United States Patent Application Publication US 2006/0003322 A1 - sequence listing, part 21

SEQ ID NO: 878689 - RNA, 19 nt, Human
uuccuggguggcuuccuuu

SEQ ID NO: 878690 - RNA, 23 nt, Human
uuccuggguggcuuccuuugugu

SEQ ID NO: 878691 - RNA, 28 nt, Human
uuccuggguggcuuccuuuguguuccuc

SEQ ID NO: 878692 - RNA, 23 nt, Human
uuccugguuggucugcugcuggg

SEQ ID NO: 878693 - RNA, 26 nt, Human
uuccugguuggucugcugcugggugg

SEQ ID NO: 878694 - RNA, 24 nt, Human
uuccuuccuggguggcuuccuuug

SEQ ID NO: 878695 - RNA, 18 nt, Human
uucuguggccacagaagg

SEQ ID NO: 878696 - RNA, 19 nt, Human
uugagaagcaggaaauggu

SEQ ID NO: 878697 - RNA, 24 nt, Human
uuggagguggggacugcuugaggc

SEQ ID NO: 878698 - RNA, 24 nt, Human
uuuccagugggccugggacuacag

SEQ ID NO: 878699 - RNA, 23 nt, Human
uuuggaaagucuccauccaguuc

SEQ ID NO: 878700 - RNA, 25 nt, Human
aaaaagaaauaaaguggucagccug

SEQ ID NO: 878701 - RNA, 27 nt, Human
aaacauccugucauaaaaagacaagga

SEQ ID NO: 878702 - RNA, 22 nt, Human
aacauggaguagccaggaaaga

SEQ ID NO: 878703 - RNA, 18 nt, Human
aagaaacagggaaauaua

SEQ ID NO: 878704 - RNA, 22 nt, Human
aagaacaaagacaaucauagcc

SEQ ID NO: 878705 - RNA, 18 nt, Human
aaggaacuagggaguuuc

SEQ ID NO: 878706 - RNA, 23 nt, Human
aagguaagugggucacagacucu

SEQ ID NO: 878707 - RNA, 19 nt, Human
acaaagacaaucauagccu

SEQ ID NO: 878708 - RNA, 21 nt, Human
acaauacaaacucugaaacaa

SEQ ID NO: 878709 - RNA, 19 nt, Human
acaauauguagucuuuggu

SEQ ID NO: 878710 - RNA, 20 nt, Human
accaagugaaacaggaguuu

SEQ ID NO: 878711 - RNA, 22 nt, Human
accagaggcuagccaacaugga

SEQ ID NO: 878712 - RNA, 18 nt, Human
agaacaaagacaaucaua

SEQ ID NO: 878713 - RNA, 22 nt, Human
agaagaacaaagacaaucauag

SEQ ID NO: 878714 - RNA, 20 nt, Human
agacaaccucuccuacacaa

SEQ ID NO: 878715 - RNA, 26 nt, Human
agacaaccucuccuacacaauucacu

SEQ ID NO: 878716 - RNA, 20 nt, Human
agaggcuagccaacauggag

SEQ ID NO: 878717 - RNA, 18 nt, Human
agauaauaaguaagaggu

SEQ ID NO: 878718 - RNA, 21 nt, Human
agcaaaggggaacaaaaagaa

SEQ ID NO: 878719 - RNA, 27 nt, Human
agccuuuguauuauaugccauccuccu

SEQ ID NO: 878720 - RNA, 26 nt, Human
agcugagcaaacauccugucauaaaa

SEQ ID NO: 878721 - RNA, 18 nt, Human
agcuggacugagugagga

SEQ ID NO: 878722 - RNA, 21 nt, Human
aggcaggacuugaacuaagcu

SEQ ID NO: 878723 - RNA, 21 nt, Human
aggcucugaaagccacacacu

SEQ ID NO: 878724 - RNA, 20 nt, Human
aggcugcaguacguggaagc

SEQ ID NO: 878725 - RNA, 20 nt, Human
auaccauucuauuuuaacaa

SEQ ID NO: 878726 - RNA, 20 nt, Human
auggccuuaagcaugaugaa

SEQ ID NO: 878727 - RNA, 24 nt, Human
caaacugcuuggcucaccagcaug

SEQ ID NO: 878728 - RNA, 24 nt, Human
caaccucuccuacacaauucacug

SEQ ID NO: 878729 - RNA, 21 nt, Human
caaggagcugacaaucugguu

SEQ ID NO: 878730 - RNA, 18 nt, Human
caauacaaacucugaaac

SEQ ID NO: 878731 - RNA, 23 nt, Human
caaucagcaugaaucucucagac

SEQ ID NO: 878732 - RNA, 23 nt, Human
cacaauacaaacucugaaacaag

SEQ ID NO: 878733 - RNA, 22 nt, Human
cacauggcuuccaaagccagaa

SEQ ID NO: 878734 - RNA, 19 nt, Human
cacugcauugugguaggau

SEQ ID NO: 878735 - RNA, 19 nt, Human
cagcagugugagcagugau

SEQ ID NO: 878736 - RNA, 22 nt, Human
caggaaagagccagcaccugcu

SEQ ID NO: 878737 - RNA, 21 nt, Human
ccaaagccagaaaggaggcuc

SEQ ID NO: 878738 - RNA, 22 nt, Human
ccacacacuggugaucuccagu

SEQ ID NO: 878739 - RNA, 21 nt, Human
ccacagacaaccucuccuaca

SEQ ID NO: 878740 - RNA, 19 nt, Human
ccaggaaagagccagcacc

SEQ ID NO: 878741 - RNA, 20 nt, Human
ccccuggaaggagguuucca

SEQ ID NO: 878742 - RNA, 25 nt, Human
ccuuuguauuauaugccauccuccu

SEQ ID NO: 878743 - RNA, 21 nt, Human
cuaacugggcaccaaucaugc

SEQ ID NO: 878744 - RNA, 23 nt, Human
cuagccaacauggaguagccagg

SEQ ID NO: 878745 - RNA, 19 nt, Human
cuagucaaauuaauaagcc

SEQ ID NO: 878746 - RNA, 26 nt, Human
cucaaggagcugacaaucugguugga

SEQ ID NO: 878747 - RNA, 18 nt, Human
cugcaguacguggaagcc

SEQ ID NO: 878748 - RNA, 20 nt, Human
cuguaggcugauucaaauac

SEQ ID NO: 878749 - RNA, 18 nt, Human
cuuccaggcagcuguugu

SEQ ID NO: 878750 - RNA, 18 nt, Human
cuuggugagguccagcuc

SEQ ID NO: 878751 - RNA, 20 nt, Human
gagagaagaaaggcacugca

SEQ ID NO: 878752 - RNA, 23 nt, Human
gagccagcaccugcucugagaca

SEQ ID NO: 878753 - RNA, 21 nt, Human
gcaaaggggaacaaaaagaaa

SEQ ID NO: 878754 - RNA, 18 nt, Human
gcaguacguggaagccua

SEQ ID NO: 878755 - RNA, 22 nt, Human
gccaacauggaguagccaggaa

SEQ ID NO: 878756 - RNA, 20 nt, Human
ggaauuuuuguaugguuggg

SEQ ID NO: 878757 - RNA, 26 nt, Human
gguguuggggacaagaugagaaagga

SEQ ID NO: 878758 - RNA, 20 nt, Human
gguugggaaaagguugguca

SEQ ID NO: 878759 - RNA, 21 nt, Human
guguaugcauguauguauaua

SEQ ID NO: 878760 - RNA, 22 nt, Human
guugcaucaucccuggucccug

SEQ ID NO: 878761 - RNA, 24 nt, Human
uaagacguucgggugggaucucca

SEQ ID NO: 878762 - RNA, 18 nt, Human
uaagagguuaccagaggc

SEQ ID NO: 878763 - RNA, 27 nt, Human
uaagagguuaccagaggcuagccaaca

SEQ ID NO: 878764 - RNA, 21 nt, Human
uaaguaagagguuaccagagg

SEQ ID NO: 878765 - RNA, 19 nt, Human
uaccugugagaugcaaggu

SEQ ID NO: 878766 - RNA, 22 nt, Human
uagaauggaguuccaagucacu

SEQ ID NO: 878767 - RNA, 21 nt, Human
uagccaacauggaguagccag

SEQ ID NO: 878768 - RNA, 23 nt, Human
uagccaggaaagagccagcaccu

SEQ ID NO: 878769 - RNA, 25 nt, Human
uaggauaaacacccaagaauuaguu

SEQ ID NO: 878770 - RNA, 24 nt, Human
uaugauaaaugauuauaacgugug

SEQ ID NO: 878771 - RNA, 18 nt, Human
uaugcauguauguauaua

SEQ ID NO: 878772 - RNA, 21 nt, Human
uauguauauauaugauaaaug

SEQ ID NO: 878773 - RNA, 19 nt, Human
uauuucaaauuacaaggua

SEQ ID NO: 878774 - RNA, 22 nt, Human
ucaugauuagauaagacguucg

SEQ ID NO: 878775 - RNA, 21 nt, Human
uccaaagccagaaaggaggcu

SEQ ID NO: 878776 - RNA, 19 nt, Human
uccaccggacagcacucua

SEQ ID NO: 878777 - RNA, 21 nt, Human
uccaccggacagcacucuaaa

SEQ ID NO: 878778 - RNA, 20 nt, Human
ugaaagccacacacugguga

SEQ ID NO: 878779 - RNA, 22 nt, Human
ugaagcaaaggggaacaaaaag

SEQ ID NO: 878780 - RNA, 21 nt, Human
ugacaauauguagucuuuggu

SEQ ID NO: 878781 - RNA, 21 nt, Human
ugagaaaggaguugacucaga

SEQ ID NO: 878782 - RNA, 21 nt, Human
ugagcaaacauccugucauaa

SEQ ID NO: 878783 - RNA, 22 nt, Human
ugagcaaacauccugucauaaa

SEQ ID NO: 878784 - RNA, 22 nt, Human
ugaggaugaauugggagaagaa

SEQ ID NO: 878785 - RNA, 19 nt, Human
ugcauguauguauauauau

SEQ ID NO: 878786 - RNA, 21 nt, Human
ugccuaaaaugaguuucgaua

SEQ ID NO: 878787 - RNA, 24 nt, Human
ugcuaaaaucauggccuuaagcau

SEQ ID NO: 878788 - RNA, 21 nt, Human
uggaagaaacagggaaauaua

SEQ ID NO: 878789 - RNA, 20 nt, Human
uggagaagagcugacuugaa

SEQ ID NO: 878790 - RNA, 20 nt, Human
uggagagaagaaaggcacug

SEQ ID NO: 878791 - RNA, 23 nt, Human
uggaguagccaggaaagagccag

SEQ ID NO: 878792 - RNA, 19 nt, Human
ugggagaagaaagcacuuc

SEQ ID NO: 878793 - RNA, 18 nt, Human
uguaugcauguauguaua

SEQ ID NO: 878794 - RNA, 19 nt, Human
uguaugcauguauguauau

SEQ ID NO: 878795 - RNA, 24 nt, Human
uguaugcauguauguauauauaug

SEQ ID NO: 878796 - RNA, 26 nt, Human
uguccugaagauaauaaguaagaggu

SEQ ID NO: 878797 - RNA, 24 nt, Human
uguggcucuugcccucaaggagcu

SEQ ID NO: 878798 - RNA, 18 nt, Human
uguugugagugggaugug

SEQ ID NO: 878799 - RNA, 24 nt, Human
uuaauaagccuuuguauuauaugc

SEQ ID NO: 878800 - RNA, 22 nt, Human
uuauuugcuuugagaguguaug

SEQ ID NO: 878801 - RNA, 20 nt, Human
uucacugaaccuccccugga

SEQ ID NO: 878802 - RNA, 25 nt, Human
uugaaugaagcaaaggggaacaaaa

SEQ ID NO: 878803 - RNA, 22 nt, Human
uuggggacaagaugagaaagga

SEQ ID NO: 878804 - RNA, 24 nt, Human
uugugagugggaugugguugggug

SEQ ID NO: 878805 - RNA, 23 nt, Human
aaaaaaaaaaagcaaaaccacaa

SEQ ID NO: 878806 - RNA, 22 nt, Human
aaaaccacaacacacaucccca

SEQ ID NO: 878807 - RNA, 20 nt, Human
aaaaggccuaaaagccagaa

SEQ ID NO: 878808 - RNA, 22 nt, Human
aaaccacaacacacauccccaa

SEQ ID NO: 878809 - RNA, 21 nt, Human
aaagcuuccccauccuccccu

SEQ ID NO: 878810 - RNA, 20 nt, Human
aaccagcaacacaaggccag

SEQ ID NO: 878811 - RNA, 27 nt, Human
aagcaaaaccacaacacacauccccaa

SEQ ID NO: 878812 - RNA, 18 nt, Human
aagcaaacaauccccagg

SEQ ID NO: 878813 - RNA, 21 nt, Human
aagcaaacaauccccaggaaa

SEQ ID NO: 878814 - RNA, 22 nt, Human
aagcagccacagcugugagagu

SEQ ID NO: 878815 - RNA, 18 nt, Human
aagcagguacacccaugg

SEQ ID NO: 878816 - RNA, 21 nt, Human
acacauccccaaacaauaacc

SEQ ID NO: 878817 - RNA, 28 nt, Human
acacauccccaaacaauaacucucaauc

SEQ ID NO: 878818 - RNA, 18 nt, Human
accacaacacacaucccc

SEQ ID NO: 878819 - RNA, 22 nt, Human
acuguaagggaaaauuagucac

SEQ ID NO: 878820 - RNA, 21 nt, Human
acuuuaaaaucaaccaguagc

SEQ ID NO: 878821 - RNA, 21 nt, Human
agaaaucuucaaacuuacuaa

SEQ ID NO: 878822 - RNA, 27 nt, Human
agaaaucuucaaacuuacuaaacaaaa

SEQ ID NO: 878823 - RNA, 27 nt, Human
agcuuccccauccuccccuccccacca

SEQ ID NO: 878824 - RNA, 23 nt, Human
caaaaccacaacacacaucccca

SEQ ID NO: 878825 - RNA, 20 nt, Human
caaacaauaacucucaauca

SEQ ID NO: 878826 - RNA, 24 nt, Human
caaacaauccccaggaaauacuga

SEQ ID NO: 878827 - RNA, 27 nt, Human
caacacuaacaaagucaggguuucuca

SEQ ID NO: 878828 - RNA, 21 nt, Human
caagacgcaacaugaaaccug

SEQ ID NO: 878829 - RNA, 24 nt, Human
caaguaaccugcucucccucccuc

SEQ ID NO: 878830 - RNA, 21 nt, Human
cacaacacacauccccaaaca

SEQ ID NO: 878831 - RNA, 18 nt, Human
cacuaacaaagucagggu

SEQ ID NO: 878832 - RNA, 18 nt, Human
cagaaagaugcugaugug

SEQ ID NO: 878833 - RNA, 19 nt, Human
cagcauaacagcaucucac

SEQ ID NO: 878834 - RNA, 24 nt, Human
cagcauaacagcaucucacaacug

SEQ ID NO: 878835 - RNA, 21 nt, Human
cagccacagcugugagaguuu

SEQ ID NO: 878836 - RNA, 21 nt, Human
caggaaauacugaauaggaac

SEQ ID NO: 878837 - RNA, 23 nt, Human
caggaaauacugaauaggaacca

SEQ ID NO: 878838 - RNA, 18 nt, Human
caggcgccucuugcuggc

SEQ ID NO: 878839 - RNA, 19 nt, Human
caucucacaacugcucuaa

SEQ ID NO: 878840 - RNA, 19 nt, Human
ccaacacuaacaaagucag

SEQ ID NO: 878841 - RNA, 23 nt, Human
ccagaaaucuucaaacuuacuaa

SEQ ID NO: 878842 - RNA, 28 nt, Human
ccccgcggcgcccucccgcgcauguccg

SEQ ID NO: 878843 - RNA, 20 nt, Human
ccccuccccaccaucacauc

SEQ ID NO: 878844 - RNA, 26 nt, Human
cccgcacuacgaugagcuacuucagg

SEQ ID NO: 878845 - RNA, 21 nt, Human
ccuccauggaaaagauugccu

SEQ ID NO: 878846 - RNA, 22 nt, Human
ccugcaaaaauaaauggaacaa

SEQ ID NO: 878847 - RNA, 18 nt, Human
ccugcucucccucccuca

SEQ ID NO: 878848 - RNA, 21 nt, Human
cgcgcaggcgccucuugcugg

SEQ ID NO: 878849 - RNA, 22 nt, Human
cggcggcugccccgcggcgccc

SEQ ID NO: 878850 - RNA, 22 nt, Human
cuauguaaccucugcuggggcc

SEQ ID NO: 878851 - RNA, 20 nt, Human
cucugcugaaccaugacccc

SEQ ID NO: 878852 - RNA, 23 nt, Human
cuggcaccuagaauacuuuucca

SEQ ID NO: 878853 - RNA, 22 nt, Human
cuuccccauccuccccucccca

SEQ ID NO: 878854 - RNA, 23 nt, Human
cuuucauucccccggaggagcgg

SEQ ID NO: 878855 - RNA, 18 nt, Human
gaaguguuuuacuuaaaa

SEQ ID NO: 878856 - RNA, 18 nt, Human
ggcccaggcacuuuaaaa

SEQ ID NO: 878857 - RNA, 18 nt, Human
guaccccacugcuucuaa

SEQ ID NO: 878858 - RNA, 28 nt, Human
gucuaaaaaaaaaaaagcaaaaccacaa

SEQ ID NO: 878859 - RNA, 22 nt, Human
gugagcaccuucucuucugugc

SEQ ID NO: 878860 - RNA, 18 nt, Human
uaaaaagcuuccccaucc

SEQ ID NO: 878861 - RNA, 22 nt, Human
uaaaacugacauccuaacacug

SEQ ID NO: 878862 - RNA, 21 nt, Human
uaaaauauaauaagcuuuaaa

SEQ ID NO: 878863 - RNA, 20 nt, Human
uaaaaucaaccaguagcuuu

SEQ ID NO: 878864 - RNA, 22 nt, Human
uaaacagcuuguuuaacuguua

SEQ ID NO: 878865 - RNA, 22 nt, Human
uaaacuguaaacagcuuguuua

SEQ ID NO: 878866 - RNA, 25 nt, Human
uaacaaagucaggguuucucagcau

SEQ ID NO: 878867 - RNA, 25 nt, Human
uaacagcaucucacaacugcucuaa

SEQ ID NO: 878868 - RNA, 21 nt, Human
uaacguaccccacugcuucua

SEQ ID NO: 878869 - RNA, 26 nt, Human
uaacuuuauuaaaaugaaaagacaau

SEQ ID NO: 878870 - RNA, 22 nt, Human
uaagagaacauugcaguaaugu

SEQ ID NO: 878871 - RNA, 19 nt, Human
uaagggauuuuucucugca

SEQ ID NO: 878872 - RNA, 22 nt, Human
uagcucaaauaauauucagcag

SEQ ID NO: 878873 - RNA, 25 nt, Human
uagugagcaccuucucuucugugcu

SEQ ID NO: 878874 - RNA, 18 nt, Human
uauaccacaaguuuauau

SEQ ID NO: 878875 - RNA, 19 nt, Human
uauguaauguaugcauaua

SEQ ID NO: 878876 - RNA, 21 nt, Human
ucagcgccgcgggcucagggg

SEQ ID NO: 878877 - RNA, 20 nt, Human
uccacaugaagacagagagu

SEQ ID NO: 878878 - RNA, 19 nt, Human
uccccauccuccccucccc

SEQ ID NO: 878879 - RNA, 19 nt, Human
ucccgcgcauguccguccc

SEQ ID NO: 878880 - RNA, 19 nt, Human
ucccucaacaagacgcaac

SEQ ID NO: 878881 - RNA, 20 nt, Human
ucuaaaaaaaaaaaagcaaa

SEQ ID NO: 878882 - RNA, 24 nt, Human
ucuaaaaaaaaaaaagcaaaacca

SEQ ID NO: 878883 - RNA, 22 nt, Human
ucucacaacugcucuaaaccuu

SEQ ID NO: 878884 - RNA, 19 nt, Human
ucuccaaaccugugaggcc

SEQ ID NO: 878885 - RNA, 22 nt, Human
ucuccaaaccugugaggcccag

SEQ ID NO: 878886 - RNA, 20 nt, Human
ucugcugaaccaugacccca

SEQ ID NO: 878887 - RNA, 21 nt, Human
ucugcugaaccaugaccccaa

SEQ ID NO: 878888 - RNA, 23 nt, Human
ucuucaaacuuacuaaacaaaaa

SEQ ID NO: 878889 - RNA, 20 nt, Human
ugaagcagccacagcuguga

SEQ ID NO: 878890 - RNA, 19 nt, Human
ugaauaggaaccagcaaca

SEQ ID NO: 878891 - RNA, 22 nt, Human
ugccugcaaaaauaaauggaac

SEQ ID NO: 878892 - RNA, 20 nt, Human
ugcuggcucgcgcucccgcu

SEQ ID NO: 878893 - RNA, 25 nt, Human
ugcuggcucgcgcucccgcuagcac

SEQ ID NO: 878894 - RNA, 23 nt, Human
ugguaugauuuuuaaccuaagca

SEQ ID NO: 878895 - RNA, 23 nt, Human
uguaaccucugcugaaccaugac

SEQ ID NO: 878896 - RNA, 26 nt, Human
uuaguucauacuaaaauauaauaagc

SEQ ID NO: 878897 - RNA, 28 nt, Human
uuaguucauacuaaaauauaauaagcuu

SEQ ID NO: 878898 - RNA, 19 nt, Human
uucaagauaaauacaugga

SEQ ID NO: 878899 - RNA, 19 nt, Human
uuucauucccccggaggag

SEQ ID NO: 878900 - RNA, 25 nt, Human
uuuucagucuaucaggacucauuuc

SEQ ID NO: 878901 - RNA, 19 nt, Human
uuuuuuuuuuuuuuuuuaa

SEQ ID NO: 878902 - RNA, 22 nt, Human
aaaucaugaucauaaugaaguc

SEQ ID NO: 878903 - RNA, 20 nt, Human
aacagacuagaacauggcca

SEQ ID NO: 878904 - RNA, 24 nt, Human
aagcgcugccuguggccggagcgg

SEQ ID NO: 878905 - RNA, 23 nt, Human
aaugcaaagaguugcauauuuua

SEQ ID NO: 878906 - RNA, 21 nt, Human
acaaaaacaaaucaagcacga

SEQ ID NO: 878907 - RNA, 19 nt, Human
acagcgcaacagacuagaa

SEQ ID NO: 878908 - RNA, 21 nt, Human
agacagugauuaugcugguga

SEQ ID NO: 878909 - RNA, 21 nt, Human
agcgcugccuguggccggagc

SEQ ID NO: 878910 - RNA, 24 nt, Human
aguaguuuuuaaaaaacuguacaa

SEQ ID NO: 878911 - RNA, 23 nt, Human
agugaugguuuguuccugauuug

SEQ ID NO: 878912 - RNA, 21 nt, Human
auaucaaauuaaacauacauu

SEQ ID NO: 878913 - RNA, 24 nt, Human
aucauaaugaagucauucuuaauu

SEQ ID NO: 878914 - RNA, 20 nt, Human
augccugauuuauuuggggg

SEQ ID NO: 878915 - RNA, 23 nt, Human
auuaguuacacaaaaugcauacu

SEQ ID NO: 878916 - RNA, 22 nt, Human
caauacugguaauccaccucuc

SEQ ID NO: 878917 - RNA, 24 nt, Human
caaugacauuacuaaauaucaggc

SEQ ID NO: 878918 - RNA, 19 nt, Human
caccucucccucgcacccu

SEQ ID NO: 878919 - RNA, 23 nt, Human
caccucucccucgcacccuuuug

SEQ ID NO: 878920 - RNA, 19 nt, Human
cagacagugauuaugcugg

SEQ ID NO: 878921 - RNA, 18 nt, Human
caugccugauuuauuugg

SEQ ID NO: 878922 - RNA, 26 nt, Human
cauggcccuaaggaaugugugacaaa

SEQ ID NO: 878923 - RNA, 22 nt, Human
ccccgcgcuccacccucucccc

SEQ ID NO: 878924 - RNA, 20 nt, Human
ccccucgccuggcuccccgc

SEQ ID NO: 878925 - RNA, 20 nt, Human
ccgcccccucuguccgagcc

SEQ ID NO: 878926 - RNA, 21 nt, Human
ccuaaggaaugugugacaaau

SEQ ID NO: 878927 - RNA, 18 nt, Human
ccuccugcaugccugauu

SEQ ID NO: 878928 - RNA, 22 nt, Human
cgcaacagacuagaacauggcc

SEQ ID NO: 878929 - RNA, 22 nt, Human
cgcuccuagcgcuccgggcccg

SEQ ID NO: 878930 - RNA, 19 nt, Human
cggcuggcgaagcgcugcc

SEQ ID NO: 878931 - RNA, 18 nt, Human
cuccuagcgcuccgggcc

SEQ ID NO: 878932 - RNA, 19 nt, Human
cucgcggggcggcgguguc

SEQ ID NO: 878933 - RNA, 18 nt, Human
cucuccccgcccccucug

SEQ ID NO: 878934 - RNA, 21 nt, Human
cuggcuccccgcgcuccaccc

SEQ ID NO: 878935 - RNA, 21 nt, Human
gaaguaggauauuuuaaaaca

SEQ ID NO: 878936 - RNA, 19 nt, Human
gacaaaaacaaaucaagca

SEQ ID NO: 878937 - RNA, 22 nt, Human
gcgcugccuguggccggagcgg

SEQ ID NO: 878938 - RNA, 21 nt, Human
gcuacauuuaagccaucugcu

SEQ ID NO: 878939 - RNA, 18 nt, Human
ggauagcuuuaaaauaga

SEQ ID NO: 878940 - RNA, 23 nt, Human
ggccggagcggcuaauggagucc

SEQ ID NO: 878941 - RNA, 20 nt, Human
ggcggcgguguccgcguccg

SEQ ID NO: 878942 - RNA, 21 nt, Human
ggcugggcugggcgcgcuggc

SEQ ID NO: 878943 - RNA, 22 nt, Human
gggcccgggacucgcgcggcaa

SEQ ID NO: 878944 - RNA, 20 nt, Human
uaaaaacacgagacaauaua

SEQ ID NO: 878945 - RNA, 21 nt, Human
uaaaaauaaaaacacgagaca

SEQ ID NO: 878946 - RNA, 26 nt, Human
uaaaaugcauuuauacagucuuugaa

SEQ ID NO: 878947 - RNA, 23 nt, Human
uacaauaugguguaaaaauaaaa

SEQ ID NO: 878948 - RNA, 22 nt, Human
uauucaaggacaaaaacaaauc

SEQ ID NO: 878949 - RNA, 26 nt, Human
uccccgcgcuccacccucuccccgcc

SEQ ID NO: 878950 - RNA, 24 nt, Human
ucgcggccccucgccuggcucccc

SEQ ID NO: 878951 - RNA, 22 nt, Human
ucgucgcggccccucgccuggc

SEQ ID NO: 878952 - RNA, 18 nt, Human
ugccuguggccggagcga

SEQ ID NO: 878953 - RNA, 19 nt, Human
uggccaguccaggcauuag

SEQ ID NO: 878954 - RNA, 24 nt, Human
uggccguggaguuucauuaaacaa

SEQ ID NO: 878955 - RNA, 21 nt, Human
uggcugggcugggcgcgcugg

SEQ ID NO: 878956 - RNA, 18 nt, Human
ugggcugggcgcgcuggc

SEQ ID NO: 878957 - RNA, 18 nt, Human
uggucugguaaggcaaag

SEQ ID NO: 878958 - RNA, 20 nt, Human
uguccgagccuggcugggcu

SEQ ID NO: 878959 - RNA, 23 nt, Human
uucaaggucaaacacaaugacau

SEQ ID NO: 878960 - RNA, 18 nt, Human
uucauuaaacaguauucc

SEQ ID NO: 878961 - RNA, 20 nt, Human
uucauuaaacaguauuccua

SEQ ID NO: 878962 - RNA, 24 nt, Human
uuccucggcuggcgaagcgcugcc

SEQ ID NO: 878963 - RNA, 23 nt, Human
uuuauuuaaaauaaaaugcauuu

SEQ ID NO: 878964 - RNA, 23 nt, Human
uuugaaccauggauuauugaaca

SEQ ID NO: 878965 - RNA, 21 nt, Human
uuuguuccugauuugcccacu

SEQ ID NO: 878966 - RNA, 19 nt, Human
aaaagaaagcacauuuaaa

SEQ ID NO: 878967 - RNA, 21 nt, Human
aagaugaccuuuuuaaaccaa

SEQ ID NO: 878968 - RNA, 24 nt, Human
aauggucagaacagcacuagugcc

SEQ ID NO: 878969 - RNA, 25 nt, Human
accacacacaggacagccccaacac

SEQ ID NO: 878970 - RNA, 22 nt, Human
acccgguccuggagggggugcu

SEQ ID NO: 878971 - RNA, 20 nt, Human
agcaagagacccauagaacu

SEQ ID NO: 878972 - RNA, 22 nt, Human
agccaauacaacuccaaccuua

SEQ ID NO: 878973 - RNA, 19 nt, Human
agcgaaaagggcugaagag

SEQ ID NO: 878974 - RNA, 18 nt, Human
agguggagcugcaggaag

SEQ ID NO: 878975 - RNA, 27 nt, Human
agguggagcugcaggaagcuucgggga

SEQ ID NO: 878976 - RNA, 21 nt, Human
aguagcugaggagcccacagc

SEQ ID NO: 878977 - RNA, 19 nt, Human
auucuuccuaaguaaaccc

SEQ ID NO: 878978 - RNA, 23 nt, Human
auugaagaauucaggugaagaug

SEQ ID NO: 878979 - RNA, 20 nt, Human
auuuacagucagaugaaugu

SEQ ID NO: 878980 - RNA, 23 nt, Human
caagaauaaaaauccuuaccccc

SEQ ID NO: 878981 - RNA, 21 nt, Human
caagagacccauagaacucau

SEQ ID NO: 878982 - RNA, 20 nt, Human
caauacaacuccaaccuuac

SEQ ID NO: 878983 - RNA, 21 nt, Human
caccacacacaggacagcccc

SEQ ID NO: 878984 - RNA, 18 nt, Human
caccucaagcccuaacau

SEQ ID NO: 878985 - RNA, 21 nt, Human
caccucaagcccuaacaugcc

SEQ ID NO: 878986 - RNA, 22 nt, Human
caccucaagcccuaacaugccu

SEQ ID NO: 878987 - RNA, 19 nt, Human
caggauggggcggggggca

SEQ ID NO: 878988 - RNA, 25 nt, Human
cauuuucguuugucaucucugggag

SEQ ID NO: 878989 - RNA, 23 nt, Human
ccaagccacgugugcccugcaua

SEQ ID NO: 878990 - RNA, 24 nt, Human
ccaccacacacaggacagccccaa

SEQ ID NO: 878991 - RNA, 22 nt, Human
ccacucuugaacucugaaagcc

SEQ ID NO: 878992 - RNA, 25 nt, Human
ccagacagcugcuggagguucaaau

SEQ ID NO: 878993 - RNA, 21 nt, Human
ccagagcaagcccucgcccgu

SEQ ID NO: 878994 - RNA, 18 nt, Human
ccagaguguuccacaaau

SEQ ID NO: 878995 - RNA, 23 nt, Human
ccagccaauacaacuccaaccuu

SEQ ID NO: 878996 - RNA, 18 nt, Human
cccaccacacacaggaca

SEQ ID NO: 878997 - RNA, 21 nt, Human
cccaccacacacaggacagcc

SEQ ID NO: 878998 - RNA, 20 nt, Human
ccccaccucaagcccuaacc

SEQ ID NO: 878999 - RNA, 19 nt, Human
cccccuagcaagagaccca

SEQ ID NO: 879000 - RNA, 25 nt, Human
cuguguacauauuucgaagauuccc

SEQ ID NO: 879001 - RNA, 22 nt, Human
gaaaagggcugaagagaccuca

SEQ ID NO: 879002 - RNA, 18 nt, Human
gaccuuuuuaaaccaagc

SEQ ID NO: 879003 - RNA, 26 nt, Human
gagaaacccgguccuggagggggugc

SEQ ID NO: 879004 - RNA, 22 nt, Human
gagcccacagcuaaguucucuc

SEQ ID NO: 879005 - RNA, 18 nt, Human
gcagagcagccucagucu

SEQ ID NO: 879006 - RNA, 23 nt, Human
gcagagcagccucagucuuaaaa

SEQ ID NO: 879007 - RNA, 24 nt, Human
gccaauacaacuccaaccuuacau

SEQ ID NO: 879008 - RNA, 23 nt, Human
gcggggggcaaaaaaagaguggg

SEQ ID NO: 879009 - RNA, 21 nt, Human
gcugcuggagguucaaauucc

SEQ ID NO: 879010 - RNA, 25 nt, Human
ggacauuuggcaaugucuagagaca

SEQ ID NO: 879011 - RNA, 22 nt, Human
ggagcugcaggaagcuucgggg

SEQ ID NO: 879012 - RNA, 21 nt, Human
ggugaccacuagcgaaaaggg

SEQ ID NO: 879013 - RNA, 23 nt, Human
gguuuuguggugaucaggguagg

SEQ ID NO: 879014 - RNA, 18 nt, Human
guagcugaggagcccaca

SEQ ID NO: 879015 - RNA, 22 nt, Human
gucuagagacauuuucguuugu

SEQ ID NO: 879016 - RNA, 21 nt, Human
uaaaaauccuuacccccuagc

SEQ ID NO: 879017 - RNA, 21 nt, Human
uaaaccaagccacgugugccc

SEQ ID NO: 879018 - RNA, 19 nt, Human
uaaaucuaagaugaccuuu

SEQ ID NO: 879019 - RNA, 24 nt, Human
uacaacuccaaccuuacauccuuc

SEQ ID NO: 879020 - RNA, 20 nt, Human
uagcccaagguuauagacag

SEQ ID NO: 879021 - RNA, 20 nt, Human
uauuuugguuuauuacccug

SEQ ID NO: 879022 - RNA, 24 nt, Human
ucaagcuucuuuuuccuacuuuuu

SEQ ID NO: 879023 - RNA, 21 nt, Human
ucaggugaagaugccaccacu

SEQ ID NO: 879024 - RNA, 24 nt, Human
ucagugauauuuaggacacucucu

SEQ ID NO: 879025 - RNA, 18 nt, Human
uccacaaauguccagaca

SEQ ID NO: 879026 - RNA, 20 nt, Human
ucuagccagaguuacuugca

SEQ ID NO: 879027 - RNA, 22 nt, Human
ugaaugccccaccucaagcccu

SEQ ID NO: 879028 - RNA, 19 nt, Human
ugaaugugaaugccccacc

SEQ ID NO: 879029 - RNA, 20 nt, Human
ugacggucaaagccugugcu

SEQ ID NO: 879030 - RNA, 19 nt, Human
ugagaguacgggcgagcac

SEQ ID NO: 879031 - RNA, 22 nt, Human
ugagcagaaguccccaauuauc

SEQ ID NO: 879032 - RNA, 19 nt, Human
ugccaaggcugagaaaccc

SEQ ID NO: 879033 - RNA, 21 nt, Human
ugccaccacucuugaacucug

SEQ ID NO: 879034 - RNA, 19 nt, Human
ugccacuggcaucuagugg

SEQ ID NO: 879035 - RNA, 20 nt, Human
uggcauugaagaauucaggu

SEQ ID NO: 879036 - RNA, 19 nt, Human
ugggagggggugccacugg

SEQ ID NO: 879037 - RNA, 20 nt, Human
ugggagggggugccacugga

SEQ ID NO: 879038 - RNA, 21 nt, Human
ugggagggggugccacuggca

SEQ ID NO: 879039 - RNA, 18 nt, Human
ugguggugggugaccacu

SEQ ID NO: 879040 - RNA, 20 nt, Human
uguccagacagcugcuggag

SEQ ID NO: 879041 - RNA, 19 nt, Human
uguucucucuagccagagu

SEQ ID NO: 879042 - RNA, 19 nt, Human
uuagggcugggaucagcca

SEQ ID NO: 879043 - RNA, 23 nt, Human
uucaaauuccagccaauacaacu

SEQ ID NO: 879044 - RNA, 20 nt, Human
uucacaggggacauuuggca

SEQ ID NO: 879045 - RNA, 19 nt, Human
uucaugugauuuuucucug

SEQ ID NO: 879046 - RNA, 18 nt, Human
uuuuuuuuuuuuuuuuug

SEQ ID NO: 879047 - RNA, 19 nt, Human
acagugcaccggagcccac

SEQ ID NO: 879048 - RNA, 18 nt, Human
aucuggaaggagguaaga

SEQ ID NO: 879049 - RNA, 19 nt, Human
aucuuccuuuuugcuuuua

SEQ ID NO: 879050 - RNA, 18 nt, Human
ccaguauuccaucuggaa

SEQ ID NO: 879051 - RNA, 19 nt, Human
cccacagugcaccggagcc

SEQ ID NO: 879052 - RNA, 21 nt, Human
ccgccgcccgguccugccagg

SEQ ID NO: 879053 - RNA, 19 nt, Human
ccgccgccgcccgguccug

SEQ ID NO: 879054 - RNA, 20 nt, Human
ccgccgccgcccgguccugc

SEQ ID NO: 879055 - RNA, 25 nt, Human
ccgccgccggcccgcgccgccgccg

SEQ ID NO: 879056 - RNA, 25 nt, Human
ccgccggcccgcgccgccgccgccc

SEQ ID NO: 879057 - RNA, 19 nt, Human
ccgcgccccucagccggcc

SEQ ID NO: 879058 - RNA, 20 nt, Human
cggcguccgccgcccgcugg

SEQ ID NO: 879059 - RNA, 18 nt, Human
cgggucccuggccgccgc

SEQ ID NO: 879060 - RNA, 21 nt, Human
cuggccgcccgcgccccucag

SEQ ID NO: 879061 - RNA, 18 nt, Human
gaacuuaaaagaguaaug

SEQ ID NO: 879062 - RNA, 22 nt, Human
gacuuuucaucucugaaacuuu

SEQ ID NO: 879063 - RNA, 21 nt, Human
gccggcccgcgccgccgccgc

SEQ ID NO: 879064 - RNA, 23 nt, Human
gggucccuggccgccgccggccc

SEQ ID NO: 879065 - RNA, 20 nt, Human
uaaagcucugaaaauuagcu

SEQ ID NO: 879066 - RNA, 20 nt, Human
uaacauuguaaacuguucaa

SEQ ID NO: 879067 - RNA, 18 nt, Human
uaacuagccaguauucca

SEQ ID NO: 879068 - RNA, 23 nt, Human
ucccacagugcaccggagcccac

SEQ ID NO: 879069 - RNA, 19 nt, Human
ucccuggccgccgccggcc

SEQ ID NO: 879070 - RNA, 21 nt, Human
uggccgccgccggcccgcgcc

SEQ ID NO: 879071 - RNA, 26 nt, Human
uuagcaaacuggaacuuaaaagagua

SEQ ID NO: 879072 - RNA, 20 nt, Human
uuuuuuuuguuuggaagcgc

SEQ ID NO: 879073 - RNA, 21 nt, Human
uuuuuuuuuuuuuuguuugga

SEQ ID NO: 879074 - RNA, 22 nt, Human
uuuuuuuuuuuuuuuuguuugg

SEQ ID NO: 879075 - RNA, 18 nt, Human
uuuuuuuuuuuuuuuuug

SEQ ID NO: 879076 - RNA, 22 nt, Human
uuuuuuuuuuuuuuuuuuguuu

SEQ ID NO: 879077 - RNA, 19 nt, Human
acccuuguccggggccccg

SEQ ID NO: 879078 - RNA, 19 nt, Human
cauggaaacaugccaaguc

SEQ ID NO: 879079 - RNA, 26 nt, Human
cccagccccggacucggagagggcug

SEQ ID NO: 879080 - RNA, 19 nt, Human
ccgcugccgccacagccgc

SEQ ID NO: 879081 - RNA, 20 nt, Human
ccgcugccgccacagccgcc

SEQ ID NO: 879082 - RNA, 20 nt, Human
ccgcugccgccacagccgcc

SEQ ID NO: 879083 - RNA, 24 nt, Human
ccuucucuuuggugugcgcggggc

SEQ ID NO: 879084 - RNA, 19 nt, Human
ccuuguccggggccccgcg

SEQ ID NO: 879085 - RNA, 19 nt, Human
cugccgccacagccgccuu

SEQ ID NO: 879086 - RNA, 19 nt, Human
gccgcugccgccacagccg

SEQ ID NO: 879087 - RNA, 21 nt, Human
ggcccucgaaggcugcagcuc

SEQ ID NO: 879088 - RNA, 23 nt, Human
gugcgcggggcugccgccuuguc

SEQ ID NO: 879089 - RNA, 20 nt, Human
uccacaaucuaucauuuuaa

SEQ ID NO: 879090 - RNA, 20 nt, Human
ucgcguccccgccacccccc

SEQ ID NO: 879091 - RNA, 18 nt, Human
uggugggacccagccccg

SEQ ID NO: 879092 - RNA, 19 nt, Human
aaaaccaaauaaaaaucac

SEQ ID NO: 879093 - RNA, 25 nt, Human
aaaagcaaacaaguuuaucuuaaaa

SEQ ID NO: 879094 - RNA, 21 nt, Human
aaaauauaaccucaagaggac

SEQ ID NO: 879095 - RNA, 23 nt, Human
aaacagacucaggaaacuaugca

SEQ ID NO: 879096 - RNA, 18 nt, Human
aaacagagcuccagcaua

SEQ ID NO: 879097 - RNA, 22 nt, Human
aaagugccuuuauccaggggua

SEQ ID NO: 879098 - RNA, 20 nt, Human
aaauacagcagcaggugaua

SEQ ID NO: 879099 - RNA, 26 nt, Human
aacaaacucauagagcacacauaaga

SEQ ID NO: 879100 - RNA, 18 nt, Human
aaccuaguaucucaaacu

SEQ ID NO: 879101 - RNA, 28 nt, Human
aacuacuaaauauuuuauuucuaagcaa

SEQ ID NO: 879102 - RNA, 26 nt, Human
aagaagaaaauuacaacaaacucaua

SEQ ID NO: 879103 - RNA, 27 nt, Human
aagaagaaaauuacaacaaacucauag

SEQ ID NO: 879104 - RNA, 21 nt, Human
aagcacuuuacaaacagacuc

SEQ ID NO: 879105 - RNA, 21 nt, Human
aaggugccaaaaaacuaccag

SEQ ID NO: 879106 - RNA, 20 nt, Human
aaguguguaguuucauaguu

SEQ ID NO: 879107 - RNA, 19 nt, Human
aauaaaaaucacauccgaa

SEQ ID NO: 879108 - RNA, 20 nt, Human
acauagcuuaaccagacucu

SEQ ID NO: 879109 - RNA, 20 nt, Human
agagauacauauuuugauuc

SEQ ID NO: 879110 - RNA, 18 nt, Human
agagcagcggcggcaaca

SEQ ID NO: 879111 - RNA, 24 nt, Human
aggugccaaaaaacuaccagggcu

SEQ ID NO: 879112 - RNA, 24 nt, Human
auuauagaaaaauacuugaaauaa

SEQ ID NO: 879113 - RNA, 18 nt, Human
caaagauggcacucaacu

SEQ ID NO: 879114 - RNA, 18 nt, Human
cagacucugaaaaagaga

SEQ ID NO: 879115 - RNA, 24 nt, Human
cauccauagccuauuccuaauuau

SEQ ID NO: 879116 - RNA, 23 nt, Human
caugucugcaugacuuaagguuc

SEQ ID NO: 879117 - RNA, 21 nt, Human
cccggcaauauccgagaccgc

SEQ ID NO: 879118 - RNA, 20 nt, Human
cuagaagcggcgaugggucc

SEQ ID NO: 879119 - RNA, 19 nt, Human
cucauagagcacacauaag

SEQ ID NO: 879120 - RNA, 20 nt, Human
cuggauuaaaaacaaaaaag

SEQ ID NO: 879121 - RNA, 20 nt, Human
cuguuugucugagaaauuca

SEQ ID NO: 879122 - RNA, 19 nt, Human
cuuaaaaaauaccaaguau

SEQ ID NO: 879123 - RNA, 22 nt, Human
gaaugcccucuaauagugaaac

SEQ ID NO: 879124 - RNA, 22 nt, Human
gagcagcggcggcaacagcacc

SEQ ID NO: 879125 - RNA, 21 nt, Human
gcaacagcaccagccucgugc

SEQ ID NO: 879126 - RNA, 18 nt, Human
gcagcggcggcaacagca

SEQ ID NO: 879127 - RNA, 21 nt, Human
gcggcggcaacagcaccagcc

SEQ ID NO: 879128 - RNA, 18 nt, Human
gggguggggguggcuaca

SEQ ID NO: 879129 - RNA, 22 nt, Human
gggguggggguggcuacaggga

SEQ ID NO: 879130 - RNA, 20 nt, Human
gguggggguggcuacaggga

SEQ ID NO: 879131 - RNA, 22 nt, Human
uaaaaacaaaaaaguuaguuuc

SEQ ID NO: 879132 - RNA, 22 nt, Human
uaaauccuguuugucugagaaa

SEQ ID NO: 879133 - RNA, 22 nt, Human
uaaccagacucugaaaaagaga

SEQ ID NO: 879134 - RNA, 18 nt, Human
uacaaacauauguauaug

SEQ ID NO: 879135 - RNA, 20 nt, Human
uacacaaaagcaaacaaguu

SEQ ID NO: 879136 - RNA, 24 nt, Human
uacacaaaagcaaacaaguuuauc

SEQ ID NO: 879137 - RNA, 20 nt, Human
uacauacauguuggccugga

SEQ ID NO: 879138 - RNA, 20 nt, Human
uaccugucaacaaauacaga

SEQ ID NO: 879139 - RNA, 21 nt, Human
uacuugauauuuaagcaacac

SEQ ID NO: 879140 - RNA, 21 nt, Human
uagaccccuggagugugccag

SEQ ID NO: 879141 - RNA, 21 nt, Human
uagcagacuuuagugcuguau

SEQ ID NO: 879142 - RNA, 23 nt, Human
uagggucuagaagcggcgauggg

SEQ ID NO: 879143 - RNA, 21 nt, Human
uauaauacaaacauauguaua

SEQ ID NO: 879144 - RNA, 26 nt, Human
uauaugcauucaugugcauauacaug

SEQ ID NO: 879145 - RNA, 23 nt, Human
uaucucaaacugauugcuuacug

SEQ ID NO: 879146 - RNA, 21 nt, Human
ucaaaacaaaggagagaauua

SEQ ID NO: 879147 - RNA, 23 nt, Human
uccaaaauauaaccucaagagga

SEQ ID NO: 879148 - RNA, 22 nt, Human
uccuuccucgagcucuucccaa

SEQ ID NO: 879149 - RNA, 23 nt, Human
ucucaaacugauugcuuacaauu

SEQ ID NO: 879150 - RNA, 18 nt, Human
ucugacaauaauuacuga

SEQ ID NO: 879151 - RNA, 21 nt, Human
ugacuaaaaauaaaaccagga

SEQ ID NO: 879152 - RNA, 22 nt, Human
ugacuuaagguucccuaaacac

SEQ ID NO: 879153 - RNA, 25 nt, Human
ugagaaauucacaauacauuuuaga

SEQ ID NO: 879154 - RNA, 20 nt, Human
ugaugguauacauaugaugu

SEQ ID NO: 879155 - RNA, 18 nt, Human
ugauuauagaaaaauacu

SEQ ID NO: 879156 - RNA, 20 nt, Human
ugccaaaaaacuaccagggc

SEQ ID NO: 879157 - RNA, 19 nt, Human
ugggguggggguggcuaca

SEQ ID NO: 879158 - RNA, 21 nt, Human
ugugcauauacauguacuuca

SEQ ID NO: 879159 - RNA, 18 nt, Human
uucaaaacaaaggagaga

SEQ ID NO: 879160 - RNA, 24 nt, Human
uucaugugcauauacauguacuuc

SEQ ID NO: 879161 - RNA, 21 nt, Human
aaaagaaauauaauacauuga

SEQ ID NO: 879162 - RNA, 20 nt, Human
aaaauuacacacugcuuucc

SEQ ID NO: 879163 - RNA, 20 nt, Human
aaacaagauugguggucuuu

SEQ ID NO: 879164 - RNA, 23 nt, Human
aaacuuccagcuucaaccaucug

SEQ ID NO: 879165 - RNA, 21 nt, Human
aacaguguauuuuuccucuga

SEQ ID NO: 879166 - RNA, 23 nt, Human
aaccacgcggcgcucccgcaaac

SEQ ID NO: 879167 - RNA, 23 nt, Human
aaccaucugauguugaaaucuaa

SEQ ID NO: 879168 - RNA, 18 nt, Human
aacugccuucucacucua

SEQ ID NO: 879169 - RNA, 19 nt, Human
acaaaccauguagauggac

SEQ ID NO: 879170 - RNA, 22 nt, Human
acaauucuucacugaugauacu

SEQ ID NO: 879171 - RNA, 21 nt, Human
agaaaaggcugcaguuuagua

SEQ ID NO: 879172 - RNA, 21 nt, Human
agaggccaggacaaagaggca

SEQ ID NO: 879173 - RNA, 18 nt, Human
agugaaauacaaagucca

SEQ ID NO: 879174 - RNA, 23 nt, Human
caaaagaaaacuagaggccagga

SEQ ID NO: 879175 - RNA, 19 nt, Human
caaaccauguagauggaca

SEQ ID NO: 879176 - RNA, 23 nt, Human
caccccuguauuucagccaaggg

SEQ ID NO: 879177 - RNA, 23 nt, Human
cagaaaaggcugcaguuuaguac

SEQ ID NO: 879178 - RNA, 24 nt, Human
caguguauuuuuccucugaaaauc

SEQ ID NO: 879179 - RNA, 22 nt, Human
cccuguauuucagccaagggca

SEQ ID NO: 879180 - RNA, 22 nt, Human
cccuguauuucagccaagggca

SEQ ID NO: 879181 - RNA, 22 nt, Human
cucccaaguccuacucgcaaac

SEQ ID NO: 879182 - RNA, 24 nt, Human
cucccaaguccuacucgcaaacaa

SEQ ID NO: 879183 - RNA, 22 nt, Human
cuggcgacagaaaaggcugcag

SEQ ID NO: 879184 - RNA, 18 nt, Human
cuuccagcuucaaccauc

SEQ ID NO: 879185 - RNA, 23 nt, Human
gacaaaccauguagauggacaaa

SEQ ID NO: 879186 - RNA, 27 nt, Human
gggaaaauuuauuauuuuuuuuuuccu

SEQ ID NO: 879187 - RNA, 21 nt, Human
gugaaauacaaaguccacucu

SEQ ID NO: 879188 - RNA, 23 nt, Human
uacaaaguccacucucauaaaaa

SEQ ID NO: 879189 - RNA, 18 nt, Human
uagaggccaggacaaaga

SEQ ID NO: 879190 - RNA, 23 nt, Human
uagauggacaaacaagauuggug

SEQ ID NO: 879191 - RNA, 25 nt, Human
uauuauauuuuucaaaagaaauaua

SEQ ID NO: 879192 - RNA, 21 nt, Human
uccaggcagaguaaacuaagg

SEQ ID NO: 879193 - RNA, 22 nt, Human
uccaggcagaguaaacuaagga

SEQ ID NO: 879194 - RNA, 21 nt, Human
ucccaaguccuacucgcaaac

SEQ ID NO: 879195 - RNA, 24 nt, Human
ucccaaguccuacucgcaaacaaa

SEQ ID NO: 879196 - RNA, 20 nt, Human
ugaaaucuaaagcaccucca

SEQ ID NO: 879197 - RNA, 21 nt, Human
ugacucccaaguccuacucgc

SEQ ID NO: 879198 - RNA, 27 nt, Human
uggacaaacaagauugguggucuuuaa

SEQ ID NO: 879199 - RNA, 20 nt, Human
uuauuuuuuuuuuccaauga

SEQ ID NO: 879200 - RNA, 19 nt, Human
uucaaaagaaauauaauac

SEQ ID NO: 879201 - RNA, 26 nt, Human
uuuuuuuuuuuuuuguuaaugaaggg

SEQ ID NO: 879202 - RNA, 19 nt, Human
uuuuuuuuuuuuuuuuguu

SEQ ID NO: 879203 - RNA, 22 nt, Human
aaaaagccugaauggagccaca

SEQ ID NO: 879204 - RNA, 21 nt, Human
aagggagaagacgggcaaaga

SEQ ID NO: 879205 - RNA, 22 nt, Human
aagggagaagacgggcaaagag

SEQ ID NO: 879206 - RNA, 23 nt, Human
acacagcagcagacaccgaugcu

SEQ ID NO: 879207 - RNA, 20 nt, Human
acagagaagagagggaagag

SEQ ID NO: 879208 - RNA, 19 nt, Human
agaggcugcugccugcuca

SEQ ID NO: 879209 - RNA, 20 nt, Human
agagggaagaggcacguguc

SEQ ID NO: 879210 - RNA, 25 nt, Human
aggagggugacagagaagagaggga

SEQ ID NO: 879211 - RNA, 23 nt, Human
agggagaagacgggcaaagagga

SEQ ID NO: 879212 - RNA, 22 nt, Human
agguggaaggaccgccagagga

SEQ ID NO: 879213 - RNA, 20 nt, Human
caaagacaaccccuuuggaa

SEQ ID NO: 879214 - RNA, 25 nt, Human
cacucucugggaaguucaugggcuu

SEQ ID NO: 879215 - RNA, 22 nt, Human
cagaauaauagggaacugcuga

SEQ ID NO: 879216 - RNA, 18 nt, Human
cagagaagagagggaaga

SEQ ID NO: 879217 - RNA, 22 nt, Human
cagcagacuuuagccacacagg

SEQ ID NO: 879218 - RNA, 22 nt, Human
caggggacaaugccuggccagg

SEQ ID NO: 879219 - RNA, 18 nt, Human
cagucacagcaaagaaag

SEQ ID NO: 879220 - RNA, 18 nt, Human
ccagccgccacagcuaca

SEQ ID NO: 879221 - RNA, 19 nt, Human
cccacacaagaccugggga

SEQ ID NO: 879222 - RNA, 21 nt, Human
ccccagccgccacagcuacag

SEQ ID NO: 879223 - RNA, 24 nt, Human
ccuccaggacccuagggaaauggg

SEQ ID NO: 879224 - RNA, 25 nt, Human
ccugcugcaggcaauuaugcaaagu

SEQ ID NO: 879225 - RNA, 21 nt, Human
ccuucgcuggcucccgccggg

SEQ ID NO: 879226 - RNA, 22 nt, Human
ccuuuggaaaaagcuuuuuccu

SEQ ID NO: 879227 - RNA, 23 nt, Human
cguuccacucucugggaaguuca

SEQ ID NO: 879228 - RNA, 20 nt, Human
cucaaacagggaagugaggc

SEQ ID NO: 879229 - RNA, 22 nt, Human
cuccaggacccuagggaaaugg

SEQ ID NO: 879230 - RNA, 26 nt, Human
cuccuugcccuucccugaauugaggg

SEQ ID NO: 879231 - RNA, 18 nt, Human
cuggaucccagaucugca

SEQ ID NO: 879232 - RNA, 24 nt, Human
cuuugugcguagguggcaaucuuc

SEQ ID NO: 879233 - RNA, 21 nt, Human
gaacagcaugguuaaaaacac

SEQ ID NO: 879234 - RNA, 23 nt, Human
gcgggugagcagguggagcccag

SEQ ID NO: 879235 - RNA, 19 nt, Human
ggaacagcuuaaaaucaga

SEQ ID NO: 879236 - RNA, 21 nt, Human
ggacauccggaggacagagga

SEQ ID NO: 879237 - RNA, 18 nt, Human
ggccucugacauggaaac

SEQ ID NO: 879238 - RNA, 21 nt, Human
gggaagaggcacgugucggca

SEQ ID NO: 879239 - RNA, 18 nt, Human
ggggagcggucgcccucg

SEQ ID NO: 879240 - RNA, 22 nt, Human
gggguugaugggaaccucaggg

SEQ ID NO: 879241 - RNA, 20 nt, Human
ggugacagagaagagaggga

SEQ ID NO: 879242 - RNA, 23 nt, Human
uaaguucaucacaggaacagcuu

SEQ ID NO: 879243 - RNA, 21 nt, Human
uagcagcaaucacaaacaaag

SEQ ID NO: 879244 - RNA, 22 nt, Human
ucagccaagggagaagacgggc

SEQ ID NO: 879245 - RNA, 21 nt, Human
ucccugaauugaggggauggc

SEQ ID NO: 879246 - RNA, 18 nt, Human
uccgugcugcagaccgga

SEQ ID NO: 879247 - RNA, 18 nt, Human
uccgugcugcagaccgga

SEQ ID NO: 879248 - RNA, 19 nt, Human
uccugaaugaggaaggcuc

SEQ ID NO: 879249 - RNA, 22 nt, Human
ucucugggaaguucaugggcuu

SEQ ID NO: 879250 - RNA, 23 nt, Human
ucugcaggcgggugagcaggugg

SEQ ID NO: 879251 - RNA, 21 nt, Human
ucugugccacccacacaagac

SEQ ID NO: 879252 - RNA, 23 nt, Human
ugaaaaagccugaauggagccac

SEQ ID NO: 879253 - RNA, 24 nt, Human
ugaauggagccacagagcagaggc

SEQ ID NO: 879254 - RNA, 19 nt, Human
ugagagcaggcuggauccc

SEQ ID NO: 879255 - RNA, 24 nt, Human
ugcacacgggcagcaggcacugca

SEQ ID NO: 879256 - RNA, 23 nt, Human
ugcguagguggcaaucuucaguu

SEQ ID NO: 879257 - RNA, 22 nt, Human
uggaacagcaugguuaaaaaca

SEQ ID NO: 879258 - RNA, 22 nt, Human
uggcuucaccuuaggcacagag

SEQ ID NO: 879259 - RNA, 19 nt, Human
uuccgugcugcagaccgga

SEQ ID NO: 879260 - RNA, 24 nt, Human
uuccugcugcaggcaauuaugcaa

SEQ ID NO: 879261 - RNA, 20 nt, Human
uucgcuggcucccgccgggg

SEQ ID NO: 879262 - RNA, 18 nt, Human
uuggugucuuccagcuac

SEQ ID NO: 879263 - RNA, 25 nt, Human
aaaaaacuguccauuucucaaaaac

SEQ ID NO: 879264 - RNA, 20 nt, Human
aaaaggagaguuaaacccau

SEQ ID NO: 879265 - RNA, 19 nt, Human
aaaaugguaggggauuuug

SEQ ID NO: 879266 - RNA, 18 nt, Human
aaacagguaccaguuuug

SEQ ID NO: 879267 - RNA, 23 nt, Human
aaacccauuuucagcaagagccc

SEQ ID NO: 879268 - RNA, 23 nt, Human
aaagagaugacuggaauaaccau

SEQ ID NO: 879269 - RNA, 19 nt, Human
aaagggcaaaaacaucugc

SEQ ID NO: 879270 - RNA, 24 nt, Human
aaaugacagaagcucauuaaaacc

SEQ ID NO: 879271 - RNA, 22 nt, Human
aacacccgcccagccccacccc

SEQ ID NO: 879272 - RNA, 23 nt, Human
aaccaagucccccaaaccuccug

SEQ ID NO: 879273 - RNA, 20 nt, Human
aacugaucaaaacucaaugg

SEQ ID NO: 879274 - RNA, 24 nt, Human
aagcagaaagggcaaaaacaucug

SEQ ID NO: 879275 - RNA, 22 nt, Human
aagcagaaagggcaaaagggac

SEQ ID NO: 879276 - RNA, 19 nt, Human
aagcagccccucacauuug

SEQ ID NO: 879277 - RNA, 20 nt, Human
aagcagcuccagagccugcc

SEQ ID NO: 879278 - RNA, 20 nt, Human
aaguccucuuuucccaccuc

SEQ ID NO: 879279 - RNA, 20 nt, Human
acaacaaaagaugcuuugga

SEQ ID NO: 879280 - RNA, 22 nt, Human
acagagaaaaaccugagauacg

SEQ ID NO: 879281 - RNA, 20 nt, Human
acaguuccagaaggaagggg

SEQ ID NO: 879282 - RNA, 22 nt, Human
accauaggaaacaugaagucac

SEQ ID NO: 879283 - RNA, 20 nt, Human
accccaccuaaagacaucca

SEQ ID NO: 879284 - RNA, 20 nt, Human
acccgcccagccccaccccc

SEQ ID NO: 879285 - RNA, 21 nt, Human
acuaacucaaaucguugacca

SEQ ID NO: 879286 - RNA, 24 nt, Human
acuggguugauccaccuguugcuu

SEQ ID NO: 879287 - RNA, 20 nt, Human
acuggguuugcucuaaggua

SEQ ID NO: 879288 - RNA, 18 nt, Human
acuugcuuuuuuaagaac

SEQ ID NO: 879289 - RNA, 22 nt, Human
agaagcucauuaaaaccaaguc

SEQ ID NO: 879290 - RNA, 21 nt, Human
agaaggaagggggaccauggc

SEQ ID NO: 879291 - RNA, 23 nt, Human
agagcccuccaagugaaugucuc

SEQ ID NO: 879292 - RNA, 21 nt, Human
agccaccaccccaccuaaaga

SEQ ID NO: 879293 - RNA, 23 nt, Human
agcugauaaaacucaagccagga

SEQ ID NO: 879294 - RNA, 21 nt, Human
aggaaacaugaagucacaucc

SEQ ID NO: 879295 - RNA, 18 nt, Human
agggucuaccuaccugac

SEQ ID NO: 879296 - RNA, 27 nt, Human
aguggucaaagccccgacuuuccuguc

SEQ ID NO: 879297 - RNA, 21 nt, Human
auaaccaagucggucuguguu

SEQ ID NO: 879298 - RNA, 20 nt, Human
auccuggucaaaaaacuguc

SEQ ID NO: 879299 - RNA, 21 nt, Human
auccuggucaaaaaacugucc

SEQ ID NO: 879300 - RNA, 25 nt, Human
caaauaaauucacauuuggcuugaa

SEQ ID NO: 879301 - RNA, 23 nt, Human
caacagcuuuacacuggacugaa

SEQ ID NO: 879302 - RNA, 21 nt, Human
caacuggguugauccaccugu

SEQ ID NO: 879303 - RNA, 22 nt, Human
caagugaaugucucuuucucuu

SEQ ID NO: 879304 - RNA, 19 nt, Human
cacaguuccagaaggaagg

SEQ ID NO: 879305 - RNA, 25 nt, Human
caccauaggaaacaugaagucaacu

SEQ ID NO: 879306 - RNA, 19 nt, Human
cacccgcccagccccaccc

SEQ ID NO: 879307 - RNA, 23 nt, Human
cacuuuacaccccaucauagcac

SEQ ID NO: 879308 - RNA, 19 nt, Human
cagagugaugcucgugucc

SEQ ID NO: 879309 - RNA, 19 nt, Human
cagcugaauccuagacagu

SEQ ID NO: 879310 - RNA, 24 nt, Human
cagcugccaggaccgauuccauac

SEQ ID NO: 879311 - RNA, 21 nt, Human
cagcuuuacacuggacugaaa

SEQ ID NO: 879312 - RNA, 19 nt, Human
caguuccagaaggaagggg

SEQ ID NO: 879313 - RNA, 20 nt, Human
caguuccagaaggaaggggg

SEQ ID NO: 879314 - RNA, 19 nt, Human
cauagcacauuauuugugc

SEQ ID NO: 879315 - RNA, 23 nt, Human
cauuucucaaaaacagagaaaaa

SEQ ID NO: 879316 - RNA, 24 nt, Human
cauuuugauuugcuuuuuccacug

SEQ ID NO: 879317 - RNA, 24 nt, Human
ccaccaccccaccuaaagacaucc

SEQ ID NO: 879318 - RNA, 19 nt, Human
ccagccccacccccaaaaa

SEQ ID NO: 879319 - RNA, 21 nt, Human
ccauagcuccauuuuccaaaa

SEQ ID NO: 879320 - RNA, 19 nt, Human
cccaccuccuucuuuaauu

SEQ ID NO: 879321 - RNA, 22 nt, Human
cccagccccacccccaaaaagc

SEQ ID NO: 879322 - RNA, 19 nt, Human
cccccaaaccuccugaaac

SEQ ID NO: 879323 - RNA, 19 nt, Human
ccccucgggccccccucgc

SEQ ID NO: 879324 - RNA, 24 nt, Human
cccgcccagccccacccccaaaaa

SEQ ID NO: 879325 - RNA, 23 nt, Human
cccuccaagugaaugucucuuuc

SEQ ID NO: 879326 - RNA, 18 nt, Human
cccucgggccccccucgc

SEQ ID NO: 879327 - RNA, 20 nt, Human
ccgcccagccccacccccaa

SEQ ID NO: 879328 - RNA, 19 nt, Human
ccuaccugacccccaagcu

SEQ ID NO: 879329 - RNA, 20 nt, Human
ccucacuaaagccucucuca

SEQ ID NO: 879330 - RNA, 24 nt, Human
ccucagcaauuuguaccuuucuua

SEQ ID NO: 879331 - RNA, 19 nt, Human
ccuccaacaccaaagacac

SEQ ID NO: 879332 - RNA, 20 nt, Human
ccucuuuucccaccuccuuc

SEQ ID NO: 879333 - RNA, 21 nt, Human
ccucuuuucccaccuccuucu

SEQ ID NO: 879334 - RNA, 18 nt, Human
ccugaaacaucguuagca

SEQ ID NO: 879335 - RNA, 25 nt, Human
ccugacccccaagcuggcucagucu

SEQ ID NO: 879336 - RNA, 28 nt, Human
ccuuugcucccgcgcuccaacagcuuua

SEQ ID NO: 879337 - RNA, 25 nt, Human
cgccacggcagucucgauuccaaga

SEQ ID NO: 879338 - RNA, 18 nt, Human
cgcccagccccaccccca

SEQ ID NO: 879339 - RNA, 20 nt, Human
cggccagcguuuccaaaaac

SEQ ID NO: 879340 - RNA, 18 nt, Human
cggcugcgcucccgcucg

SEQ ID NO: 879341 - RNA, 21 nt, Human
cguuagccucccaaccuuagc

SEQ ID NO: 879342 - RNA, 20 nt, Human
cucaaaaacagagaaaaacc

SEQ ID NO: 879343 - RNA, 19 nt, Human
cucacuaaagccucucuca

SEQ ID NO: 879344 - RNA, 23 nt, Human
cucacuaaagccucucucagccc

SEQ ID NO: 879345 - RNA, 21 nt, Human
cucauuaaaaccaaguccccc

SEQ ID NO: 879346 - RNA, 21 nt, Human
cuccuccucuucuuuucagua

SEQ ID NO: 879347 - RNA, 22 nt, Human
cuccucuucuuuucaguauauu

SEQ ID NO: 879348 - RNA, 18 nt, Human
cucgggccccccucgccu

SEQ ID NO: 879349 - RNA, 24 nt, Human
cucgggccccccucgccucccgga

SEQ ID NO: 879350 - RNA, 21 nt, Human
cugccaggaccgauuccauac

SEQ ID NO: 879351 - RNA, 20 nt, Human
cugccuccgaggccaccccu

SEQ ID NO: 879352 - RNA, 23 nt, Human
cugguggugacuggcaaaaggag

SEQ ID NO: 879353 - RNA, 22 nt, Human
gaaaaaaaaauugucuauagaa

SEQ ID NO: 879354 - RNA, 21 nt, Human
gaauaaccauuccacaacaaa

SEQ ID NO: 879355 - RNA, 22 nt, Human
gaauaaccauuccacaacaaaa

SEQ ID NO: 879356 - RNA, 22 nt, Human
gacucguuagccucccaaccuu

SEQ ID NO: 879357 - RNA, 19 nt, Human
gcaaaggacuccguccaca

SEQ ID NO: 879358 - RNA, 18 nt, Human
gcagaaagggcaaaaaca

SEQ ID NO: 879359 - RNA, 20 nt, Human
gcagagugaugcucgugucc

SEQ ID NO: 879360 - RNA, 21 nt, Human
gccacuaaggaaacagguuuc

SEQ ID NO: 879361 - RNA, 21 nt, Human
gcucaucauccccauaaccaa

SEQ ID NO: 879362 - RNA, 18 nt, Human
gcuccaacagcuuuacac

SEQ ID NO: 879363 - RNA, 18 nt, Human
gcucucgcuccauuuuga

SEQ ID NO: 879364 - RNA, 21 nt, Human
ggcggcugcgcucccgcucgc

SEQ ID NO: 879365 - RNA, 22 nt, Human
ggcggcugcgcucccgcucgcg

SEQ ID NO: 879366 - RNA, 21 nt, Human
gggaccauggccaagagaagc

SEQ ID NO: 879367 - RNA, 23 nt, Human
gggggaccauggccaagagaagc

SEQ ID NO: 879368 - RNA, 22 nt, Human
ggucugaaaagugugacuagcu

SEQ ID NO: 879369 - RNA, 22 nt, Human
ggugaacuguuacacauuuggu

SEQ ID NO: 879370 - RNA, 20 nt, Human
ggugguucagcugaauccua

SEQ ID NO: 879371 - RNA, 18 nt, Human
guaugaggucaggcuggu

SEQ ID NO: 879372 - RNA, 20 nt, Human
guccucuuuucccaccuccu

SEQ ID NO: 879373 - RNA, 26 nt, Human
gucucgauuccaagaacugauuaucu

SEQ ID NO: 879374 - RNA, 22 nt, Human
gucucuuucucuuucccguuga

SEQ ID NO: 879375 - RNA, 20 nt, Human
gugauguugccagguuccug

SEQ ID NO: 879376 - RNA, 20 nt, Human
uaaaaccaagucccccaaac

SEQ ID NO: 879377 - RNA, 24 nt, Human
uaaaaccaagucccccaaaccucc

SEQ ID NO: 879378 - RNA, 23 nt, Human
uaaaaucaccaucuguaucaccc

SEQ ID NO: 879379 - RNA, 18 nt, Human
uaaacccauuuucagcaa

SEQ ID NO: 879380 - RNA, 22 nt, Human
uaaagacauccaagcagcucca

SEQ ID NO: 879381 - RNA, 22 nt, Human
uaaguccucuuuucccaccucc

SEQ ID NO: 879382 - RNA, 18 nt, Human
uacauauauauauuucag

SEQ ID NO: 879383 - RNA, 23 nt, Human
uacauauauauauuucagauuua

SEQ ID NO: 879384 - RNA, 19 nt, Human
uaccuaccugacccccaag

SEQ ID NO: 879385 - RNA, 20 nt, Human
uagaagucaccauaggaaac

SEQ ID NO: 879386 - RNA, 22 nt, Human
uagaagucaccauaggaaacau

SEQ ID NO: 879387 - RNA, 19 nt, Human
uagaagucuaguuuugcuc

SEQ ID NO: 879388 - RNA, 22 nt, Human
uagugaaccagcacuaaaggcc

SEQ ID NO: 879389 - RNA, 20 nt, Human
uauauguauguacauauaua

SEQ ID NO: 879390 - RNA, 22 nt, Human
uauauguauguacauauauaua

SEQ ID NO: 879391 - RNA, 23 nt, Human
uaugguaguggucaaagccccga

SEQ ID NO: 879392 - RNA, 22 nt, Human
uauguacauauauauauuucag

SEQ ID NO: 879393 - RNA, 21 nt, Human
uauuaaacauuuacagucuuu

SEQ ID NO: 879394 - RNA, 21 nt, Human
ucaaaagaacacuauauucau

SEQ ID NO: 879395 - RNA, 21 nt, Human
ucaaagccccgacuuuccugu

SEQ ID NO: 879396 - RNA, 25 nt, Human
uccacaacaaaagaugcuuuggagc

SEQ ID NO: 879397 - RNA, 23 nt, Human
ucccccaaaccuccugaaacauc

SEQ ID NO: 879398 - RNA, 20 nt, Human
ucccucagagggaaacgaaa

SEQ ID NO: 879399 - RNA, 22 nt, Human
ucccucagagggaaacgaaagu

SEQ ID NO: 879400 - RNA, 25 nt, Human
uccggacaaagacuaauauuugaga

SEQ ID NO: 879401 - RNA, 23 nt, Human
uccuagacaguuucccuucucuu

SEQ ID NO: 879402 - RNA, 21 nt, Human
ucgccacggcagucucgauuc

SEQ ID NO: 879403 - RNA, 23 nt, Human
ucuaagguagaccuuggcaaggc

SEQ ID NO: 879404 - RNA, 23 nt, Human
ucucucagcccuacuaguaaaug

SEQ ID NO: 879405 - RNA, 21 nt, Human
ucugacacuagugaaccagca

SEQ ID NO: 879406 - RNA, 18 nt, Human
ucugcuaccaacccaaau

SEQ ID NO: 879407 - RNA, 18 nt, Human
ugaaacuugagaaugucu

SEQ ID NO: 879408 - RNA, 23 nt, Human
ugaagcagaaagggcaaaaacca

SEQ ID NO: 879409 - RNA, 21 nt, Human
ugacaacacccgcccagcccc

SEQ ID NO: 879410 - RNA, 21 nt, Human
ugacagaagcucauuaaaacc

SEQ ID NO: 879411 - RNA, 24 nt, Human
ugagaaugucugauuaaagauuuc

SEQ ID NO: 879412 - RNA, 20 nt, Human
ugauucauaaagagaugacu

SEQ ID NO: 879413 - RNA, 22 nt, Human
ugcucuuuaaaaucaccaucug

SEQ ID NO: 879414 - RNA, 24 nt, Human
uggaaggguccggacaaagacuaa

SEQ ID NO: 879415 - RNA, 23 nt, Human
uggaauaaccauuccacaacaaa

SEQ ID NO: 879416 - RNA, 23 nt, Human
uggauaggaucauuucucuugga

SEQ ID NO: 879417 - RNA, 22 nt, Human
ugucacggcgucuccccucggg

SEQ ID NO: 879418 - RNA, 23 nt, Human
uguccuccaacaccaaagacacu

SEQ ID NO: 879419 - RNA, 22 nt, Human
uguuacacauuuggugugugug

SEQ ID NO: 879420 - RNA, 21 nt, Human
uuaaaggauugacaaucccau

SEQ ID NO: 879421 - RNA, 21 nt, Human
uucauacauuaacauacaugg

SEQ ID NO: 879422 - RNA, 19 nt, Human
uugaaaccaaguucaucuu

SEQ ID NO: 879423 - RNA, 18 nt, Human
uugaccagcacuuuccca

SEQ ID NO: 879424 - RNA, 21 nt, Human
uugcacucuauucacaacuga

SEQ ID NO: 879425 - RNA, 18 nt, Human
uugcgaggcgccgccgcg

SEQ ID NO: 879426 - RNA, 22 nt, Human
uuguagguugaggacugaggac

SEQ ID NO: 879427 - RNA, 22 nt, Human
uuuccuauaaaauucugccaua

SEQ ID NO: 879428 - RNA, 20 nt, Human
uuugagaucucuuaguagca

SEQ ID NO: 879429 - RNA, 18 nt, Human
aaaacaaacacaaaaacc

SEQ ID NO: 879430 - RNA, 19 nt, Human
aaaaugccucaagugagga

SEQ ID NO: 879431 - RNA, 18 nt, Human
aaacaaacacaaaaaccc

SEQ ID NO: 879432 - RNA, 19 nt, Human
aaacaaacacaaaaacccg

SEQ ID NO: 879433 - RNA, 23 nt, Human
aaacaaacacaaaaacccgacaa

SEQ ID NO: 879434 - RNA, 23 nt, Human
aaacaaacacaaaaacccgacaa

SEQ ID NO: 879435 - RNA, 24 nt, Human
aaacaagagaccaaaaccacagaa

SEQ ID NO: 879436 - RNA, 18 nt, Human
aaacacaaaaacccgaca

SEQ ID NO: 879437 - RNA, 26 nt, Human
aaacacaaaaacccgacaacaaaaug

SEQ ID NO: 879438 - RNA, 18 nt, Human
aacacaaaaacccgacaa

SEQ ID NO: 879439 - RNA, 18 nt, Human
aagagaccaaaaccacag

SEQ ID NO: 879440 - RNA, 22 nt, Human
aagagaccaaaaccacagaaca

SEQ ID NO: 879441 - RNA, 23 nt, Human
aagcaguagauggacaaaccagg

SEQ ID NO: 879442 - RNA, 23 nt, Human
aagugccuguacuggaaaggcca

SEQ ID NO: 879443 - RNA, 22 nt, Human
acaaaaacaaacacaaaaaccc

SEQ ID NO: 879444 - RNA, 24 nt, Human
acaaaaacaaacacaaaaacccga

SEQ ID NO: 879445 - RNA, 22 nt, Human
acaaaaacccgacaacaaaaug

SEQ ID NO: 879446 - RNA, 22 nt, Human
acacacccacacacucacacca

SEQ ID NO: 879447 - RNA, 23 nt, Human
acaccugauucugguuacccagu

SEQ ID NO: 879448 - RNA, 23 nt, Human
acagaugacgcaacacaccuaca

SEQ ID NO: 879449 - RNA, 24 nt, Human
acagggaaaacaacacacuccuca

SEQ ID NO: 879450 - RNA, 23 nt, Human
acccacacacucacaccauguca

SEQ ID NO: 879451 - RNA, 19 nt, Human
acccguucgguccccgccu

SEQ ID NO: 879452 - RNA, 23 nt, Human
acgcaacacaccuacacuaacug

SEQ ID NO: 879453 - RNA, 26 nt, Human
acugcaaacccauuacuccacuacaa

SEQ ID NO: 879454 - RNA, 19 nt, Human
agaacaagugcacguggua

SEQ ID NO: 879455 - RNA, 20 nt, Human
agagcaacaaaacacaaagg

SEQ ID NO: 879456 - RNA, 18 nt, Human
aggacggcgaggccaggc

SEQ ID NO: 879457 - RNA, 20 nt, Human
caaaaacaaacacaaaaacc

SEQ ID NO: 879458 - RNA, 22 nt, Human
caaaaacaaacacaaaaacccg

SEQ ID NO: 879459 - RNA, 21 nt, Human
caaaauacagagaccucugca

SEQ ID NO: 879460 - RNA, 22 nt, Human
caaaauacagagaccucugcaa

SEQ ID NO: 879461 - RNA, 21 nt, Human
caaacacaaaaacccgacaac

SEQ ID NO: 879462 - RNA, 22 nt, Human
caaagcaguagauggacaaacc

SEQ ID NO: 879463 - RNA, 21 nt, Human
caaauacccacaaaaacaaac

SEQ ID NO: 879464 - RNA, 23 nt, Human
caacagggaaaacaacacacucc

SEQ ID NO: 879465 - RNA, 23 nt, Human
caagagaccaaaaccacagaaca

SEQ ID NO: 879466 - RNA, 19 nt, Human
caaggaauucuuccaacaa

SEQ ID NO: 879467 - RNA, 21 nt, Human
cacacccacacacucacacca

SEQ ID NO: 879468 - RNA, 19 nt, Human
cacaccuacacuaacuguc

SEQ ID NO: 879469 - RNA, 22 nt, Human
cacaggcacugccacaccacca

SEQ ID NO: 879470 - RNA, 21 nt, Human
caccaugucagcccuugggag

SEQ ID NO: 879471 - RNA, 22 nt, Human
cacccaucacuccuauucuugg

SEQ ID NO: 879472 - RNA, 18 nt, Human
cacucacaccaugucagc

SEQ ID NO: 879473 - RNA, 22 nt, Human
cacugccacaccaccacagggg

SEQ ID NO: 879474 - RNA, 22 nt, Human
cagaaagugccuguacuggaaa

SEQ ID NO: 879475 - RNA, 19 nt, Human
cagagcaacaaaacacaaa

SEQ ID NO: 879476 - RNA, 23 nt, Human
cagcagaccaguucacacgccac

SEQ ID NO: 879477 - RNA, 22 nt, Human
cagcugcaaaauacagagaccu

SEQ ID NO: 879478 - RNA, 20 nt, Human
cagcuuaggucccuucaccc

SEQ ID NO: 879479 - RNA, 20 nt, Human
caggcgaggggaggggaagg

SEQ ID NO: 879480 - RNA, 19 nt, Human
cccacaaaaacaaacacaa

SEQ ID NO: 879481 - RNA, 24 nt, Human
cccacacagcaaaggccccggaac

SEQ ID NO: 879482 - RNA, 21 nt, Human
ccgacaacaaaaugccucaag

SEQ ID NO: 879483 - RNA, 20 nt, Human
ccuucacccaucacuccuau

SEQ ID NO: 879484 - RNA, 22 nt, Human
cgcaacacaccuacacuaacug

SEQ ID NO: 879485 - RNA, 19 nt, Human
cucagggaaaggugagggg

SEQ ID NO: 879486 - RNA, 19 nt, Human
cuggaaaggcuagaucgua

SEQ ID NO: 879487 - RNA, 22 nt, Human
cuuaucacugcaaacccauuac

SEQ ID NO: 879488 - RNA, 19 nt, Human
gaacagauauaaaaacaca

SEQ ID NO: 879489 - RNA, 22 nt, Human
gaacagauauaaaaacacagau

SEQ ID NO: 879490 - RNA, 19 nt, Human
gagaacacaggcacugcca

SEQ ID NO: 879491 - RNA, 27 nt, Human
gagaacacaggcacugccacaccacca

SEQ ID NO: 879492 - RNA, 19 nt, Human
gagggguugagaagacagg

SEQ ID NO: 879493 - RNA, 20 nt, Human
gagggguugagaagacaggc

SEQ ID NO: 879494 - RNA, 19 nt, Human
gccaacuuccaacucugca

SEQ ID NO: 879495 - RNA, 21 nt, Human
gccacaccaccacaggggaca

SEQ ID NO: 879496 - RNA, 22 nt, Human
gccccggaacuuccgggaucac

SEQ ID NO: 879497 - RNA, 18 nt, Human
gucagcccuugggagcca

SEQ ID NO: 879498 - RNA, 18 nt, Human
gugcaauuaaacaagaga

SEQ ID NO: 879499 - RNA, 20 nt, Human
uaaaaaaucucaacacauuc

SEQ ID NO: 879500 - RNA, 18 nt, Human
uaaaaacacagaugugca

SEQ ID NO: 879501 - RNA, 23 nt, Human
uaaauucguguuacaaaaaacua

SEQ ID NO: 879502 - RNA, 20 nt, Human
uaaccucuauggcuaacccc

SEQ ID NO: 879503 - RNA, 27 nt, Human
uaagaauacugcaucuauugucguaga

SEQ ID NO: 879504 - RNA, 19 nt, Human
uacccacaaaaacaaacac

SEQ ID NO: 879505 - RNA, 26 nt, Human
uacccacaaaaacaaacacaaaaacc

SEQ ID NO: 879506 - RNA, 21 nt, Human
uacuguuuaucccacacagca

SEQ ID NO: 879507 - RNA, 19 nt, Human
uagauggacaaaccaggag

SEQ ID NO: 879508 - RNA, 20 nt, Human
uagauggacaaaccaggagc

SEQ ID NO: 879509 - RNA, 21 nt, Human
uaggacagcaccuggaguuga

SEQ ID NO: 879510 - RNA, 18 nt, Human
uaggagagaacacaggca

SEQ ID NO: 879511 - RNA, 19 nt, Human
uaucacacacccacacacu

SEQ ID NO: 879512 - RNA, 26 nt, Human
uaucacacacccacacacucacacca

SEQ ID NO: 879513 - RNA, 22 nt, Human
uauccaagacccaguuuguguu

SEQ ID NO: 879514 - RNA, 21 nt, Human
uauucuuggaccccaaagcag

SEQ ID NO: 879515 - RNA, 24 nt, Human
ucaccagaaaccucaaggauccac

SEQ ID NO: 879516 - RNA, 27 nt, Human
ucaccagaaaccucaaggauccacauc

SEQ ID NO: 879517 - RNA, 19 nt, Human
ucagaaagugccuguacug

SEQ ID NO: 879518 - RNA, 18 nt, Human
ucagggguggaaugaggc

SEQ ID NO: 879519 - RNA, 24 nt, Human
ucucaacacauucacaccugauuc

SEQ ID NO: 879520 - RNA, 22 nt, Human
ugaaaaguccauaaaugcaauc

SEQ ID NO: 879521 - RNA, 22 nt, Human
ugaggcaaauacccacaaaaac

SEQ ID NO: 879522 - RNA, 23 nt, Human
ugcaaaacaguaaaaaaucucaa

SEQ ID NO: 879523 - RNA, 23 nt, Human
ugccacacaaggcuuaaaccacu

SEQ ID NO: 879524 - RNA, 21 nt, Human
ugcuuugcccuuuaagaucua

SEQ ID NO: 879525 - RNA, 20 nt, Human
ugggagccaacuuccaacuc

SEQ ID NO: 879526 - RNA, 22 nt, Human
ugggauaaccagguaguuuuaa

SEQ ID NO: 879527 - RNA, 20 nt, Human
ugggugggauccaaggaauc

SEQ ID NO: 879528 - RNA, 19 nt, Human
ugguugaaaacagaugacg

SEQ ID NO: 879529 - RNA, 20 nt, Human
uguguauccaagacccaguu

SEQ ID NO: 879530 - RNA, 22 nt, Human
uuaagauuuauuuuuguaacuu

SEQ ID NO: 879531 - RNA, 23 nt, Human
uucuuccaacaacuuaacuuuag

SEQ ID NO: 879532 - RNA, 23 nt, Human
uuucucaauuuuccuaucaugca

SEQ ID NO: 879533 - RNA, 23 nt, Human
uuuuuuuuuuuuuuaauuguuuu

SEQ ID NO: 879534 - RNA, 23 nt, Human
uuuuuuuuuuuuuuuuuuaauug

SEQ ID NO: 879535 - RNA, 18 nt, Human
aacaagauugcuacccug

SEQ ID NO: 879536 - RNA, 22 nt, Human
aacuugaaaaaaaugaccaccc

SEQ ID NO: 879537 - RNA, 20 nt, Human
aagaagaucuauacuuccac

SEQ ID NO: 879538 - RNA, 21 nt, Human
aagaugcagggcaaccaucua

SEQ ID NO: 879539 - RNA, 22 nt, Human
aaguuuacuauuucuggggaag

SEQ ID NO: 879540 - RNA, 23 nt, Human
aauuaaaaucaaaaugacuacaa

SEQ ID NO: 879541 - RNA, 24 nt, Human
aauuacccugaugggcaagaaccc

SEQ ID NO: 879542 - RNA, 19 nt, Human
aauuucaaaucaaagccag

SEQ ID NO: 879543 - RNA, 19 nt, Human
acaggaaaugugcccagag

SEQ ID NO: 879544 - RNA, 20 nt, Human
accgucgucgugccgccgcc

SEQ ID NO: 879545 - RNA, 22 nt, Human
accuccugcuccuucaagagcc

SEQ ID NO: 879546 - RNA, 21 nt, Human
aggaccacugcugggucagaa

SEQ ID NO: 879547 - RNA, 20 nt, Human
aggagcagaauucaagaaca

SEQ ID NO: 879548 - RNA, 20 nt, Human
auaauagaucacuugaguac

SEQ ID NO: 879549 - RNA, 19 nt, Human
caaaauacaguuaucugau

SEQ ID NO: 879550 - RNA, 20 nt, Human
caaaaugacuacaagacuug

SEQ ID NO: 879551 - RNA, 23 nt, Human
caaauccaagucacacgucaccu

SEQ ID NO: 879552 - RNA, 19 nt, Human
cacacgucaccuuggcugc

SEQ ID NO: 879553 - RNA, 18 nt, Human
cacauguggcaacaagau

SEQ ID NO: 879554 - RNA, 20 nt, Human
cagcuaauaccuuaaguaaa

SEQ ID NO: 879555 - RNA, 20 nt, Human
caggaaaugugcccagagcc

SEQ ID NO: 879556 - RNA, 21 nt, Human
ccacacauguaagugcacgua

SEQ ID NO: 879557 - RNA, 19 nt, Human
cccaacaccaaccagacga

SEQ ID NO: 879558 - RNA, 19 nt, Human
cccacaggugagagcagag

SEQ ID NO: 879559 - RNA, 22 nt, Human
ccccaacaccaaccagacgaca

SEQ ID NO: 879560 - RNA, 19 nt, Human
cccugaugggcaagaaccc

SEQ ID NO: 879561 - RNA, 26 nt, Human
ccuccugcuccuucaagagccucccu

SEQ ID NO: 879562 - RNA, 20 nt, Human
ccucucgcagccgcugccgc

SEQ ID NO: 879563 - RNA, 24 nt, Human
cucaaauccaagucacacgucacc

SEQ ID NO: 879564 - RNA, 23 nt, Human
cuggaggccccaacaccaaccag

SEQ ID NO: 879565 - RNA, 21 nt, Human
gaacaggaaaugugcccagag

SEQ ID NO: 879566 - RNA, 20 nt, Human
gagaacuugaaaaaaaugac

SEQ ID NO: 879567 - RNA, 20 nt, Human
gagcccaagaugcagggcaa

SEQ ID NO: 879568 - RNA, 23 nt, Human
gagggaccgucgucgugccgccg

SEQ ID NO: 879569 - RNA, 23 nt, Human
gccccaacaccaaccagacgaca

SEQ ID NO: 879570 - RNA, 19 nt, Human
gcccuggcuggaggcccca

SEQ ID NO: 879571 - RNA, 22 nt, Human
gcugcaguacagggaagcuccg

SEQ ID NO: 879572 - RNA, 22 nt, Human
ggaaaugugcccagagccuagg

SEQ ID NO: 879573 - RNA, 18 nt, Human
ggagcagaauucaagaac

SEQ ID NO: 879574 - RNA, 22 nt, Human
gggaaaguuucggccgauggag

SEQ ID NO: 879575 - RNA, 19 nt, Human
uaaauuccagcuuggaaca

SEQ ID NO: 879576 - RNA, 22 nt, Human
uaaggcuaagcccaacuccacu

SEQ ID NO: 879577 - RNA, 18 nt, Human
ucaggagcagaauucaag

SEQ ID NO: 879578 - RNA, 21 nt, Human
uccgcacacccuggcuuggga

SEQ ID NO: 879579 - RNA, 24 nt, Human
ucuggggaagaaaagaucaaaggu

SEQ ID NO: 879580 - RNA, 18 nt, Human
ugaaugagacuaaggcua

SEQ ID NO: 879581 - RNA, 21 nt, Human
ugagagcagaggcuugguucc

SEQ ID NO: 879582 - RNA, 18 nt, Human
ugccaugaaauuuuuaca

SEQ ID NO: 879583 - RNA, 19 nt, Human
uggagcccaagaugcaggg

SEQ ID NO: 879584 - RNA, 20 nt, Human
uggagcccaagaugcagggc

SEQ ID NO: 879585 - RNA, 20 nt, Human
ugggaaaguuucggccgaug

SEQ ID NO: 879586 - RNA, 24 nt, Human
ugggacacuugagagaacuugaaa

SEQ ID NO: 879587 - RNA, 23 nt, Human
uggggaagaaaagaucaaaggua

SEQ ID NO: 879588 - RNA, 18 nt, Human
uguuaacagcuaugcugc

SEQ ID NO: 879589 - RNA, 25 nt, Human
uuaaacacaaaaauagauuagauaa

SEQ ID NO: 879590 - RNA, 22 nt, Human
uugaaugccccauuuguucacc

SEQ ID NO: 879591 - RNA, 25 nt, Human
uuuaaacacaaaaauagauuagaua

SEQ ID NO: 879592 - RNA, 19 nt, Human
uuuguucacccucuucagg

SEQ ID NO: 879593 - RNA, 23 nt, Human
aaaaaacgaacuuuaaagccagg

SEQ ID NO: 879594 - RNA, 19 nt, Human
aaaaugccccaaaugagga

SEQ ID NO: 879595 - RNA, 21 nt, Human
aaagguuuuucaggaagugcc

SEQ ID NO: 879596 - RNA, 24 nt, Human
aaagugcugggauuacaggcguga

SEQ ID NO: 879597 - RNA, 18 nt, Human
aacaguagaaaucugaac

SEQ ID NO: 879598 - RNA, 21 nt, Human
aagacggagguugcagugagc

SEQ ID NO: 879599 - RNA, 19 nt, Human
aagugcugggauuacaggc

SEQ ID NO: 879600 - RNA, 19 nt, Human
aagugcugggauuacaggc

SEQ ID NO: 879601 - RNA, 26 nt, Human
aagugcugggauuacaggcgugagcc

SEQ ID NO: 879602 - RNA, 20 nt, Human
aauggcuugaacccggaaga

SEQ ID NO: 879603 - RNA, 26 nt, Human
acagagugggacucugucucaauaaa

SEQ ID NO: 879604 - RNA, 20 nt, Human
acaggguuucgccauucaca

SEQ ID NO: 879605 - RNA, 25 nt, Human
accaaagccaagaauacugcaucua

SEQ ID NO: 879606 - RNA, 21 nt, Human
accaauauggugaaaccccgu

SEQ ID NO: 879607 - RNA, 19 nt, Human
accacugcacuccagccug

SEQ ID NO: 879608 - RNA, 22 nt, Human
acccaacaacaaaaugccccaa

SEQ ID NO: 879609 - RNA, 18 nt, Human
accccguuucuacuaaaa

SEQ ID NO: 879610 - RNA, 24 nt, Human
accugaggucaggaguucgagacc

SEQ ID NO: 879611 - RNA, 23 nt, Human
acgcuuggcucugguuacccagu

SEQ ID NO: 879612 - RNA, 21 nt, Human
acuaacuuuaaggccaggcac

SEQ ID NO: 879613 - RNA, 24 nt, Human
acuccagccugggugacagagugg

SEQ ID NO: 879614 - RNA, 24 nt, Human
acugcacuccagccugggugacag

SEQ ID NO: 879615 - RNA, 26 nt, Human
acugcacuccagccugggugacagag

SEQ ID NO: 879616 - RNA, 26 nt, Human
agaaggcuacuggccagcuuaggucc

SEQ ID NO: 879617 - RNA, 18 nt, Human
agacaggagaauggcuug

SEQ ID NO: 879618 - RNA, 24 nt, Human
agacaggagaauggcuugaacccg

SEQ ID NO: 879619 - RNA, 25 nt, Human
agacaggcccuggguacauauucuu

SEQ ID NO: 879620 - RNA, 24 nt, Human
agacggagguugcagugagccaag

SEQ ID NO: 879621 - RNA, 18 nt, Human
agccuccagaguagcugg

SEQ ID NO: 879622 - RNA, 24 nt, Human
agccugaccaauauggugaaaccc

SEQ ID NO: 879623 - RNA, 24 nt, Human
agccugggugacagagugggacuc

SEQ ID NO: 879624 - RNA, 24 nt, Human
aggacaggcgaggggaggggaagg

SEQ ID NO: 879625 - RNA, 22 nt, Human
aggcacaguggcuuaugccugu

SEQ ID NO: 879626 - RNA, 22 nt, Human
aggccaggcacaguggcuuaug

SEQ ID NO: 879627 - RNA, 24 nt, Human
aggcgcgguggcucaugccuguua

SEQ ID NO: 879628 - RNA, 24 nt, Human
aggcugagacaggagaauggcuug

SEQ ID NO: 879629 - RNA, 18 nt, Human
agggccaaaggacccgga

SEQ ID NO: 879630 - RNA, 20 nt, Human
agggccaaaggacccggaac

SEQ ID NO: 879631 - RNA, 20 nt, Human
aggucaacuuccaacucugc

SEQ ID NO: 879632 - RNA, 21 nt, Human
agguccaaaagccccggaacu

SEQ ID NO: 879633 - RNA, 22 nt, Human
agguggaucaccugaggucagg

SEQ ID NO: 879634 - RNA, 22 nt, Human
aguagagacaggguuucgccau

SEQ ID NO: 879635 - RNA, 18 nt, Human
aguagcugggacuacagg

SEQ ID NO: 879636 - RNA, 19 nt, Human
aguagcugggacuacaggc

SEQ ID NO: 879637 - RNA, 18 nt, Human
agugcugggauuacaggc

SEQ ID NO: 879638 - RNA, 26 nt, Human
auaaaacaaaaaacaaaaaaaaccuu

SEQ ID NO: 879639 - RNA, 27 nt, Human
auaaaacaaaaaacaaaaaaaaccuuu

SEQ ID NO: 879640 - RNA, 20 nt, Human
auggugaaaccccguuucua

SEQ ID NO: 879641 - RNA, 20 nt, Human
auguauucuuucucaauuuu

SEQ ID NO: 879642 - RNA, 21 nt, Human
caaaacaguagaaaucugaac

SEQ ID NO: 879643 - RNA, 24 nt, Human
caaagugcugggauuacaggcgug

SEQ ID NO: 879644 - RNA, 23 nt, Human
caacagggaaaacaacacacucc

SEQ ID NO: 879645 - RNA, 27 nt, Human
caagaauacugcaucuauugucguaga

SEQ ID NO: 879646 - RNA, 24 nt, Human
caauauggugaaaccccguuucua

SEQ ID NO: 879647 - RNA, 23 nt, Human
cacaaucugguugaaaacagaug

SEQ ID NO: 879648 - RNA, 28 nt, Human
cacacacaccaugucacccccccugagg

SEQ ID NO: 879649 - RNA, 20 nt, Human
cacacacccacacucacaca

SEQ ID NO: 879650 - RNA, 23 nt, Human
cacacacccacacucacacaccc

SEQ ID NO: 879651 - RNA, 22 nt, Human
cacacucacacacaccauguca

SEQ ID NO: 879652 - RNA, 24 nt, Human
cacauaagacuuaaaccccuaaac

SEQ ID NO: 879653 - RNA, 20 nt, Human
caccacugcacuccagccug

SEQ ID NO: 879654 - RNA, 22 nt, Human
caccaugucaccccguggaggu

SEQ ID NO: 879655 - RNA, 21 nt, Human
cacccacacucacacacacca

SEQ ID NO: 879656 - RNA, 20 nt, Human
cacccacacucacacaccca

SEQ ID NO: 879657 - RNA, 22 nt, Human
cacccaucacuccuauuauugg

SEQ ID NO: 879658 - RNA, 23 nt, Human
caccugaggucaggaguucgaga

SEQ ID NO: 879659 - RNA, 19 nt, Human
caccuggaguugauagguc

SEQ ID NO: 879660 - RNA, 23 nt, Human
caccuguagucccagcaacuugg

SEQ ID NO: 879661 - RNA, 24 nt, Human
caccuguagucccagcaacuuggg

SEQ ID NO: 879662 - RNA, 22 nt, Human
cacuccagccugggugacagag

SEQ ID NO: 879663 - RNA, 22 nt, Human
cacuccagccugggugacagag

SEQ ID NO: 879664 - RNA, 24 nt, Human
cacuccagccugggugacagagug

SEQ ID NO: 879665 - RNA, 19 nt, Human
cacugcacuccagccuggg

SEQ ID NO: 879666 - RNA, 19 nt, Human
cacugcacuccagccuggg

SEQ ID NO: 879667 - RNA, 22 nt, Human
cacugcacuccagccuggguga

SEQ ID NO: 879668 - RNA, 23 nt, Human
cacugcacuccagccugggugac

SEQ ID NO: 879669 - RNA, 24 nt, Human
cacugcacuccagccugggugaca

SEQ ID NO: 879670 - RNA, 25 nt, Human
cacugcacuccagccugggugacag

SEQ ID NO: 879671 - RNA, 22 nt, Human
cacugccacaccaccacagggg

SEQ ID NO: 879672 - RNA, 21 nt, Human
cagcacuuuggaagguagugg

SEQ ID NO: 879673 - RNA, 24 nt, Human
cagcuuaggucccuucacccauca

SEQ ID NO: 879674 - RNA, 22 nt, Human
caggaagugccuauacuggaaa

SEQ ID NO: 879675 - RNA, 21 nt, Human
caggcgcccgccacuacgccc

SEQ ID NO: 879676 - RNA, 21 nt, Human
caggguuucgccauucacagg

SEQ ID NO: 879677 - RNA, 24 nt, Human
cagguggaucaccugaggucagga

SEQ ID NO: 879678 - RNA, 22 nt, Human
cauaggcacugccacaccacca

SEQ ID NO: 879679 - RNA, 20 nt, Human
caucacaaaacaagucccac

SEQ ID NO: 879680 - RNA, 20 nt, Human
ccaaagugcugggauuacag

SEQ ID NO: 879681 - RNA, 22 nt, Human
ccaaagugcugggauuacaggc

SEQ ID NO: 879682 - RNA, 22 nt, Human
ccaaagugcugggauuacaggc

SEQ ID NO: 879683 - RNA, 24 nt, Human
ccaaagugcugggauuacaggcgu

SEQ ID NO: 879684 - RNA, 21 nt, Human
ccacgcuccaaaggccccaga

SEQ ID NO: 879685 - RNA, 20 nt, Human
ccacugcacuccagccuggg

SEQ ID NO: 879686 - RNA, 20 nt, Human
ccacugcacuccagccuggg

SEQ ID NO: 879687 - RNA, 20 nt, Human
ccacugcacuccagccuggg

SEQ ID NO: 879688 - RNA, 20 nt, Human
ccacugcacuccagccuggg

SEQ ID NO: 879689 - RNA, 21 nt, Human
ccacugcacuccagccugggu

SEQ ID NO: 879690 - RNA, 21 nt, Human
ccacugcacuccagccugggu

SEQ ID NO: 879691 - RNA, 23 nt, Human
ccacugcacuccagccuggguga

SEQ ID NO: 879692 - RNA, 23 nt, Human
ccacugcacuccagccuggguga

SEQ ID NO: 879693 - RNA, 24 nt, Human
ccacugcacuccagccugggugac

SEQ ID NO: 879694 - RNA, 25 nt, Human
ccacugcacuccagccugggugaca

SEQ ID NO: 879695 - RNA, 22 nt, Human
ccagaacgccccggaacgcccc

SEQ ID NO: 879696 - RNA, 24 nt, Human
ccagaguagcugggacuacaggcg

SEQ ID NO: 879697 - RNA, 21 nt, Human
ccagcuuaggucccuucaccc

SEQ ID NO: 879698 - RNA, 21 nt, Human
ccaggcacaguggcuuaugcc

SEQ ID NO: 879699 - RNA, 21 nt, Human
cccagaacgccccggaacgcc

SEQ ID NO: 879700 - RNA, 20 nt, Human
cccagguucacaccauucuc

SEQ ID NO: 879701 - RNA, 21 nt, Human
ccccuaaaccaaggguuuccg

SEQ ID NO: 879702 - RNA, 19 nt, Human
cccggaacgccccggaacu

SEQ ID NO: 879703 - RNA, 21 nt, Human
cccggaagacggagguugcag

SEQ ID NO: 879704 - RNA, 23 nt, Human
cccugccggcucugccucuuuuu

SEQ ID NO: 879705 - RNA, 24 nt, Human
ccgccucagccucccaaagugcug

SEQ ID NO: 879706 - RNA, 20 nt, Human
ccgcgcccagccuuaaacca

SEQ ID NO: 879707 - RNA, 20 nt, Human
ccggaacuuccgggaucauu

SEQ ID NO: 879708 - RNA, 21 nt, Human
ccuauuauuggaccccaaagc

SEQ ID NO: 879709 - RNA, 23 nt, Human
ccugaccaauauggugaaacccc

SEQ ID NO: 879710 - RNA, 24 nt, Human
ccugaccaauauggugaaaccccg

SEQ ID NO: 879711 - RNA, 22 nt, Human
ccugaggucaggaguucgagac

SEQ ID NO: 879712 - RNA, 22 nt, Human
ccugggugacagagugggacuc

SEQ ID NO: 879713 - RNA, 20 nt, Human
ccuucacccaucacuccuau

SEQ ID NO: 879714 - RNA, 19 nt, Human
ccuuggggaaaggugaggg

SEQ ID NO: 879715 - RNA, 22 nt, Human
ccuugugauccggccgccucag

SEQ ID NO: 879716 - RNA, 24 nt, Human
cgagaccagccugaccaauauggu

SEQ ID NO: 879717 - RNA, 24 nt, Human
cgagagaccaaaacuacagaacua

SEQ ID NO: 879718 - RNA, 21 nt, Human
cgccauucacaggauggucuc

SEQ ID NO: 879719 - RNA, 18 nt, Human
cgccccggaacgccccgg

SEQ ID NO: 879720 - RNA, 27 nt, Human
cgccccggaacuuccggaaucacagag

SEQ ID NO: 879721 - RNA, 24 nt, Human
cgccucagccuccagaguagcugg

SEQ ID NO: 879722 - RNA, 24 nt, Human
cgccucagccucccaaagugcugg

SEQ ID NO: 879723 - RNA, 19 nt, Human
cgccucccagguucacacc

SEQ ID NO: 879724 - RNA, 23 nt, Human
cgcucugucacccaggcugggag

SEQ ID NO: 879725 - RNA, 20 nt, Human
cggaacuuccggaaucacag

SEQ ID NO: 879726 - RNA, 24 nt, Human
cggaagacggagguugcagugagc

SEQ ID NO: 879727 - RNA, 21 nt, Human
cuaacuuuaaggcugggcaug

SEQ ID NO: 879728 - RNA, 21 nt, Human
cucacacacaccaugucaccc

SEQ ID NO: 879729 - RNA, 22 nt, Human
cucacacacaccaugucacccc

SEQ ID NO: 879730 - RNA, 22 nt, Human
cucacacacuacgcaagguuuc

SEQ ID NO: 879731 - RNA, 24 nt, Human
cucagccuccagaguagcugggac

SEQ ID NO: 879732 - RNA, 23 nt, Human
cuccaaaggccccagaacgcccc

SEQ ID NO: 879733 - RNA, 24 nt, Human
cuccuggccuugugauccggccgc

SEQ ID NO: 879734 - RNA, 21 nt, Human
cucgcucugucacccaggcug

SEQ ID NO: 879735 - RNA, 21 nt, Human
cucggucccugccggcucugc

SEQ ID NO: 879736 - RNA, 24 nt, Human
cugacgccuguaaucccagcacuu

SEQ ID NO: 879737 - RNA, 19 nt, Human
cuggaaaggcuagaucgua

SEQ ID NO: 879738 - RNA, 26 nt, Human
cugucucaauaaaacaaaaaacaaaa

SEQ ID NO: 879739 - RNA, 19 nt, Human
cuugugugcuugcacaucu

SEQ ID NO: 879740 - RNA, 23 nt, Human
gaaacccaacaacaaaaugcccc

SEQ ID NO: 879741 - RNA, 19 nt, Human
gaacagauauaaaaacaca

SEQ ID NO: 879742 - RNA, 19 nt, Human
gaacagauauaaaaacaca

SEQ ID NO: 879743 - RNA, 22 nt, Human
gaacagauauaaaaacacagau

SEQ ID NO: 879744 - RNA, 22 nt, Human
gaacccggaagacggagguugc

SEQ ID NO: 879745 - RNA, 18 nt, Human
gaacuuuaaagccaggcg

SEQ ID NO: 879746 - RNA, 23 nt, Human
gacagagugggacucugucucaa

SEQ ID NO: 879747 - RNA, 18 nt, Human
gacaggguuucgccauuc

SEQ ID NO: 879748 - RNA, 24 nt, Human
gacgccuguaaucccagcacuuug

SEQ ID NO: 879749 - RNA, 19 nt, Human
gagaacauaggcacugcca

SEQ ID NO: 879750 - RNA, 18 nt, Human
gagagaccaaaacuacag

SEQ ID NO: 879751 - RNA, 18 nt, Human
gaggggaaggagacugag

SEQ ID NO: 879752 - RNA, 19 nt, Human
gagggguugacaagacagg

SEQ ID NO: 879753 - RNA, 21 nt, Human
gagguugcagugagccaagau

SEQ ID NO: 879754 - RNA, 23 nt, Human
gagguugcagugagccaagauug

SEQ ID NO: 879755 - RNA, 25 nt, Human
gaguagcugggacuacaggcgcccg

SEQ ID NO: 879756 - RNA, 21 nt, Human
gaucaccugaggucaggaguu

SEQ ID NO: 879757 - RNA, 24 nt, Human
gaucaccugaggucaggaguucga

SEQ ID NO: 879758 - RNA, 18 nt, Human
gauuacaggcgugagcca

SEQ ID NO: 879759 - RNA, 22 nt, Human
gauuacaggcgugagccaccgc

SEQ ID NO: 879760 - RNA, 22 nt, Human
gauuacaggcgugagccaccgc

SEQ ID NO: 879761 - RNA, 18 nt, Human
gcaaaacaguagaaaucu

SEQ ID NO: 879762 - RNA, 22 nt, Human
gcaagcuccgccucccagguuc

SEQ ID NO: 879763 - RNA, 24 nt, Human
gcacuccagccugggugacagagu

SEQ ID NO: 879764 - RNA, 21 nt, Human
gccacaccaccacaggggaca

SEQ ID NO: 879765 - RNA, 22 nt, Human
gcccagccuuaaaccaaggcuu

SEQ ID NO: 879766 - RNA, 25 nt, Human
gccccagaacgccccggaacgcccc

SEQ ID NO: 879767 - RNA, 22 nt, Human
gccccggaacuuccggaaucac

SEQ ID NO: 879768 - RNA, 23 nt, Human
gcccggcuaauuuuuuguauuuu

SEQ ID NO: 879769 - RNA, 24 nt, Human
gccgccucagccucccaaagugcu

SEQ ID NO: 879770 - RNA, 25 nt, Human
gccucccagguucacaccauucucc

SEQ ID NO: 879771 - RNA, 26 nt, Human
gcucugucacccaggcugggagucca

SEQ ID NO: 879772 - RNA, 22 nt, Human
gcuugaacccggaagacggagg

SEQ ID NO: 879773 - RNA, 22 nt, Human
ggagguugcagugagccaagau

SEQ ID NO: 879774 - RNA, 24 nt, Human
ggagguugcagugagccaagauug

SEQ ID NO: 879775 - RNA, 21 nt, Human
ggcagguggaucaccugaggu

SEQ ID NO: 879776 - RNA, 24 nt, Human
ggccuugugauccggccgccucag

SEQ ID NO: 879777 - RNA, 21 nt, Human
ggcugacgccuguaaucccag

SEQ ID NO: 879778 - RNA, 24 nt, Human
gggcaugguggcugacgccuguaa

SEQ ID NO: 879779 - RNA, 23 nt, Human
ggucucgaucuccuggccuugug

SEQ ID NO: 879780 - RNA, 24 nt, Human
gguggcugacgccuguaaucccag

SEQ ID NO: 879781 - RNA, 18 nt, Human
gguugacaagacaggccc

SEQ ID NO: 879782 - RNA, 19 nt, Human
guccaguggcacauucuca

SEQ ID NO: 879783 - RNA, 24 nt, Human
gucccugccggcucugccucuuuu

SEQ ID NO: 879784 - RNA, 24 nt, Human
gucucgcucugucacccaggcugg

SEQ ID NO: 879785 - RNA, 24 nt, Human
gugacagagugggacucugucuca

SEQ ID NO: 879786 - RNA, 24 nt, Human
gugauccggccgccucagccuccc

SEQ ID NO: 879787 - RNA, 23 nt, Human
guggcagguggaucaccugaggu

SEQ ID NO: 879788 - RNA, 23 nt, Human
guggcugacgccuguaaucccag

SEQ ID NO: 879789 - RNA, 18 nt, Human
uaaaaacacagaugugca

SEQ ID NO: 879790 - RNA, 26 nt, Human
uaaaacaaaaaacaaaaaaaaccuuu

SEQ ID NO: 879791 - RNA, 24 nt, Human
uaaagccaggcgcgguggcucaug

SEQ ID NO: 879792 - RNA, 20 nt, Human
uaaccaccacauaagacuua

SEQ ID NO: 879793 - RNA, 27 nt, Human
uaaccagaaaccucaaggauccgcguc

SEQ ID NO: 879794 - RNA, 20 nt, Human
uaagacuuaaaccccuaaac

SEQ ID NO: 879795 - RNA, 24 nt, Human
uaauuuuuuguauuuuuaguagag

SEQ ID NO: 879796 - RNA, 24 nt, Human
uacaaaaaacuaacuuuaaggcug

SEQ ID NO: 879797 - RNA, 21 nt, Human
uacagaacuagugcaugcggu

SEQ ID NO: 879798 - RNA, 24 nt, Human
uacaggcgugagccaccgcgccca

SEQ ID NO: 879799 - RNA, 21 nt, Human
uacauauucuuaaccgcagca

SEQ ID NO: 879800 - RNA, 20 nt, Human
uagagacaggguuucgccau

SEQ ID NO: 879801 - RNA, 22 nt, Human
uagcaugcaccuguagucccag

SEQ ID NO: 879802 - RNA, 24 nt, Human
uagcaugcaccuguagucccagca

SEQ ID NO: 879803 - RNA, 18 nt, Human
uaggagagaacauaggca

SEQ ID NO: 879804 - RNA, 23 nt, Human
uaggucccuucacccaucacucc

SEQ ID NO: 879805 - RNA, 19 nt, Human
uaguagagacaggguuucg

SEQ ID NO: 879806 - RNA, 26 nt, Human
uaguagagacaggguuucgccauuca

SEQ ID NO: 879807 - RNA, 19 nt, Human
uaucacacacccacacuca

SEQ ID NO: 879808 - RNA, 26 nt, Human
uaucacacacccacacucacacaccc

SEQ ID NO: 879809 - RNA, 23 nt, Human
uauccuuuguugggagacaguuc

SEQ ID NO: 879810 - RNA, 21 nt, Human
ucacaccauucucccgccuca

SEQ ID NO: 879811 - RNA, 21 nt, Human
ucacagagguccaaaagcccc

SEQ ID NO: 879812 - RNA, 20 nt, Human
ucaccugaggucaggaguuc

SEQ ID NO: 879813 - RNA, 22 nt, Human
ucacuccuauuauuggacccca

SEQ ID NO: 879814 - RNA, 25 nt, Human
ucaguucauugcaagcuccgccucc

SEQ ID NO: 879815 - RNA, 21 nt, Human
ucaugcaaaacaguagaaauc

SEQ ID NO: 879816 - RNA, 22 nt, Human
ucaugccuguuacaaaaaacua

SEQ ID NO: 879817 - RNA, 19 nt, Human
ucauugcaagcuccgccuc

SEQ ID NO: 879818 - RNA, 23 nt, Human
ucauugcaagcuccgccucccag

SEQ ID NO: 879819 - RNA, 24 nt, Human
ucauugcaagcuccgccucccagg

SEQ ID NO: 879820 - RNA, 21 nt, Human
uccaaaagccccggaacuucc

SEQ ID NO: 879821 - RNA, 24 nt, Human
uccagaguagcugggacuacaggc

SEQ ID NO: 879822 - RNA, 19 nt, Human
uccagccugggugacagag

SEQ ID NO: 879823 - RNA, 19 nt, Human
uccagccugggugacagag

SEQ ID NO: 879824 - RNA, 24 nt, Human
uccagccugggugacagaguggga

SEQ ID NO: 879825 - RNA, 24 nt, Human
ucccaaagugcugggauuacaggc

SEQ ID NO: 879826 - RNA, 19 nt, Human
ucccacgcuccaaaggccc

SEQ ID NO: 879827 - RNA, 21 nt, Human
ucccagguucacaccauucuc

SEQ ID NO: 879828 - RNA, 20 nt, Human
uccuuggggaaaggugaggg

SEQ ID NO: 879829 - RNA, 19 nt, Human
ucuaugcagguuugagaag

SEQ ID NO: 879830 - RNA, 24 nt, Human
ucucccgccucagccuccagagua

SEQ ID NO: 879831 - RNA, 19 nt, Human
ucucgcucugucacccagg

SEQ ID NO: 879832 - RNA, 23 nt, Human
ucucgcucugucacccaggcugg

SEQ ID NO: 879833 - RNA, 23 nt, Human
ucucgcucugucacccaggcugg

SEQ ID NO: 879834 - RNA, 24 nt, Human
ucucgcucugucacccaggcuggg

SEQ ID NO: 879835 - RNA, 24 nt, Human
ucucgcucugucacccaggcuggg

SEQ ID NO: 879836 - RNA, 25 nt, Human
ucucgcucugucacccaggcuggga

SEQ ID NO: 879837 - RNA, 18 nt, Human
ucugucacccaggcuggg

SEQ ID NO: 879838 - RNA, 18 nt, Human
ugaaaacagaugaugcaa

SEQ ID NO: 879839 - RNA, 19 nt, Human
ugaaaaguccauaaacaca

SEQ ID NO: 879840 - RNA, 24 nt, Human
ugaacccggaagacggagguugca

SEQ ID NO: 879841 - RNA, 23 nt, Human
ugaccaauauggugaaaccccgu

SEQ ID NO: 879842 - RNA, 18 nt, Human
ugagacagagucucgcuc

SEQ ID NO: 879843 - RNA, 22 nt, Human
ugagacagagucucgcucuguc

SEQ ID NO: 879844 - RNA, 24 nt, Human
ugagacaggagaauggcuugaacc

SEQ ID NO: 879845 - RNA, 21 nt, Human
ugcaaaacaguagaaaucuga

SEQ ID NO: 879846 - RNA, 21 nt, Human
ugcaccacugcacuccagccu

SEQ ID NO: 879847 - RNA, 21 nt, Human
ugcaccuguagucccagcaac

SEQ ID NO: 879848 - RNA, 24 nt, Human
ugcaccuguagucccagcaacuug

SEQ ID NO: 879849 - RNA, 18 nt, Human
ugccuaggagagaacaua

SEQ ID NO: 879850 - RNA, 24 nt, Human
ugcugggauuacaggcgugagcca

SEQ ID NO: 879851 - RNA, 18 nt, Human
uggaagguaguggcaggu

SEQ ID NO: 879852 - RNA, 24 nt, Human
uggaucaccugaggucaggaguuc

SEQ ID NO: 879853 - RNA, 26 nt, Human
uggaucaccugaggucaggaguucga

SEQ ID NO: 879854 - RNA, 26 nt, Human
uggcagguggaucaccugaggucagg

SEQ ID NO: 879855 - RNA, 24 nt, Human
uggcugacgccuguaaucccagca

SEQ ID NO: 879856 - RNA, 21 nt, Human
ugggacuacaggcgcccgcca

SEQ ID NO: 879857 - RNA, 22 nt, Human
ugggacuacaggcgcccgccac

SEQ ID NO: 879858 - RNA, 22 nt, Human
ugggacuacaggcgcccgccac

SEQ ID NO: 879859 - RNA, 24 nt, Human
ugggacuacaggcgcccgccacua

SEQ ID NO: 879860 - RNA, 22 nt, Human
ugggauaaccagguaguuuuaa

SEQ ID NO: 879861 - RNA, 18 nt, Human
ugggauuacaggcgugag

SEQ ID NO: 879862 - RNA, 19 nt, Human
ugggauuacaggcgugagc

SEQ ID NO: 879863 - RNA, 21 nt, Human
ugggauuacaggcgugagcca

SEQ ID NO: 879864 - RNA, 22 nt, Human
ugggauuacaggcgugagccac

SEQ ID NO: 879865 - RNA, 23 nt, Human
ugggauuacaggcgugagccacc

SEQ ID NO: 879866 - RNA, 24 nt, Human
ugggauuacaggcgugagccaccg

SEQ ID NO: 879867 - RNA, 21 nt, Human
ugggugacagagugggacucu

SEQ ID NO: 879868 - RNA, 24 nt, Human
ugguggcugacgccuguaauccca

SEQ ID NO: 879869 - RNA, 19 nt, Human
ugguugaaaacagaugaug

SEQ ID NO: 879870 - RNA, 21 nt, Human
ugugagaagaagauggcgagg

SEQ ID NO: 879871 - RNA, 24 nt, Human
ugugauccggccgccucagccucc

SEQ ID NO: 879872 - RNA, 20 nt, Human
uguguauccaagacccaguu

SEQ ID NO: 879873 - RNA, 24 nt, Human
uguuacaaaaaacgaacuuuaaag

SEQ ID NO: 879874 - RNA, 22 nt, Human
uuagcugggcauuguagcaugc

SEQ ID NO: 879875 - RNA, 24 nt, Human
uuaguagagacaggguuucgccau

SEQ ID NO: 879876 - RNA, 24 nt, Human
uugcaagcuccgccucccagguuc

SEQ ID NO: 879877 - RNA, 23 nt, Human
uugcaccacugcacuccagccug

SEQ ID NO: 879878 - RNA, 22 nt, Human
uugcagugagccaagauugcac

SEQ ID NO: 879879 - RNA, 23 nt, Human
uuucucaauuuuccuaucaugca

SEQ ID NO: 879880 - RNA, 20 nt, Human
uuuguugggagacaguucuu

SEQ ID NO: 879881 - RNA, 23 nt, Human
uuuuuaguagagacaggguuucg

SEQ ID NO: 879882 - RNA, 24 nt, Human
uuuuuaguagagacaggguuucgc

SEQ ID NO: 879883 - RNA, 21 nt, Human
uuuuuguauuuuuaguagaga

SEQ ID NO: 879884 - RNA, 24 nt, Human
uuuuuuguauuuuuaguagagaca

SEQ ID NO: 879885 - RNA, 25 nt, Human
uuuuuuuuguuugagacagagucuc

SEQ ID NO: 879886 - RNA, 19 nt, Human
aaacgacagcgaagagcgu

SEQ ID NO: 879887 - RNA, 28 nt, Human
ccggacaguggcggcgccgacacuuccu

SEQ ID NO: 879888 - RNA, 22 nt, Human
cgagaccacaaacgacagcgaa

SEQ ID NO: 879889 - RNA, 18 nt, Human
cgcgagaccacaaacgac

SEQ ID NO: 879890 - RNA, 18 nt, Human
cgcgagaccacaaacgac

SEQ ID NO: 879891 - RNA, 20 nt, Human
cgcgagaccacaaacgacag

SEQ ID NO: 879892 - RNA, 18 nt, Human
gagaccacaaacgacagc

SEQ ID NO: 879893 - RNA, 20 nt, Human
ugcgcgagaccacaaacgaa

SEQ ID NO: 879894 - RNA, 23 nt, Human
uguggccggacaguggcggcgcc

SEQ ID NO: 879895 - RNA, 20 nt, Human
cggaugggggcacccaucuc

SEQ ID NO: 879896 - RNA, 24 nt, Human
gaacccagucuuuauuuugaaaca

SEQ ID NO: 879897 - RNA, 18 nt, Human
gcggggcccaguguccgg

SEQ ID NO: 879898 - RNA, 19 nt, Human
uccugguggcuggaacgug

SEQ ID NO: 879899 - RNA, 24 nt, Human
ucuuuauuuugaaacaauaggugg

SEQ ID NO: 879900 - RNA, 22 nt, Human
uggccaaaggacagugugcgga

SEQ ID NO: 879901 - RNA, 20 nt, Human
uguccgguggccaaaggaca

SEQ ID NO: 879902 - RNA, 22 nt, Human
uugaaacaauagguggccuccu

SEQ ID NO: 879903 - RNA, 22 nt, Human
aaaugauauuaauagaaagucc

SEQ ID NO: 879904 - RNA, 21 nt, Human
aaaugcaaaagcuguaaagcu

SEQ ID NO: 879905 - RNA, 19 nt, Human
aauggcugagaauaaauac

SEQ ID NO: 879906 - RNA, 19 nt, Human
acccugcuacccagagagc

SEQ ID NO: 879907 - RNA, 25 nt, Human
acccugcuacccagagagccgcuaa

SEQ ID NO: 879908 - RNA, 24 nt, Human
acucuguauagaccacaguuauug

SEQ ID NO: 879909 - RNA, 25 nt, Human
agaauacccaaaguggcaacaagga

SEQ ID NO: 879910 - RNA, 19 nt, Human
agaauccgagcaccucucc

SEQ ID NO: 879911 - RNA, 18 nt, Human
agagagccgcuaaaaacc

SEQ ID NO: 879912 - RNA, 18 nt, Human
agcaccucuccgagcccc

SEQ ID NO: 879913 - RNA, 21 nt, Human
aguggcaacaaggaacguuug

SEQ ID NO: 879914 - RNA, 23 nt, Human
caaaagcuguaaagcuaagggca

SEQ ID NO: 879915 - RNA, 19 nt, Human
caagagaaaaucucagaau

SEQ ID NO: 879916 - RNA, 30 nt, Human
caccacccugcuacccagagagccgcuaaa

SEQ ID NO: 879917 - RNA, 23 nt, Human
cacccugcuacccagagagcccu

SEQ ID NO: 879918 - RNA, 20 nt, Human
cagcuacgagaauccgagca

SEQ ID NO: 879919 - RNA, 20 nt, Human
cagucugauuauaaagauac

SEQ ID NO: 879920 - RNA, 22 nt, Human
ccacccugcuacccagagagcc

SEQ ID NO: 879921 - RNA, 27 nt, Human
ccacccugcuacccagagagccgcuaa

SEQ ID NO: 879922 - RNA, 21 nt, Human
cccagagagccgcuaaaaacc

SEQ ID NO: 879923 - RNA, 22 nt, Human
ccccucgcugccgcuaucacac

SEQ ID NO: 879924 - RNA, 19 nt, Human
cgagaauccgagcaccucu

SEQ ID NO: 879925 - RNA, 24 nt, Human
cgcuaucacaccacccugcuaccc

SEQ ID NO: 879926 - RNA, 18 nt, Human
gaaaugcaaaagcuguaa

SEQ ID NO: 879927 - RNA, 19 nt, Human
gagaauccgagcaccucuc

SEQ ID NO: 879928 - RNA, 21 nt, Human
gccccucgcugccgcuaucac

SEQ ID NO: 879929 - RNA, 31 nt, Human
guagguuaaauuacccuauuuuuuauucugg

SEQ ID NO: 879930 - RNA, 23 nt, Human
uauaaagauacauaugcccaaaa

SEQ ID NO: 879931 - RNA, 21 nt, Human
uaucacaccacccugcuaccc

SEQ ID NO: 879932 - RNA, 22 nt, Human
uggcugagaauaaauacaacag

SEQ ID NO: 879933 - RNA, 21 nt, Human
uguaaagcuaagggcaugcaa

SEQ ID NO: 879934 - RNA, 21 nt, Human
uucagaaaaaaucgagcgaau

SEQ ID NO: 879935 - RNA, 26 nt, Human
aaacagaaaacaaaaaucucuuucug

SEQ ID NO: 879936 - RNA, 20 nt, Human
aaaucagaacucccagaagc

SEQ ID NO: 879937 - RNA, 22 nt, Human
aagcaaaagugcuggaccauuc

SEQ ID NO: 879938 - RNA, 18 nt, Human
accuaaaggacugaggaa

SEQ ID NO: 879939 - RNA, 23 nt, Human
aggucaaagccagcaacuaagga

SEQ ID NO: 879940 - RNA, 24 nt, Human
caacauaaaaggucaaagccagca

SEQ ID NO: 879941 - RNA, 18 nt, Human
caccccagguaauacaac

SEQ ID NO: 879942 - RNA, 18 nt, Human
cacuuuucagcuuugacc

SEQ ID NO: 879943 - RNA, 18 nt, Human
caggaagcugccuggguu

SEQ ID NO: 879944 - RNA, 18 nt, Human
cauaaaaggucaaagcca

SEQ ID NO: 879945 - RNA, 19 nt, Human
ccacuuuucagcuuugacc

SEQ ID NO: 879946 - RNA, 21 nt, Human
cccacggcccacuuugaugcu

SEQ ID NO: 879947 - RNA, 25 nt, Human
ccugccucggccaccucgccccgac

SEQ ID NO: 879948 - RNA, 20 nt, Human
cgccucuuccuagggacaag

SEQ ID NO: 879949 - RNA, 20 nt, Human
cugcaccucgaggucuccgc

SEQ ID NO: 879950 - RNA, 25 nt, Human
gaaaucagaacucccagaagcuuuu

SEQ ID NO: 879951 - RNA, 21 nt, Human
gcccacuuugaugcuccaaau

SEQ ID NO: 879952 - RNA, 20 nt, Human
gccucggccaccucgccccg

SEQ ID NO: 879953 - RNA, 18 nt, Human
uaaaacagaaaacaaaaa

SEQ ID NO: 879954 - RNA, 27 nt, Human
uaaaaggucaaagccagcaacuaagga

SEQ ID NO: 879955 - RNA, 22 nt, Human
uaaaggacugaggaaaucagaa

SEQ ID NO: 879956 - RNA, 23 nt, Human
uauggcaguugagaaaauagaug

SEQ ID NO: 879957 - RNA, 19 nt, Human
ucaaagccagcaacuaagg

SEQ ID NO: 879958 - RNA, 22 nt, Human
ucugcaguagacaccccaggua

SEQ ID NO: 879959 - RNA, 18 nt, Human
ucugucagcuuccuccug

SEQ ID NO: 879960 - RNA, 23 nt, Human
ugaaauaucugcaguagacaccc

SEQ ID NO: 879961 - RNA, 18 nt, Human
ugaggaaaucagaacucc

SEQ ID NO: 879962 - RNA, 18 nt, Human
ugccaggaagcugccugg

SEQ ID NO: 879963 - RNA, 20 nt, Human
ugccaggaagcugccugggu

SEQ ID NO: 879964 - RNA, 24 nt, Human
uggcacugccaggaagcugccugg

SEQ ID NO: 879965 - RNA, 23 nt, Human
uuaaaaauuucccgaccuucuga

SEQ ID NO: 879966 - RNA, 23 nt, Human
uuauggguacuccaagcccccua

SEQ ID NO: 879967 - RNA, 22 nt, Human
uucugucagcuuccuccuggcg

SEQ ID NO: 879968 - RNA, 26 nt, Human
uucuucaucauccuuauuugaugaaa

SEQ ID NO: 879969 - RNA, 22 nt, Human
uuuaaaaauuucccgaccuucu

SEQ ID NO: 879970 - RNA, 23 nt, Human
aauaaaaaagugcauagaaaaga

SEQ ID NO: 879971 - RNA, 20 nt, Human
aggcuaggggcaagauggca

SEQ ID NO: 879972 - RNA, 20 nt, Human
aggggcuagggagcccccag

SEQ ID NO: 879973 - RNA, 19 nt, Human
agugcauagaaaagaaggg

SEQ ID NO: 879974 - RNA, 21 nt, Human
cacccugaacaugaggguggg

SEQ ID NO: 879975 - RNA, 18 nt, Human
cagcgacggcagcaggag

SEQ ID NO: 879976 - RNA, 18 nt, Human
cccacauccacccugaac

SEQ ID NO: 879977 - RNA, 19 nt, Human
cccccaggcuaggggcaag

SEQ ID NO: 879978 - RNA, 19 nt, Human
cccccagggcagaaagggg

SEQ ID NO: 879979 - RNA, 19 nt, Human
ccugaacaugagggugggg

SEQ ID NO: 879980 - RNA, 21 nt, Human
ccugggcccccagggcagaaa

SEQ ID NO: 879981 - RNA, 22 nt, Human
cgacggcagcaggaggugugag

SEQ ID NO: 879982 - RNA, 21 nt, Human
gcaugcccacauccacccuga

SEQ ID NO: 879983 - RNA, 24 nt, Human
gcaugcccacauccacccugaaca

SEQ ID NO: 879984 - RNA, 19 nt, Human
gcucugggaggggcuaggg

SEQ ID NO: 879985 - RNA, 23 nt, Human
ggaggcagggcccuugucaccug

SEQ ID NO: 879986 - RNA, 20 nt, Human
ggcaagauggcagcgacggc

SEQ ID NO: 879987 - RNA, 23 nt, Human
ggcagaaagggggcgauugcugg

SEQ ID NO: 879988 - RNA, 23 nt, Human
ggcagcgacggcagcaggaggug

SEQ ID NO: 879989 - RNA, 21 nt, Human
gggcaagauggcagcgacggc

SEQ ID NO: 879990 - RNA, 21 nt, Human
ggggcaagauggcagcgacgg

SEQ ID NO: 879991 - RNA, 18 nt, Human
ggguggaggcagggcccu

SEQ ID NO: 879992 - RNA, 19 nt, Human
ggguggaggcagggcccuu

SEQ ID NO: 879993 - RNA, 23 nt, Human
gugggggugagaugcucugggag

SEQ ID NO: 879994 - RNA, 23 nt, Human
ugagaugcucugggaggggcuag

SEQ ID NO: 879995 - RNA, 24 nt, Human
ugagaugcucugggaggggcuagg

SEQ ID NO: 879996 - RNA, 23 nt, Human
ugagggugggggugagaugcucu

SEQ ID NO: 879997 - RNA, 21 nt, Human
uggcagcgacggcagcaggag

SEQ ID NO: 879998 - RNA, 22 nt, Human
uggcagcgacggcagcaggagg

SEQ ID NO: 879999 - RNA, 19 nt, Human
aaauggcaaugaccaaacc

SEQ ID NO: 880000 - RNA, 18 nt, Human
accaaaccaaauaaaaau

SEQ ID NO: 880001 - RNA, 21 nt, Human
auucugaacaguaauuguggc

SEQ ID NO: 880002 - RNA, 19 nt, Human
ccaaaccaaauaaaaaugg

SEQ ID NO: 880003 - RNA, 25 nt, Human
cccggcuccacacacccccucccca

SEQ ID NO: 880004 - RNA, 21 nt, Human
cuaaugaacaaccaauaaaaa

SEQ ID NO: 880005 - RNA, 22 nt, Human
cuaccagugguagguuuuuuuu

SEQ ID NO: 880006 - RNA, 24 nt, Human
cuccacacacccccuccccaaaca

SEQ ID NO: 880007 - RNA, 25 nt, Human
cuccgcaccuccgcgaacaggcgac

SEQ ID NO: 880008 - RNA, 18 nt, Human
gcaugccagccacagugc

SEQ ID NO: 880009 - RNA, 23 nt, Human
uaauaguucaguguggcauuauu

SEQ ID NO: 880010 - RNA, 23 nt, Human
uacuauggaguccuaugcauugg

SEQ ID NO: 880011 - RNA, 23 nt, Human
uagaaauagcuaccagugguagg

SEQ ID NO: 880012 - RNA, 24 nt, Human
uagguuuuuuuuuuuuuuugcaua

SEQ ID NO: 880013 - RNA, 24 nt, Human
uccccaaacagcagcgcgcagccu

SEQ ID NO: 880014 - RNA, 18 nt, Human
ucuccgcaccuccgcgaa

SEQ ID NO: 880015 - RNA, 25 nt, Human
ucucuaaugaacaaccaauaaaaau

SEQ ID NO: 880016 - RNA, 25 nt, Human
ugaacaaccaauaaaaauacaagau

SEQ ID NO: 880017 - RNA, 21 nt, Human
uggcaaugaccaaaccaaaua

SEQ ID NO: 880018 - RNA, 22 nt, Human
ugguauccaaaacacuggggca

SEQ ID NO: 880019 - RNA, 23 nt, Human
ugguauccaaaacacuggggcau

SEQ ID NO: 880020 - RNA, 25 nt, Human
uuagcuaauaaaagacauucugaac

SEQ ID NO: 880021 - RNA, 20 nt, Human
uuuaaugagaaccuuauugu

SEQ ID NO: 880022 - RNA, 23 nt, Human
aaaggcagccagaugaagugcua

SEQ ID NO: 880023 - RNA, 23 nt, Human
acaaagcaacaagaaaacuaauc

SEQ ID NO: 880024 - RNA, 26 nt, Human
acaaagcaacaagaaaacuaaucaaa

SEQ ID NO: 880025 - RNA, 25 nt, Human
aggcagccagaugaagugcuagaac

SEQ ID NO: 880026 - RNA, 23 nt, Human
aguuucuuguugcguuucuucau

SEQ ID NO: 880027 - RNA, 23 nt, Human
caaaacuaguuguguaccaacua

SEQ ID NO: 880028 - RNA, 23 nt, Human
caaacaaaagagcauauuucaac

SEQ ID NO: 880029 - RNA, 22 nt, Human
caacaaagcaacaagaaaacua

SEQ ID NO: 880030 - RNA, 23 nt, Human
caacaaagcaacaagaaaacuaa

SEQ ID NO: 880031 - RNA, 25 nt, Human
caacaaagcaacaagaaaacuaauc

SEQ ID NO: 880032 - RNA, 26 nt, Human
caacaaagcaacaagaaaacuaauca

SEQ ID NO: 880033 - RNA, 20 nt, Human
caacuauauuaaauucuuga

SEQ ID NO: 880034 - RNA, 20 nt, Human
caacuuguacaauaaaauca

SEQ ID NO: 880035 - RNA, 24 nt, Human
cacguuccgcacaggagucaggag

SEQ ID NO: 880036 - RNA, 18 nt, Human
cagugcaacaaagcaaca

SEQ ID NO: 880037 - RNA, 20 nt, Human
cccaccuccccuccaccgcc

SEQ ID NO: 880038 - RNA, 19 nt, Human
ccccccaccuccccuccac

SEQ ID NO: 880039 - RNA, 26 nt, Human
ccccccaccuccccuccaccgccucc

SEQ ID NO: 880040 - RNA, 21 nt, Human
cccuccaccgccuccuccgcc

SEQ ID NO: 880041 - RNA, 18 nt, Human
ccuccuccgccuccuccu

SEQ ID NO: 880042 - RNA, 19 nt, Human
ccuccuccuccucagcguc

SEQ ID NO: 880043 - RNA, 28 nt, Human
ccuugcugauuccccccaccuccccucc

SEQ ID NO: 880044 - RNA, 24 nt, Human
cucagcgucuucccuccccaccuc

SEQ ID NO: 880045 - RNA, 18 nt, Human
cuccccuccaccgccucc

SEQ ID NO: 880046 - RNA, 23 nt, Human
cuccuccuccuccucagcgucuu

SEQ ID NO: 880047 - RNA, 20 nt, Human
gcaacaaagcaacaagaaaa

SEQ ID NO: 880048 - RNA, 18 nt, Human
gcaagcauacuguaaccc

SEQ ID NO: 880049 - RNA, 18 nt, Human
gcagcaauuaauccuuug

SEQ ID NO: 880050 - RNA, 24 nt, Human
uaaauucuugaguugauaaacaua

SEQ ID NO: 880051 - RNA, 27 nt, Human
uaaauuuucuuuccauguucaaaaaac

SEQ ID NO: 880052 - RNA, 20 nt, Human
uaagggguaggggcauggga

SEQ ID NO: 880053 - RNA, 18 nt, Human
uacaauaaaaucaaguag

SEQ ID NO: 880054 - RNA, 23 nt, Human
uagaacagcaggauaggcagugg

SEQ ID NO: 880055 - RNA, 23 nt, Human
uauuaaauuuucuuuccauguuc

SEQ ID NO: 880056 - RNA, 18 nt, Human
uccccuccaccgccuccu

SEQ ID NO: 880057 - RNA, 22 nt, Human
uccccuccaccgccuccuccgc

SEQ ID NO: 880058 - RNA, 24 nt, Human
uccucagcgucuucccuccccacc

SEQ ID NO: 880059 - RNA, 20 nt, Human
uccuccucagcgucuucccu

SEQ ID NO: 880060 - RNA, 21 nt, Human
ugacuuagagcaagcauacug

SEQ ID NO: 880061 - RNA, 21 nt, Human
ugcguuucuucauagcuguag

SEQ ID NO: 880062 - RNA, 20 nt, Human
uuccauguucaaaaaacugg

SEQ ID NO: 880063 - RNA, 20 nt, Human
uuccccccaccuccccucca

SEQ ID NO: 880064 - RNA, 24 nt, Human
uuccccccaccuccccuccaccgc

SEQ ID NO: 880065 - RNA, 19 nt, Human
uuggaauuugacuuagagc

SEQ ID NO: 880066 - RNA, 22 nt, Human
uuuugcuauuugcaucuccaau

SEQ ID NO: 880067 - RNA, 19 nt, Human
aaaaaaaccgacgagagcg

SEQ ID NO: 880068 - RNA, 23 nt, Human
aaaaaaaccgacgagagcgcagg

SEQ ID NO: 880069 - RNA, 22 nt, Human
aaacaucaacaggccagacccc

SEQ ID NO: 880070 - RNA, 24 nt, Human
aaacaucaacaggccagaccccac

SEQ ID NO: 880071 - RNA, 20 nt, Human
accccacuuccuccagccag

SEQ ID NO: 880072 - RNA, 18 nt, Human
acccccaccugccaccca

SEQ ID NO: 880073 - RNA, 21 nt, Human
accgcaguccggcuccgcggg

SEQ ID NO: 880074 - RNA, 20 nt, Human
agagcaaucugguccuccag

SEQ ID NO: 880075 - RNA, 19 nt, Human
agaugaagagccccuucau

SEQ ID NO: 880076 - RNA, 20 nt, Human
agcaaucugguccuccagga

SEQ ID NO: 880077 - RNA, 23 nt, Human
agccaguggggccccggagucca

SEQ ID NO: 880078 - RNA, 21 nt, Human
aggaggcccugggaggagggg

SEQ ID NO: 880079 - RNA, 24 nt, Human
aggaggcccugggaggagggggac

SEQ ID NO: 880080 - RNA, 21 nt, Human
aggcugcccugcccugcccag

SEQ ID NO: 880081 - RNA, 30 nt, Human
auaauccuaaaaaaaccgacgagagcgcag

SEQ ID NO: 880082 - RNA, 21 nt, Human
caaaggucccccaggaggccc

SEQ ID NO: 880083 - RNA, 18 nt, Human
caacaggccagaccccac

SEQ ID NO: 880084 - RNA, 23 nt, Human
caacaggccagaccccacuuccu

SEQ ID NO: 880085 - RNA, 18 nt, Human
caagucaggugccuagcc

SEQ ID NO: 880086 - RNA, 19 nt, Human
caagucaggugccuagccc

SEQ ID NO: 880087 - RNA, 18 nt, Human
cacccacuccccaacaag

SEQ ID NO: 880088 - RNA, 21 nt, Human
caccccacagccugcucaguc

SEQ ID NO: 880089 - RNA, 21 nt, Human
caccccacagccugcucaguc

SEQ ID NO: 880090 - RNA, 18 nt, Human
caccugccacccacuccc

SEQ ID NO: 880091 - RNA, 20 nt, Human
cacuccccaacaaggguccc

SEQ ID NO: 880092 - RNA, 23 nt, Human
cacugcguggcucgguggagggu

SEQ ID NO: 880093 - RNA, 22 nt, Human
cagcagcccacccccaccugcc

SEQ ID NO: 880094 - RNA, 18 nt, Human
cagcccacccccaccugc

SEQ ID NO: 880095 - RNA, 21 nt, Human
cagucagucaacuccaggcac

SEQ ID NO: 880096 - RNA, 21 nt, Human
cauguaaacaucaacaggccu

SEQ ID NO: 880097 - RNA, 19 nt, Human
ccacccacuccccaacaag

SEQ ID NO: 880098 - RNA, 19 nt, Human
ccagggcccugguccuccc

SEQ ID NO: 880099 - RNA, 22 nt, Human
cccacccccaccugccacccac

SEQ ID NO: 880100 - RNA, 21 nt, Human
cccaccugccacccacucccc

SEQ ID NO: 880101 - RNA, 22 nt, Human
cccaccugccacccacucccca

SEQ ID NO: 880102 - RNA, 20 nt, Human
cccagccaagucaggugccu

SEQ ID NO: 880103 - RNA, 18 nt, Human
ccccacuuccuccagcca

SEQ ID NO: 880104 - RNA, 21 nt, Human
cccccaccugccacccacucc

SEQ ID NO: 880105 - RNA, 22 nt, Human
ccccuucaucuucacacgggug

SEQ ID NO: 880106 - RNA, 23 nt, Human
ccuagcccagacccugcccuggc

SEQ ID NO: 880107 - RNA, 19 nt, Human
ccucagcagcagggcugcu

SEQ ID NO: 880108 - RNA, 18 nt, Human
ccuucaucuucacacggg

SEQ ID NO: 880109 - RNA, 25 nt, Human
cgccccaaccgcaguccggcuccgc

SEQ ID NO: 880110 - RNA, 22 nt, Human
cucuggaagugguggcgacagg

SEQ ID NO: 880111 - RNA, 21 nt, Human
gacaggacccuggcccgcagg

SEQ ID NO: 880112 - RNA, 21 nt, Human
gagcgcaggcagaugaagagc

SEQ ID NO: 880113 - RNA, 22 nt, Human
gaggagggggacagccugggag

SEQ ID NO: 880114 - RNA, 21 nt, Human
gcagcgcgagcccaacuggca

SEQ ID NO: 880115 - RNA, 26 nt, Human
ggcucuucccgccccaaccgcagucc

SEQ ID NO: 880116 - RNA, 19 nt, Human
gggcccugguccuccccag

SEQ ID NO: 880117 - RNA, 18 nt, Human
gggcggggagggcgcggc

SEQ ID NO: 880118 - RNA, 22 nt, Human
uaaaaaaaccgacgagagcgca

SEQ ID NO: 880119 - RNA, 25 nt, Human
uaaaaaaaccgacgagagcgcaggc

SEQ ID NO: 880120 - RNA, 29 nt, Human
uaauccuaaaaaaaccgacgagagcgcag

SEQ ID NO: 880121 - RNA, 24 nt, Human
ucaacaggccagaccccacuuccu

SEQ ID NO: 880122 - RNA, 24 nt, Human
ucagccacggccccggcucuuccc

SEQ ID NO: 880123 - RNA, 24 nt, Human
ucccagacucuuucaauaauccua

SEQ ID NO: 880124 - RNA, 21 nt, Human
ucccaugugggcagcgcgagc

SEQ ID NO: 880125 - RNA, 22 nt, Human
uccccaacaagggucccagacu

SEQ ID NO: 880126 - RNA, 18 nt, Human
ugcccugcccugcccagg

SEQ ID NO: 880127 - RNA, 28 nt, Human
uggcaagguggggcagagcaaucugguc

SEQ ID NO: 880128 - RNA, 23 nt, Human
uggcucgguggagggugacagcc

SEQ ID NO: 880129 - RNA, 19 nt, Human
uggcuuaauacaaaggucc

SEQ ID NO: 880130 - RNA, 22 nt, Human
uggggccaggucccaugugggc

SEQ ID NO: 880131 - RNA, 23 nt, Human
uggggccaggucccaugugggca

SEQ ID NO: 880132 - RNA, 23 nt, Human
uguaaacaucaacaggccagacc

SEQ ID NO: 880133 - RNA, 22 nt, Human
uuccuccagccaguggggcccc

SEQ ID NO: 880134 - RNA, 19 nt, Human
uuucuggcucuggaagugg

SEQ ID NO: 880135 - RNA, 22 nt, Human
aaaaaaaaaaaaaagagagaaa

SEQ ID NO: 880136 - RNA, 19 nt, Human
aaaaaaaaaaaaagagaga

SEQ ID NO: 880137 - RNA, 18 nt, Human
aaaaaaaaaaaagagaga

SEQ ID NO: 880138 - RNA, 23 nt, Human
aaaagagagaaaaauagcacaaa

SEQ ID NO: 880139 - RNA, 19 nt, Human
aaagagagaaaaauagcac

SEQ ID NO: 880140 - RNA, 21 nt, Human
aaagagagaaaaauagcacaa

SEQ ID NO: 880141 - RNA, 18 nt, Human
aacugcuugaacccggga

SEQ ID NO: 880142 - RNA, 21 nt, Human
aagauggugaaacccugucuc

SEQ ID NO: 880143 - RNA, 20 nt, Human
aaguccucagcaaaaagucu

SEQ ID NO: 880144 - RNA, 18 nt, Human
aaugugauucuguucacu

SEQ ID NO: 880145 - RNA, 21 nt, Human
acaacuucuuuggcucguauu

SEQ ID NO: 880146 - RNA, 23 nt, Human
acacccauuuccuuucacauaca

SEQ ID NO: 880147 - RNA, 25 nt, Human
accccaaaacauuuccuaaagucuc

SEQ ID NO: 880148 - RNA, 24 nt, Human
acccugucucuacugaaaauacaa

SEQ ID NO: 880149 - RNA, 22 nt, Human
agaccucugcggucaagacccu

SEQ ID NO: 880150 - RNA, 27 nt, Human
agagaaaaauagcacaauugaguaggg

SEQ ID NO: 880151 - RNA, 18 nt, Human
agagguugcagugagcug

SEQ ID NO: 880152 - RNA, 20 nt, Human
agagguugcagugagcuggc

SEQ ID NO: 880153 - RNA, 24 nt, Human
agcacuuugggaggcugaggccgg

SEQ ID NO: 880154 - RNA, 19 nt, Human
aggaaugguggcaggcacc

SEQ ID NO: 880155 - RNA, 24 nt, Human
aggaaugguggcaggcaccuguaa

SEQ ID NO: 880156 - RNA, 23 nt, Human
aggcagagaacugcuugaacccg

SEQ ID NO: 880157 - RNA, 20 nt, Human
aggcagagguugcagugagc

SEQ ID NO: 880158 - RNA, 24 nt, Human
aggcagagguugcagugagcugag

SEQ ID NO: 880159 - RNA, 20 nt, Human
aggccgguggaucccgaggu

SEQ ID NO: 880160 - RNA, 24 nt, Human
aggccgguggaucccgaggucagg

SEQ ID NO: 880161 - RNA, 23 nt, Human
aggcugaggcagagaacugcuug

SEQ ID NO: 880162 - RNA, 20 nt, Human
auagaguauuccaccacccc

SEQ ID NO: 880163 - RNA, 24 nt, Human
auagaguauuccaccaccccaaaa

SEQ ID NO: 880164 - RNA, 24 nt, Human
augcgcugcacuccagccugggca

SEQ ID NO: 880165 - RNA, 25 nt, Human
caaaaaaaaaaaaaagagagaaaaa

SEQ ID NO: 880166 - RNA, 24 nt, Human
caagauggugaaacccugucucua

SEQ ID NO: 880167 - RNA, 20 nt, Human
caaucacuggacaccaggaa

SEQ ID NO: 880168 - RNA, 23 nt, Human
caccaccccaaaacauuuccuaa

SEQ ID NO: 880169 - RNA, 18 nt, Human
cacccauaaggacacuca

SEQ ID NO: 880170 - RNA, 21 nt, Human
caccuggaaacgcagagaggc

SEQ ID NO: 880171 - RNA, 23 nt, Human
caccuguaaucccagcuacuugg

SEQ ID NO: 880172 - RNA, 24 nt, Human
caccuguaaucccagcuacuuggg

SEQ ID NO: 880173 - RNA, 24 nt, Human
cacgucuguaaucccagcacuuug

SEQ ID NO: 880174 - RNA, 25 nt, Human
cagcacuuugggaggcugaggccgg

SEQ ID NO: 880175 - RNA, 20 nt, Human
cagcauagacugggcgaggg

SEQ ID NO: 880176 - RNA, 24 nt, Human
cagcuacuugggaggcugaggcag

SEQ ID NO: 880177 - RNA, 22 nt, Human
caggagggcccuguucauuucc

SEQ ID NO: 880178 - RNA, 18 nt, Human
caggccaagauggugaaa

SEQ ID NO: 880179 - RNA, 21 nt, Human
ccaagauggugaaacccuguc

SEQ ID NO: 880180 - RNA, 24 nt, Human
ccaccccaaaacauuuccuaaagu

SEQ ID NO: 880181 - RNA, 24 nt, Human
ccaggccaagauggugaaacccug

SEQ ID NO: 880182 - RNA, 21 nt, Human
ccaugcgcugcacuccagccu

SEQ ID NO: 880183 - RNA, 19 nt, Human
cccgaggucaggaguucaa

SEQ ID NO: 880184 - RNA, 25 nt, Human
ccucugaacugccuacauguggcuc

SEQ ID NO: 880185 - RNA, 21 nt, Human
ccucugcggucaaguagaaau

SEQ ID NO: 880186 - RNA, 21 nt, Human
ccuguaaucccagcuacuugg

SEQ ID NO: 880187 - RNA, 21 nt, Human
cgcugcacuccagccugggca

SEQ ID NO: 880188 - RNA, 23 nt, Human
cgcugcacuccagccugggcaac

SEQ ID NO: 880189 - RNA, 24 nt, Human
cgcugcacuccagccugggcaacu

SEQ ID NO: 880190 - RNA, 24 nt, Human
cgggaggcagagguugcagugagc

SEQ ID NO: 880191 - RNA, 24 nt, Human
cgguggaucccgaggucaggaguu

SEQ ID NO: 880192 - RNA, 24 nt, Human
cucaaaaaaaaaaaaaagagagaa

SEQ ID NO: 880193 - RNA, 25 nt, Human
cucaaaaaaaaaaaaaagagagaaa

SEQ ID NO: 880194 - RNA, 24 nt, Human
cucacgucuguaaucccagcacuu

SEQ ID NO: 880195 - RNA, 19 nt, Human
cucagagucacacccauuu

SEQ ID NO: 880196 - RNA, 19 nt, Human
cuccgucucaaaaaaaaaa

SEQ ID NO: 880197 - RNA, 21 nt, Human
cuccugaaucagaauuaaaaa

SEQ ID NO: 880198 - RNA, 18 nt, Human
cugcacuccagccugggc

SEQ ID NO: 880199 - RNA, 20 nt, Human
cugcacuccagccugggcaa

SEQ ID NO: 880200 - RNA, 21 nt, Human
cugcacuccagccugggcaac

SEQ ID NO: 880201 - RNA, 24 nt, Human
cugcuugaacccgggaggcagagg

SEQ ID NO: 880202 - RNA, 21 nt, Human
cuguaaucccagcacuuuggg

SEQ ID NO: 880203 - RNA, 21 nt, Human
cuguaaucccagcuacuuggg

SEQ ID NO: 880204 - RNA, 22 nt, Human
cugucucuacuccaccuggaaa

SEQ ID NO: 880205 - RNA, 25 nt, Human
cugucucuacuccaccuggaaacgc

SEQ ID NO: 880206 - RNA, 19 nt, Human
cuucagaccucugcgguca

SEQ ID NO: 880207 - RNA, 25 nt, Human
gaaucagaauuaaaaaggcuuccuc

SEQ ID NO: 880208 - RNA, 24 nt, Human
gaccaugcgcugcacuccagccug

SEQ ID NO: 880209 - RNA, 22 nt, Human
gagaccaugcgcugcacuccag

SEQ ID NO: 880210 - RNA, 24 nt, Human
gaucccgaggucaggaguucaaga

SEQ ID NO: 880211 - RNA, 24 nt, Human
gcaguauccuggaaaaauaagcac

SEQ ID NO: 880212 - RNA, 24 nt, Human
gccaagauggugaaacccugucuc

SEQ ID NO: 880213 - RNA, 21 nt, Human
gcgcugcacuccagccugggc

SEQ ID NO: 880214 - RNA, 24 nt, Human
gcgcugcacuccagccugggcaac

SEQ ID NO: 880215 - RNA, 24 nt, Human
ggcaccuguaaucccagcuacuug

SEQ ID NO: 880216 - RNA, 23 nt, Human
ggcacgguggcucacgucuguaa

SEQ ID NO: 880217 - RNA, 19 nt, Human
ggccaagauggugaaaccc

SEQ ID NO: 880218 - RNA, 21 nt, Human
ggccgggcacgguggcucacg

SEQ ID NO: 880219 - RNA, 24 nt, Human
gguggcaggcaccuguaaucccag

SEQ ID NO: 880220 - RNA, 23 nt, Human
gguggcucacgucuguaauccca

SEQ ID NO: 880221 - RNA, 24 nt, Human
gguggcucacgucuguaaucccag

SEQ ID NO: 880222 - RNA, 20 nt, Human
gucucaaaaaaaaaaaaaag

SEQ ID NO: 880223 - RNA, 21 nt, Human
gugaaacccugucucuacuga

SEQ ID NO: 880224 - RNA, 33 nt, Human
gugauucuguucacuguucucuucucaccccac

SEQ ID NO: 880225 - RNA, 23 nt, Human
guggaucccgaggucaggaguuc

SEQ ID NO: 880226 - RNA, 19 nt, Human
guucacuguucucuucuca

SEQ ID NO: 880227 - RNA, 19 nt, Human
guugcagugagcugagacc

SEQ ID NO: 880228 - RNA, 26 nt, Human
uaaaaaggcuuccucagagucacacc

SEQ ID NO: 880229 - RNA, 21 nt, Human
uacuccaccuggaaacgcaga

SEQ ID NO: 880230 - RNA, 24 nt, Human
uagcuggaacaacuucuuuggcuc

SEQ ID NO: 880231 - RNA, 22 nt, Human
uagggccccuuccaaucuucag

SEQ ID NO: 880232 - RNA, 21 nt, Human
uaguucuggaucacagaaccu

SEQ ID NO: 880233 - RNA, 19 nt, Human
uauuccaccaccccaaaac

SEQ ID NO: 880234 - RNA, 18 nt, Human
ucagccaggccaagaugg

SEQ ID NO: 880235 - RNA, 24 nt, Human
ucccagcaacucuagcuggaacaa

SEQ ID NO: 880236 - RNA, 24 nt, Human
ucccgaggucaggaguucaagauc

SEQ ID NO: 880237 - RNA, 22 nt, Human
uccgucucaaaaaaaaaaaaaa

SEQ ID NO: 880238 - RNA, 23 nt, Human
uccgucucaaaaaaaaaaaaaag

SEQ ID NO: 880239 - RNA, 21 nt, Human
ucucuacccauuacugucucu

SEQ ID NO: 880240 - RNA, 21 nt, Human
ucucuacugaaaauacaaaaa

SEQ ID NO: 880241 - RNA, 18 nt, Human
ucucuugcacccauaagg

SEQ ID NO: 880242 - RNA, 19 nt, Human
ucugaacugccuacaugug

SEQ ID NO: 880243 - RNA, 21 nt, Human
ugaaaauacaaaaauuagcca

SEQ ID NO: 880244 - RNA, 23 nt, Human
ugaggcagagaacugcuugaacc

SEQ ID NO: 880245 - RNA, 24 nt, Human
ugaggcagagaacugcuugaaccc

SEQ ID NO: 880246 - RNA, 24 nt, Human
ugaggccgguggaucccgagguca

SEQ ID NO: 880247 - RNA, 18 nt, Human
ugaguagggccccuucca

SEQ ID NO: 880248 - RNA, 23 nt, Human
ugcaguauccuggaaaaauaagc

SEQ ID NO: 880249 - RNA, 22 nt, Human
ugcgcugcacuccagccugggc

SEQ ID NO: 880250 - RNA, 22 nt, Human
uggaaaaauaagcacaggaggg

SEQ ID NO: 880251 - RNA, 18 nt, Human
uggaaacgcagagaggca

SEQ ID NO: 880252 - RNA, 22 nt, Human
uggaacaaaaucaaguggcauc

SEQ ID NO: 880253 - RNA, 22 nt, Human
uggaacaacuucuuuggcucgu

SEQ ID NO: 880254 - RNA, 19 nt, Human
uggacugacugcccaucag

SEQ ID NO: 880255 - RNA, 22 nt, Human
uggaucccgaggucaggaguuc

SEQ ID NO: 880256 - RNA, 22 nt, Human
uggcucacgucuguaaucccag

SEQ ID NO: 880257 - RNA, 24 nt, Human
uggcucacgucuguaaucccagca

SEQ ID NO: 880258 - RNA, 19 nt, Human
ugggaggcugaggcagaga

SEQ ID NO: 880259 - RNA, 24 nt, Human
ugguggcaggcaccuguaauccca

SEQ ID NO: 880260 - RNA, 24 nt, Human
uguccuguagagaaauagcaggau

SEQ ID NO: 880261 - RNA, 19 nt, Human
uucaagaucagccaggcca

SEQ ID NO: 880262 - RNA, 18 nt, Human
uugcagugagcugagacc

SEQ ID NO: 880263 - RNA, 21 nt, Human
uugcagugagcugagaccaug

SEQ ID NO: 880264 - RNA, 24 nt, Human
uugcagugagcugagaccaugcgc

SEQ ID NO: 880265 - RNA, 18 nt, Human
uugggaggcugaggcaga

SEQ ID NO: 880266 - RNA, 18 nt, Human
uuuuuuuuuuuuagaguc

SEQ ID NO: 880267 - RNA, 30 nt, Human
aaaaaaaaaaaaacacaauauaugagaaga

SEQ ID NO: 880268 - RNA, 28 nt, Human
aaaaaaaaaaacacaauauaugagaaga

SEQ ID NO: 880269 - RNA, 22 nt, Human
aaaaaaaaaacacaauauauga

SEQ ID NO: 880270 - RNA, 24 nt, Human
aaaaaaaaaacacaauauaugaga

SEQ ID NO: 880271 - RNA, 20 nt, Human
aaaaauuuacaaaaaacuaa

SEQ ID NO: 880272 - RNA, 23 nt, Human
aaacacaauauaugagaagaugc

SEQ ID NO: 880273 - RNA, 19 nt, Human
aaauaucacuccacugagc

SEQ ID NO: 880274 - RNA, 22 nt, Human
aaggcauagagaaaaaguugga

SEQ ID NO: 880275 - RNA, 18 nt, Human
aauuuucuucuuaaaaag

SEQ ID NO: 880276 - RNA, 19 nt, Human
acaaaaaacuaaaguuucu

SEQ ID NO: 880277 - RNA, 22 nt, Human
acaaauccaaguaacaacuuua

SEQ ID NO: 880278 - RNA, 24 nt, Human
acaguaaaacaacaggcauccaga

SEQ ID NO: 880279 - RNA, 22 nt, Human
accccacucccaagugccauaa

SEQ ID NO: 880280 - RNA, 19 nt, Human
acugcaguuuuuaaaaauu

SEQ ID NO: 880281 - RNA, 21 nt, Human
agaagaugcaaaggaaaggca

SEQ ID NO: 880282 - RNA, 19 nt, Human
agaugcaaaggaaaggcag

SEQ ID NO: 880283 - RNA, 21 nt, Human
auacagaaaaaacauuuaucc

SEQ ID NO: 880284 - RNA, 19 nt, Human
auagaaacaauuuucuucu

SEQ ID NO: 880285 - RNA, 18 nt, Human
aucacugguaaaccaagc

SEQ ID NO: 880286 - RNA, 23 nt, Human
augaaacaugguaaaaaguagug

SEQ ID NO: 880287 - RNA, 19 nt, Human
caaagcaacuauuaacaac

SEQ ID NO: 880288 - RNA, 20 nt, Human
cacaauauaugagaagaugc

SEQ ID NO: 880289 - RNA, 21 nt, Human
caccaaacaggcaauacaacu

SEQ ID NO: 880290 - RNA, 22 nt, Human
caccaacaagagagauuaauca

SEQ ID NO: 880291 - RNA, 22 nt, Human
caccggcggccgggcgcgcggc

SEQ ID NO: 880292 - RNA, 22 nt, Human
cacuguggaaagagacccugaa

SEQ ID NO: 880293 - RNA, 27 nt, Human
cagaaaaaacauuuauccacuguggaa

SEQ ID NO: 880294 - RNA, 18 nt, Human
cagaaaugugaauuuaug

SEQ ID NO: 880295 - RNA, 23 nt, Human
caguaaaacaacaggcauccaga

SEQ ID NO: 880296 - RNA, 25 nt, Human
cauuacuaggaaacaggcaauauca

SEQ ID NO: 880297 - RNA, 26 nt, Human
ccagcagauggccaucacaacaauac

SEQ ID NO: 880298 - RNA, 23 nt, Human
ccuuuauacuuucacaguaauua

SEQ ID NO: 880299 - RNA, 19 nt, Human
cgcggcccucaugggcuug

SEQ ID NO: 880300 - RNA, 21 nt, Human
cuaaaggcaagccuauuucau

SEQ ID NO: 880301 - RNA, 20 nt, Human
cucaccccacucccaagugc

SEQ ID NO: 880302 - RNA, 18 nt, Human
gaagagaauguggcaaag

SEQ ID NO: 880303 - RNA, 22 nt, Human
gaauguugacugcuugcugcaa

SEQ ID NO: 880304 - RNA, 23 nt, Human
gcugcaaaaauuuacaacaugaa

SEQ ID NO: 880305 - RNA, 22 nt, Human
ggaaacaggcaauaucagcacc

SEQ ID NO: 880306 - RNA, 21 nt, Human
ggaaagagacccugaagagaa

SEQ ID NO: 880307 - RNA, 23 nt, Human
guaaaccaagcuaggucaaguau

SEQ ID NO: 880308 - RNA, 20 nt, Human
guaguaaaaucuguaaaauu

SEQ ID NO: 880309 - RNA, 21 nt, Human
gugaggcagaaaauuccagaa

SEQ ID NO: 880310 - RNA, 21 nt, Human
gugcaguuauuuuuuuucuuu

SEQ ID NO: 880311 - RNA, 19 nt, Human
uaaaaaagaaccauguuau

SEQ ID NO: 880312 - RNA, 22 nt, Human
uaaaacaacaggcauccagaug

SEQ ID NO: 880313 - RNA, 21 nt, Human
uaagagguuggcagaaaaguu

SEQ ID NO: 880314 - RNA, 24 nt, Human
uacacaguaaaacaacaggcaucc

SEQ ID NO: 880315 - RNA, 18 nt, Human
uacagcacaauuuuuaca

SEQ ID NO: 880316 - RNA, 20 nt, Human
uacagcacaauuuuuacauu

SEQ ID NO: 880317 - RNA, 25 nt, Human
uaccuugccuauuuaacucgccagc

SEQ ID NO: 880318 - RNA, 24 nt, Human
ucaccccacucccaagugccauaa

SEQ ID NO: 880319 - RNA, 19 nt, Human
ucagaagagguauaauguu

SEQ ID NO: 880320 - RNA, 19 nt, Human
uccucgggggccaggagcu

SEQ ID NO: 880321 - RNA, 22 nt, Human
ucuaggaaaaaaaaaaaaaaac

SEQ ID NO: 880322 - RNA, 24 nt, Human
ucuaggaaaaaaaaaaaaaaacac

SEQ ID NO: 880323 - RNA, 22 nt, Human
ucucaccccacucccaagugcc

SEQ ID NO: 880324 - RNA, 23 nt, Human
ucucaccccacucccaagugcca

SEQ ID NO: 880325 - RNA, 21 nt, Human
ucuguccaugauucuuuaccu

SEQ ID NO: 880326 - RNA, 18 nt, Human
uggaaagagacccugaag

SEQ ID NO: 880327 - RNA, 19 nt, Human
uggcaaaggcauagagaaa

SEQ ID NO: 880328 - RNA, 26 nt, Human
ugggaaaguaauagaaacaauuuucu

SEQ ID NO: 880329 - RNA, 24 nt, Human
uguaaguucuguccaugauucuuu

SEQ ID NO: 880330 - RNA, 22 nt, Human
ugugcaauguuuagcucucacc

SEQ ID NO: 880331 - RNA, 22 nt, Human
uuaaaacaccaacaagagagau

SEQ ID NO: 880332 - RNA, 21 nt, Human
uuaaaugaauccacaaaguua

SEQ ID NO: 880333 - RNA, 20 nt, Human
uuagcucucaccccacuccc

SEQ ID NO: 880334 - RNA, 21 nt, Human
uucaaaagauauaaagucagu

SEQ ID NO: 880335 - RNA, 22 nt, Human
uucaaaagauauaaagucagug

SEQ ID NO: 880336 - RNA, 23 nt, Human
uuuaaaauaaauaucaaacugac

SEQ ID NO: 880337 - RNA, 21 nt, Human
uuugguugguguuaucacugg

SEQ ID NO: 880338 - RNA, 24 nt, Human
acacugggucgccgcuagcugcac

SEQ ID NO: 880339 - RNA, 23 nt, Human
agauacuggaagacaaugcaccu

SEQ ID NO: 880340 - RNA, 18 nt, Human
agcagcgggugggcgugg

SEQ ID NO: 880341 - RNA, 23 nt, Human
aggcaggcuuggcaugguuggcc

SEQ ID NO: 880342 - RNA, 18 nt, Human
aguugauugucucuacag

SEQ ID NO: 880343 - RNA, 18 nt, Human
augcaccuugaagggugg

SEQ ID NO: 880344 - RNA, 19 nt, Human
augcaccuugaaggguggg

SEQ ID NO: 880345 - RNA, 24 nt, Human
cacccuaggccaggcgcagaggcc

SEQ ID NO: 880346 - RNA, 23 nt, Human
cacugggucgccgcuagcugcac

SEQ ID NO: 880347 - RNA, 19 nt, Human
cagaguugugacgggggca

SEQ ID NO: 880348 - RNA, 18 nt, Human
cagcgcggcagggccuug

SEQ ID NO: 880349 - RNA, 19 nt, Human
cccaucagcagggcucugg

SEQ ID NO: 880350 - RNA, 19 nt, Human
ccuccgagcagcggguggg

SEQ ID NO: 880351 - RNA, 21 nt, Human
ccuccgagcagcgggugggcg

SEQ ID NO: 880352 - RNA, 19 nt, Human
cgcuagcugcaccuucgca

SEQ ID NO: 880353 - RNA, 19 nt, Human
cuacagaguugugacgggg

SEQ ID NO: 880354 - RNA, 18 nt, Human
cugaagcuguagauacug

SEQ ID NO: 880355 - RNA, 21 nt, Human
cugcacccuaggccaggcgca

SEQ ID NO: 880356 - RNA, 18 nt, Human
gcaugguuggccggggcg

SEQ ID NO: 880357 - RNA, 20 nt, Human
ggcagguggcugcacccuag

SEQ ID NO: 880358 - RNA, 23 nt, Human
ucagcagggcucuggacgggaga

SEQ ID NO: 880359 - RNA, 19 nt, Human
ucccugggugucaggcagg

SEQ ID NO: 880360 - RNA, 24 nt, Human
ucccugggugucaggcagguggcu

SEQ ID NO: 880361 - RNA, 24 nt, Human
ucucuacagaguugugacgggggc

SEQ ID NO: 880362 - RNA, 21 nt, Human
ugaaagcauuuacuuagcuca

SEQ ID NO: 880363 - RNA, 24 nt, Human
ugaaagcauuuacuuagcucaagu

SEQ ID NO: 880364 - RNA, 20 nt, Human
uggcaugguuggccggggcg

SEQ ID NO: 880365 - RNA, 21 nt, Human
uggcaugguuggccggggcgg

SEQ ID NO: 880366 - RNA, 20 nt, Human
ugugaagggggcuccggucc

SEQ ID NO: 880367 - RNA, 19 nt, Human
ugugacgggggcacugagc

SEQ ID NO: 880368 - RNA, 21 nt, Human
uuuuuugaaagcauuuacuua

SEQ ID NO: 880369 - RNA, 18 nt, Human
uuuuuuuuuuuuuuuuug

SEQ ID NO: 880370 - RNA, 19 nt, Human
aagggccuggcuggccaga

SEQ ID NO: 880371 - RNA, 22 nt, Human
agcagggaaacccaggcuuguu

SEQ ID NO: 880372 - RNA, 23 nt, Human
agccuaggccaaugcacccacaa

SEQ ID NO: 880373 - RNA, 27 nt, Human
agcuguacgaccccagccuagggcccu

SEQ ID NO: 880374 - RNA, 21 nt, Human
agggaguaguuugcccaggac

SEQ ID NO: 880375 - RNA, 21 nt, Human
aguggauagagagggcucugg

SEQ ID NO: 880376 - RNA, 26 nt, Human
cacccacaacuucagcuguacgaccc

SEQ ID NO: 880377 - RNA, 20 nt, Human
cacccugggcacagccccca

SEQ ID NO: 880378 - RNA, 21 nt, Human
cagagcugccccucagacccu

SEQ ID NO: 880379 - RNA, 18 nt, Human
cagcagggaaacccaggc

SEQ ID NO: 880380 - RNA, 23 nt, Human
cagcccccauaauucccugcccc

SEQ ID NO: 880381 - RNA, 24 nt, Human
caggggcuccuccuggcauggucc

SEQ ID NO: 880382 - RNA, 21 nt, Human
ccacaggggcuccuccuggca

SEQ ID NO: 880383 - RNA, 18 nt, Human
ccagaccaaguggauaga

SEQ ID NO: 880384 - RNA, 19 nt, Human
ccagccaggaguggagcug

SEQ ID NO: 880385 - RNA, 21 nt, Human
cccacagagggugccggguuc

SEQ ID NO: 880386 - RNA, 23 nt, Human
cccaggcuuguugcucacugugu

SEQ ID NO: 880387 - RNA, 20 nt, Human
ccccacgcucagccuaggcc

SEQ ID NO: 880388 - RNA, 18 nt, Human
cccccauaauucccugcc

SEQ ID NO: 880389 - RNA, 20 nt, Human
cccccauaauucccugcccc

SEQ ID NO: 880390 - RNA, 19 nt, Human
ccccucagacccuggugag

SEQ ID NO: 880391 - RNA, 20 nt, Human
cccuaaauccugggucuccg

SEQ ID NO: 880392 - RNA, 22 nt, Human
cccuuaaguagggaguaguuug

SEQ ID NO: 880393 - RNA, 21 nt, Human
ccggauggagccuggccuauu

SEQ ID NO: 880394 - RNA, 21 nt, Human
ccuccggauggagccuggccu

SEQ ID NO: 880395 - RNA, 18 nt, Human
ccugcagcaugugacccu

SEQ ID NO: 880396 - RNA, 21 nt, Human
ccugcagcaugugacccuaaa

SEQ ID NO: 880397 - RNA, 25 nt, Human
ccugccugcagcaugugacccuaaa

SEQ ID NO: 880398 - RNA, 19 nt, Human
cuaggccaaugcacccaca

SEQ ID NO: 880399 - RNA, 22 nt, Human
gaagcagggguccuguagccuu

SEQ ID NO: 880400 - RNA, 24 nt, Human
gacagugggguggggguaggggga

SEQ ID NO: 880401 - RNA, 19 nt, Human
gacccagcugggccacagc

SEQ ID NO: 880402 - RNA, 20 nt, Human
gcagcaugugacccuaaauc

SEQ ID NO: 880403 - RNA, 20 nt, Human
gccuaggccaaugcacccac

SEQ ID NO: 880404 - RNA, 19 nt, Human
gccuuggaggacagugggg

SEQ ID NO: 880405 - RNA, 20 nt, Human
gcuccuccuggcaugguccc

SEQ ID NO: 880406 - RNA, 22 nt, Human
ggacagaaggcuggcagcuggg

SEQ ID NO: 880407 - RNA, 20 nt, Human
gggguggggguagggggaca

SEQ ID NO: 880408 - RNA, 20 nt, Human
guggagcagguuuccugagg

SEQ ID NO: 880409 - RNA, 20 nt, Human
guuccagccaggaguggagc

SEQ ID NO: 880410 - RNA, 21 nt, Human
uagggcccugcuggcccuggu

SEQ ID NO: 880411 - RNA, 22 nt, Human
ucacugugucagaagcaggggu

SEQ ID NO: 880412 - RNA, 19 nt, Human
ucagacccagcugggccac

SEQ ID NO: 880413 - RNA, 19 nt, Human
ucccacagagggugccggg

SEQ ID NO: 880414 - RNA, 21 nt, Human
ucccugccccacgcucagccu

SEQ ID NO: 880415 - RNA, 22 nt, Human
uccugggucuccgaagagaccc

SEQ ID NO: 880416 - RNA, 23 nt, Human
ucucccggaugggggaugagagc

SEQ ID NO: 880417 - RNA, 24 nt, Human
ucugccagcagggaaacccaggcu

SEQ ID NO: 880418 - RNA, 21 nt, Human
ugacaaguggagcagguuucc

SEQ ID NO: 880419 - RNA, 19 nt, Human
ugaggaagggccuggcugg

SEQ ID NO: 880420 - RNA, 20 nt, Human
ugccgugaccacaggggccg

SEQ ID NO: 880421 - RNA, 22 nt, Human
uggacaccacaggaugccguga

SEQ ID NO: 880422 - RNA, 18 nt, Human
ugggguggggguaggggg

SEQ ID NO: 880423 - RNA, 19 nt, Human
ugggguggggguaggggga

SEQ ID NO: 880424 - RNA, 24 nt, Human
ugggguggggguagggggacaucu

SEQ ID NO: 880425 - RNA, 20 nt, Human
ugugguaccucauggacacc

SEQ ID NO: 880426 - RNA, 18 nt, Human
uugcucacugugucagaa

SEQ ID NO: 880427 - RNA, 23 nt, Human
uuggaggacaguggggugggggu

SEQ ID NO: 880428 - RNA, 18 nt, Human
aaaaagccagggacuggu

SEQ ID NO: 880429 - RNA, 18 nt, Human
aaaaagccagggacuggu

SEQ ID NO: 880430 - RNA, 19 nt, Human
aacugagccaggggguccu

SEQ ID NO: 880431 - RNA, 19 nt, Human
aacugagccaggggguccu

SEQ ID NO: 880432 - RNA, 22 nt, Human
aagggccucugagguuggagac

SEQ ID NO: 880433 - RNA, 22 nt, Human
aagggccucugagguuggagac

SEQ ID NO: 880434 - RNA, 20 nt, Human
acucagaggcuucuaagagg

SEQ ID NO: 880435 - RNA, 20 nt, Human
acucagaggcuucuaagagg

SEQ ID NO: 880436 - RNA, 23 nt, Human
acucuguguccugaccccacaaa

SEQ ID NO: 880437 - RNA, 23 nt, Human
acucuguguccugaccccacaaa

SEQ ID NO: 880438 - RNA, 24 nt, Human
agaagagggcggcgucaggauggc

SEQ ID NO: 880439 - RNA, 20 nt, Human
agcccgggcagugccugccc

SEQ ID NO: 880440 - RNA, 20 nt, Human
agcccgggcagugccugccc

SEQ ID NO: 880441 - RNA, 21 nt, Human
agccgaagaaacaaaggccug

SEQ ID NO: 880442 - RNA, 22 nt, Human
aggauagaaguccucggaggaa

SEQ ID NO: 880443 - RNA, 20 nt, Human
aggcagacagacuuccagau

SEQ ID NO: 880444 - RNA, 20 nt, Human
aggcagacagacuuccagau

SEQ ID NO: 880445 - RNA, 20 nt, Human
aggcccccugcccggcacag

SEQ ID NO: 880446 - RNA, 19 nt, Human
agggaagaagagggcggcg

SEQ ID NO: 880447 - RNA, 19 nt, Human
caaagggccucugagguug

SEQ ID NO: 880448 - RNA, 19 nt, Human
caaagggccucugagguug

SEQ ID NO: 880449 - RNA, 25 nt, Human
cacccccaccuccauguggugggga

SEQ ID NO: 880450 - RNA, 25 nt, Human
cacccccaccuccauguggugggga

SEQ ID NO: 880451 - RNA, 21 nt, Human
cagcccauccagggcagcucg

SEQ ID NO: 880452 - RNA, 24 nt, Human
caggcccccugcccggcacagcug

SEQ ID NO: 880453 - RNA, 22 nt, Human
caguagcggucaucucggaaga

SEQ ID NO: 880454 - RNA, 21 nt, Human
cauccagggcagcucgguggc

SEQ ID NO: 880455 - RNA, 24 nt, Human
ccaccaguuucugaggugaggagg

SEQ ID NO: 880456 - RNA, 24 nt, Human
ccaccaguuucugaggugaggagg

SEQ ID NO: 880457 - RNA, 25 nt, Human
ccagccccagacaaaaagccaggga

SEQ ID NO: 880458 - RNA, 25 nt, Human
ccagccccagacaaaaagccaggga

SEQ ID NO: 880459 - RNA, 22 nt, Human
cccagugcuguuaccucuugaa

SEQ ID NO: 880460 - RNA, 22 nt, Human
cccagugcuguuaccucuugaa

SEQ ID NO: 880461 - RNA, 21 nt, Human
ccccggaaccuccagcaucga

SEQ ID NO: 880462 - RNA, 19 nt, Human
cccggggaugggacugcuc

SEQ ID NO: 880463 - RNA, 19 nt, Human
cccggggaugggacugcuc

SEQ ID NO: 880464 - RNA, 24 nt, Human
ccggcagucagccgcgcccgggac

SEQ ID NO: 880465 - RNA, 24 nt, Human
ccggcagucagccgcgcccgggac

SEQ ID NO: 880466 - RNA, 18 nt, Human
ccuccagcaucgaccccc

SEQ ID NO: 880467 - RNA, 21 nt, Human
ccuccgcugcccuucgccggg

SEQ ID NO: 880468 - RNA, 21 nt, Human
ccuccgcugcccuucgccggg

SEQ ID NO: 880469 - RNA, 20 nt, Human
ccuccggugcagcccggcuc

SEQ ID NO: 880470 - RNA, 20 nt, Human
ccuccggugcagcccggcuc

SEQ ID NO: 880471 - RNA, 24 nt, Human
ccugcaucagucucccucccacuc

SEQ ID NO: 880472 - RNA, 26 nt, Human
ccugcccgcggguccgccggccccgg

SEQ ID NO: 880473 - RNA, 19 nt, Human
ccuggggguggggccucug

SEQ ID NO: 880474 - RNA, 23 nt, Human
ccuucauccccauccaugcuucc

SEQ ID NO: 880475 - RNA, 23 nt, Human
ccuuuagccgaagaaacaaaggc

SEQ ID NO: 880476 - RNA, 23 nt, Human
ccuuuagccgaagaaacaaaggc

SEQ ID NO: 880477 - RNA, 19 nt, Human
cgaagaaacaaaggccugg

SEQ ID NO: 880478 - RNA, 20 nt, Human
cgcacggagagggacugucc

SEQ ID NO: 880479 - RNA, 20 nt, Human
cgcacggagagggacugucc

SEQ ID NO: 880480 - RNA, 25 nt, Human
cgccagugcccuagcugcgcgcucu

SEQ ID NO: 880481 - RNA, 22 nt, Human
cgcccgggaccccggggauggg

SEQ ID NO: 880482 - RNA, 22 nt, Human
cgcccgggaccccggggauggg

SEQ ID NO: 880483 - RNA, 26 nt, Human
cgggagccggccagacgucguccagc

SEQ ID NO: 880484 - RNA, 19 nt, Human
cgggguuucgccagugccc

SEQ ID NO: 880485 - RNA, 19 nt, Human
cgggguuucgccagugccc

SEQ ID NO: 880486 - RNA, 24 nt, Human
cgucaggauggcggggcaggcccc

SEQ ID NO: 880487 - RNA, 22 nt, Human
cuccccaguccugcagacuucg

SEQ ID NO: 880488 - RNA, 19 nt, Human
cucucggcccaccagcuga

SEQ ID NO: 880489 - RNA, 19 nt, Human
cucucggcccaccagcuga

SEQ ID NO: 880490 - RNA, 23 nt, Human
cugaccccacaaagggccucuga

SEQ ID NO: 880491 - RNA, 23 nt, Human
cugaccccacaaagggccucuga

SEQ ID NO: 880492 - RNA, 21 nt, Human
cugaccuccucagggaugccu

SEQ ID NO: 880493 - RNA, 22 nt, Human
cugaccuccucagggaugccuc

SEQ ID NO: 880494 - RNA, 23 nt, Human
cugcaucagucucccucccacuc

SEQ ID NO: 880495 - RNA, 22 nt, Human
cugcauucuucaaggaacaaag

SEQ ID NO: 880496 - RNA, 22 nt, Human
cugcauucuucaaggaacaaag

SEQ ID NO: 880497 - RNA, 22 nt, Human
cugcccggucuucugcagaggg

SEQ ID NO: 880498 - RNA, 22 nt, Human
cugcccggucuucugcagaggg

SEQ ID NO: 880499 - RNA, 21 nt, Human
cugcgcgcucugggccgcucc

SEQ ID NO: 880500 - RNA, 22 nt, Human
cuucauccccauccaugcuucc

SEQ ID NO: 880501 - RNA, 21 nt, Human
gaaccuccagcaucgaccccc

SEQ ID NO: 880502 - RNA, 18 nt, Human
gaagaaacaaaggccugg

SEQ ID NO: 880503 - RNA, 18 nt, Human
gaggaaagggccaaggga

SEQ ID NO: 880504 - RNA, 18 nt, Human
gaggaaagggccaaggga

SEQ ID NO: 880505 - RNA, 23 nt, Human
gaggauagaaguccucggaggaa

SEQ ID NO: 880506 - RNA, 19 nt, Human
gccagugcccuagcugcgc

SEQ ID NO: 880507 - RNA, 24 nt, Human
gccagugcccuagcugcgcgcucu

SEQ ID NO: 880508 - RNA, 23 nt, Human
gccccggaaccuccagcaucgac

SEQ ID NO: 880509 - RNA, 21 nt, Human
gccgcccccgcacggagaggg

SEQ ID NO: 880510 - RNA, 21 nt, Human
gccgcccccgcacggagaggg

SEQ ID NO: 880511 - RNA, 19 nt, Human
gcgcgcucugggccgcucc

SEQ ID NO: 880512 - RNA, 21 nt, Human
gcucugggccgcuccuccgcu

SEQ ID NO: 880513 - RNA, 21 nt, Human
gcucugggccgcuccuccgcu

SEQ ID NO: 880514 - RNA, 24 nt, Human
ggagcccacgaugguugguauuca

SEQ ID NO: 880515 - RNA, 24 nt, Human
ggagccggccagacgucguccagc

SEQ ID NO: 880516 - RNA, 21 nt, Human
ggccuggggaggauagaaguc

SEQ ID NO: 880517 - RNA, 21 nt, Human
ggccuggggaggauagaaguc

SEQ ID NO: 880518 - RNA, 23 nt, Human
gggaagaagagggcggcgucagg

SEQ ID NO: 880519 - RNA, 22 nt, Human
ggguucugccccgggggugggg

SEQ ID NO: 880520 - RNA, 22 nt, Human
ggguucugccccgggggugggg

SEQ ID NO: 880521 - RNA, 24 nt, Human
gguggcccagcggcccgagguggu

SEQ ID NO: 880522 - RNA, 20 nt, Human
guaggccugcaucagucucc

SEQ ID NO: 880523 - RNA, 20 nt, Human
guaggccugcaucagucucc

SEQ ID NO: 880524 - RNA, 22 nt, Human
uagccgaagaaacaaaggccug

SEQ ID NO: 880525 - RNA, 22 nt, Human
uagcgggcacccuugaagagga

SEQ ID NO: 880526 - RNA, 20 nt, Human
uaguagggcuccacuugcag

SEQ ID NO: 880527 - RNA, 18 nt, Human
uccagcaucgacccccuc

SEQ ID NO: 880528 - RNA, 21 nt, Human
uccaugcuuccuggggguggg

SEQ ID NO: 880529 - RNA, 21 nt, Human
uccaugcuuccuggggguggg

SEQ ID NO: 880530 - RNA, 18 nt, Human
ucccacucuguguccuga

SEQ ID NO: 880531 - RNA, 18 nt, Human
ucccacucuguguccuga

SEQ ID NO: 880532 - RNA, 24 nt, Human
uccuaagauugaucccacccccac

SEQ ID NO: 880533 - RNA, 24 nt, Human
uccuaagauugaucccacccccac

SEQ ID NO: 880534 - RNA, 21 nt, Human
ucgccagugcccuagcugcgc

SEQ ID NO: 880535 - RNA, 25 nt, Human
ucugcugaguuuuucaucccccugc

SEQ ID NO: 880536 - RNA, 25 nt, Human
ucugcugaguuuuucaucccccugc

SEQ ID NO: 880537 - RNA, 20 nt, Human
ugaaaggaacuguaccuuua

SEQ ID NO: 880538 - RNA, 20 nt, Human
ugaaaggaacuguaccuuua

SEQ ID NO: 880539 - RNA, 20 nt, Human
ugacuaaauaugacaccguu

SEQ ID NO: 880540 - RNA, 20 nt, Human
ugacuaaauaugacaccguu

SEQ ID NO: 880541 - RNA, 25 nt, Human
ugagagcaccaccaguuucugaggu

SEQ ID NO: 880542 - RNA, 25 nt, Human
ugagagcaccaccaguuucugaggu

SEQ ID NO: 880543 - RNA, 24 nt, Human
ugcagagggacucagaggcuucua

SEQ ID NO: 880544 - RNA, 24 nt, Human
ugcagagggacucagaggcuucua

SEQ ID NO: 880545 - RNA, 23 nt, Human
ugccuucauccccauccaugcuu

SEQ ID NO: 880546 - RNA, 23 nt, Human
ugccuucauccccauccaugcuu

SEQ ID NO: 880547 - RNA, 18 nt, Human
ugugguggggacagacaa

SEQ ID NO: 880548 - RNA, 18 nt, Human
ugugguggggacagacaa

SEQ ID NO: 880549 - RNA, 20 nt, Human
uucagaacagggcgcucccc

SEQ ID NO: 880550 - RNA, 22 nt, Human
uuccagccccagacaaaaagcc

SEQ ID NO: 880551 - RNA, 22 nt, Human
uuccagccccagacaaaaagcc

SEQ ID NO: 880552 - RNA, 22 nt, Human
uuccugccucucggcccaccag

SEQ ID NO: 880553 - RNA, 23 nt, Human
uuccugccucucggcccaccagg

SEQ ID NO: 880554 - RNA, 18 nt, Human
uuccuggggguggggccu

SEQ ID NO: 880555 - RNA, 18 nt, Human
uuccuggggguggggccu

SEQ ID NO: 880556 - RNA, 21 nt, Human
uuccuggggguggggccucug

SEQ ID NO: 880557 - RNA, 22 nt, Human
uucgccagugcccuagcugcgc

SEQ ID NO: 880558 - RNA, 18 nt, Human
uucgccgggagccggcca

SEQ ID NO: 880559 - RNA, 18 nt, Human
uucgccgggagccggcca

SEQ ID NO: 880560 - RNA, 24 nt, Human
uugaucccacccccaccuccaugu

SEQ ID NO: 880561 - RNA, 24 nt, Human
uugaucccacccccaccuccaugu

SEQ ID NO: 880562 - RNA, 23 nt, Human
uugcaaaauggucucgaauuucu

SEQ ID NO: 880563 - RNA, 23 nt, Human
uugcaaaauggucucgaauuucu

SEQ ID NO: 880564 - RNA, 22 nt, Human
uugcagucccccucgggccagc

SEQ ID NO: 880565 - RNA, 20 nt, Human
uugcuuuuccuaagauugau

SEQ ID NO: 880566 - RNA, 20 nt, Human
uugcuuuuccuaagauugau

SEQ ID NO: 880567 - RNA, 21 nt, Human
uuuuuugcuuuuccuaagauu

SEQ ID NO: 880568 - RNA, 21 nt, Human
uuuuuugcuuuuccuaagauu

SEQ ID NO: 880569 - RNA, 25 nt, Human
aaaaaagaaaaagaaaauaaaagag

SEQ ID NO: 880570 - RNA, 19 nt, Human
aaaaagaaaauaaaagaaa

SEQ ID NO: 880571 - RNA, 20 nt, Human
aaaaagaaaauaaaagaaac

SEQ ID NO: 880572 - RNA, 21 nt, Human
aaaagaaaaaaaaagaaaaag

SEQ ID NO: 880573 - RNA, 23 nt, Human
aaaagaaaaaaaaagaaaaagaa

SEQ ID NO: 880574 - RNA, 23 nt, Human
aaaagaaaaagaaaauaaaagaa

SEQ ID NO: 880575 - RNA, 19 nt, Human
aaacccagcacuuuuggag

SEQ ID NO: 880576 - RNA, 18 nt, Human
aaacuuaagagggcggug

SEQ ID NO: 880577 - RNA, 26 nt, Human
aacaggaacagcaggacaccuccaga

SEQ ID NO: 880578 - RNA, 18 nt, Human
aagaaaaaaaaagaaaaa

SEQ ID NO: 880579 - RNA, 21 nt, Human
aagaaaaagaaaauaaaagaa

SEQ ID NO: 880580 - RNA, 20 nt, Human
aagaccuucccucauuccug

SEQ ID NO: 880581 - RNA, 24 nt, Human
aagauccagagaacacacagagga

SEQ ID NO: 880582 - RNA, 19 nt, Human
aagggccucauaauggagu

SEQ ID NO: 880583 - RNA, 24 nt, Human
aaucgcuggagcccgggaggugga

SEQ ID NO: 880584 - RNA, 19 nt, Human
acagaauaaggccccgucu

SEQ ID NO: 880585 - RNA, 24 nt, Human
acagaauaaggccccgucucaaaa

SEQ ID NO: 880586 - RNA, 18 nt, Human
acaggcgguacuugucag

SEQ ID NO: 880587 - RNA, 18 nt, Human
accauagaguugcugcag

SEQ ID NO: 880588 - RNA, 24 nt, Human
accaugucauugcacuccagccug

SEQ ID NO: 880589 - RNA, 25 nt, Human
acccccaccccaggucuuccuccau

SEQ ID NO: 880590 - RNA, 23 nt, Human
agaaaauaaaagaaacuuaagag

SEQ ID NO: 880591 - RNA, 21 nt, Human
agaacacagccugccggcccc

SEQ ID NO: 880592 - RNA, 21 nt, Human
agacaggcgguacuugucagg

SEQ ID NO: 880593 - RNA, 24 nt, Human
agcacuuuuggagucccagguggg

SEQ ID NO: 880594 - RNA, 23 nt, Human
agcgacccccacccgucuccccc

SEQ ID NO: 880595 - RNA, 22 nt, Human
aggagaaucgcuggagcccggg

SEQ ID NO: 880596 - RNA, 24 nt, Human
aggaucgcuugagcccaagaguuc

SEQ ID NO: 880597 - RNA, 24 nt, Human
aggcaggagaaucgcuggagcccg

SEQ ID NO: 880598 - RNA, 20 nt, Human
aggcugaggcagggaggcag

SEQ ID NO: 880599 - RNA, 25 nt, Human
agggccucauaauggaguugggggc

SEQ ID NO: 880600 - RNA, 20 nt, Human
agguggaggcugcagugacg

SEQ ID NO: 880601 - RNA, 23 nt, Human
aggugggaggaucgcuugagccc

SEQ ID NO: 880602 - RNA, 24 nt, Human
agucccaggugggaggaucgcuug

SEQ ID NO: 880603 - RNA, 26 nt, Human
aucccuugaguccuccauccccccuc

SEQ ID NO: 880604 - RNA, 19 nt, Human
augccuguaaacccagcac

SEQ ID NO: 880605 - RNA, 18 nt, Human
auugcacuccagccugga

SEQ ID NO: 880606 - RNA, 24 nt, Human
auugcacuccagccuggaggacag

SEQ ID NO: 880607 - RNA, 23 nt, Human
cacagagcuccucuagcaggcac

SEQ ID NO: 880608 - RNA, 24 nt, Human
cacccccaccccaggucuuccucc

SEQ ID NO: 880609 - RNA, 18 nt, Human
cacccggccuugcuccca

SEQ ID NO: 880610 - RNA, 19 nt, Human
cacuggaccacagggcuga

SEQ ID NO: 880611 - RNA, 24 nt, Human
cagcacuuuuggagucccaggugg

SEQ ID NO: 880612 - RNA, 20 nt, Human
cagccccagcccugggagca

SEQ ID NO: 880613 - RNA, 22 nt, Human
cagcgacccccacccgucuccc

SEQ ID NO: 880614 - RNA, 19 nt, Human
caggaaggcccugcgagug

SEQ ID NO: 880615 - RNA, 18 nt, Human
caggcagccccagcccug

SEQ ID NO: 880616 - RNA, 19 nt, Human
cagggcugaaaagauccag

SEQ ID NO: 880617 - RNA, 21 nt, Human
cauccccccucccccaucucc

SEQ ID NO: 880618 - RNA, 24 nt, Human
cauccccuccucccagcuacaguc

SEQ ID NO: 880619 - RNA, 26 nt, Human
cauccccuccucccagcuacagucua

SEQ ID NO: 880620 - RNA, 23 nt, Human
caucccuccucaagccauauccc

SEQ ID NO: 880621 - RNA, 18 nt, Human
caucucccuguucacagc

SEQ ID NO: 880622 - RNA, 25 nt, Human
caugccuguaaacccagcacuuuug

SEQ ID NO: 880623 - RNA, 18 nt, Human
cauugcacuccagccugg

SEQ ID NO: 880624 - RNA, 19 nt, Human
cauugcacuccagccugga

SEQ ID NO: 880625 - RNA, 19 nt, Human
cauugcacuccagccugga

SEQ ID NO: 880626 - RNA, 19 nt, Human
cauugcacuccagccugga

SEQ ID NO: 880627 - RNA, 23 nt, Human
cauugcacuccagccuggaggac

SEQ ID NO: 880628 - RNA, 24 nt, Human
cauugcacuccagccuggaggaca

SEQ ID NO: 880629 - RNA, 24 nt, Human
cauugcacuccagccuggaggaca

SEQ ID NO: 880630 - RNA, 22 nt, Human
ccaggcccagggcguggccaaa

SEQ ID NO: 880631 - RNA, 20 nt, Human
ccaggucuuccuccaucucc

SEQ ID NO: 880632 - RNA, 18 nt, Human
cccaagaccuucccucau

SEQ ID NO: 880633 - RNA, 25 nt, Human
cccagcacccggccuugcucccagc

SEQ ID NO: 880634 - RNA, 21 nt, Human
cccaggcugaggcagggaggc

SEQ ID NO: 880635 - RNA, 19 nt, Human
cccaucccuccucaagcca

SEQ ID NO: 880636 - RNA, 19 nt, Human
ccccccucccccaucuccc

SEQ ID NO: 880637 - RNA, 18 nt, Human
ccccuccucucccuaccc

SEQ ID NO: 880638 - RNA, 21 nt, Human
cccggccuugcucccagccuc

SEQ ID NO: 880639 - RNA, 19 nt, Human
cccugguagaagggccuca

SEQ ID NO: 880640 - RNA, 22 nt, Human
ccggccccagcacccggccuug

SEQ ID NO: 880641 - RNA, 20 nt, Human
ccggccuugcucccagccuc

SEQ ID NO: 880642 - RNA, 18 nt, Human
ccucaagccauaucccuu

SEQ ID NO: 880643 - RNA, 22 nt, Human
ccuccagagguggccccagcuc

SEQ ID NO: 880644 - RNA, 19 nt, Human
ccuccaucuccuugggaac

SEQ ID NO: 880645 - RNA, 21 nt, Human
ccucucccuacccuguaccac

SEQ ID NO: 880646 - RNA, 21 nt, Human
ccugggagcauccccuccucc

SEQ ID NO: 880647 - RNA, 19 nt, Human
ccuguggucccagcuacuc

SEQ ID NO: 880648 - RNA, 21 nt, Human
ccuguggucccagcuacucag

SEQ ID NO: 880649 - RNA, 26 nt, Human
cgugccauucucuucaggcagcccca

SEQ ID NO: 880650 - RNA, 19 nt, Human
cucaaaaaaaguaaaaaga

SEQ ID NO: 880651 - RNA, 23 nt, Human
cucaggucccaggcugaggcagg

SEQ ID NO: 880652 - RNA, 18 nt, Human
cucauaauggaguugggg

SEQ ID NO: 880653 - RNA, 24 nt, Human
cucaugccuguaaacccagcacuu

SEQ ID NO: 880654 - RNA, 18 nt, Human
cucccccuugccaccccc

SEQ ID NO: 880655 - RNA, 24 nt, Human
cucccccuugccacccccaucugc

SEQ ID NO: 880656 - RNA, 22 nt, Human
cucugccccuccucucccuacc

SEQ ID NO: 880657 - RNA, 20 nt, Human
cuuccuccaucuccuuggga

SEQ ID NO: 880658 - RNA, 20 nt, Human
gaacacagccugccggcccc

SEQ ID NO: 880659 - RNA, 21 nt, Human
gaacucuccaucaucccuguc

SEQ ID NO: 880660 - RNA, 23 nt, Human
gacagaauaaggccccgucucaa

SEQ ID NO: 880661 - RNA, 21 nt, Human
gaccaugucauugcacuccag

SEQ ID NO: 880662 - RNA, 20 nt, Human
gacccccacccgucuccccc

SEQ ID NO: 880663 - RNA, 23 nt, Human
gagaaucgcuggagcccgggagg

SEQ ID NO: 880664 - RNA, 18 nt, Human
gaggcagggaggcaggag

SEQ ID NO: 880665 - RNA, 19 nt, Human
gagugcagcuggggccaac

SEQ ID NO: 880666 - RNA, 24 nt, Human
gaguugcugcaggccaucgcgguc

SEQ ID NO: 880667 - RNA, 26 nt, Human
gaucgcuugagcccaagaguucaaga

SEQ ID NO: 880668 - RNA, 24 nt, Human
gcacccggccuugcucccagccuc

SEQ ID NO: 880669 - RNA, 22 nt, Human
gccaggagugguggcgcaugcc

SEQ ID NO: 880670 - RNA, 22 nt, Human
gccccagcucucugcccagccc

SEQ ID NO: 880671 - RNA, 24 nt, Human
gcccgggagguggaggcugcagug

SEQ ID NO: 880672 - RNA, 18 nt, Human
gccggccccagcacccgg

SEQ ID NO: 880673 - RNA, 23 nt, Human
gccuggacaacauaaggagaucc

SEQ ID NO: 880674 - RNA, 19 nt, Human
gcugggugugguggcucau

SEQ ID NO: 880675 - RNA, 24 nt, Human
ggaggagcugggugugguggcuca

SEQ ID NO: 880676 - RNA, 19 nt, Human
ggaggcaggagaaucgcug

SEQ ID NO: 880677 - RNA, 23 nt, Human
ggaucgcuugagcccaagaguuc

SEQ ID NO: 880678 - RNA, 22 nt, Human
ggcaaacaggucgguccccucg

SEQ ID NO: 880679 - RNA, 21 nt, Human
ggcucaugccuguaaacccag

SEQ ID NO: 880680 - RNA, 20 nt, Human
gggaggagcuggguguggug

SEQ ID NO: 880681 - RNA, 21 nt, Human
ggggaggagcuggguguggug

SEQ ID NO: 880682 - RNA, 23 nt, Human
ggugugguggcucaugccuguaa

SEQ ID NO: 880683 - RNA, 19 nt, Human
guagaagggccucauaaug

SEQ ID NO: 880684 - RNA, 22 nt, Human
guagaagggccucauaauggag

SEQ ID NO: 880685 - RNA, 24 nt, Human
gucagcgacccccacccgucuccc

SEQ ID NO: 880686 - RNA, 19 nt, Human
gugagggcaggagccuaca

SEQ ID NO: 880687 - RNA, 21 nt, Human
gugcagcuggggccaacagga

SEQ ID NO: 880688 - RNA, 24 nt, Human
gugcagcuggggccaacaggaacc

SEQ ID NO: 880689 - RNA, 19 nt, Human
guggcccaggcccagggcg

SEQ ID NO: 880690 - RNA, 20 nt, Human
guggccccagcucucugccc

SEQ ID NO: 880691 - RNA, 23 nt, Human
guggcucaugccuguaaacccag

SEQ ID NO: 880692 - RNA, 20 nt, Human
guuugagggggaggagcugg

SEQ ID NO: 880693 - RNA, 25 nt, Human
uaaaaagaaaaaaaaagaaaaagaa

SEQ ID NO: 880694 - RNA, 24 nt, Human
uaaaagaaacuuaagagggcggug

SEQ ID NO: 880695 - RNA, 26 nt, Human
uacaucccuugaguccuccauccccc

SEQ ID NO: 880696 - RNA, 20 nt, Human
ucagaacacagccugccggc

SEQ ID NO: 880697 - RNA, 22 nt, Human
ucaugccuguaaacccagcacu

SEQ ID NO: 880698 - RNA, 18 nt, Human
ucauugcacuccagccug

SEQ ID NO: 880699 - RNA, 19 nt, Human
ucauugcacuccagccugg

SEQ ID NO: 880700 - RNA, 21 nt, Human
ucauugcacuccagccuggag

SEQ ID NO: 880701 - RNA, 24 nt, Human
ucauugcacuccagccuggaggac

SEQ ID NO: 880702 - RNA, 23 nt, Human
uccaucuccuugggaacacagag

SEQ ID NO: 880703 - RNA, 19 nt, Human
ucccaggcugaggcaggga

SEQ ID NO: 880704 - RNA, 22 nt, Human
ucccaggcugaggcagggaggc

SEQ ID NO: 880705 - RNA, 19 nt, Human
uccccccucccccaucucc

SEQ ID NO: 880706 - RNA, 22 nt, Human
uccccuggccuugcugcagagg

SEQ ID NO: 880707 - RNA, 19 nt, Human
ucccuacccuguaccaccc

SEQ ID NO: 880708 - RNA, 21 nt, Human
uccuccauccccccuccccca

SEQ ID NO: 880709 - RNA, 19 nt, Human
uccucccagcuacagucua

SEQ ID NO: 880710 - RNA, 21 nt, Human
ucgccgucugcaggagaaagu

SEQ ID NO: 880711 - RNA, 20 nt, Human
ucgcuggagcccgggaggug

SEQ ID NO: 880712 - RNA, 24 nt, Human
ucgcuggagcccgggagguggagg

SEQ ID NO: 880713 - RNA, 23 nt, Human
ucgcuugagcccaagaguucaag

SEQ ID NO: 880714 - RNA, 18 nt, Human
ucugccccuccucucccc

SEQ ID NO: 880715 - RNA, 19 nt, Human
ucuuccuccaucuccuugg

SEQ ID NO: 880716 - RNA, 18 nt, Human
ugacccaagaccuucccu

SEQ ID NO: 880717 - RNA, 19 nt, Human
ugacccaagaccuucccuc

SEQ ID NO: 880718 - RNA, 21 nt, Human
ugagacaggcgguacuuguca

SEQ ID NO: 880719 - RNA, 23 nt, Human
ugagcccaagaguucaagacugg

SEQ ID NO: 880720 - RNA, 22 nt, Human
ugcacuccagccuggaggacag

SEQ ID NO: 880721 - RNA, 23 nt, Human
ugcaggagaaagugggugagagc

SEQ ID NO: 880722 - RNA, 20 nt, Human
ugccccuccucucccuaccc

SEQ ID NO: 880723 - RNA, 24 nt, Human
ugccuguggucccagcuacucagg

SEQ ID NO: 880724 - RNA, 23 nt, Human
ugcuuggggaaaggggccacagg

SEQ ID NO: 880725 - RNA, 19 nt, Human
uggccaggagugguggcgc

SEQ ID NO: 880726 - RNA, 24 nt, Human
uggcgcaugccuguggucccagcu

SEQ ID NO: 880727 - RNA, 21 nt, Human
uggcucaugccuguaaaccca

SEQ ID NO: 880728 - RNA, 24 nt, Human
uggcucaugccuguaaacccagca

SEQ ID NO: 880729 - RNA, 23 nt, Human
ugggagcauccccuccucccagc

SEQ ID NO: 880730 - RNA, 21 nt, Human
uggggccaacaggaacagcag

SEQ ID NO: 880731 - RNA, 23 nt, Human
ugggggcugaggaguggcccagg

SEQ ID NO: 880732 - RNA, 18 nt, Human
ugggugugguggcucaug

SEQ ID NO: 880733 - RNA, 24 nt, Human
ugguggcgcaugccugugguccca

SEQ ID NO: 880734 - RNA, 24 nt, Human
ugguggcucaugccuguaaaccca

SEQ ID NO: 880735 - RNA, 18 nt, Human
uguaccacccccacccca

SEQ ID NO: 880736 - RNA, 21 nt, Human
uugagcccaagaguucaagac

SEQ ID NO: 880737 - RNA, 22 nt, Human
aaaaaccaaaacagagcagaug

SEQ ID NO: 880738 - RNA, 23 nt, Human
aaacagagcagaugugcaagcaa

SEQ ID NO: 880739 - RNA, 19 nt, Human
aagcaagguagcucaugug

SEQ ID NO: 880740 - RNA, 25 nt, Human
acagagcagaugugcaagcaaagau

SEQ ID NO: 880741 - RNA, 18 nt, Human
aguugauuuucauuuccu

SEQ ID NO: 880742 - RNA, 18 nt, Human
caaaacagagcagaugug

SEQ ID NO: 880743 - RNA, 22 nt, Human
ggaaagaaaacugugacugaua

SEQ ID NO: 880744 - RNA, 18 nt, Human
uagaaaaaccaaaacaga

SEQ ID NO: 880745 - RNA, 25 nt, Human
ucaauaaaggugauagucuguuuuu

SEQ ID NO: 880746 - RNA, 19 nt, Human
ugcaagcaaagauaaauga

SEQ ID NO: 880747 - RNA, 24 nt, Human
ugcaagcaaagauaaaugaaaaca

SEQ ID NO: 880748 - RNA, 21 nt, Human
uguguuauauauuuauauaca

SEQ ID NO: 880749 - RNA, 22 nt, Human
uucauuuccuguagaaaaacca

SEQ ID NO: 880750 - RNA, 22 nt, Human
agaaauauggacucuuauguuc

SEQ ID NO: 880751 - RNA, 23 nt, Human
agacaacaucugccagcccuggu

SEQ ID NO: 880752 - RNA, 18 nt, Human
agaggccuagcauuugug

SEQ ID NO: 880753 - RNA, 21 nt, Human
agcauuugugcugugucugug

SEQ ID NO: 880754 - RNA, 20 nt, Human
agccaugcaacagaggccua

SEQ ID NO: 880755 - RNA, 22 nt, Human
auaucgccccuuuucugacaua

SEQ ID NO: 880756 - RNA, 19 nt, Human
augcacucaccccucagca

SEQ ID NO: 880757 - RNA, 21 nt, Human
auuugugcugugucuguggga

SEQ ID NO: 880758 - RNA, 25 nt, Human
caagugucucacacacacuuauuuu

SEQ ID NO: 880759 - RNA, 19 nt, Human
cacucauaugcacucaccc

SEQ ID NO: 880760 - RNA, 25 nt, Human
cagcagcauaucgccccuuuucuga

SEQ ID NO: 880761 - RNA, 25 nt, Human
cagggccacacucauaugcacuccu

SEQ ID NO: 880762 - RNA, 20 nt, Human
cagguagacaacaucugcca

SEQ ID NO: 880763 - RNA, 23 nt, Human
ccacacucauaugcacucacccc

SEQ ID NO: 880764 - RNA, 26 nt, Human
cccaggacccuagaucuuucuucaaa

SEQ ID NO: 880765 - RNA, 23 nt, Human
cucaccccucagcagcauaucgc

SEQ ID NO: 880766 - RNA, 21 nt, Human
cugcuuuggggaagauggcuc

SEQ ID NO: 880767 - RNA, 20 nt, Human
cuuuguacagccaugcaaca

SEQ ID NO: 880768 - RNA, 26 nt, Human
gauggcucaacaguuaguaaucccag

SEQ ID NO: 880769 - RNA, 19 nt, Human
ggggaagauggcucaacag

SEQ ID NO: 880770 - RNA, 19 nt, Human
uauaaaugcaagagaccca

SEQ ID NO: 880771 - RNA, 19 nt, Human
ucuaggccaggacugaggg

SEQ ID NO: 880772 - RNA, 23 nt, Human
ucugacauauaaaugcaagagac

SEQ ID NO: 880773 - RNA, 21 nt, Human
ucugugggaaaggcagucaga

SEQ ID NO: 880774 - RNA, 23 nt, Human
ugacauauaaaugcaagagaccc

SEQ ID NO: 880775 - RNA, 20 nt, Human
ugcacucaccccucagcagc

SEQ ID NO: 880776 - RNA, 20 nt, Human
ugugcugugucugugggaaa

SEQ ID NO: 880777 - RNA, 24 nt, Human
uugugcugugucugugggaaaggc

SEQ ID NO: 880778 - RNA, 25 nt, Human
caccuuuaccuccacuuagugguuu

SEQ ID NO: 880779 - RNA, 18 nt, Human
cccauagauuggcagaca

SEQ ID NO: 880780 - RNA, 22 nt, Human
gacaguuuacaagugucaccag

SEQ ID NO: 880781 - RNA, 18 nt, Human
gaccuucuuccuccacca

SEQ ID NO: 880782 - RNA, 22 nt, Human
gcauggcucuuacacgaccuuc

SEQ ID NO: 880783 - RNA, 21 nt, Human
ucagagauaggcacaccaaaa

SEQ ID NO: 880784 - RNA, 21 nt, Human
ucagugcacucugguucaagc

SEQ ID NO: 880785 - RNA, 23 nt, Human
ucgagcccugacagcggcccaua

SEQ ID NO: 880786 - RNA, 18 nt, Human
uuuuuuuuuuuuuuuuug

SEQ ID NO: 880787 - RNA, 21 nt, Human
uuuuuuuuuuuuuuuuuuggg

SEQ ID NO: 880788 - RNA, 20 nt, Human
aaaaaccacuuccaguauaa

SEQ ID NO: 880789 - RNA, 25 nt, Human
aaaaaccacuuccaguauaauaguc

SEQ ID NO: 880790 - RNA, 25 nt, Human
aaaugucaaaaaauucuagaaagcu

SEQ ID NO: 880791 - RNA, 23 nt, Human
aagaaaccuugaagcaguguuga

SEQ ID NO: 880792 - RNA, 19 nt, Human
aagacguuucuuccacuug

SEQ ID NO: 880793 - RNA, 22 nt, Human
acaaaacccacgaagucugaac

SEQ ID NO: 880794 - RNA, 22 nt, Human
acacacagcacuacaccacaaa

SEQ ID NO: 880795 - RNA, 18 nt, Human
acaccacaaagccaggac

SEQ ID NO: 880796 - RNA, 22 nt, Human
accacacucucauccauacauu

SEQ ID NO: 880797 - RNA, 21 nt, Human
acggcagcggcaggggccucc

SEQ ID NO: 880798 - RNA, 22 nt, Human
acuaacuccauacacacagcac

SEQ ID NO: 880799 - RNA, 19 nt, Human
acuacaccacaaagccagg

SEQ ID NO: 880800 - RNA, 24 nt, Human
acuacaccacaaagccaggacacc

SEQ ID NO: 880801 - RNA, 30 nt, Human
acuccauacacacagcacuacaccacaaaa

SEQ ID NO: 880802 - RNA, 18 nt, Human
acugaauacaaaggacug

SEQ ID NO: 880803 - RNA, 21 nt, Human
acugcacucagaucgccaaca

SEQ ID NO: 880804 - RNA, 23 nt, Human
agaaagaaaaggugcucuacaga

SEQ ID NO: 880805 - RNA, 18 nt, Human
agaagacauuguucugcc

SEQ ID NO: 880806 - RNA, 18 nt, Human
agagaaagcccacaugug

SEQ ID NO: 880807 - RNA, 23 nt, Human
agagauuuuuuuuucaaggagac

SEQ ID NO: 880808 - RNA, 25 nt, Human
agaucgccaacaaagaugggugcaa

SEQ ID NO: 880809 - RNA, 20 nt, Human
agcacuacaccacaaagcca

SEQ ID NO: 880810 - RNA, 22 nt, Human
agcacuacaccacaaagccagg

SEQ ID NO: 880811 - RNA, 18 nt, Human
agcagauuagcaguaaug

SEQ ID NO: 880812 - RNA, 24 nt, Human
agcuuggcaagaagacguuucuuc

SEQ ID NO: 880813 - RNA, 18 nt, Human
aggggcucccgcggcugc

SEQ ID NO: 880814 - RNA, 24 nt, Human
aggguuaaaaaucacauuaaguaa

SEQ ID NO: 880815 - RNA, 20 nt, Human
agguaacugaauacaaagga

SEQ ID NO: 880816 - RNA, 19 nt, Human
agugccugaugcugaauag

SEQ ID NO: 880817 - RNA, 22 nt, Human
aguggcucggacgcucggcccc

SEQ ID NO: 880818 - RNA, 22 nt, Human
aucgcagcuuauugauggcacc

SEQ ID NO: 880819 - RNA, 25 nt, Human
augaucauaacuucaaaugcaacau

SEQ ID NO: 880820 - RNA, 24 nt, Human
auuuuaauaaaaauaaaauauauc

SEQ ID NO: 880821 - RNA, 19 nt, Human
auuuuggauaguuccccuc

SEQ ID NO: 880822 - RNA, 23 nt, Human
caacaaagaugggugcaaacaca

SEQ ID NO: 880823 - RNA, 26 nt, Human
cacacagcacuacaccacaaagccag

SEQ ID NO: 880824 - RNA, 22 nt, Human
cacagcacuacaccacaaagcc

SEQ ID NO: 880825 - RNA, 19 nt, Human
caccacaaagccaggacac

SEQ ID NO: 880826 - RNA, 20 nt, Human
caccacaaagccaggacacc

SEQ ID NO: 880827 - RNA, 22 nt, Human
caccacaaagccaggacaccac

SEQ ID NO: 880828 - RNA, 23 nt, Human
caccacaucacggccaagucuuc

SEQ ID NO: 880829 - RNA, 27 nt, Human
cacuaacuccauacacacagcacuaca

SEQ ID NO: 880830 - RNA, 20 nt, Human
cacuacaccacaaagccagg

SEQ ID NO: 880831 - RNA, 25 nt, Human
cacuacaccacaaagccaggacacc

SEQ ID NO: 880832 - RNA, 20 nt, Human
cagaacucccguagcacagu

SEQ ID NO: 880833 - RNA, 23 nt, Human
cagcagcagcuacgaucuccaac

SEQ ID NO: 880834 - RNA, 21 nt, Human
cagcauuaaggaacaggacau

SEQ ID NO: 880835 - RNA, 23 nt, Human
cagccauguucagaacucccgac

SEQ ID NO: 880836 - RNA, 19 nt, Human
cagcggcaggggccuccgc

SEQ ID NO: 880837 - RNA, 20 nt, Human
cagcggcaggggccuccgcu

SEQ ID NO: 880838 - RNA, 28 nt, Human
cagcuacgaucuccaaccuggacugaaa

SEQ ID NO: 880839 - RNA, 22 nt, Human
cagcugcagccaugcugaauuu

SEQ ID NO: 880840 - RNA, 21 nt, Human
caggaagguguggcugacuga

SEQ ID NO: 880841 - RNA, 21 nt, Human
caggacaccacaucacggcca

SEQ ID NO: 880842 - RNA, 18 nt, Human
caggugugcacuugccac

SEQ ID NO: 880843 - RNA, 23 nt, Human
ccaaaguuuuaauuauucaguuc

SEQ ID NO: 880844 - RNA, 23 nt, Human
ccaaccuggacugaaaaacaaaa

SEQ ID NO: 880845 - RNA, 20 nt, Human
ccacaaagccaggacaccac

SEQ ID NO: 880846 - RNA, 19 nt, Human
ccacacugcacucagaucg

SEQ ID NO: 880847 - RNA, 24 nt, Human
ccauuuaaaagaaaugagcauucu

SEQ ID NO: 880848 - RNA, 20 nt, Human
cccgcggcggcggcggcugc

SEQ ID NO: 880849 - RNA, 18 nt, Human
cccuucaacauauccagg

SEQ ID NO: 880850 - RNA, 21 nt, Human
ccgccgcgcugcugcgcucgc

SEQ ID NO: 880851 - RNA, 23 nt, Human
ccgccgcgcugcugcgcucgcuu

SEQ ID NO: 880852 - RNA, 21 nt, Human
ccgccgcuucgggcugcucgu

SEQ ID NO: 880853 - RNA, 18 nt, Human
ccgcugcacuccgccugu

SEQ ID NO: 880854 - RNA, 22 nt, Human
ccguccucggccgccgccgcuu

SEQ ID NO: 880855 - RNA, 19 nt, Human
ccugugcuacggggcuggg

SEQ ID NO: 880856 - RNA, 19 nt, Human
ccuuccuaaacauccaaga

SEQ ID NO: 880857 - RNA, 22 nt, Human
ccuugaagcaguguugaaauga

SEQ ID NO: 880858 - RNA, 27 nt, Human
cgcugcugcgcucgcuugggcugcggc

SEQ ID NO: 880859 - RNA, 20 nt, Human
cggccccuccguugucuucc

SEQ ID NO: 880860 - RNA, 19 nt, Human
cggccgccgccgcuucggg

SEQ ID NO: 880861 - RNA, 20 nt, Human
cggcugcgcgggcggacgcc

SEQ ID NO: 880862 - RNA, 19 nt, Human
cuaaaaugaacagauacca

SEQ ID NO: 880863 - RNA, 19 nt, Human
cuaaaccacacucucaucc

SEQ ID NO: 880864 - RNA, 19 nt, Human
cuacgaccucacugccaaa

SEQ ID NO: 880865 - RNA, 19 nt, Human
cuagcaaagaauaaucaua

SEQ ID NO: 880866 - RNA, 24 nt, Human
cucacugccaaaguggaagcuguu

SEQ ID NO: 880867 - RNA, 23 nt, Human
cuccgcgucgucgcuguccccgu

SEQ ID NO: 880868 - RNA, 19 nt, Human
cuccguugucuuccgcccg

SEQ ID NO: 880869 - RNA, 21 nt, Human
cugacacgcugcacccucacu

SEQ ID NO: 880870 - RNA, 19 nt, Human
cugacgcagggaugccagg

SEQ ID NO: 880871 - RNA, 19 nt, Human
cugaugcugaauagcuaac

SEQ ID NO: 880872 - RNA, 20 nt, Human
cugcacuccgccugugcuac

SEQ ID NO: 880873 - RNA, 20 nt, Human
gaugggugcaaacacauagg

SEQ ID NO: 880874 - RNA, 18 nt, Human
gcaaacucugauuuguca

SEQ ID NO: 880875 - RNA, 21 nt, Human
gccuucaugaacccagccaug

SEQ ID NO: 880876 - RNA, 21 nt, Human
ggacugaaaaacaaaagggua

SEQ ID NO: 880877 - RNA, 21 nt, Human
ggccccuccguugucuuccgc

SEQ ID NO: 880878 - RNA, 18 nt, Human
ggcguucccuucucugcc

SEQ ID NO: 880879 - RNA, 18 nt, Human
gggcggacgccugcccag

SEQ ID NO: 880880 - RNA, 22 nt, Human
uaaaaccugcugaaacagcaau

SEQ ID NO: 880881 - RNA, 19 nt, Human
uaaaaggcuacgaccucac

SEQ ID NO: 880882 - RNA, 21 nt, Human
uaaaaugaacagauaccauuc

SEQ ID NO: 880883 - RNA, 24 nt, Human
uaaaaugaacagauaccauucuaa

SEQ ID NO: 880884 - RNA, 25 nt, Human
uaaaaugaauaaggccaauaggaug

SEQ ID NO: 880885 - RNA, 21 nt, Human
uaaaauuaacaaauacccuuc

SEQ ID NO: 880886 - RNA, 22 nt, Human
uaaagacagucuugagaaaugc

SEQ ID NO: 880887 - RNA, 18 nt, Human
uaacauagauguuuauug

SEQ ID NO: 880888 - RNA, 18 nt, Human
uaacauagauguuuauug

SEQ ID NO: 880889 - RNA, 19 nt, Human
uaacauagauguuuauugg

SEQ ID NO: 880890 - RNA, 20 nt, Human
uaacugaauacaaaggacug

SEQ ID NO: 880891 - RNA, 22 nt, Human
uaagaauuauauacaaaagaaa

SEQ ID NO: 880892 - RNA, 18 nt, Human
uaagagaagccaaaguuu

SEQ ID NO: 880893 - RNA, 22 nt, Human
uacaaaagaaaccuugaagcag

SEQ ID NO: 880894 - RNA, 18 nt, Human
uacaccacaaagccagga

SEQ ID NO: 880895 - RNA, 21 nt, Human
uacaccacaaagccaggacac

SEQ ID NO: 880896 - RNA, 21 nt, Human
uacagggccagccagauauuc

SEQ ID NO: 880897 - RNA, 18 nt, Human
uagaagacauuguucugc

SEQ ID NO: 880898 - RNA, 26 nt, Human
uaugagcauucauuguuuuucgaacg

SEQ ID NO: 880899 - RNA, 23 nt, Human
uaugaggcuucuuuacacuuuua

SEQ ID NO: 880900 - RNA, 19 nt, Human
ucacagaucuggcagauuc

SEQ ID NO: 880901 - RNA, 24 nt, Human
ucaguaucaauuuauucgcauguc

SEQ ID NO: 880902 - RNA, 25 nt, Human
uccauacacacagcacuacaccaca

SEQ ID NO: 880903 - RNA, 24 nt, Human
ucccgcggcugccgccgcgcugcu

SEQ ID NO: 880904 - RNA, 24 nt, Human
uccucggccgccgccgcuucgggc

SEQ ID NO: 880905 - RNA, 24 nt, Human
ucgcuugggcugcggcugcugcug

SEQ ID NO: 880906 - RNA, 20 nt, Human
ugaaaaguaaaauuaacaaa

SEQ ID NO: 880907 - RNA, 22 nt, Human
ugaaacagcaauugggaggccc

SEQ ID NO: 880908 - RNA, 21 nt, Human
ugaaaugaaaugcaagguguc

SEQ ID NO: 880909 - RNA, 18 nt, Human
ugaaaugacacaaagauc

SEQ ID NO: 880910 - RNA, 20 nt, Human
ugaaguauuucaauuacaua

SEQ ID NO: 880911 - RNA, 22 nt, Human
ugaauucugaaaugacacaaag

SEQ ID NO: 880912 - RNA, 22 nt, Human
ugacgcagggaugccaggugug

SEQ ID NO: 880913 - RNA, 21 nt, Human
ugaucugaaguauuucaauua

SEQ ID NO: 880914 - RNA, 24 nt, Human
ugcacccucacuucuuccaccuaa

SEQ ID NO: 880915 - RNA, 19 nt, Human
ugcccaggggcucccgcgg

SEQ ID NO: 880916 - RNA, 20 nt, Human
ugcccaggggcucccgcggc

SEQ ID NO: 880917 - RNA, 23 nt, Human
ugcccuagugugcaagcagcagc

SEQ ID NO: 880918 - RNA, 21 nt, Human
ugccugaugcugaauagcuaa

SEQ ID NO: 880919 - RNA, 21 nt, Human
ugcugaauuuggauuuaacau

SEQ ID NO: 880920 - RNA, 24 nt, Human
ugggcugcggcugcugcugugggg

SEQ ID NO: 880921 - RNA, 19 nt, Human
uggggcccggcgccgccuu

SEQ ID NO: 880922 - RNA, 20 nt, Human
ugguuuacuuucuuuuucuu

SEQ ID NO: 880923 - RNA, 19 nt, Human
uguaauccauguuuuuaca

SEQ ID NO: 880924 - RNA, 24 nt, Human
ugugcccuagugugcaagcagcag

SEQ ID NO: 880925 - RNA, 22 nt, Human
uguggcugacugagcuccaggg

SEQ ID NO: 880926 - RNA, 22 nt, Human
uuccaauguaagaguaacauga

SEQ ID NO: 880927 - RNA, 18 nt, Human
uuccucugcuguacaaau

SEQ ID NO: 880928 - RNA, 22 nt, Human
uuccuuaggagaaagaaaaugc

SEQ ID NO: 880929 - RNA, 20 nt, Human
uugccacacugcacucagau

SEQ ID NO: 880930 - RNA, 22 nt, Human
uuucuggagcuauuuuccuaac

SEQ ID NO: 880931 - RNA, 18 nt, Human
uuuuuuuuuuuuuuuuug

SEQ ID NO: 880932 - RNA, 25 nt, Human
aaaaauggaagagauuggggaggga

SEQ ID NO: 880933 - RNA, 20 nt, Human
aaaauucuuggccgggcaca

SEQ ID NO: 880934 - RNA, 19 nt, Human
aacacggugaaacccuguc

SEQ ID NO: 880935 - RNA, 20 nt, Human
aacacggugaaacccugucu

SEQ ID NO: 880936 - RNA, 21 nt, Human
aacacggugaaacccugucuc

SEQ ID NO: 880937 - RNA, 20 nt, Human
aacauggugaaaucuugucu

SEQ ID NO: 880938 - RNA, 18 nt, Human
aagcaggagaaucacuug

SEQ ID NO: 880939 - RNA, 24 nt, Human
aagcaggagaaucacuugaaccca

SEQ ID NO: 880940 - RNA, 25 nt, Human
aagcaggagaaucacuugaacccag

SEQ ID NO: 880941 - RNA, 23 nt, Human
aagcugcguggccgggcugcugg

SEQ ID NO: 880942 - RNA, 24 nt, Human
aaucacuugaacccaggaggugga

SEQ ID NO: 880943 - RNA, 24 nt, Human
aauggcgugaaucugggaggcgga

SEQ ID NO: 880944 - RNA, 25 nt, Human
acaggcccaggcagggcuguggcca

SEQ ID NO: 880945 - RNA, 23 nt, Human
acaguggagaagacaaggcagga

SEQ ID NO: 880946 - RNA, 22 nt, Human
acccuggaagccauccagccuc

SEQ ID NO: 880947 - RNA, 23 nt, Human
acccugucucuacuaaaauacaa

SEQ ID NO: 880948 - RNA, 21 nt, Human
acgaaacacucaccaagcccc

SEQ ID NO: 880949 - RNA, 21 nt, Human
acugcacuccagccugguuag

SEQ ID NO: 880950 - RNA, 19 nt, Human
agaagaacggaagaagcag

SEQ ID NO: 880951 - RNA, 20 nt, Human
agaagaacggaagaagcaga

SEQ ID NO: 880952 - RNA, 21 nt, Human
agaagaacggaagaagcagag

SEQ ID NO: 880953 - RNA, 25 nt, Human
agaagccggggugcaggggacuagu

SEQ ID NO: 880954 - RNA, 18 nt, Human
agaggcugccugggucca

SEQ ID NO: 880955 - RNA, 24 nt, Human
agcacuuugggaggccgaggaugg

SEQ ID NO: 880956 - RNA, 24 nt, Human
agcacuuugggaggcugaggcugg

SEQ ID NO: 880957 - RNA, 19 nt, Human
agccagggagaggaggugg

SEQ ID NO: 880958 - RNA, 21 nt, Human
agccuggccaacauggugaaa

SEQ ID NO: 880959 - RNA, 23 nt, Human
aggaaagaggcugccugggucca

SEQ ID NO: 880960 - RNA, 23 nt, Human
aggaacaguggagaagacaaggc

SEQ ID NO: 880961 - RNA, 23 nt, Human
aggagccugggagccacccaggg

SEQ ID NO: 880962 - RNA, 20 nt, Human
aggaguuugagaccagccug

SEQ ID NO: 880963 - RNA, 24 nt, Human
aggaucacuggaggccaggaguuc

SEQ ID NO: 880964 - RNA, 20 nt, Human
aggaugcagugagccgagau

SEQ ID NO: 880965 - RNA, 20 nt, Human
aggcagaaguuccaggagcc

SEQ ID NO: 880966 - RNA, 20 nt, Human
aggcaggagaauggcgugaa

SEQ ID NO: 880967 - RNA, 24 nt, Human
aggcaggagaauggcgugaaucug

SEQ ID NO: 880968 - RNA, 19 nt, Human
aggccgagcaagcugggug

SEQ ID NO: 880969 - RNA, 21 nt, Human
aggccgaggauggaggaucac

SEQ ID NO: 880970 - RNA, 22 nt, Human
aggccgggugcaguagcucaug

SEQ ID NO: 880971 - RNA, 25 nt, Human
aggcggagcuugcagugacaacggu

SEQ ID NO: 880972 - RNA, 24 nt, Human
aggcggagcuugcagugagccgag

SEQ ID NO: 880973 - RNA, 24 nt, Human
aggcugaagcaggagaaucacuug

SEQ ID NO: 880974 - RNA, 19 nt, Human
aggcugaggcaggagaaug

SEQ ID NO: 880975 - RNA, 24 nt, Human
aggcugguggaucacaaggucagg

SEQ ID NO: 880976 - RNA, 19 nt, Human
agggaggaaagaggcugcc

SEQ ID NO: 880977 - RNA, 26 nt, Human
agguaggcggaucaccugaagucagg

SEQ ID NO: 880978 - RNA, 21 nt, Human
agguggaggaugcagugagcc

SEQ ID NO: 880979 - RNA, 24 nt, Human
agguggaggaugcagugagccgag

SEQ ID NO: 880980 - RNA, 23 nt, Human
aguagcucaugccuguaauccca

SEQ ID NO: 880981 - RNA, 24 nt, Human
aguagcucaugccuguaaucccag

SEQ ID NO: 880982 - RNA, 24 nt, Human
aguggcucacgccuguaaucccag

SEQ ID NO: 880983 - RNA, 21 nt, Human
auaaaaaucaaacccuuuaug

SEQ ID NO: 880984 - RNA, 24 nt, Human
aucccaccacugcacuccagccug

SEQ ID NO: 880985 - RNA, 23 nt, Human
aucccaggcgcccagaggugacc

SEQ ID NO: 880986 - RNA, 22 nt, Human
augcagugagccgagauugugc

SEQ ID NO: 880987 - RNA, 19 nt, Human
augccuguaaucccagcac

SEQ ID NO: 880988 - RNA, 18 nt, Human
caaaguggacaucguucc

SEQ ID NO: 880989 - RNA, 24 nt, Human
caacauggugaaaucuugucucua

SEQ ID NO: 880990 - RNA, 24 nt, Human
caagaccauccuggcuaacacggu

SEQ ID NO: 880991 - RNA, 19 nt, Human
caagguaggcggaucaccu

SEQ ID NO: 880992 - RNA, 26 nt, Human
caagguaggcggaucaccugaaguca

SEQ ID NO: 880993 - RNA, 23 nt, Human
cacaccuguaaucccagcuacuu

SEQ ID NO: 880994 - RNA, 30 nt, Human
cacccagggcaaggagugacccuggaagcc

SEQ ID NO: 880995 - RNA, 24 nt, Human
caccccugugauuccagcacuuug

SEQ ID NO: 880996 - RNA, 23 nt, Human
caccugaagucaggaguuugaga

SEQ ID NO: 880997 - RNA, 20 nt, Human
caccuguaaucccagcuacu

SEQ ID NO: 880998 - RNA, 24 nt, Human
caccuguaaucccagcuacuuggg

SEQ ID NO: 880999 - RNA, 24 nt, Human
cacgccuguaaucccagcacuuug

SEQ ID NO: 881000 - RNA, 18 nt, Human
cacugcacuccagccugg

SEQ ID NO: 881001 - RNA, 18 nt, Human
cacugcacuccagccugg

SEQ ID NO: 881002 - RNA, 21 nt, Human
cacugcacuccagccugguua

SEQ ID NO: 881003 - RNA, 22 nt, Human
cacugcacuccagccugguuag

SEQ ID NO: 881004 - RNA, 24 nt, Human
cacuggacuccagucugggcgaca

SEQ ID NO: 881005 - RNA, 25 nt, Human
cagcacuuugggaggccgaggaugg

SEQ ID NO: 881006 - RNA, 23 nt, Human
cagcacuuugggaggcugaggcu

SEQ ID NO: 881007 - RNA, 25 nt, Human
cagcacuuugggaggcugaggcugg

SEQ ID NO: 881008 - RNA, 24 nt, Human
cagcacuuuuggaggccaagguag

SEQ ID NO: 881009 - RNA, 25 nt, Human
cagcacuuuuggaggccaagguagg

SEQ ID NO: 881010 - RNA, 19 nt, Human
caggagccugggagccacc

SEQ ID NO: 881011 - RNA, 29 nt, Human
caggagguggaggaugcagugacaacggu

SEQ ID NO: 881012 - RNA, 20 nt, Human
cagugagccgagaucccacc

SEQ ID NO: 881013 - RNA, 20 nt, Human
caugccuguaaucccagcac

SEQ ID NO: 881014 - RNA, 25 nt, Human
caugccuguaaucccagcacuuuug

SEQ ID NO: 881015 - RNA, 24 nt, Human
ccaagccccacagcucucccgcgg

SEQ ID NO: 881016 - RNA, 26 nt, Human
ccaagccccacagcucucccgcggac

SEQ ID NO: 881017 - RNA, 25 nt, Human
ccaccacugcacuccagccugguua

SEQ ID NO: 881018 - RNA, 19 nt, Human
ccacgaaacacucaccaag

SEQ ID NO: 881019 - RNA, 23 nt, Human
ccacgaaacacucaccaagcccc

SEQ ID NO: 881020 - RNA, 19 nt, Human
ccacugcacuccagccugg

SEQ ID NO: 881021 - RNA, 19 nt, Human
ccacugcacuccagccugg

SEQ ID NO: 881022 - RNA, 19 nt, Human
ccacugcacuccagccugg

SEQ ID NO: 881023 - RNA, 19 nt, Human
ccacugcacuccagccugg

SEQ ID NO: 881024 - RNA, 20 nt, Human
ccacugcacuccagccuggu

SEQ ID NO: 881025 - RNA, 21 nt, Human
ccacuggacuccagucugggc

SEQ ID NO: 881026 - RNA, 23 nt, Human
ccacuggacuccagucugggcga

SEQ ID NO: 881027 - RNA, 23 nt, Human
ccaggcgcccagaggugaccaga

SEQ ID NO: 881028 - RNA, 19 nt, Human
ccccacagcucucccgcgg

SEQ ID NO: 881029 - RNA, 22 nt, Human
cccgagcccugggggagacaga

SEQ ID NO: 881030 - RNA, 21 nt, Human
cccuccgcucugcucuucucg

SEQ ID NO: 881031 - RNA, 21 nt, Human
cccugggggagacagaggugu

SEQ ID NO: 881032 - RNA, 19 nt, Human
ccgggcgugacggugggug

SEQ ID NO: 881033 - RNA, 22 nt, Human
ccuccccgagcccaccugggaa

SEQ ID NO: 881034 - RNA, 19 nt, Human
ccucuugccuccccaacgg

SEQ ID NO: 881035 - RNA, 22 nt, Human
ccugaagucaggaguuugagac

SEQ ID NO: 881036 - RNA, 23 nt, Human
ccugaagucaggaguuugagacc

SEQ ID NO: 881037 - RNA, 19 nt, Human
ccuggccaacauggugaaa

SEQ ID NO: 881038 - RNA, 21 nt, Human
ccuggccaacauggugaaauc

SEQ ID NO: 881039 - RNA, 24 nt, Human
ccuggccaacauggugaaaucuug

SEQ ID NO: 881040 - RNA, 22 nt, Human
ccuggcuaacacggugaaaccc

SEQ ID NO: 881041 - RNA, 24 nt, Human
ccuggcuaacacggugaaacccug

SEQ ID NO: 881042 - RNA, 22 nt, Human
ccuguaaucccagcacuuuggg

SEQ ID NO: 881043 - RNA, 21 nt, Human
ccuguaaucccagcuacuugg

SEQ ID NO: 881044 - RNA, 18 nt, Human
ccuguagucccagcugcu

SEQ ID NO: 881045 - RNA, 21 nt, Human
ccuguagucccagcugcuggg

SEQ ID NO: 881046 - RNA, 22 nt, Human
ccuguagucccagcugcugggg

SEQ ID NO: 881047 - RNA, 22 nt, Human
ccuuuaugauacacaaaggggc

SEQ ID NO: 881048 - RNA, 18 nt, Human
cgaaacacucaccaagcc

SEQ ID NO: 881049 - RNA, 24 nt, Human
cgagaccccugucucuaguaugac

SEQ ID NO: 881050 - RNA, 22 nt, Human
cgagaucccaccacugcacucc

SEQ ID NO: 881051 - RNA, 24 nt, Human
cgcagccccaggggccacacagaa

SEQ ID NO: 881052 - RNA, 24 nt, Human
cgcccagaggugaccagacuucug

SEQ ID NO: 881053 - RNA, 26 nt, Human
cgcucugcucuucucggauuccucca

SEQ ID NO: 881054 - RNA, 21 nt, Human
cggaucaccugaagucaggag

SEQ ID NO: 881055 - RNA, 24 nt, Human
cggaucaccugaagucaggaguuu

SEQ ID NO: 881056 - RNA, 22 nt, Human
cggauuccuccaggaacagugg

SEQ ID NO: 881057 - RNA, 22 nt, Human
cgggcaccgggagacccgcggg

SEQ ID NO: 881058 - RNA, 22 nt, Human
cuaaaacuacaauaauuuccug

SEQ ID NO: 881059 - RNA, 22 nt, Human
cuaguaugaccaaaaaaaaaaa

SEQ ID NO: 881060 - RNA, 24 nt, Human
cucaccccugugauuccagcacuu

SEQ ID NO: 881061 - RNA, 22 nt, Human
cucacgccuguaaucccagcac

SEQ ID NO: 881062 - RNA, 24 nt, Human
cucacgccuguaaucccagcacuu

SEQ ID NO: 881063 - RNA, 24 nt, Human
cucaugccuguaaucccagcacuu

SEQ ID NO: 881064 - RNA, 21 nt, Human
cucccaccuccccgagcccac

SEQ ID NO: 881065 - RNA, 18 nt, Human
cuccugaggaccaacacc

SEQ ID NO: 881066 - RNA, 28 nt, Human
cucuaguaugaccaaaaaaaaaaaaauc

SEQ ID NO: 881067 - RNA, 22 nt, Human
cucuucggugaccaucccaggc

SEQ ID NO: 881068 - RNA, 24 nt, Human
cuggccaacauggugaaaucuugu

SEQ ID NO: 881069 - RNA, 18 nt, Human
cuggcuaacacggugaaa

SEQ ID NO: 881070 - RNA, 24 nt, Human
cuggcuaacacggugaaacccugu

SEQ ID NO: 881071 - RNA, 22 nt, Human
cugggccagcuggcugggggug

SEQ ID NO: 881072 - RNA, 19 nt, Human
cugguggaucacaagguca

SEQ ID NO: 881073 - RNA, 21 nt, Human
cuguaaucccagcuacuuggg

SEQ ID NO: 881074 - RNA, 23 nt, Human
cuucucggauuccuccaggaaca

SEQ ID NO: 881075 - RNA, 21 nt, Human
cuugaacccaggagguggagg

SEQ ID NO: 881076 - RNA, 19 nt, Human
cuugcagugagccgagauc

SEQ ID NO: 881077 - RNA, 24 nt, Human
cuuggccgggcacaguggcucacg

SEQ ID NO: 881078 - RNA, 20 nt, Human
cuuggugacgccugcucucc

SEQ ID NO: 881079 - RNA, 20 nt, Human
cuugucucuacuaaaacuac

SEQ ID NO: 881080 - RNA, 20 nt, Human
gaaacacucaccaagcccca

SEQ ID NO: 881081 - RNA, 22 nt, Human
gaaacacucaccaagccccaca

SEQ ID NO: 881082 - RNA, 20 nt, Human
gaaggaucaaggacaagucc

SEQ ID NO: 881083 - RNA, 18 nt, Human
gaccaacaccugcucagc

SEQ ID NO: 881084 - RNA, 19 nt, Human
gaccacuguggugaaaggc

SEQ ID NO: 881085 - RNA, 23 nt, Human
gagaaucacuugaacccaggagg

SEQ ID NO: 881086 - RNA, 24 nt, Human
gagaggccacgaaacacucaccaa

SEQ ID NO: 881087 - RNA, 23 nt, Human
gagaucccaccacugcacuccag

SEQ ID NO: 881088 - RNA, 19 nt, Human
gagccugggagccacccag

SEQ ID NO: 881089 - RNA, 18 nt, Human
gagcuugcagugagccga

SEQ ID NO: 881090 - RNA, 22 nt, Human
gagcuugcagugagccgagauc

SEQ ID NO: 881091 - RNA, 23 nt, Human
gaggaugcagugagccgagauug

SEQ ID NO: 881092 - RNA, 19 nt, Human
gaggauggaggaucacugg

SEQ ID NO: 881093 - RNA, 21 nt, Human
gaggcagagagcucacuaugu

SEQ ID NO: 881094 - RNA, 18 nt, Human
gagggguccugggccagc

SEQ ID NO: 881095 - RNA, 22 nt, Human
gagguggauggagugagggugg

SEQ ID NO: 881096 - RNA, 24 nt, Human
gaucaccugaagucaggaguuuga

SEQ ID NO: 881097 - RNA, 24 nt, Human
gaucacuggaggccaggaguucag

SEQ ID NO: 881098 - RNA, 18 nt, Human
gauggagugaggguggag

SEQ ID NO: 881099 - RNA, 21 nt, Human
gaugguuccagagcguccucc

SEQ ID NO: 881100 - RNA, 18 nt, Human
gcagaagccaggagagac

SEQ ID NO: 881101 - RNA, 18 nt, Human
gcagggcuguggccacag

SEQ ID NO: 881102 - RNA, 24 nt, Human
gccaacauggugaaaucuugucuc

SEQ ID NO: 881103 - RNA, 18 nt, Human
gccacgaaacacucacca

SEQ ID NO: 881104 - RNA, 18 nt, Human
gcgguggcucaccccugu

SEQ ID NO: 881105 - RNA, 24 nt, Human
gcuaacacggugaaacccugucuc

SEQ ID NO: 881106 - RNA, 22 nt, Human
gcucccuccgcucugcucuucu

SEQ ID NO: 881107 - RNA, 25 nt, Human
gcucugcucuucucggauuccucca

SEQ ID NO: 881108 - RNA, 22 nt, Human
gcugaggcaggagaauggcgug

SEQ ID NO: 881109 - RNA, 21 nt, Human
gcugggggugcugaccaaccc

SEQ ID NO: 881110 - RNA, 19 nt, Human
ggaagagagagggcugggc

SEQ ID NO: 881111 - RNA, 19 nt, Human
ggaagugguuuaaaaacac

SEQ ID NO: 881112 - RNA, 19 nt, Human
ggagacagaggugugggug

SEQ ID NO: 881113 - RNA, 18 nt, Human
ggagcuugcagugagccg

SEQ ID NO: 881114 - RNA, 22 nt, Human
ggaggaugcagugagccgagau

SEQ ID NO: 881115 - RNA, 24 nt, Human
ggaggaugcagugagccgagauug

SEQ ID NO: 881116 - RNA, 22 nt, Human
ggaggccaagguaggcggauca

SEQ ID NO: 881117 - RNA, 19 nt, Human
ggaggcugaggcuggugga

SEQ ID NO: 881118 - RNA, 18 nt, Human
ggaggggacagagauggu

SEQ ID NO: 881119 - RNA, 21 nt, Human
ggaguccaggaagcccuggau

SEQ ID NO: 881120 - RNA, 22 nt, Human
ggaucaccugaagucaggaguu

SEQ ID NO: 881121 - RNA, 25 nt, Human
ggaucaccugaagucaggaguuuga

SEQ ID NO: 881122 - RNA, 22 nt, Human
ggcaaggagugacccuggaagc

SEQ ID NO: 881123 - RNA, 23 nt, Human
ggcacaguggcucacgccuguaa

SEQ ID NO: 881124 - RNA, 21 nt, Human
ggcucggccccuggucucccu

SEQ ID NO: 881125 - RNA, 18 nt, Human
gggcacaguggcucacgc

SEQ ID NO: 881126 - RNA, 24 nt, Human
gggcgcgguggcucaccccuguga

SEQ ID NO: 881127 - RNA, 24 nt, Human
gggcgugguggcgcacaccuguaa

SEQ ID NO: 881128 - RNA, 18 nt, Human
gggcucccuccgcucugc

SEQ ID NO: 881129 - RNA, 20 nt, Human
gggcucccuccgcucugcuc

SEQ ID NO: 881130 - RNA, 22 nt, Human
gggcuucaucuuccagguacaa

SEQ ID NO: 881131 - RNA, 22 nt, Human
ggggagugcggaguaaaggccu

SEQ ID NO: 881132 - RNA, 23 nt, Human
ggguggcagggguucagccaggg

SEQ ID NO: 881133 - RNA, 25 nt, Human
ggguguuugggcuucaucuuccagg

SEQ ID NO: 881134 - RNA, 21 nt, Human
gguccugggccagcuggcugg

SEQ ID NO: 881135 - RNA, 20 nt, Human
ggucugggacagugcagggc

SEQ ID NO: 881136 - RNA, 23 nt, Human
ggugcaguagcucaugccuguaa

SEQ ID NO: 881137 - RNA, 21 nt, Human
gguggaggaugcagugagccg

SEQ ID NO: 881138 - RNA, 24 nt, Human
gguggaggcagaaguuccaggagc

SEQ ID NO: 881139 - RNA, 21 nt, Human
gguggaucacaaggucaggag

SEQ ID NO: 881140 - RNA, 24 nt, Human
gguggcgcacaccuguaaucccag

SEQ ID NO: 881141 - RNA, 23 nt, Human
gguggcucaccccugugauucca

SEQ ID NO: 881142 - RNA, 24 nt, Human
gguggcucaccccugugauuccag

SEQ ID NO: 881143 - RNA, 20 nt, Human
ggugggugccuguaguccca

SEQ ID NO: 881144 - RNA, 21 nt, Human
gguuaggccgggugcaguagc

SEQ ID NO: 881145 - RNA, 20 nt, Human
gguuguaaaugugacuauaa

SEQ ID NO: 881146 - RNA, 19 nt, Human
gucucuacuaaaacuacaa

SEQ ID NO: 881147 - RNA, 18 nt, Human
gucugggacagugcaggg

SEQ ID NO: 881148 - RNA, 21 nt, Human
gugaaacccugucucuacuaa

SEQ ID NO: 881149 - RNA, 23 nt, Human
gugcugaccaacccgagaggcca

SEQ ID NO: 881150 - RNA, 23 nt, Human
guggcucaccccugugauuccag

SEQ ID NO: 881151 - RNA, 22 nt, Human
guucaaaaaaaauaaaaaucuc

SEQ ID NO: 881152 - RNA, 19 nt, Human
guuccugauuucauggagu

SEQ ID NO: 881153 - RNA, 22 nt, Human
uaacacggugaaacccugucuc

SEQ ID NO: 881154 - RNA, 24 nt, Human
uaacacggugaaacccugucucua

SEQ ID NO: 881155 - RNA, 21 nt, Human
uagccgggcgugacggugggu

SEQ ID NO: 881156 - RNA, 22 nt, Human
uagcucaugccuguaaucccag

SEQ ID NO: 881157 - RNA, 24 nt, Human
uagcucaugccuguaaucccagca

SEQ ID NO: 881158 - RNA, 24 nt, Human
uaggcggaucaccugaagucagga

SEQ ID NO: 881159 - RNA, 22 nt, Human
uaugaccaaaaaaaaaaaaauc

SEQ ID NO: 881160 - RNA, 18 nt, Human
ucacaaggucaggagauc

SEQ ID NO: 881161 - RNA, 24 nt, Human
ucacaaggucaggagaucaagacc

SEQ ID NO: 881162 - RNA, 19 nt, Human
ucaccugaagucaggaguu

SEQ ID NO: 881163 - RNA, 20 nt, Human
ucagaagaacggaagaagca

SEQ ID NO: 881164 - RNA, 22 nt, Human
ucaugccuguaaucccagcacu

SEQ ID NO: 881165 - RNA, 20 nt, Human
uccaagugccggaccuggug

SEQ ID NO: 881166 - RNA, 22 nt, Human
uccccgagcccaccugggaagc

SEQ ID NO: 881167 - RNA, 18 nt, Human
ucccugagaugcucaggc

SEQ ID NO: 881168 - RNA, 25 nt, Human
ucccugcucccaccuccccgagccc

SEQ ID NO: 881169 - RNA, 22 nt, Human
uccgaggccccagcggcgguuc

SEQ ID NO: 881170 - RNA, 23 nt, Human
uccgggguuggagcuccugagga

SEQ ID NO: 881171 - RNA, 21 nt, Human
uccuccaagucuccgaggccc

SEQ ID NO: 881172 - RNA, 22 nt, Human
uccugaggaccaacaccugcuc

SEQ ID NO: 881173 - RNA, 18 nt, Human
ucucagggcccugcucuc

SEQ ID NO: 881174 - RNA, 24 nt, Human
ucucccgcggaccgugucuggggc

SEQ ID NO: 881175 - RNA, 23 nt, Human
ucucuacuaaaauacaaaaaaau

SEQ ID NO: 881176 - RNA, 22 nt, Human
ucugcucuucucggauuccucc

SEQ ID NO: 881177 - RNA, 20 nt, Human
ugaagcaggagaaucacuug

SEQ ID NO: 881178 - RNA, 24 nt, Human
ugaagcaggagaaucacuugaacc

SEQ ID NO: 881179 - RNA, 23 nt, Human
ugaaucugggaggcggagcuugc

SEQ ID NO: 881180 - RNA, 23 nt, Human
ugaccaaaaaaaaaaaaaucugu

SEQ ID NO: 881181 - RNA, 24 nt, Human
ugaccaaaaaaaaaaaaaucugua

SEQ ID NO: 881182 - RNA, 21 nt, Human
ugaccagacuucugugugguc

SEQ ID NO: 881183 - RNA, 23 nt, Human
ugagaccagccuggccaacaugg

SEQ ID NO: 881184 - RNA, 24 nt, Human
ugagaccagccuggccaacauggu

SEQ ID NO: 881185 - RNA, 21 nt, Human
ugagccgagauugugccacug

SEQ ID NO: 881186 - RNA, 24 nt, Human
ugagccgagauugugccacuggac

SEQ ID NO: 881187 - RNA, 23 nt, Human
ugaggaagagagagggcugggcg

SEQ ID NO: 881188 - RNA, 23 nt, Human
ugaggcaggagaauggcgugaau

SEQ ID NO: 881189 - RNA, 24 nt, Human
ugaggcaggagaauggcgugaauc

SEQ ID NO: 881190 - RNA, 25 nt, Human
ugaggcaggagaauggcgugaaucu

SEQ ID NO: 881191 - RNA, 24 nt, Human
ugaggcugguggaucacaagguca

SEQ ID NO: 881192 - RNA, 18 nt, Human
ugagggcucggcugggag

SEQ ID NO: 881193 - RNA, 24 nt, Human
ugccacuggacuccagucugggcg

SEQ ID NO: 881194 - RNA, 18 nt, Human
ugccuguaaucccagcac

SEQ ID NO: 881195 - RNA, 20 nt, Human
ugccuguagucccagcugcu

SEQ ID NO: 881196 - RNA, 18 nt, Human
ugcuggagacaucccgag

SEQ ID NO: 881197 - RNA, 20 nt, Human
ugcuggggaggcugaggcag

SEQ ID NO: 881198 - RNA, 22 nt, Human
uggaagagauuggggagggagg

SEQ ID NO: 881199 - RNA, 18 nt, Human
uggaagccauccagccuc

SEQ ID NO: 881200 - RNA, 21 nt, Human
uggacuucuguagaggggucc

SEQ ID NO: 881201 - RNA, 22 nt, Human
uggagcuccugaggaccaacac

SEQ ID NO: 881202 - RNA, 26 nt, Human
uggaggaugcagugagccgagauugu

SEQ ID NO: 881203 - RNA, 18 nt, Human
uggauggagugagggugg

SEQ ID NO: 881204 - RNA, 23 nt, Human
uggcagaacuggaagauuccaga

SEQ ID NO: 881205 - RNA, 20 nt, Human
uggcagaagccaggagagac

SEQ ID NO: 881206 - RNA, 24 nt, Human
uggccaacauggugaaaucuuguc

SEQ ID NO: 881207 - RNA, 22 nt, Human
uggccacagcagcccugggggc

SEQ ID NO: 881208 - RNA, 20 nt, Human
uggccgggcugcuggagaca

SEQ ID NO: 881209 - RNA, 22 nt, Human
uggcgcacaccuguaaucccag

SEQ ID NO: 881210 - RNA, 21 nt, Human
uggcucaccccugugauucca

SEQ ID NO: 881211 - RNA, 24 nt, Human
uggcucaccccugugauuccagca

SEQ ID NO: 881212 - RNA, 24 nt, Human
uggcucacgccuguaaucccagca

SEQ ID NO: 881213 - RNA, 19 nt, Human
uggcugccuuuucucaggg

SEQ ID NO: 881214 - RNA, 24 nt, Human
ugggaaaggccaauucuggcagaa

SEQ ID NO: 881215 - RNA, 24 nt, Human
ugggaggccgaggauggaggauca

SEQ ID NO: 881216 - RNA, 24 nt, Human
ugggaggcggagcuugcagugagc

SEQ ID NO: 881217 - RNA, 24 nt, Human
ugggaggcugaagcaggagaauca

SEQ ID NO: 881218 - RNA, 19 nt, Human
ugggaggcugaggcuggug

SEQ ID NO: 881219 - RNA, 24 nt, Human
ugggaggcugaggcugguggauca

SEQ ID NO: 881220 - RNA, 19 nt, Human
uggggagggaggaaagagg

SEQ ID NO: 881221 - RNA, 21 nt, Human
uggucucgcagccccaggggc

SEQ ID NO: 881222 - RNA, 21 nt, Human
uggucugggacagugcagggc

SEQ ID NO: 881223 - RNA, 22 nt, Human
uggucugggacagugcagggcu

SEQ ID NO: 881224 - RNA, 24 nt, Human
ugguggcgcacaccuguaauccca

SEQ ID NO: 881225 - RNA, 21 nt, Human
uguaggaggccgagcaagcug

SEQ ID NO: 881226 - RNA, 25 nt, Human
ugugaagagacaccagcggcugcca

SEQ ID NO: 881227 - RNA, 22 nt, Human
ugugacuauaaaaaucaaaccc

SEQ ID NO: 881228 - RNA, 22 nt, Human
uguggugaaaggccacugacaa

SEQ ID NO: 881229 - RNA, 24 nt, Human
uuagccgggcgugacggugggugc

SEQ ID NO: 881230 - RNA, 20 nt, Human
uucacguuuuagucccagac

SEQ ID NO: 881231 - RNA, 23 nt, Human
uucagaagaacggaagaagcaga

SEQ ID NO: 881232 - RNA, 20 nt, Human
uucaucuuccagguacaagg

SEQ ID NO: 881233 - RNA, 21 nt, Human
uucaucuuccagguacaagga

SEQ ID NO: 881234 - RNA, 18 nt, Human
uuccguaucuggcugggg

SEQ ID NO: 881235 - RNA, 21 nt, Human
uucuggugaggaguagggugg

SEQ ID NO: 881236 - RNA, 19 nt, Human
uugcagugagccgagaucc

SEQ ID NO: 881237 - RNA, 22 nt, Human
uugcagugagccgagaucccac

SEQ ID NO: 881238 - RNA, 21 nt, Human
uugcagugagccgagaucccc

SEQ ID NO: 881239 - RNA, 20 nt, Human
uugcagugagccgagauccg

SEQ ID NO: 881240 - RNA, 25 nt, Human
uugggaggccgaggauggaggauca

SEQ ID NO: 881241 - RNA, 25 nt, Human
uugggaggcugaagcaggagaauca

SEQ ID NO: 881242 - RNA, 25 nt, Human
uugggaggcugaggcugguggauca

SEQ ID NO: 881243 - RNA, 18 nt, Human
uuuagucccagacgggag

SEQ ID NO: 881244 - RNA, 23 nt, Human
uuucaggcuucggcaguaacagu

SEQ ID NO: 881245 - RNA, 20 nt, Human
uuugagggcucggcugggag

SEQ ID NO: 881246 - RNA, 22 nt, Human
uuuucuggcagaagccaggaga

SEQ ID NO: 881247 - RNA, 18 nt, Human
uuuuuuuuuuuuuuuccg

SEQ ID NO: 881248 - RNA, 18 nt, Human
aaaaggccaaauagaaug

SEQ ID NO: 881249 - RNA, 27 nt, Human
aaaaggccaaauagaauggugggcacc

SEQ ID NO: 881250 - RNA, 19 nt, Human
aacauggugaaacccccuc

SEQ ID NO: 881251 - RNA, 20 nt, Human
aacauggugaaacccccucu

SEQ ID NO: 881252 - RNA, 20 nt, Human
aacauggugaaacccccucu

SEQ ID NO: 881253 - RNA, 18 nt, Human
aaucgcuugaaccuggga

SEQ ID NO: 881254 - RNA, 24 nt, Human
aaucgcuugaaccugggaggcgga

SEQ ID NO: 881255 - RNA, 24 nt, Human
acagagagagauuccaucucaaaa

SEQ ID NO: 881256 - RNA, 20 nt, Human
acagauccgaaguauauaau

SEQ ID NO: 881257 - RNA, 18 nt, Human
acuacacuccagccuggg

SEQ ID NO: 881258 - RNA, 24 nt, Human
acuacacuccagccugggcaacag

SEQ ID NO: 881259 - RNA, 23 nt, Human
agccaggcgugguggcgugcgcc

SEQ ID NO: 881260 - RNA, 24 nt, Human
agccugacaaacauggugaaaccc

SEQ ID NO: 881261 - RNA, 24 nt, Human
agccugggcaacagagagagauuc

SEQ ID NO: 881262 - RNA, 22 nt, Human
aggcaggagaaucgcuugaacc

SEQ ID NO: 881263 - RNA, 24 nt, Human
aggcaggagaaucgcuugaaccug

SEQ ID NO: 881264 - RNA, 20 nt, Human
aggcaggcggaucacgaggu

SEQ ID NO: 881265 - RNA, 24 nt, Human
aggcaggcggaucacgaggucagg

SEQ ID NO: 881266 - RNA, 20 nt, Human
aggcggagguugcagugagc

SEQ ID NO: 881267 - RNA, 24 nt, Human
aggcggagguugcagugagcugag

SEQ ID NO: 881268 - RNA, 24 nt, Human
aggcggaucacgaggucaggaguu

SEQ ID NO: 881269 - RNA, 24 nt, Human
aggcgugguggcgugcgccuguaa

SEQ ID NO: 881270 - RNA, 20 nt, Human
aggcugaggcaggagaaucg

SEQ ID NO: 881271 - RNA, 24 nt, Human
aggcugaggcaggagaaucgcuug

SEQ ID NO: 881272 - RNA, 18 nt, Human
auacuaauucaaaaggcc

SEQ ID NO: 881273 - RNA, 19 nt, Human
aucacgaggucaggaguuc

SEQ ID NO: 881274 - RNA, 24 nt, Human
aucgcaccacuacacuccagccug

SEQ ID NO: 881275 - RNA, 28 nt, Human
aucgcaccacuacacuccagccugggca

SEQ ID NO: 881276 - RNA, 23 nt, Human
caacagagagagauuccaucuca

SEQ ID NO: 881277 - RNA, 21 nt, Human
cacagauacuguagaaucccc

SEQ ID NO: 881278 - RNA, 24 nt, Human
cacgccuguaaucccagcacucug

SEQ ID NO: 881279 - RNA, 25 nt, Human
cacuacacuccagccugggcaacaa

SEQ ID NO: 881280 - RNA, 24 nt, Human
cagcacucugggaagucgaggcag

SEQ ID NO: 881281 - RNA, 22 nt, Human
cagccugggcaacagagagaga

SEQ ID NO: 881282 - RNA, 24 nt, Human
cagcuacucaggaggcugaggcag

SEQ ID NO: 881283 - RNA, 19 nt, Human
cauguaaaugaucugcagu

SEQ ID NO: 881284 - RNA, 19 nt, Human
cauuuugacugggggaggu

SEQ ID NO: 881285 - RNA, 21 nt, Human
ccacuacacuccagccugggc

SEQ ID NO: 881286 - RNA, 23 nt, Human
ccacuacacuccagccugggcaa

SEQ ID NO: 881287 - RNA, 24 nt, Human
ccacuacacuccagccugggcaac

SEQ ID NO: 881288 - RNA, 22 nt, Human
ccccucuguacuaaaaauacaa

SEQ ID NO: 881289 - RNA, 18 nt, Human
ccuguaaucccagcacuc

SEQ ID NO: 881290 - RNA, 22 nt, Human
ccuguaaucccagcacucuggg

SEQ ID NO: 881291 - RNA, 21 nt, Human
ccuguaaucccagcuacucag

SEQ ID NO: 881292 - RNA, 22 nt, Human
ccuguaaucccagcuacucagg

SEQ ID NO: 881293 - RNA, 24 nt, Human
cgagaccagccugacaaacauggu

SEQ ID NO: 881294 - RNA, 24 nt, Human
cgaggcaggcggaucacgagguca

SEQ ID NO: 881295 - RNA, 24 nt, Human
cgccuguaaucccagcuacucagg

SEQ ID NO: 881296 - RNA, 20 nt, Human
cucaaaaaaaaaaaaaucuc

SEQ ID NO: 881297 - RNA, 23 nt, Human
cucacgccuguaaucccagcacu

SEQ ID NO: 881298 - RNA, 24 nt, Human
cucacgccuguaaucccagcacuc

SEQ ID NO: 881299 - RNA, 20 nt, Human
cuccgugugcugaaaaaaaa

SEQ ID NO: 881300 - RNA, 20 nt, Human
cuguacuaaaaauacaaaaa

SEQ ID NO: 881301 - RNA, 19 nt, Human
cuugaaccugggaggcgga

SEQ ID NO: 881302 - RNA, 21 nt, Human
gaaguauauaaucugugaaaa

SEQ ID NO: 881303 - RNA, 23 nt, Human
gagaaucgcuugaaccugggagg

SEQ ID NO: 881304 - RNA, 23 nt, Human
gagguugcagugagcugagaucg

SEQ ID NO: 881305 - RNA, 22 nt, Human
gaucacgaggucaggaguucga

SEQ ID NO: 881306 - RNA, 24 nt, Human
gaucacgaggucaggaguucgaga

SEQ ID NO: 881307 - RNA, 20 nt, Human
gcauuuugacugggggaggu

SEQ ID NO: 881308 - RNA, 22 nt, Human
gcgugcgccuguaaucccagcu

SEQ ID NO: 881309 - RNA, 20 nt, Human
gcugagaucgcaccacuaca

SEQ ID NO: 881310 - RNA, 21 nt, Human
ggaagucgaggcaggcggauc

SEQ ID NO: 881311 - RNA, 22 nt, Human
ggagguugcagugagcugagau

SEQ ID NO: 881312 - RNA, 24 nt, Human
ggagguugcagugagcugagaucg

SEQ ID NO: 881313 - RNA, 21 nt, Human
ggaucacgaggucaggaguuc

SEQ ID NO: 881314 - RNA, 20 nt, Human
gggaagucgaggcaggcgga

SEQ ID NO: 881315 - RNA, 18 nt, Human
gggagggugugguggcuc

SEQ ID NO: 881316 - RNA, 21 nt, Human
gggagggugugguggcucacg

SEQ ID NO: 881317 - RNA, 24 nt, Human
gguggcgugcgccuguaaucccag

SEQ ID NO: 881318 - RNA, 24 nt, Human
gguggcucacgccuguaaucccag

SEQ ID NO: 881319 - RNA, 23 nt, Human
ggugugguggcucacgccuguaa

SEQ ID NO: 881320 - RNA, 23 nt, Human
guggcucacgccuguaaucccag

SEQ ID NO: 881321 - RNA, 19 nt, Human
guugcagugagcugagauc

SEQ ID NO: 881322 - RNA, 21 nt, Human
uaaaaauacaaaaauuagcca

SEQ ID NO: 881323 - RNA, 19 nt, Human
uaacugaacaguaaacaga

SEQ ID NO: 881324 - RNA, 20 nt, Human
uaccgaaaaaugcaaacaag

SEQ ID NO: 881325 - RNA, 19 nt, Human
uauucuaucaucugaaaua

SEQ ID NO: 881326 - RNA, 21 nt, Human
ucaaaaaaaaaaaaaucucau

SEQ ID NO: 881327 - RNA, 18 nt, Human
ucacgaggucaggaguuc

SEQ ID NO: 881328 - RNA, 24 nt, Human
ucacgaggucaggaguucgagacc

SEQ ID NO: 881329 - RNA, 20 nt, Human
ucagacuacaaaggugguuu

SEQ ID NO: 881330 - RNA, 23 nt, Human
uccaucucaaaaaaaaaaaaauc

SEQ ID NO: 881331 - RNA, 23 nt, Human
uccauuaauaagucauucaucca

SEQ ID NO: 881332 - RNA, 24 nt, Human
ucgcuugaaccugggaggcggagg

SEQ ID NO: 881333 - RNA, 22 nt, Human
ucucagaaacgguauaauccau

SEQ ID NO: 881334 - RNA, 24 nt, Human
ugaaccugggaggcggagguugca

SEQ ID NO: 881335 - RNA, 19 nt, Human
ugagcugagaucgcaccac

SEQ ID NO: 881336 - RNA, 20 nt, Human
ugaggcaggagaaucgcuug

SEQ ID NO: 881337 - RNA, 24 nt, Human
ugaggcaggagaaucgcuugaacc

SEQ ID NO: 881338 - RNA, 25 nt, Human
ugaggcaggagaaucgcuugaaccu

SEQ ID NO: 881339 - RNA, 19 nt, Human
ugcaaaauccugucacguu

SEQ ID NO: 881340 - RNA, 21 nt, Human
uggcgugcgccuguaauccca

SEQ ID NO: 881341 - RNA, 22 nt, Human
uggcgugcgccuguaaucccag

SEQ ID NO: 881342 - RNA, 24 nt, Human
uggcucacgccuguaaucccagca

SEQ ID NO: 881343 - RNA, 29 nt, Human
ugggaggcggagguugcagugacaacggu

SEQ ID NO: 881344 - RNA, 24 nt, Human
ugggaggcggagguugcagugagc

SEQ ID NO: 881345 - RNA, 24 nt, Human
ugguggcgugcgccuguaauccca

SEQ ID NO: 881346 - RNA, 24 nt, Human
ugguggcucacgccuguaauccca

SEQ ID NO: 881347 - RNA, 24 nt, Human
uugaaccugggaggcggagguugc

SEQ ID NO: 881348 - RNA, 18 nt, Human
uugcagugagcugagauc

SEQ ID NO: 881349 - RNA, 19 nt, Human
uugcagugagcugagaucg

SEQ ID NO: 881350 - RNA, 20 nt, Human
uugcagugagcugagaucgc

SEQ ID NO: 881351 - RNA, 22 nt, Human
uugcagugagcugagaucgcac

SEQ ID NO: 881352 - RNA, 20 nt, Human
uuuuaaaacuccuuauaaaa

SEQ ID NO: 881353 - RNA, 23 nt, Human
uuuuuuuucagacuacaaaggug

SEQ ID NO: 881354 - RNA, 22 nt, Human
uuuuuuuuuuuuuuuuuuucag

SEQ ID NO: 881355 - RNA, 23 nt, Human
aaaaaaaaaaaaagagaaaagga

SEQ ID NO: 881356 - RNA, 19 nt, Human
aaaaaaggagcacaaaugg

SEQ ID NO: 881357 - RNA, 23 nt, Human
aaaaacaauuccuaaaagauuga

SEQ ID NO: 881358 - RNA, 26 nt, Human
aaaaauuuaaugaagaucugaaaaac

SEQ ID NO: 881359 - RNA, 27 nt, Human
aaacagaaaacaaacaucaagggaccc

SEQ ID NO: 881360 - RNA, 23 nt, Human
aagaacaaaaauguguuuaugga

SEQ ID NO: 881361 - RNA, 22 nt, Human
aagagauagacuaagaacaaaa

SEQ ID NO: 881362 - RNA, 18 nt, Human
aagcagaggcccaugaaa

SEQ ID NO: 881363 - RNA, 21 nt, Human
acaaaaacugugaaacaagcc

SEQ ID NO: 881364 - RNA, 19 nt, Human
acaaauacaaaaacuguga

SEQ ID NO: 881365 - RNA, 20 nt, Human
agcauucaaaagcagcuuug

SEQ ID NO: 881366 - RNA, 19 nt, Human
aggcaauaaaacacucuac

SEQ ID NO: 881367 - RNA, 24 nt, Human
aguacucugcucuccggaacccac

SEQ ID NO: 881368 - RNA, 22 nt, Human
auggaugacuugcaaaggaugg

SEQ ID NO: 881369 - RNA, 20 nt, Human
auggcaaccuuuacacacuu

SEQ ID NO: 881370 - RNA, 25 nt, Human
cacaaauacaaaaacugugaaacaa

SEQ ID NO: 881371 - RNA, 21 nt, Human
caccauuaaaaaaaaaaagga

SEQ ID NO: 881372 - RNA, 25 nt, Human
cagcaacuuugaaaugaaaaaaaaa

SEQ ID NO: 881373 - RNA, 23 nt, Human
caucguuuguacaagagauagac

SEQ ID NO: 881374 - RNA, 18 nt, Human
ccacuguaauguauaaag

SEQ ID NO: 881375 - RNA, 21 nt, Human
ccacuguaauguauaaaguau

SEQ ID NO: 881376 - RNA, 22 nt, Human
cccucugcauacugcuccugau

SEQ ID NO: 881377 - RNA, 21 nt, Human
cgcucacccuccuggaauuua

SEQ ID NO: 881378 - RNA, 23 nt, Human
cucuccggaacccacucauccca

SEQ ID NO: 881379 - RNA, 18 nt, Human
cugcauacugcuccugau

SEQ ID NO: 881380 - RNA, 19 nt, Human
cuucagcaccauuuauaag

SEQ ID NO: 881381 - RNA, 22 nt, Human
gaaaaaaaaaaaaaaaaaagag

SEQ ID NO: 881382 - RNA, 23 nt, Human
guacucugcucuccggaacccac

SEQ ID NO: 881383 - RNA, 19 nt, Human
guauucaguuauauacacu

SEQ ID NO: 881384 - RNA, 22 nt, Human
uaaaacacucuacagcauaucc

SEQ ID NO: 881385 - RNA, 23 nt, Human
uaaaacacucuacagcauauccc

SEQ ID NO: 881386 - RNA, 20 nt, Human
uaaaaugccuaaguaacaac

SEQ ID NO: 881387 - RNA, 23 nt, Human
uaaagcagaggcccaugaaacca

SEQ ID NO: 881388 - RNA, 23 nt, Human
uaacaacauggaugacuugcaaa

SEQ ID NO: 881389 - RNA, 22 nt, Human
uaagugauuugccaccuccucc

SEQ ID NO: 881390 - RNA, 20 nt, Human
ucaaaagcagcuuugucaac

SEQ ID NO: 881391 - RNA, 22 nt, Human
ucaaagcacaucguuuguacaa

SEQ ID NO: 881392 - RNA, 20 nt, Human
ucgcucacccuccuggaauu

SEQ ID NO: 881393 - RNA, 20 nt, Human
ugaaaaacaauuccuaaaag

SEQ ID NO: 881394 - RNA, 24 nt, Human
ugaaaaacaauuccuaaaagauug

SEQ ID NO: 881395 - RNA, 27 nt, Human
ugaaaacacuggcagcaacuuugaaau

SEQ ID NO: 881396 - RNA, 20 nt, Human
ugaaaugaaaaaaaaaaaaa

SEQ ID NO: 881397 - RNA, 22 nt, Human
ugaaccuuuggcacuaggaauc

SEQ ID NO: 881398 - RNA, 22 nt, Human
ugacuugcaaaggaugggcucu

SEQ ID NO: 881399 - RNA, 20 nt, Human
ugauuugccaccuccuccuu

SEQ ID NO: 881400 - RNA, 23 nt, Human
ugcuucagcaccauuuauaagug

SEQ ID NO: 881401 - RNA, 28 nt, Human
uggcagcaacuuugaaaugaaaaaaaaa

SEQ ID NO: 881402 - RNA, 20 nt, Human
ugugaaacaagccauucuuc

SEQ ID NO: 881403 - RNA, 25 nt, Human
ugugaaacaagccauucuucaacaa

SEQ ID NO: 881404 - RNA, 23 nt, Human
uguuguccaucauugaaaacacu

SEQ ID NO: 881405 - RNA, 25 nt, Human
uuauaagugauuugccaccuccuuc

SEQ ID NO: 881406 - RNA, 21 nt, Human
uuauggcaaccuuuacacacu

SEQ ID NO: 881407 - RNA, 24 nt, Human
uucaacaauuugagccaagauaaa

SEQ ID NO: 881408 - RNA, 20 nt, Human
uuugagccaagauaaaaugc

SEQ ID NO: 881409 - RNA, 18 nt, Human
uuugccaccuccuccuuc

SEQ ID NO: 881410 - RNA, 21 nt, Human
aaacaagauguccccagcagc

SEQ ID NO: 881411 - RNA, 18 nt, Human
aaacaauggggaaaucaa

SEQ ID NO: 881412 - RNA, 26 nt, Human
aaacaccccuccaacccacgccaucc

SEQ ID NO: 881413 - RNA, 20 nt, Human
aaacccuccagcagcagguc

SEQ ID NO: 881414 - RNA, 21 nt, Human
aaacugaauucagccaugcaa

SEQ ID NO: 881415 - RNA, 23 nt, Human
aaagagccaucaggaaagagggg

SEQ ID NO: 881416 - RNA, 20 nt, Human
aaagggacagacacaaggag

SEQ ID NO: 881417 - RNA, 24 nt, Human
aaagugcugggauuacagguguga

SEQ ID NO: 881418 - RNA, 19 nt, Human
aacaagauguccccagcag

SEQ ID NO: 881419 - RNA, 20 nt, Human
aacacccaaacagaagugaa

SEQ ID NO: 881420 - RNA, 22 nt, Human
aacaccccuccaacccacgcca

SEQ ID NO: 881421 - RNA, 26 nt, Human
aacaggucugggccugaaacaucacc

SEQ ID NO: 881422 - RNA, 21 nt, Human
aacucccuccuuuugcuucug

SEQ ID NO: 881423 - RNA, 24 nt, Human
aagaaggcaccguaggcacaggcu

SEQ ID NO: 881424 - RNA, 20 nt, Human
aagaaggcugagaaggggga

SEQ ID NO: 881425 - RNA, 26 nt, Human
aagaaucagcaaaaaacaagacuuuc

SEQ ID NO: 881426 - RNA, 22 nt, Human
aagacuuucccauuccucauag

SEQ ID NO: 881427 - RNA, 19 nt, Human
aaggaccauccugauaagc

SEQ ID NO: 881428 - RNA, 24 nt, Human
aagugaucugccugccuuggccuc

SEQ ID NO: 881429 - RNA, 18 nt, Human
aagugcugggauuacagg

SEQ ID NO: 881430 - RNA, 19 nt, Human
aagugcugggauuacaggu

SEQ ID NO: 881431 - RNA, 26 nt, Human
aagugcugggauuacaggugugagcc

SEQ ID NO: 881432 - RNA, 23 nt, Human
acagcaacauccucaacgccccu

SEQ ID NO: 881433 - RNA, 18 nt, Human
acaggguuuuaccauguu

SEQ ID NO: 881434 - RNA, 21 nt, Human
acaggguuuuaccauguuggc

SEQ ID NO: 881435 - RNA, 24 nt, Human
acaggguuuuaccauguuggccag

SEQ ID NO: 881436 - RNA, 25 nt, Human
acagguuucaucuggagcaacaggg

SEQ ID NO: 881437 - RNA, 18 nt, Human
accauguuggccaggcug

SEQ ID NO: 881438 - RNA, 20 nt, Human
accauguuggccaggcuggu

SEQ ID NO: 881439 - RNA, 23 nt, Human
accauguuggccaggcuggucuc

SEQ ID NO: 881440 - RNA, 24 nt, Human
acggagucuugcuguggugcccag

SEQ ID NO: 881441 - RNA, 18 nt, Human
agacuggcucaccuccca

SEQ ID NO: 881442 - RNA, 23 nt, Human
agagcccacugcgccugggggcu

SEQ ID NO: 881443 - RNA, 22 nt, Human
agcaaaaaacaagacuuuccca

SEQ ID NO: 881444 - RNA, 25 nt, Human
agcaaccgucgccugagagcuuugc

SEQ ID NO: 881445 - RNA, 24 nt, Human
agcacugggagcugguuggagaga

SEQ ID NO: 881446 - RNA, 25 nt, Human
agcagccccaaaggaaggggaacgc

SEQ ID NO: 881447 - RNA, 23 nt, Human
agcuggcuuccagauggugacau

SEQ ID NO: 881448 - RNA, 22 nt, Human
aggaagagcuggaggaaagggg

SEQ ID NO: 881449 - RNA, 24 nt, Human
aggaagccucuagugggacacuga

SEQ ID NO: 881450 - RNA, 21 nt, Human
aggcaaacaggucugggccug

SEQ ID NO: 881451 - RNA, 25 nt, Human
aggcaaacaggucugggccugaaac

SEQ ID NO: 881452 - RNA, 26 nt, Human
aggcaaacaggucugggccugaaaca

SEQ ID NO: 881453 - RNA, 20 nt, Human
aggcaagaaggcaccguagg

SEQ ID NO: 881454 - RNA, 20 nt, Human
aggcagagaggcgaccuggg

SEQ ID NO: 881455 - RNA, 21 nt, Human
aggcagagaggcgaccugggu

SEQ ID NO: 881456 - RNA, 24 nt, Human
aggcagagcggaggguggaucaga

SEQ ID NO: 881457 - RNA, 20 nt, Human
aggcugacauucugugcccu

SEQ ID NO: 881458 - RNA, 25 nt, Human
aggcuggagugcaguggcacgaucu

SEQ ID NO: 881459 - RNA, 22 nt, Human
agggagagggagguggcugagu

SEQ ID NO: 881460 - RNA, 20 nt, Human
agggaggggggcguggcaag

SEQ ID NO: 881461 - RNA, 19 nt, Human
agggccccuccucucuuuu

SEQ ID NO: 881462 - RNA, 18 nt, Human
aggggcccaggaucacug

SEQ ID NO: 881463 - RNA, 19 nt, Human
aggggcucagggagacaaa

SEQ ID NO: 881464 - RNA, 22 nt, Human
agguacaagugauucuccugcc

SEQ ID NO: 881465 - RNA, 23 nt, Human
agguacaagugauucuccugccu

SEQ ID NO: 881466 - RNA, 25 nt, Human
agguggggagguggggggaggagug

SEQ ID NO: 881467 - RNA, 20 nt, Human
agguuaugugggcccuugag

SEQ ID NO: 881468 - RNA, 19 nt, Human
aguagcugggacuacaggc

SEQ ID NO: 881469 - RNA, 23 nt, Human
aguagcugggacuacaggcaugu

SEQ ID NO: 881470 - RNA, 24 nt, Human
agucuugcuguggugcccaggcug

SEQ ID NO: 881471 - RNA, 24 nt, Human
agugauucuccugccucagccucu

SEQ ID NO: 881472 - RNA, 21 nt, Human
agugcaguggcacgaucucag

SEQ ID NO: 881473 - RNA, 23 nt, Human
agugcaguggcacgaucucagcu

SEQ ID NO: 881474 - RNA, 24 nt, Human
agugcaguggcacgaucucagcuc

SEQ ID NO: 881475 - RNA, 20 nt, Human
aguggagagggaggugaagc

SEQ ID NO: 881476 - RNA, 20 nt, Human
aucaccguagcccugacuug

SEQ ID NO: 881477 - RNA, 21 nt, Human
aucuggagcagaucagggaac

SEQ ID NO: 881478 - RNA, 24 nt, Human
auguugugccccaaaagccaggga

SEQ ID NO: 881479 - RNA, 24 nt, Human
auguuuguguuuuuaguagagaca

SEQ ID NO: 881480 - RNA, 20 nt, Human
auucaucccucuuuacuccu

SEQ ID NO: 881481 - RNA, 19 nt, Human
auuuuaugcuagaccucug

SEQ ID NO: 881482 - RNA, 21 nt, Human
caaagggcuuugugaccagug

SEQ ID NO: 881483 - RNA, 24 nt, Human
caaagugcugggauuacaggugug

SEQ ID NO: 881484 - RNA, 20 nt, Human
caacacccaaacagaaguga

SEQ ID NO: 881485 - RNA, 23 nt, Human
caagauguccccagcagccccaa

SEQ ID NO: 881486 - RNA, 22 nt, Human
caagugaucugccugccuuggc

SEQ ID NO: 881487 - RNA, 18 nt, Human
caagugauucuccugccu

SEQ ID NO: 881488 - RNA, 20 nt, Human
caagugauucuccugccuca

SEQ ID NO: 881489 - RNA, 21 nt, Human
caagugauucuccugccucag

SEQ ID NO: 881490 - RNA, 25 nt, Human
cacacacacagcaacauccucaacg

SEQ ID NO: 881491 - RNA, 24 nt, Human
cacacagcaacauccucaacgccc

SEQ ID NO: 881492 - RNA, 24 nt, Human
cacccaaacagaagugaauuucua

SEQ ID NO: 881493 - RNA, 21 nt, Human
caccccaucagcggcuaucca

SEQ ID NO: 881494 - RNA, 24 nt, Human
caccccuccaacccacgccauccc

SEQ ID NO: 881495 - RNA, 22 nt, Human
cacuccccccaccgcacacaca

SEQ ID NO: 881496 - RNA, 22 nt, Human
cacugaagauuaauucuugcug

SEQ ID NO: 881497 - RNA, 22 nt, Human
cagaacccuugaaagggacaga

SEQ ID NO: 881498 - RNA, 21 nt, Human
cagaagccuggacuggguuuu

SEQ ID NO: 881499 - RNA, 18 nt, Human
cagaggcaaacaggucug

SEQ ID NO: 881500 - RNA, 21 nt, Human
cagaguccugggcuggaagcc

SEQ ID NO: 881501 - RNA, 23 nt, Human
cagcaaaaaacaagacuuuccca

SEQ ID NO: 881502 - RNA, 19 nt, Human
cagcauggccagguggcug

SEQ ID NO: 881503 - RNA, 20 nt, Human
cagccaaacccuccagcagc

SEQ ID NO: 881504 - RNA, 22 nt, Human
cagcucacugcaaccuccuccu

SEQ ID NO: 881505 - RNA, 23 nt, Human
caggaaaacaccccuccaaccca

SEQ ID NO: 881506 - RNA, 21 nt, Human
caggagacuggcucaccuccc

SEQ ID NO: 881507 - RNA, 19 nt, Human
cagggauucccaaaagguc

SEQ ID NO: 881508 - RNA, 24 nt, Human
caggguuuuaccauguuggccagg

SEQ ID NO: 881509 - RNA, 24 nt, Human
caucaggaaagagggggacagacc

SEQ ID NO: 881510 - RNA, 21 nt, Human
caugcaauagggcugccuuaa

SEQ ID NO: 881511 - RNA, 21 nt, Human
caugugccagucucuagugca

SEQ ID NO: 881512 - RNA, 24 nt, Human
cauguuggccaggcuggucucaaa

SEQ ID NO: 881513 - RNA, 18 nt, Human
ccaaacccuccagcagca

SEQ ID NO: 881514 - RNA, 23 nt, Human
ccaaagcucaggugaaagggcuu

SEQ ID NO: 881515 - RNA, 21 nt, Human
ccaaagugcugggauuacagg

SEQ ID NO: 881516 - RNA, 21 nt, Human
ccaaagugcugggauuacagg

SEQ ID NO: 881517 - RNA, 24 nt, Human
ccaaagugcugggauuacaggugu

SEQ ID NO: 881518 - RNA, 18 nt, Human
ccagagcccuuucacagc

SEQ ID NO: 881519 - RNA, 19 nt, Human
ccagcagcaggucuugcag

SEQ ID NO: 881520 - RNA, 20 nt, Human
ccagcagcaggucuugcagc

SEQ ID NO: 881521 - RNA, 21 nt, Human
ccagcagcaggucuugcagcc

SEQ ID NO: 881522 - RNA, 26 nt, Human
ccagugaccuccucgauguccaaucc

SEQ ID NO: 881523 - RNA, 24 nt, Human
cccaccgcacacacacagcaacau

SEQ ID NO: 881524 - RNA, 22 nt, Human
cccaccugacuaucagauucac

SEQ ID NO: 881525 - RNA, 21 nt, Human
cccaccuucuugucuugauuu

SEQ ID NO: 881526 - RNA, 18 nt, Human
cccacugcgccugggggc

SEQ ID NO: 881527 - RNA, 23 nt, Human
cccagaaagcugacucaccccau

SEQ ID NO: 881528 - RNA, 18 nt, Human
cccaggaaaacaccccuc

SEQ ID NO: 881529 - RNA, 22 nt, Human
ccccaaaagccagggauuccca

SEQ ID NO: 881530 - RNA, 22 nt, Human
ccccuaaaaagugagaccugaa

SEQ ID NO: 881531 - RNA, 20 nt, Human
cccuacccaccuaacaaagc

SEQ ID NO: 881532 - RNA, 18 nt, Human
cccugguuuucuuuuucu

SEQ ID NO: 881533 - RNA, 21 nt, Human
ccucaggacuccaugugccag

SEQ ID NO: 881534 - RNA, 23 nt, Human
ccucccagcuucagccucgguuu

SEQ ID NO: 881535 - RNA, 24 nt, Human
ccucccagguacaagugauucucc

SEQ ID NO: 881536 - RNA, 23 nt, Human
ccucugggaaccauuggaaguuu

SEQ ID NO: 881537 - RNA, 21 nt, Human
ccugaccucaagugaucugcc

SEQ ID NO: 881538 - RNA, 23 nt, Human
ccugaccucaagugaucugccug

SEQ ID NO: 881539 - RNA, 26 nt, Human
ccugcagggccaggcuggcauagacc

SEQ ID NO: 881540 - RNA, 22 nt, Human
ccugccuuggccucccaaagug

SEQ ID NO: 881541 - RNA, 20 nt, Human
ccugggcuggaagccaggag

SEQ ID NO: 881542 - RNA, 21 nt, Human
ccugguuuuuucaguuagggc

SEQ ID NO: 881543 - RNA, 18 nt, Human
ccugugcccaccuccacg

SEQ ID NO: 881544 - RNA, 21 nt, Human
ccuguucuggcugacccaaaa

SEQ ID NO: 881545 - RNA, 22 nt, Human
ccuguucuggcugacccaaaag

SEQ ID NO: 881546 - RNA, 22 nt, Human
ccuuggucccagcgccuuccca

SEQ ID NO: 881547 - RNA, 21 nt, Human
cgcacacacacagcaacaucc

SEQ ID NO: 881548 - RNA, 18 nt, Human
cuaacaaagcugcugugu

SEQ ID NO: 881549 - RNA, 20 nt, Human
cucaagugaucugccugccu

SEQ ID NO: 881550 - RNA, 23 nt, Human
cucacugcaaccuccuccuccca

SEQ ID NO: 881551 - RNA, 24 nt, Human
cucacugcaaccuccuccucccag

SEQ ID NO: 881552 - RNA, 24 nt, Human
cucagccucuugaguagcugggac

SEQ ID NO: 881553 - RNA, 21 nt, Human
cucaggaagagcuggaggaaa

SEQ ID NO: 881554 - RNA, 19 nt, Human
cucccagguacaagugauu

SEQ ID NO: 881555 - RNA, 22 nt, Human
cucccccuacccaccuaacaaa

SEQ ID NO: 881556 - RNA, 25 nt, Human
cucuaaagagccaucaggaaagagg

SEQ ID NO: 881557 - RNA, 19 nt, Human
cucuaaugaaggaggugag

SEQ ID NO: 881558 - RNA, 21 nt, Human
cugaaagaagugagggaggcu

SEQ ID NO: 881559 - RNA, 22 nt, Human
cugaggcugacauucugugccc

SEQ ID NO: 881560 - RNA, 22 nt, Human
cugcaaccuccuccucccaggu

SEQ ID NO: 881561 - RNA, 23 nt, Human
cugccucagccucuugaguagcu

SEQ ID NO: 881562 - RNA, 23 nt, Human
cugccuuggccucccaaagugcu

SEQ ID NO: 881563 - RNA, 19 nt, Human
cuggggccagcuggcaggg

SEQ ID NO: 881564 - RNA, 23 nt, Human
cuguaaacugaauucagccaugc

SEQ ID NO: 881565 - RNA, 19 nt, Human
cugucaguagggacagguu

SEQ ID NO: 881566 - RNA, 23 nt, Human
cuguggugcccaggcuggagugc

SEQ ID NO: 881567 - RNA, 19 nt, Human
cuguuccucuuucccaaag

SEQ ID NO: 881568 - RNA, 23 nt, Human
cuugaguagcugggacuacaggc

SEQ ID NO: 881569 - RNA, 24 nt, Human
cuugaguagcugggacuacaggca

SEQ ID NO: 881570 - RNA, 25 nt, Human
gaaacaagauguccccagcagcccc

SEQ ID NO: 881571 - RNA, 20 nt, Human
gaaccauuggaaguuuuaaa

SEQ ID NO: 881572 - RNA, 18 nt, Human
gaagccuugucacucccc

SEQ ID NO: 881573 - RNA, 23 nt, Human
gaagccuugucacuccccccacc

SEQ ID NO: 881574 - RNA, 27 nt, Human
gaagccuugucacuccccccaccgcac

SEQ ID NO: 881575 - RNA, 22 nt, Human
gacaagucccuuacucuucuca

SEQ ID NO: 881576 - RNA, 24 nt, Human
gaccucaagugaucugccugccuu

SEQ ID NO: 881577 - RNA, 24 nt, Human
gacuacaggcaugugccaccauac

SEQ ID NO: 881578 - RNA, 27 nt, Human
gacugagcccugauaacuccaaaagcc

SEQ ID NO: 881579 - RNA, 19 nt, Human
gagauauuuaggcucugag

SEQ ID NO: 881580 - RNA, 25 nt, Human
gagcuguuccucuuucccaaagcuc

SEQ ID NO: 881581 - RNA, 20 nt, Human
gaggagcccccuaggcagag

SEQ ID NO: 881582 - RNA, 24 nt, Human
gaggggauuggacaugcuguuacc

SEQ ID NO: 881583 - RNA, 18 nt, Human
gagguggcugagugagca

SEQ ID NO: 881584 - RNA, 18 nt, Human
gagguggggggaggagug

SEQ ID NO: 881585 - RNA, 25 nt, Human
gaguagcugggacuacaggcaugug

SEQ ID NO: 881586 - RNA, 18 nt, Human
gauuacaggugugagcca

SEQ ID NO: 881587 - RNA, 22 nt, Human
gauuacaggugugagccaugac

SEQ ID NO: 881588 - RNA, 18 nt, Human
gcaauugugcaagaaccc

SEQ ID NO: 881589 - RNA, 25 nt, Human
gcaggguggggcccaccugacuauc

SEQ ID NO: 881590 - RNA, 21 nt, Human
gcaguggagagggaggugaag

SEQ ID NO: 881591 - RNA, 19 nt, Human
gcccaggcuggagugcagu

SEQ ID NO: 881592 - RNA, 22 nt, Human
gcccagggcccugcuuuuccug

SEQ ID NO: 881593 - RNA, 19 nt, Human
gcccucugagauccacucu

SEQ ID NO: 881594 - RNA, 19 nt, Human
gcccugguuuucuuuuucu

SEQ ID NO: 881595 - RNA, 23 nt, Human
gccucgguuucuccaccuguagg

SEQ ID NO: 881596 - RNA, 22 nt, Human
gccuuggccucccaaagugcug

SEQ ID NO: 881597 - RNA, 22 nt, Human
gcucacugcaaccuccuccucc

SEQ ID NO: 881598 - RNA, 19 nt, Human
gcucugugcccuuggacaa

SEQ ID NO: 881599 - RNA, 19 nt, Human
gcuggagugcaguggcacg

SEQ ID NO: 881600 - RNA, 21 nt, Human
gcuggguuucuauccucuggg

SEQ ID NO: 881601 - RNA, 21 nt, Human
gcuguguggacccaacgagcu

SEQ ID NO: 881602 - RNA, 21 nt, Human
ggaaaacaccccuccaaccca

SEQ ID NO: 881603 - RNA, 25 nt, Human
ggaaaugugcacuuucccaggauuc

SEQ ID NO: 881604 - RNA, 23 nt, Human
ggaaguuuuaaagcaggagggug

SEQ ID NO: 881605 - RNA, 22 nt, Human
ggacagacacaaggaccauccu

SEQ ID NO: 881606 - RNA, 19 nt, Human
ggacuacaggcaugugcca

SEQ ID NO: 881607 - RNA, 27 nt, Human
ggagacaguggaaguuaaccgguaccc

SEQ ID NO: 881608 - RNA, 19 nt, Human
ggaggacuugagggccggg

SEQ ID NO: 881609 - RNA, 23 nt, Human
ggagucuugcuguggugcccagg

SEQ ID NO: 881610 - RNA, 20 nt, Human
ggagugcagaguccugggcu

SEQ ID NO: 881611 - RNA, 22 nt, Human
gggaauggaggagcccccuagg

SEQ ID NO: 881612 - RNA, 23 nt, Human
ggggagguggggggaggagugca

SEQ ID NO: 881613 - RNA, 20 nt, Human
ggggauuugaccagaugacc

SEQ ID NO: 881614 - RNA, 21 nt, Human
ggggccagcuggcaggguggg

SEQ ID NO: 881615 - RNA, 22 nt, Human
ggggccagcuggcagggugggg

SEQ ID NO: 881616 - RNA, 19 nt, Human
ggggcguggcaagaggagg

SEQ ID NO: 881617 - RNA, 22 nt, Human
ggggcuagugagcaggagugug

SEQ ID NO: 881618 - RNA, 18 nt, Human
ggguugagguggggagcu

SEQ ID NO: 881619 - RNA, 22 nt, Human
ggguuuuaccauguuggccagg

SEQ ID NO: 881620 - RNA, 21 nt, Human
gguacaaggcauaagaagaga

SEQ ID NO: 881621 - RNA, 21 nt, Human
gguggggggaggagugcagag

SEQ ID NO: 881622 - RNA, 20 nt, Human
guacaagugauucuccugcc

SEQ ID NO: 881623 - RNA, 21 nt, Human
gucaguagggacagguuucau

SEQ ID NO: 881624 - RNA, 19 nt, Human
guccuuagcacaugucugg

SEQ ID NO: 881625 - RNA, 24 nt, Human
gucuugcuguggugcccaggcugg

SEQ ID NO: 881626 - RNA, 24 nt, Human
gugaagcagacaccaccgggcccu

SEQ ID NO: 881627 - RNA, 22 nt, Human
gugagggaggcuggccagggag

SEQ ID NO: 881628 - RNA, 22 nt, Human
gugauucuccugccucagccuc

SEQ ID NO: 881629 - RNA, 24 nt, Human
gugcccaggcuggagugcaguggc

SEQ ID NO: 881630 - RNA, 21 nt, Human
guucuugucuuuggacauaaa

SEQ ID NO: 881631 - RNA, 22 nt, Human
uaagugccaaggggcucaggga

SEQ ID NO: 881632 - RNA, 19 nt, Human
uaauccaagacggagacag

SEQ ID NO: 881633 - RNA, 23 nt, Human
uaaugaaggaggugagaguccug

SEQ ID NO: 881634 - RNA, 24 nt, Human
uaauguuuguguuuuuaguagaga

SEQ ID NO: 881635 - RNA, 18 nt, Human
uaauucugggucuugugc

SEQ ID NO: 881636 - RNA, 24 nt, Human
uacaagugauucuccugccucagc

SEQ ID NO: 881637 - RNA, 18 nt, Human
uacaggacuuacgcgucu

SEQ ID NO: 881638 - RNA, 23 nt, Human
uacaggcaugugccaccauaccc

SEQ ID NO: 881639 - RNA, 23 nt, Human
uacaggugugagccaugacgccu

SEQ ID NO: 881640 - RNA, 20 nt, Human
uaccagcccugugcccaccu

SEQ ID NO: 881641 - RNA, 21 nt, Human
uaccauguuggccaggcuggu

SEQ ID NO: 881642 - RNA, 24 nt, Human
uaccauguuggccaggcuggucuc

SEQ ID NO: 881643 - RNA, 26 nt, Human
uacccaccuaacaaagcugcugugau

SEQ ID NO: 881644 - RNA, 18 nt, Human
uagaaacaagaugucccc

SEQ ID NO: 881645 - RNA, 22 nt, Human
uagagacaggguuuuaccaugu

SEQ ID NO: 881646 - RNA, 20 nt, Human
uagggccccuccucucuuuu

SEQ ID NO: 881647 - RNA, 19 nt, Human
uagguggggaggugggggg

SEQ ID NO: 881648 - RNA, 24 nt, Human
uaguagagacaggguuuuaccaug

SEQ ID NO: 881649 - RNA, 22 nt, Human
uagugagcaggagugugagggu

SEQ ID NO: 881650 - RNA, 19 nt, Human
uauccugaugcugugccuu

SEQ ID NO: 881651 - RNA, 18 nt, Human
uaucuggacagaucaggg

SEQ ID NO: 881652 - RNA, 18 nt, Human
ucacugcaaccuccuccc

SEQ ID NO: 881653 - RNA, 18 nt, Human
ucacugcaaccuccuccu

SEQ ID NO: 881654 - RNA, 24 nt, Human
ucacugcaaccuccuccucccagg

SEQ ID NO: 881655 - RNA, 18 nt, Human
ucagaguacuaacguaca

SEQ ID NO: 881656 - RNA, 23 nt, Human
ucagccucuugaguagcugggac

SEQ ID NO: 881657 - RNA, 25 nt, Human
ucagcucacugcaaccuccuccucc

SEQ ID NO: 881658 - RNA, 24 nt, Human
uccaacacccaaacagaagugaau

SEQ ID NO: 881659 - RNA, 20 nt, Human
uccaacccacgccaucccuu

SEQ ID NO: 881660 - RNA, 18 nt, Human
uccagaggcaaacagguc

SEQ ID NO: 881661 - RNA, 22 nt, Human
uccaugugccagucucuagugc

SEQ ID NO: 881662 - RNA, 21 nt, Human
ucccaaaaggucugccgggcc

SEQ ID NO: 881663 - RNA, 23 nt, Human
ucccaaagugcugggauuacagg

SEQ ID NO: 881664 - RNA, 18 nt, Human
ucccagcgccuucccacg

SEQ ID NO: 881665 - RNA, 20 nt, Human
ucccaggauucucucagcuc

SEQ ID NO: 881666 - RNA, 21 nt, Human
ucccagguacaagugauucuc

SEQ ID NO: 881667 - RNA, 24 nt, Human
ucccagguacaagugauucuccug

SEQ ID NO: 881668 - RNA, 23 nt, Human
uccccagcagccccaaaggaagc

SEQ ID NO: 881669 - RNA, 23 nt, Human
uccccccaccgcacacacacagc

SEQ ID NO: 881670 - RNA, 23 nt, Human
ucccuuacucuucucagccucag

SEQ ID NO: 881671 - RNA, 25 nt, Human
uccgcagacccugcagggccaggcu

SEQ ID NO: 881672 - RNA, 25 nt, Human
uccugaccucaagugaucugccugc

SEQ ID NO: 881673 - RNA, 18 nt, Human
uccuugcuaagcugcugc

SEQ ID NO: 881674 - RNA, 23 nt, Human
ucucccccuacccaccuaacaaa

SEQ ID NO: 881675 - RNA, 24 nt, Human
ucuccugccucagccucuugagua

SEQ ID NO: 881676 - RNA, 23 nt, Human
ucucuaaugaaggaggugagagu

SEQ ID NO: 881677 - RNA, 26 nt, Human
ucucucagcucuuugcauuuuuuagu

SEQ ID NO: 881678 - RNA, 19 nt, Human
ucugguguauaacgauggc

SEQ ID NO: 881679 - RNA, 24 nt, Human
ucuugaguagcugggacuacaggc

SEQ ID NO: 881680 - RNA, 23 nt, Human
ucuugcuguggugcccaggcugg

SEQ ID NO: 881681 - RNA, 24 nt, Human
ucuugcuguggugcccaggcugga

SEQ ID NO: 881682 - RNA, 19 nt, Human
ucuuucuuucuuucuuuuu

SEQ ID NO: 881683 - RNA, 21 nt, Human
ucuuucuuucuuucuuuuucu

SEQ ID NO: 881684 - RNA, 21 nt, Human
ucuuucuuucuuuuucuuuuu

SEQ ID NO: 881685 - RNA, 25 nt, Human
ucuuucuuuuucuuuuuuuuuuuuu

SEQ ID NO: 881686 - RNA, 19 nt, Human
ucuuuuucuuucuuucuuu

SEQ ID NO: 881687 - RNA, 19 nt, Human
ugaaacaucaccguagccc

SEQ ID NO: 881688 - RNA, 21 nt, Human
ugaaacaucaccguagcccuu

SEQ ID NO: 881689 - RNA, 24 nt, Human
ugaaagggacagacacaaggacca

SEQ ID NO: 881690 - RNA, 19 nt, Human
ugaacucccccugaggcug

SEQ ID NO: 881691 - RNA, 21 nt, Human
ugaagaaucagcaaaaaacaa

SEQ ID NO: 881692 - RNA, 24 nt, Human
ugaagagggagagggagguggcug

SEQ ID NO: 881693 - RNA, 22 nt, Human
ugaagcagacaccaccgggccc

SEQ ID NO: 881694 - RNA, 20 nt, Human
ugaaggaggugagaguccug

SEQ ID NO: 881695 - RNA, 20 nt, Human
ugaaguagguggggaggugg

SEQ ID NO: 881696 - RNA, 19 nt, Human
ugacacaggggcccugucu

SEQ ID NO: 881697 - RNA, 19 nt, Human
ugacacaggggcccugucu

SEQ ID NO: 881698 - RNA, 18 nt, Human
ugacccaaaaggaggcag

SEQ ID NO: 881699 - RNA, 18 nt, Human
ugaccucaagugaucugc

SEQ ID NO: 881700 - RNA, 24 nt, Human
ugaccucaagugaucugccugccu

SEQ ID NO: 881701 - RNA, 18 nt, Human
ugaccuugaacucccccu

SEQ ID NO: 881702 - RNA, 19 nt, Human
ugacucaccccaucagcgg

SEQ ID NO: 881703 - RNA, 21 nt, Human
ugagaagggggaguugggcau

SEQ ID NO: 881704 - RNA, 18 nt, Human
ugagagauauuuaggcuc

SEQ ID NO: 881705 - RNA, 22 nt, Human
ugagcaaccgucgccugagagc

SEQ ID NO: 881706 - RNA, 20 nt, Human
ugaggaacugaaagaaguga

SEQ ID NO: 881707 - RNA, 22 nt, Human
ugaggagugacuugauccaugg

SEQ ID NO: 881708 - RNA, 19 nt, Human
ugagugagcagggaaugga

SEQ ID NO: 881709 - RNA, 23 nt, Human
ugaugcugugccuugguacgggg

SEQ ID NO: 881710 - RNA, 20 nt, Human
ugauucuccugccucagccu

SEQ ID NO: 881711 - RNA, 21 nt, Human
ugcaagaacccaggaaaacac

SEQ ID NO: 881712 - RNA, 22 nt, Human
ugcaagaacccaggaaaacacc

SEQ ID NO: 881713 - RNA, 24 nt, Human
ugcaauuuuugguucuuccacauc

SEQ ID NO: 881714 - RNA, 18 nt, Human
ugcccaggcuggagugca

SEQ ID NO: 881715 - RNA, 21 nt, Human
ugcccaggcuggagugcagug

SEQ ID NO: 881716 - RNA, 22 nt, Human
ugcccaggcuggagugcagugg

SEQ ID NO: 881717 - RNA, 24 nt, Human
ugcccaggcuggagugcaguggca

SEQ ID NO: 881718 - RNA, 26 nt, Human
ugccccaaaagccagggauucccaaa

SEQ ID NO: 881719 - RNA, 24 nt, Human
ugccucagccucuugaguagcugg

SEQ ID NO: 881720 - RNA, 18 nt, Human
ugccugccuuggccuccc

SEQ ID NO: 881721 - RNA, 19 nt, Human
ugcucugugcccuuggaca

SEQ ID NO: 881722 - RNA, 19 nt, Human
ugcugcaguggagagggag

SEQ ID NO: 881723 - RNA, 24 nt, Human
ugcugggauuacaggugugagcca

SEQ ID NO: 881724 - RNA, 24 nt, Human
ugcuguggugcccaggcuggagug

SEQ ID NO: 881725 - RNA, 24 nt, Human
uggacaagucccuuacucuucuca

SEQ ID NO: 881726 - RNA, 21 nt, Human
uggagagggaggugaagcaga

SEQ ID NO: 881727 - RNA, 19 nt, Human
uggaggagcccccuaggca

SEQ ID NO: 881728 - RNA, 23 nt, Human
uggagugcaguggcacgaucuca

SEQ ID NO: 881729 - RNA, 24 nt, Human
uggagugcaguggcacgaucucag

SEQ ID NO: 881730 - RNA, 21 nt, Human
uggcaagaggagggccugggg

SEQ ID NO: 881731 - RNA, 23 nt, Human
uggcaagaggagggccugggggc

SEQ ID NO: 881732 - RNA, 24 nt, Human
uggcaagaggagggccugggggcc

SEQ ID NO: 881733 - RNA, 24 nt, Human
uggcacgaucucagcucacugcaa

SEQ ID NO: 881734 - RNA, 21 nt, Human
uggcaggcagagcggagggug

SEQ ID NO: 881735 - RNA, 24 nt, Human
uggccaggcuggucucaaaguccu

SEQ ID NO: 881736 - RNA, 22 nt, Human
uggcccagcuggcuuccagaug

SEQ ID NO: 881737 - RNA, 22 nt, Human
uggcucaccucccagcuucagc

SEQ ID NO: 881738 - RNA, 23 nt, Human
ugggaaaugugcacuuucccagg

SEQ ID NO: 881739 - RNA, 22 nt, Human
ugggacccggcacagggcuggg

SEQ ID NO: 881740 - RNA, 21 nt, Human
ugggacuacaggcaugugcca

SEQ ID NO: 881741 - RNA, 22 nt, Human
ugggacuacaggcaugugccac

SEQ ID NO: 881742 - RNA, 24 nt, Human
ugggacuacaggcaugugccacca

SEQ ID NO: 881743 - RNA, 27 nt, Human
ugggagcugguuggagagaaugaguac

SEQ ID NO: 881744 - RNA, 18 nt, Human
ugggauuacaggugugag

SEQ ID NO: 881745 - RNA, 19 nt, Human
ugggauuacaggugugagc

SEQ ID NO: 881746 - RNA, 21 nt, Human
ugggauuacaggugugagcca

SEQ ID NO: 881747 - RNA, 21 nt, Human
ugggauuacaggugugagcca

SEQ ID NO: 881748 - RNA, 21 nt, Human
ugggauuacaggugugagcca

SEQ ID NO: 881749 - RNA, 22 nt, Human
ugggauuacaggugugagccau

SEQ ID NO: 881750 - RNA, 23 nt, Human
ugggauuacaggugugagccaug

SEQ ID NO: 881751 - RNA, 27 nt, Human
ugggauuacaggugugagccaugacgc

SEQ ID NO: 881752 - RNA, 24 nt, Human
uggggagguggggggaggagugca

SEQ ID NO: 881753 - RNA, 20 nt, Human
uggggccagcuggcagggug

SEQ ID NO: 881754 - RNA, 22 nt, Human
ugggucuugugcugucaguagg

SEQ ID NO: 881755 - RNA, 25 nt, Human
ugggucuugugcugucaguagggac

SEQ ID NO: 881756 - RNA, 22 nt, Human
uggucccagcgccuucccacgg

SEQ ID NO: 881757 - RNA, 20 nt, Human
ugguggaggggaggaaaggg

SEQ ID NO: 881758 - RNA, 23 nt, Human
ugucacuccccccaccgcacaca

SEQ ID NO: 881759 - RNA, 22 nt, Human
ugucauugggcaguccugggaa

SEQ ID NO: 881760 - RNA, 18 nt, Human
ugugaggguugagguggg

SEQ ID NO: 881761 - RNA, 24 nt, Human
uguggugcccaggcuggagugcag

SEQ ID NO: 881762 - RNA, 20 nt, Human
uuaaagcaggagggugacuu

SEQ ID NO: 881763 - RNA, 24 nt, Human
uuaguagagacaggguuuuaccau

SEQ ID NO: 881764 - RNA, 24 nt, Human
uucuuucuuucuuucuuuuucuuu

SEQ ID NO: 881765 - RNA, 22 nt, Human
uugaagaaucagcaaaaaacaa

SEQ ID NO: 881766 - RNA, 24 nt, Human
uugcuguggugcccaggcuggagu

SEQ ID NO: 881767 - RNA, 18 nt, Human
uugcuucugggaggcugc

SEQ ID NO: 881768 - RNA, 18 nt, Human
uuggccucccaaagugcu

SEQ ID NO: 881769 - RNA, 22 nt, Human
uuggcucugaugcaucugccuc

SEQ ID NO: 881770 - RNA, 22 nt, Human
uuggugaugauuaaacaauggg

SEQ ID NO: 881771 - RNA, 23 nt, Human
uuggugguccccaggauguugug

SEQ ID NO: 881772 - RNA, 24 nt, Human
uuucuauccucuggguaccaggga

SEQ ID NO: 881773 - RNA, 24 nt, Human
uuugagacugagcccugauaacuc

SEQ ID NO: 881774 - RNA, 25 nt, Human
uuuggauuuuaugcuagaccucugg

SEQ ID NO: 881775 - RNA, 18 nt, Human
uuuguguuuuuaguagag

SEQ ID NO: 881776 - RNA, 23 nt, Human
uuuguuccuuuauccccagcacu

SEQ ID NO: 881777 - RNA, 18 nt, Human
uuuuaguuuacccggcca

SEQ ID NO: 881778 - RNA, 24 nt, Human
uuuuuaguagagacaggguuuuac

SEQ ID NO: 881779 - RNA, 25 nt, Human
uuuuucuuuuuuuuuuuuagacgga

SEQ ID NO: 881780 - RNA, 23 nt, Human
uuuuuuuuuuuuagacggagucu

SEQ ID NO: 881781 - RNA, 24 nt, Human
acaaaaauagauuuggccuagagc

SEQ ID NO: 881782 - RNA, 19 nt, Human
acagcgaaggcggcagcga

SEQ ID NO: 881783 - RNA, 19 nt, Human
agcaaagggcuggggagcc

SEQ ID NO: 881784 - RNA, 23 nt, Human
agcgacucuaucggaagagauuc

SEQ ID NO: 881785 - RNA, 22 nt, Human
aggcggcagcgaggcggggcgu

SEQ ID NO: 881786 - RNA, 25 nt, Human
augcuuccucccgucccuuucgcug

SEQ ID NO: 881787 - RNA, 23 nt, Human
caaacagaagugguaggugcggg

SEQ ID NO: 881788 - RNA, 19 nt, Human
cacauccuccggccggggc

SEQ ID NO: 881789 - RNA, 24 nt, Human
ccaaaguagaaaacacugguuuau

SEQ ID NO: 881790 - RNA, 19 nt, Human
ccccuuagauagcucaguu

SEQ ID NO: 881791 - RNA, 23 nt, Human
ccgccgccgaucggcgccacuca

SEQ ID NO: 881792 - RNA, 18 nt, Human
ccgccgccucccgccgcc

SEQ ID NO: 881793 - RNA, 22 nt, Human
ccgccgccucccgccgcccgcc

SEQ ID NO: 881794 - RNA, 23 nt, Human
ccgucccgcggcgccggucuccg

SEQ ID NO: 881795 - RNA, 19 nt, Human
ccucccgucccuuucgcug

SEQ ID NO: 881796 - RNA, 21 nt, Human
ccucccgucccuuucgcuggg

SEQ ID NO: 881797 - RNA, 21 nt, Human
ccucugguuccuuucuuuccu

SEQ ID NO: 881798 - RNA, 22 nt, Human
ccuggcucgcccaggccaucug

SEQ ID NO: 881799 - RNA, 20 nt, Human
ccuuucgcuggguauccucg

SEQ ID NO: 881800 - RNA, 21 nt, Human
ccuuucuucuuucuguucucc

SEQ ID NO: 881801 - RNA, 24 nt, Human
ccuuucuuuccuuucuucuuucug

SEQ ID NO: 881802 - RNA, 20 nt, Human
cgaggagggaggccggcggc

SEQ ID NO: 881803 - RNA, 19 nt, Human
cgccguggagcgcggggcg

SEQ ID NO: 881804 - RNA, 20 nt, Human
cgccguggagcgcggggcgu

SEQ ID NO: 881805 - RNA, 19 nt, Human
cgcugccgcucacggugcg

SEQ ID NO: 881806 - RNA, 21 nt, Human
cgggcacgagaggcgcgcggg

SEQ ID NO: 881807 - RNA, 20 nt, Human
cgggucggggggcucugccg

SEQ ID NO: 881808 - RNA, 21 nt, Human
cuccagccggagcuccgcgcc

SEQ ID NO: 881809 - RNA, 19 nt, Human
cucugcggccgagccuuuc

SEQ ID NO: 881810 - RNA, 22 nt, Human
cuuuccuuucuucuuucuguuu

SEQ ID NO: 881811 - RNA, 21 nt, Human
gagccgcggcuucgccuccgg

SEQ ID NO: 881812 - RNA, 18 nt, Human
gaggccggcggcgcugcc

SEQ ID NO: 881813 - RNA, 24 nt, Human
gcccgggggcuccgucugagcgcu

SEQ ID NO: 881814 - RNA, 18 nt, Human
gcgagucagagcgcggcc

SEQ ID NO: 881815 - RNA, 24 nt, Human
gcgcggggcgagggcgccguggag

SEQ ID NO: 881816 - RNA, 18 nt, Human
gcggcagcgaggcggggc

SEQ ID NO: 881817 - RNA, 20 nt, Human
gcggcgaggagggaggccgg

SEQ ID NO: 881818 - RNA, 22 nt, Human
ggaauccgugaaacagacacac

SEQ ID NO: 881819 - RNA, 19 nt, Human
ggaggccggcggcgcugcc

SEQ ID NO: 881820 - RNA, 22 nt, Human
ggcggcagcgaggcggggcgug

SEQ ID NO: 881821 - RNA, 20 nt, Human
gggagcggggccucagaccu

SEQ ID NO: 881822 - RNA, 20 nt, Human
gggcgcauggcucaggcugg

SEQ ID NO: 881823 - RNA, 21 nt, Human
gggcuggggagccgcggcuuc

SEQ ID NO: 881824 - RNA, 18 nt, Human
ggggcuccgucugagcgc

SEQ ID NO: 881825 - RNA, 22 nt, Human
gguuuugucuuuuuuguuuuga

SEQ ID NO: 881826 - RNA, 20 nt, Human
guauuuauauauuuauauau

SEQ ID NO: 881827 - RNA, 24 nt, Human
gugaaacagacacacggcgucugc

SEQ ID NO: 881828 - RNA, 27 nt, Human
gugaaacagacacacggcgucugcccu

SEQ ID NO: 881829 - RNA, 18 nt, Human
guguguguguguguuugu

SEQ ID NO: 881830 - RNA, 21 nt, Human
uaaauaaaucagauuuuguaa

SEQ ID NO: 881831 - RNA, 26 nt, Human
uaggugcggggacccucccccuuaau

SEQ ID NO: 881832 - RNA, 19 nt, Human
ucccgcggcgccggucucc

SEQ ID NO: 881833 - RNA, 21 nt, Human
ucccggcgcgcggcucuugcc

SEQ ID NO: 881834 - RNA, 18 nt, Human
uccggccggggcgcgggg

SEQ ID NO: 881835 - RNA, 18 nt, Human
uccuagguuucggaugcu

SEQ ID NO: 881836 - RNA, 22 nt, Human
ucgcugggccccggcucugcgg

SEQ ID NO: 881837 - RNA, 23 nt, Human
ucgcugggccccggcucugcggc

SEQ ID NO: 881838 - RNA, 18 nt, Human
ucucucugccucugguuc

SEQ ID NO: 881839 - RNA, 24 nt, Human
ucugccucugguuccuuucuuucc

SEQ ID NO: 881840 - RNA, 23 nt, Human
ucugguuccuuucuuuccuuucu

SEQ ID NO: 881841 - RNA, 18 nt, Human
ucuuuccuuucuucuuuc

SEQ ID NO: 881842 - RNA, 28 nt, Human
ugaaacagacacacggcgucugcccccu

SEQ ID NO: 881843 - RNA, 22 nt, Human
ugcccccaggagguaaaaaaga

SEQ ID NO: 881844 - RNA, 23 nt, Human
ugguaggugcggggacccuccuc

SEQ ID NO: 881845 - RNA, 20 nt, Human
uuccucccgucccuuucgcu

SEQ ID NO: 881846 - RNA, 20 nt, Human
uucuccaaagaaaacucugg

SEQ ID NO: 881847 - RNA, 25 nt, Human
uuuauauauguauauuaaccagaaa

SEQ ID NO: 881848 - RNA, 22 nt, Human
uuucccaccggcaaacagaagu

SEQ ID NO: 881849 - RNA, 18 nt, Human
uuuuguuuguuuuguuuu

SEQ ID NO: 881850 - RNA, 19 nt, Human
uuuuguuuguuuuguuuuu

SEQ ID NO: 881851 - RNA, 21 nt, Human
aaacucccucccccagccuuc

SEQ ID NO: 881852 - RNA, 23 nt, Human
aacucccucccccagccuuccug

SEQ ID NO: 881853 - RNA, 21 nt, Human
acucccucccccagccuuccu

SEQ ID NO: 881854 - RNA, 23 nt, Human
agcaggggaggggguggaauggc

SEQ ID NO: 881855 - RNA, 19 nt, Human
aggcaguuaaggcuuggcu

SEQ ID NO: 881856 - RNA, 25 nt, Human
auagaacaagauuuuguuuucagag

SEQ ID NO: 881857 - RNA, 23 nt, Human
auucuccccagcaggggaggggg

SEQ ID NO: 881858 - RNA, 22 nt, Human
cagccuuccugucccuuggagg

SEQ ID NO: 881859 - RNA, 19 nt, Human
cccagccuuccugucccuu

SEQ ID NO: 881860 - RNA, 21 nt, Human
cgagaaggcugggugcugugu

SEQ ID NO: 881861 - RNA, 21 nt, Human
cugguucagggucaggcaggc

SEQ ID NO: 881862 - RNA, 21 nt, Human
cuugaugugucauucucccca

SEQ ID NO: 881863 - RNA, 27 nt, Human
ggcaguucagcuggguucugguucagg

SEQ ID NO: 881864 - RNA, 20 nt, Human
ggggaggggguggaauggcu

SEQ ID NO: 881865 - RNA, 24 nt, Human
ggguuguaaacucccucccccagc

SEQ ID NO: 881866 - RNA, 23 nt, Human
gguuguaaacucccucccccagc

SEQ ID NO: 881867 - RNA, 20 nt, Human
ucccuuggaggggcaguuca

SEQ ID NO: 881868 - RNA, 21 nt, Human
ucuuccuuccccuucccccaa

SEQ ID NO: 881869 - RNA, 18 nt, Human
ugaugugucauucucccc

SEQ ID NO: 881870 - RNA, 22 nt, Human
uggcuggugcgagaaggcuggg

SEQ ID NO: 881871 - RNA, 18 nt, Human
uggcuuggguuguaaacu

SEQ ID NO: 881872 - RNA, 18 nt, Human
uggugcgagaaggcuggg

SEQ ID NO: 881873 - RNA, 23 nt, Human
uggugcgagaaggcugggugcug

SEQ ID NO: 881874 - RNA, 21 nt, Human
ugugucauucuccccagcagg

SEQ ID NO: 881875 - RNA, 21 nt, Human
uucagggucaggcaggcaguu

SEQ ID NO: 881876 - RNA, 19 nt, Human
uuuuuuuuuuuuuuuuugc

SEQ ID NO: 881877 - RNA, 24 nt, Human
uuuuuuuuuuuuuuuuuugcauag

SEQ ID NO: 881878 - RNA, 20 nt, Human
uuuuuuuuuuuuuuuuuugg

SEQ ID NO: 881879 - RNA, 22 nt, Human
caucccgcugcuuccuccgguc

SEQ ID NO: 881880 - RNA, 20 nt, Human
cccguucguagcugcagccg

SEQ ID NO: 881881 - RNA, 19 nt, Human
cccuguccaucagcccuuc

SEQ ID NO: 881882 - RNA, 20 nt, Human
ccgccgccauuuuccccucg

SEQ ID NO: 881883 - RNA, 18 nt, Human
ccgccgccgccgccgccg

SEQ ID NO: 881884 - RNA, 23 nt, Human
ccuuugggauaguugccugaccc

SEQ ID NO: 881885 - RNA, 18 nt, Human
cuacugcugcauccaccu

SEQ ID NO: 881886 - RNA, 24 nt, Human
cuacugcugcauccaccuccaucc

SEQ ID NO: 881887 - RNA, 20 nt, Human
cuccaucccgcugcuuccuu

SEQ ID NO: 881888 - RNA, 23 nt, Human
cugcuuccuccggucccguucgu

SEQ ID NO: 881889 - RNA, 21 nt, Human
cuggggacuacugcugcaucc

SEQ ID NO: 881890 - RNA, 27 nt, Human
cuuuuauuaaugacagcgguuucucuc

SEQ ID NO: 881891 - RNA, 22 nt, Human
gcagccgccgccgccgccgccg

SEQ ID NO: 881892 - RNA, 22 nt, Human
gcugcagccgccgccgccgccg

SEQ ID NO: 881893 - RNA, 21 nt, Human
gugcucaggggcugcuccccu

SEQ ID NO: 881894 - RNA, 24 nt, Human
ucguagcugcagccgccgccgccg

SEQ ID NO: 881895 - RNA, 22 nt, Human
ucucaaggaaguguagugcccu

SEQ ID NO: 881896 - RNA, 20 nt, Human
ugaccccuguccaucagccc

SEQ ID NO: 881897 - RNA, 26 nt, Human
uuuuuuuuuuuuuuuggugcucaggg

SEQ ID NO: 881898 - RNA, 18 nt, Human
uuuuuuuuuuuuuuuuug

SEQ ID NO: 881899 - RNA, 20 nt, Human
uuuuuuuuuuuuuuuuuggu

SEQ ID NO: 881900 - RNA, 18 nt, Human
aaaaauaucaaaaugcca

SEQ ID NO: 881901 - RNA, 24 nt, Human
aaaacaaaaacaaaauuguugaga

SEQ ID NO: 881902 - RNA, 22 nt, Human
aaacaaaaaaacuuacuuuagc

SEQ ID NO: 881903 - RNA, 18 nt, Human
aaacgagccugccaguac

SEQ ID NO: 881904 - RNA, 24 nt, Human
aaauaucaaaaugccaguuaagcu

SEQ ID NO: 881905 - RNA, 19 nt, Human
aagggcuuuggcgacacuc

SEQ ID NO: 881906 - RNA, 21 nt, Human
aguugcccuuuauuuuuagau

SEQ ID NO: 881907 - RNA, 21 nt, Human
caacagcccagacuugauacu

SEQ ID NO: 881908 - RNA, 21 nt, Human
caaugaaccucuuccugguca

SEQ ID NO: 881909 - RNA, 24 nt, Human
cagcccaaagcugguagacugaug

SEQ ID NO: 881910 - RNA, 21 nt, Human
cagcccagacuugauacuaaa

SEQ ID NO: 881911 - RNA, 21 nt, Human
caguacaaccuccaccaacag

SEQ ID NO: 881912 - RNA, 21 nt, Human
caucuucaaauccuuucucaa

SEQ ID NO: 881913 - RNA, 22 nt, Human
caugauuauuucaaugaaccuc

SEQ ID NO: 881914 - RNA, 22 nt, Human
ccugccaguacaaagugaaaau

SEQ ID NO: 881915 - RNA, 19 nt, Human
cuauuauaaaacaaaaaca

SEQ ID NO: 881916 - RNA, 19 nt, Human
cuccaccaacagcccagac

SEQ ID NO: 881917 - RNA, 22 nt, Human
gcgcuucaugcaugauuauuuc

SEQ ID NO: 881918 - RNA, 18 nt, Human
guacaaccuccaccaaca

SEQ ID NO: 881919 - RNA, 21 nt, Human
gucuauuauaaaacaaaaaca

SEQ ID NO: 881920 - RNA, 20 nt, Human
gugcagucgagcgccacggc

SEQ ID NO: 881921 - RNA, 20 nt, Human
uaagcuaguaacaagacaaa

SEQ ID NO: 881922 - RNA, 18 nt, Human
uacaaagugaaaauucua

SEQ ID NO: 881923 - RNA, 23 nt, Human
uaccacagaugauuguuuauaac

SEQ ID NO: 881924 - RNA, 23 nt, Human
uaccacaguacaaccuccaccaa

SEQ ID NO: 881925 - RNA, 21 nt, Human
uacuuuagcccuguuuuguuc

SEQ ID NO: 881926 - RNA, 22 nt, Human
uauuucaaugaaccucuuccug

SEQ ID NO: 881927 - RNA, 18 nt, Human
uccaccaacagcccagac

SEQ ID NO: 881928 - RNA, 26 nt, Human
ugaaguaaagccucaauucgaucauc

SEQ ID NO: 881929 - RNA, 21 nt, Human
ugaguuuuugacucgccaguc

SEQ ID NO: 881930 - RNA, 19 nt, Human
ugcagucgagcgccacggc

SEQ ID NO: 881931 - RNA, 19 nt, Human
uugauacuaaaauccuagu

SEQ ID NO: 881932 - RNA, 20 nt, Human
uuuaaaguaaucuauuucac

SEQ ID NO: 881933 - RNA, 23 nt, Human
aagaguuuccacugugggauuuu

SEQ ID NO: 881934 - RNA, 18 nt, Human
acagcccgagagagaagc

SEQ ID NO: 881935 - RNA, 27 nt, Human
acagccugugguuguagcuuucuuucu

SEQ ID NO: 881936 - RNA, 26 nt, Human
agagaagcugguguugauagagagag

SEQ ID NO: 881937 - RNA, 20 nt, Human
aggcagagggccagcacgug

SEQ ID NO: 881938 - RNA, 19 nt, Human
agucccagcagccgcccuc

SEQ ID NO: 881939 - RNA, 24 nt, Human
caaacagcccgagagagaagcugg

SEQ ID NO: 881940 - RNA, 23 nt, Human
caaauguaaaagcauauucacau

SEQ ID NO: 881941 - RNA, 23 nt, Human
caacagcacuuuagagaaggcag

SEQ ID NO: 881942 - RNA, 22 nt, Human
cacagcagccccaugagguaga

SEQ ID NO: 881943 - RNA, 20 nt, Human
cacuuuagagaaggcagagg

SEQ ID NO: 881944 - RNA, 19 nt, Human
cagaauugacaggucggaa

SEQ ID NO: 881945 - RNA, 20 nt, Human
cagagggccagcacguggcu

SEQ ID NO: 881946 - RNA, 19 nt, Human
cagcccgagagagaagcug

SEQ ID NO: 881947 - RNA, 21 nt, Human
caggacacagcagacacagcg

SEQ ID NO: 881948 - RNA, 19 nt, Human
cccaaacccacacagcagc

SEQ ID NO: 881949 - RNA, 22 nt, Human
cccaaacccacacagcagcccc

SEQ ID NO: 881950 - RNA, 23 nt, Human
cccacacagcagccccaugaggu

SEQ ID NO: 881951 - RNA, 20 nt, Human
ccccaggacacagcagacac

SEQ ID NO: 881952 - RNA, 19 nt, Human
cccugagcaaacagcccga

SEQ ID NO: 881953 - RNA, 22 nt, Human
ccucccaaacccacacagcagc

SEQ ID NO: 881954 - RNA, 18 nt, Human
ccuggcuauuucugacuu

SEQ ID NO: 881955 - RNA, 21 nt, Human
cgcugcgcugcugcgagccug

SEQ ID NO: 881956 - RNA, 21 nt, Human
cucccaaacccacacagcagc

SEQ ID NO: 881957 - RNA, 20 nt, Human
gagagaagcugguguugaua

SEQ ID NO: 881958 - RNA, 22 nt, Human
gcgagccuggcuauuucugacu

SEQ ID NO: 881959 - RNA, 19 nt, Human
gcuccauccccugucccca

SEQ ID NO: 881960 - RNA, 20 nt, Human
guccauccccaucuccucca

SEQ ID NO: 881961 - RNA, 20 nt, Human
gugaagcuuucaaacagccu

SEQ ID NO: 881962 - RNA, 18 nt, Human
uaagaguuuccacugugg

SEQ ID NO: 881963 - RNA, 20 nt, Human
uagagaaggcagagggccag

SEQ ID NO: 881964 - RNA, 21 nt, Human
uagauguggcaccuaugggau

SEQ ID NO: 881965 - RNA, 21 nt, Human
uaguuaggggcuccuucccag

SEQ ID NO: 881966 - RNA, 19 nt, Human
ucaguccauccccaucucc

SEQ ID NO: 881967 - RNA, 26 nt, Human
uccacuaucuagucccagcagccgcc

SEQ ID NO: 881968 - RNA, 22 nt, Human
ucccaaacccacacagcagccc

SEQ ID NO: 881969 - RNA, 25 nt, Human
uccccaugugaagaggcugccccac

SEQ ID NO: 881970 - RNA, 18 nt, Human
ucccugagcaaacagccc

SEQ ID NO: 881971 - RNA, 20 nt, Human
ucccuugaagaugcuugacc

SEQ ID NO: 881972 - RNA, 22 nt, Human
ucuacgcauuuucuaaauuucc

SEQ ID NO: 881973 - RNA, 21 nt, Human
ugacuugcccuaguuaggggc

SEQ ID NO: 881974 - RNA, 24 nt, Human
ugacuugcccuaguuaggggcucc

SEQ ID NO: 881975 - RNA, 19 nt, Human
ugcuccauccccugucccc

SEQ ID NO: 881976 - RNA, 18 nt, Human
ugggaacuggaggaaugu

SEQ ID NO: 881977 - RNA, 24 nt, Human
ugugggaacuggaggaaugugggg

SEQ ID NO: 881978 - RNA, 20 nt, Human
uuacauugguaauaaagaaa

SEQ ID NO: 881979 - RNA, 28 nt, Human
uucauccacuaucuagucccagcagccg

SEQ ID NO: 881980 - RNA, 22 nt, Human
uuucuugccuucccugagcaaa

SEQ ID NO: 881981 - RNA, 19 nt, Human
uuuuucugcuuugcagaaa

SEQ ID NO: 881982 - RNA, 19 nt, Human
uuuuuuuuuuuuuuuuugu

SEQ ID NO: 881983 - RNA, 20 nt, Human
uuuuuuuuuuuuuuuuuugg

SEQ ID NO: 881984 - RNA, 22 nt, Human
aaccgcgcggcaaagaugcgcc

SEQ ID NO: 881985 - RNA, 22 nt, Human
agccagagccaauggcagcgcg

SEQ ID NO: 881986 - RNA, 22 nt, Human
caacuuggauuucagagccgaa

SEQ ID NO: 881987 - RNA, 23 nt, Human
caacuuggauuucagagccgaaa

SEQ ID NO: 881988 - RNA, 24 nt, Human
cagcgaccuucgccacgccccuga

SEQ ID NO: 881989 - RNA, 24 nt, Human
ccaauggcagcgcgagcgcuuucu

SEQ ID NO: 881990 - RNA, 22 nt, Human
ccgcccggaaaccgcgcggcaa

SEQ ID NO: 881991 - RNA, 19 nt, Human
ccgcggcgcacagguuccg

SEQ ID NO: 881992 - RNA, 23 nt, Human
cguuuuguauuuuucaggggccc

SEQ ID NO: 881993 - RNA, 23 nt, Human
gaauuuuauuauaaaacagaaca

SEQ ID NO: 881994 - RNA, 21 nt, Human
gcgagcgcuuucgcaggaggg

SEQ ID NO: 881995 - RNA, 19 nt, Human
gucagcccaaacgccuuuc

SEQ ID NO: 881996 - RNA, 25 nt, Human
uaaaacagaacaaugacacaauaua

SEQ ID NO: 881997 - RNA, 18 nt, Human
ugggaaacaaaaaucucc

SEQ ID NO: 881998 - RNA, 23 nt, Human
uucaacucucuccaaacuucguu

SEQ ID NO: 881999 - RNA, 22 nt, Human
aggggcuccuggccccgggggu

SEQ ID NO: 882000 - RNA, 21 nt, Human
cacaggugcaacagcagcgcu

SEQ ID NO: 882001 - RNA, 21 nt, Human
cgggcaggcugggugcagagc

SEQ ID NO: 882002 - RNA, 18 nt, Human
gcagagcucugcucaagg

SEQ ID NO: 882003 - RNA, 18 nt, Human
gcugggugcagagcucug

SEQ ID NO: 882004 - RNA, 20 nt, Human
ggcaggcugggugcagagcu

SEQ ID NO: 882005 - RNA, 21 nt, Human
ggugugggcgggcaggcuggg

SEQ ID NO: 882006 - RNA, 19 nt, Human
gugcagagcucugcucaag

SEQ ID NO: 882007 - RNA, 18 nt, Human
ugggaggaccagcaggau

SEQ ID NO: 882008 - RNA, 20 nt, Human
ugggaggaccagcaggaugg

SEQ ID NO: 882009 - RNA, 21 nt, Human
ugggaggaccagcaggauggu

SEQ ID NO: 882010 - RNA, 22 nt, Human
ugggaggaccagcaggauggug

SEQ ID NO: 882011 - RNA, 20 nt, Human
ugggcgggcaggcugggugc

SEQ ID NO: 882012 - RNA, 21 nt, Human
ugggcgggcaggcugggugca

SEQ ID NO: 882013 - RNA, 22 nt, Human
uggugugggcgggcaggcuggg

SEQ ID NO: 882014 - RNA, 23 nt, Human
uggugugggcgggcaggcugggu

SEQ ID NO: 882015 - RNA, 19 nt, Human
acuguacagaugcaaccuu

SEQ ID NO: 882016 - RNA, 22 nt, Human
augagaaaacagauuuguugua

SEQ ID NO: 882017 - RNA, 21 nt, Human
ccacuugauucuaacaugauc

SEQ ID NO: 882018 - RNA, 22 nt, Human
cuggggccaccaggcccuuccu

SEQ ID NO: 882019 - RNA, 19 nt, Human
gccaccaggcccuuccugg

SEQ ID NO: 882020 - RNA, 19 nt, Human
ggggccaccaggcccuucc

SEQ ID NO: 882021 - RNA, 24 nt, Human
uacauacuguacagaugcaaccuu

SEQ ID NO: 882022 - RNA, 24 nt, Human
uauacacauaaucccaagugugug

SEQ ID NO: 882023 - RNA, 18 nt, Human
uauagcaugagaacagua

SEQ ID NO: 882024 - RNA, 22 nt, Human
ucuaacaugaucucugcccaaa

SEQ ID NO: 882025 - RNA, 19 nt, Human
ugagaaaacagauuuguug

SEQ ID NO: 882026 - RNA, 24 nt, Human
ugagaaaacagauuuguuguagag

SEQ ID NO: 882027 - RNA, 21 nt, Human
ugauaaaaaugagaaaacaga

SEQ ID NO: 882028 - RNA, 21 nt, Human
ugauucuaacaugaucucugc

SEQ ID NO: 882029 - RNA, 18 nt, Human
ugcuggggccaccaggcc

SEQ ID NO: 882030 - RNA, 20 nt, Human
uuauguauacacauaauccc

SEQ ID NO: 882031 - RNA, 21 nt, Human
uuccugggggaacaaggacuc

SEQ ID NO: 882032 - RNA, 22 nt, Human
uuugcaguuacucauuucagug

SEQ ID NO: 882033 - RNA, 20 nt, Human
accaucuuuucaucaugcaa

SEQ ID NO: 882034 - RNA, 21 nt, Human
acccgcgccggguggcaccuc

SEQ ID NO: 882035 - RNA, 18 nt, Human
agacaauggguacauaug

SEQ ID NO: 882036 - RNA, 19 nt, Human
agauuaaaaggccaugucu

SEQ ID NO: 882037 - RNA, 25 nt, Human
agcccggguccccgcugagguuggc

SEQ ID NO: 882038 - RNA, 19 nt, Human
aggcaaaccauuucuaaau

SEQ ID NO: 882039 - RNA, 21 nt, Human
aggccaugucuacuggaaaua

SEQ ID NO: 882040 - RNA, 18 nt, Human
aucauagcaucuccaucc

SEQ ID NO: 882041 - RNA, 18 nt, Human
cacccgcgccggguggca

SEQ ID NO: 882042 - RNA, 18 nt, Human
cacugcagucgccgccgc

SEQ ID NO: 882043 - RNA, 19 nt, Human
cauagcaucuccauccucc

SEQ ID NO: 882044 - RNA, 22 nt, Human
cauguaaggcuaacaauugccc

SEQ ID NO: 882045 - RNA, 19 nt, Human
ccacgccgcgcuccccacu

SEQ ID NO: 882046 - RNA, 27 nt, Human
ccacugcagucgccgccgccgccgccg

SEQ ID NO: 882047 - RNA, 25 nt, Human
ccaucuuuucaucaugcaacacugg

SEQ ID NO: 882048 - RNA, 18 nt, Human
ccgccgccgccgccgcgu

SEQ ID NO: 882049 - RNA, 20 nt, Human
ccgccgccgccgccgcgucc

SEQ ID NO: 882050 - RNA, 19 nt, Human
ccuccacgccgcgcucccc

SEQ ID NO: 882051 - RNA, 20 nt, Human
cgccgccgccgccgcguccc

SEQ ID NO: 882052 - RNA, 24 nt, Human
cguuacaaaaguucucaagcaaag

SEQ ID NO: 882053 - RNA, 18 nt, Human
cuggaaauacuacaggau

SEQ ID NO: 882054 - RNA, 23 nt, Human
cuuccaucauagcaucuccaucc

SEQ ID NO: 882055 - RNA, 18 nt, Human
ggcucggcuuggggaaga

SEQ ID NO: 882056 - RNA, 21 nt, Human
gucccugagcccggguccccg

SEQ ID NO: 882057 - RNA, 21 nt, Human
uaaaugcuaagacuaaucagu

SEQ ID NO: 882058 - RNA, 21 nt, Human
uaaggcaaaccauuucuaaau

SEQ ID NO: 882059 - RNA, 21 nt, Human
uagaaucauaccaucuuuuca

SEQ ID NO: 882060 - RNA, 24 nt, Human
uauacauauccuuuguacacaucu

SEQ ID NO: 882061 - RNA, 22 nt, Human
ucagucuuaagcccuuagauua

SEQ ID NO: 882062 - RNA, 23 nt, Human
ucccugagcccggguccccgcug

SEQ ID NO: 882063 - RNA, 21 nt, Human
ucuccaaggcuaaauguggua

SEQ ID NO: 882064 - RNA, 18 nt, Human
ucugaaaucucccaauug

SEQ ID NO: 882065 - RNA, 23 nt, Human
ugaaaagaaaguacaaaaacagc

SEQ ID NO: 882066 - RNA, 19 nt, Human
ugaaaucucccaauuguaa

SEQ ID NO: 882067 - RNA, 21 nt, Human
ugagaaaaacuucaaaaaaac

SEQ ID NO: 882068 - RNA, 21 nt, Human
ugaggauauguucuagguauu

SEQ ID NO: 882069 - RNA, 20 nt, Human
ugcuuccaucauagcaucuc

SEQ ID NO: 882070 - RNA, 23 nt, Human
uggcucggcuuggggaagaggcu

SEQ ID NO: 882071 - RNA, 24 nt, Human
uugcugaggauauguucuagguau

SEQ ID NO: 882072 - RNA, 22 nt, Human
uugucuccauuaaggcaaacca

SEQ ID NO: 882073 - RNA, 23 nt, Human
uuuaaaaccgauacuuuuuacuc

SEQ ID NO: 882074 - RNA, 25 nt, Human
uuuagugagaaaaacuucaaaaaaa

SEQ ID NO: 882075 - RNA, 23 nt, Human
uuuuuuuuuuaaaaccgauacuu

SEQ ID NO: 882076 - RNA, 21 nt, Human
aaaauaaagggcgugggcagg

SEQ ID NO: 882077 - RNA, 19 nt, Human
aaacaagaaaacaacugcc

SEQ ID NO: 882078 - RNA, 22 nt, Human
aaccaugcugagacuggaaagc

SEQ ID NO: 882079 - RNA, 22 nt, Human
aagcacugacagcagcaaagcc

SEQ ID NO: 882080 - RNA, 24 nt, Human
aagcuucagcuccaaaccaugcug

SEQ ID NO: 882081 - RNA, 20 nt, Human
aagggcgugggcaggcccug

SEQ ID NO: 882082 - RNA, 21 nt, Human
aagggcgugggcaggcccugc

SEQ ID NO: 882083 - RNA, 20 nt, Human
acaccgccagcaccccgccc

SEQ ID NO: 882084 - RNA, 21 nt, Human
acacuacagcggggaaaagua

SEQ ID NO: 882085 - RNA, 23 nt, Human
acaucaccugccaccaguggccu

SEQ ID NO: 882086 - RNA, 20 nt, Human
accccgccccuccaacucca

SEQ ID NO: 882087 - RNA, 25 nt, Human
accccgccccuccaacuccauccac

SEQ ID NO: 882088 - RNA, 19 nt, Human
acgccccgcugcagccacc

SEQ ID NO: 882089 - RNA, 21 nt, Human
agaagguaaaguaucuguucc

SEQ ID NO: 882090 - RNA, 21 nt, Human
agacagagaaugugaccagga

SEQ ID NO: 882091 - RNA, 27 nt, Human
agacaggaagcagauacacugcugccu

SEQ ID NO: 882092 - RNA, 20 nt, Human
aggcaaaauaaagggcgugg

SEQ ID NO: 882093 - RNA, 21 nt, Human
aggcuguagacucugcauccg

SEQ ID NO: 882094 - RNA, 23 nt, Human
caaaacaccaaaauccuggggga

SEQ ID NO: 882095 - RNA, 22 nt, Human
caaaauccugggggagagcccc

SEQ ID NO: 882096 - RNA, 21 nt, Human
cacaccgccagcaccccgccc

SEQ ID NO: 882097 - RNA, 22 nt, Human
caccgccagcaccccgccccuc

SEQ ID NO: 882098 - RNA, 19 nt, Human
caccugcaaacaagaaaac

SEQ ID NO: 882099 - RNA, 20 nt, Human
caccugcaaacaagaaaaca

SEQ ID NO: 882100 - RNA, 21 nt, Human
cacgccccgcugcagccaccc

SEQ ID NO: 882101 - RNA, 18 nt, Human
cacugacagcagcaaagc

SEQ ID NO: 882102 - RNA, 23 nt, Human
cagcaccccgccccuccaacucc

SEQ ID NO: 882103 - RNA, 18 nt, Human
caggaugcagcaguguca

SEQ ID NO: 882104 - RNA, 19 nt, Human
caguggccuaucccagccc

SEQ ID NO: 882105 - RNA, 22 nt, Human
caguggcuccagccggcagcgc

SEQ ID NO: 882106 - RNA, 23 nt, Human
caucugaaccccuggcuucguuc

SEQ ID NO: 882107 - RNA, 18 nt, Human
ccacacacccggccgcac

SEQ ID NO: 882108 - RNA, 19 nt, Human
ccacugcuccuaaacuccu

SEQ ID NO: 882109 - RNA, 23 nt, Human
ccacuugaggugggagcauucca

SEQ ID NO: 882110 - RNA, 20 nt, Human
cccacgccccgcugcagcca

SEQ ID NO: 882111 - RNA, 25 nt, Human
cccccccgccacaccgccagcaccc

SEQ ID NO: 882112 - RNA, 22 nt, Human
cccccgccacaccgccagcacc

SEQ ID NO: 882113 - RNA, 21 nt, Human
ccccggcccacgccccgcugc

SEQ ID NO: 882114 - RNA, 19 nt, Human
ccccggggcuccgcccggg

SEQ ID NO: 882115 - RNA, 21 nt, Human
ccccggggcuccgcccgggcc

SEQ ID NO: 882116 - RNA, 21 nt, Human
ccccuccaacuccauccaccc

SEQ ID NO: 882117 - RNA, 18 nt, Human
cccgccacaccgccagca

SEQ ID NO: 882118 - RNA, 22 nt, Human
cccgccacaccgccagcacccc

SEQ ID NO: 882119 - RNA, 20 nt, Human
cccuccaacuccauccaccc

SEQ ID NO: 882120 - RNA, 24 nt, Human
ccgccacaccgccagcaccccgcc

SEQ ID NO: 882121 - RNA, 20 nt, Human
ccgggccggaguccggaucu

SEQ ID NO: 882122 - RNA, 21 nt, Human
ccucguaguccgggccggagu

SEQ ID NO: 882123 - RNA, 18 nt, Human
ccugcccccccgccacac

SEQ ID NO: 882124 - RNA, 25 nt, Human
cgccacaccgccagcaccccgcccc

SEQ ID NO: 882125 - RNA, 23 nt, Human
cgccagcaccccgccccuccaac

SEQ ID NO: 882126 - RNA, 24 nt, Human
cgccugcccccccgccacaccgcc

SEQ ID NO: 882127 - RNA, 19 nt, Human
cggccgcaccugcaaacaa

SEQ ID NO: 882128 - RNA, 20 nt, Human
cgggcagcugggucaggcug

SEQ ID NO: 882129 - RNA, 24 nt, Human
cggggcuccgcccgggcccugccg

SEQ ID NO: 882130 - RNA, 25 nt, Human
cguucagcccccucaugggccucca

SEQ ID NO: 882131 - RNA, 22 nt, Human
cuaguccaaaagauggggaccc

SEQ ID NO: 882132 - RNA, 21 nt, Human
cucacaccccagacaggaagc

SEQ ID NO: 882133 - RNA, 24 nt, Human
cuccacuugaggugggagcauucc

SEQ ID NO: 882134 - RNA, 18 nt, Human
cuccccgccgccggcccc

SEQ ID NO: 882135 - RNA, 18 nt, Human
cuccgcccgggcccugcc

SEQ ID NO: 882136 - RNA, 19 nt, Human
cugagacuggaaagcacug

SEQ ID NO: 882137 - RNA, 21 nt, Human
cugcaucaugaaguaauguug

SEQ ID NO: 882138 - RNA, 18 nt, Human
cugcccccccgccacacc

SEQ ID NO: 882139 - RNA, 20 nt, Human
cuguggugugcuuugcugca

SEQ ID NO: 882140 - RNA, 21 nt, Human
gacagcagcaaagcccaaaga

SEQ ID NO: 882141 - RNA, 19 nt, Human
gagagccccucuaccuucc

SEQ ID NO: 882142 - RNA, 22 nt, Human
gagcauuccaggagacagagaa

SEQ ID NO: 882143 - RNA, 18 nt, Human
gccagcaccccgccccuc

SEQ ID NO: 882144 - RNA, 19 nt, Human
gcccugccgccugcccccc

SEQ ID NO: 882145 - RNA, 19 nt, Human
gcccugcgccuguugcugu

SEQ ID NO: 882146 - RNA, 24 nt, Human
gccgcaccugcaaacaagaaaaca

SEQ ID NO: 882147 - RNA, 18 nt, Human
gccgccggccccccggcc

SEQ ID NO: 882148 - RNA, 22 nt, Human
ggaaccaggggaaugagcugcu

SEQ ID NO: 882149 - RNA, 19 nt, Human
ggccccccggcccacgccc

SEQ ID NO: 882150 - RNA, 19 nt, Human
uaaaugcagcucacacccc

SEQ ID NO: 882151 - RNA, 18 nt, Human
uaggaaggccagcucaag

SEQ ID NO: 882152 - RNA, 25 nt, Human
ucaccugccaccaguggccuauccc

SEQ ID NO: 882153 - RNA, 20 nt, Human
ucagcccccucaugggccuc

SEQ ID NO: 882154 - RNA, 19 nt, Human
ucaugggccuccauaggcc

SEQ ID NO: 882155 - RNA, 21 nt, Human
ucaugggccuccauaggcccu

SEQ ID NO: 882156 - RNA, 19 nt, Human
uccccggggcuccgcccgg

SEQ ID NO: 882157 - RNA, 22 nt, Human
uccccggggcuccgcccgggcc

SEQ ID NO: 882158 - RNA, 21 nt, Human
ugacagcagcaaagcccaaag

SEQ ID NO: 882159 - RNA, 20 nt, Human
ugaccaggaugcagcagugu

SEQ ID NO: 882160 - RNA, 19 nt, Human
ugaggucccccagugaagg

SEQ ID NO: 882161 - RNA, 25 nt, Human
ugcaaacaagaaaacaacugccaca

SEQ ID NO: 882162 - RNA, 26 nt, Human
ugcaggccccggccuccccgccgccg

SEQ ID NO: 882163 - RNA, 19 nt, Human
ugcguggugacaguggcuc

SEQ ID NO: 882164 - RNA, 20 nt, Human
ugcuccaggaucccugccac

SEQ ID NO: 882165 - RNA, 21 nt, Human
ugcuccaggaucccugccacg

SEQ ID NO: 882166 - RNA, 19 nt, Human
uggcaggaacugguguuag

SEQ ID NO: 882167 - RNA, 18 nt, Human
uguaaggccaagagagcu

SEQ ID NO: 882168 - RNA, 18 nt, Human
ugugcguggugacagugg

SEQ ID NO: 882169 - RNA, 25 nt, Human
uuaaaggcuuuuuauuaggaaccag

SEQ ID NO: 882170 - RNA, 20 nt, Human
uuuuuauuaggaaccagggg

SEQ ID NO: 882171 - RNA, 18 nt, Human
aauaaccaacaacaccca

SEQ ID NO: 882172 - RNA, 23 nt, Human
aauaaccaacaacacccaacccg

SEQ ID NO: 882173 - RNA, 19 nt, Human
accaaauaaccaacaacac

SEQ ID NO: 882174 - RNA, 18 nt, Human
accaacaacacccaaccc

SEQ ID NO: 882175 - RNA, 22 nt, Human
agccugcgccggugaggaggca

SEQ ID NO: 882176 - RNA, 24 nt, Human
auaaccaacaacacccaacccgaa

SEQ ID NO: 882177 - RNA, 21 nt, Human
caaauaaccaacaacacccaa

SEQ ID NO: 882178 - RNA, 24 nt, Human
caaauaaccaacaacacccaaccc

SEQ ID NO: 882179 - RNA, 23 nt, Human
caacacccaacccgaaaagaagg

SEQ ID NO: 882180 - RNA, 23 nt, Human
cccugcccaccugcccuucuccc

SEQ ID NO: 882181 - RNA, 19 nt, Human
ccgaaaagaagggggaagg

SEQ ID NO: 882182 - RNA, 22 nt, Human
ccgcccccuccuagccugcgcc

SEQ ID NO: 882183 - RNA, 19 nt, Human
ccgcgcgcuccagccccgg

SEQ ID NO: 882184 - RNA, 20 nt, Human
ccgcgcgcuccagccccggc

SEQ ID NO: 882185 - RNA, 20 nt, Human
ccugcccuucucccuuccuc

SEQ ID NO: 882186 - RNA, 20 nt, Human
ccuugggccaaggguugugg

SEQ ID NO: 882187 - RNA, 21 nt, Human
cucccugcccaccugcccuuc

SEQ ID NO: 882188 - RNA, 24 nt, Human
gacccugucuugcucccugcccac

SEQ ID NO: 882189 - RNA, 21 nt, Human
gggcuggccaggccaccguca

SEQ ID NO: 882190 - RNA, 18 nt, Human
gggggcccaaggggcaac

SEQ ID NO: 882191 - RNA, 18 nt, Human
guaccaaguccuugggcc

SEQ ID NO: 882192 - RNA, 21 nt, Human
uaaccaaauaaccaacaacac

SEQ ID NO: 882193 - RNA, 26 nt, Human
uccaaacaacaugggggggcccaagg

SEQ ID NO: 882194 - RNA, 18 nt, Human
ucucuuuugaagaaggug

SEQ ID NO: 882195 - RNA, 20 nt, Human
ugcaguuagguggggagggg

SEQ ID NO: 882196 - RNA, 22 nt, Human
ugguuucagugcaguuaggugg

SEQ ID NO: 882197 - RNA, 22 nt, Human
caggggcauggcccgggugucc

SEQ ID NO: 882198 - RNA, 22 nt, Human
ccccuggcagcaguaccugccu

SEQ ID NO: 882199 - RNA, 25 nt, Human
ccccuggcagcaguaccugccuguu

SEQ ID NO: 882200 - RNA, 22 nt, Human
cccgcggcgcccgccccgagac

SEQ ID NO: 882201 - RNA, 24 nt, Human
cccgcggcgcccgccccgagaccc

SEQ ID NO: 882202 - RNA, 22 nt, Human
ccuggguagcaggcacuaguuc

SEQ ID NO: 882203 - RNA, 22 nt, Human
cucccagcgccuuauaacaacu

SEQ ID NO: 882204 - RNA, 26 nt, Human
cuggguccucugcuccugggcucagg

SEQ ID NO: 882205 - RNA, 21 nt, Human
ggcccggagaggucccgcggc

SEQ ID NO: 882206 - RNA, 18 nt, Human
guacacaacaccaugggc

SEQ ID NO: 882207 - RNA, 23 nt, Human
guucagagcccccuggcagcagu

SEQ ID NO: 882208 - RNA, 24 nt, Human
uccgugggcaaccugggugcuucg

SEQ ID NO: 882209 - RNA, 23 nt, Human
ugagauaaacccaguuuucccac

SEQ ID NO: 882210 - RNA, 24 nt, Human
ugcccauccucucccagcgccuua

SEQ ID NO: 882211 - RNA, 20 nt, Human
ugccuugagauaaacccagu

SEQ ID NO: 882212 - RNA, 21 nt, Human
uucccacugccuucuucuuca

SEQ ID NO: 882213 - RNA, 22 nt, Human
aaacaugaaccacagugcauga

SEQ ID NO: 882214 - RNA, 26 nt, Human
aaagaaaaagucgccaagggacaaaa

SEQ ID NO: 882215 - RNA, 25 nt, Human
aagaaaaagucgccaagggacaaaa

SEQ ID NO: 882216 - RNA, 21 nt, Human
aaggaagacaucuagaacggu

SEQ ID NO: 882217 - RNA, 19 nt, Human
aagguccgugcaagccaca

SEQ ID NO: 882218 - RNA, 21 nt, Human
agcaagaaugaaugaaaucca

SEQ ID NO: 882219 - RNA, 22 nt, Human
agcaagaaugaaugaaauccac

SEQ ID NO: 882220 - RNA, 18 nt, Human
agguggaauugaaaagcc

SEQ ID NO: 882221 - RNA, 22 nt, Human
aucaugaaguuuuagcccagag

SEQ ID NO: 882222 - RNA, 21 nt, Human
aucuucuaggaaagcaaagcu

SEQ ID NO: 882223 - RNA, 18 nt, Human
caaaauuccaagggcauu

SEQ ID NO: 882224 - RNA, 21 nt, Human
cacaacacauaggauuauggg

SEQ ID NO: 882225 - RNA, 22 nt, Human
cacuguuuaggguugacugccu

SEQ ID NO: 882226 - RNA, 19 nt, Human
ccacuggagugaguugggc

SEQ ID NO: 882227 - RNA, 26 nt, Human
cccacaaaguccugaccauucucaac

SEQ ID NO: 882228 - RNA, 21 nt, Human
ccccccaggucugccuucucc

SEQ ID NO: 882229 - RNA, 24 nt, Human
ccucaguuuucacugguccagcgu

SEQ ID NO: 882230 - RNA, 21 nt, Human
ccuucuguccauuccuuccca

SEQ ID NO: 882231 - RNA, 20 nt, Human
cgccaagggacaaaauucuu

SEQ ID NO: 882232 - RNA, 26 nt, Human
cuagaacgguaauccuagcuuuuucu

SEQ ID NO: 882233 - RNA, 19 nt, Human
cuagcuuuuucuccccacc

SEQ ID NO: 882234 - RNA, 23 nt, Human
cuguccauuccuucccaaggccu

SEQ ID NO: 882235 - RNA, 21 nt, Human
gaaaagaaugagaacagaaga

SEQ ID NO: 882236 - RNA, 18 nt, Human
gaaguuuuagcccagagc

SEQ ID NO: 882237 - RNA, 18 nt, Human
gccuaguaggaagagcuc

SEQ ID NO: 882238 - RNA, 19 nt, Human
ggaaauaggaaaaagagcc

SEQ ID NO: 882239 - RNA, 19 nt, Human
ggaauugaaaagccuugua

SEQ ID NO: 882240 - RNA, 20 nt, Human
ggaggaaauaaaguuuagag

SEQ ID NO: 882241 - RNA, 21 nt, Human
ggagugaaaagaaugagaaca

SEQ ID NO: 882242 - RNA, 21 nt, Human
ggcaguacuggggguagcuga

SEQ ID NO: 882243 - RNA, 22 nt, Human
gguggcagggaaauaggaaaaa

SEQ ID NO: 882244 - RNA, 24 nt, Human
gguggcagggaaauaggaaaaaga

SEQ ID NO: 882245 - RNA, 23 nt, Human
uaggaaagcaaagcugguggcag

SEQ ID NO: 882246 - RNA, 19 nt, Human
uaguaggaagagcucucau

SEQ ID NO: 882247 - RNA, 21 nt, Human
uccccaccacaacacauagga

SEQ ID NO: 882248 - RNA, 21 nt, Human
uccccccaggucugccuucuc

SEQ ID NO: 882249 - RNA, 23 nt, Human
uccccccaggucugccuucuccu

SEQ ID NO: 882250 - RNA, 25 nt, Human
uccgugcaagccacacggugagccg

SEQ ID NO: 882251 - RNA, 22 nt, Human
uccucgccauggucgcuauuuc

SEQ ID NO: 882252 - RNA, 23 nt, Human
ucuucaucuucuaggaaagcaaa

SEQ ID NO: 882253 - RNA, 18 nt, Human
ugaaaacaguguuccuuc

SEQ ID NO: 882254 - RNA, 23 nt, Human
ugagaacagaagaacccgcagcc

SEQ ID NO: 882255 - RNA, 19 nt, Human
ugagagaggcacuguugua

SEQ ID NO: 882256 - RNA, 23 nt, Human
ugccggcugguccucucuuccca

SEQ ID NO: 882257 - RNA, 18 nt, Human
uggaaggcuuuacaaaau

SEQ ID NO: 882258 - RNA, 19 nt, Human
uggaauugaaaagccuugu

SEQ ID NO: 882259 - RNA, 21 nt, Human
uggauauaugugcauguccuc

SEQ ID NO: 882260 - RNA, 22 nt, Human
uggcagggaaauaggaaaaaga

SEQ ID NO: 882261 - RNA, 19 nt, Human
ugggaggaaauaaaguuua

SEQ ID NO: 882262 - RNA, 26 nt, Human
ugggaggaaauaaaguuuagagcugg

SEQ ID NO: 882263 - RNA, 23 nt, Human
ugguuuggaaggcuuuacaaaau

SEQ ID NO: 882264 - RNA, 23 nt, Human
uucacaaucaccuuuucggaaac

SEQ ID NO: 882265 - RNA, 19 nt, Human
uucccacaacagcuggagc

SEQ ID NO: 882266 - RNA, 21 nt, Human
uugagaacgucuuugaaguug

SEQ ID NO: 882267 - RNA, 24 nt, Human
uuggcguacaucuuacaaagaaaa

SEQ ID NO: 882268 - RNA, 22 nt, Human
uuucuuccucguccucccccca

SEQ ID NO: 882269 - RNA, 20 nt, Human
uuuggaaggcuuuacaaaau

SEQ ID NO: 882270 - RNA, 20 nt, Human
uuuucacugguccagcgugg

SEQ ID NO: 882271 - RNA, 20 nt, Human
aaaaaaaacaaaagcacaaa

SEQ ID NO: 882272 - RNA, 23 nt, Human
aaaaacaauuccuaaaagauuga

SEQ ID NO: 882273 - RNA, 22 nt, Human
aaaaccaugaaacaagccacca

SEQ ID NO: 882274 - RNA, 20 nt, Human
aaacaaaagcacaaauggau

SEQ ID NO: 882275 - RNA, 21 nt, Human
aaacaaaagcacaaauggaug

SEQ ID NO: 882276 - RNA, 26 nt, Human
aaacagaaaacaaacaucaagggacc

SEQ ID NO: 882277 - RNA, 20 nt, Human
aacaagccaccauucuucaa

SEQ ID NO: 882278 - RNA, 23 nt, Human
aagaacaaaaauguguuuacgga

SEQ ID NO: 882279 - RNA, 19 nt, Human
aagaagaaaaaaggagcua

SEQ ID NO: 882280 - RNA, 22 nt, Human
aagagauagacuaagaacaaaa

SEQ ID NO: 882281 - RNA, 24 nt, Human
accacccccgacuaccgcccccua

SEQ ID NO: 882282 - RNA, 22 nt, Human
accauaaaaaaaaacaaaagca

SEQ ID NO: 882283 - RNA, 19 nt, Human
acuagcuacacaaugcauu

SEQ ID NO: 882284 - RNA, 19 nt, Human
agacacaaauacaaaaacc

SEQ ID NO: 882285 - RNA, 20 nt, Human
agcauucaaaagcagcuuug

SEQ ID NO: 882286 - RNA, 19 nt, Human
aggcaauaaaacacucuac

SEQ ID NO: 882287 - RNA, 22 nt, Human
auaagugauucgccgccuccuu

SEQ ID NO: 882288 - RNA, 22 nt, Human
auggaugacuugcaaaggaugg

SEQ ID NO: 882289 - RNA, 24 nt, Human
caaaaaccaugaaacaagccacca

SEQ ID NO: 882290 - RNA, 22 nt, Human
caaauacaaaaaccaugaaaca

SEQ ID NO: 882291 - RNA, 25 nt, Human
cacaaauacaaaaaccaugaaacaa

SEQ ID NO: 882292 - RNA, 24 nt, Human
cacccccgacuaccgcccccuacu

SEQ ID NO: 882293 - RNA, 25 nt, Human
cagcaauuuugaaaugaaaaaaaaa

SEQ ID NO: 882294 - RNA, 22 nt, Human
cauaaaaaaaaacaaaagcaca

SEQ ID NO: 882295 - RNA, 25 nt, Human
cauaaaaaaaaacaaaagcacaaau

SEQ ID NO: 882296 - RNA, 26 nt, Human
cauaaaaaaaaacaaaagcacaaaug

SEQ ID NO: 882297 - RNA, 23 nt, Human
caucguuuguacaagagauagac

SEQ ID NO: 882298 - RNA, 18 nt, Human
caugaaacaagccaccau

SEQ ID NO: 882299 - RNA, 25 nt, Human
caugaaacaagccaccauucuucaa

SEQ ID NO: 882300 - RNA, 21 nt, Human
ccauaaaaaaaaacaaaagca

SEQ ID NO: 882301 - RNA, 19 nt, Human
cccaccacccccgacuacc

SEQ ID NO: 882302 - RNA, 22 nt, Human
cccccuacucucuaccccaccc

SEQ ID NO: 882303 - RNA, 19 nt, Human
cccccuuuuauuuuuucuc

SEQ ID NO: 882304 - RNA, 22 nt, Human
cccuacucucuaccccacccaa

SEQ ID NO: 882305 - RNA, 23 nt, Human
cccucuguuguccaucauugaaa

SEQ ID NO: 882306 - RNA, 24 nt, Human
ccuucucccaccacccccgacuac

SEQ ID NO: 882307 - RNA, 23 nt, Human
cgcccccuacucucuaccccacc

SEQ ID NO: 882308 - RNA, 20 nt, Human
cuacucucuaccccacccaa

SEQ ID NO: 882309 - RNA, 18 nt, Human
cuccuucucccaccaccc

SEQ ID NO: 882310 - RNA, 19 nt, Human
cuccuucucccaccacccc

SEQ ID NO: 882311 - RNA, 19 nt, Human
gaaaaaaaaaaagaaagaa

SEQ ID NO: 882312 - RNA, 21 nt, Human
gaaaaaaaaaaagaaagaaga

SEQ ID NO: 882313 - RNA, 20 nt, Human
gacuaccgcccccuacucuc

SEQ ID NO: 882314 - RNA, 20 nt, Human
gauucgccgccuccuccuuc

SEQ ID NO: 882315 - RNA, 20 nt, Human
gucaaaggaauagaaccacc

SEQ ID NO: 882316 - RNA, 22 nt, Human
uaaaaaaaaacaaaagcacaaa

SEQ ID NO: 882317 - RNA, 22 nt, Human
uaaaacacucuacagcauaucc

SEQ ID NO: 882318 - RNA, 25 nt, Human
uaaaacacucuacagcauaucccuc

SEQ ID NO: 882319 - RNA, 20 nt, Human
uaaaaugccuaaguaacaac

SEQ ID NO: 882320 - RNA, 23 nt, Human
uaacaacauggaugacuugcaaa

SEQ ID NO: 882321 - RNA, 23 nt, Human
uaagcaccauaaaaaaaaacaaa

SEQ ID NO: 882322 - RNA, 22 nt, Human
uaagugauucgccgccuccucc

SEQ ID NO: 882323 - RNA, 22 nt, Human
uacaaaaaccaugaaacaagcc

SEQ ID NO: 882324 - RNA, 18 nt, Human
uaccgcccccuacucucu

SEQ ID NO: 882325 - RNA, 23 nt, Human
uagacacaaauacaaaaaccaug

SEQ ID NO: 882326 - RNA, 18 nt, Human
ucaaaagcagcuuuguca

SEQ ID NO: 882327 - RNA, 22 nt, Human
ucaaagcacaucguuuguacaa

SEQ ID NO: 882328 - RNA, 19 nt, Human
ucaaaggaauagaaccacc

SEQ ID NO: 882329 - RNA, 20 nt, Human
ugaaaaacaauuccuaaaag

SEQ ID NO: 882330 - RNA, 23 nt, Human
ugaaaaacaauuccuaaaagauu

SEQ ID NO: 882331 - RNA, 24 nt, Human
ugaaaaacaauuccuaaaagauug

SEQ ID NO: 882332 - RNA, 23 nt, Human
ugaaaacacuggcagcaauuuug

SEQ ID NO: 882333 - RNA, 27 nt, Human
ugaaaacacuggcagcaauuuugaaau

SEQ ID NO: 882334 - RNA, 18 nt, Human
ugaaaugaaaaaaaaaaa

SEQ ID NO: 882335 - RNA, 23 nt, Human
ugaaaugaaaaaaaaaaagaaag

SEQ ID NO: 882336 - RNA, 22 nt, Human
ugaaccuuuggcacuaggaauc

SEQ ID NO: 882337 - RNA, 22 nt, Human
ugacuugcaaaggaugggcucu

SEQ ID NO: 882338 - RNA, 23 nt, Human
uguuguccaucauugaaaacacu

SEQ ID NO: 882339 - RNA, 23 nt, Human
uuaagcaccauaaaaaaaaacaa

SEQ ID NO: 882340 - RNA, 24 nt, Human
uucaacaauuugagccaagauaaa

SEQ ID NO: 882341 - RNA, 25 nt, Human
uuuaagcaccauaaaaaaaaacaaa

SEQ ID NO: 882342 - RNA, 20 nt, Human
uuugagccaagauaaaaugc

SEQ ID NO: 882343 - RNA, 25 nt, Human
accaaggagacugcagucaaauaaa

SEQ ID NO: 882344 - RNA, 23 nt, Human
agacuaacaaauccaccuuggca

SEQ ID NO: 882345 - RNA, 18 nt, Human
caccaccugugccucugc

SEQ ID NO: 882346 - RNA, 18 nt, Human
caccaccugugccucugc

SEQ ID NO: 882347 - RNA, 19 nt, Human
cuacugucugccaccaccu

SEQ ID NO: 882348 - RNA, 24 nt, Human
cucacagcuuuggccacgcacucc

SEQ ID NO: 882349 - RNA, 21 nt, Human
gaaaaguacugaaaaugcuau

SEQ ID NO: 882350 - RNA, 20 nt, Human
gacuugggcaauguggccag

SEQ ID NO: 882351 - RNA, 25 nt, Human
gccucuacugucugccaccaccugu

SEQ ID NO: 882352 - RNA, 21 nt, Human
gggcaauguggccaggagggc

SEQ ID NO: 882353 - RNA, 20 nt, Human
ggucagaaaaaucaacauuu

SEQ ID NO: 882354 - RNA, 27 nt, Human
uaaauacauaauacagaagccugugug

SEQ ID NO: 882355 - RNA, 18 nt, Human
uauuagcugaauuuguga

SEQ ID NO: 882356 - RNA, 20 nt, Human
uauuucaaauauauuuucac

SEQ ID NO: 882357 - RNA, 19 nt, Human
uauuuuucccauuuuguuu

SEQ ID NO: 882358 - RNA, 18 nt, Human
uccuaggccgaggcuaug

SEQ ID NO: 882359 - RNA, 22 nt, Human
ugaguuauccuuauuuuuccca

SEQ ID NO: 882360 - RNA, 24 nt, Human
ugaguuauccuuauuuuucccauu

SEQ ID NO: 882361 - RNA, 19 nt, Human
ugccaccaccugugccucu

SEQ ID NO: 882362 - RNA, 18 nt, Human
uguccuaggccgaggcua

SEQ ID NO: 882363 - RNA, 24 nt, Human
uuagcugaauuugugauuuccuuu

SEQ ID NO: 882364 - RNA, 24 nt, Human
uuauggucagaaaaaucaacauuu

SEQ ID NO: 882365 - RNA, 24 nt, Human
aaagcccccaucaaguaucucaua

SEQ ID NO: 882366 - RNA, 18 nt, Human
aaaguguugggauuacag

SEQ ID NO: 882367 - RNA, 20 nt, Human
aaaguguugggauuacaggc

SEQ ID NO: 882368 - RNA, 24 nt, Human
aaaguguugggauuacaggcguga

SEQ ID NO: 882369 - RNA, 23 nt, Human
aaccuccgcuucauugcaaccuc

SEQ ID NO: 882370 - RNA, 20 nt, Human
aagccugcaccaacauaccc

SEQ ID NO: 882371 - RNA, 20 nt, Human
aaguagcugggauugcaagc

SEQ ID NO: 882372 - RNA, 24 nt, Human
aagugauccgcccgccuuggacuc

SEQ ID NO: 882373 - RNA, 21 nt, Human
aaguguugggauuacaggcgu

SEQ ID NO: 882374 - RNA, 26 nt, Human
aaguguugggauuacaggcgugagcc

SEQ ID NO: 882375 - RNA, 19 nt, Human
acggguuuuaucaccuugg

SEQ ID NO: 882376 - RNA, 19 nt, Human
agagaagcggggagcccag

SEQ ID NO: 882377 - RNA, 20 nt, Human
agagaagcggggagcccagg

SEQ ID NO: 882378 - RNA, 24 nt, Human
agcuggucuugaacuccugaccuc

SEQ ID NO: 882379 - RNA, 22 nt, Human
aggaaaucccuaucuuccuauc

SEQ ID NO: 882380 - RNA, 22 nt, Human
aggcgaagaaggaguucccuag

SEQ ID NO: 882381 - RNA, 24 nt, Human
agugcagcggcaugcucucggcuc

SEQ ID NO: 882382 - RNA, 21 nt, Human
auuaguagagacggguuuuau

SEQ ID NO: 882383 - RNA, 24 nt, Human
auugcaaccucugccucugagguu

SEQ ID NO: 882384 - RNA, 22 nt, Human
cacacaagcuacaguuuuucag

SEQ ID NO: 882385 - RNA, 18 nt, Human
caccgccuccccuccaga

SEQ ID NO: 882386 - RNA, 21 nt, Human
caccucagcgucccaaguagc

SEQ ID NO: 882387 - RNA, 24 nt, Human
caccucagcgucccaaguagcugg

SEQ ID NO: 882388 - RNA, 18 nt, Human
cagcaggcgaagaaggag

SEQ ID NO: 882389 - RNA, 23 nt, Human
cagucucccaggcuggagugcag

SEQ ID NO: 882390 - RNA, 26 nt, Human
caucaaguaucucauacuuaagcaaa

SEQ ID NO: 882391 - RNA, 22 nt, Human
cauuguggcuuuauugcagcuu

SEQ ID NO: 882392 - RNA, 24 nt, Human
ccaaaggcucauuuucacacaagc

SEQ ID NO: 882393 - RNA, 19 nt, Human
cccaaguagcugggauugc

SEQ ID NO: 882394 - RNA, 19 nt, Human
cccgcaccgccuccccucc

SEQ ID NO: 882395 - RNA, 22 nt, Human
cccgccuuggacuccuaaagug

SEQ ID NO: 882396 - RNA, 23 nt, Human
ccuaaaguguugggauuacaggc

SEQ ID NO: 882397 - RNA, 23 nt, Human
ccucccaccucagcgucccaagu

SEQ ID NO: 882398 - RNA, 24 nt, Human
ccucccaccucagcgucccaagua

SEQ ID NO: 882399 - RNA, 18 nt, Human
ccugaccucaagugaucc

SEQ ID NO: 882400 - RNA, 19 nt, Human
ccugaccucaagugauccg

SEQ ID NO: 882401 - RNA, 22 nt, Human
ccugaccucaagugauccgccc

SEQ ID NO: 882402 - RNA, 25 nt, Human
cggcgggaccuggagagagcagcgg

SEQ ID NO: 882403 - RNA, 22 nt, Human
cuaaaguguugggauuacaggc

SEQ ID NO: 882404 - RNA, 24 nt, Human
cuaaaguguugggauuacaggcgu

SEQ ID NO: 882405 - RNA, 26 nt, Human
cuccugaccucaagugauccgcccgc

SEQ ID NO: 882406 - RNA, 24 nt, Human
gaccucaagugauccgcccgccuu

SEQ ID NO: 882407 - RNA, 18 nt, Human
gacggguuuuaucaccuu

SEQ ID NO: 882408 - RNA, 18 nt, Human
gauuacaggcgugagcca

SEQ ID NO: 882409 - RNA, 22 nt, Human
gauuacaggcgugagccaccgc

SEQ ID NO: 882410 - RNA, 23 nt, Human
gauuacaggcgugagccaccgca

SEQ ID NO: 882411 - RNA, 24 nt, Human
gcaagccugcaccaacauacccag

SEQ ID NO: 882412 - RNA, 18 nt, Human
gcgcggcgggaccuggag

SEQ ID NO: 882413 - RNA, 21 nt, Human
gcucucggcucacugcaaccu

SEQ ID NO: 882414 - RNA, 19 nt, Human
gcuggagugcagcggcaug

SEQ ID NO: 882415 - RNA, 19 nt, Human
ggaccuggagagagcagcg

SEQ ID NO: 882416 - RNA, 19 nt, Human
ggucuugaacuccugaccu

SEQ ID NO: 882417 - RNA, 25 nt, Human
guaguaaaaucccggaaaauguuuu

SEQ ID NO: 882418 - RNA, 19 nt, Human
uaaagacugguccaaaggc

SEQ ID NO: 882419 - RNA, 23 nt, Human
uaaagacugguccaaaggcucau

SEQ ID NO: 882420 - RNA, 23 nt, Human
uacaggcgugagccaccgcaccc

SEQ ID NO: 882421 - RNA, 21 nt, Human
uaucaccuuggccaagcuggu

SEQ ID NO: 882422 - RNA, 18 nt, Human
ucacugcaaccuccgcuu

SEQ ID NO: 882423 - RNA, 19 nt, Human
ucacugcaaccuccgcuuc

SEQ ID NO: 882424 - RNA, 23 nt, Human
ucacugcaaccuccgcuucauug

SEQ ID NO: 882425 - RNA, 25 nt, Human
ucacugcaaccuccgcuucauugca

SEQ ID NO: 882426 - RNA, 28 nt, Human
ucacugcaaccuccgcuucgggcccucc

SEQ ID NO: 882427 - RNA, 28 nt, Human
ucacugcaaccuccgcuucggguccucc

SEQ ID NO: 882428 - RNA, 19 nt, Human
ucauugcaaccucugccuc

SEQ ID NO: 882429 - RNA, 20 nt, Human
ucauugcaaccucugccucu

SEQ ID NO: 882430 - RNA, 21 nt, Human
ucauugcaaccucugccucug

SEQ ID NO: 882431 - RNA, 22 nt, Human
ucauugcaaccucugccucuga

SEQ ID NO: 882432 - RNA, 23 nt, Human
ucauugcaaccucugccucugag

SEQ ID NO: 882433 - RNA, 24 nt, Human
ucauugcaaccucugccucugagg

SEQ ID NO: 882434 - RNA, 22 nt, Human
uccauaaaauccaagggugacg

SEQ ID NO: 882435 - RNA, 24 nt, Human
ucccaggcuggagugcagcggcau

SEQ ID NO: 882436 - RNA, 21 nt, Human
ucccgcaccgccuccccucca

SEQ ID NO: 882437 - RNA, 24 nt, Human
uccuaaaguguugggauuacaggc

SEQ ID NO: 882438 - RNA, 18 nt, Human
ucucccaggcuggagugc

SEQ ID NO: 882439 - RNA, 21 nt, Human
ucugagguucaggcgauccuc

SEQ ID NO: 882440 - RNA, 21 nt, Human
ucuugaacuccugaccucaag

SEQ ID NO: 882441 - RNA, 18 nt, Human
ugaaaccacaggacagca

SEQ ID NO: 882442 - RNA, 18 nt, Human
ugaccucaagugauccgc

SEQ ID NO: 882443 - RNA, 24 nt, Human
ugaccucaagugauccgcccgccu

SEQ ID NO: 882444 - RNA, 18 nt, Human
ugcaaccuccgcuucauu

SEQ ID NO: 882445 - RNA, 24 nt, Human
uggagugcagcggcaugcucucgg

SEQ ID NO: 882446 - RNA, 24 nt, Human
uggccaagcuggucuugaacuccu

SEQ ID NO: 882447 - RNA, 18 nt, Human
ugggauuacaggcgugag

SEQ ID NO: 882448 - RNA, 19 nt, Human
ugggauuacaggcgugagc

SEQ ID NO: 882449 - RNA, 21 nt, Human
ugggauuacaggcgugagcca

SEQ ID NO: 882450 - RNA, 22 nt, Human
ugggauuacaggcgugagccac

SEQ ID NO: 882451 - RNA, 23 nt, Human
ugggauuacaggcgugagccacc

SEQ ID NO: 882452 - RNA, 24 nt, Human
ugggauuacaggcgugagccaccg

SEQ ID NO: 882453 - RNA, 18 nt, Human
uuagagcucuagauauuc

SEQ ID NO: 882454 - RNA, 20 nt, Human
uuaguagagacggguuuuau

SEQ ID NO: 882455 - RNA, 24 nt, Human
uucaggcgauccucccaccucagc

SEQ ID NO: 882456 - RNA, 22 nt, Human
uucauugcaaccucugccucug

SEQ ID NO: 882457 - RNA, 19 nt, Human
uugcaaccucugccucuga

SEQ ID NO: 882458 - RNA, 23 nt, Human
uugcaaccucugccucugagguu

SEQ ID NO: 882459 - RNA, 24 nt, Human
uugcaaccucugccucugagguuc

SEQ ID NO: 882460 - RNA, 18 nt, Human
uuuuuguauuaguagaga

SEQ ID NO: 882461 - RNA, 18 nt, Human
uuuuuuguauuaguagag

SEQ ID NO: 882462 - RNA, 21 nt, Human
uuuuuuuguauuaguagagac

SEQ ID NO: 882463 - RNA, 19 nt, Human
aagcccaagaagaugacag

SEQ ID NO: 882464 - RNA, 28 nt, Human
acagagaaaauacaaagccguuuccuca

SEQ ID NO: 882465 - RNA, 29 nt, Human
acagggaaaaguacaguuucccuucucca

SEQ ID NO: 882466 - RNA, 22 nt, Human
agagaaaauacaaagccguuuc

SEQ ID NO: 882467 - RNA, 20 nt, Human
caacagcacaccaaauaagc

SEQ ID NO: 882468 - RNA, 19 nt, Human
caccgcccaccuacgcccc

SEQ ID NO: 882469 - RNA, 24 nt, Human
cacgaguacuaaggcgaagacagc

SEQ ID NO: 882470 - RNA, 23 nt, Human
cagaugagccuuuuccgaaguuc

SEQ ID NO: 882471 - RNA, 24 nt, Human
cagcacaccaaauaagcccaagaa

SEQ ID NO: 882472 - RNA, 25 nt, Human
ccagggugacagaugagccuuuucc

SEQ ID NO: 882473 - RNA, 25 nt, Human
ccccgccaacuucacacgaguacua

SEQ ID NO: 882474 - RNA, 23 nt, Human
cccuucaacagcacaccaaauaa

SEQ ID NO: 882475 - RNA, 22 nt, Human
ccgcccaccuacgccccauccg

SEQ ID NO: 882476 - RNA, 22 nt, Human
ccuucaacagcacaccaaauaa

SEQ ID NO: 882477 - RNA, 20 nt, Human
cguccccgccaacuucacac

SEQ ID NO: 882478 - RNA, 21 nt, Human
gaagacagccaucuugggccu

SEQ ID NO: 882479 - RNA, 23 nt, Human
gacaggaaccguccccgccaacu

SEQ ID NO: 882480 - RNA, 20 nt, Human
gcaccgcccaccuacgcccc

SEQ ID NO: 882481 - RNA, 21 nt, Human
uacagagaaaauacaaagccg

SEQ ID NO: 882482 - RNA, 24 nt, Human
ucuccagggugacagaugagccuu

SEQ ID NO: 882483 - RNA, 21 nt, Human
uucucuagucuccccccuuca

SEQ ID NO: 882484 - RNA, 22 nt, Human
uuuuuuuuuuccaaagaagccc

SEQ ID NO: 882485 - RNA, 23 nt, Human
aaccacugaaaguaauuucacaa

SEQ ID NO: 882486 - RNA, 20 nt, Human
caagacaucaaauguaaaaa

SEQ ID NO: 882487 - RNA, 25 nt, Human
caaguaugaucaauaacaagacauc

SEQ ID NO: 882488 - RNA, 19 nt, Human
cccaugcaccuuacggccg

SEQ ID NO: 882489 - RNA, 22 nt, Human
cuuggaaaggcuaugccuuuga

SEQ ID NO: 882490 - RNA, 23 nt, Human
uaaaaaaagguuccguucuagaa

SEQ ID NO: 882491 - RNA, 27 nt, Human
uaacaagacaucaaauguaaaaaaggg

SEQ ID NO: 882492 - RNA, 20 nt, Human
ucuacccaugcaccuuacgg

SEQ ID NO: 882493 - RNA, 21 nt, Human
ugggaagaauuaaaaaaaggu

SEQ ID NO: 882494 - RNA, 24 nt, Human
uuuuuuuuuuuuuuuuuuuuucag

SEQ ID NO: 882495 - RNA, 24 nt, Human
aaaccaagugacaaacacacuccc

SEQ ID NO: 882496 - RNA, 23 nt, Human
aaaggaacuaauacacguacagc

SEQ ID NO: 882497 - RNA, 22 nt, Human
aaauggaauccucugcaucucc

SEQ ID NO: 882498 - RNA, 18 nt, Human
aacugcaugaccuugagc

SEQ ID NO: 882499 - RNA, 18 nt, Human
aaguggcccuauaccuga

SEQ ID NO: 882500 - RNA, 19 nt, Human
aaguggcccuauaccugac

SEQ ID NO: 882501 - RNA, 19 nt, Human
aaguucuuccacauguccc

SEQ ID NO: 882502 - RNA, 24 nt, Human
accugaugaggaagcucuagugua

SEQ ID NO: 882503 - RNA, 21 nt, Human
acguacagcacucagcacaaa

SEQ ID NO: 882504 - RNA, 20 nt, Human
agagcagagggcuugguuca

SEQ ID NO: 882505 - RNA, 21 nt, Human
agcaagaggcagugaccaagg

SEQ ID NO: 882506 - RNA, 18 nt, Human
agugcucccaaacuuuuc

SEQ ID NO: 882507 - RNA, 22 nt, Human
caaacuuuucacagcguacacc

SEQ ID NO: 882508 - RNA, 20 nt, Human
caagugacaaacacacuccc

SEQ ID NO: 882509 - RNA, 20 nt, Human
caccuggaugguggauggga

SEQ ID NO: 882510 - RNA, 22 nt, Human
cagcaggcucucaccaggugcc

SEQ ID NO: 882511 - RNA, 21 nt, Human
caggagcccgugcagcaagag

SEQ ID NO: 882512 - RNA, 19 nt, Human
cauccaagcacaccuggau

SEQ ID NO: 882513 - RNA, 27 nt, Human
caugucccauugaggagagcacagcca

SEQ ID NO: 882514 - RNA, 19 nt, Human
cccaaacuuuucacagcgu

SEQ ID NO: 882515 - RNA, 22 nt, Human
cccaaguugggaaaacuaagga

SEQ ID NO: 882516 - RNA, 23 nt, Human
ccuggcacacagcaggcucucac

SEQ ID NO: 882517 - RNA, 22 nt, Human
ccuugagcaagccacuuaauuu

SEQ ID NO: 882518 - RNA, 22 nt, Human
cgcagggcuggcuaaacaggcu

SEQ ID NO: 882519 - RNA, 19 nt, Human
cguacagcacucagcacaa

SEQ ID NO: 882520 - RNA, 21 nt, Human
cgugcagcaagaggcagugac

SEQ ID NO: 882521 - RNA, 22 nt, Human
cuucucugugaaauggguacaa

SEQ ID NO: 882522 - RNA, 23 nt, Human
gaucucugccuuggaccuggaga

SEQ ID NO: 882523 - RNA, 23 nt, Human
gggcucaggagcccgugcagcaa

SEQ ID NO: 882524 - RNA, 19 nt, Human
gugaccaaggaggcagggg

SEQ ID NO: 882525 - RNA, 21 nt, Human
gugcucccaaacuuuucacag

SEQ ID NO: 882526 - RNA, 19 nt, Human
guucugccacuuacuaacu

SEQ ID NO: 882527 - RNA, 18 nt, Human
uaaagcagugcucccaaa

SEQ ID NO: 882528 - RNA, 19 nt, Human
uaaagcagugcucccaaac

SEQ ID NO: 882529 - RNA, 20 nt, Human
uaacugcaugaccuugagca

SEQ ID NO: 882530 - RNA, 23 nt, Human
uaacugcaugaccuugagcaagc

SEQ ID NO: 882531 - RNA, 23 nt, Human
ucagcacaaagccuggcacacag

SEQ ID NO: 882532 - RNA, 21 nt, Human
ucccaaguugggaaaacuaag

SEQ ID NO: 882533 - RNA, 19 nt, Human
uccccgaccccaaguucuu

SEQ ID NO: 882534 - RNA, 22 nt, Human
ucuccaaguggcccuauaccuu

SEQ ID NO: 882535 - RNA, 22 nt, Human
ucucugcuccuucucuggggcc

SEQ ID NO: 882536 - RNA, 26 nt, Human
ucuuccacaugucccauugaggagag

SEQ ID NO: 882537 - RNA, 22 nt, Human
ugaaauggguacaaugugguca

SEQ ID NO: 882538 - RNA, 19 nt, Human
ugacaaacacacuccccga

SEQ ID NO: 882539 - RNA, 25 nt, Human
ugacaaacacacuccccgaccccaa

SEQ ID NO: 882540 - RNA, 19 nt, Human
uggagaacauccaagcaca

SEQ ID NO: 882541 - RNA, 21 nt, Human
ugggcucaggagcccgugcag

SEQ ID NO: 882542 - RNA, 20 nt, Human
uugguugagcuacuguggca

SEQ ID NO: 882543 - RNA, 19 nt, Human
uuuuuuuuuuaaaggaagu

SEQ ID NO: 882544 - RNA, 23 nt, Human
uuuuuuuuuuuuuaaaggaagua

SEQ ID NO: 882545 - RNA, 22 nt, Human
aggauguuuauucaggccugau

SEQ ID NO: 882546 - RNA, 19 nt, Human
caccucaggggagcagcaa

SEQ ID NO: 882547 - RNA, 24 nt, Human
caugaaaaccaucaucauauuggu

SEQ ID NO: 882548 - RNA, 23 nt, Human
cugggaguugguggggcaaggga

SEQ ID NO: 882549 - RNA, 23 nt, Human
gagcagcaagagcgaagcucugg

SEQ ID NO: 882550 - RNA, 21 nt, Human
ggauguuuauucaggccugau

SEQ ID NO: 882551 - RNA, 21 nt, Human
ugggaguugguggggcaaggg

SEQ ID NO: 882552 - RNA, 25 nt, Human
uguacaaaaauauaucauucaaagu

SEQ ID NO: 882553 - RNA, 21 nt, Human
uucaaagucaugaaaaccauc

SEQ ID NO: 882554 - RNA, 20 nt, Human
aaacugcggaaaaccgacgg

SEQ ID NO: 882555 - RNA, 25 nt, Human
aaggagcauauaaugcaguuauuua

SEQ ID NO: 882556 - RNA, 18 nt, Human
acucagccuuacuggccc

SEQ ID NO: 882557 - RNA, 18 nt, Human
acuugucggcuucucccu

SEQ ID NO: 882558 - RNA, 24 nt, Human
agaaaguuucaaucacuucacugu

SEQ ID NO: 882559 - RNA, 23 nt, Human
agucuucuccacggcagcaauuu

SEQ ID NO: 882560 - RNA, 21 nt, Human
aguuguuuuacuccauccugu

SEQ ID NO: 882561 - RNA, 24 nt, Human
auuacauaaaaaugguucuauaaa

SEQ ID NO: 882562 - RNA, 22 nt, Human
cacccaagcaggacaguuccua

SEQ ID NO: 882563 - RNA, 23 nt, Human
caggacaguuccuagcccgucga

SEQ ID NO: 882564 - RNA, 24 nt, Human
cuagcaggaccguacguccuucuc

SEQ ID NO: 882565 - RNA, 26 nt, Human
cucaucagaagaaaguuucaaucacu

SEQ ID NO: 882566 - RNA, 21 nt, Human
gcggaaaaccgacggaggaca

SEQ ID NO: 882567 - RNA, 23 nt, Human
gcgggaaacgcuaacacccaagc

SEQ ID NO: 882568 - RNA, 22 nt, Human
uagcccgucgagcacuugucgg

SEQ ID NO: 882569 - RNA, 20 nt, Human
uaguagccacgccgggucac

SEQ ID NO: 882570 - RNA, 19 nt, Human
ucacuucacuguuauuuuc

SEQ ID NO: 882571 - RNA, 24 nt, Human
ucaucagaagaaaguuucaaucac

SEQ ID NO: 882572 - RNA, 20 nt, Human
uccauccuguagguuagaga

SEQ ID NO: 882573 - RNA, 22 nt, Human
uccauccuguagguuagagaaa

SEQ ID NO: 882574 - RNA, 23 nt, Human
ucucccucuuccucgaguuuccu

SEQ ID NO: 882575 - RNA, 25 nt, Human
ucuccuaguagccacgccgggucac

SEQ ID NO: 882576 - RNA, 28 nt, Human
ugaaaggagcauauaaugcaguuauuua

SEQ ID NO: 882577 - RNA, 18 nt, Human
uggaaaaacugcggaaaa

SEQ ID NO: 882578 - RNA, 20 nt, Human
uggaaaaacugcggaaaacc

SEQ ID NO: 882579 - RNA, 22 nt, Human
uggaaaaacugcggaaaaccga

SEQ ID NO: 882580 - RNA, 25 nt, Human
uguuauuuucugcaauucuuauucc

SEQ ID NO: 882581 - RNA, 18 nt, Human
uucacuguuauuuucugc

SEQ ID NO: 882582 - RNA, 21 nt, Human
uucacuguuauuuucugcaau

SEQ ID NO: 882583 - RNA, 23 nt, Human
uuccuccagucuucuccacggca

SEQ ID NO: 882584 - RNA, 24 nt, Human
agccauguggcucccaagcucccu

SEQ ID NO: 882585 - RNA, 21 nt, Human
agcgccgccuucgccccacgc

SEQ ID NO: 882586 - RNA, 19 nt, Human
aucccgccgcgggccccac

SEQ ID NO: 882587 - RNA, 18 nt, Human
ccauucacgaguccugca

SEQ ID NO: 882588 - RNA, 27 nt, Human
cccaccagccaagcgccgccuucgccc

SEQ ID NO: 882589 - RNA, 20 nt, Human
ccgcccgggaaaaucccgcc

SEQ ID NO: 882590 - RNA, 20 nt, Human
ccugcaaccagaggccuggg

SEQ ID NO: 882591 - RNA, 19 nt, Human
cgccgcgggccccaccagc

SEQ ID NO: 882592 - RNA, 21 nt, Human
cgccuucgccccacgcggccu

SEQ ID NO: 882593 - RNA, 19 nt, Human
gcaaccagaggccugggcu

SEQ ID NO: 882594 - RNA, 23 nt, Human
uaaaugaauacauuuauucucuc

SEQ ID NO: 882595 - RNA, 18 nt, Human
uacauuuauucucucaca

SEQ ID NO: 882596 - RNA, 19 nt, Human
uagcaaaagggugguucuc

SEQ ID NO: 882597 - RNA, 21 nt, Human
ucagaacugcuccauucacga

SEQ ID NO: 882598 - RNA, 19 nt, Human
ucccuuagcaaaagggugg

SEQ ID NO: 882599 - RNA, 20 nt, Human
uggcucccaagcucccuuag

SEQ ID NO: 882600 - RNA, 23 nt, Human
uuuuuuuuuuuuuuuuuuaaaug

SEQ ID NO: 882601 - RNA, 20 nt, Human
acuuucaagggcgcccugag

SEQ ID NO: 882602 - RNA, 19 nt, Human
aguacacugaaaaguaaca

SEQ ID NO: 882603 - RNA, 23 nt, Human
aguacucuuuaacaacucugcuu

SEQ ID NO: 882604 - RNA, 21 nt, Human
augaaaaugagacauaugagu

SEQ ID NO: 882605 - RNA, 19 nt, Human
caucuggaaaauuauacau

SEQ ID NO: 882606 - RNA, 22 nt, Human
ccaguacucuuuaacaacucug

SEQ ID NO: 882607 - RNA, 24 nt, Human
gcccugagcugcucggaggcccca

SEQ ID NO: 882608 - RNA, 24 nt, Human
uacacugaaaaguaacaucaccau

SEQ ID NO: 882609 - RNA, 19 nt, Human
ucaagggcgcccugagcug

SEQ ID NO: 882610 - RNA, 21 nt, Human
uccaguacucuuuaacaacuc

SEQ ID NO: 882611 - RNA, 23 nt, Human
ucuuuaacaacucugcuuccuug

SEQ ID NO: 882612 - RNA, 19 nt, Human
aagagcuacccaaagacuu

SEQ ID NO: 882613 - RNA, 24 nt, Human
aagagcuacccaaagacuucagug

SEQ ID NO: 882614 - RNA, 19 nt, Human
aagcagcggcgcuccacua

SEQ ID NO: 882615 - RNA, 25 nt, Human
caacaaauaacauuguuuuucagaa

SEQ ID NO: 882616 - RNA, 22 nt, Human
ccagcgacuccggcugucuccu

SEQ ID NO: 882617 - RNA, 18 nt, Human
ccccagcgacuccggcug

SEQ ID NO: 882618 - RNA, 26 nt, Human
cccccagcgacuccggcugucuccug

SEQ ID NO: 882619 - RNA, 18 nt, Human
gcagaauccuucuuucag

SEQ ID NO: 882620 - RNA, 19 nt, Human
ggagcucccccagcgacuc

SEQ ID NO: 882621 - RNA, 23 nt, Human
uauggcuuaagagcuacccaaag

SEQ ID NO: 882622 - RNA, 21 nt, Human
ucccccagcgacuccggcugu

SEQ ID NO: 882623 - RNA, 20 nt, Human
ugcacccagguaagcagcgg

SEQ ID NO: 882624 - RNA, 21 nt, Human
uuaaaucaacaaauaacauug

SEQ ID NO: 882625 - RNA, 27 nt, Human
uuuuuuuuuuuuuuuuuuuuccugggg

SEQ ID NO: 882626 - RNA, 26 nt, Human
aaaaacagaaaggggaggaggaugac

SEQ ID NO: 882627 - RNA, 18 nt, Human
aaacagaaaggggaggag

SEQ ID NO: 882628 - RNA, 19 nt, Human
aagcccaagagaggggcag

SEQ ID NO: 882629 - RNA, 23 nt, Human
aagccuuuggcugcuguagaucc

SEQ ID NO: 882630 - RNA, 21 nt, Human
auugcuguaaaacuuccaagc

SEQ ID NO: 882631 - RNA, 19 nt, Human
caagccuuuggcugcugua

SEQ ID NO: 882632 - RNA, 19 nt, Human
cagccauauaaagucaggg

SEQ ID NO: 882633 - RNA, 20 nt, Human
ccucgccucuuuuuccucac

SEQ ID NO: 882634 - RNA, 24 nt, Human
cgccaggagcagccauauaaaguc

SEQ ID NO: 882635 - RNA, 24 nt, Human
cuuccaagcuggcuguucuuccag

SEQ ID NO: 882636 - RNA, 25 nt, Human
guaguucuugauuuaaaaaaacaga

SEQ ID NO: 882637 - RNA, 22 nt, Human
uaaaaaaacagaaaggggagga

SEQ ID NO: 882638 - RNA, 22 nt, Human
uaauuuauaaacaacuucugac

SEQ ID NO: 882639 - RNA, 19 nt, Human
ugauuuaaaaaaacagaaa

SEQ ID NO: 882640 - RNA, 22 nt, Human
ugcuguaaaacuuccaagcugg

SEQ ID NO: 882641 - RNA, 20 nt, Human
uuaaaaaaacagaaagggga

SEQ ID NO: 882642 - RNA, 24 nt, Human
uuaaaaaaacagaaaggggaggag

SEQ ID NO: 882643 - RNA, 26 nt, Human
uugauggcuguaguggcugacagauu

SEQ ID NO: 882644 - RNA, 20 nt, Human
uuuaaaaaaacagaaagggg

SEQ ID NO: 882645 - RNA, 21 nt, Human
uuuuuuuuuuuuuaagaguuc

SEQ ID NO: 882646 - RNA, 19 nt, Human
uuuuuuuuuuuuuuuuuaa

SEQ ID NO: 882647 - RNA, 23 nt, Human
aaaauauauccucuuagagccaa

SEQ ID NO: 882648 - RNA, 19 nt, Human
accugauaguggguacaug

SEQ ID NO: 882649 - RNA, 26 nt, Human
acuucuauuguagcuuugccuccaau

SEQ ID NO: 882650 - RNA, 20 nt, Human
agcccagugccccgcugcaa

SEQ ID NO: 882651 - RNA, 24 nt, Human
aucccaccuauucccuuugcucag

SEQ ID NO: 882652 - RNA, 18 nt, Human
ccaugccagcuagcucac

SEQ ID NO: 882653 - RNA, 19 nt, Human
ccuccaauaagcaaaugga

SEQ ID NO: 882654 - RNA, 23 nt, Human
gcugcaaugcaggccgccaugcc

SEQ ID NO: 882655 - RNA, 25 nt, Human
ucaaaauauauccucuuagagccaa

SEQ ID NO: 882656 - RNA, 22 nt, Human
ucuuagagccaauguaucuucu

SEQ ID NO: 882657 - RNA, 28 nt, Human
ugaauuguuucacaauuaaaaaaaaaau

SEQ ID NO: 882658 - RNA, 23 nt, Human
ugcucugacuucuauuguagcuu

SEQ ID NO: 882659 - RNA, 23 nt, Human
uuaauaaaacaaugaaugcuuag

SEQ ID NO: 882660 - RNA, 22 nt, Human
uucacaauuaaaaaaaaaauuc

SEQ ID NO: 882661 - RNA, 25 nt, Human
uugguccauuuggcaugucgcacgg

SEQ ID NO: 882662 - RNA, 22 nt, Human
uuuggcauguguaauucucuuu

SEQ ID NO: 882663 - RNA, 24 nt, Human
cagcacgacacccuuacuuuuagc

SEQ ID NO: 882664 - RNA, 23 nt, Human
uacagauuaaaacgggggggggg

SEQ ID NO: 882665 - RNA, 22 nt, Human
uuuuuuuuuuuuuuuuuuacag

SEQ ID NO: 882666 - RNA, 23 nt, Human
aaaaaaccgggguacguuagaug

SEQ ID NO: 882667 - RNA, 18 nt, Human
aaaaauagcuugguggcg

SEQ ID NO: 882668 - RNA, 23 nt, Human
aaaacagcaaaaacccagcuggg

SEQ ID NO: 882669 - RNA, 24 nt, Human
aaaauuaaaaacagcaaaaaccca

SEQ ID NO: 882670 - RNA, 27 nt, Human
aaacaaaaguauaaaucaaacaaacug

SEQ ID NO: 882671 - RNA, 20 nt, Human
aaacaaacugcaaauuacuu

SEQ ID NO: 882672 - RNA, 18 nt, Human
aaacagcaaaaacccagc

SEQ ID NO: 882673 - RNA, 20 nt, Human
aacauggcggaacccggucu

SEQ ID NO: 882674 - RNA, 18 nt, Human
aagggaagggaagccacc

SEQ ID NO: 882675 - RNA, 18 nt, Human
aaucgcuugaacccggga

SEQ ID NO: 882676 - RNA, 20 nt, Human
acagcgcgagacuccgucuc

SEQ ID NO: 882677 - RNA, 24 nt, Human
acagcgcgagacuccgucucgggg

SEQ ID NO: 882678 - RNA, 24 nt, Human
acccggucucuacuaaaaauacaa

SEQ ID NO: 882679 - RNA, 24 nt, Human
agacuggggcgggaaaaucgcuug

SEQ ID NO: 882680 - RNA, 22 nt, Human
agaucgcgccauugcacuccag

SEQ ID NO: 882681 - RNA, 18 nt, Human
agcagcagcgacuagggc

SEQ ID NO: 882682 - RNA, 24 nt, Human
agccugggugacagcgcgagacuc

SEQ ID NO: 882683 - RNA, 23 nt, Human
agcuugguggcgcacaccugcag

SEQ ID NO: 882684 - RNA, 20 nt, Human
aggcagccaaagauuugaaa

SEQ ID NO: 882685 - RNA, 21 nt, Human
aggcaggcagaucauuucaga

SEQ ID NO: 882686 - RNA, 24 nt, Human
aucgcgccauugcacuccagccug

SEQ ID NO: 882687 - RNA, 21 nt, Human
auugcacuccagccuggguga

SEQ ID NO: 882688 - RNA, 24 nt, Human
auugcacuccagccugggugacag

SEQ ID NO: 882689 - RNA, 22 nt, Human
caaaauuaaaaacagcaaaaac

SEQ ID NO: 882690 - RNA, 24 nt, Human
caaaauuaaaaacagcaaaaaccc

SEQ ID NO: 882691 - RNA, 19 nt, Human
caacaguccucagugguac

SEQ ID NO: 882692 - RNA, 23 nt, Human
caacauggcggaacccggucucu

SEQ ID NO: 882693 - RNA, 19 nt, Human
cacaguuacucgggagacu

SEQ ID NO: 882694 - RNA, 23 nt, Human
caccacggcagcagauaguagcc

SEQ ID NO: 882695 - RNA, 23 nt, Human
caccggagggaugagagcagcag

SEQ ID NO: 882696 - RNA, 24 nt, Human
cacgccuguaaucccagcacuuug

SEQ ID NO: 882697 - RNA, 20 nt, Human
cacuccagccugggugacag

SEQ ID NO: 882698 - RNA, 20 nt, Human
cacuccagccugggugacag

SEQ ID NO: 882699 - RNA, 20 nt, Human
cacuccagccugggugacag

SEQ ID NO: 882700 - RNA, 24 nt, Human
cacucuggaaaaaaugccuucagg

SEQ ID NO: 882701 - RNA, 19 nt, Human
cacuuugggagggcaaggc

SEQ ID NO: 882702 - RNA, 25 nt, Human
cagagagacagggccaucccucaug

SEQ ID NO: 882703 - RNA, 18 nt, Human
cagagcugaaauaagaaa

SEQ ID NO: 882704 - RNA, 21 nt, Human
cagcacuuugggagggcaagg

SEQ ID NO: 882705 - RNA, 24 nt, Human
cagcacuuugggagggcaaggcag

SEQ ID NO: 882706 - RNA, 19 nt, Human
cauugcacuccagccuggg

SEQ ID NO: 882707 - RNA, 21 nt, Human
cauugcacuccagccugggug

SEQ ID NO: 882708 - RNA, 22 nt, Human
cauugcacuccagccuggguga

SEQ ID NO: 882709 - RNA, 24 nt, Human
cauugcacuccagccugggugaca

SEQ ID NO: 882710 - RNA, 25 nt, Human
cauugcacuccagccugggugacag

SEQ ID NO: 882711 - RNA, 21 nt, Human
ccaaagggaagggaagccacc

SEQ ID NO: 882712 - RNA, 20 nt, Human
ccauugcacuccagccuggg

SEQ ID NO: 882713 - RNA, 21 nt, Human
ccauugcacuccagccugggu

SEQ ID NO: 882714 - RNA, 21 nt, Human
ccauugcacuccagccugggu

SEQ ID NO: 882715 - RNA, 22 nt, Human
ccauugcacuccagccugggug

SEQ ID NO: 882716 - RNA, 24 nt, Human
ccauugcacuccagccugggugac

SEQ ID NO: 882717 - RNA, 26 nt, Human
cccagagagacagggccaucccucau

SEQ ID NO: 882718 - RNA, 24 nt, Human
ccccaaggcagcagcaaauccuuu

SEQ ID NO: 882719 - RNA, 21 nt, Human
ccugcaggcccgcgucccgaa

SEQ ID NO: 882720 - RNA, 22 nt, Human
ccugggugacagcgcgagacuc

SEQ ID NO: 882721 - RNA, 26 nt, Human
cgccauugcacuccagccugggugac

SEQ ID NO: 882722 - RNA, 23 nt, Human
cgccuguaaucccagcacuuugg

SEQ ID NO: 882723 - RNA, 24 nt, Human
cgccuguaaucccagcacuuuggg

SEQ ID NO: 882724 - RNA, 21 nt, Human
cgggaguggugaggcgcagua

SEQ ID NO: 882725 - RNA, 21 nt, Human
cgucucgggguaagaaaaaaa

SEQ ID NO: 882726 - RNA, 26 nt, Human
cuaaaaguaaauagcaaaaucaguga

SEQ ID NO: 882727 - RNA, 19 nt, Human
cuaaauucccaaugagcgc

SEQ ID NO: 882728 - RNA, 22 nt, Human
cucacgccuguaaucccagcac

SEQ ID NO: 882729 - RNA, 24 nt, Human
cucacgccuguaaucccagcacuu

SEQ ID NO: 882730 - RNA, 19 nt, Human
cugaaauaagaaaacauga

SEQ ID NO: 882731 - RNA, 19 nt, Human
gaacccgggagacgagguu

SEQ ID NO: 882732 - RNA, 20 nt, Human
gaacccgggagacgagguug

SEQ ID NO: 882733 - RNA, 24 nt, Human
gacagcgcgagacuccgucucggg

SEQ ID NO: 882734 - RNA, 20 nt, Human
gagcagcagcgacuagggcg

SEQ ID NO: 882735 - RNA, 20 nt, Human
gagggcaaggcaggcagauc

SEQ ID NO: 882736 - RNA, 24 nt, Human
gaucauuucagaucuggaguucga

SEQ ID NO: 882737 - RNA, 24 nt, Human
gcagcgacuagggcgguggcuggc

SEQ ID NO: 882738 - RNA, 19 nt, Human
gccauugcacuccagccug

SEQ ID NO: 882739 - RNA, 24 nt, Human
gccauugcacuccagccuggguga

SEQ ID NO: 882740 - RNA, 19 nt, Human
gcgccagccucccagaaau

SEQ ID NO: 882741 - RNA, 22 nt, Human
gcuggauacuucaguccauguu

SEQ ID NO: 882742 - RNA, 21 nt, Human
ggagggcaaggcaggcagauc

SEQ ID NO: 882743 - RNA, 22 nt, Human
ggaggguuggcaaggggcuggg

SEQ ID NO: 882744 - RNA, 23 nt, Human
ggcgggaaaaucgcuugaacccg

SEQ ID NO: 882745 - RNA, 21 nt, Human
gggcaaggcaggcagaucauu

SEQ ID NO: 882746 - RNA, 24 nt, Human
gggcacggugucucacgccuguaa

SEQ ID NO: 882747 - RNA, 18 nt, Human
gggcgguggcuggcgacg

SEQ ID NO: 882748 - RNA, 19 nt, Human
ggggcuggguugacuucag

SEQ ID NO: 882749 - RNA, 24 nt, Human
ggugucucacgccuguaaucccag

SEQ ID NO: 882750 - RNA, 21 nt, Human
guaauucgauuaauccagagc

SEQ ID NO: 882751 - RNA, 18 nt, Human
guggaggcgccagccucc

SEQ ID NO: 882752 - RNA, 21 nt, Human
uaaaaacagcaaaaacccagc

SEQ ID NO: 882753 - RNA, 20 nt, Human
uaagaaaaaaaaaccggggu

SEQ ID NO: 882754 - RNA, 22 nt, Human
uaagaaaaaaaaaccgggguac

SEQ ID NO: 882755 - RNA, 23 nt, Human
uaagaaaacaugaagauacuuaa

SEQ ID NO: 882756 - RNA, 18 nt, Human
uaagcgaaaucaagaccc

SEQ ID NO: 882757 - RNA, 18 nt, Human
uagcaaaaucagugagcu

SEQ ID NO: 882758 - RNA, 18 nt, Human
uagcaaaaucagugagcu

SEQ ID NO: 882759 - RNA, 19 nt, Human
uccagagcugaaauaagaa

SEQ ID NO: 882760 - RNA, 23 nt, Human
uccagccugggugacagcgcgag

SEQ ID NO: 882761 - RNA, 24 nt, Human
uccagccugggugacagcgcgaga

SEQ ID NO: 882762 - RNA, 23 nt, Human
ucgcgccauugcacuccagccug

SEQ ID NO: 882763 - RNA, 23 nt, Human
ucgcuugaacccgggagacgagg

SEQ ID NO: 882764 - RNA, 22 nt, Human
ucucuacuaaaaauacaaaaaa

SEQ ID NO: 882765 - RNA, 23 nt, Human
ugaaauaagaaaacaugaagaua

SEQ ID NO: 882766 - RNA, 22 nt, Human
ugacuucuggauguuauguccc

SEQ ID NO: 882767 - RNA, 21 nt, Human
ugagagcagcagcgacuaggg

SEQ ID NO: 882768 - RNA, 22 nt, Human
ugagagcagcagcgacuagggc

SEQ ID NO: 882769 - RNA, 19 nt, Human
ugcgggggguuccgggugg

SEQ ID NO: 882770 - RNA, 20 nt, Human
uggaggguuggcaaggggcu

SEQ ID NO: 882771 - RNA, 24 nt, Human
ugggagggcaaggcaggcagauca

SEQ ID NO: 882772 - RNA, 22 nt, Human
uggugaggcgcaguaaugaggc

SEQ ID NO: 882773 - RNA, 21 nt, Human
ugucucacgccuguaauccca

SEQ ID NO: 882774 - RNA, 22 nt, Human
ugucucacgccuguaaucccag

SEQ ID NO: 882775 - RNA, 24 nt, Human
ugucucacgccuguaaucccagca

SEQ ID NO: 882776 - RNA, 24 nt, Human
uucaaaauuaaaaacagcaaaaac

SEQ ID NO: 882777 - RNA, 26 nt, Human
uucaaaauuaaaaacagcaaaaaccc

SEQ ID NO: 882778 - RNA, 18 nt, Human
uguggagucugaaucucc

SEQ ID NO: 882779 - RNA, 21 nt, Human
uguggagucugaaucuccuca

SEQ ID NO: 882780 - RNA, 23 nt, Human
uuuuuugccuucaauuuuuguuu

SEQ ID NO: 882781 - RNA, 22 nt, Human
uuuuuuuuugccuucaauuuuu

SEQ ID NO: 882782 - RNA, 19 nt, Human
uuuuuuuuuuuuuuuugcc

SEQ ID NO: 882783 - RNA, 22 nt, Human
uuuuuuuuuuuuuuuuugccuu

SEQ ID NO: 882784 - RNA, 23 nt, Human
uuuuuuuuuuuuuuuuuugccuu

SEQ ID NO: 882785 - RNA, 20 nt, Human
uuuuuuuuuuuuuuuuuugg

SEQ ID NO: 882786 - RNA, 22 nt, Human
aaaaagaagugccucagccuuc

SEQ ID NO: 882787 - RNA, 23 nt, Human
aaaaagaagugccucagccuuca

SEQ ID NO: 882788 - RNA, 19 nt, Human
aaaccuuccuugucagcuc

SEQ ID NO: 882789 - RNA, 24 nt, Human
agcacaugggcccucagcgucccc

SEQ ID NO: 882790 - RNA, 23 nt, Human
auuuucagcacaugggcccucag

SEQ ID NO: 882791 - RNA, 19 nt, Human
caaaacgcucgaaaccuuc

SEQ ID NO: 882792 - RNA, 21 nt, Human
cagcaaaacgcucgaaaccuu

SEQ ID NO: 882793 - RNA, 21 nt, Human
caucugaaaaagaagugccuc

SEQ ID NO: 882794 - RNA, 19 nt, Human
cccucagcguccccucccc

SEQ ID NO: 882795 - RNA, 22 nt, Human
cccucagcguccccucccccgc

SEQ ID NO: 882796 - RNA, 19 nt, Human
ccuuccuugucagcucucc

SEQ ID NO: 882797 - RNA, 21 nt, Human
cucagccuucaaggcugggac

SEQ ID NO: 882798 - RNA, 31 nt, Human
cucgaaaccuuccuugucagcucuccacuuu

SEQ ID NO: 882799 - RNA, 24 nt, Human
cugggacagaaguuggggaggagc

SEQ ID NO: 882800 - RNA, 23 nt, Human
gcacuucggauuuucagcacaug

SEQ ID NO: 882801 - RNA, 20 nt, Human
gcugggacagaaguugggga

SEQ ID NO: 882802 - RNA, 19 nt, Human
ggacagaaguuggggagga

SEQ ID NO: 882803 - RNA, 19 nt, Human
ggauuuucagcacaugggc

SEQ ID NO: 882804 - RNA, 21 nt, Human
uaagaaaucccuuugccagca

SEQ ID NO: 882805 - RNA, 19 nt, Human
ugccucagccuucaaggcu

SEQ ID NO: 882806 - RNA, 21 nt, Human
ugccucagccuucaaggcugg

SEQ ID NO: 882807 - RNA, 19 nt, Human
ugggacagaaguuggggag

SEQ ID NO: 882808 - RNA, 23 nt, Human
uggggaggagcugcucugcccca

SEQ ID NO: 882809 - RNA, 19 nt, Human
uucggauuuucagcacaug

SEQ ID NO: 882810 - RNA, 21 nt, Human
aaaaagaaucgaguccacaaa

SEQ ID NO: 882811 - RNA, 23 nt, Human
aaagauugacaaaacuuuaauaa

SEQ ID NO: 882812 - RNA, 22 nt, Human
aacaccaauuucagcaaaucca

SEQ ID NO: 882813 - RNA, 21 nt, Human
acccaaauagguugcacuaua

SEQ ID NO: 882814 - RNA, 18 nt, Human
acgccaccgccacgugga

SEQ ID NO: 882815 - RNA, 18 nt, Human
acuuucuccauuuuagca

SEQ ID NO: 882816 - RNA, 18 nt, Human
auugucuuuccuuugucc

SEQ ID NO: 882817 - RNA, 24 nt, Human
ccacgccaccgccacguggacgca

SEQ ID NO: 882818 - RNA, 22 nt, Human
ccccacgccaccgccacgugga

SEQ ID NO: 882819 - RNA, 19 nt, Human
ccgggcgcccugccgcucu

SEQ ID NO: 882820 - RNA, 21 nt, Human
ccgggcgcccugccgcucugc

SEQ ID NO: 882821 - RNA, 20 nt, Human
cgacuuccgggcgcccugcc

SEQ ID NO: 882822 - RNA, 23 nt, Human
cuauaguccccauaugguuuucu

SEQ ID NO: 882823 - RNA, 21 nt, Human
cucacgacuuccgggcgcccu

SEQ ID NO: 882824 - RNA, 19 nt, Human
cuggcucaucgaagcucac

SEQ ID NO: 882825 - RNA, 23 nt, Human
cuugacaaagaugacauguguga

SEQ ID NO: 882826 - RNA, 18 nt, Human
gagaguaugauuucuggu

SEQ ID NO: 882827 - RNA, 23 nt, Human
gcccaacaccaauuucagcaaau

SEQ ID NO: 882828 - RNA, 21 nt, Human
guugugacuaagaaaggagag

SEQ ID NO: 882829 - RNA, 19 nt, Human
uaagguucugccacgucca

SEQ ID NO: 882830 - RNA, 18 nt, Human
uagcccgggaagacucga

SEQ ID NO: 882831 - RNA, 24 nt, Human
uaguaaaaaagaaucgaguccaca

SEQ ID NO: 882832 - RNA, 20 nt, Human
ucagcaaauccaaucuacuu

SEQ ID NO: 882833 - RNA, 18 nt, Human
uggacgcaguagccgugg

SEQ ID NO: 882834 - RNA, 20 nt, Human
uucacaaagauugacaaaaa

SEQ ID NO: 882835 - RNA, 24 nt, Human
uuuacccaaauagguugcacuaua

SEQ ID NO: 882836 - RNA, 23 nt, Human
uuuauugucuuuccuuuguccgg

SEQ ID NO: 882837 - RNA, 25 nt, Human
uuuuuuuuuuuuuuuuuuaaacagg

SEQ ID NO: 882838 - RNA, 23 nt, Human
aaaaaagaaaaaugcauuuagaa

SEQ ID NO: 882839 - RNA, 20 nt, Human
agaggaagaacuaccaagug

SEQ ID NO: 882840 - RNA, 23 nt, Human
aggcggcacccgcuaaaccuuca

SEQ ID NO: 882841 - RNA, 20 nt, Human
caagugcuacacucaaagcc

SEQ ID NO: 882842 - RNA, 24 nt, Human
cagaacauuaacgaaaaaagaaaa

SEQ ID NO: 882843 - RNA, 18 nt, Human
cagugagcgcgaccucca

SEQ ID NO: 882844 - RNA, 18 nt, Human
ccuccgaagggaagcaga

SEQ ID NO: 882845 - RNA, 22 nt, Human
gaacuaccaagugcuacacuca

SEQ ID NO: 882846 - RNA, 21 nt, Human
gggaagcagagcagaggaaga

SEQ ID NO: 882847 - RNA, 26 nt, Human
uuuuuuuuuuuuuuuuuuuaguuuuu

SEQ ID NO: 882848 - RNA, 19 nt, Human
aaacaagcacaacaacgua

SEQ ID NO: 882849 - RNA, 20 nt, Human
aaacaagcacaacaacguaa

SEQ ID NO: 882850 - RNA, 21 nt, Human
aagaaucuuccucuauuucag

SEQ ID NO: 882851 - RNA, 24 nt, Human
aagcacaacaacguaaagaaucuu

SEQ ID NO: 882852 - RNA, 19 nt, Human
acugaugauuuaaaaacaa

SEQ ID NO: 882853 - RNA, 26 nt, Human
auaaacaaaauuuucggaguuuacuc

SEQ ID NO: 882854 - RNA, 20 nt, Human
auaauauauucuucaaauua

SEQ ID NO: 882855 - RNA, 21 nt, Human
auuaucccacacaaaacugcu

SEQ ID NO: 882856 - RNA, 25 nt, Human
auuuuuguucuggaaauuuuauguu

SEQ ID NO: 882857 - RNA, 21 nt, Human
ccggucccgcccugcuuucag

SEQ ID NO: 882858 - RNA, 23 nt, Human
uccauugagccuuuggauaaaca

SEQ ID NO: 882859 - RNA, 21 nt, Human
ugagccuuuggauaaacaaaa

SEQ ID NO: 882860 - RNA, 21 nt, Human
ugaugauuuaaaaacaagcac

SEQ ID NO: 882861 - RNA, 22 nt, Human
uucaaauuaucccacacaaaac

SEQ ID NO: 882862 - RNA, 19 nt, Human
uuuuuguucuggaaauuuu

SEQ ID NO: 882863 - RNA, 19 nt, Human
aaaaggcccccaaccaaca

SEQ ID NO: 882864 - RNA, 21 nt, Human
aaggcccccaaccaacaacaa

SEQ ID NO: 882865 - RNA, 23 nt, Human
aaggcccccaaccaacaacaacu

SEQ ID NO: 882866 - RNA, 22 nt, Human
agaaagauaaauaaaugugaug

SEQ ID NO: 882867 - RNA, 23 nt, Human
caaaaggcccccaaccaacaaca

SEQ ID NO: 882868 - RNA, 20 nt, Human
caaaucacaggaggcaguga

SEQ ID NO: 882869 - RNA, 18 nt, Human
caccggccaaaaggcccc

SEQ ID NO: 882870 - RNA, 26 nt, Human
caccggccaaaaggcccccaaccaac

SEQ ID NO: 882871 - RNA, 23 nt, Human
cagaaagauaaauaaaugugaug

SEQ ID NO: 882872 - RNA, 22 nt, Human
caugccauuuccucuucuuuua

SEQ ID NO: 882873 - RNA, 22 nt, Human
ccccgcccucagucuucucuuu

SEQ ID NO: 882874 - RNA, 18 nt, Human
cggccaaaaggcccccaa

SEQ ID NO: 882875 - RNA, 20 nt, Human
cugcauuguuuuccuucaca

SEQ ID NO: 882876 - RNA, 20 nt, Human
gcagugauuccaugccauuu

SEQ ID NO: 882877 - RNA, 23 nt, Human
gucaccggccaaaaggcccccaa

SEQ ID NO: 882878 - RNA, 22 nt, Human
uauaaaaauacccagaaagaua

SEQ ID NO: 882879 - RNA, 19 nt, Human
uaucuguccuaauaugaag

SEQ ID NO: 882880 - RNA, 22 nt, Human
uauuacacgcuacaggauuucu

SEQ ID NO: 882881 - RNA, 18 nt, Human
ucaccggccaaaaggccc

SEQ ID NO: 882882 - RNA, 21 nt, Human
uccuucacaauggccuucaaa

SEQ ID NO: 882883 - RNA, 26 nt, Human
ucuuucacugcauuguuuuccuucac

SEQ ID NO: 882884 - RNA, 22 nt, Human
ugaccacaccugggcagucucc

SEQ ID NO: 882885 - RNA, 20 nt, Human
uucacaauggccuucaaauc

SEQ ID NO: 882886 - RNA, 22 nt, Human
uuuuuuuuuuuuucgauuuuaa

SEQ ID NO: 882887 - RNA, 18 nt, Human
uuuuuuuuuuuuuuuucg

SEQ ID NO: 882888 - RNA, 24 nt, Human
uuuuuuuuuuuuuuuuucgauuuu

SEQ ID NO: 882889 - RNA, 19 nt, Human
aaaagaacucaggaugggg

SEQ ID NO: 882890 - RNA, 21 nt, Human
aagguccgaggcgagggcgau

SEQ ID NO: 882891 - RNA, 20 nt, Human
agguccgaggcguuccugcu

SEQ ID NO: 882892 - RNA, 30 nt, Human
caagcucccauccagacuucaaccccacaa

SEQ ID NO: 882893 - RNA, 21 nt, Human
caguaccggcugcgggcgauu

SEQ ID NO: 882894 - RNA, 19 nt, Human
ccagacuucaaccccacaa

SEQ ID NO: 882895 - RNA, 23 nt, Human
cccugcaaaaauagcgccaggca

SEQ ID NO: 882896 - RNA, 21 nt, Human
cuuggcaagcucccauccaga

SEQ ID NO: 882897 - RNA, 21 nt, Human
ggcgauuccggagcccagagc

SEQ ID NO: 882898 - RNA, 23 nt, Human
gguuguagguagucgguagucag

SEQ ID NO: 882899 - RNA, 19 nt, Human
uacagaagaaauaauccga

SEQ ID NO: 882900 - RNA, 22 nt, Human
uacauucugaaauauuuacaga

SEQ ID NO: 882901 - RNA, 21 nt, Human
uauggagagcacucagguccg

SEQ ID NO: 882902 - RNA, 20 nt, Human
ucuuuuggaugugauaagcu

SEQ ID NO: 882903 - RNA, 19 nt, Human
ugaaauauuuacagaagaa

SEQ ID NO: 882904 - RNA, 25 nt, Human
ugagaucagcuucaaaagaacuccu

SEQ ID NO: 882905 - RNA, 22 nt, Human
ugagggucccgccgacugcguc

SEQ ID NO: 882906 - RNA, 25 nt, Human
uggcaagcucccauccagacuucaa

SEQ ID NO: 882907 - RNA, 25 nt, Human
uggggcagggacggguuguagguag

SEQ ID NO: 882908 - RNA, 18 nt, Human
uuccugcuccccagcucc

SEQ ID NO: 882909 - RNA, 21 nt, Human
uuggcaagcucccauccagac

SEQ ID NO: 882910 - RNA, 19 nt, Human
uuucaaaauuauugauaau

SEQ ID NO: 882911 - RNA, 25 nt, Human
uuuguacuguucuuuggucuguugg

SEQ ID NO: 882912 - RNA, 23 nt, Human
uuuuuuuuuugcaaguggaacuu

SEQ ID NO: 882913 - RNA, 21 nt, Human
uuuuuuuuuuuuuugcaagug

SEQ ID NO: 882914 - RNA, 21 nt, Human
uuuuuuuuuuuuuuuuugcaa

SEQ ID NO: 882915 - RNA, 23 nt, Human
uuuuuuuuuuuuuuuuugcaagu

SEQ ID NO: 882916 - RNA, 20 nt, Human
uuuuuuuuuuuuuuuuuugg

SEQ ID NO: 882917 - RNA, 18 nt, Human
aaaaagaagcaagucaca

SEQ ID NO: 882918 - RNA, 21 nt, Human
aacagagcaaaacuccugucu

SEQ ID NO: 882919 - RNA, 27 nt, Human
aacauccaccuuccccugcugaggagc

SEQ ID NO: 882920 - RNA, 18 nt, Human
aaccaaaucuggcaaagu

SEQ ID NO: 882921 - RNA, 25 nt, Human
aacuaaaagagcauaacugaaacaa

SEQ ID NO: 882922 - RNA, 24 nt, Human
aagcugaggcaggaggaccacuug

SEQ ID NO: 882923 - RNA, 23 nt, Human
aauaacugagaaacaagugaaac

SEQ ID NO: 882924 - RNA, 22 nt, Human
acaaaggaacagaaacuguaag

SEQ ID NO: 882925 - RNA, 20 nt, Human
acaaguguuaugaacacaau

SEQ ID NO: 882926 - RNA, 23 nt, Human
acaugaaaucugaaguggauaaa

SEQ ID NO: 882927 - RNA, 24 nt, Human
accacccaauuucuacucuuccug

SEQ ID NO: 882928 - RNA, 22 nt, Human
accacugcacuccagccugggc

SEQ ID NO: 882929 - RNA, 19 nt, Human
accauucuaaauuucuguu

SEQ ID NO: 882930 - RNA, 22 nt, Human
accuccaagugaaacugcucac

SEQ ID NO: 882931 - RNA, 18 nt, Human
accuuccccugcugagga

SEQ ID NO: 882932 - RNA, 18 nt, Human
acuaaaagagcauaacug

SEQ ID NO: 882933 - RNA, 24 nt, Human
acugcacuccagccugggcaacag

SEQ ID NO: 882934 - RNA, 24 nt, Human
acugcacuccagccugggcaacag

SEQ ID NO: 882935 - RNA, 22 nt, Human
agccugggcaacagagcaaaac

SEQ ID NO: 882936 - RNA, 24 nt, Human
agccugggcaacagagcaaaacuc

SEQ ID NO: 882937 - RNA, 18 nt, Human
aggagcugaaggucauca

SEQ ID NO: 882938 - RNA, 18 nt, Human
aggcaggaggaccacuug

SEQ ID NO: 882939 - RNA, 24 nt, Human
aggcaggaggaccacuugagccca

SEQ ID NO: 882940 - RNA, 22 nt, Human
augauaagcccuccuacccaca

SEQ ID NO: 882941 - RNA, 19 nt, Human
augcaccauucuaaauuuc

SEQ ID NO: 882942 - RNA, 26 nt, Human
augcaugcagagcccaagccuaaaca

SEQ ID NO: 882943 - RNA, 24 nt, Human
auugcaccacugcacuccagccug

SEQ ID NO: 882944 - RNA, 18 nt, Human
caaaaguauccuucuccc

SEQ ID NO: 882945 - RNA, 22 nt, Human
caacagagcaaaacuccugucu

SEQ ID NO: 882946 - RNA, 19 nt, Human
caccccaugugaaccucca

SEQ ID NO: 882947 - RNA, 19 nt, Human
cacugcacuccagccuggg

SEQ ID NO: 882948 - RNA, 21 nt, Human
cacugcacuccagccugggca

SEQ ID NO: 882949 - RNA, 22 nt, Human
cacugcacuccagccugggcaa

SEQ ID NO: 882950 - RNA, 23 nt, Human
cacugcacuccagccugggcaac

SEQ ID NO: 882951 - RNA, 24 nt, Human
cacugcacuccagccugggcaaca

SEQ ID NO: 882952 - RNA, 25 nt, Human
cacugcacuccagccugggcaacaa

SEQ ID NO: 882953 - RNA, 27 nt, Human
cacugcacuccagccugggcaacagag

SEQ ID NO: 882954 - RNA, 22 nt, Human
cagaacuucaauuucauaauuu

SEQ ID NO: 882955 - RNA, 26 nt, Human
cagagcccaagccuaaacauccaccu

SEQ ID NO: 882956 - RNA, 24 nt, Human
caguaagcugaggcaggaggacca

SEQ ID NO: 882957 - RNA, 21 nt, Human
caugcagagcccaagccuaaa

SEQ ID NO: 882958 - RNA, 19 nt, Human
cauggaggcugugcaaaag

SEQ ID NO: 882959 - RNA, 20 nt, Human
ccacaaaacaaaaaucguau

SEQ ID NO: 882960 - RNA, 20 nt, Human
ccacugcacuccagccuggg

SEQ ID NO: 882961 - RNA, 21 nt, Human
ccacugcacuccagccugggc

SEQ ID NO: 882962 - RNA, 22 nt, Human
ccacugcacuccagccugggca

SEQ ID NO: 882963 - RNA, 23 nt, Human
ccacugcacuccagccugggcaa

SEQ ID NO: 882964 - RNA, 24 nt, Human
ccacugcacuccagccugggcaac

SEQ ID NO: 882965 - RNA, 18 nt, Human
ccaggcaggugacaaaga

SEQ ID NO: 882966 - RNA, 26 nt, Human
ccccaugugaaccuccaagugaaacu

SEQ ID NO: 882967 - RNA, 18 nt, Human
ccccuguaacagagaccc

SEQ ID NO: 882968 - RNA, 23 nt, Human
cccuccuacccacaaaacaaaaa

SEQ ID NO: 882969 - RNA, 19 nt, Human
ccuccuacccacaaaacaa

SEQ ID NO: 882970 - RNA, 20 nt, Human
cgaagaaaugaaaauccauc

SEQ ID NO: 882971 - RNA, 18 nt, Human
cgucucagaagugcgaag

SEQ ID NO: 882972 - RNA, 19 nt, Human
cuaaacauccaccuucccc

SEQ ID NO: 882973 - RNA, 19 nt, Human
cugagaaacaagugaaacu

SEQ ID NO: 882974 - RNA, 20 nt, Human
cuggcccaguuaaauucccu

SEQ ID NO: 882975 - RNA, 22 nt, Human
gaaaauccaucaaaacagaaug

SEQ ID NO: 882976 - RNA, 24 nt, Human
gaaggugcucugaggccccuguaa

SEQ ID NO: 882977 - RNA, 24 nt, Human
gaccacuugagcccaggagugcga

SEQ ID NO: 882978 - RNA, 21 nt, Human
gagaaacgaaggugcucugag

SEQ ID NO: 882979 - RNA, 18 nt, Human
gagcaaaacuccugucuc

SEQ ID NO: 882980 - RNA, 26 nt, Human
gagcaggagccaggcaggugacaaag

SEQ ID NO: 882981 - RNA, 20 nt, Human
gaggcugugcaaaaguaucc

SEQ ID NO: 882982 - RNA, 22 nt, Human
gaucugaaacaguaauucaugc

SEQ ID NO: 882983 - RNA, 20 nt, Human
gcaaaaagaagcaagucaca

SEQ ID NO: 882984 - RNA, 21 nt, Human
gcaaaaguauccuucucccca

SEQ ID NO: 882985 - RNA, 24 nt, Human
gcacuccagccugggcaacagagc

SEQ ID NO: 882986 - RNA, 22 nt, Human
gcccacuucaaguaaacaaugc

SEQ ID NO: 882987 - RNA, 22 nt, Human
gcuguguagagaaguuggugaa

SEQ ID NO: 882988 - RNA, 21 nt, Human
ggcuauuuacucuccuaugaa

SEQ ID NO: 882989 - RNA, 22 nt, Human
guacacaaagauacauauccaa

SEQ ID NO: 882990 - RNA, 18 nt, Human
gugguuccugaauucccu

SEQ ID NO: 882991 - RNA, 20 nt, Human
guuaagugugcugccacccc

SEQ ID NO: 882992 - RNA, 18 nt, Human
uaaacauccaccuucccc

SEQ ID NO: 882993 - RNA, 23 nt, Human
uaaguaugcaaaagcuguguaga

SEQ ID NO: 882994 - RNA, 25 nt, Human
uaaguuaugugccugucagccaucc

SEQ ID NO: 882995 - RNA, 25 nt, Human
uagaaaaaauaaauaccuaucuuuc

SEQ ID NO: 882996 - RNA, 26 nt, Human
uagagagaauggaguuaacaaugcaa

SEQ ID NO: 882997 - RNA, 20 nt, Human
uauaaaaucaguguugauga

SEQ ID NO: 882998 - RNA, 19 nt, Human
uauccaauaacugagaaac

SEQ ID NO: 882999 - RNA, 20 nt, Human
uauguacacaaagauacaua

SEQ ID NO: 883000 - RNA, 18 nt, Human
uauuggucccauaaguag

SEQ ID NO: 883001 - RNA, 19 nt, Human
uccaucucacuacccagag

SEQ ID NO: 883002 - RNA, 21 nt, Human
ucccauaaguagacacgcacu

SEQ ID NO: 883003 - RNA, 18 nt, Human
ucccguaaguuaugugcc

SEQ ID NO: 883004 - RNA, 22 nt, Human
ucccuuggcaauuggagacuag

SEQ ID NO: 883005 - RNA, 22 nt, Human
ucugcaggcaccauuuccaucu

SEQ ID NO: 883006 - RNA, 23 nt, Human
ugagaaacaagugaaacuucuga

SEQ ID NO: 883007 - RNA, 20 nt, Human
ugaggcaggaggaccacuug

SEQ ID NO: 883008 - RNA, 24 nt, Human
ugaggcaggaggaccacuugagcc

SEQ ID NO: 883009 - RNA, 25 nt, Human
ugaggcaggaggaccacuugagccc

SEQ ID NO: 883010 - RNA, 20 nt, Human
ugagugggagaugggguugg

SEQ ID NO: 883011 - RNA, 21 nt, Human
ugcaccacugcacuccagccu

SEQ ID NO: 883012 - RNA, 21 nt, Human
ugccaguccuuaucucuacac

SEQ ID NO: 883013 - RNA, 20 nt, Human
ugcucugaggccccuguaac

SEQ ID NO: 883014 - RNA, 23 nt, Human
ugcugcaugcaaaccugcuaaua

SEQ ID NO: 883015 - RNA, 20 nt, Human
uggaaggcuucuaagugguu

SEQ ID NO: 883016 - RNA, 21 nt, Human
uggcacauauccuugaaauaa

SEQ ID NO: 883017 - RNA, 22 nt, Human
ugggaaaaguuuauccuuacaa

SEQ ID NO: 883018 - RNA, 23 nt, Human
ugggaaaaguuuauccuuacaaa

SEQ ID NO: 883019 - RNA, 24 nt, Human
ugggagaugggguuggugagguga

SEQ ID NO: 883020 - RNA, 23 nt, Human
uucaaaacuugcauaaaaagccc

SEQ ID NO: 883021 - RNA, 20 nt, Human
uucccuggcacauauccuug

SEQ ID NO: 883022 - RNA, 21 nt, Human
uugcaacuaaaagagcauaac

SEQ ID NO: 883023 - RNA, 23 nt, Human
uugcaccacugcacuccagccug

SEQ ID NO: 883024 - RNA, 21 nt, Human
uugucagauuauaaaaucagu

SEQ ID NO: 883025 - RNA, 26 nt, Human
uuucccuaaccaaaucuggcaaaguc

SEQ ID NO: 883026 - RNA, 22 nt, Human
uuucuaaaacaacugagauuac

SEQ ID NO: 883027 - RNA, 19 nt, Human
uuucuacucuuccugaggc

SEQ ID NO: 883028 - RNA, 18 nt, Human
cccggcgccgaccccugc

SEQ ID NO: 883029 - RNA, 21 nt, Human
cuugaugugauaauuccuucc

SEQ ID NO: 883030 - RNA, 19 nt, Human
guuguggugaauccggccg

SEQ ID NO: 883031 - RNA, 20 nt, Human
uaagauacaaccauucuccc

SEQ ID NO: 883032 - RNA, 18 nt, Human
ugaugcgaugacgaguau

SEQ ID NO: 883033 - RNA, 19 nt, Human
uguggugaauccggccgca

SEQ ID NO: 883034 - RNA, 19 nt, Human
aggcaagagggguuucagg

SEQ ID NO: 883035 - RNA, 22 nt, Human
ccacggggcccaggcccucuuc

SEQ ID NO: 883036 - RNA, 18 nt, Human
cuccaccuggaccccgcc

SEQ ID NO: 883037 - RNA, 18 nt, Human
gaccuccaccuggacccc

SEQ ID NO: 883038 - RNA, 23 nt, Human
gagagcagcaggccaaacgggca

SEQ ID NO: 883039 - RNA, 18 nt, Human
gagcagcaggccaaacgg

SEQ ID NO: 883040 - RNA, 19 nt, Human
gauagccucaagaccucca

SEQ ID NO: 883041 - RNA, 25 nt, Human
gggcacugaggcuccacggggccca

SEQ ID NO: 883042 - RNA, 20 nt, Human
ggguuucaggauucagaggg

SEQ ID NO: 883043 - RNA, 20 nt, Human
uggaagagaggcaagagggg

SEQ ID NO: 883044 - RNA, 21 nt, Human
uggaagagaggcaagaggggu

SEQ ID NO: 883045 - RNA, 23 nt, Human
uuccucuguugcuuuacuuugau

SEQ ID NO: 883046 - RNA, 22 nt, Human
aaaaaacaaaaagagggaaugg

SEQ ID NO: 883047 - RNA, 24 nt, Human
aaacaaaaagagggaauggaugca

SEQ ID NO: 883048 - RNA, 21 nt, Human
aaggacccuccguaacacugg

SEQ ID NO: 883049 - RNA, 27 nt, Human
aauuuucacuccugccucaaggagggg

SEQ ID NO: 883050 - RNA, 23 nt, Human
acgccgcccuacccccgcccgac

SEQ ID NO: 883051 - RNA, 22 nt, Human
caccccaggacuaacccccaga

SEQ ID NO: 883052 - RNA, 21 nt, Human
cacgacgcgggaggucaaggc

SEQ ID NO: 883053 - RNA, 25 nt, Human
cacuccugccucaaggacccuccgu

SEQ ID NO: 883054 - RNA, 22 nt, Human
ccaauggcgauggccgcucccu

SEQ ID NO: 883055 - RNA, 27 nt, Human
ccaauggcgauggccgcucccuguggc

SEQ ID NO: 883056 - RNA, 20 nt, Human
ccaauuuucacuccugccuc

SEQ ID NO: 883057 - RNA, 22 nt, Human
ccaggggcucggccuggcucag

SEQ ID NO: 883058 - RNA, 23 nt, Human
cccaggacuaacccccagaccca

SEQ ID NO: 883059 - RNA, 25 nt, Human
ccccaggacuaacccccagacccaa

SEQ ID NO: 883060 - RNA, 20 nt, Human
ccccgcccgacuccgcgcug

SEQ ID NO: 883061 - RNA, 23 nt, Human
cccgcccgacuccgcgcuggaaa

SEQ ID NO: 883062 - RNA, 20 nt, Human
ccgacccggcgugcccagac

SEQ ID NO: 883063 - RNA, 18 nt, Human
ccgcuggaugacgucacg

SEQ ID NO: 883064 - RNA, 27 nt, Human
ccuccaccccaggacuaacccccagac

SEQ ID NO: 883065 - RNA, 18 nt, Human
ccucgaagggugggcgug

SEQ ID NO: 883066 - RNA, 21 nt, Human
ccuguggccucagcuuccucc

SEQ ID NO: 883067 - RNA, 18 nt, Human
cgcgggaggucaaggcca

SEQ ID NO: 883068 - RNA, 22 nt, Human
cuccaccccaggacuaaccccc

SEQ ID NO: 883069 - RNA, 19 nt, Human
ggaaugaagggggccaggu

SEQ ID NO: 883070 - RNA, 25 nt, Human
gggcucggccuggcucagaagaggu

SEQ ID NO: 883071 - RNA, 22 nt, Human
uaaaaaacaaaaagagggaaug

SEQ ID NO: 883072 - RNA, 22 nt, Human
uaacacuggggaacgcgaccuc

SEQ ID NO: 883073 - RNA, 20 nt, Human
uaacccccagacccaauuuu

SEQ ID NO: 883074 - RNA, 27 nt, Human
uaacccccagacccaauuuucacuccu

SEQ ID NO: 883075 - RNA, 28 nt, Human
uaacccccagacccaauuuucacuccuu

SEQ ID NO: 883076 - RNA, 19 nt, Human
ucagaagaggugcuucaca

SEQ ID NO: 883077 - RNA, 22 nt, Human
uccaccccaggacuaaccccca

SEQ ID NO: 883078 - RNA, 20 nt, Human
uccgcgcuggaaagcggggu

SEQ ID NO: 883079 - RNA, 22 nt, Human
uuaaaaaacaaaaagagggaau

SEQ ID NO: 883080 - RNA, 21 nt, Human
uuuaaaaaacaaaaagaggga

SEQ ID NO: 883081 - RNA, 25 nt, Human
uuuauuuuaaaaaacaaaaagaggg

SEQ ID NO: 883082 - RNA, 19 nt, Human
acccggccucgaccuugcu

SEQ ID NO: 883083 - RNA, 22 nt, Human
cccggccucgaccuugcuccgc

SEQ ID NO: 883084 - RNA, 30 nt, Human
cccggcuccggcgccaacccggccucgacc

SEQ ID NO: 883085 - RNA, 21 nt, Human
ccgcgcccuggaccggagacc

SEQ ID NO: 883086 - RNA, 23 nt, Human
ccggagaccccacacgagcucca

SEQ ID NO: 883087 - RNA, 18 nt, Human
ccggcuccggcgccaacc

SEQ ID NO: 883088 - RNA, 24 nt, Human
cggccccggcuccggcgccaaccc

SEQ ID NO: 883089 - RNA, 19 nt, Human
cggcgccaacccggccucg

SEQ ID NO: 883090 - RNA, 23 nt, Human
gcccuggaccggagaccccacac

SEQ ID NO: 883091 - RNA, 20 nt, Human
gggcaggccgccccuccccc

SEQ ID NO: 883092 - RNA, 22 nt, Human
uaauagaaaugagaugagggca

SEQ ID NO: 883093 - RNA, 20 nt, Human
aaaaagaaaaaagaaaauag

SEQ ID NO: 883094 - RNA, 19 nt, Human
aacacuaaaauagaaaaag

SEQ ID NO: 883095 - RNA, 21 nt, Human
aacacuaaaauagaaaaagaa

SEQ ID NO: 883096 - RNA, 24 nt, Human
acuaaaauagaaaaagaaaaaaga

SEQ ID NO: 883097 - RNA, 25 nt, Human
augaaaaaagauguucugaagagaa

SEQ ID NO: 883098 - RNA, 19 nt, Human
cacuauggaaaaguccuaa

SEQ ID NO: 883099 - RNA, 27 nt, Human
ccaauaaaccuacuaucaguugaaaau

SEQ ID NO: 883100 - RNA, 21 nt, Human
ccagaauuacuuuauauaaaa

SEQ ID NO: 883101 - RNA, 26 nt, Human
cccguuuuauaauaaaguguugaauu

SEQ ID NO: 883102 - RNA, 19 nt, Human
ccgccaucuuguuucaauc

SEQ ID NO: 883103 - RNA, 19 nt, Human
ccuacuguuuagcaaaauu

SEQ ID NO: 883104 - RNA, 22 nt, Human
ccugucuuaaauaugcucagaa

SEQ ID NO: 883105 - RNA, 22 nt, Human
cuaaaauagaaaaagaaaaaag

SEQ ID NO: 883106 - RNA, 23 nt, Human
cugcuucuaagcauaccaauuuc

SEQ ID NO: 883107 - RNA, 23 nt, Human
gaaaaaagauguucugaagagaa

SEQ ID NO: 883108 - RNA, 24 nt, Human
uaacaaugcuuggcugaugauuaa

SEQ ID NO: 883109 - RNA, 24 nt, Human
ucccaauaaaccuacuaucaguug

SEQ ID NO: 883110 - RNA, 21 nt, Human
ugaaaaaagauguucugaaga

SEQ ID NO: 883111 - RNA, 20 nt, Human
ugaaaagauauuuuaucauu

SEQ ID NO: 883112 - RNA, 22 nt, Human
ugaagagaaacugcuuuuagaa

SEQ ID NO: 883113 - RNA, 18 nt, Human
ugaauacaccagacugca

SEQ ID NO: 883114 - RNA, 19 nt, Human
ugauucccccaggaaccuc

SEQ ID NO: 883115 - RNA, 21 nt, Human
uggcaaaugaggcacauuucu

SEQ ID NO: 883116 - RNA, 19 nt, Human
uggcacuauggaaaagucc

SEQ ID NO: 883117 - RNA, 25 nt, Human
uuaaaaauacuuaaaucacaguaga

SEQ ID NO: 883118 - RNA, 21 nt, Human
uuacaguagccuacuguuuag

SEQ ID NO: 883119 - RNA, 24 nt, Human
uucucaaauggcaaaugaggcacu

SEQ ID NO: 883120 - RNA, 20 nt, Human
uugaaaaugcuagccugucu

SEQ ID NO: 883121 - RNA, 23 nt, Human
aaaaugagugguucacaagguca

SEQ ID NO: 883122 - RNA, 22 nt, Human
aaagugccuagcccaucacagc

SEQ ID NO: 883123 - RNA, 18 nt, Human
aagggcccuguaaaaccc

SEQ ID NO: 883124 - RNA, 19 nt, Human
agcuuggaggccgcggagc

SEQ ID NO: 883125 - RNA, 18 nt, Human
agugccuagcccaucacg

SEQ ID NO: 883126 - RNA, 22 nt, Human
caaggucacugcccccagaagc

SEQ ID NO: 883127 - RNA, 19 nt, Human
cacuggaaagaaacaggca

SEQ ID NO: 883128 - RNA, 19 nt, Human
cagaagcaggcacuggaaa

SEQ ID NO: 883129 - RNA, 18 nt, Human
cagagcucuccguagcuc

SEQ ID NO: 883130 - RNA, 22 nt, Human
cagauauaaagugccuagccca

SEQ ID NO: 883131 - RNA, 22 nt, Human
ccccagaagcaggcacuggaaa

SEQ ID NO: 883132 - RNA, 26 nt, Human
cuucagaagccagccuucagaccucu

SEQ ID NO: 883133 - RNA, 24 nt, Human
cuuccucaucucagguuuuaggga

SEQ ID NO: 883134 - RNA, 22 nt, Human
cuuggaggccgcggagccuaag

SEQ ID NO: 883135 - RNA, 21 nt, Human
gcagagcucuccguagcucag

SEQ ID NO: 883136 - RNA, 23 nt, Human
gcagagcucuccguagcucagug

SEQ ID NO: 883137 - RNA, 20 nt, Human
gggaugccacuugcauaaaa

SEQ ID NO: 883138 - RNA, 20 nt, Human
uaaaaaacaagggcccugua

SEQ ID NO: 883139 - RNA, 23 nt, Human
ucacaaggucacugcccccagaa

SEQ ID NO: 883140 - RNA, 20 nt, Human
ucacugcccccagaagcagg

SEQ ID NO: 883141 - RNA, 20 nt, Human
ugagaucauuauuaucaauu

SEQ ID NO: 883142 - RNA, 21 nt, Human
ugagugguucacaaggucacu

SEQ ID NO: 883143 - RNA, 20 nt, Human
ugccuagcccaucacagcag

SEQ ID NO: 883144 - RNA, 20 nt, Human
uggaaagaaacaggcagcuc

SEQ ID NO: 883145 - RNA, 21 nt, Human
uucauuaucccaagcagaacc

SEQ ID NO: 883146 - RNA, 23 nt, Human
aaaaaaaaaaagauuugaucaaa

SEQ ID NO: 883147 - RNA, 20 nt, Human
aaaaagauuugaucaaacca

SEQ ID NO: 883148 - RNA, 22 nt, Human
aacacaguaaaaaacagaaaca

SEQ ID NO: 883149 - RNA, 22 nt, Human
aacacugugacuugguuaacau

SEQ ID NO: 883150 - RNA, 20 nt, Human
aacuuggugaaaccccaucu

SEQ ID NO: 883151 - RNA, 21 nt, Human
aacuuggugaaaccccaucuc

SEQ ID NO: 883152 - RNA, 24 nt, Human
aaucgcuugaaccugugaggugga

SEQ ID NO: 883153 - RNA, 26 nt, Human
acagaaacaaaacaucuauuucuuca

SEQ ID NO: 883154 - RNA, 24 nt, Human
acagaguaagacuccaucucaaga

SEQ ID NO: 883155 - RNA, 21 nt, Human
acagcaaaaaauucacauaag

SEQ ID NO: 883156 - RNA, 18 nt, Human
acaguaaaaaacagaaac

SEQ ID NO: 883157 - RNA, 24 nt, Human
accacugcaguccagccugggcga

SEQ ID NO: 883158 - RNA, 24 nt, Human
accugaggucaggaguucaagacu

SEQ ID NO: 883159 - RNA, 24 nt, Human
acugcaguccagccugggcgacag

SEQ ID NO: 883160 - RNA, 26 nt, Human
acugcaguccagccugggcgacagag

SEQ ID NO: 883161 - RNA, 21 nt, Human
agaaaaacaaaaccaaaaaca

SEQ ID NO: 883162 - RNA, 24 nt, Human
agccacgagaaucgcuugaaccug

SEQ ID NO: 883163 - RNA, 23 nt, Human
agccagguaugguggugugugcc

SEQ ID NO: 883164 - RNA, 24 nt, Human
agccugggcgacagaguaagacuc

SEQ ID NO: 883165 - RNA, 23 nt, Human
aggaguucaagacuagucuagcc

SEQ ID NO: 883166 - RNA, 21 nt, Human
aggccaaggcggguggaucac

SEQ ID NO: 883167 - RNA, 22 nt, Human
aggcggguggaucaccugaggu

SEQ ID NO: 883168 - RNA, 26 nt, Human
aggcggguggaucaccugaggucagg

SEQ ID NO: 883169 - RNA, 18 nt, Human
agguaugguggugugugc

SEQ ID NO: 883170 - RNA, 24 nt, Human
agguaugguggugugugccuguaa

SEQ ID NO: 883171 - RNA, 24 nt, Human
agguggagguugcagugagccgag

SEQ ID NO: 883172 - RNA, 24 nt, Human
aguggcucacaccuguaaucccag

SEQ ID NO: 883173 - RNA, 22 nt, Human
aucccagcacuuugggaggcca

SEQ ID NO: 883174 - RNA, 24 nt, Human
aucgcaccacugcaguccagccug

SEQ ID NO: 883175 - RNA, 24 nt, Human
auuuuuuugcaaaaaugucaaaaa

SEQ ID NO: 883176 - RNA, 21 nt, Human
caaaaauacaaaaauuagcca

SEQ ID NO: 883177 - RNA, 22 nt, Human
caacuuggugaaaccccaucuc

SEQ ID NO: 883178 - RNA, 24 nt, Human
caaggcggguggaucaccugaggu

SEQ ID NO: 883179 - RNA, 26 nt, Human
caaggcggguggaucaccugagguca

SEQ ID NO: 883180 - RNA, 24 nt, Human
cacaccuguaaucccagcacuuug

SEQ ID NO: 883181 - RNA, 23 nt, Human
cacaguaaaaaacagaaacaaaa

SEQ ID NO: 883182 - RNA, 25 nt, Human
cacaguaaaaaacagaaacaaaaca

SEQ ID NO: 883183 - RNA, 23 nt, Human
caccugaggucaggaguucaaga

SEQ ID NO: 883184 - RNA, 23 nt, Human
caccuguaaucccagcacuuugg

SEQ ID NO: 883185 - RNA, 24 nt, Human
caccuguaaucccagcacuuuggg

SEQ ID NO: 883186 - RNA, 21 nt, Human
cacugcaguccagccugggcg

SEQ ID NO: 883187 - RNA, 23 nt, Human
cacuuucgcucucaaguuucagg

SEQ ID NO: 883188 - RNA, 24 nt, Human
cagcacuuugggaggccaaggcgg

SEQ ID NO: 883189 - RNA, 23 nt, Human
caguccagccugggcgacagagu

SEQ ID NO: 883190 - RNA, 20 nt, Human
ccacugcaguccagccuggg

SEQ ID NO: 883191 - RNA, 21 nt, Human
ccacugcaguccagccugggc

SEQ ID NO: 883192 - RNA, 24 nt, Human
ccacugcaguccagccugggcgac

SEQ ID NO: 883193 - RNA, 19 nt, Human
ccucaaagcuagaggcaaa

SEQ ID NO: 883194 - RNA, 22 nt, Human
ccugggcgacagaguaagacuc

SEQ ID NO: 883195 - RNA, 22 nt, Human
ccuguaaucccagcuacuaggg

SEQ ID NO: 883196 - RNA, 21 nt, Human
ccugugagguggagguugcag

SEQ ID NO: 883197 - RNA, 21 nt, Human
cgcaccacugcaguccagccu

SEQ ID NO: 883198 - RNA, 24 nt, Human
cggguggaucaccugaggucagga

SEQ ID NO: 883199 - RNA, 23 nt, Human
cuagccaacuuggugaaacccca

SEQ ID NO: 883200 - RNA, 21 nt, Human
cucaagagaaaaaaaaaaaga

SEQ ID NO: 883201 - RNA, 24 nt, Human
cucaagagaaaaaaaaaaagauuu

SEQ ID NO: 883202 - RNA, 22 nt, Human
cucacaccuguaaucccagcac

SEQ ID NO: 883203 - RNA, 24 nt, Human
cucacaccuguaaucccagcacuu

SEQ ID NO: 883204 - RNA, 20 nt, Human
cucuaccaaaaauacaaaaa

SEQ ID NO: 883205 - RNA, 24 nt, Human
gaacacaguaaaaaacagaaacaa

SEQ ID NO: 883206 - RNA, 23 nt, Human
gagguugcagugagccgagaucg

SEQ ID NO: 883207 - RNA, 23 nt, Human
gaucaccugaggucaggaguuca

SEQ ID NO: 883208 - RNA, 24 nt, Human
gaucaccugaggucaggaguucaa

SEQ ID NO: 883209 - RNA, 20 nt, Human
gcaccacugcaguccagccu

SEQ ID NO: 883210 - RNA, 28 nt, Human
gcaccacugcaguccagccugggcgaca

SEQ ID NO: 883211 - RNA, 24 nt, Human
gccaacuuggugaaaccccaucuc

SEQ ID NO: 883212 - RNA, 20 nt, Human
gccgagaucgcaccacugca

SEQ ID NO: 883213 - RNA, 20 nt, Human
ggagguugcagugagccgag

SEQ ID NO: 883214 - RNA, 22 nt, Human
ggagguugcagugagccgagau

SEQ ID NO: 883215 - RNA, 24 nt, Human
ggagguugcagugagccgagaucg

SEQ ID NO: 883216 - RNA, 22 nt, Human
ggaucaccugaggucaggaguu

SEQ ID NO: 883217 - RNA, 22 nt, Human
gggaggcugagccacgagaauc

SEQ ID NO: 883218 - RNA, 23 nt, Human
gguauaguggcucacaccuguaa

SEQ ID NO: 883219 - RNA, 18 nt, Human
ggucggguauaguggcuc

SEQ ID NO: 883220 - RNA, 21 nt, Human
ggucggguauaguggcucaca

SEQ ID NO: 883221 - RNA, 24 nt, Human
gguggugugugccuguaaucccag

SEQ ID NO: 883222 - RNA, 23 nt, Human
guggugugugccuguaaucccag

SEQ ID NO: 883223 - RNA, 24 nt, Human
guggugugugccuguaaucccagc

SEQ ID NO: 883224 - RNA, 19 nt, Human
guugcagugagccgagauc

SEQ ID NO: 883225 - RNA, 19 nt, Human
uaagauacauaaauuauga

SEQ ID NO: 883226 - RNA, 18 nt, Human
uacaauuaaaucaagaac

SEQ ID NO: 883227 - RNA, 21 nt, Human
uaccaaaaauacaaaaauuag

SEQ ID NO: 883228 - RNA, 24 nt, Human
uaccaaaaauacaaaaauuagcca

SEQ ID NO: 883229 - RNA, 20 nt, Human
uaccucaaagcuagaggcaa

SEQ ID NO: 883230 - RNA, 24 nt, Human
uaguggcucacaccuguaauccca

SEQ ID NO: 883231 - RNA, 23 nt, Human
ucaccugaggucaggaguucaag

SEQ ID NO: 883232 - RNA, 21 nt, Human
ucagaaaaacaaaaccaaaaa

SEQ ID NO: 883233 - RNA, 23 nt, Human
ucagaaaaacaaaaccaaaaaca

SEQ ID NO: 883234 - RNA, 24 nt, Human
ucagaaaaacaaaaccaaaaacac

SEQ ID NO: 883235 - RNA, 24 nt, Human
uccagccugggcgacagaguaaga

SEQ ID NO: 883236 - RNA, 23 nt, Human
ucgcaccacugcaguccagccug

SEQ ID NO: 883237 - RNA, 24 nt, Human
ucgcuugaaccugugagguggagg

SEQ ID NO: 883238 - RNA, 20 nt, Human
ugaaaaugucuggcuugaaa

SEQ ID NO: 883239 - RNA, 21 nt, Human
ugaaacaccuuugacauuuau

SEQ ID NO: 883240 - RNA, 22 nt, Human
ugagccgagaucgcaccacugc

SEQ ID NO: 883241 - RNA, 19 nt, Human
ugagguggagguugcagug

SEQ ID NO: 883242 - RNA, 23 nt, Human
ugccuguaaucccagcuacuagg

SEQ ID NO: 883243 - RNA, 24 nt, Human
uggaucaccugaggucaggaguuc

SEQ ID NO: 883244 - RNA, 27 nt, Human
uggaucaccugaggucaggaguucaag

SEQ ID NO: 883245 - RNA, 21 nt, Human
uggcucacaccuguaauccca

SEQ ID NO: 883246 - RNA, 22 nt, Human
uggcucacaccuguaaucccag

SEQ ID NO: 883247 - RNA, 24 nt, Human
uggcucacaccuguaaucccagca

SEQ ID NO: 883248 - RNA, 19 nt, Human
ugggaacacaguaaaaaac

SEQ ID NO: 883249 - RNA, 19 nt, Human
ugggaacacaguaaaaaac

SEQ ID NO: 883250 - RNA, 24 nt, Human
ugggaggccaaggcggguggauca

SEQ ID NO: 883251 - RNA, 24 nt, Human
ugguggugugugccuguaauccca

SEQ ID NO: 883252 - RNA, 21 nt, Human
uggugugugccuguaauccca

SEQ ID NO: 883253 - RNA, 22 nt, Human
uggugugugccuguaaucccag

SEQ ID NO: 883254 - RNA, 24 nt, Human
uggugugugccuguaaucccagcu

SEQ ID NO: 883255 - RNA, 24 nt, Human
ugugagguggagguugcagugagc

SEQ ID NO: 883256 - RNA, 24 nt, Human
uuagccagguaugguggugugugc

SEQ ID NO: 883257 - RNA, 24 nt, Human
uugaaccugugagguggagguugc

SEQ ID NO: 883258 - RNA, 22 nt, Human
uugcaaaaaugucaaaaaaaga

SEQ ID NO: 883259 - RNA, 18 nt, Human
uugcagugagccgagauc

SEQ ID NO: 883260 - RNA, 19 nt, Human
uugcagugagccgagaucg

SEQ ID NO: 883261 - RNA, 20 nt, Human
uugcagugagccgagaucgc

SEQ ID NO: 883262 - RNA, 22 nt, Human
uugcagugagccgagaucgcac

SEQ ID NO: 883263 - RNA, 23 nt, Human
aaaauuuuuccaacacccugaca

SEQ ID NO: 883264 - RNA, 24 nt, Human
acuucaaagcuuccagcagccuca

SEQ ID NO: 883265 - RNA, 24 nt, Human
caaaauuuuuccaacacccugaca

SEQ ID NO: 883266 - RNA, 24 nt, Human
cacccaggcuucacccuagaaguc

SEQ ID NO: 883267 - RNA, 19 nt, Human
cacuaauuauucuucccca

SEQ ID NO: 883268 - RNA, 23 nt, Human
cauaaaaugcaaaugcugauuca

SEQ ID NO: 883269 - RNA, 19 nt, Human
ccaugcccagccugaacca

SEQ ID NO: 883270 - RNA, 25 nt, Human
ccauggccauguuauaccugccuug

SEQ ID NO: 883271 - RNA, 18 nt, Human
cccaggcuucacccuaga

SEQ ID NO: 883272 - RNA, 24 nt, Human
ccugugauuacaaagaggaugcug

SEQ ID NO: 883273 - RNA, 21 nt, Human
cucacagucccugcuguggga

SEQ ID NO: 883274 - RNA, 20 nt, Human
cucaucacccaggcuucacc

SEQ ID NO: 883275 - RNA, 21 nt, Human
cugaaggcugguccaugccca

SEQ ID NO: 883276 - RNA, 18 nt, Human
cugauauccaauguucuc

SEQ ID NO: 883277 - RNA, 22 nt, Human
gaugaugagacugcugaaaaga

SEQ ID NO: 883278 - RNA, 18 nt, Human
gauuacaaagaggaugcu

SEQ ID NO: 883279 - RNA, 25 nt, Human
guaguucuuuuuauagcaugagggg

SEQ ID NO: 883280 - RNA, 27 nt, Human
guccauggccauguuauaccugccacc

SEQ ID NO: 883281 - RNA, 18 nt, Human
uacaaagaggaugcugcu

SEQ ID NO: 883282 - RNA, 24 nt, Human
uccaugcccagccugaaccagggg

SEQ ID NO: 883283 - RNA, 28 nt, Human
uccauggccauguuauaccugccaccuu

SEQ ID NO: 883284 - RNA, 20 nt, Human
ucucacagucccugcugugg

SEQ ID NO: 883285 - RNA, 21 nt, Human
ucucucacagucccugcugug

SEQ ID NO: 883286 - RNA, 21 nt, Human
ugaaaagaccugagcaggaug

SEQ ID NO: 883287 - RNA, 27 nt, Human
ugacaacauuucauuucaaacucugau

SEQ ID NO: 883288 - RNA, 22 nt, Human
ugggaaaaacugauauccaaug

SEQ ID NO: 883289 - RNA, 23 nt, Human
ugggaaaaacugauauccaaugu

SEQ ID NO: 883290 - RNA, 18 nt, Human
ugggagagaacaaaggua

SEQ ID NO: 883291 - RNA, 19 nt, Human
ugugauuacaaagaggaug

SEQ ID NO: 883292 - RNA, 20 nt, Human
ugugcagaacucaccaaaau

SEQ ID NO: 883293 - RNA, 18 nt, Human
uuccccagucuucauuuc

SEQ ID NO: 883294 - RNA, 20 nt, Human
uuuuuuuuuuuuuaagggau

SEQ ID NO: 883295 - RNA, 23 nt, Human
uuuuuuuuuuuuuuuuuuaaggg

SEQ ID NO: 883296 - RNA, 19 nt, Human
aaguagcugggauuacagg

SEQ ID NO: 883297 - RNA, 23 nt, Human
agauccugucugauuaauuccuu

SEQ ID NO: 883298 - RNA, 18 nt, Human
aggugauccgcccgccuc

SEQ ID NO: 883299 - RNA, 21 nt, Human
aguguaguggcacgaucucag

SEQ ID NO: 883300 - RNA, 24 nt, Human
aguguaguggcacgaucucagcuc

SEQ ID NO: 883301 - RNA, 22 nt, Human
cacacaauucugguuuuucgcu

SEQ ID NO: 883302 - RNA, 22 nt, Human
cacccucacucagguugucaca

SEQ ID NO: 883303 - RNA, 23 nt, Human
caccuccgccucucggguucaag

SEQ ID NO: 883304 - RNA, 21 nt, Human
cacgaucucagcucacugcca

SEQ ID NO: 883305 - RNA, 20 nt, Human
cacugcuggcaugaaagggu

SEQ ID NO: 883306 - RNA, 22 nt, Human
cacugcuguuucuccagaaaga

SEQ ID NO: 883307 - RNA, 23 nt, Human
cagagucuagaaauucuccugcu

SEQ ID NO: 883308 - RNA, 29 nt, Human
cagcaauaucccaccgagacucacucaac

SEQ ID NO: 883309 - RNA, 23 nt, Human
cagcucacugccaccuccgccuc

SEQ ID NO: 883310 - RNA, 19 nt, Human
caggugcccgccaccacgc

SEQ ID NO: 883311 - RNA, 21 nt, Human
caggugcccgccaccacgccc

SEQ ID NO: 883312 - RNA, 24 nt, Human
caguaagcucuucucuuuggcacu

SEQ ID NO: 883313 - RNA, 24 nt, Human
cauguuugucaggcuggucuugaa

SEQ ID NO: 883314 - RNA, 21 nt, Human
ccaaguagcugggauuacagg

SEQ ID NO: 883315 - RNA, 23 nt, Human
ccaaguagcugggauuacaggug

SEQ ID NO: 883316 - RNA, 21 nt, Human
ccauguuugucaggcuggucu

SEQ ID NO: 883317 - RNA, 21 nt, Human
ccauguuugucaggcuggucu

SEQ ID NO: 883318 - RNA, 18 nt, Human
cccgaccucaggugaucc

SEQ ID NO: 883319 - RNA, 22 nt, Human
cccgaccucaggugauccgccc

SEQ ID NO: 883320 - RNA, 21 nt, Human
cccgccuaauuuuuauauuuu

SEQ ID NO: 883321 - RNA, 22 nt, Human
ccggacccugcagccgcguucc

SEQ ID NO: 883322 - RNA, 22 nt, Human
ccucucggguucaagcaauucu

SEQ ID NO: 883323 - RNA, 18 nt, Human
cgaccucaggugauccgc

SEQ ID NO: 883324 - RNA, 24 nt, Human
cgaccucaggugauccgcccgccu

SEQ ID NO: 883325 - RNA, 21 nt, Human
cggguucaagcaauucugucu

SEQ ID NO: 883326 - RNA, 28 nt, Human
cucacugccaccuccgccucucggguuc

SEQ ID NO: 883327 - RNA, 22 nt, Human
cucagcucacugccaccuccgc

SEQ ID NO: 883328 - RNA, 26 nt, Human
cucccgaccucaggugauccgcccgc

SEQ ID NO: 883329 - RNA, 24 nt, Human
cucgcucuguugcgcaggcuggag

SEQ ID NO: 883330 - RNA, 24 nt, Human
cugcagcagauuuuuauuagaugg

SEQ ID NO: 883331 - RNA, 20 nt, Human
cuugaccaggugcagcagca

SEQ ID NO: 883332 - RNA, 22 nt, Human
gaaauucuccugcuuuccaccc

SEQ ID NO: 883333 - RNA, 22 nt, Human
gacccugcagccgcguucccag

SEQ ID NO: 883334 - RNA, 23 nt, Human
gaccucaggugauccgcccgccu

SEQ ID NO: 883335 - RNA, 24 nt, Human
gaccucaggugauccgcccgccuc

SEQ ID NO: 883336 - RNA, 24 nt, Human
gagaugagguuucuccauguuugu

SEQ ID NO: 883337 - RNA, 22 nt, Human
gaggagugaggacauuacuggc

SEQ ID NO: 883338 - RNA, 18 nt, Human
gauuacaggugcccgcca

SEQ ID NO: 883339 - RNA, 23 nt, Human
gcuggucuugaacucccgaccuc

SEQ ID NO: 883340 - RNA, 24 nt, Human
ggcuggucuugaacucccgaccuc

SEQ ID NO: 883341 - RNA, 18 nt, Human
guagcugggauuacaggu

SEQ ID NO: 883342 - RNA, 21 nt, Human
gugauccgcccgccucggccu

SEQ ID NO: 883343 - RNA, 24 nt, Human
uaagugguaagaaauggcaaguac

SEQ ID NO: 883344 - RNA, 24 nt, Human
uaauuuuuauauuuuuacuagaga

SEQ ID NO: 883345 - RNA, 23 nt, Human
uacaggugcccgccaccacgccc

SEQ ID NO: 883346 - RNA, 24 nt, Human
uacuagagaugagguuucuccaug

SEQ ID NO: 883347 - RNA, 26 nt, Human
ucacauucacugcuguuucuccagaa

SEQ ID NO: 883348 - RNA, 18 nt, Human
ucacugccaccuccgccu

SEQ ID NO: 883349 - RNA, 23 nt, Human
ucacugccaccuccgccucucgg

SEQ ID NO: 883350 - RNA, 24 nt, Human
ucacugccaccuccgccucucggg

SEQ ID NO: 883351 - RNA, 23 nt, Human
ucacugcuguuucuccagaaaga

SEQ ID NO: 883352 - RNA, 22 nt, Human
uccaaguagcugggauuacagg

SEQ ID NO: 883353 - RNA, 23 nt, Human
uccaaguagcugggauuacaggu

SEQ ID NO: 883354 - RNA, 24 nt, Human
uccaaguagcugggauuacaggug

SEQ ID NO: 883355 - RNA, 22 nt, Human
uccacccucacucagguuguca

SEQ ID NO: 883356 - RNA, 24 nt, Human
uccgccucucggguucaagcaauu

SEQ ID NO: 883357 - RNA, 20 nt, Human
uccggaagcuucugaaauuc

SEQ ID NO: 883358 - RNA, 24 nt, Human
ucuccaaguagcugggauuacagg

SEQ ID NO: 883359 - RNA, 24 nt, Human
ucuccauguuugucaggcuggucu

SEQ ID NO: 883360 - RNA, 20 nt, Human
ucuccugcuuuccacccuca

SEQ ID NO: 883361 - RNA, 23 nt, Human
ucucgcucuguugcgcaggcugg

SEQ ID NO: 883362 - RNA, 24 nt, Human
ucucgcucuguugcgcaggcugga

SEQ ID NO: 883363 - RNA, 21 nt, Human
ucucggguucaagcaauucug

SEQ ID NO: 883364 - RNA, 24 nt, Human
ucuguugcgcaggcuggaguguag

SEQ ID NO: 883365 - RNA, 26 nt, Human
ugaaaacacugacggaacuggagacc

SEQ ID NO: 883366 - RNA, 22 nt, Human
ugaccaggugcagcagcaauau

SEQ ID NO: 883367 - RNA, 22 nt, Human
ugagacggagucucgcucuguu

SEQ ID NO: 883368 - RNA, 18 nt, Human
ugauuuguuaccaccucu

SEQ ID NO: 883369 - RNA, 20 nt, Human
ugcccgccaccacgcccgcc

SEQ ID NO: 883370 - RNA, 24 nt, Human
ugcgcaggcuggaguguaguggca

SEQ ID NO: 883371 - RNA, 23 nt, Human
uggaguguaguggcacgaucuca

SEQ ID NO: 883372 - RNA, 24 nt, Human
uggaguguaguggcacgaucucag

SEQ ID NO: 883373 - RNA, 24 nt, Human
uggcacgaucucagcucacugcca

SEQ ID NO: 883374 - RNA, 20 nt, Human
uggcaugaaagggucuacag

SEQ ID NO: 883375 - RNA, 21 nt, Human
uggcaugaaagggucuacagu

SEQ ID NO: 883376 - RNA, 21 nt, Human
ugggauuacaggugcccgcca

SEQ ID NO: 883377 - RNA, 22 nt, Human
ugggauuacaggugcccgccac

SEQ ID NO: 883378 - RNA, 24 nt, Human
ugggauuacaggugcccgccacca

SEQ ID NO: 883379 - RNA, 22 nt, Human
ugucaggcuggucuugaacucc

SEQ ID NO: 883380 - RNA, 21 nt, Human
ugucuccaaguagcugggauu

SEQ ID NO: 883381 - RNA, 24 nt, Human
uugcgcaggcuggaguguaguggc

SEQ ID NO: 883382 - RNA, 24 nt, Human
uuuacuagagaugagguuucucca

SEQ ID NO: 883383 - RNA, 18 nt, Human
acagugcccucucaaaac

SEQ ID NO: 883384 - RNA, 22 nt, Human
agagaacaguucugguaguauu

SEQ ID NO: 883385 - RNA, 19 nt, Human
agaucuaaugagcagcccc

SEQ ID NO: 883386 - RNA, 24 nt, Human
agcaaauaugaaaauagaaagucc

SEQ ID NO: 883387 - RNA, 24 nt, Human
aguaucaaaagaucuaaugagcag

SEQ ID NO: 883388 - RNA, 20 nt, Human
auuucacaugguaaaguauc

SEQ ID NO: 883389 - RNA, 22 nt, Human
caaauaugaaaauagaaagucc

SEQ ID NO: 883390 - RNA, 22 nt, Human
caauguguuucucuuccgaauu

SEQ ID NO: 883391 - RNA, 26 nt, Human
cccaaguugacagugcccucucaaaa

SEQ ID NO: 883392 - RNA, 20 nt, Human
ccuccugucuuaaacccaag

SEQ ID NO: 883393 - RNA, 25 nt, Human
ccuccugucuuaaacccaaguugac

SEQ ID NO: 883394 - RNA, 19 nt, Human
ccucuacagaaaaaguggg

SEQ ID NO: 883395 - RNA, 24 nt, Human
uaauaugagaaaaaaaaagaugau

SEQ ID NO: 883396 - RNA, 24 nt, Human
uacacaacauacuuuuauguuucu

SEQ ID NO: 883397 - RNA, 23 nt, Human
uaucuaauaaaaguuuauuugug

SEQ ID NO: 883398 - RNA, 21 nt, Human
uaucuuagauaugaauccuaa

SEQ ID NO: 883399 - RNA, 20 nt, Human
ugaaaauacuuucuugcaac

SEQ ID NO: 883400 - RNA, 24 nt, Human
ugaaaggugugaacuugcaauguc

SEQ ID NO: 883401 - RNA, 19 nt, Human
uguaauaugagaaaaaaaa

SEQ ID NO: 883402 - RNA, 22 nt, Human
uuuguccauuuguaauaugaga

SEQ ID NO: 883403 - RNA, 21 nt, Human
uuuuucacuuuaacaaaucua

SEQ ID NO: 883404 - RNA, 19 nt, Human
uuuuuuuuuuuuucacuuu

SEQ ID NO: 883405 - RNA, 23 nt, Human
uuuuuuuuuuuuuuuuucacuuu

SEQ ID NO: 883406 - RNA, 27 nt, Human
uuuuuuuuuuuuuuuuuuucacuuuaa

SEQ ID NO: 883407 - RNA, 21 nt, Human
accuccgccccggaagaacuc

SEQ ID NO: 883408 - RNA, 21 nt, Human
ccggaagaacucgugcaggcg

SEQ ID NO: 883409 - RNA, 23 nt, Human
cgccccggaagaacucgugcagg

SEQ ID NO: 883410 - RNA, 20 nt, Human
gccggcugcuuagcaggccu

SEQ ID NO: 883411 - RNA, 19 nt, Human
gcgggauagacuuccggcc

SEQ ID NO: 883412 - RNA, 19 nt, Human
gcgugaggccgugaauggc

SEQ ID NO: 883413 - RNA, 24 nt, Human
uagacuuccggccgccggcugcuu

SEQ ID NO: 883414 - RNA, 23 nt, Human
ugaccuccgccccggaagaacuc

SEQ ID NO: 883415 - RNA, 21 nt, Human
uguccuaguccacgcuaaaau

SEQ ID NO: 883416 - RNA, 21 nt, Human
uuuugcgcuccgugacccuuc

SEQ ID NO: 883417 - RNA, 19 nt, Human
uuuuuuuuuuuuuuugugg

SEQ ID NO: 883418 - RNA, 27 nt, Human
uuuuuuuuuuuuuuugugguagcaggg

SEQ ID NO: 883419 - RNA, 19 nt, Human
uuuuuuuuuuuuuuuuugu

SEQ ID NO: 883420 - RNA, 22 nt, Human
uuuuuuuuuuuuuuuuuugugg

SEQ ID NO: 883421 - RNA, 20 nt, Human
aaaauaguguuaagaugcga

SEQ ID NO: 883422 - RNA, 19 nt, Human
aaacaaacacauauguaga

SEQ ID NO: 883423 - RNA, 24 nt, Human
aaaguguugggauuacaggcguga

SEQ ID NO: 883424 - RNA, 21 nt, Human
aaguguugggauuacaggcgu

SEQ ID NO: 883425 - RNA, 26 nt, Human
aaguguugggauuacaggcgugagcc

SEQ ID NO: 883426 - RNA, 23 nt, Human
acaguaugaaaacaauuaaaaac

SEQ ID NO: 883427 - RNA, 19 nt, Human
acauuggccaggcuggucu

SEQ ID NO: 883428 - RNA, 18 nt, Human
acccggcccugaaugucc

SEQ ID NO: 883429 - RNA, 20 nt, Human
acugcaacuccaccuccugg

SEQ ID NO: 883430 - RNA, 21 nt, Human
acugcaacuccaccuccuggg

SEQ ID NO: 883431 - RNA, 22 nt, Human
acugcaacuccaccuccugggu

SEQ ID NO: 883432 - RNA, 24 nt, Human
acugcaacuccaccuccuggguuc

SEQ ID NO: 883433 - RNA, 21 nt, Human
agaaaacagacauguagaaaa

SEQ ID NO: 883434 - RNA, 26 nt, Human
agaaacaaacacauauguagacagaa

SEQ ID NO: 883435 - RNA, 19 nt, Human
aggcacccgccaccacacc

SEQ ID NO: 883436 - RNA, 19 nt, Human
aggcacccgccaccacacc

SEQ ID NO: 883437 - RNA, 24 nt, Human
aggugauccacccaccucggccuu

SEQ ID NO: 883438 - RNA, 24 nt, Human
agugcaggggcacgaucuuggcuu

SEQ ID NO: 883439 - RNA, 18 nt, Human
aucacgucuacaacuuau

SEQ ID NO: 883440 - RNA, 22 nt, Human
augagaaaacagacauguagaa

SEQ ID NO: 883441 - RNA, 24 nt, Human
augcaaaugcgguaaacuaacauu

SEQ ID NO: 883442 - RNA, 24 nt, Human
auugcuaucuuucaucaaaggguc

SEQ ID NO: 883443 - RNA, 24 nt, Human
caaaguguugggauuacaggcgug

SEQ ID NO: 883444 - RNA, 22 nt, Human
caacuccaccuccuggguucaa

SEQ ID NO: 883445 - RNA, 20 nt, Human
caagcgauucuccugccuca

SEQ ID NO: 883446 - RNA, 22 nt, Human
caagcgauucuccugccucagc

SEQ ID NO: 883447 - RNA, 24 nt, Human
cacauuggccaggcuggucuugaa

SEQ ID NO: 883448 - RNA, 21 nt, Human
caccacauuggccaggcuggu

SEQ ID NO: 883449 - RNA, 24 nt, Human
caccacauuggccaggcuggucuu

SEQ ID NO: 883450 - RNA, 27 nt, Human
caccacauuggccaggcuggucuugaa

SEQ ID NO: 883451 - RNA, 22 nt, Human
cacccaccucggccuuccaaag

SEQ ID NO: 883452 - RNA, 23 nt, Human
cacccaccucggccuuccaaagu

SEQ ID NO: 883453 - RNA, 24 nt, Human
cacucuuucgcccagccugaagug

SEQ ID NO: 883454 - RNA, 20 nt, Human
cacuuuacagaugagaaaac

SEQ ID NO: 883455 - RNA, 24 nt, Human
cagaaagguaaugcaaaugcggua

SEQ ID NO: 883456 - RNA, 19 nt, Human
cagccugaagugcaggggc

SEQ ID NO: 883457 - RNA, 22 nt, Human
cauuggccaggcuggucuugaa

SEQ ID NO: 883458 - RNA, 22 nt, Human
ccaaaguguugggauuacaggc

SEQ ID NO: 883459 - RNA, 22 nt, Human
ccaaaguguugggauuacaggc

SEQ ID NO: 883460 - RNA, 24 nt, Human
ccaaaguguugggauuacaggcgu

SEQ ID NO: 883461 - RNA, 24 nt, Human
ccaccuccuggguucaagcgauuc

SEQ ID NO: 883462 - RNA, 21 nt, Human
ccacugcacccggcccugaau

SEQ ID NO: 883463 - RNA, 23 nt, Human
cccgcguggcugggauuauaggc

SEQ ID NO: 883464 - RNA, 24 nt, Human
ccuccuggguucaagcgauucucc

SEQ ID NO: 883465 - RNA, 24 nt, Human
ccugaccucaggugauccacccac

SEQ ID NO: 883466 - RNA, 23 nt, Human
ccugccucagccucccgcguggc

SEQ ID NO: 883467 - RNA, 23 nt, Human
ccuggguucaagcgauucuccug

SEQ ID NO: 883468 - RNA, 21 nt, Human
cuccuggguucaagcgauucu

SEQ ID NO: 883469 - RNA, 22 nt, Human
cugcaacuccaccuccuggguu

SEQ ID NO: 883470 - RNA, 23 nt, Human
cugccucagccucccgcguggcu

SEQ ID NO: 883471 - RNA, 24 nt, Human
cuuacugcaacuccaccuccuggg

SEQ ID NO: 883472 - RNA, 24 nt, Human
gaccucaggugauccacccaccuc

SEQ ID NO: 883473 - RNA, 18 nt, Human
gauuacaggcgugagcca

SEQ ID NO: 883474 - RNA, 22 nt, Human
gauuacaggcgugagccacugc

SEQ ID NO: 883475 - RNA, 23 nt, Human
gauuacaggcgugagccacugca

SEQ ID NO: 883476 - RNA, 21 nt, Human
gauucuccugccucagccucc

SEQ ID NO: 883477 - RNA, 18 nt, Human
gcaaaugcgguaaacuaa

SEQ ID NO: 883478 - RNA, 24 nt, Human
gcgauucuccugccucagccuccc

SEQ ID NO: 883479 - RNA, 23 nt, Human
gcuggucuugaacuccugaccuc

SEQ ID NO: 883480 - RNA, 18 nt, Human
ggaauggaaacaaagaaa

SEQ ID NO: 883481 - RNA, 24 nt, Human
ggcuggucuugaacuccugaccuc

SEQ ID NO: 883482 - RNA, 19 nt, Human
ggucuugaacuccugaccu

SEQ ID NO: 883483 - RNA, 25 nt, Human
guagaaaagcucccaaaauguggca

SEQ ID NO: 883484 - RNA, 18 nt, Human
gucucacucuuucgccca

SEQ ID NO: 883485 - RNA, 24 nt, Human
gugauccacccaccucggccuucc

SEQ ID NO: 883486 - RNA, 24 nt, Human
uaauuuuugcauuuuuaguagaga

SEQ ID NO: 883487 - RNA, 19 nt, Human
uacaggcgugagccacugc

SEQ ID NO: 883488 - RNA, 23 nt, Human
uacaggcgugagccacugcaccc

SEQ ID NO: 883489 - RNA, 22 nt, Human
uacugcaacuccaccuccuggg

SEQ ID NO: 883490 - RNA, 28 nt, Human
uaguagagagaggguugauuucaccaca

SEQ ID NO: 883491 - RNA, 19 nt, Human
ucaagcgauucuccugccu

SEQ ID NO: 883492 - RNA, 23 nt, Human
uccaaaguguugggauuacaggc

SEQ ID NO: 883493 - RNA, 24 nt, Human
uccaaaguguugggauuacaggcg

SEQ ID NO: 883494 - RNA, 24 nt, Human
ucccgcguggcugggauuauaggc

SEQ ID NO: 883495 - RNA, 21 nt, Human
uccuggguucaagcgauucuc

SEQ ID NO: 883496 - RNA, 24 nt, Human
uccuggguucaagcgauucuccug

SEQ ID NO: 883497 - RNA, 24 nt, Human
ucucacucuuucgcccagccugaa

SEQ ID NO: 883498 - RNA, 26 nt, Human
ucuccugccucagccucccgcguggc

SEQ ID NO: 883499 - RNA, 23 nt, Human
ucuugaacuccugaccucaggug

SEQ ID NO: 883500 - RNA, 24 nt, Human
ugaagugcaggggcacgaucuugg

SEQ ID NO: 883501 - RNA, 21 nt, Human
ugaccucaggugauccaccca

SEQ ID NO: 883502 - RNA, 24 nt, Human
ugaccucaggugauccacccaccu

SEQ ID NO: 883503 - RNA, 19 nt, Human
ugagaaaacagacauguag

SEQ ID NO: 883504 - RNA, 24 nt, Human
ugauccacccaccucggccuucca

SEQ ID NO: 883505 - RNA, 21 nt, Human
ugcacccggcccugaaugucc

SEQ ID NO: 883506 - RNA, 24 nt, Human
ugccucagccucccgcguggcugg

SEQ ID NO: 883507 - RNA, 18 nt, Human
uggaaacaaagaaaauuu

SEQ ID NO: 883508 - RNA, 24 nt, Human
uggccaggcuggucuugaacuccu

SEQ ID NO: 883509 - RNA, 18 nt, Human
ugggauuacaggcgugag

SEQ ID NO: 883510 - RNA, 19 nt, Human
ugggauuacaggcgugagc

SEQ ID NO: 883511 - RNA, 21 nt, Human
ugggauuacaggcgugagcca

SEQ ID NO: 883512 - RNA, 22 nt, Human
ugggauuacaggcgugagccac

SEQ ID NO: 883513 - RNA, 22 nt, Human
ugggauuacaggcgugagccac

SEQ ID NO: 883514 - RNA, 24 nt, Human
ugggauuacaggcgugagccacug

SEQ ID NO: 883515 - RNA, 26 nt, Human
ugggauuacaggcgugagccacugca

SEQ ID NO: 883516 - RNA, 21 nt, Human
ugggauuauaggcacccgcca

SEQ ID NO: 883517 - RNA, 22 nt, Human
ugggauuauaggcacccgccac

SEQ ID NO: 883518 - RNA, 24 nt, Human
ugggauuauaggcacccgccacca

SEQ ID NO: 883519 - RNA, 23 nt, Human
uggguucaagcgauucuccugcc

SEQ ID NO: 883520 - RNA, 24 nt, Human
uggguucaagcgauucuccugccu

SEQ ID NO: 883521 - RNA, 19 nt, Human
uggugggugcaauuuuggu

SEQ ID NO: 883522 - RNA, 23 nt, Human
uuacugcaacuccaccuccuggg

SEQ ID NO: 883523 - RNA, 19 nt, Human
uuauaggcacccgccacca

SEQ ID NO: 883524 - RNA, 21 nt, Human
uucaagcgauucuccugccuc

SEQ ID NO: 883525 - RNA, 23 nt, Human
uucaagcgauucuccugccucag

SEQ ID NO: 883526 - RNA, 24 nt, Human
uucaagcgauucuccugccucagc

SEQ ID NO: 883527 - RNA, 25 nt, Human
uuuauaaacauguuuuacuuccuuu

SEQ ID NO: 883528 - RNA, 20 nt, Human
uuuuugcauuuuuaguagag

SEQ ID NO: 883529 - RNA, 19 nt, Human
aaguacuggagacaauggc

SEQ ID NO: 883530 - RNA, 19 nt, Human
aaguacuggagacaauggc

SEQ ID NO: 883531 - RNA, 21 nt, Human
aggaagaagcuaaacagguuu

SEQ ID NO: 883532 - RNA, 25 nt, Human
agggugcuugcacauuucugcucca

SEQ ID NO: 883533 - RNA, 18 nt, Human
caaaucuacagccuggua

SEQ ID NO: 883534 - RNA, 18 nt, Human
cacugcucccgauucugc

SEQ ID NO: 883535 - RNA, 18 nt, Human
caggaaaggcccccgcca

SEQ ID NO: 883536 - RNA, 21 nt, Human
caggaaaggcccccgccagug

SEQ ID NO: 883537 - RNA, 24 nt, Human
cauuucugcuccacugcucccgau

SEQ ID NO: 883538 - RNA, 19 nt, Human
ccaauggaggaagaagcua

SEQ ID NO: 883539 - RNA, 18 nt, Human
ccacugcucccgauucug

SEQ ID NO: 883540 - RNA, 24 nt, Human
cuggagacaauggcuggcucuccu

SEQ ID NO: 883541 - RNA, 23 nt, Human
gaaaggcccccgccagugcugcc

SEQ ID NO: 883542 - RNA, 18 nt, Human
gacaauggcuggcucucc

SEQ ID NO: 883543 - RNA, 21 nt, Human
gccagugcugccugcggcgcg

SEQ ID NO: 883544 - RNA, 19 nt, Human
ggaggaagaagcuaaacag

SEQ ID NO: 883545 - RNA, 19 nt, Human
ggagugagaucagggugcu

SEQ ID NO: 883546 - RNA, 19 nt, Human
uacugcaucuagcuuauca

SEQ ID NO: 883547 - RNA, 19 nt, Human
uccaauggaggaagaagcu

SEQ ID NO: 883548 - RNA, 22 nt, Human
ucccaauaaacuccaauggagg

SEQ ID NO: 883549 - RNA, 24 nt, Human
ucuacagccugguacuucuggaac

SEQ ID NO: 883550 - RNA, 19 nt, Human
ucuacugcaucuagcuuau

SEQ ID NO: 883551 - RNA, 23 nt, Human
ucuguauuuggucagagcuggga

SEQ ID NO: 883552 - RNA, 24 nt, Human
ugagaaugaggcaaguacuggaga

SEQ ID NO: 883553 - RNA, 21 nt, Human
ugagaccugagggaggacccc

SEQ ID NO: 883554 - RNA, 25 nt, Human
uggaugaugagaaugaggcaaguac

SEQ ID NO: 883555 - RNA, 18 nt, Human
uggcaaaaaugaagaauu

SEQ ID NO: 883556 - RNA, 23 nt, Human
ugggagugagaucagggugcuug

SEQ ID NO: 883557 - RNA, 20 nt, Human
ugguacuucuggaacaggac

SEQ ID NO: 883558 - RNA, 21 nt, Human
uuuuuuuuuuuuaaaaagaac

SEQ ID NO: 883559 - RNA, 24 nt, Human
aaacagagugacauuuaccaaaau

SEQ ID NO: 883560 - RNA, 24 nt, Human
aaagaugugcaggaaaccacaaaa

SEQ ID NO: 883561 - RNA, 24 nt, Human
aaagugcugggauuacaggcguga

SEQ ID NO: 883562 - RNA, 18 nt, Human
aaaguuccauucccugcc

SEQ ID NO: 883563 - RNA, 24 nt, Human
aaauagcaaaaacuuuaagggagc

SEQ ID NO: 883564 - RNA, 22 nt, Human
aaaucaucucagcuggaagcac

SEQ ID NO: 883565 - RNA, 26 nt, Human
aacacacugauaccugauagcauuac

SEQ ID NO: 883566 - RNA, 19 nt, Human
aagugcugggauuacaggc

SEQ ID NO: 883567 - RNA, 19 nt, Human
aagugcugggauuacaggc

SEQ ID NO: 883568 - RNA, 26 nt, Human
aagugcugggauuacaggcgugagcc

SEQ ID NO: 883569 - RNA, 18 nt, Human
acgggguuucaccguguu

SEQ ID NO: 883570 - RNA, 19 nt, Human
acgggguuucaccguguua

SEQ ID NO: 883571 - RNA, 20 nt, Human
acgggguuucaccguguuag

SEQ ID NO: 883572 - RNA, 24 nt, Human
acgggguuucaccguguuagccag

SEQ ID NO: 883573 - RNA, 18 nt, Human
agaagcuuaauaaagaaa

SEQ ID NO: 883574 - RNA, 19 nt, Human
agagacgggguuucaccgu

SEQ ID NO: 883575 - RNA, 25 nt, Human
agcacuucucugggguugcuauacc

SEQ ID NO: 883576 - RNA, 22 nt, Human
aggaaaaaagaauaggcaaugc

SEQ ID NO: 883577 - RNA, 23 nt, Human
aggcgugagccaccgugccuggc

SEQ ID NO: 883578 - RNA, 25 nt, Human
aggcuggagugcaguggcgcgaucu

SEQ ID NO: 883579 - RNA, 23 nt, Human
aguagcugggauuacaggcacgu

SEQ ID NO: 883580 - RNA, 20 nt, Human
agugcaguggcgcgaucucg

SEQ ID NO: 883581 - RNA, 24 nt, Human
agugcaguggcgcgaucucgucuc

SEQ ID NO: 883582 - RNA, 22 nt, Human
aguucugggcuccaagaagagg

SEQ ID NO: 883583 - RNA, 24 nt, Human
caaagugcugggauuacaggcgug

SEQ ID NO: 883584 - RNA, 20 nt, Human
caccaguagcguaacaaaau

SEQ ID NO: 883585 - RNA, 24 nt, Human
caccauguccagcuaauuuuugua

SEQ ID NO: 883586 - RNA, 18 nt, Human
caccguguuagccaggau

SEQ ID NO: 883587 - RNA, 22 nt, Human
caccguguuagccaggaugguc

SEQ ID NO: 883588 - RNA, 22 nt, Human
cacgcgauucuccugccucagc

SEQ ID NO: 883589 - RNA, 22 nt, Human
cacucuccacuuaaacauacuc

SEQ ID NO: 883590 - RNA, 18 nt, Human
cacugcagccuccaccgg

SEQ ID NO: 883591 - RNA, 19 nt, Human
cagacaucuccuaacaaac

SEQ ID NO: 883592 - RNA, 20 nt, Human
cagccuccugaguagcuggg

SEQ ID NO: 883593 - RNA, 22 nt, Human
ccaaagugcugggauuacaggc

SEQ ID NO: 883594 - RNA, 22 nt, Human
ccaaagugcugggauuacaggc

SEQ ID NO: 883595 - RNA, 24 nt, Human
ccaaagugcugggauuacaggcgu

SEQ ID NO: 883596 - RNA, 26 nt, Human
ccacccucauuucaaauuuaggcaaa

SEQ ID NO: 883597 - RNA, 26 nt, Human
ccccaaauuagcauaugccagccugc

SEQ ID NO: 883598 - RNA, 25 nt, Human
cccccaaauuagcauaugccagccu

SEQ ID NO: 883599 - RNA, 20 nt, Human
cccggguucacgcgauucuc

SEQ ID NO: 883600 - RNA, 23 nt, Human
cccggguucacgcgauucuccug

SEQ ID NO: 883601 - RNA, 22 nt, Human
ccuccaccgggcccggguucac

SEQ ID NO: 883602 - RNA, 23 nt, Human
ccugaguagcugggauuacaggc

SEQ ID NO: 883603 - RNA, 24 nt, Human
ccugaguagcugggauuacaggca

SEQ ID NO: 883604 - RNA, 23 nt, Human
ccugccucagccuccugaguagc

SEQ ID NO: 883605 - RNA, 23 nt, Human
cgcucugucgccaggcuggagug

SEQ ID NO: 883606 - RNA, 24 nt, Human
cgggguuucaccguguuagccagg

SEQ ID NO: 883607 - RNA, 28 nt, Human
cgugagccaccgugccuggccugcuuug

SEQ ID NO: 883608 - RNA, 22 nt, Human
cucaaucugaauuaaccaaaga

SEQ ID NO: 883609 - RNA, 18 nt, Human
cucacugcagccuccacc

SEQ ID NO: 883610 - RNA, 24 nt, Human
cucagccuccugaguagcugggau

SEQ ID NO: 883611 - RNA, 22 nt, Human
cuccugccucagccuccugagu

SEQ ID NO: 883612 - RNA, 23 nt, Human
cucgcucugucgccaggcuggag

SEQ ID NO: 883613 - RNA, 19 nt, Human
cucuauaaaguucugggcu

SEQ ID NO: 883614 - RNA, 24 nt, Human
cucuugaccucgugauccgccugc

SEQ ID NO: 883615 - RNA, 23 nt, Human
cugaguagcugggauuacaggca

SEQ ID NO: 883616 - RNA, 23 nt, Human
cugccucagccuccugaguagcu

SEQ ID NO: 883617 - RNA, 23 nt, Human
cugccucggccucccaaagugcu

SEQ ID NO: 883618 - RNA, 22 nt, Human
gaccucgugauccgccugccuc

SEQ ID NO: 883619 - RNA, 22 nt, Human
gaccucgugauccgccugccuc

SEQ ID NO: 883620 - RNA, 24 nt, Human
gaccucgugauccgccugccucgg

SEQ ID NO: 883621 - RNA, 19 nt, Human
gagaagcuuaauaaagaaa

SEQ ID NO: 883622 - RNA, 24 nt, Human
gagacgggguuucaccguguuagc

SEQ ID NO: 883623 - RNA, 21 nt, Human
gagcaguuaggacagacucaa

SEQ ID NO: 883624 - RNA, 25 nt, Human
gaguagcugggauuacaggcacgug

SEQ ID NO: 883625 - RNA, 25 nt, Human
gaucucgucucacugcagccuccac

SEQ ID NO: 883626 - RNA, 18 nt, Human
gauuacaggcacgugcca

SEQ ID NO: 883627 - RNA, 18 nt, Human
gauuacaggcgugagcca

SEQ ID NO: 883628 - RNA, 21 nt, Human
gauuacaggcgugagccaccg

SEQ ID NO: 883629 - RNA, 24 nt, Human
gauuacaggcgugagccaccgugc

SEQ ID NO: 883630 - RNA, 24 nt, Human
gcagccuccaccgggcccggguuc

SEQ ID NO: 883631 - RNA, 24 nt, Human
gcccggguucacgcgauucuccug

SEQ ID NO: 883632 - RNA, 24 nt, Human
gcgauucuccugccucagccuccu

SEQ ID NO: 883633 - RNA, 19 nt, Human
gcugcaauucuuuuaaugg

SEQ ID NO: 883634 - RNA, 19 nt, Human
gcuggagugcaguggcgcg

SEQ ID NO: 883635 - RNA, 20 nt, Human
ggaaaccacaaaagacaugg

SEQ ID NO: 883636 - RNA, 23 nt, Human
gggcuccaagaagaggucagugc

SEQ ID NO: 883637 - RNA, 23 nt, Human
gggguuucaccguguuagccagg

SEQ ID NO: 883638 - RNA, 19 nt, Human
ggguacuuaacuacagugc

SEQ ID NO: 883639 - RNA, 18 nt, Human
guaacccugguaggcaac

SEQ ID NO: 883640 - RNA, 18 nt, Human
guagcugggauuacaggc

SEQ ID NO: 883641 - RNA, 19 nt, Human
gucaaagugguuugcucau

SEQ ID NO: 883642 - RNA, 24 nt, Human
gucucgcucugucgccaggcugga

SEQ ID NO: 883643 - RNA, 20 nt, Human
guuccauucccugcccucag

SEQ ID NO: 883644 - RNA, 22 nt, Human
uaaaaaaaaauaaggguacgaa

SEQ ID NO: 883645 - RNA, 23 nt, Human
uaaaguuuaugcaguaaaagcuu

SEQ ID NO: 883646 - RNA, 24 nt, Human
uaauuuuuguauuuuuauuagaga

SEQ ID NO: 883647 - RNA, 24 nt, Human
uacaggcacgugccaccaugucca

SEQ ID NO: 883648 - RNA, 22 nt, Human
uacaggcgugagccaccgugcc

SEQ ID NO: 883649 - RNA, 23 nt, Human
uacaggcgugagccaccgugccu

SEQ ID NO: 883650 - RNA, 21 nt, Human
uaccaaaauaaagagggcuuc

SEQ ID NO: 883651 - RNA, 18 nt, Human
uagagacgggguuucacc

SEQ ID NO: 883652 - RNA, 18 nt, Human
uagagacgggguuucacc

SEQ ID NO: 883653 - RNA, 22 nt, Human
uagagacgggguuucaccgugu

SEQ ID NO: 883654 - RNA, 20 nt, Human
uagcaaaaacuuuaacugcu

SEQ ID NO: 883655 - RNA, 24 nt, Human
uaggauaaauaauacaacuaguaa

SEQ ID NO: 883656 - RNA, 18 nt, Human
uauaccaacuguuucagc

SEQ ID NO: 883657 - RNA, 24 nt, Human
uauuagagacgggguuucaccgug

SEQ ID NO: 883658 - RNA, 26 nt, Human
uauuagagacgggguuucaccguguu

SEQ ID NO: 883659 - RNA, 24 nt, Human
ucaccguguuagccaggauggucu

SEQ ID NO: 883660 - RNA, 19 nt, Human
ucacugcagccuccaccgg

SEQ ID NO: 883661 - RNA, 20 nt, Human
ucacugcagccuccaccggg

SEQ ID NO: 883662 - RNA, 21 nt, Human
ucacugcagccuccaccgggc

SEQ ID NO: 883663 - RNA, 26 nt, Human
ucacugcagccuccaccgggcccggg

SEQ ID NO: 883664 - RNA, 20 nt, Human
ucagccuccugaguagcugg

SEQ ID NO: 883665 - RNA, 21 nt, Human
ucagucaaagugguuugcuca

SEQ ID NO: 883666 - RNA, 24 nt, Human
ucccaaagugcugggauuacaggc

SEQ ID NO: 883667 - RNA, 24 nt, Human
uccugaguagcugggauuacaggc

SEQ ID NO: 883668 - RNA, 24 nt, Human
ucgccaggcuggagugcaguggcg

SEQ ID NO: 883669 - RNA, 18 nt, Human
ucggccucccaaagugcu

SEQ ID NO: 883670 - RNA, 21 nt, Human
ucuccuaacaaacagagugac

SEQ ID NO: 883671 - RNA, 22 nt, Human
ucucgcucugucgccaggcugg

SEQ ID NO: 883672 - RNA, 23 nt, Human
ucucgcucugucgccaggcugga

SEQ ID NO: 883673 - RNA, 18 nt, Human
ucugucgccaggcuggag

SEQ ID NO: 883674 - RNA, 21 nt, Human
ucugucgccaggcuggagugc

SEQ ID NO: 883675 - RNA, 23 nt, Human
ucugucgccaggcuggagugcag

SEQ ID NO: 883676 - RNA, 26 nt, Human
ucuuaaaaaaaaauaaggguacgaac

SEQ ID NO: 883677 - RNA, 20 nt, Human
ugaaggucauggggcacaag

SEQ ID NO: 883678 - RNA, 22 nt, Human
ugagacggugucucgcucuguc

SEQ ID NO: 883679 - RNA, 24 nt, Human
ugccucagccuccugaguagcugg

SEQ ID NO: 883680 - RNA, 21 nt, Human
ugccucggccucccaaagugc

SEQ ID NO: 883681 - RNA, 24 nt, Human
ugccucggccucccaaagugcugg

SEQ ID NO: 883682 - RNA, 22 nt, Human
ugcugaaaucagaacugaaaca

SEQ ID NO: 883683 - RNA, 24 nt, Human
ugcugggauuacaggcgugagcca

SEQ ID NO: 883684 - RNA, 23 nt, Human
uggagugcaguggcgcgaucucg

SEQ ID NO: 883685 - RNA, 18 nt, Human
ugggauuacaggcacgug

SEQ ID NO: 883686 - RNA, 21 nt, Human
ugggauuacaggcacgugcca

SEQ ID NO: 883687 - RNA, 22 nt, Human
ugggauuacaggcacgugccac

SEQ ID NO: 883688 - RNA, 24 nt, Human
ugggauuacaggcacgugccacca

SEQ ID NO: 883689 - RNA, 18 nt, Human
ugggauuacaggcgugag

SEQ ID NO: 883690 - RNA, 21 nt, Human
ugggauuacaggcgugagcca

SEQ ID NO: 883691 - RNA, 22 nt, Human
ugggauuacaggcgugagccac

SEQ ID NO: 883692 - RNA, 23 nt, Human
ugggauuacaggcgugagccacc

SEQ ID NO: 883693 - RNA, 23 nt, Human
ugggauuacaggcgugagccacc

SEQ ID NO: 883694 - RNA, 24 nt, Human
ugggauuacaggcgugagccaccg

SEQ ID NO: 883695 - RNA, 20 nt, Human
ugguaggcaacucuauaaag

SEQ ID NO: 883696 - RNA, 18 nt, Human
ugucucgcucugucgcca

SEQ ID NO: 883697 - RNA, 19 nt, Human
uuagagacgggguuucacc

SEQ ID NO: 883698 - RNA, 24 nt, Human
uuauuagagacgggguuucaccgu

SEQ ID NO: 883699 - RNA, 18 nt, Human
uucacgcgauucuccugc

SEQ ID NO: 883700 - RNA, 18 nt, Human
uucugggcuccaagaaga

SEQ ID NO: 883701 - RNA, 19 nt, Human
uuucaccguguuagccagg

SEQ ID NO: 883702 - RNA, 26 nt, Human
uuucagggcuuuagccacuauuucau

SEQ ID NO: 883703 - RNA, 22 nt, Human
uuugcucauguuugcugaaauc

SEQ ID NO: 883704 - RNA, 23 nt, Human
uuuucuuuuuuuuuuuuuuuggg

SEQ ID NO: 883705 - RNA, 24 nt, Human
uuuuuauuagagacgggguuucac

SEQ ID NO: 883706 - RNA, 20 nt, Human
uuuuuguauuuuuauuagag

SEQ ID NO: 883707 - RNA, 23 nt, Human
uuuuuguauuuuuauuagagacg

SEQ ID NO: 883708 - RNA, 25 nt, Human
uuuuuuuuuuuugagacggugucuc

SEQ ID NO: 883709 - RNA, 22 nt, Human
aucuccaacaagcauauucugg

SEQ ID NO: 883710 - RNA, 19 nt, Human
auugaccccagucaguuuc

SEQ ID NO: 883711 - RNA, 22 nt, Human
cacacccaucuccagcuggagg

SEQ ID NO: 883712 - RNA, 26 nt, Human
cacccccuccauaugcgaaugguucg

SEQ ID NO: 883713 - RNA, 21 nt, Human
cacuguguaaggaggcaaaac

SEQ ID NO: 883714 - RNA, 19 nt, Human
cagcuggaggugcaagcaa

SEQ ID NO: 883715 - RNA, 23 nt, Human
ccaugagugccugucggggaggg

SEQ ID NO: 883716 - RNA, 18 nt, Human
ccccuguagcuccccucu

SEQ ID NO: 883717 - RNA, 21 nt, Human
ccucuuguaagagaugcaaag

SEQ ID NO: 883718 - RNA, 24 nt, Human
cugagauggugggucacccccucc

SEQ ID NO: 883719 - RNA, 19 nt, Human
gagagcucugacagggagc

SEQ ID NO: 883720 - RNA, 19 nt, Human
ucuagcaguuccgggacuu

SEQ ID NO: 883721 - RNA, 24 nt, Human
ugaggucagguccaagugcaggcc

SEQ ID NO: 883722 - RNA, 24 nt, Human
uggggcacacccaucuccagcugg

SEQ ID NO: 883723 - RNA, 20 nt, Human
uuacuucuggggcacaccca

SEQ ID NO: 883724 - RNA, 25 nt, Human
uucauuagguccacugaauauuuuu

SEQ ID NO: 883725 - RNA, 25 nt, Human
uuucacuguaguucaccaggggauu

SEQ ID NO: 883726 - RNA, 21 nt, Human
uuucucagagcagaguuuggg

SEQ ID NO: 883727 - RNA, 23 nt, Human
aaaaaucuuugcuugcuggaacu

SEQ ID NO: 883728 - RNA, 18 nt, Human
aaacuuaaaaggagggua

SEQ ID NO: 883729 - RNA, 19 nt, Human
aaggaggguauaaaaaaca

SEQ ID NO: 883730 - RNA, 18 nt, Human
aaggggagcucugcaggu

SEQ ID NO: 883731 - RNA, 21 nt, Human
acuuucaaggacuuaaagagg

SEQ ID NO: 883732 - RNA, 25 nt, Human
agagaaaagauaauucacugacaug

SEQ ID NO: 883733 - RNA, 21 nt, Human
auaaaaauagggaauauauac

SEQ ID NO: 883734 - RNA, 19 nt, Human
auggagacuuucaaggacu

SEQ ID NO: 883735 - RNA, 24 nt, Human
caaaaaccccuauauguuacuaaa

SEQ ID NO: 883736 - RNA, 18 nt, Human
cagcaaagcuaguccagg

SEQ ID NO: 883737 - RNA, 20 nt, Human
caucacaagaagaaguggag

SEQ ID NO: 883738 - RNA, 19 nt, Human
cucugcaggucagcaaagc

SEQ ID NO: 883739 - RNA, 19 nt, Human
cugacaugaaacacccaaa

SEQ ID NO: 883740 - RNA, 21 nt, Human
cugcaagcucaauagguucug

SEQ ID NO: 883741 - RNA, 20 nt, Human
cugcaagcuuggcuucccug

SEQ ID NO: 883742 - RNA, 24 nt, Human
cuggaacugcaagcuuggcuuccc

SEQ ID NO: 883743 - RNA, 18 nt, Human
cuuggcuucccugcaagc

SEQ ID NO: 883744 - RNA, 18 nt, Human
gggagcucugcaggucag

SEQ ID NO: 883745 - RNA, 20 nt, Human
ggggagcucugcaggucagc

SEQ ID NO: 883746 - RNA, 21 nt, Human
uaacaauaauaguuaagggga

SEQ ID NO: 883747 - RNA, 20 nt, Human
uaauucacugacaugaaaca

SEQ ID NO: 883748 - RNA, 19 nt, Human
ucacaagaagaaguggagc

SEQ ID NO: 883749 - RNA, 24 nt, Human
uccaggauuacaaacugccauaca

SEQ ID NO: 883750 - RNA, 20 nt, Human
ugaaacacccaaaugucuuc

SEQ ID NO: 883751 - RNA, 25 nt, Human
uguuauggauuaaauaaacauaaaa

SEQ ID NO: 883752 - RNA, 21 nt, Human
uucacugacaugaaacaccca

SEQ ID NO: 883753 - RNA, 18 nt, Human
cccgcgccgcggccgccg

SEQ ID NO: 883754 - RNA, 23 nt, Human
cucuaacccccgcggggcccgcg

SEQ ID NO: 883755 - RNA, 18 nt, Human
aagaaccugcaagccgac

SEQ ID NO: 883756 - RNA, 22 nt, Human
aagaaccugcaagccgacacca

SEQ ID NO: 883757 - RNA, 25 nt, Human
aagcccgaaaaccucgacuccggaa

SEQ ID NO: 883758 - RNA, 19 nt, Human
aagcgguacaagcccgaaa

SEQ ID NO: 883759 - RNA, 26 nt, Human
aagcgguacaagcccgaaaaccucga

SEQ ID NO: 883760 - RNA, 19 nt, Human
agagaacaaacacagaaag

SEQ ID NO: 883761 - RNA, 30 nt, Human
agagaacaaacacagaaagaaccugcaagg

SEQ ID NO: 883762 - RNA, 18 nt, Human
agggcagagaacaaacac

SEQ ID NO: 883763 - RNA, 19 nt, Human
cacagaaagaaccugcaag

SEQ ID NO: 883764 - RNA, 19 nt, Human
caccaggccgcaccgccaa

SEQ ID NO: 883765 - RNA, 24 nt, Human
caggauacuccauuuauugaacuc

SEQ ID NO: 883766 - RNA, 18 nt, Human
ccgcuacccgcacgcacc

SEQ ID NO: 883767 - RNA, 19 nt, Human
ccucgacuccggaagcgga

SEQ ID NO: 883768 - RNA, 21 nt, Human
ccugcaagccgacaccaggcc

SEQ ID NO: 883769 - RNA, 21 nt, Human
cgacaccaggccgcaccgcca

SEQ ID NO: 883770 - RNA, 23 nt, Human
cgcugcaguguuucaaaaggacc

SEQ ID NO: 883771 - RNA, 20 nt, Human
cucuacggccuuggcagggc

SEQ ID NO: 883772 - RNA, 24 nt, Human
cugcaagccgacaccaggccgcac

SEQ ID NO: 883773 - RNA, 23 nt, Human
gaacaaacacagaaagaaccugc

SEQ ID NO: 883774 - RNA, 21 nt, Human
gaaccugcaagccgacaccag

SEQ ID NO: 883775 - RNA, 25 nt, Human
gaccuuguucccacugcuaugcuca

SEQ ID NO: 883776 - RNA, 19 nt, Human
gagaacaaacacagaaaga

SEQ ID NO: 883777 - RNA, 24 nt, Human
gcagggcagagaacaaacacagaa

SEQ ID NO: 883778 - RNA, 18 nt, Human
gccgcaccgccaagcggu

SEQ ID NO: 883779 - RNA, 21 nt, Human
uacaagcccgaaaaccucgac

SEQ ID NO: 883780 - RNA, 19 nt, Human
uacccgcacgcaccagcuc

SEQ ID NO: 883781 - RNA, 19 nt, Human
uacggccuuggcagggcag

SEQ ID NO: 883782 - RNA, 18 nt, Human
uccucggagagccccgcu

SEQ ID NO: 883783 - RNA, 18 nt, Human
ugcaagccgacaccaggc

SEQ ID NO: 883784 - RNA, 22 nt, Human
uggcagggcagagaacaaacac

SEQ ID NO: 883785 - RNA, 20 nt, Human
acaccacagagaaacuggac

SEQ ID NO: 883786 - RNA, 18 nt, Human
acaguuugugaugaaacu

SEQ ID NO: 883787 - RNA, 22 nt, Human
accacagagaaacuggacacag

SEQ ID NO: 883788 - RNA, 18 nt, Human
acuuagaaaaauuucuuu

SEQ ID NO: 883789 - RNA, 21 nt, Human
agagaaacuggacacaguuug

SEQ ID NO: 883790 - RNA, 18 nt, Human
agcuauuucauaaacacc

SEQ ID NO: 883791 - RNA, 21 nt, Human
cuuuagauccuucuuccacuc

SEQ ID NO: 883792 - RNA, 20 nt, Human
uagauccuucuuccacuccc

SEQ ID NO: 883793 - RNA, 19 nt, Human
uccauaacauaaacauguc

SEQ ID NO: 883794 - RNA, 22 nt, Human
uuuagauccuucuuccacuccc

SEQ ID NO: 883795 - RNA, 18 nt, Human
uuuuuuuuuuuuuuuuug

SEQ ID NO: 883796 - RNA, 19 nt, Human
uuuuuuuuuuuuuuuuugu

SEQ ID NO: 883797 - RNA, 21 nt, Human
aaaacuccuguccccagcacu

SEQ ID NO: 883798 - RNA, 21 nt, Human
acccaauggguaagcccauga

SEQ ID NO: 883799 - RNA, 19 nt, Human
acccccugcacuucccaag

SEQ ID NO: 883800 - RNA, 18 nt, Human
aggaacucuggaagcacu

SEQ ID NO: 883801 - RNA, 26 nt, Human
agggacccaacugcccugccugccuc

SEQ ID NO: 883802 - RNA, 18 nt, Human
auaguuguggccaagggc

SEQ ID NO: 883803 - RNA, 22 nt, Human
caauugacucauuggccccauc

SEQ ID NO: 883804 - RNA, 21 nt, Human
cacugcguugggcaaaacucc

SEQ ID NO: 883805 - RNA, 24 nt, Human
caggugcaggaggaacucuggaag

SEQ ID NO: 883806 - RNA, 20 nt, Human
cauguuggagggaccaggcc

SEQ ID NO: 883807 - RNA, 20 nt, Human
ccagcacaggugcaggagga

SEQ ID NO: 883808 - RNA, 18 nt, Human
ccaggccaucgugguggg

SEQ ID NO: 883809 - RNA, 25 nt, Human
cccaggacccccugcacuucccaag

SEQ ID NO: 883810 - RNA, 19 nt, Human
cccccugcacuucccaagc

SEQ ID NO: 883811 - RNA, 18 nt, Human
cugcccugccugccucua

SEQ ID NO: 883812 - RNA, 24 nt, Human
gagcgcacacccaauggguaagcc

SEQ ID NO: 883813 - RNA, 22 nt, Human
ggaguauaguuguggccaaggg

SEQ ID NO: 883814 - RNA, 25 nt, Human
uaagccccauagcagcuggcaaggg

SEQ ID NO: 883815 - RNA, 19 nt, Human
uacugugcaggccaagggu

SEQ ID NO: 883816 - RNA, 23 nt, Human
uagucccacuguccccuguccau

SEQ ID NO: 883817 - RNA, 24 nt, Human
uaugacacugcguugggcaaaacu

SEQ ID NO: 883818 - RNA, 19 nt, Human
uccaugcauguuggaggga

SEQ ID NO: 883819 - RNA, 22 nt, Human
uccaugcauguuggagggacca

SEQ ID NO: 883820 - RNA, 19 nt, Human
ucccacuguccccuguccc

SEQ ID NO: 883821 - RNA, 24 nt, Human
ugacucaaugcucagcacccagcu

SEQ ID NO: 883822 - RNA, 19 nt, Human
ugcccaggacccccugcac

SEQ ID NO: 883823 - RNA, 24 nt, Human
ugcccugccugccucuagcuccca

SEQ ID NO: 883824 - RNA, 26 nt, Human
ugcccugccugccucuagcucccagc

SEQ ID NO: 883825 - RNA, 21 nt, Human
ugccugccucuagcucccagc

SEQ ID NO: 883826 - RNA, 24 nt, Human
uggcaagggacccaacugcccugc

SEQ ID NO: 883827 - RNA, 21 nt, Human
uggccuaagccccauagcagc

SEQ ID NO: 883828 - RNA, 19 nt, Human
ugggccuccuacuccccag

SEQ ID NO: 883829 - RNA, 23 nt, Human
uggggugggacaggaguauaguu

SEQ ID NO: 883830 - RNA, 20 nt, Human
uggguaagcccaugaaccca

SEQ ID NO: 883831 - RNA, 25 nt, Human
uuggagggaccaggccaucguggug

SEQ ID NO: 883832 - RNA, 19 nt, Human
aaagugcugggauuacagg

SEQ ID NO: 883833 - RNA, 19 nt, Human
aaagugcugggauuacagg

SEQ ID NO: 883834 - RNA, 24 nt, Human
aaagugcugggauuacaggaguga

SEQ ID NO: 883835 - RNA, 20 nt, Human
aaccuccgccuccugggauc

SEQ ID NO: 883836 - RNA, 18 nt, Human
aagugcugggauuacagg

SEQ ID NO: 883837 - RNA, 22 nt, Human
aagugcugggauuacaggaguc

SEQ ID NO: 883838 - RNA, 26 nt, Human
aagugcugggauuacaggagugagcc

SEQ ID NO: 883839 - RNA, 21 nt, Human
accacccgcccucagccucaa

SEQ ID NO: 883840 - RNA, 24 nt, Human
acccaggcuggagugcaggggugu

SEQ ID NO: 883841 - RNA, 18 nt, Human
acgagguuucaccauggu

SEQ ID NO: 883842 - RNA, 21 nt, Human
acgagguuucaccauggugcc

SEQ ID NO: 883843 - RNA, 24 nt, Human
acgagguuucaccauggugcccag

SEQ ID NO: 883844 - RNA, 20 nt, Human
acugcaacucacugcaaccu

SEQ ID NO: 883845 - RNA, 25 nt, Human
acugcaacucacugcaaccuccgcc

SEQ ID NO: 883846 - RNA, 22 nt, Human
agcccagcccaucuauuuacaa

SEQ ID NO: 883847 - RNA, 22 nt, Human
agguuucaccauggugcccagg

SEQ ID NO: 883848 - RNA, 21 nt, Human
auccuaccuuagccuccccaa

SEQ ID NO: 883849 - RNA, 23 nt, Human
auuguguaaaagcugaguuggua

SEQ ID NO: 883850 - RNA, 24 nt, Human
caaagugcugggauuacaggagug

SEQ ID NO: 883851 - RNA, 24 nt, Human
caauaguugagacuacaggugugc

SEQ ID NO: 883852 - RNA, 23 nt, Human
cacauaaaccuacauacacauua

SEQ ID NO: 883853 - RNA, 24 nt, Human
caccacacccagcuaauuuuugua

SEQ ID NO: 883854 - RNA, 24 nt, Human
caccauggugcccaggcuggucuc

SEQ ID NO: 883855 - RNA, 27 nt, Human
caccauggugcccaggcuggucucaaa

SEQ ID NO: 883856 - RNA, 18 nt, Human
cacgccuggccucucuuc

SEQ ID NO: 883857 - RNA, 25 nt, Human
cacgccuggccucucuucccagucu

SEQ ID NO: 883858 - RNA, 21 nt, Human
cacugcaaccuccgccuccug

SEQ ID NO: 883859 - RNA, 23 nt, Human
cacugcaaccuccgccuccuggg

SEQ ID NO: 883860 - RNA, 26 nt, Human
cacuggccacaaaagacacaacucuu

SEQ ID NO: 883861 - RNA, 18 nt, Human
cagcccaccuuggcuucc

SEQ ID NO: 883862 - RNA, 22 nt, Human
cagggucuagcugucacccagg

SEQ ID NO: 883863 - RNA, 24 nt, Human
cauggugcccaggcuggucucaaa

SEQ ID NO: 883864 - RNA, 19 nt, Human
ccaaagugcugggauuaca

SEQ ID NO: 883865 - RNA, 20 nt, Human
ccaaagugcugggauuacag

SEQ ID NO: 883866 - RNA, 21 nt, Human
ccaaagugcugggauuacagg

SEQ ID NO: 883867 - RNA, 24 nt, Human
ccaaagugcugggauuacaggagu

SEQ ID NO: 883868 - RNA, 19 nt, Human
cccauacacaucuguacca

SEQ ID NO: 883869 - RNA, 27 nt, Human
ccuacauacacauuaucuccuaguccc

SEQ ID NO: 883870 - RNA, 22 nt, Human
ccucagccucaagauuuauccc

SEQ ID NO: 883871 - RNA, 22 nt, Human
ccugggaucaagugaucagccc

SEQ ID NO: 883872 - RNA, 19 nt, Human
ccugggaucaagugauccu

SEQ ID NO: 883873 - RNA, 20 nt, Human
cgagguuucaccauggugcc

SEQ ID NO: 883874 - RNA, 20 nt, Human
cuaauuuuuguauuuuuugg

SEQ ID NO: 883875 - RNA, 26 nt, Human
cuacauacacauuaucuccuaguccc

SEQ ID NO: 883876 - RNA, 22 nt, Human
cuagucccucuagcucucuucc

SEQ ID NO: 883877 - RNA, 24 nt, Human
cuagucccucuagcucucuuccca

SEQ ID NO: 883878 - RNA, 24 nt, Human
cucacugcaaccuccgccuccugg

SEQ ID NO: 883879 - RNA, 25 nt, Human
cucacugcaaccuccgccuccuggg

SEQ ID NO: 883880 - RNA, 29 nt, Human
cucacugcaaccuccgccuccugggauca

SEQ ID NO: 883881 - RNA, 24 nt, Human
cugcaaccuccgccuccugggauc

SEQ ID NO: 883882 - RNA, 19 nt, Human
cugggaucaagugaucagc

SEQ ID NO: 883883 - RNA, 18 nt, Human
cugucacccaggcuggag

SEQ ID NO: 883884 - RNA, 18 nt, Human
gauuacaggagugagcca

SEQ ID NO: 883885 - RNA, 18 nt, Human
gcccaggacaggaauuga

SEQ ID NO: 883886 - RNA, 23 nt, Human
gcuggagugcaggggugugacug

SEQ ID NO: 883887 - RNA, 21 nt, Human
gguaaagacgagguuucacca

SEQ ID NO: 883888 - RNA, 21 nt, Human
guaaagacgagguuucaccau

SEQ ID NO: 883889 - RNA, 26 nt, Human
gucccucuagcucucuucccagucuu

SEQ ID NO: 883890 - RNA, 23 nt, Human
gucuagcugucacccaggcugga

SEQ ID NO: 883891 - RNA, 20 nt, Human
gugagccaccacgccuggcc

SEQ ID NO: 883892 - RNA, 21 nt, Human
gugauccuaccuuagccuccc

SEQ ID NO: 883893 - RNA, 18 nt, Human
uaaaagcugaguugguag

SEQ ID NO: 883894 - RNA, 19 nt, Human
uacaauauauagggguugg

SEQ ID NO: 883895 - RNA, 22 nt, Human
uacaggagugagccaccacgcc

SEQ ID NO: 883896 - RNA, 22 nt, Human
uacaggagugagccaccacgcc

SEQ ID NO: 883897 - RNA, 23 nt, Human
uacaggagugagccaccacgccu

SEQ ID NO: 883898 - RNA, 23 nt, Human
uacaggagugagccaccacgccu

SEQ ID NO: 883899 - RNA, 24 nt, Human
uacaggugugcaccaccacaccca

SEQ ID NO: 883900 - RNA, 18 nt, Human
uagcucucuucccagucu

SEQ ID NO: 883901 - RNA, 18 nt, Human
ucacccaggcuggagugc

SEQ ID NO: 883902 - RNA, 23 nt, Human
ucacugcaaccuccgccuccugg

SEQ ID NO: 883903 - RNA, 23 nt, Human
ucacugcaaccuccgccuccugg

SEQ ID NO: 883904 - RNA, 24 nt, Human
ucacugcaaccuccgccuccuggg

SEQ ID NO: 883905 - RNA, 25 nt, Human
ucacugcaaccuccgccuccugggg

SEQ ID NO: 883906 - RNA, 20 nt, Human
ucacuggccacaaaagacac

SEQ ID NO: 883907 - RNA, 20 nt, Human
ucagcccaccuuggcuuccc

SEQ ID NO: 883908 - RNA, 18 nt, Human
ucccaaagugcugggauu

SEQ ID NO: 883909 - RNA, 23 nt, Human
ucccaaagugcugggauuacagg

SEQ ID NO: 883910 - RNA, 22 nt, Human
uccccaauaguugagacuacag

SEQ ID NO: 883911 - RNA, 24 nt, Human
ucccucuagcucucuucccagucu

SEQ ID NO: 883912 - RNA, 19 nt, Human
uccuaccuuagccucccca

SEQ ID NO: 883913 - RNA, 21 nt, Human
ucuagcugucacccaggcugg

SEQ ID NO: 883914 - RNA, 22 nt, Human
ucuagcugucacccaggcugga

SEQ ID NO: 883915 - RNA, 24 nt, Human
ucuagcugucacccaggcuggagu

SEQ ID NO: 883916 - RNA, 24 nt, Human
ugaaacggcaacaauguuuagccc

SEQ ID NO: 883917 - RNA, 19 nt, Human
ugagacagggucuagcugu

SEQ ID NO: 883918 - RNA, 21 nt, Human
ugagacuacaggugugcacca

SEQ ID NO: 883919 - RNA, 24 nt, Human
ugagacuacaggugugcaccacca

SEQ ID NO: 883920 - RNA, 31 nt, Human
ugcaacucacugcaaccuccgccuccugggg

SEQ ID NO: 883921 - RNA, 24 nt, Human
ugcccaggcuggucucaaacuccu

SEQ ID NO: 883922 - RNA, 19 nt, Human
uggagugcaggggugugac

SEQ ID NO: 883923 - RNA, 18 nt, Human
ugggauuacaggagugag

SEQ ID NO: 883924 - RNA, 19 nt, Human
ugggauuacaggagugagc

SEQ ID NO: 883925 - RNA, 22 nt, Human
ugggauuacaggagugagccac

SEQ ID NO: 883926 - RNA, 23 nt, Human
ugggauuacaggagugagccacc

SEQ ID NO: 883927 - RNA, 24 nt, Human
ugggauuacaggagugagccacca

SEQ ID NO: 883928 - RNA, 24 nt, Human
ugguaaagacgagguuucaccaug

SEQ ID NO: 883929 - RNA, 21 nt, Human
ugucacccaggcuggagugca

SEQ ID NO: 883930 - RNA, 25 nt, Human
ugucacuggccacaaaagacacaac

SEQ ID NO: 883931 - RNA, 18 nt, Human
ugugcaccaccacaccca

SEQ ID NO: 883932 - RNA, 24 nt, Human
uugguaaagacgagguuucaccau

SEQ ID NO: 883933 - RNA, 19 nt, Human
uuuaucccuaucagcaaca

SEQ ID NO: 883934 - RNA, 24 nt, Human
uuuuugguaaagacgagguuucac

SEQ ID NO: 883935 - RNA, 24 nt, Human
uuuuuuuuuugagacagggucuag

SEQ ID NO: 883936 - RNA, 20 nt, Human
uuuuuuuuuuugagacaggg

SEQ ID NO: 883937 - RNA, 21 nt, Human
uuuuuuuuuuuuacccagaga

SEQ ID NO: 883938 - RNA, 23 nt, Human
uuuuuuuuuuuugagacaggguc

SEQ ID NO: 883939 - RNA, 24 nt, Human
uuuuuuuuuuuuuuugagacaggg

SEQ ID NO: 883940 - RNA, 23 nt, Human
uuuuuuuuuuuuuuuuuacccag

SEQ ID NO: 883941 - RNA, 24 nt, Human
uuuuuuuuuuuuuuuuuuacccag

SEQ ID NO: 883942 - RNA, 24 nt, Human
aaucauucugaacaguuuuaauuc

SEQ ID NO: 883943 - RNA, 24 nt, Human
aggccaguggaacucagaacugau

SEQ ID NO: 883944 - RNA, 22 nt, Human
aucaucucuucauguaaaagac

SEQ ID NO: 883945 - RNA, 25 nt, Human
caacauagauaaaaugugaugagug

SEQ ID NO: 883946 - RNA, 20 nt, Human
cagcaccacuauccauccca

SEQ ID NO: 883947 - RNA, 22 nt, Human
cagcaccacuauccaucccaau

SEQ ID NO: 883948 - RNA, 20 nt, Human
caucccaauguaacauuucu

SEQ ID NO: 883949 - RNA, 23 nt, Human
ccucacuccucaaacacuuuucu

SEQ ID NO: 883950 - RNA, 21 nt, Human
gguaugaaggggaagugucau

SEQ ID NO: 883951 - RNA, 25 nt, Human
uaaaucaucucuucauguaaaagac

SEQ ID NO: 883952 - RNA, 22 nt, Human
uaaaugacaaucacacagaacc

SEQ ID NO: 883953 - RNA, 18 nt, Human
uacauauauacauguaug

SEQ ID NO: 883954 - RNA, 18 nt, Human
uauuagugguaacgugaa

SEQ ID NO: 883955 - RNA, 20 nt, Human
uauuuuguccuucugugaca

SEQ ID NO: 883956 - RNA, 21 nt, Human
ucaguauuggcaucauacaac

SEQ ID NO: 883957 - RNA, 22 nt, Human
ucauucuuuaccucacuccuca

SEQ ID NO: 883958 - RNA, 21 nt, Human
uccgcguuucuuccacuuccu

SEQ ID NO: 883959 - RNA, 24 nt, Human
ucgucuaggaauauuuuguccuuc

SEQ ID NO: 883960 - RNA, 19 nt, Human
ugauacauauauacaugua

SEQ ID NO: 883961 - RNA, 21 nt, Human
ugcuaguuggaaaaucauucu

SEQ ID NO: 883962 - RNA, 18 nt, Human
uuagugguaacgugauag

SEQ ID NO: 883963 - RNA, 21 nt, Human
uucaacauagauaaaauguga

SEQ ID NO: 883964 - RNA, 21 nt, Human
aaaacagcccccuggaaccag

SEQ ID NO: 883965 - RNA, 19 nt, Human
aagcggcccaccugaaagg

SEQ ID NO: 883966 - RNA, 20 nt, Human
aaggggccguucugcacaug

SEQ ID NO: 883967 - RNA, 19 nt, Human
aaucaggucaucuggccug

SEQ ID NO: 883968 - RNA, 22 nt, Human
acaaaacagcccccuggaacca

SEQ ID NO: 883969 - RNA, 22 nt, Human
accagguagccaaggaagcggc

SEQ ID NO: 883970 - RNA, 24 nt, Human
agcagcaucucauuacaaaacagc

SEQ ID NO: 883971 - RNA, 20 nt, Human
agcagcuuggccauaccagc

SEQ ID NO: 883972 - RNA, 19 nt, Human
aggggucacggugaaggga

SEQ ID NO: 883973 - RNA, 19 nt, Human
caaaacagcccccuggaaa

SEQ ID NO: 883974 - RNA, 24 nt, Human
caaaacagcccccuggaaccaggu

SEQ ID NO: 883975 - RNA, 26 nt, Human
cacugacccagggcuggggaagggga

SEQ ID NO: 883976 - RNA, 25 nt, Human
cagcagcaucuucuagcagcuuggc

SEQ ID NO: 883977 - RNA, 20 nt, Human
cccaccaacccagcugggag

SEQ ID NO: 883978 - RNA, 21 nt, Human
cccaccugaaaggcauuuaga

SEQ ID NO: 883979 - RNA, 21 nt, Human
cccagggcuggggaaggggac

SEQ ID NO: 883980 - RNA, 19 nt, Human
ccgcucagccacugguucu

SEQ ID NO: 883981 - RNA, 23 nt, Human
ccucugaguggccugccagcagc

SEQ ID NO: 883982 - RNA, 25 nt, Human
ccugaaaggcauuuagauugagaag

SEQ ID NO: 883983 - RNA, 21 nt, Human
cggcccaccugaaaggcauuu

SEQ ID NO: 883984 - RNA, 18 nt, Human
cggugaagggagggcugc

SEQ ID NO: 883985 - RNA, 20 nt, Human
cucagacaggcuuggcugug

SEQ ID NO: 883986 - RNA, 18 nt, Human
cugugguuugcuuuggga

SEQ ID NO: 883987 - RNA, 20 nt, Human
cuuugggaggagagugaaca

SEQ ID NO: 883988 - RNA, 22 nt, Human
gaggaugccacugacccagggc

SEQ ID NO: 883989 - RNA, 18 nt, Human
gcuggaaucaggucaucu

SEQ ID NO: 883990 - RNA, 22 nt, Human
gcuggggaaggggacucccagc

SEQ ID NO: 883991 - RNA, 20 nt, Human
ggcuuggcugugguuugcuu

SEQ ID NO: 883992 - RNA, 18 nt, Human
ucacagggacagcagcau

SEQ ID NO: 883993 - RNA, 25 nt, Human
ucccaccaacccagcugggagccuc

SEQ ID NO: 883994 - RNA, 21 nt, Human
uccgcucagccacugguucug

SEQ ID NO: 883995 - RNA, 18 nt, Human
ugaagggagggcugcugg

SEQ ID NO: 883996 - RNA, 19 nt, Human
ugaagggagggcugcuggg

SEQ ID NO: 883997 - RNA, 21 nt, Human
ugaagggagggcugcugggau

SEQ ID NO: 883998 - RNA, 21 nt, Human
ugaggaugccacugacccagg

SEQ ID NO: 883999 - RNA, 18 nt, Human
ugcacaugucgcucaccc

SEQ ID NO: 884000 - RNA, 21 nt, Human
ugcucuguuccccacagagca

SEQ ID NO: 884001 - RNA, 18 nt, Human
ugcugggaucacagggac

SEQ ID NO: 884002 - RNA, 18 nt, Human
ugggaucacagggacagc

SEQ ID NO: 884003 - RNA, 23 nt, Human
uggggaaggggacucccagcuca

SEQ ID NO: 884004 - RNA, 22 nt, Human
ugugguuugcuuugggaggaga

SEQ ID NO: 884005 - RNA, 21 nt, Human
aaagagaaacgcaacauaaua

SEQ ID NO: 884006 - RNA, 18 nt, Human
aacauaauacaaacuaca

SEQ ID NO: 884007 - RNA, 20 nt, Human
aacauaauacaaacuacacc

SEQ ID NO: 884008 - RNA, 18 nt, Human
aaggaugauggagaaagg

SEQ ID NO: 884009 - RNA, 26 nt, Human
agaaaagagauggagagaagggaccc

SEQ ID NO: 884010 - RNA, 21 nt, Human
agaaaagagauggcagcaggg

SEQ ID NO: 884011 - RNA, 19 nt, Human
agaaagagaaacgcaacau

SEQ ID NO: 884012 - RNA, 27 nt, Human
agaaagagaaacgcaacauaauacaaa

SEQ ID NO: 884013 - RNA, 18 nt, Human
agaagaaaagagauggca

SEQ ID NO: 884014 - RNA, 22 nt, Human
agaagaaaagagauggcagcag

SEQ ID NO: 884015 - RNA, 24 nt, Human
agaagaaaagagauggcagcaggg

SEQ ID NO: 884016 - RNA, 23 nt, Human
agagauggcagcagggcguuacc

SEQ ID NO: 884017 - RNA, 21 nt, Human
agccagccuuccuuuccccaa

SEQ ID NO: 884018 - RNA, 23 nt, Human
agggguugaguugggaguugggg

SEQ ID NO: 884019 - RNA, 19 nt, Human
auaauacaaacuacaccgc

SEQ ID NO: 884020 - RNA, 24 nt, Human
augaggguuucgcacugggugucc

SEQ ID NO: 884021 - RNA, 23 nt, Human
auggcagcagggcguuaccacaa

SEQ ID NO: 884022 - RNA, 23 nt, Human
augguaauaggaaaugggauugu

SEQ ID NO: 884023 - RNA, 21 nt, Human
caaccaccacacauaguucca

SEQ ID NO: 884024 - RNA, 21 nt, Human
caagccagccuuccuuucccc

SEQ ID NO: 884025 - RNA, 19 nt, Human
caccacacauaguuccaaa

SEQ ID NO: 884026 - RNA, 22 nt, Human
caccgcgcggcuuauuuaggau

SEQ ID NO: 884027 - RNA, 20 nt, Human
caccucgcgcgcucaguacc

SEQ ID NO: 884028 - RNA, 21 nt, Human
ccaaaagggguugaguuggga

SEQ ID NO: 884029 - RNA, 19 nt, Human
ccgcgcggcuuauuuagga

SEQ ID NO: 884030 - RNA, 22 nt, Human
ccuaaaggaugauggagaaagg

SEQ ID NO: 884031 - RNA, 18 nt, Human
ccugcacaacuccucacc

SEQ ID NO: 884032 - RNA, 23 nt, Human
cucgccaagccagccuuccuuuc

SEQ ID NO: 884033 - RNA, 20 nt, Human
cucucgccaagccagccuuc

SEQ ID NO: 884034 - RNA, 22 nt, Human
cugcacaacuccucaccucgcg

SEQ ID NO: 884035 - RNA, 23 nt, Human
gaugauggagaaagggcgaggaa

SEQ ID NO: 884036 - RNA, 24 nt, Human
gccacagggucccaaccaccacac

SEQ ID NO: 884037 - RNA, 23 nt, Human
ggcgaggaaagcagaaagagaaa

SEQ ID NO: 884038 - RNA, 22 nt, Human
gggcgaggaaagcagaaagaga

SEQ ID NO: 884039 - RNA, 20 nt, Human
ggggaaggacucuuuguugg

SEQ ID NO: 884040 - RNA, 22 nt, Human
uagacgugaaucguugucucuu

SEQ ID NO: 884041 - RNA, 19 nt, Human
ucaguaccuagcccaccgg

SEQ ID NO: 884042 - RNA, 19 nt, Human
ucaguaccuagcccaccgg

SEQ ID NO: 884043 - RNA, 19 nt, Human
uccccaaacccugcacaac

SEQ ID NO: 884044 - RNA, 24 nt, Human
uccccaaacccugcacaacuccuc

SEQ ID NO: 884045 - RNA, 27 nt, Human
ucucuuauucucacugccaguccaaau

SEQ ID NO: 884046 - RNA, 22 nt, Human
ucuuuggaaaagggggcgaaag

SEQ ID NO: 884047 - RNA, 20 nt, Human
ugagaaggacacgagcgaca

SEQ ID NO: 884048 - RNA, 23 nt, Human
ugaguugggaguuggggaaggac

SEQ ID NO: 884049 - RNA, 22 nt, Human
ugaguuuauugcagagaauggu

SEQ ID NO: 884050 - RNA, 19 nt, Human
ugccaguccaaauccucgc

SEQ ID NO: 884051 - RNA, 25 nt, Human
uggaugaggguuucgcacugggugu

SEQ ID NO: 884052 - RNA, 24 nt, Human
uggcagcagggcguuaccacaaag

SEQ ID NO: 884053 - RNA, 21 nt, Human
uggggaaggacucuuuguugg

SEQ ID NO: 884054 - RNA, 21 nt, Human
uggggaaggacucuuuguugg

SEQ ID NO: 884055 - RNA, 22 nt, Human
uguagagccucgcgcgcucagu

SEQ ID NO: 884056 - RNA, 20 nt, Human
uuccccaaacccugcacaac

SEQ ID NO: 884057 - RNA, 18 nt, Human
aaccaugauacugagcuu

SEQ ID NO: 884058 - RNA, 18 nt, Human
aagagaaggcaaacauaa

SEQ ID NO: 884059 - RNA, 22 nt, Human
agaaauaacuaagagaaggccg

SEQ ID NO: 884060 - RNA, 24 nt, Human
agaaggcaaacauaauaccuuaga

SEQ ID NO: 884061 - RNA, 28 nt, Human
aggcaaacauaauaccuuagagaucaag

SEQ ID NO: 884062 - RNA, 22 nt, Human
caagaaacauuuacacaguuca

SEQ ID NO: 884063 - RNA, 22 nt, Human
caagaaacauuuacacaguuca

SEQ ID NO: 884064 - RNA, 22 nt, Human
gcaaacauaauaccuuagagau

SEQ ID NO: 884065 - RNA, 24 nt, Human
gggaauucuuuauuuaguaauguc

SEQ ID NO: 884066 - RNA, 26 nt, Human
gggaauucuuuauuuaguaauguccu

SEQ ID NO: 884067 - RNA, 27 nt, Human
uaacauaaaaguucacauaacugcuuc

SEQ ID NO: 884068 - RNA, 21 nt, Human
uaagagaaggcaaacauaaua

SEQ ID NO: 884069 - RNA, 21 nt, Human
ugacaacccagaaauaacuaa

SEQ ID NO: 884070 - RNA, 24 nt, Human
ugagcuuugugacaacccagaaau

SEQ ID NO: 884071 - RNA, 24 nt, Human
uguccuaacauaaaaguucacaua

SEQ ID NO: 884072 - RNA, 21 nt, Human
uucaacuguuuaaaaauagcu

SEQ ID NO: 884073 - RNA, 18 nt, Human
aauagcagaugagagacu

SEQ ID NO: 884074 - RNA, 22 nt, Human
accauuccuuucccacguuucc

SEQ ID NO: 884075 - RNA, 18 nt, Human
auaccauuccuuucccac

SEQ ID NO: 884076 - RNA, 22 nt, Human
cauuucccccacauaccauucc

SEQ ID NO: 884077 - RNA, 19 nt, Human
ccucaguccucugagggga

SEQ ID NO: 884078 - RNA, 23 nt, Human
gcuacagcuugauggaaaaaagg

SEQ ID NO: 884079 - RNA, 24 nt, Human
uucccacguuuccauucucugcag

SEQ ID NO: 884080 - RNA, 23 nt, Human
uuuuuuuuuuuuuuuuuuucaag

SEQ ID NO: 884081 - RNA, 25 nt, Human
aaaguaaucccauuccaaucucccc

SEQ ID NO: 884082 - RNA, 21 nt, Human
agaaaggacuagcuagcaccc

SEQ ID NO: 884083 - RNA, 21 nt, Human
agacccuccucucccacaucc

SEQ ID NO: 884084 - RNA, 20 nt, Human
agcacccgcgcggaucucac

SEQ ID NO: 884085 - RNA, 19 nt, Human
agcagagcagggauauuca

SEQ ID NO: 884086 - RNA, 22 nt, Human
aucccauuccaaucuccccacu

SEQ ID NO: 884087 - RNA, 18 nt, Human
cagcccacagugaccgug

SEQ ID NO: 884088 - RNA, 21 nt, Human
caucaccccagcccacaguga

SEQ ID NO: 884089 - RNA, 21 nt, Human
ccccacgggccgcgagccgag

SEQ ID NO: 884090 - RNA, 18 nt, Human
cccgcgcggaucucacgc

SEQ ID NO: 884091 - RNA, 24 nt, Human
cgagaaaggacuagcuagcacccg

SEQ ID NO: 884092 - RNA, 20 nt, Human
cgagccgagcagcgacgaga

SEQ ID NO: 884093 - RNA, 19 nt, Human
gacccuccucucccacauc

SEQ ID NO: 884094 - RNA, 23 nt, Human
gagcagcgacgagaaaggacuag

SEQ ID NO: 884095 - RNA, 21 nt, Human
gcuucagacccuccucuccca

SEQ ID NO: 884096 - RNA, 21 nt, Human
gggccgcgagccgagcagcga

SEQ ID NO: 884097 - RNA, 22 nt, Human
uaaaguccuuuuaaugcaaaag

SEQ ID NO: 884098 - RNA, 19 nt, Human
ucccauuccaaucucccca

SEQ ID NO: 884099 - RNA, 21 nt, Human
ucccauuccaaucuccccacu

SEQ ID NO: 884100 - RNA, 20 nt, Human
ucucacgcggcuucucccca

SEQ ID NO: 884101 - RNA, 21 nt, Human
uuuuacacagguguguaaagu

SEQ ID NO: 884102 - RNA, 19 nt, Human
uuuuuuuuuuuuuuuugcu

SEQ ID NO: 884103 - RNA, 18 nt, Human
uuuuuuuuuuuuuuuuug

SEQ ID NO: 884104 - RNA, 20 nt, Human
uuuuuuuuuuuuuuuuugcu

SEQ ID NO: 884105 - RNA, 26 nt, Human
uuuuuuuuuuuuuuuuuugcuauuag

SEQ ID NO: 884106 - RNA, 23 nt, Human
aaacaggaagcaggcacguuugg

SEQ ID NO: 884107 - RNA, 19 nt, Human
accuggcugccugaggggg

SEQ ID NO: 884108 - RNA, 21 nt, Human
aggaagcaggcacguuuggcc

SEQ ID NO: 884109 - RNA, 23 nt, Human
aguggugacagcagagggcaaag

SEQ ID NO: 884110 - RNA, 21 nt, Human
auggucccuggcgggcacugu

SEQ ID NO: 884111 - RNA, 18 nt, Human
cacugcguuuggaaguuu

SEQ ID NO: 884112 - RNA, 19 nt, Human
cacugcguuuggaaguuuc

SEQ ID NO: 884113 - RNA, 25 nt, Human
ccaaguggugacagcagagggcaaa

SEQ ID NO: 884114 - RNA, 21 nt, Human
cgccaugauacauacaugguc

SEQ ID NO: 884115 - RNA, 22 nt, Human
cuagggucuccuggugcgcuga

SEQ ID NO: 884116 - RNA, 24 nt, Human
cuccuggugcgcugaggcuguacc

SEQ ID NO: 884117 - RNA, 19 nt, Human
cugccugagggggcugugg

SEQ ID NO: 884118 - RNA, 21 nt, Human
guaaucuucccaucacuacuc

SEQ ID NO: 884119 - RNA, 20 nt, Human
uaagcaacaccaacugcuuu

SEQ ID NO: 884120 - RNA, 19 nt, Human
uacucagaugaccuggcug

SEQ ID NO: 884121 - RNA, 23 nt, Human
ucucugugagauggaaaccacuc

SEQ ID NO: 884122 - RNA, 22 nt, Human
ugagauggaaaccacucuaggg

SEQ ID NO: 884123 - RNA, 22 nt, Human
ugauacauacauggucccuggc

SEQ ID NO: 884124 - RNA, 22 nt, Human
ugccugagggggcuguggcccu

SEQ ID NO: 884125 - RNA, 24 nt, Human
ugccugagggggcuguggcccugu

SEQ ID NO: 884126 - RNA, 20 nt, Human
ugcgcugaggcuguacacac

SEQ ID NO: 884127 - RNA, 19 nt, Human
ugcuuuauuccaggucagg

SEQ ID NO: 884128 - RNA, 21 nt, Human
uggugacagcagagggcaaaa

SEQ ID NO: 884129 - RNA, 24 nt, Human
uguacacaccggcagaacagggca

SEQ ID NO: 884130 - RNA, 22 nt, Human
uuacaaaaacaggaagcaggca

SEQ ID NO: 884131 - RNA, 23 nt, Human
uuggcccucagacuguaaucuuc

SEQ ID NO: 884132 - RNA, 18 nt, Human
uuuuuuuuuuuuuuuuug

SEQ ID NO: 884133 - RNA, 23 nt, Human
uuuuuuuuuuuuuuuuuuguguu

SEQ ID NO: 884134 - RNA, 22 nt, Human
aaaaaacaaaaacaacaaaaaa

SEQ ID NO: 884135 - RNA, 20 nt, Human
aaaacaacaaaaaacaaaag

SEQ ID NO: 884136 - RNA, 22 nt, Human
aaacaaaaacaacaaaaaacaa

SEQ ID NO: 884137 - RNA, 30 nt, Human
aaacaaaaacaacaaaaaacaaaagccugg

SEQ ID NO: 884138 - RNA, 20 nt, Human
aaacaaaagccugugcuuca

SEQ ID NO: 884139 - RNA, 23 nt, Human
aaacaacaaaaaacaaaagccug

SEQ ID NO: 884140 - RNA, 18 nt, Human
aaagaagauggguagagg

SEQ ID NO: 884141 - RNA, 19 nt, Human
aacauggugaaaccccauc

SEQ ID NO: 884142 - RNA, 20 nt, Human
aacauggugaaaccccaucu

SEQ ID NO: 884143 - RNA, 20 nt, Human
aacauggugaaaccccaucu

SEQ ID NO: 884144 - RNA, 21 nt, Human
aacauggugaaaccccaucuc

SEQ ID NO: 884145 - RNA, 18 nt, Human
aauugcuugaaccuggga

SEQ ID NO: 884146 - RNA, 24 nt, Human
aauugcuugaaccugggagucgga

SEQ ID NO: 884147 - RNA, 24 nt, Human
acagaaugagacucugucucaaaa

SEQ ID NO: 884148 - RNA, 24 nt, Human
accaacauggugaaaccccaucuc

SEQ ID NO: 884149 - RNA, 19 nt, Human
accacuguacuuaagggca

SEQ ID NO: 884150 - RNA, 18 nt, Human
accccaucucuacuaaaa

SEQ ID NO: 884151 - RNA, 22 nt, Human
acgauggagaagccaauccaaa

SEQ ID NO: 884152 - RNA, 20 nt, Human
acuaaaggaggccgaggcag

SEQ ID NO: 884153 - RNA, 18 nt, Human
acugcacuccagccuggg

SEQ ID NO: 884154 - RNA, 24 nt, Human
acugcacuccagccugggugacag

SEQ ID NO: 884155 - RNA, 24 nt, Human
acuugaggucaggagguugagacc

SEQ ID NO: 884156 - RNA, 22 nt, Human
agaaaagaagauggguagagga

SEQ ID NO: 884157 - RNA, 18 nt, Human
agaaaggagacucaggga

SEQ ID NO: 884158 - RNA, 19 nt, Human
agaaaggagacucagggac

SEQ ID NO: 884159 - RNA, 20 nt, Human
agagcacaaucuugaauaaa

SEQ ID NO: 884160 - RNA, 24 nt, Human
agcacuuugggaggcugaggcggg

SEQ ID NO: 884161 - RNA, 24 nt, Human
agccugaccaacauggugaaaccc

SEQ ID NO: 884162 - RNA, 24 nt, Human
agccugggugacagaaugagacuc

SEQ ID NO: 884163 - RNA, 18 nt, Human
aggaagcugaggcuguug

SEQ ID NO: 884164 - RNA, 22 nt, Human
aggcaggagaauugcuugaacc

SEQ ID NO: 884165 - RNA, 24 nt, Human
aggcaggagaauugcuugaaccug

SEQ ID NO: 884166 - RNA, 19 nt, Human
aggccacugcugaguccug

SEQ ID NO: 884167 - RNA, 21 nt, Human
aggccgaggcaggagaauugc

SEQ ID NO: 884168 - RNA, 24 nt, Human
aggccgaggcaggagaauugcuug

SEQ ID NO: 884169 - RNA, 21 nt, Human
aggcgggcagaucacuugagg

SEQ ID NO: 884170 - RNA, 22 nt, Human
aggcgggcagaucacuugaggu

SEQ ID NO: 884171 - RNA, 23 nt, Human
aggcgggcagaucacuugagguc

SEQ ID NO: 884172 - RNA, 26 nt, Human
aggcgggcagaucacuugaggucagg

SEQ ID NO: 884173 - RNA, 24 nt, Human
aggcugaggcgggcagaucacuug

SEQ ID NO: 884174 - RNA, 25 nt, Human
agggagaccauucaaaagccugugc

SEQ ID NO: 884175 - RNA, 19 nt, Human
aggucaggagguugagacc

SEQ ID NO: 884176 - RNA, 19 nt, Human
agguggggcccugggggac

SEQ ID NO: 884177 - RNA, 24 nt, Human
agguguggugguaugcaccuguaa

SEQ ID NO: 884178 - RNA, 25 nt, Human
agucauggugccuugccauguaggg

SEQ ID NO: 884179 - RNA, 24 nt, Human
agucggagguugcagugagccaag

SEQ ID NO: 884180 - RNA, 21 nt, Human
auguaccugggcuggggagag

SEQ ID NO: 884181 - RNA, 24 nt, Human
auugcgccacugcacuccagccug

SEQ ID NO: 884182 - RNA, 24 nt, Human
auuuuacaucuccugacaguuuua

SEQ ID NO: 884183 - RNA, 26 nt, Human
caaaaaacaaaaacaacaaaaaacaa

SEQ ID NO: 884184 - RNA, 24 nt, Human
caacaaaaaacaaaagccugugcu

SEQ ID NO: 884185 - RNA, 24 nt, Human
caacauggugaaaccccaucucua

SEQ ID NO: 884186 - RNA, 24 nt, Human
caagauugcgccacugcacuccag

SEQ ID NO: 884187 - RNA, 18 nt, Human
cacaaguugugugugcgu

SEQ ID NO: 884188 - RNA, 18 nt, Human
caccuguaaucccaccua

SEQ ID NO: 884189 - RNA, 19 nt, Human
caccuguaaucccaccuac

SEQ ID NO: 884190 - RNA, 24 nt, Human
cacgccuaucaucccagcacuuug

SEQ ID NO: 884191 - RNA, 20 nt, Human
cacuacauaguaagcaaaau

SEQ ID NO: 884192 - RNA, 18 nt, Human
cacuccagccugggugac

SEQ ID NO: 884193 - RNA, 22 nt, Human
cacuccagccugggugacagaa

SEQ ID NO: 884194 - RNA, 24 nt, Human
cacuccagccugggugacagaaug

SEQ ID NO: 884195 - RNA, 19 nt, Human
cacugcacuccagccuggg

SEQ ID NO: 884196 - RNA, 19 nt, Human
cacugcacuccagccuggg

SEQ ID NO: 884197 - RNA, 22 nt, Human
cacugcacuccagccuggguga

SEQ ID NO: 884198 - RNA, 23 nt, Human
cacugcacuccagccugggugac

SEQ ID NO: 884199 - RNA, 24 nt, Human
cacugcacuccagccugggugaca

SEQ ID NO: 884200 - RNA, 25 nt, Human
cacugcacuccagccugggugacag

SEQ ID NO: 884201 - RNA, 19 nt, Human
cacuguacuuaagggcaac

SEQ ID NO: 884202 - RNA, 22 nt, Human
cagaaaggagacucagggacac

SEQ ID NO: 884203 - RNA, 27 nt, Human
cagaucacuugaggucaggagguugag

SEQ ID NO: 884204 - RNA, 22 nt, Human
cagcacuuugggaggcugaggc

SEQ ID NO: 884205 - RNA, 24 nt, Human
cagcacuuugggaggcugaggcgg

SEQ ID NO: 884206 - RNA, 20 nt, Human
cagucugaccacuagccacc

SEQ ID NO: 884207 - RNA, 19 nt, Human
cauccuaaaaacaucccua

SEQ ID NO: 884208 - RNA, 20 nt, Human
ccacugcacuccagccuggg

SEQ ID NO: 884209 - RNA, 20 nt, Human
ccacugcacuccagccuggg

SEQ ID NO: 884210 - RNA, 21 nt, Human
ccacugcacuccagccugggu

SEQ ID NO: 884211 - RNA, 21 nt, Human
ccacugcacuccagccugggu

SEQ ID NO: 884212 - RNA, 23 nt, Human
ccacugcacuccagccuggguga

SEQ ID NO: 884213 - RNA, 24 nt, Human
ccacugcacuccagccugggugac

SEQ ID NO: 884214 - RNA, 21 nt, Human
ccagaagggcgagauguggca

SEQ ID NO: 884215 - RNA, 22 nt, Human
cccacagccagcucacagugcc

SEQ ID NO: 884216 - RNA, 18 nt, Human
cccaucucucauuuucua

SEQ ID NO: 884217 - RNA, 26 nt, Human
cccuaugggugccuaaaaauggaaau

SEQ ID NO: 884218 - RNA, 22 nt, Human
ccuaugggugccuaaaaaugga

SEQ ID NO: 884219 - RNA, 19 nt, Human
ccucauguaccugggcugg

SEQ ID NO: 884220 - RNA, 24 nt, Human
ccugaccaacauggugaaacccca

SEQ ID NO: 884221 - RNA, 21 nt, Human
ccugggagucggagguugcag

SEQ ID NO: 884222 - RNA, 19 nt, Human
ccugggcuggggagaggga

SEQ ID NO: 884223 - RNA, 22 nt, Human
ccugggugacagaaugagacuc

SEQ ID NO: 884224 - RNA, 24 nt, Human
cgaggcaggagaauugcuugaacc

SEQ ID NO: 884225 - RNA, 26 nt, Human
cgccacugcacuccagccugggugac

SEQ ID NO: 884226 - RNA, 24 nt, Human
cgggcagaucacuugaggucagga

SEQ ID NO: 884227 - RNA, 24 nt, Human
cucacgccuaucaucccagcacuu

SEQ ID NO: 884228 - RNA, 22 nt, Human
cucccaguacugucacuggguc

SEQ ID NO: 884229 - RNA, 20 nt, Human
cugucucaaaaaacaaaaac

SEQ ID NO: 884230 - RNA, 26 nt, Human
cuucaagccccaacccaucucucauu

SEQ ID NO: 884231 - RNA, 27 nt, Human
cuucaugcuagagcuagcuuucuccuc

SEQ ID NO: 884232 - RNA, 18 nt, Human
cuuggccggguguggugg

SEQ ID NO: 884233 - RNA, 20 nt, Human
gaaaggagacucagggacac

SEQ ID NO: 884234 - RNA, 23 nt, Human
gacagaaugagacucugucucaa

SEQ ID NO: 884235 - RNA, 24 nt, Human
gacagaaugagacucugucucaaa

SEQ ID NO: 884236 - RNA, 23 nt, Human
gaggcaggagaauugcuugaacc

SEQ ID NO: 884237 - RNA, 18 nt, Human
gagguugcagugagccaa

SEQ ID NO: 884238 - RNA, 23 nt, Human
gagguugcagugagccaagauug

SEQ ID NO: 884239 - RNA, 24 nt, Human
gaucacuugaggucaggagguuga

SEQ ID NO: 884240 - RNA, 19 nt, Human
gccacugcacuccagccug

SEQ ID NO: 884241 - RNA, 24 nt, Human
gccacugcacuccagccuggguga

SEQ ID NO: 884242 - RNA, 21 nt, Human
gccgggugugguggcucacgc

SEQ ID NO: 884243 - RNA, 23 nt, Human
gcgugcacaugugccucugugug

SEQ ID NO: 884244 - RNA, 18 nt, Human
ggagaagccaauccaaaa

SEQ ID NO: 884245 - RNA, 20 nt, Human
ggagguugcagugagccaag

SEQ ID NO: 884246 - RNA, 22 nt, Human
ggagguugcagugagccaagau

SEQ ID NO: 884247 - RNA, 24 nt, Human
ggagguugcagugagccaagauug

SEQ ID NO: 884248 - RNA, 27 nt, Human
ggccgaggcaggagaauugcuugaacc

SEQ ID NO: 884249 - RNA, 21 nt, Human
ggccgggugugguggcucacg

SEQ ID NO: 884250 - RNA, 21 nt, Human
gggaaaaaaaaaauuggaaaa

SEQ ID NO: 884251 - RNA, 28 nt, Human
gggaaaaaaaaaauuggaaaaaaaaugu

SEQ ID NO: 884252 - RNA, 21 nt, Human
gggcuggggagagggagacca

SEQ ID NO: 884253 - RNA, 21 nt, Human
gggugugguggcucacgccua

SEQ ID NO: 884254 - RNA, 22 nt, Human
ggucaggagguugagaccagcc

SEQ ID NO: 884255 - RNA, 24 nt, Human
gguggcucacgccuaucaucccag

SEQ ID NO: 884256 - RNA, 20 nt, Human
uaacuaaucccugugcccca

SEQ ID NO: 884257 - RNA, 23 nt, Human
uaaucccugugccccaggaacuc

SEQ ID NO: 884258 - RNA, 21 nt, Human
uaccugggcuggggagaggga

SEQ ID NO: 884259 - RNA, 23 nt, Human
uaccugggcuggggagagggaga

SEQ ID NO: 884260 - RNA, 22 nt, Human
uagaagagcacaaucuugaaua

SEQ ID NO: 884261 - RNA, 22 nt, Human
ucacgccuaucaucccagcacu

SEQ ID NO: 884262 - RNA, 22 nt, Human
ucagaaaggagacucagggaca

SEQ ID NO: 884263 - RNA, 20 nt, Human
ucagggacacaaggucucag

SEQ ID NO: 884264 - RNA, 24 nt, Human
uccagccugggugacagaaugaga

SEQ ID NO: 884265 - RNA, 21 nt, Human
uccauuaugagccucaagagu

SEQ ID NO: 884266 - RNA, 26 nt, Human
ucucaaaaaacaaaaacaacaaaaaa

SEQ ID NO: 884267 - RNA, 23 nt, Human
ucucuacuaaaaaugcaaaaauu

SEQ ID NO: 884268 - RNA, 19 nt, Human
ugaaaccccaucucuacua

SEQ ID NO: 884269 - RNA, 24 nt, Human
ugaaccugggagucggagguugca

SEQ ID NO: 884270 - RNA, 24 nt, Human
ugaccaacauggugaaaccccauc

SEQ ID NO: 884271 - RNA, 23 nt, Human
ugagaccagccugaccaacaugg

SEQ ID NO: 884272 - RNA, 24 nt, Human
ugagaccagccugaccaacauggu

SEQ ID NO: 884273 - RNA, 22 nt, Human
ugagccaagauugcgccacugc

SEQ ID NO: 884274 - RNA, 24 nt, Human
ugaggcgggcagaucacuugaggu

SEQ ID NO: 884275 - RNA, 26 nt, Human
ugaggcgggcagaucacuugagguca

SEQ ID NO: 884276 - RNA, 22 nt, Human
ugaugcacuucaagccccaacc

SEQ ID NO: 884277 - RNA, 20 nt, Human
ugccauguagggcacauagc

SEQ ID NO: 884278 - RNA, 20 nt, Human
ugcuugaaccugggagucgg

SEQ ID NO: 884279 - RNA, 18 nt, Human
ugcuuuaagaaaagaaga

SEQ ID NO: 884280 - RNA, 23 nt, Human
ugcuuuaagaaaagaagaugggu

SEQ ID NO: 884281 - RNA, 18 nt, Human
uggaaaaaaaauguuacc

SEQ ID NO: 884282 - RNA, 21 nt, Human
uggcagaaaggagaauguggg

SEQ ID NO: 884283 - RNA, 23 nt, Human
uggcagaaaggagaaugugggaa

SEQ ID NO: 884284 - RNA, 19 nt, Human
uggccgggugugguggcuc

SEQ ID NO: 884285 - RNA, 22 nt, Human
uggcucacgccuaucaucccag

SEQ ID NO: 884286 - RNA, 24 nt, Human
uggcucacgccuaucaucccagca

SEQ ID NO: 884287 - RNA, 20 nt, Human
ugggaggcugaggcgggcag

SEQ ID NO: 884288 - RNA, 24 nt, Human
ugggaggcugaggcgggcagauca

SEQ ID NO: 884289 - RNA, 24 nt, Human
ugggagucggagguugcagugagc

SEQ ID NO: 884290 - RNA, 24 nt, Human
ugguggcucacgccuaucauccca

SEQ ID NO: 884291 - RNA, 24 nt, Human
uggugguaugcaccuguaauccca

SEQ ID NO: 884292 - RNA, 18 nt, Human
ugugugcgugcacaugug

SEQ ID NO: 884293 - RNA, 23 nt, Human
uguguucacaaguugugugugcg

SEQ ID NO: 884294 - RNA, 20 nt, Human
uucauggccuugaguucacu

SEQ ID NO: 884295 - RNA, 21 nt, Human
uucuaacuucuuuaacagaaa

SEQ ID NO: 884296 - RNA, 26 nt, Human
uucuccucagaaacuuacauccuaaa

SEQ ID NO: 884297 - RNA, 24 nt, Human
uugaaccugggagucggagguugc

SEQ ID NO: 884298 - RNA, 22 nt, Human
uugcagugagccaagauugcgc

SEQ ID NO: 884299 - RNA, 23 nt, Human
uugcgccacugcacuccagccug

SEQ ID NO: 884300 - RNA, 24 nt, Human
uugcuugaaccugggagucggagg

SEQ ID NO: 884301 - RNA, 22 nt, Human
uuggccgggugugguggcucac

SEQ ID NO: 884302 - RNA, 25 nt, Human
uugggaggcugaggcgggcagauca

SEQ ID NO: 884303 - RNA, 18 nt, Human
uugugugugcgugcacau

SEQ ID NO: 884304 - RNA, 19 nt, Human
aaggagucaauccacuaag

SEQ ID NO: 884305 - RNA, 20 nt, Human
uaacugacuucagcaaagga

SEQ ID NO: 884306 - RNA, 23 nt, Human
cggacccagaggucaacuuaagc

SEQ ID NO: 884307 - RNA, 22 nt, Human
uauuguuccuucaguaaaauuu

SEQ ID NO: 884308 - RNA, 20 nt, Human
uuguuccuucaguaaaauuu

SEQ ID NO: 884309 - RNA, 19 nt, Human
uuugcccgcgauuccggac

SEQ ID NO: 884310 - RNA, 19 nt, Human
uuuuuuuuuuuuuuugucu

SEQ ID NO: 884311 - RNA, 23 nt, Human
uuuuuuuuuuuuuuuugucucaa

SEQ ID NO: 884312 - RNA, 19 nt, Human
uuuuuuuuuuuuuuuuugu

SEQ ID NO: 884313 - RNA, 20 nt, Human
uuuuuuuuuuuuuuuuuugg

SEQ ID NO: 884314 - RNA, 24 nt, Human
uuuuuuuuuuuuuuuuuugucuca

SEQ ID NO: 884315 - RNA, 22 nt, Human
aaaccagccacaauguaaccgg

SEQ ID NO: 884316 - RNA, 22 nt, Human
aauaaaugcacuuucuucucuc

SEQ ID NO: 884317 - RNA, 24 nt, Human
aguuagaauguguucaagaaacca

SEQ ID NO: 884318 - RNA, 19 nt, Human
caagaaaccagccacaaug

SEQ ID NO: 884319 - RNA, 23 nt, Human
caauaaaugcacuuucuucucuc

SEQ ID NO: 884320 - RNA, 21 nt, Human
cacaauguaaccggauuagau

SEQ ID NO: 884321 - RNA, 28 nt, Human
cacuuucuucucuccgccacugaggaag

SEQ ID NO: 884322 - RNA, 21 nt, Human
cagagaaacugagccuucuac

SEQ ID NO: 884323 - RNA, 23 nt, Human
cauuacacggccaaggccaagau

SEQ ID NO: 884324 - RNA, 25 nt, Human
ccaccacccaaagcuacagugccga

SEQ ID NO: 884325 - RNA, 23 nt, Human
ccacccaaagcuacagugccgaa

SEQ ID NO: 884326 - RNA, 18 nt, Human
cccaccacccaaagcuac

SEQ ID NO: 884327 - RNA, 24 nt, Human
cccaccacccaaagcuacagugcc

SEQ ID NO: 884328 - RNA, 25 nt, Human
cucuccgccacugaggaagaaaguc

SEQ ID NO: 884329 - RNA, 18 nt, Human
gagccuucuacuguuaac

SEQ ID NO: 884330 - RNA, 20 nt, Human
gcacaguuagaauguguuca

SEQ ID NO: 884331 - RNA, 23 nt, Human
uaaacuucauuuaggaagaugac

SEQ ID NO: 884332 - RNA, 23 nt, Human
uccuccaauauguggaaagacaa

SEQ ID NO: 884333 - RNA, 22 nt, Human
ucugcagcccaccacccaaagc

SEQ ID NO: 884334 - RNA, 19 nt, Human
ugagcagagaaacugagcc

SEQ ID NO: 884335 - RNA, 21 nt, Human
ugcagcccaccacccaaagcu

SEQ ID NO: 884336 - RNA, 21 nt, Human
uggcaaggaguuagaguuccg

SEQ ID NO: 884337 - RNA, 22 nt, Human
aggcagagagagcacuaauggg

SEQ ID NO: 884338 - RNA, 23 nt, Human
aggcagagagagcacuaaugggg

SEQ ID NO: 884339 - RNA, 20 nt, Human
cacagccccuaaggccaccc

SEQ ID NO: 884340 - RNA, 24 nt, Human
cagagagagcacuaaugggggaaa

SEQ ID NO: 884341 - RNA, 18 nt, Human
cagccccuaaggccaccc

SEQ ID NO: 884342 - RNA, 28 nt, Human
cagguggcgauuugccccagcccucccc

SEQ ID NO: 884343 - RNA, 20 nt, Human
ccagcccuccccccuaagau

SEQ ID NO: 884344 - RNA, 26 nt, Human
cccagcccuccccccuaagaugcaga

SEQ ID NO: 884345 - RNA, 22 nt, Human
ccccacugccucacagccccua

SEQ ID NO: 884346 - RNA, 18 nt, Human
cucacagccccuaaggcc

SEQ ID NO: 884347 - RNA, 20 nt, Human
gaggaaaggcacagguggcg

SEQ ID NO: 884348 - RNA, 24 nt, Human
gaguugggugugggggcagcaggg

SEQ ID NO: 884349 - RNA, 20 nt, Human
gauuugccccagcccucccc

SEQ ID NO: 884350 - RNA, 21 nt, Human
gccgggauccaggcagagaga

SEQ ID NO: 884351 - RNA, 18 nt, Human
ggcagcagggccagagga

SEQ ID NO: 884352 - RNA, 20 nt, Human
ggccagaggaaaggcacagg

SEQ ID NO: 884353 - RNA, 18 nt, Human
ggugugggggcagcaggg

SEQ ID NO: 884354 - RNA, 27 nt, Human
ggugugggggcagcagggccagaggaa

SEQ ID NO: 884355 - RNA, 20 nt, Human
gugggcccucggaguugggu

SEQ ID NO: 884356 - RNA, 21 nt, Human
uaagguccccacugccucaca

SEQ ID NO: 884357 - RNA, 19 nt, Human
uacuucuuuucucuuuauu

SEQ ID NO: 884358 - RNA, 21 nt, Human
ucagaacacgucgcggaaggu

SEQ ID NO: 884359 - RNA, 21 nt, Human
ucccgcuuuccccagcguggg

SEQ ID NO: 884360 - RNA, 20 nt, Human
ugccucacagccccuaaggc

SEQ ID NO: 884361 - RNA, 20 nt, Human
ugggggaaagggagcgagcg

SEQ ID NO: 884362 - RNA, 18 nt, Human
ugggugugggggcagcag

SEQ ID NO: 884363 - RNA, 19 nt, Human
uuacuucuuuucucuuuaa

SEQ ID NO: 884364 - RNA, 22 nt, Human
uuucaucaauaagguccccacu

SEQ ID NO: 884365 - RNA, 25 nt, Human
aaaugagccccacaaucuagaaagu

SEQ ID NO: 884366 - RNA, 18 nt, Human
aagaagaaaucagagacc

SEQ ID NO: 884367 - RNA, 22 nt, Human
acacagcccggaacugcaaguc

SEQ ID NO: 884368 - RNA, 18 nt, Human
acaugaauaccaaagcua

SEQ ID NO: 884369 - RNA, 18 nt, Human
acugaauugacagcuaca

SEQ ID NO: 884370 - RNA, 24 nt, Human
agaaauaaaaucaaaacacuuuag

SEQ ID NO: 884371 - RNA, 19 nt, Human
agacagcagucaugugaac

SEQ ID NO: 884372 - RNA, 21 nt, Human
agcuguggcagcucuaacugg

SEQ ID NO: 884373 - RNA, 21 nt, Human
auacugaauugacagcuacau

SEQ ID NO: 884374 - RNA, 20 nt, Human
cacaaucuagaaaguaggau

SEQ ID NO: 884375 - RNA, 23 nt, Human
cacagcccggaacugcaagucaa

SEQ ID NO: 884376 - RNA, 22 nt, Human
cagcagucaugugaacacagcc

SEQ ID NO: 884377 - RNA, 19 nt, Human
cagguuagagaauacuccu

SEQ ID NO: 884378 - RNA, 23 nt, Human
cauaaaauuaauaaaucaagcag

SEQ ID NO: 884379 - RNA, 22 nt, Human
ccaagaagaaaucagagaccuc

SEQ ID NO: 884380 - RNA, 18 nt, Human
ccagguaaccaaaaccau

SEQ ID NO: 884381 - RNA, 21 nt, Human
ccccacaaucuagaaaguagg

SEQ ID NO: 884382 - RNA, 20 nt, Human
cuauuauguagaaauaaaau

SEQ ID NO: 884383 - RNA, 22 nt, Human
cugggccugccuucccagguaa

SEQ ID NO: 884384 - RNA, 22 nt, Human
gaaugcaggguuucccagggua

SEQ ID NO: 884385 - RNA, 22 nt, Human
gcaaaaugagccccacaaucua

SEQ ID NO: 884386 - RNA, 19 nt, Human
gccucaucuuuuuccugag

SEQ ID NO: 884387 - RNA, 23 nt, Human
uaaaaauacugaauugacagcua

SEQ ID NO: 884388 - RNA, 18 nt, Human
uaaaugcauguauauaca

SEQ ID NO: 884389 - RNA, 23 nt, Human
uaaccagaguugacaaaugugaa

SEQ ID NO: 884390 - RNA, 23 nt, Human
uaacucugaggaaaaaaaaugau

SEQ ID NO: 884391 - RNA, 19 nt, Human
uaacuggggcacccagaga

SEQ ID NO: 884392 - RNA, 22 nt, Human
uagaaauaaaaucaaaacacuu

SEQ ID NO: 884393 - RNA, 19 nt, Human
uagaccaagaagaaaucag

SEQ ID NO: 884394 - RNA, 22 nt, Human
uaggaugcuaaacaaaguugaa

SEQ ID NO: 884395 - RNA, 23 nt, Human
uauguagaaauaaaaucaaaaca

SEQ ID NO: 884396 - RNA, 25 nt, Human
uauguagaaauaaaaucaaaacacu

SEQ ID NO: 884397 - RNA, 19 nt, Human
ucaaaacacuuuagaccaa

SEQ ID NO: 884398 - RNA, 23 nt, Human
ucacaauuaaaugcauguauaua

SEQ ID NO: 884399 - RNA, 28 nt, Human
ucagagaccuccuagucuauugccccag

SEQ ID NO: 884400 - RNA, 22 nt, Human
ucaugugaacacagcccggaac

SEQ ID NO: 884401 - RNA, 22 nt, Human
uccugagcuguggcagcucuaa

SEQ ID NO: 884402 - RNA, 21 nt, Human
ucuaacuggggcacccagaga

SEQ ID NO: 884403 - RNA, 18 nt, Human
ugaaaugccagcuugugg

SEQ ID NO: 884404 - RNA, 23 nt, Human
ugaaugcaggguuucccaggguc

SEQ ID NO: 884405 - RNA, 19 nt, Human
ugagggaaauaauuuuaac

SEQ ID NO: 884406 - RNA, 20 nt, Human
ugauaaaaucacaauuaaau

SEQ ID NO: 884407 - RNA, 23 nt, Human
ugauuuuuuaacauuuucaauuu

SEQ ID NO: 884408 - RNA, 21 nt, Human
ugcuaaacaaaguugaaucaa

SEQ ID NO: 884409 - RNA, 19 nt, Human
uggguucugggccugccuu

SEQ ID NO: 884410 - RNA, 22 nt, Human
uggguucugggccugccuuccc

SEQ ID NO: 884411 - RNA, 18 nt, Human
ugguaagaaacagcugac

SEQ ID NO: 884412 - RNA, 25 nt, Human
uuaaaaauacugaauugacagcuac

SEQ ID NO: 884413 - RNA, 19 nt, Human
uuaaucacaaccaucgaag

SEQ ID NO: 884414 - RNA, 24 nt, Human
uugaaugcaggguuucccagggua

SEQ ID NO: 884415 - RNA, 19 nt, Human
caaguguccaucuaaauuu

SEQ ID NO: 884416 - RNA, 27 nt, Human
ccaagauacauaaauuaggaaauacaa

SEQ ID NO: 884417 - RNA, 23 nt, Human
cccccgagaaggggcaguuuccg

SEQ ID NO: 884418 - RNA, 18 nt, Human
gaugacaaacagcagcca

SEQ ID NO: 884419 - RNA, 20 nt, Human
uaggaaauacaaguguccau

SEQ ID NO: 884420 - RNA, 23 nt, Human
uauugucugaugacaaacagcag

SEQ ID NO: 884421 - RNA, 22 nt, Human
uccuuuauuguaaagacaauuc

SEQ ID NO: 884422 - RNA, 18 nt, Human
ugacaaacagcagccacc

SEQ ID NO: 884423 - RNA, 22 nt, Human
uggaaguccuuuauuguaaaga

SEQ ID NO: 884424 - RNA, 20 nt, Human
uggagaagcugaccaagaua

SEQ ID NO: 884425 - RNA, 20 nt, Human
ugucugaugacaaacagcag

SEQ ID NO: 884426 - RNA, 20 nt, Human
uuucucaucugucauuuugg

SEQ ID NO: 884427 - RNA, 22 nt, Human
aaacaaaaggcaagguaacauc

SEQ ID NO: 884428 - RNA, 21 nt, Human
aggcccgaguccacgcagcag

SEQ ID NO: 884429 - RNA, 19 nt, Human
caaaacaaacaaaaggcaa

SEQ ID NO: 884430 - RNA, 20 nt, Human
cagcacaggaacuggcugca

SEQ ID NO: 884431 - RNA, 22 nt, Human
cagcacaggaacuggcugcaca

SEQ ID NO: 884432 - RNA, 19 nt, Human
ccaaagaguuuaaagauua

SEQ ID NO: 884433 - RNA, 21 nt, Human
ccaccgccuaccgcgacugcu

SEQ ID NO: 884434 - RNA, 24 nt, Human
cccucaaaacaaacaaaaggcaag

SEQ ID NO: 884435 - RNA, 23 nt, Human
ccgcagcggaauuccugaggccc

SEQ ID NO: 884436 - RNA, 22 nt, Human
ccuugcccaccgccuaccgcga

SEQ ID NO: 884437 - RNA, 20 nt, Human
cgcccagggcagccuugccc

SEQ ID NO: 884438 - RNA, 21 nt, Human
cgcgccucggccuccgcccag

SEQ ID NO: 884439 - RNA, 25 nt, Human
cggaauuccugaggcccgaguccac

SEQ ID NO: 884440 - RNA, 22 nt, Human
cucaaaacaaacaaaaggcaag

SEQ ID NO: 884441 - RNA, 22 nt, Human
cucggccuccgcccagggcagc

SEQ ID NO: 884442 - RNA, 25 nt, Human
gccacacugcaggcggagcccggcg

SEQ ID NO: 884443 - RNA, 18 nt, Human
ggaauuccugaggcccga

SEQ ID NO: 884444 - RNA, 18 nt, Human
ggcgcgaccgcggacagc

SEQ ID NO: 884445 - RNA, 18 nt, Human
uaacaucccaagcuguga

SEQ ID NO: 884446 - RNA, 22 nt, Human
uaccgcgacugcuccucgucaa

SEQ ID NO: 884447 - RNA, 19 nt, Human
ucaaaacaaacaaaaggca

SEQ ID NO: 884448 - RNA, 24 nt, Human
uccacgcagcagcgcaggccgggg

SEQ ID NO: 884449 - RNA, 22 nt, Human
ucccucaaaacaaacaaaaggc

SEQ ID NO: 884450 - RNA, 25 nt, Human
uguccggacgggccacacugcaggg

SEQ ID NO: 884451 - RNA, 20 nt, Human
uuccugaggcccgaguccac

SEQ ID NO: 884452 - RNA, 20 nt, Human
uuuuuuuuuuuuuuuuuugg

SEQ ID NO: 884453 - RNA, 19 nt, Human
aacuugcaaauucuuccuu

SEQ ID NO: 884454 - RNA, 21 nt, Human
acagcaccugcaacacaugcu

SEQ ID NO: 884455 - RNA, 21 nt, Human
agaaaaaucaaacagcaccug

SEQ ID NO: 884456 - RNA, 28 nt, Human
agcaaaggggaucaagggcuaaaaauac

SEQ ID NO: 884457 - RNA, 25 nt, Human
aggggaucaagggcuaaaaauaccu

SEQ ID NO: 884458 - RNA, 18 nt, Human
augacacuaaugaaaaca

SEQ ID NO: 884459 - RNA, 24 nt, Human
augacacuaaugaaaacaaaauca

SEQ ID NO: 884460 - RNA, 23 nt, Human
caaaaucaagaaugauccacugg

SEQ ID NO: 884461 - RNA, 18 nt, Human
caagcaaaggggaucaag

SEQ ID NO: 884462 - RNA, 20 nt, Human
cccgggacgcgaaggggcgg

SEQ ID NO: 884463 - RNA, 29 nt, Human
ccucucgcaagcaaaggggaucaagggcu

SEQ ID NO: 884464 - RNA, 18 nt, Human
cgaaggggcgggacggcg

SEQ ID NO: 884465 - RNA, 23 nt, Human
gaaaaguccucaaugacaaagaa

SEQ ID NO: 884466 - RNA, 19 nt, Human
gggacaguggggaccuaga

SEQ ID NO: 884467 - RNA, 18 nt, Human
ggggaccuagaaacugcu

SEQ ID NO: 884468 - RNA, 21 nt, Human
uaaugaaaacaaaaucaagaa

SEQ ID NO: 884469 - RNA, 20 nt, Human
uacacaggcugaaugacuag

SEQ ID NO: 884470 - RNA, 21 nt, Human
uacugcagguuacagagaagc

SEQ ID NO: 884471 - RNA, 21 nt, Human
uagcucacaaucccaggaggu

SEQ ID NO: 884472 - RNA, 23 nt, Human
uauauaaaggccaaacuugcaaa

SEQ ID NO: 884473 - RNA, 21 nt, Human
ucaaacagcaccugcaacaca

SEQ ID NO: 884474 - RNA, 26 nt, Human
ucaauuuuuauuuccacaugguuaau

SEQ ID NO: 884475 - RNA, 21 nt, Human
uccccaccucucgcaagcaaa

SEQ ID NO: 884476 - RNA, 24 nt, Human
ucccuacaaucaaguuuauuacuc

SEQ ID NO: 884477 - RNA, 20 nt, Human
ugacaaagaaaugacacuaa

SEQ ID NO: 884478 - RNA, 23 nt, Human
ugagcaguuccccaccucucgca

SEQ ID NO: 884479 - RNA, 18 nt, Human
ugcugcccaaaugugaag

SEQ ID NO: 884480 - RNA, 20 nt, Human
uguaaggggaaaaguccuca

SEQ ID NO: 884481 - RNA, 27 nt, Human
aacugcuuuuuauacauuaucuuuagg

SEQ ID NO: 884482 - RNA, 18 nt, Human
aagagaaaacagcccuga

SEQ ID NO: 884483 - RNA, 19 nt, Human
aaggacaacucuggaaaca

SEQ ID NO: 884484 - RNA, 19 nt, Human
agagaaaacagcccugagg

SEQ ID NO: 884485 - RNA, 18 nt, Human
aggaaauaggggcagaga

SEQ ID NO: 884486 - RNA, 22 nt, Human
agugacgggaaacgggugaaaa

SEQ ID NO: 884487 - RNA, 23 nt, Human
caaagaaagaaggauuaacggau

SEQ ID NO: 884488 - RNA, 24 nt, Human
caaaggaacuacauccuuaaccca

SEQ ID NO: 884489 - RNA, 19 nt, Human
caagucaaugugcucccuc

SEQ ID NO: 884490 - RNA, 21 nt, Human
cagcccugaguuuccuggagg

SEQ ID NO: 884491 - RNA, 19 nt, Human
ccaaaaggaaacccuugcc

SEQ ID NO: 884492 - RNA, 22 nt, Human
ccacagguaguuuucagcgugg

SEQ ID NO: 884493 - RNA, 21 nt, Human
cccugggcuccuccuggagac

SEQ ID NO: 884494 - RNA, 23 nt, Human
ccucuuuacaaggaaauaggggc

SEQ ID NO: 884495 - RNA, 22 nt, Human
cgccugagcgagugacgggaaa

SEQ ID NO: 884496 - RNA, 18 nt, Human
cggcagagggcccugggc

SEQ ID NO: 884497 - RNA, 25 nt, Human
gaaaaagacuccucaggguccuaaa

SEQ ID NO: 884498 - RNA, 25 nt, Human
gagggcccugggcuccuccuggaga

SEQ ID NO: 884499 - RNA, 20 nt, Human
gcugcaccacaugcuacacc

SEQ ID NO: 884500 - RNA, 18 nt, Human
gggaaacgggugaaaaag

SEQ ID NO: 884501 - RNA, 19 nt, Human
uacaaaggaacuacauccu

SEQ ID NO: 884502 - RNA, 23 nt, Human
uaggggcagagagagcaaguucc

SEQ ID NO: 884503 - RNA, 21 nt, Human
uauuuccuccagccaguuuca

SEQ ID NO: 884504 - RNA, 21 nt, Human
ucagcguggcaguagcucaca

SEQ ID NO: 884505 - RNA, 20 nt, Human
uccuccagccaguuucacug

SEQ ID NO: 884506 - RNA, 24 nt, Human
uggcaguagcucacacuguuucuu

SEQ ID NO: 884507 - RNA, 19 nt, Human
uggccacgaggaccccaca

SEQ ID NO: 884508 - RNA, 18 nt, Human
uuccuggaggaaauuccc

SEQ ID NO: 884509 - RNA, 22 nt, Human
uuuuuuuuuuuuuuuucaccag

SEQ ID NO: 884510 - RNA, 23 nt, Human
uuuuuuuuuuuuuuuuucaccag

SEQ ID NO: 884511 - RNA, 20 nt, Human
acugugugucugccacaugu

SEQ ID NO: 884512 - RNA, 23 nt, Human
cagcucaaagaaauuucugacag

SEQ ID NO: 884513 - RNA, 19 nt, Human
caggaccggaggggugagg

SEQ ID NO: 884514 - RNA, 21 nt, Human
ccacaugucggcacauauaua

SEQ ID NO: 884515 - RNA, 22 nt, Human
ccucuccuuuccugggagcaaa

SEQ ID NO: 884516 - RNA, 23 nt, Human
gcgcaggcgcuaauggcgcgggg

SEQ ID NO: 884517 - RNA, 21 nt, Human
ggaccggaggggugagggggc

SEQ ID NO: 884518 - RNA, 19 nt, Human
ugacaguacugcccucaug

SEQ ID NO: 884519 - RNA, 23 nt, Human
ugagggggcggggccuagagacg

SEQ ID NO: 884520 - RNA, 24 nt, Human
ugccacaugucggcacauauauau

SEQ ID NO: 884521 - RNA, 21 nt, Human
aaaaaaaacuucaguauccac

SEQ ID NO: 884522 - RNA, 20 nt, Human
aaaagggggcaaauacaaga

SEQ ID NO: 884523 - RNA, 23 nt, Human
agaagcaggcagcagccagaccc

SEQ ID NO: 884524 - RNA, 20 nt, Human
agaaucaggaaauucacaug

SEQ ID NO: 884525 - RNA, 20 nt, Human
agcaagaagcaggcagcagc

SEQ ID NO: 884526 - RNA, 24 nt, Human
caaguuccuacgcuucauucagca

SEQ ID NO: 884527 - RNA, 24 nt, Human
cagaccccagaccuucaugccgga

SEQ ID NO: 884528 - RNA, 21 nt, Human
cagcagccagaccccagaccu

SEQ ID NO: 884529 - RNA, 22 nt, Human
ccuguaacuaccauaaaaaaaa

SEQ ID NO: 884530 - RNA, 25 nt, Human
cuucaugccggacgcuggcugcucc

SEQ ID NO: 884531 - RNA, 23 nt, Human
guuuccuguaacuaccauaaaaa

SEQ ID NO: 884532 - RNA, 25 nt, Human
uaaaaaaaagggggcaaauacaaga

SEQ ID NO: 884533 - RNA, 23 nt, Human
uaaagcucaaacuuacagagucu

SEQ ID NO: 884534 - RNA, 19 nt, Human
uaccauaaaaaaaacuuca

SEQ ID NO: 884535 - RNA, 25 nt, Human
uagucaccugagaaucaggaaauuc

SEQ ID NO: 884536 - RNA, 28 nt, Human
ucccuauacugacaaagaacuauagcua

SEQ ID NO: 884537 - RNA, 18 nt, Human
ugacaaagaacuauagcu

SEQ ID NO: 884538 - RNA, 22 nt, Human
ugacucuauacaagaaaauaau

SEQ ID NO: 884539 - RNA, 18 nt, Human
ugcuggagcaagaagcag

SEQ ID NO: 884540 - RNA, 26 nt, Human
uuaaagcucaaacuuacagagucugu

SEQ ID NO: 884541 - RNA, 20 nt, Human
uuagucaccugagaaucagg

SEQ ID NO: 884542 - RNA, 22 nt, Human
aaaugggaagauagucacuuug

SEQ ID NO: 884543 - RNA, 18 nt, Human
aacaccggaggucaaacc

SEQ ID NO: 884544 - RNA, 22 nt, Human
aagaacaucaagucacugugua

SEQ ID NO: 884545 - RNA, 24 nt, Human
accaauuacagagaggaaaaaaga

SEQ ID NO: 884546 - RNA, 22 nt, Human
accagcuggccucagggcucag

SEQ ID NO: 884547 - RNA, 25 nt, Human
acugcccccuaccuccuccuccccc

SEQ ID NO: 884548 - RNA, 25 nt, Human
acugcccccuaccuccuccuccccc

SEQ ID NO: 884549 - RNA, 21 nt, Human
acuuugcaacuccaaauucca

SEQ ID NO: 884550 - RNA, 21 nt, Human
agaacccuuccucaugaccuu

SEQ ID NO: 884551 - RNA, 20 nt, Human
agaagacccugggccagcgc

SEQ ID NO: 884552 - RNA, 19 nt, Human
agcaaauucuuccugauaa

SEQ ID NO: 884553 - RNA, 22 nt, Human
agcuggccucagggcucagggc

SEQ ID NO: 884554 - RNA, 18 nt, Human
aggaaaaaagagaguaag

SEQ ID NO: 884555 - RNA, 21 nt, Human
aggcugaaguuauugaaaaug

SEQ ID NO: 884556 - RNA, 23 nt, Human
aguuauugaaaaugagaugggaa

SEQ ID NO: 884557 - RNA, 19 nt, Human
auaauggcagggaaagccg

SEQ ID NO: 884558 - RNA, 26 nt, Human
auuucauuuccuccggcucucuggcu

SEQ ID NO: 884559 - RNA, 21 nt, Human
caaaccaggcuaggagagggc

SEQ ID NO: 884560 - RNA, 20 nt, Human
caacaccggaggucaaacca

SEQ ID NO: 884561 - RNA, 19 nt, Human
caagccacagugagagccg

SEQ ID NO: 884562 - RNA, 19 nt, Human
caccggaggucaaaccagg

SEQ ID NO: 884563 - RNA, 23 nt, Human
caccugagcuaggggcaggagac

SEQ ID NO: 884564 - RNA, 21 nt, Human
cacuccggccuggcucggggg

SEQ ID NO: 884565 - RNA, 20 nt, Human
cacuggacacuguccuggcc

SEQ ID NO: 884566 - RNA, 22 nt, Human
caggcuaggagagggcauuugg

SEQ ID NO: 884567 - RNA, 20 nt, Human
ccaccugagcuaggggcagg

SEQ ID NO: 884568 - RNA, 24 nt, Human
ccccacccgccuggagccuccagc

SEQ ID NO: 884569 - RNA, 22 nt, Human
ccccauggcaacucgugccacu

SEQ ID NO: 884570 - RNA, 18 nt, Human
cccccuaccuccuccucc

SEQ ID NO: 884571 - RNA, 19 nt, Human
ccccgcuccuuacccccaa

SEQ ID NO: 884572 - RNA, 27 nt, Human
ccccuaccuccuccucccccgugcccc

SEQ ID NO: 884573 - RNA, 19 nt, Human
ccgaguguuaaaagaaccc

SEQ ID NO: 884574 - RNA, 19 nt, Human
ccucagggcucagggcagg

SEQ ID NO: 884575 - RNA, 19 nt, Human
ccuccagcaagcaugugag

SEQ ID NO: 884576 - RNA, 18 nt, Human
ccuccucccccgugcccc

SEQ ID NO: 884577 - RNA, 24 nt, Human
ccucugggagccccacuccggccu

SEQ ID NO: 884578 - RNA, 19 nt, Human
ccugcagaucuccccaccc

SEQ ID NO: 884579 - RNA, 24 nt, Human
ccugcgguaggaggacccuaaaac

SEQ ID NO: 884580 - RNA, 21 nt, Human
cgagaagccucuggcugcaga

SEQ ID NO: 884581 - RNA, 18 nt, Human
cggagccacaagccacag

SEQ ID NO: 884582 - RNA, 23 nt, Human
cggccuggcucgggggauaaugg

SEQ ID NO: 884583 - RNA, 19 nt, Human
cuccuccucccccgugccc

SEQ ID NO: 884584 - RNA, 18 nt, Human
cuccucuggccagccucc

SEQ ID NO: 884585 - RNA, 20 nt, Human
cuccugcgguaggaggaccc

SEQ ID NO: 884586 - RNA, 21 nt, Human
cucuggccagccuccuuucac

SEQ ID NO: 884587 - RNA, 22 nt, Human
cugggagccccacuccggccug

SEQ ID NO: 884588 - RNA, 20 nt, Human
gaaagaaugggaggcugaag

SEQ ID NO: 884589 - RNA, 22 nt, Human
gaagauagucacuuugcaacuc

SEQ ID NO: 884590 - RNA, 21 nt, Human
gaaguuauugaaaaugagaug

SEQ ID NO: 884591 - RNA, 20 nt, Human
gagaagccucuggcugcaga

SEQ ID NO: 884592 - RNA, 18 nt, Human
gagccuggagaagacccu

SEQ ID NO: 884593 - RNA, 20 nt, Human
gccacuggacacuguccugg

SEQ ID NO: 884594 - RNA, 26 nt, Human
ggaaagccgaccagcuggccgaagac

SEQ ID NO: 884595 - RNA, 24 nt, Human
ggcaguccccauggcaacucgugc

SEQ ID NO: 884596 - RNA, 21 nt, Human
gggaaagggugguagucugag

SEQ ID NO: 884597 - RNA, 19 nt, Human
gggcauuuggaauuucauu

SEQ ID NO: 884598 - RNA, 18 nt, Human
uacagagaggaaaaaaga

SEQ ID NO: 884599 - RNA, 20 nt, Human
uacagagaggaaaaaagaga

SEQ ID NO: 884600 - RNA, 20 nt, Human
uacaucuggcuccggagcuc

SEQ ID NO: 884601 - RNA, 26 nt, Human
uacugcccccuaccuccuccuccccc

SEQ ID NO: 884602 - RNA, 19 nt, Human
uaggguguuagucauuaag

SEQ ID NO: 884603 - RNA, 18 nt, Human
uccaaauuccaggucuga

SEQ ID NO: 884604 - RNA, 19 nt, Human
uccaagaacaucaagucac

SEQ ID NO: 884605 - RNA, 22 nt, Human
uccaagaacaucaagucacugu

SEQ ID NO: 884606 - RNA, 22 nt, Human
uccucugggagccccacuccgg

SEQ ID NO: 884607 - RNA, 22 nt, Human
ugacguuauacuuggggaaagg

SEQ ID NO: 884608 - RNA, 21 nt, Human
ugagaugggaaaugggaagau

SEQ ID NO: 884609 - RNA, 23 nt, Human
ugagaugggaaaugggaagauag

SEQ ID NO: 884610 - RNA, 26 nt, Human
ugagccuggagaagacccugggccag

SEQ ID NO: 884611 - RNA, 18 nt, Human
ugccccgcuccuuacccc

SEQ ID NO: 884612 - RNA, 22 nt, Human
ugccccgcuccuuacccccaac

SEQ ID NO: 884613 - RNA, 21 nt, Human
ugccgaguguuaaaagaaccc

SEQ ID NO: 884614 - RNA, 18 nt, Human
uggcaguccccauggcaa

SEQ ID NO: 884615 - RNA, 21 nt, Human
uggcucgggggauaauggcag

SEQ ID NO: 884616 - RNA, 19 nt, Human
ugggaagauagucacuuug

SEQ ID NO: 884617 - RNA, 18 nt, Human
ugggagccccacuccggc

SEQ ID NO: 884618 - RNA, 19 nt, Human
ugggaggcugaaguuauug

SEQ ID NO: 884619 - RNA, 21 nt, Human
uggggcagucgcucacccugg

SEQ ID NO: 884620 - RNA, 19 nt, Human
uuauacuuggggaaagggu

SEQ ID NO: 884621 - RNA, 19 nt, Human
uuauucuccuuuccuccuc

SEQ ID NO: 884622 - RNA, 21 nt, Human
uuauugaaaaugagaugggaa

SEQ ID NO: 884623 - RNA, 18 nt, Human
uuccaaaggaaagaaugg

SEQ ID NO: 884624 - RNA, 19 nt, Human
uuccuccggcucucuggcu

SEQ ID NO: 884625 - RNA, 24 nt, Human
uugaguuugcaucaacaccggagg

SEQ ID NO: 884626 - RNA, 24 nt, Human
uugcaacuccaaauuccaggucug

SEQ ID NO: 884627 - RNA, 19 nt, Human
uuucugagaagccuuuccu

SEQ ID NO: 884628 - RNA, 19 nt, Human
uuuuuuucugagaagccuu

SEQ ID NO: 884629 - RNA, 24 nt, Human
uuuuuuuuuuuucugagaagccuu

SEQ ID NO: 884630 - RNA, 18 nt, Human
cauauccagcaucaugag

SEQ ID NO: 884631 - RNA, 23 nt, Human
cccaagaagucaauaguucuuca

SEQ ID NO: 884632 - RNA, 28 nt, Human
ucauauccagcaucaugagucgucuuug

SEQ ID NO: 884633 - RNA, 18 nt, Human
ucccaagaagucaauagu

SEQ ID NO: 884634 - RNA, 22 nt, Human
ucccaagaagucaauaguucuu

SEQ ID NO: 884635 - RNA, 18 nt, Human
ugaggacaugaguaacca

SEQ ID NO: 884636 - RNA, 18 nt, Human
ugaggacaugaguaacca

SEQ ID NO: 884637 - RNA, 18 nt, Human
aaaagccgggagcuuggg

SEQ ID NO: 884638 - RNA, 23 nt, Human
aagacuaaaaacccaggccggga

SEQ ID NO: 884639 - RNA, 21 nt, Human
aaggagaauccagcggaaacu

SEQ ID NO: 884640 - RNA, 21 nt, Human
accuagcccugcgagcagcgg

SEQ ID NO: 884641 - RNA, 22 nt, Human
acgaacccggcccagagaagcc

SEQ ID NO: 884642 - RNA, 18 nt, Human
agagcgugagcgccccuc

SEQ ID NO: 884643 - RNA, 26 nt, Human
aggcaaaacguggucgcccagauccg

SEQ ID NO: 884644 - RNA, 20 nt, Human
agguaggagcaggagcgggg

SEQ ID NO: 884645 - RNA, 19 nt, Human
aucacaguuccagggaaag

SEQ ID NO: 884646 - RNA, 18 nt, Human
cacaguuccagggaaagg

SEQ ID NO: 884647 - RNA, 18 nt, Human
cacgucuagaccucuguc

SEQ ID NO: 884648 - RNA, 21 nt, Human
cagccacacccgccaccuguc

SEQ ID NO: 884649 - RNA, 20 nt, Human
cagcggccuuccucccgccc

SEQ ID NO: 884650 - RNA, 18 nt, Human
cagggaggccgaacggcc

SEQ ID NO: 884651 - RNA, 20 nt, Human
caucucacgagcucucccuu

SEQ ID NO: 884652 - RNA, 23 nt, Human
ccaccugucacgaucacaguucc

SEQ ID NO: 884653 - RNA, 19 nt, Human
ccccccuggccagucucgc

SEQ ID NO: 884654 - RNA, 22 nt, Human
cccgccugcggugaucugggaa

SEQ ID NO: 884655 - RNA, 19 nt, Human
cccguugucccccuugccc

SEQ ID NO: 884656 - RNA, 21 nt, Human
ccgggagcuugggaaggagac

SEQ ID NO: 884657 - RNA, 21 nt, Human
ccguucccuaaccauuguguc

SEQ ID NO: 884658 - RNA, 20 nt, Human
ccuagcccugcgagcagcgg

SEQ ID NO: 884659 - RNA, 18 nt, Human
ccuggcggaggcggaggc

SEQ ID NO: 884660 - RNA, 21 nt, Human
ccuuccgcucccuggcggagg

SEQ ID NO: 884661 - RNA, 25 nt, Human
ccuugcccacacgcguccucuuucc

SEQ ID NO: 884662 - RNA, 19 nt, Human
cgaaaggccggggcugugu

SEQ ID NO: 884663 - RNA, 20 nt, Human
cgcaggaucacuugcuaugg

SEQ ID NO: 884664 - RNA, 25 nt, Human
cgcccagauccggcgcagcuguagc

SEQ ID NO: 884665 - RNA, 20 nt, Human
cgcgaaaggccggggcugug

SEQ ID NO: 884666 - RNA, 20 nt, Human
cgcguccucuuuccuccccc

SEQ ID NO: 884667 - RNA, 21 nt, Human
cgggagcuugggaaggagacg

SEQ ID NO: 884668 - RNA, 19 nt, Human
cuagcccugcgagcagcgg

SEQ ID NO: 884669 - RNA, 20 nt, Human
gaaaaagccgggagcuuggg

SEQ ID NO: 884670 - RNA, 22 nt, Human
gaaacuucuucccaucucacga

SEQ ID NO: 884671 - RNA, 19 nt, Human
gaagaagccacccggcagg

SEQ ID NO: 884672 - RNA, 21 nt, Human
gagagucuggagucggagcug

SEQ ID NO: 884673 - RNA, 22 nt, Human
gagcgccccucugcugaccccg

SEQ ID NO: 884674 - RNA, 19 nt, Human
gaguuagucuacagagcua

SEQ ID NO: 884675 - RNA, 22 nt, Human
gcaagggcgcguucccuaucgc

SEQ ID NO: 884676 - RNA, 18 nt, Human
gcagugacagccacaccc

SEQ ID NO: 884677 - RNA, 18 nt, Human
gcccagauccggcgcagc

SEQ ID NO: 884678 - RNA, 20 nt, Human
gcgcggggugagaaagcgag

SEQ ID NO: 884679 - RNA, 23 nt, Human
gcggcaggacgugguguuggagu

SEQ ID NO: 884680 - RNA, 18 nt, Human
gcuccaaggaagacuaaa

SEQ ID NO: 884681 - RNA, 25 nt, Human
ggaagugugucuccaccuagcccug

SEQ ID NO: 884682 - RNA, 19 nt, Human
ggaguuggggcgcccggag

SEQ ID NO: 884683 - RNA, 22 nt, Human
ggauguagagcgcguucuaacc

SEQ ID NO: 884684 - RNA, 21 nt, Human
gggaggcccgaagaagacccc

SEQ ID NO: 884685 - RNA, 20 nt, Human
ggggaagaaccugcgcggca

SEQ ID NO: 884686 - RNA, 18 nt, Human
gucacuuaaaacccuguc

SEQ ID NO: 884687 - RNA, 19 nt, Human
guccucuuuccuccccccu

SEQ ID NO: 884688 - RNA, 19 nt, Human
ucccuaucgcaggaucacu

SEQ ID NO: 884689 - RNA, 20 nt, Human
ucccuggcggaggcggaggc

SEQ ID NO: 884690 - RNA, 19 nt, Human
ucgcugucuccgccuuccg

SEQ ID NO: 884691 - RNA, 23 nt, Human
ucuacagagcuagggcccgaggg

SEQ ID NO: 884692 - RNA, 20 nt, Human
ucucgcugucuccgccuucc

SEQ ID NO: 884693 - RNA, 22 nt, Human
ucucgcugucuccgccuuccgc

SEQ ID NO: 884694 - RNA, 22 nt, Human
ugagcgccccucugcugacccc

SEQ ID NO: 884695 - RNA, 24 nt, Human
ugcuggaguacgaacccggcccag

SEQ ID NO: 884696 - RNA, 18 nt, Human
uggaguggggagaccuga

SEQ ID NO: 884697 - RNA, 22 nt, Human
uggcccccaaacacucgcauuu

SEQ ID NO: 884698 - RNA, 18 nt, Human
ugggaaggagacgggauu

SEQ ID NO: 884699 - RNA, 23 nt, Human
ugggaaggagacgggauugaaga

SEQ ID NO: 884700 - RNA, 22 nt, Human
ugggcugucuggcgcgggcugg

SEQ ID NO: 884701 - RNA, 22 nt, Human
ugucuuuaaagcggauguagag

SEQ ID NO: 884702 - RNA, 20 nt, Human
ugugguagugcagccucggg

SEQ ID NO: 884703 - RNA, 20 nt, Human
aaagcacccccgaggugguc

SEQ ID NO: 884704 - RNA, 20 nt, Human
acucuccugcccagaggugg

SEQ ID NO: 884705 - RNA, 24 nt, Human
acucuccugcccagagguggagac

SEQ ID NO: 884706 - RNA, 23 nt, Human
agagguggggagggguuuagggg

SEQ ID NO: 884707 - RNA, 27 nt, Human
aggcugugggggguucauggcucgucu

SEQ ID NO: 884708 - RNA, 22 nt, Human
agguggggcccugggaccgugc

SEQ ID NO: 884709 - RNA, 19 nt, Human
caaaggacacacugugagg

SEQ ID NO: 884710 - RNA, 27 nt, Human
caacaugacuucuccccucuccggucu

SEQ ID NO: 884711 - RNA, 21 nt, Human
cacucccugccccccaccccc

SEQ ID NO: 884712 - RNA, 22 nt, Human
cagcuguuaggugaggggccgg

SEQ ID NO: 884713 - RNA, 20 nt, Human
cagucgggggagguggucag

SEQ ID NO: 884714 - RNA, 28 nt, Human
ccaaaugcagaggcugugggggguucau

SEQ ID NO: 884715 - RNA, 25 nt, Human
ccagagcaagccuggccuucccugu

SEQ ID NO: 884716 - RNA, 21 nt, Human
cccccacgggccgcuuggucu

SEQ ID NO: 884717 - RNA, 22 nt, Human
ccccucagaagcagcuauagau

SEQ ID NO: 884718 - RNA, 20 nt, Human
cccggcucccagccccucag

SEQ ID NO: 884719 - RNA, 19 nt, Human
cccucagaagcagcuauag

SEQ ID NO: 884720 - RNA, 22 nt, Human
cccugccccccaccccccacgg

SEQ ID NO: 884721 - RNA, 21 nt, Human
ccucuccggucugguaggaac

SEQ ID NO: 884722 - RNA, 21 nt, Human
ccucugggagcauaaaagucc

SEQ ID NO: 884723 - RNA, 20 nt, Human
ccuucccuguccucccuccc

SEQ ID NO: 884724 - RNA, 18 nt, Human
cuaccaggggccgggggg

SEQ ID NO: 884725 - RNA, 19 nt, Human
cucccaugucuguccugca

SEQ ID NO: 884726 - RNA, 20 nt, Human
cucccugccccccacccccc

SEQ ID NO: 884727 - RNA, 20 nt, Human
cugcucagcuccuuugcccu

SEQ ID NO: 884728 - RNA, 21 nt, Human
cuggguccuccagcugguggg

SEQ ID NO: 884729 - RNA, 24 nt, Human
gagaaagcacccccgagguggucg

SEQ ID NO: 884730 - RNA, 24 nt, Human
gcccugggaccgugccccagcccc

SEQ ID NO: 884731 - RNA, 21 nt, Human
gcugugggggguucauggcuc

SEQ ID NO: 884732 - RNA, 18 nt, Human
ggacgagggcggacucgu

SEQ ID NO: 884733 - RNA, 21 nt, Human
ggaggugggcugggcuuggga

SEQ ID NO: 884734 - RNA, 23 nt, Human
ggcccggcucccagccccucaga

SEQ ID NO: 884735 - RNA, 19 nt, Human
ggccgggggagggaggugg

SEQ ID NO: 884736 - RNA, 20 nt, Human
ggccgggggagggagguggg

SEQ ID NO: 884737 - RNA, 19 nt, Human
ggcugggcuugggauggcu

SEQ ID NO: 884738 - RNA, 20 nt, Human
gggagggaggugggcugggc

SEQ ID NO: 884739 - RNA, 22 nt, Human
gggcugggcuugggauggcugc

SEQ ID NO: 884740 - RNA, 22 nt, Human
ggggagggaggugggcugggcc

SEQ ID NO: 884741 - RNA, 22 nt, Human
ggguaaggaggguggcuggggc

SEQ ID NO: 884742 - RNA, 21 nt, Human
ggguggcauggaguggggccu

SEQ ID NO: 884743 - RNA, 23 nt, Human
gugguacacucccugccccccac

SEQ ID NO: 884744 - RNA, 22 nt, Human
uaaggaacagcuauuaggucca

SEQ ID NO: 884745 - RNA, 18 nt, Human
uaaggugagguccccaaa

SEQ ID NO: 884746 - RNA, 24 nt, Human
uacacucccugccccccacccccc

SEQ ID NO: 884747 - RNA, 23 nt, Human
uaccaggggccgggggagggagg

SEQ ID NO: 884748 - RNA, 24 nt, Human
uagguccagaguggcagucggggg

SEQ ID NO: 884749 - RNA, 23 nt, Human
uaguugggguaagccggccuggg

SEQ ID NO: 884750 - RNA, 19 nt, Human
ucccagagcaagccuggcc

SEQ ID NO: 884751 - RNA, 19 nt, Human
ucccugccccccacccccc

SEQ ID NO: 884752 - RNA, 23 nt, Human
ucccugccccccaccccccacgg

SEQ ID NO: 884753 - RNA, 20 nt, Human
ucccuguccucccucccaug

SEQ ID NO: 884754 - RNA, 21 nt, Human
ucuccuaaggugaggucccca

SEQ ID NO: 884755 - RNA, 21 nt, Human
ucugcacggcggcggccgucg

SEQ ID NO: 884756 - RNA, 19 nt, Human
ugagcugggggcaggcggu

SEQ ID NO: 884757 - RNA, 22 nt, Human
ugaggcuggguccuccagcugg

SEQ ID NO: 884758 - RNA, 23 nt, Human
ugcccuggcggaagcuguaaaug

SEQ ID NO: 884759 - RNA, 20 nt, Human
ugccuaccaggggccggggg

SEQ ID NO: 884760 - RNA, 27 nt, Human
uggaguggggccuaaggaacagcuauu

SEQ ID NO: 884761 - RNA, 26 nt, Human
uggcacaaaggacacacugugaggcu

SEQ ID NO: 884762 - RNA, 23 nt, Human
uggcucgucucucccaggggccc

SEQ ID NO: 884763 - RNA, 18 nt, Human
uggcugcucagcuccuuu

SEQ ID NO: 884764 - RNA, 21 nt, Human
uggcuggggcgggguaguugg

SEQ ID NO: 884765 - RNA, 22 nt, Human
uggcuggggcgggguaguuggg

SEQ ID NO: 884766 - RNA, 19 nt, Human
ugggauggcugcucagcuc

SEQ ID NO: 884767 - RNA, 21 nt, Human
ugggcugggcuugggauggcu

SEQ ID NO: 884768 - RNA, 18 nt, Human
uggggagggguuuagggg

SEQ ID NO: 884769 - RNA, 20 nt, Human
ugggggcaggcggucccuuu

SEQ ID NO: 884770 - RNA, 27 nt, Human
ugguacacucccugccccccacccccc

SEQ ID NO: 884771 - RNA, 19 nt, Human
ugucaggguugcagcaggg

SEQ ID NO: 884772 - RNA, 20 nt, Human
ugugggggguucauggcucg

SEQ ID NO: 884773 - RNA, 23 nt, Human
uuaggggcaacaugacuucuccc

SEQ ID NO: 884774 - RNA, 24 nt, Human
acgcgcuuaucuuccuccuccccc

SEQ ID NO: 884775 - RNA, 19 nt, Human
cacgcgcuuaucuuccucc

SEQ ID NO: 884776 - RNA, 19 nt, Human
ccaccggagucucaggagg

SEQ ID NO: 884777 - RNA, 23 nt, Human
ccucacgcgcuuaucuuccuccu

SEQ ID NO: 884778 - RNA, 20 nt, Human
gagucucaggaggcugggga

SEQ ID NO: 884779 - RNA, 23 nt, Human
uaaacuuuauuccuaauaugaaa

SEQ ID NO: 884780 - RNA, 22 nt, Human
ucgcagcguuuucccgccuuuu

SEQ ID NO: 884781 - RNA, 21 nt, Human
ucucaggaggcuggggaggac

SEQ ID NO: 884782 - RNA, 24 nt, Human
ugaaggcccuguggggcgagucgu

SEQ ID NO: 884783 - RNA, 24 nt, Human
ugaccgaccgccacgagccugcaa

SEQ ID NO: 884784 - RNA, 23 nt, Human
uggaaagaaggggucugaaggcc

SEQ ID NO: 884785 - RNA, 18 nt, Human
uggggaggacacuggaag

SEQ ID NO: 884786 - RNA, 23 nt, Human
uuuuuuuuuuuuuucuucaaaau

SEQ ID NO: 884787 - RNA, 23 nt, Human
uuuuuuuuuuuuuuuuuucuuca

SEQ ID NO: 884788 - RNA, 22 nt, Human
uuuuuuuuuuuuuuuuuuucuu

SEQ ID NO: 884789 - RNA, 22 nt, Human
aaaaaaccaagccccacagcga

SEQ ID NO: 884790 - RNA, 21 nt, Human
agcccccccgcccccccaccc

SEQ ID NO: 884791 - RNA, 19 nt, Human
aucuccgcucccuccuccc

SEQ ID NO: 884792 - RNA, 19 nt, Human
caaaaaaccaagccccaca

SEQ ID NO: 884793 - RNA, 20 nt, Human
caaaaaaccaagccccacag

SEQ ID NO: 884794 - RNA, 21 nt, Human
caagccccacagcgaucggag

SEQ ID NO: 884795 - RNA, 21 nt, Human
cacauuuaaaagcuguugucu

SEQ ID NO: 884796 - RNA, 20 nt, Human
cacccccaaaaaaccaagcc

SEQ ID NO: 884797 - RNA, 27 nt, Human
caccuaaacaaagggccacucagaaac

SEQ ID NO: 884798 - RNA, 22 nt, Human
ccaagccccacagcgaucggag

SEQ ID NO: 884799 - RNA, 19 nt, Human
ccacccccaaaaaaccaag

SEQ ID NO: 884800 - RNA, 20 nt, Human
cccaaaaaaccaagccccac

SEQ ID NO: 884801 - RNA, 22 nt, Human
cccacccccaaaaaaccaagcc

SEQ ID NO: 884802 - RNA, 18 nt, Human
ccccaaaaaaccaagccc

SEQ ID NO: 884803 - RNA, 21 nt, Human
ccccacccccaaaaaaccaag

SEQ ID NO: 884804 - RNA, 30 nt, Human
ccccacccccaaaaaaccaagccccacagg

SEQ ID NO: 884805 - RNA, 19 nt, Human
cccccaaaaaaccaagccc

SEQ ID NO: 884806 - RNA, 22 nt, Human
cccccaaaaaaccaagccccac

SEQ ID NO: 884807 - RNA, 25 nt, Human
cccccacccccaaaaaaccaagccc

SEQ ID NO: 884808 - RNA, 24 nt, Human
cccccccgcccccccacccccaaa

SEQ ID NO: 884809 - RNA, 19 nt, Human
ccccccgcccccccacccc

SEQ ID NO: 884810 - RNA, 22 nt, Human
ccccccgcccccccacccccaa

SEQ ID NO: 884811 - RNA, 18 nt, Human
cccccgcccccccacccc

SEQ ID NO: 884812 - RNA, 28 nt, Human
cccccgcccccccacccccaaaaaacca

SEQ ID NO: 884813 - RNA, 21 nt, Human
ccccgcccccccacccccaaa

SEQ ID NO: 884814 - RNA, 22 nt, Human
cccgcccccccacccccaaaaa

SEQ ID NO: 884815 - RNA, 21 nt, Human
cccgggcuccuccgaaucucu

SEQ ID NO: 884816 - RNA, 18 nt, Human
cccuccucccccuccucc

SEQ ID NO: 884817 - RNA, 21 nt, Human
ccgagccccgagaucuccgcu

SEQ ID NO: 884818 - RNA, 22 nt, Human
ccgagccccgagaucuccgcuc

SEQ ID NO: 884819 - RNA, 20 nt, Human
ccggggcagcggcgagccuc

SEQ ID NO: 884820 - RNA, 19 nt, Human
ccucccccuccuccucccc

SEQ ID NO: 884821 - RNA, 20 nt, Human
ccuccgaaucucucugcgag

SEQ ID NO: 884822 - RNA, 21 nt, Human
ccuccucccccccgcccgggc

SEQ ID NO: 884823 - RNA, 25 nt, Human
cgagaucuccgcucccuccuccccc

SEQ ID NO: 884824 - RNA, 20 nt, Human
cgaucggagcggagcggcgg

SEQ ID NO: 884825 - RNA, 20 nt, Human
cgcccccccacccccaaaaa

SEQ ID NO: 884826 - RNA, 21 nt, Human
cggagcggagcggcggccggc

SEQ ID NO: 884827 - RNA, 21 nt, Human
cggcggagccggggcagcggc

SEQ ID NO: 884828 - RNA, 20 nt, Human
cggggcagcggcgagccucg

SEQ ID NO: 884829 - RNA, 22 nt, Human
gagcccccccgcccccccaccc

SEQ ID NO: 884830 - RNA, 23 nt, Human
gagcccccccgcccccccacccc

SEQ ID NO: 884831 - RNA, 18 nt, Human
gagcggagcggcggccgg

SEQ ID NO: 884832 - RNA, 28 nt, Human
gccccacagcgaucggagcggagcggcg

SEQ ID NO: 884833 - RNA, 19 nt, Human
ggagugaggcugguggggg

SEQ ID NO: 884834 - RNA, 19 nt, Human
ucccuccucccccuccucc

SEQ ID NO: 884835 - RNA, 21 nt, Human
uccgcucccuccucccccucc

SEQ ID NO: 884836 - RNA, 19 nt, Human
ucugaggacaucaccuaaa

SEQ ID NO: 884837 - RNA, 20 nt, Human
ucuuauauuacagcagauuc

SEQ ID NO: 884838 - RNA, 25 nt, Human
ugagcccccccgcccccccaccccc

SEQ ID NO: 884839 - RNA, 19 nt, Human
ugggauggggagugaggcu

SEQ ID NO: 884840 - RNA, 21 nt, Human
uggggagugaggcuggugggg

SEQ ID NO: 884841 - RNA, 18 nt, Human
uuuuuuuuuuuuuugggu

SEQ ID NO: 884842 - RNA, 22 nt, Human
uuuuuuuuuuuuuuuuuggguu

SEQ ID NO: 884843 - RNA, 21 nt, Human
uuuuuuuuuuuuuuuuuuggg

SEQ ID NO: 884844 - RNA, 24 nt, Human
aaaaaaggcuggggaaggcccagg

SEQ ID NO: 884845 - RNA, 19 nt, Human
aacuuagauccuucagcag

SEQ ID NO: 884846 - RNA, 20 nt, Human
aagcacagcaccacaaaaga

SEQ ID NO: 884847 - RNA, 22 nt, Human
aagcugcauccaccaaaaccca

SEQ ID NO: 884848 - RNA, 23 nt, Human
acacacacacacacacacacaca

SEQ ID NO: 884849 - RNA, 23 nt, Human
acacacacacacacacacacaca

SEQ ID NO: 884850 - RNA, 25 nt, Human
acacacacacacacacacacagagg

SEQ ID NO: 884851 - RNA, 18 nt, Human
acacauaugcacacacac

SEQ ID NO: 884852 - RNA, 19 nt, Human
acagcacaguccgacuggu

SEQ ID NO: 884853 - RNA, 18 nt, Human
acagugaauccucaucuc

SEQ ID NO: 884854 - RNA, 21 nt, Human
accacaaaagacucugacggg

SEQ ID NO: 884855 - RNA, 22 nt, Human
acgacauuucccaugaaucccc

SEQ ID NO: 884856 - RNA, 25 nt, Human
acgacauuucccaugaauccccugg

SEQ ID NO: 884857 - RNA, 21 nt, Human
acguugaugauuugcaggaac

SEQ ID NO: 884858 - RNA, 25 nt, Human
acugaaagguggagaaagcugagaa

SEQ ID NO: 884859 - RNA, 18 nt, Human
agaaucuuuaaaaauacc

SEQ ID NO: 884860 - RNA, 20 nt, Human
agaggaauaggugccccaga

SEQ ID NO: 884861 - RNA, 19 nt, Human
agaguugacagcucugcug

SEQ ID NO: 884862 - RNA, 22 nt, Human
agccccaucagccccugcccag

SEQ ID NO: 884863 - RNA, 20 nt, Human
agccggugcugugcagagca

SEQ ID NO: 884864 - RNA, 23 nt, Human
agcuggcgaguccaggcacguug

SEQ ID NO: 884865 - RNA, 18 nt, Human
agcugggcuaggcugggc

SEQ ID NO: 884866 - RNA, 22 nt, Human
agcuuucucuccauagcaguuu

SEQ ID NO: 884867 - RNA, 19 nt, Human
aggaacauccacgguacuc

SEQ ID NO: 884868 - RNA, 21 nt, Human
aggcaguccaccuggaccucc

SEQ ID NO: 884869 - RNA, 21 nt, Human
aggcuuuuagcuggcgagucc

SEQ ID NO: 884870 - RNA, 19 nt, Human
auaaaauaaaacccgcccc

SEQ ID NO: 884871 - RNA, 21 nt, Human
aucuuggccccuggcuucuca

SEQ ID NO: 884872 - RNA, 20 nt, Human
augaugccacacauggccag

SEQ ID NO: 884873 - RNA, 23 nt, Human
auggacacuccuguaggaacauc

SEQ ID NO: 884874 - RNA, 18 nt, Human
cacacacacacacacaca

SEQ ID NO: 884875 - RNA, 20 nt, Human
cacacacacacacacacaca

SEQ ID NO: 884876 - RNA, 20 nt, Human
cacacacacacacacacaca

SEQ ID NO: 884877 - RNA, 20 nt, Human
cacacacacacacacacaca

SEQ ID NO: 884878 - RNA, 20 nt, Human
cacacacacacacacacaca

SEQ ID NO: 884879 - RNA, 20 nt, Human
cacacacacacacacacaca

SEQ ID NO: 884880 - RNA, 22 nt, Human
cacacacacacacacacacaca

SEQ ID NO: 884881 - RNA, 26 nt, Human
cacacacacacacacacacacacaca

SEQ ID NO: 884882 - RNA, 26 nt, Human
cacacacacacacacacacacacaca

SEQ ID NO: 884883 - RNA, 18 nt, Human
cacacagaggcagcagac

SEQ ID NO: 884884 - RNA, 20 nt, Human
cacacauaugcacacacaca

SEQ ID NO: 884885 - RNA, 26 nt, Human
cacacauggccagucaccauggccag

SEQ ID NO: 884886 - RNA, 23 nt, Human
cacagcaccacaaaagacucuga

SEQ ID NO: 884887 - RNA, 27 nt, Human
cacagcaccacaaaagacucugacggg

SEQ ID NO: 884888 - RNA, 20 nt, Human
caccacaaaagacucugacg

SEQ ID NO: 884889 - RNA, 22 nt, Human
caccacaaaagacucugacggg

SEQ ID NO: 884890 - RNA, 21 nt, Human
cagcagccggugcugugcaga

SEQ ID NO: 884891 - RNA, 18 nt, Human
cagcagggggucugggug

SEQ ID NO: 884892 - RNA, 19 nt, Human
cagccucuccagcuugcuc

SEQ ID NO: 884893 - RNA, 22 nt, Human
cagccucuccagcuugcucuuc

SEQ ID NO: 884894 - RNA, 18 nt, Human
cagcuugcucuucugggg

SEQ ID NO: 884895 - RNA, 23 nt, Human
cagcuuuucaccgaagacggucc

SEQ ID NO: 884896 - RNA, 21 nt, Human
caggacagcuccugggaauga

SEQ ID NO: 884897 - RNA, 20 nt, Human
ccaaaacccacgauccaucc

SEQ ID NO: 884898 - RNA, 30 nt, Human
ccaacuuagauccuucagcagggcugccuu

SEQ ID NO: 884899 - RNA, 18 nt, Human
ccaccugggccgcuggca

SEQ ID NO: 884900 - RNA, 26 nt, Human
ccagaaauauucuguaggacucuaag

SEQ ID NO: 884901 - RNA, 20 nt, Human
ccagagucuucacagcagcc

SEQ ID NO: 884902 - RNA, 19 nt, Human
ccagcuugcucuucugggg

SEQ ID NO: 884903 - RNA, 21 nt, Human
ccaggacagcaauggcgccac

SEQ ID NO: 884904 - RNA, 21 nt, Human
ccauccaucuauggacacucc

SEQ ID NO: 884905 - RNA, 22 nt, Human
ccccagcagcuugugaccaaau

SEQ ID NO: 884906 - RNA, 19 nt, Human
cccugggggucuugggcug

SEQ ID NO: 884907 - RNA, 20 nt, Human
cccuugagcggccauggccu

SEQ ID NO: 884908 - RNA, 26 nt, Human
ccgccccagcagcuugugaccaaaug

SEQ ID NO: 884909 - RNA, 26 nt, Human
ccucccuggggccccugggagccuac

SEQ ID NO: 884910 - RNA, 20 nt, Human
ccugggaugcagaaacaguu

SEQ ID NO: 884911 - RNA, 24 nt, Human
cucauaaagccaacgggagcagcu

SEQ ID NO: 884912 - RNA, 18 nt, Human
cucuccagcuugcucuuc

SEQ ID NO: 884913 - RNA, 21 nt, Human
cucuccagcuugcucuucugg

SEQ ID NO: 884914 - RNA, 22 nt, Human
cuggcagaggaauaggugcccc

SEQ ID NO: 884915 - RNA, 23 nt, Human
cuuggccccuggcuucucaaccg

SEQ ID NO: 884916 - RNA, 22 nt, Human
gaagaccaucgcugggggcugc

SEQ ID NO: 884917 - RNA, 23 nt, Human
gacuggugacauccacggcacca

SEQ ID NO: 884918 - RNA, 21 nt, Human
gagaagaaaucccaaaguccc

SEQ ID NO: 884919 - RNA, 19 nt, Human
gagcccugggaugcagaaa

SEQ ID NO: 884920 - RNA, 23 nt, Human
gagcggccauggccugccugagc

SEQ ID NO: 884921 - RNA, 25 nt, Human
gaguggcaaugcacacauaugcaca

SEQ ID NO: 884922 - RNA, 18 nt, Human
gccagcccaaacaaggau

SEQ ID NO: 884923 - RNA, 24 nt, Human
gccccagaaaaaaggcuggggaag

SEQ ID NO: 884924 - RNA, 20 nt, Human
ggaauaggugccccagaaaa

SEQ ID NO: 884925 - RNA, 22 nt, Human
ggaauaggugccccagaaaaaa

SEQ ID NO: 884926 - RNA, 19 nt, Human
ggagcaggacuggcagagg

SEQ ID NO: 884927 - RNA, 19 nt, Human
ggccauggccugccugagc

SEQ ID NO: 884928 - RNA, 22 nt, Human
ggcuucuggacuuuuuggagaa

SEQ ID NO: 884929 - RNA, 18 nt, Human
gggggcugcugcagacag

SEQ ID NO: 884930 - RNA, 21 nt, Human
gguuucugaaaaacuugggag

SEQ ID NO: 884931 - RNA, 26 nt, Human
uagcuuucucuccauagcaguuuuua

SEQ ID NO: 884932 - RNA, 24 nt, Human
uaugcacacacacacacacacaca

SEQ ID NO: 884933 - RNA, 25 nt, Human
uaugcacacacacacacacacacac

SEQ ID NO: 884934 - RNA, 21 nt, Human
ucagagaagcaagaauuccca

SEQ ID NO: 884935 - RNA, 20 nt, Human
ucauaaagccaacgggagca

SEQ ID NO: 884936 - RNA, 19 nt, Human
uccaccaaaacccacgauc

SEQ ID NO: 884937 - RNA, 19 nt, Human
uccagcuugcucuucuggg

SEQ ID NO: 884938 - RNA, 20 nt, Human
uccaucuauggacacuccug

SEQ ID NO: 884939 - RNA, 18 nt, Human
uccaucuuggccccuggc

SEQ ID NO: 884940 - RNA, 22 nt, Human
ucccaaagucccaggacagcuc

SEQ ID NO: 884941 - RNA, 23 nt, Human
ucccaggacagcaauggcgccac

SEQ ID NO: 884942 - RNA, 18 nt, Human
ucccaggacagcuccugg

SEQ ID NO: 884943 - RNA, 18 nt, Human
ucccaugaauccccuggg

SEQ ID NO: 884944 - RNA, 19 nt, Human
uccccaguguacccagccc

SEQ ID NO: 884945 - RNA, 20 nt, Human
uccccaguguacccagcccc

SEQ ID NO: 884946 - RNA, 22 nt, Human
ucccugaguaucuccuaggggc

SEQ ID NO: 884947 - RNA, 19 nt, Human
ucccuggggccccugggag

SEQ ID NO: 884948 - RNA, 24 nt, Human
uccuccaggcuuagcugaugucga

SEQ ID NO: 884949 - RNA, 20 nt, Human
ucgcugggggcugcugcaga

SEQ ID NO: 884950 - RNA, 22 nt, Human
ucuccagguaauuuccagccuu

SEQ ID NO: 884951 - RNA, 19 nt, Human
ucucugaggggaagagucc

SEQ ID NO: 884952 - RNA, 18 nt, Human
ucuggacuuuuuggagaa

SEQ ID NO: 884953 - RNA, 22 nt, Human
ugaaacaacugagaaacugaaa

SEQ ID NO: 884954 - RNA, 22 nt, Human
ugacauccacggcaccagcagg

SEQ ID NO: 884955 - RNA, 23 nt, Human
ugagaagaaaucccaaaguccca

SEQ ID NO: 884956 - RNA, 19 nt, Human
ugagaagcacagcaccaca

SEQ ID NO: 884957 - RNA, 19 nt, Human
ugagcugggcuaggcuggg

SEQ ID NO: 884958 - RNA, 25 nt, Human
ugcacacacacacacacacacacac

SEQ ID NO: 884959 - RNA, 31 nt, Human
ugcacacauaugcacacacacacacacacag

SEQ ID NO: 884960 - RNA, 21 nt, Human
ugccccagaaaaaaggcuggg

SEQ ID NO: 884961 - RNA, 18 nt, Human
ugccugagcugggcuagg

SEQ ID NO: 884962 - RNA, 22 nt, Human
ugccugagcugggcuaggcugg

SEQ ID NO: 884963 - RNA, 24 nt, Human
uggcagaggaauaggugccccaga

SEQ ID NO: 884964 - RNA, 22 nt, Human
uggccagagucuucacagcagc

SEQ ID NO: 884965 - RNA, 21 nt, Human
uggccccuggcuucucaaccu

SEQ ID NO: 884966 - RNA, 18 nt, Human
uggcuucucaaccugccc

SEQ ID NO: 884967 - RNA, 22 nt, Human
ugggcucugggcuccaccuccu

SEQ ID NO: 884968 - RNA, 23 nt, Human
uggggaaggcccaggcuuuuagc

SEQ ID NO: 884969 - RNA, 24 nt, Human
uggggccccugggagccuacgcgg

SEQ ID NO: 884970 - RNA, 19 nt, Human
ugggggcugcugcagacag

SEQ ID NO: 884971 - RNA, 19 nt, Human
ugugcagagcagcaggcca

SEQ ID NO: 884972 - RNA, 26 nt, Human
uuuuaggucacacaacuuuuauugcu

SEQ ID NO: 884973 - RNA, 23 nt, Human
uuuuuuuuuuuuuuuuuuuuagg

SEQ ID NO: 884974 - RNA, 19 nt, Human
aagcaaagcauuagaauuc

SEQ ID NO: 884975 - RNA, 21 nt, Human
aagcaaagcauuagaauucau

SEQ ID NO: 884976 - RNA, 19 nt, Human
accccagaagacacaggaa

SEQ ID NO: 884977 - RNA, 20 nt, Human
agaagacacaggaaaccgca

SEQ ID NO: 884978 - RNA, 22 nt, Human
agaagacacaggaaaccgcaca

SEQ ID NO: 884979 - RNA, 22 nt, Human
agacacaggaaaccgcacagcu

SEQ ID NO: 884980 - RNA, 23 nt, Human
agaccccagaagacacaggaaac

SEQ ID NO: 884981 - RNA, 18 nt, Human
agccgaaggguggucccg

SEQ ID NO: 884982 - RNA, 22 nt, Human
auacuucgguaaacccaaucug

SEQ ID NO: 884983 - RNA, 20 nt, Human
auccuguccagcaaccuccc

SEQ ID NO: 884984 - RNA, 26 nt, Human
auuaaaacaaacauuucucauagcuc

SEQ ID NO: 884985 - RNA, 18 nt, Human
caaccucccagcucacac

SEQ ID NO: 884986 - RNA, 20 nt, Human
caaccucccagcucacaccu

SEQ ID NO: 884987 - RNA, 25 nt, Human
cacucccaccauaacuuauuaggag

SEQ ID NO: 884988 - RNA, 19 nt, Human
cagaccccagaagacacag

SEQ ID NO: 884989 - RNA, 22 nt, Human
cagaccccagaagacacaggaa

SEQ ID NO: 884990 - RNA, 23 nt, Human
cagaccccagaagacacaggaaa

SEQ ID NO: 884991 - RNA, 27 nt, Human
cagcaaccucccagcucacaccuuagc

SEQ ID NO: 884992 - RNA, 26 nt, Human
cagcaucccugcuaucuucacucaga

SEQ ID NO: 884993 - RNA, 22 nt, Human
cauuucucauagcucuaagcaa

SEQ ID NO: 884994 - RNA, 21 nt, Human
ccaagaagggugaacacagca

SEQ ID NO: 884995 - RNA, 22 nt, Human
ccccagaagacacaggaaaccc

SEQ ID NO: 884996 - RNA, 18 nt, Human
ccgcacagcuccacuccc

SEQ ID NO: 884997 - RNA, 21 nt, Human
ccggcagcggagccgcagccg

SEQ ID NO: 884998 - RNA, 25 nt, Human
cggcagagagugggguccgcggcca

SEQ ID NO: 884999 - RNA, 23 nt, Human
cggcaggggcgcgggcgggcggc

SEQ ID NO: 885000 - RNA, 21 nt, Human
cgggcggcgcggggcgcugcu

SEQ ID NO: 885001 - RNA, 22 nt, Human
cgguaaacccaaucuguauaaa

SEQ ID NO: 885002 - RNA, 20 nt, Human
cugaggcuauacacguuugc

SEQ ID NO: 885003 - RNA, 23 nt, Human
cuggggucccccauccuguccag

SEQ ID NO: 885004 - RNA, 24 nt, Human
gagccgcagccggaacggcagaga

SEQ ID NO: 885005 - RNA, 26 nt, Human
gccggaacggcagagagugggguccg

SEQ ID NO: 885006 - RNA, 21 nt, Human
gcgcgggcgggcggcgcgggg

SEQ ID NO: 885007 - RNA, 18 nt, Human
ggacuucugggguccccc

SEQ ID NO: 885008 - RNA, 23 nt, Human
ggcgcgggcgggcggcgcggggc

SEQ ID NO: 885009 - RNA, 19 nt, Human
uaccaagaagggugaacac

SEQ ID NO: 885010 - RNA, 27 nt, Human
uaccaagaagggugaacacagcauccc

SEQ ID NO: 885011 - RNA, 23 nt, Human
uagcuucuaccaagaagggugaa

SEQ ID NO: 885012 - RNA, 24 nt, Human
uauuaggagauaagucacauuuua

SEQ ID NO: 885013 - RNA, 24 nt, Human
ucacaccuuagcuucuaccaagaa

SEQ ID NO: 885014 - RNA, 20 nt, Human
uccacucccaccauaacuua

SEQ ID NO: 885015 - RNA, 22 nt, Human
uccgcggccggaaccggggggc

SEQ ID NO: 885016 - RNA, 23 nt, Human
uccgcggccggaaccggggggcg

SEQ ID NO: 885017 - RNA, 22 nt, Human
ucucauagcucuaagcaaagca

SEQ ID NO: 885018 - RNA, 23 nt, Human
ugaaagcauuuuuacuggaaccu

SEQ ID NO: 885019 - RNA, 19 nt, Human
uggaaccucaaaggcccac

SEQ ID NO: 885020 - RNA, 23 nt, Human
uuuacuggaaccucaaaggccca

SEQ ID NO: 885021 - RNA, 18 nt, Human
uuugcaaauuguaaggca

SEQ ID NO: 885022 - RNA, 18 nt, Human
aaaaaggcaucacccaca

SEQ ID NO: 885023 - RNA, 24 nt, Human
aaaaauauucauuuaacccauaac

SEQ ID NO: 885024 - RNA, 26 nt, Human
aaacauuagcuaucaaaacuaaauau

SEQ ID NO: 885025 - RNA, 19 nt, Human
aaaccccuaaaacacugga

SEQ ID NO: 885026 - RNA, 21 nt, Human
aaacugugcagauccaaacaa

SEQ ID NO: 885027 - RNA, 27 nt, Human
aaagaauuuucuuggcauacaacacca

SEQ ID NO: 885028 - RNA, 24 nt, Human
aacugugcaaucuaauuuaaccuu

SEQ ID NO: 885029 - RNA, 18 nt, Human
aagaaaaaggcaucaccc

SEQ ID NO: 885030 - RNA, 20 nt, Human
aauagcuucuuccaaaucuu

SEQ ID NO: 885031 - RNA, 19 nt, Human
aaucauugagcugccugga

SEQ ID NO: 885032 - RNA, 21 nt, Human
acagaaaucauccuguacuau

SEQ ID NO: 885033 - RNA, 20 nt, Human
acagggucucaaaugugaua

SEQ ID NO: 885034 - RNA, 18 nt, Human
accuagaaacagauuaca

SEQ ID NO: 885035 - RNA, 23 nt, Human
acuagaauacaggugaaacuagu

SEQ ID NO: 885036 - RNA, 21 nt, Human
acuguaauugugcuucaguua

SEQ ID NO: 885037 - RNA, 22 nt, Human
agaaauagggauacuuaaaagc

SEQ ID NO: 885038 - RNA, 19 nt, Human
agaugauuauaaacuguaa

SEQ ID NO: 885039 - RNA, 20 nt, Human
agcuaucaaaacuaaauauc

SEQ ID NO: 885040 - RNA, 18 nt, Human
auaggcaccaauaaaaag

SEQ ID NO: 885041 - RNA, 22 nt, Human
aucagauauuuaaucacaugac

SEQ ID NO: 885042 - RNA, 19 nt, Human
auccaaaaggcacauggag

SEQ ID NO: 885043 - RNA, 24 nt, Human
augaagaacaaaaauauauaaaua

SEQ ID NO: 885044 - RNA, 21 nt, Human
caccuagaaacagauuacagg

SEQ ID NO: 885045 - RNA, 22 nt, Human
caccuagaaacagauuacagga

SEQ ID NO: 885046 - RNA, 21 nt, Human
cauuaaaaauaauuguuacaa

SEQ ID NO: 885047 - RNA, 18 nt, Human
cccgccgcugaagcagcc

SEQ ID NO: 885048 - RNA, 19 nt, Human
cccgccgcugaagcagccg

SEQ ID NO: 885049 - RNA, 21 nt, Human
cccgccgcugaagcagccgcg

SEQ ID NO: 885050 - RNA, 25 nt, Human
ccuagaaacagauuacaggacgaau

SEQ ID NO: 885051 - RNA, 22 nt, Human
ccucuguugcuguacauugccu

SEQ ID NO: 885052 - RNA, 21 nt, Human
ccuucaacauuaccaaacacc

SEQ ID NO: 885053 - RNA, 18 nt, Human
cgccgcugaagcagccgc

SEQ ID NO: 885054 - RNA, 21 nt, Human
cuccgcuucugcggcgguggc

SEQ ID NO: 885055 - RNA, 21 nt, Human
cuuggcauacaacaccacaac

SEQ ID NO: 885056 - RNA, 22 nt, Human
cuuuguguggacagaaaucauc

SEQ ID NO: 885057 - RNA, 19 nt, Human
gaaaaaggcaucacccaca

SEQ ID NO: 885058 - RNA, 24 nt, Human
gaaagguauucauccucguaacuu

SEQ ID NO: 885059 - RNA, 24 nt, Human
gcaaaauuaucuccagacuucuac

SEQ ID NO: 885060 - RNA, 25 nt, Human
gcaaaauuaucuccagacuucuaca

SEQ ID NO: 885061 - RNA, 21 nt, Human
gcuugauaauuuacaaaagcu

SEQ ID NO: 885062 - RNA, 22 nt, Human
ggugaugacugggaccugggcu

SEQ ID NO: 885063 - RNA, 25 nt, Human
guaaaauugccucuucuaccuaaaa

SEQ ID NO: 885064 - RNA, 23 nt, Human
uaaaagaaaaaggcaucacccac

SEQ ID NO: 885065 - RNA, 24 nt, Human
uaagaaauagggauacuuaaaagc

SEQ ID NO: 885066 - RNA, 19 nt, Human
uacaaaaauauucauuuaa

SEQ ID NO: 885067 - RNA, 19 nt, Human
uacaacaccacaacaacuu

SEQ ID NO: 885068 - RNA, 22 nt, Human
uagcuauaaugaauaagcaaua

SEQ ID NO: 885069 - RNA, 21 nt, Human
uaguaccauaaauauaaguga

SEQ ID NO: 885070 - RNA, 22 nt, Human
uaguaccauaaauauaagugaa

SEQ ID NO: 885071 - RNA, 18 nt, Human
uccaaauccaagcagaua

SEQ ID NO: 885072 - RNA, 22 nt, Human
ucccaggcuuuucgaucggggc

SEQ ID NO: 885073 - RNA, 23 nt, Human
ucggcggcccucccaggcuuuuc

SEQ ID NO: 885074 - RNA, 23 nt, Human
ucucaacauuuacuagaauacag

SEQ ID NO: 885075 - RNA, 19 nt, Human
ucugcggcgguggcgccuu

SEQ ID NO: 885076 - RNA, 18 nt, Human
ugaaaauuaacugugcaa

SEQ ID NO: 885077 - RNA, 21 nt, Human
ugaagaacaaaaauauauaaa

SEQ ID NO: 885078 - RNA, 24 nt, Human
ugacugugaaauuuaaauauuuau

SEQ ID NO: 885079 - RNA, 20 nt, Human
ugacuuauuuacaccucccc

SEQ ID NO: 885080 - RNA, 19 nt, Human
ugagcugccuggaauauca

SEQ ID NO: 885081 - RNA, 21 nt, Human
ugauaaacgccaucacaaaau

SEQ ID NO: 885082 - RNA, 24 nt, Human
ugcauuaaaaauaauuguuacaau

SEQ ID NO: 885083 - RNA, 22 nt, Human
uggcauacaacaccacaacaac

SEQ ID NO: 885084 - RNA, 18 nt, Human
uggggcucucugggucca

SEQ ID NO: 885085 - RNA, 23 nt, Human
ugugcaaaaaccaaacugugcag

SEQ ID NO: 885086 - RNA, 19 nt, Human
uguguggacagaaaucauc

SEQ ID NO: 885087 - RNA, 22 nt, Human
uuaaacauuagcuaucaaaacu

SEQ ID NO: 885088 - RNA, 21 nt, Human
uugaagcuugauaauuuacaa

SEQ ID NO: 885089 - RNA, 22 nt, Human
uugaagcuugauaauuuacaaa

SEQ ID NO: 885090 - RNA, 19 nt, Human
uugacguagguuugguggg

SEQ ID NO: 885091 - RNA, 21 nt, Human
uuuucgaucggggccuuucug

SEQ ID NO: 885092 - RNA, 23 nt, Human
uuuuuuuuuuuaaaaaaaaagcu

SEQ ID NO: 885093 - RNA, 23 nt, Human
aaaaguaucuccaggcuccaagg

SEQ ID NO: 885094 - RNA, 20 nt, Human
aaacaaacaugaacacagac

SEQ ID NO: 885095 - RNA, 19 nt, Human
aaaggcuugaucccuaaac

SEQ ID NO: 885096 - RNA, 19 nt, Human
aaaguucucacauacacuu

SEQ ID NO: 885097 - RNA, 18 nt, Human
aagaaccagaaacagagc

SEQ ID NO: 885098 - RNA, 22 nt, Human
aagaaccagaaacagagcugga

SEQ ID NO: 885099 - RNA, 22 nt, Human
aagcugcaauuaucaacaagcu

SEQ ID NO: 885100 - RNA, 18 nt, Human
aagggagugucacccaaa

SEQ ID NO: 885101 - RNA, 19 nt, Human
aaggggcccggcagccugc

SEQ ID NO: 885102 - RNA, 23 nt, Human
acaagcucuaggcccaaagccac

SEQ ID NO: 885103 - RNA, 23 nt, Human
acagacacaaaccagacccaaag

SEQ ID NO: 885104 - RNA, 20 nt, Human
acaggaucuggguguagcac

SEQ ID NO: 885105 - RNA, 18 nt, Human
acccaaaaagcccacaua

SEQ ID NO: 885106 - RNA, 24 nt, Human
acccaaaaagcccacauaggaagu

SEQ ID NO: 885107 - RNA, 27 nt, Human
agaaccagaaacagagcuggacacuua

SEQ ID NO: 885108 - RNA, 20 nt, Human
agacacaaaccagacccaaa

SEQ ID NO: 885109 - RNA, 22 nt, Human
agaggagcgggaucccagggag

SEQ ID NO: 885110 - RNA, 25 nt, Human
agauaccucugguggccuccaacug

SEQ ID NO: 885111 - RNA, 18 nt, Human
aggaagcagggagcucag

SEQ ID NO: 885112 - RNA, 21 nt, Human
aggagcgggaucccagggagg

SEQ ID NO: 885113 - RNA, 21 nt, Human
aggcaaagacaagggggucug

SEQ ID NO: 885114 - RNA, 21 nt, Human
aggcccaaagccacauggcag

SEQ ID NO: 885115 - RNA, 26 nt, Human
agggagugggggcggugagaggaggc

SEQ ID NO: 885116 - RNA, 18 nt, Human
aucccuuaaacaaacaug

SEQ ID NO: 885117 - RNA, 24 nt, Human
caaaaguaucuccaggcuccaagg

SEQ ID NO: 885118 - RNA, 26 nt, Human
caaacacacaggaaccaggaguggac

SEQ ID NO: 885119 - RNA, 24 nt, Human
caacaagcucuaggcccaaagcca

SEQ ID NO: 885120 - RNA, 19 nt, Human
caagcacacguccccaccc

SEQ ID NO: 885121 - RNA, 20 nt, Human
caagcucuaggcccaaagcc

SEQ ID NO: 885122 - RNA, 23 nt, Human
caagcucuaggcccaaagccaca

SEQ ID NO: 885123 - RNA, 21 nt, Human
caagggaagcagaaggggccc

SEQ ID NO: 885124 - RNA, 21 nt, Human
cacaaaccagacccaaaguua

SEQ ID NO: 885125 - RNA, 24 nt, Human
cacaaaccagacccaaaguuaucu

SEQ ID NO: 885126 - RNA, 18 nt, Human
cacauaggaagucgacac

SEQ ID NO: 885127 - RNA, 21 nt, Human
cacccaaaaagcccacauagg

SEQ ID NO: 885128 - RNA, 27 nt, Human
cacucuacacuguguaaaaaucagagg

SEQ ID NO: 885129 - RNA, 22 nt, Human
cagacacaaaccagacccaaag

SEQ ID NO: 885130 - RNA, 18 nt, Human
caggacaacucucagaau

SEQ ID NO: 885131 - RNA, 21 nt, Human
caggacaacucucagaauugu

SEQ ID NO: 885132 - RNA, 18 nt, Human
cagggcaguaaguacaaa

SEQ ID NO: 885133 - RNA, 19 nt, Human
cccaaaaagcccacauagg

SEQ ID NO: 885134 - RNA, 20 nt, Human
cccacaagcacacgucccca

SEQ ID NO: 885135 - RNA, 18 nt, Human
cccacagucacacauauc

SEQ ID NO: 885136 - RNA, 18 nt, Human
cccacauaggaagucgac

SEQ ID NO: 885137 - RNA, 19 nt, Human
cccauccaucaccugacgc

SEQ ID NO: 885138 - RNA, 20 nt, Human
cccuuaaacaaacaugaaca

SEQ ID NO: 885139 - RNA, 21 nt, Human
ccggcagccugcacaggaucu

SEQ ID NO: 885140 - RNA, 27 nt, Human
ccucugagaaccgagaaagccuggcuc

SEQ ID NO: 885141 - RNA, 19 nt, Human
ccuugucaagcaauaccaa

SEQ ID NO: 885142 - RNA, 26 nt, Human
cgacacccacaaaaauaaauauugca

SEQ ID NO: 885143 - RNA, 19 nt, Human
cgagaaagccuggcuccaa

SEQ ID NO: 885144 - RNA, 24 nt, Human
cgccaccugugccccacaagcaca

SEQ ID NO: 885145 - RNA, 19 nt, Human
cggggcuggaguuggggaa

SEQ ID NO: 885146 - RNA, 24 nt, Human
cuagcaaagcaguggggauugugc

SEQ ID NO: 885147 - RNA, 30 nt, Human
cuggggcugguggugugagggugucccugg

SEQ ID NO: 885148 - RNA, 18 nt, Human
gaaaagucggaggacgca

SEQ ID NO: 885149 - RNA, 24 nt, Human
gaacacagacacaaaccagaccca

SEQ ID NO: 885150 - RNA, 24 nt, Human
gaaccgagaaagccuggcuccaaa

SEQ ID NO: 885151 - RNA, 18 nt, Human
gaagcagaaggggcccgg

SEQ ID NO: 885152 - RNA, 18 nt, Human
gaggagccugggagguag

SEQ ID NO: 885153 - RNA, 19 nt, Human
gaggagccugggagguagg

SEQ ID NO: 885154 - RNA, 21 nt, Human
gaggaggccggcucggucucu

SEQ ID NO: 885155 - RNA, 19 nt, Human
gcagggcaguaaguacaaa

SEQ ID NO: 885156 - RNA, 22 nt, Human
gccuugucaagcaauaccaaaa

SEQ ID NO: 885157 - RNA, 18 nt, Human
ggaaggaggcugaagagg

SEQ ID NO: 885158 - RNA, 19 nt, Human
ggaaggaggcugaagagga

SEQ ID NO: 885159 - RNA, 22 nt, Human
ggaccugcuggggcuggaggau

SEQ ID NO: 885160 - RNA, 23 nt, Human
ggccaaacacacaggaaccagga

SEQ ID NO: 885161 - RNA, 19 nt, Human
gggaaggaggcugaagagg

SEQ ID NO: 885162 - RNA, 21 nt, Human
ggggaaggaggcugaagagga

SEQ ID NO: 885163 - RNA, 24 nt, Human
gggguaguuuaugagcuaugccug

SEQ ID NO: 885164 - RNA, 18 nt, Human
gggucaaucaggagaaca

SEQ ID NO: 885165 - RNA, 21 nt, Human
gucagauggccuuccuggagu

SEQ ID NO: 885166 - RNA, 18 nt, Human
gugcagaggagccuggga

SEQ ID NO: 885167 - RNA, 23 nt, Human
uaaacaaacaugaacacagacac

SEQ ID NO: 885168 - RNA, 22 nt, Human
uaaacaaagccuugcacccaaa

SEQ ID NO: 885169 - RNA, 20 nt, Human
uacaaaaugaaggcauacaa

SEQ ID NO: 885170 - RNA, 23 nt, Human
uacaacugucacaggcagggcag

SEQ ID NO: 885171 - RNA, 25 nt, Human
uaggcgcugcgcccagccgggcucc

SEQ ID NO: 885172 - RNA, 25 nt, Human
uauaaaacgguaacgauucccuuga

SEQ ID NO: 885173 - RNA, 23 nt, Human
uaugaaauaggaagcagggagcu

SEQ ID NO: 885174 - RNA, 21 nt, Human
ucagaggcaaagacaaggggg

SEQ ID NO: 885175 - RNA, 21 nt, Human
ucccagugagcaccaggccaa

SEQ ID NO: 885176 - RNA, 26 nt, Human
uccccacccacagucacacauauccc

SEQ ID NO: 885177 - RNA, 24 nt, Human
ucccuaaacaaagccuugcaccca

SEQ ID NO: 885178 - RNA, 18 nt, Human
ugaacacagacacaaacc

SEQ ID NO: 885179 - RNA, 24 nt, Human
ugaacacagacacaaaccagaccc

SEQ ID NO: 885180 - RNA, 25 nt, Human
ugaaggcauacaacugucacaggca

SEQ ID NO: 885181 - RNA, 22 nt, Human
ugagcaccaggccaaagaccag

SEQ ID NO: 885182 - RNA, 21 nt, Human
ugagcuaugccugucacaggg

SEQ ID NO: 885183 - RNA, 18 nt, Human
ugauuguuuuaaaguuuu

SEQ ID NO: 885184 - RNA, 24 nt, Human
ugccacaagcugcaauuaucaaca

SEQ ID NO: 885185 - RNA, 23 nt, Human
ugccccacaagcacacgucccca

SEQ ID NO: 885186 - RNA, 24 nt, Human
ugcccgggccaaacacacaggaac

SEQ ID NO: 885187 - RNA, 24 nt, Human
uggauacaaaaugaaggcauacaa

SEQ ID NO: 885188 - RNA, 24 nt, Human
uggccuccaacugcaggacaacuc

SEQ ID NO: 885189 - RNA, 25 nt, Human
uggccuccaacugcaggacaacucu

SEQ ID NO: 885190 - RNA, 21 nt, Human
ugggggcggugagaggaggcc

SEQ ID NO: 885191 - RNA, 23 nt, Human
uggugugagggugucccugccug

SEQ ID NO: 885192 - RNA, 22 nt, Human
ugucacccaaaaagcccacaua

SEQ ID NO: 885193 - RNA, 19 nt, Human
uuaaaguuuuauuguagac

SEQ ID NO: 885194 - RNA, 22 nt, Human
aaaaggagauacagugaaaagu

SEQ ID NO: 885195 - RNA, 25 nt, Human
aaaaggagauacagugaaaagucuc

SEQ ID NO: 885196 - RNA, 19 nt, Human
aacccucccuuuuccccuu

SEQ ID NO: 885197 - RNA, 22 nt, Human
aauuaguauagggaccuagagc

SEQ ID NO: 885198 - RNA, 22 nt, Human
acaagcuuuuugaucuuugcca

SEQ ID NO: 885199 - RNA, 20 nt, Human
acccuccccacaaaccacca

SEQ ID NO: 885200 - RNA, 20 nt, Human
acccugucacccuccccaca

SEQ ID NO: 885201 - RNA, 22 nt, Human
acccugucacccuccccacaaa

SEQ ID NO: 885202 - RNA, 22 nt, Human
acccugucacccuccccacaaa

SEQ ID NO: 885203 - RNA, 23 nt, Human
acccugucacccuccccacaaac

SEQ ID NO: 885204 - RNA, 25 nt, Human
acccugucacccuccccacaaacca

SEQ ID NO: 885205 - RNA, 18 nt, Human
aggauuauuggauaauua

SEQ ID NO: 885206 - RNA, 22 nt, Human
auccacccugucacccucccca

SEQ ID NO: 885207 - RNA, 19 nt, Human
auccuguaccuauccaccc

SEQ ID NO: 885208 - RNA, 18 nt, Human
aucucaauuaguauaggg

SEQ ID NO: 885209 - RNA, 27 nt, Human
caaaaggagauacagugaaaagucucc

SEQ ID NO: 885210 - RNA, 23 nt, Human
caccauugguucuaagaauuuau

SEQ ID NO: 885211 - RNA, 19 nt, Human
cacccuccccacaaaccac

SEQ ID NO: 885212 - RNA, 25 nt, Human
cacccugucacccuccccacaaacc

SEQ ID NO: 885213 - RNA, 26 nt, Human
cacccugucacccuccccacaaacca

SEQ ID NO: 885214 - RNA, 22 nt, Human
ccauauuguccucuucaauaug

SEQ ID NO: 885215 - RNA, 27 nt, Human
cccucccuuuuccccuuaauuuguuuu

SEQ ID NO: 885216 - RNA, 21 nt, Human
ccuuuuuuaaggguuccauaa

SEQ ID NO: 885217 - RNA, 24 nt, Human
cucccaauccuguaccuauccacc

SEQ ID NO: 885218 - RNA, 22 nt, Human
cuguaccuauccacccugucac

SEQ ID NO: 885219 - RNA, 23 nt, Human
gaaguggaaacuacuggaucaaa

SEQ ID NO: 885220 - RNA, 24 nt, Human
gauacauaugguacaaaauucaaa

SEQ ID NO: 885221 - RNA, 26 nt, Human
gcaauuaauuguuucuaaucuuuagc

SEQ ID NO: 885222 - RNA, 20 nt, Human
guaccuauccacccugucac

SEQ ID NO: 885223 - RNA, 23 nt, Human
uacaaaauucaaaaaaauacaaa

SEQ ID NO: 885224 - RNA, 25 nt, Human
ucccaauccuguaccuauccacccu

SEQ ID NO: 885225 - RNA, 25 nt, Human
uccucuucaauauguacuucuguca

SEQ ID NO: 885226 - RNA, 23 nt, Human
ucuuugccaaucugacaguuuua

SEQ ID NO: 885227 - RNA, 21 nt, Human
uggaucaaagaguuagugcuu

SEQ ID NO: 885228 - RNA, 21 nt, Human
ugucacccuccccacaaacca

SEQ ID NO: 885229 - RNA, 23 nt, Human
uuaauuuguuuuggauaucuuuc

SEQ ID NO: 885230 - RNA, 22 nt, Human
uuacaugcuguuaugcaacccu

SEQ ID NO: 885231 - RNA, 18 nt, Human
uuauguuacaugcuguua

SEQ ID NO: 885232 - RNA, 23 nt, Human
uuuuccccuuaauuuguuuugga

SEQ ID NO: 885233 - RNA, 18 nt, Human
uuuuuuuuuuuuuuuuug

SEQ ID NO: 885234 - RNA, 19 nt, Human
uuuuuuuuuuuuuuuuugu

SEQ ID NO: 885235 - RNA, 25 nt, Human
uuuuuuuuuuuuuuuuuguauuuaa

SEQ ID NO: 885236 - RNA, 22 nt, Human
aaagagccuugugcgaagcaag

SEQ ID NO: 885237 - RNA, 20 nt, Human
aaauggccugcuagggagac

SEQ ID NO: 885238 - RNA, 22 nt, Human
aacucaguuucaaccaagcuga

SEQ ID NO: 885239 - RNA, 21 nt, Human
aagaggaagggaggaacaggg

SEQ ID NO: 885240 - RNA, 18 nt, Human
aagaggcugauuuguagu

SEQ ID NO: 885241 - RNA, 21 nt, Human
aagccagauauggacaggaaa

SEQ ID NO: 885242 - RNA, 22 nt, Human
aauaugugugauugugguuaca

SEQ ID NO: 885243 - RNA, 25 nt, Human
acccaaauauguuaaauauuuccuc

SEQ ID NO: 885244 - RNA, 18 nt, Human
agaggaagggaggaacag

SEQ ID NO: 885245 - RNA, 18 nt, Human
agaggaagggaggaacag

SEQ ID NO: 885246 - RNA, 23 nt, Human
agaggaagggaggaacaggggcc

SEQ ID NO: 885247 - RNA, 23 nt, Human
agaggcugauuuguaguuucucu

SEQ ID NO: 885248 - RNA, 18 nt, Human
agauauggacaggaaacc

SEQ ID NO: 885249 - RNA, 19 nt, Human
agccuugugcgaagcaagu

SEQ ID NO: 885250 - RNA, 21 nt, Human
aggcaguuuggcaaaaaccua

SEQ ID NO: 885251 - RNA, 21 nt, Human
aggcugauuuguaguuucucu

SEQ ID NO: 885252 - RNA, 23 nt, Human
auaaaccaagaugcaccaaacuu

SEQ ID NO: 885253 - RNA, 24 nt, Human
augcaagccagauauggacaggaa

SEQ ID NO: 885254 - RNA, 21 nt, Human
caaaauucuaaagauaaacac

SEQ ID NO: 885255 - RNA, 21 nt, Human
caagaugcaccaaacuucaug

SEQ ID NO: 885256 - RNA, 19 nt, Human
caaguaacuugcaagaggc

SEQ ID NO: 885257 - RNA, 20 nt, Human
cagaaccuauuuggugaaaa

SEQ ID NO: 885258 - RNA, 25 nt, Human
cagcauaaaccaagaugcaccaaac

SEQ ID NO: 885259 - RNA, 19 nt, Human
caggugagagaacaaguaa

SEQ ID NO: 885260 - RNA, 22 nt, Human
cauguccaaaaccuacauagaa

SEQ ID NO: 885261 - RNA, 18 nt, Human
ccaggaaaaagggaaaaa

SEQ ID NO: 885262 - RNA, 19 nt, Human
ccauucaaagccaggaguc

SEQ ID NO: 885263 - RNA, 18 nt, Human
ccccuuucuucccuuucu

SEQ ID NO: 885264 - RNA, 19 nt, Human
ccccuuucuucccuuucuu

SEQ ID NO: 885265 - RNA, 18 nt, Human
cccuuucuucccuuucuu

SEQ ID NO: 885266 - RNA, 21 nt, Human
ccuucuccccuuucuucccuu

SEQ ID NO: 885267 - RNA, 22 nt, Human
cuaaacuugcuaaacucccagg

SEQ ID NO: 885268 - RNA, 23 nt, Human
cuacauagaauugccuaccccuu

SEQ ID NO: 885269 - RNA, 24 nt, Human
cuccccuuucuucccuuucuuuuc

SEQ ID NO: 885270 - RNA, 20 nt, Human
cuucccuucuccccuuucuc

SEQ ID NO: 885271 - RNA, 23 nt, Human
cuucuccccuuucuucccuuucu

SEQ ID NO: 885272 - RNA, 24 nt, Human
cuugcuaaacucccaggaaaaagg

SEQ ID NO: 885273 - RNA, 22 nt, Human
cuuucuggcacaugcaagccag

SEQ ID NO: 885274 - RNA, 25 nt, Human
ggaacaggggcaagguggggaggaa

SEQ ID NO: 885275 - RNA, 20 nt, Human
ggaggaacaggggcaaggug

SEQ ID NO: 885276 - RNA, 22 nt, Human
gggaggaacaggggcaaggugg

SEQ ID NO: 885277 - RNA, 18 nt, Human
uaaaaagaacuuuuggca

SEQ ID NO: 885278 - RNA, 19 nt, Human
uacuucauucuccuggcug

SEQ ID NO: 885279 - RNA, 21 nt, Human
uauauaaauguugaagaggcu

SEQ ID NO: 885280 - RNA, 18 nt, Human
uauggacaggaaacccuc

SEQ ID NO: 885281 - RNA, 22 nt, Human
ucaaauccugacacuauaugac

SEQ ID NO: 885282 - RNA, 18 nt, Human
ucagaaccuauuugguga

SEQ ID NO: 885283 - RNA, 20 nt, Human
uccccuuucuucccuuucuc

SEQ ID NO: 885284 - RNA, 20 nt, Human
uccuaaacuugcuaaacucu

SEQ ID NO: 885285 - RNA, 21 nt, Human
ucuccccuuucuucccuuucu

SEQ ID NO: 885286 - RNA, 25 nt, Human
ucuccccuuucuucccuuucuuuuc

SEQ ID NO: 885287 - RNA, 19 nt, Human
ucucuuuguuuugucuaug

SEQ ID NO: 885288 - RNA, 26 nt, Human
ucuuccgaagaugaguugcuaguugc

SEQ ID NO: 885289 - RNA, 24 nt, Human
ugaagagacuauaagccagagagg

SEQ ID NO: 885290 - RNA, 22 nt, Human
ugaaguuggacccaaauauguu

SEQ ID NO: 885291 - RNA, 20 nt, Human
ugacacuauaugacauaaaa

SEQ ID NO: 885292 - RNA, 22 nt, Human
ugagagaacaaguaacuugcaa

SEQ ID NO: 885293 - RNA, 24 nt, Human
ugcaaagggagaagaggaagggag

SEQ ID NO: 885294 - RNA, 18 nt, Human
ugccucaguuaguucugc

SEQ ID NO: 885295 - RNA, 19 nt, Human
ugcuuuauuuauccagaag

SEQ ID NO: 885296 - RNA, 21 nt, Human
uggcaaaaaccuagaagggaa

SEQ ID NO: 885297 - RNA, 24 nt, Human
uguugucguuguuguugccguggc

SEQ ID NO: 885298 - RNA, 22 nt, Human
uucaugacuauucucuccuaaa

SEQ ID NO: 885299 - RNA, 19 nt, Human
uucccuucuccccuuucuu

SEQ ID NO: 885300 - RNA, 19 nt, Human
uugaagaggcugauuugua

SEQ ID NO: 885301 - RNA, 22 nt, Human
uuuaauagcaguugagccagca

SEQ ID NO: 885302 - RNA, 20 nt, Human
uuuuuuuuuuuuuuuuuugg

SEQ ID NO: 885303 - RNA, 21 nt, Human
uuuuuuuuuuuuuuuuuuguu

SEQ ID NO: 885304 - RNA, 23 nt, Human
aacugcuggcauucuugacuagu

SEQ ID NO: 885305 - RNA, 19 nt, Human
acaguuaaaaaaagaggaa

SEQ ID NO: 885306 - RNA, 26 nt, Human
caaagggaacaguuaaaaaaagagga

SEQ ID NO: 885307 - RNA, 18 nt, Human
caguuaaaaaaagaggaa

SEQ ID NO: 885308 - RNA, 23 nt, Human
cauuuccuucccugagaaaaggg

SEQ ID NO: 885309 - RNA, 24 nt, Human
ccccacuuaaaaaaaaaaaauauc

SEQ ID NO: 885310 - RNA, 18 nt, Human
ccccugcccuguuggcuu

SEQ ID NO: 885311 - RNA, 22 nt, Human
ccugagugauguccacggaagg

SEQ ID NO: 885312 - RNA, 24 nt, Human
ccugcccuguuggcuuuuuguuuc

SEQ ID NO: 885313 - RNA, 23 nt, Human
cucaaacaugguccaagaaagca

SEQ ID NO: 885314 - RNA, 22 nt, Human
gcccuguuggcuuuuuguuucc

SEQ ID NO: 885315 - RNA, 19 nt, Human
ggagagcucaaaggcuuaa

SEQ ID NO: 885316 - RNA, 25 nt, Human
ggcaaagggaacaguuaaaaaaaga

SEQ ID NO: 885317 - RNA, 21 nt, Human
ggcagaaaggcccauucuucu

SEQ ID NO: 885318 - RNA, 18 nt, Human
uaaaauguucagaaugua

SEQ ID NO: 885319 - RNA, 18 nt, Human
uaagaggcugaucugugu

SEQ ID NO: 885320 - RNA, 21 nt, Human
ucgccccucccccacagaggu

SEQ ID NO: 885321 - RNA, 20 nt, Human
ucugcaguuugaagggcaaa

SEQ ID NO: 885322 - RNA, 24 nt, Human
ucuucagauucauccacaaggucc

SEQ ID NO: 885323 - RNA, 19 nt, Human
ugaagggcaaagggaacag

SEQ ID NO: 885324 - RNA, 21 nt, Human
ugaagggcaaagggaacaguu

SEQ ID NO: 885325 - RNA, 26 nt, Human
ugaagggcaaagggaacaguuaaaac

SEQ ID NO: 885326 - RNA, 22 nt, Human
uggcacuugaugagcagaaguc

SEQ ID NO: 885327 - RNA, 23 nt, Human
uggcuuuuuguuuccauuuccuu

SEQ ID NO: 885328 - RNA, 19 nt, Human
uguaagaggcugaucugug

SEQ ID NO: 885329 - RNA, 22 nt, Human
uguaugggggagggguggagaa

SEQ ID NO: 885330 - RNA, 24 nt, Human
uguccacggaaggguccuuuccuu

SEQ ID NO: 885331 - RNA, 22 nt, Human
uugaauuggcacuugaugagca

SEQ ID NO: 885332 - RNA, 20 nt, Human
uuuuguggauuuuguauggg

SEQ ID NO: 885333 - RNA, 24 nt, Human
uuuuguggauuuuguaugggggag

SEQ ID NO: 885334 - RNA, 24 nt, Human
aaaauaaaaaucaauacgguucuc

SEQ ID NO: 885335 - RNA, 19 nt, Human
aagauaucuucaaacugaa

SEQ ID NO: 885336 - RNA, 19 nt, Human
acaaagcauugcauaacaa

SEQ ID NO: 885337 - RNA, 22 nt, Human
agucccguccucccugauucua

SEQ ID NO: 885338 - RNA, 22 nt, Human
cacagcauaagucccguccucc

SEQ ID NO: 885339 - RNA, 23 nt, Human
ccaagauaucuucaaacugaaga

SEQ ID NO: 885340 - RNA, 20 nt, Human
cuggcuuugaggcccuuccc

SEQ ID NO: 885341 - RNA, 22 nt, Human
gcuuugaggcccuucccccuca

SEQ ID NO: 885342 - RNA, 22 nt, Human
uagaaguuuuuuucuguugccu

SEQ ID NO: 885343 - RNA, 23 nt, Human
uagguucucacauauuaacauuu

SEQ ID NO: 885344 - RNA, 19 nt, Human
ucagugaggaaauuaacug

SEQ ID NO: 885345 - RNA, 22 nt, Human
ucagugaggaaauuaacuguac

SEQ ID NO: 885346 - RNA, 18 nt, Human
ugaaugcucaaacuaugg

SEQ ID NO: 885347 - RNA, 23 nt, Human
uuaaaauacuuccuagguucuca

SEQ ID NO: 885348 - RNA, 21 nt, Human
uucucaguuaagcccucugug

SEQ ID NO: 885349 - RNA, 19 nt, Human
uucuggugguuuauuugug

SEQ ID NO: 885350 - RNA, 24 nt, Human
uugcuuugaaugcucaaacuaugg

SEQ ID NO: 885351 - RNA, 24 nt, Human
uuuuuuuuuuuuuuuuucauuuuu

SEQ ID NO: 885352 - RNA, 23 nt, Human
aaacucccggacucaagcaaucc

SEQ ID NO: 885353 - RNA, 24 nt, Human
aaagugcugggauuacaggcauga

SEQ ID NO: 885354 - RNA, 25 nt, Human
aagcgauccucccaucucagucucc

SEQ ID NO: 885355 - RNA, 24 nt, Human
aagggucucacuauguuccccagg

SEQ ID NO: 885356 - RNA, 19 nt, Human
aagugcugggauuacaggc

SEQ ID NO: 885357 - RNA, 21 nt, Human
aagugcugggauuacaggcau

SEQ ID NO: 885358 - RNA, 26 nt, Human
aagugcugggauuacaggcaugagcc

SEQ ID NO: 885359 - RNA, 24 nt, Human
acccagacuggagugcaguggcau

SEQ ID NO: 885360 - RNA, 24 nt, Human
accggccgggugcaguggcucaug

SEQ ID NO: 885361 - RNA, 22 nt, Human
acucaagcaauccacucaccuc

SEQ ID NO: 885362 - RNA, 19 nt, Human
acuggagugcaguggcaug

SEQ ID NO: 885363 - RNA, 19 nt, Human
agauaccacgucacugugg

SEQ ID NO: 885364 - RNA, 19 nt, Human
agcaauccacucaccucag

SEQ ID NO: 885365 - RNA, 21 nt, Human
agcaauccacucaccucagcc

SEQ ID NO: 885366 - RNA, 21 nt, Human
agugcaguggcaugaucauag

SEQ ID NO: 885367 - RNA, 23 nt, Human
agugcaguggcaugaucauagcu

SEQ ID NO: 885368 - RNA, 24 nt, Human
agugcaguggcaugaucauagcuc

SEQ ID NO: 885369 - RNA, 23 nt, Human
aguggcucaugccuauaauuuuu

SEQ ID NO: 885370 - RNA, 24 nt, Human
auagcucacugcagacucaaacuc

SEQ ID NO: 885371 - RNA, 21 nt, Human
aucucagucucccaaagugcu

SEQ ID NO: 885372 - RNA, 18 nt, Human
augggaggcaacauggua

SEQ ID NO: 885373 - RNA, 24 nt, Human
caaagugcugggauuacaggcaug

SEQ ID NO: 885374 - RNA, 27 nt, Human
caagcgauccucccaucucagucuccc

SEQ ID NO: 885375 - RNA, 24 nt, Human
caauccacucaccucagccuccua

SEQ ID NO: 885376 - RNA, 24 nt, Human
cacaccaccaugcucagauaauuu

SEQ ID NO: 885377 - RNA, 24 nt, Human
cacuauguuccccaggcuggucuc

SEQ ID NO: 885378 - RNA, 23 nt, Human
ccaaagugcugggauuacaggca

SEQ ID NO: 885379 - RNA, 24 nt, Human
ccaaagugcugggauuacaggcau

SEQ ID NO: 885380 - RNA, 21 nt, Human
ccacugugccuggccuaaaaa

SEQ ID NO: 885381 - RNA, 24 nt, Human
cccaaagugcugggauuacaggca

SEQ ID NO: 885382 - RNA, 23 nt, Human
ccucagccccauccggccacucu

SEQ ID NO: 885383 - RNA, 26 nt, Human
ccucccaucucagucucccaaagugc

SEQ ID NO: 885384 - RNA, 21 nt, Human
ccuccuaacugggacuacagg

SEQ ID NO: 885385 - RNA, 22 nt, Human
ccucgcccgcaggaagaggcag

SEQ ID NO: 885386 - RNA, 24 nt, Human
cucaagcgauccucccaucucagu

SEQ ID NO: 885387 - RNA, 25 nt, Human
cucacugcagacucaaacucccgga

SEQ ID NO: 885388 - RNA, 18 nt, Human
cuccuaacugggacuaca

SEQ ID NO: 885389 - RNA, 21 nt, Human
cuguguggaggacacgaagca

SEQ ID NO: 885390 - RNA, 19 nt, Human
gacuacaggugcacaccac

SEQ ID NO: 885391 - RNA, 23 nt, Human
gacucaagcaauccacucaccuc

SEQ ID NO: 885392 - RNA, 18 nt, Human
gauuacaggcaugagcca

SEQ ID NO: 885393 - RNA, 22 nt, Human
gauuacaggcaugagccaccac

SEQ ID NO: 885394 - RNA, 26 nt, Human
gauuacaggcaugagccaccacugug

SEQ ID NO: 885395 - RNA, 21 nt, Human
gcaauacuaaaaucaauacac

SEQ ID NO: 885396 - RNA, 18 nt, Human
ggaggacacgaagcaaua

SEQ ID NO: 885397 - RNA, 26 nt, Human
ggauuacaggcaugagccaccacugu

SEQ ID NO: 885398 - RNA, 23 nt, Human
ggccgggugcaguggcucaugcc

SEQ ID NO: 885399 - RNA, 23 nt, Human
ggcgauaaaagacgcacgaguac

SEQ ID NO: 885400 - RNA, 23 nt, Human
ggugcaguggcucaugccuauaa

SEQ ID NO: 885401 - RNA, 23 nt, Human
gucuugcugucacccagacugga

SEQ ID NO: 885402 - RNA, 19 nt, Human
uaauaauucuuucuccccu

SEQ ID NO: 885403 - RNA, 25 nt, Human
uacaggcaugagccaccacugugcc

SEQ ID NO: 885404 - RNA, 22 nt, Human
uagagaaagggucucacuaugu

SEQ ID NO: 885405 - RNA, 23 nt, Human
uauguuccccaggcuggucucaa

SEQ ID NO: 885406 - RNA, 23 nt, Human
uauguuccccaggcuggucucaa

SEQ ID NO: 885407 - RNA, 24 nt, Human
uauguuccccaggcuggucucaag

SEQ ID NO: 885408 - RNA, 19 nt, Human
ucagccccauccggccacu

SEQ ID NO: 885409 - RNA, 23 nt, Human
ucauagcucacugcagacucaaa

SEQ ID NO: 885410 - RNA, 24 nt, Human
ucccaaagugcugggauuacaggc

SEQ ID NO: 885411 - RNA, 22 nt, Human
uccccaggcuggucucaagcga

SEQ ID NO: 885412 - RNA, 20 nt, Human
uccuaacugggacuacaggu

SEQ ID NO: 885413 - RNA, 24 nt, Human
ucucacuauguuccccaggcuggu

SEQ ID NO: 885414 - RNA, 22 nt, Human
ucuugcugucacccagacugga

SEQ ID NO: 885415 - RNA, 24 nt, Human
ucuugcugucacccagacuggagu

SEQ ID NO: 885416 - RNA, 25 nt, Human
ugagccaccacugugccuggccuaa

SEQ ID NO: 885417 - RNA, 20 nt, Human
ugcuaguuuucaacaaaugu

SEQ ID NO: 885418 - RNA, 19 nt, Human
uggagugcaguggcaugau

SEQ ID NO: 885419 - RNA, 19 nt, Human
uggagugcaguggcaugau

SEQ ID NO: 885420 - RNA, 21 nt, Human
uggagugcaguggcaugauca

SEQ ID NO: 885421 - RNA, 18 nt, Human
uggcaugaucauagcuca

SEQ ID NO: 885422 - RNA, 24 nt, Human
uggcaugaucauagcucacugcag

SEQ ID NO: 885423 - RNA, 19 nt, Human
uggcucaugccuauaauuu

SEQ ID NO: 885424 - RNA, 22 nt, Human
ugggacuacaggugcacaccac

SEQ ID NO: 885425 - RNA, 24 nt, Human
ugggacuacaggugcacaccacca

SEQ ID NO: 885426 - RNA, 18 nt, Human
ugggauuacaggcaugag

SEQ ID NO: 885427 - RNA, 22 nt, Human
ugggauuacaggcaugagccac

SEQ ID NO: 885428 - RNA, 24 nt, Human
ugggauuacaggcaugagccacca

SEQ ID NO: 885429 - RNA, 24 nt, Human
ugggauuacaggcaugagccacca

SEQ ID NO: 885430 - RNA, 25 nt, Human
ugggauuacaggcaugagccaccac

SEQ ID NO: 885431 - RNA, 25 nt, Human
ugggauuacaggcaugagccaccac

SEQ ID NO: 885432 - RNA, 26 nt, Human
ugggauuacaggcaugagccaccacu

SEQ ID NO: 885433 - RNA, 24 nt, Human
uguagagaaagggucucacuaugu

SEQ ID NO: 885434 - RNA, 18 nt, Human
uguguggaggacacgaag

SEQ ID NO: 885435 - RNA, 21 nt, Human
uuaaaauugucuugaaaguau

SEQ ID NO: 885436 - RNA, 22 nt, Human
uuguuuuuucagaagaugggag

SEQ ID NO: 885437 - RNA, 21 nt, Human
uuuuguuuuuucagaagaugg

SEQ ID NO: 885438 - RNA, 23 nt, Human
aaccccacaucuggacagacaca

SEQ ID NO: 885439 - RNA, 22 nt, Human
aagcaggagaaugaugcuccca

SEQ ID NO: 885440 - RNA, 19 nt, Human
acaaagcaggagaaugaug

SEQ ID NO: 885441 - RNA, 20 nt, Human
acaaagcaggagaaugauga

SEQ ID NO: 885442 - RNA, 24 nt, Human
accaauacauuuauuugcgggaga

SEQ ID NO: 885443 - RNA, 20 nt, Human
acccaauccacugggugcag

SEQ ID NO: 885444 - RNA, 19 nt, Human
accucgccucaccuucccu

SEQ ID NO: 885445 - RNA, 25 nt, Human
accucgccucaccuucccuaggucu

SEQ ID NO: 885446 - RNA, 18 nt, Human
accugggcccccauaagc

SEQ ID NO: 885447 - RNA, 18 nt, Human
agcauuagaugaggagga

SEQ ID NO: 885448 - RNA, 18 nt, Human
agcccggcugggcuggag

SEQ ID NO: 885449 - RNA, 21 nt, Human
auaagccauucucuggcccuc

SEQ ID NO: 885450 - RNA, 30 nt, Human
auucugccaacuccccaccucgccucaccu

SEQ ID NO: 885451 - RNA, 22 nt, Human
caaagcaggagaaugaugcucc

SEQ ID NO: 885452 - RNA, 25 nt, Human
caaagcaggagaaugaugcucccag

SEQ ID NO: 885453 - RNA, 20 nt, Human
caccauuaaacagaugagca

SEQ ID NO: 885454 - RNA, 25 nt, Human
cacccacgguggccagguugagacc

SEQ ID NO: 885455 - RNA, 26 nt, Human
cagccccacccccgcucaaccccaca

SEQ ID NO: 885456 - RNA, 21 nt, Human
caggagaaugaugcucccagc

SEQ ID NO: 885457 - RNA, 18 nt, Human
ccauucucuggcccucug

SEQ ID NO: 885458 - RNA, 22 nt, Human
ccccacccccgcucaaccccac

SEQ ID NO: 885459 - RNA, 24 nt, Human
ccccaccucgccucaccuucccua

SEQ ID NO: 885460 - RNA, 24 nt, Human
ccccauuagccuuuccccauccag

SEQ ID NO: 885461 - RNA, 21 nt, Human
ccuuuccccauccaaccuggg

SEQ ID NO: 885462 - RNA, 22 nt, Human
cgggguggggucugaccccauu

SEQ ID NO: 885463 - RNA, 25 nt, Human
cugcacaagacagacucagcaaauc

SEQ ID NO: 885464 - RNA, 19 nt, Human
cugcacagguaaccagauc

SEQ ID NO: 885465 - RNA, 21 nt, Human
gaugagcauuagaugaggagg

SEQ ID NO: 885466 - RNA, 19 nt, Human
gccaacuccccaccucgcc

SEQ ID NO: 885467 - RNA, 22 nt, Human
gccaacuccccaccucgccuca

SEQ ID NO: 885468 - RNA, 19 nt, Human
gccccacccccgcucaacc

SEQ ID NO: 885469 - RNA, 21 nt, Human
ggcaaauauggaacugaagcc

SEQ ID NO: 885470 - RNA, 21 nt, Human
ggguauucacaacugcacagg

SEQ ID NO: 885471 - RNA, 20 nt, Human
uaggccuagacaugauggug

SEQ ID NO: 885472 - RNA, 21 nt, Human
ugacccaauccacugggugca

SEQ ID NO: 885473 - RNA, 22 nt, Human
ugaugguggccacgugccaggg

SEQ ID NO: 885474 - RNA, 21 nt, Human
ugcagccccacccccgcucaa

SEQ ID NO: 885475 - RNA, 22 nt, Human
uggaacugaagcccggcugggc

SEQ ID NO: 885476 - RNA, 24 nt, Human
uucccuaggucugccgggugaccc

SEQ ID NO: 885477 - RNA, 21 nt, Human
aaaaaaaaaaaaaaaaagucc

SEQ ID NO: 885478 - RNA, 19 nt, Human
aaaaaaaaaaaaguccaga

SEQ ID NO: 885479 - RNA, 24 nt, Human
aaaaauacaaaaauuagcugcgug

SEQ ID NO: 885480 - RNA, 19 nt, Human
aacauggugaaaccccauc

SEQ ID NO: 885481 - RNA, 20 nt, Human
aacauggugaaaccccaucu

SEQ ID NO: 885482 - RNA, 21 nt, Human
aacauggugaaaccccaucuc

SEQ ID NO: 885483 - RNA, 21 nt, Human
aacauggugaaaccccaucuc

SEQ ID NO: 885484 - RNA, 18 nt, Human
aauucaaguaaaaaaaaa

SEQ ID NO: 885485 - RNA, 24 nt, Human
aauugcuugaaccugggaggcgga

SEQ ID NO: 885486 - RNA, 24 nt, Human
acagagugagacucugucucaaaa

SEQ ID NO: 885487 - RNA, 24 nt, Human
accaacauggugaaaccccaucuc

SEQ ID NO: 885488 - RNA, 24 nt, Human
accccaucucuacuaaaaauacaa

SEQ ID NO: 885489 - RNA, 24 nt, Human
acuggauuccagccugggugacag

SEQ ID NO: 885490 - RNA, 26 nt, Human
acuggauuccagccugggugacagag

SEQ ID NO: 885491 - RNA, 24 nt, Human
agcacuuugggaggcugagguggg

SEQ ID NO: 885492 - RNA, 24 nt, Human
agccugaccaacauggugaaaccc

SEQ ID NO: 885493 - RNA, 24 nt, Human
agccugggugacagagugagacuc

SEQ ID NO: 885494 - RNA, 23 nt, Human
agcugcgugugguggcgugugcc

SEQ ID NO: 885495 - RNA, 24 nt, Human
aggcacgguggcucacgucuguaa

SEQ ID NO: 885496 - RNA, 22 nt, Human
aggcaggagaauugcuugaacc

SEQ ID NO: 885497 - RNA, 24 nt, Human
aggcaggagaauugcuugaaccug

SEQ ID NO: 885498 - RNA, 20 nt, Human
aggcggagguugcagugagc

SEQ ID NO: 885499 - RNA, 24 nt, Human
aggcggagguugcagugagcugag

SEQ ID NO: 885500 - RNA, 21 nt, Human
aggcugaggcaggagaauugc

SEQ ID NO: 885501 - RNA, 24 nt, Human
aggcugaggcaggagaauugcuug

SEQ ID NO: 885502 - RNA, 21 nt, Human
aggcugaggugggcagaucac

SEQ ID NO: 885503 - RNA, 24 nt, Human
aggugggcagaucacaaggucagg

SEQ ID NO: 885504 - RNA, 24 nt, Human
auagugccacuggauuccagccug

SEQ ID NO: 885505 - RNA, 21 nt, Human
aucacaaggucaggaguucga

SEQ ID NO: 885506 - RNA, 24 nt, Human
caacauggugaaaccccaucucua

SEQ ID NO: 885507 - RNA, 24 nt, Human
cacgucuguaaucauagcacuuug

SEQ ID NO: 885508 - RNA, 21 nt, Human
cacuggauuccagccugggug

SEQ ID NO: 885509 - RNA, 20 nt, Human
cagccugggugacagaguga

SEQ ID NO: 885510 - RNA, 22 nt, Human
cagcgccucgcgggcgaacugg

SEQ ID NO: 885511 - RNA, 24 nt, Human
cagcuacucaggaggcugaggcag

SEQ ID NO: 885512 - RNA, 20 nt, Human
ccacuggauuccagccuggg

SEQ ID NO: 885513 - RNA, 21 nt, Human
ccacuggauuccagccugggu

SEQ ID NO: 885514 - RNA, 21 nt, Human
ccacuggauuccagccugggu

SEQ ID NO: 885515 - RNA, 24 nt, Human
ccacuggauuccagccugggugac

SEQ ID NO: 885516 - RNA, 26 nt, Human
ccaggccaggcacgguggcucacguc

SEQ ID NO: 885517 - RNA, 24 nt, Human
ccugaccaacauggugaaacccca

SEQ ID NO: 885518 - RNA, 19 nt, Human
ccugggaggcggagguugc

SEQ ID NO: 885519 - RNA, 22 nt, Human
ccugggugacagagugagacuc

SEQ ID NO: 885520 - RNA, 21 nt, Human
ccuguaaucccagcuacucag

SEQ ID NO: 885521 - RNA, 24 nt, Human
cgagaccagccugaccaacauggu

SEQ ID NO: 885522 - RNA, 18 nt, Human
cucaaaaaaaaaaaaaaa

SEQ ID NO: 885523 - RNA, 24 nt, Human
cucacgucuguaaucauagcacuu

SEQ ID NO: 885524 - RNA, 19 nt, Human
cucugucucaaaaaaaaaa

SEQ ID NO: 885525 - RNA, 21 nt, Human
cuguaaucauagcacuuuggg

SEQ ID NO: 885526 - RNA, 23 nt, Human
cuuugggaggcugaggugggcag

SEQ ID NO: 885527 - RNA, 24 nt, Human
gacagagugagacucugucucaaa

SEQ ID NO: 885528 - RNA, 23 nt, Human
gagaauugcuugaaccugggagg

SEQ ID NO: 885529 - RNA, 21 nt, Human
gagguugcagugagcugagau

SEQ ID NO: 885530 - RNA, 21 nt, Human
gaucacaaggucaggaguucg

SEQ ID NO: 885531 - RNA, 22 nt, Human
gaucacaaggucaggaguucga

SEQ ID NO: 885532 - RNA, 24 nt, Human
gaucacaaggucaggaguucgaga

SEQ ID NO: 885533 - RNA, 24 nt, Human
gauuccagccugggugacagagug

SEQ ID NO: 885534 - RNA, 24 nt, Human
gccacuggauuccagccuggguga

SEQ ID NO: 885535 - RNA, 21 nt, Human
gcugcgugugguggcgugugc

SEQ ID NO: 885536 - RNA, 18 nt, Human
ggagguugcagugagcug

SEQ ID NO: 885537 - RNA, 22 nt, Human
ggagguugcagugagcugagau

SEQ ID NO: 885538 - RNA, 22 nt, Human
ggagguugcagugagcugagau

SEQ ID NO: 885539 - RNA, 24 nt, Human
ggagguugcagugagcugagauag

SEQ ID NO: 885540 - RNA, 23 nt, Human
ggcagaucacaaggucaggaguu

SEQ ID NO: 885541 - RNA, 19 nt, Human
gguccgugccgaagaagag

SEQ ID NO: 885542 - RNA, 24 nt, Human
gguggcgugugccuguaaucccag

SEQ ID NO: 885543 - RNA, 24 nt, Human
gguggcucacgucuguaaucauag

SEQ ID NO: 885544 - RNA, 24 nt, Human
gugacagagugagacucugucuca

SEQ ID NO: 885545 - RNA, 24 nt, Human
guugcagugagcugagauagugcc

SEQ ID NO: 885546 - RNA, 24 nt, Human
uagcacuuugggaggcugaggugg

SEQ ID NO: 885547 - RNA, 20 nt, Human
ucaaaaaaaaaaaaaaaaaa

SEQ ID NO: 885548 - RNA, 22 nt, Human
ucaaaaaaaaaaaaaaaaaaaa

SEQ ID NO: 885549 - RNA, 23 nt, Human
ucaaaaaaaaaaaaaaaaaaaaa

SEQ ID NO: 885550 - RNA, 24 nt, Human
ucacaaggucaggaguucgagacc

SEQ ID NO: 885551 - RNA, 19 nt, Human
uccagccugggugacagag

SEQ ID NO: 885552 - RNA, 19 nt, Human
uccagccugggugacagag

SEQ ID NO: 885553 - RNA, 23 nt, Human
uccagccugggugacagagugag

SEQ ID NO: 885554 - RNA, 24 nt, Human
uccagccugggugacagagugaga

SEQ ID NO: 885555 - RNA, 27 nt, Human
uccaucuuuucggcaauaaucuucucu

SEQ ID NO: 885556 - RNA, 21 nt, Human
ucucuacuaaaaauacaaaaa

SEQ ID NO: 885557 - RNA, 19 nt, Human
ucuggagucccggcagucc

SEQ ID NO: 885558 - RNA, 24 nt, Human
ucuguaaucauagcacuuugggag

SEQ ID NO: 885559 - RNA, 23 nt, Human
ucugucucaaaaaaaaaaaaaaa

SEQ ID NO: 885560 - RNA, 19 nt, Human
ugaaaccccaucucuacua

SEQ ID NO: 885561 - RNA, 24 nt, Human
ugaaccugggaggcggagguugca

SEQ ID NO: 885562 - RNA, 24 nt, Human
ugaccaacauggugaaaccccauc

SEQ ID NO: 885563 - RNA, 21 nt, Human
ugagcugagauagugccacug

SEQ ID NO: 885564 - RNA, 24 nt, Human
ugaggcaggagaauugcuugaacc

SEQ ID NO: 885565 - RNA, 24 nt, Human
ugaggcaggagaauugcuugaacc

SEQ ID NO: 885566 - RNA, 26 nt, Human
ugaggugggcagaucacaaggucagg

SEQ ID NO: 885567 - RNA, 21 nt, Human
ugccaucuucuuugaaagucc

SEQ ID NO: 885568 - RNA, 24 nt, Human
ugccuguaaucccagcuacucagg

SEQ ID NO: 885569 - RNA, 21 nt, Human
ugcuugaaccugggaggcgga

SEQ ID NO: 885570 - RNA, 19 nt, Human
uggaaagugaggcaaucca

SEQ ID NO: 885571 - RNA, 21 nt, Human
uggcgugugccuguaauccca

SEQ ID NO: 885572 - RNA, 24 nt, Human
uggcgugugccuguaaucccagcu

SEQ ID NO: 885573 - RNA, 18 nt, Human
uggcucacgucuguaauc

SEQ ID NO: 885574 - RNA, 18 nt, Human
uggcucacgucuguaauc

SEQ ID NO: 885575 - RNA, 24 nt, Human
uggcucacgucuguaaucauagca

SEQ ID NO: 885576 - RNA, 29 nt, Human
ugggaggcggagguugcagugacaacggu

SEQ ID NO: 885577 - RNA, 24 nt, Human
ugggaggcggagguugcagugagc

SEQ ID NO: 885578 - RNA, 20 nt, Human
ugggaggcugaggugggcag

SEQ ID NO: 885579 - RNA, 24 nt, Human
ugggaggcugaggugggcagauca

SEQ ID NO: 885580 - RNA, 22 nt, Human
ugggcagaucacaaggucagga

SEQ ID NO: 885581 - RNA, 21 nt, Human
ugggugacagagugagacucu

SEQ ID NO: 885582 - RNA, 24 nt, Human
ugguggcgugugccuguaauccca

SEQ ID NO: 885583 - RNA, 19 nt, Human
uuagcugcgugugguggcg

SEQ ID NO: 885584 - RNA, 24 nt, Human
uuagcugcgugugguggcgugugc

SEQ ID NO: 885585 - RNA, 25 nt, Human
uuccaggccaggcacgguggcucac

SEQ ID NO: 885586 - RNA, 24 nt, Human
uugaaccugggaggcggagguugc

SEQ ID NO: 885587 - RNA, 22 nt, Human
uugcagugagcugagauagugc

SEQ ID NO: 885588 - RNA, 24 nt, Human
uugcuugaaccugggaggcggagg

SEQ ID NO: 885589 - RNA, 25 nt, Human
uugggaggcugaggugggcagauca

SEQ ID NO: 885590 - RNA, 24 nt, Human
uuuuuuguaauucaaguaaaaaaa

SEQ ID NO: 885591 - RNA, 20 nt, Human
agugggccugaauagacacu

SEQ ID NO: 885592 - RNA, 23 nt, Human
caaacuuguuuccuuuuauucug

SEQ ID NO: 885593 - RNA, 19 nt, Human
cagugggccugaauagaca

SEQ ID NO: 885594 - RNA, 24 nt, Human
ccgcugcccacgauggacaccacc

SEQ ID NO: 885595 - RNA, 20 nt, Human
cuaaaguaaacagacaugca

SEQ ID NO: 885596 - RNA, 24 nt, Human
uaguccgcugcccacgauggacac

SEQ ID NO: 885597 - RNA, 20 nt, Human
ugacuucuggggaaacuccu

SEQ ID NO: 885598 - RNA, 18 nt, Human
ugcccacgauggacacca

SEQ ID NO: 885599 - RNA, 24 nt, Human
ugcccacgauggacaccaccaaua

SEQ ID NO: 885600 - RNA, 20 nt, Human
uggaacgucacuaaaguaaa

SEQ ID NO: 885601 - RNA, 22 nt, Human
uggccagacuuucaaaguagcu

SEQ ID NO: 885602 - RNA, 21 nt, Human
uucaaaguagcuucuugaaga

SEQ ID NO: 885603 - RNA, 24 nt, Human
aacauuuucccaauaaacugacua

SEQ ID NO: 885604 - RNA, 19 nt, Human
aagaaagaaaacccuuuaa

SEQ ID NO: 885605 - RNA, 24 nt, Human
aagauacaccaaagaaacuauaca

SEQ ID NO: 885606 - RNA, 21 nt, Human
aagcaggcagcugcugacagu

SEQ ID NO: 885607 - RNA, 21 nt, Human
aagccaaauaugacaacacac

SEQ ID NO: 885608 - RNA, 23 nt, Human
aaggcgaauguguaacugaggug

SEQ ID NO: 885609 - RNA, 26 nt, Human
aaucagaaagucugauuaaauucaau

SEQ ID NO: 885610 - RNA, 21 nt, Human
acagauguguuuuauuaaaaa

SEQ ID NO: 885611 - RNA, 23 nt, Human
agaaaagcaggcagcugcugaca

SEQ ID NO: 885612 - RNA, 21 nt, Human
aggcgaauguguaacugaggu

SEQ ID NO: 885613 - RNA, 18 nt, Human
auugcauuucuauuggcc

SEQ ID NO: 885614 - RNA, 24 nt, Human
caaauaugacaacacacauguaua

SEQ ID NO: 885615 - RNA, 26 nt, Human
caauaguaacucaaacucuuaaaaaa

SEQ ID NO: 885616 - RNA, 26 nt, Human
caucacagaaaagcaggcagcugcug

SEQ ID NO: 885617 - RNA, 18 nt, Human
ccaagcugcccaaaugau

SEQ ID NO: 885618 - RNA, 22 nt, Human
ccaauaaacugacuaagccuca

SEQ ID NO: 885619 - RNA, 23 nt, Human
cccaaaugauuaucaagccaagu

SEQ ID NO: 885620 - RNA, 24 nt, Human
ccucaaaaggacagcuuaggaaaa

SEQ ID NO: 885621 - RNA, 23 nt, Human
cucaaaaggacagcuuaggaaaa

SEQ ID NO: 885622 - RNA, 24 nt, Human
cuugacaaagugaagcauccaucc

SEQ ID NO: 885623 - RNA, 23 nt, Human
gaaaacccuuuaaucagaaaguc

SEQ ID NO: 885624 - RNA, 24 nt, Human
gaaaagaauccuuucaguccuaga

SEQ ID NO: 885625 - RNA, 19 nt, Human
gaacucaaaaggucuggua

SEQ ID NO: 885626 - RNA, 22 nt, Human
gcccaaaugauuaucaagccaa

SEQ ID NO: 885627 - RNA, 22 nt, Human
gggagggaagcgcgcgcgcggg

SEQ ID NO: 885628 - RNA, 19 nt, Human
ggugacugcgccgggaggg

SEQ ID NO: 885629 - RNA, 27 nt, Human
guauauagcaaaagccaaauaugacag

SEQ ID NO: 885630 - RNA, 18 nt, Human
uaaaaugaguacuaauag

SEQ ID NO: 885631 - RNA, 27 nt, Human
uaauagcaaggaauaauccuaaacauu

SEQ ID NO: 885632 - RNA, 22 nt, Human
uacaauacaaaaauuuaacaau

SEQ ID NO: 885633 - RNA, 23 nt, Human
uacauacaucacagaaaagcagg

SEQ ID NO: 885634 - RNA, 24 nt, Human
uagaaaagaauccuuucaguccua

SEQ ID NO: 885635 - RNA, 19 nt, Human
uagaaaaggcgaaugugua

SEQ ID NO: 885636 - RNA, 21 nt, Human
uagcaacacuuuuccuuuggu

SEQ ID NO: 885637 - RNA, 23 nt, Human
uagcaacacuuuuccuuugguuu

SEQ ID NO: 885638 - RNA, 21 nt, Human
uauagcaaaagccaaauauga

SEQ ID NO: 885639 - RNA, 20 nt, Human
ucacagaaaagcaggcagcu

SEQ ID NO: 885640 - RNA, 21 nt, Human
ucagaaagucugauuaaauuc

SEQ ID NO: 885641 - RNA, 24 nt, Human
ucccuggugagguacugcagaggu

SEQ ID NO: 885642 - RNA, 19 nt, Human
uccuggcuagaucacagga

SEQ ID NO: 885643 - RNA, 21 nt, Human
ugagguacugcagagguaugu

SEQ ID NO: 885644 - RNA, 19 nt, Human
ugcuuugcuucuugagcug

SEQ ID NO: 885645 - RNA, 19 nt, Human
uggggagaacuuacugaag

SEQ ID NO: 885646 - RNA, 24 nt, Human
uggggagaacuuacugaaggguaa

SEQ ID NO: 885647 - RNA, 21 nt, Human
uguuauugcaauagcacuugg

SEQ ID NO: 885648 - RNA, 18 nt, Human
uuacccaagcugcccaaa

SEQ ID NO: 885649 - RNA, 20 nt, Human
uuucugcucaauuacuacca

SEQ ID NO: 885650 - RNA, 20 nt, Human
uuuucaaaaauagguuuuaa

SEQ ID NO: 885651 - RNA, 20 nt, Human
agcugaaaaucacaggcuga

SEQ ID NO: 885652 - RNA, 23 nt, Human
cucucauauaaaacacugauuau

SEQ ID NO: 885653 - RNA, 21 nt, Human
aaaguuauuuguauuacagcu

SEQ ID NO: 885654 - RNA, 24 nt, Human
aaaucuaucugacuuugaagcuga

SEQ ID NO: 885655 - RNA, 19 nt, Human
aacaagagacaaucugcag

SEQ ID NO: 885656 - RNA, 19 nt, Human
aacacgcugaaugauaaga

SEQ ID NO: 885657 - RNA, 22 nt, Human
caacaagagacaaucugcaggg

SEQ ID NO: 885658 - RNA, 23 nt, Human
cagcuccuuaaagaaagaguaca

SEQ ID NO: 885659 - RNA, 20 nt, Human
cauauacacgaaaaagcaca

SEQ ID NO: 885660 - RNA, 21 nt, Human
cccauaguaaccuaauaaagc

SEQ ID NO: 885661 - RNA, 22 nt, Human
ccugaagaaguacagauuucug

SEQ ID NO: 885662 - RNA, 20 nt, Human
cuuaaagaaagaguacaaau

SEQ ID NO: 885663 - RNA, 19 nt, Human
cuuucacccuacauacuau

SEQ ID NO: 885664 - RNA, 18 nt, Human
cuuucauuaauguucaaa

SEQ ID NO: 885665 - RNA, 21 nt, Human
cuuugaugaacacugcacaaa

SEQ ID NO: 885666 - RNA, 18 nt, Human
gaaaaagcacaauuauaa

SEQ ID NO: 885667 - RNA, 20 nt, Human
gagaaaaaucuaucugacuu

SEQ ID NO: 885668 - RNA, 23 nt, Human
guuuuauuccagguucaguuuua

SEQ ID NO: 885669 - RNA, 23 nt, Human
uacauacuauauuccaauaguau

SEQ ID NO: 885670 - RNA, 18 nt, Human
ucaaaaaaacuuacgcaa

SEQ ID NO: 885671 - RNA, 23 nt, Human
ucagaaauuaauggcaaacccau

SEQ ID NO: 885672 - RNA, 23 nt, Human
ucuauacuguuguauugaucaaa

SEQ ID NO: 885673 - RNA, 18 nt, Human
ucuggauaauuuuauaua

SEQ ID NO: 885674 - RNA, 20 nt, Human
ugaggauuuccugaagaagu

SEQ ID NO: 885675 - RNA, 18 nt, Human
ugaguaggcaaaucugca

SEQ ID NO: 885676 - RNA, 23 nt, Human
uggcaaacccauaguaaccuaau

SEQ ID NO: 885677 - RNA, 22 nt, Human
uuaaagaaagaguacaaauugu

SEQ ID NO: 885678 - RNA, 24 nt, Human
uuccagguucaguuuuagguucac

SEQ ID NO: 885679 - RNA, 24 nt, Human
uuccugaagaaguacagauuucug

SEQ ID NO: 885680 - RNA, 21 nt, Human
aaacccggaggcucucggcag

SEQ ID NO: 885681 - RNA, 26 nt, Human
agcacauacauaagauacauuauaua

SEQ ID NO: 885682 - RNA, 24 nt, Human
caacagcagcggcggcugcaguga

SEQ ID NO: 885683 - RNA, 25 nt, Human
cagcagcggcggcugcagugaggcc

SEQ ID NO: 885684 - RNA, 21 nt, Human
cagcggcggcugcagugaggc

SEQ ID NO: 885685 - RNA, 24 nt, Human
cagcggcggcugcagugaggcccc

SEQ ID NO: 885686 - RNA, 24 nt, Human
ccaccgcaaacccggaggcucucg

SEQ ID NO: 885687 - RNA, 20 nt, Human
ccccaagguuaccgccaggc

SEQ ID NO: 885688 - RNA, 19 nt, Human
cgcaaacccggaggcucuc

SEQ ID NO: 885689 - RNA, 23 nt, Human
cgcaaagcccacuccaacagcag

SEQ ID NO: 885690 - RNA, 18 nt, Human
gccaggccuggcuaggga

SEQ ID NO: 885691 - RNA, 18 nt, Human
gccccccacgggccucag

SEQ ID NO: 885692 - RNA, 19 nt, Human
gcccgggugccugcccccc

SEQ ID NO: 885693 - RNA, 22 nt, Human
gguuaccgccaggccuggcuag

SEQ ID NO: 885694 - RNA, 19 nt, Human
uaaaugcaugcauguuuca

SEQ ID NO: 885695 - RNA, 23 nt, Human
uaagacuccugagacuaacacau

SEQ ID NO: 885696 - RNA, 18 nt, Human
uaucagauuaaauaauuc

SEQ ID NO: 885697 - RNA, 21 nt, Human
ucaaaaagcaguaauuugguu

SEQ ID NO: 885698 - RNA, 18 nt, Human
ucugacaccaauaucuaa

SEQ ID NO: 885699 - RNA, 21 nt, Human
ugaggcccccaagguuaccgc

SEQ ID NO: 885700 - RNA, 24 nt, Human
ugaggcccccaagguuaccgccag

SEQ ID NO: 885701 - RNA, 24 nt, Human
ugggaggcccggcgcccgggugcc

SEQ ID NO: 885702 - RNA, 20 nt, Human
uucaaggaaacaaaaauuuc

SEQ ID NO: 885703 - RNA, 23 nt, Human
uuuaaaauucugacaccaauauc

SEQ ID NO: 885704 - RNA, 18 nt, Human
aagaagguggaucccagg

SEQ ID NO: 885705 - RNA, 20 nt, Human
aaugcuggggagcuuuccuc

SEQ ID NO: 885706 - RNA, 23 nt, Human
aaugguucuuguugcccuaccag

SEQ ID NO: 885707 - RNA, 22 nt, Human
accaccucucugacaagcgcua

SEQ ID NO: 885708 - RNA, 20 nt, Human
accucagaaaccuacacccc

SEQ ID NO: 885709 - RNA, 18 nt, Human
agaaaacaacccuaacca

SEQ ID NO: 885710 - RNA, 25 nt, Human
agaaauaaaaaaggacacuaauaac

SEQ ID NO: 885711 - RNA, 25 nt, Human
agagauaugucucuuuccagucuuc

SEQ ID NO: 885712 - RNA, 18 nt, Human
agucuuucuaaacacucu

SEQ ID NO: 885713 - RNA, 21 nt, Human
aucaaaaaguuccuggauucc

SEQ ID NO: 885714 - RNA, 23 nt, Human
cacaauuaacagucaagaacaaa

SEQ ID NO: 885715 - RNA, 21 nt, Human
cacagcugagccucugucacc

SEQ ID NO: 885716 - RNA, 21 nt, Human
caccagagaaggcugaggccc

SEQ ID NO: 885717 - RNA, 19 nt, Human
cacccuuugccagacaguu

SEQ ID NO: 885718 - RNA, 19 nt, Human
caccucagaaaccuacacc

SEQ ID NO: 885719 - RNA, 21 nt, Human
caccucagaaaccuacacccc

SEQ ID NO: 885720 - RNA, 24 nt, Human
cacgccuccugaaaaagcugagag

SEQ ID NO: 885721 - RNA, 20 nt, Human
cagcugagccucugucacca

SEQ ID NO: 885722 - RNA, 18 nt, Human
cauucagagaggcuggca

SEQ ID NO: 885723 - RNA, 23 nt, Human
cauugguugggggccauggcggg

SEQ ID NO: 885724 - RNA, 18 nt, Human
ccagacaguuugucucca

SEQ ID NO: 885725 - RNA, 21 nt, Human
cccacccaguuuccuuugccu

SEQ ID NO: 885726 - RNA, 22 nt, Human
ccccggaggccagaucuuuacu

SEQ ID NO: 885727 - RNA, 24 nt, Human
ccuaaggcucuuacuccuggauuu

SEQ ID NO: 885728 - RNA, 23 nt, Human
ccuuugccagacaguuugucucc

SEQ ID NO: 885729 - RNA, 28 nt, Human
cuaauugauccuccccacccaguuuccu

SEQ ID NO: 885730 - RNA, 23 nt, Human
cucucugccccuucugccuccua

SEQ ID NO: 885731 - RNA, 18 nt, Human
gacacuaauaacauuugu

SEQ ID NO: 885732 - RNA, 28 nt, Human
gagggauagaagcagugucccuauucug

SEQ ID NO: 885733 - RNA, 28 nt, Human
gccccaauggcacaccucagaaaccuac

SEQ ID NO: 885734 - RNA, 20 nt, Human
gcucugggcuguucaaaggu

SEQ ID NO: 885735 - RNA, 23 nt, Human
ggcuggacuccugagcacaagcu

SEQ ID NO: 885736 - RNA, 18 nt, Human
guugccagaaucucucca

SEQ ID NO: 885737 - RNA, 19 nt, Human
uaaaauaacuuuuaagagg

SEQ ID NO: 885738 - RNA, 21 nt, Human
uaagaaaacaacccuaaccau

SEQ ID NO: 885739 - RNA, 26 nt, Human
uaccaggaaaagaauuaagaaaacaa

SEQ ID NO: 885740 - RNA, 27 nt, Human
uaccaggaaaagaauuaagaaaacaac

SEQ ID NO: 885741 - RNA, 23 nt, Human
uccuggauucccaggcacgccuc

SEQ ID NO: 885742 - RNA, 21 nt, Human
ucucauccccucggaccucca

SEQ ID NO: 885743 - RNA, 22 nt, Human
ucucuaauugauccuccccacc

SEQ ID NO: 885744 - RNA, 24 nt, Human
ucucuccauuggagggauagaagc

SEQ ID NO: 885745 - RNA, 19 nt, Human
ucucugccccuucugccuc

SEQ ID NO: 885746 - RNA, 21 nt, Human
ucucuuuccagucuucuuggg

SEQ ID NO: 885747 - RNA, 22 nt, Human
ucugccccuucugccuccuccc

SEQ ID NO: 885748 - RNA, 24 nt, Human
ucugucaccagagaaggcugaggc

SEQ ID NO: 885749 - RNA, 19 nt, Human
ugacaagcgcuaauagcau

SEQ ID NO: 885750 - RNA, 19 nt, Human
ugagcuggauucguugcaa

SEQ ID NO: 885751 - RNA, 20 nt, Human
ugcccuaccaggaaaagaag

SEQ ID NO: 885752 - RNA, 21 nt, Human
uggacuccugagcacaagcuc

SEQ ID NO: 885753 - RNA, 23 nt, Human
uggacuccugagcacaagcuccc

SEQ ID NO: 885754 - RNA, 24 nt, Human
uggaggaggggaccuaaggaagaa

SEQ ID NO: 885755 - RNA, 22 nt, Human
uggcacaccucagaaaccuaca

SEQ ID NO: 885756 - RNA, 22 nt, Human
ugggugaggcuagguugcaagc

SEQ ID NO: 885757 - RNA, 23 nt, Human
ugguggccacagcugagccucug

SEQ ID NO: 885758 - RNA, 24 nt, Human
ugguugugugugugugguugugug

SEQ ID NO: 885759 - RNA, 20 nt, Human
ugucucaguacuuuguacug

SEQ ID NO: 885760 - RNA, 21 nt, Human
ugugugugugguugugugugu

SEQ ID NO: 885761 - RNA, 23 nt, Human
ugugugugugguugugugugugu

SEQ ID NO: 885762 - RNA, 24 nt, Human
ugugugugugguugugugugugug

SEQ ID NO: 885763 - RNA, 20 nt, Human
ugugugugugugguugugug

SEQ ID NO: 885764 - RNA, 21 nt, Human
ugugugugugugguugugugu

SEQ ID NO: 885765 - RNA, 19 nt, Human
uguguguugguggccacag

SEQ ID NO: 885766 - RNA, 22 nt, Human
uguguugguggccacagcugag

SEQ ID NO: 885767 - RNA, 23 nt, Human
uuccucuagauuggaaaugguuc

SEQ ID NO: 885768 - RNA, 19 nt, Human
uugauccuccccacccagu

SEQ ID NO: 885769 - RNA, 21 nt, Human
uugccagaaucucuccauugg

SEQ ID NO: 885770 - RNA, 24 nt, Human
uugccagaaucucuccauuggagg

SEQ ID NO: 885771 - RNA, 18 nt, Human
uugcccaggagcaagcaa

SEQ ID NO: 885772 - RNA, 27 nt, Human
uugcccuaccaggaaaagaauuaagaa

SEQ ID NO: 885773 - RNA, 22 nt, Human
uugugugugugugguugugugu

SEQ ID NO: 885774 - RNA, 24 nt, Human
uuuaagaggacaaggcauuagaaa

SEQ ID NO: 885775 - RNA, 21 nt, Human
uuugugugugugguugugugu

SEQ ID NO: 885776 - RNA, 21 nt, Human
uuuuuuuuuuuuuuuuucacc

SEQ ID NO: 885777 - RNA, 20 nt, Human
aggcaccccaggcaccggca

SEQ ID NO: 885778 - RNA, 18 nt, Human
cccuggcugggggaaagg

SEQ ID NO: 885779 - RNA, 22 nt, Human
aagaugguaugcaauaauucuu

SEQ ID NO: 885780 - RNA, 24 nt, Human
acccgccugcucagccagaucaac

SEQ ID NO: 885781 - RNA, 19 nt, Human
agauagauacuuguaugcc

SEQ ID NO: 885782 - RNA, 22 nt, Human
cacccgccugcucagccagauc

SEQ ID NO: 885783 - RNA, 21 nt, Human
cagcacugcugucucuccucu

SEQ ID NO: 885784 - RNA, 21 nt, Human
cagccagaucaaccaaaucaa

SEQ ID NO: 885785 - RNA, 20 nt, Human
caggaaagccuagccugaua

SEQ ID NO: 885786 - RNA, 21 nt, Human
cagugagggaggacggggaca

SEQ ID NO: 885787 - RNA, 22 nt, Human
ccaaaucaauccuggcgaucaa

SEQ ID NO: 885788 - RNA, 21 nt, Human
ccagauagauacuuguaugcc

SEQ ID NO: 885789 - RNA, 20 nt, Human
cuuugaaaaaugagcaggaa

SEQ ID NO: 885790 - RNA, 22 nt, Human
gaaggcucucaaugggaaaaug

SEQ ID NO: 885791 - RNA, 22 nt, Human
ggagaagaaguggucacaggug

SEQ ID NO: 885792 - RNA, 18 nt, Human
guaaagugcaugcagucc

SEQ ID NO: 885793 - RNA, 19 nt, Human
gugaaagauguugcaguca

SEQ ID NO: 885794 - RNA, 19 nt, Human
uaccaaaagguaaaugcuc

SEQ ID NO: 885795 - RNA, 19 nt, Human
uacccucaaaucuggagcg

SEQ ID NO: 885796 - RNA, 21 nt, Human
uaggagggacacauauggggc

SEQ ID NO: 885797 - RNA, 21 nt, Human
uaugcaauaauucuuaugaga

SEQ ID NO: 885798 - RNA, 19 nt, Human
uccuccucuaucagagaag

SEQ ID NO: 885799 - RNA, 22 nt, Human
ucguccucuucaacugagcaug

SEQ ID NO: 885800 - RNA, 22 nt, Human
ucucccagcacugcugucucuc

SEQ ID NO: 885801 - RNA, 22 nt, Human
ucucuccucuuucuccuuggua

SEQ ID NO: 885802 - RNA, 22 nt, Human
ugaggggaggaacaucucugag

SEQ ID NO: 885803 - RNA, 20 nt, Human
ugaguucccauggaaggcuc

SEQ ID NO: 885804 - RNA, 21 nt, Human
ugcugucucuccucuuucucc

SEQ ID NO: 885805 - RNA, 23 nt, Human
ugggaucuccucacucccagacu

SEQ ID NO: 885806 - RNA, 22 nt, Human
ugguaaguacagggcuuguuuc

SEQ ID NO: 885807 - RNA, 20 nt, Human
ugugcuggugucaacaggag

SEQ ID NO: 885808 - RNA, 18 nt, Human
uucuauuugagaaucucc

SEQ ID NO: 885809 - RNA, 21 nt, Human
uuggagaagaaguggucacag

SEQ ID NO: 885810 - RNA, 20 nt, Human
aaagagaaaaaaggugacag

SEQ ID NO: 885811 - RNA, 19 nt, Human
aagaagcccccuauacuuc

SEQ ID NO: 885812 - RNA, 23 nt, Human
aagaagcccccuauacuucucua

SEQ ID NO: 885813 - RNA, 21 nt, Human
aagguaugaaaggguuugagg

SEQ ID NO: 885814 - RNA, 19 nt, Human
accacuguaaccuccuggc

SEQ ID NO: 885815 - RNA, 19 nt, Human
accccuaaccucugccugc

SEQ ID NO: 885816 - RNA, 24 nt, Human
agaaaaaaggugacagaaagagaa

SEQ ID NO: 885817 - RNA, 18 nt, Human
agaaugccuguuugcugg

SEQ ID NO: 885818 - RNA, 22 nt, Human
agagaaaaaaggugacagaaag

SEQ ID NO: 885819 - RNA, 21 nt, Human
agcccagcagggaagaagccc

SEQ ID NO: 885820 - RNA, 24 nt, Human
aggcaggaacccaggggcagggga

SEQ ID NO: 885821 - RNA, 19 nt, Human
cagcagggaagaagccccc

SEQ ID NO: 885822 - RNA, 21 nt, Human
ccagcagggaagaagcccccu

SEQ ID NO: 885823 - RNA, 20 nt, Human
cccaggggcaggggagggga

SEQ ID NO: 885824 - RNA, 23 nt, Human
cccugcaagcugaugguaccgag

SEQ ID NO: 885825 - RNA, 20 nt, Human
ccuaaccucugccugcggcc

SEQ ID NO: 885826 - RNA, 18 nt, Human
cgcccgcggaccgccauc

SEQ ID NO: 885827 - RNA, 21 nt, Human
cucagugcaagggaagaagga

SEQ ID NO: 885828 - RNA, 21 nt, Human
cucaucaaggccuccaggacc

SEQ ID NO: 885829 - RNA, 22 nt, Human
gaaaaaagagaaaaaaggugac

SEQ ID NO: 885830 - RNA, 18 nt, Human
gaaagauagaacuggugg

SEQ ID NO: 885831 - RNA, 26 nt, Human
gcuugaggagggaaggcaggaaccca

SEQ ID NO: 885832 - RNA, 18 nt, Human
gggcaggggaggggaucu

SEQ ID NO: 885833 - RNA, 20 nt, Human
gguaugacuaaggggauguu

SEQ ID NO: 885834 - RNA, 18 nt, Human
ggugacagaaagagaaag

SEQ ID NO: 885835 - RNA, 19 nt, Human
guugggguucugggcagcc

SEQ ID NO: 885836 - RNA, 26 nt, Human
uacuugggugugguaugacuaagggg

SEQ ID NO: 885837 - RNA, 20 nt, Human
uaggacggcuccauaagcga

SEQ ID NO: 885838 - RNA, 20 nt, Human
uauaaacccagcugugagaa

SEQ ID NO: 885839 - RNA, 23 nt, Human
ucagcaauuaugaugaccacugu

SEQ ID NO: 885840 - RNA, 18 nt, Human
ucagugcaagggaagaag

SEQ ID NO: 885841 - RNA, 24 nt, Human
ucugggcagcccaugcuucagccc

SEQ ID NO: 885842 - RNA, 21 nt, Human
ucuuagcaaagccuccucggg

SEQ ID NO: 885843 - RNA, 21 nt, Human
ugacagaaagagaaagauaga

SEQ ID NO: 885844 - RNA, 21 nt, Human
ugagagcagugugguaagccc

SEQ ID NO: 885845 - RNA, 22 nt, Human
ugaggagggaaggcaggaaccc

SEQ ID NO: 885846 - RNA, 23 nt, Human
ugaugguaccgagcaugagacug

SEQ ID NO: 885847 - RNA, 22 nt, Human
ugcuucagccccugcaagcuga

SEQ ID NO: 885848 - RNA, 19 nt, Human
uggggaagaaugugaauua

SEQ ID NO: 885849 - RNA, 22 nt, Human
ugggguucugggcagcccaugc

SEQ ID NO: 885850 - RNA, 24 nt, Human
uuauucuaaagaaauuucgaagaa

SEQ ID NO: 885851 - RNA, 22 nt, Human
acaccugggcggccgcaggacu

SEQ ID NO: 885852 - RNA, 23 nt, Human
accacauccgcucccuagcuccg

SEQ ID NO: 885853 - RNA, 21 nt, Human
accugggcggccgcaggacuc

SEQ ID NO: 885854 - RNA, 21 nt, Human
agcugcccaugggcccggggu

SEQ ID NO: 885855 - RNA, 24 nt, Human
aggaguccggccagcccaccacau

SEQ ID NO: 885856 - RNA, 24 nt, Human
cacacccaggccgugggcagccac

SEQ ID NO: 885857 - RNA, 20 nt, Human
caccccuucuccaagcggca

SEQ ID NO: 885858 - RNA, 27 nt, Human
cacccuccgagacaccugggccggggg

SEQ ID NO: 885859 - RNA, 19 nt, Human
cagcacagugaccccuucc

SEQ ID NO: 885860 - RNA, 19 nt, Human
cagcacagugaccccuucc

SEQ ID NO: 885861 - RNA, 21 nt, Human
cagugaccccuucccuggucc

SEQ ID NO: 885862 - RNA, 20 nt, Human
cauacccccuccccauccca

SEQ ID NO: 885863 - RNA, 19 nt, Human
cauccgaggcacuuggugg

SEQ ID NO: 885864 - RNA, 19 nt, Human
cauuccagccacacccagg

SEQ ID NO: 885865 - RNA, 22 nt, Human
cauuccagccacacccaggccg

SEQ ID NO: 885866 - RNA, 23 nt, Human
cauuccagccacacccaggccgu

SEQ ID NO: 885867 - RNA, 19 nt, Human
cccaggaguccggccagcc

SEQ ID NO: 885868 - RNA, 21 nt, Human
ccccacugagcuccuuucuca

SEQ ID NO: 885869 - RNA, 23 nt, Human
ccccaucccaucuuggcaaagcg

SEQ ID NO: 885870 - RNA, 19 nt, Human
ccccauggccaccggggcc

SEQ ID NO: 885871 - RNA, 25 nt, Human
ccccuccccaucccaucuuggcaaa

SEQ ID NO: 885872 - RNA, 19 nt, Human
ccggcgaggccaccccuuc

SEQ ID NO: 885873 - RNA, 29 nt, Human
ccuccgagacaccugggccgggggcaggg

SEQ ID NO: 885874 - RNA, 18 nt, Human
ccugaggcccaaggaggc

SEQ ID NO: 885875 - RNA, 21 nt, Human
ccugcacugccccacagcaag

SEQ ID NO: 885876 - RNA, 20 nt, Human
ccugggcggccgcaggacuc

SEQ ID NO: 885877 - RNA, 26 nt, Human
cggggucaagccaccacccacauguc

SEQ ID NO: 885878 - RNA, 22 nt, Human
cgugggcagccacccuccgaga

SEQ ID NO: 885879 - RNA, 22 nt, Human
cucauacccccuccccauccca

SEQ ID NO: 885880 - RNA, 24 nt, Human
cuccugccaccauuccagccacac

SEQ ID NO: 885881 - RNA, 20 nt, Human
cuggugcagcuuagggcagc

SEQ ID NO: 885882 - RNA, 22 nt, Human
gaccaccuccccacugagcucc

SEQ ID NO: 885883 - RNA, 18 nt, Human
gaccccuucccugguccg

SEQ ID NO: 885884 - RNA, 20 nt, Human
gccaccccuucuccaagcgg

SEQ ID NO: 885885 - RNA, 25 nt, Human
gcccacuccugccaccauuccagcc

SEQ ID NO: 885886 - RNA, 22 nt, Human
gcccggggucaagccaccaccc

SEQ ID NO: 885887 - RNA, 23 nt, Human
gcuuagggcagcugaagcacucg

SEQ ID NO: 885888 - RNA, 18 nt, Human
ggcauagccagagcuggg

SEQ ID NO: 885889 - RNA, 21 nt, Human
ggccgggggcagggucucagc

SEQ ID NO: 885890 - RNA, 21 nt, Human
guucucauacccccuccccau

SEQ ID NO: 885891 - RNA, 23 nt, Human
ucccagcacagugaccccuuccc

SEQ ID NO: 885892 - RNA, 24 nt, Human
uccgcuggagggaccaccucccca

SEQ ID NO: 885893 - RNA, 23 nt, Human
uccugccaccauuccagccacac

SEQ ID NO: 885894 - RNA, 22 nt, Human
ucucauacccccuccccauccc

SEQ ID NO: 885895 - RNA, 20 nt, Human
ugcagcuuagggcagcugaa

SEQ ID NO: 885896 - RNA, 22 nt, Human
ugcccacuccugccaccauucc

SEQ ID NO: 885897 - RNA, 20 nt, Human
uggggugagaaagcccuuca

SEQ ID NO: 885898 - RNA, 22 nt, Human
ugguuuccugaggcccaaggag

SEQ ID NO: 885899 - RNA, 18 nt, Human
uuccagccacacccaggc

SEQ ID NO: 885900 - RNA, 25 nt, Human
uuggcagcaaugcugguuuauuccc

SEQ ID NO: 885901 - RNA, 22 nt, Human
uuggugguuuccugaggcccaa

SEQ ID NO: 885902 - RNA, 20 nt, Human
uuuuuuggcagcaaugcugg

SEQ ID NO: 885903 - RNA, 22 nt, Human
uuuuuuuuuuuuuuuuuggcag

SEQ ID NO: 885904 - RNA, 24 nt, Human
aaaaaagccaggagaaaacccaga

SEQ ID NO: 885905 - RNA, 25 nt, Human
aaaaagccaggagaaaacccagaua

SEQ ID NO: 885906 - RNA, 21 nt, Human
aaacagaagcuaaaaagguau

SEQ ID NO: 885907 - RNA, 26 nt, Human
aaacagaagcuaaaaagguaugccug

SEQ ID NO: 885908 - RNA, 21 nt, Human
aaacauuauauaccacaaacu

SEQ ID NO: 885909 - RNA, 24 nt, Human
aaagccaggagaaaacccagauaa

SEQ ID NO: 885910 - RNA, 19 nt, Human
aacccugacuguaaccguu

SEQ ID NO: 885911 - RNA, 18 nt, Human
aacuccacaaacagaagc

SEQ ID NO: 885912 - RNA, 19 nt, Human
aacucucucuucagguucu

SEQ ID NO: 885913 - RNA, 26 nt, Human
aagcaacagcaaacaccuucccucac

SEQ ID NO: 885914 - RNA, 23 nt, Human
aagcagggcuuuuuugcacagcc

SEQ ID NO: 885915 - RNA, 20 nt, Human
aagccguagccggacucgga

SEQ ID NO: 885916 - RNA, 23 nt, Human
aauccccgacgucgggcaucuaa

SEQ ID NO: 885917 - RNA, 23 nt, Human
acaacuccacaaacagaagcuaa

SEQ ID NO: 885918 - RNA, 22 nt, Human
acacagagggaaaaaaaagcca

SEQ ID NO: 885919 - RNA, 25 nt, Human
acagcaguaaagcaacagcaaacac

SEQ ID NO: 885920 - RNA, 23 nt, Human
acaugaaaggaguaagaggaugg

SEQ ID NO: 885921 - RNA, 21 nt, Human
accccccgccgccgccgccac

SEQ ID NO: 885922 - RNA, 20 nt, Human
acccccgcccccuacgccuc

SEQ ID NO: 885923 - RNA, 21 nt, Human
agacagcaguaaagcaacagc

SEQ ID NO: 885924 - RNA, 20 nt, Human
agacugccaggacucaucca

SEQ ID NO: 885925 - RNA, 18 nt, Human
agcaaacaccuucccuca

SEQ ID NO: 885926 - RNA, 19 nt, Human
agcaggcgagccguacccc

SEQ ID NO: 885927 - RNA, 27 nt, Human
agcaggcgagccguacccccgcccccu

SEQ ID NO: 885928 - RNA, 21 nt, Human
aggaacaacauggagggugau

SEQ ID NO: 885929 - RNA, 19 nt, Human
aggaauuccugcaugaugu

SEQ ID NO: 885930 - RNA, 18 nt, Human
aggaugggggugaaggga

SEQ ID NO: 885931 - RNA, 23 nt, Human
aggaugggggugaagggaaggga

SEQ ID NO: 885932 - RNA, 21 nt, Human
auugggaaggcacaucuccuc

SEQ ID NO: 885933 - RNA, 21 nt, Human
caacuccacaaacagaagcua

SEQ ID NO: 885934 - RNA, 24 nt, Human
caacuccacaaacagaagcuaaaa

SEQ ID NO: 885935 - RNA, 18 nt, Human
caacugaggacagcuucc

SEQ ID NO: 885936 - RNA, 18 nt, Human
caaucugauuggccacau

SEQ ID NO: 885937 - RNA, 23 nt, Human
cacaaacagaagcuaaaaaggua

SEQ ID NO: 885938 - RNA, 20 nt, Human
caccuccguuccugugaggg

SEQ ID NO: 885939 - RNA, 23 nt, Human
caccuucccucacacaaacauuc

SEQ ID NO: 885940 - RNA, 25 nt, Human
cacgacccgcgggccgccgccuccc

SEQ ID NO: 885941 - RNA, 21 nt, Human
cacuucccugggagucgagga

SEQ ID NO: 885942 - RNA, 22 nt, Human
cagacagcaguaaagcaacagc

SEQ ID NO: 885943 - RNA, 25 nt, Human
cagagcccaauguucuuucuacugu

SEQ ID NO: 885944 - RNA, 26 nt, Human
cagagggaaaaaaaagccaggagaaa

SEQ ID NO: 885945 - RNA, 26 nt, Human
cagcaaacaccuucccucacacaaac

SEQ ID NO: 885946 - RNA, 21 nt, Human
caguaaagcaacagcaaacac

SEQ ID NO: 885947 - RNA, 18 nt, Human
cagucaagacggcuacaa

SEQ ID NO: 885948 - RNA, 22 nt, Human
cauagccuuuuagagccggaag

SEQ ID NO: 885949 - RNA, 18 nt, Human
ccacaaacuucucaccau

SEQ ID NO: 885950 - RNA, 23 nt, Human
ccccccgccgccgccgccaccuc

SEQ ID NO: 885951 - RNA, 23 nt, Human
cccccgacgcgcgcgcccgaucc

SEQ ID NO: 885952 - RNA, 21 nt, Human
cccccgccgccgccgccaccu

SEQ ID NO: 885953 - RNA, 18 nt, Human
cccccgccgccguucccg

SEQ ID NO: 885954 - RNA, 19 nt, Human
ccccgcacguugaagccgu

SEQ ID NO: 885955 - RNA, 23 nt, Human
ccccgccgccgccgccaccuccg

SEQ ID NO: 885956 - RNA, 24 nt, Human
ccccgccgccgccgccaccuccgu

SEQ ID NO: 885957 - RNA, 21 nt, Human
ccgccgccaccuccguuccug

SEQ ID NO: 885958 - RNA, 19 nt, Human
ccgccgccguucccggcgc

SEQ ID NO: 885959 - RNA, 21 nt, Human
ccgccgccucccccgccgccg

SEQ ID NO: 885960 - RNA, 18 nt, Human
ccggcgcgugcucgcccu

SEQ ID NO: 885961 - RNA, 18 nt, Human
ccucacacaaacauucuu

SEQ ID NO: 885962 - RNA, 19 nt, Human
ccuccaaggccucccggcg

SEQ ID NO: 885963 - RNA, 23 nt, Human
ccucccccgccgccguucccggc

SEQ ID NO: 885964 - RNA, 19 nt, Human
cgacccgcgggccgccgcc

SEQ ID NO: 885965 - RNA, 25 nt, Human
cgcaguggagcccagaccccccgcc

SEQ ID NO: 885966 - RNA, 19 nt, Human
cgccuagaaagacugccag

SEQ ID NO: 885967 - RNA, 20 nt, Human
cgccuagaaagacugccagg

SEQ ID NO: 885968 - RNA, 18 nt, Human
cggaagggaccuuggaua

SEQ ID NO: 885969 - RNA, 20 nt, Human
cuacaacugaggacagcuuc

SEQ ID NO: 885970 - RNA, 23 nt, Human
cuccucuuaucuggagacaacuc

SEQ ID NO: 885971 - RNA, 22 nt, Human
cucgcccugccuggcagccgga

SEQ ID NO: 885972 - RNA, 21 nt, Human
cuggaaaauguucugaaagga

SEQ ID NO: 885973 - RNA, 18 nt, Human
cuggagacaacuccacaa

SEQ ID NO: 885974 - RNA, 20 nt, Human
cuguaguacuguucuuuuua

SEQ ID NO: 885975 - RNA, 18 nt, Human
gaaaggaaaaaaaaaaga

SEQ ID NO: 885976 - RNA, 18 nt, Human
gaaucuuccaaauucugu

SEQ ID NO: 885977 - RNA, 26 nt, Human
gacaugaaaggaguaagaggauggaa

SEQ ID NO: 885978 - RNA, 24 nt, Human
gacccgcgggccgccgccuccccc

SEQ ID NO: 885979 - RNA, 20 nt, Human
gagccguacccccgcccccu

SEQ ID NO: 885980 - RNA, 19 nt, Human
gcgcaguggagcccagacc

SEQ ID NO: 885981 - RNA, 19 nt, Human
gcgggccgccgccuccccc

SEQ ID NO: 885982 - RNA, 23 nt, Human
gcucgcccugccuggcagccgga

SEQ ID NO: 885983 - RNA, 23 nt, Human
gcugugaccucgccaucuggaaa

SEQ ID NO: 885984 - RNA, 25 nt, Human
ggaauuccugcaugaugucacucuu

SEQ ID NO: 885985 - RNA, 22 nt, Human
ggcaaacucucucuucagguuc

SEQ ID NO: 885986 - RNA, 19 nt, Human
ggccacuucccugggaguc

SEQ ID NO: 885987 - RNA, 27 nt, Human
guaaagcaacagcaaacaccuucccuc

SEQ ID NO: 885988 - RNA, 21 nt, Human
guacuguucuuuuuaacccug

SEQ ID NO: 885989 - RNA, 25 nt, Human
gugguucuuggccccgcacguugaa

SEQ ID NO: 885990 - RNA, 24 nt, Human
uaaggaaaggcuagguggccacau

SEQ ID NO: 885991 - RNA, 24 nt, Human
uacccccgcccccuacgccuccaa

SEQ ID NO: 885992 - RNA, 18 nt, Human
uaccgcuuagaacacagc

SEQ ID NO: 885993 - RNA, 19 nt, Human
uaccgcuuagaacacagcu

SEQ ID NO: 885994 - RNA, 21 nt, Human
uaccgcuuagaacacagcugc

SEQ ID NO: 885995 - RNA, 22 nt, Human
uacucguauugaacacacuuuu

SEQ ID NO: 885996 - RNA, 24 nt, Human
uagaacacagcugccucccugcca

SEQ ID NO: 885997 - RNA, 22 nt, Human
ucaagacggcuacaacugagga

SEQ ID NO: 885998 - RNA, 23 nt, Human
uccacaaacagaagcuaaaaagg

SEQ ID NO: 885999 - RNA, 33 nt, Human
uccccugugggucaggaacaacauggaggguug

SEQ ID NO: 886000 - RNA, 22 nt, Human
ucccucacacaaacauucuugg

SEQ ID NO: 886001 - RNA, 23 nt, Human
ucuagacaagggaagaagcaggg

SEQ ID NO: 886002 - RNA, 19 nt, Human
ugaaaggaaaaaaaaaaga

SEQ ID NO: 886003 - RNA, 19 nt, Human
ugaagccguagccggacuc

SEQ ID NO: 886004 - RNA, 20 nt, Human
ugcuggaagaauguccuggc

SEQ ID NO: 886005 - RNA, 18 nt, Human
ugcuugcuuuucugugua

SEQ ID NO: 886006 - RNA, 21 nt, Human
uggagcccagaccccccgccg

SEQ ID NO: 886007 - RNA, 18 nt, Human
uggcacauacagacagca

SEQ ID NO: 886008 - RNA, 25 nt, Human
uggcagaggaggguccaugaaguca

SEQ ID NO: 886009 - RNA, 25 nt, Human
ugggucaggaacaacauggagggug

SEQ ID NO: 886010 - RNA, 19 nt, Human
uguaaacauuauauaccac

SEQ ID NO: 886011 - RNA, 18 nt, Human
uguagccaauguccaccc

SEQ ID NO: 886012 - RNA, 19 nt, Human
uguccuggcucacaugaga

SEQ ID NO: 886013 - RNA, 22 nt, Human
uguccuggcucacaugagauaa

SEQ ID NO: 886014 - RNA, 18 nt, Human
uguguaaucauaaaauga

SEQ ID NO: 886015 - RNA, 23 nt, Human
uguguaaucauaaaaugauuguc

SEQ ID NO: 886016 - RNA, 22 nt, Human
ugugucgcccccucaacauuca

SEQ ID NO: 886017 - RNA, 21 nt, Human
uuaacccugacuguaaccguu

SEQ ID NO: 886018 - RNA, 24 nt, Human
uucaccauccagaggccaaccuug

SEQ ID NO: 886019 - RNA, 20 nt, Human
uucagaaucuuccaaauucc

SEQ ID NO: 886020 - RNA, 22 nt, Human
uucagguucugguguaggauag

SEQ ID NO: 886021 - RNA, 22 nt, Human
uuccccugugggucaggaacaa

SEQ ID NO: 886022 - RNA, 21 nt, Human
uuuaaaaaacuggcagaggag

SEQ ID NO: 886023 - RNA, 20 nt, Human
uuuuuuuuuuuuuuuuuugg

SEQ ID NO: 886024 - RNA, 21 nt, Human
uuuuuuuuuuuuuuuuuuguu

SEQ ID NO: 886025 - RNA, 19 nt, Human
aaaaucugggcaccaggug

SEQ ID NO: 886026 - RNA, 19 nt, Human
aaacaggacaauaaagucc

SEQ ID NO: 886027 - RNA, 20 nt, Human
aaagugcugggauuacaggg

SEQ ID NO: 886028 - RNA, 24 nt, Human
aaagugcugggauuacagggguga

SEQ ID NO: 886029 - RNA, 21 nt, Human
aaaugaccuuuuuuucuuuuc

SEQ ID NO: 886030 - RNA, 24 nt, Human
aagcgauucuccuguucagccucc

SEQ ID NO: 886031 - RNA, 18 nt, Human
aagugcugggauuacagg

SEQ ID NO: 886032 - RNA, 21 nt, Human
aagugcugggauuacaggggu

SEQ ID NO: 886033 - RNA, 26 nt, Human
aagugcugggauuacaggggugagcc

SEQ ID NO: 886034 - RNA, 18 nt, Human
aaugaaauaagacaaacc

SEQ ID NO: 886035 - RNA, 20 nt, Human
acagaucuguagaaggaucc

SEQ ID NO: 886036 - RNA, 21 nt, Human
acaggacaauaaaguccagag

SEQ ID NO: 886037 - RNA, 21 nt, Human
acaguucauaucccaguucua

SEQ ID NO: 886038 - RNA, 19 nt, Human
accaaaugaccuuuuuuuc

SEQ ID NO: 886039 - RNA, 19 nt, Human
acugcaggugcauaccacc

SEQ ID NO: 886040 - RNA, 18 nt, Human
acuguuauucaacaaagc

SEQ ID NO: 886041 - RNA, 21 nt, Human
agaaaaaaaauaugcaaagaa

SEQ ID NO: 886042 - RNA, 25 nt, Human
agaaaaaaaauaugcaaagaauuuu

SEQ ID NO: 886043 - RNA, 24 nt, Human
agacuuggguucugaguucugggg

SEQ ID NO: 886044 - RNA, 24 nt, Human
agcagaaaaaaaauaugcaaagaa

SEQ ID NO: 886045 - RNA, 24 nt, Human
agcuguggccuuucagagauccuu

SEQ ID NO: 886046 - RNA, 18 nt, Human
aggaggaccacagaggua

SEQ ID NO: 886047 - RNA, 19 nt, Human
aggcuggagugcaguggca

SEQ ID NO: 886048 - RNA, 24 nt, Human
aggugauccgccugcuuuggccuc

SEQ ID NO: 886049 - RNA, 20 nt, Human
agugcaguggcaugaccuug

SEQ ID NO: 886050 - RNA, 23 nt, Human
agugcaguggcaugaccuuggcu

SEQ ID NO: 886051 - RNA, 24 nt, Human
agugcaguggcaugaccuuggcuc

SEQ ID NO: 886052 - RNA, 23 nt, Human
augaccuuuuuuucuuuucgugg

SEQ ID NO: 886053 - RNA, 18 nt, Human
auuucuccacuguaaagu

SEQ ID NO: 886054 - RNA, 21 nt, Human
caaaguaagauauucuaaaau

SEQ ID NO: 886055 - RNA, 24 nt, Human
caaaguaagauauucuaaaauccc

SEQ ID NO: 886056 - RNA, 24 nt, Human
caaagugcugggauuacaggggug

SEQ ID NO: 886057 - RNA, 19 nt, Human
cacaagagauuuguuccca

SEQ ID NO: 886058 - RNA, 21 nt, Human
cacaagauacucuaggcucau

SEQ ID NO: 886059 - RNA, 18 nt, Human
caccauguuggcccggcu

SEQ ID NO: 886060 - RNA, 24 nt, Human
caccauguuggcccggcuggucuc

SEQ ID NO: 886061 - RNA, 20 nt, Human
caggugcauaccaccacccc

SEQ ID NO: 886062 - RNA, 26 nt, Human
caggugugcucccauucuaguuguuu

SEQ ID NO: 886063 - RNA, 24 nt, Human
cauaccaccaccccuggcuaauuu

SEQ ID NO: 886064 - RNA, 21 nt, Human
cauuuucuaaggaguccuggu

SEQ ID NO: 886065 - RNA, 19 nt, Human
ccaaagugcugggauuaca

SEQ ID NO: 886066 - RNA, 20 nt, Human
ccaaagugcugggauuacag

SEQ ID NO: 886067 - RNA, 21 nt, Human
ccaaagugcugggauuacagg

SEQ ID NO: 886068 - RNA, 24 nt, Human
ccaaagugcugggauuacaggggu

SEQ ID NO: 886069 - RNA, 22 nt, Human
cccaggcuggagugcaguggca

SEQ ID NO: 886070 - RNA, 19 nt, Human
cccauucuaguuguuuucu

SEQ ID NO: 886071 - RNA, 21 nt, Human
ccucuuggcugugaccauguc

SEQ ID NO: 886072 - RNA, 18 nt, Human
ccugaccucaggugaucc

SEQ ID NO: 886073 - RNA, 21 nt, Human
ccugaccucaggugauccgcc

SEQ ID NO: 886074 - RNA, 23 nt, Human
ccugaccucaggugauccgccug

SEQ ID NO: 886075 - RNA, 22 nt, Human
ccugcuuuggccucccaaagug

SEQ ID NO: 886076 - RNA, 24 nt, Human
ccugcuuuggccucccaaagugcu

SEQ ID NO: 886077 - RNA, 26 nt, Human
ccuucaguucgaucaugcugacauac

SEQ ID NO: 886078 - RNA, 18 nt, Human
ccuuuuuuccucaaagaa

SEQ ID NO: 886079 - RNA, 21 nt, Human
cgaucaugcugacauacuccc

SEQ ID NO: 886080 - RNA, 21 nt, Human
cggguucaagcgauucuccug

SEQ ID NO: 886081 - RNA, 20 nt, Human
cuaaaaucccuuuaaagcca

SEQ ID NO: 886082 - RNA, 20 nt, Human
cucauuguuucuaguacuuu

SEQ ID NO: 886083 - RNA, 22 nt, Human
cucccauguugcugggacugca

SEQ ID NO: 886084 - RNA, 26 nt, Human
cuccugaccucaggugauccgccugc

SEQ ID NO: 886085 - RNA, 20 nt, Human
cucugcaaggaagucacuau

SEQ ID NO: 886086 - RNA, 20 nt, Human
cucugucucccaggcuggag

SEQ ID NO: 886087 - RNA, 20 nt, Human
gaccacagagguaaagugcc

SEQ ID NO: 886088 - RNA, 20 nt, Human
gaccaugucucagauuuucc

SEQ ID NO: 886089 - RNA, 18 nt, Human
gaccucaggugauccgcc

SEQ ID NO: 886090 - RNA, 23 nt, Human
gacgagguugcaccauguuggcc

SEQ ID NO: 886091 - RNA, 18 nt, Human
gauuacaggggugagcca

SEQ ID NO: 886092 - RNA, 19 nt, Human
gcaguggcaugaccuuggc

SEQ ID NO: 886093 - RNA, 19 nt, Human
gcuggagugcaguggcaug

SEQ ID NO: 886094 - RNA, 23 nt, Human
gcuggucucaaacuccugaccuc

SEQ ID NO: 886095 - RNA, 22 nt, Human
gcuuuggccucccaaagugcug

SEQ ID NO: 886096 - RNA, 19 nt, Human
ggaauguccuccaacgcuu

SEQ ID NO: 886097 - RNA, 24 nt, Human
ggcuggucucaaacuccugaccuc

SEQ ID NO: 886098 - RNA, 19 nt, Human
gguucaagcgauucuccug

SEQ ID NO: 886099 - RNA, 20 nt, Human
gguucugaguucuggggagg

SEQ ID NO: 886100 - RNA, 19 nt, Human
guaaaguuacucuuuuccc

SEQ ID NO: 886101 - RNA, 18 nt, Human
uaaauaagugcuuaaaaa

SEQ ID NO: 886102 - RNA, 22 nt, Human
uaagcagaaaaaaaauaugcaa

SEQ ID NO: 886103 - RNA, 23 nt, Human
uaaguaagucuaagcagaaaaaa

SEQ ID NO: 886104 - RNA, 19 nt, Human
uacaggggugagccaccgc

SEQ ID NO: 886105 - RNA, 23 nt, Human
uacaggggugagccaccgcaccc

SEQ ID NO: 886106 - RNA, 24 nt, Human
uaguaaagacgagguugcaccaug

SEQ ID NO: 886107 - RNA, 18 nt, Human
uaucccaguucuagaauc

SEQ ID NO: 886108 - RNA, 18 nt, Human
ucaacaaagcuuuucccc

SEQ ID NO: 886109 - RNA, 21 nt, Human
ucagauauuaucaucauuacu

SEQ ID NO: 886110 - RNA, 23 nt, Human
ucagcucuagagaacaaugagcu

SEQ ID NO: 886111 - RNA, 24 nt, Human
ucaggcuccucuuggcugugaagc

SEQ ID NO: 886112 - RNA, 24 nt, Human
ucaguucauuuucuaaggaguccu

SEQ ID NO: 886113 - RNA, 24 nt, Human
ucaugcugacauacucccaaucac

SEQ ID NO: 886114 - RNA, 23 nt, Human
ucccaaagugcugggauuacagg

SEQ ID NO: 886115 - RNA, 24 nt, Human
ucccaggcuggagugcaguggcau

SEQ ID NO: 886116 - RNA, 23 nt, Human
ucccauguugcugggacugcagg

SEQ ID NO: 886117 - RNA, 24 nt, Human
ucgcggguucaagcgauucuccug

SEQ ID NO: 886118 - RNA, 21 nt, Human
ucuacaaugaacacuuugcuc

SEQ ID NO: 886119 - RNA, 21 nt, Human
ucuaguacuuuacaugcuuuc

SEQ ID NO: 886120 - RNA, 18 nt, Human
ucucaggcuccucuuggc

SEQ ID NO: 886121 - RNA, 24 nt, Human
ucucccaggcuggagugcaguggc

SEQ ID NO: 886122 - RNA, 23 nt, Human
ucuggggaggaggaccacagagg

SEQ ID NO: 886123 - RNA, 19 nt, Human
ucugucucccaggcuggag

SEQ ID NO: 886124 - RNA, 24 nt, Human
ucugucucccaggcuggagugcag

SEQ ID NO: 886125 - RNA, 19 nt, Human
ucuugcucugucucccagg

SEQ ID NO: 886126 - RNA, 23 nt, Human
ucuugcucugucucccaggcugg

SEQ ID NO: 886127 - RNA, 24 nt, Human
ucuugcucugucucccaggcugga

SEQ ID NO: 886128 - RNA, 21 nt, Human
ugaaauaagacaaaccaucaa

SEQ ID NO: 886129 - RNA, 22 nt, Human
ugaccucaggugauccgccugc

SEQ ID NO: 886130 - RNA, 24 nt, Human
ugaccucaggugauccgccugcuu

SEQ ID NO: 886131 - RNA, 21 nt, Human
ugagaaguacugguuagguau

SEQ ID NO: 886132 - RNA, 22 nt, Human
ugagauggagucuugcucuguc

SEQ ID NO: 886133 - RNA, 19 nt, Human
ugaguucuggggaggagga

SEQ ID NO: 886134 - RNA, 24 nt, Human
ugauguuaaccucaaucaccuggc

SEQ ID NO: 886135 - RNA, 22 nt, Human
ugcauaccaccaccccuggcua

SEQ ID NO: 886136 - RNA, 18 nt, Human
ugcuucacucuggcuaca

SEQ ID NO: 886137 - RNA, 23 nt, Human
uggagugcaguggcaugaccuug

SEQ ID NO: 886138 - RNA, 24 nt, Human
uggagugcaguggcaugaccuugg

SEQ ID NO: 886139 - RNA, 21 nt, Human
uggcagagaggccuaaaugcc

SEQ ID NO: 886140 - RNA, 22 nt, Human
uggcagagaggccuaaaugcca

SEQ ID NO: 886141 - RNA, 24 nt, Human
uggcccggcuggucucaaacuccu

SEQ ID NO: 886142 - RNA, 21 nt, Human
uggcuaaacuaucaauagcac

SEQ ID NO: 886143 - RNA, 21 nt, Human
ugggacugcaggugcauacca

SEQ ID NO: 886144 - RNA, 19 nt, Human
ugggauuacaggggugagc

SEQ ID NO: 886145 - RNA, 22 nt, Human
ugggauuacaggggugagccac

SEQ ID NO: 886146 - RNA, 23 nt, Human
ugggauuacaggggugagccacc

SEQ ID NO: 886147 - RNA, 24 nt, Human
ugggauuacaggggugagccaccg

SEQ ID NO: 886148 - RNA, 18 nt, Human
uggguucugaguucuggg

SEQ ID NO: 886149 - RNA, 23 nt, Human
uguuacucaaauugcuccagcug

SEQ ID NO: 886150 - RNA, 18 nt, Human
uguugcugggacugcagg

SEQ ID NO: 886151 - RNA, 20 nt, Human
uguuguuguuuuguuuuguu

SEQ ID NO: 886152 - RNA, 20 nt, Human
uuauuuuguuacucaaauug

SEQ ID NO: 886153 - RNA, 22 nt, Human
uucaagcgauucuccuguucag

SEQ ID NO: 886154 - RNA, 20 nt, Human
uucagaauuuccaaaucucc

SEQ ID NO: 886155 - RNA, 24 nt, Human
uucuggggaggaggaccacagagg

SEQ ID NO: 886156 - RNA, 19 nt, Human
uugaaauucuucugcacaa

SEQ ID NO: 886157 - RNA, 21 nt, Human
uugagauggagucuugcucug

SEQ ID NO: 886158 - RNA, 18 nt, Human
uugcucugucucccaggc

SEQ ID NO: 886159 - RNA, 26 nt, Human
uuggcugugaccaugucucagauuuu

SEQ ID NO: 886160 - RNA, 19 nt, Human
uugugccugaguuuuuuug

SEQ ID NO: 886161 - RNA, 18 nt, Human
uuguuguuguuuuguuuu

SEQ ID NO: 886162 - RNA, 21 nt, Human
uuguuguuuuguuuuguuuuu

SEQ ID NO: 886163 - RNA, 28 nt, Human
uuguuguuuuguuuuguuuuuguuuuug

SEQ ID NO: 886164 - RNA, 24 nt, Human
uuguuuuuguauuuuuaguaaaga

SEQ ID NO: 886165 - RNA, 21 nt, Human
uuuaaagaaugcuucucaauu

SEQ ID NO: 886166 - RNA, 23 nt, Human
uuuaaagccaaugaaaccauuuu

SEQ ID NO: 886167 - RNA, 19 nt, Human
uuuggccucccaaagugcu

SEQ ID NO: 886168 - RNA, 22 nt, Human
uuuuguuuuguuuuuguuuuug

SEQ ID NO: 886169 - RNA, 22 nt, Human
uuuuguuuuugagauggagucu

SEQ ID NO: 886170 - RNA, 19 nt, Human
uuuuucuuuucgugguaua

SEQ ID NO: 886171 - RNA, 21 nt, Human
uuuuuguauuuuuaguaaaga

SEQ ID NO: 886172 - RNA, 23 nt, Human
uuuuuguauuuuuaguaaagacg

SEQ ID NO: 886173 - RNA, 22 nt, Human
aaaaaacagcgagaagaauaau

SEQ ID NO: 886174 - RNA, 26 nt, Human
aaaaacagcgagaagaauaaucaggc

SEQ ID NO: 886175 - RNA, 19 nt, Human
aaacgcccuaagacaagca

SEQ ID NO: 886176 - RNA, 22 nt, Human
aaacgcccuaagacaagcacuc

SEQ ID NO: 886177 - RNA, 21 nt, Human
aacaauaauccagagaccccc

SEQ ID NO: 886178 - RNA, 20 nt, Human
aaccagugaaacuccaaggc

SEQ ID NO: 886179 - RNA, 22 nt, Human
aaucacuucaugggggaggagg

SEQ ID NO: 886180 - RNA, 23 nt, Human
acacaacacacucaaagacaccg

SEQ ID NO: 886181 - RNA, 26 nt, Human
acacaacacacucaaagacaccgaag

SEQ ID NO: 886182 - RNA, 20 nt, Human
agaacaauaauccagagacc

SEQ ID NO: 886183 - RNA, 23 nt, Human
aucccccucuccucccucccuca

SEQ ID NO: 886184 - RNA, 24 nt, Human
caaagacaccgaaggacuggagac

SEQ ID NO: 886185 - RNA, 22 nt, Human
cacacaacacacucaaagacac

SEQ ID NO: 886186 - RNA, 20 nt, Human
cacaggcucuccugcccucc

SEQ ID NO: 886187 - RNA, 19 nt, Human
caccgaaggacccuaaggc

SEQ ID NO: 886188 - RNA, 19 nt, Human
cagaacaauaauccagaga

SEQ ID NO: 886189 - RNA, 23 nt, Human
cagaacaauaauccagagacccc

SEQ ID NO: 886190 - RNA, 22 nt, Human
caguccccacuagagacauaau

SEQ ID NO: 886191 - RNA, 22 nt, Human
ccagagaccccccgauacucag

SEQ ID NO: 886192 - RNA, 24 nt, Human
ccccccaaccacaagcagggguug

SEQ ID NO: 886193 - RNA, 24 nt, Human
ccccccgauacucagaaucacuuc

SEQ ID NO: 886194 - RNA, 19 nt, Human
ccuccugauggaaaauaag

SEQ ID NO: 886195 - RNA, 21 nt, Human
cgagaauccgccaacgggcac

SEQ ID NO: 886196 - RNA, 20 nt, Human
cugcugcaaaccuuggcuau

SEQ ID NO: 886197 - RNA, 19 nt, Human
cuuccugccaggcaccuuc

SEQ ID NO: 886198 - RNA, 25 nt, Human
cuuugcacaggcucuccugcccucc

SEQ ID NO: 886199 - RNA, 22 nt, Human
gaacaaacaagcuuugcacagg

SEQ ID NO: 886200 - RNA, 21 nt, Human
gacccaaguaugcagaaauaa

SEQ ID NO: 886201 - RNA, 20 nt, Human
gcugauugaacaaacaagcu

SEQ ID NO: 886202 - RNA, 20 nt, Human
ggaggaggacgaggacgggg

SEQ ID NO: 886203 - RNA, 24 nt, Human
uaaaauauguacacacaacacacu

SEQ ID NO: 886204 - RNA, 22 nt, Human
uaaguuagaaaacgcccuaaga

SEQ ID NO: 886205 - RNA, 18 nt, Human
uagaaaacgcccuaagac

SEQ ID NO: 886206 - RNA, 21 nt, Human
uagaacgaacaguccccacua

SEQ ID NO: 886207 - RNA, 23 nt, Human
uagaacgaacaguccccacuaga

SEQ ID NO: 886208 - RNA, 19 nt, Human
uauauuuauaaacuuuaag

SEQ ID NO: 886209 - RNA, 24 nt, Human
uaucccccucuccucccucccuca

SEQ ID NO: 886210 - RNA, 21 nt, Human
uaugcagaaauaaaauaaacc

SEQ ID NO: 886211 - RNA, 25 nt, Human
uauguacacacaacacacucaaaga

SEQ ID NO: 886212 - RNA, 25 nt, Human
ucaaugaaaguuguauccaaaguac

SEQ ID NO: 886213 - RNA, 19 nt, Human
ucacuucaugggggaggag

SEQ ID NO: 886214 - RNA, 24 nt, Human
uccagagaccccccgauacucaga

SEQ ID NO: 886215 - RNA, 20 nt, Human
ucuccugcccuccugaugga

SEQ ID NO: 886216 - RNA, 19 nt, Human
uggaaaauaaguuagaaaa

SEQ ID NO: 886217 - RNA, 20 nt, Human
uuuggguuagccuguuacag

SEQ ID NO: 886218 - RNA, 23 nt, Human
accugcggggacccaggacaggc

SEQ ID NO: 886219 - RNA, 22 nt, Human
agcaagcaaacacuggcaggug

SEQ ID NO: 886220 - RNA, 23 nt, Human
agguugcucuuccuuuucaggcc

SEQ ID NO: 886221 - RNA, 20 nt, Human
caggaggaacgacuaaagca

SEQ ID NO: 886222 - RNA, 22 nt, Human
cauauggccugacaaaugccug

SEQ ID NO: 886223 - RNA, 19 nt, Human
ccccuccuuuuccuuuccu

SEQ ID NO: 886224 - RNA, 21 nt, Human
ccugacaaaugccugccaggg

SEQ ID NO: 886225 - RNA, 19 nt, Human
ccugcggcucgcugaagcc

SEQ ID NO: 886226 - RNA, 24 nt, Human
ccugcggcucgcugaagccggggc

SEQ ID NO: 886227 - RNA, 22 nt, Human
cgcugaagcccgcucgcugcuc

SEQ ID NO: 886228 - RNA, 23 nt, Human
cgucucugcaaugcacaugugug

SEQ ID NO: 886229 - RNA, 19 nt, Human
gaacaacagacgcgcagac

SEQ ID NO: 886230 - RNA, 19 nt, Human
gauucuggacagguugcuc

SEQ ID NO: 886231 - RNA, 20 nt, Human
ggggacccaggacaggccug

SEQ ID NO: 886232 - RNA, 21 nt, Human
uaaaacauauggccugacaaa

SEQ ID NO: 886233 - RNA, 24 nt, Human
ucgagauuuccccuccuuuuccuu

SEQ ID NO: 886234 - RNA, 21 nt, Human
ucugcuacugaaacauagagc

SEQ ID NO: 886235 - RNA, 19 nt, Human
ugaagcccgcucgcugcuc

SEQ ID NO: 886236 - RNA, 21 nt, Human
ugguagcaggaggaacgacua

SEQ ID NO: 886237 - RNA, 18 nt, Human
aaaaaaaaaaggcucaga

SEQ ID NO: 886238 - RNA, 18 nt, Human
aaggagucaugggccagu

SEQ ID NO: 886239 - RNA, 20 nt, Human
acaaaaaaaaaaggcucaga

SEQ ID NO: 886240 - RNA, 22 nt, Human
acaaaaaaaaaaggcucagaaa

SEQ ID NO: 886241 - RNA, 18 nt, Human
aggcugcugggagcaguc

SEQ ID NO: 886242 - RNA, 22 nt, Human
agggaauaucaaaaggagcuug

SEQ ID NO: 886243 - RNA, 25 nt, Human
caaacccaaggaaucaaucauuuug

SEQ ID NO: 886244 - RNA, 23 nt, Human
caccagacuuucucuccugguuu

SEQ ID NO: 886245 - RNA, 25 nt, Human
cacccccaaacccaaggaaucaauc

SEQ ID NO: 886246 - RNA, 22 nt, Human
caggacaccagacuuucucucc

SEQ ID NO: 886247 - RNA, 24 nt, Human
cauucccacucagcuuccuuuccu

SEQ ID NO: 886248 - RNA, 20 nt, Human
ccuauucacccccaaaccca

SEQ ID NO: 886249 - RNA, 24 nt, Human
ccuccuccauuuuucaaaauauuu

SEQ ID NO: 886250 - RNA, 26 nt, Human
cuauucacccccaaacccaaggaauc

SEQ ID NO: 886251 - RNA, 22 nt, Human
cuggagaaucuuggucuuccuc

SEQ ID NO: 886252 - RNA, 19 nt, Human
cugugacaaaaaaaaaagg

SEQ ID NO: 886253 - RNA, 18 nt, Human
ggagaaucuuggucuucc

SEQ ID NO: 886254 - RNA, 20 nt, Human
ggcacugugacaaaaaaaaa

SEQ ID NO: 886255 - RNA, 19 nt, Human
gggaauaucaaaaggagcc

SEQ ID NO: 886256 - RNA, 20 nt, Human
gggcacugugacaaaaaaaa

SEQ ID NO: 886257 - RNA, 18 nt, Human
gugacaaaaaaaaaaggc

SEQ ID NO: 886258 - RNA, 19 nt, Human
uaccagcuggcauucccac

SEQ ID NO: 886259 - RNA, 23 nt, Human
uagaaaagacuggauaucaggac

SEQ ID NO: 886260 - RNA, 26 nt, Human
uauuuuaaaucagcucuggguucugg

SEQ ID NO: 886261 - RNA, 20 nt, Human
ucagaaauuucccagccuag

SEQ ID NO: 886262 - RNA, 23 nt, Human
ucccagccuauucacccccaaac

SEQ ID NO: 886263 - RNA, 24 nt, Human
ucccagccuauucacccccaaacc

SEQ ID NO: 886264 - RNA, 19 nt, Human
ucuccauggacagaugagc

SEQ ID NO: 886265 - RNA, 19 nt, Human
ucugccuccuccauuuuuc

SEQ ID NO: 886266 - RNA, 26 nt, Human
ucuggguucuggucaugagcucuggg

SEQ ID NO: 886267 - RNA, 22 nt, Human
ugacaaaaaaaaaaggcucaga

SEQ ID NO: 886268 - RNA, 26 nt, Human
ugccuccuccauuuuucaaaauauuu

SEQ ID NO: 886269 - RNA, 20 nt, Human
uggagaaucuuggucuuccu

SEQ ID NO: 886270 - RNA, 22 nt, Human
uggcuagugaccuccaucccug

SEQ ID NO: 886271 - RNA, 21 nt, Human
ugggagcagucugccuccucc

SEQ ID NO: 886272 - RNA, 21 nt, Human
ugggccagugcagccugcgcu

SEQ ID NO: 886273 - RNA, 20 nt, Human
ugugacaaaaaaaaaaggcu

SEQ ID NO: 886274 - RNA, 21 nt, Human
uuaaaaaucacugcuuuggau

SEQ ID NO: 886275 - RNA, 18 nt, Human
uuccugacuuagaaguug

SEQ ID NO: 886276 - RNA, 22 nt, Human
uucuauguaagauuuguuuuug

SEQ ID NO: 886277 - RNA, 18 nt, Human
uucucuccugguuuggaa

SEQ ID NO: 886278 - RNA, 21 nt, Human
uugaaaaacauuuaaaaauca

SEQ ID NO: 886279 - RNA, 24 nt, Human
uuucccccugcaguucucccuaac

SEQ ID NO: 886280 - RNA, 21 nt, Human
acacuugucacacauacaucc

SEQ ID NO: 886281 - RNA, 19 nt, Human
accagucugugcaacaccc

SEQ ID NO: 886282 - RNA, 20 nt, Human
accagucugugcaacacccc

SEQ ID NO: 886283 - RNA, 19 nt, Human
acucaggacugcccgacaa

SEQ ID NO: 886284 - RNA, 23 nt, Human
aggccacccuccuuuuaccccaa

SEQ ID NO: 886285 - RNA, 19 nt, Human
auagcaggccagaaaggcc

SEQ ID NO: 886286 - RNA, 22 nt, Human
cacccuccuuuuaccccaaaga

SEQ ID NO: 886287 - RNA, 26 nt, Human
cacucaggacugcccgacaacugccc

SEQ ID NO: 886288 - RNA, 26 nt, Human
caggagcccuguggaccagucuguua

SEQ ID NO: 886289 - RNA, 22 nt, Human
caggggcuuccuucaggagccc

SEQ ID NO: 886290 - RNA, 25 nt, Human
ccacccuccuuuuaccccaaagauc

SEQ ID NO: 886291 - RNA, 22 nt, Human
ccaggcuccuggcacggggcug

SEQ ID NO: 886292 - RNA, 19 nt, Human
ccccaaagauccaggggcu

SEQ ID NO: 886293 - RNA, 18 nt, Human
cccuccaggcuccuggca

SEQ ID NO: 886294 - RNA, 20 nt, Human
ccuggccauccccaggagcc

SEQ ID NO: 886295 - RNA, 23 nt, Human
cuuuuaccccaaagauccagggg

SEQ ID NO: 886296 - RNA, 21 nt, Human
uaccuggccauccccaggagc

SEQ ID NO: 886297 - RNA, 22 nt, Human
uaccuggccauccccaggagcc

SEQ ID NO: 886298 - RNA, 21 nt, Human
ucaggagcccuguggaccagu

SEQ ID NO: 886299 - RNA, 23 nt, Human
ucucugugacugcacuuaucuuu

SEQ ID NO: 886300 - RNA, 22 nt, Human
ucugugcaacacccacucagga

SEQ ID NO: 886301 - RNA, 18 nt, Human
ugcccgacaacugcccug

SEQ ID NO: 886302 - RNA, 23 nt, Human
ugcccugcugaucccccaucgca

SEQ ID NO: 886303 - RNA, 24 nt, Human
ugggaagacauagcaggccagaaa

SEQ ID NO: 886304 - RNA, 19 nt, Human
uuccccaacuucccuccag

SEQ ID NO: 886305 - RNA, 21 nt, Human
uugaggccacccuccuuuuac

SEQ ID NO: 886306 - RNA, 19 nt, Human
uuuccccaacuucccucca

SEQ ID NO: 886307 - RNA, 23 nt, Human
uuuccccaacuucccuccaggcu

SEQ ID NO: 886308 - RNA, 24 nt, Human
uuuuaccccaaagauccaggggcu

SEQ ID NO: 886309 - RNA, 23 nt, Human
aaagccccuuucacaguuugcuc

SEQ ID NO: 886310 - RNA, 21 nt, Human
aaauagaugcaaugaugaaac

SEQ ID NO: 886311 - RNA, 21 nt, Human
aacaagccucggacacaaaac

SEQ ID NO: 886312 - RNA, 22 nt, Human
aaccaagggccuggaguuuguc

SEQ ID NO: 886313 - RNA, 18 nt, Human
aacccagcgacccgcaac

SEQ ID NO: 886314 - RNA, 22 nt, Human
aagcacagucaaaacugaauac

SEQ ID NO: 886315 - RNA, 22 nt, Human
aauaugggaauacaagaaaaga

SEQ ID NO: 886316 - RNA, 19 nt, Human
aauucuuccuaauagaugu

SEQ ID NO: 886317 - RNA, 23 nt, Human
accauguuuuauaaaauggucuc

SEQ ID NO: 886318 - RNA, 21 nt, Human
acuguauugccuccucuggcu

SEQ ID NO: 886319 - RNA, 19 nt, Human
acugucccacuguauugcc

SEQ ID NO: 886320 - RNA, 19 nt, Human
acuugauguggcugaggag

SEQ ID NO: 886321 - RNA, 20 nt, Human
agacuuuuccagaagguaug

SEQ ID NO: 886322 - RNA, 20 nt, Human
agauguuaaagcuuuuaacc

SEQ ID NO: 886323 - RNA, 21 nt, Human
agcgacugagugacgaccacg

SEQ ID NO: 886324 - RNA, 20 nt, Human
aggaaaaaugaaggagucac

SEQ ID NO: 886325 - RNA, 20 nt, Human
aggaaggaaucccguagcuu

SEQ ID NO: 886326 - RNA, 24 nt, Human
aggcuccauaaaccucauugacaa

SEQ ID NO: 886327 - RNA, 19 nt, Human
auagaugcaaugaugaaac

SEQ ID NO: 886328 - RNA, 23 nt, Human
auauauguguccugugugugucu

SEQ ID NO: 886329 - RNA, 21 nt, Human
augaugaaacaaucuguuuaa

SEQ ID NO: 886330 - RNA, 21 nt, Human
augucaacauucaggaagaug

SEQ ID NO: 886331 - RNA, 22 nt, Human
auguguccugugugugucuaua

SEQ ID NO: 886332 - RNA, 21 nt, Human
auucaggaagauggcaucugu

SEQ ID NO: 886333 - RNA, 20 nt, Human
auuugcuugcaaaagcugcc

SEQ ID NO: 886334 - RNA, 22 nt, Human
caagccucggacacaaaaccaa

SEQ ID NO: 886335 - RNA, 19 nt, Human
caccccuccuacucuuucc

SEQ ID NO: 886336 - RNA, 22 nt, Human
caccccuccuacucuuuccaaa

SEQ ID NO: 886337 - RNA, 18 nt, Human
cacugaaauagcauugau

SEQ ID NO: 886338 - RNA, 18 nt, Human
cagcaccugacucacccc

SEQ ID NO: 886339 - RNA, 18 nt, Human
ccagcgacccgcaaccaa

SEQ ID NO: 886340 - RNA, 23 nt, Human
ccaggaauauuaugguccuuucu

SEQ ID NO: 886341 - RNA, 23 nt, Human
cccaacgauauagccaggguacc

SEQ ID NO: 886342 - RNA, 21 nt, Human
cccuugggggauggacauggu

SEQ ID NO: 886343 - RNA, 19 nt, Human
ccuucuaugcacagaccag

SEQ ID NO: 886344 - RNA, 18 nt, Human
cuagagagguacaugaua

SEQ ID NO: 886345 - RNA, 21 nt, Human
cucauugacaaacuuggaaca

SEQ ID NO: 886346 - RNA, 22 nt, Human
cucauugacaaacuuggaacaa

SEQ ID NO: 886347 - RNA, 21 nt, Human
cucgaggggcagggccccccu

SEQ ID NO: 886348 - RNA, 24 nt, Human
cuucaaguaaacagagcaggcgca

SEQ ID NO: 886349 - RNA, 24 nt, Human
gaccacggcgcugccccaauaacc

SEQ ID NO: 886350 - RNA, 18 nt, Human
gacgaccacggcgcugcc

SEQ ID NO: 886351 - RNA, 26 nt, Human
gcagagccaggcgguucgggagacca

SEQ ID NO: 886352 - RNA, 22 nt, Human
gccccaauaacccagcgacccg

SEQ ID NO: 886353 - RNA, 23 nt, Human
gccuccucuggcuuccugcaacu

SEQ ID NO: 886354 - RNA, 20 nt, Human
gcggucaggugucugguggu

SEQ ID NO: 886355 - RNA, 22 nt, Human
gcuuccgauccagcccaccccu

SEQ ID NO: 886356 - RNA, 21 nt, Human
gggacaccaucgacucgaggg

SEQ ID NO: 886357 - RNA, 21 nt, Human
guaaccccaaauggguguugc

SEQ ID NO: 886358 - RNA, 21 nt, Human
guagugucuaaggcacuuucc

SEQ ID NO: 886359 - RNA, 23 nt, Human
guggcugaggagucgggggccac

SEQ ID NO: 886360 - RNA, 22 nt, Human
uaacccagcgacccgcaaccaa

SEQ ID NO: 886361 - RNA, 22 nt, Human
uacaagaaaagauauuugcggu

SEQ ID NO: 886362 - RNA, 21 nt, Human
uacaguaugcauaggcuggag

SEQ ID NO: 886363 - RNA, 20 nt, Human
uaccugucuguaugacagag

SEQ ID NO: 886364 - RNA, 23 nt, Human
uagccauuggagagaaaccugua

SEQ ID NO: 886365 - RNA, 18 nt, Human
uccaaagggaagggagaa

SEQ ID NO: 886366 - RNA, 21 nt, Human
uccauggcugccaccuggggc

SEQ ID NO: 886367 - RNA, 19 nt, Human
ucccacuguauugccuccu

SEQ ID NO: 886368 - RNA, 24 nt, Human
ucgcauuuccaaaugauuccagaa

SEQ ID NO: 886369 - RNA, 23 nt, Human
ucuuguuuauugaggucucuuua

SEQ ID NO: 886370 - RNA, 23 nt, Human
ugaaggaaaugagagagacaagu

SEQ ID NO: 886371 - RNA, 19 nt, Human
ugacgaccacggcgcugcc

SEQ ID NO: 886372 - RNA, 25 nt, Human
ugaggucucuuuauucuccacgggu

SEQ ID NO: 886373 - RNA, 20 nt, Human
ugaugaaacaaucuguuuaa

SEQ ID NO: 886374 - RNA, 19 nt, Human
ugccccaauaacccagcga

SEQ ID NO: 886375 - RNA, 19 nt, Human
ugcgggacaccaucgacuc

SEQ ID NO: 886376 - RNA, 30 nt, Human
ugcggucaggugucugguggucaacagccc

SEQ ID NO: 886377 - RNA, 24 nt, Human
ugcuuaacuaccaaccaaaaacag

SEQ ID NO: 886378 - RNA, 24 nt, Human
uggaacaagccucggacacaaaac

SEQ ID NO: 886379 - RNA, 23 nt, Human
uggcugccaccuggggccucagc

SEQ ID NO: 886380 - RNA, 18 nt, Human
ugggggauggacauggua

SEQ ID NO: 886381 - RNA, 23 nt, Human
ugguaaccccaaauggguguugc

SEQ ID NO: 886382 - RNA, 19 nt, Human
ugucuagaaauaugggaau

SEQ ID NO: 886383 - RNA, 20 nt, Human
ugucuugcugucccggaaua

SEQ ID NO: 886384 - RNA, 22 nt, Human
uucauugucacugaaugucugu

SEQ ID NO: 886385 - RNA, 20 nt, Human
uucccagcaccugacucacc

SEQ ID NO: 886386 - RNA, 24 nt, Human
uuccuaauagauguuaaagcuuuu

SEQ ID NO: 886387 - RNA, 21 nt, Human
uuuaaaaagggucuuaccaug

SEQ ID NO: 886388 - RNA, 19 nt, Human
aagggccucggcgugcuuc

SEQ ID NO: 886389 - RNA, 20 nt, Human
aagggccucggcgugcuucu

SEQ ID NO: 886390 - RNA, 24 nt, Human
acuccuugugcuuggggcccaggg

SEQ ID NO: 886391 - RNA, 23 nt, Human
acucuucucgccuuccagcgccu

SEQ ID NO: 886392 - RNA, 23 nt, Human
agagcuccagcuggauccgcagc

SEQ ID NO: 886393 - RNA, 19 nt, Human
agccugcgccugcucgugg

SEQ ID NO: 886394 - RNA, 19 nt, Human
aggacuguguuuuuccucc

SEQ ID NO: 886395 - RNA, 24 nt, Human
aggcagcagggggcgaugcagaga

SEQ ID NO: 886396 - RNA, 23 nt, Human
aucucacucuucucgccuuccag

SEQ ID NO: 886397 - RNA, 20 nt, Human
caagcucagccuccagcucc

SEQ ID NO: 886398 - RNA, 22 nt, Human
cacuucugcuuugaccugggag

SEQ ID NO: 886399 - RNA, 21 nt, Human
cagccgcugcuccucgucccg

SEQ ID NO: 886400 - RNA, 22 nt, Human
cagcucccguaccucuuggccu

SEQ ID NO: 886401 - RNA, 22 nt, Human
cagcuuguccaccagguccugc

SEQ ID NO: 886402 - RNA, 21 nt, Human
cagggaaggcugaaggcagca

SEQ ID NO: 886403 - RNA, 18 nt, Human
caggugugcacuuguguc

SEQ ID NO: 886404 - RNA, 20 nt, Human
cagugauggccuuuuuggcc

SEQ ID NO: 886405 - RNA, 21 nt, Human
caguuccuggaugcucuuccc

SEQ ID NO: 886406 - RNA, 22 nt, Human
caguuccuggaugcucuuccca

SEQ ID NO: 886407 - RNA, 22 nt, Human
ccaaaagcuccugcucugccag

SEQ ID NO: 886408 - RNA, 19 nt, Human
ccagccgcugcuccucguc

SEQ ID NO: 886409 - RNA, 21 nt, Human
ccagcgccuucuugguuuucu

SEQ ID NO: 886410 - RNA, 20 nt, Human
cccgcagcuccuccagcucc

SEQ ID NO: 886411 - RNA, 20 nt, Human
cccguaccucuuggccucca

SEQ ID NO: 886412 - RNA, 22 nt, Human
ccgccaugucugcccgcuccuc

SEQ ID NO: 886413 - RNA, 18 nt, Human
ccgcucagcugggccaag

SEQ ID NO: 886414 - RNA, 22 nt, Human
ccucagccucccgccucuccug

SEQ ID NO: 886415 - RNA, 19 nt, Human
ccuccagcucccguaccuc

SEQ ID NO: 886416 - RNA, 28 nt, Human
ccuccagcuucuucuucugggggccgcc

SEQ ID NO: 886417 - RNA, 18 nt, Human
ccuccuccaccuccccgc

SEQ ID NO: 886418 - RNA, 20 nt, Human
ccucgucccgcccugccugc

SEQ ID NO: 886419 - RNA, 25 nt, Human
ccucgucccgcccugccugcuccuc

SEQ ID NO: 886420 - RNA, 24 nt, Human
ccucgucuuucucugccagcuucc

SEQ ID NO: 886421 - RNA, 24 nt, Human
ccucuccugugcagccuccuccac

SEQ ID NO: 886422 - RNA, 21 nt, Human
ccugaaccccaaagaaaagaa

SEQ ID NO: 886423 - RNA, 23 nt, Human
ccugacggguggcauggcccagc

SEQ ID NO: 886424 - RNA, 21 nt, Human
ccugcucguggagcucagcug

SEQ ID NO: 886425 - RNA, 24 nt, Human
ccuugcgauacuuggccagguugg

SEQ ID NO: 886426 - RNA, 25 nt, Human
cgccuccagcuucuucuucugguuu

SEQ ID NO: 886427 - RNA, 23 nt, Human
cgcuccagagccugcgccugcuc

SEQ ID NO: 886428 - RNA, 18 nt, Human
cgguggccuccaaaagcu

SEQ ID NO: 886429 - RNA, 23 nt, Human
cgucuuggucuccuccagcucca

SEQ ID NO: 886430 - RNA, 21 nt, Human
cuccaggucguugaggucacc

SEQ ID NO: 886431 - RNA, 23 nt, Human
cuccagugcagccuggaucucac

SEQ ID NO: 886432 - RNA, 20 nt, Human
cuccugaaccccaaagaaaa

SEQ ID NO: 886433 - RNA, 23 nt, Human
cugaaccccaaagaaaagaauga

SEQ ID NO: 886434 - RNA, 19 nt, Human
cugcagcuuguccaccagg

SEQ ID NO: 886435 - RNA, 19 nt, Human
cugccagucgccggcugcg

SEQ ID NO: 886436 - RNA, 18 nt, Human
cugggccucuguggccug

SEQ ID NO: 886437 - RNA, 18 nt, Human
cuucccagagggaccaaa

SEQ ID NO: 886438 - RNA, 21 nt, Human
cuuccgguccacuucugcuuu

SEQ ID NO: 886439 - RNA, 23 nt, Human
cuuccucccugagaggaucuggu

SEQ ID NO: 886440 - RNA, 24 nt, Human
gaaaagaaugagaaggaaacuggc

SEQ ID NO: 886441 - RNA, 24 nt, Human
gaccuugcucugcagcuuguccac

SEQ ID NO: 886442 - RNA, 19 nt, Human
gagcuccuugacacggcgc

SEQ ID NO: 886443 - RNA, 19 nt, Human
gagcucgcgcaccgucugc

SEQ ID NO: 886444 - RNA, 23 nt, Human
gaucucacucuucucgccuucca

SEQ ID NO: 886445 - RNA, 24 nt, Human
gaucucacucuucucgccuuccag

SEQ ID NO: 886446 - RNA, 22 nt, Human
gcaucaagcucagccuccagcu

SEQ ID NO: 886447 - RNA, 23 nt, Human
gcccgugucucugcauccaggga

SEQ ID NO: 886448 - RNA, 21 nt, Human
gcgagccagguucuuccuguc

SEQ ID NO: 886449 - RNA, 21 nt, Human
gcgauacuuggccagguuggu

SEQ ID NO: 886450 - RNA, 24 nt, Human
gcuccagggcccccucugccuccu

SEQ ID NO: 886451 - RNA, 18 nt, Human
gcuccucgucccgcccug

SEQ ID NO: 886452 - RNA, 18 nt, Human
gcucgugcugggccuugc

SEQ ID NO: 886453 - RNA, 20 nt, Human
gcuuggggcccagggcgucc

SEQ ID NO: 886454 - RNA, 21 nt, Human
ggacuccacagcucgcuggug

SEQ ID NO: 886455 - RNA, 19 nt, Human
ggcccagggaaggcugaag

SEQ ID NO: 886456 - RNA, 18 nt, Human
gguggcauggcccagcug

SEQ ID NO: 886457 - RNA, 19 nt, Human
gugcaacagcagacauucc

SEQ ID NO: 886458 - RNA, 21 nt, Human
guguuggccugcugcuccgcc

SEQ ID NO: 886459 - RNA, 21 nt, Human
ucaagcucagccuccagcucc

SEQ ID NO: 886460 - RNA, 20 nt, Human
uccaaaagcuccugcucugc

SEQ ID NO: 886461 - RNA, 24 nt, Human
uccagcucgugcugggccuugcga

SEQ ID NO: 886462 - RNA, 28 nt, Human
ucccagagggaccaaagugacgauuuug

SEQ ID NO: 886463 - RNA, 19 nt, Human
uccccgcucagcugggcca

SEQ ID NO: 886464 - RNA, 22 nt, Human
uccccgcucagcugggccaagu

SEQ ID NO: 886465 - RNA, 23 nt, Human
ucccguaccucuuggccuccagc

SEQ ID NO: 886466 - RNA, 18 nt, Human
ucccugagaggaucuggu

SEQ ID NO: 886467 - RNA, 18 nt, Human
uccgugcccgcagcuugu

SEQ ID NO: 886468 - RNA, 21 nt, Human
uccgugcccgcagcuuguugg

SEQ ID NO: 886469 - RNA, 20 nt, Human
uccugaaccccaaagaaaag

SEQ ID NO: 886470 - RNA, 18 nt, Human
ucguugaggucacccucc

SEQ ID NO: 886471 - RNA, 21 nt, Human
ucugcaccugcuucuucccgc

SEQ ID NO: 886472 - RNA, 23 nt, Human
ucugcagcuuguccaccaggucc

SEQ ID NO: 886473 - RNA, 21 nt, Human
ucuguggccugacggguggca

SEQ ID NO: 886474 - RNA, 18 nt, Human
ucuugagccgcagcgccu

SEQ ID NO: 886475 - RNA, 23 nt, Human
ugacggguggcauggcccagcug

SEQ ID NO: 886476 - RNA, 27 nt, Human
ugagaaggaaacuggcugugguguuua

SEQ ID NO: 886477 - RNA, 18 nt, Human
ugagaggaucugguagua

SEQ ID NO: 886478 - RNA, 22 nt, Human
ugcagccuccuccaccuccccg

SEQ ID NO: 886479 - RNA, 23 nt, Human
ugcuucuucccgccacggagggc

SEQ ID NO: 886480 - RNA, 19 nt, Human
uggcagccugggccucugu

SEQ ID NO: 886481 - RNA, 21 nt, Human
uggcaggaucggggcaggugg

SEQ ID NO: 886482 - RNA, 21 nt, Human
uggccuccagcuucugcaccu

SEQ ID NO: 886483 - RNA, 22 nt, Human
ugggagagcuccagcuggaucc

SEQ ID NO: 886484 - RNA, 20 nt, Human
ugggccucuguggccugacg

SEQ ID NO: 886485 - RNA, 24 nt, Human
uggggcccagggcgucccgggucc

SEQ ID NO: 886486 - RNA, 20 nt, Human
uggguuuccgccaugucugc

SEQ ID NO: 886487 - RNA, 20 nt, Human
uguagcucuugaccuugcuc

SEQ ID NO: 886488 - RNA, 18 nt, Human
uguccugcuccuucuuca

SEQ ID NO: 886489 - RNA, 23 nt, Human
ugugcagccuccuccaccucccc

SEQ ID NO: 886490 - RNA, 18 nt, Human
uguucugcgaaugcagaa

SEQ ID NO: 886491 - RNA, 20 nt, Human
uguuggccugcugcuccgcc

SEQ ID NO: 886492 - RNA, 20 nt, Human
uuccagcgccuucuugguuu

SEQ ID NO: 886493 - RNA, 22 nt, Human
uuccaggugugcacuugugucc

SEQ ID NO: 886494 - RNA, 22 nt, Human
uuggucuccuccagcuccaggg

SEQ ID NO: 886495 - RNA, 23 nt, Human
uuuggccuucuccucagccuccc

SEQ ID NO: 886496 - RNA, 23 nt, Human
uuuuggccuucuccucagccucc

SEQ ID NO: 886497 - RNA, 20 nt, Human
acugcucagcucuccgggac

SEQ ID NO: 886498 - RNA, 20 nt, Human
acugcucagcucuccgggac

SEQ ID NO: 886499 - RNA, 23 nt, Human
agacaagaugggaaaguugcuga

SEQ ID NO: 886500 - RNA, 23 nt, Human
agacaagaugggaaaguugcuga

SEQ ID NO: 886501 - RNA, 23 nt, Human
agacaagaugggaaaguugcuga

SEQ ID NO: 886502 - RNA, 23 nt, Human
agccauucagcaccaugcggacg

SEQ ID NO: 886503 - RNA, 23 nt, Human
agccauucagcaccaugcggacg

SEQ ID NO: 886504 - RNA, 18 nt, Human
cacauccccacacuggcu

SEQ ID NO: 886505 - RNA, 18 nt, Human
cacauccccacacuggcu

SEQ ID NO: 886506 - RNA, 19 nt, Human
caggaucuugccaucaccu

SEQ ID NO: 886507 - RNA, 19 nt, Human
caggaucuugccaucaccu

SEQ ID NO: 886508 - RNA, 21 nt, Human
cccagagagcaaguuuauuug

SEQ ID NO: 886509 - RNA, 21 nt, Human
cccagagagcaaguuuauuug

SEQ ID NO: 886510 - RNA, 21 nt, Human
cccagagagcaaguuuauuug

SEQ ID NO: 886511 - RNA, 22 nt, Human
ccgggaccuuuuccugcaguaa

SEQ ID NO: 886512 - RNA, 23 nt, Human
cuggcuguacaggaucuugccau

SEQ ID NO: 886513 - RNA, 23 nt, Human
cuggcuguacaggaucuugccau

SEQ ID NO: 886514 - RNA, 20 nt, Human
gagcuccgccccaugggccc

SEQ ID NO: 886515 - RNA, 22 nt, Human
gugaaugcugacggcaaacauc

SEQ ID NO: 886516 - RNA, 22 nt, Human
gugaaugcugacggcaaacauc

SEQ ID NO: 886517 - RNA, 22 nt, Human
gugaaugcugacggcaaacauc

SEQ ID NO: 886518 - RNA, 20 nt, Human
uucagcaccaugcggacgag

SEQ ID NO: 886519 - RNA, 20 nt, Human
uucagcaccaugcggacgag

SEQ ID NO: 886520 - RNA, 18 nt, Human
aaagggggaucccugagc

SEQ ID NO: 886521 - RNA, 22 nt, Human
aaggggugucugaucccaggac

SEQ ID NO: 886522 - RNA, 23 nt, Human
acccuaaccccucaaagggggau

SEQ ID NO: 886523 - RNA, 24 nt, Human
acgcacuucuccuggccuguuucu

SEQ ID NO: 886524 - RNA, 22 nt, Human
acugggacccuaaccccucaaa

SEQ ID NO: 886525 - RNA, 19 nt, Human
agagacuauagcccagggc

SEQ ID NO: 886526 - RNA, 19 nt, Human
aggggucagagacuauagc

SEQ ID NO: 886527 - RNA, 18 nt, Human
cagauguccacgcugccc

SEQ ID NO: 886528 - RNA, 18 nt, Human
ccccuucccuuccuccuc

SEQ ID NO: 886529 - RNA, 21 nt, Human
ccccuucccuuccuccucggg

SEQ ID NO: 886530 - RNA, 19 nt, Human
ccucuagguccugcccucc

SEQ ID NO: 886531 - RNA, 20 nt, Human
cgacuccugagcacacuccu

SEQ ID NO: 886532 - RNA, 23 nt, Human
cggaauggggccuucccuuggug

SEQ ID NO: 886533 - RNA, 21 nt, Human
cggcaguggccggucagggug

SEQ ID NO: 886534 - RNA, 19 nt, Human
cuccagcccauguccccag

SEQ ID NO: 886535 - RNA, 18 nt, Human
cuggcgggggcuggggug

SEQ ID NO: 886536 - RNA, 19 nt, Human
gacuccugagcacacuccc

SEQ ID NO: 886537 - RNA, 18 nt, Human
gccucuagguccugcccu

SEQ ID NO: 886538 - RNA, 19 nt, Human
gcggcaguggccggucagg

SEQ ID NO: 886539 - RNA, 24 nt, Human
gcuggggugucagggggcuggggu

SEQ ID NO: 886540 - RNA, 19 nt, Human
ggcaguggccggucagggu

SEQ ID NO: 886541 - RNA, 21 nt, Human
ggggcacacagagccccuucc

SEQ ID NO: 886542 - RNA, 30 nt, Human
ggggcuggggugucagggggcugggguggg

SEQ ID NO: 886543 - RNA, 26 nt, Human
gggggcuggggugucagggggcuggg

SEQ ID NO: 886544 - RNA, 20 nt, Human
ggggugucagggggcugggg

SEQ ID NO: 886545 - RNA, 21 nt, Human
gugcggggaggggugacuggc

SEQ ID NO: 886546 - RNA, 23 nt, Human
guggcgugcucugggugggugug

SEQ ID NO: 886547 - RNA, 20 nt, Human
ucagggccucuuccuccugg

SEQ ID NO: 886548 - RNA, 18 nt, Human
ucaugggcagggagcugg

SEQ ID NO: 886549 - RNA, 23 nt, Human
uccacugggaacugggacccuaa

SEQ ID NO: 886550 - RNA, 21 nt, Human
ucccugagcgagggucauggg

SEQ ID NO: 886551 - RNA, 23 nt, Human
ucggcacgcacuucuccuggccu

SEQ ID NO: 886552 - RNA, 19 nt, Human
ucuauuggagauucugccc

SEQ ID NO: 886553 - RNA, 18 nt, Human
ugagaggggaccuuggug

SEQ ID NO: 886554 - RNA, 21 nt, Human
ugagcacacucccauggcggg

SEQ ID NO: 886555 - RNA, 23 nt, Human
ugccucagcucggcacgcacuuc

SEQ ID NO: 886556 - RNA, 20 nt, Human
ugcucugggugggugugcgg

SEQ ID NO: 886557 - RNA, 24 nt, Human
uggcgugcucugggugggugugcg

SEQ ID NO: 886558 - RNA, 22 nt, Human
ugggaacaucugccucagcucg

SEQ ID NO: 886559 - RNA, 22 nt, Human
ugggacagauguccacgcugcc

SEQ ID NO: 886560 - RNA, 20 nt, Human
ugguauggacgggugugugc

SEQ ID NO: 886561 - RNA, 21 nt, Human
uguccacgcugcccgcgacuc

SEQ ID NO: 886562 - RNA, 22 nt, Human
ugugcggggaggggugacuggc

SEQ ID NO: 886563 - RNA, 25 nt, Human
uucccuuccuccucggggaacagcc

SEQ ID NO: 886564 - RNA, 23 nt, Human
uuccuuggaggggucagagacua

SEQ ID NO: 886565 - RNA, 22 nt, Human
aaacccagcuggccugaaggcu

SEQ ID NO: 886566 - RNA, 19 nt, Human
aagcaggugcgcuccggga

SEQ ID NO: 886567 - RNA, 21 nt, Human
aagccaaggccaggccaucga

SEQ ID NO: 886568 - RNA, 26 nt, Human
aggcaggggagggucuccuccugggg

SEQ ID NO: 886569 - RNA, 23 nt, Human
agggaagaggggaacagcagucg

SEQ ID NO: 886570 - RNA, 20 nt, Human
aggugccuucccaaccucag

SEQ ID NO: 886571 - RNA, 19 nt, Human
aucccacccucagcccccc

SEQ ID NO: 886572 - RNA, 19 nt, Human
cacucaccagcaugauguc

SEQ ID NO: 886573 - RNA, 20 nt, Human
cagggaggcaaacucuggcu

SEQ ID NO: 886574 - RNA, 24 nt, Human
caucaaacggagcugggagucgcu

SEQ ID NO: 886575 - RNA, 26 nt, Human
ccaaccucagcacucagucccaaucu

SEQ ID NO: 886576 - RNA, 24 nt, Human
ccacccucagccccccaacagcuu

SEQ ID NO: 886577 - RNA, 21 nt, Human
cccaaccagcugcggcggcau

SEQ ID NO: 886578 - RNA, 21 nt, Human
cccacccucagccccccaaca

SEQ ID NO: 886579 - RNA, 22 nt, Human
ccccaaccagcugcggcggcau

SEQ ID NO: 886580 - RNA, 21 nt, Human
ccccccaacagcuuccucagc

SEQ ID NO: 886581 - RNA, 23 nt, Human
ccccccaacagcuuccucagcuu

SEQ ID NO: 886582 - RNA, 21 nt, Human
ccucagccccccaacagcuuc

SEQ ID NO: 886583 - RNA, 23 nt, Human
ccucgggcuaaacccagcuggcc

SEQ ID NO: 886584 - RNA, 23 nt, Human
cgagaaucccacccucagccccc

SEQ ID NO: 886585 - RNA, 20 nt, Human
cucuccgaaggugaaguggg

SEQ ID NO: 886586 - RNA, 19 nt, Human
cuugcguucccccuucugu

SEQ ID NO: 886587 - RNA, 21 nt, Human
gaaggugaagugggggaagca

SEQ ID NO: 886588 - RNA, 24 nt, Human
gcaggcagaugaggucuugggaug

SEQ ID NO: 886589 - RNA, 21 nt, Human
gcguucccccuucugugggag

SEQ ID NO: 886590 - RNA, 23 nt, Human
ggcaggggagggucuccuccugg

SEQ ID NO: 886591 - RNA, 22 nt, Human
ggccugaaggcucaacucacau

SEQ ID NO: 886592 - RNA, 18 nt, Human
gggaagcaggugcgcucc

SEQ ID NO: 886593 - RNA, 18 nt, Human
gucccaaucucucuucca

SEQ ID NO: 886594 - RNA, 24 nt, Human
guuccuguaaacauccaucgcagc

SEQ ID NO: 886595 - RNA, 25 nt, Human
guuccuguaaacauccaucgcagcu

SEQ ID NO: 886596 - RNA, 24 nt, Human
uaagaccagccucgggcuaaaccc

SEQ ID NO: 886597 - RNA, 25 nt, Human
ucagccccccaacagcuuccucagg

SEQ ID NO: 886598 - RNA, 21 nt, Human
ucccaaccucagcacucaguc

SEQ ID NO: 886599 - RNA, 25 nt, Human
ucccacccucagccccccaacagcu

SEQ ID NO: 886600 - RNA, 24 nt, Human
ucgcagcugcaaauaaucagaagc

SEQ ID NO: 886601 - RNA, 24 nt, Human
ucuccuggguucaaacaggaacug

SEQ ID NO: 886602 - RNA, 18 nt, Human
ucugagucaccccugaaa

SEQ ID NO: 886603 - RNA, 21 nt, Human
ucuuccacucuccuggguuca

SEQ ID NO: 886604 - RNA, 23 nt, Human
ucuucugagucaccccugaaaca

SEQ ID NO: 886605 - RNA, 20 nt, Human
ugaaggagcgagaaucccac

SEQ ID NO: 886606 - RNA, 19 nt, Human
ugacacugcaggcagauga

SEQ ID NO: 886607 - RNA, 25 nt, Human
ugcccccaaccagcugcggcggcau

SEQ ID NO: 886608 - RNA, 18 nt, Human
ugccuucccaaccucagc

SEQ ID NO: 886609 - RNA, 22 nt, Human
ugcuuagacagguuuaucagaa

SEQ ID NO: 886610 - RNA, 22 nt, Human
uggcacgaagcuuuugagggaa

SEQ ID NO: 886611 - RNA, 24 nt, Human
uggccugaaggcucaacucacauc

SEQ ID NO: 886612 - RNA, 20 nt, Human
uuaauccaaagaaguaagcc

SEQ ID NO: 886613 - RNA, 18 nt, Human
uuccucagcuucuuuuuc

SEQ ID NO: 886614 - RNA, 18 nt, Human
uuugacacugcaggcaga

SEQ ID NO: 886615 - RNA, 25 nt, Human
uuugcguguguccgcaguuugaagu

SEQ ID NO: 886616 - RNA, 25 nt, Human
aaaaacaccaaauaucuacuuaaaa

SEQ ID NO: 886617 - RNA, 18 nt, Human
aaaagugcugaccauugg

SEQ ID NO: 886618 - RNA, 20 nt, Human
aaaagugcugaccauugguu

SEQ ID NO: 886619 - RNA, 24 nt, Human
aaaauaauggucacaacucaaaug

SEQ ID NO: 886620 - RNA, 28 nt, Human
aaagccaaaaauaaaaacaaacauugcc

SEQ ID NO: 886621 - RNA, 20 nt, Human
aaaugaagggcaauucuaaa

SEQ ID NO: 886622 - RNA, 22 nt, Human
aacacacucuugggcugauacu

SEQ ID NO: 886623 - RNA, 26 nt, Human
aacacuucuaccaccgauagcaaccc

SEQ ID NO: 886624 - RNA, 20 nt, Human
aacucaaguacauuuuccuc

SEQ ID NO: 886625 - RNA, 26 nt, Human
aagccaaaaauaaaaacaaagggacc

SEQ ID NO: 886626 - RNA, 22 nt, Human
aauaagugacggugaauggcaa

SEQ ID NO: 886627 - RNA, 22 nt, Human
acccaaggggggaacacaguuu

SEQ ID NO: 886628 - RNA, 22 nt, Human
agaaaauaaaacucauccaccc

SEQ ID NO: 886629 - RNA, 21 nt, Human
agccaaaaauaaaaacaaaca

SEQ ID NO: 886630 - RNA, 21 nt, Human
auauuaauagagaaauagcac

SEQ ID NO: 886631 - RNA, 23 nt, Human
augcaccuuaccagagauguuug

SEQ ID NO: 886632 - RNA, 21 nt, Human
caacccaaggggggaacacag

SEQ ID NO: 886633 - RNA, 19 nt, Human
cauuuuuguuucauuagaa

SEQ ID NO: 886634 - RNA, 19 nt, Human
cucagauaacucaaaccaa

SEQ ID NO: 886635 - RNA, 22 nt, Human
gcugauacuaucguggauuuug

SEQ ID NO: 886636 - RNA, 23 nt, Human
gucacaacugaaucacauuaacu

SEQ ID NO: 886637 - RNA, 27 nt, Human
gucacaacugaaucacauuaacuggcu

SEQ ID NO: 886638 - RNA, 22 nt, Human
uaaaaagugcauaacaggagua

SEQ ID NO: 886639 - RNA, 26 nt, Human
uaaaacauaaacugaaucaaauuuug

SEQ ID NO: 886640 - RNA, 24 nt, Human
uaaaauucauuuugaaaauacaau

SEQ ID NO: 886641 - RNA, 22 nt, Human
uaacaauauauuaauagagaaa

SEQ ID NO: 886642 - RNA, 27 nt, Human
uaacaggaguaagagaggcuuaccaaa

SEQ ID NO: 886643 - RNA, 22 nt, Human
uaaggcagcuuuaaaagaaaau

SEQ ID NO: 886644 - RNA, 22 nt, Human
uauauuaauagagaaauagcac

SEQ ID NO: 886645 - RNA, 21 nt, Human
uauuuuuaugcauaguuuaug

SEQ ID NO: 886646 - RNA, 21 nt, Human
ucacaacugaaucacauuaac

SEQ ID NO: 886647 - RNA, 23 nt, Human
ucagaauggaauuuuacccuuga

SEQ ID NO: 886648 - RNA, 20 nt, Human
ucucagauaacucaaaccaa

SEQ ID NO: 886649 - RNA, 22 nt, Human
ugagggcaggaaaauuuuaaaa

SEQ ID NO: 886650 - RNA, 22 nt, Human
uggcaacacuucuaccaccgau

SEQ ID NO: 886651 - RNA, 21 nt, Human
uuaaaaagcucucuguggagu

SEQ ID NO: 886652 - RNA, 24 nt, Human
uugaucuugaucaacuaacacaau

SEQ ID NO: 886653 - RNA, 21 nt, Human
uuucuccagaauacucaguuc

SEQ ID NO: 886654 - RNA, 23 nt, Human
uuugacaagauaaaaacaccaaa

SEQ ID NO: 886655 - RNA, 25 nt, Human
uuuuccucaucuccaauauuuuaga

SEQ ID NO: 886656 - RNA, 25 nt, Human
aacaguccuaccccuaucugcaccc

SEQ ID NO: 886657 - RNA, 22 nt, Human
acacacuuauacauacacagga

SEQ ID NO: 886658 - RNA, 19 nt, Human
accacacugggagcccagc

SEQ ID NO: 886659 - RNA, 19 nt, Human
accacacugggagcccagc

SEQ ID NO: 886660 - RNA, 23 nt, Human
agaggacacagaucacaggaacc

SEQ ID NO: 886661 - RNA, 21 nt, Human
agaggaggaggaaggucaugg

SEQ ID NO: 886662 - RNA, 20 nt, Human
agccgggaaagcaggagcga

SEQ ID NO: 886663 - RNA, 21 nt, Human
aggaaggucauggcauguaga

SEQ ID NO: 886664 - RNA, 19 nt, Human
caccccaucaacucucugg

SEQ ID NO: 886665 - RNA, 21 nt, Human
cacggaaugaggcuuuacaga

SEQ ID NO: 886666 - RNA, 20 nt, Human
cacugggagcccagcauccc

SEQ ID NO: 886667 - RNA, 23 nt, Human
cagaacuucugcaaagaggacac

SEQ ID NO: 886668 - RNA, 21 nt, Human
cauucaucauucaucaguuuc

SEQ ID NO: 886669 - RNA, 19 nt, Human
ccacacacaccgacacaca

SEQ ID NO: 886670 - RNA, 23 nt, Human
ccaugcuggcuggcucuggccac

SEQ ID NO: 886671 - RNA, 22 nt, Human
cccaccgagccgggaaagcagg

SEQ ID NO: 886672 - RNA, 23 nt, Human
cccagguagcaaggccauagaga

SEQ ID NO: 886673 - RNA, 23 nt, Human
cccggguggccgcgaagggaccc

SEQ ID NO: 886674 - RNA, 23 nt, Human
cgcgaagggaccccaccgagccg

SEQ ID NO: 886675 - RNA, 21 nt, Human
cgggaaagcaggagcgaagga

SEQ ID NO: 886676 - RNA, 24 nt, Human
cuccacacacaccgacacacaucc

SEQ ID NO: 886677 - RNA, 19 nt, Human
cucuccacacacaccgaca

SEQ ID NO: 886678 - RNA, 18 nt, Human
cuggccaccggggaggcc

SEQ ID NO: 886679 - RNA, 24 nt, Human
gaaggcacagaugcccaggaguca

SEQ ID NO: 886680 - RNA, 21 nt, Human
gagaaauagaaguauacaccc

SEQ ID NO: 886681 - RNA, 21 nt, Human
gcgaagggaccccaccgagcc

SEQ ID NO: 886682 - RNA, 20 nt, Human
ggcucuggccaccggggagg

SEQ ID NO: 886683 - RNA, 20 nt, Human
guucuauucuaacaguccua

SEQ ID NO: 886684 - RNA, 18 nt, Human
uacacacaguuuggguug

SEQ ID NO: 886685 - RNA, 19 nt, Human
uacacacaguuuggguugg

SEQ ID NO: 886686 - RNA, 19 nt, Human
uauacaccccaaacuacac

SEQ ID NO: 886687 - RNA, 22 nt, Human
uauacauacacaggauagagaa

SEQ ID NO: 886688 - RNA, 21 nt, Human
uaucaggaaagacuuccugga

SEQ ID NO: 886689 - RNA, 27 nt, Human
uauucuaacaguccuaccccuaucugc

SEQ ID NO: 886690 - RNA, 19 nt, Human
ucaacacuuuauuuuguuc

SEQ ID NO: 886691 - RNA, 20 nt, Human
uccacacacaccgacacaca

SEQ ID NO: 886692 - RNA, 23 nt, Human
uccacacacaccgacacacaucc

SEQ ID NO: 886693 - RNA, 24 nt, Human
uccacacacaccgacacacauccc

SEQ ID NO: 886694 - RNA, 20 nt, Human
uccccgcaggauaugccucu

SEQ ID NO: 886695 - RNA, 18 nt, Human
uccccggguggccgcgaa

SEQ ID NO: 886696 - RNA, 23 nt, Human
uccccggguggccgcgaagggac

SEQ ID NO: 886697 - RNA, 19 nt, Human
uccuaccccuaucugcacc

SEQ ID NO: 886698 - RNA, 21 nt, Human
ucuuuggcucauucauucauu

SEQ ID NO: 886699 - RNA, 20 nt, Human
ugagaugaugagaugagaug

SEQ ID NO: 886700 - RNA, 18 nt, Human
ugagauggagcuuccugc

SEQ ID NO: 886701 - RNA, 21 nt, Human
ugagauggagcuuccugccag

SEQ ID NO: 886702 - RNA, 20 nt, Human
ugccucugugggcucaucuc

SEQ ID NO: 886703 - RNA, 19 nt, Human
uggccaccggggaggccug

SEQ ID NO: 886704 - RNA, 21 nt, Human
uggcucuggccaccggggagg

SEQ ID NO: 886705 - RNA, 26 nt, Human
uggcuggcucuggccaccggggaggc

SEQ ID NO: 886706 - RNA, 18 nt, Human
ugggagcccagcaucccc

SEQ ID NO: 886707 - RNA, 20 nt, Human
ugugugggcucauuuauuug

SEQ ID NO: 886708 - RNA, 22 nt, Human
uucaguuugauauaucaggaaa

SEQ ID NO: 886709 - RNA, 23 nt, Human
uucaucauucaucaguuucuuga

SEQ ID NO: 886710 - RNA, 18 nt, Human
uugaaugcuuguacacac

SEQ ID NO: 886711 - RNA, 20 nt, Human
uuuacagacacacgcagcac

SEQ ID NO: 886712 - RNA, 24 nt, Human
aggcggccggagccccugcgggug

SEQ ID NO: 886713 - RNA, 24 nt, Human
cauagagcucacggcccugguacc

SEQ ID NO: 886714 - RNA, 21 nt, Human
ccucggggugcggcgggugcg

SEQ ID NO: 886715 - RNA, 19 nt, Human
ccugcgggugaggcgggag

SEQ ID NO: 886716 - RNA, 18 nt, Human
cggcccugguaccuggcg

SEQ ID NO: 886717 - RNA, 20 nt, Human
cggccggagccccugcgggu

SEQ ID NO: 886718 - RNA, 23 nt, Human
gccccugcgggugaggcgggagc

SEQ ID NO: 886719 - RNA, 22 nt, Human
gcggcguuggccacagcauaga

SEQ ID NO: 886720 - RNA, 23 nt, Human
ggcccauacaggggcagcuccug

SEQ ID NO: 886721 - RNA, 19 nt, Human
ggccggagccccugcgggu

SEQ ID NO: 886722 - RNA, 22 nt, Human
gggagcggcgagcaggagggcu

SEQ ID NO: 886723 - RNA, 24 nt, Human
ggggcggacaauuggcggccucgg

SEQ ID NO: 886724 - RNA, 22 nt, Human
uaccuggcgauggccucaggcc

SEQ ID NO: 886725 - RNA, 19 nt, Human
aaagaagcugaccccauau

SEQ ID NO: 886726 - RNA, 22 nt, Human
aaagagacagaggcuuucucag

SEQ ID NO: 886727 - RNA, 22 nt, Human
aaagauggacaagaucaggucc

SEQ ID NO: 886728 - RNA, 24 nt, Human
aaagugcugggauuacaggccuga

SEQ ID NO: 886729 - RNA, 19 nt, Human
aagugcugggauuacaggc

SEQ ID NO: 886730 - RNA, 19 nt, Human
aagugcugggauuacaggc

SEQ ID NO: 886731 - RNA, 26 nt, Human
aagugcugggauuacaggccugagcc

SEQ ID NO: 886732 - RNA, 24 nt, Human
aaucauauguaacauacaauugaa

SEQ ID NO: 886733 - RNA, 19 nt, Human
acaaagauggacaagauca

SEQ ID NO: 886734 - RNA, 22 nt, Human
accagcagaacacuucaggccc

SEQ ID NO: 886735 - RNA, 20 nt, Human
accagugaauggagaguuac

SEQ ID NO: 886736 - RNA, 24 nt, Human
accauguuggucaggcuggucucg

SEQ ID NO: 886737 - RNA, 23 nt, Human
acccucuaccaagcccugugcua

SEQ ID NO: 886738 - RNA, 18 nt, Human
acgggguuucaccauguu

SEQ ID NO: 886739 - RNA, 23 nt, Human
acgggguuucaccauguugguca

SEQ ID NO: 886740 - RNA, 24 nt, Human
acgggguuucaccauguuggucag

SEQ ID NO: 886741 - RNA, 24 nt, Human
acuucaugauccgcccaucuuggc

SEQ ID NO: 886742 - RNA, 25 nt, Human
agaaaagcccagcaaaggugggagg

SEQ ID NO: 886743 - RNA, 18 nt, Human
agaagagugcaggaaagg

SEQ ID NO: 886744 - RNA, 18 nt, Human
agagagggguuauuugcc

SEQ ID NO: 886745 - RNA, 21 nt, Human
agauaugcuuguguaacuuag

SEQ ID NO: 886746 - RNA, 20 nt, Human
agccaccgcacccggcuuuu

SEQ ID NO: 886747 - RNA, 23 nt, Human
aggaagcacaauuuaauguugag

SEQ ID NO: 886748 - RNA, 18 nt, Human
aggaugaagaaaaaaagg

SEQ ID NO: 886749 - RNA, 19 nt, Human
aggcauggaccauaugucc

SEQ ID NO: 886750 - RNA, 22 nt, Human
aguagagacgggguuucaccau

SEQ ID NO: 886751 - RNA, 22 nt, Human
agugauagaaaagcccagcaaa

SEQ ID NO: 886752 - RNA, 24 nt, Human
agugcugggauuacaggccugagc

SEQ ID NO: 886753 - RNA, 18 nt, Human
aucacacugcaauuuguc

SEQ ID NO: 886754 - RNA, 18 nt, Human
auggagcccugacucugg

SEQ ID NO: 886755 - RNA, 18 nt, Human
augugggagagugguaga

SEQ ID NO: 886756 - RNA, 18 nt, Human
caaaggugggaggaugga

SEQ ID NO: 886757 - RNA, 24 nt, Human
caaagugacagguccaaacuuucc

SEQ ID NO: 886758 - RNA, 24 nt, Human
caaagugcugggauuacaggccug

SEQ ID NO: 886759 - RNA, 22 nt, Human
caccaaagugacagguccaaac

SEQ ID NO: 886760 - RNA, 21 nt, Human
caccauguuggucaggcuggu

SEQ ID NO: 886761 - RNA, 24 nt, Human
caccauguuggucaggcuggucuc

SEQ ID NO: 886762 - RNA, 18 nt, Human
cagcagaacacuucaggc

SEQ ID NO: 886763 - RNA, 20 nt, Human
cagcagaacacuucaggccc

SEQ ID NO: 886764 - RNA, 19 nt, Human
ccaaagaagcugaccccau

SEQ ID NO: 886765 - RNA, 19 nt, Human
ccaaagugacagguccaaa

SEQ ID NO: 886766 - RNA, 19 nt, Human
ccaaagugcugggauuaca

SEQ ID NO: 886767 - RNA, 22 nt, Human
ccaaagugcugggauuacaggc

SEQ ID NO: 886768 - RNA, 24 nt, Human
ccaaagugcugggauuacaggccu

SEQ ID NO: 886769 - RNA, 19 nt, Human
ccagcagaacacuucaggc

SEQ ID NO: 886770 - RNA, 22 nt, Human
cccaucuuggccucccaaagug

SEQ ID NO: 886771 - RNA, 20 nt, Human
cccugugcuaggcucugugc

SEQ ID NO: 886772 - RNA, 28 nt, Human
cuagagaaauggucuuauagggcuucuu

SEQ ID NO: 886773 - RNA, 22 nt, Human
cucagcaucauaauuaacaagg

SEQ ID NO: 886774 - RNA, 20 nt, Human
cuccugacuucaugauccgc

SEQ ID NO: 886775 - RNA, 22 nt, Human
cuuccacuguagccacugauag

SEQ ID NO: 886776 - RNA, 27 nt, Human
cuuggcaaggugaaauaaagagacaga

SEQ ID NO: 886777 - RNA, 24 nt, Human
cuuucccucucauuccuuucuuuu

SEQ ID NO: 886778 - RNA, 20 nt, Human
gaagguaacauuccugucag

SEQ ID NO: 886779 - RNA, 19 nt, Human
gacagaggcuuucucagca

SEQ ID NO: 886780 - RNA, 23 nt, Human
gagacgggguuucaccauguugg

SEQ ID NO: 886781 - RNA, 24 nt, Human
gagacgggguuucaccauguuggu

SEQ ID NO: 886782 - RNA, 19 nt, Human
gagcaaaagagucuccuuu

SEQ ID NO: 886783 - RNA, 20 nt, Human
gaggauggagaagagugcag

SEQ ID NO: 886784 - RNA, 20 nt, Human
gauaugcuuguguaacuuag

SEQ ID NO: 886785 - RNA, 18 nt, Human
gauuacaggccugagcca

SEQ ID NO: 886786 - RNA, 23 nt, Human
gauuacaggccugagccaccgca

SEQ ID NO: 886787 - RNA, 23 nt, Human
gauuuguaauauucaucuucccc

SEQ ID NO: 886788 - RNA, 18 nt, Human
gcaagugguucaguaagg

SEQ ID NO: 886789 - RNA, 20 nt, Human
gcccugacucugggggaggu

SEQ ID NO: 886790 - RNA, 18 nt, Human
ggaguuauuugaccagug

SEQ ID NO: 886791 - RNA, 24 nt, Human
ggcuggucucgaacuccugacuuc

SEQ ID NO: 886792 - RNA, 21 nt, Human
gggaggauggagaagagugca

SEQ ID NO: 886793 - RNA, 23 nt, Human
gggguuucaccauguuggucagg

SEQ ID NO: 886794 - RNA, 22 nt, Human
ggguuucaccauguuggucagg

SEQ ID NO: 886795 - RNA, 23 nt, Human
guagagacgggguuucaccaugu

SEQ ID NO: 886796 - RNA, 21 nt, Human
uaagaaaaauauuaagaacau

SEQ ID NO: 886797 - RNA, 23 nt, Human
uacaggccugagccaccgcaccc

SEQ ID NO: 886798 - RNA, 24 nt, Human
uaccaugaauguuccuacucugga

SEQ ID NO: 886799 - RNA, 22 nt, Human
uagagacgggguuucaccaugu

SEQ ID NO: 886800 - RNA, 24 nt, Human
uaguagagacgggguuucaccaug

SEQ ID NO: 886801 - RNA, 25 nt, Human
uaguagagacgggguuucaccaugu

SEQ ID NO: 886802 - RNA, 23 nt, Human
ucaccaaagugacagguccaaac

SEQ ID NO: 886803 - RNA, 20 nt, Human
uccaaacuuucccucucauu

SEQ ID NO: 886804 - RNA, 18 nt, Human
uccaugauuagacugggg

SEQ ID NO: 886805 - RNA, 19 nt, Human
uccauguauucuccauuca

SEQ ID NO: 886806 - RNA, 24 nt, Human
ucccaaagugcugggauuacaggc

SEQ ID NO: 886807 - RNA, 19 nt, Human
uccugggucuccacugggg

SEQ ID NO: 886808 - RNA, 18 nt, Human
ucuagagaaauggucuua

SEQ ID NO: 886809 - RNA, 21 nt, Human
ucucgaacuccugacuucaug

SEQ ID NO: 886810 - RNA, 20 nt, Human
ucuuccuagacacugggggc

SEQ ID NO: 886811 - RNA, 20 nt, Human
ucuuggccucccaaagugcu

SEQ ID NO: 886812 - RNA, 25 nt, Human
ugaaaaguaacuugauaggaaaaau

SEQ ID NO: 886813 - RNA, 19 nt, Human
ugaagaaaaaaaggaaggg

SEQ ID NO: 886814 - RNA, 21 nt, Human
ugaagaaaaaaaggaagggug

SEQ ID NO: 886815 - RNA, 18 nt, Human
ugagaaaggaaggcagcg

SEQ ID NO: 886816 - RNA, 24 nt, Human
ugauccgcccaucuuggccuccca

SEQ ID NO: 886817 - RNA, 18 nt, Human
ugauuacaucacacugca

SEQ ID NO: 886818 - RNA, 18 nt, Human
ugcacaacacauguggga

SEQ ID NO: 886819 - RNA, 25 nt, Human
ugcaggaaaggaacuccugggucuc

SEQ ID NO: 886820 - RNA, 20 nt, Human
ugccuuguagaaagaaucug

SEQ ID NO: 886821 - RNA, 21 nt, Human
ugccuuguagaaagaaucuga

SEQ ID NO: 886822 - RNA, 18 nt, Human
ugggauuacaggccugag

SEQ ID NO: 886823 - RNA, 19 nt, Human
ugggauuacaggccugagc

SEQ ID NO: 886824 - RNA, 21 nt, Human
ugggauuacaggccugagcca

SEQ ID NO: 886825 - RNA, 22 nt, Human
ugggauuacaggccugagccac

SEQ ID NO: 886826 - RNA, 23 nt, Human
ugggauuacaggccugagccacc

SEQ ID NO: 886827 - RNA, 24 nt, Human
ugggauuacaggccugagccaccg

SEQ ID NO: 886828 - RNA, 24 nt, Human
uggucaggcuggucucgaacuccu

SEQ ID NO: 886829 - RNA, 19 nt, Human
uguaauauucaucuucccc

SEQ ID NO: 886830 - RNA, 23 nt, Human
uguagaaagaaucugaaagauuu

SEQ ID NO: 886831 - RNA, 18 nt, Human
uuaguagagacgggguuu

SEQ ID NO: 886832 - RNA, 22 nt, Human
uuaguagagacgggguuucacc

SEQ ID NO: 886833 - RNA, 24 nt, Human
uuaguagagacgggguuucaccau

SEQ ID NO: 886834 - RNA, 24 nt, Human
uuucaccauguuggucaggcuggu

SEQ ID NO: 886835 - RNA, 24 nt, Human
uuuuuaguagagacgggguuucac

SEQ ID NO: 886836 - RNA, 23 nt, Human
uuuuuuaguagagacgggguuuc

SEQ ID NO: 886837 - RNA, 24 nt, Human
aaaaaaaaaaaaaaauuuagaagg

SEQ ID NO: 886838 - RNA, 18 nt, Human
aaaauuagcugggcgugg

SEQ ID NO: 886839 - RNA, 19 nt, Human
aaacagaaggugcaauugg

SEQ ID NO: 886840 - RNA, 21 nt, Human
aaacggcauggcaauuaagcu

SEQ ID NO: 886841 - RNA, 19 nt, Human
aacauggugaaaccugucu

SEQ ID NO: 886842 - RNA, 20 nt, Human
aacauggugaaaccugucuc

SEQ ID NO: 886843 - RNA, 20 nt, Human
aagagaacuuuuggcagguc

SEQ ID NO: 886844 - RNA, 24 nt, Human
aagcggagguugcaauaagccgag

SEQ ID NO: 886845 - RNA, 18 nt, Human
aaucacagcugucaccug

SEQ ID NO: 886846 - RNA, 23 nt, Human
aauguauugaaaugaacuaaacu

SEQ ID NO: 886847 - RNA, 24 nt, Human
aauuguuugaacccaggaagcgga

SEQ ID NO: 886848 - RNA, 23 nt, Human
accagucuguauuauagaaucac

SEQ ID NO: 886849 - RNA, 23 nt, Human
acuacacuccagccuggcgauag

SEQ ID NO: 886850 - RNA, 25 nt, Human
acuacacuccagccuggcgauagag

SEQ ID NO: 886851 - RNA, 19 nt, Human
agaaaacuuggaagccacu

SEQ ID NO: 886852 - RNA, 22 nt, Human
agaauuguuugaacccaggaag

SEQ ID NO: 886853 - RNA, 24 nt, Human
agcacuuugggaggcugagguggg

SEQ ID NO: 886854 - RNA, 23 nt, Human
agccaggcgcgguggcacacgcc

SEQ ID NO: 886855 - RNA, 23 nt, Human
agcccugccacaagacagaacag

SEQ ID NO: 886856 - RNA, 21 nt, Human
agccuggcgauagagcgagac

SEQ ID NO: 886857 - RNA, 23 nt, Human
agccuggcgauagagcgagacuc

SEQ ID NO: 886858 - RNA, 23 nt, Human
agcugggcgugguggcaggugcc

SEQ ID NO: 886859 - RNA, 23 nt, Human
aggcaggagaauuguuugaaccc

SEQ ID NO: 886860 - RNA, 24 nt, Human
aggcaggagaauuguuugaaccca

SEQ ID NO: 886861 - RNA, 24 nt, Human
aggcgcgguggcacacgccuguaa

SEQ ID NO: 886862 - RNA, 21 nt, Human
aggcugaggcaggagaauugu

SEQ ID NO: 886863 - RNA, 24 nt, Human
aggcugaggcaggagaauuguuug

SEQ ID NO: 886864 - RNA, 22 nt, Human
aggcugaggugggcggaucacg

SEQ ID NO: 886865 - RNA, 24 nt, Human
aggugggcggaucacgaggucaag

SEQ ID NO: 886866 - RNA, 27 nt, Human
auagagcgagacuccggagucucaaaa

SEQ ID NO: 886867 - RNA, 24 nt, Human
aucaugccacuacacuccagccug

SEQ ID NO: 886868 - RNA, 21 nt, Human
auccuggccaacauggugaaa

SEQ ID NO: 886869 - RNA, 22 nt, Human
augccacuacacuccagccugg

SEQ ID NO: 886870 - RNA, 22 nt, Human
cacaagacagaacagaucaaga

SEQ ID NO: 886871 - RNA, 21 nt, Human
caccagucuguauuauagaau

SEQ ID NO: 886872 - RNA, 22 nt, Human
caccugugacugucagaaacag

SEQ ID NO: 886873 - RNA, 20 nt, Human
cacgccuguaauccuagcac

SEQ ID NO: 886874 - RNA, 22 nt, Human
cacgccuguaauccuagcacuu

SEQ ID NO: 886875 - RNA, 24 nt, Human
cacgccuguaauccuagcacuuug

SEQ ID NO: 886876 - RNA, 23 nt, Human
cacuacacuccagccuggcgaua

SEQ ID NO: 886877 - RNA, 22 nt, Human
cacuccagccuggcgauagagc

SEQ ID NO: 886878 - RNA, 23 nt, Human
cacuccagccuggcgauagagcg

SEQ ID NO: 886879 - RNA, 19 nt, Human
cagaacagaucaagaggca

SEQ ID NO: 886880 - RNA, 19 nt, Human
cagcaggcauggggcaaga

SEQ ID NO: 886881 - RNA, 24 nt, Human
cagcuacucaggaggcugaggcag

SEQ ID NO: 886882 - RNA, 20 nt, Human
cagcuuuguaaauguacuca

SEQ ID NO: 886883 - RNA, 20 nt, Human
cagggcauuuucaguaaaaa

SEQ ID NO: 886884 - RNA, 19 nt, Human
ccacuacacuccagccugg

SEQ ID NO: 886885 - RNA, 20 nt, Human
ccacuacacuccagccuggc

SEQ ID NO: 886886 - RNA, 22 nt, Human
ccacuacacuccagccuggcga

SEQ ID NO: 886887 - RNA, 23 nt, Human
ccacuacacuccagccuggcgau

SEQ ID NO: 886888 - RNA, 28 nt, Human
cccauaaaacuugggaaacggcggaccg

SEQ ID NO: 886889 - RNA, 21 nt, Human
ccuggccaacauggugaaacc

SEQ ID NO: 886890 - RNA, 21 nt, Human
ccuggccaacauggugaaacc

SEQ ID NO: 886891 - RNA, 23 nt, Human
ccuggccaacauggugaaaccug

SEQ ID NO: 886892 - RNA, 22 nt, Human
ccuguaauccuagcacuuuggg

SEQ ID NO: 886893 - RNA, 21 nt, Human
ccuguagucccagcuacucag

SEQ ID NO: 886894 - RNA, 22 nt, Human
ccuguagucccagcuacucagg

SEQ ID NO: 886895 - RNA, 24 nt, Human
cgagaucaugccacuacacuccag

SEQ ID NO: 886896 - RNA, 24 nt, Human
cgaggccauccuggccaacauggu

SEQ ID NO: 886897 - RNA, 18 nt, Human
cgccuguaauccuagcac

SEQ ID NO: 886898 - RNA, 24 nt, Human
cuccagccuggcgauagagcgaga

SEQ ID NO: 886899 - RNA, 18 nt, Human
cugucaccugugacuguc

SEQ ID NO: 886900 - RNA, 24 nt, Human
cuucauaaucauguauuauuccua

SEQ ID NO: 886901 - RNA, 21 nt, Human
gacagaauagcacuggaucca

SEQ ID NO: 886902 - RNA, 20 nt, Human
gagcaaaagucuguuuucuu

SEQ ID NO: 886903 - RNA, 24 nt, Human
gagcagcauugucacugugaguga

SEQ ID NO: 886904 - RNA, 22 nt, Human
gagugagagaugauguggucca

SEQ ID NO: 886905 - RNA, 18 nt, Human
gcacuggauccacaggcc

SEQ ID NO: 886906 - RNA, 22 nt, Human
gcaggagaauuguuugaaccca

SEQ ID NO: 886907 - RNA, 19 nt, Human
gccaacauggugaaaccug

SEQ ID NO: 886908 - RNA, 20 nt, Human
gccgagaucaugccacuaca

SEQ ID NO: 886909 - RNA, 22 nt, Human
ggaagacucagcacuagaaucc

SEQ ID NO: 886910 - RNA, 24 nt, Human
ggagguugcaauaagccgagauca

SEQ ID NO: 886911 - RNA, 24 nt, Human
ggccaacauggugaaaccugucuc

SEQ ID NO: 886912 - RNA, 20 nt, Human
gggaggcugaggugggcgga

SEQ ID NO: 886913 - RNA, 19 nt, Human
gggcggaucacgaggucaa

SEQ ID NO: 886914 - RNA, 21 nt, Human
gguggcacacgccuguaaucc

SEQ ID NO: 886915 - RNA, 24 nt, Human
gguggcacacgccuguaauccuag

SEQ ID NO: 886916 - RNA, 19 nt, Human
guccccagcaggcaugggg

SEQ ID NO: 886917 - RNA, 24 nt, Human
gugagugagagaugauguggucca

SEQ ID NO: 886918 - RNA, 18 nt, Human
gugugaauucuuacaaaa

SEQ ID NO: 886919 - RNA, 18 nt, Human
guugcaauaagccgagau

SEQ ID NO: 886920 - RNA, 19 nt, Human
uaagacaccagucuguauu

SEQ ID NO: 886921 - RNA, 19 nt, Human
uagaaucacagcugucacc

SEQ ID NO: 886922 - RNA, 22 nt, Human
uagagcccugccacaagacaga

SEQ ID NO: 886923 - RNA, 20 nt, Human
uagagcgagacuccggaguc

SEQ ID NO: 886924 - RNA, 21 nt, Human
uagagcgagacuccggagucu

SEQ ID NO: 886925 - RNA, 24 nt, Human
uagcacuuugggaggcugaggugg

SEQ ID NO: 886926 - RNA, 20 nt, Human
uagguuggugacagaauagc

SEQ ID NO: 886927 - RNA, 19 nt, Human
uaugagcccuccaggaauu

SEQ ID NO: 886928 - RNA, 24 nt, Human
ucacgaggucaagagaucgaggcc

SEQ ID NO: 886929 - RNA, 18 nt, Human
ucagaaacagaaggugca

SEQ ID NO: 886930 - RNA, 23 nt, Human
ucagccaggcgcgguggcacacg

SEQ ID NO: 886931 - RNA, 19 nt, Human
ucauguauuauuccuaccu

SEQ ID NO: 886932 - RNA, 22 nt, Human
uccagccuggcgauagagcgag

SEQ ID NO: 886933 - RNA, 26 nt, Human
uccggagucucaaaaaaaaaaaaaaa

SEQ ID NO: 886934 - RNA, 18 nt, Human
ucucaaaaaaaaaaaaaa

SEQ ID NO: 886935 - RNA, 21 nt, Human
ugaaaccugucuccacuaaaa

SEQ ID NO: 886936 - RNA, 19 nt, Human
ugaaaggaaggaaugagaa

SEQ ID NO: 886937 - RNA, 19 nt, Human
ugagcccuccaggaauuuc

SEQ ID NO: 886938 - RNA, 24 nt, Human
ugaggcaggagaauuguuugaacc

SEQ ID NO: 886939 - RNA, 25 nt, Human
ugaggcaggagaauuguuugaaccc

SEQ ID NO: 886940 - RNA, 20 nt, Human
ugaggugggcggaucacgag

SEQ ID NO: 886941 - RNA, 21 nt, Human
ugaggugggcggaucacgagg

SEQ ID NO: 886942 - RNA, 24 nt, Human
ugaggugggcggaucacgagguca

SEQ ID NO: 886943 - RNA, 23 nt, Human
ugaggugggcggaucacgagguu

SEQ ID NO: 886944 - RNA, 22 nt, Human
ugcaauaagccgagaucaugcc

SEQ ID NO: 886945 - RNA, 23 nt, Human
ugccacaagacagaacagaucaa

SEQ ID NO: 886946 - RNA, 24 nt, Human
ugccuguagucccagcuacucagg

SEQ ID NO: 886947 - RNA, 19 nt, Human
uggaagccacugugucccc

SEQ ID NO: 886948 - RNA, 19 nt, Human
uggcacacgccuguaaucc

SEQ ID NO: 886949 - RNA, 21 nt, Human
uggcacacgccuguaauccua

SEQ ID NO: 886950 - RNA, 24 nt, Human
uggcacacgccuguaauccuagca

SEQ ID NO: 886951 - RNA, 19 nt, Human
uggcaggucacgguggcca

SEQ ID NO: 886952 - RNA, 22 nt, Human
uggcaggucacgguggccaaac

SEQ ID NO: 886953 - RNA, 23 nt, Human
uggccaacauggugaaaccuguc

SEQ ID NO: 886954 - RNA, 18 nt, Human
ugggaggcugaggugggc

SEQ ID NO: 886955 - RNA, 19 nt, Human
ugggaggcugaggugggcg

SEQ ID NO: 886956 - RNA, 24 nt, Human
ugggaggcugaggugggcggauca

SEQ ID NO: 886957 - RNA, 24 nt, Human
uggugaauauguuggcagguaaga

SEQ ID NO: 886958 - RNA, 24 nt, Human
ugguggcaggugccuguaguccca

SEQ ID NO: 886959 - RNA, 21 nt, Human
ugucagaaacagaaggugcaa

SEQ ID NO: 886960 - RNA, 24 nt, Human
uuagcugggcgugguggcaggugc

SEQ ID NO: 886961 - RNA, 19 nt, Human
uuagguugcuuuuucaauc

SEQ ID NO: 886962 - RNA, 23 nt, Human
uuauguauuagcagggugaugcu

SEQ ID NO: 886963 - RNA, 22 nt, Human
uucaugaaaaccuucugucccc

SEQ ID NO: 886964 - RNA, 25 nt, Human
uugggaggcugaggugggcggauca

SEQ ID NO: 886965 - RNA, 24 nt, Human
uuguuugaacccaggaagcggagg

SEQ ID NO: 886966 - RNA, 21 nt, Human
uuuuaaaugcagggcauuuuc

SEQ ID NO: 886967 - RNA, 20 nt, Human
uuuuuuuuuuuuuuuuuggu

SEQ ID NO: 886968 - RNA, 20 nt, Human
uuuuuuuuuuuuuuuuuugg

SEQ ID NO: 886969 - RNA, 19 nt, Human
aagaggacagacgugaaaa

SEQ ID NO: 886970 - RNA, 23 nt, Human
accaucauucaaugucccuccaa

SEQ ID NO: 886971 - RNA, 20 nt, Human
acccaaaccauucacaccca

SEQ ID NO: 886972 - RNA, 22 nt, Human
agaaauaauagggaggagaagc

SEQ ID NO: 886973 - RNA, 22 nt, Human
agauaaagaaaaacaauuaaag

SEQ ID NO: 886974 - RNA, 20 nt, Human
agggaggagaagcaugaagg

SEQ ID NO: 886975 - RNA, 22 nt, Human
agggaggagaagcaugaaggac

SEQ ID NO: 886976 - RNA, 25 nt, Human
caaauuuucuuucucuucuccagac

SEQ ID NO: 886977 - RNA, 24 nt, Human
caagccacgagggcccgucgaaaa

SEQ ID NO: 886978 - RNA, 19 nt, Human
cagacaguaggcugugcuu

SEQ ID NO: 886979 - RNA, 23 nt, Human
cagcugcagcaaaucccaauucc

SEQ ID NO: 886980 - RNA, 22 nt, Human
ccaaaccauucacacccaaguc

SEQ ID NO: 886981 - RNA, 24 nt, Human
ccaacuucauucaagucuucuccu

SEQ ID NO: 886982 - RNA, 25 nt, Human
ccaauuccgccccacgacacauucg

SEQ ID NO: 886983 - RNA, 22 nt, Human
ccucuguaacaacacacgagac

SEQ ID NO: 886984 - RNA, 23 nt, Human
cgaaaagcacaucaccucuguaa

SEQ ID NO: 886985 - RNA, 24 nt, Human
cucauccuuaacccaaaccauuca

SEQ ID NO: 886986 - RNA, 21 nt, Human
cuuucucuucuccagacagua

SEQ ID NO: 886987 - RNA, 20 nt, Human
gaccugacauuauuucccuc

SEQ ID NO: 886988 - RNA, 20 nt, Human
gggcaaauuuucuuucucuu

SEQ ID NO: 886989 - RNA, 23 nt, Human
uaacaacacacgagacacggcca

SEQ ID NO: 886990 - RNA, 20 nt, Human
uaacccaaaccauucacacc

SEQ ID NO: 886991 - RNA, 21 nt, Human
uaacccaaaccauucacaccc

SEQ ID NO: 886992 - RNA, 23 nt, Human
uaacccaaaccauucacacccaa

SEQ ID NO: 886993 - RNA, 18 nt, Human
ucaagccagaaauaauag

SEQ ID NO: 886994 - RNA, 18 nt, Human
ucacacccaagucacaca

SEQ ID NO: 886995 - RNA, 26 nt, Human
ucacacccaagucacacaggccggcu

SEQ ID NO: 886996 - RNA, 23 nt, Human
ucccuccaacuucauucaagucu

SEQ ID NO: 886997 - RNA, 21 nt, Human
uccuuaacccaaaccauucac

SEQ ID NO: 886998 - RNA, 23 nt, Human
ucuuugguuuggggcucaacuug

SEQ ID NO: 886999 - RNA, 25 nt, Human
ugaaggacgucucauccuuaaccca

SEQ ID NO: 887000 - RNA, 22 nt, Human
ugaauaaucaucuaacagcaga

SEQ ID NO: 887001 - RNA, 18 nt, Human
ugguuuggggcucaacuu

SEQ ID NO: 887002 - RNA, 19 nt, Human
uucgucugcccucugacca

SEQ ID NO: 887003 - RNA, 24 nt, Human
uuuuuuuuuuuuuuuuuuuucggg

SEQ ID NO: 887004 - RNA, 19 nt, Human
aaaacagguaaacaccaaa

SEQ ID NO: 887005 - RNA, 18 nt, Human
aaacagguaaacaccaaa

SEQ ID NO: 887006 - RNA, 19 nt, Human
aaacagguaaacaccaaaa

SEQ ID NO: 887007 - RNA, 22 nt, Human
aaagcauguacuccccaguuac

SEQ ID NO: 887008 - RNA, 22 nt, Human
aaauggcaugaugggagccuca

SEQ ID NO: 887009 - RNA, 19 nt, Human
aacaagucuagaugaugau

SEQ ID NO: 887010 - RNA, 23 nt, Human
aagcugccaauucaaauuacuua

SEQ ID NO: 887011 - RNA, 26 nt, Human
aaggacacaccaaccauuuucucccc

SEQ ID NO: 887012 - RNA, 19 nt, Human
aggaauugauacugauuuc

SEQ ID NO: 887013 - RNA, 22 nt, Human
auggauggcacuugggccugau

SEQ ID NO: 887014 - RNA, 19 nt, Human
auggcacuugggccugaug

SEQ ID NO: 887015 - RNA, 18 nt, Human
cacagcauugggauuugu

SEQ ID NO: 887016 - RNA, 23 nt, Human
cacaguccuucuuccuaucuccu

SEQ ID NO: 887017 - RNA, 24 nt, Human
caccaacuuccacacuacaaacac

SEQ ID NO: 887018 - RNA, 20 nt, Human
caccagaaaggacacaccaa

SEQ ID NO: 887019 - RNA, 23 nt, Human
cacuugaaaaacuuacacuguaa

SEQ ID NO: 887020 - RNA, 21 nt, Human
cauauuauuuucucaugguca

SEQ ID NO: 887021 - RNA, 20 nt, Human
cauccagaauaaauuaccua

SEQ ID NO: 887022 - RNA, 22 nt, Human
cauugggauuugugaaacuuga

SEQ ID NO: 887023 - RNA, 19 nt, Human
ccuugcuguuagauugugc

SEQ ID NO: 887024 - RNA, 26 nt, Human
cuccuugacuuaaugcuaaaugaaua

SEQ ID NO: 887025 - RNA, 21 nt, Human
cuuccacacuacaaacacaga

SEQ ID NO: 887026 - RNA, 23 nt, Human
cuugacuuaaugcuaaaugaaua

SEQ ID NO: 887027 - RNA, 19 nt, Human
ggagauggacuauggaugg

SEQ ID NO: 887028 - RNA, 23 nt, Human
guaaacaccaaaacuuauaaaua

SEQ ID NO: 887029 - RNA, 21 nt, Human
gugaaaacaaaauuaugaaug

SEQ ID NO: 887030 - RNA, 18 nt, Human
gugaagcugucaauuacc

SEQ ID NO: 887031 - RNA, 23 nt, Human
uaaacaucuaucacagaagucuu

SEQ ID NO: 887032 - RNA, 21 nt, Human
uaacaagucuagaugaugauu

SEQ ID NO: 887033 - RNA, 19 nt, Human
uaacugaauugaaauggga

SEQ ID NO: 887034 - RNA, 23 nt, Human
uaacugaauugaauuuuggagaa

SEQ ID NO: 887035 - RNA, 26 nt, Human
uaguuuaucacagaugccaacauuau

SEQ ID NO: 887036 - RNA, 24 nt, Human
uauacaaauucucuacaauaauau

SEQ ID NO: 887037 - RNA, 19 nt, Human
uaucuccuaaacuuuaucu

SEQ ID NO: 887038 - RNA, 23 nt, Human
ucaaaacauauugaaaagugcaa

SEQ ID NO: 887039 - RNA, 19 nt, Human
uccacacuacaaacacaga

SEQ ID NO: 887040 - RNA, 25 nt, Human
ucucugcuauaaacaucuaucacag

SEQ ID NO: 887041 - RNA, 27 nt, Human
ucugcuauaaacaucuaucacagaagu

SEQ ID NO: 887042 - RNA, 18 nt, Human
ucugggcacaccuugguc

SEQ ID NO: 887043 - RNA, 22 nt, Human
ugaaaaacuuacacuguaauaa

SEQ ID NO: 887044 - RNA, 23 nt, Human
ugaaaaaugcaagugcuuugcca

SEQ ID NO: 887045 - RNA, 24 nt, Human
ugaauucugggcacaccuuggucc

SEQ ID NO: 887046 - RNA, 24 nt, Human
ugaugggagccucauugauaguuu

SEQ ID NO: 887047 - RNA, 18 nt, Human
ugauucuagauuccacuu

SEQ ID NO: 887048 - RNA, 19 nt, Human
uggauucuuuaaaccaggu

SEQ ID NO: 887049 - RNA, 19 nt, Human
uggcaugaugggagccuca

SEQ ID NO: 887050 - RNA, 20 nt, Human
uggcaugaugggagccucau

SEQ ID NO: 887051 - RNA, 20 nt, Human
ugucagaaaaggaaaaucac

SEQ ID NO: 887052 - RNA, 20 nt, Human
ugucauaugcuucuucaauu

SEQ ID NO: 887053 - RNA, 23 nt, Human
uuaaaacagguaaacaccaaaac

SEQ ID NO: 887054 - RNA, 19 nt, Human
uuagaauucuaagagugac

SEQ ID NO: 887055 - RNA, 18 nt, Human
uucaugcccuuuguuuuu

SEQ ID NO: 887056 - RNA, 21 nt, Human
uuccacacuacaaacacagau

SEQ ID NO: 887057 - RNA, 21 nt, Human
uugaaaaacuuacacuguaau

SEQ ID NO: 887058 - RNA, 23 nt, Human
uugaaugucagaaaaggaaaauc

SEQ ID NO: 887059 - RNA, 18 nt, Human
uuuaucugauaguuuucc

SEQ ID NO: 887060 - RNA, 18 nt, Human
uuuguaaacauguaaugu

SEQ ID NO: 887061 - RNA, 24 nt, Human
uuuguaaacauguaauguugcaac

SEQ ID NO: 887062 - RNA, 24 nt, Human
uuuuucagcggggaugaaucccag

SEQ ID NO: 887063 - RNA, 24 nt, Human
uuuuuuuuuuuuuuuuuuaauaug

SEQ ID NO: 887064 - RNA, 22 nt, Human
aacuuggugaccucugaagcca

SEQ ID NO: 887065 - RNA, 19 nt, Human
acccucaagauuaacaccu

SEQ ID NO: 887066 - RNA, 24 nt, Human
augggaccucaauaggcaggaggg

SEQ ID NO: 887067 - RNA, 23 nt, Human
caccucugucgggaagcugagag

SEQ ID NO: 887068 - RNA, 18 nt, Human
caggcccccgagacuggg

SEQ ID NO: 887069 - RNA, 19 nt, Human
caggcccccgagacugggg

SEQ ID NO: 887070 - RNA, 21 nt, Human
gaccucugaagccauuugcaa

SEQ ID NO: 887071 - RNA, 22 nt, Human
ggauguuaccaggcccccgagg

SEQ ID NO: 887072 - RNA, 18 nt, Human
uaggcaggagggaaucuu

SEQ ID NO: 887073 - RNA, 20 nt, Human
uccacaagucuuggcuccgg

SEQ ID NO: 887074 - RNA, 20 nt, Human
ugaaggcccuucuucaacug

SEQ ID NO: 887075 - RNA, 24 nt, Human
ugaagugcuguccacaagucuugg

SEQ ID NO: 887076 - RNA, 26 nt, Human
uucuucaacugugaagugcuguccac

SEQ ID NO: 887077 - RNA, 22 nt, Human
aaagaaucacagaauauugaaa

SEQ ID NO: 887078 - RNA, 23 nt, Human
acuacugaggauccagagaaggg

SEQ ID NO: 887079 - RNA, 20 nt, Human
agccugaagcaaguccgcga

SEQ ID NO: 887080 - RNA, 20 nt, Human
augugugaguaugugugugu

SEQ ID NO: 887081 - RNA, 20 nt, Human
caagacgggggguggccagc

SEQ ID NO: 887082 - RNA, 18 nt, Human
caccgcgccucaguacgc

SEQ ID NO: 887083 - RNA, 22 nt, Human
caugugugaguaugugugugua

SEQ ID NO: 887084 - RNA, 21 nt, Human
ccaccgcgccucaguacgccc

SEQ ID NO: 887085 - RNA, 19 nt, Human
cccagggcaccugccgcaa

SEQ ID NO: 887086 - RNA, 21 nt, Human
cgcccagggcaccugccgcaa

SEQ ID NO: 887087 - RNA, 24 nt, Human
cucaacacagaugaugaaacaaga

SEQ ID NO: 887088 - RNA, 20 nt, Human
gugcauuuuuaaagggagaa

SEQ ID NO: 887089 - RNA, 23 nt, Human
gugugcaugugugaguaugugug

SEQ ID NO: 887090 - RNA, 22 nt, Human
uagacuaaagaaucacagaaua

SEQ ID NO: 887091 - RNA, 19 nt, Human
ucucagacagagcuuagcu

SEQ ID NO: 887092 - RNA, 19 nt, Human
ugaaacaagacggggggug

SEQ ID NO: 887093 - RNA, 21 nt, Human
ugcauuuuuaaagggagaaaa

SEQ ID NO: 887094 - RNA, 27 nt, Human
ugggaagaacuacugaggauccagaga

SEQ ID NO: 887095 - RNA, 26 nt, Human
ugugcaugugugaguaugugugugua

SEQ ID NO: 887096 - RNA, 22 nt, Human
ugugcaugugugagugugcaug

SEQ ID NO: 887097 - RNA, 22 nt, Human
ugugggaagaacuacugaggau

SEQ ID NO: 887098 - RNA, 24 nt, Human
ugugugaguauguguguguauaaa

SEQ ID NO: 887099 - RNA, 20 nt, Human
ugugugagugugcaugugug

SEQ ID NO: 887100 - RNA, 18 nt, Human
uguguguauacaagugca

SEQ ID NO: 887101 - RNA, 20 nt, Human
uguguguauacaagugcauu

SEQ ID NO: 887102 - RNA, 23 nt, Human
uguguguguauacaagugcauuu

SEQ ID NO: 887103 - RNA, 23 nt, Human
agaacugacuuuauuaaaaaaau

SEQ ID NO: 887104 - RNA, 22 nt, Human
agccaggaggcucagguccggc

SEQ ID NO: 887105 - RNA, 20 nt, Human
aggcucagguccggcagcag

SEQ ID NO: 887106 - RNA, 22 nt, Human
guccggcagcaggggccaggcu

SEQ ID NO: 887107 - RNA, 19 nt, Human
ugggagccaggaggcucag

SEQ ID NO: 887108 - RNA, 18 nt, Human
aaacaaaaggaacccaaa

SEQ ID NO: 887109 - RNA, 25 nt, Human
aaacagaaaacgcacuuucuucagc

SEQ ID NO: 887110 - RNA, 19 nt, Human
aaacccgcccgcggccacc

SEQ ID NO: 887111 - RNA, 19 nt, Human
aaagaaaaccaaaaugucu

SEQ ID NO: 887112 - RNA, 19 nt, Human
aacccaaaauggaaaaaga

SEQ ID NO: 887113 - RNA, 19 nt, Human
aagaugccacucacaccac

SEQ ID NO: 887114 - RNA, 19 nt, Human
aaucaugaaauuuacaugg

SEQ ID NO: 887115 - RNA, 21 nt, Human
acaaaauuaaauaauuuacag

SEQ ID NO: 887116 - RNA, 24 nt, Human
acacgcaaacgcgacacgagaaac

SEQ ID NO: 887117 - RNA, 21 nt, Human
acagaaaacgcacuuucuuca

SEQ ID NO: 887118 - RNA, 25 nt, Human
acagauagggccaccacggccccaa

SEQ ID NO: 887119 - RNA, 19 nt, Human
acagccugugagccuggcg

SEQ ID NO: 887120 - RNA, 21 nt, Human
acauuguguuuuuaacacauu

SEQ ID NO: 887121 - RNA, 19 nt, Human
acccggagaauguggcagu

SEQ ID NO: 887122 - RNA, 24 nt, Human
accgcaagagccgacacgcaaacg

SEQ ID NO: 887123 - RNA, 22 nt, Human
accgggccccaaacgggaaguc

SEQ ID NO: 887124 - RNA, 19 nt, Human
acgcaaacgcgacacgaga

SEQ ID NO: 887125 - RNA, 24 nt, Human
acgguguggugggcugggacacuu

SEQ ID NO: 887126 - RNA, 21 nt, Human
acuccaccgcaagagccgaca

SEQ ID NO: 887127 - RNA, 23 nt, Human
agaacagagcuuuguuccacccu

SEQ ID NO: 887128 - RNA, 24 nt, Human
agaagccagaguggucccuagacg

SEQ ID NO: 887129 - RNA, 23 nt, Human
agccgacacgcaaacgcgacacg

SEQ ID NO: 887130 - RNA, 20 nt, Human
aggagggucacaguauugga

SEQ ID NO: 887131 - RNA, 18 nt, Human
agggagccucgugggagc

SEQ ID NO: 887132 - RNA, 20 nt, Human
agggagcugugacccaaggc

SEQ ID NO: 887133 - RNA, 21 nt, Human
agggagcugugacccaaggcc

SEQ ID NO: 887134 - RNA, 23 nt, Human
agggugcccugguguggggucua

SEQ ID NO: 887135 - RNA, 23 nt, Human
aucacccugcaaacacaccacgg

SEQ ID NO: 887136 - RNA, 19 nt, Human
augaugucauugccaccuc

SEQ ID NO: 887137 - RNA, 20 nt, Human
cacacagauagggccaccac

SEQ ID NO: 887138 - RNA, 23 nt, Human
cacagccucagcgccagcugccc

SEQ ID NO: 887139 - RNA, 21 nt, Human
cacagcuauugucuguccucu

SEQ ID NO: 887140 - RNA, 25 nt, Human
caccacccacccaccacgcucacgg

SEQ ID NO: 887141 - RNA, 24 nt, Human
caccacgcucacggcuacccuccc

SEQ ID NO: 887142 - RNA, 19 nt, Human
caccacggccccaagccug

SEQ ID NO: 887143 - RNA, 21 nt, Human
cacccacccaccacgcucacg

SEQ ID NO: 887144 - RNA, 26 nt, Human
cacccugcaaacacaccacggagugc

SEQ ID NO: 887145 - RNA, 19 nt, Human
caccucggaacucauuuuc

SEQ ID NO: 887146 - RNA, 19 nt, Human
caccucugauuuaacagcu

SEQ ID NO: 887147 - RNA, 22 nt, Human
cacggugcggggcagggcgagg

SEQ ID NO: 887148 - RNA, 22 nt, Human
cagaguggucccuagacgugga

SEQ ID NO: 887149 - RNA, 26 nt, Human
cagcaacaggacuccaccgcaagagc

SEQ ID NO: 887150 - RNA, 25 nt, Human
caggagucucccagguuaaaauucc

SEQ ID NO: 887151 - RNA, 19 nt, Human
cauuagaccaagggaaaac

SEQ ID NO: 887152 - RNA, 24 nt, Human
cauugccaccuccgucaccaugga

SEQ ID NO: 887153 - RNA, 21 nt, Human
ccaaaauggaaaaagaaaacc

SEQ ID NO: 887154 - RNA, 21 nt, Human
ccaagcacacacaucugcgcu

SEQ ID NO: 887155 - RNA, 18 nt, Human
ccacaccgggccccaaac

SEQ ID NO: 887156 - RNA, 25 nt, Human
ccacccaccacgcucacggcuaccc

SEQ ID NO: 887157 - RNA, 21 nt, Human
ccacccacccaccacgcucac

SEQ ID NO: 887158 - RNA, 19 nt, Human
ccacucacaccacccaccc

SEQ ID NO: 887159 - RNA, 22 nt, Human
ccacucacaccacccacccacc

SEQ ID NO: 887160 - RNA, 24 nt, Human
ccagccaucccuuuggauaaaccc

SEQ ID NO: 887161 - RNA, 22 nt, Human
ccaggccaagaugccacucaca

SEQ ID NO: 887162 - RNA, 22 nt, Human
ccccuuagugugcgaacuccua

SEQ ID NO: 887163 - RNA, 18 nt, Human
cccgcccgcggccacacc

SEQ ID NO: 887164 - RNA, 24 nt, Human
cccgcggccacaccgggccccaaa

SEQ ID NO: 887165 - RNA, 21 nt, Human
cccuagacguggaucccagac

SEQ ID NO: 887166 - RNA, 20 nt, Human
ccucagcgccagcugccccc

SEQ ID NO: 887167 - RNA, 25 nt, Human
ccucugggaggccuauuccuaacuu

SEQ ID NO: 887168 - RNA, 18 nt, Human
ccugcaaacacaccacgg

SEQ ID NO: 887169 - RNA, 20 nt, Human
ccugcagcugcuggccuugc

SEQ ID NO: 887170 - RNA, 23 nt, Human
ccugcagcugcuggccuugccuc

SEQ ID NO: 887171 - RNA, 20 nt, Human
cgagaaacacgcccaagcac

SEQ ID NO: 887172 - RNA, 23 nt, Human
cgcgacacgagaaacacgcccaa

SEQ ID NO: 887173 - RNA, 22 nt, Human
cguggaucccagacccaggguc

SEQ ID NO: 887174 - RNA, 18 nt, Human
cucacaccacccacccac

SEQ ID NO: 887175 - RNA, 20 nt, Human
cucauuuucuuuccccacag

SEQ ID NO: 887176 - RNA, 21 nt, Human
cuccaaaacuucccugagaac

SEQ ID NO: 887177 - RNA, 21 nt, Human
cugcagccccaguagggagcu

SEQ ID NO: 887178 - RNA, 19 nt, Human
cugggacacuucuggguac

SEQ ID NO: 887179 - RNA, 22 nt, Human
cuugcagugucugcccaggugu

SEQ ID NO: 887180 - RNA, 27 nt, Human
gaaaacgcacuuucuucagcggcccuc

SEQ ID NO: 887181 - RNA, 22 nt, Human
gacacuucuggguaccacacgg

SEQ ID NO: 887182 - RNA, 23 nt, Human
gaccaagggaaaacaaaaucccc

SEQ ID NO: 887183 - RNA, 22 nt, Human
gagccuggcggugacucgaggc

SEQ ID NO: 887184 - RNA, 21 nt, Human
gcaauuucucuauuuuuaaau

SEQ ID NO: 887185 - RNA, 22 nt, Human
gcccugguguggggucuaguug

SEQ ID NO: 887186 - RNA, 19 nt, Human
gcugcagccccaguaggga

SEQ ID NO: 887187 - RNA, 19 nt, Human
gcugcuggccuugccuccg

SEQ ID NO: 887188 - RNA, 21 nt, Human
ggaaaaagaaaaccaaaaugu

SEQ ID NO: 887189 - RNA, 20 nt, Human
ggacggguggcacagccugu

SEQ ID NO: 887190 - RNA, 25 nt, Human
ggagaauguggcagugaugggucgg

SEQ ID NO: 887191 - RNA, 21 nt, Human
ggcagggcgagggagguaaac

SEQ ID NO: 887192 - RNA, 20 nt, Human
ggggaggagagggaaggcag

SEQ ID NO: 887193 - RNA, 21 nt, Human
gggggugcaggguggacuggg

SEQ ID NO: 887194 - RNA, 24 nt, Human
gggucgggggccuggguggaugca

SEQ ID NO: 887195 - RNA, 19 nt, Human
ggguucaacgcgcuuccug

SEQ ID NO: 887196 - RNA, 18 nt, Human
ggugacucgaggcugccu

SEQ ID NO: 887197 - RNA, 22 nt, Human
gguggacugggggaggagaggg

SEQ ID NO: 887198 - RNA, 18 nt, Human
guggaucccagacccagg

SEQ ID NO: 887199 - RNA, 24 nt, Human
guuauaucaagauuuuuuguggcc

SEQ ID NO: 887200 - RNA, 24 nt, Human
uaaaauuaauaaauaaaaauguua

SEQ ID NO: 887201 - RNA, 18 nt, Human
uaaacccgcccgcggcca

SEQ ID NO: 887202 - RNA, 20 nt, Human
uaaacccgcccgcggccaca

SEQ ID NO: 887203 - RNA, 19 nt, Human
uaaacuaacuacuuuuuaa

SEQ ID NO: 887204 - RNA, 22 nt, Human
uaacagcucaccucggaacuca

SEQ ID NO: 887205 - RNA, 23 nt, Human
uaauaaauacagaauuccauuug

SEQ ID NO: 887206 - RNA, 19 nt, Human
uagacguggaucccagacc

SEQ ID NO: 887207 - RNA, 27 nt, Human
uagcagcgguggcacgggcuggcggag

SEQ ID NO: 887208 - RNA, 23 nt, Human
uagggagcugugacccaaggcca

SEQ ID NO: 887209 - RNA, 22 nt, Human
ucaaaauuccucaguuacaaaa

SEQ ID NO: 887210 - RNA, 24 nt, Human
uccaaaacuucccugagaaccuuu

SEQ ID NO: 887211 - RNA, 22 nt, Human
uccacccuuaacacaaaacuga

SEQ ID NO: 887212 - RNA, 23 nt, Human
uccaugagcuuccacuggagacc

SEQ ID NO: 887213 - RNA, 24 nt, Human
ucccagacccagggucuaaaggcu

SEQ ID NO: 887214 - RNA, 19 nt, Human
ucccucuagaacagagcuu

SEQ ID NO: 887215 - RNA, 22 nt, Human
uccgugccugaaacaaaaggaa

SEQ ID NO: 887216 - RNA, 23 nt, Human
uccgugccugaaacaaaaggaac

SEQ ID NO: 887217 - RNA, 30 nt, Human
ucuagaacagagcuuuguuccacccuuaaa

SEQ ID NO: 887218 - RNA, 19 nt, Human
ucuucagcggcccucauug

SEQ ID NO: 887219 - RNA, 19 nt, Human
ucuuuccccacagcuauug

SEQ ID NO: 887220 - RNA, 23 nt, Human
ugaaaccuuuguggucuccuguu

SEQ ID NO: 887221 - RNA, 20 nt, Human
ugacccggagaauguggcag

SEQ ID NO: 887222 - RNA, 20 nt, Human
ugacucgaggcugccugcgg

SEQ ID NO: 887223 - RNA, 20 nt, Human
ugcagugucugcccaggugu

SEQ ID NO: 887224 - RNA, 19 nt, Human
ugccacucacaccacccac

SEQ ID NO: 887225 - RNA, 18 nt, Human
ugccugaaacaaaaggaa

SEQ ID NO: 887226 - RNA, 22 nt, Human
uggaaaaagaaaaccaaaaugu

SEQ ID NO: 887227 - RNA, 19 nt, Human
uggacugggggaggagagg

SEQ ID NO: 887228 - RNA, 22 nt, Human
ugggggaggagagggaaggcag

SEQ ID NO: 887229 - RNA, 18 nt, Human
uggggucuaguugaaaua

SEQ ID NO: 887230 - RNA, 19 nt, Human
uuaacacaaaacugaauua

SEQ ID NO: 887231 - RNA, 23 nt, Human
uuaacagcucaccucggaacuca

SEQ ID NO: 887232 - RNA, 23 nt, Human
uuagcagcgguggcacgggcuuu

SEQ ID NO: 887233 - RNA, 21 nt, Human
uuccaggaagugcaauuucuc

SEQ ID NO: 887234 - RNA, 24 nt, Human
uuccauuugcuguuauccgugccu

SEQ ID NO: 887235 - RNA, 21 nt, Human
uuccccacagcuauugucugu

SEQ ID NO: 887236 - RNA, 23 nt, Human
uucuuucagaaaacaaaaauaaa

SEQ ID NO: 887237 - RNA, 22 nt, Human
uugucuguccucuuucaaaaug

SEQ ID NO: 887238 - RNA, 21 nt, Human
uuugaauucacuuuuuucccc

SEQ ID NO: 887239 - RNA, 20 nt, Human
aaccgcucacaagcgaaaga

SEQ ID NO: 887240 - RNA, 19 nt, Human
agaaaacccuguuccacca

SEQ ID NO: 887241 - RNA, 21 nt, Human
agacgcagaaaagguggcuuu

SEQ ID NO: 887242 - RNA, 18 nt, Human
agaguuucaucacuacag

SEQ ID NO: 887243 - RNA, 26 nt, Human
agcaaaaaacaagaggcauccuuuuu

SEQ ID NO: 887244 - RNA, 24 nt, Human
agcagcuauaaacauuacauggca

SEQ ID NO: 887245 - RNA, 21 nt, Human
agccgcacacaccucguccuu

SEQ ID NO: 887246 - RNA, 19 nt, Human
auacacagacagggaagaa

SEQ ID NO: 887247 - RNA, 23 nt, Human
caaaauacacagacagggaagaa

SEQ ID NO: 887248 - RNA, 21 nt, Human
caagaggcauccuuuuuaagc

SEQ ID NO: 887249 - RNA, 27 nt, Human
cacaaguuugaaaggaugaugagacac

SEQ ID NO: 887250 - RNA, 18 nt, Human
caccuccaucuuacagga

SEQ ID NO: 887251 - RNA, 21 nt, Human
cacgcugugaucccucaaaug

SEQ ID NO: 887252 - RNA, 21 nt, Human
cacugccgucacagccagggg

SEQ ID NO: 887253 - RNA, 21 nt, Human
cagaaauagauauacccccaa

SEQ ID NO: 887254 - RNA, 24 nt, Human
cagaaauagauauacccccaaaug

SEQ ID NO: 887255 - RNA, 19 nt, Human
cagcaaaaaacaagaggca

SEQ ID NO: 887256 - RNA, 28 nt, Human
cagcagcaaaaaacaagaggcauccuaa

SEQ ID NO: 887257 - RNA, 23 nt, Human
cagcgugacuccuggcaggacgc

SEQ ID NO: 887258 - RNA, 18 nt, Human
caggaagucuucucuccu

SEQ ID NO: 887259 - RNA, 23 nt, Human
caggcaacagccgcacacaccuc

SEQ ID NO: 887260 - RNA, 19 nt, Human
caugaccacugccgucaca

SEQ ID NO: 887261 - RNA, 18 nt, Human
cauggaaacguacaaaau

SEQ ID NO: 887262 - RNA, 22 nt, Human
cauuacauggcagaacacuaug

SEQ ID NO: 887263 - RNA, 18 nt, Human
ccacgggaacucgaaccc

SEQ ID NO: 887264 - RNA, 25 nt, Human
ccagcuugugacuguggcaaaguca

SEQ ID NO: 887265 - RNA, 21 nt, Human
cccucacaaugaccacaaccg

SEQ ID NO: 887266 - RNA, 23 nt, Human
ccuccaucuuacaggaagucuuc

SEQ ID NO: 887267 - RNA, 24 nt, Human
ccuguuccaccacaaguuugaaag

SEQ ID NO: 887268 - RNA, 19 nt, Human
ccuuggcuacagccuccuc

SEQ ID NO: 887269 - RNA, 23 nt, Human
cucaugacccgcccucacaauga

SEQ ID NO: 887270 - RNA, 21 nt, Human
cucuuguauggcugguuccac

SEQ ID NO: 887271 - RNA, 19 nt, Human
cugugucuugcauauuugc

SEQ ID NO: 887272 - RNA, 23 nt, Human
cuguuuaucuuguguuuuucuuu

SEQ ID NO: 887273 - RNA, 24 nt, Human
cuuccgccgucgaccaggguuuga

SEQ ID NO: 887274 - RNA, 18 nt, Human
gaaauagauauaccccca

SEQ ID NO: 887275 - RNA, 25 nt, Human
gaugccgcuucuccucgguguccac

SEQ ID NO: 887276 - RNA, 18 nt, Human
gcagaaaagguggcuuuu

SEQ ID NO: 887277 - RNA, 20 nt, Human
uacacuucugugucuugcau

SEQ ID NO: 887278 - RNA, 21 nt, Human
uacaggaagucuucucuccua

SEQ ID NO: 887279 - RNA, 21 nt, Human
uagcuugaaagaugcaaacac

SEQ ID NO: 887280 - RNA, 23 nt, Human
uagcuugaaagaugcaaacacuu

SEQ ID NO: 887281 - RNA, 22 nt, Human
uaggagcagguuccuggggcug

SEQ ID NO: 887282 - RNA, 24 nt, Human
ucaccaauucuccucugaguucau

SEQ ID NO: 887283 - RNA, 21 nt, Human
ucacuuaaucucucuaugccu

SEQ ID NO: 887284 - RNA, 23 nt, Human
uccaccacaaguuugaaaggaug

SEQ ID NO: 887285 - RNA, 18 nt, Human
uccaucuuuagguggcuc

SEQ ID NO: 887286 - RNA, 19 nt, Human
uccucagucccaucacugu

SEQ ID NO: 887287 - RNA, 21 nt, Human
uccucgguguccaccuccauc

SEQ ID NO: 887288 - RNA, 21 nt, Human
uccugguccucuccagcuugu

SEQ ID NO: 887289 - RNA, 20 nt, Human
ucucuccuaggaacggaggc

SEQ ID NO: 887290 - RNA, 21 nt, Human
ucugguaaguuacagcagcaa

SEQ ID NO: 887291 - RNA, 21 nt, Human
ucuuguguuuuucuuuuuuuc

SEQ ID NO: 887292 - RNA, 23 nt, Human
ugaaaaaauuaaaaugcacccac

SEQ ID NO: 887293 - RNA, 26 nt, Human
ugacaugaccacugccgucacagcca

SEQ ID NO: 887294 - RNA, 20 nt, Human
ugaguauggauaucauaacc

SEQ ID NO: 887295 - RNA, 18 nt, Human
ugccaccaagacgcagaa

SEQ ID NO: 887296 - RNA, 23 nt, Human
uggauuggacaaacguccaggca

SEQ ID NO: 887297 - RNA, 19 nt, Human
uggcucaaaauacacagac

SEQ ID NO: 887298 - RNA, 21 nt, Human
uggcucaaaauacacagacag

SEQ ID NO: 887299 - RNA, 19 nt, Human
uuacagcagcaaaaaacaa

SEQ ID NO: 887300 - RNA, 21 nt, Human
uuacagcagcaaaaaacaaga

SEQ ID NO: 887301 - RNA, 19 nt, Human
uuccaccagauguggccac

SEQ ID NO: 887302 - RNA, 19 nt, Human
aaaaggaaauggagauagg

SEQ ID NO: 887303 - RNA, 27 nt, Human
aaaggaaauggagauaggugggcugac

SEQ ID NO: 887304 - RNA, 22 nt, Human
aaggaaauggagauaggugggc

SEQ ID NO: 887305 - RNA, 20 nt, Human
agagcuuucccacacgccaa

SEQ ID NO: 887306 - RNA, 18 nt, Human
aggaagagggggucagag

SEQ ID NO: 887307 - RNA, 19 nt, Human
cagaaugaacucccaggcc

SEQ ID NO: 887308 - RNA, 24 nt, Human
cagaaugaacucccaggcccccga

SEQ ID NO: 887309 - RNA, 21 nt, Human
cagaggggggauuggaggggu

SEQ ID NO: 887310 - RNA, 21 nt, Human
cugacacuuguccccucccca

SEQ ID NO: 887311 - RNA, 24 nt, Human
cugcugacacuuguccccucccca

SEQ ID NO: 887312 - RNA, 23 nt, Human
gaagagggggucagaggggggau

SEQ ID NO: 887313 - RNA, 24 nt, Human
gaccccaugugaggaagagggggu

SEQ ID NO: 887314 - RNA, 19 nt, Human
gggauuggaggggugaggg

SEQ ID NO: 887315 - RNA, 21 nt, Human
gggggauuggaggggugaggg

SEQ ID NO: 887316 - RNA, 24 nt, Human
ggggggccagugcccagcucaaga

SEQ ID NO: 887317 - RNA, 21 nt, Human
gugaacacacagccaccucgu

SEQ ID NO: 887318 - RNA, 21 nt, Human
gugugugugugugugugugug

SEQ ID NO: 887319 - RNA, 21 nt, Human
gugugugugugugugugugug

SEQ ID NO: 887320 - RNA, 22 nt, Human
ucagaggggggauuggaggggu

SEQ ID NO: 887321 - RNA, 23 nt, Human
ugaacucccaggcccccgacccc

SEQ ID NO: 887322 - RNA, 18 nt, Human
ugaggaagagggggucag

SEQ ID NO: 887323 - RNA, 20 nt, Human
ugcugugugcugugcugaug

SEQ ID NO: 887324 - RNA, 23 nt, Human
uggcaagucucaaagucuguaua

SEQ ID NO: 887325 - RNA, 22 nt, Human
uguccccuccccaccggccuca

SEQ ID NO: 887326 - RNA, 22 nt, Human
ugugcugauggcaagucucaaa

SEQ ID NO: 887327 - RNA, 21 nt, Human
ugugugugaacacacagccac

SEQ ID NO: 887328 - RNA, 18 nt, Human
ugugugugugugugugug

SEQ ID NO: 887329 - RNA, 18 nt, Human
ugugugugugugugugug

SEQ ID NO: 887330 - RNA, 18 nt, Human
ugugugugugugugugug

SEQ ID NO: 887331 - RNA, 18 nt, Human
ugugugugugugugugug

SEQ ID NO: 887332 - RNA, 18 nt, Human
ugugugugugugugugug

SEQ ID NO: 887333 - RNA, 18 nt, Human
ugugugugugugugugug

SEQ ID NO: 887334 - RNA, 18 nt, Human
ugugugugugugugugug

SEQ ID NO: 887335 - RNA, 18 nt, Human
ugugugugugugugugug

SEQ ID NO: 887336 - RNA, 18 nt, Human
ugugugugugugugugug

SEQ ID NO: 887337 - RNA, 18 nt, Human
ugugugugugugugugug

SEQ ID NO: 887338 - RNA, 21 nt, Human
ugugugugugugugugugugu

SEQ ID NO: 887339 - RNA, 21 nt, Human
ugugugugugugugugugugu

SEQ ID NO: 887340 - RNA, 21 nt, Human
ugugugugugugugugugugu

SEQ ID NO: 887341 - RNA, 21 nt, Human
ugugugugugugugugugugu

SEQ ID NO: 887342 - RNA, 21 nt, Human
ugugugugugugugugugugu

SEQ ID NO: 887343 - RNA, 21 nt, Human
ugugugugugugugugugugu

SEQ ID NO: 887344 - RNA, 21 nt, Human
ugugugugugugugugugugu

SEQ ID NO: 887345 - RNA, 21 nt, Human
ugugugugugugugugugugu

SEQ ID NO: 887346 - RNA, 21 nt, Human
ugugugugugugugugugugu

SEQ ID NO: 887347 - RNA, 21 nt, Human
ugugugugugugugugugugu

SEQ ID NO: 887348 - RNA, 21 nt, Human
ugugugugugugugugugugu

SEQ ID NO: 887349 - RNA, 21 nt, Human
ugugugugugugugugugugu

SEQ ID NO: 887350 - RNA, 21 nt, Human
ugugugugugugugugugugu

SEQ ID NO: 887351 - RNA, 21 nt, Human
ugugugugugugugugugugu

SEQ ID NO: 887352 - RNA, 21 nt, Human
ugugugugugugugugugugu

SEQ ID NO: 887353 - RNA, 21 nt, Human
ugugugugugugugugugugu

SEQ ID NO: 887354 - RNA, 22 nt, Human
ugugugugugugugugugugug

SEQ ID NO: 887355 - RNA, 22 nt, Human
ugugugugugugugugugugug

SEQ ID NO: 887356 - RNA, 22 nt, Human
ugugugugugugugugugugug

SEQ ID NO: 887357 - RNA, 22 nt, Human
ugugugugugugugugugugug

SEQ ID NO: 887358 - RNA, 22 nt, Human
ugugugugugugugugugugug

SEQ ID NO: 887359 - RNA, 22 nt, Human
ugugugugugugugugugugug

SEQ ID NO: 887360 - RNA, 22 nt, Human
ugugugugugugugugugugug

SEQ ID NO: 887361 - RNA, 19 nt, Human
aaacaguucugaacaggca

SEQ ID NO: 887362 - RNA, 20 nt, Human
aacagaaaauguuaaaucug

SEQ ID NO: 887363 - RNA, 22 nt, Human
agaaaaaagcugguuuugaaaa

SEQ ID NO: 887364 - RNA, 24 nt, Human
aggcagaaaauguagacuuuccuu

SEQ ID NO: 887365 - RNA, 23 nt, Human
aggcggcgucggcccuucccggc

SEQ ID NO: 887366 - RNA, 25 nt, Human
cacuuuuuuuuuuauuuauuuauaa

SEQ ID NO: 887367 - RNA, 26 nt, Human
cagaaaauguuaaaucuguaauagca

SEQ ID NO: 887368 - RNA, 21 nt, Human
cagcgaaccccuccgccccuu

SEQ ID NO: 887369 - RNA, 18 nt, Human
cccccgcccgcgccccgc

SEQ ID NO: 887370 - RNA, 25 nt, Human
cccccucagcuugcugccgcugcuc

SEQ ID NO: 887371 - RNA, 24 nt, Human
ccccgccgcccgcccucaggcccg

SEQ ID NO: 887372 - RNA, 21 nt, Human
ccccuccgccccuuugccgcc

SEQ ID NO: 887373 - RNA, 18 nt, Human
cccgcccucaggcccggc

SEQ ID NO: 887374 - RNA, 19 nt, Human
ccgcccgcgccccgccgcc

SEQ ID NO: 887375 - RNA, 20 nt, Human
ccgcccgcgccccgccgccc

SEQ ID NO: 887376 - RNA, 25 nt, Human
ccgcccgcgccccgccgcccgcccu

SEQ ID NO: 887377 - RNA, 20 nt, Human
ccgccgcccgcccucaggcc

SEQ ID NO: 887378 - RNA, 23 nt, Human
ccgccucgcccccgcccgcgccc

SEQ ID NO: 887379 - RNA, 22 nt, Human
ccggcggcggcgacgcccccuc

SEQ ID NO: 887380 - RNA, 21 nt, Human
cgcccccgcccgcgccccgcc

SEQ ID NO: 887381 - RNA, 18 nt, Human
cgccgggggccggcggcg

SEQ ID NO: 887382 - RNA, 21 nt, Human
cgccucgcccccgcccgcgcc

SEQ ID NO: 887383 - RNA, 24 nt, Human
cggcggcggcgacgcccccucagc

SEQ ID NO: 887384 - RNA, 24 nt, Human
cuauaccaucccgccacgaccgca

SEQ ID NO: 887385 - RNA, 24 nt, Human
cugggaaauaaguuucuucacauu

SEQ ID NO: 887386 - RNA, 18 nt, Human
cuguacaacugcguuuac

SEQ ID NO: 887387 - RNA, 18 nt, Human
gaucagccagcccugagc

SEQ ID NO: 887388 - RNA, 22 nt, Human
gcuauuaaacaguucugaacag

SEQ ID NO: 887389 - RNA, 18 nt, Human
gcugccgcugcucccaag

SEQ ID NO: 887390 - RNA, 23 nt, Human
guagacuuuccuuuaacagaaaa

SEQ ID NO: 887391 - RNA, 23 nt, Human
gugagcuugaguuugaucagcca

SEQ ID NO: 887392 - RNA, 23 nt, Human
uaacagaaaauguuaaaucugua

SEQ ID NO: 887393 - RNA, 23 nt, Human
uaagaaagcaacacuuuuuuuuu

SEQ ID NO: 887394 - RNA, 19 nt, Human
uaccaucccgccacgaccg

SEQ ID NO: 887395 - RNA, 21 nt, Human
uaccaucccgccacgaccgca

SEQ ID NO: 887396 - RNA, 18 nt, Human
uagcagcauaauuuauau

SEQ ID NO: 887397 - RNA, 25 nt, Human
uauuuauuuauaaaggcuaaccaua

SEQ ID NO: 887398 - RNA, 22 nt, Human
ucaggcggcgucggcccuuccc

SEQ ID NO: 887399 - RNA, 19 nt, Human
ucccgcggcggcgccgggg

SEQ ID NO: 887400 - RNA, 23 nt, Human
uggcagcgaaccccuccgccccu

SEQ ID NO: 887401 - RNA, 21 nt, Human
uugcuggcagcgaaccccucc

SEQ ID NO: 887402 - RNA, 24 nt, Human
uuuauaaaggcuaaccauauccau

SEQ ID NO: 887403 - RNA, 20 nt, Human
aaaaugcacacagaagaaca

SEQ ID NO: 887404 - RNA, 23 nt, Human
aaagugcugggauuacaggcgug

SEQ ID NO: 887405 - RNA, 24 nt, Human
aaagugcugggauuacaggcgugg

SEQ ID NO: 887406 - RNA, 25 nt, Human
aaagugcugggauuacaggcguggg

SEQ ID NO: 887407 - RNA, 27 nt, Human
aagcagaagaaagggcaaaagggaccc

SEQ ID NO: 887408 - RNA, 20 nt, Human
aagcagaagaaagggcaaag

SEQ ID NO: 887409 - RNA, 21 nt, Human
aagcgguucuccugccucagc

SEQ ID NO: 887410 - RNA, 19 nt, Human
aaguagcugggauuacagg

SEQ ID NO: 887411 - RNA, 24 nt, Human
aaguagcugggauuacaggcacac

SEQ ID NO: 887412 - RNA, 19 nt, Human
aagugcugggauuacaggc

SEQ ID NO: 887413 - RNA, 19 nt, Human
aagugcugggauuacaggc

SEQ ID NO: 887414 - RNA, 19 nt, Human
acaaagcagaagaaagggc

SEQ ID NO: 887415 - RNA, 23 nt, Human
acaaagcagaagaaagggcaaaa

SEQ ID NO: 887416 - RNA, 19 nt, Human
acaguucuagaagcauuuc

SEQ ID NO: 887417 - RNA, 23 nt, Human
acaucuggaagauauuuaaccau

SEQ ID NO: 887418 - RNA, 22 nt, Human
accauguuggccaggcuggucu

SEQ ID NO: 887419 - RNA, 18 nt, Human
acggggauucaccauguu

SEQ ID NO: 887420 - RNA, 24 nt, Human
acggggauucaccauguuggccag

SEQ ID NO: 887421 - RNA, 24 nt, Human
agaacaaaagguaaaagaucaagg

SEQ ID NO: 887422 - RNA, 19 nt, Human
agaagaacagaacaaaagg

SEQ ID NO: 887423 - RNA, 23 nt, Human
agaucaaggucauauacaaagca

SEQ ID NO: 887424 - RNA, 25 nt, Human
agccggugccgcgucgucgaacgca

SEQ ID NO: 887425 - RNA, 24 nt, Human
agcgguucuccugccucagccucc

SEQ ID NO: 887426 - RNA, 24 nt, Human
aggcgauccaccuaccucggccuc

SEQ ID NO: 887427 - RNA, 23 nt, Human
agggcaaaagcaugucuuccuuc

SEQ ID NO: 887428 - RNA, 18 nt, Human
agugcaguggugugaucu

SEQ ID NO: 887429 - RNA, 19 nt, Human
agugcaguggugugaucuc

SEQ ID NO: 887430 - RNA, 20 nt, Human
agugcaguggugugaucucg

SEQ ID NO: 887431 - RNA, 21 nt, Human
agugcaguggugugaucucga

SEQ ID NO: 887432 - RNA, 21 nt, Human
auaaggcagcaacaucuggaa

SEQ ID NO: 887433 - RNA, 23 nt, Human
auacaaagcagaagaaagggcaa

SEQ ID NO: 887434 - RNA, 22 nt, Human
augcaaacucuacaccucuucu

SEQ ID NO: 887435 - RNA, 23 nt, Human
augcacacagaagaacagaacaa

SEQ ID NO: 887436 - RNA, 22 nt, Human
caaagcacuuuaaauaccucuc

SEQ ID NO: 887437 - RNA, 24 nt, Human
caaagugcugggauuacaggcgug

SEQ ID NO: 887438 - RNA, 24 nt, Human
caaccuccaccucccagguuuaag

SEQ ID NO: 887439 - RNA, 27 nt, Human
cacaauccagcaguaaaaagacugucu

SEQ ID NO: 887440 - RNA, 24 nt, Human
caccacacccagcuaauuuuugua

SEQ ID NO: 887441 - RNA, 21 nt, Human
caccauguuggccaggcuggu

SEQ ID NO: 887442 - RNA, 22 nt, Human
caccauguuggccaggcugguc

SEQ ID NO: 887443 - RNA, 23 nt, Human
caccauguuggccaggcuggucu

SEQ ID NO: 887444 - RNA, 24 nt, Human
caccauguuggccaggcuggucuu

SEQ ID NO: 887445 - RNA, 23 nt, Human
caccuaccucggccucccaaagu

SEQ ID NO: 887446 - RNA, 20 nt, Human
cacugcaaccuccaccuccc

SEQ ID NO: 887447 - RNA, 18 nt, Human
cacugcgcucucccgcgc

SEQ ID NO: 887448 - RNA, 23 nt, Human
caggcgugggccaccacaccagg

SEQ ID NO: 887449 - RNA, 24 nt, Human
cauguuggccaggcuggucuugaa

SEQ ID NO: 887450 - RNA, 22 nt, Human
ccaaagugcugggauuacaggc

SEQ ID NO: 887451 - RNA, 22 nt, Human
ccaaagugcugggauuacaggc

SEQ ID NO: 887452 - RNA, 24 nt, Human
ccaaagugcugggauuacaggcgu

SEQ ID NO: 887453 - RNA, 24 nt, Human
ccaacaugucuucuuacugcuucu

SEQ ID NO: 887454 - RNA, 23 nt, Human
ccaaguagcugggauuacaggca

SEQ ID NO: 887455 - RNA, 20 nt, Human
ccaggcugagugcaguggug

SEQ ID NO: 887456 - RNA, 23 nt, Human
cccaaguagcugggauuacaggc

SEQ ID NO: 887457 - RNA, 24 nt, Human
cccaaguagcugggauuacaggca

SEQ ID NO: 887458 - RNA, 19 nt, Human
cccaggcugagugcagugg

SEQ ID NO: 887459 - RNA, 23 nt, Human
cccagguuuaagcgguucuccug

SEQ ID NO: 887460 - RNA, 24 nt, Human
ccgcagcccuuucccgccggcgcc

SEQ ID NO: 887461 - RNA, 24 nt, Human
ccucccagguuuaagcgguucucc

SEQ ID NO: 887462 - RNA, 24 nt, Human
ccucucacaaaagacuuuuaggac

SEQ ID NO: 887463 - RNA, 23 nt, Human
ccugccucagccucccaaguagc

SEQ ID NO: 887464 - RNA, 24 nt, Human
ccugccucagccucccaaguagcu

SEQ ID NO: 887465 - RNA, 24 nt, Human
cgauccaccuaccucggccuccca

SEQ ID NO: 887466 - RNA, 23 nt, Human
cgcagcccuuucccgccggcgcc

SEQ ID NO: 887467 - RNA, 20 nt, Human
cgguucuccugccucagccu

SEQ ID NO: 887468 - RNA, 26 nt, Human
cgucgucgaacgcacaacgcggcgcc

SEQ ID NO: 887469 - RNA, 23 nt, Human
cuaauuuuuguauuuuuaauaga

SEQ ID NO: 887470 - RNA, 23 nt, Human
cucagccucccaaguagcuggga

SEQ ID NO: 887471 - RNA, 18 nt, Human
cugaaaaccuuucugucu

SEQ ID NO: 887472 - RNA, 23 nt, Human
cugaccucaggcgauccaccuac

SEQ ID NO: 887473 - RNA, 23 nt, Human
cugcaaccuccaccucccagguu

SEQ ID NO: 887474 - RNA, 24 nt, Human
cugcaaccuccaccucccagguuu

SEQ ID NO: 887475 - RNA, 20 nt, Human
cuugaacuucugaccucagg

SEQ ID NO: 887476 - RNA, 21 nt, Human
cuuuggggggcaugaaucagg

SEQ ID NO: 887477 - RNA, 24 nt, Human
gaccucaggcgauccaccuaccuc

SEQ ID NO: 887478 - RNA, 21 nt, Human
gagugcaguggugugaucucg

SEQ ID NO: 887479 - RNA, 18 nt, Human
gauuacaggcgugggcca

SEQ ID NO: 887480 - RNA, 21 nt, Human
gauuacaggcgugggccacca

SEQ ID NO: 887481 - RNA, 22 nt, Human
gauuacaggcgugggccaccac

SEQ ID NO: 887482 - RNA, 24 nt, Human
gcgauccaccuaccucggccuccc

SEQ ID NO: 887483 - RNA, 25 nt, Human
gcucugucacccaggcugagugcag

SEQ ID NO: 887484 - RNA, 22 nt, Human
ggagacggagucuugcucuguc

SEQ ID NO: 887485 - RNA, 20 nt, Human
ggcaaaagcaugucuuccuu

SEQ ID NO: 887486 - RNA, 21 nt, Human
ggcugagugcaguggugugau

SEQ ID NO: 887487 - RNA, 24 nt, Human
ggcuggucuugaacuucugaccuc

SEQ ID NO: 887488 - RNA, 22 nt, Human
gggauucaccauguuggccagg

SEQ ID NO: 887489 - RNA, 23 nt, Human
gggcgucgaagccggugccgcgu

SEQ ID NO: 887490 - RNA, 23 nt, Human
ggggauucaccauguuggccagg

SEQ ID NO: 887491 - RNA, 19 nt, Human
ggucuugaacuucugaccu

SEQ ID NO: 887492 - RNA, 20 nt, Human
gucgucgaacgcacaacgcg

SEQ ID NO: 887493 - RNA, 25 nt, Human
gucgucgaacgcacaacgcggcgcc

SEQ ID NO: 887494 - RNA, 21 nt, Human
guucuccugccucagccuccc

SEQ ID NO: 887495 - RNA, 23 nt, Human
uaaaaaaucaaaccucacuugca

SEQ ID NO: 887496 - RNA, 23 nt, Human
uaaaaagacugucugucuagcau

SEQ ID NO: 887497 - RNA, 19 nt, Human
uaaccauuucuuuuucucu

SEQ ID NO: 887498 - RNA, 26 nt, Human
uaagcgguucuccugccucagccucc

SEQ ID NO: 887499 - RNA, 19 nt, Human
uaauagaauuuuaaccuac

SEQ ID NO: 887500 - RNA, 24 nt, Human
uaauagagacggggauucaccaug

SEQ ID NO: 887501 - RNA, 24 nt, Human
uaauuuuuguauuuuuaauagaga

SEQ ID NO: 887502 - RNA, 26 nt, Human
uacaaagcagaagaaagggcaaaagc

SEQ ID NO: 887503 - RNA, 24 nt, Human
uacaggcacacgccaccacaccca

SEQ ID NO: 887504 - RNA, 22 nt, Human
uacaggcgugggccaccacacc

SEQ ID NO: 887505 - RNA, 24 nt, Human
uaccucggccucccaaagugcugg

SEQ ID NO: 887506 - RNA, 19 nt, Human
uagaauuuuaaccuacugc

SEQ ID NO: 887507 - RNA, 22 nt, Human
uagagacggggauucaccaugu

SEQ ID NO: 887508 - RNA, 23 nt, Human
uaugcaaacucuacaccucuucu

SEQ ID NO: 887509 - RNA, 23 nt, Human
ucacugcaaccuccaccucccag

SEQ ID NO: 887510 - RNA, 24 nt, Human
ucacugcaaccuccaccucccagg

SEQ ID NO: 887511 - RNA, 25 nt, Human
ucacugcaaccuccaccucccaggu

SEQ ID NO: 887512 - RNA, 27 nt, Human
ucacugcaaccuccaccucccagguuu

SEQ ID NO: 887513 - RNA, 18 nt, Human
ucagccucccaaguagcu

SEQ ID NO: 887514 - RNA, 20 nt, Human
ucagccucccaaguagcugg

SEQ ID NO: 887515 - RNA, 24 nt, Human
ucccaaagugcugggauuacaggc

SEQ ID NO: 887516 - RNA, 24 nt, Human
ucccaaguagcugggauuacaggc

SEQ ID NO: 887517 - RNA, 21 nt, Human
ucccagguuuaagcgguucuc

SEQ ID NO: 887518 - RNA, 24 nt, Human
ucccagguuuaagcgguucuccug

SEQ ID NO: 887519 - RNA, 18 nt, Human
ucgaacgcacaacgcggc

SEQ ID NO: 887520 - RNA, 18 nt, Human
ucggccucccaaagugcu

SEQ ID NO: 887521 - RNA, 23 nt, Human
ucuacaccucuucuuguuaucca

SEQ ID NO: 887522 - RNA, 26 nt, Human
ucuccugccucagccucccaaguagc

SEQ ID NO: 887523 - RNA, 23 nt, Human
ucugucacccaggcugagugcag

SEQ ID NO: 887524 - RNA, 19 nt, Human
ucuugcucugucacccagg

SEQ ID NO: 887525 - RNA, 23 nt, Human
ucuugcucugucacccaggcuga

SEQ ID NO: 887526 - RNA, 24 nt, Human
ucuugcucugucacccaggcugag

SEQ ID NO: 887527 - RNA, 21 nt, Human
ugaaucaggucucaaagcacu

SEQ ID NO: 887528 - RNA, 19 nt, Human
ugaccucaggcgauccacc

SEQ ID NO: 887529 - RNA, 21 nt, Human
ugaccucaggcgauccaccua

SEQ ID NO: 887530 - RNA, 22 nt, Human
ugagaaacaaucagagcauuuu

SEQ ID NO: 887531 - RNA, 18 nt, Human
ugagugcaguggugugau

SEQ ID NO: 887532 - RNA, 21 nt, Human
ugagugcaguggugugaucuc

SEQ ID NO: 887533 - RNA, 30 nt, Human
ugagugcaguggugugaucucgaucucggg

SEQ ID NO: 887534 - RNA, 21 nt, Human
ugcacacagaagaacagaaca

SEQ ID NO: 887535 - RNA, 22 nt, Human
ugcacacagaagaacagaacaa

SEQ ID NO: 887536 - RNA, 24 nt, Human
ugccucagccucccaaguagcugg

SEQ ID NO: 887537 - RNA, 23 nt, Human
ugcucugucacccaggcugagug

SEQ ID NO: 887538 - RNA, 24 nt, Human
ugcugggauuacaggcgugggcca

SEQ ID NO: 887539 - RNA, 24 nt, Human
uggccaggcuggucuugaacuucu

SEQ ID NO: 887540 - RNA, 21 nt, Human
ugggauuacaggcacacgcca

SEQ ID NO: 887541 - RNA, 22 nt, Human
ugggauuacaggcacacgccac

SEQ ID NO: 887542 - RNA, 24 nt, Human
ugggauuacaggcacacgccacca

SEQ ID NO: 887543 - RNA, 19 nt, Human
ugggauuacaggcgugggc

SEQ ID NO: 887544 - RNA, 21 nt, Human
ugggauuacaggcgugggcca

SEQ ID NO: 887545 - RNA, 22 nt, Human
ugggauuacaggcgugggccac

SEQ ID NO: 887546 - RNA, 23 nt, Human
ugggauuacaggcgugggccacc

SEQ ID NO: 887547 - RNA, 24 nt, Human
ugggauuacaggcgugggccacca

SEQ ID NO: 887548 - RNA, 24 nt, Human
uggucuugaacuucugaccucagg

SEQ ID NO: 887549 - RNA, 24 nt, Human
uuaauagagacggggauucaccau

SEQ ID NO: 887550 - RNA, 20 nt, Human
uuagaucuccuuuuuuucuu

SEQ ID NO: 887551 - RNA, 26 nt, Human
uuauaaacaaaauauuuucuauauuu

SEQ ID NO: 887552 - RNA, 20 nt, Human
uucaccauguuggccaggcu

SEQ ID NO: 887553 - RNA, 21 nt, Human
uuuaaccauuucuuuuucucu

SEQ ID NO: 887554 - RNA, 20 nt, Human
uuuaaccuacaaaccuucau

SEQ ID NO: 887555 - RNA, 23 nt, Human
uuuaagcgguucuccugccucag

SEQ ID NO: 887556 - RNA, 21 nt, Human
uuuccauaaaaugcacacaga

SEQ ID NO: 887557 - RNA, 20 nt, Human
uuuuuguauuuuuaauagag

SEQ ID NO: 887558 - RNA, 23 nt, Human
uuuuuguauuuuuaauagagacg

SEQ ID NO: 887559 - RNA, 25 nt, Human
aaaaaggaaagagaaaaaaccccau

SEQ ID NO: 887560 - RNA, 19 nt, Human
aaacacacccccucagaca

SEQ ID NO: 887561 - RNA, 25 nt, Human
aaagcaaaaugaaaccaugagaccc

SEQ ID NO: 887562 - RNA, 23 nt, Human
aaaugaaaccaugagacccaccu

SEQ ID NO: 887563 - RNA, 22 nt, Human
aacccauaagcuugcccaccuc

SEQ ID NO: 887564 - RNA, 19 nt, Human
aagcaaaaugaaaccauga

SEQ ID NO: 887565 - RNA, 21 nt, Human
aagcacgcaaugcauggcagc

SEQ ID NO: 887566 - RNA, 21 nt, Human
aagcccuaucagggcagggga

SEQ ID NO: 887567 - RNA, 21 nt, Human
aagcuugcccaccuccucucc

SEQ ID NO: 887568 - RNA, 19 nt, Human
aaggagacaggcaaaccaa

SEQ ID NO: 887569 - RNA, 22 nt, Human
aaggcgucggcucgggccggga

SEQ ID NO: 887570 - RNA, 26 nt, Human
aagggcuugccaagguaaggaggagg

SEQ ID NO: 887571 - RNA, 21 nt, Human
acaauuacagcagcacagaaa

SEQ ID NO: 887572 - RNA, 18 nt, Human
acacacccaccacccaca

SEQ ID NO: 887573 - RNA, 26 nt, Human
acaccacccuaccccggccggguguc

SEQ ID NO: 887574 - RNA, 18 nt, Human
acacccaccacccacaag

SEQ ID NO: 887575 - RNA, 26 nt, Human
acaccuguggucgguuggccccagag

SEQ ID NO: 887576 - RNA, 18 nt, Human
acaguguugcugcuguca

SEQ ID NO: 887577 - RNA, 18 nt, Human
accaagaaacccauaagc

SEQ ID NO: 887578 - RNA, 22 nt, Human
acccacuccccacuggcuguac

SEQ ID NO: 887579 - RNA, 25 nt, Human
accuggccacucccccuuucccucc

SEQ ID NO: 887580 - RNA, 23 nt, Human
accuucugacaguguugcugcug

SEQ ID NO: 887581 - RNA, 19 nt, Human
acuggaucccuccucuccu

SEQ ID NO: 887582 - RNA, 28 nt, Human
agaaaaaaccccauacgguuauugugaa

SEQ ID NO: 887583 - RNA, 18 nt, Human
agaaucuauuucuggcuc

SEQ ID NO: 887584 - RNA, 21 nt, Human
agacaccacccuaccccggca

SEQ ID NO: 887585 - RNA, 20 nt, Human
agacaggaggugggugcggg

SEQ ID NO: 887586 - RNA, 21 nt, Human
agacaggaggugggugcgggg

SEQ ID NO: 887587 - RNA, 24 nt, Human
agacaggcaaaccaacaauuacag

SEQ ID NO: 887588 - RNA, 23 nt, Human
agacaggcgcagggcacacccuc

SEQ ID NO: 887589 - RNA, 24 nt, Human
agacagugcacacgccucauucuc

SEQ ID NO: 887590 - RNA, 21 nt, Human
agagaaaaaaccccauacggu

SEQ ID NO: 887591 - RNA, 21 nt, Human
agagaaauguacccagcccca

SEQ ID NO: 887592 - RNA, 18 nt, Human
agagcacuucuaggggcc

SEQ ID NO: 887593 - RNA, 19 nt, Human
agccagacagaaccugugu

SEQ ID NO: 887594 - RNA, 27 nt, Human
agccagcugggaacucccauggcccuc

SEQ ID NO: 887595 - RNA, 24 nt, Human
agcccacggccccacuggaucccu

SEQ ID NO: 887596 - RNA, 21 nt, Human
aggagggagugcccaggcagg

SEQ ID NO: 887597 - RNA, 19 nt, Human
aggcaagguggggugggga

SEQ ID NO: 887598 - RNA, 21 nt, Human
aggcagagcacuucuaggggc

SEQ ID NO: 887599 - RNA, 20 nt, Human
aggcaggggaggcggugagu

SEQ ID NO: 887600 - RNA, 21 nt, Human
aggcagguguggguuuuaggg

SEQ ID NO: 887601 - RNA, 20 nt, Human
aggcggugaguucagggcag

SEQ ID NO: 887602 - RNA, 20 nt, Human
aggcucccaaacacaccccu

SEQ ID NO: 887603 - RNA, 26 nt, Human
agggagggaggcagacaggagguggg

SEQ ID NO: 887604 - RNA, 22 nt, Human
agggaggggcugcccugaggug

SEQ ID NO: 887605 - RNA, 18 nt, Human
aggggcugcccugaggug

SEQ ID NO: 887606 - RNA, 22 nt, Human
aggggcugggguggggcggggg

SEQ ID NO: 887607 - RNA, 23 nt, Human
aggggcugggguggggcgggggg

SEQ ID NO: 887608 - RNA, 21 nt, Human
agguaagcccuaucagggcag

SEQ ID NO: 887609 - RNA, 24 nt, Human
agugaaggacuggaggccccagag

SEQ ID NO: 887610 - RNA, 23 nt, Human
agugguugccaggggcuggggug

SEQ ID NO: 887611 - RNA, 18 nt, Human
auaaacacaccaucccca

SEQ ID NO: 887612 - RNA, 19 nt, Human
auaagcuugcccaccuccu

SEQ ID NO: 887613 - RNA, 19 nt, Human
aucagggcaggggaccgag

SEQ ID NO: 887614 - RNA, 20 nt, Human
aucauucuuuuucuuuucug

SEQ ID NO: 887615 - RNA, 25 nt, Human
augcugggggggugacagaacugua

SEQ ID NO: 887616 - RNA, 21 nt, Human
augggguagaggguggggcca

SEQ ID NO: 887617 - RNA, 22 nt, Human
caaaaugaaaccaugagaccca

SEQ ID NO: 887618 - RNA, 18 nt, Human
caaacacacccccucaga

SEQ ID NO: 887619 - RNA, 25 nt, Human
caaacacacccccucagacacaccc

SEQ ID NO: 887620 - RNA, 21 nt, Human
caaaccaacaauuacagcagc

SEQ ID NO: 887621 - RNA, 26 nt, Human
caaagcaaaaugaaaccaugagaccc

SEQ ID NO: 887622 - RNA, 24 nt, Human
caagaaacccauaagcuugcccac

SEQ ID NO: 887623 - RNA, 20 nt, Human
caaggcacccuacccagccc

SEQ ID NO: 887624 - RNA, 27 nt, Human
caaggcacccuacccagcccacggccc

SEQ ID NO: 887625 - RNA, 26 nt, Human
cacaaccaggacccaccuguggggcc

SEQ ID NO: 887626 - RNA, 18 nt, Human
cacacccucccacugacc

SEQ ID NO: 887627 - RNA, 20 nt, Human
cacagcaccuggcgcccagu

SEQ ID NO: 887628 - RNA, 25 nt, Human
caccagugccuucuggagcuguggu

SEQ ID NO: 887629 - RNA, 20 nt, Human
cacccacuccccacuggcug

SEQ ID NO: 887630 - RNA, 20 nt, Human
caccccaagcucaaacccau

SEQ ID NO: 887631 - RNA, 20 nt, Human
caccccaccccaagcucaaa

SEQ ID NO: 887632 - RNA, 21 nt, Human
caccccagccuccuucccugg

SEQ ID NO: 887633 - RNA, 19 nt, Human
cacccccucagacacaccc

SEQ ID NO: 887634 - RNA, 26 nt, Human
cacccuacccagcccacggccccacu

SEQ ID NO: 887635 - RNA, 20 nt, Human
cacccucccacugaccacug

SEQ ID NO: 887636 - RNA, 18 nt, Human
cacucacaagggcccagc

SEQ ID NO: 887637 - RNA, 21 nt, Human
cacucccccuuucccuccuca

SEQ ID NO: 887638 - RNA, 23 nt, Human
cacuggcuuuuggaggccaggcu

SEQ ID NO: 887639 - RNA, 24 nt, Human
cacuucuaggggccccccacuccu

SEQ ID NO: 887640 - RNA, 24 nt, Human
cacuuuuguuuuuguugcaagaag

SEQ ID NO: 887641 - RNA, 24 nt, Human
cagacaggcgcagggcacacccuc

SEQ ID NO: 887642 - RNA, 21 nt, Human
cagauaacuucucagaaguuc

SEQ ID NO: 887643 - RNA, 19 nt, Human
cagcacagaaagagcugac

SEQ ID NO: 887644 - RNA, 19 nt, Human
cagcagcacagaaagagcu

SEQ ID NO: 887645 - RNA, 28 nt, Human
cagccagacagaaccuguguuccaggac

SEQ ID NO: 887646 - RNA, 23 nt, Human
cagcccagcucccuaaucgcugg

SEQ ID NO: 887647 - RNA, 25 nt, Human
cagcccaggucuccagccucucucc

SEQ ID NO: 887648 - RNA, 20 nt, Human
cagcccuugcgcgucgcagc

SEQ ID NO: 887649 - RNA, 21 nt, Human
cagcguauucugagccucugg

SEQ ID NO: 887650 - RNA, 23 nt, Human
cagcugcuucaugguggcgacgc

SEQ ID NO: 887651 - RNA, 19 nt, Human
caggccccuggccauggag

SEQ ID NO: 887652 - RNA, 21 nt, Human
caggcucccaaacacaccccc

SEQ ID NO: 887653 - RNA, 19 nt, Human
caggggaccgagggccuug

SEQ ID NO: 887654 - RNA, 21 nt, Human
cauaagcuugcccaccuccuc

SEQ ID NO: 887655 - RNA, 21 nt, Human
ccaaagcaaaaugaaaccaug

SEQ ID NO: 887656 - RNA, 23 nt, Human
ccaacacacaugcccaguggcca

SEQ ID NO: 887657 - RNA, 24 nt, Human
ccaacccagacacuggcuuuugga

SEQ ID NO: 887658 - RNA, 19 nt, Human
ccaagaggcccagggagcu

SEQ ID NO: 887659 - RNA, 18 nt, Human
ccacagcagacagugcac

SEQ ID NO: 887660 - RNA, 24 nt, Human
ccaccccaccccaagcucaaaccc

SEQ ID NO: 887661 - RNA, 19 nt, Human
ccacucacacagccagaca

SEQ ID NO: 887662 - RNA, 19 nt, Human
ccacuggccaugggaggag

SEQ ID NO: 887663 - RNA, 23 nt, Human
ccagagccacccagccggcuggg

SEQ ID NO: 887664 - RNA, 19 nt, Human
ccagcccaggucuccagcc

SEQ ID NO: 887665 - RNA, 21 nt, Human
ccagcccaggucuccagccuc

SEQ ID NO: 887666 - RNA, 19 nt, Human
ccagccuucccaccaagaa

SEQ ID NO: 887667 - RNA, 19 nt, Human
ccagcucaugccucacacc

SEQ ID NO: 887668 - RNA, 18 nt, Human
ccaugcagacaggcgcag

SEQ ID NO: 887669 - RNA, 20 nt, Human
cccacacucacaagggccca

SEQ ID NO: 887670 - RNA, 18 nt, Human
cccaccagugccuucugg

SEQ ID NO: 887671 - RNA, 23 nt, Human
cccaccuguggggccugaggggc

SEQ ID NO: 887672 - RNA, 18 nt, Human
cccagagccacccagccg

SEQ ID NO: 887673 - RNA, 18 nt, Human
cccagaggcagggagccc

SEQ ID NO: 887674 - RNA, 22 nt, Human
cccagccuccuucccuggagga

SEQ ID NO: 887675 - RNA, 22 nt, Human
cccaggcucagguucagcucuc

SEQ ID NO: 887676 - RNA, 20 nt, Human
ccccacacucacaagggccc

SEQ ID NO: 887677 - RNA, 19 nt, Human
ccccacuggaucccuccuc

SEQ ID NO: 887678 - RNA, 18 nt, Human
ccccagaggcagggagcc

SEQ ID NO: 887679 - RNA, 23 nt, Human
ccccagaggcagggagcccagca

SEQ ID NO: 887680 - RNA, 19 nt, Human
ccccagccuccuucucugg

SEQ ID NO: 887681 - RNA, 21 nt, Human
ccccagcucaugccucacacc

SEQ ID NO: 887682 - RNA, 24 nt, Human
ccccccagcucaugccucacaccc

SEQ ID NO: 887683 - RNA, 21 nt, Human
cccccuacaucugggccuggc

SEQ ID NO: 887684 - RNA, 20 nt, Human
cccccucagacacacccacc

SEQ ID NO: 887685 - RNA, 23 nt, Human
ccccgcgcggauuugaacccucc

SEQ ID NO: 887686 - RNA, 18 nt, Human
ccccuacuuaauaaugcc

SEQ ID NO: 887687 - RNA, 21 nt, Human
ccccucagacacacccaccac

SEQ ID NO: 887688 - RNA, 21 nt, Human
cccggcaaugcccacagcuuu

SEQ ID NO: 887689 - RNA, 24 nt, Human
cccucagacacacccaccacccac

SEQ ID NO: 887690 - RNA, 21 nt, Human
cccucccccuacaucugggcc

SEQ ID NO: 887691 - RNA, 22 nt, Human
cccuccucuccuugcgccuccc

SEQ ID NO: 887692 - RNA, 22 nt, Human
cccugaaaaagggggccccccc

SEQ ID NO: 887693 - RNA, 24 nt, Human
cccuggagucccugugcuuggcac

SEQ ID NO: 887694 - RNA, 19 nt, Human
ccucaaucccgaccaucca

SEQ ID NO: 887695 - RNA, 18 nt, Human
ccucccacccacucccca

SEQ ID NO: 887696 - RNA, 21 nt, Human
ccucccacccacuccccacug

SEQ ID NO: 887697 - RNA, 22 nt, Human
ccucccacccacuccccacugg

SEQ ID NO: 887698 - RNA, 20 nt, Human
ccuggcuugacaggccccug

SEQ ID NO: 887699 - RNA, 21 nt, Human
ccuggggcccagccuucccac

SEQ ID NO: 887700 - RNA, 19 nt, Human
ccugucagggaagagacug

SEQ ID NO: 887701 - RNA, 21 nt, Human
ccuugcgcgucgcagcucccc

SEQ ID NO: 887702 - RNA, 18 nt, Human
ccuugcugugguaaaggc

SEQ ID NO: 887703 - RNA, 24 nt, Human
cuaacuccacuucacaaccaggac

SEQ ID NO: 887704 - RNA, 20 nt, Human
cuaagcccccaccugccaag

SEQ ID NO: 887705 - RNA, 18 nt, Human
cuaucagggcaggggacc

SEQ ID NO: 887706 - RNA, 20 nt, Human
cucccucugaccugcccuuc

SEQ ID NO: 887707 - RNA, 19 nt, Human
cucuaaguaagcccaaagc

SEQ ID NO: 887708 - RNA, 18 nt, Human
cugaggggcccucuggag

SEQ ID NO: 887709 - RNA, 24 nt, Human
cugcaccuuccuacgaacagggaa

SEQ ID NO: 887710 - RNA, 18 nt, Human
cugcucccaacacacaug

SEQ ID NO: 887711 - RNA, 23 nt, Human
cuggcacagcugccaaguuuugg

SEQ ID NO: 887712 - RNA, 19 nt, Human
cuggcucugaggggcccuc

SEQ ID NO: 887713 - RNA, 21 nt, Human
cuguguuccaggccgggcacc

SEQ ID NO: 887714 - RNA, 24 nt, Human
cuucaugguggcgacgcgcucgcc

SEQ ID NO: 887715 - RNA, 25 nt, Human
gaaggaaugggguagaggguggggc

SEQ ID NO: 887716 - RNA, 20 nt, Human
gacauccaugugcacuaacu

SEQ ID NO: 887717 - RNA, 18 nt, Human
gacuggccugccugaccu

SEQ ID NO: 887718 - RNA, 19 nt, Human
gagaaauguacccagcccc

SEQ ID NO: 887719 - RNA, 18 nt, Human
gagccccguugcugaugg

SEQ ID NO: 887720 - RNA, 18 nt, Human
gagggccuuguccuggcu

SEQ ID NO: 887721 - RNA, 27 nt, Human
gcacacccucccacugaccacuggcca

SEQ ID NO: 887722 - RNA, 18 nt, Human
gcacagcaccuggcgccc

SEQ ID NO: 887723 - RNA, 20 nt, Human
gcacagcaccuggcgcccag

SEQ ID NO: 887724 - RNA, 20 nt, Human
gccaagggggauggguuauc

SEQ ID NO: 887725 - RNA, 19 nt, Human
gccacucccccuuucccuc

SEQ ID NO: 887726 - RNA, 19 nt, Human
gcccuccagccucuccucu

SEQ ID NO: 887727 - RNA, 23 nt, Human
gcccucuuugcagaaaccucaac

SEQ ID NO: 887728 - RNA, 20 nt, Human
gcccuucgggaccuuggggc

SEQ ID NO: 887729 - RNA, 30 nt, Human
gccggcccgcggcuccgcagcccuugcgcc

SEQ ID NO: 887730 - RNA, 19 nt, Human
gccucccacccacucccca

SEQ ID NO: 887731 - RNA, 18 nt, Human
gccuccccagccccgggc

SEQ ID NO: 887732 - RNA, 18 nt, Human
gcguauucugagccucug

SEQ ID NO: 887733 - RNA, 20 nt, Human
gcugggaagcugaggccccg

SEQ ID NO: 887734 - RNA, 19 nt, Human
gcugggguggggcgggggg

SEQ ID NO: 887735 - RNA, 20 nt, Human
gcuggugaucccccagccuc

SEQ ID NO: 887736 - RNA, 21 nt, Human
gcugugaucaaggcaucuggc

SEQ ID NO: 887737 - RNA, 20 nt, Human
ggaaauguucccauuccuug

SEQ ID NO: 887738 - RNA, 23 nt, Human
ggaaggcuccagcccaggucucc

SEQ ID NO: 887739 - RNA, 22 nt, Human
ggaaugggguagaggguggggc

SEQ ID NO: 887740 - RNA, 20 nt, Human
ggaccgagggccuuggccac

SEQ ID NO: 887741 - RNA, 23 nt, Human
ggagcaaaggcccagagggcaag

SEQ ID NO: 887742 - RNA, 23 nt, Human
ggagcugcuggaagggaugacac

SEQ ID NO: 887743 - RNA, 24 nt, Human
ggagggagggaggcagacaggagg

SEQ ID NO: 887744 - RNA, 21 nt, Human
ggcacagcugccaaguuuugg

SEQ ID NO: 887745 - RNA, 24 nt, Human
ggccaggcucccaaacacaccccc

SEQ ID NO: 887746 - RNA, 23 nt, Human
ggccccagagccacccagccggc

SEQ ID NO: 887747 - RNA, 22 nt, Human
ggccgggcacccagcgggggag

SEQ ID NO: 887748 - RNA, 22 nt, Human
ggccugagccuguggauacucc

SEQ ID NO: 887749 - RNA, 25 nt, Human
ggccugcgcccucuuugcagaaacc

SEQ ID NO: 887750 - RNA, 20 nt, Human
ggcgacgcgcucgccggccc

SEQ ID NO: 887751 - RNA, 19 nt, Human
ggcugcagggaaggcuaag

SEQ ID NO: 887752 - RNA, 23 nt, Human
ggcugcagggaaggcuaagccag

SEQ ID NO: 887753 - RNA, 23 nt, Human
ggcugggguggggcggggggugg

SEQ ID NO: 887754 - RNA, 21 nt, Human
gggaggggcugcccugaggug

SEQ ID NO: 887755 - RNA, 19 nt, Human
gggcagcugggaagcugag

SEQ ID NO: 887756 - RNA, 22 nt, Human
gggcugggguggggcggggggu

SEQ ID NO: 887757 - RNA, 19 nt, Human
ggggaggggcugcagggaa

SEQ ID NO: 887758 - RNA, 21 nt, Human
ggggaggggcugcagggaagg

SEQ ID NO: 887759 - RNA, 19 nt, Human
ggggcugggguggggcggg

SEQ ID NO: 887760 - RNA, 21 nt, Human
gggggugacagaacuguaucu

SEQ ID NO: 887761 - RNA, 21 nt, Human
gggugcggggaggggcauggc

SEQ ID NO: 887762 - RNA, 24 nt, Human
gguagaggguggggccaagaaggg

SEQ ID NO: 887763 - RNA, 23 nt, Human
gucccugugcuuggcacagaccu

SEQ ID NO: 887764 - RNA, 21 nt, Human
gucggcucgggccgggacugc

SEQ ID NO: 887765 - RNA, 23 nt, Human
gugcggggaggggcauggccuga

SEQ ID NO: 887766 - RNA, 25 nt, Human
gugggugcggggaggggcauggccu

SEQ ID NO: 887767 - RNA, 18 nt, Human
gugugggccugcaugggu

SEQ ID NO: 887768 - RNA, 20 nt, Human
uaacuucucagaaguucccu

SEQ ID NO: 887769 - RNA, 20 nt, Human
uaagcccaaagcaaaaugag

SEQ ID NO: 887770 - RNA, 22 nt, Human
uaaguaagcccaaagcaaaaug

SEQ ID NO: 887771 - RNA, 24 nt, Human
uacauggccauaaacacaccaucc

SEQ ID NO: 887772 - RNA, 22 nt, Human
uauggaugccuaagcccccacc

SEQ ID NO: 887773 - RNA, 18 nt, Human
ucagcucucgugcccucc

SEQ ID NO: 887774 - RNA, 22 nt, Human
ucagggcaccuucugacagugu

SEQ ID NO: 887775 - RNA, 23 nt, Human
uccaccccaccccaagcucaaac

SEQ ID NO: 887776 - RNA, 26 nt, Human
uccaccccaccccaagcucaaaccca

SEQ ID NO: 887777 - RNA, 23 nt, Human
uccacuucacaaccaggacccac

SEQ ID NO: 887778 - RNA, 19 nt, Human
uccagccucucucccucuc

SEQ ID NO: 887779 - RNA, 21 nt, Human
uccagccuggaugagcugacg

SEQ ID NO: 887780 - RNA, 18 nt, Human
ucccaccaagaagacauu

SEQ ID NO: 887781 - RNA, 22 nt, Human
ucccagagauuuccguuugggg

SEQ ID NO: 887782 - RNA, 18 nt, Human
ucccauggcccuccagcc

SEQ ID NO: 887783 - RNA, 22 nt, Human
uccccagccccgggcuggccuc

SEQ ID NO: 887784 - RNA, 19 nt, Human
ucccccuacaucugggccu

SEQ ID NO: 887785 - RNA, 19 nt, Human
ucccccuuucccuccucag

SEQ ID NO: 887786 - RNA, 23 nt, Human
ucccuccucuccuugcgccuccc

SEQ ID NO: 887787 - RNA, 23 nt, Human
ucccuggaggaaggcuccagccc

SEQ ID NO: 887788 - RNA, 19 nt, Human
uccucaccugagaaggccc

SEQ ID NO: 887789 - RNA, 18 nt, Human
ucugcucccaacacacau

SEQ ID NO: 887790 - RNA, 23 nt, Human
ucugggccacauccacuccagga

SEQ ID NO: 887791 - RNA, 24 nt, Human
ucugggccacauccacuccaggaa

SEQ ID NO: 887792 - RNA, 21 nt, Human
ugaaaccaugagacccaccuc

SEQ ID NO: 887793 - RNA, 23 nt, Human
ugaagacaccacccuaccccggc

SEQ ID NO: 887794 - RNA, 19 nt, Human
ugaagggauggaccaagag

SEQ ID NO: 887795 - RNA, 20 nt, Human
ugacauguguggucucccuc

SEQ ID NO: 887796 - RNA, 19 nt, Human
ugaccuggccacucccccu

SEQ ID NO: 887797 - RNA, 20 nt, Human
ugacggagauuggcaugggg

SEQ ID NO: 887798 - RNA, 22 nt, Human
ugaggcaaggaguaggacuccu

SEQ ID NO: 887799 - RNA, 23 nt, Human
ugaggcagagcacuucuaggggc

SEQ ID NO: 887800 - RNA, 21 nt, Human
ugaggccccgccagcuggagg

SEQ ID NO: 887801 - RNA, 20 nt, Human
ugccaagacagacuggggcu

SEQ ID NO: 887802 - RNA, 19 nt, Human
ugcccaggcaggggaggcg

SEQ ID NO: 887803 - RNA, 19 nt, Human
ugcccuagagccccguugc

SEQ ID NO: 887804 - RNA, 20 nt, Human
ugccuaagcccccaccugcc

SEQ ID NO: 887805 - RNA, 21 nt, Human
ugccucacacccguccccuga

SEQ ID NO: 887806 - RNA, 18 nt, Human
ugccucccacccacuccc

SEQ ID NO: 887807 - RNA, 20 nt, Human
ugcuccugacuccacauccc

SEQ ID NO: 887808 - RNA, 20 nt, Human
ugcuuccuccugggagagcu

SEQ ID NO: 887809 - RNA, 21 nt, Human
uggccauaaacacaccauccc

SEQ ID NO: 887810 - RNA, 19 nt, Human
uggccaugcagacaggcgc

SEQ ID NO: 887811 - RNA, 18 nt, Human
uggccugccugaccuggc

SEQ ID NO: 887812 - RNA, 21 nt, Human
uggcuuugguuucuggcacag

SEQ ID NO: 887813 - RNA, 20 nt, Human
ugggaauggguaccaagggg

SEQ ID NO: 887814 - RNA, 28 nt, Human
ugggaauggguaccaaggggguguguag

SEQ ID NO: 887815 - RNA, 21 nt, Human
ugggacacaggcuccacccaa

SEQ ID NO: 887816 - RNA, 23 nt, Human
ugggacacaggcuccacccaagc

SEQ ID NO: 887817 - RNA, 19 nt, Human
ugggccccuggcuugacag

SEQ ID NO: 887818 - RNA, 20 nt, Human
uggggaaugcuuccuccugg

SEQ ID NO: 887819 - RNA, 24 nt, Human
uggggaggggcugcagggaaggcu

SEQ ID NO: 887820 - RNA, 21 nt, Human
uggggccugaggggcugccag

SEQ ID NO: 887821 - RNA, 23 nt, Human
ugggggcugugggcgcagggagg

SEQ ID NO: 887822 - RNA, 18 nt, Human
ugggguagaggguggggc

SEQ ID NO: 887823 - RNA, 22 nt, Human
ugggguagaggguggggccaag

SEQ ID NO: 887824 - RNA, 23 nt, Human
ugggguggggaaugcuuccuccu

SEQ ID NO: 887825 - RNA, 20 nt, Human
ugggguggggcggggggugg

SEQ ID NO: 887826 - RNA, 18 nt, Human
uggguuuuagggaccagc

SEQ ID NO: 887827 - RNA, 25 nt, Human
ugguugacuugcccuuuguuuuuuu

SEQ ID NO: 887828 - RNA, 20 nt, Human
ugucagaagccugaagggau

SEQ ID NO: 887829 - RNA, 26 nt, Human
ugugaucaaggcaucuggccagcacc

SEQ ID NO: 887830 - RNA, 18 nt, Human
uguggggccugaggggcu

SEQ ID NO: 887831 - RNA, 19 nt, Human
uguuggggaggggcugcag

SEQ ID NO: 887832 - RNA, 20 nt, Human
uucaugguggcgacgcgcuc

SEQ ID NO: 887833 - RNA, 19 nt, Human
uucccuggaggaaggcucc

SEQ ID NO: 887834 - RNA, 22 nt, Human
uuccguuugggguuugggguuu

SEQ ID NO: 887835 - RNA, 20 nt, Human
uucucaaaaugccuugguug

SEQ ID NO: 887836 - RNA, 20 nt, Human
uugggguuugggguuuggag

SEQ ID NO: 887837 - RNA, 18 nt, Human
uuugaaguccuuuauugu

SEQ ID NO: 887838 - RNA, 22 nt, Human
uuugcagaaaccucaacacuua

SEQ ID NO: 887839 - RNA, 24 nt, Human
uuuggaggaguuugugaaauggga

SEQ ID NO: 887840 - RNA, 25 nt, Human
uuuguugcaagaagcaucauucuuu

SEQ ID NO: 887841 - RNA, 21 nt, Human
uuuuccgccugccuggcccca

SEQ ID NO: 887842 - RNA, 23 nt, Human
uuuuucuuuucugaauccaauau

SEQ ID NO: 887843 - RNA, 20 nt, Human
acugaaagggaauguuccac

SEQ ID NO: 887844 - RNA, 19 nt, Human
uccaguaguucugggcaca

SEQ ID NO: 887845 - RNA, 18 nt, Human
uuccaguaguucugggca

SEQ ID NO: 887846 - RNA, 21 nt, Human
uuuuuuuuuuuuuuuuuauuu

SEQ ID NO: 887847 - RNA, 22 nt, Human
aaaaaaaaggcuuugcagauga

SEQ ID NO: 887848 - RNA, 20 nt, Human
aaaaaaaggcuuugcagaug

SEQ ID NO: 887849 - RNA, 22 nt, Human
aaaagaccaaagccuauaauca

SEQ ID NO: 887850 - RNA, 21 nt, Human
accacaguuuauacauucguc

SEQ ID NO: 887851 - RNA, 23 nt, Human
acuuuuaaagagcaaaaaaaaaa

SEQ ID NO: 887852 - RNA, 18 nt, Human
agacuuuuagcaacaccu

SEQ ID NO: 887853 - RNA, 18 nt, Human
aggaguuuuuuacuucau

SEQ ID NO: 887854 - RNA, 18 nt, Human
aggcuuugcagaugaaaa

SEQ ID NO: 887855 - RNA, 25 nt, Human
augacaugaaaagaguuuagaacac

SEQ ID NO: 887856 - RNA, 19 nt, Human
auuagauuaacacuuugcu

SEQ ID NO: 887857 - RNA, 22 nt, Human
cccacacucacaaugucugaga

SEQ ID NO: 887858 - RNA, 27 nt, Human
ccuauaaucaaaacaugaccggggucc

SEQ ID NO: 887859 - RNA, 18 nt, Human
ccuccccaaccugccacu

SEQ ID NO: 887860 - RNA, 18 nt, Human
cugccacuuggcccaggc

SEQ ID NO: 887861 - RNA, 21 nt, Human
cuugaggaccgagcuuggggc

SEQ ID NO: 887862 - RNA, 19 nt, Human
cuuugcagccauccucccc

SEQ ID NO: 887863 - RNA, 22 nt, Human
gagcaaaaaaaaaaaaggcuuu

SEQ ID NO: 887864 - RNA, 20 nt, Human
gccaaacuguuuucaaaagu

SEQ ID NO: 887865 - RNA, 23 nt, Human
gcccaggcaaucacuaaucuaau

SEQ ID NO: 887866 - RNA, 22 nt, Human
ggaaacugccaaacuguuuuca

SEQ ID NO: 887867 - RNA, 18 nt, Human
ggaauucuggaguccuaa

SEQ ID NO: 887868 - RNA, 23 nt, Human
uaacacuacagauuaguuugcca

SEQ ID NO: 887869 - RNA, 22 nt, Human
uaacuuuauaggaaacugccaa

SEQ ID NO: 887870 - RNA, 19 nt, Human
uagcaacaccuuuaauggc

SEQ ID NO: 887871 - RNA, 21 nt, Human
uagcaacaccuuuaauggcua

SEQ ID NO: 887872 - RNA, 25 nt, Human
uaucagaaaggugaauuuuauccuc

SEQ ID NO: 887873 - RNA, 24 nt, Human
ucccacacucacaaugucugagaa

SEQ ID NO: 887874 - RNA, 22 nt, Human
uccccaaccugccacuuggccc

SEQ ID NO: 887875 - RNA, 18 nt, Human
uccuucaacaaugucugc

SEQ ID NO: 887876 - RNA, 21 nt, Human
uccuucaacaaugucugccaa

SEQ ID NO: 887877 - RNA, 21 nt, Human
ucugccacacaggaguuuuuu

SEQ ID NO: 887878 - RNA, 25 nt, Human
ugaaaagaccaaagccuauaaucaa

SEQ ID NO: 887879 - RNA, 18 nt, Human
ugcagccauccuccccaa

SEQ ID NO: 887880 - RNA, 21 nt, Human
uuaaagagcaaaaaaaaaaaa

SEQ ID NO: 887881 - RNA, 24 nt, Human
uucccacacucacaaugucugaga

SEQ ID NO: 887882 - RNA, 24 nt, Human
uucuuugcagccauccuccccaac

SEQ ID NO: 887883 - RNA, 19 nt, Human
uuugcagccauccucccca

SEQ ID NO: 887884 - RNA, 18 nt, Human
uuuuacuuucugccacac

SEQ ID NO: 887885 - RNA, 25 nt, Human
uuuuauaaucacguuuauugaggcu

SEQ ID NO: 887886 - RNA, 24 nt, Human
aagacuuuuaaaaaacacaaagca

SEQ ID NO: 887887 - RNA, 25 nt, Human
acaaagcacuuuguaaauauaaagc

SEQ ID NO: 887888 - RNA, 23 nt, Human
accggaguaaagggagggcuggu

SEQ ID NO: 887889 - RNA, 18 nt, Human
aguaaagggagggcugaa

SEQ ID NO: 887890 - RNA, 24 nt, Human
aguaaagggagggcugaagaaaga

SEQ ID NO: 887891 - RNA, 24 nt, Human
uguaaauauaaagcaccggaguaa

SEQ ID NO: 887892 - RNA, 18 nt, Human
accaagauggcaggugug

SEQ ID NO: 887893 - RNA, 18 nt, Human
cagcggcugcgccguggc

SEQ ID NO: 887894 - RNA, 19 nt, Human
cgcgccccgcugcgccggg

SEQ ID NO: 887895 - RNA, 18 nt, Human
cgggcuccgcagcggcgg

SEQ ID NO: 887896 - RNA, 24 nt, Human
cgggcuccgcagcggcggcugggg

SEQ ID NO: 887897 - RNA, 22 nt, Human
cggggggucccggcgggcuccg

SEQ ID NO: 887898 - RNA, 21 nt, Human
cucggccuccgccuccgcggc

SEQ ID NO: 887899 - RNA, 21 nt, Human
gccgggccugggcccggggcg

SEQ ID NO: 887900 - RNA, 21 nt, Human
gggccgggccugggcccgggg

SEQ ID NO: 887901 - RNA, 19 nt, Human
uagcucaugaccaagauga

SEQ ID NO: 887902 - RNA, 19 nt, Human
uccgcagcggcggcugggg

SEQ ID NO: 887903 - RNA, 18 nt, Human
ugaccaagauggcaggug

SEQ ID NO: 887904 - RNA, 21 nt, Human
ugggaggggaaguguguggcc

SEQ ID NO: 887905 - RNA, 20 nt, Human
aaacagcucaguucagggac

SEQ ID NO: 887906 - RNA, 24 nt, Human
aauagcuauccagggauggacagc

SEQ ID NO: 887907 - RNA, 21 nt, Human
acccaucucagccucucaucc

SEQ ID NO: 887908 - RNA, 22 nt, Human
accucagggccuggcagcuuca

SEQ ID NO: 887909 - RNA, 19 nt, Human
agacaaacccacacuuccc

SEQ ID NO: 887910 - RNA, 22 nt, Human
aggaagggggucuuggcugccu

SEQ ID NO: 887911 - RNA, 18 nt, Human
aggaguuuuucccaguca

SEQ ID NO: 887912 - RNA, 22 nt, Human
aggccuccagcuauggggucca

SEQ ID NO: 887913 - RNA, 18 nt, Human
aucucagccucucaucca

SEQ ID NO: 887914 - RNA, 22 nt, Human
augaaagccuucuggguggagc

SEQ ID NO: 887915 - RNA, 23 nt, Human
auggcaacuagagggccugaaac

SEQ ID NO: 887916 - RNA, 20 nt, Human
cacccuaaucugggcuucug

SEQ ID NO: 887917 - RNA, 25 nt, Human
cauccagcugaggcucuggccacac

SEQ ID NO: 887918 - RNA, 22 nt, Human
ccacaggccuccagcuaugggg

SEQ ID NO: 887919 - RNA, 19 nt, Human
ccacccaucucagccucuc

SEQ ID NO: 887920 - RNA, 25 nt, Human
cccacacuucccacagcuccucaca

SEQ ID NO: 887921 - RNA, 22 nt, Human
ccccccguagcacuccuagggc

SEQ ID NO: 887922 - RNA, 19 nt, Human
ccccggagacuggcacgga

SEQ ID NO: 887923 - RNA, 18 nt, Human
cccggacacgccgcccca

SEQ ID NO: 887924 - RNA, 18 nt, Human
cccguagcacuccuaggg

SEQ ID NO: 887925 - RNA, 19 nt, Human
cccguagcacuccuagggc

SEQ ID NO: 887926 - RNA, 22 nt, Human
ccucagggccuggcagcuucag

SEQ ID NO: 887927 - RNA, 20 nt, Human
cggccccccguagcacuccu

SEQ ID NO: 887928 - RNA, 20 nt, Human
cggcccgggcaaggcuccgg

SEQ ID NO: 887929 - RNA, 21 nt, Human
cucagccucucauccagcuga

SEQ ID NO: 887930 - RNA, 23 nt, Human
cugaggcucuggccacaccgugc

SEQ ID NO: 887931 - RNA, 22 nt, Human
cuggaggcuucugcaaggaugg

SEQ ID NO: 887932 - RNA, 20 nt, Human
cuggcagcuucaggcuggcg

SEQ ID NO: 887933 - RNA, 21 nt, Human
cuggcgccccucggcggacgu

SEQ ID NO: 887934 - RNA, 19 nt, Human
cuucaggcuggcgccccuc

SEQ ID NO: 887935 - RNA, 21 nt, Human
cuugaagcaaaaauuaaacac

SEQ ID NO: 887936 - RNA, 21 nt, Human
gcaacuagagggccugaaacc

SEQ ID NO: 887937 - RNA, 20 nt, Human
gcagcagggaaggaguuuuu

SEQ ID NO: 887938 - RNA, 20 nt, Human
gccccgaauccagggacggg

SEQ ID NO: 887939 - RNA, 26 nt, Human
gccccgaauccagggacggggcagcg

SEQ ID NO: 887940 - RNA, 21 nt, Human
gccccgcuugcugcguccagc

SEQ ID NO: 887941 - RNA, 21 nt, Human
gccgggggcccggacacgccg

SEQ ID NO: 887942 - RNA, 18 nt, Human
gcggacguggcuggcaug

SEQ ID NO: 887943 - RNA, 18 nt, Human
gcugccucccacucuuag

SEQ ID NO: 887944 - RNA, 26 nt, Human
gcuucuggcaccacaggccuccagcu

SEQ ID NO: 887945 - RNA, 22 nt, Human
ggacugguguacaagcuggcca

SEQ ID NO: 887946 - RNA, 20 nt, Human
ggccuggcagcuucaggcug

SEQ ID NO: 887947 - RNA, 23 nt, Human
ggccuucucccaucugugauggc

SEQ ID NO: 887948 - RNA, 20 nt, Human
ggggcagguccugcuacaga

SEQ ID NO: 887949 - RNA, 20 nt, Human
gucauggcaacuagagggcc

SEQ ID NO: 887950 - RNA, 22 nt, Human
gucauggcaacuagagggccug

SEQ ID NO: 887951 - RNA, 18 nt, Human
gugauggcuucagcaagg

SEQ ID NO: 887952 - RNA, 21 nt, Human
uaaacagcucaguucagggac

SEQ ID NO: 887953 - RNA, 20 nt, Human
uacugugaguggugguggag

SEQ ID NO: 887954 - RNA, 19 nt, Human
uagggcuccuggacggggg

SEQ ID NO: 887955 - RNA, 23 nt, Human
ucacucccagcagaguacaaaug

SEQ ID NO: 887956 - RNA, 20 nt, Human
ucagcagcagggaaggaguu

SEQ ID NO: 887957 - RNA, 20 nt, Human
uccagggauggacagccacc

SEQ ID NO: 887958 - RNA, 19 nt, Human
ucccacagcuccucacaga

SEQ ID NO: 887959 - RNA, 21 nt, Human
uccucacagagggguaggggu

SEQ ID NO: 887960 - RNA, 23 nt, Human
uccuggaggcuucugcaaggaug

SEQ ID NO: 887961 - RNA, 22 nt, Human
ucucuucuguucuggagacaaa

SEQ ID NO: 887962 - RNA, 26 nt, Human
ugcaaguggcuucuaguuccgaccac

SEQ ID NO: 887963 - RNA, 23 nt, Human
ugccgggggcccggacacgccgc

SEQ ID NO: 887964 - RNA, 23 nt, Human
ugcgaggacggggagcuugggga

SEQ ID NO: 887965 - RNA, 24 nt, Human
ugcgaggacggggagcuuggggac

SEQ ID NO: 887966 - RNA, 19 nt, Human
ugcugcguccagccccgaa

SEQ ID NO: 887967 - RNA, 22 nt, Human
uggagacaaacccacacuuccc

SEQ ID NO: 887968 - RNA, 19 nt, Human
uggcaccacaggccuccag

SEQ ID NO: 887969 - RNA, 19 nt, Human
uggcacggacgcguggguc

SEQ ID NO: 887970 - RNA, 18 nt, Human
uggcucugcaagaugaag

SEQ ID NO: 887971 - RNA, 19 nt, Human
ugggaaaguccccggagac

SEQ ID NO: 887972 - RNA, 20 nt, Human
ugggaaaguccccggagacc

SEQ ID NO: 887973 - RNA, 21 nt, Human
ugggcuucuggcaccacaggc

SEQ ID NO: 887974 - RNA, 25 nt, Human
uggugguggagagggccccagagcc

SEQ ID NO: 887975 - RNA, 19 nt, Human
ugugauggcuucagcaagg

SEQ ID NO: 887976 - RNA, 24 nt, Human
uugaagcaaaaauuaaacacacac

SEQ ID NO: 887977 - RNA, 20 nt, Human
uuggauuuauguccaugauu

SEQ ID NO: 887978 - RNA, 21 nt, Human
caggaaagcacuggcguggug

SEQ ID NO: 887979 - RNA, 23 nt, Human
gauuuuggcucggaaaggagaac

SEQ ID NO: 887980 - RNA, 23 nt, Human
gcuaggagcuccucuuuccaucu

SEQ ID NO: 887981 - RNA, 18 nt, Human
gcucggaaaggagaacca

SEQ ID NO: 887982 - RNA, 22 nt, Human
ggagaaccagcccuaccccggc

SEQ ID NO: 887983 - RNA, 27 nt, Human
ggagaaccagcccuaccccggcuuaag

SEQ ID NO: 887984 - RNA, 23 nt, Human
uaagugagcuaggagcuccucuu

SEQ ID NO: 887985 - RNA, 20 nt, Human
ugagcuaggagcuccucuuu

SEQ ID NO: 887986 - RNA, 20 nt, Human
uuggcucggaaaggagaacc

SEQ ID NO: 887987 - RNA, 24 nt, Human
aaaaaaaucaaaauaauacaaaua

SEQ ID NO: 887988 - RNA, 22 nt, Human
aacugcucucccucacauagaa

SEQ ID NO: 887989 - RNA, 22 nt, Human
aagagaaagaagagauaaagug

SEQ ID NO: 887990 - RNA, 24 nt, Human
aagcagagaagcuacugcaugugg

SEQ ID NO: 887991 - RNA, 19 nt, Human
aagggggagaguaggaggg

SEQ ID NO: 887992 - RNA, 21 nt, Human
aagugggacuaagagaaagag

SEQ ID NO: 887993 - RNA, 19 nt, Human
acagcacacugcaggcccc

SEQ ID NO: 887994 - RNA, 18 nt, Human
acucuuagaaauguagaa

SEQ ID NO: 887995 - RNA, 23 nt, Human
agaaaaccuaaucacaccagcuc

SEQ ID NO: 887996 - RNA, 20 nt, Human
agaaagaagagauaaagugg

SEQ ID NO: 887997 - RNA, 22 nt, Human
agaacaaagacacaguuccuuu

SEQ ID NO: 887998 - RNA, 20 nt, Human
agagaaagggggagaguagg

SEQ ID NO: 887999 - RNA, 19 nt, Human
agaguaggagggagagggg

SEQ ID NO: 888000 - RNA, 20 nt, Human
aggagggagaggggaaaagg

SEQ ID NO: 888001 - RNA, 21 nt, Human
aggagggagaggggaaaagga

SEQ ID NO: 888002 - RNA, 21 nt, Human
aggagggagaggggaaaagga

SEQ ID NO: 888003 - RNA, 23 nt, Human
agggaagagaggaagaacaaaga

SEQ ID NO: 888004 - RNA, 19 nt, Human
cacagagggugcuaggagc

SEQ ID NO: 888005 - RNA, 20 nt, Human
cagaaacccaacugcucucc

SEQ ID NO: 888006 - RNA, 18 nt, Human
cagagggugcuaggagcc

SEQ ID NO: 888007 - RNA, 19 nt, Human
cagcacacugcaggccccc

SEQ ID NO: 888008 - RNA, 28 nt, Human
cagcaccacagacuugccaauucagcca

SEQ ID NO: 888009 - RNA, 19 nt, Human
cauguggacugacuugacu

SEQ ID NO: 888010 - RNA, 19 nt, Human
cccaaagagcagcaccaca

SEQ ID NO: 888011 - RNA, 24 nt, Human
ccccagcccuaaucuaucaggauc

SEQ ID NO: 888012 - RNA, 25 nt, Human
cgagcgucuccccaaguaaaauucu

SEQ ID NO: 888013 - RNA, 19 nt, Human
cuuagaauccccuucccag

SEQ ID NO: 888014 - RNA, 24 nt, Human
gacacaguuccuuuaaacaucagg

SEQ ID NO: 888015 - RNA, 19 nt, Human
gagagaaagggggagagua

SEQ ID NO: 888016 - RNA, 20 nt, Human
gcaugugcaugcauugugug

SEQ ID NO: 888017 - RNA, 21 nt, Human
ggagaggggaaaaggaggagg

SEQ ID NO: 888018 - RNA, 21 nt, Human
ggaggagagaaagggggagag

SEQ ID NO: 888019 - RNA, 20 nt, Human
ggcaacggaugggacacauc

SEQ ID NO: 888020 - RNA, 21 nt, Human
gggaauaaaaggacaaguagc

SEQ ID NO: 888021 - RNA, 23 nt, Human
gggagaggggaaaaggaggaggg

SEQ ID NO: 888022 - RNA, 18 nt, Human
ggggaaaaggaggaggga

SEQ ID NO: 888023 - RNA, 22 nt, Human
ggggagaguaggagggagaggg

SEQ ID NO: 888024 - RNA, 22 nt, Human
guagaaucuugggcagcacccc

SEQ ID NO: 888025 - RNA, 18 nt, Human
gugcaugcauugugugga

SEQ ID NO: 888026 - RNA, 20 nt, Human
guuccuuuaaacaucagggc

SEQ ID NO: 888027 - RNA, 19 nt, Human
uaaaauucuggccgccaca

SEQ ID NO: 888028 - RNA, 22 nt, Human
uaaaauucuggccgccacacau

SEQ ID NO: 888029 - RNA, 18 nt, Human
uaagagaaagagggaaga

SEQ ID NO: 888030 - RNA, 22 nt, Human
uaaggggagggaaaggcaaaga

SEQ ID NO: 888031 - RNA, 23 nt, Human
uaaucacaccagcucacucaagc

SEQ ID NO: 888032 - RNA, 22 nt, Human
ucuggaaaaccccuaccacaga

SEQ ID NO: 888033 - RNA, 21 nt, Human
ucuugggcagcaccccagccc

SEQ ID NO: 888034 - RNA, 18 nt, Human
ugaucaggugcggcaggc

SEQ ID NO: 888035 - RNA, 24 nt, Human
ugaugggaaauggcuuagaauccc

SEQ ID NO: 888036 - RNA, 22 nt, Human
ugcaggaagccgucugcagaga

SEQ ID NO: 888037 - RNA, 21 nt, Human
ugccaccgucauccagggacu

SEQ ID NO: 888038 - RNA, 22 nt, Human
uggcuuagaauccccuucccag

SEQ ID NO: 888039 - RNA, 19 nt, Human
ugggaagggaauaaaagga

SEQ ID NO: 888040 - RNA, 18 nt, Human
ugggcagcaccccagccc

SEQ ID NO: 888041 - RNA, 22 nt, Human
ugggcagcaccccagcccuaau

SEQ ID NO: 888042 - RNA, 24 nt, Human
ugguuuauggucugugggaaggga

SEQ ID NO: 888043 - RNA, 22 nt, Human
uuagccuaaacauguggacuga

SEQ ID NO: 888044 - RNA, 26 nt, Human
uuccaaaugggaauuuauuucaaaga

SEQ ID NO: 888045 - RNA, 18 nt, Human
uuuuuuuuuuuuuuuuug

SEQ ID NO: 888046 - RNA, 21 nt, Human
aaaaggagaaaggaagcaaaa

SEQ ID NO: 888047 - RNA, 24 nt, Human
aagacuccuuccuuucagacccag

SEQ ID NO: 888048 - RNA, 20 nt, Human
auuuucuucuauguuuguuu

SEQ ID NO: 888049 - RNA, 23 nt, Human
gcaaaagacuccuuccuuucaga

SEQ ID NO: 888050 - RNA, 19 nt, Human
ggaggggguggagccggga

SEQ ID NO: 888051 - RNA, 21 nt, Human
ugagcuuggaggggguggagc

SEQ ID NO: 888052 - RNA, 21 nt, Human
caacauccgacgacgccggcu

SEQ ID NO: 888053 - RNA, 18 nt, Human
ccgcccgccccgagcucg

SEQ ID NO: 888054 - RNA, 22 nt, Human
cuucggccacgcgggcuccgcc

SEQ ID NO: 888055 - RNA, 23 nt, Human
ugggaaaacuuuauuagguuugg

SEQ ID NO: 888056 - RNA, 25 nt, Human
ugguuuccagcuucggccacgcggg

SEQ ID NO: 888057 - RNA, 21 nt, Human
uuagguuugguuuccagcuuc

SEQ ID NO: 888058 - RNA, 19 nt, Human
aaacaucuagcccagcaau

SEQ ID NO: 888059 - RNA, 20 nt, Human
aaucauggcuaaaacaucua

SEQ ID NO: 888060 - RNA, 21 nt, Human
cacaggcaguucaccaacacc

SEQ ID NO: 888061 - RNA, 23 nt, Human
caccuggaaaaucgaugacuuca

SEQ ID NO: 888062 - RNA, 18 nt, Human
cagguugagaaagcucua

SEQ ID NO: 888063 - RNA, 20 nt, Human
cauggcuaaaacaucuagcc

SEQ ID NO: 888064 - RNA, 20 nt, Human
cuaaaacaucuagcccagca

SEQ ID NO: 888065 - RNA, 22 nt, Human
cucaauauacccgugauacaga

SEQ ID NO: 888066 - RNA, 21 nt, Human
ggagcucccaacaccuggccc

SEQ ID NO: 888067 - RNA, 19 nt, Human
gggccggggaggagaggag

SEQ ID NO: 888068 - RNA, 20 nt, Human
gggccggggaggagaggagu

SEQ ID NO: 888069 - RNA, 23 nt, Human
uaaaacagaggcagaaucauggc

SEQ ID NO: 888070 - RNA, 22 nt, Human
uagcccagcaaugaacucauua

SEQ ID NO: 888071 - RNA, 23 nt, Human
ucauauguaacaaagauaaggau

SEQ ID NO: 888072 - RNA, 18 nt, Human
ucccugagggguaggggc

SEQ ID NO: 888073 - RNA, 19 nt, Human
ucgccggcggagaugaggg

SEQ ID NO: 888074 - RNA, 22 nt, Human
ugaaugcucucaccuuuauuuc

SEQ ID NO: 888075 - RNA, 27 nt, Human
ugaaugcucucaccuuuauuucucuca

SEQ ID NO: 888076 - RNA, 22 nt, Human
ugcucucaccuuuauuucucuc

SEQ ID NO: 888077 - RNA, 18 nt, Human
uggcuaaaacaucuagcc

SEQ ID NO: 888078 - RNA, 20 nt, Human
ugugcagguauaaaacagag

SEQ ID NO: 888079 - RNA, 20 nt, Human
uucauggagaaugaaugacu

SEQ ID NO: 888080 - RNA, 20 nt, Human
uuuuuuuuuuugugaaugcu

SEQ ID NO: 888081 - RNA, 20 nt, Human
uuuuuuuuuuuuuuugugaa

SEQ ID NO: 888082 - RNA, 19 nt, Human
uuuuuuuuuuuuuuuuugu

SEQ ID NO: 888083 - RNA, 20 nt, Human
uuuuuuuuuuuuuuuuuugg

SEQ ID NO: 888084 - RNA, 19 nt, Human
aaaaaaaaaaagcacauag

SEQ ID NO: 888085 - RNA, 24 nt, Human
aaaaaaaaaaagcacauagugucu

SEQ ID NO: 888086 - RNA, 23 nt, Human
aaaaaaaagcacauagugucuaa

SEQ ID NO: 888087 - RNA, 20 nt, Human
aaaaaaaguucaaccccaaa

SEQ ID NO: 888088 - RNA, 21 nt, Human
aaaaaaaguucaaccccaaaa

SEQ ID NO: 888089 - RNA, 23 nt, Human
aaaaacaaaaacaagcaaacaaa

SEQ ID NO: 888090 - RNA, 23 nt, Human
aaaacaaaaacaagcaaacaaag

SEQ ID NO: 888091 - RNA, 19 nt, Human
aaaacugaguauaacccuu

SEQ ID NO: 888092 - RNA, 22 nt, Human
aaaauucuucugcaaaccacau

SEQ ID NO: 888093 - RNA, 24 nt, Human
aaacaaaaacaagcaaacaaacaa

SEQ ID NO: 888094 - RNA, 19 nt, Human
aaacaagcaaacaaacaac

SEQ ID NO: 888095 - RNA, 24 nt, Human
aaacaagcaaacaaacaacgaguc

SEQ ID NO: 888096 - RNA, 24 nt, Human
aacaugcgugacagaauuugugca

SEQ ID NO: 888097 - RNA, 18 nt, Human
aagaaaauacaaaaacau

SEQ ID NO: 888098 - RNA, 24 nt, Human
aagaaaauucuucugcaaaccaca

SEQ ID NO: 888099 - RNA, 21 nt, Human
aagcaaacaaacaacaaauaa

SEQ ID NO: 888100 - RNA, 19 nt, Human
aagcagaagguagacccua

SEQ ID NO: 888101 - RNA, 20 nt, Human
aagguagacccuaccacaaa

SEQ ID NO: 888102 - RNA, 23 nt, Human
aagguagacccuaccacaaagaa

SEQ ID NO: 888103 - RNA, 24 nt, Human
acacugacgucccuuaaaacuuca

SEQ ID NO: 888104 - RNA, 19 nt, Human
accauagaagcuuggggcc

SEQ ID NO: 888105 - RNA, 19 nt, Human
acuagguauuaucuacacc

SEQ ID NO: 888106 - RNA, 23 nt, Human
acuuuacaguuaacuaugucacc

SEQ ID NO: 888107 - RNA, 18 nt, Human
agaaaacagcaucaauca

SEQ ID NO: 888108 - RNA, 23 nt, Human
agaaaagaugcuuaguuaaugga

SEQ ID NO: 888109 - RNA, 23 nt, Human
agaaaauucuucugcaaaccaca

SEQ ID NO: 888110 - RNA, 20 nt, Human
agaagcacggguaagugaca

SEQ ID NO: 888111 - RNA, 18 nt, Human
agaauggaauggaaucau

SEQ ID NO: 888112 - RNA, 20 nt, Human
agcaauaagaauuagaagaa

SEQ ID NO: 888113 - RNA, 20 nt, Human
agcaggaggcggcgccgcga

SEQ ID NO: 888114 - RNA, 18 nt, Human
agcaucucguuccaaagc

SEQ ID NO: 888115 - RNA, 23 nt, Human
aggaaaaaauuacaaaaaaaaaa

SEQ ID NO: 888116 - RNA, 24 nt, Human
agguauuaucuacaccuucacuuu

SEQ ID NO: 888117 - RNA, 18 nt, Human
aguuguuaauuuucauag

SEQ ID NO: 888118 - RNA, 19 nt, Human
auagcaucucguuccaaag

SEQ ID NO: 888119 - RNA, 20 nt, Human
aucaaaaauaucugaaaaca

SEQ ID NO: 888120 - RNA, 20 nt, Human
auccucaaggccacauacau

SEQ ID NO: 888121 - RNA, 19 nt, Human
auguguuaaaaacugagua

SEQ ID NO: 888122 - RNA, 23 nt, Human
auuuuuuuuuuuuuuuuuaaaag

SEQ ID NO: 888123 - RNA, 26 nt, Human
caaaaaaaguucaaccccaaaauuaa

SEQ ID NO: 888124 - RNA, 18 nt, Human
caaaaacaaaaacaagca

SEQ ID NO: 888125 - RNA, 21 nt, Human
caaauaucggcgacuaguaug

SEQ ID NO: 888126 - RNA, 24 nt, Human
caagcaaacaaacaacaaauaacu

SEQ ID NO: 888127 - RNA, 23 nt, Human
caaggaaaaaauuacaaaaaaaa

SEQ ID NO: 888128 - RNA, 22 nt, Human
cacuacaaacaauguguucaca

SEQ ID NO: 888129 - RNA, 21 nt, Human
cacugcauuucuguaacaaag

SEQ ID NO: 888130 - RNA, 22 nt, Human
cacugcauuucuguaacaaagu

SEQ ID NO: 888131 - RNA, 23 nt, Human
cacuggcauuacaaauaggccca

SEQ ID NO: 888132 - RNA, 20 nt, Human
cacuucuauaaaaauaggag

SEQ ID NO: 888133 - RNA, 19 nt, Human
cagcagcagcgggaggagc

SEQ ID NO: 888134 - RNA, 24 nt, Human
cagcagcagcgggaggagcaggag

SEQ ID NO: 888135 - RNA, 24 nt, Human
cagcggcagcagcagcgggaggag

SEQ ID NO: 888136 - RNA, 23 nt, Human
cagcuaauccaagcggacuuaac

SEQ ID NO: 888137 - RNA, 21 nt, Human
ccucaaggccacauacauccu

SEQ ID NO: 888138 - RNA, 19 nt, Human
cgggaggagcaggaggcgg

SEQ ID NO: 888139 - RNA, 21 nt, Human
cgggaggagcaggaggcggcg

SEQ ID NO: 888140 - RNA, 23 nt, Human
cguuccaaagcugguaccuuuuc

SEQ ID NO: 888141 - RNA, 20 nt, Human
cuaccaagaaaauacaaaaa

SEQ ID NO: 888142 - RNA, 20 nt, Human
cuauaaaaauaggagccaca

SEQ ID NO: 888143 - RNA, 21 nt, Human
cuaugguuaaaaaaaaaaagc

SEQ ID NO: 888144 - RNA, 23 nt, Human
cucaaggccacauacauccugcu

SEQ ID NO: 888145 - RNA, 23 nt, Human
cugcaaaaacaaaaacaagcaaa

SEQ ID NO: 888146 - RNA, 22 nt, Human
gaagaaaccauagaagcuuggg

SEQ ID NO: 888147 - RNA, 26 nt, Human
gcaaaaacaaaaacaagcaaacaaac

SEQ ID NO: 888148 - RNA, 22 nt, Human
gcagcggcagcagcagcgggag

SEQ ID NO: 888149 - RNA, 23 nt, Human
gcaggaaaucuagaccuuccucu

SEQ ID NO: 888150 - RNA, 19 nt, Human
gcuauuauaauugguuaag

SEQ ID NO: 888151 - RNA, 18 nt, Human
ggaacuggaaaaauggca

SEQ ID NO: 888152 - RNA, 20 nt, Human
ggcaucuuuugucaaaaaua

SEQ ID NO: 888153 - RNA, 18 nt, Human
gggaggagcaggaggcgg

SEQ ID NO: 888154 - RNA, 21 nt, Human
gucacugcauuucuguaacaa

SEQ ID NO: 888155 - RNA, 19 nt, Human
uaaaaauaggagccacaca

SEQ ID NO: 888156 - RNA, 22 nt, Human
uaacaaaguaaugaaaggcaca

SEQ ID NO: 888157 - RNA, 27 nt, Human
uaacaaaguaaugaaaggcacagcuaa

SEQ ID NO: 888158 - RNA, 26 nt, Human
uaacaagauugagaaacauuauauga

SEQ ID NO: 888159 - RNA, 18 nt, Human
uaacuucugaaaaucccu

SEQ ID NO: 888160 - RNA, 19 nt, Human
uaagagcaggaaaucuaga

SEQ ID NO: 888161 - RNA, 23 nt, Human
uaagauuuucuuccucuuuuuuu

SEQ ID NO: 888162 - RNA, 25 nt, Human
uaagugacauacucauacccugaag

SEQ ID NO: 888163 - RNA, 19 nt, Human
uaauggagguuaaauuuaa

SEQ ID NO: 888164 - RNA, 24 nt, Human
uacaaaaaaaaaaaaaagguauuu

SEQ ID NO: 888165 - RNA, 21 nt, Human
uacaaaaacauaaggcuguaa

SEQ ID NO: 888166 - RNA, 18 nt, Human
uaccaagaaaauacaaaa

SEQ ID NO: 888167 - RNA, 20 nt, Human
uaccaagaaaauacaaaaac

SEQ ID NO: 888168 - RNA, 21 nt, Human
uaccaagaaaauacaaaaaca

SEQ ID NO: 888169 - RNA, 21 nt, Human
uaccucuaaaaaucaauucaa

SEQ ID NO: 888170 - RNA, 24 nt, Human
uacuucaaauuucuagaauggaau

SEQ ID NO: 888171 - RNA, 20 nt, Human
uacuucuaccugaauuggua

SEQ ID NO: 888172 - RNA, 24 nt, Human
uagcacuacaaacaauguguucaa

SEQ ID NO: 888173 - RNA, 21 nt, Human
uagcugcaaaaacaaaaacaa

SEQ ID NO: 888174 - RNA, 21 nt, Human
uagguagaacaaauuggucuu

SEQ ID NO: 888175 - RNA, 20 nt, Human
uauccucaaggccacauaca

SEQ ID NO: 888176 - RNA, 20 nt, Human
uaugguuaaaaaaaaaaagc

SEQ ID NO: 888177 - RNA, 19 nt, Human
ucaaaaauaucugaaaaca

SEQ ID NO: 888178 - RNA, 19 nt, Human
ucacugcauuucuguaaca

SEQ ID NO: 888179 - RNA, 24 nt, Human
ucagaaaggaaguuuucauuaccu

SEQ ID NO: 888180 - RNA, 23 nt, Human
ucauacuggaaauucuuaaccau

SEQ ID NO: 888181 - RNA, 18 nt, Human
uccaagcggacuuaaccc

SEQ ID NO: 888182 - RNA, 19 nt, Human
uccacccucacugucaaaa

SEQ ID NO: 888183 - RNA, 18 nt, Human
uccagggaagcagaaggu

SEQ ID NO: 888184 - RNA, 22 nt, Human
ucuaaaaagagugcugacugcc

SEQ ID NO: 888185 - RNA, 18 nt, Human
ucucuagcucuaacccaa

SEQ ID NO: 888186 - RNA, 22 nt, Human
ucugcaaaccacauccccuuua

SEQ ID NO: 888187 - RNA, 23 nt, Human
ucuuugaaguucagaaaaagcug

SEQ ID NO: 888188 - RNA, 21 nt, Human
ucuuuuuuuuuuuuuuuuaca

SEQ ID NO: 888189 - RNA, 20 nt, Human
ugaaaauaaagaaaaaaagc

SEQ ID NO: 888190 - RNA, 23 nt, Human
ugaacaaaaugcuuagugucaca

SEQ ID NO: 888191 - RNA, 20 nt, Human
ugacucagggcggcagcggc

SEQ ID NO: 888192 - RNA, 22 nt, Human
ugagguaguuagguaaacagua

SEQ ID NO: 888193 - RNA, 19 nt, Human
ugccuuaacacauccauga

SEQ ID NO: 888194 - RNA, 18 nt, Human
uggauagcacuacaaaca

SEQ ID NO: 888195 - RNA, 18 nt, Human
uggcauuacaaauaggcc

SEQ ID NO: 888196 - RNA, 19 nt, Human
uggguguggucauacugga

SEQ ID NO: 888197 - RNA, 18 nt, Human
ugucaaaaaaaguucaac

SEQ ID NO: 888198 - RNA, 19 nt, Human
ugucuuaguauaagucacu

SEQ ID NO: 888199 - RNA, 20 nt, Human
uuaaaagaaaacagcaucaa

SEQ ID NO: 888200 - RNA, 24 nt, Human
uuaaaagaaaacagcaucaaucac

SEQ ID NO: 888201 - RNA, 21 nt, Human
uuaacuaugucaccuaaaaca

SEQ ID NO: 888202 - RNA, 21 nt, Human
uuaagucucaugacuacaaua

SEQ ID NO: 888203 - RNA, 20 nt, Human
uuagguaaacaguacuaccc

SEQ ID NO: 888204 - RNA, 24 nt, Human
uuccaagaccuuaacacuaacuuc

SEQ ID NO: 888205 - RNA, 25 nt, Human
uuccaagaccuuaacacuaacuucu

SEQ ID NO: 888206 - RNA, 25 nt, Human
uucuuaaccauauaguugucuugcc

SEQ ID NO: 888207 - RNA, 24 nt, Human
uuggaacuggaaaaauggcauaaa

SEQ ID NO: 888208 - RNA, 18 nt, Human
uuuaagcaauaagaauuu

SEQ ID NO: 888209 - RNA, 24 nt, Human
uuucauagcuguacuccaagagcu

SEQ ID NO: 888210 - RNA, 27 nt, Human
uuuccacuuuaagucucaugacuacaa

SEQ ID NO: 888211 - RNA, 24 nt, Human
uuuuuuuuuuuuuuuacacuugau

SEQ ID NO: 888212 - RNA, 27 nt, Human
aaaaagaaaaacaacaacagcgaaaaa

SEQ ID NO: 888213 - RNA, 23 nt, Human
aaaaugaagcaggcacaacaaaa

SEQ ID NO: 888214 - RNA, 22 nt, Human
aaacaaaaauagaaaaagaaaa

SEQ ID NO: 888215 - RNA, 26 nt, Human
aaacaaaaauagaaaaagaaaaacaa

SEQ ID NO: 888216 - RNA, 22 nt, Human
aaaccuccacaggaaaagacuc

SEQ ID NO: 888217 - RNA, 24 nt, Human
aacacuacaagaaaaauacagaac

SEQ ID NO: 888218 - RNA, 19 nt, Human
aacacuucaccgacaaaca

SEQ ID NO: 888219 - RNA, 24 nt, Human
aagaaaaauacagaacacaaggcu

SEQ ID NO: 888220 - RNA, 26 nt, Human
aagcaggcacaacaaaauuaaaucca

SEQ ID NO: 888221 - RNA, 19 nt, Human
aagcaguggcgaccugggc

SEQ ID NO: 888222 - RNA, 20 nt, Human
acaggaaaagacucaccgaa

SEQ ID NO: 888223 - RNA, 21 nt, Human
accgaaauaucagaagcggcg

SEQ ID NO: 888224 - RNA, 23 nt, Human
acuacaagaaaaauacagaacac

SEQ ID NO: 888225 - RNA, 22 nt, Human
agaaaaacaacaacagcgaaaa

SEQ ID NO: 888226 - RNA, 23 nt, Human
agaaaaagaaaaacaacaacagc

SEQ ID NO: 888227 - RNA, 28 nt, Human
agaaaaagaaaaacaacaacagcgaaaa

SEQ ID NO: 888228 - RNA, 20 nt, Human
agaccaaaccuccacaggaa

SEQ ID NO: 888229 - RNA, 23 nt, Human
agagccggagacugcagagagcu

SEQ ID NO: 888230 - RNA, 18 nt, Human
aggagagagccggagacu

SEQ ID NO: 888231 - RNA, 23 nt, Human
aguaaacaaaaauagaaaaagaa

SEQ ID NO: 888232 - RNA, 18 nt, Human
auaaaauacaagagccua

SEQ ID NO: 888233 - RNA, 19 nt, Human
augaagcaggcacaacaaa

SEQ ID NO: 888234 - RNA, 18 nt, Human
auuaagcuacacaacacu

SEQ ID NO: 888235 - RNA, 21 nt, Human
caaaaugguaaagugaucacu

SEQ ID NO: 888236 - RNA, 20 nt, Human
caaacaaauauugaucucac

SEQ ID NO: 888237 - RNA, 21 nt, Human
caagaaaaaaacggugccgca

SEQ ID NO: 888238 - RNA, 19 nt, Human
caagaaaaauacagaacac

SEQ ID NO: 888239 - RNA, 21 nt, Human
caauaaccucaauauaacuaa

SEQ ID NO: 888240 - RNA, 25 nt, Human
cacaacacuauacuaguguuuuaaa

SEQ ID NO: 888241 - RNA, 23 nt, Human
caccgaaauaucagaagcggcgg

SEQ ID NO: 888242 - RNA, 24 nt, Human
cauccaaguuuuaaauucuacugc

SEQ ID NO: 888243 - RNA, 22 nt, Human
ccuccacaggaaaagacucacc

SEQ ID NO: 888244 - RNA, 19 nt, Human
ccugggcugggugcagagg

SEQ ID NO: 888245 - RNA, 20 nt, Human
cgacaaacaauaaccucaau

SEQ ID NO: 888246 - RNA, 20 nt, Human
cuacugcugcaagaaaaaaa

SEQ ID NO: 888247 - RNA, 22 nt, Human
cugcagugggcagaccuccucc

SEQ ID NO: 888248 - RNA, 22 nt, Human
gaaaaacaacaacagcgaaaac

SEQ ID NO: 888249 - RNA, 24 nt, Human
gaaaaacaacaacagcgaaaaccc

SEQ ID NO: 888250 - RNA, 21 nt, Human
gacaaaaagacuucagaagga

SEQ ID NO: 888251 - RNA, 22 nt, Human
gacuaaguaaacaaaaauagaa

SEQ ID NO: 888252 - RNA, 20 nt, Human
gaucacuuucaaugaaugau

SEQ ID NO: 888253 - RNA, 22 nt, Human
gcaaacuuuugaaaauacugga

SEQ ID NO: 888254 - RNA, 18 nt, Human
gcaagaaaaaaacggugc

SEQ ID NO: 888255 - RNA, 21 nt, Human
gcaguggcgaccugggcuggg

SEQ ID NO: 888256 - RNA, 19 nt, Human
gcugcagugggcagaccuc

SEQ ID NO: 888257 - RNA, 24 nt, Human
gcuguuauuaacaauaaauguagu

SEQ ID NO: 888258 - RNA, 20 nt, Human
guaauaggaaaagagaauua

SEQ ID NO: 888259 - RNA, 24 nt, Human
uaaguaaacaaaaauagaaaaaga

SEQ ID NO: 888260 - RNA, 25 nt, Human
uaauaggaaaagagaauuaaacacu

SEQ ID NO: 888261 - RNA, 26 nt, Human
uacacaacacuauacuaguguuuuaa

SEQ ID NO: 888262 - RNA, 21 nt, Human
uacaugacaaaaagacuucag

SEQ ID NO: 888263 - RNA, 19 nt, Human
ucaccgacaaacaauaacc

SEQ ID NO: 888264 - RNA, 24 nt, Human
ucacuuagcauuucugaucauuuc

SEQ ID NO: 888265 - RNA, 24 nt, Human
ucagaagcggcgguggucggaccu

SEQ ID NO: 888266 - RNA, 19 nt, Human
ucagaaggauuaagcuaca

SEQ ID NO: 888267 - RNA, 22 nt, Human
uccacaggaaaagacucaccga

SEQ ID NO: 888268 - RNA, 18 nt, Human
uccgcaagcagcuacugc

SEQ ID NO: 888269 - RNA, 25 nt, Human
uccgcaagcagcuacugcugcaaga

SEQ ID NO: 888270 - RNA, 21 nt, Human
ugaaaauacugugacuaacac

SEQ ID NO: 888271 - RNA, 25 nt, Human
ugaaagaacacgaaauaucuuuuca

SEQ ID NO: 888272 - RNA, 21 nt, Human
ugcagugggcagaccuccucc

SEQ ID NO: 888273 - RNA, 21 nt, Human
uggcuaccacagagaucggga

SEQ ID NO: 888274 - RNA, 23 nt, Human
ugugacuaacacuucaccgacaa

SEQ ID NO: 888275 - RNA, 20 nt, Human
uuaacuaacacuacaagaaa

SEQ ID NO: 888276 - RNA, 21 nt, Human
uuaguuuuugaacuuuucuua

SEQ ID NO: 888277 - RNA, 19 nt, Human
uuauucuuuuuauuuugca

SEQ ID NO: 888278 - RNA, 20 nt, Human
uuauuuaucacaguuacaua

SEQ ID NO: 888279 - RNA, 22 nt, Human
uuucagggccauguauacucug

SEQ ID NO: 888280 - RNA, 24 nt, Human
uuucagggccauguauacucugcu

SEQ ID NO: 888281 - RNA, 22 nt, Human
uuugaaaauacugugacuaaca

SEQ ID NO: 888282 - RNA, 18 nt, Human
uuuuuuuuuuuuuuuuug

SEQ ID NO: 888283 - RNA, 21 nt, Human
aaacagcaggucucagcggcu

SEQ ID NO: 888284 - RNA, 22 nt, Human
accucaaagcauuagggaagga

SEQ ID NO: 888285 - RNA, 18 nt, Human
agcagguguggggcuggg

SEQ ID NO: 888286 - RNA, 25 nt, Human
agggaaggagcagguguggggcugg

SEQ ID NO: 888287 - RNA, 24 nt, Human
aucccuaagcuccagggcccaggg

SEQ ID NO: 888288 - RNA, 22 nt, Human
cacaaagggacucagcaaagcg

SEQ ID NO: 888289 - RNA, 19 nt, Human
cagcaaagcgccugacccu

SEQ ID NO: 888290 - RNA, 19 nt, Human
cagcagaaacagcaggucu

SEQ ID NO: 888291 - RNA, 18 nt, Human
cagcaggucucagcggcu

SEQ ID NO: 888292 - RNA, 18 nt, Human
cagggcccagggucuaac

SEQ ID NO: 888293 - RNA, 23 nt, Human
cccccagcagaaacagcaggucu

SEQ ID NO: 888294 - RNA, 18 nt, Human
cccuaagcuccagggccc

SEQ ID NO: 888295 - RNA, 20 nt, Human
cccugacccugggaagacuc

SEQ ID NO: 888296 - RNA, 18 nt, Human
ccugacccugacccuggg

SEQ ID NO: 888297 - RNA, 20 nt, Human
cgggagccucccggggcugg

SEQ ID NO: 888298 - RNA, 22 nt, Human
cggggcugcaggaagcuccggg

SEQ ID NO: 888299 - RNA, 19 nt, Human
cugcagcuuccaaccaaga

SEQ ID NO: 888300 - RNA, 18 nt, Human
cuggggggcugggugggg

SEQ ID NO: 888301 - RNA, 18 nt, Human
gaagaggagccugccccc

SEQ ID NO: 888302 - RNA, 30 nt, Human
gccugacccugacccugggaagacucagcc

SEQ ID NO: 888303 - RNA, 24 nt, Human
gggaaggagcagguguggggcugg

SEQ ID NO: 888304 - RNA, 20 nt, Human
gggagccucccggggcuggg

SEQ ID NO: 888305 - RNA, 23 nt, Human
gggcacuggggggcugggugggg

SEQ ID NO: 888306 - RNA, 18 nt, Human
gggcugggggaagaggag

SEQ ID NO: 888307 - RNA, 19 nt, Human
gggcugggguggggagaau

SEQ ID NO: 888308 - RNA, 24 nt, Human
guuuuuuuuuuuuuuuuuugcaaa

SEQ ID NO: 888309 - RNA, 21 nt, Human
guuuuuuuuuuuuuuuuuugg

SEQ ID NO: 888310 - RNA, 19 nt, Human
ucagcaaagcgccugaccc

SEQ ID NO: 888311 - RNA, 24 nt, Human
uccaaccaagaaaaccucaaagca

SEQ ID NO: 888312 - RNA, 18 nt, Human
ucccuaagcuccagggcc

SEQ ID NO: 888313 - RNA, 18 nt, Human
uccgggagccucccgggg

SEQ ID NO: 888314 - RNA, 29 nt, Human
ucucucugagcagaugggacagcgaagac

SEQ ID NO: 888315 - RNA, 23 nt, Human
ugacccugacccugggaagacuc

SEQ ID NO: 888316 - RNA, 21 nt, Human
ugggacagcgaagacgggcac

SEQ ID NO: 888317 - RNA, 18 nt, Human
uuagagcuuggcucucuc

SEQ ID NO: 888318 - RNA, 22 nt, Human
aaaaaaaaaacaaaaaacaaaa

SEQ ID NO: 888319 - RNA, 26 nt, Human
aaaaaaaaaacaaaaaacaaaacaaa

SEQ ID NO: 888320 - RNA, 23 nt, Human
aaaaaaaacaaaaaacaaaacaa

SEQ ID NO: 888321 - RNA, 28 nt, Human
aaacaaaaaacaaaacaaacaaacaaac

SEQ ID NO: 888322 - RNA, 21 nt, Human
aaacaaacaaaaagguauuca

SEQ ID NO: 888323 - RNA, 29 nt, Human
aaacaaacaaaaagguauucauuacccag

SEQ ID NO: 888324 - RNA, 21 nt, Human
aaacaaacaaacaaaaaggua

SEQ ID NO: 888325 - RNA, 28 nt, Human
aacaaacaaacaaacaaacaaaaaggua

SEQ ID NO: 888326 - RNA, 20 nt, Human
aacauggagcaacuccaucu

SEQ ID NO: 888327 - RNA, 25 nt, Human
acaaaacaaacaaacaaacaaacaa

SEQ ID NO: 888328 - RNA, 26 nt, Human
acaaaacaaacaaacaaacaaacaaa

SEQ ID NO: 888329 - RNA, 18 nt, Human
acaaacaaacaaacaaac

SEQ ID NO: 888330 - RNA, 18 nt, Human
acccugacaacaaacaau

SEQ ID NO: 888331 - RNA, 23 nt, Human
acccuuaaaaaaaaaaacaaaaa

SEQ ID NO: 888332 - RNA, 24 nt, Human
acuccagccugggcaaaagaguga

SEQ ID NO: 888333 - RNA, 18 nt, Human
acugcacuccagccuggg

SEQ ID NO: 888334 - RNA, 24 nt, Human
acugcacuccagccugggcaaaag

SEQ ID NO: 888335 - RNA, 24 nt, Human
acugcacuccagccugggcaaaag

SEQ ID NO: 888336 - RNA, 20 nt, Human
agaaauauaucuguauuaga

SEQ ID NO: 888337 - RNA, 23 nt, Human
agacaauuuuccuuguaaacacc

SEQ ID NO: 888338 - RNA, 26 nt, Human
aggcagauggcuugagcuuaggaguu

SEQ ID NO: 888339 - RNA, 23 nt, Human
aggcaggcagauggcuugagcuu

SEQ ID NO: 888340 - RNA, 21 nt, Human
aguucuggaagacaauuuucc

SEQ ID NO: 888341 - RNA, 22 nt, Human
aucccagcacuuugggaggcca

SEQ ID NO: 888342 - RNA, 23 nt, Human
augucuacauauagcuuguucau

SEQ ID NO: 888343 - RNA, 24 nt, Human
auugugccacugcacuccagccug

SEQ ID NO: 888344 - RNA, 19 nt, Human
caaacaauauccccaaguc

SEQ ID NO: 888345 - RNA, 24 nt, Human
caaacaauauccccaaguccuggu

SEQ ID NO: 888346 - RNA, 27 nt, Human
caaaugucuacauauagcuuguucaua

SEQ ID NO: 888347 - RNA, 24 nt, Human
caacaaaaaaaauaaaaaaaaaau

SEQ ID NO: 888348 - RNA, 25 nt, Human
caacauggagcaacuccaucucaac

SEQ ID NO: 888349 - RNA, 31 nt, Human
caacuccaucucaacaaaaaaaauaaaaaaa

SEQ ID NO: 888350 - RNA, 19 nt, Human
cacacagaauaacccugac

SEQ ID NO: 888351 - RNA, 24 nt, Human
cacacagaauaacccugacaacaa

SEQ ID NO: 888352 - RNA, 24 nt, Human
cacagaauaacccugacaacaaac

SEQ ID NO: 888353 - RNA, 22 nt, Human
cacuccagccugggcaaaagag

SEQ ID NO: 888354 - RNA, 22 nt, Human
cacuccagccugggcaaaagag

SEQ ID NO: 888355 - RNA, 24 nt, Human
cacuccagccugggcaaaagagug

SEQ ID NO: 888356 - RNA, 19 nt, Human
cacugcacuccagccuggg

SEQ ID NO: 888357 - RNA, 21 nt, Human
cacugcacuccagccugggca

SEQ ID NO: 888358 - RNA, 22 nt, Human
cacugcacuccagccugggcaa

SEQ ID NO: 888359 - RNA, 23 nt, Human
cacugcacuccagccugggcaaa

SEQ ID NO: 888360 - RNA, 18 nt, Human
cagagaggacugaagaua

SEQ ID NO: 888361 - RNA, 24 nt, Human
cagcacuuugggaggccaaggcag

SEQ ID NO: 888362 - RNA, 25 nt, Human
cagcacuuugggaggccaaggcagg

SEQ ID NO: 888363 - RNA, 18 nt, Human
cauuaauaaaaaugaggu

SEQ ID NO: 888364 - RNA, 27 nt, Human
cauucuucccuuucagcuaaguuuuca

SEQ ID NO: 888365 - RNA, 20 nt, Human
ccacugcacuccagccuggg

SEQ ID NO: 888366 - RNA, 20 nt, Human
ccacugcacuccagccuggg

SEQ ID NO: 888367 - RNA, 21 nt, Human
ccacugcacuccagccugggc

SEQ ID NO: 888368 - RNA, 24 nt, Human
ccacugcacuccagccugggcaaa

SEQ ID NO: 888369 - RNA, 26 nt, Human
cccugacaacaaacaauauccccaag

SEQ ID NO: 888370 - RNA, 22 nt, Human
ccucaccgugggcaggaagggu

SEQ ID NO: 888371 - RNA, 21 nt, Human
ccugacaacaaacaauauccc

SEQ ID NO: 888372 - RNA, 30 nt, Human
cggauaucccuaaucuauucccaaguccuu

SEQ ID NO: 888373 - RNA, 20 nt, Human
cuaaaggauacaagcugcaa

SEQ ID NO: 888374 - RNA, 18 nt, Human
cucaagauagaaacuuac

SEQ ID NO: 888375 - RNA, 21 nt, Human
cucauucuuacaauguuagaa

SEQ ID NO: 888376 - RNA, 22 nt, Human
cugacaacaaacaauaucccca

SEQ ID NO: 888377 - RNA, 21 nt, Human
cugacguggagagagggugac

SEQ ID NO: 888378 - RNA, 21 nt, Human
cuuguaaacaccaaguuuugc

SEQ ID NO: 888379 - RNA, 18 nt, Human
gagccgugauugugccac

SEQ ID NO: 888380 - RNA, 21 nt, Human
gauugugccacugcacuccag

SEQ ID NO: 888381 - RNA, 22 nt, Human
gccacugcacuccagccugggc

SEQ ID NO: 888382 - RNA, 24 nt, Human
gccacugcacuccagccugggcaa

SEQ ID NO: 888383 - RNA, 23 nt, Human
ggaaaaagaaaauguauaaaugu

SEQ ID NO: 888384 - RNA, 21 nt, Human
ggcaggaagggugaaggaggc

SEQ ID NO: 888385 - RNA, 23 nt, Human
gguggcuuaugucuacaauccca

SEQ ID NO: 888386 - RNA, 24 nt, Human
gguggcuuaugucuacaaucccag

SEQ ID NO: 888387 - RNA, 18 nt, Human
gugaugacaguggaguuc

SEQ ID NO: 888388 - RNA, 24 nt, Human
uaaaaaauuuuuucccccagacuu

SEQ ID NO: 888389 - RNA, 23 nt, Human
uaaauagucuacaguaucuuuaa

SEQ ID NO: 888390 - RNA, 22 nt, Human
uaaaugcaaaugucuacauaua

SEQ ID NO: 888391 - RNA, 23 nt, Human
uaauaaaaaugaggugcuaccug

SEQ ID NO: 888392 - RNA, 22 nt, Human
uacaagcugcaaugaugggauc

SEQ ID NO: 888393 - RNA, 25 nt, Human
uacaagcugcaaugaugggaucuuu

SEQ ID NO: 888394 - RNA, 21 nt, Human
uaggaaauaacuauaaaggau

SEQ ID NO: 888395 - RNA, 24 nt, Human
uauccccaaguccugguuauucaa

SEQ ID NO: 888396 - RNA, 24 nt, Human
uaugucuacaaucccagcacuuug

SEQ ID NO: 888397 - RNA, 25 nt, Human
uauucuacucaucagaguugggaaa

SEQ ID NO: 888398 - RNA, 23 nt, Human
uccagccugggcaaaagagugag

SEQ ID NO: 888399 - RNA, 24 nt, Human
uccagccugggcaaaagagugaga

SEQ ID NO: 888400 - RNA, 20 nt, Human
ucccuuuucuuuucagcaag

SEQ ID NO: 888401 - RNA, 24 nt, Human
ucccuuuucuuuucagcaagcaaa

SEQ ID NO: 888402 - RNA, 20 nt, Human
ucuacaguaucuuuaaagua

SEQ ID NO: 888403 - RNA, 23 nt, Human
ugaaacaaauauuccuuaccaca

SEQ ID NO: 888404 - RNA, 21 nt, Human
ugaagauauuuauagaucacu

SEQ ID NO: 888405 - RNA, 26 nt, Human
ugaaguacggauaucccuaaucuauu

SEQ ID NO: 888406 - RNA, 18 nt, Human
ugacaguggaguucugga

SEQ ID NO: 888407 - RNA, 24 nt, Human
ugagaacagccugugcaacaugga

SEQ ID NO: 888408 - RNA, 25 nt, Human
ugcaaugaugggaucuuugaaacac

SEQ ID NO: 888409 - RNA, 18 nt, Human
ugcacuucaucaucaccu

SEQ ID NO: 888410 - RNA, 24 nt, Human
ugccacugcacuccagccugggca

SEQ ID NO: 888411 - RNA, 21 nt, Human
uggagggaagaaauauaucug

SEQ ID NO: 888412 - RNA, 22 nt, Human
uggcuuaugucuacaaucccag

SEQ ID NO: 888413 - RNA, 24 nt, Human
uggcuuaugucuacaaucccagca

SEQ ID NO: 888414 - RNA, 24 nt, Human
ugggaaaaauaggaauaaagcaga

SEQ ID NO: 888415 - RNA, 18 nt, Human
ugggagccgugauugugc

SEQ ID NO: 888416 - RNA, 19 nt, Human
ugggaggccaaggcaggca

SEQ ID NO: 888417 - RNA, 21 nt, Human
ugggcaaaagagugagacccu

SEQ ID NO: 888418 - RNA, 24 nt, Human
uggucaagaaccaaguagauuuga

SEQ ID NO: 888419 - RNA, 21 nt, Human
uguaacagaacauugaauauu

SEQ ID NO: 888420 - RNA, 19 nt, Human
ugugaaacaaauauuccuu

SEQ ID NO: 888421 - RNA, 20 nt, Human
uuccauacagaaauaccgua

SEQ ID NO: 888422 - RNA, 20 nt, Human
uucccccagacuuuaauggg

SEQ ID NO: 888423 - RNA, 24 nt, Human
uugcacuuuggacuaugcucucaa

SEQ ID NO: 888424 - RNA, 23 nt, Human
uugugccacugcacuccagccug

SEQ ID NO: 888425 - RNA, 27 nt, Human
uuuuaaauauugucuuucuaaaaccaa

SEQ ID NO: 888426 - RNA, 21 nt, Human
uuuuuuuuuuuuuugauuugg

SEQ ID NO: 888427 - RNA, 25 nt, Human
uuuuuuuuuuuuuuuuugauuuggg

SEQ ID NO: 888428 - RNA, 19 nt, Human
uuuuuuuuuuuuuuuuuug

SEQ ID NO: 888429 - RNA, 27 nt, Human
uuuuuuuuuuuuuuuuuuuuuuugggg

SEQ ID NO: 888430 - RNA, 25 nt, Human
aagcaccgggagacugggacaccuc

SEQ ID NO: 888431 - RNA, 18 nt, Human
aggccgggcgccucagcc

SEQ ID NO: 888432 - RNA, 19 nt, Human
cacugcccgccgcccgcgg

SEQ ID NO: 888433 - RNA, 18 nt, Human
ccacugcccgccgcccgc

SEQ ID NO: 888434 - RNA, 24 nt, Human
ccccaagagcagcuggaaggcccu

SEQ ID NO: 888435 - RNA, 23 nt, Human
cccgcggcccuuuguuguccucc

SEQ ID NO: 888436 - RNA, 22 nt, Human
cccuuuguuguccucccccgac

SEQ ID NO: 888437 - RNA, 22 nt, Human
cuggccccaagagcagcuggaa

SEQ ID NO: 888438 - RNA, 24 nt, Human
cuuggcucuggccccaagagcagc

SEQ ID NO: 888439 - RNA, 21 nt, Human
gcucuggccccaagagcagcu

SEQ ID NO: 888440 - RNA, 20 nt, Human
uuuuuuuuuuuuugagcggu

SEQ ID NO: 888441 - RNA, 22 nt, Human
uuuuuuuuuuuuuuuugagcgg

SEQ ID NO: 888442 - RNA, 18 nt, Human
uuuuuuuuuuuuuuuuug

SEQ ID NO: 888443 - RNA, 23 nt, Human
aaaaagaauccuccaaaagugaa

SEQ ID NO: 888444 - RNA, 22 nt, Human
accaccuuuccugccuuuucag

SEQ ID NO: 888445 - RNA, 18 nt, Human
accuccacugcagugccc

SEQ ID NO: 888446 - RNA, 21 nt, Human
acucaagaaccaccuuuccug

SEQ ID NO: 888447 - RNA, 23 nt, Human
acugcagugcccugcuuuucuag

SEQ ID NO: 888448 - RNA, 25 nt, Human
acuucugauccagccucuaaggcug

SEQ ID NO: 888449 - RNA, 24 nt, Human
agacugaagagccuccuccacuag

SEQ ID NO: 888450 - RNA, 22 nt, Human
agcagacgauccuucagccucc

SEQ ID NO: 888451 - RNA, 20 nt, Human
agccucuaaggcugaggccu

SEQ ID NO: 888452 - RNA, 19 nt, Human
agcucccugggcuaccuug

SEQ ID NO: 888453 - RNA, 22 nt, Human
agcucuagguucccaaucuccu

SEQ ID NO: 888454 - RNA, 21 nt, Human
aucaggagacugaagagccuc

SEQ ID NO: 888455 - RNA, 20 nt, Human
aucuccacugccuccguucc

SEQ ID NO: 888456 - RNA, 23 nt, Human
auuuucuuuaucauccucuucca

SEQ ID NO: 888457 - RNA, 21 nt, Human
caaaaacacuuucccuuggga

SEQ ID NO: 888458 - RNA, 20 nt, Human
caaaaagaauccuccaaaag

SEQ ID NO: 888459 - RNA, 22 nt, Human
caagcucuagguucccaaucuc

SEQ ID NO: 888460 - RNA, 21 nt, Human
cacccucuuuuaucuguucgu

SEQ ID NO: 888461 - RNA, 19 nt, Human
caccuccggugacucuuca

SEQ ID NO: 888462 - RNA, 24 nt, Human
cagcagacgauccuucagccuccu

SEQ ID NO: 888463 - RNA, 23 nt, Human
cagccuccacuguccccuccacu

SEQ ID NO: 888464 - RNA, 19 nt, Human
cagccucuguugucaccuc

SEQ ID NO: 888465 - RNA, 18 nt, Human
cagugcccugcuuuucua

SEQ ID NO: 888466 - RNA, 19 nt, Human
caucuucuguuuuuucucc

SEQ ID NO: 888467 - RNA, 25 nt, Human
cauuauauacaaaaacacuuucccu

SEQ ID NO: 888468 - RNA, 20 nt, Human
ccgguuuccucuucuuucug

SEQ ID NO: 888469 - RNA, 21 nt, Human
ccucuaaggcugaggccucug

SEQ ID NO: 888470 - RNA, 19 nt, Human
ccucuaguccugagccauc

SEQ ID NO: 888471 - RNA, 24 nt, Human
ccucugcagccucuguugucaccu

SEQ ID NO: 888472 - RNA, 20 nt, Human
cucaauuucuuucuuguauu

SEQ ID NO: 888473 - RNA, 21 nt, Human
cuccaaaagugaaaaaauaca

SEQ ID NO: 888474 - RNA, 20 nt, Human
cuccacuguccccuccacug

SEQ ID NO: 888475 - RNA, 23 nt, Human
cuccuccacuaggagugaaaccu

SEQ ID NO: 888476 - RNA, 20 nt, Human
cuccuccauguuuuccaaaa

SEQ ID NO: 888477 - RNA, 18 nt, Human
cuccucuggcucgucccc

SEQ ID NO: 888478 - RNA, 24 nt, Human
cuccuucuuccucuuccacaugca

SEQ ID NO: 888479 - RNA, 18 nt, Human
cucuagguucccaaucuc

SEQ ID NO: 888480 - RNA, 24 nt, Human
cucuuccacaugcacaccauccaa

SEQ ID NO: 888481 - RNA, 18 nt, Human
cucuucuacagacagcuu

SEQ ID NO: 888482 - RNA, 18 nt, Human
cuggcucguccccaccca

SEQ ID NO: 888483 - RNA, 24 nt, Human
cugggcaacauaaagcugggcuuu

SEQ ID NO: 888484 - RNA, 19 nt, Human
cuguagccuccugcccagg

SEQ ID NO: 888485 - RNA, 21 nt, Human
gaguagcuuucagagccaguu

SEQ ID NO: 888486 - RNA, 19 nt, Human
gccugggcaacauaaagcu

SEQ ID NO: 888487 - RNA, 18 nt, Human
gcucuagguucccaaucu

SEQ ID NO: 888488 - RNA, 24 nt, Human
gcucugaccuucuccucuaguccu

SEQ ID NO: 888489 - RNA, 24 nt, Human
ggaacuccuccacagcuugcacau

SEQ ID NO: 888490 - RNA, 20 nt, Human
ggaagcaccaucuguuggcu

SEQ ID NO: 888491 - RNA, 19 nt, Human
ggacagcaucuccacugcc

SEQ ID NO: 888492 - RNA, 19 nt, Human
ggacuggaacuccuccaca

SEQ ID NO: 888493 - RNA, 18 nt, Human
guagagcucuccaccaga

SEQ ID NO: 888494 - RNA, 22 nt, Human
guagagcucuccaccagaguag

SEQ ID NO: 888495 - RNA, 20 nt, Human
guauucagcagacgauccuu

SEQ ID NO: 888496 - RNA, 23 nt, Human
guccugagccaucuuuuguuucu

SEQ ID NO: 888497 - RNA, 23 nt, Human
ucaacucuuuccuugcuuccuca

SEQ ID NO: 888498 - RNA, 19 nt, Human
ucagagccaguucagcuac

SEQ ID NO: 888499 - RNA, 24 nt, Human
ucagccuccuccuccauguuuucc

SEQ ID NO: 888500 - RNA, 21 nt, Human
ucagcuacauucccaguaguc

SEQ ID NO: 888501 - RNA, 20 nt, Human
uccaaaacuucauuuccacu

SEQ ID NO: 888502 - RNA, 22 nt, Human
uccacuggggacagcaucucca

SEQ ID NO: 888503 - RNA, 20 nt, Human
uccagccuccacuguccccu

SEQ ID NO: 888504 - RNA, 19 nt, Human
ucccaaucuccuccucuuc

SEQ ID NO: 888505 - RNA, 22 nt, Human
ucccaaucuccuccucuucauu

SEQ ID NO: 888506 - RNA, 24 nt, Human
ucccaggcaagcucuagguuccca

SEQ ID NO: 888507 - RNA, 20 nt, Human
ucccugggcuaccuugguau

SEQ ID NO: 888508 - RNA, 18 nt, Human
ucuacagacagcuuaguc

SEQ ID NO: 888509 - RNA, 22 nt, Human
ucuagaaucaccacagucugcu

SEQ ID NO: 888510 - RNA, 21 nt, Human
ucuccuccucuucauuuucuu

SEQ ID NO: 888511 - RNA, 22 nt, Human
ucuccucuaguccugagccauc

SEQ ID NO: 888512 - RNA, 21 nt, Human
ucugaccuucuccucuagucc

SEQ ID NO: 888513 - RNA, 20 nt, Human
ucugcagccucuguugucac

SEQ ID NO: 888514 - RNA, 22 nt, Human
ucugcucuucugaaacuucuuu

SEQ ID NO: 888515 - RNA, 18 nt, Human
ucuucacccucuuuuauc

SEQ ID NO: 888516 - RNA, 20 nt, Human
ucuuuccagggacucuguuc

SEQ ID NO: 888517 - RNA, 26 nt, Human
ucuuuccagggacucuguuccuccgg

SEQ ID NO: 888518 - RNA, 18 nt, Human
ugaaaccugaaguagagc

SEQ ID NO: 888519 - RNA, 22 nt, Human
ugaacugugccacugccucauc

SEQ ID NO: 888520 - RNA, 19 nt, Human
ugacgguccauugaccgca

SEQ ID NO: 888521 - RNA, 24 nt, Human
ugaggccucugcagccucuguugu

SEQ ID NO: 888522 - RNA, 23 nt, Human
ugcagccucuguugucaccuccg

SEQ ID NO: 888523 - RNA, 20 nt, Human
ugcccaggcuuuucagagac

SEQ ID NO: 888524 - RNA, 21 nt, Human
ugcccugcuuuucuagaauca

SEQ ID NO: 888525 - RNA, 27 nt, Human
ugccucagacucuucuacagacagcuu

SEQ ID NO: 888526 - RNA, 18 nt, Human
ugccugggcaacauaaag

SEQ ID NO: 888527 - RNA, 21 nt, Human
ugccugggcaacauaaagcug

SEQ ID NO: 888528 - RNA, 24 nt, Human
ugcucugaccuucuccucuagucc

SEQ ID NO: 888529 - RNA, 22 nt, Human
uggggacagcaucuccacugcc

SEQ ID NO: 888530 - RNA, 20 nt, Human
ugucagucuuucuauagaag

SEQ ID NO: 888531 - RNA, 20 nt, Human
uguccccuccacugccgccc

SEQ ID NO: 888532 - RNA, 18 nt, Human
uucaauagauuugcugaa

SEQ ID NO: 888533 - RNA, 18 nt, Human
uucagagccaguucagcu

SEQ ID NO: 888534 - RNA, 22 nt, Human
uucagagguaacuaccuucucc

SEQ ID NO: 888535 - RNA, 18 nt, Human
uucauuagcagcuaucug

SEQ ID NO: 888536 - RNA, 19 nt, Human
uucauuagcagcuaucuga

SEQ ID NO: 888537 - RNA, 19 nt, Human
uuccaaaacuucauuucca

SEQ ID NO: 888538 - RNA, 22 nt, Human
uucuagaaucaccacagucugc

SEQ ID NO: 888539 - RNA, 18 nt, Human
uucuugaagagacuuguu

SEQ ID NO: 888540 - RNA, 19 nt, Human
uugcuuccucaucuaugcu

SEQ ID NO: 888541 - RNA, 20 nt, Human
uugggucuaaagacucugcu

SEQ ID NO: 888542 - RNA, 18 nt, Human
uuuccaaaacuucauuuc

SEQ ID NO: 888543 - RNA, 22 nt, Human
uuucccaauacaccauucucga

SEQ ID NO: 888544 - RNA, 18 nt, Human
uuucugucagucuuucua

SEQ ID NO: 888545 - RNA, 23 nt, Human
uuugcaucuucugucuuuucugu

SEQ ID NO: 888546 - RNA, 18 nt, Human
uuuggcauuucuucagcc

SEQ ID NO: 888547 - RNA, 21 nt, Human
uuuggcauuucuucagccuua

SEQ ID NO: 888548 - RNA, 22 nt, Human
uuuucuccuucuuccucuucca

SEQ ID NO: 888549 - RNA, 21 nt, Human
aagaccccgcgcccgcccugc

SEQ ID NO: 888550 - RNA, 19 nt, Human
aagcuucaauuaacaguuc

SEQ ID NO: 888551 - RNA, 21 nt, Human
aucugccuaagaaccacugcc

SEQ ID NO: 888552 - RNA, 22 nt, Human
ccgccgccgcuuccgaagaccg

SEQ ID NO: 888553 - RNA, 25 nt, Human
ccgccgccgcuuccgaagaccguuc

SEQ ID NO: 888554 - RNA, 18 nt, Human
ccgcgcccgcccugccgg

SEQ ID NO: 888555 - RNA, 19 nt, Human
ccugccggaagucucccgg

SEQ ID NO: 888556 - RNA, 22 nt, Human
cgccaagaccccgcgcccgccc

SEQ ID NO: 888557 - RNA, 23 nt, Human
cgccaagaccccgcgcccgcccu

SEQ ID NO: 888558 - RNA, 19 nt, Human
cucaggcacagaacugagg

SEQ ID NO: 888559 - RNA, 21 nt, Human
cuggagcaagucuuuucccua

SEQ ID NO: 888560 - RNA, 19 nt, Human
gagacuggagcaagucuuu

SEQ ID NO: 888561 - RNA, 20 nt, Human
gcagcagugguucucaggca

SEQ ID NO: 888562 - RNA, 22 nt, Human
uaaaauaaauugauaaccugua

SEQ ID NO: 888563 - RNA, 25 nt, Human
uaaauugauaaccuguauuguaaua

SEQ ID NO: 888564 - RNA, 24 nt, Human
uacuuuucuccuaauagagcucca

SEQ ID NO: 888565 - RNA, 18 nt, Human
uccauaaagcaucuagag

SEQ ID NO: 888566 - RNA, 19 nt, Human
ucgccaagaccccgcgccc

SEQ ID NO: 888567 - RNA, 23 nt, Human
ugaggaggagacuggagcaaguc

SEQ ID NO: 888568 - RNA, 23 nt, Human
ugauauugcuaacuggaaacaau

SEQ ID NO: 888569 - RNA, 22 nt, Human
uggaaacaaugagauuuaaaau

SEQ ID NO: 888570 - RNA, 21 nt, Human
uuaaagcuucaauuaacaguu

SEQ ID NO: 888571 - RNA, 20 nt, Human
uuccuucugaccuagcugcc

SEQ ID NO: 888572 - RNA, 20 nt, Human
uucgccaagaccccgcgccc

SEQ ID NO: 888573 - RNA, 19 nt, Human
uucuccuaauagagcucca

SEQ ID NO: 888574 - RNA, 18 nt, Human
uuuuuuuuuuuuagaguc

SEQ ID NO: 888575 - RNA, 29 nt, Human
aaacaagaagucaagggaaaggggacccc

SEQ ID NO: 888576 - RNA, 24 nt, Human
aaagaggagaggggagaggaggaa

SEQ ID NO: 888577 - RNA, 22 nt, Human
aacgcuuuguugaaggaacuuc

SEQ ID NO: 888578 - RNA, 24 nt, Human
aagguacagcaccaagaaccuguc

SEQ ID NO: 888579 - RNA, 18 nt, Human
acaaguucccaaacgcca

SEQ ID NO: 888580 - RNA, 20 nt, Human
acuugauggagggugaagca

SEQ ID NO: 888581 - RNA, 18 nt, Human
agaggaggccaguaaaug

SEQ ID NO: 888582 - RNA, 18 nt, Human
agaggggagaggaggagc

SEQ ID NO: 888583 - RNA, 18 nt, Human
aggaacugcugcaguguu

SEQ ID NO: 888584 - RNA, 18 nt, Human
aggagaggggagaggagg

SEQ ID NO: 888585 - RNA, 23 nt, Human
aggaguuguuggcaguggugaug

SEQ ID NO: 888586 - RNA, 19 nt, Human
aucaucuuuuccccaaagu

SEQ ID NO: 888587 - RNA, 21 nt, Human
auggagggugaagcagucucu

SEQ ID NO: 888588 - RNA, 21 nt, Human
caaagguacagcaccaagaac

SEQ ID NO: 888589 - RNA, 19 nt, Human
caacucuuuuuuuucuucu

SEQ ID NO: 888590 - RNA, 19 nt, Human
caaguucccaaacgccacc

SEQ ID NO: 888591 - RNA, 25 nt, Human
cagaucucccucacaagacugucuc

SEQ ID NO: 888592 - RNA, 22 nt, Human
cagcaccaagaaccugucccuc

SEQ ID NO: 888593 - RNA, 21 nt, Human
cagccuaguguggggggcugg

SEQ ID NO: 888594 - RNA, 20 nt, Human
cauccuugcugcugccgauu

SEQ ID NO: 888595 - RNA, 24 nt, Human
ccaagaaccugucccuccucuuuc

SEQ ID NO: 888596 - RNA, 24 nt, Human
cccaaacgccaccccaccauuccu

SEQ ID NO: 888597 - RNA, 22 nt, Human
cccagaaucaucuuuuccccaa

SEQ ID NO: 888598 - RNA, 20 nt, Human
cccccagaucucccucacaa

SEQ ID NO: 888599 - RNA, 20 nt, Human
cccucggugacaucagugcc

SEQ ID NO: 888600 - RNA, 24 nt, Human
ccgggggugacagugauugccgaa

SEQ ID NO: 888601 - RNA, 18 nt, Human
ccuccucccuccuguucu

SEQ ID NO: 888602 - RNA, 19 nt, Human
ccuccuggggcuggagagc

SEQ ID NO: 888603 - RNA, 20 nt, Human
ccuccuucuucucuggcucc

SEQ ID NO: 888604 - RNA, 20 nt, Human
ccuccuucuucucuggcucc

SEQ ID NO: 888605 - RNA, 18 nt, Human
ccuguucuccuccugggg

SEQ ID NO: 888606 - RNA, 20 nt, Human
cgaaguucuuuggguguggu

SEQ ID NO: 888607 - RNA, 23 nt, Human
cucaggguugcuugugagaauca

SEQ ID NO: 888608 - RNA, 25 nt, Human
cuccgauaccuccuucuucucuggc

SEQ ID NO: 888609 - RNA, 22 nt, Human
cucugggggaggaguuguuggc

SEQ ID NO: 888610 - RNA, 20 nt, Human
cucuuuuuuuucuucuuuuu

SEQ ID NO: 888611 - RNA, 19 nt, Human
cugggggaggaguuguugg

SEQ ID NO: 888612 - RNA, 19 nt, Human
cuuucaucuccuccucccu

SEQ ID NO: 888613 - RNA, 23 nt, Human
gacuugggccccuuuuuuauacu

SEQ ID NO: 888614 - RNA, 18 nt, Human
gagaggggagaggaggag

SEQ ID NO: 888615 - RNA, 18 nt, Human
gagaugcuaucugaggag

SEQ ID NO: 888616 - RNA, 22 nt, Human
gaggaggagcuaagauagcuga

SEQ ID NO: 888617 - RNA, 24 nt, Human
gccaacucuuuuuuuucuucuuuu

SEQ ID NO: 888618 - RNA, 18 nt, Human
gcuagugaugcuguugag

SEQ ID NO: 888619 - RNA, 19 nt, Human
gcucccugaaugacugccu

SEQ ID NO: 888620 - RNA, 24 nt, Human
gcuccgauaccuccuucuucucug

SEQ ID NO: 888621 - RNA, 18 nt, Human
gcugggugagcagggccc

SEQ ID NO: 888622 - RNA, 21 nt, Human
ggggagaggaggagcuaagau

SEQ ID NO: 888623 - RNA, 23 nt, Human
ggggcacaaguucccaaacgcca

SEQ ID NO: 888624 - RNA, 20 nt, Human
guaguuugggggaugagggg

SEQ ID NO: 888625 - RNA, 22 nt, Human
gucggguguagcaaucuccucu

SEQ ID NO: 888626 - RNA, 18 nt, Human
uaaaccacaugcuucuuu

SEQ ID NO: 888627 - RNA, 20 nt, Human
uagaggaggccaguaaaugu

SEQ ID NO: 888628 - RNA, 21 nt, Human
uagcucagagcgcagcuccga

SEQ ID NO: 888629 - RNA, 23 nt, Human
uaggaacugcugcaguguuuuga

SEQ ID NO: 888630 - RNA, 22 nt, Human
uagggggcacaaguucccaaac

SEQ ID NO: 888631 - RNA, 21 nt, Human
ucagugcccacggaggacgag

SEQ ID NO: 888632 - RNA, 23 nt, Human
ucccaaacgccaccccaccauuc

SEQ ID NO: 888633 - RNA, 21 nt, Human
ucccauagcucagagcgcagc

SEQ ID NO: 888634 - RNA, 25 nt, Human
uccccaaagucauuagaggaggcca

SEQ ID NO: 888635 - RNA, 22 nt, Human
uccccagaaagcccaggaguuu

SEQ ID NO: 888636 - RNA, 21 nt, Human
ucccugaaugacugccugggc

SEQ ID NO: 888637 - RNA, 18 nt, Human
uccgauaccuccuucuuc

SEQ ID NO: 888638 - RNA, 21 nt, Human
uccuucuucucuggcuccucc

SEQ ID NO: 888639 - RNA, 19 nt, Human
uccuugcugcugccgaugc

SEQ ID NO: 888640 - RNA, 24 nt, Human
ucucucaggguugcuugugagaau

SEQ ID NO: 888641 - RNA, 18 nt, Human
ucucuggcuccuccuccu

SEQ ID NO: 888642 - RNA, 22 nt, Human
ucucugggggaggaguuguugg

SEQ ID NO: 888643 - RNA, 19 nt, Human
ucugaaccccuccccagaa

SEQ ID NO: 888644 - RNA, 23 nt, Human
ugaaagaggagaggggagaggag

SEQ ID NO: 888645 - RNA, 18 nt, Human
ugaaggaacuucgaagcc

SEQ ID NO: 888646 - RNA, 22 nt, Human
ugagggggcugaagagucgggu

SEQ ID NO: 888647 - RNA, 23 nt, Human
ugagggggcugaagagucgggug

SEQ ID NO: 888648 - RNA, 22 nt, Human
ugccucccccagaucucccuca

SEQ ID NO: 888649 - RNA, 22 nt, Human
ugccugggccucagaguucuuu

SEQ ID NO: 888650 - RNA, 22 nt, Human
ugggaagggucugugagaaaau

SEQ ID NO: 888651 - RNA, 22 nt, Human
uggggcuggagagccagugcuc

SEQ ID NO: 888652 - RNA, 18 nt, Human
ugggggaggaguuguugg

SEQ ID NO: 888653 - RNA, 27 nt, Human
uguggggggcugggugaaaccuggagg

SEQ ID NO: 888654 - RNA, 18 nt, Human
uuccugccucccccagau

SEQ ID NO: 888655 - RNA, 23 nt, Human
uuccugccucccccagaucuccc

SEQ ID NO: 888656 - RNA, 25 nt, Human
uucugaaccccuccccagaaagccc

SEQ ID NO: 888657 - RNA, 18 nt, Human
uucuuugggugugguuuc

SEQ ID NO: 888658 - RNA, 26 nt, Human
uugaaacaagaagucaagggaaagac

SEQ ID NO: 888659 - RNA, 19 nt, Human
uuuucugaaccccucccca

SEQ ID NO: 888660 - RNA, 23 nt, Human
uuuuuuuuuuuuuuuuuaccuuu

SEQ ID NO: 888661 - RNA, 24 nt, Human
aaaaaacaaaaacaauagggaagg

SEQ ID NO: 888662 - RNA, 24 nt, Human
aaaaacaaaaacaauagggaagga

SEQ ID NO: 888663 - RNA, 20 nt, Human
aaaaacaaccuuauaaaacc

SEQ ID NO: 888664 - RNA, 23 nt, Human
aaaaacaacuguaaauacaggac

SEQ ID NO: 888665 - RNA, 19 nt, Human
aaaauguauacagacaaau

SEQ ID NO: 888666 - RNA, 29 nt, Human
aaacaaaaggaagggacaaaagggacccc

SEQ ID NO: 888667 - RNA, 20 nt, Human
aaacacaccagauaauacag

SEQ ID NO: 888668 - RNA, 18 nt, Human
aaagaggaaacaaagaaa

SEQ ID NO: 888669 - RNA, 20 nt, Human
aaagcaaagucuuuucccuu

SEQ ID NO: 888670 - RNA, 20 nt, Human
aaauacacguccuaaaagua

SEQ ID NO: 888671 - RNA, 22 nt, Human
aacacaaacacuacugaagccc

SEQ ID NO: 888672 - RNA, 22 nt, Human
aagaggaaacaaagaaagucca

SEQ ID NO: 888673 - RNA, 24 nt, Human
aaucucagcaagugaaacaccucc

SEQ ID NO: 888674 - RNA, 18 nt, Human
aaugaaaagacaguggaa

SEQ ID NO: 888675 - RNA, 20 nt, Human
acaguggaaauuaccaaugg

SEQ ID NO: 888676 - RNA, 21 nt, Human
acauauuauacaagggaaacu

SEQ ID NO: 888677 - RNA, 23 nt, Human
acuuugugacacucugaaaacug

SEQ ID NO: 888678 - RNA, 26 nt, Human
agaggaaacaaaaggaagggacaaaa

SEQ ID NO: 888679 - RNA, 18 nt, Human
aggcagugagacagcacc

SEQ ID NO: 888680 - RNA, 23 nt, Human
aggcagugagacagcaccauagg

SEQ ID NO: 888681 - RNA, 19 nt, Human
agggugcacauuugcaaaa

SEQ ID NO: 888682 - RNA, 20 nt, Human
auaaaccaauagaaaauaca

SEQ ID NO: 888683 - RNA, 19 nt, Human
auaaagcccuaaaaaagcc

SEQ ID NO: 888684 - RNA, 24 nt, Human
auagcaaucaaaacaacaugcguc

SEQ ID NO: 888685 - RNA, 18 nt, Human
auggaauuucgccacaug

SEQ ID NO: 888686 - RNA, 24 nt, Human
caaaacucauuaaaaaaacaaaaa

SEQ ID NO: 888687 - RNA, 24 nt, Human
caaagaaaguccaguuuggcuauc

SEQ ID NO: 888688 - RNA, 21 nt, Human
caaauacacguccuaaaagua

SEQ ID NO: 888689 - RNA, 20 nt, Human
caacucugggucagggcccu

SEQ ID NO: 888690 - RNA, 25 nt, Human
cacaacacaaacacuacugaagccc

SEQ ID NO: 888691 - RNA, 26 nt, Human
caccauaggaaauguuccuucuuuca

SEQ ID NO: 888692 - RNA, 21 nt, Human
caccguguggcacaaaggagg

SEQ ID NO: 888693 - RNA, 19 nt, Human
cacucugaaaacugcacag

SEQ ID NO: 888694 - RNA, 19 nt, Human
cacugauagcuccugcaua

SEQ ID NO: 888695 - RNA, 27 nt, Human
cagccccucagaggaaacaaaaggaag

SEQ ID NO: 888696 - RNA, 20 nt, Human
cagggcccuugacagggugc

SEQ ID NO: 888697 - RNA, 22 nt, Human
ccaguagacugugcaaaucuaa

SEQ ID NO: 888698 - RNA, 23 nt, Human
ccuagcccuuggguuucauaaac

SEQ ID NO: 888699 - RNA, 19 nt, Human
ccucagaggaaacaaaagg

SEQ ID NO: 888700 - RNA, 19 nt, Human
cuacugaagcccugugacc

SEQ ID NO: 888701 - RNA, 23 nt, Human
cuccugccuucugaaacucuuuc

SEQ ID NO: 888702 - RNA, 23 nt, Human
cuccuuggagaccacaacucugg

SEQ ID NO: 888703 - RNA, 19 nt, Human
cugaaaaggcucaaacaaa

SEQ ID NO: 888704 - RNA, 22 nt, Human
gaccacugugguaaaaacaacc

SEQ ID NO: 888705 - RNA, 18 nt, Human
gaccagcaccguguggca

SEQ ID NO: 888706 - RNA, 23 nt, Human
gcacaacacaaacacuacugaag

SEQ ID NO: 888707 - RNA, 25 nt, Human
gcacaacacaaacacuacugaagcc

SEQ ID NO: 888708 - RNA, 21 nt, Human
gcagugagacagcaccauagg

SEQ ID NO: 888709 - RNA, 19 nt, Human
gccuggggcgaacagcccc

SEQ ID NO: 888710 - RNA, 20 nt, Human
ggacuggccucuuggauuug

SEQ ID NO: 888711 - RNA, 22 nt, Human
gggcaggugguuuaaaaagacc

SEQ ID NO: 888712 - RNA, 21 nt, Human
gggcuuuacaaagacuacaaa

SEQ ID NO: 888713 - RNA, 25 nt, Human
guaaacuuuuaaagaggaaacaaag

SEQ ID NO: 888714 - RNA, 22 nt, Human
gucaaaaacaacuguaaauaca

SEQ ID NO: 888715 - RNA, 26 nt, Human
uaaaaaaacaaaaacaauagggaagg

SEQ ID NO: 888716 - RNA, 20 nt, Human
uaaaagcaaagucuuuuccc

SEQ ID NO: 888717 - RNA, 22 nt, Human
uaaaccaauagaaaauacauca

SEQ ID NO: 888718 - RNA, 21 nt, Human
uaaacuuaaaaccuguccuuu

SEQ ID NO: 888719 - RNA, 22 nt, Human
uaacucauugaaaaaggccaac

SEQ ID NO: 888720 - RNA, 23 nt, Human
uaaguccauugacaccaaguacu

SEQ ID NO: 888721 - RNA, 19 nt, Human
uacaauaccuacccaguag

SEQ ID NO: 888722 - RNA, 21 nt, Human
uacaguauaaacgcuuccucu

SEQ ID NO: 888723 - RNA, 21 nt, Human
uaccauggccuagcccuuggg

SEQ ID NO: 888724 - RNA, 26 nt, Human
uagaaaauacaucauccaaccuucag

SEQ ID NO: 888725 - RNA, 20 nt, Human
uagagaugaggcuacuaugu

SEQ ID NO: 888726 - RNA, 19 nt, Human
uagcaaucaaaacaacaug

SEQ ID NO: 888727 - RNA, 24 nt, Human
uauaaaaccagugacucauauacu

SEQ ID NO: 888728 - RNA, 19 nt, Human
uauaaaauguauacagaca

SEQ ID NO: 888729 - RNA, 25 nt, Human
uauuucacuguuucugccuauuuac

SEQ ID NO: 888730 - RNA, 21 nt, Human
uauuuuggaggauaggcaaag

SEQ ID NO: 888731 - RNA, 22 nt, Human
ucaguguucuuuaaugcugaau

SEQ ID NO: 888732 - RNA, 24 nt, Human
uccacagauauaaaaaaugcuuag

SEQ ID NO: 888733 - RNA, 24 nt, Human
uccacagugaccuuaccgcuucag

SEQ ID NO: 888734 - RNA, 21 nt, Human
ucccuuaacuuuuuucacccu

SEQ ID NO: 888735 - RNA, 21 nt, Human
ucuccuauccauuucuucaaa

SEQ ID NO: 888736 - RNA, 20 nt, Human
ucuucaaaaaaaaaaaaaaa

SEQ ID NO: 888737 - RNA, 21 nt, Human
ucuuccacagugaccuuaccg

SEQ ID NO: 888738 - RNA, 24 nt, Human
ucuuccacagugaccuuaccgcuu

SEQ ID NO: 888739 - RNA, 19 nt, Human
ugaaaauaccuuucuuuug

SEQ ID NO: 888740 - RNA, 21 nt, Human
ugaaacaccucuuaacaccaa

SEQ ID NO: 888741 - RNA, 21 nt, Human
ugaucaguuuucaugcacucu

SEQ ID NO: 888742 - RNA, 19 nt, Human
ugggauguauugcaggaaa

SEQ ID NO: 888743 - RNA, 21 nt, Human
uggggugagcgcacaacacaa

SEQ ID NO: 888744 - RNA, 21 nt, Human
ugggucagggcccuugacagg

SEQ ID NO: 888745 - RNA, 22 nt, Human
ugguaacuucuccaaugacuga

SEQ ID NO: 888746 - RNA, 18 nt, Human
uggucacagagaguagca

SEQ ID NO: 888747 - RNA, 23 nt, Human
ugucauagaaaucuguuuuaagg

SEQ ID NO: 888748 - RNA, 20 nt, Human
ugugcaaucuguucaguugc

SEQ ID NO: 888749 - RNA, 20 nt, Human
uuaaaaagaccacugugguu

SEQ ID NO: 888750 - RNA, 20 nt, Human
uuagaacuggauggaauuuc

SEQ ID NO: 888751 - RNA, 24 nt, Human
uucaaaaucuccugccuucugaaa

SEQ ID NO: 888752 - RNA, 24 nt, Human
uucacaaggcuaaaaauacugauc

SEQ ID NO: 888753 - RNA, 20 nt, Human
uucagaugauuuauuucacu

SEQ ID NO: 888754 - RNA, 22 nt, Human
uuggggcuuuacaaagacuaca

SEQ ID NO: 888755 - RNA, 18 nt, Human
uuuacaguauaaacgcuu

SEQ ID NO: 888756 - RNA, 23 nt, Human
uuugaagcaugcucacucuagca

SEQ ID NO: 888757 - RNA, 22 nt, Human
uuugugcuuauggaggacuggc

SEQ ID NO: 888758 - RNA, 23 nt, Human
aaaaaaagagcccugaagaccuc

SEQ ID NO: 888759 - RNA, 22 nt, Human
aaccccgccccuucagaucucc

SEQ ID NO: 888760 - RNA, 21 nt, Human
aaccgggcagcauucaagucc

SEQ ID NO: 888761 - RNA, 23 nt, Human
aagagaccaccccccccaaaaaa

SEQ ID NO: 888762 - RNA, 19 nt, Human
aagcccgggaccucagcag

SEQ ID NO: 888763 - RNA, 18 nt, Human
acaagcuccagaagcccg

SEQ ID NO: 888764 - RNA, 23 nt, Human
acaggaagagaccacccccccca

SEQ ID NO: 888765 - RNA, 23 nt, Human
acaggaagagaccacccccccca

SEQ ID NO: 888766 - RNA, 21 nt, Human
acagugcggggcacuaacauu

SEQ ID NO: 888767 - RNA, 20 nt, Human
agaagagcagacgcagacag

SEQ ID NO: 888768 - RNA, 22 nt, Human
agaauuggggagcuagagagag

SEQ ID NO: 888769 - RNA, 24 nt, Human
agacaggaagagaccacccccccc

SEQ ID NO: 888770 - RNA, 22 nt, Human
agaggagggggaugcucgucuu

SEQ ID NO: 888771 - RNA, 21 nt, Human
agaugcucacacuaagcccgg

SEQ ID NO: 888772 - RNA, 23 nt, Human
aggaagccagagaaaggcccgga

SEQ ID NO: 888773 - RNA, 21 nt, Human
aggcaagccaaggaagccaga

SEQ ID NO: 888774 - RNA, 18 nt, Human
aggcaggaggcagugggc

SEQ ID NO: 888775 - RNA, 18 nt, Human
aggcagugggcuggcagc

SEQ ID NO: 888776 - RNA, 19 nt, Human
agggagaggagggggaugc

SEQ ID NO: 888777 - RNA, 24 nt, Human
agggaggaggcaggcagaauuggg

SEQ ID NO: 888778 - RNA, 21 nt, Human
aggggaggaagaguugggggg

SEQ ID NO: 888779 - RNA, 25 nt, Human
agggggaugcucgucuucagggaug

SEQ ID NO: 888780 - RNA, 24 nt, Human
agugggcuggcagccacccugggc

SEQ ID NO: 888781 - RNA, 19 nt, Human
aucuuggauggccuccccc

SEQ ID NO: 888782 - RNA, 19 nt, Human
caaaaaaagagcccugaag

SEQ ID NO: 888783 - RNA, 22 nt, Human
caaaaaaagagcccugaagacc

SEQ ID NO: 888784 - RNA, 21 nt, Human
caagaugcucacacuaagccc

SEQ ID NO: 888785 - RNA, 19 nt, Human
cacccccagggaccuuagc

SEQ ID NO: 888786 - RNA, 23 nt, Human
caccccccccaaaaaaagagccc

SEQ ID NO: 888787 - RNA, 23 nt, Human
cagacaggaagagaccacccccc

SEQ ID NO: 888788 - RNA, 21 nt, Human
caggaagagaccacccccccc

SEQ ID NO: 888789 - RNA, 21 nt, Human
cagugggcuggcagccacccu

SEQ ID NO: 888790 - RNA, 26 nt, Human
caguggucuuucuagcccagcccucc

SEQ ID NO: 888791 - RNA, 25 nt, Human
caugggcccgccugcccugucccuc

SEQ ID NO: 888792 - RNA, 19 nt, Human
ccaccccaggcaggaggca

SEQ ID NO: 888793 - RNA, 18 nt, Human
cccaaaaaaagagcccug

SEQ ID NO: 888794 - RNA, 23 nt, Human
cccaaaaaaagagcccugaagac

SEQ ID NO: 888795 - RNA, 19 nt, Human
cccacaggcacaucucuag

SEQ ID NO: 888796 - RNA, 21 nt, Human
ccccaaaaaaagagcccugaa

SEQ ID NO: 888797 - RNA, 22 nt, Human
cccccaaaaaaagagcccugaa

SEQ ID NO: 888798 - RNA, 28 nt, Human
cccccaaaaaaagagcccugaagaccuc

SEQ ID NO: 888799 - RNA, 24 nt, Human
cccccagggaccuuagcccgauuc

SEQ ID NO: 888800 - RNA, 23 nt, Human
ccccccaaaaaaagagcccugaa

SEQ ID NO: 888801 - RNA, 19 nt, Human
ccccgccccuucagaucuc

SEQ ID NO: 888802 - RNA, 21 nt, Human
ccccuccuccccuucccccac

SEQ ID NO: 888803 - RNA, 19 nt, Human
cccgccccuucagaucucc

SEQ ID NO: 888804 - RNA, 22 nt, Human
cccgcgccacgagucagcaggg

SEQ ID NO: 888805 - RNA, 20 nt, Human
cccgcgcgcgcccgccgguc

SEQ ID NO: 888806 - RNA, 22 nt, Human
cccgcgcgcgcccgccgguccu

SEQ ID NO: 888807 - RNA, 23 nt, Human
cccgcgcgcgcccgccgguccug

SEQ ID NO: 888808 - RNA, 25 nt, Human
cccgcgcgcgcccgccgguccugcg

SEQ ID NO: 888809 - RNA, 19 nt, Human
cccuccccccaggucccca

SEQ ID NO: 888810 - RNA, 21 nt, Human
cccugaagaccucugcuuccu

SEQ ID NO: 888811 - RNA, 22 nt, Human
cccugucccuccccccaggucc

SEQ ID NO: 888812 - RNA, 26 nt, Human
cccuucccccaccaggcaagccaagg

SEQ ID NO: 888813 - RNA, 21 nt, Human
ccgccuagggccucuggaacc

SEQ ID NO: 888814 - RNA, 22 nt, Human
ccuccagagcccgcgcgcgccc

SEQ ID NO: 888815 - RNA, 23 nt, Human
ccuccagagcccgcgcgcgcccg

SEQ ID NO: 888816 - RNA, 25 nt, Human
ccuccagagcccgcgcgcgcccgcc

SEQ ID NO: 888817 - RNA, 26 nt, Human
ccucccacaggcacaucucuagaagc

SEQ ID NO: 888818 - RNA, 21 nt, Human
ccucccucaagccugaggcug

SEQ ID NO: 888819 - RNA, 21 nt, Human
ccucuggaaccuuggggcgag

SEQ ID NO: 888820 - RNA, 31 nt, Human
ccugaagaccucugcuuccuccccccacucu

SEQ ID NO: 888821 - RNA, 21 nt, Human
ccugcccugucccucccccca

SEQ ID NO: 888822 - RNA, 20 nt, Human
ccuggcucccagcucccgcc

SEQ ID NO: 888823 - RNA, 25 nt, Human
ccuucuuccccuccuccccuucccc

SEQ ID NO: 888824 - RNA, 18 nt, Human
ccuuggggaaaccugugg

SEQ ID NO: 888825 - RNA, 20 nt, Human
cgccccaggaggcucggcga

SEQ ID NO: 888826 - RNA, 21 nt, Human
cggagccuccuguuucugccg

SEQ ID NO: 888827 - RNA, 18 nt, Human
cuaacagggagaggaggg

SEQ ID NO: 888828 - RNA, 24 nt, Human
cuagcccagcccucccucaagccu

SEQ ID NO: 888829 - RNA, 22 nt, Human
cucacacuaagcccgggaccuc

SEQ ID NO: 888830 - RNA, 23 nt, Human
cucacucccacacccauccgaua

SEQ ID NO: 888831 - RNA, 21 nt, Human
cucagcaguaccaucugcacc

SEQ ID NO: 888832 - RNA, 27 nt, Human
cucccacacccauccgauauuuacaaa

SEQ ID NO: 888833 - RNA, 19 nt, Human
cuggcagcuuucugggggg

SEQ ID NO: 888834 - RNA, 24 nt, Human
cuggcagcuuucuggggggccuag

SEQ ID NO: 888835 - RNA, 18 nt, Human
cuucccuuuccuucuucc

SEQ ID NO: 888836 - RNA, 25 nt, Human
gaccucugcuuccuccccccacucu

SEQ ID NO: 888837 - RNA, 20 nt, Human
gagaggggagaaggcggccc

SEQ ID NO: 888838 - RNA, 20 nt, Human
gaggaagaguugggggggcc

SEQ ID NO: 888839 - RNA, 18 nt, Human
gcagcauucaaguccgag

SEQ ID NO: 888840 - RNA, 22 nt, Human
gccaggccaccccaggcaggag

SEQ ID NO: 888841 - RNA, 20 nt, Human
gccaguggucuuucuagccc

SEQ ID NO: 888842 - RNA, 23 nt, Human
gcccugaagaccucugcuuccuu

SEQ ID NO: 888843 - RNA, 18 nt, Human
gccuagggccucuggaac

SEQ ID NO: 888844 - RNA, 21 nt, Human
gccugacucccaaaccccucc

SEQ ID NO: 888845 - RNA, 23 nt, Human
ggaaaccugugggccggagccuc

SEQ ID NO: 888846 - RNA, 24 nt, Human
ggaggaggcaggcagaauugggga

SEQ ID NO: 888847 - RNA, 19 nt, Human
ggcagaauuggggagcuag

SEQ ID NO: 888848 - RNA, 23 nt, Human
ggcagcauucaaguccgagucug

SEQ ID NO: 888849 - RNA, 18 nt, Human
ggccggcagggcgggggg

SEQ ID NO: 888850 - RNA, 19 nt, Human
ggccggcagggcggggggc

SEQ ID NO: 888851 - RNA, 24 nt, Human
ggcgaggcggccggcagggcgggg

SEQ ID NO: 888852 - RNA, 20 nt, Human
ggcuggcagccacccugggc

SEQ ID NO: 888853 - RNA, 19 nt, Human
gggcacagaagagcagacg

SEQ ID NO: 888854 - RNA, 18 nt, Human
gggcacuaacauuucuaa

SEQ ID NO: 888855 - RNA, 22 nt, Human
gggcggggggcggccccgcgac

SEQ ID NO: 888856 - RNA, 22 nt, Human
ggggggcuucagcuucuccccu

SEQ ID NO: 888857 - RNA, 23 nt, Human
gguuaaagugcagcugggaggga

SEQ ID NO: 888858 - RNA, 22 nt, Human
guccuccucguccuggaguucc

SEQ ID NO: 888859 - RNA, 18 nt, Human
guccuggaguuccucgag

SEQ ID NO: 888860 - RNA, 19 nt, Human
uaaccccucacucccacac

SEQ ID NO: 888861 - RNA, 21 nt, Human
uaaccccucacucccacaccc

SEQ ID NO: 888862 - RNA, 22 nt, Human
uacaaagagcaucccugggaga

SEQ ID NO: 888863 - RNA, 21 nt, Human
uagagagagcccaagugaacc

SEQ ID NO: 888864 - RNA, 24 nt, Human
ucagcuucuccccugacuucccca

SEQ ID NO: 888865 - RNA, 19 nt, Human
uccacagggggaugagagg

SEQ ID NO: 888866 - RNA, 21 nt, Human
uccccagagagugagacccaa

SEQ ID NO: 888867 - RNA, 26 nt, Human
ucccccaccaggcaagccaaggaagc

SEQ ID NO: 888868 - RNA, 19 nt, Human
uccccuccuccccuucccc

SEQ ID NO: 888869 - RNA, 20 nt, Human
uccccuccuccccuuccccc

SEQ ID NO: 888870 - RNA, 18 nt, Human
ucccugggagaggggaga

SEQ ID NO: 888871 - RNA, 22 nt, Human
ucugcuuccuccccccacucuu

SEQ ID NO: 888872 - RNA, 24 nt, Human
ugaagaccucugcuuccucccccc

SEQ ID NO: 888873 - RNA, 23 nt, Human
ugaagccaaguccauccagugcc

SEQ ID NO: 888874 - RNA, 21 nt, Human
ugagaggggaggaagaguugg

SEQ ID NO: 888875 - RNA, 27 nt, Human
ugcccugucccuccccccaggucccca

SEQ ID NO: 888876 - RNA, 19 nt, Human
ugcugggcaacgaggggcu

SEQ ID NO: 888877 - RNA, 18 nt, Human
ugggaaguggggugagag

SEQ ID NO: 888878 - RNA, 19 nt, Human
ugggagaggggagaaggcg

SEQ ID NO: 888879 - RNA, 21 nt, Human
ugggccggagccuccuguuuc

SEQ ID NO: 888880 - RNA, 24 nt, Human
uggggcgagggagguaaccccuca

SEQ ID NO: 888881 - RNA, 21 nt, Human
ugggugcgggggucgcgggcc

SEQ ID NO: 888882 - RNA, 23 nt, Human
uggucuuucuagcccagcccucc

SEQ ID NO: 888883 - RNA, 18 nt, Human
uuggcucuaaccccgccc

SEQ ID NO: 888884 - RNA, 21 nt, Human
aaagcacuaagcuuccaacca

SEQ ID NO: 888885 - RNA, 24 nt, Human
aaagugcugggacuacaggcauga

SEQ ID NO: 888886 - RNA, 19 nt, Human
aagugcugggacuacaggc

SEQ ID NO: 888887 - RNA, 26 nt, Human
aagugcugggacuacaggcaugagcc

SEQ ID NO: 888888 - RNA, 18 nt, Human
accccagaggauggggaa

SEQ ID NO: 888889 - RNA, 26 nt, Human
agcugcucucgcuauguuggccaggc

SEQ ID NO: 888890 - RNA, 20 nt, Human
augaaccaccugccucggcc

SEQ ID NO: 888891 - RNA, 20 nt, Human
auguuggccaggcuggucuc

SEQ ID NO: 888892 - RNA, 21 nt, Human
auguuggccaggcuggucucg

SEQ ID NO: 888893 - RNA, 24 nt, Human
caaagugcugggacuacaggcaug

SEQ ID NO: 888894 - RNA, 21 nt, Human
caaggauuuuucuggaggcuu

SEQ ID NO: 888895 - RNA, 18 nt, Human
caccaugccugcccucgg

SEQ ID NO: 888896 - RNA, 18 nt, Human
caccggagcugcucucgc

SEQ ID NO: 888897 - RNA, 23 nt, Human
caccugccucggccucccaaagu

SEQ ID NO: 888898 - RNA, 24 nt, Human
cagcucugcuccccaccccagagg

SEQ ID NO: 888899 - RNA, 19 nt, Human
ccaaagugcugggacuaca

SEQ ID NO: 888900 - RNA, 24 nt, Human
ccaaagugcugggacuacaggcau

SEQ ID NO: 888901 - RNA, 22 nt, Human
ccagaccuuagaugaaccaccu

SEQ ID NO: 888902 - RNA, 20 nt, Human
ccagcucugcuccccacccc

SEQ ID NO: 888903 - RNA, 24 nt, Human
cccaaagugcugggacuacaggca

SEQ ID NO: 888904 - RNA, 21 nt, Human
ccccaaauaaggagcccacca

SEQ ID NO: 888905 - RNA, 21 nt, Human
ccccagaggauggggaauggg

SEQ ID NO: 888906 - RNA, 22 nt, Human
cccucggagcugcuaaaugaac

SEQ ID NO: 888907 - RNA, 23 nt, Human
cccucggagcugcuaaaugaaca

SEQ ID NO: 888908 - RNA, 19 nt, Human
ccgcugccacuccucccgc

SEQ ID NO: 888909 - RNA, 20 nt, Human
ccgcugccacuccucccgcc

SEQ ID NO: 888910 - RNA, 21 nt, Human
ccucuucaucuuccucaucca

SEQ ID NO: 888911 - RNA, 21 nt, Human
ccucuugggcucuuccauggg

SEQ ID NO: 888912 - RNA, 24 nt, Human
ccugccucggccucccaaagugcu

SEQ ID NO: 888913 - RNA, 23 nt, Human
ccuggccgcugccacuccucccg

SEQ ID NO: 888914 - RNA, 24 nt, Human
cgcuauguuggccaggcuggucuc

SEQ ID NO: 888915 - RNA, 19 nt, Human
cgcugaucuccucuugggc

SEQ ID NO: 888916 - RNA, 18 nt, Human
cuagagggcaggcacuuu

SEQ ID NO: 888917 - RNA, 21 nt, Human
cucugcuccccaccccagagg

SEQ ID NO: 888918 - RNA, 22 nt, Human
cucugcuccccaccccagagga

SEQ ID NO: 888919 - RNA, 21 nt, Human
cugaccuuuuucuugggcauc

SEQ ID NO: 888920 - RNA, 21 nt, Human
gacuacaggcaugagccacca

SEQ ID NO: 888921 - RNA, 24 nt, Human
gacuacaggcaugagccaccaugc

SEQ ID NO: 888922 - RNA, 22 nt, Human
gacuaccuuuuauuggcagcac

SEQ ID NO: 888923 - RNA, 24 nt, Human
ggacuacaggcaugagccaccaug

SEQ ID NO: 888924 - RNA, 22 nt, Human
ggagccuugaugugugcuuccu

SEQ ID NO: 888925 - RNA, 21 nt, Human
gggcauccuggcagcagggaa

SEQ ID NO: 888926 - RNA, 20 nt, Human
ggucucgaacuccagaccuu

SEQ ID NO: 888927 - RNA, 20 nt, Human
ggugccaggugccugcuggc

SEQ ID NO: 888928 - RNA, 18 nt, Human
guggagcugaccuuuuuc

SEQ ID NO: 888929 - RNA, 18 nt, Human
uaagcuuccaaccauagu

SEQ ID NO: 888930 - RNA, 24 nt, Human
uaagcuuccaaccauaguuaggua

SEQ ID NO: 888931 - RNA, 22 nt, Human
uacaggcaugagccaccaugcc

SEQ ID NO: 888932 - RNA, 21 nt, Human
uagaggcuagagggcaggcac

SEQ ID NO: 888933 - RNA, 19 nt, Human
uauguuggccaggcugguc

SEQ ID NO: 888934 - RNA, 24 nt, Human
uauguuggccaggcuggucucgaa

SEQ ID NO: 888935 - RNA, 20 nt, Human
uccagcaccucuucaucuuc

SEQ ID NO: 888936 - RNA, 24 nt, Human
ucccaaagugcugggacuacaggc

SEQ ID NO: 888937 - RNA, 19 nt, Human
uccccaaauaaggagccca

SEQ ID NO: 888938 - RNA, 19 nt, Human
uccugggcuuccagcaccu

SEQ ID NO: 888939 - RNA, 20 nt, Human
uccugggcuuccagcaccuc

SEQ ID NO: 888940 - RNA, 21 nt, Human
uccugggcuuccagcaccucu

SEQ ID NO: 888941 - RNA, 24 nt, Human
uccuucgcugcugccuuuuucggc

SEQ ID NO: 888942 - RNA, 18 nt, Human
ucggccucccaaagugcu

SEQ ID NO: 888943 - RNA, 23 nt, Human
ucucgcuauguuggccaggcugg

SEQ ID NO: 888944 - RNA, 24 nt, Human
ucucgcuauguuggccaggcuggu

SEQ ID NO: 888945 - RNA, 23 nt, Human
ugaaagcacuaagcuuccaacca

SEQ ID NO: 888946 - RNA, 19 nt, Human
ugcaccauccucccggcac

SEQ ID NO: 888947 - RNA, 20 nt, Human
ugcaccauccucccggcaca

SEQ ID NO: 888948 - RNA, 21 nt, Human
ugccucggccucccaaagugc

SEQ ID NO: 888949 - RNA, 24 nt, Human
ugccucggccucccaaagugcugg

SEQ ID NO: 888950 - RNA, 20 nt, Human
uggauguguucgccaaccca

SEQ ID NO: 888951 - RNA, 18 nt, Human
uggcagcagggaaggugg

SEQ ID NO: 888952 - RNA, 21 nt, Human
uggcagcagggaaggugggug

SEQ ID NO: 888953 - RNA, 23 nt, Human
uggccaggcuggucucgaacucc

SEQ ID NO: 888954 - RNA, 22 nt, Human
uggccgcggugugccuacagcc

SEQ ID NO: 888955 - RNA, 21 nt, Human
uggccgcugccacuccucccg

SEQ ID NO: 888956 - RNA, 18 nt, Human
ugggacuacaggcaugag

SEQ ID NO: 888957 - RNA, 22 nt, Human
ugggacuacaggcaugagccac

SEQ ID NO: 888958 - RNA, 24 nt, Human
ugggacuacaggcaugagccacca

SEQ ID NO: 888959 - RNA, 22 nt, Human
ugggcucuuccauggcagcccc

SEQ ID NO: 888960 - RNA, 19 nt, Human
uggggugcaccauccuccc

SEQ ID NO: 888961 - RNA, 22 nt, Human
uuccugggcuuccagcaccucu

SEQ ID NO: 888962 - RNA, 21 nt, Human
uugaugugugcuuccugggcu

SEQ ID NO: 888963 - RNA, 22 nt, Human
uuggcagcacccugcuggcaag

SEQ ID NO: 888964 - RNA, 20 nt, Human
uuuucggcuucgcuuccacu

SEQ ID NO: 888965 - RNA, 24 nt, Human
uuuuuuuugcacuuuugugucuga

SEQ ID NO: 888966 - RNA, 19 nt, Human
uuuuuuuuuuuuuuuugca

SEQ ID NO: 888967 - RNA, 19 nt, Human
uuuuuuuuuuuuuuuuugc

SEQ ID NO: 888968 - RNA, 27 nt, Human
uuuuuuuuuuuuuuuuuuuuuuugggg

SEQ ID NO: 888969 - RNA, 20 nt, Human
aaaccuugacaugaggaaaa

SEQ ID NO: 888970 - RNA, 18 nt, Human
aagcaagcauucaaacca

SEQ ID NO: 888971 - RNA, 22 nt, Human
aagcauucaaaccaucaaaaaa

SEQ ID NO: 888972 - RNA, 23 nt, Human
aaggauacuacaagaaagcaagc

SEQ ID NO: 888973 - RNA, 24 nt, Human
aggagaaaaaaaauaacaaacuga

SEQ ID NO: 888974 - RNA, 19 nt, Human
auucacuguccucuucccc

SEQ ID NO: 888975 - RNA, 18 nt, Human
ccuuaaggagaaaaaaaa

SEQ ID NO: 888976 - RNA, 21 nt, Human
gccuuaaggagaaaaaaaaua

SEQ ID NO: 888977 - RNA, 18 nt, Human
uacuggguagcuggguaa

SEQ ID NO: 888978 - RNA, 22 nt, Human
ucauggucauagucacauuacu

SEQ ID NO: 888979 - RNA, 24 nt, Human
uccccgagcugugaaaaguuaugc

SEQ ID NO: 888980 - RNA, 20 nt, Human
uccucuuccccuuuguuucc

SEQ ID NO: 888981 - RNA, 21 nt, Human
uugacaugaggaaaaaaugac

SEQ ID NO: 888982 - RNA, 18 nt, Human
uuucagggcaauuaaaag

SEQ ID NO: 888983 - RNA, 22 nt, Human
aaaagaauauaaaacacauuaa

SEQ ID NO: 888984 - RNA, 18 nt, Human
aaaaugaacaguguaucc

SEQ ID NO: 888985 - RNA, 24 nt, Human
aaaguguugggauuacacguguga

SEQ ID NO: 888986 - RNA, 19 nt, Human
aacauagcacaacuccauu

SEQ ID NO: 888987 - RNA, 19 nt, Human
aagaauauaaaacacauua

SEQ ID NO: 888988 - RNA, 23 nt, Human
aagguacuuuguugcuaagugaa

SEQ ID NO: 888989 - RNA, 26 nt, Human
aaguguugggauuacacgugugagcc

SEQ ID NO: 888990 - RNA, 24 nt, Human
acaauuucugaccugguaacaaaa

SEQ ID NO: 888991 - RNA, 26 nt, Human
acacugacaucuuuugaaaaacgugu

SEQ ID NO: 888992 - RNA, 23 nt, Human
accugguaacaaaauuguucuga

SEQ ID NO: 888993 - RNA, 19 nt, Human
acggggucuugcuauguug

SEQ ID NO: 888994 - RNA, 24 nt, Human
acggggucuugcuauguugcccag

SEQ ID NO: 888995 - RNA, 24 nt, Human
acggggucuugcuauguugcccag

SEQ ID NO: 888996 - RNA, 20 nt, Human
acuacaaaagaauauaaaac

SEQ ID NO: 888997 - RNA, 19 nt, Human
acuccccucccuguagaga

SEQ ID NO: 888998 - RNA, 24 nt, Human
agaaaacaaauucaauugucaaac

SEQ ID NO: 888999 - RNA, 18 nt, Human
agaauauaaaacacauua

SEQ ID NO: 889000 - RNA, 19 nt, Human
agagaagcggaccacaaug

SEQ ID NO: 889001 - RNA, 20 nt, Human
aggcaucugcugcaggaacc

SEQ ID NO: 889002 - RNA, 25 nt, Human
agucuagucucaaacuccuggccuc

SEQ ID NO: 889003 - RNA, 24 nt, Human
aguguugggauuacacgugugagc

SEQ ID NO: 889004 - RNA, 18 nt, Human
aguuauguuguuuuacua

SEQ ID NO: 889005 - RNA, 20 nt, Human
auguugcccagucuagucuc

SEQ ID NO: 889006 - RNA, 24 nt, Human
auuugaggaaaaaaaugagaaaug

SEQ ID NO: 889007 - RNA, 20 nt, Human
caaaguguugggauuacacg

SEQ ID NO: 889008 - RNA, 21 nt, Human
caaauaaaaccacugucuccu

SEQ ID NO: 889009 - RNA, 25 nt, Human
caaauaaauucccuagacuccccuc

SEQ ID NO: 889010 - RNA, 18 nt, Human
caaauucaacaggccaaa

SEQ ID NO: 889011 - RNA, 24 nt, Human
caacaucacugaaaaugaaaagaa

SEQ ID NO: 889012 - RNA, 22 nt, Human
caagauucucagacaagaauua

SEQ ID NO: 889013 - RNA, 20 nt, Human
caauuucugaccugguaaca

SEQ ID NO: 889014 - RNA, 19 nt, Human
cagcucuuuuaaaaauuca

SEQ ID NO: 889015 - RNA, 23 nt, Human
caggccccaauguagaucaugaa

SEQ ID NO: 889016 - RNA, 19 nt, Human
caguaaagacacugaucaa

SEQ ID NO: 889017 - RNA, 21 nt, Human
cagucuagucucaaacuccug

SEQ ID NO: 889018 - RNA, 23 nt, Human
cauucccaacaucacugaaaaug

SEQ ID NO: 889019 - RNA, 19 nt, Human
ccaaaguguugggauuaca

SEQ ID NO: 889020 - RNA, 22 nt, Human
ccaaaguguugggauuacacgu

SEQ ID NO: 889021 - RNA, 22 nt, Human
ccaaaguguugggauuacacgu

SEQ ID NO: 889022 - RNA, 24 nt, Human
ccaaaguguugggauuacacgugu

SEQ ID NO: 889023 - RNA, 24 nt, Human
ccaacaucacugaaaaugaaaaga

SEQ ID NO: 889024 - RNA, 22 nt, Human
cccaguccauucccaacaucac

SEQ ID NO: 889025 - RNA, 22 nt, Human
ccuaccccugaaauuauuuaga

SEQ ID NO: 889026 - RNA, 18 nt, Human
ccucagccucccaaagug

SEQ ID NO: 889027 - RNA, 18 nt, Human
ccuguagagaccaucagc

SEQ ID NO: 889028 - RNA, 23 nt, Human
cggggucuugcuauguugcccag

SEQ ID NO: 889029 - RNA, 24 nt, Human
cuccucagccucccaaaguguugg

SEQ ID NO: 889030 - RNA, 19 nt, Human
cugcugcaggaaccuucug

SEQ ID NO: 889031 - RNA, 20 nt, Human
cuguggagauugcuuuugcc

SEQ ID NO: 889032 - RNA, 24 nt, Human
cuucagccccaacuuucacggacu

SEQ ID NO: 889033 - RNA, 18 nt, Human
gaggaaaaaaaugagaaa

SEQ ID NO: 889034 - RNA, 18 nt, Human
gauuacacgugugagcca

SEQ ID NO: 889035 - RNA, 24 nt, Human
gauuacacgugugagccaccaugc

SEQ ID NO: 889036 - RNA, 23 nt, Human
gauucucagacaagaauuaaagg

SEQ ID NO: 889037 - RNA, 24 nt, Human
ggauuacacgugugagccaccaug

SEQ ID NO: 889038 - RNA, 19 nt, Human
ggcauucuuuuggauucug

SEQ ID NO: 889039 - RNA, 21 nt, Human
gggucuugcuauguugcccag

SEQ ID NO: 889040 - RNA, 18 nt, Human
guagagacggggucuugc

SEQ ID NO: 889041 - RNA, 21 nt, Human
guccucaugucaaggcagugu

SEQ ID NO: 889042 - RNA, 26 nt, Human
uaaaaaaauaaucccaggccccaauu

SEQ ID NO: 889043 - RNA, 24 nt, Human
uacacgugugagccaccaugccug

SEQ ID NO: 889044 - RNA, 21 nt, Human
uacagauccaaucuguuguca

SEQ ID NO: 889045 - RNA, 24 nt, Human
uagagaccaucagcucacugugaa

SEQ ID NO: 889046 - RNA, 22 nt, Human
uagagacggggucuugcuaugu

SEQ ID NO: 889047 - RNA, 20 nt, Human
uaugacaaacccuugcuuuu

SEQ ID NO: 889048 - RNA, 24 nt, Human
uauguugcccagucuagucucaaa

SEQ ID NO: 889049 - RNA, 18 nt, Human
uauugacaacaucucccc

SEQ ID NO: 889050 - RNA, 25 nt, Human
uauuggaaauuagaagguacuuugu

SEQ ID NO: 889051 - RNA, 20 nt, Human
ucagacaagaauuaaaggca

SEQ ID NO: 889052 - RNA, 19 nt, Human
ucagaggcuuccagcucag

SEQ ID NO: 889053 - RNA, 25 nt, Human
uccauucccaacaucacugaaaaug

SEQ ID NO: 889054 - RNA, 18 nt, Human
ucccaaaguguugggauu

SEQ ID NO: 889055 - RNA, 21 nt, Human
ucccaaaguguugggauuaca

SEQ ID NO: 889056 - RNA, 21 nt, Human
ucccaggccccaauguagauc

SEQ ID NO: 889057 - RNA, 21 nt, Human
ucccucuucaagcucccuuuu

SEQ ID NO: 889058 - RNA, 19 nt, Human
ucugacacauggccaagau

SEQ ID NO: 889059 - RNA, 25 nt, Human
ucuguccuuuaauaacuuucagagg

SEQ ID NO: 889060 - RNA, 18 nt, Human
ucuugcuauguugcccag

SEQ ID NO: 889061 - RNA, 22 nt, Human
ucuugcuauguugcccagucua

SEQ ID NO: 889062 - RNA, 18 nt, Human
ugacaacaucuccccuac

SEQ ID NO: 889063 - RNA, 21 nt, Human
ugacaacaucuccccuacccc

SEQ ID NO: 889064 - RNA, 18 nt, Human
ugaccucuaagcaugccu

SEQ ID NO: 889065 - RNA, 19 nt, Human
ugaccucuaagcaugccuu

SEQ ID NO: 889066 - RNA, 22 nt, Human
ugagaaauggcuaaaagaggca

SEQ ID NO: 889067 - RNA, 18 nt, Human
ugggauuacacgugugag

SEQ ID NO: 889068 - RNA, 22 nt, Human
ugggauuacacgugugagccac

SEQ ID NO: 889069 - RNA, 23 nt, Human
ugggauuacacgugugagccacc

SEQ ID NO: 889070 - RNA, 24 nt, Human
ugggauuacacgugugagccacca

SEQ ID NO: 889071 - RNA, 25 nt, Human
ugggauuacacgugugagccaccau

SEQ ID NO: 889072 - RNA, 24 nt, Human
uguagagacggggucuugcuaugu

SEQ ID NO: 889073 - RNA, 21 nt, Human
ugucaaagaacacaauuucug

SEQ ID NO: 889074 - RNA, 20 nt, Human
ugugaaggcuugagccucag

SEQ ID NO: 889075 - RNA, 19 nt, Human
uguugcuaagugaaaaaaa

SEQ ID NO: 889076 - RNA, 21 nt, Human
uguugggauuacacgugugag

SEQ ID NO: 889077 - RNA, 23 nt, Human
uuaaaugagcaauaacucagaua

SEQ ID NO: 889078 - RNA, 21 nt, Human
uucacagaaaacaaauucaau

SEQ ID NO: 889079 - RNA, 18 nt, Human
uuccugauguaugaagca

SEQ ID NO: 889080 - RNA, 18 nt, Human
uugcccagucuagucuca

SEQ ID NO: 889081 - RNA, 24 nt, Human
uuguagagacggggucuugcuaug

SEQ ID NO: 889082 - RNA, 20 nt, Human
uuugaggaaaaaaaugagaa

SEQ ID NO: 889083 - RNA, 20 nt, Human
uuuguagagacggggucuug

SEQ ID NO: 889084 - RNA, 24 nt, Human
uuuguagagacggggucuugcuau

SEQ ID NO: 889085 - RNA, 23 nt, Human
uuuuuuaaguucauccagcuuua

SEQ ID NO: 889086 - RNA, 23 nt, Human
uuuuuuuuuaaguucauccagcu

SEQ ID NO: 889087 - RNA, 24 nt, Human
uuuuuuuuuuaaguucauccagcu

SEQ ID NO: 889088 - RNA, 19 nt, Human
uuuuuuuuuuuuuuuuuaa

SEQ ID NO: 889089 - RNA, 21 nt, Human
aacaucuaggcagggccaaca

SEQ ID NO: 889090 - RNA, 18 nt, Human
aagaagcuaagagauuuu

SEQ ID NO: 889091 - RNA, 20 nt, Human
aagcuaagagauuuugcauc

SEQ ID NO: 889092 - RNA, 22 nt, Human
agaagcuaagagauuuugcauc

SEQ ID NO: 889093 - RNA, 21 nt, Human
agacaaacuguaacacagucc

SEQ ID NO: 889094 - RNA, 22 nt, Human
cacaacaucuaggcagggccaa

SEQ ID NO: 889095 - RNA, 19 nt, Human
cacaguccaugggccugca

SEQ ID NO: 889096 - RNA, 19 nt, Human
caccaugcccgguccgggc

SEQ ID NO: 889097 - RNA, 20 nt, Human
caccaugcccgguccgggcg

SEQ ID NO: 889098 - RNA, 21 nt, Human
cagacaacucuucagaagccc

SEQ ID NO: 889099 - RNA, 18 nt, Human
caugaggacgggagaggg

SEQ ID NO: 889100 - RNA, 20 nt, Human
cccaacaccaugcccggucc

SEQ ID NO: 889101 - RNA, 21 nt, Human
ccccgagacaggcgaggcggg

SEQ ID NO: 889102 - RNA, 19 nt, Human
ccggcgcccaacaccaugc

SEQ ID NO: 889103 - RNA, 24 nt, Human
cucuugcuguuucauguuagagac

SEQ ID NO: 889104 - RNA, 21 nt, Human
cugcgaguuacacugaacaca

SEQ ID NO: 889105 - RNA, 20 nt, Human
cugcugccuuuacccugggc

SEQ ID NO: 889106 - RNA, 22 nt, Human
gagcaugaggacgggagagggg

SEQ ID NO: 889107 - RNA, 18 nt, Human
ggacugagagggagcaug

SEQ ID NO: 889108 - RNA, 18 nt, Human
gggagagggggcuaccuc

SEQ ID NO: 889109 - RNA, 18 nt, Human
uaagagaucuacagugaa

SEQ ID NO: 889110 - RNA, 21 nt, Human
uaagagaucuacagugaauga

SEQ ID NO: 889111 - RNA, 21 nt, Human
uaagcagacaacucuucagaa

SEQ ID NO: 889112 - RNA, 23 nt, Human
uaagguaagcagacaacucuuca

SEQ ID NO: 889113 - RNA, 20 nt, Human
uacccugggcuccccgagac

SEQ ID NO: 889114 - RNA, 22 nt, Human
uauuuauguugaauucuccauc

SEQ ID NO: 889115 - RNA, 23 nt, Human
ucagaagcccaaacacauuuucu

SEQ ID NO: 889116 - RNA, 21 nt, Human
ucaugaagauggucuucuuca

SEQ ID NO: 889117 - RNA, 24 nt, Human
uccaggggacugagagggaggaag

SEQ ID NO: 889118 - RNA, 22 nt, Human
ugaaaauacaaacuaaaugaac

SEQ ID NO: 889119 - RNA, 18 nt, Human
ugagagggagcaugagga

SEQ ID NO: 889120 - RNA, 19 nt, Human
ugaggacgggagagggggc

SEQ ID NO: 889121 - RNA, 22 nt, Human
ugaguucauuacaacuucuuaa

SEQ ID NO: 889122 - RNA, 21 nt, Human
uguagcggguaucuuauugcc

SEQ ID NO: 889123 - RNA, 18 nt, Human
ugugcagaaaaccaauuu

SEQ ID NO: 889124 - RNA, 19 nt, Human
uuuuuuuuuuuuucuuugu

SEQ ID NO: 889125 - RNA, 23 nt, Human
uuuuuuuuuuuuuuuucuuuggg

SEQ ID NO: 889126 - RNA, 21 nt, Human
aaaaacaauaaaacagaaggc

SEQ ID NO: 889127 - RNA, 23 nt, Human
aaacaauaaaacagaaggccaag

SEQ ID NO: 889128 - RNA, 21 nt, Human
aaacuguaauauuagaagcaa

SEQ ID NO: 889129 - RNA, 26 nt, Human
aaagaaaaaaacaauaaaacagaagg

SEQ ID NO: 889130 - RNA, 21 nt, Human
aaagauuaacacucuccaaga

SEQ ID NO: 889131 - RNA, 19 nt, Human
aaaggaaaggcaauaaagg

SEQ ID NO: 889132 - RNA, 20 nt, Human
aaagggaaaacagcaaagaa

SEQ ID NO: 889133 - RNA, 19 nt, Human
aaccauaacagaacagggu

SEQ ID NO: 889134 - RNA, 23 nt, Human
aagaaaaaaacaauaaaacagaa

SEQ ID NO: 889135 - RNA, 20 nt, Human
acacaauauacuugguauuu

SEQ ID NO: 889136 - RNA, 20 nt, Human
acccaacauuuucucagucu

SEQ ID NO: 889137 - RNA, 22 nt, Human
agaaaaaaacaauaaaacagaa

SEQ ID NO: 889138 - RNA, 18 nt, Human
agaaggccaaggauaagg

SEQ ID NO: 889139 - RNA, 19 nt, Human
agacacaauauacuuggua

SEQ ID NO: 889140 - RNA, 19 nt, Human
agggaaaacagcaaagaaa

SEQ ID NO: 889141 - RNA, 21 nt, Human
cacagcagucacuucugguca

SEQ ID NO: 889142 - RNA, 24 nt, Human
ccaaucaagcacgacuggacccaa

SEQ ID NO: 889143 - RNA, 19 nt, Human
cgcuccgccgccgccgcgu

SEQ ID NO: 889144 - RNA, 21 nt, Human
cuccaggacgccacugcggcc

SEQ ID NO: 889145 - RNA, 25 nt, Human
gaagcaaagggaaaacagcaaagaa

SEQ ID NO: 889146 - RNA, 24 nt, Human
gacccaacauuuucucagucuuca

SEQ ID NO: 889147 - RNA, 22 nt, Human
gagggcuccaggacgccacugc

SEQ ID NO: 889148 - RNA, 24 nt, Human
ggagggcuccaggacgccacugcg

SEQ ID NO: 889149 - RNA, 22 nt, Human
ggcacgaggccugcgcuccgcc

SEQ ID NO: 889150 - RNA, 21 nt, Human
uaaaacagaaggccaaggaua

SEQ ID NO: 889151 - RNA, 27 nt, Human
uaaaggauuucuuccauauaaagauuc

SEQ ID NO: 889152 - RNA, 22 nt, Human
uaauauuagaagcaaagggaaa

SEQ ID NO: 889153 - RNA, 24 nt, Human
uacacagcagucacuucuggucag

SEQ ID NO: 889154 - RNA, 21 nt, Human
uaguauauauguaugggcuga

SEQ ID NO: 889155 - RNA, 23 nt, Human
uaugcagaugcacugcauacaua

SEQ ID NO: 889156 - RNA, 20 nt, Human
ucauauauagauauaauaau

SEQ ID NO: 889157 - RNA, 26 nt, Human
uccacuuauuauugcuauuuagucac

SEQ ID NO: 889158 - RNA, 21 nt, Human
uccaggacgccacugcggccg

SEQ ID NO: 889159 - RNA, 21 nt, Human
ugacaaauauaauaccuggaa

SEQ ID NO: 889160 - RNA, 22 nt, Human
ugacugaagacaaugaauguau

SEQ ID NO: 889161 - RNA, 18 nt, Human
ugcauacauaguauauau

SEQ ID NO: 889162 - RNA, 25 nt, Human
ugcuguaugacugaagacaaugaau

SEQ ID NO: 889163 - RNA, 19 nt, Human
uggccguaacggcacgagg

SEQ ID NO: 889164 - RNA, 19 nt, Human
uguaaauuaaaauuguaca

SEQ ID NO: 889165 - RNA, 20 nt, Human
ugucucaugugucuugcugu

SEQ ID NO: 889166 - RNA, 21 nt, Human
ugucuugcuguaugacugaag

SEQ ID NO: 889167 - RNA, 21 nt, Human
uuacaaaauacaaaacuguaa

SEQ ID NO: 889168 - RNA, 21 nt, Human
uuuacaaggaaacaaaggaaa

SEQ ID NO: 889169 - RNA, 28 nt, Human
uuuuuuuuuuuuuuuuuuuuuuuggggg

SEQ ID NO: 889170 - RNA, 21 nt, Human
aaaacaauccccccaaaccca

SEQ ID NO: 889171 - RNA, 18 nt, Human
aaacaggagcggaggccu

SEQ ID NO: 889172 - RNA, 19 nt, Human
aaaccaaacaaaaucccaa

SEQ ID NO: 889173 - RNA, 19 nt, Human
aaaccaaacaaaaucccaa

SEQ ID NO: 889174 - RNA, 19 nt, Human
aaaccaaacaaaaucccaa

SEQ ID NO: 889175 - RNA, 22 nt, Human
aaccuugugcccccccaacccc

SEQ ID NO: 889176 - RNA, 20 nt, Human
aagaaaacaauccccccaaa

SEQ ID NO: 889177 - RNA, 24 nt, Human
aagaaaacaaucgccauaaaccag

SEQ ID NO: 889178 - RNA, 22 nt, Human
aagcagagcuggcucagcagaa

SEQ ID NO: 889179 - RNA, 20 nt, Human
aagcccagacaacacggcag

SEQ ID NO: 889180 - RNA, 20 nt, Human
aaggagcugagccucugugg

SEQ ID NO: 889181 - RNA, 18 nt, Human
aagggacagggaaaacca

SEQ ID NO: 889182 - RNA, 20 nt, Human
aauccagagcccaguggaag

SEQ ID NO: 889183 - RNA, 22 nt, Human
acaauccccccaaacccaguaa

SEQ ID NO: 889184 - RNA, 19 nt, Human
acagggaaaaccauaccga

SEQ ID NO: 889185 - RNA, 23 nt, Human
accaaaacaggagcggaggccug

SEQ ID NO: 889186 - RNA, 21 nt, Human
accacagacagaaacauucaa

SEQ ID NO: 889187 - RNA, 20 nt, Human
accccaaaugccaaacaaca

SEQ ID NO: 889188 - RNA, 21 nt, Human
accuugugcccccccaacccc

SEQ ID NO: 889189 - RNA, 23 nt, Human
agaaaacaauccccccaaaccca

SEQ ID NO: 889190 - RNA, 22 nt, Human
agaaaacaaucgccauaaacca

SEQ ID NO: 889191 - RNA, 21 nt, Human
agacagaaacauucaaccaau

SEQ ID NO: 889192 - RNA, 18 nt, Human
agagcacaucucagggac

SEQ ID NO: 889193 - RNA, 19 nt, Human
agcagugguggccucuggg

SEQ ID NO: 889194 - RNA, 21 nt, Human
aggagcggaggccugaggaca

SEQ ID NO: 889195 - RNA, 22 nt, Human
aggaggagggauuggaaucagu

SEQ ID NO: 889196 - RNA, 32 nt, Human
aggcaggaaagggugggugggcaugacccaag

SEQ ID NO: 889197 - RNA, 24 nt, Human
agggacagggaaaaccauaccgaa

SEQ ID NO: 889198 - RNA, 26 nt, Human
agggugggugggcaugacccaaggag

SEQ ID NO: 889199 - RNA, 23 nt, Human
aggugggggagcgaggauggggc

SEQ ID NO: 889200 - RNA, 21 nt, Human
caaaagaaaacaaucccccca

SEQ ID NO: 889201 - RNA, 18 nt, Human
caaacaacaagagcacau

SEQ ID NO: 889202 - RNA, 22 nt, Human
caaacccaguaaccuaggcauc

SEQ ID NO: 889203 - RNA, 23 nt, Human
caagaaaccagugucuguaacuc

SEQ ID NO: 889204 - RNA, 19 nt, Human
caagagccaguggucaggg

SEQ ID NO: 889205 - RNA, 21 nt, Human
caagcccagacaacacggcag

SEQ ID NO: 889206 - RNA, 20 nt, Human
caccacagacagaaacauuc

SEQ ID NO: 889207 - RNA, 23 nt, Human
caccacagacagaaacauucaac

SEQ ID NO: 889208 - RNA, 18 nt, Human
caccucauggauggguag

SEQ ID NO: 889209 - RNA, 23 nt, Human
cagcagcgccaccgaggccagga

SEQ ID NO: 889210 - RNA, 20 nt, Human
caggagagacgaacgccgug

SEQ ID NO: 889211 - RNA, 20 nt, Human
caguguugccuggcucaggc

SEQ ID NO: 889212 - RNA, 21 nt, Human
caugcauacuccaacacaucu

SEQ ID NO: 889213 - RNA, 20 nt, Human
ccaaaaccuugugccccccc

SEQ ID NO: 889214 - RNA, 21 nt, Human
ccaaacccaguaaccuaggca

SEQ ID NO: 889215 - RNA, 21 nt, Human
ccaaaugcucucuguaaucaa

SEQ ID NO: 889216 - RNA, 21 nt, Human
ccaggaagcagagcuggcuca

SEQ ID NO: 889217 - RNA, 23 nt, Human
ccagugucuguaacuccugcaug

SEQ ID NO: 889218 - RNA, 23 nt, Human
ccccaaaagaaaacaaucccccc

SEQ ID NO: 889219 - RNA, 24 nt, Human
cccccaaaagaaaacaaucccccc

SEQ ID NO: 889220 - RNA, 20 nt, Human
cccccaaacccaguaaccua

SEQ ID NO: 889221 - RNA, 21 nt, Human
cccccaaccccaggggacgcc

SEQ ID NO: 889222 - RNA, 21 nt, Human
ccccccaaacccaguaaccua

SEQ ID NO: 889223 - RNA, 23 nt, Human
cccccccaaccccaggggacgcc

SEQ ID NO: 889224 - RNA, 23 nt, Human
cccccuccucucuauuucuucaa

SEQ ID NO: 889225 - RNA, 21 nt, Human
ccuccaggaagggaggggugc

SEQ ID NO: 889226 - RNA, 21 nt, Human
ccugggccaccaaaacaggag

SEQ ID NO: 889227 - RNA, 21 nt, Human
cgacagcgaccagagcagcag

SEQ ID NO: 889228 - RNA, 22 nt, Human
cgccguggccccgggggccugu

SEQ ID NO: 889229 - RNA, 20 nt, Human
cuagaaucucagucacuguu

SEQ ID NO: 889230 - RNA, 22 nt, Human
cuccaaaaccuugugccccccc

SEQ ID NO: 889231 - RNA, 23 nt, Human
cuggcaccucauggauggguagu

SEQ ID NO: 889232 - RNA, 20 nt, Human
cugggccggcuuggcggagg

SEQ ID NO: 889233 - RNA, 22 nt, Human
cuucugcucucgcaggcucgac

SEQ ID NO: 889234 - RNA, 22 nt, Human
cuugugcccccccaaccccagg

SEQ ID NO: 889235 - RNA, 22 nt, Human
gaaaaccauaccgaaugaauga

SEQ ID NO: 889236 - RNA, 19 nt, Human
gaagaaaaggaguaaaagg

SEQ ID NO: 889237 - RNA, 18 nt, Human
gaaggacguuugcccaag

SEQ ID NO: 889238 - RNA, 18 nt, Human
gacagcgaccagagcagc

SEQ ID NO: 889239 - RNA, 22 nt, Human
gagcagcagcgccaccgaggcc

SEQ ID NO: 889240 - RNA, 21 nt, Human
gagcgaggauggggcagggga

SEQ ID NO: 889241 - RNA, 18 nt, Human
gaggauggggcaggggag

SEQ ID NO: 889242 - RNA, 24 nt, Human
gaggcaggaaagggugggugggca

SEQ ID NO: 889243 - RNA, 21 nt, Human
gaggcguccuuggcuauaaaa

SEQ ID NO: 889244 - RNA, 19 nt, Human
gccugaggacagcacagga

SEQ ID NO: 889245 - RNA, 23 nt, Human
gccugggccaccaaaacaggagc

SEQ ID NO: 889246 - RNA, 21 nt, Human
gccuugcccaguggcuccucu

SEQ ID NO: 889247 - RNA, 19 nt, Human
ggaaggacguuugcccaag

SEQ ID NO: 889248 - RNA, 23 nt, Human
ggaugucuucacacggaggaggc

SEQ ID NO: 889249 - RNA, 21 nt, Human
ggcaggaaagggugggugggc

SEQ ID NO: 889250 - RNA, 19 nt, Human
ggccaggaagcagagcugg

SEQ ID NO: 889251 - RNA, 23 nt, Human
ggccaggaagcagagcuggcuca

SEQ ID NO: 889252 - RNA, 22 nt, Human
ggcccccaaaagaaaacaaucc

SEQ ID NO: 889253 - RNA, 20 nt, Human
gggcaggggagagccugggc

SEQ ID NO: 889254 - RNA, 22 nt, Human
ggguaguuuguuuaacuggggc

SEQ ID NO: 889255 - RNA, 23 nt, Human
gucacucccugucaccccaaaug

SEQ ID NO: 889256 - RNA, 18 nt, Human
guccaagaaaacaaucgc

SEQ ID NO: 889257 - RNA, 23 nt, Human
gugaggaaggacguuugcccaag

SEQ ID NO: 889258 - RNA, 20 nt, Human
gugguggccucugggucacu

SEQ ID NO: 889259 - RNA, 20 nt, Human
uaaaaagcacuacauccaug

SEQ ID NO: 889260 - RNA, 19 nt, Human
uaaaaggggaaggccccca

SEQ ID NO: 889261 - RNA, 24 nt, Human
uaaaccagugcaaaaugugcaaca

SEQ ID NO: 889262 - RNA, 19 nt, Human
uaaaguaaauacaagggac

SEQ ID NO: 889263 - RNA, 21 nt, Human
uaaccuaggcaucaucuccaa

SEQ ID NO: 889264 - RNA, 23 nt, Human
uaacuuaaaaaaggaggagggau

SEQ ID NO: 889265 - RNA, 24 nt, Human
uaaucaacgggcccccuccucucu

SEQ ID NO: 889266 - RNA, 20 nt, Human
uaccaaguggcaaauuggga

SEQ ID NO: 889267 - RNA, 21 nt, Human
uagaaagaaccuagugagaaa

SEQ ID NO: 889268 - RNA, 19 nt, Human
uagugagaaagagauggug

SEQ ID NO: 889269 - RNA, 21 nt, Human
uauugcacagaaaagaaggag

SEQ ID NO: 889270 - RNA, 19 nt, Human
ucaccccaaaugccaaaca

SEQ ID NO: 889271 - RNA, 22 nt, Human
ucacucccugucaccccaaaug

SEQ ID NO: 889272 - RNA, 20 nt, Human
ucacuguuuaaaaauggagc

SEQ ID NO: 889273 - RNA, 18 nt, Human
ucaggccaguuagcagcc

SEQ ID NO: 889274 - RNA, 18 nt, Human
uccaaaaccuugugcccc

SEQ ID NO: 889275 - RNA, 23 nt, Human
uccaaaaccuugugcccccccaa

SEQ ID NO: 889276 - RNA, 21 nt, Human
uccaacacaucugggaugcaa

SEQ ID NO: 889277 - RNA, 22 nt, Human
uccguccaagaaaacaaucgcc

SEQ ID NO: 889278 - RNA, 25 nt, Human
uccuccaaaaccuugugccccccca

SEQ ID NO: 889279 - RNA, 23 nt, Human
ucggggaagcuucuguuuuugac

SEQ ID NO: 889280 - RNA, 20 nt, Human
ucucuguaaucaacgggccc

SEQ ID NO: 889281 - RNA, 23 nt, Human
ucucuguaaucaacgggcccccu

SEQ ID NO: 889282 - RNA, 23 nt, Human
ucucuguuuucuccuucccuggc

SEQ ID NO: 889283 - RNA, 18 nt, Human
ucuuccuccaaaaccuug

SEQ ID NO: 889284 - RNA, 19 nt, Human
ugagaaagagauggugaug

SEQ ID NO: 889285 - RNA, 18 nt, Human
ugagcgagucugcaugua

SEQ ID NO: 889286 - RNA, 19 nt, Human
ugagcgagucugcauguaa

SEQ ID NO: 889287 - RNA, 21 nt, Human
ugagcgagucugcauguaaca

SEQ ID NO: 889288 - RNA, 18 nt, Human
ugagggaaguugucuucu

SEQ ID NO: 889289 - RNA, 27 nt, Human
ugcacagaaaagaaggagcugagccuc

SEQ ID NO: 889290 - RNA, 23 nt, Human
ugccuggcaccucauggaugggu

SEQ ID NO: 889291 - RNA, 24 nt, Human
uggaaaagucacguggauguugga

SEQ ID NO: 889292 - RNA, 19 nt, Human
uggaagaaaaggaguaaaa

SEQ ID NO: 889293 - RNA, 18 nt, Human
uggagcuggaaaagucac

SEQ ID NO: 889294 - RNA, 21 nt, Human
uggcggaggcgccccgugagg

SEQ ID NO: 889295 - RNA, 20 nt, Human
uggcucaggccaguuagcag

SEQ ID NO: 889296 - RNA, 21 nt, Human
uggcucaggccaguuagcagc

SEQ ID NO: 889297 - RNA, 21 nt, Human
ugucaguucucuguuuucucc

SEQ ID NO: 889298 - RNA, 18 nt, Human
ugugguuucaaagguguc

SEQ ID NO: 889299 - RNA, 20 nt, Human
ugugguuucaaaggugucag

SEQ ID NO: 889300 - RNA, 21 nt, Human
ugugugacucggggugcggcc

SEQ ID NO: 889301 - RNA, 22 nt, Human
uuaauccagagcccaguggaag

SEQ ID NO: 889302 - RNA, 25 nt, Human
uuaaugcugguucgcaccacagaau

SEQ ID NO: 889303 - RNA, 19 nt, Human
uucccuggccaucccucca

SEQ ID NO: 889304 - RNA, 18 nt, Human
uucuuccuccaaaaccuu

SEQ ID NO: 889305 - RNA, 22 nt, Human
uugcacagaaaagaaggagcug

SEQ ID NO: 889306 - RNA, 21 nt, Human
uugcccaguggcuccucuaaa

SEQ ID NO: 889307 - RNA, 21 nt, Human
uuuacacuauccguccaagaa

SEQ ID NO: 889308 - RNA, 21 nt, Human
uuuguagcagguuauuuuuac

SEQ ID NO: 889309 - RNA, 22 nt, Human
uuuucuccuucccuggccaucc

SEQ ID NO: 889310 - RNA, 18 nt, Human
aaaacacauaaguucuca

SEQ ID NO: 889311 - RNA, 21 nt, Human
aaaacaccuuuaggagacauu

SEQ ID NO: 889312 - RNA, 21 nt, Human
aaacaaauagacacagcucuc

SEQ ID NO: 889313 - RNA, 22 nt, Human
aaacaaauagacacagcucucc

SEQ ID NO: 889314 - RNA, 23 nt, Human
aaacaaauagacacagcucucca

SEQ ID NO: 889315 - RNA, 19 nt, Human
aaacagugcagaagaucua

SEQ ID NO: 889316 - RNA, 20 nt, Human
aaaccagugucuggaaccga

SEQ ID NO: 889317 - RNA, 21 nt, Human
aaacuucggcuuagucagcac

SEQ ID NO: 889318 - RNA, 24 nt, Human
aaagcaagaaaccagugucuggaa

SEQ ID NO: 889319 - RNA, 23 nt, Human
aacaaagcaagaaaccagugucu

SEQ ID NO: 889320 - RNA, 23 nt, Human
aaccgaacaggaacagaacaaga

SEQ ID NO: 889321 - RNA, 19 nt, Human
aagaaaccagugucuggaa

SEQ ID NO: 889322 - RNA, 24 nt, Human
aagaagagaugcugauucaagcug

SEQ ID NO: 889323 - RNA, 18 nt, Human
aagcagaaucacaagguu

SEQ ID NO: 889324 - RNA, 21 nt, Human
aauagacacagcucuccagac

SEQ ID NO: 889325 - RNA, 21 nt, Human
acaaggaaaaaauauuugcua

SEQ ID NO: 889326 - RNA, 19 nt, Human
acagcccucucacaggcuc

SEQ ID NO: 889327 - RNA, 23 nt, Human
acagcgcuguccacggugucugu

SEQ ID NO: 889328 - RNA, 19 nt, Human
acugugacuuuguuggucu

SEQ ID NO: 889329 - RNA, 20 nt, Human
acuuugcucuucuccuugcc

SEQ ID NO: 889330 - RNA, 21 nt, Human
agcagaaucacaagguuuaga

SEQ ID NO: 889331 - RNA, 19 nt, Human
agcccucucacaggcuccu

SEQ ID NO: 889332 - RNA, 24 nt, Human
agccgaguggacgccacccuggga

SEQ ID NO: 889333 - RNA, 21 nt, Human
auaaaaagucuuaagucuaca

SEQ ID NO: 889334 - RNA, 22 nt, Human
caaaacuucggcuuagucagca

SEQ ID NO: 889335 - RNA, 25 nt, Human
caauauguauaccucacaaaaauua

SEQ ID NO: 889336 - RNA, 18 nt, Human
cacccugggaaccagggc

SEQ ID NO: 889337 - RNA, 18 nt, Human
cacugcuaaaaaacaaaa

SEQ ID NO: 889338 - RNA, 21 nt, Human
cagcacugcuaaaaaacaaaa

SEQ ID NO: 889339 - RNA, 19 nt, Human
cagggccaggccugucugc

SEQ ID NO: 889340 - RNA, 19 nt, Human
cauugcuaugaagauaucu

SEQ ID NO: 889341 - RNA, 25 nt, Human
cccaaauucaggcuuuagcuuaaaa

SEQ ID NO: 889342 - RNA, 22 nt, Human
cccccagauaaaaucuuaaucu

SEQ ID NO: 889343 - RNA, 23 nt, Human
ccuccugccacagccgaguggac

SEQ ID NO: 889344 - RNA, 23 nt, Human
cgaacaggaacagaacaagagca

SEQ ID NO: 889345 - RNA, 21 nt, Human
cgccgucaggugccggcugcc

SEQ ID NO: 889346 - RNA, 24 nt, Human
gagaagaggcagcuccuccugcca

SEQ ID NO: 889347 - RNA, 18 nt, Human
gccgucaggugccggcug

SEQ ID NO: 889348 - RNA, 19 nt, Human
gccuguaaacagugcagaa

SEQ ID NO: 889349 - RNA, 22 nt, Human
gcgagcuucagacugucaagag

SEQ ID NO: 889350 - RNA, 22 nt, Human
ggaaaaaauauuugcuaauguu

SEQ ID NO: 889351 - RNA, 22 nt, Human
gggaaugagagaggggaaggga

SEQ ID NO: 889352 - RNA, 18 nt, Human
ggggaaugagagagggga

SEQ ID NO: 889353 - RNA, 19 nt, Human
ggggaaugagagaggggaa

SEQ ID NO: 889354 - RNA, 25 nt, Human
gucaggcugacagggaagaagagau

SEQ ID NO: 889355 - RNA, 19 nt, Human
uaaaaaacacauggcagag

SEQ ID NO: 889356 - RNA, 24 nt, Human
uaaaaagucuuaagucuacaaauu

SEQ ID NO: 889357 - RNA, 23 nt, Human
uaaaagggacuuaauuuagaaau

SEQ ID NO: 889358 - RNA, 18 nt, Human
uaaaugcauuuuuuuuuu

SEQ ID NO: 889359 - RNA, 23 nt, Human
uaagcagaaucacaagguuuaga

SEQ ID NO: 889360 - RNA, 18 nt, Human
uaaggaaauaaagggcuu

SEQ ID NO: 889361 - RNA, 18 nt, Human
uaaggaaauaaagggcuu

SEQ ID NO: 889362 - RNA, 28 nt, Human
uacaaaacaccuuuaggagacauugcua

SEQ ID NO: 889363 - RNA, 24 nt, Human
uagauuagauaaaugacuuauaag

SEQ ID NO: 889364 - RNA, 21 nt, Human
uagccaaauccaagagaaauc

SEQ ID NO: 889365 - RNA, 21 nt, Human
ucaacauuuacuuggggagga

SEQ ID NO: 889366 - RNA, 22 nt, Human
ucagcacugcuaaaaaacaaaa

SEQ ID NO: 889367 - RNA, 21 nt, Human
ucggcucgggucggucacgcc

SEQ ID NO: 889368 - RNA, 22 nt, Human
ucucccauuuuggaggccagag

SEQ ID NO: 889369 - RNA, 24 nt, Human
ucucccauuuuggaggccagaguu

SEQ ID NO: 889370 - RNA, 19 nt, Human
ucuuaagucuacaaauuag

SEQ ID NO: 889371 - RNA, 23 nt, Human
ugaaacaaauagacacagcucuc

SEQ ID NO: 889372 - RNA, 22 nt, Human
ugagagaggggaagggaagagu

SEQ ID NO: 889373 - RNA, 24 nt, Human
ugccacagccgaguggacgccacc

SEQ ID NO: 889374 - RNA, 22 nt, Human
ugcuaaaaaacaaaauaaaaaa

SEQ ID NO: 889375 - RNA, 24 nt, Human
uggauuuuauguaccuuacaaaac

SEQ ID NO: 889376 - RNA, 27 nt, Human
uggggaacagaauaaacaugcuuccaa

SEQ ID NO: 889377 - RNA, 22 nt, Human
uguagccgaggcugcggccgcc

SEQ ID NO: 889378 - RNA, 22 nt, Human
ugucaagagaagaggcagcucc

SEQ ID NO: 889379 - RNA, 19 nt, Human
ugucuggaaccgaacagga

SEQ ID NO: 889380 - RNA, 24 nt, Human
uuaacagcccucucacaggcuccu

SEQ ID NO: 889381 - RNA, 21 nt, Human
uugcucuucuccuugccagua

SEQ ID NO: 889382 - RNA, 24 nt, Human
uuuaacaaagaaaaaacaaggaaa

SEQ ID NO: 889383 - RNA, 24 nt, Human
aaaaaaaaaaaacaaaacaaaaaa

SEQ ID NO: 889384 - RNA, 20 nt, Human
aaaaaacaaaacaaaaaaag

SEQ ID NO: 889385 - RNA, 22 nt, Human
aaacaaaaaaagauacagcccc

SEQ ID NO: 889386 - RNA, 18 nt, Human
aaacaaaacaaaaaaaga

SEQ ID NO: 889387 - RNA, 22 nt, Human
aaaugcaguauaaacuuuguaa

SEQ ID NO: 889388 - RNA, 27 nt, Human
aacaaaaaaagauacagccccaaaugc

SEQ ID NO: 889389 - RNA, 22 nt, Human
aacaaaacaaaaaaagauacag

SEQ ID NO: 889390 - RNA, 24 nt, Human
aacaaaacaaaaaaagauacagcc

SEQ ID NO: 889391 - RNA, 22 nt, Human
aacaacacaagaguuccaaaga

SEQ ID NO: 889392 - RNA, 23 nt, Human
aacacaagaguuccaaagaggaa

SEQ ID NO: 889393 - RNA, 21 nt, Human
aagagagagcaggugguagaa

SEQ ID NO: 889394 - RNA, 19 nt, Human
aagaggaaaaaaaaaaaaa

SEQ ID NO: 889395 - RNA, 22 nt, Human
aagaggaaaaaaaaaaaaacaa

SEQ ID NO: 889396 - RNA, 24 nt, Human
aagaggaaaaaaaaaaaaacaaaa

SEQ ID NO: 889397 - RNA, 19 nt, Human
aagcaacacagccuugggc

SEQ ID NO: 889398 - RNA, 18 nt, Human
aaguaagugggaggaggc

SEQ ID NO: 889399 - RNA, 22 nt, Human
aaguaagugggaggaggccagg

SEQ ID NO: 889400 - RNA, 23 nt, Human
acaaaaaaagauacagccccaaa

SEQ ID NO: 889401 - RNA, 25 nt, Human
acaaaacaaaaaaagauacagcccc

SEQ ID NO: 889402 - RNA, 25 nt, Human
acaaaacaaaaaaagauacagcccc

SEQ ID NO: 889403 - RNA, 26 nt, Human
acaaaacaaaaaaagauacagcccca

SEQ ID NO: 889404 - RNA, 26 nt, Human
aggaaaaaaaaaaaaacaaaacaaaa

SEQ ID NO: 889405 - RNA, 28 nt, Human
aggaaaaaaaaaaaaacaaaacaaaaaa

SEQ ID NO: 889406 - RNA, 24 nt, Human
aggugguagaaauugaugacacuu

SEQ ID NO: 889407 - RNA, 20 nt, Human
aguauaaacuuuguaaggaa

SEQ ID NO: 889408 - RNA, 22 nt, Human
caaaaaaagauacagccccaaa

SEQ ID NO: 889409 - RNA, 18 nt, Human
caaaacaaaaaaagauac

SEQ ID NO: 889410 - RNA, 21 nt, Human
cagccccaaaugcaguauaaa

SEQ ID NO: 889411 - RNA, 18 nt, Human
ccgccgcugccgccuccg

SEQ ID NO: 889412 - RNA, 18 nt, Human
ccgcugccgccuccgcgu

SEQ ID NO: 889413 - RNA, 24 nt, Human
ccgcugccgccuccgcgucggccc

SEQ ID NO: 889414 - RNA, 21 nt, Human
ccggccgcuccuucgccucag

SEQ ID NO: 889415 - RNA, 21 nt, Human
ccuccgcgucggcccaccugc

SEQ ID NO: 889416 - RNA, 23 nt, Human
ccugcccgccguaggacaaaggc

SEQ ID NO: 889417 - RNA, 22 nt, Human
cggcgggcucccggccgcuccu

SEQ ID NO: 889418 - RNA, 21 nt, Human
gaacauccuccaaacagcucu

SEQ ID NO: 889419 - RNA, 18 nt, Human
gcagaagagagagcaggu

SEQ ID NO: 889420 - RNA, 21 nt, Human
gcagagaacauccuccaaaca

SEQ ID NO: 889421 - RNA, 20 nt, Human
guaaggaauaagcaacacag

SEQ ID NO: 889422 - RNA, 21 nt, Human
uaacaacacaagaguuccaaa

SEQ ID NO: 889423 - RNA, 20 nt, Human
ugggaggaggccaggggaug

SEQ ID NO: 889424 - RNA, 22 nt, Human
uuauuaauaucgcuaccagcgc

SEQ ID NO: 889425 - RNA, 23 nt, Human
aaaaacucuacaucucaacccuc

SEQ ID NO: 889426 - RNA, 20 nt, Human
aaaaggucaucuauuuacag

SEQ ID NO: 889427 - RNA, 18 nt, Human
aaccacaaaaacuagaga

SEQ ID NO: 889428 - RNA, 19 nt, Human
aagagugauuuaaagacau

SEQ ID NO: 889429 - RNA, 18 nt, Human
agguuuuugaccugcuac

SEQ ID NO: 889430 - RNA, 22 nt, Human
caaaaacuagagaucccucucc

SEQ ID NO: 889431 - RNA, 21 nt, Human
caggagggcagguuuuugacc

SEQ ID NO: 889432 - RNA, 18 nt, Human
caucucaacccuccacua

SEQ ID NO: 889433 - RNA, 20 nt, Human
ccaccgggagcuggcuaagc

SEQ ID NO: 889434 - RNA, 21 nt, Human
cccuccacuauuauuauaguc

SEQ ID NO: 889435 - RNA, 20 nt, Human
ccgccgccgccgccgcggcu

SEQ ID NO: 889436 - RNA, 21 nt, Human
ccgccgccgccgccgcggcug

SEQ ID NO: 889437 - RNA, 22 nt, Human
ccgccgccgccgccgcggcugc

SEQ ID NO: 889438 - RNA, 21 nt, Human
ccgccgccgcggcugcugcuu

SEQ ID NO: 889439 - RNA, 24 nt, Human
ccgcggcugcugcuucgccaccuu

SEQ ID NO: 889440 - RNA, 26 nt, Human
cgagucggacgcucacuccagccgcc

SEQ ID NO: 889441 - RNA, 23 nt, Human
cgggagcuggcuaagcgugggag

SEQ ID NO: 889442 - RNA, 23 nt, Human
cuaaaaauuaaaccacaaaaacu

SEQ ID NO: 889443 - RNA, 19 nt, Human
cucacuccagccgccgccg

SEQ ID NO: 889444 - RNA, 18 nt, Human
cugcacccuguuccccuc

SEQ ID NO: 889445 - RNA, 20 nt, Human
gaacuuccaucauuucuuca

SEQ ID NO: 889446 - RNA, 22 nt, Human
gacucuccaaaugaacuuccau

SEQ ID NO: 889447 - RNA, 21 nt, Human
gagaucaaugccaauaaacaa

SEQ ID NO: 889448 - RNA, 19 nt, Human
gggagccgacgugcgcccc

SEQ ID NO: 889449 - RNA, 21 nt, Human
gggcuggcucuccugaaaagu

SEQ ID NO: 889450 - RNA, 22 nt, Human
uagagaucccucuccugcaccc

SEQ ID NO: 889451 - RNA, 20 nt, Human
ucacaggagggcagguuuuu

SEQ ID NO: 889452 - RNA, 24 nt, Human
ucacuccagccgccgccgccgccg

SEQ ID NO: 889453 - RNA, 18 nt, Human
ucagggaauaagucacag

SEQ ID NO: 889454 - RNA, 20 nt, Human
uccacuauuauuauagucca

SEQ ID NO: 889455 - RNA, 23 nt, Human
uccugcacccuguuccccucacu

SEQ ID NO: 889456 - RNA, 23 nt, Human
ucgccaccuuggccgccaucuug

SEQ ID NO: 889457 - RNA, 18 nt, Human
ucuacaucucaacccucc

SEQ ID NO: 889458 - RNA, 22 nt, Human
ugcuucgccaccuuggccgcca

SEQ ID NO: 889459 - RNA, 25 nt, Human
uuaaaaacucuacaucucaacccuc

SEQ ID NO: 889460 - RNA, 23 nt, Human
uuaaaccacaaaaacuagagauc

SEQ ID NO: 889461 - RNA, 23 nt, Human
uuaaagacauuaugguuuucuuu

SEQ ID NO: 889462 - RNA, 27 nt, Human
uuuaaaaacucuacaucucaacccucc

SEQ ID NO: 889463 - RNA, 20 nt, Human
uuuguuuguuuuuuucccau

SEQ ID NO: 889464 - RNA, 22 nt, Human
uuuuuacacugcaaaaagguca

SEQ ID NO: 889465 - RNA, 24 nt, Human
uuuuuuuuuuuuuuuuuuacacug

SEQ ID NO: 889466 - RNA, 22 nt, Human
aaaaagaagaugaaacaugaga

SEQ ID NO: 889467 - RNA, 22 nt, Human
aaaacaaguuauuucccugcaa

SEQ ID NO: 889468 - RNA, 23 nt, Human
aaaagaagaugaaacaugagaaa

SEQ ID NO: 889469 - RNA, 23 nt, Human
aaacaauucuuagauuauaccca

SEQ ID NO: 889470 - RNA, 22 nt, Human
aacaauucuuagauuauaccca

SEQ ID NO: 889471 - RNA, 24 nt, Human
aacucuucuaucccuauacauucu

SEQ ID NO: 889472 - RNA, 23 nt, Human
aagcagaucaaauagugagacua

SEQ ID NO: 889473 - RNA, 22 nt, Human
acuuacaaggaucaaaaaaagg

SEQ ID NO: 889474 - RNA, 20 nt, Human
agaaacagaguacucaauaa

SEQ ID NO: 889475 - RNA, 25 nt, Human
agagggcaggggguggugauaacag

SEQ ID NO: 889476 - RNA, 21 nt, Human
caaagcagaucaaauagugag

SEQ ID NO: 889477 - RNA, 21 nt, Human
caaguuauuucccugcaaagc

SEQ ID NO: 889478 - RNA, 19 nt, Human
cagucugaaugucuagaua

SEQ ID NO: 889479 - RNA, 23 nt, Human
cauccagugacaaagaugugauc

SEQ ID NO: 889480 - RNA, 21 nt, Human
cccggccgcugccaccuccuc

SEQ ID NO: 889481 - RNA, 20 nt, Human
ccgcugccaccuccucucca

SEQ ID NO: 889482 - RNA, 23 nt, Human
ccuauacauucuacauacguagu

SEQ ID NO: 889483 - RNA, 21 nt, Human
ccucucagcgcggcucgggcg

SEQ ID NO: 889484 - RNA, 23 nt, Human
cguagaaacagaguacucaauaa

SEQ ID NO: 889485 - RNA, 24 nt, Human
cuaaacuuacaaggaucaaaaaaa

SEQ ID NO: 889486 - RNA, 26 nt, Human
cucccggccgcugccaccuccucucc

SEQ ID NO: 889487 - RNA, 22 nt, Human
ggcagcagagggcagggggugg

SEQ ID NO: 889488 - RNA, 22 nt, Human
ggcucgggcggacggggccugg

SEQ ID NO: 889489 - RNA, 19 nt, Human
gggcaggggguggugauaa

SEQ ID NO: 889490 - RNA, 20 nt, Human
gucacagaaugagcaauucc

SEQ ID NO: 889491 - RNA, 24 nt, Human
uaaacaauucuuagauuauaccca

SEQ ID NO: 889492 - RNA, 20 nt, Human
uacauacguagaaacagagu

SEQ ID NO: 889493 - RNA, 23 nt, Human
uagaaacagaguacucaauaagu

SEQ ID NO: 889494 - RNA, 19 nt, Human
uaggacacaaauaaaguca

SEQ ID NO: 889495 - RNA, 19 nt, Human
ucagcgcggcucgggcgga

SEQ ID NO: 889496 - RNA, 19 nt, Human
uccacgcggccgcugcccu

SEQ ID NO: 889497 - RNA, 20 nt, Human
uccacgcggccgcugcccuc

SEQ ID NO: 889498 - RNA, 21 nt, Human
uccacgcggccgcugcccucu

SEQ ID NO: 889499 - RNA, 20 nt, Human
ucccuuuaagcaggacguaa

SEQ ID NO: 889500 - RNA, 20 nt, Human
ugaaacaugagaaaaaacaa

SEQ ID NO: 889501 - RNA, 20 nt, Human
ugacaaagaugugaucucau

SEQ ID NO: 889502 - RNA, 25 nt, Human
ugagaaaaaacaaguuauuucccug

SEQ ID NO: 889503 - RNA, 19 nt, Human
uggcagcagagggcagggg

SEQ ID NO: 889504 - RNA, 22 nt, Human
uuacaaggaucaaaaaaaggaa

SEQ ID NO: 889505 - RNA, 21 nt, Human
uucaaagggcaauauaggaaa

SEQ ID NO: 889506 - RNA, 20 nt, Human
uuuuguaaacaauucuuaga

SEQ ID NO: 889507 - RNA, 18 nt, Human
aaaaauggcgggaaaggc

SEQ ID NO: 889508 - RNA, 18 nt, Human
agagccccucagagcccc

SEQ ID NO: 889509 - RNA, 23 nt, Human
agccgcugccgggcgucagcgca

SEQ ID NO: 889510 - RNA, 25 nt, Human
agccggcaccgcgcgcagcgcggcc

SEQ ID NO: 889511 - RNA, 18 nt, Human
agcuggggccccuggagc

SEQ ID NO: 889512 - RNA, 18 nt, Human
aggcagcgccagaagccc

SEQ ID NO: 889513 - RNA, 21 nt, Human
agggcgccgggguccccgaaa

SEQ ID NO: 889514 - RNA, 21 nt, Human
cacccccucuauugcuucgcc

SEQ ID NO: 889515 - RNA, 21 nt, Human
cacccggagcagccgcgcccg

SEQ ID NO: 889516 - RNA, 18 nt, Human
caccgcuccgggcccggc

SEQ ID NO: 889517 - RNA, 20 nt, Human
cagcagcaucccugugcacu

SEQ ID NO: 889518 - RNA, 20 nt, Human
cagccgcugccgggcgucag

SEQ ID NO: 889519 - RNA, 24 nt, Human
cagcucccgaccacccgccggaga

SEQ ID NO: 889520 - RNA, 18 nt, Human
ccagcggcggcgcgcucc

SEQ ID NO: 889521 - RNA, 29 nt, Human
cccucagagccccagcucccgaccacccc

SEQ ID NO: 889522 - RNA, 22 nt, Human
ccgaccacccgccggagaauuu

SEQ ID NO: 889523 - RNA, 20 nt, Human
ccggugguggaggagcccuc

SEQ ID NO: 889524 - RNA, 20 nt, Human
ccgugccagccgcugccggg

SEQ ID NO: 889525 - RNA, 19 nt, Human
ccucaaggccugccgcucc

SEQ ID NO: 889526 - RNA, 19 nt, Human
ccucagagccccagcuccc

SEQ ID NO: 889527 - RNA, 31 nt, Human
ccucgacgacagccucaaggccugccgcucu

SEQ ID NO: 889528 - RNA, 18 nt, Human
ccucugagcuggccgugc

SEQ ID NO: 889529 - RNA, 21 nt, Human
cgccgggguccccgaaacagc

SEQ ID NO: 889530 - RNA, 23 nt, Human
cgccgggguccccgaaacagcag

SEQ ID NO: 889531 - RNA, 22 nt, Human
cgcgcaacgccgcuagagcccc

SEQ ID NO: 889532 - RNA, 24 nt, Human
cggcgccucagguuccagcgaggg

SEQ ID NO: 889533 - RNA, 21 nt, Human
cggggcuggccaaggcagggc

SEQ ID NO: 889534 - RNA, 19 nt, Human
cuagagccccucagagccc

SEQ ID NO: 889535 - RNA, 20 nt, Human
cucaaggccugccgcuccuc

SEQ ID NO: 889536 - RNA, 28 nt, Human
cuccagcacccccucuauugcuucgccc

SEQ ID NO: 889537 - RNA, 18 nt, Human
gagcccucgacgacagcc

SEQ ID NO: 889538 - RNA, 22 nt, Human
gagucccucaggaaagcagcuc

SEQ ID NO: 889539 - RNA, 21 nt, Human
gccagcuggggccccuggagc

SEQ ID NO: 889540 - RNA, 21 nt, Human
gcccaagucccggguggccuc

SEQ ID NO: 889541 - RNA, 18 nt, Human
gccgaggagaaccgccgg

SEQ ID NO: 889542 - RNA, 22 nt, Human
gccguggucggugucuucuuuc

SEQ ID NO: 889543 - RNA, 20 nt, Human
ggccccuggagcuuccuugc

SEQ ID NO: 889544 - RNA, 19 nt, Human
uaacggcagugaagugaaa

SEQ ID NO: 889545 - RNA, 19 nt, Human
uagagccccucagagcccc

SEQ ID NO: 889546 - RNA, 20 nt, Human
ucagagccccagcucccgac

SEQ ID NO: 889547 - RNA, 23 nt, Human
ucagagccccagcucccgaccac

SEQ ID NO: 889548 - RNA, 21 nt, Human
ucccauuggccagcccggccc

SEQ ID NO: 889549 - RNA, 18 nt, Human
ucccggguggccucgugc

SEQ ID NO: 889550 - RNA, 20 nt, Human
uccucacgcgcccggcugcc

SEQ ID NO: 889551 - RNA, 21 nt, Human
uccucacgcgcccggcugcca

SEQ ID NO: 889552 - RNA, 19 nt, Human
ucggugguuggggaggaug

SEQ ID NO: 889553 - RNA, 18 nt, Human
ucucggcgccucagguuc

SEQ ID NO: 889554 - RNA, 25 nt, Human
ugagaugcccgggguggacaacccu

SEQ ID NO: 889555 - RNA, 18 nt, Human
ugagggaugagaugcccg

SEQ ID NO: 889556 - RNA, 19 nt, Human
uggacgcaggcagccgcgc

SEQ ID NO: 889557 - RNA, 18 nt, Human
uggccgugcaucugcgca

SEQ ID NO: 889558 - RNA, 21 nt, Human
ugggccgaggagaaccgccgg

SEQ ID NO: 889559 - RNA, 27 nt, Human
uggggaggaugccucaggggaucccau

SEQ ID NO: 889560 - RNA, 21 nt, Human
uuggccagcccggcccccucc

SEQ ID NO: 889561 - RNA, 18 nt, Human
uuuuacaguugagggaug

SEQ ID NO: 889562 - RNA, 22 nt, Human
uuuuuuuuuuuuuuuugucagg

SEQ ID NO: 889563 - RNA, 18 nt, Human
uuuuuuuuuuuuuuuuug

SEQ ID NO: 889564 - RNA, 19 nt, Human
uuuuuuuuuuuuuuuuugu

SEQ ID NO: 889565 - RNA, 23 nt, Human
aaaaaaaaaaaaaaaagaaagaa

SEQ ID NO: 889566 - RNA, 22 nt, Human
aaacaaucauuuggagaaagca

SEQ ID NO: 889567 - RNA, 22 nt, Human
aaagaaagaaagcaagccaggg

SEQ ID NO: 889568 - RNA, 19 nt, Human
aaagcccaguaggaacaca

SEQ ID NO: 889569 - RNA, 20 nt, Human
aacauagugaaacccugucu

SEQ ID NO: 889570 - RNA, 21 nt, Human
aacauagugaaacccugucuc

SEQ ID NO: 889571 - RNA, 18 nt, Human
aaucgcuugaaccuggga

SEQ ID NO: 889572 - RNA, 24 nt, Human
aaucgcuugaaccugggaggcaga

SEQ ID NO: 889573 - RNA, 21 nt, Human
aauggcagugggacaacuugg

SEQ ID NO: 889574 - RNA, 24 nt, Human
acccugucucuacuaaaaacacaa

SEQ ID NO: 889575 - RNA, 24 nt, Human
acgugaggccaggaguucgagacc

SEQ ID NO: 889576 - RNA, 21 nt, Human
acucaagggcugacuuugaau

SEQ ID NO: 889577 - RNA, 24 nt, Human
acugcaaacccauaguugcuaaca

SEQ ID NO: 889578 - RNA, 26 nt, Human
acuguuucaaaaaaaaaaaaaaaaaa

SEQ ID NO: 889579 - RNA, 19 nt, Human
agaggcuguagugagucaa

SEQ ID NO: 889580 - RNA, 22 nt, Human
agccuggccaacauagugaaac

SEQ ID NO: 889581 - RNA, 24 nt, Human
agccuggccaacauagugaaaccc

SEQ ID NO: 889582 - RNA, 20 nt, Human
agccugggugacagagagag

SEQ ID NO: 889583 - RNA, 18 nt, Human
agcggcagcagggcugag

SEQ ID NO: 889584 - RNA, 22 nt, Human
aggaaauaucagagaguagaaa

SEQ ID NO: 889585 - RNA, 18 nt, Human
aggaacacagagcuauag

SEQ ID NO: 889586 - RNA, 19 nt, Human
aggcagaggcuguagugag

SEQ ID NO: 889587 - RNA, 22 nt, Human
aggcaggaucuugacucauaua

SEQ ID NO: 889588 - RNA, 22 nt, Human
aggcaugagaaucgcuugaacc

SEQ ID NO: 889589 - RNA, 24 nt, Human
aggcaugagaaucgcuugaaccug

SEQ ID NO: 889590 - RNA, 26 nt, Human
aggcuguagugagucaacugcgccau

SEQ ID NO: 889591 - RNA, 24 nt, Human
aguggcucacgcuuguaaucccag

SEQ ID NO: 889592 - RNA, 21 nt, Human
aucacgugaggccaggaguuc

SEQ ID NO: 889593 - RNA, 19 nt, Human
auuaccuaagucccugaaa

SEQ ID NO: 889594 - RNA, 22 nt, Human
caaaacagaagaccauaaauug

SEQ ID NO: 889595 - RNA, 24 nt, Human
caacaauaaaagcuauguacauag

SEQ ID NO: 889596 - RNA, 21 nt, Human
caacauagugaaacccugucu

SEQ ID NO: 889597 - RNA, 24 nt, Human
caacauagugaaacccugucucua

SEQ ID NO: 889598 - RNA, 18 nt, Human
caagauaacugccaggac

SEQ ID NO: 889599 - RNA, 18 nt, Human
caagauaacugccaggac

SEQ ID NO: 889600 - RNA, 24 nt, Human
cacaccuguaaucccagcuacuug

SEQ ID NO: 889601 - RNA, 21 nt, Human
caccuccuuccccaccucaag

SEQ ID NO: 889602 - RNA, 20 nt, Human
caccuguaaucccagcuacu

SEQ ID NO: 889603 - RNA, 24 nt, Human
caccuguaaucccagcuacuuggg

SEQ ID NO: 889604 - RNA, 24 nt, Human
cacgcuuguaaucccagcacuuug

SEQ ID NO: 889605 - RNA, 24 nt, Human
cagaucacgugaggccaggaguuc

SEQ ID NO: 889606 - RNA, 24 nt, Human
cagcacaguggcucacgcuuguaa

SEQ ID NO: 889607 - RNA, 22 nt, Human
cagccugggugacagagagaga

SEQ ID NO: 889608 - RNA, 20 nt, Human
caucuucauuuuaucaagga

SEQ ID NO: 889609 - RNA, 19 nt, Human
cauugcacgccagccuggg

SEQ ID NO: 889610 - RNA, 22 nt, Human
cauugcacgccagccuggguga

SEQ ID NO: 889611 - RNA, 24 nt, Human
cauugcacgccagccugggugaca

SEQ ID NO: 889612 - RNA, 25 nt, Human
cauugcacgccagccugggugacag

SEQ ID NO: 889613 - RNA, 25 nt, Human
ccacacugcuccuuuuaaaaaaaau

SEQ ID NO: 889614 - RNA, 20 nt, Human
ccaggaguucgagaccagcc

SEQ ID NO: 889615 - RNA, 21 nt, Human
ccauugcacgccagccugggu

SEQ ID NO: 889616 - RNA, 22 nt, Human
ccauugcacgccagccugggug

SEQ ID NO: 889617 - RNA, 24 nt, Human
ccauugcacgccagccugggugac

SEQ ID NO: 889618 - RNA, 19 nt, Human
cccacaaggauggcagcag

SEQ ID NO: 889619 - RNA, 19 nt, Human
cccaggguuaggacugaga

SEQ ID NO: 889620 - RNA, 19 nt, Human
cccauaguugcuaacaauc

SEQ ID NO: 889621 - RNA, 22 nt, Human
ccucggaccaaucucuggcccc

SEQ ID NO: 889622 - RNA, 22 nt, Human
ccuggccaacauagugaaaccc

SEQ ID NO: 889623 - RNA, 24 nt, Human
ccuggccaacauagugaaacccug

SEQ ID NO: 889624 - RNA, 21 nt, Human
ccuguaaucccagcuacuugg

SEQ ID NO: 889625 - RNA, 19 nt, Human
ccuucccauagcccuuuug

SEQ ID NO: 889626 - RNA, 18 nt, Human
ccuuguacugagacccuc

SEQ ID NO: 889627 - RNA, 24 nt, Human
cgagaccagccuggccaacauagu

SEQ ID NO: 889628 - RNA, 20 nt, Human
cgccauugcacgccagccug

SEQ ID NO: 889629 - RNA, 24 nt, Human
cucaaccucggaccaaucucuggc

SEQ ID NO: 889630 - RNA, 24 nt, Human
cucacgcuuguaaucccagcacuu

SEQ ID NO: 889631 - RNA, 27 nt, Human
cucacgcuuguaaucccagcacuuugg

SEQ ID NO: 889632 - RNA, 18 nt, Human
cuccuuccccaccucaag

SEQ ID NO: 889633 - RNA, 21 nt, Human
cuguaaucccagcuacuuggg

SEQ ID NO: 889634 - RNA, 26 nt, Human
cugugacuaggacaauaccggggucc

SEQ ID NO: 889635 - RNA, 18 nt, Human
gagaaagcaacaccaagg

SEQ ID NO: 889636 - RNA, 24 nt, Human
gaucacgugaggccaggaguucga

SEQ ID NO: 889637 - RNA, 20 nt, Human
gcagcagaagcccuuaacag

SEQ ID NO: 889638 - RNA, 24 nt, Human
gccaacauagugaaacccugucuc

SEQ ID NO: 889639 - RNA, 19 nt, Human
gccauugcacgccagccug

SEQ ID NO: 889640 - RNA, 24 nt, Human
gccauugcacgccagccuggguga

SEQ ID NO: 889641 - RNA, 23 nt, Human
gcggcacacaccuguaaucccag

SEQ ID NO: 889642 - RNA, 19 nt, Human
ggacugagaacaaauacac

SEQ ID NO: 889643 - RNA, 19 nt, Human
ggcagugggacaacuugga

SEQ ID NO: 889644 - RNA, 18 nt, Human
ggccucgggcccagcaca

SEQ ID NO: 889645 - RNA, 21 nt, Human
gugaaacccugucucuacuaa

SEQ ID NO: 889646 - RNA, 22 nt, Human
guuucaucaccuccuuccccac

SEQ ID NO: 889647 - RNA, 18 nt, Human
uaacuccacuguuagcgg

SEQ ID NO: 889648 - RNA, 20 nt, Human
uaagaaaggauuuacaacaa

SEQ ID NO: 889649 - RNA, 22 nt, Human
uaagacaggugaagagaaauca

SEQ ID NO: 889650 - RNA, 24 nt, Human
uaaggcaugagaaucgcuugaacc

SEQ ID NO: 889651 - RNA, 21 nt, Human
uacucagaaaacugcaaaccc

SEQ ID NO: 889652 - RNA, 18 nt, Human
uagaaagugcuaaccaga

SEQ ID NO: 889653 - RNA, 24 nt, Human
uagcggcagcagggcugaguaaau

SEQ ID NO: 889654 - RNA, 20 nt, Human
uaguugcuaacaauccuauu

SEQ ID NO: 889655 - RNA, 22 nt, Human
ucaaaaaaaaaaaaaaaaaaaa

SEQ ID NO: 889656 - RNA, 25 nt, Human
ucaaaaaaaaaaaaaaaaaaaagaa

SEQ ID NO: 889657 - RNA, 23 nt, Human
ucaccuccuuccccaccucaaga

SEQ ID NO: 889658 - RNA, 21 nt, Human
ucagaucagugacauaacucc

SEQ ID NO: 889659 - RNA, 23 nt, Human
ucagucccugaggggauagaaaa

SEQ ID NO: 889660 - RNA, 18 nt, Human
ucgcuugaaccugggagg

SEQ ID NO: 889661 - RNA, 24 nt, Human
ucgggcccagcacaguggcucacg

SEQ ID NO: 889662 - RNA, 23 nt, Human
ucucuacuaaaaacacaaaaauu

SEQ ID NO: 889663 - RNA, 22 nt, Human
ucucuggccccaggguuaggac

SEQ ID NO: 889664 - RNA, 23 nt, Human
ucucuggccccaggguuaggacu

SEQ ID NO: 889665 - RNA, 19 nt, Human
ucucuguauacauccaaga

SEQ ID NO: 889666 - RNA, 27 nt, Human
ucugugacugaaacaauaccggggucc

SEQ ID NO: 889667 - RNA, 18 nt, Human
ucuuugggggcugagaaa

SEQ ID NO: 889668 - RNA, 19 nt, Human
ucuuugggggcugagaaau

SEQ ID NO: 889669 - RNA, 20 nt, Human
ucuuugggggcugagaaauu

SEQ ID NO: 889670 - RNA, 22 nt, Human
ugaaccugggaggcagaggcug

SEQ ID NO: 889671 - RNA, 26 nt, Human
ugaaguggacagaucacgugaggcca

SEQ ID NO: 889672 - RNA, 21 nt, Human
ugagaaaccuuugguauccaa

SEQ ID NO: 889673 - RNA, 20 nt, Human
ugagucaacugcgccauuga

SEQ ID NO: 889674 - RNA, 22 nt, Human
ugcacgccagccugggugacag

SEQ ID NO: 889675 - RNA, 18 nt, Human
uggaaaguuacagcaaga

SEQ ID NO: 889676 - RNA, 20 nt, Human
uggaaaguuacagcaagaaa

SEQ ID NO: 889677 - RNA, 22 nt, Human
uggaagucucuguagugaccac

SEQ ID NO: 889678 - RNA, 24 nt, Human
uggacagaucacgugaggccagga

SEQ ID NO: 889679 - RNA, 24 nt, Human
uggacggcugaaguggacagauca

SEQ ID NO: 889680 - RNA, 21 nt, Human
uggcagcagaagcccuuaaca

SEQ ID NO: 889681 - RNA, 24 nt, Human
uggccaacauagugaaacccuguc

SEQ ID NO: 889682 - RNA, 22 nt, Human
uggcuagucuaaaacaaucauu

SEQ ID NO: 889683 - RNA, 24 nt, Human
uggcucacgcuuguaaucccagca

SEQ ID NO: 889684 - RNA, 22 nt, Human
uguacauaggaaauaucagaga

SEQ ID NO: 889685 - RNA, 21 nt, Human
uguuucaucaccuccuucccc

SEQ ID NO: 889686 - RNA, 24 nt, Human
uguuucaucaccuccuuccccacc

SEQ ID NO: 889687 - RNA, 25 nt, Human
uuaaucuuaagacaggugaagagaa

SEQ ID NO: 889688 - RNA, 20 nt, Human
uucaaaaguuuuuguggaag

SEQ ID NO: 889689 - RNA, 21 nt, Human
uucaucuucauuuuaucaagg

SEQ ID NO: 889690 - RNA, 24 nt, Human
uugggaggcuaaggcaugagaauc

SEQ ID NO: 889691 - RNA, 23 nt, Human
uuuacccauauucaaaacucacc

SEQ ID NO: 889692 - RNA, 21 nt, Human
uuuaucaaggaugaaaucaaa

SEQ ID NO: 889693 - RNA, 19 nt, Human
uuuccauuuguucaguccc

SEQ ID NO: 889694 - RNA, 25 nt, Human
uuuuuuuuuuuuuuuuuuuuuaagg

SEQ ID NO: 889695 - RNA, 18 nt, Human
aaaacccaagcagcacca

SEQ ID NO: 889696 - RNA, 18 nt, Human
aaaacccaagcagcacca

SEQ ID NO: 889697 - RNA, 26 nt, Human
aaaacccaagcagcaccagcagcccc

SEQ ID NO: 889698 - RNA, 26 nt, Human
aaaacccaagcagcaccagcagcccc

SEQ ID NO: 889699 - RNA, 22 nt, Human
aaacaccacacugcuacugaug

SEQ ID NO: 889700 - RNA, 24 nt, Human
aaacauuaaaaguucaccuugacc

SEQ ID NO: 889701 - RNA, 24 nt, Human
aaacauuaaaaguucaccuugacc

SEQ ID NO: 889702 - RNA, 20 nt, Human
aacccaaaacccaagcagca

SEQ ID NO: 889703 - RNA, 20 nt, Human
aacccaaaacccaagcagca

SEQ ID NO: 889704 - RNA, 25 nt, Human
aacccaagcagcaccagcagccccu

SEQ ID NO: 889705 - RNA, 25 nt, Human
aacccaagcagcaccagcagccccu

SEQ ID NO: 889706 - RNA, 21 nt, Human
aaccccauuuccuccccuuug

SEQ ID NO: 889707 - RNA, 23 nt, Human
aaccccuugacgccccugccugc

SEQ ID NO: 889708 - RNA, 22 nt, Human
aaccuccagaagaacaccacac

SEQ ID NO: 889709 - RNA, 22 nt, Human
aaccuccagaagaacaccacac

SEQ ID NO: 889710 - RNA, 21 nt, Human
aaccugggggcaaaaaagggg

SEQ ID NO: 889711 - RNA, 27 nt, Human
aagcagcaccagcagccccccaguagg

SEQ ID NO: 889712 - RNA, 27 nt, Human
aagcagcaccagcagccccccaguagg

SEQ ID NO: 889713 - RNA, 18 nt, Human
aauguuugugacauucuc

SEQ ID NO: 889714 - RNA, 18 nt, Human
aauguuugugacauucuc

SEQ ID NO: 889715 - RNA, 19 nt, Human
acaaccuccagaagaacac

SEQ ID NO: 889716 - RNA, 20 nt, Human
acaaccuccagaagaacacc

SEQ ID NO: 889717 - RNA, 23 nt, Human
acacacacacacacacacacaca

SEQ ID NO: 889718 - RNA, 23 nt, Human
acacacacacacacacacacaca

SEQ ID NO: 889719 - RNA, 23 nt, Human
acacacacacacacacacacaca

SEQ ID NO: 889720 - RNA, 23 nt, Human
acacacacacacacacacacaca

SEQ ID NO: 889721 - RNA, 23 nt, Human
acacacacacacacacacacaca

SEQ ID NO: 889722 - RNA, 23 nt, Human
acacacacacacacacacacaua

SEQ ID NO: 889723 - RNA, 23 nt, Human
acacacacacacacacacauaua

SEQ ID NO: 889724 - RNA, 23 nt, Human
acacacacacacacacacauaua

SEQ ID NO: 889725 - RNA, 30 nt, Human
acacacacacacacacacauauaauguaua

SEQ ID NO: 889726 - RNA, 30 nt, Human; identical to SEQ ID NO: 889725

SEQ ID NO: 889727 - RNA, 22 nt, Human
acaggugugcuugguggagggu

SEQ ID NO: 889728 - RNA, 31 nt, Human
acccaaaacccaagcagcaccagcagccccc

SEQ ID NO: 889729 - RNA, 31 nt, Human; identical to SEQ ID NO: 889728

SEQ ID NO: 889730 - RNA, 19 nt, Human
acccaagcagcaccagcag

SEQ ID NO: 889731 - RNA, 19 nt, Human
acccaagcagcaccagcag

SEQ ID NO: 889732 - RNA, 18 nt, Human
accccugccucuggccac

SEQ ID NO: 889733 - RNA, 21 nt, Human
acccgccacaacccuuccccc

SEQ ID NO: 889734 - RNA, 21 nt, Human
acccgccacaacccuuccccc

SEQ ID NO: 889735 - RNA, 22 nt, Human
acccuucccccguccacagccc

SEQ ID NO: 889736 - RNA, 18 nt, Human
accuugaccaaagagaca

SEQ ID NO: 889737 - RNA, 19 nt, Human
agaaaccccuugacgcccc

SEQ ID NO: 889738 - RNA, 23 nt, Human
agaagaacaccacacaugggagg

SEQ ID NO: 889739 - RNA, 24 nt, Human
agacaaccuccagaagaacaccac

SEQ ID NO: 889740 - RNA, 24 nt, Human
agacaaccuccagaagaacaccac

SEQ ID NO: 889741 - RNA, 22 nt, Human
agagaaaccccuugacgccccu

SEQ ID NO: 889742 - RNA, 24 nt, Human
agagcucugccugaaacaccacac

SEQ ID NO: 889743 - RNA, 18 nt, Human
agcaaaaaacaaaauucc

SEQ ID NO: 889744 - RNA, 18 nt, Human
agcaaaaaacaaaauucc

SEQ ID NO: 889745 - RNA, 19 nt, Human
agcaaaaaacaaaauucca

SEQ ID NO: 889746 - RNA, 19 nt, Human
agcaaaaaacaaaauucca

SEQ ID NO: 889747 - RNA, 21 nt, Human
agcaaaaaacaaaauuccaag

SEQ ID NO: 889748 - RNA, 21 nt, Human
agcaaaaaacaaaauuccaag

SEQ ID NO: 889749 - RNA, 22 nt, Human
agcaaaaaacaaaauuccaaga

SEQ ID NO: 889750 - RNA, 22 nt, Human
agcaaaaaacaaaauuccaaga

SEQ ID NO: 889751 - RNA, 24 nt, Human
agcagcaccagcagccccugccca

SEQ ID NO: 889752 - RNA, 24 nt, Human
agcagcaccagcagccccugccca

SEQ ID NO: 889753 - RNA, 23 nt, Human
aggaacucagcuaccccugccuc

SEQ ID NO: 889754 - RNA, 22 nt, Human
aggcggggagcggggcuucggc

SEQ ID NO: 889755 - RNA, 19 nt, Human
agucaggucacugugggga

SEQ ID NO: 889756 - RNA, 19 nt, Human
aucucaugacagcagccac

SEQ ID NO: 889757 - RNA, 19 nt, Human
aucucaugacagcagccac

SEQ ID NO: 889758 - RNA, 24 nt, Human
augacagcagccaccagaauacac

SEQ ID NO: 889759 - RNA, 24 nt, Human
augacagcagccaccagaauacac

SEQ ID NO: 889760 - RNA, 22 nt, Human
auguuuucacugcucucucccg

SEQ ID NO: 889761 - RNA, 25 nt, Human
auucuguuucuccaaaagccuccca

SEQ ID NO: 889762 - RNA, 25 nt, Human
auucuguuucuccaaaagccuccca

SEQ ID NO: 889763 - RNA, 24 nt, Human
auugggacagggccaggagguggc

SEQ ID NO: 889764 - RNA, 22 nt, Human
caaaaaaggggucuccaggaac

SEQ ID NO: 889765 - RNA, 19 nt, Human
caaacagaaccccauuucc

SEQ ID NO: 889766 - RNA, 19 nt, Human
caacccaaaacccaagcag

SEQ ID NO: 889767 - RNA, 19 nt, Human
caacccaaaacccaagcag

SEQ ID NO: 889768 - RNA, 18 nt, Human
caaccuccagaagaacac

SEQ ID NO: 889769 - RNA, 18 nt, Human
caaccuccagaagaacac

SEQ ID NO: 889770 - RNA, 22 nt, Human
caaccuccagaagaacaccaca

SEQ ID NO: 889771 - RNA, 22 nt, Human
caaccuccagaagaacaccaca

SEQ ID NO: 889772 - RNA, 20 nt, Human
cacacacacacacacacaca

SEQ ID NO: 889773 - RNA, 20 nt, Human
cacacacacacacacacaca

SEQ ID NO: 889774 - RNA, 20 nt, Human
cacacacacacacacacaca

SEQ ID NO: 889775 - RNA, 20 nt, Human
cacacacacacacacacaca

SEQ ID NO: 889776 - RNA, 20 nt, Human
cacacacacacacacacaca

SEQ ID NO: 889777 - RNA, 20 nt, Human
cacacacacacacacacaca

SEQ ID NO: 889778 - RNA, 20 nt, Human
cacacacacacacacacaca

SEQ ID NO: 889779 - RNA, 20 nt, Human
cacacacacacacacacaca

SEQ ID NO: 889780 - RNA, 20 nt, Human
cacacacacacacacacaca

SEQ ID NO: 889781 - RNA, 22 nt, Human
cacacacacacacacacacaca

SEQ ID NO: 889782 - RNA, 22 nt, Human
cacacacacacacacacacaca

SEQ ID NO: 889783 - RNA, 26 nt, Human
cacacacacacacacacacacacaca

SEQ ID NO: 889784 - RNA, 26 nt, Human
cacacacacacacacacacacacaca

SEQ ID NO: 889785 - RNA, 26 nt, Human
cacacacacacacacacacacacaca

SEQ ID NO: 889786 - RNA, 26 nt, Human
cacacacacacacacacacacacaca

SEQ ID NO: 889787 - RNA, 26 nt, Human
cacacacacacacacacacacacaua

SEQ ID NO: 889788 - RNA, 26 nt, Human
cacacacacacacacacacacauaua

SEQ ID NO: 889789 - RNA, 22 nt, Human
cacacacacacacacacacaua

SEQ ID NO: 889790 - RNA, 30 nt, Human
cacacacacacacacacacauauaauguag

SEQ ID NO: 889791 - RNA, 30 nt, Human; identical to SEQ ID NO: 889790

SEQ ID NO: 889792 - RNA, 20 nt, Human
cacacacacacacacacaua

SEQ ID NO: 889793 - RNA, 20 nt, Human
cacacacacacacacacaua

SEQ ID NO: 889794 - RNA, 19 nt, Human
cacacacacacacacauau

SEQ ID NO: 889795 - RNA, 19 nt, Human
cacacacacacacacauau

SEQ ID NO: 889796 - RNA, 20 nt, Human
cacagccuggccagagcucu

SEQ ID NO: 889797 - RNA, 21 nt, Human
caccacaaaguucucaggggc

SEQ ID NO: 889798 - RNA, 18 nt, Human
cacccccagucaggucac

SEQ ID NO: 889799 - RNA, 22 nt, Human
cacccucaacccaaaacccaag

SEQ ID NO: 889800 - RNA, 22 nt, Human
cacccucaacccaaaacccaag

SEQ ID NO: 889801 - RNA, 21 nt, Human
caccugcgggcucccaaaggc

SEQ ID NO: 889802 - RNA, 19 nt, Human
caccuugaccaaagagaca

SEQ ID NO: 889803 - RNA, 18 nt, Human
cacgccaccaggcuaguc

SEQ ID NO: 889804 - RNA, 18 nt, Human
cacgccaccaggcuaguc

SEQ ID NO: 889805 - RNA, 23 nt, Human
cagaacacccgccacaacccuuc

SEQ ID NO: 889806 - RNA, 23 nt, Human
cagaacacccgccacaacccuuc

SEQ ID NO: 889807 - RNA, 23 nt, Human
cagagcucugccugaaacaccac

SEQ ID NO: 889808 - RNA, 27 nt, Human
cagcaaaaaacaaaauuccaagauuug

SEQ ID NO: 889809 - RNA, 27 nt, Human
cagcaaaaaacaaaauuccaagauuug

SEQ ID NO: 889810 - RNA, 18 nt, Human
cagcccccaguaagcccc

SEQ ID NO: 889811 - RNA, 23 nt, Human
caucuccaaacaugccugcccaa

SEQ ID NO: 889812 - RNA, 20 nt, Human
cauguccagaaccuucagcc

SEQ ID NO: 889813 - RNA, 24 nt, Human
cauuaaaaguucaccuugaccaaa

SEQ ID NO: 889814 - RNA, 24 nt, Human
cauuaaaaguucaccuugaccaaa

SEQ ID NO: 889815 - RNA, 23 nt, Human
cauucaguauucagaagaagcac

SEQ ID NO: 889816 - RNA, 23 nt, Human
cauucaguauucagaagaagcac

SEQ ID NO: 889817 - RNA, 21 nt, Human
cauucuguuucuccaaaagcc

SEQ ID NO: 889818 - RNA, 20 nt, Human
ccacaaaguucucaggggca

SEQ ID NO: 889819 - RNA, 25 nt, Human
ccagaagaacaccacacaugggagg

SEQ ID NO: 889820 - RNA, 21 nt, Human
cccagcacccacccucucgaa

SEQ ID NO: 889821 - RNA, 22 nt, Human
ccccgcaccccuguggcccagc

SEQ ID NO: 889822 - RNA, 25 nt, Human
ccccgcaccccuguggcccagcacc

SEQ ID NO: 889823 - RNA, 21 nt, Human
ccccuugacgccccugccugc

SEQ ID NO: 889824 - RNA, 22 nt, Human
ccccuuugcccucacaaaaaua

SEQ ID NO: 889825 - RNA, 21 nt, Human
cccgcaccccuguggcccagc

SEQ ID NO: 889826 - RNA, 21 nt, Human
cccgccacaacccuucccccg

SEQ ID NO: 889827 - RNA, 21 nt, Human
cccgccacaacccuucccccg

SEQ ID NO: 889828 - RNA, 18 nt, Human
cccucaacccaaaaccca

SEQ ID NO: 889829 - RNA, 18 nt, Human
cccucaacccaaaaccca

SEQ ID NO: 889830 - RNA, 21 nt, Human
cccuucccccguccacagccc

SEQ ID NO: 889831 - RNA, 20 nt, Human
ccgcaccccuguggcccagc

SEQ ID NO: 889832 - RNA, 26 nt, Human
ccuagcacccucaacccaaaacccaa

SEQ ID NO: 889833 - RNA, 26 nt, Human
ccuagcacccucaacccaaaacccaa

SEQ ID NO: 889834 - RNA, 20 nt, Human
ccuccagaagaacaccacac

SEQ ID NO: 889835 - RNA, 20 nt, Human
ccuccagaagaacaccacac

SEQ ID NO: 889836 - RNA, 21 nt, Human
ccucucagcuucagaacaccc

SEQ ID NO: 889837 - RNA, 22 nt, Human
ccugcauguuuucacugcucuc

SEQ ID NO: 889838 - RNA, 22 nt, Human
ccugcauguuuucacugcucuc

SEQ ID NO: 889839 - RNA, 24 nt, Human
ccugcccaagggcucacccaggaa

SEQ ID NO: 889840 - RNA, 18 nt, Human
ccuggccagagcucugcc

SEQ ID NO: 889841 - RNA, 18 nt, Human
ccuuaaaacaccuggaga

SEQ ID NO: 889842 - RNA, 22 nt, Human
cgaagccucucucaucuccaaa

SEQ ID NO: 889843 - RNA, 18 nt, Human
cgcaccccuguggcccag

SEQ ID NO: 889844 - RNA, 24 nt, Human
cgccacaacccuucccccguccac

SEQ ID NO: 889845 - RNA, 21 nt, Human
cggggaggccuuggcucagaa

SEQ ID NO: 889846 - RNA, 22 nt, Human
cuccaggaacucagcuaccccu

SEQ ID NO: 889847 - RNA, 21 nt, Human
cucccuauggcccugcccuuc

SEQ ID NO: 889848 - RNA, 18 nt, Human
cucuccuagcacccucaa

SEQ ID NO: 889849 - RNA, 18 nt, Human
cucuccuagcacccucaa

SEQ ID NO: 889850 - RNA, 19 nt, Human
cuggagacuguucugcuca

SEQ ID NO: 889851 - RNA, 20 nt, Human
cuggagacuguucugcugca

SEQ ID NO: 889852 - RNA, 18 nt, Human
cuugaccaaagagacaac

SEQ ID NO: 889853 - RNA, 18 nt, Human
cuugaccaaagagacaac

SEQ ID NO: 889854 - RNA, 18 nt, Human
cuuguucauguccagaac

SEQ ID NO: 889855 - RNA, 23 nt, Human
gaaaccccuugacgccccugccu

SEQ ID NO: 889856 - RNA, 23 nt, Human
gaaccuucagcccccaguaagcc

SEQ ID NO: 889857 - RNA, 19 nt, Human
gaagccuuucucuucuacc

SEQ ID NO: 889858 - RNA, 30 nt, Human
gacccgauguacacacacacacacacacag

SEQ ID NO: 889859 - RNA, 30 nt, Human; identical to SEQ ID NO: 889858

SEQ ID NO: 889860 - RNA, 18 nt, Human
gagaugggaugaggagga

SEQ ID NO: 889861 - RNA, 23 nt, Human
gaggggguagaacugggcagaaa

SEQ ID NO: 889862 - RNA, 21 nt, Human
gauccguagcgaaucucccuc

SEQ ID NO: 889863 - RNA, 21 nt, Human
gcagcaucuaagauccccuca

SEQ ID NO: 889864 - RNA, 23 nt, Human
gccacaacccuucccccguccac

SEQ ID NO: 889865 - RNA, 18 nt, Human
gccaggagguggcagagu

SEQ ID NO: 889866 - RNA, 18 nt, Human
gccagugccugagcuggc

SEQ ID NO: 889867 - RNA, 19 nt, Human
gcuacugauggcguugccc

SEQ ID NO: 889868 - RNA, 21 nt, Human
ggaaagcauacaacgcagucc

SEQ ID NO: 889869 - RNA, 22 nt, Human
ggaaagcauacaacgcaguccu

SEQ ID NO: 889870 - RNA, 19 nt, Human
ggaagccuuucucuucuac

SEQ ID NO: 889871 - RNA, 21 nt, Human
ggagaagaaaauaauaaacau

SEQ ID NO: 889872 - RNA, 21 nt, Human
ggagaagaaaauaauaaacau

SEQ ID NO: 889873 - RNA, 19 nt, Human
ggcaaaaaaggggucucca

SEQ ID NO: 889874 - RNA, 19 nt, Human
ggcaaaaaaggggucuccg

SEQ ID NO: 889875 - RNA, 19 nt, Human
ggccaggagguggcagagu

SEQ ID NO: 889876 - RNA, 19 nt, Human
gggacacacuggcacagcc

SEQ ID NO: 889877 - RNA, 24 nt, Human
gggaugaggaggacugagccccuu

SEQ ID NO: 889878 - RNA, 25 nt, Human
ggggaaccugggggcaaaaaagggg

SEQ ID NO: 889879 - RNA, 21 nt, Human
ggggguagaacugggcagaaa

SEQ ID NO: 889880 - RNA, 21 nt, Human
ggguuugugauuauugauuua

SEQ ID NO: 889881 - RNA, 23 nt, Human
gguaaggugaguggauggaaagc

SEQ ID NO: 889882 - RNA, 20 nt, Human
ggugugggacuguagaagcc

SEQ ID NO: 889883 - RNA, 20 nt, Human
gguuugugauuauugauuua

SEQ ID NO: 889884 - RNA, 21 nt, Human
guggagcaggaggccgcggag

SEQ ID NO: 889885 - RNA, 25 nt, Human
guguccucucagccucagaacaccc

SEQ ID NO: 889886 - RNA, 25 nt, Human
guguccucucagcuucagaacaccc

SEQ ID NO: 889887 - RNA, 23 nt, Human
guucauguccagaaccuucagcc

SEQ ID NO: 889888 - RNA, 30 nt, Human
uaaaaguucaccuugaccaaagagacaacu

SEQ ID NO: 889889 - RNA, 30 nt, Human; identical to SEQ ID NO: 889888

SEQ ID NO: 889890 - RNA, 22 nt, Human
uaacacgccaccaggcuaguca

SEQ ID NO: 889891 - RNA, 22 nt, Human
uaacacgccaccaggcuaguca

SEQ ID NO: 889892 - RNA, 19 nt, Human
uacaacgcaguccugggcu

SEQ ID NO: 889893 - RNA, 20 nt, Human
uacacacacacacacacaca

SEQ ID NO: 889894 - RNA, 20 nt, Human
uacacacacacacacacaca

SEQ ID NO: 889895 - RNA, 25 nt, Human
uacacacacacacacacacacacac

SEQ ID NO: 889896 - RNA, 23 nt, Human
uagaaggggggugauguguguag

SEQ ID NO: 889897 - RNA, 23 nt, Human
uagaaggggggugauguguguag

SEQ ID NO: 889898 - RNA, 18 nt, Human
uagguguccucucagccu

SEQ ID NO: 889899 - RNA, 18 nt, Human
uagguguccucucagcuu

SEQ ID NO: 889900 - RNA, 24 nt, Human
uauggcccugcccuucugugccug

SEQ ID NO: 889901 - RNA, 22 nt, Human
uaugggguaaggugaaguggau

SEQ ID NO: 889902 - RNA, 22 nt, Human
uauucagaagaagcacaugagg

SEQ ID NO: 889903 - RNA, 22 nt, Human
uauucagaagaagcacaugagg

SEQ ID NO: 889904 - RNA, 21 nt, Human
ucaacccaaaacccaagcagc

SEQ ID NO: 889905 - RNA, 21 nt, Human
ucaacccaaaacccaagcagc

SEQ ID NO: 889906 - RNA, 19 nt, Human
uccacagcccugcauguuu

SEQ ID NO: 889907 - RNA, 19 nt, Human
uccacagcccugcauguuu

SEQ ID NO: 889908 - RNA, 18 nt, Human
uccagaagaacaccacac

SEQ ID NO: 889909 - RNA, 18 nt, Human
uccagaagaacaccacac

SEQ ID NO: 889910 - RNA, 20 nt, Human
ucccaaaggcagucaccaca

SEQ ID NO: 889911 - RNA, 20 nt, Human
ucccaaaggcagucaccacg

SEQ ID NO: 889912 - RNA, 19 nt, Human
ucccagggcucccacgcca

SEQ ID NO: 889913 - RNA, 24 nt, Human
ucccaugaugggcauggcaucacc

SEQ ID NO: 889914 - RNA, 24 nt, Human
ucccaugaugggcauggcaucacc

SEQ ID NO: 889915 - RNA, 21 nt, Human
uccccuuugcccucacaaaaa

SEQ ID NO: 889916 - RNA, 23 nt, Human
uccuagcacccucaacccaaaac

SEQ ID NO: 889917 - RNA, 23 nt, Human
uccuagcacccucaacccaaaac

SEQ ID NO: 889918 - RNA, 24 nt, Human
uccuccccuuugcccucacaaaaa

SEQ ID NO: 889919 - RNA, 18 nt, Human
uccuugggcagagaaacc

SEQ ID NO: 889920 - RNA, 24 nt, Human
ucggggaggccuuggcucagaauu

SEQ ID NO: 889921 - RNA, 30 nt, Human
ucuccaaacaugccugcccaagggcucacu

SEQ ID NO: 889922 - RNA, 18 nt, Human
ucuccauguucugucuuc

SEQ ID NO: 889923 - RNA, 20 nt, Human
ucuccuagcacccucaaccc

SEQ ID NO: 889924 - RNA, 20 nt, Human
ucuccuagcacccucaaccc

SEQ ID NO: 889925 - RNA, 20 nt, Human
ucucuccuccuucucccuca

SEQ ID NO: 889926 - RNA, 19 nt, Human
ugaaacaccacacugcuac

SEQ ID NO: 889927 - RNA, 23 nt, Human
ugaaacaccacacugcuacuguc

SEQ ID NO: 889928 - RNA, 22 nt, Human
ugaccaaagagacaaccuccag

SEQ ID NO: 889929 - RNA, 22 nt, Human
ugaccaaagagacaaccuccag

SEQ ID NO: 889930 - RNA, 29 nt, Human
ugaccaaagagacaaccuccagaagaaca

SEQ ID NO: 889931 - RNA, 29 nt, Human
ugaccaaagagacaaccuccagaagaaca

SEQ ID NO: 889932 - RNA, 19 nt, Human
ugaccuggauccguagcga

SEQ ID NO: 889933 - RNA, 24 nt, Human
ugagacaaauggcucugguuucug

SEQ ID NO: 889934 - RNA, 24 nt, Human
ugagacaaauggcucugguuucug

SEQ ID NO: 889935 - RNA, 18 nt, Human
ugagaggggucaaguugg

SEQ ID NO: 889936 - RNA, 19 nt, Human
ugagaugggaugaggagga

SEQ ID NO: 889937 - RNA, 19 nt, Human
ugagcuggccccgcacccc

SEQ ID NO: 889938 - RNA, 21 nt, Human
ugagcuggccccgcaccccug

SEQ ID NO: 889939 - RNA, 24 nt, Human
ugaggggguagaacugggcagaaa

SEQ ID NO: 889940 - RNA, 24 nt, Human
ugaggggguagaacugggcagaaa

SEQ ID NO: 889941 - RNA, 22 nt, Human
ugaugcguccgggacacacuga

SEQ ID NO: 889942 - RNA, 24 nt, Human
uggaaacagcaaaaaacaaaauuc

SEQ ID NO: 889943 - RNA, 24 nt, Human
uggaaacagcaaaaaacaaaauuc

SEQ ID NO: 889944 - RNA, 22 nt, Human
uggaagggacagucuguggggu

SEQ ID NO: 889945 - RNA, 21 nt, Human
uggagcaggaggccgcggaga

SEQ ID NO: 889946 - RNA, 18 nt, Human
uggagggugggggaaggg

SEQ ID NO: 889947 - RNA, 19 nt, Human
uggagggugggggaagggg

SEQ ID NO: 889948 - RNA, 21 nt, Human
uggcagagugugggcuggaag

SEQ ID NO: 889949 - RNA, 19 nt, Human
uggccaccugcgggcuccc

SEQ ID NO: 889950 - RNA, 19 nt, Human
uggcucagaauugggacag

SEQ ID NO: 889951 - RNA, 18 nt, Human
uggcugccugguccgagc

SEQ ID NO: 889952 - RNA, 18 nt, Human
ugggaugagaggggucaa

SEQ ID NO: 889953 - RNA, 20 nt, Human
ugggcagaaacuaacacgcc

SEQ ID NO: 889954 - RNA, 20 nt, Human
ugggcagaaacuaacacgcc

SEQ ID NO: 889955 - RNA, 18 nt, Human
ugggcuggaagggacagu

SEQ ID NO: 889956 - RNA, 21 nt, Human
ugggggcaaaaaaggggucuc

SEQ ID NO: 889957 - RNA, 23 nt, Human
uggggugugggacuguagaagcc

SEQ ID NO: 889958 - RNA, 20 nt, Human
ugggguuccugcccugacgg

SEQ ID NO: 889959 - RNA, 18 nt, Human
ugguuucugggccgcaag

SEQ ID NO: 889960 - RNA, 18 nt, Human
ugguuucugggccgcaag

SEQ ID NO: 889961 - RNA, 25 nt, Human
uguacacacacacacacacacacac

SEQ ID NO: 889962 - RNA, 25 nt, Human
uguacacacacacacacacacacag

SEQ ID NO: 889963 - RNA, 25 nt, Human
uguacacacacacacacacacacag

SEQ ID NO: 889964 - RNA, 25 nt, Human
uguacacacacacacacacacacau

SEQ ID NO: 889965 - RNA, 22 nt, Human
uguccagaaccuucagccccca

SEQ ID NO: 889966 - RNA, 23 nt, Human
uguccucucagcuucagaacacc

SEQ ID NO: 889967 - RNA, 22 nt, Human
ugugacguguacuggaaauaga

SEQ ID NO: 889968 - RNA, 22 nt, Human
ugugacguguacuggaaauaga

SEQ ID NO: 889969 - RNA, 23 nt, Human
uguggcccagcacccacccucuc

SEQ ID NO: 889970 - RNA, 21 nt, Human
uguuuucacugcucucucccg

SEQ ID NO: 889971 - RNA, 23 nt, Human
uucaccuugaccaaagagacaac

SEQ ID NO: 889972 - RNA, 23 nt, Human
uucaccuugaccaaagagacaac

SEQ ID NO: 889973 - RNA, 26 nt, Human
uucacugcucucucccguuuuggggg

SEQ ID NO: 889974 - RNA, 26 nt, Human
uucacugcucucucccguuuuggggg

SEQ ID NO: 889975 - RNA, 22 nt, Human
uucauguccagaaccuucagcc

SEQ ID NO: 889976 - RNA, 25 nt, Human
uucuccauguucugucuuccuuggg

SEQ ID NO: 889977 - RNA, 19 nt, Human
uucuguuucuccaaaagcc

SEQ ID NO: 889978 - RNA, 19 nt, Human
uugaccaaagagacaaccu

SEQ ID NO: 889979 - RNA, 19 nt, Human
uugaccaaagagacaaccu

SEQ ID NO: 889980 - RNA, 18 nt, Human
accauaaaaaguuaaaag

SEQ ID NO: 889981 - RNA, 23 nt, Human
accauaaaaaguuaaaagaaaag

SEQ ID NO: 889982 - RNA, 19 nt, Human
acuaugccaacagaagcac

SEQ ID NO: 889983 - RNA, 23 nt, Human
agccaucaaacugcuaccaagcu

SEQ ID NO: 889984 - RNA, 24 nt, Human
caagugguagcaacaccaguccuu

SEQ ID NO: 889985 - RNA, 23 nt, Human
ccaguacucucauguuauguaac

SEQ ID NO: 889986 - RNA, 18 nt, Human
ccuggcccaguacucuca

SEQ ID NO: 889987 - RNA, 26 nt, Human
cugaaaaugcuugagaaaguugcaau

SEQ ID NO: 889988 - RNA, 18 nt, Human
gcaagacccgucgccaag

SEQ ID NO: 889989 - RNA, 20 nt, Human
gcaauagauggaaaagaaac

SEQ ID NO: 889990 - RNA, 22 nt, Human
ggaagaaacuguucuuuuuucu

SEQ ID NO: 889991 - RNA, 22 nt, Human
ggacucacagaaaauacagucu

SEQ ID NO: 889992 - RNA, 23 nt, Human
gugguagcaacaccaguccuggc

SEQ ID NO: 889993 - RNA, 18 nt, Human
uagcaacaccaguccugg

SEQ ID NO: 889994 - RNA, 18 nt, Human
uccacgugccagcacaug

SEQ ID NO: 889995 - RNA, 22 nt, Human
uccagcuacuuuuccaaucucu

SEQ ID NO: 889996 - RNA, 21 nt, Human
ucuggaagcuuuggaaaaggu

SEQ ID NO: 889997 - RNA, 21 nt, Human
ucuggaauuaaaguucagagc

SEQ ID NO: 889998 - RNA, 24 nt, Human
uucagagcugaaaaugcuugagaa

SEQ ID NO: 889999 - RNA, 20 nt, Human
uuuguaucacuugaucagga

SEQ ID NO: 890000 - RNA, 19 nt, Human
aaaccucuguucagcacac

SEQ ID NO: 890001 - RNA, 27 nt, Human
aagcauuucaauauuuuuuccuuacgg

SEQ ID NO: 890002 - RNA, 23 nt, Human
acaccagggagcagaccgaguac

SEQ ID NO: 890003 - RNA, 18 nt, Human
acagcaaaaaggcuauga

SEQ ID NO: 890004 - RNA, 18 nt, Human
agagcacucucuagcucc

SEQ ID NO: 890005 - RNA, 18 nt, Human
agcacaccguuaaaaugc

SEQ ID NO: 890006 - RNA, 20 nt, Human
agcacaccguuaaaaugcag

SEQ ID NO: 890007 - RNA, 26 nt, Human
agugcugcugugccucuuguuuagcu

SEQ ID NO: 890008 - RNA, 19 nt, Human
caacaauauuccaagagca

SEQ ID NO: 890009 - RNA, 22 nt, Human
caauacugagaauugcugcaga

SEQ ID NO: 890010 - RNA, 24 nt, Human
cacacauuguccuuuucaaaacaa

SEQ ID NO: 890011 - RNA, 19 nt, Human
cagaccgaguacagcaaaa

SEQ ID NO: 890012 - RNA, 25 nt, Human
cagaccgaguacagcaaaaaggcua

SEQ ID NO: 890013 - RNA, 23 nt, Human
cagcuuccuucuuggacacgaga

SEQ ID NO: 890014 - RNA, 24 nt, Human
cagcuuccuucuuggacacgagaa

SEQ ID NO: 890015 - RNA, 23 nt, Human
caugagauauccaguauucaggu

SEQ ID NO: 890016 - RNA, 20 nt, Human
cauuucaauauuuugucuuu

SEQ ID NO: 890017 - RNA, 20 nt, Human
cugcuccugcucugcuguug

SEQ ID NO: 890018 - RNA, 20 nt, Human
cugugccucuuguuuagcug

SEQ ID NO: 890019 - RNA, 22 nt, Human
cuuucaguucaugcaaucugcc

SEQ ID NO: 890020 - RNA, 23 nt, Human
gagcacaacugaguuaaagcugg

SEQ ID NO: 890021 - RNA, 22 nt, Human
gagcuuucaguucaugcaaucu

SEQ ID NO: 890022 - RNA, 24 nt, Human
gaguacagcaaaaaggcuaugaga

SEQ ID NO: 890023 - RNA, 21 nt, Human
guuuuggaagcuuuuucccaa

SEQ ID NO: 890024 - RNA, 24 nt, Human
uaaaaguaucuugagaggcuuagu

SEQ ID NO: 890025 - RNA, 21 nt, Human
uaaaguaugagauguugcaaa

SEQ ID NO: 890026 - RNA, 21 nt, Human
ucaguucaugcaaucugccuc

SEQ ID NO: 890027 - RNA, 22 nt, Human
ucuugagaggcuuaguucuugu

SEQ ID NO: 890028 - RNA, 27 nt, Human
ugcugcugugccucuuguuccgucacg

SEQ ID NO: 890029 - RNA, 21 nt, Human
ugcuguugcuagugcugcugu

SEQ ID NO: 890030 - RNA, 23 nt, Human
ugucugaacucuuccagcagagu

SEQ ID NO: 890031 - RNA, 23 nt, Human
uuaaaaugcagcuuccuucuugg

SEQ ID NO: 890032 - RNA, 19 nt, Human
uugaagggagcacaacuga

SEQ ID NO: 890033 - RNA, 22 nt, Human
uuuucaaaacaagcagccagcu

SEQ ID NO: 890034 - RNA, 21 nt, Human
ggaggggccgccucugucagu

SEQ ID NO: 890035 - RNA, 21 nt, Human
uugguuuucacauuuuuauug

SEQ ID NO: 890036 - RNA, 18 nt, Human
uuuuuuuuuuuuuuuuug

SEQ ID NO: 890037 - RNA, 24 nt, Human
uuuuuuuuuuuuuuuuuugguuuu

SEQ ID NO: 890038 - RNA, 22 nt, Human
aaaggagagaaccgaccuagcc

SEQ ID NO: 890039 - RNA, 21 nt, Human
agagaaccgaccuagccacca

SEQ ID NO: 890040 - RNA, 24 nt, Human
aucauuguaaucuccaauagagau

SEQ ID NO: 890041 - RNA, 19 nt, Human
ccaccaggcccuaagcuaa

SEQ ID NO: 890042 - RNA, 24 nt, Human
ccaccaggcccuaagcuaaaaauu

SEQ ID NO: 890043 - RNA, 18 nt, Human
gaagaccuucauucuaaa

SEQ ID NO: 890044 - RNA, 20 nt, Human
gagaaccgaccuagccacca

SEQ ID NO: 890045 - RNA, 22 nt, Human
uaaagcagcguuauagugaaac

SEQ ID NO: 890046 - RNA, 19 nt, Human
uaaguggaaaauugugcgg

SEQ ID NO: 890047 - RNA, 26 nt, Human
ucuccaauagagauuacaauagagau

SEQ ID NO: 890048 - RNA, 22 nt, Human
ucuccgacuggaaaggagagaa

SEQ ID NO: 890049 - RNA, 18 nt, Human
ucuggaagaccuucauuc

SEQ ID NO: 890050 - RNA, 22 nt, Human
uggaaaggagagaaccgaccua

SEQ ID NO: 890051 - RNA, 22 nt, Human
uuagaggagaaauauuuccugg

SEQ ID NO: 890052 - RNA, 23 nt, Human
aacaggagaauugcuugaacucg

SEQ ID NO: 890053 - RNA, 24 nt, Human
aauugcuugaacucgggaggcaga

SEQ ID NO: 890054 - RNA, 18 nt, Human
acgccacuacacuccagc

SEQ ID NO: 890055 - RNA, 18 nt, Human
acuacacuccagccuggg

SEQ ID NO: 890056 - RNA, 18 nt, Human
acuacacuccagccuggg

SEQ ID NO: 890057 - RNA, 18 nt, Human
agagguugcagugagcug

SEQ ID NO: 890058 - RNA, 22 nt, Human
agagguugcagugagcugagau

SEQ ID NO: 890059 - RNA, 23 nt, Human
agagguugcagugagcugagaug

SEQ ID NO: 890060 - RNA, 20 nt, Human
agagguugcagugagcuggc

SEQ ID NO: 890061 - RNA, 26 nt, Human
aggcaacaggagaauugcuugaacuc

SEQ ID NO: 890062 - RNA, 20 nt, Human
aggcagagguugcagugagc

SEQ ID NO: 890063 - RNA, 24 nt, Human
aggcagagguugcagugagcugag

SEQ ID NO: 890064 - RNA, 24 nt, Human
augacgccacuacacuccagccug

SEQ ID NO: 890065 - RNA, 24 nt, Human
caacaggagaauugcuugaacucg

SEQ ID NO: 890066 - RNA, 19 nt, Human
caaggcaacaggagaauug

SEQ ID NO: 890067 - RNA, 25 nt, Human
cacuacacuccagccugggggauac

SEQ ID NO: 890068 - RNA, 23 nt, Human
cacuccagccugggggauacagc

SEQ ID NO: 890069 - RNA, 18 nt, Human
cagcgagucucugcagcc

SEQ ID NO: 890070 - RNA, 20 nt, Human
ccacuacacuccagccuggg

SEQ ID NO: 890071 - RNA, 23 nt, Human
ccacuacacuccagccuggggga

SEQ ID NO: 890072 - RNA, 24 nt, Human
ccacuacacuccagccugggggau

SEQ ID NO: 890073 - RNA, 19 nt, Human
ccgagaccaaggcaacagg

SEQ ID NO: 890074 - RNA, 21 nt, Human
ccuacagcgaccccgagacca

SEQ ID NO: 890075 - RNA, 27 nt, Human
cgccacuacacuccagccugggggaua

SEQ ID NO: 890076 - RNA, 23 nt, Human
cgccuacagcgaccccgagaccc

SEQ ID NO: 890077 - RNA, 24 nt, Human
cgggaggcagagguugcagugagc

SEQ ID NO: 890078 - RNA, 23 nt, Human
gagaauugcuugaacucgggagg

SEQ ID NO: 890079 - RNA, 19 nt, Human
gagaccaaggcaacaggag

SEQ ID NO: 890080 - RNA, 19 nt, Human
gcgaccccgagaccaaggc

SEQ ID NO: 890081 - RNA, 24 nt, Human
guugcagugagcugagaugacgcc

SEQ ID NO: 890082 - RNA, 20 nt, Human
ucagcgccuacagcgacccc

SEQ ID NO: 890083 - RNA, 18 nt, Human
uugcagugagcugagaug

SEQ ID NO: 890084 - RNA, 20 nt, Human
uugcagugagcugagaugac

SEQ ID NO: 890085 - RNA, 18 nt, Human
uugcuugaacucgggagg

SEQ ID NO: 890086 - RNA, 24 nt, Human
uugcuugaacucgggaggcagagg

SEQ ID NO: 890087 - RNA, 24 nt, Human
uuuuuuuuuuuuuuuuuuuuucag

SEQ ID NO: 890088 - RNA, 18 nt, Human
aaugugcaauaugaaguc

SEQ ID NO: 890089 - RNA, 23 nt, Human
caagccacuuuaauuuguaacuu

SEQ ID NO: 890090 - RNA, 21 nt, Human
cagccgccucgccccugccua

SEQ ID NO: 890091 - RNA, 23 nt, Human
ccuggcucuuguacagagugagg

SEQ ID NO: 890092 - RNA, 23 nt, Human
cgccccgcgguccccagccgccu

SEQ ID NO: 890093 - RNA, 22 nt, Human
guccccagccgccucgccccug

SEQ ID NO: 890094 - RNA, 18 nt, Human
uccccagccgccucgccc

SEQ ID NO: 890095 - RNA, 24 nt, Human
uccccagccgccucgccccugccu

SEQ ID NO: 890096 - RNA, 26 nt, Human
uccccagccgccucgccccugccuac

SEQ ID NO: 890097 - RNA, 18 nt, Human
uaggcaggaauacauaua

SEQ ID NO: 890098 - RNA, 18 nt, Human
uagucaucauugccagac

SEQ ID NO: 890099 - RNA, 22 nt, Human
aaacaaaagccucaaucugaac

SEQ ID NO: 890100 - RNA, 23 nt, Human
aaacaaaagccucaaucugaacc

SEQ ID NO: 890101 - RNA, 22 nt, Human
acaaaagccucaaucugaacca

SEQ ID NO: 890102 - RNA, 18 nt, Human
acaucuacaguacaggca

SEQ ID NO: 890103 - RNA, 21 nt, Human
acggagagcaaaaauacagaa

SEQ ID NO: 890104 - RNA, 19 nt, Human
acuuuguauuuggagaaaa

SEQ ID NO: 890105 - RNA, 24 nt, Human
agccaaacuccucaaacaaaagcc

SEQ ID NO: 890106 - RNA, 22 nt, Human
caaaauacuauaauuacuggug

SEQ ID NO: 890107 - RNA, 24 nt, Human
caaacuccucaaacaaaagccuca

SEQ ID NO: 890108 - RNA, 26 nt, Human
caacacugagagacaguaaugucaga

SEQ ID NO: 890109 - RNA, 20 nt, Human
caguaaugucagaggcucuu

SEQ ID NO: 890110 - RNA, 20 nt, Human
ccccucaauaauacagacaa

SEQ ID NO: 890111 - RNA, 20 nt, Human
cuuaaaauccugaguugccc

SEQ ID NO: 890112 - RNA, 21 nt, Human
cuuuguauuuggagaaaaaaa

SEQ ID NO: 890113 - RNA, 20 nt, Human
guauuuggagaaaaaaaggc

SEQ ID NO: 890114 - RNA, 22 nt, Human
uaaaacacuaaccuuucaaagu

SEQ ID NO: 890115 - RNA, 21 nt, Human
uaaaauccugaguugccccuc

SEQ ID NO: 890116 - RNA, 19 nt, Human
uacaaaauacuauaauuac

SEQ ID NO: 890117 - RNA, 21 nt, Human
uauggaacuuaaaauccugag

SEQ ID NO: 890118 - RNA, 23 nt, Human
ucaaacaaaagccucaaucugaa

SEQ ID NO: 890119 - RNA, 19 nt, Human
ucaauaauacagacaucua

SEQ ID NO: 890120 - RNA, 21 nt, Human
ucacaaauuccuauuucucca

SEQ ID NO: 890121 - RNA, 22 nt, Human
ucuauaacuuccauuugucagg

SEQ ID NO: 890122 - RNA, 23 nt, Human
uuuauggaacuuaaaauccugag

SEQ ID NO: 890123 - RNA, 20 nt, Human
uuuguacaaaauacuauaau

SEQ ID NO: 890124 - RNA, 23 nt, Human
uuuguauuuggagaaaaaaaggc

SEQ ID NO: 890125 - RNA, 29 nt, Human
aaaggacacggcgcacccucgaacuacgg

SEQ ID NO: 890126 - RNA, 19 nt, Human
aagcgaccuugcgggaacc

SEQ ID NO: 890127 - RNA, 18 nt, Human
acuuaggcucauaagccu

SEQ ID NO: 890128 - RNA, 24 nt, Human
uaauauaggaacaaacuuaggcuc

SEQ ID NO: 890129 - RNA, 20 nt, Human
uuacuuuuccagaaaauuca

SEQ ID NO: 890130 - RNA, 18 nt, Human
uuuuuuuuuuuuuuucug

SEQ ID NO: 890131 - RNA, 21 nt, Human
aaaaaaaaaaaaaauaccaca

SEQ ID NO: 890132 - RNA, 18 nt, Human
aaagacaacuuggcaaca

SEQ ID NO: 890133 - RNA, 24 nt, Human
aaagugcugggauuacaggcauga

SEQ ID NO: 890134 - RNA, 19 nt, Human
aacauggugaaaccccguc

SEQ ID NO: 890135 - RNA, 20 nt, Human
aacauggugaaaccccgucu

SEQ ID NO: 890136 - RNA, 21 nt, Human
aacauggugaaaccccgucuc

SEQ ID NO: 890137 - RNA, 20 nt, Human
aaggcagguggaucacaagg

SEQ ID NO: 890138 - RNA, 19 nt, Human
aagugcugggauuacaggc

SEQ ID NO: 890139 - RNA, 21 nt, Human
aagugcugggauuacaggcau

SEQ ID NO: 890140 - RNA, 26 nt, Human
aagugcugggauuacaggcaugagcc

SEQ ID NO: 890141 - RNA, 19 nt, Human
aauccuccauaaucuggcu

SEQ ID NO: 890142 - RNA, 24 nt, Human
aauugcuugaacccaggaggugga

SEQ ID NO: 890143 - RNA, 19 nt, Human
accauguugcccaaguugg

SEQ ID NO: 890144 - RNA, 24 nt, Human
accauguugcccaaguuggucucg

SEQ ID NO: 890145 - RNA, 24 nt, Human
accccgucucuacuaaaaacacaa

SEQ ID NO: 890146 - RNA, 20 nt, Human
accucagccuuaugaguagc

SEQ ID NO: 890147 - RNA, 23 nt, Human
accuguagucccagcuacucggg

SEQ ID NO: 890148 - RNA, 21 nt, Human
acgacgaccacuacccgggcc

SEQ ID NO: 890149 - RNA, 19 nt, Human
acuaaaaacacaaaaauca

SEQ ID NO: 890150 - RNA, 23 nt, Human
acugcacuccagccugaugacag

SEQ ID NO: 890151 - RNA, 25 nt, Human
acugcacuccagccugaugacagag

SEQ ID NO: 890152 - RNA, 19 nt, Human
acuuuuuuuuuugacgggg

SEQ ID NO: 890153 - RNA, 19 nt, Human
agaccacgaacuacaagga

SEQ ID NO: 890154 - RNA, 22 nt, Human
agaccaggcgcgguggcucacg

SEQ ID NO: 890155 - RNA, 26 nt, Human
agcaagacugucucaaaaaaaaaaaa

SEQ ID NO: 890156 - RNA, 23 nt, Human
agccugaugacagagcaagacug

SEQ ID NO: 890157 - RNA, 23 nt, Human
aggcaggagaauugcuugaaccc

SEQ ID NO: 890158 - RNA, 24 nt, Human
aggcaggagaauugcuugaaccca

SEQ ID NO: 890159 - RNA, 18 nt, Human
aggcagguggaucacaag

SEQ ID NO: 890160 - RNA, 24 nt, Human
aggcagguggaucacaaggucaag

SEQ ID NO: 890161 - RNA, 24 nt, Human
aggcgcgguggcucacgccuguaa

SEQ ID NO: 890162 - RNA, 21 nt, Human
aggcugaggcaggagaauugc

SEQ ID NO: 890163 - RNA, 24 nt, Human
aggcugaggcaggagaauugcuug

SEQ ID NO: 890164 - RNA, 21 nt, Human
agguggagguugcagugagcc

SEQ ID NO: 890165 - RNA, 22 nt, Human
agguggagguugcagugagccg

SEQ ID NO: 890166 - RNA, 18 nt, Human
agguggaucacaagguca

SEQ ID NO: 890167 - RNA, 19 nt, Human
agguggaucacaaggucaa

SEQ ID NO: 890168 - RNA, 23 nt, Human
aguagcugggauugcaggaacgu

SEQ ID NO: 890169 - RNA, 21 nt, Human
agugaacugugacacaaccac

SEQ ID NO: 890170 - RNA, 18 nt, Human
agugcugggauuacaggc

SEQ ID NO: 890171 - RNA, 19 nt, Human
agugucacccaggcugcag

SEQ ID NO: 890172 - RNA, 21 nt, Human
auacaaaccugacuguaugau

SEQ ID NO: 890173 - RNA, 21 nt, Human
aucugcccugccucagccucu

SEQ ID NO: 890174 - RNA, 21 nt, Human
aucuuggccaacauggugaaa

SEQ ID NO: 890175 - RNA, 24 nt, Human
auugcgccacugcacuccagccug

SEQ ID NO: 890176 - RNA, 23 nt, Human
caaagugcugggauuacaggcau

SEQ ID NO: 890177 - RNA, 24 nt, Human
caaagugcugggauuacaggcaug

SEQ ID NO: 890178 - RNA, 21 nt, Human
caacaauaaagagucagagua

SEQ ID NO: 890179 - RNA, 24 nt, Human
caacauggugaaaccccgucucua

SEQ ID NO: 890180 - RNA, 21 nt, Human
caaggaaaaccacgacgacca

SEQ ID NO: 890181 - RNA, 22 nt, Human
caaggcagguggaucacaaggu

SEQ ID NO: 890182 - RNA, 24 nt, Human
caaggcagguggaucacaagguca

SEQ ID NO: 890183 - RNA, 18 nt, Human
caauuaauugcauccucg

SEQ ID NO: 890184 - RNA, 24 nt, Human
caccacgcccagcuaauuuuugua

SEQ ID NO: 890185 - RNA, 24 nt, Human
caccauguugcccaaguuggucuc

SEQ ID NO: 890186 - RNA, 21 nt, Human
caccuguagucccagcuacuc

SEQ ID NO: 890187 - RNA, 24 nt, Human
caccuguagucccagcuacucggg

SEQ ID NO: 890188 - RNA, 24 nt, Human
cacgccuguaauuccaacacuuug

SEQ ID NO: 890189 - RNA, 18 nt, Human
cacugcacuccagccuga

SEQ ID NO: 890190 - RNA, 20 nt, Human
cacugcacuccagccugaug

SEQ ID NO: 890191 - RNA, 23 nt, Human
cacugcacuccagccugaugaca

SEQ ID NO: 890192 - RNA, 23 nt, Human
cacugcacuccagccugaugaca

SEQ ID NO: 890193 - RNA, 23 nt, Human
cagaauccuccauaaucuggcuc

SEQ ID NO: 890194 - RNA, 24 nt, Human
cagcuacucgggaggcugaggcag

SEQ ID NO: 890195 - RNA, 22 nt, Human
caggaacgugccaccacgccca

SEQ ID NO: 890196 - RNA, 29 nt, Human
caggagguggagguugcagugacaacggu

SEQ ID NO: 890197 - RNA, 24 nt, Human
caggagguggagguugcagugagc

SEQ ID NO: 890198 - RNA, 28 nt, Human
caggauaacccaccuaagagcaaagaca

SEQ ID NO: 890199 - RNA, 18 nt, Human
caguguuucaccauguug

SEQ ID NO: 890200 - RNA, 22 nt, Human
cauauacuuuaucuccaaaacc

SEQ ID NO: 890201 - RNA, 24 nt, Human
cauguugcccaaguuggucucgaa

SEQ ID NO: 890202 - RNA, 19 nt, Human
ccaacacuuuggaaggcca

SEQ ID NO: 890203 - RNA, 20 nt, Human
ccaccacgcccagcuaauuu

SEQ ID NO: 890204 - RNA, 18 nt, Human
ccacugcacuccagccug

SEQ ID NO: 890205 - RNA, 19 nt, Human
ccacugcacuccagccuga

SEQ ID NO: 890206 - RNA, 20 nt, Human
ccacugcacuccagccugau

SEQ ID NO: 890207 - RNA, 23 nt, Human
ccacugcacuccagccugaugac

SEQ ID NO: 890208 - RNA, 22 nt, Human
ccaggagguggagguugcagug

SEQ ID NO: 890209 - RNA, 20 nt, Human
ccagggcucaauagauccuc

SEQ ID NO: 890210 - RNA, 21 nt, Human
cccaggagguggagguugcag

SEQ ID NO: 890211 - RNA, 24 nt, Human
ccucccaccucagccuuaugagua

SEQ ID NO: 890212 - RNA, 24 nt, Human
ccugccucagccucucaaagugcu

SEQ ID NO: 890213 - RNA, 21 nt, Human
ccuguagucccagcuacucgg

SEQ ID NO: 890214 - RNA, 24 nt, Human
cgaaauugcgccacugcacuccag

SEQ ID NO: 890215 - RNA, 26 nt, Human
cgccacugcacuccagccugaugaca

SEQ ID NO: 890216 - RNA, 23 nt, Human
cgccuguaauuccaacacuuugg

SEQ ID NO: 890217 - RNA, 18 nt, Human
cggcgcagcgcggugccc

SEQ ID NO: 890218 - RNA, 23 nt, Human
cuaacucuaaacuagaauucaac

SEQ ID NO: 890219 - RNA, 19 nt, Human
cuaagcggucagcuuucuc

SEQ ID NO: 890220 - RNA, 24 nt, Human
cucacgccuguaauuccaacacuu

SEQ ID NO: 890221 - RNA, 24 nt, Human
cucagccuuaugaguagcugggau

SEQ ID NO: 890222 - RNA, 20 nt, Human
cuccugggcucaugcaaucu

SEQ ID NO: 890223 - RNA, 21 nt, Human
cuccuuugucacccaggcugg

SEQ ID NO: 890224 - RNA, 23 nt, Human
cuccuuugucacccaggcuggag

SEQ ID NO: 890225 - RNA, 24 nt, Human
cuccuuugucacccaggcuggagu

SEQ ID NO: 890226 - RNA, 24 nt, Human
cuggagucuccuccuucgaaacca

SEQ ID NO: 890227 - RNA, 22 nt, Human
cugucucaaaaaaaaaaaaaaa

SEQ ID NO: 890228 - RNA, 24 nt, Human
cuuggccaacauggugaaaccccg

SEQ ID NO: 890229 - RNA, 20 nt, Human
cuuugucacccaggcuggag

SEQ ID NO: 890230 - RNA, 23 nt, Human
gaacuccugggcucaugcaaucu

SEQ ID NO: 890231 - RNA, 23 nt, Human
gacagagcaagacugucucaaaa

SEQ ID NO: 890232 - RNA, 23 nt, Human
gagaauugcuugaacccaggagg

SEQ ID NO: 890233 - RNA, 21 nt, Human
gagguugcagugagccgaaau

SEQ ID NO: 890234 - RNA, 23 nt, Human
gagguugcagugagccgaaauug

SEQ ID NO: 890235 - RNA, 18 nt, Human
gauuacaggcaugagcca

SEQ ID NO: 890236 - RNA, 19 nt, Human
gauuacaggcaugagccac

SEQ ID NO: 890237 - RNA, 23 nt, Human
gauuacaggcaugagccacugca

SEQ ID NO: 890238 - RNA, 20 nt, Human
gcaaucugcccugccucagc

SEQ ID NO: 890239 - RNA, 23 nt, Human
gcacuccagccugaugacagagc

SEQ ID NO: 890240 - RNA, 22 nt, Human
gcaggagaauugcuugaaccca

SEQ ID NO: 890241 - RNA, 24 nt, Human
gccaacauggugaaaccccgucuc

SEQ ID NO: 890242 - RNA, 22 nt, Human
gcccagcuaauuuuuguauuuu

SEQ ID NO: 890243 - RNA, 22 nt, Human
ggagguugcagugagccgaaau

SEQ ID NO: 890244 - RNA, 24 nt, Human
ggagguugcagugagccgaaauug

SEQ ID NO: 890245 - RNA, 22 nt, Human
ggauuacaggcaugagccacug

SEQ ID NO: 890246 - RNA, 18 nt, Human
gggcacggcgcagcgcgg

SEQ ID NO: 890247 - RNA, 20 nt, Human
gggccaggacaagcauuuga

SEQ ID NO: 890248 - RNA, 24 nt, Human
gggcgucguggcaugcaccuguag

SEQ ID NO: 890249 - RNA, 23 nt, Human
gguggcucacgccuguaauucca

SEQ ID NO: 890250 - RNA, 21 nt, Human
guacuuuuuuuuuugacgggg

SEQ ID NO: 890251 - RNA, 22 nt, Human
guagcugggauugcaggaacgu

SEQ ID NO: 890252 - RNA, 24 nt, Human
gucuccuuugucacccaggcugga

SEQ ID NO: 890253 - RNA, 22 nt, Human
guggcaugcaccuguaguccca

SEQ ID NO: 890254 - RNA, 25 nt, Human
uaaaaacacaaaaaucagcugggcg

SEQ ID NO: 890255 - RNA, 24 nt, Human
uaauuuuuguauuuuauguagaga

SEQ ID NO: 890256 - RNA, 24 nt, Human
uacaaggaaaaccacgacgaccac

SEQ ID NO: 890257 - RNA, 20 nt, Human
uacaggcaugagccacugca

SEQ ID NO: 890258 - RNA, 25 nt, Human
uaccacauauacuuuaucuccaaaa

SEQ ID NO: 890259 - RNA, 22 nt, Human
uacccgggccuaagcggucagc

SEQ ID NO: 890260 - RNA, 22 nt, Human
uagagacaguguuucaccaugu

SEQ ID NO: 890261 - RNA, 22 nt, Human
uagauccucccaccucagccuu

SEQ ID NO: 890262 - RNA, 20 nt, Human
uagcuccugaguccauuuuc

SEQ ID NO: 890263 - RNA, 27 nt, Human
uaggucucuaucacaacuacucaauuc

SEQ ID NO: 890264 - RNA, 20 nt, Human
uauacuuuaucuccaaaacc

SEQ ID NO: 890265 - RNA, 23 nt, Human
uaugaguagcugggauugcagga

SEQ ID NO: 890266 - RNA, 25 nt, Human
ucaaaaaaaaaaaaaaaauaccaca

SEQ ID NO: 890267 - RNA, 23 nt, Human
ucaaagugcugggauuacaggca

SEQ ID NO: 890268 - RNA, 24 nt, Human
ucaaagugcugggauuacaggcau

SEQ ID NO: 890269 - RNA, 18 nt, Human
ucaaccucaucuuaaaau

SEQ ID NO: 890270 - RNA, 24 nt, Human
ucacaaggucaagagauugagacc

SEQ ID NO: 890271 - RNA, 19 nt, Human
ucacccaggcuggaguguc

SEQ ID NO: 890272 - RNA, 22 nt, Human
ucagcugggcgucguggcaugc

SEQ ID NO: 890273 - RNA, 23 nt, Human
uccauaaucuggcucacucuaaa

SEQ ID NO: 890274 - RNA, 20 nt, Human
uccugggcucaugcaaucug

SEQ ID NO: 890275 - RNA, 23 nt, Human
ucgggaggcugaggcaggagaau

SEQ ID NO: 890276 - RNA, 23 nt, Human
ucuaaagcacuuuccucaaccua

SEQ ID NO: 890277 - RNA, 18 nt, Human
ucuaauugcaccaagcuc

SEQ ID NO: 890278 - RNA, 24 nt, Human
ucucaaagugcugggauuacaggc

SEQ ID NO: 890279 - RNA, 19 nt, Human
ucucagaccacgaacuaca

SEQ ID NO: 890280 - RNA, 23 nt, Human
ucuccuuugucacccaggcugga

SEQ ID NO: 890281 - RNA, 19 nt, Human
ucucgaacuccugggcuca

SEQ ID NO: 890282 - RNA, 19 nt, Human
ucucgaacuccugggcuca

SEQ ID NO: 890283 - RNA, 19 nt, Human
ugaaaucacauauagacca

SEQ ID NO: 890284 - RNA, 24 nt, Human
ugagaccaucuuggccaacauggu

SEQ ID NO: 890285 - RNA, 20 nt, Human
ugagcauggcuguguuccaa

SEQ ID NO: 890286 - RNA, 22 nt, Human
ugagccgaaauugcgccacugc

SEQ ID NO: 890287 - RNA, 24 nt, Human
ugaggcaggagaauugcuugaacc

SEQ ID NO: 890288 - RNA, 25 nt, Human
ugaggcaggagaauugcuugaaccc

SEQ ID NO: 890289 - RNA, 19 nt, Human
ugcaccuguagucccagcu

SEQ ID NO: 890290 - RNA, 24 nt, Human
ugcccaaguuggucucgaacuccu

SEQ ID NO: 890291 - RNA, 25 nt, Human
ugcccagaaaccaucugcuuauauu

SEQ ID NO: 890292 - RNA, 19 nt, Human
ugcccugccucagccucuc

SEQ ID NO: 890293 - RNA, 24 nt, Human
ugccucagccucucaaagugcugg

SEQ ID NO: 890294 - RNA, 24 nt, Human
uggaaggccaaggcagguggauca

SEQ ID NO: 890295 - RNA, 22 nt, Human
uggcaugcaccuguagucccag

SEQ ID NO: 890296 - RNA, 20 nt, Human
uggccaacauggugaaaccc

SEQ ID NO: 890297 - RNA, 21 nt, Human
uggccaacauggugaaacccc

SEQ ID NO: 890298 - RNA, 24 nt, Human
uggccaacauggugaaaccccguc

SEQ ID NO: 890299 - RNA, 24 nt, Human
uggcucacgccuguaauuccaaca

SEQ ID NO: 890300 - RNA, 18 nt, Human
ugggauuacaggcaugag

SEQ ID NO: 890301 - RNA, 19 nt, Human
ugggauuacaggcaugagc

SEQ ID NO: 890302 - RNA, 21 nt, Human
ugggauuacaggcaugagcca

SEQ ID NO: 890303 - RNA, 22 nt, Human
ugggauuacaggcaugagccac

SEQ ID NO: 890304 - RNA, 22 nt, Human
ugggauuacaggcaugagccac

SEQ ID NO: 890305 - RNA, 24 nt, Human
ugggauuacaggcaugagccacug

SEQ ID NO: 890306 - RNA, 24 nt, Human
ugggauuacaggcaugagccacug

SEQ ID NO: 890307 - RNA, 24 nt, Human
ugggauugcaggaacgugccacca

SEQ ID NO: 890308 - RNA, 21 nt, Human
ugggugaauggaaacugacca

SEQ ID NO: 890309 - RNA, 21 nt, Human
uguagagacaguguuucacca

SEQ ID NO: 890310 - RNA, 23 nt, Human
uguagagacaguguuucaccaug

SEQ ID NO: 890311 - RNA, 25 nt, Human
ugugacacaaccacaauuaauugca

SEQ ID NO: 890312 - RNA, 19 nt, Human
uguguuccaaugagacuuu

SEQ ID NO: 890313 - RNA, 24 nt, Human
uuacaauugguacucaagaaaaua

SEQ ID NO: 890314 - RNA, 21 nt, Human
uuccaguuagguacagucuuu

SEQ ID NO: 890315 - RNA, 24 nt, Human
uugaacccaggagguggagguugc

SEQ ID NO: 890316 - RNA, 20 nt, Human
uugcagugagccgaaauugc

SEQ ID NO: 890317 - RNA, 22 nt, Human
uugcagugagccgaaauugcgc

SEQ ID NO: 890318 - RNA, 23 nt, Human
uugcgccacugcacuccagccug

SEQ ID NO: 890319 - RNA, 24 nt, Human
uugcuugaacccaggagguggagg

SEQ ID NO: 890320 - RNA, 19 nt, Human
uuggcagugggccagauuu

SEQ ID NO: 890321 - RNA, 19 nt, Human
uuucaccauguugcccaag

SEQ ID NO: 890322 - RNA, 18 nt, Human
uuugucacccaggcugga

SEQ ID NO: 890323 - RNA, 20 nt, Human
uuuuuguauuuuauguagag

SEQ ID NO: 890324 - RNA, 23 nt, Human
uuuuuguauuuuauguagagaca

SEQ ID NO: 890325 - RNA, 23 nt, Human
aaaagccacucccaaccuuugcc

SEQ ID NO: 890326 - RNA, 19 nt, Human
aaccgcacccaaagcagac

SEQ ID NO: 890327 - RNA, 20 nt, Human
aagcagacauucuguacagg

SEQ ID NO: 890328 - RNA, 25 nt, Human
aagcagacauucuguacaggggggu

SEQ ID NO: 890329 - RNA, 26 nt, Human
aagcagaggcaguucaggccccagag

SEQ ID NO: 890330 - RNA, 20 nt, Human
aagcuccuuuuaguaguuug

SEQ ID NO: 890331 - RNA, 19 nt, Human
acaaaaccgcacccaaagc

SEQ ID NO: 890332 - RNA, 20 nt, Human
acaggggggugggugggcug

SEQ ID NO: 890333 - RNA, 21 nt, Human
accagcccugccccuuacccu

SEQ ID NO: 890334 - RNA, 19 nt, Human
accaggaagggggcacagg

SEQ ID NO: 890335 - RNA, 21 nt, Human
accaucccguuucuggguucc

SEQ ID NO: 890336 - RNA, 21 nt, Human
acccaaaugcagagaagccag

SEQ ID NO: 890337 - RNA, 23 nt, Human
accgaguacaaaaccgcacccag

SEQ ID NO: 890338 - RNA, 19 nt, Human
acggaaagggcugagggca

SEQ ID NO: 890339 - RNA, 26 nt, Human
acuucacucuccuccuaacacuccag

SEQ ID NO: 890340 - RNA, 21 nt, Human
agagcccccagcugaaaccag

SEQ ID NO: 890341 - RNA, 19 nt, Human
agagucuuggguaagagug

SEQ ID NO: 890342 - RNA, 18 nt, Human
agccugaauccccggggg

SEQ ID NO: 890343 - RNA, 19 nt, Human
aggcugaaaggagggcugg

SEQ ID NO: 890344 - RNA, 23 nt, Human
aucacuuucccauugcuauggaa

SEQ ID NO: 890345 - RNA, 18 nt, Human
caacccuccccucccccc

SEQ ID NO: 890346 - RNA, 22 nt, Human
caaccuuugccgacaaccaucc

SEQ ID NO: 890347 - RNA, 24 nt, Human
caagguggcaccugccucccuguc

SEQ ID NO: 890348 - RNA, 23 nt, Human
caccuccauccuuccucuccaaa

SEQ ID NO: 890349 - RNA, 19 nt, Human
cagcugaaaccagcccugc

SEQ ID NO: 890350 - RNA, 24 nt, Human
cagcugaaaccagcccugccccuu

SEQ ID NO: 890351 - RNA, 24 nt, Human
cagugaagcuccuuuuaguaguuu

SEQ ID NO: 890352 - RNA, 19 nt, Human
cauccuuccucuccaaauc

SEQ ID NO: 890353 - RNA, 22 nt, Human
ccaaaccgaguacaaaaccgca

SEQ ID NO: 890354 - RNA, 22 nt, Human
ccaaagcagacauucuguacag

SEQ ID NO: 890355 - RNA, 23 nt, Human
ccagcaguccccacagggccccu

SEQ ID NO: 890356 - RNA, 18 nt, Human
ccaggaagggggcacagg

SEQ ID NO: 890357 - RNA, 19 nt, Human
ccaugggaggagugguugc

SEQ ID NO: 890358 - RNA, 18 nt, Human
ccccagggcuccugccuc

SEQ ID NO: 890359 - RNA, 21 nt, Human
ccccagggcuccugccucucc

SEQ ID NO: 890360 - RNA, 23 nt, Human
ccccccgcccuccucccucccca

SEQ ID NO: 890361 - RNA, 23 nt, Human
cccccgagccgcuucggagcccg

SEQ ID NO: 890362 - RNA, 24 nt, Human
ccccucagggggggaagcagaggc

SEQ ID NO: 890363 - RNA, 24 nt, Human
ccccucuacuucacucuccuccua

SEQ ID NO: 890364 - RNA, 20 nt, Human
cccugccccuuacccuuccu

SEQ ID NO: 890365 - RNA, 19 nt, Human
cccuggcugggcgcuggcg

SEQ ID NO: 890366 - RNA, 21 nt, Human
cccuggcugggcgcuggcgag

SEQ ID NO: 890367 - RNA, 27 nt, Human
ccgcacccaaagcagacaguggaccuc

SEQ ID NO: 890368 - RNA, 20 nt, Human
ccuccccccgcccuccuccc

SEQ ID NO: 890369 - RNA, 21 nt, Human
ccuccccuccccccgcccucc

SEQ ID NO: 890370 - RNA, 18 nt, Human
ccuccucccuccccauuc

SEQ ID NO: 890371 - RNA, 19 nt, Human
ccuccucccuccccauucc

SEQ ID NO: 890372 - RNA, 21 nt, Human
ccucuccagccuggagacaga

SEQ ID NO: 890373 - RNA, 21 nt, Human
ccuuugccgacaaccaucccg

SEQ ID NO: 890374 - RNA, 24 nt, Human
cgagccugaauccccgggggcugg

SEQ ID NO: 890375 - RNA, 20 nt, Human
cggagcccggggccgaggug

SEQ ID NO: 890376 - RNA, 22 nt, Human
cguccuccccagguuacagucc

SEQ ID NO: 890377 - RNA, 18 nt, Human
cucagggggggaagcaga

SEQ ID NO: 890378 - RNA, 19 nt, Human
cuccuuuuaguaguuuguu

SEQ ID NO: 890379 - RNA, 24 nt, Human
cugaaaccagcccugccccuuacc

SEQ ID NO: 890380 - RNA, 20 nt, Human
cuucccggccggcucccugg

SEQ ID NO: 890381 - RNA, 20 nt, Human
gaauccccgggggcugggga

SEQ ID NO: 890382 - RNA, 22 nt, Human
gaauggggugagaguccaccuc

SEQ ID NO: 890383 - RNA, 25 nt, Human
gagacagauuugcuuugggauuguu

SEQ ID NO: 890384 - RNA, 20 nt, Human
gagcaagcgggaggggcggc

SEQ ID NO: 890385 - RNA, 20 nt, Human
gaggggccccucaggggggg

SEQ ID NO: 890386 - RNA, 26 nt, Human
gcaacccuccccuccccccgcccucc

SEQ ID NO: 890387 - RNA, 18 nt, Human
gcaggaagugggcaggcg

SEQ ID NO: 890388 - RNA, 19 nt, Human
gccucuccagccuggagac

SEQ ID NO: 890389 - RNA, 19 nt, Human
gcugcugagggaggaagga

SEQ ID NO: 890390 - RNA, 24 nt, Human
ggcaacccuccccuccccccgccc

SEQ ID NO: 890391 - RNA, 20 nt, Human
ggcaguucaggccccagagc

SEQ ID NO: 890392 - RNA, 19 nt, Human
gggaagcagaggcaguuca

SEQ ID NO: 890393 - RNA, 19 nt, Human
gggcuccugccucuccagc

SEQ ID NO: 890394 - RNA, 19 nt, Human
gggcuggggagcaagcggg

SEQ ID NO: 890395 - RNA, 24 nt, Human
gggcuggggagcaagcgggagggg

SEQ ID NO: 890396 - RNA, 21 nt, Human
ggggaauggggugagagucca

SEQ ID NO: 890397 - RNA, 18 nt, Human
ggggauggggagggggug

SEQ ID NO: 890398 - RNA, 19 nt, Human
ggggauggggagggggugg

SEQ ID NO: 890399 - RNA, 18 nt, Human
ggggcacaggguggccgg

SEQ ID NO: 890400 - RNA, 20 nt, Human
ggggcuggggauggggaggg

SEQ ID NO: 890401 - RNA, 22 nt, Human
ggggggugggugggcuggggag

SEQ ID NO: 890402 - RNA, 18 nt, Human
gguuuuguuuuuuguuug

SEQ ID NO: 890403 - RNA, 19 nt, Human
guugggaccaggaaggggg

SEQ ID NO: 890404 - RNA, 20 nt, Human
uacaaaaccgcacccaaagc

SEQ ID NO: 890405 - RNA, 22 nt, Human
uacaaaaccgcacccaaagcag

SEQ ID NO: 890406 - RNA, 19 nt, Human
uacaggggggugggugggc

SEQ ID NO: 890407 - RNA, 23 nt, Human
uaccagaggaaaagccacuccca

SEQ ID NO: 890408 - RNA, 21 nt, Human
uccaagggcaguuccuaugga

SEQ ID NO: 890409 - RNA, 18 nt, Human
uccccagguuacaguccu

SEQ ID NO: 890410 - RNA, 21 nt, Human
uccccgggggcuggggauggg

SEQ ID NO: 890411 - RNA, 20 nt, Human
ucccgcacucaucacuuucc

SEQ ID NO: 890412 - RNA, 21 nt, Human
ucugggaagcugcucuguugu

SEQ ID NO: 890413 - RNA, 24 nt, Human
ucuggguuccuggagaagucuggg

SEQ ID NO: 890414 - RNA, 23 nt, Human
ucuuggguaagagugaggggccc

SEQ ID NO: 890415 - RNA, 24 nt, Human
ugaaaccagcccugccccuuaccc

SEQ ID NO: 890416 - RNA, 23 nt, Human
ugagagcccccagcugaaaccag

SEQ ID NO: 890417 - RNA, 21 nt, Human
ugcuggagcaaggaggggcag

SEQ ID NO: 890418 - RNA, 21 nt, Human
uggaaagggcccggcuuuguu

SEQ ID NO: 890419 - RNA, 18 nt, Human
uggaagagaggugucaag

SEQ ID NO: 890420 - RNA, 20 nt, Human
uggcugcauguugucugcag

SEQ ID NO: 890421 - RNA, 23 nt, Human
ugggaccaggaagggggcacagg

SEQ ID NO: 890422 - RNA, 22 nt, Human
ugggcgcuggcgagccugaauc

SEQ ID NO: 890423 - RNA, 23 nt, Human
uggggugagaguccaccuccauc

SEQ ID NO: 890424 - RNA, 18 nt, Human
uggguuccuggagaaguc

SEQ ID NO: 890425 - RNA, 21 nt, Human
uggguuccuggagaagucugg

SEQ ID NO: 890426 - RNA, 21 nt, Human
uguuuguuuuuugcuuuucuc

SEQ ID NO: 890427 - RNA, 20 nt, Human
uugcuauggaagagaggugu

SEQ ID NO: 890428 - RNA, 21 nt, Human
uugcuuuucucaccccagggc

SEQ ID NO: 890429 - RNA, 22 nt, Human
uuucuggguuccuggagaaguc

SEQ ID NO: 890430 - RNA, 24 nt, Human
uuugcuuuucucaccccagggcuc

SEQ ID NO: 890431 - RNA, 20 nt, Human
uuuuguuuguuuuuugcuuu

SEQ ID NO: 890432 - RNA, 20 nt, Human
uuuuguuuuuuguuuguuuu

SEQ ID NO: 890433 - RNA, 22 nt, Human
uuuuuugcuuuucucaccccag

SEQ ID NO: 890434 - RNA, 18 nt, Human
uuuuuuuuuuuuuuuuug

SEQ ID NO: 890435 - RNA, 22 nt, Human
uuuuuuuuuuuuuuuuugcagu

SEQ ID NO: 890436 - RNA, 18 nt, Human
aaaauaaaugagacagcc

SEQ ID NO: 890437 - RNA, 20 nt, Human
aaacaaccuagcaucagaau

SEQ ID NO: 890438 - RNA, 21 nt, Human
aacacuuuucaacccaagcca

SEQ ID NO: 890439 - RNA, 21 nt, Human
aaccaguauuaguggagaaca

SEQ ID NO: 890440 - RNA, 22 nt, Human
aagaagauggcggcagcaccga

SEQ ID NO: 890441 - RNA, 23 nt, Human
aagauggcggcagcaccgagcug

SEQ ID NO: 890442 - RNA, 19 nt, Human
aagcaaagaucuccaagug

SEQ ID NO: 890443 - RNA, 22 nt, Human
aagcagauggccuugcaccaag

SEQ ID NO: 890444 - RNA, 21 nt, Human
aagcccaccaacagaccccaa

SEQ ID NO: 890445 - RNA, 21 nt, Human
aaggagacaagugcccacuga

SEQ ID NO: 890446 - RNA, 18 nt, Human
acaaaaaugaaaaaaccc

SEQ ID NO: 890447 - RNA, 20 nt, Human
acaaacauaaaagcaaggaa

SEQ ID NO: 890448 - RNA, 22 nt, Human
acaauaagccauaacauauagc

SEQ ID NO: 890449 - RNA, 20 nt, Human
acagaccagguguggcuucg

SEQ ID NO: 890450 - RNA, 18 nt, Human
acagccugcacacaaaaa

SEQ ID NO: 890451 - RNA, 20 nt, Human
acagugcacagaaaacagac

SEQ ID NO: 890452 - RNA, 23 nt, Human
acaucaaagucuuuuaaaaauua

SEQ ID NO: 890453 - RNA, 18 nt, Human
acuuuucaacccaagcca

SEQ ID NO: 890454 - RNA, 29 nt, Human
agaaaaggaagacauucaccucacaaaac

SEQ ID NO: 890455 - RNA, 24 nt, Human
agagaggcggucgcgggagggcag

SEQ ID NO: 890456 - RNA, 24 nt, Human
aggagagaggcggucgcgggaggg

SEQ ID NO: 890457 - RNA, 21 nt, Human
aggauaaccaguauuagugga

SEQ ID NO: 890458 - RNA, 25 nt, Human
aggcaucagagguucagggcaccuc

SEQ ID NO: 890459 - RNA, 21 nt, Human
aggcggucgcgggagggcagg

SEQ ID NO: 890460 - RNA, 21 nt, Human
aggcggucgcgggagggcagg

SEQ ID NO: 890461 - RNA, 23 nt, Human
aggcuucaggggcaagcccacca

SEQ ID NO: 890462 - RNA, 18 nt, Human
agugcuuuauugauaaaa

SEQ ID NO: 890463 - RNA, 19 nt, Human
aucagagguucagggcacc

SEQ ID NO: 890464 - RNA, 25 nt, Human
augagacagccugcacacaaaaaga

SEQ ID NO: 890465 - RNA, 19 nt, Human
augugguaagcagauggcc

SEQ ID NO: 890466 - RNA, 27 nt, Human
caaaacacagagugugacacagccggc

SEQ ID NO: 890467 - RNA, 20 nt, Human
caacccaagccaggcuucag

SEQ ID NO: 890468 - RNA, 24 nt, Human
caacccaagccaggcuucaggggc

SEQ ID NO: 890469 - RNA, 19 nt, Human
cacaaaaaugaaaaaaccc

SEQ ID NO: 890470 - RNA, 20 nt, Human
cacaaaaugaaugaaacgac

SEQ ID NO: 890471 - RNA, 18 nt, Human
cacagaaaacagaccagg

SEQ ID NO: 890472 - RNA, 25 nt, Human
caccaacagaccccaauuuccacag

SEQ ID NO: 890473 - RNA, 19 nt, Human
cacuagccuaugcuacaga

SEQ ID NO: 890474 - RNA, 21 nt, Human
cagaccccaauuuccacaggg

SEQ ID NO: 890475 - RNA, 22 nt, Human
ccaacugcuaauuuuccuuaaa

SEQ ID NO: 890476 - RNA, 22 nt, Human
ccacaggggaggcagaucuucu

SEQ ID NO: 890477 - RNA, 21 nt, Human
cccccacaaaaaugaaaaaac

SEQ ID NO: 890478 - RNA, 23 nt, Human
cccccacaaaaaugaaaaaaccc

SEQ ID NO: 890479 - RNA, 22 nt, Human
cccugcauagcuguuaccagga

SEQ ID NO: 890480 - RNA, 23 nt, Human
cgggaacacuuuucaacccaagc

SEQ ID NO: 890481 - RNA, 29 nt, Human
cuaaaaauaaaugagacagccugcacaca

SEQ ID NO: 890482 - RNA, 20 nt, Human
cuacacaaccauugucuccu

SEQ ID NO: 890483 - RNA, 24 nt, Human
cuacacaaccauugucuccuuuca

SEQ ID NO: 890484 - RNA, 23 nt, Human
cucuccuccuguccuccaagaag

SEQ ID NO: 890485 - RNA, 23 nt, Human
cuucuugauaugugcacaucacc

SEQ ID NO: 890486 - RNA, 22 nt, Human
gauaaaaaaggcaaccgcugga

SEQ ID NO: 890487 - RNA, 19 nt, Human
gcccccacaaaaaugaaaa

SEQ ID NO: 890488 - RNA, 20 nt, Human
gcggaccugcccacuagccu

SEQ ID NO: 890489 - RNA, 21 nt, Human
gcgggaacacuuuucaaccca

SEQ ID NO: 890490 - RNA, 18 nt, Human
ggaccugcccacuagccu

SEQ ID NO: 890491 - RNA, 20 nt, Human
gggagggcaggugguggcgg

SEQ ID NO: 890492 - RNA, 25 nt, Human
guaacuggaguggggggaaggccgu

SEQ ID NO: 890493 - RNA, 21 nt, Human
guacuguuaaaauguggaugg

SEQ ID NO: 890494 - RNA, 21 nt, Human
gugcggaccugcccacuagcc

SEQ ID NO: 890495 - RNA, 25 nt, Human
uaaaaaccaaauuaguucacuggaa

SEQ ID NO: 890496 - RNA, 21 nt, Human
uaaaauguggauggcacccuc

SEQ ID NO: 890497 - RNA, 21 nt, Human
uaaaugagacagccugcacac

SEQ ID NO: 890498 - RNA, 22 nt, Human
uaaaugagacagccugcacaca

SEQ ID NO: 890499 - RNA, 21 nt, Human
uaagcaacagugaagggcaaa

SEQ ID NO: 890500 - RNA, 24 nt, Human
uaagcagauggccuugcaccaagu

SEQ ID NO: 890501 - RNA, 19 nt, Human
uaaggagacacaagaagaa

SEQ ID NO: 890502 - RNA, 23 nt, Human
uaaguauaaagauauaucucauu

SEQ ID NO: 890503 - RNA, 21 nt, Human
uacaucacuaggcacacaccu

SEQ ID NO: 890504 - RNA, 18 nt, Human
uaccaggaggcagcgugc

SEQ ID NO: 890505 - RNA, 25 nt, Human
uacggaaaacuggagcuuaugacug

SEQ ID NO: 890506 - RNA, 21 nt, Human
uagaaggagacaagugcccac

SEQ ID NO: 890507 - RNA, 27 nt, Human
uaguucacuggaaucucauuuuguagg

SEQ ID NO: 890508 - RNA, 19 nt, Human
uauuaaaugucaaacucaa

SEQ ID NO: 890509 - RNA, 19 nt, Human
ucaaaauacauuucuauag

SEQ ID NO: 890510 - RNA, 18 nt, Human
ucaccucacaaaacacag

SEQ ID NO: 890511 - RNA, 22 nt, Human
ucacuagcaaacuuguuuuucu

SEQ ID NO: 890512 - RNA, 21 nt, Human
ucagggcaccaaggccuuagg

SEQ ID NO: 890513 - RNA, 23 nt, Human
uccaagaagauggcggcagcacc

SEQ ID NO: 890514 - RNA, 22 nt, Human
ucuauaccuacagugacagaaa

SEQ ID NO: 890515 - RNA, 19 nt, Human
ucuauuauguuuuauuugg

SEQ ID NO: 890516 - RNA, 19 nt, Human
ucuccaaguggugugaugu

SEQ ID NO: 890517 - RNA, 21 nt, Human
ucugucaauuucugggguuga

SEQ ID NO: 890518 - RNA, 22 nt, Human
ucuuuaaaacucaccucuaaaa

SEQ ID NO: 890519 - RNA, 18 nt, Human
ugccucauuuuauguuuu

SEQ ID NO: 890520 - RNA, 19 nt, Human
ugcuacagauuugaaaugu

SEQ ID NO: 890521 - RNA, 18 nt, Human
uggcggcagcaccgagcu

SEQ ID NO: 890522 - RNA, 19 nt, Human
uggcggcagcaccgagcug

SEQ ID NO: 890523 - RNA, 22 nt, Human
uggcuaaaaauaaaugagacag

SEQ ID NO: 890524 - RNA, 22 nt, Human
ugggguugaauuucccaacuuc

SEQ ID NO: 890525 - RNA, 24 nt, Human
ugugacacagcaaugaaauacaua

SEQ ID NO: 890526 - RNA, 18 nt, Human
ugugaugugguaagcaga

SEQ ID NO: 890527 - RNA, 24 nt, Human
ugugaugugguaagcagauggccg

SEQ ID NO: 890528 - RNA, 23 nt, Human
uguggauggcacccucccaagga

SEQ ID NO: 890529 - RNA, 25 nt, Human
uguggauggcacccucccaaggauu

SEQ ID NO: 890530 - RNA, 23 nt, Human
uuaaaaacaaccuagcaucagaa

SEQ ID NO: 890531 - RNA, 23 nt, Human
uuaacagauaaaaucgcagacga

SEQ ID NO: 890532 - RNA, 22 nt, Human
uuacacaaaaugaaugaaacga

SEQ ID NO: 890533 - RNA, 22 nt, Human
uucacuggaaucucauuuugua

SEQ ID NO: 890534 - RNA, 25 nt, Human
uucuacaucacuaggcacacaccuc

SEQ ID NO: 890535 - RNA, 20 nt, Human
uucuuggaaaucaauucuaa

SEQ ID NO: 890536 - RNA, 21 nt, Human
uuugaaaugucuuucacuuug

SEQ ID NO: 890537 - RNA, 21 nt, Human
uuuuucuagcccccacaaaaa

SEQ ID NO: 890538 - RNA, 24 nt, Human
acugaauccugggauccucacagu

SEQ ID NO: 890539 - RNA, 19 nt, Human
acugggcauccaggggagg

SEQ ID NO: 890540 - RNA, 18 nt, Human
agggggcaguggcuaugg

SEQ ID NO: 890541 - RNA, 24 nt, Human
cacacaggacugcaaacuaacacc

SEQ ID NO: 890542 - RNA, 20 nt, Human
cacccaguagccagcaaggc

SEQ ID NO: 890543 - RNA, 23 nt, Human
caguagccagcaaggcccucugg

SEQ ID NO: 890544 - RNA, 22 nt, Human
ccaguagccagcaaggcccucu

SEQ ID NO: 890545 - RNA, 18 nt, Human
ccgcugccgcccuccagc

SEQ ID NO: 890546 - RNA, 20 nt, Human
ccggucgccgcugccgcccu

SEQ ID NO: 890547 - RNA, 23 nt, Human
cucacagucucccaccaguagac

SEQ ID NO: 890548 - RNA, 26 nt, Human
cuccagcacucuugccugcaagggcc

SEQ ID NO: 890549 - RNA, 21 nt, Human
cugcaaacuaacacccaguag

SEQ ID NO: 890550 - RNA, 21 nt, Human
cugcuccuaccgcuccggucg

SEQ ID NO: 890551 - RNA, 20 nt, Human
gcauccaggggagggggcag

SEQ ID NO: 890552 - RNA, 19 nt, Human
gcugcacacggauaaauug

SEQ ID NO: 890553 - RNA, 22 nt, Human
gggcauccaggggagggggcag

SEQ ID NO: 890554 - RNA, 18 nt, Human
gugagaggauauaugaug

SEQ ID NO: 890555 - RNA, 23 nt, Human
uacugggcauccaggggaggggg

SEQ ID NO: 890556 - RNA, 18 nt, Human
ucuugccugcaagggcca

SEQ ID NO: 890557 - RNA, 21 nt, Human
ugacaaccagggacacaguca

SEQ ID NO: 890558 - RNA, 19 nt, Human
ugagaggauauaugaugcc

SEQ ID NO: 890559 - RNA, 26 nt, Human
ugcaaacuaacacccaguagccagca

SEQ ID NO: 890560 - RNA, 20 nt, Human
ugccucauuaugagcgacag

SEQ ID NO: 890561 - RNA, 21 nt, Human
aacaacaaaaaaaggcgagga

SEQ ID NO: 890562 - RNA, 26 nt, Human
aacagcagcgacgagccagagcggag

SEQ ID NO: 890563 - RNA, 18 nt, Human
aagcaacaacaacaacaa

SEQ ID NO: 890564 - RNA, 21 nt, Human
acaaacaucaucacggccugc

SEQ ID NO: 890565 - RNA, 23 nt, Human
accaugagaguugugcagggaac

SEQ ID NO: 890566 - RNA, 22 nt, Human
accugacuucccacugccuggc

SEQ ID NO: 890567 - RNA, 20 nt, Human
agaagcgcagccaagcaaca

SEQ ID NO: 890568 - RNA, 18 nt, Human
agagucucugaaaucaga

SEQ ID NO: 890569 - RNA, 22 nt, Human
agcaacaacaacaacaaaaaaa

SEQ ID NO: 890570 - RNA, 21 nt, Human
agcggagucgccugcagcugc

SEQ ID NO: 890571 - RNA, 19 nt, Human
aggcccuagggacccggug

SEQ ID NO: 890572 - RNA, 20 nt, Human
aggcgaggagguagacccaa

SEQ ID NO: 890573 - RNA, 21 nt, Human
agggccuguuugcaccuucag

SEQ ID NO: 890574 - RNA, 21 nt, Human
aguccuggcugggggguggcg

SEQ ID NO: 890575 - RNA, 23 nt, Human
aguugugcagggaacagccguag

SEQ ID NO: 890576 - RNA, 20 nt, Human
caaaaaaaggcgaggaggua

SEQ ID NO: 890577 - RNA, 21 nt, Human
caaaaauucagacccccagau

SEQ ID NO: 890578 - RNA, 20 nt, Human
caacaaaaaaaggcgaggaa

SEQ ID NO: 890579 - RNA, 22 nt, Human
caacaacaacaacaaaaaaagg

SEQ ID NO: 890580 - RNA, 25 nt, Human
caacaacaacaacaaaaaaaggcga

SEQ ID NO: 890581 - RNA, 27 nt, Human
caacaacaacaacaaaaaaaggcgagg

SEQ ID NO: 890582 - RNA, 21 nt, Human
caagcaacaacaacaacaaaa

SEQ ID NO: 890583 - RNA, 23 nt, Human
cacccccagcaggaaacagcagc

SEQ ID NO: 890584 - RNA, 22 nt, Human
ccagagcggagucgccugcagc

SEQ ID NO: 890585 - RNA, 20 nt, Human
cccaaaaauucagaccccca

SEQ ID NO: 890586 - RNA, 20 nt, Human
ccccgggucgccgcugucuc

SEQ ID NO: 890587 - RNA, 22 nt, Human
ccgcugucucugcgguuggggg

SEQ ID NO: 890588 - RNA, 23 nt, Human
ccgggucgccgcugucucugcgg

SEQ ID NO: 890589 - RNA, 19 nt, Human
ccugcagcugcgcgcagga

SEQ ID NO: 890590 - RNA, 18 nt, Human
ccugcucccaaaaauuca

SEQ ID NO: 890591 - RNA, 22 nt, Human
cgugcacaggugcgcgguacgc

SEQ ID NO: 890592 - RNA, 18 nt, Human
cucauaaacaaacaucau

SEQ ID NO: 890593 - RNA, 21 nt, Human
cucccaaaaauucagaccccc

SEQ ID NO: 890594 - RNA, 22 nt, Human
cuucagauauugccugcuccca

SEQ ID NO: 890595 - RNA, 18 nt, Human
gcaacaacaacaacaaaa

SEQ ID NO: 890596 - RNA, 23 nt, Human
gcaagacaauaagaaagggugag

SEQ ID NO: 890597 - RNA, 18 nt, Human
gcagaguccuggcugggg

SEQ ID NO: 890598 - RNA, 22 nt, Human
gcagccaagcaacaacaacaac

SEQ ID NO: 890599 - RNA, 23 nt, Human
gccaagcaacaacaacaacaaaa

SEQ ID NO: 890600 - RNA, 21 nt, Human
gccccgggucgccgcugucuc

SEQ ID NO: 890601 - RNA, 24 nt, Human
gcgcagccaagcaacaacaacaac

SEQ ID NO: 890602 - RNA, 21 nt, Human
ggacagggucggcacccccag

SEQ ID NO: 890603 - RNA, 27 nt, Human
ggcugggggguggcggaagaaccugau

SEQ ID NO: 890604 - RNA, 21 nt, Human
guucuguugcggagagucucu

SEQ ID NO: 890605 - RNA, 27 nt, Human
uaaacaaacaucaucacggccugcccu

SEQ ID NO: 890606 - RNA, 18 nt, Human
uacaauuaaaaccaugag

SEQ ID NO: 890607 - RNA, 18 nt, Human
ucauaaacaaacaucauc

SEQ ID NO: 890608 - RNA, 23 nt, Human
ucccaaaaauucagacccccaga

SEQ ID NO: 890609 - RNA, 19 nt, Human
ugagaguugugcagggaac

SEQ ID NO: 890610 - RNA, 20 nt, Human
ugagaugguucuguugcgga

SEQ ID NO: 890611 - RNA, 24 nt, Human
ugagggaggguggcagaguccugg

SEQ ID NO: 890612 - RNA, 18 nt, Human
ugcacaggugcgcgguac

SEQ ID NO: 890613 - RNA, 19 nt, Human
ugcgcgcaggacgugcaca

SEQ ID NO: 890614 - RNA, 21 nt, Human
ugggggguggcggaagaaccu

SEQ ID NO: 890615 - RNA, 21 nt, Human
ugugcagggaacagccguagg

SEQ ID NO: 890616 - RNA, 23 nt, Human
uuuuuuuuuucaaauguaucagu

SEQ ID NO: 890617 - RNA, 21 nt, Human
aaaaaaaaaaacccacaucau

SEQ ID NO: 890618 - RNA, 22 nt, Human
aaaaaaucuaacccuaugaaaa

SEQ ID NO: 890619 - RNA, 19 nt, Human
aaaaaucagccgagcauca

SEQ ID NO: 890620 - RNA, 22 nt, Human
aaaacaaaaacaaaacacagga

SEQ ID NO: 890621 - RNA, 21 nt, Human
aaacaaaaacaaaacacagga

SEQ ID NO: 890622 - RNA, 19 nt, Human
aaacaaaaaucagccgagc

SEQ ID NO: 890623 - RNA, 19 nt, Human
aaacaaaacacaggagcua

SEQ ID NO: 890624 - RNA, 22 nt, Human
aacauuuugggagaccaaggug

SEQ ID NO: 890625 - RNA, 24 nt, Human
aacauuuugggagaccaagguggg

SEQ ID NO: 890626 - RNA, 21 nt, Human
aagccgccucugcaacagccu

SEQ ID NO: 890627 - RNA, 20 nt, Human
aauccuguuuuccugcuuuc

SEQ ID NO: 890628 - RNA, 22 nt, Human
acaaaacaaaaacaaaacacag

SEQ ID NO: 890629 - RNA, 18 nt, Human
acaaaacacaggagcuag

SEQ ID NO: 890630 - RNA, 19 nt, Human
acaaaacacaggagcuagc

SEQ ID NO: 890631 - RNA, 27 nt, Human
acaaacaaccaaaaaaaaaaaaaaaaa

SEQ ID NO: 890632 - RNA, 26 nt, Human
acaaccaaaaaaaaaaaaaaaaaccc

SEQ ID NO: 890633 - RNA, 21 nt, Human
acagagcaagacucucucuca

SEQ ID NO: 890634 - RNA, 24 nt, Human
acagagcaagacucucucucaaaa

SEQ ID NO: 890635 - RNA, 20 nt, Human
acauccuccuuucuggacac

SEQ ID NO: 890636 - RNA, 20 nt, Human
accaaaaaaaaaaaaaaaaa

SEQ ID NO: 890637 - RNA, 23 nt, Human
accaaaguuacaaaacaaaaaca

SEQ ID NO: 890638 - RNA, 23 nt, Human
acccacacuauccucuguacccc

SEQ ID NO: 890639 - RNA, 23 nt, Human
acccagcaggaggcugaauccaa

SEQ ID NO: 890640 - RNA, 23 nt, Human
acuucgaagagucgcugaagaug

SEQ ID NO: 890641 - RNA, 21 nt, Human
agacggaggagggcccggggc

SEQ ID NO: 890642 - RNA, 19 nt, Human
agcucccugcuccaccccc

SEQ ID NO: 890643 - RNA, 21 nt, Human
agcugggcgcgguggcucaca

SEQ ID NO: 890644 - RNA, 23 nt, Human
aggaaugcuugaguuguaggagu

SEQ ID NO: 890645 - RNA, 21 nt, Human
aggccgcagaucuaccggagg

SEQ ID NO: 890646 - RNA, 18 nt, Human
aggcuuucuuuuuccuug

SEQ ID NO: 890647 - RNA, 21 nt, Human
aguuguaggaguucaaaccag

SEQ ID NO: 890648 - RNA, 21 nt, Human
auaaaaaaaaaaaaauccugu

SEQ ID NO: 890649 - RNA, 21 nt, Human
aucuaccggagggcgggcggc

SEQ ID NO: 890650 - RNA, 18 nt, Human
caaaacacaggagcuagc

SEQ ID NO: 890651 - RNA, 25 nt, Human
caacauaacuccagggagaugaaua

SEQ ID NO: 890652 - RNA, 24 nt, Human
caacauuuugggagaccaaggugg

SEQ ID NO: 890653 - RNA, 19 nt, Human
caagauaaaaaaaaaaaaa

SEQ ID NO: 890654 - RNA, 21 nt, Human
cacaccaccacacccuagcca

SEQ ID NO: 890655 - RNA, 24 nt, Human
cacacccguggucccaacauuuug

SEQ ID NO: 890656 - RNA, 19 nt, Human
cacccuagccagggagaca

SEQ ID NO: 890657 - RNA, 24 nt, Human
cagagcaagacucucucucaaaac

SEQ ID NO: 890658 - RNA, 23 nt, Human
cagcaggaggcugaauccaagca

SEQ ID NO: 890659 - RNA, 19 nt, Human
caggagcuagcugggcgcg

SEQ ID NO: 890660 - RNA, 23 nt, Human
caggcggcugagacggaggaggg

SEQ ID NO: 890661 - RNA, 19 nt, Human
cagggaagaggagggguug

SEQ ID NO: 890662 - RNA, 22 nt, Human
cagugagcuuuauuuucauguc

SEQ ID NO: 890663 - RNA, 18 nt, Human
ccacacccuagccaggga

SEQ ID NO: 890664 - RNA, 19 nt, Human
ccacacccuagccagggag

SEQ ID NO: 890665 - RNA, 22 nt, Human
ccacacuauccucuguaccccg

SEQ ID NO: 890666 - RNA, 21 nt, Human
ccacauccuccuuucuggaca

SEQ ID NO: 890667 - RNA, 21 nt, Human
ccagcaggaggcugaauccaa

SEQ ID NO: 890668 - RNA, 24 nt, Human
ccaguuggaugccugauccucuuc

SEQ ID NO: 890669 - RNA, 19 nt, Human
ccauuucccauaggcuuuc

SEQ ID NO: 890670 - RNA, 21 nt, Human
cccaacggcaagguuccauga

SEQ ID NO: 890671 - RNA, 22 nt, Human
cccacauccuccuuucuggaca

SEQ ID NO: 890672 - RNA, 25 nt, Human
ccccgccucuuggugccuguaucca

SEQ ID NO: 890673 - RNA, 21 nt, Human
cccuagccagggagacagagc

SEQ ID NO: 890674 - RNA, 22 nt, Human
cccucccuuccuguccccuccc

SEQ ID NO: 890675 - RNA, 18 nt, Human
cccucgggcccucccugc

SEQ ID NO: 890676 - RNA, 21 nt, Human
ccgggaaguuuuccccuuacc

SEQ ID NO: 890677 - RNA, 21 nt, Human
ccucaucccuggauccuccag

SEQ ID NO: 890678 - RNA, 22 nt, Human
ccucugcaacagccuugaaaga

SEQ ID NO: 890679 - RNA, 18 nt, Human
ccugaaaaucuccggaca

SEQ ID NO: 890680 - RNA, 19 nt, Human
ccuguagucccagcuacuc

SEQ ID NO: 890681 - RNA, 22 nt, Human
ccuguagucccagcuacucugg

SEQ ID NO: 890682 - RNA, 23 nt, Human
ccuguagucccagcuacucugga

SEQ ID NO: 890683 - RNA, 22 nt, Human
ccuguccccucccgacuucucc

SEQ ID NO: 890684 - RNA, 22 nt, Human
ccuugccccauugccuuccggg

SEQ ID NO: 890685 - RNA, 23 nt, Human
cggaggagggcccggggcccgcc

SEQ ID NO: 890686 - RNA, 22 nt, Human
cgugggcagcaccuccgcaggc

SEQ ID NO: 890687 - RNA, 19 nt, Human
cucaggccacucuauccuc

SEQ ID NO: 890688 - RNA, 21 nt, Human
cucaucccuggauccuccagg

SEQ ID NO: 890689 - RNA, 23 nt, Human
cuccagggaacaagauaaaaaaa

SEQ ID NO: 890690 - RNA, 22 nt, Human
cucccugcuccacccccgccuc

SEQ ID NO: 890691 - RNA, 19 nt, Human
cuccggguggguggcacgu

SEQ ID NO: 890692 - RNA, 23 nt, Human
cucuacacaccaccgggcacccc

SEQ ID NO: 890693 - RNA, 18 nt, Human
cucucaaaacaaacaacc

SEQ ID NO: 890694 - RNA, 19 nt, Human
cucugccucggggugcggg

SEQ ID NO: 890695 - RNA, 20 nt, Human
cugacccacacuauccucug

SEQ ID NO: 890696 - RNA, 19 nt, Human
cuggcaccucugacccaca

SEQ ID NO: 890697 - RNA, 21 nt, Human
gagguggggggucuaagacca

SEQ ID NO: 890698 - RNA, 22 nt, Human
gcaacagccuugaaagaugaga

SEQ ID NO: 890699 - RNA, 20 nt, Human
gccaagaucacaccaccaca

SEQ ID NO: 890700 - RNA, 21 nt, Human
gcgcagcucccugcuccaccc

SEQ ID NO: 890701 - RNA, 19 nt, Human
ggagauggacaggugggaa

SEQ ID NO: 890702 - RNA, 18 nt, Human
ggagggcccggggcccgc

SEQ ID NO: 890703 - RNA, 23 nt, Human
ggaguuucuccacagcccuugau

SEQ ID NO: 890704 - RNA, 22 nt, Human
ggcaaggcugccgugagccaag

SEQ ID NO: 890705 - RNA, 20 nt, Human
ggcccggggcccgcccuccc

SEQ ID NO: 890706 - RNA, 18 nt, Human
ggccgcagaucuaccgga

SEQ ID NO: 890707 - RNA, 21 nt, Human
ggcgcgguggcucacacccgu

SEQ ID NO: 890708 - RNA, 19 nt, Human
gggcccucccugcccgggg

SEQ ID NO: 890709 - RNA, 27 nt, Human
gggccuccaggcgugggcagcaccucc

SEQ ID NO: 890710 - RNA, 19 nt, Human
ggucccaacauuuugggag

SEQ ID NO: 890711 - RNA, 22 nt, Human
gucccaacauuuugggagacca

SEQ ID NO: 890712 - RNA, 21 nt, Human
uaaaaaaaaucuaacccuaug

SEQ ID NO: 890713 - RNA, 24 nt, Human
uaaaaaguaaacaaaaaucagccg

SEQ ID NO: 890714 - RNA, 24 nt, Human
uaaacaaaaaucagccgagcauca

SEQ ID NO: 890715 - RNA, 22 nt, Human
uaacagugagcuuuauuuucau

SEQ ID NO: 890716 - RNA, 23 nt, Human
uacaaaacaaaaacaaaacacag

SEQ ID NO: 890717 - RNA, 25 nt, Human
uauggcaagaccccaucucucuaaa

SEQ ID NO: 890718 - RNA, 21 nt, Human
ucagccgagcaucauaucaca

SEQ ID NO: 890719 - RNA, 23 nt, Human
uccagcagaaggacccagcagga

SEQ ID NO: 890720 - RNA, 18 nt, Human
ucccugcuccacccccgc

SEQ ID NO: 890721 - RNA, 19 nt, Human
ucccugcuccacccccgcc

SEQ ID NO: 890722 - RNA, 20 nt, Human
ucuaaaaaguaaacaaaaau

SEQ ID NO: 890723 - RNA, 22 nt, Human
ucuacacaccaccgggcacccc

SEQ ID NO: 890724 - RNA, 27 nt, Human
ucucucuaaaaaguaaacaaaaauugg

SEQ ID NO: 890725 - RNA, 27 nt, Human
ucugacccacacuauccucuguacccc

SEQ ID NO: 890726 - RNA, 19 nt, Human
ugaaagaugagacgcggaa

SEQ ID NO: 890727 - RNA, 22 nt, Human
ugaaaugcaccaaguccugaaa

SEQ ID NO: 890728 - RNA, 23 nt, Human
ugagaugaagacugcuugagcca

SEQ ID NO: 890729 - RNA, 21 nt, Human
ugagccaagaucacaccacca

SEQ ID NO: 890730 - RNA, 24 nt, Human
ugccuguagucccagcuacucugg

SEQ ID NO: 890731 - RNA, 23 nt, Human
uggcacgucggcccgacccagca

SEQ ID NO: 890732 - RNA, 18 nt, Human
ugggagaccaagguggga

SEQ ID NO: 890733 - RNA, 20 nt, Human
ugucuccgccguucucuucc

SEQ ID NO: 890734 - RNA, 24 nt, Human
uuaacugaacuagaaaaggauaaa

SEQ ID NO: 890735 - RNA, 21 nt, Human
uuacaaaacaaaaacaaaaca

SEQ ID NO: 890736 - RNA, 23 nt, Human
uucaacaaaucaacagucaccaa

SEQ ID NO: 890737 - RNA, 20 nt, Human
uuucccaucuuucacgaugg

SEQ ID NO: 890738 - RNA, 19 nt, Human
aaaacaaguacuagacaga

SEQ ID NO: 890739 - RNA, 19 nt, Human
aacagaaagaaguucaaca

SEQ ID NO: 890740 - RNA, 23 nt, Human
aacagaaagaaguucaacaggcc

SEQ ID NO: 890741 - RNA, 20 nt, Human
aacaggcaaacauuucccuc

SEQ ID NO: 890742 - RNA, 23 nt, Human
aacauacugauagugcugcaaga

SEQ ID NO: 890743 - RNA, 24 nt, Human
aaccauggaauucaaugaacaaaa

SEQ ID NO: 890744 - RNA, 26 nt, Human
aagucaguguuaaauccacagacuaa

SEQ ID NO: 890745 - RNA, 19 nt, Human
aaguccaucuuaaaucuga

SEQ ID NO: 890746 - RNA, 18 nt, Human
aaguucaacaggcaaaca

SEQ ID NO: 890747 - RNA, 23 nt, Human
acugucacagugucaaaauaaaa

SEQ ID NO: 890748 - RNA, 23 nt, Human
agaaaaaagaucaugcuuaaaga

SEQ ID NO: 890749 - RNA, 24 nt, Human
agacagaaaaaagaucaugcuuaa

SEQ ID NO: 890750 - RNA, 20 nt, Human
auaagccaaauucaaaugcu

SEQ ID NO: 890751 - RNA, 18 nt, Human
aucaugcuuaaagacucc

SEQ ID NO: 890752 - RNA, 25 nt, Human
auuguccuugaagcuuauguaugga

SEQ ID NO: 890753 - RNA, 24 nt, Human
cagaaugaaaacaaguacuagaca

SEQ ID NO: 890754 - RNA, 23 nt, Human
cagguucugggucaauguuuccu

SEQ ID NO: 890755 - RNA, 20 nt, Human
cauaguaaaucuucaaaacc

SEQ ID NO: 890756 - RNA, 19 nt, Human
cccuaggauccuaguuacc

SEQ ID NO: 890757 - RNA, 21 nt, Human
ccucucauaacagaaagaagu

SEQ ID NO: 890758 - RNA, 21 nt, Human
cuaagucaguguuaaauccac

SEQ ID NO: 890759 - RNA, 22 nt, Human
cucccuaggauccuaguuacca

SEQ ID NO: 890760 - RNA, 24 nt, Human
cuccuuuuuaacaucuuauugucc

SEQ ID NO: 890761 - RNA, 22 nt, Human
gaaaaaagaucaugcuuaaaga

SEQ ID NO: 890762 - RNA, 18 nt, Human
gaacaucuggacuguaga

SEQ ID NO: 890763 - RNA, 22 nt, Human
gcugaaacucaaaguuacccua

SEQ ID NO: 890764 - RNA, 19 nt, Human
gcuggccagaaugaaaaca

SEQ ID NO: 890765 - RNA, 22 nt, Human
guaaaucuucaaaaccauuaag

SEQ ID NO: 890766 - RNA, 22 nt, Human
uaaauaauugcuguauuuccca

SEQ ID NO: 890767 - RNA, 25 nt, Human
uaauugcuguauuucccacugaagc

SEQ ID NO: 890768 - RNA, 22 nt, Human
uacauauuaugccaaccagccu

SEQ ID NO: 890769 - RNA, 22 nt, Human
uaucauaaaauaaacacacaua

SEQ ID NO: 890770 - RNA, 21 nt, Human
uauggaggaaguuaaaaacca

SEQ ID NO: 890771 - RNA, 19 nt, Human
uauuagaaauaauauacau

SEQ ID NO: 890772 - RNA, 20 nt, Human
uauuagaaauaauauacaua

SEQ ID NO: 890773 - RNA, 22 nt, Human
ucaacaucuuaaugaccuaacu

SEQ ID NO: 890774 - RNA, 21 nt, Human
uccuuaaagagaaauaaaggc

SEQ ID NO: 890775 - RNA, 21 nt, Human
ugaaaaaccacagacaggucc

SEQ ID NO: 890776 - RNA, 23 nt, Human
ugagaauauaaacuuuaaggcua

SEQ ID NO: 890777 - RNA, 26 nt, Human
ugcaauaagaaaguccaucuuaaauc

SEQ ID NO: 890778 - RNA, 22 nt, Human
uguaaacagagcccuugacaag

SEQ ID NO: 890779 - RNA, 22 nt, Human
ugugaucaacaucuuaaugacc

SEQ ID NO: 890780 - RNA, 30 nt, Human
uuagaaauaauauacauaauaaauucaacc

SEQ ID NO: 890781 - RNA, 21 nt, Human
uugcauaguaaaucuucaaaa

SEQ ID NO: 890782 - RNA, 22 nt, Human
uuugcugaaacucaaaguuacc

SEQ ID NO: 890783 - RNA, 24 nt, Human
aaagaagccaguacuucugaugag

SEQ ID NO: 890784 - RNA, 23 nt, Human
aagagcacacggcuucuccccgg

SEQ ID NO: 890785 - RNA, 19 nt, Human
aagucgagaaacuccaaaa

SEQ ID NO: 890786 - RNA, 22 nt, Human
acugagcucuguccuccagcug

SEQ ID NO: 890787 - RNA, 20 nt, Human
agaagucgagaaacuccaaa

SEQ ID NO: 890788 - RNA, 19 nt, Human
aggaauugaaagucaagau

SEQ ID NO: 890789 - RNA, 26 nt, Human
aggaauugaaagucaagaugggagcu

SEQ ID NO: 890790 - RNA, 19 nt, Human
aggcagucaggcacugagc

SEQ ID NO: 890791 - RNA, 19 nt, Human
aggcaugucuggcuucugg

SEQ ID NO: 890792 - RNA, 21 nt, Human
auggaagggcaaaaguggacc

SEQ ID NO: 890793 - RNA, 23 nt, Human
caaaaacaggucagcuaagacag

SEQ ID NO: 890794 - RNA, 21 nt, Human
caagggagccaaacuugaucu

SEQ ID NO: 890795 - RNA, 22 nt, Human
caugagacccuaggcagucagg

SEQ ID NO: 890796 - RNA, 21 nt, Human
ccaagcauaggcagccaugcu

SEQ ID NO: 890797 - RNA, 26 nt, Human
ccuacaguccaugagacccuaggcag

SEQ ID NO: 890798 - RNA, 21 nt, Human
ccugcuggaagcccugagggc

SEQ ID NO: 890799 - RNA, 18 nt, Human
cgagaaacuccaaaaucu

SEQ ID NO: 890800 - RNA, 18 nt, Human
cgcacaugagagaaaugc

SEQ ID NO: 890801 - RNA, 23 nt, Human
gaaaauaaugaagagcacacggc

SEQ ID NO: 890802 - RNA, 18 nt, Human
gagaaacuccaaaaucuc

SEQ ID NO: 890803 - RNA, 24 nt, Human
gagcucugcuuuugucguccggga

SEQ ID NO: 890804 - RNA, 22 nt, Human
gaggaauugaaagucaagaugg

SEQ ID NO: 890805 - RNA, 18 nt, Human
gcuucugggcuguagcuc

SEQ ID NO: 890806 - RNA, 20 nt, Human
uaggcuagaguccagugacc

SEQ ID NO: 890807 - RNA, 19 nt, Human
ugaggaauugaaagucaag

SEQ ID NO: 890808 - RNA, 19 nt, Human
ugcuggaagcccugagggc

SEQ ID NO: 890809 - RNA, 22 nt, Human
uggaagcccugagggcgcacau

SEQ ID NO: 890810 - RNA, 19 nt, Human
uguagcucagcauguugua

SEQ ID NO: 890811 - RNA, 22 nt, Human
uguaugaaauacacacauaucu

SEQ ID NO: 890812 - RNA, 21 nt, Human
ugucuggcuucugggcuguag

SEQ ID NO: 890813 - RNA, 21 nt, Human
uguguaugaaauacacacaua

SEQ ID NO: 890814 - RNA, 26 nt, Human
uguguguaugaaauacacacauaucu

SEQ ID NO: 890815 - RNA, 25 nt, Human
uguguguguaugaaauacacacaua

SEQ ID NO: 890816 - RNA, 23 nt, Human
uucugggcuguagcucagcaugu

SEQ ID NO: 890817 - RNA, 24 nt, Human
uuuggauuuuuaauccagguccuu

SEQ ID NO: 890818 - RNA, 20 nt, Human
uuuuuuuuuuuuucacuuuu

SEQ ID NO: 890819 - RNA, 23 nt, Human
uuuuuuuuuuuuuuuucacuuuu

SEQ ID NO: 890820 - RNA, 26 nt, Human
uuuuuuuuuuuuuuuucacuuuuugg

SEQ ID NO: 890821 - RNA, 19 nt, Human
aaacagacgugggaagaaa

SEQ ID NO: 890822 - RNA, 21 nt, Human
acgcaggaaagggucccaggg

SEQ ID NO: 890823 - RNA, 18 nt, Human
aggaaagggauuaccugg

SEQ ID NO: 890824 - RNA, 24 nt, Human
aggaaggaagacauucccuuauau

SEQ ID NO: 890825 - RNA, 23 nt, Human
aggaaggagacacauacgcagga

SEQ ID NO: 890826 - RNA, 20 nt, Human
aggcuugggggcugaggcau

SEQ ID NO: 890827 - RNA, 23 nt, Human
auagacgggaaaaaggaaaggga

SEQ ID NO: 890828 - RNA, 20 nt, Human
caccacaggcccacccacca

SEQ ID NO: 890829 - RNA, 22 nt, Human
ccacccaccaaggguguccagg

SEQ ID NO: 890830 - RNA, 19 nt, Human
cccggaacuccgggagcgg

SEQ ID NO: 890831 - RNA, 20 nt, Human
cccggaacuccgggagcggg

SEQ ID NO: 890832 - RNA, 21 nt, Human
ccugcccugcuagggccugua

SEQ ID NO: 890833 - RNA, 18 nt, Human
cuggagggcaauuccuuu

SEQ ID NO: 890834 - RNA, 19 nt, Human
gcaggaaagggucccaggg

SEQ ID NO: 890835 - RNA, 21 nt, Human
gccauuccauucccaggugac

SEQ ID NO: 890836 - RNA, 18 nt, Human
gggauggccgcgcucacc

SEQ ID NO: 890837 - RNA, 18 nt, Human
ggggaagauuccacacag

SEQ ID NO: 890838 - RNA, 19 nt, Human
gguauaggagggaagaagg

SEQ ID NO: 890839 - RNA, 19 nt, Human
ggugacaggaaggagacac

SEQ ID NO: 890840 - RNA, 19 nt, Human
uacagguggguauaggagg

SEQ ID NO: 890841 - RNA, 19 nt, Human
uagacgggaaaaaggaaag

SEQ ID NO: 890842 - RNA, 26 nt, Human
uagcagaaacagacgugggaagaaga

SEQ ID NO: 890843 - RNA, 18 nt, Human
uaggagggaagaaggaaa

SEQ ID NO: 890844 - RNA, 25 nt, Human
uaggcuugggggcugaggcauguau

SEQ ID NO: 890845 - RNA, 20 nt, Human
uauuuggaagaagagcagau

SEQ ID NO: 890846 - RNA, 21 nt, Human
ugacaggaaggagacacauac

SEQ ID NO: 890847 - RNA, 26 nt, Human
ugcagagggaaaaugcuucugggauu

SEQ ID NO: 890848 - RNA, 21 nt, Human
uggaagaagagcagauuucac

SEQ ID NO: 890849 - RNA, 22 nt, Human
ugggaagaaacgucauuuugca

SEQ ID NO: 890850 - RNA, 22 nt, Human
uggguauaggagggaagaagga

SEQ ID NO: 890851 - RNA, 22 nt, Human
uguauuguacuggcacagucca

SEQ ID NO: 890852 - RNA, 22 nt, Human
uugggggcugaggcauguauug

SEQ ID NO: 890853 - RNA, 23 nt, Human
aaaaacaauaugaagacgauugc

SEQ ID NO: 890854 - RNA, 22 nt, Human
aaaaacacagaaggaaaaccua

SEQ ID NO: 890855 - RNA, 21 nt, Human
aaacacagaaggaaaaccuag

SEQ ID NO: 890856 - RNA, 22 nt, Human
aaacaguuacaaagacauucuc

SEQ ID NO: 890857 - RNA, 18 nt, Human
aaacaucuaguauugcua

SEQ ID NO: 890858 - RNA, 24 nt, Human
aaagguaaguacagggaaaggucc

SEQ ID NO: 890859 - RNA, 21 nt, Human
acaaaauaauaaacaaaucaa

SEQ ID NO: 890860 - RNA, 20 nt, Human
acacagaaggaaaaccuaga

SEQ ID NO: 890861 - RNA, 18 nt, Human
acagggaaagguccuuuc

SEQ ID NO: 890862 - RNA, 21 nt, Human
acucucagcaaucuuuucuaa

SEQ ID NO: 890863 - RNA, 21 nt, Human
acuucugggcugagagggauu

SEQ ID NO: 890864 - RNA, 21 nt, Human
aggcauuucagugucuaaaaa

SEQ ID NO: 890865 - RNA, 22 nt, Human
agggagccagcuuccccaaaaa

SEQ ID NO: 890866 - RNA, 22 nt, Human
cacgcuggggcaccuuaggaac

SEQ ID NO: 890867 - RNA, 19 nt, Human
cagaaggaaaaccuagaaa

SEQ ID NO: 890868 - RNA, 20 nt, Human
cuagaggagcagguguggug

SEQ ID NO: 890869 - RNA, 23 nt, Human
gacuccauuuuuagcugaaauga

SEQ ID NO: 890870 - RNA, 19 nt, Human
gaugccucgugucucuaga

SEQ ID NO: 890871 - RNA, 18 nt, Human
ggaaaaccuagaaauaaa

SEQ ID NO: 890872 - RNA, 18 nt, Human
ggaaagguccuuucagaa

SEQ ID NO: 890873 - RNA, 19 nt, Human
ggaacugguuguguuugug

SEQ ID NO: 890874 - RNA, 23 nt, Human
ggagcacguggugucugcuuggg

SEQ ID NO: 890875 - RNA, 19 nt, Human
gggcugagagggauuuuag

SEQ ID NO: 890876 - RNA, 19 nt, Human
uaaaaacacagaaggaaaa

SEQ ID NO: 890877 - RNA, 18 nt, Human
uaaaagggaugccucgug

SEQ ID NO: 890878 - RNA, 20 nt, Human
uaaaaugguaggcaaucuca

SEQ ID NO: 890879 - RNA, 21 nt, Human
uaaaaugguaggcaaucucau

SEQ ID NO: 890880 - RNA, 20 nt, Human
uaaaugugaaaauucggacc

SEQ ID NO: 890881 - RNA, 21 nt, Human
uagcugaaaugaaauuuacug

SEQ ID NO: 890882 - RNA, 22 nt, Human
uagggagccagcuuccccaaaa

SEQ ID NO: 890883 - RNA, 24 nt, Human
uaucucaaaacaucauuacaacag

SEQ ID NO: 890884 - RNA, 25 nt, Human
ucuaauaauaaacaucuaguauugc

SEQ ID NO: 890885 - RNA, 21 nt, Human
ucucaucgugcauuaucuuuu

SEQ ID NO: 890886 - RNA, 22 nt, Human
ucucuagaggagcagguguggu

SEQ ID NO: 890887 - RNA, 21 nt, Human
ugaaaaauacaaaauguagcg

SEQ ID NO: 890888 - RNA, 24 nt, Human
ugaaacagaagguaacuuugugca

SEQ ID NO: 890889 - RNA, 21 nt, Human
ugacaaagcauauucagauau

SEQ ID NO: 890890 - RNA, 23 nt, Human
ugcugaagauaauuugauccaau

SEQ ID NO: 890891 - RNA, 26 nt, Human
ugcuugggagcagguuuggugugugu

SEQ ID NO: 890892 - RNA, 21 nt, Human
ugggcugagagggauuuuagg

SEQ ID NO: 890893 - RNA, 23 nt, Human
ugguggguaaaaauguaucuuuu

SEQ ID NO: 890894 - RNA, 21 nt, Human
ugguguaugacacuucuggac

SEQ ID NO: 890895 - RNA, 24 nt, Human
uguugcuaaaaaauugaaguuuaa

SEQ ID NO: 890896 - RNA, 18 nt, Human
uugcaguaacacgcuggg

SEQ ID NO: 890897 - RNA, 23 nt, Human
uuggugugugucacuucugggcu

SEQ ID NO: 890898 - RNA, 20 nt, Human
uuguguuugugggauucuug

SEQ ID NO: 890899 - RNA, 20 nt, Human
uuucuuaaaaugacuuugua

SEQ ID NO: 890900 - RNA, 19 nt, Human
aaaacaaagaaucucuaaa

SEQ ID NO: 890901 - RNA, 25 nt, Human
aaagaccagacuacauucugaauaa

SEQ ID NO: 890902 - RNA, 21 nt, Human
aaauacaguaaaaugcacuuu

SEQ ID NO: 890903 - RNA, 25 nt, Human
aaccaugcugccucaaaacauaacu

SEQ ID NO: 890904 - RNA, 22 nt, Human
aagaaucucuaaauugucacau

SEQ ID NO: 890905 - RNA, 19 nt, Human
aaguccuuucugaaucaac

SEQ ID NO: 890906 - RNA, 20 nt, Human
agaagccccauccuuucacc

SEQ ID NO: 890907 - RNA, 24 nt, Human
agaagccccauccuuucaccacau

SEQ ID NO: 890908 - RNA, 25 nt, Human
agccccauccuuucaccacauccua

SEQ ID NO: 890909 - RNA, 24 nt, Human
aguggguaugacaucugucuucag

SEQ ID NO: 890910 - RNA, 22 nt, Human
auacaaaaaaucccugaucagc

SEQ ID NO: 890911 - RNA, 20 nt, Human
caaaacauaacuguguucag

SEQ ID NO: 890912 - RNA, 20 nt, Human
caaaauacaguaaaaugcag

SEQ ID NO: 890913 - RNA, 22 nt, Human
cagaagaauagaucgcugagua

SEQ ID NO: 890914 - RNA, 23 nt, Human
caggaaaggcuaaaaauaaugau

SEQ ID NO: 890915 - RNA, 24 nt, Human
ccauccucauuuuaaagcauagaa

SEQ ID NO: 890916 - RNA, 22 nt, Human
ccccauccuuucaccacauccu

SEQ ID NO: 890917 - RNA, 21 nt, Human
cggaaaugcuaaucaaaccau

SEQ ID NO: 890918 - RNA, 19 nt, Human
cuuucugaaucaacuaagu

SEQ ID NO: 890919 - RNA, 24 nt, Human
gagaaaaagaacacuauuuucugu

SEQ ID NO: 890920 - RNA, 23 nt, Human
uaaaaaguguuuagugucaaaaa

SEQ ID NO: 890921 - RNA, 23 nt, Human
uaaaacaaagaaucucuaaauug

SEQ ID NO: 890922 - RNA, 18 nt, Human
uaaaacaaguuugugguu

SEQ ID NO: 890923 - RNA, 18 nt, Human
uaaaaugcacuuuuccca

SEQ ID NO: 890924 - RNA, 26 nt, Human
uaagggcaucaauuauuguccaggug

SEQ ID NO: 890925 - RNA, 23 nt, Human
uaaguuaugugcaaauuuucuua

SEQ ID NO: 890926 - RNA, 18 nt, Human
uacacaggcuacacagug

SEQ ID NO: 890927 - RNA, 20 nt, Human
uacacaggcuacacaguggg

SEQ ID NO: 890928 - RNA, 25 nt, Human
uacuuuauauacuaguugguagaag

SEQ ID NO: 890929 - RNA, 22 nt, Human
uagaauaguauaugcuuaggug

SEQ ID NO: 890930 - RNA, 24 nt, Human
uagcuugcucuuuuaagugguaau

SEQ ID NO: 890931 - RNA, 21 nt, Human
uauacagauuuaacacagacu

SEQ ID NO: 890932 - RNA, 20 nt, Human
uaucagaacugaaaucgacu

SEQ ID NO: 890933 - RNA, 24 nt, Human
uauggcaacauuuuuauuucuaca

SEQ ID NO: 890934 - RNA, 27 nt, Human
ucaaccuuuacuauggcuccaguccca

SEQ ID NO: 890935 - RNA, 21 nt, Human
ucaccacauccuacucccaag

SEQ ID NO: 890936 - RNA, 19 nt, Human
ucagugaaauaaaacaaag

SEQ ID NO: 890937 - RNA, 23 nt, Human
ugagaaauaaacaaaauacacaa

SEQ ID NO: 890938 - RNA, 26 nt, Human
uggagaaaaagaacacuauuuucugu

SEQ ID NO: 890939 - RNA, 18 nt, Human
ugucaaaaagagucuuca

SEQ ID NO: 890940 - RNA, 19 nt, Human
uuaguacuuuauauacuag

SEQ ID NO: 890941 - RNA, 22 nt, Human
uugcauggaugcggaaaugcua

SEQ ID NO: 890942 - RNA, 23 nt, Human
uuucugaaucaacuaaguuaugu

SEQ ID NO: 890943 - RNA, 28 nt, Human
uuugugguuuucuucugugacauuucuu

SEQ ID NO: 890944 - RNA, 19 nt, Human
uuuuccuuuucauaauggu

SEQ ID NO: 890945 - RNA, 21 nt, Human
aaacaaaagaagguuccagga

SEQ ID NO: 890946 - RNA, 19 nt, Human
aagcccaucagugccgggg

SEQ ID NO: 890947 - RNA, 23 nt, Human
acuccacccacugagaaguccga

SEQ ID NO: 890948 - RNA, 21 nt, Human
agaagcccaucagugccgggg

SEQ ID NO: 890949 - RNA, 18 nt, Human
aggcaggguagguggggu

SEQ ID NO: 890950 - RNA, 23 nt, Human
aggcugaggcaggguaggugggg

SEQ ID NO: 890951 - RNA, 24 nt, Human
aggcugaggcaggguagguggggu

SEQ ID NO: 890952 - RNA, 20 nt, Human
aggggucauaucuggagagc

SEQ ID NO: 890953 - RNA, 19 nt, Human
aggugggguagggcaggcu

SEQ ID NO: 890954 - RNA, 28 nt, Human
aggugggguagggcaggcuguggggggu

SEQ ID NO: 890955 - RNA, 21 nt, Human
agugccggggguuccuccgga

SEQ ID NO: 890956 - RNA, 22 nt, Human
cacccugucgucuuuggcaaau

SEQ ID NO: 890957 - RNA, 19 nt, Human
cagcagggcggggugggca

SEQ ID NO: 890958 - RNA, 20 nt, Human
cagcagggcggggugggcac

SEQ ID NO: 890959 - RNA, 20 nt, Human
ccacccugucgucuuuggca

SEQ ID NO: 890960 - RNA, 20 nt, Human
cccgccccgccaggugcccc

SEQ ID NO: 890961 - RNA, 23 nt, Human
ccucccuggcacuccacccaacc

SEQ ID NO: 890962 - RNA, 22 nt, Human
ccucccuggcacuccacccacu

SEQ ID NO: 890963 - RNA, 22 nt, Human
ccuccggagcgcaccccagccc

SEQ ID NO: 890964 - RNA, 21 nt, Human
ccuccuccucccuggcacucc

SEQ ID NO: 890965 - RNA, 23 nt, Human
ccuggaaacaccuuggcugcuga

SEQ ID NO: 890966 - RNA, 22 nt, Human
cgccaggugccccaugguggcc

SEQ ID NO: 890967 - RNA, 23 nt, Human
cgcgcccgcaggaccuggggguc

SEQ ID NO: 890968 - RNA, 18 nt, Human
cucaauccucuucccucc

SEQ ID NO: 890969 - RNA, 20 nt, Human
cucaauccucuucccuccac

SEQ ID NO: 890970 - RNA, 21 nt, Human
cuccuccucccuggcacucca

SEQ ID NO: 890971 - RNA, 18 nt, Human
cucucugaacuuccugga

SEQ ID NO: 890972 - RNA, 24 nt, Human
cugacaaacaaaagaagguuccag

SEQ ID NO: 890973 - RNA, 21 nt, Human
cuguggggggugggugcaggg

SEQ ID NO: 890974 - RNA, 20 nt, Human
cuguucucucugaacuuccu

SEQ ID NO: 890975 - RNA, 20 nt, Human
gagagcgcaggcaggugaca

SEQ ID NO: 890976 - RNA, 22 nt, Human
gcaggcuguggggggugggugc

SEQ ID NO: 890977 - RNA, 19 nt, Human
gccccgagccccaggucuc

SEQ ID NO: 890978 - RNA, 21 nt, Human
gccccgagccccaggucuccg

SEQ ID NO: 890979 - RNA, 20 nt, Human
gcucaauccucuucccucca

SEQ ID NO: 890980 - RNA, 19 nt, Human
ggaaacaccuuggcugcug

SEQ ID NO: 890981 - RNA, 20 nt, Human
ggacaaagugucagugugag

SEQ ID NO: 890982 - RNA, 22 nt, Human
ggcagcagggcggggugggcac

SEQ ID NO: 890983 - RNA, 22 nt, Human
ggcaggggcagaagcccaucag

SEQ ID NO: 890984 - RNA, 21 nt, Human
gggcagaagcccaucagugcc

SEQ ID NO: 890985 - RNA, 22 nt, Human
gggcagcagggcggggugggca

SEQ ID NO: 890986 - RNA, 26 nt, Human
gggggugggugcaggggucauaucug

SEQ ID NO: 890987 - RNA, 20 nt, Human
gggguagggcaggcuguggg

SEQ ID NO: 890988 - RNA, 26 nt, Human
gggugggugcaggggucauaucugga

SEQ ID NO: 890989 - RNA, 19 nt, Human
gguagggcaggcugugggg

SEQ ID NO: 890990 - RNA, 19 nt, Human
gguaucuccacggggcggg

SEQ ID NO: 890991 - RNA, 21 nt, Human
ggucauaucuggagagcgcag

SEQ ID NO: 890992 - RNA, 24 nt, Human
ggugcaggggucauaucuggagag

SEQ ID NO: 890993 - RNA, 25 nt, Human
ggugggugcaggggucauaucugga

SEQ ID NO: 890994 - RNA, 21 nt, Human
gucgucuuuggcaaauacgca

SEQ ID NO: 890995 - RNA, 19 nt, Human
uaggugggguagggcaggc

SEQ ID NO: 890996 - RNA, 21 nt, Human
uccacagggcagcagggcggg

SEQ ID NO: 890997 - RNA, 19 nt, Human
ucccuggcacuccacccac

SEQ ID NO: 890998 - RNA, 20 nt, Human
uccucccuggcacuccaccc

SEQ ID NO: 890999 - RNA, 18 nt, Human
ugaacuuccuggaaacac

SEQ ID NO: 891000 - RNA, 19 nt, Human
ugacacaaagcucaauccu

SEQ ID NO: 891001 - RNA, 22 nt, Human
ugagaaguccgaggcugaggca

SEQ ID NO: 891002 - RNA, 21 nt, Human
ugcaggaauccaggggccccg

SEQ ID NO: 891003 - RNA, 18 nt, Human
uggaaacaccuuggcugc

SEQ ID NO: 891004 - RNA, 18 nt, Human
uggcaaauacgcauaugc

SEQ ID NO: 891005 - RNA, 19 nt, Human
uggggggugggugcagggg

SEQ ID NO: 891006 - RNA, 24 nt, Human
ugugccuccuccucccuggcacuc

SEQ ID NO: 891007 - RNA, 21 nt, Human
uguggggggugggugcagggg

SEQ ID NO: 891008 - RNA, 20 nt, Human
uuccgcgcccgcaggaccug

SEQ ID NO: 891009 - RNA, 18 nt, Human
uugcccagaggccggcag

SEQ ID NO: 891010 - RNA, 25 nt, Human
uuuggcaaauacgcauaugcagaug

SEQ ID NO: 891011 - RNA, 18 nt, Human
uuuuuuuuuuuuuaaccc

SEQ ID NO: 891012 - RNA, 25 nt, Human
aaaacucguuccauucugaggcacc

SEQ ID NO: 891013 - RNA, 24 nt, Human
aaaauuaaaccacaauuuccuaag

SEQ ID NO: 891014 - RNA, 19 nt, Human
aaacaugcauacacaaaga

SEQ ID NO: 891015 - RNA, 23 nt, Human
aaacauguagagaaacauagagu

SEQ ID NO: 891016 - RNA, 22 nt, Human
aaagaaaaaaacauguagagaa

SEQ ID NO: 891017 - RNA, 21 nt, Human
aaagaccaaaaaaaauuggga

SEQ ID NO: 891018 - RNA, 22 nt, Human
acacaucuuuccuaaaaagacc

SEQ ID NO: 891019 - RNA, 20 nt, Human
acagcacagugcuacauaua

SEQ ID NO: 891020 - RNA, 22 nt, Human
accacaauuuccuaagacauaa

SEQ ID NO: 891021 - RNA, 24 nt, Human
accacaauuuccuaagacauaacu

SEQ ID NO: 891022 - RNA, 20 nt, Human
agcaacggaaagaaaaaaac

SEQ ID NO: 891023 - RNA, 28 nt, Human
auacuuucugauuuuaauaaauuuccac

SEQ ID NO: 891024 - RNA, 22 nt, Human
auauaauuccacuaucaauaag

SEQ ID NO: 891025 - RNA, 22 nt, Human
caacacagugguaccauacaaa

SEQ ID NO: 891026 - RNA, 25 nt, Human
cacagugcuacauauaauuauacca

SEQ ID NO: 891027 - RNA, 22 nt, Human
caccauauaaccaacacagugg

SEQ ID NO: 891028 - RNA, 24 nt, Human
caccauauaaccaacacaguggua

SEQ ID NO: 891029 - RNA, 20 nt, Human
caccgagcuucagagaccac

SEQ ID NO: 891030 - RNA, 18 nt, Human
cccuuaacauaacaggau

SEQ ID NO: 891031 - RNA, 18 nt, Human
ccuugccuuuggggccug

SEQ ID NO: 891032 - RNA, 24 nt, Human
cgaucaauucuuccauuacuuucu

SEQ ID NO: 891033 - RNA, 22 nt, Human
gccggggccuggggcugcagug

SEQ ID NO: 891034 - RNA, 19 nt, Human
ggccggggccuggggcugc

SEQ ID NO: 891035 - RNA, 20 nt, Human
ggccggggccuggggcugca

SEQ ID NO: 891036 - RNA, 21 nt, Human
ggccggggccuggggcugcag

SEQ ID NO: 891037 - RNA, 19 nt, Human
gggcagcaacgcagacgug

SEQ ID NO: 891038 - RNA, 24 nt, Human
gggcagcaacgcagacguggguga

SEQ ID NO: 891039 - RNA, 25 nt, Human
gggcagcaacgcagacguggguggg

SEQ ID NO: 891040 - RNA, 21 nt, Human
ggggccggggccuggggcugc

SEQ ID NO: 891041 - RNA, 26 nt, Human
ggguggggggccggggccuggggcug

SEQ ID NO: 891042 - RNA, 24 nt, Human
uaaacuggcaaauggagcuuaaca

SEQ ID NO: 891043 - RNA, 24 nt, Human
uaacaggaucucauacuuucugau

SEQ ID NO: 891044 - RNA, 20 nt, Human
uaagaaaggccacaguggac

SEQ ID NO: 891045 - RNA, 22 nt, Human
uaagaaaggccacaguggacag

SEQ ID NO: 891046 - RNA, 23 nt, Human
uaagguacuuuuccagauagugu

SEQ ID NO: 891047 - RNA, 18 nt, Human
uaauuccacuaucaauaa

SEQ ID NO: 891048 - RNA, 22 nt, Human
uaauuuuuuaacagaauauaca

SEQ ID NO: 891049 - RNA, 23 nt, Human
uauacagagccacacaauacgau

SEQ ID NO: 891050 - RNA, 25 nt, Human
uaucuacacagcacagugcuacaua

SEQ ID NO: 891051 - RNA, 21 nt, Human
ucagcaacggaaagaaaaaaa

SEQ ID NO: 891052 - RNA, 23 nt, Human
ucagcaacggaaagaaaaaaaca

SEQ ID NO: 891053 - RNA, 20 nt, Human
ucccuuaacauaacaggauc

SEQ ID NO: 891054 - RNA, 22 nt, Human
uccuugccuuuggggccuggcc

SEQ ID NO: 891055 - RNA, 27 nt, Human
ucgaucaauucuuccauuacuuucuuu

SEQ ID NO: 891056 - RNA, 22 nt, Human
ugcagugcgcggcgcgcgcgcg

SEQ ID NO: 891057 - RNA, 24 nt, Human
uggacagugcccgacaaugaauac

SEQ ID NO: 891058 - RNA, 20 nt, Human
uggcccaggcggggcagcaa

SEQ ID NO: 891059 - RNA, 22 nt, Human
uggggcugcagugcgcggcgac

SEQ ID NO: 891060 - RNA, 19 nt, Human
uggggggccggggccuggg

SEQ ID NO: 891061 - RNA, 19 nt, Human
uguccuugccuuuggggcc

SEQ ID NO: 891062 - RNA, 24 nt, Human
uuauaccagugagauguacguuca

SEQ ID NO: 891063 - RNA, 22 nt, Human
uuccauucugauggaggcugaa

SEQ ID NO: 891064 - RNA, 21 nt, Human
uucugcagguaaaaaugcuaa

SEQ ID NO: 891065 - RNA, 19 nt, Human
uucuuccauuacuuucuuu

SEQ ID NO: 891066 - RNA, 24 nt, Human
uuuccuaaaaagaccaaaaaaaau

SEQ ID NO: 891067 - RNA, 24 nt, Human
uuuuuaccacaacacaucuuuccu

SEQ ID NO: 891068 - RNA, 20 nt, Human
uuuuucagcaacggaaagaa

SEQ ID NO: 891069 - RNA, 22 nt, Human
aaaaaacuaggcucaaggaagc

SEQ ID NO: 891070 - RNA, 19 nt, Human
acagcucuucccuccugcc

SEQ ID NO: 891071 - RNA, 21 nt, Human
agaugcccuucccuccugccc

SEQ ID NO: 891072 - RNA, 26 nt, Human
agccagcgcucguggccccaccugcg

SEQ ID NO: 891073 - RNA, 21 nt, Human
agccccgccaccggcguucuc

SEQ ID NO: 891074 - RNA, 22 nt, Human
agcugccauggcaggcugggcc

SEQ ID NO: 891075 - RNA, 19 nt, Human
aggccccaggugggcacag

SEQ ID NO: 891076 - RNA, 22 nt, Human
aggccgugggaccuacacacag

SEQ ID NO: 891077 - RNA, 19 nt, Human
aggugcuacaaaacugccu

SEQ ID NO: 891078 - RNA, 26 nt, Human
caaaaaaaugaauguuacaaaaauca

SEQ ID NO: 891079 - RNA, 18 nt, Human
caaggaagcagccgcccu

SEQ ID NO: 891080 - RNA, 23 nt, Human
cacacagcccuggcuuuggucag

SEQ ID NO: 891081 - RNA, 18 nt, Human
cacacaggcacacacagc

SEQ ID NO: 891082 - RNA, 20 nt, Human
cacagauuccagagcugccu

SEQ ID NO: 891083 - RNA, 22 nt, Human
cacucccucuccccaauuacag

SEQ ID NO: 891084 - RNA, 23 nt, Human
cagaugcccuucccuccugcccc

SEQ ID NO: 891085 - RNA, 19 nt, Human
cagcucuucccuccugccc

SEQ ID NO: 891086 - RNA, 21 nt, Human
caggccccaggugggcacaga

SEQ ID NO: 891087 - RNA, 24 nt, Human
ccagccccgccaccggcguucucu

SEQ ID NO: 891088 - RNA, 19 nt, Human
ccaggccccaggugggcac

SEQ ID NO: 891089 - RNA, 21 nt, Human
ccccacgauguugacugagag

SEQ ID NO: 891090 - RNA, 24 nt, Human
ccccaggccccaggugggcacaga

SEQ ID NO: 891091 - RNA, 21 nt, Human
cccuggggaggcagaggccgu

SEQ ID NO: 891092 - RNA, 20 nt, Human
ccgcccuugcaagagggcuc

SEQ ID NO: 891093 - RNA, 19 nt, Human
ccuggggaggcagaggccg

SEQ ID NO: 891094 - RNA, 22 nt, Human
ccuguagcccaggccuggagaa

SEQ ID NO: 891095 - RNA, 21 nt, Human
cguggccccaccugcggcugc

SEQ ID NO: 891096 - RNA, 19 nt, Human
cucccuggggaggcagagg

SEQ ID NO: 891097 - RNA, 24 nt, Human
cucccuggggaggcagaggccgug

SEQ ID NO: 891098 - RNA, 24 nt, Human
cugagaagaggccaaccuggccau

SEQ ID NO: 891099 - RNA, 23 nt, Human
gaagaggccaaccuggccauggg

SEQ ID NO: 891100 - RNA, 21 nt, Human
gcccugagcagagccucaggc

SEQ ID NO: 891101 - RNA, 20 nt, Human
ggcagaggggccgcagcccu

SEQ ID NO: 891102 - RNA, 19 nt, Human
ggccccaccugcggcugcc

SEQ ID NO: 891103 - RNA, 20 nt, Human
ggcucugcucccuggggagg

SEQ ID NO: 891104 - RNA, 21 nt, Human
gggcacagauuccagagcugc

SEQ ID NO: 891105 - RNA, 18 nt, Human
guuggagcugccauggca

SEQ ID NO: 891106 - RNA, 22 nt, Human
uaggggaggcccaggcucugcu

SEQ ID NO: 891107 - RNA, 18 nt, Human
uagucagaaacuccuguu

SEQ ID NO: 891108 - RNA, 20 nt, Human
uccccagaugcccuucccuc

SEQ ID NO: 891109 - RNA, 24 nt, Human
uccccagaugcccuucccuccugc

SEQ ID NO: 891110 - RNA, 22 nt, Human
uccccgcgcggguuacgggggc

SEQ ID NO: 891111 - RNA, 20 nt, Human
uccccuguagcccaggccug

SEQ ID NO: 891112 - RNA, 20 nt, Human
ucccucagccagcgcucgug

SEQ ID NO: 891113 - RNA, 20 nt, Human
ucccuggggaggcagaggcc

SEQ ID NO: 891114 - RNA, 24 nt, Human
ucccuggggaggcagaggccgugg

SEQ ID NO: 891115 - RNA, 20 nt, Human
ucggggaaagccucuuaggg

SEQ ID NO: 891116 - RNA, 18 nt, Human
ugagaagaggccaaccug

SEQ ID NO: 891117 - RNA, 19 nt, Human
ugagaagaggccaaccugg

SEQ ID NO: 891118 - RNA, 22 nt, Human
ugagaagaggccaaccuggcca

SEQ ID NO: 891119 - RNA, 19 nt, Human
ugcccuucccuccugcccc

SEQ ID NO: 891120 - RNA, 23 nt, Human
uggagcugccauggcaggcuggg

SEQ ID NO: 891121 - RNA, 24 nt, Human
uggcuuuggucaguacugagugug

SEQ ID NO: 891122 - RNA, 19 nt, Human
ugggaggcugagaagaggc

SEQ ID NO: 891123 - RNA, 24 nt, Human
uggggaggcagaggccgugggacc

SEQ ID NO: 891124 - RNA, 24 nt, Human
ugugggcagaggggccgcagcccu

SEQ ID NO: 891125 - RNA, 22 nt, Human
uuaggggaggcccaggcucugc

SEQ ID NO: 891126 - RNA, 21 nt, Human
aaaaagaacacagaaaaacau

SEQ ID NO: 891127 - RNA, 18 nt, Human
aaacaaaagugaaacuga

SEQ ID NO: 891128 - RNA, 22 nt, Human
aaacuccucagcugaagaauuc

SEQ ID NO: 891129 - RNA, 22 nt, Human
aaagcaagaaggaaauaaaggg

SEQ ID NO: 891130 - RNA, 21 nt, Human
aacacucuguagauccugcua

SEQ ID NO: 891131 - RNA, 26 nt, Human
aagaacacagaaaaacagcaggaacu

SEQ ID NO: 891132 - RNA, 19 nt, Human
aagaacacagaaaaacaua

SEQ ID NO: 891133 - RNA, 25 nt, Human
aagacauaaaacaacauagaaacaa

SEQ ID NO: 891134 - RNA, 26 nt, Human
aagcaagaaggaaauaaaggggaccc

SEQ ID NO: 891135 - RNA, 19 nt, Human
aaggagaggcaaacaauga

SEQ ID NO: 891136 - RNA, 18 nt, Human
aaggagcacuugguggcc

SEQ ID NO: 891137 - RNA, 21 nt, Human
acaaagacauaaaacaacaua

SEQ ID NO: 891138 - RNA, 24 nt, Human
acacagaaaaacauaucuggggca

SEQ ID NO: 891139 - RNA, 21 nt, Human
acugacaauaaaaauaaaguu

SEQ ID NO: 891140 - RNA, 19 nt, Human
agagaggggccagaaggua

SEQ ID NO: 891141 - RNA, 19 nt, Human
agcaauuucauuuuuaaau

SEQ ID NO: 891142 - RNA, 22 nt, Human
aguccauggcgauaagaaacua

SEQ ID NO: 891143 - RNA, 22 nt, Human
auaaaacaacauagaaacaaaa

SEQ ID NO: 891144 - RNA, 18 nt, Human
auagaaacaaaagugaaa

SEQ ID NO: 891145 - RNA, 23 nt, Human
aucaacguucugggcaccacagc

SEQ ID NO: 891146 - RNA, 23 nt, Human
aucccuacaauaauaacagaaaa

SEQ ID NO: 891147 - RNA, 21 nt, Human
auuguuugagcaaaauguguu

SEQ ID NO: 891148 - RNA, 21 nt, Human
caaagcaagaaggaaauaaag

SEQ ID NO: 891149 - RNA, 24 nt, Human
caaguuuccaguuaaucucaaaau

SEQ ID NO: 891150 - RNA, 18 nt, Human
cacagcauccagagauga

SEQ ID NO: 891151 - RNA, 23 nt, Human
caccacagcauccagagaugaga

SEQ ID NO: 891152 - RNA, 22 nt, Human
cacgaaacacucuguagauccu

SEQ ID NO: 891153 - RNA, 23 nt, Human
cagcagcauccccaccgugacug

SEQ ID NO: 891154 - RNA, 18 nt, Human
cagcauccagagaugaga

SEQ ID NO: 891155 - RNA, 21 nt, Human
caguggcggggggaggacagg

SEQ ID NO: 891156 - RNA, 21 nt, Human
cauaucuggggcaaacagcaa

SEQ ID NO: 891157 - RNA, 24 nt, Human
ccacgcugcagccagauccggaug

SEQ ID NO: 891158 - RNA, 23 nt, Human
cccacgcugcagccagauccgga

SEQ ID NO: 891159 - RNA, 18 nt, Human
ccgcgcagccagcagcau

SEQ ID NO: 891160 - RNA, 18 nt, Human
ccucagcgccgcgcagcc

SEQ ID NO: 891161 - RNA, 23 nt, Human
cgauaagaaacuaaagcaaaacu

SEQ ID NO: 891162 - RNA, 21 nt, Human
cgcuggcccucagcgccgcgc

SEQ ID NO: 891163 - RNA, 20 nt, Human
cgggaagacuuccaguggcg

SEQ ID NO: 891164 - RNA, 26 nt, Human
cucaaaauguauuuaaaaacuaagga

SEQ ID NO: 891165 - RNA, 19 nt, Human
cucuucagcuuuuacuguu

SEQ ID NO: 891166 - RNA, 21 nt, Human
cugaaugaagagaggggccag

SEQ ID NO: 891167 - RNA, 24 nt, Human
gaaacacucuguagauccugcuaa

SEQ ID NO: 891168 - RNA, 26 nt, Human
gcaaacaaugagaacagcuccaugac

SEQ ID NO: 891169 - RNA, 19 nt, Human
gcaaacuuucuccagaaag

SEQ ID NO: 891170 - RNA, 23 nt, Human
gcaaagcaagaaggaaauaaagg

SEQ ID NO: 891171 - RNA, 24 nt, Human
gcaaagcaagaaggaaauaaaggg

SEQ ID NO: 891172 - RNA, 28 nt, Human
gccccgggcgggcucucgcucucgcugg

SEQ ID NO: 891173 - RNA, 20 nt, Human
gcggggggaggacagggucg

SEQ ID NO: 891174 - RNA, 20 nt, Human
gggcgggcucucgcucucgc

SEQ ID NO: 891175 - RNA, 19 nt, Human
gguaaaaaggaggaaaagg

SEQ ID NO: 891176 - RNA, 22 nt, Human
uaaaaagaacacagaaaaacau

SEQ ID NO: 891177 - RNA, 24 nt, Human
uaaaaagauuguaauacaagaaua

SEQ ID NO: 891178 - RNA, 22 nt, Human
uaaaacaacauagaaacaaaag

SEQ ID NO: 891179 - RNA, 19 nt, Human
uaaagcaaaacuccucagc

SEQ ID NO: 891180 - RNA, 25 nt, Human
uaagaaacuaaagcaaaacuccuca

SEQ ID NO: 891181 - RNA, 22 nt, Human
uagguaaagguuuagaaaccag

SEQ ID NO: 891182 - RNA, 22 nt, Human
uagguguguauaguccauaacc

SEQ ID NO: 891183 - RNA, 22 nt, Human
uaucauauauaaaauaacauuu

SEQ ID NO: 891184 - RNA, 19 nt, Human
ucaggaacgcacuauucuc

SEQ ID NO: 891185 - RNA, 22 nt, Human
uccaugguccacacugucacuu

SEQ ID NO: 891186 - RNA, 23 nt, Human
ucccuacaauaauaacagaaaaa

SEQ ID NO: 891187 - RNA, 21 nt, Human
uccgagcccacgcugcagcca

SEQ ID NO: 891188 - RNA, 20 nt, Human
ucucucggaaugggcgaaua

SEQ ID NO: 891189 - RNA, 19 nt, Human
ucuucaaguuuccaguuaa

SEQ ID NO: 891190 - RNA, 19 nt, Human
ugaggaaaggaauccuggg

SEQ ID NO: 891191 - RNA, 20 nt, Human
uggcggggggaggacaggga

SEQ ID NO: 891192 - RNA, 21 nt, Human
uuaauugcaaaauaaguuuua

SEQ ID NO: 891193 - RNA, 21 nt, Human
uuacucagaucaaagucaugu

SEQ ID NO: 891194 - RNA, 22 nt, Human
uuccaugguccacacugucacu

SEQ ID NO: 891195 - RNA, 24 nt, Human
uucuccagaaagauugagcaaaca

SEQ ID NO: 891196 - RNA, 19 nt, Human
uugcaaucuaguaauuuua

SEQ ID NO: 891197 - RNA, 19 nt, Human
uuguauuauugucuuggca

SEQ ID NO: 891198 - RNA, 19 nt, Human
uuuuuguuuaaaaaacauu

SEQ ID NO: 891199 - RNA, 24 nt, Human
uuuuuuuucacauaucacacaaug

SEQ ID NO: 891200 - RNA, 18 nt, Human
aaacuaaauacaguaaca

SEQ ID NO: 891201 - RNA, 18 nt, Human
aacaaaauauagaaaaca

SEQ ID NO: 891202 - RNA, 18 nt, Human
aacgaagaggcagccuga

SEQ ID NO: 891203 - RNA, 21 nt, Human
aagaagaaacagaugggugaa

SEQ ID NO: 891204 - RNA, 21 nt, Human
aagaggcagccugagccuggc

SEQ ID NO: 891205 - RNA, 19 nt, Human
aauacaguaacaaaaggaa

SEQ ID NO: 891206 - RNA, 21 nt, Human
acaauuugauaaaugaguucc

SEQ ID NO: 891207 - RNA, 20 nt, Human
acacacccuaagaauucaca

SEQ ID NO: 891208 - RNA, 18 nt, Human
acagagauuagccaagaa

SEQ ID NO: 891209 - RNA, 22 nt, Human
acagagcuguuaucagucaaga

SEQ ID NO: 891210 - RNA, 19 nt, Human
acaguaacaaaaggaaaga

SEQ ID NO: 891211 - RNA, 20 nt, Human
agaaagagcuuauguccaca

SEQ ID NO: 891212 - RNA, 22 nt, Human
agaaagagcuuauguccacauu

SEQ ID NO: 891213 - RNA, 19 nt, Human
agaaaggaaaaauaaaagg

SEQ ID NO: 891214 - RNA, 22 nt, Human
agaugggugaaauacaacuggg

SEQ ID NO: 891215 - RNA, 21 nt, Human
agcuagaaaaaugucaugucc

SEQ ID NO: 891216 - RNA, 23 nt, Human
aggcagaaguacagagauuagcc

SEQ ID NO: 891217 - RNA, 27 nt, Human
aggcagaaguacagagauuagccaaga

SEQ ID NO: 891218 - RNA, 21 nt, Human
aguaacaaaaggaaagaaaga

SEQ ID NO: 891219 - RNA, 24 nt, Human
aguacagagauuagccaagaagaa

SEQ ID NO: 891220 - RNA, 20 nt, Human
agugaaaaauuuaucacaaa

SEQ ID NO: 891221 - RNA, 24 nt, Human
aguugugaugggagaaaaggguug

SEQ ID NO: 891222 - RNA, 20 nt, Human
auaccauaaaaaaagucaaa

SEQ ID NO: 891223 - RNA, 20 nt, Human
auucuugauaagagcuagaa

SEQ ID NO: 891224 - RNA, 21 nt, Human
auuuaucacaaacuaaauaca

SEQ ID NO: 891225 - RNA, 19 nt, Human
caaggcucauccaauuucu

SEQ ID NO: 891226 - RNA, 20 nt, Human
caaggcucauccaauuucua

SEQ ID NO: 891227 - RNA, 21 nt, Human
cagaaugggagcuauguaaca

SEQ ID NO: 891228 - RNA, 20 nt, Human
cauccaaccaccucuucuaa

SEQ ID NO: 891229 - RNA, 18 nt, Human
caucuugauuuaauaaag

SEQ ID NO: 891230 - RNA, 18 nt, Human
cauugagaauuuacuaac

SEQ ID NO: 891231 - RNA, 22 nt, Human
cuagaaaaaugucaugucccag

SEQ ID NO: 891232 - RNA, 20 nt, Human
cugagaaaacacauauaugu

SEQ ID NO: 891233 - RNA, 20 nt, Human
gaacaaaugccuauacugaa

SEQ ID NO: 891234 - RNA, 22 nt, Human
gacacacucaagaacaaaugcc

SEQ ID NO: 891235 - RNA, 21 nt, Human
gcaaaaccaacagaaugggag

SEQ ID NO: 891236 - RNA, 22 nt, Human
gcuaaaacgaagaggcagccug

SEQ ID NO: 891237 - RNA, 20 nt, Human
gguaaacuucaaaggcuugc

SEQ ID NO: 891238 - RNA, 24 nt, Human
guaaaacgauaggcuuauaaaaca

SEQ ID NO: 891239 - RNA, 21 nt, Human
guaacaaucuagcgaagagaa

SEQ ID NO: 891240 - RNA, 23 nt, Human
uaaaacgaagaggcagccugagc

SEQ ID NO: 891241 - RNA, 24 nt, Human
uaaaacgauaggcuuauaaaacaa

SEQ ID NO: 891242 - RNA, 22 nt, Human
uaacaaaauauagaaaacaaga

SEQ ID NO: 891243 - RNA, 19 nt, Human
uaacaaucuagcgaagaga

SEQ ID NO: 891244 - RNA, 22 nt, Human
uaacuggcagugcuuccuauaa

SEQ ID NO: 891245 - RNA, 18 nt, Human
uaagauccacaaccuugg

SEQ ID NO: 891246 - RNA, 24 nt, Human
uacaauguauauuuuaauauggga

SEQ ID NO: 891247 - RNA, 26 nt, Human
uacaauguauauuuuaauaugggauu

SEQ ID NO: 891248 - RNA, 24 nt, Human
uaccauaugcuguaagcaaaacca

SEQ ID NO: 891249 - RNA, 21 nt, Human
uacuaacaaaauauagaaaac

SEQ ID NO: 891250 - RNA, 19 nt, Human
uaucccaggauuaugaaau

SEQ ID NO: 891251 - RNA, 21 nt, Human
ucaagagcagucuucuuguug

SEQ ID NO: 891252 - RNA, 20 nt, Human
ugauaagagcuagaaaaaug

SEQ ID NO: 891253 - RNA, 19 nt, Human
ugccugagagaauaaaaac

SEQ ID NO: 891254 - RNA, 26 nt, Human
uggaaugaaugggcugucacugaaug

SEQ ID NO: 891255 - RNA, 23 nt, Human
ugggagcuauguaacaaucuagc

SEQ ID NO: 891256 - RNA, 20 nt, Human
ugugaugggagaaaaggguu

SEQ ID NO: 891257 - RNA, 21 nt, Human
uuauagcguccagguccaaca

SEQ ID NO: 891258 - RNA, 22 nt, Human
uuggcacaguaacuagcuguau

SEQ ID NO: 891259 - RNA, 24 nt, Human
uuuauaccauaaaaaaagucaaaa

SEQ ID NO: 891260 - RNA, 22 nt, Human
uuucauugagaauuuacuaaca

SEQ ID NO: 891261 - RNA, 23 nt, Human
uuuuauaccauaaaaaaagucaa

SEQ ID NO: 891262 - RNA, 22 nt, Human
aagcagccaguaaacaagugcc

SEQ ID NO: 891263 - RNA, 18 nt, Human
aagcccagagcagggcca

SEQ ID NO: 891264 - RNA, 25 nt, Human
aagcccagagcagggccaggggugc

SEQ ID NO: 891265 - RNA, 18 nt, Human
acacucccacgguggcac

SEQ ID NO: 891266 - RNA, 25 nt, Human
acagcacagccccucgcagcacagg

SEQ ID NO: 891267 - RNA, 24 nt, Human
acccagagcagagacaagggccca

SEQ ID NO: 891268 - RNA, 18 nt, Human
acccugggcuaccugcgg

SEQ ID NO: 891269 - RNA, 19 nt, Human
acucccagccgcugcuccc

SEQ ID NO: 891270 - RNA, 19 nt, Human
agaaagcagccaguaaaca

SEQ ID NO: 891271 - RNA, 21 nt, Human
agagcagagacaagggcccac

SEQ ID NO: 891272 - RNA, 24 nt, Human
agccaguaaacaagugcugccacc

SEQ ID NO: 891273 - RNA, 21 nt, Human
agggagcuggccacgucucag

SEQ ID NO: 891274 - RNA, 21 nt, Human
agggcccacugugcgggcagc

SEQ ID NO: 891275 - RNA, 19 nt, Human
agggcccacuucgugcccc

SEQ ID NO: 891276 - RNA, 19 nt, Human
auuccaccccucugcccca

SEQ ID NO: 891277 - RNA, 24 nt, Human
cacaacacccugggcuaccugcgg

SEQ ID NO: 891278 - RNA, 21 nt, Human
cacccaggagccacacagacg

SEQ ID NO: 891279 - RNA, 23 nt, Human
cacccagggcccacuucgugccc

SEQ ID NO: 891280 - RNA, 22 nt, Human
caccccaacguauuccaccccu

SEQ ID NO: 891281 - RNA, 25 nt, Human
caccccucugccccaggcacccaag

SEQ ID NO: 891282 - RNA, 24 nt, Human
cacgguggcacggcuccacugaag

SEQ ID NO: 891283 - RNA, 23 nt, Human
cacuaagagccccccccacagcu

SEQ ID NO: 891284 - RNA, 19 nt, Human
cacugugcgggcagcaggc

SEQ ID NO: 891285 - RNA, 21 nt, Human
cagccccucgcagcacaggcc

SEQ ID NO: 891286 - RNA, 19 nt, Human
caggagggcuccgugagug

SEQ ID NO: 891287 - RNA, 21 nt, Human
caggcacccaaggggcauggg

SEQ ID NO: 891288 - RNA, 21 nt, Human
caggucaaugcacucaacacu

SEQ ID NO: 891289 - RNA, 19 nt, Human
ccacccugcccccacccug

SEQ ID NO: 891290 - RNA, 20 nt, Human
ccaguaaacaagugcugcca

SEQ ID NO: 891291 - RNA, 24 nt, Human
cccaacguauuccaccccucugcc

SEQ ID NO: 891292 - RNA, 20 nt, Human
cccacaacacccugggcuac

SEQ ID NO: 891293 - RNA, 21 nt, Human
cccacccugcccccacccugc

SEQ ID NO: 891294 - RNA, 19 nt, Human
cccacccugcccugcucac

SEQ ID NO: 891295 - RNA, 22 nt, Human
cccacccugcccugcucacucc

SEQ ID NO: 891296 - RNA, 23 nt, Human
cccacuucgugcccccacccugc

SEQ ID NO: 891297 - RNA, 20 nt, Human
cccagccgcugcuccccuuc

SEQ ID NO: 891298 - RNA, 19 nt, Human
cccaggagccacacagacg

SEQ ID NO: 891299 - RNA, 19 nt, Human
ccccacccugcccccaccc

SEQ ID NO: 891300 - RNA, 19 nt, Human
ccccaggcacccaaggggc

SEQ ID NO: 891301 - RNA, 25 nt, Human
cccccacagcuaucguggggcaccc

SEQ ID NO: 891302 - RNA, 18 nt, Human
cccccacccugcccccac

SEQ ID NO: 891303 - RNA, 25 nt, Human
ccccucugccccaggcacccaaggg

SEQ ID NO: 891304 - RNA, 20 nt, Human
ccccuggcacagcacagccc

SEQ ID NO: 891305 - RNA, 21 nt, Human
cccugcccccacccugcccug

SEQ ID NO: 891306 - RNA, 22 nt, Human
cccugcccccacccugcccugc

SEQ ID NO: 891307 - RNA, 18 nt, Human
ccucggaagggagcugug

SEQ ID NO: 891308 - RNA, 23 nt, Human
ccucugccccaggcacccaaggg

SEQ ID NO: 891309 - RNA, 22 nt, Human
ccuggcccugcagccucggaag

SEQ ID NO: 891310 - RNA, 18 nt, Human
cgugcccccacccugccc

SEQ ID NO: 891311 - RNA, 21 nt, Human
cuacgucaggacccuggacac

SEQ ID NO: 891312 - RNA, 24 nt, Human
cuccccuggcacagcacagccccc

SEQ ID NO: 891313 - RNA, 21 nt, Human
cuucgugcccccacccugccc

SEQ ID NO: 891314 - RNA, 19 nt, Human
cuugcacuaagagcccccc

SEQ ID NO: 891315 - RNA, 22 nt, Human
gagcagggccaggggugcagau

SEQ ID NO: 891316 - RNA, 25 nt, Human
gccacacagacgcccgggaccagca

SEQ ID NO: 891317 - RNA, 18 nt, Human
gccaggggugcagauggg

SEQ ID NO: 891318 - RNA, 22 nt, Human
gccccaggcacccaaggggcau

SEQ ID NO: 891319 - RNA, 21 nt, Human
gcccugcucacucccagccgc

SEQ ID NO: 891320 - RNA, 19 nt, Human
gcggcccugccaggagggc

SEQ ID NO: 891321 - RNA, 27 nt, Human
ggacacgggggugcgcccuccaacaag

SEQ ID NO: 891322 - RNA, 21 nt, Human
ggagcuggccacgucucaggg

SEQ ID NO: 891323 - RNA, 21 nt, Human
gggacaggcccagcugugagg

SEQ ID NO: 891324 - RNA, 22 nt, Human
gggaccagcacaggcuccccuc

SEQ ID NO: 891325 - RNA, 22 nt, Human
ggggugcugaggacacgggggu

SEQ ID NO: 891326 - RNA, 20 nt, Human
gggugcugaggacacggggg

SEQ ID NO: 891327 - RNA, 24 nt, Human
ggguggcugccucgccugacccag

SEQ ID NO: 891328 - RNA, 23 nt, Human
guaaacaagugcugccacccaca

SEQ ID NO: 891329 - RNA, 23 nt, Human
gucaggacccuggacacucccac

SEQ ID NO: 891330 - RNA, 18 nt, Human
ucacccagggcccacuuc

SEQ ID NO: 891331 - RNA, 25 nt, Human
ucacccagggcccacuucgugcccc

SEQ ID NO: 891332 - RNA, 19 nt, Human
uccacaggaucuugcacua

SEQ ID NO: 891333 - RNA, 21 nt, Human
uccaccccucugccccaggca

SEQ ID NO: 891334 - RNA, 23 nt, Human
ucccacgguggcacggcuccacu

SEQ ID NO: 891335 - RNA, 18 nt, Human
ucccagccgcugcucccc

SEQ ID NO: 891336 - RNA, 20 nt, Human
uccucugggcuucccgggug

SEQ ID NO: 891337 - RNA, 28 nt, Human
ucgccugacccagagcagagacaagggc

SEQ ID NO: 891338 - RNA, 19 nt, Human
ugacccagagcagagacaa

SEQ ID NO: 891339 - RNA, 19 nt, Human
ugaccucccagagggacac

SEQ ID NO: 891340 - RNA, 18 nt, Human
ugaggccgcaguugaccu

SEQ ID NO: 891341 - RNA, 22 nt, Human
ugagugcacacucuccucuggg

SEQ ID NO: 891342 - RNA, 23 nt, Human
ugcacuaagagccccccccacag

SEQ ID NO: 891343 - RNA, 21 nt, Human
ugcccccacccugcccugcuc

SEQ ID NO: 891344 - RNA, 23 nt, Human
ugcccccacccugcccugcucac

SEQ ID NO: 891345 - RNA, 20 nt, Human
ugccucgccugacccagagc

SEQ ID NO: 891346 - RNA, 24 nt, Human
uggcacggcuccacugaagcccag

SEQ ID NO: 891347 - RNA, 22 nt, Human
ugugggggucacccagggccca

SEQ ID NO: 891348 - RNA, 23 nt, Human
uucuaauccacaggaucuugcac

SEQ ID NO: 891349 - RNA, 21 nt, Human
uugcacuaagagcccccccca

SEQ ID NO: 891350 - RNA, 23 nt, Human
uugcacuaagagccccccccaca

SEQ ID NO: 891351 - RNA, 23 nt, Human
uuucgagccagaaagcagccagu

SEQ ID NO: 891352 - RNA, 23 nt, Human
uuuuuuuuuuuuuuuuucacaag

SEQ ID NO: 891353 - RNA, 19 nt, Human
aaccaauggcagaagccau

SEQ ID NO: 891354 - RNA, 21 nt, Human
aagaagaaacaagggccgcug

SEQ ID NO: 891355 - RNA, 29 nt, Human
aagaaggaaaugaggucagaagggacccc

SEQ ID NO: 891356 - RNA, 19 nt, Human
aagcaagaagagugaguac

SEQ ID NO: 891357 - RNA, 20 nt, Human
aaucggauugcuuguuucug

SEQ ID NO: 891358 - RNA, 18 nt, Human
acaacacaugcaacacgg

SEQ ID NO: 891359 - RNA, 24 nt, Human
acaauaacugccuguaagcaugcc

SEQ ID NO: 891360 - RNA, 21 nt, Human
acacccggcgccaagggggcg

SEQ ID NO: 891361 - RNA, 19 nt, Human
acaggaaguuugaaucuau

SEQ ID NO: 891362 - RNA, 20 nt, Human
accaauugacuaaguugucc

SEQ ID NO: 891363 - RNA, 23 nt, Human
acgucacuaaugaagggaccagu

SEQ ID NO: 891364 - RNA, 19 nt, Human
agaaggaaaugaggucaga

SEQ ID NO: 891365 - RNA, 21 nt, Human
agcucuuuccucccacagucc

SEQ ID NO: 891366 - RNA, 19 nt, Human
agcugaacaccugacgcug

SEQ ID NO: 891367 - RNA, 18 nt, Human
agggaccaguggucccgg

SEQ ID NO: 891368 - RNA, 23 nt, Human
aguccaggcucaacaccucuucc

SEQ ID NO: 891369 - RNA, 22 nt, Human
caagaaggaaaugaggucagaa

SEQ ID NO: 891370 - RNA, 22 nt, Human
cacagaaaauuguaacaacaca

SEQ ID NO: 891371 - RNA, 24 nt, Human
cacuaaugaagggaccaguggucc

SEQ ID NO: 891372 - RNA, 18 nt, Human
cagaagccaugcguggaa

SEQ ID NO: 891373 - RNA, 18 nt, Human
cagcgagugacggcggcg

SEQ ID NO: 891374 - RNA, 28 nt, Human
cagcucuuuccucccacaguccaggcuc

SEQ ID NO: 891375 - RNA, 21 nt, Human
caggacacccggcgccaaggg

SEQ ID NO: 891376 - RNA, 18 nt, Human
caugcguggaagcagaau

SEQ ID NO: 891377 - RNA, 22 nt, Human
ccaagggggcgcggccuggagc

SEQ ID NO: 891378 - RNA, 22 nt, Human
ccaauagggccugggcccgcca

SEQ ID NO: 891379 - RNA, 18 nt, Human
ccagaaagcuaacaccua

SEQ ID NO: 891380 - RNA, 18 nt, Human
ccaggcucaacaccucuc

SEQ ID NO: 891381 - RNA, 19 nt, Human
cccacaguccaggcucaac

SEQ ID NO: 891382 - RNA, 20 nt, Human
cccacaguccaggcucaaca

SEQ ID NO: 891383 - RNA, 18 nt, Human
cccccgggucgcgaaccc

SEQ ID NO: 891384 - RNA, 19 nt, Human
ccggcgccaagggggcgcg

SEQ ID NO: 891385 - RNA, 18 nt, Human
ccugcagcucccguuccu

SEQ ID NO: 891386 - RNA, 19 nt, Human
ccugcagcucccguuccuc

SEQ ID NO: 891387 - RNA, 22 nt, Human
ccugggcccgccaccccccggg

SEQ ID NO: 891388 - RNA, 18 nt, Human
cgccaagggggcgcggcc

SEQ ID NO: 891389 - RNA, 23 nt, Human
cgcugcgcaagcagcggcaggac

SEQ ID NO: 891390 - RNA, 21 nt, Human
cucccguuccuccggcuccca

SEQ ID NO: 891391 - RNA, 21 nt, Human
cugaacaccugacgcugcgcc

SEQ ID NO: 891392 - RNA, 18 nt, Human
gaacucucuaaacugaug

SEQ ID NO: 891393 - RNA, 23 nt, Human
gcaagaagagugaguacugaagg

SEQ ID NO: 891394 - RNA, 23 nt, Human
gccaccccccgggucgcgaaccc

SEQ ID NO: 891395 - RNA, 20 nt, Human
gccaugcguggaagcagaau

SEQ ID NO: 891396 - RNA, 24 nt, Human
gccuaagcaagaagagugaguacc

SEQ ID NO: 891397 - RNA, 21 nt, Human
gcgcggccuggagcgccgggg

SEQ ID NO: 891398 - RNA, 18 nt, Human
gcggcgcaaacgcgcccg

SEQ ID NO: 891399 - RNA, 18 nt, Human
ggcaaacuuuucacuucu

SEQ ID NO: 891400 - RNA, 18 nt, Human
ggcccugcuucaagcuga

SEQ ID NO: 891401 - RNA, 23 nt, Human
ggcuuucaacacacagagagccu

SEQ ID NO: 891402 - RNA, 21 nt, Human
gggccgcugcgcaagcagcgg

SEQ ID NO: 891403 - RNA, 23 nt, Human
gggcgcggccuggagcgccgggg

SEQ ID NO: 891404 - RNA, 21 nt, Human
ggggcacgaggcccugcuuca

SEQ ID NO: 891405 - RNA, 21 nt, Human
gucacuaaugaagggaccagu

SEQ ID NO: 891406 - RNA, 22 nt, Human
uaacaacacaugcaacacggga

SEQ ID NO: 891407 - RNA, 24 nt, Human
uaagaagaaacaagggccgcugcg

SEQ ID NO: 891408 - RNA, 21 nt, Human
ucaacaccucuuccuauucca

SEQ ID NO: 891409 - RNA, 19 nt, Human
uccucccacaguccaggcu

SEQ ID NO: 891410 - RNA, 19 nt, Human
ucgggguccggcucccggc

SEQ ID NO: 891411 - RNA, 22 nt, Human
ugagggcccggggagaagccgg

SEQ ID NO: 891412 - RNA, 22 nt, Human
ugcaacacgggauggcuuucaa

SEQ ID NO: 891413 - RNA, 18 nt, Human
ugucguuucagggugcug

SEQ ID NO: 891414 - RNA, 22 nt, Human
uguuaguguucacugaucaaga

SEQ ID NO: 891415 - RNA, 24 nt, Human
uguucacugaucaagaaggaaaug

SEQ ID NO: 891416 - RNA, 23 nt, Human
uuucacuucuucucaaacauaaa

SEQ ID NO: 891417 - RNA, 24 nt, Human
uuuuuuuuuuuuuuugcuacauuu

SEQ ID NO: 891418 - RNA, 19 nt, Human
uuuuuuuuuuuuuuuugcu

SEQ ID NO: 891419 - RNA, 20 nt, Human
uuuuuuuuuuuuuuuugcua

SEQ ID NO: 891420 - RNA, 18 nt, Human
uuuuuuuuuuuuuuuuug

SEQ ID NO: 891421 - RNA, 20 nt, Human
uuuuuuuuuuuuuuuuugcu

SEQ ID NO: 891422 - RNA, 19 nt, Human
aagccucugggcagcuccu

SEQ ID NO: 891423 - RNA, 23 nt, Human
agacucucggucacuggccguuc

SEQ ID NO: 891424 - RNA, 22 nt, Human
agccucugacuugcugcaguuu

SEQ ID NO: 891425 - RNA, 22 nt, Human
aggacagucagagaagccaagu

SEQ ID NO: 891426 - RNA, 18 nt, Human
caggaccacaagccucug

SEQ ID NO: 891427 - RNA, 20 nt, Human
caguaccuccucucccuggu

SEQ ID NO: 891428 - RNA, 20 nt, Human
caguuuugauugcucuccca

SEQ ID NO: 891429 - RNA, 20 nt, Human
ccagccgaaagacacgccca

SEQ ID NO: 891430 - RNA, 20 nt, Human
ccgaaagacacgcccacuug

SEQ ID NO: 891431 - RNA, 18 nt, Human
cggucacuggccguuccu

SEQ ID NO: 891432 - RNA, 20 nt, Human
cucccuuuuccccagccgaa

SEQ ID NO: 891433 - RNA, 21 nt, Human
cuccucccuuuuccccagccg

SEQ ID NO: 891434 - RNA, 21 nt, Human
cucucggucacuggccguucc

SEQ ID NO: 891435 - RNA, 21 nt, Human
cucucuggccggagccucuga

SEQ ID NO: 891436 - RNA, 22 nt, Human
cucucuggccggagccucugac

SEQ ID NO: 891437 - RNA, 18 nt, Human
cugcucucuggccggagc

SEQ ID NO: 891438 - RNA, 20 nt, Human
cugggcagcuccugcucucu

SEQ ID NO: 891439 - RNA, 18 nt, Human
gaguuccguaugcuccuc

SEQ ID NO: 891440 - RNA, 23 nt, Human
gauuccaccgggucugguuucuc

SEQ ID NO: 891441 - RNA, 24 nt, Human
ggagccucugacuugcugcaguuu

SEQ ID NO: 891442 - RNA, 20 nt, Human
gggaggagugauguugccca

SEQ ID NO: 891443 - RNA, 21 nt, Human
guuaccucuuagagauuccac

SEQ ID NO: 891444 - RNA, 18 nt, Human
uaacuccucccuuuuccc

SEQ ID NO: 891445 - RNA, 20 nt, Human
uagaagagacgcuuucagcg

SEQ ID NO: 891446 - RNA, 19 nt, Human
uagcuccccggagaggagc

SEQ ID NO: 891447 - RNA, 19 nt, Human
ucccugaccauccagaugg

SEQ ID NO: 891448 - RNA, 20 nt, Human
ucuccgcugcagccaguuua

SEQ ID NO: 891449 - RNA, 22 nt, Human
uuagagauuccaccgggucugg

SEQ ID NO: 891450 - RNA, 26 nt, Human
uuagcuccccggagaggagcuuucag

SEQ ID NO: 891451 - RNA, 20 nt, Human
acugcagaaacuaguaaaca

SEQ ID NO: 891452 - RNA, 18 nt, Human
agaaacuaguaaacaccu

SEQ ID NO: 891453 - RNA, 20 nt, Human
caauaguugaaacacacugc

SEQ ID NO: 891454 - RNA, 20 nt, Human
caggggaggugaaugaccac

SEQ ID NO: 891455 - RNA, 20 nt, Human
cuccuggagucucuagaucu

SEQ ID NO: 891456 - RNA, 22 nt, Human
cucuagaucuguguauaucugc

SEQ ID NO: 891457 - RNA, 24 nt, Human
gccaauuacucagcccacaagcau

SEQ ID NO: 891458 - RNA, 19 nt, Human
guauaucugcacuaucuca

SEQ ID NO: 891459 - RNA, 24 nt, Human
uaguaaacaccuuagauagaguug

SEQ ID NO: 891460 - RNA, 19 nt, Human
ucaguuuucauuuuggguc

SEQ ID NO: 891461 - RNA, 23 nt, Human
ugugccaauuacucagcccacaa

SEQ ID NO: 891462 - RNA, 20 nt, Human
uguuuauuuucauuuuccuc

SEQ ID NO: 891463 - RNA, 18 nt, Human
uuaaauuaccuuagguuu

SEQ ID NO: 891464 - RNA, 20 nt, Human
aaggaacaagugcuuuugag

SEQ ID NO: 891465 - RNA, 23 nt, Human
aaugcccacuucgcgcgggcagc

SEQ ID NO: 891466 - RNA, 21 nt, Human
acccaagacggugggcggcuc

SEQ ID NO: 891467 - RNA, 21 nt, Human
agaaaagaagagagaaugggg

SEQ ID NO: 891468 - RNA, 22 nt, Human
agaaaagaagagagaauggggg

SEQ ID NO: 891469 - RNA, 18 nt, Human
agagagaaugggguccga

SEQ ID NO: 891470 - RNA, 21 nt, Human
agagagcgaugagcagcgagg

SEQ ID NO: 891471 - RNA, 18 nt, Human
agcacccacagcccagcg

SEQ ID NO: 891472 - RNA, 19 nt, Human
agcagaaggaacaagugcu

SEQ ID NO: 891473 - RNA, 19 nt, Human
cagcgagggccguggggag

SEQ ID NO: 891474 - RNA, 23 nt, Human
ccaaaggagaaaagaagagagaa

SEQ ID NO: 891475 - RNA, 23 nt, Human
ccccgccugggaguugccccagc

SEQ ID NO: 891476 - RNA, 22 nt, Human
ccgccugggaguugccccagcc

SEQ ID NO: 891477 - RNA, 20 nt, Human
cgacccaagacggugggcgg

SEQ ID NO: 891478 - RNA, 23 nt, Human
cgcaaaagaauagagagcgauga

SEQ ID NO: 891479 - RNA, 21 nt, Human
cuacggcucccggcucccucc

SEQ ID NO: 891480 - RNA, 20 nt, Human
cucccucucccuuacccuua

SEQ ID NO: 891481 - RNA, 20 nt, Human
cugcaggcgcccccgccugg

SEQ ID NO: 891482 - RNA, 19 nt, Human
gaacccagccuaccgcccc

SEQ ID NO: 891483 - RNA, 19 nt, Human
gaagcagaaggaacaagug

SEQ ID NO: 891484 - RNA, 18 nt, Human
gaggguagggcgacccaa

SEQ ID NO: 891485 - RNA, 21 nt, Human
gauuauggggugguggcagag

SEQ ID NO: 891486 - RNA, 18 nt, Human
gcagaaggaacaagugcu

SEQ ID NO: 891487 - RNA, 18 nt, Human
gcagagaggaggccuaaa

SEQ ID NO: 891488 - RNA, 18 nt, Human
gcagcagcaaggguugcg

SEQ ID NO: 891489 - RNA, 21 nt, Human
gcgcgggcagcagcaaggguu

SEQ ID NO: 891490 - RNA, 27 nt, Human
gcgcgggcagcagcaaggguugcgugc

SEQ ID NO: 891491 - RNA, 23 nt, Human
gcuuuugagggccgccgccgucg

SEQ ID NO: 891492 - RNA, 20 nt, Human
ggagaagcagaaggaacaag

SEQ ID NO: 891493 - RNA, 19 nt, Human
gugguggcagagaggaggc

SEQ ID NO: 891494 - RNA, 19 nt, Human
guucagcugagcugcaggc

SEQ ID NO: 891495 - RNA, 19 nt, Human
ucccggcucccucccucuc

SEQ ID NO: 891496 - RNA, 22 nt, Human
ucuacggcucccggcucccucc

SEQ ID NO: 891497 - RNA, 21 nt, Human
ucucccuuacccuuagcaccc

SEQ ID NO: 891498 - RNA, 21 nt, Human
uggcgcggcucggagggccgg

SEQ ID NO: 891499 - RNA, 18 nt, Human
uucagcugagcugcaggc

SEQ ID NO: 891500 - RNA, 18 nt, Human
aaaaaagagaagaagaaa

SEQ ID NO: 891501 - RNA, 23 nt, Human
aaaaaagagaagaagaaaaguga

SEQ ID NO: 891502 - RNA, 24 nt, Human
aaaaauuaauagaauaaaagauaa

SEQ ID NO: 891503 - RNA, 21 nt, Human
acagaaaagauggauguagua

SEQ ID NO: 891504 - RNA, 24 nt, Human
agaggggaggggagcuaguaguca

SEQ ID NO: 891505 - RNA, 24 nt, Human
cagcaaaucuacccuucacaguuc

SEQ ID NO: 891506 - RNA, 21 nt, Human
cuaaaaaagagaagaagaaaa

SEQ ID NO: 891507 - RNA, 19 nt, Human
cuacccuucacaguuccug

SEQ ID NO: 891508 - RNA, 24 nt, Human
cuuugaagacuguuaugaaaagga

SEQ ID NO: 891509 - RNA, 18 nt, Human
ggagaggggaggggagcu

SEQ ID NO: 891510 - RNA, 20 nt, Human
ggagaggggaggggagcuag

SEQ ID NO: 891511 - RNA, 18 nt, Human
gggagaggggaggggagc

SEQ ID NO: 891512 - RNA, 18 nt, Human
ggggaggggagcuaguag

SEQ ID NO: 891513 - RNA, 19 nt, Human
uaaaaaagagaagaagaaa

SEQ ID NO: 891514 - RNA, 22 nt, Human
uaagaagucagcauaguggcac

SEQ ID NO: 891515 - RNA, 20 nt, Human
uaauaggcgauaaaucugau

SEQ ID NO: 891516 - RNA, 23 nt, Human
uagaauaaaagauaaaaagagug

SEQ ID NO: 891517 - RNA, 23 nt, Human
uaugaaaaggaauaagaagucag

SEQ ID NO: 891518 - RNA, 30 nt, Human
ucagcauaguggcacuccugguuuccuuuu

SEQ ID NO: 891519 - RNA, 18 nt, Human
ucagcuaaaaaagagaag

SEQ ID NO: 891520 - RNA, 23 nt, Human
ucagcuaaaaaagagaagaagaa

SEQ ID NO: 891521 - RNA, 21 nt, Human
uccagggagaggggaggggag

SEQ ID NO: 891522 - RNA, 18 nt, Human
ucuaugggaaauacaguc

SEQ ID NO: 891523 - RNA, 20 nt, Human
ugauuuuaaggaaaaaaaaa

SEQ ID NO: 891524 - RNA, 23 nt, Human
uggaaaagaaguaggcauucuuu

SEQ ID NO: 891525 - RNA, 22 nt, Human
uggagugaaagagaaaguucca

SEQ ID NO: 891526 - RNA, 21 nt, Human
uuaauagaauaaaagauaaaa

SEQ ID NO: 891527 - RNA, 19 nt, Human
uuggccccgccacagaaaa

SEQ ID NO: 891528 - RNA, 18 nt, Human
aaaaaggauucuccuggg

SEQ ID NO: 891529 - RNA, 18 nt, Human
aaacacaccucccaacca

SEQ ID NO: 891530 - RNA, 22 nt, Human
aaacacaccucccaaccaaacc

SEQ ID NO: 891531 - RNA, 19 nt, Human
aaacagagacauugggucu

SEQ ID NO: 891532 - RNA, 21 nt, Human
aaagggcaggggaggaaugag

SEQ ID NO: 891533 - RNA, 18 nt, Human
aagaaaacagagacauug

SEQ ID NO: 891534 - RNA, 21 nt, Human
aaggagccaagcccagcucag

SEQ ID NO: 891535 - RNA, 27 nt, Human
aaggagccaagcccagcucagcaacug

SEQ ID NO: 891536 - RNA, 21 nt, Human
acaaagcgaaauuaagacaau

SEQ ID NO: 891537 - RNA, 22 nt, Human
acagugugguggaacgcucggg

SEQ ID NO: 891538 - RNA, 20 nt, Human
accaugucaaacaagagccu

SEQ ID NO: 891539 - RNA, 23 nt, Human
acccuccugaaacugaccucagc

SEQ ID NO: 891540 - RNA, 20 nt, Human
accgggcaaggggccaggcu

SEQ ID NO: 891541 - RNA, 23 nt, Human
accucagcugcagaaacagcuaa

SEQ ID NO: 891542 - RNA, 20 nt, Human
accucaggguccccugauau

SEQ ID NO: 891543 - RNA, 26 nt, Human
accugcucagucuuggggcaaguccc

SEQ ID NO: 891544 - RNA, 20 nt, Human
agaagugagcacagugcccc

SEQ ID NO: 891545 - RNA, 21 nt, Human
agaagugagcacagugccccc

SEQ ID NO: 891546 - RNA, 19 nt, Human
agaauccacuuauucuuuc

SEQ ID NO: 891547 - RNA, 18 nt, Human
agagaaaagggcagggga

SEQ ID NO: 891548 - RNA, 21 nt, Human
aggaggcaugaaguccaaacc

SEQ ID NO: 891549 - RNA, 20 nt, Human
aggcagaggggcugggggcc

SEQ ID NO: 891550 - RNA, 18 nt, Human
aggcaugaaguccaaacc

SEQ ID NO: 891551 - RNA, 27 nt, Human
aggccaagggcggacagugugguggaa

SEQ ID NO: 891552 - RNA, 25 nt, Human
aggccgaggcagaggggcugggggc

SEQ ID NO: 891553 - RNA, 18 nt, Human
aggggcugggggccaggg

SEQ ID NO: 891554 - RNA, 19 nt, Human
agguggggaggaugaaggc

SEQ ID NO: 891555 - RNA, 21 nt, Human
aggugguuugaauauuacagg

SEQ ID NO: 891556 - RNA, 22 nt, Human
aucacaacacugaguacggugc

SEQ ID NO: 891557 - RNA, 25 nt, Human
aucagcuucacccuccugaaacuga

SEQ ID NO: 891558 - RNA, 25 nt, Human
augagaagucccguaaccaacagaa

SEQ ID NO: 891559 - RNA, 19 nt, Human
augaggagcaagagguaaa

SEQ ID NO: 891560 - RNA, 26 nt, Human
caaacacaccagcaaagcuggagacc

SEQ ID NO: 891561 - RNA, 24 nt, Human
caaaccagagagcagcaaggaggc

SEQ ID NO: 891562 - RNA, 21 nt, Human
caagagguaaacacaccuccc

SEQ ID NO: 891563 - RNA, 18 nt, Human
cacacaccaugucaaaca

SEQ ID NO: 891564 - RNA, 21 nt, Human
cacacaccaugucaaacaaga

SEQ ID NO: 891565 - RNA, 19 nt, Human
cacagcuuggcagaccccc

SEQ ID NO: 891566 - RNA, 18 nt, Human
caccaugucaaacaagag

SEQ ID NO: 891567 - RNA, 18 nt, Human
caccugauuuucuucugc

SEQ ID NO: 891568 - RNA, 18 nt, Human
caccuucucccugccaaa

SEQ ID NO: 891569 - RNA, 18 nt, Human
cagaggaggcucuguucc

SEQ ID NO: 891570 - RNA, 24 nt, Human
cagcaacugacaaggccgaggcag

SEQ ID NO: 891571 - RNA, 19 nt, Human
cagccuuuuucuucucucc

SEQ ID NO: 891572 - RNA, 18 nt, Human
cagcuucacccuccugaa

SEQ ID NO: 891573 - RNA, 22 nt, Human
caggggaggaaugaggagcaag

SEQ ID NO: 891574 - RNA, 18 nt, Human
cagugcccccaagaccag

SEQ ID NO: 891575 - RNA, 20 nt, Human
caucacaggguuccaucucc

SEQ ID NO: 891576 - RNA, 18 nt, Human
cauugggucuggagggga

SEQ ID NO: 891577 - RNA, 18 nt, Human
ccaaaccagagagcagca

SEQ ID NO: 891578 - RNA, 21 nt, Human
ccaaccaaaccagagagcagc

SEQ ID NO: 891579 - RNA, 28 nt, Human
ccaaccaaaccagagagcagcaaggagg

SEQ ID NO: 891580 - RNA, 21 nt, Human
ccacacaccaugucaaacaag

SEQ ID NO: 891581 - RNA, 24 nt, Human
ccauccacacaccaugucaaacaa

SEQ ID NO: 891582 - RNA, 26 nt, Human
ccauccacacaccaugucaaacaaga

SEQ ID NO: 891583 - RNA, 24 nt, Human
cccaagaccagacaccugauuuuc

SEQ ID NO: 891584 - RNA, 24 nt, Human
cccccaagaccagacaccugauuu

SEQ ID NO: 891585 - RNA, 19 nt, Human
cccccucuccuucucuguc

SEQ ID NO: 891586 - RNA, 18 nt, Human
ccccucuccuucucuguc

SEQ ID NO: 891587 - RNA, 21 nt, Human
cccuggucuggcccaggcccc

SEQ ID NO: 891588 - RNA, 21 nt, Human
ccuacagaauuggcugagaag

SEQ ID NO: 891589 - RNA, 18 nt, Human
ccucauucagccucuucc

SEQ ID NO: 891590 - RNA, 20 nt, Human
ccuccagcugagcucagcca

SEQ ID NO: 891591 - RNA, 22 nt, Human
ccucccaaccaaaccagagagc

SEQ ID NO: 891592 - RNA, 24 nt, Human
ccuccugaaacugaccucagcugc

SEQ ID NO: 891593 - RNA, 25 nt, Human
ccucgagccgcuuuaacugggccuc

SEQ ID NO: 891594 - RNA, 20 nt, Human
ccuuaugccccaaacacaca

SEQ ID NO: 891595 - RNA, 21 nt, Human
cgagaccgggcaaggggccag

SEQ ID NO: 891596 - RNA, 24 nt, Human
cucaagaucucccccucuccuucu

SEQ ID NO: 891597 - RNA, 23 nt, Human
cucccccucuccuucucugucuc

SEQ ID NO: 891598 - RNA, 22 nt, Human
cuccccuccucccacuugcaaa

SEQ ID NO: 891599 - RNA, 22 nt, Human
cucucccacacugguggcaccc

SEQ ID NO: 891600 - RNA, 24 nt, Human
cugaaacugaccucagcugcagaa

SEQ ID NO: 891601 - RNA, 19 nt, Human
cugugcccauggcagcuga

SEQ ID NO: 891602 - RNA, 18 nt, Human
cuucugcuggagguacac

SEQ ID NO: 891603 - RNA, 25 nt, Human
cuucugcuggagguacacagucacu

SEQ ID NO: 891604 - RNA, 22 nt, Human
cuucugguccugccggaacacu

SEQ ID NO: 891605 - RNA, 18 nt, Human
cuugcagggggggagcug

SEQ ID NO: 891606 - RNA, 18 nt, Human
cuuuaacugggccuccug

SEQ ID NO: 891607 - RNA, 22 nt, Human
cuuuuccagggacucuuuuuca

SEQ ID NO: 891608 - RNA, 26 nt, Human
gaaguccuuucuaucagugcccacuc

SEQ ID NO: 891609 - RNA, 21 nt, Human
gagagcagcaaggaggccugc

SEQ ID NO: 891610 - RNA, 19 nt, Human
gagcccuggucuggcccag

SEQ ID NO: 891611 - RNA, 19 nt, Human
gaggaaugaggagcaagag

SEQ ID NO: 891612 - RNA, 20 nt, Human
gaggcagaggggcugggggc

SEQ ID NO: 891613 - RNA, 20 nt, Human
gagguaaacacaccucccaa

SEQ ID NO: 891614 - RNA, 23 nt, Human
gagguaaacacaccucccaacca

SEQ ID NO: 891615 - RNA, 22 nt, Human
gcacaaagcgaaauuaagacaa

SEQ ID NO: 891616 - RNA, 19 nt, Human
gcaccuucucccugccaaa

SEQ ID NO: 891617 - RNA, 20 nt, Human
gcagugguuuugucuccccu

SEQ ID NO: 891618 - RNA, 22 nt, Human
gcccacuccuguuccucaaacg

SEQ ID NO: 891619 - RNA, 19 nt, Human
gcccucuaucuacauccug

SEQ ID NO: 891620 - RNA, 19 nt, Human
gcccugcucccugcucccc

SEQ ID NO: 891621 - RNA, 20 nt, Human
ggaaaagaaaacagagacau

SEQ ID NO: 891622 - RNA, 23 nt, Human
ggcacccggggcugaaggggggu

SEQ ID NO: 891623 - RNA, 20 nt, Human
ggcagcaccuucggucugag

SEQ ID NO: 891624 - RNA, 18 nt, Human
ggcccugcucccugcucc

SEQ ID NO: 891625 - RNA, 19 nt, Human
ggcccuggccacguggaca

SEQ ID NO: 891626 - RNA, 18 nt, Human
ggccgaggcagaggggcu

SEQ ID NO: 891627 - RNA, 21 nt, Human
ggcuugcagggggggagcugg

SEQ ID NO: 891628 - RNA, 18 nt, Human
gggcaaguccccauccac

SEQ ID NO: 891629 - RNA, 18 nt, Human
gggcaggggaggaaugag

SEQ ID NO: 891630 - RNA, 19 nt, Human
gggcugggggccaggggag

SEQ ID NO: 891631 - RNA, 24 nt, Human
uaccuuugguuucaaaaaugcauu

SEQ ID NO: 891632 - RNA, 24 nt, Human
uauacaccccaaugaaagggcaga

SEQ ID NO: 891633 - RNA, 27 nt, Human
uaucagugcccacuccuguuccucaaa

SEQ ID NO: 891634 - RNA, 25 nt, Human
ucaaaaggaaaagaaaacagagaca

SEQ ID NO: 891635 - RNA, 21 nt, Human
ucagcaacugacaaggccgag

SEQ ID NO: 891636 - RNA, 21 nt, Human
ucauugggagggggcuugugg

SEQ ID NO: 891637 - RNA, 19 nt, Human
uccccagcacucggggucu

SEQ ID NO: 891638 - RNA, 20 nt, Human
uccuggacagcacucagcuu

SEQ ID NO: 891639 - RNA, 20 nt, Human
ucgugguaggucugcagugg

SEQ ID NO: 891640 - RNA, 21 nt, Human
ucuccuggagauagacguugc

SEQ ID NO: 891641 - RNA, 22 nt, Human
ucugccucauucagccucuucc

SEQ ID NO: 891642 - RNA, 21 nt, Human
ucuuucuuuuccagggacucu

SEQ ID NO: 891643 - RNA, 24 nt, Human
ugaaggggggucauugggaggggg

SEQ ID NO: 891644 - RNA, 18 nt, Human
ugagaacugcaggucugc

SEQ ID NO: 891645 - RNA, 19 nt, Human
ugagaacugcaggucugcg

SEQ ID NO: 891646 - RNA, 21 nt, Human
ugagaagaugauaucugcuag

SEQ ID NO: 891647 - RNA, 24 nt, Human
ugagaagaugauaucugcuagaga

SEQ ID NO: 891648 - RNA, 23 nt, Human
ugagcacagugcccccaagacca

SEQ ID NO: 891649 - RNA, 19 nt, Human
ugaggcuagguaccuuugg

SEQ ID NO: 891650 - RNA, 19 nt, Human
ugauauguauacaccccaa

SEQ ID NO: 891651 - RNA, 24 nt, Human
ugcaaaaaggauucuccuggggga

SEQ ID NO: 891652 - RNA, 25 nt, Human
ugcggagggaagguaaacuccagga

SEQ ID NO: 891653 - RNA, 23 nt, Human
uggcagccggagaggcucaaauc

SEQ ID NO: 891654 - RNA, 25 nt, Human
uggcccaggcccccuggcuggcagc

SEQ ID NO: 891655 - RNA, 19 nt, Human
uggcugcgagaccgggcaa

SEQ ID NO: 891656 - RNA, 18 nt, Human
uggcugugccuggguggg

SEQ ID NO: 891657 - RNA, 21 nt, Human
uggcuucgugguaggucugca

SEQ ID NO: 891658 - RNA, 19 nt, Human
uggcuugguggcuacuggu

SEQ ID NO: 891659 - RNA, 18 nt, Human
ugggaacuccagggacag

SEQ ID NO: 891660 - RNA, 20 nt, Human
ugggagggggcuugugggug

SEQ ID NO: 891661 - RNA, 18 nt, Human
uggggaggaugaaggcag

SEQ ID NO: 891662 - RNA, 23 nt, Human
ugggggccaggggaggcauaugg

SEQ ID NO: 891663 - RNA, 18 nt, Human
ugguauggauucaauccu

SEQ ID NO: 891664 - RNA, 24 nt, Human
ugguggaacgcucgggguggcugc

SEQ ID NO: 891665 - RNA, 23 nt, Human
uuagacucaagaucucccccucu

SEQ ID NO: 891666 - RNA, 22 nt, Human
uuccuggggaucagcuucaccc

SEQ ID NO: 891667 - RNA, 21 nt, Human
uugcuggaggcuucaaggcuu

SEQ ID NO: 891668 - RNA, 25 nt, Human
aaaaaaaaaaaaaagaacagaaaag

SEQ ID NO: 891669 - RNA, 24 nt, Human
aaaaaagauuccuucacuuuggcc

SEQ ID NO: 891670 - RNA, 24 nt, Human
aaaaagaauuaucuuaguucugga

SEQ ID NO: 891671 - RNA, 26 nt, Human
aaaaagaggugaaaaguaagggaccc

SEQ ID NO: 891672 - RNA, 24 nt, Human
aaacaaaaagaaggaaaaaucugg

SEQ ID NO: 891673 - RNA, 22 nt, Human
aaacacacauuagauauaaacc

SEQ ID NO: 891674 - RNA, 22 nt, Human
aaacagauauuguaacagaaau

SEQ ID NO: 891675 - RNA, 23 nt, Human
aaacagguaaaaagcaaaccuca

SEQ ID NO: 891676 - RNA, 23 nt, Human
aaacaugagaaaaaagagaaaaa

SEQ ID NO: 891677 - RNA, 19 nt, Human
aaaccauccaaaacuugaa

SEQ ID NO: 891678 - RNA, 20 nt, Human
aaacccauuucuuaauuagg

SEQ ID NO: 891679 - RNA, 20 nt, Human
aaaccccacccccccucacc

SEQ ID NO: 891680 - RNA, 22 nt, Human
aaaccccaucucuacuaaaaaa

SEQ ID NO: 891681 - RNA, 22 nt, Human
aaacgagaacacuuaaauguaa

SEQ ID NO: 891682 - RNA, 22 nt, Human
aaacggacaaggauaccaaaac

SEQ ID NO: 891683 - RNA, 23 nt, Human
aaagaaacaauucuagcaaugua

SEQ ID NO: 891684 - RNA, 19 nt, Human
aaagaaagggguggaggug

SEQ ID NO: 891685 - RNA, 19 nt, Human
aaagagaaaaagcaaaaga

SEQ ID NO: 891686 - RNA, 20 nt, Human
aaagagaaaaagcaaaagag

SEQ ID NO: 891687 - RNA, 23 nt, Human
aaagagauaagcuccaagcauua

SEQ ID NO: 891688 - RNA, 20 nt, Human
aaagagcccauucaaagaac

SEQ ID NO: 891689 - RNA, 23 nt, Human
aaagcagcccuaucccaaaggua

SEQ ID NO: 891690 - RNA, 21 nt, Human
aaagggagggaggaaggaaag

SEQ ID NO: 891691 - RNA, 24 nt, Human
aaauacucaauaaagacauaacaa

SEQ ID NO: 891692 - RNA, 18 nt, Human
aaauagauucucagucau

SEQ ID NO: 891693 - RNA, 19 nt, Human
aaauagugaaaaaugaaau

SEQ ID NO: 891694 - RNA, 19 nt, Human
aacaaaccccacccccccu

SEQ ID NO: 891695 - RNA, 20 nt, Human
aacaaaccccacccccccuc

SEQ ID NO: 891696 - RNA, 20 nt, Human
aacaguuuuucuuuuuucug

SEQ ID NO: 891697 - RNA, 19 nt, Human
aacauggcaaaaccccauc

SEQ ID NO: 891698 - RNA, 21 nt, Human
aacauggcaaaaccccaucuc

SEQ ID NO: 891699 - RNA, 21 nt, Human
aacauggcaaaaccccaucuc

SEQ ID NO: 891700 - RNA, 22 nt, Human
aacauuaucucaacacauagaa

SEQ ID NO: 891701 - RNA, 23 nt, Human
aaccaacaccacaauuccgcaca

SEQ ID NO: 891702 - RNA, 21 nt, Human
aaccacuugagaacagguuaa

SEQ ID NO: 891703 - RNA, 21 nt, Human
aagaacacccaaaacuguaua

SEQ ID NO: 891704 - RNA, 24 nt, Human
aagaagaaaacauucaaauuuuuc

SEQ ID NO: 891705 - RNA, 25 nt, Human
aagaagaaaacauucaaauuuuucu

SEQ ID NO: 891706 - RNA, 19 nt, Human
aagaagaaaagguggcuca

SEQ ID NO: 891707 - RNA, 23 nt, Human
aagaagcaucuaugaagcagaga

SEQ ID NO: 891708 - RNA, 21 nt, Human
aagagcccauucaaagaacaa

SEQ ID NO: 891709 - RNA, 20 nt, Human
aagaggagggagcugaagaa

SEQ ID NO: 891710 - RNA, 25 nt, Human
aagcagacacauucauuagaucaaa

SEQ ID NO: 891711 - RNA, 21 nt, Human
aagcagcccuaucccaaaggu

SEQ ID NO: 891712 - RNA, 20 nt, Human
aagcaucuaugaagcagaga

SEQ ID NO: 891713 - RNA, 24 nt, Human
aagcugaauuuacaugaagaacaa

SEQ ID NO: 891714 - RNA, 19 nt, Human
aagcugccuuuagcccacu

SEQ ID NO: 891715 - RNA, 18 nt, Human
aagcuuguauuacacugc

SEQ ID NO: 891716 - RNA, 20 nt, Human
aaggagaaacaaagaaggca

SEQ ID NO: 891717 - RNA, 19 nt, Human
aaggcagggaggaggggga

SEQ ID NO: 891718 - RNA, 18 nt, Human
aaggcauagaauacagaa

SEQ ID NO: 891719 - RNA, 22 nt, Human
aaggcuugugggaaccaucagg

SEQ ID NO: 891720 - RNA, 25 nt, Human
aagggaagaagggaggcagggaggg

SEQ ID NO: 891721 - RNA, 29 nt, Human
aagguaagcagacacauucauuagaucaa

SEQ ID NO: 891722 - RNA, 24 nt, Human
aagugaauuuauacucacugcaga

SEQ ID NO: 891723 - RNA, 21 nt, Human
aaguggccaaagaugcuacag

SEQ ID NO: 891724 - RNA, 22 nt, Human
aauacaaaauauagcuuuccaa

SEQ ID NO: 891725 - RNA, 24 nt, Human
aaucgcuugaaccugggaggugga

SEQ ID NO: 891726 - RNA, 20 nt, Human
aauggaaaaaguaaaagcug

SEQ ID NO: 891727 - RNA, 19 nt, Human
aauggcauaaaaauaaaug

SEQ ID NO: 891728 - RNA, 23 nt, Human
acaaaaauguaacccuuauauca

SEQ ID NO: 891729 - RNA, 20 nt, Human
acaaaggaagaucaucccaa

SEQ ID NO: 891730 - RNA, 22 nt, Human
acaacccuguaaagccuaaggc

SEQ ID NO: 891731 - RNA, 22 nt, Human
acaauaaaccucuugcuaaacc

SEQ ID NO: 891732 - RNA, 23 nt, Human
acacacacacacacacacacaca

SEQ ID NO: 891733 - RNA, 23 nt, Human
acacacacacacacacacacagu

SEQ ID NO: 891734 - RNA, 23 nt, Human
acacacacacacacacacacaua

SEQ ID NO: 891735 - RNA, 23 nt, Human
acacacacacacacacacauaca

SEQ ID NO: 891736 - RNA, 23 nt, Human
acacacacacacacacauacaca

SEQ ID NO: 891737 - RNA, 27 nt, Human
acacacacacacacacauacacacaca

SEQ ID NO: 891738 - RNA, 23 nt, Human
acacacacacauacacacacaca

SEQ ID NO: 891739 - RNA, 23 nt, Human
acacacauacacacacacacaca

SEQ ID NO: 891740 - RNA, 24 nt, Human
acagagcaagacuccaucucaaaa

SEQ ID NO: 891741 - RNA, 21 nt, Human
acaguuuuucuuuuuucuguu

SEQ ID NO: 891742 - RNA, 22 nt, Human
acauaaaauacacuguaucucu

SEQ ID NO: 891743 - RNA, 19 nt, Human
acauacacacacacacaca

SEQ ID NO: 891744 - RNA, 24 nt, Human
acaucaaggaacuaacugccugau

SEQ ID NO: 891745 - RNA, 18 nt, Human
accccaucucuacuaaaa

SEQ ID NO: 891746 - RNA, 22 nt, Human
accugcuggguuugcuuugucu

SEQ ID NO: 891747 - RNA, 24 nt, Human
accugggagguggaggcugcagug

SEQ ID NO: 891748 - RNA, 24 nt, Human
acuaaaacaaugcaggaaagaaaa

SEQ ID NO: 891749 - RNA, 22 nt, Human
acuagagcagcucccaacaguu

SEQ ID NO: 891750 - RNA, 23 nt, Human
acuccccuccuaccuuuggaggc

SEQ ID NO: 891751 - RNA, 20 nt, Human
acugaguuuuugcucuugcu

SEQ ID NO: 891752 - RNA, 18 nt, Human
acuggacacagaagucug

SEQ ID NO: 891753 - RNA, 22 nt, Human
acuucagaacagcaccguucau

SEQ ID NO: 891754 - RNA, 26 nt, Human
agaaaaaaaaaaaaaaaagaacagaa

SEQ ID NO: 891755 - RNA, 25 nt, Human
agaaaaaagagaaaaagcaaaagag

SEQ ID NO: 891756 - RNA, 19 nt, Human
agaaaauaaugaagaacaa

SEQ ID NO: 891757 - RNA, 19 nt, Human
agaaagagauaagcuccaa

SEQ ID NO: 891758 - RNA, 20 nt, Human
agaaaggagggagggaggaa

SEQ ID NO: 891759 - RNA, 20 nt, Human
agaaaggagggagggaggaa

SEQ ID NO: 891760 - RNA, 21 nt, Human
agaaagggguggagguggagg

SEQ ID NO: 891761 - RNA, 22 nt, Human
agaacaucagacaaacucacaa

SEQ ID NO: 891762 - RNA, 19 nt, Human
agaagaaaagguggcucac

SEQ ID NO: 891763 - RNA, 18 nt, Human
agaagggaggcagggagg

SEQ ID NO: 891764 - RNA, 19 nt, Human
agaagggaggcagggaggg

SEQ ID NO: 891765 - RNA, 25 nt, Human
agaagggaggcagggaggggaggaa

SEQ ID NO: 891766 - RNA, 24 nt, Human
agacaaacucacaaauuuaccaca

SEQ ID NO: 891767 - RNA, 22 nt, Human
agacagagccgagagaagcgag

SEQ ID NO: 891768 - RNA, 20 nt, Human
agacauaacaaaccccaccc

SEQ ID NO: 891769 - RNA, 27 nt, Human
agacauaacaaaccccacccccccuca

SEQ ID NO: 891770 - RNA, 18 nt, Human
agagaaaaagggaauaag

SEQ ID NO: 891771 - RNA, 22 nt, Human
agagaaaggaaggggagaggga

SEQ ID NO: 891772 - RNA, 24 nt, Human
agagcagcucccaacaguuugccu

SEQ ID NO: 891773 - RNA, 18 nt, Human
agaugaagacaaauuuag

SEQ ID NO: 891774 - RNA, 20 nt, Human
agcaaaagagcccauucaaa

SEQ ID NO: 891775 - RNA, 23 nt, Human
agcacuuugggacgccgaggcag

SEQ ID NO: 891776 - RNA, 19 nt, Human
agcagagcugagcgcagga

SEQ ID NO: 891777 - RNA, 22 nt, Human
agcagcaacaacagcuggagga

SEQ ID NO: 891778 - RNA, 18 nt, Human
agccuggccaacauggca

SEQ ID NO: 891779 - RNA, 24 nt, Human
agccuggccaacauggcaaaaccc

SEQ ID NO: 891780 - RNA, 21 nt, Human
agcggcgguggcggcggcacc

SEQ ID NO: 891781 - RNA, 21 nt, Human
agcggcgguggcggcggcacc

SEQ ID NO: 891782 - RNA, 20 nt, Human
agcgggagggggggagcggc

SEQ ID NO: 891783 - RNA, 20 nt, Human
agcgggagggggggagcggc

SEQ ID NO: 891784 - RNA, 23 nt, Human
aggaaaaacagguaaaaagcaaa

SEQ ID NO: 891785 - RNA, 23 nt, Human
aggaaaaugagacauaagcaugu

SEQ ID NO: 891786 - RNA, 31 nt, Human
aggaaacacacacacacacacacacacauag

SEQ ID NO: 891787 - RNA, 22 nt, Human
aggaaagaaaauaaugaagaac

SEQ ID NO: 891788 - RNA, 23 nt, Human
aggaaagaaaauaaugaagaaca

SEQ ID NO: 891789 - RNA, 24 nt, Human
aggaaagaaaauaaugaagaacaa

SEQ ID NO: 891790 - RNA, 26 nt, Human
aggaaauggcaaaccguaucccaaaa

SEQ ID NO: 891791 - RNA, 22 nt, Human
aggaaauugcauuauuagcaca

SEQ ID NO: 891792 - RNA, 19 nt, Human
aggaagaggagggagcuga

SEQ ID NO: 891793 - RNA, 20 nt, Human
aggaaggaagggagaaagga

SEQ ID NO: 891794 - RNA, 23 nt, Human
aggagggagggaggaauaaggga

SEQ ID NO: 891795 - RNA, 19 nt, Human
aggcaaaauaugacuuuga

SEQ ID NO: 891796 - RNA, 23 nt, Human
aggcaaaauuaacaaaaaccaag

SEQ ID NO: 891797 - RNA, 26 nt, Human
aggcaaagauggaggaagagggaccc

SEQ ID NO: 891798 - RNA, 22 nt, Human
aggcaggagaaucgcuugaacc

SEQ ID NO: 891799 - RNA, 24 nt, Human
aggcaggagaaucgcuugaaccug

SEQ ID NO: 891800 - RNA, 25 nt, Human
aggcagggaggagggggagauggaa

SEQ ID NO: 891801 - RNA, 22 nt, Human
aggcagguggaucacuggaggg

SEQ ID NO: 891802 - RNA, 18 nt, Human
aggcaucccacggguggc

SEQ ID NO: 891803 - RNA, 20 nt, Human
aggcugaggcaggagaaucg

SEQ ID NO: 891804 - RNA, 24 nt, Human
aggcugaggcaggagaaucgcuug

SEQ ID NO: 891805 - RNA, 25 nt, Human
agggaagaaaacaugagaaaaaaga

SEQ ID NO: 891806 - RNA, 22 nt, Human
agggaagaaauggagaaaagaa

SEQ ID NO: 891807 - RNA, 26 nt, Human
agggaagaaauggagaaaagggaccc

SEQ ID NO: 891808 - RNA, 22 nt, Human
agggaagaagggaggcagggag

SEQ ID NO: 891809 - RNA, 19 nt, Human
agggaggaauaagggaagg

SEQ ID NO: 891810 - RNA, 22 nt, Human
agggaggagggggagauggaag

SEQ ID NO: 891811 - RNA, 21 nt, Human
agggaggcagggaggggagga

SEQ ID NO: 891812 - RNA, 25 nt, Human
agggagggaggaauaagggaaggag

SEQ ID NO: 891813 - RNA, 22 nt, Human
aggggaagggggagagccaaag

SEQ ID NO: 891814 - RNA, 22 nt, Human
aggggaagggggagagccaaag

SEQ ID NO: 891815 - RNA, 19 nt, Human
aggggagagggagggagaa

SEQ ID NO: 891816 - RNA, 20 nt, Human
aggggccuggcuggcccggg

SEQ ID NO: 891817 - RNA, 21 nt, Human
aggggccuggcuggcccgggg

SEQ ID NO: 891818 - RNA, 22 nt, Human
aggggcugggggagaagagaua

SEQ ID NO: 891819 - RNA, 20 nt, Human
agggguggagguggagggaa

SEQ ID NO: 891820 - RNA, 18 nt, Human
agggucaugaagccagua

SEQ ID NO: 891821 - RNA, 18 nt, Human
aggguuagaauuuuacau

SEQ ID NO: 891822 - RNA, 20 nt, Human
agguaaaaagcaaaccucaa

SEQ ID NO: 891823 - RNA, 24 nt, Human
agguggaggcugcagugagcugag

SEQ ID NO: 891824 - RNA, 22 nt, Human
agguggagggggaacuccacgg

SEQ ID NO: 891825 - RNA, 22 nt, Human
agguggagggggaacuccacgg

SEQ ID NO: 891826 - RNA, 23 nt, Human
aguaagugguaggaaaaugccaa

SEQ ID NO: 891827 - RNA, 18 nt, Human
agucauuuuagaaaaauc

SEQ ID NO: 891828 - RNA, 18 nt, Human
agugaccacuucaaacug

SEQ ID NO: 891829 - RNA, 22 nt, Human
agugcaguauuaacaaucaucc

SEQ ID NO: 891830 - RNA, 24 nt, Human
aguggagggugccuguaauccugg

SEQ ID NO: 891831 - RNA, 18 nt, Human
agugucaucgcccggacg

SEQ ID NO: 891832 - RNA, 24 nt, Human
aguuggcuauccaaaagaaaaggg

SEQ ID NO: 891833 - RNA, 18 nt, Human
auaaagcccuuaaaaacu

SEQ ID NO: 891834 - RNA, 18 nt, Human
auaacaaaccccaccccc

SEQ ID NO: 891835 - RNA, 33 nt, Human
auaaggaaacacacacacacacacacacacagu

SEQ ID NO: 891836 - RNA, 21 nt, Human
auaaucaggcuuuaccuaaac

SEQ ID NO: 891837 - RNA, 21 nt, Human
auacaaaauauagcuuuccaa

SEQ ID NO: 891838 - RNA, 20 nt, Human
auagaauacagaaaggccag

SEQ ID NO: 891839 - RNA, 25 nt, Human
auagauaaccagguuaagcugaauu

SEQ ID NO: 891840 - RNA, 18 nt, Human
auagauauauauaaaaag

SEQ ID NO: 891841 - RNA, 24 nt, Human
auagugagcaaagacugaauggcu

SEQ ID NO: 891842 - RNA, 19 nt, Human
auauauguauauauauaaa

SEQ ID NO: 891843 - RNA, 19 nt, Human
augaaaauucugugauggg

SEQ ID NO: 891844 - RNA, 18 nt, Human
augaagaacaaaaguaaa

SEQ ID NO: 891845 - RNA, 19 nt, Human
augccuguaauccuagcac

SEQ ID NO: 891846 - RNA, 20 nt, Human
augcuacaacugccaaguuc

SEQ ID NO: 891847 - RNA, 24 nt, Human
caaaaaauaaaaauaaaaggcaag

SEQ ID NO: 891848 - RNA, 27 nt, Human
caaaagccauuacuugacuaaaacaau

SEQ ID NO: 891849 - RNA, 21 nt, Human
caaaccucaacgcuacucuuc

SEQ ID NO: 891850 - RNA, 21 nt, Human
caaauagauucucagucauca

SEQ ID NO: 891851 - RNA, 18 nt, Human
caacuccuaauaauuccu

SEQ ID NO: 891852 - RNA, 22 nt, Human
caagaaguacacuaacauaaac

SEQ ID NO: 891853 - RNA, 21 nt, Human
caagacuccaucucaaaaaaa

SEQ ID NO: 891854 - RNA, 21 nt, Human
caagcugaauguucuaaaaug

SEQ ID NO: 891855 - RNA, 18 nt, Human
caaggcacuccaucugac

SEQ ID NO: 891856 - RNA, 20 nt, Human
caauguacucacucaguaca

SEQ ID NO: 891857 - RNA, 19 nt, Human
cacaaauaucaaccacuga

SEQ ID NO: 891858 - RNA, 20 nt, Human
cacacacacacacacacaca

SEQ ID NO: 891859 - RNA, 20 nt, Human
cacacacacacacacacaca

SEQ ID NO: 891860 - RNA, 25 nt, Human
cacacacacacacacacacacauac

SEQ ID NO: 891861 - RNA, 20 nt, Human
cacacacacacacacacaua

SEQ ID NO: 891862 - RNA, 26 nt, Human
cacacacacacacacacauacacaca

SEQ ID NO: 891863 - RNA, 19 nt, Human
cacacacacacacacauac

SEQ ID NO: 891864 - RNA, 28 nt, Human
cacacacacacauacacacacacacaca

SEQ ID NO: 891865 - RNA, 22 nt, Human
cacacacacauacacacacaca

SEQ ID NO: 891866 - RNA, 22 nt, Human
cacacacauacacacacacaca

SEQ ID NO: 891867 - RNA, 23 nt, Human
cacaggugguagugagaagcagg

SEQ ID NO: 891868 - RNA, 21 nt, Human
cacccuagauuaaaguggcca

SEQ ID NO: 891869 - RNA, 18 nt, Human
caccuccucuccgggacc

SEQ ID NO: 891870 - RNA, 18 nt, Human
caccuccucuccgggacc

SEQ ID NO: 891871 - RNA, 22 nt, Human
cacggggaaagcagcccuaucc

SEQ ID NO: 891872 - RNA, 24 nt, Human
cacugggccgaggaccgaggaaac

SEQ ID NO: 891873 - RNA, 20 nt, Human
cagaaaaguagccuucaaca

SEQ ID NO: 891874 - RNA, 21 nt, Human
cagauaagaccuaccauuagc

SEQ ID NO: 891875 - RNA, 18 nt, Human
cagauacaacuuucucau

SEQ ID NO: 891876 - RNA, 21 nt, Human
cagcaacaacagcuggaggag

SEQ ID NO: 891877 - RNA, 21 nt, Human
cagcagcaacaacagcuggag

SEQ ID NO: 891878 - RNA, 23 nt, Human
cagcucuaugaaaauucugugau

SEQ ID NO: 891879 - RNA, 19 nt, Human
caggacggggaaggggaag

SEQ ID NO: 891880 - RNA, 19 nt, Human
caggacggggaaggggaag

SEQ ID NO: 891881 - RNA, 18 nt, Human
cauaaaauacacuguauc

SEQ ID NO: 891882 - RNA, 19 nt, Human
cauaaagguaacaugauca

SEQ ID NO: 891883 - RNA, 18 nt, Human
caucaaggaacuaacugc

SEQ ID NO: 891884 - RNA, 20 nt, Human
caucaaggaacuaacugccu

SEQ ID NO: 891885 - RNA, 19 nt, Human
caucccaaaacaaaaagaa

SEQ ID NO: 891886 - RNA, 24 nt, Human
caucuuggaaucaggauuuucuuc

SEQ ID NO: 891887 - RNA, 24 nt, Human
caugccuguaauccuagcacuuug

SEQ ID NO: 891888 - RNA, 23 nt, Human
ccaaaagaaaagggacauaacaa

SEQ ID NO: 891889 - RNA, 21 nt, Human
ccaaagguagaacuauccuga

SEQ ID NO: 891890 - RNA, 21 nt, Human
ccacaauuccgcacaguucaa

SEQ ID NO: 891891 - RNA, 21 nt, Human
ccacaugccaaaaggaaaaug

SEQ ID NO: 891892 - RNA, 20 nt, Human
ccaccuggcuguucuagagg

SEQ ID NO: 891893 - RNA, 19 nt, Human
ccaggucuagguccgcgcu

SEQ ID NO: 891894 - RNA, 20 nt, Human
ccauagcauuugaucuagau

SEQ ID NO: 891895 - RNA, 22 nt, Human
ccaucucaaaaaaaaaaaagaa

SEQ ID NO: 891896 - RNA, 18 nt, Human
cccaaaacaaaaagaagg

SEQ ID NO: 891897 - RNA, 25 nt, Human
cccaaaacaaaaagaaggaaaaauc

SEQ ID NO: 891898 - RNA, 19 nt, Human
cccaaagguagaacuaucc

SEQ ID NO: 891899 - RNA, 23 nt, Human
cccaucucuacuaaaaaaauaca

SEQ ID NO: 891900 - RNA, 22 nt, Human
cccccagagaacaaacugaaaa

SEQ ID NO: 891901 - RNA, 18 nt, Human
ccccggggagggaaaagg

SEQ ID NO: 891902 - RNA, 19 nt, Human
cccggcccgagggcagcgg

SEQ ID NO: 891903 - RNA, 19 nt, Human
cccggcccgagggcagcgg

SEQ ID NO: 891904 - RNA, 21 nt, Human
cccugugcugcaggauugcua

SEQ ID NO: 891905 - RNA, 18 nt, Human
ccgccaccgccgccgccg

SEQ ID NO: 891906 - RNA, 21 nt, Human
ccgcugccuccuccucgaggg

SEQ ID NO: 891907 - RNA, 22 nt, Human
ccuaagacaguacucucugccc

SEQ ID NO: 891908 - RNA, 20 nt, Human
ccuaggaaaauaauaacaau

SEQ ID NO: 891909 - RNA, 19 nt, Human
ccuccacacagucuaaggc

SEQ ID NO: 891910 - RNA, 22 nt, Human
ccucgaggguagugacuuccac

SEQ ID NO: 891911 - RNA, 22 nt, Human
ccucgaggguagugacuuccac

SEQ ID NO: 891912 - RNA, 22 nt, Human
ccugagagacagagcaagacuc

SEQ ID NO: 891913 - RNA, 24 nt, Human
ccuggccaacauggcaaaacccca

SEQ ID NO: 891914 - RNA, 19 nt, Human
ccugggagguggaggcugc

SEQ ID NO: 891915 - RNA, 22 nt, Human
ccuguaauccuggcuacuuggg

SEQ ID NO: 891916 - RNA, 22 nt, Human
ccugugcugcaggauugcuagg

SEQ ID NO: 891917 - RNA, 19 nt, Human
ccuuuggaggcugaaauuu

SEQ ID NO: 891918 - RNA, 23 nt, Human
cgagggcaucgcagcucgaccca

SEQ ID NO: 891919 - RNA, 18 nt, Human
cgcaggcgcggagggggg

SEQ ID NO: 891920 - RNA, 25 nt, Human
cgcggaagagccguggcggcccccg

SEQ ID NO: 891921 - RNA, 18 nt, Human
cggcaagaagccuguacu

SEQ ID NO: 891922 - RNA, 18 nt, Human
cggcccccggagggcggg

SEQ ID NO: 891923 - RNA, 19 nt, Human
cgggagggggggagcggcg

SEQ ID NO: 891924 - RNA, 24 nt, Human
cggugaccaggagagggguucagg

SEQ ID NO: 891925 - RNA, 20 nt, Human
cuaaaaaaauacaaaaaaaa

SEQ ID NO: 891926 - RNA, 20 nt, Human
cuacuaaaaaaauacaaaaa

SEQ ID NO: 891927 - RNA, 24 nt, Human
cucaugccuguaauccuagcacuu

SEQ ID NO: 891928 - RNA, 19 nt, Human
cuccaucucaaaaaaaaaa

SEQ ID NO: 891929 - RNA, 20 nt, Human
cucggugaccaggagagggg

SEQ ID NO: 891930 - RNA, 20 nt, Human
cucggugaccaggagagggg

SEQ ID NO: 891931 - RNA, 20 nt, Human
cucuagccugagagacagag

SEQ ID NO: 891932 - RNA, 19 nt, Human
cucucccaaagaaacaauu

SEQ ID NO: 891933 - RNA, 19 nt, Human
cucucugauugugcugggg

SEQ ID NO: 891934 - RNA, 24 nt, Human
cugaagcacuggauuguguggcug

SEQ ID NO: 891935 - RNA, 19 nt, Human
cugaguggaagaaaaacuc

SEQ ID NO: 891936 - RNA, 19 nt, Human
cugcagcuguuuacagaaa

SEQ ID NO: 891937 - RNA, 22 nt, Human
cugcagugagcugagaucgcac

SEQ ID NO: 891938 - RNA, 24 nt, Human
cugcucuagccugagagacagagc

SEQ ID NO: 891939 - RNA, 23 nt, Human
cuggccaacauggcaaaacccca

SEQ ID NO: 891940 - RNA, 22 nt, Human
cugggccgaggaccgaggaaac

SEQ ID NO: 891941 - RNA, 20 nt, Human
cugguggcggcgagccugag

SEQ ID NO: 891942 - RNA, 18 nt, Human
cuuccugccggcgcggcc

SEQ ID NO: 891943 - RNA, 19 nt, Human
cuugaaccugggaggugga

SEQ ID NO: 891944 - RNA, 22 nt, Human
cuuuuaguaagugguaggaaaa

SEQ ID NO: 891945 - RNA, 24 nt, Human
cuuuucuguucguggagcuaaaag

SEQ ID NO: 891946 - RNA, 21 nt, Human
cuuuuuuuuuuuuuuuccuuu

SEQ ID NO: 891947 - RNA, 22 nt, Human
cuuuuuuuuuuuuuuuccuuuu

SEQ ID NO: 891948 - RNA, 18 nt, Human
gaaaaacagguaaaaagc

SEQ ID NO: 891949 - RNA, 19 nt, Human
gaaaaacagguaaaaagca

SEQ ID NO: 891950 - RNA, 26 nt, Human
gaaaaagcaaaagagcccauucaaag

SEQ ID NO: 891951 - RNA, 21 nt, Human
gaaaacguaauucaaugccuc

SEQ ID NO: 891952 - RNA, 18 nt, Human
gaaacgagaaaugcccaa

SEQ ID NO: 891953 - RNA, 21 nt, Human
gaaaggaaggggagagggagg

SEQ ID NO: 891954 - RNA, 20 nt, Human
gaacagaaaaguagccuuca

SEQ ID NO: 891955 - RNA, 18 nt, Human
gaagaacgcauuuaacug

SEQ ID NO: 891956 - RNA, 24 nt, Human
gaagaagauuagaacaauuaugga

SEQ ID NO: 891957 - RNA, 23 nt, Human
gaagaugaauacucuuuguagcc

SEQ ID NO: 891958 - RNA, 21 nt, Human
gaagggaggcagggaggggag

SEQ ID NO: 891959 - RNA, 20 nt, Human
gaccaggagagggguucagg

SEQ ID NO: 891960 - RNA, 21 nt, Human
gagaaaaaagagaaaaagcaa

SEQ ID NO: 891961 - RNA, 23 nt, Human
gagaaaaaagagaaaaagcaaaa

SEQ ID NO: 891962 - RNA, 23 nt, Human
gagaaucgcuugaaccugggagg

SEQ ID NO: 891963 - RNA, 18 nt, Human
gagacagagccgagagaa

SEQ ID NO: 891964 - RNA, 23 nt, Human
gagacagagccgagagaagcgag

SEQ ID NO: 891965 - RNA, 21 nt, Human
gagagggagggagaauaugag

SEQ ID NO: 891966 - RNA, 21 nt, Human
gagagggagggagaauaugag

SEQ ID NO: 891967 - RNA, 18 nt, Human
gagccgagagaagcgaga

SEQ ID NO: 891968 - RNA, 19 nt, Human
gaggaaagggagggaggaa

SEQ ID NO: 891969 - RNA, 18 nt, Human
gaggagggggagauggaa

SEQ ID NO: 891970 - RNA, 23 nt, Human
gaggcagggaggggaggaaaggg

SEQ ID NO: 891971 - RNA, 19 nt, Human
gaggcagguggaucacugg

SEQ ID NO: 891972 - RNA, 23 nt, Human
gaggcugcagugagcugagaucg

SEQ ID NO: 891973 - RNA, 24 nt, Human
gagggggggagcggcgguggcggc

SEQ ID NO: 891974 - RNA, 24 nt, Human
gagggggggagcggcgguggcggc

SEQ ID NO: 891975 - RNA, 30 nt, Human
gagggggggagcggcgguggcggcggcaac

SEQ ID NO: 891976 - RNA, 19 nt, Human
gagguacugaauuacacaa

SEQ ID NO: 891977 - RNA, 20 nt, Human
gagguucugaugagcaagaa

SEQ ID NO: 891978 - RNA, 24 nt, Human
gaucacuggagguuaggaguucga

SEQ ID NO: 891979 - RNA, 18 nt, Human
gcaagaacacccaaaacu

SEQ ID NO: 891980 - RNA, 19 nt, Human
gcacagcgcaggcgcggag

SEQ ID NO: 891981 - RNA, 21 nt, Human
gcagcaacaugggccucgcuu

SEQ ID NO: 891982 - RNA, 20 nt, Human
gcaggagacagagccgagag

SEQ ID NO: 891983 - RNA, 21 nt, Human
gcauagaauacagaaaggcca

SEQ ID NO: 891984 - RNA, 25 nt, Human
gccaauuaauaauaacaauaacaac

SEQ ID NO: 891985 - RNA, 22 nt, Human
gccgcugccuccuccucgaggg

SEQ ID NO: 891986 - RNA, 20 nt, Human
gccuaaggcuugugggaacc

SEQ ID NO: 891987 - RNA, 25 nt, Human
gcggcgguggcggcggcaccuccuc

SEQ ID NO: 891988 - RNA, 21 nt, Human
gcgggagggggggagcggcgg

SEQ ID NO: 891989 - RNA, 21 nt, Human
gcgggagggggggagcggcgg

SEQ ID NO: 891990 - RNA, 21 nt, Human
gcuaaaccacagaagucagca

SEQ ID NO: 891991 - RNA, 24 nt, Human
gcuaaaccccuuaguagaaaccca

SEQ ID NO: 891992 - RNA, 21 nt, Human
gcuacaacugccaaguucugg

SEQ ID NO: 891993 - RNA, 20 nt, Human
gcucaccugagucucuccca

SEQ ID NO: 891994 - RNA, 27 nt, Human
gcucugaaaucccaacuaugaaagcca

SEQ ID NO: 891995 - RNA, 21 nt, Human
gcugcagugagcugagaucgc

SEQ ID NO: 891996 - RNA, 22 nt, Human
gcugcugcuguuccugagccgg

SEQ ID NO: 891997 - RNA, 26 nt, Human
gcugggggagaagagauacacugaga

SEQ ID NO: 891998 - RNA, 22 nt, Human
gcuguguaaacaaaaccaacac

SEQ ID NO: 891999 - RNA, 22 nt, Human
ggaaaaacagguaaaaagcaaa

SEQ ID NO: 892000 - RNA, 24 nt, Human
ggaaagcagcccuaucccaaaggu

SEQ ID NO: 892001 - RNA, 19 nt, Human
ggaagaacgcauuuaacug

SEQ ID NO: 892002 - RNA, 18 nt, Human
ggaccccagaggccggcg

SEQ ID NO: 892003 - RNA, 22 nt, Human
ggacuaggcaaagauggaggaa

SEQ ID NO: 892004 - RNA, 21 nt, Human
ggagcggcgguggcggcggca

SEQ ID NO: 892005 - RNA, 21 nt, Human
ggaggagggggagauggaagg

SEQ ID NO: 892006 - RNA, 18 nt, Human
ggaggcugcagugagcug

SEQ ID NO: 892007 - RNA, 24 nt, Human
ggaggcugcagugagcugagaucg

SEQ ID NO: 892008 - RNA, 23 nt, Human
ggagggagggaggaauaagggaa

SEQ ID NO: 892009 - RNA, 19 nt, Human
ggagucccuccacacaguc

SEQ ID NO: 892010 - RNA, 18 nt, Human
ggagugucaucgcccgga

SEQ ID NO: 892011 - RNA, 24 nt, Human
ggaugugguggcucaugccuguaa

SEQ ID NO: 892012 - RNA, 20 nt, Human
ggcagguggaucacuggagg

SEQ ID NO: 892013 - RNA, 26 nt, Human
ggccggccccgagcagagcugagcgc

SEQ ID NO: 892014 - RNA, 25 nt, Human
ggcuaaaccccuuaguagaaaccca

SEQ ID NO: 892015 - RNA, 18 nt, Human
ggcucaugccuguaaucc

SEQ ID NO: 892016 - RNA, 22 nt, Human
ggcuggcccggggucucgcagg

SEQ ID NO: 892017 - RNA, 22 nt, Human
ggcuguguaaacaaaaccaaca

SEQ ID NO: 892018 - RNA, 20 nt, Human
gggaaaagguauuugcaacg

SEQ ID NO: 892019 - RNA, 25 nt, Human
gggaacuccacggggacugauucuc

SEQ ID NO: 892020 - RNA, 25 nt, Human
gggaacuccacggggacugauucuc

SEQ ID NO: 892021 - RNA, 24 nt, Human
gggaaggagaaacaaagaaggcag

SEQ ID NO: 892022 - RNA, 21 nt, Human
gggaggcugggagguggccgc

SEQ ID NO: 892023 - RNA, 18 nt, Human
gggagggggggagcggcg

SEQ ID NO: 892024 - RNA, 19 nt, Human
gggcacagcgcaggcgcgg

SEQ ID NO: 892025 - RNA, 19 nt, Human
gggccgaggaccgaggaaa

SEQ ID NO: 892026 - RNA, 19 nt, Human
gggccgaggaccgaggaaa

SEQ ID NO: 892027 - RNA, 24 nt, Human
gggccuaguggagggugccuguaa

SEQ ID NO: 892028 - RNA, 18 nt, Human
gggccuggcuggcccggg

SEQ ID NO: 892029 - RNA, 19 nt, Human
gggcugggggagaagagau

SEQ ID NO: 892030 - RNA, 22 nt, Human
ggggaagggggagagccaaagg

SEQ ID NO: 892031 - RNA, 22 nt, Human
ggggaagggggagagccaaagg

SEQ ID NO: 892032 - RNA, 23 nt, Human
ggggagaagagauacacugagga

SEQ ID NO: 892033 - RNA, 20 nt, Human
gggggaggcugggagguggc

SEQ ID NO: 892034 - RNA, 23 nt, Human
ggggggagcggcgguggcggcgg

SEQ ID NO: 892035 - RNA, 23 nt, Human
ggggggagcggcgguggcggcgg

SEQ ID NO: 892036 - RNA, 24 nt, Human
ggugaccaggagagggguucagga

SEQ ID NO: 892037 - RNA, 24 nt, Human
ggugaccaggagagggguucagga

SEQ ID NO: 892038 - RNA, 24 nt, Human
ggugccuguaauccuggcuacuug

SEQ ID NO: 892039 - RNA, 24 nt, Human
gguggcucaugccuguaauccuag

SEQ ID NO: 892040 - RNA, 22 nt, Human
gguucagagaauuuauaaagua

SEQ ID NO: 892041 - RNA, 22 nt, Human
guaagauuacuauuucugguga

SEQ ID NO: 892042 - RNA, 22 nt, Human
guaagugguaggaaaaugccaa

SEQ ID NO: 892043 - RNA, 20 nt, Human
guaauccuggcuacuuggga

SEQ ID NO: 892044 - RNA, 23 nt, Human
gucacaaugacuucagugcagga

SEQ ID NO: 892045 - RNA, 20 nt, Human
gucacccauguuggugugga

SEQ ID NO: 892046 - RNA, 18 nt, Human
gucuagccaggcaaaacu

SEQ ID NO: 892047 - RNA, 23 nt, Human
gugacacaaacaagcagagaaga

SEQ ID NO: 892048 - RNA, 20 nt, Human
guggaggcugcagugagcug

SEQ ID NO: 892049 - RNA, 20 nt, Human
guggcucaugccuguaaucc

SEQ ID NO: 892050 - RNA, 22 nt, Human
gugguuccuaaacuuuaaagug

SEQ ID NO: 892051 - RNA, 18 nt, Human
guguauguaugugugugu

SEQ ID NO: 892052 - RNA, 18 nt, Human
guguauguaugugugugu

SEQ ID NO: 892053 - RNA, 18 nt, Human
guuucugacucaguaugu

SEQ ID NO: 892054 - RNA, 23 nt, Human
guuucuuuuuuuuuuuuuuuccu

SEQ ID NO: 892055 - RNA, 19 nt, Human
guuuucuuagugucuuuau

SEQ ID NO: 892056 - RNA, 24 nt, Human
uaaaaaauaaaugaaacggacaaa

SEQ ID NO: 892057 - RNA, 18 nt, Human
uaaaaagcaaaccucaac

SEQ ID NO: 892058 - RNA, 22 nt, Human
uaaaagaagugaaugaaacuca

SEQ ID NO: 892059 - RNA, 21 nt, Human
uaaaaggaaacaagguaagca

SEQ ID NO: 892060 - RNA, 23 nt, Human
uaaaaucuaucaguuuacucaaa

SEQ ID NO: 892061 - RNA, 25 nt, Human
uaaaaugaugugcuaaagcauaauu

SEQ ID NO: 892062 - RNA, 23 nt, Human
uaaaauuccaaacuacagcacau

SEQ ID NO: 892063 - RNA, 24 nt, Human
uaaaauuccaaacuacagcacaug

SEQ ID NO: 892064 - RNA, 21 nt, Human
uaaaccacuugagaacagguu

SEQ ID NO: 892065 - RNA, 23 nt, Human
uaaaccccuuaguagaaacccag

SEQ ID NO: 892066 - RNA, 18 nt, Human
uaaagacauaacaaaccc

SEQ ID NO: 892067 - RNA, 19 nt, Human
uaaagcccuuaaaaacuug

SEQ ID NO: 892068 - RNA, 23 nt, Human
uaaaguaacuagagcacugggac

SEQ ID NO: 892069 - RNA, 24 nt, Human
uaaauacaaggaaugaugauuuug

SEQ ID NO: 892070 - RNA, 21 nt, Human
uaacaaaaaccaaggcacucc

SEQ ID NO: 892071 - RNA, 23 nt, Human
uaacagguuauuuuuuguacacu

SEQ ID NO: 892072 - RNA, 24 nt, Human
uaacccuuauaucauugcaggaca

SEQ ID NO: 892073 - RNA, 19 nt, Human
uaagaccuaccauuagcug

SEQ ID NO: 892074 - RNA, 27 nt, Human
uaagcagacacauucauuagaucaaaa

SEQ ID NO: 892075 - RNA, 21 nt, Human
uaaggaaacacacacacacac

SEQ ID NO: 892076 - RNA, 19 nt, Human
uaauaauucucauggaacc

SEQ ID NO: 892077 - RNA, 21 nt, Human
uaauacauguuaugagauucu

SEQ ID NO: 892078 - RNA, 19 nt, Human
uaaugaagaacaaaaguaa

SEQ ID NO: 892079 - RNA, 28 nt, Human
uaaugaagaacaaaaguaaacaugauag

SEQ ID NO: 892080 - RNA, 18 nt, Human
uaaugcagacacucccug

SEQ ID NO: 892081 - RNA, 24 nt, Human
uaaugcuacaacugccaaguucug

SEQ ID NO: 892082 - RNA, 21 nt, Human
uaauuuaucauauauuauccc

SEQ ID NO: 892083 - RNA, 26 nt, Human
uacaaaaaauaaaaauaaaaggcaag

SEQ ID NO: 892084 - RNA, 19 nt, Human
uacacacaucuggugcaug

SEQ ID NO: 892085 - RNA, 30 nt, Human
uacaggauagaaaaaaaaaaaaaaaagaaa

SEQ ID NO: 892086 - RNA, 21 nt, Human
uacucugagaaccacugguug

SEQ ID NO: 892087 - RNA, 20 nt, Human
uagaaacccagagaacuaac

SEQ ID NO: 892088 - RNA, 23 nt, Human
uagaauacagaaaggccaauuaa

SEQ ID NO: 892089 - RNA, 22 nt, Human
uagaaugcuuuggguacaggaa

SEQ ID NO: 892090 - RNA, 22 nt, Human
uagaggcaaaauuaacaaaaac

SEQ ID NO: 892091 - RNA, 21 nt, Human
uagauauaaaccauccaaaac

SEQ ID NO: 892092 - RNA, 26 nt, Human
uagcacuuugggacgccgaggcaggu

SEQ ID NO: 892093 - RNA, 19 nt, Human
uagcccacuacugacauca

SEQ ID NO: 892094 - RNA, 19 nt, Human
uagcuaaaaacauagaugc

SEQ ID NO: 892095 - RNA, 19 nt, Human
uagcuaaaccacuugagaa

SEQ ID NO: 892096 - RNA, 22 nt, Human
uaggaaaaugccaaacuaaauu

SEQ ID NO: 892097 - RNA, 22 nt, Human
uaggucacccuagauuaaagug

SEQ ID NO: 892098 - RNA, 23 nt, Human
uaggucucuuucugaaaaguucc

SEQ ID NO: 892099 - RNA, 22 nt, Human
uaguauuaaggaaagacagcag

SEQ ID NO: 892100 - RNA, 22 nt, Human
uaguggagggugccuguaaucc

SEQ ID NO: 892101 - RNA, 21 nt, Human
uauaauaagcaaucccuacaa

SEQ ID NO: 892102 - RNA, 24 nt, Human
uauauacauggcacaaaauauaua

SEQ ID NO: 892103 - RNA, 18 nt, Human
uauauauauguauauaua

SEQ ID NO: 892104 - RNA, 18 nt, Human
uauauauguauauauaua

SEQ ID NO: 892105 - RNA, 19 nt, Human
uauauguauauauauaaau

SEQ ID NO: 892106 - RNA, 21 nt, Human
uauguguguguguguagacgu

SEQ ID NO: 892107 - RNA, 18 nt, Human
uauuaaggaaagacagca

SEQ ID NO: 892108 - RNA, 26 nt, Human
uauuaaggaaagacagcaguggugau

SEQ ID NO: 892109 - RNA, 21 nt, Human
uauucggagugggacauagaa

SEQ ID NO: 892110 - RNA, 19 nt, Human
ucaaaagaaauuagaucaa

SEQ ID NO: 892111 - RNA, 23 nt, Human
ucaaaagauacuuaaauacucaa

SEQ ID NO: 892112 - RNA, 24 nt, Human
ucaaaagauacuuaaauacucaaa

SEQ ID NO: 892113 - RNA, 23 nt, Human
ucaaaccaggcaaaugacuucug

SEQ ID NO: 892114 - RNA, 23 nt, Human
ucaacuccuaauaauuccuaaga

SEQ ID NO: 892115 - RNA, 22 nt, Human
ucacuuuccuaaaacaagcauu

SEQ ID NO: 892116 - RNA, 21 nt, Human
ucagauacaacuuucucauuu

SEQ ID NO: 892117 - RNA, 25 nt, Human
ucaggacggggaaggggaaggggga

SEQ ID NO: 892118 - RNA, 25 nt, Human
ucaggacggggaaggggaaggggga

SEQ ID NO: 892119 - RNA, 22 nt, Human
ucagugcaggaguuuuuuacug

SEQ ID NO: 892120 - RNA, 22 nt, Human
ucauaaagguaacaugaucaag

SEQ ID NO: 892121 - RNA, 22 nt, Human
ucaugugaauccaccuggcugu

SEQ ID NO: 892122 - RNA, 21 nt, Human
ucauugaugcuacagauguuu

SEQ ID NO: 892123 - RNA, 20 nt, Human
uccaaaaaaaugaaacacac

SEQ ID NO: 892124 - RNA, 18 nt, Human
uccacacagucuaaggca

SEQ ID NO: 892125 - RNA, 24 nt, Human
uccagaguuucugacucaguaugu

SEQ ID NO: 892126 - RNA, 22 nt, Human
uccagcaaacacacaguaagcu

SEQ ID NO: 892127 - RNA, 20 nt, Human
uccaucucaaaaaaaaaaaa

SEQ ID NO: 892128 - RNA, 20 nt, Human
ucccaaaacaaaaagaagga

SEQ ID NO: 892129 - RNA, 22 nt, Human
ucccaaagaaacaauucuagca

SEQ ID NO: 892130 - RNA, 20 nt, Human
ucccaaagguagaacuaucc

SEQ ID NO: 892131 - RNA, 18 nt, Human
uccccuaacacuccccuc

SEQ ID NO: 892132 - RNA, 21 nt, Human
ucccuacaaaauauuucaaac

SEQ ID NO: 892133 - RNA, 24 nt, Human
uccuaccuuuggaggcugaaauuu

SEQ ID NO: 892134 - RNA, 21 nt, Human
uccugacccuaacacuuggcc

SEQ ID NO: 892135 - RNA, 22 nt, Human
ucgccgccaccgccgccgccgc

SEQ ID NO: 892136 - RNA, 26 nt, Human
ucgccgccaccgccgccgccgcugac

SEQ ID NO: 892137 - RNA, 24 nt, Human
ucgcuugaaccugggagguggagg

SEQ ID NO: 892138 - RNA, 20 nt, Human
ucuagaggaaaaacagguaa

SEQ ID NO: 892139 - RNA, 20 nt, Human
ucuauaauaaagcccuuaaa

SEQ ID NO: 892140 - RNA, 20 nt, Human
ucucgcgaguagagggacuu

SEQ ID NO: 892141 - RNA, 22 nt, Human
ucugauuccaagcccacucuuc

SEQ ID NO: 892142 - RNA, 27 nt, Human
ucuuaaguccuauauagucauuuuaga

SEQ ID NO: 892143 - RNA, 21 nt, Human
ugaaaaagaggugaaaaguaa

SEQ ID NO: 892144 - RNA, 21 nt, Human
ugaaacaccauuugacgccau

SEQ ID NO: 892145 - RNA, 25 nt, Human
ugaaacaccauuugacgccauugcc

SEQ ID NO: 892146 - RNA, 21 nt, Human
ugaaacgagaacacuuaaaug

SEQ ID NO: 892147 - RNA, 25 nt, Human
ugaaacggacaaggauaccaaaaca

SEQ ID NO: 892148 - RNA, 20 nt, Human
ugaaacuauuuguuuaugug

SEQ ID NO: 892149 - RNA, 20 nt, Human
ugaaagagaaaguaaaaaca

SEQ ID NO: 892150 - RNA, 24 nt, Human
ugaaccugggagguggaggcugca

SEQ ID NO: 892151 - RNA, 22 nt, Human
ugaagcacuggauuguguggcu

SEQ ID NO: 892152 - RNA, 22 nt, Human
ugaagcagagaacuacagguca

SEQ ID NO: 892153 - RNA, 23 nt, Human
ugaauucccaaacauguagguua

SEQ ID NO: 892154 - RNA, 18 nt, Human
ugaccacuucaaacuguu

SEQ ID NO: 892155 - RNA, 24 nt, Human
ugacuucagugcaggaguuuuuua

SEQ ID NO: 892156 - RNA, 21 nt, Human
ugagaaccauacucugagaac

SEQ ID NO: 892157 - RNA, 20 nt, Human
ugagaagcaggcaucccacg

SEQ ID NO: 892158 - RNA, 23 nt, Human
ugagaagcaggcaucccacgggu

SEQ ID NO: 892159 - RNA, 22 nt, Human
ugagaugaaguccgagggcauc

SEQ ID NO: 892160 - RNA, 19 nt, Human
ugagcaaagacugaauggc

SEQ ID NO: 892161 - RNA, 18 nt, Human
ugaggaaaauacuuuugg

SEQ ID NO: 892162 - RNA, 22 nt, Human
ugaggaaaauacuuuugguuca

SEQ ID NO: 892163 - RNA, 20 nt, Human
ugaggcaggagaaucgcuug

SEQ ID NO: 892164 - RNA, 24 nt, Human
ugaggcaggagaaucgcuugaacc

SEQ ID NO: 892165 - RNA, 24 nt, Human
ugaggcaggagaaucgcuugaacc

SEQ ID NO: 892166 - RNA, 19 nt, Human
ugagguucaucagcuaaaa

SEQ ID NO: 892167 - RNA, 19 nt, Human
ugagugguccagccuugaa

SEQ ID NO: 892168 - RNA, 18 nt, Human
ugauacaacccuguaaag

SEQ ID NO: 892169 - RNA, 23 nt, Human
ugcaguauuaacaaucauccuaa

SEQ ID NO: 892170 - RNA, 22 nt, Human
ugcauagcaguguguacaaagg

SEQ ID NO: 892171 - RNA, 26 nt, Human
ugcccgggagcgcggaagagccgugg

SEQ ID NO: 892172 - RNA, 23 nt, Human
ugccuguaauccuagcacuuugg

SEQ ID NO: 892173 - RNA, 23 nt, Human
ugccuguaauccuagcacuuugg

SEQ ID NO: 892174 - RNA, 24 nt, Human
ugccuguaauccuagcacuuuggg

SEQ ID NO: 892175 - RNA, 23 nt, Human
ugccuguaauccuggcuacuugg

SEQ ID NO: 892176 - RNA, 24 nt, Human
ugccuguaauccuggcuacuuggg

SEQ ID NO: 892177 - RNA, 19 nt, Human
ugcgaguauacaaauguuc

SEQ ID NO: 892178 - RNA, 19 nt, Human
ugcguguauguaugugugu

SEQ ID NO: 892179 - RNA, 24 nt, Human
ugcguguauguaugugugugugug

SEQ ID NO: 892180 - RNA, 22 nt, Human
ugcuacaacugccaaguucugg

SEQ ID NO: 892181 - RNA, 26 nt, Human
ugcuacagauguuucucuagauggag

SEQ ID NO: 892182 - RNA, 21 nt, Human
uggaaauagugaaaaaugaaa

SEQ ID NO: 892183 - RNA, 23 nt, Human
uggaagaaaggaaggaagggaga

SEQ ID NO: 892184 - RNA, 21 nt, Human
uggaagaaggcaguucagugg

SEQ ID NO: 892185 - RNA, 19 nt, Human
uggaagagagagaaaggaa

SEQ ID NO: 892186 - RNA, 21 nt, Human
uggaagagagagaaaggaagg

SEQ ID NO: 892187 - RNA, 19 nt, Human
uggaagggaagaagggagg

SEQ ID NO: 892188 - RNA, 22 nt, Human
uggaggaggcgagccugccuca

SEQ ID NO: 892189 - RNA, 18 nt, Human
uggaggcugcagugagcu

SEQ ID NO: 892190 - RNA, 19 nt, Human
uggagguggagggaagaaa

SEQ ID NO: 892191 - RNA, 24 nt, Human
uggaucacuggagguuaggaguuc

SEQ ID NO: 892192 - RNA, 22 nt, Human
uggcaaaccguaucccaaaaac

SEQ ID NO: 892193 - RNA, 19 nt, Human
uggcaagaacacccaaaac

SEQ ID NO: 892194 - RNA, 23 nt, Human
uggcuaaaccccuuaguagaaac

SEQ ID NO: 892195 - RNA, 24 nt, Human
uggcuaaaccccuuaguagaaacc

SEQ ID NO: 892196 - RNA, 24 nt, Human
uggcuacuugggaggcugaggcag

SEQ ID NO: 892197 - RNA, 24 nt, Human
uggcucaugccuguaauccuagca

SEQ ID NO: 892198 - RNA, 24 nt, Human
ugggacgccgaggcagguggauca

SEQ ID NO: 892199 - RNA, 19 nt, Human
ugggaggcugaggcaggag

SEQ ID NO: 892200 - RNA, 23 nt, Human
ugggaggcugaggcaggagaauc

SEQ ID NO: 892201 - RNA, 18 nt, Human
ugggagggggggaggcug

SEQ ID NO: 892202 - RNA, 18 nt, Human
ugggagguggaggcugca

SEQ ID NO: 892203 - RNA, 24 nt, Human
ugggagguggaggcugcagugagc

SEQ ID NO: 892204 - RNA, 18 nt, Human
ugggauggggccaaagaa

SEQ ID NO: 892205 - RNA, 25 nt, Human
ugggauggggccaaagaauuuacau

SEQ ID NO: 892206 - RNA, 25 nt, Human
uggggccaaagaauuuacauuucua

SEQ ID NO: 892207 - RNA, 21 nt, Human
ugguaaggagcuggaauagag

SEQ ID NO: 892208 - RNA, 21 nt, Human
ugguagugagaagcaggcauc

SEQ ID NO: 892209 - RNA, 22 nt, Human
ugguggcucaugccuguaaucc

SEQ ID NO: 892210 - RNA, 22 nt, Human
uguaaacaaaaccaacaccaca

SEQ ID NO: 892211 - RNA, 18 nt, Human
uguaaacagugggaagaa

SEQ ID NO: 892212 - RNA, 19 nt, Human
uguauguaugugugugugu

SEQ ID NO: 892213 - RNA, 23 nt, Human
uguauguauguguguguguguaa

SEQ ID NO: 892214 - RNA, 22 nt, Human
ugucaucgcccggacagccgcc

SEQ ID NO: 892215 - RNA, 21 nt, Human
ugucugaaauuucaaccaacc

SEQ ID NO: 892216 - RNA, 21 nt, Human
ugugcguguauguaugugugu

SEQ ID NO: 892217 - RNA, 20 nt, Human
ugugguagaacaucagacaa

SEQ ID NO: 892218 - RNA, 25 nt, Human
ugugguagaaugcuuuggguacagg

SEQ ID NO: 892219 - RNA, 20 nt, Human
uguggucugcugguaaagua

SEQ ID NO: 892220 - RNA, 19 nt, Human
ugugugcguguauguaugu

SEQ ID NO: 892221 - RNA, 20 nt, Human
ugugugcguguauguaugug

SEQ ID NO: 892222 - RNA, 25 nt, Human
ugugugcguguauguaugugugugu

SEQ ID NO: 892223 - RNA, 20 nt, Human
uguguguguguagacguugu

SEQ ID NO: 892224 - RNA, 19 nt, Human
uguguguguguguagacgu

SEQ ID NO: 892225 - RNA, 26 nt, Human
uguuucuuuuuuuuuuuuuuuccuuu

SEQ ID NO: 892226 - RNA, 24 nt, Human
uuaaaauaaacauagaacauugca

SEQ ID NO: 892227 - RNA, 19 nt, Human
uuacagauaauuauuuuuc

SEQ ID NO: 892228 - RNA, 20 nt, Human
uuacccucucccaaagaaac

SEQ ID NO: 892229 - RNA, 20 nt, Human
uuacuggacacagaagucug

SEQ ID NO: 892230 - RNA, 24 nt, Human
uuagaccggaugugguggcucaug

SEQ ID NO: 892231 - RNA, 24 nt, Human
uuagaucaaguucacuggaaucag

SEQ ID NO: 892232 - RNA, 23 nt, Human
uuauauacauggcacaaaauaua

SEQ ID NO: 892233 - RNA, 20 nt, Human
uuauugaacaagaauauggu

SEQ ID NO: 892234 - RNA, 19 nt, Human
uucaaugccucucaaucag

SEQ ID NO: 892235 - RNA, 25 nt, Human
uucaucagcuaaaauaauauaauaa

SEQ ID NO: 892236 - RNA, 22 nt, Human
uuccugaaagagaaaguaaaaa

SEQ ID NO: 892237 - RNA, 22 nt, Human
uuccugagccgggaaagggccc

SEQ ID NO: 892238 - RNA, 31 nt, Human
uucuguuucuuuuuuuuuuuuuuuccuuuuu

SEQ ID NO: 892239 - RNA, 20 nt, Human
uucuucuauaauaaagcccu

SEQ ID NO: 892240 - RNA, 20 nt, Human
uucuuggcuucuuuggaaug

SEQ ID NO: 892241 - RNA, 21 nt, Human
uugaaccugggagguggaggc

SEQ ID NO: 892242 - RNA, 20 nt, Human
uugcacauacuacauaugua

SEQ ID NO: 892243 - RNA, 22 nt, Human
uugcuggcucaccugagucucu

SEQ ID NO: 892244 - RNA, 24 nt, Human
uugggaggcugaggcaggagaauc

SEQ ID NO: 892245 - RNA, 25 nt, Human
uuucuuuuuuuuuuuuuuuccuuuu

SEQ ID NO: 892246 - RNA, 22 nt, Human
uuugauacuauuuuuccuaggu

SEQ ID NO: 892247 - RNA, 19 nt, Human
uuugcaguccucagugcca

SEQ ID NO: 892248 - RNA, 22 nt, Human
uuugcauagcaguguguacaaa

SEQ ID NO: 892249 - RNA, 18 nt, Human
uuugcuggcucaccugag

SEQ ID NO: 892250 - RNA, 21 nt, Human
uuuguaaacagugggaagaag

SEQ ID NO: 892251 - RNA, 19 nt, Human
uuuguucugaggguugguc

SEQ ID NO: 892252 - RNA, 22 nt, Human
uuuuauaaguguaucaucugcc

SEQ ID NO: 892253 - RNA, 18 nt, Human
uuuucuuuuuucuguuuc

SEQ ID NO: 892254 - RNA, 20 nt, Human
uuuugcucuugcuuuucugu

SEQ ID NO: 892255 - RNA, 18 nt, Human
aaacugcagcaguuaugg

SEQ ID NO: 892256 - RNA, 26 nt, Human
aagaagcccuguccaccuggaaagcc

SEQ ID NO: 892257 - RNA, 24 nt, Human
aaguaccaaaaccugcaacaggcu

SEQ ID NO: 892258 - RNA, 18 nt, Human
accagaagagcacauagc

SEQ ID NO: 892259 - RNA, 20 nt, Human
acugaaacuucccuucccca

SEQ ID NO: 892260 - RNA, 24 nt, Human
acugaaacuucccuuccccagugg

SEQ ID NO: 892261 - RNA, 18 nt, Human
acugagaaaacaccugca

SEQ ID NO: 892262 - RNA, 25 nt, Human
agagcaaaaaguuacauuucuaaag

SEQ ID NO: 892263 - RNA, 24 nt, Human
agauggacaccucucaggguucug

SEQ ID NO: 892264 - RNA, 22 nt, Human
agcaagaagauggacaccucuc

SEQ ID NO: 892265 - RNA, 23 nt, Human
agcagaaggggauggugggaggg

SEQ ID NO: 892266 - RNA, 26 nt, Human
agccagcggccagcggaagugccgcg

SEQ ID NO: 892267 - RNA, 20 nt, Human
agccugggcccaaacugcag

SEQ ID NO: 892268 - RNA, 23 nt, Human
aggcaaacaggcuucacccagga

SEQ ID NO: 892269 - RNA, 21 nt, Human
aggcucuggccacagcagucc

SEQ ID NO: 892270 - RNA, 23 nt, Human
aguuauggcuccggcuuccagau

SEQ ID NO: 892271 - RNA, 23 nt, Human
auuugcagaggggagugagucug

SEQ ID NO: 892272 - RNA, 21 nt, Human
caaaaccccucacugaggacu

SEQ ID NO: 892273 - RNA, 19 nt, Human
caaaaccugcaacaggcuc

SEQ ID NO: 892274 - RNA, 21 nt, Human
caacagcaagaagauggacac

SEQ ID NO: 892275 - RNA, 20 nt, Human
caagagaggcaaacaggcuu

SEQ ID NO: 892276 - RNA, 21 nt, Human
cacagcaccaucuucacccuc

SEQ ID NO: 892277 - RNA, 25 nt, Human
cacuucaccccucaggcccuuucca

SEQ ID NO: 892278 - RNA, 23 nt, Human
cagaauaaacugcuuacuggaag

SEQ ID NO: 892279 - RNA, 21 nt, Human
cagcacagcaccaucuucacc

SEQ ID NO: 892280 - RNA, 18 nt, Human
cagcgagccagcggccag

SEQ ID NO: 892281 - RNA, 21 nt, Human
caggcucauggaacagagccu

SEQ ID NO: 892282 - RNA, 20 nt, Human
cagucccuagggcaccagaa

SEQ ID NO: 892283 - RNA, 21 nt, Human
cauccccuuuccucagcacag

SEQ ID NO: 892284 - RNA, 22 nt, Human
cauggaacagagccuagggauc

SEQ ID NO: 892285 - RNA, 27 nt, Human
cauuuugcccuuucagccagcucccuc

SEQ ID NO: 892286 - RNA, 19 nt, Human
ccaaacuccccaaaacccc

SEQ ID NO: 892287 - RNA, 25 nt, Human
ccaaacuccccaaaaccccucacug

SEQ ID NO: 892288 - RNA, 21 nt, Human
ccagaagagcacauagccugg

SEQ ID NO: 892289 - RNA, 26 nt, Human
cccaaaaccccucacugaggacuguc

SEQ ID NO: 892290 - RNA, 20 nt, Human
ccccaaacuccccaaaaccc

SEQ ID NO: 892291 - RNA, 21 nt, Human
ccccaaacuccccaaaacccc

SEQ ID NO: 892292 - RNA, 22 nt, Human
ccccaguggcucaguucagagc

SEQ ID NO: 892293 - RNA, 25 nt, Human
cccccugcgcucccgccgccgccuc

SEQ ID NO: 892294 - RNA, 23 nt, Human
ccccugcgcucccgccgccgccu

SEQ ID NO: 892295 - RNA, 22 nt, Human
ccccugcugcagagcuggucug

SEQ ID NO: 892296 - RNA, 19 nt, Human
cccgccgccgccuccagga

SEQ ID NO: 892297 - RNA, 19 nt, Human
ccgcgcgcccccugcgcuc

SEQ ID NO: 892298 - RNA, 24 nt, Human
ccuacaccgcuugugcuuuucuca

SEQ ID NO: 892299 - RNA, 25 nt, Human
ccuccaggagcggccagcgagccag

SEQ ID NO: 892300 - RNA, 21 nt, Human
ccugcaacaggcucauggaac

SEQ ID NO: 892301 - RNA, 19 nt, Human
ccuuuccucagcacagcac

SEQ ID NO: 892302 - RNA, 23 nt, Human
cucagcacagcaccaucuucacc

SEQ ID NO: 892303 - RNA, 22 nt, Human
cuccccaaaaccccucacugag

SEQ ID NO: 892304 - RNA, 23 nt, Human
cucuugaccccaaacuccccaaa

SEQ ID NO: 892305 - RNA, 22 nt, Human
cugcagcaguuauggcuccggc

SEQ ID NO: 892306 - RNA, 22 nt, Human
cugcgcucccgccgccgccucc

SEQ ID NO: 892307 - RNA, 23 nt, Human
cugggcuccccaauccccugcug

SEQ ID NO: 892308 - RNA, 22 nt, Human
cuguacuggcuggccccaggcu

SEQ ID NO: 892309 - RNA, 18 nt, Human
gaaagcagcauuggagcc

SEQ ID NO: 892310 - RNA, 20 nt, Human
gaagcccuguccaccuggaa

SEQ ID NO: 892311 - RNA, 23 nt, Human
gaccccaaacuccccaaaacccc

SEQ ID NO: 892312 - RNA, 24 nt, Human
gaguaacuggaaccuaccuaugcc

SEQ ID NO: 892313 - RNA, 24 nt, Human
gcagagcuggucugugauacugag

SEQ ID NO: 892314 - RNA, 21 nt, Human
gccuccugggcuccccaaucc

SEQ ID NO: 892315 - RNA, 20 nt, Human
gcugccuccugggcucccca

SEQ ID NO: 892316 - RNA, 23 nt, Human
ggaaagcagcauuggagccuaca

SEQ ID NO: 892317 - RNA, 27 nt, Human
ggaggugguggugcugggcagggcucu

SEQ ID NO: 892318 - RNA, 21 nt, Human
ggauaccuggggcuuuggggg

SEQ ID NO: 892319 - RNA, 19 nt, Human
ggcagggcucugcaucccc

SEQ ID NO: 892320 - RNA, 18 nt, Human
ggccgcgcgcccccugcg

SEQ ID NO: 892321 - RNA, 18 nt, Human
ggcuccccaauccccugc

SEQ ID NO: 892322 - RNA, 20 nt, Human
gggaaugcgaguccccgggc

SEQ ID NO: 892323 - RNA, 18 nt, Human
gggcccaaacugcagcag

SEQ ID NO: 892324 - RNA, 24 nt, Human
ggggaaccggggaaugcgaguccc

SEQ ID NO: 892325 - RNA, 19 nt, Human
ggggauggugggagggucc

SEQ ID NO: 892326 - RNA, 19 nt, Human
gggggucuuccaagaagcc

SEQ ID NO: 892327 - RNA, 21 nt, Human
gggugacuuaaggcaaaaggg

SEQ ID NO: 892328 - RNA, 18 nt, Human
uaagaaaugcagguauuu

SEQ ID NO: 892329 - RNA, 22 nt, Human
uaaggcaaaagggaaggcugcc

SEQ ID NO: 892330 - RNA, 18 nt, Human
uacccccggggcucagaa

SEQ ID NO: 892331 - RNA, 22 nt, Human
uagccugggcccaaacugcagc

SEQ ID NO: 892332 - RNA, 25 nt, Human
uauuucagucucuucucacucagga

SEQ ID NO: 892333 - RNA, 19 nt, Human
ucacuucaccccucaggcc

SEQ ID NO: 892334 - RNA, 22 nt, Human
ucagcacagcaccaucuucacc

SEQ ID NO: 892335 - RNA, 23 nt, Human
uccagacuggcucucuuccacuu

SEQ ID NO: 892336 - RNA, 18 nt, Human
uccaggagcauaggaggu

SEQ ID NO: 892337 - RNA, 21 nt, Human
ucccgccgccgccuccaggag

SEQ ID NO: 892338 - RNA, 21 nt, Human
ucuaaaguaccaaaaccugca

SEQ ID NO: 892339 - RNA, 23 nt, Human
ucucaggguucugcuugcuccua

SEQ ID NO: 892340 - RNA, 22 nt, Human
ucuuccaagaagcccuguccac

SEQ ID NO: 892341 - RNA, 25 nt, Human
ugaccccaaacuccccaaaaccccu

SEQ ID NO: 892342 - RNA, 20 nt, Human
ugagucuggaagguggcaga

SEQ ID NO: 892343 - RNA, 21 nt, Human
ugauacugagaaaacaccugc

SEQ ID NO: 892344 - RNA, 25 nt, Human
ugcaacaggcucauggaacagagcc

SEQ ID NO: 892345 - RNA, 25 nt, Human
ugccuccugggcuccccaauccccu

SEQ ID NO: 892346 - RNA, 20 nt, Human
uggaacagagccuagggauc

SEQ ID NO: 892347 - RNA, 21 nt, Human
uggagagguggagcccugagg

SEQ ID NO: 892348 - RNA, 19 nt, Human
uggcagagcacagcuaggg

SEQ ID NO: 892349 - RNA, 24 nt, Human
ugggaagaguaacuggaaccuacc

SEQ ID NO: 892350 - RNA, 22 nt, Human
ugggggucuuccaagaagcccu

SEQ ID NO: 892351 - RNA, 23 nt, Human
ugggguggagggggaaccgggga

SEQ ID NO: 892352 - RNA, 21 nt, Human
ugugauacugagaaaacaccu

SEQ ID NO: 892353 - RNA, 24 nt, Human
ugugugaagucuuuaaacaacggu

SEQ ID NO: 892354 - RNA, 22 nt, Human
uucaggcugacccaacaugggu

SEQ ID NO: 892355 - RNA, 21 nt, Human
uucuaaaguaccaaaaccugc

SEQ ID NO: 892356 - RNA, 20 nt, Human
uugcagaggggagugagucu

SEQ ID NO: 892357 - RNA, 25 nt, Human
acacuaauggaacuaucaaugcacc

SEQ ID NO: 892358 - RNA, 25 nt, Human
agaaggaaguugcuggaagccuggc

SEQ ID NO: 892359 - RNA, 20 nt, Human
agaggcagggagagccaaua

SEQ ID NO: 892360 - RNA, 24 nt, Human
aggaauagacaagggauuucugac

SEQ ID NO: 892361 - RNA, 22 nt, Human
aggaggacaaauaacugggaca

SEQ ID NO: 892362 - RNA, 22 nt, Human
caaacagaguccagagcucaga

SEQ ID NO: 892363 - RNA, 18 nt, Human
caacacaggacaguuguc

SEQ ID NO: 892364 - RNA, 19 nt, Human
caauaggcugcugaaggcc

SEQ ID NO: 892365 - RNA, 24 nt, Human
cacacucaugcuuuggauguguca

SEQ ID NO: 892366 - RNA, 20 nt, Human
ccaaauaaagcccaauaguc

SEQ ID NO: 892367 - RNA, 21 nt, Human
ccaggcagaggggaacgggca

SEQ ID NO: 892368 - RNA, 20 nt, Human
cccgugccgcagaaccuaga

SEQ ID NO: 892369 - RNA, 22 nt, Human
ccuagggaaagcaacacaggac

SEQ ID NO: 892370 - RNA, 19 nt, Human
ccuccaggcuggaggggug

SEQ ID NO: 892371 - RNA, 21 nt, Human
cuucuaggucuagaacugauc

SEQ ID NO: 892372 - RNA, 24 nt, Human
gaaguugcuggaagccuggccucc

SEQ ID NO: 892373 - RNA, 18 nt, Human
gaucacauugaaaaugcc

SEQ ID NO: 892374 - RNA, 19 nt, Human
ggacaacugaggcuaugac

SEQ ID NO: 892375 - RNA, 23 nt, Human
ggauuucugacacacucaugcuu

SEQ ID NO: 892376 - RNA, 18 nt, Human
guaaagcagccugacccc

SEQ ID NO: 892377 - RNA, 20 nt, Human
uaaagcaagcaaugucuguc

SEQ ID NO: 892378 - RNA, 21 nt, Human
uaauuuaauuaagugcuuguu

SEQ ID NO: 892379 - RNA, 21 nt, Human
uagaauucuguaaagcagccu

SEQ ID NO: 892380 - RNA, 19 nt, Human
ucacagugaugguguaaag

SEQ ID NO: 892381 - RNA, 22 nt, Human
ucugcuggcaaauaagucucca

SEQ ID NO: 892382 - RNA, 18 nt, Human
ugagaagugccagggacu

SEQ ID NO: 892383 - RNA, 26 nt, Human
ugauugcauaccuagugaccauacaa

SEQ ID NO: 892384 - RNA, 18 nt, Human
ugcuuuggaugugucagu

SEQ ID NO: 892385 - RNA, 20 nt, Human
uggaauauucaaacagaguc

SEQ ID NO: 892386 - RNA, 19 nt, Human
uggcaaauaagucuccacu

SEQ ID NO: 892387 - RNA, 21 nt, Human
ugggacaacugaggcuaugac

SEQ ID NO: 892388 - RNA, 19 nt, Human
ugguuuguccaaauaaagc

SEQ ID NO: 892389 - RNA, 25 nt, Human
uucagacuaaaaaauucauuugugc

SEQ ID NO: 892390 - RNA, 19 nt, Human
uugcucuagggcagaagga

SEQ ID NO: 892391 - RNA, 20 nt, Human
uugcucucuauauuuccuac

SEQ ID NO: 892392 - RNA, 24 nt, Human
uuuuuuuuuuuuuuuuuuuuaaag

SEQ ID NO: 892393 - RNA, 22 nt, Human
aagcuucacugguuugagugcu

SEQ ID NO: 892394 - RNA, 22 nt, Human
aaggggccaagacacaugagca

SEQ ID NO: 892395 - RNA, 23 nt, Human
aaggggccaagacacaugagcac

SEQ ID NO: 892396 - RNA, 19 nt, Human
aagugauauuugcuuuucu

SEQ ID NO: 892397 - RNA, 23 nt, Human
accauaaucgauacaagaugcag

SEQ ID NO: 892398 - RNA, 24 nt, Human
acucugucccagagagcccacagc

SEQ ID NO: 892399 - RNA, 22 nt, Human
agagcccccccccccccaccuu

SEQ ID NO: 892400 - RNA, 21 nt, Human
agcaaggggccaagacacaug

SEQ ID NO: 892401 - RNA, 23 nt, Human
agccagaggcuggcagaggccug

SEQ ID NO: 892402 - RNA, 24 nt, Human
agcugggcucucaguccuggaacc

SEQ ID NO: 892403 - RNA, 21 nt, Human
augcaggcccugcucccgcug

SEQ ID NO: 892404 - RNA, 23 nt, Human
caaggggccaagacacaugagca

SEQ ID NO: 892405 - RNA, 22 nt, Human
cacaggcgcuccacucuguccc

SEQ ID NO: 892406 - RNA, 19 nt, Human
cacugcgugggcagggaug

SEQ ID NO: 892407 - RNA, 22 nt, Human
cagagcccccccccccccaccu

SEQ ID NO: 892408 - RNA, 21 nt, Human
caggcccugcucccgcuggcc

SEQ ID NO: 892409 - RNA, 23 nt, Human
caugagcacucacugcgugggca

SEQ ID NO: 892410 - RNA, 20 nt, Human
ccaagacacaugagcacuca

SEQ ID NO: 892411 - RNA, 19 nt, Human
ccaagcucuggcaggccug

SEQ ID NO: 892412 - RNA, 23 nt, Human
ccaauucauuccuuaaaacaccu

SEQ ID NO: 892413 - RNA, 19 nt, Human
ccagagagcccacagccaa

SEQ ID NO: 892414 - RNA, 24 nt, Human
cccacccccuuccacccccucgga

SEQ ID NO: 892415 - RNA, 24 nt, Human
cccagagcccccccccccccaccu

SEQ ID NO: 892416 - RNA, 20 nt, Human
ccccaagccagauccugcca

SEQ ID NO: 892417 - RNA, 18 nt, Human
ccccccccccccaccuuc

SEQ ID NO: 892418 - RNA, 23 nt, Human
ccccccccccccaccuucugucg

SEQ ID NO: 892419 - RNA, 20 nt, Human
cccccccccccccaccuucu

SEQ ID NO: 892420 - RNA, 18 nt, Human
cccccuuccacccccucc

SEQ ID NO: 892421 - RNA, 18 nt, Human
ccccucggaggcaugagg

SEQ ID NO: 892422 - RNA, 23 nt, Human
cccugcucccgcuggcccccugg

SEQ ID NO: 892423 - RNA, 18 nt, Human
cccugggggccaggggca

SEQ ID NO: 892424 - RNA, 21 nt, Human
ccucagagaguguuccucccu

SEQ ID NO: 892425 - RNA, 22 nt, Human
ccuggaaccggagaccaagggc

SEQ ID NO: 892426 - RNA, 24 nt, Human
cgugggcagggaugagggccgggc

SEQ ID NO: 892427 - RNA, 22 nt, Human
cuggggaggugcuggccugugc

SEQ ID NO: 892428 - RNA, 22 nt, Human
cuucacugguuugagugcugcc

SEQ ID NO: 892429 - RNA, 23 nt, Human
cuucccagagccccccccccccc

SEQ ID NO: 892430 - RNA, 24 nt, Human
gagcaggaugguguguccccggcu

SEQ ID NO: 892431 - RNA, 19 nt, Human
gcagccagaggcuggcaga

SEQ ID NO: 892432 - RNA, 21 nt, Human
ggcauggggggcccuggagug

SEQ ID NO: 892433 - RNA, 22 nt, Human
gggcacccuuuauccaguuugc

SEQ ID NO: 892434 - RNA, 25 nt, Human
gggcacccuuuauccaguuugcgag

SEQ ID NO: 892435 - RNA, 20 nt, Human
gggcccuggagugugcccac

SEQ ID NO: 892436 - RNA, 18 nt, Human
gugcagccagaggcuggc

SEQ ID NO: 892437 - RNA, 24 nt, Human
gugcagccagaggcuggcagaggc

SEQ ID NO: 892438 - RNA, 19 nt, Human
uaaauccacaggcgcucca

SEQ ID NO: 892439 - RNA, 25 nt, Human
ucacugcgugggcagggaugagggc

SEQ ID NO: 892440 - RNA, 18 nt, Human
ucagggagccagaggcgg

SEQ ID NO: 892441 - RNA, 25 nt, Human
ucagggagccagaggcgggaggggu

SEQ ID NO: 892442 - RNA, 28 nt, Human
uccaagguagaggaggacgcgugcagga

SEQ ID NO: 892443 - RNA, 19 nt, Human
uccagcccaucagggagcc

SEQ ID NO: 892444 - RNA, 21 nt, Human
ucccagagagcccacagccaa

SEQ ID NO: 892445 - RNA, 21 nt, Human
ucccagagccccccccccccc

SEQ ID NO: 892446 - RNA, 24 nt, Human
ucccagagcccccccccccccacc

SEQ ID NO: 892447 - RNA, 18 nt, Human
ucccucguccccuguccu

SEQ ID NO: 892448 - RNA, 19 nt, Human
ucccugggggccaggggca

SEQ ID NO: 892449 - RNA, 19 nt, Human
ucucagaaccauaaucgau

SEQ ID NO: 892450 - RNA, 24 nt, Human
ucucaguccuggaaccggagacca

SEQ ID NO: 892451 - RNA, 22 nt, Human
ugcaggcccugcucccgcuggc

SEQ ID NO: 892452 - RNA, 19 nt, Human
ugcccacccccuuccaccc

SEQ ID NO: 892453 - RNA, 18 nt, Human
ugccucccacagggacac

SEQ ID NO: 892454 - RNA, 18 nt, Human
ugccucccacagggacac

SEQ ID NO: 892455 - RNA, 21 nt, Human
ugccugguagauucuaacugc

SEQ ID NO: 892456 - RNA, 23 nt, Human
ugcuggccugugcuucccagagc

SEQ ID NO: 892457 - RNA, 25 nt, Human
ugcuucccagagccccccccccccc

SEQ ID NO: 892458 - RNA, 26 nt, Human
ugcuucccagagccccccccccccca

SEQ ID NO: 892459 - RNA, 22 nt, Human
ugcuucuuuuaaugcagccaaa

SEQ ID NO: 892460 - RNA, 19 nt, Human
ugggcagaggcagcugggc

SEQ ID NO: 892461 - RNA, 18 nt, Human
uggggaagggugggcaga

SEQ ID NO: 892462 - RNA, 19 nt, Human
ugggggccaggggcauggg

SEQ ID NO: 892463 - RNA, 26 nt, Human
uggggggcccuggagugucgguagac

SEQ ID NO: 892464 - RNA, 20 nt, Human
ugucccagagagcccacagc

SEQ ID NO: 892465 - RNA, 21 nt, Human
ugucggggucucaugcaggcc

SEQ ID NO: 892466 - RNA, 24 nt, Human
ugugccugguagauucuaacugcu

SEQ ID NO: 892467 - RNA, 25 nt, Human
ugugccugguagauucuaacugcuu

SEQ ID NO: 892468 - RNA, 20 nt, Human
uuccuuaaaacaccugggcu

SEQ ID NO: 892469 - RNA, 25 nt, Human
uugggagccucuuccagucccuggg

SEQ ID NO: 892470 - RNA, 23 nt, Human
uuucccaagcuucacugguuuga

SEQ ID NO: 892471 - RNA, 20 nt, Human
uuucucagcagaacgacugg

SEQ ID NO: 892472 - RNA, 20 nt, Human
aagcaugcacugaaccaaca

SEQ ID NO: 892473 - RNA, 20 nt, Human
acagggugguaacugccaac

SEQ ID NO: 892474 - RNA, 20 nt, Human
cacagggugguaacugccaa

SEQ ID NO: 892475 - RNA, 18 nt, Human
cacugaaccaacagacua

SEQ ID NO: 892476 - RNA, 22 nt, Human
cagggugguaacugccaacuaa

SEQ ID NO: 892477 - RNA, 24 nt, Human
ccaacagacuacuucaguaagucc

SEQ ID NO: 892478 - RNA, 20 nt, Human
ccgccgccgccccucgcucc

SEQ ID NO: 892479 - RNA, 20 nt, Human
guccuugauuauugccagcu

SEQ ID NO: 892480 - RNA, 23 nt, Human
ugauggauagcuagcaaaagaaa

SEQ ID NO: 892481 - RNA, 21 nt, Human
ugccagcuuuucuauaauguu

SEQ ID NO: 892482 - RNA, 20 nt, Human
aacagauuauauucaucuuc

SEQ ID NO: 892483 - RNA, 20 nt, Human
aacagcuugcaugcaacccc

SEQ ID NO: 892484 - RNA, 25 nt, Human
aacccuuuggcuuuuuucagagaaa

SEQ ID NO: 892485 - RNA, 19 nt, Human
aacugugacguuaaaucuc

SEQ ID NO: 892486 - RNA, 22 nt, Human
aagugcagaguauacucaaaac

SEQ ID NO: 892487 - RNA, 24 nt, Human
aaugaaccaggacuauuugaaugg

SEQ ID NO: 892488 - RNA, 21 nt, Human
acccaggccaauaaaauuuuc

SEQ ID NO: 892489 - RNA, 20 nt, Human
agaaaaaaaaaagcugucau

SEQ ID NO: 892490 - RNA, 19 nt, Human
agaacaauucauguccaca

SEQ ID NO: 892491 - RNA, 27 nt, Human
agcacuuaucuuuucuuuuuuuuauua

SEQ ID NO: 892492 - RNA, 18 nt, Human
agcaggaugaguaacagg

SEQ ID NO: 892493 - RNA, 24 nt, Human
agccgcccaugaccgcgagcugcc

SEQ ID NO: 892494 - RNA, 23 nt, Human
agggucugggaaaugccugucag

SEQ ID NO: 892495 - RNA, 21 nt, Human
auaaaauuuucuugccucauc

SEQ ID NO: 892496 - RNA, 22 nt, Human
auggaaagagaaaaaaaaaagc

SEQ ID NO: 892497 - RNA, 21 nt, Human
caaaauaguuccaggcgccaa

SEQ ID NO: 892498 - RNA, 18 nt, Human
caaacuuccuucgagagg

SEQ ID NO: 892499 - RNA, 20 nt, Human
caaccccuaaguguaccccu

SEQ ID NO: 892500 - RNA, 25 nt, Human
caccccaaguaugccauugucuuug

SEQ ID NO: 892501 - RNA, 21 nt, Human
cagagaaagacuucagccaaa

SEQ ID NO: 892502 - RNA, 23 nt, Human
caggaccacaaagggcugagugu

SEQ ID NO: 892503 - RNA, 20 nt, Human
ccacagaucacaccuuccac

SEQ ID NO: 892504 - RNA, 20 nt, Human
ccagacagucccacagauca

SEQ ID NO: 892505 - RNA, 24 nt, Human
cccaggccaauaaaauuuucuugc

SEQ ID NO: 892506 - RNA, 18 nt, Human
ccccuauaacccuuuggc

SEQ ID NO: 892507 - RNA, 18 nt, Human
cccgcugcuagcuccugg

SEQ ID NO: 892508 - RNA, 31 nt, Human
cccuauaacccuuuggcuuuuuucagagaaa

SEQ ID NO: 892509 - RNA, 19 nt, Human
cccuguaugcauuuccucu

SEQ ID NO: 892510 - RNA, 23 nt, Human
ccgcgcccgcugcuagcuccugg

SEQ ID NO: 892511 - RNA, 23 nt, Human
ccuccauuuccgcuuagcuucuc

SEQ ID NO: 892512 - RNA, 18 nt, Human
ccucguggaagcagaagu

SEQ ID NO: 892513 - RNA, 21 nt, Human
ccugcaauacuauucccuccu

SEQ ID NO: 892514 - RNA, 22 nt, Human
ccuuaagagauggugaaguagg

SEQ ID NO: 892515 - RNA, 22 nt, Human
ccuucgagaggcgagagacagg

SEQ ID NO: 892516 - RNA, 20 nt, Human
cgagaggcgagagacaggag

SEQ ID NO: 892517 - RNA, 21 nt, Human
cgagaggcgagagacaggagg

SEQ ID NO: 892518 - RNA, 21 nt, Human
cuaaguguaccccuauaaccc

SEQ ID NO: 892519 - RNA, 19 nt, Human
cucugaaauuaagagcaaa

SEQ ID NO: 892520 - RNA, 23 nt, Human
cuguucuacuucagugcgcacgu

SEQ ID NO: 892521 - RNA, 19 nt, Human
cuucugggaaugaaccagg

SEQ ID NO: 892522 - RNA, 19 nt, Human
cuuucagucuuacccaggc

SEQ ID NO: 892523 - RNA, 23 nt, Human
gaaagacuucagccaaauugucc

SEQ ID NO: 892524 - RNA, 21 nt, Human
gaagaagggcugccacaggua

SEQ ID NO: 892525 - RNA, 18 nt, Human
gaagcagaaguagccgug

SEQ ID NO: 892526 - RNA, 21 nt, Human
gagggucugggaaaugccugu

SEQ ID NO: 892527 - RNA, 19 nt, Human
gcccaugaccgcgagcugc

SEQ ID NO: 892528 - RNA, 19 nt, Human
gccugugcugagcgcggaa

SEQ ID NO: 892529 - RNA, 18 nt, Human
ggacaaaugccgaguccu

SEQ ID NO: 892530 - RNA, 18 nt, Human
ggcaggaccacaaagggc

SEQ ID NO: 892531 - RNA, 18 nt, Human
ggcaugauugccucugug

SEQ ID NO: 892532 - RNA, 25 nt, Human
gugauugcagaaagccacagaguac

SEQ ID NO: 892533 - RNA, 25 nt, Human
uaaaaagccuuaaagugcacaagaa

SEQ ID NO: 892534 - RNA, 24 nt, Human
uaacuuagcuaagcccuuugcaca

SEQ ID NO: 892535 - RNA, 25 nt, Human
uaagcccuuugcacagucuaagccu

SEQ ID NO: 892536 - RNA, 19 nt, Human
uaaguguaccccuauaacc

SEQ ID NO: 892537 - RNA, 23 nt, Human
uacauuugcauucucaaacaaaa

SEQ ID NO: 892538 - RNA, 18 nt, Human
uagaacaauucaugucca

SEQ ID NO: 892539 - RNA, 22 nt, Human
uagcuaagcccuuugcacaguc

SEQ ID NO: 892540 - RNA, 24 nt, Human
uaguagggacugaaguuuuugaug

SEQ ID NO: 892541 - RNA, 24 nt, Human
uaugccauugucuuuguaauucuu

SEQ ID NO: 892542 - RNA, 19 nt, Human
ucacuggaggcaagagggu

SEQ ID NO: 892543 - RNA, 19 nt, Human
ucauucauuuugugcccuu

SEQ ID NO: 892544 - RNA, 19 nt, Human
ucccugcaauacuauuccc

SEQ ID NO: 892545 - RNA, 21 nt, Human
ucccugcaauacuauucccuc

SEQ ID NO: 892546 - RNA, 18 nt, Human
uccucagcucccucucac

SEQ ID NO: 892547 - RNA, 21 nt, Human
uccucagcucccucucacccc

SEQ ID NO: 892548 - RNA, 24 nt, Human
uccuucucacuggaggcaagaggg

SEQ ID NO: 892549 - RNA, 23 nt, Human
ucucuugaaucuauugggcauga

SEQ ID NO: 892550 - RNA, 24 nt, Human
ucugguuuuauuauucaaauuaag

SEQ ID NO: 892551 - RNA, 25 nt, Human
ucuuuauucauuuauuuauuuauuu

SEQ ID NO: 892552 - RNA, 27 nt, Human
ugaaauuaagagcaaacuuccuucgag

SEQ ID NO: 892553 - RNA, 21 nt, Human
ugaauggaaagagaaaaaaaa

SEQ ID NO: 892554 - RNA, 18 nt, Human
ugccacagguacacuggg

SEQ ID NO: 892555 - RNA, 22 nt, Human
ugcccucguccagcuggcugga

SEQ ID NO: 892556 - RNA, 20 nt, Human
uggaaagagaaaaaaaaaag

SEQ ID NO: 892557 - RNA, 20 nt, Human
uggaagcagaaguagccgug

SEQ ID NO: 892558 - RNA, 26 nt, Human
ugggcaugauugccucugugggggcu

SEQ ID NO: 892559 - RNA, 19 nt, Human
ugucugaagaagggcugcc

SEQ ID NO: 892560 - RNA, 23 nt, Human
ugugcugagcgcggaaacugccc

SEQ ID NO: 892561 - RNA, 24 nt, Human
uuagcuucucuugaaucuauuggg

SEQ ID NO: 892562 - RNA, 19 nt, Human
uuaugcuagaacaagcacu

SEQ ID NO: 892563 - RNA, 23 nt, Human
uucucaaacaaaauuaaaaagcc

SEQ ID NO: 892564 - RNA, 20 nt, Human
uugaaucuauugggcaugau

SEQ ID NO: 892565 - RNA, 23 nt, Human
acuacguucuccaacuggaaugg

SEQ ID NO: 892566 - RNA, 21 nt, Human
acuccgaggcccagccccgcg

SEQ ID NO: 892567 - RNA, 19 nt, Human
aguuuugcguggcugagaa

SEQ ID NO: 892568 - RNA, 22 nt, Human
ccacgcauggcucucgaauccc

SEQ ID NO: 892569 - RNA, 22 nt, Human
cccuggcuccacugaaagacuc

SEQ ID NO: 892570 - RNA, 22 nt, Human
ccucacgacaaaccagacccug

SEQ ID NO: 892571 - RNA, 20 nt, Human
cggggcaaacuccgaggccc

SEQ ID NO: 892572 - RNA, 21 nt, Human
gacucacuacguucuccaacu

SEQ ID NO: 892573 - RNA, 25 nt, Human
gcgcagcgcuggggguugcgggccu

SEQ ID NO: 892574 - RNA, 18 nt, Human
gcucugggcugggcgggu

SEQ ID NO: 892575 - RNA, 22 nt, Human
ggcaaacuccgaggcccagccc

SEQ ID NO: 892576 - RNA, 19 nt, Human
gggcaaacuccgaggccca

SEQ ID NO: 892577 - RNA, 24 nt, Human
gggcugggcggguuucucuagcgc

SEQ ID NO: 892578 - RNA, 21 nt, Human
uauuaugacaucuucaaaaga

SEQ ID NO: 892579 - RNA, 26 nt, Human
ucaauaggcauuugcugagcaccugc

SEQ ID NO: 892580 - RNA, 18 nt, Human
ucugaacaucaaagugca

SEQ ID NO: 892581 - RNA, 23 nt, Human
ugacaucuucaaaagacaaucaa

SEQ ID NO: 892582 - RNA, 20 nt, Human
ugagaacaaaguggguuucu

SEQ ID NO: 892583 - RNA, 28 nt, Human
uggguuucugaacaucaaagugcaauuc

SEQ ID NO: 892584 - RNA, 21 nt, Human
aaaccuggaacagggaaggug

SEQ ID NO: 892585 - RNA, 19 nt, Human
aaccuggaacagggaaggu

SEQ ID NO: 892586 - RNA, 20 nt, Human
aagcagccugucuugcacau

SEQ ID NO: 892587 - RNA, 21 nt, Human
aagccagacccggccugaaaa

SEQ ID NO: 892588 - RNA, 18 nt, Human
aagcugcaacacaucugg

SEQ ID NO: 892589 - RNA, 23 nt, Human
acaacgggaacuuggauggauac

SEQ ID NO: 892590 - RNA, 24 nt, Human
acauuaagaauaacacccgaaugc

SEQ ID NO: 892591 - RNA, 20 nt, Human
agaaaaaagcgcuacugggg

SEQ ID NO: 892592 - RNA, 20 nt, Human
auggaagacaucucacucca

SEQ ID NO: 892593 - RNA, 20 nt, Human
augucaggaaagcugcaaca

SEQ ID NO: 892594 - RNA, 21 nt, Human
caggaaagcugcaacacaucu

SEQ ID NO: 892595 - RNA, 18 nt, Human
caggugccaaaacauucc

SEQ ID NO: 892596 - RNA, 22 nt, Human
ccaacucucaccuuuggaauua

SEQ ID NO: 892597 - RNA, 23 nt, Human
ccaagccagacccggccugaaaa

SEQ ID NO: 892598 - RNA, 21 nt, Human
ccagacccggccugaaaacag

SEQ ID NO: 892599 - RNA, 21 nt, Human
ccagcuccgccgaagcgacgg

SEQ ID NO: 892600 - RNA, 22 nt, Human
ccccgcuguccuggcuggucag

SEQ ID NO: 892601 - RNA, 21 nt, Human
cccuaaacccaaacaguuccc

SEQ ID NO: 892602 - RNA, 26 nt, Human
ccgaagcgacggcgccuggguccccu

SEQ ID NO: 892603 - RNA, 18 nt, Human
ccuggguccccuggagcu

SEQ ID NO: 892604 - RNA, 18 nt, Human
cgacggcgccuggguccc

SEQ ID NO: 892605 - RNA, 19 nt, Human
cgccuggguccccuggagc

SEQ ID NO: 892606 - RNA, 21 nt, Human
cgccuggguccccuggagcuc

SEQ ID NO: 892607 - RNA, 27 nt, Human
cggcgccuggguccccuggagcucccu

SEQ ID NO: 892608 - RNA, 26 nt, Human
cucccuaccucgcgcagaauuguucg

SEQ ID NO: 892609 - RNA, 24 nt, Human
gaagacaucucacuccaacucuca

SEQ ID NO: 892610 - RNA, 18 nt, Human
gacgccuuccagcuuccc

SEQ ID NO: 892611 - RNA, 19 nt, Human
gagcuccccggccauuucc

SEQ ID NO: 892612 - RNA, 18 nt, Human
gccagacccggccugaaa

SEQ ID NO: 892613 - RNA, 20 nt, Human
gccuggguccccuggagcuc

SEQ ID NO: 892614 - RNA, 20 nt, Human
uaagaugcccuaaacccaaa

SEQ ID NO: 892615 - RNA, 21 nt, Human
uaagaugcccuaaacccaaac

SEQ ID NO: 892616 - RNA, 18 nt, Human
uaucaggugccaaaacau

SEQ ID NO: 892617 - RNA, 24 nt, Human
uccacauucaccaacuuccccacu

SEQ ID NO: 892618 - RNA, 22 nt, Human
uccccuggagcuccccggccau

SEQ ID NO: 892619 - RNA, 20 nt, Human
uccgagggcggcccggcaag

SEQ ID NO: 892620 - RNA, 20 nt, Human
ucuaagaacucuggauacaa

SEQ ID NO: 892621 - RNA, 19 nt, Human
ucuaagaugcccuaaaccc

SEQ ID NO: 892622 - RNA, 21 nt, Human
ugcccuaaacccaaacaguuc

SEQ ID NO: 892623 - RNA, 22 nt, Human
uggaauuaaauaaaccuggaac

SEQ ID NO: 892624 - RNA, 23 nt, Human
uggauacaacgggaacuuggaug

SEQ ID NO: 892625 - RNA, 23 nt, Human
uggcggacaggcaggagagcugg

SEQ ID NO: 892626 - RNA, 18 nt, Human
ugggaaaggagaacgacg

SEQ ID NO: 892627 - RNA, 19 nt, Human
uuccaucaaucaacucuaa

SEQ ID NO: 892628 - RNA, 20 nt, Human
uuuuaagaagcuuugacaga

SEQ ID NO: 892629 - RNA, 23 nt, Human
uuuuuuuuuuuuuuuuuuacuga

SEQ ID NO: 892630 - RNA, 18 nt, Human
aacagguuuuucucacau

SEQ ID NO: 892631 - RNA, 18 nt, Human
aagaaccagagggaaaca

SEQ ID NO: 892632 - RNA, 18 nt, Human
aaggaagaauugaguugc

SEQ ID NO: 892633 - RNA, 20 nt, Human
aagugaccuugcagaugaag

SEQ ID NO: 892634 - RNA, 20 nt, Human
acugaacucccccgagaaaa

SEQ ID NO: 892635 - RNA, 18 nt, Human
agacagagcacccccaug

SEQ ID NO: 892636 - RNA, 24 nt, Human
agagcacccccaugccaggagcuc

SEQ ID NO: 892637 - RNA, 22 nt, Human
agagggaaacagguuuuucuca

SEQ ID NO: 892638 - RNA, 20 nt, Human
aggcaggcagaucaggaaug

SEQ ID NO: 892639 - RNA, 24 nt, Human
aggccaaggcaggcagaucaggaa

SEQ ID NO: 892640 - RNA, 21 nt, Human
aucucuuggaaaggggcaggc

SEQ ID NO: 892641 - RNA, 19 nt, Human
augccuguaaucccagcac

SEQ ID NO: 892642 - RNA, 21 nt, Human
caacacuuggaaugcacagga

SEQ ID NO: 892643 - RNA, 18 nt, Human
caagacauacugcaguac

SEQ ID NO: 892644 - RNA, 18 nt, Human
caaugagaacccuuacuu

SEQ ID NO: 892645 - RNA, 21 nt, Human
cagcacuuuggaaggccaagg

SEQ ID NO: 892646 - RNA, 24 nt, Human
cagcacuuuggaaggccaaggcag

SEQ ID NO: 892647 - RNA, 21 nt, Human
caggcccucagauggggacac

SEQ ID NO: 892648 - RNA, 23 nt, Human
caggccgggcgcgguggcucaug

SEQ ID NO: 892649 - RNA, 19 nt, Human
caggugagaacagagggug

SEQ ID NO: 892650 - RNA, 24 nt, Human
caugccuguaaucccagcacuuug

SEQ ID NO: 892651 - RNA, 24 nt, Human
ccaaaccaagucugggugggcaca

SEQ ID NO: 892652 - RNA, 23 nt, Human
ccaggaagaaccagagggaaaca

SEQ ID NO: 892653 - RNA, 25 nt, Human
ccccugagaauccugaaucugugaa

SEQ ID NO: 892654 - RNA, 25 nt, Human
ccucuuaaaaggcaacaaugagaac

SEQ ID NO: 892655 - RNA, 21 nt, Human
ccuuacuuggacccacucccc

SEQ ID NO: 892656 - RNA, 24 nt, Human
cucaugccuguaaucccagcacuu

SEQ ID NO: 892657 - RNA, 24 nt, Human
cugugaauguggcccagacagaac

SEQ ID NO: 892658 - RNA, 24 nt, Human
cuuacugcauaccaggcccucaga

SEQ ID NO: 892659 - RNA, 21 nt, Human
cuuacuuggacccacucccca

SEQ ID NO: 892660 - RNA, 19 nt, Human
gcaggcagaucaggaaugu

SEQ ID NO: 892661 - RNA, 19 nt, Human
ggaaauacacuucagccuc

SEQ ID NO: 892662 - RNA, 18 nt, Human
ggaagaaccagagggaaa

SEQ ID NO: 892663 - RNA, 21 nt, Human
ggcaggccgggcgcgguggcu

SEQ ID NO: 892664 - RNA, 23 nt, Human
ggccgggcgcgguggcucaugcc

SEQ ID NO: 892665 - RNA, 24 nt, Human
gggcgcgguggcucaugccuguaa

SEQ ID NO: 892666 - RNA, 20 nt, Human
ggggcaggccgggcgcggug

SEQ ID NO: 892667 - RNA, 20 nt, Human
ggguagaaggaagaauugag

SEQ ID NO: 892668 - RNA, 23 nt, Human
gguggcucaugccuguaauccca

SEQ ID NO: 892669 - RNA, 24 nt, Human
gguggcucaugccuguaaucccag

SEQ ID NO: 892670 - RNA, 21 nt, Human
gugaauguggcccagacagaa

SEQ ID NO: 892671 - RNA, 22 nt, Human
gugcaaagccaggaagaaccag

SEQ ID NO: 892672 - RNA, 23 nt, Human
guggcccaaaccaagucugggug

SEQ ID NO: 892673 - RNA, 22 nt, Human
ucaugccuguaaucccagcacu

SEQ ID NO: 892674 - RNA, 23 nt, Human
ucaugcugaaguaacacgguaag

SEQ ID NO: 892675 - RNA, 21 nt, Human
ucugguggcccaaaccaaguc

SEQ ID NO: 892676 - RNA, 18 nt, Human
ugagaacagaggguggcc

SEQ ID NO: 892677 - RNA, 22 nt, Human
ugagaacagaggguggccacca

SEQ ID NO: 892678 - RNA, 20 nt, Human
ugagaacccuuacuuggacc

SEQ ID NO: 892679 - RNA, 22 nt, Human
ugagaacccuuacuuggaccca

SEQ ID NO: 892680 - RNA, 18 nt, Human
ugagccacacacaugucc

SEQ ID NO: 892681 - RNA, 18 nt, Human
ugcaaagccaggaagaac

SEQ ID NO: 892682 - RNA, 22 nt, Human
ugcagccaggcgaagacagagc

SEQ ID NO: 892683 - RNA, 25 nt, Human
ugcagccaggcgaagacagagcacc

SEQ ID NO: 892684 - RNA, 18 nt, Human
ugccuguaaucccagcac

SEQ ID NO: 892685 - RNA, 23 nt, Human
ugccuguaaucccagcacuuugg

SEQ ID NO: 892686 - RNA, 21 nt, Human
uggaaaggggcaggccgggcg

SEQ ID NO: 892687 - RNA, 24 nt, Human
uggaaggccaaggcaggcagauca

SEQ ID NO: 892688 - RNA, 24 nt, Human
uggaguguuuuuggguagaaggaa

SEQ ID NO: 892689 - RNA, 24 nt, Human
uggcucaugccuguaaucccagca

SEQ ID NO: 892690 - RNA, 20 nt, Human
uggggcuauguaagugaccu

SEQ ID NO: 892691 - RNA, 22 nt, Human
uggguagaaggaagaauugagu

SEQ ID NO: 892692 - RNA, 22 nt, Human
ugugaauguggcccagacagaa

SEQ ID NO: 892693 - RNA, 18 nt, Human
uuaugcugagcauaucuc

SEQ ID NO: 892694 - RNA, 18 nt, Human
uugcagaugaagucgcca

SEQ ID NO: 892695 - RNA, 19 nt, Human
uuuuuuuuuuuuuuuugca

SEQ ID NO: 892696 - RNA, 18 nt, Human
uuuuuuuuuuuuuuuuug

SEQ ID NO: 892697 - RNA, 22 nt, Human
uuuuuuuuuuuuuuuuugcauu

SEQ ID NO: 892698 - RNA, 18 nt, Human
aacuugcaauaacaaccu

SEQ ID NO: 892699 - RNA, 23 nt, Human
acaguaguaaagauugagguauc

SEQ ID NO: 892700 - RNA, 20 nt, Human
auuccuuuuuuacuuucuuu

SEQ ID NO: 892701 - RNA, 18 nt, Human
cagaaggaauccauggca

SEQ ID NO: 892702 - RNA, 21 nt, Human
gaguaaucuagaaaauuuuaa

SEQ ID NO: 892703 - RNA, 21 nt, Human
ggaucagaaaaugcaaauuga

SEQ ID NO: 892704 - RNA, 24 nt, Human
uaauugguccuuucccaucaguuc

SEQ ID NO: 892705 - RNA, 21 nt, Human
uacaaaauguucaucuuggau

SEQ ID NO: 892706 - RNA, 18 nt, Human
uaucagcuuuucacaaaa

SEQ ID NO: 892707 - RNA, 20 nt, Human
ucuuugccuuugcagucacu

SEQ ID NO: 892708 - RNA, 22 nt, Human
ugaaugaauuugaucuuuuaaa

SEQ ID NO: 892709 - RNA, 25 nt, Human
ugauuguaaacuccaagucuuccuu

SEQ ID NO: 892710 - RNA, 18 nt, Human
ugcucaggaacgucuaau

SEQ ID NO: 892711 - RNA, 23 nt, Human
uuuagagucuuaaacucuaauuc

SEQ ID NO: 892712 - RNA, 18 nt, Human
aaaccuggagcgaggcag

SEQ ID NO: 892713 - RNA, 26 nt, Human
aggcagggaaaagguacaucaauguc

SEQ ID NO: 892714 - RNA, 21 nt, Human
cacggccagggcccucgugcc

SEQ ID NO: 892715 - RNA, 21 nt, Human
ccggcucuuucgccacggcca

SEQ ID NO: 892716 - RNA, 19 nt, Human
cggccagggcccucgugcc

SEQ ID NO: 892717 - RNA, 19 nt, Human
gagcgaggcagggaaaagg

SEQ ID NO: 892718 - RNA, 22 nt, Human
gggucuccggcuccgccggcuc

SEQ ID NO: 892719 - RNA, 20 nt, Human
ucuccgggagcgggucuccg

SEQ ID NO: 892720 - RNA, 24 nt, Human
ucuccgggagcgggucuccggcuc

SEQ ID NO: 892721 - RNA, 23 nt, Human
aaaaaugggaagcuuaagaagga

SEQ ID NO: 892722 - RNA, 23 nt, Human
aaacagacauaauuccugcccau

SEQ ID NO: 892723 - RNA, 21 nt, Human
aaugagggagcaagguagaga

SEQ ID NO: 892724 - RNA, 27 nt, Human
acuagacccggggauccaacggaaagc

SEQ ID NO: 892725 - RNA, 19 nt, Human
agacccggggauccaacgg

SEQ ID NO: 892726 - RNA, 22 nt, Human
agcaaaacagacauaauuccug

SEQ ID NO: 892727 - RNA, 18 nt, Human
agcaaacucaauuuauag

SEQ ID NO: 892728 - RNA, 22 nt, Human
aggaagccgagauucagggcag

SEQ ID NO: 892729 - RNA, 23 nt, Human
aggaagcggcuucugaacaucua

SEQ ID NO: 892730 - RNA, 20 nt, Human
caagauggcgccaaauucuu

SEQ ID NO: 892731 - RNA, 22 nt, Human
caccgaguccacuuuuccuaac

SEQ ID NO: 892732 - RNA, 18 nt, Human
cacgcguccgccuucugg

SEQ ID NO: 892733 - RNA, 19 nt, Human
cacuuugaccuucucaaga

SEQ ID NO: 892734 - RNA, 19 nt, Human
cagaacaaugaaacugugu

SEQ ID NO: 892735 - RNA, 23 nt, Human
cagacauaauuccugcccauuaa

SEQ ID NO: 892736 - RNA, 18 nt, Human
cagagcgacgccgagggg

SEQ ID NO: 892737 - RNA, 21 nt, Human
ccaaggucgcuaaggacuuau

SEQ ID NO: 892738 - RNA, 18 nt, Human
ccacgccucucgggggcg

SEQ ID NO: 892739 - RNA, 20 nt, Human
ccaucuugccggcuugcgcc

SEQ ID NO: 892740 - RNA, 23 nt, Human
ccgccaucuugccggcuugcgcc

SEQ ID NO: 892741 - RNA, 18 nt, Human
ccucagggcuucugcagu

SEQ ID NO: 892742 - RNA, 18 nt, Human
ccugcaguuuucuuugcg

SEQ ID NO: 892743 - RNA, 20 nt, Human
ccugguucgguuccuuccug

SEQ ID NO: 892744 - RNA, 21 nt, Human
cgcagcagcagagccgaugcc

SEQ ID NO: 892745 - RNA, 21 nt, Human
cgggcgggcaggcgggggcuc

SEQ ID NO: 892746 - RNA, 19 nt, Human
cucauagcucuucagugga

SEQ ID NO: 892747 - RNA, 21 nt, Human
cuggccccgccuugaccacgc

SEQ ID NO: 892748 - RNA, 23 nt, Human
cuugcaugagagucauaacguga

SEQ ID NO: 892749 - RNA, 19 nt, Human
gaagaaucacuuugaccuu

SEQ ID NO: 892750 - RNA, 22 nt, Human
gacugcacagcaggugggaaac

SEQ ID NO: 892751 - RNA, 20 nt, Human
gagggcuuguccugggugcu

SEQ ID NO: 892752 - RNA, 21 nt, Human
gagggcuuguccugggugcug

SEQ ID NO: 892753 - RNA, 20 nt, Human
gaguccacuuuuccuaaccc

SEQ ID NO: 892754 - RNA, 20 nt, Human
gcaaaacagacauaauuccu

SEQ ID NO: 892755 - RNA, 20 nt, Human
gcagagccgaugccgcccgc

SEQ ID NO: 892756 - RNA, 20 nt, Human
gcagcagcagagccgaugcc

SEQ ID NO: 892757 - RNA, 19 nt, Human
gcaggcgggggcuccgcag

SEQ ID NO: 892758 - RNA, 22 nt, Human
gccucagacggaaagccccagc

SEQ ID NO: 892759 - RNA, 18 nt, Human
gccugcgccaguccagag

SEQ ID NO: 892760 - RNA, 20 nt, Human
gccugcgcuuuaccgcuccg

SEQ ID NO: 892761 - RNA, 21 nt, Human
gcuggagggcuuguccugggu

SEQ ID NO: 892762 - RNA, 23 nt, Human
gcuggagggcuuguccugggugc

SEQ ID NO: 892763 - RNA, 19 nt, Human
ggaaagccccagccgccgc

SEQ ID NO: 892764 - RNA, 18 nt, Human
gggccggggccgacagcu

SEQ ID NO: 892765 - RNA, 18 nt, Human
ggggcgggcggggucggg

SEQ ID NO: 892766 - RNA, 21 nt, Human
ggggcgggcggggucgggagc

SEQ ID NO: 892767 - RNA, 20 nt, Human
gguguggccugcuggaggcu

SEQ ID NO: 892768 - RNA, 18 nt, Human
guaaacccaagcgccagg

SEQ ID NO: 892769 - RNA, 18 nt, Human
uaaaacaacagcaaacuc

SEQ ID NO: 892770 - RNA, 19 nt, Human
uacauauauauauaugcgc

SEQ ID NO: 892771 - RNA, 23 nt, Human
uagauacuuaugcacuucacggg

SEQ ID NO: 892772 - RNA, 18 nt, Human
uauacauauauauauaug

SEQ ID NO: 892773 - RNA, 20 nt, Human
uauacauauauauauaugcg

SEQ ID NO: 892774 - RNA, 23 nt, Human
uaugucuauuuuucucucuaaaa

SEQ ID NO: 892775 - RNA, 27 nt, Human
uauuauuuuuuauacauauauauauau

SEQ ID NO: 892776 - RNA, 22 nt, Human
ucaaaaaugggaagcuuaagaa

SEQ ID NO: 892777 - RNA, 22 nt, Human
uccaacggaaagcaaaacagac

SEQ ID NO: 892778 - RNA, 20 nt, Human
ucccuagacgaaugguaccg

SEQ ID NO: 892779 - RNA, 24 nt, Human
ucccuagacgaaugguaccggcuc

SEQ ID NO: 892780 - RNA, 24 nt, Human
uccuaacccuauuuugcagcuaag

SEQ ID NO: 892781 - RNA, 23 nt, Human
ucgcuggagggcuuguccugggu

SEQ ID NO: 892782 - RNA, 23 nt, Human
ucgguuccuuccuggcugugugu

SEQ ID NO: 892783 - RNA, 18 nt, Human
ucuaaaacaacagcaaac

SEQ ID NO: 892784 - RNA, 23 nt, Human
ucuaaaacaacagcaaacucaau

SEQ ID NO: 892785 - RNA, 21 nt, Human
ucuacuagacccggggaucca

SEQ ID NO: 892786 - RNA, 18 nt, Human
ucuacugguaauuucccc

SEQ ID NO: 892787 - RNA, 21 nt, Human
ucuacugguaauuucccccca

SEQ ID NO: 892788 - RNA, 27 nt, Human
ucucuaaaacaacagcaaacucaauuu

SEQ ID NO: 892789 - RNA, 22 nt, Human
ugaaaaaaaaugaauaugucua

SEQ ID NO: 892790 - RNA, 21 nt, Human
ugaaagaaaccacaggauuca

SEQ ID NO: 892791 - RNA, 19 nt, Human
ugaggcgcaguugcugggg

SEQ ID NO: 892792 - RNA, 19 nt, Human
uggagaggaagcggcuucu

SEQ ID NO: 892793 - RNA, 20 nt, Human
ugggaaauggauuuuucucu

SEQ ID NO: 892794 - RNA, 22 nt, Human
ugguguggccugcuggaggcuc

SEQ ID NO: 892795 - RNA, 21 nt, Human
ugucuauuuuucucucuaaaa

SEQ ID NO: 892796 - RNA, 24 nt, Human
ugugucgaguaccuacuauguguc

SEQ ID NO: 892797 - RNA, 19 nt, Human
uucacaaaucccgcugcgg

SEQ ID NO: 892798 - RNA, 18 nt, Human
uucagaacaaugaaacug

SEQ ID NO: 892799 - RNA, 19 nt, Human
uuccugcccauuaagccug

SEQ ID NO: 892800 - RNA, 19 nt, Human
uuccuggcugugugucccu

SEQ ID NO: 892801 - RNA, 18 nt, Human
uuccuuccuggcugugug

SEQ ID NO: 892802 - RNA, 22 nt, Human
uugcaugagagucauaacguga

SEQ ID NO: 892803 - RNA, 20 nt, Human
uuuauacauauauauauauu

SEQ ID NO: 892804 - RNA, 20 nt, Human
uuuuauacauauauauauau

SEQ ID NO: 892805 - RNA, 21 nt, Human
agcccacagugcucaccuucu

SEQ ID NO: 892806 - RNA, 22 nt, Human
ccgcgcccagcgcgcucggcuc

SEQ ID NO: 892807 - RNA, 22 nt, Human
cgcccgcacagccggcagcccg

SEQ ID NO: 892808 - RNA, 18 nt, Human
cggcucgggcggccgcga

SEQ ID NO: 892809 - RNA, 20 nt, Human
cgggaaccauggccgcuggc

SEQ ID NO: 892810 - RNA, 19 nt, Human
cucccggcucgggcggccg

SEQ ID NO: 892811 - RNA, 23 nt, Human
cugguguuuucugucgcuguuca

SEQ ID NO: 892812 - RNA, 18 nt, Human
gggcuuggcggcggcagc

SEQ ID NO: 892813 - RNA, 24 nt, Human
guuuucugucgcuguucagucaac

SEQ ID NO: 892814 - RNA, 20 nt, Human
ucaggcgcccggcgccgccg

SEQ ID NO: 892815 - RNA, 18 nt, Human
ucagucaacuuccagagc

SEQ ID NO: 892816 - RNA, 20 nt, Human
uggcgcacuccgggcuuggc

SEQ ID NO: 892817 - RNA, 19 nt, Human
uggcggcggcagcgggacg

SEQ ID NO: 892818 - RNA, 19 nt, Human
ugguguuuucugucgcugu

SEQ ID NO: 892819 - RNA, 23 nt, Human
aaaggaaaaaaagcaaaaggaaa

SEQ ID NO: 892820 - RNA, 19 nt, Human
aaccuggaggccgagaccc

SEQ ID NO: 892821 - RNA, 18 nt, Human
aggaaaaaaagcaaaagg

SEQ ID NO: 892822 - RNA, 18 nt, Human
ccacaggccgcccccggg

SEQ ID NO: 892823 - RNA, 21 nt, Human
cgcccccgggcuccgaaagcc

SEQ ID NO: 892824 - RNA, 24 nt, Human
cggagggagaaaaggaaaaaaagc

SEQ ID NO: 892825 - RNA, 24 nt, Human
cgggcuccgaaagccgggggagcc

SEQ ID NO: 892826 - RNA, 18 nt, Human
cucagcagcagggggagg

SEQ ID NO: 892827 - RNA, 20 nt, Human
gcagcagggggagggcugga

SEQ ID NO: 892828 - RNA, 21 nt, Human
aaaaaaaaaaaaaaaaagccu

SEQ ID NO: 892829 - RNA, 23 nt, Human
aaaaaaaaaaaaaaaagccuuug

SEQ ID NO: 892830 - RNA, 21 nt, Human
aaaaaaaaaagccuuugucau

SEQ ID NO: 892831 - RNA, 20 nt, Human
aacauggagaaaccccgucu

SEQ ID NO: 892832 - RNA, 21 nt, Human
aacauggagaaaccccgucuc

SEQ ID NO: 892833 - RNA, 18 nt, Human
aaccagcauccuuaagcc

SEQ ID NO: 892834 - RNA, 22 nt, Human
aaccccacuuuuccuuccacac

SEQ ID NO: 892835 - RNA, 22 nt, Human
aagaaaccuuuauagauauaga

SEQ ID NO: 892836 - RNA, 24 nt, Human
aagccgggcagacuuggccuuaga

SEQ ID NO: 892837 - RNA, 24 nt, Human
aagggaaaauugaggccuucagag

SEQ ID NO: 892838 - RNA, 18 nt, Human
aaucgcuugaaccuggga

SEQ ID NO: 892839 - RNA, 24 nt, Human
aaucgcuugaaccugggaggcgga

SEQ ID NO: 892840 - RNA, 18 nt, Human
aauuagccaggcauggug

SEQ ID NO: 892841 - RNA, 22 nt, Human
accaagcugacccccagccuca

SEQ ID NO: 892842 - RNA, 21 nt, Human
accaggaagguauggcuggca

SEQ ID NO: 892843 - RNA, 21 nt, Human
accaggccuuguucccaccug

SEQ ID NO: 892844 - RNA, 21 nt, Human
acccagaccccugucccccaa

SEQ ID NO: 892845 - RNA, 23 nt, Human
accccgucucuacuaaaaauaca

SEQ ID NO: 892846 - RNA, 24 nt, Human
accugaggucaggaguucaagacc

SEQ ID NO: 892847 - RNA, 22 nt, Human
acuccagccuagccaacaagag

SEQ ID NO: 892848 - RNA, 23 nt, Human
acuccagccuagccaacaagagc

SEQ ID NO: 892849 - RNA, 19 nt, Human
acuuuuuaacucaggugcu

SEQ ID NO: 892850 - RNA, 22 nt, Human
acuuuuuuuuuuuuuuuuuuuu

SEQ ID NO: 892851 - RNA, 18 nt, Human
agaaccagcauccuuaag

SEQ ID NO: 892852 - RNA, 22 nt, Human
agaaggaagcagugggguagag

SEQ ID NO: 892853 - RNA, 21 nt, Human
agaagggaaaauugaggccug

SEQ ID NO: 892854 - RNA, 19 nt, Human
agacaaucuagaagccccc

SEQ ID NO: 892855 - RNA, 22 nt, Human
agacgggcagaucaccugaggu

SEQ ID NO: 892856 - RNA, 26 nt, Human
agacgggcagaucaccugaggucagg

SEQ ID NO: 892857 - RNA, 18 nt, Human
agagcuaggagaucuggg

SEQ ID NO: 892858 - RNA, 23 nt, Human
agaucaccugaggucaggaguuc

SEQ ID NO: 892859 - RNA, 25 nt, Human
agaucaccugaggucaggaguucaa

SEQ ID NO: 892860 - RNA, 24 nt, Human
agcacuuugggaggccgagacggg

SEQ ID NO: 892861 - RNA, 23 nt, Human
agccaggcaugguggugcaugcc

SEQ ID NO: 892862 - RNA, 22 nt, Human
agcugacccccagccucacccc

SEQ ID NO: 892863 - RNA, 20 nt, Human
aggcagaaguuccaggccca

SEQ ID NO: 892864 - RNA, 22 nt, Human
aggcaggaaaaucgcuugaacc

SEQ ID NO: 892865 - RNA, 24 nt, Human
aggcaggaaaaucgcuugaaccug

SEQ ID NO: 892866 - RNA, 24 nt, Human
aggcaugguggugcaugccuguaa

SEQ ID NO: 892867 - RNA, 19 nt, Human
aggcccagaaccugggucc

SEQ ID NO: 892868 - RNA, 21 nt, Human
aggcccagaaccuggguccca

SEQ ID NO: 892869 - RNA, 24 nt, Human
aggcgcaguggcucaugccgguaa

SEQ ID NO: 892870 - RNA, 20 nt, Human
aggcggaggugcagugagcc

SEQ ID NO: 892871 - RNA, 23 nt, Human
aggcggaggugcagugagccgag

SEQ ID NO: 892872 - RNA, 21 nt, Human
aggcugaggcaggaaaaucgc

SEQ ID NO: 892873 - RNA, 24 nt, Human
aggcugaggcaggaaaaucgcuug

SEQ ID NO: 892874 - RNA, 23 nt, Human
agggcccaguggugaccugccuc

SEQ ID NO: 892875 - RNA, 23 nt, Human
agguccagcagaugcuaccagga

SEQ ID NO: 892876 - RNA, 18 nt, Human
aguggcaguggaagggca

SEQ ID NO: 892877 - RNA, 24 nt, Human
aguggcucaugccgguaaucccag

SEQ ID NO: 892878 - RNA, 22 nt, Human
auaucaaagccuuugucggcca

SEQ ID NO: 892879 - RNA, 24 nt, Human
aucaccugaggucaggaguucaag

SEQ ID NO: 892880 - RNA, 20 nt, Human
auccagaccacccagcccca

SEQ ID NO: 892881 - RNA, 22 nt, Human
auccagcaaugaaaucugagua

SEQ ID NO: 892882 - RNA, 18 nt, Human
auccuguauauauuuugg

SEQ ID NO: 892883 - RNA, 20 nt, Human
augaagcacuggaugggacc

SEQ ID NO: 892884 - RNA, 21 nt, Human
caaacccagaccccugucccc

SEQ ID NO: 892885 - RNA, 22 nt, Human
caaacccagaccccuguccccc

SEQ ID NO: 892886 - RNA, 21 nt, Human
caaacuccuauucacacuccc

SEQ ID NO: 892887 - RNA, 24 nt, Human
caacauggagaaaccccgucucua

SEQ ID NO: 892888 - RNA, 18 nt, Human
caacuccuagccaauccc

SEQ ID NO: 892889 - RNA, 20 nt, Human
caacuuuuuuuuuuuuuuuu

SEQ ID NO: 892890 - RNA, 20 nt, Human
caacuuuuuuuuuuuuuuuu

SEQ ID NO: 892891 - RNA, 24 nt, Human
caagauggaagucccuuagaccaa

SEQ ID NO: 892892 - RNA, 22 nt, Human
cacacuccccaaccuaagaccc

SEQ ID NO: 892893 - RNA, 21 nt, Human
caccuccugccuagacaaucu

SEQ ID NO: 892894 - RNA, 23 nt, Human
caccugaggucaggaguucaaga

SEQ ID NO: 892895 - RNA, 26 nt, Human
caccugcacacacgugugaguguaug

SEQ ID NO: 892896 - RNA, 18 nt, Human
caccuggagccaaacccg

SEQ ID NO: 892897 - RNA, 19 nt, Human
cagaaccagcauccuuaag

SEQ ID NO: 892898 - RNA, 23 nt, Human
cagaaccagcauccuuaagccgg

SEQ ID NO: 892899 - RNA, 20 nt, Human
cagaagccagagcuaggaga

SEQ ID NO: 892900 - RNA, 18 nt, Human
cagaagcucuccugggcu

SEQ ID NO: 892901 - RNA, 21 nt, Human
cagaccacccagccccaaccc

SEQ ID NO: 892902 - RNA, 22 nt, Human
cagaccccugucccccaacuuu

SEQ ID NO: 892903 - RNA, 20 nt, Human
cagagcuaggagaucugggg

SEQ ID NO: 892904 - RNA, 24 nt, Human
cagaucaccugaggucaggaguuc

SEQ ID NO: 892905 - RNA, 18 nt, Human
cagcacagguuaaucccu

SEQ ID NO: 892906 - RNA, 24 nt, Human
cagcacuuugggaggccgagacgg

SEQ ID NO: 892907 - RNA, 19 nt, Human
cagcagaugcuaccaggaa

SEQ ID NO: 892908 - RNA, 24 nt, Human
cagccugaccaacauggagaaacc

SEQ ID NO: 892909 - RNA, 24 nt, Human
cagcuacucgggaggcugaggcag

SEQ ID NO: 892910 - RNA, 22 nt, Human
caggaaacacugaauggauaaa

SEQ ID NO: 892911 - RNA, 20 nt, Human
caggcccagaaccugggucc

SEQ ID NO: 892912 - RNA, 24 nt, Human
cagugagccgagaucgcaccauuu

SEQ ID NO: 892913 - RNA, 22 nt, Human
caguucauucugauaucaaagc

SEQ ID NO: 892914 - RNA, 24 nt, Human
caugccgguaaucccagcacuuug

SEQ ID NO: 892915 - RNA, 19 nt, Human
cauuuuacaagaagggaaa

SEQ ID NO: 892916 - RNA, 22 nt, Human
cauuuuacaagaagggaaaauu

SEQ ID NO: 892917 - RNA, 18 nt, Human
cauuuuacuccagccuag

SEQ ID NO: 892918 - RNA, 23 nt, Human
ccaaacccagaccccuguccccc

SEQ ID NO: 892919 - RNA, 21 nt, Human
ccaacacuuguggcugggcuu

SEQ ID NO: 892920 - RNA, 25 nt, Human
ccaaccccacuuuuccuuccacacu

SEQ ID NO: 892921 - RNA, 24 nt, Human
ccaggcccagaaccugggucccag

SEQ ID NO: 892922 - RNA, 19 nt, Human
ccauuuuacuccagccuag

SEQ ID NO: 892923 - RNA, 20 nt, Human
ccauuuuacuccagccuagc

SEQ ID NO: 892924 - RNA, 24 nt, Human
cccagccucaccccagugaguggc

SEQ ID NO: 892925 - RNA, 22 nt, Human
ccccaaccccacuuuuccuucc

SEQ ID NO: 892926 - RNA, 18 nt, Human
ccccaauccucaccaagc

SEQ ID NO: 892927 - RNA, 20 nt, Human
ccccagcaacuccuagccaa

SEQ ID NO: 892928 - RNA, 21 nt, Human
cccuaaauccaagaauuggcc

SEQ ID NO: 892929 - RNA, 22 nt, Human
ccgguaaucccagcacuuuggg

SEQ ID NO: 892930 - RNA, 23 nt, Human
ccuaagacccugagggucccagg

SEQ ID NO: 892931 - RNA, 22 nt, Human
ccuagccaaucccuaaauccaa

SEQ ID NO: 892932 - RNA, 25 nt, Human
ccucaccaagcugacccccagccuc

SEQ ID NO: 892933 - RNA, 24 nt, Human
ccuccaggcuccgccgucugaguc

SEQ ID NO: 892934 - RNA, 19 nt, Human
ccucugaugugggaugccc

SEQ ID NO: 892935 - RNA, 23 nt, Human
ccugaccaacauggagaaacccc

SEQ ID NO: 892936 - RNA, 24 nt, Human
ccugaccaacauggagaaaccccg

SEQ ID NO: 892937 - RNA, 21 nt, Human
ccugccuagacaaucuagaag

SEQ ID NO: 892938 - RNA, 19 nt, Human
ccugcgucugagcucagga

SEQ ID NO: 892939 - RNA, 22 nt, Human
ccuggagccaaacccagacccc

SEQ ID NO: 892940 - RNA, 22 nt, Human
ccuguaaccccagcuacucggg

SEQ ID NO: 892941 - RNA, 26 nt, Human
cgagacgggcagaucaccugagguca

SEQ ID NO: 892942 - RNA, 21 nt, Human
cgcaccauuuuacuccagccu

SEQ ID NO: 892943 - RNA, 21 nt, Human
cgcuugaaccugggaggcgga

SEQ ID NO: 892944 - RNA, 24 nt, Human
cggccaggcgcaguggcucaugcc

SEQ ID NO: 892945 - RNA, 24 nt, Human
cgggcagaucaccugaggucagga

SEQ ID NO: 892946 - RNA, 18 nt, Human
cucaaaaaaaaaaaaaaa

SEQ ID NO: 892947 - RNA, 18 nt, Human
cucaaaaaaaaaaaaaaa

SEQ ID NO: 892948 - RNA, 22 nt, Human
cucaccaagcugacccccagcu

SEQ ID NO: 892949 - RNA, 24 nt, Human
cucaggacuucagaccaagaugga

SEQ ID NO: 892950 - RNA, 24 nt, Human
cucaugccgguaaucccagcacuu

SEQ ID NO: 892951 - RNA, 19 nt, Human
cuccagcaccucccuugac

SEQ ID NO: 892952 - RNA, 20 nt, Human
cucccugggcaaggagcugg

SEQ ID NO: 892953 - RNA, 21 nt, Human
cuccucaaaaaaaaaaaaaaa

SEQ ID NO: 892954 - RNA, 21 nt, Human
cuccuccaggcuccgccgucu

SEQ ID NO: 892955 - RNA, 20 nt, Human
cucugccuggaaugcccuuc

SEQ ID NO: 892956 - RNA, 18 nt, Human
cugcagccucugggggag

SEQ ID NO: 892957 - RNA, 23 nt, Human
cugggauagugacugaaggagua

SEQ ID NO: 892958 - RNA, 19 nt, Human
cuucagaccaagauggaag

SEQ ID NO: 892959 - RNA, 22 nt, Human
cuuucagaagcucuccugggcu

SEQ ID NO: 892960 - RNA, 21 nt, Human
gaaccagcauccuuaagccgg

SEQ ID NO: 892961 - RNA, 20 nt, Human
gaaccugggaggcggaggug

SEQ ID NO: 892962 - RNA, 24 nt, Human
gacaaucuagaagccccaauccuc

SEQ ID NO: 892963 - RNA, 19 nt, Human
gaccccugucccccaacuu

SEQ ID NO: 892964 - RNA, 21 nt, Human
gagaaaccccgucucuacuaa

SEQ ID NO: 892965 - RNA, 19 nt, Human
gaguggcaguggaagggca

SEQ ID NO: 892966 - RNA, 23 nt, Human
gaucaccugaggucaggaguuca

SEQ ID NO: 892967 - RNA, 24 nt, Human
gaucaccugaggucaggaguucaa

SEQ ID NO: 892968 - RNA, 20 nt, Human
gcaccauuuuacuccagccu

SEQ ID NO: 892969 - RNA, 21 nt, Human
gcaguggaagggcaagcugga

SEQ ID NO: 892970 - RNA, 19 nt, Human
gcuccaacacuuguggcug

SEQ ID NO: 892971 - RNA, 21 nt, Human
ggagccaaacccagaccccug

SEQ ID NO: 892972 - RNA, 23 nt, Human
ggaggugcagugagccgagaucg

SEQ ID NO: 892973 - RNA, 28 nt, Human
ggcagaaguuccaggcccagaaccuggg

SEQ ID NO: 892974 - RNA, 25 nt, Human
ggcagaucaccugaggucaggaguu

SEQ ID NO: 892975 - RNA, 25 nt, Human
ggcaugguggugcaugccuguaacc

SEQ ID NO: 892976 - RNA, 21 nt, Human
ggccaggcgcaguggcucaug

SEQ ID NO: 892977 - RNA, 19 nt, Human
gggauagugacugaaggag

SEQ ID NO: 892978 - RNA, 24 nt, Human
gguggugcaugccuguaaccccag

SEQ ID NO: 892979 - RNA, 22 nt, Human
guaacaagggaaccaggagaga

SEQ ID NO: 892980 - RNA, 22 nt, Human
gugcagugagccgagaucgcac

SEQ ID NO: 892981 - RNA, 23 nt, Human
gugcuguggguagggagcaaggg

SEQ ID NO: 892982 - RNA, 27 nt, Human
gugggacacagaagccagagcuaggag

SEQ ID NO: 892983 - RNA, 21 nt, Human
gugugcaccugcacacacgug

SEQ ID NO: 892984 - RNA, 18 nt, Human
uaacaagggaaccaggag

SEQ ID NO: 892985 - RNA, 25 nt, Human
uaacauaaaaaucacuuuuuaacuc

SEQ ID NO: 892986 - RNA, 21 nt, Human
uaauccagaccacccagcccc

SEQ ID NO: 892987 - RNA, 23 nt, Human
uaauccagaccacccagccccaa

SEQ ID NO: 892988 - RNA, 20 nt, Human
uaaucccucuccagcaccuc

SEQ ID NO: 892989 - RNA, 22 nt, Human
uaccaggaagguauggcuggca

SEQ ID NO: 892990 - RNA, 22 nt, Human
uaccaggccuuguucccaccug

SEQ ID NO: 892991 - RNA, 25 nt, Human
uacuccagccuagccaacaagagcg

SEQ ID NO: 892992 - RNA, 19 nt, Human
uagacaaucuagaagcccc

SEQ ID NO: 892993 - RNA, 22 nt, Human
ucaaaaaaaaaaaaaaaaaaaa

SEQ ID NO: 892994 - RNA, 23 nt, Human
ucaaaaaaaaaaaaaaaaaaaaa

SEQ ID NO: 892995 - RNA, 22 nt, Human
ucacacuccccaaccuaagacc

SEQ ID NO: 892996 - RNA, 25 nt, Human
ucaccaagcugacccccagccucac

SEQ ID NO: 892997 - RNA, 19 nt, Human
ucagaagcucuccugggcu

SEQ ID NO: 892998 - RNA, 21 nt, Human
ucaggacuucagaccaagaug

SEQ ID NO: 892999 - RNA, 18 nt, Human
ucaggugcuguggguagg

SEQ ID NO: 893000 - RNA, 21 nt, Human
uccagcagaugcuaccaggaa

SEQ ID NO: 893001 - RNA, 18 nt, Human
ucccugggcaaggagcug

SEQ ID NO: 893002 - RNA, 20 nt, Human
ucccugggcaaggagcuggg

SEQ ID NO: 893003 - RNA, 21 nt, Human
ucccuugacaguucauucuga

SEQ ID NO: 893004 - RNA, 21 nt, Human
uccgcauccagcaaugaaauc

SEQ ID NO: 893005 - RNA, 20 nt, Human
uccucaaaaaaaaaaaaaaa

SEQ ID NO: 893006 - RNA, 24 nt, Human
uccucaaaaaaaaaaaaaaaaaaa

SEQ ID NO: 893007 - RNA, 24 nt, Human
ucgcuugaaccugggaggcggagg

SEQ ID NO: 893008 - RNA, 24 nt, Human
ucgggaggcugaggcaggaaaauc

SEQ ID NO: 893009 - RNA, 21 nt, Human
ucucccugggcaaggagcugg

SEQ ID NO: 893010 - RNA, 22 nt, Human
ucucuacuaaaaauacagaaaa

SEQ ID NO: 893011 - RNA, 21 nt, Human
ucugcacagguuucccucugc

SEQ ID NO: 893012 - RNA, 23 nt, Human
ucugcacagguuucccucugccu

SEQ ID NO: 893013 - RNA, 23 nt, Human
ucugcagcuccaacacuuguggc

SEQ ID NO: 893014 - RNA, 23 nt, Human
ugaaggaguaugaagcacuggau

SEQ ID NO: 893015 - RNA, 19 nt, Human
ugacccccagccucacccc

SEQ ID NO: 893016 - RNA, 19 nt, Human
ugacugaaggaguaugaag

SEQ ID NO: 893017 - RNA, 18 nt, Human
ugagccgagaucgcacca

SEQ ID NO: 893018 - RNA, 20 nt, Human
ugaggcaggaaaaucgcuug

SEQ ID NO: 893019 - RNA, 24 nt, Human
ugaggcaggaaaaucgcuugaacc

SEQ ID NO: 893020 - RNA, 25 nt, Human
ugaggcaggaaaaucgcuugaaccu

SEQ ID NO: 893021 - RNA, 21 nt, Human
ugcccucaagucccuucacac

SEQ ID NO: 893022 - RNA, 23 nt, Human
ugccgguaaucccagcacuuugg

SEQ ID NO: 893023 - RNA, 18 nt, Human
ugccuagacaaucuagaa

SEQ ID NO: 893024 - RNA, 21 nt, Human
ugccuagacaaucuagaagcc

SEQ ID NO: 893025 - RNA, 18 nt, Human
ugccuggaaugcccuucc

SEQ ID NO: 893026 - RNA, 23 nt, Human
ugccuguaaccccagcuacucgg

SEQ ID NO: 893027 - RNA, 24 nt, Human
ugccuguaaccccagcuacucggg

SEQ ID NO: 893028 - RNA, 22 nt, Human
uggaagggcaagcuggaguggc

SEQ ID NO: 893029 - RNA, 24 nt, Human
uggagccaaacccagaccccuguc

SEQ ID NO: 893030 - RNA, 19 nt, Human
uggcaguaccugcgucuga

SEQ ID NO: 893031 - RNA, 24 nt, Human
uggcucaugccgguaaucccagca

SEQ ID NO: 893032 - RNA, 18 nt, Human
uggcugcagccucugggg

SEQ ID NO: 893033 - RNA, 21 nt, Human
ugggaacaggccgugugggac

SEQ ID NO: 893034 - RNA, 19 nt, Human
ugggaggccgagacgggca

SEQ ID NO: 893035 - RNA, 24 nt, Human
ugggaggccgagacgggcagauca

SEQ ID NO: 893036 - RNA, 23 nt, Human
ugggaggcggaggugcagugagc

SEQ ID NO: 893037 - RNA, 22 nt, Human
ugggguagagucagaaccagca

SEQ ID NO: 893038 - RNA, 21 nt, Human
uggugcaugccuguaacccca

SEQ ID NO: 893039 - RNA, 22 nt, Human
uggugcaugccuguaaccccag

SEQ ID NO: 893040 - RNA, 23 nt, Human
uggugcaugccuguaaccccagc

SEQ ID NO: 893041 - RNA, 24 nt, Human
ugguggugcaugccuguaacccca

SEQ ID NO: 893042 - RNA, 29 nt, Human
ugugcaccugcacacacgugugaguguau

SEQ ID NO: 893043 - RNA, 22 nt, Human
uguggguagggagcaagggcag

SEQ ID NO: 893044 - RNA, 19 nt, Human
uuaaucccucuccagcacc

SEQ ID NO: 893045 - RNA, 20 nt, Human
uucaagggacaguaagaucc

SEQ ID NO: 893046 - RNA, 22 nt, Human
uuccaggcccagaaccuggguc

SEQ ID NO: 893047 - RNA, 21 nt, Human
uugaaccugggaggcggaggu

SEQ ID NO: 893048 - RNA, 20 nt, Human
uuuaccaggccuuguuccca

SEQ ID NO: 893049 - RNA, 22 nt, Human
uuuuuuuuuuuuuuggauuuga

SEQ ID NO: 893050 - RNA, 18 nt, Human
uuuuuuuuuuuuuuuuug

SEQ ID NO: 893051 - RNA, 23 nt, Human
aaaaaaacagaaagcaauaaaac

SEQ ID NO: 893052 - RNA, 24 nt, Human
aaaaaagaaaaaaaaaugaaagga

SEQ ID NO: 893053 - RNA, 27 nt, Human
aaaaagaaaaaaaaaugaaaggaagaa

SEQ ID NO: 893054 - RNA, 29 nt, Human
aaaagaaaaaaaaaugaaaggaagaaaga

SEQ ID NO: 893055 - RNA, 23 nt, Human
aaacagaaagcaauaaaacccaa

SEQ ID NO: 893056 - RNA, 22 nt, Human
aaagaggaaccaaacacgauuc

SEQ ID NO: 893057 - RNA, 21 nt, Human
aaagcaauaaaacccaaaccc

SEQ ID NO: 893058 - RNA, 24 nt, Human
aaaggaagaaagaaagaaacagag

SEQ ID NO: 893059 - RNA, 23 nt, Human
aacaccuguccaauaacugcccu

SEQ ID NO: 893060 - RNA, 19 nt, Human
aagaaagaaacagaggaag

SEQ ID NO: 893061 - RNA, 21 nt, Human
aagaaagaaacagaggaagga

SEQ ID NO: 893062 - RNA, 22 nt, Human
aagaaagaaacagaggaaggaa

SEQ ID NO: 893063 - RNA, 21 nt, Human
aagaaagaaagaaacagagga

SEQ ID NO: 893064 - RNA, 18 nt, Human
aagcaauaaaacccaaac

SEQ ID NO: 893065 - RNA, 21 nt, Human
aagcagaaggugccuacaaag

SEQ ID NO: 893066 - RNA, 20 nt, Human
aagggcuccauuucauuacc

SEQ ID NO: 893067 - RNA, 18 nt, Human
aaggugccuacaaaguuu

SEQ ID NO: 893068 - RNA, 18 nt, Human
aaguggcagcgggacagg

SEQ ID NO: 893069 - RNA, 21 nt, Human
acaggaacaaugaagcagaga

SEQ ID NO: 893070 - RNA, 19 nt, Human
acugguuaguuccagggaa

SEQ ID NO: 893071 - RNA, 18 nt, Human
acuuagucacacaacauc

SEQ ID NO: 893072 - RNA, 23 nt, Human
agaaaaaaacagaaagcaauaaa

SEQ ID NO: 893073 - RNA, 21 nt, Human
agaggaaggaaggaaugaaag

SEQ ID NO: 893074 - RNA, 20 nt, Human
agagugucacuguacuggaa

SEQ ID NO: 893075 - RNA, 22 nt, Human
aggaacaaugaagcagagaagc

SEQ ID NO: 893076 - RNA, 23 nt, Human
aggaagaaagaaagaaacagagg

SEQ ID NO: 893077 - RNA, 18 nt, Human
aggagugggcuggaugag

SEQ ID NO: 893078 - RNA, 20 nt, Human
aggauggagcugaugcgccc

SEQ ID NO: 893079 - RNA, 21 nt, Human
aggggaaaaggagugggcugg

SEQ ID NO: 893080 - RNA, 22 nt, Human
aucugccaaugggcaccagagu

SEQ ID NO: 893081 - RNA, 19 nt, Human
augaaacaaccaaucuacc

SEQ ID NO: 893082 - RNA, 23 nt, Human
augaaaggaagaaagaaagaaac

SEQ ID NO: 893083 - RNA, 19 nt, Human
augaagcagagaagcagaa

SEQ ID NO: 893084 - RNA, 26 nt, Human
caacaucaaggacugguuaguuccag

SEQ ID NO: 893085 - RNA, 23 nt, Human
caaugugaggcuguuuugggcac

SEQ ID NO: 893086 - RNA, 22 nt, Human
cacaacaucaaggacugguuag

SEQ ID NO: 893087 - RNA, 24 nt, Human
cacaaugcaguagaaccaaacaac

SEQ ID NO: 893088 - RNA, 24 nt, Human
cacacaacaucaaggacugguuag

SEQ ID NO: 893089 - RNA, 18 nt, Human
cacagaguaguucugaaa

SEQ ID NO: 893090 - RNA, 18 nt, Human
cagaaggugccuacaaag

SEQ ID NO: 893091 - RNA, 24 nt, Human
cagaaggugccuacaaaguuuuac

SEQ ID NO: 893092 - RNA, 21 nt, Human
cagaguaguucugaaaaggag

SEQ ID NO: 893093 - RNA, 19 nt, Human
caguagaaccaaacaacac

SEQ ID NO: 893094 - RNA, 18 nt, Human
caguagcugcucugccug

SEQ ID NO: 893095 - RNA, 21 nt, Human
ccaggggccucucugcccaug

SEQ ID NO: 893096 - RNA, 23 nt, Human
ccuauaggcagcaugaacggucc

SEQ ID NO: 893097 - RNA, 20 nt, Human
ccuccuguaacaaugugagg

SEQ ID NO: 893098 - RNA, 22 nt, Human
ccuguaacaaugugaggcuguu

SEQ ID NO: 893099 - RNA, 22 nt, Human
cgcucuuaaaaaagaaaaaaaa

SEQ ID NO: 893100 - RNA, 19 nt, Human
cuccacaaugcaguagaac

SEQ ID NO: 893101 - RNA, 19 nt, Human
cugccaaugggcaccagag

SEQ ID NO: 893102 - RNA, 21 nt, Human
cugcucugccugccggcauca

SEQ ID NO: 893103 - RNA, 22 nt, Human
cuucggcugggccuugcccucc

SEQ ID NO: 893104 - RNA, 25 nt, Human
gaaaggaagaaagaaagaaacagaa

SEQ ID NO: 893105 - RNA, 24 nt, Human
gcagagaagcagaaggugccuaca

SEQ ID NO: 893106 - RNA, 27 nt, Human
gcagagaagcagaaggugccuacaaag

SEQ ID NO: 893107 - RNA, 22 nt, Human
gcagagccgcucgcucuuaaaa

SEQ ID NO: 893108 - RNA, 20 nt, Human
gccaaugggcaccagagugu

SEQ ID NO: 893109 - RNA, 24 nt, Human
gcccaccccaaaccgccaccgcag

SEQ ID NO: 893110 - RNA, 22 nt, Human
gccgagugugaagugacacccc

SEQ ID NO: 893111 - RNA, 24 nt, Human
ggacagguuuggucaucugcagug

SEQ ID NO: 893112 - RNA, 18 nt, Human
ggucaguucucuuccccc

SEQ ID NO: 893113 - RNA, 21 nt, Human
guucaaagucaguagcugcuc

SEQ ID NO: 893114 - RNA, 21 nt, Human
uaauaacaacaggacuaucac

SEQ ID NO: 893115 - RNA, 26 nt, Human
uaauggauguuuuuaaacccugcaac

SEQ ID NO: 893116 - RNA, 25 nt, Human
uacaauagaauguuuaaauaacacc

SEQ ID NO: 893117 - RNA, 21 nt, Human
uacaguaauggccucuuaaga

SEQ ID NO: 893118 - RNA, 20 nt, Human
uacuggaaggggaaaaggag

SEQ ID NO: 893119 - RNA, 21 nt, Human
uagaaccaaacaacacauuca

SEQ ID NO: 893120 - RNA, 25 nt, Human
ucaguagcugcucugccugccggca

SEQ ID NO: 893121 - RNA, 24 nt, Human
ucgccaucugccaaugggcaccag

SEQ ID NO: 893122 - RNA, 23 nt, Human
ucgcucuuaaaaaagaaaaaaaa

SEQ ID NO: 893123 - RNA, 20 nt, Human
ucggcggcgcccaccccaaa

SEQ ID NO: 893124 - RNA, 25 nt, Human
ucgggaaaagaaaaaaacagaaagc

SEQ ID NO: 893125 - RNA, 21 nt, Human
ugaaaggaagaaagaaagaaa

SEQ ID NO: 893126 - RNA, 21 nt, Human
ugaagcagagaagcagaaggu

SEQ ID NO: 893127 - RNA, 21 nt, Human
ugaagugacacccccagcaga

SEQ ID NO: 893128 - RNA, 26 nt, Human
ugcaguggaguagaaagaggaaccaa

SEQ ID NO: 893129 - RNA, 18 nt, Human
ugcaugccgagugugaag

SEQ ID NO: 893130 - RNA, 23 nt, Human
ugccaaugggcaccagaguguca

SEQ ID NO: 893131 - RNA, 25 nt, Human
ugccuauucuccuggggcauuuuua

SEQ ID NO: 893132 - RNA, 18 nt, Human
ugcgcccauacuggcaga

SEQ ID NO: 893133 - RNA, 25 nt, Human
uggggcauuuuuaguggaacuucgg

SEQ ID NO: 893134 - RNA, 23 nt, Human
ugguuaaaaaugucauguuguac

SEQ ID NO: 893135 - RNA, 21 nt, Human
uguaauaacaacaggacuauc

SEQ ID NO: 893136 - RNA, 18 nt, Human
ugugcugucgggaaaaga

SEQ ID NO: 893137 - RNA, 18 nt, Human
uuaaacccugcaacccuc

SEQ ID NO: 893138 - RNA, 26 nt, Human
uuaguggaacuucggcugggccuugc

SEQ ID NO: 893139 - RNA, 26 nt, Human
uuuauuagcuuucauguuaauggaug

SEQ ID NO: 893140 - RNA, 18 nt, Human
uuuggcaagccagccggu

SEQ ID NO: 893141 - RNA, 20 nt, Human
uuuuuagauuggauugguua

SEQ ID NO: 893142 - RNA, 20 nt, Human
cccccgccccgcucgccucg

SEQ ID NO: 893143 - RNA, 20 nt, Human
ccccgaccgccuccggcccc

SEQ ID NO: 893144 - RNA, 18 nt, Human
ccccgcucgccucgcugc

SEQ ID NO: 893145 - RNA, 19 nt, Human
ccccgcucgccucgcugcc

SEQ ID NO: 893146 - RNA, 22 nt, Human
cccgggcccggccccgaccgcc

SEQ ID NO: 893147 - RNA, 20 nt, Human
cccugcucugagcacagccc

SEQ ID NO: 893148 - RNA, 21 nt, Human
ccgccccgcucgccucgcugc

SEQ ID NO: 893149 - RNA, 22 nt, Human
ccgccccgcucgccucgcugcc

SEQ ID NO: 893150 - RNA, 23 nt, Human
ccgccuccggccccgaacggacu

SEQ ID NO: 893151 - RNA, 19 nt, Human
ccggccccgaccgccuccg

SEQ ID NO: 893152 - RNA, 22 nt, Human
ccggcggcuacgcgcgcuccuc

SEQ ID NO: 893153 - RNA, 27 nt, Human
ccgggcccggccccgaccgccuccggc

SEQ ID NO: 893154 - RNA, 22 nt, Human
ccucgcugccgccaccgcagcc

SEQ ID NO: 893155 - RNA, 20 nt, Human
cgccgcgcccgcgcccccgc

SEQ ID NO: 893156 - RNA, 18 nt, Human
cgccucgcugccgccacc

SEQ ID NO: 893157 - RNA, 20 nt, Human
cgcgcccgcgcccccgcccc

SEQ ID NO: 893158 - RNA, 20 nt, Human
cgcugccgccaccgcagccg

SEQ ID NO: 893159 - RNA, 19 nt, Human
cugccgccaccgcagccgc

SEQ ID NO: 893160 - RNA, 18 nt, Human
gcccgcgcccccgccccg

SEQ ID NO: 893161 - RNA, 19 nt, Human
gcccgcgcccccgccccgc

SEQ ID NO: 893162 - RNA, 22 nt, Human
gccgccaccgcagccgccgccg

SEQ ID NO: 893163 - RNA, 23 nt, Human
uacgcgcgcuccucgcgcuuccc

SEQ ID NO: 893164 - RNA, 20 nt, Human
uccucgcgcuucccgggccc

SEQ ID NO: 893165 - RNA, 20 nt, Human
uucccgggcccggccccgac

SEQ ID NO: 893166 - RNA, 23 nt, Human
aaacagacggcacacggacagac

SEQ ID NO: 893167 - RNA, 27 nt, Human
aaacagacggcacacggacagaccaga

SEQ ID NO: 893168 - RNA, 19 nt, Human
aacuugguccauaaaauaa

SEQ ID NO: 893169 - RNA, 22 nt, Human
aaguuaacaucacucugugcac

SEQ ID NO: 893170 - RNA, 19 nt, Human
agaaggcaggugguggggc

SEQ ID NO: 893171 - RNA, 22 nt, Human
agacggucagacccagcgugca

SEQ ID NO: 893172 - RNA, 19 nt, Human
agagccuggucgcuggaca

SEQ ID NO: 893173 - RNA, 27 nt, Human
agagccuggucgcuggacaaaggccga

SEQ ID NO: 893174 - RNA, 20 nt, Human
agcagcagaggggccgccgg

SEQ ID NO: 893175 - RNA, 19 nt, Human
agccagggagggguggggg

SEQ ID NO: 893176 - RNA, 19 nt, Human
agccggacccgucaggccc

SEQ ID NO: 893177 - RNA, 20 nt, Human
aggaagcagccaaggauugc

SEQ ID NO: 893178 - RNA, 23 nt, Human
aggcagacaggugggcagggucc

SEQ ID NO: 893179 - RNA, 22 nt, Human
aggcaggugguggggcgugggg

SEQ ID NO: 893180 - RNA, 21 nt, Human
aggcccgaggacgugaggcag

SEQ ID NO: 893181 - RNA, 19 nt, Human
aggcccugggacaaucucc

SEQ ID NO: 893182 - RNA, 25 nt, Human
aggccgaggccaggcaggcucuccc

SEQ ID NO: 893183 - RNA, 25 nt, Human
aggcggggagugaggagccgugggg

SEQ ID NO: 893184 - RNA, 20 nt, Human
agggacggauggggagaugg

SEQ ID NO: 893185 - RNA, 22 nt, Human
agggacggauggggagaugggg

SEQ ID NO: 893186 - RNA, 21 nt, Human
agggagcacuguguggugcgg

SEQ ID NO: 893187 - RNA, 19 nt, Human
aggugguggggcguggggg

SEQ ID NO: 893188 - RNA, 19 nt, Human
aggugguggggcguggggg

SEQ ID NO: 893189 - RNA, 22 nt, Human
agugaggguggccaguggaugg

SEQ ID NO: 893190 - RNA, 18 nt, Human
augcaugucaacggggcu

SEQ ID NO: 893191 - RNA, 20 nt, Human
auggcugccugcccugaagc

SEQ ID NO: 893192 - RNA, 22 nt, Human
caagaggagaaugugccaaaag

SEQ ID NO: 893193 - RNA, 20 nt, Human
caaggucacgcuuggugcug

SEQ ID NO: 893194 - RNA, 22 nt, Human
cacucugugcaccuccccagcc

SEQ ID NO: 893195 - RNA, 20 nt, Human
cacuggccugggcuccaggc

SEQ ID NO: 893196 - RNA, 24 nt, Human
cacuuccgggaaagccgaggagca

SEQ ID NO: 893197 - RNA, 21 nt, Human
cagacggcacacggacagacc

SEQ ID NO: 893198 - RNA, 18 nt, Human
cagacggucagacccagc

SEQ ID NO: 893199 - RNA, 21 nt, Human
cagaguagaaauucaguggga

SEQ ID NO: 893200 - RNA, 18 nt, Human
caggcagacaggugggca

SEQ ID NO: 893201 - RNA, 23 nt, Human
caggcggggagugaggagccgug

SEQ ID NO: 893202 - RNA, 23 nt, Human
cagggccccugacaggggcugug

SEQ ID NO: 893203 - RNA, 23 nt, Human
caguacugaaagaguuaagaaaa

SEQ ID NO: 893204 - RNA, 18 nt, Human
caguguggaggggcugcu

SEQ ID NO: 893205 - RNA, 18 nt, Human
cauggcccagagaaacag

SEQ ID NO: 893206 - RNA, 25 nt, Human
ccacacagggcaaaaugucugggag

SEQ ID NO: 893207 - RNA, 20 nt, Human
ccagcccguggccugaggcu

SEQ ID NO: 893208 - RNA, 18 nt, Human
ccaggcccacgucagugc

SEQ ID NO: 893209 - RNA, 24 nt, Human
ccaggcccacgucagugcgugugc

SEQ ID NO: 893210 - RNA, 18 nt, Human
ccagggaggggugggggg

SEQ ID NO: 893211 - RNA, 19 nt, Human
ccagggagggguggggggu

SEQ ID NO: 893212 - RNA, 19 nt, Human
ccaggggacuauugcuguu

SEQ ID NO: 893213 - RNA, 24 nt, Human
ccauccuggggcugguggucccug

SEQ ID NO: 893214 - RNA, 22 nt, Human
cccacccaccccagaguagaaa

SEQ ID NO: 893215 - RNA, 22 nt, Human
cccacgucagugcgugugccca

SEQ ID NO: 893216 - RNA, 27 nt, Human
ccccacccaccccagaguagaaauuca

SEQ ID NO: 893217 - RNA, 19 nt, Human
ccccuggggagaggcugag

SEQ ID NO: 893218 - RNA, 20 nt, Human
cccguggccugaggcuggaa

SEQ ID NO: 893219 - RNA, 19 nt, Human
cccguguccuccacaaggc

SEQ ID NO: 893220 - RNA, 20 nt, Human
ccgcgcugcacucacggugc

SEQ ID NO: 893221 - RNA, 19 nt, Human
ccgcugggagagccccagg

SEQ ID NO: 893222 - RNA, 19 nt, Human
ccguugagcgccacagcca

SEQ ID NO: 893223 - RNA, 20 nt, Human
ccguugagcgccacagccaa

SEQ ID NO: 893224 - RNA, 21 nt, Human
cgcuuggugcuggggagagag

SEQ ID NO: 893225 - RNA, 19 nt, Human
cggcccguguccuccacaa

SEQ ID NO: 893226 - RNA, 19 nt, Human
cgggaggggcugagacgug

SEQ ID NO: 893227 - RNA, 19 nt, Human
cggggcuggccacccuggc

SEQ ID NO: 893228 - RNA, 18 nt, Human
cucugccgcacuggagcc

SEQ ID NO: 893229 - RNA, 21 nt, Human
cucuguauagacccacuuuug

SEQ ID NO: 893230 - RNA, 23 nt, Human
cugaaacaacaaaaagcuacauc

SEQ ID NO: 893231 - RNA, 18 nt, Human
cuggggcugguggucccu

SEQ ID NO: 893232 - RNA, 18 nt, Human
gaaacaacaaaaagcuac

SEQ ID NO: 893233 - RNA, 19 nt, Human
gaaggcaggugguggggcg

SEQ ID NO: 893234 - RNA, 20 nt, Human
gacccagaaccaggcuggaa

SEQ ID NO: 893235 - RNA, 18 nt, Human
gagaaugugccaaaagga

SEQ ID NO: 893236 - RNA, 21 nt, Human
gagcacuguguggugcggccc

SEQ ID NO: 893237 - RNA, 22 nt, Human
gagcagcagaggggccgccgga

SEQ ID NO: 893238 - RNA, 19 nt, Human
gaggagccgugggggagcu

SEQ ID NO: 893239 - RNA, 23 nt, Human
gagugaggagccgugggggagcu

SEQ ID NO: 893240 - RNA, 19 nt, Human
gaugcggggacagcaggga

SEQ ID NO: 893241 - RNA, 21 nt, Human
gcagaacauuuacacgacccu

SEQ ID NO: 893242 - RNA, 20 nt, Human
gcagcagaggggccgccgga

SEQ ID NO: 893243 - RNA, 18 nt, Human
gcaggcucucccacuucc

SEQ ID NO: 893244 - RNA, 19 nt, Human
gcggggacagcagggacgg

SEQ ID NO: 893245 - RNA, 20 nt, Human
gcgugugcccaggccaggcc

SEQ ID NO: 893246 - RNA, 21 nt, Human
gcuggaaacaacacuggccug

SEQ ID NO: 893247 - RNA, 25 nt, Human
gcuugcacgaggcucugccgcacca

SEQ ID NO: 893248 - RNA, 23 nt, Human
ggacccagaaccaggcuggacuc

SEQ ID NO: 893249 - RNA, 18 nt, Human
ggacccgucaggcccgag

SEQ ID NO: 893250 - RNA, 19 nt, Human
ggaccugggagugagggug

SEQ ID NO: 893251 - RNA, 21 nt, Human
ggacuucuaggcaagguuccu

SEQ ID NO: 893252 - RNA, 20 nt, Human
ggagggguggggggucucug

SEQ ID NO: 893253 - RNA, 19 nt, Human
ggcaggcagacaggugggc

SEQ ID NO: 893254 - RNA, 21 nt, Human
ggcaggcagacaggugggcag

SEQ ID NO: 893255 - RNA, 23 nt, Human
ggccaagagaggaggaggcacug

SEQ ID NO: 893256 - RNA, 21 nt, Human
ggccaggcaggcucucccacu

SEQ ID NO: 893257 - RNA, 18 nt, Human
ggcuggcggcugggcagg

SEQ ID NO: 893258 - RNA, 19 nt, Human
ggcugggcaggcaggcggg

SEQ ID NO: 893259 - RNA, 18 nt, Human
gggaggggcugagacgug

SEQ ID NO: 893260 - RNA, 24 nt, Human
gggagugaggagccgugggggagc

SEQ ID NO: 893261 - RNA, 19 nt, Human
gggcaggcaggcggggagu

SEQ ID NO: 893262 - RNA, 21 nt, Human
gggcaggcugcccaccuugcc

SEQ ID NO: 893263 - RNA, 23 nt, Human
gggcaggguccggggugcagaaa

SEQ ID NO: 893264 - RNA, 19 nt, Human
ggggaccugggagugaggg

SEQ ID NO: 893265 - RNA, 21 nt, Human
ggggagcugccccccugggga

SEQ ID NO: 893266 - RNA, 18 nt, Human
ggggccaagagaggagga

SEQ ID NO: 893267 - RNA, 20 nt, Human
ggggccaagagaggaggagg

SEQ ID NO: 893268 - RNA, 21 nt, Human
ggggcgugggggugugguggg

SEQ ID NO: 893269 - RNA, 18 nt, Human
gggggagcugccccccug

SEQ ID NO: 893270 - RNA, 20 nt, Human
ggggguggcagucagcaagg

SEQ ID NO: 893271 - RNA, 22 nt, Human
gguggggcguggggguguggug

SEQ ID NO: 893272 - RNA, 18 nt, Human
gucccucugccauccugg

SEQ ID NO: 893273 - RNA, 19 nt, Human
gugauggggugggcagugg

SEQ ID NO: 893274 - RNA, 22 nt, Human
guggaaagcagaccuggauaca

SEQ ID NO: 893275 - RNA, 22 nt, Human
guggauggggagguggcaggcu

SEQ ID NO: 893276 - RNA, 24 nt, Human
uaaauagcuuucacucuguauaga

SEQ ID NO: 893277 - RNA, 22 nt, Human
uacagagcacacucaggcccaa

SEQ ID NO: 893278 - RNA, 18 nt, Human
uagcaccauggagacccc

SEQ ID NO: 893279 - RNA, 21 nt, Human
uaggaggugguaaugggucuc

SEQ ID NO: 893280 - RNA, 21 nt, Human
uauugcacuuucacugcaaca

SEQ ID NO: 893281 - RNA, 20 nt, Human
ucacugcaacaguuacaugg

SEQ ID NO: 893282 - RNA, 20 nt, Human
ucagauauugcacuuucacu

SEQ ID NO: 893283 - RNA, 18 nt, Human
ucagugcgugugcccagg

SEQ ID NO: 893284 - RNA, 19 nt, Human
ucagugcgugugcccaggc

SEQ ID NO: 893285 - RNA, 19 nt, Human
ucagugugguuguaggucc

SEQ ID NO: 893286 - RNA, 21 nt, Human
ucccaacaccagacccagguc

SEQ ID NO: 893287 - RNA, 21 nt, Human
ucuaacaggccuggggggugg

SEQ ID NO: 893288 - RNA, 22 nt, Human
ucucuggauggcuggucuccca

SEQ ID NO: 893289 - RNA, 19 nt, Human
ucugcugaaucccucuuua

SEQ ID NO: 893290 - RNA, 19 nt, Human
ugaaagaguuaagaaaagg

SEQ ID NO: 893291 - RNA, 21 nt, Human
ugagaaguagaaaggcguaga

SEQ ID NO: 893292 - RNA, 22 nt, Human
ugagcccugcagcucagcaccc

SEQ ID NO: 893293 - RNA, 25 nt, Human
ugcacaaaauaaauagcuuucacuc

SEQ ID NO: 893294 - RNA, 23 nt, Human
ugcaggacagcaugguccuuguu

SEQ ID NO: 893295 - RNA, 27 nt, Human
ugcccaggccaggccuccuggcggggc

SEQ ID NO: 893296 - RNA, 19 nt, Human
ugcggcccguguccuccac

SEQ ID NO: 893297 - RNA, 20 nt, Human
ugcggggacagcagggacgg

SEQ ID NO: 893298 - RNA, 19 nt, Human
ugcuggggagagagggcag

SEQ ID NO: 893299 - RNA, 18 nt, Human
uggaaacaacacuggccu

SEQ ID NO: 893300 - RNA, 23 nt, Human
uggccaguggauggggagguggc

SEQ ID NO: 893301 - RNA, 20 nt, Human
uggcccagagaaacagacgg

SEQ ID NO: 893302 - RNA, 18 nt, Human
uggcggcugggcaggcag

SEQ ID NO: 893303 - RNA, 23 nt, Human
uggcggggcuggccacccuggcc

SEQ ID NO: 893304 - RNA, 24 nt, Human
ugggaggggaccugggagugaggg

SEQ ID NO: 893305 - RNA, 19 nt, Human
uggggagagagggcagacg

SEQ ID NO: 893306 - RNA, 20 nt, Human
uggggagaggcugagcccac

SEQ ID NO: 893307 - RNA, 24 nt, Human
uggggagaggcugagcccacugcc

SEQ ID NO: 893308 - RNA, 23 nt, Human
ugggggguggcagucagcaaggc

SEQ ID NO: 893309 - RNA, 25 nt, Human
uggugcuggggagagagggcagacg

SEQ ID NO: 893310 - RNA, 18 nt, Human
ugguggggcgugggggug

SEQ ID NO: 893311 - RNA, 23 nt, Human
ugguggggcguggggguguggug

SEQ ID NO: 893312 - RNA, 22 nt, Human
uguauagacccacuuuugcaga

SEQ ID NO: 893313 - RNA, 24 nt, Human
uguggcuucuuagauucggcauga

SEQ ID NO: 893314 - RNA, 22 nt, Human
uguggugggagugggacuaagg

SEQ ID NO: 893315 - RNA, 24 nt, Human
uguggugggagugggacuaaggcu

SEQ ID NO: 893316 - RNA, 24 nt, Human
ugugugccccacccaccccagagu

SEQ ID NO: 893317 - RNA, 24 nt, Human
uuaaaaaaaccucauagaaaucag

SEQ ID NO: 893318 - RNA, 19 nt, Human
uucccaugggggggcaggc

SEQ ID NO: 893319 - RNA, 23 nt, Human
uuccgggaaagccgaggagcagc

SEQ ID NO: 893320 - RNA, 20 nt, Human
uuggagcugcuaccaaaugg

SEQ ID NO: 893321 - RNA, 21 nt, Human
uuucaguguggaggggcugcu

SEQ ID NO: 893322 - RNA, 23 nt, Human
aacaaaggacuggacucgacacu

SEQ ID NO: 893323 - RNA, 21 nt, Human
aacagcaacagcaacaaagga

SEQ ID NO: 893324 - RNA, 21 nt, Human
aacagcaacagcaacagcaac

SEQ ID NO: 893325 - RNA, 21 nt, Human
aacagcaacagcaacagcaac

SEQ ID NO: 893326 - RNA, 21 nt, Human
aacagcaacagcaacagcaac

SEQ ID NO: 893327 - RNA, 20 nt, Human
aagagaaagucagacccaca

SEQ ID NO: 893328 - RNA, 25 nt, Human
aaggacguguagaagagaaagucag

SEQ ID NO: 893329 - RNA, 18 nt, Human
acagcaacagcaacaaag

SEQ ID NO: 893330 - RNA, 19 nt, Human
acagcaacagcaacagcaa

SEQ ID NO: 893331 - RNA, 22 nt, Human
acagcaacagcaacagcaacaa

SEQ ID NO: 893332 - RNA, 24 nt, Human
acagcaacagcaacagcaacaaag

SEQ ID NO: 893333 - RNA, 25 nt, Human
acagcaacagcaacagcaacagcaa

SEQ ID NO: 893334 - RNA, 25 nt, Human
acagcaacagcaacagcaacagcaa

SEQ ID NO: 893335 - RNA, 18 nt, Human
accaccugugggaggcug

SEQ ID NO: 893336 - RNA, 21 nt, Human
acuuugaagaacaauaugggg

SEQ ID NO: 893337 - RNA, 24 nt, Human
agcaacagcaacagcaacaaagga

SEQ ID NO: 893338 - RNA, 20 nt, Human
agcaacagcaacagcaacag

SEQ ID NO: 893339 - RNA, 21 nt, Human
agcaacagcaacagcaacagc

SEQ ID NO: 893340 - RNA, 21 nt, Human
agcaacagcaacagcaacagc

SEQ ID NO: 893341 - RNA, 23 nt, Human
agcaagaugccaacagcaacagc

SEQ ID NO: 893342 - RNA, 23 nt, Human
aggaaaggacguguagaagagaa

SEQ ID NO: 893343 - RNA, 23 nt, Human
aggauuagcagcaagaugccaac

SEQ ID NO: 893344 - RNA, 18 nt, Human
caacagcaacagcaacag

SEQ ID NO: 893345 - RNA, 22 nt, Human
caacagcaacagcaacagcaac

SEQ ID NO: 893346 - RNA, 22 nt, Human
caacagcaacagcaacagcaac

SEQ ID NO: 893347 - RNA, 22 nt, Human
caacagcaacagcaacagcaac

SEQ ID NO: 893348 - RNA, 24 nt, Human
caacagcaacagcaacagcaacag

SEQ ID NO: 893349 - RNA, 22 nt, Human
caagaugccaacagcaacagca

SEQ ID NO: 893350 - RNA, 23 nt, Human
cacgcuuggugcuggcagcucca

SEQ ID NO: 893351 - RNA, 22 nt, Human
cagcaacaaaggacuggacucg

SEQ ID NO: 893352 - RNA, 26 nt, Human
cagcaacaaaggacuggacucgacac

SEQ ID NO: 893353 - RNA, 22 nt, Human
cagcaacagcaacaaaggacug

SEQ ID NO: 893354 - RNA, 23 nt, Human
cagcaacagcaacagcaacagca

SEQ ID NO: 893355 - RNA, 21 nt, Human
cagcaagaugccaacagcaac

SEQ ID NO: 893356 - RNA, 22 nt, Human
cagcuccagguccccugccccc

SEQ ID NO: 893357 - RNA, 23 nt, Human
ccaacaugagaaagaauuaacac

SEQ ID NO: 893358 - RNA, 24 nt, Human
ccugcccccacgggcucucccaag

SEQ ID NO: 893359 - RNA, 19 nt, Human
cuccagguccccugccccc

SEQ ID NO: 893360 - RNA, 21 nt, Human
cuggcagcuccagguccccug

SEQ ID NO: 893361 - RNA, 21 nt, Human
gaacacaaaagccugcugccc

SEQ ID NO: 893362 - RNA, 22 nt, Human
gcugacagcacaccgacagccc

SEQ ID NO: 893363 - RNA, 22 nt, Human
ggcagcuccagguccccugccc

SEQ ID NO: 893364 - RNA, 20 nt, Human
ggcccggcauucucacuccc

SEQ ID NO: 893365 - RNA, 21 nt, Human
ucaggcuggacacgacaggcu

SEQ ID NO: 893366 - RNA, 20 nt, Human
uccagguccccugcccccac

SEQ ID NO: 893367 - RNA, 23 nt, Human
ugcacggcuguaccaccuguggg

SEQ ID NO: 893368 - RNA, 18 nt, Human
uggaauagagaauacagg

SEQ ID NO: 893369 - RNA, 24 nt, Human
uggaauagagaauacaggcagugg

SEQ ID NO: 893370 - RNA, 24 nt, Human
ugggaggcugacagcacaccgaca

SEQ ID NO: 893371 - RNA, 26 nt, Human
uuggugcuggcagcuccagguccccu

SEQ ID NO: 893372 - RNA, 24 nt, Human
aagcagcccaucuguguuccauca

SEQ ID NO: 893373 - RNA, 18 nt, Human
aagugaggggagcugugc

SEQ ID NO: 893374 - RNA, 21 nt, Human
aggggcaggucuaaacucaca

SEQ ID NO: 893375 - RNA, 19 nt, Human
caggguccgauccggaggg

SEQ ID NO: 893376 - RNA, 19 nt, Human
cagggugggggugggaggg

SEQ ID NO: 893377 - RNA, 18 nt, Human
ccaccuuucugaaacugc

SEQ ID NO: 893378 - RNA, 23 nt, Human
ccauucgcaggguccgauccgga

SEQ ID NO: 893379 - RNA, 21 nt, Human
cgcaggguccgauccggaggg

SEQ ID NO: 893380 - RNA, 25 nt, Human
cuauauaaaauuccaccuuucugaa

SEQ ID NO: 893381 - RNA, 21 nt, Human
cugaaacugcagucugaccuc

SEQ ID NO: 893382 - RNA, 19 nt, Human
gauaggccgcagcgagugg

SEQ ID NO: 893383 - RNA, 18 nt, Human
ggagccagauaggccgca

SEQ ID NO: 893384 - RNA, 18 nt, Human
ggggagcugugccuggau

SEQ ID NO: 893385 - RNA, 24 nt, Human
gggugggggugggaggggcagguc

SEQ ID NO: 893386 - RNA, 18 nt, Human
gucugaccucaggugaag

SEQ ID NO: 893387 - RNA, 20 nt, Human
ucaagagagucaagguucuc

SEQ ID NO: 893388 - RNA, 27 nt, Human
ucaaugccagugcugcucagcccucag

SEQ ID NO: 893389 - RNA, 25 nt, Human
ucauaguggcagggugggggugggg

SEQ ID NO: 893390 - RNA, 19 nt, Human
uccaccuuucugaaacugc

SEQ ID NO: 893391 - RNA, 22 nt, Human
uccaccuuucugaaacugcagu

SEQ ID NO: 893392 - RNA, 22 nt, Human
ugcucagcccucagcagaacuu

SEQ ID NO: 893393 - RNA, 24 nt, Human
uggauccugccuccaagucacauu

SEQ ID NO: 893394 - RNA, 18 nt, Human
uuuuuuuuuuuuuuuuug

SEQ ID NO: 893395 - RNA, 24 nt, Human
uuuuuuuuuuuuuuuuuugacuuu

SEQ ID NO: 893396 - RNA, 24 nt, Human
aucguccuauucugugacacauua

SEQ ID NO: 893397 - RNA, 25 nt, Human
ucauaucguccuauucugugacaca

SEQ ID NO: 893398 - RNA, 25 nt, Human
uuuuuuuuuuuuuuuuuaaauuuuu

SEQ ID NO: 893399 - RNA, 22 nt, Human
aaaaagaaaaucuggauugagu

SEQ ID NO: 893400 - RNA, 21 nt, Human
aauacaaaaagaaaaucugga

SEQ ID NO: 893401 - RNA, 22 nt, Human
caaacacuaagacuuaaauaua

SEQ ID NO: 893402 - RNA, 22 nt, Human
caagagcuucuuucaugaauuc

SEQ ID NO: 893403 - RNA, 25 nt, Human
cuuaaauauacaacuugaucauaca

SEQ ID NO: 893404 - RNA, 24 nt, Human
gguaaaauacaaaaagaaaaucug

SEQ ID NO: 893405 - RNA, 18 nt, Human
uaaaauacaaaaagaaaa

SEQ ID NO: 893406 - RNA, 21 nt, Human
uaaauagcaauccuaugaaca

SEQ ID NO: 893407 - RNA, 19 nt, Human
uacaaaaagaaaaucugga

SEQ ID NO: 893408 - RNA, 25 nt, Human
ugaucaaaaacuuuggucaagagcu

SEQ ID NO: 893409 - RNA, 26 nt, Human
uugaucauacaauuaucucaaaacau

SEQ ID NO: 893410 - RNA, 19 nt, Human
uuuuuuuuuuuuuuguucu

SEQ ID NO: 893411 - RNA, 27 nt, Human
aagaugccagggcgacagcagugggca

SEQ ID NO: 893412 - RNA, 19 nt, Human
acaggacagcugagggagg

SEQ ID NO: 893413 - RNA, 22 nt, Human
accccaccagccugagaguggg

SEQ ID NO: 893414 - RNA, 18 nt, Human
agacucgggacagcuggc

SEQ ID NO: 893415 - RNA, 22 nt, Human
agaguggggaggggcagaggga

SEQ ID NO: 893416 - RNA, 20 nt, Human
aggcagggggacugagugug

SEQ ID NO: 893417 - RNA, 22 nt, Human
ccaggaaugggcugcuuucccc

SEQ ID NO: 893418 - RNA, 19 nt, Human
ccccaccccaccagccuga

SEQ ID NO: 893419 - RNA, 21 nt, Human
ccccaccccaccagccugaga

SEQ ID NO: 893420 - RNA, 22 nt, Human
ccccaccccaccagccugagag

SEQ ID NO: 893421 - RNA, 24 nt, Human
cccuggcugggccccugcucccuc

SEQ ID NO: 893422 - RNA, 18 nt, Human
ccucugagcugggguggg

SEQ ID NO: 893423 - RNA, 18 nt, Human
ccugagaguggggagggg

SEQ ID NO: 893424 - RNA, 21 nt, Human
cgggacagcuggcuggggccu

SEQ ID NO: 893425 - RNA, 19 nt, Human
cucugagcccaggaauggg

SEQ ID NO: 893426 - RNA, 20 nt, Human
cugagcccaggaaugggcug

SEQ ID NO: 893427 - RNA, 18 nt, Human
cugggccccugcucccuc

SEQ ID NO: 893428 - RNA, 23 nt, Human
gaaugggcugcuuuccccacccc

SEQ ID NO: 893429 - RNA, 19 nt, Human
gagcuggggugggagucuc

SEQ ID NO: 893430 - RNA, 18 nt, Human
gaggguccgucccuggcu

SEQ ID NO: 893431 - RNA, 20 nt, Human
gcggugacggggagggcaaa

SEQ ID NO: 893432 - RNA, 22 nt, Human
ggcugggccccugcucccucug

SEQ ID NO: 893433 - RNA, 19 nt, Human
ucagagcugcggcaggaac

SEQ ID NO: 893434 - RNA, 19 nt, Human
ucaggguaucuccccugcc

SEQ ID NO: 893435 - RNA, 22 nt, Human
ucccucugagcuggggugggag

SEQ ID NO: 893436 - RNA, 23 nt, Human
ucccucugagcuggggugggagu

SEQ ID NO: 893437 - RNA, 18 nt, Human
ucccugggaggaaugagg

SEQ ID NO: 893438 - RNA, 23 nt, Human
ucgggacagcuggcuggggccuc

SEQ ID NO: 893439 - RNA, 22 nt, Human
ugagcuggggugggagucucug

SEQ ID NO: 893440 - RNA, 18 nt, Human
ugcgcggugacggggagg

SEQ ID NO: 893441 - RNA, 21 nt, Human
ugcuuuccccaccccaccagc

SEQ ID NO: 893442 - RNA, 19 nt, Human
uggggugggagucucugag

SEQ ID NO: 893443 - RNA, 24 nt, Human
uggggugggagucucugagcccag

SEQ ID NO: 893444 - RNA, 22 nt, Human
ugggugcgcggugacggggagg

SEQ ID NO: 893445 - RNA, 25 nt, Human
uuuuuuuuuuuuuuuuuuucagggg

SEQ ID NO: 893446 - RNA, 21 nt, Human
agaugcugcagaucccgagcc

SEQ ID NO: 893447 - RNA, 19 nt, Human
aggcugggguggggcagag

SEQ ID NO: 893448 - RNA, 18 nt, Human
agggcucccuggcucugg

SEQ ID NO: 893449 - RNA, 21 nt, Human
aggguggggcccuggggaggg

SEQ ID NO: 893450 - RNA, 22 nt, Human
caaaaccagagucauuuccugg

SEQ ID NO: 893451 - RNA, 19 nt, Human
cagagucauuuccugggcu

SEQ ID NO: 893452 - RNA, 19 nt, Human
cagaguugaggcuaagggc

SEQ ID NO: 893453 - RNA, 19 nt, Human
cagaucccgagccccgagg

SEQ ID NO: 893454 - RNA, 18 nt, Human
caggccacucaaaaccag

SEQ ID NO: 893455 - RNA, 24 nt, Human
caggccacucaaaaccagagucau

SEQ ID NO: 893456 - RNA, 23 nt, Human
caggguggggcccuggggagggg

SEQ ID NO: 893457 - RNA, 25 nt, Human
caggguggggcccuggggaggggcu

SEQ ID NO: 893458 - RNA, 18 nt, Human
ccccgagggagccucugc

SEQ ID NO: 893459 - RNA, 24 nt, Human
ccucugcccauuacaggccacuca

SEQ ID NO: 893460 - RNA, 23 nt, Human
gaucccgagccccgagggagccu

SEQ ID NO: 893461 - RNA, 23 nt, Human
ggaagggugugggcugauccaca

SEQ ID NO: 893462 - RNA, 20 nt, Human
ggcaggguggggcccugggg

SEQ ID NO: 893463 - RNA, 22 nt, Human
ggguggggcccuggggaggggc

SEQ ID NO: 893464 - RNA, 20 nt, Human
uagaucuucuacauguaggc

SEQ ID NO: 893465 - RNA, 18 nt, Human
uagcuaaauauuagugga

SEQ ID NO: 893466 - RNA, 22 nt, Human
ucccgagccccgagggagccuc

SEQ ID NO: 893467 - RNA, 22 nt, Human
ucuguguuuccauagaucuucu

SEQ ID NO: 893468 - RNA, 20 nt, Human
uggaagaggcuggggugggg

SEQ ID NO: 893469 - RNA, 19 nt, Human
ugggaagggugugggcuga

SEQ ID NO: 893470 - RNA, 19 nt, Human
ugggguggggcagaguuga

SEQ ID NO: 893471 - RNA, 23 nt, Human
ugggguggggcagaguugaggcu

SEQ ID NO: 893472 - RNA, 23 nt, Human
aagagcagagggcgccugggccu

SEQ ID NO: 893473 - RNA, 20 nt, Human
agguggggggugggggcugg

SEQ ID NO: 893474 - RNA, 18 nt, Human
auggguuacacagacgag

SEQ ID NO: 893475 - RNA, 25 nt, Human
caaggugcaccaccuccaucaugcc

SEQ ID NO: 893476 - RNA, 19 nt, Human
cacacagccggcagcugcu

SEQ ID NO: 893477 - RNA, 21 nt, Human
caucaugccagcaccugcagu

SEQ ID NO: 893478 - RNA, 22 nt, Human
cuccccaugggcacacagccgg

SEQ ID NO: 893479 - RNA, 22 nt, Human
cugcucccugcccugaggucga

SEQ ID NO: 893480 - RNA, 22 nt, Human
cuucagauguguucaccgccau

SEQ ID NO: 893481 - RNA, 20 nt, Human
ggagguggggggugggggcu

SEQ ID NO: 893482 - RNA, 21 nt, Human
gggugggggcugggcucccca

SEQ ID NO: 893483 - RNA, 20 nt, Human
gguggggggugggggcuggg

SEQ ID NO: 893484 - RNA, 20 nt, Human
uggcuucagauguguucacc

SEQ ID NO: 893485 - RNA, 19 nt, Human
uggggggugggggcugggc

SEQ ID NO: 893486 - RNA, 19 nt, Human
ugugcugggagcgaggugu

SEQ ID NO: 893487 - RNA, 20 nt, Human
uuagagccaggaaacauagu

SEQ ID NO: 893488 - RNA, 21 nt, Human
uuagagccaggaaacauagug

SEQ ID NO: 893489 - RNA, 23 nt, Human
uugcuguuugcugucggaggugg

SEQ ID NO: 893490 - RNA, 26 nt, Human
uugcuguuugcugucggagguggggg

SEQ ID NO: 893491 - RNA, 24 nt, Human
uuuuauggguuacacagacgagcc

SEQ ID NO: 893492 - RNA, 22 nt, Human
acucaucuugccgcucuugccu

SEQ ID NO: 893493 - RNA, 22 nt, Human
acucuugaaucucagagagaag

SEQ ID NO: 893494 - RNA, 19 nt, Human
agaaacaagaggaggggcc

SEQ ID NO: 893495 - RNA, 25 nt, Human
agagaaggaggcugugcacccagac

SEQ ID NO: 893496 - RNA, 21 nt, Human
aggaggggcuggggaagggcu

SEQ ID NO: 893497 - RNA, 21 nt, Human
auaagcucagggcuucugggu

SEQ ID NO: 893498 - RNA, 24 nt, Human
cagagagaaggaggcugugcaccc

SEQ ID NO: 893499 - RNA, 24 nt, Human
ccagaugaggccuuuggaauacaa

SEQ ID NO: 893500 - RNA, 21 nt, Human
ggaggggcuggggaagggcug

SEQ ID NO: 893501 - RNA, 22 nt, Human
ggaggggcuggggaagggcugg

SEQ ID NO: 893502 - RNA, 24 nt, Human
uaggaccagacuuucccgaggcuc

SEQ ID NO: 893503 - RNA, 19 nt, Human
ucaaaacucaucuugccgc

SEQ ID NO: 893504 - RNA, 25 nt, Human
ucccgaggcuccagaugaggccuuc

SEQ ID NO: 893505 - RNA, 23 nt, Human
uccuggaggaggaagaggcugcu

SEQ ID NO: 893506 - RNA, 20 nt, Human
ugaaugaagaaacaagagga

SEQ ID NO: 893507 - RNA, 19 nt, Human
uggaauacaacgcucaaaa

SEQ ID NO: 893508 - RNA, 23 nt, Human
uggaggaggaagaggcugcugau

SEQ ID NO: 893509 - RNA, 21 nt, Human
uggggaagggcuggaagggcg

SEQ ID NO: 893510 - RNA, 24 nt, Human
uuuuuuuuuuuuuuuuuuuuccag

SEQ ID NO: 893511 - RNA, 19 nt, Human
acagaagguaacagucaca

SEQ ID NO: 893512 - RNA, 25 nt, Human
agaaaaccccaacuccuagaagccc

SEQ ID NO: 893513 - RNA, 23 nt, Human
agagcauaucccuagcccccucc

SEQ ID NO: 893514 - RNA, 21 nt, Human
aggcaggagugugcucacagc

SEQ ID NO: 893515 - RNA, 21 nt, Human
auccauuccuuucccuuucug

SEQ ID NO: 893516 - RNA, 20 nt, Human
caacccagagcuaggggcaa

SEQ ID NO: 893517 - RNA, 19 nt, Human
caagaauaaccucucuauc

SEQ ID NO: 893518 - RNA, 28 nt, Human
caagcccaacccagagcuaggggcaaaa

SEQ ID NO: 893519 - RNA, 19 nt, Human
caagucaaggcgugggcag

SEQ ID NO: 893520 - RNA, 21 nt, Human
cacaaauuuauucuccugcaa

SEQ ID NO: 893521 - RNA, 20 nt, Human
cacacccacguccacuucca

SEQ ID NO: 893522 - RNA, 19 nt, Human
cacguccacuuccaucauc

SEQ ID NO: 893523 - RNA, 23 nt, Human
caguuucaaugggcucaagucaa

SEQ ID NO: 893524 - RNA, 18 nt, Human
cauucauggccccugcuc

SEQ ID NO: 893525 - RNA, 19 nt, Human
ccaacuccuagaagccccc

SEQ ID NO: 893526 - RNA, 27 nt, Human
cccaugaaagccccagagcauaucccc

SEQ ID NO: 893527 - RNA, 21 nt, Human
ccccaagcccaacccagagcu

SEQ ID NO: 893528 - RNA, 22 nt, Human
ccccagagcauaucccuagccc

SEQ ID NO: 893529 - RNA, 19 nt, Human
ccuagaagcccccugagac

SEQ ID NO: 893530 - RNA, 19 nt, Human
ccugggguccaagaaggag

SEQ ID NO: 893531 - RNA, 25 nt, Human
cucacgucacacccacguccacuuc

SEQ ID NO: 893532 - RNA, 22 nt, Human
cugaaucagcaagaauaaccuc

SEQ ID NO: 893533 - RNA, 23 nt, Human
cugcacugucccuuucugccaca

SEQ ID NO: 893534 - RNA, 20 nt, Human
cugcucacgucacacccacg

SEQ ID NO: 893535 - RNA, 25 nt, Human
cuuggccccaagcccaacccagagc

SEQ ID NO: 893536 - RNA, 20 nt, Human
gaccuucuggccucuuucuu

SEQ ID NO: 893537 - RNA, 18 nt, Human
gaggccaggagcucaaga

SEQ ID NO: 893538 - RNA, 24 nt, Human
gccccagagcauaucccuagcccc

SEQ ID NO: 893539 - RNA, 20 nt, Human
gcggcauucauggccccugc

SEQ ID NO: 893540 - RNA, 22 nt, Human
ggaggccaggagcucaagauca

SEQ ID NO: 893541 - RNA, 19 nt, Human
gggcagggcugguuucuuu

SEQ ID NO: 893542 - RNA, 19 nt, Human
uacaucugcacugucccuu

SEQ ID NO: 893543 - RNA, 20 nt, Human
ucgaugaggcaggagugugc

SEQ ID NO: 893544 - RNA, 21 nt, Human
ucuucaucauucccaugaaag

SEQ ID NO: 893545 - RNA, 19 nt, Human
ugaaagccccagagcauau

SEQ ID NO: 893546 - RNA, 18 nt, Human
ugauaacauuuuucucau

SEQ ID NO: 893547 - RNA, 24 nt, Human
ugcaauucuggaggccaggagcuc

SEQ ID NO: 893548 - RNA, 21 nt, Human
ugccacagaagguaacaguca

SEQ ID NO: 893549 - RNA, 22 nt, Human
ugccacagaagguaacagucac

SEQ ID NO: 893550 - RNA, 18 nt, Human
uggccccaagcccaaccc

SEQ ID NO: 893551 - RNA, 20 nt, Human
uggccccaagcccaacccag

SEQ ID NO: 893552 - RNA, 20 nt, Human
uggugauauuuugggcccac

SEQ ID NO: 893553 - RNA, 18 nt, Human
uguaggagaggaggggac

SEQ ID NO: 893554 - RNA, 21 nt, Human
uuauucuccugcaauucuggu

SEQ ID NO: 893555 - RNA, 18 nt, Human
uuuuuuuuuuuuuuuuug

SEQ ID NO: 893556 - RNA, 18 nt, Human
uuuuuuuuuuuuuuuuug

SEQ ID NO: 893557 - RNA, 22 nt, Human
uuuuuuuuuuuuuuuuuuuggc

SEQ ID NO: 893558 - RNA, 23 nt, Human
aaaaaacaaacccaaacaagcca

SEQ ID NO: 893559 - RNA, 24 nt, Human
aaaaaacaaacccaaacaagccac

SEQ ID NO: 893560 - RNA, 22 nt, Human
aaaaacaaaaacaaaacaaaaa

SEQ ID NO: 893561 - RNA, 21 nt, Human
aaaacaaaaacaaaacaaaaa

SEQ ID NO: 893562 - RNA, 23 nt, Human
aaaacaaaacaaaaaacaaaccc

SEQ ID NO: 893563 - RNA, 22 nt, Human
aaacaaaacaaaaaacaaaccc

SEQ ID NO: 893564 - RNA, 23 nt, Human
aaacaaaacaaaaaacaaaccca

SEQ ID NO: 893565 - RNA, 25 nt, Human
aaacaaaacaaaaaacaaacccaaa

SEQ ID NO: 893566 - RNA, 18 nt, Human
aaacaaacccaaacaagc

SEQ ID NO: 893567 - RNA, 22 nt, Human
aaacaaacccaaacaagccaca

SEQ ID NO: 893568 - RNA, 20 nt, Human
aaacccaaacaagccacaaa

SEQ ID NO: 893569 - RNA, 24 nt, Human
aaacgcaaaaacaaaaacaaaaca

SEQ ID NO: 893570 - RNA, 18 nt, Human
aaagaaaggaguuggacc

SEQ ID NO: 893571 - RNA, 26 nt, Human
aacaaaaaacaaacccaaacaagcca

SEQ ID NO: 893572 - RNA, 22 nt, Human
aacgcaaaaacaaaaacaaaac

SEQ ID NO: 893573 - RNA, 25 nt, Human
aacgcaaaaacaaaaacaaaacaaa

SEQ ID NO: 893574 - RNA, 28 nt, Human
aacgcaaaaacaaaaacaaaacaaaaaa

SEQ ID NO: 893575 - RNA, 25 nt, Human
aagaaagcaggggaaaaccgguacc

SEQ ID NO: 893576 - RNA, 24 nt, Human
aagaaagcaggggaaaacgcaaaa

SEQ ID NO: 893577 - RNA, 31 nt, Human
aagcaggggaaaacgcaaaaacaaaaacaaa

SEQ ID NO: 893578 - RNA, 18 nt, Human
aauucguggcgcuccccu

SEQ ID NO: 893579 - RNA, 20 nt, Human
aauucguggcgcuccccugc

SEQ ID NO: 893580 - RNA, 22 nt, Human
acaaaacaaaaaacaaacccaa

SEQ ID NO: 893581 - RNA, 23 nt, Human
acaaaacaaaaaacaaacccaaa

SEQ ID NO: 893582 - RNA, 24 nt, Human
acaaaacaaaaaacaaacccaaac

SEQ ID NO: 893583 - RNA, 20 nt, Human
acaaacccaaacaagccaca

SEQ ID NO: 893584 - RNA, 24 nt, Human
acaaacccaaacaagccacaaaga

SEQ ID NO: 893585 - RNA, 24 nt, Human
acaaagaaaggaguuggacccaga

SEQ ID NO: 893586 - RNA, 23 nt, Human
accgccgccgggguggggccugg

SEQ ID NO: 893587 - RNA, 22 nt, Human
acgaaagcaggggugggggguc

SEQ ID NO: 893588 - RNA, 23 nt, Human
agaaggagaggcaugggcagagc

SEQ ID NO: 893589 - RNA, 21 nt, Human
agcuggguggguggaaucugc

SEQ ID NO: 893590 - RNA, 22 nt, Human
agcuggguggguggaaucugcc

SEQ ID NO: 893591 - RNA, 19 nt, Human
caaaacaaaaaacaaaccc

SEQ ID NO: 893592 - RNA, 25 nt, Human
caaaacaaaaaacaaacccaaacaa

SEQ ID NO: 893593 - RNA, 24 nt, Human
caaacaagccacaaagaaaggagu

SEQ ID NO: 893594 - RNA, 19 nt, Human
caaacccaaacaagccaca

SEQ ID NO: 893595 - RNA, 20 nt, Human
caaacccaaacaagccacaa

SEQ ID NO: 893596 - RNA, 19 nt, Human
caaccucccggcgccuccc

SEQ ID NO: 893597 - RNA, 18 nt, Human
caagugacgacauuaacg

SEQ ID NO: 893598 - RNA, 19 nt, Human
caagugacgacauuaacgc

SEQ ID NO: 893599 - RNA, 23 nt, Human
caccgccgccgggguggggccug

SEQ ID NO: 893600 - RNA, 19 nt, Human
cacuuggucaauucguggc

SEQ ID NO: 893601 - RNA, 24 nt, Human
cccggaggacagggcagagggcuc

SEQ ID NO: 893602 - RNA, 19 nt, Human
ccgccgccgggguggggcc

SEQ ID NO: 893603 - RNA, 21 nt, Human
ccgccgccgggguggggccug

SEQ ID NO: 893604 - RNA, 21 nt, Human
ccucccuaguggagccgagag

SEQ ID NO: 893605 - RNA, 21 nt, Human
ccuccucgccgccaccgccgc

SEQ ID NO: 893606 - RNA, 20 nt, Human
cucacacaaacauauuuuac

SEQ ID NO: 893607 - RNA, 25 nt, Human
cuccucgccgccaccgccgccgggg

SEQ ID NO: 893608 - RNA, 21 nt, Human
gaaaacgcaaaaacaaaaaca

SEQ ID NO: 893609 - RNA, 19 nt, Human
gaagaaagcaggggaaaac

SEQ ID NO: 893610 - RNA, 23 nt, Human
gagcuggguggguggaaucugcc

SEQ ID NO: 893611 - RNA, 21 nt, Human
gaggacagggcagagggcucc

SEQ ID NO: 893612 - RNA, 24 nt, Human
gaguucagcccucucccaagguuc

SEQ ID NO: 893613 - RNA, 22 nt, Human
gcaaaaacaaaaacaaaacaaa

SEQ ID NO: 893614 - RNA, 21 nt, Human
gcagagggcucccugccuaca

SEQ ID NO: 893615 - RNA, 19 nt, Human
gcgggcgggggagggggga

SEQ ID NO: 893616 - RNA, 19 nt, Human
ggaggggggagugggggga

SEQ ID NO: 893617 - RNA, 23 nt, Human
ggaggggggaguggggggaggga

SEQ ID NO: 893618 - RNA, 18 nt, Human
ggcaugggcagagcuggg

SEQ ID NO: 893619 - RNA, 23 nt, Human
ggccugggccuggggccgcgagu

SEQ ID NO: 893620 - RNA, 18 nt, Human
ggccuggggccgcgaguc

SEQ ID NO: 893621 - RNA, 20 nt, Human
gggcagagggcucccugccu

SEQ ID NO: 893622 - RNA, 24 nt, Human
ggggaggggggaguggggggaggg

SEQ ID NO: 893623 - RNA, 22 nt, Human
ggguggaaucugccacuccaag

SEQ ID NO: 893624 - RNA, 20 nt, Human
ggguggggccugggccuggg

SEQ ID NO: 893625 - RNA, 24 nt, Human
guggggccugggccuggggccgcg

SEQ ID NO: 893626 - RNA, 24 nt, Human
uaaaaaaaggaagaaauucucugu

SEQ ID NO: 893627 - RNA, 23 nt, Human
uaauaauaauaauaaccaccaua

SEQ ID NO: 893628 - RNA, 20 nt, Human
uacaaaaugcacgaaagcag

SEQ ID NO: 893629 - RNA, 22 nt, Human
uacauggccauaaauauuuagc

SEQ ID NO: 893630 - RNA, 20 nt, Human
uagcuucacuuggucaauuc

SEQ ID NO: 893631 - RNA, 20 nt, Human
uaucgcuacucacacaaaca

SEQ ID NO: 893632 - RNA, 22 nt, Human
ucacuuggucaauucguggcgc

SEQ ID NO: 893633 - RNA, 21 nt, Human
ucagcccucucccaagguuca

SEQ ID NO: 893634 - RNA, 24 nt, Human
uccccccggggagaggcaaagaag

SEQ ID NO: 893635 - RNA, 18 nt, Human
ucgccgccaccgccgccg

SEQ ID NO: 893636 - RNA, 21 nt, Human
ucgccgccaccgccgccgggg

SEQ ID NO: 893637 - RNA, 22 nt, Human
ucugcgcccggcgcuguugggg

SEQ ID NO: 893638 - RNA, 22 nt, Human
uggaaucugccacuccaaggag

SEQ ID NO: 893639 - RNA, 25 nt, Human
uggacccagacgggaaacaggccgg

SEQ ID NO: 893640 - RNA, 19 nt, Human
uggccauaaauauuuagca

SEQ ID NO: 893641 - RNA, 18 nt, Human
ugggcagagcuggguggg

SEQ ID NO: 893642 - RNA, 19 nt, Human
ugggcagagcugggugggu

SEQ ID NO: 893643 - RNA, 20 nt, Human
ugucgcaaaguuguagcuuc

SEQ ID NO: 893644 - RNA, 22 nt, Human
uuccauauuugagaaauguuug

SEQ ID NO: 893645 - RNA, 23 nt, Human
uuuccauauuugagaaauguuug

SEQ ID NO: 893646 - RNA, 22 nt, Human
aaacccgguaacaccuccggug

SEQ ID NO: 893647 - RNA, 23 nt, Human
acauauuuuuuuaacgaggggac

SEQ ID NO: 893648 - RNA, 18 nt, Human
acccgccccgucccuacc

SEQ ID NO: 893649 - RNA, 25 nt, Human
acgaaacagaaaggaaacccgguaa

SEQ ID NO: 893650 - RNA, 23 nt, Human
agcgcggccaggguccuagccuc

SEQ ID NO: 893651 - RNA, 22 nt, Human
aggcagagggagagaagcccuu

SEQ ID NO: 893652 - RNA, 23 nt, Human
aggcagcgcggcggcuccagcuc

SEQ ID NO: 893653 - RNA, 25 nt, Human
aggguccuagccuccuggucuccuc

SEQ ID NO: 893654 - RNA, 22 nt, Human
agugagcugcgauccgaagccc

SEQ ID NO: 893655 - RNA, 18 nt, Human
cagaaaggaaacccggua

SEQ ID NO: 893656 - RNA, 24 nt, Human
cagccuccccccacccccaacuuu

SEQ ID NO: 893657 - RNA, 21 nt, Human
caggcccggaugcccugcaag

SEQ ID NO: 893658 - RNA, 19 nt, Human
cagucauccuccucgcccc

SEQ ID NO: 893659 - RNA, 18 nt, Human
ccaggcccgcaaaggggg

SEQ ID NO: 893660 - RNA, 18 nt, Human
ccagucauccuccucgcc

SEQ ID NO: 893661 - RNA, 21 nt, Human
ccaguccaaauaauaaauccc

SEQ ID NO: 893662 - RNA, 20 nt, Human
ccccauuuuucucuccuuca

SEQ ID NO: 893663 - RNA, 18 nt, Human
ccccgccaacgcuucgcg

SEQ ID NO: 893664 - RNA, 27 nt, Human
ccccggcgcccagccggcguuucugcc

SEQ ID NO: 893665 - RNA, 22 nt, Human
ccccgucccuaccaggcccgga

SEQ ID NO: 893666 - RNA, 24 nt, Human
ccccugaguccccuuccccagggg

SEQ ID NO: 893667 - RNA, 24 nt, Human
cccggcgcccagccggcguuucug

SEQ ID NO: 893668 - RNA, 21 nt, Human
cccugaggagcuagacguaca

SEQ ID NO: 893669 - RNA, 18 nt, Human
cccuggugcaacggcugu

SEQ ID NO: 893670 - RNA, 19 nt, Human
cccuggugcaacggcugug

SEQ ID NO: 893671 - RNA, 22 nt, Human
ccuccggugggccaccaggucc

SEQ ID NO: 893672 - RNA, 21 nt, Human
ccuccuggucuccucucgcug

SEQ ID NO: 893673 - RNA, 18 nt, Human
cgaagcccugaggagcua

SEQ ID NO: 893674 - RNA, 20 nt, Human
cgacaauccggagaucugga

SEQ ID NO: 893675 - RNA, 21 nt, Human
cgccaacgcuucgcggaggcc

SEQ ID NO: 893676 - RNA, 18 nt, Human
cgccaggcugcgcugggg

SEQ ID NO: 893677 - RNA, 18 nt, Human
cgccccgucccuaccagg

SEQ ID NO: 893678 - RNA, 19 nt, Human
cgcggccaggguccuagcc

SEQ ID NO: 893679 - RNA, 18 nt, Human
cgcugccgccgcugccga

SEQ ID NO: 893680 - RNA, 18 nt, Human
cgcuuuggaagaaccaag

SEQ ID NO: 893681 - RNA, 23 nt, Human
cggcgccaggcugcgcuggggug

SEQ ID NO: 893682 - RNA, 19 nt, Human
cggcugcaguacccuggug

SEQ ID NO: 893683 - RNA, 22 nt, Human
cucgccccugaguccccuuccc

SEQ ID NO: 893684 - RNA, 18 nt, Human
gaagaguccugcgucccc

SEQ ID NO: 893685 - RNA, 20 nt, Human
gaugcccugcaaggugcccu

SEQ ID NO: 893686 - RNA, 22 nt, Human
gccccugaguccccuuccccag

SEQ ID NO: 893687 - RNA, 21 nt, Human
gccuccccccacccccaacuu

SEQ ID NO: 893688 - RNA, 21 nt, Human
gcggcggcuccagcucuccuc

SEQ ID NO: 893689 - RNA, 22 nt, Human
gcuccagcucuccuccuggacu

SEQ ID NO: 893690 - RNA, 19 nt, Human
ggacccagucauccuccuc

SEQ ID NO: 893691 - RNA, 23 nt, Human
ggccgcggaaaggcagagggaga

SEQ ID NO: 893692 - RNA, 23 nt, Human
ggcggcuccagcucuccuccugg

SEQ ID NO: 893693 - RNA, 18 nt, Human
gggaccugggggucuggg

SEQ ID NO: 893694 - RNA, 22 nt, Human
gggcuuuugacagacgcggucc

SEQ ID NO: 893695 - RNA, 20 nt, Human
gggugcccgccgcgugaccc

SEQ ID NO: 893696 - RNA, 18 nt, Human
gugcgcugccgccgcugc

SEQ ID NO: 893697 - RNA, 24 nt, Human
guuuguucagccuccccccacccc

SEQ ID NO: 893698 - RNA, 20 nt, Human
uacagaauacgaaacagaaa

SEQ ID NO: 893699 - RNA, 20 nt, Human
uacccuggugcaacggcugu

SEQ ID NO: 893700 - RNA, 24 nt, Human
uagauagauagauaacaugugcug

SEQ ID NO: 893701 - RNA, 23 nt, Human
ucaggcccuucucgagcuucagu

SEQ ID NO: 893702 - RNA, 21 nt, Human
uccccaggccucgagugagcu

SEQ ID NO: 893703 - RNA, 24 nt, Human
ucccccgacaauccggagaucugg

SEQ ID NO: 893704 - RNA, 19 nt, Human
uccccggcgcccagccggc

SEQ ID NO: 893705 - RNA, 20 nt, Human
uccuccuggacuccgccgcu

SEQ ID NO: 893706 - RNA, 21 nt, Human
ucgccccugaguccccuuccc

SEQ ID NO: 893707 - RNA, 19 nt, Human
ucugccucagagacagucc

SEQ ID NO: 893708 - RNA, 21 nt, Human
ugaguuuguucagccuccccc

SEQ ID NO: 893709 - RNA, 22 nt, Human
ugccagggucggggccaucguc

SEQ ID NO: 893710 - RNA, 23 nt, Human
ugcgcuggggugcccgccgcgug

SEQ ID NO: 893711 - RNA, 18 nt, Human
uggaauuucucaagccac

SEQ ID NO: 893712 - RNA, 24 nt, Human
ugugguuauaguuauauagauaga

SEQ ID NO: 893713 - RNA, 27 nt, Human
uuuuuuuuuuuuuuuuuuuuuuugggg

SEQ ID NO: 893714 - RNA, 23 nt, Human
aaccccacagaaggucccaccuc

SEQ ID NO: 893715 - RNA, 19 nt, Human
aaggaugggcaaggaggca

SEQ ID NO: 893716 - RNA, 24 nt, Human
aauccuuucccucccuccccccaa

SEQ ID NO: 893717 - RNA, 18 nt, Human
acaccgccugguggggcu

SEQ ID NO: 893718 - RNA, 20 nt, Human
acccugcccccaggaagcag

SEQ ID NO: 893719 - RNA, 21 nt, Human
acccuucccucucuccuuccc

SEQ ID NO: 893720 - RNA, 20 nt, Human
accuccccucccuccaaggc

SEQ ID NO: 893721 - RNA, 26 nt, Human
agaaggcacuuaaaugggaaggccac

SEQ ID NO: 893722 - RNA, 18 nt, Human
agacagaaaaagggagca

SEQ ID NO: 893723 - RNA, 21 nt, Human
agcacaacgacaucaccacuu

SEQ ID NO: 893724 - RNA, 24 nt, Human
agcaggcagggccccccagguccc

SEQ ID NO: 893725 - RNA, 24 nt, Human
agccagcaggggaucaggcagggg

SEQ ID NO: 893726 - RNA, 22 nt, Human
agccugcugccccuacaccgcc

SEQ ID NO: 893727 - RNA, 21 nt, Human
aggaacccugcccccaggaag

SEQ ID NO: 893728 - RNA, 18 nt, Human
aggaagcagaaccggaag

SEQ ID NO: 893729 - RNA, 22 nt, Human
aggagauggguuggcacagggg

SEQ ID NO: 893730 - RNA, 21 nt, Human
aggaugggcaaggaggcacug

SEQ ID NO: 893731 - RNA, 21 nt, Human
aggcaccggugaaggaugggc

SEQ ID NO: 893732 - RNA, 19 nt, Human
aggcagaagucugagguca

SEQ ID NO: 893733 - RNA, 23 nt, Human
aggcagaagucugaggucauugc

SEQ ID NO: 893734 - RNA, 25 nt, Human
aggcagaggcaaagguugguagggg

SEQ ID NO: 893735 - RNA, 23 nt, Human
aggcaggaacccugcccccagga

SEQ ID NO: 893736 - RNA, 20 nt, Human
agggagcagcccucagcugu

SEQ ID NO: 893737 - RNA, 18 nt, Human
agggaggagguggggcag

SEQ ID NO: 893738 - RNA, 19 nt, Human
agggaggagguggggcagg

SEQ ID NO: 893739 - RNA, 22 nt, Human
agggaggagguggggcaggggg

SEQ ID NO: 893740 - RNA, 22 nt, Human
aggggcccucucagucccaagg

SEQ ID NO: 893741 - RNA, 18 nt, Human
auguuaggaggaggggcu

SEQ ID NO: 893742 - RNA, 24 nt, Human
caaacauggaacccaggcgccguu

SEQ ID NO: 893743 - RNA, 26 nt, Human
caacgacaucaccacuugacaucccc

SEQ ID NO: 893744 - RNA, 20 nt, Human
cacugguauguggguccccu

SEQ ID NO: 893745 - RNA, 20 nt, Human
cagaaacaguuggaaggcag

SEQ ID NO: 893746 - RNA, 19 nt, Human
cagacuccugcugccuucc

SEQ ID NO: 893747 - RNA, 18 nt, Human
cagcagagaaacauggca

SEQ ID NO: 893748 - RNA, 22 nt, Human
cagcagagaaacauggcagcau

SEQ ID NO: 893749 - RNA, 18 nt, Human
cagcaggcagggcccccc

SEQ ID NO: 893750 - RNA, 25 nt, Human
cagcauggacagagacagaaaaagg

SEQ ID NO: 893751 - RNA, 19 nt, Human
cagggccccccaggucccc

SEQ ID NO: 893752 - RNA, 21 nt, Human
cagguucuaggggggaggggg

SEQ ID NO: 893753 - RNA, 23 nt, Human
ccaaccauauucaccccccgccc

SEQ ID NO: 893754 - RNA, 21 nt, Human
ccacagaaggucccaccuccu

SEQ ID NO: 893755 - RNA, 20 nt, Human
ccaccuccuacagauccccc

SEQ ID NO: 893756 - RNA, 18 nt, Human
ccagacuggggguccaag

SEQ ID NO: 893757 - RNA, 21 nt, Human
cccagacuggggguccaaggc

SEQ ID NO: 893758 - RNA, 23 nt, Human
ccccaaaccccacagaagguccc

SEQ ID NO: 893759 - RNA, 21 nt, Human
ccccacagaaggucccaccuc

SEQ ID NO: 893760 - RNA, 20 nt, Human
cccccacacacacuuagcug

SEQ ID NO: 893761 - RNA, 20 nt, Human
ccccugagaauaggggagga

SEQ ID NO: 893762 - RNA, 24 nt, Human
cccucucuccuuccccuaaaaauc

SEQ ID NO: 893763 - RNA, 19 nt, Human
cccuggggagagcccaagg

SEQ ID NO: 893764 - RNA, 20 nt, Human
ccggaaucggggcgcggggg

SEQ ID NO: 893765 - RNA, 25 nt, Human
ccuacagaucccccaaaggcaccgg

SEQ ID NO: 893766 - RNA, 21 nt, Human
ccucagugcagccugcugccc

SEQ ID NO: 893767 - RNA, 19 nt, Human
ccucccccccggcuggggc

SEQ ID NO: 893768 - RNA, 26 nt, Human
ccuccuacagaucccccaaaggcugg

SEQ ID NO: 893769 - RNA, 26 nt, Human
ccugacccuucccucucuccuucccc

SEQ ID NO: 893770 - RNA, 19 nt, Human
ccugcccccaggaagcaga

SEQ ID NO: 893771 - RNA, 19 nt, Human
ccugcccccaggaagcaga

SEQ ID NO: 893772 - RNA, 24 nt, Human
ccuggagauccccaaaccccacag

SEQ ID NO: 893773 - RNA, 19 nt, Human
ccugggagcugcccccagc

SEQ ID NO: 893774 - RNA, 20 nt, Human
ccugggccccuuggcccagc

SEQ ID NO: 893775 - RNA, 19 nt, Human
ccuuucccucccucccccc

SEQ ID NO: 893776 - RNA, 19 nt, Human
cgcuccgcuccggccggac

SEQ ID NO: 893777 - RNA, 24 nt, Human
cuacagaucccccaaaggcaccgg

SEQ ID NO: 893778 - RNA, 20 nt, Human
cuccuacagaucccccaaag

SEQ ID NO: 893779 - RNA, 23 nt, Human
cuggagcucacgguccucagugc

SEQ ID NO: 893780 - RNA, 19 nt, Human
cugguucuccccucccagc

SEQ ID NO: 893781 - RNA, 22 nt, Human
cuucugggaccggcgcggcuag

SEQ ID NO: 893782 - RNA, 19 nt, Human
gagauccccaaaccccaca

SEQ ID NO: 893783 - RNA, 21 nt, Human
gagcccaaggccuugaccucc

SEQ ID NO: 893784 - RNA, 23 nt, Human
gagcugcccccagccagcagggg

SEQ ID NO: 893785 - RNA, 22 nt, Human
gagcuggcguagagacccccca

SEQ ID NO: 893786 - RNA, 23 nt, Human
gagcuggcguagagaccccccac

SEQ ID NO: 893787 - RNA, 19 nt, Human
gcacuuaaaugggaaggcc

SEQ ID NO: 893788 - RNA, 26 nt, Human
gcagcagagaaacauggcagcaugga

SEQ ID NO: 893789 - RNA, 20 nt, Human
gccggaaucggggcgcgggg

SEQ ID NO: 893790 - RNA, 21 nt, Human
gccugcugccccuacaccgcc

SEQ ID NO: 893791 - RNA, 18 nt, Human
gccugggccccuuggccc

SEQ ID NO: 893792 - RNA, 20 nt, Human
gcggggaagagggggcucua

SEQ ID NO: 893793 - RNA, 25 nt, Human
ggaaagcugggcggggaagaggggg

SEQ ID NO: 893794 - RNA, 22 nt, Human
ggaaggcaggauauccugggag

SEQ ID NO: 893795 - RNA, 18 nt, Human
ggaaucggggcgcggggg

SEQ ID NO: 893796 - RNA, 20 nt, Human
ggacagagacagaaaaaggg

SEQ ID NO: 893797 - RNA, 18 nt, Human
ggagauggguuggcacag

SEQ ID NO: 893798 - RNA, 22 nt, Human
ggagcaaaggggugugagggac

SEQ ID NO: 893799 - RNA, 24 nt, Human
ggaggagguggggcagggggaggg

SEQ ID NO: 893800 - RNA, 21 nt, Human
ggaggggaggggugggaggga

SEQ ID NO: 893801 - RNA, 21 nt, Human
ggagguggggcagggggaggg

SEQ ID NO: 893802 - RNA, 24 nt, Human
ggcaaggaggcacugaugagcugg

SEQ ID NO: 893803 - RNA, 21 nt, Human
ggcccaauuuggcagcagaga

SEQ ID NO: 893804 - RNA, 18 nt, Human
ggccugggcagucuuccu

SEQ ID NO: 893805 - RNA, 23 nt, Human
ggccugggcagucuuccugggag

SEQ ID NO: 893806 - RNA, 19 nt, Human
ggccugggccccuuggccc

SEQ ID NO: 893807 - RNA, 22 nt, Human
gggacagaggacagggccuggg

SEQ ID NO: 893808 - RNA, 19 nt, Human
gggagacgcccgcuucccc

SEQ ID NO: 893809 - RNA, 22 nt, Human
gggcccaauuuggcagcagaga

SEQ ID NO: 893810 - RNA, 23 nt, Human
gggcccaauuuggcagcagagaa

SEQ ID NO: 893811 - RNA, 19 nt, Human
gggcccaggaaaggggcaa

SEQ ID NO: 893812 - RNA, 21 nt, Human
gggccggaaucggggcgcggg

SEQ ID NO: 893813 - RNA, 25 nt, Human
gggccggaaucggggcgcggggggg

SEQ ID NO: 893814 - RNA, 20 nt, Human
gggcgcgggggggaggggag

SEQ ID NO: 893815 - RNA, 22 nt, Human
ggggaggggaggggugggaggg

SEQ ID NO: 893816 - RNA, 18 nt, Human
gggggagggagggggcgc

SEQ ID NO: 893817 - RNA, 19 nt, Human
gggugugagggacagagga

SEQ ID NO: 893818 - RNA, 18 nt, Human
ggugugagggacagagga

SEQ ID NO: 893819 - RNA, 19 nt, Human
gugaaggaugggcaaggag

SEQ ID NO: 893820 - RNA, 18 nt, Human
guucuccccucccagccu

SEQ ID NO: 893821 - RNA, 18 nt, Human
uaaaaaauguaaaaaucc

SEQ ID NO: 893822 - RNA, 25 nt, Human
uaaaaauccuuucccucccuccccc

SEQ ID NO: 893823 - RNA, 19 nt, Human
uaacagaccuccccucccu

SEQ ID NO: 893824 - RNA, 21 nt, Human
uaaggcagaagucugagguca

SEQ ID NO: 893825 - RNA, 24 nt, Human
uauacacauguacauauuuauaug

SEQ ID NO: 893826 - RNA, 19 nt, Human
uauauacacauguacauau

SEQ ID NO: 893827 - RNA, 20 nt, Human
ucagaaacaguuggaaggca

SEQ ID NO: 893828 - RNA, 22 nt, Human
ucccaccuccuacagauccccc

SEQ ID NO: 893829 - RNA, 24 nt, Human
ucccaccuccuacagaucccccaa

SEQ ID NO: 893830 - RNA, 24 nt, Human
uccccaaaccccacagaagguccc

SEQ ID NO: 893831 - RNA, 26 nt, Human
uccccaaaccccacagaaggucccac

SEQ ID NO: 893832 - RNA, 25 nt, Human
ucccuccaaggcagaggcaaagguu

SEQ ID NO: 893833 - RNA, 20 nt, Human
uccggaggggaggggagcca

SEQ ID NO: 893834 - RNA, 22 nt, Human
ucuccuuccccuaaaaaucuau

SEQ ID NO: 893835 - RNA, 22 nt, Human
ugaaggcacugacacggggccu

SEQ ID NO: 893836 - RNA, 24 nt, Human
ugacccuucccucucuccuucccc

SEQ ID NO: 893837 - RNA, 23 nt, Human
uggcagcauggacagagacagaa

SEQ ID NO: 893838 - RNA, 18 nt, Human
ugggaaggccaccugaug

SEQ ID NO: 893839 - RNA, 18 nt, Human
ugggccccuuggcccagc

SEQ ID NO: 893840 - RNA, 18 nt, Human
ugggcggggaagaggggg

SEQ ID NO: 893841 - RNA, 18 nt, Human
uggggagagcccaaggcc

SEQ ID NO: 893842 - RNA, 21 nt, Human
uggggcagggggaggggcugg

SEQ ID NO: 893843 - RNA, 23 nt, Human
uggguuuuccuaacaaaggccug

SEQ ID NO: 893844 - RNA, 20 nt, Human
ugguaacagaccuccccucc

SEQ ID NO: 893845 - RNA, 22 nt, Human
ugguggggcuggugggggagac

SEQ ID NO: 893846 - RNA, 24 nt, Human
ugguggggcuggugggggagacgc

SEQ ID NO: 893847 - RNA, 24 nt, Human
uguccaccguucccagacuggggg

SEQ ID NO: 893848 - RNA, 18 nt, Human
uguggcggcggcccaugg

SEQ ID NO: 893849 - RNA, 25 nt, Human
uguggggccugaaggacagacuccu

SEQ ID NO: 893850 - RNA, 19 nt, Human
uucaccccccgcccacccg

SEQ ID NO: 893851 - RNA, 20 nt, Human
uucugggcccaggaaagggg

SEQ ID NO: 893852 - RNA, 18 nt, Human
uuggcacaggggaagggg

SEQ ID NO: 893853 - RNA, 26 nt, Human
uuggcacugguauguggguccccuua

SEQ ID NO: 893854 - RNA, 23 nt, Human
uuggucaggggcagguccuggcc

SEQ ID NO: 893855 - RNA, 20 nt, Human
uuuuuuuuuuuaggggucug

SEQ ID NO: 893856 - RNA, 20 nt, Human
uuuuuuuuuuuuaggggucu

SEQ ID NO: 893857 - RNA, 26 nt, Human
uuuuuuuuuuuuuuuuaggggucugg

SEQ ID NO: 893858 - RNA, 22 nt, Human
uuuuuuuuuuuuuuuuuuaggg

SEQ ID NO: 893859 - RNA, 23 nt, Human
aaguacaaaacuucaagauacaa

SEQ ID NO: 893860 - RNA, 22 nt, Human
acaaaacuucaagauacaagaa

SEQ ID NO: 893861 - RNA, 19 nt, Human
acugaaauggaggaacgua

SEQ ID NO: 893862 - RNA, 21 nt, Human
agaaaagacaaaacugaaaug

SEQ ID NO: 893863 - RNA, 20 nt, Human
aggcauauuccccuggccuu

SEQ ID NO: 893864 - RNA, 23 nt, Human
caaaacucccuucaguuuccagg

SEQ ID NO: 893865 - RNA, 22 nt, Human
ccgcagaggccacccucgugcc

SEQ ID NO: 893866 - RNA, 22 nt, Human
cgcugagaggcuggcggcggcg

SEQ ID NO: 893867 - RNA, 28 nt, Human
cuggcggcggcgggcgcgugguccuucu

SEQ ID NO: 893868 - RNA, 19 nt, Human
cuucaagauacaagaagga

SEQ ID NO: 893869 - RNA, 19 nt, Human
gcgcgugguccuucggcgu

SEQ ID NO: 893870 - RNA, 20 nt, Human
ggcggcagcgccucggcgcc

SEQ ID NO: 893871 - RNA, 24 nt, Human
gggcggcgaggcgggcggcagcgc

SEQ ID NO: 893872 - RNA, 26 nt, Human
guggggcggcgaggcgggcggcagcg

SEQ ID NO: 893873 - RNA, 25 nt, Human
uaaaauuagaaaacaaaaggauguc

SEQ ID NO: 893874 - RNA, 21 nt, Human
uagugggucuuuucuuagguc

SEQ ID NO: 893875 - RNA, 18 nt, Human
uauacaaagauaaaugca

SEQ ID NO: 893876 - RNA, 26 nt, Human
uaugcaggcaaaggagaggucacacc

SEQ ID NO: 893877 - RNA, 27 nt, Human
ucaauuuaaaaauucuuagcccucuua

SEQ ID NO: 893878 - RNA, 27 nt, Human
uccaagaaaauauuuaccagaagaaug

SEQ ID NO: 893879 - RNA, 21 nt, Human
uccagaaaucccaaguacaaa

SEQ ID NO: 893880 - RNA, 24 nt, Human
uccccuggccuugagguaugcagg

SEQ ID NO: 893881 - RNA, 25 nt, Human
uccuccagacauggacggcuaccaa

SEQ ID NO: 893882 - RNA, 21 nt, Human
ucgacuuguccuccagacaug

SEQ ID NO: 893883 - RNA, 25 nt, Human
ugacugaacuuuagacagaaaagac

SEQ ID NO: 893884 - RNA, 21 nt, Human
ugagaggcuggcggcggcggg

SEQ ID NO: 893885 - RNA, 18 nt, Human
ugagguaugcaggcaaag

SEQ ID NO: 893886 - RNA, 19 nt, Human
uggcggcggcgggcgcgug

SEQ ID NO: 893887 - RNA, 23 nt, Human
uucaagauacaagaaggaucaaa

SEQ ID NO: 893888 - RNA, 23 nt, Human
aaaaaaauucccuugcuugcaga

SEQ ID NO: 893889 - RNA, 18 nt, Human
agacgcauggacuugagc

SEQ ID NO: 893890 - RNA, 18 nt, Human
aguuccauucaaaauuac

SEQ ID NO: 893891 - RNA, 25 nt, Human
auauauacauguaugcauauauaca

SEQ ID NO: 893892 - RNA, 23 nt, Human
cccuugcuugcagaguuuuuguu

SEQ ID NO: 893893 - RNA, 22 nt, Human
ccuuaugaauauauacauguau

SEQ ID NO: 893894 - RNA, 23 nt, Human
ccuuaugaauauauacauguaug

SEQ ID NO: 893895 - RNA, 21 nt, Human
cuugagaagagcggaccgcuc

SEQ ID NO: 893896 - RNA, 19 nt, Human
ggaaggccuuuuuccgccu

SEQ ID NO: 893897 - RNA, 20 nt, Human
ggaaggccuuuuuccgccuc

SEQ ID NO: 893898 - RNA, 20 nt, Human
gucaucuucucgcgccuggg

SEQ ID NO: 893899 - RNA, 23 nt, Human
uaagaaaaaaaucaaauuuaaaa

SEQ ID NO: 893900 - RNA, 24 nt, Human
uauauacauguaugcauauauaca

SEQ ID NO: 893901 - RNA, 22 nt, Human
uaugaauauauacauguaugca

SEQ ID NO: 893902 - RNA, 23 nt, Human
ugagaagagcggaccgcucugac

SEQ ID NO: 893903 - RNA, 26 nt, Human
uguaugcauauauacaucucuguaug

SEQ ID NO: 893904 - RNA, 24 nt, Human
uuuaaaaucacuauugauggaagc

SEQ ID NO: 893905 - RNA, 18 nt, Human
uuuuuuuuuuuuuuuuug

SEQ ID NO: 893906 - RNA, 25 nt, Human
uuuuuuuuuuuuuuuuuuuuugggg

SEQ ID NO: 893907 - RNA, 21 nt, Human
ccggcugcgguucaccuuucc

SEQ ID NO: 893908 - RNA, 18 nt, Human
uaccacuggucuucauag

SEQ ID NO: 893909 - RNA, 19 nt, Human
aaagugcuccuguccagca

SEQ ID NO: 893910 - RNA, 22 nt, Human
agcgcggcuacagggcucucca

SEQ ID NO: 893911 - RNA, 21 nt, Human
cacggccgcggcgcccccgcc

SEQ ID NO: 893912 - RNA, 19 nt, Human
ccgccgcagcucccgcccc

SEQ ID NO: 893913 - RNA, 20 nt, Human
ccgcggcgcccccgccggcu

SEQ ID NO: 893914 - RNA, 21 nt, Human
ccgcggcgcccccgccggcuu

SEQ ID NO: 893915 - RNA, 22 nt, Human
ccuguccagcagaacucaaaag

SEQ ID NO: 893916 - RNA, 22 nt, Human
cgccgcagcucccgcccgcgcc

SEQ ID NO: 893917 - RNA, 21 nt, Human
cggagcgcgcagggcaugggc

SEQ ID NO: 893918 - RNA, 19 nt, Human
cggccgcggcgcccccgcc

SEQ ID NO: 893919 - RNA, 24 nt, Human
cggcggcagcuacgacccccggag

SEQ ID NO: 893920 - RNA, 20 nt, Human
cggcucggcggcagcuacga

SEQ ID NO: 893921 - RNA, 22 nt, Human
cgucagcggcggggcuggguuu

SEQ ID NO: 893922 - RNA, 30 nt, Human
cuggugacaguguguacaaagucuucucuu

SEQ ID NO: 893923 - RNA, 19 nt, Human
gaagagaguagggucucca

SEQ ID NO: 893924 - RNA, 19 nt, Human
gagcgcgcagggcaugggc

SEQ ID NO: 893925 - RNA, 19 nt, Human
gccccgggucgggaguggg

SEQ ID NO: 893926 - RNA, 23 nt, Human
gccgcagcucccgcccgcgccag

SEQ ID NO: 893927 - RNA, 21 nt, Human
gccggcuuccggagccccggc

SEQ ID NO: 893928 - RNA, 21 nt, Human
uagcggccguucucagcgaag

SEQ ID NO: 893929 - RNA, 23 nt, Human
uauccgccgcagcucccgcccgc

SEQ ID NO: 893930 - RNA, 21 nt, Human
ucagcggcggggcuggguuuc

SEQ ID NO: 893931 - RNA, 19 nt, Human
ucaguccccgcuagcggcc

SEQ ID NO: 893932 - RNA, 20 nt, Human
uccgucagcggcggggcugg

SEQ ID NO: 893933 - RNA, 24 nt, Human
ucggcggcagcuacgacccccgga

SEQ ID NO: 893934 - RNA, 21 nt, Human
ucggcggccacuggcucccuu

SEQ ID NO: 893935 - RNA, 21 nt, Human
ucuccacagcacgcaaggguu

SEQ ID NO: 893936 - RNA, 18 nt, Human
ucuccaggagcccagaaa

SEQ ID NO: 893937 - RNA, 21 nt, Human
ugggcucccggccuucagucc

SEQ ID NO: 893938 - RNA, 23 nt, Human
ugggcucccggccuucagucccc

SEQ ID NO: 893939 - RNA, 24 nt, Human
uuaaaagcaaauaacacauuuaac

SEQ ID NO: 893940 - RNA, 19 nt, Human
aagcccgcccaccugggcc

SEQ ID NO: 893941 - RNA, 24 nt, Human
acccuccaugcaacguccagacag

SEQ ID NO: 893942 - RNA, 19 nt, Human
acccuguacgccagggauu

SEQ ID NO: 893943 - RNA, 20 nt, Human
aggacaguguccuggcacgu

SEQ ID NO: 893944 - RNA, 20 nt, Human
cagcagcccguccaaaggga

SEQ ID NO: 893945 - RNA, 20 nt, Human
ccacccuccaugcaacgucc

SEQ ID NO: 893946 - RNA, 22 nt, Human
ccagaagcccgcccaccugggc

SEQ ID NO: 893947 - RNA, 20 nt, Human
ccguccaaagggaugcucca

SEQ ID NO: 893948 - RNA, 23 nt, Human
ccguccaaagggaugcuccaagc

SEQ ID NO: 893949 - RNA, 21 nt, Human
gaagcccgcccaccugggccc

SEQ ID NO: 893950 - RNA, 23 nt, Human
gagaggccugcgccacccuccau

SEQ ID NO: 893951 - RNA, 20 nt, Human
gcgcugugggguggggccag

SEQ ID NO: 893952 - RNA, 20 nt, Human
gcugugggguggggccagaa

SEQ ID NO: 893953 - RNA, 21 nt, Human
ggcccuggaggaggcuggagu

SEQ ID NO: 893954 - RNA, 19 nt, Human
ggcuccuggagcagcuccu

SEQ ID NO: 893955 - RNA, 23 nt, Human
uauaaaaaaacguuggaccacgu

SEQ ID NO: 893956 - RNA, 18 nt, Human
uccaugcaacguccagac

SEQ ID NO: 893957 - RNA, 26 nt, Human
uggaggaggcuggagugugagagccu

SEQ ID NO: 893958 - RNA, 24 nt, Human
uggagugugagagccucugugacg

SEQ ID NO: 893959 - RNA, 22 nt, Human
ugggcccuggaggaggcuggag

SEQ ID NO: 893960 - RNA, 23 nt, Human
ugggguggggccagaagcccgcc

SEQ ID NO: 893961 - RNA, 21 nt, Human
ugugggguggggccagaagcc

SEQ ID NO: 893962 - RNA, 23 nt, Human
accaccaccaccaccaucauacg

SEQ ID NO: 893963 - RNA, 25 nt, Human
accaccaccaccaucauacgguuac

SEQ ID NO: 893964 - RNA, 22 nt, Human
caacggacaauaaaagaaugaa

SEQ ID NO: 893965 - RNA, 21 nt, Human
caccaccaccaccaccaucau

SEQ ID NO: 893966 - RNA, 18 nt, Human
cagguuaaaacaacggac

SEQ ID NO: 893967 - RNA, 20 nt, Human
cagucagguuaaaacaacgg

SEQ ID NO: 893968 - RNA, 24 nt, Human
caucauacgguuacucaggcaaca

SEQ ID NO: 893969 - RNA, 23 nt, Human
ccaccaccaccaccaucauacgg

SEQ ID NO: 893970 - RNA, 23 nt, Human
ccaccaccaccaucauacgguua

SEQ ID NO: 893971 - RNA, 18 nt, Human
cucagcacuagaaaauag

SEQ ID NO: 893972 - RNA, 25 nt, Human
cuuguauucagucagguuaaaacaa

SEQ ID NO: 893973 - RNA, 20 nt, Human
gcaguaccccauagacuggu

SEQ ID NO: 893974 - RNA, 20 nt, Human
uaaaaagcaaugcaguaccc

SEQ ID NO: 893975 - RNA, 19 nt, Human
uacagugcaaaauccaugu

SEQ ID NO: 893976 - RNA, 25 nt, Human
ucagucagguuaaaacaacggacaa

SEQ ID NO: 893977 - RNA, 19 nt, Human
ugagacaggaagacaccac

SEQ ID NO: 893978 - RNA, 21 nt, Human
ugagacaggaagacaccacca

SEQ ID NO: 893979 - RNA, 20 nt, Human
ugccaggaguacagugcucu

SEQ ID NO: 893980 - RNA, 23 nt, Human
uguaauaauugccaggaguacag

SEQ ID NO: 893981 - RNA, 18 nt, Human
aaaaauguagcagaagca

SEQ ID NO: 893982 - RNA, 21 nt, Human
aagaaaaacauucauagauca

SEQ ID NO: 893983 - RNA, 21 nt, Human
aauaagcacaaacuuuuagac

SEQ ID NO: 893984 - RNA, 21 nt, Human
acccuaaaaauguagcagaag

SEQ ID NO: 893985 - RNA, 18 nt, Human
agcagaagcauuuccgca

SEQ ID NO: 893986 - RNA, 20 nt, Human
aguuugugcagaaauguuuu

SEQ ID NO: 893987 - RNA, 23 nt, Human
auagaguacucuucagaagaaag

SEQ ID NO: 893988 - RNA, 22 nt, Human
caaacccuaaaaauguagcaga

SEQ ID NO: 893989 - RNA, 20 nt, Human
cagaaauguuuccacuagau

SEQ ID NO: 893990 - RNA, 23 nt, Human
cagugcaguuauugcugcacucc

SEQ ID NO: 893991 - RNA, 26 nt, Human
ccauaaaaauauuuucucuuccauuu

SEQ ID NO: 893992 - RNA, 18 nt, Human
cgccgggcggugcgcacg

SEQ ID NO: 893993 - RNA, 21 nt, Human
uaagaaaaacauucauagauc

SEQ ID NO: 893994 - RNA, 21 nt, Human
uagauuuauagaguacucuuc

SEQ ID NO: 893995 - RNA, 23 nt, Human
uauagaguacucuucagaagaaa

SEQ ID NO: 893996 - RNA, 18 nt, Human
uauccagagcccaaaaaa

SEQ ID NO: 893997 - RNA, 19 nt, Human
ucaccuggacgccgggcgg

SEQ ID NO: 893998 - RNA, 21 nt, Human
uccaccgcgcuccgcaggcca

SEQ ID NO: 893999 - RNA, 23 nt, Human
uccagagcccaaaaaauguagac

SEQ ID NO: 894000 - RNA, 21 nt, Human
uccgcaggccaacugcgggcc

SEQ ID NO: 894001 - RNA, 24 nt, Human
ugaaauuucaugguucaaauguau

SEQ ID NO: 894002 - RNA, 23 nt, Human
ugcagaaauguuuccacuagauu

SEQ ID NO: 894003 - RNA, 24 nt, Human
uuccuuauccagagcccaaaaaau

SEQ ID NO: 894004 - RNA, 24 nt, Human
aaacaaauaaacaaacaaaaacuu

SEQ ID NO: 894005 - RNA, 24 nt, Human
aaagugcugggauuacagguguga

SEQ ID NO: 894006 - RNA, 20 nt, Human
aaccugugccucccggguuc

SEQ ID NO: 894007 - RNA, 19 nt, Human
aaguagcugggacuacagg

SEQ ID NO: 894008 - RNA, 23 nt, Human
aaguagcugggacuacaggagcc

SEQ ID NO: 894009 - RNA, 23 nt, Human
aaguagcugggacuacaggagcc

SEQ ID NO: 894010 - RNA, 20 nt, Human
aaguagcugggacuacaggc

SEQ ID NO: 894011 - RNA, 20 nt, Human
aaguagcugggacuacaggc

SEQ ID NO: 894012 - RNA, 27 nt, Human
aaguagcugggacuacaggcgugagcc

SEQ ID NO: 894013 - RNA, 18 nt, Human
aaguagcugggauuauag

SEQ ID NO: 894014 - RNA, 24 nt, Human
aaguagcugggauuauaguuaugc

SEQ ID NO: 894015 - RNA, 25 nt, Human
aagugauucuccugccucagccucc

SEQ ID NO: 894016 - RNA, 18 nt, Human
aagugcugggauuacagg

SEQ ID NO: 894017 - RNA, 19 nt, Human
aagugcugggauuacaggu

SEQ ID NO: 894018 - RNA, 26 nt, Human
aagugcugggauuacaggugugagcc

SEQ ID NO: 894019 - RNA, 22 nt, Human
accauauuggccaggcuggucu

SEQ ID NO: 894020 - RNA, 19 nt, Human
acccaggcuggagugcaau

SEQ ID NO: 894021 - RNA, 21 nt, Human
accggagaucaccagcggccc

SEQ ID NO: 894022 - RNA, 24 nt, Human
accuggggucaagugauucuccug

SEQ ID NO: 894023 - RNA, 21 nt, Human
acugcaaccucugccucccag

SEQ ID NO: 894024 - RNA, 22 nt, Human
acugcaaccucugccucccagg

SEQ ID NO: 894025 - RNA, 24 nt, Human
agcgauucuccugccucagccucc

SEQ ID NO: 894026 - RNA, 24 nt, Human
agcgauucuccugccucagccucc

SEQ ID NO: 894027 - RNA, 21 nt, Human
agcugggacuacaggagccca

SEQ ID NO: 894028 - RNA, 19 nt, Human
aggcuggagugcaguggca

SEQ ID NO: 894029 - RNA, 24 nt, Human
agugcaauggcacgaucuuggcuu

SEQ ID NO: 894030 - RNA, 23 nt, Human
agugcaauggugcaaucuuggcu

SEQ ID NO: 894031 - RNA, 24 nt, Human
agugcaauggugcaaucuuggcuc

SEQ ID NO: 894032 - RNA, 20 nt, Human
agugcaguggcacaaccuug

SEQ ID NO: 894033 - RNA, 23 nt, Human
auauuggccaggcuggucuugaa

SEQ ID NO: 894034 - RNA, 19 nt, Human
aucacaacuucuuucccca

SEQ ID NO: 894035 - RNA, 18 nt, Human
augggguuucaccauauu

SEQ ID NO: 894036 - RNA, 20 nt, Human
augggguuucaccauauugg

SEQ ID NO: 894037 - RNA, 24 nt, Human
augggguuucaccauauuggccag

SEQ ID NO: 894038 - RNA, 24 nt, Human
caaagugcugggauuacaggugug

SEQ ID NO: 894039 - RNA, 22 nt, Human
caagcgauucuccugccucagc

SEQ ID NO: 894040 - RNA, 22 nt, Human
caagcgauucuccugccucagc

SEQ ID NO: 894041 - RNA, 27 nt, Human
caagcgauucuccugccucagccuccc

SEQ ID NO: 894042 - RNA, 27 nt, Human
caagcgauucuccugccucagccuccc

SEQ ID NO: 894043 - RNA, 22 nt, Human
caagugauucuccugccucagc

SEQ ID NO: 894044 - RNA, 24 nt, Human
cacaaccuuggcccacuggaaccu

SEQ ID NO: 894045 - RNA, 21 nt, Human
caccauauuggccaggcuggu

SEQ ID NO: 894046 - RNA, 23 nt, Human
caccauauuggccaggcuggucu

SEQ ID NO: 894047 - RNA, 27 nt, Human
caccauauuggccaggcuggucuugaa

SEQ ID NO: 894048 - RNA, 19 nt, Human
caggagcccaccaccaugc

SEQ ID NO: 894049 - RNA, 24 nt, Human
cauauuggccaggcuggucuugaa

SEQ ID NO: 894050 - RNA, 24 nt, Human
caucucaaaaacaaauaaacaaac

SEQ ID NO: 894051 - RNA, 20 nt, Human
ccaaagugcugggauuacag

SEQ ID NO: 894052 - RNA, 21 nt, Human
ccaaagugcugggauuacagg

SEQ ID NO: 894053 - RNA, 21 nt, Human
ccaaagugcugggauuacagg

SEQ ID NO: 894054 - RNA, 24 nt, Human
ccaaagugcugggauuacaggugu

SEQ ID NO: 894055 - RNA, 24 nt, Human
ccaaguagcugggacuacaggagc

SEQ ID NO: 894056 - RNA, 22 nt, Human
ccacccacuuaggccucccaaa

SEQ ID NO: 894057 - RNA, 24 nt, Human
ccaccuggggucaagugauucucc

SEQ ID NO: 894058 - RNA, 24 nt, Human
ccacuggaaccugugccucccggg

SEQ ID NO: 894059 - RNA, 23 nt, Human
cccaaguagcugggacuacagga

SEQ ID NO: 894060 - RNA, 23 nt, Human
cccaaguagcugggacuacaggc

SEQ ID NO: 894061 - RNA, 23 nt, Human
cccaaguagcugggacuacaggc

SEQ ID NO: 894062 - RNA, 23 nt, Human
cccaaguagcugggauuauaguu

SEQ ID NO: 894063 - RNA, 19 nt, Human
cccaggcuggagugcagug

SEQ ID NO: 894064 - RNA, 23 nt, Human
cccagguucaagcgauucuccug

SEQ ID NO: 894065 - RNA, 20 nt, Human
cccggguucaagcgauucuc

SEQ ID NO: 894066 - RNA, 23 nt, Human
cccggguucaagcgauucuccug

SEQ ID NO: 894067 - RNA, 24 nt, Human
ccggacgccagcgaguggaacauc

SEQ ID NO: 894068 - RNA, 24 nt, Human
ccucccagguucaagcgauucucc

SEQ ID NO: 894069 - RNA, 24 nt, Human
ccucccggguucaagcgauucucc

SEQ ID NO: 894070 - RNA, 23 nt, Human
ccugccucagccucccaaguagc

SEQ ID NO: 894071 - RNA, 23 nt, Human
ccugccucagccucccaaguagc

SEQ ID NO: 894072 - RNA, 23 nt, Human
ccugccucagccucccaaguagc

SEQ ID NO: 894073 - RNA, 24 nt, Human
ccugccucagccucccaaguagcu

SEQ ID NO: 894074 - RNA, 24 nt, Human
cgcucugucacccaggcuggagug

SEQ ID NO: 894075 - RNA, 18 nt, Human
cggcaccaugccuggcua

SEQ ID NO: 894076 - RNA, 18 nt, Human
cggcccggacgccagcga

SEQ ID NO: 894077 - RNA, 24 nt, Human
cucacugcaaccuccaccaccugg

SEQ ID NO: 894078 - RNA, 23 nt, Human
cucagccucccaaguagcuggga

SEQ ID NO: 894079 - RNA, 24 nt, Human
cucagccucccaaguagcugggac

SEQ ID NO: 894080 - RNA, 24 nt, Human
cucagccucccaaguagcugggac

SEQ ID NO: 894081 - RNA, 21 nt, Human
cucgcucugucacccaggcug

SEQ ID NO: 894082 - RNA, 24 nt, Human
cucgcucugucacccaggcuggag

SEQ ID NO: 894083 - RNA, 23 nt, Human
cugcaaccucugccucccagguu

SEQ ID NO: 894084 - RNA, 24 nt, Human
cugcaaccucugccucccagguuc

SEQ ID NO: 894085 - RNA, 23 nt, Human
cugccucagccucccaaguagcu

SEQ ID NO: 894086 - RNA, 23 nt, Human
cugccucagccucccaaguagcu

SEQ ID NO: 894087 - RNA, 20 nt, Human
cuugcucugucgccaggcug

SEQ ID NO: 894088 - RNA, 19 nt, Human
cuuuuuugcccaggcugga

SEQ ID NO: 894089 - RNA, 24 nt, Human
gacagagucuugcucugucgccag

SEQ ID NO: 894090 - RNA, 21 nt, Human
gaccucacgugauccacccac

SEQ ID NO: 894091 - RNA, 18 nt, Human
gacuacaggcgugagcca

SEQ ID NO: 894092 - RNA, 21 nt, Human
gacuacaggcgugagccacug

SEQ ID NO: 894093 - RNA, 24 nt, Human
gacuacaggcgugagccacugugc

SEQ ID NO: 894094 - RNA, 23 nt, Human
gagaugggguuucaccauauugg

SEQ ID NO: 894095 - RNA, 24 nt, Human
gagaugggguuucaccauauuggc

SEQ ID NO: 894096 - RNA, 18 nt, Human
gauuacaggugugagcca

SEQ ID NO: 894097 - RNA, 21 nt, Human
gauuacaggugugagccacca

SEQ ID NO: 894098 - RNA, 22 nt, Human
gauuacaggugugagccaccac

SEQ ID NO: 894099 - RNA, 21 nt, Human
gauucuccugccucagccucc

SEQ ID NO: 894100 - RNA, 22 nt, Human
gcaaccuccaccaccugggguc

SEQ ID NO: 894101 - RNA, 19 nt, Human
gcccaggcuggagugcagu

SEQ ID NO: 894102 - RNA, 23 nt, Human
gccuggcuaauuuuuuguauuuu

SEQ ID NO: 894103 - RNA, 24 nt, Human
gcgauucuccugccucagccuccc

SEQ ID NO: 894104 - RNA, 24 nt, Human
gcgauucuccugccucagccuccc

SEQ ID NO: 894105 - RNA, 27 nt, Human
gcucugucacccaggcuggagugcaau

SEQ ID NO: 894106 - RNA, 19 nt, Human
gcuggagugcaauggcacg

SEQ ID NO: 894107 - RNA, 19 nt, Human
gcuggagugcaguggcaca

SEQ ID NO: 894108 - RNA, 21 nt, Human
gcuuacugcaaccucugccuc

SEQ ID NO: 894109 - RNA, 20 nt, Human
gcuuuuuugcccaggcugga

SEQ ID NO: 894110 - RNA, 20 nt, Human
ggacuacaggcgugagccac

SEQ ID NO: 894111 - RNA, 24 nt, Human
ggacuacaggcgugagccacugug

SEQ ID NO: 894112 - RNA, 20 nt, Human
ggagaucaccagcggcccgg

SEQ ID NO: 894113 - RNA, 22 nt, Human
gggguuucaccauauuggccag

SEQ ID NO: 894114 - RNA, 19 nt, Human
ggucuugaacucuugaccu

SEQ ID NO: 894115 - RNA, 20 nt, Human
ggucuuuuuuuuuuuucucu

SEQ ID NO: 894116 - RNA, 24 nt, Human
gucuugcucugucgccaggcugga

SEQ ID NO: 894117 - RNA, 23 nt, Human
gucuuuuuuuuuuuucucuuuga

SEQ ID NO: 894118 - RNA, 24 nt, Human
gugauccacccacuuaggccuccc

SEQ ID NO: 894119 - RNA, 24 nt, Human
gugauucuccugccucagccuccc

SEQ ID NO: 894120 - RNA, 24 nt, Human
guuuugcuuuuuugcccaggcugg

SEQ ID NO: 894121 - RNA, 24 nt, Human
uaauuuuuuguauucuuaguagag

SEQ ID NO: 894122 - RNA, 24 nt, Human
uaauuuuuuguauuuuuaguagag

SEQ ID NO: 894123 - RNA, 25 nt, Human
uaauuuuuuguauuuuuaguagaga

SEQ ID NO: 894124 - RNA, 23 nt, Human
uacaggcgugagccacugugccc

SEQ ID NO: 894125 - RNA, 24 nt, Human
uacaggcgugagccacugugccca

SEQ ID NO: 894126 - RNA, 23 nt, Human
uacaggugugagccaccacaccc

SEQ ID NO: 894127 - RNA, 24 nt, Human
uaccggagaucaccagcggcccgg

SEQ ID NO: 894128 - RNA, 21 nt, Human
uacugcaaccucugccuccca

SEQ ID NO: 894129 - RNA, 23 nt, Human
uacugcaaccucugccucccagg

SEQ ID NO: 894130 - RNA, 24 nt, Human
uagagacuccaucucaaaaacaaa

SEQ ID NO: 894131 - RNA, 19 nt, Human
uaguagagaugggguuuca

SEQ ID NO: 894132 - RNA, 23 nt, Human
uaguagagaugggguuucaccau

SEQ ID NO: 894133 - RNA, 26 nt, Human
uaguagagaugggguuucaccauauu

SEQ ID NO: 894134 - RNA, 19 nt, Human
ucaagugauucuccugccu

SEQ ID NO: 894135 - RNA, 22 nt, Human
ucaagugauucuccugccucag

SEQ ID NO: 894136 - RNA, 18 nt, Human
ucacccaggcuggagugc

SEQ ID NO: 894137 - RNA, 19 nt, Human
ucacugcaaccuccaccac

SEQ ID NO: 894138 - RNA, 23 nt, Human
ucacugcaaccuccaccaccugg

SEQ ID NO: 894139 - RNA, 24 nt, Human
ucacugcaaccuccaccaccuggg

SEQ ID NO: 894140 - RNA, 27 nt, Human
ucacugcaaccuccaccaccugggguc

SEQ ID NO: 894141 - RNA, 18 nt, Human
ucagccucccaaguagcu

SEQ ID NO: 894142 - RNA, 18 nt, Human
ucagccucccaaguagcu

SEQ ID NO: 894143 - RNA, 20 nt, Human
ucagccucccaaguagcugg

SEQ ID NO: 894144 - RNA, 20 nt, Human
ucagccucccaaguagcugg

SEQ ID NO: 894145 - RNA, 20 nt, Human
ucagccucccaaguagcugg

SEQ ID NO: 894146 - RNA, 23 nt, Human
ucccaaagugcugggauuacagg

SEQ ID NO: 894147 - RNA, 18 nt, Human
ucccaaguagcugggacu

SEQ ID NO: 894148 - RNA, 24 nt, Human
ucccaaguagcugggacuacaggc

SEQ ID NO: 894149 - RNA, 23 nt, Human
ucccaaguagcugggauuauagu

SEQ ID NO: 894150 - RNA, 21 nt, Human
ucccagguucaagcgauucuc

SEQ ID NO: 894151 - RNA, 24 nt, Human
ucccagguucaagcgauucuccug

SEQ ID NO: 894152 - RNA, 21 nt, Human
ucccggguucaagcgauucuc

SEQ ID NO: 894153 - RNA, 24 nt, Human
ucccggguucaagcgauucuccug

SEQ ID NO: 894154 - RNA, 21 nt, Human
ucccuuguugucgcgcccuca

SEQ ID NO: 894155 - RNA, 24 nt, Human
ucgcucugucacccaggcuggagu

SEQ ID NO: 894156 - RNA, 26 nt, Human
ucuccugccucagccucccaaguagc

SEQ ID NO: 894157 - RNA, 26 nt, Human
ucuccugccucagccucccaaguagc

SEQ ID NO: 894158 - RNA, 26 nt, Human
ucuccugccucagccucccaaguagc

SEQ ID NO: 894159 - RNA, 19 nt, Human
ucucgcucugucacccagg

SEQ ID NO: 894160 - RNA, 23 nt, Human
ucucgcucugucacccaggcugg

SEQ ID NO: 894161 - RNA, 24 nt, Human
ucucgcucugucacccaggcugga

SEQ ID NO: 894162 - RNA, 26 nt, Human
ucucgcucugucacccaggcuggagu

SEQ ID NO: 894163 - RNA, 27 nt, Human
ucucgcucugucacccaggcuggagug

SEQ ID NO: 894164 - RNA, 24 nt, Human
ucugucacccaggcuggagugcaa

SEQ ID NO: 894165 - RNA, 18 nt, Human
ucugucgccaggcuggag

SEQ ID NO: 894166 - RNA, 21 nt, Human
ucugucgccaggcuggagugc

SEQ ID NO: 894167 - RNA, 23 nt, Human
ucugucgccaggcuggagugcaa

SEQ ID NO: 894168 - RNA, 21 nt, Human
ucuugcucugucgccaggcug

SEQ ID NO: 894169 - RNA, 21 nt, Human
ucuugcucugucgccaggcug

SEQ ID NO: 894170 - RNA, 22 nt, Human
ucuugcucugucgccaggcugg

SEQ ID NO: 894171 - RNA, 23 nt, Human
ucuugcucugucgccaggcugga

SEQ ID NO: 894172 - RNA, 22 nt, Human
ugaccucacgugauccacccac

SEQ ID NO: 894173 - RNA, 18 nt, Human
ugagacagagucuugcuc

SEQ ID NO: 894174 - RNA, 22 nt, Human
ugagacagagucuugcucuguc

SEQ ID NO: 894175 - RNA, 22 nt, Human
ugagauggagucucgcucuguc

SEQ ID NO: 894176 - RNA, 20 nt, Human
ugauucuccugccucagccu

SEQ ID NO: 894177 - RNA, 23 nt, Human
ugcaauggugcaaucuuggcucc

SEQ ID NO: 894178 - RNA, 20 nt, Human
ugcaguggcacaaccuuggc

SEQ ID NO: 894179 - RNA, 18 nt, Human
ugcccaggcuggagugca

SEQ ID NO: 894180 - RNA, 22 nt, Human
ugcccaggcuggagugcagugg

SEQ ID NO: 894181 - RNA, 24 nt, Human
ugcccaggcuggagugcaguggca

SEQ ID NO: 894182 - RNA, 24 nt, Human
ugccucagccucccaaguagcugg

SEQ ID NO: 894183 - RNA, 24 nt, Human
ugccucagccucccaaguagcugg

SEQ ID NO: 894184 - RNA, 24 nt, Human
ugccucagccucccaaguagcugg

SEQ ID NO: 894185 - RNA, 23 nt, Human
ugcucugucgccaggcuggagug

SEQ ID NO: 894186 - RNA, 24 nt, Human
ugcugggauuacaggugugagcca

SEQ ID NO: 894187 - RNA, 23 nt, Human
uggagugcaauggcacgaucuug

SEQ ID NO: 894188 - RNA, 24 nt, Human
uggagugcaauggcacgaucuugg

SEQ ID NO: 894189 - RNA, 23 nt, Human
uggagugcaauggugcaaucuug

SEQ ID NO: 894190 - RNA, 24 nt, Human
uggagugcaauggugcaaucuugg

SEQ ID NO: 894191 - RNA, 23 nt, Human
uggagugcaguggcacaaccuug

SEQ ID NO: 894192 - RNA, 24 nt, Human
uggagugcaguggcacaaccuugg

SEQ ID NO: 894193 - RNA, 24 nt, Human
uggaguuuugcuuuuuugcccagg

SEQ ID NO: 894194 - RNA, 20 nt, Human
uggcacaaccuuggcccacu

SEQ ID NO: 894195 - RNA, 23 nt, Human
uggcacaaccuuggcccacugga

SEQ ID NO: 894196 - RNA, 24 nt, Human
uggccaggcuggucuugaacucuu

SEQ ID NO: 894197 - RNA, 19 nt, Human
ugggacuacaggagcccac

SEQ ID NO: 894198 - RNA, 21 nt, Human
ugggacuacaggagcccacca

SEQ ID NO: 894199 - RNA, 24 nt, Human
ugggacuacaggagcccaccacca

SEQ ID NO: 894200 - RNA, 21 nt, Human
ugggacuacaggcgugagcca

SEQ ID NO: 894201 - RNA, 22 nt, Human
ugggacuacaggcgugagccac

SEQ ID NO: 894202 - RNA, 22 nt, Human
ugggacuacaggcgugagccac

SEQ ID NO: 894203 - RNA, 22 nt, Human
ugggacuacaggcgugagccac

SEQ ID NO: 894204 - RNA, 24 nt, Human
ugggacuacaggcgugagccacug

SEQ ID NO: 894205 - RNA, 26 nt, Human
ugggacuacaggcgugagccacugug

SEQ ID NO: 894206 - RNA, 18 nt, Human
ugggauuacaggugugag

SEQ ID NO: 894207 - RNA, 19 nt, Human
ugggauuacaggugugagc

SEQ ID NO: 894208 - RNA, 22 nt, Human
ugggauuacaggugugagccac

SEQ ID NO: 894209 - RNA, 23 nt, Human
ugggauuacaggugugagccacc

SEQ ID NO: 894210 - RNA, 24 nt, Human
ugggauuacaggugugagccacca

SEQ ID NO: 894211 - RNA, 25 nt, Human
ugggauuauaguuaugcggcaccau

SEQ ID NO: 894212 - RNA, 23 nt, Human
uggggucaagugauucuccugcc

SEQ ID NO: 894213 - RNA, 24 nt, Human
ugggguuucaccauauuggccagg

SEQ ID NO: 894214 - RNA, 20 nt, Human
ugucacccaggcuggagugc

SEQ ID NO: 894215 - RNA, 19 nt, Human
uuacugcaaccucugccuc

SEQ ID NO: 894216 - RNA, 24 nt, Human
uuacugcaaccucugccucccagg

SEQ ID NO: 894217 - RNA, 25 nt, Human
uuacugcaaccucugccucccaggu

SEQ ID NO: 894218 - RNA, 21 nt, Human
uuaggccucccaaagugcugg

SEQ ID NO: 894219 - RNA, 18 nt, Human
uuaguagagaugggguuu

SEQ ID NO: 894220 - RNA, 22 nt, Human
uuaguagagaugggguuucacc

SEQ ID NO: 894221 - RNA, 24 nt, Human
uuaguagagaugggguuucaccau

SEQ ID NO: 894222 - RNA, 21 nt, Human
uucaagcgauucuccugccuc

SEQ ID NO: 894223 - RNA, 21 nt, Human
uucaagcgauucuccugccuc

SEQ ID NO: 894224 - RNA, 23 nt, Human
uucaagcgauucuccugccucag

SEQ ID NO: 894225 - RNA, 23 nt, Human
uucaagcgauucuccugccucag

SEQ ID NO: 894226 - RNA, 24 nt, Human
uucaagcgauucuccugccucagc

SEQ ID NO: 894227 - RNA, 24 nt, Human
uucaagcgauucuccugccucagc

SEQ ID NO: 894228 - RNA, 24 nt, Human
uucuuaguagagaugggguuucac

SEQ ID NO: 894229 - RNA, 24 nt, Human
uugcccaggcuggagugcaguggc

SEQ ID NO: 894230 - RNA, 22 nt, Human
uugcuuuuuugcccaggcugga

SEQ ID NO: 894231 - RNA, 24 nt, Human
uuucaccauauuggccaggcuggu

SEQ ID NO: 894232 - RNA, 24 nt, Human
uuuugcuuuuuugcccaggcugga

SEQ ID NO: 894233 - RNA, 21 nt, Human
uuuuuguauucuuaguagaga

SEQ ID NO: 894234 - RNA, 21 nt, Human
uuuuuguauuuuuaguagaga

SEQ ID NO: 894235 - RNA, 23 nt, Human
uuuuuucucuuugagauggaguu

SEQ ID NO: 894236 - RNA, 24 nt, Human
uuuuuugcccaggcuggagugcag

SEQ ID NO: 894237 - RNA, 24 nt, Human
uuuuuuguauucuuaguagagaug

SEQ ID NO: 894238 - RNA, 18 nt, Human
uuuuuuguauuuuuagua

SEQ ID NO: 894239 - RNA, 20 nt, Human
uuuuuuuuuuugagacagag

SEQ ID NO: 894240 - RNA, 18 nt, Human
uuuuuuuuuuuucucuuu

SEQ ID NO: 894241 - RNA, 24 nt, Human
uuuuuuuuuuuugagacagagucu

SEQ ID NO: 894242 - RNA, 25 nt, Human
uuuuuuuuuuuugagauggagucuc

SEQ ID NO: 894243 - RNA, 22 nt, Human
uuuuuuuuuuuuuugagaugga

SEQ ID NO: 894244 - RNA, 18 nt, Human
uuuuuuuuuuuuuuuuug

SEQ ID NO: 894245 - RNA, 21 nt, Human
aacccugcacaagcccuccug

SEQ ID NO: 894246 - RNA, 18 nt, Human
acagagcccccucccccc

SEQ ID NO: 894247 - RNA, 18 nt, Human
acccugcacaagcccucc

SEQ ID NO: 894248 - RNA, 21 nt, Human
acugagaugaggcccagcuuc

SEQ ID NO: 894249 - RNA, 24 nt, Human
agauuccccccaccccccccccaa

SEQ ID NO: 894250 - RNA, 18 nt, Human
agugaaaugaugugaaug

SEQ ID NO: 894251 - RNA, 23 nt, Human
augaugugaaugucccaccccac

SEQ ID NO: 894252 - RNA, 22 nt, Human
auggggacagccgcgcgccaca

SEQ ID NO: 894253 - RNA, 18 nt, Human
augugaaugucccacccc

SEQ ID NO: 894254 - RNA, 23 nt, Human
caaaacccugcacaagcccuccc

SEQ ID NO: 894255 - RNA, 24 nt, Human
cacaagcccuccugcccauccccu

SEQ ID NO: 894256 - RNA, 19 nt, Human
cacagccuucagcaccucc

SEQ ID NO: 894257 - RNA, 24 nt, Human
caccccacagagcccccucccccc

SEQ ID NO: 894258 - RNA, 20 nt, Human
caccccccccccaaacccua

SEQ ID NO: 894259 - RNA, 20 nt, Human
caccccccccccaaacccua

SEQ ID NO: 894260 - RNA, 24 nt, Human
caccccccccccaaacccuaauuc

SEQ ID NO: 894261 - RNA, 21 nt, Human
cauagauuccccccacccccc

SEQ ID NO: 894262 - RNA, 22 nt, Human
cauagauuccccccaccccccc

SEQ ID NO: 894263 - RNA, 22 nt, Human
ccaaacccuaauucuaccccuc

SEQ ID NO: 894264 - RNA, 22 nt, Human
ccaccccccccccaaacccuaa

SEQ ID NO: 894265 - RNA, 22 nt, Human
ccauagauuccccccacccccc

SEQ ID NO: 894266 - RNA, 21 nt, Human
ccaugguucucaggccaccac

SEQ ID NO: 894267 - RNA, 20 nt, Human
cccacagagcccccuccccc

SEQ ID NO: 894268 - RNA, 22 nt, Human
cccacagagcccccucccccca

SEQ ID NO: 894269 - RNA, 23 nt, Human
cccacagagcccccuccccccau

SEQ ID NO: 894270 - RNA, 19 nt, Human
cccaccccccccccaaacc

SEQ ID NO: 894271 - RNA, 22 nt, Human
ccccaaacccuaauucuacccc

SEQ ID NO: 894272 - RNA, 20 nt, Human
ccccacagagcccccucccc

SEQ ID NO: 894273 - RNA, 21 nt, Human
ccccacagagcccccuccccc

SEQ ID NO: 894274 - RNA, 20 nt, Human
ccccauagauuccccccacc

SEQ ID NO: 894275 - RNA, 22 nt, Human
cccccaccccccccccaaaccc

SEQ ID NO: 894276 - RNA, 25 nt, Human
cccccauagauuccccccacccccc

SEQ ID NO: 894277 - RNA, 20 nt, Human
ccccccaccccccccccaaa

SEQ ID NO: 894278 - RNA, 24 nt, Human
ccccccaccccccccccaaacccu

SEQ ID NO: 894279 - RNA, 23 nt, Human
cccccccccaaacccuaauucua

SEQ ID NO: 894280 - RNA, 18 nt, Human
cccugcacaagcccuccu

SEQ ID NO: 894281 - RNA, 20 nt, Human
cccugggcuccgacccuggg

SEQ ID NO: 894282 - RNA, 24 nt, Human
cccugggcuccgacccugggccuu

SEQ ID NO: 894283 - RNA, 18 nt, Human
cgccgucaccgugcuccg

SEQ ID NO: 894284 - RNA, 24 nt, Human
cuccccccauagauuccccccacc

SEQ ID NO: 894285 - RNA, 20 nt, Human
cugcacaagcccuccugccc

SEQ ID NO: 894286 - RNA, 19 nt, Human
cugggcuccgacccugggc

SEQ ID NO: 894287 - RNA, 25 nt, Human
cuuccggucccccgcugcugccggg

SEQ ID NO: 894288 - RNA, 22 nt, Human
gacaggaagggagaggcccugg

SEQ ID NO: 894289 - RNA, 20 nt, Human
gagaggcccugggcuccgac

SEQ ID NO: 894290 - RNA, 20 nt, Human
gagccuccgcgagccacuuc

SEQ ID NO: 894291 - RNA, 19 nt, Human
gcaccuccucgugccgaau

SEQ ID NO: 894292 - RNA, 21 nt, Human
gcccccuccccccauagauuc

SEQ ID NO: 894293 - RNA, 18 nt, Human
ggccaccacucagaccag

SEQ ID NO: 894294 - RNA, 21 nt, Human
ggugguccaugccaccauggu

SEQ ID NO: 894295 - RNA, 23 nt, Human
uaagagggugacaguucuuccuu

SEQ ID NO: 894296 - RNA, 20 nt, Human
uaaugaaacuagaucacugc

SEQ ID NO: 894297 - RNA, 19 nt, Human
uagaucacugcuuacaaaa

SEQ ID NO: 894298 - RNA, 18 nt, Human
uagauuccccccaccccc

SEQ ID NO: 894299 - RNA, 19 nt, Human
uagauuccccccacccccc

SEQ ID NO: 894300 - RNA, 18 nt, Human
uagcuucugagccuccgc

SEQ ID NO: 894301 - RNA, 19 nt, Human
ucagaccagagugaaaugg

SEQ ID NO: 894302 - RNA, 28 nt, Human
ucccaccccacagagcccccuccccccu

SEQ ID NO: 894303 - RNA, 22 nt, Human
uccccccaccccccccccaaac

SEQ ID NO: 894304 - RNA, 23 nt, Human
uccccccaccccccccccaaacc

SEQ ID NO: 894305 - RNA, 23 nt, Human
uccgggacuagcuucugagccuc

SEQ ID NO: 894306 - RNA, 21 nt, Human
uccugcccauccccuucacag

SEQ ID NO: 894307 - RNA, 19 nt, Human
ucuacugagaugaggccca

SEQ ID NO: 894308 - RNA, 23 nt, Human
ugagaugaggcccagcuuccauc

SEQ ID NO: 894309 - RNA, 21 nt, Human
ugggcuccgacccugggccuu

SEQ ID NO: 894310 - RNA, 18 nt, Human
uggguguggaacagccac

SEQ ID NO: 894311 - RNA, 23 nt, Human
uuaagagggugacaguucuuccu

SEQ ID NO: 894312 - RNA, 19 nt, Human
uuccccccacccccccccc

SEQ ID NO: 894313 - RNA, 20 nt, Human
uuccccccacccccccccca

SEQ ID NO: 894314 - RNA, 25 nt, Human
uuccccccaccccccccccaaaccc

SEQ ID NO: 894315 - RNA, 21 nt, Human
aaaagccaagacaaaaaggug

SEQ ID NO: 894316 - RNA, 23 nt, Human
aaacagcaucagcgaaaaucaga

SEQ ID NO: 894317 - RNA, 21 nt, Human
aaaccacaccaaaacccacag

SEQ ID NO: 894318 - RNA, 20 nt, Human
aaacgagcccuauacaggcc

SEQ ID NO: 894319 - RNA, 21 nt, Human
aaccacaccaaaacccacagc

SEQ ID NO: 894320 - RNA, 18 nt, Human
aaccgaaacagagcucac

SEQ ID NO: 894321 - RNA, 18 nt, Human
aagaaauggcuaaugggu

SEQ ID NO: 894322 - RNA, 21 nt, Human
aagaauucaggaccacaggga

SEQ ID NO: 894323 - RNA, 19 nt, Human
aagcagcccacaagccaaa

SEQ ID NO: 894324 - RNA, 22 nt, Human
aagugagauguauugagcagaa

SEQ ID NO: 894325 - RNA, 22 nt, Human
aauggaaugaaauuguccucaa

SEQ ID NO: 894326 - RNA, 24 nt, Human
acaaccaucacuaccacaaaaauc

SEQ ID NO: 894327 - RNA, 25 nt, Human
acaccaaaacccacagccugcaaca

SEQ ID NO: 894328 - RNA, 19 nt, Human
acagaagccucuucagaaa

SEQ ID NO: 894329 - RNA, 18 nt, Human
acagagcucacuccagag

SEQ ID NO: 894330 - RNA, 21 nt, Human
accacaaaaauccacaaaaca

SEQ ID NO: 894331 - RNA, 24 nt, Human
accacaaaaauccacaaaacagca

SEQ ID NO: 894332 - RNA, 20 nt, Human
accacacugcagggcuccug

SEQ ID NO: 894333 - RNA, 22 nt, Human
acccacagccugcaacaagccc

SEQ ID NO: 894334 - RNA, 19 nt, Human
acuccugccuagccacccc

SEQ ID NO: 894335 - RNA, 19 nt, Human
acucuggggcuugaggcac

SEQ ID NO: 894336 - RNA, 23 nt, Human
acugcagggcuccuguggggagg

SEQ ID NO: 894337 - RNA, 19 nt, Human
acuugcaggcuguaucuug

SEQ ID NO: 894338 - RNA, 23 nt, Human
agacuggaguccguggucaaaug

SEQ ID NO: 894339 - RNA, 24 nt, Human
agagcucacuccagagauccgcac

SEQ ID NO: 894340 - RNA, 19 nt, Human
agaggugacggcagcaagg

SEQ ID NO: 894341 - RNA, 20 nt, Human
agaucaagacuaggacaggg

SEQ ID NO: 894342 - RNA, 22 nt, Human
agcacugacaaccaucacuacc

SEQ ID NO: 894343 - RNA, 20 nt, Human
agcccaaaucucagaggcag

SEQ ID NO: 894344 - RNA, 21 nt, Human
agccggccaccugguuucagu

SEQ ID NO: 894345 - RNA, 19 nt, Human
agcugggugugggcuggcc

SEQ ID NO: 894346 - RNA, 22 nt, Human
aggaaaccaugaacugugccaa

SEQ ID NO: 894347 - RNA, 24 nt, Human
aggaacaaugggaaaagggagggc

SEQ ID NO: 894348 - RNA, 19 nt, Human
aggacagggagccuuucca

SEQ ID NO: 894349 - RNA, 19 nt, Human
aggagguccaagggccucu

SEQ ID NO: 894350 - RNA, 21 nt, Human
aggcacaggccaggggcuggu

SEQ ID NO: 894351 - RNA, 19 nt, Human
agguugguuaaaugcuggu

SEQ ID NO: 894352 - RNA, 20 nt, Human
aguccguggucaaaugcaga

SEQ ID NO: 894353 - RNA, 21 nt, Human
aucacuucuugcuaccacuug

SEQ ID NO: 894354 - RNA, 20 nt, Human
aucccaugagaucugagccu

SEQ ID NO: 894355 - RNA, 18 nt, Human
auggcagcugggaggacu

SEQ ID NO: 894356 - RNA, 26 nt, Human
auuggaccaacaguggugggguucca

SEQ ID NO: 894357 - RNA, 21 nt, Human
caaaaaucagaugagcagcaa

SEQ ID NO: 894358 - RNA, 22 nt, Human
caaaacccacagccugcaacaa

SEQ ID NO: 894359 - RNA, 25 nt, Human
caaaccacaccaaaacccacagccu

SEQ ID NO: 894360 - RNA, 21 nt, Human
caaauaagacagaagccucuu

SEQ ID NO: 894361 - RNA, 25 nt, Human
caaccgaaacagagcucacuccaga

SEQ ID NO: 894362 - RNA, 27 nt, Human
cacagcccaaagaaaagccaagacaaa

SEQ ID NO: 894363 - RNA, 20 nt, Human
cacagcccaauuuugcccgg

SEQ ID NO: 894364 - RNA, 19 nt, Human
caccaaaacccacagccug

SEQ ID NO: 894365 - RNA, 25 nt, Human
caccaaaacccacagccugcaacaa

SEQ ID NO: 894366 - RNA, 25 nt, Human
caccacuugcuucucucuagagcaa

SEQ ID NO: 894367 - RNA, 23 nt, Human
cacgcagcccacgccaucgcaau

SEQ ID NO: 894368 - RNA, 23 nt, Human
cacuaccacaaaaauccacaaaa

SEQ ID NO: 894369 - RNA, 18 nt, Human
cacuuuguccuuugauau

SEQ ID NO: 894370 - RNA, 18 nt, Human
cagaacagaucaagacua

SEQ ID NO: 894371 - RNA, 23 nt, Human
cagaacagaucaagacuaggaca

SEQ ID NO: 894372 - RNA, 31 nt, Human
cagaaggcugccucacagguggguaggcacc

SEQ ID NO: 894373 - RNA, 18 nt, Human
cagagcgggcagcauucc

SEQ ID NO: 894374 - RNA, 19 nt, Human
cagaucaagacuaggacag

SEQ ID NO: 894375 - RNA, 18 nt, Human
cagaucugccucuaauca

SEQ ID NO: 894376 - RNA, 20 nt, Human
cagcaagcagcccacaagcc

SEQ ID NO: 894377 - RNA, 24 nt, Human
cagcaagcagcccacaagccaaac

SEQ ID NO: 894378 - RNA, 21 nt, Human
cagcaaggaaacccgcacacc

SEQ ID NO: 894379 - RNA, 22 nt, Human
cagcaaggaaacccgcacacca

SEQ ID NO: 894380 - RNA, 24 nt, Human
cagcccaaagaaaagccaagacaa

SEQ ID NO: 894381 - RNA, 21 nt, Human
caggccccugaugaaaaucca

SEQ ID NO: 894382 - RNA, 24 nt, Human
cagugcgcaucuugcuaagaacag

SEQ ID NO: 894383 - RNA, 20 nt, Human
caucacuaccacaaaaaucc

SEQ ID NO: 894384 - RNA, 20 nt, Human
cauggcaccugccugccagc

SEQ ID NO: 894385 - RNA, 18 nt, Human
ccacaaaaauccacaaaa

SEQ ID NO: 894386 - RNA, 24 nt, Human
ccacaccaaaacccacagccugca

SEQ ID NO: 894387 - RNA, 20 nt, Human
ccagauccucuuuuucccca

SEQ ID NO: 894388 - RNA, 21 nt, Human
ccaggccaucagaaggcugcc

SEQ ID NO: 894389 - RNA, 21 nt, Human
ccaucacuaccacaaaaaucc

SEQ ID NO: 894390 - RNA, 21 nt, Human
cccacagcccaaagaaaagcc

SEQ ID NO: 894391 - RNA, 18 nt, Human
ccccaagguaggaaagac

SEQ ID NO: 894392 - RNA, 21 nt, Human
ccccacgccacuccugccuag

SEQ ID NO: 894393 - RNA, 24 nt, Human
ccccccacagcccaaagaaaagcc

SEQ ID NO: 894394 - RNA, 22 nt, Human
ccccugccucuccgacuccccu

SEQ ID NO: 894395 - RNA, 20 nt, Human
cccuauacaggccucgaucc

SEQ ID NO: 894396 - RNA, 23 nt, Human
cccugacccccgggauggugcuc

SEQ ID NO: 894397 - RNA, 19 nt, Human
cccugcacaccugggcaga

SEQ ID NO: 894398 - RNA, 23 nt, Human
cccugcccagggucagccccagc

SEQ ID NO: 894399 - RNA, 21 nt, Human
ccggucacuuggcugaacacc

SEQ ID NO: 894400 - RNA, 18 nt, Human
ccgguucaguucugcucc

SEQ ID NO: 894401 - RNA, 19 nt, Human
ccuacacacagacuggagu

SEQ ID NO: 894402 - RNA, 20 nt, Human
ccucacagguggguaggcac

SEQ ID NO: 894403 - RNA, 21 nt, Human
ccucuucagaaauaggcaugu

SEQ ID NO: 894404 - RNA, 22 nt, Human
ccugcccagggucagccccagc

SEQ ID NO: 894405 - RNA, 23 nt, Human
ccuguuccaucuucccuuccuuc

SEQ ID NO: 894406 - RNA, 19 nt, Human
ccuuaguggaguugcuggc

SEQ ID NO: 894407 - RNA, 25 nt, Human
ccuuccaacagcaguugcucgagga

SEQ ID NO: 894408 - RNA, 24 nt, Human
cgcacaccacacgucaugcuaccu

SEQ ID NO: 894409 - RNA, 23 nt, Human
cgcacagcccaaaucucagaggc

SEQ ID NO: 894410 - RNA, 24 nt, Human
cgucagucacgauugcuggggccu

SEQ ID NO: 894411 - RNA, 27 nt, Human
cuaaggcuucauuccuguaacgucucg

SEQ ID NO: 894412 - RNA, 21 nt, Human
cuaccuccuucccaccacuug

SEQ ID NO: 894413 - RNA, 20 nt, Human
cucagaggcagcucaagcuc

SEQ ID NO: 894414 - RNA, 21 nt, Human
cucaguuucuuggagucaagg

SEQ ID NO: 894415 - RNA, 23 nt, Human
cucccccgucccuguucccagac

SEQ ID NO: 894416 - RNA, 22 nt, Human
cuccccuaggcuucugagagcc

SEQ ID NO: 894417 - RNA, 21 nt, Human
cuccuucccaccacuugcuuc

SEQ ID NO: 894418 - RNA, 22 nt, Human
cugaagccucaggccuccccug

SEQ ID NO: 894419 - RNA, 23 nt, Human
cugacccccgggauggugcucuc

SEQ ID NO: 894420 - RNA, 19 nt, Human
cugcacaccugggcagagu

SEQ ID NO: 894421 - RNA, 22 nt, Human
cugcagggcuccuguggggagg

SEQ ID NO: 894422 - RNA, 18 nt, Human
cuggcuaaggcuucauuc

SEQ ID NO: 894423 - RNA, 21 nt, Human
cuggguggcagaggguggggg

SEQ ID NO: 894424 - RNA, 21 nt, Human
cuucucaaagccagucauccc

SEQ ID NO: 894425 - RNA, 23 nt, Human
gaaacagagcucacuccagagau

SEQ ID NO: 894426 - RNA, 21 nt, Human
gaaggcacaggccaggggcug

SEQ ID NO: 894427 - RNA, 23 nt, Human
gacaaaaaggugaagcucccccg

SEQ ID NO: 894428 - RNA, 22 nt, Human
gacaaccaucacuaccacaaaa

SEQ ID NO: 894429 - RNA, 19 nt, Human
gacagcaguuagacaggag

SEQ ID NO: 894430 - RNA, 24 nt, Human
gagacagccauggcgcuaccacac

SEQ ID NO: 894431 - RNA, 24 nt, Human
gagaugcuggggccuuugccagga

SEQ ID NO: 894432 - RNA, 18 nt, Human
gagauguauugagcagaa

SEQ ID NO: 894433 - RNA, 20 nt, Human
gagcaaaaauuacauccaag

SEQ ID NO: 894434 - RNA, 21 nt, Human
gagcaggccaaggggauggaa

SEQ ID NO: 894435 - RNA, 24 nt, Human
gagccuguuccaucuucccuuccu

SEQ ID NO: 894436 - RNA, 18 nt, Human
gaggugacggcagcaagg

SEQ ID NO: 894437 - RNA, 23 nt, Human
gcaacaagccccugcuggccugu

SEQ ID NO: 894438 - RNA, 24 nt, Human
gcagaguucucaccgcaacauaaa

SEQ ID NO: 894439 - RNA, 18 nt, Human
gcagcugggaggacuggg

SEQ ID NO: 894440 - RNA, 20 nt, Human
gcagcugggaggacugggug

SEQ ID NO: 894441 - RNA, 24 nt, Human
gccaggggcugguggcugaagggg

SEQ ID NO: 894442 - RNA, 20 nt, Human
gcccaaaucucagaggcagc

SEQ ID NO: 894443 - RNA, 20 nt, Human
gccuucauuuugcagcagag

SEQ ID NO: 894444 - RNA, 23 nt, Human
gcugauucagaaggggagcugga

SEQ ID NO: 894445 - RNA, 23 nt, Human
ggaccaacaguggugggguucca

SEQ ID NO: 894446 - RNA, 19 nt, Human
ggagggcccugcaggcccc

SEQ ID NO: 894447 - RNA, 21 nt, Human
ggaugcccccccacagcccuu

SEQ ID NO: 894448 - RNA, 22 nt, Human
ggccuuccaacagcaguugcuc

SEQ ID NO: 894449 - RNA, 20 nt, Human
ggcugguggcugaagggguc

SEQ ID NO: 894450 - RNA, 20 nt, Human
ggcugguggcugaagggguc

SEQ ID NO: 894451 - RNA, 24 nt, Human
ggcugguggcugaaggggucuggg

SEQ ID NO: 894452 - RNA, 24 nt, Human
gggagcuggaugagguucuccaga

SEQ ID NO: 894453 - RNA, 20 nt, Human
gggaggacuggguggcagag

SEQ ID NO: 894454 - RNA, 19 nt, Human
gggcacuuuguccuuugau

SEQ ID NO: 894455 - RNA, 24 nt, Human
ggggccucaccguuuccauuccau

SEQ ID NO: 894456 - RNA, 18 nt, Human
ggucuccaaaggucccug

SEQ ID NO: 894457 - RNA, 19 nt, Human
gguggcagagggugggggc

SEQ ID NO: 894458 - RNA, 20 nt, Human
ggugugggcuggccuucaaa

SEQ ID NO: 894459 - RNA, 23 nt, Human
gguuuuggaaacucugcagaauu

SEQ ID NO: 894460 - RNA, 20 nt, Human
guggaaaagcaaaaucucac

SEQ ID NO: 894461 - RNA, 19 nt, Human
uaaaacugaagccucaggc

SEQ ID NO: 894462 - RNA, 23 nt, Human
uaaaacugaagccucaggccucc

SEQ ID NO: 894463 - RNA, 20 nt, Human
uaaaguagcugggugugggc

SEQ ID NO: 894464 - RNA, 18 nt, Human
uaacuggaaaacacggag

SEQ ID NO: 894465 - RNA, 21 nt, Human
uaccacaaaaauccacaaaac

SEQ ID NO: 894466 - RNA, 20 nt, Human
uaccacacugcagggcuccc

SEQ ID NO: 894467 - RNA, 21 nt, Human
uacguuuugggaaacuggcag

SEQ ID NO: 894468 - RNA, 22 nt, Human
uagccucugacaaaccacacca

SEQ ID NO: 894469 - RNA, 21 nt, Human
uauauauaauauauauauaua

SEQ ID NO: 894470 - RNA, 23 nt, Human
uauauauauaauauauauauaua

SEQ ID NO: 894471 - RNA, 18 nt, Human
ucagaaauaggcaugugu

SEQ ID NO: 894472 - RNA, 24 nt, Human
ucagaaggggagcuggaugagguu

SEQ ID NO: 894473 - RNA, 24 nt, Human
ucagaggcagcucaagcugggacc

SEQ ID NO: 894474 - RNA, 22 nt, Human
ucagaugagcagcaagcagccc

SEQ ID NO: 894475 - RNA, 27 nt, Human
ucaguggcuuuauccagaaucgcacug

SEQ ID NO: 894476 - RNA, 23 nt, Human
uccagagauccgcacagcccaaa

SEQ ID NO: 894477 - RNA, 23 nt, Human
uccagguucccccaagguaggaa

SEQ ID NO: 894478 - RNA, 21 nt, Human
uccaugaccugggucaaccga

SEQ ID NO: 894479 - RNA, 24 nt, Human
uccaugaccugggucaaccgaaac

SEQ ID NO: 894480 - RNA, 20 nt, Human
uccaugcaguuguccaagga

SEQ ID NO: 894481 - RNA, 20 nt, Human
ucccacggguggcacggccc

SEQ ID NO: 894482 - RNA, 19 nt, Human
ucccaugagaucugagccu

SEQ ID NO: 894483 - RNA, 19 nt, Human
uccccaugauaagccaagg

SEQ ID NO: 894484 - RNA, 20 nt, Human
ucccccgucccuguucccag

SEQ ID NO: 894485 - RNA, 23 nt, Human
ucccuugaucacggcugcaugag

SEQ ID NO: 894486 - RNA, 26 nt, Human
uccgcacagcccaaaucucagaggca

SEQ ID NO: 894487 - RNA, 23 nt, Human
ucucaccgcaacauaaagcagag

SEQ ID NO: 894488 - RNA, 23 nt, Human
ucucucccuacacacagacugga

SEQ ID NO: 894489 - RNA, 23 nt, Human
ucugccacuguccucggguccuc

SEQ ID NO: 894490 - RNA, 24 nt, Human
ugaaauuguccucaacagccuccg

SEQ ID NO: 894491 - RNA, 19 nt, Human
ugacaaaccacaccaaaac

SEQ ID NO: 894492 - RNA, 18 nt, Human
ugacaaccaucacuacca

SEQ ID NO: 894493 - RNA, 18 nt, Human
ugagagccagcaaguagg

SEQ ID NO: 894494 - RNA, 19 nt, Human
ugagagccagcaaguaggg

SEQ ID NO: 894495 - RNA, 19 nt, Human
ugagauguauugagcagaa

SEQ ID NO: 894496 - RNA, 21 nt, Human
ugagcagcaagcagcccacaa

SEQ ID NO: 894497 - RNA, 18 nt, Human
ugagccuggccuccuggc

SEQ ID NO: 894498 - RNA, 21 nt, Human
ugagccuguuccaucuucccu

SEQ ID NO: 894499 - RNA, 24 nt, Human
ugaguggcacagggcugagccugg

SEQ ID NO: 894500 - RNA, 22 nt, Human
ugcaacuguugucuguggggcu

SEQ ID NO: 894501 - RNA, 21 nt, Human
ugcagaauuagccucugacaa

SEQ ID NO: 894502 - RNA, 19 nt, Human
ugccaggagaucuguuucu

SEQ ID NO: 894503 - RNA, 20 nt, Human
ugccuagccaccccagggac

SEQ ID NO: 894504 - RNA, 22 nt, Human
uggaaaacacggagaccagaga

SEQ ID NO: 894505 - RNA, 20 nt, Human
uggaacaugaaagauauuua

SEQ ID NO: 894506 - RNA, 19 nt, Human
uggcagagggugggggcca

SEQ ID NO: 894507 - RNA, 20 nt, Human
uggcagcugggaggacuggg

SEQ ID NO: 894508 - RNA, 22 nt, Human
uggcugaaggggucuggguauu

SEQ ID NO: 894509 - RNA, 21 nt, Human
ugggacaaaaaucagaugagc

SEQ ID NO: 894510 - RNA, 27 nt, Human
ugggaggacuggguggcagaggguggg

SEQ ID NO: 894511 - RNA, 22 nt, Human
ugggguuccauuuccugguucg

SEQ ID NO: 894512 - RNA, 19 nt, Human
uggguaggcacugacggga

SEQ ID NO: 894513 - RNA, 19 nt, Human
ugguggcugaaggggucug

SEQ ID NO: 894514 - RNA, 22 nt, Human
ugguuaaaugcuggucgucuuu

SEQ ID NO: 894515 - RNA, 22 nt, Human
ugguucgaauuuucaguggcuu

SEQ ID NO: 894516 - RNA, 23 nt, Human
ugguuuuggaaacucugcagaau

SEQ ID NO: 894517 - RNA, 22 nt, Human
ugugaaaauuggaccaacagug

SEQ ID NO: 894518 - RNA, 22 nt, Human
uuaaaguagcugggugugggcu

SEQ ID NO: 894519 - RNA, 18 nt, Human
uuaauggaaugaaauugu

SEQ ID NO: 894520 - RNA, 20 nt, Human
uucccuuccuucucaaagcc

SEQ ID NO: 894521 - RNA, 18 nt, Human
uucccuugaucacggcug

SEQ ID NO: 894522 - RNA, 24 nt, Human
uucuccuagagugcagcuccaugc

SEQ ID NO: 894523 - RNA, 19 nt, Human
uugaguugcgagagcagcc

SEQ ID NO: 894524 - RNA, 24 nt, Human
uugcuggggccugcaauuugcagc

SEQ ID NO: 894525 - RNA, 19 nt, Human
uuggccccacgccacuccu

SEQ ID NO: 894526 - RNA, 20 nt, Human
aaacuaucaaugcccugaua

SEQ ID NO: 894527 - RNA, 24 nt, Human
aaagugcugggauuacaggcguga

SEQ ID NO: 894528 - RNA, 18 nt, Human
aacauucuagcuagaaac

SEQ ID NO: 894529 - RNA, 22 nt, Human
aagcaauccacugaccugguaa

SEQ ID NO: 894530 - RNA, 20 nt, Human
aagcagcugggacuacaggc

SEQ ID NO: 894531 - RNA, 24 nt, Human
aagcagcugggacuacaggcacac

SEQ ID NO: 894532 - RNA, 19 nt, Human
aagugcugggauuacaggc

SEQ ID NO: 894533 - RNA, 19 nt, Human
aagugcugggauuacaggc

SEQ ID NO: 894534 - RNA, 26 nt, Human
aagugcugggauuacaggcgugagcc

SEQ ID NO: 894535 - RNA, 26 nt, Human
acaggcucuuucuuuuuuuuuuuuuu

SEQ ID NO: 894536 - RNA, 18 nt, Human
acaguuuuuuauuuccuu

SEQ ID NO: 894537 - RNA, 19 nt, Human
acccaggcuggagugcagu

SEQ ID NO: 894538 - RNA, 24 nt, Human
accucaugaucugcccaccuuggc

SEQ ID NO: 894539 - RNA, 24 nt, Human
acgcucugucacccaggcuggagu

SEQ ID NO: 894540 - RNA, 18 nt, Human
acuauguuggccagaaug

SEQ ID NO: 894541 - RNA, 24 nt, Human
acuauguuggccagaauggucucg

SEQ ID NO: 894542 - RNA, 23 nt, Human
agaaaaacagucccuuuucuaag

SEQ ID NO: 894543 - RNA, 21 nt, Human
agaaguguugauuccauaaau

SEQ ID NO: 894544 - RNA, 26 nt, Human
agagacaggcaaaaauuugaaaauua

SEQ ID NO: 894545 - RNA, 23 nt, Human
agagagcacagugagugcuugca

SEQ ID NO: 894546 - RNA, 24 nt, Human
agcgauucuccugccucagccucc

SEQ ID NO: 894547 - RNA, 25 nt, Human
aggcuggagugcaguggcucgaucu

SEQ ID NO: 894548 - RNA, 20 nt, Human
agugcaguggcucgaucucg

SEQ ID NO: 894549 - RNA, 24 nt, Human
agugcaguggcucgaucucggcuc

SEQ ID NO: 894550 - RNA, 18 nt, Human
agugcugggauuacaggc

SEQ ID NO: 894551 - RNA, 20 nt, Human
augugcaauuuugcauaagu

SEQ ID NO: 894552 - RNA, 24 nt, Human
auuuuuguauuuuuaguagagaug

SEQ ID NO: 894553 - RNA, 24 nt, Human
caaagugcugggauuacaggcgug

SEQ ID NO: 894554 - RNA, 23 nt, Human
caaaugucacauguggacuuuug

SEQ ID NO: 894555 - RNA, 22 nt, Human
caagcgauucuccugccucagc

SEQ ID NO: 894556 - RNA, 27 nt, Human
caagcgauucuccugccucagccuccc

SEQ ID NO: 894557 - RNA, 28 nt, Human
cacacaauagcaaagauuuucuuacaug

SEQ ID NO: 894558 - RNA, 24 nt, Human
caccacgcccggcuaauuuuugua

SEQ ID NO: 894559 - RNA, 24 nt, Human
cacgccaccacgcccggcuaauuu

SEQ ID NO: 894560 - RNA, 24 nt, Human
cacuauguuggccagaauggucuc

SEQ ID NO: 894561 - RNA, 19 nt, Human
cagcauagaggaguaugug

SEQ ID NO: 894562 - RNA, 23 nt, Human
cagccucccaagcagcugggacu

SEQ ID NO: 894563 - RNA, 21 nt, Human
cagguucaagcgauucuccug

SEQ ID NO: 894564 - RNA, 21 nt, Human
caucccucccacaaauagguc

SEQ ID NO: 894565 - RNA, 21 nt, Human
caugaucugcccaccuuggcc

SEQ ID NO: 894566 - RNA, 22 nt, Human
ccaaagugcugggauuacaggc

SEQ ID NO: 894567 - RNA, 22 nt, Human
ccaaagugcugggauuacaggc

SEQ ID NO: 894568 - RNA, 24 nt, Human
ccaaagugcugggauuacaggcgu

SEQ ID NO: 894569 - RNA, 24 nt, Human
cccaagcagcugggacuacaggca

SEQ ID NO: 894570 - RNA, 18 nt, Human
cccacaaauaggucaaca

SEQ ID NO: 894571 - RNA, 24 nt, Human
ccucucagguucaagcgauucucc

SEQ ID NO: 894572 - RNA, 24 nt, Human
ccugccucagccucccaagcagcu

SEQ ID NO: 894573 - RNA, 19 nt, Human
cggugcucggggccgggcc

SEQ ID NO: 894574 - RNA, 21 nt, Human
cgugagccaccacgcccggcc

SEQ ID NO: 894575 - RNA, 23 nt, Human
cuccacacaauagcaaagauuuu

SEQ ID NO: 894576 - RNA, 20 nt, Human
cuccugaccucaugaucugc

SEQ ID NO: 894577 - RNA, 20 nt, Human
cucugucacccaggcuggag

SEQ ID NO: 894578 - RNA, 24 nt, Human
cugcacuuaaacaaccaccaccug

SEQ ID NO: 894579 - RNA, 18 nt, Human
cuuuuuuuuuuuuuuuug

SEQ ID NO: 894580 - RNA, 20 nt, Human
gagaugggguuucacuaugu

SEQ ID NO: 894581 - RNA, 24 nt, Human
gagaugggguuucacuauguuggc

SEQ ID NO: 894582 - RNA, 18 nt, Human
gauuacaggcgugagcca

SEQ ID NO: 894583 - RNA, 21 nt, Human
gauuacaggcgugagccacca

SEQ ID NO: 894584 - RNA, 22 nt, Human
gauuacaggcgugagccaccac

SEQ ID NO: 894585 - RNA, 21 nt, Human
gcaaccucaccucucagguuc

SEQ ID NO: 894586 - RNA, 22 nt, Human
gcaauuucucuccacacaauag

SEQ ID NO: 894587 - RNA, 22 nt, Human
gcccggcuaauuuuuguauuuu

SEQ ID NO: 894588 - RNA, 24 nt, Human
gcgauucuccugccucagccuccc

SEQ ID NO: 894589 - RNA, 25 nt, Human
gcucugucacccaggcuggagugca

SEQ ID NO: 894590 - RNA, 25 nt, Human
gcuggagugcaguggcucgaucucg

SEQ ID NO: 894591 - RNA, 19 nt, Human
ggauuacaggcgugagcca

SEQ ID NO: 894592 - RNA, 25 nt, Human
ggcucuuucuuuuuuuuuuuuuuuu

SEQ ID NO: 894593 - RNA, 19 nt, Human
ggcuggagugcaguggcuc

SEQ ID NO: 894594 - RNA, 22 nt, Human
gggguuucacuauguuggccag

SEQ ID NO: 894595 - RNA, 18 nt, Human
ggguuucacuauguuggc

SEQ ID NO: 894596 - RNA, 21 nt, Human
guaaagaucaaaguacaaacu

SEQ ID NO: 894597 - RNA, 19 nt, Human
gugcucuuuguagccuuuc

SEQ ID NO: 894598 - RNA, 24 nt, Human
uaaaaacauucaaacuaucaaugc

SEQ ID NO: 894599 - RNA, 21 nt, Human
uaagaaacagaaaugcagcaa

SEQ ID NO: 894600 - RNA, 24 nt, Human
uaauuuuuguauuuuuaguagaga

SEQ ID NO: 894601 - RNA, 23 nt, Human
uacaggcacacgccaccacgccc

SEQ ID NO: 894602 - RNA, 23 nt, Human
uacaggcgugagccaccacgccc

SEQ ID NO: 894603 - RNA, 19 nt, Human
uaccauguaaggugauacc

SEQ ID NO: 894604 - RNA, 22 nt, Human
uagagaugggguuucacuaugu

SEQ ID NO: 894605 - RNA, 25 nt, Human
uagcacgaauaaguuccaccaggca

SEQ ID NO: 894606 - RNA, 23 nt, Human
uaguagagaugggguuucacuau

SEQ ID NO: 894607 - RNA, 24 nt, Human
uaguagagaugggguuucacuaug

SEQ ID NO: 894608 - RNA, 26 nt, Human
uauucuucuuuggaauggcaguucca

SEQ ID NO: 894609 - RNA, 21 nt, Human
ucaaugcccugauagcacgaa

SEQ ID NO: 894610 - RNA, 24 nt, Human
ucacccaggcuggagugcaguggc

SEQ ID NO: 894611 - RNA, 23 nt, Human
ucacgcucugucacccaggcugg

SEQ ID NO: 894612 - RNA, 24 nt, Human
ucacgcucugucacccaggcugga

SEQ ID NO: 894613 - RNA, 18 nt, Human
ucacugcaaccucaccuc

SEQ ID NO: 894614 - RNA, 23 nt, Human
ucacugcaaccucaccucucagg

SEQ ID NO: 894615 - RNA, 20 nt, Human
ucagccucccaagcagcugg

SEQ ID NO: 894616 - RNA, 19 nt, Human
uccacacaauagcaaagau

SEQ ID NO: 894617 - RNA, 24 nt, Human
ucccaaagugcugggauuacaggc

SEQ ID NO: 894618 - RNA, 24 nt, Human
ucccaagcagcugggacuacaggc

SEQ ID NO: 894619 - RNA, 22 nt, Human
ucccacaaauaggucaacagua

SEQ ID NO: 894620 - RNA, 19 nt, Human
ucccuuuucuaagggugaa

SEQ ID NO: 894621 - RNA, 21 nt, Human
ucucagguucaagcgauucuc

SEQ ID NO: 894622 - RNA, 24 nt, Human
ucucagguucaagcgauucuccug

SEQ ID NO: 894623 - RNA, 21 nt, Human
ucuccacacaauagcaaagau

SEQ ID NO: 894624 - RNA, 23 nt, Human
ucuccugccucagccucccaagc

SEQ ID NO: 894625 - RNA, 24 nt, Human
ucugucacccaggcuggagugcag

SEQ ID NO: 894626 - RNA, 21 nt, Human
ugaauacuuauuuacaaauaa

SEQ ID NO: 894627 - RNA, 18 nt, Human
ugacucuguaacuucuac

SEQ ID NO: 894628 - RNA, 24 nt, Human
ugagacggagucucacgcucuguc

SEQ ID NO: 894629 - RNA, 20 nt, Human
ugauagcacgaauaaguucc

SEQ ID NO: 894630 - RNA, 24 nt, Human
ugaucugcccaccuuggccuccca

SEQ ID NO: 894631 - RNA, 22 nt, Human
ugcacuuaaacaaccaccaccu

SEQ ID NO: 894632 - RNA, 22 nt, Human
ugcaguggcucgaucucggcuc

SEQ ID NO: 894633 - RNA, 24 nt, Human
ugccucagccucccaagcagcugg

SEQ ID NO: 894634 - RNA, 24 nt, Human
ugcugggauuacaggcgugagcca

SEQ ID NO: 894635 - RNA, 23 nt, Human
ugcuuauggagaaauacauguac

SEQ ID NO: 894636 - RNA, 19 nt, Human
uggagugcaguggcucgau

SEQ ID NO: 894637 - RNA, 23 nt, Human
uggagugcaguggcucgaucucg

SEQ ID NO: 894638 - RNA, 24 nt, Human
uggagugcaguggcucgaucucgg

SEQ ID NO: 894639 - RNA, 21 nt, Human
ugggacuacaggcacacgcca

SEQ ID NO: 894640 - RNA, 22 nt, Human
ugggacuacaggcacacgccac

SEQ ID NO: 894641 - RNA, 24 nt, Human
ugggacuacaggcacacgccacca

SEQ ID NO: 894642 - RNA, 18 nt, Human
ugggauuacaggcgugag

SEQ ID NO: 894643 - RNA, 19 nt, Human
ugggauuacaggcgugagc

SEQ ID NO: 894644 - RNA, 22 nt, Human
ugggauuacaggcgugagccac

SEQ ID NO: 894645 - RNA, 23 nt, Human
ugggauuacaggcgugagccacc

SEQ ID NO: 894646 - RNA, 24 nt, Human
ugggauuacaggcgugagccacca

SEQ ID NO: 894647 - RNA, 23 nt, Human
ugggguuucacuauguuggccag

SEQ ID NO: 894648 - RNA, 19 nt, Human
ugguaaagaucaaaguaca

SEQ ID NO: 894649 - RNA, 21 nt, Human
uggucucgaucuccugaccuc

SEQ ID NO: 894650 - RNA, 21 nt, Human
uguauuuuuaguagagauggg

SEQ ID NO: 894651 - RNA, 21 nt, Human
uguucuguuacauggacaaau

SEQ ID NO: 894652 - RNA, 18 nt, Human
uuaguagagaugggguuu

SEQ ID NO: 894653 - RNA, 21 nt, Human
uuaguagagaugggguuucac

SEQ ID NO: 894654 - RNA, 21 nt, Human
uuaguagagaugggguuucac

SEQ ID NO: 894655 - RNA, 24 nt, Human
uuaguagagaugggguuucacuau

SEQ ID NO: 894656 - RNA, 23 nt, Human
uuaguccauagaaaaacaguccc

SEQ ID NO: 894657 - RNA, 21 nt, Human
uucaagcgauucuccugccuc

SEQ ID NO: 894658 - RNA, 23 nt, Human
uucaagcgauucuccugccucag

SEQ ID NO: 894659 - RNA, 24 nt, Human
uucaagcgauucuccugccucagc

SEQ ID NO: 894660 - RNA, 21 nt, Human
uucuuuggaauggcaguucca

SEQ ID NO: 894661 - RNA, 18 nt, Human
uuggccucccaaagugcu

SEQ ID NO: 894662 - RNA, 18 nt, Human
uuuacaguuuuuuauuuc

SEQ ID NO: 894663 - RNA, 19 nt, Human
uuucacuauguuggccaga

SEQ ID NO: 894664 - RNA, 21 nt, Human
uuuguagccuuucaucccucc

SEQ ID NO: 894665 - RNA, 24 nt, Human
uuuuuaguagagaugggguuucac

SEQ ID NO: 894666 - RNA, 20 nt, Human
uuuuuguauuuuuaguagag

SEQ ID NO: 894667 - RNA, 26 nt, Human
uuuuuuuuuuuugagacggagucuca

SEQ ID NO: 894668 - RNA, 22 nt, Human
uuuuuuuuuuuuuugagacgga

SEQ ID NO: 894669 - RNA, 20 nt, Human
accuggugcccugcugcgcc

SEQ ID NO: 894670 - RNA, 19 nt, Human
agaagaaaacaaaauguca

SEQ ID NO: 894671 - RNA, 23 nt, Human
cagaagaaaacaaaaugucagua

SEQ ID NO: 894672 - RNA, 20 nt, Human
ggcugcgggaggcucggugc

SEQ ID NO: 894673 - RNA, 22 nt, Human
uagggacgcugcgcugcgccac

SEQ ID NO: 894674 - RNA, 19 nt, Human
ucaacagaguacauuuagc

SEQ ID NO: 894675 - RNA, 20 nt, Human
ugcccugcugcgccucgggg

SEQ ID NO: 894676 - RNA, 19 nt, Human
uggugcccugcugcgccuc

SEQ ID NO: 894677 - RNA, 20 nt, Human
uuacaacugagaacauugac

SEQ ID NO: 894678 - RNA, 22 nt, Human
uuuucaacagaguacauuuagc

SEQ ID NO: 894679 - RNA, 19 nt, Human
aaaaaaaaaaaaaagaaaa

SEQ ID NO: 894680 - RNA, 20 nt, Human
aaaaaaaaaaaaacuagcaa

SEQ ID NO: 894681 - RNA, 21 nt, Human
aaaaaaaaaaaaacuagcaau

SEQ ID NO: 894682 - RNA, 22 nt, Human
aaaaaaaaaaaaagaaaaaagg

SEQ ID NO: 894683 - RNA, 23 nt, Human
aaaaaaaaaaaaagaaaaaagga

SEQ ID NO: 894684 - RNA, 31 nt, Human
aaaaaaaaaaaagaaaaaaggaaaacaaaag

SEQ ID NO: 894685 - RNA, 31 nt, Human
aaaaaaaaaagaaaaaaggaaaacaaaaaag

SEQ ID NO: 894686 - RNA, 25 nt, Human
aaaaaagagaaagcagucacgaaag

SEQ ID NO: 894687 - RNA, 21 nt, Human
aaaaagaaaaaaggaaaacaa

SEQ ID NO: 894688 - RNA, 23 nt, Human
aaaaaggaaaacaaaaaagagaa

SEQ ID NO: 894689 - RNA, 24 nt, Human
aaaaaggaaaacaaaaaagagaaa

SEQ ID NO: 894690 - RNA, 22 nt, Human
aaaagaaaaaaggaaaacaaaa

SEQ ID NO: 894691 - RNA, 21 nt, Human
aaagagaaagcagucacgaaa

SEQ ID NO: 894692 - RNA, 18 nt, Human
aaccauuuccauuaaugg

SEQ ID NO: 894693 - RNA, 21 nt, Human
aagaaaaaaggaaaacaaaaa

SEQ ID NO: 894694 - RNA, 19 nt, Human
aagagaaagcagucacgaa

SEQ ID NO: 894695 - RNA, 19 nt, Human
aagcagucacgaaagucac

SEQ ID NO: 894696 - RNA, 19 nt, Human
accagaucuaacucucagu

SEQ ID NO: 894697 - RNA, 23 nt, Human
acugcugccaagggacacugaug

SEQ ID NO: 894698 - RNA, 24 nt, Human
agaaaaaaggaaaacaaaaaagag

SEQ ID NO: 894699 - RNA, 22 nt, Human
agaaagcagucacgaaagucac

SEQ ID NO: 894700 - RNA, 19 nt, Human
aggaaaaaaaaaaaaaaag

SEQ ID NO: 894701 - RNA, 23 nt, Human
aggaaaacaaaaaagagaaagca

SEQ ID NO: 894702 - RNA, 19 nt, Human
agggacacugauguuggcu

SEQ ID NO: 894703 - RNA, 18 nt, Human
agugacagccugacucgg

SEQ ID NO: 894704 - RNA, 18 nt, Human
augacucaggacgaacca

SEQ ID NO: 894705 - RNA, 26 nt, Human
cagcacaauaaaacaaguuaugccuu

SEQ ID NO: 894706 - RNA, 26 nt, Human
cagcauugccacaaacuuucaauuuu

SEQ ID NO: 894707 - RNA, 21 nt, Human
caggaaaaaaaaaaaaaaaga

SEQ ID NO: 894708 - RNA, 18 nt, Human
caugccuuugggaagaaa

SEQ ID NO: 894709 - RNA, 19 nt, Human
cauugccacaaacuuucaa

SEQ ID NO: 894710 - RNA, 20 nt, Human
ccacaaacuuucaauuuuuu

SEQ ID NO: 894711 - RNA, 24 nt, Human
ccaggaaaaaaaaaaaaaaagaaa

SEQ ID NO: 894712 - RNA, 23 nt, Human
ccuuuccagucacguucuuggca

SEQ ID NO: 894713 - RNA, 23 nt, Human
gaaagucacaggcuucguaagga

SEQ ID NO: 894714 - RNA, 19 nt, Human
uaaaaaucaggcagucuug

SEQ ID NO: 894715 - RNA, 22 nt, Human
uaaaauccaaggccugagccuc

SEQ ID NO: 894716 - RNA, 18 nt, Human
uccuucuguggcucacag

SEQ ID NO: 894717 - RNA, 20 nt, Human
ucuguuucaagcugagccag

SEQ ID NO: 894718 - RNA, 22 nt, Human
ugacucaggacgaaccauuucc

SEQ ID NO: 894719 - RNA, 24 nt, Human
ugacucggaacguagaugacucag

SEQ ID NO: 894720 - RNA, 27 nt, Human
ugagaagcacaauaaaauucagcacaa

SEQ ID NO: 894721 - RNA, 18 nt, Human
ugagaaggcauacauuau

SEQ ID NO: 894722 - RNA, 27 nt, Human
ugagccaggaaaaaaaaaaaaaaagaa

SEQ ID NO: 894723 - RNA, 18 nt, Human
ugccaagggacacugaug

SEQ ID NO: 894724 - RNA, 22 nt, Human
uggaaagauaacuaaaaaucag

SEQ ID NO: 894725 - RNA, 20 nt, Human
uggaaagauaacuaaaaauu

SEQ ID NO: 894726 - RNA, 22 nt, Human
ugggagagagugagugcggacg

SEQ ID NO: 894727 - RNA, 23 nt, Human
ugggauguuccucucugaaguuu

SEQ ID NO: 894728 - RNA, 20 nt, Human
uguuggcuucucacaucaua

SEQ ID NO: 894729 - RNA, 21 nt, Human
uucguaaggaaggcugggaga

SEQ ID NO: 894730 - RNA, 22 nt, Human
aacacaaaaaauaugcacagaa

SEQ ID NO: 894731 - RNA, 18 nt, Human
acagauguacaucaccau

SEQ ID NO: 894732 - RNA, 18 nt, Human
gcauuauuagcuaacagc

SEQ ID NO: 894733 - RNA, 23 nt, Human
uagcuaacagcuugauccuuaau

SEQ ID NO: 894734 - RNA, 19 nt, Human
uauuugccuguucccaaaa

SEQ ID NO: 894735 - RNA, 22 nt, Human
ucagucuucauuuucuccaaga

SEQ ID NO: 894736 - RNA, 19 nt, Human
uccaagagcuuugcuacag

SEQ ID NO: 894737 - RNA, 19 nt, Human
ucucuauacaguuuuugcu

SEQ ID NO: 894738 - RNA, 23 nt, Human
ugcacagaaagacauuuagaauu

SEQ ID NO: 894739 - RNA, 22 nt, Human
ugcagagguggcauuauuagcu

SEQ ID NO: 894740 - RNA, 22 nt, Human
ugcuuugcuuucuucagucuuc

SEQ ID NO: 894741 - RNA, 23 nt, Human
ugcuuugcuuucuucagucuuca

SEQ ID NO: 894742 - RNA, 19 nt, Human
uuacugcuuuugaaaaauc

SEQ ID NO: 894743 - RNA, 24 nt, Human
uugcuuugcuuucuucagucuuca

SEQ ID NO: 894744 - RNA, 21 nt, Human
uuugccuguucccaaaacugc

SEQ ID NO: 894745 - RNA, 18 nt, Human
aaaacgccaccgacgcga

SEQ ID NO: 894746 - RNA, 23 nt, Human
aauuuuuauucuguugucaaggg

SEQ ID NO: 894747 - RNA, 24 nt, Human
agugccaaggagcuaaagggccca

SEQ ID NO: 894748 - RNA, 24 nt, Human
caagaugccagcuuggaagugcca

SEQ ID NO: 894749 - RNA, 18 nt, Human
caaggagcuaaagggccc

SEQ ID NO: 894750 - RNA, 20 nt, Human
caccagagccucgccugucc

SEQ ID NO: 894751 - RNA, 23 nt, Human
cacugccggccccagaacugucu

SEQ ID NO: 894752 - RNA, 24 nt, Human
gccaaggagcuaaagggcccagca

SEQ ID NO: 894753 - RNA, 19 nt, Human
guaagcaccagagccucgc

SEQ ID NO: 894754 - RNA, 18 nt, Human
gucaaggggcaagaugcc

SEQ ID NO: 894755 - RNA, 20 nt, Human
uagcgcagcacgcacgcggu

SEQ ID NO: 894756 - RNA, 25 nt, Human
uccacaaugugcucagcuccagaga

SEQ ID NO: 894757 - RNA, 19 nt, Human
ugccaaggagcuaaagggc

SEQ ID NO: 894758 - RNA, 23 nt, Human
ugccaaggagcuaaagggcccag

SEQ ID NO: 894759 - RNA, 22 nt, Human
ugucuguucaggcugugcagua

SEQ ID NO: 894760 - RNA, 20 nt, Human
uuuuuuuuuuuuggggcagc

SEQ ID NO: 894761 - RNA, 21 nt, Human
aacaaaaagcaauaggcugga

SEQ ID NO: 894762 - RNA, 20 nt, Human
acacacuaaaacaaaaagca

SEQ ID NO: 894763 - RNA, 21 nt, Human
acacacuaaaacaaaaagcaa

SEQ ID NO: 894764 - RNA, 19 nt, Human
agggaugggaagaggggag

SEQ ID NO: 894765 - RNA, 19 nt, Human
aggggaggaggguccgguu

SEQ ID NO: 894766 - RNA, 18 nt, Human
agguacuucagcuuucag

SEQ ID NO: 894767 - RNA, 19 nt, Human
caaaaugucauuaguggaa

SEQ ID NO: 894768 - RNA, 19 nt, Human
cacacuaaaacaaaaagca

SEQ ID NO: 894769 - RNA, 22 nt, Human
caccagcaaucaaugccccgug

SEQ ID NO: 894770 - RNA, 22 nt, Human
caccuuaacacaucacuuacgg

SEQ ID NO: 894771 - RNA, 21 nt, Human
cacuaaaacaaaaagcaauag

SEQ ID NO: 894772 - RNA, 24 nt, Human
cagaauuuaaauuuggcguugucc

SEQ ID NO: 894773 - RNA, 26 nt, Human
cagaggucagaguuccuuugaagcac

SEQ ID NO: 894774 - RNA, 22 nt, Human
caugaaaaaugcagccccggcc

SEQ ID NO: 894775 - RNA, 21 nt, Human
ccccgcgcucggccgcuggcc

SEQ ID NO: 894776 - RNA, 24 nt, Human
ccgcagcgggagccugcuuugggu

SEQ ID NO: 894777 - RNA, 19 nt, Human
ccugaggcaccaguccugg

SEQ ID NO: 894778 - RNA, 18 nt, Human
ccugcuuuggguggggga

SEQ ID NO: 894779 - RNA, 22 nt, Human
cgcaccuguucacccuaggcuc

SEQ ID NO: 894780 - RNA, 22 nt, Human
cgccgccgccucccccgcggac

SEQ ID NO: 894781 - RNA, 21 nt, Human
cggcuggcccagcuggaagcc

SEQ ID NO: 894782 - RNA, 24 nt, Human
cgguacaugucgcgcucgcucucc

SEQ ID NO: 894783 - RNA, 18 nt, Human
cguggagcucgacucgga

SEQ ID NO: 894784 - RNA, 19 nt, Human
cuaggcucaugaaaaaugc

SEQ ID NO: 894785 - RNA, 20 nt, Human
cucggccgcuggccggaugc

SEQ ID NO: 894786 - RNA, 21 nt, Human
cuggaacuggcgguacauguc

SEQ ID NO: 894787 - RNA, 19 nt, Human
cuggcccagcuggaagccc

SEQ ID NO: 894788 - RNA, 21 nt, Human
cuugaauuaagaauagauagc

SEQ ID NO: 894789 - RNA, 23 nt, Human
gauagcuucucaucuaccccuac

SEQ ID NO: 894790 - RNA, 22 nt, Human
gcaccuguucacccuaggcuca

SEQ ID NO: 894791 - RNA, 19 nt, Human
gccugcuuuggguggggga

SEQ ID NO: 894792 - RNA, 19 nt, Human
ggcgccgccgccucccccg

SEQ ID NO: 894793 - RNA, 22 nt, Human
uaaaacaaaaagcaauaggcug

SEQ ID NO: 894794 - RNA, 21 nt, Human
uacccgucguaaagauagcuu

SEQ ID NO: 894795 - RNA, 19 nt, Human
uagcuucucaucuaccccu

SEQ ID NO: 894796 - RNA, 21 nt, Human
uaggcuggacauacuaaagua

SEQ ID NO: 894797 - RNA, 20 nt, Human
uaucucuguugggaaaucaa

SEQ ID NO: 894798 - RNA, 19 nt, Human
ucaaccacagcuacccguc

SEQ ID NO: 894799 - RNA, 19 nt, Human
ucacuuacggaucaaggac

SEQ ID NO: 894800 - RNA, 20 nt, Human
ucacuuacggaucaaggacu

SEQ ID NO: 894801 - RNA, 21 nt, Human
uccuggaacuggcgguacaug

SEQ ID NO: 894802 - RNA, 21 nt, Human
ucuucaaccacagcuacccgu

SEQ ID NO: 894803 - RNA, 22 nt, Human
ugaccaggaccauccggacgcg

SEQ ID NO: 894804 - RNA, 20 nt, Human
ugagucaguagcaaauucca

SEQ ID NO: 894805 - RNA, 19 nt, Human
ugccagguacuucagcuuc

SEQ ID NO: 894806 - RNA, 19 nt, Human
ugcuuugggugggggaagg

SEQ ID NO: 894807 - RNA, 21 nt, Human
uggaacugcaaauuuagaccu

SEQ ID NO: 894808 - RNA, 18 nt, Human
uggagcucgacucggagc

SEQ ID NO: 894809 - RNA, 18 nt, Human
ugucauuaguggaacugc

SEQ ID NO: 894810 - RNA, 22 nt, Human
uugggcaccagcaaucaaugcc

SEQ ID NO: 894811 - RNA, 20 nt, Human
uuuuauaccacaagcuucuu

SEQ ID NO: 894812 - RNA, 27 nt, Human
auuuuuuuuuuuuuuuuuuuuuucuuu

SEQ ID NO: 894813 - RNA, 21 nt, Human
cuaugguaugccccaccuccc

SEQ ID NO: 894814 - RNA, 19 nt, Human
ggaauuuuuuuuuuuuuuu

SEQ ID NO: 894815 - RNA, 18 nt, Human
gggaacacgggcacaggg

SEQ ID NO: 894816 - RNA, 24 nt, Human
ucaggaauuuuuuuuuuuuuuuuu

SEQ ID NO: 894817 - RNA, 21 nt, Human
ucccuugcggccucaggaauu

SEQ ID NO: 894818 - RNA, 21 nt, Human
ugggaaaugucaccuugggcu

SEQ ID NO: 894819 - RNA, 18 nt, Human
uuuuuuuuuuuuuucuug

SEQ ID NO: 894820 - RNA, 27 nt, Human
uuuuuuuuuuuuuucuugugaauuugu

SEQ ID NO: 894821 - RNA, 23 nt, Human
uuuuuuuuuuuuuuuuuucuugu

SEQ ID NO: 894822 - RNA, 22 nt, Human
aagacccucaccuagagaccug

SEQ ID NO: 894823 - RNA, 25 nt, Human
aagacccucaccuagagaccugagg

SEQ ID NO: 894824 - RNA, 22 nt, Human
aaggaaggagacaacaaugaaa

SEQ ID NO: 894825 - RNA, 24 nt, Human
aagucuguacaaaacuaggaacac

SEQ ID NO: 894826 - RNA, 20 nt, Human
acagaaaaggaaggagacac

SEQ ID NO: 894827 - RNA, 23 nt, Human
accuacucuaaacuucuguccuc

SEQ ID NO: 894828 - RNA, 26 nt, Human
acuaggaacacagaaaaggaccaguc

SEQ ID NO: 894829 - RNA, 25 nt, Human
aggaacacagaaaaggaccgguacc

SEQ ID NO: 894830 - RNA, 26 nt, Human
aggaaggagacaacaaugaaaaugaa

SEQ ID NO: 894831 - RNA, 24 nt, Human
auaacauucccuuauuuugucccu

SEQ ID NO: 894832 - RNA, 26 nt, Human
aucaagacccucaccuagagaccuga

SEQ ID NO: 894833 - RNA, 26 nt, Human
cacccuugcuucaccgaagauggccu

SEQ ID NO: 894834 - RNA, 24 nt, Human
cacucaaaaacaagucuguacaaa

SEQ ID NO: 894835 - RNA, 19 nt, Human
cagguccacuggagaaagu

SEQ ID NO: 894836 - RNA, 20 nt, Human
ccagagaggauguuacacug

SEQ ID NO: 894837 - RNA, 18 nt, Human
ccaggcaauacgcgucac

SEQ ID NO: 894838 - RNA, 22 nt, Human
ccugcuacucaacacucaaaaa

SEQ ID NO: 894839 - RNA, 22 nt, Human
ccuugcuucaccgaagauggcc

SEQ ID NO: 894840 - RNA, 21 nt, Human
cuccaggcaauacgcgucacu

SEQ ID NO: 894841 - RNA, 19 nt, Human
gaucaucacccuugcuuca

SEQ ID NO: 894842 - RNA, 20 nt, Human
uacaaaacuaggaacacaga

SEQ ID NO: 894843 - RNA, 21 nt, Human
uaggaacacagaaaaggacca

SEQ ID NO: 894844 - RNA, 20 nt, Human
ucaagacccucaccuagaga

SEQ ID NO: 894845 - RNA, 21 nt, Human
uuucucaguaugaggacuuuc

SEQ ID NO: 894846 - RNA, 22 nt, Human
aggcaggaggaauaaagcaggu

SEQ ID NO: 894847 - RNA, 22 nt, Human
aguuggagcuggagcagccgcc

SEQ ID NO: 894848 - RNA, 24 nt, Human
caccaauggacccaaacccacccc

SEQ ID NO: 894849 - RNA, 19 nt, Human
cagacucccucucuccccc

SEQ ID NO: 894850 - RNA, 20 nt, Human
cagccgccucugagcaccag

SEQ ID NO: 894851 - RNA, 23 nt, Human
ccaaacccaccccagcugggcgc

SEQ ID NO: 894852 - RNA, 23 nt, Human
ccaaggcgaggguggcccucccc

SEQ ID NO: 894853 - RNA, 20 nt, Human
ccgcuccgguggcggcggcg

SEQ ID NO: 894854 - RNA, 18 nt, Human
ccucugagcaccagggag

SEQ ID NO: 894855 - RNA, 19 nt, Human
ccucugagcaccagggagc

SEQ ID NO: 894856 - RNA, 24 nt, Human
cgccucugagcaccagggagcagc

SEQ ID NO: 894857 - RNA, 22 nt, Human
cggcgccugccuccucugcucc

SEQ ID NO: 894858 - RNA, 20 nt, Human
cgggaagaagcuguggagcg

SEQ ID NO: 894859 - RNA, 21 nt, Human
cuccccccuaccuugucucca

SEQ ID NO: 894860 - RNA, 18 nt, Human
cuccccucccgggaagaa

SEQ ID NO: 894861 - RNA, 19 nt, Human
cuccgcggcgccugccucc

SEQ ID NO: 894862 - RNA, 20 nt, Human
cuccucugcuccccccuacc

SEQ ID NO: 894863 - RNA, 18 nt, Human
cugcuccccccuaccuug

SEQ ID NO: 894864 - RNA, 18 nt, Human
cugcuccccccuaccuug

SEQ ID NO: 894865 - RNA, 21 nt, Human
cugcuccccccuaccuugucu

SEQ ID NO: 894866 - RNA, 24 nt, Human
gagcagcugaugggaacgugugac

SEQ ID NO: 894867 - RNA, 18 nt, Human
gccccgggacgcaccgcu

SEQ ID NO: 894868 - RNA, 23 nt, Human
gcgaggguggcccuccccucccg

SEQ ID NO: 894869 - RNA, 18 nt, Human
gcggcgccugccuccucu

SEQ ID NO: 894870 - RNA, 20 nt, Human
ggcccuccccucccgggaag

SEQ ID NO: 894871 - RNA, 21 nt, Human
ggcugguggcugaagugcucg

SEQ ID NO: 894872 - RNA, 20 nt, Human
gggcacuggaaaaaaaaaaa

SEQ ID NO: 894873 - RNA, 21 nt, Human
guggcggcggcggagggacua

SEQ ID NO: 894874 - RNA, 22 nt, Human
guggcugaagugcucgcccaag

SEQ ID NO: 894875 - RNA, 25 nt, Human
ucaacaguuauugaucuuauaauaa

SEQ ID NO: 894876 - RNA, 18 nt, Human
ucccgggaagaagcugug

SEQ ID NO: 894877 - RNA, 20 nt, Human
ugaaugagaguuggagcugg

SEQ ID NO: 894878 - RNA, 21 nt, Human
ugacguucaacaguuauugau

SEQ ID NO: 894879 - RNA, 19 nt, Human
ugacuuuuuucaccaaugg

SEQ ID NO: 894880 - RNA, 24 nt, Human
ugauggggacagccuucggcgggu

SEQ ID NO: 894881 - RNA, 21 nt, Human
uggaaaaaaaaaaaaaaaaac

SEQ ID NO: 894882 - RNA, 23 nt, Human
uggagcuggagcagccgccucug

SEQ ID NO: 894883 - RNA, 23 nt, Human
uggggcacuggaaaaaaaaaaaa

SEQ ID NO: 894884 - RNA, 26 nt, Human
uucaacaguuauugaucuuauaauaa

SEQ ID NO: 894885 - RNA, 18 nt, Human
aggccgcagcgucccaau

SEQ ID NO: 894886 - RNA, 21 nt, Human
aggcugcggcugcuucucggc

SEQ ID NO: 894887 - RNA, 18 nt, Human
cacacucagagcagugac

SEQ ID NO: 894888 - RNA, 20 nt, Human
caccucacggcccaccucca

SEQ ID NO: 894889 - RNA, 23 nt, Human
caccucacggcccaccuccaagg

SEQ ID NO: 894890 - RNA, 19 nt, Human
ccaguggccugaaggccag

SEQ ID NO: 894891 - RNA, 24 nt, Human
cguuugaaaucaccagcaucgcuc

SEQ ID NO: 894892 - RNA, 23 nt, Human
cucacggcccaccuccaaggccc

SEQ ID NO: 894893 - RNA, 21 nt, Human
gaggaggcugcggcugcuucu

SEQ ID NO: 894894 - RNA, 21 nt, Human
gaggcugcggcugcuucucgg

SEQ ID NO: 894895 - RNA, 18 nt, Human
ggacucaaaacaggucag

SEQ ID NO: 894896 - RNA, 19 nt, Human
ggacuggugaagagccccg

SEQ ID NO: 894897 - RNA, 21 nt, Human
ggaggcugcggcugcuucucg

SEQ ID NO: 894898 - RNA, 22 nt, Human
ggcccugggacacacucagagc

SEQ ID NO: 894899 - RNA, 22 nt, Human
ugaaaucaccagcaucgcucug

SEQ ID NO: 894900 - RNA, 19 nt, Human
uggaaacgagcuggacugg

SEQ ID NO: 894901 - RNA, 21 nt, Human
uggacuggugaagagccccgg

SEQ ID NO: 894902 - RNA, 20 nt, Human
ugggauagguggagggaggg

SEQ ID NO: 894903 - RNA, 20 nt, Human
ugugacagcaaggugggagc

SEQ ID NO: 894904 - RNA, 18 nt, Human
uucgguagccaguggccu

SEQ ID NO: 894905 - RNA, 18 nt, Human
acucgggaggcugaaaug

SEQ ID NO: 894906 - RNA, 19 nt, Human
aggcgaaggucgugaugag

SEQ ID NO: 894907 - RNA, 24 nt, Human
aggcgaaggucgugaugagccaag

SEQ ID NO: 894908 - RNA, 20 nt, Human
aucgcaccauugcacuccag

SEQ ID NO: 894909 - RNA, 28 nt, Human
aucgcaccauugcacuccagccuaggca

SEQ ID NO: 894910 - RNA, 25 nt, Human
auugcacuccagccuaggcaacaag

SEQ ID NO: 894911 - RNA, 24 nt, Human
cacuccagccuaggcaacaagagu

SEQ ID NO: 894912 - RNA, 19 nt, Human
cauugcacuccagccuagg

SEQ ID NO: 894913 - RNA, 21 nt, Human
cauugcacuccagccuaggca

SEQ ID NO: 894914 - RNA, 22 nt, Human
cauugcacuccagccuaggcaa

SEQ ID NO: 894915 - RNA, 23 nt, Human
cauugcacuccagccuaggcaac

SEQ ID NO: 894916 - RNA, 24 nt, Human
cauugcacuccagccuaggcaaca

SEQ ID NO: 894917 - RNA, 25 nt, Human
cauugcacuccagccuaggcaacaa

SEQ ID NO: 894918 - RNA, 19 nt, Human
ccauugcacuccagccuag

SEQ ID NO: 894919 - RNA, 20 nt, Human
ccauugcacuccagccuagg

SEQ ID NO: 894920 - RNA, 21 nt, Human
ccauugcacuccagccuaggc

SEQ ID NO: 894921 - RNA, 24 nt, Human
ccauugcacuccagccuaggcaac

SEQ ID NO: 894922 - RNA, 20 nt, Human
cccucggucgcuuccucgug

SEQ ID NO: 894923 - RNA, 21 nt, Human
ccuguaaucccagcuacucgg

SEQ ID NO: 894924 - RNA, 21 nt, Human
cgcaccauugcacuccagccu

SEQ ID NO: 894925 - RNA, 18 nt, Human
cucccagucccucggucg

SEQ ID NO: 894926 - RNA, 21 nt, Human
cuguaaucccagcuacucggg

SEQ ID NO: 894927 - RNA, 20 nt, Human
gcaccauugcacuccagccu

SEQ ID NO: 894928 - RNA, 25 nt, Human
ucacuugaaccugggaggcgaaggu

SEQ ID NO: 894929 - RNA, 22 nt, Human
ugcacuccagccuaggcaacaa

SEQ ID NO: 894930 - RNA, 25 nt, Human
ugcacuccagccuaggcaacaagag

SEQ ID NO: 894931 - RNA, 21 nt, Human
uugaaccugggaggcgaaggu

SEQ ID NO: 894932 - RNA, 18 nt, Human
uuuuuuuuuugcgcaccc

SEQ ID NO: 894933 - RNA, 18 nt, Human
uuuuuuuuuuuuuuuuug

SEQ ID NO: 894934 - RNA, 21 nt, Human
aagggcagaguccaacccacc

SEQ ID NO: 894935 - RNA, 23 nt, Human
ccaccccagguccugaggguaga

SEQ ID NO: 894936 - RNA, 23 nt, Human
ccccagguccugaggguagacuc

SEQ ID NO: 894937 - RNA, 18 nt, Human
guccaacccaccccaggu

SEQ ID NO: 894938 - RNA, 20 nt, Human
guccugagggaaaggggugg

SEQ ID NO: 894939 - RNA, 23 nt, Human
uuuuuuggacuuagcaagguuua

SEQ ID NO: 894940 - RNA, 18 nt, Human
uuuuuuuuuuuuuuggac

SEQ ID NO: 894941 - RNA, 18 nt, Human
uuuuuuuuuuuuuuuuug

SEQ ID NO: 894942 - RNA, 23 nt, Human
uuuuuuuuuuuuuuuuuggacuu

SEQ ID NO: 894943 - RNA, 20 nt, Human
aagaggaggagaugggagga

SEQ ID NO: 894944 - RNA, 19 nt, Human
aagcacagggagggaggaa

SEQ ID NO: 894945 - RNA, 22 nt, Human
agaggagcaggacuacaccaag

SEQ ID NO: 894946 - RNA, 22 nt, Human
aggagcaggacuacaccaagcu

SEQ ID NO: 894947 - RNA, 18 nt, Human
aggaggagagggaagagg

SEQ ID NO: 894948 - RNA, 21 nt, Human
aggaggagagggaagaggagg

SEQ ID NO: 894949 - RNA, 20 nt, Human
agggaggaaggaggggucag

SEQ ID NO: 894950 - RNA, 22 nt, Human
caaaaugcaauauauacagaua

SEQ ID NO: 894951 - RNA, 21 nt, Human
cacacagaccugggcccuggg

SEQ ID NO: 894952 - RNA, 25 nt, Human
cagccccaucccaagaggagcagga

SEQ ID NO: 894953 - RNA, 26 nt, Human
cccagccccaucccaagaggagcagg

SEQ ID NO: 894954 - RNA, 18 nt, Human
ccccagccccaucccaag

SEQ ID NO: 894955 - RNA, 24 nt, Human
ccuaccccagccccaucccaagag

SEQ ID NO: 894956 - RNA, 19 nt, Human
cgggcuggggagggggcuu

SEQ ID NO: 894957 - RNA, 20 nt, Human
gacaggaagggucaggccca

SEQ ID NO: 894958 - RNA, 22 nt, Human
gagaugggaggagagaaaaggg

SEQ ID NO: 894959 - RNA, 24 nt, Human
gaguugggggggaggaggagaggg

SEQ ID NO: 894960 - RNA, 22 nt, Human
gcaauauauacagauaucacaa

SEQ ID NO: 894961 - RNA, 20 nt, Human
gcggcggcugcugcugcugc

SEQ ID NO: 894962 - RNA, 19 nt, Human
gcugcggcggcugcggcgg

SEQ ID NO: 894963 - RNA, 19 nt, Human
gcugcugcugcugcggcgg

SEQ ID NO: 894964 - RNA, 18 nt, Human
ggagagggaagaggagga

SEQ ID NO: 894965 - RNA, 24 nt, Human
gggaggaggagagggaagaggagg

SEQ ID NO: 894966 - RNA, 19 nt, Human
gggcuggggagggggcuuc

SEQ ID NO: 894967 - RNA, 21 nt, Human
gggcuucugagcccccuuccc

SEQ ID NO: 894968 - RNA, 19 nt, Human
ggggcggcggcugcugcug

SEQ ID NO: 894969 - RNA, 21 nt, Human
ggggggccuggggcggcggcu

SEQ ID NO: 894970 - RNA, 18 nt, Human
gggggggaggaggagagg

SEQ ID NO: 894971 - RNA, 20 nt, Human
gggggggccuggggcggcgg

SEQ ID NO: 894972 - RNA, 18 nt, Human
ucaggaguugggggggag

SEQ ID NO: 894973 - RNA, 18 nt, Human
ucaggcccagccaagcac

SEQ ID NO: 894974 - RNA, 21 nt, Human
ugcugcugcugcggcggcugc

SEQ ID NO: 894975 - RNA, 18 nt, Human
ugggaggagagaaaaggg

SEQ ID NO: 894976 - RNA, 21 nt, Human
ugggaggagagaaaagggugg

SEQ ID NO: 894977 - RNA, 20 nt, Human
ugggggggaggaggagaggg

SEQ ID NO: 894978 - RNA, 18 nt, Human
uuccgggcuggggagggg

SEQ ID NO: 894979 - RNA, 24 nt, Human
uugggggggaggaggagagggaag

SEQ ID NO: 894980 - RNA, 23 nt, Human
aagaauaacacaaagcuaugccu

SEQ ID NO: 894981 - RNA, 18 nt, Human
acaaagcuaugccuaccc

SEQ ID NO: 894982 - RNA, 23 nt, Human
acacaaagcuaugccuacccgac

SEQ ID NO: 894983 - RNA, 23 nt, Human
caacuggacccuaaacaaauuuc

SEQ ID NO: 894984 - RNA, 20 nt, Human
caagaaagccugauuuaaua

SEQ ID NO: 894985 - RNA, 18 nt, Human
caagaauaacacaaagcu

SEQ ID NO: 894986 - RNA, 24 nt, Human
caagaauaacacaaagcuaugccu

SEQ ID NO: 894987 - RNA, 18 nt, Human
cccagguucaaggaauuc

SEQ ID NO: 894988 - RNA, 22 nt, Human
cgaaauuuuccaagaauaacac

SEQ ID NO: 894989 - RNA, 22 nt, Human
cugaagcgccaacugagucuua

SEQ ID NO: 894990 - RNA, 21 nt, Human
cugagcaaagugcaaaggaga

SEQ ID NO: 894991 - RNA, 22 nt, Human
uaaaagauauuucuccaugccc

SEQ ID NO: 894992 - RNA, 22 nt, Human
uaacaaaaauacacaaaucaac

SEQ ID NO: 894993 - RNA, 24 nt, Human
uaacaaaaauacacaaaucaacug

SEQ ID NO: 894994 - RNA, 24 nt, Human
uacaacacgaauauuugcuucuga

SEQ ID NO: 894995 - RNA, 25 nt, Human
uccaagaauaacacaaagcuaugcc

SEQ ID NO: 894996 - RNA, 23 nt, Human
uccagucucgacgccgaaaaagc

SEQ ID NO: 894997 - RNA, 24 nt, Human
uuaaaugauaacaaaaauacacaa

SEQ ID NO: 894998 - RNA, 21 nt, Human
uucaagaaagccugauuuaau

SEQ ID NO: 894999 - RNA, 21 nt, Human
gaagagaagacacgcgcggca

SEQ ID NO: 895000 - RNA, 23 nt, Human
uuuuuuuuuuuuuuuuccacaag

SEQ ID NO: 895001 - RNA, 23 nt, Human
uuuuuuuuuuuuuuuuuuuucca

SEQ ID NO: 895002 - RNA, 29 nt, Human
uuuuuuuuuuuuuuuuuuuuccacaagaa

SEQ ID NO: 895003 - RNA, 24 nt, Human
uuuuuuuuuuuuuuuuuuuuuccu

SEQ ID NO: 895004 - RNA, 19 nt, Human
aaaacggcaggcaacuggu

SEQ ID NO: 895005 - RNA, 19 nt, Human
aaacagggcacauuguuua

SEQ ID NO: 895006 - RNA, 26 nt, Human
aaagaggggguggaauggggaccguc

SEQ ID NO: 895007 - RNA, 22 nt, Human
aacagaaacaaaaaccacccua

SEQ ID NO: 895008 - RNA, 21 nt, Human
aagaagacaaaacggcaggca

SEQ ID NO: 895009 - RNA, 26 nt, Human
aagaagacaaaacggcaggcaacugg

SEQ ID NO: 895010 - RNA, 22 nt, Human
aaggaauuaggaacagaaacaa

SEQ ID NO: 895011 - RNA, 22 nt, Human
aagucaggugaaagaaagaggg

SEQ ID NO: 895012 - RNA, 19 nt, Human
agaaauuaaguuuaagaac

SEQ ID NO: 895013 - RNA, 21 nt, Human
agaagaagacaaaacggcagg

SEQ ID NO: 895014 - RNA, 24 nt, Human
agaagaagacaaaacggcaggcaa

SEQ ID NO: 895015 - RNA, 23 nt, Human
aggaacagaaacaaaaaccaccc

SEQ ID NO: 895016 - RNA, 18 nt, Human
aggcaaaaaauaaacaua

SEQ ID NO: 895017 - RNA, 19 nt, Human
caaaacaacccaacacaca

SEQ ID NO: 895018 - RNA, 21 nt, Human
caaaacggcaggcaacugguc

SEQ ID NO: 895019 - RNA, 21 nt, Human
cagaaacaaaaaccacccuau

SEQ ID NO: 895020 - RNA, 24 nt, Human
cauaucaagaucuuuaugaagaaa

SEQ ID NO: 895021 - RNA, 23 nt, Human
ccaacacacaccuuagaagaaga

SEQ ID NO: 895022 - RNA, 23 nt, Human
cguggcgagagaagacgcugacc

SEQ ID NO: 895023 - RNA, 19 nt, Human
cuagucacaggccagaaau

SEQ ID NO: 895024 - RNA, 19 nt, Human
cuggccgggcccaggacgg

SEQ ID NO: 895025 - RNA, 20 nt, Human
gacaaaacggcaggcaacug

SEQ ID NO: 895026 - RNA, 23 nt, Human
gggguggaauggggaccgucgug

SEQ ID NO: 895027 - RNA, 21 nt, Human
uaggaacagaaacaaaaacca

SEQ ID NO: 895028 - RNA, 22 nt, Human
uaggaacagaaacaaaaaccac

SEQ ID NO: 895029 - RNA, 25 nt, Human
uaugaagaaaccccaaugguuguca

SEQ ID NO: 895030 - RNA, 22 nt, Human
ucaaagugcuagaauuaaaggu

SEQ ID NO: 895031 - RNA, 21 nt, Human
ucacaggccagaaauuaaguu

SEQ ID NO: 895032 - RNA, 21 nt, Human
ucaggugaaagaaagaggggg

SEQ ID NO: 895033 - RNA, 20 nt, Human
ucugacccucugaaggcaaa

SEQ ID NO: 895034 - RNA, 20 nt, Human
ucuuuaugaagaaaccccaa

SEQ ID NO: 895035 - RNA, 25 nt, Human
ugaaagaaagaggggguggaauggg

SEQ ID NO: 895036 - RNA, 21 nt, Human
ugcaaaggaaagcaaaacaac

SEQ ID NO: 895037 - RNA, 22 nt, Human
uggaauggggaccgucguggcg

SEQ ID NO: 895038 - RNA, 23 nt, Human
uggaauggggaccgucguggcga

SEQ ID NO: 895039 - RNA, 26 nt, Human
uggaauggggaccgucguggcgagag

SEQ ID NO: 895040 - RNA, 21 nt, Human
uucuagucacaggccagaaau

SEQ ID NO: 895041 - RNA, 19 nt, Human
uugaccacaagacugagua

SEQ ID NO: 895042 - RNA, 25 nt, Human
aaguauuggagcuggagaccaaacc

SEQ ID NO: 895043 - RNA, 23 nt, Human
acaggcagucucaugggaauggc

SEQ ID NO: 895044 - RNA, 19 nt, Human
accaaacccaacaccauuu

SEQ ID NO: 895045 - RNA, 20 nt, Human
agaaaaggccguggauggca

SEQ ID NO: 895046 - RNA, 20 nt, Human
agagcuguccaaaagcucgg

SEQ ID NO: 895047 - RNA, 22 nt, Human
agcggggagccaggccaggccu

SEQ ID NO: 895048 - RNA, 21 nt, Human
aggaggaggcacugcccaagg

SEQ ID NO: 895049 - RNA, 27 nt, Human
aggugacuuggaaacuggggacccacu

SEQ ID NO: 895050 - RNA, 24 nt, Human
aguggcugccgaccggccucccac

SEQ ID NO: 895051 - RNA, 18 nt, Human
auggagugugucuguucc

SEQ ID NO: 895052 - RNA, 21 nt, Human
cacaaggaagauccccauaac

SEQ ID NO: 895053 - RNA, 19 nt, Human
cacagcacagagccaggau

SEQ ID NO: 895054 - RNA, 27 nt, Human
cacccaggguaguggucaaccgggucg

SEQ ID NO: 895055 - RNA, 22 nt, Human
cacugcccaaggccuaggugac

SEQ ID NO: 895056 - RNA, 18 nt, Human
cagacuccuggguggccu

SEQ ID NO: 895057 - RNA, 19 nt, Human
cagaggagccaucaguggu

SEQ ID NO: 895058 - RNA, 20 nt, Human
cagaggagccaucaguggug

SEQ ID NO: 895059 - RNA, 19 nt, Human
caggaggggcuaauccaug

SEQ ID NO: 895060 - RNA, 23 nt, Human
caggcccgaggugaagaugggag

SEQ ID NO: 895061 - RNA, 24 nt, Human
ccaaacccaacaccauuuuccagg

SEQ ID NO: 895062 - RNA, 22 nt, Human
ccagcccagccccaagagcucc

SEQ ID NO: 895063 - RNA, 22 nt, Human
ccaggccucaggaacagccaag

SEQ ID NO: 895064 - RNA, 19 nt, Human
ccccaagagcucccagccu

SEQ ID NO: 895065 - RNA, 21 nt, Human
ccccaagagcucccagccuuc

SEQ ID NO: 895066 - RNA, 22 nt, Human
ccccauaacccuuugguucagg

SEQ ID NO: 895067 - RNA, 18 nt, Human
ccgaccggccucccacag

SEQ ID NO: 895068 - RNA, 20 nt, Human
ccgaggugaagaugggagga

SEQ ID NO: 895069 - RNA, 20 nt, Human
ccugccaacuuccagaccca

SEQ ID NO: 895070 - RNA, 18 nt, Human
ccugggcccuucucuugc

SEQ ID NO: 895071 - RNA, 24 nt, Human
cuccagugacaggcagucucaugg

SEQ ID NO: 895072 - RNA, 21 nt, Human
cucccagccuucagacuccug

SEQ ID NO: 895073 - RNA, 22 nt, Human
cucccagccuucagacuccugg

SEQ ID NO: 895074 - RNA, 18 nt, Human
cuuccagacccaggccca

SEQ ID NO: 895075 - RNA, 21 nt, Human
gaagaugggaggaccagccca

SEQ ID NO: 895076 - RNA, 22 nt, Human
gagccaggccaggccucaggaa

SEQ ID NO: 895077 - RNA, 19 nt, Human
gaggagccaucaguggugc

SEQ ID NO: 895078 - RNA, 18 nt, Human
gcagaccugcaggugcgc

SEQ ID NO: 895079 - RNA, 21 nt, Human
gccuucagacuccuggguggc

SEQ ID NO: 895080 - RNA, 19 nt, Human
gcugccgaccggccuccca

SEQ ID NO: 895081 - RNA, 21 nt, Human
ggccauagagccuagacaggg

SEQ ID NO: 895082 - RNA, 23 nt, Human
ggccauagagccuagacagggcc

SEQ ID NO: 895083 - RNA, 21 nt, Human
gggaguggcugccgaccggcc

SEQ ID NO: 895084 - RNA, 24 nt, Human
ggguaguggucauugucuguguuc

SEQ ID NO: 895085 - RNA, 20 nt, Human
gguugggcugguuugaggcc

SEQ ID NO: 895086 - RNA, 24 nt, Human
uaagacuuucgagagaggaacuga

SEQ ID NO: 895087 - RNA, 21 nt, Human
uagacagggccucuggcugua

SEQ ID NO: 895088 - RNA, 18 nt, Human
ucaguggugcugccugga

SEQ ID NO: 895089 - RNA, 19 nt, Human
ucaguggugcugccuggau

SEQ ID NO: 895090 - RNA, 27 nt, Human
ucaguggugcugccugggcggcuuacc

SEQ ID NO: 895091 - RNA, 18 nt, Human
uccccauaacccuuuggu

SEQ ID NO: 895092 - RNA, 18 nt, Human
uccuggguggccuugacu

SEQ ID NO: 895093 - RNA, 21 nt, Human
uccuggguggccuugacuggc

SEQ ID NO: 895094 - RNA, 23 nt, Human
ugaccaaggugcuuaugagagca

SEQ ID NO: 895095 - RNA, 18 nt, Human
ugagugugggacaaacau

SEQ ID NO: 895096 - RNA, 19 nt, Human
ugcccaaggccuaggugac

SEQ ID NO: 895097 - RNA, 19 nt, Human
ugccgaccggccucccaca

SEQ ID NO: 895098 - RNA, 20 nt, Human
ugccuggauaccucaagagc

SEQ ID NO: 895099 - RNA, 22 nt, Human
uggauggcagaccugcaggugc

SEQ ID NO: 895100 - RNA, 19 nt, Human
uggcucuuggccugagccu

SEQ ID NO: 895101 - RNA, 22 nt, Human
ugggaaggggucagcggggagc

SEQ ID NO: 895102 - RNA, 18 nt, Human
ugggaggaccagcccagc

SEQ ID NO: 895103 - RNA, 18 nt, Human
ugugggacaaacauggag

SEQ ID NO: 895104 - RNA, 28 nt, Human
uuccugggccuuaugagagcauccuucc

SEQ ID NO: 895105 - RNA, 24 nt, Human
uucucuugccagaaaaggccgugg

SEQ ID NO: 895106 - RNA, 27 nt, Human
uuuuuuuuuuuuuuuuuuuuucugggg

SEQ ID NO: 895107 - RNA, 24 nt, Human
aaaaggcuuaaccugugauaaucc

SEQ ID NO: 895108 - RNA, 21 nt, Human
aagugccucugcuucuaguuu

SEQ ID NO: 895109 - RNA, 18 nt, Human
acauuuuauauucuuugu

SEQ ID NO: 895110 - RNA, 25 nt, Human
caacaccuucugaaaaaagaguaac

SEQ ID NO: 895111 - RNA, 18 nt, Human
cacccaccucacacccug

SEQ ID NO: 895112 - RNA, 18 nt, Human
cagcagcauaagccccag

SEQ ID NO: 895113 - RNA, 22 nt, Human
ccacaccugacacaggucccca

SEQ ID NO: 895114 - RNA, 21 nt, Human
ccaggccaggcgacaacccuu

SEQ ID NO: 895115 - RNA, 26 nt, Human
ccaguuuccacuauggugucuccuca

SEQ ID NO: 895116 - RNA, 26 nt, Human
ccugcaggucaaaaccuggaagaggc

SEQ ID NO: 895117 - RNA, 24 nt, Human
ccugugauaaucccaacaccuucu

SEQ ID NO: 895118 - RNA, 26 nt, Human
cucagccucagucuccccuucuuagc

SEQ ID NO: 895119 - RNA, 23 nt, Human
cugccugcaggucaaaaccugga

SEQ ID NO: 895120 - RNA, 24 nt, Human
cuggaggcagcagcauaagccccu

SEQ ID NO: 895121 - RNA, 22 nt, Human
gacacagguccccacccaccuc

SEQ ID NO: 895122 - RNA, 19 nt, Human
gcagaaauggcuauccaca

SEQ ID NO: 895123 - RNA, 19 nt, Human
gcccgauguuccccagccu

SEQ ID NO: 895124 - RNA, 23 nt, Human
gcccgauguuccccagccucagc

SEQ ID NO: 895125 - RNA, 22 nt, Human
gccucagccucagucuccccuu

SEQ ID NO: 895126 - RNA, 20 nt, Human
ggccaggcgacaacccuuca

SEQ ID NO: 895127 - RNA, 20 nt, Human
gggccauggguaggggcggg

SEQ ID NO: 895128 - RNA, 22 nt, Human
guucagaagcugugaugguccu

SEQ ID NO: 895129 - RNA, 18 nt, Human
uaacaguacacagauugu

SEQ ID NO: 895130 - RNA, 24 nt, Human
ucagaagcugugaugguccuguua

SEQ ID NO: 895131 - RNA, 18 nt, Human
ucaggugcagacggggaa

SEQ ID NO: 895132 - RNA, 21 nt, Human
ucaguucagaagcugugaugg

SEQ ID NO: 895133 - RNA, 18 nt, Human
uccacaccugacacaggu

SEQ ID NO: 895134 - RNA, 21 nt, Human
uccccacccaccucacacccu

SEQ ID NO: 895135 - RNA, 21 nt, Human
ugaaaaaagaguaacagucau

SEQ ID NO: 895136 - RNA, 21 nt, Human
ugugaugguccuguuagagag

SEQ ID NO: 895137 - RNA, 25 nt, Human
uguuagagagcacugccugcagguc

SEQ ID NO: 895138 - RNA, 18 nt, Human
uuccccagccucagccuc

SEQ ID NO: 895139 - RNA, 19 nt, Human
uuccccagccucagccuca

SEQ ID NO: 895140 - RNA, 22 nt, Human
uugagcagaaauggcuauccac

SEQ ID NO: 895141 - RNA, 23 nt, Human
uuuuuuuuuuuuuuuuuuaacag

SEQ ID NO: 895142 - RNA, 22 nt, Human
aaaaugaacaagaauucacgaa

SEQ ID NO: 895143 - RNA, 25 nt, Human
aacuugucauugccuuucauucuuc

SEQ ID NO: 895144 - RNA, 22 nt, Human
aagccccagcccccaaaagagc

SEQ ID NO: 895145 - RNA, 23 nt, Human
aaggaaaccacguugaaccaaca

SEQ ID NO: 895146 - RNA, 23 nt, Human
aaucacggguaaggccaccuggu

SEQ ID NO: 895147 - RNA, 19 nt, Human
acggguaaggccaccuggg

SEQ ID NO: 895148 - RNA, 24 nt, Human
agcccccaaaagagcaugucucag

SEQ ID NO: 895149 - RNA, 18 nt, Human
agcuaaagccccagcccc

SEQ ID NO: 895150 - RNA, 22 nt, Human
aggagggaguuuggggaaugga

SEQ ID NO: 895151 - RNA, 22 nt, Human
agggaggagggaguuuggggaa

SEQ ID NO: 895152 - RNA, 24 nt, Human
auauuggagccccucucccuacca

SEQ ID NO: 895153 - RNA, 19 nt, Human
caaaauagucaaccaaggc

SEQ ID NO: 895154 - RNA, 23 nt, Human
caaguacaaggaaaccacguuga

SEQ ID NO: 895155 - RNA, 22 nt, Human
cagacccugggcuuuuccuccu

SEQ ID NO: 895156 - RNA, 28 nt, Human
cagacuccccaccaaauaauacuucucc

SEQ ID NO: 895157 - RNA, 24 nt, Human
cagagaugcuacagccucagccac

SEQ ID NO: 895158 - RNA, 22 nt, Human
cagccacagccccuuuaagcau

SEQ ID NO: 895159 - RNA, 19 nt, Human
caucaccacuuggcuggga

SEQ ID NO: 895160 - RNA, 19 nt, Human
ccagcagagaugcuacagc

SEQ ID NO: 895161 - RNA, 24 nt, Human
ccaguggcaugugagcccccgggg

SEQ ID NO: 895162 - RNA, 21 nt, Human
ccccaccaaauaauacuucuc

SEQ ID NO: 895163 - RNA, 24 nt, Human
ccccagcccccaaaagagcauguc

SEQ ID NO: 895164 - RNA, 21 nt, Human
cccugggcuuuuccuccuggg

SEQ ID NO: 895165 - RNA, 19 nt, Human
ccucuuagggcgagggagc

SEQ ID NO: 895166 - RNA, 22 nt, Human
cuagcuaaagccccagccccca

SEQ ID NO: 895167 - RNA, 22 nt, Human
cucagccacagccccuuuaagc

SEQ ID NO: 895168 - RNA, 21 nt, Human
cuggcaccuuuaauucauggu

SEQ ID NO: 895169 - RNA, 24 nt, Human
cuggcaccuuuaauucauggugcu

SEQ ID NO: 895170 - RNA, 21 nt, Human
cugguaaucuccauacucagu

SEQ ID NO: 895171 - RNA, 19 nt, Human
cuucugcugaguuucuaca

SEQ ID NO: 895172 - RNA, 21 nt, Human
gacuugcuauuacuggaccuu

SEQ ID NO: 895173 - RNA, 20 nt, Human
gagcauucgaggucaaauca

SEQ ID NO: 895174 - RNA, 18 nt, Human
gcaaagcccuguccaggg

SEQ ID NO: 895175 - RNA, 21 nt, Human
ggacagauaauacaagccagg

SEQ ID NO: 895176 - RNA, 24 nt, Human
ggccucugcccuggacagcagccu

SEQ ID NO: 895177 - RNA, 22 nt, Human
ggccugugcuucuagcccugug

SEQ ID NO: 895178 - RNA, 19 nt, Human
gggaaacaugaugcgaugg

SEQ ID NO: 895179 - RNA, 19 nt, Human
ggguaaggccaccugggga

SEQ ID NO: 895180 - RNA, 18 nt, Human
gguuuucuaccaugagcu

SEQ ID NO: 895181 - RNA, 20 nt, Human
gucccuguggacacucaggc

SEQ ID NO: 895182 - RNA, 21 nt, Human
gugaccuuaaaccuggcagaa

SEQ ID NO: 895183 - RNA, 21 nt, Human
guggaagcuaaaaaaaaaaac

SEQ ID NO: 895184 - RNA, 25 nt, Human
gugugaagguggaugagcaaaagag

SEQ ID NO: 895185 - RNA, 21 nt, Human
uaaaccuggcagaacuccuga

SEQ ID NO: 895186 - RNA, 21 nt, Human
uaaagccccagcccccaaaag

SEQ ID NO: 895187 - RNA, 23 nt, Human
uaauagcucuggaauuuuccaga

SEQ ID NO: 895188 - RNA, 23 nt, Human
uaaucuccauacucagucaucuc

SEQ ID NO: 895189 - RNA, 20 nt, Human
uaauucauggugcuucccuc

SEQ ID NO: 895190 - RNA, 21 nt, Human
uacaaggaaaccacguugaac

SEQ ID NO: 895191 - RNA, 23 nt, Human
uacagccucagccacagccccuu

SEQ ID NO: 895192 - RNA, 18 nt, Human
ucauuuccagacugucgg

SEQ ID NO: 895193 - RNA, 23 nt, Human
uccauacucagucaucucaggaa

SEQ ID NO: 895194 - RNA, 21 nt, Human
ucccuugguaaggaguaaaua

SEQ ID NO: 895195 - RNA, 21 nt, Human
ucuccauacucagucaucuca

SEQ ID NO: 895196 - RNA, 24 nt, Human
ugaagaggcuuccuuuuggacaga

SEQ ID NO: 895197 - RNA, 21 nt, Human
ugacugcaggaaugcaaaaug

SEQ ID NO: 895198 - RNA, 19 nt, Human
ugagcaaaagagaggaaga

SEQ ID NO: 895199 - RNA, 22 nt, Human
ugagcaaaagagaggaagagcc

SEQ ID NO: 895200 - RNA, 21 nt, Human
ugcaggugaccuuaaaccugg

SEQ ID NO: 895201 - RNA, 23 nt, Human
ugcccuggacagcagccuguccu

SEQ ID NO: 895202 - RNA, 25 nt, Human
ugcccuggacagcagccuguccucc

SEQ ID NO: 895203 - RNA, 22 nt, Human
ugccgaguaagaaucacgggua

SEQ ID NO: 895204 - RNA, 24 nt, Human
ugccugguaaucuccauacucagu

SEQ ID NO: 895205 - RNA, 24 nt, Human
ugcuuuuauucacaccucugucau

SEQ ID NO: 895206 - RNA, 18 nt, Human
uggagcucuggcaccuuu

SEQ ID NO: 895207 - RNA, 19 nt, Human
ugggaaacaugaugcgaug

SEQ ID NO: 895208 - RNA, 18 nt, Human
ugucucaggaacucauua

SEQ ID NO: 895209 - RNA, 24 nt, Human
uguuuuuaccagcuucugcugagu

SEQ ID NO: 895210 - RNA, 25 nt, Human
uucaggaggaucaaguacaaggaaa

SEQ ID NO: 895211 - RNA, 23 nt, Human
uuccuuuuggacagauaauacaa

SEQ ID NO: 895212 - RNA, 21 nt, Human
uucuucuagcuaaagccccag

SEQ ID NO: 895213 - RNA, 19 nt, Human
uuuauuggcacugucaaca

SEQ ID NO: 895214 - RNA, 18 nt, Human
uuucugguugugcccugg

SEQ ID NO: 895215 - RNA, 21 nt, Human
aaguaacaaacagaaacaagc

SEQ ID NO: 895216 - RNA, 24 nt, Human
aaguaacaaacagaaacaagcccc

SEQ ID NO: 895217 - RNA, 20 nt, Human
acagggcaccaggcaggcag

SEQ ID NO: 895218 - RNA, 21 nt, Human
accccggggugcagaaggccc

SEQ ID NO: 895219 - RNA, 20 nt, Human
acccggggcugcagcuuccc

SEQ ID NO: 895220 - RNA, 22 nt, Human
accucaagugaauucugagagg

SEQ ID NO: 895221 - RNA, 22 nt, Human
acgcaggugcccugcacaggac

SEQ ID NO: 895222 - RNA, 20 nt, Human
agcagcagcaggggccggcu

SEQ ID NO: 895223 - RNA, 23 nt, Human
aggcaggaggccucaccccgggg

SEQ ID NO: 895224 - RNA, 21 nt, Human
aggccccagggguagcaguuu

SEQ ID NO: 895225 - RNA, 24 nt, Human
agguccccugcagcaagucagcuc

SEQ ID NO: 895226 - RNA, 23 nt, Human
agguggugcagcugcccgagcag

SEQ ID NO: 895227 - RNA, 20 nt, Human
caaacccuaagcugucuccu

SEQ ID NO: 895228 - RNA, 23 nt, Human
cacaggaccuggggcugggacag

SEQ ID NO: 895229 - RNA, 24 nt, Human
cacaggaccuggggcugggacagg

SEQ ID NO: 895230 - RNA, 20 nt, Human
caccaaacccuaagcugucu

SEQ ID NO: 895231 - RNA, 21 nt, Human
caccaaacccuaagcugucuc

SEQ ID NO: 895232 - RNA, 18 nt, Human
cacccugcagggcagggc

SEQ ID NO: 895233 - RNA, 24 nt, Human
cagaaacaagccccagcgcuuccc

SEQ ID NO: 895234 - RNA, 23 nt, Human
cagaaagacaaaccaaaacccau

SEQ ID NO: 895235 - RNA, 20 nt, Human
cagcagcaggggccggcucu

SEQ ID NO: 895236 - RNA, 21 nt, Human
cagcagcaggggccggcucug

SEQ ID NO: 895237 - RNA, 21 nt, Human
cagcagcaggggccggcucug

SEQ ID NO: 895238 - RNA, 21 nt, Human
cagggcacgcggugcaggugg

SEQ ID NO: 895239 - RNA, 22 nt, Human
cagguccccugcagcaagucag

SEQ ID NO: 895240 - RNA, 18 nt, Human
ccagagcuccucggugac

SEQ ID NO: 895241 - RNA, 21 nt, Human
ccccacguucgccaucuuccu

SEQ ID NO: 895242 - RNA, 18 nt, Human
ccccggcuggaguaagag

SEQ ID NO: 895243 - RNA, 20 nt, Human
ccccugcagcaagucagcuc

SEQ ID NO: 895244 - RNA, 23 nt, Human
cccggcccggcccgccgcucggc

SEQ ID NO: 895245 - RNA, 20 nt, Human
ccgcgcucgccuggaacugc

SEQ ID NO: 895246 - RNA, 21 nt, Human
ccggcccgccgcucggccccc

SEQ ID NO: 895247 - RNA, 19 nt, Human
ccuaagcugucuccuaaaa

SEQ ID NO: 895248 - RNA, 24 nt, Human
ccuggaacugcagccccacguucg

SEQ ID NO: 895249 - RNA, 18 nt, Human
ccuggggcugggacaggg

SEQ ID NO: 895250 - RNA, 26 nt, Human
ccuggggcugggacagggcaccaggc

SEQ ID NO: 895251 - RNA, 23 nt, Human
cgcaggugcccugcacaggaccu

SEQ ID NO: 895252 - RNA, 21 nt, Human
cgccccggcccugcccggccc

SEQ ID NO: 895253 - RNA, 20 nt, Human
cggcccggcccgccgcucgg

SEQ ID NO: 895254 - RNA, 21 nt, Human
cggcucacccugcagggcagg

SEQ ID NO: 895255 - RNA, 20 nt, Human
cuaaaacuucagcuguuucc

SEQ ID NO: 895256 - RNA, 25 nt, Human
cuaaaacuucagcuguuuccaccac

SEQ ID NO: 895257 - RNA, 19 nt, Human
cugacgaccagaaagacaa

SEQ ID NO: 895258 - RNA, 19 nt, Human
cugacgaccagaaagacaa

SEQ ID NO: 895259 - RNA, 20 nt, Human
gacccggggcugcagcuucc

SEQ ID NO: 895260 - RNA, 21 nt, Human
gaccuggggcugggacagggc

SEQ ID NO: 895261 - RNA, 18 nt, Human
gagcagcagcaggggccg

SEQ ID NO: 895262 - RNA, 22 nt, Human
gcaggugcccugcacaggaccu

SEQ ID NO: 895263 - RNA, 19 nt, Human
gccggcccacgccccggcc

SEQ ID NO: 895264 - RNA, 22 nt, Human
gcggugcagguggugcagcugc

SEQ ID NO: 895265 - RNA, 20 nt, Human
gcuguugugccggcucaccc

SEQ ID NO: 895266 - RNA, 23 nt, Human
ggaccuggggcugggacagggca

SEQ ID NO: 895267 - RNA, 24 nt, Human
ggaugcgcuggcagccccggcugg

SEQ ID NO: 895268 - RNA, 26 nt, Human
ggccgaggggcuguuguugccacugg

SEQ ID NO: 895269 - RNA, 26 nt, Human
gggcacgcggugcagguggugcagcu

SEQ ID NO: 895270 - RNA, 20 nt, Human
gggcugggcuggcuggaugc

SEQ ID NO: 895271 - RNA, 24 nt, Human
ggugcccugcacaggaccuggggc

SEQ ID NO: 895272 - RNA, 23 nt, Human
guugggguugagcgugcucaggg

SEQ ID NO: 895273 - RNA, 18 nt, Human
uaaaacuucagcuguuuc

SEQ ID NO: 895274 - RNA, 21 nt, Human
uaacaaacagaaacaagcccc

SEQ ID NO: 895275 - RNA, 23 nt, Human
uaacaaacagaaacaagccccag

SEQ ID NO: 895276 - RNA, 19 nt, Human
uaagagccuggcugucagc

SEQ ID NO: 895277 - RNA, 22 nt, Human
uacagaagaugucucaguccug

SEQ ID NO: 895278 - RNA, 23 nt, Human
uagcaguuuacagaagaugucuc

SEQ ID NO: 895279 - RNA, 22 nt, Human
ucacagggcugggcuggcugga

SEQ ID NO: 895280 - RNA, 21 nt, Human
ucagcuccaucuuucacaggg

SEQ ID NO: 895281 - RNA, 18 nt, Human
ucaguccuguaaguaaca

SEQ ID NO: 895282 - RNA, 21 nt, Human
uccaccaccacgcugacgacc

SEQ ID NO: 895283 - RNA, 25 nt, Human
uccaccaccacgcugacgacccuag

SEQ ID NO: 895284 - RNA, 19 nt, Human
uccccugcagcaagucagc

SEQ ID NO: 895285 - RNA, 22 nt, Human
ucccgguccccuccccguggcc

SEQ ID NO: 895286 - RNA, 18 nt, Human
ugaagugggcggccgagg

SEQ ID NO: 895287 - RNA, 19 nt, Human
ugacuguauuuaauugaac

SEQ ID NO: 895288 - RNA, 19 nt, Human
ugagcgugcucagggcagc

SEQ ID NO: 895289 - RNA, 23 nt, Human
ugcagcaagucagcuccaucuuu

SEQ ID NO: 895290 - RNA, 21 nt, Human
ugcccgagcagcagcaggggc

SEQ ID NO: 895291 - RNA, 22 nt, Human
ugcccuauaaaucagguccccu

SEQ ID NO: 895292 - RNA, 24 nt, Human
ugccggcccacgccccggcccugc

SEQ ID NO: 895293 - RNA, 19 nt, Human
ugcucagggcagccugccc

SEQ ID NO: 895294 - RNA, 21 nt, Human
uggaguaagagccuggcuguc

SEQ ID NO: 895295 - RNA, 18 nt, Human
uggcagccccggcuggag

SEQ ID NO: 895296 - RNA, 19 nt, Human
uucgccaucuuccugccgg

SEQ ID NO: 895297 - RNA, 18 nt, Human
uuugagggggcgguguga

SEQ ID NO: 895298 - RNA, 20 nt, Human
uuuuuuuuuuuugagggggc

SEQ ID NO: 895299 - RNA, 19 nt, Human
uuuuuuuuuuuuugagggg

SEQ ID NO: 895300 - RNA, 22 nt, Human
uuuuuuuuuuuuuuuuugaggg

SEQ ID NO: 895301 - RNA, 19 nt, Human
aacauugacacuuuugggu

SEQ ID NO: 895302 - RNA, 20 nt, Human
acccccagccucacaguagc

SEQ ID NO: 895303 - RNA, 20 nt, Human
accugcuguucccccacccc

SEQ ID NO: 895304 - RNA, 22 nt, Human
cacccccagccucacaguagcc

SEQ ID NO: 895305 - RNA, 23 nt, Human
cacccccagccucacaguagccu

SEQ ID NO: 895306 - RNA, 21 nt, Human
caccuacccuccuacagccac

SEQ ID NO: 895307 - RNA, 19 nt, Human
cccacccccagccucacag

SEQ ID NO: 895308 - RNA, 23 nt, Human
cccacccccagccucacaguagc

SEQ ID NO: 895309 - RNA, 18 nt, Human
cccauggcgcccccagga

SEQ ID NO: 895310 - RNA, 21 nt, Human
ccuccuacagccaccccaacc

SEQ ID NO: 895311 - RNA, 26 nt, Human
cucccauggcgcccccaggacuucau

SEQ ID NO: 895312 - RNA, 19 nt, Human
cugcuguucccccaccccc

SEQ ID NO: 895313 - RNA, 23 nt, Human
uacccuccuacagccaccccaac

SEQ ID NO: 895314 - RNA, 20 nt, Human
uaggggaaucuagagcaggc

SEQ ID NO: 895315 - RNA, 20 nt, Human
ucccccacccccagccucac

SEQ ID NO: 895316 - RNA, 19 nt, Human
ccgcuaaggggcacccagg

SEQ ID NO: 895317 - RNA, 22 nt, Human
ccgcuaaggggcacccagguac

SEQ ID NO: 895318 - RNA, 24 nt, Human
gaagugcaaagccacaaaaagcaa

SEQ ID NO: 895319 - RNA, 21 nt, Human
gcgcggcaaagaaaaggaagc

SEQ ID NO: 895320 - RNA, 21 nt, Human
ggcaaagaaaaggaagcauca

SEQ ID NO: 895321 - RNA, 20 nt, Human
uagaguuaggauuaucacac

SEQ ID NO: 895322 - RNA, 22 nt, Human
uaguagaguuaggauuaucaca

SEQ ID NO: 895323 - RNA, 19 nt, Human
ucaccauuacuuggcucca

SEQ ID NO: 895324 - RNA, 23 nt, Human
ucaguaucaccauuacuuggcuc

SEQ ID NO: 895325 - RNA, 19 nt, Human
ucucuagaaauauauuuau

SEQ ID NO: 895326 - RNA, 18 nt, Human
ugcaaagccacaaaaagc

SEQ ID NO: 895327 - RNA, 18 nt, Human
ugcaaagccacaaaaagc

SEQ ID NO: 895328 - RNA, 23 nt, Human
uuaauuuuuuugccagagagggc

SEQ ID NO: 895329 - RNA, 23 nt, Human
uuuuuuuuuuuuuuuuuuaacug

SEQ ID NO: 895330 - RNA, 22 nt, Human
aaaaacaaaaagguaacaaaac

SEQ ID NO: 895331 - RNA, 19 nt, Human
aaaaagguaacaaaaccau

SEQ ID NO: 895332 - RNA, 21 nt, Human
aaaaggcaggcaaaagguaca

SEQ ID NO: 895333 - RNA, 23 nt, Human
aaacaauaacagaaacacaucaa

SEQ ID NO: 895334 - RNA, 22 nt, Human
aaagagaggaggaaagaggagg

SEQ ID NO: 895335 - RNA, 24 nt, Human
aaagugcugggauuacaggcguga

SEQ ID NO: 895336 - RNA, 19 nt, Human
aacaaaaaggcaggcaaaa

SEQ ID NO: 895337 - RNA, 18 nt, Human
aacagaaacacaucaagc

SEQ ID NO: 895338 - RNA, 19 nt, Human
aacauggagggggaagaac

SEQ ID NO: 895339 - RNA, 22 nt, Human
aacccaugacuggcugcauccc

SEQ ID NO: 895340 - RNA, 18 nt, Human
aaccuugcccuggacucu

SEQ ID NO: 895341 - RNA, 22 nt, Human
aagcaagaguuggagaagcagc

SEQ ID NO: 895342 - RNA, 18 nt, Human
aagcaggaucugggcgcg

SEQ ID NO: 895343 - RNA, 21 nt, Human
aagcgagggccucagcucacg

SEQ ID NO: 895344 - RNA, 19 nt, Human
aagcgcccagggaucauaa

SEQ ID NO: 895345 - RNA, 19 nt, Human
aagggcugaagcucuggcc

SEQ ID NO: 895346 - RNA, 19 nt, Human
aaggggucggaacacgucu

SEQ ID NO: 895347 - RNA, 28 nt, Human
aaguccccaaaguggcaggcaagggagg

SEQ ID NO: 895348 - RNA, 24 nt, Human
aagugaucugccugucucagccuc

SEQ ID NO: 895349 - RNA, 19 nt, Human
aagugcugggauuacaggc

SEQ ID NO: 895350 - RNA, 19 nt, Human
aagugcugggauuacaggc

SEQ ID NO: 895351 - RNA, 21 nt, Human
aagugguggcaaggggauugg

SEQ ID NO: 895352 - RNA, 21 nt, Human
aauaacagaaacacaucaagc

SEQ ID NO: 895353 - RNA, 22 nt, Human
aauccuacccuacugggggugc

SEQ ID NO: 895354 - RNA, 18 nt, Human
aauuucccuccccuuccc

SEQ ID NO: 895355 - RNA, 26 nt, Human
acaaaacagggagaggagaaaggggc

SEQ ID NO: 895356 - RNA, 21 nt, Human
acaauaacagaaacacaucaa

SEQ ID NO: 895357 - RNA, 24 nt, Human
acaauccuacccuacugggggugc

SEQ ID NO: 895358 - RNA, 25 nt, Human
acacacacacacacacgcacacaca

SEQ ID NO: 895359 - RNA, 23 nt, Human
acacacauacacacacacacaca

SEQ ID NO: 895360 - RNA, 22 nt, Human
acacauucccugaagcagcuga

SEQ ID NO: 895361 - RNA, 23 nt, Human
accucagcucuccauucugccga

SEQ ID NO: 895362 - RNA, 19 nt, Human
acgcacacacacgcacaca

SEQ ID NO: 895363 - RNA, 19 nt, Human
acucagguggggacagggg

SEQ ID NO: 895364 - RNA, 20 nt, Human
acugcaaccuccaccuccuc

SEQ ID NO: 895365 - RNA, 21 nt, Human
acugcagcccuuuggccuccu

SEQ ID NO: 895366 - RNA, 21 nt, Human
acugcuucaugcuucucccca

SEQ ID NO: 895367 - RNA, 19 nt, Human
agacacuugacccagcacu

SEQ ID NO: 895368 - RNA, 18 nt, Human
agagaggaggaaagagga

SEQ ID NO: 895369 - RNA, 21 nt, Human
agagaggaggaaagaggagga

SEQ ID NO: 895370 - RNA, 19 nt, Human
agagcccuuccuguccaaa

SEQ ID NO: 895371 - RNA, 23 nt, Human
agaggucucaucuucacugugac

SEQ ID NO: 895372 - RNA, 30 nt, Human
agcagaagauaggaaaagcgggacccaaaa

SEQ ID NO: 895373 - RNA, 21 nt, Human
agccagggagcaugcagcugc

SEQ ID NO: 895374 - RNA, 18 nt, Human
agccccccggccugcagc

SEQ ID NO: 895375 - RNA, 20 nt, Human
agccccuggacguaaccccc

SEQ ID NO: 895376 - RNA, 19 nt, Human
agcuggguggccuugaggg

SEQ ID NO: 895377 - RNA, 18 nt, Human
aggaaagaggaggaagag

SEQ ID NO: 895378 - RNA, 19 nt, Human
aggaaagaggaggaagagg

SEQ ID NO: 895379 - RNA, 27 nt, Human
aggaagagggaggcauggguggggggg

SEQ ID NO: 895380 - RNA, 28 nt, Human
aggaagagggaggcaugggugggggggg

SEQ ID NO: 895381 - RNA, 20 nt, Human
aggagcagcucaggauguga

SEQ ID NO: 895382 - RNA, 21 nt, Human
aggaggaaagaggaggaagag

SEQ ID NO: 895383 - RNA, 22 nt, Human
aggaggaagagggaggcauggg

SEQ ID NO: 895384 - RNA, 18 nt, Human
aggaggggggacucagug

SEQ ID NO: 895385 - RNA, 24 nt, Human
aggaggggggacucagugcugggg

SEQ ID NO: 895386 - RNA, 23 nt, Human
aggcaacauggagggggaagaac

SEQ ID NO: 895387 - RNA, 19 nt, Human
aggcaggcaaaagguacag

SEQ ID NO: 895388 - RNA, 19 nt, Human
aggcaugcaccaccuaacc

SEQ ID NO: 895389 - RNA, 23 nt, Human
aggcgugagccaccgugcccggc

SEQ ID NO: 895390 - RNA, 26 nt, Human
agggacaccucagcucuccauucugc

SEQ ID NO: 895391 - RNA, 18 nt, Human
agggagcugguuuuuuac

SEQ ID NO: 895392 - RNA, 20 nt, Human
aggggacacacucgcagggc

SEQ ID NO: 895393 - RNA, 21 nt, Human
aggggcagcagaagauaggaa

SEQ ID NO: 895394 - RNA, 22 nt, Human
agggggaagaacacugaagagg

SEQ ID NO: 895395 - RNA, 23 nt, Human
agggggaagaacacugaagaggg

SEQ ID NO: 895396 - RNA, 21 nt, Human
aggggggacucagugcugggg

SEQ ID NO: 895397 - RNA, 21 nt, Human
aggggucggaacacgucugga

SEQ ID NO: 895398 - RNA, 23 nt, Human
agggugcugggacacacaaagga

SEQ ID NO: 895399 - RNA, 23 nt, Human
aggugacuagcaggggagggaca

SEQ ID NO: 895400 - RNA, 18 nt, Human
agguguggguacagguga

SEQ ID NO: 895401 - RNA, 19 nt, Human
aguagcugggacuacaggc

SEQ ID NO: 895402 - RNA, 21 nt, Human
aguagcugggacuacaggcau

SEQ ID NO: 895403 - RNA, 23 nt, Human
aguagcugggacuacaggcaugc

SEQ ID NO: 895404 - RNA, 24 nt, Human
agugaucugccugucucagccucc

SEQ ID NO: 895405 - RNA, 20 nt, Human
agugcaauggcgugaucucg

SEQ ID NO: 895406 - RNA, 24 nt, Human
agugcaauggcgugaucucggcuc

SEQ ID NO: 895407 - RNA, 18 nt, Human
agugcugggauuacaggc

SEQ ID NO: 895408 - RNA, 24 nt, Human
aguuuuguauuuuuagugaagaug

SEQ ID NO: 895409 - RNA, 25 nt, Human
auagggaacaaaaaggcaggcaaaa

SEQ ID NO: 895410 - RNA, 22 nt, Human
aucacacacacauacacacaca

SEQ ID NO: 895411 - RNA, 20 nt, Human
auccaaagggagcugguuuu

SEQ ID NO: 895412 - RNA, 19 nt, Human
aucuggagagcaaaugacc

SEQ ID NO: 895413 - RNA, 24 nt, Human
augacacagaucacacacacauac

SEQ ID NO: 895414 - RNA, 18 nt, Human
augggcagggaggguggg

SEQ ID NO: 895415 - RNA, 18 nt, Human
augggguuucaccacguu

SEQ ID NO: 895416 - RNA, 20 nt, Human
augggguuucaccacguugg

SEQ ID NO: 895417 - RNA, 24 nt, Human
augggguuucaccacguuggccag

SEQ ID NO: 895418 - RNA, 19 nt, Human
augucacagugucagacaa

SEQ ID NO: 895419 - RNA, 23 nt, Human
caaaaacaaaaagguaacaaaac

SEQ ID NO: 895420 - RNA, 21 nt, Human
caaaaaggcaggcaaaaggua

SEQ ID NO: 895421 - RNA, 18 nt, Human
caagcaagaguuggagaa

SEQ ID NO: 895422 - RNA, 22 nt, Human
caagugaucugccugucucagc

SEQ ID NO: 895423 - RNA, 22 nt, Human
caauaacagaaacacaucaagc

SEQ ID NO: 895424 - RNA, 22 nt, Human
cacacacauacacacacacaca

SEQ ID NO: 895425 - RNA, 22 nt, Human
cacacauacacacacacacaca

SEQ ID NO: 895426 - RNA, 18 nt, Human
cacacucagccugggccc

SEQ ID NO: 895427 - RNA, 22 nt, Human
cacacucagccugggcccaugu

SEQ ID NO: 895428 - RNA, 18 nt, Human
cacagaucacacacacau

SEQ ID NO: 895429 - RNA, 18 nt, Human
caccaaggggacccuggc

SEQ ID NO: 895430 - RNA, 22 nt, Human
caccacguuggccaggcugacu

SEQ ID NO: 895431 - RNA, 23 nt, Human
caccacguuggccaggcugacuu

SEQ ID NO: 895432 - RNA, 26 nt, Human
caccacguuggccaggcugacuucga

SEQ ID NO: 895433 - RNA, 20 nt, Human
caccaggcagaugacaucac

SEQ ID NO: 895434 - RNA, 21 nt, Human
caccaggcagaugacaucacc

SEQ ID NO: 895435 - RNA, 24 nt, Human
cacguuggccaggcugacuucgaa

SEQ ID NO: 895436 - RNA, 20 nt, Human
cacucagccugggcccaugu

SEQ ID NO: 895437 - RNA, 31 nt, Human
cagcagaagauaggaaaagcgggacccaaaa

SEQ ID NO: 895438 - RNA, 21 nt, Human
cagccaggagcagcucaggau

SEQ ID NO: 895439 - RNA, 21 nt, Human
cagccccuggacguaaccccc

SEQ ID NO: 895440 - RNA, 24 nt, Human
cagcccuuuggccuccuggggucu

SEQ ID NO: 895441 - RNA, 18 nt, Human
cagcugagcccccuggca

SEQ ID NO: 895442 - RNA, 21 nt, Human
caggacaaacacgggcuccau

SEQ ID NO: 895443 - RNA, 24 nt, Human
caggcgugagccaccgugcccggc

SEQ ID NO: 895444 - RNA, 22 nt, Human
cagggcauucuggagguguggg

SEQ ID NO: 895445 - RNA, 21 nt, Human
cagggcuggcuaggaaccaag

SEQ ID NO: 895446 - RNA, 24 nt, Human
cagugggauuguacuggaggggcu

SEQ ID NO: 895447 - RNA, 19 nt, Human
caucccauccacugccgag

SEQ ID NO: 895448 - RNA, 22 nt, Human
caugcaagugcugucaccuccu

SEQ ID NO: 895449 - RNA, 22 nt, Human
caugcaccaccuaaccagcuaa

SEQ ID NO: 895450 - RNA, 22 nt, Human
ccaaagugcugggauuacaggc

SEQ ID NO: 895451 - RNA, 22 nt, Human
ccaaagugcugggauuacaggc

SEQ ID NO: 895452 - RNA, 24 nt, Human
ccaaagugcugggauuacaggcgu

SEQ ID NO: 895453 - RNA, 21 nt, Human
ccacugcccuugacuggcagc

SEQ ID NO: 895454 - RNA, 20 nt, Human
ccacugggccuguugcaugg

SEQ ID NO: 895455 - RNA, 23 nt, Human
ccagagguggggucuccugggcc

SEQ ID NO: 895456 - RNA, 24 nt, Human
ccagcaacagugccaguaugauga

SEQ ID NO: 895457 - RNA, 22 nt, Human
ccagcccaggcugaagcggucc

SEQ ID NO: 895458 - RNA, 21 nt, Human
ccagcuggguggccuugaggg

SEQ ID NO: 895459 - RNA, 20 nt, Human
ccaggcccagagagggcagg

SEQ ID NO: 895460 - RNA, 22 nt, Human
ccauugccuuuucuuccagugg

SEQ ID NO: 895461 - RNA, 21 nt, Human
cccaggcuggagugcaauggc

SEQ ID NO: 895462 - RNA, 21 nt, Human
cccagggaucauaaccuccuc

SEQ ID NO: 895463 - RNA, 20 nt, Human
cccauccuucucccaagucc

SEQ ID NO: 895464 - RNA, 23 nt, Human
cccgaguagcugggacuacaggc

SEQ ID NO: 895465 - RNA, 24 nt, Human
cccgaguagcugggacuacaggca

SEQ ID NO: 895466 - RNA, 21 nt, Human
cccugugggcugggaaagggg

SEQ ID NO: 895467 - RNA, 21 nt, Human
cccuuuggccuccuggggucu

SEQ ID NO: 895468 - RNA, 18 nt, Human
ccgaagcgcccagggauc

SEQ ID NO: 895469 - RNA, 24 nt, Human
ccgccauugccuuuucuuccagug

SEQ ID NO: 895470 - RNA, 20 nt, Human
ccggagccggagcuggagcu

SEQ ID NO: 895471 - RNA, 24 nt, Human
ccuaagaccccauccuucucccaa

SEQ ID NO: 895472 - RNA, 19 nt, Human
ccuccuggggucuuugucc

SEQ ID NO: 895473 - RNA, 21 nt, Human
ccugaccucaagugaucugcc

SEQ ID NO: 895474 - RNA, 23 nt, Human
ccugaccucaagugaucugccug

SEQ ID NO: 895475 - RNA, 21 nt, Human
ccuggcccuggggcuggccca

SEQ ID NO: 895476 - RNA, 22 nt, Human
ccuggcccuggggcuggcccac

SEQ ID NO: 895477 - RNA, 20 nt, Human
ccuggggucuuuguccccuu

SEQ ID NO: 895478 - RNA, 24 nt, Human
ccuggggucuuuguccccuucccu

SEQ ID NO: 895479 - RNA, 19 nt, Human
ccugguaggugacuagcag

SEQ ID NO: 895480 - RNA, 20 nt, Human
ccuucacuucaagcccugug

SEQ ID NO: 895481 - RNA, 25 nt, Human
cgaaauggaaagcaggaucugggcg

SEQ ID NO: 895482 - RNA, 21 nt, Human
cgaguccugggaucuaccccu

SEQ ID NO: 895483 - RNA, 19 nt, Human
cgcccgaggcccccggcag

SEQ ID NO: 895484 - RNA, 19 nt, Human
cgcgcugggccgagcgggg

SEQ ID NO: 895485 - RNA, 21 nt, Human
cggagccggagccggagccgg

SEQ ID NO: 895486 - RNA, 21 nt, Human
cggagccggagccggagccgg

SEQ ID NO: 895487 - RNA, 21 nt, Human
cggagccggagccggagcugg

SEQ ID NO: 895488 - RNA, 21 nt, Human
cgggagaugcucagcuuccuu

SEQ ID NO: 895489 - RNA, 23 nt, Human
cucaagugaucugccugucucag

SEQ ID NO: 895490 - RNA, 23 nt, Human
cucacugcaaccuccaccuccuc

SEQ ID NO: 895491 - RNA, 25 nt, Human
cucacugcaaccuccaccuccucag

SEQ ID NO: 895492 - RNA, 26 nt, Human
cuccugaccucaagugaucugccugu

SEQ ID NO: 895493 - RNA, 24 nt, Human
cucggccucccgaguagcugggac

SEQ ID NO: 895494 - RNA, 22 nt, Human
cucugccccaugcucugugauc

SEQ ID NO: 895495 - RNA, 22 nt, Human
cucugggagggagccccuuucc

SEQ ID NO: 895496 - RNA, 20 nt, Human
cucuguugcccaggcuggag

SEQ ID NO: 895497 - RNA, 21 nt, Human
cugagcuaaagaagggcugaa

SEQ ID NO: 895498 - RNA, 20 nt, Human
cugagucucugcugacccua

SEQ ID NO: 895499 - RNA, 19 nt, Human
cugcaaccuccaccuccuc

SEQ ID NO: 895500 - RNA, 18 nt, Human
cugccgaagcgcccaggg

SEQ ID NO: 895501 - RNA, 23 nt, Human
cugccucggccucccgaguagcu

SEQ ID NO: 895502 - RNA, 23 nt, Human
cuggugcagggcuuggccccaag

SEQ ID NO: 895503 - RNA, 21 nt, Human
cugguggaaagagggaggagg

SEQ ID NO: 895504 - RNA, 23 nt, Human
cugucucagccucccaaagugcu

SEQ ID NO: 895505 - RNA, 24 nt, Human
cugucucagccucccaaagugcug

SEQ ID NO: 895506 - RNA, 19 nt, Human
cuguugcccaggcuggagu

SEQ ID NO: 895507 - RNA, 21 nt, Human
cuugagacgcuccuccccacu

SEQ ID NO: 895508 - RNA, 24 nt, Human
gaaauggaaagcaggaucugggcg

SEQ ID NO: 895509 - RNA, 19 nt, Human
gaaccuugcccuggacucu

SEQ ID NO: 895510 - RNA, 23 nt, Human
gaacucuuccccauuucucacaa

SEQ ID NO: 895511 - RNA, 25 nt, Human
gaagggcugaagcucuggcccaugg

SEQ ID NO: 895512 - RNA, 28 nt, Human
gaccccauccuucucccaaguccuccac

SEQ ID NO: 895513 - RNA, 24 nt, Human
gaccucaagugaucugccugucuc

SEQ ID NO: 895514 - RNA, 19 nt, Human
gacuagcaggggagggaca

SEQ ID NO: 895515 - RNA, 20 nt, Human
gacugcagcccuuuggccuc

SEQ ID NO: 895516 - RNA, 24 nt, Human
gagcaauggugcccagauggcacu

SEQ ID NO: 895517 - RNA, 21 nt, Human
gagccccccggccugcagcuc

SEQ ID NO: 895518 - RNA, 20 nt, Human
gagccggagccggagccgga

SEQ ID NO: 895519 - RNA, 20 nt, Human
gagccggagccggagccgga

SEQ ID NO: 895520 - RNA, 20 nt, Human
gagccggagccggagccgga

SEQ ID NO: 895521 - RNA, 20 nt, Human
gagccggagccggagcugga

SEQ ID NO: 895522 - RNA, 24 nt, Human
gagcugguuuuuuacaauccaugc

SEQ ID NO: 895523 - RNA, 22 nt, Human
gaggaagagggaggcaugggug

SEQ ID NO: 895524 - RNA, 24 nt, Human
gaguagcugggacuacaggcaugc

SEQ ID NO: 895525 - RNA, 20 nt, Human
gaguccugggaucuaccccu

SEQ ID NO: 895526 - RNA, 21 nt, Human
gaucugccugucucagccucc

SEQ ID NO: 895527 - RNA, 18 nt, Human
gauuacaggcgugagcca

SEQ ID NO: 895528 - RNA, 21 nt, Human
gauuacaggcgugagccaccg

SEQ ID NO: 895529 - RNA, 24 nt, Human
gauuacaggcgugagccaccgugc

SEQ ID NO: 895530 - RNA, 22 nt, Human
gcaaccuccaccuccucaguuc

SEQ ID NO: 895531 - RNA, 19 nt, Human
gcaaggggauugguccccu

SEQ ID NO: 895532 - RNA, 19 nt, Human
gcaagugcugucaccuccu

SEQ ID NO: 895533 - RNA, 18 nt, Human
gcacagccaggagugggg

SEQ ID NO: 895534 - RNA, 25 nt, Human
gcagugccagauggcaggacaaaca

SEQ ID NO: 895535 - RNA, 19 nt, Human
gcauggguggggggggggg

SEQ ID NO: 895536 - RNA, 24 nt, Human
gcccaggcuggagugcaauggcgu

SEQ ID NO: 895537 - RNA, 18 nt, Human
gccccccggccugcagcc

SEQ ID NO: 895538 - RNA, 18 nt, Human
gcccuggacucugagucc

SEQ ID NO: 895539 - RNA, 21 nt, Human
gcccugugggcugggaaaggg

SEQ ID NO: 895540 - RNA, 21 nt, Human
gccucggccucccgaguagcu

SEQ ID NO: 895541 - RNA, 20 nt, Human
gccugggcccaugugagccc

SEQ ID NO: 895542 - RNA, 19 nt, Human
gccuugagggucgcucccc

SEQ ID NO: 895543 - RNA, 28 nt, Human
gcgcggcggcggggucggggcgcggagg

SEQ ID NO: 895544 - RNA, 20 nt, Human
gcggcggcggggucggggcg

SEQ ID NO: 895545 - RNA, 21 nt, Human
gcggcgggggcgcccgaggcc

SEQ ID NO: 895546 - RNA, 23 nt, Human
gcucacugcuucaugcuucuccc

SEQ ID NO: 895547 - RNA, 20 nt, Human
gcucccagcccaggcugaag

SEQ ID NO: 895548 - RNA, 27 nt, Human
gcucuguugcccaggcuggagugcaau

SEQ ID NO: 895549 - RNA, 23 nt, Human
gcugacuucgaacuccugaccuc

SEQ ID NO: 895550 - RNA, 22 nt, Human
gcuggagcugggaaaggaaugu

SEQ ID NO: 895551 - RNA, 19 nt, Human
gcuggagugcaauggcgug

SEQ ID NO: 895552 - RNA, 18 nt, Human
ggaaagaggaggaagagg

SEQ ID NO: 895553 - RNA, 18 nt, Human
ggaaaggaauguccugga

SEQ ID NO: 895554 - RNA, 21 nt, Human
ggaacaaaaaggcaggcaaaa

SEQ ID NO: 895555 - RNA, 24 nt, Human
ggaagaucuggcagauaacagcug

SEQ ID NO: 895556 - RNA, 18 nt, Human
ggacccuggcccuggggc

SEQ ID NO: 895557 - RNA, 18 nt, Human
ggagaaaggggcaaggcu

SEQ ID NO: 895558 - RNA, 20 nt, Human
ggagaaaggggcaaggcugg

SEQ ID NO: 895559 - RNA, 21 nt, Human
ggagacugagguggggcuggg

SEQ ID NO: 895560 - RNA, 19 nt, Human
ggaggggggacucagugcu

SEQ ID NO: 895561 - RNA, 23 nt, Human
ggagucuugcucuguugcccagg

SEQ ID NO: 895562 - RNA, 20 nt, Human
ggcaaggcuggggagggguu

SEQ ID NO: 895563 - RNA, 18 nt, Human
ggcaggagggaaggccag

SEQ ID NO: 895564 - RNA, 23 nt, Human
ggccgagcggggcaggcgcggga

SEQ ID NO: 895565 - RNA, 24 nt, Human
ggcgcggcggcggggucggggcga

SEQ ID NO: 895566 - RNA, 18 nt, Human
ggcggcgggggcgcccga

SEQ ID NO: 895567 - RNA, 22 nt, Human
ggcuggagugcaauggcgugau

SEQ ID NO: 895568 - RNA, 20 nt, Human
gggaaaggaauguccuggag

SEQ ID NO: 895569 - RNA, 19 nt, Human
gggagaugcucagcuuccu

SEQ ID NO: 895570 - RNA, 18 nt, Human
gggcaggagggaaggcca

SEQ ID NO: 895571 - RNA, 19 nt, Human
gggcaggagggaaggccag

SEQ ID NO: 895572 - RNA, 19 nt, Human
gggcaggcucccacuguuc

SEQ ID NO: 895573 - RNA, 18 nt, Human
gggcagggaggguggggu

SEQ ID NO: 895574 - RNA, 23 nt, Human
gggcggcgggggcgcccgaggcc

SEQ ID NO: 895575 - RNA, 18 nt, Human
gggcucaagugaccaugc

SEQ ID NO: 895576 - RNA, 20 nt, Human
ggggcagcagaagauaggaa

SEQ ID NO: 895577 - RNA, 18 nt, Human
gggguuucaccacguugg

SEQ ID NO: 895578 - RNA, 22 nt, Human
gggguuucaccacguuggccag

SEQ ID NO: 895579 - RNA, 25 nt, Human
gggugggaggugggggucuggggug

SEQ ID NO: 895580 - RNA, 22 nt, Human
ggguuucaccacguuggccagg

SEQ ID NO: 895581 - RNA, 27 nt, Human
gguagguaauguggcucugccagaggu

SEQ ID NO: 895582 - RNA, 24 nt, Human
ggugacugcagcccuuuggccucc

SEQ ID NO: 895583 - RNA, 24 nt, Human
gguggaaagagggaggaggguaag

SEQ ID NO: 895584 - RNA, 21 nt, Human
ggugggaggugggggucuggg

SEQ ID NO: 895585 - RNA, 18 nt, Human
gguggggggggggggagg

SEQ ID NO: 895586 - RNA, 20 nt, Human
gguguugcauaaaggaagau

SEQ ID NO: 895587 - RNA, 24 nt, Human
guagguaauguggcucugccagag

SEQ ID NO: 895588 - RNA, 19 nt, Human
gucacagugucagacaacu

SEQ ID NO: 895589 - RNA, 21 nt, Human
gucccaggugaugcaaagugg

SEQ ID NO: 895590 - RNA, 24 nt, Human
gugaucugccugucucagccuccc

SEQ ID NO: 895591 - RNA, 20 nt, Human
gugcugggacacacaaagga

SEQ ID NO: 895592 - RNA, 22 nt, Human
gugcuggggaaauuuguuccug

SEQ ID NO: 895593 - RNA, 21 nt, Human
gugggggucugggguggcagg

SEQ ID NO: 895594 - RNA, 24 nt, Human
guggucccaggugaugcaaagugg

SEQ ID NO: 895595 - RNA, 19 nt, Human
uaacagaaacacaucaagc

SEQ ID NO: 895596 - RNA, 20 nt, Human
uaaccuccuccccgcacuuc

SEQ ID NO: 895597 - RNA, 25 nt, Human
uaaccucugauguccucgucauccc

SEQ ID NO: 895598 - RNA, 21 nt, Human
uaaguuuuguauuuuuaguga

SEQ ID NO: 895599 - RNA, 23 nt, Human
uacaggcgugagccaccgugccc

SEQ ID NO: 895600 - RNA, 21 nt, Human
uaccaguggccaucacuaugg

SEQ ID NO: 895601 - RNA, 22 nt, Human
uaccaguggccaucacuauggg

SEQ ID NO: 895602 - RNA, 24 nt, Human
uagcugagcuaaagaagggcugaa

SEQ ID NO: 895603 - RNA, 24 nt, Human
uagugaagaugggguuucaccacg

SEQ ID NO: 895604 - RNA, 20 nt, Human
uaugaccccccucaaguccc

SEQ ID NO: 895605 - RNA, 21 nt, Human
uauuuuuuugagauggagucu

SEQ ID NO: 895606 - RNA, 23 nt, Human
ucacacacacauacacacacaca

SEQ ID NO: 895607 - RNA, 20 nt, Human
ucaccaaggggacccuggcc

SEQ ID NO: 895608 - RNA, 20 nt, Human
ucaccagagcuuuccccaca

SEQ ID NO: 895609 - RNA, 23 nt, Human
ucaccccagcaacagugccagua

SEQ ID NO: 895610 - RNA, 19 nt, Human
ucacugcaaccuccaccuc

SEQ ID NO: 895611 - RNA, 22 nt, Human
ucacugcaaccuccaccuccuc

SEQ ID NO: 895612 - RNA, 24 nt, Human
ucacugcaaccuccaccuccucag

SEQ ID NO: 895613 - RNA, 28 nt, Human
ucacugcaaccuccaccuccucaguuca

SEQ ID NO: 895614 - RNA, 19 nt, Human
ucaggccaagggugcuggg

SEQ ID NO: 895615 - RNA, 19 nt, Human
uccaaguccuguccuuggc

SEQ ID NO: 895616 - RNA, 19 nt, Human
uccaccuccucaguucaag

SEQ ID NO: 895617 - RNA, 22 nt, Human
uccagcuggguggccuugaggg

SEQ ID NO: 895618 - RNA, 24 nt, Human
ucccaaagugcugggauuacaggc

SEQ ID NO: 895619 - RNA, 18 nt, Human
ucccaaguccuccacaag

SEQ ID NO: 895620 - RNA, 21 nt, Human
uccccgggcuucagcuuccuc

SEQ ID NO: 895621 - RNA, 24 nt, Human
uccccgggcuucagcuuccucauc

SEQ ID NO: 895622 - RNA, 24 nt, Human
ucccgaguagcugggacuacaggc

SEQ ID NO: 895623 - RNA, 26 nt, Human
ucccugaacucuuccccauuucucac

SEQ ID NO: 895624 - RNA, 23 nt, Human
ucccugaagcagcugagcccccu

SEQ ID NO: 895625 - RNA, 19 nt, Human
ucgcuccccuccccgggcu

SEQ ID NO: 895626 - RNA, 23 nt, Human
ucggccucccgaguagcugggac

SEQ ID NO: 895627 - RNA, 20 nt, Human
ucuacagccuguuguggccc

SEQ ID NO: 895628 - RNA, 21 nt, Human
ucuacagccuguuguggcccc

SEQ ID NO: 895629 - RNA, 19 nt, Human
ucugccgaagcgcccaggg

SEQ ID NO: 895630 - RNA, 23 nt, Human
ucuggcagauaacagcugggaag

SEQ ID NO: 895631 - RNA, 18 nt, Human
ucuguugcccaggcugga

SEQ ID NO: 895632 - RNA, 24 nt, Human
ucuguugcccaggcuggagugcaa

SEQ ID NO: 895633 - RNA, 23 nt, Human
ucuugcucuguugcccaggcugg

SEQ ID NO: 895634 - RNA, 24 nt, Human
ucuugcucuguugcccaggcugga

SEQ ID NO: 895635 - RNA, 21 nt, Human
ugaagcucuggcccauggugg

SEQ ID NO: 895636 - RNA, 21 nt, Human
ugaaguucugaauucugccgu

SEQ ID NO: 895637 - RNA, 22 nt, Human
ugaaugcagucagaaggcuggg

SEQ ID NO: 895638 - RNA, 18 nt, Human
ugacaugcucacucacac

SEQ ID NO: 895639 - RNA, 18 nt, Human
ugaccucaagugaucugc

SEQ ID NO: 895640 - RNA, 20 nt, Human
ugaccucaagugaucugccu

SEQ ID NO: 895641 - RNA, 20 nt, Human
ugacugcagcccuuuggccu

SEQ ID NO: 895642 - RNA, 20 nt, Human
ugacugggccaugucugacu

SEQ ID NO: 895643 - RNA, 21 nt, Human
ugacugggccaugucugacuc

SEQ ID NO: 895644 - RNA, 20 nt, Human
ugacuucgaacuccugaccu

SEQ ID NO: 895645 - RNA, 20 nt, Human
ugagccccuuccccacccag

SEQ ID NO: 895646 - RNA, 24 nt, Human
ugaggaaggccaggcccagagagg

SEQ ID NO: 895647 - RNA, 25 nt, Human
ugaggaaggccaggcccagagaggg

SEQ ID NO: 895648 - RNA, 25 nt, Human
ugaggcgggcggcgggggcgccccc

SEQ ID NO: 895649 - RNA, 23 nt, Human
ugagggcuuuggccucuucucag

SEQ ID NO: 895650 - RNA, 18 nt, Human
ugaugagacacuugaccc

SEQ ID NO: 895651 - RNA, 24 nt, Human
ugcaccaccuaaccagcuaaguuu

SEQ ID NO: 895652 - RNA, 22 nt, Human
ugcaugggggacaagggggcgg

SEQ ID NO: 895653 - RNA, 23 nt, Human
ugcaugggggacaagggggcggg

SEQ ID NO: 895654 - RNA, 21 nt, Human
ugccagagguggggucuccug

SEQ ID NO: 895655 - RNA, 24 nt, Human
ugccagagguggggucuccugggc

SEQ ID NO: 895656 - RNA, 18 nt, Human
ugcccaggcuggagugca

SEQ ID NO: 895657 - RNA, 21 nt, Human
ugcccaggcuggagugcaaug

SEQ ID NO: 895658 - RNA, 21 nt, Human
ugcccaggcuggagugcaaug

SEQ ID NO: 895659 - RNA, 24 nt, Human
ugcccaggcuggagugcaauggcg

SEQ ID NO: 895660 - RNA, 20 nt, Human
ugccccaggaccaugcacag

SEQ ID NO: 895661 - RNA, 18 nt, Human
ugccgaagcgcccaggga

SEQ ID NO: 895662 - RNA, 20 nt, Human
ugccgaagcgcccagggauc

SEQ ID NO: 895663 - RNA, 21 nt, Human
ugccucggccucccgaguagc

SEQ ID NO: 895664 - RNA, 24 nt, Human
ugccucggccucccgaguagcugg

SEQ ID NO: 895665 - RNA, 20 nt, Human
ugccucuguuccuucacuuc

SEQ ID NO: 895666 - RNA, 24 nt, Human
ugcugggauuacaggcgugagcca

SEQ ID NO: 895667 - RNA, 24 nt, Human
uggaaagagggaggaggguaaguc

SEQ ID NO: 895668 - RNA, 22 nt, Human
uggagaagcagcaauuucccuc

SEQ ID NO: 895669 - RNA, 18 nt, Human
uggagacugagguggggc

SEQ ID NO: 895670 - RNA, 24 nt, Human
uggagucuugcucuguugcccagg

SEQ ID NO: 895671 - RNA, 19 nt, Human
uggagugcaauggcgugau

SEQ ID NO: 895672 - RNA, 23 nt, Human
uggagugcaauggcgugaucucg

SEQ ID NO: 895673 - RNA, 24 nt, Human
uggagugcaauggcgugaucucgg

SEQ ID NO: 895674 - RNA, 19 nt, Human
uggcaaccuaggucucagc

SEQ ID NO: 895675 - RNA, 19 nt, Human
uggcacggcuucaccaagg

SEQ ID NO: 895676 - RNA, 20 nt, Human
uggcaggcagcuggaauaaa

SEQ ID NO: 895677 - RNA, 18 nt, Human
uggcauggagggagagcg

SEQ ID NO: 895678 - RNA, 24 nt, Human
uggccaggcugacuucgaacuccu

SEQ ID NO: 895679 - RNA, 22 nt, Human
uggccaucacuaugggugagca

SEQ ID NO: 895680 - RNA, 24 nt, Human
uggcgucacugaaauugaaguucc

SEQ ID NO: 895681 - RNA, 20 nt, Human
uggcgugaucucggcucacu

SEQ ID NO: 895682 - RNA, 20 nt, Human
uggcucugccagaggugggg

SEQ ID NO: 895683 - RNA, 25 nt, Human
ugggaaaggaauguccuggagacug

SEQ ID NO: 895684 - RNA, 25 nt, Human
ugggaagcaacuggugcagggcuug

SEQ ID NO: 895685 - RNA, 21 nt, Human
ugggacuacaggcaugcacca

SEQ ID NO: 895686 - RNA, 26 nt, Human
ugggacuacaggcaugcaccaccuaa

SEQ ID NO: 895687 - RNA, 26 nt, Human
ugggaggcacagccaggaguggggca

SEQ ID NO: 895688 - RNA, 28 nt, Human
ugggaggcacagccaggaguggggcagg

SEQ ID NO: 895689 - RNA, 21 nt, Human
ugggauuacaggcgugagcca

SEQ ID NO: 895690 - RNA, 22 nt, Human
ugggauuacaggcgugagccac

SEQ ID NO: 895691 - RNA, 23 nt, Human
ugggauuacaggcgugagccacc

SEQ ID NO: 895692 - RNA, 23 nt, Human
ugggauuacaggcgugagccacc

SEQ ID NO: 895693 - RNA, 24 nt, Human
ugggauuacaggcgugagccaccg

SEQ ID NO: 895694 - RNA, 19 nt, Human
ugggcaggcucccacuguu

SEQ ID NO: 895695 - RNA, 19 nt, Human
ugggcagggaggguggggu

SEQ ID NO: 895696 - RNA, 21 nt, Human
ugggcucaagucucccguguc

SEQ ID NO: 895697 - RNA, 21 nt, Human
uggggggggggggaggcucca

SEQ ID NO: 895698 - RNA, 24 nt, Human
ugggguuucaccacguuggccagg

SEQ ID NO: 895699 - RNA, 23 nt, Human
uggugcagggcuuggccccaagc

SEQ ID NO: 895700 - RNA, 21 nt, Human
ugguggaaagagggaggaggg

SEQ ID NO: 895701 - RNA, 19 nt, Human
ugguggcaaggggauuggu

SEQ ID NO: 895702 - RNA, 21 nt, Human
uguauuuuuagugaagauggg

SEQ ID NO: 895703 - RNA, 18 nt, Human
uguccuggagacugaggu

SEQ ID NO: 895704 - RNA, 24 nt, Human
ugucucagccucccaaagugcugg

SEQ ID NO: 895705 - RNA, 20 nt, Human
ugugauccugugcaggucac

SEQ ID NO: 895706 - RNA, 18 nt, Human
ugugggcugggaaagggg

SEQ ID NO: 895707 - RNA, 18 nt, Human
uguucaggugucauguug

SEQ ID NO: 895708 - RNA, 20 nt, Human
uguugcccaggcuggagugc

SEQ ID NO: 895709 - RNA, 19 nt, Human
uguugugagaucaacagga

SEQ ID NO: 895710 - RNA, 24 nt, Human
uuacaaaaacaaaaagguaacaaa

SEQ ID NO: 895711 - RNA, 18 nt, Human
uuagugaagaugggguuu

SEQ ID NO: 895712 - RNA, 22 nt, Human
uuagugaagaugggguuucacc

SEQ ID NO: 895713 - RNA, 24 nt, Human
uuagugaagaugggguuucaccac

SEQ ID NO: 895714 - RNA, 25 nt, Human
uuagugaagaugggguuucaccacg

SEQ ID NO: 895715 - RNA, 22 nt, Human
uucaaaacaauaacagaaacac

SEQ ID NO: 895716 - RNA, 18 nt, Human
uucaagagauucuucugc

SEQ ID NO: 895717 - RNA, 20 nt, Human
uuccuuuucuuuuuuggcuc

SEQ ID NO: 895718 - RNA, 23 nt, Human
uucucccaaguccuccacaagag

SEQ ID NO: 895719 - RNA, 20 nt, Human
uucucgaaauggaaagcagg

SEQ ID NO: 895720 - RNA, 24 nt, Human
uugacaugcucacucacacucagc

SEQ ID NO: 895721 - RNA, 21 nt, Human
uugagauggagucuugcucug

SEQ ID NO: 895722 - RNA, 18 nt, Human
uugcccaggcuggagugc

SEQ ID NO: 895723 - RNA, 24 nt, Human
uugcucuguugcccaggcuggagu

SEQ ID NO: 895724 - RNA, 23 nt, Human
uuggagaagcagcaauuucccuc

SEQ ID NO: 895725 - RNA, 24 nt, Human
uuggccccaagcaagaguuggaga

SEQ ID NO: 895726 - RNA, 25 nt, Human
uuggccccaagcaagaguuggagaa

SEQ ID NO: 895727 - RNA, 18 nt, Human
uugguccccuugggaugu

SEQ ID NO: 895728 - RNA, 23 nt, Human
uuguauuuuuagugaagaugggg

SEQ ID NO: 895729 - RNA, 19 nt, Human
uuguuccuguucccuuugg

SEQ ID NO: 895730 - RNA, 21 nt, Human
uuucaccacguuggccaggcu

SEQ ID NO: 895731 - RNA, 18 nt, Human
uuuggaaggcugaguggg

SEQ ID NO: 895732 - RNA, 24 nt, Human
uuuuuagugaagaugggguuucac

SEQ ID NO: 895733 - RNA, 24 nt, Human
uuuuugagauggagucuugcucug

SEQ ID NO: 895734 - RNA, 18 nt, Human
uuuuuugagauggagucu

SEQ ID NO: 895735 - RNA, 18 nt, Human
acugcacuacugcacuug

SEQ ID NO: 895736 - RNA, 22 nt, Human
ccucauggugaacugcacuacu

SEQ ID NO: 895737 - RNA, 21 nt, Human
cuguuggcaaaugucuucuuu

SEQ ID NO: 895738 - RNA, 19 nt, Human
cuuguguggcccacaugac

SEQ ID NO: 895739 - RNA, 18 nt, Human
uuuuuuuuuuuuaaaaga

SEQ ID NO: 895740 - RNA, 23 nt, Human
aaacagaaaauauggggacagaa

SEQ ID NO: 895741 - RNA, 23 nt, Human
agaaaacagaaaauauggggaca

SEQ ID NO: 895742 - RNA, 19 nt, Human
agccauccggccaagaaaa

SEQ ID NO: 895743 - RNA, 18 nt, Human
aggccucagccauccggc

SEQ ID NO: 895744 - RNA, 19 nt, Human
cccaggaauguuugcccuu

SEQ ID NO: 895745 - RNA, 22 nt, Human
cggccaagaaaacagaaaauau

SEQ ID NO: 895746 - RNA, 20 nt, Human
gaggaucuccuugcccagcu

SEQ ID NO: 895747 - RNA, 21 nt, Human
uggagcccuggucauuaccaa

SEQ ID NO: 895748 - RNA, 19 nt, Human
uuugcccuucucagucugu

SEQ ID NO: 895749 - RNA, 18 nt, Human
aagaaauccaggaaacua

SEQ ID NO: 895750 - RNA, 19 nt, Human
acaauguagagaaaguugu

SEQ ID NO: 895751 - RNA, 23 nt, Human
agacaaugaggugaggaggagga

SEQ ID NO: 895752 - RNA, 26 nt, Human
agagaagcaguguucacuuugagcua

SEQ ID NO: 895753 - RNA, 19 nt, Human
aggcaaacagggcuugcca

SEQ ID NO: 895754 - RNA, 21 nt, Human
auuagaaugcaggauucccug

SEQ ID NO: 895755 - RNA, 18 nt, Human
caaaaugagauuuucccu

SEQ ID NO: 895756 - RNA, 20 nt, Human
cagaagaaauccaggaaacu

SEQ ID NO: 895757 - RNA, 20 nt, Human
cuuuucuucuuucacuccuu

SEQ ID NO: 895758 - RNA, 19 nt, Human
ggagacaaugaggugagga

SEQ ID NO: 895759 - RNA, 25 nt, Human
uaagaugagcaaaaugagauuuucc

SEQ ID NO: 895760 - RNA, 18 nt, Human
uagaaugcaggauucccu

SEQ ID NO: 895761 - RNA, 21 nt, Human
uagaaugcaggauucccugga

SEQ ID NO: 895762 - RNA, 25 nt, Human
ucaacagauagaauugaaguaacaa

SEQ ID NO: 895763 - RNA, 20 nt, Human
uccagaagaaauccaggaaa

SEQ ID NO: 895764 - RNA, 21 nt, Human
ucuaagucuucuuuucuucuu

SEQ ID NO: 895765 - RNA, 20 nt, Human
ugaaaugcacuuucuuuaug

SEQ ID NO: 895766 - RNA, 21 nt, Human
ugagagagaaaaaggagcuag

SEQ ID NO: 895767 - RNA, 22 nt, Human
ugaggaggaggagagagucucg

SEQ ID NO: 895768 - RNA, 22 nt, Human
ugaggugaggaggaggagagag

SEQ ID NO: 895769 - RNA, 22 nt, Human
ugggucagagauggacuuucaa

SEQ ID NO: 895770 - RNA, 20 nt, Human
uguccagaagaaauccagga

SEQ ID NO: 895771 - RNA, 22 nt, Human
ugucugaaguuucaucuugagg

SEQ ID NO: 895772 - RNA, 20 nt, Human
uucacuuugagcuauguuuc

SEQ ID NO: 895773 - RNA, 19 nt, Human
uugaaaugcacuuucuuua

SEQ ID NO: 895774 - RNA, 26 nt, Human
uuuucuguugccauuauguuugcuuu

SEQ ID NO: 895775 - RNA, 20 nt, Human
uuuuucuguugccauuaugu

SEQ ID NO: 895776 - RNA, 22 nt, Human
uuuuuuucuguugccauuauua

SEQ ID NO: 895777 - RNA, 18 nt, Human
uuuuuuuuuuuuuuucug

SEQ ID NO: 895778 - RNA, 22 nt, Human
uuuuuuuuuuuuuuuuucuguu

SEQ ID NO: 895779 - RNA, 19 nt, Human
accacugggcucccuuuga

SEQ ID NO: 895780 - RNA, 19 nt, Human
acgcuguugcugguuuucc

SEQ ID NO: 895781 - RNA, 22 nt, Human
cacgcuguugcugguuuuccuc

SEQ ID NO: 895782 - RNA, 25 nt, Human
cacgcuguugcugguuuuccucuga

SEQ ID NO: 895783 - RNA, 21 nt, Human
cacugggcucccuuugaaccc

SEQ ID NO: 895784 - RNA, 22 nt, Human
ccacugggcucccuuugaaccc

SEQ ID NO: 895785 - RNA, 23 nt, Human
ccagcaguggucagucauuuuuc

SEQ ID NO: 895786 - RNA, 21 nt, Human
ccuuugaacccggcccaaucu

SEQ ID NO: 895787 - RNA, 18 nt, Human
cuaggaaaaugaaguguc

SEQ ID NO: 895788 - RNA, 21 nt, Human
cugguauggaaugccucuccc

SEQ ID NO: 895789 - RNA, 24 nt, Human
gaaugccucuccccaaacucccac

SEQ ID NO: 895790 - RNA, 18 nt, Human
ggaaugccucuccccaaa

SEQ ID NO: 895791 - RNA, 22 nt, Human
ggaaugccucuccccaaacucc

SEQ ID NO: 895792 - RNA, 22 nt, Human
ggccacagaaucugguauggaa

SEQ ID NO: 895793 - RNA, 21 nt, Human
uaaggagaguuccuguaacuu

SEQ ID NO: 895794 - RNA, 30 nt, Human
ucccacgcuguugcugguuuuccucugauu

SEQ ID NO: 895795 - RNA, 19 nt, Human
ucuuucauugcaaccacug

SEQ ID NO: 895796 - RNA, 25 nt, Human
ucuuuggucccagcauuuucccacu

SEQ ID NO: 895797 - RNA, 18 nt, Human
ugagcuggggaaggaagu

SEQ ID NO: 895798 - RNA, 20 nt, Human
uggaaugccucuccccaaac

SEQ ID NO: 895799 - RNA, 23 nt, Human
ugguauggaaugccucuccccaa

SEQ ID NO: 895800 - RNA, 18 nt, Human
accgcuuuucgccccugc

SEQ ID NO: 895801 - RNA, 21 nt, Human
agauaaucaagaggugacagc

SEQ ID NO: 895802 - RNA, 18 nt, Human
cagcacugcagucacagu

SEQ ID NO: 895803 - RNA, 24 nt, Human
ccgcuuuucgccccugcugacucc

SEQ ID NO: 895804 - RNA, 18 nt, Human
cuuuucgccccugcugac

SEQ ID NO: 895805 - RNA, 22 nt, Human
gcaaagaacaguuaaguuuaca

SEQ ID NO: 895806 - RNA, 22 nt, Human
uaaaaauaccuuggauucuggu

SEQ ID NO: 895807 - RNA, 24 nt, Human
ugccucaaaagcagugaguucaau

SEQ ID NO: 895808 - RNA, 20 nt, Human
uuuaaaggaaucaggaagaa

SEQ ID NO: 895809 - RNA, 22 nt, Human
aaaauaaagacuaguauuuuac

SEQ ID NO: 895810 - RNA, 22 nt, Human
aaacagauauagauacauagac

SEQ ID NO: 895811 - RNA, 18 nt, Human
aauuuucacuucaauuuu

SEQ ID NO: 895812 - RNA, 18 nt, Human
acaaaaugaauaacaaug

SEQ ID NO: 895813 - RNA, 24 nt, Human
accagaaaaaaauacaaaacagau

SEQ ID NO: 895814 - RNA, 19 nt, Human
aggaaaucugguuuggaac

SEQ ID NO: 895815 - RNA, 21 nt, Human
auauauccacauccguccaca

SEQ ID NO: 895816 - RNA, 25 nt, Human
auucuuguuuccuuuuucuuuaugc

SEQ ID NO: 895817 - RNA, 24 nt, Human
cacuucaauuuuaauucuugaaga

SEQ ID NO: 895818 - RNA, 18 nt, Human
cccuccucccucccaccc

SEQ ID NO: 895819 - RNA, 21 nt, Human
ccuccucccucccacccagcc

SEQ ID NO: 895820 - RNA, 24 nt, Human
ccucugagucucuagggggacggg

SEQ ID NO: 895821 - RNA, 19 nt, Human
ccuuggcccaggugggucc

SEQ ID NO: 895822 - RNA, 23 nt, Human
cucccacccagccugccuggccc

SEQ ID NO: 895823 - RNA, 23 nt, Human
gaaaaaaauacaaaacagauaua

SEQ ID NO: 895824 - RNA, 22 nt, Human
gaaccagaaaaaaauacaaaac

SEQ ID NO: 895825 - RNA, 19 nt, Human
gcacucauuauaagaagca

SEQ ID NO: 895826 - RNA, 20 nt, Human
ggcccuccucccucccaccc

SEQ ID NO: 895827 - RNA, 20 nt, Human
ggggacggggcaggugggaa

SEQ ID NO: 895828 - RNA, 21 nt, Human
guguuucuacauaggcuucag

SEQ ID NO: 895829 - RNA, 21 nt, Human
uaaaauucucaugguccucuc

SEQ ID NO: 895830 - RNA, 19 nt, Human
uaauuauuuggaaaauguu

SEQ ID NO: 895831 - RNA, 18 nt, Human
uagcagggacaccugguc

SEQ ID NO: 895832 - RNA, 23 nt, Human
uauaagaagcaaaggguuauauc

SEQ ID NO: 895833 - RNA, 21 nt, Human
uccguccacaauaaauccugg

SEQ ID NO: 895834 - RNA, 20 nt, Human
ucucaugguccucucuucca

SEQ ID NO: 895835 - RNA, 19 nt, Human
uggaaccagaaaaaaauac

SEQ ID NO: 895836 - RNA, 24 nt, Human
uggaaccagaaaaaaauacaaaac

SEQ ID NO: 895837 - RNA, 22 nt, Human
uggcccagguggguccucugag

SEQ ID NO: 895838 - RNA, 20 nt, Human
ugucucggcccuccucccuc

SEQ ID NO: 895839 - RNA, 26 nt, Human
ugucucggcccuccucccucccaccc

SEQ ID NO: 895840 - RNA, 25 nt, Human
uguguguguguuucuacauaggcuu

SEQ ID NO: 895841 - RNA, 21 nt, Human
uguuauuuuccccuaauucuu

SEQ ID NO: 895842 - RNA, 19 nt, Human
uguuuuguuuuuccucgcc

SEQ ID NO: 895843 - RNA, 20 nt, Human
uuuggaguccuuggcccagg

SEQ ID NO: 895844 - RNA, 18 nt, Human
uuuuguuuguuuuguuuu

SEQ ID NO: 895845 - RNA, 23 nt, Human
aaaauuaaauuauaucuauaaaa

SEQ ID NO: 895846 - RNA, 21 nt, Human
aaacacaaccccaacacaaua

SEQ ID NO: 895847 - RNA, 22 nt, Human
aacacaaccccaacacaauacu

SEQ ID NO: 895848 - RNA, 20 nt, Human
aaccccaacacaauacucug

SEQ ID NO: 895849 - RNA, 18 nt, Human
aagaaggaaauuaaaagg

SEQ ID NO: 895850 - RNA, 20 nt, Human
aagggaucgacagggaaggu

SEQ ID NO: 895851 - RNA, 21 nt, Human
aagggcucagggcaagagggg

SEQ ID NO: 895852 - RNA, 23 nt, Human
aauacaaagcaacuauaauugga

SEQ ID NO: 895853 - RNA, 18 nt, Human
acaaccccaacacaauac

SEQ ID NO: 895854 - RNA, 25 nt, Human
acacauccuacccuggcgaacaacc

SEQ ID NO: 895855 - RNA, 20 nt, Human
acaggagcugcuuuuccucu

SEQ ID NO: 895856 - RNA, 23 nt, Human
acccccucccaccccauccccca

SEQ ID NO: 895857 - RNA, 18 nt, Human
acccuggcgaacaacccu

SEQ ID NO: 895858 - RNA, 21 nt, Human
acccuggcgaacaacccuugg

SEQ ID NO: 895859 - RNA, 22 nt, Human
agaacacaaccaaaacaguuac

SEQ ID NO: 895860 - RNA, 19 nt, Human
agaaggaaauuaaaaggaa

SEQ ID NO: 895861 - RNA, 18 nt, Human
agacuuaguaagacagca

SEQ ID NO: 895862 - RNA, 22 nt, Human
agagcugucccgaaaucugcac

SEQ ID NO: 895863 - RNA, 19 nt, Human
agagguuccgcgggcgucc

SEQ ID NO: 895864 - RNA, 19 nt, Human
agcggcuggugggggaugc

SEQ ID NO: 895865 - RNA, 18 nt, Human
agcugcuuuuccucuuaa

SEQ ID NO: 895866 - RNA, 18 nt, Human
agcuggaggggugggggg

SEQ ID NO: 895867 - RNA, 18 nt, Human
aggaagaaggaaauuaaa

SEQ ID NO: 895868 - RNA, 20 nt, Human
aggaaggacaggaaaugaua

SEQ ID NO: 895869 - RNA, 23 nt, Human
aggaggagcaggagcuggagggg

SEQ ID NO: 895870 - RNA, 19 nt, Human
agggaacucuggugggguu

SEQ ID NO: 895871 - RNA, 21 nt, Human
agggaucaaauacucaacuga

SEQ ID NO: 895872 - RNA, 24 nt, Human
agggcucagggcaagaggggugug

SEQ ID NO: 895873 - RNA, 18 nt, Human
agggguggggggcgggag

SEQ ID NO: 895874 - RNA, 20 nt, Human
agggguggggggcgggaggc

SEQ ID NO: 895875 - RNA, 23 nt, Human
agggugcuaggagaggaggcagc

SEQ ID NO: 895876 - RNA, 21 nt, Human
auaaaacacaaccccaacaca

SEQ ID NO: 895877 - RNA, 25 nt, Human
augaacuauaacccccucccacccc

SEQ ID NO: 895878 - RNA, 23 nt, Human
augcugcgaucccgacucauggg

SEQ ID NO: 895879 - RNA, 19 nt, Human
auuauccuuuuuuuuccug

SEQ ID NO: 895880 - RNA, 23 nt, Human
caccauuuguuaaaauaaaggaa

SEQ ID NO: 895881 - RNA, 23 nt, Human
caccccaucccccaaugccuaaa

SEQ ID NO: 895882 - RNA, 22 nt, Human
cacugggggggagucacagcug

SEQ ID NO: 895883 - RNA, 24 nt, Human
caggagcuggagggguggggggcg

SEQ ID NO: 895884 - RNA, 23 nt, Human
cagggcagggaucugguuccauc

SEQ ID NO: 895885 - RNA, 22 nt, Human
cagggcccgggcuugccccccg

SEQ ID NO: 895886 - RNA, 21 nt, Human
cauauagaauaaaggagaguu

SEQ ID NO: 895887 - RNA, 20 nt, Human
ccaggcucagggcccgggcu

SEQ ID NO: 895888 - RNA, 25 nt, Human
cccucccaccccaucccccaaugcc

SEQ ID NO: 895889 - RNA, 18 nt, Human
cccuggugcuuacccugu

SEQ ID NO: 895890 - RNA, 23 nt, Human
ccucccaccccaucccccaaugc

SEQ ID NO: 895891 - RNA, 24 nt, Human
ccucccaccccaucccccaaugcc

SEQ ID NO: 895892 - RNA, 19 nt, Human
ccucuuaaggaaggacagg

SEQ ID NO: 895893 - RNA, 24 nt, Human
cggcaagggcucagggcaagaggg

SEQ ID NO: 895894 - RNA, 23 nt, Human
cggcuggugggggaugcugcgau

SEQ ID NO: 895895 - RNA, 19 nt, Human
cgggagagcgaagugugug

SEQ ID NO: 895896 - RNA, 24 nt, Human
cgggaggggcguccagcugcggcg

SEQ ID NO: 895897 - RNA, 22 nt, Human
cuacaggagcugcuuuuccucu

SEQ ID NO: 895898 - RNA, 24 nt, Human
cuaguacucacacucauacuauuu

SEQ ID NO: 895899 - RNA, 25 nt, Human
cuauaacugaagcaaguuuagggaa

SEQ ID NO: 895900 - RNA, 19 nt, Human
cucaugggagagcacagcc

SEQ ID NO: 895901 - RNA, 18 nt, Human
cuuucaggauagcuggac

SEQ ID NO: 895902 - RNA, 19 nt, Human
gaagaaggaaauuaaaagg

SEQ ID NO: 895903 - RNA, 19 nt, Human
gaagggaucgacagggaag

SEQ ID NO: 895904 - RNA, 18 nt, Human
gaaggugaacacagccuc

SEQ ID NO: 895905 - RNA, 19 nt, Human
gacuccgcucucccggcug

SEQ ID NO: 895906 - RNA, 18 nt, Human
gagcggaggaggagcagg

SEQ ID NO: 895907 - RNA, 24 nt, Human
gaggaggagcaggagcuggagggg

SEQ ID NO: 895908 - RNA, 22 nt, Human
gauagcuggacagucagggcag

SEQ ID NO: 895909 - RNA, 23 nt, Human
gcaaacagccauuauuguuuugc

SEQ ID NO: 895910 - RNA, 18 nt, Human
gcagggaucugguuccau

SEQ ID NO: 895911 - RNA, 24 nt, Human
gcgaagcgccggcagugcugcccg

SEQ ID NO: 895912 - RNA, 18 nt, Human
gcggaggaggagcaggag

SEQ ID NO: 895913 - RNA, 23 nt, Human
gcucgcucucucggcacgucauu

SEQ ID NO: 895914 - RNA, 22 nt, Human
ggaggaggagcaggagcuggag

SEQ ID NO: 895915 - RNA, 23 nt, Human
ggaucgacagggaaggugaacac

SEQ ID NO: 895916 - RNA, 19 nt, Human
ggcuggugggggaugcugc

SEQ ID NO: 895917 - RNA, 22 nt, Human
gggaaggugaacacagccucug

SEQ ID NO: 895918 - RNA, 19 nt, Human
gggcagggaucugguucca

SEQ ID NO: 895919 - RNA, 20 nt, Human
gggcuugccgggcugcccuc

SEQ ID NO: 895920 - RNA, 20 nt, Human
ggggcugggggucucuccag

SEQ ID NO: 895921 - RNA, 19 nt, Human
uaaaacacaaccccaacac

SEQ ID NO: 895922 - RNA, 21 nt, Human
uaaaacacaaccccaacacaa

SEQ ID NO: 895923 - RNA, 24 nt, Human
uaaaggaagaaggaaauuaaaagg

SEQ ID NO: 895924 - RNA, 22 nt, Human
uaacccccucccaccccauccc

SEQ ID NO: 895925 - RNA, 22 nt, Human
uaaggaaaagagccagaaaaaa

SEQ ID NO: 895926 - RNA, 24 nt, Human
uaaggaaggacaggaaaugauagg

SEQ ID NO: 895927 - RNA, 21 nt, Human
uagaagcagggugcuaggaga

SEQ ID NO: 895928 - RNA, 21 nt, Human
uagagagcugucccgaaaucu

SEQ ID NO: 895929 - RNA, 22 nt, Human
uaggaggagcggacguccggcg

SEQ ID NO: 895930 - RNA, 22 nt, Human
uagguuuccaaaccuaucccuu

SEQ ID NO: 895931 - RNA, 26 nt, Human
ucagggcaagaggggugugagcggcg

SEQ ID NO: 895932 - RNA, 22 nt, Human
ucaugaacuauaacccccuccc

SEQ ID NO: 895933 - RNA, 26 nt, Human
ucaugaacuauaacccccucccaccc

SEQ ID NO: 895934 - RNA, 21 nt, Human
uccaggcucagggcccgggcu

SEQ ID NO: 895935 - RNA, 25 nt, Human
ucccaccccaucccccaaugccuaa

SEQ ID NO: 895936 - RNA, 18 nt, Human
uccgcgggcguccuggcu

SEQ ID NO: 895937 - RNA, 18 nt, Human
ucgagugagggagcgggu

SEQ ID NO: 895938 - RNA, 19 nt, Human
ucgcucgcucucucggcac

SEQ ID NO: 895939 - RNA, 23 nt, Human
ucuauaaaaauccuuauuguccc

SEQ ID NO: 895940 - RNA, 21 nt, Human
ucuccagcggaggcugagagu

SEQ ID NO: 895941 - RNA, 23 nt, Human
ucuccagcggaggcugagagugu

SEQ ID NO: 895942 - RNA, 22 nt, Human
ucuuaaggaaggacaggaaaug

SEQ ID NO: 895943 - RNA, 23 nt, Human
ucuugcgcgcugaaugguggggc

SEQ ID NO: 895944 - RNA, 23 nt, Human
ugaagcaaguuuagggaacucug

SEQ ID NO: 895945 - RNA, 24 nt, Human
ugacugccuccuuuuuauuuccau

SEQ ID NO: 895946 - RNA, 19 nt, Human
ugauuuguagguaauccuc

SEQ ID NO: 895947 - RNA, 22 nt, Human
ugcggcgccgcgcugcaccggc

SEQ ID NO: 895948 - RNA, 20 nt, Human
ugcguagaagcagggugcua

SEQ ID NO: 895949 - RNA, 20 nt, Human
ugcuuucuacaggagcugcu

SEQ ID NO: 895950 - RNA, 22 nt, Human
uggggagcggaggaggagcagg

SEQ ID NO: 895951 - RNA, 22 nt, Human
ugucccgaaaucugcacugggg

SEQ ID NO: 895952 - RNA, 21 nt, Human
ugucccggaagggcugcggug

SEQ ID NO: 895953 - RNA, 21 nt, Human
ugugugcgcgcuugugucugu

SEQ ID NO: 895954 - RNA, 18 nt, Human
ugugugcggagccugugu

SEQ ID NO: 895955 - RNA, 22 nt, Human
ugugugugugcggagccugugu

SEQ ID NO: 895956 - RNA, 20 nt, Human
uguuugcaccacauacguag

SEQ ID NO: 895957 - RNA, 23 nt, Human
uuauauuauccuuuuuuuuccug

SEQ ID NO: 895958 - RNA, 23 nt, Human
uuccugcugauuugcauguucuu

SEQ ID NO: 895959 - RNA, 18 nt, Human
uugauagaacacaaccaa

SEQ ID NO: 895960 - RNA, 22 nt, Human
uugccgggcugcccucuuccgc

SEQ ID NO: 895961 - RNA, 22 nt, Human
uugcuuucuacaggagcugcuu

SEQ ID NO: 895962 - RNA, 26 nt, Human
uuuaaaaaauugcacuuguuuaugga

SEQ ID NO: 895963 - RNA, 24 nt, Human
uuuauaaucugauccacuuucagg

SEQ ID NO: 895964 - RNA, 22 nt, Human
aagugccaguggccacuccacc

SEQ ID NO: 895965 - RNA, 21 nt, Human
accuccgccaggcccugccca

SEQ ID NO: 895966 - RNA, 19 nt, Human
accugcucaacuucucccu

SEQ ID NO: 895967 - RNA, 22 nt, Human
agaacucaggggcagcggccuc

SEQ ID NO: 895968 - RNA, 19 nt, Human
agcagggagggggcggggc

SEQ ID NO: 895969 - RNA, 22 nt, Human
agccagcgguguggcugcggcc

SEQ ID NO: 895970 - RNA, 20 nt, Human
agcggccucugggacggggc

SEQ ID NO: 895971 - RNA, 18 nt, Human
agcugggagcagggaggg

SEQ ID NO: 895972 - RNA, 19 nt, Human
aggaggaagggaugaccuc

SEQ ID NO: 895973 - RNA, 19 nt, Human
agggagggggcggggcggg

SEQ ID NO: 895974 - RNA, 18 nt, Human
agggggcggggcgggugg

SEQ ID NO: 895975 - RNA, 23 nt, Human
augcggagccagcgguguugcgc

SEQ ID NO: 895976 - RNA, 21 nt, Human
cacagugucagaacucagggg

SEQ ID NO: 895977 - RNA, 22 nt, Human
cacccaccuucccaaacacaca

SEQ ID NO: 895978 - RNA, 23 nt, Human
cacccaccuucccaaacacacag

SEQ ID NO: 895979 - RNA, 19 nt, Human
caccuccgccaggcccugc

SEQ ID NO: 895980 - RNA, 22 nt, Human
cagaggcucucccuccuggucu

SEQ ID NO: 895981 - RNA, 18 nt, Human
cagcgguguggcugcggc

SEQ ID NO: 895982 - RNA, 22 nt, Human
caggggcagcggccucugggac

SEQ ID NO: 895983 - RNA, 21 nt, Human
cccagccucacccaccuuccc

SEQ ID NO: 895984 - RNA, 24 nt, Human
cccagucccggccccgcccccggc

SEQ ID NO: 895985 - RNA, 21 nt, Human
cccccagucccggccccgccc

SEQ ID NO: 895986 - RNA, 21 nt, Human
ccccgcccaggccccgccccc

SEQ ID NO: 895987 - RNA, 22 nt, Human
ccccgcccccagucccgccccc

SEQ ID NO: 895988 - RNA, 18 nt, Human
cccgcccccggcccaggc

SEQ ID NO: 895989 - RNA, 24 nt, Human
cccggccccgcccccggcccaggc

SEQ ID NO: 895990 - RNA, 19 nt, Human
ccucacccaccuucccaaa

SEQ ID NO: 895991 - RNA, 24 nt, Human
cgcccccagucccgcccccagucc

SEQ ID NO: 895992 - RNA, 21 nt, Human
cuccccuaguugauaccugcu

SEQ ID NO: 895993 - RNA, 25 nt, Human
cuggagacccucucuccuccccuag

SEQ ID NO: 895994 - RNA, 21 nt, Human
cugggagcagggagggggcgg

SEQ ID NO: 895995 - RNA, 23 nt, Human
gagagcugggagcagggaggggg

SEQ ID NO: 895996 - RNA, 22 nt, Human
gagcagggagggggcggggcgg

SEQ ID NO: 895997 - RNA, 18 nt, Human
ggagagagagcugggagc

SEQ ID NO: 895998 - RNA, 21 nt, Human
ggagcagggagggggcggggc

SEQ ID NO: 895999 - RNA, 18 nt, Human
ggcugcggccccgcccag

SEQ ID NO: 896000 - RNA, 22 nt, Human
uccaggagagagagcugggagc

SEQ ID NO: 896001 - RNA, 24 nt, Human
uccccggaccugcaggcuucagac

SEQ ID NO: 896002 - RNA, 20 nt, Human
ucccgaaccuccuccccgga

SEQ ID NO: 896003 - RNA, 21 nt, Human
ucccggccccgcccccggccc

SEQ ID NO: 896004 - RNA, 22 nt, Human
ucccugucuguuuccaggagag

SEQ ID NO: 896005 - RNA, 22 nt, Human
uccgccaggcccugcccagccu

SEQ ID NO: 896006 - RNA, 21 nt, Human
ugcccagccucacccaccuuc

SEQ ID NO: 896007 - RNA, 22 nt, Human
ugcucaacuucucccugucugu

SEQ ID NO: 896008 - RNA, 18 nt, Human
ugggagcagggagggggc

SEQ ID NO: 896009 - RNA, 22 nt, Human
ugggagcagggagggggcgggg

SEQ ID NO: 896010 - RNA, 21 nt, Human
uggggcuccucggugggcauc

SEQ ID NO: 896011 - RNA, 23 nt, Human
aaaaaaacagacaaacaaacaaa

SEQ ID NO: 896012 - RNA, 25 nt, Human
aaaaaguagggauggccacaccccc

SEQ ID NO: 896013 - RNA, 26 nt, Human
aaacagacaaacaaacaaaaacucuu

SEQ ID NO: 896014 - RNA, 24 nt, Human
aaacagacaaacaaacaacgaguc

SEQ ID NO: 896015 - RNA, 18 nt, Human
aaagaguucaaagacaga

SEQ ID NO: 896016 - RNA, 24 nt, Human
aacaaaaacucuucuugcuaugga

SEQ ID NO: 896017 - RNA, 20 nt, Human
aacacacagccacuuugcuc

SEQ ID NO: 896018 - RNA, 19 nt, Human
aacagacaaacaaacaaaa

SEQ ID NO: 896019 - RNA, 20 nt, Human
aacuugcagaaccuuucccc

SEQ ID NO: 896020 - RNA, 23 nt, Human
aagaaaacaaggugaaaggagaa

SEQ ID NO: 896021 - RNA, 22 nt, Human
aaggggcagcugagccacucug

SEQ ID NO: 896022 - RNA, 21 nt, Human
aaucaucacucugcugguacc

SEQ ID NO: 896023 - RNA, 18 nt, Human
acacacgaacacacaaga

SEQ ID NO: 896024 - RNA, 20 nt, Human
acagaaauucuucugcccuu

SEQ ID NO: 896025 - RNA, 24 nt, Human
acagaccugguguagcgcuggcca

SEQ ID NO: 896026 - RNA, 21 nt, Human
accagaaagaaacaauuacaa

SEQ ID NO: 896027 - RNA, 20 nt, Human
acccuguuuaaaaaaagccc

SEQ ID NO: 896028 - RNA, 22 nt, Human
accuggguguaggcaggacaag

SEQ ID NO: 896029 - RNA, 24 nt, Human
acgaacacacaagaaucuucccac

SEQ ID NO: 896030 - RNA, 18 nt, Human
agaaauucuucugcccuu

SEQ ID NO: 896031 - RNA, 26 nt, Human
agaagacauuaaagacgguccacagg

SEQ ID NO: 896032 - RNA, 18 nt, Human
agacaaauguaugagucu

SEQ ID NO: 896033 - RNA, 18 nt, Human
agacauggacuacccagu

SEQ ID NO: 896034 - RNA, 18 nt, Human
agagagcaauuucuuuug

SEQ ID NO: 896035 - RNA, 22 nt, Human
agcaaagaacgaugcuguacac

SEQ ID NO: 896036 - RNA, 21 nt, Human
agccgggccauuaggaaccug

SEQ ID NO: 896037 - RNA, 22 nt, Human
agccugaaguuuucggauuuag

SEQ ID NO: 896038 - RNA, 21 nt, Human
agcuggagcuuuuccugagga

SEQ ID NO: 896039 - RNA, 20 nt, Human
agcugggaggcgaguccugu

SEQ ID NO: 896040 - RNA, 19 nt, Human
agcugguuuuucaaagggc

SEQ ID NO: 896041 - RNA, 21 nt, Human
aggagacagcaaacagccuuu

SEQ ID NO: 896042 - RNA, 23 nt, Human
aggagacagcaaacagccuuuga

SEQ ID NO: 896043 - RNA, 21 nt, Human
aggcagaagaaggugccgugg

SEQ ID NO: 896044 - RNA, 18 nt, Human
aggcaggacaagcaccug

SEQ ID NO: 896045 - RNA, 22 nt, Human
aggggaggagguugucaggagc

SEQ ID NO: 896046 - RNA, 22 nt, Human
aggggaggagguugucaggagc

SEQ ID NO: 896047 - RNA, 22 nt, Human
aggggaggggagaggaacagau

SEQ ID NO: 896048 - RNA, 18 nt, Human
aggugcuucuggcuccag

SEQ ID NO: 896049 - RNA, 24 nt, Human
aguggcugaccuaaugucuccacg

SEQ ID NO: 896050 - RNA, 18 nt, Human
aucccacccucucccuca

SEQ ID NO: 896051 - RNA, 22 nt, Human
aucuggaggaaagcagcucaga

SEQ ID NO: 896052 - RNA, 21 nt, Human
aucugugauaugugucuccuu

SEQ ID NO: 896053 - RNA, 21 nt, Human
augaccggcgcccuagucgcc

SEQ ID NO: 896054 - RNA, 19 nt, Human
caaaaucaucacucugcug

SEQ ID NO: 896055 - RNA, 24 nt, Human
caaaaucaucacucugcugguacc

SEQ ID NO: 896056 - RNA, 21 nt, Human
caaacaaaaacucuucuugcu

SEQ ID NO: 896057 - RNA, 26 nt, Human
caaacaaaaacucuucuugcuaugga

SEQ ID NO: 896058 - RNA, 23 nt, Human
caaggugaaaggagaauaaauca

SEQ ID NO: 896059 - RNA, 25 nt, Human
caccccccauuuccaucaccacugg

SEQ ID NO: 896060 - RNA, 19 nt, Human
cagcaaacagccuuugacu

SEQ ID NO: 896061 - RNA, 18 nt, Human
cagccgggccauuaggaa

SEQ ID NO: 896062 - RNA, 19 nt, Human
cagccgggccauuaggaac

SEQ ID NO: 896063 - RNA, 20 nt, Human
cagcugguuuuucaaagggc

SEQ ID NO: 896064 - RNA, 18 nt, Human
caucccacccucucccuc

SEQ ID NO: 896065 - RNA, 27 nt, Human
caucccacccucucccucaaaauacaa

SEQ ID NO: 896066 - RNA, 22 nt, Human
caugaccggcgcccuagucgcc

SEQ ID NO: 896067 - RNA, 22 nt, Human
caugaccggcgcccuagucgcc

SEQ ID NO: 896068 - RNA, 18 nt, Human
ccacagccuccaucuugg

SEQ ID NO: 896069 - RNA, 19 nt, Human
ccagaaagaaacaauuaca

SEQ ID NO: 896070 - RNA, 20 nt, Human
ccagcccuccaggccuuggc

SEQ ID NO: 896071 - RNA, 24 nt, Human
ccauacauucaacucugucgugaa

SEQ ID NO: 896072 - RNA, 18 nt, Human
cccaucccacccucuccc

SEQ ID NO: 896073 - RNA, 21 nt, Human
cccaucccacccucucccuca

SEQ ID NO: 896074 - RNA, 20 nt, Human
ccccaucccacccucucccu

SEQ ID NO: 896075 - RNA, 24 nt, Human
ccccccauuuccauugagguaguc

SEQ ID NO: 896076 - RNA, 19 nt, Human
cccgcgagcucccggccgc

SEQ ID NO: 896077 - RNA, 19 nt, Human
cccuuccaaccuacccagg

SEQ ID NO: 896078 - RNA, 18 nt, Human
cccuuccaggugcuucug

SEQ ID NO: 896079 - RNA, 18 nt, Human
ccgcgagcucccggccgc

SEQ ID NO: 896080 - RNA, 18 nt, Human
ccgcgagcucccggccgc

SEQ ID NO: 896081 - RNA, 20 nt, Human
ccgcgccccuccgcgccgcc

SEQ ID NO: 896082 - RNA, 21 nt, Human
ccuacuacccuuugaagaaaa

SEQ ID NO: 896083 - RNA, 19 nt, Human
ccuccaggccuuggcuggc

SEQ ID NO: 896084 - RNA, 18 nt, Human
ccugaggagggcgccugg

SEQ ID NO: 896085 - RNA, 19 nt, Human
ccuguccugcccacccaag

SEQ ID NO: 896086 - RNA, 19 nt, Human
ccuucaguauuggaggaac

SEQ ID NO: 896087 - RNA, 22 nt, Human
ccuugcccuacuacccuuugaa

SEQ ID NO: 896088 - RNA, 21 nt, Human
ccuugggcuuuguguccuggg

SEQ ID NO: 896089 - RNA, 22 nt, Human
cgaacacacaagaaucuuccca

SEQ ID NO: 896090 - RNA, 23 nt, Human
cgaacacacaagaaucuucccac

SEQ ID NO: 896091 - RNA, 23 nt, Human
cgccgcuccgcgccccuccgcgc

SEQ ID NO: 896092 - RNA, 19 nt, Human
cggcaaugaaugggcucuu

SEQ ID NO: 896093 - RNA, 22 nt, Human
cggcauugaggaguaauguucc

SEQ ID NO: 896094 - RNA, 20 nt, Human
cggcucggaacacacagcca

SEQ ID NO: 896095 - RNA, 22 nt, Human
cguaacauuucaccagaaagaa

SEQ ID NO: 896096 - RNA, 19 nt, Human
cgugaaaaacaugcuagcu

SEQ ID NO: 896097 - RNA, 23 nt, Human
cguggcucaauccucaccuccua

SEQ ID NO: 896098 - RNA, 24 nt, Human
cguggcucaauccucaccuccuac

SEQ ID NO: 896099 - RNA, 21 nt, Human
cuacuccacaaauuaacaacu

SEQ ID NO: 896100 - RNA, 22 nt, Human
cuccagcccuccaggccuuggc

SEQ ID NO: 896101 - RNA, 23 nt, Human
cuccgcgccccuccgcgccgccu

SEQ ID NO: 896102 - RNA, 24 nt, Human
cuccgcgccccuccgcgccgccuc

SEQ ID NO: 896103 - RNA, 25 nt, Human
cuccgcgccgcagagagaccuuccu

SEQ ID NO: 896104 - RNA, 24 nt, Human
cuccuaacaacacuuugcgcccuu

SEQ ID NO: 896105 - RNA, 19 nt, Human
cuccuggguagcuuuacua

SEQ ID NO: 896106 - RNA, 22 nt, Human
cucucuggcuuuucccuccaga

SEQ ID NO: 896107 - RNA, 22 nt, Human
cucuggagagaaaaggagaacu

SEQ ID NO: 896108 - RNA, 20 nt, Human
cucugggccccgagccgccc

SEQ ID NO: 896109 - RNA, 25 nt, Human
cucugggccccgagccgcccggcuc

SEQ ID NO: 896110 - RNA, 24 nt, Human
cucugggccuugggcuuugugucc

SEQ ID NO: 896111 - RNA, 18 nt, Human
cugggccccgagccgccc

SEQ ID NO: 896112 - RNA, 18 nt, Human
cugggccccgagccgccc

SEQ ID NO: 896113 - RNA, 18 nt, Human
cugggccccgagccgccc

SEQ ID NO: 896114 - RNA, 22 nt, Human
cuuagccccaucccacccucuc

SEQ ID NO: 896115 - RNA, 18 nt, Human
cuugcagaaccuuucccc

SEQ ID NO: 896116 - RNA, 22 nt, Human
cuugggcuuuguguccuggguc

SEQ ID NO: 896117 - RNA, 26 nt, Human
gaaagaaacaauuacaaucagacaug

SEQ ID NO: 896118 - RNA, 24 nt, Human
gaaauaaacagauacacacgaaca

SEQ ID NO: 896119 - RNA, 21 nt, Human
gaacacacagccacuuugcuc

SEQ ID NO: 896120 - RNA, 24 nt, Human
gaacacacagccacuuugcucuga

SEQ ID NO: 896121 - RNA, 21 nt, Human
gacauguucuugccucaucag

SEQ ID NO: 896122 - RNA, 19 nt, Human
gagcucccggccgcggcuc

SEQ ID NO: 896123 - RNA, 19 nt, Human
gagcucccggccgcggcuc

SEQ ID NO: 896124 - RNA, 18 nt, Human
gaggaaagcagcucagag

SEQ ID NO: 896125 - RNA, 21 nt, Human
gcaaugcaacacauucacuuu

SEQ ID NO: 896126 - RNA, 18 nt, Human
gcagaagacauuaaagac

SEQ ID NO: 896127 - RNA, 20 nt, Human
gcagcugagccacucugggc

SEQ ID NO: 896128 - RNA, 23 nt, Human
gccccaucccacccucucccuca

SEQ ID NO: 896129 - RNA, 18 nt, Human
gcucucggcaaugaaugg

SEQ ID NO: 896130 - RNA, 20 nt, Human
gcugaaguaaggggcagcug

SEQ ID NO: 896131 - RNA, 18 nt, Human
ggacguggcucaauccuc

SEQ ID NO: 896132 - RNA, 22 nt, Human
ggagcuuuuccugaggaacauu

SEQ ID NO: 896133 - RNA, 24 nt, Human
ggagugggaaggaggaaggugggc

SEQ ID NO: 896134 - RNA, 21 nt, Human
ggcagguagugagaggucaag

SEQ ID NO: 896135 - RNA, 21 nt, Human
ggcuccagcccuccaggccuu

SEQ ID NO: 896136 - RNA, 21 nt, Human
gggcagcugagccacucuggg

SEQ ID NO: 896137 - RNA, 22 nt, Human
gggcagcugagccacucugggc

SEQ ID NO: 896138 - RNA, 22 nt, Human
gggcagguagugagaggucaag

SEQ ID NO: 896139 - RNA, 18 nt, Human
gggcccuuccaaccuacc

SEQ ID NO: 896140 - RNA, 21 nt, Human
guaacauuucaccagaaagaa

SEQ ID NO: 896141 - RNA, 22 nt, Human
guaggcaggacaagcaccugaa

SEQ ID NO: 896142 - RNA, 20 nt, Human
guagggauggccacaccccc

SEQ ID NO: 896143 - RNA, 20 nt, Human
guccugggucccugaggaaa

SEQ ID NO: 896144 - RNA, 18 nt, Human
gugaaaaacaugcuagcu

SEQ ID NO: 896145 - RNA, 18 nt, Human
guggugcagggguaaggg

SEQ ID NO: 896146 - RNA, 24 nt, Human
guguaggcaggacaagcaccugaa

SEQ ID NO: 896147 - RNA, 24 nt, Human
guuuaaagccccccuucccuucca

SEQ ID NO: 896148 - RNA, 27 nt, Human
uaaaaaaacagacaaacaaacaaaaac

SEQ ID NO: 896149 - RNA, 24 nt, Human
uaaacagauacacacgaacacaca

SEQ ID NO: 896150 - RNA, 19 nt, Human
uaaagccccccuucccuuc

SEQ ID NO: 896151 - RNA, 23 nt, Human
uaaagccccccuucccuuccagg

SEQ ID NO: 896152 - RNA, 23 nt, Human
uaaauaggcagaagaaggugccg

SEQ ID NO: 896153 - RNA, 21 nt, Human
uaacaacacuuugcgcccuua

SEQ ID NO: 896154 - RNA, 23 nt, Human
uaaggaaacuagguagcuggggg

SEQ ID NO: 896155 - RNA, 21 nt, Human
uaaguggucugcuugccacac

SEQ ID NO: 896156 - RNA, 19 nt, Human
uacaauggcaacuugcaga

SEQ ID NO: 896157 - RNA, 18 nt, Human
uacccuguuuaaaaaaag

SEQ ID NO: 896158 - RNA, 26 nt, Human
uagaaauaaacagauacacacgaaca

SEQ ID NO: 896159 - RNA, 20 nt, Human
uagccccaucccacccucuc

SEQ ID NO: 896160 - RNA, 19 nt, Human
uagcuacacuccuaccuuc

SEQ ID NO: 896161 - RNA, 21 nt, Human
uagcuacacuccuaccuucuc

SEQ ID NO: 896162 - RNA, 19 nt, Human
uaggcaggacaagcaccug

SEQ ID NO: 896163 - RNA, 19 nt, Human
uauauagaaaaaugagguu

SEQ ID NO: 896164 - RNA, 18 nt, Human
ucccugaggaaaacuggu

SEQ ID NO: 896165 - RNA, 19 nt, Human
ucccugaggaaaacugguc

SEQ ID NO: 896166 - RNA, 19 nt, Human
ucccugaggaaaacugguc

SEQ ID NO: 896167 - RNA, 23 nt, Human
uccgcgccccuccgcgccgccuc

SEQ ID NO: 896168 - RNA, 22 nt, Human
uccgcgccgcuccgcgccccuc

SEQ ID NO: 896169 - RNA, 18 nt, Human
uccugcccacccaagacg

SEQ ID NO: 896170 - RNA, 19 nt, Human
uccuggguagcuuuacuag

SEQ ID NO: 896171 - RNA, 22 nt, Human
uccuggguagcuuuacuagguu

SEQ ID NO: 896172 - RNA, 21 nt, Human
ucuccuaacaacacuuugcgc

SEQ ID NO: 896173 - RNA, 23 nt, Human
ucuccuaacaacacuuugcgccc

SEQ ID NO: 896174 - RNA, 21 nt, Human
ucuuagccccaucccacccuc

SEQ ID NO: 896175 - RNA, 21 nt, Human
ucuuccuucucagagcaacug

SEQ ID NO: 896176 - RNA, 23 nt, Human
ugaaaaacaugcuagcuggagcu

SEQ ID NO: 896177 - RNA, 20 nt, Human
ugaagaaaacaaggugaaag

SEQ ID NO: 896178 - RNA, 23 nt, Human
ugaccuaaugucuccacgcugcu

SEQ ID NO: 896179 - RNA, 24 nt, Human
ugagaggucaaggaguccaggcca

SEQ ID NO: 896180 - RNA, 22 nt, Human
ugagauucugcagggcucucgg

SEQ ID NO: 896181 - RNA, 22 nt, Human
ugaggaacaugucucuuccuuc

SEQ ID NO: 896182 - RNA, 20 nt, Human
ugcagggguaaggggggcag

SEQ ID NO: 896183 - RNA, 24 nt, Human
ugcauucacacaaaagcaugugca

SEQ ID NO: 896184 - RNA, 20 nt, Human
ugccuaggguccgcgccggg

SEQ ID NO: 896185 - RNA, 20 nt, Human
ugccuaggguccgcgccggg

SEQ ID NO: 896186 - RNA, 18 nt, Human
ugcuagcuacacuccuac

SEQ ID NO: 896187 - RNA, 23 nt, Human
ugcucagcugguuuuucaaaggg

SEQ ID NO: 896188 - RNA, 22 nt, Human
ugcucuguucaauacuacguug

SEQ ID NO: 896189 - RNA, 24 nt, Human
uggaaaaaguagggauggccacac

SEQ ID NO: 896190 - RNA, 23 nt, Human
uggaaggacaccugccuuaaaua

SEQ ID NO: 896191 - RNA, 22 nt, Human
uggaggaaagcagcucagaguc

SEQ ID NO: 896192 - RNA, 18 nt, Human
ugggaaggaggaaggugg

SEQ ID NO: 896193 - RNA, 23 nt, Human
ugggaggcgaguccuguggauca

SEQ ID NO: 896194 - RNA, 22 nt, Human
uggggcagguagugagagguca

SEQ ID NO: 896195 - RNA, 19 nt, Human
ugguagacaaugauggugg

SEQ ID NO: 896196 - RNA, 20 nt, Human
uggugcccuccuggguagcu

SEQ ID NO: 896197 - RNA, 22 nt, Human
uggugcccuccuggguagcuuu

SEQ ID NO: 896198 - RNA, 21 nt, Human
ugguguagcgcuggccaaagu

SEQ ID NO: 896199 - RNA, 21 nt, Human
ugucaggagcccgcgagcucc

SEQ ID NO: 896200 - RNA, 21 nt, Human
ugucaggagcccgcgagcucc

SEQ ID NO: 896201 - RNA, 18 nt, Human
uuaaaaaaacagacaaac

SEQ ID NO: 896202 - RNA, 24 nt, Human
uuaaaaaaagcccacgucauaaaa

SEQ ID NO: 896203 - RNA, 20 nt, Human
uuaaauauggucacugugcc

SEQ ID NO: 896204 - RNA, 18 nt, Human
uuagaaauaaacagauac

SEQ ID NO: 896205 - RNA, 25 nt, Human
uuagccccaucccacccucucccuc

SEQ ID NO: 896206 - RNA, 21 nt, Human
uuaggacuuguuggguggaag

SEQ ID NO: 896207 - RNA, 19 nt, Human
uuccaggugcuucuggcuc

SEQ ID NO: 896208 - RNA, 20 nt, Human
uucccuuccaggugcuucug

SEQ ID NO: 896209 - RNA, 23 nt, Human
uuccgcgccgcuccgcgccccuc

SEQ ID NO: 896210 - RNA, 23 nt, Human
uucugcucagcugguuuuucaaa

SEQ ID NO: 896211 - RNA, 23 nt, Human
uugaggagacagcaaacagccuu

SEQ ID NO: 896212 - RNA, 23 nt, Human
uugcagaaccuuuccccuacucc

SEQ ID NO: 896213 - RNA, 20 nt, Human
uugggcuuuguguccugggu

SEQ ID NO: 896214 - RNA, 24 nt, Human
uuguguccugggucccugaggaaa

SEQ ID NO: 896215 - RNA, 23 nt, Human
uuuuuuggcaauuugcucucuga

SEQ ID NO: 896216 - RNA, 21 nt, Human
aaaacaaaggguauuuccucc

SEQ ID NO: 896217 - RNA, 22 nt, Human
aaaccgaaccuccaugaguuua

SEQ ID NO: 896218 - RNA, 19 nt, Human
aaagcauguuucaaauaua

SEQ ID NO: 896219 - RNA, 22 nt, Human
acacaccuuaaacaaacagaau

SEQ ID NO: 896220 - RNA, 19 nt, Human
acagugacuguuucccaag

SEQ ID NO: 896221 - RNA, 22 nt, Human
acauuuuaacccugaagauaag

SEQ ID NO: 896222 - RNA, 19 nt, Human
acccugaagauaagaaaaa

SEQ ID NO: 896223 - RNA, 28 nt, Human
acgcagccgcggagacugcggccccucu

SEQ ID NO: 896224 - RNA, 19 nt, Human
agaaugugcauuaacaaaa

SEQ ID NO: 896225 - RNA, 18 nt, Human
agcgauaggcgcugaagg

SEQ ID NO: 896226 - RNA, 19 nt, Human
caacaaccucaccacuucc

SEQ ID NO: 896227 - RNA, 21 nt, Human
caagucggagucauuagcuga

SEQ ID NO: 896228 - RNA, 23 nt, Human
cacacaccuuaaacaaacagaau

SEQ ID NO: 896229 - RNA, 20 nt, Human
cagccgcggagacugcggcc

SEQ ID NO: 896230 - RNA, 19 nt, Human
caggagaaaccgaaccucc

SEQ ID NO: 896231 - RNA, 25 nt, Human
cccacaguccaccagaugaagcauu

SEQ ID NO: 896232 - RNA, 21 nt, Human
ccucucugcgccccaagagcc

SEQ ID NO: 896233 - RNA, 18 nt, Human
ccucuuuuccccuuuucu

SEQ ID NO: 896234 - RNA, 24 nt, Human
ccugaagauaagaaaaauaacugu

SEQ ID NO: 896235 - RNA, 23 nt, Human
cggggaacauggaggggacugca

SEQ ID NO: 896236 - RNA, 20 nt, Human
cuccaugaguuuagcgucug

SEQ ID NO: 896237 - RNA, 21 nt, Human
cugaaggagcaacaaccucac

SEQ ID NO: 896238 - RNA, 22 nt, Human
cugcggccccucucugcgcccc

SEQ ID NO: 896239 - RNA, 23 nt, Human
gccccaagagccagcgauaggcg

SEQ ID NO: 896240 - RNA, 18 nt, Human
ggccccucucugcgcccc

SEQ ID NO: 896241 - RNA, 24 nt, Human
gggaacauggaggggaccgguacc

SEQ ID NO: 896242 - RNA, 22 nt, Human
guuuucccuuuucauuucuuuu

SEQ ID NO: 896243 - RNA, 23 nt, Human
uaaaaacaaaggguauuuccucc

SEQ ID NO: 896244 - RNA, 21 nt, Human
uaucaggagaaaccgaaccuc

SEQ ID NO: 896245 - RNA, 23 nt, Human
uaucucacacaccuuaaacaaac

SEQ ID NO: 896246 - RNA, 22 nt, Human
ucacacaccuuaaacaaacaga

SEQ ID NO: 896247 - RNA, 24 nt, Human
ucugcucccacaguccaccagaug

SEQ ID NO: 896248 - RNA, 21 nt, Human
ugaagauaagaaaaauaacug

SEQ ID NO: 896249 - RNA, 19 nt, Human
ugccucugcucccacaguc

SEQ ID NO: 896250 - RNA, 21 nt, Human
ugcggccccucucugcgcccc

SEQ ID NO: 896251 - RNA, 21 nt, Human
uggcauuauagauuaauuaca

SEQ ID NO: 896252 - RNA, 23 nt, Human
uuaaaaagcauaauaauuugguu

SEQ ID NO: 896253 - RNA, 22 nt, Human
uuauuuccucuuuuccccuuuu

SEQ ID NO: 896254 - RNA, 24 nt, Human
uugcuggauuaacgauuacuguau

SEQ ID NO: 896255 - RNA, 25 nt, Human
uuuuuuuuuuaaaacacaauuacuu

SEQ ID NO: 896256 - RNA, 25 nt, Human
aaaaauauauccccacaagauacag

SEQ ID NO: 896257 - RNA, 20 nt, Human
aaaccaaagaaucggcccua

SEQ ID NO: 896258 - RNA, 24 nt, Human
aaagacacaaacaguaacugcaca

SEQ ID NO: 896259 - RNA, 21 nt, Human
aacagcuccuuucuucaaguu

SEQ ID NO: 896260 - RNA, 25 nt, Human
aagccagucuuauaauugcucccac

SEQ ID NO: 896261 - RNA, 21 nt, Human
acacaaacaguaacugcacaa

SEQ ID NO: 896262 - RNA, 19 nt, Human
accacagcuguggugugcc

SEQ ID NO: 896263 - RNA, 20 nt, Human
accacagcuguggugugccu

SEQ ID NO: 896264 - RNA, 24 nt, Human
acucaaaaaaauuuagcaaaaacc

SEQ ID NO: 896265 - RNA, 23 nt, Human
agaauucuuuagguuccaauauc

SEQ ID NO: 896266 - RNA, 18 nt, Human
agauuuaccuaaaccacc

SEQ ID NO: 896267 - RNA, 23 nt, Human
agcacaauuuauugucaaacauu

SEQ ID NO: 896268 - RNA, 24 nt, Human
aggaugucuuuuuuaaaaagcuuc

SEQ ID NO: 896269 - RNA, 20 nt, Human
aggguaucuuggcuauaaaa

SEQ ID NO: 896270 - RNA, 23 nt, Human
aggguccuuagagaaauggcuga

SEQ ID NO: 896271 - RNA, 21 nt, Human
auaaaaccaaagaaucggccc

SEQ ID NO: 896272 - RNA, 21 nt, Human
auccucugggugaagagccug

SEQ ID NO: 896273 - RNA, 20 nt, Human
aucugauguauuugcuuccg

SEQ ID NO: 896274 - RNA, 23 nt, Human
auggcaauggauugaaauauauc

SEQ ID NO: 896275 - RNA, 22 nt, Human
auuguggucucuaucauuucuc

SEQ ID NO: 896276 - RNA, 19 nt, Human
auuuaccuaaaccaccacc

SEQ ID NO: 896277 - RNA, 25 nt, Human
caaacuacuaaaaucugagggacac

SEQ ID NO: 896278 - RNA, 21 nt, Human
caacccaucuuucucagcagc

SEQ ID NO: 896279 - RNA, 22 nt, Human
caacccaucuuucucagcagcu

SEQ ID NO: 896280 - RNA, 23 nt, Human
caagauacaguaaaucacuucca

SEQ ID NO: 896281 - RNA, 26 nt, Human
caagauacaguaaaucacuuccaaua

SEQ ID NO: 896282 - RNA, 18 nt, Human
caagcucguaaugcccac

SEQ ID NO: 896283 - RNA, 19 nt, Human
cacagcaauaucaaagaca

SEQ ID NO: 896284 - RNA, 23 nt, Human
cacagcaauaucaaagacacaaa

SEQ ID NO: 896285 - RNA, 25 nt, Human
cacagcaauaucaaagacacaaaca

SEQ ID NO: 896286 - RNA, 18 nt, Human
cacaucuucaacagcucc

SEQ ID NO: 896287 - RNA, 26 nt, Human
caccaagaacaaacaguucaagcuuc

SEQ ID NO: 896288 - RNA, 18 nt, Human
caccccaacugcuucugc

SEQ ID NO: 896289 - RNA, 24 nt, Human
cacccucucuacauccagaccaag

SEQ ID NO: 896290 - RNA, 22 nt, Human
cacuaugugaaaugaacaaggu

SEQ ID NO: 896291 - RNA, 20 nt, Human
cauggcccaccccaugagac

SEQ ID NO: 896292 - RNA, 20 nt, Human
cauuuuaucacccucucuac

SEQ ID NO: 896293 - RNA, 18 nt, Human
ccaccccaugagacuuac

SEQ ID NO: 896294 - RNA, 19 nt, Human
ccagaaauaagcgaaaaua

SEQ ID NO: 896295 - RNA, 20 nt, Human
ccagcggaggccugucaucc

SEQ ID NO: 896296 - RNA, 22 nt, Human
cccacaagauacaguaaaucac

SEQ ID NO: 896297 - RNA, 23 nt, Human
cccguaugcccucaccagauuua

SEQ ID NO: 896298 - RNA, 22 nt, Human
cuaauaaaccacuaugugaaau

SEQ ID NO: 896299 - RNA, 22 nt, Human
cucagaagccaauuugaauaga

SEQ ID NO: 896300 - RNA, 21 nt, Human
cucucugcaaggcaccaagaa

SEQ ID NO: 896301 - RNA, 23 nt, Human
cugaugaucuguucaauaucucu

SEQ ID NO: 896302 - RNA, 20 nt, Human
cugcuggauuaagcuaauac

SEQ ID NO: 896303 - RNA, 18 nt, Human
cuucagauugaaccaaag

SEQ ID NO: 896304 - RNA, 20 nt, Human
cuuucacugagauaggcucc

SEQ ID NO: 896305 - RNA, 21 nt, Human
gacacagcaauaucaaagaca

SEQ ID NO: 896306 - RNA, 22 nt, Human
gacauuuucaguaaaucuggaa

SEQ ID NO: 896307 - RNA, 19 nt, Human
gaggauggaaggaaccaug

SEQ ID NO: 896308 - RNA, 18 nt, Human
ggcuguguuuuugaagaa

SEQ ID NO: 896309 - RNA, 21 nt, Human
guaguuucugaugaucuguuc

SEQ ID NO: 896310 - RNA, 23 nt, Human
gucauccuuucauagacauacuc

SEQ ID NO: 896311 - RNA, 18 nt, Human
gugggcuguaccuauuua

SEQ ID NO: 896312 - RNA, 18 nt, Human
guuaaacugagcuguguc

SEQ ID NO: 896313 - RNA, 21 nt, Human
uaaaucuggaauuaagacugg

SEQ ID NO: 896314 - RNA, 23 nt, Human
uaacugcacaauaucaucugcug

SEQ ID NO: 896315 - RNA, 30 nt, Human
uaagacauacaaauauaaacucaaaaaaag

SEQ ID NO: 896316 - RNA, 18 nt, Human
uaaugauacuuacaaacu

SEQ ID NO: 896317 - RNA, 18 nt, Human
uacaguaaaucacuucca

SEQ ID NO: 896318 - RNA, 22 nt, Human
uaccacagcuguggugugccuu

SEQ ID NO: 896319 - RNA, 22 nt, Human
uaccacagcuguggugugccuu

SEQ ID NO: 896320 - RNA, 20 nt, Human
uaucacccucucuacaucca

SEQ ID NO: 896321 - RNA, 21 nt, Human
uauucagucuuuuaccaagcu

SEQ ID NO: 896322 - RNA, 19 nt, Human
ucaaacauucuauaacugg

SEQ ID NO: 896323 - RNA, 21 nt, Human
ucaaauggacucagaagccaa

SEQ ID NO: 896324 - RNA, 21 nt, Human
ucagcagcugauuuccaauau

SEQ ID NO: 896325 - RNA, 21 nt, Human
uccaauauuaucuucuuugau

SEQ ID NO: 896326 - RNA, 21 nt, Human
ucccacaagacuuuaucaaca

SEQ ID NO: 896327 - RNA, 23 nt, Human
ucccacaagacuuuaucaacagg

SEQ ID NO: 896328 - RNA, 18 nt, Human
ucccguaugcccucacca

SEQ ID NO: 896329 - RNA, 21 nt, Human
ucuacauccagaccaagcccu

SEQ ID NO: 896330 - RNA, 21 nt, Human
ucuaucauuucucaugaaaug

SEQ ID NO: 896331 - RNA, 18 nt, Human
ucucagcagcugauuucc

SEQ ID NO: 896332 - RNA, 18 nt, Human
ucucaugaaauggaauca

SEQ ID NO: 896333 - RNA, 21 nt, Human
ucucuuggcauuuuaucaccc

SEQ ID NO: 896334 - RNA, 24 nt, Human
ucugaucaacuuuggcuccuuuuu

SEQ ID NO: 896335 - RNA, 25 nt, Human
ucugaucaacuuuggcuccuuuuuu

SEQ ID NO: 896336 - RNA, 23 nt, Human
ucuuucuucuuuccagauccucu

SEQ ID NO: 896337 - RNA, 24 nt, Human
ucuuugauuugcuguuuguaagcc

SEQ ID NO: 896338 - RNA, 18 nt, Human
ucuuuuucuaccuaccac

SEQ ID NO: 896339 - RNA, 20 nt, Human
ugaagaauucucauaaacua

SEQ ID NO: 896340 - RNA, 18 nt, Human
ugaagagccuguauggca

SEQ ID NO: 896341 - RNA, 22 nt, Human
ugaagaguagaauuuguuaaaa

SEQ ID NO: 896342 - RNA, 20 nt, Human
ugaucuaguaggucuuccuu

SEQ ID NO: 896343 - RNA, 23 nt, Human
ugcaaggcaccaagaacaaacag

SEQ ID NO: 896344 - RNA, 21 nt, Human
ugcauuuccagcggaggccug

SEQ ID NO: 896345 - RNA, 22 nt, Human
uggaaaucacaugguagaaguu

SEQ ID NO: 896346 - RNA, 21 nt, Human
uggcaaagugagccaacucaa

SEQ ID NO: 896347 - RNA, 22 nt, Human
uguacagcacaauuuauuguca

SEQ ID NO: 896348 - RNA, 18 nt, Human
ugucaaagaucaaaggug

SEQ ID NO: 896349 - RNA, 26 nt, Human
ugucauucgguuaaacugagcugugu

SEQ ID NO: 896350 - RNA, 22 nt, Human
ugugucguucagcgugcacacg

SEQ ID NO: 896351 - RNA, 20 nt, Human
uuacaaaguuggcuuuucag

SEQ ID NO: 896352 - RNA, 26 nt, Human
uuagagaaauggcugauucuaagucu

SEQ ID NO: 896353 - RNA, 19 nt, Human
uuccagaaauaagcgaaaa

SEQ ID NO: 896354 - RNA, 24 nt, Human
uuuagcaaaaaccucaucuuuaau

SEQ ID NO: 896355 - RNA, 22 nt, Human
uuucucagcagcugauuuccaa

SEQ ID NO: 896356 - RNA, 19 nt, Human
uuucucaggguaaaauucc

SEQ ID NO: 896357 - RNA, 22 nt, Human
uuuggaggauggaaggaaccau

SEQ ID NO: 896358 - RNA, 18 nt, Human
uuuguaagccuccucugc

SEQ ID NO: 896359 - RNA, 18 nt, Human
uuuuuuuuuuuuuuucug

SEQ ID NO: 896360 - RNA, 19 nt, Human
aagcagccagggccuggau

SEQ ID NO: 896361 - RNA, 20 nt, Human
aagcagccagggccuggaug

SEQ ID NO: 896362 - RNA, 21 nt, Human
aagcagccagggccuggaugu

SEQ ID NO: 896363 - RNA, 22 nt, Human
accccugaggcgcagaggcaag

SEQ ID NO: 896364 - RNA, 18 nt, Human
agaugacuuccauacccc

SEQ ID NO: 896365 - RNA, 23 nt, Human
agccagggccuggauguuaagga

SEQ ID NO: 896366 - RNA, 24 nt, Human
aggaggcuguugagggggagagug

SEQ ID NO: 896367 - RNA, 19 nt, Human
aggcaaguaacagugccag

SEQ ID NO: 896368 - RNA, 18 nt, Human
aggggaguggucagggca

SEQ ID NO: 896369 - RNA, 18 nt, Human
agugggagaggaagaaca

SEQ ID NO: 896370 - RNA, 21 nt, Human
cagaaggggaccccugaggcg

SEQ ID NO: 896371 - RNA, 19 nt, Human
ccagggccuggauguuaag

SEQ ID NO: 896372 - RNA, 19 nt, Human
ccaggggaguggucagggc

SEQ ID NO: 896373 - RNA, 21 nt, Human
ccauaccccacucuuccuugc

SEQ ID NO: 896374 - RNA, 21 nt, Human
ccccugaggcgcagaggcaag

SEQ ID NO: 896375 - RNA, 21 nt, Human
cugacuuuuauuuuccugcag

SEQ ID NO: 896376 - RNA, 20 nt, Human
cugagcccagaggcagggcc

SEQ ID NO: 896377 - RNA, 18 nt, Human
gaagcagccagggccugg

SEQ ID NO: 896378 - RNA, 18 nt, Human
gaagccagcggugcagaa

SEQ ID NO: 896379 - RNA, 18 nt, Human
gcugaaacucagaauuua

SEQ ID NO: 896380 - RNA, 25 nt, Human
uaaacagugaagggacagaugacuu

SEQ ID NO: 896381 - RNA, 24 nt, Human
uaacagugccaggggaguggucag

SEQ ID NO: 896382 - RNA, 20 nt, Human
uagaaaaaggcugacuuuua

SEQ ID NO: 896383 - RNA, 20 nt, Human
ucaguccauggauuugggcc

SEQ ID NO: 896384 - RNA, 18 nt, Human
ucagugggagaggaagaa

SEQ ID NO: 896385 - RNA, 19 nt, Human
ucagugggagaggaagaac

SEQ ID NO: 896386 - RNA, 24 nt, Human
uccaccuucuuggaguggaagcca

SEQ ID NO: 896387 - RNA, 20 nt, Human
uccauggauuugggccucug

SEQ ID NO: 896388 - RNA, 23 nt, Human
ucuggcaugaagcagccagggcc

SEQ ID NO: 896389 - RNA, 24 nt, Human
ucuggcaugaagcagccagggccu

SEQ ID NO: 896390 - RNA, 23 nt, Human
ugaacuugcagacccugguccac

SEQ ID NO: 896391 - RNA, 19 nt, Human
ugacuuccauaccccacuc

SEQ ID NO: 896392 - RNA, 23 nt, Human
ugacuuccauaccccacucuucc

SEQ ID NO: 896393 - RNA, 20 nt, Human
ugacuuuuauuuuccugcag

SEQ ID NO: 896394 - RNA, 22 nt, Human
ugcagaaggggaccccugaggc

SEQ ID NO: 896395 - RNA, 19 nt, Human
ugccaggggaguggucagg

SEQ ID NO: 896396 - RNA, 23 nt, Human
uggaagccagcggugcagaaggg

SEQ ID NO: 896397 - RNA, 19 nt, Human
uggcaugaagcagccaggc

SEQ ID NO: 896398 - RNA, 19 nt, Human
uggcaugaagcagccaggg

SEQ ID NO: 896399 - RNA, 20 nt, Human
uggcaugaagcagccagggc

SEQ ID NO: 896400 - RNA, 20 nt, Human
uggcugaaacucagaauuua

SEQ ID NO: 896401 - RNA, 26 nt, Human
ugggccucuggcaugaagcagccagg

SEQ ID NO: 896402 - RNA, 24 nt, Human
uggugagaaguggaccuuggaguu

SEQ ID NO: 896403 - RNA, 18 nt, Human
uuccuucucaggaggcug

SEQ ID NO: 896404 - RNA, 19 nt, Human
uuccuugcuggugagaagu

SEQ ID NO: 896405 - RNA, 21 nt, Human
aaauaaaacacaagaaaucaa

SEQ ID NO: 896406 - RNA, 20 nt, Human
aacauuuaacaucccccccu

SEQ ID NO: 896407 - RNA, 18 nt, Human
aacauuuggcaaauaaaa

SEQ ID NO: 896408 - RNA, 18 nt, Human
accccagagauuuccuca

SEQ ID NO: 896409 - RNA, 18 nt, Human
agaaagagagggagcgag

SEQ ID NO: 896410 - RNA, 20 nt, Human
agagaaagagagggagcgag

SEQ ID NO: 896411 - RNA, 19 nt, Human
agagaaucacaacgucccc

SEQ ID NO: 896412 - RNA, 20 nt, Human
agcagauaaagcuaaccccu

SEQ ID NO: 896413 - RNA, 19 nt, Human
agugugggugggcgcgcgg

SEQ ID NO: 896414 - RNA, 25 nt, Human
auaaaacacaagaaaucaaacgaaa

SEQ ID NO: 896415 - RNA, 21 nt, Human
auaaaggcagugaacuuggac

SEQ ID NO: 896416 - RNA, 22 nt, Human
caaagccaacagucuguccuuu

SEQ ID NO: 896417 - RNA, 25 nt, Human
caagaaaucaaacgaaauaaaaaag

SEQ ID NO: 896418 - RNA, 21 nt, Human
cacugggaaggcagagggagg

SEQ ID NO: 896419 - RNA, 23 nt, Human
cagccccuucccucucucccucc

SEQ ID NO: 896420 - RNA, 26 nt, Human
ccaacagucuguccuuucgcuuuucu

SEQ ID NO: 896421 - RNA, 20 nt, Human
cccagagauuuccucagccc

SEQ ID NO: 896422 - RNA, 18 nt, Human
ccccaaagaacuaaugga

SEQ ID NO: 896423 - RNA, 23 nt, Human
ccccaaagaacuaauggaucuuc

SEQ ID NO: 896424 - RNA, 22 nt, Human
ccccagagauuuccucagcccc

SEQ ID NO: 896425 - RNA, 20 nt, Human
ccccuucccucucucccucc

SEQ ID NO: 896426 - RNA, 22 nt, Human
ccuccuauccuccaaacacaaa

SEQ ID NO: 896427 - RNA, 18 nt, Human
ccucucucccuccuaucc

SEQ ID NO: 896428 - RNA, 23 nt, Human
cuaauggaucuuccucucgauuu

SEQ ID NO: 896429 - RNA, 25 nt, Human
cucagccccuucccucucucccucc

SEQ ID NO: 896430 - RNA, 22 nt, Human
cuccucgccuuccuauuaggag

SEQ ID NO: 896431 - RNA, 26 nt, Human
cucucucccuccuauccuccaaacac

SEQ ID NO: 896432 - RNA, 23 nt, Human
cucucucucuuuuuuuuuuaaaa

SEQ ID NO: 896433 - RNA, 22 nt, Human
cucuugaauucauuccccuggc

SEQ ID NO: 896434 - RNA, 19 nt, Human
gaaagccaaaaaauaggca

SEQ ID NO: 896435 - RNA, 25 nt, Human
gagaacgcgggggaaagccgguacc

SEQ ID NO: 896436 - RNA, 21 nt, Human
gagagaaagagagggagcgag

SEQ ID NO: 896437 - RNA, 19 nt, Human
gagggaggagagaaagaga

SEQ ID NO: 896438 - RNA, 21 nt, Human
gcauggagugagugugggugg

SEQ ID NO: 896439 - RNA, 19 nt, Human
gccuucuccucuccucgcc

SEQ ID NO: 896440 - RNA, 24 nt, Human
ggaaaugaucaaaacaagauacug

SEQ ID NO: 896441 - RNA, 25 nt, Human
ggaaaugaucaaaacaagauacugu

SEQ ID NO: 896442 - RNA, 21 nt, Human
ggaagaacgacgugagcguga

SEQ ID NO: 896443 - RNA, 25 nt, Human
ggcaaauaaaacacaagaaaucaaa

SEQ ID NO: 896444 - RNA, 18 nt, Human
uaaaaaagagaaucagga

SEQ ID NO: 896445 - RNA, 19 nt, Human
uaaaacacaagaaaucaaa

SEQ ID NO: 896446 - RNA, 23 nt, Human
uaccccagagauuuccucagccc

SEQ ID NO: 896447 - RNA, 25 nt, Human
uagcaaaucuuuuuuugcugaauuu

SEQ ID NO: 896448 - RNA, 21 nt, Human
uauaugaguguuuucagcauc

SEQ ID NO: 896449 - RNA, 26 nt, Human
ucagugaccauagcagcaugucuucu

SEQ ID NO: 896450 - RNA, 20 nt, Human
ucccacaauccuauaugagu

SEQ ID NO: 896451 - RNA, 26 nt, Human
uccccuggccuucuccucuccucgac

SEQ ID NO: 896452 - RNA, 19 nt, Human
uccuccaaacacaaagcca

SEQ ID NO: 896453 - RNA, 19 nt, Human
ucuguccuuucgcuuuucu

SEQ ID NO: 896454 - RNA, 24 nt, Human
ucuuuuuuuuuuaaaaucaaggcu

SEQ ID NO: 896455 - RNA, 19 nt, Human
ugaagacggacuaaagcug

SEQ ID NO: 896456 - RNA, 19 nt, Human
ugaauucauuccccuggcc

SEQ ID NO: 896457 - RNA, 24 nt, Human
uguccuuucgcuuuucuugaggag

SEQ ID NO: 896458 - RNA, 21 nt, Human
ugugaagacggacuaaagcug

SEQ ID NO: 896459 - RNA, 25 nt, Human
uucuccucuccucgccuuccuauua

SEQ ID NO: 896460 - RNA, 21 nt, Human
uuucccacaauccuauaugag

SEQ ID NO: 896461 - RNA, 23 nt, Human
uuuuauacuucucuauacuuugu

SEQ ID NO: 896462 - RNA, 23 nt, Human
uuuuuuuuuucaaacaauaacuu

SEQ ID NO: 896463 - RNA, 21 nt, Human
aaacauacccucaacaaguca

SEQ ID NO: 896464 - RNA, 24 nt, Human
aaacauaguucugauaaaaccugc

SEQ ID NO: 896465 - RNA, 18 nt, Human
aaacugaagacugccacu

SEQ ID NO: 896466 - RNA, 24 nt, Human
aaaguaaaauaaccaaagucuuaa

SEQ ID NO: 896467 - RNA, 23 nt, Human
aaauauugguaggcauguaagcu

SEQ ID NO: 896468 - RNA, 19 nt, Human
aacccuaccccuuuuaccc

SEQ ID NO: 896469 - RNA, 22 nt, Human
aagcgggcgggaaucggcccaa

SEQ ID NO: 896470 - RNA, 24 nt, Human
aagggcccuuaaaaaacccaacug

SEQ ID NO: 896471 - RNA, 22 nt, Human
acacaaaacagaccuucaucuu

SEQ ID NO: 896472 - RNA, 18 nt, Human
acaccaagucaucccaac

SEQ ID NO: 896473 - RNA, 19 nt, Human
acucugcaaacugaagacu

SEQ ID NO: 896474 - RNA, 22 nt, Human
acucugcaaacugaagacugcc

SEQ ID NO: 896475 - RNA, 22 nt, Human
acucugcuucaauaacuccagc

SEQ ID NO: 896476 - RNA, 24 nt, Human
agaacacauacagauccauauuaa

SEQ ID NO: 896477 - RNA, 22 nt, Human
agaacucugaaguuugcacuca

SEQ ID NO: 896478 - RNA, 19 nt, Human
agccgcgccgaagcagcag

SEQ ID NO: 896479 - RNA, 19 nt, Human
aggaagggggagcgccacc

SEQ ID NO: 896480 - RNA, 19 nt, Human
aggaggaagcgggcgggaa

SEQ ID NO: 896481 - RNA, 23 nt, Human
auacccacccacccucuuuauuc

SEQ ID NO: 896482 - RNA, 22 nt, Human
caaggacaaaggaguguuaaaa

SEQ ID NO: 896483 - RNA, 20 nt, Human
cacccucuuuauucacaagg

SEQ ID NO: 896484 - RNA, 19 nt, Human
cagaauagucaccucaucc

SEQ ID NO: 896485 - RNA, 21 nt, Human
cagaauagucaccucauccca

SEQ ID NO: 896486 - RNA, 18 nt, Human
cagcccgcuuccgucucg

SEQ ID NO: 896487 - RNA, 19 nt, Human
caucuauacccacccaccc

SEQ ID NO: 896488 - RNA, 21 nt, Human
ccauaguacacauuugaggga

SEQ ID NO: 896489 - RNA, 24 nt, Human
cccacccacccucuuuauucacaa

SEQ ID NO: 896490 - RNA, 19 nt, Human
cccccucgcacgucaccac

SEQ ID NO: 896491 - RNA, 24 nt, Human
cccuacucugcaaacugaagacug

SEQ ID NO: 896492 - RNA, 22 nt, Human
cccucgcacgucaccacgugcg

SEQ ID NO: 896493 - RNA, 29 nt, Human
cccucgcacgucaccacgugcgcugccgg

SEQ ID NO: 896494 - RNA, 23 nt, Human
ccgcacccccucgcacgucaccc

SEQ ID NO: 896495 - RNA, 22 nt, Human
ccgccgacgccucccagcccgc

SEQ ID NO: 896496 - RNA, 24 nt, Human
ccgccgacgccucccagcccgcuu

SEQ ID NO: 896497 - RNA, 18 nt, Human
cgcacccccucgcacguc

SEQ ID NO: 896498 - RNA, 18 nt, Human
cgcgccgcacccccucgc

SEQ ID NO: 896499 - RNA, 21 nt, Human
cgggcgggaaucggcccaacg

SEQ ID NO: 896500 - RNA, 21 nt, Human
cucagaguuuaaaagacagac

SEQ ID NO: 896501 - RNA, 23 nt, Human
cugaauagaacacauacagaucc

SEQ ID NO: 896502 - RNA, 19 nt, Human
cugcagccaaggcaagaac

SEQ ID NO: 896503 - RNA, 22 nt, Human
gaacacauacagauccauauua

SEQ ID NO: 896504 - RNA, 23 nt, Human
gaacacauacagauccauauuaa

SEQ ID NO: 896505 - RNA, 20 nt, Human
gaccgcucgcgccgcacccc

SEQ ID NO: 896506 - RNA, 22 nt, Human
gagacugaaaggaagggggagc

SEQ ID NO: 896507 - RNA, 19 nt, Human
gcaagcauuaggacaugcu

SEQ ID NO: 896508 - RNA, 21 nt, Human
gcauucuugaaggaaaaaaac

SEQ ID NO: 896509 - RNA, 18 nt, Human
gccgccgccgaccgcucg

SEQ ID NO: 896510 - RNA, 23 nt, Human
gcgccgaagcagcaggcggagaa

SEQ ID NO: 896511 - RNA, 19 nt, Human
gcucgcgccgcacccccuc

SEQ ID NO: 896512 - RNA, 18 nt, Human
ggaaacauucauuucuag

SEQ ID NO: 896513 - RNA, 21 nt, Human
ggcccaacggaaagcgccaga

SEQ ID NO: 896514 - RNA, 21 nt, Human
gggaacucgcucgcucgccga

SEQ ID NO: 896515 - RNA, 19 nt, Human
ggguaugaagacagguggu

SEQ ID NO: 896516 - RNA, 24 nt, Human
gucaggguaugaagacaggugguu

SEQ ID NO: 896517 - RNA, 21 nt, Human
gugcgcugccgccgccgacgc

SEQ ID NO: 896518 - RNA, 23 nt, Human
gugugucuuaagcucuaauggug

SEQ ID NO: 896519 - RNA, 21 nt, Human
uaaaaaacccaacugucuaca

SEQ ID NO: 896520 - RNA, 23 nt, Human
uaaaaacaaaaauagucaauguc

SEQ ID NO: 896521 - RNA, 24 nt, Human
uaaaaccugcauucacaaccuaau

SEQ ID NO: 896522 - RNA, 20 nt, Human
uaaaagacagaccccuacuc

SEQ ID NO: 896523 - RNA, 21 nt, Human
uaaaagacagaccccuacucu

SEQ ID NO: 896524 - RNA, 22 nt, Human
uaaacccuaccccuuuuacccc

SEQ ID NO: 896525 - RNA, 23 nt, Human
uaagaugccaggugaguuauuuu

SEQ ID NO: 896526 - RNA, 19 nt, Human
uaaucugguucaucucuga

SEQ ID NO: 896527 - RNA, 22 nt, Human
uacacauuugagggaagaguca

SEQ ID NO: 896528 - RNA, 23 nt, Human
uacaucuuuaaacccuaccccuu

SEQ ID NO: 896529 - RNA, 19 nt, Human
uagacaccaagucauccca

SEQ ID NO: 896530 - RNA, 21 nt, Human
uagcacuacacauuagacacc

SEQ ID NO: 896531 - RNA, 21 nt, Human
uaugaacagauaaacugaaca

SEQ ID NO: 896532 - RNA, 24 nt, Human
uaugaacagauaaacugaacaaaa

SEQ ID NO: 896533 - RNA, 18 nt, Human
uauuaggcaaauucaauc

SEQ ID NO: 896534 - RNA, 23 nt, Human
uauuuaaaaccaguguuucaaau

SEQ ID NO: 896535 - RNA, 19 nt, Human
ucaaaacuuuuaguaauga

SEQ ID NO: 896536 - RNA, 22 nt, Human
ucaaauaccaaaaaucacagcu

SEQ ID NO: 896537 - RNA, 24 nt, Human
ucacaaguguaccucuacuaacca

SEQ ID NO: 896538 - RNA, 24 nt, Human
ucaccacgugcgcugccgccgccg

SEQ ID NO: 896539 - RNA, 18 nt, Human
ucagaauagucaccucau

SEQ ID NO: 896540 - RNA, 22 nt, Human
uccacaaauuucuuaagcucau

SEQ ID NO: 896541 - RNA, 23 nt, Human
uccacaaauuucuuaagcucauu

SEQ ID NO: 896542 - RNA, 22 nt, Human
uccuuuccaaauaaacccaaaa

SEQ ID NO: 896543 - RNA, 22 nt, Human
ucggcccaacggaaagcgccag

SEQ ID NO: 896544 - RNA, 18 nt, Human
ucucugaagagauggaac

SEQ ID NO: 896545 - RNA, 19 nt, Human
ucugcaaacugaagacugc

SEQ ID NO: 896546 - RNA, 19 nt, Human
ucugcaaacugaagacugc

SEQ ID NO: 896547 - RNA, 22 nt, Human
ucugcaaacugaagacugccac

SEQ ID NO: 896548 - RNA, 20 nt, Human
ucugucaauguaguuuuagu

SEQ ID NO: 896549 - RNA, 23 nt, Human
ucugugauaaugaugcaucauaa

SEQ ID NO: 896550 - RNA, 18 nt, Human
ugaaaggaagggggagcg

SEQ ID NO: 896551 - RNA, 24 nt, Human
ugaacagauaaacugaacaaaaac

SEQ ID NO: 896552 - RNA, 21 nt, Human
ugaaggaaaaaaacugcagcc

SEQ ID NO: 896553 - RNA, 18 nt, Human
ugaauagaacacauacag

SEQ ID NO: 896554 - RNA, 18 nt, Human
ugagaaaaaaaaaccuuu

SEQ ID NO: 896555 - RNA, 19 nt, Human
ugagagaaauaaaguggca

SEQ ID NO: 896556 - RNA, 23 nt, Human
ugauaaaaccugcauucacaacc

SEQ ID NO: 896557 - RNA, 20 nt, Human
ugccuccgccgccgccgacu

SEQ ID NO: 896558 - RNA, 23 nt, Human
uggcaaaacaaauguggaggaga

SEQ ID NO: 896559 - RNA, 19 nt, Human
uguaagcuuccuuuuaaua

SEQ ID NO: 896560 - RNA, 19 nt, Human
uuaaaaacagucaucauau

SEQ ID NO: 896561 - RNA, 25 nt, Human
uuuuacugcuauauaaugucuugcu

SEQ ID NO: 896562 - RNA, 18 nt, Human
uuuuccacaaauuucuua

SEQ ID NO: 896563 - RNA, 25 nt, Human
caauggguuauucuauaccaaaucc

SEQ ID NO: 896564 - RNA, 21 nt, Human
cacccucgcacagcagaaauu

SEQ ID NO: 896565 - RNA, 23 nt, Human
cccccauccacaccucgcguccc

SEQ ID NO: 896566 - RNA, 19 nt, Human
cccgccccaccgacuuggc

SEQ ID NO: 896567 - RNA, 25 nt, Human
ccgcacccagggcaccaucuccgua

SEQ ID NO: 896568 - RNA, 18 nt, Human
ccgcaggcugaggucgcg

SEQ ID NO: 896569 - RNA, 26 nt, Human
cugaggcagaggucaaggcgaccccc

SEQ ID NO: 896570 - RNA, 19 nt, Human
gaccccccauccacaccuc

SEQ ID NO: 896571 - RNA, 18 nt, Human
uaaaauuucagacagcga

SEQ ID NO: 896572 - RNA, 24 nt, Human
uaacuaaaauuucagacagcgaug

SEQ ID NO: 896573 - RNA, 25 nt, Human
uaagaauauacccaaaaaaguaaau

SEQ ID NO: 896574 - RNA, 22 nt, Human
uacccaaaaaaguaaauuucua

SEQ ID NO: 896575 - RNA, 27 nt, Human
uagucuuuauuaaaaacaaaaaauaac

SEQ ID NO: 896576 - RNA, 23 nt, Human
ugaggcagaggucaaggcgaccc

SEQ ID NO: 896577 - RNA, 24 nt, Human
uguacauaauauauauaagaauau

SEQ ID NO: 896578 - RNA, 19 nt, Human
uuucacuuuuaaucauuaa

SEQ ID NO: 896579 - RNA, 23 nt, Human
uuuuuuuuuuuuucacuuuuaau

SEQ ID NO: 896580 - RNA, 25 nt, Human
uuuuuuuuuuuuuuuucacuuuuaa

SEQ ID NO: 896581 - RNA, 24 nt, Human
uuuuuuuuuuuuuuuuucacuuuu

SEQ ID NO: 896582 - RNA, 30 nt, Human
uuuuuuuuuuuuuuuuuuuucacuuuuaaa

SEQ ID NO: 896583 - RNA, 23 nt, Human
aaaaagccgaaggcagucacugc

SEQ ID NO: 896584 - RNA, 19 nt, Human
aaaagcaaccugcagaaca

SEQ ID NO: 896585 - RNA, 18 nt, Human
aaaggcuguguuuauaaa

SEQ ID NO: 896586 - RNA, 21 nt, Human
aagcaaccugcagaacaagaa

SEQ ID NO: 896587 - RNA, 22 nt, Human
aagcaaccugcagaacaagaau

SEQ ID NO: 896588 - RNA, 19 nt, Human
aauuaugaaacuacauagg

SEQ ID NO: 896589 - RNA, 18 nt, Human
aauucacucacaaaguug

SEQ ID NO: 896590 - RNA, 22 nt, Human
acaauagaaaaaaauuaagcac

SEQ ID NO: 896591 - RNA, 19 nt, Human
agagauagaaggcagauua

SEQ ID NO: 896592 - RNA, 24 nt, Human
agccgaaggcagucacugccugac

SEQ ID NO: 896593 - RNA, 18 nt, Human
agggauggagguggggga

SEQ ID NO: 896594 - RNA, 23 nt, Human
auaaaaauauuuaucucuauuaa

SEQ ID NO: 896595 - RNA, 18 nt, Human
auuacaugaaaauaguuc

SEQ ID NO: 896596 - RNA, 22 nt, Human
caaaacacaaucaucgucagag

SEQ ID NO: 896597 - RNA, 26 nt, Human
caacauugugaauauacugacaacca

SEQ ID NO: 896598 - RNA, 20 nt, Human
cagaaaaaaagccgaaggca

SEQ ID NO: 896599 - RNA, 23 nt, Human
cagaaaaaaagccgaaggcaguc

SEQ ID NO: 896600 - RNA, 22 nt, Human
cagcagaaaaaaagccgaaggc

SEQ ID NO: 896601 - RNA, 23 nt, Human
cauauaacuuacacaacacgaaa

SEQ ID NO: 896602 - RNA, 21 nt, Human
cuaaagaaaggcuguguuuau

SEQ ID NO: 896603 - RNA, 23 nt, Human
cugaaauaaacauuuguauuuau

SEQ ID NO: 896604 - RNA, 24 nt, Human
cugaaauuaaaucaaugcuaaaga

SEQ ID NO: 896605 - RNA, 27 nt, Human
cuuuacaacaugaagguacauguuacc

SEQ ID NO: 896606 - RNA, 22 nt, Human
cuuuuuuugggaucccucacuu

SEQ ID NO: 896607 - RNA, 22 nt, Human
gaauacaauuucauuuuuccca

SEQ ID NO: 896608 - RNA, 21 nt, Human
gaauaggcaaauccauagaga

SEQ ID NO: 896609 - RNA, 18 nt, Human
gaggugggggauaaguug

SEQ ID NO: 896610 - RNA, 18 nt, Human
gcagaaaaaaagccgaag

SEQ ID NO: 896611 - RNA, 23 nt, Human
ggaauacaauuucauuuuuccca

SEQ ID NO: 896612 - RNA, 19 nt, Human
gucagcagaaaaaaagccg

SEQ ID NO: 896613 - RNA, 22 nt, Human
uaaaaauauuuaucucuauuaa

SEQ ID NO: 896614 - RNA, 19 nt, Human
uaaaagcaaccugcagaac

SEQ ID NO: 896615 - RNA, 21 nt, Human
uaaaagcaaccugcagaacaa

SEQ ID NO: 896616 - RNA, 18 nt, Human
uaagcacaauauuucacu

SEQ ID NO: 896617 - RNA, 22 nt, Human
uauaaaagcaaccugcagaaca

SEQ ID NO: 896618 - RNA, 24 nt, Human
uauaacaaaacacaaucaucguca

SEQ ID NO: 896619 - RNA, 23 nt, Human
uauagauaaauguuucauguuag

SEQ ID NO: 896620 - RNA, 22 nt, Human
ucaaugcuaaagaaaggcugug

SEQ ID NO: 896621 - RNA, 18 nt, Human
ucacauguauaaaagagu

SEQ ID NO: 896622 - RNA, 19 nt, Human
ucacucacaaaguugaaag

SEQ ID NO: 896623 - RNA, 20 nt, Human
ucagugaauauuaaauauuu

SEQ ID NO: 896624 - RNA, 21 nt, Human
ugaauaacacaauagaaaaaa

SEQ ID NO: 896625 - RNA, 23 nt, Human
ugggaagagacugcuaauuggug

SEQ ID NO: 896626 - RNA, 21 nt, Human
uucaccuucuuuauaaaagca

SEQ ID NO: 896627 - RNA, 20 nt, Human
uucacuagcuauauuuuuga

SEQ ID NO: 896628 - RNA, 24 nt, Human
uucagaauaggcaaauccauagag

SEQ ID NO: 896629 - RNA, 26 nt, Human
uucccaagcuaauaauaaaguuauau

SEQ ID NO: 896630 - RNA, 23 nt, Human
aaauggucaauaaaaacaucaac

SEQ ID NO: 896631 - RNA, 20 nt, Human
aagccaaaaaauuaacuaca

SEQ ID NO: 896632 - RNA, 25 nt, Human
aagcgcacgcggggucucccagcac

SEQ ID NO: 896633 - RNA, 20 nt, Human
aagcggcgguggcgaguggg

SEQ ID NO: 896634 - RNA, 24 nt, Human
aaugcagcccgaggagggagcaau

SEQ ID NO: 896635 - RNA, 22 nt, Human
aauucgcagcgccaucuuccuc

SEQ ID NO: 896636 - RNA, 22 nt, Human
acauuaauuaacaacuccacca

SEQ ID NO: 896637 - RNA, 22 nt, Human
agaaaaaaauaaacaucgugga

SEQ ID NO: 896638 - RNA, 18 nt, Human
agaccuggggcuggagag

SEQ ID NO: 896639 - RNA, 23 nt, Human
agccaggcgcucgcagcggcgcc

SEQ ID NO: 896640 - RNA, 22 nt, Human
auccacucuuaauggcccccag

SEQ ID NO: 896641 - RNA, 24 nt, Human
caauaaaaacaucaacacgauagg

SEQ ID NO: 896642 - RNA, 23 nt, Human
cacacauucaaguucccagacac

SEQ ID NO: 896643 - RNA, 19 nt, Human
caccaaagcagugaacccc

SEQ ID NO: 896644 - RNA, 21 nt, Human
caccaaagcagugaaccccuu

SEQ ID NO: 896645 - RNA, 20 nt, Human
cagaacaauaagcgcccuuc

SEQ ID NO: 896646 - RNA, 18 nt, Human
cagaaugcuuacaauauc

SEQ ID NO: 896647 - RNA, 18 nt, Human
cagaggagcugaacugug

SEQ ID NO: 896648 - RNA, 18 nt, Human
cagccccuuccccguucc

SEQ ID NO: 896649 - RNA, 19 nt, Human
cagcccgaggagggagcaa

SEQ ID NO: 896650 - RNA, 23 nt, Human
cauguccuuucuccccucagccc

SEQ ID NO: 896651 - RNA, 22 nt, Human
ccaaagcuguggacggugaaca

SEQ ID NO: 896652 - RNA, 19 nt, Human
cccccucccucuccuccaa

SEQ ID NO: 896653 - RNA, 22 nt, Human
cccccucccucuccuccaacuc

SEQ ID NO: 896654 - RNA, 23 nt, Human
cccgaaaccccaaacuccuuuaa

SEQ ID NO: 896655 - RNA, 21 nt, Human
cccggaaucccgaagugcugu

SEQ ID NO: 896656 - RNA, 20 nt, Human
cccgguuuacaucucaaggg

SEQ ID NO: 896657 - RNA, 27 nt, Human
cccucccucuccuccaacuccuuuaaa

SEQ ID NO: 896658 - RNA, 19 nt, Human
ccuccaggucugcgcuggc

SEQ ID NO: 896659 - RNA, 18 nt, Human
ccucccgggaccgggccg

SEQ ID NO: 896660 - RNA, 19 nt, Human
ccuuuuuuccaagaagggc

SEQ ID NO: 896661 - RNA, 28 nt, Human
cgaaaccccaaacuccuuuaaagucucc

SEQ ID NO: 896662 - RNA, 18 nt, Human
cgcguggggcugcggcuc

SEQ ID NO: 896663 - RNA, 23 nt, Human
cgggcccgggccaccggcggcgg

SEQ ID NO: 896664 - RNA, 19 nt, Human
cguggcggggcggggcaga

SEQ ID NO: 896665 - RNA, 23 nt, Human
cucccccucccucuccuccaacu

SEQ ID NO: 896666 - RNA, 20 nt, Human
cuccccucagccccuucccc

SEQ ID NO: 896667 - RNA, 27 nt, Human
cucccgaaaccccaaacuccuuuaaaa

SEQ ID NO: 896668 - RNA, 26 nt, Human
cucccucuccuccaacuccuuuaaaa

SEQ ID NO: 896669 - RNA, 22 nt, Human
cuccgcucuaccccgagccgaa

SEQ ID NO: 896670 - RNA, 21 nt, Human
cugcgcguggggcugcggcuc

SEQ ID NO: 896671 - RNA, 23 nt, Human
gaaaagccaaacuaaauauacug

SEQ ID NO: 896672 - RNA, 21 nt, Human
gaaagaaccggaggcaaacac

SEQ ID NO: 896673 - RNA, 18 nt, Human
gagacuuccugccgcugg

SEQ ID NO: 896674 - RNA, 21 nt, Human
gagcugaacugugcccuguag

SEQ ID NO: 896675 - RNA, 22 nt, Human
gaggagcugaacugugcccugu

SEQ ID NO: 896676 - RNA, 19 nt, Human
gaggcagaggggccggcag

SEQ ID NO: 896677 - RNA, 20 nt, Human
gcacaagggacaggcucgau

SEQ ID NO: 896678 - RNA, 18 nt, Human
gcgcguggcggggcgggg

SEQ ID NO: 896679 - RNA, 20 nt, Human
gcgcuggccggggcgccugc

SEQ ID NO: 896680 - RNA, 18 nt, Human
gcuguggcgaucaggcca

SEQ ID NO: 896681 - RNA, 21 nt, Human
gcuucccacgguggaaagaac

SEQ ID NO: 896682 - RNA, 19 nt, Human
ggaaaagccaaacuaaaua

SEQ ID NO: 896683 - RNA, 20 nt, Human
ggagggagcaaucaaggguu

SEQ ID NO: 896684 - RNA, 21 nt, Human
ggauaacccggaaucccgaag

SEQ ID NO: 896685 - RNA, 22 nt, Human
ggccacucaaggcagccagccc

SEQ ID NO: 896686 - RNA, 22 nt, Human
ggcgcccuuucggcccuggggc

SEQ ID NO: 896687 - RNA, 24 nt, Human
ggcuaugguguuguaacaaugcug

SEQ ID NO: 896688 - RNA, 19 nt, Human
gggaggcagaggggccggc

SEQ ID NO: 896689 - RNA, 21 nt, Human
gggaggcagaggggccggcag

SEQ ID NO: 896690 - RNA, 21 nt, Human
ggggaaggccauguccuuucu

SEQ ID NO: 896691 - RNA, 22 nt, Human
ggggaagggaagggagcgaggu

SEQ ID NO: 896692 - RNA, 22 nt, Human
ggugcgggggaggcagaggggc

SEQ ID NO: 896693 - RNA, 18 nt, Human
gguggggguggcguucgc

SEQ ID NO: 896694 - RNA, 22 nt, Human
gugaaccccuuaacugacagaa

SEQ ID NO: 896695 - RNA, 21 nt, Human
guucagaacaauaagcgcccu

SEQ ID NO: 896696 - RNA, 22 nt, Human
uaaaaacaucaacacgauaggc

SEQ ID NO: 896697 - RNA, 18 nt, Human
uaaagucuccuggucccc

SEQ ID NO: 896698 - RNA, 21 nt, Human
uaagacgaaagaggggacucg

SEQ ID NO: 896699 - RNA, 27 nt, Human
uaagcgcccuucacacauucaaguucc

SEQ ID NO: 896700 - RNA, 20 nt, Human
uaagcucuuagcuacaucca

SEQ ID NO: 896701 - RNA, 23 nt, Human
uaagcucuuagcuacauccacuc

SEQ ID NO: 896702 - RNA, 22 nt, Human
uacaauaucugagaaaaauaga

SEQ ID NO: 896703 - RNA, 18 nt, Human
uagcuaagcucuuagcua

SEQ ID NO: 896704 - RNA, 20 nt, Human
ucaacacgauaggcuuuguu

SEQ ID NO: 896705 - RNA, 19 nt, Human
ucaaggggaaagcgcacgc

SEQ ID NO: 896706 - RNA, 22 nt, Human
ucagaacaauaagcgcccuuca

SEQ ID NO: 896707 - RNA, 25 nt, Human
ucagccaggcgcucgcagcggcgcc

SEQ ID NO: 896708 - RNA, 23 nt, Human
ucaggauaacccggaaucccgaa

SEQ ID NO: 896709 - RNA, 23 nt, Human
ucauuuuuaaaacuuuauuucca

SEQ ID NO: 896710 - RNA, 18 nt, Human
uccaagaagggcuguggc

SEQ ID NO: 896711 - RNA, 19 nt, Human
uccacucuuaauggccccc

SEQ ID NO: 896712 - RNA, 22 nt, Human
uccccagcuuugaagauuucua

SEQ ID NO: 896713 - RNA, 18 nt, Human
ucccgaaaccccaaacuc

SEQ ID NO: 896714 - RNA, 21 nt, Human
uccgcucuaccccgagccgaa

SEQ ID NO: 896715 - RNA, 20 nt, Human
uccugggcugcgcguggggc

SEQ ID NO: 896716 - RNA, 22 nt, Human
ucuauguuaggaaaagccaaac

SEQ ID NO: 896717 - RNA, 18 nt, Human
ucugagaaaaauagagug

SEQ ID NO: 896718 - RNA, 21 nt, Human
ugaaaaacagaaugcuuacaa

SEQ ID NO: 896719 - RNA, 24 nt, Human
ugaaaugcagcccgaggagggagc

SEQ ID NO: 896720 - RNA, 19 nt, Human
ugaaccccuuaacugacag

SEQ ID NO: 896721 - RNA, 18 nt, Human
ugcgcacgcucggggcgg

SEQ ID NO: 896722 - RNA, 18 nt, Human
ugcggggaagggaaggga

SEQ ID NO: 896723 - RNA, 18 nt, Human
uggaaagaaccggaggca

SEQ ID NO: 896724 - RNA, 19 nt, Human
uggaaauccugcgaucugg

SEQ ID NO: 896725 - RNA, 25 nt, Human
uggaacacaaugucaggagaccugg

SEQ ID NO: 896726 - RNA, 20 nt, Human
uggaaccugaaacacggacg

SEQ ID NO: 896727 - RNA, 20 nt, Human
uggaauggugccauguccuc

SEQ ID NO: 896728 - RNA, 22 nt, Human
uggcgaggcgagggccaggagc

SEQ ID NO: 896729 - RNA, 19 nt, Human
uggcuuagcccgcagccug

SEQ ID NO: 896730 - RNA, 22 nt, Human
ugguuuauuccaaagcugugga

SEQ ID NO: 896731 - RNA, 25 nt, Human
uguccucccccucccucuccuccaa

SEQ ID NO: 896732 - RNA, 23 nt, Human
ugugugcgcacgcucggggcgac

SEQ ID NO: 896733 - RNA, 18 nt, Human
uuaacugacagaaauuca

SEQ ID NO: 896734 - RNA, 22 nt, Human
uuagcuaagcucuuagcuacau

SEQ ID NO: 896735 - RNA, 18 nt, Human
uucccugcucccgaaacc

SEQ ID NO: 896736 - RNA, 22 nt, Human
uucccugcucccgaaaccccaa

SEQ ID NO: 896737 - RNA, 22 nt, Human
uucucgccuccgaccggucugu

SEQ ID NO: 896738 - RNA, 22 nt, Human
uugaaaaacagaaugcuuacaa

SEQ ID NO: 896739 - RNA, 19 nt, Human
uuggaaauccugcgaucug

SEQ ID NO: 896740 - RNA, 22 nt, Human
uuucccaggaugguuuauucca

SEQ ID NO: 896741 - RNA, 21 nt, Human
uuuuuuuuuuuuuuuucccag

SEQ ID NO: 896742 - RNA, 23 nt, Human
uuuuuuuuuuuuuuuuucccagg

SEQ ID NO: 896743 - RNA, 25 nt, Human
aaaacagaaacauaccagagaggga

SEQ ID NO: 896744 - RNA, 25 nt, Human
aaacaaaugcaccuacacagucaga

SEQ ID NO: 896745 - RNA, 22 nt, Human
aaacaggaauuuguugaccuga

SEQ ID NO: 896746 - RNA, 20 nt, Human
aacagaaacauaccagagag

SEQ ID NO: 896747 - RNA, 25 nt, Human
aacagaaucuuggccaagccaauga

SEQ ID NO: 896748 - RNA, 20 nt, Human
aagaaacauuagauauagga

SEQ ID NO: 896749 - RNA, 18 nt, Human
aagaaaggcaauggggca

SEQ ID NO: 896750 - RNA, 27 nt, Human
aagaaccauaaaggacaaccgguaccc

SEQ ID NO: 896751 - RNA, 21 nt, Human
aaggaggccaaaucucuugug

SEQ ID NO: 896752 - RNA, 23 nt, Human
accauaaaggacaacaaaauaac

SEQ ID NO: 896753 - RNA, 21 nt, Human
acuggaguacaaagacaaaac

SEQ ID NO: 896754 - RNA, 23 nt, Human
acuuggggaaggccaccagugag

SEQ ID NO: 896755 - RNA, 18 nt, Human
agaauauauguaaacuga

SEQ ID NO: 896756 - RNA, 20 nt, Human
aggaagaguuuacuauagua

SEQ ID NO: 896757 - RNA, 27 nt, Human
aggcguuaaaagcugauagaggaagcc

SEQ ID NO: 896758 - RNA, 20 nt, Human
agugaaggggcuguaauaga

SEQ ID NO: 896759 - RNA, 18 nt, Human
auauguaaacugagauaa

SEQ ID NO: 896760 - RNA, 22 nt, Human
augggauuugagggcccucucu

SEQ ID NO: 896761 - RNA, 21 nt, Human
caaaacagaaacauaccagag

SEQ ID NO: 896762 - RNA, 21 nt, Human
caaaauaacaggccuucuucc

SEQ ID NO: 896763 - RNA, 23 nt, Human
caaagggccaggagcccagaagu

SEQ ID NO: 896764 - RNA, 22 nt, Human
caagccaaugaaaaauuaggca

SEQ ID NO: 896765 - RNA, 23 nt, Human
cacaaaacagaaacauaccagag

SEQ ID NO: 896766 - RNA, 22 nt, Human
cacaaaacagaaacauaccagg

SEQ ID NO: 896767 - RNA, 21 nt, Human
caccuauuagcacaugcugcu

SEQ ID NO: 896768 - RNA, 19 nt, Human
cagaagaauggaugcaauu

SEQ ID NO: 896769 - RNA, 23 nt, Human
ccaagcuuggagagcuuuccuaa

SEQ ID NO: 896770 - RNA, 24 nt, Human
cccaugguacauuucuaccuccac

SEQ ID NO: 896771 - RNA, 21 nt, Human
cccaugguacauuucuaccuu

SEQ ID NO: 896772 - RNA, 27 nt, Human
cucccacccugacaaaugccaagcuug

SEQ ID NO: 896773 - RNA, 27 nt, Human
cuccuaaucccaacagccauccuggga

SEQ ID NO: 896774 - RNA, 21 nt, Human
cucucuaggcuuucugaagua

SEQ ID NO: 896775 - RNA, 23 nt, Human
cucucuucucucuaggcuuucug

SEQ ID NO: 896776 - RNA, 22 nt, Human
cucuucgcuuauuuagcagucu

SEQ ID NO: 896777 - RNA, 18 nt, Human
gacagagaaaacauaaaa

SEQ ID NO: 896778 - RNA, 27 nt, Human
gacuuuaucccagaggcaauggggagu

SEQ ID NO: 896779 - RNA, 24 nt, Human
gccaggagcccagaagugaagggg

SEQ ID NO: 896780 - RNA, 20 nt, Human
gcuggaaugggauuugaggg

SEQ ID NO: 896781 - RNA, 21 nt, Human
ggagagacagggagacccagg

SEQ ID NO: 896782 - RNA, 23 nt, Human
guaacagaaucuuggccaagcca

SEQ ID NO: 896783 - RNA, 20 nt, Human
uaaacaaaugcaccuacaca

SEQ ID NO: 896784 - RNA, 22 nt, Human
uaaacaaaugcaccuacacagu

SEQ ID NO: 896785 - RNA, 18 nt, Human
uaaggcccacaaaaauca

SEQ ID NO: 896786 - RNA, 19 nt, Human
uagaggaagcccaguaguc

SEQ ID NO: 896787 - RNA, 24 nt, Human
uauaggaauauagacauacauuau

SEQ ID NO: 896788 - RNA, 21 nt, Human
ucauuuaggggcuggaauggg

SEQ ID NO: 896789 - RNA, 25 nt, Human
uccacuuuucuccuugugaugccac

SEQ ID NO: 896790 - RNA, 18 nt, Human
ucgcaaagggccaggagc

SEQ ID NO: 896791 - RNA, 23 nt, Human
ucuaauccacaaaacagaaacau

SEQ ID NO: 896792 - RNA, 19 nt, Human
ucuaccuccacuuuucucc

SEQ ID NO: 896793 - RNA, 20 nt, Human
ucugaaguacuucgcaaagg

SEQ ID NO: 896794 - RNA, 19 nt, Human
ucugacagagaaaacauaa

SEQ ID NO: 896795 - RNA, 19 nt, Human
ucuucucucuaggcuuucu

SEQ ID NO: 896796 - RNA, 21 nt, Human
ugagcaaaugggaaaaguaag

SEQ ID NO: 896797 - RNA, 18 nt, Human
ugcaccuacacagucaga

SEQ ID NO: 896798 - RNA, 23 nt, Human
ugcugagcucacuuggggaaggc

SEQ ID NO: 896799 - RNA, 22 nt, Human
uggcuggagagacagggagacc

SEQ ID NO: 896800 - RNA, 24 nt, Human
ugggaaaaguaaggcccacaaaaa

SEQ ID NO: 896801 - RNA, 24 nt, Human
ugggauaggaacacuagccucugg

SEQ ID NO: 896802 - RNA, 26 nt, Human
uguaauagacagauaacaaccuggua

SEQ ID NO: 896803 - RNA, 25 nt, Human
ugugaugccacuuucauuuaggggc

SEQ ID NO: 896804 - RNA, 22 nt, Human
uucaaaauuaacucuucgcuua

SEQ ID NO: 896805 - RNA, 19 nt, Human
uuccucauuccacuccuaa

SEQ ID NO: 896806 - RNA, 21 nt, Human
uuuuuuuuuuuuuugauagga

SEQ ID NO: 896807 - RNA, 21 nt, Human
aacaccagacuaucaccacuu

SEQ ID NO: 896808 - RNA, 20 nt, Human
aaccuuuccaaagaagcaaa

SEQ ID NO: 896809 - RNA, 20 nt, Human
aagcuagccauagcagucac

SEQ ID NO: 896810 - RNA, 22 nt, Human
acaaagcuccaguuuucaagag

SEQ ID NO: 896811 - RNA, 20 nt, Human
agacucucuuuugaggaccu

SEQ ID NO: 896812 - RNA, 19 nt, Human
agcacugguguuccugcuu

SEQ ID NO: 896813 - RNA, 20 nt, Human
agccaaaagaaguggcuucu

SEQ ID NO: 896814 - RNA, 18 nt, Human
agccauagcagucacaga

SEQ ID NO: 896815 - RNA, 21 nt, Human
agcgucuacacgacgagugac

SEQ ID NO: 896816 - RNA, 19 nt, Human
aggcagcgucuacacgacg

SEQ ID NO: 896817 - RNA, 21 nt, Human
aucauggugaucugcuggccc

SEQ ID NO: 896818 - RNA, 22 nt, Human
auccacauuuuugucuccccag

SEQ ID NO: 896819 - RNA, 23 nt, Human
caaaagaaguggcuucuguaaca

SEQ ID NO: 896820 - RNA, 18 nt, Human
caaaagguuuuccaaaaa

SEQ ID NO: 896821 - RNA, 24 nt, Human
cacaagguacccucgagagucugu

SEQ ID NO: 896822 - RNA, 19 nt, Human
cagcggcggcggugaggag

SEQ ID NO: 896823 - RNA, 23 nt, Human
cagcuccauuuccugucacuuuu

SEQ ID NO: 896824 - RNA, 22 nt, Human
cauuaugacuuacacagagaua

SEQ ID NO: 896825 - RNA, 21 nt, Human
cccugcucccacaacaggcac

SEQ ID NO: 896826 - RNA, 21 nt, Human
cgaccggggcagcuggggcga

SEQ ID NO: 896827 - RNA, 22 nt, Human
cgcagugaugauucuugugauc

SEQ ID NO: 896828 - RNA, 23 nt, Human
cgggagccaggaucgggcucugg

SEQ ID NO: 896829 - RNA, 21 nt, Human
cgugggaggcgcgaguccagc

SEQ ID NO: 896830 - RNA, 18 nt, Human
cucauucuuuuucuguuu

SEQ ID NO: 896831 - RNA, 22 nt, Human
gagcucguggagcugcugggga

SEQ ID NO: 896832 - RNA, 23 nt, Human
gcccugcucccacaacaggcaca

SEQ ID NO: 896833 - RNA, 18 nt, Human
gccucaucugauugcuca

SEQ ID NO: 896834 - RNA, 19 nt, Human
gcuggagcgagggcugccc

SEQ ID NO: 896835 - RNA, 21 nt, Human
ggauggagccuugguggaugg

SEQ ID NO: 896836 - RNA, 21 nt, Human
ggcaacaucucagcgagugau

SEQ ID NO: 896837 - RNA, 21 nt, Human
ggccaagggcuguucccucaa

SEQ ID NO: 896838 - RNA, 23 nt, Human
gggagguggauggaguccgggag

SEQ ID NO: 896839 - RNA, 19 nt, Human
ggggagguggauggagucc

SEQ ID NO: 896840 - RNA, 18 nt, Human
gguggaugggcuccggga

SEQ ID NO: 896841 - RNA, 18 nt, Human
gugaucugcuggcccugc

SEQ ID NO: 896842 - RNA, 18 nt, Human
uaaaacagugccuuaagc

SEQ ID NO: 896843 - RNA, 24 nt, Human
uaaaacagugccuuaagcaugcaa

SEQ ID NO: 896844 - RNA, 20 nt, Human
uaaguaagcuucuaaaacag

SEQ ID NO: 896845 - RNA, 18 nt, Human
uaccuaucuaauuauccu

SEQ ID NO: 896846 - RNA, 23 nt, Human
uauaaaacuaaguaagcuucuaa

SEQ ID NO: 896847 - RNA, 19 nt, Human
uauucuagaccauugacug

SEQ ID NO: 896848 - RNA, 19 nt, Human
ucaaaagguuuuccaaaaa

SEQ ID NO: 896849 - RNA, 21 nt, Human
ucaggagaaaaccuuuccaaa

SEQ ID NO: 896850 - RNA, 21 nt, Human
ucauuaugacuuacacagaga

SEQ ID NO: 896851 - RNA, 20 nt, Human
ucccacaacaggcacaugug

SEQ ID NO: 896852 - RNA, 20 nt, Human
ugacuuacacagagauaggu

SEQ ID NO: 896853 - RNA, 19 nt, Human
ugaggaccucauuccaggc

SEQ ID NO: 896854 - RNA, 22 nt, Human
ugaggagucaugcaggcuuggg

SEQ ID NO: 896855 - RNA, 20 nt, Human
ugcucccacaacaggcacau

SEQ ID NO: 896856 - RNA, 22 nt, Human
ugcuuaaccauacuccuucuac

SEQ ID NO: 896857 - RNA, 22 nt, Human
uggaaggggcaacaucucagcg

SEQ ID NO: 896858 - RNA, 24 nt, Human
uggauggaguccgggagcucgugg

SEQ ID NO: 896859 - RNA, 19 nt, Human
uggcaggggccaagggcug

SEQ ID NO: 896860 - RNA, 24 nt, Human
ugucagauuccuuucuuuuuucug

SEQ ID NO: 896861 - RNA, 20 nt, Human
uuccaaagaagcaaaguuuu

SEQ ID NO: 896862 - RNA, 24 nt, Human
uucuugugauccccucaucauggu

SEQ ID NO: 896863 - RNA, 19 nt, Human
uugcucagacgaacuccug

SEQ ID NO: 896864 - RNA, 20 nt, Human
uuucugcuucuagacucucu

SEQ ID NO: 896865 - RNA, 20 nt, Human
uuugucuccccagcuccauu

SEQ ID NO: 896866 - RNA, 25 nt, Human
uuuucaagagugugcuuaaccauac

SEQ ID NO: 896867 - RNA, 21 nt, Human
uuuucuguuugagagauguuu

SEQ ID NO: 896868 - RNA, 22 nt, Human
aaaaaaaaaaaaaaaaaaggac

SEQ ID NO: 896869 - RNA, 22 nt, Human
aaaaaaaaaaaaaaaaggacaa

SEQ ID NO: 896870 - RNA, 25 nt, Human
aaaaaaaaaaaaaaggacaaccuuu

SEQ ID NO: 896871 - RNA, 21 nt, Human
aacccagcgcggucugcggcc

SEQ ID NO: 896872 - RNA, 22 nt, Human
acaacacaaacuucucccguca

SEQ ID NO: 896873 - RNA, 23 nt, Human
agcggcagcggcaacccagcgcg

SEQ ID NO: 896874 - RNA, 18 nt, Human
aggcagcugcuuucuccu

SEQ ID NO: 896875 - RNA, 18 nt, Human
agggaggaggaaacagcg

SEQ ID NO: 896876 - RNA, 19 nt, Human
aguauugggaagaggaggg

SEQ ID NO: 896877 - RNA, 20 nt, Human
cccagcgcggucugcggccg

SEQ ID NO: 896878 - RNA, 24 nt, Human
cggcagcggcaacccagcgcgguc

SEQ ID NO: 896879 - RNA, 21 nt, Human
cugcgcccacucccaccgcgg

SEQ ID NO: 896880 - RNA, 19 nt, Human
cuggcacgauggcggcagc

SEQ ID NO: 896881 - RNA, 21 nt, Human
gagcaucuggaggagugggaa

SEQ ID NO: 896882 - RNA, 20 nt, Human
gcauugaaacaucugaacaa

SEQ ID NO: 896883 - RNA, 21 nt, Human
gcggcaacccagcgcggucuc

SEQ ID NO: 896884 - RNA, 20 nt, Human
ggagacccgaggggcuggca

SEQ ID NO: 896885 - RNA, 22 nt, Human
ggcggcagcggcagcggcaacc

SEQ ID NO: 896886 - RNA, 22 nt, Human
gggaauaguauugggaagagga

SEQ ID NO: 896887 - RNA, 29 nt, Human
ucaguagauuaaaaaaaaaaaaaaaaaaa

SEQ ID NO: 896888 - RNA, 18 nt, Human
ucaguggcagcagcgcac

SEQ ID NO: 896889 - RNA, 21 nt, Human
ucucccgucagaugcaacuag

SEQ ID NO: 896890 - RNA, 20 nt, Human
uggagcgucacccggccuca

SEQ ID NO: 896891 - RNA, 24 nt, Human
uggcggcagcggcagcggcaaccc

SEQ ID NO: 896892 - RNA, 18 nt, Human
ugggaagaggagggagga

SEQ ID NO: 896893 - RNA, 20 nt, Human
uuaaaaaaaaaaaaaaaaaa

SEQ ID NO: 896894 - RNA, 18 nt, Human
uuggagcaucuggaggag

SEQ ID NO: 896895 - RNA, 21 nt, Human
ccgggcucacaugguuuguac

SEQ ID NO: 896896 - RNA, 18 nt, Human
gccacgguucaguccagc

SEQ ID NO: 896897 - RNA, 21 nt, Human
gcgccgcggguucggcgccuu

SEQ ID NO: 896898 - RNA, 18 nt, Human
ggcucugauuauguacac

SEQ ID NO: 896899 - RNA, 20 nt, Human
ucacaugguuuguacaauaa

SEQ ID NO: 896900 - RNA, 21 nt, Human
ugauuauguacacgugagaug

SEQ ID NO: 896901 - RNA, 18 nt, Human
uggccuggcugggccggc

SEQ ID NO: 896902 - RNA, 18 nt, Human
uggcugggccggccgggc

SEQ ID NO: 896903 - RNA, 20 nt, Human
uggcugggccggccgggcuc

SEQ ID NO: 896904 - RNA, 23 nt, Human
uguggggcgggcucuccgcagcc

SEQ ID NO: 896905 - RNA, 18 nt, Human
uuuuuuuuuuuuuuuuug

SEQ ID NO: 896906 - RNA, 19 nt, Human
uuuuuuuuuuuuuuuuugu

SEQ ID NO: 896907 - RNA, 19 nt, Human
agcuugccccggcccugcc

SEQ ID NO: 896908 - RNA, 23 nt, Human
cccgcccggcccgcccgcccgcu

SEQ ID NO: 896909 - RNA, 20 nt, Human
cccggcccgcccgcccgcug

SEQ ID NO: 896910 - RNA, 21 nt, Human
ccgucucgcucgccccgcccu

SEQ ID NO: 896911 - RNA, 19 nt, Human
cgcccgcccgcugccucgg

SEQ ID NO: 896912 - RNA, 22 nt, Human
cgcccucgggcccgcccggccc

SEQ ID NO: 896913 - RNA, 23 nt, Human
cgcuggccggcgcgcacucacac

SEQ ID NO: 896914 - RNA, 20 nt, Human
cucgccccgcccucgggccc

SEQ ID NO: 896915 - RNA, 21 nt, Human
gcgcacucacacacacgagcg

SEQ ID NO: 896916 - RNA, 19 nt, Human
gcgcgcacucacacacacg

SEQ ID NO: 896917 - RNA, 21 nt, Human
aaaaaacagguaaauauaaug

SEQ ID NO: 896918 - RNA, 19 nt, Human
aacaaauucugugucuaca

SEQ ID NO: 896919 - RNA, 21 nt, Human
aauuuaaaguccauuuccccu

SEQ ID NO: 896920 - RNA, 19 nt, Human
acaaagcaauauauauaua

SEQ ID NO: 896921 - RNA, 23 nt, Human
acaaagcaauauauauauauauu

SEQ ID NO: 896922 - RNA, 26 nt, Human
agcacaacuucuuuuauauggucacu

SEQ ID NO: 896923 - RNA, 20 nt, Human
aggagccgggagcagccggg

SEQ ID NO: 896924 - RNA, 20 nt, Human
aguaacaucgcugaagcugg

SEQ ID NO: 896925 - RNA, 21 nt, Human
aucuucaccuaguuucuccaa

SEQ ID NO: 896926 - RNA, 18 nt, Human
auguaguggcagugcugc

SEQ ID NO: 896927 - RNA, 21 nt, Human
caaaagaaacuauguauagug

SEQ ID NO: 896928 - RNA, 23 nt, Human
caaagcugagacuucacgcauac

SEQ ID NO: 896929 - RNA, 22 nt, Human
caaguacaaaagaaacuaugua

SEQ ID NO: 896930 - RNA, 24 nt, Human
caccuacagaccaaaguucaugcg

SEQ ID NO: 896931 - RNA, 25 nt, Human
cacuguguucauguuuuguauauuc

SEQ ID NO: 896932 - RNA, 20 nt, Human
cccaugcauucaaacauuuc

SEQ ID NO: 896933 - RNA, 18 nt, Human
ccccgggaccauagccgg

SEQ ID NO: 896934 - RNA, 23 nt, Human
ccgccgccuccuccugggcgucc

SEQ ID NO: 896935 - RNA, 24 nt, Human
ccgccgccuccuccugggcguccu

SEQ ID NO: 896936 - RNA, 18 nt, Human
ccgccgcugaacuuugcg

SEQ ID NO: 896937 - RNA, 22 nt, Human
ccggcagcugggagccaggggc

SEQ ID NO: 896938 - RNA, 18 nt, Human
ccggccgccgccgccgcc

SEQ ID NO: 896939 - RNA, 18 nt, Human
ccuccuccgcuuuuccca

SEQ ID NO: 896940 - RNA, 18 nt, Human
ccucgggagggaacgggg

SEQ ID NO: 896941 - RNA, 20 nt, Human
ccucugggcugcgggaugaa

SEQ ID NO: 896942 - RNA, 21 nt, Human
cgccgccgccgccuccuccug

SEQ ID NO: 896943 - RNA, 18 nt, Human
cggccuggcugcgcugcc

SEQ ID NO: 896944 - RNA, 19 nt, Human
cgggagcagccgggccggg

SEQ ID NO: 896945 - RNA, 21 nt, Human
cgggagcagccgggccgggcg

SEQ ID NO: 896946 - RNA, 19 nt, Human
cgggaugaagcgccgccgu

SEQ ID NO: 896947 - RNA, 23 nt, Human
cgucauucauuacuuuaaguagc

SEQ ID NO: 896948 - RNA, 23 nt, Human
cucuucugguuuaguuuuuuaaa

SEQ ID NO: 896949 - RNA, 21 nt, Human
cugcgcugccccgcggagcgg

SEQ ID NO: 896950 - RNA, 21 nt, Human
cuucccggccgccgccgccgc

SEQ ID NO: 896951 - RNA, 24 nt, Human
cuucugguuuaguuuuuuaaaaag

SEQ ID NO: 896952 - RNA, 21 nt, Human
cuuucugguugcaucuucacc

SEQ ID NO: 896953 - RNA, 22 nt, Human
gagaaggcucuuuaacaaacac

SEQ ID NO: 896954 - RNA, 21 nt, Human
gcccugguuucuuccuccucc

SEQ ID NO: 896955 - RNA, 21 nt, Human
gcccugguuucuuccuccucc

SEQ ID NO: 896956 - RNA, 19 nt, Human
gccgccgccgccuccuccu

SEQ ID NO: 896957 - RNA, 19 nt, Human
gcgccgggcucggucagcg

SEQ ID NO: 896958 - RNA, 19 nt, Human
gcgcugccccgcggagcgg

SEQ ID NO: 896959 - RNA, 19 nt, Human
gcugaacuuugcgagaccu

SEQ ID NO: 896960 - RNA, 23 nt, Human
gcugccccgcggagcggcccugc

SEQ ID NO: 896961 - RNA, 24 nt, Human
ggcccugguuucuuccuccuccug

SEQ ID NO: 896962 - RNA, 20 nt, Human
gggccgggaccgcgcgggga

SEQ ID NO: 896963 - RNA, 25 nt, Human
gggcugcgggaugaagcgccgccgu

SEQ ID NO: 896964 - RNA, 18 nt, Human
ggucccgggcaccugggg

SEQ ID NO: 896965 - RNA, 19 nt, Human
gucugaggucuucuugcuc

SEQ ID NO: 896966 - RNA, 26 nt, Human
uaaaaaacagguaaauauaaugacua

SEQ ID NO: 896967 - RNA, 21 nt, Human
uaaaaaguuucaucauggcug

SEQ ID NO: 896968 - RNA, 23 nt, Human
uaagacccaugcauucaaacauu

SEQ ID NO: 896969 - RNA, 20 nt, Human
uaauaaugaaaaacugugau

SEQ ID NO: 896970 - RNA, 19 nt, Human
uacacauggagagguucca

SEQ ID NO: 896971 - RNA, 24 nt, Human
uacagaccaaaguucaugcguaac

SEQ ID NO: 896972 - RNA, 20 nt, Human
uacauuguguuaaaaaacag

SEQ ID NO: 896973 - RNA, 19 nt, Human
uacuauauacacauggaga

SEQ ID NO: 896974 - RNA, 24 nt, Human
uagccaagcauaugucuacauuua

SEQ ID NO: 896975 - RNA, 25 nt, Human
uagggguuuucauuucucuucauga

SEQ ID NO: 896976 - RNA, 20 nt, Human
uauaacaaauucugugucua

SEQ ID NO: 896977 - RNA, 18 nt, Human
ucccaccucuucuggcug

SEQ ID NO: 896978 - RNA, 21 nt, Human
ucccaccucuucuggcugccc

SEQ ID NO: 896979 - RNA, 21 nt, Human
ucggcgcccgcagccgccgcu

SEQ ID NO: 896980 - RNA, 18 nt, Human
ucgucugccgcuagcccg

SEQ ID NO: 896981 - RNA, 24 nt, Human
ucuacaauaauuuuugaaguguau

SEQ ID NO: 896982 - RNA, 23 nt, Human
ucucuuauuuuaaagucucuucu

SEQ ID NO: 896983 - RNA, 24 nt, Human
ucugaggucuucuugcucuaaagu

SEQ ID NO: 896984 - RNA, 18 nt, Human
ucugccgcuagcccgggg

SEQ ID NO: 896985 - RNA, 22 nt, Human
ugaggucuucuugcucuaaagu

SEQ ID NO: 896986 - RNA, 19 nt, Human
ugccccgcggagcggcccu

SEQ ID NO: 896987 - RNA, 21 nt, Human
ugccccggcuccgucccgucc

SEQ ID NO: 896988 - RNA, 19 nt, Human
uguacauagacaagugcca

SEQ ID NO: 896989 - RNA, 21 nt, Human
uucagaguuaaauagcacaac

SEQ ID NO: 896990 - RNA, 24 nt, Human
uucaugaaauaaaacuguauuuaa

SEQ ID NO: 896991 - RNA, 23 nt, Human
uucauguuuuguauauucaagua

SEQ ID NO: 896992 - RNA, 22 nt, Human
uucccggccgccgccgccgccu

SEQ ID NO: 896993 - RNA, 21 nt, Human
uugcaucuucaccuaguuucu

SEQ ID NO: 896994 - RNA, 18 nt, Human
acaagggaaaggccaagg

SEQ ID NO: 896995 - RNA, 22 nt, Human
agcugggggaguagaggcuaua

SEQ ID NO: 896996 - RNA, 20 nt, Human
agugcagggucaagagcaag

SEQ ID NO: 896997 - RNA, 22 nt, Human
auaaauacaagggaaaggccaa

SEQ ID NO: 896998 - RNA, 19 nt, Human
auggagguccaaaauucug

SEQ ID NO: 896999 - RNA, 18 nt, Human
caagagcaagaagcuggg

SEQ ID NO: 897000 - RNA, 21 nt, Human
ccaagggucuucuaucccuga

SEQ ID NO: 897001 - RNA, 22 nt, Human
cccccaguucagagguaagaac

SEQ ID NO: 897002 - RNA, 19 nt, Human
ccuccuggccccacccacc

SEQ ID NO: 897003 - RNA, 23 nt, Human
cuagaaacaagugaagugugcua

SEQ ID NO: 897004 - RNA, 20 nt, Human
cuuaugggagcccccaguuc

SEQ ID NO: 897005 - RNA, 20 nt, Human
gcccccaguucagagguaag

SEQ ID NO: 897006 - RNA, 19 nt, Human
uagccuaauaauagagauc

SEQ ID NO: 897007 - RNA, 21 nt, Human
uaucagcucaguauauccuuc

SEQ ID NO: 897008 - RNA, 19 nt, Human
uggagguccaaaauucugg

SEQ ID NO: 897009 - RNA, 22 nt, Human
ugucuugcccacuuuuuucaac

SEQ ID NO: 897010 - RNA, 26 nt, Human
uuucauagcaacguugguugauugcc

SEQ ID NO: 897011 - RNA, 18 nt, Human
uuuuuuuuuuuuuuuuug

SEQ ID NO: 897012 - RNA, 25 nt, Human
uuuuuuuuuuuuuuuuuuguuuuuu

SEQ ID NO: 897013 - RNA, 19 nt, Human
aagcagcuggucauuuugc

SEQ ID NO: 897014 - RNA, 22 nt, Human
agugagcaccuccucuucucug

SEQ ID NO: 897015 - RNA, 21 nt, Human
cacuacacagacgagggagcc

SEQ ID NO: 897016 - RNA, 22 nt, Human
cgcucccucccucucacugccc

SEQ ID NO: 897017 - RNA, 21 nt, Human
cuacgcaccagguucugugcu

SEQ ID NO: 897018 - RNA, 30 nt, Human
cucacugcccggagucugggcgagcugccu

SEQ ID NO: 897019 - RNA, 22 nt, Human
cugguuagugagcaccuccucu

SEQ ID NO: 897020 - RNA, 24 nt, Human
cugguuagugagcaccuccucuuc

SEQ ID NO: 897021 - RNA, 19 nt, Human
gaacugggagacacgcccc

SEQ ID NO: 897022 - RNA, 18 nt, Human
gagaugggugcuguucuu

SEQ ID NO: 897023 - RNA, 18 nt, Human
gagcugccugguuaguga

SEQ ID NO: 897024 - RNA, 21 nt, Human
gcccggagucugggcgagcug

SEQ ID NO: 897025 - RNA, 20 nt, Human
uagugagcaccuccucuucu

SEQ ID NO: 897026 - RNA, 25 nt, Human
uagugagcaccuccucuucucuggg

SEQ ID NO: 897027 - RNA, 21 nt, Human
uccacuacacagacgagggag

SEQ ID NO: 897028 - RNA, 24 nt, Human
ucucacugcccggagucugggcga

SEQ ID NO: 897029 - RNA, 24 nt, Human
ugaggcuaggaggggucacguggc

SEQ ID NO: 897030 - RNA, 19 nt, Human
ugaugagguugcucaccug

SEQ ID NO: 897031 - RNA, 19 nt, Human
ugccaggugacuaagcagc

SEQ ID NO: 897032 - RNA, 19 nt, Human
ugguuagugagcaccuccu

SEQ ID NO: 897033 - RNA, 22 nt, Human
uuagucucaggcaacacuaaga

SEQ ID NO: 897034 - RNA, 19 nt, Human
aaaagugguucuggaucca

SEQ ID NO: 897035 - RNA, 19 nt, Human
aacaaugaugguggucacc

SEQ ID NO: 897036 - RNA, 19 nt, Human
aacagcauugcuccuccag

SEQ ID NO: 897037 - RNA, 20 nt, Human
aacagcauugcuccuccagc

SEQ ID NO: 897038 - RNA, 19 nt, Human
aagaugggacccaggaagg

SEQ ID NO: 897039 - RNA, 19 nt, Human
aagugguucuggauccagg

SEQ ID NO: 897040 - RNA, 18 nt, Human
aggaaaacugaacaucug

SEQ ID NO: 897041 - RNA, 21 nt, Human
aggccccaugaacacccccaa

SEQ ID NO: 897042 - RNA, 18 nt, Human
agugguucuggauccagg

SEQ ID NO: 897043 - RNA, 23 nt, Human
auguguugugcauguaugugugu

SEQ ID NO: 897044 - RNA, 22 nt, Human
caggaaaacugaacaucugaga

SEQ ID NO: 897045 - RNA, 25 nt, Human
caggccccaugaacacccccaaaga

SEQ ID NO: 897046 - RNA, 19 nt, Human
cagugugaaaaugaacuaa

SEQ ID NO: 897047 - RNA, 19 nt, Human
cccaugaacacccccaaag

SEQ ID NO: 897048 - RNA, 23 nt, Human
cccaugaacacccccaaagaaug

SEQ ID NO: 897049 - RNA, 27 nt, Human
cccaugaacacccccaaagaaugcccc

SEQ ID NO: 897050 - RNA, 19 nt, Human
ccccaaagaaugccccucc

SEQ ID NO: 897051 - RNA, 20 nt, Human
ccccaaagaaugccccuccu

SEQ ID NO: 897052 - RNA, 21 nt, Human
ccccaaagaaugccccuccuc

SEQ ID NO: 897053 - RNA, 19 nt, Human
ccccaugaacacccccaaa

SEQ ID NO: 897054 - RNA, 28 nt, Human
ccccaugaacacccccaaagaaugcccu

SEQ ID NO: 897055 - RNA, 19 nt, Human
cccccaaagaaugccccuc

SEQ ID NO: 897056 - RNA, 27 nt, Human
ccucuuggaaauaaaagugguucuggg

SEQ ID NO: 897057 - RNA, 18 nt, Human
cuauaggaaaaaaagauc

SEQ ID NO: 897058 - RNA, 23 nt, Human
cuccucuuggaaauaaaaguggu

SEQ ID NO: 897059 - RNA, 20 nt, Human
gaacacccccaaagaaugcc

SEQ ID NO: 897060 - RNA, 20 nt, Human
gcauguauguguguugagga

SEQ ID NO: 897061 - RNA, 19 nt, Human
ggacccaggaagggauugc

SEQ ID NO: 897062 - RNA, 25 nt, Human
guaagaugggacccaggaagggauu

SEQ ID NO: 897063 - RNA, 21 nt, Human
uauguguugugcauguaugug

SEQ ID NO: 897064 - RNA, 21 nt, Human
uccaggccccaugaacacccc

SEQ ID NO: 897065 - RNA, 19 nt, Human
ugaacacccccaaagaaug

SEQ ID NO: 897066 - RNA, 21 nt, Human
ugaggaagaggauggggaaaa

SEQ ID NO: 897067 - RNA, 20 nt, Human
ugccccuccucuuggaaaua

SEQ ID NO: 897068 - RNA, 18 nt, Human
uguauauguguugugcau

SEQ ID NO: 897069 - RNA, 28 nt, Human
uguguugugcauguauguguguugagga

SEQ ID NO: 897070 - RNA, 19 nt, Human
uguugugcauguaugugug

SEQ ID NO: 897071 - RNA, 26 nt, Human
uguugugcauguauguguguugagga

SEQ ID NO: 897072 - RNA, 25 nt, Human
aaaaaaaaaaaaaguaauacgaaag

SEQ ID NO: 897073 - RNA, 25 nt, Human
aaaaaaaaaaaguaauacgaaagca

SEQ ID NO: 897074 - RNA, 19 nt, Human
aaaaaaaacucccuuaugg

SEQ ID NO: 897075 - RNA, 25 nt, Human
aaagaccgaggaugauaucaaauaa

SEQ ID NO: 897076 - RNA, 20 nt, Human
aaaugauaucaaacaaacaa

SEQ ID NO: 897077 - RNA, 24 nt, Human
aacaaacaagcuaccuagaauuca

SEQ ID NO: 897078 - RNA, 21 nt, Human
aacaccuacagcagagagaaa

SEQ ID NO: 897079 - RNA, 22 nt, Human
aaccacaaccauucuaaucuuc

SEQ ID NO: 897080 - RNA, 19 nt, Human
aagcaaagaugaauuagac

SEQ ID NO: 897081 - RNA, 21 nt, Human
aaggguaggguccagguggcu

SEQ ID NO: 897082 - RNA, 22 nt, Human
aaugucuuuuuaaaccacaacc

SEQ ID NO: 897083 - RNA, 21 nt, Human
acaccuacagcagagagaaac

SEQ ID NO: 897084 - RNA, 20 nt, Human
acagaguuuccuucaggaag

SEQ ID NO: 897085 - RNA, 21 nt, Human
acaguacccaaagcaaaauac

SEQ ID NO: 897086 - RNA, 22 nt, Human
acaugggcucuagauuuagaca

SEQ ID NO: 897087 - RNA, 18 nt, Human
accauucuaaucuucaau

SEQ ID NO: 897088 - RNA, 21 nt, Human
acccggggcuggguuuugggg

SEQ ID NO: 897089 - RNA, 21 nt, Human
acucauuuuaccacuuucccc

SEQ ID NO: 897090 - RNA, 23 nt, Human
acucauuuuaccacuuuccccaa

SEQ ID NO: 897091 - RNA, 21 nt, Human
acucgugagcgccuguguguc

SEQ ID NO: 897092 - RNA, 22 nt, Human
agaaacaaaugauaucaaacaa

SEQ ID NO: 897093 - RNA, 22 nt, Human
agaaaggacuuuuaaguauuca

SEQ ID NO: 897094 - RNA, 25 nt, Human
agaacaccuacagcagagagaaaca

SEQ ID NO: 897095 - RNA, 23 nt, Human
agagaagcagcuucuugccuagg

SEQ ID NO: 897096 - RNA, 18 nt, Human
aggagagacucgugagcg

SEQ ID NO: 897097 - RNA, 23 nt, Human
aguguugcaguuaaagaacaugg

SEQ ID NO: 897098 - RNA, 21 nt, Human
auaaaguaacaggaagcaaag

SEQ ID NO: 897099 - RNA, 19 nt, Human
auacuagaacuuaauagcc

SEQ ID NO: 897100 - RNA, 18 nt, Human
aucacaguacccaaagca

SEQ ID NO: 897101 - RNA, 20 nt, Human
caccuacagcagagagaaac

SEQ ID NO: 897102 - RNA, 22 nt, Human
caccuacagcagagagaaacaa

SEQ ID NO: 897103 - RNA, 23 nt, Human
cagcagagagaaacaaaugauau

SEQ ID NO: 897104 - RNA, 23 nt, Human
cagcagcagcagucgcgaaaggg

SEQ ID NO: 897105 - RNA, 18 nt, Human
cagcagucgcgaaagggu

SEQ ID NO: 897106 - RNA, 23 nt, Human
cauuuuaccacuuuccccaauuu

SEQ ID NO: 897107 - RNA, 28 nt, Human
cgaaguauuuaaaaaaaaaaaaaaaaaa

SEQ ID NO: 897108 - RNA, 27 nt, Human
cgggcagcagcagcagcagucgcgaaa

SEQ ID NO: 897109 - RNA, 19 nt, Human
cuaauugaauaaagggcaa

SEQ ID NO: 897110 - RNA, 21 nt, Human
cucauuuuaccacuuucccca

SEQ ID NO: 897111 - RNA, 22 nt, Human
cugcuuccacguccgggcagca

SEQ ID NO: 897112 - RNA, 24 nt, Human
cuugcauuugacuccaaauacuag

SEQ ID NO: 897113 - RNA, 21 nt, Human
gaggccgaagaggagcuguug

SEQ ID NO: 897114 - RNA, 23 nt, Human
gauguggagagcuuuagaacaau

SEQ ID NO: 897115 - RNA, 21 nt, Human
gcgaaaggguaggguccaggu

SEQ ID NO: 897116 - RNA, 22 nt, Human
ggguuuugggggucgccgcccu

SEQ ID NO: 897117 - RNA, 20 nt, Human
gguaauaaguuagccugaaa

SEQ ID NO: 897118 - RNA, 23 nt, Human
uaaaaauguaagcacacuuuuga

SEQ ID NO: 897119 - RNA, 20 nt, Human
uaaaaugguucugaaaauaa

SEQ ID NO: 897120 - RNA, 22 nt, Human
uaccacuuuccccaauuuccau

SEQ ID NO: 897121 - RNA, 25 nt, Human
uagaacaauggcugugauaaugaaa

SEQ ID NO: 897122 - RNA, 19 nt, Human
uauuugucuuuuuaaaaau

SEQ ID NO: 897123 - RNA, 22 nt, Human
ugauacagaguuuccuucagga

SEQ ID NO: 897124 - RNA, 27 nt, Human
ugcauuugacuccaaauacuagaacuu

SEQ ID NO: 897125 - RNA, 22 nt, Human
ugccuagguugggacccggggc

SEQ ID NO: 897126 - RNA, 22 nt, Human
uggauucugaauccguaugucc

SEQ ID NO: 897127 - RNA, 19 nt, Human
uggcagagaagcagcuucu

SEQ ID NO: 897128 - RNA, 25 nt, Human
uggcugugauaaugaaaaaaaaaaa

SEQ ID NO: 897129 - RNA, 21 nt, Human
uguaaaaucagcuacaauuua

SEQ ID NO: 897130 - RNA, 22 nt, Human
ugucagaaacaucuuuaucauc

SEQ ID NO: 897131 - RNA, 23 nt, Human
ugugauaaugaaaaaaaaaaaaa

SEQ ID NO: 897132 - RNA, 23 nt, Human
uuaaaaauguaagcacacuuuug

SEQ ID NO: 897133 - RNA, 20 nt, Human
uuacaaguuaaaaagucacu

SEQ ID NO: 897134 - RNA, 22 nt, Human
guagagaaugcccuuuauauau

SEQ ID NO: 897135 - RNA, 20 nt, Human
ucccggagcuggucgggucu

SEQ ID NO: 897136 - RNA, 20 nt, Human
ucuaaagaaaaguguacaaa

SEQ ID NO: 897137 - RNA, 18 nt, Human
ugacccaccccaucccgg

SEQ ID NO: 897138 - RNA, 18 nt, Human
uggaugugcugcccagug

SEQ ID NO: 897139 - RNA, 21 nt, Human
aaacacagaugacagcgaccc

SEQ ID NO: 897140 - RNA, 18 nt, Human
aaccgagcccaggccucu

SEQ ID NO: 897141 - RNA, 22 nt, Human
aagcucucccgcugacgcugcc

SEQ ID NO: 897142 - RNA, 18 nt, Human
accaggcagagcugcugg

SEQ ID NO: 897143 - RNA, 24 nt, Human
acgcagaccacggcacugcaggcc

SEQ ID NO: 897144 - RNA, 19 nt, Human
agcugcagagcacgcagac

SEQ ID NO: 897145 - RNA, 21 nt, Human
caaccaggcagagcugcuggu

SEQ ID NO: 897146 - RNA, 24 nt, Human
cagagcacgcagaccacggcacug

SEQ ID NO: 897147 - RNA, 21 nt, Human
ccugcagggcccgggaaccga

SEQ ID NO: 897148 - RNA, 22 nt, Human
ccugccccugcagggcccggga

SEQ ID NO: 897149 - RNA, 23 nt, Human
ccugccccugcagggcccgggaa

SEQ ID NO: 897150 - RNA, 19 nt, Human
cgcuaacuguguggacacg

SEQ ID NO: 897151 - RNA, 19 nt, Human
cggcugccaggggcacagg

SEQ ID NO: 897152 - RNA, 22 nt, Human
cggcugccaggggcacagguag

SEQ ID NO: 897153 - RNA, 21 nt, Human
cuaaacacagaugacagcgac

SEQ ID NO: 897154 - RNA, 20 nt, Human
cucacagcugcagagcacgc

SEQ ID NO: 897155 - RNA, 24 nt, Human
gaagcucucccgcugacgcugccu

SEQ ID NO: 897156 - RNA, 22 nt, Human
gccccugcagggcccgggaacu

SEQ ID NO: 897157 - RNA, 19 nt, Human
gcccgggaaccgagcccag

SEQ ID NO: 897158 - RNA, 19 nt, Human
gccugaggucaguucgccc

SEQ ID NO: 897159 - RNA, 21 nt, Human
ggaagagagcccaggccgccc

SEQ ID NO: 897160 - RNA, 18 nt, Human
ggcccuggaaagcggcug

SEQ ID NO: 897161 - RNA, 24 nt, Human
gggcugggcuggucggggagaagc

SEQ ID NO: 897162 - RNA, 21 nt, Human
ggggcugggcuggucggggag

SEQ ID NO: 897163 - RNA, 18 nt, Human
ggugcuggaggcccgggg

SEQ ID NO: 897164 - RNA, 18 nt, Human
gucucacagcugcagagc

SEQ ID NO: 897165 - RNA, 18 nt, Human
ucucccgcugacgcugcc

SEQ ID NO: 897166 - RNA, 23 nt, Human
ucucccgcugacgcugccugggc

SEQ ID NO: 897167 - RNA, 19 nt, Human
ucucugagaggcuggagca

SEQ ID NO: 897168 - RNA, 21 nt, Human
ucucugagaggcuggagcaga

SEQ ID NO: 897169 - RNA, 19 nt, Human
ugacgcugccugggccugc

SEQ ID NO: 897170 - RNA, 21 nt, Human
ugaggacugcagaaguccugc

SEQ ID NO: 897171 - RNA, 18 nt, Human
ugaggucaguucgccccc

SEQ ID NO: 897172 - RNA, 21 nt, Human
ugcaggccaaccaggcagagc

SEQ ID NO: 897173 - RNA, 21 nt, Human
ugccugggccugccccugcag

SEQ ID NO: 897174 - RNA, 20 nt, Human
uggggcugggcuggucgggg

SEQ ID NO: 897175 - RNA, 23 nt, Human
uuacaagacaugccugaggucag

SEQ ID NO: 897176 - RNA, 22 nt, Human
augagacaacugagauccagag

SEQ ID NO: 897177 - RNA, 24 nt, Human
auugagcagagaaaagggaaggga

SEQ ID NO: 897178 - RNA, 18 nt, Human
cagcgcacaaaccugucc

SEQ ID NO: 897179 - RNA, 21 nt, Human
gcagagaaaagggaagggagc

SEQ ID NO: 897180 - RNA, 25 nt, Human
uauugagcagagaaaagggaaggga

SEQ ID NO: 897181 - RNA, 23 nt, Human
ucuuccaaguucugguggacuuc

SEQ ID NO: 897182 - RNA, 19 nt, Human
ugaagagaugggucuuggc

SEQ ID NO: 897183 - RNA, 27 nt, Human
ugaagagaugggucuuggcuccuaauu

SEQ ID NO: 897184 - RNA, 22 nt, Human
ugacucguaacacguucuggcc

SEQ ID NO: 897185 - RNA, 19 nt, Human
ugagacaacugagauccag

SEQ ID NO: 897186 - RNA, 20 nt, Human
ugagcagagaaaagggaagg

SEQ ID NO: 897187 - RNA, 19 nt, Human
uuuaaaauauuuauugagc

SEQ ID NO: 897188 - RNA, 24 nt, Human
uuuaaaauauuuauugagcagaga

SEQ ID NO: 897189 - RNA, 23 nt, Human
aaaaaaaaaaaaaaaaaaaagag

SEQ ID NO: 897190 - RNA, 24 nt, Human
aaagaccaggaccccccccacccc

SEQ ID NO: 897191 - RNA, 20 nt, Human
aaagagagagagagagaaau

SEQ ID NO: 897192 - RNA, 22 nt, Human
aaaggggagggcuggcaaagag

SEQ ID NO: 897193 - RNA, 25 nt, Human
aagagaccaauagacaaaaagguaa

SEQ ID NO: 897194 - RNA, 24 nt, Human
aagcacugaaagcccaugagucaa

SEQ ID NO: 897195 - RNA, 21 nt, Human
aaggaucacuggcuccgaguc

SEQ ID NO: 897196 - RNA, 22 nt, Human
accaggaccccccccaccccgc

SEQ ID NO: 897197 - RNA, 22 nt, Human
agaaggagucuuuuccuuugau

SEQ ID NO: 897198 - RNA, 19 nt, Human
agacccuucauccccagau

SEQ ID NO: 897199 - RNA, 22 nt, Human
agaguuuuggcagccccugcuu

SEQ ID NO: 897200 - RNA, 20 nt, Human
agccaaagaccaggaccccc

SEQ ID NO: 897201 - RNA, 23 nt, Human
agcccaugagucaagccauagcc

SEQ ID NO: 897202 - RNA, 21 nt, Human
aguagguucuuuuuuuuuccu

SEQ ID NO: 897203 - RNA, 20 nt, Human
auaaaaucucuccccagacc

SEQ ID NO: 897204 - RNA, 21 nt, Human
auaaaaucucuccccagacca

SEQ ID NO: 897205 - RNA, 24 nt, Human
aucaucacuuuuaauccuccccag

SEQ ID NO: 897206 - RNA, 23 nt, Human
caaaaagcgaaguuucaauagug

SEQ ID NO: 897207 - RNA, 27 nt, Human
caagugaugaaauaaaaaagaaagccc

SEQ ID NO: 897208 - RNA, 23 nt, Human
cagaaggggcuucaucuucagac

SEQ ID NO: 897209 - RNA, 21 nt, Human
caggaccgagucgagaagcca

SEQ ID NO: 897210 - RNA, 21 nt, Human
caggaccgagucgagaagcca

SEQ ID NO: 897211 - RNA, 23 nt, Human
caggaccgagucgagaagccaaa

SEQ ID NO: 897212 - RNA, 22 nt, Human
cauugggaaaggggagggcugg

SEQ ID NO: 897213 - RNA, 21 nt, Human
ccagugauuaauuugacaugg

SEQ ID NO: 897214 - RNA, 20 nt, Human
cccacccucccuacaaggua

SEQ ID NO: 897215 - RNA, 18 nt, Human
cccacuuucccuuugccu

SEQ ID NO: 897216 - RNA, 23 nt, Human
cccauugcccacccucccuacaa

SEQ ID NO: 897217 - RNA, 22 nt, Human
ccccagaaggggcuucaucuuc

SEQ ID NO: 897218 - RNA, 18 nt, Human
ccccauugcccacccucc

SEQ ID NO: 897219 - RNA, 21 nt, Human
ccccauugcccacccucccua

SEQ ID NO: 897220 - RNA, 18 nt, Human
cccucuuuuuucuuuuuu

SEQ ID NO: 897221 - RNA, 19 nt, Human
ccgguuccucaucuucuuc

SEQ ID NO: 897222 - RNA, 19 nt, Human
cgagaagccaaagaccagg

SEQ ID NO: 897223 - RNA, 19 nt, Human
cuccccagaccaucaucac

SEQ ID NO: 897224 - RNA, 24 nt, Human
cuggcaggcuuuccgguuccucau

SEQ ID NO: 897225 - RNA, 22 nt, Human
cuucagacccuucauccccaga

SEQ ID NO: 897226 - RNA, 21 nt, Human
cuugguaaaauuuuauccaaa

SEQ ID NO: 897227 - RNA, 21 nt, Human
gaaacaggaccgagucgagaa

SEQ ID NO: 897228 - RNA, 23 nt, Human
gaaaggggagggcuggcaaagag

SEQ ID NO: 897229 - RNA, 18 nt, Human
gaagcuguggggcgaccc

SEQ ID NO: 897230 - RNA, 22 nt, Human
gacaaauggaaaaaagcacuga

SEQ ID NO: 897231 - RNA, 20 nt, Human
gagagagagagaaauguuac

SEQ ID NO: 897232 - RNA, 25 nt, Human
gauaacaagugaugaaauaaaaaag

SEQ ID NO: 897233 - RNA, 26 nt, Human
gccaaagaccaggaccccccccaccc

SEQ ID NO: 897234 - RNA, 18 nt, Human
ggaaaaaagcacugaaag

SEQ ID NO: 897235 - RNA, 24 nt, Human
ggaaaggggagggcuggcaaagag

SEQ ID NO: 897236 - RNA, 22 nt, Human
ggaaauaugaaaucaagaguuu

SEQ ID NO: 897237 - RNA, 19 nt, Human
ggcaaagagaccaauagac

SEQ ID NO: 897238 - RNA, 24 nt, Human
gggaaaggggagggcuggcaaaga

SEQ ID NO: 897239 - RNA, 21 nt, Human
gguucuuuuuuuuuccucccu

SEQ ID NO: 897240 - RNA, 23 nt, Human
guuccucaucuucuucuuuggga

SEQ ID NO: 897241 - RNA, 27 nt, Human
guuugcuuuaaaaaaaaaaaaaaaaaa

SEQ ID NO: 897242 - RNA, 18 nt, Human
uaacaagugaugaaauaa

SEQ ID NO: 897243 - RNA, 24 nt, Human
uaacaagugaugaaauaaaaaaga

SEQ ID NO: 897244 - RNA, 19 nt, Human
uaaggucggguaaccccau

SEQ ID NO: 897245 - RNA, 22 nt, Human
uaccugccucaucgguggaagu

SEQ ID NO: 897246 - RNA, 23 nt, Human
uagacaaaaagguaacuuaaaca

SEQ ID NO: 897247 - RNA, 23 nt, Human
uagcaaaaagcgaaguuucaaua

SEQ ID NO: 897248 - RNA, 21 nt, Human
uaggguuuuuuuuuuuuugga

SEQ ID NO: 897249 - RNA, 23 nt, Human
ucacuggacuuggcgucacugua

SEQ ID NO: 897250 - RNA, 18 nt, Human
ucacuggcuccgagucuc

SEQ ID NO: 897251 - RNA, 22 nt, Human
ucacuguagccuuuagucuggg

SEQ ID NO: 897252 - RNA, 18 nt, Human
ucauugggaaaggggagg

SEQ ID NO: 897253 - RNA, 20 nt, Human
uccagugauuaauuugacau

SEQ ID NO: 897254 - RNA, 18 nt, Human
ucccuacaagguaaaaaa

SEQ ID NO: 897255 - RNA, 23 nt, Human
ucuuauugcuuuacaaccguggu

SEQ ID NO: 897256 - RNA, 23 nt, Human
ugacaauugauuuuuuaaaaguc

SEQ ID NO: 897257 - RNA, 22 nt, Human
ugaguacuuuuaguaacaguuc

SEQ ID NO: 897258 - RNA, 20 nt, Human
ugcuuuacaaccgugguaca

SEQ ID NO: 897259 - RNA, 24 nt, Human
uggcagccccugcuuuuuuuuuuu

SEQ ID NO: 897260 - RNA, 24 nt, Human
ugguuugcuuuaaaaaaaaaaaaa

SEQ ID NO: 897261 - RNA, 20 nt, Human
uguagccuuuagucuggguu

SEQ ID NO: 897262 - RNA, 20 nt, Human
uuaaaaaaaaaaaaaaaaaa

SEQ ID NO: 897263 - RNA, 24 nt, Human
uucagacccuucauccccagauuu

SEQ ID NO: 897264 - RNA, 19 nt, Human
uucccuuugccuuucacug

SEQ ID NO: 897265 - RNA, 20 nt, Human
uuccucaucuucuucuuugg

SEQ ID NO: 897266 - RNA, 20 nt, Human
uuccucaucuucuucuuugg

SEQ ID NO: 897267 - RNA, 19 nt, Human
uucgcugucgaaacaggac

SEQ ID NO: 897268 - RNA, 23 nt, Human
uugcccacccucccuacaaggua

SEQ ID NO: 897269 - RNA, 23 nt, Human
uuuagcaaaaagcgaaguuucaa

SEQ ID NO: 897270 - RNA, 19 nt, Human
uuuccucccucuuuuuucu

SEQ ID NO: 897271 - RNA, 19 nt, Human
uuuccucccucuuuuuucu

SEQ ID NO: 897272 - RNA, 25 nt, Human
uuuccucccucuuuuuucuuuuuuu

SEQ ID NO: 897273 - RNA, 20 nt, Human
uuuucuggcaggcuuuccgg

SEQ ID NO: 897274 - RNA, 18 nt, Human
uuuuuuaaaaguccaggu

SEQ ID NO: 897275 - RNA, 22 nt, Human
uuuuuucuuuuuuuuucuuuuu

SEQ ID NO: 897276 - RNA, 21 nt, Human
uuuuuucuuuuuuuuuuuaau

SEQ ID NO: 897277 - RNA, 18 nt, Human
uuuuuuuuuuuuuuucug

SEQ ID NO: 897278 - RNA, 25 nt, Human
uuuuuuuuuuuuuuuuucugaguuu

SEQ ID NO: 897279 - RNA, 19 nt, Human
caagcccugaggcccacaa

SEQ ID NO: 897280 - RNA, 20 nt, Human
cagccuuucuccugaugccc

SEQ ID NO: 897281 - RNA, 23 nt, Human
caugccugccccaagcccugagg

SEQ ID NO: 897282 - RNA, 23 nt, Human
ccaagcccugaggcccacaaguc

SEQ ID NO: 897283 - RNA, 23 nt, Human
ccccgggaccugugugccugggc

SEQ ID NO: 897284 - RNA, 26 nt, Human
ccgauccacgucccggagcucugcac

SEQ ID NO: 897285 - RNA, 23 nt, Human
ccugugugccugggccaguccca

SEQ ID NO: 897286 - RNA, 22 nt, Human
cgcgccggcuccgauccacguc

SEQ ID NO: 897287 - RNA, 18 nt, Human
gccccaagcccugaggcc

SEQ ID NO: 897288 - RNA, 18 nt, Human
gccuuucuccugaugccc

SEQ ID NO: 897289 - RNA, 19 nt, Human
gccuuucuccugaugcccc

SEQ ID NO: 897290 - RNA, 22 nt, Human
gcucagccccaagaguucaggg

SEQ ID NO: 897291 - RNA, 21 nt, Human
ucagccccaagaguucaggga

SEQ ID NO: 897292 - RNA, 19 nt, Human
ugaggcccacaagucccag

SEQ ID NO: 897293 - RNA, 19 nt, Human
ugccccaagcccugaggcc

SEQ ID NO: 897294 - RNA, 19 nt, Human
ugccccgggaccugugugc

SEQ ID NO: 897295 - RNA, 21 nt, Human
uuaauguguaacaguaggccu

SEQ ID NO: 897296 - RNA, 21 nt, Human
uucagggaggaaaaaacaggg

SEQ ID NO: 897297 - RNA, 20 nt, Human
uuuuuuuuuuuuuuagcugg

SEQ ID NO: 897298 - RNA, 24 nt, Human
uuuuuuuuuuuuuuuuuagcuggg

SEQ ID NO: 897299 - RNA, 21 nt, Human
aagaagaaacccggcagaagc

SEQ ID NO: 897300 - RNA, 20 nt, Human
aagaagaagcugcaggacuu

SEQ ID NO: 897301 - RNA, 19 nt, Human
aagcugcaggacuuugcca

SEQ ID NO: 897302 - RNA, 21 nt, Human
aagcugcaggacuuugccagc

SEQ ID NO: 897303 - RNA, 22 nt, Human
agaaggagaucgagaaccucac

SEQ ID NO: 897304 - RNA, 21 nt, Human
agcggaacagccugcaagacc

SEQ ID NO: 897305 - RNA, 23 nt, Human
agcucuggaagaggggaagaaga

SEQ ID NO: 897306 - RNA, 24 nt, Human
agcucuggaagaggggaagaagag

SEQ ID NO: 897307 - RNA, 22 nt, Human
aggagacauggucuucgcuucu

SEQ ID NO: 897308 - RNA, 19 nt, Human
aggcagaucgcgguggagu

SEQ ID NO: 897309 - RNA, 21 nt, Human
agucuguggggccagggacag

SEQ ID NO: 897310 - RNA, 18 nt, Human
aucccccgcaggcagauc

SEQ ID NO: 897311 - RNA, 21 nt, Human
caagaagaaacccggcagaag

SEQ ID NO: 897312 - RNA, 23 nt, Human
cacccuuagaaugaaguugagag

SEQ ID NO: 897313 - RNA, 20 nt, Human
caccguggaagcucuggaag

SEQ ID NO: 897314 - RNA, 20 nt, Human
caccucaaguacuagcccau

SEQ ID NO: 897315 - RNA, 18 nt, Human
cccccucucacccuaccc

SEQ ID NO: 897316 - RNA, 20 nt, Human
cccuacccuggacgcugucc

SEQ ID NO: 897317 - RNA, 19 nt, Human
ccucucacccuacccugga

SEQ ID NO: 897318 - RNA, 21 nt, Human
ccucucacccuacccuggacg

SEQ ID NO: 897319 - RNA, 22 nt, Human
cgacucgaagaagaagcugcag

SEQ ID NO: 897320 - RNA, 20 nt, Human
cgccacaucuccacucucaa

SEQ ID NO: 897321 - RNA, 19 nt, Human
cggcgaggccaacgcggcg

SEQ ID NO: 897322 - RNA, 18 nt, Human
cuccaacgaggagacaug

SEQ ID NO: 897323 - RNA, 19 nt, Human
cucugcgcugagauccccc

SEQ ID NO: 897324 - RNA, 18 nt, Human
cuugcuuccuucaugggu

SEQ ID NO: 897325 - RNA, 20 nt, Human
gaccagcuggacgaggagau

SEQ ID NO: 897326 - RNA, 18 nt, Human
gagcgccacaucuccacu

SEQ ID NO: 897327 - RNA, 20 nt, Human
gcggcggcggcggcagaggc

SEQ ID NO: 897328 - RNA, 18 nt, Human
gcuugaccccccagcuuc

SEQ ID NO: 897329 - RNA, 20 nt, Human
ggaagagaucacucuccuug

SEQ ID NO: 897330 - RNA, 22 nt, Human
ggccaacgcggcggcggcggca

SEQ ID NO: 897331 - RNA, 20 nt, Human
ggccaagcagaaccuggagc

SEQ ID NO: 897332 - RNA, 21 nt, Human
gggaccugggggguggccuuc

SEQ ID NO: 897333 - RNA, 22 nt, Human
ggggcggcgaggccaacgcggc

SEQ ID NO: 897334 - RNA, 21 nt, Human
ggguggccuuccucggggcag

SEQ ID NO: 897335 - RNA, 23 nt, Human
uaaacuggaaaagaccaagaaca

SEQ ID NO: 897336 - RNA, 21 nt, Human
uacccuggacgcuguccuugu

SEQ ID NO: 897337 - RNA, 22 nt, Human
ucccccgcaggcagaucgcggu

SEQ ID NO: 897338 - RNA, 25 nt, Human
uccccugcuauuggguuucuccaac

SEQ ID NO: 897339 - RNA, 19 nt, Human
ucccucaguucccagcucc

SEQ ID NO: 897340 - RNA, 21 nt, Human
ucccucaguucccagcuccag

SEQ ID NO: 897341 - RNA, 24 nt, Human
ucccugggaccucuuugcaucccu

SEQ ID NO: 897342 - RNA, 21 nt, Human
uccugccacaucauccagggg

SEQ ID NO: 897343 - RNA, 20 nt, Human
uccuugcuuccuucaugggu

SEQ ID NO: 897344 - RNA, 20 nt, Human
ucucacccuacccuggacgg

SEQ ID NO: 897345 - RNA, 21 nt, Human
ucucagagucuguggggccag

SEQ ID NO: 897346 - RNA, 23 nt, Human
ugaacaccucaaguacuagccca

SEQ ID NO: 897347 - RNA, 19 nt, Human
ugaccccccagcuuccccu

SEQ ID NO: 897348 - RNA, 21 nt, Human
ugccacaucauccaggggacc

SEQ ID NO: 897349 - RNA, 19 nt, Human
ugcgcugagaucccccgca

SEQ ID NO: 897350 - RNA, 23 nt, Human
ugcuuccuucauggguccucuca

SEQ ID NO: 897351 - RNA, 22 nt, Human
uggaaaagaccaagaacaggcu

SEQ ID NO: 897352 - RNA, 21 nt, Human
uggggccagggacaggggcca

SEQ ID NO: 897353 - RNA, 22 nt, Human
uuuugaguaaaaagggcuccuu

SEQ ID NO: 897354 - RNA, 21 nt, Human
uuuuuuuucagagucccauaa

SEQ ID NO: 897355 - RNA, 19 nt, Human
aaaacacaacuaaauccua

SEQ ID NO: 897356 - RNA, 25 nt, Human
aagagaaaacaaaaacacuccaaag

SEQ ID NO: 897357 - RNA, 18 nt, Human
acaguaaaugcagcauga

SEQ ID NO: 897358 - RNA, 21 nt, Human
accacaugaugauccuauaca

SEQ ID NO: 897359 - RNA, 20 nt, Human
accccgagucugaggcgcac

SEQ ID NO: 897360 - RNA, 21 nt, Human
accccggagcuggcaccggcc

SEQ ID NO: 897361 - RNA, 22 nt, Human
accgaggggugaggcgugggug

SEQ ID NO: 897362 - RNA, 23 nt, Human
agaaaacaaaaacacuccaaaga

SEQ ID NO: 897363 - RNA, 21 nt, Human
agccaguauugauaucgcgca

SEQ ID NO: 897364 - RNA, 23 nt, Human
agcugcuuaaguaaaaucagaag

SEQ ID NO: 897365 - RNA, 19 nt, Human
aggcaccgaggggugaggc

SEQ ID NO: 897366 - RNA, 23 nt, Human
aggcagacggaggggcacggggc

SEQ ID NO: 897367 - RNA, 18 nt, Human
agggguggaguuggggga

SEQ ID NO: 897368 - RNA, 21 nt, Human
augccugggugggagcucagg

SEQ ID NO: 897369 - RNA, 23 nt, Human
caacuaaauccuaucaguacagc

SEQ ID NO: 897370 - RNA, 21 nt, Human
caauguccuaaaacacaacua

SEQ ID NO: 897371 - RNA, 22 nt, Human
caauguccuaaaacacaacuaa

SEQ ID NO: 897372 - RNA, 25 nt, Human
cacccuggaaccagccacucacccu

SEQ ID NO: 897373 - RNA, 22 nt, Human
cagacggaggggcacggggcug

SEQ ID NO: 897374 - RNA, 20 nt, Human
cagcacagaggcugggccug

SEQ ID NO: 897375 - RNA, 24 nt, Human
cagcacagaggcugggccugugug

SEQ ID NO: 897376 - RNA, 20 nt, Human
cagccccgagcuccacucag

SEQ ID NO: 897377 - RNA, 19 nt, Human
cagcuccccuacgcagccc

SEQ ID NO: 897378 - RNA, 21 nt, Human
cauggaaugguagcugcuuaa

SEQ ID NO: 897379 - RNA, 21 nt, Human
ccagaggcuccugccacgugg

SEQ ID NO: 897380 - RNA, 19 nt, Human
cccaggcaccgagggguga

SEQ ID NO: 897381 - RNA, 21 nt, Human
ccgugcggaggcagacggagg

SEQ ID NO: 897382 - RNA, 19 nt, Human
ccuauacagcugcccagag

SEQ ID NO: 897383 - RNA, 20 nt, Human
ccugacucuuugccagaaac

SEQ ID NO: 897384 - RNA, 24 nt, Human
ccuuggaagagaaaacaaaaacac

SEQ ID NO: 897385 - RNA, 20 nt, Human
cggggcugggcccaggcacc

SEQ ID NO: 897386 - RNA, 19 nt, Human
cuaaaacacaacuaaaucc

SEQ ID NO: 897387 - RNA, 18 nt, Human
cuaucaguacagcagagu

SEQ ID NO: 897388 - RNA, 19 nt, Human
cucaccccgagucugaggc

SEQ ID NO: 897389 - RNA, 19 nt, Human
cucacccuuccuaacacaa

SEQ ID NO: 897390 - RNA, 23 nt, Human
cugggcagggcccaguagccgcc

SEQ ID NO: 897391 - RNA, 22 nt, Human
cugugagggguggaguuggggg

SEQ ID NO: 897392 - RNA, 20 nt, Human
gaaacaggcccaaacuguga

SEQ ID NO: 897393 - RNA, 23 nt, Human
gagaaaacaaaaacacuccaaag

SEQ ID NO: 897394 - RNA, 18 nt, Human
gagcacuggagaugccug

SEQ ID NO: 897395 - RNA, 18 nt, Human
gagggguggaguuggggg

SEQ ID NO: 897396 - RNA, 18 nt, Human
gccccgagcuccacucag

SEQ ID NO: 897397 - RNA, 18 nt, Human
gcucugggaggcaagucc

SEQ ID NO: 897398 - RNA, 20 nt, Human
gcugggcccaggcaccgagg

SEQ ID NO: 897399 - RNA, 18 nt, Human
ggaggagggcaggagccc

SEQ ID NO: 897400 - RNA, 20 nt, Human
gggaaggcuggcgagaggcu

SEQ ID NO: 897401 - RNA, 24 nt, Human
gguuguuggaggagggcaggagcc

SEQ ID NO: 897402 - RNA, 22 nt, Human
gugaggcguggguguccugggu

SEQ ID NO: 897403 - RNA, 20 nt, Human
uaaaacacaacuaaauccua

SEQ ID NO: 897404 - RNA, 24 nt, Human
uaaaacacaacuaaauccuaucag

SEQ ID NO: 897405 - RNA, 20 nt, Human
uaaauaaaagcuacaaagcc

SEQ ID NO: 897406 - RNA, 20 nt, Human
uaacacaacgggacggcccu

SEQ ID NO: 897407 - RNA, 23 nt, Human
uaaguaaaaucagaaggugcaga

SEQ ID NO: 897408 - RNA, 27 nt, Human
uauggggcaggugugaugaauggguac

SEQ ID NO: 897409 - RNA, 26 nt, Human
ucaccuugcgacccacaaaagugcaa

SEQ ID NO: 897410 - RNA, 24 nt, Human
ucaccuugcgacccacaaaaguug

SEQ ID NO: 897411 - RNA, 20 nt, Human
ucagaaggugcagaaaaugu

SEQ ID NO: 897412 - RNA, 22 nt, Human
ucaggcaauaauguuuacaaac

SEQ ID NO: 897413 - RNA, 21 nt, Human
uccgcuggcccggccaggccc

SEQ ID NO: 897414 - RNA, 19 nt, Human
uccuauacagcugcccaga

SEQ ID NO: 897415 - RNA, 22 nt, Human
ugaauggguacuucugcaucca

SEQ ID NO: 897416 - RNA, 24 nt, Human
ugagaguaaucaaaggaugcacag

SEQ ID NO: 897417 - RNA, 19 nt, Human
ugagggguggaguuggggg

SEQ ID NO: 897418 - RNA, 19 nt, Human
ugaugaauggguacuucug

SEQ ID NO: 897419 - RNA, 21 nt, Human
ugcaaucaugugaaaccaacg

SEQ ID NO: 897420 - RNA, 22 nt, Human
ugccagccgugcggaggcagac

SEQ ID NO: 897421 - RNA, 20 nt, Human
ugcccagaggaggacaccau

SEQ ID NO: 897422 - RNA, 19 nt, Human
ugcccgccucccucacccc

SEQ ID NO: 897423 - RNA, 24 nt, Human
ugccugggugggagcucaggaggg

SEQ ID NO: 897424 - RNA, 19 nt, Human
uggaaccagccacucaccc

SEQ ID NO: 897425 - RNA, 22 nt, Human
uggaaugguagcugcuuaagua

SEQ ID NO: 897426 - RNA, 21 nt, Human
uggagaugccugggugggagc

SEQ ID NO: 897427 - RNA, 20 nt, Human
uguaaacaguaaaugcagca

SEQ ID NO: 897428 - RNA, 18 nt, Human
ugugagggguggaguugg

SEQ ID NO: 897429 - RNA, 18 nt, Human
uucaguaaccuuccugac

SEQ ID NO: 897430 - RNA, 20 nt, Human
uucugcauccagugaccaag

SEQ ID NO: 897431 - RNA, 19 nt, Human
uuuuuuguaaccacaugau

SEQ ID NO: 897432 - RNA, 18 nt, Human
uuuuuuuuuuuuuuucug

SEQ ID NO: 897433 - RNA, 24 nt, Human
uuuuuuuuuuuuuuucugugaaau

SEQ ID NO: 897434 - RNA, 19 nt, Human
aaaaaagcacaacaaaagg

SEQ ID NO: 897435 - RNA, 20 nt, Human
aaauggaucagugagagagg

SEQ ID NO: 897436 - RNA, 18 nt, Human
aaccagagcaagagucag

SEQ ID NO: 897437 - RNA, 19 nt, Human
aagagucagugguauagac

SEQ ID NO: 897438 - RNA, 24 nt, Human
aaggagugucccaagaugcaggaa

SEQ ID NO: 897439 - RNA, 20 nt, Human
acaaaagccacacacauggu

SEQ ID NO: 897440 - RNA, 20 nt, Human
acacagcuucagcaauuacc

SEQ ID NO: 897441 - RNA, 21 nt, Human
acaucaaaaaagcacaacaaa

SEQ ID NO: 897442 - RNA, 20 nt, Human
acucaauuaccccacacucg

SEQ ID NO: 897443 - RNA, 19 nt, Human
agaaaccagaugagcuguc

SEQ ID NO: 897444 - RNA, 19 nt, Human
agccaaauggaucagugag

SEQ ID NO: 897445 - RNA, 22 nt, Human
agccuccucucgccucucgcug

SEQ ID NO: 897446 - RNA, 20 nt, Human
agcuguguguacuggaaaag

SEQ ID NO: 897447 - RNA, 23 nt, Human
aggaaacaguguuuccucaaaga

SEQ ID NO: 897448 - RNA, 22 nt, Human
aggcagacacaucaaaaaagca

SEQ ID NO: 897449 - RNA, 18 nt, Human
aggcagccuccucgaggc

SEQ ID NO: 897450 - RNA, 20 nt, Human
aggcagccuccucucgccuc

SEQ ID NO: 897451 - RNA, 21 nt, Human
aguuguuacacgaaggacuga

SEQ ID NO: 897452 - RNA, 25 nt, Human
auagcauauacucuacuagcaccag

SEQ ID NO: 897453 - RNA, 23 nt, Human
auaucacacaucccauggcaaac

SEQ ID NO: 897454 - RNA, 18 nt, Human
augagcugucuucuuggg

SEQ ID NO: 897455 - RNA, 22 nt, Human
caaacauccaucacacagcuuc

SEQ ID NO: 897456 - RNA, 22 nt, Human
caacaauuuugcccucucucag

SEQ ID NO: 897457 - RNA, 28 nt, Human
caacauaaccacaguaccauaucacauc

SEQ ID NO: 897458 - RNA, 19 nt, Human
caaccagagcaagagucag

SEQ ID NO: 897459 - RNA, 21 nt, Human
caagaugcaggaagaaaccag

SEQ ID NO: 897460 - RNA, 20 nt, Human
cacaacauuauuuugcgucc

SEQ ID NO: 897461 - RNA, 21 nt, Human
cacacagcuucagcaauuacc

SEQ ID NO: 897462 - RNA, 22 nt, Human
cacaucaaaaaagcacaacaaa

SEQ ID NO: 897463 - RNA, 19 nt, Human
cagagcaagagucaguggu

SEQ ID NO: 897464 - RNA, 24 nt, Human
caucaaaaaagcacaacaaaaggc

SEQ ID NO: 897465 - RNA, 18 nt, Human
caucaaaaaagcacaacu

SEQ ID NO: 897466 - RNA, 21 nt, Human
caucuuaaaaaacaauaaauc

SEQ ID NO: 897467 - RNA, 21 nt, Human
ccacacacauggugccuagau

SEQ ID NO: 897468 - RNA, 21 nt, Human
cccaagaugcaggaagaaacc

SEQ ID NO: 897469 - RNA, 21 nt, Human
cccauggcaaacuccguaaga

SEQ ID NO: 897470 - RNA, 21 nt, Human
ccucgaggcagccuccucgag

SEQ ID NO: 897471 - RNA, 20 nt, Human
ccucucgcugcugugugggc

SEQ ID NO: 897472 - RNA, 22 nt, Human
cuagcaccagauuggaagggga

SEQ ID NO: 897473 - RNA, 24 nt, Human
cugguaucaugaggaagaguguca

SEQ ID NO: 897474 - RNA, 24 nt, Human
cuuguccucaaacaucuuacaacu

SEQ ID NO: 897475 - RNA, 25 nt, Human
cuuuugguaauuuguaaggagcuga

SEQ ID NO: 897476 - RNA, 18 nt, Human
gaacucucaaacauccau

SEQ ID NO: 897477 - RNA, 20 nt, Human
gaggcagcugaugcaagucc

SEQ ID NO: 897478 - RNA, 23 nt, Human
gauauagccuguuggcucuggca

SEQ ID NO: 897479 - RNA, 22 nt, Human
gcugaauuaagagucuauucac

SEQ ID NO: 897480 - RNA, 19 nt, Human
guguguacuggaaaaggga

SEQ ID NO: 897481 - RNA, 19 nt, Human
guucacaucaauguuucuu

SEQ ID NO: 897482 - RNA, 27 nt, Human
uaaaacaacauaaccacaguaccauaa

SEQ ID NO: 897483 - RNA, 22 nt, Human
uaaaagaaaaaaucaaacaaac

SEQ ID NO: 897484 - RNA, 24 nt, Human
uaaaauggaguccaagcuuuuauc

SEQ ID NO: 897485 - RNA, 21 nt, Human
uaaaucaagaaguuauauuuu

SEQ ID NO: 897486 - RNA, 25 nt, Human
uaagcaaaucaucaacaguacaaaa

SEQ ID NO: 897487 - RNA, 24 nt, Human
uagcagccucuuuccuaaaugccu

SEQ ID NO: 897488 - RNA, 20 nt, Human
ucacacagcuucagcaauua

SEQ ID NO: 897489 - RNA, 20 nt, Human
ucagcacaauacugaacauc

SEQ ID NO: 897490 - RNA, 22 nt, Human
ucagugagagaggcaaaagaaa

SEQ ID NO: 897491 - RNA, 18 nt, Human
ucgccucucgcugcugug

SEQ ID NO: 897492 - RNA, 20 nt, Human
ucucaaacauccaucacaca

SEQ ID NO: 897493 - RNA, 20 nt, Human
ugaaaacuacagccaaaugg

SEQ ID NO: 897494 - RNA, 18 nt, Human
ugaggaaacaguguuucc

SEQ ID NO: 897495 - RNA, 18 nt, Human
ugaggagcuagcugugug

SEQ ID NO: 897496 - RNA, 22 nt, Human
ugguauagacagggaaggagug

SEQ ID NO: 897497 - RNA, 25 nt, Human
uguaaggagcugaagacugcugaua

SEQ ID NO: 897498 - RNA, 21 nt, Human
uguacucaauuaccccacacu

SEQ ID NO: 897499 - RNA, 24 nt, Human
uucaucuauguacucaauuacccc

SEQ ID NO: 897500 - RNA, 19 nt, Human
uuuaaaaaaaccuucacuu

SEQ ID NO: 897501 - RNA, 22 nt, Human
uuuguaaggagcugaagacugc

SEQ ID NO: 897502 - RNA, 24 nt, Human
aaaacaaaauguauaacuacacuu

SEQ ID NO: 897503 - RNA, 18 nt, Human
aaaccuggaauuucacaa

SEQ ID NO: 897504 - RNA, 22 nt, Human
aaaucaauuucaaaauagccuu

SEQ ID NO: 897505 - RNA, 23 nt, Human
aacaauggaacccccaggaaaga

SEQ ID NO: 897506 - RNA, 19 nt, Human
aaggugaccacaguagagg

SEQ ID NO: 897507 - RNA, 25 nt, Human
acaaaauguauaacuacacuuguug

SEQ ID NO: 897508 - RNA, 19 nt, Human
acccaaauuuaacauaauc

SEQ ID NO: 897509 - RNA, 21 nt, Human
agaaaagaaaccgagagagaa

SEQ ID NO: 897510 - RNA, 18 nt, Human
agagagaaaaaguucaga

SEQ ID NO: 897511 - RNA, 21 nt, Human
agagagaaaaaguucagagaa

SEQ ID NO: 897512 - RNA, 18 nt, Human
agcaagugggacuacaau

SEQ ID NO: 897513 - RNA, 23 nt, Human
aggaagaaaagaaaccgagagag

SEQ ID NO: 897514 - RNA, 22 nt, Human
aguaaagaugcaaauuauacaa

SEQ ID NO: 897515 - RNA, 20 nt, Human
auacaucacucaucacaaaa

SEQ ID NO: 897516 - RNA, 18 nt, Human
auagcuuuucaccucuca

SEQ ID NO: 897517 - RNA, 23 nt, Human
augaaauaaagccaauguuuuaa

SEQ ID NO: 897518 - RNA, 23 nt, Human
augaauuugugauuaagacagaa

SEQ ID NO: 897519 - RNA, 18 nt, Human
auuaacaauauuugguaa

SEQ ID NO: 897520 - RNA, 19 nt, Human
cacaauguaaucuuagaau

SEQ ID NO: 897521 - RNA, 28 nt, Human
cacugcuagaacaauggaacccccagga

SEQ ID NO: 897522 - RNA, 20 nt, Human
cagcuaacucaagcuaauac

SEQ ID NO: 897523 - RNA, 18 nt, Human
gaaaaccuggaauuucac

SEQ ID NO: 897524 - RNA, 21 nt, Human
gaagaaaagaaaccgagagag

SEQ ID NO: 897525 - RNA, 30 nt, Human
gacuaaaaaaucaaugccagcuaacucaag

SEQ ID NO: 897526 - RNA, 18 nt, Human
gauauucauaaacuauaa

SEQ ID NO: 897527 - RNA, 22 nt, Human
ggaagaaaagaaaccgagagag

SEQ ID NO: 897528 - RNA, 22 nt, Human
ggggagaugaacaaaaaccaua

SEQ ID NO: 897529 - RNA, 25 nt, Human
uaaaaaaucaaugccagcuaacuca

SEQ ID NO: 897530 - RNA, 21 nt, Human
uaacaaaaggacuaaaaaauc

SEQ ID NO: 897531 - RNA, 24 nt, Human
uaacacagauacaucacucaucac

SEQ ID NO: 897532 - RNA, 24 nt, Human
uaacucaagcuaauacaagcuaaa

SEQ ID NO: 897533 - RNA, 20 nt, Human
uaagacagaacacuuugaaa

SEQ ID NO: 897534 - RNA, 22 nt, Human
uaauuuuaggucuaaaagagag

SEQ ID NO: 897535 - RNA, 20 nt, Human
uaccaauaagccuucaucaa

SEQ ID NO: 897536 - RNA, 21 nt, Human
uaguuccuuuuacagggagaa

SEQ ID NO: 897537 - RNA, 22 nt, Human
ucacaaaaugaaauaaagccaa

SEQ ID NO: 897538 - RNA, 22 nt, Human
uccuaagaaaaucacugcucau

SEQ ID NO: 897539 - RNA, 24 nt, Human
ugaaauaaagccaauguuuuaaau

SEQ ID NO: 897540 - RNA, 20 nt, Human
uggaauuucacaauguaauc

SEQ ID NO: 897541 - RNA, 19 nt, Human
ugguuugucuuaauaacag

SEQ ID NO: 897542 - RNA, 22 nt, Human
ugucaaggcuucuuagaaugug

SEQ ID NO: 897543 - RNA, 24 nt, Human
ugucuuaauaacagcuuuagguau

SEQ ID NO: 897544 - RNA, 22 nt, Human
ugugaaggaagaaaagaaaccg

SEQ ID NO: 897545 - RNA, 25 nt, Human
ugugauuaagacagaaccggggucc

SEQ ID NO: 897546 - RNA, 21 nt, Human
uuaauuaacaauauuugguaa

SEQ ID NO: 897547 - RNA, 24 nt, Human
uucagagaagacugacccaaauuu

SEQ ID NO: 897548 - RNA, 23 nt, Human
uucuacuauucuuuugaacuggc

SEQ ID NO: 897549 - RNA, 21 nt, Human
uuuacauagcuuuucaccucu

SEQ ID NO: 897550 - RNA, 18 nt, Human
uuuuuuuuuuuuuuuucg

SEQ ID NO: 897551 - RNA, 28 nt, Human
uuuuuuuuuuuuuuuuuuucgauuuuaa

SEQ ID NO: 897552 - RNA, 21 nt, Human
aaaugacugaacaagggccua

SEQ ID NO: 897553 - RNA, 18 nt, Human
aacuaaugcuucccccuu

SEQ ID NO: 897554 - RNA, 23 nt, Human
aauuucuuuuauuuuccccaaau

SEQ ID NO: 897555 - RNA, 21 nt, Human
agagcugaaaacagcgaaaaa

SEQ ID NO: 897556 - RNA, 21 nt, Human
agcaauagucuuuucccuggg

SEQ ID NO: 897557 - RNA, 20 nt, Human
aggaaaacaggcauggcaaa

SEQ ID NO: 897558 - RNA, 23 nt, Human
aggaauuucuuccauuaacacug

SEQ ID NO: 897559 - RNA, 22 nt, Human
aucuccaccaaucccuuuguua

SEQ ID NO: 897560 - RNA, 23 nt, Human
caacagagccucagggcaucuga

SEQ ID NO: 897561 - RNA, 19 nt, Human
caaguaacucaguaaugac

SEQ ID NO: 897562 - RNA, 19 nt, Human
cacuggcuuuuuugauugc

SEQ ID NO: 897563 - RNA, 18 nt, Human
cccccuucccccugauuu

SEQ ID NO: 897564 - RNA, 24 nt, Human
ccuacauccaaacuaaugcuuccc

SEQ ID NO: 897565 - RNA, 21 nt, Human
cuguaggcucacccuuugcuc

SEQ ID NO: 897566 - RNA, 18 nt, Human
gaaaacaggcauggcaaa

SEQ ID NO: 897567 - RNA, 18 nt, Human
gacagagcugaaaacagc

SEQ ID NO: 897568 - RNA, 24 nt, Human
gagcaugugacagagcugaaaaca

SEQ ID NO: 897569 - RNA, 22 nt, Human
gauuuuugacaguugacagcuc

SEQ ID NO: 897570 - RNA, 18 nt, Human
ggucucugaauucuuuuc

SEQ ID NO: 897571 - RNA, 22 nt, Human
gucuggagucccauugggauuc

SEQ ID NO: 897572 - RNA, 22 nt, Human
uaaacacaacauuaacaagcca

SEQ ID NO: 897573 - RNA, 20 nt, Human
uaacaagccauaugccagaa

SEQ ID NO: 897574 - RNA, 18 nt, Human
uaggaaaacaggcauggc

SEQ ID NO: 897575 - RNA, 26 nt, Human
ucccucaggaauaccaaggagcgauc

SEQ ID NO: 897576 - RNA, 22 nt, Human
ugaacaagggccuacauccaaa

SEQ ID NO: 897577 - RNA, 23 nt, Human
ugacagagcugaaaacagcgaaa

SEQ ID NO: 897578 - RNA, 24 nt, Human
ugacugaacaagggccuacaucca

SEQ ID NO: 897579 - RNA, 19 nt, Human
ugucuggagucccauuggg

SEQ ID NO: 897580 - RNA, 18 nt, Human
uuccucaacagagccuca

SEQ ID NO: 897581 - RNA, 20 nt, Human
uucucccuuauggcaucaua

SEQ ID NO: 897582 - RNA, 22 nt, Human
uugcucugcccuucugaggucc

SEQ ID NO: 897583 - RNA, 22 nt, Human
uuuacugucuggagucccauug

SEQ ID NO: 897584 - RNA, 18 nt, Human
uuucggggcaccuuccua

SEQ ID NO: 897585 - RNA, 21 nt, Human
uuuuucuuaauucuguaaggg

SEQ ID NO: 897586 - RNA, 20 nt, Human
aaaaacagaagaaaaagccc

SEQ ID NO: 897587 - RNA, 26 nt, Human
aaaaagccccaucacuuaacaccaaa

SEQ ID NO: 897588 - RNA, 19 nt, Human
aaacagaagaaaaagcccc

SEQ ID NO: 897589 - RNA, 20 nt, Human
aaacagaagaaaaagcccca

SEQ ID NO: 897590 - RNA, 23 nt, Human
aaacaggaacacuucagaaucca

SEQ ID NO: 897591 - RNA, 21 nt, Human
aacagaagaaaaagccccauc

SEQ ID NO: 897592 - RNA, 21 nt, Human
aagacaaacaggaacacuuca

SEQ ID NO: 897593 - RNA, 31 nt, Human
auaaaaaaaaaaaauuaaaaaucaaagaaag

SEQ ID NO: 897594 - RNA, 26 nt, Human
auaagacaaacaggaacacuucagaa

SEQ ID NO: 897595 - RNA, 19 nt, Human
auacugguaucuuuuaaua

SEQ ID NO: 897596 - RNA, 22 nt, Human
cacacccaacccccacccucaa

SEQ ID NO: 897597 - RNA, 18 nt, Human
cacccaacccccacccuc

SEQ ID NO: 897598 - RNA, 20 nt, Human
cacccaacccccacccucaa

SEQ ID NO: 897599 - RNA, 23 nt, Human
cagcaacauuaucaauacacccu

SEQ ID NO: 897600 - RNA, 23 nt, Human
cauuucucuuacaggaagucuuc

SEQ ID NO: 897601 - RNA, 22 nt, Human
cccaccaugccuuauuugaaag

SEQ ID NO: 897602 - RNA, 18 nt, Human
ccccaucacuuaacacca

SEQ ID NO: 897603 - RNA, 20 nt, Human
ccgcgugcgcgcgcgccccu

SEQ ID NO: 897604 - RNA, 19 nt, Human
ccucaauaaaaacagaaga

SEQ ID NO: 897605 - RNA, 24 nt, Human
ccuccgggcccgggugggggugcg

SEQ ID NO: 897606 - RNA, 21 nt, Human
cgugcgcgcgcgcccccggcu

SEQ ID NO: 897607 - RNA, 21 nt, Human
cucucuucagaggacugcagg

SEQ ID NO: 897608 - RNA, 25 nt, Human
gaagaaaaagccccaucacuuaaca

SEQ ID NO: 897609 - RNA, 21 nt, Human
gaaguggaaagagccagggug

SEQ ID NO: 897610 - RNA, 26 nt, Human
gcagugaaagugaccacucuacugaa

SEQ ID NO: 897611 - RNA, 20 nt, Human
gcgcccccggcucggccaag

SEQ ID NO: 897612 - RNA, 18 nt, Human
ggaagcagggagggggag

SEQ ID NO: 897613 - RNA, 18 nt, Human
gggugcggugcgggucgc

SEQ ID NO: 897614 - RNA, 19 nt, Human
gggugcggugcgggucgca

SEQ ID NO: 897615 - RNA, 23 nt, Human
uaaaaacagaagaaaaagcccca

SEQ ID NO: 897616 - RNA, 18 nt, Human
uacagcacauuauaggac

SEQ ID NO: 897617 - RNA, 19 nt, Human
ucaauaaaaacagaagaaa

SEQ ID NO: 897618 - RNA, 21 nt, Human
ucaauaaaaacagaagaaaaa

SEQ ID NO: 897619 - RNA, 23 nt, Human
ucucuucagaggacugcaggggu

SEQ ID NO: 897620 - RNA, 22 nt, Human
ugaaagaggaggccugugagaa

SEQ ID NO: 897621 - RNA, 27 nt, Human
ugaacuguacagcacauuauaggacaa

SEQ ID NO: 897622 - RNA, 23 nt, Human
uggaaguuuucaucucauacugg

SEQ ID NO: 897623 - RNA, 19 nt, Human
uggacggccgcgugcgcgc

SEQ ID NO: 897624 - RNA, 20 nt, Human
uggccagggccaggauaaga

SEQ ID NO: 897625 - RNA, 21 nt, Human
ugugagaaguggaaagagcca

SEQ ID NO: 897626 - RNA, 19 nt, Human
uuaacaccaaacagcaaca

SEQ ID NO: 897627 - RNA, 21 nt, Human
uuacacacccaacccccaccc

SEQ ID NO: 897628 - RNA, 24 nt, Human
uugcugcccaccaugccuuauuug

SEQ ID NO: 897629 - RNA, 24 nt, Human
uuggaaguuuucaucucauacugg

SEQ ID NO: 897630 - RNA, 21 nt, Human
aaaaagauuugaaagcaucug

SEQ ID NO: 897631 - RNA, 22 nt, Human
aaucugaugacaaaauaaacca

SEQ ID NO: 897632 - RNA, 22 nt, Human
acaaauccccaaaaauggcaaa

SEQ ID NO: 897633 - RNA, 20 nt, Human
acagaaauagcccaaaucug

SEQ ID NO: 897634 - RNA, 19 nt, Human
aucauacagaaauagccca

SEQ ID NO: 897635 - RNA, 21 nt, Human
caucugaaaaacaugcaaauu

SEQ ID NO: 897636 - RNA, 19 nt, Human
caugagacugcacauggug

SEQ ID NO: 897637 - RNA, 21 nt, Human
cccaaaaauggcaaauuaagc

SEQ ID NO: 897638 - RNA, 25 nt, Human
cuaaaauauucaccaacucuacaga

SEQ ID NO: 897639 - RNA, 23 nt, Human
gaaauagacaaccaaaauaauau

SEQ ID NO: 897640 - RNA, 20 nt, Human
gacgaggaaacgaaagaagc

SEQ ID NO: 897641 - RNA, 21 nt, Human
gcaucuaaacaaaaauuccac

SEQ ID NO: 897642 - RNA, 18 nt, Human
ggaaauagccguaucagg

SEQ ID NO: 897643 - RNA, 20 nt, Human
gucgacaaauccccaaaaau

SEQ ID NO: 897644 - RNA, 20 nt, Human
gugaaaauucagacaaaaug

SEQ ID NO: 897645 - RNA, 20 nt, Human
uaaaauauucaccaacucua

SEQ ID NO: 897646 - RNA, 18 nt, Human
uagcccaaaucuggaaau

SEQ ID NO: 897647 - RNA, 20 nt, Human
uaggggguuguggggugugg

SEQ ID NO: 897648 - RNA, 18 nt, Human
ugaaaaacaugcaaauug

SEQ ID NO: 897649 - RNA, 19 nt, Human
ugaaagcaucugaaaaaca

SEQ ID NO: 897650 - RNA, 24 nt, Human
ugaaagcaucugaaaaacaugcaa

SEQ ID NO: 897651 - RNA, 20 nt, Human
ugacgaggaaacgaaagaag

SEQ ID NO: 897652 - RNA, 23 nt, Human
ugacgaggaaacgaaagaagccu

SEQ ID NO: 897653 - RNA, 22 nt, Human
ugagaaaacaauuuugggguag

SEQ ID NO: 897654 - RNA, 18 nt, Human
ugagaaauagacaaccaa

SEQ ID NO: 897655 - RNA, 24 nt, Human
ugcugugagaaauagacaaccaaa

SEQ ID NO: 897656 - RNA, 24 nt, Human
uuugcaagcgucaaucagauguuu

SEQ ID NO: 897657 - RNA, 22 nt, Human
uuuuuuuuuuuuuuuuuuacag

SEQ ID NO: 897658 - RNA, 19 nt, Human
aacggaagaggacgaaaua

SEQ ID NO: 897659 - RNA, 20 nt, Human
aaguugaauacaaagucuua

SEQ ID NO: 897660 - RNA, 19 nt, Human
acagcccucaggugagaag

SEQ ID NO: 897661 - RNA, 20 nt, Human
acagcccucaggugagaagu

SEQ ID NO: 897662 - RNA, 22 nt, Human
accuccaagguguaggggugaa

SEQ ID NO: 897663 - RNA, 19 nt, Human
agacuggacuagaaaagua

SEQ ID NO: 897664 - RNA, 21 nt, Human
aggggugaagaacggaagagg

SEQ ID NO: 897665 - RNA, 31 nt, Human
caaccuaccuguaauuacaauuccauaccag

SEQ ID NO: 897666 - RNA, 20 nt, Human
cgaaauaacuagcuggaggc

SEQ ID NO: 897667 - RNA, 18 nt, Human
cugagcuguaguuaacuc

SEQ ID NO: 897668 - RNA, 18 nt, Human
cuugcauuuauauucuuu

SEQ ID NO: 897669 - RNA, 24 nt, Human
gcccucaggugagaaguucaccuc

SEQ ID NO: 897670 - RNA, 19 nt, Human
ggacuagaaaaguaacuga

SEQ ID NO: 897671 - RNA, 18 nt, Human
uaaguugaauacaaaguc

SEQ ID NO: 897672 - RNA, 19 nt, Human
uaaguugaauacaaagucu

SEQ ID NO: 897673 - RNA, 24 nt, Human
uacagcccucaggugagaaguuca

SEQ ID NO: 897674 - RNA, 21 nt, Human
uaccaaauaccccuguguucc

SEQ ID NO: 897675 - RNA, 22 nt, Human
uauauucuuuguuaauuuuagc

SEQ ID NO: 897676 - RNA, 21 nt, Human
uccagacuggacuagaaaagu

SEQ ID NO: 897677 - RNA, 24 nt, Human
uccauaccaccaccacaucuguuc

SEQ ID NO: 897678 - RNA, 30 nt, Human
ucucaauaccaaauaccccuguguuccagu

SEQ ID NO: 897679 - RNA, 23 nt, Human
ucuguugagcuuuaaaaaaauug

SEQ ID NO: 897680 - RNA, 20 nt, Human
ugagaaguucaccuccaagg

SEQ ID NO: 897681 - RNA, 19 nt, Human
uggccagugucauauuugg

SEQ ID NO: 897682 - RNA, 19 nt, Human
ugucagccgaugccggugc

SEQ ID NO: 897683 - RNA, 20 nt, Human
uuagugaagaaggccuggug

SEQ ID NO: 897684 - RNA, 27 nt, Human
aaagaggcuuuuaaaaugugcauguuu

SEQ ID NO: 897685 - RNA, 23 nt, Human
acagucagauguuuaaucaaucc

SEQ ID NO: 897686 - RNA, 22 nt, Human
auccaaaauguccacuauuucu

SEQ ID NO: 897687 - RNA, 25 nt, Human
auuagaaaaucacagucagauguuu

SEQ ID NO: 897688 - RNA, 24 nt, Human
cacagucagauguuuaaucaaucc

SEQ ID NO: 897689 - RNA, 23 nt, Human
uaugucauucguuagucuacaug

SEQ ID NO: 897690 - RNA, 19 nt, Human
uauuucuuaugucauucgu

SEQ ID NO: 897691 - RNA, 19 nt, Human
ucagauguuuaaucaaucc

SEQ ID NO: 897692 - RNA, 22 nt, Human
ucagauguuuaaucaauccaaa

SEQ ID NO: 897693 - RNA, 20 nt, Human
uuuuuuuuuuucuuuuucac

SEQ ID NO: 897694 - RNA, 20 nt, Human
uuuuuuuuuuucuuuuucac

SEQ ID NO: 897695 - RNA, 25 nt, Human
uuuuuuuuuuuuuuuuuuucuuuuu

SEQ ID NO: 897696 - RNA, 22 nt, Human
acaccccacagcuccgaguccc

SEQ ID NO: 897697 - RNA, 19 nt, Human
accucguaacuuuccccac

SEQ ID NO: 897698 - RNA, 19 nt, Human
caccccacagcuccgaguc

SEQ ID NO: 897699 - RNA, 18 nt, Human
cagcuccgagucccggcc

SEQ ID NO: 897700 - RNA, 24 nt, Human
ccacaccccacagcuccgaguccc

SEQ ID NO: 897701 - RNA, 21 nt, Human
ccagaccagcacgugacgccg

SEQ ID NO: 897702 - RNA, 24 nt, Human
ccccacaccccacagcuccgaguc

SEQ ID NO: 897703 - RNA, 25 nt, Human
ccccacgcguccgcccacgcguccg

SEQ ID NO: 897704 - RNA, 18 nt, Human
ccgaagccuccagcgcca

SEQ ID NO: 897705 - RNA, 20 nt, Human
ccuccgccuccccacacccc

SEQ ID NO: 897706 - RNA, 18 nt, Human
cgccgaagccuccagcgc

SEQ ID NO: 897707 - RNA, 25 nt, Human
cuaucuauaaaucacagaucaagag

SEQ ID NO: 897708 - RNA, 19 nt, Human
gccccgagggcggcuuugc

SEQ ID NO: 897709 - RNA, 19 nt, Human
gccuaucuauaaaucacag

SEQ ID NO: 897710 - RNA, 21 nt, Human
uaguuggugccuccgccuccc

SEQ ID NO: 897711 - RNA, 22 nt, Human
ugccuccgccuccccacacccc

SEQ ID NO: 897712 - RNA, 19 nt, Human
uucccgaacgggaguagcu

SEQ ID NO: 897713 - RNA, 23 nt, Human
aaacagaaaauuuuaauuuuuau

SEQ ID NO: 897714 - RNA, 21 nt, Human
aaacgcugauaucccuacaug

SEQ ID NO: 897715 - RNA, 19 nt, Human
aaagccuuuuccacacaca

SEQ ID NO: 897716 - RNA, 19 nt, Human
aagcagucugucccuaaaa

SEQ ID NO: 897717 - RNA, 21 nt, Human
aaugcaaaagaaaaaauuacu

SEQ ID NO: 897718 - RNA, 24 nt, Human
agcccuucgacccggaagcagucu

SEQ ID NO: 897719 - RNA, 22 nt, Human
caagcccuucgacccggaagca

SEQ ID NO: 897720 - RNA, 19 nt, Human
cacacagagaaacgcugau

SEQ ID NO: 897721 - RNA, 22 nt, Human
cacacagagaaacgcugauauc

SEQ ID NO: 897722 - RNA, 19 nt, Human
cccgcucuccggaagcaag

SEQ ID NO: 897723 - RNA, 24 nt, Human
cgacccggaagcagucugucccua

SEQ ID NO: 897724 - RNA, 25 nt, Human
gcugcaguuuagcuaccgcguuuua

SEQ ID NO: 897725 - RNA, 21 nt, Human
ggaagcaagcccuucgacccg

SEQ ID NO: 897726 - RNA, 19 nt, Human
uaacaagcacacagagaaa

SEQ ID NO: 897727 - RNA, 23 nt, Human
uaacaaguauauuuuauuaaaaa

SEQ ID NO: 897728 - RNA, 19 nt, Human
ucuccggaagcaagcccuu

SEQ ID NO: 897729 - RNA, 28 nt, Human
aaacagauaucaaacacccuagauucuc

SEQ ID NO: 897730 - RNA, 19 nt, Human
aaggagcagcgacuaggac

SEQ ID NO: 897731 - RNA, 21 nt, Human
aaucacaguuacauaacuauu

SEQ ID NO: 897732 - RNA, 23 nt, Human
acacuuauacagauuucauaaac

SEQ ID NO: 897733 - RNA, 23 nt, Human
accgaguacaggaacaacaacug

SEQ ID NO: 897734 - RNA, 23 nt, Human
acuccaaggagcagcgacuagga

SEQ ID NO: 897735 - RNA, 18 nt, Human
agaagugauuuguacaug

SEQ ID NO: 897736 - RNA, 18 nt, Human
aggacaagaacuccagaa

SEQ ID NO: 897737 - RNA, 19 nt, Human
aggacagcgagggaucugg

SEQ ID NO: 897738 - RNA, 19 nt, Human
aggcccacucuccuuuggu

SEQ ID NO: 897739 - RNA, 19 nt, Human
aucuggccgucagguugca

SEQ ID NO: 897740 - RNA, 20 nt, Human
caccgaguacaggaacaaca

SEQ ID NO: 897741 - RNA, 25 nt, Human
cagguggaaaaaacaagucacauaa

SEQ ID NO: 897742 - RNA, 20 nt, Human
caucucauaauaagucagca

SEQ ID NO: 897743 - RNA, 21 nt, Human
caugaguuaggcccacucucc

SEQ ID NO: 897744 - RNA, 22 nt, Human
cauuagcccuaacugaaacaga

SEQ ID NO: 897745 - RNA, 23 nt, Human
cgaguacaggaacaacaacugac

SEQ ID NO: 897746 - RNA, 24 nt, Human
cuagacauuucccauuagcccuaa

SEQ ID NO: 897747 - RNA, 24 nt, Human
gaaagggcaccgaguacaggaaca

SEQ ID NO: 897748 - RNA, 23 nt, Human
gaaccaggacaagaacuccagaa

SEQ ID NO: 897749 - RNA, 19 nt, Human
gccuaaaauuuguauaagg

SEQ ID NO: 897750 - RNA, 23 nt, Human
ggacaagaacuccagaaccuggg

SEQ ID NO: 897751 - RNA, 26 nt, Human
ggagcagcgacuaggacagcgaggga

SEQ ID NO: 897752 - RNA, 23 nt, Human
gugagaguaaaaagaaagggcac

SEQ ID NO: 897753 - RNA, 19 nt, Human
guggaaaaaacaagucaca

SEQ ID NO: 897754 - RNA, 23 nt, Human
uaacugaaacagauaucaaacac

SEQ ID NO: 897755 - RNA, 21 nt, Human
uagaaccaggacaagaacucc

SEQ ID NO: 897756 - RNA, 25 nt, Human
uagaaccaggacaagaacuccagaa

SEQ ID NO: 897757 - RNA, 21 nt, Human
ucaagcucacaugaguuaggc

SEQ ID NO: 897758 - RNA, 18 nt, Human
ucauuuauuauuuaugua

SEQ ID NO: 897759 - RNA, 18 nt, Human
uccagaaccugggaccac

SEQ ID NO: 897760 - RNA, 26 nt, Human
ucucauaauaagucagcaaaaguugg

SEQ ID NO: 897761 - RNA, 21 nt, Human
ugaguuaggcccacucuccuu

SEQ ID NO: 897762 - RNA, 22 nt, Human
uuaggcccacucuccuuugguu

SEQ ID NO: 897763 - RNA, 22 nt, Human
uuuauagccuaaaauuuguaua

SEQ ID NO: 897764 - RNA, 24 nt, Human
uuuauagccuaaaauuuguauaag

SEQ ID NO: 897765 - RNA, 22 nt, Human
uuucccauuagcccuaacugaa

SEQ ID NO: 897766 - RNA, 19 nt, Human
cagaaaggcggcuccggcc

SEQ ID NO: 897767 - RNA, 19 nt, Human
uccaccgggagaaugaggg

SEQ ID NO: 897768 - RNA, 20 nt, Human
aagcuaugccaucaacccug

SEQ ID NO: 897769 - RNA, 24 nt, Human
accacaugcacauaaucuucacaa

SEQ ID NO: 897770 - RNA, 19 nt, Human
acugaaugccuucaacguc

SEQ ID NO: 897771 - RNA, 18 nt, Human
aggcaaugaaucaagucu

SEQ ID NO: 897772 - RNA, 20 nt, Human
caaaauauguacuaaaaaua

SEQ ID NO: 897773 - RNA, 25 nt, Human
caaaguuugugaaucuaagguacag

SEQ ID NO: 897774 - RNA, 19 nt, Human
ccacaguguaggcagcauu

SEQ ID NO: 897775 - RNA, 24 nt, Human
uaaaagcaacugagacauuuucua

SEQ ID NO: 897776 - RNA, 23 nt, Human
uauacugaaugccuucaacgucu

SEQ ID NO: 897777 - RNA, 21 nt, Human
ucucugggcuccaagcuaugc

SEQ ID NO: 897778 - RNA, 23 nt, Human
ugaaugccuucaacgucugcuuc

SEQ ID NO: 897779 - RNA, 28 nt, Human
uuccugaauccccauucucaaagggauu

SEQ ID NO: 897780 - RNA, 23 nt, Human
aaaaaaaaaaaauugaacacagc

SEQ ID NO: 897781 - RNA, 21 nt, Human
aaaaaaaauugaacacagcua

SEQ ID NO: 897782 - RNA, 23 nt, Human
aaaaccuauucugaaaaaggaac

SEQ ID NO: 897783 - RNA, 18 nt, Human
aaaauuagcugggcgugg

SEQ ID NO: 897784 - RNA, 24 nt, Human
aaaauucuuuacucugaucauauc

SEQ ID NO: 897785 - RNA, 23 nt, Human
aaacaaaagcaaaguugggucua

SEQ ID NO: 897786 - RNA, 21 nt, Human
aacaaaagcaaaguugggucu

SEQ ID NO: 897787 - RNA, 19 nt, Human
aacacagugaaaccccauc

SEQ ID NO: 897788 - RNA, 20 nt, Human
aacacagugaaaccccaucu

SEQ ID NO: 897789 - RNA, 20 nt, Human
aacacagugaaaccccaucu

SEQ ID NO: 897790 - RNA, 21 nt, Human
aacacagugaaaccccaucuc

SEQ ID NO: 897791 - RNA, 18 nt, Human
aacauggugaaacccugu

SEQ ID NO: 897792 - RNA, 22 nt, Human
aacauggugaaacccugucguc

SEQ ID NO: 897793 - RNA, 24 nt, Human
aacauggugaaacccugucgucuc

SEQ ID NO: 897794 - RNA, 19 nt, Human
aaccuauucaucagcacca

SEQ ID NO: 897795 - RNA, 24 nt, Human
aacugcuugaacccgggaggugga

SEQ ID NO: 897796 - RNA, 20 nt, Human
aacuggugauuggcucaucu

SEQ ID NO: 897797 - RNA, 24 nt, Human
aagcagauucgaacauaacaacug

SEQ ID NO: 897798 - RNA, 25 nt, Human
aagcgucccaacacaaagcagauuc

SEQ ID NO: 897799 - RNA, 21 nt, Human
aaucccauauuuucaacuguc

SEQ ID NO: 897800 - RNA, 20 nt, Human
acaagagcaaaacuccaucu

SEQ ID NO: 897801 - RNA, 19 nt, Human
acaauaacugauggucucc

SEQ ID NO: 897802 - RNA, 21 nt, Human
acacagugaaaccccaucucc

SEQ ID NO: 897803 - RNA, 22 nt, Human
acacuauagguggcuaaaacaa

SEQ ID NO: 897804 - RNA, 23 nt, Human
acagugaaauauaauuuuccuca

SEQ ID NO: 897805 - RNA, 24 nt, Human
accccaucuccacuaaaauuacaa

SEQ ID NO: 897806 - RNA, 18 nt, Human
accuguggucaggaguuc

SEQ ID NO: 897807 - RNA, 24 nt, Human
accuguggucaggaguucgagacc

SEQ ID NO: 897808 - RNA, 28 nt, Human
acucugccucaaaaaaaaaaaaaaaaaa

SEQ ID NO: 897809 - RNA, 20 nt, Human
acugauguuuccccugcaaa

SEQ ID NO: 897810 - RNA, 22 nt, Human
acugcaccaccgcacuccagca

SEQ ID NO: 897811 - RNA, 24 nt, Human
agacugaggcaggagaacugcuug

SEQ ID NO: 897812 - RNA, 20 nt, Human
agcaauucuccugccucagc

SEQ ID NO: 897813 - RNA, 23 nt, Human
agcauggaguguacuacuaucug

SEQ ID NO: 897814 - RNA, 22 nt, Human
agcauuuugggaggcugaggca

SEQ ID NO: 897815 - RNA, 24 nt, Human
agcauuuugggaggcugaggcagg

SEQ ID NO: 897816 - RNA, 24 nt, Human
agccuggccaacacagugaaaccc

SEQ ID NO: 897817 - RNA, 24 nt, Human
aggaaauacuugcaauaaaaagaa

SEQ ID NO: 897818 - RNA, 19 nt, Human
aggacagaaaagcaaaacc

SEQ ID NO: 897819 - RNA, 24 nt, Human
aggaguucgagaccagcccuggcc

SEQ ID NO: 897820 - RNA, 18 nt, Human
aggcaggagaacugcuug

SEQ ID NO: 897821 - RNA, 24 nt, Human
aggcaggagaacugcuugaacccg

SEQ ID NO: 897822 - RNA, 27 nt, Human
aggcagguggaucaugaggucaguuca

SEQ ID NO: 897823 - RNA, 21 nt, Human
aggccgaggcgggcugauuac

SEQ ID NO: 897824 - RNA, 20 nt, Human
aggcugaggcagguggauca

SEQ ID NO: 897825 - RNA, 22 nt, Human
aggcugaggcagguggaucaug

SEQ ID NO: 897826 - RNA, 24 nt, Human
agguggagguugcagugagccgag

SEQ ID NO: 897827 - RNA, 24 nt, Human
aguggcucaagccuguaaucccag

SEQ ID NO: 897828 - RNA, 24 nt, Human
aguggcucacaccuguaaucacag

SEQ ID NO: 897829 - RNA, 24 nt, Human
auuaccuguggucaggaguucgag

SEQ ID NO: 897830 - RNA, 21 nt, Human
caacaagagcaaaacuccauc

SEQ ID NO: 897831 - RNA, 27 nt, Human
caacauggugaaacccugucgucucua

SEQ ID NO: 897832 - RNA, 24 nt, Human
caagagcaaaacuccaucucaaaa

SEQ ID NO: 897833 - RNA, 24 nt, Human
caagauccuguagcgaacgucucc

SEQ ID NO: 897834 - RNA, 22 nt, Human
caagcugaaagaguucugcuca

SEQ ID NO: 897835 - RNA, 21 nt, Human
cacacaacaccuguacauggu

SEQ ID NO: 897836 - RNA, 24 nt, Human
cacacacuaaaacccugccauaaa

SEQ ID NO: 897837 - RNA, 19 nt, Human
cacacccguaguuccagcc

SEQ ID NO: 897838 - RNA, 24 nt, Human
cacaccuguaaucacagcacuuug

SEQ ID NO: 897839 - RNA, 26 nt, Human
cacagcacuuuggaggccgaggcggg

SEQ ID NO: 897840 - RNA, 19 nt, Human
caccuguaaucacagcacu

SEQ ID NO: 897841 - RNA, 22 nt, Human
cacuauagguggcuaaaacaaa

SEQ ID NO: 897842 - RNA, 21 nt, Human
cacuccagcagagcaagacuc

SEQ ID NO: 897843 - RNA, 21 nt, Human
cacugcaaccucugccucccg

SEQ ID NO: 897844 - RNA, 23 nt, Human
cacugcaaccucugccucccggg

SEQ ID NO: 897845 - RNA, 23 nt, Human
cacugcugguugacugacagagu

SEQ ID NO: 897846 - RNA, 23 nt, Human
cacuuuggaggccgaggcgggcu

SEQ ID NO: 897847 - RNA, 23 nt, Human
cagagcaagacucugccucaaaa

SEQ ID NO: 897848 - RNA, 22 nt, Human
cagaguccaaguuuccaaaauc

SEQ ID NO: 897849 - RNA, 23 nt, Human
cagcaacaagagcaaaacuccau

SEQ ID NO: 897850 - RNA, 25 nt, Human
cagcaacaagagcaaaacuccaucu

SEQ ID NO: 897851 - RNA, 20 nt, Human
cagcaccagaaucccacuga

SEQ ID NO: 897852 - RNA, 21 nt, Human
cagcacuuuggaggccgaggc

SEQ ID NO: 897853 - RNA, 23 nt, Human
cagcacuuuggaggccgaggcgg

SEQ ID NO: 897854 - RNA, 24 nt, Human
cagcauuuugggaggcugaggcag

SEQ ID NO: 897855 - RNA, 24 nt, Human
cagcauuuugggaggcugaggcag

SEQ ID NO: 897856 - RNA, 24 nt, Human
cagcuuccuugugaucagcucuga

SEQ ID NO: 897857 - RNA, 24 nt, Human
caucaaaaauaaagaauuaguucc

SEQ ID NO: 897858 - RNA, 23 nt, Human
cauuaaagcgucccaacacaaag

SEQ ID NO: 897859 - RNA, 26 nt, Human
cauuuucaccuuaaaaaaauuucagg

SEQ ID NO: 897860 - RNA, 22 nt, Human
ccacaacaucaaaaauaaagaa

SEQ ID NO: 897861 - RNA, 20 nt, Human
ccaccgcacuccagcagagc

SEQ ID NO: 897862 - RNA, 21 nt, Human
ccaccgcacuccagcagagca

SEQ ID NO: 897863 - RNA, 23 nt, Human
ccaccgcacuccagcagagcaag

SEQ ID NO: 897864 - RNA, 25 nt, Human
ccaccgcacuccagcagagcaagac

SEQ ID NO: 897865 - RNA, 21 nt, Human
cccaacacaaagcagauucga

SEQ ID NO: 897866 - RNA, 19 nt, Human
cccggaggcagcggucgcc

SEQ ID NO: 897867 - RNA, 21 nt, Human
cccgggagguggagguugcag

SEQ ID NO: 897868 - RNA, 23 nt, Human
cccggguuugagcaauucuccug

SEQ ID NO: 897869 - RNA, 19 nt, Human
ccgggagcaguggcucaag

SEQ ID NO: 897870 - RNA, 21 nt, Human
ccucauugucccaagauccug

SEQ ID NO: 897871 - RNA, 24 nt, Human
ccucccggguuugagcaauucucc

SEQ ID NO: 897872 - RNA, 24 nt, Human
ccuggccaacacagugaaacccca

SEQ ID NO: 897873 - RNA, 22 nt, Human
ccuggccaacauggugaaaccc

SEQ ID NO: 897874 - RNA, 22 nt, Human
ccuggccaacauggugaaaccc

SEQ ID NO: 897875 - RNA, 24 nt, Human
ccuggccaacauggugaaacccug

SEQ ID NO: 897876 - RNA, 25 nt, Human
ccuguaaucacagcacuuuggaggc

SEQ ID NO: 897877 - RNA, 20 nt, Human
ccuguaaucccagcauuuug

SEQ ID NO: 897878 - RNA, 22 nt, Human
ccuguaaucccagcauuuuggg

SEQ ID NO: 897879 - RNA, 22 nt, Human
ccuguggucaggaguucgagac

SEQ ID NO: 897880 - RNA, 25 nt, Human
cgagaccagcccuggccaacauggu

SEQ ID NO: 897881 - RNA, 29 nt, Human
cgggagguggagguugcagugacaacggu

SEQ ID NO: 897882 - RNA, 24 nt, Human
cgggagguggagguugcagugagc

SEQ ID NO: 897883 - RNA, 18 nt, Human
cucaaaaaaaaaaaaaaa

SEQ ID NO: 897884 - RNA, 23 nt, Human
cucaaaaaaaaaaaaaaaaaaaa

SEQ ID NO: 897885 - RNA, 24 nt, Human
cucaagccuguaaucccagcauuu

SEQ ID NO: 897886 - RNA, 24 nt, Human
cucacaccuguaaucacagcacuu

SEQ ID NO: 897887 - RNA, 19 nt, Human
cucugccucaaaaaaaaaa

SEQ ID NO: 897888 - RNA, 22 nt, Human
cucugccucaaaaaaaaaaaaa

SEQ ID NO: 897889 - RNA, 19 nt, Human
cucuuuugcccaggcugga

SEQ ID NO: 897890 - RNA, 24 nt, Human
cugauggucuccuucaaacccucc

SEQ ID NO: 897891 - RNA, 19 nt, Human
cugcaaccucugccucccg

SEQ ID NO: 897892 - RNA, 23 nt, Human
cugcaaccucugccucccggguu

SEQ ID NO: 897893 - RNA, 23 nt, Human
cugcaaccucugccucccggguu

SEQ ID NO: 897894 - RNA, 23 nt, Human
cugccucagcaacaagagcaaaa

SEQ ID NO: 897895 - RNA, 24 nt, Human
cugcuugaacccgggagguggagg

SEQ ID NO: 897896 - RNA, 23 nt, Human
cuggccaacacagugaaacccca

SEQ ID NO: 897897 - RNA, 24 nt, Human
cuggccaacauggugaaacccugu

SEQ ID NO: 897898 - RNA, 23 nt, Human
gaaaaaggaacuugucaaaacau

SEQ ID NO: 897899 - RNA, 25 nt, Human
gaaaauucauuuauuuagugaaacc

SEQ ID NO: 897900 - RNA, 23 nt, Human
gagguugcagugagccgagacug

SEQ ID NO: 897901 - RNA, 21 nt, Human
gaucaugaggucaguucaaga

SEQ ID NO: 897902 - RNA, 22 nt, Human
gauuaccuguggucaggaguuc

SEQ ID NO: 897903 - RNA, 24 nt, Human
gauuaccuguggucaggaguucga

SEQ ID NO: 897904 - RNA, 21 nt, Human
gcaaccucugccucccggguu

SEQ ID NO: 897905 - RNA, 23 nt, Human
gcagugauuugucauuaaggucu

SEQ ID NO: 897906 - RNA, 22 nt, Human
gccaacauggugaaacccuguc

SEQ ID NO: 897907 - RNA, 20 nt, Human
gcucuuuugcccaggcugga

SEQ ID NO: 897908 - RNA, 23 nt, Human
ggaaauaaaguguggaaggauca

SEQ ID NO: 897909 - RNA, 24 nt, Human
ggaaggacugcagggccugugugg

SEQ ID NO: 897910 - RNA, 18 nt, Human
ggagguugcagugagccg

SEQ ID NO: 897911 - RNA, 20 nt, Human
ggagguugcagugagccgag

SEQ ID NO: 897912 - RNA, 22 nt, Human
ggagguugcagugagccgagac

SEQ ID NO: 897913 - RNA, 22 nt, Human
ggcgugguggcgcacacccgua

SEQ ID NO: 897914 - RNA, 23 nt, Human
ggcguuuugcucuuuugcccagg

SEQ ID NO: 897915 - RNA, 24 nt, Human
gggagcaguggcucaagccuguaa

SEQ ID NO: 897916 - RNA, 24 nt, Human
gggugcaguggcucacaccuguaa

SEQ ID NO: 897917 - RNA, 24 nt, Human
gguggcgcacacccguaguuccag

SEQ ID NO: 897918 - RNA, 22 nt, Human
gucuccuucaaacccuccauca

SEQ ID NO: 897919 - RNA, 29 nt, Human
gucugaaaucccauauuuucaacuguccc

SEQ ID NO: 897920 - RNA, 18 nt, Human
gugcaguggcucacaccu

SEQ ID NO: 897921 - RNA, 19 nt, Human
guugcagugagccgagacu

SEQ ID NO: 897922 - RNA, 21 nt, Human
guugcagugagccgagacugc

SEQ ID NO: 897923 - RNA, 24 nt, Human
guuuugcucuuuugcccaggcugg

SEQ ID NO: 897924 - RNA, 22 nt, Human
uaaagcgucccaacacaaagca

SEQ ID NO: 897925 - RNA, 21 nt, Human
uagcgaacgucuccgcggucu

SEQ ID NO: 897926 - RNA, 25 nt, Human
uaggaaauacuugcaauaaaaagaa

SEQ ID NO: 897927 - RNA, 18 nt, Human
uaggaaggacugcagggc

SEQ ID NO: 897928 - RNA, 21 nt, Human
ucaagccuguaaucccagcau

SEQ ID NO: 897929 - RNA, 20 nt, Human
ucacacacuaaaacccugcc

SEQ ID NO: 897930 - RNA, 23 nt, Human
ucacugcaaccucugccucccgg

SEQ ID NO: 897931 - RNA, 24 nt, Human
ucacugcaaccucugccucccggg

SEQ ID NO: 897932 - RNA, 25 nt, Human
ucacugcaaccucugccucccgggu

SEQ ID NO: 897933 - RNA, 23 nt, Human
ucagcaacaagagcaaaacucca

SEQ ID NO: 897934 - RNA, 25 nt, Human
ucaggccgggugcaguggcucacac

SEQ ID NO: 897935 - RNA, 21 nt, Human
ucaugaggucaguucaagacc

SEQ ID NO: 897936 - RNA, 21 nt, Human
uccaugccgaaagcggccgca

SEQ ID NO: 897937 - RNA, 21 nt, Human
ucccggguuugagcaauucuc

SEQ ID NO: 897938 - RNA, 24 nt, Human
ucccggguuugagcaauucuccug

SEQ ID NO: 897939 - RNA, 24 nt, Human
uccgcggucuguaaacuucccgga

SEQ ID NO: 897940 - RNA, 24 nt, Human
ucuccuucaaacccuccaucagag

SEQ ID NO: 897941 - RNA, 26 nt, Human
ucugaaaucccauauuuucaacuguc

SEQ ID NO: 897942 - RNA, 23 nt, Human
ucugccucaaaaaaaaaaaaaaa

SEQ ID NO: 897943 - RNA, 20 nt, Human
ucuguaaacuucccggaggc

SEQ ID NO: 897944 - RNA, 18 nt, Human
ucuugggucacugcaacc

SEQ ID NO: 897945 - RNA, 19 nt, Human
ugaaaccccaucuccacua

SEQ ID NO: 897946 - RNA, 22 nt, Human
ugaaaccccaucuccacuaaaa

SEQ ID NO: 897947 - RNA, 19 nt, Human
ugaaggaaaacuguuacac

SEQ ID NO: 897948 - RNA, 20 nt, Human
ugagcaauucuccugccuca

SEQ ID NO: 897949 - RNA, 20 nt, Human
ugagcuguaguccacugcug

SEQ ID NO: 897950 - RNA, 24 nt, Human
ugaggcaggagaacugcuugaacc

SEQ ID NO: 897951 - RNA, 25 nt, Human
ugaggcaggagaacugcuugaaccc

SEQ ID NO: 897952 - RNA, 24 nt, Human
ugaggcagguggaucaugagguca

SEQ ID NO: 897953 - RNA, 23 nt, Human
ugauuaccuguggucaggaguuc

SEQ ID NO: 897954 - RNA, 25 nt, Human
ugccauaaaguuguaucaauuaggg

SEQ ID NO: 897955 - RNA, 26 nt, Human
ugccauaaaguuguaucaauuagggc

SEQ ID NO: 897956 - RNA, 20 nt, Human
ugccaucagucaucuaucgg

SEQ ID NO: 897957 - RNA, 21 nt, Human
ugcccaggcuggagugaagug

SEQ ID NO: 897958 - RNA, 24 nt, Human
ugcccaggcuggagugaaguggca

SEQ ID NO: 897959 - RNA, 21 nt, Human
ugcucuuuugcccaggcugga

SEQ ID NO: 897960 - RNA, 24 nt, Human
ugcucuuuugcccaggcuggagug

SEQ ID NO: 897961 - RNA, 19 nt, Human
uggagugaaguggcacgau

SEQ ID NO: 897962 - RNA, 24 nt, Human
uggagugaaguggcacgaucuugg

SEQ ID NO: 897963 - RNA, 21 nt, Human
uggcacgaucuugggucacug

SEQ ID NO: 897964 - RNA, 24 nt, Human
uggccaacauggugaaacccuguc

SEQ ID NO: 897965 - RNA, 24 nt, Human
uggcucaagccuguaaucccagca

SEQ ID NO: 897966 - RNA, 18 nt, Human
uggcucacaccuguaauc

SEQ ID NO: 897967 - RNA, 24 nt, Human
uggcucacaccuguaaucacagca

SEQ ID NO: 897968 - RNA, 24 nt, Human
ugggaggcugaggcagguggauca

SEQ ID NO: 897969 - RNA, 24 nt, Human
uguugcacacaacaccuguacaug

SEQ ID NO: 897970 - RNA, 18 nt, Human
uuagcugggcgugguggc

SEQ ID NO: 897971 - RNA, 20 nt, Human
uuagcugggcgugguggcgc

SEQ ID NO: 897972 - RNA, 18 nt, Human
uucaaaaggcuaauugca

SEQ ID NO: 897973 - RNA, 24 nt, Human
uugaacccgggagguggagguugc

SEQ ID NO: 897974 - RNA, 18 nt, Human
uugcagugagccgagacu

SEQ ID NO: 897975 - RNA, 19 nt, Human
uugcagugagccgagacug

SEQ ID NO: 897976 - RNA, 22 nt, Human
uugcagugagccgagacugcac

SEQ ID NO: 897977 - RNA, 21 nt, Human
uugcccaggcuggagugaagu

SEQ ID NO: 897978 - RNA, 22 nt, Human
uugcucuuuugcccaggcugga

SEQ ID NO: 897979 - RNA, 24 nt, Human
uugcucuuuugcccaggcuggagu

SEQ ID NO: 897980 - RNA, 25 nt, Human
uugggaggcugaggcagguggauca

SEQ ID NO: 897981 - RNA, 28 nt, Human
uugucugaaaucccauauuuucaacugu

SEQ ID NO: 897982 - RNA, 19 nt, Human
uuuccuggucaaaaaacug

SEQ ID NO: 897983 - RNA, 24 nt, Human
uuugagcaauucuccugccucagc

SEQ ID NO: 897984 - RNA, 24 nt, Human
uuuugcucuuuugcccaggcugga

SEQ ID NO: 897985 - RNA, 22 nt, Human
uuuuuuuuuuuuuuuuuuucag

SEQ ID NO: 897986 - RNA, 24 nt, Human
aaaaccaguaccaaauccaaaacc

SEQ ID NO: 897987 - RNA, 18 nt, Human
aaaauagcaucucucuca

SEQ ID NO: 897988 - RNA, 23 nt, Human
aaaauugaaggccaugucgcgaa

SEQ ID NO: 897989 - RNA, 25 nt, Human
aaaccaguaccuaaaccaguacuag

SEQ ID NO: 897990 - RNA, 21 nt, Human
aaccaguaccaaauccaaaac

SEQ ID NO: 897991 - RNA, 24 nt, Human
aauaaaaaggcuuaaaaaacaaaa

SEQ ID NO: 897992 - RNA, 22 nt, Human
aaucccaguccaguucccaaac

SEQ ID NO: 897993 - RNA, 22 nt, Human
acucgcaguauuuaucagcugg

SEQ ID NO: 897994 - RNA, 18 nt, Human
aggagcuuguguaggcug

SEQ ID NO: 897995 - RNA, 21 nt, Human
aggugcccgagggagccccaa

SEQ ID NO: 897996 - RNA, 20 nt, Human
aguacaggcucaauggacaa

SEQ ID NO: 897997 - RNA, 24 nt, Human
aguccaguucccaaaccaguaccu

SEQ ID NO: 897998 - RNA, 21 nt, Human
caaaaaaccaauccaagaaag

SEQ ID NO: 897999 - RNA, 18 nt, Human
caaaaccaguaccaaauc

SEQ ID NO: 898000 - RNA, 23 nt, Human
cagaaaagcugaaugcagaaccu

SEQ ID NO: 898001 - RNA, 23 nt, Human
caguccaguucccaaaccaguac

SEQ ID NO: 898002 - RNA, 18 nt, Human
cauuucacaaaccuuuac

SEQ ID NO: 898003 - RNA, 23 nt, Human
cauuuugccaaaauagcaucucu

SEQ ID NO: 898004 - RNA, 19 nt, Human
ccaaaaccaguaccaaauc

SEQ ID NO: 898005 - RNA, 21 nt, Human
ccaaaaccaguaccaaaucca

SEQ ID NO: 898006 - RNA, 18 nt, Human
ccccaaaauugaaggccu

SEQ ID NO: 898007 - RNA, 22 nt, Human
cccuccauguggucgguuucau

SEQ ID NO: 898008 - RNA, 20 nt, Human
ccugcaguuguagauguugu

SEQ ID NO: 898009 - RNA, 19 nt, Human
cugaagagaccaccuaaug

SEQ ID NO: 898010 - RNA, 18 nt, Human
cugcuguguauuaaaucc

SEQ ID NO: 898011 - RNA, 20 nt, Human
gaagagcugugaggugacua

SEQ ID NO: 898012 - RNA, 19 nt, Human
gaaggccaugucgcgaaag

SEQ ID NO: 898013 - RNA, 27 nt, Human
gccgcgguggcugcagcggucguacac

SEQ ID NO: 898014 - RNA, 19 nt, Human
ggaauauuauuguugaaau

SEQ ID NO: 898015 - RNA, 23 nt, Human
gggccgcgguggcugcagcggua

SEQ ID NO: 898016 - RNA, 20 nt, Human
guuuucuuuuucccuccaug

SEQ ID NO: 898017 - RNA, 22 nt, Human
uaaaaaggcuuaaaaaacaaaa

SEQ ID NO: 898018 - RNA, 20 nt, Human
uaaaauaauauaaaaauaca

SEQ ID NO: 898019 - RNA, 23 nt, Human
uaaaauaauauaaaaauacauuu

SEQ ID NO: 898020 - RNA, 21 nt, Human
uaaggaaggucugaugcagua

SEQ ID NO: 898021 - RNA, 22 nt, Human
uacccuuuuccuguuccccaaa

SEQ ID NO: 898022 - RNA, 24 nt, Human
uaggagcuuguguaggcugacuga

SEQ ID NO: 898023 - RNA, 26 nt, Human
uauaaccuacugccuuaaaucggcaa

SEQ ID NO: 898024 - RNA, 18 nt, Human
uauagaacaaaaacaaaa

SEQ ID NO: 898025 - RNA, 21 nt, Human
ucccaaauccuccaaacccac

SEQ ID NO: 898026 - RNA, 25 nt, Human
uccccaaaaggccugcaguugauuc

SEQ ID NO: 898027 - RNA, 21 nt, Human
ucggcaaaagggauuuucuug

SEQ ID NO: 898028 - RNA, 22 nt, Human
ugaguaccaccaaagaguccag

SEQ ID NO: 898029 - RNA, 21 nt, Human
ugcugcuguguauuaaauccu

SEQ ID NO: 898030 - RNA, 22 nt, Human
uggaaagcagaguacaggcuca

SEQ ID NO: 898031 - RNA, 23 nt, Human
uggacaauaaucauuaaacacag

SEQ ID NO: 898032 - RNA, 19 nt, Human
uggggcagaaaagcugaau

SEQ ID NO: 898033 - RNA, 21 nt, Human
ugguaauuaugcacuucuuuu

SEQ ID NO: 898034 - RNA, 23 nt, Human
ugugaggugacuauuucagauuu

SEQ ID NO: 898035 - RNA, 21 nt, Human
uuauagaacaaaaacaaaaca

SEQ ID NO: 898036 - RNA, 20 nt, Human
uucacaaauacaaaaacugg

SEQ ID NO: 898037 - RNA, 25 nt, Human
uuucacaaaccuuuacacaaguuuu

SEQ ID NO: 898038 - RNA, 24 nt, Human
uuuguucugaguaccaccaaagag

SEQ ID NO: 898039 - RNA, 24 nt, Human
uuuuggauuuucuuuacuccuccc

SEQ ID NO: 898040 - RNA, 21 nt, Human
aaaaccuguuuggaaaacaga

SEQ ID NO: 898041 - RNA, 23 nt, Human
aaaagaagaauggugaaacaaaa

SEQ ID NO: 898042 - RNA, 29 nt, Human
aaacacaaggcaaagugagaagggacccc

SEQ ID NO: 898043 - RNA, 19 nt, Human
aaacagcccaucuccuguc

SEQ ID NO: 898044 - RNA, 19 nt, Human
aagcgagccaccaccaaaa

SEQ ID NO: 898045 - RNA, 20 nt, Human
acuacaaauaccacaugacc

SEQ ID NO: 898046 - RNA, 25 nt, Human
agaaacaagcgagccaccaccaaaa

SEQ ID NO: 898047 - RNA, 23 nt, Human
aggguggaaaacacaaggcaaag

SEQ ID NO: 898048 - RNA, 26 nt, Human
cacaaggcaaagugagaaaaaaaaaa

SEQ ID NO: 898049 - RNA, 24 nt, Human
ccauccauuuacaauaauuacuuc

SEQ ID NO: 898050 - RNA, 22 nt, Human
cccuguauaugaguaauuccau

SEQ ID NO: 898051 - RNA, 26 nt, Human
ccuacucugacucuaccucaaaagcc

SEQ ID NO: 898052 - RNA, 19 nt, Human
gaagcagaacaacagcccu

SEQ ID NO: 898053 - RNA, 23 nt, Human
gagccaccaccaaaaagguuuaa

SEQ ID NO: 898054 - RNA, 25 nt, Human
gugaaacaaaauauaugaucugcuc

SEQ ID NO: 898055 - RNA, 21 nt, Human
guuaauacuuccauaaaaaca

SEQ ID NO: 898056 - RNA, 23 nt, Human
uaaaaacagcccaucuccuguca

SEQ ID NO: 898057 - RNA, 25 nt, Human
uaacaggauaaaauuccacccugua

SEQ ID NO: 898058 - RNA, 23 nt, Human
uaauuucuugaggaagcagaaca

SEQ ID NO: 898059 - RNA, 21 nt, Human
uaccacaugaccacauuuaua

SEQ ID NO: 898060 - RNA, 23 nt, Human
uacucugacucuaccucaaaagc

SEQ ID NO: 898061 - RNA, 18 nt, Human
uacuuagucauauacaga

SEQ ID NO: 898062 - RNA, 26 nt, Human
uauaauugauugcuuuucacuuucaa

SEQ ID NO: 898063 - RNA, 20 nt, Human
uaucagagaaacaagcgagc

SEQ ID NO: 898064 - RNA, 19 nt, Human
uauuaggggcugauauuca

SEQ ID NO: 898065 - RNA, 20 nt, Human
uauuaggggcugauauucag

SEQ ID NO: 898066 - RNA, 25 nt, Human
uauuaggggcugauauucagaaaau

SEQ ID NO: 898067 - RNA, 18 nt, Human
ucuaaaaaugcuuaaauc

SEQ ID NO: 898068 - RNA, 20 nt, Human
ugaaacaaaauauaugaucu

SEQ ID NO: 898069 - RNA, 21 nt, Human
ugauuaacacccaucauuugg

SEQ ID NO: 898070 - RNA, 25 nt, Human
uggaaaacacaaggcaaagugagaa

SEQ ID NO: 898071 - RNA, 23 nt, Human
uggaaaauuuauuuuuccuuagg

SEQ ID NO: 898072 - RNA, 18 nt, Human
ugugaaaauauauacaua

SEQ ID NO: 898073 - RNA, 24 nt, Human
ugugauaacaggauaaaauuccac

SEQ ID NO: 898074 - RNA, 23 nt, Human
uguuuggaaaacagauuaguugu

SEQ ID NO: 898075 - RNA, 22 nt, Human
uucaaaauuuauuacaaaagaa

SEQ ID NO: 898076 - RNA, 19 nt, Human
uuuauacacuauacuguca

SEQ ID NO: 898077 - RNA, 25 nt, Human
uuuuuuuuuuuuuuuuuuuacuuaa

SEQ ID NO: 898078 - RNA, 20 nt, Human
aaaaaaaagaaaauaaaagg

SEQ ID NO: 898079 - RNA, 21 nt, Human
aaagaaaauaaaagggaaugg

SEQ ID NO: 898080 - RNA, 20 nt, Human
aacagagucuccaaacacgg

SEQ ID NO: 898081 - RNA, 19 nt, Human
aacauggugaaaccccauc

SEQ ID NO: 898082 - RNA, 20 nt, Human
aacauggugaaaccccaucu

SEQ ID NO: 898083 - RNA, 21 nt, Human
aacauggugaaaccccaucuc

SEQ ID NO: 898084 - RNA, 21 nt, Human
aacauggugaaaccccaucuc

SEQ ID NO: 898085 - RNA, 21 nt, Human
aagaaaauaaaagggaauggc

SEQ ID NO: 898086 - RNA, 22 nt, Human
aagaaaauaaaagggaauggca

SEQ ID NO: 898087 - RNA, 20 nt, Human
aagaggccaacaaccuaccu

SEQ ID NO: 898088 - RNA, 21 nt, Human
aaggaaggagggggaggagga

SEQ ID NO: 898089 - RNA, 18 nt, Human
aauaacgucucaggaggc

SEQ ID NO: 898090 - RNA, 24 nt, Human
acacaaggcccacccguggcugac

SEQ ID NO: 898091 - RNA, 24 nt, Human
acagagcaagacuccaucucaaaa

SEQ ID NO: 898092 - RNA, 24 nt, Human
accccagggugcuggcugaggagu

SEQ ID NO: 898093 - RNA, 24 nt, Human
accccaucucuacuaaaaauacaa

SEQ ID NO: 898094 - RNA, 25 nt, Human
accggauuuuccaaaucaauggucu

SEQ ID NO: 898095 - RNA, 24 nt, Human
accugaggucaggaguucgagacc

SEQ ID NO: 898096 - RNA, 24 nt, Human
acugcacuccagccugggcgacag

SEQ ID NO: 898097 - RNA, 26 nt, Human
acugcacuccagccugggcgacagag

SEQ ID NO: 898098 - RNA, 22 nt, Human
acuuggguggugggauucgggg

SEQ ID NO: 898099 - RNA, 19 nt, Human
agagaaggauucguuaaca

SEQ ID NO: 898100 - RNA, 22 nt, Human
agauggugccacugcacuccag

SEQ ID NO: 898101 - RNA, 24 nt, Human
agcaaggaacaacagugucaacag

SEQ ID NO: 898102 - RNA, 24 nt, Human
agcacuuugggaggccgaggcggg

SEQ ID NO: 898103 - RNA, 23 nt, Human
agccagguacgguggcgggugcc

SEQ ID NO: 898104 - RNA, 24 nt, Human
agccagguacgguggcgggugccu

SEQ ID NO: 898105 - RNA, 24 nt, Human
agccuagccaacauggugaaaccc

SEQ ID NO: 898106 - RNA, 24 nt, Human
agccugggcgacagagcaagacuc

SEQ ID NO: 898107 - RNA, 24 nt, Human
aggaaaaggcgaggcuucugguaa

SEQ ID NO: 898108 - RNA, 24 nt, Human
aggaacaacagugucaacagccgg

SEQ ID NO: 898109 - RNA, 20 nt, Human
aggaaggagggggaggagga

SEQ ID NO: 898110 - RNA, 21 nt, Human
aggagaaggcugaguuuuaaa

SEQ ID NO: 898111 - RNA, 18 nt, Human
aggcaggagaaucacuug

SEQ ID NO: 898112 - RNA, 22 nt, Human
aggcaggagaaucacuugaacc

SEQ ID NO: 898113 - RNA, 21 nt, Human
aggccgaggcggguggaucac

SEQ ID NO: 898114 - RNA, 22 nt, Human
aggcggguggaucaccugaggu

SEQ ID NO: 898115 - RNA, 26 nt, Human
aggcggguggaucaccugaggucagg

SEQ ID NO: 898116 - RNA, 24 nt, Human
aggcugaggcaggagaaucacuug

SEQ ID NO: 898117 - RNA, 18 nt, Human
agggggaggaggagaagg

SEQ ID NO: 898118 - RNA, 24 nt, Human
agguacgguggcgggugccuguaa

SEQ ID NO: 898119 - RNA, 21 nt, Human
aucaccugaggucaggaguuc

SEQ ID NO: 898120 - RNA, 21 nt, Human
augccugcuuuauuuccuacg

SEQ ID NO: 898121 - RNA, 24 nt, Human
auggugccacugcacuccagccug

SEQ ID NO: 898122 - RNA, 24 nt, Human
caacauggugaaaccccaucucua

SEQ ID NO: 898123 - RNA, 21 nt, Human
caagacuccaucucaaaaaaa

SEQ ID NO: 898124 - RNA, 23 nt, Human
caagacuccaucucaaaaaaaag

SEQ ID NO: 898125 - RNA, 18 nt, Human
caagggcccugcaaugac

SEQ ID NO: 898126 - RNA, 20 nt, Human
caagggcccugcaaugacuu

SEQ ID NO: 898127 - RNA, 22 nt, Human
caaugacuucccugaaggguuu

SEQ ID NO: 898128 - RNA, 25 nt, Human
cacccgcagcucuaagcggaggccc

SEQ ID NO: 898129 - RNA, 21 nt, Human
cacccucgcuccaucccgggg

SEQ ID NO: 898130 - RNA, 22 nt, Human
cacccucgcuccaucccggggc

SEQ ID NO: 898131 - RNA, 23 nt, Human
caccugaggucaggaguucgaga

SEQ ID NO: 898132 - RNA, 24 nt, Human
cacgccuguaaucccagcacuuug

SEQ ID NO: 898133 - RNA, 23 nt, Human
cacuccagccugggcgacagagc

SEQ ID NO: 898134 - RNA, 19 nt, Human
cacugcacuccagccuggg

SEQ ID NO: 898135 - RNA, 20 nt, Human
cacugcacuccagccugggc

SEQ ID NO: 898136 - RNA, 22 nt, Human
cacugcacuccagccugggcga

SEQ ID NO: 898137 - RNA, 23 nt, Human
cacugcacuccagccugggcgac

SEQ ID NO: 898138 - RNA, 24 nt, Human
cacugcacuccagccugggcgaca

SEQ ID NO: 898139 - RNA, 27 nt, Human
cacugcacuccagccugggcgacagag

SEQ ID NO: 898140 - RNA, 22 nt, Human
cagcacuuugggaggccgaggc

SEQ ID NO: 898141 - RNA, 24 nt, Human
cagcacuuugggaggccgaggcgg

SEQ ID NO: 898142 - RNA, 24 nt, Human
cagcuacucgggaggcugaggcag

SEQ ID NO: 898143 - RNA, 18 nt, Human
caggacccgggugaggcu

SEQ ID NO: 898144 - RNA, 18 nt, Human
cagguacgguggcgggug

SEQ ID NO: 898145 - RNA, 26 nt, Human
caucacauaacaagucuaaucgccaa

SEQ ID NO: 898146 - RNA, 20 nt, Human
caucucggaucaccagcagc

SEQ ID NO: 898147 - RNA, 20 nt, Human
ccacugcacuccagccuggg

SEQ ID NO: 898148 - RNA, 21 nt, Human
ccacugcacuccagccugggc

SEQ ID NO: 898149 - RNA, 21 nt, Human
ccacugcacuccagccugggc

SEQ ID NO: 898150 - RNA, 24 nt, Human
ccacugcacuccagccugggcgac

SEQ ID NO: 898151 - RNA, 24 nt, Human
cccaaaaaaccucuacaagcuucc

SEQ ID NO: 898152 - RNA, 18 nt, Human
cccaaguaagaggccaac

SEQ ID NO: 898153 - RNA, 20 nt, Human
cccgugcucccaaacagagu

SEQ ID NO: 898154 - RNA, 24 nt, Human
ccuagccaacauggugaaacccca

SEQ ID NO: 898155 - RNA, 21 nt, Human
ccuccacccucgcuccauccc

SEQ ID NO: 898156 - RNA, 22 nt, Human
ccugaggucaggaguucgagac

SEQ ID NO: 898157 - RNA, 22 nt, Human
ccugggcgacagagcaagacuc

SEQ ID NO: 898158 - RNA, 19 nt, Human
ccuguaaucccagcuacuc

SEQ ID NO: 898159 - RNA, 21 nt, Human
ccuguaaucccagcuacucgg

SEQ ID NO: 898160 - RNA, 23 nt, Human
ccuuagcuacauuuuucuucuca

SEQ ID NO: 898161 - RNA, 25 nt, Human
ccuugggcacagagcuggguggagc

SEQ ID NO: 898162 - RNA, 24 nt, Human
cgagaccagccuagccaacauggu

SEQ ID NO: 898163 - RNA, 20 nt, Human
cgaggcggguggaucaccug

SEQ ID NO: 898164 - RNA, 24 nt, Human
cgaggcggguggaucaccugaggu

SEQ ID NO: 898165 - RNA, 26 nt, Human
cgaggcggguggaucaccugagguca

SEQ ID NO: 898166 - RNA, 23 nt, Human
cgccuguaaucccagcacuuugg

SEQ ID NO: 898167 - RNA, 24 nt, Human
cgccuguaaucccagcacuuuggg

SEQ ID NO: 898168 - RNA, 22 nt, Human
cgcgcccuccacccucgcucca

SEQ ID NO: 898169 - RNA, 21 nt, Human
cggaaggaaggagggggagga

SEQ ID NO: 898170 - RNA, 24 nt, Human
cggcucacgccuguaaucccagca

SEQ ID NO: 898171 - RNA, 24 nt, Human
cggguggaucaccugaggucagga

SEQ ID NO: 898172 - RNA, 22 nt, Human
cucacgccuguaaucccagcac

SEQ ID NO: 898173 - RNA, 24 nt, Human
cucacgccuguaaucccagcacuu

SEQ ID NO: 898174 - RNA, 20 nt, Human
cucacugaaguacuguuuga

SEQ ID NO: 898175 - RNA, 25 nt, Human
cucagaccgaggaagacuguguugc

SEQ ID NO: 898176 - RNA, 19 nt, Human
cucaucuuuguaguucugc

SEQ ID NO: 898177 - RNA, 20 nt, Human
cucuacaagcuuccuuuugc

SEQ ID NO: 898178 - RNA, 21 nt, Human
cugcagaaacaaggcaccaca

SEQ ID NO: 898179 - RNA, 21 nt, Human
cugcccaggacacccuggcag

SEQ ID NO: 898180 - RNA, 19 nt, Human
cuggacacuuggguggugg

SEQ ID NO: 898181 - RNA, 20 nt, Human
cugguaauuucucaucuuug

SEQ ID NO: 898182 - RNA, 21 nt, Human
cuggugcuuaggaaaaggcga

SEQ ID NO: 898183 - RNA, 21 nt, Human
cuucugguaauuucucaucuu

SEQ ID NO: 898184 - RNA, 19 nt, Human
cuugggaagauguccaaag

SEQ ID NO: 898185 - RNA, 24 nt, Human
gaaggagggggaggaggagaaggc

SEQ ID NO: 898186 - RNA, 27 nt, Human
gacccaccggcccuccacgcucacucu

SEQ ID NO: 898187 - RNA, 20 nt, Human
gagcuggguggagcgagagg

SEQ ID NO: 898188 - RNA, 22 nt, Human
gaggaguuuacugcagaaacaa

SEQ ID NO: 898189 - RNA, 21 nt, Human
gagguugaagugagccaagau

SEQ ID NO: 898190 - RNA, 21 nt, Human
gaucaccugaggucaggaguu

SEQ ID NO: 898191 - RNA, 24 nt, Human
gaucaccugaggucaggaguucga

SEQ ID NO: 898192 - RNA, 24 nt, Human
gcacuccagccugggcgacagagc

SEQ ID NO: 898193 - RNA, 21 nt, Human
gcaggagaaucacuugaaccu

SEQ ID NO: 898194 - RNA, 24 nt, Human
gccaacauggugaaaccccaucuc

SEQ ID NO: 898195 - RNA, 22 nt, Human
gccacugcacuccagccugggc

SEQ ID NO: 898196 - RNA, 24 nt, Human
gccacugcacuccagccugggcga

SEQ ID NO: 898197 - RNA, 18 nt, Human
gcgaaagccaugcagccc

SEQ ID NO: 898198 - RNA, 20 nt, Human
gcgcccuccacccucgcucc

SEQ ID NO: 898199 - RNA, 20 nt, Human
gcgggugccuguaaucccag

SEQ ID NO: 898200 - RNA, 18 nt, Human
gcuacauuuuucuucuca

SEQ ID NO: 898201 - RNA, 23 nt, Human
gcugcugauuccacaccccaggg

SEQ ID NO: 898202 - RNA, 18 nt, Human
ggaaggaaggagggggag

SEQ ID NO: 898203 - RNA, 18 nt, Human
ggaaggaaggagggggag

SEQ ID NO: 898204 - RNA, 18 nt, Human
ggagguugaagugagcca

SEQ ID NO: 898205 - RNA, 20 nt, Human
ggagguugaagugagccaag

SEQ ID NO: 898206 - RNA, 24 nt, Human
ggagguugaagugagccaagaugg

SEQ ID NO: 898207 - RNA, 18 nt, Human
ggcggagguugaagugag

SEQ ID NO: 898208 - RNA, 23 nt, Human
ggcggagguugaagugagccaag

SEQ ID NO: 898209 - RNA, 24 nt, Human
ggcggcucacgccuguaaucccag

SEQ ID NO: 898210 - RNA, 20 nt, Human
ggcucacgccuguaauccca

SEQ ID NO: 898211 - RNA, 23 nt, Human
gggaggcugaggcaggagaauca

SEQ ID NO: 898212 - RNA, 24 nt, Human
gggcacggcggcucacgccuguaa

SEQ ID NO: 898213 - RNA, 23 nt, Human
gggcccccggccaucccgugcuc

SEQ ID NO: 898214 - RNA, 24 nt, Human
gggcggagguugaagugagccaag

SEQ ID NO: 898215 - RNA, 24 nt, Human
ggggaggaggagaaggcugaguuu

SEQ ID NO: 898216 - RNA, 24 nt, Human
gggggccgggcacggcggcucacg

SEQ ID NO: 898217 - RNA, 24 nt, Human
gggugaucgaacgugggugugggc

SEQ ID NO: 898218 - RNA, 21 nt, Human
gguggaucaccugaggucagg

SEQ ID NO: 898219 - RNA, 23 nt, Human
gguggcgggugccuguaauccca

SEQ ID NO: 898220 - RNA, 24 nt, Human
gguggcgggugccuguaaucccag

SEQ ID NO: 898221 - RNA, 21 nt, Human
uaaaaauacaaaaauuagcca

SEQ ID NO: 898222 - RNA, 21 nt, Human
uaaauaacgucucaggaggcc

SEQ ID NO: 898223 - RNA, 19 nt, Human
uaccugggccgauacaagg

SEQ ID NO: 898224 - RNA, 26 nt, Human
ucaaaaaaaagaaaauaaaagggaau

SEQ ID NO: 898225 - RNA, 24 nt, Human
ucacccgcagcucuaagcggaggc

SEQ ID NO: 898226 - RNA, 26 nt, Human
ucacccggcgguuccccucuggccgu

SEQ ID NO: 898227 - RNA, 20 nt, Human
ucaccugaggucaggaguuc

SEQ ID NO: 898228 - RNA, 18 nt, Human
ucaggaggccggagccac

SEQ ID NO: 898229 - RNA, 20 nt, Human
uccaauucagcaaggaacaa

SEQ ID NO: 898230 - RNA, 19 nt, Human
uccacgcucacucugccca

SEQ ID NO: 898231 - RNA, 20 nt, Human
uccagaccuucugggucauc

SEQ ID NO: 898232 - RNA, 24 nt, Human
uccagccugggcgacagagcaaga

SEQ ID NO: 898233 - RNA, 19 nt, Human
ucccggggcacagcuccuu

SEQ ID NO: 898234 - RNA, 21 nt, Human
ucccggggcacagcuccuucc

SEQ ID NO: 898235 - RNA, 19 nt, Human
ucccugaaggguuucgguc

SEQ ID NO: 898236 - RNA, 25 nt, Human
ucgggaggcugaggcaggagaauca

SEQ ID NO: 898237 - RNA, 22 nt, Human
ucuccagagacugcccauuguu

SEQ ID NO: 898238 - RNA, 23 nt, Human
ucucuacuaaaaauacaaaaauu

SEQ ID NO: 898239 - RNA, 22 nt, Human
ucugaacuacaagucaacaauc

SEQ ID NO: 898240 - RNA, 19 nt, Human
ugaaaccccaucucuacua

SEQ ID NO: 898241 - RNA, 19 nt, Human
ugaaggguuucggucccca

SEQ ID NO: 898242 - RNA, 21 nt, Human
ugagaacacaagagugggcug

SEQ ID NO: 898243 - RNA, 24 nt, Human
ugaggcaggagaaucacuugaacc

SEQ ID NO: 898244 - RNA, 25 nt, Human
ugaggcaggagaaucacuugaaccu

SEQ ID NO: 898245 - RNA, 24 nt, Human
ugccuguaaucccagcuacucggg

SEQ ID NO: 898246 - RNA, 20 nt, Human
ugcuccuccuaggacucagg

SEQ ID NO: 898247 - RNA, 24 nt, Human
uggaucaccugaggucaggaguuc

SEQ ID NO: 898248 - RNA, 27 nt, Human
uggaucaccugaggucaggaguucgag

SEQ ID NO: 898249 - RNA, 22 nt, Human
uggcgggugccuguaaucccag

SEQ ID NO: 898250 - RNA, 24 nt, Human
uggcgggugccuguaaucccagcu

SEQ ID NO: 898251 - RNA, 19 nt, Human
uggcuggcagagugcugag

SEQ ID NO: 898252 - RNA, 18 nt, Human
ugggaagauguccaaaga

SEQ ID NO: 898253 - RNA, 23 nt, Human
ugggaggccgaggcggguggauc

SEQ ID NO: 898254 - RNA, 24 nt, Human
ugggaggccgaggcggguggauca

SEQ ID NO: 898255 - RNA, 24 nt, Human
uucucacccaaaaaaccucuacaa

SEQ ID NO: 898256 - RNA, 25 nt, Human
uugggaggccgaggcggguggauca

SEQ ID NO: 898257 - RNA, 19 nt, Human
uuggguggugggauucggg

SEQ ID NO: 898258 - RNA, 21 nt, Human
uuggguggugggauucggggc

SEQ ID NO: 898259 - RNA, 22 nt, Human
uuugcgaaagccaugcagcccc

SEQ ID NO: 898260 - RNA, 22 nt, Human
uuuugcauuuggagauccccug

SEQ ID NO: 898261 - RNA, 25 nt, Human
aaaaauacacuuuggggaaccagaa

SEQ ID NO: 898262 - RNA, 24 nt, Human
aaaaauucaauacuguauaugacc

SEQ ID NO: 898263 - RNA, 26 nt, Human
aaacaaagguaaaaauaaagggaccc

SEQ ID NO: 898264 - RNA, 21 nt, Human
aaaccagcuucauaccaaaaa

SEQ ID NO: 898265 - RNA, 24 nt, Human
aaagaaacauuaaugcucaauuca

SEQ ID NO: 898266 - RNA, 19 nt, Human
aaccagaaaaaauugcaca

SEQ ID NO: 898267 - RNA, 20 nt, Human
aaccugaaaagcucuuggug

SEQ ID NO: 898268 - RNA, 20 nt, Human
acaaaacaugggaccaauaa

SEQ ID NO: 898269 - RNA, 19 nt, Human
acaaagccaggaacggccu

SEQ ID NO: 898270 - RNA, 18 nt, Human
acauuugaaugcauagaa

SEQ ID NO: 898271 - RNA, 22 nt, Human
accacauuugaaugcauagaau

SEQ ID NO: 898272 - RNA, 24 nt, Human
agaaaaaauugcacaaagcuuagg

SEQ ID NO: 898273 - RNA, 27 nt, Human
agaaaaauacacuuuggggaaccagaa

SEQ ID NO: 898274 - RNA, 19 nt, Human
agagaaaaauacacuuugg

SEQ ID NO: 898275 - RNA, 25 nt, Human
agcaaugauaaaacuuuggaaaaaa

SEQ ID NO: 898276 - RNA, 25 nt, Human
aggacaggaauuuauacaaaagaaa

SEQ ID NO: 898277 - RNA, 21 nt, Human
auaaaaacaaucuucauuuau

SEQ ID NO: 898278 - RNA, 23 nt, Human
aucauaucuauaaaacaaaauua

SEQ ID NO: 898279 - RNA, 18 nt, Human
auuacaauugugacagaa

SEQ ID NO: 898280 - RNA, 21 nt, Human
caaaacaugggaccaauaaag

SEQ ID NO: 898281 - RNA, 22 nt, Human
caaaagaaacauuaaugcucaa

SEQ ID NO: 898282 - RNA, 23 nt, Human
caaauaaaaacaaucuucauuua

SEQ ID NO: 898283 - RNA, 19 nt, Human
cacaaaacaugggaccaau

SEQ ID NO: 898284 - RNA, 21 nt, Human
cacaacaaaauccuggcaaaa

SEQ ID NO: 898285 - RNA, 18 nt, Human
cacuuuguguuuaaccgu

SEQ ID NO: 898286 - RNA, 23 nt, Human
cagaaaaaauugcacaaagcuua

SEQ ID NO: 898287 - RNA, 24 nt, Human
cagcacaacaaaauccuggcaaaa

SEQ ID NO: 898288 - RNA, 18 nt, Human
ccaaaagaauugagcaaa

SEQ ID NO: 898289 - RNA, 22 nt, Human
ccacuucaugcugacuaaacag

SEQ ID NO: 898290 - RNA, 19 nt, Human
gaaaaccagcuucauacca

SEQ ID NO: 898291 - RNA, 25 nt, Human
gacuuagagaaaaauacacuuuggg

SEQ ID NO: 898292 - RNA, 21 nt, Human
gauuaugguuuucagucuguu

SEQ ID NO: 898293 - RNA, 25 nt, Human
uaaaaauaaauagcaaugauaaaac

SEQ ID NO: 898294 - RNA, 24 nt, Human
uacaaaagaaacauuaaugcucaa

SEQ ID NO: 898295 - RNA, 24 nt, Human
uacuuuaucaggcaaauaaaaaca

SEQ ID NO: 898296 - RNA, 19 nt, Human
ucaaaguaaacuugguggc

SEQ ID NO: 898297 - RNA, 21 nt, Human
ucaaugccaacaauucacagg

SEQ ID NO: 898298 - RNA, 23 nt, Human
ugaaagcuguacaaccaaaagaa

SEQ ID NO: 898299 - RNA, 18 nt, Human
ugaauguucaaaaacaaa

SEQ ID NO: 898300 - RNA, 19 nt, Human
ugagaaagacugucuuccu

SEQ ID NO: 898301 - RNA, 18 nt, Human
ugagcgagcuacaaagcc

SEQ ID NO: 898302 - RNA, 22 nt, Human
ugagcgagcuacaaagccagga

SEQ ID NO: 898303 - RNA, 23 nt, Human
ugagcgagcuacaaagccaggaa

SEQ ID NO: 898304 - RNA, 20 nt, Human
uguaguauuguuugagaaag

SEQ ID NO: 898305 - RNA, 23 nt, Human
uguucaaaaacaaagguaaaaau

SEQ ID NO: 898306 - RNA, 25 nt, Human
uguuuaaccgugauuggcaaucuca

SEQ ID NO: 898307 - RNA, 18 nt, Human
uguuugagaaagacuguc

SEQ ID NO: 898308 - RNA, 18 nt, Human
uucaauacuguauaugac

SEQ ID NO: 898309 - RNA, 27 nt, Human
uuuaaaaauccuauuuaaacuccuuua

SEQ ID NO: 898310 - RNA, 18 nt, Human
uuuuauggcauguaauac

SEQ ID NO: 898311 - RNA, 20 nt, Human
uuuugcuuaccuuauuuuca

SEQ ID NO: 898312 - RNA, 24 nt, Human
agugcaccacguugccgaccaacg

SEQ ID NO: 898313 - RNA, 18 nt, Human
caggggacugaugauccu

SEQ ID NO: 898314 - RNA, 21 nt, Human
ccuccguggcaugcaccacuu

SEQ ID NO: 898315 - RNA, 22 nt, Human
uacauauguaucccucauuucc

SEQ ID NO: 898316 - RNA, 18 nt, Human
ucccaauccagccccucc

SEQ ID NO: 898317 - RNA, 22 nt, Human
ugccgaccaacgucccuggagc

SEQ ID NO: 898318 - RNA, 21 nt, Human
uggagcaucuuugucuuccca

SEQ ID NO: 898319 - RNA, 21 nt, Human
aaacaaagaaagaaagccaga

SEQ ID NO: 898320 - RNA, 24 nt, Human
aacacucccccaggaucccugcca

SEQ ID NO: 898321 - RNA, 19 nt, Human
aagaaccaagggcuuagcu

SEQ ID NO: 898322 - RNA, 23 nt, Human
aagaauuaagguuugggaggaaa

SEQ ID NO: 898323 - RNA, 20 nt, Human
aagcagauggaaauuacagc

SEQ ID NO: 898324 - RNA, 20 nt, Human
aaggcaagcugucccccucc

SEQ ID NO: 898325 - RNA, 18 nt, Human
aaugcaaggucaccagca

SEQ ID NO: 898326 - RNA, 22 nt, Human
acagacccaggaugaggaccca

SEQ ID NO: 898327 - RNA, 23 nt, Human
acauggccaaggccacgcagcaa

SEQ ID NO: 898328 - RNA, 19 nt, Human
accccaggguugccacuuc

SEQ ID NO: 898329 - RNA, 20 nt, Human
accccuugcccuugugagga

SEQ ID NO: 898330 - RNA, 22 nt, Human
acuccagucugaugaggggagg

SEQ ID NO: 898331 - RNA, 21 nt, Human
acugaugaaaucucccccucc

SEQ ID NO: 898332 - RNA, 19 nt, Human
acuucccuccccucccccc

SEQ ID NO: 898333 - RNA, 22 nt, Human
acuucccuccccuccccccacc

SEQ ID NO: 898334 - RNA, 23 nt, Human
acuuggcaucuccucgucuccac

SEQ ID NO: 898335 - RNA, 19 nt, Human
acuuggcccuggccccacu

SEQ ID NO: 898336 - RNA, 19 nt, Human
agaaauguggguaggaccc

SEQ ID NO: 898337 - RNA, 20 nt, Human
agaaccccuggucugggcaa

SEQ ID NO: 898338 - RNA, 18 nt, Human
agacagacacacagaaca

SEQ ID NO: 898339 - RNA, 22 nt, Human
agacagacacacagaacagauc

SEQ ID NO: 898340 - RNA, 23 nt, Human
agacagauggucaaucugucaag

SEQ ID NO: 898341 - RNA, 24 nt, Human
agacuucccuccccuccccccacc

SEQ ID NO: 898342 - RNA, 24 nt, Human
agaguucagccaggggaggugggg

SEQ ID NO: 898343 - RNA, 22 nt, Human
agcacugugggaggcugaacgg

SEQ ID NO: 898344 - RNA, 21 nt, Human
agcagccaggcuacuggggaa

SEQ ID NO: 898345 - RNA, 21 nt, Human
agccugguaaacuugucccag

SEQ ID NO: 898346 - RNA, 18 nt, Human
agcggaggguggucugga

SEQ ID NO: 898347 - RNA, 18 nt, Human
agcugcaggaggggagug

SEQ ID NO: 898348 - RNA, 23 nt, Human
agcugccuccguccccauaaaca

SEQ ID NO: 898349 - RNA, 22 nt, Human
aggaaaucuguuagcgaagucc

SEQ ID NO: 898350 - RNA, 22 nt, Human
aggaacugggaggccuugaacu

SEQ ID NO: 898351 - RNA, 24 nt, Human
aggaaguuggauggaccccuugcc

SEQ ID NO: 898352 - RNA, 20 nt, Human
aggaccuggcccuuuggggu

SEQ ID NO: 898353 - RNA, 18 nt, Human
aggcacugugaccuuggu

SEQ ID NO: 898354 - RNA, 26 nt, Human
aggcauccuucacuugaauuaucagg

SEQ ID NO: 898355 - RNA, 20 nt, Human
aggcccccggcagcccccag

SEQ ID NO: 898356 - RNA, 22 nt, Human
aggcccuguguccacaccccac

SEQ ID NO: 898357 - RNA, 19 nt, Human
aggcggcagugugcaugag

SEQ ID NO: 898358 - RNA, 20 nt, Human
aggcggcagugugcaugagg

SEQ ID NO: 898359 - RNA, 22 nt, Human
agggcagaggcagccuccaggu

SEQ ID NO: 898360 - RNA, 21 nt, Human
auacgccaagguaagcaaagc

SEQ ID NO: 898361 - RNA, 18 nt, Human
auccgaggugucuccccc

SEQ ID NO: 898362 - RNA, 19 nt, Human
auugcuuccuccuccuucc

SEQ ID NO: 898363 - RNA, 20 nt, Human
caaacaucagcgccaagggc

SEQ ID NO: 898364 - RNA, 21 nt, Human
caagcaaauguccugcggcca

SEQ ID NO: 898365 - RNA, 22 nt, Human
caagcaaauguccugcggccau

SEQ ID NO: 898366 - RNA, 21 nt, Human
caagccuccaggguggggagc

SEQ ID NO: 898367 - RNA, 23 nt, Human
caaugggccucgccaccugaauc

SEQ ID NO: 898368 - RNA, 19 nt, Human
cacacagaacagauccagc

SEQ ID NO: 898369 - RNA, 24 nt, Human
cacagagagcccacuccuccucca

SEQ ID NO: 898370 - RNA, 24 nt, Human
caccccagcccccgguucuccugg

SEQ ID NO: 898371 - RNA, 19 nt, Human
caccccaucuugccucugc

SEQ ID NO: 898372 - RNA, 22 nt, Human
cacuccuccuccagugcuccug

SEQ ID NO: 898373 - RNA, 22 nt, Human
cacugauggaggagacaaggcc

SEQ ID NO: 898374 - RNA, 21 nt, Human
cagagucccaaagggcccaac

SEQ ID NO: 898375 - RNA, 18 nt, Human
cagauccagcacaugcuc

SEQ ID NO: 898376 - RNA, 19 nt, Human
cagcaaaaugacggggcua

SEQ ID NO: 898377 - RNA, 26 nt, Human
cagcaaaaugacggggcuaggacccu

SEQ ID NO: 898378 - RNA, 23 nt, Human
cagcacugugggaggcugaacgg

SEQ ID NO: 898379 - RNA, 24 nt, Human
cagcagcaucagcauagaccuggg

SEQ ID NO: 898380 - RNA, 21 nt, Human
cagcagucucaagccuccagg

SEQ ID NO: 898381 - RNA, 19 nt, Human
cagcaucagcauagaccug

SEQ ID NO: 898382 - RNA, 21 nt, Human
cagcuucagguugggaccagc

SEQ ID NO: 898383 - RNA, 20 nt, Human
caggugcaucucgagcaaug

SEQ ID NO: 898384 - RNA, 25 nt, Human
caggugcucugaugccuaggaaaag

SEQ ID NO: 898385 - RNA, 18 nt, Human
cagugugcaugaggguga

SEQ ID NO: 898386 - RNA, 20 nt, Human
caucaccccagcccccgguu

SEQ ID NO: 898387 - RNA, 24 nt, Human
ccaaggaacacccucauuggccca

SEQ ID NO: 898388 - RNA, 22 nt, Human
ccacagacagacacacagaaca

SEQ ID NO: 898389 - RNA, 20 nt, Human
ccacaggaggagaggagcag

SEQ ID NO: 898390 - RNA, 19 nt, Human
ccacuccaagacuuuggca

SEQ ID NO: 898391 - RNA, 20 nt, Human
ccacuugagacuuggcccug

SEQ ID NO: 898392 - RNA, 19 nt, Human
ccagacagcgccuuugagc

SEQ ID NO: 898393 - RNA, 19 nt, Human
ccagcccuggccuggccuc

SEQ ID NO: 898394 - RNA, 21 nt, Human
ccagccugauggggagaucca

SEQ ID NO: 898395 - RNA, 20 nt, Human
ccaggguggggagcggaggg

SEQ ID NO: 898396 - RNA, 28 nt, Human
cccacagacagacacacagaacagaucc

SEQ ID NO: 898397 - RNA, 19 nt, Human
cccacucccagcgaugaca

SEQ ID NO: 898398 - RNA, 21 nt, Human
cccagcaccuggucaccccuc

SEQ ID NO: 898399 - RNA, 19 nt, Human
cccagccugauggggagau

SEQ ID NO: 898400 - RNA, 19 nt, Human
ccccacccaggccugcuga

SEQ ID NO: 898401 - RNA, 21 nt, Human
ccccauaaacacucccccagg

SEQ ID NO: 898402 - RNA, 21 nt, Human
ccccgauucucugaaaggccc

SEQ ID NO: 898403 - RNA, 18 nt, Human
ccccgccccacccgugcc

SEQ ID NO: 898404 - RNA, 19 nt, Human
ccccgccccacccgugccc

SEQ ID NO: 898405 - RNA, 19 nt, Human
ccccgccccacccgugccc

SEQ ID NO: 898406 - RNA, 19 nt, Human
ccccucccauccauagcac

SEQ ID NO: 898407 - RNA, 22 nt, Human
ccccuucucuuuucgggguccc

SEQ ID NO: 898408 - RNA, 18 nt, Human
cccggccccgccccaccc

SEQ ID NO: 898409 - RNA, 24 nt, Human
cccucccugcccuucagcugccuc

SEQ ID NO: 898410 - RNA, 19 nt, Human
cccuccugcacauacucac

SEQ ID NO: 898411 - RNA, 21 nt, Human
cccuguguccacaccccacuc

SEQ ID NO: 898412 - RNA, 23 nt, Human
cccuguguccacaccccacucca

SEQ ID NO: 898413 - RNA, 23 nt, Human
ccgcuugcucaucccaggaaagg

SEQ ID NO: 898414 - RNA, 20 nt, Human
ccuaaguugacaggcugucc

SEQ ID NO: 898415 - RNA, 21 nt, Human
ccuccccuccccccacccaca

SEQ ID NO: 898416 - RNA, 19 nt, Human
ccuccuccuuccugcaguc

SEQ ID NO: 898417 - RNA, 19 nt, Human
ccucgcucuccccuucucu

SEQ ID NO: 898418 - RNA, 19 nt, Human
ccucucagccauccauccu

SEQ ID NO: 898419 - RNA, 20 nt, Human
ccuggcuggagacagauggu

SEQ ID NO: 898420 - RNA, 19 nt, Human
ccuuacccaucaccccagc

SEQ ID NO: 898421 - RNA, 18 nt, Human
ccuuccugcuccuucagg

SEQ ID NO: 898422 - RNA, 22 nt, Human
cgaugacacuggaucacuuccc

SEQ ID NO: 898423 - RNA, 25 nt, Human
cgccaagggcgguuggaucccugcc

SEQ ID NO: 898424 - RNA, 26 nt, Human
cgccgucccaugcuccaguccccggc

SEQ ID NO: 898425 - RNA, 21 nt, Human
cggaaucuuuggaaguaacau

SEQ ID NO: 898426 - RNA, 22 nt, Human
cguuagaaauucuaauucuuag

SEQ ID NO: 898427 - RNA, 23 nt, Human
cuccagcaccgagcccaggguac

SEQ ID NO: 898428 - RNA, 22 nt, Human
cuccagugccccggggcaagcu

SEQ ID NO: 898429 - RNA, 19 nt, Human
cucccugcccuucagcugc

SEQ ID NO: 898430 - RNA, 19 nt, Human
cucccuguugcuaucuuuc

SEQ ID NO: 898431 - RNA, 19 nt, Human
cuccuccagcaccgagccc

SEQ ID NO: 898432 - RNA, 18 nt, Human
cucucccucccugagcug

SEQ ID NO: 898433 - RNA, 18 nt, Human
cucucuguggcuccgugg

SEQ ID NO: 898434 - RNA, 18 nt, Human
cugaaaggccccuucccc

SEQ ID NO: 898435 - RNA, 24 nt, Human
cugccacaaugcaaggucaccagc

SEQ ID NO: 898436 - RNA, 20 nt, Human
cugcugagaguucagccagg

SEQ ID NO: 898437 - RNA, 19 nt, Human
cuggccccaccccacccug

SEQ ID NO: 898438 - RNA, 21 nt, Human
cuuaccuuacugccaggacuc

SEQ ID NO: 898439 - RNA, 19 nt, Human
cuucccuccccucccccca

SEQ ID NO: 898440 - RNA, 21 nt, Human
cuugaucuggggccacacuga

SEQ ID NO: 898441 - RNA, 19 nt, Human
cuugccucugccuggcggg

SEQ ID NO: 898442 - RNA, 22 nt, Human
cuuggcccuggccccacuuggc

SEQ ID NO: 898443 - RNA, 19 nt, Human
gaaccccuggucugggcaa

SEQ ID NO: 898444 - RNA, 21 nt, Human
gaagaugcuacgcccuccucc

SEQ ID NO: 898445 - RNA, 19 nt, Human
gaaggcacugugaccuugg

SEQ ID NO: 898446 - RNA, 19 nt, Human
gaccagcacuugggacccu

SEQ ID NO: 898447 - RNA, 23 nt, Human
gagagcagccaggcuacugggga

SEQ ID NO: 898448 - RNA, 21 nt, Human
gagcgcuggugggcaggggcg

SEQ ID NO: 898449 - RNA, 21 nt, Human
gaggcugaacggcacacggug

SEQ ID NO: 898450 - RNA, 19 nt, Human
gaggcugcacagagagccc

SEQ ID NO: 898451 - RNA, 23 nt, Human
gagugacugacgcaggcccugug

SEQ ID NO: 898452 - RNA, 24 nt, Human
gaugaggacccagcuauaucuucc

SEQ ID NO: 898453 - RNA, 25 nt, Human
gcaagagugggaggccagcgcacuu

SEQ ID NO: 898454 - RNA, 22 nt, Human
gcacacgguggguguccauugg

SEQ ID NO: 898455 - RNA, 24 nt, Human
gcacacgguggguguccauuggug

SEQ ID NO: 898456 - RNA, 18 nt, Human
gcagcagcaucagcauag

SEQ ID NO: 898457 - RNA, 19 nt, Human
gcauggcaagagugggagg

SEQ ID NO: 898458 - RNA, 23 nt, Human
gcccacuccuccuccagugcucc

SEQ ID NO: 898459 - RNA, 21 nt, Human
gcgcggagcgcuggugggcag

SEQ ID NO: 898460 - RNA, 19 nt, Human
gcggcgccauccagauccg

SEQ ID NO: 898461 - RNA, 24 nt, Human
gcugaagggcagaggcagccucca

SEQ ID NO: 898462 - RNA, 18 nt, Human
gcugagaguucagccagg

SEQ ID NO: 898463 - RNA, 21 nt, Human
gcugccuccguccccauaaac

SEQ ID NO: 898464 - RNA, 23 nt, Human
gcuggagacagauggucaaucug

SEQ ID NO: 898465 - RNA, 22 nt, Human
ggaaagggaaggggggaagggg

SEQ ID NO: 898466 - RNA, 23 nt, Human
ggaaggggggaagggggggaagg

SEQ ID NO: 898467 - RNA, 25 nt, Human
ggaccuggcccuuuggggucugggc

SEQ ID NO: 898468 - RNA, 20 nt, Human
ggagacaaggcccccggcag

SEQ ID NO: 898469 - RNA, 18 nt, Human
ggagcgcuggugggcagg

SEQ ID NO: 898470 - RNA, 21 nt, Human
ggaggagaggagcaggagggg

SEQ ID NO: 898471 - RNA, 21 nt, Human
ggcaggggcgaaagguggggg

SEQ ID NO: 898472 - RNA, 18 nt, Human
ggccccacccaggccugc

SEQ ID NO: 898473 - RNA, 18 nt, Human
ggccccaccccacccugc

SEQ ID NO: 898474 - RNA, 20 nt, Human
ggcuucucagccccacccaa

SEQ ID NO: 898475 - RNA, 23 nt, Human
gggcagaguggggacagguuucu

SEQ ID NO: 898476 - RNA, 23 nt, Human
gggcaggggcgaaaggugggggg

SEQ ID NO: 898477 - RNA, 19 nt, Human
ggguggccuggcuggagac

SEQ ID NO: 898478 - RNA, 22 nt, Human
ggugggcuguaaccagauggcu

SEQ ID NO: 898479 - RNA, 24 nt, Human
gguuggagugugaguaggaccugg

SEQ ID NO: 898480 - RNA, 21 nt, Human
gguuugggaggaaaucuguua

SEQ ID NO: 898481 - RNA, 23 nt, Human
gugaggcugcacagagagcccac

SEQ ID NO: 898482 - RNA, 18 nt, Human
gugcccccagugccugcu

SEQ ID NO: 898483 - RNA, 24 nt, Human
gugccuuggugauggugccagcug

SEQ ID NO: 898484 - RNA, 19 nt, Human
gugggggggcaucaccaug

SEQ ID NO: 898485 - RNA, 24 nt, Human
guguccacaccccacuccagccug

SEQ ID NO: 898486 - RNA, 21 nt, Human
guuaggguggaggaccacggg

SEQ ID NO: 898487 - RNA, 20 nt, Human
guuccuucacuggcaugugg

SEQ ID NO: 898488 - RNA, 23 nt, Human
uaaguugacaggcuguccacacu

SEQ ID NO: 898489 - RNA, 19 nt, Human
uaccuuacugccaggacuc

SEQ ID NO: 898490 - RNA, 23 nt, Human
uacgccaagguaagcaaagcccu

SEQ ID NO: 898491 - RNA, 21 nt, Human
uacgcccuccuccagcaccga

SEQ ID NO: 898492 - RNA, 18 nt, Human
uagaaugaccuccagaag

SEQ ID NO: 898493 - RNA, 18 nt, Human
uauuagcuucacagagug

SEQ ID NO: 898494 - RNA, 23 nt, Human
ucacagagucccaaagggcccaa

SEQ ID NO: 898495 - RNA, 19 nt, Human
ucagcacacgacaaggggc

SEQ ID NO: 898496 - RNA, 21 nt, Human
ucaggcgcgccgucccaugcu

SEQ ID NO: 898497 - RNA, 19 nt, Human
uccagauccgggagaaccc

SEQ ID NO: 898498 - RNA, 23 nt, Human
uccagugcuccugugaucuaguc

SEQ ID NO: 898499 - RNA, 21 nt, Human
ucccagaggagccagcagggg

SEQ ID NO: 898500 - RNA, 22 nt, Human
ucccagaggcuccacugaugga

SEQ ID NO: 898501 - RNA, 25 nt, Human
ucccagcgaugacacugggguaccc

SEQ ID NO: 898502 - RNA, 21 nt, Human
ucccaugacuugaucuggggc

SEQ ID NO: 898503 - RNA, 22 nt, Human
ucccaugacuugaucuggggcc

SEQ ID NO: 898504 - RNA, 24 nt, Human
uccccauaaacacucccccaggau

SEQ ID NO: 898505 - RNA, 23 nt, Human
ucccccaggaucccugccaccca

SEQ ID NO: 898506 - RNA, 28 nt, Human
uccccccacccacagacagacacacaga

SEQ ID NO: 898507 - RNA, 23 nt, Human
ucccuugggaccaccugaccagg

SEQ ID NO: 898508 - RNA, 19 nt, Human
uccgaggugucucccccuc

SEQ ID NO: 898509 - RNA, 19 nt, Human
uccucaggauggcaagaac

SEQ ID NO: 898510 - RNA, 20 nt, Human
uccucuccucaagagggccc

SEQ ID NO: 898511 - RNA, 25 nt, Human
uccugcggagccauagccagagaug

SEQ ID NO: 898512 - RNA, 20 nt, Human
uccuuacccaucaccccagc

SEQ ID NO: 898513 - RNA, 25 nt, Human
uccuuccccuuccugcuccuucagg

SEQ ID NO: 898514 - RNA, 21 nt, Human
ucggggucccaggccuccuuc

SEQ ID NO: 898515 - RNA, 25 nt, Human
ucuccccuucucuuuucgggguccc

SEQ ID NO: 898516 - RNA, 21 nt, Human
ucucucuguggcuccguggca

SEQ ID NO: 898517 - RNA, 19 nt, Human
ucugaaaggccccuucccc

SEQ ID NO: 898518 - RNA, 18 nt, Human
ucugacaggugaggcuga

SEQ ID NO: 898519 - RNA, 25 nt, Human
ucuggcaagaacaguagggaccaga

SEQ ID NO: 898520 - RNA, 23 nt, Human
ucuggccccaccccacccugcug

SEQ ID NO: 898521 - RNA, 20 nt, Human
ugaacuucaagguccuuuga

SEQ ID NO: 898522 - RNA, 18 nt, Human
ugaagggcagaggcagcc

SEQ ID NO: 898523 - RNA, 22 nt, Human
ugaagggcagaggcagccucca

SEQ ID NO: 898524 - RNA, 21 nt, Human
ugaauccaucccuggugcagg

SEQ ID NO: 898525 - RNA, 19 nt, Human
ugacaggcuguccacacug

SEQ ID NO: 898526 - RNA, 18 nt, Human
ugaccagguggccuggga

SEQ ID NO: 898527 - RNA, 22 nt, Human
ugagcaaagcugaagggcagag

SEQ ID NO: 898528 - RNA, 18 nt, Human
ugaggagagcagccaggc

SEQ ID NO: 898529 - RNA, 24 nt, Human
ugaucuagucacuccacagcuuca

SEQ ID NO: 898530 - RNA, 19 nt, Human
ugaugagggaggcauggcc

SEQ ID NO: 898531 - RNA, 18 nt, Human
ugcaggaggggagugacu

SEQ ID NO: 898532 - RNA, 19 nt, Human
ugcaggaggggagugacug

SEQ ID NO: 898533 - RNA, 21 nt, Human
ugcaugagggugaaaugaagu

SEQ ID NO: 898534 - RNA, 20 nt, Human
ugccaaggauggggaacagg

SEQ ID NO: 898535 - RNA, 19 nt, Human
ugccaggaaggccgggccc

SEQ ID NO: 898536 - RNA, 21 nt, Human
ugcccacaggccucggggacc

SEQ ID NO: 898537 - RNA, 20 nt, Human
ugcgcggagcgcuggugggc

SEQ ID NO: 898538 - RNA, 23 nt, Human
ugcugagaguucagccaggggag

SEQ ID NO: 898539 - RNA, 25 nt, Human
uggaaagggguggccuggcuggaga

SEQ ID NO: 898540 - RNA, 22 nt, Human
uggaaguaacauuucugucucc

SEQ ID NO: 898541 - RNA, 20 nt, Human
uggacaacucugacuccagu

SEQ ID NO: 898542 - RNA, 22 nt, Human
uggagagggaagcccugagccc

SEQ ID NO: 898543 - RNA, 24 nt, Human
uggauggaccccuugcccuugugg

SEQ ID NO: 898544 - RNA, 23 nt, Human
uggcaagaacaguagggaccaga

SEQ ID NO: 898545 - RNA, 19 nt, Human
uggcaagagugggaggcca

SEQ ID NO: 898546 - RNA, 19 nt, Human
uggcagaagagggaauuuu

SEQ ID NO: 898547 - RNA, 21 nt, Human
uggcagcuggccauucugagg

SEQ ID NO: 898548 - RNA, 21 nt, Human
uggccuggcuggagacagaug

SEQ ID NO: 898549 - RNA, 23 nt, Human
uggccuuagugugggaggaccac

SEQ ID NO: 898550 - RNA, 25 nt, Human
uggcuucucagccccacccaacucu

SEQ ID NO: 898551 - RNA, 19 nt, Human
ugggaccaccugaccaggu

SEQ ID NO: 898552 - RNA, 23 nt, Human
ugggacccuuucucugccacuug

SEQ ID NO: 898553 - RNA, 19 nt, Human
ugggaggccagcgcacuuc

SEQ ID NO: 898554 - RNA, 25 nt, Human
ugggcaggggcgaaagguggggggu

SEQ ID NO: 898555 - RNA, 18 nt, Human
ugggcccuggagcagcag

SEQ ID NO: 898556 - RNA, 21 nt, Human
ugggcugcuccagugccagca

SEQ ID NO: 898557 - RNA, 20 nt, Human
uggggagggcgcccagggcc

SEQ ID NO: 898558 - RNA, 24 nt, Human
uggggcagaggugacgucuucuua

SEQ ID NO: 898559 - RNA, 18 nt, Human
uggggccacacugaucgg

SEQ ID NO: 898560 - RNA, 21 nt, Human
ugggggggcaucaccaugggg

SEQ ID NO: 898561 - RNA, 18 nt, Human
uggguaggacccagaaau

SEQ ID NO: 898562 - RNA, 26 nt, Human
uggugggcaggggcgaaagguggggg

SEQ ID NO: 898563 - RNA, 21 nt, Human
uggugggggggcaucaccaug

SEQ ID NO: 898564 - RNA, 23 nt, Human
ugugaguaggaccuggcccuuug

SEQ ID NO: 898565 - RNA, 18 nt, Human
ugugccuuggugauggug

SEQ ID NO: 898566 - RNA, 24 nt, Human
ugugggaggcugaacggcacacgg

SEQ ID NO: 898567 - RNA, 20 nt, Human
ugugggggaaacaagcuggg

SEQ ID NO: 898568 - RNA, 26 nt, Human
ugugggggaaacaagcugggucauuu

SEQ ID NO: 898569 - RNA, 19 nt, Human
uguugagggaccccucucc

SEQ ID NO: 898570 - RNA, 20 nt, Human
uguugagggaccccucuccg

SEQ ID NO: 898571 - RNA, 22 nt, Human
uuacagacccaggaugaggacc

SEQ ID NO: 898572 - RNA, 22 nt, Human
uuagaaauguggguaggaccca

SEQ ID NO: 898573 - RNA, 23 nt, Human
uuaggccccacccaggccugcug

SEQ ID NO: 898574 - RNA, 18 nt, Human
uucacagagugcuaggag

SEQ ID NO: 898575 - RNA, 22 nt, Human
uucaugucauagaggaagaaac

SEQ ID NO: 898576 - RNA, 24 nt, Human
uucucuuuucggggucccaggccu

SEQ ID NO: 898577 - RNA, 21 nt, Human
uucuugaagaugcuacgcccu

SEQ ID NO: 898578 - RNA, 23 nt, Human
uugaagaugcuacgcccuccucc

SEQ ID NO: 898579 - RNA, 20 nt, Human
uugagggaccccucuccggg

SEQ ID NO: 898580 - RNA, 21 nt, Human
uuucacaagacuucccucccc

SEQ ID NO: 898581 - RNA, 20 nt, Human
aaagaaguuucuuacugcuu

SEQ ID NO: 898582 - RNA, 21 nt, Human
accuaggcuggagugcagagc

SEQ ID NO: 898583 - RNA, 25 nt, Human
acucugucaccuaggcuggagugca

SEQ ID NO: 898584 - RNA, 23 nt, Human
cacucugucaccuaggcuggagu

SEQ ID NO: 898585 - RNA, 24 nt, Human
cacucugucaccuaggcuggagug

SEQ ID NO: 898586 - RNA, 20 nt, Human
ccagaguggacgauguagga

SEQ ID NO: 898587 - RNA, 19 nt, Human
ccuaggcuggagugcagag

SEQ ID NO: 898588 - RNA, 22 nt, Human
cgagguggagucucacucuguc

SEQ ID NO: 898589 - RNA, 24 nt, Human
cucacucugucaccuaggcuggag

SEQ ID NO: 898590 - RNA, 24 nt, Human
gcuggagugcagagcgagauucug

SEQ ID NO: 898591 - RNA, 26 nt, Human
gggaggcagcuuuauggaucuuucua

SEQ ID NO: 898592 - RNA, 18 nt, Human
ucaccuaggcuggagugc

SEQ ID NO: 898593 - RNA, 24 nt, Human
ucacucugucaccuaggcuggagu

SEQ ID NO: 898594 - RNA, 27 nt, Human
ucaugaauuuuucuucuaaaauaagua

SEQ ID NO: 898595 - RNA, 22 nt, Human
uccgagguggagucucacucug

SEQ ID NO: 898596 - RNA, 22 nt, Human
uccggacuuguccccgggaggc

SEQ ID NO: 898597 - RNA, 23 nt, Human
ucucacucugucaccuaggcugg

SEQ ID NO: 898598 - RNA, 24 nt, Human
ucucacucugucaccuaggcugga

SEQ ID NO: 898599 - RNA, 24 nt, Human
ucugucaccuaggcuggagugcag

SEQ ID NO: 898600 - RNA, 22 nt, Human
ugguaagauuuucaacauaagg

SEQ ID NO: 898601 - RNA, 20 nt, Human
ugucaccuaggcuggagugc

SEQ ID NO: 898602 - RNA, 21 nt, Human
uguccccgggaggcagcuuua

SEQ ID NO: 898603 - RNA, 22 nt, Human
uugacacagacuauugguaaga

SEQ ID NO: 898604 - RNA, 25 nt, Human
aaaaaaaaaaaacaaaacagauugu

SEQ ID NO: 898605 - RNA, 26 nt, Human
aaaauaccacacugcauauuugaaac

SEQ ID NO: 898606 - RNA, 20 nt, Human
aaacaaaugugacguugccu

SEQ ID NO: 898607 - RNA, 21 nt, Human
aaacaaaugugacguugccua

SEQ ID NO: 898608 - RNA, 24 nt, Human
aaagaagcacaauagaagaaauag

SEQ ID NO: 898609 - RNA, 18 nt, Human
aaaguaaacaaaauacca

SEQ ID NO: 898610 - RNA, 24 nt, Human
aaucccuggucccuucuccacccc

SEQ ID NO: 898611 - RNA, 22 nt, Human
acacugcauauuugaaacaaac

SEQ ID NO: 898612 - RNA, 22 nt, Human
accacacugcauauuugaaaca

SEQ ID NO: 898613 - RNA, 20 nt, Human
accugguccucgucgcccgc

SEQ ID NO: 898614 - RNA, 19 nt, Human
agaagaaauagacgcaaaa

SEQ ID NO: 898615 - RNA, 20 nt, Human
agcaucugugacagcccaca

SEQ ID NO: 898616 - RNA, 21 nt, Human
aggaagcagucuuuauuugau

SEQ ID NO: 898617 - RNA, 19 nt, Human
aggaggccguaaccugguc

SEQ ID NO: 898618 - RNA, 19 nt, Human
aucacacuuuacaaaggcg

SEQ ID NO: 898619 - RNA, 22 nt, Human
aucacacuuuacaaaggcggcu

SEQ ID NO: 898620 - RNA, 20 nt, Human
auuauuuucccuuuugaaug

SEQ ID NO: 898621 - RNA, 23 nt, Human
auuccuggggagaaagucaagga

SEQ ID NO: 898622 - RNA, 22 nt, Human
caaaaaaaaaaaacaaaacaga

SEQ ID NO: 898623 - RNA, 24 nt, Human
caaaagagaguuaacuacuaaagg

SEQ ID NO: 898624 - RNA, 22 nt, Human
caaagaagcacaauagaagaaa

SEQ ID NO: 898625 - RNA, 24 nt, Human
caaagaagcacaauagaagaaaua

SEQ ID NO: 898626 - RNA, 19 nt, Human
caagaacaagccucagguu

SEQ ID NO: 898627 - RNA, 21 nt, Human
caagaacaagccucagguucc

SEQ ID NO: 898628 - RNA, 19 nt, Human
caauagaagaaauagacgc

SEQ ID NO: 898629 - RNA, 20 nt, Human
cacagcaucugugacagccc

SEQ ID NO: 898630 - RNA, 20 nt, Human
cacccugacucugcaauaac

SEQ ID NO: 898631 - RNA, 22 nt, Human
cacccugacucugcaauaacuu

SEQ ID NO: 898632 - RNA, 21 nt, Human
cagaaauuaccuaugagucac

SEQ ID NO: 898633 - RNA, 20 nt, Human
cagcacagauuacccauuuc

SEQ ID NO: 898634 - RNA, 23 nt, Human
cagggagcagccuggaugggccc

SEQ ID NO: 898635 - RNA, 22 nt, Human
cagugcccuuggcuguauuccc

SEQ ID NO: 898636 - RNA, 21 nt, Human
cauagaucacacuuuacaaag

SEQ ID NO: 898637 - RNA, 20 nt, Human
ccccgcgccccgcggcguuc

SEQ ID NO: 898638 - RNA, 24 nt, Human
cccgccccaagucucggccccggc

SEQ ID NO: 898639 - RNA, 21 nt, Human
cccuuggcuguauuccccagg

SEQ ID NO: 898640 - RNA, 24 nt, Human
ccgcgcccaccccgcgccccgcgg

SEQ ID NO: 898641 - RNA, 22 nt, Human
ccgcggcguucccgcccgcgcu

SEQ ID NO: 898642 - RNA, 18 nt, Human
ccucacugcagccauucc

SEQ ID NO: 898643 - RNA, 23 nt, Human
ccucacugcagccauuccaagaa

SEQ ID NO: 898644 - RNA, 19 nt, Human
ccuuagcccuagggcccug

SEQ ID NO: 898645 - RNA, 21 nt, Human
cggccccggcggggucucccg

SEQ ID NO: 898646 - RNA, 20 nt, Human
cggccggcucagggaccagg

SEQ ID NO: 898647 - RNA, 22 nt, Human
cggggucgccggccggcucagg

SEQ ID NO: 898648 - RNA, 20 nt, Human
cggggucucccgcgcccgcc

SEQ ID NO: 898649 - RNA, 20 nt, Human
gaaaaucugguuaaaaugua

SEQ ID NO: 898650 - RNA, 18 nt, Human
gaagagccauggagcucc

SEQ ID NO: 898651 - RNA, 19 nt, Human
gagcaagcgagcguagggc

SEQ ID NO: 898652 - RNA, 21 nt, Human
gcccacuucaagaacaagccu

SEQ ID NO: 898653 - RNA, 20 nt, Human
ggaaauccuucacucaugca

SEQ ID NO: 898654 - RNA, 20 nt, Human
ggacaggauuagcugccuuu

SEQ ID NO: 898655 - RNA, 23 nt, Human
ggagcagccuggaugggcccagg

SEQ ID NO: 898656 - RNA, 20 nt, Human
ggcccugguugacacagcau

SEQ ID NO: 898657 - RNA, 18 nt, Human
gggcccugguugacacag

SEQ ID NO: 898658 - RNA, 22 nt, Human
ggucccuucuccaccccaggga

SEQ ID NO: 898659 - RNA, 22 nt, Human
guaaacaaaauaccacacugca

SEQ ID NO: 898660 - RNA, 20 nt, Human
guagaacacaccugguuugg

SEQ ID NO: 898661 - RNA, 21 nt, Human
gugaaauggaauuaaaagcac

SEQ ID NO: 898662 - RNA, 25 nt, Human
gugaacacauauaugaaaaacacug

SEQ ID NO: 898663 - RNA, 18 nt, Human
gugucuacguggaaaucc

SEQ ID NO: 898664 - RNA, 18 nt, Human
gugucuacguggaaaucc

SEQ ID NO: 898665 - RNA, 23 nt, Human
uaaaaaauagauuuauccagaaa

SEQ ID NO: 898666 - RNA, 20 nt, Human
uaaaagcacccugacucugc

SEQ ID NO: 898667 - RNA, 21 nt, Human
uaaggagaucagcacagauua

SEQ ID NO: 898668 - RNA, 24 nt, Human
uaccacacugcauauuugaaacaa

SEQ ID NO: 898669 - RNA, 19 nt, Human
uauacuggccucaugugca

SEQ ID NO: 898670 - RNA, 20 nt, Human
uauccaaaaaaggccugaga

SEQ ID NO: 898671 - RNA, 21 nt, Human
uaucugggaacguuucacugg

SEQ ID NO: 898672 - RNA, 22 nt, Human
ucacuggcaacacuaacuguau

SEQ ID NO: 898673 - RNA, 20 nt, Human
ucagauagauggaggaagaa

SEQ ID NO: 898674 - RNA, 24 nt, Human
ucagcacagauuacccauuuccuc

SEQ ID NO: 898675 - RNA, 19 nt, Human
uccaagaaguaucuuugcu

SEQ ID NO: 898676 - RNA, 24 nt, Human
uccccaaagaagcacaauagaaga

SEQ ID NO: 898677 - RNA, 18 nt, Human
ucccugguucugcaccuc

SEQ ID NO: 898678 - RNA, 23 nt, Human
ucgucgcccgccccaagucucgg

SEQ ID NO: 898679 - RNA, 23 nt, Human
ucuaaaaagcaacguggaaucau

SEQ ID NO: 898680 - RNA, 19 nt, Human
ucuccuccccuuagccugg

SEQ ID NO: 898681 - RNA, 20 nt, Human
ucucuuccuauccccaaaga

SEQ ID NO: 898682 - RNA, 26 nt, Human
ugaaaaacacugcaacagguugacac

SEQ ID NO: 898683 - RNA, 20 nt, Human
ugaaacaaacaaaugugacg

SEQ ID NO: 898684 - RNA, 22 nt, Human
ugacaaaaaaaaaaaacaaaac

SEQ ID NO: 898685 - RNA, 25 nt, Human
ugacaaaaaaaaaaaacaaaacaga

SEQ ID NO: 898686 - RNA, 21 nt, Human
ugacaauguccuagaaacccu

SEQ ID NO: 898687 - RNA, 22 nt, Human
ugaccugcaagccaauacagcu

SEQ ID NO: 898688 - RNA, 19 nt, Human
ugagucacuuuugugagcc

SEQ ID NO: 898689 - RNA, 18 nt, Human
ugcaaauaguuaacaaua

SEQ ID NO: 898690 - RNA, 21 nt, Human
ugcaugcacgcaaggugcagg

SEQ ID NO: 898691 - RNA, 19 nt, Human
ugccugcugcaugcacgca

SEQ ID NO: 898692 - RNA, 22 nt, Human
ugcugcaugcacgcaaggugca

SEQ ID NO: 898693 - RNA, 18 nt, Human
uggaaauccuucacucau

SEQ ID NO: 898694 - RNA, 19 nt, Human
uggaaggaauggaaucaga

SEQ ID NO: 898695 - RNA, 21 nt, Human
uggagaauccugcucucaaaa

SEQ ID NO: 898696 - RNA, 24 nt, Human
ugggaguuguuuuuauaucuuuua

SEQ ID NO: 898697 - RNA, 20 nt, Human
ugggcccaggagucccuggg

SEQ ID NO: 898698 - RNA, 20 nt, Human
uggggagaaagucaaggacc

SEQ ID NO: 898699 - RNA, 26 nt, Human
uggucagacaaugacaaaaaaaaaaa

SEQ ID NO: 898700 - RNA, 21 nt, Human
ugucuaaagcugguaguaaaa

SEQ ID NO: 898701 - RNA, 19 nt, Human
ugugcagaaggaauuuugg

SEQ ID NO: 898702 - RNA, 20 nt, Human
ugugcagaaggaauuuuggu

SEQ ID NO: 898703 - RNA, 22 nt, Human
ugugcagaaggaauuuugguca

SEQ ID NO: 898704 - RNA, 21 nt, Human
ugugcagaaggaauuuugguu

SEQ ID NO: 898705 - RNA, 19 nt, Human
ugugcagaggcucacaggc

SEQ ID NO: 898706 - RNA, 20 nt, Human
uuaccagguuauuucagugc

SEQ ID NO: 898707 - RNA, 25 nt, Human
uucacuggcaacacuaacuguauga

SEQ ID NO: 898708 - RNA, 19 nt, Human
uucuauauguaucuccucu

SEQ ID NO: 898709 - RNA, 21 nt, Human
uucuuuguaucugggaacguu

SEQ ID NO: 898710 - RNA, 24 nt, Human
uuggucagacaaugacaaaaaaaa

SEQ ID NO: 898711 - RNA, 24 nt, Human
uuugacaaaagagaguuaacuacu

SEQ ID NO: 898712 - RNA, 23 nt, Human
uuuuaagugaauuccuggggaga

SEQ ID NO: 898713 - RNA, 24 nt, Human
aaaaacaaaacaagccaaagaaga

SEQ ID NO: 898714 - RNA, 22 nt, Human
aaacaaaacaagccaaagaaga

SEQ ID NO: 898715 - RNA, 21 nt, Human
aaacaaauaugguuauaacac

SEQ ID NO: 898716 - RNA, 23 nt, Human
aaagaagaaagacucuaagagaa

SEQ ID NO: 898717 - RNA, 19 nt, Human
aaagaggcaaaaaucccug

SEQ ID NO: 898718 - RNA, 25 nt, Human
aaagaggcaaaaaucccugcccuuu

SEQ ID NO: 898719 - RNA, 23 nt, Human
aaauaugguuauaacacacauac

SEQ ID NO: 898720 - RNA, 21 nt, Human
aacaagccaaagaagaaagac

SEQ ID NO: 898721 - RNA, 25 nt, Human
aacagaagacaaauugaccacagaa

SEQ ID NO: 898722 - RNA, 22 nt, Human
aagaagaaagacucuaagagaa

SEQ ID NO: 898723 - RNA, 22 nt, Human
aauacagacuuggugacugccu

SEQ ID NO: 898724 - RNA, 18 nt, Human
aaucacaacagaagacaa

SEQ ID NO: 898725 - RNA, 21 nt, Human
acagaagacaaauugaccaca

SEQ ID NO: 898726 - RNA, 22 nt, Human
agaaaaacaaaacaagccaaag

SEQ ID NO: 898727 - RNA, 24 nt, Human
agaaaaacaaaacaagccaaagaa

SEQ ID NO: 898728 - RNA, 21 nt, Human
agaagacaaauugaccacaga

SEQ ID NO: 898729 - RNA, 23 nt, Human
agacaaauugaccacagaauaag

SEQ ID NO: 898730 - RNA, 22 nt, Human
aggaacaacagaagaauucuaa

SEQ ID NO: 898731 - RNA, 21 nt, Human
aggauagaaaaacaaaacaag

SEQ ID NO: 898732 - RNA, 20 nt, Human
auaauaauaaaagcaguacc

SEQ ID NO: 898733 - RNA, 19 nt, Human
augaaacagagaaauggga

SEQ ID NO: 898734 - RNA, 23 nt, Human
augaaacagagaaaugggaggau

SEQ ID NO: 898735 - RNA, 22 nt, Human
auucaucuagcuccuggaaaac

SEQ ID NO: 898736 - RNA, 20 nt, Human
auuugcagacuuggaggcac

SEQ ID NO: 898737 - RNA, 21 nt, Human
caauccaguauaagaaguaaa

SEQ ID NO: 898738 - RNA, 26 nt, Human
caaugaacaucuucacucaauuaaac

SEQ ID NO: 898739 - RNA, 20 nt, Human
cacaacagaagacaaauuga

SEQ ID NO: 898740 - RNA, 26 nt, Human
caccaggauagaaaaacaaaacaagc

SEQ ID NO: 898741 - RNA, 19 nt, Human
cagaagacaaauugaccac

SEQ ID NO: 898742 - RNA, 19 nt, Human
cauucaaugaacaucuuca

SEQ ID NO: 898743 - RNA, 20 nt, Human
cauuccuagacaaacaacaa

SEQ ID NO: 898744 - RNA, 21 nt, Human
ccaccaggauagaaaaacaaa

SEQ ID NO: 898745 - RNA, 24 nt, Human
ccuacaauuuaaacauuuuuccac

SEQ ID NO: 898746 - RNA, 19 nt, Human
ccuagacaaacaacaacua

SEQ ID NO: 898747 - RNA, 20 nt, Human
gaaacagagaaaugggagga

SEQ ID NO: 898748 - RNA, 24 nt, Human
gauaagaaggacuuuuagaggaaa

SEQ ID NO: 898749 - RNA, 19 nt, Human
gcaugguaaaauuagcuua

SEQ ID NO: 898750 - RNA, 22 nt, Human
uacauuccuagacaaacaacaa

SEQ ID NO: 898751 - RNA, 22 nt, Human
uagaaaaacaaaacaagccaaa

SEQ ID NO: 898752 - RNA, 19 nt, Human
uauaacacacauacaucua

SEQ ID NO: 898753 - RNA, 22 nt, Human
uauguaaaaaucacaacagaag

SEQ ID NO: 898754 - RNA, 20 nt, Human
ucaaaaagauauuacccaaa

SEQ ID NO: 898755 - RNA, 21 nt, Human
uccaccaggauagaaaaacaa

SEQ ID NO: 898756 - RNA, 22 nt, Human
uccaccaggauagaaaaacaaa

SEQ ID NO: 898757 - RNA, 26 nt, Human
uccaccaggauagaaaaacaaaacaa

SEQ ID NO: 898758 - RNA, 24 nt, Human
ucgaaugugugugauccauagaag

SEQ ID NO: 898759 - RNA, 21 nt, Human
ucuuacauuccuagacaaaca

SEQ ID NO: 898760 - RNA, 29 nt, Human
ucuuacauuccuagacaaacaacaacuag

SEQ ID NO: 898761 - RNA, 22 nt, Human
ugaaacagagaaaugggaggau

SEQ ID NO: 898762 - RNA, 23 nt, Human
ugaaacagagaaaugggaggaug

SEQ ID NO: 898763 - RNA, 22 nt, Human
ugaacaaaagaggcaaaaaucc

SEQ ID NO: 898764 - RNA, 19 nt, Human
ugaacaucuucacucaauu

SEQ ID NO: 898765 - RNA, 21 nt, Human
ugaccgagaagacagcugaau

SEQ ID NO: 898766 - RNA, 22 nt, Human
ugggaggauggauuuacgaagg

SEQ ID NO: 898767 - RNA, 18 nt, Human
ugggcaaaauggguuguu

SEQ ID NO: 898768 - RNA, 20 nt, Human
uguaaagaaaaggaggagau

SEQ ID NO: 898769 - RNA, 22 nt, Human
uucccuccaaaagaaauaauuu

SEQ ID NO: 898770 - RNA, 18 nt, Human
uuccuagacaaacaacaa

SEQ ID NO: 898771 - RNA, 18 nt, Human
uugaccacagaauaagua

SEQ ID NO: 898772 - RNA, 23 nt, Human
uuuaaaauauuguccuacaauuu

SEQ ID NO: 898773 - RNA, 27 nt, Human
uuuuuuuuuuuuauauauaacgucuca

SEQ ID NO: 898774 - RNA, 18 nt, Human
aaccagauguuagacugc

SEQ ID NO: 898775 - RNA, 20 nt, Human
aagagauggcaugugaccau

SEQ ID NO: 898776 - RNA, 24 nt, Human
accauguacuucugcuagaaggau

SEQ ID NO: 898777 - RNA, 18 nt, Human
agacaaaaaauugaaagg

SEQ ID NO: 898778 - RNA, 20 nt, Human
agacaaaaaauugaaagggu

SEQ ID NO: 898779 - RNA, 21 nt, Human
caaaucggacacuuauaugcc

SEQ ID NO: 898780 - RNA, 24 nt, Human
cacacaaaaauccacucacugagg

SEQ ID NO: 898781 - RNA, 25 nt, Human
cauggaacaaauccacaacaauuga

SEQ ID NO: 898782 - RNA, 22 nt, Human
ccacaugucuugcauuuuacuu

SEQ ID NO: 898783 - RNA, 18 nt, Human
ccauugguaguaaggaug

SEQ ID NO: 898784 - RNA, 19 nt, Human
cccauugguaguaaggaug

SEQ ID NO: 898785 - RNA, 25 nt, Human
cuagaagcugaaauuggagacgcag

SEQ ID NO: 898786 - RNA, 24 nt, Human
cucaggaagagaagauagcgggga

SEQ ID NO: 898787 - RNA, 26 nt, Human
cucaggaagagaagauagcggggaaa

SEQ ID NO: 898788 - RNA, 27 nt, Human
cugcaaugauguaaccuguaaaggggc

SEQ ID NO: 898789 - RNA, 26 nt, Human
gaagauagcggggaaauaauuccagc

SEQ ID NO: 898790 - RNA, 22 nt, Human
gaaguucuucucaguuccacau

SEQ ID NO: 898791 - RNA, 24 nt, Human
uaaguccacagagaucacucagcu

SEQ ID NO: 898792 - RNA, 19 nt, Human
uagaagcugaaauuggaga

SEQ ID NO: 898793 - RNA, 22 nt, Human
ucaaaugcacacaaaaauccac

SEQ ID NO: 898794 - RNA, 20 nt, Human
ucugucuugcuguucuugau

SEQ ID NO: 898795 - RNA, 21 nt, Human
uggcaaagacaaaaaauugaa

SEQ ID NO: 898796 - RNA, 22 nt, Human
ugguuguccugaggaaaguucu

SEQ ID NO: 898797 - RNA, 22 nt, Human
uucaaccagauguuagacugcu

SEQ ID NO: 898798 - RNA, 20 nt, Human
uuggacuagaagcugaaauu

SEQ ID NO: 898799 - RNA, 22 nt, Human
aaaccugcgacaggauucccga

SEQ ID NO: 898800 - RNA, 21 nt, Human
aaagaaaaagccggcuuuuca

SEQ ID NO: 898801 - RNA, 25 nt, Human
aaugagccugggggaagacaucacc

SEQ ID NO: 898802 - RNA, 19 nt, Human
aaugcaaugugauccuucg

SEQ ID NO: 898803 - RNA, 21 nt, Human
accacgaggauaugaaaggag

SEQ ID NO: 898804 - RNA, 22 nt, Human
accccgcaaccauuuuuggcua

SEQ ID NO: 898805 - RNA, 20 nt, Human
acucaucuuucuucccagcc

SEQ ID NO: 898806 - RNA, 21 nt, Human
agagcuuuauuacacuggugc

SEQ ID NO: 898807 - RNA, 19 nt, Human
agcuaguccucggaucagc

SEQ ID NO: 898808 - RNA, 21 nt, Human
aggacaccacugcccccagga

SEQ ID NO: 898809 - RNA, 19 nt, Human
agggaggcgaagaaguggg

SEQ ID NO: 898810 - RNA, 21 nt, Human
aguggaaaggauuuggagauc

SEQ ID NO: 898811 - RNA, 19 nt, Human
aguuuugcucuucauccau

SEQ ID NO: 898812 - RNA, 20 nt, Human
auucuguauuacuuauagcu

SEQ ID NO: 898813 - RNA, 20 nt, Human
auuuaaguucagaaggcauu

SEQ ID NO: 898814 - RNA, 22 nt, Human
caacuaagaagcuaccuggcgg

SEQ ID NO: 898815 - RNA, 18 nt, Human
caaucguucagucaugga

SEQ ID NO: 898816 - RNA, 20 nt, Human
cacagcacugguacuucagc

SEQ ID NO: 898817 - RNA, 21 nt, Human
cacccaagagagggaggcgaa

SEQ ID NO: 898818 - RNA, 18 nt, Human
cacuggugcuugaagacc

SEQ ID NO: 898819 - RNA, 19 nt, Human
cacuugaguggaaaggauu

SEQ ID NO: 898820 - RNA, 23 nt, Human
cacuuucauccucuaagaggggg

SEQ ID NO: 898821 - RNA, 21 nt, Human
cagcuguaagagugagguccu

SEQ ID NO: 898822 - RNA, 23 nt, Human
caggacaccacugcccccaggau

SEQ ID NO: 898823 - RNA, 21 nt, Human
caggggaaugagccuggggga

SEQ ID NO: 898824 - RNA, 23 nt, Human
cagggguuccuccccgaucaucu

SEQ ID NO: 898825 - RNA, 18 nt, Human
caguucuuugggucuucc

SEQ ID NO: 898826 - RNA, 23 nt, Human
cauucaaucucugcuccacuuga

SEQ ID NO: 898827 - RNA, 20 nt, Human
ccaagagagggaggcgaaga

SEQ ID NO: 898828 - RNA, 19 nt, Human
cccaggacaccacugcccc

SEQ ID NO: 898829 - RNA, 23 nt, Human
cccaggacaccacugcccccagg

SEQ ID NO: 898830 - RNA, 20 nt, Human
cccccaggaugccagacaag

SEQ ID NO: 898831 - RNA, 18 nt, Human
ccuggcucugugcucauc

SEQ ID NO: 898832 - RNA, 21 nt, Human
cgggucauagcagaggcagcu

SEQ ID NO: 898833 - RNA, 23 nt, Human
cgucuuuggccuuugcugggcuu

SEQ ID NO: 898834 - RNA, 24 nt, Human
cuaaagaaaaagccggcuuuucau

SEQ ID NO: 898835 - RNA, 19 nt, Human
cuggcggauguugcgagag

SEQ ID NO: 898836 - RNA, 19 nt, Human
cuugaagaccacuugggaa

SEQ ID NO: 898837 - RNA, 18 nt, Human
cuugauggccacuucaga

SEQ ID NO: 898838 - RNA, 19 nt, Human
cuuggccucgucuuuggcc

SEQ ID NO: 898839 - RNA, 24 nt, Human
cuuggccucgucuuuggccuuugg

SEQ ID NO: 898840 - RNA, 24 nt, Human
cuuuggccuuugcugggcuugaug

SEQ ID NO: 898841 - RNA, 19 nt, Human
gaccccgcaaccauuuuug

SEQ ID NO: 898842 - RNA, 18 nt, Human
gcccgcauccccaguaga

SEQ ID NO: 898843 - RNA, 18 nt, Human
gcucaaugacccaggaca

SEQ ID NO: 898844 - RNA, 18 nt, Human
ggaagacaucaccgucag

SEQ ID NO: 898845 - RNA, 22 nt, Human
ggcauugagacaucuaaagaaa

SEQ ID NO: 898846 - RNA, 21 nt, Human
ggcugucucagagcguagggc

SEQ ID NO: 898847 - RNA, 18 nt, Human
gggaaugagccuggggga

SEQ ID NO: 898848 - RNA, 23 nt, Human
guccuagaguggauuccaaucuc

SEQ ID NO: 898849 - RNA, 22 nt, Human
guccucaguuuugcucuucauc

SEQ ID NO: 898850 - RNA, 21 nt, Human
uaaggacacuguagguuacau

SEQ ID NO: 898851 - RNA, 19 nt, Human
uaugaaaggagccugcaug

SEQ ID NO: 898852 - RNA, 24 nt, Human
uauuucacucaucuuucuucccag

SEQ ID NO: 898853 - RNA, 24 nt, Human
ucagauucuucagaaacuguagga

SEQ ID NO: 898854 - RNA, 18 nt, Human
uccaugcuacagcuugua

SEQ ID NO: 898855 - RNA, 18 nt, Human
uccuagacgcuucagccc

SEQ ID NO: 898856 - RNA, 22 nt, Human
uccuccuuauucuuuggauauu

SEQ ID NO: 898857 - RNA, 19 nt, Human
uccugaggacuguugcuua

SEQ ID NO: 898858 - RNA, 24 nt, Human
ugagaaucaacaucuuuugagagc

SEQ ID NO: 898859 - RNA, 24 nt, Human
ugagacaucuaaagaaaaagccgg

SEQ ID NO: 898860 - RNA, 21 nt, Human
ugauggccacuucagauucuu

SEQ ID NO: 898861 - RNA, 21 nt, Human
ugccaccuagcucaaugaccc

SEQ ID NO: 898862 - RNA, 21 nt, Human
ugcccuagugcaccaacacag

SEQ ID NO: 898863 - RNA, 18 nt, Human
ugcuugaagaccacuugg

SEQ ID NO: 898864 - RNA, 20 nt, Human
uggaaaggauuuggagaucu

SEQ ID NO: 898865 - RNA, 20 nt, Human
uggcaaaaagaugaguaauc

SEQ ID NO: 898866 - RNA, 21 nt, Human
uggugcggccucagucccacu

SEQ ID NO: 898867 - RNA, 22 nt, Human
uggugucauuuaggaggaguuu

SEQ ID NO: 898868 - RNA, 21 nt, Human
uguuuagagucucucucuuuc

SEQ ID NO: 898869 - RNA, 25 nt, Human
uuagagucucucucuuucgucuucu

SEQ ID NO: 898870 - RNA, 19 nt, Human
uucagaaacuguaggaggu

SEQ ID NO: 898871 - RNA, 18 nt, Human
uucaucucuaugugacag

SEQ ID NO: 898872 - RNA, 18 nt, Human
uucuuugggucuuccgaa

SEQ ID NO: 898873 - RNA, 24 nt, Human
uugagagcuuuauuacacuggugg

SEQ ID NO: 898874 - RNA, 20 nt, Human
agccacagcaucugccaacu

SEQ ID NO: 898875 - RNA, 21 nt, Human
caccggcuucccaacguccca

SEQ ID NO: 898876 - RNA, 24 nt, Human
ccagccacagcaucugccaacacc

SEQ ID NO: 898877 - RNA, 22 nt, Human
cgucuggacuccucccagccac

SEQ ID NO: 898878 - RNA, 21 nt, Human
cucccagccacagcaucugcc

SEQ ID NO: 898879 - RNA, 22 nt, Human
cugcccaaaacuccuaagcagg

SEQ ID NO: 898880 - RNA, 22 nt, Human
gaguggaugcccuugccucuuc

SEQ ID NO: 898881 - RNA, 22 nt, Human
gccacagcaucugccaacaccg

SEQ ID NO: 898882 - RNA, 18 nt, Human
ggacuccucccagccaca

SEQ ID NO: 898883 - RNA, 24 nt, Human
uccuaagcaguuguggcucagccc

SEQ ID NO: 898884 - RNA, 21 nt, Human
ucuuucuuuuggugacaagcu

SEQ ID NO: 898885 - RNA, 24 nt, Human
ucuuucuuuuggugacaagcuuuu

SEQ ID NO: 898886 - RNA, 25 nt, Human
ugagauuaaugaaacauagaguguc

SEQ ID NO: 898887 - RNA, 18 nt, Human
ugcccaaaacuccuaagc

SEQ ID NO: 898888 - RNA, 24 nt, Human
ugccucuucuucugggauaucuua

SEQ ID NO: 898889 - RNA, 23 nt, Human
uggaguggaugcccuugccucuu

SEQ ID NO: 898890 - RNA, 18 nt, Human
uuagugguagugccugcu

SEQ ID NO: 898891 - RNA, 22 nt, Human
uuagugguagugccugcucccu

SEQ ID NO: 898892 - RNA, 27 nt, Human
uuuuucgaguccaacuugcugagaaua

SEQ ID NO: 898893 - RNA, 25 nt, Human
uuuuuuuucgaguccaacuugcuga

SEQ ID NO: 898894 - RNA, 18 nt, Human
uuuuuuuuuuucgagucc

SEQ ID NO: 898895 - RNA, 22 nt, Human
uuuuuuuuuuuuuuuuucgagu

SEQ ID NO: 898896 - RNA, 21 nt, Human
uuuuuuuuuuuuuuuuuucgg

SEQ ID NO: 898897 - RNA, 23 nt, Human
caccggcggcaggugcugggcgu

SEQ ID NO: 898898 - RNA, 20 nt, Human
cacuggcccagggaaacaac

SEQ ID NO: 898899 - RNA, 24 nt, Human
cagccucggugcacuggcccaggg

SEQ ID NO: 898900 - RNA, 19 nt, Human
cgaagucagucccccaccg

SEQ ID NO: 898901 - RNA, 23 nt, Human
gcccccuccucucucagugauuc

SEQ ID NO: 898902 - RNA, 18 nt, Human
gcugcccccuccucucuc

SEQ ID NO: 898903 - RNA, 22 nt, Human
ggcggcaggugcugggcguugg

SEQ ID NO: 898904 - RNA, 20 nt, Human
uacugcugauggucucucca

SEQ ID NO: 898905 - RNA, 21 nt, Human
uccgccgaagucaguccccca

SEQ ID NO: 898906 - RNA, 20 nt, Human
ugaaaagagucauaguccgu

SEQ ID NO: 898907 - RNA, 21 nt, Human
ugaaaagagucauaguccguu

SEQ ID NO: 898908 - RNA, 20 nt, Human
uggcccagggaaacaacucc

SEQ ID NO: 898909 - RNA, 20 nt, Human
uguuaagugaaaagcugcuu

SEQ ID NO: 898910 - RNA, 24 nt, Human
uuucuucuugcuuugauguuaagu

SEQ ID NO: 898911 - RNA, 22 nt, Human
uuuuuuuuuuuugaaaagaguc

SEQ ID NO: 898912 - RNA, 18 nt, Human
uuuuuuuuuuuuuuuuug

SEQ ID NO: 898913 - RNA, 18 nt, Human
aaaagacaaauauucuua

SEQ ID NO: 898914 - RNA, 26 nt, Human
aaacaacaaauccaagagcugaagca

SEQ ID NO: 898915 - RNA, 23 nt, Human
aaaggcagggaacaaaagcagag

SEQ ID NO: 898916 - RNA, 24 nt, Human
aaaggcagggaacaaaagcagagg

SEQ ID NO: 898917 - RNA, 24 nt, Human
aaaucacagacagcaaucuggaau

SEQ ID NO: 898918 - RNA, 22 nt, Human
aaaugccuauuuuucccuuucu

SEQ ID NO: 898919 - RNA, 21 nt, Human
aaauggcauuaucaugccucu

SEQ ID NO: 898920 - RNA, 21 nt, Human
aacacccaacaggcaaaucca

SEQ ID NO: 898921 - RNA, 22 nt, Human
aaccugaccaccgcagauccag

SEQ ID NO: 898922 - RNA, 20 nt, Human
aagaauaucuuaauucacgg

SEQ ID NO: 898923 - RNA, 23 nt, Human
aagacaaauauucuuauuaacac

SEQ ID NO: 898924 - RNA, 23 nt, Human
aagagucagugauaucaagcagc

SEQ ID NO: 898925 - RNA, 21 nt, Human
aagcagaggcaaaccugacca

SEQ ID NO: 898926 - RNA, 18 nt, Human
aauaugccaggauuuugg

SEQ ID NO: 898927 - RNA, 20 nt, Human
aauaugccaggauuuugggu

SEQ ID NO: 898928 - RNA, 20 nt, Human
aauauuuacugauugauuua

SEQ ID NO: 898929 - RNA, 21 nt, Human
aaucacaguuuuucccacuug

SEQ ID NO: 898930 - RNA, 21 nt, Human
acaccauuuguauccuagaaa

SEQ ID NO: 898931 - RNA, 18 nt, Human
acacuacuacauuaugga

SEQ ID NO: 898932 - RNA, 18 nt, Human
accuggcaauaugccagg

SEQ ID NO: 898933 - RNA, 19 nt, Human
acuuguaugcuucuuccuc

SEQ ID NO: 898934 - RNA, 21 nt, Human
agaaacaacaaauccaagagc

SEQ ID NO: 898935 - RNA, 21 nt, Human
agaaacugguaggaagcccag

SEQ ID NO: 898936 - RNA, 18 nt, Human
agaagaaaaaaaauggca

SEQ ID NO: 898937 - RNA, 21 nt, Human
agaagaaaaaaaauggcauua

SEQ ID NO: 898938 - RNA, 21 nt, Human
agaccuggcaauaugccagga

SEQ ID NO: 898939 - RNA, 21 nt, Human
agcagcauuuauuaauggaau

SEQ ID NO: 898940 - RNA, 21 nt, Human
aggcagggaacaaaagcagag

SEQ ID NO: 898941 - RNA, 19 nt, Human
aucacaguuuuucccacuu

SEQ ID NO: 898942 - RNA, 21 nt, Human
augaagcaccccaggccaccc

SEQ ID NO: 898943 - RNA, 22 nt, Human
augaagcaccccaggccacccc

SEQ ID NO: 898944 - RNA, 19 nt, Human
auggagacaaaguccacua

SEQ ID NO: 898945 - RNA, 19 nt, Human
auggagccaauguuuggau

SEQ ID NO: 898946 - RNA, 20 nt, Human
caacacccaacaggcaaauc

SEQ ID NO: 898947 - RNA, 21 nt, Human
caacaggcaaauccacagacc

SEQ ID NO: 898948 - RNA, 18 nt, Human
cacagcccuggcauggag

SEQ ID NO: 898949 - RNA, 18 nt, Human
cacccaacaggcaaaucc

SEQ ID NO: 898950 - RNA, 24 nt, Human
caccccaggccaccccucucuaac

SEQ ID NO: 898951 - RNA, 19 nt, Human
cagcauuuauuaauggaau

SEQ ID NO: 898952 - RNA, 25 nt, Human
cagcgacacugucucagaauaacac

SEQ ID NO: 898953 - RNA, 21 nt, Human
cagucacagcccuggcaugga

SEQ ID NO: 898954 - RNA, 22 nt, Human
cagugauaucaagcagcgacac

SEQ ID NO: 898955 - RNA, 19 nt, Human
caguucuuggcugccuugu

SEQ ID NO: 898956 - RNA, 27 nt, Human
ccaacacccaacaggcaaauccacaga

SEQ ID NO: 898957 - RNA, 20 nt, Human
ccaacaggcaaauccacaga

SEQ ID NO: 898958 - RNA, 20 nt, Human
ccacuuguaugcuucuuccu

SEQ ID NO: 898959 - RNA, 22 nt, Human
ccaggccaccccucucuaaccu

SEQ ID NO: 898960 - RNA, 23 nt, Human
ccaguuguacagaagaaaaaaaa

SEQ ID NO: 898961 - RNA, 18 nt, Human
cccacacauaaaucuaaa

SEQ ID NO: 898962 - RNA, 21 nt, Human
cccacacauaaaucuaaaaga

SEQ ID NO: 898963 - RNA, 19 nt, Human
ccccaggccaccccucucu

SEQ ID NO: 898964 - RNA, 19 nt, Human
ccccaugguccuacacagg

SEQ ID NO: 898965 - RNA, 21 nt, Human
ccccaugguccuacacaggcu

SEQ ID NO: 898966 - RNA, 22 nt, Human
cccugcaguguagacaggccuu

SEQ ID NO: 898967 - RNA, 18 nt, Human
ccucugcugccaaggaaa

SEQ ID NO: 898968 - RNA, 23 nt, Human
ccugaccaccgcagauccaggaa

SEQ ID NO: 898969 - RNA, 23 nt, Human
cggaaaggcagggaacaaaagca

SEQ ID NO: 898970 - RNA, 18 nt, Human
cuaggagagaacagaaaa

SEQ ID NO: 898971 - RNA, 18 nt, Human
cucaugaagcaccccagg

SEQ ID NO: 898972 - RNA, 25 nt, Human
cucaugaagcaccccaggccacccc

SEQ ID NO: 898973 - RNA, 21 nt, Human
cugaaaugaccauacuuucaa

SEQ ID NO: 898974 - RNA, 20 nt, Human
gaaaccucucccagucaggg

SEQ ID NO: 898975 - RNA, 21 nt, Human
gaauagcugaaaugaccauac

SEQ ID NO: 898976 - RNA, 24 nt, Human
gaaugaacaaggcugaauuuuaga

SEQ ID NO: 898977 - RNA, 18 nt, Human
gagucaauucuaauuaag

SEQ ID NO: 898978 - RNA, 19 nt, Human
gcagggaacaaaagcagag

SEQ ID NO: 898979 - RNA, 19 nt, Human
gcccuagcgcccccccccc

SEQ ID NO: 898980 - RNA, 22 nt, Human
ggcauggagccaauguuuggau

SEQ ID NO: 898981 - RNA, 24 nt, Human
gggagguaagcaaucucaguguuu

SEQ ID NO: 898982 - RNA, 25 nt, Human
uaacacacuacuacauuauggaaaa

SEQ ID NO: 898983 - RNA, 18 nt, Human
uaacacucucuuccuauu

SEQ ID NO: 898984 - RNA, 21 nt, Human
uaaguguacaucaccuccucu

SEQ ID NO: 898985 - RNA, 19 nt, Human
uacugauugauuuauaaaa

SEQ ID NO: 898986 - RNA, 19 nt, Human
uaggagagaacagaaaaug

SEQ ID NO: 898987 - RNA, 19 nt, Human
uaucaugccucucuuaaua

SEQ ID NO: 898988 - RNA, 21 nt, Human
uauuucucaaaagguguguga

SEQ ID NO: 898989 - RNA, 19 nt, Human
ucaaagccaugagacaacc

SEQ ID NO: 898990 - RNA, 19 nt, Human
ucacagcccuggcauggag

SEQ ID NO: 898991 - RNA, 26 nt, Human
ucccugcagaggcaugaccucuugug

SEQ ID NO: 898992 - RNA, 19 nt, Human
ucccuggagcaguuuacua

SEQ ID NO: 898993 - RNA, 18 nt, Human
ucggcccuagcgcccccc

SEQ ID NO: 898994 - RNA, 23 nt, Human
ucugugauaaacaggaccggggc

SEQ ID NO: 898995 - RNA, 25 nt, Human
ugaacaaggcugaauuuuagaagug

SEQ ID NO: 898996 - RNA, 21 nt, Human
ugaagcaccccaggccacccc

SEQ ID NO: 898997 - RNA, 24 nt, Human
ugacucugaacuccccaugguccu

SEQ ID NO: 898998 - RNA, 23 nt, Human
ugagguucacuguuagugauuuc

SEQ ID NO: 898999 - RNA, 20 nt, Human
ugauuacuagaaagcuuugg

SEQ ID NO: 899000 - RNA, 26 nt, Human
ugauucccugcagaggcaugaccucu

SEQ ID NO: 899001 - RNA, 24 nt, Human
uggcaaauguuuuuaaaaggcucu

SEQ ID NO: 899002 - RNA, 21 nt, Human
uguacagaagaaaaaaaaugg

SEQ ID NO: 899003 - RNA, 22 nt, Human
uguacagaagaaaaaaaauggc

SEQ ID NO: 899004 - RNA, 20 nt, Human
uguccuaucccaugcccucc

SEQ ID NO: 899005 - RNA, 21 nt, Human
ugugauguggcggaaaggcag

SEQ ID NO: 899006 - RNA, 23 nt, Human
uuaugagucaauucuaauuaagu

SEQ ID NO: 899007 - RNA, 18 nt, Human
uucucagcaaauaaaaau

SEQ ID NO: 899008 - RNA, 23 nt, Human
uuucucaugaagcaccccaggcc

SEQ ID NO: 899009 - RNA, 19 nt, Human
aagacuuuucuuuccuuca

SEQ ID NO: 899010 - RNA, 22 nt, Human
aagcuguuggcaugucuaguuc

SEQ ID NO: 899011 - RNA, 19 nt, Human
accccuuagaccuacuguu

SEQ ID NO: 899012 - RNA, 21 nt, Human
accuacuguuuuuuuaaccug

SEQ ID NO: 899013 - RNA, 22 nt, Human
aguuccauagaauuuucuccag

SEQ ID NO: 899014 - RNA, 21 nt, Human
auagaauuuucuccaguuuca

SEQ ID NO: 899015 - RNA, 22 nt, Human
auagaauuuucuccaguuucag

SEQ ID NO: 899016 - RNA, 20 nt, Human
augucagaauauuaaaugag

SEQ ID NO: 899017 - RNA, 18 nt, Human
caaccuggcuccugccug

SEQ ID NO: 899018 - RNA, 23 nt, Human
caaucuugcauauuauguuccag

SEQ ID NO: 899019 - RNA, 22 nt, Human
cacugcacaaccuggcuccugc

SEQ ID NO: 899020 - RNA, 23 nt, Human
cagaaucuugucaccccaacccc

SEQ ID NO: 899021 - RNA, 19 nt, Human
cagcacugcacaaccuggc

SEQ ID NO: 899022 - RNA, 19 nt, Human
cauuagugaaagaugaggg

SEQ ID NO: 899023 - RNA, 21 nt, Human
cauuagugaaagaugagggua

SEQ ID NO: 899024 - RNA, 18 nt, Human
ccguguauaguuugcccc

SEQ ID NO: 899025 - RNA, 21 nt, Human
ccugcugaacuugaaaauaag

SEQ ID NO: 899026 - RNA, 22 nt, Human
cucaaacuguuguccauagacc

SEQ ID NO: 899027 - RNA, 23 nt, Human
cucaaacuguuguccauagacca

SEQ ID NO: 899028 - RNA, 22 nt, Human
cugcugaacuugaaaauaagaa

SEQ ID NO: 899029 - RNA, 22 nt, Human
cuugaagaccuugcuccucaaa

SEQ ID NO: 899030 - RNA, 20 nt, Human
cuuuucuuuccuucaggcuu

SEQ ID NO: 899031 - RNA, 25 nt, Human
gaacauuugacaugucagaauauua

SEQ ID NO: 899032 - RNA, 19 nt, Human
ggaagccagacacagcugc

SEQ ID NO: 899033 - RNA, 21 nt, Human
ucaagaacauuugacauguca

SEQ ID NO: 899034 - RNA, 21 nt, Human
ucaguccauaaugagagcuug

SEQ ID NO: 899035 - RNA, 20 nt, Human
uccagucuucuggaacacau

SEQ ID NO: 899036 - RNA, 20 nt, Human
uccauaaugagagcuugaag

SEQ ID NO: 899037 - RNA, 21 nt, Human
uccauaaugagagcuugaaga

SEQ ID NO: 899038 - RNA, 18 nt, Human
uccauacacagcacugca

SEQ ID NO: 899039 - RNA, 20 nt, Human
uccauacacagcacugcaca

SEQ ID NO: 899040 - RNA, 21 nt, Human
uccccaagcuguuggcauguc

SEQ ID NO: 899041 - RNA, 20 nt, Human
ucuccaguuucaguccauaa

SEQ ID NO: 899042 - RNA, 25 nt, Human
ucugccauuagugaaagaugagggu

SEQ ID NO: 899043 - RNA, 21 nt, Human
ugccauuagugaaagaugagg

SEQ ID NO: 899044 - RNA, 19 nt, Human
ugcugcccagccaugagag

SEQ ID NO: 899045 - RNA, 26 nt, Human
uguuccagucuucuggaacacauuca

SEQ ID NO: 899046 - RNA, 19 nt, Human
uugaagaccuugcuccuca

SEQ ID NO: 899047 - RNA, 19 nt, Human
aagcaaagcagaacauaac

SEQ ID NO: 899048 - RNA, 26 nt, Human
aaugguccuucucuuacuauuuguug

SEQ ID NO: 899049 - RNA, 18 nt, Human
aggaagaaauaauguaca

SEQ ID NO: 899050 - RNA, 21 nt, Human
cauggugaaacaagaggcaag

SEQ ID NO: 899051 - RNA, 19 nt, Human
uguacaaaugaaauggucc

SEQ ID NO: 899052 - RNA, 18 nt, Human
ugugccaagcaaagcaga

SEQ ID NO: 899053 - RNA, 21 nt, Human
ugugccaagcaaagcagaaca

SEQ ID NO: 899054 - RNA, 21 nt, Human
uuacauuuauuuugugccaag

SEQ ID NO: 899055 - RNA, 22 nt, Human
uuagaacacucuggaaaucauc

SEQ ID NO: 899056 - RNA, 21 nt, Human
uuugugccaagcaaagcagaa

SEQ ID NO: 899057 - RNA, 18 nt, Human
uuuuuuuuuuuuuuuuug

SEQ ID NO: 899058 - RNA, 19 nt, Human
uuuuuuuuuuuuuuuuugu

SEQ ID NO: 899059 - RNA, 18 nt, Human
aaauagaagcuuggugag

SEQ ID NO: 899060 - RNA, 23 nt, Human
auagauucuccccagugcggaag

SEQ ID NO: 899061 - RNA, 23 nt, Human
augcucaggggccugcugcacau

SEQ ID NO: 899062 - RNA, 24 nt, Human
cacuccuuuccuucaucucuuggg

SEQ ID NO: 899063 - RNA, 21 nt, Human
cccgcccauucugagagcaca

SEQ ID NO: 899064 - RNA, 19 nt, Human
ccuacuucccuuucacucc

SEQ ID NO: 899065 - RNA, 19 nt, Human
cuugcauagauucucccca

SEQ ID NO: 899066 - RNA, 26 nt, Human
cuuucaaguuuuaaauuagauaaaua

SEQ ID NO: 899067 - RNA, 22 nt, Human
ggcauggagguggcauaugccg

SEQ ID NO: 899068 - RNA, 22 nt, Human
ggugcaguggcgaggacguggu

SEQ ID NO: 899069 - RNA, 21 nt, Human
uccauuuugcuuccuuccacu

SEQ ID NO: 899070 - RNA, 19 nt, Human
ucccgggaucucugucucc

SEQ ID NO: 899071 - RNA, 19 nt, Human
ucuccaucccgauaauccc

SEQ ID NO: 899072 - RNA, 23 nt, Human
ucucuugggcccgcccauucuga

SEQ ID NO: 899073 - RNA, 20 nt, Human
ugaaugcugcaaaguggugu

SEQ ID NO: 899074 - RNA, 19 nt, Human
ugcaguggcgaggacgugg

SEQ ID NO: 899075 - RNA, 22 nt, Human
ugcucaggggccugcugcacau

SEQ ID NO: 899076 - RNA, 26 nt, Human
uggcauggagguggcauaugccgagg

SEQ ID NO: 899077 - RNA, 18 nt, Human
ugucccgggaucucuguc

SEQ ID NO: 899078 - RNA, 23 nt, Human
uuccguuuccuauuaccacuucu

SEQ ID NO: 899079 - RNA, 23 nt, Human
uuccuuccacuucucugguccua

SEQ ID NO: 899080 - RNA, 24 nt, Human
uucuuccuugguugcaguuuucuc

SEQ ID NO: 899081 - RNA, 19 nt, Human
uugcuaggccagcucuggc

SEQ ID NO: 899082 - RNA, 24 nt, Human
uugugucucucaucugcugacuuu

SEQ ID NO: 899083 - RNA, 25 nt, Human
uuuuuuuuuuuuuuuuuuuucaugg

SEQ ID NO: 899084 - RNA, 22 nt, Human
aaaggccucuccugacccgccc

SEQ ID NO: 899085 - RNA, 22 nt, Human
caaaggccucuccugacccgcc

SEQ ID NO: 899086 - RNA, 26 nt, Human
caagugaaauacaauaguagcuauaa

SEQ ID NO: 899087 - RNA, 21 nt, Human
cagaaaacuacuauaauuuau

SEQ ID NO: 899088 - RNA, 23 nt, Human
cagaaaacuacuauaauuuaugc

SEQ ID NO: 899089 - RNA, 21 nt, Human
cagucuuucccuucuaggccc

SEQ ID NO: 899090 - RNA, 19 nt, Human
cccgcccacggaguggggg

SEQ ID NO: 899091 - RNA, 23 nt, Human
cuuccaaaggccucuccugaccc

SEQ ID NO: 899092 - RNA, 22 nt, Human
cuucuaggcccuccugccaaca

SEQ ID NO: 899093 - RNA, 21 nt, Human
gaaauacaauaguagcuauaa

SEQ ID NO: 899094 - RNA, 19 nt, Human
gcggugggagagaagaggc

SEQ ID NO: 899095 - RNA, 21 nt, Human
uaauuuaugcuaaacuuccuu

SEQ ID NO: 899096 - RNA, 19 nt, Human
uacaauaguagcuauaaaa

SEQ ID NO: 899097 - RNA, 28 nt, Human
uacaauaguagcuauaaaacuauggaga

SEQ ID NO: 899098 - RNA, 18 nt, Human
uacuuuaauucaacaagu

SEQ ID NO: 899099 - RNA, 19 nt, Human
uaguagcuauaaaacuaug

SEQ ID NO: 899100 - RNA, 24 nt, Human
uccaaaggccucuccugacccgcc

SEQ ID NO: 899101 - RNA, 18 nt, Human
ucuauaauuuucuauuca

SEQ ID NO: 899102 - RNA, 19 nt, Human
ugacccgcccacggagugg

SEQ ID NO: 899103 - RNA, 24 nt, Human
ugcuaaacuuccuuuuaucacuac

SEQ ID NO: 899104 - RNA, 23 nt, Human
uugguaucaacgcacagucuuuc

SEQ ID NO: 899105 - RNA, 24 nt, Human
uuuuuuuuuuuuuaaaagaauuca

SEQ ID NO: 899106 - RNA, 23 nt, Human
uuuuuuuuuuuuuuuuuuaaaag

SEQ ID NO: 899107 - RNA, 21 nt, Human
aagaacaaauuguuugagugc

SEQ ID NO: 899108 - RNA, 18 nt, Human
aagaagaaugaaaaucug

SEQ ID NO: 899109 - RNA, 22 nt, Human
agcaugcccuucauuuuuuugu

SEQ ID NO: 899110 - RNA, 19 nt, Human
cagaacucuaguaagggaa

SEQ ID NO: 899111 - RNA, 23 nt, Human
cagaagaagaaugaaaaucugcc

SEQ ID NO: 899112 - RNA, 18 nt, Human
cugauugcagguccccug

SEQ ID NO: 899113 - RNA, 21 nt, Human
gaaagagugagcaaacauugc

SEQ ID NO: 899114 - RNA, 18 nt, Human
gagaacacagauuggagg

SEQ ID NO: 899115 - RNA, 21 nt, Human
gagcaaacauugccgcccaaa

SEQ ID NO: 899116 - RNA, 18 nt, Human
gcauguuagucagagucu

SEQ ID NO: 899117 - RNA, 20 nt, Human
gcgugcuggguuuggacuuc

SEQ ID NO: 899118 - RNA, 23 nt, Human
gugagcaaacauugccgcccaaa

SEQ ID NO: 899119 - RNA, 18 nt, Human
uagauuggacaaauaggc

SEQ ID NO: 899120 - RNA, 25 nt, Human
ugagugcucagcaugcccuucauuu

SEQ ID NO: 899121 - RNA, 22 nt, Human
ugcuggguuuggacuucuuggu

SEQ ID NO: 899122 - RNA, 21 nt, Human
ugcuuuauaaucuuuguuucu

SEQ ID NO: 899123 - RNA, 18 nt, Human
ugguauagagcuuucugc

SEQ ID NO: 899124 - RNA, 25 nt, Human
ugguauagagcuuucugcuuuaggg

SEQ ID NO: 899125 - RNA, 19 nt, Human
uguuagucagagucuucag

SEQ ID NO: 899126 - RNA, 26 nt, Human
uguucugaaucuagauuggacaaaua

SEQ ID NO: 899127 - RNA, 19 nt, Human
uucuauggcagaacucuag

SEQ ID NO: 899128 - RNA, 24 nt, Human
uucugaaucuagauuggacaaaua

SEQ ID NO: 899129 - RNA, 20 nt, Human
uuuaaguaagaacaaauuga

SEQ ID NO: 899130 - RNA, 21 nt, Human
uuuuuguaaguuaaugaggug

SEQ ID NO: 899131 - RNA, 22 nt, Human
aagcccaggcucuaccagcaag

SEQ ID NO: 899132 - RNA, 21 nt, Human
aauccccuccugcagaggauc

SEQ ID NO: 899133 - RNA, 20 nt, Human
accagacuucuugaagugac

SEQ ID NO: 899134 - RNA, 20 nt, Human
accccacacugaugcccccc

SEQ ID NO: 899135 - RNA, 18 nt, Human
caagggcuccugcuggac

SEQ ID NO: 899136 - RNA, 24 nt, Human
cacagcaagcccaggcucuaccag

SEQ ID NO: 899137 - RNA, 27 nt, Human
caccccacacugaugcccccccccgcu

SEQ ID NO: 899138 - RNA, 23 nt, Human
cagugaccacccuuccccuagac

SEQ ID NO: 899139 - RNA, 20 nt, Human
ccaacagccuuccugcuccc

SEQ ID NO: 899140 - RNA, 20 nt, Human
ccacacugaugccccccccc

SEQ ID NO: 899141 - RNA, 21 nt, Human
cccaacagccuuccugcuccc

SEQ ID NO: 899142 - RNA, 22 nt, Human
ccccacacugaugccccccccc

SEQ ID NO: 899143 - RNA, 27 nt, Human
ccccuagacaggccacaccuccagccu

SEQ ID NO: 899144 - RNA, 24 nt, Human
ccuuagcugcuauaauccccuccu

SEQ ID NO: 899145 - RNA, 23 nt, Human
cugcccccuuggcacagcaagcc

SEQ ID NO: 899146 - RNA, 21 nt, Human
gcacagcaagcccaggcucua

SEQ ID NO: 899147 - RNA, 20 nt, Human
gccacaccuccagccuggca

SEQ ID NO: 899148 - RNA, 21 nt, Human
gccacaccuccagccuggcag

SEQ ID NO: 899149 - RNA, 24 nt, Human
uaacauaguuguuucucuggggac

SEQ ID NO: 899150 - RNA, 18 nt, Human
uaggucucagacacaaac

SEQ ID NO: 899151 - RNA, 23 nt, Human
ucccaccccacacugaugccccc

SEQ ID NO: 899152 - RNA, 25 nt, Human
uccccaacagccuuccugcucccac

SEQ ID NO: 899153 - RNA, 21 nt, Human
ucucuggggaccaccagacuu

SEQ ID NO: 899154 - RNA, 21 nt, Human
ucuuggagaugccgugguggg

SEQ ID NO: 899155 - RNA, 21 nt, Human
ugcccuuagcugcuauaaucc

SEQ ID NO: 899156 - RNA, 27 nt, Human
ugcucugcccccuuggcacagcaagcc

SEQ ID NO: 899157 - RNA, 19 nt, Human
ugucaagggcuccugcugg

SEQ ID NO: 899158 - RNA, 18 nt, Human
uugaagaguuuauuuauu

SEQ ID NO: 899159 - RNA, 20 nt, Human
uugcucugcccccuuggcac

SEQ ID NO: 899160 - RNA, 19 nt, Human
aaaacaaacaaacaaacca

SEQ ID NO: 899161 - RNA, 22 nt, Human
aaaacaaacaaacaaaccaaaa

SEQ ID NO: 899162 - RNA, 22 nt, Human
aaacaaacaaaccaaaaaaaca

SEQ ID NO: 899163 - RNA, 25 nt, Human
aaacaaacaaaccaaaaaaacacua

SEQ ID NO: 899164 - RNA, 27 nt, Human
aaacaaacaaaccaaaaaaacacuaca

SEQ ID NO: 899165 - RNA, 22 nt, Human
aaacaaaccaaaaaaacacuac

SEQ ID NO: 899166 - RNA, 26 nt, Human
acaaacaaaccaaaaaaacacuacaa

SEQ ID NO: 899167 - RNA, 18 nt, Human
acaaagcacaaggcaaag

SEQ ID NO: 899168 - RNA, 24 nt, Human
acagauuacuucauaccucuuuca

SEQ ID NO: 899169 - RNA, 19 nt, Human
acucuccagaacugggagu

SEQ ID NO: 899170 - RNA, 20 nt, Human
acugggaguggcucauuccc

SEQ ID NO: 899171 - RNA, 18 nt, Human
agaguuugggcuuuggcc

SEQ ID NO: 899172 - RNA, 20 nt, Human
aggcaagguuaccaaggggg

SEQ ID NO: 899173 - RNA, 21 nt, Human
aggcgggagggauccauggcc

SEQ ID NO: 899174 - RNA, 24 nt, Human
agggaaggaaggaaauggggaagg

SEQ ID NO: 899175 - RNA, 20 nt, Human
agguggagucagauuucagg

SEQ ID NO: 899176 - RNA, 23 nt, Human
caaagaaauuauaaacaaagcac

SEQ ID NO: 899177 - RNA, 23 nt, Human
caaagcacaaggcaaaguugcaa

SEQ ID NO: 899178 - RNA, 21 nt, Human
caaccccacccuccgcagaag

SEQ ID NO: 899179 - RNA, 23 nt, Human
caaccccacccuccgcagaagaa

SEQ ID NO: 899180 - RNA, 24 nt, Human
caauucuugguagaaagagucgaa

SEQ ID NO: 899181 - RNA, 23 nt, Human
cacaccccaaaacugagagcaga

SEQ ID NO: 899182 - RNA, 20 nt, Human
caccccaaaacugagagcag

SEQ ID NO: 899183 - RNA, 18 nt, Human
caccuugacaguugaguu

SEQ ID NO: 899184 - RNA, 23 nt, Human
cagaucaaccccacccuccgcag

SEQ ID NO: 899185 - RNA, 22 nt, Human
cagcaaauaucuguguucuuuu

SEQ ID NO: 899186 - RNA, 22 nt, Human
cagcagagucgaaaucuaggcc

SEQ ID NO: 899187 - RNA, 24 nt, Human
cagcagagucgaaaucuaggccug

SEQ ID NO: 899188 - RNA, 25 nt, Human
cagguggagucagauuucaggcggg

SEQ ID NO: 899189 - RNA, 25 nt, Human
cauccucacucuccagaacugggag

SEQ ID NO: 899190 - RNA, 23 nt, Human
ccagcagagucgaaaucuaggcc

SEQ ID NO: 899191 - RNA, 23 nt, Human
cccacaccccaaaacugagagca

SEQ ID NO: 899192 - RNA, 19 nt, Human
ccccaaaacugagagcaga

SEQ ID NO: 899193 - RNA, 23 nt, Human
ccccacaccccaaaacugagagc

SEQ ID NO: 899194 - RNA, 23 nt, Human
ccucuggagccacugacuugccc

SEQ ID NO: 899195 - RNA, 24 nt, Human
cugcuauggcaaagacaugcugcu

SEQ ID NO: 899196 - RNA, 21 nt, Human
cuggagccacugacuugccca

SEQ ID NO: 899197 - RNA, 19 nt, Human
cugguacaauggacaccuu

SEQ ID NO: 899198 - RNA, 22 nt, Human
cuuuuuaaaauaaaaguuguag

SEQ ID NO: 899199 - RNA, 19 nt, Human
gaaggaaggaaauggggaa

SEQ ID NO: 899200 - RNA, 22 nt, Human
gagcagaucaaccccacccucc

SEQ ID NO: 899201 - RNA, 20 nt, Human
ggaaaacaaacaaacaaacc

SEQ ID NO: 899202 - RNA, 21 nt, Human
ggacugggaaagaagaucuuc

SEQ ID NO: 899203 - RNA, 20 nt, Human
gggaaaacaaacaaacaaac

SEQ ID NO: 899204 - RNA, 18 nt, Human
gggaaagaagaucuucgu

SEQ ID NO: 899205 - RNA, 26 nt, Human
gggaaggaaggaaauggggaagggaa

SEQ ID NO: 899206 - RNA, 18 nt, Human
gugaagugcugcuauggc

SEQ ID NO: 899207 - RNA, 19 nt, Human
guggcucauucccacuccc

SEQ ID NO: 899208 - RNA, 21 nt, Human
guugaguugacgaccuggccu

SEQ ID NO: 899209 - RNA, 18 nt, Human
uaaaagcagcaaauaucu

SEQ ID NO: 899210 - RNA, 19 nt, Human
uaacuaggaauugcugcca

SEQ ID NO: 899211 - RNA, 25 nt, Human
uaagaccccucuggagccacugacu

SEQ ID NO: 899212 - RNA, 22 nt, Human
uaagugaaaaauaaccagguac

SEQ ID NO: 899213 - RNA, 23 nt, Human
uaauaauuuccuaaacugacacu

SEQ ID NO: 899214 - RNA, 21 nt, Human
uacuucauaccucuuucaagc

SEQ ID NO: 899215 - RNA, 18 nt, Human
uauauuaguaauguaaca

SEQ ID NO: 899216 - RNA, 24 nt, Human
ucuccagaacugggaguggcucau

SEQ ID NO: 899217 - RNA, 20 nt, Human
ucugguuccagaaaguggag

SEQ ID NO: 899218 - RNA, 19 nt, Human
ucuuaaaagcagcaaauau

SEQ ID NO: 899219 - RNA, 20 nt, Human
ugaaaaauaaccagguacaa

SEQ ID NO: 899220 - RNA, 24 nt, Human
ugaaaaauaaccagguacaaaacu

SEQ ID NO: 899221 - RNA, 24 nt, Human
uggagauggucauccucacucucc

SEQ ID NO: 899222 - RNA, 21 nt, Human
uggcucauucccacuccccgg

SEQ ID NO: 899223 - RNA, 24 nt, Human
ugggcugcagagaaauaaucuugg

SEQ ID NO: 899224 - RNA, 21 nt, Human
ugguuccagaaaguggagaug

SEQ ID NO: 899225 - RNA, 24 nt, Human
ugugguuugcuugcuuguuuuugu

SEQ ID NO: 899226 - RNA, 21 nt, Human
uuaaaauaaaaguuguaggcc

SEQ ID NO: 899227 - RNA, 24 nt, Human
uuaaaauaaaaguuguaggccagg

SEQ ID NO: 899228 - RNA, 21 nt, Human
uucauaccucuuucaagcuua

SEQ ID NO: 899229 - RNA, 18 nt, Human
uuccagaaaguggagaug

SEQ ID NO: 899230 - RNA, 24 nt, Human
uucuugaucaucuuuuuaaaauaa

SEQ ID NO: 899231 - RNA, 22 nt, Human
uuucugagucucagagaagaug

SEQ ID NO: 899232 - RNA, 21 nt, Human
aagugaaaacagacccauuua

SEQ ID NO: 899233 - RNA, 18 nt, Human
agauguuaaggcuagcuu

SEQ ID NO: 899234 - RNA, 23 nt, Human
ccuuaaaugcccacauucuuuca

SEQ ID NO: 899235 - RNA, 19 nt, Human
uagcuggcuagacuauugc

SEQ ID NO: 899236 - RNA, 18 nt, Human
ugaagaaaaaugagcaaa

SEQ ID NO: 899237 - RNA, 18 nt, Human
uggaaaaauuucuuagau

SEQ ID NO: 899238 - RNA, 19 nt, Human
uucaguguuuaagaccuua

SEQ ID NO: 899239 - RNA, 23 nt, Human
cagauuacuugcuaaaagaauuu

SEQ ID NO: 899240 - RNA, 25 nt, Human
ccaaauaucuaauuuuucaaguaac

SEQ ID NO: 899241 - RNA, 19 nt, Human
ccaccucugaagucauccu

SEQ ID NO: 899242 - RNA, 21 nt, Human
ccccuuugcagaaaauaauuu

SEQ ID NO: 899243 - RNA, 23 nt, Human
cuagguuaauuuuuccaccucug

SEQ ID NO: 899244 - RNA, 18 nt, Human
cuguagagccguuucucc

SEQ ID NO: 899245 - RNA, 19 nt, Human
gugauucuuccuuguuuca

SEQ ID NO: 899246 - RNA, 21 nt, Human
gugauucuuccuuguuucagc

SEQ ID NO: 899247 - RNA, 25 nt, Human
uccucacuuagaagucuuuccccag

SEQ ID NO: 899248 - RNA, 18 nt, Human
ucugaagucauccugaau

SEQ ID NO: 899249 - RNA, 23 nt, Human
ugaaucuuugacaaaaaccaucu

SEQ ID NO: 899250 - RNA, 24 nt, Human
ugaccuguagagccguuucuccuc

SEQ ID NO: 899251 - RNA, 26 nt, Human
uguagagccguuucuccucacuuaga

SEQ ID NO: 899252 - RNA, 18 nt, Human
uucacuuucgaagaagac

SEQ ID NO: 899253 - RNA, 19 nt, Human
uuccaaauacaauuaacuc

SEQ ID NO: 899254 - RNA, 22 nt, Human
uucuauggugauucuuccuugu

SEQ ID NO: 899255 - RNA, 18 nt, Human
uucuuaaaaucuucaaaa

SEQ ID NO: 899256 - RNA, 23 nt, Human
uuucacaugaauauaacugcacc

SEQ ID NO: 899257 - RNA, 18 nt, Human
uuuuuuuuuuuuuuugca

SEQ ID NO: 899258 - RNA, 19 nt, Human
uuuuuuuuuuuuuuugcau

SEQ ID NO: 899259 - RNA, 18 nt, Human
aaaaauaaauagagggaa

SEQ ID NO: 899260 - RNA, 21 nt, Human
aaaaggagccucuuugcagug

SEQ ID NO: 899261 - RNA, 22 nt, Human
caaaccgcagcaacucugccga

SEQ ID NO: 899262 - RNA, 21 nt, Human
ccuucgagagcuggagguggg

SEQ ID NO: 899263 - RNA, 19 nt, Human
cgagagcuggaggugggag

SEQ ID NO: 899264 - RNA, 22 nt, Human
cgcaagggcacaaaccgcagca

SEQ ID NO: 899265 - RNA, 23 nt, Human
gcagugcccucaggaaaagcucc

SEQ ID NO: 899266 - RNA, 22 nt, Human
gcuggaggugggaguuugacuc

SEQ ID NO: 899267 - RNA, 18 nt, Human
ggcacaaaccgcagcaac

SEQ ID NO: 899268 - RNA, 25 nt, Human
uagcagggaaauaaaagucuauaaa

SEQ ID NO: 899269 - RNA, 24 nt, Human
uauauauauguucagcaugccagu

SEQ ID NO: 899270 - RNA, 24 nt, Human
ucagaaaaagaaaucgcaagggca

SEQ ID NO: 899271 - RNA, 22 nt, Human
ucagcaugccaguucaccuggu

SEQ ID NO: 899272 - RNA, 21 nt, Human
ucgagagcuggaggugggagu

SEQ ID NO: 899273 - RNA, 21 nt, Human
ugaaagaaaaggagccucuuu

SEQ ID NO: 899274 - RNA, 19 nt, Human
ugagccuauauauauauau

SEQ ID NO: 899275 - RNA, 24 nt, Human
ugcagugcccucaggaaaagcucc

SEQ ID NO: 899276 - RNA, 21 nt, Human
uuuaauagcagggaaauaaaa

SEQ ID NO: 899277 - RNA, 19 nt, Human
aacaugcugguggcacagg

SEQ ID NO: 899278 - RNA, 21 nt, Human
aacaugcugguggcacaggua

SEQ ID NO: 899279 - RNA, 18 nt, Human
agcagcugcagcgccccc

SEQ ID NO: 899280 - RNA, 19 nt, Human
aggacaggauccuugguuu

SEQ ID NO: 899281 - RNA, 21 nt, Human
augcugguggcacagguaggg

SEQ ID NO: 899282 - RNA, 18 nt, Human
cagcagcugcagcgcccc

SEQ ID NO: 899283 - RNA, 20 nt, Human
cagcagcugcagcgcccccc

SEQ ID NO: 899284 - RNA, 21 nt, Human
uccgaggguggccucuguggg

SEQ ID NO: 899285 - RNA, 24 nt, Human
ucucuaggacaggauccuugguuu

SEQ ID NO: 899286 - RNA, 18 nt, Human
uggccacaucuucagucc

SEQ ID NO: 899287 - RNA, 20 nt, Human
aaaacaagggaggggcgaag

SEQ ID NO: 899288 - RNA, 19 nt, Human
aaggacggauggauguugg

SEQ ID NO: 899289 - RNA, 19 nt, Human
aauuucuguucuuggucuc

SEQ ID NO: 899290 - RNA, 21 nt, Human
acaauaucuuaggggauuggc

SEQ ID NO: 899291 - RNA, 23 nt, Human
agcggcuugggcagcagcagggg

SEQ ID NO: 899292 - RNA, 21 nt, Human
aggaggcaggggcacgaggcg

SEQ ID NO: 899293 - RNA, 24 nt, Human
aggcaggggcacgaggcggauccg

SEQ ID NO: 899294 - RNA, 18 nt, Human
aggcccagcggcuugggc

SEQ ID NO: 899295 - RNA, 21 nt, Human
aggcccagcggcuugggcagc

SEQ ID NO: 899296 - RNA, 23 nt, Human
aggggugucugugaguggggugc

SEQ ID NO: 899297 - RNA, 24 nt, Human
auaaaacaagggaggggcgaaggg

SEQ ID NO: 899298 - RNA, 22 nt, Human
caagaacuccucuucuggguac

SEQ ID NO: 899299 - RNA, 20 nt, Human
cacugggcuucccucacucu

SEQ ID NO: 899300 - RNA, 18 nt, Human
cagcagcaggggggugcc

SEQ ID NO: 899301 - RNA, 22 nt, Human
cagcagcaggggggugccaggg

SEQ ID NO: 899302 - RNA, 19 nt, Human
caggugugggggcagggag

SEQ ID NO: 899303 - RNA, 20 nt, Human
cauaaaauauaaaacaaggg

SEQ ID NO: 899304 - RNA, 23 nt, Human
ccagagcuccugccugagcgcug

SEQ ID NO: 899305 - RNA, 24 nt, Human
ccagagcuccugccugagcgcugg

SEQ ID NO: 899306 - RNA, 19 nt, Human
ccagggcggcggcgcgccc

SEQ ID NO: 899307 - RNA, 19 nt, Human
ccaguccagagcuccugcc

SEQ ID NO: 899308 - RNA, 20 nt, Human
ccuuccacugggcuucccuc

SEQ ID NO: 899309 - RNA, 18 nt, Human
cggcuugggcagcagcag

SEQ ID NO: 899310 - RNA, 22 nt, Human
cggguuagugagcaagaacucc

SEQ ID NO: 899311 - RNA, 21 nt, Human
cucccgggacccccuuccacu

SEQ ID NO: 899312 - RNA, 20 nt, Human
cugggaaguggagccuuuuc

SEQ ID NO: 899313 - RNA, 19 nt, Human
gaaggagaaugagaacaga

SEQ ID NO: 899314 - RNA, 19 nt, Human
gacggauggauguuggugg

SEQ ID NO: 899315 - RNA, 20 nt, Human
gaugcugcaucuuuuuuuuu

SEQ ID NO: 899316 - RNA, 27 nt, Human
gaugcugcaucuuuuuuuuuuuuuuuu

SEQ ID NO: 899317 - RNA, 19 nt, Human
gcagccggcucccgggacc

SEQ ID NO: 899318 - RNA, 21 nt, Human
gcaucuuuuuuuuuuuuuuuu

SEQ ID NO: 899319 - RNA, 22 nt, Human
ggaaugggaagcuccaggaggc

SEQ ID NO: 899320 - RNA, 18 nt, Human
ggcaaggaagggcuggga

SEQ ID NO: 899321 - RNA, 18 nt, Human
ggcccagcggcuugggca

SEQ ID NO: 899322 - RNA, 21 nt, Human
gggcugggaaguggagccuuu

SEQ ID NO: 899323 - RNA, 18 nt, Human
gggcuucccucacuccag

SEQ ID NO: 899324 - RNA, 22 nt, Human
uaauaaaaaauaagguucauua

SEQ ID NO: 899325 - RNA, 25 nt, Human
uagucccucuuuccugggccaggga

SEQ ID NO: 899326 - RNA, 18 nt, Human
ucaggggcaaggaagggc

SEQ ID NO: 899327 - RNA, 23 nt, Human
uccacugggcuucccucacucca

SEQ ID NO: 899328 - RNA, 23 nt, Human
ucuuuccugggccagggagcagc

SEQ ID NO: 899329 - RNA, 22 nt, Human
ucuuuuuuuuuuuuuuuuuggg

SEQ ID NO: 899330 - RNA, 25 nt, Human
ucuuuuuuuuuuuuuuuuuggguuu

SEQ ID NO: 899331 - RNA, 19 nt, Human
ugagaaggacggauggaug

SEQ ID NO: 899332 - RNA, 18 nt, Human
ugagcugaugaagagagc

SEQ ID NO: 899333 - RNA, 23 nt, Human
ugagcugaugaagagagcaguuu

SEQ ID NO: 899334 - RNA, 18 nt, Human
ugccaggugagggucagg

SEQ ID NO: 899335 - RNA, 21 nt, Human
ugcugagcugaugaagagagc

SEQ ID NO: 899336 - RNA, 20 nt, Human
ugggaaggagaaugagaacc

SEQ ID NO: 899337 - RNA, 18 nt, Human
ugggcagcagcagggggg

SEQ ID NO: 899338 - RNA, 18 nt, Human
ugggggugggguaagggg

SEQ ID NO: 899339 - RNA, 18 nt, Human
ugggugcagguguggggg

SEQ ID NO: 899340 - RNA, 24 nt, Human
uggucucuguacaguggggguggg

SEQ ID NO: 899341 - RNA, 21 nt, Human
uguugggcauaugagagagga

SEQ ID NO: 899342 - RNA, 21 nt, Human
uguuugggugcaggugugggg

SEQ ID NO: 899343 - RNA, 19 nt, Human
uucuggguaccaggggucc

SEQ ID NO: 899344 - RNA, 18 nt, Human
uuuuuuuuuuuuuugggu

SEQ ID NO: 899345 - RNA, 18 nt, Human
uuuuuuuuuuuuuuuuug

SEQ ID NO: 899346 - RNA, 24 nt, Human
uuuuuuuuuuuuuuuuugaugcug

SEQ ID NO: 899347 - RNA, 22 nt, Human
aaaacaaaacaacagaaacaga

SEQ ID NO: 899348 - RNA, 19 nt, Human
aagaauggagaucuggugg

SEQ ID NO: 899349 - RNA, 19 nt, Human
acaaaacaacagaaacaga

SEQ ID NO: 899350 - RNA, 25 nt, Human
acaccgccaugauagauccgcaggc

SEQ ID NO: 899351 - RNA, 20 nt, Human
acacgucggagccaaugaca

SEQ ID NO: 899352 - RNA, 19 nt, Human
acuguguaaagggcagggc

SEQ ID NO: 899353 - RNA, 20 nt, Human
agaauggagaucuggugggg

SEQ ID NO: 899354 - RNA, 20 nt, Human
aggcagggagggaggugggg

SEQ ID NO: 899355 - RNA, 24 nt, Human
aggcagggagggagguggggagga

SEQ ID NO: 899356 - RNA, 21 nt, Human
aggcagggagggagguggggu

SEQ ID NO: 899357 - RNA, 21 nt, Human
aggcaguggcaaaggcugugc

SEQ ID NO: 899358 - RNA, 23 nt, Human
aggcgcaacuccucgggucggga

SEQ ID NO: 899359 - RNA, 19 nt, Human
agggguggcuugaagggcu

SEQ ID NO: 899360 - RNA, 19 nt, Human
agugccaaagcagagcucc

SEQ ID NO: 899361 - RNA, 18 nt, Human
caccugagugaggaugga

SEQ ID NO: 899362 - RNA, 18 nt, Human
ccagucagauagaaguga

SEQ ID NO: 899363 - RNA, 20 nt, Human
ccccauacgaccagcucagc

SEQ ID NO: 899364 - RNA, 28 nt, Human
ccgaauaucuacacgcaauugcagguaa

SEQ ID NO: 899365 - RNA, 19 nt, Human
cgcucucggccugucaguc

SEQ ID NO: 899366 - RNA, 25 nt, Human
cgucagugaugaccguuucucagcc

SEQ ID NO: 899367 - RNA, 19 nt, Human
cguucagcagguaccgcca

SEQ ID NO: 899368 - RNA, 25 nt, Human
cucaaaucaaaggcucggaugagga

SEQ ID NO: 899369 - RNA, 21 nt, Human
cuuucgcagcgagggcuccac

SEQ ID NO: 899370 - RNA, 27 nt, Human
gaaacagaauaaauaggcguggccucu

SEQ ID NO: 899371 - RNA, 21 nt, Human
gagaucugguggggccgaugg

SEQ ID NO: 899372 - RNA, 20 nt, Human
gaggugaucuggggaucuac

SEQ ID NO: 899373 - RNA, 22 nt, Human
gagguggggucucauguguugg

SEQ ID NO: 899374 - RNA, 24 nt, Human
gauagauccgcaggcgcaacuccu

SEQ ID NO: 899375 - RNA, 21 nt, Human
gauccgcaggcgcaacuccuc

SEQ ID NO: 899376 - RNA, 19 nt, Human
gcagguaccgccacaccac

SEQ ID NO: 899377 - RNA, 23 nt, Human
gcagugccaaagcagagcuccac

SEQ ID NO: 899378 - RNA, 18 nt, Human
gcccagguagcugaugcc

SEQ ID NO: 899379 - RNA, 24 nt, Human
gcccucauggcaaagaauggagau

SEQ ID NO: 899380 - RNA, 19 nt, Human
gccuggggaggaagggcuc

SEQ ID NO: 899381 - RNA, 18 nt, Human
ggcagugccaaagcagag

SEQ ID NO: 899382 - RNA, 22 nt, Human
ggcaguggcaaaggcugugcug

SEQ ID NO: 899383 - RNA, 20 nt, Human
gggcagugccaaagcagagc

SEQ ID NO: 899384 - RNA, 23 nt, Human
ggggcagugccaaagcagagcuc

SEQ ID NO: 899385 - RNA, 22 nt, Human
ggguggcuugaagggcuugaca

SEQ ID NO: 899386 - RNA, 23 nt, Human
uacuuaggccuggggaggaaggg

SEQ ID NO: 899387 - RNA, 23 nt, Human
uagaagugagagguaaacuuccu

SEQ ID NO: 899388 - RNA, 22 nt, Human
uaugcuccaacaagucuagggc

SEQ ID NO: 899389 - RNA, 19 nt, Human
ucccacucaaaucaaaggc

SEQ ID NO: 899390 - RNA, 18 nt, Human
ucgggucgggagagcugg

SEQ ID NO: 899391 - RNA, 27 nt, Human
ucuucuagcaaugggcuguccuccgag

SEQ ID NO: 899392 - RNA, 23 nt, Human
ugagugaggauggacuguguaaa

SEQ ID NO: 899393 - RNA, 23 nt, Human
ugccaaaguucuucuucccacuc

SEQ ID NO: 899394 - RNA, 19 nt, Human
uggcuugaagggcuugaca

SEQ ID NO: 899395 - RNA, 21 nt, Human
ugucccagucuucuagcaaug

SEQ ID NO: 899396 - RNA, 18 nt, Human
uguuaaaaacaaaacaac

SEQ ID NO: 899397 - RNA, 20 nt, Human
uguuaaaaacaaaacaacag

SEQ ID NO: 899398 - RNA, 18 nt, Human
uugcagguaagguuugga

SEQ ID NO: 899399 - RNA, 20 nt, Human
aagaaagaaaagaaggcaca

SEQ ID NO: 899400 - RNA, 20 nt, Human
acugaguuuuguugguuuga

SEQ ID NO: 899401 - RNA, 22 nt, Human
agccgcgugaggaggcagccuc

SEQ ID NO: 899402 - RNA, 23 nt, Human
aggcaggcgccucgcgcgucccg

SEQ ID NO: 899403 - RNA, 18 nt, Human
aguuuuguugguuugagg

SEQ ID NO: 899404 - RNA, 22 nt, Human
augauaugcaccgccauucccc

SEQ ID NO: 899405 - RNA, 21 nt, Human
caaccaacaaaacuaaauucu

SEQ ID NO: 899406 - RNA, 19 nt, Human
caagcucaccuuuguuugg

SEQ ID NO: 899407 - RNA, 18 nt, Human
cacccugcgccgggggug

SEQ ID NO: 899408 - RNA, 23 nt, Human
caccugggacuggggcugggggc

SEQ ID NO: 899409 - RNA, 18 nt, Human
cagaacucacaguaggug

SEQ ID NO: 899410 - RNA, 18 nt, Human
cauccugaucacagacac

SEQ ID NO: 899411 - RNA, 22 nt, Human
caugguuuugcuaaccguguac

SEQ ID NO: 899412 - RNA, 21 nt, Human
ccaccugggacuggggcuggg

SEQ ID NO: 899413 - RNA, 21 nt, Human
ccccuccgccgccgccgccgc

SEQ ID NO: 899414 - RNA, 18 nt, Human
cccugcgccggggguggg

SEQ ID NO: 899415 - RNA, 18 nt, Human
ccgccgccgccgccgccg

SEQ ID NO: 899416 - RNA, 22 nt, Human
ccgccgccgccgccgccgccgc

SEQ ID NO: 899417 - RNA, 25 nt, Human
ccgccgccgccgccgccgccgccgg

SEQ ID NO: 899418 - RNA, 23 nt, Human
ccgccgccgccgccgccgccgcu

SEQ ID NO: 899419 - RNA, 19 nt, Human
ccgccgccgccgccgcugg

SEQ ID NO: 899420 - RNA, 23 nt, Human
ccgccugggcucgcggcacccuc

SEQ ID NO: 899421 - RNA, 22 nt, Human
ccuccgccgccgccgccgccgc

SEQ ID NO: 899422 - RNA, 24 nt, Human
ccuccgccgccgccgccgccgccg

SEQ ID NO: 899423 - RNA, 23 nt, Human
ccugcgccgggggugggggggca

SEQ ID NO: 899424 - RNA, 21 nt, Human
ccugggacuggggcugggggc

SEQ ID NO: 899425 - RNA, 21 nt, Human
cgaagccgggcccagucaguc

SEQ ID NO: 899426 - RNA, 21 nt, Human
cgaggcgcccagugcauccuu

SEQ ID NO: 899427 - RNA, 21 nt, Human
cgccgggggugggggggcacu

SEQ ID NO: 899428 - RNA, 19 nt, Human
cgcggccaggagcgagugc

SEQ ID NO: 899429 - RNA, 22 nt, Human
cgcugggcccgcggccaggagc

SEQ ID NO: 899430 - RNA, 19 nt, Human
cgggggugggggggcacuu

SEQ ID NO: 899431 - RNA, 21 nt, Human
cgucccgggcucauccccucc

SEQ ID NO: 899432 - RNA, 19 nt, Human
cuccguccagccgaagaga

SEQ ID NO: 899433 - RNA, 25 nt, Human
cugcacauacauuuuuccaaucaaa

SEQ ID NO: 899434 - RNA, 20 nt, Human
gagcggcgggaggggggcac

SEQ ID NO: 899435 - RNA, 19 nt, Human
gaggaggcagccuccgucc

SEQ ID NO: 899436 - RNA, 24 nt, Human
gccgacuagcgagucugucagucu

SEQ ID NO: 899437 - RNA, 20 nt, Human
gcgugaggaggcagccuccg

SEQ ID NO: 899438 - RNA, 24 nt, Human
ggagagaagcggggaaaggcucuc

SEQ ID NO: 899439 - RNA, 20 nt, Human
ggcagggguccgcgcgguac

SEQ ID NO: 899440 - RNA, 25 nt, Human
ggcccagucagucuugcccaccugg

SEQ ID NO: 899441 - RNA, 18 nt, Human
gggacuggggcugggggc

SEQ ID NO: 899442 - RNA, 24 nt, Human
gggcacuuagcgcugcuguccgua

SEQ ID NO: 899443 - RNA, 22 nt, Human
ggguguucgccgccugggcucg

SEQ ID NO: 899444 - RNA, 21 nt, Human
gugcacccugcgccgggggug

SEQ ID NO: 899445 - RNA, 22 nt, Human
uaaaaaaaagaaagaaagaaaa

SEQ ID NO: 899446 - RNA, 21 nt, Human
uaacacaacggaaaugggaac

SEQ ID NO: 899447 - RNA, 24 nt, Human
uaaccguguaccucagccuguacc

SEQ ID NO: 899448 - RNA, 21 nt, Human
uagcugauggcacccaagcac

SEQ ID NO: 899449 - RNA, 18 nt, Human
ucacaguagguguucaua

SEQ ID NO: 899450 - RNA, 21 nt, Human
uccccuccgccgccgccgcua

SEQ ID NO: 899451 - RNA, 19 nt, Human
ucgcugcgccagggguacc

SEQ ID NO: 899452 - RNA, 23 nt, Human
ucuaaaaacuuugauuuggaaau

SEQ ID NO: 899453 - RNA, 20 nt, Human
ucuugcccaccugggacugg

SEQ ID NO: 899454 - RNA, 22 nt, Human
ugaguagagcggcgggaggggg

SEQ ID NO: 899455 - RNA, 24 nt, Human
ugaguagagcggcgggaggggggc

SEQ ID NO: 899456 - RNA, 22 nt, Human
ugcgaggcgcccagugcauccu

SEQ ID NO: 899457 - RNA, 20 nt, Human
ugcuguccguacagcauccc

SEQ ID NO: 899458 - RNA, 19 nt, Human
uggcugaguagagcggcgg

SEQ ID NO: 899459 - RNA, 20 nt, Human
uguaacaugcugcacauaca

SEQ ID NO: 899460 - RNA, 21 nt, Human
uucccaugguuuugcuaaccg

SEQ ID NO: 899461 - RNA, 26 nt, Human
uuguuucucaagucgccauuuucaau

SEQ ID NO: 899462 - RNA, 27 nt, Human
aaaaauuaaaaggaaauauucagacaa

SEQ ID NO: 899463 - RNA, 22 nt, Human
aaacaagaaagaaaaaaaagaa

SEQ ID NO: 899464 - RNA, 26 nt, Human
aaacaagaaagaaaaaaaagaagcaa

SEQ ID NO: 899465 - RNA, 22 nt, Human
aaagaaaaaaaagaagcaaaga

SEQ ID NO: 899466 - RNA, 20 nt, Human
aagaaagaaaaaaaagaagc

SEQ ID NO: 899467 - RNA, 23 nt, Human
aagaaagaaaaaaaagaagcaaa

SEQ ID NO: 899468 - RNA, 28 nt, Human
aagaaagaaaaaaaagaagcaaagaaaa

SEQ ID NO: 899469 - RNA, 19 nt, Human
acaagaaagaaaaaaaaga

SEQ ID NO: 899470 - RNA, 21 nt, Human
agaaaaaaaagaagcaaagaa

SEQ ID NO: 899471 - RNA, 25 nt, Human
agaaagaaaaaaaagaagcaaagaa

SEQ ID NO: 899472 - RNA, 24 nt, Human
agcaggacaauaaaaaauacugag

SEQ ID NO: 899473 - RNA, 18 nt, Human
aggaacaaaggacaauag

SEQ ID NO: 899474 - RNA, 20 nt, Human
aggggguggggggguggggg

SEQ ID NO: 899475 - RNA, 18 nt, Human
agucuaaaagcacacuag

SEQ ID NO: 899476 - RNA, 20 nt, Human
aucaauauaauacaugaagg

SEQ ID NO: 899477 - RNA, 20 nt, Human
aucacuguccggugaacugg

SEQ ID NO: 899478 - RNA, 18 nt, Human
augacacuuugauuggau

SEQ ID NO: 899479 - RNA, 24 nt, Human
auugcaauuaaaaaguaguuaacc

SEQ ID NO: 899480 - RNA, 19 nt, Human
caauagccuuaaaaagcag

SEQ ID NO: 899481 - RNA, 18 nt, Human
caggacaauaaaaaauac

SEQ ID NO: 899482 - RNA, 21 nt, Human
caggacaauaaaaaauacuga

SEQ ID NO: 899483 - RNA, 24 nt, Human
caucuggguugcaaaugacacuuu

SEQ ID NO: 899484 - RNA, 19 nt, Human
cggcgucuccggcaagccu

SEQ ID NO: 899485 - RNA, 22 nt, Human
gaugcacaauuaccuagaauug

SEQ ID NO: 899486 - RNA, 18 nt, Human
gcagcgccucauggccaa

SEQ ID NO: 899487 - RNA, 19 nt, Human
gcccuccccacggcgucuc

SEQ ID NO: 899488 - RNA, 22 nt, Human
gcggcggaaagucuaaaagcac

SEQ ID NO: 899489 - RNA, 22 nt, Human
ggaaagucuaaaagcacacuag

SEQ ID NO: 899490 - RNA, 20 nt, Human
gggaagaaaaacaagaaaga

SEQ ID NO: 899491 - RNA, 18 nt, Human
gguggggggguggggggg

SEQ ID NO: 899492 - RNA, 22 nt, Human
gugggggggaagaaaaacaaga

SEQ ID NO: 899493 - RNA, 21 nt, Human
guugcaaaugacacuuugauu

SEQ ID NO: 899494 - RNA, 22 nt, Human
uaaaaaauacugagcauggaau

SEQ ID NO: 899495 - RNA, 20 nt, Human
uaaaagcacacuagcuguag

SEQ ID NO: 899496 - RNA, 23 nt, Human
uacaugaaggaacaaaggacaau

SEQ ID NO: 899497 - RNA, 24 nt, Human
uagcaggacaauaaaaaauacuga

SEQ ID NO: 899498 - RNA, 21 nt, Human
uagccuuaaaaagcagguuuc

SEQ ID NO: 899499 - RNA, 21 nt, Human
uauucagacaauagccaagca

SEQ ID NO: 899500 - RNA, 23 nt, Human
ucugcggcggaaagucuaaaagc

SEQ ID NO: 899501 - RNA, 25 nt, Human
ugaacuggcaaauccaaucaaagca

SEQ ID NO: 899502 - RNA, 21 nt, Human
uguaauguucaaauggcccuc

SEQ ID NO: 899503 - RNA, 20 nt, Human
uucaaauggcccuccccacc

SEQ ID NO: 899504 - RNA, 20 nt, Human
aaaccaggaaaaccuccgcu

SEQ ID NO: 899505 - RNA, 21 nt, Human
accaggaaaaccuccgcugcg

SEQ ID NO: 899506 - RNA, 22 nt, Human
aggaaaaccuccgcugcgucuc

SEQ ID NO: 899507 - RNA, 24 nt, Human
ccccaggggccggaugcccagccc

SEQ ID NO: 899508 - RNA, 19 nt, Human
ccgaaaccaggaaaaccuc

SEQ ID NO: 899509 - RNA, 19 nt, Human
ccgaaaccaggaaaaccuc

SEQ ID NO: 899510 - RNA, 23 nt, Human
ccgaaaccaggaaaaccuccgcu

SEQ ID NO: 899511 - RNA, 18 nt, Human
ccgccgccgcugcucgcc

SEQ ID NO: 899512 - RNA, 19 nt, Human
ccgccgccgcugcucgccg

SEQ ID NO: 899513 - RNA, 19 nt, Human
ccgccgccgcugcucgccg

SEQ ID NO: 899514 - RNA, 18 nt, Human
ccgcgccgccgccgcugc

SEQ ID NO: 899515 - RNA, 18 nt, Human
ccgcgccgccgccgcugc

SEQ ID NO: 899516 - RNA, 22 nt, Human
ccggccgcugggguccgaaacc

SEQ ID NO: 899517 - RNA, 18 nt, Human
cgaaaccaggaaaaccuc

SEQ ID NO: 899518 - RNA, 21 nt, Human
cgccgccgccgcugcucgccg

SEQ ID NO: 899519 - RNA, 18 nt, Human
cuccgcgccgccgccgcu

SEQ ID NO: 899520 - RNA, 19 nt, Human
ggagugagcguuuauuugc

SEQ ID NO: 899521 - RNA, 24 nt, Human
guggccccaggggccggaugccca

SEQ ID NO: 899522 - RNA, 18 nt, Human
uagaauuaaagcaaauac

SEQ ID NO: 899523 - RNA, 22 nt, Human
ucaguaucacaaacacaauauu

SEQ ID NO: 899524 - RNA, 25 nt, Human
uccgcgccgccgccgcugcucgccg

SEQ ID NO: 899525 - RNA, 21 nt, Human
uccuacccacccggcugacaa

SEQ ID NO: 899526 - RNA, 18 nt, Human
ucuccgcgccgccgccgc

SEQ ID NO: 899527 - RNA, 23 nt, Human
ucuccgcgccgccgccgcugcuc

SEQ ID NO: 899528 - RNA, 18 nt, Human
uuccuacccacccggcug

SEQ ID NO: 899529 - RNA, 18 nt, Human
aaaaaacaacucaaggac

SEQ ID NO: 899530 - RNA, 22 nt, Human
aaaaaacaacucaaggacacug

SEQ ID NO: 899531 - RNA, 24 nt, Human
aaaaaagcccugguggugggagua

SEQ ID NO: 899532 - RNA, 22 nt, Human
aaaagccuauacucaggagccc

SEQ ID NO: 899533 - RNA, 23 nt, Human
aaacaacucaaggacacugccca

SEQ ID NO: 899534 - RNA, 21 nt, Human
aaacaagauuaagccagcuua

SEQ ID NO: 899535 - RNA, 22 nt, Human
aaacagaaagccaacagcaggg

SEQ ID NO: 899536 - RNA, 24 nt, Human
aaacagaaagccaacagcagggaa

SEQ ID NO: 899537 - RNA, 22 nt, Human
aaagaaaauacacaagucuuaa

SEQ ID NO: 899538 - RNA, 23 nt, Human
aaaugccagaauaacacuaagcu

SEQ ID NO: 899539 - RNA, 20 nt, Human
aagaaagaaaauacacaagu

SEQ ID NO: 899540 - RNA, 24 nt, Human
aagaaagaaaauacacaagucuua

SEQ ID NO: 899541 - RNA, 24 nt, Human
aagcccagguaagagugucaaaaa

SEQ ID NO: 899542 - RNA, 18 nt, Human
aaguauccagucccuaag

SEQ ID NO: 899543 - RNA, 19 nt, Human
aauaggcaacccucacccu

SEQ ID NO: 899544 - RNA, 22 nt, Human
acacagagaagcccagguaaga

SEQ ID NO: 899545 - RNA, 23 nt, Human
acagcgaggagcccucucgucug

SEQ ID NO: 899546 - RNA, 19 nt, Human
acaggaagcaaagaaagaa

SEQ ID NO: 899547 - RNA, 23 nt, Human
acccaaucuagaucucucccccu

SEQ ID NO: 899548 - RNA, 22 nt, Human
acccugagccccucaguguccu

SEQ ID NO: 899549 - RNA, 22 nt, Human
accuuggggccugggccugcag

SEQ ID NO: 899550 - RNA, 18 nt, Human
acuuccccucuuccccca

SEQ ID NO: 899551 - RNA, 27 nt, Human
agaaagccaacagcagggaaaccugag

SEQ ID NO: 899552 - RNA, 21 nt, Human
agacagucccucccccucuag

SEQ ID NO: 899553 - RNA, 20 nt, Human
agauggaugagugggugggu

SEQ ID NO: 899554 - RNA, 22 nt, Human
agcaaagaaagaaaauacacaa

SEQ ID NO: 899555 - RNA, 23 nt, Human
agccaggagcaagaacuccuggc

SEQ ID NO: 899556 - RNA, 24 nt, Human
agccaggagcaagaacuccuggca

SEQ ID NO: 899557 - RNA, 18 nt, Human
aggcaacccucacccuga

SEQ ID NO: 899558 - RNA, 22 nt, Human
aggcaucccccaaaaaagcccu

SEQ ID NO: 899559 - RNA, 20 nt, Human
aguguccuucccuagacagc

SEQ ID NO: 899560 - RNA, 24 nt, Human
auggaaaacaauuucaacgaguca

SEQ ID NO: 899561 - RNA, 21 nt, Human
caaaaaacaacucaaggacac

SEQ ID NO: 899562 - RNA, 23 nt, Human
caacccucacccugagccccuca

SEQ ID NO: 899563 - RNA, 20 nt, Human
caagaaggagaccuuggggc

SEQ ID NO: 899564 - RNA, 24 nt, Human
caauaggcaacccucacccugagc

SEQ ID NO: 899565 - RNA, 18 nt, Human
cacaguaacacaacacac

SEQ ID NO: 899566 - RNA, 18 nt, Human
caccgccgccgccgccgc

SEQ ID NO: 899567 - RNA, 18 nt, Human
cacuucuacacucccagc

SEQ ID NO: 899568 - RNA, 24 nt, Human
cagagcagagucucagacacuacu

SEQ ID NO: 899569 - RNA, 19 nt, Human
cagcagggaaaccugagcc

SEQ ID NO: 899570 - RNA, 22 nt, Human
caggcaucccccaaaaaagccc

SEQ ID NO: 899571 - RNA, 20 nt, Human
ccaaaaaagcccugguggug

SEQ ID NO: 899572 - RNA, 26 nt, Human
ccaaaugccagaauaacacuaagcug

SEQ ID NO: 899573 - RNA, 22 nt, Human
ccaacugacccuucccggccgu

SEQ ID NO: 899574 - RNA, 22 nt, Human
ccagcuuaaccaaaugccagaa

SEQ ID NO: 899575 - RNA, 22 nt, Human
ccaggccagacgcaaaugcaca

SEQ ID NO: 899576 - RNA, 18 nt, Human
cccagacagucccucccc

SEQ ID NO: 899577 - RNA, 18 nt, Human
cccccaaaaaagcccugg

SEQ ID NO: 899578 - RNA, 19 nt, Human
cccccucuaggcaaugucc

SEQ ID NO: 899579 - RNA, 19 nt, Human
cccccucuaggcaaugucc

SEQ ID NO: 899580 - RNA, 23 nt, Human
ccccgucccccucacccaaucua

SEQ ID NO: 899581 - RNA, 23 nt, Human
ccccugaacccagacagucccuc

SEQ ID NO: 899582 - RNA, 20 nt, Human
cccugaacccagacaguccc

SEQ ID NO: 899583 - RNA, 18 nt, Human
ccgccgccgccgccgccg

SEQ ID NO: 899584 - RNA, 18 nt, Human
ccgccgccgccgccgccg

SEQ ID NO: 899585 - RNA, 22 nt, Human
ccucuaggcaauguccuccccu

SEQ ID NO: 899586 - RNA, 22 nt, Human
cgaggagcccucucgucugucc

SEQ ID NO: 899587 - RNA, 20 nt, Human
cggcucugcucagggugggg

SEQ ID NO: 899588 - RNA, 23 nt, Human
cgggccgagcgccuccuuuugcc

SEQ ID NO: 899589 - RNA, 20 nt, Human
cgucugucccagggcugccu

SEQ ID NO: 899590 - RNA, 22 nt, Human
cuaaugccaguucauaaacauc

SEQ ID NO: 899591 - RNA, 22 nt, Human
cuccaggccaugccccugaacc

SEQ ID NO: 899592 - RNA, 21 nt, Human
cucccccucuaggcaaugucc

SEQ ID NO: 899593 - RNA, 19 nt, Human
gaaaacaguuaagggcagg

SEQ ID NO: 899594 - RNA, 20 nt, Human
gaaccugguggggaggcagc

SEQ ID NO: 899595 - RNA, 18 nt, Human
gacaggaagcaaagaaag

SEQ ID NO: 899596 - RNA, 19 nt, Human
gagcaagaacuccuggcag

SEQ ID NO: 899597 - RNA, 22 nt, Human
gccccugaacccagacaguccc

SEQ ID NO: 899598 - RNA, 18 nt, Human
gcccuccaggccaugccc

SEQ ID NO: 899599 - RNA, 23 nt, Human
gccgucaccgccgccgccgccgg

SEQ ID NO: 899600 - RNA, 20 nt, Human
gccuccaacugacccuuccc

SEQ ID NO: 899601 - RNA, 21 nt, Human
gcgcuacccuaggcccugcag

SEQ ID NO: 899602 - RNA, 19 nt, Human
ggagaccuuggggccuggg

SEQ ID NO: 899603 - RNA, 21 nt, Human
ggccaugccccugaacccaga

SEQ ID NO: 899604 - RNA, 23 nt, Human
ggccugggccugcagccaggagc

SEQ ID NO: 899605 - RNA, 22 nt, Human
ggugacaggaagcaaagaaaga

SEQ ID NO: 899606 - RNA, 22 nt, Human
ggugacaggaagcaaagaaaga

SEQ ID NO: 899607 - RNA, 24 nt, Human
guggcucuuggguaaagcaucccc

SEQ ID NO: 899608 - RNA, 20 nt, Human
uaaaggcccaggcauccccc

SEQ ID NO: 899609 - RNA, 22 nt, Human
uaacacaacacacuugccuccc

SEQ ID NO: 899610 - RNA, 20 nt, Human
uaaccaaaacagaaagccaa

SEQ ID NO: 899611 - RNA, 24 nt, Human
uaauaaccaaaacagaaagccaac

SEQ ID NO: 899612 - RNA, 20 nt, Human
uacccuaggcccugcagagc

SEQ ID NO: 899613 - RNA, 18 nt, Human
uacugauaacauuaaaca

SEQ ID NO: 899614 - RNA, 19 nt, Human
uagaaaaagcuguuuagug

SEQ ID NO: 899615 - RNA, 24 nt, Human
uaggcaacccucacccugagcccc

SEQ ID NO: 899616 - RNA, 30 nt, Human
uauacuguucuuuauggaaaacaauuucaa

SEQ ID NO: 899617 - RNA, 21 nt, Human
ucaaaaaacaacucaaggaca

SEQ ID NO: 899618 - RNA, 22 nt, Human
ucacccugagccccucaguguc

SEQ ID NO: 899619 - RNA, 24 nt, Human
ucaccgccgccgccgccgccgccg

SEQ ID NO: 899620 - RNA, 23 nt, Human
ucagccagccagaaguauccagu

SEQ ID NO: 899621 - RNA, 19 nt, Human
uccagucccuaagaacgga

SEQ ID NO: 899622 - RNA, 19 nt, Human
ucccagcgcuacccuaggc

SEQ ID NO: 899623 - RNA, 22 nt, Human
ucccagcgcuacccuaggcccu

SEQ ID NO: 899624 - RNA, 19 nt, Human
ucccagggcugccuaacuu

SEQ ID NO: 899625 - RNA, 21 nt, Human
uccccuaggcuagauagaaca

SEQ ID NO: 899626 - RNA, 22 nt, Human
ucccuaagaacggauugcccca

SEQ ID NO: 899627 - RNA, 18 nt, Human
ugaaaacaguuaagggca

SEQ ID NO: 899628 - RNA, 22 nt, Human
ugacaggaagcaaagaaagaaa

SEQ ID NO: 899629 - RNA, 19 nt, Human
ugagugggugggugugggg

SEQ ID NO: 899630 - RNA, 19 nt, Human
ugccccacaauucccaggc

SEQ ID NO: 899631 - RNA, 18 nt, Human
ugccccugaacccagaca

SEQ ID NO: 899632 - RNA, 22 nt, Human
ugccccugaacccagacagucc

SEQ ID NO: 899633 - RNA, 23 nt, Human
ugccucccugacauccccguccc

SEQ ID NO: 899634 - RNA, 23 nt, Human
uggaaaacaauuucaacgaguca

SEQ ID NO: 899635 - RNA, 24 nt, Human
uggauagauggaugaguggguggg

SEQ ID NO: 899636 - RNA, 19 nt, Human
ugggaggaggcggcgcagg

SEQ ID NO: 899637 - RNA, 22 nt, Human
ugggaggaggcggcgcagggag

SEQ ID NO: 899638 - RNA, 22 nt, Human
ugggaguaaauuucaaugcccc

SEQ ID NO: 899639 - RNA, 21 nt, Human
ugucaggccgcgggccgagcg

SEQ ID NO: 899640 - RNA, 23 nt, Human
uuaaccaaaugccagaauaacac

SEQ ID NO: 899641 - RNA, 23 nt, Human
uuacugcuguuugugaccccaag

SEQ ID NO: 899642 - RNA, 19 nt, Human
uucccggccgucaccgccg

SEQ ID NO: 899643 - RNA, 21 nt, Human
uugcuauauauuccucuuccu

SEQ ID NO: 899644 - RNA, 20 nt, Human
accucuuacaaggcaguuuu

SEQ ID NO: 899645 - RNA, 19 nt, Human
agacagaggggcgacaccu

SEQ ID NO: 899646 - RNA, 20 nt, Human
ccucaaagcguuggaauaag

SEQ ID NO: 899647 - RNA, 21 nt, Human
cuguggcaaagugaaguucac

SEQ ID NO: 899648 - RNA, 18 nt, Human
gcaguuuuucaguucagu

SEQ ID NO: 899649 - RNA, 23 nt, Human
ucacagguggguggcagagguuu

SEQ ID NO: 899650 - RNA, 19 nt, Human
ucccggagagugauccggu

SEQ ID NO: 899651 - RNA, 20 nt, Human
ucccuguggcaaagugaagu

SEQ ID NO: 899652 - RNA, 22 nt, Human
uccugaaucacaucccgggccc

SEQ ID NO: 899653 - RNA, 23 nt, Human
uccugaaucacaucccgggcccc

SEQ ID NO: 899654 - RNA, 20 nt, Human
ugucaaggcuuccagccccu

SEQ ID NO: 899655 - RNA, 20 nt, Human
aaaaaacaguaaaaucuaca

SEQ ID NO: 899656 - RNA, 24 nt, Human
aaaacccuucaaaacaguccauau

SEQ ID NO: 899657 - RNA, 18 nt, Human
aaacugauacaucucuca

SEQ ID NO: 899658 - RNA, 23 nt, Human
aaagacaagagacgggccaccaa

SEQ ID NO: 899659 - RNA, 21 nt, Human
aaaggaugagaagaggcagag

SEQ ID NO: 899660 - RNA, 19 nt, Human
aaauuauuuuuccacacug

SEQ ID NO: 899661 - RNA, 23 nt, Human
aagccgaaagucauaaaccagga

SEQ ID NO: 899662 - RNA, 18 nt, Human
aagcgcggcaccgacacc

SEQ ID NO: 899663 - RNA, 24 nt, Human
aaggagaaauagaacagcgcaggc

SEQ ID NO: 899664 - RNA, 23 nt, Human
aaugaaaaaugcaccgagccaaa

SEQ ID NO: 899665 - RNA, 21 nt, Human
acaaagccgaaagucauaaac

SEQ ID NO: 899666 - RNA, 20 nt, Human
acacugcagagcagcagagc

SEQ ID NO: 899667 - RNA, 22 nt, Human
accuccauggacaaguugggag

SEQ ID NO: 899668 - RNA, 25 nt, Human
agaaacugauacaucucucaaauaa

SEQ ID NO: 899669 - RNA, 20 nt, Human
agaagaaaggcgcgggcugg

SEQ ID NO: 899670 - RNA, 26 nt, Human
agacaagagacgggccaccaagccua

SEQ ID NO: 899671 - RNA, 23 nt, Human
agacaagagacgggccaccaagg

SEQ ID NO: 899672 - RNA, 20 nt, Human
agagcagcagagcgagaaag

SEQ ID NO: 899673 - RNA, 18 nt, Human
agcagcagagcgagaaag

SEQ ID NO: 899674 - RNA, 19 nt, Human
aggcaaaagaagaaaggcg

SEQ ID NO: 899675 - RNA, 23 nt, Human
aggcaaaagaagaaaggcgcggg

SEQ ID NO: 899676 - RNA, 18 nt, Human
agucauaaaccaggaaag

SEQ ID NO: 899677 - RNA, 19 nt, Human
augcaccgagccaaacaaa

SEQ ID NO: 899678 - RNA, 18 nt, Human
caaaguuuuagccugaaa

SEQ ID NO: 899679 - RNA, 20 nt, Human
caagauaauucuggcagcaa

SEQ ID NO: 899680 - RNA, 20 nt, Human
caagcuuaaccugcaacuuc

SEQ ID NO: 899681 - RNA, 24 nt, Human
cacaaagccgaaagucauaaacca

SEQ ID NO: 899682 - RNA, 19 nt, Human
cacauucuaaauacacuaa

SEQ ID NO: 899683 - RNA, 19 nt, Human
cacugcagagcagcagagc

SEQ ID NO: 899684 - RNA, 21 nt, Human
cagcaacagcccacuugacac

SEQ ID NO: 899685 - RNA, 22 nt, Human
cagcaacagcccacuugacacc

SEQ ID NO: 899686 - RNA, 19 nt, Human
cagcaguggcggcggcggc

SEQ ID NO: 899687 - RNA, 24 nt, Human
cagcccacuugacaccaagcugga

SEQ ID NO: 899688 - RNA, 19 nt, Human
cauaaaccaggaaagacaa

SEQ ID NO: 899689 - RNA, 23 nt, Human
ccaccaagccuaugucugggucc

SEQ ID NO: 899690 - RNA, 26 nt, Human
ccacuaagucauccauuuuguugcau

SEQ ID NO: 899691 - RNA, 19 nt, Human
ccgagccaaacaaaacuua

SEQ ID NO: 899692 - RNA, 22 nt, Human
ccuccauggacaaguugggaga

SEQ ID NO: 899693 - RNA, 22 nt, Human
cgagaaaggaugagaagaggca

SEQ ID NO: 899694 - RNA, 23 nt, Human
cgagccaaacaaaacuuaacugg

SEQ ID NO: 899695 - RNA, 18 nt, Human
cguugaagucgaacugcu

SEQ ID NO: 899696 - RNA, 19 nt, Human
cuagcuagccccuuuccca

SEQ ID NO: 899697 - RNA, 25 nt, Human
cuauacagcacuucuccuaggcccu

SEQ ID NO: 899698 - RNA, 19 nt, Human
cucuauacagcacuucucc

SEQ ID NO: 899699 - RNA, 20 nt, Human
cugggugaaagacaugaacu

SEQ ID NO: 899700 - RNA, 22 nt, Human
cugggugggaagaggauucgga

SEQ ID NO: 899701 - RNA, 22 nt, Human
cuugacaccaagcuggaugaau

SEQ ID NO: 899702 - RNA, 18 nt, Human
gaaagacaagagacgggc

SEQ ID NO: 899703 - RNA, 18 nt, Human
gaaggagaaauagaacag

SEQ ID NO: 899704 - RNA, 22 nt, Human
gacggcagaagaaaaaaggaaa

SEQ ID NO: 899705 - RNA, 21 nt, Human
gagcagcagagcgagaaagga

SEQ ID NO: 899706 - RNA, 24 nt, Human
gaggcagagaaggcgacggcagaa

SEQ ID NO: 899707 - RNA, 20 nt, Human
gcugcgggaacgacuugggg

SEQ ID NO: 899708 - RNA, 21 nt, Human
ggccugggccauaggcugcgg

SEQ ID NO: 899709 - RNA, 19 nt, Human
ggcgacggcagaagaaaaa

SEQ ID NO: 899710 - RNA, 21 nt, Human
gggcugggugggaagaggauu

SEQ ID NO: 899711 - RNA, 21 nt, Human
uaaaccaggaaagacaagaga

SEQ ID NO: 899712 - RNA, 26 nt, Human
uaaagaaaaaaacccuucaaaacagu

SEQ ID NO: 899713 - RNA, 22 nt, Human
uaaaugaaaaaugcaccgagcc

SEQ ID NO: 899714 - RNA, 23 nt, Human
uaacugggcuauaaagaaaaaaa

SEQ ID NO: 899715 - RNA, 21 nt, Human
uaaugggcuuccaucuccacu

SEQ ID NO: 899716 - RNA, 20 nt, Human
uacaagacuuuaaacacaaa

SEQ ID NO: 899717 - RNA, 19 nt, Human
uagaacagcgcaggcaaaa

SEQ ID NO: 899718 - RNA, 21 nt, Human
uagaacagcgcaggcaaaaga

SEQ ID NO: 899719 - RNA, 20 nt, Human
uagccugaaaaaacaguaaa

SEQ ID NO: 899720 - RNA, 24 nt, Human
uagcuagccccuuucccaaaguuu

SEQ ID NO: 899721 - RNA, 19 nt, Human
uaggucaacaaauacuaug

SEQ ID NO: 899722 - RNA, 20 nt, Human
uauacagcacuucuccuagg

SEQ ID NO: 899723 - RNA, 23 nt, Human
ucaaauaaucacaagauaauucu

SEQ ID NO: 899724 - RNA, 23 nt, Human
ucacacugcagagcagcagagcg

SEQ ID NO: 899725 - RNA, 24 nt, Human
ucagaagaaacugauacaucucuc

SEQ ID NO: 899726 - RNA, 22 nt, Human
ucauacaaggguuacauuaggu

SEQ ID NO: 899727 - RNA, 23 nt, Human
uccacaaagccgaaagucauaaa

SEQ ID NO: 899728 - RNA, 23 nt, Human
uccacacuggaauguugaccaga

SEQ ID NO: 899729 - RNA, 25 nt, Human
uccccaaugaauuauagaugaaagc

SEQ ID NO: 899730 - RNA, 24 nt, Human
ucuaaaucucccauuauccccaau

SEQ ID NO: 899731 - RNA, 25 nt, Human
ucuccuaggcccucuggguaguugu

SEQ ID NO: 899732 - RNA, 19 nt, Human
ucucuauacagcacuucuc

SEQ ID NO: 899733 - RNA, 25 nt, Human
ugaaaaaacaguaaaaucuacacaa

SEQ ID NO: 899734 - RNA, 21 nt, Human
ugaauuauagaugaaagcuga

SEQ ID NO: 899735 - RNA, 20 nt, Human
ugagaagaggcagagaaggc

SEQ ID NO: 899736 - RNA, 21 nt, Human
ugagaagaggcagagaaggcg

SEQ ID NO: 899737 - RNA, 23 nt, Human
ugagaagaggcagagaaggcgac

SEQ ID NO: 899738 - RNA, 19 nt, Human
ugagauaacggcccaaaga

SEQ ID NO: 899739 - RNA, 22 nt, Human
ugagauaacggcccaaagaguc

SEQ ID NO: 899740 - RNA, 20 nt, Human
ugagcagaaauacccaaggc

SEQ ID NO: 899741 - RNA, 18 nt, Human
ugcaacaaacugcuacaa

SEQ ID NO: 899742 - RNA, 22 nt, Human
ugggaagaggauucggacucgu

SEQ ID NO: 899743 - RNA, 20 nt, Human
uguugccaaaagaauuaaga

SEQ ID NO: 899744 - RNA, 18 nt, Human
uucuggcagcaacagccc

SEQ ID NO: 899745 - RNA, 19 nt, Human
agcaucagggcugugcgcc

SEQ ID NO: 899746 - RNA, 19 nt, Human
aggggcgccagcccagggc

SEQ ID NO: 899747 - RNA, 18 nt, Human
caccacaguggaaggucu

SEQ ID NO: 899748 - RNA, 20 nt, Human
caccacaguggaaggucucc

SEQ ID NO: 899749 - RNA, 21 nt, Human
caccacaguggugauggucuc

SEQ ID NO: 899750 - RNA, 20 nt, Human
cacccugcgggcccaucuuc

SEQ ID NO: 899751 - RNA, 18 nt, Human
cacgcacuagcccgcgcg

SEQ ID NO: 899752 - RNA, 18 nt, Human
cacgcugagcagcacagg

SEQ ID NO: 899753 - RNA, 19 nt, Human
cacugcagccacgagcugc

SEQ ID NO: 899754 - RNA, 21 nt, Human
cagcucacacucguagagccc

SEQ ID NO: 899755 - RNA, 19 nt, Human
cagugugggcaccacgggc

SEQ ID NO: 899756 - RNA, 21 nt, Human
ccacacugccucuggcaucca

SEQ ID NO: 899757 - RNA, 22 nt, Human
ccacacugccucuggcauccac

SEQ ID NO: 899758 - RNA, 22 nt, Human
ccacaguggaaggucuccccuu

SEQ ID NO: 899759 - RNA, 22 nt, Human
ccaccgugggcuccccgaucuc

SEQ ID NO: 899760 - RNA, 19 nt, Human
ccagcaccuggcagguaca

SEQ ID NO: 899761 - RNA, 20 nt, Human
ccaggcugcccaugccagaa

SEQ ID NO: 899762 - RNA, 24 nt, Human
cccaagccaccauggcagcagcau

SEQ ID NO: 899763 - RNA, 18 nt, Human
cccacagccgagcggggc

SEQ ID NO: 899764 - RNA, 19 nt, Human
cccaucuucuucacccgga

SEQ ID NO: 899765 - RNA, 23 nt, Human
cccccucuuccucucccgccucc

SEQ ID NO: 899766 - RNA, 21 nt, Human
cccugcgggcccaucuucuuc

SEQ ID NO: 899767 - RNA, 19 nt, Human
ccgucucccccacuguccc

SEQ ID NO: 899768 - RNA, 18 nt, Human
ccgucuucccccucuucc

SEQ ID NO: 899769 - RNA, 20 nt, Human
ccucaggaggacccagggcu

SEQ ID NO: 899770 - RNA, 23 nt, Human
ccucaggaggacccagggcugcu

SEQ ID NO: 899771 - RNA, 20 nt, Human
ccuccacccacuugggcugg

SEQ ID NO: 899772 - RNA, 23 nt, Human
ccuccaccuccacccacuugggc

SEQ ID NO: 899773 - RNA, 21 nt, Human
ccugcagcauggggcucugaa

SEQ ID NO: 899774 - RNA, 19 nt, Human
ccuggccucagcgggcugg

SEQ ID NO: 899775 - RNA, 25 nt, Human
ccugugacacugcuccugggccugc

SEQ ID NO: 899776 - RNA, 19 nt, Human
cgcugccccaagccaccau

SEQ ID NO: 899777 - RNA, 21 nt, Human
cggggcuggccagcaccuggc

SEQ ID NO: 899778 - RNA, 18 nt, Human
cuccaggcugcccaugcc

SEQ ID NO: 899779 - RNA, 20 nt, Human
cuccgucuucccccucuucc

SEQ ID NO: 899780 - RNA, 23 nt, Human
cuccgucuucccccucuuccucu

SEQ ID NO: 899781 - RNA, 23 nt, Human
cucucuggaucaccgagaccucg

SEQ ID NO: 899782 - RNA, 23 nt, Human
cugcagccacgagcugcucccug

SEQ ID NO: 899783 - RNA, 20 nt, Human
gacccagugcaugccccacg

SEQ ID NO: 899784 - RNA, 20 nt, Human
gagcagcgggaaggugagcg

SEQ ID NO: 899785 - RNA, 22 nt, Human
gagccccagguccuccuugcug

SEQ ID NO: 899786 - RNA, 25 nt, Human
gagccccagguccuccuugcuggcc

SEQ ID NO: 899787 - RNA, 20 nt, Human
gaucaccagcacuagcaggc

SEQ ID NO: 899788 - RNA, 18 nt, Human
gcaccgggcagugugaag

SEQ ID NO: 899789 - RNA, 21 nt, Human
gcagagcagcgggaaggugag

SEQ ID NO: 899790 - RNA, 21 nt, Human
gcagcagcaucagggcugugc

SEQ ID NO: 899791 - RNA, 19 nt, Human
gcagccacgagcugcuccc

SEQ ID NO: 899792 - RNA, 22 nt, Human
gccccaagccaccauggcagca

SEQ ID NO: 899793 - RNA, 29 nt, Human
gccuccuccauggugcccuccuccuccaa

SEQ ID NO: 899794 - RNA, 21 nt, Human
gcgcagucacgcacuagcccg

SEQ ID NO: 899795 - RNA, 23 nt, Human
gcucuggguggaaagcucugugg

SEQ ID NO: 899796 - RNA, 21 nt, Human
ggagagugggccucggccucc

SEQ ID NO: 899797 - RNA, 27 nt, Human
ggagggggacuugcugggggggauccc

SEQ ID NO: 899798 - RNA, 22 nt, Human
ggcagguacagcaggucggggg

SEQ ID NO: 899799 - RNA, 18 nt, Human
ggcagugugaagagaugc

SEQ ID NO: 899800 - RNA, 20 nt, Human
gggcagagcuggagaguggg

SEQ ID NO: 899801 - RNA, 24 nt, Human
gggccucaggaggacccagggcug

SEQ ID NO: 899802 - RNA, 21 nt, Human
gggucccuccgggauccgcac

SEQ ID NO: 899803 - RNA, 20 nt, Human
gguacagcaggucgggggcc

SEQ ID NO: 899804 - RNA, 20 nt, Human
ggugaccgucucccccacug

SEQ ID NO: 899805 - RNA, 18 nt, Human
gugaagcugcucuggcca

SEQ ID NO: 899806 - RNA, 21 nt, Human
guggcggcggggaccucucuc

SEQ ID NO: 899807 - RNA, 21 nt, Human
guggugggagacacacccugc

SEQ ID NO: 899808 - RNA, 19 nt, Human
uacagugugggcaccacgg

SEQ ID NO: 899809 - RNA, 23 nt, Human
uagucucuugcucagugacuucc

SEQ ID NO: 899810 - RNA, 20 nt, Human
uaugaugacgguuuucuugg

SEQ ID NO: 899811 - RNA, 18 nt, Human
ucaccgagaccucgcagg

SEQ ID NO: 899812 - RNA, 18 nt, Human
ucagugacuuccacugca

SEQ ID NO: 899813 - RNA, 22 nt, Human
ucagugacuuccacugcagcca

SEQ ID NO: 899814 - RNA, 24 nt, Human
ucagugacuuccacugcagccacg

SEQ ID NO: 899815 - RNA, 22 nt, Human
uccaggcugcccaugccagaag

SEQ ID NO: 899816 - RNA, 21 nt, Human
uccccaggcacguaaucuucc

SEQ ID NO: 899817 - RNA, 22 nt, Human
uccccaggcacguaaucuucca

SEQ ID NO: 899818 - RNA, 22 nt, Human
ucccugugacacugcuccuggg

SEQ ID NO: 899819 - RNA, 25 nt, Human
ucccugugacacugcuccugggccu

SEQ ID NO: 899820 - RNA, 23 nt, Human
uccgcaccgggcagugugaagag

SEQ ID NO: 899821 - RNA, 19 nt, Human
uccgcagaacgccggaugc

SEQ ID NO: 899822 - RNA, 20 nt, Human
uccgggcagagcuggagagu

SEQ ID NO: 899823 - RNA, 20 nt, Human
uccuaggcccaaggacacuc

SEQ ID NO: 899824 - RNA, 24 nt, Human
uccugggccugcagcauggggcuc

SEQ ID NO: 899825 - RNA, 20 nt, Human
ucucuggaucaccgagaccu

SEQ ID NO: 899826 - RNA, 22 nt, Human
ucuguggugaagcugcucuggc

SEQ ID NO: 899827 - RNA, 23 nt, Human
ugaggcgggcacguccuaggccc

SEQ ID NO: 899828 - RNA, 25 nt, Human
ugccccaagccaccauggcagcagc

SEQ ID NO: 899829 - RNA, 24 nt, Human
ugcccuccuccuccaggcugccca

SEQ ID NO: 899830 - RNA, 24 nt, Human
ugccugggcccaggccuccugggc

SEQ ID NO: 899831 - RNA, 18 nt, Human
ugcgggcccaucuucuuc

SEQ ID NO: 899832 - RNA, 19 nt, Human
ugcucagugacuuccacug

SEQ ID NO: 899833 - RNA, 23 nt, Human
uggaaagcucuguggugaagcug

SEQ ID NO: 899834 - RNA, 24 nt, Human
uggccugguucugccuccggcugc

SEQ ID NO: 899835 - RNA, 19 nt, Human
ugggccugcagcauggggc

SEQ ID NO: 899836 - RNA, 19 nt, Human
ugggcuggggccccgagag

SEQ ID NO: 899837 - RNA, 21 nt, Human
uggggucacgauccccaaggc

SEQ ID NO: 899838 - RNA, 19 nt, Human
uggugaagcugcucuggcc

SEQ ID NO: 899839 - RNA, 22 nt, Human
uguccugggacuccuccgucac

SEQ ID NO: 899840 - RNA, 19 nt, Human
ugucugggcagaugugaag

SEQ ID NO: 899841 - RNA, 20 nt, Human
uguguccugggacuccuccg

SEQ ID NO: 899842 - RNA, 20 nt, Human
uguguguguccugggacucc

SEQ ID NO: 899843 - RNA, 22 nt, Human
uucaauggucuccuccaccucc

SEQ ID NO: 899844 - RNA, 24 nt, Human
uucaauggucuccuccaccuccac

SEQ ID NO: 899845 - RNA, 18 nt, Human
uucccccucuuccucucc

SEQ ID NO: 899846 - RNA, 23 nt, Human
aaaaucacccccugcagaagcuu

SEQ ID NO: 899847 - RNA, 23 nt, Human
aagccugcuuccuuccucuucug

SEQ ID NO: 899848 - RNA, 21 nt, Human
aagcgguagacgccccgaagc

SEQ ID NO: 899849 - RNA, 23 nt, Human
aaggaacaaaaggaaacuaggca

SEQ ID NO: 899850 - RNA, 22 nt, Human
aaggagggggcgucuggggccc

SEQ ID NO: 899851 - RNA, 21 nt, Human
aagugcccaucugaaucaaac

SEQ ID NO: 899852 - RNA, 19 nt, Human
aaguuccuggccagccaaa

SEQ ID NO: 899853 - RNA, 23 nt, Human
acccccugcagaagcuugggaac

SEQ ID NO: 899854 - RNA, 21 nt, Human
acugagugcaaggauagcugg

SEQ ID NO: 899855 - RNA, 20 nt, Human
agaaagggguguccuuggga

SEQ ID NO: 899856 - RNA, 20 nt, Human
agaccccuuuccucccacuc

SEQ ID NO: 899857 - RNA, 22 nt, Human
agacgacagguggcauuagaac

SEQ ID NO: 899858 - RNA, 21 nt, Human
agagacaggaauuccugagca

SEQ ID NO: 899859 - RNA, 21 nt, Human
agaggaggaggagcaggugga

SEQ ID NO: 899860 - RNA, 30 nt, Human
agaggaggaggagcagguggagaaaggggu

SEQ ID NO: 899861 - RNA, 24 nt, Human
agcaagaaaggagggggcgucugg

SEQ ID NO: 899862 - RNA, 20 nt, Human
agccagcagcgcucaccggg

SEQ ID NO: 899863 - RNA, 19 nt, Human
agccauaguggaaagcuuc

SEQ ID NO: 899864 - RNA, 23 nt, Human
agccugucugcugaccagagaau

SEQ ID NO: 899865 - RNA, 21 nt, Human
aggaacaaaaggaaacuaggc

SEQ ID NO: 899866 - RNA, 18 nt, Human
aggaaccguaucggcguc

SEQ ID NO: 899867 - RNA, 20 nt, Human
aggcagcaagaaaggagggg

SEQ ID NO: 899868 - RNA, 18 nt, Human
aggcagcccccucugagu

SEQ ID NO: 899869 - RNA, 24 nt, Human
aggcagggaaggggaagaaaagug

SEQ ID NO: 899870 - RNA, 21 nt, Human
aggcguugcuguccucugcuu

SEQ ID NO: 899871 - RNA, 23 nt, Human
aggcuggaaccgccggcagcagc

SEQ ID NO: 899872 - RNA, 18 nt, Human
agggcacaucuuguggug

SEQ ID NO: 899873 - RNA, 19 nt, Human
agggggaggcuagccuugu

SEQ ID NO: 899874 - RNA, 25 nt, Human
aggugccaugaggucaaugucacuu

SEQ ID NO: 899875 - RNA, 23 nt, Human
agguuccgagucagaggaggagg

SEQ ID NO: 899876 - RNA, 22 nt, Human
aguuccuggccagccaaacucc

SEQ ID NO: 899877 - RNA, 24 nt, Human
auaguggaaagcuucgcaugggcc

SEQ ID NO: 899878 - RNA, 20 nt, Human
caagagcaaaaaucaccccc

SEQ ID NO: 899879 - RNA, 19 nt, Human
caaggaacaaaaggaaacu

SEQ ID NO: 899880 - RNA, 18 nt, Human
caaguuccuggccagcca

SEQ ID NO: 899881 - RNA, 24 nt, Human
caccccaaaacagcuucccuucuu

SEQ ID NO: 899882 - RNA, 22 nt, Human
cacgccuuggggccaaagcccc

SEQ ID NO: 899883 - RNA, 19 nt, Human
cacugccccugcuccaggc

SEQ ID NO: 899884 - RNA, 21 nt, Human
cacuguuauuucucaggacaa

SEQ ID NO: 899885 - RNA, 19 nt, Human
cagcaaggaguguucggga

SEQ ID NO: 899886 - RNA, 27 nt, Human
cagcccccucugaguuugcaggcugga

SEQ ID NO: 899887 - RNA, 19 nt, Human
cagcuucuaagcaugcccu

SEQ ID NO: 899888 - RNA, 24 nt, Human
ccaucugaaucaaacuucagcugc

SEQ ID NO: 899889 - RNA, 20 nt, Human
ccccaaaacagcuucccuuc

SEQ ID NO: 899890 - RNA, 23 nt, Human
ccccacaccccaaaacagcuucc

SEQ ID NO: 899891 - RNA, 18 nt, Human
ccccaggucgguucuccu

SEQ ID NO: 899892 - RNA, 28 nt, Human
cccccucaucauugccaccucuucucca

SEQ ID NO: 899893 - RNA, 24 nt, Human
cccccucugaguuugcaggcugga

SEQ ID NO: 899894 - RNA, 21 nt, Human
ccccucucugagcugcgccac

SEQ ID NO: 899895 - RNA, 21 nt, Human
ccccugcagaagcuugggaac

SEQ ID NO: 899896 - RNA, 20 nt, Human
ccccuuuccucccacucaca

SEQ ID NO: 899897 - RNA, 25 nt, Human
cccgcagcaaagagucccaaauuua

SEQ ID NO: 899898 - RNA, 20 nt, Human
cccuuugggugccuccgcuu

SEQ ID NO: 899899 - RNA, 20 nt, Human
ccgggccgggucggaaacgc

SEQ ID NO: 899900 - RNA, 21 nt, Human
ccgucaggccccucacccggu

SEQ ID NO: 899901 - RNA, 21 nt, Human
ccuccuugcagauccucacug

SEQ ID NO: 899902 - RNA, 30 nt, Human
ccucgccgccucuugcgggcgugcgccugg

SEQ ID NO: 899903 - RNA, 24 nt, Human
ccugcauguguggucuuccuugag

SEQ ID NO: 899904 - RNA, 22 nt, Human
ccugcuggggacuggauccagg

SEQ ID NO: 899905 - RNA, 19 nt, Human
ccugcuuccuuccucuucu

SEQ ID NO: 899906 - RNA, 20 nt, Human
ccuggauccuggggcuuggg

SEQ ID NO: 899907 - RNA, 18 nt, Human
ccuggggcuuggggcugu

SEQ ID NO: 899908 - RNA, 19 nt, Human
ccuggggcuuggggcuguc

SEQ ID NO: 899909 - RNA, 22 nt, Human
ccuggggcuuggggcugucuuc

SEQ ID NO: 899910 - RNA, 18 nt, Human
ccuuucuccuucuuuccc

SEQ ID NO: 899911 - RNA, 22 nt, Human
cgaguccagucuccccuguucc

SEQ ID NO: 899912 - RNA, 19 nt, Human
cgccggcagcagcaaggag

SEQ ID NO: 899913 - RNA, 26 nt, Human
cgccuaagaaaaauccuucagguucc

SEQ ID NO: 899914 - RNA, 23 nt, Human
cgcgcaguacugaagggggcgca

SEQ ID NO: 899915 - RNA, 26 nt, Human
cggcagcagcaaggaguguucgggag

SEQ ID NO: 899916 - RNA, 20 nt, Human
cggcagguggccugagucac

SEQ ID NO: 899917 - RNA, 22 nt, Human
cggcagguggccugagucacug

SEQ ID NO: 899918 - RNA, 18 nt, Human
cggggcugucccagccug

SEQ ID NO: 899919 - RNA, 20 nt, Human
cgggggucuuccaggacugg

SEQ ID NO: 899920 - RNA, 25 nt, Human
cuagcacauggugcagugcgucuua

SEQ ID NO: 899921 - RNA, 21 nt, Human
cuccucgcugugcgucgcugu

SEQ ID NO: 899922 - RNA, 19 nt, Human
cugcauguguggucuuccu

SEQ ID NO: 899923 - RNA, 23 nt, Human
cugcauguguggucuuccuugag

SEQ ID NO: 899924 - RNA, 23 nt, Human
cugcguggacucaaggaacaaaa

SEQ ID NO: 899925 - RNA, 18 nt, Human
cuggaccgacucugccgu

SEQ ID NO: 899926 - RNA, 21 nt, Human
cuguccucugcuuggaggcuu

SEQ ID NO: 899927 - RNA, 22 nt, Human
cuguccucugcuuggaggcuuc

SEQ ID NO: 899928 - RNA, 19 nt, Human
cuuccuuccucuucugucc

SEQ ID NO: 899929 - RNA, 24 nt, Human
gaacaaaaggaaacuaggcaggga

SEQ ID NO: 899930 - RNA, 18 nt, Human
gaaccgccggcagcagca

SEQ ID NO: 899931 - RNA, 23 nt, Human
gacaagagcaaaaaucacccccu

SEQ ID NO: 899932 - RNA, 21 nt, Human
gaccccuuuccucccacucac

SEQ ID NO: 899933 - RNA, 23 nt, Human
gaccuggauccuggggcuugggg

SEQ ID NO: 899934 - RNA, 24 nt, Human
gaccuggauccuggggcuuggggc

SEQ ID NO: 899935 - RNA, 21 nt, Human
gacggcccucugcugcgccuc

SEQ ID NO: 899936 - RNA, 18 nt, Human
gagaauggaauucugcgu

SEQ ID NO: 899937 - RNA, 19 nt, Human
gcaaaaaucacccccugca

SEQ ID NO: 899938 - RNA, 18 nt, Human
gcaaagccugcuuccuuc

SEQ ID NO: 899939 - RNA, 20 nt, Human
gcauuagaacuacuuggcua

SEQ ID NO: 899940 - RNA, 23 nt, Human
gcuuucccuucuuaacccccuuc

SEQ ID NO: 899941 - RNA, 25 nt, Human
ggagaggguugcagaguucaccgag

SEQ ID NO: 899942 - RNA, 18 nt, Human
ggaggaaccguaucggcg

SEQ ID NO: 899943 - RNA, 23 nt, Human
ggaggaggaugguggggacgggg

SEQ ID NO: 899944 - RNA, 24 nt, Human
ggaggaggaugguggggacggggc

SEQ ID NO: 899945 - RNA, 20 nt, Human
ggaggggacuugcacccucu

SEQ ID NO: 899946 - RNA, 19 nt, Human
ggagguggggguaggggcu

SEQ ID NO: 899947 - RNA, 22 nt, Human
ggaguuucauuagccgagccag

SEQ ID NO: 899948 - RNA, 23 nt, Human
ggcagguggccugagucacuguc

SEQ ID NO: 899949 - RNA, 20 nt, Human
ggccgggucggaaacgcugg

SEQ ID NO: 899950 - RNA, 19 nt, Human
ggcguugcuguccucugcu

SEQ ID NO: 899951 - RNA, 25 nt, Human
ggcugguggaccuggauccuggggc

SEQ ID NO: 899952 - RNA, 20 nt, Human
gggaacuauguacagaacuu

SEQ ID NO: 899953 - RNA, 20 nt, Human
gggcuuggggcugucuucuu

SEQ ID NO: 899954 - RNA, 18 nt, Human
ggggccccaggaggggac

SEQ ID NO: 899955 - RNA, 19 nt, Human
ggucuggcacuuccggcug

SEQ ID NO: 899956 - RNA, 20 nt, Human
gguuuggucccuuccuucag

SEQ ID NO: 899957 - RNA, 21 nt, Human
gucccaccuccggcucuccag

SEQ ID NO: 899958 - RNA, 24 nt, Human
gucuucuugguggggccagccaga

SEQ ID NO: 899959 - RNA, 27 nt, Human
gucuucuugguggggccagccagaguu

SEQ ID NO: 899960 - RNA, 28 nt, Human
uaggagagauaaugaauacucaugugaa

SEQ ID NO: 899961 - RNA, 19 nt, Human
uaggagagauaaugaauag

SEQ ID NO: 899962 - RNA, 22 nt, Human
uauguacagaacuuuacagaau

SEQ ID NO: 899963 - RNA, 23 nt, Human
ucacgccuuggggccaaagcccc

SEQ ID NO: 899964 - RNA, 19 nt, Human
ucagcaggggaagcguagc

SEQ ID NO: 899965 - RNA, 21 nt, Human
ucaggacaagagcaaaaauca

SEQ ID NO: 899966 - RNA, 20 nt, Human
ucauugccaccucuucucca

SEQ ID NO: 899967 - RNA, 21 nt, Human
ucccaccuccggcucuccagc

SEQ ID NO: 899968 - RNA, 23 nt, Human
uccccaggucgguucuccugauc

SEQ ID NO: 899969 - RNA, 20 nt, Human
ucccuucuuaacccccuuca

SEQ ID NO: 899970 - RNA, 24 nt, Human
uccgggccgggucggaaacgcugg

SEQ ID NO: 899971 - RNA, 23 nt, Human
uccuuccucuucuguccuucagg

SEQ ID NO: 899972 - RNA, 18 nt, Human
uccuugggaucacgaaua

SEQ ID NO: 899973 - RNA, 19 nt, Human
ucuacgguccccugcuccc

SEQ ID NO: 899974 - RNA, 19 nt, Human
ucuccaggcggcauugcuc

SEQ ID NO: 899975 - RNA, 22 nt, Human
ucuccaggcggcauugcuccug

SEQ ID NO: 899976 - RNA, 22 nt, Human
ucucccgcuuuacagaccccuu

SEQ ID NO: 899977 - RNA, 24 nt, Human
ucucccgcuuuacagaccccuuuc

SEQ ID NO: 899978 - RNA, 22 nt, Human
ucuccuucuuucccccucauca

SEQ ID NO: 899979 - RNA, 24 nt, Human
ucuuccauuuuggcuccucgcugg

SEQ ID NO: 899980 - RNA, 21 nt, Human
ugaaugaguuuaaagucaaaa

SEQ ID NO: 899981 - RNA, 22 nt, Human
ugacaauacagacccccuagga

SEQ ID NO: 899982 - RNA, 19 nt, Human
ugaggugccaugaggucaa

SEQ ID NO: 899983 - RNA, 21 nt, Human
ugaguuggcugguggaccugg

SEQ ID NO: 899984 - RNA, 19 nt, Human
ugauaagacgacagguggc

SEQ ID NO: 899985 - RNA, 22 nt, Human
ugcagauccucacugagugcaa

SEQ ID NO: 899986 - RNA, 24 nt, Human
ugcccaucugaaucaaacuucagc

SEQ ID NO: 899987 - RNA, 23 nt, Human
ugcuccugcccuuugggugccuc

SEQ ID NO: 899988 - RNA, 24 nt, Human
uggaaagcuucgcaugggccucgc

SEQ ID NO: 899989 - RNA, 18 nt, Human
uggcugaggugccaugag

SEQ ID NO: 899990 - RNA, 19 nt, Human
ugggaucacgaauagucuc

SEQ ID NO: 899991 - RNA, 21 nt, Human
uggggccaaagccccuagagu

SEQ ID NO: 899992 - RNA, 25 nt, Human
uggggcugucuucuugguggggcca

SEQ ID NO: 899993 - RNA, 23 nt, Human
uggggcuuggggcugucuucuug

SEQ ID NO: 899994 - RNA, 21 nt, Human
ugguggaccuggauccugggg

SEQ ID NO: 899995 - RNA, 24 nt, Human
ugguggggacggggcugucccagg

SEQ ID NO: 899996 - RNA, 20 nt, Human
uguacagaacuuuacagaau

SEQ ID NO: 899997 - RNA, 21 nt, Human
ugugcgucgcuguccgggcag

SEQ ID NO: 899998 - RNA, 21 nt, Human
ugugcgucgcuguccgggcag

SEQ ID NO: 899999 - RNA, 20 nt, Human
uuagccgagccagcagcgcu

SEQ ID NO: 900000 - RNA, 23 nt, Human
uuccugagcauggguauccucag

SEQ ID NO: 900001 - RNA, 22 nt, Human
uugacaauacagacccccuagg

SEQ ID NO: 900002 - RNA, 19 nt, Human
uuuacagaccccuuuccuc

SEQ ID NO: 900003 - RNA, 23 nt, Human
uuucucaggacaagagcaaaaau

SEQ ID NO: 900004 - RNA, 21 nt, Human
uuucuccuucuuucccccuca

SEQ ID NO: 900005 - RNA, 20 nt, Human
uuuuucuuuccuuucuccuu

SEQ ID NO: 900006 - RNA, 18 nt, Human
uuuuuuuuuuuuccuuug

SEQ ID NO: 900007 - RNA, 22 nt, Human
uuuuuuuuuuuuuuuuuccuuu

SEQ ID NO: 900008 - RNA, 23 nt, Human
uuuuuuuuuuuuuuuuuuccuuu

SEQ ID NO: 900009 - RNA, 23 nt, Human
aaucaugaccaccuagaugaagc

SEQ ID NO: 900010 - RNA, 19 nt, Human
agaaaauacuggagaaaaa

SEQ ID NO: 900011 - RNA, 23 nt, Human
agccgcaagaagucauccagaca

SEQ ID NO: 900012 - RNA, 19 nt, Human
agggggcagggagggagaa

SEQ ID NO: 900013 - RNA, 22 nt, Human
agggggcagggagggagaaaag

SEQ ID NO: 900014 - RNA, 18 nt, Human
agguaccgcggggagggg

SEQ ID NO: 900015 - RNA, 24 nt, Human
caaaugaaucccuaaggugaguac

SEQ ID NO: 900016 - RNA, 20 nt, Human
caauucaacaugcagauauc

SEQ ID NO: 900017 - RNA, 20 nt, Human
cagcagcaggcgacugcaag

SEQ ID NO: 900018 - RNA, 22 nt, Human
caggggcagaaggcccggaggg

SEQ ID NO: 900019 - RNA, 22 nt, Human
ccauagaagucaaaccacaaaa

SEQ ID NO: 900020 - RNA, 21 nt, Human
cccauccaccccaauucaaca

SEQ ID NO: 900021 - RNA, 19 nt, Human
cccccauccaccccaauuc

SEQ ID NO: 900022 - RNA, 22 nt, Human
ccccccauccaccccaauucaa

SEQ ID NO: 900023 - RNA, 26 nt, Human
ccgacgacagcagcaggcgacugcaa

SEQ ID NO: 900024 - RNA, 30 nt, Human
cgacgacagcagcaggcgacugcaaggaag

SEQ ID NO: 900025 - RNA, 21 nt, Human
cucgagagggggcagggaggg

SEQ ID NO: 900026 - RNA, 30 nt, Human
cuuaaaaauuaugcuugcuccccccauccu

SEQ ID NO: 900027 - RNA, 20 nt, Human
gaaacuccuucauguccaau

SEQ ID NO: 900028 - RNA, 21 nt, Human
gaaucccuaaggugaguacau

SEQ ID NO: 900029 - RNA, 19 nt, Human
gcaaagcuucacacuuaaa

SEQ ID NO: 900030 - RNA, 20 nt, Human
gcaaagcuucacacuuaaaa

SEQ ID NO: 900031 - RNA, 19 nt, Human
ggagggggagggguagaac

SEQ ID NO: 900032 - RNA, 19 nt, Human
ggcagggagggagaaaagu

SEQ ID NO: 900033 - RNA, 24 nt, Human
ggggagggggagggguagaacagc

SEQ ID NO: 900034 - RNA, 21 nt, Human
uaacacuaaaaaucuguguuu

SEQ ID NO: 900035 - RNA, 27 nt, Human
uaugcuugcuccccccauccaccccaa

SEQ ID NO: 900036 - RNA, 23 nt, Human
ucaaaccacaaaaacccaggauc

SEQ ID NO: 900037 - RNA, 23 nt, Human
ucaggggcagaaggcccggaggg

SEQ ID NO: 900038 - RNA, 18 nt, Human
uccccccauccaccccaa

SEQ ID NO: 900039 - RNA, 21 nt, Human
uccccccauccaccccaauuc

SEQ ID NO: 900040 - RNA, 23 nt, Human
ucuuugcccuugcaacaauuuca

SEQ ID NO: 900041 - RNA, 21 nt, Human
ugcaaagcuucacacuuaaaa

SEQ ID NO: 900042 - RNA, 19 nt, Human
ugcuccccccauccacccc

SEQ ID NO: 900043 - RNA, 19 nt, Human
uggacucgagagggggcag

SEQ ID NO: 900044 - RNA, 24 nt, Human
uugaaacuccuucauguccaauga

SEQ ID NO: 900045 - RNA, 23 nt, Human
uuuuuuuggcauguuccuuuaca

SEQ ID NO: 900046 - RNA, 18 nt, Human
uuuuuuuuuuuuuuuuug

SEQ ID NO: 900047 - RNA, 18 nt, Human
uuuuuuuuuuuuuuuuug

SEQ ID NO: 900048 - RNA, 23 nt, Human
uuuuuuuuuuuuuuuuuggcaug

SEQ ID NO: 900049 - RNA, 22 nt, Human
uuuuuuuuuuuuuuuuuuuggc

SEQ ID NO: 900050 - RNA, 19 nt, Human
aaacaaagccacacugaga

SEQ ID NO: 900051 - RNA, 24 nt, Human
aaagugcugggauuauaggcauga

SEQ ID NO: 900052 - RNA, 18 nt, Human
aaauucauguuccagcaa

SEQ ID NO: 900053 - RNA, 24 nt, Human
aagaaguugguuauauagaggagc

SEQ ID NO: 900054 - RNA, 22 nt, Human
aaggauaaauguuaaaucugcc

SEQ ID NO: 900055 - RNA, 19 nt, Human
aagugcugggauuauaggc

SEQ ID NO: 900056 - RNA, 21 nt, Human
aagugcugggauuauaggcau

SEQ ID NO: 900057 - RNA, 21 nt, Human
acacagaauccgagaacuuca

SEQ ID NO: 900058 - RNA, 24 nt, Human
acacaggucccaaggccacccaau

SEQ ID NO: 900059 - RNA, 23 nt, Human
acaccacaggaguuaccacaaac

SEQ ID NO: 900060 - RNA, 23 nt, Human
accucggccucccaaagugcugg

SEQ ID NO: 900061 - RNA, 18 nt, Human
agccaccaugcccagccc

SEQ ID NO: 900062 - RNA, 21 nt, Human
aggcaugagccaccaugccca

SEQ ID NO: 900063 - RNA, 19 nt, Human
aggucccaaggccacccaa

SEQ ID NO: 900064 - RNA, 24 nt, Human
augauccacccaccucggccuccc

SEQ ID NO: 900065 - RNA, 25 nt, Human
auuuacaccacaggaguuaccacca

SEQ ID NO: 900066 - RNA, 20 nt, Human
caaaaacaaagccacacuga

SEQ ID NO: 900067 - RNA, 21 nt, Human
caaaaacaaagccacacugag

SEQ ID NO: 900068 - RNA, 21 nt, Human
caaaagcuaaugugggcuggg

SEQ ID NO: 900069 - RNA, 24 nt, Human
caaagugcugggauuauaggcaug

SEQ ID NO: 900070 - RNA, 25 nt, Human
caaauugcaaaaacaaagccacacu

SEQ ID NO: 900071 - RNA, 22 nt, Human
cacacaggucccaaggccaccc

SEQ ID NO: 900072 - RNA, 22 nt, Human
cacagaauccgagaacuucaaa

SEQ ID NO: 900073 - RNA, 22 nt, Human
cacccaccucggccucccaaag

SEQ ID NO: 900074 - RNA, 23 nt, Human
cacccaccucggccucccaaagu

SEQ ID NO: 900075 - RNA, 20 nt, Human
cacucugcuaggagcagaau

SEQ ID NO: 900076 - RNA, 24 nt, Human
cauacuaggaauauaaaaaaaaga

SEQ ID NO: 900077 - RNA, 21 nt, Human
cauacugcccucccaaaacuc

SEQ ID NO: 900078 - RNA, 24 nt, Human
caugagccaccaugcccagcccau

SEQ ID NO: 900079 - RNA, 24 nt, Human
ccaaagugcugggauuauaggcau

SEQ ID NO: 900080 - RNA, 22 nt, Human
ccaccaaacuacagucuaugcu

SEQ ID NO: 900081 - RNA, 21 nt, Human
cccacauacugcccucccaaa

SEQ ID NO: 900082 - RNA, 24 nt, Human
ccugaccucagaugauccacccac

SEQ ID NO: 900083 - RNA, 18 nt, Human
cgagaaggauaaauguua

SEQ ID NO: 900084 - RNA, 20 nt, Human
cugcaaauccugaaaccugc

SEQ ID NO: 900085 - RNA, 22 nt, Human
cugcuagacugauggacuaugu

SEQ ID NO: 900086 - RNA, 23 nt, Human
cuucaaaagcuaaugugggcucc

SEQ ID NO: 900087 - RNA, 24 nt, Human
gaccucagaugauccacccaccuc

SEQ ID NO: 900088 - RNA, 21 nt, Human
gauuauaggcaugagccacca

SEQ ID NO: 900089 - RNA, 24 nt, Human
gauuauaggcaugagccaccaugc

SEQ ID NO: 900090 - RNA, 18 nt, Human
gcucagaaccugaagcaa

SEQ ID NO: 900091 - RNA, 23 nt, Human
gcugggcucgaacuccugaccuc

SEQ ID NO: 900092 - RNA, 24 nt, Human
ggauuauaggcaugagccaccaug

SEQ ID NO: 900093 - RNA, 24 nt, Human
ggcugggcucgaacuccugaccuc

SEQ ID NO: 900094 - RNA, 24 nt, Human
ggucccacauacugcccucccaaa

SEQ ID NO: 900095 - RNA, 21 nt, Human
uaacauacaaacaguacaacu

SEQ ID NO: 900096 - RNA, 21 nt, Human
uacacacagaauccgagaacu

SEQ ID NO: 900097 - RNA, 21 nt, Human
uacagucuaugcucuucacac

SEQ ID NO: 900098 - RNA, 22 nt, Human
uacugcccucccaaaacucuca

SEQ ID NO: 900099 - RNA, 20 nt, Human
ucagaugauccacccaccuc

SEQ ID NO: 900100 - RNA, 24 nt, Human
ucccaaagugcugggauuauaggc

SEQ ID NO: 900101 - RNA, 18 nt, Human
ucccacauacugcccucc

SEQ ID NO: 900102 - RNA, 24 nt, Human
uccgagaacuucaaagucuuugcu

SEQ ID NO: 900103 - RNA, 20 nt, Human
ugaaaccugcaaugcagcua

SEQ ID NO: 900104 - RNA, 21 nt, Human
ugagccaccaugcccagccca

SEQ ID NO: 900105 - RNA, 24 nt, Human
ugauccacccaccucggccuccca

SEQ ID NO: 900106 - RNA, 22 nt, Human
ugcccagcccauauucccuuca

SEQ ID NO: 900107 - RNA, 18 nt, Human
ugggauuauaggcaugag

SEQ ID NO: 900108 - RNA, 22 nt, Human
ugggauuauaggcaugagccac

SEQ ID NO: 900109 - RNA, 23 nt, Human
ugggauuauaggcaugagccacc

SEQ ID NO: 900110 - RNA, 24 nt, Human
ugggauuauaggcaugagccacca

SEQ ID NO: 900111 - RNA, 25 nt, Human
ugggauuauaggcaugagccaccau

SEQ ID NO: 900112 - RNA, 19 nt, Human
ugggcugggcucgaacucc

SEQ ID NO: 900113 - RNA, 22 nt, Human
uguuagggggccauuaauuuua

SEQ ID NO: 900114 - RNA, 19 nt, Human
uuccaccaaacuacagucu

SEQ ID NO: 900115 - RNA, 19 nt, Human
aaaaaaaaaaagaaaaaga

SEQ ID NO: 900116 - RNA, 22 nt, Human
aaaaaagcagacucuagagaua

SEQ ID NO: 900117 - RNA, 23 nt, Human
aaaaggaggggaccuggagggcg

SEQ ID NO: 900118 - RNA, 28 nt, Human
aaaauuccacauuaaggaguuaagaaca

SEQ ID NO: 900119 - RNA, 20 nt, Human
aaacuggcccacaaaaaagc

SEQ ID NO: 900120 - RNA, 23 nt, Human
aaagaaaaaaaaaucccagccca

SEQ ID NO: 900121 - RNA, 22 nt, Human
aaagaaaaagaaaaaaaaaucc

SEQ ID NO: 900122 - RNA, 23 nt, Human
aaagagaaacccagggcgccagg

SEQ ID NO: 900123 - RNA, 22 nt, Human
aaaggagaggggacaggauaaa

SEQ ID NO: 900124 - RNA, 19 nt, Human
aacauggugaaaccccauc

SEQ ID NO: 900125 - RNA, 20 nt, Human
aacauggugaaaccccaucu

SEQ ID NO: 900126 - RNA, 20 nt, Human
aacauggugaaaccccaucu

SEQ ID NO: 900127 - RNA, 21 nt, Human
aacauggugaaaccccaucuc

SEQ ID NO: 900128 - RNA, 24 nt, Human
aagaagucaacaaagauucccagc

SEQ ID NO: 900129 - RNA, 19 nt, Human
aaggaggggaccuggaggg

SEQ ID NO: 900130 - RNA, 18 nt, Human
aagggcagcucuuuuaca

SEQ ID NO: 900131 - RNA, 24 nt, Human
aaucgcuugaacccaaguggcaga

SEQ ID NO: 900132 - RNA, 23 nt, Human
aaugcaaaaaugggaaagggcua

SEQ ID NO: 900133 - RNA, 24 nt, Human
accaacauggugaaaccccaucuc

SEQ ID NO: 900134 - RNA, 24 nt, Human
accccaucucuacuaaaaauacaa

SEQ ID NO: 900135 - RNA, 19 nt, Human
acugcacuccagccugggc

SEQ ID NO: 900136 - RNA, 22 nt, Human
acugcacuccagccugggcugg

SEQ ID NO: 900137 - RNA, 24 nt, Human
acugcacuccagccugggcuggag

SEQ ID NO: 900138 - RNA, 27 nt, Human
agcaagaagucuuuucuccuccccugg

SEQ ID NO: 900139 - RNA, 24 nt, Human
agcacuucgggacgcugagguggg

SEQ ID NO: 900140 - RNA, 24 nt, Human
agccugaccaacauggugaaaccc

SEQ ID NO: 900141 - RNA, 22 nt, Human
aggcaagggcauaggcaaggaa

SEQ ID NO: 900142 - RNA, 23 nt, Human
aggcaggagaaucgcuugaaccc

SEQ ID NO: 900143 - RNA, 24 nt, Human
aggcaggagaaucgcuugaaccca

SEQ ID NO: 900144 - RNA, 24 nt, Human
aggcgcgguggcucacaccuguaa

SEQ ID NO: 900145 - RNA, 20 nt, Human
aggcugaggcaggagaaucg

SEQ ID NO: 900146 - RNA, 24 nt, Human
aggcugaggcaggagaaucgcuug

SEQ ID NO: 900147 - RNA, 24 nt, Human
agguggguggaucaggaggucagg

SEQ ID NO: 900148 - RNA, 22 nt, Human
aucaggaggucaggaguucaag

SEQ ID NO: 900149 - RNA, 24 nt, Human
aucaugccacugcacuccagccug

SEQ ID NO: 900150 - RNA, 22 nt, Human
augccacugcacuccagccugg

SEQ ID NO: 900151 - RNA, 21 nt, Human
auuaucuccccuucugguguu

SEQ ID NO: 900152 - RNA, 18 nt, Human
caaaaaagcagacucuag

SEQ ID NO: 900153 - RNA, 21 nt, Human
caaaaaagcagacucuagaga

SEQ ID NO: 900154 - RNA, 18 nt, Human
caaaacuauuaucucccc

SEQ ID NO: 900155 - RNA, 24 nt, Human
caacauggugaaaccccaucucua

SEQ ID NO: 900156 - RNA, 31 nt, Human; identical to SEQ ID NO: 562574

SEQ ID NO: 900157 - RNA, 19 nt, Human
caagagcauuaggagucug

SEQ ID NO: 900158 - RNA, 24 nt, Human
caagaucaugccacugcacuccag

SEQ ID NO: 900159 - RNA, 22 nt, Human
cacaccugaguuaaacauuuug

SEQ ID NO: 900160 - RNA, 24 nt, Human
cacaccuguaaucccagcacuucg

SEQ ID NO: 900161 - RNA, 23 nt, Human
caccuguaaucccagcacuucgg

SEQ ID NO: 900162 - RNA, 24 nt, Human
caccuguaaucccagcacuucggg

SEQ ID NO: 900163 - RNA, 21 nt, Human
cacuccagccugggcuggagc

SEQ ID NO: 900164 - RNA, 18 nt, Human
cacugcacuccagccugg

SEQ ID NO: 900165 - RNA, 19 nt, Human
cacugcacuccagccuggg

SEQ ID NO: 900166 - RNA, 20 nt, Human
cacugcacuccagccugggc

SEQ ID NO: 900167 - RNA, 20 nt, Human
cacugcacuccagccugggc

SEQ ID NO: 900168 - RNA, 26 nt, Human
cacugcacuccagccugggcuggagc

SEQ ID NO: 900169 - RNA, 20 nt, Human
cagagcaugcagugagccaa

SEQ ID NO: 900170 - RNA, 21 nt, Human
cagcacuucgggacgcugagg

SEQ ID NO: 900171 - RNA, 24 nt, Human
cagcacuucgggacgcugaggugg

SEQ ID NO: 900172 - RNA, 19 nt, Human
cagcaggcguugcaacaug

SEQ ID NO: 900173 - RNA, 19 nt, Human
cagcccaggccaggcgcgg

SEQ ID NO: 900174 - RNA, 20 nt, Human
cauuuugcuggaaaauucca

SEQ ID NO: 900175 - RNA, 19 nt, Human
ccaaagaagucaacaaaga

SEQ ID NO: 900176 - RNA, 20 nt, Human
ccacugcacuccagccuggg

SEQ ID NO: 900177 - RNA, 21 nt, Human
ccacugcacuccagccugggc

SEQ ID NO: 900178 - RNA, 21 nt, Human
ccacugcacuccagccugggc

SEQ ID NO: 900179 - RNA, 26 nt, Human
ccacugcacuccagccugggcuggag

SEQ ID NO: 900180 - RNA, 22 nt, Human
ccaggagaaaggagaggggaca

SEQ ID NO: 900181 - RNA, 25 nt, Human
ccaggccaggcgcgguggcucacac

SEQ ID NO: 900182 - RNA, 22 nt, Human
ccagggaaagaacaagcacucc

SEQ ID NO: 900183 - RNA, 19 nt, Human
cccacaaaaaagcagacuc

SEQ ID NO: 900184 - RNA, 24 nt, Human
ccugaccaacauggugaaacccca

SEQ ID NO: 900185 - RNA, 25 nt, Human
ccugggcuggagcaagaccgggguc

SEQ ID NO: 900186 - RNA, 22 nt, Human
cgccuguaauccgcuacuugag

SEQ ID NO: 900187 - RNA, 18 nt, Human
cucaaaaaaaaaaaaaaa

SEQ ID NO: 900188 - RNA, 24 nt, Human
cucacaccuguaaucccagcacuu

SEQ ID NO: 900189 - RNA, 27 nt, Human
cucacaccuguaaucccagcacuucgg

SEQ ID NO: 900190 - RNA, 18 nt, Human
cugagcccuaggcagacg

SEQ ID NO: 900191 - RNA, 19 nt, Human
cuggcccacaaaaaagcag

SEQ ID NO: 900192 - RNA, 22 nt, Human
cugucucaaaaaaaaaaaaaaa

SEQ ID NO: 900193 - RNA, 27 nt, Human
gagcaagacugucucaaaaaaaaaaaa

SEQ ID NO: 900194 - RNA, 22 nt, Human
gaucaggaggucaggaguucaa

SEQ ID NO: 900195 - RNA, 22 nt, Human
gcacuccagccugggcuggagc

SEQ ID NO: 900196 - RNA, 22 nt, Human
gcaggagaaucgcuugaaccca

SEQ ID NO: 900197 - RNA, 20 nt, Human
gccaagaucaugccacugca

SEQ ID NO: 900198 - RNA, 22 nt, Human
gccacugcacuccagccugggc

SEQ ID NO: 900199 - RNA, 22 nt, Human
gcuacuugagaggcugaggcag

SEQ ID NO: 900200 - RNA, 23 nt, Human
gcuggagcaagacugucucaaaa

SEQ ID NO: 900201 - RNA, 23 nt, Human
ggcagagcaugcagugagccaag

SEQ ID NO: 900202 - RNA, 20 nt, Human
gguaagcuccuaggaggggc

SEQ ID NO: 900203 - RNA, 23 nt, Human
gguggaucaggaggucaggaguu

SEQ ID NO: 900204 - RNA, 28 nt, Human
gguggaucaggaggucaggaguucaaga

SEQ ID NO: 900205 - RNA, 23 nt, Human
gguggcucacaccuguaauccca

SEQ ID NO: 900206 - RNA, 24 nt, Human
gguggcucacaccuguaaucccag

SEQ ID NO: 900207 - RNA, 23 nt, Human
gguuguggccaaguucagaguca

SEQ ID NO: 900208 - RNA, 23 nt, Human
guacagagaaaacaucaaggcuu

SEQ ID NO: 900209 - RNA, 30 nt, Human
guggaucaggaggucaggaguucaagaccc

SEQ ID NO: 900210 - RNA, 21 nt, Human
uaaggaguuaagaacauaaug

SEQ ID NO: 900211 - RNA, 21 nt, Human
uagcacaguauuucacacuuu

SEQ ID NO: 900212 - RNA, 20 nt, Human
uagcuguacagagaaaacau

SEQ ID NO: 900213 - RNA, 23 nt, Human
ucaaaaaaaaaaaaaaaaaagaa

SEQ ID NO: 900214 - RNA, 22 nt, Human
ucagaaaacuuagcuguacaga

SEQ ID NO: 900215 - RNA, 24 nt, Human
ucaggaggucaggaguucaagacc

SEQ ID NO: 900216 - RNA, 23 nt, Human
ucaugccacugcacuccagccug

SEQ ID NO: 900217 - RNA, 20 nt, Human
uccacucuucugaaggcaau

SEQ ID NO: 900218 - RNA, 18 nt, Human
uccgcuacuugagaggcu

SEQ ID NO: 900219 - RNA, 23 nt, Human
ucucuacuaaaaauacaaaaauu

SEQ ID NO: 900220 - RNA, 19 nt, Human
ugaaaccccaucucuacua

SEQ ID NO: 900221 - RNA, 22 nt, Human
ugaaucucaacaguuuccuaga

SEQ ID NO: 900222 - RNA, 24 nt, Human
ugaccaacauggugaaaccccauc

SEQ ID NO: 900223 - RNA, 19 nt, Human
ugagaggcugaggcaggag

SEQ ID NO: 900224 - RNA, 20 nt, Human
ugaggcaggagaaucgcuug

SEQ ID NO: 900225 - RNA, 24 nt, Human
ugaggcaggagaaucgcuugaacc

SEQ ID NO: 900226 - RNA, 25 nt, Human
ugaggcaggagaaucgcuugaaccc

SEQ ID NO: 900227 - RNA, 20 nt, Human
ugagguggguggaucaggag

SEQ ID NO: 900228 - RNA, 21 nt, Human
ugagguggguggaucaggagg

SEQ ID NO: 900229 - RNA, 22 nt, Human
ugagguggguggaucaggaggu

SEQ ID NO: 900230 - RNA, 24 nt, Human
ugagguggguggaucaggagguca

SEQ ID NO: 900231 - RNA, 24 nt, Human
ugcaacaugcucaagggcacccac

SEQ ID NO: 900232 - RNA, 24 nt, Human
ugcucuugaagaagacaagaguug

SEQ ID NO: 900233 - RNA, 18 nt, Human
ugcugccaggagaaagga

SEQ ID NO: 900234 - RNA, 22 nt, Human
uggaucaggaggucaggaguuc

SEQ ID NO: 900235 - RNA, 21 nt, Human
uggcucacaccuguaauccca

SEQ ID NO: 900236 - RNA, 24 nt, Human
uggcucacaccuguaaucccagca

SEQ ID NO: 900237 - RNA, 22 nt, Human
ugggaaagggcuauauacaggu

SEQ ID NO: 900238 - RNA, 26 nt, Human
ugggaaagggcuauauacagguacuu

SEQ ID NO: 900239 - RNA, 22 nt, Human
uggguggaucaggaggucagga

SEQ ID NO: 900240 - RNA, 24 nt, Human
ugguggugggcgccuguaauccgc

SEQ ID NO: 900241 - RNA, 19 nt, Human
uguagaaaagggggcgagg

SEQ ID NO: 900242 - RNA, 19 nt, Human
uguuguguguuugcucuug

SEQ ID NO: 900243 - RNA, 18 nt, Human
uucauaaucacuauacac

SEQ ID NO: 900244 - RNA, 20 nt, Human
uucauugauaguggagauuu

SEQ ID NO: 900245 - RNA, 24 nt, Human
uugagaggcugaggcaggagaauc

SEQ ID NO: 900246 - RNA, 18 nt, Human
uugcuggaaaauuccaca

SEQ ID NO: 900247 - RNA, 24 nt, Human
uuggaacuagaaggcaagggcaua

SEQ ID NO: 900248 - RNA, 19 nt, Human
uuggagaauaacagcaaga

SEQ ID NO: 900249 - RNA, 21 nt, Human
uuguguucuuccuuuucugcu

SEQ ID NO: 900250 - RNA, 23 nt, Human
uuucccccccuuuuuuuuaaaga

SEQ ID NO: 900251 - RNA, 19 nt, Human
uuuugcuggaaaauuccac

SEQ ID NO: 900252 - RNA, 19 nt, Human
accccaagaacacccccac

SEQ ID NO: 900253 - RNA, 20 nt, Human
agaaaguaugcaacacacaa

SEQ ID NO: 900254 - RNA, 21 nt, Human
agaacacccccacaccuggcu

SEQ ID NO: 900255 - RNA, 24 nt, Human
agccaggcgcgcugcuaggggggg

SEQ ID NO: 900256 - RNA, 19 nt, Human
aggaggagcugacgggcug

SEQ ID NO: 900257 - RNA, 19 nt, Human
aggaggagcugacgggcug

SEQ ID NO: 900258 - RNA, 23 nt, Human
agggggggucgccggugaccucg

SEQ ID NO: 900259 - RNA, 23 nt, Human
aucuuccccaccucucccagaug

SEQ ID NO: 900260 - RNA, 19 nt, Human
caacacacaaacuccgucc

SEQ ID NO: 900261 - RNA, 20 nt, Human
caacaccccgaggaggagug

SEQ ID NO: 900262 - RNA, 22 nt, Human
caagaacacccccacaccuggc

SEQ ID NO: 900263 - RNA, 19 nt, Human
cacacaaacuccguccucc

SEQ ID NO: 900264 - RNA, 18 nt, Human
cacccccacaccuggcug

SEQ ID NO: 900265 - RNA, 19 nt, Human
ccaucuuccccaccucucc

SEQ ID NO: 900266 - RNA, 20 nt, Human
ccccaagaacacccccacac

SEQ ID NO: 900267 - RNA, 18 nt, Human
ccccacaccuggcugacc

SEQ ID NO: 900268 - RNA, 18 nt, Human
cccgcugggauucuccgg

SEQ ID NO: 900269 - RNA, 20 nt, Human
ccgcugcugcagccgccgcc

SEQ ID NO: 900270 - RNA, 21 nt, Human
ccgcugcugcagccgccgccu

SEQ ID NO: 900271 - RNA, 25 nt, Human
ccugccaucuuccccaccucuccca

SEQ ID NO: 900272 - RNA, 20 nt, Human
ccuugccugccaucuucccc

SEQ ID NO: 900273 - RNA, 21 nt, Human
cgcggccugcgccccgccagc

SEQ ID NO: 900274 - RNA, 21 nt, Human
cggcgccuccgcucucucgcu

SEQ ID NO: 900275 - RNA, 25 nt, Human
cggugaccucgaaacuugugcaaca

SEQ ID NO: 900276 - RNA, 24 nt, Human
cucccagaugcaucucugaggccc

SEQ ID NO: 900277 - RNA, 27 nt, Human
gaacacccccacaccuggcugaccagg

SEQ ID NO: 900278 - RNA, 22 nt, Human
gcggggguggcagggugggcac

SEQ ID NO: 900279 - RNA, 21 nt, Human
ggauccucggcgccuccgcuc

SEQ ID NO: 900280 - RNA, 24 nt, Human
gggccagagccaggcgcgcugcua

SEQ ID NO: 900281 - RNA, 23 nt, Human
ggucccgcggccugcgccccgcc

SEQ ID NO: 900282 - RNA, 22 nt, Human
guggcagggugggcaccagagu

SEQ ID NO: 900283 - RNA, 23 nt, Human
ucgcuuccccgggcucggguccc

SEQ ID NO: 900284 - RNA, 20 nt, Human
ucggauccucggcgccuccg

SEQ ID NO: 900285 - RNA, 19 nt, Human
ugaaucggauccucggcgc

SEQ ID NO: 900286 - RNA, 19 nt, Human
uggagcgcggggguggcag

SEQ ID NO: 900287 - RNA, 24 nt, Human
uggagcgcggggguggcagggugg

SEQ ID NO: 900288 - RNA, 22 nt, Human
uggauggagccgcugcugcagc

SEQ ID NO: 900289 - RNA, 25 nt, Human
ugggaaggagaccaaaggagacccc

SEQ ID NO: 900290 - RNA, 22 nt, Human
uugugcaacaccccgaggagga

SEQ ID NO: 900291 - RNA, 23 nt, Human
uuuauguugcauacuugaacuac

SEQ ID NO: 900292 - RNA, 24 nt, Human
uuuuuuuuuuuuuuuucaguuuuu

SEQ ID NO: 900293 - RNA, 25 nt, Human
ucuuuggugacgcaaaggcagagau

SEQ ID NO: 900294 - RNA, 23 nt, Human
ugacgcaaaggcagagauauuuu

SEQ ID NO: 900295 - RNA, 19 nt, Human
aaacugauacccacgaacu

SEQ ID NO: 900296 - RNA, 22 nt, Human
aaaguucuuauuagacuuuauu

SEQ ID NO: 900297 - RNA, 21 nt, Human
aacacacuaauaauuuuaaau

SEQ ID NO: 900298 - RNA, 20 nt, Human
aacagacuacacccuguaac

SEQ ID NO: 900299 - RNA, 18 nt, Human
aacuacggaaucuaaaca

SEQ ID NO: 900300 - RNA, 21 nt, Human
aacuacggaaucuaaacagac

SEQ ID NO: 900301 - RNA, 24 nt, Human
aagaguaugaaauuuaucuguagu

SEQ ID NO: 900302 - RNA, 23 nt, Human
accuguuagcaaaagugucacga

SEQ ID NO: 900303 - RNA, 18 nt, Human
agucuacuucaggaugag

SEQ ID NO: 900304 - RNA, 22 nt, Human
auuuuuuuuguuuuuauuuuua

SEQ ID NO: 900305 - RNA, 20 nt, Human
caaaaaaguuccuguaccaa

SEQ ID NO: 900306 - RNA, 18 nt, Human
caaaguguagagucaagg

SEQ ID NO: 900307 - RNA, 20 nt, Human
cacacaaaucacccccaaag

SEQ ID NO: 900308 - RNA, 22 nt, Human
cacacaaaucacccccaaaguc

SEQ ID NO: 900309 - RNA, 20 nt, Human
cacaugugaaugagugaggu

SEQ ID NO: 900310 - RNA, 21 nt, Human
cucaaaguguagagucaagga

SEQ ID NO: 900311 - RNA, 20 nt, Human
cucacaugugaaugagugag

SEQ ID NO: 900312 - RNA, 22 nt, Human
cuccccaggcgcuacacacaaa

SEQ ID NO: 900313 - RNA, 21 nt, Human
cuccuuaggagaggagauaac

SEQ ID NO: 900314 - RNA, 19 nt, Human
cucguggugacugucaugu

SEQ ID NO: 900315 - RNA, 20 nt, Human
cuucaggaugagggacuucu

SEQ ID NO: 900316 - RNA, 21 nt, Human
gccagacuuaguugggaccug

SEQ ID NO: 900317 - RNA, 22 nt, Human
gcucacaugugaaugagugagg

SEQ ID NO: 900318 - RNA, 19 nt, Human
ggaaucuccaaagacaaaa

SEQ ID NO: 900319 - RNA, 22 nt, Human
gggaccugagaguuaagugcug

SEQ ID NO: 900320 - RNA, 20 nt, Human
gguccguguguuuguuuugu

SEQ ID NO: 900321 - RNA, 18 nt, Human
gucccgcagcuggucugg

SEQ ID NO: 900322 - RNA, 26 nt, Human
gucgcucacaugugaaugagugaggu

SEQ ID NO: 900323 - RNA, 21 nt, Human
gucucuuuucugcguagaccc

SEQ ID NO: 900324 - RNA, 19 nt, Human
uaccgaaacugauacccac

SEQ ID NO: 900325 - RNA, 22 nt, Human
uccucuuuuauccccccucccc

SEQ ID NO: 900326 - RNA, 23 nt, Human
uccucuuuuauccccccucccca

SEQ ID NO: 900327 - RNA, 23 nt, Human
ucuccaaagacaaaagaguauga

SEQ ID NO: 900328 - RNA, 22 nt, Human
ucuccuaaagcagcccagccgc

SEQ ID NO: 900329 - RNA, 24 nt, Human
ucuguagugauuauagccaccauu

SEQ ID NO: 900330 - RNA, 21 nt, Human
ucuuaucuucgcuucuuuguu

SEQ ID NO: 900331 - RNA, 22 nt, Human
ucuuucuuaucuucgcuucuuu

SEQ ID NO: 900332 - RNA, 25 nt, Human
ucuuuuguuccuuuuggacacuuug

SEQ ID NO: 900333 - RNA, 20 nt, Human
ugaggccuucuuucuuaucu

SEQ ID NO: 900334 - RNA, 19 nt, Human
ugagggacuucucgcuugg

SEQ ID NO: 900335 - RNA, 25 nt, Human
ugagguaauuggauaugaggccuuc

SEQ ID NO: 900336 - RNA, 22 nt, Human
ugauacccacgaacuacggaau

SEQ ID NO: 900337 - RNA, 21 nt, Human
ugaucagaagugguaccuguu

SEQ ID NO: 900338 - RNA, 24 nt, Human
uggaaucuccaaagacaaaagagu

SEQ ID NO: 900339 - RNA, 22 nt, Human
ugugugucuguucauucauucg

SEQ ID NO: 900340 - RNA, 24 nt, Human
ugugugugucuguucauucauucg

SEQ ID NO: 900341 - RNA, 24 nt, Human
uguguuuguuuuguuuuguuuuug

SEQ ID NO: 900342 - RNA, 22 nt, Human
uguuaggucuucaucuccuuag

SEQ ID NO: 900343 - RNA, 25 nt, Human
uguuuuguuuuccucggaauuuuca

SEQ ID NO: 900344 - RNA, 26 nt, Human
uuaaaauuaauauaaaaacucgauga

SEQ ID NO: 900345 - RNA, 21 nt, Human
uuaaauuuuacacucugcgcu

SEQ ID NO: 900346 - RNA, 18 nt, Human
uuaggucuucaucuccuu

SEQ ID NO: 900347 - RNA, 19 nt, Human
uuccucggaauuuucagcc

SEQ ID NO: 900348 - RNA, 22 nt, Human
uuucugcguagacccagaacaa

SEQ ID NO: 900349 - RNA, 23 nt, Human
uuucuggaccaaacaaacacacu

SEQ ID NO: 900350 - RNA, 20 nt, Human
uuuguuuuguuuuguuuuug

SEQ ID NO: 900351 - RNA, 19 nt, Human
aaagcagcccugcccgccg

SEQ ID NO: 900352 - RNA, 20 nt, Human
agaaaaggccuugcuuggua

SEQ ID NO: 900353 - RNA, 21 nt, Human
agaagggucaauuuacaaaga

SEQ ID NO: 900354 - RNA, 22 nt, Human
agcagggacaggaggaccaaga

SEQ ID NO: 900355 - RNA, 22 nt, Human
aggaggcuucugcaggccuugg

SEQ ID NO: 900356 - RNA, 22 nt, Human
aggaggcuucugcaggccuugg

SEQ ID NO: 900357 - RNA, 20 nt, Human
aucagacuaagaaaagcagc

SEQ ID NO: 900358 - RNA, 21 nt, Human
cagcagcuccggaggccccag

SEQ ID NO: 900359 - RNA, 23 nt, Human
cagcagggacaggaggaccaaga

SEQ ID NO: 900360 - RNA, 19 nt, Human
cagcuccggaggccccagc

SEQ ID NO: 900361 - RNA, 19 nt, Human
caggaggccagcacugugg

SEQ ID NO: 900362 - RNA, 24 nt, Human
caggaggccagcacugugggucau

SEQ ID NO: 900363 - RNA, 19 nt, Human
caggaggcuucugcaggcc

SEQ ID NO: 900364 - RNA, 21 nt, Human
ccaggccaggaggcuucugca

SEQ ID NO: 900365 - RNA, 26 nt, Human
cccgcagcagcuccggaggccccagc

SEQ ID NO: 900366 - RNA, 20 nt, Human
ccgccgccccccacuccaga

SEQ ID NO: 900367 - RNA, 24 nt, Human
ccugcagcagggacaggaggacca

SEQ ID NO: 900368 - RNA, 23 nt, Human
ccuugggcuucccugagggccuc

SEQ ID NO: 900369 - RNA, 25 nt, Human
cgccccccacuccagaagggucaau

SEQ ID NO: 900370 - RNA, 18 nt, Human
gagcccgcagcagcuccg

SEQ ID NO: 900371 - RNA, 19 nt, Human
gcagcccugcccgccgccc

SEQ ID NO: 900372 - RNA, 20 nt, Human
gccccugcagcagggacagg

SEQ ID NO: 900373 - RNA, 18 nt, Human
gcccgccgccccccacuc

SEQ ID NO: 900374 - RNA, 19 nt, Human
gcuccggaggccccagccc

SEQ ID NO: 900375 - RNA, 19 nt, Human
ggccccacaggaggccagc

SEQ ID NO: 900376 - RNA, 20 nt, Human
gucacgaagcagagccugag

SEQ ID NO: 900377 - RNA, 21 nt, Human
guggccccacaggaggccagc

SEQ ID NO: 900378 - RNA, 21 nt, Human
ucccugagggccucgcggcuu

SEQ ID NO: 900379 - RNA, 24 nt, Human
ucccugagggccucgcggcuucug

SEQ ID NO: 900380 - RNA, 19 nt, Human
ucccugagggccucgcggg

SEQ ID NO: 900381 - RNA, 22 nt, Human
ucugcaggccuugggcuucccu

SEQ ID NO: 900382 - RNA, 19 nt, Human
ugagggccucgcggcuucu

SEQ ID NO: 900383 - RNA, 20 nt, Human
ugcagcagggacaggaggac

SEQ ID NO: 900384 - RNA, 18 nt, Human
uuacaaagacaggggcgc

SEQ ID NO: 900385 - RNA, 19 nt, Human
aaaagagaagaauccuuag

SEQ ID NO: 900386 - RNA, 24 nt, Human
aaauagcuauaaaagagaagaauc

SEQ ID NO: 900387 - RNA, 20 nt, Human
agacagcaauaaagccugaa

SEQ ID NO: 900388 - RNA, 24 nt, Human
agacagcaauaaagccugaaccug

SEQ ID NO: 900389 - RNA, 27 nt, Human
aggaguaauagaagucaaccgguaccc

SEQ ID NO: 900390 - RNA, 21 nt, Human
auaaagccugaaccugacacu

SEQ ID NO: 900391 - RNA, 24 nt, Human
auaaagccugaaccugacacucaa

SEQ ID NO: 900392 - RNA, 27 nt, Human
cagcaauaaagccugaaccugacacuc

SEQ ID NO: 900393 - RNA, 21 nt, Human
cauaacaacugcuccaugcag

SEQ ID NO: 900394 - RNA, 18 nt, Human
ccaggccccgccccaagc

SEQ ID NO: 900395 - RNA, 19 nt, Human
cugcuccaugcaggaguaa

SEQ ID NO: 900396 - RNA, 22 nt, Human
cuucacaaauaauuuggaaaau

SEQ ID NO: 900397 - RNA, 22 nt, Human
cuucccgcagccggcgccuucc

SEQ ID NO: 900398 - RNA, 22 nt, Human
gaagacagcaauaaagccugaa

SEQ ID NO: 900399 - RNA, 23 nt, Human
gaagucaacauuaagcccaacuc

SEQ ID NO: 900400 - RNA, 23 nt, Human
gacucugcaucuuaauuccuaaa

SEQ ID NO: 900401 - RNA, 23 nt, Human
uaagcccaacucuauuuucagac

SEQ ID NO: 900402 - RNA, 24 nt, Human
uacagaaguuaaaaagugauguau

SEQ ID NO: 900403 - RNA, 22 nt, Human
uagaaacugcauuuccccucca

SEQ ID NO: 900404 - RNA, 20 nt, Human
uggaaaaucagccuaaaggu

SEQ ID NO: 900405 - RNA, 18 nt, Human
uucaauaagaaucuaaag

SEQ ID NO: 900406 - RNA, 23 nt, Human
uugaagacagcaauaaagccuga

SEQ ID NO: 900407 - RNA, 25 nt, Human
uuuacagucaaagacauuuucagag

SEQ ID NO: 900408 - RNA, 24 nt, Human
aacgugggcugacaccccuccccg

SEQ ID NO: 900409 - RNA, 19 nt, Human
accccaaaggccagcaacg

SEQ ID NO: 900410 - RNA, 21 nt, Human
accucacacacuggucuaagu

SEQ ID NO: 900411 - RNA, 20 nt, Human
acuggucuaaguccaaccuc

SEQ ID NO: 900412 - RNA, 24 nt, Human
acuggucuaaguccaaccucacac

SEQ ID NO: 900413 - RNA, 23 nt, Human
aggcgccccccugcacaaaccuc

SEQ ID NO: 900414 - RNA, 19 nt, Human
agggauguggucaucucug

SEQ ID NO: 900415 - RNA, 21 nt, Human
caacgugggcugacaccccuc

SEQ ID NO: 900416 - RNA, 23 nt, Human
cacaaaccucacgaaguuguccc

SEQ ID NO: 900417 - RNA, 23 nt, Human
cacaccagcagcuuuccccacaa

SEQ ID NO: 900418 - RNA, 22 nt, Human
caccucacacacuggucuaagu

SEQ ID NO: 900419 - RNA, 19 nt, Human
ccaaaggccagcaacgugg

SEQ ID NO: 900420 - RNA, 20 nt, Human
ccaacccccugcugcggccg

SEQ ID NO: 900421 - RNA, 19 nt, Human
ccagcggccccauggcgua

SEQ ID NO: 900422 - RNA, 23 nt, Human
cccacaaaucccaggucuaggcc

SEQ ID NO: 900423 - RNA, 22 nt, Human
ccccaaaggccagcaacguggg

SEQ ID NO: 900424 - RNA, 19 nt, Human
ccccaaagucugugucugg

SEQ ID NO: 900425 - RNA, 21 nt, Human
ccccggggcaucuuuggacgg

SEQ ID NO: 900426 - RNA, 20 nt, Human
ccccugcacaaaccucacga

SEQ ID NO: 900427 - RNA, 22 nt, Human
ccccugcugcggccgcuguuac

SEQ ID NO: 900428 - RNA, 23 nt, Human
ccugcugcggccgcuguuaccac

SEQ ID NO: 900429 - RNA, 18 nt, Human
cgccccccugcacaaacc

SEQ ID NO: 900430 - RNA, 18 nt, Human
cucacgaaguuguccccg

SEQ ID NO: 900431 - RNA, 18 nt, Human
cugcaggucuccuggcug

SEQ ID NO: 900432 - RNA, 21 nt, Human
cugcaggucuccuggcugggu

SEQ ID NO: 900433 - RNA, 18 nt, Human
cuggaaggcgcagggcug

SEQ ID NO: 900434 - RNA, 24 nt, Human
cuggucacaccagcagcuuucccc

SEQ ID NO: 900435 - RNA, 21 nt, Human
cuguccucucagggccuggga

SEQ ID NO: 900436 - RNA, 19 nt, Human
cuucuuagcagggagcugg

SEQ ID NO: 900437 - RNA, 22 nt, Human
gagcuggccacagccaaggcgc

SEQ ID NO: 900438 - RNA, 25 nt, Human
gcgcagggcugcaggucuccuggcu

SEQ ID NO: 900439 - RNA, 20 nt, Human
gggaucggccuucgaggccu

SEQ ID NO: 900440 - RNA, 21 nt, Human
gggcugcaggucuccuggcug

SEQ ID NO: 900441 - RNA, 18 nt, Human
gucuaggccaacccccug

SEQ ID NO: 900442 - RNA, 19 nt, Human
uaggugaagggguccacgu

SEQ ID NO: 900443 - RNA, 18 nt, Human
ucuaggccaacccccugc

SEQ ID NO: 900444 - RNA, 22 nt, Human
ucuguccucucagggccuggga

SEQ ID NO: 900445 - RNA, 19 nt, Human
ugacaccccuccccggggc

SEQ ID NO: 900446 - RNA, 20 nt, Human
uggcgggugcucugguaggu

SEQ ID NO: 900447 - RNA, 22 nt, Human
ugggaccugcuucuggaaggcg

SEQ ID NO: 900448 - RNA, 25 nt, Human
uguggucaucucuguccucucaggg

SEQ ID NO: 900449 - RNA, 25 nt, Human
uuaggguggcuuccuggucuccuuc

SEQ ID NO: 900450 - RNA, 22 nt, Human
uugaccccaaaggccagcaacg

SEQ ID NO: 900451 - RNA, 24 nt, Human
uugaccccaaaggccagcaacgug

SEQ ID NO: 900452 - RNA, 24 nt, Human
uuuuuuuuuucaggugggcacugg

SEQ ID NO: 900453 - RNA, 26 nt, Human
aaaaagaaaaagacauccauaaaaag

SEQ ID NO: 900454 - RNA, 21 nt, Human
aaaaagaaacagauccaugca

SEQ ID NO: 900455 - RNA, 26 nt, Human
aaaaagaaacagauccaugcacucaa

SEQ ID NO: 900456 - RNA, 25 nt, Human
aaaagaaaaagacauccauaaaaag

SEQ ID NO: 900457 - RNA, 23 nt, Human
aaagaaaaagacauccauaaaaa

SEQ ID NO: 900458 - RNA, 22 nt, Human
aagaaaaagacauccauaaaaa

SEQ ID NO: 900459 - RNA, 19 nt, Human
aagcaaggagggaggggug

SEQ ID NO: 900460 - RNA, 18 nt, Human
aaggacagagagagagag

SEQ ID NO: 900461 - RNA, 19 nt, Human
acagagagaggcagagacg

SEQ ID NO: 900462 - RNA, 21 nt, Human
acagagagaggcagagacgga

SEQ ID NO: 900463 - RNA, 20 nt, Human
acgcgccccuagcccggcgu

SEQ ID NO: 900464 - RNA, 24 nt, Human
acuccugggggugggggugggggu

SEQ ID NO: 900465 - RNA, 22 nt, Human
agaacaaaagcccagcaaaaag

SEQ ID NO: 900466 - RNA, 21 nt, Human
agaaccagagccauaaaaaga

SEQ ID NO: 900467 - RNA, 24 nt, Human
agagaacaaaagcccagcaaaaag

SEQ ID NO: 900468 - RNA, 18 nt, Human
agauccaugcacucaacu

SEQ ID NO: 900469 - RNA, 20 nt, Human
aggcagaaugaaaagggccc

SEQ ID NO: 900470 - RNA, 24 nt, Human
aggcagaaugaaaagggcccccag

SEQ ID NO: 900471 - RNA, 19 nt, Human
aggcagagaacaaaagccc

SEQ ID NO: 900472 - RNA, 22 nt, Human
aggcagcagcccgagccacagc

SEQ ID NO: 900473 - RNA, 23 nt, Human
aggcagcagcccgagccacagca

SEQ ID NO: 900474 - RNA, 21 nt, Human
aggccccccaggcagcagccc

SEQ ID NO: 900475 - RNA, 23 nt, Human
caaaagcccagcaaaaaggcggg

SEQ ID NO: 900476 - RNA, 19 nt, Human
caacuccuggggguggggg

SEQ ID NO: 900477 - RNA, 19 nt, Human
cagaaagaaagaaguggug

SEQ ID NO: 900478 - RNA, 24 nt, Human
cagagagagagagacagagagagg

SEQ ID NO: 900479 - RNA, 19 nt, Human
cagagccauaaaaagaaaa

SEQ ID NO: 900480 - RNA, 22 nt, Human
cagagccauaaaaagaaaaaga

SEQ ID NO: 900481 - RNA, 20 nt, Human
cagauccaugcacucaacuc

SEQ ID NO: 900482 - RNA, 23 nt, Human
cagcagcccgagccacagcauuu

SEQ ID NO: 900483 - RNA, 19 nt, Human
ccagcccccggaggccccc

SEQ ID NO: 900484 - RNA, 18 nt, Human
ccaggcagcagcccgagc

SEQ ID NO: 900485 - RNA, 23 nt, Human
cccagcaaaaaggcggggagaaa

SEQ ID NO: 900486 - RNA, 19 nt, Human
cccccagcccccggaggcc

SEQ ID NO: 900487 - RNA, 18 nt, Human
ccccggaggccccccagg

SEQ ID NO: 900488 - RNA, 20 nt, Human
ccuagcccggcgucccgacc

SEQ ID NO: 900489 - RNA, 25 nt, Human
cgccccuagcccggcgucccgaccu

SEQ ID NO: 900490 - RNA, 19 nt, Human
cucaacuccuggggguggg

SEQ ID NO: 900491 - RNA, 21 nt, Human
cugggggugggggugggggug

SEQ ID NO: 900492 - RNA, 21 nt, Human
gaaaaagacauccauaaaaag

SEQ ID NO: 900493 - RNA, 21 nt, Human
gaaagaacuggagaaccagag

SEQ ID NO: 900494 - RNA, 21 nt, Human
gaaccagagccauaaaaagaa

SEQ ID NO: 900495 - RNA, 24 nt, Human
gcagagaacaaaagcccagcaaaa

SEQ ID NO: 900496 - RNA, 19 nt, Human
gccccccaggcagcagccc

SEQ ID NO: 900497 - RNA, 20 nt, Human
gccccccaggcagcagcccg

SEQ ID NO: 900498 - RNA, 22 nt, Human
ggaagcaaggagggaggggugg

SEQ ID NO: 900499 - RNA, 26 nt, Human
ggaagcaaggagggagggguggaagg

SEQ ID NO: 900500 - RNA, 26 nt, Human
gggugggaagcaaggagggaggggug

SEQ ID NO: 900501 - RNA, 21 nt, Human
uaaaaaaagaaacagauccau

SEQ ID NO: 900502 - RNA, 22 nt, Human
uaaauaaaaaaagaaacagauc

SEQ ID NO: 900503 - RNA, 23 nt, Human
uaaauaaaaaaagaaacagaucc

SEQ ID NO: 900504 - RNA, 24 nt, Human
ucaacuccuggggguggggguggg

SEQ ID NO: 900505 - RNA, 22 nt, Human
uccauaaaaaggcagaaagaaa

SEQ ID NO: 900506 - RNA, 19 nt, Human
ugaaaaaauagacagaaau

SEQ ID NO: 900507 - RNA, 22 nt, Human
ugaaaagggcccccagcccccg

SEQ ID NO: 900508 - RNA, 22 nt, Human
ugacagagacagagagaucacc

SEQ ID NO: 900509 - RNA, 21 nt, Human
ugaggaaugggugggaagcaa

SEQ ID NO: 900510 - RNA, 21 nt, Human
ugggggugggagugagggaug

SEQ ID NO: 900511 - RNA, 18 nt, Human
ugggggugggggugggag

SEQ ID NO: 900512 - RNA, 18 nt, Human
uggggguggggguggggg

SEQ ID NO: 900513 - RNA, 25 nt, Human
aaaaagacauucgugcauuuaagcc

SEQ ID NO: 900514 - RNA, 22 nt, Human
aaauaauagugaagaaaaaaac

SEQ ID NO: 900515 - RNA, 20 nt, Human
aaaugaguagagucaacuca

SEQ ID NO: 900516 - RNA, 22 nt, Human
aacucaaugaaauguuugauau

SEQ ID NO: 900517 - RNA, 22 nt, Human
aagcagaggcggcggcagcagc

SEQ ID NO: 900518 - RNA, 19 nt, Human
aaugguagaaauacauacu

SEQ ID NO: 900519 - RNA, 18 nt, Human
aaugucaguggcccaaaa

SEQ ID NO: 900520 - RNA, 18 nt, Human
aauuuuuuuuuucuaaga

SEQ ID NO: 900521 - RNA, 19 nt, Human
acauccuuaucuuucaaag

SEQ ID NO: 900522 - RNA, 18 nt, Human
acaugaugcuuuaucuaa

SEQ ID NO: 900523 - RNA, 19 nt, Human
acugcugagagaggugugg

SEQ ID NO: 900524 - RNA, 18 nt, Human
agaaaugaugaaaaauaa

SEQ ID NO: 900525 - RNA, 18 nt, Human
agaggcggcggcagcagc

SEQ ID NO: 900526 - RNA, 23 nt, Human
agcagcagcggcagcggcggcag

SEQ ID NO: 900527 - RNA, 22 nt, Human
agcagcggcagcggcggcagcc

SEQ ID NO: 900528 - RNA, 24 nt, Human
agcaguagcaauaacagcagcagc

SEQ ID NO: 900529 - RNA, 23 nt, Human
agccaagaagauuauucuugacc

SEQ ID NO: 900530 - RNA, 19 nt, Human
agcggcagcggcggcagcc

SEQ ID NO: 900531 - RNA, 18 nt, Human
aucagagaauuguguuaa

SEQ ID NO: 900532 - RNA, 23 nt, Human
augaaaaauaauagugaagaaaa

SEQ ID NO: 900533 - RNA, 21 nt, Human
auucucagagcuaggaguccc

SEQ ID NO: 900534 - RNA, 22 nt, Human
caaaaguuuugacccaaggaau

SEQ ID NO: 900535 - RNA, 25 nt, Human
caaagacaacucccaagucucccca

SEQ ID NO: 900536 - RNA, 23 nt, Human
caaggaauagauaaagggauuaa

SEQ ID NO: 900537 - RNA, 21 nt, Human
cacaauggugguuacaauggu

SEQ ID NO: 900538 - RNA, 21 nt, Human
cagcagcaguagcaauaacag

SEQ ID NO: 900539 - RNA, 23 nt, Human
cagcagcggcagcggcggcagcc

SEQ ID NO: 900540 - RNA, 21 nt, Human
cagcggcagcggcggcagccg

SEQ ID NO: 900541 - RNA, 21 nt, Human
cauaaucuaaaucuagaggac

SEQ ID NO: 900542 - RNA, 19 nt, Human
caugacaaggacaugauag

SEQ ID NO: 900543 - RNA, 21 nt, Human
cccaaggaauagauaaaggga

SEQ ID NO: 900544 - RNA, 21 nt, Human
cgcccuggggggcgaucauuc

SEQ ID NO: 900545 - RNA, 26 nt, Human
cgccuccaacccgcgcgccccaguuu

SEQ ID NO: 900546 - RNA, 23 nt, Human
cgcgcgccccaguuuacccucuc

SEQ ID NO: 900547 - RNA, 23 nt, Human
cggcagcggcggcagccgcccug

SEQ ID NO: 900548 - RNA, 25 nt, Human
cuccccauauuuuauuuugcacaaa

SEQ ID NO: 900549 - RNA, 19 nt, Human
cugcagugggcgcuggccg

SEQ ID NO: 900550 - RNA, 23 nt, Human
cuguacagcaccgcaucagagaa

SEQ ID NO: 900551 - RNA, 21 nt, Human
gaaaaauaauagugaagaaaa

SEQ ID NO: 900552 - RNA, 21 nt, Human
gacaacucccaagucucccca

SEQ ID NO: 900553 - RNA, 21 nt, Human
gaggcggcggcagcagcagua

SEQ ID NO: 900554 - RNA, 20 nt, Human
gaguaacucaguuguaugaa

SEQ ID NO: 900555 - RNA, 19 nt, Human
gcaaaacuaugacuuuagc

SEQ ID NO: 900556 - RNA, 18 nt, Human
gcagcagcggcagcggcg

SEQ ID NO: 900557 - RNA, 19 nt, Human
gcagcggcagcggcggcag

SEQ ID NO: 900558 - RNA, 19 nt, Human
gcggcagccgcccuggggg

SEQ ID NO: 900559 - RNA, 20 nt, Human
gcugaagcgccuccaacccg

SEQ ID NO: 900560 - RNA, 20 nt, Human
ggcccaaaaaacuuggggua

SEQ ID NO: 900561 - RNA, 25 nt, Human
ggccgcggugcugaagcgccuccaa

SEQ ID NO: 900562 - RNA, 18 nt, Human
ggcggcagccgcccuggg

SEQ ID NO: 900563 - RNA, 21 nt, Human
ggguccugacauaaggaauuu

SEQ ID NO: 900564 - RNA, 18 nt, Human
gucguuuuuccauuuugu

SEQ ID NO: 900565 - RNA, 18 nt, Human
guugcauucaguggagug

SEQ ID NO: 900566 - RNA, 18 nt, Human
uaaaugaaauccuuacau

SEQ ID NO: 900567 - RNA, 23 nt, Human
uaaauuaaaugcuaguacauuua

SEQ ID NO: 900568 - RNA, 18 nt, Human
uaacuccucagggcucau

SEQ ID NO: 900569 - RNA, 23 nt, Human
uacaaugguagaaauacauacug

SEQ ID NO: 900570 - RNA, 26 nt, Human
uacugccaauaaaauguuagcaagag

SEQ ID NO: 900571 - RNA, 22 nt, Human
uagauaaagggauuaacugcug

SEQ ID NO: 900572 - RNA, 23 nt, Human
uagcacaauggugguuacaaugg

SEQ ID NO: 900573 - RNA, 22 nt, Human
uagcuagcccaccucaaaaguu

SEQ ID NO: 900574 - RNA, 22 nt, Human
uauauggguugcauucagugga

SEQ ID NO: 900575 - RNA, 23 nt, Human
uauguaaagggguaagccaagaa

SEQ ID NO: 900576 - RNA, 23 nt, Human
uauguggaaaauacauccaaacu

SEQ ID NO: 900577 - RNA, 19 nt, Human
uauuacuuucacagaagug

SEQ ID NO: 900578 - RNA, 22 nt, Human
ucaacucaaauccaauauuugg

SEQ ID NO: 900579 - RNA, 18 nt, Human
ucuaaaucauuacauccu

SEQ ID NO: 900580 - RNA, 20 nt, Human
ugaaaacaugucacauuugc

SEQ ID NO: 900581 - RNA, 23 nt, Human
ugaaaccacaaagacaacuccca

SEQ ID NO: 900582 - RNA, 19 nt, Human
ugaagaaaaaaacggaagg

SEQ ID NO: 900583 - RNA, 18 nt, Human
ugaagcgccuccaacccg

SEQ ID NO: 900584 - RNA, 21 nt, Human
ugacaguuuuaaaaaaaaaga

SEQ ID NO: 900585 - RNA, 19 nt, Human
ugccccucuuuacucucuu

SEQ ID NO: 900586 - RNA, 19 nt, Human
ugcugagagagguguggag

SEQ ID NO: 900587 - RNA, 19 nt, Human
ugcuuuggagaaaugauga

SEQ ID NO: 900588 - RNA, 19 nt, Human
uggggggcgaucauuccgc

SEQ ID NO: 900589 - RNA, 20 nt, Human
uguacagcaccgcaucagag

SEQ ID NO: 900590 - RNA, 24 nt, Human
uguaggcucuccacucacugcaga

SEQ ID NO: 900591 - RNA, 19 nt, Human
uguguuaacagcaaaauga

SEQ ID NO: 900592 - RNA, 23 nt, Human
uguuugauauauaguuagcuuau

SEQ ID NO: 900593 - RNA, 22 nt, Human
uugaaaccacaaagacaacucc

SEQ ID NO: 900594 - RNA, 23 nt, Human
uugaaaccacaaagacaacuccc

SEQ ID NO: 900595 - RNA, 24 nt, Human
uugaaaccacaaagacaacuccca

SEQ ID NO: 900596 - RNA, 23 nt, Human
uugaaaugaauuacacuuaaaug

SEQ ID NO: 900597 - RNA, 19 nt, Human
uugggguaaaauaaagacu

SEQ ID NO: 900598 - RNA, 26 nt, Human
uuucaaagaaaaucaugguacuaugg

SEQ ID NO: 900599 - RNA, 23 nt, Human
uuugccccucuuuacucucuuuu

SEQ ID NO: 900600 - RNA, 25 nt, Human
uuuuugccccucuuuacucucuuuu

SEQ ID NO: 900601 - RNA, 23 nt, Human
uuuuuuaaagaaauaaaugggau

SEQ ID NO: 900602 - RNA, 23 nt, Human
aaaagaaccaccccuccgccccc

SEQ ID NO: 900603 - RNA, 22 nt, Human
aaccaccccuccgcccccgcca

SEQ ID NO: 900604 - RNA, 27 nt, Human
aaccgacccagaaccccaaacugcccc

SEQ ID NO: 900605 - RNA, 21 nt, Human
aacgucccaggggugggggcg

SEQ ID NO: 900606 - RNA, 20 nt, Human
aacuggucuuuuucugccuc

SEQ ID NO: 900607 - RNA, 23 nt, Human
aagccgcuggaaccgacccagaa

SEQ ID NO: 900608 - RNA, 25 nt, Human
aauacagcucuccaaacagcugguc

SEQ ID NO: 900609 - RNA, 23 nt, Human
acaaccaaaaccuuaaacauaga

SEQ ID NO: 900610 - RNA, 25 nt, Human
acccaccgcaccccgaccggguguc

SEQ ID NO: 900611 - RNA, 25 nt, Human
acccagaaccccaaacugccccgag

SEQ ID NO: 900612 - RNA, 18 nt, Human
acccggggcgcgccaacc

SEQ ID NO: 900613 - RNA, 20 nt, Human
acgcuacuuuuggggaaagg

SEQ ID NO: 900614 - RNA, 19 nt, Human
acuaccaacaaccaaaacc

SEQ ID NO: 900615 - RNA, 22 nt, Human
aggaaaagaaccaccccuccgc

SEQ ID NO: 900616 - RNA, 26 nt, Human
aggaacagcggaaagcgccuucccgc

SEQ ID NO: 900617 - RNA, 22 nt, Human
agggaggccgggccgaggucgc

SEQ ID NO: 900618 - RNA, 19 nt, Human
agggggugcccgacagucc

SEQ ID NO: 900619 - RNA, 24 nt, Human
aggggugggggcggggaagggggu

SEQ ID NO: 900620 - RNA, 21 nt, Human
caccccuccgcccccgccacu

SEQ ID NO: 900621 - RNA, 19 nt, Human
caccgucaggaaacaaggu

SEQ ID NO: 900622 - RNA, 22 nt, Human
cacuggaugcaaggcgguuggu

SEQ ID NO: 900623 - RNA, 21 nt, Human
cagaaccccaaacugccccga

SEQ ID NO: 900624 - RNA, 23 nt, Human
cauagaaaaucaaaguaaacugc

SEQ ID NO: 900625 - RNA, 23 nt, Human
cccaccgcaccccgacgccgacc

SEQ ID NO: 900626 - RNA, 26 nt, Human
cccaccgcaccccgacgccgaccacc

SEQ ID NO: 900627 - RNA, 21 nt, Human
cccagaaccccaaacugcccc

SEQ ID NO: 900628 - RNA, 28 nt, Human
cccagaaccccaaacugccccgaggcgc

SEQ ID NO: 900629 - RNA, 20 nt, Human
ccccaggcccaggcccgccc

SEQ ID NO: 900630 - RNA, 21 nt, Human
cccccaggauuuaagagcgaa

SEQ ID NO: 900631 - RNA, 24 nt, Human
cccccaggauuuaagagcgaaaac

SEQ ID NO: 900632 - RNA, 22 nt, Human
ccccuacccaccgcaccccgac

SEQ ID NO: 900633 - RNA, 21 nt, Human
ccgccgagcagcgggcgguuc

SEQ ID NO: 900634 - RNA, 22 nt, Human
ccgccgucgccaccgcagcugg

SEQ ID NO: 900635 - RNA, 20 nt, Human
ccgcuggaaccgacccagaa

SEQ ID NO: 900636 - RNA, 21 nt, Human
cgacccagaaccccaaacugc

SEQ ID NO: 900637 - RNA, 23 nt, Human
cgacccagaaccccaaacugccc

SEQ ID NO: 900638 - RNA, 22 nt, Human
cgccccaggcccaggcccgccc

SEQ ID NO: 900639 - RNA, 18 nt, Human
cgcccguggccucuggcg

SEQ ID NO: 900640 - RNA, 24 nt, Human
cggcccgcugaggaacagcggaaa

SEQ ID NO: 900641 - RNA, 22 nt, Human
cggccucgcucucccagacgca

SEQ ID NO: 900642 - RNA, 22 nt, Human
cggcuacuaccaacaaccaaaa

SEQ ID NO: 900643 - RNA, 22 nt, Human
cuacguauguagcucuucaacu

SEQ ID NO: 900644 - RNA, 24 nt, Human
cugcgggccgcgcuggucaagggc

SEQ ID NO: 900645 - RNA, 21 nt, Human
cugggugagagcgagcacuuu

SEQ ID NO: 900646 - RNA, 22 nt, Human
cugggugagagcgagcacuuuc

SEQ ID NO: 900647 - RNA, 19 nt, Human
cuugaguuccggcagccuc

SEQ ID NO: 900648 - RNA, 20 nt, Human
gacccagaaccccaaacugc

SEQ ID NO: 900649 - RNA, 19 nt, Human
gagcacuuucugccuaaag

SEQ ID NO: 900650 - RNA, 21 nt, Human
gagcagcgggcgguucagggc

SEQ ID NO: 900651 - RNA, 22 nt, Human
gagcgagcacuuucugccuaaa

SEQ ID NO: 900652 - RNA, 20 nt, Human
gaggaacagcggaaagcgcc

SEQ ID NO: 900653 - RNA, 20 nt, Human
gaguucuaaguugcuuucua

SEQ ID NO: 900654 - RNA, 19 nt, Human
gcagcgggcgguucagggc

SEQ ID NO: 900655 - RNA, 26 nt, Human
gcgagucuuaaauacagcucuccaaa

SEQ ID NO: 900656 - RNA, 19 nt, Human
gcuccggggagguagcgcu

SEQ ID NO: 900657 - RNA, 18 nt, Human
ggaacaagggcgcccgug

SEQ ID NO: 900658 - RNA, 21 nt, Human
ggagaaggaaaagaaccaccc

SEQ ID NO: 900659 - RNA, 20 nt, Human
ggcccgcugaggaacagcgg

SEQ ID NO: 900660 - RNA, 23 nt, Human
ggcccgcugaggaacagcggaaa

SEQ ID NO: 900661 - RNA, 18 nt, Human
ggccgggccgaggucgcg

SEQ ID NO: 900662 - RNA, 23 nt, Human
ggcggaggagaaggaaaagaacc

SEQ ID NO: 900663 - RNA, 22 nt, Human
gucuguaacaaaucgaaacuga

SEQ ID NO: 900664 - RNA, 21 nt, Human
guggacccacgucccaaccca

SEQ ID NO: 900665 - RNA, 20 nt, Human
guuguccucgccccuacccc

SEQ ID NO: 900666 - RNA, 19 nt, Human
uaaaauaaagugccaguua

SEQ ID NO: 900667 - RNA, 23 nt, Human
uaaaauaaagugccaguuaaauu

SEQ ID NO: 900668 - RNA, 21 nt, Human
uaagcaagcuuaaauguuggu

SEQ ID NO: 900669 - RNA, 20 nt, Human
uacaccgucaggaaacaagg

SEQ ID NO: 900670 - RNA, 21 nt, Human
uacagcucuccaaacagcugg

SEQ ID NO: 900671 - RNA, 23 nt, Human
uacagcucuccaaacagcugguc

SEQ ID NO: 900672 - RNA, 22 nt, Human
uacccaccgcaccccgacgccg

SEQ ID NO: 900673 - RNA, 18 nt, Human
uacuaccaacaaccaaaa

SEQ ID NO: 900674 - RNA, 23 nt, Human
uacuccugcguguuaaugagaac

SEQ ID NO: 900675 - RNA, 21 nt, Human
uccaaacagcuggucuacaaa

SEQ ID NO: 900676 - RNA, 20 nt, Human
ucccagaccgucugcaccgc

SEQ ID NO: 900677 - RNA, 19 nt, Human
uccgccgagcagcgggcgg

SEQ ID NO: 900678 - RNA, 23 nt, Human
ucgaaaugcuuuccuugcucggc

SEQ ID NO: 900679 - RNA, 18 nt, Human
ucucccagacgcagggag

SEQ ID NO: 900680 - RNA, 24 nt, Human
ucuguaacaaaucgaaaccggggc

SEQ ID NO: 900681 - RNA, 22 nt, Human
ugacaggacggcgacugugaga

SEQ ID NO: 900682 - RNA, 20 nt, Human
ugcucgagcgcagccccuag

SEQ ID NO: 900683 - RNA, 25 nt, Human
ugcugggugagagcgagcacuuucu

SEQ ID NO: 900684 - RNA, 24 nt, Human
ugcugggugagagcgagcacuuuu

SEQ ID NO: 900685 - RNA, 21 nt, Human
uggaaccgacccagaacccca

SEQ ID NO: 900686 - RNA, 20 nt, Human
uggccggcgggaacaagggc

SEQ ID NO: 900687 - RNA, 24 nt, Human
aaaaagagcauaagaaaccauuaa

SEQ ID NO: 900688 - RNA, 22 nt, Human
agcuagggggauggaugucaua

SEQ ID NO: 900689 - RNA, 18 nt, Human
aguaccuggauggccucu

SEQ ID NO: 900690 - RNA, 22 nt, Human
auaauggugagaucacaaauac

SEQ ID NO: 900691 - RNA, 22 nt, Human
caaagcaguuauuucuuugcaa

SEQ ID NO: 900692 - RNA, 24 nt, Human
ccucuuacaaaucaaaaauaucau

SEQ ID NO: 900693 - RNA, 31 nt, Human
cugaagaagaggucagagaaaauggucuauu

SEQ ID NO: 900694 - RNA, 19 nt, Human
cuugcaaacaaagcaguua

SEQ ID NO: 900695 - RNA, 19 nt, Human
gcaaaucauuuuguaacaa

SEQ ID NO: 900696 - RNA, 21 nt, Human
uaaagauuuacauuauuuuga

SEQ ID NO: 900697 - RNA, 23 nt, Human
uagaaaugauacacucacuuucu

SEQ ID NO: 900698 - RNA, 23 nt, Human
uaggauaguugcugaaaucugcu

SEQ ID NO: 900699 - RNA, 26 nt, Human
uaggauaguugcugaaaucugcuaaa

SEQ ID NO: 900700 - RNA, 27 nt, Human
uaugaaaugaugcagaugucaccaaca

SEQ ID NO: 900701 - RNA, 18 nt, Human
ucccaguuaaaauggaac

SEQ ID NO: 900702 - RNA, 22 nt, Human
ugaaaucugcuaaaauacaaau

SEQ ID NO: 900703 - RNA, 20 nt, Human
ugaaaugaugcagaugucac

SEQ ID NO: 900704 - RNA, 22 nt, Human
ugagcuagggggauggauguca

SEQ ID NO: 900705 - RNA, 19 nt, Human
ugccuuggguccuuaguac

SEQ ID NO: 900706 - RNA, 19 nt, Human
ugcuaaaauacaaauugca

SEQ ID NO: 900707 - RNA, 19 nt, Human
ugcuacuuccuuccucauu

SEQ ID NO: 900708 - RNA, 20 nt, Human
uggugagaucacaaauacca

SEQ ID NO: 900709 - RNA, 19 nt, Human
uguuguuuugguauucuga

SEQ ID NO: 900710 - RNA, 21 nt, Human
uguuguuuugguauucugagg

SEQ ID NO: 900711 - RNA, 18 nt, Human
uucuuugcaaaucauuuu

SEQ ID NO: 900712 - RNA, 25 nt, Human
uucuuugcaaaucauuuuguaacaa

SEQ ID NO: 900713 - RNA, 22 nt, Human
aaaugcccgcgugcacaagaau

SEQ ID NO: 900714 - RNA, 24 nt, Human
accacuacaugaaaugaaucacaa

SEQ ID NO: 900715 - RNA, 18 nt, Human
acgcagagugugcacgca

SEQ ID NO: 900716 - RNA, 20 nt, Human
agaggcagacaacucgggaa

SEQ ID NO: 900717 - RNA, 18 nt, Human
agccugggggcagaggcu

SEQ ID NO: 900718 - RNA, 19 nt, Human
agccugggggcagaggcuc

SEQ ID NO: 900719 - RNA, 21 nt, Human
aggcugagccucgggugcggc

SEQ ID NO: 900720 - RNA, 18 nt, Human
agggccacuuccaaagcc

SEQ ID NO: 900721 - RNA, 27 nt, Human
agugugcacgcaugugcuuggugugca

SEQ ID NO: 900722 - RNA, 18 nt, Human
augcccgcgugcacaaga

SEQ ID NO: 900723 - RNA, 20 nt, Human
cacaccccucaggcugagcc

SEQ ID NO: 900724 - RNA, 23 nt, Human
caccccugcuuagccuacccgcu

SEQ ID NO: 900725 - RNA, 21 nt, Human
cagcauuugaggagaggcaga

SEQ ID NO: 900726 - RNA, 19 nt, Human
caggcccagccugggggca

SEQ ID NO: 900727 - RNA, 18 nt, Human
cagugggagaugcggggc

SEQ ID NO: 900728 - RNA, 21 nt, Human
ccccugcuuagccuacccgcu

SEQ ID NO: 900729 - RNA, 25 nt, Human
ccccugcuuagccuacccgcugcuu

SEQ ID NO: 900730 - RNA, 23 nt, Human
ccucagcaccccugcuuagccua

SEQ ID NO: 900731 - RNA, 18 nt, Human
cugguguguucucuggag

SEQ ID NO: 900732 - RNA, 18 nt, Human
gaagugggagggccuggg

SEQ ID NO: 900733 - RNA, 18 nt, Human
gaggggccauggggcugg

SEQ ID NO: 900734 - RNA, 24 nt, Human
gcacagggagcucaggacuucagc

SEQ ID NO: 900735 - RNA, 21 nt, Human
gcagugggagaugcggggcug

SEQ ID NO: 900736 - RNA, 21 nt, Human
gcugcugagcuggaaagugga

SEQ ID NO: 900737 - RNA, 23 nt, Human
ggacguuauggggcaggaguuuu

SEQ ID NO: 900738 - RNA, 18 nt, Human
ggccauggggcuggggcu

SEQ ID NO: 900739 - RNA, 18 nt, Human
gggaagaagccacaggug

SEQ ID NO: 900740 - RNA, 21 nt, Human
gggaagugggagggccugggc

SEQ ID NO: 900741 - RNA, 22 nt, Human
gggagaugcggggcuggccuuc

SEQ ID NO: 900742 - RNA, 27 nt, Human
uacacugggggaagaagccacagguga

SEQ ID NO: 900743 - RNA, 25 nt, Human
uccucagcaccccugcuuagccuac

SEQ ID NO: 900744 - RNA, 18 nt, Human
ucgagcccacagagaagu

SEQ ID NO: 900745 - RNA, 22 nt, Human
ugaaaugaaucacagacgcaga

SEQ ID NO: 900746 - RNA, 20 nt, Human
ugaggagaggcagacaacuc

SEQ ID NO: 900747 - RNA, 21 nt, Human
ugagggagacgugggggggcu

SEQ ID NO: 900748 - RNA, 19 nt, Human
ugagguguggagaggggcc

SEQ ID NO: 900749 - RNA, 18 nt, Human
ugcaaagggaggucugug

SEQ ID NO: 900750 - RNA, 18 nt, Human
uggacaauugcagcacac

SEQ ID NO: 900751 - RNA, 19 nt, Human
uggagaggggccauggggc

SEQ ID NO: 900752 - RNA, 23 nt, Human
uggagaggggccauggggcuggg

SEQ ID NO: 900753 - RNA, 22 nt, Human
uguauaugagggagacgugggg

SEQ ID NO: 900754 - RNA, 24 nt, Human
uguggagaggggccauggggcugg

SEQ ID NO: 900755 - RNA, 22 nt, Human
aaacagagcagucaagaccagg

SEQ ID NO: 900756 - RNA, 22 nt, Human
aagcccugccaggccccacccc

SEQ ID NO: 900757 - RNA, 21 nt, Human
aaguccuccagguggcagcuc

SEQ ID NO: 900758 - RNA, 23 nt, Human
acagggcugaaggcagcuggagc

SEQ ID NO: 900759 - RNA, 26 nt, Human
acccaggguucugccaacgcagcagc

SEQ ID NO: 900760 - RNA, 18 nt, Human
accgagcaucccuggccc

SEQ ID NO: 900761 - RNA, 18 nt, Human
acgcagcagcagagaggc

SEQ ID NO: 900762 - RNA, 24 nt, Human
agcacggccacugaccucuggcuu

SEQ ID NO: 900763 - RNA, 18 nt, Human
agggccagcucggggucu

SEQ ID NO: 900764 - RNA, 22 nt, Human
agggcugaaggcagcuggagcc

SEQ ID NO: 900765 - RNA, 18 nt, Human
agguggcccuaaugcuuu

SEQ ID NO: 900766 - RNA, 23 nt, Human
caagaccaggaaaacgaggccuc

SEQ ID NO: 900767 - RNA, 28 nt, Human
caagcucaggcccuacacagagccaucu

SEQ ID NO: 900768 - RNA, 21 nt, Human
cacacagcacauggggggcac

SEQ ID NO: 900769 - RNA, 21 nt, Human
cacacagcuuccccgcaacac

SEQ ID NO: 900770 - RNA, 22 nt, Human
cacagcacauggggggcacagg

SEQ ID NO: 900771 - RNA, 19 nt, Human
caccgcuggagggauggcc

SEQ ID NO: 900772 - RNA, 20 nt, Human
caccgugcagcacacagaaa

SEQ ID NO: 900773 - RNA, 20 nt, Human
cagcacauggggggcacagg

SEQ ID NO: 900774 - RNA, 19 nt, Human
ccaaacagagcagucaaga

SEQ ID NO: 900775 - RNA, 21 nt, Human
ccacagggaaaagcccauccc

SEQ ID NO: 900776 - RNA, 19 nt, Human
ccaccagcuucuccuucca

SEQ ID NO: 900777 - RNA, 19 nt, Human
ccaggccccaccccucaug

SEQ ID NO: 900778 - RNA, 23 nt, Human
ccagggccucucgcuggucuccu

SEQ ID NO: 900779 - RNA, 19 nt, Human
cccaaacagagcagucaag

SEQ ID NO: 900780 - RNA, 20 nt, Human
cccacacugagaagcagggc

SEQ ID NO: 900781 - RNA, 23 nt, Human
cccacagggaaaagcccauccca

SEQ ID NO: 900782 - RNA, 22 nt, Human
cccacccaaacagagcagucaa

SEQ ID NO: 900783 - RNA, 18 nt, Human
ccccaaagaaaagcugcc

SEQ ID NO: 900784 - RNA, 25 nt, Human
ccccaaagaaaagcugccugcugca

SEQ ID NO: 900785 - RNA, 22 nt, Human
cccccagagaaucuucucccac

SEQ ID NO: 900786 - RNA, 23 nt, Human
ccccucaugcuggcucugcugug

SEQ ID NO: 900787 - RNA, 22 nt, Human
cccgcaguguccucacagccac

SEQ ID NO: 900788 - RNA, 30 nt, Human
cccgcaguguccucacagccaccacagccu

SEQ ID NO: 900789 - RNA, 20 nt, Human
cccucagccggcuggcaguc

SEQ ID NO: 900790 - RNA, 21 nt, Human
cccucaugcuggcucugcugu

SEQ ID NO: 900791 - RNA, 21 nt, Human
cccugccaggccccaccccuc

SEQ ID NO: 900792 - RNA, 18 nt, Human
ccguggagacccccgccc

SEQ ID NO: 900793 - RNA, 21 nt, Human
ccucccguugggcagcaagcu

SEQ ID NO: 900794 - RNA, 20 nt, Human
ccuccgggugccugcccacc

SEQ ID NO: 900795 - RNA, 25 nt, Human
ccucuggcuucaagcaaaggagagg

SEQ ID NO: 900796 - RNA, 24 nt, Human
ccugagacaccugccccacacuga

SEQ ID NO: 900797 - RNA, 20 nt, Human
ccugcccacccaggguucug

SEQ ID NO: 900798 - RNA, 18 nt, Human
ccugcugcacuucccggg

SEQ ID NO: 900799 - RNA, 23 nt, Human
ccuggcccacagggaaaagccca

SEQ ID NO: 900800 - RNA, 24 nt, Human
cgcaguguccucacagccaccaca

SEQ ID NO: 900801 - RNA, 24 nt, Human
cggaacaggcaaguccuccaggug

SEQ ID NO: 900802 - RNA, 25 nt, Human
cgggugccugcccacccaggguucu

SEQ ID NO: 900803 - RNA, 18 nt, Human
cugcaaccuccuugggag

SEQ ID NO: 900804 - RNA, 19 nt, Human
cugccaacgcagcagcaga

SEQ ID NO: 900805 - RNA, 23 nt, Human
cugccaggccccaccccucaugc

SEQ ID NO: 900806 - RNA, 21 nt, Human
cugggguggccccggcugcac

SEQ ID NO: 900807 - RNA, 24 nt, Human
cuguacgguacuucugcaaccucc

SEQ ID NO: 900808 - RNA, 21 nt, Human
cugugaggggagccuugggag

SEQ ID NO: 900809 - RNA, 19 nt, Human
gaacagagcugcccaugug

SEQ ID NO: 900810 - RNA, 22 nt, Human
gaagcacggggagggaggggca

SEQ ID NO: 900811 - RNA, 22 nt, Human
gaaucuucucccacccaaacag

SEQ ID NO: 900812 - RNA, 19 nt, Human
gacaggcaccaugggcaga

SEQ ID NO: 900813 - RNA, 19 nt, Human
gaccaggaaaacgaggccu

SEQ ID NO: 900814 - RNA, 26 nt, Human
gagaaucuucucccacccaaacagag

SEQ ID NO: 900815 - RNA, 25 nt, Human
gagaggcugugaggggagccuuggg

SEQ ID NO: 900816 - RNA, 18 nt, Human
gcacauggggggcacagg

SEQ ID NO: 900817 - RNA, 28 nt, Human
gcagcagagaggccaagagucacaugaa

SEQ ID NO: 900818 - RNA, 21 nt, Human
gcaguguccucacagccacca

SEQ ID NO: 900819 - RNA, 22 nt, Human
gccccaccccucaugcuggcuc

SEQ ID NO: 900820 - RNA, 21 nt, Human
gcccugccaggccccaccccu

SEQ ID NO: 900821 - RNA, 20 nt, Human
gccugcugcacuucccgggc

SEQ ID NO: 900822 - RNA, 19 nt, Human
gccuugggaggaugugggg

SEQ ID NO: 900823 - RNA, 19 nt, Human
gccuuugcaguuuggcuca

SEQ ID NO: 900824 - RNA, 19 nt, Human
gcucagggcccagggugug

SEQ ID NO: 900825 - RNA, 18 nt, Human
ggaaaagcccaucccagg

SEQ ID NO: 900826 - RNA, 24 nt, Human
gggaaaagcccaucccaggcucug

SEQ ID NO: 900827 - RNA, 19 nt, Human
gggcacaggaugacacagc

SEQ ID NO: 900828 - RNA, 24 nt, Human
gggccagcucggggucugcagcca

SEQ ID NO: 900829 - RNA, 23 nt, Human
gggggcacaggaugacacagcug

SEQ ID NO: 900830 - RNA, 23 nt, Human
gucggaacaggcaaguccuccag

SEQ ID NO: 900831 - RNA, 20 nt, Human
guggagucggaacaggcaag

SEQ ID NO: 900832 - RNA, 22 nt, Human
guggccaccagcuucuccuucc

SEQ ID NO: 900833 - RNA, 22 nt, Human
ucaagcaagcccugccaggccc

SEQ ID NO: 900834 - RNA, 20 nt, Human
ucagggaugaggccugcacc

SEQ ID NO: 900835 - RNA, 22 nt, Human
ucagggcaagucccaccccaaa

SEQ ID NO: 900836 - RNA, 19 nt, Human
uccaccagcaugucagcug

SEQ ID NO: 900837 - RNA, 23 nt, Human
uccaccagcaugucagcugcuuc

SEQ ID NO: 900838 - RNA, 19 nt, Human
ucccgggccgugccaagcc

SEQ ID NO: 900839 - RNA, 18 nt, Human
ucccuggcccacagggaa

SEQ ID NO: 900840 - RNA, 19 nt, Human
uccgagggccagcucgggg

SEQ ID NO: 900841 - RNA, 22 nt, Human
uccuuguguccccucggcccug

SEQ ID NO: 900842 - RNA, 22 nt, Human
ucggcccugcaccaggagggca

SEQ ID NO: 900843 - RNA, 23 nt, Human
ucguccugagacaccugccccac

SEQ ID NO: 900844 - RNA, 22 nt, Human
ucuccugaagggaaaugggggu

SEQ ID NO: 900845 - RNA, 22 nt, Human
ucuccugaagggaaaugggggu

SEQ ID NO: 900846 - RNA, 22 nt, Human
ucugcagccagggacugccagc

SEQ ID NO: 900847 - RNA, 18 nt, Human
ucuggaugcucagggccc

SEQ ID NO: 900848 - RNA, 23 nt, Human
ugaaggcagcuggagcccugcca

SEQ ID NO: 900849 - RNA, 18 nt, Human
ugaccucuggcuucaagc

SEQ ID NO: 900850 - RNA, 21 nt, Human
ugccagcccccaccuggacac

SEQ ID NO: 900851 - RNA, 21 nt, Human
ugcugugaagccauccucccg

SEQ ID NO: 900852 - RNA, 23 nt, Human
uggaugcucagggcccagggugu

SEQ ID NO: 900853 - RNA, 21 nt, Human
ugggaccgagcaucccuggcc

SEQ ID NO: 900854 - RNA, 26 nt, Human
ugggaggauguggggacccccagaga

SEQ ID NO: 900855 - RNA, 24 nt, Human
uggggggcacaggaugacacagga

SEQ ID NO: 900856 - RNA, 22 nt, Human
uguccucacagccaccacagcc

SEQ ID NO: 900857 - RNA, 18 nt, Human
ugugaggggagccuuggg

SEQ ID NO: 900858 - RNA, 22 nt, Human
uuccagguagguccuugugucc

SEQ ID NO: 900859 - RNA, 22 nt, Human
accugggaggaguggaagggcu

SEQ ID NO: 900860 - RNA, 21 nt, Human
agagaugaccugggaggagug

SEQ ID NO: 900861 - RNA, 18 nt, Human
aggaaggaggugguccuu

SEQ ID NO: 900862 - RNA, 18 nt, Human
aggaaggaggugguccuu

SEQ ID NO: 900863 - RNA, 21 nt, Human
cacaggagggaggcgugugag

SEQ ID NO: 900864 - RNA, 23 nt, Human
cccgcaguacaaugaggcaggaa

SEQ ID NO: 900865 - RNA, 20 nt, Human
ccugcagcuuccagaccugc

SEQ ID NO: 900866 - RNA, 23 nt, Human
cuccucccccugcauggagaccc

SEQ ID NO: 900867 - RNA, 23 nt, Human
cuguggggaaagaagcaggccuc

SEQ ID NO: 900868 - RNA, 22 nt, Human
gaccugggaggaguggaagggc

SEQ ID NO: 900869 - RNA, 23 nt, Human
gacgugagagcuguggggaaaga

SEQ ID NO: 900870 - RNA, 19 nt, Human
gagaaucccuucagcggcu

SEQ ID NO: 900871 - RNA, 21 nt, Human
gugagagcuguggggaaagaa

SEQ ID NO: 900872 - RNA, 23 nt, Human
gugagagcuguggggaaagaagc

SEQ ID NO: 900873 - RNA, 24 nt, Human
uccaugcugccggcggcacaggag

SEQ ID NO: 900874 - RNA, 23 nt, Human
uccuugggcuucuuugucacccg

SEQ ID NO: 900875 - RNA, 23 nt, Human
uccuugggcuucuuugucacccg

SEQ ID NO: 900876 - RNA, 22 nt, Human
uggauccuggauggagagcccu

SEQ ID NO: 900877 - RNA, 24 nt, Human
uucuggauccuggauggagagccc

SEQ ID NO: 900878 - RNA, 21 nt, Human
aacucggagacacucacuggu

SEQ ID NO: 900879 - RNA, 20 nt, Human
aagaacacaaagaggagaug

SEQ ID NO: 900880 - RNA, 19 nt, Human
aagaggagaugcugcugcu

SEQ ID NO: 900881 - RNA, 18 nt, Human
aggaagaacacaaagagg

SEQ ID NO: 900882 - RNA, 19 nt, Human
aggaagaacacaaagagga

SEQ ID NO: 900883 - RNA, 18 nt, Human
caaagaggagaugcugcu

SEQ ID NO: 900884 - RNA, 23 nt, Human
caagaggaggaacucggagacac

SEQ ID NO: 900885 - RNA, 25 nt, Human
cugcugcuggggcugccuggagagu

SEQ ID NO: 900886 - RNA, 19 nt, Human
gaggaagaacacaaagagg

SEQ ID NO: 900887 - RNA, 22 nt, Human
uagaagacagugaauucagaaa

SEQ ID NO: 900888 - RNA, 19 nt, Human
ucacugguuugucccucuc

SEQ ID NO: 900889 - RNA, 19 nt, Human
ugccuggagagucccaaga

SEQ ID NO: 900890 - RNA, 19 nt, Human
ugccuggagagucccaaga

SEQ ID NO: 900891 - RNA, 18 nt, Human
ugcugcugcuggggcugc

SEQ ID NO: 900892 - RNA, 22 nt, Human
ugcugcugcuggggcugccugg

SEQ ID NO: 900893 - RNA, 24 nt, Human
ugcugcugcuggggcugccuggag

SEQ ID NO: 900894 - RNA, 23 nt, Human
ugucuggacccagcugcauagaa

SEQ ID NO: 900895 - RNA, 24 nt, Human
ccaacuccucucuuggcauggcca

SEQ ID NO: 900896 - RNA, 23 nt, Human
ccaaggcugagauccaccgaagc

SEQ ID NO: 900897 - RNA, 24 nt, Human
cucucuuggcauggccaaggcuga

SEQ ID NO: 900898 - RNA, 19 nt, Human
uuggcauggccaaggcuga

SEQ ID NO: 900899 - RNA, 24 nt, Human
aaacaccaugccauccccccccca

SEQ ID NO: 900900 - RNA, 19 nt, Human
aaacaggaacugccacaug

SEQ ID NO: 900901 - RNA, 22 nt, Human
aacaaaaugcacaaucauaaga

SEQ ID NO: 900902 - RNA, 20 nt, Human
aaccaguccacaaacaccau

SEQ ID NO: 900903 - RNA, 24 nt, Human
aaccaguccacaaacaccaugcca

SEQ ID NO: 900904 - RNA, 18 nt, Human
aacuugaucuuccuucuc

SEQ ID NO: 900905 - RNA, 23 nt, Human
aagaaaaaaggaacacugcucag

SEQ ID NO: 900906 - RNA, 22 nt, Human
aagaaacagacaucucaaaaaa

SEQ ID NO: 900907 - RNA, 20 nt, Human
aaggaaagacuacuuuaaug

SEQ ID NO: 900908 - RNA, 22 nt, Human
aaucauaagaaacaauggugaa

SEQ ID NO: 900909 - RNA, 24 nt, Human
aaucugccauuugucaguugauuu

SEQ ID NO: 900910 - RNA, 22 nt, Human
aaugcacaaucauaagaaacaa

SEQ ID NO: 900911 - RNA, 21 nt, Human
acaucuggaaagacuagcugu

SEQ ID NO: 900912 - RNA, 18 nt, Human
acccgcggccggcggggu

SEQ ID NO: 900913 - RNA, 26 nt, Human
accucccuuuuccccuccuucccuga

SEQ ID NO: 900914 - RNA, 24 nt, Human
agaagaaacagacaucucaaaaaa

SEQ ID NO: 900915 - RNA, 19 nt, Human
agaaguaauaaaaugcaca

SEQ ID NO: 900916 - RNA, 18 nt, Human
agacaucucaaaaaagcu

SEQ ID NO: 900917 - RNA, 20 nt, Human
agagcucucugcaccucccu

SEQ ID NO: 900918 - RNA, 20 nt, Human
aggaacagcugaacaacaac

SEQ ID NO: 900919 - RNA, 23 nt, Human
aggccggcuccggucuccccgcg

SEQ ID NO: 900920 - RNA, 18 nt, Human
aggccugagggcugggag

SEQ ID NO: 900921 - RNA, 24 nt, Human
aggccugagggcugggagggcucc

SEQ ID NO: 900922 - RNA, 25 nt, Human
aggcgcugagucccggcggcucggc

SEQ ID NO: 900923 - RNA, 18 nt, Human
aggguaggaagagguucg

SEQ ID NO: 900924 - RNA, 18 nt, Human
auauuauauacauauaua

SEQ ID NO: 900925 - RNA, 21 nt, Human
caaaaaccaacaacgcaauug

SEQ ID NO: 900926 - RNA, 22 nt, Human
cacaaacaccaugccauccccc

SEQ ID NO: 900927 - RNA, 20 nt, Human
cacagccuaacggccuccuu

SEQ ID NO: 900928 - RNA, 19 nt, Human
caccaugccaucccccccc

SEQ ID NO: 900929 - RNA, 23 nt, Human
caccaugccaucccccccccaca

SEQ ID NO: 900930 - RNA, 22 nt, Human
cagcugaacaacaacgcaagga

SEQ ID NO: 900931 - RNA, 24 nt, Human
cagguccccgagguaggguaggaa

SEQ ID NO: 900932 - RNA, 22 nt, Human
caucccaagugcccugucuucc

SEQ ID NO: 900933 - RNA, 21 nt, Human
caugccaucccccccccacaa

SEQ ID NO: 900934 - RNA, 23 nt, Human
caugccaucccccccccacaaaa

SEQ ID NO: 900935 - RNA, 21 nt, Human
ccaguccacaaacaccaugcc

SEQ ID NO: 900936 - RNA, 19 nt, Human
ccauuugucaguugauuuc

SEQ ID NO: 900937 - RNA, 23 nt, Human
ccccuccuucccugaaccagucc

SEQ ID NO: 900938 - RNA, 20 nt, Human
ccucccuuuuccccuccuuc

SEQ ID NO: 900939 - RNA, 21 nt, Human
ccucuaauuuuaacauguauc

SEQ ID NO: 900940 - RNA, 19 nt, Human
ccucuggaccgccuuccuc

SEQ ID NO: 900941 - RNA, 20 nt, Human
ccugagggcugggagggcuc

SEQ ID NO: 900942 - RNA, 21 nt, Human
cgcaaggaguuuacaaaacaa

SEQ ID NO: 900943 - RNA, 19 nt, Human
cgcaauugaacaaaacuau

SEQ ID NO: 900944 - RNA, 21 nt, Human
cgcaauugaacaaaacuauga

SEQ ID NO: 900945 - RNA, 18 nt, Human
cgcaggccugagggcugg

SEQ ID NO: 900946 - RNA, 18 nt, Human
cgccauguuuccuccccg

SEQ ID NO: 900947 - RNA, 23 nt, Human
cgcccuccacagccuaacggccu

SEQ ID NO: 900948 - RNA, 21 nt, Human
cgccgcugccaccaggucccc

SEQ ID NO: 900949 - RNA, 19 nt, Human
cgcugagucccggcggcuc

SEQ ID NO: 900950 - RNA, 22 nt, Human
cucucagcgucgucaaaguuua

SEQ ID NO: 900951 - RNA, 22 nt, Human
gaacaaaacuaugauaauuagc

SEQ ID NO: 900952 - RNA, 22 nt, Human
gaccgccuuccucgcccuccac

SEQ ID NO: 900953 - RNA, 21 nt, Human
gcaaaaggccaccuuacugga

SEQ ID NO: 900954 - RNA, 23 nt, Human
gccauguuuccuccccgcuuacc

SEQ ID NO: 900955 - RNA, 24 nt, Human
gccauguuuccuccccgcuuaccg

SEQ ID NO: 900956 - RNA, 19 nt, Human
gccucuggaccgccuuccu

SEQ ID NO: 900957 - RNA, 21 nt, Human
gccugagggcugggagggcuc

SEQ ID NO: 900958 - RNA, 19 nt, Human
gcgccauguuuccuccccg

SEQ ID NO: 900959 - RNA, 22 nt, Human
ggccugagggcugggagggcuc

SEQ ID NO: 900960 - RNA, 19 nt, Human
ggccugggccgagcggggg

SEQ ID NO: 900961 - RNA, 21 nt, Human
ggccugggccgagcgggggag

SEQ ID NO: 900962 - RNA, 25 nt, Human
gggagacccgcggccggcggggucc

SEQ ID NO: 900963 - RNA, 23 nt, Human
ggucuccccgcgcgcucucagcg

SEQ ID NO: 900964 - RNA, 18 nt, Human
ggucuugcugggcuucuu

SEQ ID NO: 900965 - RNA, 21 nt, Human
gucccggcggcucggcgcggu

SEQ ID NO: 900966 - RNA, 23 nt, Human
uaaaaucaaaaacaggaacugcc

SEQ ID NO: 900967 - RNA, 23 nt, Human
uaaaaucaaaaacaggaacugcc

SEQ ID NO: 900968 - RNA, 20 nt, Human
uagaagaaacagacaucuca

SEQ ID NO: 900969 - RNA, 24 nt, Human
uagaagaaacagacaucucaaaaa

SEQ ID NO: 900970 - RNA, 20 nt, Human
uagagcucucugcaccuccc

SEQ ID NO: 900971 - RNA, 23 nt, Human
uagagcucucugcaccucccuuu

SEQ ID NO: 900972 - RNA, 19 nt, Human
uagcaaaaaccaacaacgc

SEQ ID NO: 900973 - RNA, 18 nt, Human
uauacagaaguaauaaaa

SEQ ID NO: 900974 - RNA, 21 nt, Human
uauacagaaguaauaaaaugc

SEQ ID NO: 900975 - RNA, 23 nt, Human
uauagcaaaaaccaacaacgcaa

SEQ ID NO: 900976 - RNA, 24 nt, Human
uauugcauaccaagaaaaaagggg

SEQ ID NO: 900977 - RNA, 18 nt, Human
ucaaaaaagcuuagcguu

SEQ ID NO: 900978 - RNA, 18 nt, Human
uccaaggucacuuugcuc

SEQ ID NO: 900979 - RNA, 18 nt, Human
uccacaaacaccaugcca

SEQ ID NO: 900980 - RNA, 21 nt, Human
uccacaaacaccaugccaucc

SEQ ID NO: 900981 - RNA, 24 nt, Human
ucccugaaccaguccacaaacacc

SEQ ID NO: 900982 - RNA, 25 nt, Human
ucccuuuuccccuccuucccugaac

SEQ ID NO: 900983 - RNA, 19 nt, Human
uccgggcgcauuugggcgg

SEQ ID NO: 900984 - RNA, 20 nt, Human
uccuuuagauacacuguaua

SEQ ID NO: 900985 - RNA, 20 nt, Human
ucucgcccaacugcgacaga

SEQ ID NO: 900986 - RNA, 21 nt, Human
ucucugcaccucccuuuuccc

SEQ ID NO: 900987 - RNA, 20 nt, Human
ucuggaaagacuagcuguug

SEQ ID NO: 900988 - RNA, 19 nt, Human
ucuuggucugggucggugg

SEQ ID NO: 900989 - RNA, 18 nt, Human
ugaacaacaacgcaagga

SEQ ID NO: 900990 - RNA, 20 nt, Human
ugaaccaguccacaaacacc

SEQ ID NO: 900991 - RNA, 22 nt, Human
ugaaccaguccacaaacaccau

SEQ ID NO: 900992 - RNA, 22 nt, Human
ugagcacacuccuuucagauuu

SEQ ID NO: 900993 - RNA, 19 nt, Human
ugcacacaaaacaauggaa

SEQ ID NO: 900994 - RNA, 21 nt, Human
ugcauaccaagaaaaaaggag

SEQ ID NO: 900995 - RNA, 19 nt, Human
ugcccugucuuccaagguc

SEQ ID NO: 900996 - RNA, 20 nt, Human
ugcccugucuuccaagguca

SEQ ID NO: 900997 - RNA, 22 nt, Human
ugcuggggguggggcaaaaggc

SEQ ID NO: 900998 - RNA, 21 nt, Human
uggcuuagagcucucugcacc

SEQ ID NO: 900999 - RNA, 25 nt, Human
ugggaaguuucucuuguaucuuugg

SEQ ID NO: 901000 - RNA, 23 nt, Human
uguauauauagcaaaaaccaaca

SEQ ID NO: 901001 - RNA, 21 nt, Human
uguaucagguacuucagaaca

SEQ ID NO: 901002 - RNA, 18 nt, Human
uuacuaccucuaauuuua

SEQ ID NO: 901003 - RNA, 22 nt, Human
uucauauuauauacauauauau

SEQ ID NO: 901004 - RNA, 22 nt, Human
uugagcucaaacaauauuagaa

SEQ ID NO: 901005 - RNA, 18 nt, Human
uuggucuggaaauggcau

SEQ ID NO: 901006 - RNA, 21 nt, Human
aaaaaaagaaagaaaaaagag

SEQ ID NO: 901007 - RNA, 23 nt, Human
aaaaaugaagacaugaucaagga

SEQ ID NO: 901008 - RNA, 22 nt, Human
aaacucugucucuacuaaaaaa

SEQ ID NO: 901009 - RNA, 21 nt, Human
aaagagagagaaaguagggac

SEQ ID NO: 901010 - RNA, 18 nt, Human
aacacuuugggaggcuga

SEQ ID NO: 901011 - RNA, 24 nt, Human
aacacuuugggaggcugaggcggg

SEQ ID NO: 901012 - RNA, 21 nt, Human
aacaggauuauucugcaugug

SEQ ID NO: 901013 - RNA, 20 nt, Human
aacauggugaaacucugucu

SEQ ID NO: 901014 - RNA, 21 nt, Human
aacauggugaaacucugucuc

SEQ ID NO: 901015 - RNA, 22 nt, Human
aagaaagaaaaaagagagagaa

SEQ ID NO: 901016 - RNA, 20 nt, Human
aagaacacauaaaaccugug

SEQ ID NO: 901017 - RNA, 25 nt, Human
aagcgauucucccaccucagcuuuc

SEQ ID NO: 901018 - RNA, 23 nt, Human
aauaacaguagagacugugacaa

SEQ ID NO: 901019 - RNA, 22 nt, Human
aauauaaacuucauuucucuca

SEQ ID NO: 901020 - RNA, 20 nt, Human
aaugaagacaugaucaagga

SEQ ID NO: 901021 - RNA, 18 nt, Human
aauuagccagucauggug

SEQ ID NO: 901022 - RNA, 20 nt, Human
acaacauucucccugaaucu

SEQ ID NO: 901023 - RNA, 19 nt, Human
acagagagaaaacagagga

SEQ ID NO: 901024 - RNA, 20 nt, Human
acagagcgagaccccaucuc

SEQ ID NO: 901025 - RNA, 24 nt, Human
acagagcgagaccccaucucaaaa

SEQ ID NO: 901026 - RNA, 19 nt, Human
acauggugaaacucugucu

SEQ ID NO: 901027 - RNA, 20 nt, Human
acauuaaaaaaugaagacau

SEQ ID NO: 901028 - RNA, 18 nt, Human
accccaucucaaaaaaaa

SEQ ID NO: 901029 - RNA, 24 nt, Human
acuccuggacucaagcgauucucc

SEQ ID NO: 901030 - RNA, 23 nt, Human
acugcacuccagccuggugacag

SEQ ID NO: 901031 - RNA, 25 nt, Human
acugcacuccagccuggugacagag

SEQ ID NO: 901032 - RNA, 22 nt, Human
acuuauuccagccugacuggag

SEQ ID NO: 901033 - RNA, 24 nt, Human
agaacacauaaaaccugugaagca

SEQ ID NO: 901034 - RNA, 18 nt, Human
agacaaauagacaacaac

SEQ ID NO: 901035 - RNA, 19 nt, Human
agacaaauagacaacaaca

SEQ ID NO: 901036 - RNA, 24 nt, Human
agacaaauagacaacaacauucuc

SEQ ID NO: 901037 - RNA, 18 nt, Human
agccagucaugguggcac

SEQ ID NO: 901038 - RNA, 23 nt, Human
agccuggugacagagcgagaccc

SEQ ID NO: 901039 - RNA, 25 nt, Human
agcuaaccauaauaaaaaaaaaaga

SEQ ID NO: 901040 - RNA, 20 nt, Human
agcuucauuuucccuguuuc

SEQ ID NO: 901041 - RNA, 24 nt, Human
aggcggguggaucacaaggucagg

SEQ ID NO: 901042 - RNA, 19 nt, Human
aggcugaggcggguggauc

SEQ ID NO: 901043 - RNA, 21 nt, Human
aggcugaggcggguggaucac

SEQ ID NO: 901044 - RNA, 19 nt, Human
agugguucacaccuguaau

SEQ ID NO: 901045 - RNA, 23 nt, Human
agugguucacaccuguaauccca

SEQ ID NO: 901046 - RNA, 19 nt, Human
aguguguaacagagagaaa

SEQ ID NO: 901047 - RNA, 21 nt, Human
aguuacgaagaacacauaaaa

SEQ ID NO: 901048 - RNA, 24 nt, Human
auaauauaaacuucauuucucuca

SEQ ID NO: 901049 - RNA, 21 nt, Human
auccuggccaacauggugaaa

SEQ ID NO: 901050 - RNA, 24 nt, Human
aucgcgccacugcacuccagccug

SEQ ID NO: 901051 - RNA, 24 nt, Human
auguggagguugcagugagccgag

SEQ ID NO: 901052 - RNA, 21 nt, Human
caacaacauucucccugaauc

SEQ ID NO: 901053 - RNA, 24 nt, Human
caacacuuugggaggcugaggcgg

SEQ ID NO: 901054 - RNA, 24 nt, Human
caacauggugaaacucugucucua

SEQ ID NO: 901055 - RNA, 20 nt, Human
caagcgauucucccaccuca

SEQ ID NO: 901056 - RNA, 22 nt, Human
cacaacuagggcaagguuaucu

SEQ ID NO: 901057 - RNA, 24 nt, Human
cacaccuguaaucccaacacuuug

SEQ ID NO: 901058 - RNA, 21 nt, Human
cacauuaaaaaaugaagacau

SEQ ID NO: 901059 - RNA, 19 nt, Human
caccuguaaucccaacacu

SEQ ID NO: 901060 - RNA, 24 nt, Human
caccuguaaucccaacacuuuggg

SEQ ID NO: 901061 - RNA, 23 nt, Human
cacuccagccuggugacagagcg

SEQ ID NO: 901062 - RNA, 18 nt, Human
cacugcacuccagccugg

SEQ ID NO: 901063 - RNA, 18 nt, Human
cacugcacuccagccugg

SEQ ID NO: 901064 - RNA, 22 nt, Human
cacugcacuccagccuggugac

SEQ ID NO: 901065 - RNA, 23 nt, Human
cacugcacuccagccuggugaca

SEQ ID NO: 901066 - RNA, 24 nt, Human
cacugcacuccagccuggugacag

SEQ ID NO: 901067 - RNA, 21 nt, Human
cacuguaaccucaaacuccug

SEQ ID NO: 901068 - RNA, 21 nt, Human
cagagcacauuaaaaaaugaa

SEQ ID NO: 901069 - RNA, 24 nt, Human
cagcuacucgggaggcugaggcag

SEQ ID NO: 901070 - RNA, 18 nt, Human
cagcuuuccaggcagugg

SEQ ID NO: 901071 - RNA, 23 nt, Human
caggccgggcacagugguucaca

SEQ ID NO: 901072 - RNA, 24 nt, Human
cagggucuugcuccguugcccagg

SEQ ID NO: 901073 - RNA, 24 nt, Human
caugugguguacauucaaaauuuu

SEQ ID NO: 901074 - RNA, 22 nt, Human
cauuaaaaaaugaagacaugau

SEQ ID NO: 901075 - RNA, 22 nt, Human
ccacaagccgugugacuuuagu

SEQ ID NO: 901076 - RNA, 19 nt, Human
ccacugcacuccagccugg

SEQ ID NO: 901077 - RNA, 19 nt, Human
ccacugcacuccagccugg

SEQ ID NO: 901078 - RNA, 20 nt, Human
ccacugcacuccagccuggu

SEQ ID NO: 901079 - RNA, 23 nt, Human
ccacugcacuccagccuggugac

SEQ ID NO: 901080 - RNA, 19 nt, Human
ccccaucucaaaaaaaaaa

SEQ ID NO: 901081 - RNA, 21 nt, Human
ccucuagucccagcuacucgg

SEQ ID NO: 901082 - RNA, 20 nt, Human
ccuggacucaagcgauucuc

SEQ ID NO: 901083 - RNA, 20 nt, Human
ccuggccaacauggugaaac

SEQ ID NO: 901084 - RNA, 20 nt, Human
ccuggccaacauggugaaac

SEQ ID NO: 901085 - RNA, 24 nt, Human
ccuggccaacauggugaaacucug

SEQ ID NO: 901086 - RNA, 20 nt, Human
cgaaaggcagcuguaaaaca

SEQ ID NO: 901087 - RNA, 24 nt, Human
cgagaccauccuggccaacauggu

SEQ ID NO: 901088 - RNA, 23 nt, Human
cgagaccccaucucaaaaaaaaa

SEQ ID NO: 901089 - RNA, 24 nt, Human
cgagaucgcgccacugcacuccag

SEQ ID NO: 901090 - RNA, 25 nt, Human
cgccacugcacuccagccuggugac

SEQ ID NO: 901091 - RNA, 27 nt, Human
cgggaggcugaggcagaagaauuacuu

SEQ ID NO: 901092 - RNA, 19 nt, Human
cguugcccaggcuggagug

SEQ ID NO: 901093 - RNA, 26 nt, Human
cuaaccauaauaaaaaaaaaagaaag

SEQ ID NO: 901094 - RNA, 18 nt, Human
cuacuaaaaaauacagaa

SEQ ID NO: 901095 - RNA, 23 nt, Human
cuacuccauaaaguuacgaagaa

SEQ ID NO: 901096 - RNA, 24 nt, Human
cucaagcgauucucccaccucagc

SEQ ID NO: 901097 - RNA, 24 nt, Human
cuggccaacauggugaaacucugu

SEQ ID NO: 901098 - RNA, 27 nt, Human
cuggugguggugcuaacucacuguguc

SEQ ID NO: 901099 - RNA, 24 nt, Human
cuuuccaggcagugggggcuauag

SEQ ID NO: 901100 - RNA, 22 nt, Human
gaagcacuuauaauagugccag

SEQ ID NO: 901101 - RNA, 18 nt, Human
gacaacaacauucucccu

SEQ ID NO: 901102 - RNA, 18 nt, Human
gacagagcgagaccccau

SEQ ID NO: 901103 - RNA, 19 nt, Human
gacagagcgagaccccauc

SEQ ID NO: 901104 - RNA, 24 nt, Human
gagaaaacagaggauuuguacagc

SEQ ID NO: 901105 - RNA, 24 nt, Human
gagaaaguagggacaaccgguacc

SEQ ID NO: 901106 - RNA, 23 nt, Human
gagguugcagugagccgagaucg

SEQ ID NO: 901107 - RNA, 18 nt, Human
gcacagugguucacaccu

SEQ ID NO: 901108 - RNA, 23 nt, Human
gcacuccagccuggugacagagc

SEQ ID NO: 901109 - RNA, 24 nt, Human
gccaacauggugaaacucugucuc

SEQ ID NO: 901110 - RNA, 20 nt, Human
gcccaggcuggaguguagug

SEQ ID NO: 901111 - RNA, 20 nt, Human
gccgagaucgcgccacugca

SEQ ID NO: 901112 - RNA, 25 nt, Human
gcuccguugcccaggcuggagugua

SEQ ID NO: 901113 - RNA, 20 nt, Human
ggagguugcagugagccgag

SEQ ID NO: 901114 - RNA, 22 nt, Human
ggagguugcagugagccgagau

SEQ ID NO: 901115 - RNA, 24 nt, Human
ggagguugcagugagccgagaucg

SEQ ID NO: 901116 - RNA, 23 nt, Human
ggcacagugguucacaccuguaa

SEQ ID NO: 901117 - RNA, 24 nt, Human
ggguggaucacaaggucaggagau

SEQ ID NO: 901118 - RNA, 23 nt, Human
guaaaacaggauuauucugcaug

SEQ ID NO: 901119 - RNA, 19 nt, Human
gucucuacuaaaaaauaca

SEQ ID NO: 901120 - RNA, 21 nt, Human
gugaaacucugucucuacuaa

SEQ ID NO: 901121 - RNA, 19 nt, Human
guugcagugagccgagauc

SEQ ID NO: 901122 - RNA, 21 nt, Human
guugcagugagccgagaucgc

SEQ ID NO: 901123 - RNA, 24 nt, Human
uaaagagacacaaaugguaccuac

SEQ ID NO: 901124 - RNA, 20 nt, Human
uaacaguagagacugugaca

SEQ ID NO: 901125 - RNA, 21 nt, Human
uaacaguagagacugugacaa

SEQ ID NO: 901126 - RNA, 26 nt, Human
uaacucacugugucuucagggugugu

SEQ ID NO: 901127 - RNA, 18 nt, Human
uaagagacaaauagacaa

SEQ ID NO: 901128 - RNA, 18 nt, Human
uaagaucacgaaaggcag

SEQ ID NO: 901129 - RNA, 22 nt, Human
uaauauaaacuucauuucucuc

SEQ ID NO: 901130 - RNA, 19 nt, Human
uaggugcacaccaccaugc

SEQ ID NO: 901131 - RNA, 25 nt, Human
uagugccagaacauugugagcacac

SEQ ID NO: 901132 - RNA, 22 nt, Human
uauuccauuuuaugcuuugaga

SEQ ID NO: 901133 - RNA, 18 nt, Human
ucacaaggucaggagauc

SEQ ID NO: 901134 - RNA, 24 nt, Human
ucacaaggucaggagaucgagacc

SEQ ID NO: 901135 - RNA, 23 nt, Human
ucacaccuguaaucccaacacuu

SEQ ID NO: 901136 - RNA, 18 nt, Human
ucacacuggcaguagagc

SEQ ID NO: 901137 - RNA, 23 nt, Human
ucacuguaaccucaaacuccugg

SEQ ID NO: 901138 - RNA, 22 nt, Human
uccagccagagaaaaguacuga

SEQ ID NO: 901139 - RNA, 22 nt, Human
uccagccuggugacagagcgag

SEQ ID NO: 901140 - RNA, 23 nt, Human
uccagccuggugacagagcgaga

SEQ ID NO: 901141 - RNA, 23 nt, Human
ucccagguaaugcauaauaacag

SEQ ID NO: 901142 - RNA, 19 nt, Human
ucccugaaucuggaaaaaa

SEQ ID NO: 901143 - RNA, 21 nt, Human
uccuggacucaagcgauucuc

SEQ ID NO: 901144 - RNA, 23 nt, Human
ucgcgccacugcacuccagccug

SEQ ID NO: 901145 - RNA, 23 nt, Human
ucgggaggcugaggcagaagaau

SEQ ID NO: 901146 - RNA, 23 nt, Human
ucucccaccucagcuuuccaggc

SEQ ID NO: 901147 - RNA, 25 nt, Human
ucucuacuaaaaaauacagaaaauu

SEQ ID NO: 901148 - RNA, 22 nt, Human
ucuugcuccguugcccaggcug

SEQ ID NO: 901149 - RNA, 22 nt, Human
ucuugcuccguugcccaggcug

SEQ ID NO: 901150 - RNA, 23 nt, Human
ucuugcuccguugcccaggcugg

SEQ ID NO: 901151 - RNA, 24 nt, Human
ucuugcuccguugcccaggcugga

SEQ ID NO: 901152 - RNA, 25 nt, Human
ugacagguacagagcacauuaaaaa

SEQ ID NO: 901153 - RNA, 22 nt, Human
ugagacagggucuugcuccguu

SEQ ID NO: 901154 - RNA, 22 nt, Human
ugagccgagaucgcgccacugc

SEQ ID NO: 901155 - RNA, 22 nt, Human
ugaggaggggugacuggagagg

SEQ ID NO: 901156 - RNA, 19 nt, Human
ugaggcagaagaauuacuu

SEQ ID NO: 901157 - RNA, 20 nt, Human
ugaggcagaagaauuacuuc

SEQ ID NO: 901158 - RNA, 20 nt, Human
ugaggcagaagaauuacuuc

SEQ ID NO: 901159 - RNA, 20 nt, Human
ugaggcggguggaucacaag

SEQ ID NO: 901160 - RNA, 24 nt, Human
ugaggcggguggaucacaagguca

SEQ ID NO: 901161 - RNA, 26 nt, Human
ugaggcggguggaucacaaggucagg

SEQ ID NO: 901162 - RNA, 21 nt, Human
ugauauguuauuccauuuuau

SEQ ID NO: 901163 - RNA, 21 nt, Human
ugcccaggcuggaguguagug

SEQ ID NO: 901164 - RNA, 21 nt, Human
ugcccaggcuggaguguagug

SEQ ID NO: 901165 - RNA, 22 nt, Human
ugcccaggcuggaguguagugg

SEQ ID NO: 901166 - RNA, 24 nt, Human
ugcuccguugcccaggcuggagug

SEQ ID NO: 901167 - RNA, 23 nt, Human
uggaucacuguaaccucaaacuc

SEQ ID NO: 901168 - RNA, 24 nt, Human
uggccaacauggugaaacucuguc

SEQ ID NO: 901169 - RNA, 20 nt, Human
ugggaggcugaggcgggugg

SEQ ID NO: 901170 - RNA, 23 nt, Human
ugggaggcugaggcggguggauc

SEQ ID NO: 901171 - RNA, 24 nt, Human
ugggaggcugaggcggguggauca

SEQ ID NO: 901172 - RNA, 24 nt, Human
ugggauguggagguugcagugagc

SEQ ID NO: 901173 - RNA, 21 nt, Human
ugguucacaccuguaauccca

SEQ ID NO: 901174 - RNA, 21 nt, Human
uguggagguugcagugagccg

SEQ ID NO: 901175 - RNA, 19 nt, Human
uguguaacagagagaaaac

SEQ ID NO: 901176 - RNA, 18 nt, Human
uguuugguuuuauuguag

SEQ ID NO: 901177 - RNA, 20 nt, Human
uguuugguuuuauuguaguc

SEQ ID NO: 901178 - RNA, 24 nt, Human
uuccucuagucccagcuacucggg

SEQ ID NO: 901179 - RNA, 18 nt, Human
uugagacagggucuugcu

SEQ ID NO: 901180 - RNA, 18 nt, Human
uugagcacauuuccucca

SEQ ID NO: 901181 - RNA, 19 nt, Human
uugcagugagccgagaucg

SEQ ID NO: 901182 - RNA, 22 nt, Human
uugcagugagccgagaucgcgc

SEQ ID NO: 901183 - RNA, 24 nt, Human
uugcuccguugcccaggcuggagu

SEQ ID NO: 901184 - RNA, 18 nt, Human
uuggcauuauuauuaagg

SEQ ID NO: 901185 - RNA, 25 nt, Human
uugggaggcugaggcggguggauca

SEQ ID NO: 901186 - RNA, 19 nt, Human
uuuaugcuuugagacaggg

SEQ ID NO: 901187 - RNA, 22 nt, Human
uuucaggcugacucagaaggcu

SEQ ID NO: 901188 - RNA, 22 nt, Human
aaaguaggaaaacaacaaagag

SEQ ID NO: 901189 - RNA, 23 nt, Human
aaauaaccuugagaaaguaggaa

SEQ ID NO: 901190 - RNA, 21 nt, Human
aagcaaaaacagaaguaugga

SEQ ID NO: 901191 - RNA, 29 nt, Human
aagcaaaaacagaaguauggagggacccc

SEQ ID NO: 901192 - RNA, 27 nt, Human
aagcaaaaacagaaguauggaugcaug

SEQ ID NO: 901193 - RNA, 23 nt, Human
aaguaggaaaacaacaaagagaa

SEQ ID NO: 901194 - RNA, 18 nt, Human
aagugacuaucagagaga

SEQ ID NO: 901195 - RNA, 22 nt, Human
aagugacuaucagagagagaga

SEQ ID NO: 901196 - RNA, 21 nt, Human
agaaauaccaucauuuauauu

SEQ ID NO: 901197 - RNA, 24 nt, Human
agacauacaacucuucccuguaug

SEQ ID NO: 901198 - RNA, 23 nt, Human
agaccauggcaccaaauccauca

SEQ ID NO: 901199 - RNA, 23 nt, Human
agagcagaaagcuuaauaaaagg

SEQ ID NO: 901200 - RNA, 21 nt, Human
aggcagggcaagggggugggu

SEQ ID NO: 901201 - RNA, 21 nt, Human
aggcauagagaaggugcucuu

SEQ ID NO: 901202 - RNA, 21 nt, Human
aggggcugguucucuggagug

SEQ ID NO: 901203 - RNA, 23 nt, Human
aguuacuaccucugaagcuuaga

SEQ ID NO: 901204 - RNA, 20 nt, Human
auccaaagucggaaauaacc

SEQ ID NO: 901205 - RNA, 23 nt, Human
caaauugaaacucccagaaauau

SEQ ID NO: 901206 - RNA, 21 nt, Human
cacuaagcuuccauacuucaa

SEQ ID NO: 901207 - RNA, 25 nt, Human
cacugaccugcacuuuaauguuuac

SEQ ID NO: 901208 - RNA, 21 nt, Human
caggggcugguucucuggagu

SEQ ID NO: 901209 - RNA, 24 nt, Human
cauaaaaacaagucuuccauagca

SEQ ID NO: 901210 - RNA, 21 nt, Human
cucaugaccagcugcaaaaua

SEQ ID NO: 901211 - RNA, 25 nt, Human
cuccaauaaauaaacuuauauaugg

SEQ ID NO: 901212 - RNA, 18 nt, Human
cuuucagaaauaccauca

SEQ ID NO: 901213 - RNA, 19 nt, Human
gaccauggcaccaaaucca

SEQ ID NO: 901214 - RNA, 18 nt, Human
gaccuucccuccuugcac

SEQ ID NO: 901215 - RNA, 19 nt, Human
gagagagagagagaaagag

SEQ ID NO: 901216 - RNA, 26 nt, Human
gcaccaaauccaucacuccaauaaau

SEQ ID NO: 901217 - RNA, 20 nt, Human
gcucuuggucuggggcuggu

SEQ ID NO: 901218 - RNA, 21 nt, Human
ggcuggugaacugcagguggg

SEQ ID NO: 901219 - RNA, 23 nt, Human
gggcaagggggugggugucaggg

SEQ ID NO: 901220 - RNA, 28 nt, Human
gggcaagggggugggugucaggggcugg

SEQ ID NO: 901221 - RNA, 23 nt, Human
gggcuggugaacugcaggugggu

SEQ ID NO: 901222 - RNA, 19 nt, Human
gggggugggugucaggggc

SEQ ID NO: 901223 - RNA, 23 nt, Human
ggugggugucaggggcugguucu

SEQ ID NO: 901224 - RNA, 21 nt, Human
uaaaaacaagucuuccauagc

SEQ ID NO: 901225 - RNA, 22 nt, Human
uaggaaaacaacaaagagaaaa

SEQ ID NO: 901226 - RNA, 26 nt, Human
uccaaagucggaaauaaccuugagaa

SEQ ID NO: 901227 - RNA, 21 nt, Human
uccaucacuccaauaaauaaa

SEQ ID NO: 901228 - RNA, 24 nt, Human
ucccuguaugagacaaauggaaau

SEQ ID NO: 901229 - RNA, 22 nt, Human
uccuucccacucucagccuuaa

SEQ ID NO: 901230 - RNA, 19 nt, Human
ucucaggucauauuccacu

SEQ ID NO: 901231 - RNA, 19 nt, Human
ucucugauuaggaacuccu

SEQ ID NO: 901232 - RNA, 20 nt, Human
ucugauugaagaaugacagu

SEQ ID NO: 901233 - RNA, 27 nt, Human
ugaaacucccagaaauauaauaaguau

SEQ ID NO: 901234 - RNA, 20 nt, Human
ugcacaucauaaaaacaagu

SEQ ID NO: 901235 - RNA, 19 nt, Human
ugccacaggagacauacaa

SEQ ID NO: 901236 - RNA, 19 nt, Human
ugccacaggagacauacaa

SEQ ID NO: 901237 - RNA, 20 nt, Human
uggcucuguugaccuucccu

SEQ ID NO: 901238 - RNA, 19 nt, Human
uggucuggggcuggugaac

SEQ ID NO: 901239 - RNA, 21 nt, Human
uggucuggggcuggugaacug

SEQ ID NO: 901240 - RNA, 19 nt, Human
uggugaacugcaggugggu

SEQ ID NO: 901241 - RNA, 24 nt, Human
uguaugaaucugguucucuuuaag

SEQ ID NO: 901242 - RNA, 20 nt, Human
ugucaggggcugguucucug

SEQ ID NO: 901243 - RNA, 18 nt, Human
uguugaccuucccuccuu

SEQ ID NO: 901244 - RNA, 18 nt, Human
uugaagcaaaaacagaag

SEQ ID NO: 901245 - RNA, 21 nt, Human
uugccaaguguagucuaugcc

SEQ ID NO: 901246 - RNA, 22 nt, Human
uuggucuggggcuggugaacug

SEQ ID NO: 901247 - RNA, 24 nt, Human
uuuccacuaucugauugaagaaug

SEQ ID NO: 901248 - RNA, 21 nt, Human
uuuugaagcaaaaacagaagu

SEQ ID NO: 901249 - RNA, 27 nt, Human
aaaaauggcaaagagagaccgguaccc

SEQ ID NO: 901250 - RNA, 24 nt, Human
aauaacugacaggugagacccaca

SEQ ID NO: 901251 - RNA, 19 nt, Human
acugcagccuuucucaggg

SEQ ID NO: 901252 - RNA, 21 nt, Human
agcaugggggugaccaucuug

SEQ ID NO: 901253 - RNA, 24 nt, Human
agggaagaugacacaucugaacug

SEQ ID NO: 901254 - RNA, 21 nt, Human
auaaaaucagcaaauaacuga

SEQ ID NO: 901255 - RNA, 19 nt, Human
caaauaacugacaggugag

SEQ ID NO: 901256 - RNA, 19 nt, Human
ccacugcagccuuucucag

SEQ ID NO: 901257 - RNA, 23 nt, Human
ccuccaaaaauggcaaagagaga

SEQ ID NO: 901258 - RNA, 23 nt, Human
cugaggccacugcagccuuucuc

SEQ ID NO: 901259 - RNA, 19 nt, Human
cuuccaugccuccaaaaau

SEQ ID NO: 901260 - RNA, 23 nt, Human
gaucacucugcugugagacugga

SEQ ID NO: 901261 - RNA, 25 nt, Human
ggccugcauaggagaucacucugcu

SEQ ID NO: 901262 - RNA, 21 nt, Human
uaaaaucagcaaauaacugac

SEQ ID NO: 901263 - RNA, 23 nt, Human
uccaaaaauggcaaagagagaca

SEQ ID NO: 901264 - RNA, 19 nt, Human
ugaagggguucagcauggg

SEQ ID NO: 901265 - RNA, 18 nt, Human
uggauguccacaaucauc

SEQ ID NO: 901266 - RNA, 22 nt, Human
aagccuuauuggauaugaugac

SEQ ID NO: 901267 - RNA, 21 nt, Human
agaaaagcaagccuuauugga

SEQ ID NO: 901268 - RNA, 24 nt, Human
cacaauaauaguauaaaacacaga

SEQ ID NO: 901269 - RNA, 18 nt, Human
cacuguacagcaaggggc

SEQ ID NO: 901270 - RNA, 24 nt, Human
ccccuaaaaucagagaaaagcaag

SEQ ID NO: 901271 - RNA, 19 nt, Human
cccuaaaaucagagaaaag

SEQ ID NO: 901272 - RNA, 18 nt, Human
cugaugcacaaaccaggc

SEQ ID NO: 901273 - RNA, 23 nt, Human
gaacugaugcacaaaccaggccu

SEQ ID NO: 901274 - RNA, 19 nt, Human
uacaccccuaaaaucagag

SEQ ID NO: 901275 - RNA, 28 nt, Human
uacaccccuaaaaucagagaaaagcaag

SEQ ID NO: 901276 - RNA, 24 nt, Human
aaagugcugggauuacaggcguga

SEQ ID NO: 901277 - RNA, 19 nt, Human
aagugcugggauuacaggc

SEQ ID NO: 901278 - RNA, 19 nt, Human
aagugcugggauuacaggc

SEQ ID NO: 901279 - RNA, 26 nt, Human
aagugcugggauuacaggcgugagcc

SEQ ID NO: 901280 - RNA, 22 nt, Human
accaaucaggcacuguggcugg

SEQ ID NO: 901281 - RNA, 24 nt, Human
accauguuggccaggcuggucucg

SEQ ID NO: 901282 - RNA, 23 nt, Human
acccaggcuggagugcgguggug

SEQ ID NO: 901283 - RNA, 21 nt, Human
accguacacaaaaauugaagu

SEQ ID NO: 901284 - RNA, 20 nt, Human
aggaaagcacauaaggcuau

SEQ ID NO: 901285 - RNA, 20 nt, Human
aggagcugggauuacaggca

SEQ ID NO: 901286 - RNA, 21 nt, Human
aggagcugggauuacaggcau

SEQ ID NO: 901287 - RNA, 19 nt, Human
aggggccagcccacugccc

SEQ ID NO: 901288 - RNA, 22 nt, Human
aggggccagcccacugcccaga

SEQ ID NO: 901289 - RNA, 24 nt, Human
aggugauccacccaccuuggccuc

SEQ ID NO: 901290 - RNA, 20 nt, Human
agugcgguggugcaaucucg

SEQ ID NO: 901291 - RNA, 24 nt, Human
agugcgguggugcaaucucggcuc

SEQ ID NO: 901292 - RNA, 18 nt, Human
augggguuucaccauguu

SEQ ID NO: 901293 - RNA, 22 nt, Human
augggguuucaccauguuggcc

SEQ ID NO: 901294 - RNA, 23 nt, Human
augggguuucaccauguuggcca

SEQ ID NO: 901295 - RNA, 24 nt, Human
augggguuucaccauguuggccag

SEQ ID NO: 901296 - RNA, 24 nt, Human
auuuuuguauuuuuaguagagaug

SEQ ID NO: 901297 - RNA, 24 nt, Human
caaagugcugggauuacaggcgug

SEQ ID NO: 901298 - RNA, 22 nt, Human
caagugaugcuccugucucagc

SEQ ID NO: 901299 - RNA, 21 nt, Human
cacaccuggcuaauuuuugua

SEQ ID NO: 901300 - RNA, 21 nt, Human
caccauguuggccaggcuggu

SEQ ID NO: 901301 - RNA, 24 nt, Human
caccauguuggccaggcuggucuc

SEQ ID NO: 901302 - RNA, 22 nt, Human
cacccaccuuggccucccaaag

SEQ ID NO: 901303 - RNA, 23 nt, Human
cacccaccuuggccucccaaagu

SEQ ID NO: 901304 - RNA, 24 nt, Human
cacccaggcuggagugcgguggug

SEQ ID NO: 901305 - RNA, 21 nt, Human
cacugcaaccucugccuccca

SEQ ID NO: 901306 - RNA, 21 nt, Human
cacugcaaccucugccuccca

SEQ ID NO: 901307 - RNA, 22 nt, Human
cagcccacugcccagacuuagc

SEQ ID NO: 901308 - RNA, 22 nt, Human
cagccuacugaggagcugggau

SEQ ID NO: 901309 - RNA, 23 nt, Human
caugcaccaucacaccuggcuaa

SEQ ID NO: 901310 - RNA, 23 nt, Human
cauguuggccaggcuggucucga

SEQ ID NO: 901311 - RNA, 20 nt, Human
ccaaagugcugggauuacag

SEQ ID NO: 901312 - RNA, 22 nt, Human
ccaaagugcugggauuacaggc

SEQ ID NO: 901313 - RNA, 22 nt, Human
ccaaagugcugggauuacaggc

SEQ ID NO: 901314 - RNA, 24 nt, Human
ccaaagugcugggauuacaggcgu

SEQ ID NO: 901315 - RNA, 20 nt, Human
cccacugcccagacuuagcc

SEQ ID NO: 901316 - RNA, 19 nt, Human
cccagacuuagccuccagg

SEQ ID NO: 901317 - RNA, 24 nt, Human
ccugaccucaggugauccacccac

SEQ ID NO: 901318 - RNA, 22 nt, Human
cgcucugucacccaggcuggag

SEQ ID NO: 901319 - RNA, 24 nt, Human
cgcucugucacccaggcuggagug

SEQ ID NO: 901320 - RNA, 23 nt, Human
cuaauuuuuguauuuuuaguaga

SEQ ID NO: 901321 - RNA, 23 nt, Human
cucacugcaaccucugccuccca

SEQ ID NO: 901322 - RNA, 24 nt, Human
cucaggugauccacccaccuuggc

SEQ ID NO: 901323 - RNA, 21 nt, Human
cucgcucugucacccaggcug

SEQ ID NO: 901324 - RNA, 24 nt, Human
cucgcucugucacccaggcuggag

SEQ ID NO: 901325 - RNA, 24 nt, Human
cucgcucugucacccaggcuggag

SEQ ID NO: 901326 - RNA, 24 nt, Human
cugaggagcugggauuacaggcau

SEQ ID NO: 901327 - RNA, 24 nt, Human
cugcaaccucugccucccacguuc

SEQ ID NO: 901328 - RNA, 23 nt, Human
gaaagcacauaaggcuauaccaa

SEQ ID NO: 901329 - RNA, 24 nt, Human
gaccucaggugauccacccaccuu

SEQ ID NO: 901330 - RNA, 18 nt, Human
gagaugggguuucaccau

SEQ ID NO: 901331 - RNA, 24 nt, Human
gagaugggguuucaccauguuggc

SEQ ID NO: 901332 - RNA, 20 nt, Human
gaggagcugggauuacaggc

SEQ ID NO: 901333 - RNA, 22 nt, Human
gaggagcugggauuacaggcau

SEQ ID NO: 901334 - RNA, 24 nt, Human
gaggagcugggauuacaggcaugc

SEQ ID NO: 901335 - RNA, 18 nt, Human
gauuacaggcgugagcca

SEQ ID NO: 901336 - RNA, 22 nt, Human
gauuacaggcgugagccacugc

SEQ ID NO: 901337 - RNA, 22 nt, Human
gauuacaggcgugagccacugc

SEQ ID NO: 901338 - RNA, 22 nt, Human
gcaaccucugccucccacguuc

SEQ ID NO: 901339 - RNA, 24 nt, Human
gcuccugucucagccuacugagga

SEQ ID NO: 901340 - RNA, 21 nt, Human
gcucugucacccaggcuggag

SEQ ID NO: 901341 - RNA, 25 nt, Human
gcucugucacccaggcuggagugcg

SEQ ID NO: 901342 - RNA, 23 nt, Human
gcuggucucgagcuccugaccuc

SEQ ID NO: 901343 - RNA, 24 nt, Human
ggcuggucucgagcuccugaccuc

SEQ ID NO: 901344 - RNA, 22 nt, Human
gggguuucaccauguuggccag

SEQ ID NO: 901345 - RNA, 22 nt, Human
ggguuucaccauguuggccagg

SEQ ID NO: 901346 - RNA, 19 nt, Human
ggucucgagcuccugaccu

SEQ ID NO: 901347 - RNA, 23 nt, Human
guagagaugggguuucaccaugu

SEQ ID NO: 901348 - RNA, 20 nt, Human
gucaaauaaaaaauaccgua

SEQ ID NO: 901349 - RNA, 24 nt, Human
gucucgcucugucacccaggcugg

SEQ ID NO: 901350 - RNA, 24 nt, Human
gugauccacccaccuuggccuccc

SEQ ID NO: 901351 - RNA, 21 nt, Human
uaagaugccauucagacugaa

SEQ ID NO: 901352 - RNA, 24 nt, Human
uaauuuuuguauuuuuaguagaga

SEQ ID NO: 901353 - RNA, 22 nt, Human
uacaggcaugcaccaucacacc

SEQ ID NO: 901354 - RNA, 19 nt, Human
uacaggcgugagccacugc

SEQ ID NO: 901355 - RNA, 23 nt, Human
uacaggcgugagccacugcgccc

SEQ ID NO: 901356 - RNA, 24 nt, Human
uacugaggagcugggauuacaggc

SEQ ID NO: 901357 - RNA, 22 nt, Human
uagagaugggguuucaccaugu

SEQ ID NO: 901358 - RNA, 25 nt, Human
uaggaaagcacauaaggcuauacca

SEQ ID NO: 901359 - RNA, 21 nt, Human
uaggauccuuauuauaaaagu

SEQ ID NO: 901360 - RNA, 24 nt, Human
uaguagagaugggguuucaccaug

SEQ ID NO: 901361 - RNA, 26 nt, Human
uaguagagaugggguuucaccauguu

SEQ ID NO: 901362 - RNA, 19 nt, Human
uagucaaauaaaaaauacc

SEQ ID NO: 901363 - RNA, 22 nt, Human
ucacccaggcuggagugcggug

SEQ ID NO: 901364 - RNA, 18 nt, Human
ucacugcaaccucugccu

SEQ ID NO: 901365 - RNA, 19 nt, Human
ucacugcaaccucugccuc

SEQ ID NO: 901366 - RNA, 22 nt, Human
ucacugcaaccucugccuccca

SEQ ID NO: 901367 - RNA, 24 nt, Human
ucacugcaaccucugccucccacg

SEQ ID NO: 901368 - RNA, 27 nt, Human
ucacugcaaccucugccucccacguuc

SEQ ID NO: 901369 - RNA, 24 nt, Human
ucccaaagugcugggauuacaggc

SEQ ID NO: 901370 - RNA, 24 nt, Human
ucgcucugucacccaggcuggagu

SEQ ID NO: 901371 - RNA, 24 nt, Human
ucgcucugucacccaggcuggagu

SEQ ID NO: 901372 - RNA, 21 nt, Human
ucuaaugcucacaccaggggc

SEQ ID NO: 901373 - RNA, 19 nt, Human
ucucgcucugucacccagg

SEQ ID NO: 901374 - RNA, 19 nt, Human
ucucgcucugucacccagg

SEQ ID NO: 901375 - RNA, 23 nt, Human
ucucgcucugucacccaggcugg

SEQ ID NO: 901376 - RNA, 23 nt, Human
ucucgcucugucacccaggcugg

SEQ ID NO: 901377 - RNA, 24 nt, Human
ucucgcucugucacccaggcugga

SEQ ID NO: 901378 - RNA, 24 nt, Human
ucucgcucugucacccaggcugga

SEQ ID NO: 901379 - RNA, 25 nt, Human
ucucgcucugucacccaggcuggag

SEQ ID NO: 901380 - RNA, 26 nt, Human
ucucgcucugucacccaggcuggagu

SEQ ID NO: 901381 - RNA, 21 nt, Human
ugaccucaggugauccaccca

SEQ ID NO: 901382 - RNA, 24 nt, Human
ugaccucaggugauccacccaccu

SEQ ID NO: 901383 - RNA, 21 nt, Human
ugagauaagucucgcucuguc

SEQ ID NO: 901384 - RNA, 24 nt, Human
ugauccacccaccuuggccuccca

SEQ ID NO: 901385 - RNA, 22 nt, Human
ugcgguggugcaaucucggcuc

SEQ ID NO: 901386 - RNA, 23 nt, Human
ugcgguggugcaaucucggcuca

SEQ ID NO: 901387 - RNA, 24 nt, Human
ugcugggauuacaggcgugagcca

SEQ ID NO: 901388 - RNA, 30 nt, Human
ugcuuugcuauuuaaaggcaacagucuuaa

SEQ ID NO: 901389 - RNA, 24 nt, Human
uggagugcgguggugcaaucucgg

SEQ ID NO: 901390 - RNA, 24 nt, Human
uggccaggcuggucucgagcuccu

SEQ ID NO: 901391 - RNA, 21 nt, Human
ugggauuacaggcaugcacca

SEQ ID NO: 901392 - RNA, 24 nt, Human
ugggauuacaggcaugcaccauca

SEQ ID NO: 901393 - RNA, 18 nt, Human
ugggauuacaggcgugag

SEQ ID NO: 901394 - RNA, 19 nt, Human
ugggauuacaggcgugagc

SEQ ID NO: 901395 - RNA, 21 nt, Human
ugggauuacaggcgugagcca

SEQ ID NO: 901396 - RNA, 22 nt, Human
ugggauuacaggcgugagccac

SEQ ID NO: 901397 - RNA, 22 nt, Human
ugggauuacaggcgugagccac

SEQ ID NO: 901398 - RNA, 24 nt, Human
ugggauuacaggcgugagccacug

SEQ ID NO: 901399 - RNA, 26 nt, Human
ugggauuacaggcgugagccacugcg

SEQ ID NO: 901400 - RNA, 24 nt, Human
ugggguuucaccauguuggccagg

SEQ ID NO: 901401 - RNA, 21 nt, Human
uguauuuuuaguagagauggg

SEQ ID NO: 901402 - RNA, 20 nt, Human
ugucacccaggcuggagugc

SEQ ID NO: 901403 - RNA, 18 nt, Human
uuaguagagaugggguuu

SEQ ID NO: 901404 - RNA, 22 nt, Human
uuaguagagaugggguuucacc

SEQ ID NO: 901405 - RNA, 24 nt, Human
uuaguagagaugggguuucaccau

SEQ ID NO: 901406 - RNA, 23 nt, Human
uucaagugaugcuccugucucag

SEQ ID NO: 901407 - RNA, 18 nt, Human
uuggccucccaaagugcu

SEQ ID NO: 901408 - RNA, 23 nt, Human
uuguauuuuuaguagagaugggg

SEQ ID NO: 901409 - RNA, 24 nt, Human
uuucaccauguuggccaggcuggu

SEQ ID NO: 901410 - RNA, 24 nt, Human
uuuuuaguagagaugggguuucac

SEQ ID NO: 901411 - RNA, 20 nt, Human
uuuuuguauuuuuaguagag

SEQ ID NO: 901412 - RNA, 19 nt, Human
uuuuuuuuuuuuuuuugca

SEQ ID NO: 901413 - RNA, 18 nt, Human
uuuuuuuuuuuuuuuuug

SEQ ID NO: 901414 - RNA, 19 nt, Human
uuuuuuuuuuuuuuuuugc

SEQ ID NO: 901415 - RNA, 23 nt, Human
aaagaccucuacccuuucccuca

SEQ ID NO: 901416 - RNA, 18 nt, Human
aagcagcugagcaugagc

SEQ ID NO: 901417 - RNA, 20 nt, Human
aaggaggccgggagguccug

SEQ ID NO: 901418 - RNA, 21 nt, Human
accagaaagaacugcaaccag

SEQ ID NO: 901419 - RNA, 18 nt, Human
acccaagauccuaaccca

SEQ ID NO: 901420 - RNA, 18 nt, Human
accucuacccuuucccuc

SEQ ID NO: 901421 - RNA, 25 nt, Human
agacagaguauugggggcagggcuc

SEQ ID NO: 901422 - RNA, 22 nt, Human
aggagguguuuaggcagcuccc

SEQ ID NO: 901423 - RNA, 19 nt, Human
aggcggggugaggcgggga

SEQ ID NO: 901424 - RNA, 25 nt, Human
agggcaggggacuccagauugagga

SEQ ID NO: 901425 - RNA, 24 nt, Human
aguauugggggcagggcucuggag

SEQ ID NO: 901426 - RNA, 19 nt, Human
aucaagagagccauacccc

SEQ ID NO: 901427 - RNA, 19 nt, Human
augacccagugaccuaugg

SEQ ID NO: 901428 - RNA, 22 nt, Human
augguccagcucuuagagaccu

SEQ ID NO: 901429 - RNA, 20 nt, Human
caaauuggaaagggcuuacc

SEQ ID NO: 901430 - RNA, 19 nt, Human
caagcuggucccugagcca

SEQ ID NO: 901431 - RNA, 20 nt, Human
cacauuuguuuccucucccc

SEQ ID NO: 901432 - RNA, 24 nt, Human
cagaaagaacugcaaccagcagca

SEQ ID NO: 901433 - RNA, 26 nt, Human
cagaacaaaccuccuuuccuucccca

SEQ ID NO: 901434 - RNA, 21 nt, Human
cagacagaguauugggggcag

SEQ ID NO: 901435 - RNA, 20 nt, Human
cagcagcagcucggugaaaa

SEQ ID NO: 901436 - RNA, 22 nt, Human
ccagaaagaacugcaaccagca

SEQ ID NO: 901437 - RNA, 21 nt, Human
ccauaccccaugaagauuguu

SEQ ID NO: 901438 - RNA, 25 nt, Human
cccuccuguucccacaaauuggaaa

SEQ ID NO: 901439 - RNA, 20 nt, Human
cccugugucccugugggucc

SEQ ID NO: 901440 - RNA, 23 nt, Human
ccucacccugcaugggcccugga

SEQ ID NO: 901441 - RNA, 20 nt, Human
ccuccauaagcaaggcuggu

SEQ ID NO: 901442 - RNA, 19 nt, Human
ccuccuuuccuuccccaag

SEQ ID NO: 901443 - RNA, 21 nt, Human
ccuccuuuccuuccccaagcu

SEQ ID NO: 901444 - RNA, 19 nt, Human
ccugugucccugugggucc

SEQ ID NO: 901445 - RNA, 22 nt, Human
cugggauuggacucggcaggag

SEQ ID NO: 901446 - RNA, 24 nt, Human
gaacaaaccuccuuuccuucccca

SEQ ID NO: 901447 - RNA, 21 nt, Human
gccaaugugcaccagaaagaa

SEQ ID NO: 901448 - RNA, 18 nt, Human
ggaggcggggugaggcgg

SEQ ID NO: 901449 - RNA, 18 nt, Human
ggaggugacagccauggg

SEQ ID NO: 901450 - RNA, 21 nt, Human
gucccugagccacacauaggu

SEQ ID NO: 901451 - RNA, 23 nt, Human
uagguuaggcaugagcugagugu

SEQ ID NO: 901452 - RNA, 22 nt, Human
uauugggggcagggcucuggag

SEQ ID NO: 901453 - RNA, 24 nt, Human
ucagauggugguucccagucuggg

SEQ ID NO: 901454 - RNA, 21 nt, Human
ucauaaccuuccuuuuaucca

SEQ ID NO: 901455 - RNA, 21 nt, Human
uccaagacauacccaagaucc

SEQ ID NO: 901456 - RNA, 21 nt, Human
ucccacaaauuggaaagggcu

SEQ ID NO: 901457 - RNA, 23 nt, Human
ucucagauggugguucccagucu

SEQ ID NO: 901458 - RNA, 19 nt, Human
ugacagccaugggccagau

SEQ ID NO: 901459 - RNA, 20 nt, Human
ugagaaaggugaaggaggcc

SEQ ID NO: 901460 - RNA, 24 nt, Human
ugagcaugagcaggaggaggcggg

SEQ ID NO: 901461 - RNA, 20 nt, Human
uggaaagggcuuaccuugug

SEQ ID NO: 901462 - RNA, 23 nt, Human
uggaagguccagaagcagcugag

SEQ ID NO: 901463 - RNA, 22 nt, Human
uguagggcggggguugggccau

SEQ ID NO: 901464 - RNA, 19 nt, Human
uucccagucugggauugga

SEQ ID NO: 901465 - RNA, 20 nt, Human
uuuguuuccucuccccuccu

SEQ ID NO: 901466 - RNA, 25 nt, Human
aaacaucagagaccagcauggagcc

SEQ ID NO: 901467 - RNA, 21 nt, Human
aauccaugaccccauacuugg

SEQ ID NO: 901468 - RNA, 23 nt, Human
acccugcccccaaacugaacuag

SEQ ID NO: 901469 - RNA, 25 nt, Human
agacaggguauggguccaaucucag

SEQ ID NO: 901470 - RNA, 20 nt, Human
agagaccagcauggagccac

SEQ ID NO: 901471 - RNA, 24 nt, Human
agagcuccugcagaaggagggggc

SEQ ID NO: 901472 - RNA, 19 nt, Human
aucagagaccagcauggag

SEQ ID NO: 901473 - RNA, 21 nt, Human
cagagcuccugcagaaggagg

SEQ ID NO: 901474 - RNA, 19 nt, Human
caugaccccauacuuggcc

SEQ ID NO: 901475 - RNA, 22 nt, Human
cauuuuuuuuuaaugucaaggg

SEQ ID NO: 901476 - RNA, 18 nt, Human
ccccauacuuggccacuc

SEQ ID NO: 901477 - RNA, 18 nt, Human
ccucagggagccuggcug

SEQ ID NO: 901478 - RNA, 30 nt, Human
ccugcccccaaacugaacuaggccuggaaa

SEQ ID NO: 901479 - RNA, 21 nt, Human
cugcccccaaacugaacuagg

SEQ ID NO: 901480 - RNA, 19 nt, Human
cugggcauugagaaugaca

SEQ ID NO: 901481 - RNA, 21 nt, Human
gacccugcccccaaacugaac

SEQ ID NO: 901482 - RNA, 19 nt, Human
gccuggcccucagggagcc

SEQ ID NO: 901483 - RNA, 18 nt, Human
ggccuggaauccaugacc

SEQ ID NO: 901484 - RNA, 21 nt, Human
uacuuggccacucaauuccaa

SEQ ID NO: 901485 - RNA, 26 nt, Human
ucaaggcaggguuggagacaggguau

SEQ ID NO: 901486 - RNA, 22 nt, Human
ugagaaugacauucuuggccgc

SEQ ID NO: 901487 - RNA, 24 nt, Human
ugcagaaggagggggcauuuuuuu

SEQ ID NO: 901488 - RNA, 24 nt, Human
ugcagcucagucucugcugacacc

SEQ ID NO: 901489 - RNA, 19 nt, Human
uggaauuuguggccuggaa

SEQ ID NO: 901490 - RNA, 19 nt, Human
ugggagcaggacugacccu

SEQ ID NO: 901491 - RNA, 23 nt, Human
uggucugggggccuggcccucag

SEQ ID NO: 901492 - RNA, 19 nt, Human
uguccaaagaaagggugca

SEQ ID NO: 901493 - RNA, 19 nt, Human
uuuguggccuggaauccau

SEQ ID NO: 901494 - RNA, 19 nt, Human
aaagaucaauaagaaaugg

SEQ ID NO: 901495 - RNA, 20 nt, Human
aaagaucaauaagaaaugga

SEQ ID NO: 901496 - RNA, 19 nt, Human
aaccugaggagcccggacc

SEQ ID NO: 901497 - RNA, 20 nt, Human
aauuauauuuuucacaacua

SEQ ID NO: 901498 - RNA, 24 nt, Human
agagguggcagcagagcuggcagg

SEQ ID NO: 901499 - RNA, 23 nt, Human
aggagcccggaccagcccgcagu

SEQ ID NO: 901500 - RNA, 25 nt, Human
caacuaagccuuuggccaaaaaagu

SEQ ID NO: 901501 - RNA, 19 nt, Human
cagagcuggcaggacagga

SEQ ID NO: 901502 - RNA, 21 nt, Human
ccagcccgcaguagacuugcc

SEQ ID NO: 901503 - RNA, 20 nt, Human
cccauagugcugaagguaga

SEQ ID NO: 901504 - RNA, 22 nt, Human
ccgcaccugucucagauugcuc

SEQ ID NO: 901505 - RNA, 21 nt, Human
ccgcaguagacuugccgcacc

SEQ ID NO: 901506 - RNA, 21 nt, Human
cugaagguagaggugucugug

SEQ ID NO: 901507 - RNA, 24 nt, Human
gaccuguaaagugcaccucuccuc

SEQ ID NO: 901508 - RNA, 25 nt, Human
gagcuggcaggacaggacggcuggg

SEQ ID NO: 901509 - RNA, 28 nt, Human
ggccacuaccuugaauguauaauuuaaa

SEQ ID NO: 901510 - RNA, 21 nt, Human
ggucgggucugaaccugagga

SEQ ID NO: 901511 - RNA, 18 nt, Human
guggcagcagagcuggca

SEQ ID NO: 901512 - RNA, 20 nt, Human
uaaagugcaccucuccucuc

SEQ ID NO: 901513 - RNA, 23 nt, Human
uaagccuuuggccaaaaaaguca

SEQ ID NO: 901514 - RNA, 22 nt, Human
ucacugaauuaaacaguagcaa

SEQ ID NO: 901515 - RNA, 23 nt, Human
ugaaacauacaggcggcuguuag

SEQ ID NO: 901516 - RNA, 21 nt, Human
ugaauuaaacaguagcaaccc

SEQ ID NO: 901517 - RNA, 24 nt, Human
ugcaccucuccucuccacgaaccg

SEQ ID NO: 901518 - RNA, 24 nt, Human
uguaaagugcaccucuccucucca

SEQ ID NO: 901519 - RNA, 21 nt, Human
uguuacauuuggccacuaccu

SEQ ID NO: 901520 - RNA, 24 nt, Human
aagaaaaauacacagcaaaacaga

SEQ ID NO: 901521 - RNA, 22 nt, Human
aagaagcugcccaaauggcuuc

SEQ ID NO: 901522 - RNA, 20 nt, Human
acccauccugauuaaacugc

SEQ ID NO: 901523 - RNA, 24 nt, Human
accucaccugccuuccugauucaa

SEQ ID NO: 901524 - RNA, 18 nt, Human
accuccuacuggaccaaa

SEQ ID NO: 901525 - RNA, 21 nt, Human
agcugucccaaaacccauccc

SEQ ID NO: 901526 - RNA, 22 nt, Human
aguauggagaauaagagaagga

SEQ ID NO: 901527 - RNA, 22 nt, Human
aucauuuuuaaaaaguagauuc

SEQ ID NO: 901528 - RNA, 21 nt, Human
auuccaucuucccacccccag

SEQ ID NO: 901529 - RNA, 26 nt, Human
cacccccagccuuaugaggacagcuc

SEQ ID NO: 901530 - RNA, 26 nt, Human
cagcucagauccccguccggcuaucc

SEQ ID NO: 901531 - RNA, 25 nt, Human
caggacugggcccaggagccccauu

SEQ ID NO: 901532 - RNA, 27 nt, Human
ccaugcccauggagcugucccaaaacc

SEQ ID NO: 901533 - RNA, 23 nt, Human
cccaaauggcuuccugcuaugga

SEQ ID NO: 901534 - RNA, 19 nt, Human
cccauggagcugucccaaa

SEQ ID NO: 901535 - RNA, 21 nt, Human
ccuuaccucaccugccuuccu

SEQ ID NO: 901536 - RNA, 19 nt, Human
cuuccccaugcccauggag

SEQ ID NO: 901537 - RNA, 22 nt, Human
cuugggagucugggaaagguug

SEQ ID NO: 901538 - RNA, 20 nt, Human
gacuauuuaaagccagggga

SEQ ID NO: 901539 - RNA, 22 nt, Human
gagaaggauguuuuauaguccu

SEQ ID NO: 901540 - RNA, 19 nt, Human
gagaaucucuucccuacua

SEQ ID NO: 901541 - RNA, 19 nt, Human
gagucugggaaagguugua

SEQ ID NO: 901542 - RNA, 20 nt, Human
gauccccguccggcuauccc

SEQ ID NO: 901543 - RNA, 19 nt, Human
gccaaucucuucucuucuu

SEQ ID NO: 901544 - RNA, 26 nt, Human
gcccaggagccccauuugccaaucuc

SEQ ID NO: 901545 - RNA, 22 nt, Human
gcuauagcugaaaaaaauuauu

SEQ ID NO: 901546 - RNA, 19 nt, Human
ggagagugauuuggcccuu

SEQ ID NO: 901547 - RNA, 24 nt, Human
ggagcccuuuuucucauuugagaa

SEQ ID NO: 901548 - RNA, 21 nt, Human
gggaaagguuguauaguucuc

SEQ ID NO: 901549 - RNA, 33 nt, Human
uaagagaaggauguuuuauaguccucuguuucu

SEQ ID NO: 901550 - RNA, 24 nt, Human
uaccucaccugccuuccugauuca

SEQ ID NO: 901551 - RNA, 18 nt, Human
uauuuguauguacaugac

SEQ ID NO: 901552 - RNA, 22 nt, Human
ucaccugccuuccugauucaaa

SEQ ID NO: 901553 - RNA, 18 nt, Human
uccaucuucccaccccca

SEQ ID NO: 901554 - RNA, 22 nt, Human
ucuguuucagugccuuccccau

SEQ ID NO: 901555 - RNA, 18 nt, Human
ugccaaucucuucucuuc

SEQ ID NO: 901556 - RNA, 23 nt, Human
uggaaagauguaaucaccaaaga

SEQ ID NO: 901557 - RNA, 21 nt, Human
ugggagucugggaaagguugu

SEQ ID NO: 901558 - RNA, 19 nt, Human
ugguaaguguaaaagauau

SEQ ID NO: 901559 - RNA, 21 nt, Human
ugguaaguguaaaagauaugg

SEQ ID NO: 901560 - RNA, 22 nt, Human
uguaaucaccaaagaagcugcc

SEQ ID NO: 901561 - RNA, 24 nt, Human
uguauguacaugacuauuuaaagc

SEQ ID NO: 901562 - RNA, 24 nt, Human
uuaaagccaggggauuaucuuucu

SEQ ID NO: 901563 - RNA, 21 nt, Human
uucaugcccacugcccuuggg

SEQ ID NO: 901564 - RNA, 24 nt, Human
uucccagaagcccccaugugaucc

SEQ ID NO: 901565 - RNA, 18 nt, Human
uuggagaauuguuuuaag

SEQ ID NO: 901566 - RNA, 18 nt, Human
uuguaagaaaaauacaca

SEQ ID NO: 901567 - RNA, 21 nt, Human
uuucucauuugagaaucucuu

SEQ ID NO: 901568 - RNA, 21 nt, Human
uuugagaaucucuucccuacu

SEQ ID NO: 901569 - RNA, 21 nt, Human
uuuuuuuuuuuuuuugucaaa

SEQ ID NO: 901570 - RNA, 18 nt, Human
uuuuuuuuuuuuuuuuug

SEQ ID NO: 901571 - RNA, 19 nt, Human
uuuuuuuuuuuuuuuuugu

SEQ ID NO: 901572 - RNA, 24 nt, Human
aaaaagcaaaaggaaaagaucaaa

SEQ ID NO: 901573 - RNA, 18 nt, Human
aaacaagugagcaggggu

SEQ ID NO: 901574 - RNA, 23 nt, Human
aaagcaaaaggaaaagaucaaaa

SEQ ID NO: 901575 - RNA, 22 nt, Human
aacccgcggcugcagccucccc

SEQ ID NO: 901576 - RNA, 22 nt, Human
aacgguucccgggagcgggggc

SEQ ID NO: 901577 - RNA, 18 nt, Human
aagcaaaaggaaaagauc

SEQ ID NO: 901578 - RNA, 19 nt, Human
accccuccccugccacccu

SEQ ID NO: 901579 - RNA, 21 nt, Human
acccuaccccuccccugccac

SEQ ID NO: 901580 - RNA, 20 nt, Human
agaaaaggucagagcccagg

SEQ ID NO: 901581 - RNA, 26 nt, Human
agcuguaacaacccgcggcugcagcc

SEQ ID NO: 901582 - RNA, 28 nt, Human
agcuguaacaacccgcggcugcagccuc

SEQ ID NO: 901583 - RNA, 24 nt, Human
aggaaaagaucaaaaaauucagaa

SEQ ID NO: 901584 - RNA, 23 nt, Human
aggagcccagcccauuccaugac

SEQ ID NO: 901585 - RNA, 20 nt, Human
auggagucucuauucaaaaa

SEQ ID NO: 901586 - RNA, 22 nt, Human
cacccugggcaggggaaggggc

SEQ ID NO: 901587 - RNA, 22 nt, Human
cagaggcuucuucuuucugucu

SEQ ID NO: 901588 - RNA, 21 nt, Human
cagggguuuuuccccuggccu

SEQ ID NO: 901589 - RNA, 18 nt, Human
ccccaaccccacuacaag

SEQ ID NO: 901590 - RNA, 20 nt, Human
ccccacuacaagcuacucca

SEQ ID NO: 901591 - RNA, 21 nt, Human
ccccacuacaagcuacuccaa

SEQ ID NO: 901592 - RNA, 25 nt, Human
ccccacuacaagcuacuccaaguug

SEQ ID NO: 901593 - RNA, 18 nt, Human
cccuccccugccacccug

SEQ ID NO: 901594 - RNA, 18 nt, Human
cccugccacccugggcag

SEQ ID NO: 901595 - RNA, 18 nt, Human
ccuaccccuccccugcca

SEQ ID NO: 901596 - RNA, 23 nt, Human
ccuccugucgcaacugcgugguc

SEQ ID NO: 901597 - RNA, 19 nt, Human
ccugagggcaaacaaguga

SEQ ID NO: 901598 - RNA, 21 nt, Human
cggcccgggaacgguucccgg

SEQ ID NO: 901599 - RNA, 23 nt, Human
cuccagcagcuguaacaacccgc

SEQ ID NO: 901600 - RNA, 25 nt, Human
cuggcaguguccagaggcuucuucu

SEQ ID NO: 901601 - RNA, 24 nt, Human
ggaaaagaucaaaaaauucagaaa

SEQ ID NO: 901602 - RNA, 22 nt, Human
ggcaaacaagugagcagggguu

SEQ ID NO: 901603 - RNA, 24 nt, Human
ggcaguguccagaggcuucuucuu

SEQ ID NO: 901604 - RNA, 19 nt, Human
ggccagaggcucaaccccc

SEQ ID NO: 901605 - RNA, 20 nt, Human
gggggaaauuaggccagagg

SEQ ID NO: 901606 - RNA, 20 nt, Human
uaccccaaccccacuacaag

SEQ ID NO: 901607 - RNA, 26 nt, Human
ucaacccccaucucuggcagugucca

SEQ ID NO: 901608 - RNA, 20 nt, Human
ucagaaaaggucagagccca

SEQ ID NO: 901609 - RNA, 18 nt, Human
ucaguguugcagcacaug

SEQ ID NO: 901610 - RNA, 20 nt, Human
uccccuggccuccugucgca

SEQ ID NO: 901611 - RNA, 18 nt, Human
ugcugccccucucugcug

SEQ ID NO: 901612 - RNA, 24 nt, Human
uggggccgaagaucaacggcccgg

SEQ ID NO: 901613 - RNA, 18 nt, Human
ugggggaagcgagggggg

SEQ ID NO: 901614 - RNA, 22 nt, Human
ugucgcaacugcgugguccauu

SEQ ID NO: 901615 - RNA, 21 nt, Human
uucuucuuucugucuucagug

SEQ ID NO: 901616 - RNA, 18 nt, Human
uuggcugccugagggcaa

SEQ ID NO: 901617 - RNA, 23 nt, Human
aaccaaaauucccaugaagucaa

SEQ ID NO: 901618 - RNA, 19 nt, Human
aggguagaagaagggaaga

SEQ ID NO: 901619 - RNA, 19 nt, Human
caaaggcccugacagaacg

SEQ ID NO: 901620 - RNA, 19 nt, Human
caaaggcccugacagaacg

SEQ ID NO: 901621 - RNA, 22 nt, Human
caaaggcccugacagaacgaua

SEQ ID NO: 901622 - RNA, 21 nt, Human
cagcaagugcaagagcagcaa

SEQ ID NO: 901623 - RNA, 22 nt, Human
cagcaagugcaagagcagcaac

SEQ ID NO: 901624 - RNA, 19 nt, Human
ccagcaagugcaagagcag

SEQ ID NO: 901625 - RNA, 23 nt, Human
cccugugaugaacuguaguccuc

SEQ ID NO: 901626 - RNA, 19 nt, Human
uacauagggccaaccagcc

SEQ ID NO: 901627 - RNA, 20 nt, Human
uagggccaaccagcccaccc

SEQ ID NO: 901628 - RNA, 19 nt, Human
uauaugauguaaaauagag

SEQ ID NO: 901629 - RNA, 20 nt, Human
ugaagucaaaauuagacagu

SEQ ID NO: 901630 - RNA, 24 nt, Human
uguacacacaaauggcuuuaugca

SEQ ID NO: 901631 - RNA, 20 nt, Human
uuaggguagaagaagggaag

SEQ ID NO: 901632 - RNA, 23 nt, Human
uucaauacaauuaugggcagaaa

SEQ ID NO: 901633 - RNA, 19 nt, Human
aaagauccuacugaaucuc

SEQ ID NO: 901634 - RNA, 22 nt, Human
aaggaaaucccaaggcaauuca

SEQ ID NO: 901635 - RNA, 30 nt, Human
aauaacaggaaaagccacagaggagaggaa

SEQ ID NO: 901636 - RNA, 19 nt, Human
acccacagaguugcccgag

SEQ ID NO: 901637 - RNA, 21 nt, Human
acccagggcccccacacccac

SEQ ID NO: 901638 - RNA, 18 nt, Human
acucaaaagauccuacug

SEQ ID NO: 901639 - RNA, 23 nt, Human
agaagcacaaauuguaggggaca

SEQ ID NO: 901640 - RNA, 19 nt, Human
agcagcauucacccagggc

SEQ ID NO: 901641 - RNA, 22 nt, Human
agcgaagagcggacgaaaagaa

SEQ ID NO: 901642 - RNA, 19 nt, Human
aggaagagucuggauuccg

SEQ ID NO: 901643 - RNA, 20 nt, Human
aggggacagggugggcaggg

SEQ ID NO: 901644 - RNA, 19 nt, Human
aggguggggagguggggag

SEQ ID NO: 901645 - RNA, 19 nt, Human
auuccgugaagggucaagu

SEQ ID NO: 901646 - RNA, 18 nt, Human
auuguaggggacagggug

SEQ ID NO: 901647 - RNA, 23 nt, Human
auugugcuggaggugauaggcag

SEQ ID NO: 901648 - RNA, 20 nt, Human
auuuagaaaccugauuguuc

SEQ ID NO: 901649 - RNA, 22 nt, Human
caaauaucacaggcccggugag

SEQ ID NO: 901650 - RNA, 19 nt, Human
cacagcucagcuccacucu

SEQ ID NO: 901651 - RNA, 24 nt, Human
cacagcucagcuccacucugcugu

SEQ ID NO: 901652 - RNA, 22 nt, Human
cacccagggcccccacacccac

SEQ ID NO: 901653 - RNA, 24 nt, Human
cacccagggcccccacacccacag

SEQ ID NO: 901654 - RNA, 18 nt, Human
cagcuccacucugcuguu

SEQ ID NO: 901655 - RNA, 19 nt, Human
cauggugggugcuucacac

SEQ ID NO: 901656 - RNA, 19 nt, Human
ccucagcaacagaggugaa

SEQ ID NO: 901657 - RNA, 22 nt, Human
ccucagcaacagaggugaaggc

SEQ ID NO: 901658 - RNA, 20 nt, Human
ccugcccuccuugcucucuc

SEQ ID NO: 901659 - RNA, 26 nt, Human
cucucucuacccaccuccacucaaaa

SEQ ID NO: 901660 - RNA, 26 nt, Human
gaaaucccaaggcaauucaauagaag

SEQ ID NO: 901661 - RNA, 22 nt, Human
gagcggacgaaaagaaaagggu

SEQ ID NO: 901662 - RNA, 24 nt, Human
gauugugcuggaggugauaggcag

SEQ ID NO: 901663 - RNA, 20 nt, Human
gcucagcuccacucugcugu

SEQ ID NO: 901664 - RNA, 22 nt, Human
ggagaaauaagcgaagagcgga

SEQ ID NO: 901665 - RNA, 20 nt, Human
ggagguggggaggaggcaag

SEQ ID NO: 901666 - RNA, 22 nt, Human
ggcgggagaaauaagcgaagag

SEQ ID NO: 901667 - RNA, 19 nt, Human
gggacagggugggcaggga

SEQ ID NO: 901668 - RNA, 18 nt, Human
gguggggagguggggagg

SEQ ID NO: 901669 - RNA, 20 nt, Human
guccacagcucagcuccacu

SEQ ID NO: 901670 - RNA, 18 nt, Human
guccugcccuccuugcuc

SEQ ID NO: 901671 - RNA, 24 nt, Human
uaaaacgacuccaaacaucacuaa

SEQ ID NO: 901672 - RNA, 18 nt, Human
uaagggcaggugggggcc

SEQ ID NO: 901673 - RNA, 19 nt, Human
uaaguguccugcccuccuu

SEQ ID NO: 901674 - RNA, 18 nt, Human
uaggggacagggugggca

SEQ ID NO: 901675 - RNA, 25 nt, Human
ucagcaacagaggugaaggcuccuc

SEQ ID NO: 901676 - RNA, 21 nt, Human
uccaggaagagucuggauucc

SEQ ID NO: 901677 - RNA, 24 nt, Human
uccaggguggggagguggggagga

SEQ ID NO: 901678 - RNA, 21 nt, Human
ucuaccauuuccucagcaaca

SEQ ID NO: 901679 - RNA, 19 nt, Human
ugaggucucaagguggcug

SEQ ID NO: 901680 - RNA, 19 nt, Human
ugccagcaggggcagcagc

SEQ ID NO: 901681 - RNA, 22 nt, Human
ugccugcuaaguguccugcccu

SEQ ID NO: 901682 - RNA, 20 nt, Human
ugcucucucuacccaccucc

SEQ ID NO: 901683 - RNA, 19 nt, Human
ugcuggaggugauaggcag

SEQ ID NO: 901684 - RNA, 22 nt, Human
ugggcagggaaagggagaagga

SEQ ID NO: 901685 - RNA, 18 nt, Human
uggggagguggggaggag

SEQ ID NO: 901686 - RNA, 18 nt, Human
uggggagguggggaggag

SEQ ID NO: 901687 - RNA, 19 nt, Human
uggggagguggggaggagg

SEQ ID NO: 901688 - RNA, 25 nt, Human
uguccugcccuccuugcucucucua

SEQ ID NO: 901689 - RNA, 22 nt, Human
uguuuggcccucagggguucca

SEQ ID NO: 901690 - RNA, 21 nt, Human
uugcucucucuacccaccucc

SEQ ID NO: 901691 - RNA, 22 nt, Human
aaaaaagcucacgaggcccaaa

SEQ ID NO: 901692 - RNA, 22 nt, Human
aaaaagcucacgaggcccaaag

SEQ ID NO: 901693 - RNA, 20 nt, Human
aaaacacagucaaaagaacg

SEQ ID NO: 901694 - RNA, 21 nt, Human
aaaaggagaaaaaagacagaa

SEQ ID NO: 901695 - RNA, 19 nt, Human
aaacaagaggaggaaaugg

SEQ ID NO: 901696 - RNA, 21 nt, Human
aaacaaguucucaucuuccca

SEQ ID NO: 901697 - RNA, 24 nt, Human
aaacacacacacaaacacacacuc

SEQ ID NO: 901698 - RNA, 25 nt, Human
aaacacacacacaaacacacacucu

SEQ ID NO: 901699 - RNA, 18 nt, Human
aaacacacacucucucac

SEQ ID NO: 901700 - RNA, 19 nt, Human
aaacacacacucucucaca

SEQ ID NO: 901701 - RNA, 19 nt, Human
aaacacacaucucaacaag

SEQ ID NO: 901702 - RNA, 18 nt, Human
aaagagcccugcccaaga

SEQ ID NO: 901703 - RNA, 20 nt, Human
aaagcucacgaggcccaaag

SEQ ID NO: 901704 - RNA, 19 nt, Human
aaagcucuuuccaguuacu

SEQ ID NO: 901705 - RNA, 18 nt, Human
aacaagaggaggaaaugg

SEQ ID NO: 901706 - RNA, 20 nt, Human
aaccccagcgccgccgacau

SEQ ID NO: 901707 - RNA, 23 nt, Human
aacccgacagcaaauaaugacua

SEQ ID NO: 901708 - RNA, 23 nt, Human
aagcaagaggaagcuaaacagaa

SEQ ID NO: 901709 - RNA, 19 nt, Human
aagcagauccccuacccuc

SEQ ID NO: 901710 - RNA, 22 nt, Human
aagcagauccccuacccuccaa

SEQ ID NO: 901711 - RNA, 18 nt, Human
aagcaggagacacccaga

SEQ ID NO: 901712 - RNA, 18 nt, Human
aagcaggagacacccaga

SEQ ID NO: 901713 - RNA, 18 nt, Human
aaguaauccacugaggac

SEQ ID NO: 901714 - RNA, 18 nt, Human
aauggcaucuugaagggg

SEQ ID NO: 901715 - RNA, 24 nt, Human
acaaacacacacucucucacaguc

SEQ ID NO: 901716 - RNA, 24 nt, Human
acaaauauuccaaaaauauaaaca

SEQ ID NO: 901717 - RNA, 18 nt, Human
acacacucucucacaguc

SEQ ID NO: 901718 - RNA, 20 nt, Human
acacacucucucacagucaa

SEQ ID NO: 901719 - RNA, 23 nt, Human
acagagcucgguacaggacaggc

SEQ ID NO: 901720 - RNA, 22 nt, Human
acaggacaggcccugggggaag

SEQ ID NO: 901721 - RNA, 21 nt, Human
acccaugggccuacagagugu

SEQ ID NO: 901722 - RNA, 19 nt, Human
acccuuaggguggggcuug

SEQ ID NO: 901723 - RNA, 25 nt, Human
accuccuuccccacagguuugagac

SEQ ID NO: 901724 - RNA, 18 nt, Human
agaaaaccuccuucccca

SEQ ID NO: 901725 - RNA, 23 nt, Human
agaaaagccuggcugggccuaga

SEQ ID NO: 901726 - RNA, 18 nt, Human
agagaaccccacccaccc

SEQ ID NO: 901727 - RNA, 21 nt, Human
agagucugagcuccugcuuuc

SEQ ID NO: 901728 - RNA, 22 nt, Human
agcagaauagaauagcauccau

SEQ ID NO: 901729 - RNA, 19 nt, Human
agccaccgcugagagcacg

SEQ ID NO: 901730 - RNA, 22 nt, Human
agcuggcccgaccucuggccuc

SEQ ID NO: 901731 - RNA, 20 nt, Human
aggaaaagagcccugcccaa

SEQ ID NO: 901732 - RNA, 18 nt, Human
aggaagagcaagaguucu

SEQ ID NO: 901733 - RNA, 23 nt, Human
aggaaggauguaggcuggaacag

SEQ ID NO: 901734 - RNA, 20 nt, Human
aggaccugaaggggaaaaug

SEQ ID NO: 901735 - RNA, 18 nt, Human
aggagcgcccucccaccc

SEQ ID NO: 901736 - RNA, 19 nt, Human
aggaggagggagggaggga

SEQ ID NO: 901737 - RNA, 19 nt, Human
aggagggagggagggagga

SEQ ID NO: 901738 - RNA, 19 nt, Human
aggcaagcauagccuuugg

SEQ ID NO: 901739 - RNA, 23 nt, Human
aggcaccuuaaaagaacugaacc

SEQ ID NO: 901740 - RNA, 19 nt, Human
aggcaggguucugauggga

SEQ ID NO: 901741 - RNA, 25 nt, Human
aggcggccuguacaaagggcgggcc

SEQ ID NO: 901742 - RNA, 21 nt, Human
aggcuggaacagacagagcuc

SEQ ID NO: 901743 - RNA, 19 nt, Human
agggacacucccaccaagc

SEQ ID NO: 901744 - RNA, 21 nt, Human
agggaggcggccuguacaaag

SEQ ID NO: 901745 - RNA, 18 nt, Human
aggugggcaggcaggguu

SEQ ID NO: 901746 - RNA, 23 nt, Human
agguuugagacuauggcuaggug

SEQ ID NO: 901747 - RNA, 18 nt, Human
agugcaggucugaggggc

SEQ ID NO: 901748 - RNA, 23 nt, Human
auaaccuugggacaagaagggaa

SEQ ID NO: 901749 - RNA, 19 nt, Human
augccuggaguacccaaag

SEQ ID NO: 901750 - RNA, 23 nt, Human
auggcaaaacacacacacaaaca

SEQ ID NO: 901751 - RNA, 20 nt, Human
augugcagaguggaaacccu

SEQ ID NO: 901752 - RNA, 18 nt, Human
caaaacacacacacaaac

SEQ ID NO: 901753 - RNA, 21 nt, Human
caaaaugcuuaaaaucuuugg

SEQ ID NO: 901754 - RNA, 20 nt, Human
caagaguucugaggcccuua

SEQ ID NO: 901755 - RNA, 28 nt, Human
cacacacacaaacacacacucucucaca

SEQ ID NO: 901756 - RNA, 20 nt, Human
cacagcuguucacauccccc

SEQ ID NO: 901757 - RNA, 18 nt, Human
cacuggggccacaguuca

SEQ ID NO: 901758 - RNA, 22 nt, Human
cagcaaauaaugacuaggcugg

SEQ ID NO: 901759 - RNA, 20 nt, Human
caggcccuacaacguuaaaa

SEQ ID NO: 901760 - RNA, 19 nt, Human
caggcucagcaccccagcc

SEQ ID NO: 901761 - RNA, 23 nt, Human
cagggaacacagagaugggaaca

SEQ ID NO: 901762 - RNA, 20 nt, Human
cagucaaaagaacggaaauc

SEQ ID NO: 901763 - RNA, 20 nt, Human
caucccuacacaacucaguu

SEQ ID NO: 901764 - RNA, 24 nt, Human
cauggcaaaacacacacacaaaca

SEQ ID NO: 901765 - RNA, 25 nt, Human
cauggcaaaacacacacacaaacac

SEQ ID NO: 901766 - RNA, 18 nt, Human
ccaagccauccugggcuu

SEQ ID NO: 901767 - RNA, 21 nt, Human
ccacgauuaaggcagugaugc

SEQ ID NO: 901768 - RNA, 22 nt, Human
ccagccuuuggaacagaagucc

SEQ ID NO: 901769 - RNA, 23 nt, Human
cccaaaggcauacccuuccuuua

SEQ ID NO: 901770 - RNA, 19 nt, Human
cccaggaaggauguaggcu

SEQ ID NO: 901771 - RNA, 26 nt, Human
ccccacccaccccagggaggccacga

SEQ ID NO: 901772 - RNA, 19 nt, Human
ccccccucucguuuccucc

SEQ ID NO: 901773 - RNA, 18 nt, Human
cccccgggugcccccggc

SEQ ID NO: 901774 - RNA, 18 nt, Human
cccccucaccccaggaag

SEQ ID NO: 901775 - RNA, 24 nt, Human
cccccucucguuuccuccccggac

SEQ ID NO: 901776 - RNA, 21 nt, Human
ccccggccccgaucccccagc

SEQ ID NO: 901777 - RNA, 19 nt, Human
ccccgggugcccccggccc

SEQ ID NO: 901778 - RNA, 28 nt, Human
cccgaccucuggccuccucuucccuggc

SEQ ID NO: 901779 - RNA, 19 nt, Human
cccggaccgggaagggagg

SEQ ID NO: 901780 - RNA, 18 nt, Human
cccugaaaagcagacuua

SEQ ID NO: 901781 - RNA, 25 nt, Human
ccgagggacagcagugguuaaguaa

SEQ ID NO: 901782 - RNA, 23 nt, Human
ccgcuccggcucccgagacuccc

SEQ ID NO: 901783 - RNA, 23 nt, Human
ccgcuguuuccgggccguguggu

SEQ ID NO: 901784 - RNA, 22 nt, Human
ccggcucccgagacuccgacuu

SEQ ID NO: 901785 - RNA, 28 nt, Human
ccucacccuaacacacggugaaacugga

SEQ ID NO: 901786 - RNA, 23 nt, Human
ccucuuauuuuccacccugggaa

SEQ ID NO: 901787 - RNA, 19 nt, Human
ccuuggcauaggccuuaca

SEQ ID NO: 901788 - RNA, 22 nt, Human
cgaccucuggccuccucuuccc

SEQ ID NO: 901789 - RNA, 19 nt, Human
cggagugaaaacaagagga

SEQ ID NO: 901790 - RNA, 25 nt, Human
cggccuccucccugucuugcccucc

SEQ ID NO: 901791 - RNA, 22 nt, Human
cucaaccucucuaguaagggaa

SEQ ID NO: 901792 - RNA, 20 nt, Human
cuccaaauggcaucuugaag

SEQ ID NO: 901793 - RNA, 20 nt, Human
cuccuuuuugggaggccccu

SEQ ID NO: 901794 - RNA, 23 nt, Human
cuccuuuuugggaggccccuugu

SEQ ID NO: 901795 - RNA, 23 nt, Human
cugggugccagacagccuucuga

SEQ ID NO: 901796 - RNA, 22 nt, Human
gaaaacaagaggaggaaauggc

SEQ ID NO: 901797 - RNA, 18 nt, Human
gaaccuggcagguaggca

SEQ ID NO: 901798 - RNA, 25 nt, Human
gacccuggcuagguuuggggguagc

SEQ ID NO: 901799 - RNA, 22 nt, Human
gagaggagacaagcuaacuugg

SEQ ID NO: 901800 - RNA, 21 nt, Human
gaggccacgauuaaggcagug

SEQ ID NO: 901801 - RNA, 21 nt, Human
gaggcccaaagaggagggucc

SEQ ID NO: 901802 - RNA, 20 nt, Human
gaucccccagcggcagcucc

SEQ ID NO: 901803 - RNA, 24 nt, Human
gcagggagaaaaccuccuucccca

SEQ ID NO: 901804 - RNA, 18 nt, Human
gcauaggccuuacaacac

SEQ ID NO: 901805 - RNA, 21 nt, Human
gccccgaucccccagcggcag

SEQ ID NO: 901806 - RNA, 24 nt, Human
gcuuugugauaccugccuccaggg

SEQ ID NO: 901807 - RNA, 21 nt, Human
ggaaaggggguggcacaugcu

SEQ ID NO: 901808 - RNA, 18 nt, Human
ggaagaguccugaguggg

SEQ ID NO: 901809 - RNA, 19 nt, Human
ggaccugaaggggaaaaug

SEQ ID NO: 901810 - RNA, 18 nt, Human
ggagacauagaaaaggcc

SEQ ID NO: 901811 - RNA, 18 nt, Human
ggagggagggagggagga

SEQ ID NO: 901812 - RNA, 19 nt, Human
ggcaggcaggguucugaug

SEQ ID NO: 901813 - RNA, 20 nt, Human
ggccugggcgggggcccgcu

SEQ ID NO: 901814 - RNA, 21 nt, Human
ggccugggcgggggcccgcuc

SEQ ID NO: 901815 - RNA, 20 nt, Human
ggccuguacaaagggcgggc

SEQ ID NO: 901816 - RNA, 24 nt, Human
ggccuuggguccgaagccacagcc

SEQ ID NO: 901817 - RNA, 25 nt, Human
ggcugggccuagacggcacaagauu

SEQ ID NO: 901818 - RNA, 22 nt, Human
ggcugggcugggcuggggggcc

SEQ ID NO: 901819 - RNA, 21 nt, Human
ggcugggcuggggggccuggg

SEQ ID NO: 901820 - RNA, 22 nt, Human
gggaagacacaacaggaaaaga

SEQ ID NO: 901821 - RNA, 21 nt, Human
gggaauggcauuguugggggg

SEQ ID NO: 901822 - RNA, 18 nt, Human
gggaggggcugggacagc

SEQ ID NO: 901823 - RNA, 19 nt, Human
gggccacaagaccugaugg

SEQ ID NO: 901824 - RNA, 20 nt, Human
gggcuccucaguuugggucc

SEQ ID NO: 901825 - RNA, 22 nt, Human
gggcugggcugggcuggggggc

SEQ ID NO: 901826 - RNA, 23 nt, Human
gggcugggcuggggggccugggc

SEQ ID NO: 901827 - RNA, 21 nt, Human
gggcuggggggccugggcggg

SEQ ID NO: 901828 - RNA, 23 nt, Human
ggggggaguugcaggugggcagg

SEQ ID NO: 901829 - RNA, 26 nt, Human
ggggggccugggcggggguuccucga

SEQ ID NO: 901830 - RNA, 22 nt, Human
gucacagugggaagcagauccc

SEQ ID NO: 901831 - RNA, 19 nt, Human
gucuuucagcuucuccccc

SEQ ID NO: 901832 - RNA, 18 nt, Human
gugaugcugagguggggc

SEQ ID NO: 901833 - RNA, 20 nt, Human
gugcucccaauuacagcagc

SEQ ID NO: 901834 - RNA, 18 nt, Human
guguggcaauggaaggga

SEQ ID NO: 901835 - RNA, 21 nt, Human
uaaaacacagucaaaagaacg

SEQ ID NO: 901836 - RNA, 18 nt, Human
uaaacagacacuuaaugg

SEQ ID NO: 901837 - RNA, 18 nt, Human
uaagcaaaaaagcucacg

SEQ ID NO: 901838 - RNA, 19 nt, Human
uaaggcagugaugcugagg

SEQ ID NO: 901839 - RNA, 22 nt, Human
uacaccgggaccccauaggcac

SEQ ID NO: 901840 - RNA, 23 nt, Human
uacaccgggaccccauaggcacc

SEQ ID NO: 901841 - RNA, 26 nt, Human
uauaaacagacacuuaauggcguccu

SEQ ID NO: 901842 - RNA, 19 nt, Human
uaucccaggcacucagccg

SEQ ID NO: 901843 - RNA, 19 nt, Human
ucacagugggaagcagauc

SEQ ID NO: 901844 - RNA, 22 nt, Human
ucagaaacaaaccaggcccaac

SEQ ID NO: 901845 - RNA, 23 nt, Human
ucagaaacaaaccaggcccaaca

SEQ ID NO: 901846 - RNA, 25 nt, Human
ucagcuuagagccucuuauugcuua

SEQ ID NO: 901847 - RNA, 26 nt, Human
uccaaaaauauaaacagacacuuaau

SEQ ID NO: 901848 - RNA, 21 nt, Human
uccacaagaacagacccuggc

SEQ ID NO: 901849 - RNA, 19 nt, Human
ucccagaaaugugaucuuu

SEQ ID NO: 901850 - RNA, 23 nt, Human
ucccagaaaugugaucuuuuguc

SEQ ID NO: 901851 - RNA, 20 nt, Human
ucccagagaaagacugccuu

SEQ ID NO: 901852 - RNA, 24 nt, Human
ucccagccuuuggaacagaagucc

SEQ ID NO: 901853 - RNA, 22 nt, Human
ucccaugcuuuuagcacaaagc

SEQ ID NO: 901854 - RNA, 22 nt, Human
ucccccagcggcagcuccgggc

SEQ ID NO: 901855 - RNA, 20 nt, Human
ucccgagacuccgacuucca

SEQ ID NO: 901856 - RNA, 21 nt, Human
ucccgagacuccgacuuccac

SEQ ID NO: 901857 - RNA, 20 nt, Human
ucccgcgggcccgggcuggc

SEQ ID NO: 901858 - RNA, 20 nt, Human
ucccgggcagggagaaaacc

SEQ ID NO: 901859 - RNA, 19 nt, Human
ucccugcaaccccagcgcc

SEQ ID NO: 901860 - RNA, 20 nt, Human
uccucaguuuggguccaaca

SEQ ID NO: 901861 - RNA, 19 nt, Human
uccuccccggaccgggaag

SEQ ID NO: 901862 - RNA, 24 nt, Human
uccuucucccuuuaggucggacuc

SEQ ID NO: 901863 - RNA, 23 nt, Human
ucucacagucaaacacacaucuc

SEQ ID NO: 901864 - RNA, 24 nt, Human
ucucaucuucccagaaaugugauc

SEQ ID NO: 901865 - RNA, 22 nt, Human
ucugcagcagcuggcuggagaa

SEQ ID NO: 901866 - RNA, 22 nt, Human
ucuggggacucuguuccacuuu

SEQ ID NO: 901867 - RNA, 26 nt, Human
ucuguccucuucccgggcagggagaa

SEQ ID NO: 901868 - RNA, 18 nt, Human
ucuuauugcuuauuuagu

SEQ ID NO: 901869 - RNA, 22 nt, Human
ugaagaggcaccuuaaaagaac

SEQ ID NO: 901870 - RNA, 25 nt, Human
ugaagaggcaccuuaaaagaacuga

SEQ ID NO: 901871 - RNA, 18 nt, Human
ugagagcacgaagcugcu

SEQ ID NO: 901872 - RNA, 20 nt, Human
ugaggaaggcaggcucagca

SEQ ID NO: 901873 - RNA, 19 nt, Human
ugaguggguggugucccug

SEQ ID NO: 901874 - RNA, 22 nt, Human
ugcaccagcaccagcagagaau

SEQ ID NO: 901875 - RNA, 23 nt, Human
ugcagaugcagcagggacacucc

SEQ ID NO: 901876 - RNA, 18 nt, Human
ugcccccggccccgaucc

SEQ ID NO: 901877 - RNA, 20 nt, Human
ugccuggaguacccaaaggc

SEQ ID NO: 901878 - RNA, 23 nt, Human
uggaaagguuuuuuaaacccacu

SEQ ID NO: 901879 - RNA, 21 nt, Human
uggaacagacagagcucggua

SEQ ID NO: 901880 - RNA, 26 nt, Human
uggaagggaugauggggaagaguccu

SEQ ID NO: 901881 - RNA, 26 nt, Human
uggcaauggaagggaugauggggaag

SEQ ID NO: 901882 - RNA, 23 nt, Human
uggcagguaggcagauuccuucu

SEQ ID NO: 901883 - RNA, 19 nt, Human
ugggaauggcauuguuggg

SEQ ID NO: 901884 - RNA, 18 nt, Human
ugggagugaggccuaaaa

SEQ ID NO: 901885 - RNA, 18 nt, Human
ugggcugggcuggggggc

SEQ ID NO: 901886 - RNA, 24 nt, Human
ugggggggaguugcaggugggcag

SEQ ID NO: 901887 - RNA, 21 nt, Human
uguaugccuggaguacccaaa

SEQ ID NO: 901888 - RNA, 23 nt, Human
uguaugccuggaguacccaaagg

SEQ ID NO: 901889 - RNA, 20 nt, Human
ugucuuuucccugcaacccc

SEQ ID NO: 901890 - RNA, 28 nt, Human
uguggcaauggaagggaugauggggaag

SEQ ID NO: 901891 - RNA, 18 nt, Human
uuacagcagcacuuccuc

SEQ ID NO: 901892 - RNA, 22 nt, Human
uuacaggcccaggacuguaacu

SEQ ID NO: 901893 - RNA, 18 nt, Human
uuacuucccgcuguuucc

SEQ ID NO: 901894 - RNA, 24 nt, Human
uucacauccccccucucguuuccu

SEQ ID NO: 901895 - RNA, 20 nt, Human
uuccacagcuguucacaucc

SEQ ID NO: 901896 - RNA, 25 nt, Human
uucccagaaaugugaucuuuuguua

SEQ ID NO: 901897 - RNA, 23 nt, Human
uucccaugcuuuuagcacaaagc

SEQ ID NO: 901898 - RNA, 25 nt, Human
uucccaugcuuuuagcacaaagcag

SEQ ID NO: 901899 - RNA, 20 nt, Human
uuccgggccguguggugagg

SEQ ID NO: 901900 - RNA, 26 nt, Human
uuccugaggcuggaucuagggugugg

SEQ ID NO: 901901 - RNA, 19 nt, Human
uucucaucuucccagaaau

SEQ ID NO: 901902 - RNA, 23 nt, Human
uugcaggugggcaggcaggguuc

SEQ ID NO: 901903 - RNA, 19 nt, Human
uuggacaagucuguuagga

SEQ ID NO: 901904 - RNA, 21 nt, Human
uugggacaagaagggaaggug

SEQ ID NO: 901905 - RNA, 23 nt, Human
uuuaggaaaaagggaccgaggga

SEQ ID NO: 901906 - RNA, 25 nt, Human
uuucaaguuuuggaauacaacaaau

SEQ ID NO: 901907 - RNA, 20 nt, Human
aaaaaaaaccaaagaugaaa

SEQ ID NO: 901908 - RNA, 21 nt, Human
aaaagaaaagugucuagaaaa

SEQ ID NO: 901909 - RNA, 23 nt, Human
aagacccauuaacguuuucuaga

SEQ ID NO: 901910 - RNA, 22 nt, Human
aaguaaauacagguuguaugga

SEQ ID NO: 901911 - RNA, 18 nt, Human
aauaaaguaagcugaaag

SEQ ID NO: 901912 - RNA, 21 nt, Human
agaaaaaaaaaccaaagauga

SEQ ID NO: 901913 - RNA, 23 nt, Human
agaaauguacaaucucaagucuc

SEQ ID NO: 901914 - RNA, 22 nt, Human
agaguaguaagaaauguacaau

SEQ ID NO: 901915 - RNA, 22 nt, Human
auagugaaauuaaaguaaauac

SEQ ID NO: 901916 - RNA, 20 nt, Human
caggcgcaggcugcccuucc

SEQ ID NO: 901917 - RNA, 24 nt, Human
cucaaacuauauuuuagaccuaca

SEQ ID NO: 901918 - RNA, 27 nt, Human
cucuuuacugcaaugucauauucugau

SEQ ID NO: 901919 - RNA, 21 nt, Human
cugcaaugucauauucugauc

SEQ ID NO: 901920 - RNA, 22 nt, Human
gcgcagcagccucgguacccag

SEQ ID NO: 901921 - RNA, 19 nt, Human
guggaugccaaaaaucuuc

SEQ ID NO: 901922 - RNA, 19 nt, Human
uaagcugaaagcauaguga

SEQ ID NO: 901923 - RNA, 23 nt, Human
uacauaucauacaauaaaguaag

SEQ ID NO: 901924 - RNA, 22 nt, Human
ucaagacccauuaacguuuucu

SEQ ID NO: 901925 - RNA, 22 nt, Human
ucuagaaaaaaaaaccaaagau

SEQ ID NO: 901926 - RNA, 21 nt, Human
uguauggauagcucaauuucu

SEQ ID NO: 901927 - RNA, 18 nt, Human
ugucuagaaaaaaaaacc

SEQ ID NO: 901928 - RNA, 21 nt, Human
ugucuagaaaaaaaaaccaaa

SEQ ID NO: 901929 - RNA, 18 nt, Human
uuaagcucuuuacugcaa

SEQ ID NO: 901930 - RNA, 23 nt, Human
agcggccagugggggcggggggc

SEQ ID NO: 901931 - RNA, 22 nt, Human
cccgcgcgcggccgagcggcca

SEQ ID NO: 901932 - RNA, 19 nt, Human
ccgggggcggggccggggg

SEQ ID NO: 901933 - RNA, 18 nt, Human
gcgcggcgcgaggcgggg

SEQ ID NO: 901934 - RNA, 22 nt, Human
ggccagugggggcggggggcag

SEQ ID NO: 901935 - RNA, 20 nt, Human
ggcgcagucacgugcgcgcg

SEQ ID NO: 901936 - RNA, 21 nt, Human
gggcggggccgggggcgcagu

SEQ ID NO: 901937 - RNA, 23 nt, Human
ggggcggggggcaggccgggggc

SEQ ID NO: 901938 - RNA, 21 nt, Human
ugggggcggggggcaggccgg

SEQ ID NO: 901939 - RNA, 23 nt, Human
aaaaggcacaaaauuaguauuac

SEQ ID NO: 901940 - RNA, 22 nt, Human
aaagcccuuuuucaucacaaaa

SEQ ID NO: 901941 - RNA, 19 nt, Human
aaagcucugcaccuccacc

SEQ ID NO: 901942 - RNA, 19 nt, Human
aacuccuuggugggccuug

SEQ ID NO: 901943 - RNA, 25 nt, Human
aagcagacaaaaggcacaaaauuag

SEQ ID NO: 901944 - RNA, 23 nt, Human
aagcccuuuuucaucacaaaaga

SEQ ID NO: 901945 - RNA, 23 nt, Human
acagugcuuucuugcagaguugg

SEQ ID NO: 901946 - RNA, 20 nt, Human
acggcggcugcugcugcugc

SEQ ID NO: 901947 - RNA, 21 nt, Human
agaaaaacuucaaacuucauu

SEQ ID NO: 901948 - RNA, 18 nt, Human
agaaagcagacaaaaggc

SEQ ID NO: 901949 - RNA, 20 nt, Human
agaaagcagacaaaaggcac

SEQ ID NO: 901950 - RNA, 24 nt, Human
agaaagcagacaaaaggcacaaaa

SEQ ID NO: 901951 - RNA, 29 nt, Human
agacaaaaggcacaaaauuaggggacccc

SEQ ID NO: 901952 - RNA, 27 nt, Human
agacaaaaggcacaaaauuaguauuac

SEQ ID NO: 901953 - RNA, 21 nt, Human
agagaagcauucaugcuauug

SEQ ID NO: 901954 - RNA, 19 nt, Human
aggaaaaaauaauccacag

SEQ ID NO: 901955 - RNA, 29 nt, Human
aggcucuggcauaaaucuuuaacagcuuu

SEQ ID NO: 901956 - RNA, 21 nt, Human
caaaaacagggcuauacugga

SEQ ID NO: 901957 - RNA, 23 nt, Human
caaaaacagggcuauacuggaaa

SEQ ID NO: 901958 - RNA, 19 nt, Human
caaaaggcacaaaauuagu

SEQ ID NO: 901959 - RNA, 22 nt, Human
caacuucucaaaaaugaaugac

SEQ ID NO: 901960 - RNA, 21 nt, Human
cacgccaagucacccacgcau

SEQ ID NO: 901961 - RNA, 24 nt, Human
cacgccaagucacccacgcauucc

SEQ ID NO: 901962 - RNA, 22 nt, Human
cacuccccaccccuuauccacc

SEQ ID NO: 901963 - RNA, 19 nt, Human
cagcuuccugccaaccccc

SEQ ID NO: 901964 - RNA, 21 nt, Human
ccaugccaguucaccuucauu

SEQ ID NO: 901965 - RNA, 24 nt, Human
cccggauauggacccgcccagccu

SEQ ID NO: 901966 - RNA, 18 nt, Human
cccuaaauccacgccaag

SEQ ID NO: 901967 - RNA, 21 nt, Human
ccgccgcgguggcggccccgg

SEQ ID NO: 901968 - RNA, 21 nt, Human
ccgggaaaugccuucucuucc

SEQ ID NO: 901969 - RNA, 24 nt, Human
ccuacaaaaacagggcuauacugg

SEQ ID NO: 901970 - RNA, 21 nt, Human
ccucuagcagagugugggggu

SEQ ID NO: 901971 - RNA, 20 nt, Human
ccugccaacccccauccagc

SEQ ID NO: 901972 - RNA, 21 nt, Human
ccuucucuuccuucguguccc

SEQ ID NO: 901973 - RNA, 19 nt, Human
ccuucugccacccucucuu

SEQ ID NO: 901974 - RNA, 24 nt, Human
ccuucugccacccucucuuggauc

SEQ ID NO: 901975 - RNA, 22 nt, Human
cgccaagucacccacgcauucc

SEQ ID NO: 901976 - RNA, 21 nt, Human
cgcccgggccgcgcgugccug

SEQ ID NO: 901977 - RNA, 21 nt, Human
cgggaccuggagggaggggca

SEQ ID NO: 901978 - RNA, 22 nt, Human
cuaaauccacgccaagucaccc

SEQ ID NO: 901979 - RNA, 19 nt, Human
cuccuuggugggccuuggc

SEQ ID NO: 901980 - RNA, 21 nt, Human
cuggucuuaagaaagcagaca

SEQ ID NO: 901981 - RNA, 22 nt, Human
cuuccugccaacccccauccag

SEQ ID NO: 901982 - RNA, 21 nt, Human
cuugaauaaauucauuccucu

SEQ ID NO: 901983 - RNA, 18 nt, Human
gccacccucucuuggauc

SEQ ID NO: 901984 - RNA, 19 nt, Human
gcggccccggcacggcggc

SEQ ID NO: 901985 - RNA, 22 nt, Human
ggaaagcucugcaccuccaccc

SEQ ID NO: 901986 - RNA, 18 nt, Human
ggaccuggagggaggggc

SEQ ID NO: 901987 - RNA, 21 nt, Human
ggacgcccgggccgcgcgugc

SEQ ID NO: 901988 - RNA, 22 nt, Human
ggagggaggggcagccucaccc

SEQ ID NO: 901989 - RNA, 19 nt, Human
ggggugcacuuuucauagu

SEQ ID NO: 901990 - RNA, 24 nt, Human
gggugcccgccgcgguggcggccc

SEQ ID NO: 901991 - RNA, 19 nt, Human
ggguggaaaacuccuuggu

SEQ ID NO: 901992 - RNA, 21 nt, Human
gucacuccccaccccuuaucc

SEQ ID NO: 901993 - RNA, 26 nt, Human
uaaaaaauaaauuaagcauucagcaa

SEQ ID NO: 901994 - RNA, 23 nt, Human
uaagaaagcagacaaaaggcaca

SEQ ID NO: 901995 - RNA, 24 nt, Human
uacaaaaacagggcuauacuggaa

SEQ ID NO: 901996 - RNA, 24 nt, Human
uagcagagugugggggugcacuuu

SEQ ID NO: 901997 - RNA, 21 nt, Human
uaguauuacuacagagaagca

SEQ ID NO: 901998 - RNA, 25 nt, Human
uauauuugucuaauaucuacaaagu

SEQ ID NO: 901999 - RNA, 19 nt, Human
uaucuuugugaguguaaaa

SEQ ID NO: 902000 - RNA, 20 nt, Human
ucagauguuuacauagugca

SEQ ID NO: 902001 - RNA, 26 nt, Human
uccacgccaagucacccacgcauucc

SEQ ID NO: 902002 - RNA, 20 nt, Human
uccccaaacuaaauacaaga

SEQ ID NO: 902003 - RNA, 20 nt, Human
uccccaccccuuauccaccu

SEQ ID NO: 902004 - RNA, 23 nt, Human
ucccuuauggacagugaucgggc

SEQ ID NO: 902005 - RNA, 18 nt, Human
uccugccaacccccaucc

SEQ ID NO: 902006 - RNA, 24 nt, Human
uccuucugccacccucucuuggau

SEQ ID NO: 902007 - RNA, 21 nt, Human
ucugcacgucacuccccaccc

SEQ ID NO: 902008 - RNA, 21 nt, Human
ugacuagcgcugugaccauga

SEQ ID NO: 902009 - RNA, 20 nt, Human
ugauacucuacuacuuuaau

SEQ ID NO: 902010 - RNA, 20 nt, Human
ugcacgucacuccccacccc

SEQ ID NO: 902011 - RNA, 21 nt, Human
ugcacuugaggaaaaaauaau

SEQ ID NO: 902012 - RNA, 19 nt, Human
ugcacuuuucauaguauau

SEQ ID NO: 902013 - RNA, 20 nt, Human
ugcaggcguuauguauguuu

SEQ ID NO: 902014 - RNA, 22 nt, Human
ugcauguuuucaugugcaugca

SEQ ID NO: 902015 - RNA, 21 nt, Human
ugcugcuacagcuccggacgc

SEQ ID NO: 902016 - RNA, 18 nt, Human
ugcugcugcugcuacagc

SEQ ID NO: 902017 - RNA, 23 nt, Human
uggcggccccggcacggcggcug

SEQ ID NO: 902018 - RNA, 18 nt, Human
uguaaaggcuaaaaacug

SEQ ID NO: 902019 - RNA, 21 nt, Human
ugucccagaggugcuccaucc

SEQ ID NO: 902020 - RNA, 21 nt, Human
ugugaacguauacggugugua

SEQ ID NO: 902021 - RNA, 23 nt, Human
uguguacacacacgugccccgaa

SEQ ID NO: 902022 - RNA, 24 nt, Human
ugugugaacguauacgguguguac

SEQ ID NO: 902023 - RNA, 23 nt, Human
uguuuacauagugcaugugugug

SEQ ID NO: 902024 - RNA, 20 nt, Human
uuaacugaaaccauggaaua

SEQ ID NO: 902025 - RNA, 20 nt, Human
uuaagcauucagcaaaaacc

SEQ ID NO: 902026 - RNA, 21 nt, Human
uucauuuugacaggaguugac

SEQ ID NO: 902027 - RNA, 21 nt, Human
uucuaccaggaaugagccacu

SEQ ID NO: 902028 - RNA, 22 nt, Human
uugaggcugugguugugcaugu

SEQ ID NO: 902029 - RNA, 23 nt, Human
uugcagaguuggguuagccagag

SEQ ID NO: 902030 - RNA, 24 nt, Human
uuggauuugauaaauauuggagug

SEQ ID NO: 902031 - RNA, 23 nt, Human
uugugcauguuuucaugugcaug

SEQ ID NO: 902032 - RNA, 25 nt, Human
uuuggcaaagugaaaaauagaaaaa

SEQ ID NO: 902033 - RNA, 21 nt, Human
uuuuuuuuuuuuuuuuguauu

SEQ ID NO: 902034 - RNA, 22 nt, Human
aaaaaacagaguaaggcaccac

SEQ ID NO: 902035 - RNA, 23 nt, Human
aaaaaacagaguaaggcaguggg

SEQ ID NO: 902036 - RNA, 23 nt, Human
aaaugaacaagggaaucauuaaa

SEQ ID NO: 902037 - RNA, 20 nt, Human
aagaaggaaaaaaguaacag

SEQ ID NO: 902038 - RNA, 24 nt, Human
aagcaaggauggaaaaagggaccc

SEQ ID NO: 902039 - RNA, 23 nt, Human
aagucaauguuguuuucaaguau

SEQ ID NO: 902040 - RNA, 19 nt, Human
acacaggcauacagucuuu

SEQ ID NO: 902041 - RNA, 26 nt, Human
acuacaaagaaaucaaagucacugag

SEQ ID NO: 902042 - RNA, 24 nt, Human
acugucaaaugguccagaaaagga

SEQ ID NO: 902043 - RNA, 25 nt, Human
agaaagaaagacacaaacucugaaa

SEQ ID NO: 902044 - RNA, 26 nt, Human
agaaagaaagacacaaacucugaaag

SEQ ID NO: 902045 - RNA, 20 nt, Human
agaaagacacaaacucugaa

SEQ ID NO: 902046 - RNA, 25 nt, Human
agacacagccaccuacaauggcuga

SEQ ID NO: 902047 - RNA, 19 nt, Human
agcaauucuucaaccucac

SEQ ID NO: 902048 - RNA, 22 nt, Human
caaaagcaaggauggaaaaacg

SEQ ID NO: 902049 - RNA, 23 nt, Human
caaaagcaaggauggaaaaacgc

SEQ ID NO: 902050 - RNA, 18 nt, Human
caaagaaaucaaagucac

SEQ ID NO: 902051 - RNA, 19 nt, Human
caaaguccacuugcccuuc

SEQ ID NO: 902052 - RNA, 21 nt, Human
caacacaggaacuauaacuca

SEQ ID NO: 902053 - RNA, 18 nt, Human
caacagacacagccaccu

SEQ ID NO: 902054 - RNA, 21 nt, Human
caccacucuugggaaauuaag

SEQ ID NO: 902055 - RNA, 25 nt, Human
cagaacacaauuuaucagagcacaa

SEQ ID NO: 902056 - RNA, 21 nt, Human
cagcaaaaaugaacaagggaa

SEQ ID NO: 902057 - RNA, 18 nt, Human
caggggaagcaacgagga

SEQ ID NO: 902058 - RNA, 24 nt, Human
ccacuucugggucaucuuucuccu

SEQ ID NO: 902059 - RNA, 20 nt, Human
ccagaaaaggaagauacaca

SEQ ID NO: 902060 - RNA, 18 nt, Human
ccauucugggaggauuua

SEQ ID NO: 902061 - RNA, 22 nt, Human
ccuuuccggcaaaagcaaggau

SEQ ID NO: 902062 - RNA, 22 nt, Human
cgcaaucaggaagcaggucacu

SEQ ID NO: 902063 - RNA, 20 nt, Human
cuaaaggugaaaagaaagaa

SEQ ID NO: 902064 - RNA, 23 nt, Human
cuaaccucuuuaacagaacacaa

SEQ ID NO: 902065 - RNA, 25 nt, Human
cugaaaaauguucugaaauuuuuca

SEQ ID NO: 902066 - RNA, 20 nt, Human
cugggucaucuuucuccucc

SEQ ID NO: 902067 - RNA, 21 nt, Human
cugguugauuuuuuuuuuuaa

SEQ ID NO: 902068 - RNA, 20 nt, Human
cuuauaauuuacaauuuguu

SEQ ID NO: 902069 - RNA, 24 nt, Human
cuucugggucaucuuucuccuccu

SEQ ID NO: 902070 - RNA, 20 nt, Human
gaacaauucuguaguucugu

SEQ ID NO: 902071 - RNA, 22 nt, Human
gcaacagacacagccaccuaca

SEQ ID NO: 902072 - RNA, 23 nt, Human
ggcaccacucuugggaaauuaag

SEQ ID NO: 902073 - RNA, 23 nt, Human
ggucaucuuucuccuccucuugg

SEQ ID NO: 902074 - RNA, 18 nt, Human
gguccagaaaaggaagau

SEQ ID NO: 902075 - RNA, 21 nt, Human
guaaacagagaagaaccucau

SEQ ID NO: 902076 - RNA, 20 nt, Human
uaaacagagaagaaccucau

SEQ ID NO: 902077 - RNA, 22 nt, Human
uaacaaguuuuaagaugguauu

SEQ ID NO: 902078 - RNA, 21 nt, Human
uaauugccagcaauucuucaa

SEQ ID NO: 902079 - RNA, 19 nt, Human
uaccgguugcuaaaucaca

SEQ ID NO: 902080 - RNA, 24 nt, Human
uacuucaguuauggacagaaagaa

SEQ ID NO: 902081 - RNA, 22 nt, Human
uaucagagcacaaagcuuaaac

SEQ ID NO: 902082 - RNA, 22 nt, Human
ucagaaaaaacagaguaaggca

SEQ ID NO: 902083 - RNA, 23 nt, Human
uccaaagggauaacacauaauac

SEQ ID NO: 902084 - RNA, 25 nt, Human
uccggcaaaagcaaggauggaaaaa

SEQ ID NO: 902085 - RNA, 23 nt, Human
uccucaaaaaaaaaaauaaauaa

SEQ ID NO: 902086 - RNA, 21 nt, Human
ucugaaacggagacuucacuu

SEQ ID NO: 902087 - RNA, 27 nt, Human
ucuguaguucuguaggugacuuuuuuu

SEQ ID NO: 902088 - RNA, 23 nt, Human
ugagagggacaggggaagcaacg

SEQ ID NO: 902089 - RNA, 19 nt, Human
ugagcaccauaauaaguag

SEQ ID NO: 902090 - RNA, 20 nt, Human
ugagcgggagagaacaauuc

SEQ ID NO: 902091 - RNA, 24 nt, Human
ugagcgggagagaacaauucugua

SEQ ID NO: 902092 - RNA, 21 nt, Human
ugccagcaauucuucaaccuc

SEQ ID NO: 902093 - RNA, 19 nt, Human
ugccuuguuaccacaaccu

SEQ ID NO: 902094 - RNA, 23 nt, Human
ugccuuguuaccacaaccugguu

SEQ ID NO: 902095 - RNA, 19 nt, Human
uggaaaaacgcauccggcg

SEQ ID NO: 902096 - RNA, 24 nt, Human
uggaaaaacgcauccggcgagaag

SEQ ID NO: 902097 - RNA, 22 nt, Human
ugucaauuuucccaacacagga

SEQ ID NO: 902098 - RNA, 19 nt, Human
ugugcaaaaauaggggauu

SEQ ID NO: 902099 - RNA, 25 nt, Human
uguugagcaccauaauaaguaggug

SEQ ID NO: 902100 - RNA, 22 nt, Human
uguuguguguaucugcugcccc

SEQ ID NO: 902101 - RNA, 22 nt, Human
uuaauugccagcaauucuucaa

SEQ ID NO: 902102 - RNA, 22 nt, Human
uucaaacuuaacuuuaggagca

SEQ ID NO: 902103 - RNA, 25 nt, Human
uucacuuuucacuacaaagaaauca

SEQ ID NO: 902104 - RNA, 22 nt, Human
uuuaauuuuuaacagagguaaa

SEQ ID NO: 902105 - RNA, 18 nt, Human
uuuuaagauuugaucuga

SEQ ID NO: 902106 - RNA, 23 nt, Human
aaaaagcauauuccccagcagug

SEQ ID NO: 902107 - RNA, 24 nt, Human
aaaaagcauauuccccagcagugu

SEQ ID NO: 902108 - RNA, 22 nt, Human
aaaagauaaguagaaaccaagg

SEQ ID NO: 902109 - RNA, 18 nt, Human
aaagcauauuccccagca

SEQ ID NO: 902110 - RNA, 19 nt, Human
aaagcauauuccccagcag

SEQ ID NO: 902111 - RNA, 19 nt, Human
aagcaugacagcauaaaaa

SEQ ID NO: 902112 - RNA, 19 nt, Human
aagccugcacggcccuccg

SEQ ID NO: 902113 - RNA, 23 nt, Human
aagcuaaaguuacauuuagguau

SEQ ID NO: 902114 - RNA, 19 nt, Human
aaggucucccuaagucacc

SEQ ID NO: 902115 - RNA, 21 nt, Human
aauaguauuccaaauaaguac

SEQ ID NO: 902116 - RNA, 26 nt, Human
acccugcgcuccucgcaagcuccagc

SEQ ID NO: 902117 - RNA, 23 nt, Human
accugggccagauccgaggaccc

SEQ ID NO: 902118 - RNA, 20 nt, Human
acuauauaguuccauaaagc

SEQ ID NO: 902119 - RNA, 24 nt, Human
agagccuuucaccagagacugcuc

SEQ ID NO: 902120 - RNA, 25 nt, Human
agcaguaucucagucugggguuugg

SEQ ID NO: 902121 - RNA, 19 nt, Human
agcguccgggccgcuccuc

SEQ ID NO: 902122 - RNA, 22 nt, Human
agcuaaaguuacauuuagguau

SEQ ID NO: 902123 - RNA, 24 nt, Human
aggaccccggcuggcgcgcuccac

SEQ ID NO: 902124 - RNA, 22 nt, Human
aggcgcgacccagggcggcccg

SEQ ID NO: 902125 - RNA, 22 nt, Human
agggaccgccggggaagccugc

SEQ ID NO: 902126 - RNA, 22 nt, Human
aggggcaaaacuacuguacagu

SEQ ID NO: 902127 - RNA, 20 nt, Human
auaugucaaagguuacaucu

SEQ ID NO: 902128 - RNA, 25 nt, Human
aucauagaacucguccucgcuaagg

SEQ ID NO: 902129 - RNA, 25 nt, Human
cacccugcgcuccucgcaagcucca

SEQ ID NO: 902130 - RNA, 21 nt, Human
cagaggucugcgcugccccuc

SEQ ID NO: 902131 - RNA, 24 nt, Human
cagcaauuaaaaucacggacuggc

SEQ ID NO: 902132 - RNA, 18 nt, Human
cagcgaggucgggcagag

SEQ ID NO: 902133 - RNA, 22 nt, Human
cagcgccagccuuccccagcga

SEQ ID NO: 902134 - RNA, 19 nt, Human
cagcguccgggccgcuccu

SEQ ID NO: 902135 - RNA, 24 nt, Human
caguaggucuccacacauauuuua

SEQ ID NO: 902136 - RNA, 24 nt, Human
caucuaaaacauucaagcaugaca

SEQ ID NO: 902137 - RNA, 24 nt, Human
cauuuuuuuucuucuugggggggc

SEQ ID NO: 902138 - RNA, 26 nt, Human
cauuuuuuuuuuaaaagauaaguaga

SEQ ID NO: 902139 - RNA, 22 nt, Human
ccaagggaaaaaaauuuaaaaa

SEQ ID NO: 902140 - RNA, 19 nt, Human
ccccaauuaaaggggcaaa

SEQ ID NO: 902141 - RNA, 24 nt, Human
ccccugggagcaguaucucagucu

SEQ ID NO: 902142 - RNA, 22 nt, Human
ccgccgccgcuggcucggccgc

SEQ ID NO: 902143 - RNA, 25 nt, Human
ccuaagucaccuuugcgcagccugc

SEQ ID NO: 902144 - RNA, 21 nt, Human
ccuccgccgccgcuggcucgg

SEQ ID NO: 902145 - RNA, 20 nt, Human
ccucuauaucugagaauaaa

SEQ ID NO: 902146 - RNA, 19 nt, Human
cgaggagaggucggggacu

SEQ ID NO: 902147 - RNA, 19 nt, Human
cgcagguagggaccgccgg

SEQ ID NO: 902148 - RNA, 22 nt, Human
cgccgcgcccgcccgggccgca

SEQ ID NO: 902149 - RNA, 22 nt, Human
cgcuccacccugcgcuccucgc

SEQ ID NO: 902150 - RNA, 20 nt, Human
cgcugccccuccgccgccgc

SEQ ID NO: 902151 - RNA, 25 nt, Human
cggccugcuccuccuccuccccucc

SEQ ID NO: 902152 - RNA, 22 nt, Human
cucggccgcagacccgcccucc

SEQ ID NO: 902153 - RNA, 19 nt, Human
cugcugugcgcucggcccu

SEQ ID NO: 902154 - RNA, 18 nt, Human
cuucuuggaagauggaag

SEQ ID NO: 902155 - RNA, 18 nt, Human
gaagauggaagggguaac

SEQ ID NO: 902156 - RNA, 22 nt, Human
gaagauggaagggguaacauug

SEQ ID NO: 902157 - RNA, 19 nt, Human
gacccagggcggcccgcaa

SEQ ID NO: 902158 - RNA, 24 nt, Human
gacugcagaaaacuguaaaaguaa

SEQ ID NO: 902159 - RNA, 19 nt, Human
gagcugcugugcgcucggc

SEQ ID NO: 902160 - RNA, 18 nt, Human
gaggcgguggccacgacc

SEQ ID NO: 902161 - RNA, 24 nt, Human
gauaaguagaaaccaagggaaaaa

SEQ ID NO: 902162 - RNA, 21 nt, Human
gauacugacugcagaaaacug

SEQ ID NO: 902163 - RNA, 18 nt, Human
gcaaaacuacuguacagu

SEQ ID NO: 902164 - RNA, 24 nt, Human
gcacaaggccuccuuuuauauagu

SEQ ID NO: 902165 - RNA, 20 nt, Human
gccccaauuaaaggggcaaa

SEQ ID NO: 902166 - RNA, 18 nt, Human
gcccgccagcggcccagg

SEQ ID NO: 902167 - RNA, 23 nt, Human
gccugcuccuccuccuccccucc

SEQ ID NO: 902168 - RNA, 19 nt, Human
gcgccgcgcccgcccgggc

SEQ ID NO: 902169 - RNA, 22 nt, Human
ggaagggguaacauugggagga

SEQ ID NO: 902170 - RNA, 25 nt, Human
ggagcgugcugucacugcuuccaau

SEQ ID NO: 902171 - RNA, 19 nt, Human
ggaggcgcgacccagggcg

SEQ ID NO: 902172 - RNA, 22 nt, Human
ggccgggcagcagcgccagccu

SEQ ID NO: 902173 - RNA, 18 nt, Human
gggaaaaaaauuuaaaaa

SEQ ID NO: 902174 - RNA, 23 nt, Human
gggcagaggcguugcccgccagc

SEQ ID NO: 902175 - RNA, 19 nt, Human
gggcagcagcgccagccuu

SEQ ID NO: 902176 - RNA, 23 nt, Human
gggcggcggcaaggccugcggcg

SEQ ID NO: 902177 - RNA, 18 nt, Human
gggguaacauugggagga

SEQ ID NO: 902178 - RNA, 27 nt, Human
guccgggccgcuccuccccuuccccag

SEQ ID NO: 902179 - RNA, 19 nt, Human
gugccccaauuaaaggggc

SEQ ID NO: 902180 - RNA, 19 nt, Human
guuuggguggauaaauacu

SEQ ID NO: 902181 - RNA, 20 nt, Human
uaaaaagcauauuccccagc

SEQ ID NO: 902182 - RNA, 21 nt, Human
uaaaaagcauauuccccagca

SEQ ID NO: 902183 - RNA, 18 nt, Human
uaaaaauauucaaaauag

SEQ ID NO: 902184 - RNA, 25 nt, Human
uaaugauacugacugcagaaaacug

SEQ ID NO: 902185 - RNA, 19 nt, Human
uaccuaggccccugggagc

SEQ ID NO: 902186 - RNA, 21 nt, Human
uacuauauaguuccauaaagc

SEQ ID NO: 902187 - RNA, 23 nt, Human
uacuuugcaaacuugaaaugcac

SEQ ID NO: 902188 - RNA, 22 nt, Human
uagauuuuauacauauuuucag

SEQ ID NO: 902189 - RNA, 26 nt, Human
uagccaaacacccugacuuguaugca

SEQ ID NO: 902190 - RNA, 21 nt, Human
uaucucagucugggguuuggg

SEQ ID NO: 902191 - RNA, 20 nt, Human
ucaaauguaaacuuaaccau

SEQ ID NO: 902192 - RNA, 24 nt, Human
ucacccgggcucccagagcucccg

SEQ ID NO: 902193 - RNA, 22 nt, Human
ucagagcacuaaguaaaugaaa

SEQ ID NO: 902194 - RNA, 19 nt, Human
uccagucgagccgaggcga

SEQ ID NO: 902195 - RNA, 24 nt, Human
uccccagcgaggucgggcagaggc

SEQ ID NO: 902196 - RNA, 21 nt, Human
uccccagcgccgcuggcgggc

SEQ ID NO: 902197 - RNA, 22 nt, Human
uccccgaggacgcucgagcccg

SEQ ID NO: 902198 - RNA, 24 nt, Human
uccgggccgcuccuccccuucccc

SEQ ID NO: 902199 - RNA, 21 nt, Human
uccggggcucgcggggagagc

SEQ ID NO: 902200 - RNA, 24 nt, Human
ugaaauacuuuuccaguuuaauuc

SEQ ID NO: 902201 - RNA, 18 nt, Human
ugaaaugcacaaggccuc

SEQ ID NO: 902202 - RNA, 23 nt, Human
ugacaagauuuuguuuuuuucuu

SEQ ID NO: 902203 - RNA, 25 nt, Human
ugacugcagaaaacuguaaaaguaa

SEQ ID NO: 902204 - RNA, 25 nt, Human
ugcagaaaacuguaaaaguaaauuc

SEQ ID NO: 902205 - RNA, 24 nt, Human
ugcgcugccccuccgccgccgcug

SEQ ID NO: 902206 - RNA, 21 nt, Human
uggaagauggaagggguaaca

SEQ ID NO: 902207 - RNA, 20 nt, Human
uggagagccuuucaccagag

SEQ ID NO: 902208 - RNA, 22 nt, Human
uggagagccuuucaccagagac

SEQ ID NO: 902209 - RNA, 22 nt, Human
uggcgggcggaggcgcagguag

SEQ ID NO: 902210 - RNA, 18 nt, Human
uggcuccggccgggcagc

SEQ ID NO: 902211 - RNA, 24 nt, Human
ugggugaaaugcaguuaucucaug

SEQ ID NO: 902212 - RNA, 22 nt, Human
uguaaaaguaaauucagagcac

SEQ ID NO: 902213 - RNA, 22 nt, Human
uuacaugagugcaacuuacuuu

SEQ ID NO: 902214 - RNA, 22 nt, Human
uuaugcauuuuuccuaagacuu

SEQ ID NO: 902215 - RNA, 23 nt, Human
uuccaauuuaaaauuccucaccu

SEQ ID NO: 902216 - RNA, 18 nt, Human
uuccccagcaguguucuc

SEQ ID NO: 902217 - RNA, 25 nt, Human
uuuaaaauuccucaccugggccaga

SEQ ID NO: 902218 - RNA, 18 nt, Human
uuucuucuuggaagaugg

SEQ ID NO: 902219 - RNA, 20 nt, Human
uuugcaaacuugaaaugcac

SEQ ID NO: 902220 - RNA, 18 nt, Human
uuuggguggauaaauacu

SEQ ID NO: 902221 - RNA, 20 nt, Human
uuuuguugggugaaaugcag

SEQ ID NO: 902222 - RNA, 23 nt, Human
uuuuuucuugcucuuguuccaau

SEQ ID NO: 902223 - RNA, 23 nt, Human
uuuuuuuucuucuuggaagaugg

SEQ ID NO: 902224 - RNA, 20 nt, Human
uuuuuuuuuuuuggggaaca

SEQ ID NO: 902225 - RNA, 23 nt, Human
aaaaaaaaaaaaaaaggaaagaa

SEQ ID NO: 902226 - RNA, 23 nt, Human
aaaaacagaaacacaagagugcu

SEQ ID NO: 902227 - RNA, 18 nt, Human
aaaaauacaaaaucagcc

SEQ ID NO: 902228 - RNA, 24 nt, Human
aaaaggcuuucagaaccuuuugcc

SEQ ID NO: 902229 - RNA, 22 nt, Human
aaaaguugguuucugcugugac

SEQ ID NO: 902230 - RNA, 20 nt, Human
aaacagaaacacaagagugc

SEQ ID NO: 902231 - RNA, 21 nt, Human
aaauaccaggagccugguccu

SEQ ID NO: 902232 - RNA, 24 nt, Human
aacaaaaaguaguaaaaaguuaaa

SEQ ID NO: 902233 - RNA, 18 nt, Human
aaccagccccugaaauac

SEQ ID NO: 902234 - RNA, 22 nt, Human
aagaaaaaaaaaucagucacuu

SEQ ID NO: 902235 - RNA, 22 nt, Human
aagcagaugacccuccaccaga

SEQ ID NO: 902236 - RNA, 23 nt, Human
aagcagaugacccuccaccagag

SEQ ID NO: 902237 - RNA, 23 nt, Human
aagcagucuugggauuuccuguc

SEQ ID NO: 902238 - RNA, 19 nt, Human
aaggaaagaaaagaaaaaa

SEQ ID NO: 902239 - RNA, 18 nt, Human
aaggagccgguucacaac

SEQ ID NO: 902240 - RNA, 23 nt, Human
aagugcuuccgucacagguguga

SEQ ID NO: 902241 - RNA, 19 nt, Human
aaucaucguaucugaucca

SEQ ID NO: 902242 - RNA, 24 nt, Human
aaucgcuugaacccgggaggcgga

SEQ ID NO: 902243 - RNA, 23 nt, Human
aaugaucaguaagaacucguuaa

SEQ ID NO: 902244 - RNA, 20 nt, Human
aaugcagucacuuucaaugu

SEQ ID NO: 902245 - RNA, 20 nt, Human
acaagagugaaacuccgucu

SEQ ID NO: 902246 - RNA, 21 nt, Human
acaagagugaaacuccgucuc

SEQ ID NO: 902247 - RNA, 23 nt, Human
acuaaaaauacaaaaucagccag

SEQ ID NO: 902248 - RNA, 25 nt, Human
acuccagccugggcaacaagaguga

SEQ ID NO: 902249 - RNA, 26 nt, Human
agaaaggaacccccuggagacacgga

SEQ ID NO: 902250 - RNA, 19 nt, Human
agaagaaaggaacccccug

SEQ ID NO: 902251 - RNA, 24 nt, Human
agcacuuugggagguugaggcagg

SEQ ID NO: 902252 - RNA, 23 nt, Human
agccaggugugguggcgcgugcc

SEQ ID NO: 902253 - RNA, 22 nt, Human
agccuccggucccgggccccag

SEQ ID NO: 902254 - RNA, 26 nt, Human
aggcagacuacuugaggucgggaguu

SEQ ID NO: 902255 - RNA, 24 nt, Human
aggcaggagaaucgcuugaacccg

SEQ ID NO: 902256 - RNA, 22 nt, Human
aggcaggcagacuacuugaggg

SEQ ID NO: 902257 - RNA, 22 nt, Human
aggcaggcagacuacuugaggu

SEQ ID NO: 902258 - RNA, 26 nt, Human
aggcaggcagacuacuugaggucggg

SEQ ID NO: 902259 - RNA, 24 nt, Human
aggcgcaguggcucacgccuguaa

SEQ ID NO: 902260 - RNA, 21 nt, Human
aggcggagguugcggugagcc

SEQ ID NO: 902261 - RNA, 24 nt, Human
aggcggagguugcggugagccgag

SEQ ID NO: 902262 - RNA, 20 nt, Human
aggcugaggcaggagaaucg

SEQ ID NO: 902263 - RNA, 24 nt, Human
aggcugaggcaggagaaucgcuug

SEQ ID NO: 902264 - RNA, 24 nt, Human
aggugugguggcgcgugccuguaa

SEQ ID NO: 902265 - RNA, 21 nt, Human
agguugaggcaggcagacuac

SEQ ID NO: 902266 - RNA, 24 nt, Human
agguugaggcaggcagacuacuug

SEQ ID NO: 902267 - RNA, 23 nt, Human
aguagauucugccucugacccuc

SEQ ID NO: 902268 - RNA, 24 nt, Human
aguggcucacgccuguaaucccag

SEQ ID NO: 902269 - RNA, 21 nt, Human
auaaaacucucugcaggauua

SEQ ID NO: 902270 - RNA, 22 nt, Human
auaaaacucucugcaggauuag

SEQ ID NO: 902271 - RNA, 24 nt, Human
aucaugccauugcacuccagccug

SEQ ID NO: 902272 - RNA, 20 nt, Human
augcagucacuuucaaugug

SEQ ID NO: 902273 - RNA, 21 nt, Human
auucugccucugacccuccca

SEQ ID NO: 902274 - RNA, 24 nt, Human
auugcacuccagccugggcaacaa

SEQ ID NO: 902275 - RNA, 25 nt, Human
auugcacuccagccugggcaacaag

SEQ ID NO: 902276 - RNA, 22 nt, Human
caaagugcuccacugugaucuc

SEQ ID NO: 902277 - RNA, 19 nt, Human
caaccagccccugaaauac

SEQ ID NO: 902278 - RNA, 24 nt, Human
caagauccaucuuucccccacugg

SEQ ID NO: 902279 - RNA, 22 nt, Human
caaggugacaaaaguuagguca

SEQ ID NO: 902280 - RNA, 21 nt, Human
caauccugaauccucagaccc

SEQ ID NO: 902281 - RNA, 19 nt, Human
caccugggcuccacauucc

SEQ ID NO: 902282 - RNA, 21 nt, Human
caccugucacucagaagugcc

SEQ ID NO: 902283 - RNA, 24 nt, Human
cacgccuguaaucccagcacuuug

SEQ ID NO: 902284 - RNA, 24 nt, Human
cacggccaggcgcaguggcucacg

SEQ ID NO: 902285 - RNA, 23 nt, Human
cacuccagccugggcaacaagag

SEQ ID NO: 902286 - RNA, 23 nt, Human
cacuccagccugggcaacaagag

SEQ ID NO: 902287 - RNA, 24 nt, Human
cacuccagccugggcaacaagagu

SEQ ID NO: 902288 - RNA, 25 nt, Human
cacuccagccugggcaacaagagug

SEQ ID NO: 902289 - RNA, 19 nt, Human
cacugcauuauaaagagaa

SEQ ID NO: 902290 - RNA, 20 nt, Human
cacugcauuauaaagagaac

SEQ ID NO: 902291 - RNA, 19 nt, Human
cagaaacaguaacaaaaag

SEQ ID NO: 902292 - RNA, 24 nt, Human
cagacuacuugaggucgggaguuu

SEQ ID NO: 902293 - RNA, 24 nt, Human
cagcacuuugggagguugaggcag

SEQ ID NO: 902294 - RNA, 25 nt, Human
cagcacuuugggagguugaggcagg

SEQ ID NO: 902295 - RNA, 21 nt, Human
cagccuccggucccgggcccc

SEQ ID NO: 902296 - RNA, 24 nt, Human
cagcuacuugggaggcugaggcag

SEQ ID NO: 902297 - RNA, 22 nt, Human
caggagccugguccuagaagag

SEQ ID NO: 902298 - RNA, 20 nt, Human
caguuaauuagaauuacauc

SEQ ID NO: 902299 - RNA, 25 nt, Human
caugaaccccuucccauuacuuccu

SEQ ID NO: 902300 - RNA, 19 nt, Human
cauugcacuccagccuggg

SEQ ID NO: 902301 - RNA, 21 nt, Human
cauugcacuccagccugggca

SEQ ID NO: 902302 - RNA, 22 nt, Human
cauugcacuccagccugggcaa

SEQ ID NO: 902303 - RNA, 23 nt, Human
cauugcacuccagccugggcaac

SEQ ID NO: 902304 - RNA, 24 nt, Human
cauugcacuccagccugggcaaca

SEQ ID NO: 902305 - RNA, 20 nt, Human
ccacauaaaagggcgccgug

SEQ ID NO: 902306 - RNA, 25 nt, Human
ccaucagccuuccuaccguucuucc

SEQ ID NO: 902307 - RNA, 20 nt, Human
ccauugcacuccagccuggg

SEQ ID NO: 902308 - RNA, 21 nt, Human
ccauugcacuccagccugggc

SEQ ID NO: 902309 - RNA, 23 nt, Human
ccauugcacuccagccugggcaa

SEQ ID NO: 902310 - RNA, 24 nt, Human
ccauugcacuccagccugggcaac

SEQ ID NO: 902311 - RNA, 20 nt, Human
ccccaggccccuccaggccc

SEQ ID NO: 902312 - RNA, 20 nt, Human
cccccgccccguaggcccgc

SEQ ID NO: 902313 - RNA, 26 nt, Human
ccccugaaauaccaggagccuggucc

SEQ ID NO: 902314 - RNA, 20 nt, Human
ccccuggagacacggacgcg

SEQ ID NO: 902315 - RNA, 18 nt, Human
cccgcccccgccccguag

SEQ ID NO: 902316 - RNA, 23 nt, Human
cccgggccccaggccccuccagg

SEQ ID NO: 902317 - RNA, 22 nt, Human
cccucccacaggacacaaccgg

SEQ ID NO: 902318 - RNA, 22 nt, Human
cccuggagacacggacgcggug

SEQ ID NO: 902319 - RNA, 21 nt, Human
ccgccccguaggcccgcgacc

SEQ ID NO: 902320 - RNA, 21 nt, Human
ccucccacaggacacaaccgg

SEQ ID NO: 902321 - RNA, 22 nt, Human
ccuccggucccgggccccaggc

SEQ ID NO: 902322 - RNA, 19 nt, Human
ccucgucagccuccggucc

SEQ ID NO: 902323 - RNA, 20 nt, Human
ccucuggauguucucagcuu

SEQ ID NO: 902324 - RNA, 23 nt, Human
ccugaccaacauggugaaaaccc

SEQ ID NO: 902325 - RNA, 24 nt, Human
ccugaccaacauggugaaaacccg

SEQ ID NO: 902326 - RNA, 19 nt, Human
ccuguaaucccagcuacuu

SEQ ID NO: 902327 - RNA, 21 nt, Human
ccuguaaucccagcuacuugg

SEQ ID NO: 902328 - RNA, 24 nt, Human
cgagaucaugccauugcacuccag

SEQ ID NO: 902329 - RNA, 23 nt, Human
cgcagccgggacgccucugaggc

SEQ ID NO: 902330 - RNA, 19 nt, Human
cgcccccgccccguaggcc

SEQ ID NO: 902331 - RNA, 20 nt, Human
cgccccgcccccgccccgua

SEQ ID NO: 902332 - RNA, 23 nt, Human
cgccuguaaucccagcacuuugg

SEQ ID NO: 902333 - RNA, 24 nt, Human
cgccuguaaucccagcacuuuggg

SEQ ID NO: 902334 - RNA, 19 nt, Human
cgcgugucagcgugugcau

SEQ ID NO: 902335 - RNA, 23 nt, Human
cggcaccaaacaccaucgcuucc

SEQ ID NO: 902336 - RNA, 24 nt, Human
cggccaggcgcaguggcucacgcc

SEQ ID NO: 902337 - RNA, 24 nt, Human
cgggaggcggagguugcggugagc

SEQ ID NO: 902338 - RNA, 22 nt, Human
cggucccgggccccaggccccu

SEQ ID NO: 902339 - RNA, 24 nt, Human
cgguucacaaccacagucuggaaa

SEQ ID NO: 902340 - RNA, 24 nt, Human
cgugccuguaaucccagcuacuug

SEQ ID NO: 902341 - RNA, 18 nt, Human
cucaaucugaugcucuga

SEQ ID NO: 902342 - RNA, 21 nt, Human
cucaaucugaugcucugaaac

SEQ ID NO: 902343 - RNA, 22 nt, Human
cucacgccuguaaucccagcac

SEQ ID NO: 902344 - RNA, 24 nt, Human
cucacgccuguaaucccagcacuu

SEQ ID NO: 902345 - RNA, 19 nt, Human
cuccgucucaaaaaaaaaa

SEQ ID NO: 902346 - RNA, 18 nt, Human
cucguuaaaccucccuaa

SEQ ID NO: 902347 - RNA, 21 nt, Human
cucucguguugacaauucuac

SEQ ID NO: 902348 - RNA, 19 nt, Human
cuucugcccacucugguuu

SEQ ID NO: 902349 - RNA, 19 nt, Human
cuugcaaccuuucuuggag

SEQ ID NO: 902350 - RNA, 21 nt, Human
cuugcaaccuuucuuggagaa

SEQ ID NO: 902351 - RNA, 24 nt, Human
gaaacucuucacuucuguuuuauc

SEQ ID NO: 902352 - RNA, 24 nt, Human
gaaucgcagccgggacgccucuga

SEQ ID NO: 902353 - RNA, 19 nt, Human
gacgcggugugcggugaca

SEQ ID NO: 902354 - RNA, 24 nt, Human
gacuacuugaggucgggaguuuga

SEQ ID NO: 902355 - RNA, 23 nt, Human
gagaaucgcuugaacccgggagg

SEQ ID NO: 902356 - RNA, 23 nt, Human
gagaccagccugaccaacauggu

SEQ ID NO: 902357 - RNA, 23 nt, Human
gagaucaugccauugcacuccag

SEQ ID NO: 902358 - RNA, 22 nt, Human
gagguugcggugagccgagauc

SEQ ID NO: 902359 - RNA, 20 nt, Human
gcaaaauacuauucaaguag

SEQ ID NO: 902360 - RNA, 23 nt, Human
gcauacugggaaaaacagaaaca

SEQ ID NO: 902361 - RNA, 21 nt, Human
gccacaauccugaauccucag

SEQ ID NO: 902362 - RNA, 22 nt, Human
gccauugcacuccagccugggc

SEQ ID NO: 902363 - RNA, 24 nt, Human
gccauugcacuccagccugggcaa

SEQ ID NO: 902364 - RNA, 21 nt, Human
gccccaggccccuccaggccc

SEQ ID NO: 902365 - RNA, 23 nt, Human
gccucacugacaacagggcagcg

SEQ ID NO: 902366 - RNA, 20 nt, Human
gccuguaaucccagcuacuu

SEQ ID NO: 902367 - RNA, 20 nt, Human
gcgcaguggcucacgccugu

SEQ ID NO: 902368 - RNA, 19 nt, Human
gcgugcgugcacacaaccg

SEQ ID NO: 902369 - RNA, 18 nt, Human
gcgugucagcgugugcau

SEQ ID NO: 902370 - RNA, 28 nt, Human
gcgugugcaugagugugugcgugcgugc

SEQ ID NO: 902371 - RNA, 21 nt, Human
ggagaaggagccgguuccguc

SEQ ID NO: 902372 - RNA, 18 nt, Human
ggagguugcggugagccg

SEQ ID NO: 902373 - RNA, 20 nt, Human
ggagguugcggugagccgag

SEQ ID NO: 902374 - RNA, 22 nt, Human
ggagguugcggugagccgagau

SEQ ID NO: 902375 - RNA, 23 nt, Human
ggagguugcggugagccgagauc

SEQ ID NO: 902376 - RNA, 24 nt, Human
ggagguugcggugagccgagauca

SEQ ID NO: 902377 - RNA, 19 nt, Human
ggaguuugagaccagccug

SEQ ID NO: 902378 - RNA, 19 nt, Human
ggccccaggccccuccagg

SEQ ID NO: 902379 - RNA, 20 nt, Human
ggccccaggccccuccaggc

SEQ ID NO: 902380 - RNA, 18 nt, Human
gggaaaaacagaaacaca

SEQ ID NO: 902381 - RNA, 20 nt, Human
gggaaaaacagaaacacaag

SEQ ID NO: 902382 - RNA, 19 nt, Human
gggccccaggccccuccag

SEQ ID NO: 902383 - RNA, 21 nt, Human
ggucccgggccccaggccccu

SEQ ID NO: 902384 - RNA, 19 nt, Human
ggucgggaguuugagacca

SEQ ID NO: 902385 - RNA, 24 nt, Human
gguggcgcgugccuguaaucccag

SEQ ID NO: 902386 - RNA, 23 nt, Human
guggcgcgugccuguaaucccag

SEQ ID NO: 902387 - RNA, 24 nt, Human
guugcggugagccgagaucaugcc

SEQ ID NO: 902388 - RNA, 20 nt, Human
uaaaaauacaaaaucagcca

SEQ ID NO: 902389 - RNA, 22 nt, Human
uaaaaauacaaaaucagccagg

SEQ ID NO: 902390 - RNA, 23 nt, Human
uaaaaauacaaaaucagccaggu

SEQ ID NO: 902391 - RNA, 21 nt, Human
uaaaaggcuuucagaaccuuu

SEQ ID NO: 902392 - RNA, 18 nt, Human
uaaaagggcgccgugaag

SEQ ID NO: 902393 - RNA, 18 nt, Human
uacaccacuguaaguaga

SEQ ID NO: 902394 - RNA, 19 nt, Human
uaccagucacggagcgguu

SEQ ID NO: 902395 - RNA, 19 nt, Human
uacugggaaaaacagaaac

SEQ ID NO: 902396 - RNA, 23 nt, Human
uaggccccgaggaugacacagga

SEQ ID NO: 902397 - RNA, 19 nt, Human
uauccaaggugacaaaagu

SEQ ID NO: 902398 - RNA, 21 nt, Human
uauccaaggugacaaaaguua

SEQ ID NO: 902399 - RNA, 19 nt, Human
ucacaguggccacucgagg

SEQ ID NO: 902400 - RNA, 21 nt, Human
ucagccaggugugguggcgcg

SEQ ID NO: 902401 - RNA, 23 nt, Human
ucaugccauugcacuccagccug

SEQ ID NO: 902402 - RNA, 19 nt, Human
uccaucuuucccccacugg

SEQ ID NO: 902403 - RNA, 20 nt, Human
ucccacaggacacaaccgga

SEQ ID NO: 902404 - RNA, 23 nt, Human
uccgucucaaaaaaaaaaaaaaa

SEQ ID NO: 902405 - RNA, 24 nt, Human
uccgucucaaaaaaaaaaaaaaaa

SEQ ID NO: 902406 - RNA, 18 nt, Human
uccugaauccucagaccc

SEQ ID NO: 902407 - RNA, 25 nt, Human
uccuuuagcuacacaugcuaugacu

SEQ ID NO: 902408 - RNA, 24 nt, Human
ucgcuugaacccgggaggcggagg

SEQ ID NO: 902409 - RNA, 18 nt, Human
ucucaaaaaaaaaaaaaa

SEQ ID NO: 902410 - RNA, 19 nt, Human
ucugaaacucuucacuucu

SEQ ID NO: 902411 - RNA, 24 nt, Human
ucugccacauaaaagggcgccgug

SEQ ID NO: 902412 - RNA, 25 nt, Human
ugaaacucuucacuucuguuuuauc

SEQ ID NO: 902413 - RNA, 19 nt, Human
ugacugagagugugcugga

SEQ ID NO: 902414 - RNA, 22 nt, Human
ugacugagagugugcuggaagc

SEQ ID NO: 902415 - RNA, 23 nt, Human
ugagaccagccugaccaacaugg

SEQ ID NO: 902416 - RNA, 24 nt, Human
ugagaccagccugaccaacauggu

SEQ ID NO: 902417 - RNA, 21 nt, Human
ugagauggacacauaccuauu

SEQ ID NO: 902418 - RNA, 22 nt, Human
ugagccgagaucaugccauugc

SEQ ID NO: 902419 - RNA, 20 nt, Human
ugaggcaggagaaucgcuug

SEQ ID NO: 902420 - RNA, 24 nt, Human
ugaggcaggagaaucgcuugaacc

SEQ ID NO: 902421 - RNA, 25 nt, Human
ugaggcaggagaaucgcuugaaccc

SEQ ID NO: 902422 - RNA, 22 nt, Human
ugaggcggaagcagucuuggga

SEQ ID NO: 902423 - RNA, 18 nt, Human
ugaggucgggaguuugag

SEQ ID NO: 902424 - RNA, 19 nt, Human
ugcacuccagccugggcaa

SEQ ID NO: 902425 - RNA, 24 nt, Human
ugccauugcacuccagccugggca

SEQ ID NO: 902426 - RNA, 23 nt, Human
ugccuguaaucccagcuacuugg

SEQ ID NO: 902427 - RNA, 24 nt, Human
ugccuguaaucccagcuacuuggg

SEQ ID NO: 902428 - RNA, 23 nt, Human
ugcgugcgugcacacaaccgacg

SEQ ID NO: 902429 - RNA, 22 nt, Human
ugcuggaagcuaaacaagcccc

SEQ ID NO: 902430 - RNA, 26 nt, Human
uggaaaaauccaauagacacugaaga

SEQ ID NO: 902431 - RNA, 21 nt, Human
uggcgcgugccuguaauccca

SEQ ID NO: 902432 - RNA, 24 nt, Human
uggcgcgugccuguaaucccagcu

SEQ ID NO: 902433 - RNA, 22 nt, Human
uggcucacgccuguaaucccag

SEQ ID NO: 902434 - RNA, 24 nt, Human
uggcucacgccuguaaucccagca

SEQ ID NO: 902435 - RNA, 22 nt, Human
ugggaaaaacagaaacacaaga

SEQ ID NO: 902436 - RNA, 19 nt, Human
ugggaggcugaggcaggag

SEQ ID NO: 902437 - RNA, 23 nt, Human
ugggaggcugaggcaggagaauc

SEQ ID NO: 902438 - RNA, 19 nt, Human
ugggagguugaggcaggca

SEQ ID NO: 902439 - RNA, 19 nt, Human
ugggagguugaggcaggca

SEQ ID NO: 902440 - RNA, 20 nt, Human
ugggagguugaggcaggcag

SEQ ID NO: 902441 - RNA, 19 nt, Human
uggguacacgcgacgugug

SEQ ID NO: 902442 - RNA, 24 nt, Human
ugguggcgcgugccuguaauccca

SEQ ID NO: 902443 - RNA, 19 nt, Human
ugugagaagaaaggaaccc

SEQ ID NO: 902444 - RNA, 20 nt, Human
ugugugcgugcgugcacaca

SEQ ID NO: 902445 - RNA, 21 nt, Human
ugugugcgugcgugcacacaa

SEQ ID NO: 902446 - RNA, 25 nt, Human
ugugugcgugcgugcacagugacac

SEQ ID NO: 902447 - RNA, 24 nt, Human
ugugugcgugcgugcacagugacc

SEQ ID NO: 902448 - RNA, 18 nt, Human
uuaaaauaaccucgacac

SEQ ID NO: 902449 - RNA, 19 nt, Human
uuaaaccucccuaaaugca

SEQ ID NO: 902450 - RNA, 22 nt, Human
uuagcauuugcagaaacaguaa

SEQ ID NO: 902451 - RNA, 24 nt, Human
uugaacccgggaggcggagguugc

SEQ ID NO: 902452 - RNA, 18 nt, Human
uugcggugagccgagauc

SEQ ID NO: 902453 - RNA, 19 nt, Human
uugcggugagccgagauca

SEQ ID NO: 902454 - RNA, 20 nt, Human
uugcggugagccgagaucau

SEQ ID NO: 902455 - RNA, 21 nt, Human
uugcggugagccgagaucaug

SEQ ID NO: 902456 - RNA, 24 nt, Human
uugggaggcugaggcaggagaauc

SEQ ID NO: 902457 - RNA, 26 nt, Human
aaaacaaucaguuauuuugcuaaacu

SEQ ID NO: 902458 - RNA, 20 nt, Human
aaaaucaugcauucuuuucc

SEQ ID NO: 902459 - RNA, 21 nt, Human
aaaaugccaucagaugacaag

SEQ ID NO: 902460 - RNA, 18 nt, Human
aaacauguaacucaaaug

SEQ ID NO: 902461 - RNA, 22 nt, Human
aaagauuuuccaaaugccacau

SEQ ID NO: 902462 - RNA, 19 nt, Human
aaaggucugcggagauucu

SEQ ID NO: 902463 - RNA, 21 nt, Human
aacacaauucaacuacuacac

SEQ ID NO: 902464 - RNA, 26 nt, Human
aacacagaaaaaugaagacuaacacu

SEQ ID NO: 902465 - RNA, 20 nt, Human
aaccccggcuucuccgguac

SEQ ID NO: 902466 - RNA, 19 nt, Human
aagacagugcuugaagccc

SEQ ID NO: 902467 - RNA, 24 nt, Human
aaggcaagcacaggagaaauacac

SEQ ID NO: 902468 - RNA, 25 nt, Human
aaucuuauauccucucccuaaccac

SEQ ID NO: 902469 - RNA, 21 nt, Human
aauuuaauuggaaucuucccu

SEQ ID NO: 902470 - RNA, 19 nt, Human
acacaacacaaagcaagaa

SEQ ID NO: 902471 - RNA, 22 nt, Human
acaggaacauuaccugaagugc

SEQ ID NO: 902472 - RNA, 21 nt, Human
accugcacaaagucccauuuc

SEQ ID NO: 902473 - RNA, 21 nt, Human
acuggcucuccugcuacaccg

SEQ ID NO: 902474 - RNA, 21 nt, Human
acuucuugcccucaggugaac

SEQ ID NO: 902475 - RNA, 19 nt, Human
acuuuagaauaagaggcuu

SEQ ID NO: 902476 - RNA, 24 nt, Human
agaacacaacacaaagcaagaaca

SEQ ID NO: 902477 - RNA, 18 nt, Human
agacugcugcaaaacuca

SEQ ID NO: 902478 - RNA, 20 nt, Human
agccuuggggugcuuugggg

SEQ ID NO: 902479 - RNA, 19 nt, Human
agcuucuuuuuuuaaccca

SEQ ID NO: 902480 - RNA, 18 nt, Human
aggaccagaauccaccug

SEQ ID NO: 902481 - RNA, 20 nt, Human
agguauggauggaagggugg

SEQ ID NO: 902482 - RNA, 23 nt, Human
agguugauuuuuuuucuacaaca

SEQ ID NO: 902483 - RNA, 22 nt, Human
auaacacaauucaacuacuaca

SEQ ID NO: 902484 - RNA, 19 nt, Human
auacaagaucuaaaauaug

SEQ ID NO: 902485 - RNA, 19 nt, Human
auacauuccauuaaucuua

SEQ ID NO: 902486 - RNA, 23 nt, Human
caaagcaagaacaucaauucucu

SEQ ID NO: 902487 - RNA, 27 nt, Human
caaauauccauuaaaaaaguacccucc

SEQ ID NO: 902488 - RNA, 18 nt, Human
caaaugauuuacuacaag

SEQ ID NO: 902489 - RNA, 25 nt, Human
caacacagaaaaaugaagacuaaca

SEQ ID NO: 902490 - RNA, 18 nt, Human
caagucacuuggccucga

SEQ ID NO: 902491 - RNA, 23 nt, Human
cacaacacaaagcaagaacauca

SEQ ID NO: 902492 - RNA, 18 nt, Human
cacacuguggaaacuaca

SEQ ID NO: 902493 - RNA, 22 nt, Human
cacagaaccgggagaaggcaac

SEQ ID NO: 902494 - RNA, 18 nt, Human
cacaggagaaauacacua

SEQ ID NO: 902495 - RNA, 18 nt, Human
caccagcagaauuguucu

SEQ ID NO: 902496 - RNA, 18 nt, Human
cacugcauuccccaaagu

SEQ ID NO: 902497 - RNA, 22 nt, Human
cacuucagaaggcaagcacagg

SEQ ID NO: 902498 - RNA, 18 nt, Human
cagaacacaacacaaagc

SEQ ID NO: 902499 - RNA, 25 nt, Human
cagaacacaacacaaagcaagaaca

SEQ ID NO: 902500 - RNA, 20 nt, Human
cagaggaaaauagagcaaau

SEQ ID NO: 902501 - RNA, 18 nt, Human
cagauggcaacuuuuuau

SEQ ID NO: 902502 - RNA, 18 nt, Human
cagccaauauuaccacga

SEQ ID NO: 902503 - RNA, 24 nt, Human
cagccaauauuaccacgauucuac

SEQ ID NO: 902504 - RNA, 23 nt, Human
caggagucgggggcggggauggc

SEQ ID NO: 902505 - RNA, 19 nt, Human
caggugaacucccaucucu

SEQ ID NO: 902506 - RNA, 20 nt, Human
caugaacauucaaucuuuca

SEQ ID NO: 902507 - RNA, 18 nt, Human
cauuuaaaaagacgaagg

SEQ ID NO: 902508 - RNA, 19 nt, Human
ccaccuggcuuguaggaga

SEQ ID NO: 902509 - RNA, 24 nt, Human
ccacuugcagacagacugcggggc

SEQ ID NO: 902510 - RNA, 21 nt, Human
ccagccuuggggugcuuuggg

SEQ ID NO: 902511 - RNA, 24 nt, Human
ccaguggcaggugguuuagcucuu

SEQ ID NO: 902512 - RNA, 23 nt, Human
cccgcaacgugcagcugacagcu

SEQ ID NO: 902513 - RNA, 19 nt, Human
cccucucccgggccggcug

SEQ ID NO: 902514 - RNA, 21 nt, Human
ccggcuucuccgguacccccg

SEQ ID NO: 902515 - RNA, 18 nt, Human
ccgguacccccgcaacgu

SEQ ID NO: 902516 - RNA, 18 nt, Human
ccugaagugcaggguggu

SEQ ID NO: 902517 - RNA, 24 nt, Human
ccugaagugcagggugguuaccug

SEQ ID NO: 902518 - RNA, 19 nt, Human
ccugcuuccucaugucugu

SEQ ID NO: 902519 - RNA, 21 nt, Human
cgcaggagucgggggcgggga

SEQ ID NO: 902520 - RNA, 22 nt, Human
cgggggcggggauggccacuug

SEQ ID NO: 902521 - RNA, 23 nt, Human
cuaaaacagcauuuaagaaaaac

SEQ ID NO: 902522 - RNA, 23 nt, Human
cuaacacugaguaacagauuagu

SEQ ID NO: 902523 - RNA, 20 nt, Human
cuauaaggcagauggcaacu

SEQ ID NO: 902524 - RNA, 24 nt, Human
cucccgggccggcuggcgggcgcc

SEQ ID NO: 902525 - RNA, 19 nt, Human
cugcggggccggagccgcg

SEQ ID NO: 902526 - RNA, 19 nt, Human
cuucagacuccagcaccag

SEQ ID NO: 902527 - RNA, 22 nt, Human
gaaaauauucuucagacuccag

SEQ ID NO: 902528 - RNA, 19 nt, Human
gaaacccuaaaaccugagc

SEQ ID NO: 902529 - RNA, 23 nt, Human
gaaagaacaaagcauacaccaaa

SEQ ID NO: 902530 - RNA, 23 nt, Human
gaaauacacuaauguuaucuuuc

SEQ ID NO: 902531 - RNA, 23 nt, Human
gaaccgggagaaggcaacccccu

SEQ ID NO: 902532 - RNA, 23 nt, Human
gaagacagugcuugaagcccaaa

SEQ ID NO: 902533 - RNA, 18 nt, Human
gaaggcaagcacaggaga

SEQ ID NO: 902534 - RNA, 27 nt, Human
gaaggcaagcacaggagaaauacacuc

SEQ ID NO: 902535 - RNA, 20 nt, Human
gaagugacuggcucuccugc

SEQ ID NO: 902536 - RNA, 20 nt, Human
gacuccagcaccagcagaau

SEQ ID NO: 902537 - RNA, 27 nt, Human
gaugacaagggagccgagaguauggaa

SEQ ID NO: 902538 - RNA, 22 nt, Human
gcacaaagucccauuuccaaaa

SEQ ID NO: 902539 - RNA, 22 nt, Human
gcagauggcaacuuuuuauaca

SEQ ID NO: 902540 - RNA, 23 nt, Human
gcccucaggugaacucccaucuc

SEQ ID NO: 902541 - RNA, 25 nt, Human
ggaaagaacaaagcauacaccaaag

SEQ ID NO: 902542 - RNA, 20 nt, Human
ggacaaaaaacggggugggg

SEQ ID NO: 902543 - RNA, 19 nt, Human
ggagggacaaaaaacgggg

SEQ ID NO: 902544 - RNA, 24 nt, Human
gggaggaacaaguucaaaugcuuc

SEQ ID NO: 902545 - RNA, 26 nt, Human
gggaggcagagguauggauggaaggg

SEQ ID NO: 902546 - RNA, 20 nt, Human
gggagggaagugacuggcuc

SEQ ID NO: 902547 - RNA, 21 nt, Human
guauggauggaagggugggau

SEQ ID NO: 902548 - RNA, 19 nt, Human
gugcagccggagacgcucc

SEQ ID NO: 902549 - RNA, 23 nt, Human
uaaaaaacauuuuggguggccca

SEQ ID NO: 902550 - RNA, 22 nt, Human
uaaaaaaguacccucuggauaa

SEQ ID NO: 902551 - RNA, 18 nt, Human
uaaaacauguaacucaaa

SEQ ID NO: 902552 - RNA, 19 nt, Human
uaaaauaaagcauaagggc

SEQ ID NO: 902553 - RNA, 21 nt, Human
uaaaaugccagucacgugcag

SEQ ID NO: 902554 - RNA, 21 nt, Human
uaaagacauucaaacaaauua

SEQ ID NO: 902555 - RNA, 25 nt, Human
uaaauaacucuccauuuugaaaaug

SEQ ID NO: 902556 - RNA, 18 nt, Human
uaagacacucacuuaaag

SEQ ID NO: 902557 - RNA, 22 nt, Human
uaaggacaccuucuuauugcuu

SEQ ID NO: 902558 - RNA, 19 nt, Human
uacaagaucuaaaauaugg

SEQ ID NO: 902559 - RNA, 20 nt, Human
uacauuuguuuuccccuuga

SEQ ID NO: 902560 - RNA, 21 nt, Human
uaccugaagugcagggugguu

SEQ ID NO: 902561 - RNA, 21 nt, Human
uagaaaauacuaaaacagcau

SEQ ID NO: 902562 - RNA, 19 nt, Human
uagaacaagaucacucaug

SEQ ID NO: 902563 - RNA, 23 nt, Human
uagaacuauagggaggaacaagu

SEQ ID NO: 902564 - RNA, 21 nt, Human
uagcaaaaauagauuuaugcc

SEQ ID NO: 902565 - RNA, 19 nt, Human
uauagaugcuaguacugac

SEQ ID NO: 902566 - RNA, 23 nt, Human
uaucaaaauaaagacauucaaac

SEQ ID NO: 902567 - RNA, 25 nt, Human
uaucaaaauaaagacauucaaacua

SEQ ID NO: 902568 - RNA, 23 nt, Human
uaucaggaugcaucaccaagcug

SEQ ID NO: 902569 - RNA, 18 nt, Human
ucaaaauaaagacauuca

SEQ ID NO: 902570 - RNA, 25 nt, Human
ucacuaaggagaaauuuccuacuuc

SEQ ID NO: 902571 - RNA, 22 nt, Human
uccaacacagaaaaaugaagac

SEQ ID NO: 902572 - RNA, 19 nt, Human
uccauacucaacagggagg

SEQ ID NO: 902573 - RNA, 18 nt, Human
ucccaaaugaugccacgu

SEQ ID NO: 902574 - RNA, 19 nt, Human
ucccacccccaucucaaau

SEQ ID NO: 902575 - RNA, 21 nt, Human
ucccuaaccacuaaaaugcaa

SEQ ID NO: 902576 - RNA, 18 nt, Human
ucuacagccugcuuccuc

SEQ ID NO: 902577 - RNA, 19 nt, Human
ucucuuaugaauaauuucu

SEQ ID NO: 902578 - RNA, 23 nt, Human
ucugcauauaguucucuaucaua

SEQ ID NO: 902579 - RNA, 20 nt, Human
ucuguauuauucaagacugc

SEQ ID NO: 902580 - RNA, 21 nt, Human
ucuguauuauucaagacugcu

SEQ ID NO: 902581 - RNA, 23 nt, Human
ugacagcucccgcaccggccgca

SEQ ID NO: 902582 - RNA, 24 nt, Human
ugacagugcuacguccauucaggc

SEQ ID NO: 902583 - RNA, 18 nt, Human
ugaggaaaauauagacuu

SEQ ID NO: 902584 - RNA, 22 nt, Human
ugcacaaagucccauuuccaaa

SEQ ID NO: 902585 - RNA, 20 nt, Human
ugccacaugacagugcuacg

SEQ ID NO: 902586 - RNA, 18 nt, Human
ugcccuuaaaucuacagc

SEQ ID NO: 902587 - RNA, 21 nt, Human
ugcuaagcuaagcacaaguga

SEQ ID NO: 902588 - RNA, 18 nt, Human
ugcuugaagcccaaacaa

SEQ ID NO: 902589 - RNA, 21 nt, Human
ugcuuuggggccuggggaggg

SEQ ID NO: 902590 - RNA, 22 nt, Human
uggaauaauuagaaaaaaaaaa

SEQ ID NO: 902591 - RNA, 22 nt, Human
uggaauaauuagaaaaaaaaaa

SEQ ID NO: 902592 - RNA, 22 nt, Human
uggcuuguaggagaggaacuac

SEQ ID NO: 902593 - RNA, 21 nt, Human
uggggugcuuuggggccuggg

SEQ ID NO: 902594 - RNA, 21 nt, Human
uggggugggaagcaggaaaca

SEQ ID NO: 902595 - RNA, 22 nt, Human
ugguuuagcucuuauccaaagu

SEQ ID NO: 902596 - RNA, 18 nt, Human
ugucaugauuugcagaua

SEQ ID NO: 902597 - RNA, 21 nt, Human
ugucugugagcagaauuugga

SEQ ID NO: 902598 - RNA, 21 nt, Human
uguguggaauaaacuguaugu

SEQ ID NO: 902599 - RNA, 25 nt, Human
uuaaaaaacauuuuggguggcccaa

SEQ ID NO: 902600 - RNA, 18 nt, Human
uuaaaagcagaauaugag

SEQ ID NO: 902601 - RNA, 22 nt, Human
uuacaaagucaaacugcugugu

SEQ ID NO: 902602 - RNA, 22 nt, Human
uuacaaugcuaagcuaagcaca

SEQ ID NO: 902603 - RNA, 20 nt, Human
uucacauuguguucaucuug

SEQ ID NO: 902604 - RNA, 23 nt, Human
uucuccgguacccccgcaacgug

SEQ ID NO: 902605 - RNA, 24 nt, Human
uucuccgguacccccgcaacgugc

SEQ ID NO: 902606 - RNA, 22 nt, Human
uucuuuuuugagccagucucug

SEQ ID NO: 902607 - RNA, 22 nt, Human
uuguaggagaggaacuacaugg

SEQ ID NO: 902608 - RNA, 19 nt, Human
aaaccaaaaugccuucccc

SEQ ID NO: 902609 - RNA, 21 nt, Human
aaaccaaaaugccuuccccag

SEQ ID NO: 902610 - RNA, 23 nt, Human
aaaugccuuccccagaguggccc

SEQ ID NO: 902611 - RNA, 20 nt, Human
aacaaagccacccgcuacag

SEQ ID NO: 902612 - RNA, 19 nt, Human
aaccugucccuggcaccca

SEQ ID NO: 902613 - RNA, 21 nt, Human
aagccacaccccugcgccccc

SEQ ID NO: 902614 - RNA, 19 nt, Human
aaugccuuccccagagugg

SEQ ID NO: 902615 - RNA, 21 nt, Human
acaaccaccuccaccugcgug

SEQ ID NO: 902616 - RNA, 27 nt, Human
acacaccugcacccacaaccaccucca

SEQ ID NO: 902617 - RNA, 21 nt, Human
acagcugacacgccaggaaca

SEQ ID NO: 902618 - RNA, 21 nt, Human
acaguggcugugcuugccggg

SEQ ID NO: 902619 - RNA, 24 nt, Human
accauccugcuccucgucugagag

SEQ ID NO: 902620 - RNA, 22 nt, Human
accccugcgccccccacacccc

SEQ ID NO: 902621 - RNA, 22 nt, Human
acccuaaauccauccauccccc

SEQ ID NO: 902622 - RNA, 25 nt, Human
agaaaagcgcacugcuuccgcuccc

SEQ ID NO: 902623 - RNA, 23 nt, Human
agacgugaaggcugacugcagcu

SEQ ID NO: 902624 - RNA, 22 nt, Human
aggaggccuggggucggugccu

SEQ ID NO: 902625 - RNA, 25 nt, Human
aggaggccuggggucggugccugug

SEQ ID NO: 902626 - RNA, 21 nt, Human
aggccuaugcaucugugugug

SEQ ID NO: 902627 - RNA, 18 nt, Human
aggccuggggucggugcc

SEQ ID NO: 902628 - RNA, 22 nt, Human
aggggcccagcacaccugggcc

SEQ ID NO: 902629 - RNA, 22 nt, Human
auccaaacagcacagcguggaa

SEQ ID NO: 902630 - RNA, 20 nt, Human
auccauccaucccccauggc

SEQ ID NO: 902631 - RNA, 21 nt, Human
aucgggggcucugcaggaggc

SEQ ID NO: 902632 - RNA, 21 nt, Human
caaagccacccgcuacagcuc

SEQ ID NO: 902633 - RNA, 19 nt, Human
caaagucaccauccugcuc

SEQ ID NO: 902634 - RNA, 22 nt, Human
caaagucaccauccugcuccuc

SEQ ID NO: 902635 - RNA, 22 nt, Human
cacacaccugcacccacaacca

SEQ ID NO: 902636 - RNA, 19 nt, Human
cacaccccugcgcccccca

SEQ ID NO: 902637 - RNA, 22 nt, Human
caccugcacccacaaccaccuc

SEQ ID NO: 902638 - RNA, 21 nt, Human
cacucggggcuccuccaaacc

SEQ ID NO: 902639 - RNA, 24 nt, Human
caggaucgggggcucugcaggagg

SEQ ID NO: 902640 - RNA, 19 nt, Human
cagguggaacagcugcggc

SEQ ID NO: 902641 - RNA, 18 nt, Human
cauggcaaguggaggccg

SEQ ID NO: 902642 - RNA, 18 nt, Human
ccacaaccaccuccaccu

SEQ ID NO: 902643 - RNA, 18 nt, Human
ccacugaggcucgccagg

SEQ ID NO: 902644 - RNA, 18 nt, Human
ccaggacuuccucucccg

SEQ ID NO: 902645 - RNA, 18 nt, Human
ccaucccccauggcaagu

SEQ ID NO: 902646 - RNA, 20 nt, Human
cccacaaccaccuccaccug

SEQ ID NO: 902647 - RNA, 19 nt, Human
cccacaccccugcacacac

SEQ ID NO: 902648 - RNA, 22 nt, Human
cccacaggcccucccacccuaa

SEQ ID NO: 902649 - RNA, 23 nt, Human
ccccacaccccugcacacaccug

SEQ ID NO: 902650 - RNA, 28 nt, Human
ccccacaccccugcacacaccugcaccc

SEQ ID NO: 902651 - RNA, 24 nt, Human
ccccacaggcccucccacccuaaa

SEQ ID NO: 902652 - RNA, 23 nt, Human
cccccacaccccugcacacaccu

SEQ ID NO: 902653 - RNA, 24 nt, Human
cccccacaccccugcacacaccug

SEQ ID NO: 902654 - RNA, 26 nt, Human
ccccccacaccccugcacacaccugc

SEQ ID NO: 902655 - RNA, 21 nt, Human
ccccugcgccccccacacccc

SEQ ID NO: 902656 - RNA, 22 nt, Human
cccgcagcgccuuguggccccg

SEQ ID NO: 902657 - RNA, 18 nt, Human
cccggccugggugcgggg

SEQ ID NO: 902658 - RNA, 20 nt, Human
cccugggcugcccaggaagg

SEQ ID NO: 902659 - RNA, 24 nt, Human
ccgcucgggguccagaaaagcgca

SEQ ID NO: 902660 - RNA, 20 nt, Human
ccgcugcucuccguggccug

SEQ ID NO: 902661 - RNA, 21 nt, Human
ccgcugcucuccguggccugg

SEQ ID NO: 902662 - RNA, 22 nt, Human
ccgcugcucuccguggccuggc

SEQ ID NO: 902663 - RNA, 21 nt, Human
ccgcugugccuccuccagugc

SEQ ID NO: 902664 - RNA, 18 nt, Human
ccuccauggagcaggcuu

SEQ ID NO: 902665 - RNA, 23 nt, Human
ccuccccgcucgggguccagaaa

SEQ ID NO: 902666 - RNA, 21 nt, Human
ccucgugcagggccugcagcc

SEQ ID NO: 902667 - RNA, 18 nt, Human
ccucugucugcggaccuc

SEQ ID NO: 902668 - RNA, 21 nt, Human
ccugcacacaccugcacccac

SEQ ID NO: 902669 - RNA, 23 nt, Human
ccugcacccacaaccaccuccac

SEQ ID NO: 902670 - RNA, 22 nt, Human
ccugggcccugggcugcccagg

SEQ ID NO: 902671 - RNA, 23 nt, Human
ccugggcccugggcugcccagga

SEQ ID NO: 902672 - RNA, 18 nt, Human
ccuuguggccccgggucc

SEQ ID NO: 902673 - RNA, 20 nt, Human
cgccaggaacacgcagagca

SEQ ID NO: 902674 - RNA, 22 nt, Human
cgccagggacaaagucaccauc

SEQ ID NO: 902675 - RNA, 25 nt, Human
cgucugcuccuccagcggcaccgug

SEQ ID NO: 902676 - RNA, 19 nt, Human
cgugcagggccugcagccg

SEQ ID NO: 902677 - RNA, 18 nt, Human
cguggauccgcugcucuc

SEQ ID NO: 902678 - RNA, 20 nt, Human
cuaagccacaccccugcgcc

SEQ ID NO: 902679 - RNA, 24 nt, Human
cuacagcucagacggcaccgccac

SEQ ID NO: 902680 - RNA, 18 nt, Human
cucagccucugucugcgg

SEQ ID NO: 902681 - RNA, 23 nt, Human
cucagggcuccuauuugaggaug

SEQ ID NO: 902682 - RNA, 21 nt, Human
cuccagcuccgucugcuccuc

SEQ ID NO: 902683 - RNA, 21 nt, Human
cuccugcugcaagguccgcag

SEQ ID NO: 902684 - RNA, 22 nt, Human
cucgccaggacuuccucucccg

SEQ ID NO: 902685 - RNA, 21 nt, Human
cucgugccugggcccugggcu

SEQ ID NO: 902686 - RNA, 21 nt, Human
cugcugcuggggugugacugu

SEQ ID NO: 902687 - RNA, 21 nt, Human
cuugccgggccucucugccuc

SEQ ID NO: 902688 - RNA, 20 nt, Human
gaacagcugcggcuuccagg

SEQ ID NO: 902689 - RNA, 20 nt, Human
gaaggcccugcagagaggcc

SEQ ID NO: 902690 - RNA, 19 nt, Human
gagcguccagguguggggg

SEQ ID NO: 902691 - RNA, 18 nt, Human
gaguggcccuaaccuguc

SEQ ID NO: 902692 - RNA, 18 nt, Human
gccacaccccugcgcccc

SEQ ID NO: 902693 - RNA, 19 nt, Human
gcccagcacaccugggccc

SEQ ID NO: 902694 - RNA, 18 nt, Human
gccccgggucccuccugc

SEQ ID NO: 902695 - RNA, 22 nt, Human
gcccugugcuggucgcccuugc

SEQ ID NO: 902696 - RNA, 24 nt, Human
gcccugugcuggucgcccuugcug

SEQ ID NO: 902697 - RNA, 20 nt, Human
gccuggcuguggccggaggg

SEQ ID NO: 902698 - RNA, 22 nt, Human
gcgcacacgcacacgcagagcg

SEQ ID NO: 902699 - RNA, 21 nt, Human
gcuccuccagcggcaccgugu

SEQ ID NO: 902700 - RNA, 20 nt, Human
gcucgggggcuucuccuacc

SEQ ID NO: 902701 - RNA, 21 nt, Human
gcugcccaggaagguggucug

SEQ ID NO: 902702 - RNA, 20 nt, Human
gcugccgcugugccuccucc

SEQ ID NO: 902703 - RNA, 19 nt, Human
ggaacacagacacaucccc

SEQ ID NO: 902704 - RNA, 20 nt, Human
ggaacacagacacaucccca

SEQ ID NO: 902705 - RNA, 21 nt, Human
ggaaggcccugcagagaggcc

SEQ ID NO: 902706 - RNA, 20 nt, Human
ggacugaggccagacgugaa

SEQ ID NO: 902707 - RNA, 22 nt, Human
ggagcucagcauggccgagagg

SEQ ID NO: 902708 - RNA, 20 nt, Human
ggcaagauggccaggagugc

SEQ ID NO: 902709 - RNA, 24 nt, Human
ggccaggagcucugcccucagggc

SEQ ID NO: 902710 - RNA, 20 nt, Human
ggcccagcacaccugggccc

SEQ ID NO: 902711 - RNA, 20 nt, Human
ggcccucccacccuaaaucc

SEQ ID NO: 902712 - RNA, 21 nt, Human
ggcccugcagagaggccagug

SEQ ID NO: 902713 - RNA, 18 nt, Human
ggcuccuauuugaggaug

SEQ ID NO: 902714 - RNA, 18 nt, Human
ggcugugcuugccgggcc

SEQ ID NO: 902715 - RNA, 21 nt, Human
gggagggagggcucaggaccg

SEQ ID NO: 902716 - RNA, 20 nt, Human
gggcuccuccaaaccugccc

SEQ ID NO: 902717 - RNA, 22 nt, Human
ggggcccagcacaccugggccc

SEQ ID NO: 902718 - RNA, 23 nt, Human
ggggcuccuccaaaccugcccac

SEQ ID NO: 902719 - RNA, 21 nt, Human
gguagugccacuccuggguga

SEQ ID NO: 902720 - RNA, 18 nt, Human
gguccagguggaacagcu

SEQ ID NO: 902721 - RNA, 26 nt, Human
ggucgcuggccuugcgaagccgcugg

SEQ ID NO: 902722 - RNA, 22 nt, Human
gguggucuggcgggccacggcc

SEQ ID NO: 902723 - RNA, 25 nt, Human
guggccccaccaggguggucccggc

SEQ ID NO: 902724 - RNA, 23 nt, Human
guguggaacacagacacaucccc

SEQ ID NO: 902725 - RNA, 20 nt, Human
guguguggggggacuccugg

SEQ ID NO: 902726 - RNA, 22 nt, Human
uaaaaaaccaaaaugccuuccc

SEQ ID NO: 902727 - RNA, 33 nt, Human
uauguguagaggcucacacacgcgcacacggug

SEQ ID NO: 902728 - RNA, 21 nt, Human
uccagggcccccacaggcccu

SEQ ID NO: 902729 - RNA, 19 nt, Human
uccagguggaacagcugcg

SEQ ID NO: 902730 - RNA, 22 nt, Human
ucccaggggcugugguccucgu

SEQ ID NO: 902731 - RNA, 19 nt, Human
ucccaguggccacugaggc

SEQ ID NO: 902732 - RNA, 22 nt, Human
uccccagaguggcccuaaccuu

SEQ ID NO: 902733 - RNA, 18 nt, Human
uccccagaugggggagga

SEQ ID NO: 902734 - RNA, 20 nt, Human
ucccccauggcaaguggagg

SEQ ID NO: 902735 - RNA, 23 nt, Human
uccccgucacaguggcugugcuu

SEQ ID NO: 902736 - RNA, 20 nt, Human
uccuccaaaccugcccacuc

SEQ ID NO: 902737 - RNA, 20 nt, Human
uccugggccacucggggcuc

SEQ ID NO: 902738 - RNA, 21 nt, Human
ucgggggcucugcaggaggcc

SEQ ID NO: 902739 - RNA, 19 nt, Human
ucucccgacgugaucuuuc

SEQ ID NO: 902740 - RNA, 19 nt, Human
ucugcaggaggccuggggu

SEQ ID NO: 902741 - RNA, 22 nt, Human
ugaaggcugacugcagcucgca

SEQ ID NO: 902742 - RNA, 23 nt, Human
ugacacggcaagauggccaggag

SEQ ID NO: 902743 - RNA, 20 nt, Human
ugagaggggcccagcacacc

SEQ ID NO: 902744 - RNA, 22 nt, Human
ugaggccagacgugaaggcuga

SEQ ID NO: 902745 - RNA, 23 nt, Human
ugaggccagacgugaaggcugac

SEQ ID NO: 902746 - RNA, 21 nt, Human
ugcacccacaaccaccuccac

SEQ ID NO: 902747 - RNA, 18 nt, Human
ugcagcucgcagcccacc

SEQ ID NO: 902748 - RNA, 22 nt, Human
ugcagggccugcagccgccgcg

SEQ ID NO: 902749 - RNA, 18 nt, Human
ugccagagccucucggac

SEQ ID NO: 902750 - RNA, 19 nt, Human
ugccguggagcucagcaug

SEQ ID NO: 902751 - RNA, 18 nt, Human
ugccucagccucugucug

SEQ ID NO: 902752 - RNA, 21 nt, Human
ugccucagccucugucugcgg

SEQ ID NO: 902753 - RNA, 19 nt, Human
ugccugggagggagggcuc

SEQ ID NO: 902754 - RNA, 21 nt, Human
ugccugugcagcuccugcugg

SEQ ID NO: 902755 - RNA, 21 nt, Human
ugccugugcugcccgugccgu

SEQ ID NO: 902756 - RNA, 24 nt, Human
ugcggcuuccagggcaugaggcuc

SEQ ID NO: 902757 - RNA, 21 nt, Human
ugcgucgcacagcagaagcug

SEQ ID NO: 902758 - RNA, 21 nt, Human
uggaacacagacacaucccca

SEQ ID NO: 902759 - RNA, 19 nt, Human
uggacagggucuccggaag

SEQ ID NO: 902760 - RNA, 18 nt, Human
uggaggccggacaggggg

SEQ ID NO: 902761 - RNA, 21 nt, Human
uggccaggagugcgucgcaca

SEQ ID NO: 902762 - RNA, 21 nt, Human
uggccuggcuguggccggagg

SEQ ID NO: 902763 - RNA, 23 nt, Human
uggccuggcuguggccggagggc

SEQ ID NO: 902764 - RNA, 21 nt, Human
uggcuguggccggagggcugg

SEQ ID NO: 902765 - RNA, 18 nt, Human
ugggagggagggcucagg

SEQ ID NO: 902766 - RNA, 19 nt, Human
ugggcccugggcugcccag

SEQ ID NO: 902767 - RNA, 20 nt, Human
ugggcugcccaggaaggugg

SEQ ID NO: 902768 - RNA, 19 nt, Human
uguacguauauauaugugu

SEQ ID NO: 902769 - RNA, 20 nt, Human
uguccagggcccccacaggc

SEQ ID NO: 902770 - RNA, 21 nt, Human
ugucccaguggccacugaggc

SEQ ID NO: 902771 - RNA, 24 nt, Human
ugugacuguccagggcccccacag

SEQ ID NO: 902772 - RNA, 21 nt, Human
ugugcugcccgugccguggag

SEQ ID NO: 902773 - RNA, 19 nt, Human
uguggccccgggucccucc

SEQ ID NO: 902774 - RNA, 18 nt, Human
uguggggggacuccuggg

SEQ ID NO: 902775 - RNA, 32 nt, Human
uguguagaggcucacacacgcgcacacgcagu

SEQ ID NO: 902776 - RNA, 25 nt, Human
uuauuaaaaaaguguaaaaugggaa

SEQ ID NO: 902777 - RNA, 21 nt, Human
uuccagggcaugaggcucucc

SEQ ID NO: 902778 - RNA, 18 nt, Human
uuucaagguguggaacac

SEQ ID NO: 902779 - RNA, 19 nt, Human
aaaaugauuuauuguacau

SEQ ID NO: 902780 - RNA, 19 nt, Human
aaacagaaaggaucccaaa

SEQ ID NO: 902781 - RNA, 23 nt, Human
aaacagacacacuugaagucugc

SEQ ID NO: 902782 - RNA, 18 nt, Human
aaggaucccaaagugguu

SEQ ID NO: 902783 - RNA, 19 nt, Human
aaguggcagaaccuggagg

SEQ ID NO: 902784 - RNA, 18 nt, Human
aaucuucucucaaaucca

SEQ ID NO: 902785 - RNA, 19 nt, Human
acaaacaaagaaguagaug

SEQ ID NO: 902786 - RNA, 21 nt, Human
accacacauagcuauaagaaa

SEQ ID NO: 902787 - RNA, 27 nt, Human
acgguguggauuuuuuuuuuuuuuuuu

SEQ ID NO: 902788 - RNA, 18 nt, Human
agcaaaacagaaaggauc

SEQ ID NO: 902789 - RNA, 22 nt, Human
aggggauggugcuuccagacag

SEQ ID NO: 902790 - RNA, 23 nt, Human
aggggauggugcuuccagacagu

SEQ ID NO: 902791 - RNA, 24 nt, Human
agugguuaggggccuugucuaaug

SEQ ID NO: 902792 - RNA, 25 nt, Human
aucacaccacaucaaacagacacac

SEQ ID NO: 902793 - RNA, 23 nt, Human
augccugcagcuuuucuccuugg

SEQ ID NO: 902794 - RNA, 22 nt, Human
augucuuugaccuugcuggggc

SEQ ID NO: 902795 - RNA, 18 nt, Human
caccaguuaccauuuguu

SEQ ID NO: 902796 - RNA, 19 nt, Human
cagaaaccacacauagcua

SEQ ID NO: 902797 - RNA, 19 nt, Human
cagaaaggaucccaaagug

SEQ ID NO: 902798 - RNA, 18 nt, Human
cagaaccuggagggcgag

SEQ ID NO: 902799 - RNA, 23 nt, Human
cagcaaaacagaaaggaucccaa

SEQ ID NO: 902800 - RNA, 23 nt, Human
cagcaaaacagaaaggaucccaa

SEQ ID NO: 902801 - RNA, 25 nt, Human
cagcaaaacagaaaggaucccaaga

SEQ ID NO: 902802 - RNA, 22 nt, Human
cagcaaguggcagaaccuggag

SEQ ID NO: 902803 - RNA, 18 nt, Human
cagguucugagaagcauc

SEQ ID NO: 902804 - RNA, 24 nt, Human
caucaaacagacacacuugaaguc

SEQ ID NO: 902805 - RNA, 24 nt, Human
ccaaggacgguguggauuuuuuuu

SEQ ID NO: 902806 - RNA, 27 nt, Human
ccaaucuucucucaaauccacaaacaa

SEQ ID NO: 902807 - RNA, 22 nt, Human
ccacaucaaacagacacacuug

SEQ ID NO: 902808 - RNA, 21 nt, Human
cccaaucuucucucaaaucca

SEQ ID NO: 902809 - RNA, 21 nt, Human
ccugcagcuuuucuccuuggg

SEQ ID NO: 902810 - RNA, 19 nt, Human
ccuucuguugcuguuuucc

SEQ ID NO: 902811 - RNA, 18 nt, Human
cuguuuucccagcaagug

SEQ ID NO: 902812 - RNA, 23 nt, Human
cuucuguugcuguuuucccagca

SEQ ID NO: 902813 - RNA, 21 nt, Human
gaaccuggagggcgagcggug

SEQ ID NO: 902814 - RNA, 23 nt, Human
gacacacuugaagucugcacuga

SEQ ID NO: 902815 - RNA, 26 nt, Human
gcagcaaaacagaaaggaucccaaaa

SEQ ID NO: 902816 - RNA, 24 nt, Human
ggcgagcgguggcgccgcggacca

SEQ ID NO: 902817 - RNA, 23 nt, Human
uauguuguuguuaacuuucuuga

SEQ ID NO: 902818 - RNA, 28 nt, Human
uauucugcuccuuuuauucugcuuucca

SEQ ID NO: 902819 - RNA, 20 nt, Human
uccacaaacaaagaaguaga

SEQ ID NO: 902820 - RNA, 24 nt, Human
ugacuagaaaagagcaggcaauau

SEQ ID NO: 902821 - RNA, 22 nt, Human
ugcagcaaaacagaaaggaucc

SEQ ID NO: 902822 - RNA, 20 nt, Human
ugccugcagcuuuucuccuu

SEQ ID NO: 902823 - RNA, 21 nt, Human
uggcagaaccuggagggcgag

SEQ ID NO: 902824 - RNA, 21 nt, Human
uggcccaggaguccugcgaua

SEQ ID NO: 902825 - RNA, 21 nt, Human
uguccaaaccaccuugcaccu

SEQ ID NO: 902826 - RNA, 19 nt, Human
uguggcccaggaguccugc

SEQ ID NO: 902827 - RNA, 26 nt, Human
uuaauauccuucuguugcuguuuucc

SEQ ID NO: 902828 - RNA, 20 nt, Human
uugcagcaaaacagaaagga

SEQ ID NO: 902829 - RNA, 23 nt, Human
uugcagcaaaacagaaaggaucc

SEQ ID NO: 902830 - RNA, 25 nt, Human
uuucccagcaaguggcagaaccugg

SEQ ID NO: 902831 - RNA, 28 nt, Human
uuucuauguuguuguuaacuuucuugau

SEQ ID NO: 902832 - RNA, 18 nt, Human
uuuucagcuucauuccau

SEQ ID NO: 902833 - RNA, 24 nt, Human
uuuucccagcaaguggcagaaccu

SEQ ID NO: 902834 - RNA, 20 nt, Human
uuuuuuuuuuuuuaaggaau

SEQ ID NO: 902835 - RNA, 23 nt, Human
uuuuuuuuuuuuuuuuuuuaagg

SEQ ID NO: 902836 - RNA, 19 nt, Human
aaccagagccuccugcccc

SEQ ID NO: 902837 - RNA, 20 nt, Human
aaccaggaaggaaggagaug

SEQ ID NO: 902838 - RNA, 22 nt, Human
aagcagggcacaggcgcacacg

SEQ ID NO: 902839 - RNA, 21 nt, Human
aagggagaggccacucccugc

SEQ ID NO: 902840 - RNA, 22 nt, Human
aaggggaagaagaugcuggaga

SEQ ID NO: 902841 - RNA, 21 nt, Human
acacgcauacacucuccuaca

SEQ ID NO: 902842 - RNA, 22 nt, Human
accggcucccuccucaccgcgc

SEQ ID NO: 902843 - RNA, 22 nt, Human
agaggccacucccugcugggga

SEQ ID NO: 902844 - RNA, 18 nt, Human
aggagcuggaagcugcag

SEQ ID NO: 902845 - RNA, 20 nt, Human
aggagcuggaagcugcaggc

SEQ ID NO: 902846 - RNA, 22 nt, Human
aggcagacugugagaaagagca

SEQ ID NO: 902847 - RNA, 19 nt, Human
agggauccaggacaggagg

SEQ ID NO: 902848 - RNA, 24 nt, Human
cacucacaccugcgcacucgcugc

SEQ ID NO: 902849 - RNA, 22 nt, Human
cagaagggcagugaggcgggga

SEQ ID NO: 902850 - RNA, 21 nt, Human
cagcagcugcugcaggaacca

SEQ ID NO: 902851 - RNA, 18 nt, Human
caggguggaaggggaagg

SEQ ID NO: 902852 - RNA, 22 nt, Human
ccagagccuccugcccccgggg

SEQ ID NO: 902853 - RNA, 20 nt, Human
ccagcagggggaaggcgggg

SEQ ID NO: 902854 - RNA, 21 nt, Human
ccaggacaggagggauggcca

SEQ ID NO: 902855 - RNA, 18 nt, Human
cccucuagccggaucucc

SEQ ID NO: 902856 - RNA, 26 nt, Human
cgccaguacuccuuggcccuugcgcc

SEQ ID NO: 902857 - RNA, 24 nt, Human
cgcugagcugagacgggagggaac

SEQ ID NO: 902858 - RNA, 21 nt, Human
cucccugcuggggauguagag

SEQ ID NO: 902859 - RNA, 21 nt, Human
cuccugcccccggggccaggg

SEQ ID NO: 902860 - RNA, 21 nt, Human
cuccuuggcccuugcgccgcu

SEQ ID NO: 902861 - RNA, 19 nt, Human
gaaggcggggcuacaugag

SEQ ID NO: 902862 - RNA, 22 nt, Human
gagcaguggcagcagcugcugc

SEQ ID NO: 902863 - RNA, 26 nt, Human
gaggccuccuccacucuggggcacuc

SEQ ID NO: 902864 - RNA, 25 nt, Human
gcacaggcgcacacgcauacacucu

SEQ ID NO: 902865 - RNA, 20 nt, Human
gccacucccugcuggggaug

SEQ ID NO: 902866 - RNA, 19 nt, Human
gcccugcuugccugcaagc

SEQ ID NO: 902867 - RNA, 24 nt, Human
ggaaccagagccuccugcccccgg

SEQ ID NO: 902868 - RNA, 22 nt, Human
ggaaggaaggagaugucagagc

SEQ ID NO: 902869 - RNA, 20 nt, Human
ggacaggagggauggccagg

SEQ ID NO: 902870 - RNA, 24 nt, Human
ggacaggugccuugggcugcuccc

SEQ ID NO: 902871 - RNA, 24 nt, Human
ggacccccagcagggggaaggcgg

SEQ ID NO: 902872 - RNA, 19 nt, Human
ggaggagugaggaaccaga

SEQ ID NO: 902873 - RNA, 23 nt, Human
ggcagaagggcagugaggcgggg

SEQ ID NO: 902874 - RNA, 29 nt, Human
ggcgcacacgcauacacucuccuacaugg

SEQ ID NO: 902875 - RNA, 18 nt, Human
gggcacaggcgcacacgc

SEQ ID NO: 902876 - RNA, 19 nt, Human
ggggaagaagaugcuggag

SEQ ID NO: 902877 - RNA, 21 nt, Human
guccauggacgccaguacucc

SEQ ID NO: 902878 - RNA, 18 nt, Human
uaggggguggaggcagga

SEQ ID NO: 902879 - RNA, 21 nt, Human
uccaugguaggggguggaggc

SEQ ID NO: 902880 - RNA, 18 nt, Human
ucuccgagucaccggcuc

SEQ ID NO: 902881 - RNA, 23 nt, Human
ugagaaagagcagcgauguggug

SEQ ID NO: 902882 - RNA, 20 nt, Human
ugccggugggucagaggaca

SEQ ID NO: 902883 - RNA, 20 nt, Human
ugccuugggcugcuccccuc

SEQ ID NO: 902884 - RNA, 25 nt, Human
uggaaugucauagcaauucgcccuc

SEQ ID NO: 902885 - RNA, 19 nt, Human
uggcccuugcgccgcucug

SEQ ID NO: 902886 - RNA, 24 nt, Human
aaacacaaaaucaaaauauuaaac

SEQ ID NO: 902887 - RNA, 20 nt, Human
aaaucuaauauuuuauuucu

SEQ ID NO: 902888 - RNA, 22 nt, Human
aacaaaaaaguacuaacaugaa

SEQ ID NO: 902889 - RNA, 22 nt, Human
aaccaacuugaacacugguccc

SEQ ID NO: 902890 - RNA, 22 nt, Human
aagaaaaacaaaaauaagacaa

SEQ ID NO: 902891 - RNA, 25 nt, Human
aagaaguuacuaagaagagaggagg

SEQ ID NO: 902892 - RNA, 22 nt, Human
aagccaaucaauuuguauguaa

SEQ ID NO: 902893 - RNA, 22 nt, Human
aaguaacacacagaaaugaccc

SEQ ID NO: 902894 - RNA, 20 nt, Human
aaguuaaaacugccuuccac

SEQ ID NO: 902895 - RNA, 20 nt, Human
aauaaaaucuugguaaauga

SEQ ID NO: 902896 - RNA, 21 nt, Human
acacuacagccgccgccuggc

SEQ ID NO: 902897 - RNA, 24 nt, Human
acagauauucuucagaaaguuaaa

SEQ ID NO: 902898 - RNA, 18 nt, Human
accauucauacuuuuucu

SEQ ID NO: 902899 - RNA, 19 nt, Human
acucaacuuauuacacguu

SEQ ID NO: 902900 - RNA, 19 nt, Human
acugaagaaacaaacaaaa

SEQ ID NO: 902901 - RNA, 19 nt, Human
acugaaguucuguggcuca

SEQ ID NO: 902902 - RNA, 23 nt, Human
acugaucuaaaauuaagccacca

SEQ ID NO: 902903 - RNA, 22 nt, Human
acugauuucugugggauuuucc

SEQ ID NO: 902904 - RNA, 22 nt, Human
acuuacugauuucugugggauu

SEQ ID NO: 902905 - RNA, 25 nt, Human
agaaaaauucuuuucuuucugcaaa

SEQ ID NO: 902906 - RNA, 19 nt, Human
agaaaugacccuuuuauga

SEQ ID NO: 902907 - RNA, 22 nt, Human
agacauauuuuagaacaacaua

SEQ ID NO: 902908 - RNA, 19 nt, Human
agccgccgccuggccagga

SEQ ID NO: 902909 - RNA, 22 nt, Human
agguaaauaacauucaaaguca

SEQ ID NO: 902910 - RNA, 24 nt, Human
auaaagaccaaaccaacuugaaca

SEQ ID NO: 902911 - RNA, 24 nt, Human
auaaauccuagaaacccucaugag

SEQ ID NO: 902912 - RNA, 23 nt, Human
auacaaagacuacugucagguug

SEQ ID NO: 902913 - RNA, 20 nt, Human
auagaauacaaagacuacug

SEQ ID NO: 902914 - RNA, 20 nt, Human
augacaagccuauaaacacc

SEQ ID NO: 902915 - RNA, 22 nt, Human
auucuaucacacaaaacugacc

SEQ ID NO: 902916 - RNA, 19 nt, Human
caaaacaguggccuauaac

SEQ ID NO: 902917 - RNA, 28 nt, Human
caaauauaaaauauaaccaaaaacccag

SEQ ID NO: 902918 - RNA, 20 nt, Human
caaaucccgugcggagcucc

SEQ ID NO: 902919 - RNA, 21 nt, Human
caauaaugccaucaucacugu

SEQ ID NO: 902920 - RNA, 19 nt, Human
caauauuuacagaauauca

SEQ ID NO: 902921 - RNA, 18 nt, Human
cacacauaaaggccacca

SEQ ID NO: 902922 - RNA, 21 nt, Human
caccagcccgggcggaccccc

SEQ ID NO: 902923 - RNA, 22 nt, Human
cacuacagccgccgccuggcca

SEQ ID NO: 902924 - RNA, 18 nt, Human
cagguaggaguacauaag

SEQ ID NO: 902925 - RNA, 24 nt, Human
ccaaaaagugugauuccaucgaaa

SEQ ID NO: 902926 - RNA, 22 nt, Human
ccagcccgggcggacccccacc

SEQ ID NO: 902927 - RNA, 19 nt, Human
cccccgagcggggcgggac

SEQ ID NO: 902928 - RNA, 19 nt, Human
ccccgagguccaccagccc

SEQ ID NO: 902929 - RNA, 21 nt, Human
ccgcugucgucggcggcagcu

SEQ ID NO: 902930 - RNA, 20 nt, Human
ccguaagcgucuagucagac

SEQ ID NO: 902931 - RNA, 25 nt, Human
cgagccuggacgaagggcgcugccc

SEQ ID NO: 902932 - RNA, 21 nt, Human
cgggcggacccccaccuuccc

SEQ ID NO: 902933 - RNA, 20 nt, Human
cuaacacuacagccgccgcc

SEQ ID NO: 902934 - RNA, 23 nt, Human
cucacaaaagcuagaaauguccu

SEQ ID NO: 902935 - RNA, 19 nt, Human
cugcccagcggccgcggag

SEQ ID NO: 902936 - RNA, 23 nt, Human
cugggcacccagaaccgcgaaga

SEQ ID NO: 902937 - RNA, 20 nt, Human
cugguccuauacaauuucaa

SEQ ID NO: 902938 - RNA, 24 nt, Human
cuuucggccccgagguccaccuua

SEQ ID NO: 902939 - RNA, 22 nt, Human
gaaaaaacauaaauuaucagca

SEQ ID NO: 902940 - RNA, 23 nt, Human
gaaaacaacauacacguggauaa

SEQ ID NO: 902941 - RNA, 22 nt, Human
gaaucucuuuccacuuagucaa

SEQ ID NO: 902942 - RNA, 19 nt, Human
gacuacugucagguaggag

SEQ ID NO: 902943 - RNA, 18 nt, Human
gccaccaauuccugaguu

SEQ ID NO: 902944 - RNA, 18 nt, Human
gccgcggaggcacugccg

SEQ ID NO: 902945 - RNA, 19 nt, Human
gcuaaacacuggaaaaaau

SEQ ID NO: 902946 - RNA, 18 nt, Human
gcucuuguuucaguguga

SEQ ID NO: 902947 - RNA, 23 nt, Human
ggaauacagcauuauuuugccaa

SEQ ID NO: 902948 - RNA, 21 nt, Human
ggcaaauguggucagggcaau

SEQ ID NO: 902949 - RNA, 23 nt, Human
ggcaauuauucucucugaccuuc

SEQ ID NO: 902950 - RNA, 22 nt, Human
ggccaggagcgcgucgcggccc

SEQ ID NO: 902951 - RNA, 25 nt, Human
ggcggacccccaccuucccucaguc

SEQ ID NO: 902952 - RNA, 25 nt, Human
ggcuuuugaaguaaaauacugguua

SEQ ID NO: 902953 - RNA, 21 nt, Human
gggcacccagaaccgcgaaga

SEQ ID NO: 902954 - RNA, 19 nt, Human
ggucgccgcggcgccgggg

SEQ ID NO: 902955 - RNA, 20 nt, Human
gugcggagcucccagggagg

SEQ ID NO: 902956 - RNA, 22 nt, Human
guggauaagaccaaaguccuaa

SEQ ID NO: 902957 - RNA, 18 nt, Human
uaaaaaaauuaaacuuca

SEQ ID NO: 902958 - RNA, 20 nt, Human
uaaaauauaaccaaaaaccc

SEQ ID NO: 902959 - RNA, 20 nt, Human
uaaaauauaaccaaaaaccc

SEQ ID NO: 902960 - RNA, 22 nt, Human
uaaagaauagguaaauagacaa

SEQ ID NO: 902961 - RNA, 18 nt, Human
uaaauagacaaaccccua

SEQ ID NO: 902962 - RNA, 18 nt, Human
uaaauagacaaaccccua

SEQ ID NO: 902963 - RNA, 24 nt, Human
uaaaugcaaaaagauaacauuuuc

SEQ ID NO: 902964 - RNA, 19 nt, Human
uaacaaaaauaaacaguau

SEQ ID NO: 902965 - RNA, 22 nt, Human
uaacacaaaaaaugacaaaaaa

SEQ ID NO: 902966 - RNA, 19 nt, Human
uaacacacagaaaugaccc

SEQ ID NO: 902967 - RNA, 25 nt, Human
uaacacuacagccgccgccuggcca

SEQ ID NO: 902968 - RNA, 18 nt, Human
uaacauuauaucucagaa

SEQ ID NO: 902969 - RNA, 24 nt, Human
uaagaaaaacaaaaauaagacaaa

SEQ ID NO: 902970 - RNA, 22 nt, Human
uaagacaaaaggacagcaauca

SEQ ID NO: 902971 - RNA, 21 nt, Human
uaagauagcuauauugguuag

SEQ ID NO: 902972 - RNA, 21 nt, Human
uaagccuaguacaagcacuga

SEQ ID NO: 902973 - RNA, 21 nt, Human
uaaggauacuuaagauagcua

SEQ ID NO: 902974 - RNA, 20 nt, Human
uaaucugcagucucauguau

SEQ ID NO: 902975 - RNA, 18 nt, Human
uacauauauuuauaagau

SEQ ID NO: 902976 - RNA, 18 nt, Human
uacuauagaauacaaaga

SEQ ID NO: 902977 - RNA, 21 nt, Human
uagaaagagacucauacaacu

SEQ ID NO: 902978 - RNA, 22 nt, Human
uagccugaacaauaggaaucuu

SEQ ID NO: 902979 - RNA, 22 nt, Human
uauaaaauauaaccaaaaaccc

SEQ ID NO: 902980 - RNA, 18 nt, Human
uauaaacaccuugaauca

SEQ ID NO: 902981 - RNA, 21 nt, Human
uauaaccaaaaacccauuugu

SEQ ID NO: 902982 - RNA, 20 nt, Human
uaugacaagccuauaaacac

SEQ ID NO: 902983 - RNA, 22 nt, Human
uaugacaagccuauaaacaccu

SEQ ID NO: 902984 - RNA, 21 nt, Human
uauuauuccaucauuucucaa

SEQ ID NO: 902985 - RNA, 19 nt, Human
ucaaaauauuaaacugaag

SEQ ID NO: 902986 - RNA, 22 nt, Human
ucaauaccucuacauuuaucuc

SEQ ID NO: 902987 - RNA, 25 nt, Human
ucacacaacagguagaauaaaauga

SEQ ID NO: 902988 - RNA, 19 nt, Human
ucacagaaaccuaaggaua

SEQ ID NO: 902989 - RNA, 25 nt, Human
ucagaccccaacuucucucggccgc

SEQ ID NO: 902990 - RNA, 22 nt, Human
uccaaagcuaacacuacagccg

SEQ ID NO: 902991 - RNA, 23 nt, Human
uccgccgcgucgccgccuuucug

SEQ ID NO: 902992 - RNA, 21 nt, Human
uccuaagaggugggucaccag

SEQ ID NO: 902993 - RNA, 21 nt, Human
uccuagaaacccucaugaggc

SEQ ID NO: 902994 - RNA, 18 nt, Human
ucuccuagguuuuuuugu

SEQ ID NO: 902995 - RNA, 23 nt, Human
ucuccuagguuuuuuuguuuucg

SEQ ID NO: 902996 - RNA, 22 nt, Human
ucucucggccgcugucgucggc

SEQ ID NO: 902997 - RNA, 19 nt, Human
ucugaccuucauuuucauu

SEQ ID NO: 902998 - RNA, 20 nt, Human
ucugggcacccagaaccgcg

SEQ ID NO: 902999 - RNA, 18 nt, Human
ucugugggauuuucccca

SEQ ID NO: 903000 - RNA, 23 nt, Human
ugaaaaaacauaaauuaucagca

SEQ ID NO: 903001 - RNA, 21 nt, Human
ugaaauacaaauaaaauaucu

SEQ ID NO: 903002 - RNA, 26 nt, Human
ugaauaggcagaguguaacagaaugu

SEQ ID NO: 903003 - RNA, 24 nt, Human
ugacaaauauaaaauauaaccaaa

SEQ ID NO: 903004 - RNA, 22 nt, Human
ugauauaaaacaaaaaaguacu

SEQ ID NO: 903005 - RNA, 20 nt, Human
ugccaucaucacuguauguc

SEQ ID NO: 903006 - RNA, 22 nt, Human
ugccaucaucacuguaugucaa

SEQ ID NO: 903007 - RNA, 20 nt, Human
ugcuguacuuacacugcagg

SEQ ID NO: 903008 - RNA, 18 nt, Human
uggacgaagggcgcugcc

SEQ ID NO: 903009 - RNA, 20 nt, Human
uggccaggagcgcgucgcgg

SEQ ID NO: 903010 - RNA, 22 nt, Human
ugggaaaugguucuucacagaa

SEQ ID NO: 903011 - RNA, 20 nt, Human
ugguaaaugaaaaaaacugg

SEQ ID NO: 903012 - RNA, 21 nt, Human
uguauaaagaacagucaugaa

SEQ ID NO: 903013 - RNA, 24 nt, Human
uguauaaagaacagucaugaauaa

SEQ ID NO: 903014 - RNA, 22 nt, Human
uguccugggccagcuacauuuu

SEQ ID NO: 903015 - RNA, 19 nt, Human
ugucugaguaaagaauagg

SEQ ID NO: 903016 - RNA, 24 nt, Human
uguuaacaagguuuacugaugaaa

SEQ ID NO: 903017 - RNA, 18 nt, Human
uuaagccaccaauuccug

SEQ ID NO: 903018 - RNA, 20 nt, Human
uuaugaacaauguuaacauu

SEQ ID NO: 903019 - RNA, 18 nt, Human
uucaauggaaugcgguua

SEQ ID NO: 903020 - RNA, 23 nt, Human
uuugccaagaaaacaugggaaau

SEQ ID NO: 903021 - RNA, 21 nt, Human
uuuggaccaaaugaaaacaac

SEQ ID NO: 903022 - RNA, 20 nt, Human
uuuuuuguuuucggaauauu

SEQ ID NO: 903023 - RNA, 23 nt, Human
aauaguucaauuccaaaauaaaa

SEQ ID NO: 903024 - RNA, 23 nt, Human
acaacucagaggaacccauauuu

SEQ ID NO: 903025 - RNA, 24 nt, Human
acguauguguguguauauauaugu

SEQ ID NO: 903026 - RNA, 18 nt, Human
auguauguguguguauac

SEQ ID NO: 903027 - RNA, 20 nt, Human
auguguguguauacguaugu

SEQ ID NO: 903028 - RNA, 22 nt, Human
auguguguguauauauaugugu

SEQ ID NO: 903029 - RNA, 24 nt, Human
caguaucccugagauaggaaccac

SEQ ID NO: 903030 - RNA, 22 nt, Human
caucugauuuucaaaaccugaa

SEQ ID NO: 903031 - RNA, 21 nt, Human
ccuuaagcacuaagaauaauu

SEQ ID NO: 903032 - RNA, 25 nt, Human
cgucagaaaguccaguaucccugag

SEQ ID NO: 903033 - RNA, 25 nt, Human
cuuuaugaagccuuaagcacuaaga

SEQ ID NO: 903034 - RNA, 19 nt, Human
gaaaaggagaagacaucau

SEQ ID NO: 903035 - RNA, 20 nt, Human
gaaguuuuucucaggacuga

SEQ ID NO: 903036 - RNA, 18 nt, Human
gaauuaugccuacugccc

SEQ ID NO: 903037 - RNA, 23 nt, Human
gagcgcagaguuucagacuugga

SEQ ID NO: 903038 - RNA, 20 nt, Human
gauuuauaaaugcuuucaac

SEQ ID NO: 903039 - RNA, 23 nt, Human
gguauauuuauauauauguaugu

SEQ ID NO: 903040 - RNA, 22 nt, Human
guauauuuauauauauguaugu

SEQ ID NO: 903041 - RNA, 24 nt, Human
guguguguauauauaugugugugu

SEQ ID NO: 903042 - RNA, 24 nt, Human
uauacguauguguguguauauaaa

SEQ ID NO: 903043 - RNA, 27 nt, Human
uauacguauguguguguauauauauua

SEQ ID NO: 903044 - RNA, 24 nt, Human
uauauauauguauguguguguaua

SEQ ID NO: 903045 - RNA, 19 nt, Human
uauauauaugugugugugu

SEQ ID NO: 903046 - RNA, 22 nt, Human
uauauauaugugugugugugug

SEQ ID NO: 903047 - RNA, 24 nt, Human
uauauaugugugugugugugugua

SEQ ID NO: 903048 - RNA, 20 nt, Human
uauauguauguguguguaua

SEQ ID NO: 903049 - RNA, 19 nt, Human
uauaugugugugugugugu

SEQ ID NO: 903050 - RNA, 22 nt, Human
uauguauguguguguauacgua

SEQ ID NO: 903051 - RNA, 19 nt, Human
uauguguguguauacguau

SEQ ID NO: 903052 - RNA, 23 nt, Human
uauguguguguauacguaugugu

SEQ ID NO: 903053 - RNA, 23 nt, Human
uauguguguguauauauaugugu

SEQ ID NO: 903054 - RNA, 25 nt, Human
uauguguguguauauauauguguca

SEQ ID NO: 903055 - RNA, 18 nt, Human
uaugugugugugugugug

SEQ ID NO: 903056 - RNA, 19 nt, Human
uccaguaucccugagauag

SEQ ID NO: 903057 - RNA, 19 nt, Human
ugaaaaaaaucuggcauca

SEQ ID NO: 903058 - RNA, 18 nt, Human
ugaacuaagaaacaaguu

SEQ ID NO: 903059 - RNA, 23 nt, Human
uggcaucagguauauuuauauau

SEQ ID NO: 903060 - RNA, 19 nt, Human
ugguguuuggaaaaggaga

SEQ ID NO: 903061 - RNA, 24 nt, Human
uguauacguauguguguguauaaa

SEQ ID NO: 903062 - RNA, 26 nt, Human
uguauacguauguguguguauauaau

SEQ ID NO: 903063 - RNA, 21 nt, Human
uguauauauaugugugugugu

SEQ ID NO: 903064 - RNA, 22 nt, Human
uguguauacguaugugugugua

SEQ ID NO: 903065 - RNA, 19 nt, Human
uguguauauauaugugugu

SEQ ID NO: 903066 - RNA, 19 nt, Human
uguguauauauaugugugu

SEQ ID NO: 903067 - RNA, 21 nt, Human
uguguauauauaugugugugu

SEQ ID NO: 903068 - RNA, 22 nt, Human
uguguauauauaugugugugug

SEQ ID NO: 903069 - RNA, 18 nt, Human
uguguguauacguaugug

SEQ ID NO: 903070 - RNA, 21 nt, Human
uguguguauacguaugugugu

SEQ ID NO: 903071 - RNA, 19 nt, Human
uguguguauauauaugugu

SEQ ID NO: 903072 - RNA, 21 nt, Human
uguguguauauauaugugugu

SEQ ID NO: 903073 - RNA, 19 nt, Human
uguguguguauacguaugu

SEQ ID NO: 903074 - RNA, 19 nt, Human
uguguguguauacguaugu

SEQ ID NO: 903075 - RNA, 22 nt, Human
uguguguguauacguaugugug

SEQ ID NO: 903076 - RNA, 23 nt, Human
uguguguguauauauaugugugu

SEQ ID NO: 903077 - RNA, 30 nt, Human
uguguguguauauauauguguguguguguu

SEQ ID NO: 903078 - RNA, 20 nt, Human
uguguguguguguguauccc

SEQ ID NO: 903079 - RNA, 26 nt, Human
uuaaaaaaaagguuggaaaaauuacu

SEQ ID NO: 903080 - RNA, 21 nt, Human
uuggauuuauaaaugcuuuca

SEQ ID NO: 903081 - RNA, 25 nt, Human
uuggauuuauaaaugcuuucaacgu

SEQ ID NO: 903082 - RNA, 20 nt, Human
uuuaugaaaaaaaucuggca

SEQ ID NO: 903083 - RNA, 20 nt, Human
uuucaacgugugguguuugg

SEQ ID NO: 903084 - RNA, 18 nt, Human
uuuuuuuuuaaaaaaaag

SEQ ID NO: 903085 - RNA, 23 nt, Human
uuuuuuuuuuuuaaaaaaaaggu

SEQ ID NO: 903086 - RNA, 22 nt, Human
auacaaggcucggucuuuucaa

SEQ ID NO: 903087 - RNA, 18 nt, Human
auguauccauaacauaca

SEQ ID NO: 903088 - RNA, 20 nt, Human
auuuguguucagaauuauuu

SEQ ID NO: 903089 - RNA, 22 nt, Human
caaggauuuuucucuaauggau

SEQ ID NO: 903090 - RNA, 21 nt, Human
cagaauuauuugaugauugcu

SEQ ID NO: 903091 - RNA, 18 nt, Human
caggaggcuaacuccaca

SEQ ID NO: 903092 - RNA, 23 nt, Human
ccaaaccacuuuuuaacuuaaau

SEQ ID NO: 903093 - RNA, 23 nt, Human
ccaagcaccuauuuuuauaacuu

SEQ ID NO: 903094 - RNA, 22 nt, Human
ccaguaaacccacucauauaga

SEQ ID NO: 903095 - RNA, 23 nt, Human
cuuugugcugauguuucaguucc

SEQ ID NO: 903096 - RNA, 21 nt, Human
uaccacaggaggcuaacucca

SEQ ID NO: 903097 - RNA, 19 nt, Human
uagccagaacuuuuaaugu

SEQ ID NO: 903098 - RNA, 22 nt, Human
uagcuucccauggagagauaau

SEQ ID NO: 903099 - RNA, 21 nt, Human
ucaaugggauaacaguucaca

SEQ ID NO: 903100 - RNA, 21 nt, Human
ucagguuauugacuuaggguu

SEQ ID NO: 903101 - RNA, 20 nt, Human
ugagaguacaaaauuaguug

SEQ ID NO: 903102 - RNA, 18 nt, Human
ugcaagaagcauaugaca

SEQ ID NO: 903103 - RNA, 21 nt, Human
uguauccauaacauacauaca

SEQ ID NO: 903104 - RNA, 23 nt, Human
uuccaaaguuagccagaacuuuu

SEQ ID NO: 903105 - RNA, 25 nt, Human
caaaaaaccaaaaauauuuuauugc

SEQ ID NO: 903106 - RNA, 21 nt, Human
cauaaaggaccccaagccuug

SEQ ID NO: 903107 - RNA, 19 nt, Human
cgcugggccgcagcuuucc

SEQ ID NO: 903108 - RNA, 24 nt, Human
cucccaugacaucaggauagagau

SEQ ID NO: 903109 - RNA, 19 nt, Human
gaggcacgggguccuuugg

SEQ ID NO: 903110 - RNA, 18 nt, Human
gcuuggagucuauagcuu

SEQ ID NO: 903111 - RNA, 21 nt, Human
gguccucacuaguccgcgcug

SEQ ID NO: 903112 - RNA, 23 nt, Human
guccgcgcugggccgcagcuuuc

SEQ ID NO: 903113 - RNA, 22 nt, Human
uacaaaaccaaaaaaccaaaaa

SEQ ID NO: 903114 - RNA, 18 nt, Human
ucaggagcuguggagguc

SEQ ID NO: 903115 - RNA, 23 nt, Human
ucaggauagagauugaggcacgg

SEQ ID NO: 903116 - RNA, 20 nt, Human
uccauaaaggaccccaagcc

SEQ ID NO: 903117 - RNA, 19 nt, Human
ugcugagucauccuggggu

SEQ ID NO: 903118 - RNA, 28 nt, Human
uggcaaugucaggagcuguggagguccu

SEQ ID NO: 903119 - RNA, 23 nt, Human
ugggguuccauaaaggaccccaa

SEQ ID NO: 903120 - RNA, 20 nt, Human
uugcugagucauccuggggu

SEQ ID NO: 903121 - RNA, 23 nt, Human
uuuacaaaaccaaaaaaccaaaa

SEQ ID NO: 903122 - RNA, 20 nt, Human
uuugcuaggacucccaugac

SEQ ID NO: 903123 - RNA, 29 nt, Human
uuuuuuuuuuuuuuuuuuuuuuacaaaaa

SEQ ID NO: 903124 - RNA, 21 nt, Human
aaaccagaccugcaaauugua

SEQ ID NO: 903125 - RNA, 21 nt, Human
aaagaggaaccaaaaacugug

SEQ ID NO: 903126 - RNA, 18 nt, Human
aacugaacuucuaggacc

SEQ ID NO: 903127 - RNA, 18 nt, Human
aagucuccuguucuaaag

SEQ ID NO: 903128 - RNA, 19 nt, Human
acaaacagcagaagguaag

SEQ ID NO: 903129 - RNA, 28 nt, Human
acaaacagcagaagguaagccgguaccc

SEQ ID NO: 903130 - RNA, 21 nt, Human
acugaacuucuaggaccacag

SEQ ID NO: 903131 - RNA, 23 nt, Human
agguagucaucaaaaaugauggc

SEQ ID NO: 903132 - RNA, 19 nt, Human
auaaaacacgcucaguaaa

SEQ ID NO: 903133 - RNA, 19 nt, Human
caaacagcagaagguaagc

SEQ ID NO: 903134 - RNA, 19 nt, Human
caaacagcagaagguaagc

SEQ ID NO: 903135 - RNA, 18 nt, Human
cacuggugaugacagggu

SEQ ID NO: 903136 - RNA, 19 nt, Human
cagaggcggcaccgaggag

SEQ ID NO: 903137 - RNA, 20 nt, Human
cagccacccuguacaguacu

SEQ ID NO: 903138 - RNA, 22 nt, Human
cagcggcagggcgcgagcagag

SEQ ID NO: 903139 - RNA, 28 nt, Human
caguaaaaacugaacuucuaggaccaca

SEQ ID NO: 903140 - RNA, 23 nt, Human
ccacagaguuaauuuuacugugu

SEQ ID NO: 903141 - RNA, 20 nt, Human
ccggggcggacgugcagagg

SEQ ID NO: 903142 - RNA, 21 nt, Human
ccuccgagcgccguccgagcg

SEQ ID NO: 903143 - RNA, 19 nt, Human
ccuuaggucaagcucaagu

SEQ ID NO: 903144 - RNA, 21 nt, Human
cgagcagagcggggacgggcg

SEQ ID NO: 903145 - RNA, 19 nt, Human
cgagccgggccgaguccuc

SEQ ID NO: 903146 - RNA, 23 nt, Human
cggaaaagccaccgagggcggcg

SEQ ID NO: 903147 - RNA, 21 nt, Human
cguuccuuuuuauguucugag

SEQ ID NO: 903148 - RNA, 18 nt, Human
cugaacuucuaggaccac

SEQ ID NO: 903149 - RNA, 18 nt, Human
cugguuuucagguaggca

SEQ ID NO: 903150 - RNA, 20 nt, Human
cuucuaggaccacagccacc

SEQ ID NO: 903151 - RNA, 20 nt, Human
gagcagagcggggacgggcg

SEQ ID NO: 903152 - RNA, 20 nt, Human
gagccuggaacaaacagcag

SEQ ID NO: 903153 - RNA, 25 nt, Human
gcagggcgcgagcagagcggggacg

SEQ ID NO: 903154 - RNA, 21 nt, Human
gcccgucggaaaagccaccga

SEQ ID NO: 903155 - RNA, 21 nt, Human
gcgcgggugcgggcuccgggg

SEQ ID NO: 903156 - RNA, 25 nt, Human
gcgcguggggcgcgggugcgggcuc

SEQ ID NO: 903157 - RNA, 23 nt, Human
ggcaccgaggaggggaacgggcu

SEQ ID NO: 903158 - RNA, 19 nt, Human
uaaugcauauccuuagguc

SEQ ID NO: 903159 - RNA, 23 nt, Human
uaaugcauauccuuaggucaagc

SEQ ID NO: 903160 - RNA, 20 nt, Human
uagccucuggccuuuaaccu

SEQ ID NO: 903161 - RNA, 23 nt, Human
ucaagguaagucuaaaaucuguu

SEQ ID NO: 903162 - RNA, 22 nt, Human
ucccggucgcguccagccggga

SEQ ID NO: 903163 - RNA, 18 nt, Human
uccucggcggcgcguggg

SEQ ID NO: 903164 - RNA, 19 nt, Human
ucuaggaccacagccaccc

SEQ ID NO: 903165 - RNA, 20 nt, Human
ucuccuguucuaaaggugag

SEQ ID NO: 903166 - RNA, 21 nt, Human
ugagccuggaacaaacagcag

SEQ ID NO: 903167 - RNA, 23 nt, Human
ugagccuggaacaaacagcagaa

SEQ ID NO: 903168 - RNA, 20 nt, Human
ugccaaucccauucuuucac

SEQ ID NO: 903169 - RNA, 22 nt, Human
uggaacaaacagcagaagguaa

SEQ ID NO: 903170 - RNA, 22 nt, Human
ugggauuaaggaccaaggccac

SEQ ID NO: 903171 - RNA, 22 nt, Human
ugggauuaaggaccaaggccac

SEQ ID NO: 903172 - RNA, 24 nt, Human
ugggauuaaggaccaaggccacug

SEQ ID NO: 903173 - RNA, 18 nt, Human
ugguagcccagccaagca

SEQ ID NO: 903174 - RNA, 19 nt, Human
uguacaguacugaguggga

SEQ ID NO: 903175 - RNA, 18 nt, Human
ugucuguguagcauaagg

SEQ ID NO: 903176 - RNA, 21 nt, Human
uuacauuugacaaucuaugcu

SEQ ID NO: 903177 - RNA, 21 nt, Human
uucccgcacagcacggggcuc

SEQ ID NO: 903178 - RNA, 21 nt, Human
uuggccucaaacaccugugaa

SEQ ID NO: 903179 - RNA, 18 nt, Human
uuuauuaaagccuucaau

SEQ ID NO: 903180 - RNA, 21 nt, Human
aaaacaacaaaacaaagaccc

SEQ ID NO: 903181 - RNA, 25 nt, Human
aaaacaacaaaacaaagacccacaa

SEQ ID NO: 903182 - RNA, 18 nt, Human
aaacaacaaaacaaagac

SEQ ID NO: 903183 - RNA, 25 nt, Human
aaagcaaacaaaacaacaaaacaaa

SEQ ID NO: 903184 - RNA, 32 nt, Human
aaagcaaacaaaacaacaaaacaaagaccccc

SEQ ID NO: 903185 - RNA, 21 nt, Human
aacaaaacaacaaaacaaaga

SEQ ID NO: 903186 - RNA, 25 nt, Human
aacaaaacaacaaaacaaagaccca

SEQ ID NO: 903187 - RNA, 21 nt, Human
aagaucccaaagcaaacaaaa

SEQ ID NO: 903188 - RNA, 21 nt, Human
aagcaaacaaaacaacaaaac

SEQ ID NO: 903189 - RNA, 22 nt, Human
aagcaaacaaaacaacaaaaca

SEQ ID NO: 903190 - RNA, 27 nt, Human
aagcaaacaaaacaacaaaacaaagac

SEQ ID NO: 903191 - RNA, 20 nt, Human
acaaaacaacaaaacaaaga

SEQ ID NO: 903192 - RNA, 22 nt, Human
acaaaacaacaaaacaaagacc

SEQ ID NO: 903193 - RNA, 20 nt, Human
acagagcucuaaaaugagcu

SEQ ID NO: 903194 - RNA, 24 nt, Human
acgggacagauccugggcuucucu

SEQ ID NO: 903195 - RNA, 25 nt, Human
agagaaagcccucccgcagaaaggu

SEQ ID NO: 903196 - RNA, 22 nt, Human
aggagucgcggacaugaucugg

SEQ ID NO: 903197 - RNA, 21 nt, Human
agggaagagcuggggucagug

SEQ ID NO: 903198 - RNA, 18 nt, Human
auccacgucuucgucaga

SEQ ID NO: 903199 - RNA, 19 nt, Human
aucccaaagcaaacaaaac

SEQ ID NO: 903200 - RNA, 22 nt, Human
caaaacaacaaaacaaagaccc

SEQ ID NO: 903201 - RNA, 27 nt, Human
caaaacaacaaaacaaagacccacaac

SEQ ID NO: 903202 - RNA, 23 nt, Human
caaacaaaacaacaaaacaaaga

SEQ ID NO: 903203 - RNA, 24 nt, Human
caaacaaaacaacaaaacaaagac

SEQ ID NO: 903204 - RNA, 22 nt, Human
caaagcaaacaaaacaacaaaa

SEQ ID NO: 903205 - RNA, 21 nt, Human
caacaaaacaaagacccacaa

SEQ ID NO: 903206 - RNA, 23 nt, Human
caacaagaucccaaagcaaacaa

SEQ ID NO: 903207 - RNA, 25 nt, Human
caacaagaucccaaagcaaacaaaa

SEQ ID NO: 903208 - RNA, 19 nt, Human
cagaaaggucaaccugggc

SEQ ID NO: 903209 - RNA, 18 nt, Human
cagagcucuaaaaugagc

SEQ ID NO: 903210 - RNA, 24 nt, Human
cagagucuguggacgcggacugug

SEQ ID NO: 903211 - RNA, 23 nt, Human
cagcagcaagcacgccgagcucc

SEQ ID NO: 903212 - RNA, 20 nt, Human
ccaaagcaaacaaaacaaca

SEQ ID NO: 903213 - RNA, 20 nt, Human
ccaaagcaaacaaaacaaca

SEQ ID NO: 903214 - RNA, 18 nt, Human
ccaacaagaucccaaagc

SEQ ID NO: 903215 - RNA, 24 nt, Human
ccacgccuggcaaacuuuuuuuuc

SEQ ID NO: 903216 - RNA, 22 nt, Human
ccagaaccucgcucuucggcga

SEQ ID NO: 903217 - RNA, 21 nt, Human
ccagaagaagaguuaacuccc

SEQ ID NO: 903218 - RNA, 21 nt, Human
cccaaagcaaacaaaacaaca

SEQ ID NO: 903219 - RNA, 19 nt, Human
ccucccgcagaaaggucaa

SEQ ID NO: 903220 - RNA, 21 nt, Human
cgcccagaaccucgcucuucg

SEQ ID NO: 903221 - RNA, 21 nt, Human
cuaaagcgagagcagauccac

SEQ ID NO: 903222 - RNA, 21 nt, Human
gacaaaaacccagugagacaa

SEQ ID NO: 903223 - RNA, 25 nt, Human
gacaaaaacccagugagacaacagc

SEQ ID NO: 903224 - RNA, 19 nt, Human
gacccgguccaggcagcga

SEQ ID NO: 903225 - RNA, 18 nt, Human
gaugcugggggugcugag

SEQ ID NO: 903226 - RNA, 25 nt, Human
gcacgggacagauccugggcuucuc

SEQ ID NO: 903227 - RNA, 20 nt, Human
gcagcaagggaagagcuggg

SEQ ID NO: 903228 - RNA, 21 nt, Human
gcuaaagcgagagcagaucca

SEQ ID NO: 903229 - RNA, 20 nt, Human
ggccaucacccuccagcagc

SEQ ID NO: 903230 - RNA, 21 nt, Human
ggccaucacccuccagcagca

SEQ ID NO: 903231 - RNA, 18 nt, Human
ggccggagggcguggggc

SEQ ID NO: 903232 - RNA, 24 nt, Human
ggcuccgacaaaaacccagugaga

SEQ ID NO: 903233 - RNA, 21 nt, Human
ggggaggggagcagcggcggc

SEQ ID NO: 903234 - RNA, 20 nt, Human
ggucagugaagggcuaggga

SEQ ID NO: 903235 - RNA, 22 nt, Human
gucuuuaaagauaaaauuuggc

SEQ ID NO: 903236 - RNA, 21 nt, Human
gugagacaacagcacguagag

SEQ ID NO: 903237 - RNA, 19 nt, Human
uccaacaagaucccaaagc

SEQ ID NO: 903238 - RNA, 18 nt, Human
ucgcaggagucgcggaca

SEQ ID NO: 903239 - RNA, 21 nt, Human
ugaaacaaacaagaaaaaguu

SEQ ID NO: 903240 - RNA, 21 nt, Human
ugaaacaaacaagaaaaaguu

SEQ ID NO: 903241 - RNA, 21 nt, Human
ugaauaucuacaagaaacuag

SEQ ID NO: 903242 - RNA, 19 nt, Human
ugagacaacagcacguaga

SEQ ID NO: 903243 - RNA, 27 nt, Human
ugagacaacagcacguagagaaagccc

SEQ ID NO: 903244 - RNA, 18 nt, Human
ugaguccacgccuggcaa

SEQ ID NO: 903245 - RNA, 19 nt, Human
ugcagcaagggaagagcug

SEQ ID NO: 903246 - RNA, 23 nt, Human
uggacgcggacuguguaaagacc

SEQ ID NO: 903247 - RNA, 25 nt, Human
uggcaaacuuuuuuuuccgcgcgga

SEQ ID NO: 903248 - RNA, 20 nt, Human
uggggcuccgacaaaaaccc

SEQ ID NO: 903249 - RNA, 21 nt, Human
uggggcuccgacaaaaaccca

SEQ ID NO: 903250 - RNA, 24 nt, Human
ugucuggggaggggagcagcggcg

SEQ ID NO: 903251 - RNA, 26 nt, Human
aaaaaacaaacauccauuacucaaaa

SEQ ID NO: 903252 - RNA, 24 nt, Human
aaacacuauacaauaauccugcca

SEQ ID NO: 903253 - RNA, 23 nt, Human
aaacagaaacacaaaucagaauu

SEQ ID NO: 903254 - RNA, 19 nt, Human
aaacggguuuggcccaccc

SEQ ID NO: 903255 - RNA, 26 nt, Human
aagcaagaaguaaguuguuuccaggg

SEQ ID NO: 903256 - RNA, 24 nt, Human
aagcauauuccaaacacuauacaa

SEQ ID NO: 903257 - RNA, 21 nt, Human
aaggaaagaauauucuuuuca

SEQ ID NO: 903258 - RNA, 19 nt, Human
aaucacauuccaauuucua

SEQ ID NO: 903259 - RNA, 22 nt, Human
aauuacacaaaaaacaaacauc

SEQ ID NO: 903260 - RNA, 24 nt, Human
acaaaaguuuuaaaaaccaucuuc

SEQ ID NO: 903261 - RNA, 23 nt, Human
acagauucaaauaauccuaugca

SEQ ID NO: 903262 - RNA, 19 nt, Human
acauuuuucaaguuuuguc

SEQ ID NO: 903263 - RNA, 20 nt, Human
accucucuaaccagagcuaa

SEQ ID NO: 903264 - RNA, 21 nt, Human
agugucagaaguaacagaacc

SEQ ID NO: 903265 - RNA, 25 nt, Human
aucuagaaaaguaauucccagucau

SEQ ID NO: 903266 - RNA, 20 nt, Human
augaagcaagaaaaagacag

SEQ ID NO: 903267 - RNA, 19 nt, Human
auguacacauuugugugca

SEQ ID NO: 903268 - RNA, 18 nt, Human
auguauuuugugcuuaag

SEQ ID NO: 903269 - RNA, 27 nt, Human
caaaaaacaaacauccauuacucaaaa

SEQ ID NO: 903270 - RNA, 25 nt, Human
caaaacagaaacacaaaucagaauu

SEQ ID NO: 903271 - RNA, 23 nt, Human
caaaaugaaugucaaaaauauuc

SEQ ID NO: 903272 - RNA, 25 nt, Human
caaacacuauacaauaauccugcca

SEQ ID NO: 903273 - RNA, 19 nt, Human
caaagucaaaacagaaaca

SEQ ID NO: 903274 - RNA, 24 nt, Human
caagaaaaagacagcaaauauuaa

SEQ ID NO: 903275 - RNA, 23 nt, Human
caaggcaagugcuaauuucucca

SEQ ID NO: 903276 - RNA, 18 nt, Human
cacaaaaaacaaacaucc

SEQ ID NO: 903277 - RNA, 19 nt, Human
cacaaaaaacaaacaucca

SEQ ID NO: 903278 - RNA, 24 nt, Human
caccccugggcguucgaacagucc

SEQ ID NO: 903279 - RNA, 23 nt, Human
cagaacccaacaguucuauauua

SEQ ID NO: 903280 - RNA, 22 nt, Human
cauaaaacaaaaguugagacag

SEQ ID NO: 903281 - RNA, 27 nt, Human
caucugaaaaacauauuuuacaaccuu

SEQ ID NO: 903282 - RNA, 24 nt, Human
ccaacccugaaaagagauaugcau

SEQ ID NO: 903283 - RNA, 21 nt, Human
cucugaaacuaaccucucuaa

SEQ ID NO: 903284 - RNA, 22 nt, Human
cuucaagaggcaaucaaaaaga

SEQ ID NO: 903285 - RNA, 22 nt, Human
cuuucugacagacuuacucuaa

SEQ ID NO: 903286 - RNA, 22 nt, Human
gaaugucaaaaauauucaagcu

SEQ ID NO: 903287 - RNA, 22 nt, Human
gaugauauaacuuaaggaaaga

SEQ ID NO: 903288 - RNA, 20 nt, Human
guaacaauuaaaaaauaaaa

SEQ ID NO: 903289 - RNA, 19 nt, Human
gugcuaauuucuccaaccc

SEQ ID NO: 903290 - RNA, 21 nt, Human
gugggcuacuuucaucucuaa

SEQ ID NO: 903291 - RNA, 18 nt, Human
guucuccuaucuaucucc

SEQ ID NO: 903292 - RNA, 24 nt, Human
uaaaacaaaaguugagacagcauu

SEQ ID NO: 903293 - RNA, 23 nt, Human
uaacuuaucaaagcauauuccaa

SEQ ID NO: 903294 - RNA, 22 nt, Human
uacaaccaggcguucuccuauc

SEQ ID NO: 903295 - RNA, 18 nt, Human
uacuauaaaucacauucc

SEQ ID NO: 903296 - RNA, 24 nt, Human
uacucuaaugaagcaagaaaaaga

SEQ ID NO: 903297 - RNA, 23 nt, Human
uacuuuacacuuuuaccaaauac

SEQ ID NO: 903298 - RNA, 22 nt, Human
uagaucauuacuuauaagcucc

SEQ ID NO: 903299 - RNA, 21 nt, Human
ucaaagucaaaacagaaacac

SEQ ID NO: 903300 - RNA, 21 nt, Human
ucagaaguaacagaacccaac

SEQ ID NO: 903301 - RNA, 19 nt, Human
ucagaauuuuaaccuugag

SEQ ID NO: 903302 - RNA, 23 nt, Human
ucaucugaaaaacauauuuuacu

SEQ ID NO: 903303 - RNA, 24 nt, Human
uccaacaguaguaagaucuuuaac

SEQ ID NO: 903304 - RNA, 19 nt, Human
uccacagaagcgggcaaag

SEQ ID NO: 903305 - RNA, 19 nt, Human
uccauuacucaaaacaaua

SEQ ID NO: 903306 - RNA, 21 nt, Human
ucccuggauuccugguuuccu

SEQ ID NO: 903307 - RNA, 25 nt, Human
ucccuggauuccugguuuuccgaug

SEQ ID NO: 903308 - RNA, 23 nt, Human
ucuaugucaaaacuucaagaggc

SEQ ID NO: 903309 - RNA, 22 nt, Human
ugacaguauugguuugugaaua

SEQ ID NO: 903310 - RNA, 18 nt, Human
ugaguaguuucaaaaaaa

SEQ ID NO: 903311 - RNA, 23 nt, Human
uggaaagacacaagcaagaagua

SEQ ID NO: 903312 - RNA, 23 nt, Human
uguacacauuugugugcauuuuc

SEQ ID NO: 903313 - RNA, 22 nt, Human
ugucagaaguaacagaacccaa

SEQ ID NO: 903314 - RNA, 21 nt, Human
uuaaguuauuuauucauuggc

SEQ ID NO: 903315 - RNA, 22 nt, Human
uucaaagucaaaacagaaacac

SEQ ID NO: 903316 - RNA, 24 nt, Human
uucaaauaauccuaugcauacugc

SEQ ID NO: 903317 - RNA, 18 nt, Human
uucauuggcacucuaaua

SEQ ID NO: 903318 - RNA, 20 nt, Human
uuccaggguuuuuaaagcuu

SEQ ID NO: 903319 - RNA, 23 nt, Human
uuccugagugucagaaguaacag

SEQ ID NO: 903320 - RNA, 19 nt, Human
uucuccuaucuaucuccag

SEQ ID NO: 903321 - RNA, 24 nt, Human
uuguacuacaauauauaguauaaa

SEQ ID NO: 903322 - RNA, 22 nt, Human
uuuaaaaaugacucauuugugg

SEQ ID NO: 903323 - RNA, 19 nt, Human
aaacacagugcaacacugc

SEQ ID NO: 903324 - RNA, 21 nt, Human
aacacuuuucuggcaaagaca

SEQ ID NO: 903325 - RNA, 20 nt, Human
accgcuugcccgccaccugg

SEQ ID NO: 903326 - RNA, 19 nt, Human
acuaaaaaaaaaaaaaaaa

SEQ ID NO: 903327 - RNA, 19 nt, Human
auccagucacuuacuggca

SEQ ID NO: 903328 - RNA, 20 nt, Human
caaauccuaaagaccccgcc

SEQ ID NO: 903329 - RNA, 22 nt, Human
caccuggcacuccgggcacccc

SEQ ID NO: 903330 - RNA, 27 nt, Human
cuggcaaaccaaaggugggaacaauug

SEQ ID NO: 903331 - RNA, 30 nt, Human
gcauuuuaacuaaaaaaaaaaaaaaaaaaa

SEQ ID NO: 903332 - RNA, 20 nt, Human
uagaucucaaagcuccagaa

SEQ ID NO: 903333 - RNA, 18 nt, Human
ucucaaagcuccagaaag

SEQ ID NO: 903334 - RNA, 21 nt, Human
ucucaaagcuccagaaaggaa

SEQ ID NO: 903335 - RNA, 24 nt, Human
ugaacacaaaugugccaagaaucc

SEQ ID NO: 903336 - RNA, 19 nt, Human
ugugccaagaauccaguca

SEQ ID NO: 903337 - RNA, 26 nt, Human
uuccuggagcugcaaauccuaaagac

SEQ ID NO: 903338 - RNA, 23 nt, Human
uuguuuuuaaagaaaaaaaaauc

SEQ ID NO: 903339 - RNA, 18 nt, Human
uuugucagaauagcugac

SEQ ID NO: 903340 - RNA, 19 nt, Human
uuuucuggcaaagacaaag

SEQ ID NO: 903341 - RNA, 18 nt, Human
uuuuuuuuuuuuuuuuug

SEQ ID NO: 903342 - RNA, 25 nt, Human
uuuuuuuuuuuuuuuuuuguuuuuu

SEQ ID NO: 903343 - RNA, 19 nt, Human
aguggcaccagaaaaaccc

SEQ ID NO: 903344 - RNA, 22 nt, Human
aguggcaccagaaaaacccauc

SEQ ID NO: 903345 - RNA, 18 nt, Human
caaacuagcuccugaaga

SEQ ID NO: 903346 - RNA, 21 nt, Human
caccagaaaaacccaucucca

SEQ ID NO: 903347 - RNA, 23 nt, Human
caccagaaaaacccaucuccaaa

SEQ ID NO: 903348 - RNA, 19 nt, Human
cagcccaggugucaguggc

SEQ ID NO: 903349 - RNA, 19 nt, Human
cgcugcgccccugcacaaa

SEQ ID NO: 903350 - RNA, 21 nt, Human
gaaaaacccaucuccaaacua

SEQ ID NO: 903351 - RNA, 23 nt, Human
gcaccagaaaaacccaucuccaa

SEQ ID NO: 903352 - RNA, 18 nt, Human
ugggcagcccagguguca

SEQ ID NO: 903353 - RNA, 24 nt, Human
aaccauauucauguuugcguuuuc

SEQ ID NO: 903354 - RNA, 23 nt, Human
agcagugaguggaggguccuggg

SEQ ID NO: 903355 - RNA, 22 nt, Human
ccuuuucuucaguacagggcag

SEQ ID NO: 903356 - RNA, 18 nt, Human
cucaagaauugauaguug

SEQ ID NO: 903357 - RNA, 24 nt, Human
cucuccaaccauauucauguuugc

SEQ ID NO: 903358 - RNA, 25 nt, Human
gaugacggaggcugccccuagagga

SEQ ID NO: 903359 - RNA, 19 nt, Human
gucucuuaacugguucugg

SEQ ID NO: 903360 - RNA, 18 nt, Human
uaacugguucuggugagg

SEQ ID NO: 903361 - RNA, 23 nt, Human
uaggagcagagacauuucuugau

SEQ ID NO: 903362 - RNA, 23 nt, Human
uccauuaaggccuugugcucccc

SEQ ID NO: 903363 - RNA, 18 nt, Human
ucuuaacugguucuggug

SEQ ID NO: 903364 - RNA, 21 nt, Human
uguggcagucaccaucgugcc

SEQ ID NO: 903365 - RNA, 21 nt, Human
aagcuccagccccuggagguc

SEQ ID NO: 903366 - RNA, 19 nt, Human
acaggcagucccagagacc

SEQ ID NO: 903367 - RNA, 18 nt, Human
aggcagaguccucaccua

SEQ ID NO: 903368 - RNA, 22 nt, Human
aggcuggggaguggccugcuuc

SEQ ID NO: 903369 - RNA, 22 nt, Human
caaaacccaguccaaacucagu

SEQ ID NO: 903370 - RNA, 23 nt, Human
caaacuauaaagaaaccugcucu

SEQ ID NO: 903371 - RNA, 24 nt, Human
cacaacggcacaggcagucccaga

SEQ ID NO: 903372 - RNA, 22 nt, Human
caccaaagugaccucggcccug

SEQ ID NO: 903373 - RNA, 18 nt, Human
cagcaggcuggggagugg

SEQ ID NO: 903374 - RNA, 18 nt, Human
cagcccacuccccucucc

SEQ ID NO: 903375 - RNA, 24 nt, Human
cagcccacuccccucuccugcugc

SEQ ID NO: 903376 - RNA, 21 nt, Human
cagcgggggcaggcaccccuc

SEQ ID NO: 903377 - RNA, 20 nt, Human
ccaccuggugacucccgucc

SEQ ID NO: 903378 - RNA, 20 nt, Human
cccagcucuggccaguccca

SEQ ID NO: 903379 - RNA, 22 nt, Human
ccccuggagguccaaaacccag

SEQ ID NO: 903380 - RNA, 19 nt, Human
ccguccacagcucccagcu

SEQ ID NO: 903381 - RNA, 21 nt, Human
ccucugaaggcugcgugacuc

SEQ ID NO: 903382 - RNA, 19 nt, Human
ccuggcuuggccccaccac

SEQ ID NO: 903383 - RNA, 22 nt, Human
cgcucuggagccucaggcagag

SEQ ID NO: 903384 - RNA, 22 nt, Human
cucaagcuauucuccaugaacu

SEQ ID NO: 903385 - RNA, 20 nt, Human
cucagucccuuuagaaagcu

SEQ ID NO: 903386 - RNA, 25 nt, Human
cucccguccacagcucccagcuacc

SEQ ID NO: 903387 - RNA, 24 nt, Human
cugccaccaaagugaccucggccc

SEQ ID NO: 903388 - RNA, 22 nt, Human
cugcugcgauuccagcgcagcu

SEQ ID NO: 903389 - RNA, 22 nt, Human
cugcuucuaagccauuugcccu

SEQ ID NO: 903390 - RNA, 21 nt, Human
cuggaggggcugcccacaacg

SEQ ID NO: 903391 - RNA, 25 nt, Human
cugguggcuggugcugacccuuccc

SEQ ID NO: 903392 - RNA, 23 nt, Human
gaacugccaccaaagugaccucg

SEQ ID NO: 903393 - RNA, 19 nt, Human
gagcacagugagugcuggc

SEQ ID NO: 903394 - RNA, 20 nt, Human
gcaccggagcuccugaguca

SEQ ID NO: 903395 - RNA, 19 nt, Human
gcagagccccaggcagagu

SEQ ID NO: 903396 - RNA, 20 nt, Human
gcagaguccucaccuaaggg

SEQ ID NO: 903397 - RNA, 20 nt, Human
gcugcagcaccggagcuccu

SEQ ID NO: 903398 - RNA, 19 nt, Human
ggaaccaucagcagagccc

SEQ ID NO: 903399 - RNA, 19 nt, Human
ggccagucccaggcuggcc

SEQ ID NO: 903400 - RNA, 24 nt, Human
ggccccaccaccuggugacucccg

SEQ ID NO: 903401 - RNA, 20 nt, Human
ggcugcccacaacggcacag

SEQ ID NO: 903402 - RNA, 18 nt, Human
gggcccagcucuggccag

SEQ ID NO: 903403 - RNA, 21 nt, Human
gugaaccauuuauuuccaaac

SEQ ID NO: 903404 - RNA, 20 nt, Human
gugccucugaaggcugcgug

SEQ ID NO: 903405 - RNA, 24 nt, Human
ucagcgggggcaggcaccccucuu

SEQ ID NO: 903406 - RNA, 20 nt, Human
uccaaaacccaguccaaacu

SEQ ID NO: 903407 - RNA, 23 nt, Human
ucccagcuaccaugaugagcccu

SEQ ID NO: 903408 - RNA, 22 nt, Human
ucggcccugggagcuccaggcc

SEQ ID NO: 903409 - RNA, 19 nt, Human
ucuccaggcuggaggagcu

SEQ ID NO: 903410 - RNA, 22 nt, Human
ucuccaggcuggaggagcucuc

SEQ ID NO: 903411 - RNA, 22 nt, Human
ucuccaugaacugccaccaaag

SEQ ID NO: 903412 - RNA, 21 nt, Human
ucucggcugucagagccuggg

SEQ ID NO: 903413 - RNA, 21 nt, Human
ugacucccguccacagcuccc

SEQ ID NO: 903414 - RNA, 24 nt, Human
ugagucccuggcuuggccccacca

SEQ ID NO: 903415 - RNA, 18 nt, Human
ugagugcuggcagcaggc

SEQ ID NO: 903416 - RNA, 23 nt, Human
uggaggggcugcccacaacggca

SEQ ID NO: 903417 - RNA, 23 nt, Human
uggagguccaaaacccaguccaa

SEQ ID NO: 903418 - RNA, 19 nt, Human
uggcagcaggcuggggagu

SEQ ID NO: 903419 - RNA, 22 nt, Human
uggccuggugcucgccccuugu

SEQ ID NO: 903420 - RNA, 22 nt, Human
uggcggcugcagcaccggagcu

SEQ ID NO: 903421 - RNA, 22 nt, Human
ugggaaguggugggaagaacca

SEQ ID NO: 903422 - RNA, 25 nt, Human
ugguggcuggugcugacccuuccca

SEQ ID NO: 903423 - RNA, 19 nt, Human
ugucagagccugggaagug

SEQ ID NO: 903424 - RNA, 27 nt, Human
ugucuugucaccucaagcuauucucca

SEQ ID NO: 903425 - RNA, 18 nt, Human
ugugaccaggcucugaag

SEQ ID NO: 903426 - RNA, 18 nt, Human
uuuuuuuuuuuuuuuuug

SEQ ID NO: 903427 - RNA, 18 nt, Human
acuuagaagaaaagacaa

SEQ ID NO: 903428 - RNA, 21 nt, Human
acuuagaagaaaagacaaggg

SEQ ID NO: 903429 - RNA, 18 nt, Human
aggcuuccaacaugucac

SEQ ID NO: 903430 - RNA, 22 nt, Human
caacaugucacuuagaagaaaa

SEQ ID NO: 903431 - RNA, 21 nt, Human
gccccgggaugagaaggcuuc

SEQ ID NO: 903432 - RNA, 22 nt, Human
uagaagaaaagacaaggguuuu

SEQ ID NO: 903433 - RNA, 26 nt, Human
ucccugguuucugacaccagaggggc

SEQ ID NO: 903434 - RNA, 18 nt, Human
uggaaaagagauuggccu

SEQ ID NO: 903435 - RNA, 22 nt, Human
uggguucuuguguuuacaguuu

SEQ ID NO: 903436 - RNA, 19 nt, Human
ugucacuuagaagaaaaga

SEQ ID NO: 903437 - RNA, 22 nt, Human
aggaaaguaggaggccaguagc

SEQ ID NO: 903438 - RNA, 21 nt, Human
ccaguagcaaaccccucccag

SEQ ID NO: 903439 - RNA, 23 nt, Human
ccccuggggaacccgguggcacc

SEQ ID NO: 903440 - RNA, 20 nt, Human
cgggucggaggccaggacag

SEQ ID NO: 903441 - RNA, 21 nt, Human
cgguggcacccgcccugagga

SEQ ID NO: 903442 - RNA, 19 nt, Human
gugagcccugcgugcgccu

SEQ ID NO: 903443 - RNA, 19 nt, Human
ucacagagcagggcgggcg

SEQ ID NO: 903444 - RNA, 24 nt, Human
uccccuggggaacccgguggcacc

SEQ ID NO: 903445 - RNA, 22 nt, Human
ucucuagaggagcacuguccac

SEQ ID NO: 903446 - RNA, 21 nt, Human
uguuuuccuguuguuuuuaau

SEQ ID NO: 903447 - RNA, 20 nt, Human
aaaaggcccaagccaucccc

SEQ ID NO: 903448 - RNA, 24 nt, Human
aacccucuacucccagccccugcu

SEQ ID NO: 903449 - RNA, 20 nt, Human
aagccaucccccugagcacc

SEQ ID NO: 903450 - RNA, 19 nt, Human
aaucaccugagccccacag

SEQ ID NO: 903451 - RNA, 21 nt, Human
acagagagggacuguccugga

SEQ ID NO: 903452 - RNA, 26 nt, Human
acccauccuucuccuucuacugccag

SEQ ID NO: 903453 - RNA, 22 nt, Human
acccugaggccccagaaacccu

SEQ ID NO: 903454 - RNA, 19 nt, Human
agaggcuauggggucuggc

SEQ ID NO: 903455 - RNA, 18 nt, Human
agggcuucuguccagucu

SEQ ID NO: 903456 - RNA, 19 nt, Human
augcaugccaugugugugu

SEQ ID NO: 903457 - RNA, 23 nt, Human
cagaaacccucuacucccagccc

SEQ ID NO: 903458 - RNA, 23 nt, Human
caugcaugccauguguguguggu

SEQ ID NO: 903459 - RNA, 20 nt, Human
ccagaaacccucuacuccca

SEQ ID NO: 903460 - RNA, 19 nt, Human
cccacagugggacuauggc

SEQ ID NO: 903461 - RNA, 20 nt, Human
cccagaaacccucuacuccc

SEQ ID NO: 903462 - RNA, 20 nt, Human
ccccagaaacccucuacucc

SEQ ID NO: 903463 - RNA, 21 nt, Human
ccccagaaacccucuacuccc

SEQ ID NO: 903464 - RNA, 18 nt, Human
ccccugagcaccagagcc

SEQ ID NO: 903465 - RNA, 19 nt, Human
ccccugagcaccagagccu

SEQ ID NO: 903466 - RNA, 19 nt, Human
cccugagcaccagagccuc

SEQ ID NO: 903467 - RNA, 22 nt, Human
cccugaggccccagaaacccuc

SEQ ID NO: 903468 - RNA, 19 nt, Human
ccucauggggcucuuggga

SEQ ID NO: 903469 - RNA, 18 nt, Human
ccuucuacugccaggaau

SEQ ID NO: 903470 - RNA, 23 nt, Human
cggugcgcaugugcguacaugca

SEQ ID NO: 903471 - RNA, 21 nt, Human
cuauggggucuggcccuucuc

SEQ ID NO: 903472 - RNA, 21 nt, Human
cuauggggucuggcccuucuc

SEQ ID NO: 903473 - RNA, 20 nt, Human
cugauagcuguugcuuuccc

SEQ ID NO: 903474 - RNA, 19 nt, Human
gacugaacuccagacauac

SEQ ID NO: 903475 - RNA, 21 nt, Human
gagaaaaggcccaagccaucc

SEQ ID NO: 903476 - RNA, 19 nt, Human
gagagaaaaggcccaagcc

SEQ ID NO: 903477 - RNA, 22 nt, Human
gagccccacagaggaggggacu

SEQ ID NO: 903478 - RNA, 23 nt, Human
gaggccccagaaacccucuacuc

SEQ ID NO: 903479 - RNA, 28 nt, Human
gccccagaaacccucuacucccagcccc

SEQ ID NO: 903480 - RNA, 20 nt, Human
gccgaggagguugccccagg

SEQ ID NO: 903481 - RNA, 21 nt, Human
ggauccuagaccaugcuaaug

SEQ ID NO: 903482 - RNA, 22 nt, Human
guagagaaauguuucauccaca

SEQ ID NO: 903483 - RNA, 21 nt, Human
uacaugcaugccaugugugug

SEQ ID NO: 903484 - RNA, 21 nt, Human
uacaugcaugccaugugugug

SEQ ID NO: 903485 - RNA, 20 nt, Human
uacugccaggaaucuaagag

SEQ ID NO: 903486 - RNA, 19 nt, Human
ucccagaacccugaggccc

SEQ ID NO: 903487 - RNA, 21 nt, Human
ucucucugauagcuguugcuu

SEQ ID NO: 903488 - RNA, 20 nt, Human
ucugauagcuguugcuuucc

SEQ ID NO: 903489 - RNA, 23 nt, Human
ugaacuccagacauacagggucc

SEQ ID NO: 903490 - RNA, 18 nt, Human
ugcaugccaugugugugu

SEQ ID NO: 903491 - RNA, 19 nt, Human
ugccccagggcuucugucc

SEQ ID NO: 903492 - RNA, 22 nt, Human
ugccccagggcuucuguccagu

SEQ ID NO: 903493 - RNA, 21 nt, Human
ugcguacaugcaugccaugug

SEQ ID NO: 903494 - RNA, 26 nt, Human
ugcguacaugcaugccaugugugugg

SEQ ID NO: 903495 - RNA, 20 nt, Human
ugcuguagcagaugcgcuga

SEQ ID NO: 903496 - RNA, 19 nt, Human
ugggaagauaaaaugcugu

SEQ ID NO: 903497 - RNA, 21 nt, Human
ugggaagauaaaaugcuguag

SEQ ID NO: 903498 - RNA, 20 nt, Human
ugugugugugguguuugcag

SEQ ID NO: 903499 - RNA, 22 nt, Human
uguuucauccacauuucaauca

SEQ ID NO: 903500 - RNA, 27 nt, Human
uucccagaacccugaggccccagaaac

SEQ ID NO: 903501 - RNA, 21 nt, Human
uucuccuucuacugccaggaa

SEQ ID NO: 903502 - RNA, 18 nt, Human
uugcagggagaggugguc

SEQ ID NO: 903503 - RNA, 21 nt, Human
uuuacccauccuucuccuucu

SEQ ID NO: 903504 - RNA, 23 nt, Human
uuucccagaacccugaggcccca

SEQ ID NO: 903505 - RNA, 19 nt, Human
aaaaaaccaaaggcccuug

SEQ ID NO: 903506 - RNA, 20 nt, Human
aaccuauuacccuucuccuu

SEQ ID NO: 903507 - RNA, 18 nt, Human
aacucuggaaaaaaccaa

SEQ ID NO: 903508 - RNA, 19 nt, Human
aagacaccaggacuugugg

SEQ ID NO: 903509 - RNA, 20 nt, Human
aagaggaaagugggcaaacc

SEQ ID NO: 903510 - RNA, 24 nt, Human
acagagcuguguauaauaacagcc

SEQ ID NO: 903511 - RNA, 22 nt, Human
accaaccuauuacccuucucca

SEQ ID NO: 903512 - RNA, 22 nt, Human
accccacccccagcccauucac

SEQ ID NO: 903513 - RNA, 23 nt, Human
accuauuacccuucuccauucag

SEQ ID NO: 903514 - RNA, 23 nt, Human
acucuuucaaaaaaaauugggga

SEQ ID NO: 903515 - RNA, 19 nt, Human
acuucuuccuaguuccccc

SEQ ID NO: 903516 - RNA, 23 nt, Human
agagagcuauggaggguuccuac

SEQ ID NO: 903517 - RNA, 20 nt, Human
agagcccucaugccccuuuc

SEQ ID NO: 903518 - RNA, 23 nt, Human
aggccaaaaagggaguggcuguu

SEQ ID NO: 903519 - RNA, 21 nt, Human
agggaagcaugaggccuggug

SEQ ID NO: 903520 - RNA, 24 nt, Human
aucauccuccuaugaggagaacuc

SEQ ID NO: 903521 - RNA, 28 nt, Human
caaaaacacucaggccuggagaaggcca

SEQ ID NO: 903522 - RNA, 21 nt, Human
caaauuauggcugcuggauaa

SEQ ID NO: 903523 - RNA, 23 nt, Human
caccccacccccagcccauucac

SEQ ID NO: 903524 - RNA, 21 nt, Human
cagcccauucacugcaaccaa

SEQ ID NO: 903525 - RNA, 21 nt, Human
cagcuguucuuccuaagaaca

SEQ ID NO: 903526 - RNA, 22 nt, Human
caugccccuuucuggcucgaag

SEQ ID NO: 903527 - RNA, 22 nt, Human
cccacacaucagggcagagagc

SEQ ID NO: 903528 - RNA, 22 nt, Human
cccagcccauucacugcaacca

SEQ ID NO: 903529 - RNA, 28 nt, Human
ccccaaaaagaggaaagugggcaaaccc

SEQ ID NO: 903530 - RNA, 19 nt, Human
cccccagcccauucacugc

SEQ ID NO: 903531 - RNA, 18 nt, Human
cccucuucucucuagucc

SEQ ID NO: 903532 - RNA, 19 nt, Human
ccuauuacccuucuccauu

SEQ ID NO: 903533 - RNA, 23 nt, Human
ccuuacuucuuugaggaccccaa

SEQ ID NO: 903534 - RNA, 19 nt, Human
cuaaaccauaguucacacc

SEQ ID NO: 903535 - RNA, 22 nt, Human
cuaacucuggaaaaaaccaaag

SEQ ID NO: 903536 - RNA, 19 nt, Human
cuauggguuccuucuucuu

SEQ ID NO: 903537 - RNA, 18 nt, Human
cuccuaugaggagaacuc

SEQ ID NO: 903538 - RNA, 22 nt, Human
cucgcaagagcccucaugcccc

SEQ ID NO: 903539 - RNA, 19 nt, Human
cucuuucccaugugggcac

SEQ ID NO: 903540 - RNA, 24 nt, Human
gacuuguggagcuggugucuccag

SEQ ID NO: 903541 - RNA, 20 nt, Human
gcuggacacaaaaacacuca

SEQ ID NO: 903542 - RNA, 25 nt, Human
ggagaacucuuucaaaaaaaauugg

SEQ ID NO: 903543 - RNA, 23 nt, Human
ggaggccaaaaagggaguggcug

SEQ ID NO: 903544 - RNA, 18 nt, Human
ggaguucucccagacucu

SEQ ID NO: 903545 - RNA, 19 nt, Human
ggcagagagcuauggaggg

SEQ ID NO: 903546 - RNA, 20 nt, Human
gggacaaaugcauaauugag

SEQ ID NO: 903547 - RNA, 19 nt, Human
guucucccagacucuguuc

SEQ ID NO: 903548 - RNA, 23 nt, Human
uaaaaauaucaggguuugcccuc

SEQ ID NO: 903549 - RNA, 24 nt, Human
uaaagacaccaggacuuguggagc

SEQ ID NO: 903550 - RNA, 26 nt, Human
uaaagacaccaggacuuguggagcug

SEQ ID NO: 903551 - RNA, 21 nt, Human
uaaagggaagcaugaggccug

SEQ ID NO: 903552 - RNA, 21 nt, Human
uagucaacauugccaaaauuc

SEQ ID NO: 903553 - RNA, 23 nt, Human
ucaaaaaaaauuggggaucaaaa

SEQ ID NO: 903554 - RNA, 23 nt, Human
ucacugcaaccaaccuauuaccc

SEQ ID NO: 903555 - RNA, 22 nt, Human
ucccaugugggcacuuugggau

SEQ ID NO: 903556 - RNA, 19 nt, Human
ucccucuucucucuagucc

SEQ ID NO: 903557 - RNA, 22 nt, Human
ucuaacucuggaaaaaaccaaa

SEQ ID NO: 903558 - RNA, 20 nt, Human
ucucugcuuggacucuguuu

SEQ ID NO: 903559 - RNA, 23 nt, Human
ugagcuggacacaaaaacacuca

SEQ ID NO: 903560 - RNA, 24 nt, Human
ugaggaccccaacacagggcugaa

SEQ ID NO: 903561 - RNA, 19 nt, Human
uggaaaaaaccaaaggccc

SEQ ID NO: 903562 - RNA, 21 nt, Human
uggaaacuugaaccuucuaaa

SEQ ID NO: 903563 - RNA, 18 nt, Human
ugggguuggggacaaauc

SEQ ID NO: 903564 - RNA, 21 nt, Human
uguauaauaacagccauuaua

SEQ ID NO: 903565 - RNA, 22 nt, Human
uuaaagggaagcaugaggccug

SEQ ID NO: 903566 - RNA, 23 nt, Human
uucacugcaaccaaccuauuacc

SEQ ID NO: 903567 - RNA, 18 nt, Human
uuccucaagcugauccuu

SEQ ID NO: 903568 - RNA, 23 nt, Human
uuggugaucccuuccaguccucu

SEQ ID NO: 903569 - RNA, 21 nt, Human
uuuaaagacaccaggacuugu

SEQ ID NO: 903570 - RNA, 22 nt, Human
aaggacuuggcccuggcagggg

SEQ ID NO: 903571 - RNA, 27 nt, Human
acaaaacacugaugauaaacauggcag

SEQ ID NO: 903572 - RNA, 20 nt, Human
acccugggaugucccagcac

SEQ ID NO: 903573 - RNA, 23 nt, Human
accuccuuccuccaccccuccag

SEQ ID NO: 903574 - RNA, 18 nt, Human
acggaccguaagcugcaa

SEQ ID NO: 903575 - RNA, 18 nt, Human
agggaagggcugucggcg

SEQ ID NO: 903576 - RNA, 23 nt, Human
agggaagggcugucggcgcugcc

SEQ ID NO: 903577 - RNA, 23 nt, Human
agggcuggaccggcacacgccgg

SEQ ID NO: 903578 - RNA, 25 nt, Human
auggaguuuccccucccuugugccc

SEQ ID NO: 903579 - RNA, 23 nt, Human
caccagcuccugccccgcccccu

SEQ ID NO: 903580 - RNA, 23 nt, Human
cacccggauggggugcuaugauu

SEQ ID NO: 903581 - RNA, 21 nt, Human
caccgcguggccgagcagaaa

SEQ ID NO: 903582 - RNA, 18 nt, Human
caccuccuuccuccaccc

SEQ ID NO: 903583 - RNA, 20 nt, Human
caccuccuuccuccaccccu

SEQ ID NO: 903584 - RNA, 22 nt, Human
caccuccuuccuccaccccucc

SEQ ID NO: 903585 - RNA, 26 nt, Human
caccuccuuccuccaccccuccaggg

SEQ ID NO: 903586 - RNA, 18 nt, Human
cacuggcgagggaagggc

SEQ ID NO: 903587 - RNA, 18 nt, Human
cagcacagugggagaagg

SEQ ID NO: 903588 - RNA, 23 nt, Human
cagcggccacuuguccacuugcu

SEQ ID NO: 903589 - RNA, 19 nt, Human
cagcuccugccccgccccc

SEQ ID NO: 903590 - RNA, 18 nt, Human
caggacccaguccuacca

SEQ ID NO: 903591 - RNA, 19 nt, Human
caguacaaaaauacaaaac

SEQ ID NO: 903592 - RNA, 20 nt, Human
caguacaaaaauacaaaaca

SEQ ID NO: 903593 - RNA, 27 nt, Human
caguucccaggacccuggguucgggag

SEQ ID NO: 903594 - RNA, 19 nt, Human
caucggacaggagggugcc

SEQ ID NO: 903595 - RNA, 21 nt, Human
cauggcgcucucgacagucug

SEQ ID NO: 903596 - RNA, 22 nt, Human
cauguaccccacugggaacaag

SEQ ID NO: 903597 - RNA, 23 nt, Human
ccaaacccacagaaccugacugg

SEQ ID NO: 903598 - RNA, 19 nt, Human
ccaacccaggaguggccga

SEQ ID NO: 903599 - RNA, 20 nt, Human
ccaaugccaaguaaaaaggg

SEQ ID NO: 903600 - RNA, 21 nt, Human
ccacagcacccagugggcgcc

SEQ ID NO: 903601 - RNA, 24 nt, Human
ccacagcacccagugggcgccucu

SEQ ID NO: 903602 - RNA, 18 nt, Human
ccagcaccuuugaugcug

SEQ ID NO: 903603 - RNA, 22 nt, Human
ccagggucugggaauguucucu

SEQ ID NO: 903604 - RNA, 22 nt, Human
cccaacaccuccuuccuccacc

SEQ ID NO: 903605 - RNA, 24 nt, Human
cccaacaccuccuuccuccacccc

SEQ ID NO: 903606 - RNA, 18 nt, Human
cccacagaaccugacugg

SEQ ID NO: 903607 - RNA, 20 nt, Human
cccagcaccuuugaugcugc

SEQ ID NO: 903608 - RNA, 24 nt, Human
cccagcaccuuugaugcugcccaa

SEQ ID NO: 903609 - RNA, 22 nt, Human
cccccgggaucugcaguuccca

SEQ ID NO: 903610 - RNA, 21 nt, Human
ccccgcccccuccugagccca

SEQ ID NO: 903611 - RNA, 19 nt, Human
ccccgugccuggcucauuc

SEQ ID NO: 903612 - RNA, 21 nt, Human
ccccuccuggugcccuaaccc

SEQ ID NO: 903613 - RNA, 21 nt, Human
cccgcccuggcugaagcuaga

SEQ ID NO: 903614 - RNA, 21 nt, Human
cccuccugagcccacagcacc

SEQ ID NO: 903615 - RNA, 19 nt, Human
cccuggcugaagcuagagg

SEQ ID NO: 903616 - RNA, 19 nt, Human
cccuggguucgggagaagg

SEQ ID NO: 903617 - RNA, 19 nt, Human
ccgcagugaggaaauguug

SEQ ID NO: 903618 - RNA, 22 nt, Human
ccggccggcagcuccuucucaa

SEQ ID NO: 903619 - RNA, 18 nt, Human
ccuaacccuuggcuccac

SEQ ID NO: 903620 - RNA, 22 nt, Human
ccuaacccuuggcuccacuguc

SEQ ID NO: 903621 - RNA, 19 nt, Human
ccuccuggugcccuaaccc

SEQ ID NO: 903622 - RNA, 21 nt, Human
ccugauucuggggacagaugc

SEQ ID NO: 903623 - RNA, 18 nt, Human
ccugccccguggcccucu

SEQ ID NO: 903624 - RNA, 23 nt, Human
cgacugagaccccucugccacag

SEQ ID NO: 903625 - RNA, 21 nt, Human
cggacaggagggugccccggg

SEQ ID NO: 903626 - RNA, 22 nt, Human
cggcacacgccggcucaggagg

SEQ ID NO: 903627 - RNA, 26 nt, Human
cggcucaggagggugccagggucugg

SEQ ID NO: 903628 - RNA, 19 nt, Human
cgggucagaaauaucccgc

SEQ ID NO: 903629 - RNA, 19 nt, Human
cuccugagcccacagcacc

SEQ ID NO: 903630 - RNA, 24 nt, Human
cugaauccccccgggaucugcagu

SEQ ID NO: 903631 - RNA, 22 nt, Human
cugagcccacagcacccagugg

SEQ ID NO: 903632 - RNA, 19 nt, Human
cugaggacccugugcccag

SEQ ID NO: 903633 - RNA, 22 nt, Human
cuguccuguccucagcuccgug

SEQ ID NO: 903634 - RNA, 23 nt, Human
cuuggcuccacugucgcgcggcg

SEQ ID NO: 903635 - RNA, 20 nt, Human
gacaggagggugccccgggg

SEQ ID NO: 903636 - RNA, 19 nt, Human
gccaccuggccccuccugg

SEQ ID NO: 903637 - RNA, 27 nt, Human
gcccgcacagcggccacuuguccacca

SEQ ID NO: 903638 - RNA, 23 nt, Human
gcgcggcggcuguggagcguggc

SEQ ID NO: 903639 - RNA, 21 nt, Human
gcggcggcuguggagcguggc

SEQ ID NO: 903640 - RNA, 21 nt, Human
gcucauuucccgggggcugag

SEQ ID NO: 903641 - RNA, 22 nt, Human
gcucauuucccgggggcugaga

SEQ ID NO: 903642 - RNA, 25 nt, Human
gcuccugccccgcccccuccugagc

SEQ ID NO: 903643 - RNA, 21 nt, Human
gcugggcagaguugaggucgu

SEQ ID NO: 903644 - RNA, 21 nt, Human
ggagcguggccccggccggca

SEQ ID NO: 903645 - RNA, 21 nt, Human
ggauggaucucaccacccugg

SEQ ID NO: 903646 - RNA, 18 nt, Human
ggcaggggcucacaugua

SEQ ID NO: 903647 - RNA, 19 nt, Human
ggcucuguuugggaagugg

SEQ ID NO: 903648 - RNA, 22 nt, Human
ggcuggaccggcacacgccggc

SEQ ID NO: 903649 - RNA, 27 nt, Human
gggaaguggauucugccugauucuggg

SEQ ID NO: 903650 - RNA, 19 nt, Human
gggacagaugcugccgacg

SEQ ID NO: 903651 - RNA, 26 nt, Human
gggcagaguugaggucgucggagggg

SEQ ID NO: 903652 - RNA, 20 nt, Human
gggcuggaccggcacacgcc

SEQ ID NO: 903653 - RNA, 22 nt, Human
gggugcagaacaaggcuugaca

SEQ ID NO: 903654 - RNA, 19 nt, Human
ggugccagggucugggaau

SEQ ID NO: 903655 - RNA, 23 nt, Human
gugcccaucuguccccgaguggc

SEQ ID NO: 903656 - RNA, 22 nt, Human
guucccucagugggcccugccc

SEQ ID NO: 903657 - RNA, 18 nt, Human
uaaagugcuccgauacuc

SEQ ID NO: 903658 - RNA, 22 nt, Human
uaagcugcaacagcucacuaca

SEQ ID NO: 903659 - RNA, 22 nt, Human
uacaaauaaaaucgggcuccaa

SEQ ID NO: 903660 - RNA, 23 nt, Human
uacccgcccuggcugaagcuaga

SEQ ID NO: 903661 - RNA, 20 nt, Human
ucacaggagugccucugcca

SEQ ID NO: 903662 - RNA, 21 nt, Human
ucagugggcccugccccgugg

SEQ ID NO: 903663 - RNA, 24 nt, Human
uccacuugcugcaacgucucuagg

SEQ ID NO: 903664 - RNA, 21 nt, Human
ucccaggacccuggguucggg

SEQ ID NO: 903665 - RNA, 19 nt, Human
uccugagcccacagcaccc

SEQ ID NO: 903666 - RNA, 21 nt, Human
uccuugagcgaggcucggccc

SEQ ID NO: 903667 - RNA, 18 nt, Human
ucucaccacccugggaug

SEQ ID NO: 903668 - RNA, 25 nt, Human
ucucaggaccuugucaccaaugggc

SEQ ID NO: 903669 - RNA, 18 nt, Human
ugacggggggcggacagc

SEQ ID NO: 903670 - RNA, 21 nt, Human
ugacuaagaucaugaccacaa

SEQ ID NO: 903671 - RNA, 18 nt, Human
ugaggacccugugcccag

SEQ ID NO: 903672 - RNA, 22 nt, Human
ugauggaguuuccccucccuug

SEQ ID NO: 903673 - RNA, 25 nt, Human
ugccagggucugggaauguucucuu

SEQ ID NO: 903674 - RNA, 22 nt, Human
ugccaucggacaggagggugcc

SEQ ID NO: 903675 - RNA, 20 nt, Human
ugcccuugggaagcagaguu

SEQ ID NO: 903676 - RNA, 22 nt, Human
ugccucggaaaaacagcucgga

SEQ ID NO: 903677 - RNA, 20 nt, Human
uggccgaggggcacuggcga

SEQ ID NO: 903678 - RNA, 21 nt, Human
uggcugaagcuagaggcccgc

SEQ ID NO: 903679 - RNA, 24 nt, Human
ugggaaacagcugguuucaaaacc

SEQ ID NO: 903680 - RNA, 24 nt, Human
ugggaaguggauucugccugauuc

SEQ ID NO: 903681 - RNA, 21 nt, Human
uggggacaccuggccacugug

SEQ ID NO: 903682 - RNA, 20 nt, Human
uggggcucuguuugggaagu

SEQ ID NO: 903683 - RNA, 22 nt, Human
uggggcucuguuugggaagugg

SEQ ID NO: 903684 - RNA, 24 nt, Human
uggggugcagaacaaggcuugaca

SEQ ID NO: 903685 - RNA, 22 nt, Human
ugucccagcaccuuugaugcug

SEQ ID NO: 903686 - RNA, 20 nt, Human
uguggagcguggccccggcc

SEQ ID NO: 903687 - RNA, 20 nt, Human
uucccgggggcugaggaccc

SEQ ID NO: 903688 - RNA, 22 nt, Human
uuuccauuaaaaacuuuccuug

SEQ ID NO: 903689 - RNA, 23 nt, Human
aaaaagaaaaccaaucacauuaa

SEQ ID NO: 903690 - RNA, 20 nt, Human
aaacaaaaagaaaaccaauc

SEQ ID NO: 903691 - RNA, 24 nt, Human
aaacaaaaagaaaaccaaucacau

SEQ ID NO: 903692 - RNA, 22 nt, Human
aaagucacaaauuuugcaaagu

SEQ ID NO: 903693 - RNA, 22 nt, Human
aacucggcggccacuccagccc

SEQ ID NO: 903694 - RNA, 22 nt, Human
aagaagacaacuucccccgccc

SEQ ID NO: 903695 - RNA, 22 nt, Human
aagacaacuucccccgcccucc

SEQ ID NO: 903696 - RNA, 18 nt, Human
aaucuauuaucugacuua

SEQ ID NO: 903697 - RNA, 20 nt, Human
acaaaaagaaaaccaaucac

SEQ ID NO: 903698 - RNA, 22 nt, Human
acaaaaagaaaaccaaucacau

SEQ ID NO: 903699 - RNA, 22 nt, Human
acaacgaaugaacuaaggcaaa

SEQ ID NO: 903700 - RNA, 18 nt, Human
acauugccucauuugcuu

SEQ ID NO: 903701 - RNA, 18 nt, Human
accaccgccuccaacucg

SEQ ID NO: 903702 - RNA, 21 nt, Human
agacaacuucccccgcccucc

SEQ ID NO: 903703 - RNA, 20 nt, Human
agcauugucaccacaugccu

SEQ ID NO: 903704 - RNA, 22 nt, Human
aguaaacaacgaaugaacuaag

SEQ ID NO: 903705 - RNA, 26 nt, Human
aguaaacaacgaaugaacuaaggcaa

SEQ ID NO: 903706 - RNA, 19 nt, Human
auacuaaaucugaguugua

SEQ ID NO: 903707 - RNA, 20 nt, Human
aucuuuauuuuccauggagg

SEQ ID NO: 903708 - RNA, 21 nt, Human
augguauauuuuugguguuug

SEQ ID NO: 903709 - RNA, 18 nt, Human
caccacaugccuuaaaau

SEQ ID NO: 903710 - RNA, 18 nt, Human
caccgccuccaacucggc

SEQ ID NO: 903711 - RNA, 19 nt, Human
cacucauucuaagcugucc

SEQ ID NO: 903712 - RNA, 33 nt, Human
cacuccuacugcugccaccaccgccuccaacua

SEQ ID NO: 903713 - RNA, 24 nt, Human
cacucuacacacuccuacugcugc

SEQ ID NO: 903714 - RNA, 19 nt, Human
cacugugugucagcauccu

SEQ ID NO: 903715 - RNA, 23 nt, Human
ccaaucccgcacucuacacacug

SEQ ID NO: 903716 - RNA, 21 nt, Human
ccaccagguuuaccggccccu

SEQ ID NO: 903717 - RNA, 21 nt, Human
ccgcacucuacacacuccuac

SEQ ID NO: 903718 - RNA, 19 nt, Human
ccggaaaaaaaagaagaca

SEQ ID NO: 903719 - RNA, 21 nt, Human
cgaaugaacuaaggcaaauag

SEQ ID NO: 903720 - RNA, 20 nt, Human
cgccuccaacucggcggcca

SEQ ID NO: 903721 - RNA, 21 nt, Human
cggccccuccggaaaaaaaag

SEQ ID NO: 903722 - RNA, 21 nt, Human
cuggcccccaaucccgcacuc

SEQ ID NO: 903723 - RNA, 19 nt, Human
cuuaauagugaauguuuuc

SEQ ID NO: 903724 - RNA, 18 nt, Human
gcauugucaccacaugcc

SEQ ID NO: 903725 - RNA, 22 nt, Human
gcugccaccaccgccuccaacu

SEQ ID NO: 903726 - RNA, 19 nt, Human
uaaggcaaauagcauuguc

SEQ ID NO: 903727 - RNA, 22 nt, Human
uacacacuccuacugcugccac

SEQ ID NO: 903728 - RNA, 23 nt, Human
uacacauucaaucaaauguguua

SEQ ID NO: 903729 - RNA, 19 nt, Human
uagcuuaaaacaaaaagaa

SEQ ID NO: 903730 - RNA, 25 nt, Human
uagcuuaaaacaaaaagaaaaccaa

SEQ ID NO: 903731 - RNA, 24 nt, Human
uagugaauguuuuccaccugguuu

SEQ ID NO: 903732 - RNA, 21 nt, Human
uauggaaugcagccauaugua

SEQ ID NO: 903733 - RNA, 21 nt, Human
ucacugagguauggaaugcag

SEQ ID NO: 903734 - RNA, 25 nt, Human
ucagauggauuuaaauaaaagaugu

SEQ ID NO: 903735 - RNA, 25 nt, Human
uccuacugcugccaccaccgccucc

SEQ ID NO: 903736 - RNA, 18 nt, Human
ugaacuguuaacuugaaa

SEQ ID NO: 903737 - RNA, 22 nt, Human
ugaauguuuuccaccugguuuc

SEQ ID NO: 903738 - RNA, 23 nt, Human
uggcaacauuacaaaaauauauc

SEQ ID NO: 903739 - RNA, 19 nt, Human
uggcccccaaucccgcacu

SEQ ID NO: 903740 - RNA, 26 nt, Human
uuaaaacaaaaagaaaaccaaucaca

SEQ ID NO: 903741 - RNA, 26 nt, Human
uucaauacacauucaaucaaaugugu

SEQ ID NO: 903742 - RNA, 22 nt, Human
accacaccacugaccggaaacc

SEQ ID NO: 903743 - RNA, 23 nt, Human
cacugaccggaaaccgaucacgc

SEQ ID NO: 903744 - RNA, 20 nt, Human
aaacacaacaaucaugaaca

SEQ ID NO: 903745 - RNA, 25 nt, Human
aaacauuaaaaaauggaaaagauau

SEQ ID NO: 903746 - RNA, 22 nt, Human
aaaucaauccaaaauaagaaua

SEQ ID NO: 903747 - RNA, 19 nt, Human
aaaugacacucaugaucac

SEQ ID NO: 903748 - RNA, 22 nt, Human
aacaaaaaugacacucaugauc

SEQ ID NO: 903749 - RNA, 24 nt, Human
aacaaaaaugacacucaugaucac

SEQ ID NO: 903750 - RNA, 21 nt, Human
aaccuaauaaccaaaaaacuc

SEQ ID NO: 903751 - RNA, 19 nt, Human
aagaaacuuugggccuaaa

SEQ ID NO: 903752 - RNA, 21 nt, Human
aagaaacuuugggccuaaagu

SEQ ID NO: 903753 - RNA, 23 nt, Human
aaguaccaauaguuuaccauuug

SEQ ID NO: 903754 - RNA, 27 nt, Human
aaucacaaaauuaaauaauucuaccuu

SEQ ID NO: 903755 - RNA, 18 nt, Human
aaucuuucucuuuaucug

SEQ ID NO: 903756 - RNA, 20 nt, Human
acaaaaaaaugccaaaacaa

SEQ ID NO: 903757 - RNA, 22 nt, Human
acaaagcacugggaaaaaauca

SEQ ID NO: 903758 - RNA, 21 nt, Human
acaacaaucaugaacaaugca

SEQ ID NO: 903759 - RNA, 24 nt, Human
acaaggcaaaauuuuauuuuuuca

SEQ ID NO: 903760 - RNA, 20 nt, Human
acagaaauacaguguauagu

SEQ ID NO: 903761 - RNA, 23 nt, Human
acauucugauuguugcugcugaa

SEQ ID NO: 903762 - RNA, 18 nt, Human
agaaugucauuaguggaa

SEQ ID NO: 903763 - RNA, 21 nt, Human
aguacaaagcacugggaaaaa

SEQ ID NO: 903764 - RNA, 22 nt, Human
caaaaaacuccacuucuuccca

SEQ ID NO: 903765 - RNA, 23 nt, Human
caaacauuaaaaaauggaaaaga

SEQ ID NO: 903766 - RNA, 21 nt, Human
caacaaucaugaacaaugcac

SEQ ID NO: 903767 - RNA, 26 nt, Human
caauugcuggaacuaauggaccaaau

SEQ ID NO: 903768 - RNA, 26 nt, Human
cacacaaaaaaaugccaaaacaaaaa

SEQ ID NO: 903769 - RNA, 22 nt, Human
cacugaacugauuugaaaaagc

SEQ ID NO: 903770 - RNA, 19 nt, Human
caguugacaguacaaagca

SEQ ID NO: 903771 - RNA, 21 nt, Human
cauuuggccacccuccuuacu

SEQ ID NO: 903772 - RNA, 25 nt, Human
ccaaaaaacuccacuucuucccaga

SEQ ID NO: 903773 - RNA, 23 nt, Human
ccaaaagauaacaauggcuuuga

SEQ ID NO: 903774 - RNA, 18 nt, Human
ccuggagcugccaagaaa

SEQ ID NO: 903775 - RNA, 19 nt, Human
ccuuggauuucuauuucuc

SEQ ID NO: 903776 - RNA, 21 nt, Human
cgaccacugaacaucucuaua

SEQ ID NO: 903777 - RNA, 19 nt, Human
cuacaagaaagcaugguuu

SEQ ID NO: 903778 - RNA, 27 nt, Human
cucuguaagggaaaggacagcauuugg

SEQ ID NO: 903779 - RNA, 20 nt, Human
gaaaauuaaccuaauaacca

SEQ ID NO: 903780 - RNA, 18 nt, Human
gcaauguagaaacaaagc

SEQ ID NO: 903781 - RNA, 21 nt, Human
gccacccuccuuacuuuuggc

SEQ ID NO: 903782 - RNA, 24 nt, Human
gucuuaaaacacaacaaucaugaa

SEQ ID NO: 903783 - RNA, 23 nt, Human
guuuuaaagcucuuagagggcaa

SEQ ID NO: 903784 - RNA, 20 nt, Human
uaaaaagaagaguuauccac

SEQ ID NO: 903785 - RNA, 21 nt, Human
uaaaaagaagaguuauccaca

SEQ ID NO: 903786 - RNA, 19 nt, Human
uaaauguauagaccuggag

SEQ ID NO: 903787 - RNA, 20 nt, Human
uaacugaaaacaggcaacgu

SEQ ID NO: 903788 - RNA, 24 nt, Human
uacaaaaauaggagcaugucaaaa

SEQ ID NO: 903789 - RNA, 23 nt, Human
uaccaguguuaacugaaaacagg

SEQ ID NO: 903790 - RNA, 20 nt, Human
uaucuggcucuuuucucuuc

SEQ ID NO: 903791 - RNA, 20 nt, Human
ucaccaaaagauaacaaugg

SEQ ID NO: 903792 - RNA, 28 nt, Human
ucacugaacugauuugaaaaagccauau

SEQ ID NO: 903793 - RNA, 19 nt, Human
uccaacucucauguuagac

SEQ ID NO: 903794 - RNA, 19 nt, Human
ucuuucucuuuaucuggcu

SEQ ID NO: 903795 - RNA, 25 nt, Human
ugaaacagaucuauuugcucaaugu

SEQ ID NO: 903796 - RNA, 23 nt, Human
ugacaggaauagaaaauauuaaa

SEQ ID NO: 903797 - RNA, 23 nt, Human
ugaggauuaucaugaagauuugc

SEQ ID NO: 903798 - RNA, 20 nt, Human
ugcacccaauacucagauag

SEQ ID NO: 903799 - RNA, 22 nt, Human
ugcugaagcugugguuuuggaa

SEQ ID NO: 903800 - RNA, 23 nt, Human
ugcugacaucccauagauaauau

SEQ ID NO: 903801 - RNA, 22 nt, Human
uggaaaagauauuuaauguuua

SEQ ID NO: 903802 - RNA, 24 nt, Human
uggaaaaucaauccaaaauaagaa

SEQ ID NO: 903803 - RNA, 23 nt, Human
uggaagacuuaaaauuuaagggu

SEQ ID NO: 903804 - RNA, 23 nt, Human
uggagguagaaaacaaguaccaa

SEQ ID NO: 903805 - RNA, 25 nt, Human
uggcuucagccuuggauuucuauuu

SEQ ID NO: 903806 - RNA, 18 nt, Human
uggcuuugacuccaacuc

SEQ ID NO: 903807 - RNA, 24 nt, Human
ugggaaaaaaucacuuauuugggg

SEQ ID NO: 903808 - RNA, 25 nt, Human
ugucagaguaguuauguaaaccuaa

SEQ ID NO: 903809 - RNA, 24 nt, Human
uuaaaacacaacaaucaugaacaa

SEQ ID NO: 903810 - RNA, 24 nt, Human
uuacaaaaauaggagcaugucaaa

SEQ ID NO: 903811 - RNA, 21 nt, Human
uuaguucuacuaccauucauu

SEQ ID NO: 903812 - RNA, 20 nt, Human
uugcaauguagaaacaaagc

SEQ ID NO: 903813 - RNA, 20 nt, Human
uugcuaguuauaugcagcuu

SEQ ID NO: 903814 - RNA, 21 nt, Human
uuuaaucuuucucuuuaucug

SEQ ID NO: 903815 - RNA, 28 nt, Human
uuuggacauucugauuguugcugcugaa

SEQ ID NO: 903816 - RNA, 22 nt, Human
uuuuaagccaccaaaugcaccc

SEQ ID NO: 903817 - RNA, 25 nt, Human
uuuugcaauaggcuggguucacagu

SEQ ID NO: 903818 - RNA, 25 nt, Human
uuuuggagguagaaaacaaguacca

SEQ ID NO: 903819 - RNA, 23 nt, Human
uuuuuggagguagaaaacaagua

SEQ ID NO: 903820 - RNA, 22 nt, Human
aaagaggcagagcuucccgcua

SEQ ID NO: 903821 - RNA, 23 nt, Human
aggcagagcuucccgcuagucuu

SEQ ID NO: 903822 - RNA, 20 nt, Human
aggcaggggguggggaaggc

SEQ ID NO: 903823 - RNA, 23 nt, Human
aggcaggggguggggaaggcggu

SEQ ID NO: 903824 - RNA, 25 nt, Human
aggcaggggguggggaaggcggugg

SEQ ID NO: 903825 - RNA, 18 nt, Human
aggggguggggaaggcgg

SEQ ID NO: 903826 - RNA, 18 nt, Human
auggcaggcagggggugg

SEQ ID NO: 903827 - RNA, 21 nt, Human
cagaauggcaggcagggggug

SEQ ID NO: 903828 - RNA, 21 nt, Human
cauuuucggccaggcugagaa

SEQ ID NO: 903829 - RNA, 21 nt, Human
cggugacauuuggguggauac

SEQ ID NO: 903830 - RNA, 19 nt, Human
cugugcgcagcugcagugg

SEQ ID NO: 903831 - RNA, 21 nt, Human
gccccgaguucccucgcccac

SEQ ID NO: 903832 - RNA, 19 nt, Human
ggcaggcagggggugggga

SEQ ID NO: 903833 - RNA, 18 nt, Human
ggcguugagcaacccucu

SEQ ID NO: 903834 - RNA, 26 nt, Human
gggcguugagcaacccucuuugcuuc

SEQ ID NO: 903835 - RNA, 20 nt, Human
ucgccccgccuccgccacgc

SEQ ID NO: 903836 - RNA, 20 nt, Human
ugagaagaggucagaauggc

SEQ ID NO: 903837 - RNA, 21 nt, Human
ugagaagaggucagaauggca

SEQ ID NO: 903838 - RNA, 19 nt, Human
ugcagggucucaggggcgg

SEQ ID NO: 903839 - RNA, 18 nt, Human
ugggucugcucauuuccu

SEQ ID NO: 903840 - RNA, 20 nt, Human
ugggucugcucauuuccugc

SEQ ID NO: 903841 - RNA, 18 nt, Human
aaaaugaauggucagagc

SEQ ID NO: 903842 - RNA, 20 nt, Human
agggcaauuaacaaguccag

SEQ ID NO: 903843 - RNA, 18 nt, Human
caaaugagcaccaauguu

SEQ ID NO: 903844 - RNA, 20 nt, Human
caacuuccagaccacucucc

SEQ ID NO: 903845 - RNA, 27 nt, Human
caggggcccaggacacccccugagaaa

SEQ ID NO: 903846 - RNA, 22 nt, Human
caggguggcuucaguucaguga

SEQ ID NO: 903847 - RNA, 21 nt, Human
ccagaccacucucccauggcc

SEQ ID NO: 903848 - RNA, 22 nt, Human
ccagaccacucucccauggccu

SEQ ID NO: 903849 - RNA, 23 nt, Human
ccagacuacauuuucuaauaccc

SEQ ID NO: 903850 - RNA, 23 nt, Human
ccaggacacccccugaggcgcag

SEQ ID NO: 903851 - RNA, 23 nt, Human
cccacaguaaguaucaccaaagg

SEQ ID NO: 903852 - RNA, 24 nt, Human
cccccacaucagagccauccaacc

SEQ ID NO: 903853 - RNA, 18 nt, Human
ccccugaggcgcagcugc

SEQ ID NO: 903854 - RNA, 22 nt, Human
ccgaugauguauagugguaaau

SEQ ID NO: 903855 - RNA, 25 nt, Human
cugaggcgcagcugcacagaucucu

SEQ ID NO: 903856 - RNA, 19 nt, Human
cugcaaguggucccccucc

SEQ ID NO: 903857 - RNA, 21 nt, Human
cugcaccccacucugaauccc

SEQ ID NO: 903858 - RNA, 21 nt, Human
gagcaccaauguuggcaugaa

SEQ ID NO: 903859 - RNA, 20 nt, Human
gaggcgcagcugcacagauc

SEQ ID NO: 903860 - RNA, 21 nt, Human
gcccugguccacaauuucugu

SEQ ID NO: 903861 - RNA, 18 nt, Human
gcuccaggguggcuucag

SEQ ID NO: 903862 - RNA, 20 nt, Human
gguccuacaacuuccagacc

SEQ ID NO: 903863 - RNA, 20 nt, Human
guucagugacaaaugagcac

SEQ ID NO: 903864 - RNA, 18 nt, Human
uagguccuacaacuuccc

SEQ ID NO: 903865 - RNA, 18 nt, Human
uauagugguaaauaaagc

SEQ ID NO: 903866 - RNA, 23 nt, Human
ucaccaaaggaugucuuuggccu

SEQ ID NO: 903867 - RNA, 22 nt, Human
ucagccagacuacauuuucuaa

SEQ ID NO: 903868 - RNA, 21 nt, Human
ucaguucagugacaaaugagc

SEQ ID NO: 903869 - RNA, 22 nt, Human
uccuaaagugcuggcugagggc

SEQ ID NO: 903870 - RNA, 20 nt, Human
ucugcaccccacucugaauc

SEQ ID NO: 903871 - RNA, 22 nt, Human
ucugcaccccacucugaauccc

SEQ ID NO: 903872 - RNA, 20 nt, Human
ugacccaaggcaguacucgg

SEQ ID NO: 903873 - RNA, 18 nt, Human
uggcugagggcaauuaac

SEQ ID NO: 903874 - RNA, 21 nt, Human
uuagguccuacaacuuccaga

SEQ ID NO: 903875 - RNA, 23 nt, Human
uuuuuuuuuuuuuuuucucaugg

SEQ ID NO: 903876 - RNA, 22 nt, Human
aaacagaggcagggcccuaagc

SEQ ID NO: 903877 - RNA, 24 nt, Human
aaauacacagcucaccaagggcac

SEQ ID NO: 903878 - RNA, 22 nt, Human
acacagcucaccaagggcaccc

SEQ ID NO: 903879 - RNA, 18 nt, Human
acacccaagacaaaugac

SEQ ID NO: 903880 - RNA, 21 nt, Human
acacuuaguuuuuauuagcca

SEQ ID NO: 903881 - RNA, 20 nt, Human
accacagcagcaucguucug

SEQ ID NO: 903882 - RNA, 18 nt, Human
acccagucaccauucugu

SEQ ID NO: 903883 - RNA, 18 nt, Human
accccaaagaaagaagag

SEQ ID NO: 903884 - RNA, 18 nt, Human
acccugggcuacgcgacc

SEQ ID NO: 903885 - RNA, 23 nt, Human
aggaaauacacagcucaccaagg

SEQ ID NO: 903886 - RNA, 18 nt, Human
aucguucugccuccaccc

SEQ ID NO: 903887 - RNA, 19 nt, Human
augaaacagaggcagggcc

SEQ ID NO: 903888 - RNA, 23 nt, Human
augaaacagaggcagggcccuaa

SEQ ID NO: 903889 - RNA, 22 nt, Human
auuagccacaguuucccacagu

SEQ ID NO: 903890 - RNA, 24 nt, Human
auugccuguccacccucccacagu

SEQ ID NO: 903891 - RNA, 20 nt, Human
caaagggcuaccacagcagc

SEQ ID NO: 903892 - RNA, 21 nt, Human
caaagggcuaccacagcagca

SEQ ID NO: 903893 - RNA, 23 nt, Human
caagacaaaugacccaugcauca

SEQ ID NO: 903894 - RNA, 26 nt, Human
cacugaaccauugccuguccacccuc

SEQ ID NO: 903895 - RNA, 20 nt, Human
cacuuaguuuuuauuagcca

SEQ ID NO: 903896 - RNA, 21 nt, Human
cagccuggggcaugaggggcc

SEQ ID NO: 903897 - RNA, 21 nt, Human
cagcucaccaagggcacccag

SEQ ID NO: 903898 - RNA, 21 nt, Human
caugaaaggcaaagggcuacc

SEQ ID NO: 903899 - RNA, 20 nt, Human
cauugccuguccacccuccc

SEQ ID NO: 903900 - RNA, 21 nt, Human
ccaaagaaagaagagccagaa

SEQ ID NO: 903901 - RNA, 18 nt, Human
ccaagacaaaugacccau

SEQ ID NO: 903902 - RNA, 20 nt, Human
ccaagggcacccagucacca

SEQ ID NO: 903903 - RNA, 24 nt, Human
ccacccucccacaguggcuaaucc

SEQ ID NO: 903904 - RNA, 18 nt, Human
cccaaagaaagaagagcc

SEQ ID NO: 903905 - RNA, 21 nt, Human
cccaaagaaagaagagccaga

SEQ ID NO: 903906 - RNA, 24 nt, Human
cccaugcaucaugaaacagaggca

SEQ ID NO: 903907 - RNA, 22 nt, Human
cccuaagcugcccaagaggccu

SEQ ID NO: 903908 - RNA, 21 nt, Human
cuaaucccuggccuaguugua

SEQ ID NO: 903909 - RNA, 24 nt, Human
cucagguacagagaaccccaaaga

SEQ ID NO: 903910 - RNA, 21 nt, Human
cuuggaguuccugccaacagc

SEQ ID NO: 903911 - RNA, 26 nt, Human
gagaaccccaaagaaagaagagccag

SEQ ID NO: 903912 - RNA, 21 nt, Human
gcgcccccggcgggcuggggc

SEQ ID NO: 903913 - RNA, 20 nt, Human
gcgcugcgcccccggcgggc

SEQ ID NO: 903914 - RNA, 20 nt, Human
gcggcucgggcgcugcgccc

SEQ ID NO: 903915 - RNA, 19 nt, Human
gggauaggacacccaagac

SEQ ID NO: 903916 - RNA, 18 nt, Human
gggcccuaagcugcccaa

SEQ ID NO: 903917 - RNA, 19 nt, Human
guccuaggaggauguaagg

SEQ ID NO: 903918 - RNA, 21 nt, Human
uacacagcucaccaagggcac

SEQ ID NO: 903919 - RNA, 24 nt, Human
uacagagaaccccaaagaaagaag

SEQ ID NO: 903920 - RNA, 19 nt, Human
uaggaaauacacagcucac

SEQ ID NO: 903921 - RNA, 21 nt, Human
uaggacacccaagacaaauga

SEQ ID NO: 903922 - RNA, 19 nt, Human
uaggagagcugcuccagcc

SEQ ID NO: 903923 - RNA, 24 nt, Human
ucaagcaugggcaugaaaggcaaa

SEQ ID NO: 903924 - RNA, 21 nt, Human
ucccacaguggcuaaucccug

SEQ ID NO: 903925 - RNA, 20 nt, Human
uccucagguacagagaaccc

SEQ ID NO: 903926 - RNA, 20 nt, Human
ucgagggccgcggcucgggc

SEQ ID NO: 903927 - RNA, 22 nt, Human
ucggaugccuucugauuacugg

SEQ ID NO: 903928 - RNA, 19 nt, Human
ucguucugccuccacccug

SEQ ID NO: 903929 - RNA, 24 nt, Human
ucucggucccgucucgagggccgc

SEQ ID NO: 903930 - RNA, 19 nt, Human
ucucugagaccuucagcug

SEQ ID NO: 903931 - RNA, 19 nt, Human
ugagcagaucugcaaaguc

SEQ ID NO: 903932 - RNA, 20 nt, Human
ugaggggcccuagagcagga

SEQ ID NO: 903933 - RNA, 24 nt, Human
ugcagucggaugccuucugauuac

SEQ ID NO: 903934 - RNA, 23 nt, Human
ugcuccagccuggggcaugaggg

SEQ ID NO: 903935 - RNA, 21 nt, Human
uuagccacaguuucccacagu

SEQ ID NO: 903936 - RNA, 19 nt, Human
uuccucagguacagagaac

SEQ ID NO: 903937 - RNA, 22 nt, Human
uugcauggcugacacuguugcu

SEQ ID NO: 903938 - RNA, 27 nt, Human
uuuuuuuuuuuuuuuuuuuuuuugggg

SEQ ID NO: 903939 - RNA, 19 nt, Human
aaguggggcggccacagga

SEQ ID NO: 903940 - RNA, 22 nt, Human
acagagucccugcucuggggac

SEQ ID NO: 903941 - RNA, 23 nt, Human
accacgugcccagugugguguga

SEQ ID NO: 903942 - RNA, 19 nt, Human
accccccgccuuccccagg

SEQ ID NO: 903943 - RNA, 25 nt, Human
acccgcggaccccaacccgcccuuc

SEQ ID NO: 903944 - RNA, 26 nt, Human
accggcagugccgcgaggcauggagc

SEQ ID NO: 903945 - RNA, 22 nt, Human
accggcuuccccacacaugugc

SEQ ID NO: 903946 - RNA, 18 nt, Human
accguagccacgggcuaa

SEQ ID NO: 903947 - RNA, 19 nt, Human
agaggggagugcugggggc

SEQ ID NO: 903948 - RNA, 21 nt, Human
agagugaagggaccacuucug

SEQ ID NO: 903949 - RNA, 18 nt, Human
agaguuguuuucaaaugu

SEQ ID NO: 903950 - RNA, 23 nt, Human
agaugcaauuacggauuccacag

SEQ ID NO: 903951 - RNA, 18 nt, Human
agccagguucagcggggg

SEQ ID NO: 903952 - RNA, 21 nt, Human
agccaugagccccgccgcucc

SEQ ID NO: 903953 - RNA, 23 nt, Human
agcggaccaugcuggcugggagc

SEQ ID NO: 903954 - RNA, 18 nt, Human
agcuggccuguaggcaug

SEQ ID NO: 903955 - RNA, 18 nt, Human
aggagagguuaggcugag

SEQ ID NO: 903956 - RNA, 22 nt, Human
aggagcgccggcuucuccccag

SEQ ID NO: 903957 - RNA, 22 nt, Human
aggcagccaccgcaucuucuca

SEQ ID NO: 903958 - RNA, 22 nt, Human
agguggaggcuucucuguugag

SEQ ID NO: 903959 - RNA, 18 nt, Human
agugcugggggcauccgg

SEQ ID NO: 903960 - RNA, 21 nt, Human
augugccaggcgcccagcacc

SEQ ID NO: 903961 - RNA, 22 nt, Human
caacaccacagggaccggacau

SEQ ID NO: 903962 - RNA, 18 nt, Human
caacagaaccugucccuc

SEQ ID NO: 903963 - RNA, 18 nt, Human
caacagaaccugucccuc

SEQ ID NO: 903964 - RNA, 19 nt, Human
caagaugggagccaugagc

SEQ ID NO: 903965 - RNA, 21 nt, Human
caagaugggagccaugagccc

SEQ ID NO: 903966 - RNA, 23 nt, Human
caagggacaguggcagugugcca

SEQ ID NO: 903967 - RNA, 22 nt, Human
cacaggacaugaugccagccca

SEQ ID NO: 903968 - RNA, 24 nt, Human
caccgcaucuucucaggaaagcaa

SEQ ID NO: 903969 - RNA, 21 nt, Human
cacuuuggaaauggcugaggg

SEQ ID NO: 903970 - RNA, 24 nt, Human
cagagaaacccccacagacacugc

SEQ ID NO: 903971 - RNA, 18 nt, Human
cagccaccgcaucuucuc

SEQ ID NO: 903972 - RNA, 21 nt, Human
cagcccaacuccaccaucugc

SEQ ID NO: 903973 - RNA, 19 nt, Human
cagcccaggaugggggcug

SEQ ID NO: 903974 - RNA, 20 nt, Human
cagcccugagcuggcauccc

SEQ ID NO: 903975 - RNA, 23 nt, Human
cagccucgaucucauucacgaaa

SEQ ID NO: 903976 - RNA, 22 nt, Human
cagcgcucucccucugccuuuc

SEQ ID NO: 903977 - RNA, 19 nt, Human
cagcgggggcacagggcug

SEQ ID NO: 903978 - RNA, 18 nt, Human
caggacgggcagggugcc

SEQ ID NO: 903979 - RNA, 19 nt, Human
caggaucccagggugcucc

SEQ ID NO: 903980 - RNA, 23 nt, Human
caggcuucgggaccuggggagcc

SEQ ID NO: 903981 - RNA, 24 nt, Human
cauaaaaacaugcagaagagaaca

SEQ ID NO: 903982 - RNA, 20 nt, Human
ccacacccgucagccucccc

SEQ ID NO: 903983 - RNA, 23 nt, Human
ccacggacagaaaggagaaacgc

SEQ ID NO: 903984 - RNA, 27 nt, Human
ccacggcccagcaggucacacgugugg

SEQ ID NO: 903985 - RNA, 24 nt, Human
ccagacccgcucugagaacauagg

SEQ ID NO: 903986 - RNA, 21 nt, Human
ccagcccucagcggaccaugc

SEQ ID NO: 903987 - RNA, 18 nt, Human
ccaugagccccgccgcuc

SEQ ID NO: 903988 - RNA, 24 nt, Human
cccacagacaccucccacguccgg

SEQ ID NO: 903989 - RNA, 19 nt, Human
cccacgcagggcugcugug

SEQ ID NO: 903990 - RNA, 19 nt, Human
cccaggaugggggcugggg

SEQ ID NO: 903991 - RNA, 20 nt, Human
ccccaacccgcccuucccuc

SEQ ID NO: 903992 - RNA, 21 nt, Human
ccccaacccgcccuucccucc

SEQ ID NO: 903993 - RNA, 22 nt, Human
ccccacacaugugccaggcgcc

SEQ ID NO: 903994 - RNA, 19 nt, Human
ccccacagaccggaucagg

SEQ ID NO: 903995 - RNA, 19 nt, Human
cccccugcuggcagagaaa

SEQ ID NO: 903996 - RNA, 20 nt, Human
ccccucuggggcacccgucu

SEQ ID NO: 903997 - RNA, 18 nt, Human
cccgcccuucccuccguc

SEQ ID NO: 903998 - RNA, 20 nt, Human
ccgcccuggggcuucugcuc

SEQ ID NO: 903999 - RNA, 18 nt, Human
ccgcccuucccuccgucc

SEQ ID NO: 904000 - RNA, 20 nt, Human
ccgcccuucccuccguccug

SEQ ID NO: 904001 - RNA, 19 nt, Human
ccgcgcuggggccagggag

SEQ ID NO: 904002 - RNA, 22 nt, Human
ccgcugggggaggccgugccuc

SEQ ID NO: 904003 - RNA, 22 nt, Human
ccggcgccaggcucagcuccag

SEQ ID NO: 904004 - RNA, 18 nt, Human
ccgucugaguucugcccc

SEQ ID NO: 904005 - RNA, 19 nt, Human
ccgugacuguggggacugg

SEQ ID NO: 904006 - RNA, 22 nt, Human
ccguggaagcugccugccaggu

SEQ ID NO: 904007 - RNA, 18 nt, Human
ccucagggcuccuggaag

SEQ ID NO: 904008 - RNA, 21 nt, Human
ccuccuguugccaugacagcc

SEQ ID NO: 904009 - RNA, 18 nt, Human
ccucggagaccgcccccc

SEQ ID NO: 904010 - RNA, 19 nt, Human
ccucguccccacagaccgg

SEQ ID NO: 904011 - RNA, 20 nt, Human
ccucucccuccaggauccca

SEQ ID NO: 904012 - RNA, 24 nt, Human
ccugccagguccuccccauccuca

SEQ ID NO: 904013 - RNA, 23 nt, Human
ccuggaugggcucugcucagccc

SEQ ID NO: 904014 - RNA, 19 nt, Human
ccuggggcuucugcucugc

SEQ ID NO: 904015 - RNA, 21 nt, Human
cgaaacccacaggcguggccu

SEQ ID NO: 904016 - RNA, 24 nt, Human
cgccagguggccucacucugcccu

SEQ ID NO: 904017 - RNA, 20 nt, Human
cgcuggggccagggaggccg

SEQ ID NO: 904018 - RNA, 19 nt, Human
cgugggcaccaacccugga

SEQ ID NO: 904019 - RNA, 22 nt, Human
cgugggcaccaacccuggaagu

SEQ ID NO: 904020 - RNA, 18 nt, Human
cguucugcguggcuuggc

SEQ ID NO: 904021 - RNA, 19 nt, Human
cucaggcuucgggaccugg

SEQ ID NO: 904022 - RNA, 18 nt, Human
cuccagaaccacggccca

SEQ ID NO: 904023 - RNA, 21 nt, Human
cucccgacagaaccuauuccu

SEQ ID NO: 904024 - RNA, 21 nt, Human
cucccuaguguccugcucucc

SEQ ID NO: 904025 - RNA, 18 nt, Human
cucccucugccuuucucc

SEQ ID NO: 904026 - RNA, 18 nt, Human
cucguccccacagaccgg

SEQ ID NO: 904027 - RNA, 19 nt, Human
cucguccccacagaccgga

SEQ ID NO: 904028 - RNA, 21 nt, Human
cucugugccugccgugcggug

SEQ ID NO: 904029 - RNA, 22 nt, Human
cugaugcugagacacgaucagc

SEQ ID NO: 904030 - RNA, 20 nt, Human
cugcgagcaaacagggugca

SEQ ID NO: 904031 - RNA, 18 nt, Human
cugcucccugcgaggucg

SEQ ID NO: 904032 - RNA, 21 nt, Human
cuggcaguguggaguguccug

SEQ ID NO: 904033 - RNA, 19 nt, Human
cugucccugucuccucuug

SEQ ID NO: 904034 - RNA, 23 nt, Human
cugucccugucuccucuugucac

SEQ ID NO: 904035 - RNA, 22 nt, Human
cuucgggaccuggggagccacc

SEQ ID NO: 904036 - RNA, 22 nt, Human
cuuuggaaauggcugaggacgg

SEQ ID NO: 904037 - RNA, 28 nt, Human
gaaaggagaaacgcagccugugaccagg

SEQ ID NO: 904038 - RNA, 20 nt, Human
gaagggugcucuccuggcuc

SEQ ID NO: 904039 - RNA, 20 nt, Human
gacagcggguggccacaccc

SEQ ID NO: 904040 - RNA, 23 nt, Human
gagaaaagccugagggccgcugg

SEQ ID NO: 904041 - RNA, 23 nt, Human
gagguccauuuuuccuugcucuu

SEQ ID NO: 904042 - RNA, 19 nt, Human
gagucggggaggcgggugg

SEQ ID NO: 904043 - RNA, 21 nt, Human
gagugcugggggcauccggua

SEQ ID NO: 904044 - RNA, 24 nt, Human
gccacaggacaugaugccagccca

SEQ ID NO: 904045 - RNA, 22 nt, Human
gcccaacuccaccaucugcgcc

SEQ ID NO: 904046 - RNA, 24 nt, Human
gcccagcacccccgccagguggcc

SEQ ID NO: 904047 - RNA, 21 nt, Human
gcccuggggcuucugcucugc

SEQ ID NO: 904048 - RNA, 19 nt, Human
gccgccccccagcccccuc

SEQ ID NO: 904049 - RNA, 20 nt, Human
gccucacucugcccucugcc

SEQ ID NO: 904050 - RNA, 19 nt, Human
gccugccagguccucccca

SEQ ID NO: 904051 - RNA, 19 nt, Human
gcugcacacaggacaggcc

SEQ ID NO: 904052 - RNA, 19 nt, Human
gcugcuguggucagcccug

SEQ ID NO: 904053 - RNA, 22 nt, Human
gcuggcagagaaacccccacag

SEQ ID NO: 904054 - RNA, 18 nt, Human
gcugggguaggaggugau

SEQ ID NO: 904055 - RNA, 24 nt, Human
gcuguggugagucggugcuggccg

SEQ ID NO: 904056 - RNA, 22 nt, Human
gcuugggcaccccccgccuucc

SEQ ID NO: 904057 - RNA, 21 nt, Human
ggaaagcaggaaggccccgug

SEQ ID NO: 904058 - RNA, 21 nt, Human
ggagaccgccccccagcccuc

SEQ ID NO: 904059 - RNA, 18 nt, Human
ggagcaggagcgccggcu

SEQ ID NO: 904060 - RNA, 18 nt, Human
ggagcuguggccgcagca

SEQ ID NO: 904061 - RNA, 22 nt, Human
ggagggagagugggggcguggg

SEQ ID NO: 904062 - RNA, 23 nt, Human
ggaggggcaggagggaggccugg

SEQ ID NO: 904063 - RNA, 25 nt, Human
ggagugcugggggcauccgguagga

SEQ ID NO: 904064 - RNA, 21 nt, Human
ggaguguccuggaugggcucu

SEQ ID NO: 904065 - RNA, 22 nt, Human
ggcaaguggggcggccacagga

SEQ ID NO: 904066 - RNA, 23 nt, Human
ggcaggagggaggccugggccug

SEQ ID NO: 904067 - RNA, 21 nt, Human
ggccagagccugaccguagcc

SEQ ID NO: 904068 - RNA, 20 nt, Human
ggccgaggagggcaggaguc

SEQ ID NO: 904069 - RNA, 21 nt, Human
ggccgugacuguggggacugg

SEQ ID NO: 904070 - RNA, 19 nt, Human
ggccuaggguuugggaugc

SEQ ID NO: 904071 - RNA, 20 nt, Human
ggcgugaacagucuucucag

SEQ ID NO: 904072 - RNA, 23 nt, Human
ggcucuggaaaaguuuccccagg

SEQ ID NO: 904073 - RNA, 18 nt, Human
gggaagggcuguggugag

SEQ ID NO: 904074 - RNA, 21 nt, Human
gggaccaggaggcagcguccu

SEQ ID NO: 904075 - RNA, 21 nt, Human
gggagaguugaagaaggugcu

SEQ ID NO: 904076 - RNA, 18 nt, Human
gggagugcugggggcauc

SEQ ID NO: 904077 - RNA, 23 nt, Human
gggcaccccccgccuuccccagg

SEQ ID NO: 904078 - RNA, 22 nt, Human
gggcacccgucugaguucugcc

SEQ ID NO: 904079 - RNA, 19 nt, Human
gggcaggagggaggccugg

SEQ ID NO: 904080 - RNA, 21 nt, Human
gggcaggagggaggccugggc

SEQ ID NO: 904081 - RNA, 19 nt, Human
gggcaggaguccgagggug

SEQ ID NO: 904082 - RNA, 19 nt, Human
gggcggaggcucuucucgu

SEQ ID NO: 904083 - RNA, 22 nt, Human
ggggcacagggcugggcuuggg

SEQ ID NO: 904084 - RNA, 21 nt, Human
gguggugcccgggccgggcgg

SEQ ID NO: 904085 - RNA, 22 nt, Human
gguucagcgggggcacagggcu

SEQ ID NO: 904086 - RNA, 20 nt, Human
gugcccgggccgggcggagg

SEQ ID NO: 904087 - RNA, 23 nt, Human
guggccucacucugcccucugcc

SEQ ID NO: 904088 - RNA, 24 nt, Human
uaaaaauaaauaagcacucuggcg

SEQ ID NO: 904089 - RNA, 21 nt, Human
uaacucgugggcaccaacccu

SEQ ID NO: 904090 - RNA, 19 nt, Human
ucagcggaccaugcuggcu

SEQ ID NO: 904091 - RNA, 20 nt, Human
ucagugucccucguccccac

SEQ ID NO: 904092 - RNA, 20 nt, Human
uccaccaucugcgcccaaac

SEQ ID NO: 904093 - RNA, 20 nt, Human
uccaggaucccagggugcuc

SEQ ID NO: 904094 - RNA, 20 nt, Human
ucccacguccgguguggggc

SEQ ID NO: 904095 - RNA, 23 nt, Human
ucccgcaugucugagaaaagccu

SEQ ID NO: 904096 - RNA, 19 nt, Human
ucccuggggcccgggaugg

SEQ ID NO: 904097 - RNA, 20 nt, Human
uccgguaggaggaggggcag

SEQ ID NO: 904098 - RNA, 20 nt, Human
uccuggaaggugucugccgc

SEQ ID NO: 904099 - RNA, 19 nt, Human
uccuggcucccgcaugucu

SEQ ID NO: 904100 - RNA, 19 nt, Human
uccuguacugugagccugg

SEQ ID NO: 904101 - RNA, 21 nt, Human
uccuguguccuggugucaccc

SEQ ID NO: 904102 - RNA, 18 nt, Human
ucugcccucugcccagga

SEQ ID NO: 904103 - RNA, 19 nt, Human
ucugccuuucuccuuuccu

SEQ ID NO: 904104 - RNA, 21 nt, Human
ugacagggccugcucccugcg

SEQ ID NO: 904105 - RNA, 18 nt, Human
ugaccaggagacgcagcc

SEQ ID NO: 904106 - RNA, 20 nt, Human
ugaccaggagacgcagccca

SEQ ID NO: 904107 - RNA, 25 nt, Human
ugaccggcuuccccacacaugugcc

SEQ ID NO: 904108 - RNA, 18 nt, Human
ugagaacauaggcagcca

SEQ ID NO: 904109 - RNA, 20 nt, Human
ugagaggggagugcuggggg

SEQ ID NO: 904110 - RNA, 21 nt, Human
ugagccauuuugggagaguug

SEQ ID NO: 904111 - RNA, 22 nt, Human
ugagcucaccuccaggggccaa

SEQ ID NO: 904112 - RNA, 19 nt, Human
ugaggacccgcggacccca

SEQ ID NO: 904113 - RNA, 21 nt, Human
ugaggacccgcggaccccaac

SEQ ID NO: 904114 - RNA, 18 nt, Human
ugaggccaaccagggacc

SEQ ID NO: 904115 - RNA, 19 nt, Human
ugaggccaaccagggacca

SEQ ID NO: 904116 - RNA, 20 nt, Human
ugaggccaaccagggaccag

SEQ ID NO: 904117 - RNA, 19 nt, Human
ugaggugacauccuaaagg

SEQ ID NO: 904118 - RNA, 23 nt, Human
ugauccgcgagacacuuuggaaa

SEQ ID NO: 904119 - RNA, 20 nt, Human
ugcacacaggacaggccucg

SEQ ID NO: 904120 - RNA, 19 nt, Human
ugcagacaggcaagggcgg

SEQ ID NO: 904121 - RNA, 18 nt, Human
ugccaggcgcccagcacc

SEQ ID NO: 904122 - RNA, 19 nt, Human
ugccagguccuccccaucc

SEQ ID NO: 904123 - RNA, 21 nt, Human
ugcccacgcagggcugcugug

SEQ ID NO: 904124 - RNA, 23 nt, Human
ugcccaggaaagcaggaaggccc

SEQ ID NO: 904125 - RNA, 19 nt, Human
ugcccuggccagagccuga

SEQ ID NO: 904126 - RNA, 19 nt, Human
ugcucugcucagguagggg

SEQ ID NO: 904127 - RNA, 20 nt, Human
ugcucuuuauuuccaggcac

SEQ ID NO: 904128 - RNA, 23 nt, Human
ugcuggcagagaaacccccacag

SEQ ID NO: 904129 - RNA, 20 nt, Human
ugcuguggucagcccugagc

SEQ ID NO: 904130 - RNA, 19 nt, Human
ugcuugggcuguggcaaug

SEQ ID NO: 904131 - RNA, 24 nt, Human
uggagaagggugcucuccuggcuc

SEQ ID NO: 904132 - RNA, 20 nt, Human
uggagccgcgcuggggccag

SEQ ID NO: 904133 - RNA, 20 nt, Human
uggaggcuucucuguugagg

SEQ ID NO: 904134 - RNA, 19 nt, Human
uggaguguccuggaugggc

SEQ ID NO: 904135 - RNA, 21 nt, Human
uggcacagagcuggccuguag

SEQ ID NO: 904136 - RNA, 23 nt, Human
uggcagagaaacccccacagaca

SEQ ID NO: 904137 - RNA, 23 nt, Human
uggcaguguggaguguccuggau

SEQ ID NO: 904138 - RNA, 21 nt, Human
uggccacacccgucagccucc

SEQ ID NO: 904139 - RNA, 21 nt, Human
uggccgcagcaggugcacucu

SEQ ID NO: 904140 - RNA, 22 nt, Human
uggccuaggguuugggaugcac

SEQ ID NO: 904141 - RNA, 21 nt, Human
uggccuguaggcaugugugca

SEQ ID NO: 904142 - RNA, 18 nt, Human
uggcgugaacagucuucu

SEQ ID NO: 904143 - RNA, 25 nt, Human
uggcuuggccgugacuguggggacu

SEQ ID NO: 904144 - RNA, 23 nt, Human
ugggagaguugaagaaggugcuu

SEQ ID NO: 904145 - RNA, 26 nt, Human
uggggacaccggcagugccgcgaggc

SEQ ID NO: 904146 - RNA, 18 nt, Human
uggggccagggaggccga

SEQ ID NO: 904147 - RNA, 20 nt, Human
uggggcccgggauggagugg

SEQ ID NO: 904148 - RNA, 19 nt, Human
uggugcccgggccgggcgg

SEQ ID NO: 904149 - RNA, 19 nt, Human
uggugucacccccaacagg

SEQ ID NO: 904150 - RNA, 19 nt, Human
uggugucacccccgacagg

SEQ ID NO: 904151 - RNA, 19 nt, Human
uggugucacccccgacagg

SEQ ID NO: 904152 - RNA, 18 nt, Human
uggugucaccccugacag

SEQ ID NO: 904153 - RNA, 19 nt, Human
uggugucaccccugacagg

SEQ ID NO: 904154 - RNA, 24 nt, Human
uguccuggaugggcucugcucagc

SEQ ID NO: 904155 - RNA, 24 nt, Human
ugugaccgggcgauuccggugacc

SEQ ID NO: 904156 - RNA, 24 nt, Human
ugugaucgggcgauuccggugacc

SEQ ID NO: 904157 - RNA, 24 nt, Human
ugugaucgggcgauucuggugacc

SEQ ID NO: 904158 - RNA, 22 nt, Human
ugugaucgggugauuccgaacc

SEQ ID NO: 904159 - RNA, 23 nt, Human
ugugcacagguguguccauguga

SEQ ID NO: 904160 - RNA, 19 nt, Human
ugugcaguggggcugccgu

SEQ ID NO: 904161 - RNA, 19 nt, Human
uguggcaaugggaggucug

SEQ ID NO: 904162 - RNA, 21 nt, Human
uguggcaaugggaggucugcg

SEQ ID NO: 904163 - RNA, 25 nt, Human
uguggggacugggcugcccacgggg

SEQ ID NO: 904164 - RNA, 20 nt, Human
uguggucagcccugagcugg

SEQ ID NO: 904165 - RNA, 20 nt, Human
ugugugcgugccaagggaca

SEQ ID NO: 904166 - RNA, 21 nt, Human
uuaguucugccuuucacacgc

SEQ ID NO: 904167 - RNA, 19 nt, Human
uugagaggggagugcuggg

SEQ ID NO: 904168 - RNA, 23 nt, Human
uugcucuuuauuuccaggcacug

SEQ ID NO: 904169 - RNA, 22 nt, Human
uuucaacacaagggcuuuggag

SEQ ID NO: 904170 - RNA, 18 nt, Human
uuucuccuuuccugaugc

SEQ ID NO: 904171 - RNA, 20 nt, Human
uuugagaggggagugcuggg

SEQ ID NO: 904172 - RNA, 21 nt, Human
aaaccgaaggccaggaagaaa

SEQ ID NO: 904173 - RNA, 26 nt, Human
aagaaacagggcucaagcagugggca

SEQ ID NO: 904174 - RNA, 23 nt, Human
acaucggagagcacagaucuaga

SEQ ID NO: 904175 - RNA, 19 nt, Human
accagggcuccaggcugaa

SEQ ID NO: 904176 - RNA, 23 nt, Human
acccgucgcuucccccagaccuu

SEQ ID NO: 904177 - RNA, 23 nt, Human
acccuguucagugucugcaccuu

SEQ ID NO: 904178 - RNA, 25 nt, Human
agacagagccaggcaggccuuggga

SEQ ID NO: 904179 - RNA, 24 nt, Human
agagcacagaucuagagaaaugga

SEQ ID NO: 904180 - RNA, 28 nt, Human
agcacacaacacacaugcugaagguguu

SEQ ID NO: 904181 - RNA, 18 nt, Human
agccauuccccaccagga

SEQ ID NO: 904182 - RNA, 23 nt, Human
agcggguuggauaaugagagucc

SEQ ID NO: 904183 - RNA, 20 nt, Human
agcuguucacauacacagug

SEQ ID NO: 904184 - RNA, 19 nt, Human
agcuucuggcaaacugcuc

SEQ ID NO: 904185 - RNA, 22 nt, Human
aggaagaaacagggcucaagca

SEQ ID NO: 904186 - RNA, 21 nt, Human
aggcagcggguuggauaauga

SEQ ID NO: 904187 - RNA, 23 nt, Human
aggucugggggugggcccaggag

SEQ ID NO: 904188 - RNA, 24 nt, Human
auagaacuuucuuugacagugaaa

SEQ ID NO: 904189 - RNA, 21 nt, Human
auggcacggaccaugugugug

SEQ ID NO: 904190 - RNA, 23 nt, Human
auggcacggaccaugugugugug

SEQ ID NO: 904191 - RNA, 20 nt, Human
cacacagaucauacggccag

SEQ ID NO: 904192 - RNA, 18 nt, Human
cacacguaucuacugagc

SEQ ID NO: 904193 - RNA, 24 nt, Human
cacagaucauacggccagcccugg

SEQ ID NO: 904194 - RNA, 22 nt, Human
caccccaacccgagguagcuga

SEQ ID NO: 904195 - RNA, 19 nt, Human
cacccugagcuucuggcaa

SEQ ID NO: 904196 - RNA, 19 nt, Human
cacuguguggcacgugagc

SEQ ID NO: 904197 - RNA, 18 nt, Human
cagaucuagagaaaugga

SEQ ID NO: 904198 - RNA, 18 nt, Human
caggagccagaggucagc

SEQ ID NO: 904199 - RNA, 21 nt, Human
cagggcccaagcuguucacau

SEQ ID NO: 904200 - RNA, 18 nt, Human
cagggcggugcaggugga

SEQ ID NO: 904201 - RNA, 19 nt, Human
cagggcucaagcagggcug

SEQ ID NO: 904202 - RNA, 22 nt, Human
ccacccgucgcuucccccagac

SEQ ID NO: 904203 - RNA, 20 nt, Human
ccaggaagaaacagggcuca

SEQ ID NO: 904204 - RNA, 19 nt, Human
ccagggaaaccgaaggcca

SEQ ID NO: 904205 - RNA, 22 nt, Human
ccaguauggcagccacuaacca

SEQ ID NO: 904206 - RNA, 22 nt, Human
cccagccccagccauuccccac

SEQ ID NO: 904207 - RNA, 23 nt, Human
cccuggcugggacccaccagggc

SEQ ID NO: 904208 - RNA, 23 nt, Human
ccuggccccuuaggaagagcagg

SEQ ID NO: 904209 - RNA, 18 nt, Human
ccuggcugagaggguagg

SEQ ID NO: 904210 - RNA, 21 nt, Human
ccuggggaggccccucugccc

SEQ ID NO: 904211 - RNA, 21 nt, Human
cggugcagguggagccagagg

SEQ ID NO: 904212 - RNA, 21 nt, Human
cgugagcacacaacacacaug

SEQ ID NO: 904213 - RNA, 20 nt, Human
cucccaccccaacccgaggu

SEQ ID NO: 904214 - RNA, 20 nt, Human
cucugcucucagggugagcc

SEQ ID NO: 904215 - RNA, 23 nt, Human
cucugcucucagggugagccggg

SEQ ID NO: 904216 - RNA, 22 nt, Human
cugaagccucacgcugcaccca

SEQ ID NO: 904217 - RNA, 24 nt, Human
cugaagguguuugagacccuguuc

SEQ ID NO: 904218 - RNA, 21 nt, Human
cuggcaaacugcucucugccu

SEQ ID NO: 904219 - RNA, 20 nt, Human
gagcagggcggugcaggugg

SEQ ID NO: 904220 - RNA, 21 nt, Human
gagcccccugcacggccucuc

SEQ ID NO: 904221 - RNA, 21 nt, Human
gagcuggggcugagccacagg

SEQ ID NO: 904222 - RNA, 20 nt, Human
gaggucugggggugggccca

SEQ ID NO: 904223 - RNA, 23 nt, Human
gauaaugagaguccggagagaga

SEQ ID NO: 904224 - RNA, 18 nt, Human
gcacaggucucuccuacu

SEQ ID NO: 904225 - RNA, 21 nt, Human
gcacggaccaugugugugugc

SEQ ID NO: 904226 - RNA, 24 nt, Human
gcucccaccccaacccgagguagc

SEQ ID NO: 904227 - RNA, 19 nt, Human
gcuuuugguucaggagguc

SEQ ID NO: 904228 - RNA, 19 nt, Human
ggacccaccagggcuccag

SEQ ID NO: 904229 - RNA, 18 nt, Human
ggagccagaggacaggag

SEQ ID NO: 904230 - RNA, 18 nt, Human
ggagcggcugaggcuagg

SEQ ID NO: 904231 - RNA, 21 nt, Human
ggccaggaagaaacagggcuc

SEQ ID NO: 904232 - RNA, 23 nt, Human
ggguagggcucccucagggugug

SEQ ID NO: 904233 - RNA, 18 nt, Human
guugugugcaugagacac

SEQ ID NO: 904234 - RNA, 24 nt, Human
uaaguuccccagggaaaccgaagg

SEQ ID NO: 904235 - RNA, 24 nt, Human
uaaugagaguccggagagagaagc

SEQ ID NO: 904236 - RNA, 19 nt, Human
uaggaagagcagggcggug

SEQ ID NO: 904237 - RNA, 24 nt, Human
uaggaagagcagggcggugcaggu

SEQ ID NO: 904238 - RNA, 23 nt, Human
uaggucccagaauggccugggga

SEQ ID NO: 904239 - RNA, 25 nt, Human
ucacauacacaguguggaaggaugc

SEQ ID NO: 904240 - RNA, 19 nt, Human
ucagaacugagcccccugc

SEQ ID NO: 904241 - RNA, 22 nt, Human
ucaggaggucugggggugggcc

SEQ ID NO: 904242 - RNA, 21 nt, Human
uccacacagaucauacggcca

SEQ ID NO: 904243 - RNA, 23 nt, Human
ucccagaauggccuggggaguuu

SEQ ID NO: 904244 - RNA, 21 nt, Human
ucccucagggugugugggguc

SEQ ID NO: 904245 - RNA, 22 nt, Human
ucuggcaaacugcucucugccu

SEQ ID NO: 904246 - RNA, 18 nt, Human
ugaaaaugccccgagcug

SEQ ID NO: 904247 - RNA, 18 nt, Human
ugagcccccugcacggcc

SEQ ID NO: 904248 - RNA, 25 nt, Human
ugagcccccugcacggccucugcuc

SEQ ID NO: 904249 - RNA, 18 nt, Human
ugagccgggugccaccac

SEQ ID NO: 904250 - RNA, 19 nt, Human
ugagcuucuggcaaacugc

SEQ ID NO: 904251 - RNA, 20 nt, Human
ugaggcuaggguagggcucc

SEQ ID NO: 904252 - RNA, 24 nt, Human
ugccuggcugagaggguaggagac

SEQ ID NO: 904253 - RNA, 21 nt, Human
uggagccagaggacaggagcc

SEQ ID NO: 904254 - RNA, 23 nt, Human
uggagccagaggacaggagccag

SEQ ID NO: 904255 - RNA, 19 nt, Human
uggcaaacugcucucugcc

SEQ ID NO: 904256 - RNA, 22 nt, Human
uggcacacuuggagagaagccu

SEQ ID NO: 904257 - RNA, 21 nt, Human
uggcugggagggcuguccugg

SEQ ID NO: 904258 - RNA, 23 nt, Human
uggcuggggcucccaccccaacc

SEQ ID NO: 904259 - RNA, 18 nt, Human
ugggaggguccugcccag

SEQ ID NO: 904260 - RNA, 25 nt, Human
uggggcugagccacaggcagggagc

SEQ ID NO: 904261 - RNA, 19 nt, Human
ugggggcuuccuggccccu

SEQ ID NO: 904262 - RNA, 18 nt, Human
ugggggugggcccaggag

SEQ ID NO: 904263 - RNA, 23 nt, Human
uggguugugugcaugagacacug

SEQ ID NO: 904264 - RNA, 21 nt, Human
ugugcacguagguggugugua

SEQ ID NO: 904265 - RNA, 24 nt, Human
uguguacacuggguugugugcaug

SEQ ID NO: 904266 - RNA, 21 nt, Human
ugugugcacguagguggugug

SEQ ID NO: 904267 - RNA, 19 nt, Human
ugugugcaugagacacugu

SEQ ID NO: 904268 - RNA, 19 nt, Human
ugugugcaugagacacugu

SEQ ID NO: 904269 - RNA, 22 nt, Human
ugugugcaugagacacugugug

SEQ ID NO: 904270 - RNA, 19 nt, Human
uguuugcagggcccaagcc

SEQ ID NO: 904271 - RNA, 22 nt, Human
uuccccagggaaaccgaaggcc

SEQ ID NO: 904272 - RNA, 25 nt, Human
uucuuugacagugaaaaugccccga

SEQ ID NO: 904273 - RNA, 18 nt, Human
aaaaagacagccaugaug

SEQ ID NO: 904274 - RNA, 18 nt, Human
aaaaagacagccaugaug

SEQ ID NO: 904275 - RNA, 21 nt, Human
acgcacaaugcuauucccagu

SEQ ID NO: 904276 - RNA, 21 nt, Human
acguggaggucacuuugcucu

SEQ ID NO: 904277 - RNA, 21 nt, Human
agacguggaggucacuuugcu

SEQ ID NO: 904278 - RNA, 19 nt, Human
agccacggagaaaggaaga

SEQ ID NO: 904279 - RNA, 23 nt, Human
aggaagucauguuccccauuucu

SEQ ID NO: 904280 - RNA, 24 nt, Human
auccugggauucccaaaggcaugg

SEQ ID NO: 904281 - RNA, 19 nt, Human
aucucccccacuuuaauuc

SEQ ID NO: 904282 - RNA, 21 nt, Human
auggagcccuuuuccggacac

SEQ ID NO: 904283 - RNA, 18 nt, Human
ccagccacggagaaagga

SEQ ID NO: 904284 - RNA, 18 nt, Human
ccugggauucccaaaggc

SEQ ID NO: 904285 - RNA, 24 nt, Human
cugccaucucccccacuuuaauuc

SEQ ID NO: 904286 - RNA, 22 nt, Human
gccaucucccccacuuuaauuc

SEQ ID NO: 904287 - RNA, 21 nt, Human
gcccuuuuccggacacgcaca

SEQ ID NO: 904288 - RNA, 22 nt, Human
ggacacgcacaaugcuauuccc

SEQ ID NO: 904289 - RNA, 19 nt, Human
ggcaaaaagacagccauga

SEQ ID NO: 904290 - RNA, 22 nt, Human
ggcaaaaagacagccaugaugg

SEQ ID NO: 904291 - RNA, 18 nt, Human
uacagggcacugcggucc

SEQ ID NO: 904292 - RNA, 18 nt, Human
ucacugggugcuagacgg

SEQ ID NO: 904293 - RNA, 25 nt, Human
ucacugggugcuagacggcuggguu

SEQ ID NO: 904294 - RNA, 18 nt, Human
ucacuuugcucugugaug

SEQ ID NO: 904295 - RNA, 21 nt, Human
ucccagaaagcgucugccauc

SEQ ID NO: 904296 - RNA, 18 nt, Human
ucugagggaagcuguggc

SEQ ID NO: 904297 - RNA, 23 nt, Human
ugacggcaggggguggggcaaaa

SEQ ID NO: 904298 - RNA, 25 nt, Human
ugccaucucccccacuuuaauucug

SEQ ID NO: 904299 - RNA, 24 nt, Human
uggaaccaaauggagcccuuuucc

SEQ ID NO: 904300 - RNA, 23 nt, Human
uggccuaagggcaaacagcuggc

SEQ ID NO: 904301 - RNA, 21 nt, Human
uggguuuaggacagggccuga

SEQ ID NO: 904302 - RNA, 23 nt, Human
ugucagagaauacauaucuuggg

SEQ ID NO: 904303 - RNA, 20 nt, Human
uuaauucuguguacuggccu

SEQ ID NO: 904304 - RNA, 18 nt, Human
uuuuuuuuuuuuuuuuug

SEQ ID NO: 904305 - RNA, 19 nt, Human
aaacaaucccccuccccca

SEQ ID NO: 904306 - RNA, 22 nt, Human
aaccaggcaauugucuccaauc

SEQ ID NO: 904307 - RNA, 20 nt, Human
aagcaggugugggcccaaga

SEQ ID NO: 904308 - RNA, 21 nt, Human
aaggacuacacaggaagaggg

SEQ ID NO: 904309 - RNA, 21 nt, Human
aagggcuuugaggugaaaaga

SEQ ID NO: 904310 - RNA, 19 nt, Human
aaucaggugcacgugcccu

SEQ ID NO: 904311 - RNA, 19 nt, Human
acacaugcaucccugcagg

SEQ ID NO: 904312 - RNA, 20 nt, Human
accaagucuucaccugcccc

SEQ ID NO: 904313 - RNA, 18 nt, Human
acccugcaccaccccacu

SEQ ID NO: 904314 - RNA, 30 nt, Human
accuucaccuucagagcccaccuccccauu

SEQ ID NO: 904315 - RNA, 21 nt, Human
agagagaccuucaggcccaga

SEQ ID NO: 904316 - RNA, 18 nt, Human
agaguaggugccaggccu

SEQ ID NO: 904317 - RNA, 24 nt, Human
agauguacagccucccacagccuc

SEQ ID NO: 904318 - RNA, 20 nt, Human
agcagagcuugggccccaag

SEQ ID NO: 904319 - RNA, 18 nt, Human
agcagcugcccagacagc

SEQ ID NO: 904320 - RNA, 27 nt, Human
agccagggccucccucgagcagcugcc

SEQ ID NO: 904321 - RNA, 22 nt, Human
agccccaccccuggcccuccac

SEQ ID NO: 904322 - RNA, 20 nt, Human
agcucucuugcugucuuugc

SEQ ID NO: 904323 - RNA, 24 nt, Human
agcugcacagccccauguaggacc

SEQ ID NO: 904324 - RNA, 23 nt, Human
agcugcagggccucagucuucag

SEQ ID NO: 904325 - RNA, 18 nt, Human
aggaaagauuccaagggg

SEQ ID NO: 904326 - RNA, 21 nt, Human
aggaggcugccuagaaagggc

SEQ ID NO: 904327 - RNA, 18 nt, Human
aggaggguuugugcugac

SEQ ID NO: 904328 - RNA, 19 nt, Human
aggcagggccccgcccuuc

SEQ ID NO: 904329 - RNA, 19 nt, Human
aggcugcagcucucuugcu

SEQ ID NO: 904330 - RNA, 23 nt, Human
aggcugcagcucucuugcugucu

SEQ ID NO: 904331 - RNA, 21 nt, Human
agggcagcaggguucugagca

SEQ ID NO: 904332 - RNA, 18 nt, Human
agggccucccucgagcag

SEQ ID NO: 904333 - RNA, 23 nt, Human
aggugcccagugaagaggggagc

SEQ ID NO: 904334 - RNA, 21 nt, Human
agguggcagauccagggagca

SEQ ID NO: 904335 - RNA, 18 nt, Human
augcuggggccucauccu

SEQ ID NO: 904336 - RNA, 20 nt, Human
caagggcuuugaggugaaaa

SEQ ID NO: 904337 - RNA, 22 nt, Human
cacagcaccagagaagcugaag

SEQ ID NO: 904338 - RNA, 18 nt, Human
cacaugcuccgcccuugc

SEQ ID NO: 904339 - RNA, 27 nt, Human
caccccauucccuagauuaggacucuu

SEQ ID NO: 904340 - RNA, 20 nt, Human
cacuacccuggggugcaugc

SEQ ID NO: 904341 - RNA, 24 nt, Human
cagagcuugggccccaaggaggcu

SEQ ID NO: 904342 - RNA, 20 nt, Human
cagcaccagagaagcugaaa

SEQ ID NO: 904343 - RNA, 22 nt, Human
cagccaugacaucagcuuccuu

SEQ ID NO: 904344 - RNA, 20 nt, Human
cagccauguggccugcuggc

SEQ ID NO: 904345 - RNA, 19 nt, Human
cagccccuugccucccugg

SEQ ID NO: 904346 - RNA, 23 nt, Human
cagccucccacagccucccaccc

SEQ ID NO: 904347 - RNA, 25 nt, Human
cagccucccacagccucccaccccc

SEQ ID NO: 904348 - RNA, 23 nt, Human
cagcuuccucugggccccaagga

SEQ ID NO: 904349 - RNA, 19 nt, Human
cagggaaccaggcaauugu

SEQ ID NO: 904350 - RNA, 18 nt, Human
cagggacacaggugggcc

SEQ ID NO: 904351 - RNA, 25 nt, Human
cagggccccgcccuucccagccccc

SEQ ID NO: 904352 - RNA, 21 nt, Human
caggugauucuagaugucagc

SEQ ID NO: 904353 - RNA, 19 nt, Human
cagucucagccccaccccu

SEQ ID NO: 904354 - RNA, 22 nt, Human
cauaccucugcuaggaacacug

SEQ ID NO: 904355 - RNA, 18 nt, Human
ccaacucucaaccagcag

SEQ ID NO: 904356 - RNA, 23 nt, Human
ccaacuuagcccugccgcccucu

SEQ ID NO: 904357 - RNA, 23 nt, Human
ccauuccuuccagccacuccauc

SEQ ID NO: 904358 - RNA, 21 nt, Human
cccaaggagaaucaggugcac

SEQ ID NO: 904359 - RNA, 18 nt, Human
cccacagccucccacccc

SEQ ID NO: 904360 - RNA, 19 nt, Human
cccacagccucccaccccc

SEQ ID NO: 904361 - RNA, 24 nt, Human
cccaccuucaccuucagagcccac

SEQ ID NO: 904362 - RNA, 24 nt, Human
cccagucucagccccaccccuggc

SEQ ID NO: 904363 - RNA, 21 nt, Human
cccaucacuccucuuucuacc

SEQ ID NO: 904364 - RNA, 19 nt, Human
ccccaccccuggcccucca

SEQ ID NO: 904365 - RNA, 19 nt, Human
cccccucccccaucacucc

SEQ ID NO: 904366 - RNA, 23 nt, Human
ccgcccuucccagcccccaacuc

SEQ ID NO: 904367 - RNA, 18 nt, Human
ccgucucaaaacacagcc

SEQ ID NO: 904368 - RNA, 20 nt, Human
ccgucucaaaacacagccga

SEQ ID NO: 904369 - RNA, 24 nt, Human
ccuagauuaggacucuccuggggc

SEQ ID NO: 904370 - RNA, 19 nt, Human
ccucaggggccugcucucc

SEQ ID NO: 904371 - RNA, 21 nt, Human
ccucauccuugaaauccccag

SEQ ID NO: 904372 - RNA, 18 nt, Human
ccucuuucuaccuugccu

SEQ ID NO: 904373 - RNA, 18 nt, Human
ccugccccgcccugggac

SEQ ID NO: 904374 - RNA, 24 nt, Human
ccugcugggcucucccagucucca

SEQ ID NO: 904375 - RNA, 25 nt, Human
ccuggccagccugagggagaucucg

SEQ ID NO: 904376 - RNA, 23 nt, Human
ccuggggugcaugcuugugcgca

SEQ ID NO: 904377 - RNA, 21 nt, Human
ccuugccuuuuuggcuccagc

SEQ ID NO: 904378 - RNA, 23 nt, Human
ccuugccuuuuuggcuccagcug

SEQ ID NO: 904379 - RNA, 19 nt, Human
cgcagacugaggcgacagc

SEQ ID NO: 904380 - RNA, 21 nt, Human
cgcccucugcucucucuccca

SEQ ID NO: 904381 - RNA, 20 nt, Human
cguauccacuguggcauucu

SEQ ID NO: 904382 - RNA, 21 nt, Human
cucaaaacacagccgacuuuu

SEQ ID NO: 904383 - RNA, 26 nt, Human
cucagccccaccccuggcccuccaca

SEQ ID NO: 904384 - RNA, 21 nt, Human
cuccaccccauucccuagauu

SEQ ID NO: 904385 - RNA, 20 nt, Human
cuccagguggcaggugauuc

SEQ ID NO: 904386 - RNA, 21 nt, Human
cuccaugcuggggccucaucc

SEQ ID NO: 904387 - RNA, 21 nt, Human
cuccucuuucuaccuugccuu

SEQ ID NO: 904388 - RNA, 19 nt, Human
cugcagcucucuugcuguc

SEQ ID NO: 904389 - RNA, 21 nt, Human
cuggcacaggcacccccacgg

SEQ ID NO: 904390 - RNA, 18 nt, Human
cuggggccucauccuuga

SEQ ID NO: 904391 - RNA, 21 nt, Human
cugugccaugucuaccauaga

SEQ ID NO: 904392 - RNA, 22 nt, Human
cuuagaauucccugccccgccc

SEQ ID NO: 904393 - RNA, 18 nt, Human
cuucagagcccaccuccc

SEQ ID NO: 904394 - RNA, 24 nt, Human
cuugccuuuuuggcuccagcugca

SEQ ID NO: 904395 - RNA, 19 nt, Human
gaaacaaucccccuccccc

SEQ ID NO: 904396 - RNA, 19 nt, Human
gaagaacccagugaucacc

SEQ ID NO: 904397 - RNA, 22 nt, Human
gagcagcugcccagacagcuuc

SEQ ID NO: 904398 - RNA, 18 nt, Human
gauccagggagcagagcu

SEQ ID NO: 904399 - RNA, 19 nt, Human
gccaggacccaggcagcag

SEQ ID NO: 904400 - RNA, 21 nt, Human
gccagggccucccucgagcag

SEQ ID NO: 904401 - RNA, 21 nt, Human
gcccaagacacaugcuccgcc

SEQ ID NO: 904402 - RNA, 18 nt, Human
gcccaccuccccauggac

SEQ ID NO: 904403 - RNA, 18 nt, Human
gcccuucccagcccccaa

SEQ ID NO: 904404 - RNA, 21 nt, Human
gccugcucucccaccuucacc

SEQ ID NO: 904405 - RNA, 22 nt, Human
gccugcucucccaccuucaccu

SEQ ID NO: 904406 - RNA, 21 nt, Human
gcuccugcuagcugcgggcac

SEQ ID NO: 904407 - RNA, 22 nt, Human
gcugcaaaaccuggccagccug

SEQ ID NO: 904408 - RNA, 21 nt, Human
ggaaccaggcaauugucucca

SEQ ID NO: 904409 - RNA, 20 nt, Human
ggagguggauuaucugccua

SEQ ID NO: 904410 - RNA, 19 nt, Human
ggcagcacccuaccaaggu

SEQ ID NO: 904411 - RNA, 25 nt, Human
gggccaggacccaggcagcaggagg

SEQ ID NO: 904412 - RNA, 20 nt, Human
gggcuggggggucaccgagg

SEQ ID NO: 904413 - RNA, 18 nt, Human
ggggucaccgaggaggga

SEQ ID NO: 904414 - RNA, 18 nt, Human
ggugggagucaggggagg

SEQ ID NO: 904415 - RNA, 26 nt, Human
gucaccgaggagggauauccggugcc

SEQ ID NO: 904416 - RNA, 24 nt, Human
gucucagccccaccccuggcccuc

SEQ ID NO: 904417 - RNA, 21 nt, Human
gucuuugcccacucuucaagg

SEQ ID NO: 904418 - RNA, 18 nt, Human
gugaaaagaguguggccc

SEQ ID NO: 904419 - RNA, 21 nt, Human
uaagcaggugugggcccaaga

SEQ ID NO: 904420 - RNA, 22 nt, Human
uaagcaggugugggcccaagac

SEQ ID NO: 904421 - RNA, 23 nt, Human
uacacaggaagaggguggcuuug

SEQ ID NO: 904422 - RNA, 22 nt, Human
uacccaggccucaggggccugc

SEQ ID NO: 904423 - RNA, 23 nt, Human
uaccuugccuuuuuggcuccagc

SEQ ID NO: 904424 - RNA, 18 nt, Human
ucaccugccccagggaac

SEQ ID NO: 904425 - RNA, 22 nt, Human
ucagcccagucucagccccacc

SEQ ID NO: 904426 - RNA, 28 nt, Human
uccaagggguugggcuggggggucaccc

SEQ ID NO: 904427 - RNA, 19 nt, Human
uccagccugggaucagagc

SEQ ID NO: 904428 - RNA, 18 nt, Human
uccaugacaggcaugggg

SEQ ID NO: 904429 - RNA, 23 nt, Human
ucccacagccucccacccccagg

SEQ ID NO: 904430 - RNA, 26 nt, Human
ucccagucuccacgggucagguucug

SEQ ID NO: 904431 - RNA, 19 nt, Human
ucccccucccccaucacuc

SEQ ID NO: 904432 - RNA, 21 nt, Human
ucccugaggcagcacccuacc

SEQ ID NO: 904433 - RNA, 23 nt, Human
uccuacaugggugcacaagugcc

SEQ ID NO: 904434 - RNA, 20 nt, Human
uccuuccagccacuccaucc

SEQ ID NO: 904435 - RNA, 20 nt, Human
ucuagaugucagcccagucu

SEQ ID NO: 904436 - RNA, 21 nt, Human
ucucaaaacacagccgacuuu

SEQ ID NO: 904437 - RNA, 21 nt, Human
ugaaaagaguguggcccucau

SEQ ID NO: 904438 - RNA, 20 nt, Human
ugaaacaaucccccuccccc

SEQ ID NO: 904439 - RNA, 20 nt, Human
ugaggugaaaagaguguggc

SEQ ID NO: 904440 - RNA, 22 nt, Human
ugagucagggacacaggugggc

SEQ ID NO: 904441 - RNA, 19 nt, Human
ugauucuagaugucagccc

SEQ ID NO: 904442 - RNA, 19 nt, Human
ugcaccaccccacuggucu

SEQ ID NO: 904443 - RNA, 24 nt, Human
ugccaugucuaccauagaugcccc

SEQ ID NO: 904444 - RNA, 22 nt, Human
ugcccacucuucaagggcuuug

SEQ ID NO: 904445 - RNA, 18 nt, Human
ugccccagggaaccaggc

SEQ ID NO: 904446 - RNA, 21 nt, Human
ugccuagaaagggcagcaggg

SEQ ID NO: 904447 - RNA, 19 nt, Human
ugccugggggauagggagg

SEQ ID NO: 904448 - RNA, 25 nt, Human
ugcuaggaacacuggggacagagca

SEQ ID NO: 904449 - RNA, 20 nt, Human
ugcuagguggcagauccagg

SEQ ID NO: 904450 - RNA, 22 nt, Human
ugcucucccaccuucaccuuca

SEQ ID NO: 904451 - RNA, 19 nt, Human
ugcugggguucaagggugg

SEQ ID NO: 904452 - RNA, 23 nt, Human
uggccagccauguggccugcugg

SEQ ID NO: 904453 - RNA, 20 nt, Human
uggcguauccacuguggcau

SEQ ID NO: 904454 - RNA, 23 nt, Human
uggggacagagcacugggagaga

SEQ ID NO: 904455 - RNA, 22 nt, Human
ugggggaggagggccaggaccc

SEQ ID NO: 904456 - RNA, 19 nt, Human
ugggggugcagauggggga

SEQ ID NO: 904457 - RNA, 25 nt, Human
ugggguggaugggaaggcccacagc

SEQ ID NO: 904458 - RNA, 21 nt, Human
uguggugggguggaugggaag

SEQ ID NO: 904459 - RNA, 20 nt, Human
uucaaggguggaauucuacc

SEQ ID NO: 904460 - RNA, 28 nt, Human
uuccaagggguugggcuggggggucacc

SEQ ID NO: 904461 - RNA, 29 nt, Human
uuccaagggguugggcuggggggucaccc

SEQ ID NO: 904462 - RNA, 19 nt, Human
uugcccacucuucaagggc

SEQ ID NO: 904463 - RNA, 24 nt, Human
uugggccccaaggaggcugccuag

SEQ ID NO: 904464 - RNA, 23 nt, Human
uuucugagcucgggcccaggcug

SEQ ID NO: 904465 - RNA, 22 nt, Human
aguucugucccagugaguccua

SEQ ID NO: 904466 - RNA, 19 nt, Human
aaaagaaugcucugccuuu

SEQ ID NO: 904467 - RNA, 24 nt, Human
aaaaggugucauuuucauauuccu

SEQ ID NO: 904468 - RNA, 21 nt, Human
aaaauagcuaaaauacauugg

SEQ ID NO: 904469 - RNA, 19 nt, Human
aaacagaaagaacccaaag

SEQ ID NO: 904470 - RNA, 27 nt, Human
aaauauccuuucaaacagaaagaaccc

SEQ ID NO: 904471 - RNA, 18 nt, Human
aaaugccacagaugcaga

SEQ ID NO: 904472 - RNA, 18 nt, Human
aagaagaaaacgaagaag

SEQ ID NO: 904473 - RNA, 18 nt, Human
aagagauuugguaaguaa

SEQ ID NO: 904474 - RNA, 23 nt, Human
aagcaaggcucagagucccauag

SEQ ID NO: 904475 - RNA, 18 nt, Human
acacugaggaagaaagcc

SEQ ID NO: 904476 - RNA, 21 nt, Human
acccauacaccauauguaaua

SEQ ID NO: 904477 - RNA, 22 nt, Human
agaagcgaaacaguucagaaca

SEQ ID NO: 904478 - RNA, 20 nt, Human
agacuggcuaacacaacaac

SEQ ID NO: 904479 - RNA, 20 nt, Human
agagacucuuagagaaagag

SEQ ID NO: 904480 - RNA, 19 nt, Human
agagucccauaguuucuuc

SEQ ID NO: 904481 - RNA, 18 nt, Human
agaugccaguguuuuggg

SEQ ID NO: 904482 - RNA, 23 nt, Human
agcgaaccaggccugaaggccca

SEQ ID NO: 904483 - RNA, 18 nt, Human
agcuaccucgccaaggag

SEQ ID NO: 904484 - RNA, 18 nt, Human
agcugugugagugaaaag

SEQ ID NO: 904485 - RNA, 19 nt, Human
aggaaaacaagucaaucca

SEQ ID NO: 904486 - RNA, 23 nt, Human
agguggggggggggacucucagc

SEQ ID NO: 904487 - RNA, 24 nt, Human
agguggggggggggacucucagcc

SEQ ID NO: 904488 - RNA, 21 nt, Human
aggugucauuuucauauuccu

SEQ ID NO: 904489 - RNA, 20 nt, Human
agugaaaaggcaggagugga

SEQ ID NO: 904490 - RNA, 23 nt, Human
auagcaccauucaucagugucuc

SEQ ID NO: 904491 - RNA, 23 nt, Human
aucuaaaugaaaaaaaaaggugg

SEQ ID NO: 904492 - RNA, 25 nt, Human
augggggagcaagaagaaaacgaag

SEQ ID NO: 904493 - RNA, 27 nt, Human
auuggggggagagagagggaaagggag

SEQ ID NO: 904494 - RNA, 22 nt, Human
caaaagaagagcuaaagacagu

SEQ ID NO: 904495 - RNA, 22 nt, Human
caacagacaaaagccccgcucc

SEQ ID NO: 904496 - RNA, 24 nt, Human
caacagacaaaagccccgcucccu

SEQ ID NO: 904497 - RNA, 20 nt, Human
caagaagaaaacgaagaagu

SEQ ID NO: 904498 - RNA, 18 nt, Human
cacacuguuacaaaagcc

SEQ ID NO: 904499 - RNA, 21 nt, Human
cagaaagaacccaaagagaca

SEQ ID NO: 904500 - RNA, 22 nt, Human
cagcaguacacaacugcaacuc

SEQ ID NO: 904501 - RNA, 19 nt, Human
caggaguggaccgguugug

SEQ ID NO: 904502 - RNA, 18 nt, Human
cagggaaacagaguacca

SEQ ID NO: 904503 - RNA, 18 nt, Human
cagucagaagcgaaacag

SEQ ID NO: 904504 - RNA, 18 nt, Human
cagucgggagcuguguga

SEQ ID NO: 904505 - RNA, 26 nt, Human
ccccgcucccuguucacucucucucc

SEQ ID NO: 904506 - RNA, 24 nt, Human
cccgcuaccgugacugcauguccg

SEQ ID NO: 904507 - RNA, 22 nt, Human
ccuacaacacugaggaagaaag

SEQ ID NO: 904508 - RNA, 24 nt, Human
ccuguggcagcaucucggucacuu

SEQ ID NO: 904509 - RNA, 22 nt, Human
cuaacacaacaacauuccauga

SEQ ID NO: 904510 - RNA, 19 nt, Human
cuauucuaacgaaggaggg

SEQ ID NO: 904511 - RNA, 23 nt, Human
cucucucuccucucuacaccuga

SEQ ID NO: 904512 - RNA, 24 nt, Human
cugaagacacaaggaaaacaaguc

SEQ ID NO: 904513 - RNA, 23 nt, Human
cuggcuaacacaacaacauucca

SEQ ID NO: 904514 - RNA, 26 nt, Human
cuuagaacauggaaauaaaaaauaac

SEQ ID NO: 904515 - RNA, 19 nt, Human
cuuucagacuggcuaacac

SEQ ID NO: 904516 - RNA, 21 nt, Human
gaaagaacccaaagagacacc

SEQ ID NO: 904517 - RNA, 22 nt, Human
gaacaaggccugcccugucaaa

SEQ ID NO: 904518 - RNA, 21 nt, Human
gagagacucuuagagaaagag

SEQ ID NO: 904519 - RNA, 18 nt, Human
gauuggggggagagagag

SEQ ID NO: 904520 - RNA, 22 nt, Human
gauuggggggagagagagggaa

SEQ ID NO: 904521 - RNA, 23 nt, Human
ggccaaugggggagcaagaagaa

SEQ ID NO: 904522 - RNA, 18 nt, Human
ggcuacggaaaggaagag

SEQ ID NO: 904523 - RNA, 19 nt, Human
gucuagagaacaacauuca

SEQ ID NO: 904524 - RNA, 23 nt, Human
gucucagguccuguggcagcauc

SEQ ID NO: 904525 - RNA, 23 nt, Human
guggggggggggacucucagccu

SEQ ID NO: 904526 - RNA, 21 nt, Human
guugaaaguccaaaauagcac

SEQ ID NO: 904527 - RNA, 22 nt, Human
uaaaaaauaacuccaucagagc

SEQ ID NO: 904528 - RNA, 25 nt, Human
uaaaauagcuaaaauacauugggua

SEQ ID NO: 904529 - RNA, 22 nt, Human
uaaaugccacagaugcagaaua

SEQ ID NO: 904530 - RNA, 22 nt, Human
uaaguaaauuacaguuuuguga

SEQ ID NO: 904531 - RNA, 19 nt, Human
uaccacaaggaaacaauga

SEQ ID NO: 904532 - RNA, 25 nt, Human
uaccacaaggaaacaaugaguuuca

SEQ ID NO: 904533 - RNA, 21 nt, Human
uagagaacaacauucagggaa

SEQ ID NO: 904534 - RNA, 21 nt, Human
uagcuaaaauacauuggguac

SEQ ID NO: 904535 - RNA, 19 nt, Human
ucaauacccauacaccaua

SEQ ID NO: 904536 - RNA, 27 nt, Human
ucacucucucuccucucuacaccugaa

SEQ ID NO: 904537 - RNA, 22 nt, Human
ucagaacaaggccugcccuguc

SEQ ID NO: 904538 - RNA, 24 nt, Human
ucagguccuguggcagcaucucgg

SEQ ID NO: 904539 - RNA, 18 nt, Human
ucagugucucagguccug

SEQ ID NO: 904540 - RNA, 24 nt, Human
ucuagagaacaacauucagggaaa

SEQ ID NO: 904541 - RNA, 22 nt, Human
ucucuccucucuacaccugaaa

SEQ ID NO: 904542 - RNA, 18 nt, Human
ugaaaaaaaaaggugggg

SEQ ID NO: 904543 - RNA, 24 nt, Human
ugaaaaagggcaacaugcuagaaa

SEQ ID NO: 904544 - RNA, 24 nt, Human
ugaccucaucaauacccauacacc

SEQ ID NO: 904545 - RNA, 20 nt, Human
ugagcguuuucacuugaguc

SEQ ID NO: 904546 - RNA, 24 nt, Human
ugaggaagaaagccacacugaaga

SEQ ID NO: 904547 - RNA, 22 nt, Human
ugcaacucuacauaaaugccac

SEQ ID NO: 904548 - RNA, 21 nt, Human
ugccacagaugcagaauacug

SEQ ID NO: 904549 - RNA, 19 nt, Human
ugccgaaaaaagaaugcuc

SEQ ID NO: 904550 - RNA, 18 nt, Human
uggcagcaucucggucac

SEQ ID NO: 904551 - RNA, 20 nt, Human
ugggagcaaggacaaaaaug

SEQ ID NO: 904552 - RNA, 20 nt, Human
ugguaaguaaauuacaguuu

SEQ ID NO: 904553 - RNA, 20 nt, Human
ugucucagguccuguggcag

SEQ ID NO: 904554 - RNA, 21 nt, Human
uguggcagcaucucggucacu

SEQ ID NO: 904555 - RNA, 20 nt, Human
uguuguagcgaaccaggccu

SEQ ID NO: 904556 - RNA, 19 nt, Human
uugccgaaaaaagaaugcu

SEQ ID NO: 904557 - RNA, 25 nt, Human
uuguuacaucuaaaugaaaaaaaaa

SEQ ID NO: 904558 - RNA, 19 nt, Human
uuucaaacagaaagaaccc

SEQ ID NO: 904559 - RNA, 22 nt, Human
uuuugugauugcucccgcuacc

SEQ ID NO: 904560 - RNA, 19 nt, Human
aacaaugagacccagcugg

SEQ ID NO: 904561 - RNA, 23 nt, Human
aacaccaguauagaaaauacaaa

SEQ ID NO: 904562 - RNA, 19 nt, Human
aagcaggaugauagcauuc

SEQ ID NO: 904563 - RNA, 23 nt, Human
agcccuaaaaaagcggcacagca

SEQ ID NO: 904564 - RNA, 24 nt, Human
agcccuaaaaaagcggcacagcaa

SEQ ID NO: 904565 - RNA, 23 nt, Human
caaauggacaggcaagcaggaug

SEQ ID NO: 904566 - RNA, 18 nt, Human
caaggguuaucucugagc

SEQ ID NO: 904567 - RNA, 19 nt, Human
cacaucuccaaggguuauc

SEQ ID NO: 904568 - RNA, 19 nt, Human
cacaucuccaaggguuauc

SEQ ID NO: 904569 - RNA, 23 nt, Human
caccaguauagaaaauacaaaac

SEQ ID NO: 904570 - RNA, 22 nt, Human
cauaaauaggcaacacaguuaa

SEQ ID NO: 904571 - RNA, 18 nt, Human
cauccagcuggccccaau

SEQ ID NO: 904572 - RNA, 21 nt, Human
ccacaaauggacaggcaagca

SEQ ID NO: 904573 - RNA, 18 nt, Human
ccacaagcucaucuaucu

SEQ ID NO: 904574 - RNA, 27 nt, Human
ccacagaccauccuuuguauucuucaa

SEQ ID NO: 904575 - RNA, 23 nt, Human
cuggaccucucuggcugcaccca

SEQ ID NO: 904576 - RNA, 20 nt, Human
gaaugggcugcauucagccc

SEQ ID NO: 904577 - RNA, 22 nt, Human
uaaaaacauuuauacaggacau

SEQ ID NO: 904578 - RNA, 24 nt, Human
uaccuuauccuacuauaguaauua

SEQ ID NO: 904579 - RNA, 19 nt, Human
uauagaaaauacaaaacua

SEQ ID NO: 904580 - RNA, 20 nt, Human
uauguuuuuuuucccauuca

SEQ ID NO: 904581 - RNA, 22 nt, Human
ucacaauaauacuuauaauuaa

SEQ ID NO: 904582 - RNA, 21 nt, Human
ucacguaagucuacuugcagg

SEQ ID NO: 904583 - RNA, 21 nt, Human
uccuuugaaauccaagucugg

SEQ ID NO: 904584 - RNA, 20 nt, Human
ucuaaaagcaguaaaaacau

SEQ ID NO: 904585 - RNA, 18 nt, Human
ucuaacaccaguauagaa

SEQ ID NO: 904586 - RNA, 21 nt, Human
ucuaauauauuuucccacaga

SEQ ID NO: 904587 - RNA, 23 nt, Human
ucuaucuggaccucucuggcugc

SEQ ID NO: 904588 - RNA, 18 nt, Human
ucucuggcugcacccagg

SEQ ID NO: 904589 - RNA, 23 nt, Human
ucuuugcugcggugugugaggaa

SEQ ID NO: 904590 - RNA, 23 nt, Human
ugcauaaauaggcaacacaguua

SEQ ID NO: 904591 - RNA, 24 nt, Human
ugccaucauuaggacccaacugcu

SEQ ID NO: 904592 - RNA, 19 nt, Human
ugcugguaacuugucuuug

SEQ ID NO: 904593 - RNA, 21 nt, Human
uggucaaaugacucaggauau

SEQ ID NO: 904594 - RNA, 18 nt, Human
uguaaacauauguuuucu

SEQ ID NO: 904595 - RNA, 21 nt, Human
uuaacuaaugcaguucuggaa

SEQ ID NO: 904596 - RNA, 24 nt, Human
uucuucuaaaugugugagcccuaa

SEQ ID NO: 904597 - RNA, 20 nt, Human
uugcggugugaucucuaugu

SEQ ID NO: 904598 - RNA, 22 nt, Human
aaaacaaaaaguagaaacucaa

SEQ ID NO: 904599 - RNA, 20 nt, Human
aaggaacaaaaaguaaugca

SEQ ID NO: 904600 - RNA, 22 nt, Human
aauaaggguccaaaagaagaga

SEQ ID NO: 904601 - RNA, 21 nt, Human
acacauuaaaaaaaacaaaaa

SEQ ID NO: 904602 - RNA, 20 nt, Human
acaucuagcaauguaaaaua

SEQ ID NO: 904603 - RNA, 19 nt, Human
acauuaaaaaaaacaaaaa

SEQ ID NO: 904604 - RNA, 23 nt, Human
agugcucuuguguuuuuaaaaaa

SEQ ID NO: 904605 - RNA, 22 nt, Human
caaaaaguaaugcaagacucaa

SEQ ID NO: 904606 - RNA, 19 nt, Human
cagugcucuuguguuuuua

SEQ ID NO: 904607 - RNA, 22 nt, Human
cgcuaggccccaagacggcgcc

SEQ ID NO: 904608 - RNA, 23 nt, Human
cgcugaugaaguggggugaacac

SEQ ID NO: 904609 - RNA, 23 nt, Human
cggcgccgccugcucggcagcaa

SEQ ID NO: 904610 - RNA, 18 nt, Human
gugaacaccaugccuuua

SEQ ID NO: 904611 - RNA, 23 nt, Human
uaaaauacugacacauuaaaaaa

SEQ ID NO: 904612 - RNA, 27 nt, Human
uaacaucaaucuuacaguacugugcgg

SEQ ID NO: 904613 - RNA, 24 nt, Human
uaggccccaagacggcgccgccug

SEQ ID NO: 904614 - RNA, 19 nt, Human
ugacacauuaaaaaaaaca

SEQ ID NO: 904615 - RNA, 23 nt, Human
ugcaagacucaaaauuuuggagu

SEQ ID NO: 904616 - RNA, 18 nt, Human
uuuuuuuuuuuuuuuuug

SEQ ID NO: 904617 - RNA, 22 nt, Human
uuuuuuuuuuuuuuuuuuguuu

SEQ ID NO: 904618 - RNA, 22 nt, Human
aaaaacacuguagcacgcgcug

SEQ ID NO: 904619 - RNA, 22 nt, Human
aaaacaaaacacacaagugcuu

SEQ ID NO: 904620 - RNA, 19 nt, Human
aaacaaaacacacaagugc

SEQ ID NO: 904621 - RNA, 20 nt, Human
aaacaucacccaucuaaugc

SEQ ID NO: 904622 - RNA, 23 nt, Human
aaacaucacccaucuaaugcuag

SEQ ID NO: 904623 - RNA, 19 nt, Human
aaagacagacacaaaauua

SEQ ID NO: 904624 - RNA, 18 nt, Human
aacccuaggcccuggggg

SEQ ID NO: 904625 - RNA, 20 nt, Human
aagaguuuugugggguuuug

SEQ ID NO: 904626 - RNA, 21 nt, Human
aagggggagaguuaaggaagg

SEQ ID NO: 904627 - RNA, 21 nt, Human
aaucagcuccgaggcagaacu

SEQ ID NO: 904628 - RNA, 23 nt, Human
acacacacgcacacgcacagaca

SEQ ID NO: 904629 - RNA, 20 nt, Human
acagacacaaaauuauaaca

SEQ ID NO: 904630 - RNA, 25 nt, Human
acagggaccccccucagcuuuuccu

SEQ ID NO: 904631 - RNA, 19 nt, Human
acagguuucuaccucccac

SEQ ID NO: 904632 - RNA, 24 nt, Human
acaucaaaaaccaauaaacacaga

SEQ ID NO: 904633 - RNA, 19 nt, Human
accaccaccccgcugccug

SEQ ID NO: 904634 - RNA, 21 nt, Human
acccagcggggcaaaugaucc

SEQ ID NO: 904635 - RNA, 18 nt, Human
accccuuccucuucacuc

SEQ ID NO: 904636 - RNA, 24 nt, Human
acgggcaucucacuagagagccga

SEQ ID NO: 904637 - RNA, 18 nt, Human
agaaagcaaggaaaaauc

SEQ ID NO: 904638 - RNA, 21 nt, Human
agaacacaaacgccagcgccc

SEQ ID NO: 904639 - RNA, 23 nt, Human
agagccccugccacgcccuuccc

SEQ ID NO: 904640 - RNA, 18 nt, Human
agauacucagucaaaaac

SEQ ID NO: 904641 - RNA, 23 nt, Human
agcaguucagaacaucacaaaaa

SEQ ID NO: 904642 - RNA, 18 nt, Human
aggaagaguuuugugggg

SEQ ID NO: 904643 - RNA, 18 nt, Human
aggccccugagaccuccc

SEQ ID NO: 904644 - RNA, 21 nt, Human
agggagcaguucagaacauca

SEQ ID NO: 904645 - RNA, 22 nt, Human
agggagcaguucagaacaucac

SEQ ID NO: 904646 - RNA, 19 nt, Human
agggagggcaaguaugggg

SEQ ID NO: 904647 - RNA, 20 nt, Human
agggcaugaaggggaggaga

SEQ ID NO: 904648 - RNA, 20 nt, Human
aggggaugggaagguggggg

SEQ ID NO: 904649 - RNA, 24 nt, Human
auaaagacagacacaaaauuauaa

SEQ ID NO: 904650 - RNA, 24 nt, Human
auaacaaauauuuaacagcaaaaa

SEQ ID NO: 904651 - RNA, 22 nt, Human
auguccuucauucuucuguguu

SEQ ID NO: 904652 - RNA, 21 nt, Human
caacacagggauccugucagc

SEQ ID NO: 904653 - RNA, 22 nt, Human
caacaucaaaaaccaauaaaca

SEQ ID NO: 904654 - RNA, 21 nt, Human
caaccaccaccccgcugccug

SEQ ID NO: 904655 - RNA, 18 nt, Human
caacccaaucccccugac

SEQ ID NO: 904656 - RNA, 23 nt, Human
caacccuaggcccugggggcugg

SEQ ID NO: 904657 - RNA, 25 nt, Human
caaguugcaauaguuagggaugaua

SEQ ID NO: 904658 - RNA, 19 nt, Human
cacacagguuucuaccucc

SEQ ID NO: 904659 - RNA, 23 nt, Human
caccauguagcuauguugcaagc

SEQ ID NO: 904660 - RNA, 21 nt, Human
caccuggaccagacccagugg

SEQ ID NO: 904661 - RNA, 23 nt, Human
caccuggaccagacccagugggc

SEQ ID NO: 904662 - RNA, 20 nt, Human
cacggcucuucccguccccc

SEQ ID NO: 904663 - RNA, 24 nt, Human
cacucgcccuccccguuccggccc

SEQ ID NO: 904664 - RNA, 24 nt, Human
cagaacaaguagcagcaauaggua

SEQ ID NO: 904665 - RNA, 18 nt, Human
cagaacacaaacgccagc

SEQ ID NO: 904666 - RNA, 24 nt, Human
cagaagaacccguauccuucccca

SEQ ID NO: 904667 - RNA, 22 nt, Human
cagagccccugccacgcccuuc

SEQ ID NO: 904668 - RNA, 22 nt, Human
cagccagccagagcuuucuuca

SEQ ID NO: 904669 - RNA, 18 nt, Human
cagcggggcaaaugaucc

SEQ ID NO: 904670 - RNA, 19 nt, Human
cagcuuuuccuucucugcc

SEQ ID NO: 904671 - RNA, 22 nt, Human
caggagagggaggaggcaaugg

SEQ ID NO: 904672 - RNA, 22 nt, Human
caggaggaggagacgcugaaga

SEQ ID NO: 904673 - RNA, 23 nt, Human
caugcagagccccugccacgccc

SEQ ID NO: 904674 - RNA, 23 nt, Human
ccacacacagguuucuaccuccc

SEQ ID NO: 904675 - RNA, 19 nt, Human
ccacauuccaucuccacca

SEQ ID NO: 904676 - RNA, 19 nt, Human
ccaggaugcuguuccuggg

SEQ ID NO: 904677 - RNA, 18 nt, Human
cccacaaccaccaccccg

SEQ ID NO: 904678 - RNA, 25 nt, Human
cccagccccaugcccccugccccuc

SEQ ID NO: 904679 - RNA, 23 nt, Human
cccaggaggcaucccaaauugcc

SEQ ID NO: 904680 - RNA, 19 nt, Human
cccagggaaggccccugag

SEQ ID NO: 904681 - RNA, 22 nt, Human
ccccaccccugagcugggcuaa

SEQ ID NO: 904682 - RNA, 21 nt, Human
ccccagcauccccaagauucu

SEQ ID NO: 904683 - RNA, 24 nt, Human
ccccagggaaggccccugagaccc

SEQ ID NO: 904684 - RNA, 20 nt, Human
ccccaugcccccugccccuc

SEQ ID NO: 904685 - RNA, 24 nt, Human
cccccaaccccagcuaaaaggguc

SEQ ID NO: 904686 - RNA, 24 nt, Human
cccccuaccaggcuggccaccccc

SEQ ID NO: 904687 - RNA, 20 nt, Human
cccccugccccucaccugga

SEQ ID NO: 904688 - RNA, 21 nt, Human
cccccugccccucaccuggac

SEQ ID NO: 904689 - RNA, 18 nt, Human
ccccguuccggcccccuc

SEQ ID NO: 904690 - RNA, 21 nt, Human
ccccguuccggcccccuccca

SEQ ID NO: 904691 - RNA, 19 nt, Human
ccccugagaccucccagcc

SEQ ID NO: 904692 - RNA, 25 nt, Human
ccccugagaccucccagccccaugc

SEQ ID NO: 904693 - RNA, 21 nt, Human
ccccugccccucaccuggacc

SEQ ID NO: 904694 - RNA, 22 nt, Human
ccccuuccucuucacucacaga

SEQ ID NO: 904695 - RNA, 25 nt, Human
cccgccccgccaagguugacuccug

SEQ ID NO: 904696 - RNA, 24 nt, Human
cccgucagaagaacccguauccuu

SEQ ID NO: 904697 - RNA, 18 nt, Human
cccugccacgcccuuccc

SEQ ID NO: 904698 - RNA, 20 nt, Human
ccgccaagguugacuccugu

SEQ ID NO: 904699 - RNA, 21 nt, Human
ccgccccgccaagguugacuc

SEQ ID NO: 904700 - RNA, 21 nt, Human
ccgcugccugggcugggcuga

SEQ ID NO: 904701 - RNA, 22 nt, Human
ccggcccccucccacacacagg

SEQ ID NO: 904702 - RNA, 19 nt, Human
ccucaccuggaccagaccc

SEQ ID NO: 904703 - RNA, 19 nt, Human
ccugcaaucagcuccgagg

SEQ ID NO: 904704 - RNA, 20 nt, Human
ccugggcagacgcagugggg

SEQ ID NO: 904705 - RNA, 21 nt, Human
ccuucucugcccccuaccagg

SEQ ID NO: 904706 - RNA, 22 nt, Human
cgaaaggaacggagggaaggga

SEQ ID NO: 904707 - RNA, 18 nt, Human
cgauuuucuuguaaaggg

SEQ ID NO: 904708 - RNA, 22 nt, Human
cgcacacgcacagacacgggca

SEQ ID NO: 904709 - RNA, 22 nt, Human
cgccaggacagcuagaacacag

SEQ ID NO: 904710 - RNA, 22 nt, Human
cgcugaagagugcgcccaaggg

SEQ ID NO: 904711 - RNA, 19 nt, Human
cgcugcgcucaccuccccc

SEQ ID NO: 904712 - RNA, 24 nt, Human
cggcucuucccgucccccaacccc

SEQ ID NO: 904713 - RNA, 18 nt, Human
cuaaauaucuauuuugaa

SEQ ID NO: 904714 - RNA, 26 nt, Human
cuacccaggaugcuguuccugggccg

SEQ ID NO: 904715 - RNA, 19 nt, Human
cucacagggaccccccuca

SEQ ID NO: 904716 - RNA, 21 nt, Human
cucagcuuuuccuucucugcc

SEQ ID NO: 904717 - RNA, 23 nt, Human
cuccagaccccagcauccccaag

SEQ ID NO: 904718 - RNA, 18 nt, Human
cucccacaaccaccaccc

SEQ ID NO: 904719 - RNA, 19 nt, Human
cuccccgucagaagaaccc

SEQ ID NO: 904720 - RNA, 20 nt, Human
cucuccuagauacucaguca

SEQ ID NO: 904721 - RNA, 23 nt, Human
cucuucccgucccccaaccccag

SEQ ID NO: 904722 - RNA, 19 nt, Human
cugagaccucccagcccca

SEQ ID NO: 904723 - RNA, 21 nt, Human
cugcggcagccuucccgcagc

SEQ ID NO: 904724 - RNA, 19 nt, Human
cugggcugggcugaggcgg

SEQ ID NO: 904725 - RNA, 21 nt, Human
cuucaggguggcugugagugg

SEQ ID NO: 904726 - RNA, 19 nt, Human
gaaacaucugagacucagg

SEQ ID NO: 904727 - RNA, 21 nt, Human
gaacaggggccaaacaggaaa

SEQ ID NO: 904728 - RNA, 21 nt, Human
gacgcagugggggcgcaggag

SEQ ID NO: 904729 - RNA, 25 nt, Human
gagaccccuuccucuucacucacag

SEQ ID NO: 904730 - RNA, 20 nt, Human
gagcagucugugugguaugg

SEQ ID NO: 904731 - RNA, 18 nt, Human
gagcaguucagaacauca

SEQ ID NO: 904732 - RNA, 19 nt, Human
gagcugaaaggagggacca

SEQ ID NO: 904733 - RNA, 18 nt, Human
gagggcaaagggggagag

SEQ ID NO: 904734 - RNA, 21 nt, Human
gagggugggaaccguggcaua

SEQ ID NO: 904735 - RNA, 21 nt, Human
gaguggcuggagggaagcugg

SEQ ID NO: 904736 - RNA, 21 nt, Human
gauccuucuuuccucccucac

SEQ ID NO: 904737 - RNA, 19 nt, Human
gcccagggccaccagggag

SEQ ID NO: 904738 - RNA, 19 nt, Human
gcccagggccaccagggag

SEQ ID NO: 904739 - RNA, 18 nt, Human
gcugcgcucaccuccccc

SEQ ID NO: 904740 - RNA, 25 nt, Human
gcuggagccagaaggggagcccagu

SEQ ID NO: 904741 - RNA, 22 nt, Human
gcuggccacccccagggaaggc

SEQ ID NO: 904742 - RNA, 18 nt, Human
gcuuucgccucuucccca

SEQ ID NO: 904743 - RNA, 21 nt, Human
ggacgcagcccccgccccgcc

SEQ ID NO: 904744 - RNA, 22 nt, Human
ggagauguucacuccagacccc

SEQ ID NO: 904745 - RNA, 24 nt, Human
ggaggaugcuggggagacagggcc

SEQ ID NO: 904746 - RNA, 22 nt, Human
ggaguggcuggagggaagcugg

SEQ ID NO: 904747 - RNA, 21 nt, Human
ggcagacgcagugggggcgca

SEQ ID NO: 904748 - RNA, 18 nt, Human
ggcagggucacgguggug

SEQ ID NO: 904749 - RNA, 26 nt, Human
ggccugguucagcaggggaugggaag

SEQ ID NO: 904750 - RNA, 19 nt, Human
ggcuagggcaugaagggga

SEQ ID NO: 904751 - RNA, 23 nt, Human
ggcucuucccgucccccaacccc

SEQ ID NO: 904752 - RNA, 18 nt, Human
ggcugggcugaggcgggu

SEQ ID NO: 904753 - RNA, 24 nt, Human
ggcuguguguaacagggccugguu

SEQ ID NO: 904754 - RNA, 24 nt, Human
gggaagcuggagccagaaggggag

SEQ ID NO: 904755 - RNA, 22 nt, Human
gggcagcacaugagccgcgggc

SEQ ID NO: 904756 - RNA, 19 nt, Human
gggccugguucagcagggg

SEQ ID NO: 904757 - RNA, 19 nt, Human
gggccugguucagcagggg

SEQ ID NO: 904758 - RNA, 20 nt, Human
gggcugaggcgggugggucu

SEQ ID NO: 904759 - RNA, 22 nt, Human
gggcugaggcgggugggucuug

SEQ ID NO: 904760 - RNA, 21 nt, Human
gggcugggcugaggcgggugg

SEQ ID NO: 904761 - RNA, 19 nt, Human
ggggaugggaagguggggg

SEQ ID NO: 904762 - RNA, 20 nt, Human
gggggaggggguacaggucc

SEQ ID NO: 904763 - RNA, 18 nt, Human
ggggggaggggguacagg

SEQ ID NO: 904764 - RNA, 23 nt, Human
gggucagggucggucuguggggc

SEQ ID NO: 904765 - RNA, 22 nt, Human
gguggcugugaguggggucagg

SEQ ID NO: 904766 - RNA, 18 nt, Human
guagcacgcgcugacacc

SEQ ID NO: 904767 - RNA, 19 nt, Human
gucagggucggucuguggg

SEQ ID NO: 904768 - RNA, 18 nt, Human
guggcauagggaagggca

SEQ ID NO: 904769 - RNA, 27 nt, Human
uaaaauaauauuauagccaucugggca

SEQ ID NO: 904770 - RNA, 26 nt, Human
uaaacccaaauaaugcccggagccgg

SEQ ID NO: 904771 - RNA, 19 nt, Human
uaaaggaaaaugaaccucc

SEQ ID NO: 904772 - RNA, 19 nt, Human
uaaaugaaacaucugagac

SEQ ID NO: 904773 - RNA, 26 nt, Human
uaaaugaaacaucugagacucaggga

SEQ ID NO: 904774 - RNA, 22 nt, Human
uaacaaauauuuaacagcaaaa

SEQ ID NO: 904775 - RNA, 19 nt, Human
uacaacaucaaaaaccaau

SEQ ID NO: 904776 - RNA, 23 nt, Human
uacccaggaugcuguuccugggc

SEQ ID NO: 904777 - RNA, 18 nt, Human
uagaacacaggcuagggc

SEQ ID NO: 904778 - RNA, 20 nt, Human
uaugaaacacacacgcacac

SEQ ID NO: 904779 - RNA, 19 nt, Human
ucaaaacaaaacacacaag

SEQ ID NO: 904780 - RNA, 23 nt, Human
ucagaacaucacaaaaacacugu

SEQ ID NO: 904781 - RNA, 20 nt, Human
ucagggccagugcacugggg

SEQ ID NO: 904782 - RNA, 23 nt, Human
ucagggcggagggcaaaggggga

SEQ ID NO: 904783 - RNA, 24 nt, Human
uccacacuguuuuuuaguagugga

SEQ ID NO: 904784 - RNA, 23 nt, Human
ucccaaauugccaacacucaaaa

SEQ ID NO: 904785 - RNA, 26 nt, Human
ucccacaaccaccaccccgcugccug

SEQ ID NO: 904786 - RNA, 22 nt, Human
ucccagccccaugcccccugcc

SEQ ID NO: 904787 - RNA, 20 nt, Human
uccuucuuuccucccucaca

SEQ ID NO: 904788 - RNA, 22 nt, Human
ucugaaguuccacuuacugcuc

SEQ ID NO: 904789 - RNA, 18 nt, Human
ucuguguuuucgauuuuc

SEQ ID NO: 904790 - RNA, 20 nt, Human
ugacuccuguucugcuaccc

SEQ ID NO: 904791 - RNA, 22 nt, Human
ugagcaauuuugccaauaaugu

SEQ ID NO: 904792 - RNA, 22 nt, Human
ugagggagccacugaggugcuc

SEQ ID NO: 904793 - RNA, 19 nt, Human
ugccugggcugggcugagg

SEQ ID NO: 904794 - RNA, 20 nt, Human
ugccugggcugggcugaggc

SEQ ID NO: 904795 - RNA, 23 nt, Human
ugccugggcugggcugaggcggg

SEQ ID NO: 904796 - RNA, 21 nt, Human
ugcuucaaucugcaagcccgu

SEQ ID NO: 904797 - RNA, 23 nt, Human
uggacgcagcccccgccccgcca

SEQ ID NO: 904798 - RNA, 22 nt, Human
uggcauagagguggaagggacu

SEQ ID NO: 904799 - RNA, 25 nt, Human
uggcauagggaagggcaaucuccag

SEQ ID NO: 904800 - RNA, 24 nt, Human
ugggccacauuccaucuccaccag

SEQ ID NO: 904801 - RNA, 20 nt, Human
ugggcugggcugaggcgggu

SEQ ID NO: 904802 - RNA, 23 nt, Human
ugggggcgcaggaggaggagacg

SEQ ID NO: 904803 - RNA, 18 nt, Human
uguagcacgcgcugacac

SEQ ID NO: 904804 - RNA, 27 nt, Human
uguaugaaacacacacgcacacgcaca

SEQ ID NO: 904805 - RNA, 21 nt, Human
uguccaaacuggugagggagg

SEQ ID NO: 904806 - RNA, 21 nt, Human
uguguguaacagggccugguu

SEQ ID NO: 904807 - RNA, 20 nt, Human
uucucugcccccuaccaggc

SEQ ID NO: 904808 - RNA, 22 nt, Human
uugacaggagagggaggaggca

SEQ ID NO: 904809 - RNA, 25 nt, Human
uuugaaccauguuuacaauagagca

SEQ ID NO: 904810 - RNA, 23 nt, Human
uuugaauuauaacaaaaauagua

SEQ ID NO: 904811 - RNA, 21 nt, Human
aaacaaacguccaaccaagau

SEQ ID NO: 904812 - RNA, 24 nt, Human
aaaguccauugaucaucacaaaaa

SEQ ID NO: 904813 - RNA, 20 nt, Human
agaaaacaaacguccaacca

SEQ ID NO: 904814 - RNA, 20 nt, Human
aggagaaaacaaacguccaa

SEQ ID NO: 904815 - RNA, 19 nt, Human
aguccauugaucaucacaa

SEQ ID NO: 904816 - RNA, 27 nt, Human
caaaaacccaggaaaugcaacuaagga

SEQ ID NO: 904817 - RNA, 20 nt, Human
cacaaaaacccaggaaaugc

SEQ ID NO: 904818 - RNA, 20 nt, Human
caucacaaaaacccaggaaa

SEQ ID NO: 904819 - RNA, 19 nt, Human
ccaggaaaugcaacuaagg

SEQ ID NO: 904820 - RNA, 20 nt, Human
ccaggaaaugcaacuaagga

SEQ ID NO: 904821 - RNA, 18 nt, Human
ccgcguuccgcuugcccc

SEQ ID NO: 904822 - RNA, 22 nt, Human
cgugcgccuuccaaagcgcucc

SEQ ID NO: 904823 - RNA, 19 nt, Human
gcacaagggggcaggaggg

SEQ ID NO: 904824 - RNA, 18 nt, Human
gcacuggacugcugggug

SEQ ID NO: 904825 - RNA, 19 nt, Human
ggaaacacaggagggaggc

SEQ ID NO: 904826 - RNA, 23 nt, Human
ggccaugggaaacacaggaggga

SEQ ID NO: 904827 - RNA, 19 nt, Human
uaagaacccagagcuaugg

SEQ ID NO: 904828 - RNA, 23 nt, Human
ucacaaaaacccaggaaaugcaa

SEQ ID NO: 904829 - RNA, 20 nt, Human
ugcacuggacugcugggugu

SEQ ID NO: 904830 - RNA, 18 nt, Human
uggggcauggccacuggc

SEQ ID NO: 904831 - RNA, 22 nt, Human
uucgccccgugcgccuuccaaa

SEQ ID NO: 904832 - RNA, 26 nt, Human
uuuuuuuuuuuuuuuugguuguuuuu

SEQ ID NO: 904833 - RNA, 18 nt, Human
uuuuuuuuuuuuuuuuug

SEQ ID NO: 904834 - RNA, 24 nt, Human
aaaacaccugagguacaaaggcac

SEQ ID NO: 904835 - RNA, 19 nt, Human
aacauacaaggaacauaca

SEQ ID NO: 904836 - RNA, 24 nt, Human
aagugccugauccaggcuccugcu

SEQ ID NO: 904837 - RNA, 18 nt, Human
accaggaaggggaaggac

SEQ ID NO: 904838 - RNA, 18 nt, Human
agccuuggggccagggau

SEQ ID NO: 904839 - RNA, 21 nt, Human
aggcaggaagugccugauccg

SEQ ID NO: 904840 - RNA, 19 nt, Human
aggcgcuagacagcuaacu

SEQ ID NO: 904841 - RNA, 23 nt, Human
aggcgcuagacagcuaacucugc

SEQ ID NO: 904842 - RNA, 22 nt, Human
agggaagugucugggcugucca

SEQ ID NO: 904843 - RNA, 23 nt, Human
agggaagugucugggcuguccag

SEQ ID NO: 904844 - RNA, 21 nt, Human
auaaaaacaaacauguaaaca

SEQ ID NO: 904845 - RNA, 23 nt, Human
auaaaaacaaacauguaaacaag

SEQ ID NO: 904846 - RNA, 23 nt, Human
caaaaaucagccugauaggaaca

SEQ ID NO: 904847 - RNA, 24 nt, Human
caccuaaaacaccugagguacaaa

SEQ ID NO: 904848 - RNA, 21 nt, Human
cacuuugauccuagccuuggg

SEQ ID NO: 904849 - RNA, 21 nt, Human
caggaagugccugauccaggc

SEQ ID NO: 904850 - RNA, 18 nt, Human
caggcuccugcugcgaag

SEQ ID NO: 904851 - RNA, 23 nt, Human
cauuuuauuuuuugguaaagcca

SEQ ID NO: 904852 - RNA, 20 nt, Human
ccagggucuuguagacagcg

SEQ ID NO: 904853 - RNA, 19 nt, Human
ccguggacagcuauccccu

SEQ ID NO: 904854 - RNA, 25 nt, Human
cuccagggucuuguagacagcgucc

SEQ ID NO: 904855 - RNA, 23 nt, Human
cugcagccacuuugauccuagcc

SEQ ID NO: 904856 - RNA, 21 nt, Human
gaaggggaaggacagaaaagg

SEQ ID NO: 904857 - RNA, 23 nt, Human
gcaauaccugaggcaggaagugc

SEQ ID NO: 904858 - RNA, 19 nt, Human
gcugcagccacuuugaucc

SEQ ID NO: 904859 - RNA, 18 nt, Human
uaaaaacaaacauguaaa

SEQ ID NO: 904860 - RNA, 25 nt, Human
uaaaacaccugagguacaaaggcac

SEQ ID NO: 904861 - RNA, 20 nt, Human
uaccaggcacguuaucucac

SEQ ID NO: 904862 - RNA, 24 nt, Human
uaccugaggcaggaagugccugau

SEQ ID NO: 904863 - RNA, 18 nt, Human
uagaaaugccauaaaaac

SEQ ID NO: 904864 - RNA, 21 nt, Human
uaguauggucucccucugcuc

SEQ ID NO: 904865 - RNA, 21 nt, Human
ucagaacuuugguucacugaa

SEQ ID NO: 904866 - RNA, 19 nt, Human
uccguggacagcuaucccc

SEQ ID NO: 904867 - RNA, 18 nt, Human
ucucacaccuaaaacacc

SEQ ID NO: 904868 - RNA, 24 nt, Human
ucucacaccuaaaacaccugaggu

SEQ ID NO: 904869 - RNA, 22 nt, Human
ucuuacacaugcagggcacagu

SEQ ID NO: 904870 - RNA, 18 nt, Human
ugaggcaggaagugccug

SEQ ID NO: 904871 - RNA, 22 nt, Human
ugaggcaggaagugccugaucc

SEQ ID NO: 904872 - RNA, 21 nt, Human
uggacagcuauccccuacagu

SEQ ID NO: 904873 - RNA, 19 nt, Human
uggcacaggcugaauggaa

SEQ ID NO: 904874 - RNA, 21 nt, Human
uggggccagggauggcacagg

SEQ ID NO: 904875 - RNA, 20 nt, Human
uguccagcaauaccugaggc

SEQ ID NO: 904876 - RNA, 19 nt, Human
acgccgcgcccccgcgccc

SEQ ID NO: 904877 - RNA, 22 nt, Human
cacgccgcgcccccgcgcccac

SEQ ID NO: 904878 - RNA, 21 nt, Human
ccaccgccgccgccgcuucag

SEQ ID NO: 904879 - RNA, 21 nt, Human
cuucagcccugcagcgugccg

SEQ ID NO: 904880 - RNA, 19 nt, Human
gccgcuucagcccugcagc

SEQ ID NO: 904881 - RNA, 20 nt, Human
guccccaccgccgccgccgc

SEQ ID NO: 904882 - RNA, 20 nt, Human
gugccgcacgccgcgccccc

SEQ ID NO: 904883 - RNA, 21 nt, Human
ucccaagaaaagaaaaugguc

SEQ ID NO: 904884 - RNA, 21 nt, Human
aaaaaugagaucauuucugcc

SEQ ID NO: 904885 - RNA, 21 nt, Human
aaaacacccaaaccugaaaug

SEQ ID NO: 904886 - RNA, 22 nt, Human
aaacaaccaugugauuccaagu

SEQ ID NO: 904887 - RNA, 19 nt, Human
aaacaucuucucuccagag

SEQ ID NO: 904888 - RNA, 21 nt, Human
aaauggcccugaacaaccaag

SEQ ID NO: 904889 - RNA, 18 nt, Human
aagcaacuuuuggcaugu

SEQ ID NO: 904890 - RNA, 22 nt, Human
aagcacuccugcgggugggagg

SEQ ID NO: 904891 - RNA, 21 nt, Human
aagcacugaaauuagccagcc

SEQ ID NO: 904892 - RNA, 22 nt, Human
aagguccuggauucuaaaggag

SEQ ID NO: 904893 - RNA, 20 nt, Human
acaggaaaggacacugcagc

SEQ ID NO: 904894 - RNA, 25 nt, Human
acaguggagggccugggauucugga

SEQ ID NO: 904895 - RNA, 21 nt, Human
acccucagccagcaccacucu

SEQ ID NO: 904896 - RNA, 20 nt, Human
acggcucccgagaacagcag

SEQ ID NO: 904897 - RNA, 19 nt, Human
acuccaugacccgcaaccu

SEQ ID NO: 904898 - RNA, 22 nt, Human
agauucagaaguggccacugca

SEQ ID NO: 904899 - RNA, 24 nt, Human
agcacaagcacugaaauuagccag

SEQ ID NO: 904900 - RNA, 22 nt, Human
agcauccaucaugagaugaaaa

SEQ ID NO: 904901 - RNA, 19 nt, Human
aggaagaacacgugggucc

SEQ ID NO: 904902 - RNA, 24 nt, Human
aggcacagcucaacgccagcuugc

SEQ ID NO: 904903 - RNA, 21 nt, Human
agguagauccagacacugcca

SEQ ID NO: 904904 - RNA, 22 nt, Human
agguccuggauucuaaaggagg

SEQ ID NO: 904905 - RNA, 21 nt, Human
auaagauagaaugcuugacca

SEQ ID NO: 904906 - RNA, 21 nt, Human
auggagcaaacacaguggcag

SEQ ID NO: 904907 - RNA, 18 nt, Human
augggacacaaaacaacc

SEQ ID NO: 904908 - RNA, 23 nt, Human
caacagcauccaucaugagauga

SEQ ID NO: 904909 - RNA, 24 nt, Human
caacagcauccaucaugagaugaa

SEQ ID NO: 904910 - RNA, 21 nt, Human
caaccaagcacaagcacugaa

SEQ ID NO: 904911 - RNA, 22 nt, Human
caagguagauccagacacugcc

SEQ ID NO: 904912 - RNA, 24 nt, Human
cacaaaacaaccaugugauuccaa

SEQ ID NO: 904913 - RNA, 23 nt, Human
cacagaaauaugccccauccaaa

SEQ ID NO: 904914 - RNA, 23 nt, Human
caccaaccaagggcuccuggacc

SEQ ID NO: 904915 - RNA, 23 nt, Human
caccaucugcaccaaccaagggc

SEQ ID NO: 904916 - RNA, 21 nt, Human
cacugaaauuagccagccuuc

SEQ ID NO: 904917 - RNA, 19 nt, Human
cagaaaacacccaaaccug

SEQ ID NO: 904918 - RNA, 23 nt, Human
cagacccucagccagcaccacuc

SEQ ID NO: 904919 - RNA, 28 nt, Human
cagcacagaaauaugccccauccaaagc

SEQ ID NO: 904920 - RNA, 20 nt, Human
cagggguguccuuccaaugu

SEQ ID NO: 904921 - RNA, 22 nt, Human
cagucuuaagagaucuggagaa

SEQ ID NO: 904922 - RNA, 18 nt, Human
caugacccgcaaccuugg

SEQ ID NO: 904923 - RNA, 26 nt, Human
caugcaaggaagaagcacacugccug

SEQ ID NO: 904924 - RNA, 22 nt, Human
cauguuaacauccccagaaaac

SEQ ID NO: 904925 - RNA, 24 nt, Human
ccaggccggguagguggguacaua

SEQ ID NO: 904926 - RNA, 21 nt, Human
ccaguggugggguaagauuug

SEQ ID NO: 904927 - RNA, 19 nt, Human
ccaugacccgcaaccuugg

SEQ ID NO: 904928 - RNA, 24 nt, Human
ccaugcugugggacccacuggguc

SEQ ID NO: 904929 - RNA, 18 nt, Human
cccaaugaucuucccugg

SEQ ID NO: 904930 - RNA, 20 nt, Human
cccacuggguccuaucacca

SEQ ID NO: 904931 - RNA, 21 nt, Human
cccauuccuucaacucaccug

SEQ ID NO: 904932 - RNA, 18 nt, Human
ccccagaaaacacccaaa

SEQ ID NO: 904933 - RNA, 19 nt, Human
ccccagaaaacacccaaac

SEQ ID NO: 904934 - RNA, 21 nt, Human
ccugauccacaggcuuggcac

SEQ ID NO: 904935 - RNA, 20 nt, Human
ccuuccaaugugaagacaaa

SEQ ID NO: 904936 - RNA, 19 nt, Human
cgagaacagcaggaggagg

SEQ ID NO: 904937 - RNA, 26 nt, Human
cuaauaguggcuggaggacucuuccu

SEQ ID NO: 904938 - RNA, 23 nt, Human
cuacauugcacuccuuccauccu

SEQ ID NO: 904939 - RNA, 21 nt, Human
cuccauaucccauuccuucaa

SEQ ID NO: 904940 - RNA, 23 nt, Human
cuccuuccauccuggaagggcca

SEQ ID NO: 904941 - RNA, 18 nt, Human
cucucagacccucagcca

SEQ ID NO: 904942 - RNA, 24 nt, Human
cugaaucccauguuaacaucccca

SEQ ID NO: 904943 - RNA, 19 nt, Human
cugacucccuccuaccaag

SEQ ID NO: 904944 - RNA, 21 nt, Human
cugcaggguagaagguccugg

SEQ ID NO: 904945 - RNA, 21 nt, Human
cuggaccauaaagaauguuga

SEQ ID NO: 904946 - RNA, 19 nt, Human
cuguuugaguucugacauc

SEQ ID NO: 904947 - RNA, 19 nt, Human
gaaccaagcaccaguagga

SEQ ID NO: 904948 - RNA, 19 nt, Human
gaagaacacguggguccag

SEQ ID NO: 904949 - RNA, 20 nt, Human
gaagaacacguggguccaga

SEQ ID NO: 904950 - RNA, 20 nt, Human
gaagggccagagguucaucu

SEQ ID NO: 904951 - RNA, 22 nt, Human
gaccaugggacacaaaacaacc

SEQ ID NO: 904952 - RNA, 22 nt, Human
gagcugaaccaagcaccaguag

SEQ ID NO: 904953 - RNA, 21 nt, Human
gccugaaucccauguuaacau

SEQ ID NO: 904954 - RNA, 22 nt, Human
ggacccacuugacagcgaagga

SEQ ID NO: 904955 - RNA, 20 nt, Human
ggagaaccuggauauacuau

SEQ ID NO: 904956 - RNA, 23 nt, Human
gggggcuguugauauuccugauc

SEQ ID NO: 904957 - RNA, 20 nt, Human
gguaagauuugggguggagc

SEQ ID NO: 904958 - RNA, 20 nt, Human
ggugcauuuuaaaaaucaaa

SEQ ID NO: 904959 - RNA, 22 nt, Human
gguuaggggcauccaggggugu

SEQ ID NO: 904960 - RNA, 23 nt, Human
guacauaaauggagcaaacacag

SEQ ID NO: 904961 - RNA, 20 nt, Human
gucuuaagagaucuggagaa

SEQ ID NO: 904962 - RNA, 19 nt, Human
guggaaguggauguggcuc

SEQ ID NO: 904963 - RNA, 23 nt, Human
uaaaacaucuucucuccagaggg

SEQ ID NO: 904964 - RNA, 25 nt, Human
uaaauaaaccuuacagagauucaga

SEQ ID NO: 904965 - RNA, 24 nt, Human
uaacauccccagaaaacacccaaa

SEQ ID NO: 904966 - RNA, 22 nt, Human
uacauuggacaugcccaacagc

SEQ ID NO: 904967 - RNA, 19 nt, Human
uaccuguguucuagaaugc

SEQ ID NO: 904968 - RNA, 19 nt, Human
uagauccagacacugccac

SEQ ID NO: 904969 - RNA, 20 nt, Human
uagugguuaggggcauccag

SEQ ID NO: 904970 - RNA, 23 nt, Human
uaucuucgugggggacccacuug

SEQ ID NO: 904971 - RNA, 24 nt, Human
uauguuggaagcaacuuuuggcaa

SEQ ID NO: 904972 - RNA, 23 nt, Human
ucacuugggggcacacuugcauc

SEQ ID NO: 904973 - RNA, 27 nt, Human
ucagacccccuggugcugaaagugcca

SEQ ID NO: 904974 - RNA, 18 nt, Human
uccaucaugagaugaaaa

SEQ ID NO: 904975 - RNA, 18 nt, Human
ucccauggucagcccagg

SEQ ID NO: 904976 - RNA, 20 nt, Human
uccccaggccucuauaguac

SEQ ID NO: 904977 - RNA, 19 nt, Human
ucuacaguucuguaaucuc

SEQ ID NO: 904978 - RNA, 19 nt, Human
ucuagaaugcauccaaaac

SEQ ID NO: 904979 - RNA, 24 nt, Human
ucuauaggcacagcucaacgccag

SEQ ID NO: 904980 - RNA, 20 nt, Human
ucuucgugggggacccacuu

SEQ ID NO: 904981 - RNA, 23 nt, Human
ucuuuaggugaccaaccagaccc

SEQ ID NO: 904982 - RNA, 24 nt, Human
ugaaauggcccugaacaaccaagc

SEQ ID NO: 904983 - RNA, 21 nt, Human
ugaaauuagccagccuuccca

SEQ ID NO: 904984 - RNA, 19 nt, Human
ugacaacaucauguugacu

SEQ ID NO: 904985 - RNA, 19 nt, Human
ugacaucacauucuacaug

SEQ ID NO: 904986 - RNA, 21 nt, Human
ugaccaugggacacaaaacaa

SEQ ID NO: 904987 - RNA, 22 nt, Human
ugacccacacucuaggugacau

SEQ ID NO: 904988 - RNA, 18 nt, Human
ugacccgcaaccuuggcg

SEQ ID NO: 904989 - RNA, 21 nt, Human
ugacuacauugcacuccuucc

SEQ ID NO: 904990 - RNA, 24 nt, Human
ugacucccuccuaccaagguagau

SEQ ID NO: 904991 - RNA, 19 nt, Human
ugagccuguuugaguucug

SEQ ID NO: 904992 - RNA, 24 nt, Human
ugcaggaagcacuccugcgggugg

SEQ ID NO: 904993 - RNA, 19 nt, Human
ugcaggguagaagguccug

SEQ ID NO: 904994 - RNA, 19 nt, Human
uggccuaauaguggcugga

SEQ ID NO: 904995 - RNA, 21 nt, Human
ugggauucuggaguaaggcca

SEQ ID NO: 904996 - RNA, 18 nt, Human
uggguccagauaccaagg

SEQ ID NO: 904997 - RNA, 20 nt, Human
uguccugcucucagacccuc

SEQ ID NO: 904998 - RNA, 18 nt, Human
uguccuuccaaugugaag

SEQ ID NO: 904999 - RNA, 22 nt, Human
uucauugacaacaucauguuga

SEQ ID NO: 905000 - RNA, 18 nt, Human
uucccugguagggcucua

SEQ ID NO: 905001 - RNA, 22 nt, Human
uucuacauguagguguauugcu

SEQ ID NO: 905002 - RNA, 23 nt, Human
uugcacuucucuccccaaaccac

SEQ ID NO: 905003 - RNA, 20 nt, Human
uuguaauguaaaaaugagau

SEQ ID NO: 905004 - RNA, 24 nt, Human
uuugacccacacucuaggugacau

SEQ ID NO: 905005 - RNA, 19 nt, Human
aaccggagccccccagccu

SEQ ID NO: 905006 - RNA, 20 nt, Human
aagggaggcugaaggcucau

SEQ ID NO: 905007 - RNA, 21 nt, Human
aaguagccaaggaagggggga

SEQ ID NO: 905008 - RNA, 21 nt, Human
agaaggggagaugcaggagga

SEQ ID NO: 905009 - RNA, 22 nt, Human
agcacuaaguuuucucucuccu

SEQ ID NO: 905010 - RNA, 27 nt, Human
agcacuaaguuuucucucuccugaggg

SEQ ID NO: 905011 - RNA, 23 nt, Human
aggagcagcauuacaaagggagg

SEQ ID NO: 905012 - RNA, 21 nt, Human
aggaggaaggggagguauagc

SEQ ID NO: 905013 - RNA, 20 nt, Human
aggcacaacuacccuccccu

SEQ ID NO: 905014 - RNA, 28 nt, Human
agguauagcgggggaugagccgguaccc

SEQ ID NO: 905015 - RNA, 18 nt, Human
augggacaaggaggaaga

SEQ ID NO: 905016 - RNA, 21 nt, Human
auggugcugggcaguggagag

SEQ ID NO: 905017 - RNA, 18 nt, Human
augucaaaguagccaagg

SEQ ID NO: 905018 - RNA, 23 nt, Human
caaaguagccaaggaagggggga

SEQ ID NO: 905019 - RNA, 20 nt, Human
cacuaaguuuucucucuccu

SEQ ID NO: 905020 - RNA, 18 nt, Human
cagguaguucccaaguga

SEQ ID NO: 905021 - RNA, 21 nt, Human
caugaaggcuccaagaagggc

SEQ ID NO: 905022 - RNA, 22 nt, Human
ccagcauggaggggggaguggg

SEQ ID NO: 905023 - RNA, 23 nt, Human
cccagccccgggcccggcuccgc

SEQ ID NO: 905024 - RNA, 18 nt, Human
ccccgggcccggcuccgc

SEQ ID NO: 905025 - RNA, 20 nt, Human
ccccgggcccggcuccgcuc

SEQ ID NO: 905026 - RNA, 20 nt, Human
ccccuggaccaugaaggcuc

SEQ ID NO: 905027 - RNA, 18 nt, Human
cccggcuccgcuccugcc

SEQ ID NO: 905028 - RNA, 21 nt, Human
ccuaggaguccccagagcugg

SEQ ID NO: 905029 - RNA, 22 nt, Human
ccucagggaaccggagcccccc

SEQ ID NO: 905030 - RNA, 19 nt, Human
ccugagggggaaggaaaga

SEQ ID NO: 905031 - RNA, 19 nt, Human
cuccaagaagggcuggaag

SEQ ID NO: 905032 - RNA, 22 nt, Human
cuccugagggggaaggaaagaa

SEQ ID NO: 905033 - RNA, 21 nt, Human
cugggcaguggagaggagcag

SEQ ID NO: 905034 - RNA, 21 nt, Human
gaaagaaggggagaugcagga

SEQ ID NO: 905035 - RNA, 20 nt, Human
gaaggcuccaagaagggcug

SEQ ID NO: 905036 - RNA, 20 nt, Human
gacaaggaggaagacaggag

SEQ ID NO: 905037 - RNA, 20 nt, Human
gaggaaggggagguauagcg

SEQ ID NO: 905038 - RNA, 20 nt, Human
gccccgggcccggcuccgcu

SEQ ID NO: 905039 - RNA, 20 nt, Human
ggaaagaaggggagaugcag

SEQ ID NO: 905040 - RNA, 25 nt, Human
ggaaccggagccccccagccugugg

SEQ ID NO: 905041 - RNA, 27 nt, Human
ggaggaaggggagguauagcgggggau

SEQ ID NO: 905042 - RNA, 19 nt, Human
guccccagagcuggggggu

SEQ ID NO: 905043 - RNA, 21 nt, Human
guggagaggagcagcauuaca

SEQ ID NO: 905044 - RNA, 18 nt, Human
uacaaagggaggcugaag

SEQ ID NO: 905045 - RNA, 23 nt, Human
uaggcacaacuacccuccccuca

SEQ ID NO: 905046 - RNA, 22 nt, Human
ucagcccugaacagagggcaga

SEQ ID NO: 905047 - RNA, 23 nt, Human
ucagcccugaacagagggcagaa

SEQ ID NO: 905048 - RNA, 18 nt, Human
ucauguccaugguccugg

SEQ ID NO: 905049 - RNA, 21 nt, Human
ucccaagugaccuaggagucc

SEQ ID NO: 905050 - RNA, 21 nt, Human
uccccagagcuggggggugug

SEQ ID NO: 905051 - RNA, 22 nt, Human
ucccucagggaaccggagcccc

SEQ ID NO: 905052 - RNA, 18 nt, Human
ucuccugagggggaagga

SEQ ID NO: 905053 - RNA, 22 nt, Human
ugaaggcuccaagaagggcugg

SEQ ID NO: 905054 - RNA, 19 nt, Human
ugcaggaggaaggggaggg

SEQ ID NO: 905055 - RNA, 18 nt, Human
ugcucaggccaguggggc

SEQ ID NO: 905056 - RNA, 21 nt, Human
uggcaugcucaggccaguggg

SEQ ID NO: 905057 - RNA, 19 nt, Human
ugggacaaggaggaagaca

SEQ ID NO: 905058 - RNA, 21 nt, Human
uggggccccuaccccuggacc

SEQ ID NO: 905059 - RNA, 22 nt, Human
uggggcuugugucagcccugaa

SEQ ID NO: 905060 - RNA, 23 nt, Human
ugggggguguggccuucauggga

SEQ ID NO: 905061 - RNA, 21 nt, Human
ugucagcccugaacagagggc

SEQ ID NO: 905062 - RNA, 18 nt, Human
uuuuuuuuuuucagaccc

SEQ ID NO: 905063 - RNA, 22 nt, Human
uuuuuuuuuuuuuuuuuuucag

SEQ ID NO: 905064 - RNA, 24 nt, Human
aagcaagaguuaaauauaaaccca

SEQ ID NO: 905065 - RNA, 20 nt, Human
acccugccucgggcuucagc

SEQ ID NO: 905066 - RNA, 26 nt, Human
agcaucuaccaccccuucagagcaac

SEQ ID NO: 905067 - RNA, 21 nt, Human
agucuccaccaacugagcagc

SEQ ID NO: 905068 - RNA, 19 nt, Human
auccuccccagccccuccu

SEQ ID NO: 905069 - RNA, 27 nt, Human
auccuccccagccccuccucccagcug

SEQ ID NO: 905070 - RNA, 19 nt, Human
cagcugaggaggggcaaug

SEQ ID NO: 905071 - RNA, 22 nt, Human
cauugcuuggucugaacagauu

SEQ ID NO: 905072 - RNA, 19 nt, Human
ccaauucagagaaagcccg

SEQ ID NO: 905073 - RNA, 19 nt, Human
ccccucagcgagggaccgg

SEQ ID NO: 905074 - RNA, 22 nt, Human
ccccuccucccagcugggcuga

SEQ ID NO: 905075 - RNA, 18 nt, Human
cccuccucccagcugggc

SEQ ID NO: 905076 - RNA, 20 nt, Human
ccuccccagccccuccuccc

SEQ ID NO: 905077 - RNA, 23 nt, Human
cgagcuaacagcagcuucuggga

SEQ ID NO: 905078 - RNA, 22 nt, Human
cgaggaccggcgagcuaacagc

SEQ ID NO: 905079 - RNA, 23 nt, Human
cggaaguaacgcuaggggaaggg

SEQ ID NO: 905080 - RNA, 18 nt, Human
gagcaacuuccaacaugg

SEQ ID NO: 905081 - RNA, 21 nt, Human
gagccgcacgaacccccucag

SEQ ID NO: 905082 - RNA, 21 nt, Human
gcugacuccagucccagcccc

SEQ ID NO: 905083 - RNA, 22 nt, Human
gcugggcugacuccagucccag

SEQ ID NO: 905084 - RNA, 24 nt, Human
ggagaggaagcucgcauugcuugg

SEQ ID NO: 905085 - RNA, 21 nt, Human
gggagcggggcaggggggugg

SEQ ID NO: 905086 - RNA, 21 nt, Human
gggcagggggguggcaggggc

SEQ ID NO: 905087 - RNA, 18 nt, Human
ggggcagggggguggcag

SEQ ID NO: 905088 - RNA, 19 nt, Human
uagcauuaaauaacacucu

SEQ ID NO: 905089 - RNA, 19 nt, Human
uagcauuaaauaacacucu

SEQ ID NO: 905090 - RNA, 19 nt, Human
uaucacaaggaccugaaaa

SEQ ID NO: 905091 - RNA, 21 nt, Human
uauuaaagcaguuaaacuuag

SEQ ID NO: 905092 - RNA, 24 nt, Human
ucccagccccagucuccaccaacu

SEQ ID NO: 905093 - RNA, 19 nt, Human
ugaggaggggcaauggugg

SEQ ID NO: 905094 - RNA, 21 nt, Human
ugaggaggggcaaugguggga

SEQ ID NO: 905095 - RNA, 25 nt, Human
ugccucgggcuucagcugcagaucc

SEQ ID NO: 905096 - RNA, 24 nt, Human
uggcuuccagcaucuaccaccccu

SEQ ID NO: 905097 - RNA, 19 nt, Human
ugggauggugcaacccuau

SEQ ID NO: 905098 - RNA, 21 nt, Human
uggugggagcggggcaggggg

SEQ ID NO: 905099 - RNA, 22 nt, Human
uuaaaugguacaccuaugaagc

SEQ ID NO: 905100 - RNA, 24 nt, Human
uucagagcaacuuccaacauggga

SEQ ID NO: 905101 - RNA, 21 nt, Human
uucagcugcagauccucccca

SEQ ID NO: 905102 - RNA, 19 nt, Human
uugcuuggucugaacagau

SEQ ID NO: 905103 - RNA, 23 nt, Human
uuuccuguuuucuccucaccacu

SEQ ID NO: 905104 - RNA, 26 nt, Human
uuuccuguuuucuccucaccacuuuc

SEQ ID NO: 905105 - RNA, 22 nt, Human
aaaaaaaaaaaaaaaggcaaaa

SEQ ID NO: 905106 - RNA, 24 nt, Human
aaaaaaaaaaaaaaaggcaaaauu

SEQ ID NO: 905107 - RNA, 24 nt, Human
aaaaaaaggaagaaaaggaaaaag

SEQ ID NO: 905108 - RNA, 23 nt, Human
aaaaaagcuuccaauuuugugga

SEQ ID NO: 905109 - RNA, 19 nt, Human
aaaaagccaggaaggcccg

SEQ ID NO: 905110 - RNA, 23 nt, Human
aaaacuucugccccuaacacucc

SEQ ID NO: 905111 - RNA, 23 nt, Human
aaagaaaaaagccaggaaggccc

SEQ ID NO: 905112 - RNA, 18 nt, Human
aaagggaaugauuaggga

SEQ ID NO: 905113 - RNA, 24 nt, Human
aaagggaaugauuagggaaaagga

SEQ ID NO: 905114 - RNA, 18 nt, Human
aacugaagagagaagaca

SEQ ID NO: 905115 - RNA, 20 nt, Human
aacuucugccccuaacacuc

SEQ ID NO: 905116 - RNA, 19 nt, Human
aacuugggcaucucguacc

SEQ ID NO: 905117 - RNA, 24 nt, Human
aagacaccaaccuuaaaauacugc

SEQ ID NO: 905118 - RNA, 27 nt, Human
aaggaugaggaaggaggagggaaggga

SEQ ID NO: 905119 - RNA, 18 nt, Human
acagacaugccacaaggc

SEQ ID NO: 905120 - RNA, 20 nt, Human
acagagcggcagaagaacag

SEQ ID NO: 905121 - RNA, 21 nt, Human
acagagcggcagaagaacaga

SEQ ID NO: 905122 - RNA, 19 nt, Human
acccaaauuguccagcccc

SEQ ID NO: 905123 - RNA, 26 nt, Human
acccaaauuguccagcccccaaacac

SEQ ID NO: 905124 - RNA, 25 nt, Human
accucagcgguugaacaaaggguca

SEQ ID NO: 905125 - RNA, 18 nt, Human
accuccaucacuaauccc

SEQ ID NO: 905126 - RNA, 18 nt, Human
acuucuccucauucuucu

SEQ ID NO: 905127 - RNA, 27 nt, Human
agaagaacagaucgcagcagugugaaa

SEQ ID NO: 905128 - RNA, 20 nt, Human
agacgguauugcacauucuc

SEQ ID NO: 905129 - RNA, 23 nt, Human
agagagaagacagagcggcagaa

SEQ ID NO: 905130 - RNA, 18 nt, Human
agaggggauagauuagaa

SEQ ID NO: 905131 - RNA, 19 nt, Human
agaggggauagauuagaau

SEQ ID NO: 905132 - RNA, 24 nt, Human
agccagacgguauugcacauucuc

SEQ ID NO: 905133 - RNA, 21 nt, Human
agccaggaaggcccguagggc

SEQ ID NO: 905134 - RNA, 22 nt, Human
agcccagacacuggcugcaucu

SEQ ID NO: 905135 - RNA, 27 nt, Human
agccugguccacuccgucuucccacag

SEQ ID NO: 905136 - RNA, 20 nt, Human
agcgcuuaaaaaaaaaaaaa

SEQ ID NO: 905137 - RNA, 20 nt, Human
aggaaggaggagggaaggga

SEQ ID NO: 905138 - RNA, 20 nt, Human
aggaggagggaagggaggag

SEQ ID NO: 905139 - RNA, 20 nt, Human
aggcaagaugacuugugggg

SEQ ID NO: 905140 - RNA, 20 nt, Human
aggcacugcaugcgacagaa

SEQ ID NO: 905141 - RNA, 24 nt, Human
aggcaggaccuaguuucaauccuc

SEQ ID NO: 905142 - RNA, 23 nt, Human
agggaaaggacucagcucagggc

SEQ ID NO: 905143 - RNA, 20 nt, Human
agggaagggaggagguggaa

SEQ ID NO: 905144 - RNA, 22 nt, Human
agggaggaaagaaaaaagccag

SEQ ID NO: 905145 - RNA, 22 nt, Human
agggcuuagauucuccccagga

SEQ ID NO: 905146 - RNA, 20 nt, Human
aggggagguggcagggcagg

SEQ ID NO: 905147 - RNA, 21 nt, Human
agguagggugcuauucguccu

SEQ ID NO: 905148 - RNA, 23 nt, Human
aucuuuacaaagcaguucuauag

SEQ ID NO: 905149 - RNA, 24 nt, Human
auggggaaggugugcaguucaugu

SEQ ID NO: 905150 - RNA, 21 nt, Human
caaagcacagagggcaaagaa

SEQ ID NO: 905151 - RNA, 22 nt, Human
caaauaagaaccucuguccccu

SEQ ID NO: 905152 - RNA, 21 nt, Human
caaauaucauaagcuaaugaa

SEQ ID NO: 905153 - RNA, 23 nt, Human
caaggcaaucagugaugaaaaaa

SEQ ID NO: 905154 - RNA, 19 nt, Human
cacuccgucuucccacagu

SEQ ID NO: 905155 - RNA, 20 nt, Human
cacucgacuauaggcuuucc

SEQ ID NO: 905156 - RNA, 19 nt, Human
cacugaacaaagggaggac

SEQ ID NO: 905157 - RNA, 20 nt, Human
cagagggugaaagaauaggc

SEQ ID NO: 905158 - RNA, 20 nt, Human
cagcucagggcagggcaggg

SEQ ID NO: 905159 - RNA, 23 nt, Human
cagcugggaccccuacugcaauc

SEQ ID NO: 905160 - RNA, 23 nt, Human
cagcuucuauguaacugacccuu

SEQ ID NO: 905161 - RNA, 19 nt, Human
caggaccuaguuucaaucc

SEQ ID NO: 905162 - RNA, 18 nt, Human
caguaccaaacacugcca

SEQ ID NO: 905163 - RNA, 21 nt, Human
ccaagauacagaaaggcagga

SEQ ID NO: 905164 - RNA, 19 nt, Human
ccacaaggcaagaugacuu

SEQ ID NO: 905165 - RNA, 18 nt, Human
ccaccacuuacagucagg

SEQ ID NO: 905166 - RNA, 21 nt, Human
ccagcccccaaacacccacag

SEQ ID NO: 905167 - RNA, 23 nt, Human
ccaguacaggcacugcaugcgac

SEQ ID NO: 905168 - RNA, 22 nt, Human
ccaucuccccugugaccucagc

SEQ ID NO: 905169 - RNA, 23 nt, Human
cccaagauacagaaaggcaggac

SEQ ID NO: 905170 - RNA, 23 nt, Human
cccccagccucucaucuccuggc

SEQ ID NO: 905171 - RNA, 22 nt, Human
cccucucccaccacuuacaguc

SEQ ID NO: 905172 - RNA, 19 nt, Human
ccuaagcaggcacucgacu

SEQ ID NO: 905173 - RNA, 19 nt, Human
ccucugagcaccucugagc

SEQ ID NO: 905174 - RNA, 21 nt, Human
ccucugagcaccucugagcuu

SEQ ID NO: 905175 - RNA, 24 nt, Human
ccucugagcaccucugagcuuggg

SEQ ID NO: 905176 - RNA, 25 nt, Human
ccucugagcaccucugagcuugggg

SEQ ID NO: 905177 - RNA, 19 nt, Human
ccuggcucccagggaaagg

SEQ ID NO: 905178 - RNA, 20 nt, Human
ccuucuggaggaguggggag

SEQ ID NO: 905179 - RNA, 23 nt, Human
cuaggacggggguggggguaggg

SEQ ID NO: 905180 - RNA, 21 nt, Human
cuccuagucauguccuacuuu

SEQ ID NO: 905181 - RNA, 23 nt, Human
cucugcugagaacauucccccca

SEQ ID NO: 905182 - RNA, 25 nt, Human
cugacccugaggggauaaaaacagg

SEQ ID NO: 905183 - RNA, 22 nt, Human
cugauuguguacccccagccuc

SEQ ID NO: 905184 - RNA, 23 nt, Human
cuguuuggcuuugagcaguuggu

SEQ ID NO: 905185 - RNA, 21 nt, Human
cuuagauucuccccaggaccu

SEQ ID NO: 905186 - RNA, 20 nt, Human
cuucaaaaacagccuggucc

SEQ ID NO: 905187 - RNA, 18 nt, Human
cuuuauauauauauauau

SEQ ID NO: 905188 - RNA, 21 nt, Human
gaaaaauacucaaaaaaccca

SEQ ID NO: 905189 - RNA, 20 nt, Human
gaagagagaagacagagcgg

SEQ ID NO: 905190 - RNA, 19 nt, Human
gaagggaggagguggaagg

SEQ ID NO: 905191 - RNA, 18 nt, Human
gaauuugggguaagggag

SEQ ID NO: 905192 - RNA, 19 nt, Human
gacagaaguugggggaaug

SEQ ID NO: 905193 - RNA, 20 nt, Human
gaccucauucugaccucuau

SEQ ID NO: 905194 - RNA, 18 nt, Human
gagagaagacagagcggc

SEQ ID NO: 905195 - RNA, 18 nt, Human
gaggaagaggcuagacag

SEQ ID NO: 905196 - RNA, 19 nt, Human
gaggagggaagggaggagg

SEQ ID NO: 905197 - RNA, 19 nt, Human
gagguggcagggcagggcg

SEQ ID NO: 905198 - RNA, 18 nt, Human
gauuccaccaucuccccu

SEQ ID NO: 905199 - RNA, 22 nt, Human
gcaaaaccaaacaauuuaucca

SEQ ID NO: 905200 - RNA, 20 nt, Human
gcagagguccuaagcugguu

SEQ ID NO: 905201 - RNA, 18 nt, Human
gcaucucugcuccuuuaa

SEQ ID NO: 905202 - RNA, 19 nt, Human
gcguguguuuucuugcuga

SEQ ID NO: 905203 - RNA, 21 nt, Human
gcucaaugaauuugggguaag

SEQ ID NO: 905204 - RNA, 19 nt, Human
gcuucuggagccagagagg

SEQ ID NO: 905205 - RNA, 22 nt, Human
ggaaaacauuuaucucuguguc

SEQ ID NO: 905206 - RNA, 19 nt, Human
ggaggaguggggagaaaag

SEQ ID NO: 905207 - RNA, 20 nt, Human
ggcacugggguguggggagu

SEQ ID NO: 905208 - RNA, 25 nt, Human
gggaaaaggaacaaaaguaaaauau

SEQ ID NO: 905209 - RNA, 18 nt, Human
gggaagggaggaggugga

SEQ ID NO: 905210 - RNA, 23 nt, Human
gggauaaaaacagggaagauucc

SEQ ID NO: 905211 - RNA, 18 nt, Human
ggggagaagaaaggguaa

SEQ ID NO: 905212 - RNA, 24 nt, Human
ggggagagggagacguaacagaaa

SEQ ID NO: 905213 - RNA, 25 nt, Human
ggguaagaaaucaaaccucagcggu

SEQ ID NO: 905214 - RNA, 20 nt, Human
ggguggggugagggagaauu

SEQ ID NO: 905215 - RNA, 22 nt, Human
guaccaaacacugccacccaaa

SEQ ID NO: 905216 - RNA, 20 nt, Human
uaaaaaaagcuuccaauuuu

SEQ ID NO: 905217 - RNA, 23 nt, Human
uaaaaaaagcuuccaauuuugug

SEQ ID NO: 905218 - RNA, 19 nt, Human
uaaaauaaucccagaccca

SEQ ID NO: 905219 - RNA, 19 nt, Human
uaaccccccucccucuccc

SEQ ID NO: 905220 - RNA, 18 nt, Human
uacaaaaaaaaaaaaaaa

SEQ ID NO: 905221 - RNA, 20 nt, Human
uaccauacauauauccaaaa

SEQ ID NO: 905222 - RNA, 23 nt, Human
uaccucugagcaccucugagcuu

SEQ ID NO: 905223 - RNA, 22 nt, Human
uagauuagaauuuuuaaaagca

SEQ ID NO: 905224 - RNA, 23 nt, Human
uagcauaaaacaacuuuagaaac

SEQ ID NO: 905225 - RNA, 25 nt, Human
uagcucuuucucccaccccaccucc

SEQ ID NO: 905226 - RNA, 21 nt, Human
uagucaagaagcagcuucuau

SEQ ID NO: 905227 - RNA, 19 nt, Human
uagugccucuggggaugga

SEQ ID NO: 905228 - RNA, 22 nt, Human
uaucaagaagcaucuuuacaaa

SEQ ID NO: 905229 - RNA, 18 nt, Human
uaucauugaacugaaugu

SEQ ID NO: 905230 - RNA, 21 nt, Human
uauuccagggagagagggagu

SEQ ID NO: 905231 - RNA, 23 nt, Human
ucacuaccuguuacuagcaucua

SEQ ID NO: 905232 - RNA, 22 nt, Human
ucaggugacuuucaagggcaaa

SEQ ID NO: 905233 - RNA, 23 nt, Human
uccacccaacuugugggacaccc

SEQ ID NO: 905234 - RNA, 23 nt, Human
uccaccucacuguuaaagaaaac

SEQ ID NO: 905235 - RNA, 22 nt, Human
ucccacagugugggcaaauggg

SEQ ID NO: 905236 - RNA, 19 nt, Human
uccccaggcucuuuccccu

SEQ ID NO: 905237 - RNA, 18 nt, Human
uccccggaaaaauacuca

SEQ ID NO: 905238 - RNA, 23 nt, Human
uccccggaaaaauacucaaaaaa

SEQ ID NO: 905239 - RNA, 25 nt, Human
ucccugggaagaguaugaaaauggg

SEQ ID NO: 905240 - RNA, 21 nt, Human
uccucaggugacuuucaaggg

SEQ ID NO: 905241 - RNA, 21 nt, Human
uccuuguuauaacaucucggc

SEQ ID NO: 905242 - RNA, 23 nt, Human
ucuaucagagguaaagauccacc

SEQ ID NO: 905243 - RNA, 19 nt, Human
ucucccaccccaccuccaa

SEQ ID NO: 905244 - RNA, 28 nt, Human
ucugcagcuggugcagcagaguaaggac

SEQ ID NO: 905245 - RNA, 23 nt, Human
ucugccccuaacacuccuaguca

SEQ ID NO: 905246 - RNA, 24 nt, Human
ucuuucuucccgucuucuccuccu

SEQ ID NO: 905247 - RNA, 18 nt, Human
ugaaagaauaggcaaaua

SEQ ID NO: 905248 - RNA, 22 nt, Human
ugaacaaagggaggacacacaa

SEQ ID NO: 905249 - RNA, 18 nt, Human
ugagggagggaggaagag

SEQ ID NO: 905250 - RNA, 18 nt, Human
ugaggggauaaaaacagg

SEQ ID NO: 905251 - RNA, 18 nt, Human
ugcaguucaugugugugu

SEQ ID NO: 905252 - RNA, 18 nt, Human
ugcucaaugaauuugggg

SEQ ID NO: 905253 - RNA, 21 nt, Human
ugcuccaaacagagggucuuu

SEQ ID NO: 905254 - RNA, 20 nt, Human
uggaacagccguuccucugu

SEQ ID NO: 905255 - RNA, 20 nt, Human
uggagagaaggguuaugccu

SEQ ID NO: 905256 - RNA, 20 nt, Human
uggccuggcucccagggaaa

SEQ ID NO: 905257 - RNA, 23 nt, Human
ugggaaaaauacuuauuccaggg

SEQ ID NO: 905258 - RNA, 26 nt, Human
ugggacacccagcaaacagccuugga

SEQ ID NO: 905259 - RNA, 25 nt, Human
ugggaugcuaaucuccccagucccc

SEQ ID NO: 905260 - RNA, 24 nt, Human
ugggggaaugaaagaggaaaggga

SEQ ID NO: 905261 - RNA, 19 nt, Human
ugggggcgggcggggggca

SEQ ID NO: 905262 - RNA, 23 nt, Human
ugggggcgggcggggggcagugg

SEQ ID NO: 905263 - RNA, 22 nt, Human
uguccagcccccaaacacccac

SEQ ID NO: 905264 - RNA, 20 nt, Human
uguccuuagggcaugagguu

SEQ ID NO: 905265 - RNA, 21 nt, Human
ugugggaaaaauacuuauucc

SEQ ID NO: 905266 - RNA, 18 nt, Human
uguggggaguagaggcca

SEQ ID NO: 905267 - RNA, 24 nt, Human
uguuaaagaaaacugaagagagaa

SEQ ID NO: 905268 - RNA, 21 nt, Human
uguuuggcuuugagcaguugg

SEQ ID NO: 905269 - RNA, 20 nt, Human
uuaaaaaaaaaaaaaaaaaa

SEQ ID NO: 905270 - RNA, 21 nt, Human
uuaaaaaaaaaaaaaaaaaaa

SEQ ID NO: 905271 - RNA, 26 nt, Human
uuagaaacacacaucggagggcuuag

SEQ ID NO: 905272 - RNA, 31 nt, Human
uuagagcccaacuucaguaccaaacacugcu

SEQ ID NO: 905273 - RNA, 24 nt, Human
uuagcucuuucucccaccccaccu

SEQ ID NO: 905274 - RNA, 21 nt, Human
uucaaaaacagccugguccac

SEQ ID NO: 905275 - RNA, 22 nt, Human
uucuauggguaaauuccagagu

SEQ ID NO: 905276 - RNA, 22 nt, Human
uuggcagcugggaccccuacug

SEQ ID NO: 905277 - RNA, 20 nt, Human
uuuaaaauaaucccagaccc

SEQ ID NO: 905278 - RNA, 19 nt, Human
uuuaaaggggaaaggaaag

SEQ ID NO: 905279 - RNA, 23 nt, Human
uuuuauggggaaggugugcaguu

SEQ ID NO: 905280 - RNA, 19 nt, Human
cacacacccaagcuguggc

SEQ ID NO: 905281 - RNA, 23 nt, Human
cacccaagcuguggcugccgugc

SEQ ID NO: 905282 - RNA, 18 nt, Human
caucuugcacuuuugcua

SEQ ID NO: 905283 - RNA, 18 nt, Human
cccaagcuguggcugccg

SEQ ID NO: 905284 - RNA, 19 nt, Human
cccgggccucuccacuccc

SEQ ID NO: 905285 - RNA, 20 nt, Human
cccgggccucuccacucccu

SEQ ID NO: 905286 - RNA, 20 nt, Human
cccugccucucuucuucucc

SEQ ID NO: 905287 - RNA, 22 nt, Human
cccugccucucuucuucuccua

SEQ ID NO: 905288 - RNA, 20 nt, Human
ccuccuuccuccgcaguccc

SEQ ID NO: 905289 - RNA, 20 nt, Human
ccuggaggagccccaguucu

SEQ ID NO: 905290 - RNA, 23 nt, Human
ccuggaggagccccaguucugac

SEQ ID NO: 905291 - RNA, 24 nt, Human
ccuguccuggguccuccuuccucc

SEQ ID NO: 905292 - RNA, 18 nt, Human
cugccucucuucuucucc

SEQ ID NO: 905293 - RNA, 18 nt, Human
cuggccccgggccucucc

SEQ ID NO: 905294 - RNA, 24 nt, Human
cuggccccgggccucuccacuccc

SEQ ID NO: 905295 - RNA, 21 nt, Human
cuuccuggcucugccccucca

SEQ ID NO: 905296 - RNA, 18 nt, Human
gagccccaguuucuucug

SEQ ID NO: 905297 - RNA, 22 nt, Human
gcacuuuugcuaggguuggagg

SEQ ID NO: 905298 - RNA, 21 nt, Human
gccccgggccucuccacuccc

SEQ ID NO: 905299 - RNA, 19 nt, Human
gcuggguguaguguccaug

SEQ ID NO: 905300 - RNA, 19 nt, Human
ggcucugccccuccauucc

SEQ ID NO: 905301 - RNA, 19 nt, Human
gguccuccuuccuccgcag

SEQ ID NO: 905302 - RNA, 18 nt, Human
ucccagccucucacuccc

SEQ ID NO: 905303 - RNA, 19 nt, Human
ucccagccucucacucccc

SEQ ID NO: 905304 - RNA, 24 nt, Human
uccugguagccccucagagacuca

SEQ ID NO: 905305 - RNA, 21 nt, Human
ucuauuuauuguugcugccac

SEQ ID NO: 905306 - RNA, 23 nt, Human
ucuugcacuuuugcuaggguugg

SEQ ID NO: 905307 - RNA, 20 nt, Human
ugccucucuucuucuccuaa

SEQ ID NO: 905308 - RNA, 20 nt, Human
uggcaagccggccuggaucc

SEQ ID NO: 905309 - RNA, 18 nt, Human
ugggggguguggcaagcc

SEQ ID NO: 905310 - RNA, 23 nt, Human
ugucucugcuuuccuggccccgg

SEQ ID NO: 905311 - RNA, 18 nt, Human
uuaacaaggaugaacaca

SEQ ID NO: 905312 - RNA, 22 nt, Human
uuccuggcucugccccuccauu

SEQ ID NO: 905313 - RNA, 21 nt, Human
uucugggggaucuuccuggcu

SEQ ID NO: 905314 - RNA, 23 nt, Human
uucuguagcuuucuuuucugggg

SEQ ID NO: 905315 - RNA, 26 nt, Human
uuuaacaaggaugaacacacacccaa

SEQ ID NO: 905316 - RNA, 19 nt, Human
uuuauuguugcugccaccc

SEQ ID NO: 905317 - RNA, 22 nt, Human
uuuuuuuuuuuuuuaacaagga

SEQ ID NO: 905318 - RNA, 25 nt, Human
uuuuuuuuuuuuuuuuuuaacaagg

SEQ ID NO: 905319 - RNA, 22 nt, Human
aaaaccaguggaccucuuauca

SEQ ID NO: 905320 - RNA, 23 nt, Human
aaaccaguggaccucuuaucaaa

SEQ ID NO: 905321 - RNA, 24 nt, Human
caguuuuaauaaaaagaaaaaaaa

SEQ ID NO: 905322 - RNA, 26 nt, Human
cuucucggcugcgcgugcccgccacu

SEQ ID NO: 905323 - RNA, 22 nt, Human
uaucacaguuuuaauaaaaaga

SEQ ID NO: 905324 - RNA, 23 nt, Human
uaucacaguuuuaauaaaaagaa

SEQ ID NO: 905325 - RNA, 19 nt, Human
aaaagcaacaggauuugga

SEQ ID NO: 905326 - RNA, 23 nt, Human
aaaauucuuuacauauaaagcuu

SEQ ID NO: 905327 - RNA, 21 nt, Human
aaacaguuacacagcaucuug

SEQ ID NO: 905328 - RNA, 22 nt, Human
aaauagcagaaacuaaaggaau

SEQ ID NO: 905329 - RNA, 19 nt, Human
aagcugccaaacagucacu

SEQ ID NO: 905330 - RNA, 20 nt, Human
aaucaaauuugauaacccga

SEQ ID NO: 905331 - RNA, 19 nt, Human
aaugcacaagacagcugcc

SEQ ID NO: 905332 - RNA, 19 nt, Human
acccaggacugcgcagcag

SEQ ID NO: 905333 - RNA, 24 nt, Human
agcaacaugucccacaacuuuggu

SEQ ID NO: 905334 - RNA, 23 nt, Human
agcagaaacuaaaggaaucaugg

SEQ ID NO: 905335 - RNA, 23 nt, Human
agccaucuauucauuccuccagc

SEQ ID NO: 905336 - RNA, 21 nt, Human
agucacugcuugugccagcag

SEQ ID NO: 905337 - RNA, 23 nt, Human
agucccauucuuugcaugcucca

SEQ ID NO: 905338 - RNA, 21 nt, Human
augguuguugcugagcugugu

SEQ ID NO: 905339 - RNA, 21 nt, Human
auuaacacauaaugcaaguuu

SEQ ID NO: 905340 - RNA, 20 nt, Human
cacccaggacugcgcagcag

SEQ ID NO: 905341 - RNA, 21 nt, Human
cagaauacaaaguacuuaaua

SEQ ID NO: 905342 - RNA, 20 nt, Human
cagagagacugaaugcaccc

SEQ ID NO: 905343 - RNA, 19 nt, Human
cagcaacaugucccacaac

SEQ ID NO: 905344 - RNA, 20 nt, Human
cagcugcccuccagugucag

SEQ ID NO: 905345 - RNA, 22 nt, Human
caguaauacugacagacuucaa

SEQ ID NO: 905346 - RNA, 20 nt, Human
ccaggaggcaggcagaggca

SEQ ID NO: 905347 - RNA, 18 nt, Human
ccagugucaggauccugu

SEQ ID NO: 905348 - RNA, 19 nt, Human
cccuuguagacuauaucug

SEQ ID NO: 905349 - RNA, 27 nt, Human
ccgacuaaaaauauuuuccagcuuuau

SEQ ID NO: 905350 - RNA, 25 nt, Human
ccugaauuuaaaaaacuaaugaaag

SEQ ID NO: 905351 - RNA, 25 nt, Human
cugaaacagccaucuauucauuccu

SEQ ID NO: 905352 - RNA, 21 nt, Human
gaacacaaguaaugcacaaga

SEQ ID NO: 905353 - RNA, 20 nt, Human
gaaugcacccaggacugcgc

SEQ ID NO: 905354 - RNA, 25 nt, Human
gcaccaagaucuucuaaaauucuuu

SEQ ID NO: 905355 - RNA, 21 nt, Human
gcagucuacagcaacaugucc

SEQ ID NO: 905356 - RNA, 21 nt, Human
gugaauggcagccugucuuca

SEQ ID NO: 905357 - RNA, 20 nt, Human
uaaaguggggaccaggaggc

SEQ ID NO: 905358 - RNA, 19 nt, Human
uaacuguuaccaucaaaau

SEQ ID NO: 905359 - RNA, 24 nt, Human
uaauacugacagacuucaaaagca

SEQ ID NO: 905360 - RNA, 24 nt, Human
uaauauccagaacccugaauuuaa

SEQ ID NO: 905361 - RNA, 23 nt, Human
uacacagcaucuuguacugucaa

SEQ ID NO: 905362 - RNA, 23 nt, Human
uacagcaacaugucccacaacuu

SEQ ID NO: 905363 - RNA, 21 nt, Human
uagacuauaucugcugaucau

SEQ ID NO: 905364 - RNA, 23 nt, Human
uagcagaaacuaaaggaaucaug

SEQ ID NO: 905365 - RNA, 27 nt, Human
uagcagaaacuaaaggaaucauggcag

SEQ ID NO: 905366 - RNA, 27 nt, Human
uagcagcaccaagaucuucuaaaauuc

SEQ ID NO: 905367 - RNA, 22 nt, Human
uagcuuaacugaaacagccauc

SEQ ID NO: 905368 - RNA, 23 nt, Human
uagcuuaacugaaacagccaucu

SEQ ID NO: 905369 - RNA, 24 nt, Human
uauguaggcucagauaguagcaau

SEQ ID NO: 905370 - RNA, 19 nt, Human
ucauuccagaaucaucuuu

SEQ ID NO: 905371 - RNA, 21 nt, Human
uccacagaaaaauagcagaaa

SEQ ID NO: 905372 - RNA, 22 nt, Human
uccagaauacaaaguacuuaau

SEQ ID NO: 905373 - RNA, 23 nt, Human
uccugugaaacagcauaucaaaa

SEQ ID NO: 905374 - RNA, 22 nt, Human
ucuaaacuugaagcugccaaac

SEQ ID NO: 905375 - RNA, 19 nt, Human
ucuaccauugguccugggg

SEQ ID NO: 905376 - RNA, 21 nt, Human
ucuuuauuuaaaaauaccagu

SEQ ID NO: 905377 - RNA, 20 nt, Human
ugaaacagcauaucaaaaga

SEQ ID NO: 905378 - RNA, 23 nt, Human
ugcgcagcagucuacagcaacau

SEQ ID NO: 905379 - RNA, 30 nt, Human
ugcugggaacacaaguaaugcacaagacaa

SEQ ID NO: 905380 - RNA, 26 nt, Human
ugggaacacaaguaaugcacaagaca

SEQ ID NO: 905381 - RNA, 28 nt, Human
uucacuuuuauuacuaauaaccccuagg

SEQ ID NO: 905382 - RNA, 21 nt, Human
uucuucuuuauuuaaaaauac

SEQ ID NO: 905383 - RNA, 23 nt, Human
uugcuguauuaaaacaguuacac

SEQ ID NO: 905384 - RNA, 19 nt, Human
uuucaaacaaaguuagcgu

SEQ ID NO: 905385 - RNA, 20 nt, Human
uuuuuuuuuuuuuuuuuugg

SEQ ID NO: 905386 - RNA, 23 nt, Human
aaaaaaaacuugugaauuagcau

SEQ ID NO: 905387 - RNA, 27 nt, Human
aaaaaaaguggaggaauaccgguaccc

SEQ ID NO: 905388 - RNA, 23 nt, Human
aaaaagccaaggcaggcaguggg

SEQ ID NO: 905389 - RNA, 24 nt, Human
aaaaagguaauacaaaaaauagaa

SEQ ID NO: 905390 - RNA, 25 nt, Human
aaaaagguaauacaaaaaauagaaa

SEQ ID NO: 905391 - RNA, 27 nt, Human
aaaaggacacacacaauaauuuacaag

SEQ ID NO: 905392 - RNA, 21 nt, Human
aaaaugaaacaagaauacaaa

SEQ ID NO: 905393 - RNA, 24 nt, Human
aaacaagaauacaaauaaagaaaa

SEQ ID NO: 905394 - RNA, 22 nt, Human
aaaggaagcuaaaagcagacuc

SEQ ID NO: 905395 - RNA, 18 nt, Human
aaauaaccccuuaucaca

SEQ ID NO: 905396 - RNA, 23 nt, Human
aagagauaacaaguuuaauagaa

SEQ ID NO: 905397 - RNA, 22 nt, Human
aagccaaggcaggcaaaaggaa

SEQ ID NO: 905398 - RNA, 18 nt, Human
aagcuaaaagcagacuca

SEQ ID NO: 905399 - RNA, 21 nt, Human
aagcuaaaagcagacucagaa

SEQ ID NO: 905400 - RNA, 22 nt, Human
aauacaaaaaauagaaaaauaa

SEQ ID NO: 905401 - RNA, 23 nt, Human
aauacaaaaaauagaaaaauaag

SEQ ID NO: 905402 - RNA, 18 nt, Human
aaugaggagaacaggaaa

SEQ ID NO: 905403 - RNA, 19 nt, Human
agagauaacaaguuuaaua

SEQ ID NO: 905404 - RNA, 21 nt, Human
agcagugauagggagggggga

SEQ ID NO: 905405 - RNA, 20 nt, Human
agcccaaacuaaggaggcac

SEQ ID NO: 905406 - RNA, 19 nt, Human
aggaaaaaauaugaaaaga

SEQ ID NO: 905407 - RNA, 21 nt, Human
aggagaacaggaaacugcaag

SEQ ID NO: 905408 - RNA, 23 nt, Human
aggcaggcaaaaggaagcuaagg

SEQ ID NO: 905409 - RNA, 27 nt, Human
aggcaggcaaugaggagaacaggaaac

SEQ ID NO: 905410 - RNA, 19 nt, Human
aggcucgaggcagguccgg

SEQ ID NO: 905411 - RNA, 20 nt, Human
agggaggggggacaggcggg

SEQ ID NO: 905412 - RNA, 21 nt, Human
agggaggggggacaggcgggg

SEQ ID NO: 905413 - RNA, 23 nt, Human
agucaaaaguacuaucaaaucug

SEQ ID NO: 905414 - RNA, 20 nt, Human
auaccaaaucucuuaggaaa

SEQ ID NO: 905415 - RNA, 19 nt, Human
auagaaacagcuuauuguc

SEQ ID NO: 905416 - RNA, 18 nt, Human
augaaacaagaauacaaa

SEQ ID NO: 905417 - RNA, 21 nt, Human
auggucaaagagcuaacaaaa

SEQ ID NO: 905418 - RNA, 18 nt, Human
auucuaaaaugaauaaag

SEQ ID NO: 905419 - RNA, 20 nt, Human
caaaaaaaguacaaaaugac

SEQ ID NO: 905420 - RNA, 19 nt, Human
caaaaggaagcuaaaagca

SEQ ID NO: 905421 - RNA, 21 nt, Human
caaaaggaagcuaaaagcaga

SEQ ID NO: 905422 - RNA, 19 nt, Human
caaacagcuguucacgaac

SEQ ID NO: 905423 - RNA, 27 nt, Human
caagcagccaagacauaaagaaaacca

SEQ ID NO: 905424 - RNA, 21 nt, Human
caccaacuaaggcugaaacaa

SEQ ID NO: 905425 - RNA, 22 nt, Human
caccaacuaaggcugaaacaaa

SEQ ID NO: 905426 - RNA, 24 nt, Human
cacgaacagaaaaagccaaggcag

SEQ ID NO: 905427 - RNA, 19 nt, Human
cagaaaaagccaaggcagg

SEQ ID NO: 905428 - RNA, 22 nt, Human
cagauuucuaaggauauuacau

SEQ ID NO: 905429 - RNA, 20 nt, Human
cagccaagacauaaagaaaa

SEQ ID NO: 905430 - RNA, 18 nt, Human
caguagagauaaaacaua

SEQ ID NO: 905431 - RNA, 26 nt, Human
caguagagauaaaacauauucuaaug

SEQ ID NO: 905432 - RNA, 24 nt, Human
caucaaaaaaaguacaaaaugaca

SEQ ID NO: 905433 - RNA, 24 nt, Human
caucaaaaaaaguacaaaaugaca

SEQ ID NO: 905434 - RNA, 20 nt, Human
ccaaacagcuguucacgaac

SEQ ID NO: 905435 - RNA, 20 nt, Human
ccaagacauaaagaaaacca

SEQ ID NO: 905436 - RNA, 18 nt, Human
ccaaggcaggcaaaagga

SEQ ID NO: 905437 - RNA, 18 nt, Human
ccagcgcagaccgauggg

SEQ ID NO: 905438 - RNA, 25 nt, Human
ccagcgcagaccgaugggcuggggu

SEQ ID NO: 905439 - RNA, 22 nt, Human
cccaaacuaaggaggcaccaac

SEQ ID NO: 905440 - RNA, 19 nt, Human
ccggagagacugacuggca

SEQ ID NO: 905441 - RNA, 21 nt, Human
cgaacagaaaaagccaaggca

SEQ ID NO: 905442 - RNA, 23 nt, Human
cgaggcagguccggagagacuga

SEQ ID NO: 905443 - RNA, 21 nt, Human
cgaugggcugggguuucucuc

SEQ ID NO: 905444 - RNA, 18 nt, Human
cgcagaccgaugggcugg

SEQ ID NO: 905445 - RNA, 19 nt, Human
cgcaggacaguccaacgga

SEQ ID NO: 905446 - RNA, 24 nt, Human
cgcgagaaacccggaaccgugcua

SEQ ID NO: 905447 - RNA, 24 nt, Human
cggagggaccaagagccaguagca

SEQ ID NO: 905448 - RNA, 21 nt, Human
cuaaaaggacuugaacuggua

SEQ ID NO: 905449 - RNA, 22 nt, Human
gaaaaaauaugaaaagauauuu

SEQ ID NO: 905450 - RNA, 22 nt, Human
gaagaagggcagaugcgcggcg

SEQ ID NO: 905451 - RNA, 22 nt, Human
gagaaacccggaaccgugcuaa

SEQ ID NO: 905452 - RNA, 21 nt, Human
gagcacugggaggagguucuc

SEQ ID NO: 905453 - RNA, 20 nt, Human
gcagaccgaugggcuggggu

SEQ ID NO: 905454 - RNA, 20 nt, Human
ggagggaccaagagccagua

SEQ ID NO: 905455 - RNA, 20 nt, Human
ggcaaugaggagaacaggaa

SEQ ID NO: 905456 - RNA, 21 nt, Human
ggcgcggugauuucagcagcc

SEQ ID NO: 905457 - RNA, 24 nt, Human
gggcugggguuucucuccgcagga

SEQ ID NO: 905458 - RNA, 19 nt, Human
ggggcggagucagcgaaga

SEQ ID NO: 905459 - RNA, 18 nt, Human
ggucaaagagcuaacaaa

SEQ ID NO: 905460 - RNA, 27 nt, Human
ggugauuucagcagccugaggcucgag

SEQ ID NO: 905461 - RNA, 21 nt, Human
guacugacuucucaaaaacaa

SEQ ID NO: 905462 - RNA, 18 nt, Human
gucuggccagaugcgggg

SEQ ID NO: 905463 - RNA, 23 nt, Human
uaaaacccgaagguaaaauauua

SEQ ID NO: 905464 - RNA, 22 nt, Human
uaaaauaaccccuuaucacaaa

SEQ ID NO: 905465 - RNA, 27 nt, Human
uaaccccuuaucacaaaggagcccaaa

SEQ ID NO: 905466 - RNA, 22 nt, Human
uaacggcaauauugaacaaacc

SEQ ID NO: 905467 - RNA, 22 nt, Human
uaaggaggcaccaacuaaggcu

SEQ ID NO: 905468 - RNA, 20 nt, Human
uaaguguaauaugaauggaa

SEQ ID NO: 905469 - RNA, 22 nt, Human
uaauuuucaagcagccaagaca

SEQ ID NO: 905470 - RNA, 19 nt, Human
uagggaggggggacaggcg

SEQ ID NO: 905471 - RNA, 19 nt, Human
uaugaaaagauauuuacac

SEQ ID NO: 905472 - RNA, 21 nt, Human
ucacauauguuuuccccugcu

SEQ ID NO: 905473 - RNA, 20 nt, Human
ucagaagaaccauguugaca

SEQ ID NO: 905474 - RNA, 18 nt, Human
ucagcagccugaggcucg

SEQ ID NO: 905475 - RNA, 21 nt, Human
ucagcgaagaagggcagaugc

SEQ ID NO: 905476 - RNA, 25 nt, Human
ucccagcgcagaccgaugggcuggg

SEQ ID NO: 905477 - RNA, 20 nt, Human
uccgcaggacaguccaacgg

SEQ ID NO: 905478 - RNA, 20 nt, Human
ucuuugaagagaaaaaaggc

SEQ ID NO: 905479 - RNA, 22 nt, Human
ugaaaagauauuuacacauuga

SEQ ID NO: 905480 - RNA, 26 nt, Human
ugaaacaagaauacaaauaaagaaaa

SEQ ID NO: 905481 - RNA, 26 nt, Human
ugacuucucaaaaacaaguuagaacu

SEQ ID NO: 905482 - RNA, 19 nt, Human
ugagaaaacaccaauaugc

SEQ ID NO: 905483 - RNA, 18 nt, Human
ugcuaaguaacuucccgc

SEQ ID NO: 905484 - RNA, 23 nt, Human
ugcuaaguaacuucccgcuuccu

SEQ ID NO: 905485 - RNA, 18 nt, Human
uggaaggcaggcaaugag

SEQ ID NO: 905486 - RNA, 19 nt, Human
uggaaggcaggcaaugagg

SEQ ID NO: 905487 - RNA, 22 nt, Human
uggaaggcaggcaaugaggaga

SEQ ID NO: 905488 - RNA, 25 nt, Human
ugggucagcucugacgcgaggcggg

SEQ ID NO: 905489 - RNA, 18 nt, Human
uuaauugcaucacauaug

SEQ ID NO: 905490 - RNA, 23 nt, Human
uucacauuuuuugaaaaaacauu

SEQ ID NO: 905491 - RNA, 18 nt, Human
uucacgaacagaaaaagc

SEQ ID NO: 905492 - RNA, 25 nt, Human
uucacgaacagaaaaagccaaggca

SEQ ID NO: 905493 - RNA, 21 nt, Human
uucucuaagcuaugggccaaa

SEQ ID NO: 905494 - RNA, 25 nt, Human
uuuacaaugagcaugucuuauguuu

SEQ ID NO: 905495 - RNA, 22 nt, Human
uuucacaguucucauauaaugg

SEQ ID NO: 905496 - RNA, 19 nt, Human
uuucuaguuuugcauuuuu

SEQ ID NO: 905497 - RNA, 18 nt, Human
uuuuuuuuuuuuuuuuug

SEQ ID NO: 905498 - RNA, 21 nt, Human
aaagagcauucccaauagaaa

SEQ ID NO: 905499 - RNA, 24 nt, Human
aaaggaacuguuaaacugaaaaag

SEQ ID NO: 905500 - RNA, 21 nt, Human
aaaggagagacaaagucaaga

SEQ ID NO: 905501 - RNA, 23 nt, Human
aacggagugaaugcauagcuggu

SEQ ID NO: 905502 - RNA, 26 nt, Human
aagcaagaauagagugaaaagggacc

SEQ ID NO: 905503 - RNA, 23 nt, Human
aagcaguuuacaaacgaaacuca

SEQ ID NO: 905504 - RNA, 19 nt, Human
aaggaacuguuaaacugaa

SEQ ID NO: 905505 - RNA, 18 nt, Human
aaggagagacaaagucaa

SEQ ID NO: 905506 - RNA, 18 nt, Human
aaucuguagacaaaccuc

SEQ ID NO: 905507 - RNA, 23 nt, Human
acgcucaaaaucuguagacaaac

SEQ ID NO: 905508 - RNA, 22 nt, Human
acguggcuggcugaggcuccug

SEQ ID NO: 905509 - RNA, 20 nt, Human
acguuccccccacccccgcc

SEQ ID NO: 905510 - RNA, 21 nt, Human
acguuccccccacccccgccg

SEQ ID NO: 905511 - RNA, 20 nt, Human
acuacugcaaagacgcgggc

SEQ ID NO: 905512 - RNA, 21 nt, Human
agacaaaccucccaauccguc

SEQ ID NO: 905513 - RNA, 27 nt, Human
agacacagacacagguccacuuuccaa

SEQ ID NO: 905514 - RNA, 24 nt, Human
agacacagguccacuuuccaagca

SEQ ID NO: 905515 - RNA, 22 nt, Human
agacaucugcucacuggaaacg

SEQ ID NO: 905516 - RNA, 23 nt, Human
agaggccccaggcccacugagcc

SEQ ID NO: 905517 - RNA, 18 nt, Human
agaugcauuugcuugaaa

SEQ ID NO: 905518 - RNA, 20 nt, Human
agcaccugcucccgggcgac

SEQ ID NO: 905519 - RNA, 23 nt, Human
agccagacgugugccugaaugcc

SEQ ID NO: 905520 - RNA, 21 nt, Human
aggagacccagccggccagcc

SEQ ID NO: 905521 - RNA, 20 nt, Human
aggagagacaaagucaagaa

SEQ ID NO: 905522 - RNA, 24 nt, Human
aggccaacaggcacagugggcggg

SEQ ID NO: 905523 - RNA, 21 nt, Human
aggcuccugggcccgccgccu

SEQ ID NO: 905524 - RNA, 25 nt, Human
agguucccccacguuccccccaccc

SEQ ID NO: 905525 - RNA, 25 nt, Human
agguucccccacguuccccccaccc

SEQ ID NO: 905526 - RNA, 19 nt, Human
augacagucuaaucuaaag

SEQ ID NO: 905527 - RNA, 25 nt, Human
caaaaugggauguaagcuuguucau

SEQ ID NO: 905528 - RNA, 23 nt, Human
caaagagcauucccaauagaaac

SEQ ID NO: 905529 - RNA, 24 nt, Human
cacagacuucaagcaguuuacaaa

SEQ ID NO: 905530 - RNA, 23 nt, Human
cacagccuuuaaauuaaaaaccu

SEQ ID NO: 905531 - RNA, 24 nt, Human
cacggcguggcugaguaacagggu

SEQ ID NO: 905532 - RNA, 19 nt, Human
cacucggaaaggugccgag

SEQ ID NO: 905533 - RNA, 20 nt, Human
cagacgugugccugaaugcc

SEQ ID NO: 905534 - RNA, 21 nt, Human
cagcacugcccagcccugccc

SEQ ID NO: 905535 - RNA, 19 nt, Human
caggaacaccaugaagcca

SEQ ID NO: 905536 - RNA, 25 nt, Human
caugaagccaagagcaauggaacca

SEQ ID NO: 905537 - RNA, 21 nt, Human
ccaagcaagacaucugcucac

SEQ ID NO: 905538 - RNA, 19 nt, Human
ccacugagcccgggaggag

SEQ ID NO: 905539 - RNA, 21 nt, Human
ccagacccagcuccggccggg

SEQ ID NO: 905540 - RNA, 25 nt, Human
cccaccauugacucggaagguuuuc

SEQ ID NO: 905541 - RNA, 22 nt, Human
cccacguuccccccacccccgc

SEQ ID NO: 905542 - RNA, 19 nt, Human
cccagaccccugcggccgc

SEQ ID NO: 905543 - RNA, 23 nt, Human
cccaggcccacugagcccgggag

SEQ ID NO: 905544 - RNA, 18 nt, Human
cccccacccccgccggcc

SEQ ID NO: 905545 - RNA, 21 nt, Human
cccccacguuccccccacccc

SEQ ID NO: 905546 - RNA, 20 nt, Human
ccccccacccccgccggccc

SEQ ID NO: 905547 - RNA, 23 nt, Human
ccccgccggcccgcguggccccc

SEQ ID NO: 905548 - RNA, 18 nt, Human
ccccugcggccgcaacgg

SEQ ID NO: 905549 - RNA, 19 nt, Human
cccgccgccuccguccccc

SEQ ID NO: 905550 - RNA, 22 nt, Human
ccgaccauaacccggucccacc

SEQ ID NO: 905551 - RNA, 18 nt, Human
ccggcccgcguggccccc

SEQ ID NO: 905552 - RNA, 23 nt, Human
ccggcccgcguggcccccgcgua

SEQ ID NO: 905553 - RNA, 21 nt, Human
ccuacacacggcguggcugag

SEQ ID NO: 905554 - RNA, 23 nt, Human
ccugcccagaccccugcggccgc

SEQ ID NO: 905555 - RNA, 21 nt, Human
cgacuccgggcagcccgagac

SEQ ID NO: 905556 - RNA, 21 nt, Human
cgcucagaucccuccagcugc

SEQ ID NO: 905557 - RNA, 23 nt, Human
cgcucagaucccuccagcugcac

SEQ ID NO: 905558 - RNA, 20 nt, Human
cggaaaggugccgaguccca

SEQ ID NO: 905559 - RNA, 21 nt, Human
cggagccaggacaaaggccgg

SEQ ID NO: 905560 - RNA, 19 nt, Human
cggccgggcucccgcuacc

SEQ ID NO: 905561 - RNA, 22 nt, Human
cggguaagacccagcuucuguu

SEQ ID NO: 905562 - RNA, 20 nt, Human
cucaaaaucuucacucaaaa

SEQ ID NO: 905563 - RNA, 23 nt, Human
cucccaauccgucgcacacuccg

SEQ ID NO: 905564 - RNA, 23 nt, Human
cuccugggcccgccgccuccguc

SEQ ID NO: 905565 - RNA, 19 nt, Human
cugaaaucugcaacuacug

SEQ ID NO: 905566 - RNA, 20 nt, Human
cugcagcaccugcucccggg

SEQ ID NO: 905567 - RNA, 22 nt, Human
cuggcugaggcuccugggcccg

SEQ ID NO: 905568 - RNA, 23 nt, Human
cugggcccgccgccuccgucccc

SEQ ID NO: 905569 - RNA, 18 nt, Human
cuuuagauucucugaaua

SEQ ID NO: 905570 - RNA, 20 nt, Human
gacaaaggccggucagaagc

SEQ ID NO: 905571 - RNA, 25 nt, Human
gagaggccccaggcccacugagccc

SEQ ID NO: 905572 - RNA, 21 nt, Human
gaguucuaccuaagguucuau

SEQ ID NO: 905573 - RNA, 20 nt, Human
gccccaggcccacugagccc

SEQ ID NO: 905574 - RNA, 23 nt, Human
gccggcccgcguggcccccgcgu

SEQ ID NO: 905575 - RNA, 22 nt, Human
gccuccguccccccgcuggccu

SEQ ID NO: 905576 - RNA, 18 nt, Human
gcugcagcaccugcuccc

SEQ ID NO: 905577 - RNA, 18 nt, Human
gcuggccuguccccgacu

SEQ ID NO: 905578 - RNA, 23 nt, Human
ggaacaccaugaagccaagagca

SEQ ID NO: 905579 - RNA, 23 nt, Human
ggacaaaggccggucagaagccg

SEQ ID NO: 905580 - RNA, 20 nt, Human
ggaccagcagucagcuggug

SEQ ID NO: 905581 - RNA, 21 nt, Human
ggagacccagccggccagcca

SEQ ID NO: 905582 - RNA, 21 nt, Human
ggagaucguuuccucaagacu

SEQ ID NO: 905583 - RNA, 19 nt, Human
ggccccaggcccacugagc

SEQ ID NO: 905584 - RNA, 19 nt, Human
ggggaggggcggcuauuuc

SEQ ID NO: 905585 - RNA, 27 nt, Human
guaaagcuuccauucagaugcccaaaa

SEQ ID NO: 905586 - RNA, 21 nt, Human
uaaacugaaaaagacuugaca

SEQ ID NO: 905587 - RNA, 23 nt, Human
uaacacgacgacugaaaucugca

SEQ ID NO: 905588 - RNA, 18 nt, Human
uaacccaccauugacucg

SEQ ID NO: 905589 - RNA, 20 nt, Human
ucaaauaauauauacagaua

SEQ ID NO: 905590 - RNA, 19 nt, Human
uccauucagaugcccaaaa

SEQ ID NO: 905591 - RNA, 21 nt, Human
ucccaggcgaaaugaccagcu

SEQ ID NO: 905592 - RNA, 23 nt, Human
ucccaggcgaaaugaccagcucu

SEQ ID NO: 905593 - RNA, 22 nt, Human
uccguagcacagaaaugaggau

SEQ ID NO: 905594 - RNA, 24 nt, Human
ucgaacgcucaaaaucuguagaca

SEQ ID NO: 905595 - RNA, 24 nt, Human
ucgugcugcggguaagacccagcu

SEQ ID NO: 905596 - RNA, 23 nt, Human
ucuaaagcaucuuuacagaugca

SEQ ID NO: 905597 - RNA, 19 nt, Human
ucucuugcaggaaaaggag

SEQ ID NO: 905598 - RNA, 23 nt, Human
ucuguagacaaaccucccaaucc

SEQ ID NO: 905599 - RNA, 24 nt, Human
ucuugcaggaaaaggaguggaugc

SEQ ID NO: 905600 - RNA, 21 nt, Human
ugacucggaaaggagagacaa

SEQ ID NO: 905601 - RNA, 18 nt, Human
ugagucacgugaaacaca

SEQ ID NO: 905602 - RNA, 24 nt, Human
ugcaacuacugcaaagacgcgggc

SEQ ID NO: 905603 - RNA, 19 nt, Human
ugccacagacuucaagcag

SEQ ID NO: 905604 - RNA, 18 nt, Human
ugccacggcgucuccaga

SEQ ID NO: 905605 - RNA, 22 nt, Human
ugccacggcgucuccagacccc

SEQ ID NO: 905606 - RNA, 19 nt, Human
ugcccagaccccugcggcc

SEQ ID NO: 905607 - RNA, 24 nt, Human
ugcccagaccccugcggccgcaac

SEQ ID NO: 905608 - RNA, 21 nt, Human
ugcuacggagccaggacaaag

SEQ ID NO: 905609 - RNA, 19 nt, Human
ugcucacuggaaacggagu

SEQ ID NO: 905610 - RNA, 21 nt, Human
uggugacggcggcgggcacug

SEQ ID NO: 905611 - RNA, 21 nt, Human
uuaaaagcuguuaaaucucau

SEQ ID NO: 905612 - RNA, 23 nt, Human
uuacagaugcauuugcuugaaaa

SEQ ID NO: 905613 - RNA, 22 nt, Human
uuccccccacccccgccggccc

SEQ ID NO: 905614 - RNA, 18 nt, Human
uuuuccucaaauacuaca

SEQ ID NO: 905615 - RNA, 18 nt, Human
aaauuaaacuccaccuuc

SEQ ID NO: 905616 - RNA, 22 nt, Human
aacugcccuacaauggccucac

SEQ ID NO: 905617 - RNA, 26 nt, Human
aagaaaccuagagcggggagaggaug

SEQ ID NO: 905618 - RNA, 22 nt, Human
aagcuccagcucccuucaaauc

SEQ ID NO: 905619 - RNA, 23 nt, Human
acaccagggccccucgauggccc

SEQ ID NO: 905620 - RNA, 21 nt, Human
acacucugcuacccugaccuc

SEQ ID NO: 905621 - RNA, 26 nt, Human
accacggacaccucuaggcccccaaa

SEQ ID NO: 905622 - RNA, 20 nt, Human
acucugcuacccugaccuca

SEQ ID NO: 905623 - RNA, 19 nt, Human
agaacauucucagagccaa

SEQ ID NO: 905624 - RNA, 24 nt, Human
agaacauucucagagccaacacca

SEQ ID NO: 905625 - RNA, 18 nt, Human
agaauggaggccaggugg

SEQ ID NO: 905626 - RNA, 18 nt, Human
agaccccaggucccccag

SEQ ID NO: 905627 - RNA, 20 nt, Human
agagaggauggcgggugggg

SEQ ID NO: 905628 - RNA, 19 nt, Human
agagggcagagaggauggc

SEQ ID NO: 905629 - RNA, 21 nt, Human
agccaacaccagggccccucg

SEQ ID NO: 905630 - RNA, 18 nt, Human
agcccaggaaccacggac

SEQ ID NO: 905631 - RNA, 21 nt, Human
agcuaugugcagggucccugg

SEQ ID NO: 905632 - RNA, 18 nt, Human
agcucacacccccggccc

SEQ ID NO: 905633 - RNA, 22 nt, Human
agcugggagaagccagcucugg

SEQ ID NO: 905634 - RNA, 21 nt, Human
aggaagaagugugaguucuga

SEQ ID NO: 905635 - RNA, 19 nt, Human
aggcaucagaaugaagggg

SEQ ID NO: 905636 - RNA, 20 nt, Human
aggccagggaagaaugaggu

SEQ ID NO: 905637 - RNA, 24 nt, Human
agggcagagaggauggcggguggg

SEQ ID NO: 905638 - RNA, 25 nt, Human
agggggagcaauucuaaguggggcc

SEQ ID NO: 905639 - RNA, 19 nt, Human
agggugcuggaugggggug

SEQ ID NO: 905640 - RNA, 19 nt, Human
aggucccccaggccccguu

SEQ ID NO: 905641 - RNA, 21 nt, Human
aggugacuggucacccagaac

SEQ ID NO: 905642 - RNA, 18 nt, Human
caaagugccaagacuccc

SEQ ID NO: 905643 - RNA, 20 nt, Human
caaccccagcucacaccccc

SEQ ID NO: 905644 - RNA, 18 nt, Human
cacacacagcugaagggu

SEQ ID NO: 905645 - RNA, 18 nt, Human
caccagaccccagguccc

SEQ ID NO: 905646 - RNA, 18 nt, Human
caccagggccccucgaug

SEQ ID NO: 905647 - RNA, 21 nt, Human
cacccagaacauucucagagc

SEQ ID NO: 905648 - RNA, 20 nt, Human
caccucuaggcccccaaauc

SEQ ID NO: 905649 - RNA, 21 nt, Human
caccucuaggcccccaaaucc

SEQ ID NO: 905650 - RNA, 21 nt, Human
cacggacaccucuaggccccc

SEQ ID NO: 905651 - RNA, 18 nt, Human
cacucugcuacccugacc

SEQ ID NO: 905652 - RNA, 25 nt, Human
cacucugcuacccugaccucauccc

SEQ ID NO: 905653 - RNA, 22 nt, Human
cacugaaaaccuagauggaccg

SEQ ID NO: 905654 - RNA, 22 nt, Human
cacuggguuuuucuguccuugu

SEQ ID NO: 905655 - RNA, 18 nt, Human
cagaacauucucagagcc

SEQ ID NO: 905656 - RNA, 25 nt, Human
cagagccuccuucuccuucuugacu

SEQ ID NO: 905657 - RNA, 23 nt, Human
cagaugcaaagucauuauccuug

SEQ ID NO: 905658 - RNA, 20 nt, Human
cagccuccuagaucagcccu

SEQ ID NO: 905659 - RNA, 19 nt, Human
cagcucccuucaaauccag

SEQ ID NO: 905660 - RNA, 18 nt, Human
cagcugaagggugcugga

SEQ ID NO: 905661 - RNA, 20 nt, Human
caggauguuugcaaagugcc

SEQ ID NO: 905662 - RNA, 20 nt, Human
caggugguuguuccuugccu

SEQ ID NO: 905663 - RNA, 23 nt, Human
ccaacugcccuacaauggccuca

SEQ ID NO: 905664 - RNA, 24 nt, Human
ccaccuucagagauaaccuaauuu

SEQ ID NO: 905665 - RNA, 20 nt, Human
ccagaacauucucagagcca

SEQ ID NO: 905666 - RNA, 21 nt, Human
ccagaacauucucagagccaa

SEQ ID NO: 905667 - RNA, 19 nt, Human
ccagcucacacccccggcc

SEQ ID NO: 905668 - RNA, 21 nt, Human
cccaaccccagcucacacccc

SEQ ID NO: 905669 - RNA, 25 nt, Human
cccaaccccagcucacacccccggc

SEQ ID NO: 905670 - RNA, 18 nt, Human
cccaagagaauggaggcc

SEQ ID NO: 905671 - RNA, 24 nt, Human
cccacuuuaaccauagcaguucca

SEQ ID NO: 905672 - RNA, 22 nt, Human
cccccuaccccugcuacaucug

SEQ ID NO: 905673 - RNA, 25 nt, Human
ccccugcuacaucuggaagcuccag

SEQ ID NO: 905674 - RNA, 24 nt, Human
cccggccccuucagagccuccuuc

SEQ ID NO: 905675 - RNA, 24 nt, Human
cccuaccccugcuacaucuggaag

SEQ ID NO: 905676 - RNA, 20 nt, Human
cccugcagcccagcugaacc

SEQ ID NO: 905677 - RNA, 20 nt, Human
ccgugcccugcagcccagcu

SEQ ID NO: 905678 - RNA, 20 nt, Human
ccucccacagccauucugga

SEQ ID NO: 905679 - RNA, 21 nt, Human
ccuccuucuccuucuugacuc

SEQ ID NO: 905680 - RNA, 21 nt, Human
ccugcacagcgguuuauucag

SEQ ID NO: 905681 - RNA, 21 nt, Human
ccugcagcccagcugaaccag

SEQ ID NO: 905682 - RNA, 26 nt, Human
ccuggcucccagccuccuagaucagc

SEQ ID NO: 905683 - RNA, 18 nt, Human
ccuggcuccccagcuccc

SEQ ID NO: 905684 - RNA, 23 nt, Human
cggacaccucuaggcccccaaau

SEQ ID NO: 905685 - RNA, 21 nt, Human
cuacccacagcucuuucucag

SEQ ID NO: 905686 - RNA, 23 nt, Human
cucacacccccggccccuucaga

SEQ ID NO: 905687 - RNA, 20 nt, Human
cuggaacaugcuaacauugg

SEQ ID NO: 905688 - RNA, 25 nt, Human
cuucacccuggcaggguucccuagc

SEQ ID NO: 905689 - RNA, 22 nt, Human
cuucccuacugugggaggggac

SEQ ID NO: 905690 - RNA, 20 nt, Human
cuuugggagaagaaaccuag

SEQ ID NO: 905691 - RNA, 21 nt, Human
gaaaugcaugucgacauuuuu

SEQ ID NO: 905692 - RNA, 18 nt, Human
gacccccagcccuaucuc

SEQ ID NO: 905693 - RNA, 20 nt, Human
gaccucauccccuccugccc

SEQ ID NO: 905694 - RNA, 24 nt, Human
gagcuucccacacucaguguggcc

SEQ ID NO: 905695 - RNA, 20 nt, Human
gaggauggcgggugggggca

SEQ ID NO: 905696 - RNA, 19 nt, Human
gaucagaaaguaggugacu

SEQ ID NO: 905697 - RNA, 22 nt, Human
gcaaagugccaagacuccccca

SEQ ID NO: 905698 - RNA, 22 nt, Human
gcaacuccagagcuucccacac

SEQ ID NO: 905699 - RNA, 22 nt, Human
gcagagaggauggcgggugggg

SEQ ID NO: 905700 - RNA, 20 nt, Human
gccccgacccccagcccuau

SEQ ID NO: 905701 - RNA, 20 nt, Human
gcccuggcuccccagcuccc

SEQ ID NO: 905702 - RNA, 21 nt, Human
gcccuggcuccccagcucccg

SEQ ID NO: 905703 - RNA, 25 nt, Human
gcccuggcuccccagcucccguccu

SEQ ID NO: 905704 - RNA, 18 nt, Human
gcucagugugaggucuca

SEQ ID NO: 905705 - RNA, 25 nt, Human
ggagaagccagcucugguaauuaaa

SEQ ID NO: 905706 - RNA, 20 nt, Human
ggagaggauguuucugaucc

SEQ ID NO: 905707 - RNA, 20 nt, Human
ggcacuucuuugccaggaag

SEQ ID NO: 905708 - RNA, 19 nt, Human
ggcagagaggauggcgggu

SEQ ID NO: 905709 - RNA, 23 nt, Human
ggcagagaggauggcgggugggg

SEQ ID NO: 905710 - RNA, 21 nt, Human
gggagucccaaccccagcuca

SEQ ID NO: 905711 - RNA, 19 nt, Human
gggccccucgauggcccag

SEQ ID NO: 905712 - RNA, 24 nt, Human
gucuuuuuuucuauuuaaauuggc

SEQ ID NO: 905713 - RNA, 19 nt, Human
gugguuguuccuugccuuc

SEQ ID NO: 905714 - RNA, 23 nt, Human
uacccugaccucauccccuccug

SEQ ID NO: 905715 - RNA, 20 nt, Human
uacugugggaggggacaugg

SEQ ID NO: 905716 - RNA, 22 nt, Human
uaggcccccaaauccgucguca

SEQ ID NO: 905717 - RNA, 24 nt, Human
ucacccagaacauucucagagcca

SEQ ID NO: 905718 - RNA, 18 nt, Human
ucagaaaguaggugacug

SEQ ID NO: 905719 - RNA, 21 nt, Human
ucagagccuccuucuccuucu

SEQ ID NO: 905720 - RNA, 23 nt, Human
ucagugugaggucucagcagggg

SEQ ID NO: 905721 - RNA, 23 nt, Human
uccaaaaucccagcccaggaacc

SEQ ID NO: 905722 - RNA, 19 nt, Human
uccagaaagguagcaauca

SEQ ID NO: 905723 - RNA, 22 nt, Human
ucccaacacacacacccucuuc

SEQ ID NO: 905724 - RNA, 22 nt, Human
ucccaaccccagcucacacccc

SEQ ID NO: 905725 - RNA, 26 nt, Human
ucccagccuccuagaucagcccuggc

SEQ ID NO: 905726 - RNA, 21 nt, Human
ucccguggcagcugucuuccc

SEQ ID NO: 905727 - RNA, 19 nt, Human
uccucccaacacacacacc

SEQ ID NO: 905728 - RNA, 23 nt, Human
ucuaacaucuggcccccuacccc

SEQ ID NO: 905729 - RNA, 18 nt, Human
ucugagcugggagaagcc

SEQ ID NO: 905730 - RNA, 20 nt, Human
ucugcaaugcucacucccuu

SEQ ID NO: 905731 - RNA, 20 nt, Human
ugaaaaccuagauggaccga

SEQ ID NO: 905732 - RNA, 22 nt, Human
ugaccucauccccuccugcccc

SEQ ID NO: 905733 - RNA, 18 nt, Human
ugacuggucacccagaac

SEQ ID NO: 905734 - RNA, 22 nt, Human
ugagcagaggacgcucagguua

SEQ ID NO: 905735 - RNA, 23 nt, Human
ugaggucucagcaggggccacug

SEQ ID NO: 905736 - RNA, 19 nt, Human
ugaggugcauucuucucgg

SEQ ID NO: 905737 - RNA, 19 nt, Human
ugcaugucgacauuuuuau

SEQ ID NO: 905738 - RNA, 22 nt, Human
ugccuucacccuggcaggguuc

SEQ ID NO: 905739 - RNA, 18 nt, Human
uggaacaugcuaacauug

SEQ ID NO: 905740 - RNA, 18 nt, Human
uggccucacuggcagugg

SEQ ID NO: 905741 - RNA, 21 nt, Human
uggcuccccagcucccguccu

SEQ ID NO: 905742 - RNA, 23 nt, Human
ugggaaagaggccagggaagaau

SEQ ID NO: 905743 - RNA, 21 nt, Human
ugggagaagccagcucuggua

SEQ ID NO: 905744 - RNA, 19 nt, Human
ugggggcugugggugggaa

SEQ ID NO: 905745 - RNA, 20 nt, Human
ugugcaugucucagugaccu

SEQ ID NO: 905746 - RNA, 20 nt, Human
uuaaacuccaccuucagaga

SEQ ID NO: 905747 - RNA, 23 nt, Human
uuaaaggaaauuaaacuccaccu

SEQ ID NO: 905748 - RNA, 22 nt, Human
uucagagccuccuucuccuucu

SEQ ID NO: 905749 - RNA, 20 nt, Human
uuccagaaggggauuuucag

SEQ ID NO: 905750 - RNA, 23 nt, Human
uucuugacucagugcaggcuggg

SEQ ID NO: 905751 - RNA, 23 nt, Human
uuucagguucccgcucacccacu

SEQ ID NO: 905752 - RNA, 23 nt, Human
uuucucaggggagucccaacccc

SEQ ID NO: 905753 - RNA, 20 nt, Human
aaacgccagggccccuggca

SEQ ID NO: 905754 - RNA, 19 nt, Human
aaauuccaccccacguccc

SEQ ID NO: 905755 - RNA, 21 nt, Human
accccacgucccaaaggucuc

SEQ ID NO: 905756 - RNA, 23 nt, Human
agaaggcucugggcgugugaggg

SEQ ID NO: 905757 - RNA, 22 nt, Human
agaggacacugaggccccucuc

SEQ ID NO: 905758 - RNA, 23 nt, Human
agauaccccaaauuccaccccac

SEQ ID NO: 905759 - RNA, 23 nt, Human
cagcagggacagagucgaggcuc

SEQ ID NO: 905760 - RNA, 23 nt, Human
ccccaaauuccaccccacguccc

SEQ ID NO: 905761 - RNA, 25 nt, Human
ccccaaauuccaccccacgucccaa

SEQ ID NO: 905762 - RNA, 20 nt, Human
ccccacgucccaaaggucuc

SEQ ID NO: 905763 - RNA, 18 nt, Human
cgccagggccccuggcag

SEQ ID NO: 905764 - RNA, 22 nt, Human
cggccgggagcaccugcagcag

SEQ ID NO: 905765 - RNA, 24 nt, Human
cggggcuguccaguccaugucagc

SEQ ID NO: 905766 - RNA, 25 nt, Human
cuucagaggacacugaggccccucu

SEQ ID NO: 905767 - RNA, 20 nt, Human
gcuacagagacacuggccca

SEQ ID NO: 905768 - RNA, 19 nt, Human
ggagcaccugcagcaggug

SEQ ID NO: 905769 - RNA, 19 nt, Human
ggagcaccugcagcaggug

SEQ ID NO: 905770 - RNA, 22 nt, Human
ggcucugggcgugugagggagg

SEQ ID NO: 905771 - RNA, 23 nt, Human
uaagcgaaggaggcaaacgccag

SEQ ID NO: 905772 - RNA, 21 nt, Human
ucacuggggauggcuucagag

SEQ ID NO: 905773 - RNA, 20 nt, Human
ucagggagggcaaggcacag

SEQ ID NO: 905774 - RNA, 18 nt, Human
ucagggcuacagagacac

SEQ ID NO: 905775 - RNA, 19 nt, Human
ucucccagcggggcugucc

SEQ ID NO: 905776 - RNA, 22 nt, Human
ugaggccccucucagggagggc

SEQ ID NO: 905777 - RNA, 19 nt, Human
uguucuguuccuuauguca

SEQ ID NO: 905778 - RNA, 25 nt, Human
uguuguguucuguuccuuaugucag

SEQ ID NO: 905779 - RNA, 22 nt, Human
aagaugguuccgcccugaucua

SEQ ID NO: 905780 - RNA, 19 nt, Human
aagcaaccuucuccagaca

SEQ ID NO: 905781 - RNA, 22 nt, Human
acacaccucgagaaccgggccc

SEQ ID NO: 905782 - RNA, 24 nt, Human
accuucuccagacaccuaauauua

SEQ ID NO: 905783 - RNA, 24 nt, Human
agagaggaagcaauuggaccaaag

SEQ ID NO: 905784 - RNA, 20 nt, Human
agcugccuugguggauccag

SEQ ID NO: 905785 - RNA, 24 nt, Human
agcugccuugguggauccagcccc

SEQ ID NO: 905786 - RNA, 20 nt, Human
agcuguggccgccaacccca

SEQ ID NO: 905787 - RNA, 21 nt, Human
aguacccacccaucccccagc

SEQ ID NO: 905788 - RNA, 25 nt, Human
aguacccacccaucccccagcauac

SEQ ID NO: 905789 - RNA, 20 nt, Human
aguggauccacagcucccuu

SEQ ID NO: 905790 - RNA, 19 nt, Human
caacagagagccugagacc

SEQ ID NO: 905791 - RNA, 20 nt, Human
cacacguguagcuggcacac

SEQ ID NO: 905792 - RNA, 22 nt, Human
cacaugcaucuagaagcuccua

SEQ ID NO: 905793 - RNA, 21 nt, Human
cagcagagcaggauguggaaa

SEQ ID NO: 905794 - RNA, 22 nt, Human
cagccccuuagcccccucuccu

SEQ ID NO: 905795 - RNA, 21 nt, Human
caggagaggcuauaagaaaug

SEQ ID NO: 905796 - RNA, 21 nt, Human
cauacagaacacacguguagc

SEQ ID NO: 905797 - RNA, 27 nt, Human
caucacaagguggaucaccauagucaa

SEQ ID NO: 905798 - RNA, 23 nt, Human
ccaccaccuggccaaugcccgcc

SEQ ID NO: 905799 - RNA, 23 nt, Human
ccagacaccuaauauuaaccauc

SEQ ID NO: 905800 - RNA, 21 nt, Human
cccauacagaacacacgugua

SEQ ID NO: 905801 - RNA, 20 nt, Human
ccccugaauucagugguuca

SEQ ID NO: 905802 - RNA, 24 nt, Human
ccuaauauuaaccaucacaaggug

SEQ ID NO: 905803 - RNA, 26 nt, Human
ccuccugcagagagaagucccagggc

SEQ ID NO: 905804 - RNA, 25 nt, Human
ccugcagcagagcaggauguggaaa

SEQ ID NO: 905805 - RNA, 18 nt, Human
ccuugguggauccagccc

SEQ ID NO: 905806 - RNA, 27 nt, Human
cguccuccaagcaauuccaggaggauu

SEQ ID NO: 905807 - RNA, 23 nt, Human
cuccaccaccuggccaaugcccg

SEQ ID NO: 905808 - RNA, 21 nt, Human
cucuccuccugcagagagaag

SEQ ID NO: 905809 - RNA, 22 nt, Human
cugggugagggucaacaucugg

SEQ ID NO: 905810 - RNA, 21 nt, Human
cuuagcccccucuccugcagc

SEQ ID NO: 905811 - RNA, 19 nt, Human
gaaccgggcccccaccccc

SEQ ID NO: 905812 - RNA, 19 nt, Human
gacaggaugguggguggga

SEQ ID NO: 905813 - RNA, 22 nt, Human
gagaagauucaagucugagaac

SEQ ID NO: 905814 - RNA, 19 nt, Human
gagaaggggacaucuccau

SEQ ID NO: 905815 - RNA, 23 nt, Human
gagagccugagaccaauccagag

SEQ ID NO: 905816 - RNA, 23 nt, Human
gagccugagaccaauccagagga

SEQ ID NO: 905817 - RNA, 20 nt, Human
gcccccacccccauccccug

SEQ ID NO: 905818 - RNA, 20 nt, Human
ggacuuagcuguggccgcca

SEQ ID NO: 905819 - RNA, 21 nt, Human
ggauggugggugggagcuguc

SEQ ID NO: 905820 - RNA, 19 nt, Human
ggccgagaagauucaaguc

SEQ ID NO: 905821 - RNA, 20 nt, Human
gggcaggagcuuggccgggu

SEQ ID NO: 905822 - RNA, 27 nt, Human
gucugagaaccacauggguugcagggg

SEQ ID NO: 905823 - RNA, 25 nt, Human
uaggaugcacaggacaagauggcug

SEQ ID NO: 905824 - RNA, 20 nt, Human
ucauggauccuuccucuguu

SEQ ID NO: 905825 - RNA, 21 nt, Human
uccacaugcaucuagaagcug

SEQ ID NO: 905826 - RNA, 21 nt, Human
uccagccccuuagcccccucu

SEQ ID NO: 905827 - RNA, 27 nt, Human
uccauggguuguguugaaucacaggag

SEQ ID NO: 905828 - RNA, 20 nt, Human
ucccagaguuuucccgcugu

SEQ ID NO: 905829 - RNA, 30 nt, Human
ucuccugcagcagagcaggauguggaaacu

SEQ ID NO: 905830 - RNA, 18 nt, Human
ucucuuggugcuuaucgu

SEQ ID NO: 905831 - RNA, 21 nt, Human
ugaaucacaggagaggcuaua

SEQ ID NO: 905832 - RNA, 26 nt, Human
ugaccaaaggccaacagagagccuga

SEQ ID NO: 905833 - RNA, 19 nt, Human
ugagaaggggacaucucca

SEQ ID NO: 905834 - RNA, 24 nt, Human
ugcaugucagaucauggggaguuu

SEQ ID NO: 905835 - RNA, 18 nt, Human
ugccuugguggauccagc

SEQ ID NO: 905836 - RNA, 21 nt, Human
uggaucaccauagucaaccau

SEQ ID NO: 905837 - RNA, 18 nt, Human
uggauuucugcaugucag

SEQ ID NO: 905838 - RNA, 19 nt, Human
uucuggacaaggcuggauu

SEQ ID NO: 905839 - RNA, 22 nt, Human
uuucguccuccaagcaauucca

SEQ ID NO: 905840 - RNA, 20 nt, Human
uuugggguuguuccucugca

SEQ ID NO: 905841 - RNA, 24 nt, Human
aagcaagccacugcugggagggcu

SEQ ID NO: 905842 - RNA, 22 nt, Human
agcgacaucuggccaggaggga

SEQ ID NO: 905843 - RNA, 22 nt, Human
cagaacugagugugcagugcua

SEQ ID NO: 905844 - RNA, 19 nt, Human
caggagaagaaagcaagcc

SEQ ID NO: 905845 - RNA, 23 nt, Human
gccacacugcagaggacccagcg

SEQ ID NO: 905846 - RNA, 25 nt, Human
ugcagaggacccagcgacaucuggc

SEQ ID NO: 905847 - RNA, 18 nt, Human
ugcugggagggcuggccg

SEQ ID NO: 905848 - RNA, 19 nt, Human
ugcugggagggcuggccgc

SEQ ID NO: 905849 - RNA, 19 nt, Human
ugcugggagggcuggccgc

SEQ ID NO: 905850 - RNA, 19 nt, Human
ugggaaacugggacaucaa

SEQ ID NO: 905851 - RNA, 22 nt, Human
ugggacaucacaggagaagaaa

SEQ ID NO: 905852 - RNA, 25 nt, Human
uuaaaaaaacuuuauugcagcuucu

SEQ ID NO: 905853 - RNA, 21 nt, Human
aaaacccccaaagacauccag

SEQ ID NO: 905854 - RNA, 21 nt, Human
aaaguacccaguuauccaagc

SEQ ID NO: 905855 - RNA, 24 nt, Human
aaagugcugggauuacaggcauga

SEQ ID NO: 905856 - RNA, 22 nt, Human
aaaugacuugccggagcugaac

SEQ ID NO: 905857 - RNA, 21 nt, Human
aagacagagucuugcucuguc

SEQ ID NO: 905858 - RNA, 23 nt, Human
aagauacacuuagcaaaaccccc

SEQ ID NO: 905859 - RNA, 21 nt, Human
aagugaucugccugccuuggc

SEQ ID NO: 905860 - RNA, 24 nt, Human
aagugaucugccugccuuggccuc

SEQ ID NO: 905861 - RNA, 19 nt, Human
aagugcugggauuacaggc

SEQ ID NO: 905862 - RNA, 21 nt, Human
aagugcugggauuacaggcau

SEQ ID NO: 905863 - RNA, 26 nt, Human
aagugcugggauuacaggcaugagcc

SEQ ID NO: 905864 - RNA, 25 nt, Human
aaguggcccuggggagggagaaggc

SEQ ID NO: 905865 - RNA, 18 nt, Human
aauggccauuuaacacug

SEQ ID NO: 905866 - RNA, 21 nt, Human
accauguuggccagguggucu

SEQ ID NO: 905867 - RNA, 18 nt, Human
acccaggaacccguggcc

SEQ ID NO: 905868 - RNA, 19 nt, Human
acccaggcuggagugcagu

SEQ ID NO: 905869 - RNA, 22 nt, Human
acgccaggcuaauuuuuuguau

SEQ ID NO: 905870 - RNA, 20 nt, Human
acggaaaugagaaacgaccc

SEQ ID NO: 905871 - RNA, 21 nt, Human
acgggguuucaccauguuggc

SEQ ID NO: 905872 - RNA, 23 nt, Human
acgggguuucaccauguuggcca

SEQ ID NO: 905873 - RNA, 24 nt, Human
acgggguuucaccauguuggccag

SEQ ID NO: 905874 - RNA, 18 nt, Human
agaaacgacccaggaacc

SEQ ID NO: 905875 - RNA, 23 nt, Human
agacguuuaacucgacggaaaug

SEQ ID NO: 905876 - RNA, 20 nt, Human
agagccaugcugucugccac

SEQ ID NO: 905877 - RNA, 18 nt, Human
aggccucacagugcucag

SEQ ID NO: 905878 - RNA, 23 nt, Human
aggcugcagcugaguuuuagcug

SEQ ID NO: 905879 - RNA, 25 nt, Human
aggcuggagugcaguggcgcgaucu

SEQ ID NO: 905880 - RNA, 24 nt, Human
agguggucuugaacuccuggccuu

SEQ ID NO: 905881 - RNA, 21 nt, Human
agguucaagugauucuucugc

SEQ ID NO: 905882 - RNA, 22 nt, Human
aguacccaguuauccaagcagc

SEQ ID NO: 905883 - RNA, 19 nt, Human
aguagcugggauuauaggc

SEQ ID NO: 905884 - RNA, 24 nt, Human
agugauucuucugcuucagccucc

SEQ ID NO: 905885 - RNA, 20 nt, Human
agugcaguggcgcgaucuug

SEQ ID NO: 905886 - RNA, 24 nt, Human
agugcaguggcgcgaucuugacuc

SEQ ID NO: 905887 - RNA, 23 nt, Human
aguggcgcgaucuugacucacug

SEQ ID NO: 905888 - RNA, 23 nt, Human
aucagcaagggaucccaguccca

SEQ ID NO: 905889 - RNA, 18 nt, Human
aucucuuccacugaagca

SEQ ID NO: 905890 - RNA, 24 nt, Human
caaagugcugggauuacaggcaug

SEQ ID NO: 905891 - RNA, 21 nt, Human
caagauacacuuagcaaaacc

SEQ ID NO: 905892 - RNA, 22 nt, Human
caaguauaacuuacuacuguaa

SEQ ID NO: 905893 - RNA, 22 nt, Human
caagugauucuucugcuucagc

SEQ ID NO: 905894 - RNA, 20 nt, Human
caccauguuggccagguggu

SEQ ID NO: 905895 - RNA, 22 nt, Human
caccauguuggccagguggucu

SEQ ID NO: 905896 - RNA, 23 nt, Human
caccauguuggccagguggucuu

SEQ ID NO: 905897 - RNA, 30 nt, Human
caccauguuggccagguggucuugaacucc

SEQ ID NO: 905898 - RNA, 24 nt, Human
cacccaggcuggagugcaguggcg

SEQ ID NO: 905899 - RNA, 23 nt, Human
cacucuacugcuuguuccccacu

SEQ ID NO: 905900 - RNA, 21 nt, Human
cacugcaaccuccgccuccua

SEQ ID NO: 905901 - RNA, 18 nt, Human
cagagcuucugagguacc

SEQ ID NO: 905902 - RNA, 24 nt, Human
cagcagcacuggccggggguaagg

SEQ ID NO: 905903 - RNA, 24 nt, Human
cagccaagcugauuccucagaagc

SEQ ID NO: 905904 - RNA, 22 nt, Human
cagcccggggccugggucuccc

SEQ ID NO: 905905 - RNA, 20 nt, Human
cagccuccugaguagcuggg

SEQ ID NO: 905906 - RNA, 19 nt, Human
caguggcgcgaucuugacu

SEQ ID NO: 905907 - RNA, 19 nt, Human
caucucaaccugcuuuugu

SEQ ID NO: 905908 - RNA, 23 nt, Human
ccaaagugcugggauuacaggca

SEQ ID NO: 905909 - RNA, 24 nt, Human
ccaaagugcugggauuacaggcau

SEQ ID NO: 905910 - RNA, 21 nt, Human
ccacuccaucaaggucccaga

SEQ ID NO: 905911 - RNA, 22 nt, Human
ccagccuucuuuauuuuuaaga

SEQ ID NO: 905912 - RNA, 23 nt, Human
ccagucccaaagugauuuuaaga

SEQ ID NO: 905913 - RNA, 20 nt, Human
ccagucccacucuacugcuu

SEQ ID NO: 905914 - RNA, 24 nt, Human
cccaaagugcugggauuacaggca

SEQ ID NO: 905915 - RNA, 24 nt, Human
ccccacuccaucaaggucccagaa

SEQ ID NO: 905916 - RNA, 25 nt, Human
ccccacuccaucaaggucccagaag

SEQ ID NO: 905917 - RNA, 20 nt, Human
cccccaaagacauccagagc

SEQ ID NO: 905918 - RNA, 25 nt, Human
cccccaaagacauccagagcuucug

SEQ ID NO: 905919 - RNA, 18 nt, Human
cccuggggagggagaagg

SEQ ID NO: 905920 - RNA, 24 nt, Human
ccgccuccuagguucaagugauuc

SEQ ID NO: 905921 - RNA, 23 nt, Human
ccuagguucaagugauucuucug

SEQ ID NO: 905922 - RNA, 23 nt, Human
ccucacagugcucagcccggggc

SEQ ID NO: 905923 - RNA, 18 nt, Human
ccucuguguaccucaguu

SEQ ID NO: 905924 - RNA, 23 nt, Human
ccugaguagcugggauuauaggc

SEQ ID NO: 905925 - RNA, 24 nt, Human
ccugaguagcugggauuauaggcg

SEQ ID NO: 905926 - RNA, 22 nt, Human
ccugccuuggccucccaaagug

SEQ ID NO: 905927 - RNA, 21 nt, Human
ccuggccuuaagugaucugcc

SEQ ID NO: 905928 - RNA, 23 nt, Human
ccuuuggcuucaucucuuccacu

SEQ ID NO: 905929 - RNA, 21 nt, Human
cgacggaaaugagaaacgacc

SEQ ID NO: 905930 - RNA, 18 nt, Human
cggcucacaccuagaaau

SEQ ID NO: 905931 - RNA, 22 nt, Human
cucaaaauggacgcuuggaagc

SEQ ID NO: 905932 - RNA, 23 nt, Human
cucacagugcucagcccggggcc

SEQ ID NO: 905933 - RNA, 19 nt, Human
cuccuagguucaagugauu

SEQ ID NO: 905934 - RNA, 20 nt, Human
cucugucacccaggcuggag

SEQ ID NO: 905935 - RNA, 23 nt, Human
cugcaaccuccgccuccuagguu

SEQ ID NO: 905936 - RNA, 24 nt, Human
cugcaaccuccgccuccuagguuc

SEQ ID NO: 905937 - RNA, 23 nt, Human
cugccuuggccucccaaagugcu

SEQ ID NO: 905938 - RNA, 23 nt, Human
cugcuucagccuccugaguagcu

SEQ ID NO: 905939 - RNA, 18 nt, Human
cugucacccaggcuggag

SEQ ID NO: 905940 - RNA, 19 nt, Human
cugucacccaggcuggagu

SEQ ID NO: 905941 - RNA, 24 nt, Human
cuguccuuuggcuucaucucuucc

SEQ ID NO: 905942 - RNA, 23 nt, Human
cuuaagugaucugccugccuugg

SEQ ID NO: 905943 - RNA, 19 nt, Human
cuucugagguaccucugug

SEQ ID NO: 905944 - RNA, 24 nt, Human
gagacgggguuucaccauguuggc

SEQ ID NO: 905945 - RNA, 24 nt, Human
gaucacuucuugauaggagcucau

SEQ ID NO: 905946 - RNA, 18 nt, Human
gauuacaggcaugagcca

SEQ ID NO: 905947 - RNA, 21 nt, Human
gauuacaggcaugagccacca

SEQ ID NO: 905948 - RNA, 22 nt, Human
gauuacaggcaugagccaccac

SEQ ID NO: 905949 - RNA, 26 nt, Human
gcaaaacccccaaagacauccagagc

SEQ ID NO: 905950 - RNA, 19 nt, Human
gcagcugaguuuuagcuga

SEQ ID NO: 905951 - RNA, 18 nt, Human
gccaggcuaauuuuuugu

SEQ ID NO: 905952 - RNA, 18 nt, Human
gcccuggggagggagaag

SEQ ID NO: 905953 - RNA, 22 nt, Human
gccuuggccucccaaagugcug

SEQ ID NO: 905954 - RNA, 19 nt, Human
gcucagcccggggccuggg

SEQ ID NO: 905955 - RNA, 25 nt, Human
gcucugucacccaggcuggagugca

SEQ ID NO: 905956 - RNA, 24 nt, Human
gcugcagcugaguuuuagcugacc

SEQ ID NO: 905957 - RNA, 19 nt, Human
gcuggagugcaguggcgcg

SEQ ID NO: 905958 - RNA, 28 nt, Human
ggaaauaaauagaaaaugugaucacggc

SEQ ID NO: 905959 - RNA, 19 nt, Human
ggauuacaggcaugagcca

SEQ ID NO: 905960 - RNA, 23 nt, Human
ggccauuuaacacuguuguucug

SEQ ID NO: 905961 - RNA, 22 nt, Human
ggccugggucucccccaguccc

SEQ ID NO: 905962 - RNA, 24 nt, Human
ggccuuaagugaucugccugccuu

SEQ ID NO: 905963 - RNA, 22 nt, Human
ggcucacaccuagaaauuuaca

SEQ ID NO: 905964 - RNA, 21 nt, Human
ggggguaagggaaugagcuuc

SEQ ID NO: 905965 - RNA, 23 nt, Human
gggguuucaccauguuggccagg

SEQ ID NO: 905966 - RNA, 22 nt, Human
ggguuucaccauguuggccagg

SEQ ID NO: 905967 - RNA, 22 nt, Human
guaaguauaaguaguacuaugu

SEQ ID NO: 905968 - RNA, 23 nt, Human
guagagacgggguuucaccaugu

SEQ ID NO: 905969 - RNA, 18 nt, Human
guagcugggauuauaggc

SEQ ID NO: 905970 - RNA, 19 nt, Human
gucaucuuccccaucucaa

SEQ ID NO: 905971 - RNA, 24 nt, Human
gucuugcucugucacccaggcugg

SEQ ID NO: 905972 - RNA, 24 nt, Human
gugauucuucugcuucagccuccu

SEQ ID NO: 905973 - RNA, 24 nt, Human
uaauuuuuuguauuuuuaguagag

SEQ ID NO: 905974 - RNA, 19 nt, Human
uacacuuagcaaaaccccc

SEQ ID NO: 905975 - RNA, 24 nt, Human
uacaggcaugagccaccacgccca

SEQ ID NO: 905976 - RNA, 21 nt, Human
uaccucaguuuuucucccugu

SEQ ID NO: 905977 - RNA, 22 nt, Human
uaccucaguuuuucucccugug

SEQ ID NO: 905978 - RNA, 22 nt, Human
uagagacgggguuucaccaugu

SEQ ID NO: 905979 - RNA, 26 nt, Human
uagcaaaacccccaaagacauccaga

SEQ ID NO: 905980 - RNA, 20 nt, Human
uagguucaagugauucuucu

SEQ ID NO: 905981 - RNA, 20 nt, Human
uagguucaagugauucuucu

SEQ ID NO: 905982 - RNA, 24 nt, Human
uaguagagacgggguuucaccaug

SEQ ID NO: 905983 - RNA, 25 nt, Human
uaguagagacgggguuucaccaugu

SEQ ID NO: 905984 - RNA, 18 nt, Human
uauuuuuaagaugggguc

SEQ ID NO: 905985 - RNA, 24 nt, Human
ucacccaggcuggagugcaguggc

SEQ ID NO: 905986 - RNA, 19 nt, Human
ucacugcaaccuccgccuc

SEQ ID NO: 905987 - RNA, 24 nt, Human
ucacugcaaccuccgccuccuagg

SEQ ID NO: 905988 - RNA, 25 nt, Human
ucacugcaaccuccgccuccuaggu

SEQ ID NO: 905989 - RNA, 27 nt, Human
ucacugcaaccuccgccuccuagguuc

SEQ ID NO: 905990 - RNA, 20 nt, Human
ucagccuccugaguagcugg

SEQ ID NO: 905991 - RNA, 22 nt, Human
ucagccuccugaguagcuggga

SEQ ID NO: 905992 - RNA, 21 nt, Human
ucauucuguccuuuggcuuca

SEQ ID NO: 905993 - RNA, 23 nt, Human
uccauacaaugagaagacuugga

SEQ ID NO: 905994 - RNA, 24 nt, Human
ucccaaagugcugggauuacaggc

SEQ ID NO: 905995 - RNA, 21 nt, Human
uccuagguucaagugauucuu

SEQ ID NO: 905996 - RNA, 24 nt, Human
uccuagguucaagugauucuucug

SEQ ID NO: 905997 - RNA, 24 nt, Human
uccugaguagcugggauuauaggc

SEQ ID NO: 905998 - RNA, 22 nt, Human
ucgcugggcugagucuucacau

SEQ ID NO: 905999 - RNA, 18 nt, Human
ucuaagaucaaaguaccc

SEQ ID NO: 906000 - RNA, 18 nt, Human
ucuacugcuuguucccca

SEQ ID NO: 906001 - RNA, 19 nt, Human
ucucgcccacgcguccgcg

SEQ ID NO: 906002 - RNA, 26 nt, Human
ucucgcucuacuguccaggcugcagc

SEQ ID NO: 906003 - RNA, 18 nt, Human
ucucugaagguagggauu

SEQ ID NO: 906004 - RNA, 21 nt, Human
ucugaagguagggauuuucau

SEQ ID NO: 906005 - RNA, 20 nt, Human
ucugccacucugugggcuca

SEQ ID NO: 906006 - RNA, 24 nt, Human
ucugucacccaggcuggagugcag

SEQ ID NO: 906007 - RNA, 22 nt, Human
ucuucacauccaggccucacag

SEQ ID NO: 906008 - RNA, 19 nt, Human
ucuuccccaucucaaccug

SEQ ID NO: 906009 - RNA, 21 nt, Human
ucuugaacuccuggccuuaag

SEQ ID NO: 906010 - RNA, 22 nt, Human
ucuugcucugucacccaggcug

SEQ ID NO: 906011 - RNA, 23 nt, Human
ucuugcucugucacccaggcugg

SEQ ID NO: 906012 - RNA, 24 nt, Human
ucuugcucugucacccaggcugga

SEQ ID NO: 906013 - RNA, 23 nt, Human
ugaagguagggauuuucauucug

SEQ ID NO: 906014 - RNA, 23 nt, Human
ugagaaacgacccaggaacccgg

SEQ ID NO: 906015 - RNA, 21 nt, Human
ugagagccaugcugucugcca

SEQ ID NO: 906016 - RNA, 19 nt, Human
ugagucuucacauccaggc

SEQ ID NO: 906017 - RNA, 18 nt, Human
ugccugccuuggccuccc

SEQ ID NO: 906018 - RNA, 24 nt, Human
ugcuucagccuccugaguagcugg

SEQ ID NO: 906019 - RNA, 21 nt, Human
uggagugcaguggcgcgaucu

SEQ ID NO: 906020 - RNA, 23 nt, Human
uggagugcaguggcgcgaucuug

SEQ ID NO: 906021 - RNA, 24 nt, Human
uggccagccaagcugauuccucag

SEQ ID NO: 906022 - RNA, 18 nt, Human
uggccuuaagugaucugc

SEQ ID NO: 906023 - RNA, 20 nt, Human
uggccuuaagugaucugccu

SEQ ID NO: 906024 - RNA, 24 nt, Human
uggccuuaagugaucugccugccu

SEQ ID NO: 906025 - RNA, 18 nt, Human
ugggauuacaggcaugag

SEQ ID NO: 906026 - RNA, 19 nt, Human
ugggauuacaggcaugagc

SEQ ID NO: 906027 - RNA, 22 nt, Human
ugggauuacaggcaugagccac

SEQ ID NO: 906028 - RNA, 23 nt, Human
ugggauuacaggcaugagccacc

SEQ ID NO: 906029 - RNA, 24 nt, Human
ugggauuacaggcaugagccacca

SEQ ID NO: 906030 - RNA, 24 nt, Human
ugggauuacaggcaugagccacca

SEQ ID NO: 906031 - RNA, 19 nt, Human
ugggauuauaggcgccugc

SEQ ID NO: 906032 - RNA, 21 nt, Human
ugggauuauaggcgccugcca

SEQ ID NO: 906033 - RNA, 21 nt, Human
ugggauuauaggcgccugcca

SEQ ID NO: 906034 - RNA, 22 nt, Human
ugggauuauaggcgccugccau

SEQ ID NO: 906035 - RNA, 24 nt, Human
ugggauuauaggcgccugccauua

SEQ ID NO: 906036 - RNA, 18 nt, Human
ugguguugggcugggcua

SEQ ID NO: 906037 - RNA, 21 nt, Human
uguauuuuuaguagagacggg

SEQ ID NO: 906038 - RNA, 20 nt, Human
uguccaggcugcagcugagu

SEQ ID NO: 906039 - RNA, 21 nt, Human
ugugaucacggcucacaccua

SEQ ID NO: 906040 - RNA, 18 nt, Human
uguucugucaucuucccc

SEQ ID NO: 906041 - RNA, 24 nt, Human
uguucugucaucuuccccaucuca

SEQ ID NO: 906042 - RNA, 18 nt, Human
uuaguagagacgggguuu

SEQ ID NO: 906043 - RNA, 22 nt, Human
uuaguagagacgggguuucacc

SEQ ID NO: 906044 - RNA, 24 nt, Human
uuaguagagacgggguuucaccau

SEQ ID NO: 906045 - RNA, 23 nt, Human
uucaagugauucuucugcuucag

SEQ ID NO: 906046 - RNA, 24 nt, Human
uucaagugauucuucugcuucagc

SEQ ID NO: 906047 - RNA, 23 nt, Human
uuccaaggcucaaaauggacgcu

SEQ ID NO: 906048 - RNA, 24 nt, Human
uugccggagcugaacuugcuggcc

SEQ ID NO: 906049 - RNA, 24 nt, Human
uuggccagguggucuugaacuccu

SEQ ID NO: 906050 - RNA, 18 nt, Human
uuggccucccaaagugcu

SEQ ID NO: 906051 - RNA, 19 nt, Human
uuucaccauguuggccagg

SEQ ID NO: 906052 - RNA, 20 nt, Human
uuucaccauguuggccaggu

SEQ ID NO: 906053 - RNA, 24 nt, Human
uuuuuaguagagacgggguuucac

SEQ ID NO: 906054 - RNA, 21 nt, Human
uuuuuguauuuuuaguagaga

SEQ ID NO: 906055 - RNA, 24 nt, Human
uuuuuuguauuuuuaguagagacg

SEQ ID NO: 906056 - RNA, 20 nt, Human
aacgaagauggcggaaagaa

SEQ ID NO: 906057 - RNA, 23 nt, Human
aagaacgaagauguuggaaagaa

SEQ ID NO: 906058 - RNA, 20 nt, Human
auaagaacaauauucuuggu

SEQ ID NO: 906059 - RNA, 27 nt, Human
caaauuuccagcauaagaacaauauuc

SEQ ID NO: 906060 - RNA, 23 nt, Human
caacuaaauuaccaggaagacca

SEQ ID NO: 906061 - RNA, 20 nt, Human
caccgcgaggcccuuuuccc

SEQ ID NO: 906062 - RNA, 19 nt, Human
caggaccuguccuaagccc

SEQ ID NO: 906063 - RNA, 25 nt, Human
ccgcuggcuccuccacacauucacu

SEQ ID NO: 906064 - RNA, 21 nt, Human
cggaaagaacgaagacacaac

SEQ ID NO: 906065 - RNA, 21 nt, Human
cucugcagaccuaccggcuga

SEQ ID NO: 906066 - RNA, 22 nt, Human
gaaagaacgaagauggcggaaa

SEQ ID NO: 906067 - RNA, 19 nt, Human
ggaaagaacgaagauggcc

SEQ ID NO: 906068 - RNA, 19 nt, Human
ucagucuucauuugucuug

SEQ ID NO: 906069 - RNA, 18 nt, Human
ucagugagaaagaacgaa

SEQ ID NO: 906070 - RNA, 18 nt, Human
uccuaagcccgcuggcuc

SEQ ID NO: 906071 - RNA, 18 nt, Human
ugagaaagaacgaagaug

SEQ ID NO: 906072 - RNA, 19 nt, Human
ugagaaagaacgaagaugu

SEQ ID NO: 906073 - RNA, 24 nt, Human
ugcagaccuaccggcugagucucg

SEQ ID NO: 906074 - RNA, 20 nt, Human
uggaaagaacgaagauggcg

SEQ ID NO: 906075 - RNA, 21 nt, Human
uucuugguuucagucuucauu

SEQ ID NO: 906076 - RNA, 18 nt, Human
aaaaacacaaaugaagug

SEQ ID NO: 906077 - RNA, 22 nt, Human
aaaaaguaaauauagcugaaaa

SEQ ID NO: 906078 - RNA, 19 nt, Human
aaaacaucccugcuaccaa

SEQ ID NO: 906079 - RNA, 23 nt, Human
aaaagcuuugaacagaaggguuc

SEQ ID NO: 906080 - RNA, 20 nt, Human
aacuuauuccacccacccug

SEQ ID NO: 906081 - RNA, 22 nt, Human
aagcagcaauacaaaaguauuc

SEQ ID NO: 906082 - RNA, 22 nt, Human
auguccaauauuuaaaaccagu

SEQ ID NO: 906083 - RNA, 24 nt, Human
cacaaaggaaccaggguugucuua

SEQ ID NO: 906084 - RNA, 23 nt, Human
caccuauauuucaaguuuggaaa

SEQ ID NO: 906085 - RNA, 19 nt, Human
caucccugcuaccaauaca

SEQ ID NO: 906086 - RNA, 24 nt, Human
cugaaaauguaaauuaguuauaau

SEQ ID NO: 906087 - RNA, 20 nt, Human
gaaccaggguugucuuaugg

SEQ ID NO: 906088 - RNA, 22 nt, Human
gaagugaaaaaagauuuuuccc

SEQ ID NO: 906089 - RNA, 18 nt, Human
gagaaaaaacccauaccu

SEQ ID NO: 906090 - RNA, 18 nt, Human
gggaacuucuaaguccuu

SEQ ID NO: 906091 - RNA, 21 nt, Human
gugaagggggagaaaaaaccc

SEQ ID NO: 906092 - RNA, 21 nt, Human
uaaaaaguaaauauagcugaa

SEQ ID NO: 906093 - RNA, 21 nt, Human
uaaaaccaguuuguaauuggg

SEQ ID NO: 906094 - RNA, 20 nt, Human
uaaaaugggaaacucaagca

SEQ ID NO: 906095 - RNA, 27 nt, Human
uaaacugguacacacuguucacaccua

SEQ ID NO: 906096 - RNA, 25 nt, Human
uauaaagauuuagcauauauauaua

SEQ ID NO: 906097 - RNA, 20 nt, Human
uauuccacccacccugguga

SEQ ID NO: 906098 - RNA, 22 nt, Human
uccacccacccuggugaagggg

SEQ ID NO: 906099 - RNA, 22 nt, Human
uccacggauugcagcgggccgc

SEQ ID NO: 906100 - RNA, 23 nt, Human
ugaaaaaagauuuuucccccaaa

SEQ ID NO: 906101 - RNA, 21 nt, Human
ugaagggggagaaaaaaccca

SEQ ID NO: 906102 - RNA, 21 nt, Human
ugaaugacagucuuuuuuuuu

SEQ ID NO: 906103 - RNA, 24 nt, Human
ugaaugacagucuuuuuuuuuuua

SEQ ID NO: 906104 - RNA, 20 nt, Human
ugaaugguaugaaugacagu

SEQ ID NO: 906105 - RNA, 22 nt, Human
ugcaagcagcaauacaaaagua

SEQ ID NO: 906106 - RNA, 19 nt, Human
ugcagcgggccgcgccgag

SEQ ID NO: 906107 - RNA, 25 nt, Human
ugguaugaaugacagucuuuuuuuu

SEQ ID NO: 906108 - RNA, 26 nt, Human
ugguaugaaugacagucuuuuuuuuu

SEQ ID NO: 906109 - RNA, 19 nt, Human
uguaauugggggaacuucu

SEQ ID NO: 906110 - RNA, 20 nt, Human
uguucacaccuauauuucaa

SEQ ID NO: 906111 - RNA, 24 nt, Human
uuagauuuuaaaaugggaaacuca

SEQ ID NO: 906112 - RNA, 22 nt, Human
uuuuuuuuuuuuuauuuuacag

SEQ ID NO: 906113 - RNA, 23 nt, Human
uuuuuuuuuuuuuuuuuuauuuu

SEQ ID NO: 906114 - RNA, 21 nt, Human
aaaucgauuuuauugcagcca

SEQ ID NO: 906115 - RNA, 24 nt, Human
aagauuugacauuagguaaaaaua

SEQ ID NO: 906116 - RNA, 21 nt, Human
aagcccuugguaucaaauagc

SEQ ID NO: 906117 - RNA, 18 nt, Human
acaaacaagcagaaaagu

SEQ ID NO: 906118 - RNA, 24 nt, Human
acacuaaaugucaaacuaaaauga

SEQ ID NO: 906119 - RNA, 28 nt, Human
accauaccuaaacugcuuuauaaaacug

SEQ ID NO: 906120 - RNA, 22 nt, Human
agauguaccaaauguaaaacag

SEQ ID NO: 906121 - RNA, 21 nt, Human
agccgccgcgccucacucggg

SEQ ID NO: 906122 - RNA, 18 nt, Human
aggaggagggcggcgggc

SEQ ID NO: 906123 - RNA, 22 nt, Human
aguaaaaaagucgaugcaaccc

SEQ ID NO: 906124 - RNA, 26 nt, Human
auaaagcagaauaauguucuagccuu

SEQ ID NO: 906125 - RNA, 24 nt, Human
auaacucaacauccuuaauuuggu

SEQ ID NO: 906126 - RNA, 21 nt, Human
auuugguauagaugugacauu

SEQ ID NO: 906127 - RNA, 19 nt, Human
caaaauaaaagugagaaag

SEQ ID NO: 906128 - RNA, 24 nt, Human
cacagauguaccaaauguaaaaca

SEQ ID NO: 906129 - RNA, 20 nt, Human
cccaugcuacaaaauaaaaa

SEQ ID NO: 906130 - RNA, 26 nt, Human
cccaugcuacaaaauaaaagugagaa

SEQ ID NO: 906131 - RNA, 22 nt, Human
ccccccaugacauuuaaaaagc

SEQ ID NO: 906132 - RNA, 21 nt, Human
cccccccaugacauuuaaaaa

SEQ ID NO: 906133 - RNA, 20 nt, Human
ccccucaagaaaaguagaau

SEQ ID NO: 906134 - RNA, 21 nt, Human
ccgccgcgccucacucgggcc

SEQ ID NO: 906135 - RNA, 21 nt, Human
ccgccgcgccucacucgggcc

SEQ ID NO: 906136 - RNA, 22 nt, Human
ccgccgcgccucacucgggccu

SEQ ID NO: 906137 - RNA, 20 nt, Human
ccucacucgggccucaugga

SEQ ID NO: 906138 - RNA, 18 nt, Human
ccuccuccaggggccgcu

SEQ ID NO: 906139 - RNA, 18 nt, Human
cgccgcgccucacucggg

SEQ ID NO: 906140 - RNA, 22 nt, Human
cggcucggcugcucggugcuuc

SEQ ID NO: 906141 - RNA, 24 nt, Human
cuaaaaaaggaugcuacauuuuug

SEQ ID NO: 906142 - RNA, 25 nt, Human
cuccaggggccgcugccgcugcgcu

SEQ ID NO: 906143 - RNA, 20 nt, Human
cuccuccgccuccuccucca

SEQ ID NO: 906144 - RNA, 24 nt, Human
cuccuccgccuccuccuccagggg

SEQ ID NO: 906145 - RNA, 22 nt, Human
gaaaaaauaaaaauaaaaaaga

SEQ ID NO: 906146 - RNA, 18 nt, Human
gaaagcuauaauacuccu

SEQ ID NO: 906147 - RNA, 21 nt, Human
gaacaaacaagcagaaaagug

SEQ ID NO: 906148 - RNA, 19 nt, Human
gaugcuacauuuuugcagu

SEQ ID NO: 906149 - RNA, 19 nt, Human
gcuacaaaauaaaagugag

SEQ ID NO: 906150 - RNA, 24 nt, Human
gcuccuccuccuccgccuccuccu

SEQ ID NO: 906151 - RNA, 20 nt, Human
gggaguucaccaaguuggga

SEQ ID NO: 906152 - RNA, 22 nt, Human
uaaaaagcccuugguaucaaau

SEQ ID NO: 906153 - RNA, 24 nt, Human
uaaaacaguggguuauuaacagaa

SEQ ID NO: 906154 - RNA, 23 nt, Human
uaaagcagaugaaaacuugaaug

SEQ ID NO: 906155 - RNA, 19 nt, Human
uaagguaaugaaguuaguc

SEQ ID NO: 906156 - RNA, 20 nt, Human
uaggacgcggggggaaggcg

SEQ ID NO: 906157 - RNA, 23 nt, Human
uauaaagcagaugaaaacuugaa

SEQ ID NO: 906158 - RNA, 20 nt, Human
ucauugggacacuaaauguc

SEQ ID NO: 906159 - RNA, 19 nt, Human
uccuccuccgccuccuccu

SEQ ID NO: 906160 - RNA, 23 nt, Human
ugaaaaaauaaaaauaaaaaaga

SEQ ID NO: 906161 - RNA, 20 nt, Human
ugaaugacaaauaucuagua

SEQ ID NO: 906162 - RNA, 18 nt, Human
ugacauuuucuugcucuc

SEQ ID NO: 906163 - RNA, 21 nt, Human
ugagaaagcuaacuguauuag

SEQ ID NO: 906164 - RNA, 21 nt, Human
uggaauaaaucuucagugaag

SEQ ID NO: 906165 - RNA, 22 nt, Human
ugggacacuaaaugucaaacua

SEQ ID NO: 906166 - RNA, 26 nt, Human
uuacaugcauauuuacaagcaauccu

SEQ ID NO: 906167 - RNA, 22 nt, Human
uuagugcuaaagauuuucaaga

SEQ ID NO: 906168 - RNA, 27 nt, Human
uuccccucaagaaaaguagaauuuaaa

SEQ ID NO: 906169 - RNA, 23 nt, Human
aagacuuggcaccaccaucaaca

SEQ ID NO: 906170 - RNA, 19 nt, Human
aagggaagccaucuuucuc

SEQ ID NO: 906171 - RNA, 19 nt, Human
aaugcaaaucucacauaug

SEQ ID NO: 906172 - RNA, 18 nt, Human
agccaacauggauggugu

SEQ ID NO: 906173 - RNA, 19 nt, Human
aggaguaaaacucagauac

SEQ ID NO: 906174 - RNA, 21 nt, Human
agugaaaacuguaccagaagc

SEQ ID NO: 906175 - RNA, 22 nt, Human
agugcugguguuccagaaggga

SEQ ID NO: 906176 - RNA, 23 nt, Human
auucagugcugguguuccagaag

SEQ ID NO: 906177 - RNA, 26 nt, Human
caacauggaugguguguucaaaauca

SEQ ID NO: 906178 - RNA, 20 nt, Human
caacgucaguagcagugaaa

SEQ ID NO: 906179 - RNA, 21 nt, Human
cacuguguuggagucguagac

SEQ ID NO: 906180 - RNA, 26 nt, Human
cagaccguguguaaauugguuaaaga

SEQ ID NO: 906181 - RNA, 22 nt, Human
caggaggaguaaaacucagaua

SEQ ID NO: 906182 - RNA, 22 nt, Human
cccaaaagaguaauaauuuuca

SEQ ID NO: 906183 - RNA, 20 nt, Human
ccggugguggggcaauaaug

SEQ ID NO: 906184 - RNA, 22 nt, Human
ccggugguggggcaauaauggg

SEQ ID NO: 906185 - RNA, 27 nt, Human
ccggugguggggcaauaaugggagggg

SEQ ID NO: 906186 - RNA, 20 nt, Human
ccucuggaacagaaggcaaa

SEQ ID NO: 906187 - RNA, 18 nt, Human
cuacugcaggugcuucug

SEQ ID NO: 906188 - RNA, 22 nt, Human
cuccucugucacuacugcaggu

SEQ ID NO: 906189 - RNA, 21 nt, Human
cucuucaucaucguccuccuc

SEQ ID NO: 906190 - RNA, 21 nt, Human
cuucuguucccucggcauuca

SEQ ID NO: 906191 - RNA, 23 nt, Human
cuuucuuuuuacuuccuuucucu

SEQ ID NO: 906192 - RNA, 23 nt, Human
gaggagaaauuucuggccguucc

SEQ ID NO: 906193 - RNA, 20 nt, Human
gcccugauaggcgguuugcu

SEQ ID NO: 906194 - RNA, 18 nt, Human
ggaacagaaggcaaaggu

SEQ ID NO: 906195 - RNA, 19 nt, Human
ggcaauaaugggaggggcc

SEQ ID NO: 906196 - RNA, 27 nt, Human
ggcuucuuguagaaaauggaaaaaaga

SEQ ID NO: 906197 - RNA, 18 nt, Human
guaacagcaucaaagcca

SEQ ID NO: 906198 - RNA, 18 nt, Human
gucauacuuuucuuuuug

SEQ ID NO: 906199 - RNA, 22 nt, Human
gucaucuuagucuucuuuuucu

SEQ ID NO: 906200 - RNA, 19 nt, Human
uaccagaagccccuugucc

SEQ ID NO: 906201 - RNA, 18 nt, Human
uacugcaggugcuucugu

SEQ ID NO: 906202 - RNA, 21 nt, Human
uagcaaccuucugucccagug

SEQ ID NO: 906203 - RNA, 22 nt, Human
uaggcgguuugcugaaagaccu

SEQ ID NO: 906204 - RNA, 21 nt, Human
ucaacauuugaaucaccaacu

SEQ ID NO: 906205 - RNA, 18 nt, Human
ucaauuccuucuuuggcu

SEQ ID NO: 906206 - RNA, 21 nt, Human
ucaggaggaguaaaacucaga

SEQ ID NO: 906207 - RNA, 20 nt, Human
ucauacuuuucuuuuugcaa

SEQ ID NO: 906208 - RNA, 20 nt, Human
uccuuuuggacccuaaagaa

SEQ ID NO: 906209 - RNA, 26 nt, Human
ucuccucuggaacagaaggcaaaggu

SEQ ID NO: 906210 - RNA, 21 nt, Human
ucucuucaucugucaucuuag

SEQ ID NO: 906211 - RNA, 18 nt, Human
ucuggccguuccuuuucu

SEQ ID NO: 906212 - RNA, 20 nt, Human
ucugucaucuuagucuucuu

SEQ ID NO: 906213 - RNA, 19 nt, Human
ugcagaccauuucuuuaaa

SEQ ID NO: 906214 - RNA, 24 nt, Human
ugccugagaauauggagaugauuu

SEQ ID NO: 906215 - RNA, 22 nt, Human
ugccugggcuuuuucuccucug

SEQ ID NO: 906216 - RNA, 20 nt, Human
uggaacagaaggcaaagguu

SEQ ID NO: 906217 - RNA, 23 nt, Human
uguccaauuuuuucauaucuugu

SEQ ID NO: 906218 - RNA, 19 nt, Human
uugcuucuuucauucaggu

SEQ ID NO: 906219 - RNA, 21 nt, Human
aaacaggcacaagugcaaaca

SEQ ID NO: 906220 - RNA, 22 nt, Human
aaacaggcacaagugcaaacaa

SEQ ID NO: 906221 - RNA, 22 nt, Human
aagcucagaagccuccugagcu

SEQ ID NO: 906222 - RNA, 21 nt, Human
acaagugcaaacaauucacaa

SEQ ID NO: 906223 - RNA, 23 nt, Human
acacacacacacacacacacaca

SEQ ID NO: 906224 - RNA, 23 nt, Human
acacacacacacacacacacaca

SEQ ID NO: 906225 - RNA, 23 nt, Human
acacacacacacacacacacaca

SEQ ID NO: 906226 - RNA, 23 nt, Human
acacacacacacacacacacaca

SEQ ID NO: 906227 - RNA, 23 nt, Human
acacacacacacacacacacaca

SEQ ID NO: 906228 - RNA, 23 nt, Human
acacacacacacacacacacaca

SEQ ID NO: 906229 - RNA, 23 nt, Human
acacacacacacacacacacaca

SEQ ID NO: 906230 - RNA, 23 nt, Human
acacacacacacacacacacaca

SEQ ID NO: 906231 - RNA, 23 nt, Human
acacacacacacacacacacaca

SEQ ID NO: 906232 - RNA, 23 nt, Human
acacacacacacacacacacacg

SEQ ID NO: 906233 - RNA, 24 nt, Human
acacacacacacacacgauguucu

SEQ ID NO: 906234 - RNA, 22 nt, Human
acaggaguggagagguggaagc

SEQ ID NO: 906235 - RNA, 23 nt, Human
acaggaguggagagguggaagcc

SEQ ID NO: 906236 - RNA, 21 nt, Human
acccagcugcuguccccagca

SEQ ID NO: 906237 - RNA, 25 nt, Human
accccauucuuucucuuucacucag

SEQ ID NO: 906238 - RNA, 19 nt, Human
accuggagggaccugggcu

SEQ ID NO: 906239 - RNA, 20 nt, Human
accuucaccaccgaccccau

SEQ ID NO: 906240 - RNA, 18 nt, Human
acuccacuggccagguag

SEQ ID NO: 906241 - RNA, 22 nt, Human
agaaagcaggucccuucaggcc

SEQ ID NO: 906242 - RNA, 20 nt, Human
agaauacugagaggaggagg

SEQ ID NO: 906243 - RNA, 22 nt, Human
agagcaccuucaccaccgaccc

SEQ ID NO: 906244 - RNA, 24 nt, Human
agccaggccaagaaagcagguccc

SEQ ID NO: 906245 - RNA, 20 nt, Human
aggccauucacaguucuggg

SEQ ID NO: 906246 - RNA, 19 nt, Human
agggcagaggguggggcug

SEQ ID NO: 906247 - RNA, 19 nt, Human
agguccggccuggcccagu

SEQ ID NO: 906248 - RNA, 19 nt, Human
augggucccugaugaccug

SEQ ID NO: 906249 - RNA, 25 nt, Human
auucacaguucugggcggggagggg

SEQ ID NO: 906250 - RNA, 19 nt, Human
caacugccuuuaaaaaacc

SEQ ID NO: 906251 - RNA, 19 nt, Human
caagaaagcaggucccuuc

SEQ ID NO: 906252 - RNA, 21 nt, Human
caagugcaaacaauucacaaa

SEQ ID NO: 906253 - RNA, 23 nt, Human
cacaagugcaaacaauucacaaa

SEQ ID NO: 906254 - RNA, 20 nt, Human
cacacacacacacacacaca

SEQ ID NO: 906255 - RNA, 20 nt, Human
cacacacacacacacacaca

SEQ ID NO: 906256 - RNA, 20 nt, Human
cacacacacacacacacaca

SEQ ID NO: 906257 - RNA, 20 nt, Human
cacacacacacacacacaca

SEQ ID NO: 906258 - RNA, 20 nt, Human
cacacacacacacacacaca

SEQ ID NO: 906259 - RNA, 20 nt, Human
cacacacacacacacacaca

SEQ ID NO: 906260 - RNA, 20 nt, Human
cacacacacacacacacaca

SEQ ID NO: 906261 - RNA, 20 nt, Human
cacacacacacacacacaca

SEQ ID NO: 906262 - RNA, 20 nt, Human
cacacacacacacacacaca

SEQ ID NO: 906263 - RNA, 20 nt, Human
cacacacacacacacacaca

SEQ ID NO: 906264 - RNA, 20 nt, Human
cacacacacacacacacaca

SEQ ID NO: 906265 - RNA, 20 nt, Human
cacacacacacacacacaca

SEQ ID NO: 906266 - RNA, 20 nt, Human
cacacacacacacacacaca

SEQ ID NO: 906267 - RNA, 20 nt, Human
cacacacacacacacacaca

SEQ ID NO: 906268 - RNA, 20 nt, Human
cacacacacacacacacaca

SEQ ID NO: 906269 - RNA, 22 nt, Human
cacacacacacacacacacaca

SEQ ID NO: 906270 - RNA, 22 nt, Human
cacacacacacacacacacaca

SEQ ID NO: 906271 - RNA, 22 nt, Human
cacacacacacacacacacaca

SEQ ID NO: 906272 - RNA, 22 nt, Human
cacacacacacacacacacaca

SEQ ID NO: 906273 - RNA, 22 nt, Human
cacacacacacacacacacaca

SEQ ID NO: 906274 - RNA, 26 nt, Human
cacacacacacacacacacacacaca

SEQ ID NO: 906275 - RNA, 26 nt, Human
cacacacacacacacacacacacaca

SEQ ID NO: 906276 - RNA, 26 nt, Human
cacacacacacacacacacacacaca

SEQ ID NO: 906277 - RNA, 26 nt, Human
cacacacacacacacacacacacaca

SEQ ID NO: 906278 - RNA, 26 nt, Human
cacacacacacacacacacacacaca

SEQ ID NO: 906279 - RNA, 26 nt, Human
cacacacacacacacacacacacaca

SEQ ID NO: 906280 - RNA, 26 nt, Human
cacacacacacacacacacacacaca

SEQ ID NO: 906281 - RNA, 26 nt, Human
cacacacacacacacacacacacaca

SEQ ID NO: 906282 - RNA, 26 nt, Human
cacacacacacacacacacacacaca

SEQ ID NO: 906283 - RNA, 26 nt, Human
cacacacacacacacacacacacaca

SEQ ID NO: 906284 - RNA, 26 nt, Human
cacacacacacacacacacacacaca

SEQ ID NO: 906285 - RNA, 26 nt, Human
cacacacacacacacacacacacgau

SEQ ID NO: 906286 - RNA, 19 nt, Human
cacagcagcccugaagugg

SEQ ID NO: 906287 - RNA, 18 nt, Human
cacucagaaauugucccc

SEQ ID NO: 906288 - RNA, 23 nt, Human
cacuggccagguagacacaggag

SEQ ID NO: 906289 - RNA, 21 nt, Human
cacugggccucucucuuaggc

SEQ ID NO: 906290 - RNA, 23 nt, Human
cagaaauuguccccucacucccu

SEQ ID NO: 906291 - RNA, 22 nt, Human
cagaagccuccugagcucccag

SEQ ID NO: 906292 - RNA, 23 nt, Human
cagcaucaguuaggauaaacucc

SEQ ID NO: 906293 - RNA, 21 nt, Human
cagccuuccugaaacuggcug

SEQ ID NO: 906294 - RNA, 18 nt, Human
cagggccgaggaggacaa

SEQ ID NO: 906295 - RNA, 23 nt, Human
caguaggcugaagggcagagggu

SEQ ID NO: 906296 - RNA, 20 nt, Human
cauaaaaaccaccccguggc

SEQ ID NO: 906297 - RNA, 19 nt, Human
caucucacagcagcccuga

SEQ ID NO: 906298 - RNA, 22 nt, Human
ccagacagggccugggccugcc

SEQ ID NO: 906299 - RNA, 18 nt, Human
cccagugugcccugccug

SEQ ID NO: 906300 - RNA, 21 nt, Human
cccccagccauggccuggagc

SEQ ID NO: 906301 - RNA, 22 nt, Human
ccccucacucccugcccccagc

SEQ ID NO: 906302 - RNA, 19 nt, Human
ccccucucccugacgccca

SEQ ID NO: 906303 - RNA, 25 nt, Human
cccuuaaaaaaaaguccuugcaauu

SEQ ID NO: 906304 - RNA, 26 nt, Human
ccucacccgcacugggccucucucuu

SEQ ID NO: 906305 - RNA, 18 nt, Human
ccucacucccugccccca

SEQ ID NO: 906306 - RNA, 31 nt, Human
ccuccccuuacacacacacacacacacacag

SEQ ID NO: 906307 - RNA, 18 nt, Human
ccugcccccagccauggc

SEQ ID NO: 906308 - RNA, 23 nt, Human
ccuguagaaaggggucuccaucu

SEQ ID NO: 906309 - RNA, 21 nt, Human
ccugucaagcccccagccagc

SEQ ID NO: 906310 - RNA, 19 nt, Human
ccuuccggcgccuuccgcc

SEQ ID NO: 906311 - RNA, 21 nt, Human
cguucuccacugcaggcuggu

SEQ ID NO: 906312 - RNA, 23 nt, Human
cuccugagcucccaggaguguua

SEQ ID NO: 906313 - RNA, 19 nt, Human
cucgagguuugaagcugga

SEQ ID NO: 906314 - RNA, 18 nt, Human
cucucugcuggacccagc

SEQ ID NO: 906315 - RNA, 22 nt, Human
cucucugcuggacccagcugcu

SEQ ID NO: 906316 - RNA, 18 nt, Human
cugcuccuucugggcagc

SEQ ID NO: 906317 - RNA, 18 nt, Human
cuggagcaggccauucac

SEQ ID NO: 906318 - RNA, 25 nt, Human
cuggagcaggccauucacaguucug

SEQ ID NO: 906319 - RNA, 20 nt, Human
cuggccagguagacacagga

SEQ ID NO: 906320 - RNA, 19 nt, Human
cugugcacccagacagggc

SEQ ID NO: 906321 - RNA, 18 nt, Human
gaagagaacaaugggucc

SEQ ID NO: 906322 - RNA, 19 nt, Human
gaagggcagaggguggggc

SEQ ID NO: 906323 - RNA, 22 nt, Human
gagaauacugagaggaggaggc

SEQ ID NO: 906324 - RNA, 21 nt, Human
gagcaggccauucacaguucu

SEQ ID NO: 906325 - RNA, 18 nt, Human
gaggacaaggagacagca

SEQ ID NO: 906326 - RNA, 19 nt, Human
gaugccugugaccuugaca

SEQ ID NO: 906327 - RNA, 21 nt, Human
gccaagaaagcaggucccuuc

SEQ ID NO: 906328 - RNA, 24 nt, Human
gcucucugcuggacccagcugcug

SEQ ID NO: 906329 - RNA, 19 nt, Human
gcuggggcuucacauuuca

SEQ ID NO: 906330 - RNA, 19 nt, Human
gggaggggcuguacaggug

SEQ ID NO: 906331 - RNA, 20 nt, Human
gggcagaggguggggcuggg

SEQ ID NO: 906332 - RNA, 22 nt, Human
gggcagaggguggggcuggggc

SEQ ID NO: 906333 - RNA, 24 nt, Human
gggcagaggguggggcuggggcuu

SEQ ID NO: 906334 - RNA, 18 nt, Human
gggccugcgcccacccag

SEQ ID NO: 906335 - RNA, 20 nt, Human
ggggaggggcuguacaggug

SEQ ID NO: 906336 - RNA, 22 nt, Human
ggguccugcguucuccacugca

SEQ ID NO: 906337 - RNA, 21 nt, Human
gucauccuguagaaagggguc

SEQ ID NO: 906338 - RNA, 23 nt, Human
guccccucacucccugcccccag

SEQ ID NO: 906339 - RNA, 22 nt, Human
guggggcagggccgaggaggac

SEQ ID NO: 906340 - RNA, 20 nt, Human
uaacacaguugccaauccuu

SEQ ID NO: 906341 - RNA, 23 nt, Human
uaauuuaaaacaggcacaagugc

SEQ ID NO: 906342 - RNA, 20 nt, Human
uacacacacacacacacaca

SEQ ID NO: 906343 - RNA, 25 nt, Human
uacacacacacacacacacacacac

SEQ ID NO: 906344 - RNA, 21 nt, Human
uacacacacacacacacacag

SEQ ID NO: 906345 - RNA, 19 nt, Human
uagaaaggguccagacacc

SEQ ID NO: 906346 - RNA, 19 nt, Human
uagguggcaggcauacuug

SEQ ID NO: 906347 - RNA, 22 nt, Human
ucacagcagcccugaagugggg

SEQ ID NO: 906348 - RNA, 21 nt, Human
ucagaagccuccugagcuccc

SEQ ID NO: 906349 - RNA, 24 nt, Human
ucaggacaucagacgugagggagg

SEQ ID NO: 906350 - RNA, 18 nt, Human
uccacugcaggcuggugc

SEQ ID NO: 906351 - RNA, 31 nt, Human
uccccuuacacacacacacacacacacacag

SEQ ID NO: 906352 - RNA, 19 nt, Human
ucccugggcaucuugcugu

SEQ ID NO: 906353 - RNA, 24 nt, Human
ucccuucaggccagaacuuagugg

SEQ ID NO: 906354 - RNA, 23 nt, Human
uccgccucuuccucgcgacuccu

SEQ ID NO: 906355 - RNA, 18 nt, Human
uccugagcucccaggagu

SEQ ID NO: 906356 - RNA, 24 nt, Human
uccuuacauuccugucucuggccc

SEQ ID NO: 906357 - RNA, 20 nt, Human
ucuacuguguuggcugcaga

SEQ ID NO: 906358 - RNA, 25 nt, Human
ucucacagcagcccugaaguggggc

SEQ ID NO: 906359 - RNA, 23 nt, Human
ucuccacugcaggcuggugcuug

SEQ ID NO: 906360 - RNA, 23 nt, Human
ucuccauucuguaaagugagagc

SEQ ID NO: 906361 - RNA, 18 nt, Human
ucugacccuuaaaaaaaa

SEQ ID NO: 906362 - RNA, 21 nt, Human
ucuguccugugcacccagaca

SEQ ID NO: 906363 - RNA, 20 nt, Human
ucuguggaggcagcuggggc

SEQ ID NO: 906364 - RNA, 20 nt, Human
ugaagagaacaauggguccc

SEQ ID NO: 906365 - RNA, 20 nt, Human
ugaagagaacaauggguccc

SEQ ID NO: 906366 - RNA, 23 nt, Human
ugacaugauggaaacccggaggu

SEQ ID NO: 906367 - RNA, 20 nt, Human
ugacccuuaaaaaaaagucc

SEQ ID NO: 906368 - RNA, 18 nt, Human
ugagaacagcagguaucu

SEQ ID NO: 906369 - RNA, 24 nt, Human
ugagagcaccuucaccaccgaccc

SEQ ID NO: 906370 - RNA, 18 nt, Human
ugagaggaggaggcaggc

SEQ ID NO: 906371 - RNA, 22 nt, Human
ugagaggaggaggcaggcaagu

SEQ ID NO: 906372 - RNA, 20 nt, Human
ugaggagagggaagaccugg

SEQ ID NO: 906373 - RNA, 19 nt, Human
ugcacacauggaugccugu

SEQ ID NO: 906374 - RNA, 24 nt, Human
ugccggcaggcuggcugcccagug

SEQ ID NO: 906375 - RNA, 22 nt, Human
uggaagccaggccaagaaagca

SEQ ID NO: 906376 - RNA, 24 nt, Human
uggaauuccaucucacagcagccc

SEQ ID NO: 906377 - RNA, 24 nt, Human
uggacaacugccuuuaaaaaacca

SEQ ID NO: 906378 - RNA, 21 nt, Human
uggagagaauacugagaggag

SEQ ID NO: 906379 - RNA, 24 nt, Human
uggagagaauacugagaggaggaa

SEQ ID NO: 906380 - RNA, 18 nt, Human
uggaggcagcuggggcag

SEQ ID NO: 906381 - RNA, 19 nt, Human
uggaugccugugaccuuga

SEQ ID NO: 906382 - RNA, 22 nt, Human
uggccuggagcaggccauucac

SEQ ID NO: 906383 - RNA, 21 nt, Human
uggcugugggugaccuggagg

SEQ ID NO: 906384 - RNA, 21 nt, Human
ugggcuuugaacacucaauuu

SEQ ID NO: 906385 - RNA, 22 nt, Human
ugggugaccuggagggaccugg

SEQ ID NO: 906386 - RNA, 20 nt, Human
ugucucuguccugugcaccc

SEQ ID NO: 906387 - RNA, 19 nt, Human
uguggagaccagcagucug

SEQ ID NO: 906388 - RNA, 18 nt, Human
uguggaggcagcuggggc

SEQ ID NO: 906389 - RNA, 20 nt, Human
uguguuggcugcagaggcca

SEQ ID NO: 906390 - RNA, 19 nt, Human
uucacaguucugggcgggg

SEQ ID NO: 906391 - RNA, 19 nt, Human
uucuccacugcaggcuggu

SEQ ID NO: 906392 - RNA, 21 nt, Human
uucucuuucacucagaaauug

SEQ ID NO: 906393 - RNA, 28 nt, Human
uugcacacauggaugccuggucagagga

SEQ ID NO: 906394 - RNA, 21 nt, Human
uuggagagaauacugagagga

SEQ ID NO: 906395 - RNA, 23 nt, Human
uuuuuuuuuuuuuuuuugggcuu

SEQ ID NO: 906396 - RNA, 23 nt, Human
uuuuuuuuuuuuuuuuuuuuggg

SEQ ID NO: 906397 - RNA, 19 nt, Human
aaagauuuucuuuuucuuu

SEQ ID NO: 906398 - RNA, 24 nt, Human
aaauacccucuugcuaauucaucc

SEQ ID NO: 906399 - RNA, 21 nt, Human
aacaagcaacacaaaauguau

SEQ ID NO: 906400 - RNA, 23 nt, Human
aacucaaugaauacuuuaaaaaa

SEQ ID NO: 906401 - RNA, 22 nt, Human
aacugaauccaaugauccuagc

SEQ ID NO: 906402 - RNA, 22 nt, Human
acagaguuuuaaaaauggugac

SEQ ID NO: 906403 - RNA, 19 nt, Human
acaugggcacaacugaagu

SEQ ID NO: 906404 - RNA, 23 nt, Human
acucuccacccaaaccuccccca

SEQ ID NO: 906405 - RNA, 21 nt, Human
acugaagucagaucauaccug

SEQ ID NO: 906406 - RNA, 24 nt, Human
acuggcuggguaggggcaaggggg

SEQ ID NO: 906407 - RNA, 21 nt, Human
agaaaacugaaaaucuaauca

SEQ ID NO: 906408 - RNA, 23 nt, Human
agcgggagggggugagaggcaga

SEQ ID NO: 906409 - RNA, 29 nt, Human
agggauaaaaaaguaggaaaggcuuuguu

SEQ ID NO: 906410 - RNA, 21 nt, Human
aggggcaaggggggcgggggc

SEQ ID NO: 906411 - RNA, 21 nt, Human
aggggggcgggggccagcggg

SEQ ID NO: 906412 - RNA, 20 nt, Human
agggggugagaggcagagcc

SEQ ID NO: 906413 - RNA, 23 nt, Human
agucuucuucauuuuuccucagu

SEQ ID NO: 906414 - RNA, 19 nt, Human
agugcuuuuuguuuuccuu

SEQ ID NO: 906415 - RNA, 27 nt, Human
auaaauuaucaaaacuaucguacagaa

SEQ ID NO: 906416 - RNA, 21 nt, Human
augcaguuucugccaauaguu

SEQ ID NO: 906417 - RNA, 18 nt, Human
auucugcaacuuuucgcu

SEQ ID NO: 906418 - RNA, 25 nt, Human
caaaccucccccagcuacugagcau

SEQ ID NO: 906419 - RNA, 23 nt, Human
caacaagcaacacaaaauguauu

SEQ ID NO: 906420 - RNA, 23 nt, Human
caaggggggcgggggccagcggg

SEQ ID NO: 906421 - RNA, 18 nt, Human
cacagcuuucuacucucc

SEQ ID NO: 906422 - RNA, 23 nt, Human
cagcgggagggggugagaggcag

SEQ ID NO: 906423 - RNA, 23 nt, Human
caucacgcugucccaccaauugg

SEQ ID NO: 906424 - RNA, 21 nt, Human
ccacccaaaccucccccagcu

SEQ ID NO: 906425 - RNA, 22 nt, Human
ccccagcuacugagcaugccca

SEQ ID NO: 906426 - RNA, 23 nt, Human
cccccagcuacugagcaugccca

SEQ ID NO: 906427 - RNA, 18 nt, Human
cccucggaggacugucca

SEQ ID NO: 906428 - RNA, 18 nt, Human
cccuggucuguugaaccc

SEQ ID NO: 906429 - RNA, 20 nt, Human
ccuagcacugaaauugcucc

SEQ ID NO: 906430 - RNA, 22 nt, Human
cggugccucagccccuucucag

SEQ ID NO: 906431 - RNA, 27 nt, Human
cucauggucucacugaaacauucuauu

SEQ ID NO: 906432 - RNA, 28 nt, Human
cucuccacccaaaccucccccagcuacu

SEQ ID NO: 906433 - RNA, 22 nt, Human
cuggugcuugucagucuucuuc

SEQ ID NO: 906434 - RNA, 18 nt, Human
cuuuuuuuuuuuuuuuug

SEQ ID NO: 906435 - RNA, 22 nt, Human
cuuuuuuuuuuuuuuuugccag

SEQ ID NO: 906436 - RNA, 24 nt, Human
gaacauuuaggacugccauuuucu

SEQ ID NO: 906437 - RNA, 20 nt, Human
gaauuaaagacuccagagga

SEQ ID NO: 906438 - RNA, 22 nt, Human
gacuauguagcucuuccagagu

SEQ ID NO: 906439 - RNA, 18 nt, Human
gagggggugagaggcaga

SEQ ID NO: 906440 - RNA, 23 nt, Human
gcccuguucucuccucucccuuu

SEQ ID NO: 906441 - RNA, 23 nt, Human
gcggcggugccucagccccuucu

SEQ ID NO: 906442 - RNA, 21 nt, Human
gcuucgccccucggaggacug

SEQ ID NO: 906443 - RNA, 19 nt, Human
gcuuuguucaaacuccucu

SEQ ID NO: 906444 - RNA, 24 nt, Human
ggaaaaugugaucuuuaaaaauau

SEQ ID NO: 906445 - RNA, 19 nt, Human
ggaacugaauccaaugauc

SEQ ID NO: 906446 - RNA, 21 nt, Human
ggagggggugagaggcagagc

SEQ ID NO: 906447 - RNA, 20 nt, Human
ggcgggggccagcgggaggg

SEQ ID NO: 906448 - RNA, 18 nt, Human
gggagggggugagaggca

SEQ ID NO: 906449 - RNA, 18 nt, Human
gggcaaggggggcggggg

SEQ ID NO: 906450 - RNA, 23 nt, Human
gguaggggcaaggggggcggggg

SEQ ID NO: 906451 - RNA, 21 nt, Human
guacagaaaaauuacaaauuc

SEQ ID NO: 906452 - RNA, 29 nt, Human
uaaaauacccucuugcuaauucauccucu

SEQ ID NO: 906453 - RNA, 18 nt, Human
uaacaugcaaauucaucc

SEQ ID NO: 906454 - RNA, 20 nt, Human
uaagaaaagccucuguuuuc

SEQ ID NO: 906455 - RNA, 21 nt, Human
uacagaguuuuaaaaauggug

SEQ ID NO: 906456 - RNA, 21 nt, Human
uacccugcauguggcuaggau

SEQ ID NO: 906457 - RNA, 24 nt, Human
uacuucaacugauacaauggcuac

SEQ ID NO: 906458 - RNA, 18 nt, Human
uagaaaauccuacauguu

SEQ ID NO: 906459 - RNA, 25 nt, Human
uagugcucacaaaaccuuuuaagcu

SEQ ID NO: 906460 - RNA, 18 nt, Human
uauaaauuaucaaaacua

SEQ ID NO: 906461 - RNA, 22 nt, Human
ucagcgaagcggcggugccucu

SEQ ID NO: 906462 - RNA, 22 nt, Human
uccaaugauccuagcacugaaa

SEQ ID NO: 906463 - RNA, 18 nt, Human
uccacccaaaccuccccc

SEQ ID NO: 906464 - RNA, 22 nt, Human
uccacccaaaccucccccagcu

SEQ ID NO: 906465 - RNA, 18 nt, Human
uccccgggcgcacgcugg

SEQ ID NO: 906466 - RNA, 18 nt, Human
ucccggucuccccgggcg

SEQ ID NO: 906467 - RNA, 21 nt, Human
ucuccacccaaaccuccccca

SEQ ID NO: 906468 - RNA, 23 nt, Human
ucugucucaugaacauuuaggac

SEQ ID NO: 906469 - RNA, 19 nt, Human
ucuuccagaguuuuaaagg

SEQ ID NO: 906470 - RNA, 20 nt, Human
ugaauuauucucauguccuc

SEQ ID NO: 906471 - RNA, 20 nt, Human
ugagagucauucaguauuca

SEQ ID NO: 906472 - RNA, 19 nt, Human
ugagcaugcccagcugccc

SEQ ID NO: 906473 - RNA, 23 nt, Human
ugcaaaugcaguuucugccaaua

SEQ ID NO: 906474 - RNA, 20 nt, Human
ugcacaccaucaccaucacu

SEQ ID NO: 906475 - RNA, 24 nt, Human
ugcauaauuaauagaaacuaauga

SEQ ID NO: 906476 - RNA, 18 nt, Human
ugccauuuucuggauuua

SEQ ID NO: 906477 - RNA, 20 nt, Human
ugcccuggucuguugaaccc

SEQ ID NO: 906478 - RNA, 20 nt, Human
ugccucagccccuucucagc

SEQ ID NO: 906479 - RNA, 20 nt, Human
ugcuaccauuaagaaaaaag

SEQ ID NO: 906480 - RNA, 19 nt, Human
uggaagcauuucaccacag

SEQ ID NO: 906481 - RNA, 19 nt, Human
uggcuaggauauaucauaa

SEQ ID NO: 906482 - RNA, 21 nt, Human
uggcuggguaggggcaagggg

SEQ ID NO: 906483 - RNA, 24 nt, Human
uggcuggguaggggcaaggggggc

SEQ ID NO: 906484 - RNA, 18 nt, Human
ugggaacugaauccaaug

SEQ ID NO: 906485 - RNA, 19 nt, Human
uggguaggggcaagggggg

SEQ ID NO: 906486 - RNA, 18 nt, Human
ugugcaaaagaaugguuu

SEQ ID NO: 906487 - RNA, 22 nt, Human
uguggugugcaaaagaaugguu

SEQ ID NO: 906488 - RNA, 24 nt, Human
uuaauuaugcuuagagcaaccaga

SEQ ID NO: 906489 - RNA, 18 nt, Human
uucauggaaaaugugauc

SEQ ID NO: 906490 - RNA, 24 nt, Human
uuuaaaaaagauuuucuuuuucuu

SEQ ID NO: 906491 - RNA, 22 nt, Human
uuuauucugguuuaaaaaagau

SEQ ID NO: 906492 - RNA, 21 nt, Human
uuuuaugccuuuuuuccuuuu

SEQ ID NO: 906493 - RNA, 23 nt, Human
agguacccgagcagguaagagug

SEQ ID NO: 906494 - RNA, 19 nt, Human
cuugcugcugcuguuguug

SEQ ID NO: 906495 - RNA, 20 nt, Human
gcuugcugcugcuguuguug

SEQ ID NO: 906496 - RNA, 21 nt, Human
ggugucagagcuaaagaagga

SEQ ID NO: 906497 - RNA, 23 nt, Human
uagcagcuugcugcugcuguugu

SEQ ID NO: 906498 - RNA, 19 nt, Human
ugcaguagcagcuugcugc

SEQ ID NO: 906499 - RNA, 18 nt, Human
uuguugcaguagcagcuu

SEQ ID NO: 906500 - RNA, 20 nt, Human
aaacucggaaggaacaugua

SEQ ID NO: 906501 - RNA, 24 nt, Human
aacauguaacaacacgccaagucc

SEQ ID NO: 906502 - RNA, 23 nt, Human
aaccccauagagccucacuucca

SEQ ID NO: 906503 - RNA, 23 nt, Human
aagcaggauggagaagaggccgg

SEQ ID NO: 906504 - RNA, 23 nt, Human
aaggcucgcggcucgagggacuc

SEQ ID NO: 906505 - RNA, 19 nt, Human
accaggcacaagugcacgg

SEQ ID NO: 906506 - RNA, 20 nt, Human
acugccugagauuggggggc

SEQ ID NO: 906507 - RNA, 24 nt, Human
acugccugagauuggggggccagc

SEQ ID NO: 906508 - RNA, 21 nt, Human
agaaaggcacagguaggaggc

SEQ ID NO: 906509 - RNA, 20 nt, Human
agacuccagggaggaggagg

SEQ ID NO: 906510 - RNA, 23 nt, Human
agcgaaagaaaacucggaaggaa

SEQ ID NO: 906511 - RNA, 19 nt, Human
aggaggaaggagggcccag

SEQ ID NO: 906512 - RNA, 21 nt, Human
aggaggaggggguuccacggg

SEQ ID NO: 906513 - RNA, 22 nt, Human
aggaggcccagaggguggcagg

SEQ ID NO: 906514 - RNA, 18 nt, Human
aggagggcccaguggggg

SEQ ID NO: 906515 - RNA, 25 nt, Human
aggcgccgggaggggccgggcuggu

SEQ ID NO: 906516 - RNA, 19 nt, Human
agggacccaggcucccauc

SEQ ID NO: 906517 - RNA, 26 nt, Human
agggaggaggaggggguuccacggcu

SEQ ID NO: 906518 - RNA, 22 nt, Human
agggcccagugggggcgggagc

SEQ ID NO: 906519 - RNA, 24 nt, Human
aggggaggggagggggacgcggcc

SEQ ID NO: 906520 - RNA, 20 nt, Human
aggggcacagcagaggggcc

SEQ ID NO: 906521 - RNA, 19 nt, Human
agggggcuugggggcaggc

SEQ ID NO: 906522 - RNA, 23 nt, Human
cacacagggcauaggggcacagc

SEQ ID NO: 906523 - RNA, 18 nt, Human
cacagguaggaggcccag

SEQ ID NO: 906524 - RNA, 23 nt, Human
caccaggaggaaggagggcccaa

SEQ ID NO: 906525 - RNA, 19 nt, Human
cacccgccaggaccccggu

SEQ ID NO: 906526 - RNA, 18 nt, Human
caggcacaagugcacggc

SEQ ID NO: 906527 - RNA, 21 nt, Human
caggccucaguacccaccccc

SEQ ID NO: 906528 - RNA, 20 nt, Human
cagguaggaggcccagaggg

SEQ ID NO: 906529 - RNA, 18 nt, Human
ccacccaagaccuuuagc

SEQ ID NO: 906530 - RNA, 19 nt, Human
ccacccaggggcagagcgg

SEQ ID NO: 906531 - RNA, 22 nt, Human
ccacccccggcucccggggccc

SEQ ID NO: 906532 - RNA, 18 nt, Human
ccagggaggaggaggggg

SEQ ID NO: 906533 - RNA, 20 nt, Human
ccagggccugagcaggccuc

SEQ ID NO: 906534 - RNA, 22 nt, Human
ccauagagccucacuuccaggg

SEQ ID NO: 906535 - RNA, 20 nt, Human
cccacacagggcauaggggc

SEQ ID NO: 906536 - RNA, 21 nt, Human
cccacccccggcucccggggc

SEQ ID NO: 906537 - RNA, 23 nt, Human
cccaggacccugguccaagcagg

SEQ ID NO: 906538 - RNA, 21 nt, Human
cccaggcugugucccucccuc

SEQ ID NO: 906539 - RNA, 23 nt, Human
ccccaaagaggcacggccucacc

SEQ ID NO: 906540 - RNA, 23 nt, Human
ccccauagagccucacuuccagg

SEQ ID NO: 906541 - RNA, 24 nt, Human
cccuagggcagggaccaaguuggg

SEQ ID NO: 906542 - RNA, 23 nt, Human
cccugggguccccaaauuagcac

SEQ ID NO: 906543 - RNA, 20 nt, Human
ccucaccccaacugccugag

SEQ ID NO: 906544 - RNA, 19 nt, Human
ccucccuccacugcccgga

SEQ ID NO: 906545 - RNA, 25 nt, Human
ccucuggggacgaguguaacguaac

SEQ ID NO: 906546 - RNA, 18 nt, Human
ccuggacccgugaggcug

SEQ ID NO: 906547 - RNA, 20 nt, Human
cgagguggccccuguaccug

SEQ ID NO: 906548 - RNA, 22 nt, Human
cgccccgucuagaagauagccc

SEQ ID NO: 906549 - RNA, 23 nt, Human
cgccccgucuagaagauagccca

SEQ ID NO: 906550 - RNA, 21 nt, Human
cgcggguggcgcgcgggggag

SEQ ID NO: 906551 - RNA, 18 nt, Human
cgggggccucgucacaca

SEQ ID NO: 906552 - RNA, 19 nt, Human
cucuccucccagccaccca

SEQ ID NO: 906553 - RNA, 21 nt, Human
cugcccggacgugcuccaagc

SEQ ID NO: 906554 - RNA, 18 nt, Human
cugccgaggcugcaggug

SEQ ID NO: 906555 - RNA, 19 nt, Human
cuggguggcaaaugagggu

SEQ ID NO: 906556 - RNA, 22 nt, Human
cugguccaagcaggauggagaa

SEQ ID NO: 906557 - RNA, 19 nt, Human
gagcaggccucaguaccca

SEQ ID NO: 906558 - RNA, 21 nt, Human
gagccucacuuccagggccug

SEQ ID NO: 906559 - RNA, 26 nt, Human
gaggucccuagggcagggaccaaguu

SEQ ID NO: 906560 - RNA, 19 nt, Human
gcaaaugagggucuccugc

SEQ ID NO: 906561 - RNA, 20 nt, Human
gcaggcgccgggaggggccg

SEQ ID NO: 906562 - RNA, 23 nt, Human
gccaggaccccggugggcgcgac

SEQ ID NO: 906563 - RNA, 18 nt, Human
gcccccaaagaggcacgg

SEQ ID NO: 906564 - RNA, 21 nt, Human
gccgggcgggggcgggcgcgg

SEQ ID NO: 906565 - RNA, 21 nt, Human
gccggggucucgggggccggc

SEQ ID NO: 906566 - RNA, 21 nt, Human
gccuguccuccacccaagacc

SEQ ID NO: 906567 - RNA, 18 nt, Human
gcggaggcagggacccag

SEQ ID NO: 906568 - RNA, 23 nt, Human
gcgggcgcggguggcgcgcgggg

SEQ ID NO: 906569 - RNA, 19 nt, Human
gcucacucggucccugccc

SEQ ID NO: 906570 - RNA, 23 nt, Human
gcugcagguggugacuggaccag

SEQ ID NO: 906571 - RNA, 25 nt, Human
gcuggugggugucuguggucggcgc

SEQ ID NO: 906572 - RNA, 18 nt, Human
gcugugucccucccucca

SEQ ID NO: 906573 - RNA, 22 nt, Human
ggaacauguaacaacacgccaa

SEQ ID NO: 906574 - RNA, 22 nt, Human
ggagaagaggccgggggcggcc

SEQ ID NO: 906575 - RNA, 18 nt, Human
ggaggaggaggggguucc

SEQ ID NO: 906576 - RNA, 20 nt, Human
ggaggcccagaggguggcag

SEQ ID NO: 906577 - RNA, 20 nt, Human
ggcaggucaaugaccccugg

SEQ ID NO: 906578 - RNA, 19 nt, Human
ggccuggcggccggggcug

SEQ ID NO: 906579 - RNA, 19 nt, Human
ggccugggccgcguggagg

SEQ ID NO: 906580 - RNA, 21 nt, Human
ggcguggugacgggugggggc

SEQ ID NO: 906581 - RNA, 20 nt, Human
ggcucgagggacucaggcag

SEQ ID NO: 906582 - RNA, 19 nt, Human
gggaggggccgggcuggug

SEQ ID NO: 906583 - RNA, 22 nt, Human
gggcacagcagaggggccuguc

SEQ ID NO: 906584 - RNA, 23 nt, Human
gggcauaggggcacagcagaggg

SEQ ID NO: 906585 - RNA, 22 nt, Human
gggccucuccucccagccaccc

SEQ ID NO: 906586 - RNA, 24 nt, Human
gggcggccccugggguccccaaau

SEQ ID NO: 906587 - RNA, 18 nt, Human
gggcgggggcgggcgcgg

SEQ ID NO: 906588 - RNA, 18 nt, Human
ggggcugcgcggcgcggg

SEQ ID NO: 906589 - RNA, 19 nt, Human
gggggaggggaggggaggg

SEQ ID NO: 906590 - RNA, 18 nt, Human
ggguggcgcgcgggggag

SEQ ID NO: 906591 - RNA, 24 nt, Human
gggugggggccggggucucggggg

SEQ ID NO: 906592 - RNA, 20 nt, Human
gggugucugugguguggggu

SEQ ID NO: 906593 - RNA, 23 nt, Human
ggguucccccucccccagacucc

SEQ ID NO: 906594 - RNA, 22 nt, Human
gugacaugggggguccuugucu

SEQ ID NO: 906595 - RNA, 21 nt, Human
guggcgcgcgggggaggggag

SEQ ID NO: 906596 - RNA, 26 nt, Human
guggggccugaucucgggguaugguu

SEQ ID NO: 906597 - RNA, 20 nt, Human
gugggggccggggucucggg

SEQ ID NO: 906598 - RNA, 19 nt, Human
guggguggagggugggcag

SEQ ID NO: 906599 - RNA, 23 nt, Human
uaggaggcccagaggguggcagg

SEQ ID NO: 906600 - RNA, 21 nt, Human
uauuugcuucucugggaaaau

SEQ ID NO: 906601 - RNA, 20 nt, Human
ucacuuccagggccugagca

SEQ ID NO: 906602 - RNA, 19 nt, Human
uccagggaggaggaggggg

SEQ ID NO: 906603 - RNA, 18 nt, Human
ucccccucccccagacuc

SEQ ID NO: 906604 - RNA, 22 nt, Human
uccccgggguucccccuccccc

SEQ ID NO: 906605 - RNA, 24 nt, Human
uccccgggguucccccucccccag

SEQ ID NO: 906606 - RNA, 22 nt, Human
ucgccccgucuagaagauagcc

SEQ ID NO: 906607 - RNA, 24 nt, Human
ucucgggaaaagcgggucuguccu

SEQ ID NO: 906608 - RNA, 21 nt, Human
ucugugguguggggugggggc

SEQ ID NO: 906609 - RNA, 18 nt, Human
ugaccccugguucgcccc

SEQ ID NO: 906610 - RNA, 19 nt, Human
ugacgcccaggucaccccc

SEQ ID NO: 906611 - RNA, 21 nt, Human
ugacuggaccaggagguggcc

SEQ ID NO: 906612 - RNA, 20 nt, Human
ugagagggggcuugggggca

SEQ ID NO: 906613 - RNA, 21 nt, Human
ugagcacugggcaccaggcug

SEQ ID NO: 906614 - RNA, 19 nt, Human
ugcccggacgugcuccaag

SEQ ID NO: 906615 - RNA, 18 nt, Human
ugccugagauuggggggc

SEQ ID NO: 906616 - RNA, 20 nt, Human
uggaggcugcgggucccacc

SEQ ID NO: 906617 - RNA, 21 nt, Human
uggcaaaugagggucuccugc

SEQ ID NO: 906618 - RNA, 19 nt, Human
uggccccuguaccugcccu

SEQ ID NO: 906619 - RNA, 18 nt, Human
ugggggccggggucucgg

SEQ ID NO: 906620 - RNA, 22 nt, Human
uguccaaagccaacgugugaga

SEQ ID NO: 906621 - RNA, 19 nt, Human
uguccccgggguucccccu

SEQ ID NO: 906622 - RNA, 21 nt, Human
uguccugucucucuccuacca

SEQ ID NO: 906623 - RNA, 22 nt, Human
ugucucgggaaaagcgggucug

SEQ ID NO: 906624 - RNA, 18 nt, Human
uguggggugggggccggg

SEQ ID NO: 906625 - RNA, 19 nt, Human
uguggguggagggugggca

SEQ ID NO: 906626 - RNA, 25 nt, Human
uuccacggcugacgcccaggucacc

SEQ ID NO: 906627 - RNA, 19 nt, Human
uuccagcgaaagaaaacuc

SEQ ID NO: 906628 - RNA, 24 nt, Human
uuguccacugguugggcccacaca

SEQ ID NO: 906629 - RNA, 20 nt, Human
aaggagaagaaagaagugga

SEQ ID NO: 906630 - RNA, 21 nt, Human
aguacaggcugcccagaagaa

SEQ ID NO: 906631 - RNA, 21 nt, Human
caggcaggggaaagaggaaag

SEQ ID NO: 906632 - RNA, 22 nt, Human
ccagaagaaaggagaagaaaga

SEQ ID NO: 906633 - RNA, 20 nt, Human
gagaguacaggcugcccaga

SEQ ID NO: 906634 - RNA, 24 nt, Human
ggggaaagaggaaagaaaaaacac

SEQ ID NO: 906635 - RNA, 20 nt, Human
aagcaaguccaaagcuacca

SEQ ID NO: 906636 - RNA, 18 nt, Human
acagaagagaagcaggga

SEQ ID NO: 906637 - RNA, 21 nt, Human
agaagcagggagaaauccgcu

SEQ ID NO: 906638 - RNA, 23 nt, Human
agaugaaugugcggguuaugauc

SEQ ID NO: 906639 - RNA, 21 nt, Human
auaaaaaaugcugguuuuccc

SEQ ID NO: 906640 - RNA, 19 nt, Human
cagacagacacauguaaug

SEQ ID NO: 906641 - RNA, 18 nt, Human
cagaccccgaaucugggg

SEQ ID NO: 906642 - RNA, 21 nt, Human
caggaggauguacuuuuauua

SEQ ID NO: 906643 - RNA, 18 nt, Human
ccugggggagaggagcgg

SEQ ID NO: 906644 - RNA, 21 nt, Human
cuccugggggagaggagcggg

SEQ ID NO: 906645 - RNA, 20 nt, Human
cugaggcugcuggcaugagu

SEQ ID NO: 906646 - RNA, 18 nt, Human
cuguaaugauaauuuuuu

SEQ ID NO: 906647 - RNA, 21 nt, Human
cuuaguuucuucuucaaagga

SEQ ID NO: 906648 - RNA, 18 nt, Human
gaaauucccgacuuguca

SEQ ID NO: 906649 - RNA, 19 nt, Human
gaauuuuucacaaauaaug

SEQ ID NO: 906650 - RNA, 23 nt, Human
gagggugugcuggggaggcagac

SEQ ID NO: 906651 - RNA, 22 nt, Human
gaucauuggcgggaugcaccuu

SEQ ID NO: 906652 - RNA, 23 nt, Human
ggagcgucuccgagcagaugcac

SEQ ID NO: 906653 - RNA, 20 nt, Human
ggagucucuaccaaaccaac

SEQ ID NO: 906654 - RNA, 24 nt, Human
gggagaggagcgggggugacagaa

SEQ ID NO: 906655 - RNA, 26 nt, Human
ggugacagaagagaagcagggagaaa

SEQ ID NO: 906656 - RNA, 18 nt, Human
gucaaguaacuggaaaag

SEQ ID NO: 906657 - RNA, 21 nt, Human
gugacagaagagaagcaggga

SEQ ID NO: 906658 - RNA, 22 nt, Human
gugaugaagggcaaugcuuucc

SEQ ID NO: 906659 - RNA, 24 nt, Human
uaccauaaaucaaggagccuccug

SEQ ID NO: 906660 - RNA, 19 nt, Human
ucaggccagacagacacau

SEQ ID NO: 906661 - RNA, 24 nt, Human
uccaaagcuaccauaaaucaagga

SEQ ID NO: 906662 - RNA, 19 nt, Human
ucuaccaaaccaacugaag

SEQ ID NO: 906663 - RNA, 23 nt, Human
ucugugaugaagggcaaugcuuu

SEQ ID NO: 906664 - RNA, 22 nt, Human
ugaagugauaguuagcaggagg

SEQ ID NO: 906665 - RNA, 19 nt, Human
ugaaucgugucaaguaacu

SEQ ID NO: 906666 - RNA, 20 nt, Human
ugaguugacugacaaguuug

SEQ ID NO: 906667 - RNA, 21 nt, Human
ugauaguuagcaggaggaugu

SEQ ID NO: 906668 - RNA, 18 nt, Human
uggcgggaugcaccuuuu

SEQ ID NO: 906669 - RNA, 19 nt, Human
ugggggagaggagcggggg

SEQ ID NO: 906670 - RNA, 19 nt, Human
ugucagaguugaauacuuc

SEQ ID NO: 906671 - RNA, 21 nt, Human
ugucagaguugaauacuucug

SEQ ID NO: 906672 - RNA, 23 nt, Human
aaaauacccacauguaccucuua

SEQ ID NO: 906673 - RNA, 26 nt, Human
augaaacucaaagauacuugaaaaac

SEQ ID NO: 906674 - RNA, 20 nt, Human
caaaauacccacauguaccu

SEQ ID NO: 906675 - RNA, 21 nt, Human
caaaauacccacauguaccuc

SEQ ID NO: 906676 - RNA, 25 nt, Human
caaauauuaauaugucauccaugcu

SEQ ID NO: 906677 - RNA, 24 nt, Human
cacacaaacaccaaacauuguagu

SEQ ID NO: 906678 - RNA, 18 nt, Human
cagccgccgccuccggaa

SEQ ID NO: 906679 - RNA, 18 nt, Human
ccgcagccgccgccuccg

SEQ ID NO: 906680 - RNA, 24 nt, Human
ccgcagccgccgccuccggaauuc

SEQ ID NO: 906681 - RNA, 21 nt, Human
gugcacacaccaggcagauaa

SEQ ID NO: 906682 - RNA, 23 nt, Human
uaaaacaucuuugcugaaauucu

SEQ ID NO: 906683 - RNA, 24 nt, Human
uaaaacaucuuugcugaaauucuc

SEQ ID NO: 906684 - RNA, 23 nt, Human
uaauaugucauccaugcuugccc

SEQ ID NO: 906685 - RNA, 24 nt, Human
uaauuuccacacaaacaccaaaca

SEQ ID NO: 906686 - RNA, 21 nt, Human
uacccacauguaccucuuagc

SEQ ID NO: 906687 - RNA, 19 nt, Human
uauauauauuuaaaacauc

SEQ ID NO: 906688 - RNA, 20 nt, Human
uauauauauuuaaaacaucu

SEQ ID NO: 906689 - RNA, 25 nt, Human
uccaaaauacccacauguacccugu

SEQ ID NO: 906690 - RNA, 18 nt, Human
uccacacaaacaccaaac

SEQ ID NO: 906691 - RNA, 21 nt, Human
uccacaccauuccugaucaca

SEQ ID NO: 906692 - RNA, 21 nt, Human
uccacgggaguuccgcagccg

SEQ ID NO: 906693 - RNA, 25 nt, Human
ucuucaaguaacaaguucucaaucc

SEQ ID NO: 906694 - RNA, 22 nt, Human
uggccaugaaacucaaagauac

SEQ ID NO: 906695 - RNA, 22 nt, Human
ugugugcacacaccaggcagug

SEQ ID NO: 906696 - RNA, 23 nt, Human
uucaaguaacaaguucucaaucc

SEQ ID NO: 906697 - RNA, 21 nt, Human
uuccacacaaacaccaaacau

SEQ ID NO: 906698 - RNA, 21 nt, Human
uuuccacacaaacaccaaaca

SEQ ID NO: 906699 - RNA, 26 nt, Human
uuuccacacaaacaccaaacauugua

SEQ ID NO: 906700 - RNA, 23 nt, Human
uuugcugaaauucucuuauccca

SEQ ID NO: 906701 - RNA, 21 nt, Human
aaaaaaauacaguauacagaa

SEQ ID NO: 906702 - RNA, 24 nt, Human
aaaacagaaaaacaagacaaaaaa

SEQ ID NO: 906703 - RNA, 18 nt, Human
aaacagaaaaacaagaca

SEQ ID NO: 906704 - RNA, 23 nt, Human
aaacagaaaaacaagacaaaaaa

SEQ ID NO: 906705 - RNA, 25 nt, Human
aaacaggcuuuauuucaaccagaca

SEQ ID NO: 906706 - RNA, 21 nt, Human
aaacaucaaacaacuuuucaa

SEQ ID NO: 906707 - RNA, 19 nt, Human
aaaccagcuguaaacucga

SEQ ID NO: 906708 - RNA, 24 nt, Human
aaaccuuuaacauuauuaaagaug

SEQ ID NO: 906709 - RNA, 24 nt, Human
aacaagacaaaaaaggguacaaaa

SEQ ID NO: 906710 - RNA, 21 nt, Human
aaccaacagcaaaucaugaaa

SEQ ID NO: 906711 - RNA, 23 nt, Human
aaccuagcauaaaauaaauccaa

SEQ ID NO: 906712 - RNA, 20 nt, Human
aagaaagguuacagguaggg

SEQ ID NO: 906713 - RNA, 19 nt, Human
aaguaaccaguugaaugag

SEQ ID NO: 906714 - RNA, 22 nt, Human
acaaagaaguaaccaguugaau

SEQ ID NO: 906715 - RNA, 25 nt, Human
acccuaaaucuccugauaugaacaa

SEQ ID NO: 906716 - RNA, 18 nt, Human
agaaacagagggaaugac

SEQ ID NO: 906717 - RNA, 19 nt, Human
agaagacaacuaaaacaga

SEQ ID NO: 906718 - RNA, 22 nt, Human
agacaaaaaaggguacaaaaca

SEQ ID NO: 906719 - RNA, 23 nt, Human
agauuugcugccauucauauucu

SEQ ID NO: 906720 - RNA, 24 nt, Human
agcauaaaauaaauccaaugaaac

SEQ ID NO: 906721 - RNA, 18 nt, Human
aguaaaagaucaucugga

SEQ ID NO: 906722 - RNA, 21 nt, Human
auccaaugaaacacuacauuu

SEQ ID NO: 906723 - RNA, 19 nt, Human
caaaacaaauaacaaaagu

SEQ ID NO: 906724 - RNA, 24 nt, Human
caagaaaaaccagcuguaaacucg

SEQ ID NO: 906725 - RNA, 19 nt, Human
cacuuuacaaacuaccauu

SEQ ID NO: 906726 - RNA, 20 nt, Human
cagaaaaacaagacaaaaaa

SEQ ID NO: 906727 - RNA, 23 nt, Human
cagcaccuucauugauaugaaca

SEQ ID NO: 906728 - RNA, 18 nt, Human
cagcagguucaucugcca

SEQ ID NO: 906729 - RNA, 21 nt, Human
cccuuucaacaauaagcucaa

SEQ ID NO: 906730 - RNA, 24 nt, Human
cggugcucagaaggcagagaaagg

SEQ ID NO: 906731 - RNA, 23 nt, Human
cuagcauaaaauaaauccaauga

SEQ ID NO: 906732 - RNA, 19 nt, Human
cucgaccuacaaauuuaca

SEQ ID NO: 906733 - RNA, 19 nt, Human
gaauucuucaauuaacauc

SEQ ID NO: 906734 - RNA, 24 nt, Human
gauguguuguuacaaaguuccuag

SEQ ID NO: 906735 - RNA, 21 nt, Human
guguuguuacaaaguuccuag

SEQ ID NO: 906736 - RNA, 21 nt, Human
uaaaaaugaaaaaaccuuuaa

SEQ ID NO: 906737 - RNA, 19 nt, Human
uaaaacagaaaaacaagac

SEQ ID NO: 906738 - RNA, 20 nt, Human
uaaaaucuccuagaguaauu

SEQ ID NO: 906739 - RNA, 21 nt, Human
uaaagacacccacaaagaagu

SEQ ID NO: 906740 - RNA, 23 nt, Human
uagauauauacauguacaaaaca

SEQ ID NO: 906741 - RNA, 25 nt, Human
uagcauaaaauaaauccaaugaaac

SEQ ID NO: 906742 - RNA, 19 nt, Human
uagguuuggccacgcugca

SEQ ID NO: 906743 - RNA, 25 nt, Human
uauacagaaaaaaaaccuuuuauau

SEQ ID NO: 906744 - RNA, 23 nt, Human
uauauacauguacaaaacaaaua

SEQ ID NO: 906745 - RNA, 25 nt, Human
ucaacaauaagcucaauacacaaga

SEQ ID NO: 906746 - RNA, 22 nt, Human
ucaguaaaccccagaagaaaaa

SEQ ID NO: 906747 - RNA, 23 nt, Human
ucccaauauuuguacaugacccu

SEQ ID NO: 906748 - RNA, 24 nt, Human
uccugauaugaacaauuaaucuac

SEQ ID NO: 906749 - RNA, 23 nt, Human
ucuucacgggcauuuucaagagc

SEQ ID NO: 906750 - RNA, 24 nt, Human
ugaaaccaacagcaaaucaugaaa

SEQ ID NO: 906751 - RNA, 23 nt, Human
ugaacaauuaugucaaagaaagg

SEQ ID NO: 906752 - RNA, 18 nt, Human
ugauaugaacaauuaugu

SEQ ID NO: 906753 - RNA, 18 nt, Human
ugggaggcuuuucccaau

SEQ ID NO: 906754 - RNA, 25 nt, Human
uguucuguccuucaaaaaucccuuu

SEQ ID NO: 906755 - RNA, 27 nt, Human
uguucuguccuucaaaaaucccuuuca

SEQ ID NO: 906756 - RNA, 25 nt, Human
uuaaucuacugggaggcuuuuccca

SEQ ID NO: 906757 - RNA, 22 nt, Human
uuagaaacugagauugaaguac

SEQ ID NO: 906758 - RNA, 23 nt, Human
uuaguucucuguccuuuugggag

SEQ ID NO: 906759 - RNA, 26 nt, Human
uucagaagacaacuaaaacagaaaaa

SEQ ID NO: 906760 - RNA, 22 nt, Human
uugaaaccaacagcaaaucaug

SEQ ID NO: 906761 - RNA, 21 nt, Human
uugcacaaagauuugcugcca

SEQ ID NO: 906762 - RNA, 19 nt, Human
aaccagcugugaaaccaac

SEQ ID NO: 906763 - RNA, 21 nt, Human
agcuccgcuuccugcgguucc

SEQ ID NO: 906764 - RNA, 26 nt, Human
cacgcgcggaacaaagcgcuucccuc

SEQ ID NO: 906765 - RNA, 18 nt, Human
ccaggcgcgggaaccacg

SEQ ID NO: 906766 - RNA, 21 nt, Human
cccgugcaaguccccgggccg

SEQ ID NO: 906767 - RNA, 23 nt, Human
cccgugcaaguccccgggccgcg

SEQ ID NO: 906768 - RNA, 24 nt, Human
cgcgcacccccaggcgcgggaacc

SEQ ID NO: 906769 - RNA, 21 nt, Human
cgcuucccucuggcccugccc

SEQ ID NO: 906770 - RNA, 19 nt, Human
cggggcgggaacccgagag

SEQ ID NO: 906771 - RNA, 23 nt, Human
cgucgggaaagcugcgcggcgcc

SEQ ID NO: 906772 - RNA, 18 nt, Human
gaacaaagcgcuucccuc

SEQ ID NO: 906773 - RNA, 18 nt, Human
gcacccccaggcgcggga

SEQ ID NO: 906774 - RNA, 19 nt, Human
gccugcucccgcaucccgc

SEQ ID NO: 906775 - RNA, 21 nt, Human
gcggaacaaagcgcuucccuc

SEQ ID NO: 906776 - RNA, 24 nt, Human
gcggcgcgccaggcucgaccagga

SEQ ID NO: 906777 - RNA, 18 nt, Human
gcggggcggggcggggcg

SEQ ID NO: 906778 - RNA, 27 nt, Human
uauugcaaaccagcugugaaaccaaca

SEQ ID NO: 906779 - RNA, 19 nt, Human
ucgcgcucgcugccuccgc

SEQ ID NO: 906780 - RNA, 24 nt, Human
ucggugccucaggcucccagcgac

SEQ ID NO: 906781 - RNA, 23 nt, Human
ugaaaccaacaggggugcuuuag

SEQ ID NO: 906782 - RNA, 20 nt, Human
ugccucaggcucccagcgac

SEQ ID NO: 906783 - RNA, 24 nt, Human
ugccuccgccgccggcggggcggg

SEQ ID NO: 906784 - RNA, 21 nt, Human
ugcgguuccaccccgcacgcc

SEQ ID NO: 906785 - RNA, 19 nt, Human
caccgggaggcuggccagg

SEQ ID NO: 906786 - RNA, 22 nt, Human
caccugaugcaggagcauggga

SEQ ID NO: 906787 - RNA, 23 nt, Human
ccccaccccagccagugccuggc

SEQ ID NO: 906788 - RNA, 22 nt, Human
cggugccaucccucaaaacucc

SEQ ID NO: 906789 - RNA, 21 nt, Human
cucucggcggccuggacggug

SEQ ID NO: 906790 - RNA, 19 nt, Human
ggaagcgggcuucagccuu

SEQ ID NO: 906791 - RNA, 21 nt, Human
ggcugguguccaccgggaggc

SEQ ID NO: 906792 - RNA, 22 nt, Human
uccacugggccaccuuucccca

SEQ ID NO: 906793 - RNA, 30 nt, Human
uccccugucgagcacgugggggcgaaggcu

SEQ ID NO: 906794 - RNA, 22 nt, Human
ugggaagcgggcuucagccuuc

SEQ ID NO: 906795 - RNA, 23 nt, Human
ugggaagcgggcuucagccuucc

SEQ ID NO: 906796 - RNA, 20 nt, Human
ugguguccaccgggaggcug

SEQ ID NO: 906797 - RNA, 19 nt, Human
aaucuucuuuccuugcagc

SEQ ID NO: 906798 - RNA, 18 nt, Human
agaaucuucuuuccuugc

SEQ ID NO: 906799 - RNA, 21 nt, Human
caugucuuaugaggaaggaga

SEQ ID NO: 906800 - RNA, 20 nt, Human
gcaguuuuaaaauguguaau

SEQ ID NO: 906801 - RNA, 24 nt, Human
ggaaggagagagacuuuccacaag

SEQ ID NO: 906802 - RNA, 19 nt, Human
uauguguauuagugugcau

SEQ ID NO: 906803 - RNA, 20 nt, Human
ugacucuucggcuccagcuu

SEQ ID NO: 906804 - RNA, 22 nt, Human
ugaggaaggagagagacuuucc

SEQ ID NO: 906805 - RNA, 23 nt, Human
ugccagauugccucacuugcucu

SEQ ID NO: 906806 - RNA, 21 nt, Human
uguguauguguauuagugugc

SEQ ID NO: 906807 - RNA, 19 nt, Human
uguguauuagugugcaugu

SEQ ID NO: 906808 - RNA, 22 nt, Human
uuaaucuuuugccagauugccu

SEQ ID NO: 906809 - RNA, 20 nt, Human
uuaugucuucucacuuuuag

SEQ ID NO: 906810 - RNA, 21 nt, Human
uucacauuuauuuccaugucu

SEQ ID NO: 906811 - RNA, 24 nt, Human
uucacauuuauuuccaugucuugg

SEQ ID NO: 906812 - RNA, 21 nt, Human
uugccagauugccucacuugc

SEQ ID NO: 906813 - RNA, 21 nt, Human
ccccagaggugcucccacgcc

SEQ ID NO: 906814 - RNA, 19 nt, Human
gaagauacucaagagcggg

SEQ ID NO: 906815 - RNA, 28 nt, Human
gggcaugggacggggcgcagaguccggg

SEQ ID NO: 906816 - RNA, 24 nt, Human
uuuaauaggguggggaagauacuc

SEQ ID NO: 906817 - RNA, 22 nt, Human
uuuuuuuuuuuuuugcaccgga

SEQ ID NO: 906818 - RNA, 22 nt, Human
uuuuuuuuuuuuuuugcaccgg

SEQ ID NO: 906819 - RNA, 20 nt, Human
aggcggaagggcagggcuuc

SEQ ID NO: 906820 - RNA, 21 nt, Human
aggcggaagggcagggcuucu

SEQ ID NO: 906821 - RNA, 19 nt, Human
ccccaccaccgcgaccuuc

SEQ ID NO: 906822 - RNA, 21 nt, Human
cccgccagggcacguccccca

SEQ ID NO: 906823 - RNA, 21 nt, Human
ccgccgcccgggucaugaucc

SEQ ID NO: 906824 - RNA, 26 nt, Human
ccgccgcccgggucaugauccgcuga

SEQ ID NO: 906825 - RNA, 24 nt, Human
ccuucgcggccgccgcccggguca

SEQ ID NO: 906826 - RNA, 19 nt, Human
ucagcgcccgccccgccag

SEQ ID NO: 906827 - RNA, 20 nt, Human
ucccccaccaccgcgacccu

SEQ ID NO: 906828 - RNA, 24 nt, Human
aaaaaagaaaaacacaaaaaacaa

SEQ ID NO: 906829 - RNA, 23 nt, Human
aaaaaagcagcguaaaaaaagac

SEQ ID NO: 906830 - RNA, 22 nt, Human
aaaaacacaaaaaacaaaacag

SEQ ID NO: 906831 - RNA, 23 nt, Human
aaaaagaaaaacacaaaaaacaa

SEQ ID NO: 906832 - RNA, 24 nt, Human
aaaaagaaaaacacaaaaaacaaa

SEQ ID NO: 906833 - RNA, 27 nt, Human
aaaaagcagcguaaaaaaagacaacuc

SEQ ID NO: 906834 - RNA, 23 nt, Human
aaaagaaaaacacaaaaaacaaa

SEQ ID NO: 906835 - RNA, 21 nt, Human
aaacaaaaaaggaguucagga

SEQ ID NO: 906836 - RNA, 23 nt, Human
aaacccccaaaugcaaagcugua

SEQ ID NO: 906837 - RNA, 21 nt, Human
aaaccggcucuauuuaugaca

SEQ ID NO: 906838 - RNA, 23 nt, Human
aaagaugcauuucaaaggccucc

SEQ ID NO: 906839 - RNA, 18 nt, Human
aaagggcuugcaagagaa

SEQ ID NO: 906840 - RNA, 19 nt, Human
aaccgaguagugaaaacac

SEQ ID NO: 906841 - RNA, 27 nt, Human
aaccgaguagugaaaacaccacaaaaa

SEQ ID NO: 906842 - RNA, 26 nt, Human
aagaaaaacacaaaaaacaaaacaaa

SEQ ID NO: 906843 - RNA, 27 nt, Human
aagaaaaacacaaaaaacaaaacaaaa

SEQ ID NO: 906844 - RNA, 22 nt, Human
aagaauggcaugaaauaggaua

SEQ ID NO: 906845 - RNA, 19 nt, Human
aagcauugaaaguuaaggc

SEQ ID NO: 906846 - RNA, 18 nt, Human
aagguuauuagacugaag

SEQ ID NO: 906847 - RNA, 19 nt, Human
aaugaggaaagcagaaaag

SEQ ID NO: 906848 - RNA, 23 nt, Human
acaaaaaaagaaaaacacaaaaa

SEQ ID NO: 906849 - RNA, 18 nt, Human
acaaaaaacaaaacaaaa

SEQ ID NO: 906850 - RNA, 21 nt, Human
acaacauaagacaaaaaaaga

SEQ ID NO: 906851 - RNA, 24 nt, Human
acauacgacuucauuuacaaaaca

SEQ ID NO: 906852 - RNA, 23 nt, Human
accgaguagugaaaacaccacaa

SEQ ID NO: 906853 - RNA, 27 nt, Human
agaacagacaguacaucuacacaaaug

SEQ ID NO: 906854 - RNA, 26 nt, Human
agacaaaaaaagaaaaacacaaaaaa

SEQ ID NO: 906855 - RNA, 19 nt, Human
agcaaucagugagagaaug

SEQ ID NO: 906856 - RNA, 26 nt, Human
aggcauccaaccgaguagugaaaaca

SEQ ID NO: 906857 - RNA, 24 nt, Human
aguaaaacccccaaaugcaaagcu

SEQ ID NO: 906858 - RNA, 27 nt, Human
auaagacaaaaaaagaaaaacacaaaa

SEQ ID NO: 906859 - RNA, 25 nt, Human
auaauacacgaggugucuuccccac

SEQ ID NO: 906860 - RNA, 18 nt, Human
aucuggaaaaaaauaauu

SEQ ID NO: 906861 - RNA, 18 nt, Human
auggcgccgcuucccagc

SEQ ID NO: 906862 - RNA, 19 nt, Human
caaaaaacaaaacaaaaaa

SEQ ID NO: 906863 - RNA, 19 nt, Human
caaaaauacucugaaaaua

SEQ ID NO: 906864 - RNA, 24 nt, Human
cacaaaaaacaaaacaaaaaagga

SEQ ID NO: 906865 - RNA, 22 nt, Human
caccucaaaaauacaagugugc

SEQ ID NO: 906866 - RNA, 19 nt, Human
caugaaauaggauauguaa

SEQ ID NO: 906867 - RNA, 20 nt, Human
cauucaaaaugccuuuaggu

SEQ ID NO: 906868 - RNA, 21 nt, Human
ccgaguagugaaaacaccaca

SEQ ID NO: 906869 - RNA, 21 nt, Human
ccucagagaaguguauguagc

SEQ ID NO: 906870 - RNA, 21 nt, Human
cggccgacgccaauauggcgc

SEQ ID NO: 906871 - RNA, 20 nt, Human
cuacuggaccuacuaaaugc

SEQ ID NO: 906872 - RNA, 18 nt, Human
cuccaugggaggcaaaau

SEQ ID NO: 906873 - RNA, 19 nt, Human
cuggaccuacuaaaugcug

SEQ ID NO: 906874 - RNA, 21 nt, Human
cuuccugcgucucccucucca

SEQ ID NO: 906875 - RNA, 19 nt, Human
cuugcucgcucacuuuccc

SEQ ID NO: 906876 - RNA, 22 nt, Human
cuuguucacuuaagugaggagg

SEQ ID NO: 906877 - RNA, 19 nt, Human
gacugcuauuucuccacuu

SEQ ID NO: 906878 - RNA, 25 nt, Human
gcaaugaacaggagugggaccugga

SEQ ID NO: 906879 - RNA, 23 nt, Human
gcggccgacgccaauauggcgcc

SEQ ID NO: 906880 - RNA, 18 nt, Human
gcucuggaguccuguucu

SEQ ID NO: 906881 - RNA, 22 nt, Human
ggacugcuauuucuccacuugc

SEQ ID NO: 906882 - RNA, 20 nt, Human
gggaccuggaggauacggcu

SEQ ID NO: 906883 - RNA, 22 nt, Human
gguaaagggcuugcaagagaaa

SEQ ID NO: 906884 - RNA, 19 nt, Human
guauuaacauuuggaaaau

SEQ ID NO: 906885 - RNA, 19 nt, Human
guggcuucaaugcuaaagu

SEQ ID NO: 906886 - RNA, 24 nt, Human
guugcuccucaguaaaaaauacca

SEQ ID NO: 906887 - RNA, 22 nt, Human
uaaaacccccaaaugcaaagcu

SEQ ID NO: 906888 - RNA, 25 nt, Human
uaaaacccccaaaugcaaagcugua

SEQ ID NO: 906889 - RNA, 23 nt, Human
uacaaagguccugagccaauuaa

SEQ ID NO: 906890 - RNA, 24 nt, Human
uacaacauaagacaaaaaaagaaa

SEQ ID NO: 906891 - RNA, 22 nt, Human
uacacgaggugucuuccccaca

SEQ ID NO: 906892 - RNA, 20 nt, Human
uacagcaucuacaggucaaa

SEQ ID NO: 906893 - RNA, 25 nt, Human
uauacaaugauuacaacauaagaca

SEQ ID NO: 906894 - RNA, 23 nt, Human
uauuuugauuuuuaauaaagaug

SEQ ID NO: 906895 - RNA, 20 nt, Human
ucaguauccugguuauauuu

SEQ ID NO: 906896 - RNA, 21 nt, Human
ucccccuguucacuuuccucc

SEQ ID NO: 906897 - RNA, 22 nt, Human
uccucagagaaguguauguagc

SEQ ID NO: 906898 - RNA, 20 nt, Human
ucgcucuggaguccuguucu

SEQ ID NO: 906899 - RNA, 23 nt, Human
ucuccagcgaguguuuaucgcuc

SEQ ID NO: 906900 - RNA, 24 nt, Human
ugaaaacaccacaaaaccggcucu

SEQ ID NO: 906901 - RNA, 25 nt, Human
ugaaaacaccacaaaacuggagacc

SEQ ID NO: 906902 - RNA, 19 nt, Human
ugacaguucaaaaaccacu

SEQ ID NO: 906903 - RNA, 18 nt, Human
ugaggaaagcagaaaaga

SEQ ID NO: 906904 - RNA, 20 nt, Human
ugcauucaugaaacuuaaaa

SEQ ID NO: 906905 - RNA, 21 nt, Human
ugcauucaugaaacuuaaaaa

SEQ ID NO: 906906 - RNA, 18 nt, Human
ugcugcuauauaaaaagg

SEQ ID NO: 906907 - RNA, 19 nt, Human
uggcuaagaacugguuccc

SEQ ID NO: 906908 - RNA, 24 nt, Human
uggcugcaucuaugccacuaaaug

SEQ ID NO: 906909 - RNA, 25 nt, Human
ugggaccuggaggauacggcucucu

SEQ ID NO: 906910 - RNA, 21 nt, Human
ugguaacuaugcaacauuugg

SEQ ID NO: 906911 - RNA, 20 nt, Human
ugugccaaucuggaaaaaaa

SEQ ID NO: 906912 - RNA, 27 nt, Human
uuacaacauaagacaaaaaaagaaaaa

SEQ ID NO: 906913 - RNA, 22 nt, Human
uucaaaaugccuuuagguuuca

SEQ ID NO: 906914 - RNA, 24 nt, Human
uucaagcauaauccauauuuaaaa

SEQ ID NO: 906915 - RNA, 21 nt, Human
uuccaugguacaagguaaaca

SEQ ID NO: 906916 - RNA, 21 nt, Human
uucccauaacaagcauugaaa

SEQ ID NO: 906917 - RNA, 20 nt, Human
uuccugcgucucccucucca

SEQ ID NO: 906918 - RNA, 18 nt, Human
uuccuggcuguguaaucu

SEQ ID NO: 906919 - RNA, 19 nt, Human
uugaaaaaagcagcguaaa

SEQ ID NO: 906920 - RNA, 20 nt, Human
uugcuuguucacuuaaguga

SEQ ID NO: 906921 - RNA, 24 nt, Human
uuuuuguuuguuuucaauuuuuuu

SEQ ID NO: 906922 - RNA, 25 nt, Human
aaaaauagaaaagguaaucaaagag

SEQ ID NO: 906923 - RNA, 26 nt, Human
aacuagacacauggucaaacaaagcc

SEQ ID NO: 906924 - RNA, 22 nt, Human
aauuguacagaagaggacacaa

SEQ ID NO: 906925 - RNA, 21 nt, Human
acagaagaggacacaaucuga

SEQ ID NO: 906926 - RNA, 25 nt, Human
acagaagaggacacaaucugauaua

SEQ ID NO: 906927 - RNA, 23 nt, Human
agaaagaaacucuggagccaaag

SEQ ID NO: 906928 - RNA, 24 nt, Human
agaaagaaacucuggagccaaagg

SEQ ID NO: 906929 - RNA, 20 nt, Human
agagcacuucagaaagaaac

SEQ ID NO: 906930 - RNA, 24 nt, Human
agagcuaauuuuauuaugaaaugu

SEQ ID NO: 906931 - RNA, 23 nt, Human
agggacggcggcggcggcggcgg

SEQ ID NO: 906932 - RNA, 21 nt, Human
aguagaaaauacauagagcua

SEQ ID NO: 906933 - RNA, 19 nt, Human
auaaaaauagaaaagguaa

SEQ ID NO: 906934 - RNA, 22 nt, Human
auagacacaacuuuuacuucau

SEQ ID NO: 906935 - RNA, 19 nt, Human
aucugggaccugccugcuc

SEQ ID NO: 906936 - RNA, 28 nt, Human
auguguguguguauauauauauaaugua

SEQ ID NO: 906937 - RNA, 21 nt, Human
cacuucagaaagaaacucugg

SEQ ID NO: 906938 - RNA, 22 nt, Human
cacuucagaaagaaacucugga

SEQ ID NO: 906939 - RNA, 22 nt, Human
cagaagaggacacaaucugaua

SEQ ID NO: 906940 - RNA, 23 nt, Human
cagcagcagcagcagcagcagca

SEQ ID NO: 906941 - RNA, 23 nt, Human
cagcagcagcagcagcagcagcg

SEQ ID NO: 906942 - RNA, 24 nt, Human
cagcagcagcagcagcagcagcgg

SEQ ID NO: 906943 - RNA, 25 nt, Human
cagcagcagcagcagcagcggcugc

SEQ ID NO: 906944 - RNA, 27 nt, Human
cauuuuguuucuccagucaggucuuca

SEQ ID NO: 906945 - RNA, 30 nt, Human
cgcagggacggcggcggcggcggcggcaac

SEQ ID NO: 906946 - RNA, 23 nt, Human
cggcggcagcagcagcagcagca

SEQ ID NO: 906947 - RNA, 23 nt, Human
cggcggcggcggcggcggcagca

SEQ ID NO: 906948 - RNA, 20 nt, Human
gcagcagcagcagcggcugc

SEQ ID NO: 906949 - RNA, 18 nt, Human
gcaguagaaaauacauag

SEQ ID NO: 906950 - RNA, 20 nt, Human
gcccgggucccgggagcaga

SEQ ID NO: 906951 - RNA, 20 nt, Human
gcggcggcggcggcggcagc

SEQ ID NO: 906952 - RNA, 21 nt, Human
ggcagcagcagcagcagcagc

SEQ ID NO: 906953 - RNA, 21 nt, Human
gggagcagagaccgaaggacg

SEQ ID NO: 906954 - RNA, 27 nt, Human
gguaaucaaagagcacuucagaaagaa

SEQ ID NO: 906955 - RNA, 24 nt, Human
uaauacaaagcaucuaaucauaaa

SEQ ID NO: 906956 - RNA, 19 nt, Human
uaucaggaagaaucuugau

SEQ ID NO: 906957 - RNA, 24 nt, Human
uauguauauguguguguguauaua

SEQ ID NO: 906958 - RNA, 22 nt, Human
uauguguguguguauauauaua

SEQ ID NO: 906959 - RNA, 20 nt, Human
ucugggaccugccugcucag

SEQ ID NO: 906960 - RNA, 19 nt, Human
ugcuuuuaccugcuaagau

SEQ ID NO: 906961 - RNA, 19 nt, Human
uguauguauaugugugugu

SEQ ID NO: 906962 - RNA, 19 nt, Human
uguauguauaugugugugu

SEQ ID NO: 906963 - RNA, 22 nt, Human
uguauguauaugugugugugua

SEQ ID NO: 906964 - RNA, 23 nt, Human
uguauguauauguguguguguau

SEQ ID NO: 906965 - RNA, 18 nt, Human
uguguguguauauauaua

SEQ ID NO: 906966 - RNA, 23 nt, Human
uguguguguguauauauauauau

SEQ ID NO: 906967 - RNA, 19 nt, Human
uuuuuugucaauuguacag

SEQ ID NO: 906968 - RNA, 20 nt, Human
agccagcuaaaaacccccac

SEQ ID NO: 906969 - RNA, 18 nt, Human
aggcgcaggugcacagcc

SEQ ID NO: 906970 - RNA, 21 nt, Human
cacagcccggccggcccgccc

SEQ ID NO: 906971 - RNA, 21 nt, Human
caguguggaguggcauggggc

SEQ ID NO: 906972 - RNA, 25 nt, Human
cccccacugugaagucccugccaug

SEQ ID NO: 906973 - RNA, 20 nt, Human
cccugccaugucccagcagu

SEQ ID NO: 906974 - RNA, 23 nt, Human
gaaaaccuuuaauguuccccagg

SEQ ID NO: 906975 - RNA, 22 nt, Human
gaagucccugccaugucccagc

SEQ ID NO: 906976 - RNA, 23 nt, Human
gccagcuaaaaacccccacugug

SEQ ID NO: 906977 - RNA, 23 nt, Human
gggacggugccccaggcggcccg

SEQ ID NO: 906978 - RNA, 21 nt, Human
uccccaggcugagggagcccu

SEQ ID NO: 906979 - RNA, 22 nt, Human
uccccaggcugagggagcccug

SEQ ID NO: 906980 - RNA, 19 nt, Human
ugaagucccugccaugucc

SEQ ID NO: 906981 - RNA, 21 nt, Human
ugagccagcuaaaaaccccca

SEQ ID NO: 906982 - RNA, 24 nt, Human
uguagaaaaccuuuaauguucccc

SEQ ID NO: 906983 - RNA, 18 nt, Human
uuuuuuuuuuuuuuuuug

SEQ ID NO: 906984 - RNA, 20 nt, Human
uuuuuuuuuuuuuuuuuugu

SEQ ID NO: 906985 - RNA, 19 nt, Human
aaaaaacccugaaauuuga

SEQ ID NO: 906986 - RNA, 18 nt, Human
aaaaacuucugaaacagg

SEQ ID NO: 906987 - RNA, 21 nt, Human
aaaaacuucugaaacaggcau

SEQ ID NO: 906988 - RNA, 22 nt, Human
aaacaagcacaauaccacaaaa

SEQ ID NO: 906989 - RNA, 21 nt, Human
aaaccaucuaaagccaaauau

SEQ ID NO: 906990 - RNA, 23 nt, Human
aaaccaucuaaagccaaauauaa

SEQ ID NO: 906991 - RNA, 18 nt, Human
aaagccaaggggugaaaa

SEQ ID NO: 906992 - RNA, 21 nt, Human
aaauggaccauuuggugggga

SEQ ID NO: 906993 - RNA, 21 nt, Human
aacaaaaaaacccugaaauuu

SEQ ID NO: 906994 - RNA, 20 nt, Human
aacaacaaaaaaacccugaa

SEQ ID NO: 906995 - RNA, 19 nt, Human
aacaacaacaaaaaaaccc

SEQ ID NO: 906996 - RNA, 22 nt, Human
aacccaugauuuggcaguccua

SEQ ID NO: 906997 - RNA, 22 nt, Human
aauaacacaacaacaacaaaaa

SEQ ID NO: 906998 - RNA, 22 nt, Human
acaaaacaagcacaauaccaca

SEQ ID NO: 906999 - RNA, 23 nt, Human
acaaaacauaugcauaccaacaa

SEQ ID NO: 907000 - RNA, 25 nt, Human
acaaaacauaugcauaccaacaaag

SEQ ID NO: 907001 - RNA, 22 nt, Human
acaacaacaaaaggcaaaaccc

SEQ ID NO: 907002 - RNA, 21 nt, Human
acaacaacaacaaaaaaaccc

SEQ ID NO: 907003 - RNA, 20 nt, Human
acaauaccacaaaauaacac

SEQ ID NO: 907004 - RNA, 22 nt, Human
acacaacaacaacaaaaaaacc

SEQ ID NO: 907005 - RNA, 23 nt, Human
acagaggauaaauacaacaacaa

SEQ ID NO: 907006 - RNA, 21 nt, Human
acagucagaaaaacugaaauc

SEQ ID NO: 907007 - RNA, 19 nt, Human
acccagaaaauaacaggaa

SEQ ID NO: 907008 - RNA, 18 nt, Human
accuacggccgccgccac

SEQ ID NO: 907009 - RNA, 21 nt, Human
agaaauauaauucacacauaa

SEQ ID NO: 907010 - RNA, 21 nt, Human
agaacugcugaaaaacaaaag

SEQ ID NO: 907011 - RNA, 22 nt, Human
agccgcagccgcagccgcagcc

SEQ ID NO: 907012 - RNA, 21 nt, Human
aggcaaaaugauaaaacccag

SEQ ID NO: 907013 - RNA, 21 nt, Human
aggcacuugcauucagaaaca

SEQ ID NO: 907014 - RNA, 21 nt, Human
agggaugcauucaaauggacc

SEQ ID NO: 907015 - RNA, 21 nt, Human
auaaaaugauuccuaagucaa

SEQ ID NO: 907016 - RNA, 22 nt, Human
auaacaguuccacuccaaaaaa

SEQ ID NO: 907017 - RNA, 24 nt, Human
auacaaaaggaaugguuuuaaccc

SEQ ID NO: 907018 - RNA, 21 nt, Human
auacaacaacaaaaggcaaaa

SEQ ID NO: 907019 - RNA, 20 nt, Human
auuucauacaaaaggaaugg

SEQ ID NO: 907020 - RNA, 18 nt, Human
caaaacaagcacaauacc

SEQ ID NO: 907021 - RNA, 24 nt, Human
caaaaggaaugguuuuaacccaga

SEQ ID NO: 907022 - RNA, 23 nt, Human
caacaacaaaaggcaaaacccau

SEQ ID NO: 907023 - RNA, 24 nt, Human
caacugaacuuuaaaaaauacgaa

SEQ ID NO: 907024 - RNA, 21 nt, Human
caaguauaacacagucauaca

SEQ ID NO: 907025 - RNA, 22 nt, Human
cacaaaacaagcacaauaccac

SEQ ID NO: 907026 - RNA, 26 nt, Human
cacaaaacaagcacaauaccacaaaa

SEQ ID NO: 907027 - RNA, 21 nt, Human
cacaacaacaacaaaaaaacc

SEQ ID NO: 907028 - RNA, 23 nt, Human
cacaauaccacaaaauaacacaa

SEQ ID NO: 907029 - RNA, 20 nt, Human
cacacauaaaaacagucuac

SEQ ID NO: 907030 - RNA, 23 nt, Human
ccacaaaauaacacaacaacaac

SEQ ID NO: 907031 - RNA, 22 nt, Human
ccacuccaaaaaauaaaccuga

SEQ ID NO: 907032 - RNA, 19 nt, Human
cccagaaaauaacaggaau

SEQ ID NO: 907033 - RNA, 20 nt, Human
ccccacggccugcggacgcc

SEQ ID NO: 907034 - RNA, 22 nt, Human
ccccacggccugcggacgcccg

SEQ ID NO: 907035 - RNA, 21 nt, Human
cccgccccacaccuacggccg

SEQ ID NO: 907036 - RNA, 21 nt, Human
ccgcagccgcagccgcagcca

SEQ ID NO: 907037 - RNA, 19 nt, Human
ccgccgccaccgccgaggg

SEQ ID NO: 907038 - RNA, 20 nt, Human
ccgccgccaccgccgagggc

SEQ ID NO: 907039 - RNA, 21 nt, Human
ccggccaaaucucagccgcag

SEQ ID NO: 907040 - RNA, 20 nt, Human
cggccugcggacgcccggcc

SEQ ID NO: 907041 - RNA, 21 nt, Human
cuuucaguuguugacaaucuu

SEQ ID NO: 907042 - RNA, 21 nt, Human
gaaauauaauucacacauaaa

SEQ ID NO: 907043 - RNA, 24 nt, Human
gaacaaguacauaaaaugauuccu

SEQ ID NO: 907044 - RNA, 24 nt, Human
ggaaagucaacugaacuuuaaaaa

SEQ ID NO: 907045 - RNA, 20 nt, Human
ggacgcccggccaaaucuca

SEQ ID NO: 907046 - RNA, 20 nt, Human
ggcaaaaugauaaaacccag

SEQ ID NO: 907047 - RNA, 19 nt, Human
ggcauuuuuuggaccauua

SEQ ID NO: 907048 - RNA, 21 nt, Human
ggccaaaucucagccgcagcc

SEQ ID NO: 907049 - RNA, 21 nt, Human
gugaggcacaaaugugacccu

SEQ ID NO: 907050 - RNA, 22 nt, Human
uaaaaugauuccuaagucaaaa

SEQ ID NO: 907051 - RNA, 24 nt, Human
uaaaugaaacagauccgaucaccu

SEQ ID NO: 907052 - RNA, 21 nt, Human
uaaauuuuagcuugauuugga

SEQ ID NO: 907053 - RNA, 22 nt, Human
uaacacaacaacaacaaaaaaa

SEQ ID NO: 907054 - RNA, 26 nt, Human
uaacacaacaacaacaaaaaaacccu

SEQ ID NO: 907055 - RNA, 20 nt, Human
uaacugaauugccaauugaa

SEQ ID NO: 907056 - RNA, 20 nt, Human
uaauuuagaaacagguuuaa

SEQ ID NO: 907057 - RNA, 19 nt, Human
uacaacaacaaaaggcaaa

SEQ ID NO: 907058 - RNA, 20 nt, Human
uacaacaacaaaaggcaaaa

SEQ ID NO: 907059 - RNA, 21 nt, Human
uaccacaaaauaacacaacaa

SEQ ID NO: 907060 - RNA, 22 nt, Human
uaguagaaauauaauucacaca

SEQ ID NO: 907061 - RNA, 24 nt, Human
uauaaauugugugacaaaacauau

SEQ ID NO: 907062 - RNA, 18 nt, Human
uauauauauauauauaua

SEQ ID NO: 907063 - RNA, 19 nt, Human
uauauauauauauauauau

SEQ ID NO: 907064 - RNA, 24 nt, Human
uauauauauauauuaucaaguaua

SEQ ID NO: 907065 - RNA, 19 nt, Human
ucaaauggaccauuuggug

SEQ ID NO: 907066 - RNA, 20 nt, Human
ucaaauggaccauuuggugg

SEQ ID NO: 907067 - RNA, 24 nt, Human
ucaaguauaacacagucauacaaa

SEQ ID NO: 907068 - RNA, 19 nt, Human
ucacaaaacaagcacaaua

SEQ ID NO: 907069 - RNA, 24 nt, Human
ucagaaaaacugaaauccacggcg

SEQ ID NO: 907070 - RNA, 22 nt, Human
uccaucucgcgugccggacgcg

SEQ ID NO: 907071 - RNA, 21 nt, Human
ugcccccaucccccacggccu

SEQ ID NO: 907072 - RNA, 24 nt, Human
uggcaguccuauacaaaaggggcc

SEQ ID NO: 907073 - RNA, 24 nt, Human
uguaacagucagaaaaacugaaau

SEQ ID NO: 907074 - RNA, 21 nt, Human
uguauuaaaaccaucuaaagc

SEQ ID NO: 907075 - RNA, 25 nt, Human
ugucccuuuuauauccuauuuuagg

SEQ ID NO: 907076 - RNA, 22 nt, Human
ugugugacaaaacauaugcaua

SEQ ID NO: 907077 - RNA, 22 nt, Human
uuauauaaaauaaagccaaggg

SEQ ID NO: 907078 - RNA, 22 nt, Human
uucaaaaacuucugaaacaggc

SEQ ID NO: 907079 - RNA, 24 nt, Human
uucacaaaacaagcacaauaccac

SEQ ID NO: 907080 - RNA, 20 nt, Human
uucaguauuaccaacagagg

SEQ ID NO: 907081 - RNA, 29 nt, Human
uucugaaacaggcauuuuuuggaccauua

SEQ ID NO: 907082 - RNA, 23 nt, Human
uuggaccauuuauaaaauacuaa

SEQ ID NO: 907083 - RNA, 19 nt, Human
uuuauauauauauauauau

SEQ ID NO: 907084 - RNA, 21 nt, Human
uuuuauauauauauauauauu

SEQ ID NO: 907085 - RNA, 20 nt, Human
uuuuauauauauauauauuu

SEQ ID NO: 907086 - RNA, 24 nt, Human
uuuuuugucccuuuuauauccuau

SEQ ID NO: 907087 - RNA, 32 nt, Human; identical to SEQ ID NO: 508996

SEQ ID NO: 907088 - RNA, 19 nt, Human
accuuaccaaccccagcug

SEQ ID NO: 907089 - RNA, 22 nt, Human
caaccucugccccaccauggcc

SEQ ID NO: 907090 - RNA, 19 nt, Human
caccauggcccgaccuuac

SEQ ID NO: 907091 - RNA, 21 nt, Human
cauggcccgaccuuaccaacc

SEQ ID NO: 907092 - RNA, 21 nt, Human
cccgaccuuaccaaccccagc

SEQ ID NO: 907093 - RNA, 23 nt, Human
ccuuaccaaccccagcugcgcaa

SEQ ID NO: 907094 - RNA, 24 nt, Human
cgaccuuaccaaccccagcugcgc

SEQ ID NO: 907095 - RNA, 25 nt, Human
ucccaaccucugccccaccauggcc

SEQ ID NO: 907096 - RNA, 18 nt, Human
uucccaaccucugcccca

SEQ ID NO: 907097 - RNA, 26 nt, Human
aaaaagagaccaaaaaagagacaaaa

SEQ ID NO: 907098 - RNA, 24 nt, Human
aaaauccuucccaaaugucacccu

SEQ ID NO: 907099 - RNA, 26 nt, Human
aaaccaaaguacagaguuauuauaaa

SEQ ID NO: 907100 - RNA, 22 nt, Human
aaaccaggcccaggaccuggga

SEQ ID NO: 907101 - RNA, 21 nt, Human
aaagaacauaauguaauuggc

SEQ ID NO: 907102 - RNA, 20 nt, Human
aaagaacucaaucccaaaac

SEQ ID NO: 907103 - RNA, 22 nt, Human
aaagaacucaaucccaaaacac

SEQ ID NO: 907104 - RNA, 19 nt, Human
aaaugaucaauuagaaggc

SEQ ID NO: 907105 - RNA, 21 nt, Human
aacaaccuucccaaccuucau

SEQ ID NO: 907106 - RNA, 24 nt, Human
aacagaaaagaaaagaaaacccag

SEQ ID NO: 907107 - RNA, 27 nt, Human
aagagaccaaaaaagagacagugggca

SEQ ID NO: 907108 - RNA, 23 nt, Human
aagagaccaaaaaagagaccguu

SEQ ID NO: 907109 - RNA, 19 nt, Human
aagaggaaaaaaauuccaa

SEQ ID NO: 907110 - RNA, 21 nt, Human
aagcccuugaguaacccacgc

SEQ ID NO: 907111 - RNA, 21 nt, Human
aaggcaaaaagaaguuccuuu

SEQ ID NO: 907112 - RNA, 20 nt, Human
aauauaagaaaaagagaccu

SEQ ID NO: 907113 - RNA, 20 nt, Human
aaucacuaagcucugaccua

SEQ ID NO: 907114 - RNA, 20 nt, Human
aaugaauucucaaaccagag

SEQ ID NO: 907115 - RNA, 22 nt, Human
aaugcucauuaugcugagugac

SEQ ID NO: 907116 - RNA, 19 nt, Human
acaaaacaguacauugccu

SEQ ID NO: 907117 - RNA, 24 nt, Human
acacaacuuuagaacaugcaaaga

SEQ ID NO: 907118 - RNA, 18 nt, Human
acaugggcccgugcccag

SEQ ID NO: 907119 - RNA, 20 nt, Human
acccugaaaccaaaguacag

SEQ ID NO: 907120 - RNA, 22 nt, Human
accuacgucaaugggaguccug

SEQ ID NO: 907121 - RNA, 18 nt, Human
accuuuagggagaaggga

SEQ ID NO: 907122 - RNA, 24 nt, Human
acuuugggugguguagauacagau

SEQ ID NO: 907123 - RNA, 18 nt, Human
agaaaaccaggcccagga

SEQ ID NO: 907124 - RNA, 20 nt, Human
agaaaagaaaagaaaaccca

SEQ ID NO: 907125 - RNA, 22 nt, Human
agaaauaaaaaggcugaaagga

SEQ ID NO: 907126 - RNA, 21 nt, Human
agagagagggaggcuuagguu

SEQ ID NO: 907127 - RNA, 22 nt, Human
agagugcaaauauuuuccccau

SEQ ID NO: 907128 - RNA, 20 nt, Human
agaucaguggguucucgugu

SEQ ID NO: 907129 - RNA, 21 nt, Human
agcuggcgcugggcggacgca

SEQ ID NO: 907130 - RNA, 22 nt, Human
aggaucuuuauuuucaucuugu

SEQ ID NO: 907131 - RNA, 23 nt, Human
aggguacuugggcuggugucuac

SEQ ID NO: 907132 - RNA, 24 nt, Human
aguaaccacaagcccuugaguaac

SEQ ID NO: 907133 - RNA, 20 nt, Human
aguaagugauaaaaaacaaa

SEQ ID NO: 907134 - RNA, 25 nt, Human
auaagaaaaagagaccaaaaaagag

SEQ ID NO: 907135 - RNA, 26 nt, Human
caaaaggagcacucuuaguaaggaua

SEQ ID NO: 907136 - RNA, 22 nt, Human
caaaauucauaaagcaaagcau

SEQ ID NO: 907137 - RNA, 24 nt, Human
caacacaaaacaguacauugccuu

SEQ ID NO: 907138 - RNA, 23 nt, Human
cacaagcccuugaguaacccacg

SEQ ID NO: 907139 - RNA, 20 nt, Human
cacugcccaccccccuccgc

SEQ ID NO: 907140 - RNA, 25 nt, Human
cacugcccaccccccuccgcccuuc

SEQ ID NO: 907141 - RNA, 24 nt, Human
cagauucuaaaguaaaauaucgaa

SEQ ID NO: 907142 - RNA, 21 nt, Human
caggcccaggaccugggauuc

SEQ ID NO: 907143 - RNA, 18 nt, Human
cagguguacaugugcacg

SEQ ID NO: 907144 - RNA, 18 nt, Human
cagugugaaucacuaagc

SEQ ID NO: 907145 - RNA, 21 nt, Human
cauagaggagauacaaguaac

SEQ ID NO: 907146 - RNA, 23 nt, Human
caugacuccugccacacacacug

SEQ ID NO: 907147 - RNA, 22 nt, Human
ccaaagugaugcucacaugggc

SEQ ID NO: 907148 - RNA, 18 nt, Human
ccaaaucauggagggaaa

SEQ ID NO: 907149 - RNA, 22 nt, Human
cccaaaacacaauuuucugaua

SEQ ID NO: 907150 - RNA, 23 nt, Human
ccccaugcuucucguccccuagu

SEQ ID NO: 907151 - RNA, 23 nt, Human
ccccuagucacugcccacccccc

SEQ ID NO: 907152 - RNA, 24 nt, Human
cgcgggccggucgggacgcggagc

SEQ ID NO: 907153 - RNA, 23 nt, Human
cggacgcagcgggcggcggcggg

SEQ ID NO: 907154 - RNA, 24 nt, Human
cuaaaugaucaauuagaaggcaaa

SEQ ID NO: 907155 - RNA, 24 nt, Human
cugagugacaauucuaagagcaaa

SEQ ID NO: 907156 - RNA, 27 nt, Human
cugcagauagacaguacagcgcgaguc

SEQ ID NO: 907157 - RNA, 19 nt, Human
cugcccaccccccuccgcc

SEQ ID NO: 907158 - RNA, 22 nt, Human
cuggcauauuuaggaacauucc

SEQ ID NO: 907159 - RNA, 21 nt, Human
gaaaaccaggcccaggaccug

SEQ ID NO: 907160 - RNA, 20 nt, Human
gaccuagcuugccccagugg

SEQ ID NO: 907161 - RNA, 20 nt, Human
gaggagauacaaguaaccac

SEQ ID NO: 907162 - RNA, 23 nt, Human
gcaaauauuuuccccaugcuucu

SEQ ID NO: 907163 - RNA, 18 nt, Human
gcaggaaaauauagggca

SEQ ID NO: 907164 - RNA, 23 nt, Human
gccacuccauuaauucuaaacaa

SEQ ID NO: 907165 - RNA, 19 nt, Human
gcggcggcgggacugaggc

SEQ ID NO: 907166 - RNA, 18 nt, Human
ggacuuagcaggcuggca

SEQ ID NO: 907167 - RNA, 21 nt, Human
ggaggaggguacuugggcugg

SEQ ID NO: 907168 - RNA, 22 nt, Human
ggcaguggugggcccagggcag

SEQ ID NO: 907169 - RNA, 20 nt, Human
gguucucguguuuuuggcuc

SEQ ID NO: 907170 - RNA, 19 nt, Human
guaggagauuccagauucu

SEQ ID NO: 907171 - RNA, 19 nt, Human
gucacugcccaccccccuc

SEQ ID NO: 907172 - RNA, 19 nt, Human
uaaaaaacaaaguguauga

SEQ ID NO: 907173 - RNA, 26 nt, Human
uaaaaaauaaaauuucacuaauuaug

SEQ ID NO: 907174 - RNA, 18 nt, Human
uaaacaaaauccuuccca

SEQ ID NO: 907175 - RNA, 20 nt, Human
uaaacaaaauccuucccaaa

SEQ ID NO: 907176 - RNA, 26 nt, Human
uaaauuaacagaaaagaaaagaaaac

SEQ ID NO: 907177 - RNA, 22 nt, Human
uaacagaaaagaaaagaaaacc

SEQ ID NO: 907178 - RNA, 23 nt, Human
uaaccuccaagccuuaguuuccu

SEQ ID NO: 907179 - RNA, 23 nt, Human
uaagaaaaagagaccaaaaaaga

SEQ ID NO: 907180 - RNA, 20 nt, Human
uaagaaauaaaaaggcugaa

SEQ ID NO: 907181 - RNA, 23 nt, Human
uaagagacaguacaguaagaaau

SEQ ID NO: 907182 - RNA, 28 nt, Human
uaauaaaaaauaaaauuucacuaauuau

SEQ ID NO: 907183 - RNA, 23 nt, Human
uacacaacuuuagaacaugcaaa

SEQ ID NO: 907184 - RNA, 26 nt, Human
uacaugcaaucaagcaaaaaggcugc

SEQ ID NO: 907185 - RNA, 18 nt, Human
uacauuuguaacuugaau

SEQ ID NO: 907186 - RNA, 25 nt, Human
uagaaaaccaggcccaggaccuggg

SEQ ID NO: 907187 - RNA, 18 nt, Human
uagucacugcccaccccc

SEQ ID NO: 907188 - RNA, 18 nt, Human
uauuuaggaacauuccau

SEQ ID NO: 907189 - RNA, 24 nt, Human
uauuuugcaggaaaauauagggca

SEQ ID NO: 907190 - RNA, 23 nt, Human
ucacuaagcucugaccuagcuuu

SEQ ID NO: 907191 - RNA, 18 nt, Human
ucauuuaaccuccaagcc

SEQ ID NO: 907192 - RNA, 19 nt, Human
uccaacuucuggcaaguca

SEQ ID NO: 907193 - RNA, 22 nt, Human
uccaagccuuaguuuccucauc

SEQ ID NO: 907194 - RNA, 23 nt, Human
ucccaaaugucacccugaaacca

SEQ ID NO: 907195 - RNA, 25 nt, Human
ucccaaaugucacccugaaaccaaa

SEQ ID NO: 907196 - RNA, 22 nt, Human
ucccaaccuucauugcuagguu

SEQ ID NO: 907197 - RNA, 19 nt, Human
ucccuguugaagagcccua

SEQ ID NO: 907198 - RNA, 21 nt, Human
ucuggguugcagcuggacuug

SEQ ID NO: 907199 - RNA, 21 nt, Human
ucuuuugccuuucaaagucau

SEQ ID NO: 907200 - RNA, 20 nt, Human
ugaaacaccuacgucaaugg

SEQ ID NO: 907201 - RNA, 21 nt, Human
ugagaucaguggguucucgug

SEQ ID NO: 907202 - RNA, 30 nt, Human
ugagaugacagcauuagaaaaccaggcccc

SEQ ID NO: 907203 - RNA, 21 nt, Human
ugagggacaugacuccugcca

SEQ ID NO: 907204 - RNA, 18 nt, Human
ugauuugcuaccaggaau

SEQ ID NO: 907205 - RNA, 21 nt, Human
ugccccaguggugagaucagu

SEQ ID NO: 907206 - RNA, 19 nt, Human
uggcaguguguguaagaaa

SEQ ID NO: 907207 - RNA, 24 nt, Human
ugggagagcacagugcaagagaca

SEQ ID NO: 907208 - RNA, 18 nt, Human
ugggauucugggcugaga

SEQ ID NO: 907209 - RNA, 19 nt, Human
ugggcaguggugggcccag

SEQ ID NO: 907210 - RNA, 23 nt, Human
uggguugcagcuggacuuguggg

SEQ ID NO: 907211 - RNA, 25 nt, Human
ugucuuucaaagucaaguucacaua

SEQ ID NO: 907212 - RNA, 18 nt, Human
ugugagggacaugacucc

SEQ ID NO: 907213 - RNA, 23 nt, Human
ugugcacacacauacacaacuuu

SEQ ID NO: 907214 - RNA, 22 nt, Human
ugugcacgugcucagaugugca

SEQ ID NO: 907215 - RNA, 19 nt, Human
uguguaagaaauggaucaa

SEQ ID NO: 907216 - RNA, 21 nt, Human
uuaaguaccacaagccccacc

SEQ ID NO: 907217 - RNA, 28 nt, Human
uuaauacccaggguaauacaauauccaa

SEQ ID NO: 907218 - RNA, 24 nt, Human
uuagagugcaaauauuuuccccau

SEQ ID NO: 907219 - RNA, 21 nt, Human
uuagcuaaaaagaaaagcaaa

SEQ ID NO: 907220 - RNA, 25 nt, Human
uuauauuuuuugaagcccgcagauu

SEQ ID NO: 907221 - RNA, 18 nt, Human
uuaucuugauuugcuacc

SEQ ID NO: 907222 - RNA, 22 nt, Human
uucaguuuccacuaucucuggg

SEQ ID NO: 907223 - RNA, 25 nt, Human
uucaucuuguggggacucuuuugcc

SEQ ID NO: 907224 - RNA, 20 nt, Human
uucccuauucuuacaggacu

SEQ ID NO: 907225 - RNA, 22 nt, Human
uugaagagcccuacuuccaaag

SEQ ID NO: 907226 - RNA, 21 nt, Human
uugaaugguaacuaggaucuu

SEQ ID NO: 907227 - RNA, 22 nt, Human
uugcuagguugguccccagcgc

SEQ ID NO: 907228 - RNA, 25 nt, Human
uuuaaaaacuuuccuaguguuccuu

SEQ ID NO: 907229 - RNA, 25 nt, Human
uuuaucuugauuugcuaccaggaau

SEQ ID NO: 907230 - RNA, 19 nt, Human
aacacagcuuggaccagaa

SEQ ID NO: 907231 - RNA, 23 nt, Human
aacacagcuuggaccagaagccc

SEQ ID NO: 907232 - RNA, 20 nt, Human
acugcaccaugaggcagaau

SEQ ID NO: 907233 - RNA, 18 nt, Human
agaggcaggggguggggc

SEQ ID NO: 907234 - RNA, 20 nt, Human
agaggcaggggguggggcag

SEQ ID NO: 907235 - RNA, 21 nt, Human
agaggcaggggguggggcagg

SEQ ID NO: 907236 - RNA, 22 nt, Human
aggcagaaugcagggugcucuc

SEQ ID NO: 907237 - RNA, 19 nt, Human
aggcaggggguggggcagg

SEQ ID NO: 907238 - RNA, 20 nt, Human
aggcaggggguggggcaggc

SEQ ID NO: 907239 - RNA, 20 nt, Human
aggcaggggguggggcaggc

SEQ ID NO: 907240 - RNA, 21 nt, Human
aggcaggggguggggcaggcg

SEQ ID NO: 907241 - RNA, 18 nt, Human
aggggguggggcaggcgu

SEQ ID NO: 907242 - RNA, 19 nt, Human
aggggguggggcaggcgug

SEQ ID NO: 907243 - RNA, 20 nt, Human
agggugcucucaaccagcug

SEQ ID NO: 907244 - RNA, 23 nt, Human
agucaacacagcuuggaccagaa

SEQ ID NO: 907245 - RNA, 22 nt, Human
caacaacggacucaucauccca

SEQ ID NO: 907246 - RNA, 18 nt, Human
ccaccauccacagcuccc

SEQ ID NO: 907247 - RNA, 20 nt, Human
cccauggcgccuggcucccu

SEQ ID NO: 907248 - RNA, 22 nt, Human
cggccaaggcagacaacaacgg

SEQ ID NO: 907249 - RNA, 19 nt, Human
cucccuggaaaggcacagg

SEQ ID NO: 907250 - RNA, 18 nt, Human
cuccugccaccauccaca

SEQ ID NO: 907251 - RNA, 18 nt, Human
cugcugagcugauguugu

SEQ ID NO: 907252 - RNA, 23 nt, Human
cugugaucgcuaacugcaccaug

SEQ ID NO: 907253 - RNA, 21 nt, Human
cuugcugggacacuccugcca

SEQ ID NO: 907254 - RNA, 25 nt, Human
gaugccgccuuucuugcugggacac

SEQ ID NO: 907255 - RNA, 21 nt, Human
ggagagcccagcccaggagau

SEQ ID NO: 907256 - RNA, 19 nt, Human
ggagccggcguuccugcug

SEQ ID NO: 907257 - RNA, 23 nt, Human
ggcaggcgugagguagggguggg

SEQ ID NO: 907258 - RNA, 21 nt, Human
gggcaggcgugagguaggggu

SEQ ID NO: 907259 - RNA, 23 nt, Human
gggguggggcaggcgugagguag

SEQ ID NO: 907260 - RNA, 19 nt, Human
guacuucugaaggccugug

SEQ ID NO: 907261 - RNA, 25 nt, Human
gugcucucaaccagcuggggguugg

SEQ ID NO: 907262 - RNA, 22 nt, Human
uaagaacaacaaccaaaagagg

SEQ ID NO: 907263 - RNA, 23 nt, Human
uaagaacaacaaccaaaagaggc

SEQ ID NO: 907264 - RNA, 23 nt, Human
uacauggagaggagauuaagaac

SEQ ID NO: 907265 - RNA, 26 nt, Human
uacauggagaggagauuaagaacaac

SEQ ID NO: 907266 - RNA, 22 nt, Human
uaggggugggguggggaugaca

SEQ ID NO: 907267 - RNA, 23 nt, Human
uaggggugggguggggaugacag

SEQ ID NO: 907268 - RNA, 26 nt, Human
ucaaacgcaagcacgaguguuuagaa

SEQ ID NO: 907269 - RNA, 18 nt, Human
ucccuggaaaggcacagg

SEQ ID NO: 907270 - RNA, 20 nt, Human
uccugcauuuucaaaggcuc

SEQ ID NO: 907271 - RNA, 19 nt, Human
ugaggcagaaugcagggug

SEQ ID NO: 907272 - RNA, 20 nt, Human
ugggaacuacauggagagga

SEQ ID NO: 907273 - RNA, 23 nt, Human
uggguccucggggagccggcguu

SEQ ID NO: 907274 - RNA, 21 nt, Human
aaaaaaaaaaaaaaaaaggac

SEQ ID NO: 907275 - RNA, 27 nt, Human
aaaaaaaaaaaggacgaccccagaaag

SEQ ID NO: 907276 - RNA, 24 nt, Human
aaaaaaaaaaggacgaccccagaa

SEQ ID NO: 907277 - RNA, 23 nt, Human
aaaaaaaaaggacgaccccagaa

SEQ ID NO: 907278 - RNA, 18 nt, Human
aaaaaaaaggacgacccc

SEQ ID NO: 907279 - RNA, 21 nt, Human
aaaaaaaggacgaccccagaa

SEQ ID NO: 907280 - RNA, 24 nt, Human
aaaaagcuuguauaaaggacagac

SEQ ID NO: 907281 - RNA, 19 nt, Human
aaaauauauauccuacucc

SEQ ID NO: 907282 - RNA, 18 nt, Human
aaacccaacaacccgaga

SEQ ID NO: 907283 - RNA, 19 nt, Human
aacacaggaagagggagag

SEQ ID NO: 907284 - RNA, 18 nt, Human
aacacaggcaugcaugca

SEQ ID NO: 907285 - RNA, 21 nt, Human
aacagcauguacucaacacag

SEQ ID NO: 907286 - RNA, 20 nt, Human
aacauggagaaaccccgucu

SEQ ID NO: 907287 - RNA, 21 nt, Human
aacauggagaaaccccgucuc

SEQ ID NO: 907288 - RNA, 21 nt, Human
aacccuagccccaagccgaga

SEQ ID NO: 907289 - RNA, 19 nt, Human
aaccucgcaagccagcacc

SEQ ID NO: 907290 - RNA, 24 nt, Human
aaccucgcaagccagcaccugccg

SEQ ID NO: 907291 - RNA, 20 nt, Human
aacuaaacuucggaaaccca

SEQ ID NO: 907292 - RNA, 21 nt, Human
aacucuguggccucacuccuc

SEQ ID NO: 907293 - RNA, 18 nt, Human
aagaacccuagccccaag

SEQ ID NO: 907294 - RNA, 23 nt, Human
aagagcgaaacucugucucaaaa

SEQ ID NO: 907295 - RNA, 21 nt, Human
aagagcguuugcucuucacag

SEQ ID NO: 907296 - RNA, 18 nt, Human
aagcgacccucaacauaa

SEQ ID NO: 907297 - RNA, 24 nt, Human
aaucaccugaacccaggaggcaga

SEQ ID NO: 907298 - RNA, 18 nt, Human
aauuagccaggcauggug

SEQ ID NO: 907299 - RNA, 19 nt, Human
acaaacagcauguacucaa

SEQ ID NO: 907300 - RNA, 20 nt, Human
acaagagcgaaacucugucu

SEQ ID NO: 907301 - RNA, 21 nt, Human
acaagagcgaaacucugucuc

SEQ ID NO: 907302 - RNA, 26 nt, Human
acaaugaagggaaccacaugcuaagg

SEQ ID NO: 907303 - RNA, 19 nt, Human
acaggcaaugcccugagaa

SEQ ID NO: 907304 - RNA, 23 nt, Human
accacaaagggcuaaagagcgac

SEQ ID NO: 907305 - RNA, 23 nt, Human
accaccaaauauccgacaaacag

SEQ ID NO: 907306 - RNA, 18 nt, Human
accaccccaggcguccca

SEQ ID NO: 907307 - RNA, 24 nt, Human
acccaggaggcagagguugcagug

SEQ ID NO: 907308 - RNA, 18 nt, Human
accccgucuccacuaaaa

SEQ ID NO: 907309 - RNA, 26 nt, Human
accgccacccucuccuuaaaacccaa

SEQ ID NO: 907310 - RNA, 23 nt, Human
accucgcaagccagcaccugccg

SEQ ID NO: 907311 - RNA, 19 nt, Human
accuggcucccuccagucc

SEQ ID NO: 907312 - RNA, 18 nt, Human
acugcacuccagccucag

SEQ ID NO: 907313 - RNA, 27 nt, Human
acugcacuccagccucagcaacaagag

SEQ ID NO: 907314 - RNA, 19 nt, Human
acugcaugcccucuucccc

SEQ ID NO: 907315 - RNA, 22 nt, Human
agaaaugugauccccucccccc

SEQ ID NO: 907316 - RNA, 19 nt, Human
agacacgaaacagaucaag

SEQ ID NO: 907317 - RNA, 24 nt, Human
agagcaaaugugaguugucuacac

SEQ ID NO: 907318 - RNA, 18 nt, Human
agagcgaaacucugucuc

SEQ ID NO: 907319 - RNA, 24 nt, Human
agaggaaaaagcuuguauaaagga

SEQ ID NO: 907320 - RNA, 22 nt, Human
agaggccuugggaucauggcuc

SEQ ID NO: 907321 - RNA, 24 nt, Human
agagguugcagugagacgagaugg

SEQ ID NO: 907322 - RNA, 25 nt, Human
agauacaaugaagggaaccgguacc

SEQ ID NO: 907323 - RNA, 23 nt, Human
agcagcuuuuaacaagcgacccu

SEQ ID NO: 907324 - RNA, 21 nt, Human
agcaucgaccaccucucacca

SEQ ID NO: 907325 - RNA, 24 nt, Human
agcaucgaccaccucucaccaccc

SEQ ID NO: 907326 - RNA, 22 nt, Human
agccccaagccgagagaagccu

SEQ ID NO: 907327 - RNA, 21 nt, Human
agccccagaauuaacagcugu

SEQ ID NO: 907328 - RNA, 20 nt, Human
agccugcauuaggaaggacc

SEQ ID NO: 907329 - RNA, 18 nt, Human
agcgcccucuucucugcc

SEQ ID NO: 907330 - RNA, 22 nt, Human
agcgcccucuucucugccuccu

SEQ ID NO: 907331 - RNA, 22 nt, Human
aggaaggacccugggaggccac

SEQ ID NO: 907332 - RNA, 24 nt, Human
aggacaaccucgcaagccagcacc

SEQ ID NO: 907333 - RNA, 21 nt, Human
aggcagagguugcagugagac

SEQ ID NO: 907334 - RNA, 24 nt, Human
aggcagagguugcagugagacgag

SEQ ID NO: 907335 - RNA, 21 nt, Human
aggcauggugcuacaucccug

SEQ ID NO: 907336 - RNA, 24 nt, Human
aggcauggugcuacaucccuguaa

SEQ ID NO: 907337 - RNA, 18 nt, Human
aggccuccugggacccca

SEQ ID NO: 907338 - RNA, 21 nt, Human
aggcgggcagaucaccugagg

SEQ ID NO: 907339 - RNA, 22 nt, Human
aggcgggcagaucaccugaggg

SEQ ID NO: 907340 - RNA, 21 nt, Human
agggaggacgucaccuuccaa

SEQ ID NO: 907341 - RNA, 18 nt, Human
agggguagagauucuuuu

SEQ ID NO: 907342 - RNA, 20 nt, Human
aguacugagagauuaaccac

SEQ ID NO: 907343 - RNA, 24 nt, Human
aguggcucacaccuguaaucccag

SEQ ID NO: 907344 - RNA, 19 nt, Human
auauccgacaaacagcaug

SEQ ID NO: 907345 - RNA, 18 nt, Human
aucgaguuguccccagca

SEQ ID NO: 907346 - RNA, 21 nt, Human
aucgaguuguccccagcaaac

SEQ ID NO: 907347 - RNA, 19 nt, Human
aucucggggcacaacgugg

SEQ ID NO: 907348 - RNA, 23 nt, Human
augcaggacaaccucgcaagcca

SEQ ID NO: 907349 - RNA, 20 nt, Human
auggagaaaccccgucucca

SEQ ID NO: 907350 - RNA, 23 nt, Human
auggugccacugcacuccagccu

SEQ ID NO: 907351 - RNA, 25 nt, Human
caaaaaaaaaaaaaaaaaggacgac

SEQ ID NO: 907352 - RNA, 23 nt, Human
caacaagagcgaaacucugucuc

SEQ ID NO: 907353 - RNA, 21 nt, Human
caacauaaccucauacagaua

SEQ ID NO: 907354 - RNA, 19 nt, Human
caacccuccaacagcuccc

SEQ ID NO: 907355 - RNA, 28 nt, Human
caacguggccaccagcaagcacgacauu

SEQ ID NO: 907356 - RNA, 21 nt, Human
caagcgacccucaacauaacc

SEQ ID NO: 907357 - RNA, 21 nt, Human
cacaaugcccagacagcuaaa

SEQ ID NO: 907358 - RNA, 22 nt, Human
cacacaugccuuugagacgcuc

SEQ ID NO: 907359 - RNA, 24 nt, Human
cacaccuguaaucccagcacuuug

SEQ ID NO: 907360 - RNA, 21 nt, Human
cacagcaugaccagcaucgac

SEQ ID NO: 907361 - RNA, 21 nt, Human
caccaaauauccgacaaacag

SEQ ID NO: 907362 - RNA, 18 nt, Human
caccaccccaggcguccc

SEQ ID NO: 907363 - RNA, 21 nt, Human
caccacgaugcagagccccga

SEQ ID NO: 907364 - RNA, 22 nt, Human
caccauaauuaugugucucacu

SEQ ID NO: 907365 - RNA, 22 nt, Human
caccggacccaggcacccaggc

SEQ ID NO: 907366 - RNA, 19 nt, Human
caccuguaaucccagcacu

SEQ ID NO: 907367 - RNA, 24 nt, Human
caccuguaaucccagcacuuuggg

SEQ ID NO: 907368 - RNA, 19 nt, Human
cacgaaacagaucaagaca

SEQ ID NO: 907369 - RNA, 19 nt, Human
cacugcacuccagccucag

SEQ ID NO: 907370 - RNA, 21 nt, Human
cacugcacuccagccucagca

SEQ ID NO: 907371 - RNA, 22 nt, Human
cacugcacuccagccucagcaa

SEQ ID NO: 907372 - RNA, 24 nt, Human
cacugcacuccagccucagcaaca

SEQ ID NO: 907373 - RNA, 19 nt, Human
cagaaagaacccuagcccc

SEQ ID NO: 907374 - RNA, 24 nt, Human
cagaucaccugaggcugggaguuc

SEQ ID NO: 907375 - RNA, 26 nt, Human
cagcaacaagagcgaaacucugucuc

SEQ ID NO: 907376 - RNA, 24 nt, Human
cagcaacaccaaaaaagagcguuu

SEQ ID NO: 907377 - RNA, 24 nt, Human
cagcacuuugggagaccgaggcgg

SEQ ID NO: 907378 - RNA, 21 nt, Human
cagcaugaccagcaucgacca

SEQ ID NO: 907379 - RNA, 24 nt, Human
cagcaugauuccuacauacauuga

SEQ ID NO: 907380 - RNA, 19 nt, Human
cagccaccauuuagugggg

SEQ ID NO: 907381 - RNA, 22 nt, Human
cagccaccggacccaggcaccc

SEQ ID NO: 907382 - RNA, 23 nt, Human
cagccaccggacccaggcaccca

SEQ ID NO: 907383 - RNA, 24 nt, Human
cagccugaccaacauggagaaacc

SEQ ID NO: 907384 - RNA, 19 nt, Human
cagccugcauuaggaagga

SEQ ID NO: 907385 - RNA, 22 nt, Human
cagccugcauuaggaaggaccc

SEQ ID NO: 907386 - RNA, 20 nt, Human
cagcuucuaaugccccaggc

SEQ ID NO: 907387 - RNA, 20 nt, Human
caggcaaugcccugagaacc

SEQ ID NO: 907388 - RNA, 21 nt, Human
cagguccugaugaaucuggag

SEQ ID NO: 907389 - RNA, 19 nt, Human
caucccuguaaucccagcu

SEQ ID NO: 907390 - RNA, 25 nt, Human
cauguacucaacacaggcaugcaug

SEQ ID NO: 907391 - RNA, 24 nt, Human
ccaaagaacucacacaaugcccag

SEQ ID NO: 907392 - RNA, 18 nt, Human
ccacaaagggcuaaagag

SEQ ID NO: 907393 - RNA, 20 nt, Human
ccacccucuccuuaaaaccc

SEQ ID NO: 907394 - RNA, 25 nt, Human
ccaccucucaccaccccaggcgucc

SEQ ID NO: 907395 - RNA, 20 nt, Human
ccacugcacuccagccucag

SEQ ID NO: 907396 - RNA, 20 nt, Human
ccacugcacuccagccucag

SEQ ID NO: 907397 - RNA, 21 nt, Human
ccacugcacuccagccucagc

SEQ ID NO: 907398 - RNA, 21 nt, Human
ccacuucuaagaauucauccu

SEQ ID NO: 907399 - RNA, 21 nt, Human
ccagcaaacaauccaagagca

SEQ ID NO: 907400 - RNA, 23 nt, Human
ccagcaaacaauccaagagcaaa

SEQ ID NO: 907401 - RNA, 23 nt, Human
ccagcaccugccgacccgccugg

SEQ ID NO: 907402 - RNA, 24 nt, Human
ccagcgcccucuucucugccuccu

SEQ ID NO: 907403 - RNA, 22 nt, Human
cccaacacgaguuaccguuucu

SEQ ID NO: 907404 - RNA, 21 nt, Human
cccaagccgagagaagccugc

SEQ ID NO: 907405 - RNA, 25 nt, Human
cccaagucagagcacggccgggguc

SEQ ID NO: 907406 - RNA, 22 nt, Human
cccaccaccaaauauccgacaa

SEQ ID NO: 907407 - RNA, 22 nt, Human
ccccaagccgagagaagccugc

SEQ ID NO: 907408 - RNA, 18 nt, Human
ccccaagccuaagacugc

SEQ ID NO: 907409 - RNA, 25 nt, Human
ccccccaccaccaaauauccgacaa

SEQ ID NO: 907410 - RNA, 18 nt, Human
cccccugucccucugcua

SEQ ID NO: 907411 - RNA, 20 nt, Human
ccccuccccccaccaccaaa

SEQ ID NO: 907412 - RNA, 22 nt, Human
cccgagguggcugugcuuucug

SEQ ID NO: 907413 - RNA, 21 nt, Human
cccgucuccacuaaaaacaca

SEQ ID NO: 907414 - RNA, 20 nt, Human
cccuaggccuccugggaccc

SEQ ID NO: 907415 - RNA, 21 nt, Human
cccuaggccuccugggacccc

SEQ ID NO: 907416 - RNA, 19 nt, Human
cccucuuccccucuuugcc

SEQ ID NO: 907417 - RNA, 18 nt, Human
cccugaauccagaaguuc

SEQ ID NO: 907418 - RNA, 23 nt, Human
cccuggacuggccaugcugcccu

SEQ ID NO: 907419 - RNA, 23 nt, Human
ccuccaggucucuccaccuggcc

SEQ ID NO: 907420 - RNA, 24 nt, Human
ccuccaggucucuccaccuggccu

SEQ ID NO: 907421 - RNA, 22 nt, Human
ccuccugggaccccaagccuaa

SEQ ID NO: 907422 - RNA, 18 nt, Human
ccuccugucucccugcuc

SEQ ID NO: 907423 - RNA, 19 nt, Human
ccuccugucucccugcucc

SEQ ID NO: 907424 - RNA, 20 nt, Human
ccuccugucucccugcuccu

SEQ ID NO: 907425 - RNA, 25 nt, Human
ccucucaccaccccaggcgucccag

SEQ ID NO: 907426 - RNA, 23 nt, Human
ccugaccaacauggagaaacccc

SEQ ID NO: 907427 - RNA, 24 nt, Human
ccugaccaacauggagaaaccccg

SEQ ID NO: 907428 - RNA, 22 nt, Human
ccugaggcugggaguucgagac

SEQ ID NO: 907429 - RNA, 22 nt, Human
ccugcaggccgcugugccgcac

SEQ ID NO: 907430 - RNA, 22 nt, Human
ccuggccccaccacgaugcaga

SEQ ID NO: 907431 - RNA, 19 nt, Human
ccuguaaucccagcuacuc

SEQ ID NO: 907432 - RNA, 21 nt, Human
ccuguaaucccagcuacucgg

SEQ ID NO: 907433 - RNA, 19 nt, Human
ccuuggcccaggacaccug

SEQ ID NO: 907434 - RNA, 24 nt, Human
cgagauggugccacugcacuccag

SEQ ID NO: 907435 - RNA, 20 nt, Human
cgaggcgggcagaucaccug

SEQ ID NO: 907436 - RNA, 22 nt, Human
cggaaacccaacaacccgagag

SEQ ID NO: 907437 - RNA, 24 nt, Human
cggaaggcugggacaggagaauca

SEQ ID NO: 907438 - RNA, 24 nt, Human
cgggcagaucaccugaggcuggga

SEQ ID NO: 907439 - RNA, 28 nt, Human
cuaccaugauccuauuaacacccaaguu

SEQ ID NO: 907440 - RNA, 20 nt, Human
cuagccccaagccgagagaa

SEQ ID NO: 907441 - RNA, 18 nt, Human
cucaaaaaaaaaaaaaaa

SEQ ID NO: 907442 - RNA, 22 nt, Human
cucacaccuguaaucccagcac

SEQ ID NO: 907443 - RNA, 24 nt, Human
cucacaccuguaaucccagcacuu

SEQ ID NO: 907444 - RNA, 20 nt, Human
cucaccaccccaggcguccc

SEQ ID NO: 907445 - RNA, 23 nt, Human
cuccaugaaauccccacacagaa

SEQ ID NO: 907446 - RNA, 22 nt, Human
cuccccccaccaccaaauaucc

SEQ ID NO: 907447 - RNA, 21 nt, Human
cuccugggaccccaagccuaa

SEQ ID NO: 907448 - RNA, 18 nt, Human
cucucucucucucacccc

SEQ ID NO: 907449 - RNA, 19 nt, Human
cucucuggcugcauccuaa

SEQ ID NO: 907450 - RNA, 19 nt, Human
cucugucucaaaaaaaaaa

SEQ ID NO: 907451 - RNA, 22 nt, Human
cucuucacaggcacucccuaaa

SEQ ID NO: 907452 - RNA, 20 nt, Human
cuggaacucacugagacugc

SEQ ID NO: 907453 - RNA, 25 nt, Human
cuggauagaagccgaagucucggcc

SEQ ID NO: 907454 - RNA, 22 nt, Human
cugucccucugcuagggugccu

SEQ ID NO: 907455 - RNA, 23 nt, Human
cugucccucugcuagggugccuu

SEQ ID NO: 907456 - RNA, 20 nt, Human
cuuggcccaggacaccugca

SEQ ID NO: 907457 - RNA, 24 nt, Human
gaccccagaaagaacccuagcccc

SEQ ID NO: 907458 - RNA, 22 nt, Human
gacccuguggggaaggaggcug

SEQ ID NO: 907459 - RNA, 24 nt, Human
gacgaccccagaaagaacccuagc

SEQ ID NO: 907460 - RNA, 22 nt, Human
gacuugaagaaagcugcucuuc

SEQ ID NO: 907461 - RNA, 21 nt, Human
gagaaaccccgucuccacuaa

SEQ ID NO: 907462 - RNA, 23 nt, Human
gagaccagccugaccaacaugga

SEQ ID NO: 907463 - RNA, 18 nt, Human
gaucaccugaggcuggga

SEQ ID NO: 907464 - RNA, 24 nt, Human
gaucaccugaggcugggaguucga

SEQ ID NO: 907465 - RNA, 18 nt, Human
gaucauggcuccugaucc

SEQ ID NO: 907466 - RNA, 23 nt, Human
gauccccuccccccaccaccaaa

SEQ ID NO: 907467 - RNA, 22 nt, Human
gcacaguggcucacaccuguaa

SEQ ID NO: 907468 - RNA, 19 nt, Human
gccacgcacaguggcucac

SEQ ID NO: 907469 - RNA, 20 nt, Human
gcccuggagcggccugaacc

SEQ ID NO: 907470 - RNA, 24 nt, Human
gccucauccuuccuucccaaccuc

SEQ ID NO: 907471 - RNA, 20 nt, Human
gccugcauuaggaaggaccc

SEQ ID NO: 907472 - RNA, 28 nt, Human
ggaaacaaugcgagaguaaccgguaccc

SEQ ID NO: 907473 - RNA, 21 nt, Human
ggaaagccgggauuguaagga

SEQ ID NO: 907474 - RNA, 18 nt, Human
ggacaggagaaucaccug

SEQ ID NO: 907475 - RNA, 24 nt, Human
ggacaggagaaucaccugaaccca

SEQ ID NO: 907476 - RNA, 21 nt, Human
ggaucauggcuccugauccca

SEQ ID NO: 907477 - RNA, 19 nt, Human
ggcagcaacaccaaaaaag

SEQ ID NO: 907478 - RNA, 21 nt, Human
ggcaucugcacgcagugcagc

SEQ ID NO: 907479 - RNA, 19 nt, Human
ggcugugcuuucugccagc

SEQ ID NO: 907480 - RNA, 21 nt, Human
gggagcugggagcaguacagg

SEQ ID NO: 907481 - RNA, 24 nt, Human
ggugcuacaucccuguaaucccag

SEQ ID NO: 907482 - RNA, 26 nt, Human
gugcaucuguauuuacauagaauaac

SEQ ID NO: 907483 - RNA, 23 nt, Human
guugauucacggaagcugucauu

SEQ ID NO: 907484 - RNA, 20 nt, Human
uaaaaacacaaaauuagcca

SEQ ID NO: 907485 - RNA, 22 nt, Human
uaaaaacacaaaauuagccagg

SEQ ID NO: 907486 - RNA, 23 nt, Human
uaaaaacacaaaauuagccaggc

SEQ ID NO: 907487 - RNA, 22 nt, Human
uaaaacccaacacgaguuaccg

SEQ ID NO: 907488 - RNA, 19 nt, Human
uaacagaaaugugaucccc

SEQ ID NO: 907489 - RNA, 25 nt, Human
uaacuagcaaacguguucauucccu

SEQ ID NO: 907490 - RNA, 23 nt, Human
uaauuagacacgaaacagaucaa

SEQ ID NO: 907491 - RNA, 21 nt, Human
uacaauccagcuucuaaugcc

SEQ ID NO: 907492 - RNA, 21 nt, Human
uagaaaaacccagauacaaug

SEQ ID NO: 907493 - RNA, 23 nt, Human
uagaaaaacccagauacaaugaa

SEQ ID NO: 907494 - RNA, 20 nt, Human
uaggccuccugggaccccaa

SEQ ID NO: 907495 - RNA, 23 nt, Human
uaguacugagagauuaaccacaa

SEQ ID NO: 907496 - RNA, 21 nt, Human
uagugggcacuuacaaccugc

SEQ ID NO: 907497 - RNA, 23 nt, Human
uauaaaggacagacugagauaga

SEQ ID NO: 907498 - RNA, 22 nt, Human
uaucugaaacuuacaaguagga

SEQ ID NO: 907499 - RNA, 18 nt, Human
uauuucuccaguucuucu

SEQ ID NO: 907500 - RNA, 20 nt, Human
uauuucuccaguucuucugg

SEQ ID NO: 907501 - RNA, 23 nt, Human
ucacacaaugcccagacagcuaa

SEQ ID NO: 907502 - RNA, 18 nt, Human
ucaccugaggcugggagu

SEQ ID NO: 907503 - RNA, 20 nt, Human
uccagaaguuccacuucuaa

SEQ ID NO: 907504 - RNA, 20 nt, Human
uccaggucucuccaccuggg

SEQ ID NO: 907505 - RNA, 18 nt, Human
ucccaggcccagcucccc

SEQ ID NO: 907506 - RNA, 23 nt, Human
ucccaggcccagcuccccgaccc

SEQ ID NO: 907507 - RNA, 18 nt, Human
ucccagguccaacccagc

SEQ ID NO: 907508 - RNA, 21 nt, Human
uccccacacagaaggcuagau

SEQ ID NO: 907509 - RNA, 23 nt, Human
uccccagcaaacaauccaagagc

SEQ ID NO: 907510 - RNA, 20 nt, Human
uccccccaccaccaaauauc

SEQ ID NO: 907511 - RNA, 22 nt, Human
uccccccaccaccaaauauccg

SEQ ID NO: 907512 - RNA, 18 nt, Human
uccccgugagcgcagggg

SEQ ID NO: 907513 - RNA, 22 nt, Human
ucccugcuccuuggcccaggac

SEQ ID NO: 907514 - RNA, 21 nt, Human
ucccuguaaucccagcuacuc

SEQ ID NO: 907515 - RNA, 23 nt, Human
ucccuguaaucccagcuacucgg

SEQ ID NO: 907516 - RNA, 18 nt, Human
uccugaucccagaaaugc

SEQ ID NO: 907517 - RNA, 21 nt, Human
uccugggaccccaagccuaag

SEQ ID NO: 907518 - RNA, 20 nt, Human
uccugggcuccaugucaccu

SEQ ID NO: 907519 - RNA, 20 nt, Human
uccuuggaucuggcagcaac

SEQ ID NO: 907520 - RNA, 24 nt, Human
ucgaguuguccccagcaaacaauc

SEQ ID NO: 907521 - RNA, 25 nt, Human
ucggaaggcugggacaggagaauca

SEQ ID NO: 907522 - RNA, 23 nt, Human
ucucaccaccccaggcgucccag

SEQ ID NO: 907523 - RNA, 24 nt, Human
ucuccaccuggccucccugccaua

SEQ ID NO: 907524 - RNA, 21 nt, Human
ucucugccuccugucucccug

SEQ ID NO: 907525 - RNA, 19 nt, Human
ucucuggcugcauccuaac

SEQ ID NO: 907526 - RNA, 23 nt, Human
ucugacucuggauagaagccgaa

SEQ ID NO: 907527 - RNA, 21 nt, Human
ucugcacgcagugcagccugg

SEQ ID NO: 907528 - RNA, 24 nt, Human
ucugccuccugucucccugcuccu

SEQ ID NO: 907529 - RNA, 23 nt, Human
ucugucucaaaaaaaaaaaaaaa

SEQ ID NO: 907530 - RNA, 25 nt, Human
ucugucucaaaaaaaaaaaaaaaaa

SEQ ID NO: 907531 - RNA, 24 nt, Human
ucuucugggggagcugggagcagu

SEQ ID NO: 907532 - RNA, 20 nt, Human
ucuuuuggcaaaaauuuuag

SEQ ID NO: 907533 - RNA, 22 nt, Human
ugaaacuuacaaguaggagccu

SEQ ID NO: 907534 - RNA, 20 nt, Human
ugaaccaagccagggcuguu

SEQ ID NO: 907535 - RNA, 24 nt, Human
ugaagaaagcugcucuuccugcag

SEQ ID NO: 907536 - RNA, 21 nt, Human
ugacaggcaaugcccugagaa

SEQ ID NO: 907537 - RNA, 18 nt, Human
ugagaaacuaaacuucgg

SEQ ID NO: 907538 - RNA, 21 nt, Human
ugagaaugucaggaucucagu

SEQ ID NO: 907539 - RNA, 23 nt, Human
ugagaaugucaggaucucaguuu

SEQ ID NO: 907540 - RNA, 21 nt, Human
ugagauagaaaaacccagaua

SEQ ID NO: 907541 - RNA, 20 nt, Human
ugaugaaucuggagcugaca

SEQ ID NO: 907542 - RNA, 25 nt, Human
ugcacgcagugcagccuggcacgug

SEQ ID NO: 907543 - RNA, 20 nt, Human
ugcacuccagccucagcaac

SEQ ID NO: 907544 - RNA, 20 nt, Human
ugcagagccccgagguggcu

SEQ ID NO: 907545 - RNA, 19 nt, Human
ugcagaugcuucugugccc

SEQ ID NO: 907546 - RNA, 18 nt, Human
ugccaaagaacucacaca

SEQ ID NO: 907547 - RNA, 19 nt, Human
ugccaaagaacucacacaa

SEQ ID NO: 907548 - RNA, 26 nt, Human
ugccaaagaacucacacaaugcccag

SEQ ID NO: 907549 - RNA, 19 nt, Human
ugcccagacagcuaaagag

SEQ ID NO: 907550 - RNA, 21 nt, Human
ugcugguauuucuccaguucu

SEQ ID NO: 907551 - RNA, 21 nt, Human
ugcuucacagcaugaccagca

SEQ ID NO: 907552 - RNA, 24 nt, Human
uggaacucacugagacugcuucac

SEQ ID NO: 907553 - RNA, 19 nt, Human
uggcccaggacaccugcag

SEQ ID NO: 907554 - RNA, 21 nt, Human
uggcucacaccuguaauccca

SEQ ID NO: 907555 - RNA, 24 nt, Human
uggcucacaccuguaaucccagca

SEQ ID NO: 907556 - RNA, 21 nt, Human
uggcuccugaucccagaaaug

SEQ ID NO: 907557 - RNA, 20 nt, Human
ugggacaggagaaucaccug

SEQ ID NO: 907558 - RNA, 24 nt, Human
ugggacaggagaaucaccugaacc

SEQ ID NO: 907559 - RNA, 24 nt, Human
ugggagaccgaggcgggcagauca

SEQ ID NO: 907560 - RNA, 19 nt, Human
ugggagcaguacaggaugg

SEQ ID NO: 907561 - RNA, 18 nt, Human
ugggugguucggcauaac

SEQ ID NO: 907562 - RNA, 24 nt, Human
uggugcuacaucccuguaauccca

SEQ ID NO: 907563 - RNA, 25 nt, Human
uguacucaacacaggcaugcaugca

SEQ ID NO: 907564 - RNA, 24 nt, Human
uguaguuuuucucagugacuguau

SEQ ID NO: 907565 - RNA, 21 nt, Human
ugucaggaucucaguuuugcu

SEQ ID NO: 907566 - RNA, 25 nt, Human
ugugauccccuccccccaccaccaa

SEQ ID NO: 907567 - RNA, 24 nt, Human
uuaaaacccaacacgaguuaccgu

SEQ ID NO: 907568 - RNA, 23 nt, Human
uucccuaggccuccugggacccc

SEQ ID NO: 907569 - RNA, 22 nt, Human
uuccugcagaugcuucugugcc

SEQ ID NO: 907570 - RNA, 20 nt, Human
uuccugggcuccaugucacc

SEQ ID NO: 907571 - RNA, 25 nt, Human
uucuaaugccccaggcgagacccug

SEQ ID NO: 907572 - RNA, 28 nt, Human
uucuaaugccccaggcgagacccugugg

SEQ ID NO: 907573 - RNA, 23 nt, Human
uucuucccccugucccucugcua

SEQ ID NO: 907574 - RNA, 23 nt, Human
uugaagaaagcugcuccugugcg

SEQ ID NO: 907575 - RNA, 22 nt, Human
uugaagaaagcugcuccugugg

SEQ ID NO: 907576 - RNA, 22 nt, Human
uugcagugagacgagauggugc

SEQ ID NO: 907577 - RNA, 24 nt, Human
uuggaucuggcagcaacaccaaaa

SEQ ID NO: 907578 - RNA, 21 nt, Human
uuggccacaaacuaaagggag

SEQ ID NO: 907579 - RNA, 20 nt, Human
uuuuucucagugacuguauu

SEQ ID NO: 907580 - RNA, 21 nt, Human
aacaacacuacccuuccacaa

SEQ ID NO: 907581 - RNA, 23 nt, Human
aaucaaauccuuuaaauuggaca

SEQ ID NO: 907582 - RNA, 20 nt, Human
acagacuguaaauacagaac

SEQ ID NO: 907583 - RNA, 18 nt, Human
agcgggacacagaaaccc

SEQ ID NO: 907584 - RNA, 23 nt, Human
aggcccaaaacaauggccagcgg

SEQ ID NO: 907585 - RNA, 22 nt, Human
caaaaauaaaacugucuccuga

SEQ ID NO: 907586 - RNA, 20 nt, Human
caaaacaauggccagcggga

SEQ ID NO: 907587 - RNA, 18 nt, Human
cacaaguguggaaguaga

SEQ ID NO: 907588 - RNA, 18 nt, Human
cacagaaacccagagcuc

SEQ ID NO: 907589 - RNA, 20 nt, Human
cagagcucacaguuccuuuc

SEQ ID NO: 907590 - RNA, 18 nt, Human
ccuuccacaaguguggaa

SEQ ID NO: 907591 - RNA, 18 nt, Human
gacacagaaacccagagc

SEQ ID NO: 907592 - RNA, 19 nt, Human
gacacagaaacccagagcu

SEQ ID NO: 907593 - RNA, 22 nt, Human
gggacacagaaacccagagcuc

SEQ ID NO: 907594 - RNA, 19 nt, Human
guagagacuacagacugua

SEQ ID NO: 907595 - RNA, 23 nt, Human
gucuccugacugccucucuguug

SEQ ID NO: 907596 - RNA, 24 nt, Human
ucuccugacugccucucuguugua

SEQ ID NO: 907597 - RNA, 22 nt, Human
ugaaacuuacaggaauguacac

SEQ ID NO: 907598 - RNA, 20 nt, Human
uggacaccaugguucuucuu

SEQ ID NO: 907599 - RNA, 25 nt, Human
uguaaauacagaacuuuccagguuc

SEQ ID NO: 907600 - RNA, 20 nt, Human
uugcuggugacaacuguccc

SEQ ID NO: 907601 - RNA, 22 nt, Human
aaaagaaaacagaguauaagaa

SEQ ID NO: 907602 - RNA, 22 nt, Human
aaaauaaucaaaguacaaaaca

SEQ ID NO: 907603 - RNA, 19 nt, Human
aaagauggcugcuuggaua

SEQ ID NO: 907604 - RNA, 24 nt, Human
aaaguacuucugccucagcaucuc

SEQ ID NO: 907605 - RNA, 24 nt, Human
aagcacaaaaggggucaauucugg

SEQ ID NO: 907606 - RNA, 21 nt, Human
acaagagcaugugaaggaagc

SEQ ID NO: 907607 - RNA, 25 nt, Human
acaccugaagcauucuuccagccac

SEQ ID NO: 907608 - RNA, 19 nt, Human
acuucugccucagcaucuc

SEQ ID NO: 907609 - RNA, 22 nt, Human
agaacgaacucugcauugugaa

SEQ ID NO: 907610 - RNA, 19 nt, Human
agcauucuuccagccacuc

SEQ ID NO: 907611 - RNA, 18 nt, Human
aggggucaauucuggagu

SEQ ID NO: 907612 - RNA, 22 nt, Human
auaacaccuuuccuccugcaca

SEQ ID NO: 907613 - RNA, 20 nt, Human
augaacuucugacaccugaa

SEQ ID NO: 907614 - RNA, 18 nt, Human
caaaugaaucauaaaacc

SEQ ID NO: 907615 - RNA, 22 nt, Human
caaugaacuucugacaccugaa

SEQ ID NO: 907616 - RNA, 19 nt, Human
cagccagacagccagcccc

SEQ ID NO: 907617 - RNA, 22 nt, Human
cagcguuugagugagcacucca

SEQ ID NO: 907618 - RNA, 19 nt, Human
cagcuggaaaacaagagca

SEQ ID NO: 907619 - RNA, 21 nt, Human
cauucuguuucaguuugggag

SEQ ID NO: 907620 - RNA, 21 nt, Human
ccagacagccagccccgcacc

SEQ ID NO: 907621 - RNA, 19 nt, Human
ccagccagacagccagccc

SEQ ID NO: 907622 - RNA, 19 nt, Human
ccgcaaccucuccaccaag

SEQ ID NO: 907623 - RNA, 21 nt, Human
ccgcaaccucuccaccaagaa

SEQ ID NO: 907624 - RNA, 20 nt, Human
cggugcgagucacuuugcuu

SEQ ID NO: 907625 - RNA, 20 nt, Human
cuggcaaugaggugugugca

SEQ ID NO: 907626 - RNA, 23 nt, Human
cuuaauauacuguugaaccugga

SEQ ID NO: 907627 - RNA, 18 nt, Human
cuucacggugcgagucac

SEQ ID NO: 907628 - RNA, 18 nt, Human
cuucugugcagacuccgc

SEQ ID NO: 907629 - RNA, 23 nt, Human
gaaaacaagagcaugugaaggaa

SEQ ID NO: 907630 - RNA, 23 nt, Human
gaaagcagcuggaaaacaagagc

SEQ ID NO: 907631 - RNA, 24 nt, Human
gagcuuccggaaagauggcugcuu

SEQ ID NO: 907632 - RNA, 23 nt, Human
gcacaaaaggggucaauucugga

SEQ ID NO: 907633 - RNA, 19 nt, Human
ggauaacaccuuuccuccu

SEQ ID NO: 907634 - RNA, 25 nt, Human
uacuucugccucagcaucucggaga

SEQ ID NO: 907635 - RNA, 22 nt, Human
uagcuacuucauucuguuucag

SEQ ID NO: 907636 - RNA, 20 nt, Human
ucaauucuggcucuuuugga

SEQ ID NO: 907637 - RNA, 25 nt, Human
ucuggcucuuuuggaagaaggcugg

SEQ ID NO: 907638 - RNA, 24 nt, Human
ucuuccagccacucuggcgucacu

SEQ ID NO: 907639 - RNA, 19 nt, Human
ugaaaagcacaaaaggggu

SEQ ID NO: 907640 - RNA, 24 nt, Human
ugaaaagcacaaaaggggucaauu

SEQ ID NO: 907641 - RNA, 25 nt, Human
ugaacuucugacaccugaagcauuc

SEQ ID NO: 907642 - RNA, 25 nt, Human
ugaggugugugcacuucugugcaga

SEQ ID NO: 907643 - RNA, 19 nt, Human
ugugugcacuucugugcag

SEQ ID NO: 907644 - RNA, 19 nt, Human
uucauaguccagcguuuga

SEQ ID NO: 907645 - RNA, 25 nt, Human
uugccuuaaagaguggagaaacgug

SEQ ID NO: 907646 - RNA, 21 nt, Human
uuggauaacaccuuuccuccu

SEQ ID NO: 907647 - RNA, 25 nt, Human
uuggauaacaccuuuccuccugcac

SEQ ID NO: 907648 - RNA, 24 nt, Human
aaaaaacccaaaaccaagaaaaca

SEQ ID NO: 907649 - RNA, 18 nt, Human
aaaacaaaaaccccaagc

SEQ ID NO: 907650 - RNA, 24 nt, Human
aaaacccaaaaccaagaaaacaaa

SEQ ID NO: 907651 - RNA, 23 nt, Human
aaaaggaaaaaagcauccucuga

SEQ ID NO: 907652 - RNA, 24 nt, Human
aaaaugcugggauuacaggcguga

SEQ ID NO: 907653 - RNA, 25 nt, Human
aaacaaacacaaguauacuccccuc

SEQ ID NO: 907654 - RNA, 23 nt, Human
aaacacaaguauacuccccucuc

SEQ ID NO: 907655 - RNA, 18 nt, Human
aaaccaagaaaacaaaaa

SEQ ID NO: 907656 - RNA, 21 nt, Human
aaagacagggucaccaaaccc

SEQ ID NO: 907657 - RNA, 23 nt, Human
aaaggaaaaaagcauccucugag

SEQ ID NO: 907658 - RNA, 24 nt, Human
aaagugcugggauuacagguguga

SEQ ID NO: 907659 - RNA, 20 nt, Human
aaagugcuuuuuccccuccu

SEQ ID NO: 907660 - RNA, 26 nt, Human
aaaugcugggauuacaggcgugaacc

SEQ ID NO: 907661 - RNA, 18 nt, Human
aaccccuuucuuuuccca

SEQ ID NO: 907662 - RNA, 19 nt, Human
aagaaaacaaaaaccccaa

SEQ ID NO: 907663 - RNA, 18 nt, Human
aagacagggucaccaaac

SEQ ID NO: 907664 - RNA, 24 nt, Human
aagcacuucaucuguaagaaacag

SEQ ID NO: 907665 - RNA, 23 nt, Human
aaggaaauaaggaauacuaaaac

SEQ ID NO: 907666 - RNA, 18 nt, Human
aaggagccuggaggagag

SEQ ID NO: 907667 - RNA, 18 nt, Human
aagugcugggauuacagg

SEQ ID NO: 907668 - RNA, 19 nt, Human
aagugcugggauuacaggu

SEQ ID NO: 907669 - RNA, 26 nt, Human
aagugcugggauuacaggugugagcc

SEQ ID NO: 907670 - RNA, 20 nt, Human
aaucaccuccaugcauaccu

SEQ ID NO: 907671 - RNA, 19 nt, Human
aauggcuacugauccacag

SEQ ID NO: 907672 - RNA, 22 nt, Human
acaaaaaccccaagccaagaca

SEQ ID NO: 907673 - RNA, 23 nt, Human
acaaaaaccccaagccaagacaa

SEQ ID NO: 907674 - RNA, 20 nt, Human
acaggcacccaccaccucac

SEQ ID NO: 907675 - RNA, 20 nt, Human
acaggguuucaccacguugg

SEQ ID NO: 907676 - RNA, 24 nt, Human
acaggguuucaccacguuggccag

SEQ ID NO: 907677 - RNA, 24 nt, Human
accacguuggccaggcuggucucg

SEQ ID NO: 907678 - RNA, 24 nt, Human
accauguuggucaggcuggucucg

SEQ ID NO: 907679 - RNA, 25 nt, Human
acccaucuuggccucccaaagugcu

SEQ ID NO: 907680 - RNA, 20 nt, Human
accccaagccaagacaaaaa

SEQ ID NO: 907681 - RNA, 24 nt, Human
acgaaggaaacauaugcaaaaaaa

SEQ ID NO: 907682 - RNA, 24 nt, Human
acucacucuguugcccaggcugga

SEQ ID NO: 907683 - RNA, 27 nt, Human
acucuguugcccaggcuggaguagagu

SEQ ID NO: 907684 - RNA, 19 nt, Human
agaaaacaaaaaccccaag

SEQ ID NO: 907685 - RNA, 20 nt, Human
agaaagacagggucaccaaa

SEQ ID NO: 907686 - RNA, 23 nt, Human
agaaagcacuucaucuguaagaa

SEQ ID NO: 907687 - RNA, 27 nt, Human
agaaauauacagucuuuacauuucuuc

SEQ ID NO: 907688 - RNA, 22 nt, Human
agacagaugcacagcacugauu

SEQ ID NO: 907689 - RNA, 26 nt, Human
agccccuggcuggaucuauguuuccc

SEQ ID NO: 907690 - RNA, 31 nt, Human
agcuaauuuuuuguauuuuuaguagagacaa

SEQ ID NO: 907691 - RNA, 21 nt, Human
agggucauauaagaaagacag

SEQ ID NO: 907692 - RNA, 24 nt, Human
aguggcguggucucagcucacugc

SEQ ID NO: 907693 - RNA, 22 nt, Human
auaaaaaaacccaaaaccaaga

SEQ ID NO: 907694 - RNA, 22 nt, Human
auagagcaaaugugcugugucu

SEQ ID NO: 907695 - RNA, 24 nt, Human
aucucgugaucugcccgccuuggc

SEQ ID NO: 907696 - RNA, 20 nt, Human
augagguuucaccauguugg

SEQ ID NO: 907697 - RNA, 21 nt, Human
augagguuucaccauguuggu

SEQ ID NO: 907698 - RNA, 24 nt, Human
augagguuucaccauguuggucag

SEQ ID NO: 907699 - RNA, 23 nt, Human
auuauacaguccaugaugauuca

SEQ ID NO: 907700 - RNA, 24 nt, Human
auuuuuguauuuuuaguagagaug

SEQ ID NO: 907701 - RNA, 22 nt, Human
caaaaaccccaagccaagacaa

SEQ ID NO: 907702 - RNA, 23 nt, Human
caaaaaccccaagccaagacaaa

SEQ ID NO: 907703 - RNA, 21 nt, Human
caaaaccaagaaaacaaaaac

SEQ ID NO: 907704 - RNA, 22 nt, Human
caaaaccaagaaaacaaaaacc

SEQ ID NO: 907705 - RNA, 24 nt, Human
caaaaccaagaaaacaaaaacccc

SEQ ID NO: 907706 - RNA, 28 nt, Human
caaaaccaagaaaacaaaaaccccaagc

SEQ ID NO: 907707 - RNA, 20 nt, Human
caaaagcacaagcuaaauuu

SEQ ID NO: 907708 - RNA, 24 nt, Human
caaaaugcugggauuacaggcgug

SEQ ID NO: 907709 - RNA, 24 nt, Human
caaagugcugggauuacaggugug

SEQ ID NO: 907710 - RNA, 20 nt, Human
caagcgauucuccugccuca

SEQ ID NO: 907711 - RNA, 22 nt, Human
caagcgauucuccugccucagc

SEQ ID NO: 907712 - RNA, 24 nt, Human
caccacacccagcuaauuuuugua

SEQ ID NO: 907713 - RNA, 21 nt, Human
caccacguuggccaggcuggu

SEQ ID NO: 907714 - RNA, 24 nt, Human
caccacguuggccaggcuggucuc

SEQ ID NO: 907715 - RNA, 27 nt, Human
caccacguuggccaggcuggucucgaa

SEQ ID NO: 907716 - RNA, 21 nt, Human
caccauguuggucaggcuggu

SEQ ID NO: 907717 - RNA, 24 nt, Human
caccauguuggucaggcuggucuc

SEQ ID NO: 907718 - RNA, 22 nt, Human
cacccaucuuggccucccaaag

SEQ ID NO: 907719 - RNA, 23 nt, Human
cacccaucuuggccucccaaagu

SEQ ID NO: 907720 - RNA, 24 nt, Human
cacccaucuuggccucccaaagug

SEQ ID NO: 907721 - RNA, 22 nt, Human
cacgccauucuccugccucagc

SEQ ID NO: 907722 - RNA, 24 nt, Human
cacguuggccaggcuggucucgaa

SEQ ID NO: 907723 - RNA, 22 nt, Human
cacucuguugcccaggcuggag

SEQ ID NO: 907724 - RNA, 21 nt, Human
cacugcaaccucugccuccug

SEQ ID NO: 907725 - RNA, 23 nt, Human
cacugcaaccucugccuccuggg

SEQ ID NO: 907726 - RNA, 20 nt, Human
cacuuggccugauuuacuuu

SEQ ID NO: 907727 - RNA, 19 nt, Human
cagccuccuggguagcugg

SEQ ID NO: 907728 - RNA, 21 nt, Human
caggcacccaccaccucaccc

SEQ ID NO: 907729 - RNA, 24 nt, Human
caggguuucaccacguuggccagg

SEQ ID NO: 907730 - RNA, 22 nt, Human
cagguuucaaaaacaugccgcc

SEQ ID NO: 907731 - RNA, 23 nt, Human
caucuaaaaccuaaauaaccacc

SEQ ID NO: 907732 - RNA, 24 nt, Human
ccaaaaccaagaaaacaaaaaccc

SEQ ID NO: 907733 - RNA, 27 nt, Human
ccaaaaccaagaaaacaaaaacccccu

SEQ ID NO: 907734 - RNA, 20 nt, Human
ccaaaaugcugggauuacag

SEQ ID NO: 907735 - RNA, 22 nt, Human
ccaaaaugcugggauuacaggc

SEQ ID NO: 907736 - RNA, 22 nt, Human
ccaaaaugcugggauuacaggc

SEQ ID NO: 907737 - RNA, 24 nt, Human
ccaaaaugcugggauuacaggcgu

SEQ ID NO: 907738 - RNA, 21 nt, Human
ccaaagugcugggauuacagg

SEQ ID NO: 907739 - RNA, 21 nt, Human
ccaaagugcugggauuacagg

SEQ ID NO: 907740 - RNA, 24 nt, Human
ccaaagugcugggauuacaggugu

SEQ ID NO: 907741 - RNA, 23 nt, Human
ccaccgcgccuggccuucuucca

SEQ ID NO: 907742 - RNA, 24 nt, Human
cccaaaaccaagaaaacaaaaacc

SEQ ID NO: 907743 - RNA, 20 nt, Human
cccagguucacgccauucuc

SEQ ID NO: 907744 - RNA, 20 nt, Human
ccccaagccaagacaaaaac

SEQ ID NO: 907745 - RNA, 23 nt, Human
ccccaaguuaauauacagaaaaa

SEQ ID NO: 907746 - RNA, 19 nt, Human
ccccacccccaguaacuaa

SEQ ID NO: 907747 - RNA, 23 nt, Human
ccccaguaacuaaaauggcuacu

SEQ ID NO: 907748 - RNA, 21 nt, Human
ccccccacccccaguaacuaa

SEQ ID NO: 907749 - RNA, 27 nt, Human
ccgacgguagcgauuauuuucaacauu

SEQ ID NO: 907750 - RNA, 23 nt, Human
ccucaggguugugcacguguucu

SEQ ID NO: 907751 - RNA, 24 nt, Human
ccucccagguucacgccauucucc

SEQ ID NO: 907752 - RNA, 21 nt, Human
ccucccguugggauuacaggc

SEQ ID NO: 907753 - RNA, 19 nt, Human
ccuccgccucccagguuca

SEQ ID NO: 907754 - RNA, 24 nt, Human
ccuccuggguucaagcgauucucc

SEQ ID NO: 907755 - RNA, 25 nt, Human
ccucugaguuaauagagcaaaugug

SEQ ID NO: 907756 - RNA, 19 nt, Human
ccucugccuccuggguuca

SEQ ID NO: 907757 - RNA, 23 nt, Human
ccugaccucagguaauccaccca

SEQ ID NO: 907758 - RNA, 24 nt, Human
ccugaccucagguaauccacccau

SEQ ID NO: 907759 - RNA, 26 nt, Human
ccugaucucgugaucugcccgccuug

SEQ ID NO: 907760 - RNA, 19 nt, Human
ccugccucagccucccguu

SEQ ID NO: 907761 - RNA, 24 nt, Human
ccuggccuucuuccacauuuugug

SEQ ID NO: 907762 - RNA, 23 nt, Human
ccuggguagcuggaauuacaggc

SEQ ID NO: 907763 - RNA, 23 nt, Human
ccuggguucaagcgauucuccug

SEQ ID NO: 907764 - RNA, 26 nt, Human
ccuguuuggcuaagguuuuguguugu

SEQ ID NO: 907765 - RNA, 19 nt, Human
cgccucccagguucacgcc

SEQ ID NO: 907766 - RNA, 21 nt, Human
cuaaauauuaacgauaucccc

SEQ ID NO: 907767 - RNA, 23 nt, Human
cuaauuuuuguauuuuuaguaga

SEQ ID NO: 907768 - RNA, 23 nt, Human
cucacucuguugcccaggcugga

SEQ ID NO: 907769 - RNA, 24 nt, Human
cucacucuguugcccaggcuggag

SEQ ID NO: 907770 - RNA, 24 nt, Human
cucacugcaaccucugccuccugg

SEQ ID NO: 907771 - RNA, 24 nt, Human
cucagguaauccacccaucuuggc

SEQ ID NO: 907772 - RNA, 21 nt, Human
cucccguugggauuacaggca

SEQ ID NO: 907773 - RNA, 24 nt, Human
cuccugaucucgugaucugcccgc

SEQ ID NO: 907774 - RNA, 21 nt, Human
cuccuggguucaagcgauucu

SEQ ID NO: 907775 - RNA, 18 nt, Human
cucgugaucugcccgccu

SEQ ID NO: 907776 - RNA, 19 nt, Human
cugcaaccucugccuccug

SEQ ID NO: 907777 - RNA, 23 nt, Human
cugcaaccucugccuccuggguu

SEQ ID NO: 907778 - RNA, 24 nt, Human
cugcaaccucugccuccuggguuc

SEQ ID NO: 907779 - RNA, 23 nt, Human
cugcagccuccgccucccagguu

SEQ ID NO: 907780 - RNA, 23 nt, Human
cugccucagccuccuggguagcu

SEQ ID NO: 907781 - RNA, 19 nt, Human
cuucacauuucauuaucaa

SEQ ID NO: 907782 - RNA, 23 nt, Human
gaaagcacuucaucuguaagaaa

SEQ ID NO: 907783 - RNA, 21 nt, Human
gaaggagccuggaggagagcu

SEQ ID NO: 907784 - RNA, 24 nt, Human
gaccucagguaauccacccaucuu

SEQ ID NO: 907785 - RNA, 20 nt, Human
gagagcucuggcuucuaaug

SEQ ID NO: 907786 - RNA, 24 nt, Human
gagaugagguuucaccauguuggu

SEQ ID NO: 907787 - RNA, 22 nt, Human
gagguuucaccauguuggucag

SEQ ID NO: 907788 - RNA, 19 nt, Human
gauaauaaggaaauaagga

SEQ ID NO: 907789 - RNA, 22 nt, Human
gauuacaggcgugaaccaaugc

SEQ ID NO: 907790 - RNA, 23 nt, Human
gauuacaggcgugaaccaaugca

SEQ ID NO: 907791 - RNA, 18 nt, Human
gauuacaggugugagcca

SEQ ID NO: 907792 - RNA, 20 nt, Human
gauuacaggugugagccacc

SEQ ID NO: 907793 - RNA, 22 nt, Human
gauuacaggugugagccaccgc

SEQ ID NO: 907794 - RNA, 21 nt, Human
gauucuccugccucagccucc

SEQ ID NO: 907795 - RNA, 21 nt, Human
gcagauuaaaaggaaaaaagc

SEQ ID NO: 907796 - RNA, 22 nt, Human
gcagccuccgccucccagguuc

SEQ ID NO: 907797 - RNA, 24 nt, Human
gcccaggcuggaguagaguggcgu

SEQ ID NO: 907798 - RNA, 22 nt, Human
gccgacgguagcgauuauuuuc

SEQ ID NO: 907799 - RNA, 23 nt, Human
gccucccguugggauuacaggca

SEQ ID NO: 907800 - RNA, 20 nt, Human
gccuggaggagagcucuggc

SEQ ID NO: 907801 - RNA, 24 nt, Human
gcgauucuccugccucagccuccc

SEQ ID NO: 907802 - RNA, 23 nt, Human
gcuggucucgaacuccugaccuc

SEQ ID NO: 907803 - RNA, 19 nt, Human
ggcacccaccaccucaccc

SEQ ID NO: 907804 - RNA, 20 nt, Human
ggcuggaguagaguggcgug

SEQ ID NO: 907805 - RNA, 24 nt, Human
ggcuggucucgaacuccugaccuc

SEQ ID NO: 907806 - RNA, 24 nt, Human
ggcuggucucgaacuccugaucuc

SEQ ID NO: 907807 - RNA, 18 nt, Human
ggcuuaagauauucaggc

SEQ ID NO: 907808 - RNA, 24 nt, Human
ggguagcuggaauuacaggcacgc

SEQ ID NO: 907809 - RNA, 27 nt, Human
gggugguuuguuaggaaagucgggucc

SEQ ID NO: 907810 - RNA, 19 nt, Human
ggucucgaacuccugaccu

SEQ ID NO: 907811 - RNA, 19 nt, Human
guaagaaacagcuuuugca

SEQ ID NO: 907812 - RNA, 24 nt, Human
guaauccacccaucuuggccuccc

SEQ ID NO: 907813 - RNA, 18 nt, Human
guauuugauaaagucaac

SEQ ID NO: 907814 - RNA, 21 nt, Human
gucugccauccuaugcugccu

SEQ ID NO: 907815 - RNA, 22 nt, Human
gugaaaaauuuuuuuagaggcu

SEQ ID NO: 907816 - RNA, 28 nt, Human
uaaaaaaacccaaaaccaagaaaacaaa

SEQ ID NO: 907817 - RNA, 28 nt, Human
uaaaaaaacccaaaaccaagaaaacaaa

SEQ ID NO: 907818 - RNA, 24 nt, Human
uaaaaagauaaaacuccaagucua

SEQ ID NO: 907819 - RNA, 21 nt, Human
uaaaauaaauacacaggcuuu

SEQ ID NO: 907820 - RNA, 18 nt, Human
uaaaauggcuacugaucc

SEQ ID NO: 907821 - RNA, 21 nt, Human
uaaaucaccuccaugcauacc

SEQ ID NO: 907822 - RNA, 18 nt, Human
uaaauuucuuucuguuau

SEQ ID NO: 907823 - RNA, 21 nt, Human
uaacucacagaugucuaacuc

SEQ ID NO: 907824 - RNA, 23 nt, Human
uaagaaacagcuuuugcagaaag

SEQ ID NO: 907825 - RNA, 22 nt, Human
uaagaaagacagggucaccaaa

SEQ ID NO: 907826 - RNA, 19 nt, Human
uaaggaauacuaaaacaua

SEQ ID NO: 907827 - RNA, 24 nt, Human
uaauccacccaucuuggccuccca

SEQ ID NO: 907828 - RNA, 22 nt, Human
uaauucaaggaugucuagaaac

SEQ ID NO: 907829 - RNA, 24 nt, Human
uaauuuuuguauuuuuaguagaga

SEQ ID NO: 907830 - RNA, 24 nt, Human
uaauuuuuuguauuuuuaguagag

SEQ ID NO: 907831 - RNA, 25 nt, Human
uaauuuuuuguauuuuuaguagaga

SEQ ID NO: 907832 - RNA, 23 nt, Human
uacagaaaaacaugauucuaaaa

SEQ ID NO: 907833 - RNA, 24 nt, Human
uacaggcacgcgccaccacaccca

SEQ ID NO: 907834 - RNA, 22 nt, Human
uacaggugugagccaccgcgcc

SEQ ID NO: 907835 - RNA, 23 nt, Human
uacaggugugagccaccgcgccu

SEQ ID NO: 907836 - RNA, 18 nt, Human
uacucucuuacccauguu

SEQ ID NO: 907837 - RNA, 23 nt, Human
uacugauccacaacucuuuaugc

SEQ ID NO: 907838 - RNA, 20 nt, Human
uacuuuauucauuuauuuuu

SEQ ID NO: 907839 - RNA, 22 nt, Human
uagagacaggguuucaccacgu

SEQ ID NO: 907840 - RNA, 22 nt, Human
uagagaugagguuucaccaugu

SEQ ID NO: 907841 - RNA, 22 nt, Human
uagaucaaaauauccuuaaacg

SEQ ID NO: 907842 - RNA, 19 nt, Human
uagcagaaauauacagucu

SEQ ID NO: 907843 - RNA, 19 nt, Human
uaguagagacaggguuuca

SEQ ID NO: 907844 - RNA, 26 nt, Human
uaguagagacaggguuucaccacguu

SEQ ID NO: 907845 - RNA, 24 nt, Human
uaguagagaugagguuucaccaug

SEQ ID NO: 907846 - RNA, 26 nt, Human
uaguagagaugagguuucaccauguu

SEQ ID NO: 907847 - RNA, 20 nt, Human
uauaaaaaaacccaaaacca

SEQ ID NO: 907848 - RNA, 22 nt, Human
uauaaaaaaacccaaaaccaag

SEQ ID NO: 907849 - RNA, 25 nt, Human
uauaaaaaaacccaaaaccaagaaa

SEQ ID NO: 907850 - RNA, 21 nt, Human
uauaaagcagguuucaaaaac

SEQ ID NO: 907851 - RNA, 19 nt, Human
uauacagaaaaacaugauu

SEQ ID NO: 907852 - RNA, 22 nt, Human
uauaggcauaaauugugaauuc

SEQ ID NO: 907853 - RNA, 20 nt, Human
uauaguuuccuucuuccugu

SEQ ID NO: 907854 - RNA, 22 nt, Human
uauauaaaaaaacccaaaacca

SEQ ID NO: 907855 - RNA, 19 nt, Human
ucaagcgauucuccugccu

SEQ ID NO: 907856 - RNA, 22 nt, Human
ucacccagcuaauuuuuuguau

SEQ ID NO: 907857 - RNA, 24 nt, Human
ucacucuguugcccaggcuggagu

SEQ ID NO: 907858 - RNA, 24 nt, Human
ucacugcaaccucugccuccuggg

SEQ ID NO: 907859 - RNA, 25 nt, Human
ucacugcaaccucugccuccugggu

SEQ ID NO: 907860 - RNA, 27 nt, Human
ucacugcaaccucugccuccuggguuc

SEQ ID NO: 907861 - RNA, 19 nt, Human
ucacugcagccuccgccuc

SEQ ID NO: 907862 - RNA, 24 nt, Human
ucacugcagccuccgccucccagg

SEQ ID NO: 907863 - RNA, 25 nt, Human
ucacugcagccuccgccucccaggu

SEQ ID NO: 907864 - RNA, 19 nt, Human
ucagcacaauugaaaaagu

SEQ ID NO: 907865 - RNA, 22 nt, Human
ucagccuccuggguagcuggaa

SEQ ID NO: 907866 - RNA, 18 nt, Human
ucaggguugugcacgugu

SEQ ID NO: 907867 - RNA, 21 nt, Human
ucauuuauuuucuggaauagg

SEQ ID NO: 907868 - RNA, 21 nt, Human
uccacccaucuuggccuccca

SEQ ID NO: 907869 - RNA, 18 nt, Human
uccagaccuuaagggaaa

SEQ ID NO: 907870 - RNA, 24 nt, Human
uccaugcauaccuuaaugcuuucu

SEQ ID NO: 907871 - RNA, 24 nt, Human
ucccaaaaugcugggauuacaggc

SEQ ID NO: 907872 - RNA, 23 nt, Human
ucccaaagugcugggauuacagg

SEQ ID NO: 907873 - RNA, 20 nt, Human
ucccagguucacgccauucu

SEQ ID NO: 907874 - RNA, 21 nt, Human
ucccagguucacgccauucuc

SEQ ID NO: 907875 - RNA, 24 nt, Human
ucccagguucacgccauucuccug

SEQ ID NO: 907876 - RNA, 23 nt, Human
uccccaaagaagucucauccaga

SEQ ID NO: 907877 - RNA, 24 nt, Human
uccccccacccccaguaacuaaaa

SEQ ID NO: 907878 - RNA, 18 nt, Human
ucccguugggauuacagg

SEQ ID NO: 907879 - RNA, 27 nt, Human
uccuaaauauuaacgauaucccccaag

SEQ ID NO: 907880 - RNA, 24 nt, Human
uccuggguagcuggaauuacaggc

SEQ ID NO: 907881 - RNA, 21 nt, Human
uccuggguucaagcgauucuc

SEQ ID NO: 907882 - RNA, 24 nt, Human
uccuggguucaagcgauucuccug

SEQ ID NO: 907883 - RNA, 20 nt, Human
uccuuuguuccuucccccca

SEQ ID NO: 907884 - RNA, 22 nt, Human
ucgcucuuguugcccaggcugg

SEQ ID NO: 907885 - RNA, 23 nt, Human
ucgcucuuguugcccaggcugga

SEQ ID NO: 907886 - RNA, 20 nt, Human
ucuaaaauaaauacacaggc

SEQ ID NO: 907887 - RNA, 19 nt, Human
ucuccugccucagccuccc

SEQ ID NO: 907888 - RNA, 24 nt, Human
ucuccugccucagccuccugggua

SEQ ID NO: 907889 - RNA, 23 nt, Human
ucucgaacuccugaccucaggua

SEQ ID NO: 907890 - RNA, 19 nt, Human
ucucgaacuccugaucucg

SEQ ID NO: 907891 - RNA, 21 nt, Human
ucuggcuucuaaugacccacg

SEQ ID NO: 907892 - RNA, 18 nt, Human
ucuguugcccaggcugga

SEQ ID NO: 907893 - RNA, 22 nt, Human
ucuguugcccaggcuggaguag

SEQ ID NO: 907894 - RNA, 23 nt, Human
ucuuccacauuuauuuauuuauu

SEQ ID NO: 907895 - RNA, 23 nt, Human
ucuuccacauuuauuuauuuauu

SEQ ID NO: 907896 - RNA, 20 nt, Human
ucuuggccucccaaagugcu

SEQ ID NO: 907897 - RNA, 22 nt, Human
ucuuguugcccaggcuggacug

SEQ ID NO: 907898 - RNA, 21 nt, Human
ugaaaaauuuuuuuagaggcu

SEQ ID NO: 907899 - RNA, 18 nt, Human
ugaaacaaacacaaguau

SEQ ID NO: 907900 - RNA, 24 nt, Human
ugaaauaaauaaauaauuuaacca

SEQ ID NO: 907901 - RNA, 18 nt, Human
ugaaggcaaucaaucuac

SEQ ID NO: 907902 - RNA, 21 nt, Human
ugaccucagguaauccaccca

SEQ ID NO: 907903 - RNA, 19 nt, Human
ugagacagagacucacucu

SEQ ID NO: 907904 - RNA, 24 nt, Human
ugagacagagacucacucuguugc

SEQ ID NO: 907905 - RNA, 23 nt, Human
ugagacagaguuucgcucuuguu

SEQ ID NO: 907906 - RNA, 24 nt, Human
ugagguuucaccauguuggucagg

SEQ ID NO: 907907 - RNA, 19 nt, Human
ugcaaaaaucacugacacc

SEQ ID NO: 907908 - RNA, 23 nt, Human
ugcagccuccgccucccagguuc

SEQ ID NO: 907909 - RNA, 21 nt, Human
ugcccaggcuggaguagagug

SEQ ID NO: 907910 - RNA, 21 nt, Human
ugcccaggcuggaguagagug

SEQ ID NO: 907911 - RNA, 24 nt, Human
ugcccaggcuggaguagaguggcg

SEQ ID NO: 907912 - RNA, 22 nt, Human
ugcccgccuuggccucccaaaa

SEQ ID NO: 907913 - RNA, 19 nt, Human
ugccucagccucccguugg

SEQ ID NO: 907914 - RNA, 23 nt, Human
ugccucagccuccuggguagcug

SEQ ID NO: 907915 - RNA, 24 nt, Human
ugccucagccuccuggguagcugg

SEQ ID NO: 907916 - RNA, 23 nt, Human
ugcugggauuacaggcgugaacc

SEQ ID NO: 907917 - RNA, 24 nt, Human
ugcugggauuacaggugugagcca

SEQ ID NO: 907918 - RNA, 21 nt, Human
uggaauuacaggcacgcgcca

SEQ ID NO: 907919 - RNA, 22 nt, Human
uggaauuacaggcacgcgccac

SEQ ID NO: 907920 - RNA, 24 nt, Human
uggaauuacaggcacgcgccacca

SEQ ID NO: 907921 - RNA, 24 nt, Human
uggacugcaauagcacgaucucgg

SEQ ID NO: 907922 - RNA, 24 nt, Human
uggccaggcuggucucgaacuccu

SEQ ID NO: 907923 - RNA, 24 nt, Human
uggcguggucucagcucacugcag

SEQ ID NO: 907924 - RNA, 21 nt, Human
uggcuuaagauauucaggcac

SEQ ID NO: 907925 - RNA, 19 nt, Human
ugggauuacaggcacccac

SEQ ID NO: 907926 - RNA, 21 nt, Human
ugggauuacaggcacccacca

SEQ ID NO: 907927 - RNA, 19 nt, Human
ugggauuacaggcgugaac

SEQ ID NO: 907928 - RNA, 21 nt, Human
ugggauuacaggcgugaacca

SEQ ID NO: 907929 - RNA, 21 nt, Human
ugggauuacaggcgugaacca

SEQ ID NO: 907930 - RNA, 21 nt, Human
ugggauuacaggcgugaacca

SEQ ID NO: 907931 - RNA, 24 nt, Human
ugggauuacaggcgugaaccaaug

SEQ ID NO: 907932 - RNA, 24 nt, Human
ugggauuacaggcgugaaccaaug

SEQ ID NO: 907933 - RNA, 18 nt, Human
ugggauuacaggugugag

SEQ ID NO: 907934 - RNA, 19 nt, Human
ugggauuacaggugugagc

SEQ ID NO: 907935 - RNA, 21 nt, Human
ugggauuacaggugugagcca

SEQ ID NO: 907936 - RNA, 22 nt, Human
ugggauuacaggugugagccac

SEQ ID NO: 907937 - RNA, 23 nt, Human
ugggauuacaggugugagccacc

SEQ ID NO: 907938 - RNA, 24 nt, Human
ugggauuacaggugugagccaccg

SEQ ID NO: 907939 - RNA, 23 nt, Human
uggguucaagcgauucuccugcc

SEQ ID NO: 907940 - RNA, 24 nt, Human
uggucaggcuggucucgaacuccu

SEQ ID NO: 907941 - RNA, 25 nt, Human
uguaaauuucuuucuguuauaguuu

SEQ ID NO: 907942 - RNA, 24 nt, Human
uguagggucauauaagaaagacag

SEQ ID NO: 907943 - RNA, 27 nt, Human
ugucuagaaacaaaauaaucugauugc

SEQ ID NO: 907944 - RNA, 30 nt, Human
uguguguguuuuuuuucauuuuguucuuuu

SEQ ID NO: 907945 - RNA, 20 nt, Human
uguugcccaggcuggacugc

SEQ ID NO: 907946 - RNA, 22 nt, Human
uguuguugcucuuuuucuaagu

SEQ ID NO: 907947 - RNA, 18 nt, Human
uuaguagagacaggguuu

SEQ ID NO: 907948 - RNA, 18 nt, Human
uuaguagagaugagguuu

SEQ ID NO: 907949 - RNA, 22 nt, Human
uuaguagagaugagguuucacc

SEQ ID NO: 907950 - RNA, 24 nt, Human
uuaguagagaugagguuucaccau

SEQ ID NO: 907951 - RNA, 20 nt, Human
uuauuuauuuauuuauuuuu

SEQ ID NO: 907952 - RNA, 24 nt, Human
uucaagacgaacuucaauguuuuu

SEQ ID NO: 907953 - RNA, 21 nt, Human
uucaagcgauucuccugccuc

SEQ ID NO: 907954 - RNA, 23 nt, Human
uucaagcgauucuccugccucag

SEQ ID NO: 907955 - RNA, 24 nt, Human
uucaagcgauucuccugccucagc

SEQ ID NO: 907956 - RNA, 20 nt, Human
uuccccccacccccaguaac

SEQ ID NO: 907957 - RNA, 24 nt, Human
uucgcucuuguugcccaggcugga

SEQ ID NO: 907958 - RNA, 24 nt, Human
uugaaaguguaaauuucuuucugu

SEQ ID NO: 907959 - RNA, 25 nt, Human
uugagacagagacucacucuguugc

SEQ ID NO: 907960 - RNA, 18 nt, Human
uugcccaggcuggacugc

SEQ ID NO: 907961 - RNA, 21 nt, Human
uugcccaggcuggaguagagu

SEQ ID NO: 907962 - RNA, 18 nt, Human
uuggccucccaaaaugcu

SEQ ID NO: 907963 - RNA, 19 nt, Human
uugggaucuguaauggucu

SEQ ID NO: 907964 - RNA, 22 nt, Human
uugggaucuguaauggucuuuc

SEQ ID NO: 907965 - RNA, 23 nt, Human
uuguugcccaggcuggacugcaa

SEQ ID NO: 907966 - RNA, 20 nt, Human
uuuauuuuuugagacagagu

SEQ ID NO: 907967 - RNA, 21 nt, Human
uuucaccacguuggccaggcu

SEQ ID NO: 907968 - RNA, 24 nt, Human
uuucaccauguuggucaggcuggu

SEQ ID NO: 907969 - RNA, 24 nt, Human
uuucgcucuuguugcccaggcugg

SEQ ID NO: 907970 - RNA, 20 nt, Human
uuuguuuuuuugagacagag

SEQ ID NO: 907971 - RNA, 24 nt, Human
uuuuuaguagagacaggguuucac

SEQ ID NO: 907972 - RNA, 24 nt, Human
uuuuuaguagagaugagguuucac

SEQ ID NO: 907973 - RNA, 20 nt, Human
uuuuuguauuuuuaguagag

SEQ ID NO: 907974 - RNA, 21 nt, Human
uuuuuguauuuuuaguagaga

SEQ ID NO: 907975 - RNA, 23 nt, Human
aaaaagcuuacuuuagcacucau

SEQ ID NO: 907976 - RNA, 23 nt, Human
aauaccagauugaaugacuaccu

SEQ ID NO: 907977 - RNA, 21 nt, Human
acaaaccccacacaucuguac

SEQ ID NO: 907978 - RNA, 24 nt, Human
acacaacacacacccagucauaaa

SEQ ID NO: 907979 - RNA, 19 nt, Human
accagauugaaugacuacc

SEQ ID NO: 907980 - RNA, 21 nt, Human
auacacacaacacacacccag

SEQ ID NO: 907981 - RNA, 21 nt, Human
caaccaagauauauaauaacu

SEQ ID NO: 907982 - RNA, 24 nt, Human
caaguuaaauauaaacauaaagca

SEQ ID NO: 907983 - RNA, 26 nt, Human
cacugaaacuucaaauauaucuuaca

SEQ ID NO: 907984 - RNA, 24 nt, Human
cagaaauucucucuaaaaacauua

SEQ ID NO: 907985 - RNA, 19 nt, Human
ccacacaucuguacaauaa

SEQ ID NO: 907986 - RNA, 25 nt, Human
ccuaaacacuggaaaagaaaaaaaa

SEQ ID NO: 907987 - RNA, 22 nt, Human
ccuauuggcaaagggcccuaaa

SEQ ID NO: 907988 - RNA, 20 nt, Human
cugguacaauacaacaaccu

SEQ ID NO: 907989 - RNA, 20 nt, Human
cuucaaauauaucuuacaca

SEQ ID NO: 907990 - RNA, 21 nt, Human
gaaagucugugcucauaaaaa

SEQ ID NO: 907991 - RNA, 20 nt, Human
gccggaggacaggggccgcg

SEQ ID NO: 907992 - RNA, 20 nt, Human
gccuagacauuccaguaaga

SEQ ID NO: 907993 - RNA, 20 nt, Human
guuuguacaaaaauacaagu

SEQ ID NO: 907994 - RNA, 29 nt, Human
uacauacacacaacacacacccagucaua

SEQ ID NO: 907995 - RNA, 19 nt, Human
uauaauaacuguacagugc

SEQ ID NO: 907996 - RNA, 23 nt, Human
uaugcaaaucuguuuuaugugau

SEQ ID NO: 907997 - RNA, 24 nt, Human
uauguauuacauacacacaacaca

SEQ ID NO: 907998 - RNA, 26 nt, Human
uauguccauaaaccaaccacccaagg

SEQ ID NO: 907999 - RNA, 24 nt, Human
uauuacauacacacaacacacacc

SEQ ID NO: 908000 - RNA, 19 nt, Human
ucgggccggaggacagggg

SEQ ID NO: 908001 - RNA, 19 nt, Human
ucuuguuuguacaaaaaua

SEQ ID NO: 908002 - RNA, 18 nt, Human
ugaaaaguuggaaagacu

SEQ ID NO: 908003 - RNA, 21 nt, Human
ugaaaaguuggaaagacuguu

SEQ ID NO: 908004 - RNA, 18 nt, Human
ugaaagggcaguaugucc

SEQ ID NO: 908005 - RNA, 19 nt, Human
ugaaugacuaccuauuggc

SEQ ID NO: 908006 - RNA, 20 nt, Human
ugguacaauacaacaaccaa

SEQ ID NO: 908007 - RNA, 23 nt, Human
ugguacaauacaacaaccaagau

SEQ ID NO: 908008 - RNA, 22 nt, Human
uguaaguauuuuacauuuaugu

SEQ ID NO: 908009 - RNA, 22 nt, Human
uguaauguaucauaaaacacaa

SEQ ID NO: 908010 - RNA, 24 nt, Human
uguauuacauacacacaacacaca

SEQ ID NO: 908011 - RNA, 19 nt, Human
ugugaaaagaucaauacca

SEQ ID NO: 908012 - RNA, 23 nt, Human
uuacauacacacaacacacaccc

SEQ ID NO: 908013 - RNA, 21 nt, Human
uuugagaucaccuaaacacug

SEQ ID NO: 908014 - RNA, 23 nt, Human
uuuuacauuuauguauauauucu

SEQ ID NO: 908015 - RNA, 22 nt, Human
caaaaaaacgaacugaaguggg

SEQ ID NO: 908016 - RNA, 23 nt, Human
cacgggccuggcugaggagcagg

SEQ ID NO: 908017 - RNA, 24 nt, Human
cagcagacacaugagccggcgcca

SEQ ID NO: 908018 - RNA, 21 nt, Human
cgauacauggcagcucacgca

SEQ ID NO: 908019 - RNA, 19 nt, Human
cgccacgggccuggcugag

SEQ ID NO: 908020 - RNA, 19 nt, Human
cgggccuggcugaggagca

SEQ ID NO: 908021 - RNA, 22 nt, Human
cuggcgauacauggcagcucac

SEQ ID NO: 908022 - RNA, 19 nt, Human
gcucaugggcaccaccacc

SEQ ID NO: 908023 - RNA, 21 nt, Human
ggcacguucaguaacaaagca

SEQ ID NO: 908024 - RNA, 22 nt, Human
uaccauaaaauuacugucaaaa

SEQ ID NO: 908025 - RNA, 21 nt, Human
uagaacagacaauucaauuca

SEQ ID NO: 908026 - RNA, 19 nt, Human
ucugugcccaguccuagaa

SEQ ID NO: 908027 - RNA, 19 nt, Human
uggcagcucacgcagcgcu

SEQ ID NO: 908028 - RNA, 19 nt, Human
uuuccugcuuaucccccaa

SEQ ID NO: 908029 - RNA, 18 nt, Human
agggccucuucaaggggu

SEQ ID NO: 908030 - RNA, 20 nt, Human
cuucaagggguccagaagag

SEQ ID NO: 908031 - RNA, 21 nt, Human
gguccagaagagugggggccc

SEQ ID NO: 908032 - RNA, 18 nt, Human
ucuccagggagacaggug

SEQ ID NO: 908033 - RNA, 22 nt, Human
uuuuuuuuuuugcagggcagcg

SEQ ID NO: 908034 - RNA, 19 nt, Human
uuuuuuuuuuuugcagggc

SEQ ID NO: 908035 - RNA, 21 nt, Human
uuuuuuuuuuuuuuuuugcag

SEQ ID NO: 908036 - RNA, 23 nt, Human
uuuuuuuuuuuuuuuuugcaggg

SEQ ID NO: 908037 - RNA, 27 nt, Human
aaagaaaaaaauauaauaaaugucuua

SEQ ID NO: 908038 - RNA, 18 nt, Human
aacucuucuccuucucuu

SEQ ID NO: 908039 - RNA, 23 nt, Human
aaguguagaaauuuauuugaacc

SEQ ID NO: 908040 - RNA, 24 nt, Human
aaguguagaaauuuauuugaacca

SEQ ID NO: 908041 - RNA, 22 nt, Human
accaaucaccacgaagucucaa

SEQ ID NO: 908042 - RNA, 25 nt, Human
acuguaacacagagaugucacucug

SEQ ID NO: 908043 - RNA, 23 nt, Human
agguuaucccaaaaaaagggaaa

SEQ ID NO: 908044 - RNA, 23 nt, Human
aguaacuaacgagaaucucuuga

SEQ ID NO: 908045 - RNA, 25 nt, Human
auagcaacagacguggcagcacguc

SEQ ID NO: 908046 - RNA, 23 nt, Human
aucccaaaaaaagggaaaaacuc

SEQ ID NO: 908047 - RNA, 18 nt, Human
caaacaugcaaauggcaa

SEQ ID NO: 908048 - RNA, 18 nt, Human
cagcaagguaauauggua

SEQ ID NO: 908049 - RNA, 21 nt, Human
caggacuuauuauuaagaugg

SEQ ID NO: 908050 - RNA, 23 nt, Human
caucuucaccacaagagagaaaa

SEQ ID NO: 908051 - RNA, 22 nt, Human
ccaaaaaaagggaaaaacucca

SEQ ID NO: 908052 - RNA, 25 nt, Human
ccaaaaaaagggaaaaacuccaaaa

SEQ ID NO: 908053 - RNA, 24 nt, Human
ccaacagcaagguaauaugguauu

SEQ ID NO: 908054 - RNA, 25 nt, Human
ccaaucaccacgaagucucaaacgc

SEQ ID NO: 908055 - RNA, 20 nt, Human
cccagcauucgccgaucaua

SEQ ID NO: 908056 - RNA, 20 nt, Human
ccugcauaauucccuguagc

SEQ ID NO: 908057 - RNA, 22 nt, Human
cucauaaguaguuccauaauga

SEQ ID NO: 908058 - RNA, 22 nt, Human
cuccuucucuccuucccgcaga

SEQ ID NO: 908059 - RNA, 19 nt, Human
cucuccggccuugcucugg

SEQ ID NO: 908060 - RNA, 18 nt, Human
cugaccaaucaccacgaa

SEQ ID NO: 908061 - RNA, 26 nt, Human
cugaccaaucaccacgaagucucaaa

SEQ ID NO: 908062 - RNA, 18 nt, Human
gacguggcagcacgucga

SEQ ID NO: 908063 - RNA, 27 nt, Human
uaaaacgggcaaccauuccaguagucc

SEQ ID NO: 908064 - RNA, 21 nt, Human
uaacaguuccaucuucaccac

SEQ ID NO: 908065 - RNA, 21 nt, Human
uagaaagcaacaaacaugcaa

SEQ ID NO: 908066 - RNA, 18 nt, Human
uagguuaucccaaaaaaa

SEQ ID NO: 908067 - RNA, 18 nt, Human
ucagaacaacccaacagc

SEQ ID NO: 908068 - RNA, 24 nt, Human
ucagaacauuuaagugcuugccaa

SEQ ID NO: 908069 - RNA, 20 nt, Human
uccaucuucaccacaagaga

SEQ ID NO: 908070 - RNA, 19 nt, Human
ucccucgaccugcauaauu

SEQ ID NO: 908071 - RNA, 21 nt, Human
ucccuguagcucuugugccca

SEQ ID NO: 908072 - RNA, 21 nt, Human
ucuccuucucuccuucccgca

SEQ ID NO: 908073 - RNA, 25 nt, Human
ucugaccaaucaccacgaagucuca

SEQ ID NO: 908074 - RNA, 20 nt, Human
ugaccaucuucacuguaacc

SEQ ID NO: 908075 - RNA, 18 nt, Human
ugagcugucagaacaacc

SEQ ID NO: 908076 - RNA, 20 nt, Human
ugcaaauggcaaguguagaa

SEQ ID NO: 908077 - RNA, 22 nt, Human
uggcagcacgucgacaguuaau

SEQ ID NO: 908078 - RNA, 21 nt, Human
ugggaaggaauaaaacgggca

SEQ ID NO: 908079 - RNA, 22 nt, Human
ugggaaggaauaaaacgggcaa

SEQ ID NO: 908080 - RNA, 18 nt, Human
ugucgcaacucuucuccu

SEQ ID NO: 908081 - RNA, 19 nt, Human
uuagggaaaauauugcacu

SEQ ID NO: 908082 - RNA, 19 nt, Human
uucaugcacacaaucauuc

SEQ ID NO: 908083 - RNA, 20 nt, Human
uucaugcacacaaucauucc

SEQ ID NO: 908084 - RNA, 25 nt, Human
uugaucuuaaaacaaccaguuucuu

SEQ ID NO: 908085 - RNA, 26 nt, Human
uugaucuuaaaacaaccaguuucuuu

SEQ ID NO: 908086 - RNA, 21 nt, Human
uugucgcaacucuucuccuuc

SEQ ID NO: 908087 - RNA, 21 nt, Human
uuugaugcguguaucaaacca

SEQ ID NO: 908088 - RNA, 22 nt, Human
uuuuuuuuuuuuuugaucuuaa

SEQ ID NO: 908089 - RNA, 18 nt, Human
uuuuuuuuuuuuuuuuug

SEQ ID NO: 908090 - RNA, 18 nt, Human
aaaaaccauugggggugg

SEQ ID NO: 908091 - RNA, 18 nt, Human
aaagaaaagaauaaagag

SEQ ID NO: 908092 - RNA, 23 nt, Human
aauauuuuuaauaaugcacauua

SEQ ID NO: 908093 - RNA, 19 nt, Human
acacuauggguaaacaaac

SEQ ID NO: 908094 - RNA, 22 nt, Human
acagaacacuauggguaaacaa

SEQ ID NO: 908095 - RNA, 23 nt, Human
acuaagcaauaacuacacagaac

SEQ ID NO: 908096 - RNA, 25 nt, Human
agaaaacaaaagcuaauguaaaaag

SEQ ID NO: 908097 - RNA, 18 nt, Human
aucaaaaaaggccacaac

SEQ ID NO: 908098 - RNA, 22 nt, Human
caaaaaaggccacaacaguuaa

SEQ ID NO: 908099 - RNA, 21 nt, Human
caauccaaacauacaauagcu

SEQ ID NO: 908100 - RNA, 22 nt, Human
cacaaaccaaaaguuuauaaac

SEQ ID NO: 908101 - RNA, 22 nt, Human
cagaacacuauggguaaacaaa

SEQ ID NO: 908102 - RNA, 21 nt, Human
ccucuuggucguucgcucgcg

SEQ ID NO: 908103 - RNA, 20 nt, Human
cuagcagucgaacacccucu

SEQ ID NO: 908104 - RNA, 20 nt, Human
gaaaaaccauugggggugga

SEQ ID NO: 908105 - RNA, 22 nt, Human
gaagagaaaagaucaaauauga

SEQ ID NO: 908106 - RNA, 19 nt, Human
gcacauuaaaaaaaaguau

SEQ ID NO: 908107 - RNA, 20 nt, Human
gccuagacauuugauuggaa

SEQ ID NO: 908108 - RNA, 25 nt, Human
gcucuagcagucgaacacccucuug

SEQ ID NO: 908109 - RNA, 25 nt, Human
uaaaaaaaaguauucaucuuacaaa

SEQ ID NO: 908110 - RNA, 22 nt, Human
uaccauaaucaaagaaaagaau

SEQ ID NO: 908111 - RNA, 24 nt, Human
uacuuuuggccuuaaacaguacca

SEQ ID NO: 908112 - RNA, 20 nt, Human
uagcagucgaacacccucuu

SEQ ID NO: 908113 - RNA, 22 nt, Human
uaucaaauuagaucugcuaaua

SEQ ID NO: 908114 - RNA, 18 nt, Human
uaugaucaaaaaaggccc

SEQ ID NO: 908115 - RNA, 18 nt, Human
ucaaacaagccuagacau

SEQ ID NO: 908116 - RNA, 20 nt, Human
ucccauggugaacauguuua

SEQ ID NO: 908117 - RNA, 19 nt, Human
ugaaguaaaaacugaacau

SEQ ID NO: 908118 - RNA, 20 nt, Human
ugaaguaaauaaaaagagug

SEQ ID NO: 908119 - RNA, 23 nt, Human
ugaaguucacaaaccaaaaguuu

SEQ ID NO: 908120 - RNA, 25 nt, Human
ugaaguucacaaaccaaaaguuuau

SEQ ID NO: 908121 - RNA, 22 nt, Human
ugaucaaaaaaggccacaacag

SEQ ID NO: 908122 - RNA, 23 nt, Human
uguaaaagcugaguugaaacuaa

SEQ ID NO: 908123 - RNA, 20 nt, Human
uuccaaauaagcauaccaua

SEQ ID NO: 908124 - RNA, 19 nt, Human
uucucauauaaguaucuua

SEQ ID NO: 908125 - RNA, 18 nt, Human
uugaaacuaaaagaucua

SEQ ID NO: 908126 - RNA, 23 nt, Human
uugaaacuaaaagaucuauaaaa

SEQ ID NO: 908127 - RNA, 23 nt, Human
uuggccuuaaacaguaccaacuc

SEQ ID NO: 908128 - RNA, 24 nt, Human
uuggccuuaaacaguaccaacucu

SEQ ID NO: 908129 - RNA, 19 nt, Human
uuugacaguuucacugacu

SEQ ID NO: 908130 - RNA, 23 nt, Human
uuuuuuuuuuuuuuuuaagcuuu

SEQ ID NO: 908131 - RNA, 25 nt, Human
uuuuuuuuuuuuuuuuuuuuuaagg

SEQ ID NO: 908132 - RNA, 20 nt, Human
auggugguggcggcggcggc

SEQ ID NO: 908133 - RNA, 21 nt, Human
caccccccuccccgcccccgc

SEQ ID NO: 908134 - RNA, 22 nt, Human
caccccccuccccgcccccgcc

SEQ ID NO: 908135 - RNA, 20 nt, Human
cagggucucccucgggcucu

SEQ ID NO: 908136 - RNA, 19 nt, Human
ccccacgcccucccgcccc

SEQ ID NO: 908137 - RNA, 26 nt, Human
ccccacgcccucccgcccccuucgcc

SEQ ID NO: 908138 - RNA, 25 nt, Human
cccccacgcccucccgcccccuucg

SEQ ID NO: 908139 - RNA, 21 nt, Human
cccccacggccucuuuuccgc

SEQ ID NO: 908140 - RNA, 21 nt, Human
cccccuagcgcgccgcucgcc

SEQ ID NO: 908141 - RNA, 21 nt, Human
ccccgcccccgcccucccccu

SEQ ID NO: 908142 - RNA, 19 nt, Human
ccccuucgcccaccccccu

SEQ ID NO: 908143 - RNA, 18 nt, Human
cccgcccucccccuagcg

SEQ ID NO: 908144 - RNA, 22 nt, Human
cccucccgcccccuucgcccac

SEQ ID NO: 908145 - RNA, 24 nt, Human
cccuucgcccaccccccuccccgc

SEQ ID NO: 908146 - RNA, 23 nt, Human
cccuugguucuccugcccgggac

SEQ ID NO: 908147 - RNA, 21 nt, Human
ccgcccccuucgcccaccccc

SEQ ID NO: 908148 - RNA, 19 nt, Human
ccgcugccgccgccgccac

SEQ ID NO: 908149 - RNA, 18 nt, Human
ccgcugccgcugccgccg

SEQ ID NO: 908150 - RNA, 21 nt, Human
ccgcugccgcugccgccgccg

SEQ ID NO: 908151 - RNA, 19 nt, Human
ccuccccccacgcccuccc

SEQ ID NO: 908152 - RNA, 20 nt, Human
ccuccccgcccccgcccucc

SEQ ID NO: 908153 - RNA, 26 nt, Human
ccucccgcccccuucgcccacccccc

SEQ ID NO: 908154 - RNA, 18 nt, Human
cgcccccuucgcccaccc

SEQ ID NO: 908155 - RNA, 18 nt, Human
cgcugggaggccccccac

SEQ ID NO: 908156 - RNA, 21 nt, Human
cggcggcagcggcggcagcug

SEQ ID NO: 908157 - RNA, 21 nt, Human
cgggccccgcgcgcugauggu

SEQ ID NO: 908158 - RNA, 19 nt, Human
cuccccgcccccgcccucc

SEQ ID NO: 908159 - RNA, 19 nt, Human
cucgcucuggccgggcccc

SEQ ID NO: 908160 - RNA, 27 nt, Human
cugauggugguggcggcggcggcagcg

SEQ ID NO: 908161 - RNA, 22 nt, Human
cugccagcgcugggaggccccc

SEQ ID NO: 908162 - RNA, 19 nt, Human
cugccgcugccgccgccgc

SEQ ID NO: 908163 - RNA, 23 nt, Human
cugcggacauguuccucgggacu

SEQ ID NO: 908164 - RNA, 21 nt, Human
cugcucccccaggagggaggg

SEQ ID NO: 908165 - RNA, 20 nt, Human
cugcuccgcgcccuggcugc

SEQ ID NO: 908166 - RNA, 18 nt, Human
cuucgcccaccccccucc

SEQ ID NO: 908167 - RNA, 21 nt, Human
cuucgcccaccccccuccccg

SEQ ID NO: 908168 - RNA, 21 nt, Human
gacccuccccccacgcccucc

SEQ ID NO: 908169 - RNA, 21 nt, Human
gagagcgagacccucccccca

SEQ ID NO: 908170 - RNA, 23 nt, Human
gaguuucuaagaagcagaggggg

SEQ ID NO: 908171 - RNA, 20 nt, Human
gauggugguggcggcggcgg

SEQ ID NO: 908172 - RNA, 18 nt, Human
gcuccgcgcccuggcugc

SEQ ID NO: 908173 - RNA, 24 nt, Human
gcugauggugguggcggcggcuuu

SEQ ID NO: 908174 - RNA, 18 nt, Human
gcugggaggccccccacg

SEQ ID NO: 908175 - RNA, 18 nt, Human
ggacuaggugugcgugcc

SEQ ID NO: 908176 - RNA, 21 nt, Human
ggacuaggugugcgugccggc

SEQ ID NO: 908177 - RNA, 19 nt, Human
ggaggccccccacggccuc

SEQ ID NO: 908178 - RNA, 19 nt, Human
ggcagcugcucccccagga

SEQ ID NO: 908179 - RNA, 20 nt, Human
ggccucuuuuccgcgucgac

SEQ ID NO: 908180 - RNA, 18 nt, Human
ggcggcagcggcggcagc

SEQ ID NO: 908181 - RNA, 23 nt, Human
ggcggcggcagcggcggcagcug

SEQ ID NO: 908182 - RNA, 20 nt, Human
guggcggcggcggcagcggc

SEQ ID NO: 908183 - RNA, 24 nt, Human
guggcggcggcggcagcggcggca

SEQ ID NO: 908184 - RNA, 20 nt, Human
gugguggcggcggcggcagc

SEQ ID NO: 908185 - RNA, 21 nt, Human
uccccgcccccgcccuccccc

SEQ ID NO: 908186 - RNA, 22 nt, Human
ucccgcccccuucgcccacccc

SEQ ID NO: 908187 - RNA, 21 nt, Human
ucccuugguucuccugcccga

SEQ ID NO: 908188 - RNA, 19 nt, Human
uccgcugccgcugccgccg

SEQ ID NO: 908189 - RNA, 18 nt, Human
ugauggugguggcggcgg

SEQ ID NO: 908190 - RNA, 23 nt, Human
ugcccgggacucugcuccgcgcc

SEQ ID NO: 908191 - RNA, 18 nt, Human
uggcggcggcggcagcgg

SEQ ID NO: 908192 - RNA, 21 nt, Human
uggcugcggacauguuccucg

SEQ ID NO: 908193 - RNA, 20 nt, Human
ugguagucgggagagcgagg

SEQ ID NO: 908194 - RNA, 20 nt, Human
ugguggcggcggcggcagcg

SEQ ID NO: 908195 - RNA, 18 nt, Human
uggugguggcggcggcgg

SEQ ID NO: 908196 - RNA, 18 nt, Human
uggugguggcggcggcgg

SEQ ID NO: 908197 - RNA, 23 nt, Human
uucgcccaccccccuccccgccc

SEQ ID NO: 908198 - RNA, 20 nt, Human
aaaccaggacaagauaagga

SEQ ID NO: 908199 - RNA, 22 nt, Human
aaaccgaggcggauccaagaga

SEQ ID NO: 908200 - RNA, 22 nt, Human
aagaaaggaaaccaggacaaga

SEQ ID NO: 908201 - RNA, 18 nt, Human
aaggcuccggugcccucc

SEQ ID NO: 908202 - RNA, 20 nt, Human
acaagaaaggaaaccaggac

SEQ ID NO: 908203 - RNA, 22 nt, Human
accugcacgugguggugguggg

SEQ ID NO: 908204 - RNA, 20 nt, Human
acgaagcccaugaaagggcc

SEQ ID NO: 908205 - RNA, 21 nt, Human
agaaaggaaaccaggacaaga

SEQ ID NO: 908206 - RNA, 21 nt, Human
agagggcaggugcgggggucc

SEQ ID NO: 908207 - RNA, 24 nt, Human
agagggcaggugcggggguccugg

SEQ ID NO: 908208 - RNA, 20 nt, Human
agagugaagagacggauggg

SEQ ID NO: 908209 - RNA, 20 nt, Human
agauggucacaagaaaggaa

SEQ ID NO: 908210 - RNA, 20 nt, Human
aggcgccuggaagguggggg

SEQ ID NO: 908211 - RNA, 21 nt, Human
aggcgggugguggggggacag

SEQ ID NO: 908212 - RNA, 18 nt, Human
aggugggggcuggcucac

SEQ ID NO: 908213 - RNA, 19 nt, Human
caacauagcaucccagagc

SEQ ID NO: 908214 - RNA, 22 nt, Human
caaguucccccauucucugcuc

SEQ ID NO: 908215 - RNA, 23 nt, Human
caaguucccccauucucugcucu

SEQ ID NO: 908216 - RNA, 23 nt, Human
cacaaccuccccuaugagguagg

SEQ ID NO: 908217 - RNA, 24 nt, Human
cacccuuaccucccgugcuagccu

SEQ ID NO: 908218 - RNA, 18 nt, Human
cagagcuccaccugcacg

SEQ ID NO: 908219 - RNA, 18 nt, Human
ccagggcgaaggcgccug

SEQ ID NO: 908220 - RNA, 23 nt, Human
ccauaccacccuuaccucccgug

SEQ ID NO: 908221 - RNA, 19 nt, Human
ccaugaaagggccugcgac

SEQ ID NO: 908222 - RNA, 18 nt, Human
ccccauucucugcucucc

SEQ ID NO: 908223 - RNA, 22 nt, Human
ccgcccccgccccaucccauac

SEQ ID NO: 908224 - RNA, 20 nt, Human
ccgcuccccagcccgccaaa

SEQ ID NO: 908225 - RNA, 21 nt, Human
ccucccgucccggcugggggc

SEQ ID NO: 908226 - RNA, 18 nt, Human
ccucccgugcuagccuac

SEQ ID NO: 908227 - RNA, 22 nt, Human
ccuccugccuugacccccaggu

SEQ ID NO: 908228 - RNA, 23 nt, Human
ccucggcccaccgcuugccgccc

SEQ ID NO: 908229 - RNA, 20 nt, Human
ccucggggucgcugcccucc

SEQ ID NO: 908230 - RNA, 21 nt, Human
ccugcgacagagugaagagac

SEQ ID NO: 908231 - RNA, 21 nt, Human
ccuggaaggugggggcuggcu

SEQ ID NO: 908232 - RNA, 22 nt, Human
cgccccaacauagcaucccagg

SEQ ID NO: 908233 - RNA, 20 nt, Human
cgcugcccucccgucccggc

SEQ ID NO: 908234 - RNA, 18 nt, Human
cggugcccuccccccacc

SEQ ID NO: 908235 - RNA, 22 nt, Human
cucaagacuucccaccacacuc

SEQ ID NO: 908236 - RNA, 19 nt, Human
cucccgucccggcuggggg

SEQ ID NO: 908237 - RNA, 19 nt, Human
cuccggugcccucccccca

SEQ ID NO: 908238 - RNA, 20 nt, Human
cuccuccgcucaagacuucc

SEQ ID NO: 908239 - RNA, 22 nt, Human
cuccugccuugacccccagguc

SEQ ID NO: 908240 - RNA, 21 nt, Human
cucugcucuccuauugcccua

SEQ ID NO: 908241 - RNA, 19 nt, Human
cuggguggggucugguugg

SEQ ID NO: 908242 - RNA, 18 nt, Human
cuggugccagagggcagg

SEQ ID NO: 908243 - RNA, 18 nt, Human
gacaggaaaccgaggcgg

SEQ ID NO: 908244 - RNA, 22 nt, Human
gagaagggcagauccccuccuc

SEQ ID NO: 908245 - RNA, 20 nt, Human
gagaugcucucugcauagga

SEQ ID NO: 908246 - RNA, 23 nt, Human
gagggcaggugcggggguccugg

SEQ ID NO: 908247 - RNA, 22 nt, Human
gcaggugcggggguccuggggc

SEQ ID NO: 908248 - RNA, 20 nt, Human
ggacaggaaaccgaggcgga

SEQ ID NO: 908249 - RNA, 18 nt, Human
ggggaaaccgaggcccag

SEQ ID NO: 908250 - RNA, 20 nt, Human
ggggaggggcaggugggccu

SEQ ID NO: 908251 - RNA, 21 nt, Human
gggugacuugcccaaaguccu

SEQ ID NO: 908252 - RNA, 19 nt, Human
gguggaauuuguacagcac

SEQ ID NO: 908253 - RNA, 21 nt, Human
gugacuauuugcuuuacauua

SEQ ID NO: 908254 - RNA, 23 nt, Human
gugcggggguccuggggcgggug

SEQ ID NO: 908255 - RNA, 23 nt, Human
guucccccauucucugcucuccu

SEQ ID NO: 908256 - RNA, 21 nt, Human
uaagcaaagcuacaauauaga

SEQ ID NO: 908257 - RNA, 23 nt, Human
uagcauucuucacucuacaaaac

SEQ ID NO: 908258 - RNA, 24 nt, Human
uagggcacccacaaagauggcaga

SEQ ID NO: 908259 - RNA, 24 nt, Human
ucacaagaaaggaaaccaggacaa

SEQ ID NO: 908260 - RNA, 19 nt, Human
ucaccuacuauguaugaug

SEQ ID NO: 908261 - RNA, 19 nt, Human
ucacugggcggucuuccgc

SEQ ID NO: 908262 - RNA, 19 nt, Human
uccaagagaggaguggaga

SEQ ID NO: 908263 - RNA, 19 nt, Human
uccccagggcgaaggcgcc

SEQ ID NO: 908264 - RNA, 23 nt, Human
ucgcuaaugugccuggguggggu

SEQ ID NO: 908265 - RNA, 25 nt, Human
ucggaguccuccugccuugaccccc

SEQ ID NO: 908266 - RNA, 22 nt, Human
ucuggaggcucugugggggagg

SEQ ID NO: 908267 - RNA, 20 nt, Human
ugccccgcccacucgauaca

SEQ ID NO: 908268 - RNA, 25 nt, Human
ugccccgcccacucgauacaaguug

SEQ ID NO: 908269 - RNA, 25 nt, Human
ugccccgcccacucgauaccgacuc

SEQ ID NO: 908270 - RNA, 24 nt, Human
ugcccuagaccgcccccgccccau

SEQ ID NO: 908271 - RNA, 19 nt, Human
ugccuggguggggucuggu

SEQ ID NO: 908272 - RNA, 21 nt, Human
ugccuggguggggucugguug

SEQ ID NO: 908273 - RNA, 19 nt, Human
ugcggggguccuggggcgg

SEQ ID NO: 908274 - RNA, 22 nt, Human
uggcagacgaagcccaugaaag

SEQ ID NO: 908275 - RNA, 21 nt, Human
uggggaaaccgaggcccaggg

SEQ ID NO: 908276 - RNA, 24 nt, Human
uggggccgaccccauuuuaagcaa

SEQ ID NO: 908277 - RNA, 22 nt, Human
uggggggacaggaaaccgaggc

SEQ ID NO: 908278 - RNA, 24 nt, Human
uggugguggggcgcuggggaagcc

SEQ ID NO: 908279 - RNA, 19 nt, Human
ugguggugguggggcgcug

SEQ ID NO: 908280 - RNA, 22 nt, Human
ugguugggaagagaccccugcc

SEQ ID NO: 908281 - RNA, 19 nt, Human
uuaagcaaagcuacaauau

SEQ ID NO: 908282 - RNA, 23 nt, Human
uugccccgcccacucgauacaag

SEQ ID NO: 908283 - RNA, 23 nt, Human
uuuguacagcacuuucaugggga

SEQ ID NO: 908284 - RNA, 18 nt, Human
aaauaaaauaacacugag

SEQ ID NO: 908285 - RNA, 19 nt, Human
aacaguucuggacgguucu

SEQ ID NO: 908286 - RNA, 20 nt, Human
aaccacagcaggugauuuag

SEQ ID NO: 908287 - RNA, 21 nt, Human
aaggugcugagggugcuguga

SEQ ID NO: 908288 - RNA, 23 nt, Human
aaggugcugagggugcugugagg

SEQ ID NO: 908289 - RNA, 21 nt, Human
accccaagagccuucccagca

SEQ ID NO: 908290 - RNA, 21 nt, Human
acccuggaagacgcucagggg

SEQ ID NO: 908291 - RNA, 21 nt, Human
acucugaggagcacagagggg

SEQ ID NO: 908292 - RNA, 18 nt, Human
agacaacaauggcucuga

SEQ ID NO: 908293 - RNA, 18 nt, Human
agagcaucauaaccacag

SEQ ID NO: 908294 - RNA, 23 nt, Human
agagccuucccagcacgcggcau

SEQ ID NO: 908295 - RNA, 21 nt, Human
agauggggcccagaaggcguc

SEQ ID NO: 908296 - RNA, 18 nt, Human
agcaggcuccgcccucca

SEQ ID NO: 908297 - RNA, 20 nt, Human
agcugugugcgcgggugugu

SEQ ID NO: 908298 - RNA, 20 nt, Human
aggcagggaaggugggcugu

SEQ ID NO: 908299 - RNA, 21 nt, Human
aggugauuuacagaaggguug

SEQ ID NO: 908300 - RNA, 24 nt, Human
caauauuucuaaaauaauuaccac

SEQ ID NO: 908301 - RNA, 24 nt, Human
caccccccgauuccagcacacaac

SEQ ID NO: 908302 - RNA, 20 nt, Human
cacccuggaagacgcucagg

SEQ ID NO: 908303 - RNA, 22 nt, Human
cacugcaugccggugcaugggc

SEQ ID NO: 908304 - RNA, 23 nt, Human
cacugcaugccggugcaugggca

SEQ ID NO: 908305 - RNA, 23 nt, Human
cagagcaucauaaccacagcagg

SEQ ID NO: 908306 - RNA, 18 nt, Human
cagagccccaacauccuc

SEQ ID NO: 908307 - RNA, 19 nt, Human
cagagccccaacauccucc

SEQ ID NO: 908308 - RNA, 19 nt, Human
cagcaggcuccgcccucca

SEQ ID NO: 908309 - RNA, 27 nt, Human
cagcaggcuccgcccuccaccccacuc

SEQ ID NO: 908310 - RNA, 24 nt, Human
caggcuccgcccuccaccccacuc

SEQ ID NO: 908311 - RNA, 23 nt, Human
cauaagcaggcuauaagguuuag

SEQ ID NO: 908312 - RNA, 19 nt, Human
ccaacauccuccaugaccc

SEQ ID NO: 908313 - RNA, 22 nt, Human
ccacugcaugccggugcauggg

SEQ ID NO: 908314 - RNA, 23 nt, Human
ccacugcaugccggugcaugggc

SEQ ID NO: 908315 - RNA, 23 nt, Human
cccagacaacaauggcucugagg

SEQ ID NO: 908316 - RNA, 18 nt, Human
ccggugcaugggcagacg

SEQ ID NO: 908317 - RNA, 24 nt, Human
cgagcccagacaacaauggcucug

SEQ ID NO: 908318 - RNA, 18 nt, Human
cgggggaagggugcuggg

SEQ ID NO: 908319 - RNA, 21 nt, Human
cuccagcaggcuccgcccucc

SEQ ID NO: 908320 - RNA, 18 nt, Human
gaaggcagggccuccagc

SEQ ID NO: 908321 - RNA, 19 nt, Human
gacccagcuccuaagacag

SEQ ID NO: 908322 - RNA, 21 nt, Human
ggaaaccgagucagcauggca

SEQ ID NO: 908323 - RNA, 19 nt, Human
ggaacgccgacccagcucc

SEQ ID NO: 908324 - RNA, 21 nt, Human
gggcugugugagagaggaggg

SEQ ID NO: 908325 - RNA, 21 nt, Human
gggggcucccuggcgcgucug

SEQ ID NO: 908326 - RNA, 18 nt, Human
gggucucaggcaacaguu

SEQ ID NO: 908327 - RNA, 20 nt, Human
uaaaauaacacugagggggg

SEQ ID NO: 908328 - RNA, 22 nt, Human
uaagacagacagcuacgcugac

SEQ ID NO: 908329 - RNA, 25 nt, Human
uaagacagacagcuacgcugacacc

SEQ ID NO: 908330 - RNA, 26 nt, Human
ucagagccccaacauccuccaugacc

SEQ ID NO: 908331 - RNA, 22 nt, Human
ucauaaauaaaauaacacugag

SEQ ID NO: 908332 - RNA, 19 nt, Human
uccagcacacaaccugggg

SEQ ID NO: 908333 - RNA, 20 nt, Human
uccagcaggcuccgcccucc

SEQ ID NO: 908334 - RNA, 24 nt, Human
ucccccauaagcaggcuauaaggu

SEQ ID NO: 908335 - RNA, 20 nt, Human
ucuccuggcgcuccccauga

SEQ ID NO: 908336 - RNA, 20 nt, Human
ucucugugaaggcagggccu

SEQ ID NO: 908337 - RNA, 21 nt, Human
ugaacucagagcaucauaacc

SEQ ID NO: 908338 - RNA, 23 nt, Human
ugacccuccucuccuggcgcucc

SEQ ID NO: 908339 - RNA, 23 nt, Human
ugacgcgggggaagggugcuggg

SEQ ID NO: 908340 - RNA, 18 nt, Human
ugagagaggaggggucuc

SEQ ID NO: 908341 - RNA, 19 nt, Human
ugaggagcacagagggggc

SEQ ID NO: 908342 - RNA, 20 nt, Human
ugcugagggugcugugagga

SEQ ID NO: 908343 - RNA, 22 nt, Human
uggaagacgcucaggggacccc

SEQ ID NO: 908344 - RNA, 20 nt, Human
uggcaggagagccacccccc

SEQ ID NO: 908345 - RNA, 23 nt, Human
uggcagggcugugugagagagga

SEQ ID NO: 908346 - RNA, 18 nt, Human
uggcugagggugguggcu

SEQ ID NO: 908347 - RNA, 23 nt, Human
uggcugagggugguggcuuaagg

SEQ ID NO: 908348 - RNA, 19 nt, Human
uggggcagaaacucgagcc

SEQ ID NO: 908349 - RNA, 23 nt, Human
ugugaggcagggaaggugggcug

SEQ ID NO: 908350 - RNA, 23 nt, Human
ugugaggcagggaaggugggcug

SEQ ID NO: 908351 - RNA, 20 nt, Human
uguggcugagggugguggcu

SEQ ID NO: 908352 - RNA, 24 nt, Human
aaagagugaugagaauuaaaacaa

SEQ ID NO: 908353 - RNA, 18 nt, Human
aagcacauacaugguagg

SEQ ID NO: 908354 - RNA, 20 nt, Human
acccugagacacuaaaagaa

SEQ ID NO: 908355 - RNA, 20 nt, Human
acccugagacacuaaaagaa

SEQ ID NO: 908356 - RNA, 22 nt, Human
acccugcuccccugggugcagc

SEQ ID NO: 908357 - RNA, 18 nt, Human
acucccagaggaaagaga

SEQ ID NO: 908358 - RNA, 22 nt, Human
agaaagaacucccauagaugga

SEQ ID NO: 908359 - RNA, 21 nt, Human
agaagccuggccccagcuacc

SEQ ID NO: 908360 - RNA, 19 nt, Human
agagagaaaguggggcagg

SEQ ID NO: 908361 - RNA, 21 nt, Human
agagagaaaguggggcaggga

SEQ ID NO: 908362 - RNA, 21 nt, Human
agagugucugcugcugagaac

SEQ ID NO: 908363 - RNA, 20 nt, Human
agcucuggcuccuccuccag

SEQ ID NO: 908364 - RNA, 22 nt, Human
caaaaggguaucaguggaagca

SEQ ID NO: 908365 - RNA, 23 nt, Human
caacgggcccuccucccugacuc

SEQ ID NO: 908366 - RNA, 25 nt, Human
cacacaucacucugaccagggugcu

SEQ ID NO: 908367 - RNA, 20 nt, Human
caccaggccugaggcaaggc

SEQ ID NO: 908368 - RNA, 21 nt, Human
cacccugcuccccugggugca

SEQ ID NO: 908369 - RNA, 23 nt, Human
cacccugcuccccugggugcagc

SEQ ID NO: 908370 - RNA, 24 nt, Human
cagaggaaagagacugcauggacc

SEQ ID NO: 908371 - RNA, 25 nt, Human
cagcccccugcuggugguccugccu

SEQ ID NO: 908372 - RNA, 21 nt, Human
cagggaucuccccuccacauc

SEQ ID NO: 908373 - RNA, 18 nt, Human
caguaggccaggaagccc

SEQ ID NO: 908374 - RNA, 21 nt, Human
caguccacccugccccugccc

SEQ ID NO: 908375 - RNA, 22 nt, Human
caguucauuccagucaaaaggg

SEQ ID NO: 908376 - RNA, 22 nt, Human
caucaggugcccugggcuccuc

SEQ ID NO: 908377 - RNA, 20 nt, Human
cauucaacccucugagccuc

SEQ ID NO: 908378 - RNA, 18 nt, Human
ccacagggacuccagagg

SEQ ID NO: 908379 - RNA, 21 nt, Human
ccagccaguucauuccaguca

SEQ ID NO: 908380 - RNA, 21 nt, Human
ccaguccacccugccccugcc

SEQ ID NO: 908381 - RNA, 21 nt, Human
ccaugccacucccccagcuac

SEQ ID NO: 908382 - RNA, 23 nt, Human
cccaugccacucccccagcuacc

SEQ ID NO: 908383 - RNA, 22 nt, Human
ccccagcuacccaacgggcccu

SEQ ID NO: 908384 - RNA, 18 nt, Human
ccccaggguggagucucc

SEQ ID NO: 908385 - RNA, 19 nt, Human
cccccaaacuccauccuca

SEQ ID NO: 908386 - RNA, 20 nt, Human
ccccucuuuggggugccccc

SEQ ID NO: 908387 - RNA, 19 nt, Human
ccccugccccaugccacuc

SEQ ID NO: 908388 - RNA, 22 nt, Human
ccccugccccaugccacucccc

SEQ ID NO: 908389 - RNA, 21 nt, Human
cccugccccaugccacucccc

SEQ ID NO: 908390 - RNA, 23 nt, Human
cccugggcuccucccccaaacuc

SEQ ID NO: 908391 - RNA, 22 nt, Human
ccgcgcugcaaccuggccggcu

SEQ ID NO: 908392 - RNA, 22 nt, Human
ccgcgcugcaaccuggccggcu

SEQ ID NO: 908393 - RNA, 22 nt, Human
ccgcgcugcaaccuggccggcu

SEQ ID NO: 908394 - RNA, 22 nt, Human
ccucccugacucccacaaggau

SEQ ID NO: 908395 - RNA, 24 nt, Human
ccucccugacucccacaaggauug

SEQ ID NO: 908396 - RNA, 24 nt, Human
ccugccccacucaccaggccugag

SEQ ID NO: 908397 - RNA, 22 nt, Human
ccugcggcggcggcggcggcuu

SEQ ID NO: 908398 - RNA, 19 nt, Human
ccugcucccuugccggaac

SEQ ID NO: 908399 - RNA, 18 nt, Human
ccugcuggugguccugcc

SEQ ID NO: 908400 - RNA, 18 nt, Human
ccuggccccagcuaccca

SEQ ID NO: 908401 - RNA, 20 nt, Human
ccuggccggcucuauccaac

SEQ ID NO: 908402 - RNA, 24 nt, Human
ccugggcuccucccccaaacuccc

SEQ ID NO: 908403 - RNA, 26 nt, Human
ccuggggcugccgcagcucagacccc

SEQ ID NO: 908404 - RNA, 20 nt, Human
cgagaggagcccaguccacc

SEQ ID NO: 908405 - RNA, 21 nt, Human
cgaugaugcugcccacuuccu

SEQ ID NO: 908406 - RNA, 21 nt, Human
cgcucacaacugcgagugaca

SEQ ID NO: 908407 - RNA, 24 nt, Human
cggcugggccgcucagucccacag

SEQ ID NO: 908408 - RNA, 21 nt, Human
cuccagucccccguccgagcc

SEQ ID NO: 908409 - RNA, 23 nt, Human
cucccccaaacuccauccucacc

SEQ ID NO: 908410 - RNA, 22 nt, Human
cuccccuccacaucaggugccc

SEQ ID NO: 908411 - RNA, 23 nt, Human
cugagccucagcuucuccaucug

SEQ ID NO: 908412 - RNA, 18 nt, Human
cugccccaugccacuccc

SEQ ID NO: 908413 - RNA, 20 nt, Human
cugccccugccuguaccuca

SEQ ID NO: 908414 - RNA, 21 nt, Human
cugccugccccugccuguacc

SEQ ID NO: 908415 - RNA, 22 nt, Human
cugcucccuugccggaacuugu

SEQ ID NO: 908416 - RNA, 22 nt, Human
cuguguaagccuggggagccca

SEQ ID NO: 908417 - RNA, 26 nt, Human
gaaacugcccccacucugaggcacuc

SEQ ID NO: 908418 - RNA, 19 nt, Human
gacacccgccauggugggg

SEQ ID NO: 908419 - RNA, 18 nt, Human
gagugacaucagcugcga

SEQ ID NO: 908420 - RNA, 23 nt, Human
gcccugggcuccucccccaaacu

SEQ ID NO: 908421 - RNA, 21 nt, Human
gccuggccccagcuacccaac

SEQ ID NO: 908422 - RNA, 20 nt, Human
gcggcggcggcggcacggcg

SEQ ID NO: 908423 - RNA, 19 nt, Human
gcggcggcggcggcggcac

SEQ ID NO: 908424 - RNA, 19 nt, Human
gcggcggcggcggcggcgg

SEQ ID NO: 908425 - RNA, 21 nt, Human
gcggcggcggcggcggcggca

SEQ ID NO: 908426 - RNA, 24 nt, Human
gcucuauccaacggaggugacacc

SEQ ID NO: 908427 - RNA, 23 nt, Human
gcucuggcuccuccuccaguccc

SEQ ID NO: 908428 - RNA, 18 nt, Human
gcuuuacagucucgcccu

SEQ ID NO: 908429 - RNA, 25 nt, Human
ggcggcggcggcggcacggcggcug

SEQ ID NO: 908430 - RNA, 20 nt, Human
gggcagggaucuccccucca

SEQ ID NO: 908431 - RNA, 21 nt, Human
gggcccccugcccuggggcug

SEQ ID NO: 908432 - RNA, 18 nt, Human
gugcaucagcauccgcag

SEQ ID NO: 908433 - RNA, 22 nt, Human
gugcccccucuuuggggugccc

SEQ ID NO: 908434 - RNA, 21 nt, Human
guggggcagggaucuccccuc

SEQ ID NO: 908435 - RNA, 23 nt, Human
guggggcagggaucuccccucca

SEQ ID NO: 908436 - RNA, 19 nt, Human
uaagcacauacaugguagg

SEQ ID NO: 908437 - RNA, 21 nt, Human
ucaggcgaggcuggggccaca

SEQ ID NO: 908438 - RNA, 21 nt, Human
ucaggcgaggcuggggccaca

SEQ ID NO: 908439 - RNA, 21 nt, Human
ucaggcgaggcuggggccaca

SEQ ID NO: 908440 - RNA, 18 nt, Human
uccccgggagaggcggcc

SEQ ID NO: 908441 - RNA, 21 nt, Human
uccgcgcugcaaccuggccgg

SEQ ID NO: 908442 - RNA, 21 nt, Human
uccgcgcugcaaccuggccgg

SEQ ID NO: 908443 - RNA, 21 nt, Human
uccgcgcugcaaccuggccgg

SEQ ID NO: 908444 - RNA, 23 nt, Human
ucgcuggggcagccaaagagggg

SEQ ID NO: 908445 - RNA, 20 nt, Human
ucgcuggggcuguccugcgg

SEQ ID NO: 908446 - RNA, 20 nt, Human
ucucacgagcuguguaagcc

SEQ ID NO: 908447 - RNA, 21 nt, Human
ucuggcuccuccuccaguccc

SEQ ID NO: 908448 - RNA, 23 nt, Human
ugacaucagcugcgaacaaugag

SEQ ID NO: 908449 - RNA, 21 nt, Human
ugaccagggugcuuaugugug

SEQ ID NO: 908450 - RNA, 23 nt, Human
ugaggcaaggcucaaaacugcca

SEQ ID NO: 908451 - RNA, 23 nt, Human
ugcagcugcuccuccuuccauuu

SEQ ID NO: 908452 - RNA, 20 nt, Human
ugcaguaggccaggaagccc

SEQ ID NO: 908453 - RNA, 21 nt, Human
ugcccccucuuuggggugccc

SEQ ID NO: 908454 - RNA, 22 nt, Human
ugcccccucuuuggggugcccc

SEQ ID NO: 908455 - RNA, 21 nt, Human
ugccccugccuguaccucagc

SEQ ID NO: 908456 - RNA, 19 nt, Human
ugcccugggcuccuccccc

SEQ ID NO: 908457 - RNA, 23 nt, Human
ugcccugggcuccucccccaaac

SEQ ID NO: 908458 - RNA, 18 nt, Human
ugcccuggggcugccgca

SEQ ID NO: 908459 - RNA, 21 nt, Human
ugcggcggcggcggcggcggc

SEQ ID NO: 908460 - RNA, 23 nt, Human
uggccggcucucgcuggggcagc

SEQ ID NO: 908461 - RNA, 21 nt, Human
uggcuccuccuccaguccccc

SEQ ID NO: 908462 - RNA, 22 nt, Human
ugggcguuagcggcguuuggga

SEQ ID NO: 908463 - RNA, 21 nt, Human
ugggcuccucccccaaacucc

SEQ ID NO: 908464 - RNA, 19 nt, Human
uggggagagaagccuggcc

SEQ ID NO: 908465 - RNA, 21 nt, Human
uggggugcccccugacaagcc

SEQ ID NO: 908466 - RNA, 23 nt, Human
ugguccugccugccccugccugu

SEQ ID NO: 908467 - RNA, 19 nt, Human
ugguggggagagaagccug

SEQ ID NO: 908468 - RNA, 22 nt, Human
ugguggggagagaagccuggcc

SEQ ID NO: 908469 - RNA, 21 nt, Human
uucaaaaacagggauugaaaa

SEQ ID NO: 908470 - RNA, 21 nt, Human
uucaacccucugagccucagc

SEQ ID NO: 908471 - RNA, 21 nt, Human
uugaaaaaacuguacagagug

SEQ ID NO: 908472 - RNA, 23 nt, Human
uugaaaaaacuguacagaguguc

SEQ ID NO: 908473 - RNA, 22 nt, Human
uuggggugcccccugacaagcc

SEQ ID NO: 908474 - RNA, 18 nt, Human
uuuuuuuuuuuuuuuuug

SEQ ID NO: 908475 - RNA, 18 nt, Human
uuuuuuuuuuuuuuuuug

SEQ ID NO: 908476 - RNA, 28 nt, Human
uuuuuuuuuuuuuuuuuuuuuuuggggg

SEQ ID NO: 908477 - RNA, 24 nt, Human
aaaaccaaccaaacaaaaaaaagu

SEQ ID NO: 908478 - RNA, 25 nt, Human
aacaccacuaccacuaacagaaacu

SEQ ID NO: 908479 - RNA, 21 nt, Human
aagacggcagcagauguggug

SEQ ID NO: 908480 - RNA, 22 nt, Human
aagcaaaagaaaggcuaugugg

SEQ ID NO: 908481 - RNA, 20 nt, Human
aaguacaagagcucaugcug

SEQ ID NO: 908482 - RNA, 23 nt, Human
acaaaaaaaagugucaagacggc

SEQ ID NO: 908483 - RNA, 24 nt, Human
acaaaaccaaccaaacaaaaaaaa

SEQ ID NO: 908484 - RNA, 20 nt, Human
acaaauucaacaaagguaaa

SEQ ID NO: 908485 - RNA, 23 nt, Human
acaccacuaccacuaacagaaac

SEQ ID NO: 908486 - RNA, 19 nt, Human
acccaaaaccucgguguug

SEQ ID NO: 908487 - RNA, 21 nt, Human
accuccugagugcaaaggcug

SEQ ID NO: 908488 - RNA, 21 nt, Human
acuauaauuuacauuuaucca

SEQ ID NO: 908489 - RNA, 23 nt, Human
acuuuacaacuaggaaauagcca

SEQ ID NO: 908490 - RNA, 20 nt, Human
agaauuucuccgaaguccac

SEQ ID NO: 908491 - RNA, 22 nt, Human
agagaagcaaaagcaaaagaaa

SEQ ID NO: 908492 - RNA, 22 nt, Human
agugaauucucuacagaggaaa

SEQ ID NO: 908493 - RNA, 24 nt, Human
caaaacaccacuaccacuaacaga

SEQ ID NO: 908494 - RNA, 23 nt, Human
caaagcagacucucaacuuccag

SEQ ID NO: 908495 - RNA, 26 nt, Human
cauuuuuguaaagucucuccccuccc

SEQ ID NO: 908496 - RNA, 18 nt, Human
ccaaaacaccacuaccac

SEQ ID NO: 908497 - RNA, 21 nt, Human
ccaaaacaccacuaccacuaa

SEQ ID NO: 908498 - RNA, 24 nt, Human
ccaaacaaaaaaaagugucaagac

SEQ ID NO: 908499 - RNA, 22 nt, Human
ccaaaggaaagugucggcucac

SEQ ID NO: 908500 - RNA, 20 nt, Human
ccacuaccacuaacagaaac

SEQ ID NO: 908501 - RNA, 19 nt, Human
cccucccagagcccgcccc

SEQ ID NO: 908502 - RNA, 19 nt, Human
ccgcccggagcaggcucgg

SEQ ID NO: 908503 - RNA, 18 nt, Human
ccuccugagugcaaaggc

SEQ ID NO: 908504 - RNA, 19 nt, Human
cgcccggagcaggcucggc

SEQ ID NO: 908505 - RNA, 23 nt, Human
cgcugacauggcuggagcggcgc

SEQ ID NO: 908506 - RNA, 21 nt, Human
cucaaaacaauaaaaacacug

SEQ ID NO: 908507 - RNA, 19 nt, Human
cucccagagcccgccccgu

SEQ ID NO: 908508 - RNA, 26 nt, Human
cucuccuaccuuaaggaaaucaggaa

SEQ ID NO: 908509 - RNA, 18 nt, Human
cuuaaggaaaucaggaaa

SEQ ID NO: 908510 - RNA, 21 nt, Human
cuucuuguaaaggccgccuua

SEQ ID NO: 908511 - RNA, 24 nt, Human
gagagaagcaaaagcaaaagaaag

SEQ ID NO: 908512 - RNA, 23 nt, Human
gagcaggcucggcucgcccuggc

SEQ ID NO: 908513 - RNA, 21 nt, Human
gcaaggaaugaaguguccaaa

SEQ ID NO: 908514 - RNA, 24 nt, Human
gccuuagaaaugguccagaaagca

SEQ ID NO: 908515 - RNA, 18 nt, Human
gcggcgccgccgccgccg

SEQ ID NO: 908516 - RNA, 20 nt, Human
gcucacucaucccccaaacg

SEQ ID NO: 908517 - RNA, 19 nt, Human
gcuuuuaaguggaaggucu

SEQ ID NO: 908518 - RNA, 24 nt, Human
ggcagcagaugugguguguggucc

SEQ ID NO: 908519 - RNA, 19 nt, Human
ggccgccuuagaaaugguc

SEQ ID NO: 908520 - RNA, 18 nt, Human
uaacaaaaccaaccaaac

SEQ ID NO: 908521 - RNA, 25 nt, Human
uaacagaaacuccuaagcucaugcu

SEQ ID NO: 908522 - RNA, 19 nt, Human
uaaguggaaggucuuagcc

SEQ ID NO: 908523 - RNA, 19 nt, Human
uacaagagcucaugcugga

SEQ ID NO: 908524 - RNA, 23 nt, Human
uacaagagcucaugcuggagcag

SEQ ID NO: 908525 - RNA, 24 nt, Human
uacacguuaaauucucuccuaccu

SEQ ID NO: 908526 - RNA, 23 nt, Human
uaccacuaacagaaacuccuaag

SEQ ID NO: 908527 - RNA, 22 nt, Human
uaugagaauuucuccgaagucc

SEQ ID NO: 908528 - RNA, 21 nt, Human
uaugucaacacccaaaaccuc

SEQ ID NO: 908529 - RNA, 24 nt, Human
uccaaaacaccacuaccacuaaca

SEQ ID NO: 908530 - RNA, 22 nt, Human
uccaaauggaaaauaaaagccc

SEQ ID NO: 908531 - RNA, 18 nt, Human
uccacuuuaugucaacac

SEQ ID NO: 908532 - RNA, 24 nt, Human
uccgaaguccacccuccucuccga

SEQ ID NO: 908533 - RNA, 18 nt, Human
uccgacaggaaugucuuc

SEQ ID NO: 908534 - RNA, 23 nt, Human
ugagguacaaagcagacucucaa

SEQ ID NO: 908535 - RNA, 18 nt, Human
ugagugcaaaggcugaag

SEQ ID NO: 908536 - RNA, 21 nt, Human
ugagugcaaaggcugaagucg

SEQ ID NO: 908537 - RNA, 18 nt, Human
ugcaaggaaugaaguguc

SEQ ID NO: 908538 - RNA, 24 nt, Human
uggaaggucuuagccuacuuuguu

SEQ ID NO: 908539 - RNA, 22 nt, Human
ugucaacacccaaaaccucggu

SEQ ID NO: 908540 - RNA, 21 nt, Human
uguccaaaacaccacuaccac

SEQ ID NO: 908541 - RNA, 25 nt, Human
uguccaaaacaccacuaccacuaac

SEQ ID NO: 908542 - RNA, 20 nt, Human
aaacaaagcaaaauagagcc

SEQ ID NO: 908543 - RNA, 20 nt, Human
aaaugcaaaagggcuuaaaa

SEQ ID NO: 908544 - RNA, 22 nt, Human
aaccugucucuuuuuccuucca

SEQ ID NO: 908545 - RNA, 22 nt, Human
aagaagaagaagaggaagagga

SEQ ID NO: 908546 - RNA, 18 nt, Human
aagaagaagaggaagagg

SEQ ID NO: 908547 - RNA, 26 nt, Human
aagaggaagaggagaaggaaaaggag

SEQ ID NO: 908548 - RNA, 21 nt, Human
aaguaccaaggggacggaaug

SEQ ID NO: 908549 - RNA, 19 nt, Human
aaugugaaaggguggaaca

SEQ ID NO: 908550 - RNA, 20 nt, Human
acaccacaaaauguacagac

SEQ ID NO: 908551 - RNA, 18 nt, Human
acccaaucaccuccccca

SEQ ID NO: 908552 - RNA, 22 nt, Human
acccaaucaccucccccaccac

SEQ ID NO: 908553 - RNA, 20 nt, Human
agaaauagaaucagacuuau

SEQ ID NO: 908554 - RNA, 19 nt, Human
agaagaggaagaggagaag

SEQ ID NO: 908555 - RNA, 22 nt, Human
agaggaagaggagaaggaaaag

SEQ ID NO: 908556 - RNA, 20 nt, Human
agauacagugcaccagagau

SEQ ID NO: 908557 - RNA, 24 nt, Human
agauauggaaauugggagaaaacu

SEQ ID NO: 908558 - RNA, 21 nt, Human
agccacccaaucaccuccccc

SEQ ID NO: 908559 - RNA, 23 nt, Human
agcuauaaaauuuuuacauggaa

SEQ ID NO: 908560 - RNA, 18 nt, Human
aggaaaaagaggaggagg

SEQ ID NO: 908561 - RNA, 18 nt, Human
aggaagaagaagaagagg

SEQ ID NO: 908562 - RNA, 19 nt, Human
aggaagaagaagaagagga

SEQ ID NO: 908563 - RNA, 23 nt, Human
aggaagaagaagaagaggaagag

SEQ ID NO: 908564 - RNA, 22 nt, Human
aggaggaagaagaagaagagga

SEQ ID NO: 908565 - RNA, 19 nt, Human
aggaggaggaaaaagagga

SEQ ID NO: 908566 - RNA, 23 nt, Human
aggauggaagagcaaaggaggga

SEQ ID NO: 908567 - RNA, 25 nt, Human
aguaaaaggcaagcuuaacuuuuga

SEQ ID NO: 908568 - RNA, 22 nt, Human
aguaagucccuccuccacauuu

SEQ ID NO: 908569 - RNA, 18 nt, Human
auagugcuguaaacaggc

SEQ ID NO: 908570 - RNA, 18 nt, Human
aucacaauuucucuugua

SEQ ID NO: 908571 - RNA, 22 nt, Human
aucaccucccccaccaccacga

SEQ ID NO: 908572 - RNA, 18 nt, Human
caaaucccaaagaggaaa

SEQ ID NO: 908573 - RNA, 19 nt, Human
caagccucuuucccucuaa

SEQ ID NO: 908574 - RNA, 23 nt, Human
caagcuuaacuuuugaaggcuga

SEQ ID NO: 908575 - RNA, 24 nt, Human
caagcuuaacuuuugaaggcugac

SEQ ID NO: 908576 - RNA, 28 nt, Human
caaguuuaaaacagugauauugcauuua

SEQ ID NO: 908577 - RNA, 25 nt, Human
caauaugaguuuuugacaaaauuuu

SEQ ID NO: 908578 - RNA, 20 nt, Human
cacauuucccucucccuuca

SEQ ID NO: 908579 - RNA, 24 nt, Human
caccacaaaauguacagacaccca

SEQ ID NO: 908580 - RNA, 22 nt, Human
caccaccacgaaacaaaaaaaa

SEQ ID NO: 908581 - RNA, 23 nt, Human
caccaccacgaaacaaaaaaaaa

SEQ ID NO: 908582 - RNA, 27 nt, Human
caccaccacgaaacaaaaaaaaaucug

SEQ ID NO: 908583 - RNA, 25 nt, Human
cagaauacaacauuuuuuauaaccc

SEQ ID NO: 908584 - RNA, 20 nt, Human
cagccacccaaucaccuccc

SEQ ID NO: 908585 - RNA, 18 nt, Human
caggaagggugacaggcg

SEQ ID NO: 908586 - RNA, 24 nt, Human
caggugaaaagaacauaaucacaa

SEQ ID NO: 908587 - RNA, 22 nt, Human
ccaagccucuuucccucuaacc

SEQ ID NO: 908588 - RNA, 20 nt, Human
ccaaucaccucccccaccac

SEQ ID NO: 908589 - RNA, 21 nt, Human
ccacccaaucaccucccccac

SEQ ID NO: 908590 - RNA, 20 nt, Human
ccacgaaacaaaaaaaaauc

SEQ ID NO: 908591 - RNA, 26 nt, Human
ccauccgaaaucuaauacucaguuac

SEQ ID NO: 908592 - RNA, 23 nt, Human
cccaagccucuuucccucuaacc

SEQ ID NO: 908593 - RNA, 22 nt, Human
cccacaggugaaaagaacauaa

SEQ ID NO: 908594 - RNA, 23 nt, Human
cccaucucugcucccacaacgau

SEQ ID NO: 908595 - RNA, 24 nt, Human
ccccaccaccacgaaacaaaaaaa

SEQ ID NO: 908596 - RNA, 21 nt, Human
ccucuuucccucuaaccuguc

SEQ ID NO: 908597 - RNA, 18 nt, Human
ccugucucuuuuuccuuc

SEQ ID NO: 908598 - RNA, 25 nt, Human
cgcaaagaaaaaagaccuuugccag

SEQ ID NO: 908599 - RNA, 18 nt, Human
cgcccaucucugcuccca

SEQ ID NO: 908600 - RNA, 18 nt, Human
cggcuggcaaaugcaaaa

SEQ ID NO: 908601 - RNA, 26 nt, Human
cuccuuuugcuucauuuuagagcuuc

SEQ ID NO: 908602 - RNA, 20 nt, Human
cucugcucccacaacgauac

SEQ ID NO: 908603 - RNA, 22 nt, Human
cugaaacaauaauguaccauga

SEQ ID NO: 908604 - RNA, 21 nt, Human
cugggacagacgcaaagaaaa

SEQ ID NO: 908605 - RNA, 24 nt, Human
cuuucccucuaaccugucucuuuu

SEQ ID NO: 908606 - RNA, 23 nt, Human
gaacacuugaucacacaaaaaua

SEQ ID NO: 908607 - RNA, 19 nt, Human
gaagaagaagaagaggaag

SEQ ID NO: 908608 - RNA, 21 nt, Human
gaagaagaagaagaggaagag

SEQ ID NO: 908609 - RNA, 23 nt, Human
gaagaagaagaagaggaagagga

SEQ ID NO: 908610 - RNA, 18 nt, Human
gaagaagaggaagaggag

SEQ ID NO: 908611 - RNA, 18 nt, Human
gaagaggaagaggagaag

SEQ ID NO: 908612 - RNA, 19 nt, Human
gaagaggagaaggaaaagg

SEQ ID NO: 908613 - RNA, 19 nt, Human
gaaggagugggagaaggug

SEQ ID NO: 908614 - RNA, 19 nt, Human
gaaggcugacucaugaaga

SEQ ID NO: 908615 - RNA, 22 nt, Human
gccacccaaucaccucccccac

SEQ ID NO: 908616 - RNA, 24 nt, Human
gccucuuucccucuaaccugucuc

SEQ ID NO: 908617 - RNA, 20 nt, Human
gcuaauauccuaaaaauaga

SEQ ID NO: 908618 - RNA, 24 nt, Human
ggaaaagcacagaacggcucugca

SEQ ID NO: 908619 - RNA, 22 nt, Human
ggaagaagaagaagaggaagag

SEQ ID NO: 908620 - RNA, 18 nt, Human
ggaggaaaaagaggagga

SEQ ID NO: 908621 - RNA, 20 nt, Human
gggaaaggacugacaggaug

SEQ ID NO: 908622 - RNA, 21 nt, Human
guaaacaggcacacacugauc

SEQ ID NO: 908623 - RNA, 20 nt, Human
uaaccugucucuuuuuccuu

SEQ ID NO: 908624 - RNA, 18 nt, Human
uaagucccuccuccacau

SEQ ID NO: 908625 - RNA, 21 nt, Human
uagugcuguaaacaggcacac

SEQ ID NO: 908626 - RNA, 19 nt, Human
uauagaauuauagauuuua

SEQ ID NO: 908627 - RNA, 20 nt, Human
uaugacugaugacuucuuaa

SEQ ID NO: 908628 - RNA, 23 nt, Human
uauggaaauugggagaaaacuau

SEQ ID NO: 908629 - RNA, 23 nt, Human
uauucauguguaauuaagucaca

SEQ ID NO: 908630 - RNA, 23 nt, Human
ucacacaaaaauaauauaaaaca

SEQ ID NO: 908631 - RNA, 24 nt, Human
ucaccucccccaccaccacgaaac

SEQ ID NO: 908632 - RNA, 24 nt, Human
ucagccacccaaucaccuccccca

SEQ ID NO: 908633 - RNA, 25 nt, Human
ucauagaaauagaaucagacuuaug

SEQ ID NO: 908634 - RNA, 20 nt, Human
uccacauuucccucucccuu

SEQ ID NO: 908635 - RNA, 21 nt, Human
ucccaagccucuuucccucua

SEQ ID NO: 908636 - RNA, 22 nt, Human
ucccaagccucuuucccucuaa

SEQ ID NO: 908637 - RNA, 21 nt, Human
ucccccaccaccacgaaacaa

SEQ ID NO: 908638 - RNA, 22 nt, Human
ucccccaccaccacgaaacaaa

SEQ ID NO: 908639 - RNA, 22 nt, Human
uccuccacauuucccucucccu

SEQ ID NO: 908640 - RNA, 21 nt, Human
ucgauauuucaagacuguccu

SEQ ID NO: 908641 - RNA, 23 nt, Human
ucugcuguuuucuucccaagccu

SEQ ID NO: 908642 - RNA, 24 nt, Human
ucuucuugacauuuuuuuccucuu

SEQ ID NO: 908643 - RNA, 22 nt, Human
ucuuuaugacuggcuucucgug

SEQ ID NO: 908644 - RNA, 18 nt, Human
ucuuugggacccugaauu

SEQ ID NO: 908645 - RNA, 20 nt, Human
ucuuuuuccuuccaguccuu

SEQ ID NO: 908646 - RNA, 19 nt, Human
ugaaaggguggaacaacgc

SEQ ID NO: 908647 - RNA, 19 nt, Human
ugaaauaguacaguaaaca

SEQ ID NO: 908648 - RNA, 18 nt, Human
ugacaggauggaagagca

SEQ ID NO: 908649 - RNA, 20 nt, Human
ugacaggauggaagagcaaa

SEQ ID NO: 908650 - RNA, 18 nt, Human
ugagaagggaaaggacug

SEQ ID NO: 908651 - RNA, 19 nt, Human
ugcaaaagggcuuaaaauc

SEQ ID NO: 908652 - RNA, 23 nt, Human
ugccucuaaaguuucuacaguuc

SEQ ID NO: 908653 - RNA, 21 nt, Human
ugcucccacaacgauacacug

SEQ ID NO: 908654 - RNA, 18 nt, Human
ugcuucagguaaguccug

SEQ ID NO: 908655 - RNA, 20 nt, Human
ugggaggagaacgaggagga

SEQ ID NO: 908656 - RNA, 23 nt, Human
ugggucuucagaauacaacauuu

SEQ ID NO: 908657 - RNA, 23 nt, Human
uguaaugagcaguuucuuuucug

SEQ ID NO: 908658 - RNA, 25 nt, Human
uguauaaacuacagaaugucuuuga

SEQ ID NO: 908659 - RNA, 22 nt, Human
uguaugauguggacuguaugca

SEQ ID NO: 908660 - RNA, 19 nt, Human
ugugcaaaucaugcugcuu

SEQ ID NO: 908661 - RNA, 21 nt, Human
uuaugcagauuguuagauagu

SEQ ID NO: 908662 - RNA, 23 nt, Human
uucaaagucauagaaauagaauc

SEQ ID NO: 908663 - RNA, 25 nt, Human
uucuacaguucugcacauuucaacu

SEQ ID NO: 908664 - RNA, 23 nt, Human
uugacauaaaaguaaaaggcaag

SEQ ID NO: 908665 - RNA, 20 nt, Human
uugacauuuuuuuccucuuu

SEQ ID NO: 908666 - RNA, 18 nt, Human
uugucuuucagagucuug

SEQ ID NO: 908667 - RNA, 25 nt, Human
uuuccuuccaguccuuccuuccucc

SEQ ID NO: 908668 - RNA, 18 nt, Human
uuucucaggccugcugag

SEQ ID NO: 908669 - RNA, 23 nt, Human
uuugggacccugaauuaccuuuu

SEQ ID NO: 908670 - RNA, 22 nt, Human
uuugucuucuugcugaugggag

SEQ ID NO: 908671 - RNA, 22 nt, Human
uuuucuaacaacaaauacaggu

SEQ ID NO: 908672 - RNA, 21 nt, Human
uuuuguagcuuagagcaucau

SEQ ID NO: 908673 - RNA, 24 nt, Human
uuuuugcgucuuacuaaauuuaau

SEQ ID NO: 908674 - RNA, 19 nt, Human
uuuuuuuuuuuuuuuugcg

SEQ ID NO: 908675 - RNA, 18 nt, Human
uuuuuuuuuuuuuuuuug

SEQ ID NO: 908676 - RNA, 19 nt, Human
uuuuuuuuuuuuuuuuugc

SEQ ID NO: 908677 - RNA, 19 nt, Human
aagcuggugggaagauggc

SEQ ID NO: 908678 - RNA, 18 nt, Human
aaggagcuggguccaaac

SEQ ID NO: 908679 - RNA, 26 nt, Human
acaggucagugagcaacagggcuucu

SEQ ID NO: 908680 - RNA, 19 nt, Human
acucugagggggcugggga

SEQ ID NO: 908681 - RNA, 20 nt, Human
acucugagggggcuggggag

SEQ ID NO: 908682 - RNA, 21 nt, Human
acucugagggggcuggggagu

SEQ ID NO: 908683 - RNA, 18 nt, Human
agcuccaggccaggcucu

SEQ ID NO: 908684 - RNA, 21 nt, Human
aggccacagccccccaggaag

SEQ ID NO: 908685 - RNA, 26 nt, Human
agggaccuccuccaucccccuacccc

SEQ ID NO: 908686 - RNA, 26 nt, Human
agggaccuccuccaucccccuacccc

SEQ ID NO: 908687 - RNA, 21 nt, Human
aggucggggcccagccugggc

SEQ ID NO: 908688 - RNA, 18 nt, Human
cacugaggagaacccagg

SEQ ID NO: 908689 - RNA, 19 nt, Human
cacugugcgcaucccaggu

SEQ ID NO: 908690 - RNA, 27 nt, Human
cacuugguucugggcaggggcaggggc

SEQ ID NO: 908691 - RNA, 27 nt, Human
cacuugguucugggcaggggcaggggc

SEQ ID NO: 908692 - RNA, 18 nt, Human
cagcuccaggccaggcuc

SEQ ID NO: 908693 - RNA, 21 nt, Human
cagcuugaccucagacuuugg

SEQ ID NO: 908694 - RNA, 25 nt, Human
cagggcagggaucccucacugagga

SEQ ID NO: 908695 - RNA, 18 nt, Human
caggucagugagcaacag

SEQ ID NO: 908696 - RNA, 21 nt, Human
caggucggggcccagccuggg

SEQ ID NO: 908697 - RNA, 22 nt, Human
cagugguuggaacugagggcac

SEQ ID NO: 908698 - RNA, 22 nt, Human
ccccaauaaauaaagucucagc

SEQ ID NO: 908699 - RNA, 24 nt, Human
cccccaauaaauaaagucucagcu

SEQ ID NO: 908700 - RNA, 25 nt, Human
cccccuacccccaauaaauaaaguc

SEQ ID NO: 908701 - RNA, 25 nt, Human
cccccuacccccaauaaauaaaguc

SEQ ID NO: 908702 - RNA, 19 nt, Human
cccguagccagucauaguc

SEQ ID NO: 908703 - RNA, 22 nt, Human
ccuccaucccccuacccccaau

SEQ ID NO: 908704 - RNA, 22 nt, Human
ccuccaucccccuacccccaau

SEQ ID NO: 908705 - RNA, 18 nt, Human
ccuggcuccagcucaggc

SEQ ID NO: 908706 - RNA, 20 nt, Human
ccuggugguggccuccccgu

SEQ ID NO: 908707 - RNA, 22 nt, Human
cgcaccugccacacauggcuug

SEQ ID NO: 908708 - RNA, 18 nt, Human
cucaggcucccugaccuc

SEQ ID NO: 908709 - RNA, 18 nt, Human
cucugagggggcugggga

SEQ ID NO: 908710 - RNA, 20 nt, Human
cucugggcccagcuugaccu

SEQ ID NO: 908711 - RNA, 20 nt, Human
cugccacggagcuccuccuc

SEQ ID NO: 908712 - RNA, 19 nt, Human
cugcccagggcaggcucag

SEQ ID NO: 908713 - RNA, 23 nt, Human
cugcccagggcaggcucagagug

SEQ ID NO: 908714 - RNA, 21 nt, Human
gaccuccuccaucccccuacc

SEQ ID NO: 908715 - RNA, 21 nt, Human
gaccuccuccaucccccuacc

SEQ ID NO: 908716 - RNA, 21 nt, Human
gaccuggucacaggucaguga

SEQ ID NO: 908717 - RNA, 25 nt, Human
gagcuggggccuggugguggccucc

SEQ ID NO: 908718 - RNA, 19 nt, Human
gcacagacuuggcuccugg

SEQ ID NO: 908719 - RNA, 21 nt, Human
gcuccagcuccaggccaggcu

SEQ ID NO: 908720 - RNA, 21 nt, Human
gcugcagcuguguuugcuggc

SEQ ID NO: 908721 - RNA, 20 nt, Human
ggagcuccuccucgccggcc

SEQ ID NO: 908722 - RNA, 18 nt, Human
ggcaggggcaggggcagg

SEQ ID NO: 908723 - RNA, 18 nt, Human
ggcaggggcaggggcagg

SEQ ID NO: 908724 - RNA, 20 nt, Human
ggcaggggcaggggcagggg

SEQ ID NO: 908725 - RNA, 26 nt, Human
ggccuggugguggccuccccguagcc

SEQ ID NO: 908726 - RNA, 23 nt, Human
ggcucaggccacagccccccagg

SEQ ID NO: 908727 - RNA, 20 nt, Human
ggcuccagcuccaggccagg

SEQ ID NO: 908728 - RNA, 21 nt, Human
ggcugucagcgcaccugccac

SEQ ID NO: 908729 - RNA, 26 nt, Human
gggaccuccuccaucccccuaccccc

SEQ ID NO: 908730 - RNA, 26 nt, Human
gggaccuccuccaucccccuaccccc

SEQ ID NO: 908731 - RNA, 21 nt, Human
gggcaggggcaggggcagggg

SEQ ID NO: 908732 - RNA, 21 nt, Human
gggcaggggcaggggcagggg

SEQ ID NO: 908733 - RNA, 22 nt, Human
gggcaggggcaggggcaggggu

SEQ ID NO: 908734 - RNA, 18 nt, Human
gggcuccagcuccaggcc

SEQ ID NO: 908735 - RNA, 20 nt, Human
gggcuccagcuccaggccag

SEQ ID NO: 908736 - RNA, 21 nt, Human
ggggggcacagacuuggcucc

SEQ ID NO: 908737 - RNA, 20 nt, Human
gguggccuccccguagccag

SEQ ID NO: 908738 - RNA, 18 nt, Human
gucaguggaacccaaagg

SEQ ID NO: 908739 - RNA, 18 nt, Human
gucaguggaacccaaagg

SEQ ID NO: 908740 - RNA, 18 nt, Human
gugguuggaacugagggc

SEQ ID NO: 908741 - RNA, 22 nt, Human
uacucugagggggcuggggagg

SEQ ID NO: 908742 - RNA, 21 nt, Human
ucacugaggagaacccagggc

SEQ ID NO: 908743 - RNA, 23 nt, Human
ucacugaggagaacccagggcuu

SEQ ID NO: 908744 - RNA, 19 nt, Human
ugaggagaacccagggcug

SEQ ID NO: 908745 - RNA, 21 nt, Human
ugaggagaacccagggcugcu

SEQ ID NO: 908746 - RNA, 21 nt, Human
ugagggcaccagcucagcagg

SEQ ID NO: 908747 - RNA, 21 nt, Human
ugccacacauggcuugccauc

SEQ ID NO: 908748 - RNA, 20 nt, Human
ugcccagggcaggcucagag

SEQ ID NO: 908749 - RNA, 20 nt, Human
uggaacccaaaggagcuggg

SEQ ID NO: 908750 - RNA, 20 nt, Human
uggaacccaaaggagcuggg

SEQ ID NO: 908751 - RNA, 19 nt, Human
uggaacugagggcaccagc

SEQ ID NO: 908752 - RNA, 22 nt, Human
ugguccuaguacucugaggggg

SEQ ID NO: 908753 - RNA, 21 nt, Human
uggugggaagauggcccgggc

SEQ ID NO: 908754 - RNA, 23 nt, Human
ugguucugggcaggggcaggggc

SEQ ID NO: 908755 - RNA, 23 nt, Human
ugguucugggcaggggcaggggc

SEQ ID NO: 908756 - RNA, 20 nt, Human
uuggggggcacagacuuggc

SEQ ID NO: 908757 - RNA, 19 nt, Human
aacagaagagacaagaaaa

SEQ ID NO: 908758 - RNA, 22 nt, Human
aagacccuugccaucugaucgg

SEQ ID NO: 908759 - RNA, 19 nt, Human
aagagacaagaaaaugcca

SEQ ID NO: 908760 - RNA, 22 nt, Human
aagagcaacgaagacagaguca

SEQ ID NO: 908761 - RNA, 18 nt, Human
aaggucuuuucaggacuu

SEQ ID NO: 908762 - RNA, 22 nt, Human
aauggguuaucaccaggaggga

SEQ ID NO: 908763 - RNA, 23 nt, Human
aauugauggggaugaagagcaac

SEQ ID NO: 908764 - RNA, 22 nt, Human
acagacaugucacagcaggagc

SEQ ID NO: 908765 - RNA, 23 nt, Human
accacagaucacaaauuaugacc

SEQ ID NO: 908766 - RNA, 26 nt, Human
acccgguggucucuccuuauucugcu

SEQ ID NO: 908767 - RNA, 22 nt, Human
agaagagacaagaaaaugccaa

SEQ ID NO: 908768 - RNA, 18 nt, Human
agaagccugugaugacug

SEQ ID NO: 908769 - RNA, 19 nt, Human
agacucucugcccagaucc

SEQ ID NO: 908770 - RNA, 26 nt, Human
agcgaugaggcaggcgauaagaagga

SEQ ID NO: 908771 - RNA, 18 nt, Human
agguaacuuuauacagaa

SEQ ID NO: 908772 - RNA, 21 nt, Human
aucacggaggacagucugaga

SEQ ID NO: 908773 - RNA, 18 nt, Human
caacagaagagacaagaa

SEQ ID NO: 908774 - RNA, 19 nt, Human
caacgaagacagagucaca

SEQ ID NO: 908775 - RNA, 19 nt, Human
caagaacagcacccaucuc

SEQ ID NO: 908776 - RNA, 23 nt, Human
cacagaucacaaauuaugacccu

SEQ ID NO: 908777 - RNA, 20 nt, Human
caccacagaucacaaauuau

SEQ ID NO: 908778 - RNA, 21 nt, Human
cacccaucucacuggaauccc

SEQ ID NO: 908779 - RNA, 19 nt, Human
cagaagagacaagaaaaug

SEQ ID NO: 908780 - RNA, 22 nt, Human
cagaaugaccaagcacucggca

SEQ ID NO: 908781 - RNA, 23 nt, Human
cagauccgaaagugaaauucuua

SEQ ID NO: 908782 - RNA, 18 nt, Human
caggagccuuuguuagug

SEQ ID NO: 908783 - RNA, 21 nt, Human
caguagguuuuccucgcuccc

SEQ ID NO: 908784 - RNA, 31 nt, Human
cauccagcaccugucagaaugaccaagcacc

SEQ ID NO: 908785 - RNA, 24 nt, Human
ccagcaccugucagaaugaccaag

SEQ ID NO: 908786 - RNA, 26 nt, Human
ccucccgugaugaaauugauggggau

SEQ ID NO: 908787 - RNA, 19 nt, Human
ccuguaaggugggggcagg

SEQ ID NO: 908788 - RNA, 19 nt, Human
ccuuuuucuucucucuuuu

SEQ ID NO: 908789 - RNA, 19 nt, Human
cuauggguccuuuuuuccu

SEQ ID NO: 908790 - RNA, 21 nt, Human
cucaaacuugagcgaugaggc

SEQ ID NO: 908791 - RNA, 18 nt, Human
cucaagaacagcacccau

SEQ ID NO: 908792 - RNA, 18 nt, Human
cucaaguucccugaaccu

SEQ ID NO: 908793 - RNA, 21 nt, Human
cucccgugaugaaauugaugg

SEQ ID NO: 908794 - RNA, 18 nt, Human
cugggagagaugauaaug

SEQ ID NO: 908795 - RNA, 27 nt, Human
cuucaacuguagguacaagacaucggg

SEQ ID NO: 908796 - RNA, 21 nt, Human
cuuccugcggcugggggugag

SEQ ID NO: 908797 - RNA, 18 nt, Human
cuugagugccucccuaac

SEQ ID NO: 908798 - RNA, 18 nt, Human
gaagcuuccccagcgcac

SEQ ID NO: 908799 - RNA, 25 nt, Human
gaaucccggcuggcucuccccgagg

SEQ ID NO: 908800 - RNA, 21 nt, Human
gacugcuugcuucagccaggg

SEQ ID NO: 908801 - RNA, 21 nt, Human
gacuucgggaggcucaaacuu

SEQ ID NO: 908802 - RNA, 24 nt, Human
gagccuuuuguugaggugcaaggc

SEQ ID NO: 908803 - RNA, 21 nt, Human
gaggcagcggcggcggcggac

SEQ ID NO: 908804 - RNA, 24 nt, Human
gaggggaccucuuggaggagaggg

SEQ ID NO: 908805 - RNA, 18 nt, Human
gcagcagagcugcagggg

SEQ ID NO: 908806 - RNA, 19 nt, Human
gcagcagagcugcaggggc

SEQ ID NO: 908807 - RNA, 21 nt, Human
gccaaugccuuuuuuuuuuuc

SEQ ID NO: 908808 - RNA, 18 nt, Human
ggagagaugauaaugagc

SEQ ID NO: 908809 - RNA, 22 nt, Human
ggcugggggugagccagggguu

SEQ ID NO: 908810 - RNA, 19 nt, Human
gggagagaugauaaugagc

SEQ ID NO: 908811 - RNA, 21 nt, Human
uacaaaugaccaaagguuuuu

SEQ ID NO: 908812 - RNA, 19 nt, Human
uaggugacagauauugacu

SEQ ID NO: 908813 - RNA, 21 nt, Human
uauagguaaacaguuaaguca

SEQ ID NO: 908814 - RNA, 27 nt, Human
ucaaaacgaaaccauuguuaucucuga

SEQ ID NO: 908815 - RNA, 21 nt, Human
ucaacagaagagacaagaaaa

SEQ ID NO: 908816 - RNA, 18 nt, Human
ucacagccacagggucgu

SEQ ID NO: 908817 - RNA, 20 nt, Human
ucacugucagccugaucacu

SEQ ID NO: 908818 - RNA, 18 nt, Human
ucacuguccccgugccca

SEQ ID NO: 908819 - RNA, 19 nt, Human
ucaggcaguguuuugcugc

SEQ ID NO: 908820 - RNA, 21 nt, Human
ucaguagguuuuccucgcucu

SEQ ID NO: 908821 - RNA, 18 nt, Human
ucagugggcaaguacuga

SEQ ID NO: 908822 - RNA, 21 nt, Human
uccacagacucucugcccaga

SEQ ID NO: 908823 - RNA, 22 nt, Human
uccccggcagucuugcaaaagc

SEQ ID NO: 908824 - RNA, 19 nt, Human
ucugcaaagacccuugcca

SEQ ID NO: 908825 - RNA, 23 nt, Human
ucugguucuuguucaagugguug

SEQ ID NO: 908826 - RNA, 18 nt, Human
ucuuggaggagagggcuc

SEQ ID NO: 908827 - RNA, 23 nt, Human
ugaaaaagaaaucagcaguggaa

SEQ ID NO: 908828 - RNA, 19 nt, Human
ugaaaugucugcuugcugc

SEQ ID NO: 908829 - RNA, 19 nt, Human
ugaaauucuuacuugcugc

SEQ ID NO: 908830 - RNA, 18 nt, Human
ugagcgaugaggcaggcg

SEQ ID NO: 908831 - RNA, 20 nt, Human
ugaucacuguccccgugccc

SEQ ID NO: 908832 - RNA, 21 nt, Human
ugauuggcugcagggaacugu

SEQ ID NO: 908833 - RNA, 24 nt, Human
ugcuugaugcugaggggaccucuu

SEQ ID NO: 908834 - RNA, 23 nt, Human
uggaaagaacauacuugugggca

SEQ ID NO: 908835 - RNA, 21 nt, Human
uggaaugcacaucugcaaaga

SEQ ID NO: 908836 - RNA, 20 nt, Human
uggaggagccagagagggag

SEQ ID NO: 908837 - RNA, 19 nt, Human
ugggggagggagcagggag

SEQ ID NO: 908838 - RNA, 22 nt, Human
uggguccuuuuuucccucugca

SEQ ID NO: 908839 - RNA, 24 nt, Human
ugugaugacugcuagaaauccacc

SEQ ID NO: 908840 - RNA, 22 nt, Human
uguuccuuguguuuauaugugu

SEQ ID NO: 908841 - RNA, 18 nt, Human
uucacuuucucacagcca

SEQ ID NO: 908842 - RNA, 21 nt, Human
uucaguagaagccugugauga

SEQ ID NO: 908843 - RNA, 19 nt, Human
uucucacagccacaggguc

SEQ ID NO: 908844 - RNA, 24 nt, Human
uugggcugcuugaugcugagggga

SEQ ID NO: 908845 - RNA, 27 nt, Human
uugguugggcugcuugaugcugagggg

SEQ ID NO: 908846 - RNA, 25 nt, Human
uuucaucucuccuuuuucuucucuc

SEQ ID NO: 908847 - RNA, 21 nt, Human
uuucccagugggauucacagu

SEQ ID NO: 908848 - RNA, 21 nt, Human
uuuuuuuuguuuuuguuuucg

SEQ ID NO: 908849 - RNA, 23 nt, Human
uuuuuuuuuucuuuuuucacuuu

SEQ ID NO: 908850 - RNA, 22 nt, Human
aaaaaaaucugacugcccacug

SEQ ID NO: 908851 - RNA, 23 nt, Human
aaaaaaaucugacugcccacuga

SEQ ID NO: 908852 - RNA, 21 nt, Human
aaacaacucucuuaagaccaa

SEQ ID NO: 908853 - RNA, 18 nt, Human
aaacauaacuucaggagc

SEQ ID NO: 908854 - RNA, 21 nt, Human
aaacucccuucauaaaaucag

SEQ ID NO: 908855 - RNA, 24 nt, Human
aacaacaucucaauacacuucagu

SEQ ID NO: 908856 - RNA, 19 nt, Human
aaguauuuggauagggaag

SEQ ID NO: 908857 - RNA, 22 nt, Human
aauaaauggaauagaacucccu

SEQ ID NO: 908858 - RNA, 22 nt, Human
aauauagccacucaagaaccaa

SEQ ID NO: 908859 - RNA, 18 nt, Human
aauaucaggauggaucag

SEQ ID NO: 908860 - RNA, 22 nt, Human
aaugaccauuaacuugucuaca

SEQ ID NO: 908861 - RNA, 21 nt, Human
acaacaagugacccacaagcc

SEQ ID NO: 908862 - RNA, 19 nt, Human
acaaucuuuucugcucccu

SEQ ID NO: 908863 - RNA, 19 nt, Human
acaccaacuuuuaaaagcc

SEQ ID NO: 908864 - RNA, 24 nt, Human
acagaaccauaaaacuuguuucuc

SEQ ID NO: 908865 - RNA, 26 nt, Human
acauaacuucaggagcaagggaacgc

SEQ ID NO: 908866 - RNA, 22 nt, Human
accaagagcgccuuccaaucua

SEQ ID NO: 908867 - RNA, 21 nt, Human
acccggucccagccccacccc

SEQ ID NO: 908868 - RNA, 23 nt, Human
agaaaacaccaacuuuuaaaagc

SEQ ID NO: 908869 - RNA, 21 nt, Human
agaaguauaccugucugggga

SEQ ID NO: 908870 - RNA, 20 nt, Human
agacaaaagauaaauggggg

SEQ ID NO: 908871 - RNA, 19 nt, Human
agaggcaaugaaaugagga

SEQ ID NO: 908872 - RNA, 22 nt, Human
agcaauuugcaauaucaaauac

SEQ ID NO: 908873 - RNA, 25 nt, Human
agccaaguggaccaaacuugucaga

SEQ ID NO: 908874 - RNA, 19 nt, Human
agccaauuccagcggcaca

SEQ ID NO: 908875 - RNA, 19 nt, Human
aggauggaucagggugaga

SEQ ID NO: 908876 - RNA, 22 nt, Human
auacagagcaacauggaguucu

SEQ ID NO: 908877 - RNA, 21 nt, Human
aucaaugccaaugccacucua

SEQ ID NO: 908878 - RNA, 19 nt, Human
aucacugugaaaauguaca

SEQ ID NO: 908879 - RNA, 20 nt, Human
aucaugauugggaaacacug

SEQ ID NO: 908880 - RNA, 18 nt, Human
auccuugcucagaaugcc

SEQ ID NO: 908881 - RNA, 21 nt, Human
augaaacaaaugaaaacagaa

SEQ ID NO: 908882 - RNA, 23 nt, Human
auggaucuauagcuugaagauga

SEQ ID NO: 908883 - RNA, 24 nt, Human
augguguuagcugguuuguuugcu

SEQ ID NO: 908884 - RNA, 20 nt, Human
auuuuuuuaagaaaaagaaa

SEQ ID NO: 908885 - RNA, 22 nt, Human
caaaaauaaguaaaacauucaa

SEQ ID NO: 908886 - RNA, 20 nt, Human
caaaaucaaugccaaugcca

SEQ ID NO: 908887 - RNA, 18 nt, Human
caaagcuaauuugcucca

SEQ ID NO: 908888 - RNA, 23 nt, Human
caacaacuucauuaggacaaugu

SEQ ID NO: 908889 - RNA, 23 nt, Human
caagaaaacgaagagagcugcaa

SEQ ID NO: 908890 - RNA, 21 nt, Human
caaggccccaugaacaacuca

SEQ ID NO: 908891 - RNA, 25 nt, Human
caauaugauuccuauuugaaauuaa

SEQ ID NO: 908892 - RNA, 18 nt, Human
cacaacaagugacccaca

SEQ ID NO: 908893 - RNA, 27 nt, Human
caccaacuuuuaaaagccuuuugccau

SEQ ID NO: 908894 - RNA, 18 nt, Human
cacccccucccucaaaac

SEQ ID NO: 908895 - RNA, 20 nt, Human
cacccccucccucaaaaccc

SEQ ID NO: 908896 - RNA, 19 nt, Human
cacuacaaaaaacaguggc

SEQ ID NO: 908897 - RNA, 19 nt, Human
cacuugugcuucugagagg

SEQ ID NO: 908898 - RNA, 23 nt, Human
cagcaaaguagcggcauugggaa

SEQ ID NO: 908899 - RNA, 24 nt, Human
cagccaguggccucucuggcucaa

SEQ ID NO: 908900 - RNA, 25 nt, Human
cagcccaugacgugcuuugcagucu

SEQ ID NO: 908901 - RNA, 21 nt, Human
cagcggcacaagaaaacgaag

SEQ ID NO: 908902 - RNA, 24 nt, Human
cagcuaaacucccuucauaaaauc

SEQ ID NO: 908903 - RNA, 20 nt, Human
caggucggggucgcgagcag

SEQ ID NO: 908904 - RNA, 22 nt, Human
cagucauaugcugaaguaacac

SEQ ID NO: 908905 - RNA, 18 nt, Human
cauacagaucagcauaua

SEQ ID NO: 908906 - RNA, 21 nt, Human
cauacagaucagcauauacaa

SEQ ID NO: 908907 - RNA, 24 nt, Human
cauggaguucucaaucccagccca

SEQ ID NO: 908908 - RNA, 19 nt, Human
caugguguugcucauucau

SEQ ID NO: 908909 - RNA, 21 nt, Human
caugguguugcucauucauuu

SEQ ID NO: 908910 - RNA, 22 nt, Human
cauguuuagagaacaaaaggga

SEQ ID NO: 908911 - RNA, 25 nt, Human
cauguuuagagaacaaaagggagaa

SEQ ID NO: 908912 - RNA, 21 nt, Human
ccaaaaaugacuuucugcaau

SEQ ID NO: 908913 - RNA, 21 nt, Human
ccacccccaaacauccccuuu

SEQ ID NO: 908914 - RNA, 20 nt, Human
ccaucaccacacacauagca

SEQ ID NO: 908915 - RNA, 18 nt, Human
ccauuuaaaacuuggcug

SEQ ID NO: 908916 - RNA, 21 nt, Human
cccaacaucaaggccccauga

SEQ ID NO: 908917 - RNA, 26 nt, Human
cccaagagaaaagcaaaaucaaugcc

SEQ ID NO: 908918 - RNA, 26 nt, Human
cccacccccaaacauccccuuugaau

SEQ ID NO: 908919 - RNA, 23 nt, Human
cccaucccuacugccuuacccac

SEQ ID NO: 908920 - RNA, 19 nt, Human
cccaugaacaacucaagcc

SEQ ID NO: 908921 - RNA, 22 nt, Human
ccccaugaacaacucaagccaa

SEQ ID NO: 908922 - RNA, 26 nt, Human
cccugccucucccuaaacugcccuuu

SEQ ID NO: 908923 - RNA, 21 nt, Human
ccuaccuaaccccaucccuac

SEQ ID NO: 908924 - RNA, 21 nt, Human
ccucaaaacccuucucccucc

SEQ ID NO: 908925 - RNA, 20 nt, Human
ccuuaggugcaauuuuggau

SEQ ID NO: 908926 - RNA, 26 nt, Human
cgagcagacacagagagcagauaggc

SEQ ID NO: 908927 - RNA, 24 nt, Human
cgagcuauccccuucacccugccu

SEQ ID NO: 908928 - RNA, 26 nt, Human
cgagcuucagaaacaaccuuuugggg

SEQ ID NO: 908929 - RNA, 18 nt, Human
cgaucugguaggagacac

SEQ ID NO: 908930 - RNA, 20 nt, Human
cuaaccccaucccuacugcc

SEQ ID NO: 908931 - RNA, 26 nt, Human
cuacagcaaaaagaguuggcuaaauc

SEQ ID NO: 908932 - RNA, 22 nt, Human
cuaccaaaaugaaauaaaucag

SEQ ID NO: 908933 - RNA, 22 nt, Human
cucaagccaaagcuaauuugcu

SEQ ID NO: 908934 - RNA, 18 nt, Human
cugguuuguuugcuaagg

SEQ ID NO: 908935 - RNA, 26 nt, Human
cuuacccacccccucccucaaaaccc

SEQ ID NO: 908936 - RNA, 19 nt, Human
cuugaauugccaacacagc

SEQ ID NO: 908937 - RNA, 20 nt, Human
gagcaacuuuccuguucagg

SEQ ID NO: 908938 - RNA, 20 nt, Human
gagcuuauuaaaggugucca

SEQ ID NO: 908939 - RNA, 18 nt, Human
gcaaaguagcggcauugg

SEQ ID NO: 908940 - RNA, 19 nt, Human
gcagccaguggccucucug

SEQ ID NO: 908941 - RNA, 19 nt, Human
gccaaaaaaaucugacugc

SEQ ID NO: 908942 - RNA, 19 nt, Human
gccaaugccacucuaacca

SEQ ID NO: 908943 - RNA, 20 nt, Human
gccugaaaauuuaaaagaug

SEQ ID NO: 908944 - RNA, 20 nt, Human
ggaauuccagccagaacugc

SEQ ID NO: 908945 - RNA, 19 nt, Human
gggaaacagagaaccacca

SEQ ID NO: 908946 - RNA, 20 nt, Human
guacugcuuacucuaucccu

SEQ ID NO: 908947 - RNA, 19 nt, Human
gucccagccccacccccaa

SEQ ID NO: 908948 - RNA, 23 nt, Human
gugaguauucuccaaguacucaa

SEQ ID NO: 908949 - RNA, 22 nt, Human
guguccagagcuuuuuuuuuuc

SEQ ID NO: 908950 - RNA, 18 nt, Human
uaaaacuuguuucucuag

SEQ ID NO: 908951 - RNA, 19 nt, Human
uaaaucagagggagaaaac

SEQ ID NO: 908952 - RNA, 23 nt, Human
uaacuucaggagcaacuuuccug

SEQ ID NO: 908953 - RNA, 21 nt, Human
uaagaaauaaggauggauuug

SEQ ID NO: 908954 - RNA, 23 nt, Human
uaagaccaaggcagaacaaaggu

SEQ ID NO: 908955 - RNA, 19 nt, Human
uaagggucuuauuacccgg

SEQ ID NO: 908956 - RNA, 22 nt, Human
uaaucaugauugggaaacacug

SEQ ID NO: 908957 - RNA, 22 nt, Human
uaauucacuuuugcacaacaag

SEQ ID NO: 908958 - RNA, 25 nt, Human
uacaacaauagcacagcuagcaaaa

SEQ ID NO: 908959 - RNA, 23 nt, Human
uaccaagaaggcaaacacuagga

SEQ ID NO: 908960 - RNA, 23 nt, Human
uacccacccccucccucaaaacc

SEQ ID NO: 908961 - RNA, 20 nt, Human
uacugccuuacccacccccu

SEQ ID NO: 908962 - RNA, 25 nt, Human
uagcuucauuauaaguucuuuuuca

SEQ ID NO: 908963 - RNA, 22 nt, Human
uaggagacacugccguugagac

SEQ ID NO: 908964 - RNA, 18 nt, Human
uaggcugcaaaaauacua

SEQ ID NO: 908965 - RNA, 23 nt, Human
uauaagccuaagauacagagcaa

SEQ ID NO: 908966 - RNA, 25 nt, Human
ucaaggccccaugaacaacucaagc

SEQ ID NO: 908967 - RNA, 18 nt, Human
ucacagaaugauaaucac

SEQ ID NO: 908968 - RNA, 18 nt, Human
uccaacugaacaccccug

SEQ ID NO: 908969 - RNA, 22 nt, Human
ucccagccccacccccaaacau

SEQ ID NO: 908970 - RNA, 22 nt, Human
ucccuacugccuuacccacccc

SEQ ID NO: 908971 - RNA, 20 nt, Human
ucccucaaaacccuucuccc

SEQ ID NO: 908972 - RNA, 21 nt, Human
uccuugcugcuucaaguggac

SEQ ID NO: 908973 - RNA, 24 nt, Human
ucucuuaagaccaaggcagaacaa

SEQ ID NO: 908974 - RNA, 23 nt, Human
ucuguauccuagccuuccucagc

SEQ ID NO: 908975 - RNA, 24 nt, Human
ucuuuuucagaaauguucuccccu

SEQ ID NO: 908976 - RNA, 24 nt, Human
ugaaaagaaaugaagaaaacccaa

SEQ ID NO: 908977 - RNA, 22 nt, Human
ugaaacaaaugaaaacagaacc

SEQ ID NO: 908978 - RNA, 24 nt, Human
ugaaauuaauucacuuuugcacaa

SEQ ID NO: 908979 - RNA, 23 nt, Human
ugaacaacucaagccaaagcuaa

SEQ ID NO: 908980 - RNA, 19 nt, Human
ugacccacaagccaauucc

SEQ ID NO: 908981 - RNA, 25 nt, Human
ugagacauacuguacuugcaucccu

SEQ ID NO: 908982 - RNA, 23 nt, Human
ugaguucaagugucugagugucu

SEQ ID NO: 908983 - RNA, 18 nt, Human
ugcaugagguaguauuca

SEQ ID NO: 908984 - RNA, 25 nt, Human
ugcuaagguugacagcaacuuucag

SEQ ID NO: 908985 - RNA, 18 nt, Human
ugcuucaaguggaccacu

SEQ ID NO: 908986 - RNA, 18 nt, Human
uggcucaacagccacgug

SEQ ID NO: 908987 - RNA, 22 nt, Human
uggggcgggggggacaugagcc

SEQ ID NO: 908988 - RNA, 22 nt, Human
uuaaagggggaaacagagaacc

SEQ ID NO: 908989 - RNA, 22 nt, Human
uuaauacuaaaaugcauuaaau

SEQ ID NO: 908990 - RNA, 18 nt, Human
uuacaaagccuuccuagu

SEQ ID NO: 908991 - RNA, 20 nt, Human
uuaccaagaaggcaaacacu

SEQ ID NO: 908992 - RNA, 21 nt, Human
uuaugccaguuuuucaaaguc

SEQ ID NO: 908993 - RNA, 25 nt, Human
uucagaaacaaccuuuugggggcuu

SEQ ID NO: 908994 - RNA, 24 nt, Human
uucagagaucuaaauuguauuuuu

SEQ ID NO: 908995 - RNA, 23 nt, Human
uucauuaucaauauaaagccacc

SEQ ID NO: 908996 - RNA, 20 nt, Human
uucauuugcugucucaguug

SEQ ID NO: 908997 - RNA, 21 nt, Human
uucucaaucccagcccaugac

SEQ ID NO: 908998 - RNA, 23 nt, Human
uugaagcagagaaaacacauuua

SEQ ID NO: 908999 - RNA, 18 nt, Human
uugccaucaccacacaca

SEQ ID NO: 909000 - RNA, 18 nt, Human
uugcugcuucaaguggac

SEQ ID NO: 909001 - RNA, 21 nt, Human
uuguauuuuuuaaaaauauuu

SEQ ID NO: 909002 - RNA, 20 nt, Human
uugucagaaugcuuuggggg

SEQ ID NO: 909003 - RNA, 22 nt, Human
uuguuugcacuuuguuuuuguc

SEQ ID NO: 909004 - RNA, 21 nt, Human
uuugcuccaacugaacacccc

SEQ ID NO: 909005 - RNA, 19 nt, Human
uuuuaaauguaauccucca

SEQ ID NO: 909006 - RNA, 19 nt, Human
uuuucugcucccugguucc

SEQ ID NO: 909007 - RNA, 24 nt, Human
aaacaacaacaaaaagauaaguac

SEQ ID NO: 909008 - RNA, 22 nt, Human
aaacaaccaguaguguacacaa

SEQ ID NO: 909009 - RNA, 19 nt, Human
aaaugguagucaacaaacc

SEQ ID NO: 909010 - RNA, 19 nt, Human
aacaaacaaaugacaggca

SEQ ID NO: 909011 - RNA, 25 nt, Human
aacauuucucuguguuauuccacca

SEQ ID NO: 909012 - RNA, 20 nt, Human
aaccuaaacaacaacaaaaa

SEQ ID NO: 909013 - RNA, 21 nt, Human
aagcaaacagaaagcaauucg

SEQ ID NO: 909014 - RNA, 19 nt, Human
aagcccauguucaaauaua

SEQ ID NO: 909015 - RNA, 21 nt, Human
aauccaaaaccaaagaaagga

SEQ ID NO: 909016 - RNA, 25 nt, Human
aauucacuuuuaauaugauuucuau

SEQ ID NO: 909017 - RNA, 21 nt, Human
acagaaagcaauucgaguaca

SEQ ID NO: 909018 - RNA, 21 nt, Human
acagaugcaugaugccaaaaa

SEQ ID NO: 909019 - RNA, 19 nt, Human
acccaauguuuaauugagu

SEQ ID NO: 909020 - RNA, 18 nt, Human
agaaagaaauuaugaaaa

SEQ ID NO: 909021 - RNA, 24 nt, Human
agcuuuuuuuuuuuuuuuuuuuaa

SEQ ID NO: 909022 - RNA, 19 nt, Human
auaaaucacugaugaaaua

SEQ ID NO: 909023 - RNA, 21 nt, Human
auauauguauguauauaucua

SEQ ID NO: 909024 - RNA, 24 nt, Human
augaagaauauauauauguaugua

SEQ ID NO: 909025 - RNA, 22 nt, Human
augaagcaacuaaagauugaag

SEQ ID NO: 909026 - RNA, 19 nt, Human
caaaaccaaagaaaggaag

SEQ ID NO: 909027 - RNA, 24 nt, Human
caaaaccaaagaaaggaagccaga

SEQ ID NO: 909028 - RNA, 22 nt, Human
caaacagaaagcaauucgagua

SEQ ID NO: 909029 - RNA, 19 nt, Human
caaaccuaaacaacaacaa

SEQ ID NO: 909030 - RNA, 22 nt, Human
caaaccuaaacaacaacaaaaa

SEQ ID NO: 909031 - RNA, 22 nt, Human
caaaggagcagcugaugcccuc

SEQ ID NO: 909032 - RNA, 19 nt, Human
caacugccaaguacaauac

SEQ ID NO: 909033 - RNA, 25 nt, Human
caacugccaaguacaauaccccagu

SEQ ID NO: 909034 - RNA, 21 nt, Human
caagcuuuuuuuuuuuuuuuu

SEQ ID NO: 909035 - RNA, 21 nt, Human
caagcuuuuuuuuuuuuuuuu

SEQ ID NO: 909036 - RNA, 23 nt, Human
cacauuuaacccuaaaaacaaac

SEQ ID NO: 909037 - RNA, 21 nt, Human
caguauaacuuucauauaaaa

SEQ ID NO: 909038 - RNA, 22 nt, Human
cauauaaaaggcccaacuaaaa

SEQ ID NO: 909039 - RNA, 18 nt, Human
ccaagcuuuuuuuuuuuu

SEQ ID NO: 909040 - RNA, 19 nt, Human
ccagcucacucccagggcc

SEQ ID NO: 909041 - RNA, 20 nt, Human
ccagcucacucccagggccu

SEQ ID NO: 909042 - RNA, 22 nt, Human
ccccaguuuccugcaaaggagc

SEQ ID NO: 909043 - RNA, 20 nt, Human
ccucuuguggugacaggaau

SEQ ID NO: 909044 - RNA, 22 nt, Human
cgggcaccagcucacucccagg

SEQ ID NO: 909045 - RNA, 20 nt, Human
cuaaaaacaaacaaaugaca

SEQ ID NO: 909046 - RNA, 23 nt, Human
cuaaacaacaacaaaaagauaag

SEQ ID NO: 909047 - RNA, 21 nt, Human
cuucuggcuguuuuucuuggg

SEQ ID NO: 909048 - RNA, 22 nt, Human
gaagcaacuaaagauugaagca

SEQ ID NO: 909049 - RNA, 19 nt, Human
gguagucaacaaaccuaaa

SEQ ID NO: 909050 - RNA, 24 nt, Human
guacacaagccucuagaagaauuc

SEQ ID NO: 909051 - RNA, 18 nt, Human
guacagaugcaugaugcc

SEQ ID NO: 909052 - RNA, 18 nt, Human
gugcagugguaaagcaaa

SEQ ID NO: 909053 - RNA, 19 nt, Human
guggaauacucuucagcag

SEQ ID NO: 909054 - RNA, 22 nt, Human
guuacccacauuuaacccuaaa

SEQ ID NO: 909055 - RNA, 22 nt, Human
uaaaaaugcuguacacauuuua

SEQ ID NO: 909056 - RNA, 28 nt, Human
uaaaacaaccaguaguguaacuaacgag

SEQ ID NO: 909057 - RNA, 21 nt, Human
uaaaaggcccaacuaaaacaa

SEQ ID NO: 909058 - RNA, 25 nt, Human
uaaguacaguauaacuuucauauaa

SEQ ID NO: 909059 - RNA, 20 nt, Human
uauauauauguauguauaua

SEQ ID NO: 909060 - RNA, 26 nt, Human
ucaacaaaccuaaacaacaacaaaaa

SEQ ID NO: 909061 - RNA, 21 nt, Human
uccaaaaccaaagaaaggaag

SEQ ID NO: 909062 - RNA, 23 nt, Human
uccaaaaccaaagaaaggaagcc

SEQ ID NO: 909063 - RNA, 21 nt, Human
uccuauagcuguuaguacuuc

SEQ ID NO: 909064 - RNA, 24 nt, Human
ucgcacuucuuuuuaaugccuucu

SEQ ID NO: 909065 - RNA, 22 nt, Human
ugaagaauauauauauguaugu

SEQ ID NO: 909066 - RNA, 21 nt, Human
ugaauugaaagugauaaauca

SEQ ID NO: 909067 - RNA, 21 nt, Human
ugccaaaaaguaaaaugaucc

SEQ ID NO: 909068 - RNA, 18 nt, Human
ugccaaguacaauacccc

SEQ ID NO: 909069 - RNA, 19 nt, Human
uggaacugccaucaacaca

SEQ ID NO: 909070 - RNA, 24 nt, Human
uggaugauuucaagccuauaaaag

SEQ ID NO: 909071 - RNA, 21 nt, Human
ugguaaagcaaacagaaagca

SEQ ID NO: 909072 - RNA, 22 nt, Human
uguauguauauaucuauuuccc

SEQ ID NO: 909073 - RNA, 27 nt, Human
uguuccauuuuucuuaccuuacuccca

SEQ ID NO: 909074 - RNA, 27 nt, Human
uuaaaaaugcuguacacauuuuauaac

SEQ ID NO: 909075 - RNA, 19 nt, Human
uuccugcaaaggagcagcu

SEQ ID NO: 909076 - RNA, 22 nt, Human
uugcuucuggcuguuuuucuug

SEQ ID NO: 909077 - RNA, 22 nt, Human
uuuaacccuaaaaacaaacaaa

SEQ ID NO: 909078 - RNA, 24 nt, Human
uuuaauccaaaaccaaagaaagga

SEQ ID NO: 909079 - RNA, 20 nt, Human
uuuuaaugccuucucuuuca

SEQ ID NO: 909080 - RNA, 20 nt, Human
aaacauggcuauguaacacc

SEQ ID NO: 909081 - RNA, 21 nt, Human
aaucaaaaccucagauuucug

SEQ ID NO: 909082 - RNA, 20 nt, Human
acacaccaaaaguauaugaa

SEQ ID NO: 909083 - RNA, 22 nt, Human
gcaguuggaaagaauuaaaacc

SEQ ID NO: 909084 - RNA, 19 nt, Human
ggaaauguagauaugccuu

SEQ ID NO: 909085 - RNA, 19 nt, Human
uaaaaccacagggguauac

SEQ ID NO: 909086 - RNA, 20 nt, Human
uaaacuaauagaaacauggc

SEQ ID NO: 909087 - RNA, 22 nt, Human
uaacacaccaaaaguauaugaa

SEQ ID NO: 909088 - RNA, 19 nt, Human
ugagaugcaagcucugaaa

SEQ ID NO: 909089 - RNA, 23 nt, Human
ugaugaaacauuguaaaaccaca

SEQ ID NO: 909090 - RNA, 22 nt, Human
aucaaauaacggucugucuuca

SEQ ID NO: 909091 - RNA, 24 nt, Human
auggcggcggcaguggcggcuccu

SEQ ID NO: 909092 - RNA, 21 nt, Human
cagacacaaaauggcggcggc

SEQ ID NO: 909093 - RNA, 27 nt, Human
caguggcggcuccagcuccgaaaaugu

SEQ ID NO: 909094 - RNA, 19 nt, Human
ccagcuccgaaaaugucug

SEQ ID NO: 909095 - RNA, 27 nt, Human
ccccgccucccuuccgacuccucuucc

SEQ ID NO: 909096 - RNA, 18 nt, Human
ccuucaaaaaucaucuuc

SEQ ID NO: 909097 - RNA, 20 nt, Human
cgccgccgucucgcggguga

SEQ ID NO: 909098 - RNA, 24 nt, Human
cgccgcggccccccuccgaggucc

SEQ ID NO: 909099 - RNA, 20 nt, Human
cgcgggugaucuccguccac

SEQ ID NO: 909100 - RNA, 21 nt, Human
cggcggcaguggcggcuccag

SEQ ID NO: 909101 - RNA, 27 nt, Human
cggcuccagcuccgaaaaugucugugu

SEQ ID NO: 909102 - RNA, 22 nt, Human
cggcuucaccacaugcugaccg

SEQ ID NO: 909103 - RNA, 20 nt, Human
cuccggcuucaccacaugcu

SEQ ID NO: 909104 - RNA, 23 nt, Human
cucucucgcggcuccggcuucac

SEQ ID NO: 909105 - RNA, 24 nt, Human
gaagccgcucuggauaccccgccu

SEQ ID NO: 909106 - RNA, 25 nt, Human
gcggcggcaguggcggcuccagcuc

SEQ ID NO: 909107 - RNA, 21 nt, Human
gcuccggcuucaccacaugcu

SEQ ID NO: 909108 - RNA, 20 nt, Human
ggggaugggggacgacacag

SEQ ID NO: 909109 - RNA, 23 nt, Human
gggggacgacacagggggaaccu

SEQ ID NO: 909110 - RNA, 22 nt, Human
ggggggaugggggacgacacag

SEQ ID NO: 909111 - RNA, 21 nt, Human
uccacagacacaaaauggcgg

SEQ ID NO: 909112 - RNA, 20 nt, Human
ucccuuccgacuccucuucc

SEQ ID NO: 909113 - RNA, 21 nt, Human
uccguccacuuccagccgcca

SEQ ID NO: 909114 - RNA, 19 nt, Human
uccucuuccucuccccggc

SEQ ID NO: 909115 - RNA, 21 nt, Human
ucgcgggugaucuccguccac

SEQ ID NO: 909116 - RNA, 21 nt, Human
ucuccguccacuuccagccgc

SEQ ID NO: 909117 - RNA, 18 nt, Human
ucugucuucagcuaaagc

SEQ ID NO: 909118 - RNA, 18 nt, Human
ucugucuucagcuaaagc

SEQ ID NO: 909119 - RNA, 18 nt, Human
uggcggcggcaguggcgg

SEQ ID NO: 909120 - RNA, 22 nt, Human
uuuuuuuuuuuuuuuuuccgga

SEQ ID NO: 909121 - RNA, 24 nt, Human
uuuuuuuuuuuuuuuuuccggagu

SEQ ID NO: 909122 - RNA, 25 nt, Human
uuuuuuuuuuuuuuuuuuuuuccgg

SEQ ID NO: 909123 - RNA, 22 nt, Human
aggggcugcgggguggccagga

SEQ ID NO: 909124 - RNA, 21 nt, Human
aggugccuucccuauucccag

SEQ ID NO: 909125 - RNA, 18 nt, Human
caccugggcaggggcugc

SEQ ID NO: 909126 - RNA, 24 nt, Human
caggaaccgagcggagccggggag

SEQ ID NO: 909127 - RNA, 18 nt, Human
ccggggagguauggaagg

SEQ ID NO: 909128 - RNA, 18 nt, Human
gccuucccuauucccaga

SEQ ID NO: 909129 - RNA, 21 nt, Human
ucccuauucccagaugagggu

SEQ ID NO: 909130 - RNA, 22 nt, Human
ugcaaggugccuucccuauucc

SEQ ID NO: 909131 - RNA, 18 nt, Human
ugcuauguccucuugcua

SEQ ID NO: 909132 - RNA, 18 nt, Human
agcuggccucaagagccc

SEQ ID NO: 909133 - RNA, 19 nt, Human
augauaauggcaaaauauc

SEQ ID NO: 909134 - RNA, 19 nt, Human
cagcagggauuacuuuuau

SEQ ID NO: 909135 - RNA, 20 nt, Human
cauuuggaacuaggagggga

SEQ ID NO: 909136 - RNA, 23 nt, Human
ccucaagagccccgcaguccucc

SEQ ID NO: 909137 - RNA, 20 nt, Human
ucucugcucagauuuuguuc

SEQ ID NO: 909138 - RNA, 19 nt, Human
ugauaauggcaaaauaucu

SEQ ID NO: 909139 - RNA, 23 nt, Human
uuuccuaugaccagcagggauug

SEQ ID NO: 909140 - RNA, 18 nt, Human
aacaagagugacagaccu

SEQ ID NO: 909141 - RNA, 21 nt, Human
acaaucaccaaacaaacccaa

SEQ ID NO: 909142 - RNA, 18 nt, Human
agagugacagaccugaaa

SEQ ID NO: 909143 - RNA, 18 nt, Human
agcggaagggccagagga

SEQ ID NO: 909144 - RNA, 20 nt, Human
agggccagaggaauuaagcu

SEQ ID NO: 909145 - RNA, 23 nt, Human
auaaauacacacagcagcuucau

SEQ ID NO: 909146 - RNA, 19 nt, Human
cacacagcagcuucauuag

SEQ ID NO: 909147 - RNA, 18 nt, Human
cagcacagaggacauugg

SEQ ID NO: 909148 - RNA, 22 nt, Human
cagcuucauuagagauuucaau

SEQ ID NO: 909149 - RNA, 19 nt, Human
ccuuuugaauguacacaau

SEQ ID NO: 909150 - RNA, 22 nt, Human
cugaaauuacaaucaccaaaca

SEQ ID NO: 909151 - RNA, 18 nt, Human
cugcuaccuacauuuacc

SEQ ID NO: 909152 - RNA, 21 nt, Human
gacagaccugaaauuacaauc

SEQ ID NO: 909153 - RNA, 18 nt, Human
guauuaggagagccuuuu

SEQ ID NO: 909154 - RNA, 23 nt, Human
ucauauauauuuucucucuuccu

SEQ ID NO: 909155 - RNA, 23 nt, Human
ugaauguacacaauguaacaaga

SEQ ID NO: 909156 - RNA, 23 nt, Human
ugcacugcuaccuacauuuaccu

SEQ ID NO: 909157 - RNA, 21 nt, Human
ugcagaacgucucacuccuga

SEQ ID NO: 909158 - RNA, 22 nt, Human
uguaacugagaagcggaagggc

SEQ ID NO: 909159 - RNA, 21 nt, Human
aaaaaaaagcggcuccaaaga

SEQ ID NO: 909160 - RNA, 27 nt, Human
aaaaaacaagagaagcacauucaaaag

SEQ ID NO: 909161 - RNA, 23 nt, Human
aaaaaauaaaaacagccaaauac

SEQ ID NO: 909162 - RNA, 24 nt, Human
aaaaagcggcuccaaagauagucu

SEQ ID NO: 909163 - RNA, 21 nt, Human
aaaaauacaaaacaaacaccc

SEQ ID NO: 909164 - RNA, 22 nt, Human
aaaacaaaugcccauaaggaaa

SEQ ID NO: 909165 - RNA, 26 nt, Human
aaaagaaaaaaaaagcggcuccaaag

SEQ ID NO: 909166 - RNA, 23 nt, Human
aaaauacaaaacaaacacccuac

SEQ ID NO: 909167 - RNA, 20 nt, Human
aaacaagagaagcacauuca

SEQ ID NO: 909168 - RNA, 19 nt, Human
aaacaggaaaauggacaaa

SEQ ID NO: 909169 - RNA, 27 nt, Human
aaacaggaaaauggacaaaagggaccc

SEQ ID NO: 909170 - RNA, 22 nt, Human
aaagcggcuccaaagauagucu

SEQ ID NO: 909171 - RNA, 22 nt, Human
aacacccuacaauacacaaauc

SEQ ID NO: 909172 - RNA, 23 nt, Human
aacacccuacaauacacaaaucu

SEQ ID NO: 909173 - RNA, 23 nt, Human
aacagucugaagcugccuccaaa

SEQ ID NO: 909174 - RNA, 20 nt, Human
aagcggcuccaaagauaguc

SEQ ID NO: 909175 - RNA, 19 nt, Human
aaucacaugaaacuacaaa

SEQ ID NO: 909176 - RNA, 25 nt, Human
aauuucaaacucucauuuauuagug

SEQ ID NO: 909177 - RNA, 27 nt, Human
acaauacaaaaauacaaaacaaacacc

SEQ ID NO: 909178 - RNA, 18 nt, Human
acacccaccccacacccc

SEQ ID NO: 909179 - RNA, 23 nt, Human
acccaccccacaccccaauuuca

SEQ ID NO: 909180 - RNA, 22 nt, Human
accccacaccccaauuucaaaa

SEQ ID NO: 909181 - RNA, 24 nt, Human
agaaaaaaaaagcggcuccaaaga

SEQ ID NO: 909182 - RNA, 20 nt, Human
agacccauuaaggugaagug

SEQ ID NO: 909183 - RNA, 22 nt, Human
auaaacaaaaaacaagagaagc

SEQ ID NO: 909184 - RNA, 24 nt, Human
auacugauuuacuuugguagcaaa

SEQ ID NO: 909185 - RNA, 23 nt, Human
aucucagucauuucucucuccca

SEQ ID NO: 909186 - RNA, 20 nt, Human
augcuuuugucugugacuau

SEQ ID NO: 909187 - RNA, 25 nt, Human
caaaaaacaagagaagcacauucaa

SEQ ID NO: 909188 - RNA, 22 nt, Human
caaaaauacaaaacaaacaccc

SEQ ID NO: 909189 - RNA, 23 nt, Human
caaaaauacaaaacaaacacccu

SEQ ID NO: 909190 - RNA, 19 nt, Human
cacaggcugcuucucugga

SEQ ID NO: 909191 - RNA, 28 nt, Human
cacccaccccacaccccaauuucaaaac

SEQ ID NO: 909192 - RNA, 22 nt, Human
caccccaauuucaaaacaucau

SEQ ID NO: 909193 - RNA, 26 nt, Human
caccccacaccccaauuucaaaacau

SEQ ID NO: 909194 - RNA, 24 nt, Human
cagucugaagcugccuccaaauau

SEQ ID NO: 909195 - RNA, 20 nt, Human
caugaaacuacaaaauuagc

SEQ ID NO: 909196 - RNA, 18 nt, Human
ccaccccacaccccaauu

SEQ ID NO: 909197 - RNA, 19 nt, Human
ccaccccacaccccaauuu

SEQ ID NO: 909198 - RNA, 18 nt, Human
cccacaccccaauuucaa

SEQ ID NO: 909199 - RNA, 21 nt, Human
cccacaccccaauuucaaaac

SEQ ID NO: 909200 - RNA, 23 nt, Human
ccccacaccccaauuucaaaaca

SEQ ID NO: 909201 - RNA, 19 nt, Human
ccuacaauacacaaaucua

SEQ ID NO: 909202 - RNA, 21 nt, Human
cuagcuaauaaacaaaaaaca

SEQ ID NO: 909203 - RNA, 23 nt, Human
cuagcuaauaaacaaaaaacaag

SEQ ID NO: 909204 - RNA, 24 nt, Human
cucagcaagcagcuaccaccaaua

SEQ ID NO: 909205 - RNA, 24 nt, Human
cuuuuaaaaaauaaaaacagccaa

SEQ ID NO: 909206 - RNA, 22 nt, Human
gaaaaaaaaagcggcuccaaag

SEQ ID NO: 909207 - RNA, 22 nt, Human
gaagaugcauuuucuuuccuuc

SEQ ID NO: 909208 - RNA, 21 nt, Human
gguaauaagggaguuaagaga

SEQ ID NO: 909209 - RNA, 24 nt, Human
gucaauaguucaguaacauuuucu

SEQ ID NO: 909210 - RNA, 23 nt, Human
uaaaaaaaaaaucuuuuaagagc

SEQ ID NO: 909211 - RNA, 21 nt, Human
uaaaaaaaguucauauacaau

SEQ ID NO: 909212 - RNA, 18 nt, Human
uaaaaaauaaaaacagcc

SEQ ID NO: 909213 - RNA, 22 nt, Human
uaaaagaaacagcuuccuuacg

SEQ ID NO: 909214 - RNA, 19 nt, Human
uaacaaaguauauguggug

SEQ ID NO: 909215 - RNA, 22 nt, Human
uacaaaaauacaaaacaaacac

SEQ ID NO: 909216 - RNA, 26 nt, Human
uacaaaaauacaaaacaaacacccua

SEQ ID NO: 909217 - RNA, 23 nt, Human
uacaaaauuagcaaaugucuuga

SEQ ID NO: 909218 - RNA, 23 nt, Human
uacaauacaaaaauacaaaacaa

SEQ ID NO: 909219 - RNA, 25 nt, Human
uaccaccaauaaaacagucugaagc

SEQ ID NO: 909220 - RNA, 18 nt, Human
uaggagagguauguuauu

SEQ ID NO: 909221 - RNA, 30 nt, Human
uccacggauagcaaugcaauaccuaguuuu

SEQ ID NO: 909222 - RNA, 24 nt, Human
ucccaauacaauacucccucucuc

SEQ ID NO: 909223 - RNA, 28 nt, Human
ugaaaaagaaaaaaaaagcggcuccaaa

SEQ ID NO: 909224 - RNA, 20 nt, Human
ugacuugaaacaaaacaaau

SEQ ID NO: 909225 - RNA, 22 nt, Human
ugacuugaaacaaaacaaaugc

SEQ ID NO: 909226 - RNA, 24 nt, Human
ugacuugaaacaaaacaaaugccc

SEQ ID NO: 909227 - RNA, 25 nt, Human
ugauuucuuuauuaucuguaaccuu

SEQ ID NO: 909228 - RNA, 19 nt, Human
uggaaacuaaucacaugaa

SEQ ID NO: 909229 - RNA, 23 nt, Human
ugguggaaaugcuuacaggaacu

SEQ ID NO: 909230 - RNA, 21 nt, Human
ugucugugacuaugcuuuuaa

SEQ ID NO: 909231 - RNA, 19 nt, Human
uguguuuuaaaagaaacag

SEQ ID NO: 909232 - RNA, 25 nt, Human
uuaaaguaaguuaaauucauguauc

SEQ ID NO: 909233 - RNA, 21 nt, Human
uucaaauauucaacaguuuac

SEQ ID NO: 909234 - RNA, 21 nt, Human
uuuacacccaccccacacccc

SEQ ID NO: 909235 - RNA, 19 nt, Human
uuuccauugucuuacuugg

SEQ ID NO: 909236 - RNA, 19 nt, Human
acaaaacaacaggaagcca

SEQ ID NO: 909237 - RNA, 26 nt, Human
acaaaacaacaggaagccauucucug

SEQ ID NO: 909238 - RNA, 23 nt, Human
acacagccagggcucaugggagu

SEQ ID NO: 909239 - RNA, 22 nt, Human
agcuuccuugggaaaagggaaa

SEQ ID NO: 909240 - RNA, 19 nt, Human
aggcaggaaggauggaucu

SEQ ID NO: 909241 - RNA, 20 nt, Human
aggcaggaaggauggaucug

SEQ ID NO: 909242 - RNA, 22 nt, Human
agggaaaaacaaaucuuuuccu

SEQ ID NO: 909243 - RNA, 23 nt, Human
augggagugagugcccgucaccu

SEQ ID NO: 909244 - RNA, 18 nt, Human
cacaaacaaaacagugau

SEQ ID NO: 909245 - RNA, 19 nt, Human
cacaacagcacacagccag

SEQ ID NO: 909246 - RNA, 20 nt, Human
cacguuaagaaaauaaacaa

SEQ ID NO: 909247 - RNA, 28 nt, Human
ccgauaggcacacaacagcacacagcca

SEQ ID NO: 909248 - RNA, 24 nt, Human
ccuugggaaaagggaaaaacaaau

SEQ ID NO: 909249 - RNA, 22 nt, Human
cguuaagaaaauaaacaaaaca

SEQ ID NO: 909250 - RNA, 19 nt, Human
gaaggucaugggccuaaaa

SEQ ID NO: 909251 - RNA, 24 nt, Human
ggaaaaacaaaucuuuuccucaaa

SEQ ID NO: 909252 - RNA, 23 nt, Human
uaagaaaauaaacaaaacaacag

SEQ ID NO: 909253 - RNA, 24 nt, Human
uacacguuaagaaaauaaacaaaa

SEQ ID NO: 909254 - RNA, 20 nt, Human
uagaaaaugcuccagcuggc

SEQ ID NO: 909255 - RNA, 18 nt, Human
ucaaggcaucugggggcu

SEQ ID NO: 909256 - RNA, 18 nt, Human
ucaaggcaucugggggcu

SEQ ID NO: 909257 - RNA, 19 nt, Human
uccgcgcgggccgcccggc

SEQ ID NO: 909258 - RNA, 20 nt, Human
uccgcgcgggccgcccggcg

SEQ ID NO: 909259 - RNA, 22 nt, Human
uccuuggaggcaggaaggaugg

SEQ ID NO: 909260 - RNA, 18 nt, Human
ucucuguguauccuccuu

SEQ ID NO: 909261 - RNA, 24 nt, Human
ugaguuguuuuguuuuuauuuuua

SEQ ID NO: 909262 - RNA, 18 nt, Human
ugcuccagcuggcuuugc

SEQ ID NO: 909263 - RNA, 23 nt, Human
uucucuguguauccuccuuggag

SEQ ID NO: 909264 - RNA, 27 nt, Human
uucucuguguauccuccuuggaggcag

SEQ ID NO: 909265 - RNA, 20 nt, Human
aaugggcugcugaagaaaug

SEQ ID NO: 909266 - RNA, 22 nt, Human
auucuauuagccaagugccacc

SEQ ID NO: 909267 - RNA, 19 nt, Human
caguugcuaaugggcugcu

SEQ ID NO: 909268 - RNA, 24 nt, Human
ccaccugucacuaugaaacuaucc

SEQ ID NO: 909269 - RNA, 20 nt, Human
ccugucacuaugaaacuauc

SEQ ID NO: 909270 - RNA, 27 nt, Human
cuccggggucccuggguggggcaaauc

SEQ ID NO: 909271 - RNA, 19 nt, Human
cuguaggacaucccugggc

SEQ ID NO: 909272 - RNA, 20 nt, Human
gauuucacaagaaggguccg

SEQ ID NO: 909273 - RNA, 19 nt, Human
uaggacaucccugggcucu

SEQ ID NO: 909274 - RNA, 21 nt, Human
uaggacaucccugggcucuca

SEQ ID NO: 909275 - RNA, 18 nt, Human
ucccugggcucucaguug

SEQ ID NO: 909276 - RNA, 18 nt, Human
uccggggucccugggugg

SEQ ID NO: 909277 - RNA, 20 nt, Human
uccuguaggacaucccuggg

SEQ ID NO: 909278 - RNA, 22 nt, Human
ucucaguugcuaaugggcugcu

SEQ ID NO: 909279 - RNA, 18 nt, Human
uuuuuuuuuuuuuuuuug

SEQ ID NO: 909280 - RNA, 21 nt, Human
aaagcagcauagccugaaccc

SEQ ID NO: 909281 - RNA, 19 nt, Human
aacaacacccugagugcac

SEQ ID NO: 909282 - RNA, 20 nt, Human
aacacccugagugcacccuc

SEQ ID NO: 909283 - RNA, 20 nt, Human
aagaagucggccaacgcccc

SEQ ID NO: 909284 - RNA, 21 nt, Human
aagcagcauagccugaaccca

SEQ ID NO: 909285 - RNA, 25 nt, Human
aagcagcauagccugaacccaaaac

SEQ ID NO: 909286 - RNA, 28 nt, Human
aagcagcauagccugaacccaaaacugu

SEQ ID NO: 909287 - RNA, 20 nt, Human
aagcaggaaagcuaaccuaa

SEQ ID NO: 909288 - RNA, 22 nt, Human
aaggcagaagauaaaagcagga

SEQ ID NO: 909289 - RNA, 21 nt, Human
acauagggaggcgcucccugc

SEQ ID NO: 909290 - RNA, 23 nt, Human
acccgcuccacugcgccuauccc

SEQ ID NO: 909291 - RNA, 21 nt, Human
accuaugggccagcccucccu

SEQ ID NO: 909292 - RNA, 23 nt, Human
acgagacgcucuaacaacacccu

SEQ ID NO: 909293 - RNA, 18 nt, Human
acgccccccaagcaaccc

SEQ ID NO: 909294 - RNA, 27 nt, Human
acgccccccaagcaacccgcuccacug

SEQ ID NO: 909295 - RNA, 20 nt, Human
agcagcaccuaugggccagc

SEQ ID NO: 909296 - RNA, 18 nt, Human
aggaagccaacaccuaga

SEQ ID NO: 909297 - RNA, 18 nt, Human
aggaggcguguguccuug

SEQ ID NO: 909298 - RNA, 18 nt, Human
augccagcggcacagggg

SEQ ID NO: 909299 - RNA, 23 nt, Human
caaaacugugaccagagaauccc

SEQ ID NO: 909300 - RNA, 20 nt, Human
caaagcagcauagccugaac

SEQ ID NO: 909301 - RNA, 21 nt, Human
caaagcagcauagccugaacc

SEQ ID NO: 909302 - RNA, 23 nt, Human
caaagcagcauagccugaaccca

SEQ ID NO: 909303 - RNA, 23 nt, Human
cagcaccuaugggccagcccucc

SEQ ID NO: 909304 - RNA, 18 nt, Human
cagcucccgccgcccgua

SEQ ID NO: 909305 - RNA, 26 nt, Human
cagguccccaaggcagaagauaaaag

SEQ ID NO: 909306 - RNA, 25 nt, Human
ccaaaacugugaccagagaauccca

SEQ ID NO: 909307 - RNA, 20 nt, Human
ccaaggcagaagauaaaagc

SEQ ID NO: 909308 - RNA, 24 nt, Human
ccaaggcagaagauaaaagcagga

SEQ ID NO: 909309 - RNA, 19 nt, Human
ccagcccucccuccaaaag

SEQ ID NO: 909310 - RNA, 26 nt, Human
ccagcccucccuccaaaaggcagccu

SEQ ID NO: 909311 - RNA, 22 nt, Human
cccaaaacugugaccagagaau

SEQ ID NO: 909312 - RNA, 22 nt, Human
cccaagcaacccgcuccacugc

SEQ ID NO: 909313 - RNA, 23 nt, Human
cccaaggcagaagauaaaagcag

SEQ ID NO: 909314 - RNA, 22 nt, Human
ccccacggugcucagcaggaau

SEQ ID NO: 909315 - RNA, 19 nt, Human
cccccaagcaacccgcucc

SEQ ID NO: 909316 - RNA, 20 nt, Human
cccccaagcaacccgcucca

SEQ ID NO: 909317 - RNA, 22 nt, Human
ccccugcucccugggugcccca

SEQ ID NO: 909318 - RNA, 20 nt, Human
cccugggugccccacggugc

SEQ ID NO: 909319 - RNA, 23 nt, Human
ccuaaccccaggcucucuaagga

SEQ ID NO: 909320 - RNA, 18 nt, Human
ccuauguccucuguguuc

SEQ ID NO: 909321 - RNA, 18 nt, Human
ccugcucccugggugccc

SEQ ID NO: 909322 - RNA, 20 nt, Human
cgagacgcucuaacaacacc

SEQ ID NO: 909323 - RNA, 22 nt, Human
cgccccccaagcaacccgcucc

SEQ ID NO: 909324 - RNA, 22 nt, Human
cgccgcccguaucccgcuuggc

SEQ ID NO: 909325 - RNA, 24 nt, Human
cuaagaagucggccaacgcccccc

SEQ ID NO: 909326 - RNA, 24 nt, Human
cuauaggaacgaguaggggugcgu

SEQ ID NO: 909327 - RNA, 21 nt, Human
cucacgcugcugagauggacc

SEQ ID NO: 909328 - RNA, 21 nt, Human
cuccaaaaggcagccugugcc

SEQ ID NO: 909329 - RNA, 21 nt, Human
cucccgccgcccguaucccgc

SEQ ID NO: 909330 - RNA, 22 nt, Human
cugaacccaaaacugugaccag

SEQ ID NO: 909331 - RNA, 25 nt, Human
gacuugcaggcuuccucggggggug

SEQ ID NO: 909332 - RNA, 19 nt, Human
gaggacacggguccugagg

SEQ ID NO: 909333 - RNA, 21 nt, Human
gcauagccugaacccaaaacu

SEQ ID NO: 909334 - RNA, 21 nt, Human
gccccccaagcaacccgcucc

SEQ ID NO: 909335 - RNA, 24 nt, Human
gcccgcugccaggcccgcugucuc

SEQ ID NO: 909336 - RNA, 18 nt, Human
ggcccagcugguggcggg

SEQ ID NO: 909337 - RNA, 23 nt, Human
ggggaccucuucucaccagaggg

SEQ ID NO: 909338 - RNA, 22 nt, Human
ggguuuccuauguccucugugu

SEQ ID NO: 909339 - RNA, 18 nt, Human
uaaaagcaggaaagcuaa

SEQ ID NO: 909340 - RNA, 24 nt, Human
uaaaagcaggaaagcuaaccuaac

SEQ ID NO: 909341 - RNA, 25 nt, Human
uaacaacacccugagugcacccuca

SEQ ID NO: 909342 - RNA, 22 nt, Human
uaagaagucggccaacgccccc

SEQ ID NO: 909343 - RNA, 18 nt, Human
uagugcacauaaaaaggg

SEQ ID NO: 909344 - RNA, 20 nt, Human
ucaguguguggugcucugag

SEQ ID NO: 909345 - RNA, 18 nt, Human
uccccagcucccgccgcc

SEQ ID NO: 909346 - RNA, 21 nt, Human
uccccagcucccgccgcccgu

SEQ ID NO: 909347 - RNA, 26 nt, Human
uccccagcucccgccgcccguauccc

SEQ ID NO: 909348 - RNA, 19 nt, Human
ucccgcuuggccccucguc

SEQ ID NO: 909349 - RNA, 19 nt, Human
ucccugcauggcccggccc

SEQ ID NO: 909350 - RNA, 18 nt, Human
ucucugggugcucagugu

SEQ ID NO: 909351 - RNA, 24 nt, Human
ucugacaggaggcguguguccccc

SEQ ID NO: 909352 - RNA, 21 nt, Human
ugagauggaccuggaccgugg

SEQ ID NO: 909353 - RNA, 22 nt, Human
ugcuccaccugcccaaagcagc

SEQ ID NO: 909354 - RNA, 27 nt, Human
ugcucugaggacacggguccugagggc

SEQ ID NO: 909355 - RNA, 23 nt, Human
ugcuggccggugcccagaguggc

SEQ ID NO: 909356 - RNA, 23 nt, Human
ugguggcggggagccagcagcac

SEQ ID NO: 909357 - RNA, 19 nt, Human
uguguggugcucugaggac

SEQ ID NO: 909358 - RNA, 22 nt, Human
uuuuuuuuuuuuuuucacagga

SEQ ID NO: 909359 - RNA, 26 nt, Human
uuuuuuuuuuuuuuuuuuuucacagg

SEQ ID NO: 909360 - RNA, 19 nt, Human
aaggcuacagaccggcccc

SEQ ID NO: 909361 - RNA, 28 nt, Human
accccgaaguccucuucccaagugaccc

SEQ ID NO: 909362 - RNA, 23 nt, Human
acuugcagaggaagacagggugg

SEQ ID NO: 909363 - RNA, 21 nt, Human
acuuucacugugaguaguguu

SEQ ID NO: 909364 - RNA, 21 nt, Human
agaaaaaaauucaagaaaaug

SEQ ID NO: 909365 - RNA, 18 nt, Human
agaaaaacaaaucuuaag

SEQ ID NO: 909366 - RNA, 19 nt, Human
agaaaaacaaaucuuaagc

SEQ ID NO: 909367 - RNA, 24 nt, Human
agagagaugaggauggaggccaaa

SEQ ID NO: 909368 - RNA, 24 nt, Human
agcuggccuccggcgggaaggcca

SEQ ID NO: 909369 - RNA, 18 nt, Human
aggcauguccaggggcuc

SEQ ID NO: 909370 - RNA, 26 nt, Human
auccccuguccaacaccuucucacca

SEQ ID NO: 909371 - RNA, 20 nt, Human
cagaggaugccucagauucc

SEQ ID NO: 909372 - RNA, 18 nt, Human
caggggcuccucccagcc

SEQ ID NO: 909373 - RNA, 27 nt, Human
cauuaaaaaaaauucaaccaacuagcu

SEQ ID NO: 909374 - RNA, 22 nt, Human
ccaaaagcucccguuuggcugg

SEQ ID NO: 909375 - RNA, 19 nt, Human
ccaauccccuguccaacac

SEQ ID NO: 909376 - RNA, 29 nt, Human
ccagccucuaccccgaaguccucuuccca

SEQ ID NO: 909377 - RNA, 29 nt, Human
cccagccucuaccccgaaguccgguuccg

SEQ ID NO: 909378 - RNA, 23 nt, Human
ccccgccgcagcugccgccgccu

SEQ ID NO: 909379 - RNA, 22 nt, Human
cccgaaguccucuucccaagug

SEQ ID NO: 909380 - RNA, 19 nt, Human
cccuagugaagcagcucag

SEQ ID NO: 909381 - RNA, 22 nt, Human
ccgcagcugccgccgccucccc

SEQ ID NO: 909382 - RNA, 20 nt, Human
ccgccgcagcugccgccgcc

SEQ ID NO: 909383 - RNA, 21 nt, Human
ccgccgcagcugccgccgccu

SEQ ID NO: 909384 - RNA, 21 nt, Human
ccggccccgccgcagcugccg

SEQ ID NO: 909385 - RNA, 21 nt, Human
ccguguguaucccagcugugc

SEQ ID NO: 909386 - RNA, 19 nt, Human
ccucuaccccgaaguccuc

SEQ ID NO: 909387 - RNA, 20 nt, Human
ccugucaggcagauagcugg

SEQ ID NO: 909388 - RNA, 19 nt, Human
cucagaagaggggagaagg

SEQ ID NO: 909389 - RNA, 20 nt, Human
cuuucaggacaggcaugucc

SEQ ID NO: 909390 - RNA, 19 nt, Human
gaagacagggugguggcag

SEQ ID NO: 909391 - RNA, 18 nt, Human
gaaggagccagggguuca

SEQ ID NO: 909392 - RNA, 20 nt, Human
gagagaagagucacagccug

SEQ ID NO: 909393 - RNA, 24 nt, Human
gagccugucccacacugucaggcc

SEQ ID NO: 909394 - RNA, 23 nt, Human
gaguggcaguggcucccaaggcu

SEQ ID NO: 909395 - RNA, 26 nt, Human
gauaauggaggcagccgcuuucagga

SEQ ID NO: 909396 - RNA, 22 nt, Human
gcagcucaggccugggggagcc

SEQ ID NO: 909397 - RNA, 26 nt, Human
gccugucccacacugucaggcccuga

SEQ ID NO: 909398 - RNA, 27 nt, Human
gcuaaccacgucacacucauguugugc

SEQ ID NO: 909399 - RNA, 22 nt, Human
gcucccaaggcucucuccucca

SEQ ID NO: 909400 - RNA, 22 nt, Human
gcuccucccagccucuaccccg

SEQ ID NO: 909401 - RNA, 18 nt, Human
gcuggcuuggcccaagag

SEQ ID NO: 909402 - RNA, 19 nt, Human
ggaaacucgcggcuucccg

SEQ ID NO: 909403 - RNA, 21 nt, Human
ggaaagaagagccugucccac

SEQ ID NO: 909404 - RNA, 21 nt, Human
ggaguggcaguggcucccaag

SEQ ID NO: 909405 - RNA, 22 nt, Human
gggcuccucccagccucuaccc

SEQ ID NO: 909406 - RNA, 21 nt, Human
guggagucagaggaugccuca

SEQ ID NO: 909407 - RNA, 21 nt, Human
ucagaagaggggagaaggcca

SEQ ID NO: 909408 - RNA, 25 nt, Human
ucaggacaggcauguccaggggcuc

SEQ ID NO: 909409 - RNA, 18 nt, Human
ucccacacugucaggccc

SEQ ID NO: 909410 - RNA, 22 nt, Human
ucccagccucuaccccgaaguc

SEQ ID NO: 909411 - RNA, 21 nt, Human
ucccugagcacuugcagagga

SEQ ID NO: 909412 - RNA, 20 nt, Human
uccugccgcaggauucccua

SEQ ID NO: 909413 - RNA, 23 nt, Human
ugaaaagagaaaaacaaaucuua

SEQ ID NO: 909414 - RNA, 20 nt, Human
ugaaggagccagggguucau

SEQ ID NO: 909415 - RNA, 18 nt, Human
ugagagaagagucacagc

SEQ ID NO: 909416 - RNA, 21 nt, Human
ugagagaagagucacagccug

SEQ ID NO: 909417 - RNA, 22 nt, Human
ugagaugcgcuccuggcuaugg

SEQ ID NO: 909418 - RNA, 18 nt, Human
ugcagaggaagacagggu

SEQ ID NO: 909419 - RNA, 20 nt, Human
ugcagaggaagacagggugg

SEQ ID NO: 909420 - RNA, 23 nt, Human
ugcuugggggaccuaggcagcug

SEQ ID NO: 909421 - RNA, 23 nt, Human
uggaaaagcugugcagaaaaaaa

SEQ ID NO: 909422 - RNA, 22 nt, Human
uggaggcagacccuguggcucu

SEQ ID NO: 909423 - RNA, 23 nt, Human
uggcaggacuggaguggcagugg

SEQ ID NO: 909424 - RNA, 21 nt, Human
uggcucccaaggcucucuccu

SEQ ID NO: 909425 - RNA, 18 nt, Human
ugggaaagaagagccugu

SEQ ID NO: 909426 - RNA, 21 nt, Human
ugggaauggauaauggaggca

SEQ ID NO: 909427 - RNA, 23 nt, Human
ugggaauggauaauggaggcagc

SEQ ID NO: 909428 - RNA, 25 nt, Human
ugucaagagcucccuaauuuuggga

SEQ ID NO: 909429 - RNA, 21 nt, Human
ugucaggcagauagcuggccu

SEQ ID NO: 909430 - RNA, 22 nt, Human
ugucaggcagauagcuggccuc

SEQ ID NO: 909431 - RNA, 21 nt, Human
uuuuuuuuuuuuuuguuugga

SEQ ID NO: 909432 - RNA, 19 nt, Human
uuuuuuuuuuuuuuuguuu

SEQ ID NO: 909433 - RNA, 20 nt, Human
aagcccccgccccgcccugc

SEQ ID NO: 909434 - RNA, 18 nt, Human
accaccggagccgccccg

SEQ ID NO: 909435 - RNA, 21 nt, Human
caccucaagcccccgccccgc

SEQ ID NO: 909436 - RNA, 23 nt, Human
caccucaagcccccgccccgccc

SEQ ID NO: 909437 - RNA, 22 nt, Human
cacggcccguccccgcgucucu

SEQ ID NO: 909438 - RNA, 26 nt, Human
cccccgccccgcccugcucggccccc

SEQ ID NO: 909439 - RNA, 19 nt, Human
ccccgcuucgccccgcccc

SEQ ID NO: 909440 - RNA, 19 nt, Human
cccgccccgcuucgagggc

SEQ ID NO: 909441 - RNA, 19 nt, Human
cccgcuucgccccgccccg

SEQ ID NO: 909442 - RNA, 19 nt, Human
cccguccccgcgucucugg

SEQ ID NO: 909443 - RNA, 21 nt, Human
ccgcccugcucggccccgccc

SEQ ID NO: 909444 - RNA, 20 nt, Human
ccgcggccgccgcccacuuu

SEQ ID NO: 909445 - RNA, 19 nt, Human
ccugcucggccccgccccg

SEQ ID NO: 909446 - RNA, 21 nt, Human
cucggccccgccccgcuucgc

SEQ ID NO: 909447 - RNA, 20 nt, Human
cugccgccgucuccgccagg

SEQ ID NO: 909448 - RNA, 19 nt, Human
gccgccccgcggcuuggga

SEQ ID NO: 909449 - RNA, 21 nt, Human
gcuugggaaucaccucaagcc

SEQ ID NO: 909450 - RNA, 23 nt, Human
ggaaucaccucaagcccccgccc

SEQ ID NO: 909451 - RNA, 19 nt, Human
uaaauaucuuucaucaaac

SEQ ID NO: 909452 - RNA, 23 nt, Human
uagcagaguuaagauuuuuuuua

SEQ ID NO: 909453 - RNA, 19 nt, Human
uauaguaauaauucaagua

SEQ ID NO: 909454 - RNA, 22 nt, Human
ucaccucaagcccccgccccgc

SEQ ID NO: 909455 - RNA, 21 nt, Human
ucagagccauguagcagaguu

SEQ ID NO: 909456 - RNA, 19 nt, Human
ucccccacagcagucagag

SEQ ID NO: 909457 - RNA, 23 nt, Human
uccccgcaccaccggagccgccc

SEQ ID NO: 909458 - RNA, 19 nt, Human
uccccgcgucucugggccc

SEQ ID NO: 909459 - RNA, 22 nt, Human
uccccgcgucucugggcccagc

SEQ ID NO: 909460 - RNA, 18 nt, Human
ucucugggcccagcuccu

SEQ ID NO: 909461 - RNA, 18 nt, Human
ugaaaagucaacucuguu

SEQ ID NO: 909462 - RNA, 24 nt, Human
uuuuuuaagccuacuacauuuugu

SEQ ID NO: 909463 - RNA, 26 nt, Human
aaagcagaagucaccccaaucaacgg

SEQ ID NO: 909464 - RNA, 21 nt, Human
acaggugguuuacuugguggg

SEQ ID NO: 909465 - RNA, 18 nt, Human
accaaagcagaagucacc

SEQ ID NO: 909466 - RNA, 20 nt, Human
accucgcccaacucuucagc

SEQ ID NO: 909467 - RNA, 22 nt, Human
accucgcccaacucuucagcug

SEQ ID NO: 909468 - RNA, 25 nt, Human
agaagucaccccaucagugcaaguc

SEQ ID NO: 909469 - RNA, 25 nt, Human
agaagucucugcaccucgcccaacu

SEQ ID NO: 909470 - RNA, 22 nt, Human
cagcuccugugacuauuacccu

SEQ ID NO: 909471 - RNA, 19 nt, Human
cccuuauggacgcagaagu

SEQ ID NO: 909472 - RNA, 18 nt, Human
cugugacucucgcccucc

SEQ ID NO: 909473 - RNA, 26 nt, Human
cuuagcaagguuagagugacucuaga

SEQ ID NO: 909474 - RNA, 27 nt, Human
gaaacaauuuuauucuggcagagcugg

SEQ ID NO: 909475 - RNA, 18 nt, Human
ggcagagcugggguggug

SEQ ID NO: 909476 - RNA, 22 nt, Human
ggcucuugccucccagcagccu

SEQ ID NO: 909477 - RNA, 24 nt, Human
gugacucucgcccuccuccccauc

SEQ ID NO: 909478 - RNA, 21 nt, Human
uacuuggugggggugguggaa

SEQ ID NO: 909479 - RNA, 19 nt, Human
ucagggucucucugcugac

SEQ ID NO: 909480 - RNA, 20 nt, Human
uccagcuagaagucucugca

SEQ ID NO: 909481 - RNA, 20 nt, Human
ucgcccaacucuucagcugu

SEQ ID NO: 909482 - RNA, 21 nt, Human
ucgcccaacucuucagcugua

SEQ ID NO: 909483 - RNA, 21 nt, Human
ucucugcaccucgcccaacuc

SEQ ID NO: 909484 - RNA, 22 nt, Human
ucugcaccucgcccaacucuuc

SEQ ID NO: 909485 - RNA, 20 nt, Human
ugacucucgcccuccucccc

SEQ ID NO: 909486 - RNA, 22 nt, Human
ugcaagucucucuagggaacuc

SEQ ID NO: 909487 - RNA, 21 nt, Human
uggacgcagaaguagcagguu

SEQ ID NO: 909488 - RNA, 19 nt, Human
uggcagagcugggguggug

SEQ ID NO: 909489 - RNA, 21 nt, Human
ugggguggugggaggcaacgu

SEQ ID NO: 909490 - RNA, 19 nt, Human
ugugacuauuacccuucaa

SEQ ID NO: 909491 - RNA, 21 nt, Human
uucccuuagcagaguucaggg

SEQ ID NO: 909492 - RNA, 23 nt, Human
uuggugggggugguggaaggacc

SEQ ID NO: 909493 - RNA, 24 nt, Human
aagcccccugcucugcaccucccg

SEQ ID NO: 909494 - RNA, 21 nt, Human
acagcugggugggcagucagu

SEQ ID NO: 909495 - RNA, 23 nt, Human
acccucucugagcagcuuugcug

SEQ ID NO: 909496 - RNA, 19 nt, Human
agagccaggccaguuagag

SEQ ID NO: 909497 - RNA, 23 nt, Human
agcggcggcgcggacagccuggc

SEQ ID NO: 909498 - RNA, 21 nt, Human
agcugggugggcagucagugu

SEQ ID NO: 909499 - RNA, 19 nt, Human
aggagcggugcguuucagg

SEQ ID NO: 909500 - RNA, 20 nt, Human
aggcaggcaaggaggcagag

SEQ ID NO: 909501 - RNA, 23 nt, Human
aguggcgaagcugccgggaagga

SEQ ID NO: 909502 - RNA, 20 nt, Human
caccguguuggggggugccc

SEQ ID NO: 909503 - RNA, 24 nt, Human
caccuuguaggcaggcaaggaggc

SEQ ID NO: 909504 - RNA, 24 nt, Human
cacugcucccuaaagcccccugcc

SEQ ID NO: 909505 - RNA, 23 nt, Human
cagagcagggggagggccggccc

SEQ ID NO: 909506 - RNA, 21 nt, Human
cagaguccucaccagcccuuc

SEQ ID NO: 909507 - RNA, 22 nt, Human
cagccuggcagcucccggcgac

SEQ ID NO: 909508 - RNA, 19 nt, Human
cagcuuugcuggaaagagc

SEQ ID NO: 909509 - RNA, 26 nt, Human
cauguacaaacagaacagaguccaua

SEQ ID NO: 909510 - RNA, 22 nt, Human
ccccgcgcagcacugccaccag

SEQ ID NO: 909511 - RNA, 24 nt, Human
cccgcagcggcggcgcggacagcc

SEQ ID NO: 909512 - RNA, 20 nt, Human
cccgcgcagcacugccacca

SEQ ID NO: 909513 - RNA, 23 nt, Human
cccuaaagcccccugcucugcac

SEQ ID NO: 909514 - RNA, 23 nt, Human
ccucccgccacagcugggugggc

SEQ ID NO: 909515 - RNA, 24 nt, Human
ccugcagaguccuauguccaaacg

SEQ ID NO: 909516 - RNA, 23 nt, Human
ccugcugcaaaccaggcaccuug

SEQ ID NO: 909517 - RNA, 25 nt, Human
cgcagcacugccaccaggcuuuauu

SEQ ID NO: 909518 - RNA, 20 nt, Human
cucacuuccggccucuccac

SEQ ID NO: 909519 - RNA, 24 nt, Human
cucccgccacagcugggugggcag

SEQ ID NO: 909520 - RNA, 20 nt, Human
gacuccgaacgccgccgccc

SEQ ID NO: 909521 - RNA, 18 nt, Human
gagccaggccaguuagag

SEQ ID NO: 909522 - RNA, 19 nt, Human
gcaggugccgucugcccgu

SEQ ID NO: 909523 - RNA, 19 nt, Human
gccucuguccagguggugg

SEQ ID NO: 909524 - RNA, 21 nt, Human
gcggcgcggacagccuggcag

SEQ ID NO: 909525 - RNA, 22 nt, Human
gggaaggaaggcaagcguguuu

SEQ ID NO: 909526 - RNA, 20 nt, Human
ggugcccagugggagguggu

SEQ ID NO: 909527 - RNA, 19 nt, Human
gguggugggggcauccggg

SEQ ID NO: 909528 - RNA, 21 nt, Human
gguggugggggcauccgggga

SEQ ID NO: 909529 - RNA, 25 nt, Human
uaaagcccccugcucugcaccuccc

SEQ ID NO: 909530 - RNA, 21 nt, Human
uacaaacagaacagaguccau

SEQ ID NO: 909531 - RNA, 22 nt, Human
ucacuuccggccucuccccguc

SEQ ID NO: 909532 - RNA, 23 nt, Human
uccaaacgcagaaggcgcagaag

SEQ ID NO: 909533 - RNA, 19 nt, Human
ucccuaaagcccccugcuc

SEQ ID NO: 909534 - RNA, 24 nt, Human
ugagcagcuuugcuggaaagagcg

SEQ ID NO: 909535 - RNA, 19 nt, Human
ugcucugcaccucccgcca

SEQ ID NO: 909536 - RNA, 21 nt, Human
ugcuggaaagagcggagagcc

SEQ ID NO: 909537 - RNA, 24 nt, Human
uggacacccucucugagcagcuuu

SEQ ID NO: 909538 - RNA, 20 nt, Human
uggcugggagccccgcgcag

SEQ ID NO: 909539 - RNA, 22 nt, Human
uggggggugcccagugggaggu

SEQ ID NO: 909540 - RNA, 25 nt, Human
uggguggcaggacaccguguugggg

SEQ ID NO: 909541 - RNA, 19 nt, Human
uggucuacacccagagaac

SEQ ID NO: 909542 - RNA, 25 nt, Human
uguccaaacgcagaaggcgcagaag

SEQ ID NO: 909543 - RNA, 20 nt, Human
ugugcuggacacccucucug

SEQ ID NO: 909544 - RNA, 21 nt, Human
uguuggggggugcccaguggg

SEQ ID NO: 909545 - RNA, 25 nt, Human
uguuggggggugcccagugggaggu

SEQ ID NO: 909546 - RNA, 23 nt, Human
aaacaccaauauuuacaauucuu

SEQ ID NO: 909547 - RNA, 21 nt, Human
aagcagugcuaaaaugcagag

SEQ ID NO: 909548 - RNA, 22 nt, Human
acaaaaaacacacugaucuuag

SEQ ID NO: 909549 - RNA, 20 nt, Human
acagcuacaccuuaccgcca

SEQ ID NO: 909550 - RNA, 19 nt, Human
acccuagaccucuucugcu

SEQ ID NO: 909551 - RNA, 19 nt, Human
aucauuaaacuggaacuga

SEQ ID NO: 909552 - RNA, 19 nt, Human
cagccauggccccugcgug

SEQ ID NO: 909553 - RNA, 22 nt, Human
cagcuacaccuuaccgccaccc

SEQ ID NO: 909554 - RNA, 18 nt, Human
cauuugucucuuccuucu

SEQ ID NO: 909555 - RNA, 21 nt, Human
ccccugcgugacccuagaccu

SEQ ID NO: 909556 - RNA, 24 nt, Human
cguagaccccaacauuugucucuu

SEQ ID NO: 909557 - RNA, 23 nt, Human
cucagccauggccccugcgugac

SEQ ID NO: 909558 - RNA, 20 nt, Human
gugacccuagaccucuucug

SEQ ID NO: 909559 - RNA, 21 nt, Human
guugaaaaagcagugcuaaaa

SEQ ID NO: 909560 - RNA, 18 nt, Human
uaaggcaaaauuaucucc

SEQ ID NO: 909561 - RNA, 18 nt, Human
uaaggcaaaauuaucucc

SEQ ID NO: 909562 - RNA, 20 nt, Human
uacaccuuaccgccacccag

SEQ ID NO: 909563 - RNA, 23 nt, Human
uacaucucuuaacauauacaacu

SEQ ID NO: 909564 - RNA, 21 nt, Human
uagcaaaagugaugcaaaaga

SEQ ID NO: 909565 - RNA, 21 nt, Human
uagcaaaagugaugcaaaauc

SEQ ID NO: 909566 - RNA, 18 nt, Human
uccgcuccgccugccaga

SEQ ID NO: 909567 - RNA, 20 nt, Human
uccguagaccccaacauuug

SEQ ID NO: 909568 - RNA, 21 nt, Human
ucuucagugugagauuaugau

SEQ ID NO: 909569 - RNA, 19 nt, Human
ugaaaaagcagugcuaaaa

SEQ ID NO: 909570 - RNA, 23 nt, Human
ugaaaaagcagugcuaaaaugca

SEQ ID NO: 909571 - RNA, 20 nt, Human
ugagauuaugauuaagcuac

SEQ ID NO: 909572 - RNA, 21 nt, Human
ugccucagccauggccccugc

SEQ ID NO: 909573 - RNA, 21 nt, Human
uggaacugaauccguagaccc

SEQ ID NO: 909574 - RNA, 18 nt, Human
uggccccugcgugacccu

SEQ ID NO: 909575 - RNA, 22 nt, Human
uggugauaaaagaauuggacac

SEQ ID NO: 909576 - RNA, 21 nt, Human
uuacaaaaauaugguguaaga

SEQ ID NO: 909577 - RNA, 23 nt, Human
uuuuuuuuuuuuuuuuuuaacag

SEQ ID NO: 909578 - RNA, 24 nt, Human
aaaaaaacuugugcuaacaacucu

SEQ ID NO: 909579 - RNA, 24 nt, Human
aaacaagugcuuaaaaaaaaaaaa

SEQ ID NO: 909580 - RNA, 23 nt, Human
aaaugucagaaaugccuuguacc

SEQ ID NO: 909581 - RNA, 28 nt, Human
acaagugcuuaaaaaaaaaaaaaaaaaa

SEQ ID NO: 909582 - RNA, 18 nt, Human
caaaacaagugcuuaaaa

SEQ ID NO: 909583 - RNA, 19 nt, Human
cagaaucccucgggccccc

SEQ ID NO: 909584 - RNA, 23 nt, Human
cccaaaacaagugcuuaaaaaaa

SEQ ID NO: 909585 - RNA, 21 nt, Human
ccuucagaaucccucgggccc

SEQ ID NO: 909586 - RNA, 20 nt, Human
cuuaaaaaaaaaaaaaaaga

SEQ ID NO: 909587 - RNA, 20 nt, Human
gaaaugccuuguacccaaaa

SEQ ID NO: 909588 - RNA, 24 nt, Human
ugauuaaacaaauuaccuaaugga

SEQ ID NO: 909589 - RNA, 19 nt, Human
ugccuuguacccaaaacaa

SEQ ID NO: 909590 - RNA, 23 nt, Human
ugucagaaaugccuuguacccaa

SEQ ID NO: 909591 - RNA, 20 nt, Human
uuaaaaaaaaaaaaaaaaaa

SEQ ID NO: 909592 - RNA, 20 nt, Human
uuuauaacaucuaagacugc

SEQ ID NO: 909593 - RNA, 22 nt, Human
agccgcggucacucucgcagcc

SEQ ID NO: 909594 - RNA, 21 nt, Human
cagccccucggcgcgagcgcg

SEQ ID NO: 909595 - RNA, 23 nt, Human
cagccccucggcgcgagcgcggc

SEQ ID NO: 909596 - RNA, 21 nt, Human
cauauagacaauaaacaaagu

SEQ ID NO: 909597 - RNA, 24 nt, Human
uuuuuuuuuuuuuuuuuuuauuuu

SEQ ID NO: 909598 - RNA, 24 nt, Human
acgugacaaaaucuaaaggaagaa

SEQ ID NO: 909599 - RNA, 24 nt, Human
cacaaugagacagucaccaaaucc

SEQ ID NO: 909600 - RNA, 22 nt, Human
cagaaugccugaaacauuacau

SEQ ID NO: 909601 - RNA, 24 nt, Human
cagcuacuauuacaguugcaaaac

SEQ ID NO: 909602 - RNA, 25 nt, Human
cagcuggguccccacgugacaaaau

SEQ ID NO: 909603 - RNA, 22 nt, Human
cucauggcacaaugagacaguc

SEQ ID NO: 909604 - RNA, 18 nt, Human
cugauaucacuccacucc

SEQ ID NO: 909605 - RNA, 21 nt, Human
cugcaccugugcuccauuccc

SEQ ID NO: 909606 - RNA, 22 nt, Human
cugugacauuuuggcucuuucc

SEQ ID NO: 909607 - RNA, 19 nt, Human
gaucgaccugacagucacu

SEQ ID NO: 909608 - RNA, 25 nt, Human
gcacaaugagacagucaccaaaucc

SEQ ID NO: 909609 - RNA, 18 nt, Human
gugcuccauucccucaca

SEQ ID NO: 909610 - RNA, 22 nt, Human
uaaagggaguccacgugccguu

SEQ ID NO: 909611 - RNA, 19 nt, Human
uaggaacugugacauuuug

SEQ ID NO: 909612 - RNA, 18 nt, Human
ucacuggauuaaagggag

SEQ ID NO: 909613 - RNA, 25 nt, Human
ucacuggauuaaagggaguccacgu

SEQ ID NO: 909614 - RNA, 24 nt, Human
ugagacagucaccaaauccaaugu

SEQ ID NO: 909615 - RNA, 18 nt, Human
ugauaucacuccacuccu

SEQ ID NO: 909616 - RNA, 22 nt, Human
ugcaaaaccauuaaucagcuua

SEQ ID NO: 909617 - RNA, 21 nt, Human
ugcuccauucccucacagaua

SEQ ID NO: 909618 - RNA, 21 nt, Human
uuacaguugcaaaaccauuaa

SEQ ID NO: 909619 - RNA, 18 nt, Human
uuuggcucuuuccauguu

SEQ ID NO: 909620 - RNA, 18 nt, Human
aaugcaauuucaaauccu

SEQ ID NO: 909621 - RNA, 26 nt, Human
agaaagaaaacuuaauuuucucuagu

SEQ ID NO: 909622 - RNA, 22 nt, Human
agcaaaucucacauguguaauc

SEQ ID NO: 909623 - RNA, 25 nt, Human
caacagcagcaaaucucacaugugu

SEQ ID NO: 909624 - RNA, 22 nt, Human
gcugacagacuugcgcuccgcc

SEQ ID NO: 909625 - RNA, 23 nt, Human
gcugacagacuugcgcuccgccu

SEQ ID NO: 909626 - RNA, 19 nt, Human
ggagagagagguacugggc

SEQ ID NO: 909627 - RNA, 18 nt, Human
ggccgaggagagagaggu

SEQ ID NO: 909628 - RNA, 24 nt, Human
uauacacugcauucaguccaggag

SEQ ID NO: 909629 - RNA, 24 nt, Human
uguagacagaaauuauacacugca

SEQ ID NO: 909630 - RNA, 19 nt, Human
uguguaaucaaauguggaa

SEQ ID NO: 909631 - RNA, 23 nt, Human
uuucacuugcagguuuaauuucu

SEQ ID NO: 909632 - RNA, 20 nt, Human
aaaaaccaaaccaaaacaga

SEQ ID NO: 909633 - RNA, 27 nt, Human
aaaaaccaaaccaaaacagaaccaaaa

SEQ ID NO: 909634 - RNA, 26 nt, Human
aaaaccaaaccaaaacagaaccaaaa

SEQ ID NO: 909635 - RNA, 22 nt, Human
aaaccaaaacagaaccaaaaaa

SEQ ID NO: 909636 - RNA, 24 nt, Human
aaaccaaaccaaaacagaaccaaa

SEQ ID NO: 909637 - RNA, 24 nt, Human
aaaguguugggauuacaggcguga

SEQ ID NO: 909638 - RNA, 24 nt, Human
aaauaauuggcaaaaaccaaacca

SEQ ID NO: 909639 - RNA, 20 nt, Human
aaaucuacccaucacacacc

SEQ ID NO: 909640 - RNA, 28 nt, Human
aacacaacugaagauaacauuuuugacc

SEQ ID NO: 909641 - RNA, 21 nt, Human
aacauggaaaaaauacagcca

SEQ ID NO: 909642 - RNA, 23 nt, Human
aaccaaaacagaaccaaaaaaau

SEQ ID NO: 909643 - RNA, 20 nt, Human
aaccacauuaaucugauuca

SEQ ID NO: 909644 - RNA, 18 nt, Human
aagcauaacuucagggua

SEQ ID NO: 909645 - RNA, 20 nt, Human
aagucacucuggaccaagcc

SEQ ID NO: 909646 - RNA, 21 nt, Human
aaguguugggauuacaggcgu

SEQ ID NO: 909647 - RNA, 26 nt, Human
aaguguugggauuacaggcgugagcc

SEQ ID NO: 909648 - RNA, 24 nt, Human
acagagcacagaaggaaagcauaa

SEQ ID NO: 909649 - RNA, 18 nt, Human
acaggguuucaccguguu

SEQ ID NO: 909650 - RNA, 19 nt, Human
acaggguuucaccguguua

SEQ ID NO: 909651 - RNA, 20 nt, Human
acaggguuucaccguguuag

SEQ ID NO: 909652 - RNA, 24 nt, Human
acaggguuucaccguguuagccag

SEQ ID NO: 909653 - RNA, 20 nt, Human
acugcaagcucugccuccug

SEQ ID NO: 909654 - RNA, 22 nt, Human
agaaggaaagcauaacuucagg

SEQ ID NO: 909655 - RNA, 18 nt, Human
agacaggguuucaccgug

SEQ ID NO: 909656 - RNA, 21 nt, Human
agccuacagccacugccaucu

SEQ ID NO: 909657 - RNA, 18 nt, Human
agcucugccuccuggguu

SEQ ID NO: 909658 - RNA, 25 nt, Human
agcuggaaagagcgcuggcuggacc

SEQ ID NO: 909659 - RNA, 20 nt, Human
aggccaccaucuuuucuggc

SEQ ID NO: 909660 - RNA, 20 nt, Human
aggccgcgcagccgccgcac

SEQ ID NO: 909661 - RNA, 23 nt, Human
aggcgugagccacugugcccggc

SEQ ID NO: 909662 - RNA, 22 nt, Human
aggcguuggagggccgcauccu

SEQ ID NO: 909663 - RNA, 20 nt, Human
agugccguggcgcgaucucg

SEQ ID NO: 909664 - RNA, 24 nt, Human
agugccguggcgcgaucucggcuc

SEQ ID NO: 909665 - RNA, 26 nt, Human
auaacaaaauaauuggcaaaaaccaa

SEQ ID NO: 909666 - RNA, 21 nt, Human
auucuccugccucagccuccc

SEQ ID NO: 909667 - RNA, 21 nt, Human
caaaccaaaacagaaccaaaa

SEQ ID NO: 909668 - RNA, 24 nt, Human
caaaguguugggauuacaggcgug

SEQ ID NO: 909669 - RNA, 20 nt, Human
caacagcauuuauuaaugaa

SEQ ID NO: 909670 - RNA, 22 nt, Human
caagaggcaccucuggccagca

SEQ ID NO: 909671 - RNA, 25 nt, Human
caccaccuacgcccagcuaauauuu

SEQ ID NO: 909672 - RNA, 18 nt, Human
caccguguuagccaggau

SEQ ID NO: 909673 - RNA, 24 nt, Human
caccguguuagccaggauggccuu

SEQ ID NO: 909674 - RNA, 23 nt, Human
cacugcaagcucugccuccuggg

SEQ ID NO: 909675 - RNA, 20 nt, Human
cagaaccaaaaaaaugacau

SEQ ID NO: 909676 - RNA, 18 nt, Human
cagaaggaaagcauaacu

SEQ ID NO: 909677 - RNA, 22 nt, Human
cagccacugccaucuuccuaac

SEQ ID NO: 909678 - RNA, 19 nt, Human
cagccuccuaagcugcacu

SEQ ID NO: 909679 - RNA, 24 nt, Human
caggguuucaccguguuagccagg

SEQ ID NO: 909680 - RNA, 24 nt, Human
caguagcugggacuacaggugugc

SEQ ID NO: 909681 - RNA, 19 nt, Human
ccaaaacagaaccaaaaag

SEQ ID NO: 909682 - RNA, 18 nt, Human
ccaaaccaaaacagaacc

SEQ ID NO: 909683 - RNA, 20 nt, Human
ccaaaguguugggauuacag

SEQ ID NO: 909684 - RNA, 22 nt, Human
ccaaaguguugggauuacaggc

SEQ ID NO: 909685 - RNA, 22 nt, Human
ccaaaguguugggauuacaggc

SEQ ID NO: 909686 - RNA, 24 nt, Human
ccaaaguguugggauuacaggcgu

SEQ ID NO: 909687 - RNA, 18 nt, Human
ccacugcccgcgcggccu

SEQ ID NO: 909688 - RNA, 19 nt, Human
cccaggcuggagugccgug

SEQ ID NO: 909689 - RNA, 23 nt, Human
cccaguagcugggacuacaggug

SEQ ID NO: 909690 - RNA, 20 nt, Human
ccccucaaaacagaggcaaa

SEQ ID NO: 909691 - RNA, 26 nt, Human
ccccucaaaacagaggcaaauuuggu

SEQ ID NO: 909692 - RNA, 18 nt, Human
ccgcagccggcggcgccg

SEQ ID NO: 909693 - RNA, 24 nt, Human
ccgcgccgucggcuucggccucgc

SEQ ID NO: 909694 - RNA, 19 nt, Human
ccgcgcgcagcggcgcggu

SEQ ID NO: 909695 - RNA, 19 nt, Human
ccgcgcggccucugccucc

SEQ ID NO: 909696 - RNA, 19 nt, Human
ccggcggcggcggcgccuc

SEQ ID NO: 909697 - RNA, 20 nt, Human
ccucgcgcagggccuggcuc

SEQ ID NO: 909698 - RNA, 21 nt, Human
ccugaccucgugaucggcccg

SEQ ID NO: 909699 - RNA, 24 nt, Human
ccugccucagccuccccaguagcu

SEQ ID NO: 909700 - RNA, 19 nt, Human
ccugcucccgcuucuucuc

SEQ ID NO: 909701 - RNA, 18 nt, Human
cgcgcgcgcacuucgcca

SEQ ID NO: 909702 - RNA, 18 nt, Human
cggccggcggcggcggcg

SEQ ID NO: 909703 - RNA, 24 nt, Human
cggcuucggccucgcgcagggccu

SEQ ID NO: 909704 - RNA, 30 nt, Human
cuaauauuuuuuuguauuuuuaguagagaa

SEQ ID NO: 909705 - RNA, 33 nt, Human
cuaauauuuuuuuguauuuuuaguagagacaac

SEQ ID NO: 909706 - RNA, 24 nt, Human
cucacugcaagcucugccuccugg

SEQ ID NO: 909707 - RNA, 24 nt, Human
cucagccuccccaguagcugggac

SEQ ID NO: 909708 - RNA, 22 nt, Human
cuccagccacugccggucgcgc

SEQ ID NO: 909709 - RNA, 24 nt, Human
cuccugaccucgugaucggcccgc

SEQ ID NO: 909710 - RNA, 22 nt, Human
cuccuggguuuuacaccauucu

SEQ ID NO: 909711 - RNA, 20 nt, Human
cucugucucccaggcuggag

SEQ ID NO: 909712 - RNA, 24 nt, Human
cucuucagguuuucuaaguucucc

SEQ ID NO: 909713 - RNA, 19 nt, Human
cugcaagcucugccuccug

SEQ ID NO: 909714 - RNA, 24 nt, Human
cuggaccacacuccuggagcaucu

SEQ ID NO: 909715 - RNA, 26 nt, Human
cuggcuccuacaaugugacugaguga

SEQ ID NO: 909716 - RNA, 18 nt, Human
cuucgccaaggcugggcc

SEQ ID NO: 909717 - RNA, 23 nt, Human
gaaaggucaggagguuuugcauc

SEQ ID NO: 909718 - RNA, 22 nt, Human
gaagccgcagccggcggcgccg

SEQ ID NO: 909719 - RNA, 18 nt, Human
gauuacaggcgugagcca

SEQ ID NO: 909720 - RNA, 19 nt, Human
gauuacaggcgugagccac

SEQ ID NO: 909721 - RNA, 21 nt, Human
gauuacaggcgugagccacug

SEQ ID NO: 909722 - RNA, 26 nt, Human
gcaaaaaccaaaccaaaacagaacca

SEQ ID NO: 909723 - RNA, 22 nt, Human
gcaaauuuggugaaccaagguc

SEQ ID NO: 909724 - RNA, 20 nt, Human
gcagagcccggagcaaucgc

SEQ ID NO: 909725 - RNA, 20 nt, Human
gcagcggcgcggucugggag

SEQ ID NO: 909726 - RNA, 23 nt, Human
gcagcggcgcggucugggaguac

SEQ ID NO: 909727 - RNA, 28 nt, Human
gcauaacuucaggguaggggggaacgcc

SEQ ID NO: 909728 - RNA, 19 nt, Human
gccgcggggucccgaacac

SEQ ID NO: 909729 - RNA, 26 nt, Human
gccuccuggguuuuacaccauucucc

SEQ ID NO: 909730 - RNA, 20 nt, Human
gccucgcccacauaggcagc

SEQ ID NO: 909731 - RNA, 23 nt, Human
gccucggccucccaaaguguugg

SEQ ID NO: 909732 - RNA, 22 nt, Human
gcgccggacccucuccagccuc

SEQ ID NO: 909733 - RNA, 21 nt, Human
ggaaaggucaggagguuuugc

SEQ ID NO: 909734 - RNA, 24 nt, Human
ggaaaggucaggagguuuugcauc

SEQ ID NO: 909735 - RNA, 22 nt, Human
ggcaccggacagccugcccgcc

SEQ ID NO: 909736 - RNA, 23 nt, Human
ggcccucucgcgaagccgcagcc

SEQ ID NO: 909737 - RNA, 20 nt, Human
ggccgggaggcgguggccgc

SEQ ID NO: 909738 - RNA, 24 nt, Human
gugaucggcccgccucggccuccc

SEQ ID NO: 909739 - RNA, 19 nt, Human
gugccguggcgcgaucucg

SEQ ID NO: 909740 - RNA, 24 nt, Human
guuuuuuggaaauauaacaaaaua

SEQ ID NO: 909741 - RNA, 18 nt, Human
uaaaaaccucaguucacc

SEQ ID NO: 909742 - RNA, 23 nt, Human
uaaaauacaauccaauuugggua

SEQ ID NO: 909743 - RNA, 18 nt, Human
uaacaagucacucuggac

SEQ ID NO: 909744 - RNA, 21 nt, Human
uaagauaauuccauagcuaca

SEQ ID NO: 909745 - RNA, 20 nt, Human
uaauuggcaaaaaccaaacc

SEQ ID NO: 909746 - RNA, 22 nt, Human
uacaccauucuccugccucagc

SEQ ID NO: 909747 - RNA, 19 nt, Human
uacagcaggacccaggccg

SEQ ID NO: 909748 - RNA, 26 nt, Human
uacagcaggacccaggccgcgccguc

SEQ ID NO: 909749 - RNA, 23 nt, Human
uacaggcgugagccacugugccc

SEQ ID NO: 909750 - RNA, 23 nt, Human
uacaggcgugagccacugugccc

SEQ ID NO: 909751 - RNA, 22 nt, Human
uagagacaggguuucaccgugu

SEQ ID NO: 909752 - RNA, 19 nt, Human
uaggaaaggucaggagguu

SEQ ID NO: 909753 - RNA, 22 nt, Human
uaggggaaugccacauggaauu

SEQ ID NO: 909754 - RNA, 21 nt, Human
uaguagagacaggguuucacc

SEQ ID NO: 909755 - RNA, 24 nt, Human
uaguagagacaggguuucaccgug

SEQ ID NO: 909756 - RNA, 26 nt, Human
uaguagagacaggguuucaccguguu

SEQ ID NO: 909757 - RNA, 23 nt, Human
uagucuacagcaaaagauggcac

SEQ ID NO: 909758 - RNA, 24 nt, Human
ucaccguguuagccaggauggccu

SEQ ID NO: 909759 - RNA, 18 nt, Human
ucacugcaagcucugccu

SEQ ID NO: 909760 - RNA, 23 nt, Human
ucacugcaagcucugccuccugg

SEQ ID NO: 909761 - RNA, 24 nt, Human
ucacugcaagcucugccuccuggg

SEQ ID NO: 909762 - RNA, 20 nt, Human
ucagccuccccaguagcugg

SEQ ID NO: 909763 - RNA, 21 nt, Human
ucaggccgcgcagccgccgcc

SEQ ID NO: 909764 - RNA, 28 nt, Human
uccaagcacaacagcauuuauuaaugaa

SEQ ID NO: 909765 - RNA, 24 nt, Human
ucccaaaguguugggauuacaggc

SEQ ID NO: 909766 - RNA, 22 nt, Human
uccccaguagcugggacuacag

SEQ ID NO: 909767 - RNA, 24 nt, Human
uccccaguagcugggacuacaggu

SEQ ID NO: 909768 - RNA, 18 nt, Human
uccccgagcacgucggcc

SEQ ID NO: 909769 - RNA, 25 nt, Human
uccccuagauuugacuacauggaua

SEQ ID NO: 909770 - RNA, 24 nt, Human
uccuccaccuccugcacacacuuc

SEQ ID NO: 909771 - RNA, 25 nt, Human
uccugcucccgcuucuucuccucca

SEQ ID NO: 909772 - RNA, 23 nt, Human
ucgcgcgcgcacuucgccaaggc

SEQ ID NO: 909773 - RNA, 18 nt, Human
ucggccggcggcggcggc

SEQ ID NO: 909774 - RNA, 22 nt, Human
ucuccagccuccuccgcgccuc

SEQ ID NO: 909775 - RNA, 18 nt, Human
ucucccaggcuggagugc

SEQ ID NO: 909776 - RNA, 25 nt, Human
ucuccugccucagccuccccaguag

SEQ ID NO: 909777 - RNA, 19 nt, Human
ucugucucccaggcuggag

SEQ ID NO: 909778 - RNA, 19 nt, Human
ucuugcucugucucccagg

SEQ ID NO: 909779 - RNA, 23 nt, Human
ucuugcucugucucccaggcugg

SEQ ID NO: 909780 - RNA, 24 nt, Human
ucuugcucugucucccaggcugga

SEQ ID NO: 909781 - RNA, 22 nt, Human
ugaaaucuacccaucacacacc

SEQ ID NO: 909782 - RNA, 20 nt, Human
ugacugagugagguuaggga

SEQ ID NO: 909783 - RNA, 22 nt, Human
ugagacggagucuugcucuguc

SEQ ID NO: 909784 - RNA, 21 nt, Human
ugccacauggaauuuagaagu

SEQ ID NO: 909785 - RNA, 25 nt, Human
ugcccggccaaauuuuacuauuuuu

SEQ ID NO: 909786 - RNA, 18 nt, Human
ugccguggcgcgaucucg

SEQ ID NO: 909787 - RNA, 21 nt, Human
ugccucagccuccccaguagc

SEQ ID NO: 909788 - RNA, 24 nt, Human
ugccucagccuccccaguagcugg

SEQ ID NO: 909789 - RNA, 24 nt, Human
uggagugccguggcgcgaucucgg

SEQ ID NO: 909790 - RNA, 18 nt, Human
uggcaaaaaccaaaccaa

SEQ ID NO: 909791 - RNA, 23 nt, Human
uggcaaaaaccaaaccaaaacag

SEQ ID NO: 909792 - RNA, 21 nt, Human
ugggacuacaggugugcacca

SEQ ID NO: 909793 - RNA, 18 nt, Human
ugggauuacaggcgugag

SEQ ID NO: 909794 - RNA, 21 nt, Human
ugggauuacaggcgugagcca

SEQ ID NO: 909795 - RNA, 22 nt, Human
ugggauuacaggcgugagccac

SEQ ID NO: 909796 - RNA, 22 nt, Human
ugggauuacaggcgugagccac

SEQ ID NO: 909797 - RNA, 22 nt, Human
ugggauuacaggcgugagccac

SEQ ID NO: 909798 - RNA, 24 nt, Human
ugggauuacaggcgugagccacug

SEQ ID NO: 909799 - RNA, 26 nt, Human
ugggauuacaggcgugagccacugug

SEQ ID NO: 909800 - RNA, 19 nt, Human
uuaacaagucacucuggac

SEQ ID NO: 909801 - RNA, 24 nt, Human
uuaacaagucacucuggaccaagc

SEQ ID NO: 909802 - RNA, 21 nt, Human
uuacaccauucuccugccuca

SEQ ID NO: 909803 - RNA, 18 nt, Human
uuaggauccuucuaacau

SEQ ID NO: 909804 - RNA, 22 nt, Human
uuaguagagacaggguuucacc

SEQ ID NO: 909805 - RNA, 24 nt, Human
uuaguagagacaggguuucaccgu

SEQ ID NO: 909806 - RNA, 21 nt, Human
uucaguguuugaguguacuua

SEQ ID NO: 909807 - RNA, 20 nt, Human
uucauuaggauccuucuaac

SEQ ID NO: 909808 - RNA, 18 nt, Human
uugcucugucucccaggc

SEQ ID NO: 909809 - RNA, 19 nt, Human
uuucaccguguuagccagg

SEQ ID NO: 909810 - RNA, 21 nt, Human
uuugcuuuuuccccuagauuu

SEQ ID NO: 909811 - RNA, 23 nt, Human
uuugcuuuuuccccuagauuuga

SEQ ID NO: 909812 - RNA, 24 nt, Human
uuuucuaaguucuccaucugaaua

SEQ ID NO: 909813 - RNA, 24 nt, Human
uuuuuaguagagacaggguuucac

SEQ ID NO: 909814 - RNA, 22 nt, Human
uuuuuguauuuuuaguagagaa

SEQ ID NO: 909815 - RNA, 21 nt, Human
uuuuuuguauuuuuaguagag

SEQ ID NO: 909816 - RNA, 24 nt, Human
uuuuuuuuuuuugagacggagucu

SEQ ID NO: 909817 - RNA, 23 nt, Human
aaaaggaaaagaaugucaaagaa

SEQ ID NO: 909818 - RNA, 24 nt, Human
aaacacuuacauuguauaguaaua

SEQ ID NO: 909819 - RNA, 21 nt, Human
aaacccacaggcuucuaugga

SEQ ID NO: 909820 - RNA, 23 nt, Human
aaagaagcaagaugaggaucugu

SEQ ID NO: 909821 - RNA, 18 nt, Human
aagaaaacugaacacaua

SEQ ID NO: 909822 - RNA, 19 nt, Human
aagacaacaacaaaaacaa

SEQ ID NO: 909823 - RNA, 22 nt, Human
aagacaacaacaaaaacaauuu

SEQ ID NO: 909824 - RNA, 22 nt, Human
aagcaacauugauguuaaagcc

SEQ ID NO: 909825 - RNA, 23 nt, Human
aagcaacauugauguuaaagccc

SEQ ID NO: 909826 - RNA, 18 nt, Human
aagcaagaugaggaucug

SEQ ID NO: 909827 - RNA, 20 nt, Human
aaguaggucauacaugaaca

SEQ ID NO: 909828 - RNA, 21 nt, Human
aaguaggucauacaugaacau

SEQ ID NO: 909829 - RNA, 20 nt, Human
aauaguaccauuuuaaaccc

SEQ ID NO: 909830 - RNA, 20 nt, Human
agaaagcucaugaaauacga

SEQ ID NO: 909831 - RNA, 19 nt, Human
aggugcagguuccccccac

SEQ ID NO: 909832 - RNA, 22 nt, Human
agguuccccccaccccccccaa

SEQ ID NO: 909833 - RNA, 21 nt, Human
agguuuggagguuaccgugcc

SEQ ID NO: 909834 - RNA, 20 nt, Human
aguaaagagaacagaaagaa

SEQ ID NO: 909835 - RNA, 25 nt, Human
aguaaagagaacagaaagaaggucc

SEQ ID NO: 909836 - RNA, 19 nt, Human
agucuaaaauucugcauau

SEQ ID NO: 909837 - RNA, 22 nt, Human
agugguacuucucucucuuuug

SEQ ID NO: 909838 - RNA, 21 nt, Human
auacaucuaugugugugugcu

SEQ ID NO: 909839 - RNA, 25 nt, Human
auagaagaaaccaucgaaacccaca

SEQ ID NO: 909840 - RNA, 20 nt, Human
auauauacacauauguauac

SEQ ID NO: 909841 - RNA, 21 nt, Human
auauauauauguguguguaua

SEQ ID NO: 909842 - RNA, 21 nt, Human
auauauauguguguguauaua

SEQ ID NO: 909843 - RNA, 23 nt, Human
auccauccauauauauaugugug

SEQ ID NO: 909844 - RNA, 20 nt, Human
augaagcucugaaauaagag

SEQ ID NO: 909845 - RNA, 18 nt, Human
auguaucauauauacaca

SEQ ID NO: 909846 - RNA, 24 nt, Human
caaaaaaaggaaaagaaugucaaa

SEQ ID NO: 909847 - RNA, 19 nt, Human
caaagucuucucuaccccc

SEQ ID NO: 909848 - RNA, 25 nt, Human
caacaaaaacaauuuuaaaaacuga

SEQ ID NO: 909849 - RNA, 21 nt, Human
caacaacaucaaagcaacauu

SEQ ID NO: 909850 - RNA, 21 nt, Human
caacauaaauaaaccauguug

SEQ ID NO: 909851 - RNA, 19 nt, Human
caaguacaauaccauaaua

SEQ ID NO: 909852 - RNA, 25 nt, Human
caaguacaauaccauaauaguacca

SEQ ID NO: 909853 - RNA, 22 nt, Human
cagaagcccacaagaaaacuga

SEQ ID NO: 909854 - RNA, 19 nt, Human
cagcgugucagggugacca

SEQ ID NO: 909855 - RNA, 22 nt, Human
cagcgugucagggugaccagug

SEQ ID NO: 909856 - RNA, 19 nt, Human
cagguuccccccacccccc

SEQ ID NO: 909857 - RNA, 24 nt, Human
cauaauaguaccauuuuaaacccu

SEQ ID NO: 909858 - RNA, 24 nt, Human
cauauauauauguguguguauaua

SEQ ID NO: 909859 - RNA, 27 nt, Human
cauauguauacguuuacauacauggug

SEQ ID NO: 909860 - RNA, 24 nt, Human
caucuuccaugucggagccgaaga

SEQ ID NO: 909861 - RNA, 25 nt, Human
cauucuuuuccuucaaagucuucuc

SEQ ID NO: 909862 - RNA, 21 nt, Human
cccacaagaaaacugaacaca

SEQ ID NO: 909863 - RNA, 19 nt, Human
cccaccccccccaaaaaaa

SEQ ID NO: 909864 - RNA, 19 nt, Human
cccccccaaaaaaaggaaa

SEQ ID NO: 909865 - RNA, 20 nt, Human
ccugaggcuguggacuacaa

SEQ ID NO: 909866 - RNA, 20 nt, Human
cggcgagggcgaacguggcg

SEQ ID NO: 909867 - RNA, 21 nt, Human
cguguguguguauguguaugu

SEQ ID NO: 909868 - RNA, 22 nt, Human
cguuuacauacaugagugugua

SEQ ID NO: 909869 - RNA, 24 nt, Human
cuacauguuugcuucucucuuccu

SEQ ID NO: 909870 - RNA, 21 nt, Human
cuauauacaucuaugugugug

SEQ ID NO: 909871 - RNA, 18 nt, Human
cucucuuccucucuuucc

SEQ ID NO: 909872 - RNA, 21 nt, Human
cucuuccucucuuuccuucug

SEQ ID NO: 909873 - RNA, 21 nt, Human
cucuucucaaaaagacaggaa

SEQ ID NO: 909874 - RNA, 18 nt, Human
cuggucaaccaaaaaggu

SEQ ID NO: 909875 - RNA, 22 nt, Human
cuucucaaaaagacaggaaguc

SEQ ID NO: 909876 - RNA, 18 nt, Human
cuugacuuauuuauuuga

SEQ ID NO: 909877 - RNA, 22 nt, Human
gaaaaauguaccccucguaucc

SEQ ID NO: 909878 - RNA, 23 nt, Human
gaaaauagcaaauggagcuccac

SEQ ID NO: 909879 - RNA, 19 nt, Human
gaacauucaccauucacaa

SEQ ID NO: 909880 - RNA, 22 nt, Human
gagaacagaaagaagguccaac

SEQ ID NO: 909881 - RNA, 25 nt, Human
gagaagaguaaagagaaccgguacc

SEQ ID NO: 909882 - RNA, 21 nt, Human
gcagguuccccccaccccccc

SEQ ID NO: 909883 - RNA, 24 nt, Human
gcagguuccccccaccccccccaa

SEQ ID NO: 909884 - RNA, 31 nt, Human
guauguaucauauauacacauauguauacgg

SEQ ID NO: 909885 - RNA, 24 nt, Human
guuaccaggugcagguucccccca

SEQ ID NO: 909886 - RNA, 22 nt, Human
uaaaaugcgccagaagugacug

SEQ ID NO: 909887 - RNA, 19 nt, Human
uaacaucucuguggaugac

SEQ ID NO: 909888 - RNA, 18 nt, Human
uaaccucaacgacauuug

SEQ ID NO: 909889 - RNA, 23 nt, Human
uacauccauccauauauauaugu

SEQ ID NO: 909890 - RNA, 21 nt, Human
uacauucuuuuccuucaaagu

SEQ ID NO: 909891 - RNA, 24 nt, Human
uaccccucguauccauaagacuug

SEQ ID NO: 909892 - RNA, 21 nt, Human
uacguggaagagauaagugag

SEQ ID NO: 909893 - RNA, 22 nt, Human
uacuggucaaccaaaaaggugg

SEQ ID NO: 909894 - RNA, 26 nt, Human
uacuucucucucuuuugucgggcucc

SEQ ID NO: 909895 - RNA, 23 nt, Human
uauauacacauauguauacguua

SEQ ID NO: 909896 - RNA, 25 nt, Human
uauauuacauccauccauauauaua

SEQ ID NO: 909897 - RNA, 29 nt, Human
uauauuacauccauccauauauauaugug

SEQ ID NO: 909898 - RNA, 25 nt, Human
uauguaucauauauacacauaugua

SEQ ID NO: 909899 - RNA, 26 nt, Human
uauguaucauauauacacauauguaa

SEQ ID NO: 909900 - RNA, 23 nt, Human
uauguguauguaucauauauaca

SEQ ID NO: 909901 - RNA, 19 nt, Human
uaugugugugugcuacaua

SEQ ID NO: 909902 - RNA, 21 nt, Human
uaugugugugugcuacauaua

SEQ ID NO: 909903 - RNA, 20 nt, Human
ucaaagaagcaagaugagga

SEQ ID NO: 909904 - RNA, 19 nt, Human
ucauauauacacauaugua

SEQ ID NO: 909905 - RNA, 21 nt, Human
uccaugucggagccgaagagc

SEQ ID NO: 909906 - RNA, 23 nt, Human
uccccccaccccccccaaaaaaa

SEQ ID NO: 909907 - RNA, 19 nt, Human
ucucuguggaugacuucua

SEQ ID NO: 909908 - RNA, 23 nt, Human
ucuuuguaggaaggggugcagag

SEQ ID NO: 909909 - RNA, 18 nt, Human
ugaaauacgaccgugcag

SEQ ID NO: 909910 - RNA, 18 nt, Human
ugaacaaaacgccuaugg

SEQ ID NO: 909911 - RNA, 22 nt, Human
ugaagcucugaaauaagaguuu

SEQ ID NO: 909912 - RNA, 20 nt, Human
ugacugcuuuaucaucuuug

SEQ ID NO: 909913 - RNA, 18 nt, Human
ugaucugaucugugagaa

SEQ ID NO: 909914 - RNA, 21 nt, Human
ugcacaaaccaggcucauaug

SEQ ID NO: 909915 - RNA, 18 nt, Human
ugcaccccaguuaccagg

SEQ ID NO: 909916 - RNA, 21 nt, Human
ugcagguuccccccacccccc

SEQ ID NO: 909917 - RNA, 20 nt, Human
ugccaagacaacaacaaaaa

SEQ ID NO: 909918 - RNA, 22 nt, Human
ugccaagacaacaacaaaaaca

SEQ ID NO: 909919 - RNA, 20 nt, Human
ugcuucucucuuccucucuu

SEQ ID NO: 909920 - RNA, 22 nt, Human
uggaagagauaagugagaggug

SEQ ID NO: 909921 - RNA, 18 nt, Human
uggcaggaaguccucugc

SEQ ID NO: 909922 - RNA, 28 nt, Human
uggugguaaauauguagaagcauauuuu

SEQ ID NO: 909923 - RNA, 24 nt, Human
uguauacguuuacauacaugagug

SEQ ID NO: 909924 - RNA, 25 nt, Human
uguauagaagaaaccaucgaaaccc

SEQ ID NO: 909925 - RNA, 21 nt, Human
uguauguguauguaucauaua

SEQ ID NO: 909926 - RNA, 21 nt, Human
uguauguguauguaucauaua

SEQ ID NO: 909927 - RNA, 23 nt, Human
uguauguguauguaucauauaua

SEQ ID NO: 909928 - RNA, 23 nt, Human
ugucucucguguguguguaugug

SEQ ID NO: 909929 - RNA, 20 nt, Human
uguguauauaucuagccaca

SEQ ID NO: 909930 - RNA, 19 nt, Human
uguguauguaucauauaua

SEQ ID NO: 909931 - RNA, 25 nt, Human
uguguauguaucauauauacacaua

SEQ ID NO: 909932 - RNA, 25 nt, Human
uguguguauauaucuagccacagug

SEQ ID NO: 909933 - RNA, 19 nt, Human
uguguguguauguguaugu

SEQ ID NO: 909934 - RNA, 25 nt, Human
uucaaagucuucucuacccccaucu

SEQ ID NO: 909935 - RNA, 26 nt, Human
uucaaagucuucucuacccccaucuc

SEQ ID NO: 909936 - RNA, 22 nt, Human
uucaugaagcucugaaauaaga

SEQ ID NO: 909937 - RNA, 22 nt, Human
uuccccccaccccccccaaaaa

SEQ ID NO: 909938 - RNA, 22 nt, Human
uugcaccccaguuaccaggugc

SEQ ID NO: 909939 - RNA, 24 nt, Human
uugcucagugucuaugaugccuca

SEQ ID NO: 909940 - RNA, 19 nt, Human
uuguaggaaggggugcaga

SEQ ID NO: 909941 - RNA, 22 nt, Human
uuugcuacaacauaaauaaacc

SEQ ID NO: 909942 - RNA, 21 nt, Human
uuuguccauuuccuuuaaggc

SEQ ID NO: 909943 - RNA, 19 nt, Human
aaaauaccucuauggaaua

SEQ ID NO: 909944 - RNA, 22 nt, Human
aaaauccaaaauuagggacccc

SEQ ID NO: 909945 - RNA, 19 nt, Human
aacagaaaagcccuauaca

SEQ ID NO: 909946 - RNA, 20 nt, Human
aaggaaacaagcuuguagaa

SEQ ID NO: 909947 - RNA, 19 nt, Human
aaggaugacauugcuggac

SEQ ID NO: 909948 - RNA, 25 nt, Human
aauuuuauaccagaacuccucacua

SEQ ID NO: 909949 - RNA, 19 nt, Human
accccaccccgugguccug

SEQ ID NO: 909950 - RNA, 25 nt, Human
accucuuucuuuguccuucccguug

SEQ ID NO: 909951 - RNA, 22 nt, Human
aggcauucagggacgggaagca

SEQ ID NO: 909952 - RNA, 24 nt, Human
agguccuuggauccaaaacagucc

SEQ ID NO: 909953 - RNA, 18 nt, Human
aggugcccagcacugagc

SEQ ID NO: 909954 - RNA, 21 nt, Human
agucaauaaugccaaagcuaa

SEQ ID NO: 909955 - RNA, 21 nt, Human
agucccagucuagaauuaccc

SEQ ID NO: 909956 - RNA, 22 nt, Human
caaacagaaaagcccuauacaa

SEQ ID NO: 909957 - RNA, 24 nt, Human
caaagcuaaggauagaaaucuauc

SEQ ID NO: 909958 - RNA, 24 nt, Human
caagguagucaaugcuuauucucc

SEQ ID NO: 909959 - RNA, 24 nt, Human
caaggugaaagcccaggcaugguu

SEQ ID NO: 909960 - RNA, 23 nt, Human
caagucaauccagucaauaaugc

SEQ ID NO: 909961 - RNA, 20 nt, Human
cacccccaccaguauuccca

SEQ ID NO: 909962 - RNA, 23 nt, Human
cacccccaccaguauucccaguu

SEQ ID NO: 909963 - RNA, 22 nt, Human
caccucuuucuuuguccuuccc

SEQ ID NO: 909964 - RNA, 19 nt, Human
cagucaauaaugccaaagc

SEQ ID NO: 909965 - RNA, 23 nt, Human
ccaccuccccuggagauuauucc

SEQ ID NO: 909966 - RNA, 18 nt, Human
ccaccucuuucuuugucc

SEQ ID NO: 909967 - RNA, 19 nt, Human
ccagacagcuuuccuugcc

SEQ ID NO: 909968 - RNA, 22 nt, Human
ccagcuacagauuuccuuccac

SEQ ID NO: 909969 - RNA, 19 nt, Human
ccccgugguccugcuacuc

SEQ ID NO: 909970 - RNA, 18 nt, Human
ccccuggagauuauuccc

SEQ ID NO: 909971 - RNA, 21 nt, Human
ccgccgcugccccggcuccug

SEQ ID NO: 909972 - RNA, 21 nt, Human
cgcacaggugcccagcacuga

SEQ ID NO: 909973 - RNA, 23 nt, Human
cuuucugagcuaaaagaacaaaa

SEQ ID NO: 909974 - RNA, 21 nt, Human
gacagucuggcacaaaaaggc

SEQ ID NO: 909975 - RNA, 21 nt, Human
gaggguccuggggugugcucc

SEQ ID NO: 909976 - RNA, 21 nt, Human
ggaaaagugaggguccugggg

SEQ ID NO: 909977 - RNA, 22 nt, Human
ggacagucuggcacaaaaaggc

SEQ ID NO: 909978 - RNA, 23 nt, Human
ggauccaaaacaguccccuaccc

SEQ ID NO: 909979 - RNA, 24 nt, Human
ggcacaaaaaggcauucagggacg

SEQ ID NO: 909980 - RNA, 19 nt, Human
gggagaaaacuuugucugu

SEQ ID NO: 909981 - RNA, 20 nt, Human
gugcauccuugagauguuag

SEQ ID NO: 909982 - RNA, 18 nt, Human
uaagcgacuuguucaagu

SEQ ID NO: 909983 - RNA, 25 nt, Human
uaaggaaaaauccaaaauuagggac

SEQ ID NO: 909984 - RNA, 22 nt, Human
uaaggaaacaagcuuguagaag

SEQ ID NO: 909985 - RNA, 23 nt, Human
uaaggaaacaagcuuguagaagu

SEQ ID NO: 909986 - RNA, 21 nt, Human
uacaaaaugaagcagcgcuaa

SEQ ID NO: 909987 - RNA, 22 nt, Human
uacacgugaaccaaauguuuuc

SEQ ID NO: 909988 - RNA, 24 nt, Human
uagaaaucuaucuucuagcccaau

SEQ ID NO: 909989 - RNA, 20 nt, Human
uaggauuaaaaauaaaauac

SEQ ID NO: 909990 - RNA, 19 nt, Human
uagucauuuugcagcugca

SEQ ID NO: 909991 - RNA, 19 nt, Human
uaguuugcuuuaaguuggu

SEQ ID NO: 909992 - RNA, 19 nt, Human
uauagggagcaaagcagcu

SEQ ID NO: 909993 - RNA, 23 nt, Human
uccccuggagauuauucccagca

SEQ ID NO: 909994 - RNA, 20 nt, Human
uccugcacauguucaccccu

SEQ ID NO: 909995 - RNA, 24 nt, Human
ucucugcugcugaccaugcuucaa

SEQ ID NO: 909996 - RNA, 18 nt, Human
ucugggagaugccccuuc

SEQ ID NO: 909997 - RNA, 18 nt, Human
ugaacaaagaguuguaag

SEQ ID NO: 909998 - RNA, 18 nt, Human
ugaacaaagaguuguaag

SEQ ID NO: 909999 - RNA, 19 nt, Human
ugaacaaagaguuguaagg

SEQ ID NO: 910000 - RNA, 21 nt, Human
ugaaccaaauguuuuccugcc

SEQ ID NO: 910001 - RNA, 18 nt, Human
ugaucaguauuuauaagg

SEQ ID NO: 910002 - RNA, 19 nt, Human
ugccccaccucuuucuuug

SEQ ID NO: 910003 - RNA, 18 nt, Human
ugccccgaggccucuagc

SEQ ID NO: 910004 - RNA, 23 nt, Human
ugccccgaggccucuagcuguuc

SEQ ID NO: 910005 - RNA, 22 nt, Human
ugccccuuccuucucuggcuca

SEQ ID NO: 910006 - RNA, 19 nt, Human
ugcuggacugaaaauggcc

SEQ ID NO: 910007 - RNA, 22 nt, Human
ugcuucaaggugaaagcccagg

SEQ ID NO: 910008 - RNA, 19 nt, Human
uggauccaaaacagucccc

SEQ ID NO: 910009 - RNA, 21 nt, Human
uggcucagaguggcuggcgcc

SEQ ID NO: 910010 - RNA, 24 nt, Human
uggcucagaguggcuggcgccgac

SEQ ID NO: 910011 - RNA, 24 nt, Human
ugggagaaaacuuugucuguaaug

SEQ ID NO: 910012 - RNA, 18 nt, Human
ugggagaugccccuuccu

SEQ ID NO: 910013 - RNA, 20 nt, Human
uguagaaguuaagcgacuug

SEQ ID NO: 910014 - RNA, 20 nt, Human
uguucaguguucccucagcu

SEQ ID NO: 910015 - RNA, 21 nt, Human
uguuuuccugccccgaggccu

SEQ ID NO: 910016 - RNA, 22 nt, Human
uucacccccaccaguauuccca

SEQ ID NO: 910017 - RNA, 20 nt, Human
uucucuggcucagaguggcu

SEQ ID NO: 910018 - RNA, 18 nt, Human
uugccuguuuacacguga

SEQ ID NO: 910019 - RNA, 27 nt, Human
uuuuuuuuuuuuuuuuuuauguugggg

SEQ ID NO: 910020 - RNA, 23 nt, Human
aagaagcucagcuagaaugaugc

SEQ ID NO: 910021 - RNA, 22 nt, Human
aagccaggucauuagcaaagga

SEQ ID NO: 910022 - RNA, 22 nt, Human
aaguaacggcauugacagucau

SEQ ID NO: 910023 - RNA, 20 nt, Human
aaugaagaagcucagcuaga

SEQ ID NO: 910024 - RNA, 20 nt, Human
aauggcaauuacugugugug

SEQ ID NO: 910025 - RNA, 23 nt, Human
agaaaacaaauguuccugacuca

SEQ ID NO: 910026 - RNA, 18 nt, Human
agaagaaggagaaugaag

SEQ ID NO: 910027 - RNA, 20 nt, Human
agaagaaggagaaugaagaa

SEQ ID NO: 910028 - RNA, 20 nt, Human
agaagugggaaaaaaagcau

SEQ ID NO: 910029 - RNA, 20 nt, Human
agccagugcaaaaaugacaa

SEQ ID NO: 910030 - RNA, 19 nt, Human
agcuagaaugaugcaagac

SEQ ID NO: 910031 - RNA, 19 nt, Human
aggucccccacagccucac

SEQ ID NO: 910032 - RNA, 21 nt, Human
aguucuaagaccucaaaccaa

SEQ ID NO: 910033 - RNA, 24 nt, Human
augaugcaagacacuggcagccuc

SEQ ID NO: 910034 - RNA, 21 nt, Human
caacccccaaagauucauccc

SEQ ID NO: 910035 - RNA, 23 nt, Human
caacccccaaagauucauccccu

SEQ ID NO: 910036 - RNA, 22 nt, Human
cacagaaccggauccauuuuga

SEQ ID NO: 910037 - RNA, 24 nt, Human
cagacagaugccuugaaagccagg

SEQ ID NO: 910038 - RNA, 21 nt, Human
cagcuagaaugaugcaagaca

SEQ ID NO: 910039 - RNA, 22 nt, Human
caggggguggggggcuuguguu

SEQ ID NO: 910040 - RNA, 26 nt, Human
cccacagccucacucucgcacccgcc

SEQ ID NO: 910041 - RNA, 21 nt, Human
ccccaaagauucauccccugg

SEQ ID NO: 910042 - RNA, 22 nt, Human
ccccaaagauucauccccugga

SEQ ID NO: 910043 - RNA, 25 nt, Human
ccccacagccucacucucgcacccg

SEQ ID NO: 910044 - RNA, 18 nt, Human
ccccagaguucuaagacc

SEQ ID NO: 910045 - RNA, 24 nt, Human
cccggggccagggcacgcagaagc

SEQ ID NO: 910046 - RNA, 18 nt, Human
ccgccacagaaccggauc

SEQ ID NO: 910047 - RNA, 19 nt, Human
cucccggggccagggcacg

SEQ ID NO: 910048 - RNA, 18 nt, Human
cuucgcggagguucggcc

SEQ ID NO: 910049 - RNA, 18 nt, Human
gaauaucccccagaguuc

SEQ ID NO: 910050 - RNA, 18 nt, Human
gcgcgcaaguaggaggga

SEQ ID NO: 910051 - RNA, 18 nt, Human
ggagauggugugagggaa

SEQ ID NO: 910052 - RNA, 18 nt, Human
gggaaggccaagggucag

SEQ ID NO: 910053 - RNA, 18 nt, Human
ggucaggggguggggggc

SEQ ID NO: 910054 - RNA, 21 nt, Human
uaagaccucaaaccaaccccc

SEQ ID NO: 910055 - RNA, 23 nt, Human
uaagaccucaaaccaacccccaa

SEQ ID NO: 910056 - RNA, 21 nt, Human
uaugggucuuuguggaagaag

SEQ ID NO: 910057 - RNA, 22 nt, Human
uauuacagaagugggaaaaaaa

SEQ ID NO: 910058 - RNA, 19 nt, Human
ucaggccagacagaugccu

SEQ ID NO: 910059 - RNA, 18 nt, Human
uccauucucaucaggcca

SEQ ID NO: 910060 - RNA, 24 nt, Human
ucucgcacccgccacagaaccgga

SEQ ID NO: 910061 - RNA, 21 nt, Human
ucugaaaggaaauuggagaaa

SEQ ID NO: 910062 - RNA, 24 nt, Human
ugaaaguuguacaccuucuccaga

SEQ ID NO: 910063 - RNA, 23 nt, Human
ugccccuucauguuuuguuucug

SEQ ID NO: 910064 - RNA, 20 nt, Human
uggaagaaggagaagaagga

SEQ ID NO: 910065 - RNA, 22 nt, Human
uggaagaaggagaagaaggaga

SEQ ID NO: 910066 - RNA, 24 nt, Human
uggaaucaucaucuuugcggugau

SEQ ID NO: 910067 - RNA, 19 nt, Human
uggaggucccccacagccu

SEQ ID NO: 910068 - RNA, 23 nt, Human
uggugugagggaaggccaagggu

SEQ ID NO: 910069 - RNA, 20 nt, Human
uguggaagaaggagaagaag

SEQ ID NO: 910070 - RNA, 23 nt, Human
uuacuguguguguggcuuuuuuc

SEQ ID NO: 910071 - RNA, 18 nt, Human
uucauguuuuguuucugu

SEQ ID NO: 910072 - RNA, 23 nt, Human
uucuguuugaguaaaaaucucac

SEQ ID NO: 910073 - RNA, 27 nt, Human
aaaaacgcaucucucuaaaggcaacuc

SEQ ID NO: 910074 - RNA, 23 nt, Human
aaaccaucaagcugcucagacaa

SEQ ID NO: 910075 - RNA, 21 nt, Human
aacaccccaauccagcucugc

SEQ ID NO: 910076 - RNA, 20 nt, Human
aacgcacacagaaugaaacg

SEQ ID NO: 910077 - RNA, 23 nt, Human
aagcauggcuggcucauucauac

SEQ ID NO: 910078 - RNA, 23 nt, Human
aagcggucagcccacgggaccau

SEQ ID NO: 910079 - RNA, 19 nt, Human
aaggcagguggacccccuc

SEQ ID NO: 910080 - RNA, 23 nt, Human
accccacaacgcacacagaauga

SEQ ID NO: 910081 - RNA, 20 nt, Human
acccccucccccaccccaca

SEQ ID NO: 910082 - RNA, 22 nt, Human
acccccucccccaccccacaac

SEQ ID NO: 910083 - RNA, 19 nt, Human
accucgcccuguccccgcu

SEQ ID NO: 910084 - RNA, 21 nt, Human
acgagaaagcugaggcccagg

SEQ ID NO: 910085 - RNA, 18 nt, Human
acggagaaaaagagagaa

SEQ ID NO: 910086 - RNA, 20 nt, Human
acggagaaaaagagagaagc

SEQ ID NO: 910087 - RNA, 23 nt, Human
agaaagaaauagauuuauucuca

SEQ ID NO: 910088 - RNA, 19 nt, Human
agaagccaguggcgggcug

SEQ ID NO: 910089 - RNA, 24 nt, Human
agagaagcaaauuacaaagucucc

SEQ ID NO: 910090 - RNA, 20 nt, Human
agagagaagccaguggcggg

SEQ ID NO: 910091 - RNA, 18 nt, Human
agcagugggcugcccccu

SEQ ID NO: 910092 - RNA, 18 nt, Human
aggaaguccuggucuagg

SEQ ID NO: 910093 - RNA, 22 nt, Human
aggcaggaggaagcauggcugg

SEQ ID NO: 910094 - RNA, 18 nt, Human
aggcagguggacccccuc

SEQ ID NO: 910095 - RNA, 21 nt, Human
aggcagguggacccccucccc

SEQ ID NO: 910096 - RNA, 19 nt, Human
agggaccaagagcaguggg

SEQ ID NO: 910097 - RNA, 20 nt, Human
agggaccaagagcagugggc

SEQ ID NO: 910098 - RNA, 23 nt, Human
agggcacagguggauauggccuu

SEQ ID NO: 910099 - RNA, 18 nt, Human
agugguccucagggggcc

SEQ ID NO: 910100 - RNA, 20 nt, Human
auuacaaagucuccgugagg

SEQ ID NO: 910101 - RNA, 28 nt, Human
caacgcacacagaaugaaacggagaaaa

SEQ ID NO: 910102 - RNA, 22 nt, Human
caagagcagugggcugcccccu

SEQ ID NO: 910103 - RNA, 25 nt, Human
caagagucccggccuauggggucuc

SEQ ID NO: 910104 - RNA, 19 nt, Human
cacagaaugaaacggagaa

SEQ ID NO: 910105 - RNA, 18 nt, Human
cacagaguccuagaaaaa

SEQ ID NO: 910106 - RNA, 24 nt, Human
cacucugcucacucagaugucuca

SEQ ID NO: 910107 - RNA, 26 nt, Human
cacucugcucacucagaugucucacc

SEQ ID NO: 910108 - RNA, 28 nt, Human
cacucugcucacucagaugucucaccuu

SEQ ID NO: 910109 - RNA, 21 nt, Human
cagagcacugagcugccccuc

SEQ ID NO: 910110 - RNA, 22 nt, Human
cagccuggacucaacaccccaa

SEQ ID NO: 910111 - RNA, 26 nt, Human
caggcacagggaccaagagcaguggg

SEQ ID NO: 910112 - RNA, 23 nt, Human
cagggcacagguggauauggccu

SEQ ID NO: 910113 - RNA, 19 nt, Human
cagguggauauggccuuga

SEQ ID NO: 910114 - RNA, 18 nt, Human
caguauaguagugguccu

SEQ ID NO: 910115 - RNA, 25 nt, Human
cagugggcugcccccuacucagccu

SEQ ID NO: 910116 - RNA, 23 nt, Human
ccaagagcagugggcugcccccu

SEQ ID NO: 910117 - RNA, 24 nt, Human
ccacugcucauuggucaccccugu

SEQ ID NO: 910118 - RNA, 22 nt, Human
ccagcaggcacagggaccaaga

SEQ ID NO: 910119 - RNA, 21 nt, Human
ccagccagacuaagguggcac

SEQ ID NO: 910120 - RNA, 19 nt, Human
ccagcuucuuccuggggcc

SEQ ID NO: 910121 - RNA, 22 nt, Human
cccaggacccguggcucuguuc

SEQ ID NO: 910122 - RNA, 18 nt, Human
ccccacaacgcacacaga

SEQ ID NO: 910123 - RNA, 21 nt, Human
ccccaccccacaacgcacaca

SEQ ID NO: 910124 - RNA, 24 nt, Human
cccccaccccacaacgcacacaga

SEQ ID NO: 910125 - RNA, 18 nt, Human
cccccagcaggcacaggg

SEQ ID NO: 910126 - RNA, 24 nt, Human
cccccaggucccaaucccaccauc

SEQ ID NO: 910127 - RNA, 23 nt, Human
cccccucccccaccccacaacgc

SEQ ID NO: 910128 - RNA, 24 nt, Human
cccgcucccuguuuggcccagaca

SEQ ID NO: 910129 - RNA, 23 nt, Human
cccucccccaccccacaacgcac

SEQ ID NO: 910130 - RNA, 20 nt, Human
cccuguaucccccagguccc

SEQ ID NO: 910131 - RNA, 18 nt, Human
ccucccacagaacuaagg

SEQ ID NO: 910132 - RNA, 28 nt, Human
ccuccccagccagacuaagguggcaccu

SEQ ID NO: 910133 - RNA, 25 nt, Human
ccucgcccuguccccgcugccugga

SEQ ID NO: 910134 - RNA, 23 nt, Human
ccuggagacccaaagggugggag

SEQ ID NO: 910135 - RNA, 24 nt, Human
ccuggggccccuguaucccccagg

SEQ ID NO: 910136 - RNA, 23 nt, Human
cuccugcccaucaaucccauccu

SEQ ID NO: 910137 - RNA, 21 nt, Human
cuggggccccuguauccccca

SEQ ID NO: 910138 - RNA, 25 nt, Human
gaaauagauuuauucucauguacaa

SEQ ID NO: 910139 - RNA, 23 nt, Human
gaaguccuggucuaggacccagg

SEQ ID NO: 910140 - RNA, 23 nt, Human
gacaaagaauggcuugggaaaga

SEQ ID NO: 910141 - RNA, 19 nt, Human
gacccccucccccacccca

SEQ ID NO: 910142 - RNA, 19 nt, Human
gagaaaaagagagaagcca

SEQ ID NO: 910143 - RNA, 22 nt, Human
gagacccaaagggugggagucc

SEQ ID NO: 910144 - RNA, 20 nt, Human
gcagagcacugagcugcccc

SEQ ID NO: 910145 - RNA, 21 nt, Human
gccgcggcuguuucuaguccu

SEQ ID NO: 910146 - RNA, 23 nt, Human
ggacccccucccccaccccacaa

SEQ ID NO: 910147 - RNA, 24 nt, Human
ggagaaaccaucaagcugcucaga

SEQ ID NO: 910148 - RNA, 22 nt, Human
ggcagggaaguguccuggaggg

SEQ ID NO: 910149 - RNA, 20 nt, Human
gggcagggaaguguccugga

SEQ ID NO: 910150 - RNA, 22 nt, Human
uaagguggcaccucgcccuguc

SEQ ID NO: 910151 - RNA, 24 nt, Human
uagaaaaacgcaucucucuaaagg

SEQ ID NO: 910152 - RNA, 19 nt, Human
uagaaagaaauagauuuau

SEQ ID NO: 910153 - RNA, 25 nt, Human
uagagcauggauugucuuacccgcu

SEQ ID NO: 910154 - RNA, 19 nt, Human
uauaguagugguccucagg

SEQ ID NO: 910155 - RNA, 21 nt, Human
uaucccccaggucccaauccc

SEQ ID NO: 910156 - RNA, 18 nt, Human
ucaacaccccaauccagc

SEQ ID NO: 910157 - RNA, 19 nt, Human
ucaacaccccaauccagcu

SEQ ID NO: 910158 - RNA, 22 nt, Human
ucaacaccccaauccagcucug

SEQ ID NO: 910159 - RNA, 22 nt, Human
ucaaucccauccugcuucuccc

SEQ ID NO: 910160 - RNA, 23 nt, Human
ucaaucccauccugcuucucccc

SEQ ID NO: 910161 - RNA, 23 nt, Human
ucagaggugcagaguagggccca

SEQ ID NO: 910162 - RNA, 21 nt, Human
ucagcccacgggaccauauac

SEQ ID NO: 910163 - RNA, 21 nt, Human
ucagggggccuucgccgcggc

SEQ ID NO: 910164 - RNA, 24 nt, Human
ucccagugcaucuggccagaccag

SEQ ID NO: 910165 - RNA, 19 nt, Human
uccccagggccccucucug

SEQ ID NO: 910166 - RNA, 19 nt, Human
uccucaucguccgccuccc

SEQ ID NO: 910167 - RNA, 21 nt, Human
ucucucacuggcugcaggaau

SEQ ID NO: 910168 - RNA, 24 nt, Human
ucucugcagagcacugagcugccc

SEQ ID NO: 910169 - RNA, 21 nt, Human
ucugcugggacuccgcagagc

SEQ ID NO: 910170 - RNA, 23 nt, Human
ucugcugggacuccgcagagcca

SEQ ID NO: 910171 - RNA, 23 nt, Human
ugaggccaggucucucacuggcu

SEQ ID NO: 910172 - RNA, 18 nt, Human
ugccaggcugaggccagg

SEQ ID NO: 910173 - RNA, 21 nt, Human
ugccuggaguucagggcaggg

SEQ ID NO: 910174 - RNA, 20 nt, Human
ugcucauuggucaccccugu

SEQ ID NO: 910175 - RNA, 20 nt, Human
ugcugggacuccgcagagcc

SEQ ID NO: 910176 - RNA, 20 nt, Human
uggacccccucccccacccc

SEQ ID NO: 910177 - RNA, 21 nt, Human
ugggaaagacuugccaaggug

SEQ ID NO: 910178 - RNA, 24 nt, Human
ugggaaagacuugccaaggugugg

SEQ ID NO: 910179 - RNA, 23 nt, Human
uggggucucccaagccccagggc

SEQ ID NO: 910180 - RNA, 21 nt, Human
ugucucaccuuccccuuccaa

SEQ ID NO: 910181 - RNA, 22 nt, Human
uuccuggggccccuguaucccc

SEQ ID NO: 910182 - RNA, 18 nt, Human
uuuuuuuuuuuuuuuuug

SEQ ID NO: 910183 - RNA, 20 nt, Human
uuuuuuuuuuuuuuuuuggu

SEQ ID NO: 910184 - RNA, 22 nt, Human
uuuuuuuuuuuuuuuuugguag

SEQ ID NO: 910185 - RNA, 25 nt, Human
aaaaaucucuuuacauauagcacac

SEQ ID NO: 910186 - RNA, 22 nt, Human
aaagcuucuuugagcaaaaagu

SEQ ID NO: 910187 - RNA, 20 nt, Human
aagccacaccaucuccuuug

SEQ ID NO: 910188 - RNA, 23 nt, Human
acacacacacacacacacacaca

SEQ ID NO: 910189 - RNA, 23 nt, Human
acacacacacacacacacacaca

SEQ ID NO: 910190 - RNA, 23 nt, Human
acacacacacacacacacacaca

SEQ ID NO: 910191 - RNA, 23 nt, Human
acacacacacacacacacacaca

SEQ ID NO: 910192 - RNA, 23 nt, Human
acacacacacacacacacacaca

SEQ ID NO: 910193 - RNA, 23 nt, Human
acacacacacacacacacacaca

SEQ ID NO: 910194 - RNA, 23 nt, Human
acacacacacacacacacacaca

SEQ ID NO: 910195 - RNA, 22 nt, Human
acacacacacacacacacacag

SEQ ID NO: 910196 - RNA, 23 nt, Human
agaagcugguguugcaaugugaa

SEQ ID NO: 910197 - RNA, 25 nt, Human
agcuuauauacacacacacauauag

SEQ ID NO: 910198 - RNA, 23 nt, Human
aggauguaucagaauucaaauaa

SEQ ID NO: 910199 - RNA, 21 nt, Human
aguaauguaauaccaaacacg

SEQ ID NO: 910200 - RNA, 22 nt, Human
auacauucauuaggcaaguaga

SEQ ID NO: 910201 - RNA, 18 nt, Human
auagagcuccuucaagug

SEQ ID NO: 910202 - RNA, 23 nt, Human
auuugcccaucucaaauuucuac

SEQ ID NO: 910203 - RNA, 19 nt, Human
caaaaugcaauagccauuu

SEQ ID NO: 910204 - RNA, 23 nt, Human
caaguggugcauagcaguaaugu

SEQ ID NO: 910205 - RNA, 21 nt, Human
cacaagcgaccccucucaaac

SEQ ID NO: 910206 - RNA, 22 nt, Human
cacacaagcgaccccucucaaa

SEQ ID NO: 910207 - RNA, 20 nt, Human
cacacacacacacacacaca

SEQ ID NO: 910208 - RNA, 20 nt, Human
cacacacacacacacacaca

SEQ ID NO: 910209 - RNA, 20 nt, Human
cacacacacacacacacaca

SEQ ID NO: 910210 - RNA, 20 nt, Human
cacacacacacacacacaca

SEQ ID NO: 910211 - RNA, 20 nt, Human
cacacacacacacacacaca

SEQ ID NO: 910212 - RNA, 20 nt, Human
cacacacacacacacacaca

SEQ ID NO: 910213 - RNA, 20 nt, Human
cacacacacacacacacaca

SEQ ID NO: 910214 - RNA, 20 nt, Human
cacacacacacacacacaca

SEQ ID NO: 910215 - RNA, 20 nt, Human
cacacacacacacacacaca

SEQ ID NO: 910216 - RNA, 20 nt, Human
cacacacacacacacacaca

SEQ ID NO: 910217 - RNA, 20 nt, Human
cacacacacacacacacaca

SEQ ID NO: 910218 - RNA, 20 nt, Human
cacacacacacacacacaca

SEQ ID NO: 910219 - RNA, 20 nt, Human
cacacacacacacacacaca

SEQ ID NO: 910220 - RNA, 22 nt, Human
cacacacacacacacacacaca

SEQ ID NO: 910221 - RNA, 22 nt, Human
cacacacacacacacacacaca

SEQ ID NO: 910222 - RNA, 22 nt, Human
cacacacacacacacacacaca

SEQ ID NO: 910223 - RNA, 22 nt, Human
cacacacacacacacacacaca

SEQ ID NO: 910224 - RNA, 22 nt, Human
cacacacacacacacacacaca

SEQ ID NO: 910225 - RNA, 22 nt, Human
cacacacacacacacacacaca

SEQ ID NO: 910226 - RNA, 22 nt, Human
cacacacacacacacacacaca

SEQ ID NO: 910227 - RNA, 26 nt, Human
cacacacacacacacacacacacaca

SEQ ID NO: 910228 - RNA, 26 nt, Human
cacacacacacacacacacacacaca

SEQ ID NO: 910229 - RNA, 26 nt, Human
cacacacacacacacacacacacaca

SEQ ID NO: 910230 - RNA, 26 nt, Human
cacacacacacacacacacacacaca

SEQ ID NO: 910231 - RNA, 26 nt, Human
cacacacacacacacacacacacaca

SEQ ID NO: 910232 - RNA, 26 nt, Human
cacacacacacacacacacacacaca

SEQ ID NO: 910233 - RNA, 28 nt, Human
cacacacacacacacacacacacagugg

SEQ ID NO: 910234 - RNA, 28 nt, Human
cacacacacacacacacacaguguuggc

SEQ ID NO: 910235 - RNA, 21 nt, Human
cagcucuuagguguuuaggua

SEQ ID NO: 910236 - RNA, 22 nt, Human
caguguuggcaggauguaucag

SEQ ID NO: 910237 - RNA, 20 nt, Human
cccucaguacuaagagcaaa

SEQ ID NO: 910238 - RNA, 23 nt, Human
cccuccuuaaaaaauccuuagaa

SEQ ID NO: 910239 - RNA, 22 nt, Human
ccucccaaagacacuccagagu

SEQ ID NO: 910240 - RNA, 20 nt, Human
ccugaaguacaauuucccaa

SEQ ID NO: 910241 - RNA, 21 nt, Human
cgaccccucucaaaccauccc

SEQ ID NO: 910242 - RNA, 22 nt, Human
cuccagagugaacuuccuucug

SEQ ID NO: 910243 - RNA, 31 nt, Human
cucuuucacacacacacacacacacacacag

SEQ ID NO: 910244 - RNA, 23 nt, Human
cugcacuguuuccuugcuaagcc

SEQ ID NO: 910245 - RNA, 21 nt, Human
gagucuuugacaagucaaucu

SEQ ID NO: 910246 - RNA, 22 nt, Human
guaauaccaaacacguggcccu

SEQ ID NO: 910247 - RNA, 25 nt, Human
guggagccagcaaucguggccuuca

SEQ ID NO: 910248 - RNA, 21 nt, Human
guggccuucaguguguaugug

SEQ ID NO: 910249 - RNA, 24 nt, Human
uaaagaaugccaucccccuuaaau

SEQ ID NO: 910250 - RNA, 20 nt, Human
uaaauggugauuugaucuua

SEQ ID NO: 910251 - RNA, 19 nt, Human
uaagccacaccaucuccuu

SEQ ID NO: 910252 - RNA, 23 nt, Human
uacacacaaaaugcgaagaaucc

SEQ ID NO: 910253 - RNA, 19 nt, Human
uagccauuugcccaucuca

SEQ ID NO: 910254 - RNA, 21 nt, Human
uagccugccucccaaagacac

SEQ ID NO: 910255 - RNA, 25 nt, Human
uauagcacacacaugcacacaagcg

SEQ ID NO: 910256 - RNA, 22 nt, Human
uauauacacacacacauauaua

SEQ ID NO: 910257 - RNA, 23 nt, Human
uaugugugugcgugcaugggugu

SEQ ID NO: 910258 - RNA, 23 nt, Human
uauuauaucacagugaccacuau

SEQ ID NO: 910259 - RNA, 21 nt, Human
ucagucauuugcuacagcuau

SEQ ID NO: 910260 - RNA, 24 nt, Human
ucccucaguacuaagagcaaaagc

SEQ ID NO: 910261 - RNA, 19 nt, Human
ugagugacauccauacuca

SEQ ID NO: 910262 - RNA, 18 nt, Human
ugagugcccuccaccagc

SEQ ID NO: 910263 - RNA, 18 nt, Human
ugccucagucuucggguu

SEQ ID NO: 910264 - RNA, 28 nt, Human
ugcucuggaacuuucaucccucaacugu

SEQ ID NO: 910265 - RNA, 21 nt, Human
uggcaggauguaucagaauuc

SEQ ID NO: 910266 - RNA, 18 nt, Human
uggccuucaguguguaug

SEQ ID NO: 910267 - RNA, 19 nt, Human
uguaugugugugcgugcau

SEQ ID NO: 910268 - RNA, 20 nt, Human
ugugugcgugcaugggugug

SEQ ID NO: 910269 - RNA, 21 nt, Human
uguuuguucacauguauucag

SEQ ID NO: 910270 - RNA, 21 nt, Human
uguuuguucacauguauucag

SEQ ID NO: 910271 - RNA, 25 nt, Human
uuauauacacacacacauauauauu

SEQ ID NO: 910272 - RNA, 24 nt, Human
uuauuauaucacagugaccacuau

SEQ ID NO: 910273 - RNA, 20 nt, Human
uucacacacacacacacaca

SEQ ID NO: 910274 - RNA, 21 nt, Human
uucacacacacacacacacac

SEQ ID NO: 910275 - RNA, 27 nt, Human
uucucuggcaucauuuagaauucuaag

SEQ ID NO: 910276 - RNA, 20 nt, Human
uucugucucucuuucacaca

SEQ ID NO: 910277 - RNA, 18 nt, Human
uuuguucacauguauuca

SEQ ID NO: 910278 - RNA, 20 nt, Human
aaaagcccaaggggaauguu

SEQ ID NO: 910279 - RNA, 21 nt, Human
aaaugacuugcaauaccagga

SEQ ID NO: 910280 - RNA, 24 nt, Human
aagauaggacgacaaaaugggaca

SEQ ID NO: 910281 - RNA, 26 nt, Human
aagcaaaaggaaaaguggagggaccc

SEQ ID NO: 910282 - RNA, 20 nt, Human
aagcugcuggggcuguugag

SEQ ID NO: 910283 - RNA, 21 nt, Human
acaacuucaaacuccagaaaa

SEQ ID NO: 910284 - RNA, 24 nt, Human
acacaagcacauucuaucaaaacu

SEQ ID NO: 910285 - RNA, 18 nt, Human
accagagccgucagcccc

SEQ ID NO: 910286 - RNA, 18 nt, Human
acccaacagggucaggug

SEQ ID NO: 910287 - RNA, 21 nt, Human
acgacaaaaugggacaagaua

SEQ ID NO: 910288 - RNA, 22 nt, Human
acuuggaggaaugaggcccaga

SEQ ID NO: 910289 - RNA, 19 nt, Human
agaaaggcuuucugccuuu

SEQ ID NO: 910290 - RNA, 19 nt, Human
agacaacuacucauguccc

SEQ ID NO: 910291 - RNA, 22 nt, Human
agaccauaucaaucagaaacuu

SEQ ID NO: 910292 - RNA, 20 nt, Human
agauaggacgacaaaauggg

SEQ ID NO: 910293 - RNA, 22 nt, Human
agcagauagguagcugcacaaa

SEQ ID NO: 910294 - RNA, 18 nt, Human
agcauggcacagcccagu

SEQ ID NO: 910295 - RNA, 21 nt, Human
aggaaaggugauggaaagaaa

SEQ ID NO: 910296 - RNA, 23 nt, Human
aggggcgcgccccugccccgcgc

SEQ ID NO: 910297 - RNA, 18 nt, Human
auaaaucuguaucauaca

SEQ ID NO: 910298 - RNA, 25 nt, Human
auagcaacauaaauaaaucuguauc

SEQ ID NO: 910299 - RNA, 23 nt, Human
auccugcaggucccucucucuca

SEQ ID NO: 910300 - RNA, 21 nt, Human
augccacuuaaaaaugagcac

SEQ ID NO: 910301 - RNA, 22 nt, Human
auggggucuggucagauucucc

SEQ ID NO: 910302 - RNA, 22 nt, Human
caaaaggaaaaguggagcucau

SEQ ID NO: 910303 - RNA, 25 nt, Human
caaagaaacuguugagaauaugacg

SEQ ID NO: 910304 - RNA, 22 nt, Human
caaaucccaaaagauuugagga

SEQ ID NO: 910305 - RNA, 21 nt, Human
caacauaaauaaaucuguauc

SEQ ID NO: 910306 - RNA, 18 nt, Human
caacuucaaacuccagaa

SEQ ID NO: 910307 - RNA, 21 nt, Human
caagaaagcuauuacuggaaa

SEQ ID NO: 910308 - RNA, 20 nt, Human
caagauccucaaugaaauca

SEQ ID NO: 910309 - RNA, 24 nt, Human
caagauccucaaugaaaucagaga

SEQ ID NO: 910310 - RNA, 21 nt, Human
caauaccaggaguacuucaga

SEQ ID NO: 910311 - RNA, 22 nt, Human
cacaguccauuuaggagaugag

SEQ ID NO: 910312 - RNA, 23 nt, Human
caccaagauuccuccuacccaaa

SEQ ID NO: 910313 - RNA, 18 nt, Human
cacugagucaccaugacc

SEQ ID NO: 910314 - RNA, 18 nt, Human
cacugagucaccaugacc

SEQ ID NO: 910315 - RNA, 19 nt, Human
cacuuaaaaaugagcacag

SEQ ID NO: 910316 - RNA, 24 nt, Human
cacuuucuccuuaagaaucauagg

SEQ ID NO: 910317 - RNA, 26 nt, Human
cagaaacuuucuucauaucugugucu

SEQ ID NO: 910318 - RNA, 26 nt, Human
cagaaucaggguccuauauucacuga

SEQ ID NO: 910319 - RNA, 19 nt, Human
cagcaauaggaccacgugc

SEQ ID NO: 910320 - RNA, 21 nt, Human
cagccccgccccucgggcagg

SEQ ID NO: 910321 - RNA, 19 nt, Human
cagcgcgacccucgcccca

SEQ ID NO: 910322 - RNA, 20 nt, Human
caggagaagcuguucaagca

SEQ ID NO: 910323 - RNA, 24 nt, Human
caggaguacuucagaccauaucaa

SEQ ID NO: 910324 - RNA, 18 nt, Human
caggcagacccagaaagc

SEQ ID NO: 910325 - RNA, 23 nt, Human
cagguccuccgcccugccaccuc

SEQ ID NO: 910326 - RNA, 21 nt, Human
ccaagauccucaaugaaauca

SEQ ID NO: 910327 - RNA, 23 nt, Human
ccaccaggauacaacucugacuc

SEQ ID NO: 910328 - RNA, 29 nt, Human
ccaccuccccgagcagcccuucgaugacu

SEQ ID NO: 910329 - RNA, 21 nt, Human
ccacucugcaggggcgcgccc

SEQ ID NO: 910330 - RNA, 22 nt, Human
cccaaauccgguugcacaccug

SEQ ID NO: 910331 - RNA, 19 nt, Human
cccaagagauucuuccauc

SEQ ID NO: 910332 - RNA, 18 nt, Human
ccccaagaaagcuauuac

SEQ ID NO: 910333 - RNA, 21 nt, Human
ccccaagugccaaaucccaaa

SEQ ID NO: 910334 - RNA, 22 nt, Human
ccccgccccucgggcagggggc

SEQ ID NO: 910335 - RNA, 18 nt, Human
ccccgcgcgccgacuccg

SEQ ID NO: 910336 - RNA, 18 nt, Human
ccccgcgcgccgacuccg

SEQ ID NO: 910337 - RNA, 21 nt, Human
ccccucgggcagggggcgggc

SEQ ID NO: 910338 - RNA, 19 nt, Human
cccgccccucgggcagggg

SEQ ID NO: 910339 - RNA, 20 nt, Human
cccugucuucuguggugcgu

SEQ ID NO: 910340 - RNA, 25 nt, Human
ccgagcagcccuucgaugacucccu

SEQ ID NO: 910341 - RNA, 20 nt, Human
ccgccgcguccucaacgucc

SEQ ID NO: 910342 - RNA, 20 nt, Human
ccgccgcguccucaacgucc

SEQ ID NO: 910343 - RNA, 23 nt, Human
ccgccgcguccucaacguccucc

SEQ ID NO: 910344 - RNA, 21 nt, Human
ccuacaauugagaauuagagc

SEQ ID NO: 910345 - RNA, 22 nt, Human
ccucucccaugccacuuaaaaa

SEQ ID NO: 910346 - RNA, 19 nt, Human
ccugccaugucucucccca

SEQ ID NO: 910347 - RNA, 24 nt, Human
ccuuuuagcagacugggcucccgg

SEQ ID NO: 910348 - RNA, 20 nt, Human
cgagguagccagcgcgaccc

SEQ ID NO: 910349 - RNA, 22 nt, Human
cgggccacagccagccgcuuuc

SEQ ID NO: 910350 - RNA, 22 nt, Human
cggucagcgggcuuccggcucu

SEQ ID NO: 910351 - RNA, 20 nt, Human
cuaagcaucucuccuaugcc

SEQ ID NO: 910352 - RNA, 22 nt, Human
cuacagugcagaccaaaacccc

SEQ ID NO: 910353 - RNA, 19 nt, Human
cuacccaaagcugaagaua

SEQ ID NO: 910354 - RNA, 24 nt, Human
cuauuacuggaaaguccagcugcu

SEQ ID NO: 910355 - RNA, 18 nt, Human
cuccgcccugccaccucc

SEQ ID NO: 910356 - RNA, 26 nt, Human
cucuaugcaagaauuucaacagaauu

SEQ ID NO: 910357 - RNA, 25 nt, Human
cucuugcuaguucccaagcugcugg

SEQ ID NO: 910358 - RNA, 25 nt, Human
cugaagauauauuuucaaggaaagg

SEQ ID NO: 910359 - RNA, 19 nt, Human
cugucacccacccugucca

SEQ ID NO: 910360 - RNA, 24 nt, Human
cuuuuagaaccugccagaggagcu

SEQ ID NO: 910361 - RNA, 25 nt, Human
gaacaacuauuuauuucuuuauaca

SEQ ID NO: 910362 - RNA, 19 nt, Human
gaaccugccagaggagcuc

SEQ ID NO: 910363 - RNA, 20 nt, Human
gaacucaaagaacgcaggug

SEQ ID NO: 910364 - RNA, 18 nt, Human
gacacagacuaggcuuua

SEQ ID NO: 910365 - RNA, 19 nt, Human
gagcaaaugacuugcaaua

SEQ ID NO: 910366 - RNA, 19 nt, Human
gaggacucaggagaagcug

SEQ ID NO: 910367 - RNA, 19 nt, Human
gaggcggcggcggcggcgg

SEQ ID NO: 910368 - RNA, 20 nt, Human
gaggcggcggcggcggcggc

SEQ ID NO: 910369 - RNA, 24 nt, Human
gagggaaauacaaaugcccuaaug

SEQ ID NO: 910370 - RNA, 22 nt, Human
gagucacaacuucaaacuccag

SEQ ID NO: 910371 - RNA, 20 nt, Human
gagucaccaugaccucagug

SEQ ID NO: 910372 - RNA, 23 nt, Human
gauagcaacauaaauaaaucugu

SEQ ID NO: 910373 - RNA, 19 nt, Human
gcagacccagaaagccuca

SEQ ID NO: 910374 - RNA, 20 nt, Human
gcagcagcggccggccgcgc

SEQ ID NO: 910375 - RNA, 18 nt, Human
gcaggggcgcgccccugc

SEQ ID NO: 910376 - RNA, 20 nt, Human
gccaaguggaccuuggcuaa

SEQ ID NO: 910377 - RNA, 21 nt, Human
gccgccgcguccucaacgucc

SEQ ID NO: 910378 - RNA, 22 nt, Human
gcuaagaccucaccugaaaguc

SEQ ID NO: 910379 - RNA, 25 nt, Human
gcuacagugcagaccaaaacccagu

SEQ ID NO: 910380 - RNA, 19 nt, Human
gcuacugggugaccacucc

SEQ ID NO: 910381 - RNA, 20 nt, Human
gcucacugagcccccacgag

SEQ ID NO: 910382 - RNA, 23 nt, Human
gcugcuccguagugugcuuuuag

SEQ ID NO: 910383 - RNA, 21 nt, Human
gcugggccaaguggaccuugg

SEQ ID NO: 910384 - RNA, 19 nt, Human
ggagcuccagcaauaggac

SEQ ID NO: 910385 - RNA, 21 nt, Human
ggagcuguaguccggucagcg

SEQ ID NO: 910386 - RNA, 20 nt, Human
ggaugcugagugacagaggc

SEQ ID NO: 910387 - RNA, 23 nt, Human
ggcacagcccaguggggucccca

SEQ ID NO: 910388 - RNA, 18 nt, Human
ggcggcggcggcggcggc

SEQ ID NO: 910389 - RNA, 23 nt, Human
ggcggcggcggcggcggcuacug

SEQ ID NO: 910390 - RNA, 23 nt, Human
ggcuacugggugaccacuccauc

SEQ ID NO: 910391 - RNA, 19 nt, Human
gggucuggucagauucucc

SEQ ID NO: 910392 - RNA, 21 nt, Human
ggucagcgggcuuccggcucu

SEQ ID NO: 910393 - RNA, 18 nt, Human
gucaccaugaccucagug

SEQ ID NO: 910394 - RNA, 18 nt, Human
guccuccccuuuuagcag

SEQ ID NO: 910395 - RNA, 23 nt, Human
guggcugcgcuucuugcaugguu

SEQ ID NO: 910396 - RNA, 22 nt, Human
uaacaaucaccaaaaaggcuuu

SEQ ID NO: 910397 - RNA, 20 nt, Human
uaagaggaugcugagugaca

SEQ ID NO: 910398 - RNA, 20 nt, Human
uacaccaagauuccuccuac

SEQ ID NO: 910399 - RNA, 23 nt, Human
uacaggaaagaaggcugaagaag

SEQ ID NO: 910400 - RNA, 18 nt, Human
uacagugcagaccaaaac

SEQ ID NO: 910401 - RNA, 23 nt, Human
uaggcuacaggaaagaaggcuga

SEQ ID NO: 910402 - RNA, 23 nt, Human
uauaaccaucagugaccagccaa

SEQ ID NO: 910403 - RNA, 21 nt, Human
uauaauuacacuaagcaucuc

SEQ ID NO: 910404 - RNA, 26 nt, Human
uaugcagaagacauacaggcagaccc

SEQ ID NO: 910405 - RNA, 21 nt, Human
ucaagcaaaaggaaaagugga

SEQ ID NO: 910406 - RNA, 22 nt, Human
ucacaacuucaaacuccagaaa

SEQ ID NO: 910407 - RNA, 20 nt, Human
uccagaaaagaugaaguaaa

SEQ ID NO: 910408 - RNA, 21 nt, Human
uccaguguaggcugaccuucu

SEQ ID NO: 910409 - RNA, 19 nt, Human
uccaugcuaggcuacagga

SEQ ID NO: 910410 - RNA, 28 nt, Human
ucccagacaacuacucauguccccaagu

SEQ ID NO: 910411 - RNA, 24 nt, Human
uccccaauuuccccgagguaagau

SEQ ID NO: 910412 - RNA, 18 nt, Human
uccccacucugcaggggc

SEQ ID NO: 910413 - RNA, 22 nt, Human
uccccgagcagcccuucgauga

SEQ ID NO: 910414 - RNA, 19 nt, Human
uccccgagguaagauagga

SEQ ID NO: 910415 - RNA, 22 nt, Human
ucccgaggcggcggcggcggcg

SEQ ID NO: 910416 - RNA, 18 nt, Human
ucgccccaaauccgguug

SEQ ID NO: 910417 - RNA, 27 nt, Human
ucucccgccagccgccgcguccucaac

SEQ ID NO: 910418 - RNA, 19 nt, Human
ucucuccccagcugucucu

SEQ ID NO: 910419 - RNA, 25 nt, Human
ucucugaaguccagauuauucacuc

SEQ ID NO: 910420 - RNA, 19 nt, Human
ucugaaguccagauuauuc

SEQ ID NO: 910421 - RNA, 20 nt, Human
ucugcuaagaccucaccuga

SEQ ID NO: 910422 - RNA, 23 nt, Human
ugaagaagcaaauuuacaaauca

SEQ ID NO: 910423 - RNA, 18 nt, Human
ugaaguaccaucugcuga

SEQ ID NO: 910424 - RNA, 24 nt, Human
ugaagugaggucaguccaauuugg

SEQ ID NO: 910425 - RNA, 21 nt, Human
ugaaguuaauccugucccaca

SEQ ID NO: 910426 - RNA, 18 nt, Human
ugaccagccaaccuccca

SEQ ID NO: 910427 - RNA, 23 nt, Human
ugacucccucuucuggacccucc

SEQ ID NO: 910428 - RNA, 22 nt, Human
ugacuuaaucucugaaguccag

SEQ ID NO: 910429 - RNA, 24 nt, Human
ugaggcccagaugcuccucagaac

SEQ ID NO: 910430 - RNA, 18 nt, Human
ugagggaaauacaaaugc

SEQ ID NO: 910431 - RNA, 22 nt, Human
ugaguagugcucacugagcccc

SEQ ID NO: 910432 - RNA, 22 nt, Human
ugcagaagacauacaggcagac

SEQ ID NO: 910433 - RNA, 23 nt, Human
ugccacuuaaaaaugagcacagg

SEQ ID NO: 910434 - RNA, 26 nt, Human
ugccacuuaaaaaugagcacagguuu

SEQ ID NO: 910435 - RNA, 19 nt, Human
uggaagcauuccaaucuuc

SEQ ID NO: 910436 - RNA, 25 nt, Human
uggaagcauuccaaucuucuuggag

SEQ ID NO: 910437 - RNA, 21 nt, Human
uggcaagcuucccgaggcggc

SEQ ID NO: 910438 - RNA, 24 nt, Human
uggcacagcccaguggggucccca

SEQ ID NO: 910439 - RNA, 19 nt, Human
uggcauggacaaaguggag

SEQ ID NO: 910440 - RNA, 19 nt, Human
ugggcucccggagcagcag

SEQ ID NO: 910441 - RNA, 21 nt, Human
ugggguccccacucugcaggg

SEQ ID NO: 910442 - RNA, 25 nt, Human
ugguagcaggagagucacaacuuca

SEQ ID NO: 910443 - RNA, 22 nt, Human
uggucuggccaucaguccccaa

SEQ ID NO: 910444 - RNA, 22 nt, Human
uguaaaaaguucauuccagugu

SEQ ID NO: 910445 - RNA, 23 nt, Human
uguaucauacaucuauacacaca

SEQ ID NO: 910446 - RNA, 25 nt, Human
ugugaacucaaagaacgcaggugcu

SEQ ID NO: 910447 - RNA, 19 nt, Human
uuaaagucacaaccaucgg

SEQ ID NO: 910448 - RNA, 24 nt, Human
uuaaucucugaaguccagauuauu

SEQ ID NO: 910449 - RNA, 22 nt, Human
uucaaacuccagaaaagaugaa

SEQ ID NO: 910450 - RNA, 19 nt, Human
uucaagcaaaaggaaaagu

SEQ ID NO: 910451 - RNA, 24 nt, Human
uucuuuauacacauuuugcuuuaa

SEQ ID NO: 910452 - RNA, 23 nt, Human
uuuauacacauuuugcuuuaaca

SEQ ID NO: 910453 - RNA, 22 nt, Human
aaaaaaaaaagaaaaaaaagga

SEQ ID NO: 910454 - RNA, 20 nt, Human
aaaaaaaagaaaaaaaagga

SEQ ID NO: 910455 - RNA, 25 nt, Human
aaaaaaagaaaaaaaaggaaaagaa

SEQ ID NO: 910456 - RNA, 24 nt, Human
aaaaaagaaaaaaaaggaaaagaa

SEQ ID NO: 910457 - RNA, 28 nt, Human
aaaaaagaaaaaaaaggaaaagaaauaa

SEQ ID NO: 910458 - RNA, 23 nt, Human
aaaaagaaaaaaaaggaaaagaa

SEQ ID NO: 910459 - RNA, 20 nt, Human
aaaaagaaaaaaaaggaagg

SEQ ID NO: 910460 - RNA, 20 nt, Human
aagaaacacaaaagcacaca

SEQ ID NO: 910461 - RNA, 30 nt, Human
aagaaauaaagaaacacaaaagcacacaaa

SEQ ID NO: 910462 - RNA, 23 nt, Human
aagugcugggacagagccgagcc

SEQ ID NO: 910463 - RNA, 25 nt, Human
acaaaaaaaaaaaaaagaaaaaaaa

SEQ ID NO: 910464 - RNA, 23 nt, Human
acucagaaaguggcugggcugcu

SEQ ID NO: 910465 - RNA, 18 nt, Human
agaaagaaggaagguaga

SEQ ID NO: 910466 - RNA, 24 nt, Human
agcacacaaggagaucgagaaaga

SEQ ID NO: 910467 - RNA, 20 nt, Human
aggaagguagaaagagagac

SEQ ID NO: 910468 - RNA, 18 nt, Human
agggagagccugcccgug

SEQ ID NO: 910469 - RNA, 22 nt, Human
agggagagccugcccgugggau

SEQ ID NO: 910470 - RNA, 21 nt, Human
auaaagaaacacaaaagcaca

SEQ ID NO: 910471 - RNA, 24 nt, Human
caaaagcacacaaggagaucgaga

SEQ ID NO: 910472 - RNA, 22 nt, Human
caccacuuuucucccagacaag

SEQ ID NO: 910473 - RNA, 19 nt, Human
cacgcugcuucugcccucu

SEQ ID NO: 910474 - RNA, 21 nt, Human
cacucagaaaguggcugggcu

SEQ ID NO: 910475 - RNA, 21 nt, Human
cagaauccagcaacuucaucc

SEQ ID NO: 910476 - RNA, 18 nt, Human
ccaaagagccccaggaca

SEQ ID NO: 910477 - RNA, 20 nt, Human
cccacguuacugaauggagu

SEQ ID NO: 910478 - RNA, 21 nt, Human
cugaggugacaaauggcuucu

SEQ ID NO: 910479 - RNA, 20 nt, Human
gagagccugcccgugggauc

SEQ ID NO: 910480 - RNA, 19 nt, Human
gaguugcucauuucggcag

SEQ ID NO: 910481 - RNA, 20 nt, Human
gaguugcucauuucggcagc

SEQ ID NO: 910482 - RNA, 20 nt, Human
ggaguugcucauuucggcag

SEQ ID NO: 910483 - RNA, 25 nt, Human
gggccccuccacgcugcuucugccc

SEQ ID NO: 910484 - RNA, 19 nt, Human
gguaagugggaggaagaug

SEQ ID NO: 910485 - RNA, 18 nt, Human
guacauuugcgaaaagga

SEQ ID NO: 910486 - RNA, 18 nt, Human
uaaagaaacacaaaagca

SEQ ID NO: 910487 - RNA, 27 nt, Human
uaaguaacaaaaaaaaaaaaaagaaaa

SEQ ID NO: 910488 - RNA, 30 nt, Human
uaauuaaguaacaaaaaaaaaaaaaagaaa

SEQ ID NO: 910489 - RNA, 19 nt, Human
uacauuugcgaaaaggagg

SEQ ID NO: 910490 - RNA, 25 nt, Human
ucccagacaagugcugggacagagc

SEQ ID NO: 910491 - RNA, 18 nt, Human
ucucugagcggugcugcu

SEQ ID NO: 910492 - RNA, 19 nt, Human
ugaagacuugugcugcaga

SEQ ID NO: 910493 - RNA, 19 nt, Human
ugccgugaaaucucugagc

SEQ ID NO: 910494 - RNA, 23 nt, Human
uggaguugcucauuucggcagcg

SEQ ID NO: 910495 - RNA, 18 nt, Human
ugggacagagccgagccu

SEQ ID NO: 910496 - RNA, 21 nt, Human
ugggacagagccgagccugcu

SEQ ID NO: 910497 - RNA, 22 nt, Human
ugggacagagccgagccugcug

SEQ ID NO: 910498 - RNA, 24 nt, Human
ugggaggaagauggcguuccaaag

SEQ ID NO: 910499 - RNA, 24 nt, Human
ugggaucagcucccacguuaccuc

SEQ ID NO: 910500 - RNA, 27 nt, Human
uuaaccauaguggcaguucugugaccu

SEQ ID NO: 910501 - RNA, 21 nt, Human
aaaugaccgaaggaacaaagc

SEQ ID NO: 910502 - RNA, 18 nt, Human
aagcaucaaacaugucug

SEQ ID NO: 910503 - RNA, 21 nt, Human
aagcgagcaaacauuuugaga

SEQ ID NO: 910504 - RNA, 23 nt, Human
agcacagcagugucauuguacaa

SEQ ID NO: 910505 - RNA, 22 nt, Human
agggauuggacacaucagcaca

SEQ ID NO: 910506 - RNA, 20 nt, Human
aggguccgguucucuggagu

SEQ ID NO: 910507 - RNA, 19 nt, Human
augcugcagguauuucugu

SEQ ID NO: 910508 - RNA, 19 nt, Human
auuucguccaguccuuucc

SEQ ID NO: 910509 - RNA, 26 nt, Human
caaagcgagcaaacauuuugagacca

SEQ ID NO: 910510 - RNA, 23 nt, Human
cacagcagugucauuguacaaaa

SEQ ID NO: 910511 - RNA, 20 nt, Human
cagauuccaaagcgagcaaa

SEQ ID NO: 910512 - RNA, 22 nt, Human
cagcccacucgaugcaguacug

SEQ ID NO: 910513 - RNA, 19 nt, Human
caggaaggaguugguucuc

SEQ ID NO: 910514 - RNA, 21 nt, Human
cagguaagcccugcugcuucu

SEQ ID NO: 910515 - RNA, 25 nt, Human
cauuuucuucuaguguugccaaggg

SEQ ID NO: 910516 - RNA, 19 nt, Human
ccgcagcuucauuucgucc

SEQ ID NO: 910517 - RNA, 19 nt, Human
ccggcgccuccgggccgcc

SEQ ID NO: 910518 - RNA, 20 nt, Human
ccuuggagagaaaauaggca

SEQ ID NO: 910519 - RNA, 24 nt, Human
cgagcaaacauuuugagaccaaga

SEQ ID NO: 910520 - RNA, 20 nt, Human
gaacaaagcuucagggcucu

SEQ ID NO: 910521 - RNA, 18 nt, Human
gacacgcuggcggguagc

SEQ ID NO: 910522 - RNA, 22 nt, Human
gagcaaacauuuugagaccaag

SEQ ID NO: 910523 - RNA, 18 nt, Human
gaguugguucucccaggg

SEQ ID NO: 910524 - RNA, 24 nt, Human
ggguggugucucccacuauucagg

SEQ ID NO: 910525 - RNA, 19 nt, Human
gucaaacacuggcaucacc

SEQ ID NO: 910526 - RNA, 19 nt, Human
gugucaucgccgccugggc

SEQ ID NO: 910527 - RNA, 20 nt, Human
guuuuuaucaguuuccccau

SEQ ID NO: 910528 - RNA, 22 nt, Human
uaagaccaugucgauaaucccc

SEQ ID NO: 910529 - RNA, 20 nt, Human
ucaaaaauaucaaaguccca

SEQ ID NO: 910530 - RNA, 19 nt, Human
ucaaugaaagagauuuggg

SEQ ID NO: 910531 - RNA, 19 nt, Human
uccaguggucagcuggaag

SEQ ID NO: 910532 - RNA, 22 nt, Human
ucccaagcaucaaacaugucug

SEQ ID NO: 910533 - RNA, 21 nt, Human
uccgauaaucauuccucucca

SEQ ID NO: 910534 - RNA, 21 nt, Human
uccugguuuuuaucaguuucc

SEQ ID NO: 910535 - RNA, 20 nt, Human
uccuuggagagaaaauaggc

SEQ ID NO: 910536 - RNA, 25 nt, Human
uccuuggagagaaaauaggcagugg

SEQ ID NO: 910537 - RNA, 18 nt, Human
ucgccgccugggcgggcg

SEQ ID NO: 910538 - RNA, 19 nt, Human
ucuaaaguuuccuuuaucc

SEQ ID NO: 910539 - RNA, 21 nt, Human
ucuccaguggucagcuggaag

SEQ ID NO: 910540 - RNA, 18 nt, Human
ucuuagcguugacucgga

SEQ ID NO: 910541 - RNA, 25 nt, Human
ugaaaggaccaaggagcucuggcug

SEQ ID NO: 910542 - RNA, 18 nt, Human
ugaagcacaucagcagaa

SEQ ID NO: 910543 - RNA, 24 nt, Human
ugaccgaaggaacaaagcuucagg

SEQ ID NO: 910544 - RNA, 21 nt, Human
ugagaaaaauauucuuccgaa

SEQ ID NO: 910545 - RNA, 18 nt, Human
ugcgaugagugcagcgac

SEQ ID NO: 910546 - RNA, 21 nt, Human
uggcggcggcgccgcggacac

SEQ ID NO: 910547 - RNA, 20 nt, Human
ugggauuuggggaugcugca

SEQ ID NO: 910548 - RNA, 19 nt, Human
uguaagaauucacagauuc

SEQ ID NO: 910549 - RNA, 20 nt, Human
uuggaggaaugauaauuggc

SEQ ID NO: 910550 - RNA, 22 nt, Human
aacagucaagcuaaacagcaau

SEQ ID NO: 910551 - RNA, 20 nt, Human
aaccauguagccauagaggc

SEQ ID NO: 910552 - RNA, 19 nt, Human
aagaaaagcuuguccaagg

SEQ ID NO: 910553 - RNA, 18 nt, Human
aagaggccgggcaggggu

SEQ ID NO: 910554 - RNA, 23 nt, Human
aaugauucaaggucaaauauuaa

SEQ ID NO: 910555 - RNA, 18 nt, Human
agucaagcuaaacagcaa

SEQ ID NO: 910556 - RNA, 23 nt, Human
auggcuuuuauauaauacuuggu

SEQ ID NO: 910557 - RNA, 22 nt, Human
caagaggcccccucuguggcuu

SEQ ID NO: 910558 - RNA, 18 nt, Human
cacaggcaccaaggcuuu

SEQ ID NO: 910559 - RNA, 20 nt, Human
cacuuuuucccucaucaugg

SEQ ID NO: 910560 - RNA, 19 nt, Human
ccccaaaaaugaaaugccu

SEQ ID NO: 910561 - RNA, 22 nt, Human
ccccacuuucggucugcgcccg

SEQ ID NO: 910562 - RNA, 19 nt, Human
cccgaugcgcaccuccgca

SEQ ID NO: 910563 - RNA, 27 nt, Human
ccggcaguagaucacgccgcucuucuu

SEQ ID NO: 910564 - RNA, 21 nt, Human
ccuccgcagaagacaccugcu

SEQ ID NO: 910565 - RNA, 18 nt, Human
ccucugugagccagaaau

SEQ ID NO: 910566 - RNA, 19 nt, Human
ccugcuaguuacagugaac

SEQ ID NO: 910567 - RNA, 26 nt, Human
cggcucggggggauggcgucggcggg

SEQ ID NO: 910568 - RNA, 22 nt, Human
cgucggcggcgucggucuggac

SEQ ID NO: 910569 - RNA, 21 nt, Human
cuaaacagcaaugaugacuuu

SEQ ID NO: 910570 - RNA, 21 nt, Human
cugguggucgcggcgggggcu

SEQ ID NO: 910571 - RNA, 21 nt, Human
gaagcucauggauuccccaaa

SEQ ID NO: 910572 - RNA, 21 nt, Human
gccaaguauuuguucugucau

SEQ ID NO: 910573 - RNA, 22 nt, Human
gccucugugagccagaaauaaa

SEQ ID NO: 910574 - RNA, 19 nt, Human
gcucggggggauggcgucg

SEQ ID NO: 910575 - RNA, 20 nt, Human
ggcucggggggauggcgucc

SEQ ID NO: 910576 - RNA, 21 nt, Human
ggucuggcggggcgagcugga

SEQ ID NO: 910577 - RNA, 21 nt, Human
uaccaucggccagaagaacca

SEQ ID NO: 910578 - RNA, 27 nt, Human
uaccaucggccagaagaaccauguagc

SEQ ID NO: 910579 - RNA, 24 nt, Human
uagaggcugugaagcuaacuaguu

SEQ ID NO: 910580 - RNA, 23 nt, Human
uagcaggucugagucucggccuc

SEQ ID NO: 910581 - RNA, 20 nt, Human
uagcuccuucaccaauaccu

SEQ ID NO: 910582 - RNA, 20 nt, Human
uagugccucguggcugccuc

SEQ ID NO: 910583 - RNA, 18 nt, Human
uauuuuucuucauggaac

SEQ ID NO: 910584 - RNA, 23 nt, Human
ucggcggcgucggucuggacgaa

SEQ ID NO: 910585 - RNA, 23 nt, Human
ucuguaauuugguccuaguugcu

SEQ ID NO: 910586 - RNA, 19 nt, Human
ugaaaugccacuuuuuccc

SEQ ID NO: 910587 - RNA, 21 nt, Human
ugaaaugccacuuuuucccuc

SEQ ID NO: 910588 - RNA, 20 nt, Human
ugacaaggguacacaggaug

SEQ ID NO: 910589 - RNA, 18 nt, Human
ugaggaaaacagucaagc

SEQ ID NO: 910590 - RNA, 18 nt, Human
ugcccagcucggugcggg

SEQ ID NO: 910591 - RNA, 22 nt, Human
ugcgcaccuccgcagaagacac

SEQ ID NO: 910592 - RNA, 18 nt, Human
ugcgggcccugcggacgc

SEQ ID NO: 910593 - RNA, 21 nt, Human
ugcugauaccagucuagagga

SEQ ID NO: 910594 - RNA, 24 nt, Human
uggacgaagaggccgggcaggggu

SEQ ID NO: 910595 - RNA, 22 nt, Human
uggacucguccgagucccggca

SEQ ID NO: 910596 - RNA, 23 nt, Human
ugggagaugagcucacaggcacc

SEQ ID NO: 910597 - RNA, 21 nt, Human
ugguggucgcggcgggggcug

SEQ ID NO: 910598 - RNA, 18 nt, Human
ugguguagugccucgugg

SEQ ID NO: 910599 - RNA, 21 nt, Human
ugucguuuuuuuuuuuuucuu

SEQ ID NO: 910600 - RNA, 23 nt, Human
uuaucuguaauuugguccuaguu

SEQ ID NO: 910601 - RNA, 24 nt, Human
uucacaguguccuuugucggucaa

SEQ ID NO: 910602 - RNA, 20 nt, Human
uuugccaaguauuuguucug

SEQ ID NO: 910603 - RNA, 19 nt, Human
aaccaggggccagcagggc

SEQ ID NO: 910604 - RNA, 24 nt, Human
aagcaccccugccccauggucccg

SEQ ID NO: 910605 - RNA, 19 nt, Human
agagcagcagagcagacug

SEQ ID NO: 910606 - RNA, 25 nt, Human
agaggcagguguuggggagcagccc

SEQ ID NO: 910607 - RNA, 22 nt, Human
agaggccccugagggcggguuu

SEQ ID NO: 910608 - RNA, 20 nt, Human
agcagcagagcagacugccc

SEQ ID NO: 910609 - RNA, 21 nt, Human
aggcaggagagaggccccuga

SEQ ID NO: 910610 - RNA, 23 nt, Human
aggcagggcaggcaggagagagg

SEQ ID NO: 910611 - RNA, 22 nt, Human
aggcagguguuggggagcagcc

SEQ ID NO: 910612 - RNA, 20 nt, Human
agggccuggcugaggcaggg

SEQ ID NO: 910613 - RNA, 23 nt, Human
aggggagcagcugggccugagga

SEQ ID NO: 910614 - RNA, 20 nt, Human
agggguggcccucugagguc

SEQ ID NO: 910615 - RNA, 21 nt, Human
agggguggcccucugaggucu

SEQ ID NO: 910616 - RNA, 24 nt, Human
agugcaggaaugugcugggaggaa

SEQ ID NO: 910617 - RNA, 27 nt, Human
auggucccgaaggccccagaggaccca

SEQ ID NO: 910618 - RNA, 18 nt, Human
caccccugccccaugguc

SEQ ID NO: 910619 - RNA, 29 nt, Human
cagcagagcagacugcccguuuucccccu

SEQ ID NO: 910620 - RNA, 26 nt, Human
cagcggaaccaggggccagcagggcu

SEQ ID NO: 910621 - RNA, 21 nt, Human
cagguguuggggagcagcccu

SEQ ID NO: 910622 - RNA, 20 nt, Human
cagugccaacuucaggggcc

SEQ ID NO: 910623 - RNA, 20 nt, Human
caguguggacacggcagagu

SEQ ID NO: 910624 - RNA, 18 nt, Human
caucucagggccuggcug

SEQ ID NO: 910625 - RNA, 24 nt, Human
ccaugccagguguggugcagaaug

SEQ ID NO: 910626 - RNA, 22 nt, Human
cccagggcugccugcuggcacc

SEQ ID NO: 910627 - RNA, 19 nt, Human
ccccauggucccgaaggcc

SEQ ID NO: 910628 - RNA, 21 nt, Human
cccccagcccagggcugccug

SEQ ID NO: 910629 - RNA, 19 nt, Human
ccccuggggcaguugguug

SEQ ID NO: 910630 - RNA, 19 nt, Human
ccucaagggguggcccucu

SEQ ID NO: 910631 - RNA, 23 nt, Human
ccugaccuugggcucuggaaggu

SEQ ID NO: 910632 - RNA, 20 nt, Human
ccuggacugccuguggccuu

SEQ ID NO: 910633 - RNA, 23 nt, Human
cucagccaggcaucuggggggcc

SEQ ID NO: 910634 - RNA, 21 nt, Human
cucccugaccuugggcucugg

SEQ ID NO: 910635 - RNA, 21 nt, Human
cucugcucuggaaaugcuggg

SEQ ID NO: 910636 - RNA, 21 nt, Human
cucuggaaaugcuggggucag

SEQ ID NO: 910637 - RNA, 19 nt, Human
cugaccuugggcucuggaa

SEQ ID NO: 910638 - RNA, 19 nt, Human
cugaggccacuggcguguc

SEQ ID NO: 910639 - RNA, 23 nt, Human
cugaggccacuggcgugucuccu

SEQ ID NO: 910640 - RNA, 20 nt, Human
cugcaccaugccaggugugg

SEQ ID NO: 910641 - RNA, 24 nt, Human
cuggcagcaggcuuggaggacugg

SEQ ID NO: 910642 - RNA, 24 nt, Human
cuggggcaguugguugccccuccc

SEQ ID NO: 910643 - RNA, 24 nt, Human
cuggggggccagcggaaccagggg

SEQ ID NO: 910644 - RNA, 18 nt, Human
cugggucuguggggcagu

SEQ ID NO: 910645 - RNA, 22 nt, Human
cuuugucgagucacugcccuuc

SEQ ID NO: 910646 - RNA, 26 nt, Human
gaagcaccccugccccauggucccgg

SEQ ID NO: 910647 - RNA, 24 nt, Human
gagcagacugcccguuuuccccca

SEQ ID NO: 910648 - RNA, 18 nt, Human
gagcagcccugucucccu

SEQ ID NO: 910649 - RNA, 19 nt, Human
gaggcagggcaggcaggag

SEQ ID NO: 910650 - RNA, 20 nt, Human
gcagggagcuggcagcaggc

SEQ ID NO: 910651 - RNA, 24 nt, Human
gccaacuucaggggccgggaagag

SEQ ID NO: 910652 - RNA, 22 nt, Human
ggagcagcugggccugaggagg

SEQ ID NO: 910653 - RNA, 18 nt, Human
ggaggcagggggauggag

SEQ ID NO: 910654 - RNA, 20 nt, Human
ggauggagcagagagaggcc

SEQ ID NO: 910655 - RNA, 24 nt, Human
ggcagagugcaggaaugugcuggu

SEQ ID NO: 910656 - RNA, 21 nt, Human
ggccuggccacccucaagggg

SEQ ID NO: 910657 - RNA, 26 nt, Human
ggcugguggcagaggcagcacucagg

SEQ ID NO: 910658 - RNA, 20 nt, Human
gggaguccccuacccccagc

SEQ ID NO: 910659 - RNA, 23 nt, Human
gggcugcgugccuguagggaguc

SEQ ID NO: 910660 - RNA, 19 nt, Human
ggggagcagcugggccuga

SEQ ID NO: 910661 - RNA, 18 nt, Human
ggggauggagcagagaga

SEQ ID NO: 910662 - RNA, 19 nt, Human
ggugcagaugucucccugc

SEQ ID NO: 910663 - RNA, 21 nt, Human
gugucuguuagcugccuggug

SEQ ID NO: 910664 - RNA, 23 nt, Human
guuucaggcccugggccaggcac

SEQ ID NO: 910665 - RNA, 19 nt, Human
uagggaguccccuaccccc

SEQ ID NO: 910666 - RNA, 19 nt, Human
ucacugcccuucuguaggc

SEQ ID NO: 910667 - RNA, 18 nt, Human
ucaggggccgggaagagg

SEQ ID NO: 910668 - RNA, 19 nt, Human
ucccccuggggcaguuggu

SEQ ID NO: 910669 - RNA, 24 nt, Human
ucuaguaucuuuauuauccauucc

SEQ ID NO: 910670 - RNA, 20 nt, Human
ucuguaggcucugcucugga

SEQ ID NO: 910671 - RNA, 18 nt, Human
ugagggcggguuucaggc

SEQ ID NO: 910672 - RNA, 23 nt, Human
ugcagaugucucccugcaccaug

SEQ ID NO: 910673 - RNA, 19 nt, Human
ugccccauggucccgaagg

SEQ ID NO: 910674 - RNA, 22 nt, Human
ugccuggugcccagggagcugu

SEQ ID NO: 910675 - RNA, 20 nt, Human
uggcagaggcagcacucagg

SEQ ID NO: 910676 - RNA, 20 nt, Human
uggcagcaggcuuggaggac

SEQ ID NO: 910677 - RNA, 19 nt, Human
uggcugaggcagggcaggc

SEQ ID NO: 910678 - RNA, 21 nt, Human
ugggaggcagggggauggagc

SEQ ID NO: 910679 - RNA, 21 nt, Human
ugggcuggcggcugugucugu

SEQ ID NO: 910680 - RNA, 24 nt, Human
uggggcaguguggacacggcagag

SEQ ID NO: 910681 - RNA, 21 nt, Human
uggucccgaaggccccagagg

SEQ ID NO: 910682 - RNA, 23 nt, Human
uggucccgaaggccccagaggac

SEQ ID NO: 910683 - RNA, 25 nt, Human
ugguggcagaggcagcacucagguu

SEQ ID NO: 910684 - RNA, 28 nt, Human
uguggacacggcagagugcaggaaugug

SEQ ID NO: 910685 - RNA, 22 nt, Human
uguuggggagcagcccugucuc

SEQ ID NO: 910686 - RNA, 24 nt, Human
uuggccacugggggccuggccacc

SEQ ID NO: 910687 - RNA, 18 nt, Human
uuggggagcagcccuguc

SEQ ID NO: 910688 - RNA, 23 nt, Human
aaaaagucuuugcaacuuaccaa

SEQ ID NO: 910689 - RNA, 21 nt, Human
aaaaccuggaccugaaccagg

SEQ ID NO: 910690 - RNA, 19 nt, Human
aacugaaauacagaaccca

SEQ ID NO: 910691 - RNA, 19 nt, Human
aagauuagaaaagccaaca

SEQ ID NO: 910692 - RNA, 19 nt, Human
aagguccuugaagcaaaca

SEQ ID NO: 910693 - RNA, 21 nt, Human
aagguuuaaacaaauccugag

SEQ ID NO: 910694 - RNA, 24 nt, Human
aauuuucuuuccacgauugaagac

SEQ ID NO: 910695 - RNA, 19 nt, Human
acaagauuagaaaagccaa

SEQ ID NO: 910696 - RNA, 20 nt, Human
acauacuucuguacauaaaa

SEQ ID NO: 910697 - RNA, 18 nt, Human
acugaaauacagaaccca

SEQ ID NO: 910698 - RNA, 22 nt, Human
acugaaauacagaacccagcua

SEQ ID NO: 910699 - RNA, 27 nt, Human
acugcacugcacagcucugggcaagag

SEQ ID NO: 910700 - RNA, 21 nt, Human
agaaauaugaaaaauccaguc

SEQ ID NO: 910701 - RNA, 23 nt, Human
agauaauaaaaccacaacaucac

SEQ ID NO: 910702 - RNA, 23 nt, Human
agcaaaaaaaaaaaaaaaaaucc

SEQ ID NO: 910703 - RNA, 25 nt, Human
agcaaaaaaaaaaaaaaaaauccag

SEQ ID NO: 910704 - RNA, 18 nt, Human
agcaaaaccuggaccuga

SEQ ID NO: 910705 - RNA, 22 nt, Human
aggcgaaaacucaaggguugcc

SEQ ID NO: 910706 - RNA, 23 nt, Human
aggcgagggaggaaugagggggu

SEQ ID NO: 910707 - RNA, 23 nt, Human
aggggguggggacgcgggggagc

SEQ ID NO: 910708 - RNA, 22 nt, Human
aguggugggggugggggugaag

SEQ ID NO: 910709 - RNA, 21 nt, Human
augagcaaaaaaaaaaaaaaa

SEQ ID NO: 910710 - RNA, 22 nt, Human
augaggggguggggacgcgggg

SEQ ID NO: 910711 - RNA, 25 nt, Human
auucuguuugaugucuccucuuuca

SEQ ID NO: 910712 - RNA, 23 nt, Human
caaagcaaaaccuggaccugaac

SEQ ID NO: 910713 - RNA, 24 nt, Human
caaagcaaaaccuggaccugaacc

SEQ ID NO: 910714 - RNA, 23 nt, Human
caaggugcuuuauguuuuucuga

SEQ ID NO: 910715 - RNA, 21 nt, Human
cacaacaucacaauaaauagg

SEQ ID NO: 910716 - RNA, 22 nt, Human
caccacauaaccuaggcacgau

SEQ ID NO: 910717 - RNA, 21 nt, Human
cacugcacagcucugggcaag

SEQ ID NO: 910718 - RNA, 24 nt, Human
cacugcacagcucugggcaagagc

SEQ ID NO: 910719 - RNA, 18 nt, Human
cagaacccagcuagugga

SEQ ID NO: 910720 - RNA, 18 nt, Human
cagccagacuggaagcca

SEQ ID NO: 910721 - RNA, 20 nt, Human
caggaauggaagauaugaua

SEQ ID NO: 910722 - RNA, 21 nt, Human
cauccaaaacuuuuuccuaga

SEQ ID NO: 910723 - RNA, 20 nt, Human
caucuuuguuccucuggcua

SEQ ID NO: 910724 - RNA, 27 nt, Human
ccacugcacugcacagcucugggcaag

SEQ ID NO: 910725 - RNA, 22 nt, Human
ccccaaaauagccacauucuuu

SEQ ID NO: 910726 - RNA, 24 nt, Human
ccccagcaaguugcugggagcacc

SEQ ID NO: 910727 - RNA, 23 nt, Human
cgacucccgagucucuuucaccu

SEQ ID NO: 910728 - RNA, 21 nt, Human
cggaaucaggugcucacuugc

SEQ ID NO: 910729 - RNA, 20 nt, Human
cggcgagaaguccccagcaa

SEQ ID NO: 910730 - RNA, 22 nt, Human
cguucucuaauagaaucagcca

SEQ ID NO: 910731 - RNA, 23 nt, Human
cuagagcccucuucugugucucc

SEQ ID NO: 910732 - RNA, 20 nt, Human
gaaagaacugaaauacagaa

SEQ ID NO: 910733 - RNA, 23 nt, Human
gagccugcucuggcagcagagaa

SEQ ID NO: 910734 - RNA, 18 nt, Human
gauaaagugaagauaagg

SEQ ID NO: 910735 - RNA, 21 nt, Human
gcaaaaccuggaccugaacca

SEQ ID NO: 910736 - RNA, 25 nt, Human
gcaggguaguuuccacauaauccca

SEQ ID NO: 910737 - RNA, 26 nt, Human
gccagaguacaauaagugaacugguc

SEQ ID NO: 910738 - RNA, 23 nt, Human
ggaaugaggggguggggacgcgg

SEQ ID NO: 910739 - RNA, 24 nt, Human
ggcacuuuggaagcagcgacuccc

SEQ ID NO: 910740 - RNA, 18 nt, Human
gggaggaaugagggggug

SEQ ID NO: 910741 - RNA, 19 nt, Human
gggaggaaugagggggugg

SEQ ID NO: 910742 - RNA, 21 nt, Human
ggggguggggacgcgggggag

SEQ ID NO: 910743 - RNA, 18 nt, Human
ggggugggggugaaggcg

SEQ ID NO: 910744 - RNA, 22 nt, Human
guaaaaauagauauauuuaaca

SEQ ID NO: 910745 - RNA, 22 nt, Human
uaaagugaagauaaggccacuc

SEQ ID NO: 910746 - RNA, 18 nt, Human
uaaauccugaagaugaaa

SEQ ID NO: 910747 - RNA, 20 nt, Human
uaacaagauuagaaaagcca

SEQ ID NO: 910748 - RNA, 19 nt, Human
uaacaggaauggaagauau

SEQ ID NO: 910749 - RNA, 24 nt, Human
uaaggccacucuucuuuucagguu

SEQ ID NO: 910750 - RNA, 24 nt, Human
uaauucauagcaacauaguuccuu

SEQ ID NO: 910751 - RNA, 22 nt, Human
uaguucucuucuucuaaauggc

SEQ ID NO: 910752 - RNA, 19 nt, Human
uauacaaguguauggaaca

SEQ ID NO: 910753 - RNA, 20 nt, Human
ucaaauagucaccacauaac

SEQ ID NO: 910754 - RNA, 23 nt, Human
uccaaaccaugaauguaguucuc

SEQ ID NO: 910755 - RNA, 20 nt, Human
uccccaaaauagccacauuc

SEQ ID NO: 910756 - RNA, 19 nt, Human
ucggcggcgagcaguuucu

SEQ ID NO: 910757 - RNA, 24 nt, Human
ucuguacauaaaaauauccaugua

SEQ ID NO: 910758 - RNA, 20 nt, Human
ugagcaaaaaaaaaaaaaaa

SEQ ID NO: 910759 - RNA, 24 nt, Human
ugagcaaaaaaaaaaaaaaaaauc

SEQ ID NO: 910760 - RNA, 25 nt, Human
ugagcaaaaaaaaaaaaaaaaaucc

SEQ ID NO: 910761 - RNA, 21 nt, Human
ugagcuguggcgaaguggugg

SEQ ID NO: 910762 - RNA, 20 nt, Human
ugaggggguggggacgcggg

SEQ ID NO: 910763 - RNA, 18 nt, Human
uggaauacguacauggua

SEQ ID NO: 910764 - RNA, 23 nt, Human
uggcagcagagaaucgcagggua

SEQ ID NO: 910765 - RNA, 22 nt, Human
uggcuauaacaauuguguuuag

SEQ ID NO: 910766 - RNA, 19 nt, Human
uguacugacauuacccuaa

SEQ ID NO: 910767 - RNA, 21 nt, Human
uguacugacauuacccuaagc

SEQ ID NO: 910768 - RNA, 19 nt, Human
ugucaaaaggagaauauaa

SEQ ID NO: 910769 - RNA, 21 nt, Human
uguggcgaaguggugggggug

SEQ ID NO: 910770 - RNA, 22 nt, Human
uuagaaaaauuuaccaagcuaa

SEQ ID NO: 910771 - RNA, 24 nt, Human
uuagaaaagccaacaguuauaaug

SEQ ID NO: 910772 - RNA, 18 nt, Human
uuccuacugcacagcaca

SEQ ID NO: 910773 - RNA, 22 nt, Human
uucuguacauaaaaauauccau

SEQ ID NO: 910774 - RNA, 21 nt, Human
uugaagaccuuuucuccugac

SEQ ID NO: 910775 - RNA, 24 nt, Human
uugaagaccuuuucuccuguccuu

SEQ ID NO: 910776 - RNA, 30 nt, Human
uuggaagcagcgacucccgagucucuuucu

SEQ ID NO: 910777 - RNA, 23 nt, Human
uuuuaggcccaggacauggagcu

SEQ ID NO: 910778 - RNA, 21 nt, Human
ccagcuucugccuguacugcu

SEQ ID NO: 910779 - RNA, 22 nt, Human
ucacaaugcacagcucccucug

SEQ ID NO: 910780 - RNA, 20 nt, Human
uccuguccagcagugauggc

SEQ ID NO: 910781 - RNA, 19 nt, Human
ccacuccggcgccccccga

SEQ ID NO: 910782 - RNA, 23 nt, Human
cuccuuucuccacuccggcgccc

SEQ ID NO: 910783 - RNA, 22 nt, Human
gcagcgcugcccaccgcuggcu

SEQ ID NO: 910784 - RNA, 18 nt, Human
gcugcccaccgcuggcuc

SEQ ID NO: 910785 - RNA, 23 nt, Human
uaauggaaaagcuuuuucugagg

SEQ ID NO: 910786 - RNA, 18 nt, Human
uggcuccuuucuccacuc

SEQ ID NO: 910787 - RNA, 24 nt, Human
aacuccuuuccccacucagucccc

SEQ ID NO: 910788 - RNA, 19 nt, Human
acaugucugggcacagugg

SEQ ID NO: 910789 - RNA, 19 nt, Human
acccacccccugcuccccc

SEQ ID NO: 910790 - RNA, 19 nt, Human
acccacccccugcuccccc

SEQ ID NO: 910791 - RNA, 23 nt, Human
acccugagcacacaugucugggc

SEQ ID NO: 910792 - RNA, 22 nt, Human
agaacccacccccugcuccccc

SEQ ID NO: 910793 - RNA, 19 nt, Human
agaaccuggucaucaggga

SEQ ID NO: 910794 - RNA, 20 nt, Human
agacaucccuaacccucagg

SEQ ID NO: 910795 - RNA, 22 nt, Human
aggauggugaggggcaccacgg

SEQ ID NO: 910796 - RNA, 23 nt, Human
cacagcuuuaaccccugugugcu

SEQ ID NO: 910797 - RNA, 21 nt, Human
cacccacccucuuccuaacaa

SEQ ID NO: 910798 - RNA, 20 nt, Human
cacgguggggggacccagag

SEQ ID NO: 910799 - RNA, 19 nt, Human
caggaccagccucauuccc

SEQ ID NO: 910800 - RNA, 22 nt, Human
cagggagaacccacccccugcu

SEQ ID NO: 910801 - RNA, 22 nt, Human
ccacccccugcucccccaggag

SEQ ID NO: 910802 - RNA, 20 nt, Human
cccacccccugcucccccag

SEQ ID NO: 910803 - RNA, 23 nt, Human
ccccgcgcgggcagcgcucccuc

SEQ ID NO: 910804 - RNA, 24 nt, Human
cccuccgccaccgaccuucaagcc

SEQ ID NO: 910805 - RNA, 20 nt, Human
cccugagcggagggagaggc

SEQ ID NO: 910806 - RNA, 23 nt, Human
ccuaacccucaggcaucgcccac

SEQ ID NO: 910807 - RNA, 24 nt, Human
ccuccgccaccgaccuucaagccc

SEQ ID NO: 910808 - RNA, 24 nt, Human
ccugugagagccacccccuccgcc

SEQ ID NO: 910809 - RNA, 24 nt, Human
cuaggcuuguggaggagcgggugg

SEQ ID NO: 910810 - RNA, 18 nt, Human
cuccgccaccgaccuuca

SEQ ID NO: 910811 - RNA, 19 nt, Human
cuggucaucagggagaacc

SEQ ID NO: 910812 - RNA, 22 nt, Human
gaacccacccccugcuccccca

SEQ ID NO: 910813 - RNA, 21 nt, Human
gaccaucacagaccuaucacc

SEQ ID NO: 910814 - RNA, 19 nt, Human
gagaaagccacccugagca

SEQ ID NO: 910815 - RNA, 22 nt, Human
gagcacacaugucugggcacag

SEQ ID NO: 910816 - RNA, 20 nt, Human
gcacagugggggcugggggc

SEQ ID NO: 910817 - RNA, 18 nt, Human
gcuggagcucaggcagga

SEQ ID NO: 910818 - RNA, 21 nt, Human
ggacuaggcuuguggaggagc

SEQ ID NO: 910819 - RNA, 25 nt, Human
gggcacagugggggcugggggacuc

SEQ ID NO: 910820 - RNA, 19 nt, Human
gggcuggagcucaggcagg

SEQ ID NO: 910821 - RNA, 24 nt, Human
gggcugggggcuggagcucaggca

SEQ ID NO: 910822 - RNA, 19 nt, Human
gugccuuugugggcugggg

SEQ ID NO: 910823 - RNA, 23 nt, Human
uaacaagguucuuccacuuuagg

SEQ ID NO: 910824 - RNA, 24 nt, Human
uaacuccuuuccccacucaguccc

SEQ ID NO: 910825 - RNA, 19 nt, Human
uaggggaagggugggggca

SEQ ID NO: 910826 - RNA, 18 nt, Human
ucacagaccuaucaccgc

SEQ ID NO: 910827 - RNA, 22 nt, Human
ucagcagaccaaggccagggug

SEQ ID NO: 910828 - RNA, 18 nt, Human
ucaguccccaggucugga

SEQ ID NO: 910829 - RNA, 19 nt, Human
uccuagggagaaagccacc

SEQ ID NO: 910830 - RNA, 23 nt, Human
ugacuugcauagagacagaaccu

SEQ ID NO: 910831 - RNA, 25 nt, Human
ugagcacacaugucugggcacagug

SEQ ID NO: 910832 - RNA, 18 nt, Human
ugagggggacccaguacc

SEQ ID NO: 910833 - RNA, 20 nt, Human
uggcuggauggcaagcucuc

SEQ ID NO: 910834 - RNA, 22 nt, Human
ugggagggcucaggagguggca

SEQ ID NO: 910835 - RNA, 19 nt, Human
ugggggcugggggcuggag

SEQ ID NO: 910836 - RNA, 20 nt, Human
ugggggcugggggcuggagc

SEQ ID NO: 910837 - RNA, 20 nt, Human
uggugaggggcaccacggug

SEQ ID NO: 910838 - RNA, 19 nt, Human
ugucacugccacagccacu

SEQ ID NO: 910839 - RNA, 21 nt, Human
ugugcuguggagggugcugag

SEQ ID NO: 910840 - RNA, 19 nt, Human
uucaggguuauaaaacuaa

SEQ ID NO: 910841 - RNA, 21 nt, Human
uuuuuuuuuuuuuuuuucauu

SEQ ID NO: 910842 - RNA, 20 nt, Human
aauugcuuuuuaaauaaaau

SEQ ID NO: 910843 - RNA, 23 nt, Human
cccauguugcagcacauaucaga

SEQ ID NO: 910844 - RNA, 20 nt, Human
gacaaacugcaaacuuaauu

SEQ ID NO: 910845 - RNA, 18 nt, Human
guccuuccuuuuuaaggc

SEQ ID NO: 910846 - RNA, 23 nt, Human
ucaccuuuuaucuugauugauca

SEQ ID NO: 910847 - RNA, 19 nt, Human
ugaauaccucuacacugca

SEQ ID NO: 910848 - RNA, 19 nt, Human
ugcaagaauuccuggaaca

SEQ ID NO: 910849 - RNA, 22 nt, Human
uggauggauagaucaccuuuua

SEQ ID NO: 910850 - RNA, 21 nt, Human
uuaugucugguuuauuucacu

SEQ ID NO: 910851 - RNA, 24 nt, Human
uuuuaugucugguuuauuucacuu

SEQ ID NO: 910852 - RNA, 24 nt, Human
aaaauaaauguauaugaauaaugc

SEQ ID NO: 910853 - RNA, 23 nt, Human
aaucggguggauaacggaguaua

SEQ ID NO: 910854 - RNA, 23 nt, Human
acagcaagauacuugcuuuuggc

SEQ ID NO: 910855 - RNA, 23 nt, Human
agaaaggugugaacaguacuguu

SEQ ID NO: 910856 - RNA, 19 nt, Human
agcagcaccggccgggcac

SEQ ID NO: 910857 - RNA, 18 nt, Human
aggugugaacaguacugu

SEQ ID NO: 910858 - RNA, 22 nt, Human
caagacaccugugauaaagaag

SEQ ID NO: 910859 - RNA, 19 nt, Human
caauagaagaguagaucaa

SEQ ID NO: 910860 - RNA, 24 nt, Human
cacagcaagauacuugcuuuuggc

SEQ ID NO: 910861 - RNA, 19 nt, Human
caccugaaaauguuuauua

SEQ ID NO: 910862 - RNA, 23 nt, Human
cagcagcagcgacagcagcaccg

SEQ ID NO: 910863 - RNA, 20 nt, Human
ccaagagacuacacacagca

SEQ ID NO: 910864 - RNA, 19 nt, Human
ccacuuuaggcuaaaauaa

SEQ ID NO: 910865 - RNA, 22 nt, Human
ccgcucggcgcucuuuccacgc

SEQ ID NO: 910866 - RNA, 19 nt, Human
cuacacacagcaagauacu

SEQ ID NO: 910867 - RNA, 20 nt, Human
cugcccugccacccugcugc

SEQ ID NO: 910868 - RNA, 20 nt, Human
gaagaaaggugugaacagua

SEQ ID NO: 910869 - RNA, 19 nt, Human
gcagcagcagcgacagcag

SEQ ID NO: 910870 - RNA, 23 nt, Human
ggaguauaguuauuccacuuaag

SEQ ID NO: 910871 - RNA, 19 nt, Human
gggcagcagcagcgacagc

SEQ ID NO: 910872 - RNA, 21 nt, Human
gggcagcagcagcgacagcag

SEQ ID NO: 910873 - RNA, 18 nt, Human
uaaccaagagacuacaca

SEQ ID NO: 910874 - RNA, 22 nt, Human
uaguagaucuuuuaaaaaaucu

SEQ ID NO: 910875 - RNA, 21 nt, Human
uauuugccaggucauccuaau

SEQ ID NO: 910876 - RNA, 22 nt, Human
ucagauugcuuggaucuugguc

SEQ ID NO: 910877 - RNA, 19 nt, Human
ucuccaaguguguggcaaa

SEQ ID NO: 910878 - RNA, 22 nt, Human
ucugcccugccacccugcugca

SEQ ID NO: 910879 - RNA, 19 nt, Human
ugaagaaaggugugaacag

SEQ ID NO: 910880 - RNA, 19 nt, Human
uuccacuuaagaagcauuc

SEQ ID NO: 910881 - RNA, 20 nt, Human
uugccaggucauccuaauuu

SEQ ID NO: 910882 - RNA, 25 nt, Human
uugccaggucauccuaauuuucuca

SEQ ID NO: 910883 - RNA, 20 nt, Human
agaccaaauucacugggcca

SEQ ID NO: 910884 - RNA, 20 nt, Human
agagcagagggcagaggaga

SEQ ID NO: 910885 - RNA, 25 nt, Human
aggaaaggaaugagagucuggaucc

SEQ ID NO: 910886 - RNA, 19 nt, Human
agggcagaggagagggaug

SEQ ID NO: 910887 - RNA, 21 nt, Human
ccagagcugggagagaccaaa

SEQ ID NO: 910888 - RNA, 21 nt, Human
ccagaggaaaggaaugagagu

SEQ ID NO: 910889 - RNA, 19 nt, Human
cccagagcugggagagacc

SEQ ID NO: 910890 - RNA, 24 nt, Human
cccugguucagggccaaagggagu

SEQ ID NO: 910891 - RNA, 24 nt, Human
cuaacggugaauuugguuuccccu

SEQ ID NO: 910892 - RNA, 21 nt, Human
cugccaggagcuggaaagagc

SEQ ID NO: 910893 - RNA, 25 nt, Human
ggagagagagagacuccaguggggu

SEQ ID NO: 910894 - RNA, 20 nt, Human
ggccuucagaagaguggccc

SEQ ID NO: 910895 - RNA, 20 nt, Human
uaaugagcucagaguaaggu

SEQ ID NO: 910896 - RNA, 22 nt, Human
uaaugagcucagaguaagguuu

SEQ ID NO: 910897 - RNA, 23 nt, Human
uagauucaggucccaaggaugcc

SEQ ID NO: 910898 - RNA, 24 nt, Human
uaguguggccucucucaaggcuga

SEQ ID NO: 910899 - RNA, 24 nt, Human
ucccccagagcugggagagacccc

SEQ ID NO: 910900 - RNA, 22 nt, Human
uccuugagaucuucucccaaau

SEQ ID NO: 910901 - RNA, 24 nt, Human
uggaaaauaaaucuauuuuauuaa

SEQ ID NO: 910902 - RNA, 20 nt, Human
uggaaagagccgcgaccgcg

SEQ ID NO: 910903 - RNA, 18 nt, Human
uggauccuugagaucuuc

SEQ ID NO: 910904 - RNA, 20 nt, Human
uggcagcaauuagagcagag

SEQ ID NO: 910905 - RNA, 26 nt, Human
ugggagagaccaaauucacugggcca

SEQ ID NO: 910906 - RNA, 23 nt, Human
aaaaaaaaacaaaaaacaaaaaa

SEQ ID NO: 910907 - RNA, 23 nt, Human
aaaaauacaaaagggauacagac

SEQ ID NO: 910908 - RNA, 23 nt, Human
aaaaauccaagaccagcaguucc

SEQ ID NO: 910909 - RNA, 24 nt, Human
aaaaaugggguuugccauccaucu

SEQ ID NO: 910910 - RNA, 19 nt, Human
aaaacaaaaaacaaaaccu

SEQ ID NO: 910911 - RNA, 20 nt, Human
aaaauacaaaagggauacag

SEQ ID NO: 910912 - RNA, 24 nt, Human
aaacagcuggcauuagcuccaaca

SEQ ID NO: 910913 - RNA, 19 nt, Human
aaacugguccaccguccuc

SEQ ID NO: 910914 - RNA, 23 nt, Human
aaagaaauauaacuuaaaaaugg

SEQ ID NO: 910915 - RNA, 23 nt, Human
aacauaguacauuucuaccaucu

SEQ ID NO: 910916 - RNA, 25 nt, Human
aagcaacaaagucugaaaagugcca

SEQ ID NO: 910917 - RNA, 19 nt, Human
aagcacugacauuguuuga

SEQ ID NO: 910918 - RNA, 19 nt, Human
aaggccccaaguaguucaa

SEQ ID NO: 910919 - RNA, 24 nt, Human
aauggaaaaaaaauccaagaccag

SEQ ID NO: 910920 - RNA, 22 nt, Human
acaaaaaacaaaaaacaaaacc

SEQ ID NO: 910921 - RNA, 18 nt, Human
acauuguaaacaagugga

SEQ ID NO: 910922 - RNA, 22 nt, Human
accagaaggacaugggaagcca

SEQ ID NO: 910923 - RNA, 19 nt, Human
accccauccacuggggaag

SEQ ID NO: 910924 - RNA, 24 nt, Human
accccauccacuggggaaggagca

SEQ ID NO: 910925 - RNA, 23 nt, Human
augaucagcugaauuuaauggaa

SEQ ID NO: 910926 - RNA, 22 nt, Human
auucugcacuugacaucacaga

SEQ ID NO: 910927 - RNA, 25 nt, Human
caaaaaacaaaaccuacaccucuaa

SEQ ID NO: 910928 - RNA, 22 nt, Human
cacaagccaggucuucccgucu

SEQ ID NO: 910929 - RNA, 18 nt, Human
cacaugagguccauagcc

SEQ ID NO: 910930 - RNA, 18 nt, Human
cacaugcaaaggggaaag

SEQ ID NO: 910931 - RNA, 20 nt, Human
cacugcaauuccacuuuuaa

SEQ ID NO: 910932 - RNA, 22 nt, Human
cagcaacagugggagcucgaag

SEQ ID NO: 910933 - RNA, 24 nt, Human
cagcugaauuuaauggaaaaaaaa

SEQ ID NO: 910934 - RNA, 24 nt, Human
caggacacaaggguccuaguuccc

SEQ ID NO: 910935 - RNA, 19 nt, Human
caggacacauccgccaaug

SEQ ID NO: 910936 - RNA, 21 nt, Human
ccaaugcucaggacgucuucu

SEQ ID NO: 910937 - RNA, 24 nt, Human
ccccuggccaugugcaaacaguuu

SEQ ID NO: 910938 - RNA, 23 nt, Human
ccugccuccauaaggcucagaca

SEQ ID NO: 910939 - RNA, 21 nt, Human
cgccaaugacaccguccugcc

SEQ ID NO: 910940 - RNA, 21 nt, Human
cuaaaagacauacagguacaa

SEQ ID NO: 910941 - RNA, 20 nt, Human
cuaaccagguuuuugaucuu

SEQ ID NO: 910942 - RNA, 23 nt, Human
cuaaccugccuugcaaaggcugg

SEQ ID NO: 910943 - RNA, 21 nt, Human
cuacaauuacuuaaugcuuag

SEQ ID NO: 910944 - RNA, 21 nt, Human
gaucaagugcuaggacuggau

SEQ ID NO: 910945 - RNA, 22 nt, Human
gcaaaacaacacaaaaauagag

SEQ ID NO: 910946 - RNA, 23 nt, Human
gcagcaacagugggagcucgaag

SEQ ID NO: 910947 - RNA, 18 nt, Human
gccaaugacaccguccug

SEQ ID NO: 910948 - RNA, 24 nt, Human
ggagcucgaagauugcugcacugu

SEQ ID NO: 910949 - RNA, 19 nt, Human
guguggccacacccugucc

SEQ ID NO: 910950 - RNA, 25 nt, Human
uaaaaaaaaacaaaaaacaaaaaac

SEQ ID NO: 910951 - RNA, 20 nt, Human
uaaaggcuuguuuauucccu

SEQ ID NO: 910952 - RNA, 18 nt, Human
uaaugcauauuacaugua

SEQ ID NO: 910953 - RNA, 19 nt, Human
uacacaucauguaccaauc

SEQ ID NO: 910954 - RNA, 24 nt, Human
uacagguacaaguaguaucaaaag

SEQ ID NO: 910955 - RNA, 18 nt, Human
uagccuauauaauaaaac

SEQ ID NO: 910956 - RNA, 24 nt, Human
uaguucaauggcuagcuuuucuca

SEQ ID NO: 910957 - RNA, 28 nt, Human
uaugcacaugagguccauagccuauaua

SEQ ID NO: 910958 - RNA, 18 nt, Human
ucagacaggacacaaggg

SEQ ID NO: 910959 - RNA, 18 nt, Human
ucaggacgucuucuugug

SEQ ID NO: 910960 - RNA, 18 nt, Human
ucauuaucccaaugagau

SEQ ID NO: 910961 - RNA, 25 nt, Human
uccauaaagccacuuggagguuagu

SEQ ID NO: 910962 - RNA, 21 nt, Human
uccucagaaugugaguuccaa

SEQ ID NO: 910963 - RNA, 19 nt, Human
uccuugguggguuaaaggc

SEQ ID NO: 910964 - RNA, 21 nt, Human
uccuugguggguuaaaggccc

SEQ ID NO: 910965 - RNA, 20 nt, Human
ucuauaugcagcguccauaa

SEQ ID NO: 910966 - RNA, 22 nt, Human
ugaaaaaacacugcaauuccac

SEQ ID NO: 910967 - RNA, 24 nt, Human
ugaaaaaacacugcaauuccacuu

SEQ ID NO: 910968 - RNA, 23 nt, Human
ugaaaagugccagggcaauuucu

SEQ ID NO: 910969 - RNA, 20 nt, Human
ugaacugaauuuacacauca

SEQ ID NO: 910970 - RNA, 21 nt, Human
ugacaucacagagcgaacuga

SEQ ID NO: 910971 - RNA, 24 nt, Human
ugagaucaagugcuaggacuggau

SEQ ID NO: 910972 - RNA, 21 nt, Human
ugagauuagcaguccuauguu

SEQ ID NO: 910973 - RNA, 22 nt, Human
ugauacugugugauguggcagg

SEQ ID NO: 910974 - RNA, 20 nt, Human
ugccuugcaaaggcuggcau

SEQ ID NO: 910975 - RNA, 21 nt, Human
ugcugcuuuuaaggcagggaa

SEQ ID NO: 910976 - RNA, 19 nt, Human
uggaaaaaaaauccaagac

SEQ ID NO: 910977 - RNA, 20 nt, Human
uggagcaggacacauccgcc

SEQ ID NO: 910978 - RNA, 22 nt, Human
uggcaggcagcaacagugggag

SEQ ID NO: 910979 - RNA, 27 nt, Human
uguaaaauuacaaaugcauaauugaca

SEQ ID NO: 910980 - RNA, 22 nt, Human
uguccggcauauuugguuuuuc

SEQ ID NO: 910981 - RNA, 19 nt, Human
ugugaguuccaaggcucca

SEQ ID NO: 910982 - RNA, 18 nt, Human
ugugaugaucuuggaauu

SEQ ID NO: 910983 - RNA, 20 nt, Human
ugugaugaucuuggaauuug

SEQ ID NO: 910984 - RNA, 20 nt, Human
ugugcaaacaguuuuacaga

SEQ ID NO: 910985 - RNA, 27 nt, Human
ugugcaaacaguuuuacagaagaaccc

SEQ ID NO: 910986 - RNA, 20 nt, Human
uucaacaaaaauauaaccaa

SEQ ID NO: 910987 - RNA, 24 nt, Human
uucgcgggugagaccagaaggaca

SEQ ID NO: 910988 - RNA, 18 nt, Human
uuucagaaaccaggcugg

SEQ ID NO: 910989 - RNA, 18 nt, Human
uuuuuuuuuuuaaaagga

SEQ ID NO: 910990 - RNA, 18 nt, Human
aaaaaaaagaaacaauga

SEQ ID NO: 910991 - RNA, 24 nt, Human
aaaaaaaccaaccagucuccuaaa

SEQ ID NO: 910992 - RNA, 25 nt, Human
aaaaaaagaaacaaugacaguuuua

SEQ ID NO: 910993 - RNA, 22 nt, Human
aaaaaccaaccagucuccuaaa

SEQ ID NO: 910994 - RNA, 25 nt, Human
aaaacagcaaaaacuuaaggggagc

SEQ ID NO: 910995 - RNA, 18 nt, Human
aaaacugaccccagagac

SEQ ID NO: 910996 - RNA, 19 nt, Human
aaacagggauguucccaaa

SEQ ID NO: 910997 - RNA, 18 nt, Human
aagaaagaagagaacuga

SEQ ID NO: 910998 - RNA, 22 nt, Human
aagaaagaagagaacugagaaa

SEQ ID NO: 910999 - RNA, 23 nt, Human
aagaaagcagaaaccacaaaacu

SEQ ID NO: 911000 - RNA, 19 nt, Human
aagaagagaacugagaaaa

SEQ ID NO: 911001 - RNA, 20 nt, Human
aagaagagaacugagaaaau

SEQ ID NO: 911002 - RNA, 23 nt, Human
aagcagaaaccacaaaacugacc

SEQ ID NO: 911003 - RNA, 26 nt, Human
aagcagaaaccacaaaacugacccca

SEQ ID NO: 911004 - RNA, 23 nt, Human
aaggaccucucuaggccgacuuc

SEQ ID NO: 911005 - RNA, 18 nt, Human
aaggcuucuggaguuaau

SEQ ID NO: 911006 - RNA, 20 nt, Human
aagggugugucacaucuugu

SEQ ID NO: 911007 - RNA, 23 nt, Human
aaguaucuccaacauaaaaucuu

SEQ ID NO: 911008 - RNA, 22 nt, Human
aauacagcuuaucagaagugcu

SEQ ID NO: 911009 - RNA, 20 nt, Human
aauaucuaucaaucaagcau

SEQ ID NO: 911010 - RNA, 19 nt, Human
acaaaaucauacaaaauga

SEQ ID NO: 911011 - RNA, 22 nt, Human
acaguacagaucuccauuuccu

SEQ ID NO: 911012 - RNA, 24 nt, Human
acaguacagaucuccauuucgggg

SEQ ID NO: 911013 - RNA, 22 nt, Human
acauauacagaccuacaucucc

SEQ ID NO: 911014 - RNA, 23 nt, Human
accaguuaaaaaaaaagaaacaa

SEQ ID NO: 911015 - RNA, 23 nt, Human
acccgggagggccccugggagug

SEQ ID NO: 911016 - RNA, 19 nt, Human
acccuggccacuggucugu

SEQ ID NO: 911017 - RNA, 22 nt, Human
acccuguuucuccuccucuuua

SEQ ID NO: 911018 - RNA, 20 nt, Human
accuggcugaaagccagcga

SEQ ID NO: 911019 - RNA, 23 nt, Human
acucacccuguuucuccuccucu

SEQ ID NO: 911020 - RNA, 23 nt, Human
acuggaacgaaggaacccucccg

SEQ ID NO: 911021 - RNA, 22 nt, Human
acuguuuguuggcgagggaaac

SEQ ID NO: 911022 - RNA, 24 nt, Human
agaaaagagauccaauacuuagaa

SEQ ID NO: 911023 - RNA, 20 nt, Human
agaaagaagagaacugagaa

SEQ ID NO: 911024 - RNA, 22 nt, Human
agaaagaagagaacugagaaaa

SEQ ID NO: 911025 - RNA, 21 nt, Human
agaaguaucuccaacauaaaa

SEQ ID NO: 911026 - RNA, 24 nt, Human
agaggaggggcaggugcagcacgg

SEQ ID NO: 911027 - RNA, 22 nt, Human
agagggaaaaaaaccaaccagu

SEQ ID NO: 911028 - RNA, 23 nt, Human
agaggguuucggagggccugugg

SEQ ID NO: 911029 - RNA, 23 nt, Human
agaugugugggaagauggaaaug

SEQ ID NO: 911030 - RNA, 23 nt, Human
agccgcugcuuucucccccgggg

SEQ ID NO: 911031 - RNA, 21 nt, Human
aggaaaacauuuuuggcaaaa

SEQ ID NO: 911032 - RNA, 22 nt, Human
aggagcagucauggguuguugc

SEQ ID NO: 911033 - RNA, 25 nt, Human
aggcaagaaagcagaaaccacaaaa

SEQ ID NO: 911034 - RNA, 19 nt, Human
aggcaggcugcccuccucc

SEQ ID NO: 911035 - RNA, 19 nt, Human
aggccgacuucaaagaugu

SEQ ID NO: 911036 - RNA, 23 nt, Human
aggccuggagaugaccccaaacu

SEQ ID NO: 911037 - RNA, 19 nt, Human
aggcggaucugcucaugug

SEQ ID NO: 911038 - RNA, 22 nt, Human
agggaaaaaaaccaaccagucu

SEQ ID NO: 911039 - RNA, 24 nt, Human
agggauguucccaaaacucaggcc

SEQ ID NO: 911040 - RNA, 22 nt, Human
agggccccugggagugaaaugc

SEQ ID NO: 911041 - RNA, 21 nt, Human
agggggagccgcugcuuucuc

SEQ ID NO: 911042 - RNA, 26 nt, Human
aggucugaggagcagucauggguugu

SEQ ID NO: 911043 - RNA, 18 nt, Human
aguccgugagguuggcug

SEQ ID NO: 911044 - RNA, 22 nt, Human
aguccuuuuuugcaagagaggg

SEQ ID NO: 911045 - RNA, 18 nt, Human
aguguuguugacuugaaa

SEQ ID NO: 911046 - RNA, 19 nt, Human
augaccccaaacuuucugg

SEQ ID NO: 911047 - RNA, 20 nt, Human
augaccccaaacuuucuggu

SEQ ID NO: 911048 - RNA, 25 nt, Human
augagaaaucuggacucagacaagc

SEQ ID NO: 911049 - RNA, 21 nt, Human
augcagcccacauccagcaca

SEQ ID NO: 911050 - RNA, 23 nt, Human
auguugucagggcucaacggguu

SEQ ID NO: 911051 - RNA, 25 nt, Human
auuccauuaagcuccucuauuugga

SEQ ID NO: 911052 - RNA, 19 nt, Human
auuccuggcacaacuucuc

SEQ ID NO: 911053 - RNA, 20 nt, Human
auuccugugagcggcaccuc

SEQ ID NO: 911054 - RNA, 25 nt, Human
caaaacucaggcccacagucucugu

SEQ ID NO: 911055 - RNA, 22 nt, Human
caaaacugaccccagagacuga

SEQ ID NO: 911056 - RNA, 20 nt, Human
caacuucuccacagcuccac

SEQ ID NO: 911057 - RNA, 24 nt, Human
caagaaaagagauccaauacuuag

SEQ ID NO: 911058 - RNA, 18 nt, Human
caagaaagcagaaaccac

SEQ ID NO: 911059 - RNA, 21 nt, Human
caagaaagcagaaaccacaaa

SEQ ID NO: 911060 - RNA, 20 nt, Human
caaggcccuugccuuuuucu

SEQ ID NO: 911061 - RNA, 22 nt, Human
cacaagcaucuccaguggucag

SEQ ID NO: 911062 - RNA, 24 nt, Human
cacagcuccaccuggcugaaagcc

SEQ ID NO: 911063 - RNA, 19 nt, Human
cacagucucuguguccccc

SEQ ID NO: 911064 - RNA, 19 nt, Human
cacccagcuccaagguagg

SEQ ID NO: 911065 - RNA, 20 nt, Human
cacugauccuggagcaaggc

SEQ ID NO: 911066 - RNA, 27 nt, Human
cagaaaaaugaugauguacaaagcuga

SEQ ID NO: 911067 - RNA, 24 nt, Human
cagcaauacuaaagccaaggcccu

SEQ ID NO: 911068 - RNA, 20 nt, Human
cagcauggcggacguugacg

SEQ ID NO: 911069 - RNA, 23 nt, Human
cagcgacagucacuuugacagaa

SEQ ID NO: 911070 - RNA, 19 nt, Human
cagcuuccagggcuccccu

SEQ ID NO: 911071 - RNA, 20 nt, Human
cagcuucuggauggccgccu

SEQ ID NO: 911072 - RNA, 19 nt, Human
caguacagaucuccauuuc

SEQ ID NO: 911073 - RNA, 21 nt, Human
cagucacucgauuggaagucc

SEQ ID NO: 911074 - RNA, 27 nt, Human
cagucucgaccuccagcaauacuaaag

SEQ ID NO: 911075 - RNA, 19 nt, Human
cauaguccccgaaaacagg

SEQ ID NO: 911076 - RNA, 18 nt, Human
caucaacuccaaccauca

SEQ ID NO: 911077 - RNA, 22 nt, Human
caugcaccuugcacugacuucc

SEQ ID NO: 911078 - RNA, 26 nt, Human
cauucagaaaaaugaugauguacaaa

SEQ ID NO: 911079 - RNA, 21 nt, Human
ccaaaacucaggcccacaguc

SEQ ID NO: 911080 - RNA, 18 nt, Human
ccacagucucuguguccc

SEQ ID NO: 911081 - RNA, 23 nt, Human
ccaccagaggaggaguggccaga

SEQ ID NO: 911082 - RNA, 21 nt, Human
ccacgaaugcagucucgaccu

SEQ ID NO: 911083 - RNA, 21 nt, Human
ccagagacugaaaaacaauca

SEQ ID NO: 911084 - RNA, 20 nt, Human
ccagccuacuuuaaucuuca

SEQ ID NO: 911085 - RNA, 24 nt, Human
ccaguuaaaaaaaaagaaacaaug

SEQ ID NO: 911086 - RNA, 25 nt, Human
ccaguuaaaaaaaaagaaacaauga

SEQ ID NO: 911087 - RNA, 18 nt, Human
ccaugaagucugacaagg

SEQ ID NO: 911088 - RNA, 21 nt, Human
ccaugacgauccuguccuugg

SEQ ID NO: 911089 - RNA, 22 nt, Human
cccacauccagcacaggacccu

SEQ ID NO: 911090 - RNA, 19 nt, Human
cccaccuuccugcaggcug

SEQ ID NO: 911091 - RNA, 24 nt, Human
cccagaagcccgauggcucccaag

SEQ ID NO: 911092 - RNA, 21 nt, Human
ccccacugacaucaacuccaa

SEQ ID NO: 911093 - RNA, 21 nt, Human
cccccccugcgcuuuucacca

SEQ ID NO: 911094 - RNA, 18 nt, Human
cccccugcgcuuuucacc

SEQ ID NO: 911095 - RNA, 19 nt, Human
ccccugagggcagccaccc

SEQ ID NO: 911096 - RNA, 18 nt, Human
cccgcugaggcuccccca

SEQ ID NO: 911097 - RNA, 19 nt, Human
cccgcugaggcucccccac

SEQ ID NO: 911098 - RNA, 18 nt, Human
cccuggggaagagaugag

SEQ ID NO: 911099 - RNA, 24 nt, Human
ccgaugagaguuuggaauuauuua

SEQ ID NO: 911100 - RNA, 22 nt, Human
ccggcccauccccaccuuccug

SEQ ID NO: 911101 - RNA, 20 nt, Human
ccuacaguauucuaccugua

SEQ ID NO: 911102 - RNA, 19 nt, Human
ccucagaaccggccaccau

SEQ ID NO: 911103 - RNA, 20 nt, Human
ccugcagcuucuggauggcc

SEQ ID NO: 911104 - RNA, 19 nt, Human
ccuguccuugggcccaggg

SEQ ID NO: 911105 - RNA, 19 nt, Human
ccuuccugcaggcuguucu

SEQ ID NO: 911106 - RNA, 19 nt, Human
cgaaggaacccucccggcc

SEQ ID NO: 911107 - RNA, 24 nt, Human
cgaguccagaucgcauggaucauu

SEQ ID NO: 911108 - RNA, 22 nt, Human
cggaaacagggcauuuacucaa

SEQ ID NO: 911109 - RNA, 24 nt, Human
cuaaguccacugagcuaccaagaa

SEQ ID NO: 911110 - RNA, 20 nt, Human
cuagaugggguccagccacc

SEQ ID NO: 911111 - RNA, 20 nt, Human
cucacagccagcgcugcccu

SEQ ID NO: 911112 - RNA, 20 nt, Human
cucacuaaaaaauacucuca

SEQ ID NO: 911113 - RNA, 26 nt, Human
cuccaacauaaaaucuuagugucaug

SEQ ID NO: 911114 - RNA, 21 nt, Human
cuccaaccaucagcugcccau

SEQ ID NO: 911115 - RNA, 20 nt, Human
cuccaagguagguguuucuc

SEQ ID NO: 911116 - RNA, 24 nt, Human
cuccauuucgggggggcugugauc

SEQ ID NO: 911117 - RNA, 19 nt, Human
cucccggccugggugacgc

SEQ ID NO: 911118 - RNA, 19 nt, Human
cucguccucagaaccggcc

SEQ ID NO: 911119 - RNA, 22 nt, Human
cugcaggcuguucugcagccac

SEQ ID NO: 911120 - RNA, 21 nt, Human
cuggggcucaccaacuuugug

SEQ ID NO: 911121 - RNA, 25 nt, Human
cuugguuguggacguccaaccgacg

SEQ ID NO: 911122 - RNA, 19 nt, Human
cuuuaagucuuccguccuc

SEQ ID NO: 911123 - RNA, 19 nt, Human
cuuuuuggacaauuccuga

SEQ ID NO: 911124 - RNA, 19 nt, Human
gaaaacagcaaaaacuuaa

SEQ ID NO: 911125 - RNA, 23 nt, Human
gaaaacgaaaacagcaaaaacuu

SEQ ID NO: 911126 - RNA, 21 nt, Human
gacgauccuguccuugggccc

SEQ ID NO: 911127 - RNA, 21 nt, Human
gagaaaucuggacucagacaa

SEQ ID NO: 911128 - RNA, 24 nt, Human
gaggcuguuggcucuggguuuucc

SEQ ID NO: 911129 - RNA, 20 nt, Human
gagggaaaaaaaccaaccag

SEQ ID NO: 911130 - RNA, 24 nt, Human
gaggguuucggagggccugugggc

SEQ ID NO: 911131 - RNA, 18 nt, Human
gauccuguccuugggccc

SEQ ID NO: 911132 - RNA, 21 nt, Human
gauggcuaaagccccuccaug

SEQ ID NO: 911133 - RNA, 19 nt, Human
gcaauacuaaagccaaggc

SEQ ID NO: 911134 - RNA, 21 nt, Human
gcagccacugguagaggaggg

SEQ ID NO: 911135 - RNA, 18 nt, Human
gcagcuuugggcagguuc

SEQ ID NO: 911136 - RNA, 20 nt, Human
gcaggcuguucugcagccac

SEQ ID NO: 911137 - RNA, 19 nt, Human
gccacugggcuuggccuca

SEQ ID NO: 911138 - RNA, 21 nt, Human
gccauuucaacaaccuguggu

SEQ ID NO: 911139 - RNA, 25 nt, Human
gcucagugcuggggucacuggacac

SEQ ID NO: 911140 - RNA, 25 nt, Human
gcugggaggcaggcugcccuccucc

SEQ ID NO: 911141 - RNA, 18 nt, Human
gcuuggccucagccucgg

SEQ ID NO: 911142 - RNA, 21 nt, Human
ggaaagagggaaaaaaaccaa

SEQ ID NO: 911143 - RNA, 23 nt, Human
ggaaauugagacacgccucgggu

SEQ ID NO: 911144 - RNA, 18 nt, Human
ggaaggagaccauuccau

SEQ ID NO: 911145 - RNA, 20 nt, Human
ggagaggaauuggccucuuu

SEQ ID NO: 911146 - RNA, 21 nt, Human
ggaggagaggguuucggaggg

SEQ ID NO: 911147 - RNA, 22 nt, Human
ggaggccuggagaugaccccaa

SEQ ID NO: 911148 - RNA, 24 nt, Human
ggcaagaaggaagcaaaggucuag

SEQ ID NO: 911149 - RNA, 21 nt, Human
ggccgaaugagccuccaagga

SEQ ID NO: 911150 - RNA, 18 nt, Human
gggagagcuggcaagaag

SEQ ID NO: 911151 - RNA, 20 nt, Human
gggcauuuacucaagauggc

SEQ ID NO: 911152 - RNA, 24 nt, Human
gggggcugugaucaggugggaccg

SEQ ID NO: 911153 - RNA, 24 nt, Human
gggucauccucugacagaggccug

SEQ ID NO: 911154 - RNA, 21 nt, Human
gguauuguggggugugcuggu

SEQ ID NO: 911155 - RNA, 23 nt, Human
ggucaagaaaagagauccaauac

SEQ ID NO: 911156 - RNA, 19 nt, Human
guggucagaggagcaucug

SEQ ID NO: 911157 - RNA, 24 nt, Human
uaaaaaaaaagaaacaaugacagg

SEQ ID NO: 911158 - RNA, 26 nt, Human
uaaaacaaauaauccacuccggauuu

SEQ ID NO: 911159 - RNA, 18 nt, Human
uaaacauaacauaaaggu

SEQ ID NO: 911160 - RNA, 23 nt, Human
uaacuccuguaccauauuuuccu

SEQ ID NO: 911161 - RNA, 19 nt, Human
uaacuggccccacugacau

SEQ ID NO: 911162 - RNA, 21 nt, Human
uacuagucaugccuugaacac

SEQ ID NO: 911163 - RNA, 22 nt, Human
uacuuaaaaaagguuguuuaca

SEQ ID NO: 911164 - RNA, 22 nt, Human
uacuucauggugaucaauaacc

SEQ ID NO: 911165 - RNA, 20 nt, Human
uagagacacaagcaucucca

SEQ ID NO: 911166 - RNA, 23 nt, Human
uagcaguggcugaugacuuuagc

SEQ ID NO: 911167 - RNA, 25 nt, Human
uagcauaguguaugugguaagccag

SEQ ID NO: 911168 - RNA, 23 nt, Human
uaggaaaacauuuuuggcaaaag

SEQ ID NO: 911169 - RNA, 24 nt, Human
uaggcaagaaagcagaaaccacaa

SEQ ID NO: 911170 - RNA, 18 nt, Human
uaguccccgaaaacaggg

SEQ ID NO: 911171 - RNA, 28 nt, Human
uauacauuacacucacuaaaaaauacuc

SEQ ID NO: 911172 - RNA, 24 nt, Human
uaucaagacagguucaaaaacuag

SEQ ID NO: 911173 - RNA, 20 nt, Human
uauggcaaaugcacucucca

SEQ ID NO: 911174 - RNA, 21 nt, Human
uauggcaaaugcacucuccac

SEQ ID NO: 911175 - RNA, 20 nt, Human
ucaaccaucaaauucaauga

SEQ ID NO: 911176 - RNA, 20 nt, Human
ucaagcaugcaccuugcacu

SEQ ID NO: 911177 - RNA, 26 nt, Human
ucacagcugguagagacacaagcauc

SEQ ID NO: 911178 - RNA, 21 nt, Human
ucaccaguguuuuccgggguc

SEQ ID NO: 911179 - RNA, 24 nt, Human
ucacccagcuccaagguagguguu

SEQ ID NO: 911180 - RNA, 24 nt, Human
ucacuuccaggauuugauccccgc

SEQ ID NO: 911181 - RNA, 24 nt, Human
ucagaaauggaaacccagugacug

SEQ ID NO: 911182 - RNA, 18 nt, Human
ucaugccaccagaggagg

SEQ ID NO: 911183 - RNA, 20 nt, Human
uccaauacuuagaauguuac

SEQ ID NO: 911184 - RNA, 20 nt, Human
uccacugagcuaccaagaag

SEQ ID NO: 911185 - RNA, 22 nt, Human
uccaugacgauccuguccuugg

SEQ ID NO: 911186 - RNA, 18 nt, Human
ucccaaaacucaggccca

SEQ ID NO: 911187 - RNA, 20 nt, Human
ucccaagagucacgaggcug

SEQ ID NO: 911188 - RNA, 20 nt, Human
ucccucugcuccaggucccg

SEQ ID NO: 911189 - RNA, 25 nt, Human
ucccucuguccacuucugaccucuc

SEQ ID NO: 911190 - RNA, 19 nt, Human
ucccuggggaagagaugag

SEQ ID NO: 911191 - RNA, 20 nt, Human
uccucagaaccggccaccau

SEQ ID NO: 911192 - RNA, 20 nt, Human
uccuucuuccaccagcuucc

SEQ ID NO: 911193 - RNA, 24 nt, Human
ucgaccuccagcaauacuaaagcc

SEQ ID NO: 911194 - RNA, 21 nt, Human
ucgagaugacggauggccgaa

SEQ ID NO: 911195 - RNA, 21 nt, Human
ucgcauggaucauuggcucug

SEQ ID NO: 911196 - RNA, 24 nt, Human
ucggccaacuuccuccuuccgugc

SEQ ID NO: 911197 - RNA, 21 nt, Human
ucguuggcaucguagcagccu

SEQ ID NO: 911198 - RNA, 23 nt, Human
ucuccaacauaaaaucuuagugu

SEQ ID NO: 911199 - RNA, 22 nt, Human
ucuccugguucagagcuguugc

SEQ ID NO: 911200 - RNA, 21 nt, Human
ucucucaucugaaggaccucu

SEQ ID NO: 911201 - RNA, 20 nt, Human
ucucugugucccccagcucc

SEQ ID NO: 911202 - RNA, 25 nt, Human
ucucugugucccccagcuccuuggu

SEQ ID NO: 911203 - RNA, 22 nt, Human
ucugaugcagcuuugggcaggu

SEQ ID NO: 911204 - RNA, 20 nt, Human
ucugcagcugauccauuugg

SEQ ID NO: 911205 - RNA, 19 nt, Human
ucugucccucuguccacuu

SEQ ID NO: 911206 - RNA, 19 nt, Human
ucugugccuggagcccagg

SEQ ID NO: 911207 - RNA, 24 nt, Human
ugaaaugcaguccccuucucuguc

SEQ ID NO: 911208 - RNA, 19 nt, Human
ugaagaacugccuucaucg

SEQ ID NO: 911209 - RNA, 19 nt, Human
ugacagaaguggccuggac

SEQ ID NO: 911210 - RNA, 22 nt, Human
ugacagaaguggccuggacucu

SEQ ID NO: 911211 - RNA, 18 nt, Human
ugacagaggccugauggg

SEQ ID NO: 911212 - RNA, 19 nt, Human
ugacccugggcgaugcagg

SEQ ID NO: 911213 - RNA, 23 nt, Human
ugacucacccuguuucuccuccu

SEQ ID NO: 911214 - RNA, 18 nt, Human
ugagcggcaccuccuucc

SEQ ID NO: 911215 - RNA, 21 nt, Human
ugagguacacaguacagaucu

SEQ ID NO: 911216 - RNA, 19 nt, Human
ugaggugagcgcuuugauc

SEQ ID NO: 911217 - RNA, 22 nt, Human
ugagguggcuggcauccagaug

SEQ ID NO: 911218 - RNA, 24 nt, Human
ugcaaagcgggaaaacgaaaacag

SEQ ID NO: 911219 - RNA, 20 nt, Human
ugccccagcucugaugcagc

SEQ ID NO: 911220 - RNA, 21 nt, Human
ugcccucugggauacucuccu

SEQ ID NO: 911221 - RNA, 21 nt, Human
ugccuugaacacugaagacaa

SEQ ID NO: 911222 - RNA, 23 nt, Human
ugcgcuuuucaccauaguccccg

SEQ ID NO: 911223 - RNA, 21 nt, Human
ugcgugcuaugacuucaucca

SEQ ID NO: 911224 - RNA, 18 nt, Human
ugcucugucccucugucc

SEQ ID NO: 911225 - RNA, 24 nt, Human
ugcugggaggcaggcugcccuccu

SEQ ID NO: 911226 - RNA, 22 nt, Human
uggaaacccagugacugacuga

SEQ ID NO: 911227 - RNA, 20 nt, Human
uggaaggcuucuggaguuaa

SEQ ID NO: 911228 - RNA, 23 nt, Human
uggacaccucacagccagcgcug

SEQ ID NO: 911229 - RNA, 18 nt, Human
uggcaagaaggaagcaaa

SEQ ID NO: 911230 - RNA, 22 nt, Human
uggcaagaaggaagcaaaggcc

SEQ ID NO: 911231 - RNA, 19 nt, Human
uggcggaggagaggguuuc

SEQ ID NO: 911232 - RNA, 22 nt, Human
uggcguggacuuugcuuaaagc

SEQ ID NO: 911233 - RNA, 20 nt, Human
uggcucuggguuuuccaggc

SEQ ID NO: 911234 - RNA, 20 nt, Human
uggcugaaagccagcgacag

SEQ ID NO: 911235 - RNA, 23 nt, Human
uggcugggauucucuggccgacu

SEQ ID NO: 911236 - RNA, 23 nt, Human
ugggacccgggagggccccuggg

SEQ ID NO: 911237 - RNA, 20 nt, Human
ugggaggcaggcugcccucc

SEQ ID NO: 911238 - RNA, 19 nt, Human
ugggcaaaguacugggaga

SEQ ID NO: 911239 - RNA, 20 nt, Human
ugggcccaggggucuuccga

SEQ ID NO: 911240 - RNA, 19 nt, Human
ugggcuguucuuccucagc

SEQ ID NO: 911241 - RNA, 24 nt, Human
uggggggaacuggggcucccagug

SEQ ID NO: 911242 - RNA, 23 nt, Human
ugguagaggaggggcaggugcag

SEQ ID NO: 911243 - RNA, 18 nt, Human
ugguauuguggggugugc

SEQ ID NO: 911244 - RNA, 18 nt, Human
uggucagaggagcaucug

SEQ ID NO: 911245 - RNA, 19 nt, Human
ugucgagcagggugugagg

SEQ ID NO: 911246 - RNA, 21 nt, Human
uguggaagagcccagaagccc

SEQ ID NO: 911247 - RNA, 18 nt, Human
ugugucuacagaggucuu

SEQ ID NO: 911248 - RNA, 19 nt, Human
uguucacauagggcugugc

SEQ ID NO: 911249 - RNA, 22 nt, Human
uguucccaaaacucaggcccac

SEQ ID NO: 911250 - RNA, 23 nt, Human
uguugggagagcuggcaagaagg

SEQ ID NO: 911251 - RNA, 21 nt, Human
uuacccuggccacuggucugu

SEQ ID NO: 911252 - RNA, 19 nt, Human
uuacucuuuaauauauaag

SEQ ID NO: 911253 - RNA, 20 nt, Human
uuccaggauuugauccccgc

SEQ ID NO: 911254 - RNA, 19 nt, Human
uuccucagcucugucaccc

SEQ ID NO: 911255 - RNA, 18 nt, Human
uuccucuugguuguggac

SEQ ID NO: 911256 - RNA, 21 nt, Human
uucggggaggcggaucugcuc

SEQ ID NO: 911257 - RNA, 23 nt, Human
uucggggaggcggaucugcucau

SEQ ID NO: 911258 - RNA, 19 nt, Human
uucggucacccagcuccaa

SEQ ID NO: 911259 - RNA, 19 nt, Human
uucuggauggccgccuggc

SEQ ID NO: 911260 - RNA, 19 nt, Human
uugagcagcuccaucuucc

SEQ ID NO: 911261 - RNA, 20 nt, Human
uuuccaggcucacuggaggu

SEQ ID NO: 911262 - RNA, 22 nt, Human
uuucggagggccugugggcuuc

SEQ ID NO: 911263 - RNA, 23 nt, Human
uuuuccucuucuugcccccccug

SEQ ID NO: 911264 - RNA, 23 nt, Human
aaaggagcaggugggugacagau

SEQ ID NO: 911265 - RNA, 23 nt, Human
aaccuagcccccaccccgcuaca

SEQ ID NO: 911266 - RNA, 19 nt, Human
aagggugggauuuaucugc

SEQ ID NO: 911267 - RNA, 21 nt, Human
acagagaacaccucucgccca

SEQ ID NO: 911268 - RNA, 18 nt, Human
acagcucaaggaagggug

SEQ ID NO: 911269 - RNA, 21 nt, Human
agcaacaugcccccccggcac

SEQ ID NO: 911270 - RNA, 22 nt, Human
agcaacaugcccccccggcacg

SEQ ID NO: 911271 - RNA, 20 nt, Human
agcaggugggugacagaugg

SEQ ID NO: 911272 - RNA, 19 nt, Human
aggcucaaggcucaagcag

SEQ ID NO: 911273 - RNA, 23 nt, Human
agggggaagcuccugaggcucag

SEQ ID NO: 911274 - RNA, 19 nt, Human
agggggagggggaagcucc

SEQ ID NO: 911275 - RNA, 23 nt, Human
caacagcugcaacuccuuucagc

SEQ ID NO: 911276 - RNA, 21 nt, Human
caacaugcccccccggcacgg

SEQ ID NO: 911277 - RNA, 18 nt, Human
caagacggggagaaggag

SEQ ID NO: 911278 - RNA, 18 nt, Human
cacagcacagagaacacc

SEQ ID NO: 911279 - RNA, 22 nt, Human
caccccgcuacagcuccccacu

SEQ ID NO: 911280 - RNA, 19 nt, Human
caccucucgcccaacaacu

SEQ ID NO: 911281 - RNA, 18 nt, Human
cagagcaccaaggggaag

SEQ ID NO: 911282 - RNA, 24 nt, Human
cagagcugaggcccaggagcagcu

SEQ ID NO: 911283 - RNA, 20 nt, Human
cagcaacaugcccccccggc

SEQ ID NO: 911284 - RNA, 20 nt, Human
cagcacagagaacaccucuc

SEQ ID NO: 911285 - RNA, 19 nt, Human
cauggagguauaccaaguc

SEQ ID NO: 911286 - RNA, 19 nt, Human
cccaagacggggagaagga

SEQ ID NO: 911287 - RNA, 22 nt, Human
ccccaacgagauaaacacagcc

SEQ ID NO: 911288 - RNA, 20 nt, Human
ccccaagacggggagaagga

SEQ ID NO: 911289 - RNA, 20 nt, Human
ccccaccccgcuacagcucc

SEQ ID NO: 911290 - RNA, 22 nt, Human
ccccaccccgcuacagcucccc

SEQ ID NO: 911291 - RNA, 19 nt, Human
ccccauucccuucccuucc

SEQ ID NO: 911292 - RNA, 23 nt, Human
ccccauucccuucccuucccagc

SEQ ID NO: 911293 - RNA, 24 nt, Human
cccccccggcacggccugcugccu

SEQ ID NO: 911294 - RNA, 23 nt, Human
ccccgcuacagcuccccacugaa

SEQ ID NO: 911295 - RNA, 18 nt, Human
cccugggcagagcugagg

SEQ ID NO: 911296 - RNA, 18 nt, Human
ccggggcggggccgcggg

SEQ ID NO: 911297 - RNA, 23 nt, Human
ccuagcccccaccccgcuacagc

SEQ ID NO: 911298 - RNA, 20 nt, Human
cugcugguccccaccucccc

SEQ ID NO: 911299 - RNA, 21 nt, Human
cuugcuucucccuucucccca

SEQ ID NO: 911300 - RNA, 19 nt, Human
gacagaugggcaggggcag

SEQ ID NO: 911301 - RNA, 21 nt, Human
gagcaggugggugacagaugg

SEQ ID NO: 911302 - RNA, 18 nt, Human
gcaggcucaggaggggag

SEQ ID NO: 911303 - RNA, 21 nt, Human
gcucaaggcucaagcagaggg

SEQ ID NO: 911304 - RNA, 18 nt, Human
ggagcagcugaaaggagg

SEQ ID NO: 911305 - RNA, 18 nt, Human
ggcucagacacugcuugc

SEQ ID NO: 911306 - RNA, 18 nt, Human
ggcuggcccugggcagag

SEQ ID NO: 911307 - RNA, 21 nt, Human
gggaagcuccugaggcucaga

SEQ ID NO: 911308 - RNA, 19 nt, Human
gggcagagcugaggcccag

SEQ ID NO: 911309 - RNA, 20 nt, Human
gggcagugaagaugacagca

SEQ ID NO: 911310 - RNA, 26 nt, Human
gggcagugaagaugacagcaggcuca

SEQ ID NO: 911311 - RNA, 24 nt, Human
ggguccucgagcugccugcagccu

SEQ ID NO: 911312 - RNA, 23 nt, Human
ggugggugacagaugggcagggg

SEQ ID NO: 911313 - RNA, 23 nt, Human
uagaacccguugcgcgccaaccg

SEQ ID NO: 911314 - RNA, 21 nt, Human
ucaaggaagggugggauuuau

SEQ ID NO: 911315 - RNA, 21 nt, Human
ucaggaggggagguggcagaa

SEQ ID NO: 911316 - RNA, 19 nt, Human
ucccagucaaggcucaagg

SEQ ID NO: 911317 - RNA, 24 nt, Human
uccccauucccuucccuucccagc

SEQ ID NO: 911318 - RNA, 19 nt, Human
ucccuucccuucccagcag

SEQ ID NO: 911319 - RNA, 20 nt, Human
uccugaggcucagacacugc

SEQ ID NO: 911320 - RNA, 21 nt, Human
ucugcuaucugccaggccgag

SEQ ID NO: 911321 - RNA, 20 nt, Human
ucugcugguccccaccuccc

SEQ ID NO: 911322 - RNA, 20 nt, Human
ugaaaggagguggaugggga

SEQ ID NO: 911323 - RNA, 18 nt, Human
ugcccccccggcacggcc

SEQ ID NO: 911324 - RNA, 23 nt, Human
ugcugguccccaccuccccaaga

SEQ ID NO: 911325 - RNA, 26 nt, Human
ugcuugcuucucccuucuccccauuc

SEQ ID NO: 911326 - RNA, 20 nt, Human
uucccagcagaaccuggcug

SEQ ID NO: 911327 - RNA, 22 nt, Human
aacuaccgggaaacuagugacc

SEQ ID NO: 911328 - RNA, 24 nt, Human
augugcagcugaacuaccgggaaa

SEQ ID NO: 911329 - RNA, 24 nt, Human
caaaacuuuuuauucaucagagcu

SEQ ID NO: 911330 - RNA, 20 nt, Human
cagcugaacuaccgggaaac

SEQ ID NO: 911331 - RNA, 22 nt, Human
caguacuggaaaucagagguaa

SEQ ID NO: 911332 - RNA, 21 nt, Human
ccaagccaaguacgccaccug

SEQ ID NO: 911333 - RNA, 25 nt, Human
cuagcacuacaaaaggcacaaugaa

SEQ ID NO: 911334 - RNA, 21 nt, Human
gggaaacuagugaccugcaga

SEQ ID NO: 911335 - RNA, 18 nt, Human
gugcagcugaacuaccgg

SEQ ID NO: 911336 - RNA, 25 nt, Human
ucagagguaacagcacauccuuccu

SEQ ID NO: 911337 - RNA, 26 nt, Human
ucagagguaacagcacauccuuccuu

SEQ ID NO: 911338 - RNA, 23 nt, Human
ugcuuuacucugcuguagugguc

SEQ ID NO: 911339 - RNA, 21 nt, Human
aacugcucauggccaucagga

SEQ ID NO: 911340 - RNA, 18 nt, Human
aacuucuauccucuccuc

SEQ ID NO: 911341 - RNA, 25 nt, Human
aagagauguccacauacuucucuca

SEQ ID NO: 911342 - RNA, 22 nt, Human
aaguauuggcagggagagguga

SEQ ID NO: 911343 - RNA, 19 nt, Human
acacaaggauuuaugggug

SEQ ID NO: 911344 - RNA, 21 nt, Human
acucuaagaagccaggaaagg

SEQ ID NO: 911345 - RNA, 24 nt, Human
acucuccacccucuuuuggaacag

SEQ ID NO: 911346 - RNA, 19 nt, Human
acuucuauccucuccucca

SEQ ID NO: 911347 - RNA, 18 nt, Human
agacugaagccgagcaga

SEQ ID NO: 911348 - RNA, 20 nt, Human
agagggacaggaaaagaaga

SEQ ID NO: 911349 - RNA, 22 nt, Human
agcugcagagggcagaagccug

SEQ ID NO: 911350 - RNA, 19 nt, Human
agggacaggaaaagaagag

SEQ ID NO: 911351 - RNA, 22 nt, Human
agggagcagauuugucugagca

SEQ ID NO: 911352 - RNA, 18 nt, Human
aggucccuggugcacucc

SEQ ID NO: 911353 - RNA, 19 nt, Human
aucaggcuccuaucugugu

SEQ ID NO: 911354 - RNA, 22 nt, Human
auuugguggcuaugaugcagga

SEQ ID NO: 911355 - RNA, 19 nt, Human
caaggauuuaugggugugg

SEQ ID NO: 911356 - RNA, 18 nt, Human
caggaaaggucccuggug

SEQ ID NO: 911357 - RNA, 22 nt, Human
ccaagccacuggucccauagac

SEQ ID NO: 911358 - RNA, 18 nt, Human
ccacuggucccauagaca

SEQ ID NO: 911359 - RNA, 20 nt, Human
ccagccccaggcagcuagaa

SEQ ID NO: 911360 - RNA, 18 nt, Human
cccucuuuuggaacagug

SEQ ID NO: 911361 - RNA, 22 nt, Human
ccuggccaaagaugcccaggga

SEQ ID NO: 911362 - RNA, 20 nt, Human
ccuggugcacuccacucucc

SEQ ID NO: 911363 - RNA, 21 nt, Human
cgguaacaggccgaugaacac

SEQ ID NO: 911364 - RNA, 24 nt, Human
cucucaugcuuggucagauuccac

SEQ ID NO: 911365 - RNA, 22 nt, Human
cugaagccgagcagagcauggc

SEQ ID NO: 911366 - RNA, 18 nt, Human
cuguguggccucagcccc

SEQ ID NO: 911367 - RNA, 19 nt, Human
gaaaagaagagauguccac

SEQ ID NO: 911368 - RNA, 20 nt, Human
gaaaagaagagauguccaca

SEQ ID NO: 911369 - RNA, 19 nt, Human
gccagccccaggcagcuag

SEQ ID NO: 911370 - RNA, 21 nt, Human
ggagaaaaugggcucguuuga

SEQ ID NO: 911371 - RNA, 18 nt, Human
gggaacacagguacuaac

SEQ ID NO: 911372 - RNA, 18 nt, Human
ucaccacuggcaucaggg

SEQ ID NO: 911373 - RNA, 23 nt, Human
ucccagcugcagagggcagaagc

SEQ ID NO: 911374 - RNA, 19 nt, Human
ucccauagacagaucucuc

SEQ ID NO: 911375 - RNA, 21 nt, Human
ucccauagacagaucucucuc

SEQ ID NO: 911376 - RNA, 24 nt, Human
ucccuggugcacuccacucuccac

SEQ ID NO: 911377 - RNA, 23 nt, Human
uccuccaucaggcuccuaucugu

SEQ ID NO: 911378 - RNA, 18 nt, Human
ucugagcagggccagccc

SEQ ID NO: 911379 - RNA, 25 nt, Human
ugaaaaaaaaugcaaauuaaaaaaa

SEQ ID NO: 911380 - RNA, 21 nt, Human
uggugcacuccacucuccaca

SEQ ID NO: 911381 - RNA, 22 nt, Human
uggugcacuccacucuccacag

SEQ ID NO: 911382 - RNA, 22 nt, Human
uucacuggacuuuuggccccaa

SEQ ID NO: 911383 - RNA, 20 nt, Human
uuggccccaaaugaaaaaaa

SEQ ID NO: 911384 - RNA, 21 nt, Human
uuuuuuuuuuuuggaguuuca

SEQ ID NO: 911385 - RNA, 23 nt, Human
uuuuuuuuuuuuuuuuuggaguu

SEQ ID NO: 911386 - RNA, 28 nt, Human
uuuuuuuuuuuuuuuuuuuuuuuggggg

SEQ ID NO: 911387 - RNA, 24 nt, Human
aaagccuagucaccacuucaaaac

SEQ ID NO: 911388 - RNA, 20 nt, Human
aaauguauggaggaugaauu

SEQ ID NO: 911389 - RNA, 20 nt, Human
aacaacuugaauucaaaugu

SEQ ID NO: 911390 - RNA, 20 nt, Human
aacuuucucccacugggguu

SEQ ID NO: 911391 - RNA, 18 nt, Human
aaggaaaaaaaaaaguug

SEQ ID NO: 911392 - RNA, 20 nt, Human
acaacuggaucaauucagaa

SEQ ID NO: 911393 - RNA, 22 nt, Human
accaauucaauaccauucuaca

SEQ ID NO: 911394 - RNA, 20 nt, Human
accccacccacuuaaaauua

SEQ ID NO: 911395 - RNA, 18 nt, Human
agaaccauggaaauggag

SEQ ID NO: 911396 - RNA, 19 nt, Human
agaauuccagacugcacca

SEQ ID NO: 911397 - RNA, 20 nt, Human
agaggguaccgaaaccgcag

SEQ ID NO: 911398 - RNA, 22 nt, Human
agagugaagagaauacagcaau

SEQ ID NO: 911399 - RNA, 22 nt, Human
agaucauuuauuggcaaauacu

SEQ ID NO: 911400 - RNA, 24 nt, Human
agccaauuaagaacacucaugaaa

SEQ ID NO: 911401 - RNA, 22 nt, Human
aggagggguaggggcaaugggg

SEQ ID NO: 911402 - RNA, 23 nt, Human
aggcauaggagugugaaucuggg

SEQ ID NO: 911403 - RNA, 21 nt, Human
aggcggcggcggugguggugg

SEQ ID NO: 911404 - RNA, 20 nt, Human
aggcggcggcuguggcggcg

SEQ ID NO: 911405 - RNA, 21 nt, Human
aggcggcggcuguggcggcgg

SEQ ID NO: 911406 - RNA, 22 nt, Human
aggcggcggcuguggcggcggg

SEQ ID NO: 911407 - RNA, 23 nt, Human
aggcggcggcuguggcggcgggu

SEQ ID NO: 911408 - RNA, 19 nt, Human
agggggaggaggaggaggg

SEQ ID NO: 911409 - RNA, 23 nt, Human
agggggaggaggaggaggugggc

SEQ ID NO: 911410 - RNA, 18 nt, Human
agguggucacauuucaug

SEQ ID NO: 911411 - RNA, 22 nt, Human
aguggcgguuguggugcuggug

SEQ ID NO: 911412 - RNA, 19 nt, Human
aucagacuaauucuccuuu

SEQ ID NO: 911413 - RNA, 24 nt, Human
auccuuuuauaugauuuuuaaagg

SEQ ID NO: 911414 - RNA, 22 nt, Human
augaugcugaugaaaagugaaa

SEQ ID NO: 911415 - RNA, 22 nt, Human
augccagggcuacagacaacgg

SEQ ID NO: 911416 - RNA, 23 nt, Human
auuuaucagaggucacucauccu

SEQ ID NO: 911417 - RNA, 23 nt, Human
caaaauggagucucagcaaccag

SEQ ID NO: 911418 - RNA, 19 nt, Human
caaauacucuguugcucuc

SEQ ID NO: 911419 - RNA, 22 nt, Human
caacuggaucaauucagaaguc

SEQ ID NO: 911420 - RNA, 23 nt, Human
caaggguuuuuccugcuccuggg

SEQ ID NO: 911421 - RNA, 30 nt, Human
caauggcaguagcaaagaauuaaacagaag

SEQ ID NO: 911422 - RNA, 19 nt, Human
cacagcauuguaagaaguu

SEQ ID NO: 911423 - RNA, 21 nt, Human
caccacuucaaaacacacuaa

SEQ ID NO: 911424 - RNA, 18 nt, Human
caccauauagauguggcc

SEQ ID NO: 911425 - RNA, 18 nt, Human
cacccccucuucaccugg

SEQ ID NO: 911426 - RNA, 23 nt, Human
cacccugcagcuugaagaucaau

SEQ ID NO: 911427 - RNA, 25 nt, Human
cacgcacucuuauggccggugugcu

SEQ ID NO: 911428 - RNA, 20 nt, Human
cacugguugguaaacucugu

SEQ ID NO: 911429 - RNA, 21 nt, Human
cagcagcauauuuucccuaau

SEQ ID NO: 911430 - RNA, 22 nt, Human
caugcaagaguccaucugagag

SEQ ID NO: 911431 - RNA, 19 nt, Human
cauggcucggacgaacagg

SEQ ID NO: 911432 - RNA, 22 nt, Human
ccaauucaauaccauucuacaa

SEQ ID NO: 911433 - RNA, 18 nt, Human
ccggugugcuuggaguug

SEQ ID NO: 911434 - RNA, 18 nt, Human
ccucaaaggugauugaga

SEQ ID NO: 911435 - RNA, 18 nt, Human
ccugcagcuugaagauca

SEQ ID NO: 911436 - RNA, 22 nt, Human
cuaaauaaccccacccacuuaa

SEQ ID NO: 911437 - RNA, 18 nt, Human
cuccucucuccacacauc

SEQ ID NO: 911438 - RNA, 21 nt, Human
cucuguauccaucuacuggau

SEQ ID NO: 911439 - RNA, 18 nt, Human
cugggaauacugugugcu

SEQ ID NO: 911440 - RNA, 20 nt, Human
cuggguaggucggguacgcg

SEQ ID NO: 911441 - RNA, 29 nt, Human
cuuaacaugcaagaguccaucugagagag

SEQ ID NO: 911442 - RNA, 26 nt, Human
cuuugaacuuucucccacugggguuu

SEQ ID NO: 911443 - RNA, 18 nt, Human
gaaagccuagucaccacu

SEQ ID NO: 911444 - RNA, 19 nt, Human
gaacaggaugaauuauuau

SEQ ID NO: 911445 - RNA, 21 nt, Human
gaacagggugugucugcccgg

SEQ ID NO: 911446 - RNA, 22 nt, Human
gaagacaacucuuguguugucc

SEQ ID NO: 911447 - RNA, 20 nt, Human
gaagccuuuccacacugcac

SEQ ID NO: 911448 - RNA, 21 nt, Human
gacagggaagaauggagacug

SEQ ID NO: 911449 - RNA, 24 nt, Human
gagauauacaccauguuguuuucu

SEQ ID NO: 911450 - RNA, 20 nt, Human
gagggcagagauccugaagg

SEQ ID NO: 911451 - RNA, 22 nt, Human
gauauacaccauguuguuuucu

SEQ ID NO: 911452 - RNA, 27 nt, Human
gauggaggcggcggcgguggugguggu

SEQ ID NO: 911453 - RNA, 24 nt, Human
gcaagaaaagucauguccuccucc

SEQ ID NO: 911454 - RNA, 23 nt, Human
gcacaugccagggcuacagacaa

SEQ ID NO: 911455 - RNA, 18 nt, Human
gcagcagggucaauggca

SEQ ID NO: 911456 - RNA, 20 nt, Human
ggaauaaauuuugagggcag

SEQ ID NO: 911457 - RNA, 22 nt, Human
ggacacacgcacucuuauggcc

SEQ ID NO: 911458 - RNA, 20 nt, Human
ggacaucagaggugucacug

SEQ ID NO: 911459 - RNA, 23 nt, Human
ggaggcggcggcggugguggugg

SEQ ID NO: 911460 - RNA, 21 nt, Human
ggagggggaggaggaggaggu

SEQ ID NO: 911461 - RNA, 24 nt, Human
ggagggggaggaggaggagguggg

SEQ ID NO: 911462 - RNA, 22 nt, Human
ggagggguaggggcaauggggu

SEQ ID NO: 911463 - RNA, 21 nt, Human
ggaggugggcagucgggaccc

SEQ ID NO: 911464 - RNA, 18 nt, Human
ggcggcgguggugguggu

SEQ ID NO: 911465 - RNA, 21 nt, Human
ggcuggcgguaccagugugga

SEQ ID NO: 911466 - RNA, 22 nt, Human
gggacugaagaugaaaugccca

SEQ ID NO: 911467 - RNA, 19 nt, Human
gggcaaugggguucagugg

SEQ ID NO: 911468 - RNA, 23 nt, Human
ggggacugaagaugaaaugccca

SEQ ID NO: 911469 - RNA, 26 nt, Human
ggggcaaugggguucagugguaggag

SEQ ID NO: 911470 - RNA, 18 nt, Human
gggggagggggaggagga

SEQ ID NO: 911471 - RNA, 23 nt, Human
guggaggcggcggcuguggcggc

SEQ ID NO: 911472 - RNA, 24 nt, Human
guggugguggaggcggcggcugug

SEQ ID NO: 911473 - RNA, 20 nt, Human
gugguggugguggaggcggc

SEQ ID NO: 911474 - RNA, 18 nt, Human
guguggcagcaaaaugga

SEQ ID NO: 911475 - RNA, 19 nt, Human
guuguccguugcuuugagu

SEQ ID NO: 911476 - RNA, 22 nt, Human
uaaaacaacaaagaacuuucag

SEQ ID NO: 911477 - RNA, 25 nt, Human
uaaaacaacaaagaacuuucagucu

SEQ ID NO: 911478 - RNA, 27 nt, Human
uaaccaaacuucaaaaccucguagacg

SEQ ID NO: 911479 - RNA, 20 nt, Human
uaauucuccuuuuuuccacu

SEQ ID NO: 911480 - RNA, 21 nt, Human
uagauggugauggagguuuug

SEQ ID NO: 911481 - RNA, 24 nt, Human
uagcaguaauuuaucagaggucac

SEQ ID NO: 911482 - RNA, 22 nt, Human
uaguaauaccucacugguuggu

SEQ ID NO: 911483 - RNA, 26 nt, Human
ucaaaacacacuaaaaauuauacuaa

SEQ ID NO: 911484 - RNA, 23 nt, Human
ucaccacuucaaaacacacuaaa

SEQ ID NO: 911485 - RNA, 24 nt, Human
ucaguguacguugccaggugugcu

SEQ ID NO: 911486 - RNA, 20 nt, Human
ucauguccuccuccuccucg

SEQ ID NO: 911487 - RNA, 21 nt, Human
ucauguccuccuccuccucgu

SEQ ID NO: 911488 - RNA, 19 nt, Human
uccagacugcaccauauag

SEQ ID NO: 911489 - RNA, 24 nt, Human
ucuaaaacacaugagugauugaca

SEQ ID NO: 911490 - RNA, 21 nt, Human
ucuaacuucuuuagauaucaa

SEQ ID NO: 911491 - RNA, 20 nt, Human
ucugaugugagaugucugug

SEQ ID NO: 911492 - RNA, 23 nt, Human
ucuuccaaaacgucagcuggugc

SEQ ID NO: 911493 - RNA, 18 nt, Human
ugaaaucuuuaaggauag

SEQ ID NO: 911494 - RNA, 22 nt, Human
ugaaaugcccagaugcauaugg

SEQ ID NO: 911495 - RNA, 19 nt, Human
ugaauucaaauguauggag

SEQ ID NO: 911496 - RNA, 20 nt, Human
ugacaaaaaacaacuugaau

SEQ ID NO: 911497 - RNA, 19 nt, Human
ugacagcaccucucgguga

SEQ ID NO: 911498 - RNA, 21 nt, Human
ugagugaaaggaaacuuaacc

SEQ ID NO: 911499 - RNA, 20 nt, Human
ugaucagacuaauucuccuu

SEQ ID NO: 911500 - RNA, 24 nt, Human
ugauuccauugaaggaaaaaaaaa

SEQ ID NO: 911501 - RNA, 21 nt, Human
ugcaaguguggagaugaggca

SEQ ID NO: 911502 - RNA, 24 nt, Human
ugccaaaaaguuaaucacaagcuu

SEQ ID NO: 911503 - RNA, 19 nt, Human
ugcuuugaguccuuugagu

SEQ ID NO: 911504 - RNA, 19 nt, Human
uggaaaaaugagagaucau

SEQ ID NO: 911505 - RNA, 18 nt, Human
uggaggcggcggcggugg

SEQ ID NO: 911506 - RNA, 21 nt, Human
uggaggcggcggcgguggugg

SEQ ID NO: 911507 - RNA, 23 nt, Human
uggaggcggcggcggugguggug

SEQ ID NO: 911508 - RNA, 18 nt, Human
uggaucaauucagaaguc

SEQ ID NO: 911509 - RNA, 19 nt, Human
uggaucagggacuuucuga

SEQ ID NO: 911510 - RNA, 23 nt, Human
uggcagguaaaacccagacuucc

SEQ ID NO: 911511 - RNA, 22 nt, Human
uggcuuccuuaauaaggccuca

SEQ ID NO: 911512 - RNA, 21 nt, Human
ugggagaaccagucgaguugc

SEQ ID NO: 911513 - RNA, 21 nt, Human
ugggagcgauggugguauugg

SEQ ID NO: 911514 - RNA, 26 nt, Human
ugggguucagugguaggaggagggcu

SEQ ID NO: 911515 - RNA, 19 nt, Human
uggugguggaggcggcggc

SEQ ID NO: 911516 - RNA, 18 nt, Human
ugguggugguggaggcgg

SEQ ID NO: 911517 - RNA, 22 nt, Human
ugguggugguggaggcggcggc

SEQ ID NO: 911518 - RNA, 21 nt, Human
uguguguggcagcaaaaugga

SEQ ID NO: 911519 - RNA, 24 nt, Human
uuagcaaauagagagaaauauaga

SEQ ID NO: 911520 - RNA, 21 nt, Human
uuaucacuuuuauaacuucca

SEQ ID NO: 911521 - RNA, 22 nt, Human
uucaaauguauggaggaugaau

SEQ ID NO: 911522 - RNA, 20 nt, Human
uuccaagugaucaucacagg

SEQ ID NO: 911523 - RNA, 24 nt, Human
uucgugaucaaugaaguugccaga

SEQ ID NO: 911524 - RNA, 22 nt, Human
uugagggcagagauccugaagg

SEQ ID NO: 911525 - RNA, 20 nt, Human
uugcucccuuucuaacuucu

SEQ ID NO: 911526 - RNA, 19 nt, Human
uuggguaugggauuuugga

SEQ ID NO: 911527 - RNA, 25 nt, Human
uuuaaggauagcaauuauaggguaa

SEQ ID NO: 911528 - RNA, 20 nt, Human
uuuguggaagccaucauggc

SEQ ID NO: 911529 - RNA, 25 nt, Human
uuuguuggaaaaugccaaaaaaaau

SEQ ID NO: 911530 - RNA, 19 nt, Human
aaaaaaccaaaccacaaaa

SEQ ID NO: 911531 - RNA, 25 nt, Human
aaaaaagagacaccaaugugucuaa

SEQ ID NO: 911532 - RNA, 18 nt, Human
aaaaggaaaggaaaaaag

SEQ ID NO: 911533 - RNA, 23 nt, Human
aaaaggccauggagagagaauuu

SEQ ID NO: 911534 - RNA, 18 nt, Human
aaacagcaaaacuaagua

SEQ ID NO: 911535 - RNA, 22 nt, Human
aaaugaaagucaaacugacagg

SEQ ID NO: 911536 - RNA, 21 nt, Human
aaaugacccugaccagauuuu

SEQ ID NO: 911537 - RNA, 25 nt, Human
aacaaaaaaaaccaaaccacaaaaa

SEQ ID NO: 911538 - RNA, 18 nt, Human
aacuaaaauugaaaagcc

SEQ ID NO: 911539 - RNA, 23 nt, Human
aagacugguaaaacugcaaauaa

SEQ ID NO: 911540 - RNA, 19 nt, Human
aagcgacuccaaaaggcca

SEQ ID NO: 911541 - RNA, 26 nt, Human
aauuugaagucacagaaaauauuuua

SEQ ID NO: 911542 - RNA, 22 nt, Human
acaaaaaaaaccaaaccacaaa

SEQ ID NO: 911543 - RNA, 23 nt, Human
acaaaaaacaaaaaaaaccaaac

SEQ ID NO: 911544 - RNA, 20 nt, Human
acaaaaacagcaaaacuaau

SEQ ID NO: 911545 - RNA, 22 nt, Human
acaaaacuuuucaccccaaauc

SEQ ID NO: 911546 - RNA, 19 nt, Human
acaagaauccauuuuggac

SEQ ID NO: 911547 - RNA, 20 nt, Human
accaaaccacaaaaacagca

SEQ ID NO: 911548 - RNA, 24 nt, Human
acuccaaaaggccauggagagaga

SEQ ID NO: 911549 - RNA, 22 nt, Human
acugcacuccaauucuccaaug

SEQ ID NO: 911550 - RNA, 24 nt, Human
agacaccaaugugucuaacuguuc

SEQ ID NO: 911551 - RNA, 19 nt, Human
aggaagaauaagagauucu

SEQ ID NO: 911552 - RNA, 20 nt, Human
aggaaggaaaaggaaucuug

SEQ ID NO: 911553 - RNA, 19 nt, Human
aggaauaggaagaauaaga

SEQ ID NO: 911554 - RNA, 18 nt, Human
aggcaucuagcacucuag

SEQ ID NO: 911555 - RNA, 21 nt, Human
augaagacugguaaaacugca

SEQ ID NO: 911556 - RNA, 24 nt, Human
augccgucgccgccgccgccgucu

SEQ ID NO: 911557 - RNA, 20 nt, Human
auggaguaaaccacaccgcc

SEQ ID NO: 911558 - RNA, 18 nt, Human
auuugaagucacagaaaa

SEQ ID NO: 911559 - RNA, 25 nt, Human
caaaaaaaaccaaaccacaaaaaca

SEQ ID NO: 911560 - RNA, 25 nt, Human
caaaaacagcaaaacuaaguaaaau

SEQ ID NO: 911561 - RNA, 25 nt, Human
caaaacaaaaaacaaaaaaaaccaa

SEQ ID NO: 911562 - RNA, 19 nt, Human
caaaaggaaaggaaaaaag

SEQ ID NO: 911563 - RNA, 25 nt, Human
caaaccacaaaaacagcaaaacuaa

SEQ ID NO: 911564 - RNA, 20 nt, Human
cacaaaaacagcaaaacuaa

SEQ ID NO: 911565 - RNA, 18 nt, Human
cacuuuauuagggaugac

SEQ ID NO: 911566 - RNA, 20 nt, Human
caguugaaaugaaacuaccg

SEQ ID NO: 911567 - RNA, 21 nt, Human
caugaagacugguaaaacugc

SEQ ID NO: 911568 - RNA, 19 nt, Human
ccaaaucuguuccuccuuu

SEQ ID NO: 911569 - RNA, 18 nt, Human
ccacaaaaacagcaaaac

SEQ ID NO: 911570 - RNA, 22 nt, Human
cccaaaucuguuccuccuuuuu

SEQ ID NO: 911571 - RNA, 18 nt, Human
cccaccuuuucuuggaaa

SEQ ID NO: 911572 - RNA, 18 nt, Human
ccgucgccgccgccgccg

SEQ ID NO: 911573 - RNA, 21 nt, Human
ccuccuuuuucuugccacucc

SEQ ID NO: 911574 - RNA, 22 nt, Human
ccucuuguggaaaaaagaaaau

SEQ ID NO: 911575 - RNA, 19 nt, Human
cugacaggggaaaaaggca

SEQ ID NO: 911576 - RNA, 23 nt, Human
cuugagaaauuuguuuggaggcu

SEQ ID NO: 911577 - RNA, 25 nt, Human
gaaacaucaaaaguauggauaagcc

SEQ ID NO: 911578 - RNA, 19 nt, Human
gauagaaggaaggaaaagg

SEQ ID NO: 911579 - RNA, 19 nt, Human
gccgucgccgccgccgccg

SEQ ID NO: 911580 - RNA, 19 nt, Human
gccgucgccgccgccgccg

SEQ ID NO: 911581 - RNA, 19 nt, Human
gccgucgccgccgccgccg

SEQ ID NO: 911582 - RNA, 21 nt, Human
ggauagaaggaaggaaaagga

SEQ ID NO: 911583 - RNA, 21 nt, Human
ggcagaaaauggauagaagga

SEQ ID NO: 911584 - RNA, 24 nt, Human
ggcagaaaauggauagaagggacc

SEQ ID NO: 911585 - RNA, 20 nt, Human
gggaaaaaggcaucuagcac

SEQ ID NO: 911586 - RNA, 19 nt, Human
guaauaaauucuguaauuu

SEQ ID NO: 911587 - RNA, 25 nt, Human
uacagcaagcgacuccaaaaggcca

SEQ ID NO: 911588 - RNA, 22 nt, Human
uaccugugaaaauaaaaaucca

SEQ ID NO: 911589 - RNA, 19 nt, Human
uagcagacacuuuauuagg

SEQ ID NO: 911590 - RNA, 22 nt, Human
uagcagacacuuuauuagggau

SEQ ID NO: 911591 - RNA, 24 nt, Human
uauauucauuuccacaccuuuuua

SEQ ID NO: 911592 - RNA, 25 nt, Human
uaugggcagaaaauggauagaagga

SEQ ID NO: 911593 - RNA, 22 nt, Human
uauuagggaugaccaaaacaaa

SEQ ID NO: 911594 - RNA, 23 nt, Human
ucuaauauauaaaugacccugac

SEQ ID NO: 911595 - RNA, 19 nt, Human
ucuacacaguuucgucacu

SEQ ID NO: 911596 - RNA, 19 nt, Human
ucucuuuugucaucaaagg

SEQ ID NO: 911597 - RNA, 19 nt, Human
ucuguaauuuauucuacca

SEQ ID NO: 911598 - RNA, 23 nt, Human
ugaagaggagacaagaauccauu

SEQ ID NO: 911599 - RNA, 19 nt, Human
ugaccaaaacaaaaaacaa

SEQ ID NO: 911600 - RNA, 25 nt, Human
ugaccaaaacaaaaaacaaaaaaaa

SEQ ID NO: 911601 - RNA, 30 nt, Human
ugaccaaaacaaaaaacaaaaaaaaccaag

SEQ ID NO: 911602 - RNA, 18 nt, Human
ugacugcacuccaauucu

SEQ ID NO: 911603 - RNA, 18 nt, Human
uggaaaacugacaugugu

SEQ ID NO: 911604 - RNA, 23 nt, Human
uggaccauaaaugugagaaauuc

SEQ ID NO: 911605 - RNA, 18 nt, Human
ugugaaaauaaaaaucca

SEQ ID NO: 911606 - RNA, 21 nt, Human
uguggaaaaaagaaaauuuuu

SEQ ID NO: 911607 - RNA, 22 nt, Human
uguggaaaaaagaaaauuuuua

SEQ ID NO: 911608 - RNA, 20 nt, Human
uuaaaugaaagucaaacuga

SEQ ID NO: 911609 - RNA, 18 nt, Human
uuaacauuuacaguuugu

SEQ ID NO: 911610 - RNA, 21 nt, Human
uucaacuaaaauugaaaagcc

SEQ ID NO: 911611 - RNA, 23 nt, Human
uugaaaugaaacuaccgauucaa

SEQ ID NO: 911612 - RNA, 25 nt, Human
uugaauaaacaaguuauuuuaaaua

SEQ ID NO: 911613 - RNA, 22 nt, Human
uugagaaauuuguuuggaggcu

SEQ ID NO: 911614 - RNA, 22 nt, Human
uuuaugaaaaaaaggggaaauu

SEQ ID NO: 911615 - RNA, 22 nt, Human
uuuguaaauaugacuucacuau

SEQ ID NO: 911616 - RNA, 18 nt, Human
uuuuuuuuuuuuuuuucg

SEQ ID NO: 911617 - RNA, 19 nt, Human
uuuuuuuuuuuuuuuucgu

SEQ ID NO: 911618 - RNA, 19 nt, Human
aaaaaaaaaaaaaaaaaga

SEQ ID NO: 911619 - RNA, 19 nt, Human
aaaaaaaaaaaaaagaaaa

SEQ ID NO: 911620 - RNA, 24 nt, Human
aaaaaaagaaaaaauauccuggaa

SEQ ID NO: 911621 - RNA, 20 nt, Human
aaaaacacuaaaaggaaggc

SEQ ID NO: 911622 - RNA, 22 nt, Human
aaaaacacuaaaaggaaggccg

SEQ ID NO: 911623 - RNA, 25 nt, Human
aaaaagauuugauguagugcaacug

SEQ ID NO: 911624 - RNA, 18 nt, Human
aaaaauugagagaauuug

SEQ ID NO: 911625 - RNA, 22 nt, Human
aaaacaaaaacaaugcaaaaga

SEQ ID NO: 911626 - RNA, 25 nt, Human
aaaacaaaaacagaaacaaaaacaa

SEQ ID NO: 911627 - RNA, 20 nt, Human
aaaacaaaaugaaacaaaaa

SEQ ID NO: 911628 - RNA, 28 nt, Human
aaaacaaaaugaaacaaaaaacagagcc

SEQ ID NO: 911629 - RNA, 20 nt, Human
aaaagaaaauucagaacagu

SEQ ID NO: 911630 - RNA, 20 nt, Human
aaaagcagcuaugauaaaac

SEQ ID NO: 911631 - RNA, 20 nt, Human
aaaaugaaacaaaaaacaga

SEQ ID NO: 911632 - RNA, 21 nt, Human
aaaauggaagggaagucaaga

SEQ ID NO: 911633 - RNA, 26 nt, Human
aaacaaaaaacagagccuuauagacc

SEQ ID NO: 911634 - RNA, 22 nt, Human
aaacaaaaacaaaaacaaugca

SEQ ID NO: 911635 - RNA, 25 nt, Human
aaacaaaaacagaaacaaaaacaaa

SEQ ID NO: 911636 - RNA, 22 nt, Human
aaacaagaaagggacagccugg

SEQ ID NO: 911637 - RNA, 23 nt, Human
aaacaccucucgucacccuagau

SEQ ID NO: 911638 - RNA, 25 nt, Human
aaacagaaacaaaaacaaaaacaaa

SEQ ID NO: 911639 - RNA, 27 nt, Human
aaacagaaacaaaaacaaaaacaaugc

SEQ ID NO: 911640 - RNA, 20 nt, Human
aaacagaagguuuagauaau

SEQ ID NO: 911641 - RNA, 21 nt, Human
aaacagagccuuauagacccg

SEQ ID NO: 911642 - RNA, 24 nt, Human
aaacagagccuuauagacccgugc

SEQ ID NO: 911643 - RNA, 19 nt, Human
aaacauguauucaugcccu

SEQ ID NO: 911644 - RNA, 20 nt, Human
aaacccagaguuaaggcugg

SEQ ID NO: 911645 - RNA, 19 nt, Human
aaagaaggcagcaaccugg

SEQ ID NO: 911646 - RNA, 18 nt, Human
aaaggagcauauaaaaug

SEQ ID NO: 911647 - RNA, 27 nt, Human
aaauacacuaaaaacaccucucgucac

SEQ ID NO: 911648 - RNA, 22 nt, Human
aaaugccaacuggcacagacaa

SEQ ID NO: 911649 - RNA, 18 nt, Human
aacaccucucgucacccu

SEQ ID NO: 911650 - RNA, 23 nt, Human
aacagaaaaucauucauccuagc

SEQ ID NO: 911651 - RNA, 20 nt, Human
aacagagcaagacuccaucu

SEQ ID NO: 911652 - RNA, 24 nt, Human
aacaguuuugccccaccaccaccc

SEQ ID NO: 911653 - RNA, 19 nt, Human
aacauggugaaaccccauc

SEQ ID NO: 911654 - RNA, 20 nt, Human
aacauggugaaaccccaucu

SEQ ID NO: 911655 - RNA, 21 nt, Human
aacauggugaaaccccaucuc

SEQ ID NO: 911656 - RNA, 21 nt, Human
aacauggugaaaccccaucuc

SEQ ID NO: 911657 - RNA, 19 nt, Human
aacauggugaaaccccguc

SEQ ID NO: 911658 - RNA, 20 nt, Human
aacauggugaaaccccgucu

SEQ ID NO: 911659 - RNA, 21 nt, Human
aacauggugaaaccccgucuc

SEQ ID NO: 911660 - RNA, 23 nt, Human
aaccacuugaacccgggaggagg

SEQ ID NO: 911661 - RNA, 24 nt, Human
aaccugggcaacagagcaagacuc

SEQ ID NO: 911662 - RNA, 18 nt, Human
aagaucacuugaggucag

SEQ ID NO: 911663 - RNA, 24 nt, Human
aagaucacuugaggucaggaguuc

SEQ ID NO: 911664 - RNA, 18 nt, Human
aagcagcuaugauaaaac

SEQ ID NO: 911665 - RNA, 21 nt, Human
aagcagcuaugauaaaacuga

SEQ ID NO: 911666 - RNA, 18 nt, Human
aagcagugucaauaaaag

SEQ ID NO: 911667 - RNA, 25 nt, Human
aaggugggaagaucacuugagguca

SEQ ID NO: 911668 - RNA, 24 nt, Human
aaucgcuugaacccgggaggcaga

SEQ ID NO: 911669 - RNA, 20 nt, Human
aaucuguuuccucaucucug

SEQ ID NO: 911670 - RNA, 23 nt, Human
aaucuuuguucacuggucaggag

SEQ ID NO: 911671 - RNA, 18 nt, Human
aauuagccaggcauggug

SEQ ID NO: 911672 - RNA, 21 nt, Human
acaaaacaugagaagacugug

SEQ ID NO: 911673 - RNA, 24 nt, Human
acaaaacaugagaagacugugaaa

SEQ ID NO: 911674 - RNA, 21 nt, Human
acaacuuuucaaacuaaagga

SEQ ID NO: 911675 - RNA, 24 nt, Human
acagagcaagacuccaucucaaaa

SEQ ID NO: 911676 - RNA, 24 nt, Human
acagagcaagacuccauuucaaaa

SEQ ID NO: 911677 - RNA, 20 nt, Human
acagagugagacuccgucuc

SEQ ID NO: 911678 - RNA, 22 nt, Human
acagagugagacuccgucucaa

SEQ ID NO: 911679 - RNA, 24 nt, Human
acagagugagacuccgucucaaga

SEQ ID NO: 911680 - RNA, 24 nt, Human
accaauauauugcuauuucaccau

SEQ ID NO: 911681 - RNA, 21 nt, Human
accacaguuuauauccaaaaa

SEQ ID NO: 911682 - RNA, 19 nt, Human
accacugcacuccagccug

SEQ ID NO: 911683 - RNA, 24 nt, Human
accacugcacuccagccuggguga

SEQ ID NO: 911684 - RNA, 18 nt, Human
acccacaccaacgaaagc

SEQ ID NO: 911685 - RNA, 20 nt, Human
acccagaucgcaccacugca

SEQ ID NO: 911686 - RNA, 24 nt, Human
accccgucucuacuaaaaauacaa

SEQ ID NO: 911687 - RNA, 23 nt, Human
accugggcaacagagcaagacuc

SEQ ID NO: 911688 - RNA, 24 nt, Human
accuggucucuacuaaaaauacaa

SEQ ID NO: 911689 - RNA, 21 nt, Human
acgaagaacagcaauaauuaa

SEQ ID NO: 911690 - RNA, 24 nt, Human
acuccagccugggcgacagaguga

SEQ ID NO: 911691 - RNA, 18 nt, Human
acugcacuccaaccuggg

SEQ ID NO: 911692 - RNA, 24 nt, Human
acugcacuccaaccugggcaacag

SEQ ID NO: 911693 - RNA, 24 nt, Human
acugcacuccagccugggcgacag

SEQ ID NO: 911694 - RNA, 26 nt, Human
acugcacuccagccugggcgacagag

SEQ ID NO: 911695 - RNA, 24 nt, Human
acugcacuccagccugggugacag

SEQ ID NO: 911696 - RNA, 26 nt, Human
acugcacuccagccugggugacagag

SEQ ID NO: 911697 - RNA, 22 nt, Human
acuuccacccccacccagcaau

SEQ ID NO: 911698 - RNA, 24 nt, Human
acuugaggucaggaguucaagacc

SEQ ID NO: 911699 - RNA, 22 nt, Human
agaaaacaguuuugccccacca

SEQ ID NO: 911700 - RNA, 20 nt, Human
agaaaaucauucauccuagc

SEQ ID NO: 911701 - RNA, 26 nt, Human
agaaaaucauucauccuagcaagaac

SEQ ID NO: 911702 - RNA, 21 nt, Human
agaaccacuugaacccgggag

SEQ ID NO: 911703 - RNA, 24 nt, Human
agacagaagaaagaguaaagcuga

SEQ ID NO: 911704 - RNA, 26 nt, Human
agacagaagaaagaguaaaggggacc

SEQ ID NO: 911705 - RNA, 22 nt, Human
agacugugaaaaguggagagaa

SEQ ID NO: 911706 - RNA, 23 nt, Human
agacuuccacccccacccagcaa

SEQ ID NO: 911707 - RNA, 19 nt, Human
agagagccuuaaaauauga

SEQ ID NO: 911708 - RNA, 20 nt, Human
agagaggcucucucguccuu

SEQ ID NO: 911709 - RNA, 24 nt, Human
agagcuugcagugagccaaaauug

SEQ ID NO: 911710 - RNA, 18 nt, Human
agaggcugggagcagugg

SEQ ID NO: 911711 - RNA, 20 nt, Human
agagguugcagugaacccag

SEQ ID NO: 911712 - RNA, 24 nt, Human
agagguugcagugaacccagaucg

SEQ ID NO: 911713 - RNA, 23 nt, Human
agauaaucaauaggugccaaaac

SEQ ID NO: 911714 - RNA, 22 nt, Human
agaucacuugaggucaggaguu

SEQ ID NO: 911715 - RNA, 23 nt, Human
agaucacuugaggucaggaguuc

SEQ ID NO: 911716 - RNA, 23 nt, Human
agaucacuugaugucaggaguuc

SEQ ID NO: 911717 - RNA, 21 nt, Human
agauugggguggggagagagg

SEQ ID NO: 911718 - RNA, 20 nt, Human
agcaaaucaagucacucucc

SEQ ID NO: 911719 - RNA, 20 nt, Human
agcacuuugggaggucgagg

SEQ ID NO: 911720 - RNA, 23 nt, Human
agcagggcgugguggcacgugcc

SEQ ID NO: 911721 - RNA, 23 nt, Human
agccgggcgugguggcacaugcc

SEQ ID NO: 911722 - RNA, 22 nt, Human
agccuggccaacauggugaaac

SEQ ID NO: 911723 - RNA, 24 nt, Human
agccuggccaacauggugaaaccc

SEQ ID NO: 911724 - RNA, 19 nt, Human
agccugggcaacaugguga

SEQ ID NO: 911725 - RNA, 22 nt, Human
agccugggcaacauggugaaac

SEQ ID NO: 911726 - RNA, 24 nt, Human
agccugggcaacauggugaaaccc

SEQ ID NO: 911727 - RNA, 24 nt, Human
agccugggcgacagagugagacuc

SEQ ID NO: 911728 - RNA, 24 nt, Human
agccugggugacagagcaagacuc

SEQ ID NO: 911729 - RNA, 20 nt, Human
agcuaugauaaaacugaaca

SEQ ID NO: 911730 - RNA, 23 nt, Human
aggaaaaacaaaaugaaacaaaa

SEQ ID NO: 911731 - RNA, 23 nt, Human
aggaaggcaucaaauuagacuau

SEQ ID NO: 911732 - RNA, 24 nt, Human
aggaggagguugcagugagccgag

SEQ ID NO: 911733 - RNA, 21 nt, Human
aggaggggagagaagaaacuu

SEQ ID NO: 911734 - RNA, 23 nt, Human
aggaguucgagaccagccugggc

SEQ ID NO: 911735 - RNA, 22 nt, Human
aggauaggugauucaaaaacac

SEQ ID NO: 911736 - RNA, 23 nt, Human
aggcagagcuugcagugagccaa

SEQ ID NO: 911737 - RNA, 19 nt, Human
aggcagagguugcagugaa

SEQ ID NO: 911738 - RNA, 22 nt, Human
aggcagcaaccuggaaaugcca

SEQ ID NO: 911739 - RNA, 18 nt, Human
aggcaggaagaucacuug

SEQ ID NO: 911740 - RNA, 18 nt, Human
aggcaggagaaccacuug

SEQ ID NO: 911741 - RNA, 24 nt, Human
aggcaggagaaccacuugaacccg

SEQ ID NO: 911742 - RNA, 22 nt, Human
aggcaggaggaucacuugaacc

SEQ ID NO: 911743 - RNA, 24 nt, Human
aggcaggaggaucacuugaaccug

SEQ ID NO: 911744 - RNA, 18 nt, Human
aggcaggcggaucacuug

SEQ ID NO: 911745 - RNA, 21 nt, Human
aggcaggcggaucacuugagg

SEQ ID NO: 911746 - RNA, 22 nt, Human
aggcaggcggaucacuugaggu

SEQ ID NO: 911747 - RNA, 21 nt, Human
aggccaacuagggagccagga

SEQ ID NO: 911748 - RNA, 21 nt, Human
aggccaaggugggaagaucac

SEQ ID NO: 911749 - RNA, 24 nt, Human
aggcugaggcaggaggaucacuug

SEQ ID NO: 911750 - RNA, 19 nt, Human
aggcuggucugcuaaaaac

SEQ ID NO: 911751 - RNA, 21 nt, Human
aggucgaggcaggcggaucac

SEQ ID NO: 911752 - RNA, 23 nt, Human
aggugggaagaucacuugagguc

SEQ ID NO: 911753 - RNA, 24 nt, Human
agguugaggcaggagaaccacuug

SEQ ID NO: 911754 - RNA, 21 nt, Human
aguaaugaggcacccccuaug

SEQ ID NO: 911755 - RNA, 24 nt, Human
aguggcucacgccuguaauuccag

SEQ ID NO: 911756 - RNA, 24 nt, Human
agugggaguaaucgcuugaacccg

SEQ ID NO: 911757 - RNA, 24 nt, Human
agugguucacgccuguaaucccag

SEQ ID NO: 911758 - RNA, 23 nt, Human
auaaaacaaaucauucugacccc

SEQ ID NO: 911759 - RNA, 22 nt, Human
auaaacauguauucaugcccuc

SEQ ID NO: 911760 - RNA, 21 nt, Human
auaaacuuauaauacaaguuu

SEQ ID NO: 911761 - RNA, 22 nt, Human
auaauacaaguuuccugacaug

SEQ ID NO: 911762 - RNA, 24 nt, Human
aucacuugaggucaggaguucaag

SEQ ID NO: 911763 - RNA, 20 nt, Human
aucacuugagguugggaguu

SEQ ID NO: 911764 - RNA, 21 nt, Human
aucagaaaccacagaacccag

SEQ ID NO: 911765 - RNA, 21 nt, Human
aucagccggaaaaucacacaa

SEQ ID NO: 911766 - RNA, 24 nt, Human
aucgcaccacugcacuccagccug

SEQ ID NO: 911767 - RNA, 22 nt, Human
augaaacaaaaaacagagccuu

SEQ ID NO: 911768 - RNA, 20 nt, Human
augcauuuccugagugaacc

SEQ ID NO: 911769 - RNA, 23 nt, Human
auggccgggcaugccccagcacc

SEQ ID NO: 911770 - RNA, 24 nt, Human
auugcgccacugcacuccagccug

SEQ ID NO: 911771 - RNA, 27 nt, Human
auuucaaaauauauauauauauaugua

SEQ ID NO: 911772 - RNA, 25 nt, Human
caaaaacagaaacaaaaacaaaaac

SEQ ID NO: 911773 - RNA, 22 nt, Human
caaaaagacagaagaaagagua

SEQ ID NO: 911774 - RNA, 23 nt, Human
caaaacaaaaacagaaacaaaaa

SEQ ID NO: 911775 - RNA, 24 nt, Human
caaaauugcgccacugcacuccag

SEQ ID NO: 911776 - RNA, 22 nt, Human
caaacuaaaggaaaacaaauca

SEQ ID NO: 911777 - RNA, 18 nt, Human
caaagaaacaagaaaggg

SEQ ID NO: 911778 - RNA, 21 nt, Human
caaagcagugucaauaaaagc

SEQ ID NO: 911779 - RNA, 23 nt, Human
caaagcagugucaauaaaagcca

SEQ ID NO: 911780 - RNA, 21 nt, Human
caaauacacuaaaaacaccuc

SEQ ID NO: 911781 - RNA, 18 nt, Human
caacaaacuguaaacuaa

SEQ ID NO: 911782 - RNA, 22 nt, Human
caacauggauaaaccuggucuc

SEQ ID NO: 911783 - RNA, 18 nt, Human
caacauggugaaacccca

SEQ ID NO: 911784 - RNA, 22 nt, Human
caacauggugaaaccccgucuc

SEQ ID NO: 911785 - RNA, 24 nt, Human
caacauggugaaaccccgucucua

SEQ ID NO: 911786 - RNA, 21 nt, Human
caagacagaaaacuuuugaca

SEQ ID NO: 911787 - RNA, 24 nt, Human
caagaccagccuggccaacauggu

SEQ ID NO: 911788 - RNA, 24 nt, Human
caaggugggaagaucacuugaggu

SEQ ID NO: 911789 - RNA, 23 nt, Human
caauaacaagaaggauccucuuc

SEQ ID NO: 911790 - RNA, 25 nt, Human
caauaggugccaaaacuuagaugac

SEQ ID NO: 911791 - RNA, 23 nt, Human
caauauauugcuauuucaccaua

SEQ ID NO: 911792 - RNA, 24 nt, Human
caaucuguuuccucaucucugaaa

SEQ ID NO: 911793 - RNA, 25 nt, Human
caauuaaggaacugacaucaaacau

SEQ ID NO: 911794 - RNA, 27 nt, Human
cacacaugucaaaaagacagaagaaag

SEQ ID NO: 911795 - RNA, 24 nt, Human
cacagacaaaaagagccacaacaa

SEQ ID NO: 911796 - RNA, 22 nt, Human
cacagcaaaacuccuacuagcu

SEQ ID NO: 911797 - RNA, 24 nt, Human
cacaguuuauauccaaaaaauaaa

SEQ ID NO: 911798 - RNA, 20 nt, Human
caccaagggugugacaccau

SEQ ID NO: 911799 - RNA, 21 nt, Human
cacccccuaugaccuugccaa

SEQ ID NO: 911800 - RNA, 24 nt, Human
caccuggcaguaaugaggcacccc

SEQ ID NO: 911801 - RNA, 24 nt, Human
cacgccuguaaucccagcacuuug

SEQ ID NO: 911802 - RNA, 24 nt, Human
cacgccuguaauuccagcacuuug

SEQ ID NO: 911803 - RNA, 18 nt, Human
cacuauaaauaaagaaug

SEQ ID NO: 911804 - RNA, 23 nt, Human
cacuccaaccugggcaacagagc

SEQ ID NO: 911805 - RNA, 22 nt, Human
cacuccagccugggcgacagag

SEQ ID NO: 911806 - RNA, 22 nt, Human
cacuccagccugggcgacagag

SEQ ID NO: 911807 - RNA, 24 nt, Human
cacuccagccugggcgacagagug

SEQ ID NO: 911808 - RNA, 22 nt, Human
cacuccagccugggugacagag

SEQ ID NO: 911809 - RNA, 23 nt, Human
cacugcacuccaaccugggcaac

SEQ ID NO: 911810 - RNA, 24 nt, Human
cacugcacuccaaccugggcaaca

SEQ ID NO: 911811 - RNA, 27 nt, Human
cacugcacuccaaccugggcaacagag

SEQ ID NO: 911812 - RNA, 19 nt, Human
cacugcacuccagccuggg

SEQ ID NO: 911813 - RNA, 19 nt, Human
cacugcacuccagccuggg

SEQ ID NO: 911814 - RNA, 21 nt, Human
cacugcacuccagccugggcg

SEQ ID NO: 911815 - RNA, 22 nt, Human
cacugcacuccagccugggcga

SEQ ID NO: 911816 - RNA, 23 nt, Human
cacugcacuccagccugggcgac

SEQ ID NO: 911817 - RNA, 24 nt, Human
cacugcacuccagccugggcgaca

SEQ ID NO: 911818 - RNA, 21 nt, Human
cacugcacuccagccugggug

SEQ ID NO: 911819 - RNA, 22 nt, Human
cacugcacuccagccuggguga

SEQ ID NO: 911820 - RNA, 23 nt, Human
cacugcacuccagccugggugac

SEQ ID NO: 911821 - RNA, 24 nt, Human
cacugcacuccagccugggugaca

SEQ ID NO: 911822 - RNA, 25 nt, Human
cacugcacuccagccugggugacag

SEQ ID NO: 911823 - RNA, 21 nt, Human
cacuggacacacaugucaaaa

SEQ ID NO: 911824 - RNA, 18 nt, Human
cacuucugaucagccgga

SEQ ID NO: 911825 - RNA, 21 nt, Human
cacuugaacccgggaggagga

SEQ ID NO: 911826 - RNA, 23 nt, Human
cacuugaggucaggaguucaaga

SEQ ID NO: 911827 - RNA, 21 nt, Human
cacuuuuggugagaaggcaac

SEQ ID NO: 911828 - RNA, 20 nt, Human
cagaaacaaaaacaaaaaca

SEQ ID NO: 911829 - RNA, 19 nt, Human
cagaagcuuaacuagaggc

SEQ ID NO: 911830 - RNA, 20 nt, Human
cagcaaaacuccuacuagcu

SEQ ID NO: 911831 - RNA, 23 nt, Human
cagcaaccuggaaaugccaacug

SEQ ID NO: 911832 - RNA, 21 nt, Human
cagcaauaacaagaaggaucc

SEQ ID NO: 911833 - RNA, 24 nt, Human
cagcacuuugggaagcggaggcag

SEQ ID NO: 911834 - RNA, 24 nt, Human
cagcacuuugggaggucgaggcag

SEQ ID NO: 911835 - RNA, 28 nt, Human
cagcacuuugggaggucgaggcaggcgg

SEQ ID NO: 911836 - RNA, 25 nt, Human
caucucaaaacaaaaacagaaacaa

SEQ ID NO: 911837 - RNA, 22 nt, Human
cauggcuagcaaguauuagccu

SEQ ID NO: 911838 - RNA, 19 nt, Human
ccaacuggcacagacaaaa

SEQ ID NO: 911839 - RNA, 20 nt, Human
ccaccacccacaccaacgaa

SEQ ID NO: 911840 - RNA, 23 nt, Human
ccacugcacuccaaccugggcaa

SEQ ID NO: 911841 - RNA, 24 nt, Human
ccacugcacuccaaccugggcaac

SEQ ID NO: 911842 - RNA, 20 nt, Human
ccacugcacuccagccuggg

SEQ ID NO: 911843 - RNA, 20 nt, Human
ccacugcacuccagccuggg

SEQ ID NO: 911844 - RNA, 20 nt, Human
ccacugcacuccagccuggg

SEQ ID NO: 911845 - RNA, 20 nt, Human
ccacugcacuccagccuggg

SEQ ID NO: 911846 - RNA, 21 nt, Human
ccacugcacuccagccugggc

SEQ ID NO: 911847 - RNA, 21 nt, Human
ccacugcacuccagccugggc

SEQ ID NO: 911848 - RNA, 23 nt, Human
ccacugcacuccagccugggcga

SEQ ID NO: 911849 - RNA, 24 nt, Human
ccacugcacuccagccugggcgac

SEQ ID NO: 911850 - RNA, 21 nt, Human
ccacugcacuccagccugggu

SEQ ID NO: 911851 - RNA, 21 nt, Human
ccacugcacuccagccugggu

SEQ ID NO: 911852 - RNA, 23 nt, Human
ccacugcacuccagccuggguga

SEQ ID NO: 911853 - RNA, 24 nt, Human
ccacugcacuccagccugggugac

SEQ ID NO: 911854 - RNA, 25 nt, Human
ccacugcacuccagccugggugaca

SEQ ID NO: 911855 - RNA, 23 nt, Human
ccagaaaacaguuuugccccacc

SEQ ID NO: 911856 - RNA, 21 nt, Human
ccagagccuaggaacauaaua

SEQ ID NO: 911857 - RNA, 22 nt, Human
cccaaugaauaagaacacguca

SEQ ID NO: 911858 - RNA, 18 nt, Human
cccaccaccacccacacc

SEQ ID NO: 911859 - RNA, 21 nt, Human
cccaccaccacccacaccaac

SEQ ID NO: 911860 - RNA, 26 nt, Human
cccaccaccacccacaccaacgaaag

SEQ ID NO: 911861 - RNA, 23 nt, Human
cccacccagcaauaacaagaagg

SEQ ID NO: 911862 - RNA, 18 nt, Human
cccagaaaacaguuuugc

SEQ ID NO: 911863 - RNA, 23 nt, Human
cccagaaaacaguuuugccccac

SEQ ID NO: 911864 - RNA, 19 nt, Human
cccauaaaagucuccucau

SEQ ID NO: 911865 - RNA, 21 nt, Human
cccaucuccacuaagaauaca

SEQ ID NO: 911866 - RNA, 19 nt, Human
ccccaccaccacccacacc

SEQ ID NO: 911867 - RNA, 21 nt, Human
ccccaccaccacccacaccaa

SEQ ID NO: 911868 - RNA, 22 nt, Human
ccgggcaugccccagcaccuac

SEQ ID NO: 911869 - RNA, 25 nt, Human
ccuaugaccuugccaaagcaguguc

SEQ ID NO: 911870 - RNA, 19 nt, Human
ccucaucucugaaaaugaa

SEQ ID NO: 911871 - RNA, 23 nt, Human
ccuggccaacauggugaaacccc

SEQ ID NO: 911872 - RNA, 24 nt, Human
ccuggccaacauggugaaacccca

SEQ ID NO: 911873 - RNA, 23 nt, Human
ccugggcaacauggugaaacccc

SEQ ID NO: 911874 - RNA, 24 nt, Human
ccugggcaacauggugaaaccccg

SEQ ID NO: 911875 - RNA, 22 nt, Human
ccugggcgacagagugagacuc

SEQ ID NO: 911876 - RNA, 22 nt, Human
ccugggugacagagcaagacuc

SEQ ID NO: 911877 - RNA, 22 nt, Human
ccuguaaucccagcacuuuggg

SEQ ID NO: 911878 - RNA, 18 nt, Human
ccuguaaucccagcuacu

SEQ ID NO: 911879 - RNA, 21 nt, Human
ccuguaaucccagcuacuaag

SEQ ID NO: 911880 - RNA, 22 nt, Human
ccuguaauuccagcacuuuggg

SEQ ID NO: 911881 - RNA, 19 nt, Human
ccuguaguccuagcuacuc

SEQ ID NO: 911882 - RNA, 19 nt, Human
ccuguguaguggcacuuuu

SEQ ID NO: 911883 - RNA, 21 nt, Human
ccuuugcuugaguuucccaga

SEQ ID NO: 911884 - RNA, 24 nt, Human
cgagaccagccugggcaacauggu

SEQ ID NO: 911885 - RNA, 22 nt, Human
cgagaucagugccacugcacuc

SEQ ID NO: 911886 - RNA, 24 nt, Human
cgaggcaggcggaucacuugaggu

SEQ ID NO: 911887 - RNA, 26 nt, Human
cgccacugcacuccagccugggcgac

SEQ ID NO: 911888 - RNA, 23 nt, Human
cgccuguaaucccagcacuuugg

SEQ ID NO: 911889 - RNA, 23 nt, Human
cgccuguaauuccagcacuuugg

SEQ ID NO: 911890 - RNA, 24 nt, Human
cggaucacuugagguugggaguuu

SEQ ID NO: 911891 - RNA, 24 nt, Human
cgggaggaggagguugcagugagc

SEQ ID NO: 911892 - RNA, 24 nt, Human
cgggaggcugaggcaggaggauca

SEQ ID NO: 911893 - RNA, 22 nt, Human
cgguagcaaaaauaugaguaaa

SEQ ID NO: 911894 - RNA, 24 nt, Human
cgugugucacuggacacacauggu

SEQ ID NO: 911895 - RNA, 23 nt, Human
cuaacuaaaaccuucaagguaaa

SEQ ID NO: 911896 - RNA, 20 nt, Human
cuaacuuugcaaauccuuga

SEQ ID NO: 911897 - RNA, 22 nt, Human
cucaaaacaaaaacagaaacaa

SEQ ID NO: 911898 - RNA, 23 nt, Human
cucaagaaaaaaaaaaaaaaaaa

SEQ ID NO: 911899 - RNA, 24 nt, Human
cucacgccuguaauuccagcacuu

SEQ ID NO: 911900 - RNA, 24 nt, Human
cucagacgaggaaaaauugagaga

SEQ ID NO: 911901 - RNA, 18 nt, Human
cucauuuuauaccuccac

SEQ ID NO: 911902 - RNA, 20 nt, Human
cucuccuuucuugcuaauuu

SEQ ID NO: 911903 - RNA, 22 nt, Human
cucucuagccaaagaaacaaga

SEQ ID NO: 911904 - RNA, 25 nt, Human
cugaaaguguaaaugcccguauuug

SEQ ID NO: 911905 - RNA, 18 nt, Human
cugauacaucacaacuaa

SEQ ID NO: 911906 - RNA, 22 nt, Human
cugauacuaaaaacagauuagu

SEQ ID NO: 911907 - RNA, 18 nt, Human
cuggcacagacaaaaaga

SEQ ID NO: 911908 - RNA, 23 nt, Human
cuggccaacauggugaaacccca

SEQ ID NO: 911909 - RNA, 22 nt, Human
cugguuucuacaagugucaaaa

SEQ ID NO: 911910 - RNA, 23 nt, Human
cuugaugucaggaguucgagacc

SEQ ID NO: 911911 - RNA, 21 nt, Human
cuuggagcuaaagaaggcagc

SEQ ID NO: 911912 - RNA, 20 nt, Human
cuuugcuugaguuucccaga

SEQ ID NO: 911913 - RNA, 23 nt, Human
gaaaaaauaaagaggcugggagc

SEQ ID NO: 911914 - RNA, 20 nt, Human
gaacccgggaggcagagcuu

SEQ ID NO: 911915 - RNA, 18 nt, Human
gaauucagaagacugaua

SEQ ID NO: 911916 - RNA, 22 nt, Human
gacaaucuagaaaacuucaaaa

SEQ ID NO: 911917 - RNA, 24 nt, Human
gagaaaauaggaaaaaccgguacc

SEQ ID NO: 911918 - RNA, 19 nt, Human
gagagagagagaacacugc

SEQ ID NO: 911919 - RNA, 18 nt, Human
gagcuugcagugagccaa

SEQ ID NO: 911920 - RNA, 22 nt, Human
gagguugcagugagccgagauc

SEQ ID NO: 911921 - RNA, 23 nt, Human
gauaggcugggugcagugguuca

SEQ ID NO: 911922 - RNA, 23 nt, Human
gaucacuugaaccuggaggcaga

SEQ ID NO: 911923 - RNA, 23 nt, Human
gaucacuugaggucaggaguuca

SEQ ID NO: 911924 - RNA, 24 nt, Human
gaucacuugaggucaggaguucaa

SEQ ID NO: 911925 - RNA, 24 nt, Human
gaucacuugagguugggaguuuga

SEQ ID NO: 911926 - RNA, 18 nt, Human
gaucacuugaugucagga

SEQ ID NO: 911927 - RNA, 24 nt, Human
gaucacuugaugucaggaguucga

SEQ ID NO: 911928 - RNA, 22 nt, Human
gcaaaagacauauuggaauuag

SEQ ID NO: 911929 - RNA, 19 nt, Human
gcaauguaaaaguaggcca

SEQ ID NO: 911930 - RNA, 20 nt, Human
gcaccacugcacuccagccu

SEQ ID NO: 911931 - RNA, 21 nt, Human
gcacuauugucauucaacccu

SEQ ID NO: 911932 - RNA, 23 nt, Human
gcacuccagccugggcgacagag

SEQ ID NO: 911933 - RNA, 24 nt, Human
gcacuccagccugggugacagagc

SEQ ID NO: 911934 - RNA, 24 nt, Human
gcagaaaaacugugacguggacaa

SEQ ID NO: 911935 - RNA, 22 nt, Human
gcaggagaaccacuugaacccg

SEQ ID NO: 911936 - RNA, 18 nt, Human
gcagugguucacgccugu

SEQ ID NO: 911937 - RNA, 24 nt, Human
gccaacauggugaaaccccaucuc

SEQ ID NO: 911938 - RNA, 24 nt, Human
gccacugcacuccaaccugggcaa

SEQ ID NO: 911939 - RNA, 22 nt, Human
gccacugcacuccagccugggc

SEQ ID NO: 911940 - RNA, 24 nt, Human
gccacugcacuccagccugggcga

SEQ ID NO: 911941 - RNA, 20 nt, Human
gccccaccaccacccacacc

SEQ ID NO: 911942 - RNA, 24 nt, Human
gccuuguaguccuagcuacuuggg

SEQ ID NO: 911943 - RNA, 19 nt, Human
gcugacaaaaauggaaggg

SEQ ID NO: 911944 - RNA, 18 nt, Human
ggacaacagguucgaaaa

SEQ ID NO: 911945 - RNA, 21 nt, Human
ggagaaccacuugaacccggg

SEQ ID NO: 911946 - RNA, 19 nt, Human
ggagagaagaaacuuuucu

SEQ ID NO: 911947 - RNA, 18 nt, Human
ggagguugcagugagccg

SEQ ID NO: 911948 - RNA, 20 nt, Human
ggagguugcagugagccgag

SEQ ID NO: 911949 - RNA, 22 nt, Human
ggagguugcagugagccgagau

SEQ ID NO: 911950 - RNA, 23 nt, Human
ggagguugcagugagccgagauc

SEQ ID NO: 911951 - RNA, 24 nt, Human
ggagguugcagugagccgagauca

SEQ ID NO: 911952 - RNA, 22 nt, Human
ggaguucgagaccagccugggc

SEQ ID NO: 911953 - RNA, 19 nt, Human
ggaguuugagaccagccug

SEQ ID NO: 911954 - RNA, 22 nt, Human
ggaucacuugagguugggaguu

SEQ ID NO: 911955 - RNA, 21 nt, Human
ggcacaugccuguaaucccag

SEQ ID NO: 911956 - RNA, 23 nt, Human
ggcgugguggcacaugccuguaa

SEQ ID NO: 911957 - RNA, 23 nt, Human
ggcugggagcaguggcucacgcc

SEQ ID NO: 911958 - RNA, 24 nt, Human
gggagcaguggcucacgccuguaa

SEQ ID NO: 911959 - RNA, 23 nt, Human
gggaggcugaggcaggaggauca

SEQ ID NO: 911960 - RNA, 20 nt, Human
gggaggucgaggcaggcgga

SEQ ID NO: 911961 - RNA, 24 nt, Human
gggugcagugguucacgccuguaa

SEQ ID NO: 911962 - RNA, 19 nt, Human
ggugagaaggcaacaggga

SEQ ID NO: 911963 - RNA, 24 nt, Human
gguggcacaugccuguaaucccag

SEQ ID NO: 911964 - RNA, 19 nt, Human
gguugggaguuugagacca

SEQ ID NO: 911965 - RNA, 19 nt, Human
guggacaacagguucgaaa

SEQ ID NO: 911966 - RNA, 22 nt, Human
guggugccuuugaaaaaagggu

SEQ ID NO: 911967 - RNA, 25 nt, Human
guugcagugagccgagaucagugcc

SEQ ID NO: 911968 - RNA, 23 nt, Human
guugcuuuguuuugaauuccuau

SEQ ID NO: 911969 - RNA, 21 nt, Human
uaaaaacaccucucgucaccc

SEQ ID NO: 911970 - RNA, 21 nt, Human
uaaaaacacgguagcaaaaau

SEQ ID NO: 911971 - RNA, 21 nt, Human
uaaaaauacaaaaauuagcca

SEQ ID NO: 911972 - RNA, 22 nt, Human
uaaaaauacaaaauuagccggg

SEQ ID NO: 911973 - RNA, 23 nt, Human
uaaaaauacaaaauuagccgggc

SEQ ID NO: 911974 - RNA, 25 nt, Human
uaaaacuuugcuacagucaguuaag

SEQ ID NO: 911975 - RNA, 20 nt, Human
uaaaagaagauacugucuaa

SEQ ID NO: 911976 - RNA, 22 nt, Human
uaaaagguuacagaaaccaaua

SEQ ID NO: 911977 - RNA, 22 nt, Human
uaaaauaauucauggcuucuaa

SEQ ID NO: 911978 - RNA, 22 nt, Human
uaaauucucuggguuuucuuuu

SEQ ID NO: 911979 - RNA, 18 nt, Human
uaacaagaaggauccucu

SEQ ID NO: 911980 - RNA, 25 nt, Human
uaagaaaaaaucuuuccugauuauc

SEQ ID NO: 911981 - RNA, 23 nt, Human
uaagugcacagauauggcaaaca

SEQ ID NO: 911982 - RNA, 19 nt, Human
uaauauaucccagacuugg

SEQ ID NO: 911983 - RNA, 18 nt, Human
uacaauauauagccugaa

SEQ ID NO: 911984 - RNA, 18 nt, Human
uacaaucgacuuuccuuc

SEQ ID NO: 911985 - RNA, 19 nt, Human
uaccaaauuccauauuuag

SEQ ID NO: 911986 - RNA, 24 nt, Human
uaccacauauaaaacuuugcuaca

SEQ ID NO: 911987 - RNA, 25 nt, Human
uacccucaguuauacaaaacaauuu

SEQ ID NO: 911988 - RNA, 20 nt, Human
uaccuccaccaacagauuuc

SEQ ID NO: 911989 - RNA, 23 nt, Human
uagacaauuaaggaacugacauc

SEQ ID NO: 911990 - RNA, 21 nt, Human
uagacuuccacccccacccag

SEQ ID NO: 911991 - RNA, 19 nt, Human
uagagcagacauacuuuuc

SEQ ID NO: 911992 - RNA, 23 nt, Human
uagaggaaauuaacuaaacagaa

SEQ ID NO: 911993 - RNA, 21 nt, Human
uagcaaaaauaugaguaaaua

SEQ ID NO: 911994 - RNA, 19 nt, Human
uagcaaaaucuaacacgug

SEQ ID NO: 911995 - RNA, 24 nt, Human
uagcaagaacaagauuuaaaacaa

SEQ ID NO: 911996 - RNA, 21 nt, Human
uagcaaguauuagccuguguu

SEQ ID NO: 911997 - RNA, 22 nt, Human
uagcagggcgugguggcacgug

SEQ ID NO: 911998 - RNA, 22 nt, Human
uagccaggcaugguggugugcc

SEQ ID NO: 911999 - RNA, 22 nt, Human
uagccgggcgugguggcacaug

SEQ ID NO: 912000 - RNA, 24 nt, Human
uagcuacucgggaggcugaggcag

SEQ ID NO: 912001 - RNA, 18 nt, Human
uagcuagcccauaaaagu

SEQ ID NO: 912002 - RNA, 21 nt, Human
uaggaaaaacaaaaugaaaca

SEQ ID NO: 912003 - RNA, 23 nt, Human
uauacaaaacaauuucagcacug

SEQ ID NO: 912004 - RNA, 19 nt, Human
uauaucccagacuuggagc

SEQ ID NO: 912005 - RNA, 19 nt, Human
uaugcaaaccaucacaagg

SEQ ID NO: 912006 - RNA, 25 nt, Human
uauuagccuguguucuaguucuagc

SEQ ID NO: 912007 - RNA, 19 nt, Human
uauuucaccauaacuguga

SEQ ID NO: 912008 - RNA, 21 nt, Human
uauuucaccauaacugugaua

SEQ ID NO: 912009 - RNA, 23 nt, Human
uauuuugaaaaguauuuacuuag

SEQ ID NO: 912010 - RNA, 19 nt, Human
ucaaaacaaaaacagaaac

SEQ ID NO: 912011 - RNA, 24 nt, Human
ucaaaacaaaaacagaaacaaaaa

SEQ ID NO: 912012 - RNA, 25 nt, Human
ucaaaacaaaaacagaaacaaaaac

SEQ ID NO: 912013 - RNA, 26 nt, Human
ucaaaacaaaaacagaaacaaaaaca

SEQ ID NO: 912014 - RNA, 21 nt, Human
ucaaaauauauauauauauau

SEQ ID NO: 912015 - RNA, 23 nt, Human
ucaaaauauauauauauauaugu

SEQ ID NO: 912016 - RNA, 27 nt, Human
ucaaauacacuaaaaacaccucucguc

SEQ ID NO: 912017 - RNA, 24 nt, Human
ucaagaaaaaaaaaaaaaaaaaaa

SEQ ID NO: 912018 - RNA, 26 nt, Human
ucaagguaaaaacugaaguuucaaga

SEQ ID NO: 912019 - RNA, 21 nt, Human
ucacaccaagggugugacacc

SEQ ID NO: 912020 - RNA, 25 nt, Human
ucacccugauggccgggcaugcccc

SEQ ID NO: 912021 - RNA, 23 nt, Human
ucacgccuguaaucccagcacuu

SEQ ID NO: 912022 - RNA, 22 nt, Human
ucacgccuguaauuccagcacu

SEQ ID NO: 912023 - RNA, 20 nt, Human
ucacuugaugucaggaguuc

SEQ ID NO: 912024 - RNA, 23 nt, Human
ucagcaguccucuugaacacaau

SEQ ID NO: 912025 - RNA, 20 nt, Human
ucagcuagacuuccaccccc

SEQ ID NO: 912026 - RNA, 21 nt, Human
ucagcuagacuuccaccccca

SEQ ID NO: 912027 - RNA, 19 nt, Human
ucagugccacugcacucca

SEQ ID NO: 912028 - RNA, 24 nt, Human
ucaucagaaaccacagaacccaga

SEQ ID NO: 912029 - RNA, 22 nt, Human
ucaucugccaaccaaacauuuc

SEQ ID NO: 912030 - RNA, 22 nt, Human
ucauuuaaaaaaguuauacaga

SEQ ID NO: 912031 - RNA, 19 nt, Human
uccaccaacagauuucaua

SEQ ID NO: 912032 - RNA, 23 nt, Human
uccacuccagccaaacccagaaa

SEQ ID NO: 912033 - RNA, 22 nt, Human
uccacuuacagaagcauagagc

SEQ ID NO: 912034 - RNA, 23 nt, Human
uccagccugggcgacagagugag

SEQ ID NO: 912035 - RNA, 24 nt, Human
uccagccugggcgacagagugaga

SEQ ID NO: 912036 - RNA, 24 nt, Human
uccagccugggugacagagcaaga

SEQ ID NO: 912037 - RNA, 27 nt, Human
uccauuucaaaauauauauauauauau

SEQ ID NO: 912038 - RNA, 23 nt, Human
uccgucucaagaaaaaaaaaaaa

SEQ ID NO: 912039 - RNA, 24 nt, Human
uccucaucucugaaaaugaaggga

SEQ ID NO: 912040 - RNA, 23 nt, Human
ucgcaccacugcacuccagccug

SEQ ID NO: 912041 - RNA, 18 nt, Human
ucgcuugaacccgggagg

SEQ ID NO: 912042 - RNA, 25 nt, Human
ucgggaggcugaggcaggaggauca

SEQ ID NO: 912043 - RNA, 28 nt, Human
ucuaguuuuaacagaaaaucauucaucu

SEQ ID NO: 912044 - RNA, 20 nt, Human
ucucuacuaaaaauacaaaa

SEQ ID NO: 912045 - RNA, 21 nt, Human
ucucuacuaaaaauacaaaaa

SEQ ID NO: 912046 - RNA, 27 nt, Human
ucucucguccuucuuccuaacuuugca

SEQ ID NO: 912047 - RNA, 19 nt, Human
ucucuugaaucuucugaau

SEQ ID NO: 912048 - RNA, 21 nt, Human
ucugccaaccaaacauuuccu

SEQ ID NO: 912049 - RNA, 25 nt, Human
ucuuauggcaaugauuuuuuucuag

SEQ ID NO: 912050 - RNA, 27 nt, Human
ucuucugaauuuugucugauggugaaa

SEQ ID NO: 912051 - RNA, 22 nt, Human
ugaaacaaaaaacagagccuua

SEQ ID NO: 912052 - RNA, 19 nt, Human
ugaaaccccaucuccacua

SEQ ID NO: 912053 - RNA, 22 nt, Human
ugaaaccccaucuccacuaaga

SEQ ID NO: 912054 - RNA, 18 nt, Human
ugaaauacagccugugua

SEQ ID NO: 912055 - RNA, 22 nt, Human
ugaacagaugaaccacaguuua

SEQ ID NO: 912056 - RNA, 25 nt, Human
ugaacagaugaaccacaguuuauau

SEQ ID NO: 912057 - RNA, 19 nt, Human
ugaagggacuaaaguggaa

SEQ ID NO: 912058 - RNA, 19 nt, Human
ugaauagagagaaaauagg

SEQ ID NO: 912059 - RNA, 26 nt, Human
ugacaaaaauggaagggaagucaaga

SEQ ID NO: 912060 - RNA, 23 nt, Human
ugacacauuucugacgaagaaca

SEQ ID NO: 912061 - RNA, 24 nt, Human
ugacaguaacugcuccacuccagc

SEQ ID NO: 912062 - RNA, 19 nt, Human
ugacaucaaacaugaaaac

SEQ ID NO: 912063 - RNA, 18 nt, Human
ugacuucuauguccaccu

SEQ ID NO: 912064 - RNA, 18 nt, Human
ugagaagacugugaaaag

SEQ ID NO: 912065 - RNA, 20 nt, Human
ugagaagacugugaaaagug

SEQ ID NO: 912066 - RNA, 24 nt, Human
ugagaccagccugaccaacaugga

SEQ ID NO: 912067 - RNA, 23 nt, Human
ugagccgagaucagugccacugc

SEQ ID NO: 912068 - RNA, 20 nt, Human
ugaggagcuccaaugcccua

SEQ ID NO: 912069 - RNA, 18 nt, Human
ugaggcaggagaaccacu

SEQ ID NO: 912070 - RNA, 20 nt, Human
ugaggcaggagaaccacuug

SEQ ID NO: 912071 - RNA, 24 nt, Human
ugaggcaggagaaccacuugaacc

SEQ ID NO: 912072 - RNA, 25 nt, Human
ugaggcaggagaaccacuugaaccc

SEQ ID NO: 912073 - RNA, 20 nt, Human
ugaggcaggaggaucacuug

SEQ ID NO: 912074 - RNA, 24 nt, Human
ugaggcaggaggaucacuugaacc

SEQ ID NO: 912075 - RNA, 25 nt, Human
ugaggcaggaggaucacuugaaccu

SEQ ID NO: 912076 - RNA, 20 nt, Human
ugagugaacccaaaugauca

SEQ ID NO: 912077 - RNA, 19 nt, Human
ugauggugaaagugaaaac

SEQ ID NO: 912078 - RNA, 23 nt, Human
ugauucaaaaacacuaaaaggaa

SEQ ID NO: 912079 - RNA, 24 nt, Human
ugccacugcacuccaaccugggca

SEQ ID NO: 912080 - RNA, 24 nt, Human
ugccccaccaccacccacaccaac

SEQ ID NO: 912081 - RNA, 24 nt, Human
ugccuguaaucccagcuacuaagg

SEQ ID NO: 912082 - RNA, 24 nt, Human
ugccuguaguccuagcuacucggg

SEQ ID NO: 912083 - RNA, 21 nt, Human
ugcucaucugccaaccaaaca

SEQ ID NO: 912084 - RNA, 18 nt, Human
uggaagcaaaagacauau

SEQ ID NO: 912085 - RNA, 18 nt, Human
uggauaaaccuggucucu

SEQ ID NO: 912086 - RNA, 22 nt, Human
uggcaagacagaaaacuuuuga

SEQ ID NO: 912087 - RNA, 25 nt, Human
uggcaagacagaaaacuuuugacag

SEQ ID NO: 912088 - RNA, 21 nt, Human
uggcacaugccuguaauccca

SEQ ID NO: 912089 - RNA, 24 nt, Human
uggcaguaaugaggcacccccuuc

SEQ ID NO: 912090 - RNA, 24 nt, Human
uggccaacauggugaaaccccauc

SEQ ID NO: 912091 - RNA, 24 nt, Human
uggcucacgccuguaauuccagca

SEQ ID NO: 912092 - RNA, 21 nt, Human
uggcugacauuaguauaucac

SEQ ID NO: 912093 - RNA, 21 nt, Human
uggcugucuuucucaaaucuu

SEQ ID NO: 912094 - RNA, 18 nt, Human
ugggaagaucacuugagg

SEQ ID NO: 912095 - RNA, 20 nt, Human
ugggaagcggaggcaggaag

SEQ ID NO: 912096 - RNA, 19 nt, Human
ugggaggcuaaagugggag

SEQ ID NO: 912097 - RNA, 24 nt, Human
ugggaggcuaaagugggaguaauc

SEQ ID NO: 912098 - RNA, 25 nt, Human
ugggaggcuaaagugggaguaaucg

SEQ ID NO: 912099 - RNA, 20 nt, Human
ugggaggucgaggcaggcgg

SEQ ID NO: 912100 - RNA, 20 nt, Human
ugggaucaaguauuuccugc

SEQ ID NO: 912101 - RNA, 23 nt, Human
ugggaucaaguauuuccugcauu

SEQ ID NO: 912102 - RNA, 23 nt, Human
uggucaggagccuugggacaccu

SEQ ID NO: 912103 - RNA, 20 nt, Human
uggugccuuugaaaaaaggg

SEQ ID NO: 912104 - RNA, 24 nt, Human
ugguggcacaugccuguaauccca

SEQ ID NO: 912105 - RNA, 22 nt, Human
ugguggcacgugccuguagucc

SEQ ID NO: 912106 - RNA, 21 nt, Human
ugguggugugccuuguagucc

SEQ ID NO: 912107 - RNA, 22 nt, Human
ugguucacgccuguaaucccag

SEQ ID NO: 912108 - RNA, 24 nt, Human
ugguucacgccuguaaucccagca

SEQ ID NO: 912109 - RNA, 19 nt, Human
uguaaaaacacgguagcag

SEQ ID NO: 912110 - RNA, 19 nt, Human
uguaaucccagcuacuaag

SEQ ID NO: 912111 - RNA, 23 nt, Human
ugucuuugaacaaagcaaucugu

SEQ ID NO: 912112 - RNA, 23 nt, Human
uguuacaaagguuucacagcaaa

SEQ ID NO: 912113 - RNA, 22 nt, Human
uuaaaucaaccaaagaauaauu

SEQ ID NO: 912114 - RNA, 19 nt, Human
uuaagcauuucuuuuucca

SEQ ID NO: 912115 - RNA, 20 nt, Human
uuagcagggcgugguggcac

SEQ ID NO: 912116 - RNA, 20 nt, Human
uuagcagggcgugguggcac

SEQ ID NO: 912117 - RNA, 24 nt, Human
uuagcagggcgugguggcacgugc

SEQ ID NO: 912118 - RNA, 23 nt, Human
uuagccaggcaugguggugugcc

SEQ ID NO: 912119 - RNA, 18 nt, Human
uuagccgggcgugguggc

SEQ ID NO: 912120 - RNA, 19 nt, Human
uuagccgggcgugguggca

SEQ ID NO: 912121 - RNA, 24 nt, Human
uuagccgggcgugguggcacaugc

SEQ ID NO: 912122 - RNA, 22 nt, Human
uucacccugauggccgggcaug

SEQ ID NO: 912123 - RNA, 23 nt, Human
uucagaaauauuuuaagaaaaac

SEQ ID NO: 912124 - RNA, 23 nt, Human
uucauccucaguuuaaugggauc

SEQ ID NO: 912125 - RNA, 20 nt, Human
uucuaguucuagcugucuuu

SEQ ID NO: 912126 - RNA, 21 nt, Human
uucucuggguuuucuuuuugc

SEQ ID NO: 912127 - RNA, 22 nt, Human
uugcagugaacccagaucgcac

SEQ ID NO: 912128 - RNA, 22 nt, Human
uugcagugagccaaaauugcgc

SEQ ID NO: 912129 - RNA, 22 nt, Human
uugcagugagccgagaucagug

SEQ ID NO: 912130 - RNA, 23 nt, Human
uugcagugagccgagaucagugc

SEQ ID NO: 912131 - RNA, 23 nt, Human
uugcgccacugcacuccagccug

SEQ ID NO: 912132 - RNA, 21 nt, Human
uugggguggggagagaggcuc

SEQ ID NO: 912133 - RNA, 19 nt, Human
uuggucuuacaaauuacaa

SEQ ID NO: 912134 - RNA, 18 nt, Human
uuggugagaaggcaacag

SEQ ID NO: 912135 - RNA, 18 nt, Human
uuuccaaaagcaaaucaa

SEQ ID NO: 912136 - RNA, 22 nt, Human
uuuccugacaugcauuuccuga

SEQ ID NO: 912137 - RNA, 25 nt, Human
uuucuccucaaaauauauuuucaaa

SEQ ID NO: 912138 - RNA, 25 nt, Human
uuugcaaauccuugagcuagguugc

SEQ ID NO: 912139 - RNA, 24 nt, Human
aaaaaaaaaaaaaaagacauugaa

SEQ ID NO: 912140 - RNA, 20 nt, Human
aaaaaacuugguuaaaaacc

SEQ ID NO: 912141 - RNA, 26 nt, Human
aaaaaagucacccaaaucugcaaugg

SEQ ID NO: 912142 - RNA, 19 nt, Human
aaaaccaaaaccaaaaaug

SEQ ID NO: 912143 - RNA, 18 nt, Human
aaaaucuucacaguaacc

SEQ ID NO: 912144 - RNA, 20 nt, Human
aaacaaaaccaaaaccaaaa

SEQ ID NO: 912145 - RNA, 19 nt, Human
aaacaaugaucuccacuga

SEQ ID NO: 912146 - RNA, 22 nt, Human
aaaccaccugugccuaaggcca

SEQ ID NO: 912147 - RNA, 26 nt, Human
aaacugagaggcugaacuuuaaacau

SEQ ID NO: 912148 - RNA, 23 nt, Human
aaagcugaaccaaauaagggaaa

SEQ ID NO: 912149 - RNA, 20 nt, Human
aaauaaaucagaaaaagccc

SEQ ID NO: 912150 - RNA, 22 nt, Human
aaauacuuauuuuccuuaucuu

SEQ ID NO: 912151 - RNA, 18 nt, Human
aaaucagaaaaagcccca

SEQ ID NO: 912152 - RNA, 19 nt, Human
aacuaaagaguucuccuca

SEQ ID NO: 912153 - RNA, 20 nt, Human
aagcagcagcaaucaagagu

SEQ ID NO: 912154 - RNA, 23 nt, Human
aaggaucuuuaccuucuaggagc

SEQ ID NO: 912155 - RNA, 24 nt, Human
aaggugacagauggugaaaaggga

SEQ ID NO: 912156 - RNA, 18 nt, Human
aaguguccacacaauacu

SEQ ID NO: 912157 - RNA, 22 nt, Human
aaguuaaaaaaaaaaaaagccc

SEQ ID NO: 912158 - RNA, 19 nt, Human
acaaaaccauagaacugcg

SEQ ID NO: 912159 - RNA, 26 nt, Human
acacccuuucaagcacauccaaagag

SEQ ID NO: 912160 - RNA, 18 nt, Human
acccggcagcaccgauua

SEQ ID NO: 912161 - RNA, 18 nt, Human
acuauaucauugugauug

SEQ ID NO: 912162 - RNA, 27 nt, Human
agaaaagaagugaaacaaaagggaccc

SEQ ID NO: 912163 - RNA, 21 nt, Human
agaguaagcuauacagaauac

SEQ ID NO: 912164 - RNA, 22 nt, Human
agccccagauuucaaaaccacc

SEQ ID NO: 912165 - RNA, 20 nt, Human
agggcacggcggcgaagggg

SEQ ID NO: 912166 - RNA, 23 nt, Human
auacaugguaaaugugaccaucc

SEQ ID NO: 912167 - RNA, 18 nt, Human
auguauuugaugaaugaa

SEQ ID NO: 912168 - RNA, 23 nt, Human
auguggagcccauggagggcggu

SEQ ID NO: 912169 - RNA, 24 nt, Human
caacaagucagaaaaauaaaucag

SEQ ID NO: 912170 - RNA, 22 nt, Human
caacugugaaaaaaaaaaucuc

SEQ ID NO: 912171 - RNA, 23 nt, Human
cacacacccuuucaagcacaucc

SEQ ID NO: 912172 - RNA, 28 nt, Human
cacaccauuuaaaauuuacccaaacaaa

SEQ ID NO: 912173 - RNA, 25 nt, Human
cacacccuuucaagcacauccaaag

SEQ ID NO: 912174 - RNA, 22 nt, Human
cacagaaggaggcgcaucauaa

SEQ ID NO: 912175 - RNA, 19 nt, Human
caggcugaaaagacauacu

SEQ ID NO: 912176 - RNA, 24 nt, Human
cauaaccuaagccacaaaggcuaa

SEQ ID NO: 912177 - RNA, 18 nt, Human
cauagaacugcagguaac

SEQ ID NO: 912178 - RNA, 24 nt, Human
caucagagacucuggcuaaaucaa

SEQ ID NO: 912179 - RNA, 18 nt, Human
caugagcccacacuuuug

SEQ ID NO: 912180 - RNA, 19 nt, Human
ccacaaaggcuaaacuacu

SEQ ID NO: 912181 - RNA, 20 nt, Human
ccccagauuucaaaaccacc

SEQ ID NO: 912182 - RNA, 27 nt, Human
ccgccgccuccgccgcgauccccgccg

SEQ ID NO: 912183 - RNA, 18 nt, Human
ccgccgcgauccccgccg

SEQ ID NO: 912184 - RNA, 23 nt, Human
ccgccgcgauccccgccgagucc

SEQ ID NO: 912185 - RNA, 20 nt, Human
ccgccuccgccgcgaucccc

SEQ ID NO: 912186 - RNA, 21 nt, Human
ccgccuccgccgcgauccccg

SEQ ID NO: 912187 - RNA, 24 nt, Human
ccuacaaguggccaagaagagccu

SEQ ID NO: 912188 - RNA, 18 nt, Human
ccuacaccacacugcacu

SEQ ID NO: 912189 - RNA, 19 nt, Human
ccuccgccgcgauccccgc

SEQ ID NO: 912190 - RNA, 21 nt, Human
ccugccauguuucaucaccau

SEQ ID NO: 912191 - RNA, 26 nt, Human
ccugccauguuucaucaccauguccc

SEQ ID NO: 912192 - RNA, 24 nt, Human
cgccccucugcugucuggucaggu

SEQ ID NO: 912193 - RNA, 20 nt, Human
cgccgccgccgacgccgccg

SEQ ID NO: 912194 - RNA, 19 nt, Human
cuacaaucauguuuaugcc

SEQ ID NO: 912195 - RNA, 20 nt, Human
cugcuucaaugaugcuuaga

SEQ ID NO: 912196 - RNA, 22 nt, Human
cuucgcguaacaccuacaccac

SEQ ID NO: 912197 - RNA, 18 nt, Human
cuuucauuuucugucugc

SEQ ID NO: 912198 - RNA, 19 nt, Human
gaaaaaaaaaaaccccaag

SEQ ID NO: 912199 - RNA, 21 nt, Human
gaaaagaagugaaacaaaacc

SEQ ID NO: 912200 - RNA, 19 nt, Human
gagaaauuacuuuucugaa

SEQ ID NO: 912201 - RNA, 20 nt, Human
gagauggauuuggcuuaaaa

SEQ ID NO: 912202 - RNA, 18 nt, Human
gagcuacagaguucuuua

SEQ ID NO: 912203 - RNA, 19 nt, Human
gcaagacauaaaaaaagaa

SEQ ID NO: 912204 - RNA, 25 nt, Human
gcacggcggcgaagggggcgcgggg

SEQ ID NO: 912205 - RNA, 20 nt, Human
gccagucccgcugcugcucc

SEQ ID NO: 912206 - RNA, 19 nt, Human
gccgccgacgccgccgccg

SEQ ID NO: 912207 - RNA, 21 nt, Human
gccgccgccgacgccgccgcc

SEQ ID NO: 912208 - RNA, 22 nt, Human
gccgccgccgacgccgccgccu

SEQ ID NO: 912209 - RNA, 21 nt, Human
gcuccuuaagcugcaagggaa

SEQ ID NO: 912210 - RNA, 20 nt, Human
ggacuugaaauggaaaauua

SEQ ID NO: 912211 - RNA, 20 nt, Human
gggaccugacuuuggaagcc

SEQ ID NO: 912212 - RNA, 21 nt, Human
guaaacgacauaaacaacuga

SEQ ID NO: 912213 - RNA, 24 nt, Human
guggggcuaguccuuuaaagugau

SEQ ID NO: 912214 - RNA, 20 nt, Human
uaaaaaaaagucacccaaaa

SEQ ID NO: 912215 - RNA, 19 nt, Human
uaaaaaaagaagugaccuu

SEQ ID NO: 912216 - RNA, 23 nt, Human
uaaaaaauuccggacuagaaaaa

SEQ ID NO: 912217 - RNA, 18 nt, Human
uaaaaauagaagcauagc

SEQ ID NO: 912218 - RNA, 21 nt, Human
uaaaaauagaagcauagcauu

SEQ ID NO: 912219 - RNA, 23 nt, Human
uaaccuaagccacaaaggcuaaa

SEQ ID NO: 912220 - RNA, 19 nt, Human
uaagaggacuguugucauc

SEQ ID NO: 912221 - RNA, 22 nt, Human
uacaaagguuaaaaaaaaguca

SEQ ID NO: 912222 - RNA, 22 nt, Human
uacugcuucaaugaugcuuaga

SEQ ID NO: 912223 - RNA, 20 nt, Human
uagagucaggccaagacaaa

SEQ ID NO: 912224 - RNA, 23 nt, Human
uagcccuuuuugcuaaaagcuga

SEQ ID NO: 912225 - RNA, 19 nt, Human
uagcuuacaagaugguuuu

SEQ ID NO: 912226 - RNA, 23 nt, Human
uaggcaaaauacgaaaaaaccaa

SEQ ID NO: 912227 - RNA, 20 nt, Human
uauuaugguuggaucaagca

SEQ ID NO: 912228 - RNA, 21 nt, Human
ucaaugacgacgcugcuguuu

SEQ ID NO: 912229 - RNA, 22 nt, Human
ucacaaacuaacucaacuguga

SEQ ID NO: 912230 - RNA, 19 nt, Human
uccacacaauacugagcuc

SEQ ID NO: 912231 - RNA, 24 nt, Human
uccacucugaaucuuuuuuuuugu

SEQ ID NO: 912232 - RNA, 18 nt, Human
uccagccccugucacccu

SEQ ID NO: 912233 - RNA, 22 nt, Human
uccgcgccgccgcuacaauccc

SEQ ID NO: 912234 - RNA, 23 nt, Human
uccgcgccgccgcuacaauccca

SEQ ID NO: 912235 - RNA, 21 nt, Human
uccuacaaguggccaagaaga

SEQ ID NO: 912236 - RNA, 21 nt, Human
ucgaugccaagcauccaagaa

SEQ ID NO: 912237 - RNA, 20 nt, Human
ucuagacuauuuaauacaga

SEQ ID NO: 912238 - RNA, 21 nt, Human
ucucugcagauguaccacuug

SEQ ID NO: 912239 - RNA, 18 nt, Human
ucuuuggggcccaaagaa

SEQ ID NO: 912240 - RNA, 20 nt, Human
ucuuuggggcccaaagaauu

SEQ ID NO: 912241 - RNA, 21 nt, Human
ugaaaaauaaagcuauauuaa

SEQ ID NO: 912242 - RNA, 23 nt, Human
ugaaaaauauuucuaugggaaua

SEQ ID NO: 912243 - RNA, 18 nt, Human
ugaaaagacauacucuau

SEQ ID NO: 912244 - RNA, 19 nt, Human
ugaaacaaaaccauagaac

SEQ ID NO: 912245 - RNA, 20 nt, Human
ugaaacaaaaccauagaacc

SEQ ID NO: 912246 - RNA, 20 nt, Human
ugaacuaaagaguucuccuc

SEQ ID NO: 912247 - RNA, 19 nt, Human
ugaaugaauaucuaaagua

SEQ ID NO: 912248 - RNA, 21 nt, Human
ugaaugaauaucuaaaguaaa

SEQ ID NO: 912249 - RNA, 23 nt, Human
ugacuuuggaagccaaaggaaaa

SEQ ID NO: 912250 - RNA, 19 nt, Human
ugagcuacagaguucuuua

SEQ ID NO: 912251 - RNA, 23 nt, Human
ugagcuacagaguucuuuauuuu

SEQ ID NO: 912252 - RNA, 26 nt, Human
ugaguuuuuccaugaaaaaaaaaaaa

SEQ ID NO: 912253 - RNA, 22 nt, Human
ugauucgcaaacauuuucaaaa

SEQ ID NO: 912254 - RNA, 23 nt, Human
uggaagguaacuucauuuugggg

SEQ ID NO: 912255 - RNA, 24 nt, Human
uggcaagacauaaaaaaagaagug

SEQ ID NO: 912256 - RNA, 18 nt, Human
uggcuuguauuuccacag

SEQ ID NO: 912257 - RNA, 22 nt, Human
ugguaaaugugaccauccccuc

SEQ ID NO: 912258 - RNA, 20 nt, Human
ugguaucuguuacacuccug

SEQ ID NO: 912259 - RNA, 18 nt, Human
uguacagagccgccccuc

SEQ ID NO: 912260 - RNA, 24 nt, Human
uguaguaaacgacauaaacaacug

SEQ ID NO: 912261 - RNA, 20 nt, Human
ugugaaaaaaaaaaucuccu

SEQ ID NO: 912262 - RNA, 21 nt, Human
ugugaaaaaaaaaaucuccuu

SEQ ID NO: 912263 - RNA, 21 nt, Human
uguggagcccauggagggcgg

SEQ ID NO: 912264 - RNA, 26 nt, Human
uuacaaaaaaaaaaaaaaacuugguu

SEQ ID NO: 912265 - RNA, 20 nt, Human
uuagacauaugcccaacuac

SEQ ID NO: 912266 - RNA, 18 nt, Human
uuccuuaggcaggguggg

SEQ ID NO: 912267 - RNA, 21 nt, Human
uuggaagccaaaggaaaagau

SEQ ID NO: 912268 - RNA, 21 nt, Human
uuggggcccaaagaauuacag

SEQ ID NO: 912269 - RNA, 22 nt, Human
uuggugagcuacagaguucuuu

SEQ ID NO: 912270 - RNA, 23 nt, Human
uuucaggcugauauccauuuaau

SEQ ID NO: 912271 - RNA, 26 nt, Human
uuucugaauugcguuucuccaccuug

SEQ ID NO: 912272 - RNA, 18 nt, Human
uuuucaaaacuuacuggg

SEQ ID NO: 912273 - RNA, 19 nt, Human
uuuucaaaacuuacugggc

SEQ ID NO: 912274 - RNA, 22 nt, Human
aaacaaagaguggggugcagaa

SEQ ID NO: 912275 - RNA, 22 nt, Human
ggacauaacuuuauuggaaaca

SEQ ID NO: 912276 - RNA, 23 nt, Human
uaacuuuauuggaaacaaagagu

SEQ ID NO: 912277 - RNA, 18 nt, Human
aagcauggguaaggaaga

SEQ ID NO: 912278 - RNA, 20 nt, Human
aaggaagaggcuuuauggua

SEQ ID NO: 912279 - RNA, 22 nt, Human
accccaaagcauggguaaggaa

SEQ ID NO: 912280 - RNA, 20 nt, Human
acggccaggaggucugcuga

SEQ ID NO: 912281 - RNA, 19 nt, Human
aggcagcagguuccaaggc

SEQ ID NO: 912282 - RNA, 27 nt, Human
aggccuucagcaaagcuguugcagcuc

SEQ ID NO: 912283 - RNA, 23 nt, Human
aggggugcaggguucucgggagc

SEQ ID NO: 912284 - RNA, 20 nt, Human
caggcaccauucucgcccug

SEQ ID NO: 912285 - RNA, 20 nt, Human
cagguuccaaggcacugggg

SEQ ID NO: 912286 - RNA, 23 nt, Human
ccaaggcacuggggcagcccacg

SEQ ID NO: 912287 - RNA, 20 nt, Human
cccugcgcagggccugccac

SEQ ID NO: 912288 - RNA, 22 nt, Human
cccugcgcagggccugccacuu

SEQ ID NO: 912289 - RNA, 20 nt, Human
cuuuauuggugaaugggaau

SEQ ID NO: 912290 - RNA, 20 nt, Human
ggcaggccaggaggcuggcc

SEQ ID NO: 912291 - RNA, 22 nt, Human
ggccugccacuuggggcaggcc

SEQ ID NO: 912292 - RNA, 21 nt, Human
ggugaaugggaaugugugggu

SEQ ID NO: 912293 - RNA, 23 nt, Human
gugccuuuauuggugaaugggaa

SEQ ID NO: 912294 - RNA, 19 nt, Human
ucagcuguuaacaccccaa

SEQ ID NO: 912295 - RNA, 22 nt, Human
ugcgcagggccugccacuuggg

SEQ ID NO: 912296 - RNA, 22 nt, Human
uggccaggccuucagcaaagcu

SEQ ID NO: 912297 - RNA, 22 nt, Human
uuggagcucaauggccauaugu

SEQ ID NO: 912298 - RNA, 22 nt, Human
aaaaaaagaaaacaagcuucaa

SEQ ID NO: 912299 - RNA, 21 nt, Human
aaaacaggacauacuucacuu

SEQ ID NO: 912300 - RNA, 19 nt, Human
aaaagaaaacaagcuucaa

SEQ ID NO: 912301 - RNA, 24 nt, Human
aaaagaaaacaagcuucaauggaa

SEQ ID NO: 912302 - RNA, 20 nt, Human
aagaacaucaacauuuauuu

SEQ ID NO: 912303 - RNA, 19 nt, Human
aaugaaaagcaaaaaaaua

SEQ ID NO: 912304 - RNA, 25 nt, Human
accuagacuuaagaaaccggggguc

SEQ ID NO: 912305 - RNA, 19 nt, Human
agaaaaugaaaagcaaaaa

SEQ ID NO: 912306 - RNA, 18 nt, Human
agcugacaggaguguggc

SEQ ID NO: 912307 - RNA, 21 nt, Human
auaaaaugaugcucugugacc

SEQ ID NO: 912308 - RNA, 20 nt, Human
caaaagcaucagaacuauga

SEQ ID NO: 912309 - RNA, 23 nt, Human
cacaaugaacauaauuacauuug

SEQ ID NO: 912310 - RNA, 21 nt, Human
caccuagacuuaagaaacauc

SEQ ID NO: 912311 - RNA, 25 nt, Human
cacugcaguagcuaaaaugggaaga

SEQ ID NO: 912312 - RNA, 18 nt, Human
cacugcugaagguccaug

SEQ ID NO: 912313 - RNA, 19 nt, Human
cauuugcauuuaaacaaua

SEQ ID NO: 912314 - RNA, 19 nt, Human
cccaguacuucaaaauacc

SEQ ID NO: 912315 - RNA, 19 nt, Human
cgaaguguacauaugggcc

SEQ ID NO: 912316 - RNA, 23 nt, Human
cuuaagaaacaucgaaaucugga

SEQ ID NO: 912317 - RNA, 19 nt, Human
gaacauaauuacauuugua

SEQ ID NO: 912318 - RNA, 21 nt, Human
ggaagaaaaaaagaaaacaag

SEQ ID NO: 912319 - RNA, 26 nt, Human
ggaagaaaaaaagaaaacaagcuucc

SEQ ID NO: 912320 - RNA, 20 nt, Human
gggaagaaaaaaagaaaaca

SEQ ID NO: 912321 - RNA, 21 nt, Human
gggaagaaaaaaagaaaacaa

SEQ ID NO: 912322 - RNA, 20 nt, Human
uaaaaagcaccuuuacuuau

SEQ ID NO: 912323 - RNA, 24 nt, Human
uaaaaagcaccuuuacuuaugugc

SEQ ID NO: 912324 - RNA, 22 nt, Human
uaaaaugaugcucugugaccaa

SEQ ID NO: 912325 - RNA, 19 nt, Human
uaacaugauaaaaaaagaa

SEQ ID NO: 912326 - RNA, 24 nt, Human
uaacuuuagaaaaugaaaagcaaa

SEQ ID NO: 912327 - RNA, 21 nt, Human
uacaaaucaagugugaaacaa

SEQ ID NO: 912328 - RNA, 21 nt, Human
uagcuaaaaugggaagaaaaa

SEQ ID NO: 912329 - RNA, 23 nt, Human
ucugugaccaaaagcaucagaac

SEQ ID NO: 912330 - RNA, 19 nt, Human
ugaaacaaaagcacugcag

SEQ ID NO: 912331 - RNA, 25 nt, Human
ugaacauaauuacauuuguacacaa

SEQ ID NO: 912332 - RNA, 26 nt, Human
uggcacauuuuaaauacauauauaua

SEQ ID NO: 912333 - RNA, 20 nt, Human
ugugaaacaaaagcacugca

SEQ ID NO: 912334 - RNA, 21 nt, Human
uguggcaguaacugcugacau

SEQ ID NO: 912335 - RNA, 21 nt, Human
uugcuguacacauguauucca

SEQ ID NO: 912336 - RNA, 21 nt, Human
uuguuuuuuuuuuuuuuaaga

SEQ ID NO: 912337 - RNA, 22 nt, Human
uuuaaauacauauauauaaaau

SEQ ID NO: 912338 - RNA, 19 nt, Human
uuuuggaauaaacauuuuc

SEQ ID NO: 912339 - RNA, 21 nt, Human
uuuuuuuuuuuuaagaacauc

SEQ ID NO: 912340 - RNA, 22 nt, Human
uuuuuuuuuuuuuuuuuuuaag

SEQ ID NO: 912341 - RNA, 24 nt, Human
aacccccuucacccagauccccac

SEQ ID NO: 912342 - RNA, 21 nt, Human
aagcaaagcacuggguuugug

SEQ ID NO: 912343 - RNA, 18 nt, Human
aagccucugagcggcaac

SEQ ID NO: 912344 - RNA, 22 nt, Human
aaggcaccccuccccccagcuc

SEQ ID NO: 912345 - RNA, 20 nt, Human
aaggcugaccacacccuaca

SEQ ID NO: 912346 - RNA, 21 nt, Human
aauguguccugcugcuucccc

SEQ ID NO: 912347 - RNA, 24 nt, Human
acagggcaagaaauaucauggaac

SEQ ID NO: 912348 - RNA, 21 nt, Human
accaagcaucuccacugaggc

SEQ ID NO: 912349 - RNA, 23 nt, Human
accaaucugauauccccuuucca

SEQ ID NO: 912350 - RNA, 19 nt, Human
acccagauccccacaccaa

SEQ ID NO: 912351 - RNA, 18 nt, Human
accccaggauggcgaggc

SEQ ID NO: 912352 - RNA, 21 nt, Human
acugcacugggcacuaaccua

SEQ ID NO: 912353 - RNA, 19 nt, Human
acuggguguagaaaugugu

SEQ ID NO: 912354 - RNA, 23 nt, Human
agaggagacagucuggcacugca

SEQ ID NO: 912355 - RNA, 19 nt, Human
agccaggaccucagguggg

SEQ ID NO: 912356 - RNA, 23 nt, Human
agccaugaaggaguggagaggaa

SEQ ID NO: 912357 - RNA, 21 nt, Human
agcugggguccuccucccccg

SEQ ID NO: 912358 - RNA, 24 nt, Human
aggcagacaccaggcgcagaccua

SEQ ID NO: 912359 - RNA, 18 nt, Human
agggggccagggugggga

SEQ ID NO: 912360 - RNA, 19 nt, Human
aggugggcagaggacggcu

SEQ ID NO: 912361 - RNA, 22 nt, Human
caacucuagcagagagaaggcc

SEQ ID NO: 912362 - RNA, 21 nt, Human
cacaaccccagccagggcaag

SEQ ID NO: 912363 - RNA, 18 nt, Human
cacagaccugcuguucuc

SEQ ID NO: 912364 - RNA, 21 nt, Human
cacauaagauagccacaggug

SEQ ID NO: 912365 - RNA, 21 nt, Human
caccacaaccccagccagggc

SEQ ID NO: 912366 - RNA, 22 nt, Human
caccacaaccccagccagggca

SEQ ID NO: 912367 - RNA, 22 nt, Human
cacccagauccccacaccaagc

SEQ ID NO: 912368 - RNA, 24 nt, Human
cacccagauccccacaccaagcau

SEQ ID NO: 912369 - RNA, 18 nt, Human
caccccuccccccagcuc

SEQ ID NO: 912370 - RNA, 20 nt, Human
caccccuccccccagcucag

SEQ ID NO: 912371 - RNA, 22 nt, Human
caccggaccccagcgagcaccc

SEQ ID NO: 912372 - RNA, 21 nt, Human
cagcauuggccucagccaggg

SEQ ID NO: 912373 - RNA, 21 nt, Human
caggaccucaggugggcagag

SEQ ID NO: 912374 - RNA, 19 nt, Human
caggcugaagccucugagc

SEQ ID NO: 912375 - RNA, 22 nt, Human
caucuccucuucaccucuaguc

SEQ ID NO: 912376 - RNA, 23 nt, Human
caugggagugcaggggcaggggg

SEQ ID NO: 912377 - RNA, 22 nt, Human
ccaauggccucuccccaucucu

SEQ ID NO: 912378 - RNA, 22 nt, Human
ccaauguguccugcugcuuccc

SEQ ID NO: 912379 - RNA, 21 nt, Human
ccacaaccccagccagggcaa

SEQ ID NO: 912380 - RNA, 23 nt, Human
ccacaccaagcaucuccacugag

SEQ ID NO: 912381 - RNA, 24 nt, Human
ccacuggagucaccacaaccccag

SEQ ID NO: 912382 - RNA, 22 nt, Human
ccaggcagucgcuacucaaccc

SEQ ID NO: 912383 - RNA, 18 nt, Human
ccccaaggcaccccuccc

SEQ ID NO: 912384 - RNA, 19 nt, Human
ccccaaggcaccccucccc

SEQ ID NO: 912385 - RNA, 20 nt, Human
ccccaaggcaccccuccccc

SEQ ID NO: 912386 - RNA, 24 nt, Human
ccccagccagggcaaggcugaggc

SEQ ID NO: 912387 - RNA, 21 nt, Human
ccccagcgagcacccauaagc

SEQ ID NO: 912388 - RNA, 20 nt, Human
ccccagcucaggccagcugg

SEQ ID NO: 912389 - RNA, 19 nt, Human
cccccuccuuccacucuga

SEQ ID NO: 912390 - RNA, 21 nt, Human
cccccuucacccagaucccca

SEQ ID NO: 912391 - RNA, 18 nt, Human
ccccgcgcuggaaagcuc

SEQ ID NO: 912392 - RNA, 22 nt, Human
ccccgcgcuggaaagcucuaac

SEQ ID NO: 912393 - RNA, 21 nt, Human
ccccgcugcccucccggggca

SEQ ID NO: 912394 - RNA, 20 nt, Human
ccccuuuccaucucccuccu

SEQ ID NO: 912395 - RNA, 23 nt, Human
cccggggcagguggaucaugaga

SEQ ID NO: 912396 - RNA, 21 nt, Human
cccucagacacugcacagacc

SEQ ID NO: 912397 - RNA, 22 nt, Human
cccucagacacugcacagaccu

SEQ ID NO: 912398 - RNA, 22 nt, Human
cccuccuuccacucugaggauc

SEQ ID NO: 912399 - RNA, 24 nt, Human
cccuccuuccacucugaggaucuc

SEQ ID NO: 912400 - RNA, 18 nt, Human
ccgaggggccacgguguu

SEQ ID NO: 912401 - RNA, 18 nt, Human
ccgcugcccucccggggc

SEQ ID NO: 912402 - RNA, 28 nt, Human
ccucccggggcagguggaucaugagagc

SEQ ID NO: 912403 - RNA, 23 nt, Human
ccucugggaccuggccagucacu

SEQ ID NO: 912404 - RNA, 19 nt, Human
ccucugggagccaauggcc

SEQ ID NO: 912405 - RNA, 18 nt, Human
ccucuucaccucuagucc

SEQ ID NO: 912406 - RNA, 20 nt, Human
ccuggcccaggaccacggug

SEQ ID NO: 912407 - RNA, 23 nt, Human
cgaggcagacaccaggcgcagac

SEQ ID NO: 912408 - RNA, 22 nt, Human
cggcaacucuagcagagagaag

SEQ ID NO: 912409 - RNA, 21 nt, Human
cggcuucugaggugugauccc

SEQ ID NO: 912410 - RNA, 20 nt, Human
cgggggaaaccaaucugaua

SEQ ID NO: 912411 - RNA, 22 nt, Human
cuacuaacagccaucucccagg

SEQ ID NO: 912412 - RNA, 21 nt, Human
cucccccgccccuggggcccc

SEQ ID NO: 912413 - RNA, 26 nt, Human
cuccggcuggcaggucccuggcgcag

SEQ ID NO: 912414 - RNA, 19 nt, Human
cucuccggcuggcaggucc

SEQ ID NO: 912415 - RNA, 18 nt, Human
cugaggcugcaugugcuc

SEQ ID NO: 912416 - RNA, 22 nt, Human
cuugggaccgcuggaagucagg

SEQ ID NO: 912417 - RNA, 19 nt, Human
gaccuacuaacagccaucu

SEQ ID NO: 912418 - RNA, 19 nt, Human
gagccccaaggcaccccuc

SEQ ID NO: 912419 - RNA, 19 nt, Human
gaggcucccugugacuugg

SEQ ID NO: 912420 - RNA, 19 nt, Human
gaggggccacgguguuuuc

SEQ ID NO: 912421 - RNA, 21 nt, Human
gauccccacaccaagcaucuc

SEQ ID NO: 912422 - RNA, 21 nt, Human
gcauuggccucagccagggcu

SEQ ID NO: 912423 - RNA, 19 nt, Human
gccccaaggcugaccacac

SEQ ID NO: 912424 - RNA, 22 nt, Human
gcgagccccaaggcaccccucc

SEQ ID NO: 912425 - RNA, 21 nt, Human
gcugcuucccccuccuuccac

SEQ ID NO: 912426 - RNA, 24 nt, Human
ggaaagcucuaacucugcgagccc

SEQ ID NO: 912427 - RNA, 21 nt, Human
ggaccacggugugaguaguga

SEQ ID NO: 912428 - RNA, 21 nt, Human
ggaccuggccagucacugggu

SEQ ID NO: 912429 - RNA, 23 nt, Human
ggagcuucacagcauuggccuca

SEQ ID NO: 912430 - RNA, 20 nt, Human
ggaucaugagagcgccuagc

SEQ ID NO: 912431 - RNA, 25 nt, Human
ggaugcuguugugguuacugcagga

SEQ ID NO: 912432 - RNA, 23 nt, Human
ggcuacauucgucuccagguggg

SEQ ID NO: 912433 - RNA, 24 nt, Human
ggcuacauucgucuccaggugggu

SEQ ID NO: 912434 - RNA, 19 nt, Human
gggccacgguguuuucagu

SEQ ID NO: 912435 - RNA, 18 nt, Human
ggggaacagggcaagaaa

SEQ ID NO: 912436 - RNA, 19 nt, Human
ggggccaggguggggagcc

SEQ ID NO: 912437 - RNA, 21 nt, Human
ggggccaggguggggagccag

SEQ ID NO: 912438 - RNA, 22 nt, Human
ggguggagcugaggaggaaugu

SEQ ID NO: 912439 - RNA, 18 nt, Human
guguuugcuuuucucugu

SEQ ID NO: 912440 - RNA, 19 nt, Human
uaagacaaguccuucucuc

SEQ ID NO: 912441 - RNA, 23 nt, Human
uaagacaaguccuucucucugcc

SEQ ID NO: 912442 - RNA, 18 nt, Human
uaaggccccaaggcugac

SEQ ID NO: 912443 - RNA, 19 nt, Human
uaaggccucauccccccuc

SEQ ID NO: 912444 - RNA, 20 nt, Human
uaaggcuccaccgggggaaa

SEQ ID NO: 912445 - RNA, 21 nt, Human
uacauucgucuccaggugggu

SEQ ID NO: 912446 - RNA, 27 nt, Human
uagcagagagaaggccgaggggccacg

SEQ ID NO: 912447 - RNA, 24 nt, Human
uagggggauaggccucccagauua

SEQ ID NO: 912448 - RNA, 20 nt, Human
ucaacccccuucacccagau

SEQ ID NO: 912449 - RNA, 22 nt, Human
ucaccacaaccccagccagggc

SEQ ID NO: 912450 - RNA, 22 nt, Human
ucagacacugcacagaccugcu

SEQ ID NO: 912451 - RNA, 24 nt, Human
ucaggccagcugggguccuccucc

SEQ ID NO: 912452 - RNA, 24 nt, Human
ucaggcccuggcccaggaccacgg

SEQ ID NO: 912453 - RNA, 25 nt, Human
uccacuggagucaccacaaccccag

SEQ ID NO: 912454 - RNA, 18 nt, Human
uccagggggaacagggca

SEQ ID NO: 912455 - RNA, 19 nt, Human
uccaucuccucuucaccuc

SEQ ID NO: 912456 - RNA, 20 nt, Human
ucccccuccuuccacucuga

SEQ ID NO: 912457 - RNA, 24 nt, Human
uccccuuuccaucucccuccuccc

SEQ ID NO: 912458 - RNA, 24 nt, Human
uccccuuuccaucucccuccuucc

SEQ ID NO: 912459 - RNA, 22 nt, Human
ucccucugggagccaauggccu

SEQ ID NO: 912460 - RNA, 18 nt, Human
uccugcugcuucccccuc

SEQ ID NO: 912461 - RNA, 20 nt, Human
ucuaacucugcgagccccaa

SEQ ID NO: 912462 - RNA, 20 nt, Human
ucuccagguggguggagcug

SEQ ID NO: 912463 - RNA, 20 nt, Human
ucuuucugucucucucucuc

SEQ ID NO: 912464 - RNA, 18 nt, Human
ugacuuggacauuaauga

SEQ ID NO: 912465 - RNA, 24 nt, Human
ugcacauuccagggggaacagggc

SEQ ID NO: 912466 - RNA, 22 nt, Human
ugccugggauagggggauaggc

SEQ ID NO: 912467 - RNA, 18 nt, Human
ugcuuuucucugucuucc

SEQ ID NO: 912468 - RNA, 20 nt, Human
ugcuuuucucugucuucccc

SEQ ID NO: 912469 - RNA, 21 nt, Human
uggagucaccacaaccccagc

SEQ ID NO: 912470 - RNA, 23 nt, Human
uggcagcagcccauggccccagc

SEQ ID NO: 912471 - RNA, 21 nt, Human
ugggaggagcagaggagacag

SEQ ID NO: 912472 - RNA, 21 nt, Human
uggggcugacgaggauaggga

SEQ ID NO: 912473 - RNA, 22 nt, Human
uggucagucuccaccggacccc

SEQ ID NO: 912474 - RNA, 23 nt, Human
ugguggguguguggacacugagg

SEQ ID NO: 912475 - RNA, 19 nt, Human
ugucaaagcccugggucca

SEQ ID NO: 912476 - RNA, 23 nt, Human
ugucaggcuggcuccagaggcag

SEQ ID NO: 912477 - RNA, 19 nt, Human
uguggcucuguggagcuuc

SEQ ID NO: 912478 - RNA, 21 nt, Human
uucacccagauccccacacca

SEQ ID NO: 912479 - RNA, 21 nt, Human
uucccaugggagugcaggggc

SEQ ID NO: 912480 - RNA, 18 nt, Human
uucgucuccaggugggug

SEQ ID NO: 912481 - RNA, 21 nt, Human
uugccaauguguccugcugcu

SEQ ID NO: 912482 - RNA, 22 nt, Human
uuucccuccuuccuccucuccc

SEQ ID NO: 912483 - RNA, 18 nt, Human
aaaaaaccaaaaacaaaa

SEQ ID NO: 912484 - RNA, 22 nt, Human
aaaaaaccauaaaaaaccaaaa

SEQ ID NO: 912485 - RNA, 18 nt, Human
aaaaagcuguaaaacuuc

SEQ ID NO: 912486 - RNA, 18 nt, Human
aaaaccaaaaacaaaaaa

SEQ ID NO: 912487 - RNA, 21 nt, Human
aaaauaaaugaggcuaagguu

SEQ ID NO: 912488 - RNA, 22 nt, Human
aaacaaaaauacucaaaagggc

SEQ ID NO: 912489 - RNA, 23 nt, Human
aaacaauggaaaagaaaggcuuc

SEQ ID NO: 912490 - RNA, 19 nt, Human
aaaggcuucuauuagagaa

SEQ ID NO: 912491 - RNA, 24 nt, Human
aacacacacacaaacgcuucagaa

SEQ ID NO: 912492 - RNA, 19 nt, Human
aacccccaaaaccugguua

SEQ ID NO: 912493 - RNA, 22 nt, Human
aaccugaucaacacacacacaa

SEQ ID NO: 912494 - RNA, 19 nt, Human
aacucaacccccaaaaccu

SEQ ID NO: 912495 - RNA, 22 nt, Human
aagacacaacuacaaacgccau

SEQ ID NO: 912496 - RNA, 24 nt, Human
aagcaaaaauaucacacaaccuga

SEQ ID NO: 912497 - RNA, 21 nt, Human
acaaaaauacucaaaagggca

SEQ ID NO: 912498 - RNA, 20 nt, Human
acaaaauuucaguuuggauu

SEQ ID NO: 912499 - RNA, 19 nt, Human
acaagcaccaguuucaaau

SEQ ID NO: 912500 - RNA, 21 nt, Human
acacacacaaacgcuucagaa

SEQ ID NO: 912501 - RNA, 26 nt, Human
accaaaaacaaaaaaaggaaaaaaaa

SEQ ID NO: 912502 - RNA, 24 nt, Human
accaaagaaaacacagcuuuuugg

SEQ ID NO: 912503 - RNA, 24 nt, Human
acgucuuggaaaggguaugaaggu

SEQ ID NO: 912504 - RNA, 23 nt, Human
acuacaaacgccauagaaagcgg

SEQ ID NO: 912505 - RNA, 21 nt, Human
acuuguaaaacauuuuacaau

SEQ ID NO: 912506 - RNA, 22 nt, Human
agaaauaagcacauuuggauaa

SEQ ID NO: 912507 - RNA, 21 nt, Human
agacaacagguuacuguaacc

SEQ ID NO: 912508 - RNA, 23 nt, Human
agauggagcagacuaugagagcu

SEQ ID NO: 912509 - RNA, 19 nt, Human
agucagugacagacaccgg

SEQ ID NO: 912510 - RNA, 24 nt, Human
aguuuggauuaaauuuacacugug

SEQ ID NO: 912511 - RNA, 21 nt, Human
auaccucuuuagaggccaucc

SEQ ID NO: 912512 - RNA, 21 nt, Human
augaaaaguacacaaccugua

SEQ ID NO: 912513 - RNA, 23 nt, Human
augaaaauuuaaacacagaagua

SEQ ID NO: 912514 - RNA, 22 nt, Human
augaagccuguaugaacguacu

SEQ ID NO: 912515 - RNA, 19 nt, Human
augcaaaugcuaacugaaa

SEQ ID NO: 912516 - RNA, 18 nt, Human
caaaaacaaaaaaaggaa

SEQ ID NO: 912517 - RNA, 20 nt, Human
caaaacucaacccccaaaac

SEQ ID NO: 912518 - RNA, 22 nt, Human
caaaacucaacccccaaaaccu

SEQ ID NO: 912519 - RNA, 19 nt, Human
cacuacuuugaaaggagau

SEQ ID NO: 912520 - RNA, 22 nt, Human
cacuucuuaaaagacacaacua

SEQ ID NO: 912521 - RNA, 26 nt, Human
cagcagcaggugcaaccugggagugc

SEQ ID NO: 912522 - RNA, 23 nt, Human
cagguugaaugaagccuguauga

SEQ ID NO: 912523 - RNA, 24 nt, Human
caguugaaacaaaauuucaguuug

SEQ ID NO: 912524 - RNA, 24 nt, Human
cauaaaaaaccaaaaacaaaaaaa

SEQ ID NO: 912525 - RNA, 22 nt, Human
cauaaaacgugugcuaaggcaa

SEQ ID NO: 912526 - RNA, 23 nt, Human
cauccaaucucuuuagaagacaa

SEQ ID NO: 912527 - RNA, 22 nt, Human
cauuuaaaaguccaggacuuaa

SEQ ID NO: 912528 - RNA, 19 nt, Human
cauuuucuucuauuuguuu

SEQ ID NO: 912529 - RNA, 24 nt, Human
cauuuuguuuuucauaaauuuuga

SEQ ID NO: 912530 - RNA, 22 nt, Human
ccaaaaccugguuaucccagau

SEQ ID NO: 912531 - RNA, 22 nt, Human
cccaaaaccugguuaucccaga

SEQ ID NO: 912532 - RNA, 24 nt, Human
ccccgccauggcguuagugagaac

SEQ ID NO: 912533 - RNA, 20 nt, Human
cccgcagccugcuucucgcu

SEQ ID NO: 912534 - RNA, 22 nt, Human
cccuguucaagggcaaacaaaa

SEQ ID NO: 912535 - RNA, 19 nt, Human
ccugcaggacccugugggc

SEQ ID NO: 912536 - RNA, 19 nt, Human
cgccagcagcaggugcaac

SEQ ID NO: 912537 - RNA, 18 nt, Human
cucaaaagggcaacagca

SEQ ID NO: 912538 - RNA, 20 nt, Human
cugcucaccgccagcagcag

SEQ ID NO: 912539 - RNA, 21 nt, Human
cugucaaaggcagcauuugaa

SEQ ID NO: 912540 - RNA, 23 nt, Human
gaacaggcggccaccacgagcca

SEQ ID NO: 912541 - RNA, 21 nt, Human
gacaagcaccaguuucaaauc

SEQ ID NO: 912542 - RNA, 19 nt, Human
gagagcccccucggggggc

SEQ ID NO: 912543 - RNA, 22 nt, Human
gcaggggugugaauuucaucua

SEQ ID NO: 912544 - RNA, 18 nt, Human
gcccuguucaagggcaaa

SEQ ID NO: 912545 - RNA, 24 nt, Human
gcugaacccccugcucaccgccag

SEQ ID NO: 912546 - RNA, 21 nt, Human
gcuggggagagcccccucggg

SEQ ID NO: 912547 - RNA, 19 nt, Human
gugaaugcguccacccaca

SEQ ID NO: 912548 - RNA, 21 nt, Human
uaaaaaaccaaaaacaaaaaa

SEQ ID NO: 912549 - RNA, 23 nt, Human
uaaaaagauacccaacugaaaua

SEQ ID NO: 912550 - RNA, 25 nt, Human
uaaaaagcaccagagagugagcuga

SEQ ID NO: 912551 - RNA, 21 nt, Human
uaacaaauuuaaacaacaaag

SEQ ID NO: 912552 - RNA, 21 nt, Human
uaagguuuggggcucauucua

SEQ ID NO: 912553 - RNA, 22 nt, Human
uaauguguugugagaaaaccgg

SEQ ID NO: 912554 - RNA, 22 nt, Human
uacagaaggucacugacagaca

SEQ ID NO: 912555 - RNA, 21 nt, Human
uacagaguuuauuuguuguuu

SEQ ID NO: 912556 - RNA, 23 nt, Human
uaccauccagaaagccacuacuu

SEQ ID NO: 912557 - RNA, 20 nt, Human
uacuacagaaggucacugac

SEQ ID NO: 912558 - RNA, 28 nt, Human
uagaagacaauucaacuacaaaaagagc

SEQ ID NO: 912559 - RNA, 24 nt, Human
uaucaagcaaaaauaucacacaac

SEQ ID NO: 912560 - RNA, 21 nt, Human
uaucacacaaccugaucaaca

SEQ ID NO: 912561 - RNA, 25 nt, Human
uaucagaaaauuccaagaacuguca

SEQ ID NO: 912562 - RNA, 28 nt, Human
ucaaaccuaguauaacaaguacuccaua

SEQ ID NO: 912563 - RNA, 19 nt, Human
ucaaaggcagcauuugaaa

SEQ ID NO: 912564 - RNA, 25 nt, Human
ucagaaaauuccaagaacugucaaa

SEQ ID NO: 912565 - RNA, 23 nt, Human
ucagugacagacaccgguuucuc

SEQ ID NO: 912566 - RNA, 25 nt, Human
ucauucuagcuauacuucuaauuau

SEQ ID NO: 912567 - RNA, 21 nt, Human
uccccacaacacugcccuguu

SEQ ID NO: 912568 - RNA, 22 nt, Human
uccgcggggcuccacgucgugc

SEQ ID NO: 912569 - RNA, 20 nt, Human
ucucuuuugcaguccccaca

SEQ ID NO: 912570 - RNA, 21 nt, Human
ucugacaguucugcgacaagc

SEQ ID NO: 912571 - RNA, 23 nt, Human
ucugaccaaagaaaacacagcuu

SEQ ID NO: 912572 - RNA, 20 nt, Human
ucuuuuguauaaauugauuu

SEQ ID NO: 912573 - RNA, 20 nt, Human
ugaaaggagaucugagcuau

SEQ ID NO: 912574 - RNA, 19 nt, Human
ugaaggccaaaacucaacc

SEQ ID NO: 912575 - RNA, 24 nt, Human
ugcugaacccccugcucaccgcca

SEQ ID NO: 912576 - RNA, 19 nt, Human
uggaacugcuuaauaucag

SEQ ID NO: 912577 - RNA, 27 nt, Human
uggaaggugggaaaucaauaacaacgg

SEQ ID NO: 912578 - RNA, 19 nt, Human
uggaauuaccauccagaaa

SEQ ID NO: 912579 - RNA, 25 nt, Human
uggcugguuaauuguuucaaauuug

SEQ ID NO: 912580 - RNA, 19 nt, Human
ugguagggcuggagcgacc

SEQ ID NO: 912581 - RNA, 25 nt, Human
uuaauauuacacaugcaaaugcuaa

SEQ ID NO: 912582 - RNA, 24 nt, Human
uuaccacuuucaauagucauuaau

SEQ ID NO: 912583 - RNA, 22 nt, Human
uuagaagacaauucaacuacaa

SEQ ID NO: 912584 - RNA, 21 nt, Human
uucaaaggagaaaaguauuuu

SEQ ID NO: 912585 - RNA, 19 nt, Human
uucaacuacaaaaagagcc

SEQ ID NO: 912586 - RNA, 22 nt, Human
uuuaaacacagaaguauguaag

SEQ ID NO: 912587 - RNA, 22 nt, Human
uuuaauauaucaggaacaaaga

SEQ ID NO: 912588 - RNA, 24 nt, Human
uuucucacuccgguccccgccaug

SEQ ID NO: 912589 - RNA, 19 nt, Human
uuugcaguccccacaacac

SEQ ID NO: 912590 - RNA, 21 nt, Human
cagccgcggcugcagcgugcg

SEQ ID NO: 912591 - RNA, 25 nt, Human
cagccgcggcugcagcgugcggcgg

SEQ ID NO: 912592 - RNA, 21 nt, Human
cggcugcagcgugcggcggag

SEQ ID NO: 912593 - RNA, 28 nt, Human
aaaaacauacaacucuucaugcuccucc

SEQ ID NO: 912594 - RNA, 24 nt, Human
aaacauacaacucuucaugcuccu

SEQ ID NO: 912595 - RNA, 23 nt, Human
aagcacaguaugacauggccgug

SEQ ID NO: 912596 - RNA, 27 nt, Human
aauuuuuuccuuucaauuuuuauucau

SEQ ID NO: 912597 - RNA, 18 nt, Human
acaagaaaggaagcacag

SEQ ID NO: 912598 - RNA, 20 nt, Human
agaaaggaagcacaguauga

SEQ ID NO: 912599 - RNA, 18 nt, Human
augcucacaugaacaaga

SEQ ID NO: 912600 - RNA, 20 nt, Human
cagaaauucacaagucacuc

SEQ ID NO: 912601 - RNA, 21 nt, Human
cagcaaauacuaagcucccac

SEQ ID NO: 912602 - RNA, 21 nt, Human
cagcacuccaaaaacauacaa

SEQ ID NO: 912603 - RNA, 18 nt, Human
cguggguccucuggggcc

SEQ ID NO: 912604 - RNA, 23 nt, Human
cuccagcacuccaaaaacauaca

SEQ ID NO: 912605 - RNA, 22 nt, Human
gccucaucucugcccacaucac

SEQ ID NO: 912606 - RNA, 22 nt, Human
ucaaucaauguuagaugaaggg

SEQ ID NO: 912607 - RNA, 24 nt, Human
uccaaaaacauacaacucuucaug

SEQ ID NO: 912608 - RNA, 23 nt, Human
uccccagggaacggucaguccca

SEQ ID NO: 912609 - RNA, 19 nt, Human
uuaaaguagguacuaguuc

SEQ ID NO: 912610 - RNA, 20 nt, Human
uuaaaugcucacaugaacaa

SEQ ID NO: 912611 - RNA, 24 nt, Human
uuuuuuuuuuuuuuuuaaauuuuu

SEQ ID NO: 912612 - RNA, 19 nt, Human
aaagaaagaggaaaagaac

SEQ ID NO: 912613 - RNA, 19 nt, Human
aagaggaaaagaacagaag

SEQ ID NO: 912614 - RNA, 20 nt, Human
aagaggaaaagaacagaagc

SEQ ID NO: 912615 - RNA, 19 nt, Human
aagcagaaaucugaaggua

SEQ ID NO: 912616 - RNA, 21 nt, Human
aagcagaaaucugaagguagg

SEQ ID NO: 912617 - RNA, 19 nt, Human
aagcucuuccuccaccccu

SEQ ID NO: 912618 - RNA, 23 nt, Human
aagcucuuccuccaccccuaaau

SEQ ID NO: 912619 - RNA, 20 nt, Human
acaggauuuacagcaagaug

SEQ ID NO: 912620 - RNA, 21 nt, Human
agaaagaggaaaagaacagaa

SEQ ID NO: 912621 - RNA, 25 nt, Human
agacacaaaguaaauauauucaaga

SEQ ID NO: 912622 - RNA, 19 nt, Human
agaugcuacacauagcauc

SEQ ID NO: 912623 - RNA, 22 nt, Human
agcaucauucuggauaagcgac

SEQ ID NO: 912624 - RNA, 22 nt, Human
agccaccucugugagaaaaaag

SEQ ID NO: 912625 - RNA, 19 nt, Human
agcgacaaaggaguaagaa

SEQ ID NO: 912626 - RNA, 23 nt, Human
agggaggaagaggaaacauccaa

SEQ ID NO: 912627 - RNA, 18 nt, Human
agguagguguacaaggaa

SEQ ID NO: 912628 - RNA, 18 nt, Human
auaagggaggaagaggaa

SEQ ID NO: 912629 - RNA, 18 nt, Human
caaagcucuuccuccacc

SEQ ID NO: 912630 - RNA, 19 nt, Human
caagaugcuacacauagca

SEQ ID NO: 912631 - RNA, 19 nt, Human
cacagaaccuuaaacagag

SEQ ID NO: 912632 - RNA, 22 nt, Human
caccccuaaaucucugaauuuu

SEQ ID NO: 912633 - RNA, 19 nt, Human
cagcaagaugcuacacaua

SEQ ID NO: 912634 - RNA, 24 nt, Human
ccaauucagguccccuccuuaucc

SEQ ID NO: 912635 - RNA, 20 nt, Human
cccaaagcucuuccuccacc

SEQ ID NO: 912636 - RNA, 22 nt, Human
cccaaagcucuuccuccacccc

SEQ ID NO: 912637 - RNA, 22 nt, Human
ccccuaaaucucugaauuucua

SEQ ID NO: 912638 - RNA, 23 nt, Human
ccccuaaaucucugaauuucuaa

SEQ ID NO: 912639 - RNA, 20 nt, Human
gagaagguugaaaaaagaaa

SEQ ID NO: 912640 - RNA, 19 nt, Human
gagguuggugagguagaca

SEQ ID NO: 912641 - RNA, 25 nt, Human
ggaagaggaaacauccaacaacuug

SEQ ID NO: 912642 - RNA, 21 nt, Human
ggccaaaccuuauaccucccc

SEQ ID NO: 912643 - RNA, 24 nt, Human
uaaauauauucaagagagacacaa

SEQ ID NO: 912644 - RNA, 22 nt, Human
uaaccaaagaguagaauucgaa

SEQ ID NO: 912645 - RNA, 23 nt, Human
uaacuuuaaccaaagaguagaau

SEQ ID NO: 912646 - RNA, 23 nt, Human
uaagcgacaaaggaguaagaaca

SEQ ID NO: 912647 - RNA, 19 nt, Human
uacaggauuuacagcaaga

SEQ ID NO: 912648 - RNA, 27 nt, Human
uacaggauuuacagcaagaggacauac

SEQ ID NO: 912649 - RNA, 20 nt, Human
uagcaucauucuggauaagc

SEQ ID NO: 912650 - RNA, 19 nt, Human
ucagguccccuccuuaucc

SEQ ID NO: 912651 - RNA, 23 nt, Human
uccccaaagcucuuccuccaccc

SEQ ID NO: 912652 - RNA, 21 nt, Human
ucuuccuccaccccuaaaucu

SEQ ID NO: 912653 - RNA, 18 nt, Human
ugaaaaaagaaagagaga

SEQ ID NO: 912654 - RNA, 24 nt, Human
ugaaaucaaaguguaagcagaaau

SEQ ID NO: 912655 - RNA, 25 nt, Human
ugagaagguugaaaaaagaaagaga

SEQ ID NO: 912656 - RNA, 19 nt, Human
uguuuggaguuugaaggag

SEQ ID NO: 912657 - RNA, 21 nt, Human
uucaagagagacacaaagaaa

SEQ ID NO: 912658 - RNA, 21 nt, Human
uucacgagucaucuuuccuua

SEQ ID NO: 912659 - RNA, 21 nt, Human
uuguggugcagagauauaagg

SEQ ID NO: 912660 - RNA, 23 nt, Human
aaacgcccccuccuccccaaucg

SEQ ID NO: 912661 - RNA, 18 nt, Human
aaacucuuagcagcaagc

SEQ ID NO: 912662 - RNA, 20 nt, Human
aacugaugaaauuuccaccu

SEQ ID NO: 912663 - RNA, 19 nt, Human
aagcugauaaacaauagau

SEQ ID NO: 912664 - RNA, 27 nt, Human
accagaaacgcccccuccuccccaauc

SEQ ID NO: 912665 - RNA, 23 nt, Human
acuccagcuguuggcuuugagua

SEQ ID NO: 912666 - RNA, 22 nt, Human
agcaagcagaaagaacuuauua

SEQ ID NO: 912667 - RNA, 23 nt, Human
agcaugaacuuuuucgggaggaa

SEQ ID NO: 912668 - RNA, 26 nt, Human
agcuuggucaacuguaaguaggguuc

SEQ ID NO: 912669 - RNA, 19 nt, Human
aggcgcaaacaacccacga

SEQ ID NO: 912670 - RNA, 18 nt, Human
agugucaacucaauacca

SEQ ID NO: 912671 - RNA, 21 nt, Human
augaacugggaaaaaaagacc

SEQ ID NO: 912672 - RNA, 21 nt, Human
caccucaaguaaucuuuacau

SEQ ID NO: 912673 - RNA, 20 nt, Human
cacuguucacuuuauuuuuu

SEQ ID NO: 912674 - RNA, 23 nt, Human
caggcuaaaagguuaggaucaaa

SEQ ID NO: 912675 - RNA, 23 nt, Human
ccagaaacgcccccuccucccca

SEQ ID NO: 912676 - RNA, 25 nt, Human
ccaggcgaggcgcaaacaacccacg

SEQ ID NO: 912677 - RNA, 26 nt, Human
ccccaggcgaggcgcaaacaacccac

SEQ ID NO: 912678 - RNA, 20 nt, Human
ccccuauuccuuuuuuaacc

SEQ ID NO: 912679 - RNA, 18 nt, Human
ccccugccaguccugauc

SEQ ID NO: 912680 - RNA, 18 nt, Human
ccuccccaaucgugagag

SEQ ID NO: 912681 - RNA, 25 nt, Human
cgcccccuccuccccaaucgugaga

SEQ ID NO: 912682 - RNA, 26 nt, Human
cgcccccuccuccccaaucgugagag

SEQ ID NO: 912683 - RNA, 21 nt, Human
cuacacuggcccucauauccc

SEQ ID NO: 912684 - RNA, 24 nt, Human
cucaaguaaucuuuacauuucuac

SEQ ID NO: 912685 - RNA, 24 nt, Human
cucuacacuggcccucauaucccc

SEQ ID NO: 912686 - RNA, 21 nt, Human
cucuguaacacucuaccccua

SEQ ID NO: 912687 - RNA, 20 nt, Human
gagcaggcuaaaagguuagg

SEQ ID NO: 912688 - RNA, 22 nt, Human
gaggcgcaaacaacccacgacg

SEQ ID NO: 912689 - RNA, 18 nt, Human
gauaucugaaacucgaaa

SEQ ID NO: 912690 - RNA, 24 nt, Human
gcagaaagaacuuauuaaucagug

SEQ ID NO: 912691 - RNA, 21 nt, Human
ggaucaaaugggcauauccuu

SEQ ID NO: 912692 - RNA, 24 nt, Human
gugagcccgggacacgagggcuga

SEQ ID NO: 912693 - RNA, 19 nt, Human
guguacuggcuuucacuuu

SEQ ID NO: 912694 - RNA, 18 nt, Human
uaagaacaaaguuaacuc

SEQ ID NO: 912695 - RNA, 23 nt, Human
uaagaacaaaguuaacucggacg

SEQ ID NO: 912696 - RNA, 25 nt, Human
uaauaaccagaauaauucaugacac

SEQ ID NO: 912697 - RNA, 24 nt, Human
uacuggcuuucacuuuucccacaa

SEQ ID NO: 912698 - RNA, 18 nt, Human
uaucaagagcaagucugc

SEQ ID NO: 912699 - RNA, 26 nt, Human
uauccucaaauauccuaaauauccaa

SEQ ID NO: 912700 - RNA, 18 nt, Human
ucaagaaggauauggaga

SEQ ID NO: 912701 - RNA, 19 nt, Human
uccccaaucgugagagcuc

SEQ ID NO: 912702 - RNA, 18 nt, Human
ucucucgugagcaugaac

SEQ ID NO: 912703 - RNA, 21 nt, Human
ugaacugggaaaaaaagaccu

SEQ ID NO: 912704 - RNA, 18 nt, Human
uggaaguaguauguggcg

SEQ ID NO: 912705 - RNA, 25 nt, Human
uggaaguaguauguggcgagggggu

SEQ ID NO: 912706 - RNA, 22 nt, Human
uggagcugcgaaccagaaacgc

SEQ ID NO: 912707 - RNA, 21 nt, Human
ugggaaaaaaagaccuggagg

SEQ ID NO: 912708 - RNA, 19 nt, Human
ugucucacaguauauggaa

SEQ ID NO: 912709 - RNA, 21 nt, Human
uguugugaggauaagacauga

SEQ ID NO: 912710 - RNA, 22 nt, Human
uguugugaggauaagacaugaa

SEQ ID NO: 912711 - RNA, 24 nt, Human
uuaaagguaaacuuucugcaugau

SEQ ID NO: 912712 - RNA, 24 nt, Human
uuaguaauaaccagaauaauucau

SEQ ID NO: 912713 - RNA, 24 nt, Human
uuaguauuuugcuucaugucuuca

SEQ ID NO: 912714 - RNA, 20 nt, Human
uuggucaacuguaaguaggg

SEQ ID NO: 912715 - RNA, 19 nt, Human
uuucccacaaacucucucg

SEQ ID NO: 912716 - RNA, 23 nt, Human
uuucccacaaacucucucgugag

SEQ ID NO: 912717 - RNA, 23 nt, Human
uuucuuaucguuugcaaacugau

SEQ ID NO: 912718 - RNA, 23 nt, Human
aaacccggcccccuacucccuca

SEQ ID NO: 912719 - RNA, 19 nt, Human
aagcagcuucccgggcucc

SEQ ID NO: 912720 - RNA, 19 nt, Human
acagacccacagaaggacc

SEQ ID NO: 912721 - RNA, 21 nt, Human
aggagccuggaucccacuccu

SEQ ID NO: 912722 - RNA, 18 nt, Human
cacagggaggcuggcaac

SEQ ID NO: 912723 - RNA, 27 nt, Human
caccaggggccagcgagagagcagcag

SEQ ID NO: 912724 - RNA, 22 nt, Human
cagacccacagaaggaccguac

SEQ ID NO: 912725 - RNA, 18 nt, Human
cagcuucccgggcuccau

SEQ ID NO: 912726 - RNA, 23 nt, Human
caguuuuauuagggaagaggggc

SEQ ID NO: 912727 - RNA, 19 nt, Human
ccacagaaggaccguacga

SEQ ID NO: 912728 - RNA, 21 nt, Human
ccaccccuccccacacccucc

SEQ ID NO: 912729 - RNA, 20 nt, Human
ccagaagacacgcugggcag

SEQ ID NO: 912730 - RNA, 19 nt, Human
ccagccagaagacacgcug

SEQ ID NO: 912731 - RNA, 20 nt, Human
ccaggcucugucacagggag

SEQ ID NO: 912732 - RNA, 22 nt, Human
cccaaacccggcccccuacucc

SEQ ID NO: 912733 - RNA, 20 nt, Human
cccacacccuccuuccggga

SEQ ID NO: 912734 - RNA, 21 nt, Human
ccccaccccuccccacacccu

SEQ ID NO: 912735 - RNA, 27 nt, Human
ccccaccccuccccacacccuccuucc

SEQ ID NO: 912736 - RNA, 22 nt, Human
ccccuccccacacccuccuucc

SEQ ID NO: 912737 - RNA, 18 nt, Human
cccggguucaggcuuccu

SEQ ID NO: 912738 - RNA, 21 nt, Human
cccuccuuccugcuuccgguc

SEQ ID NO: 912739 - RNA, 23 nt, Human
cccuccuuccugcuuccggucuu

SEQ ID NO: 912740 - RNA, 19 nt, Human
cccugccccaccccucccc

SEQ ID NO: 912741 - RNA, 21 nt, Human
cccugccccaccccuccccac

SEQ ID NO: 912742 - RNA, 20 nt, Human
cccugcggagaaggggcaga

SEQ ID NO: 912743 - RNA, 24 nt, Human
cccugcuuccugcgcccuccuucc

SEQ ID NO: 912744 - RNA, 20 nt, Human
cccuuagcaacugagggccc

SEQ ID NO: 912745 - RNA, 22 nt, Human
ccgccucuugguugcuuaacuu

SEQ ID NO: 912746 - RNA, 24 nt, Human
ccucaccaggggccagcgagagag

SEQ ID NO: 912747 - RNA, 20 nt, Human
ccuccccacacccuccuucc

SEQ ID NO: 912748 - RNA, 18 nt, Human
ccucuugguugcuuaacu

SEQ ID NO: 912749 - RNA, 19 nt, Human
ccugccccaccccucccca

SEQ ID NO: 912750 - RNA, 18 nt, Human
cugcgcccuccuuccugc

SEQ ID NO: 912751 - RNA, 18 nt, Human
cugcgcccuccuuccugg

SEQ ID NO: 912752 - RNA, 19 nt, Human
gacaaggugcgggcugcag

SEQ ID NO: 912753 - RNA, 18 nt, Human
ggacuugaagaaccggug

SEQ ID NO: 912754 - RNA, 25 nt, Human
ggcccagcagugacaaggugcgggc

SEQ ID NO: 912755 - RNA, 19 nt, Human
ggcucccugccccaccccu

SEQ ID NO: 912756 - RNA, 18 nt, Human
ggcucugucacagggagg

SEQ ID NO: 912757 - RNA, 20 nt, Human
uaaagugccacuugcguggg

SEQ ID NO: 912758 - RNA, 19 nt, Human
uccaugaggugaagucacc

SEQ ID NO: 912759 - RNA, 21 nt, Human
uccaugaggugaagucaccgc

SEQ ID NO: 912760 - RNA, 20 nt, Human
ucccugccccaccccucccc

SEQ ID NO: 912761 - RNA, 21 nt, Human
ucucaaccgaggaugcagggc

SEQ ID NO: 912762 - RNA, 20 nt, Human
ugagggcccaaacccggccc

SEQ ID NO: 912763 - RNA, 21 nt, Human
ugccagagccacagggcccug

SEQ ID NO: 912764 - RNA, 23 nt, Human
ugccccaccccuccccacacccu

SEQ ID NO: 912765 - RNA, 22 nt, Human
ugcccucggcaccgacagaccc

SEQ ID NO: 912766 - RNA, 20 nt, Human
ugccgaggcaagcagcuucc

SEQ ID NO: 912767 - RNA, 24 nt, Human
ugccggagucaguuuuauuaggga

SEQ ID NO: 912768 - RNA, 20 nt, Human
ugcggagaaggggcagacgg

SEQ ID NO: 912769 - RNA, 19 nt, Human
ugcuuccugcgcccuccuu

SEQ ID NO: 912770 - RNA, 19 nt, Human
uggcaacgccauggccugg

SEQ ID NO: 912771 - RNA, 22 nt, Human
uggcccagcagugacaaggugc

SEQ ID NO: 912772 - RNA, 20 nt, Human
ugugggagaggagccuggau

SEQ ID NO: 912773 - RNA, 19 nt, Human
uuauuagggaagaggggcu

SEQ ID NO: 912774 - RNA, 22 nt, Human
uucaccccaucucuugaaccgc

SEQ ID NO: 912775 - RNA, 21 nt, Human
uucugugggagaggagccugg

SEQ ID NO: 912776 - RNA, 19 nt, Human
uuuuuuuuuuuuuaaggga

SEQ ID NO: 912777 - RNA, 26 nt, Human
uuuuuuuuuuuuuugacgcugccgga

SEQ ID NO: 912778 - RNA, 24 nt, Human
uuuuuuuuuuuuuuuuugacgcug

SEQ ID NO: 912779 - RNA, 24 nt, Human
uuuuuuuuuuuuuuuuuuuaaggg

SEQ ID NO: 912780 - RNA, 27 nt, Human
uuuuuuuuuuuuuuuuuuuuuuugggg

SEQ ID NO: 912781 - RNA, 21 nt, Human
aacaaaacaggcagaggccua

SEQ ID NO: 912782 - RNA, 24 nt, Human
aagacaaacaauacaaaggccaaa

SEQ ID NO: 912783 - RNA, 27 nt, Human
acaauacaaaggccaaaguccucugaa

SEQ ID NO: 912784 - RNA, 18 nt, Human
acccgcgcaggcgccccg

SEQ ID NO: 912785 - RNA, 19 nt, Human
agaaagagcauaaaauuau

SEQ ID NO: 912786 - RNA, 21 nt, Human
agacaaaagggcgggaccuga

SEQ ID NO: 912787 - RNA, 22 nt, Human
agacaaaagggcgggaccugag

SEQ ID NO: 912788 - RNA, 21 nt, Human
agacaaacaauacaaaggccc

SEQ ID NO: 912789 - RNA, 21 nt, Human
agccggcacuggcgacagccg

SEQ ID NO: 912790 - RNA, 23 nt, Human
agccggcggccuggcucccgcgc

SEQ ID NO: 912791 - RNA, 21 nt, Human
aggcagaggccuaggccugga

SEQ ID NO: 912792 - RNA, 20 nt, Human
aggggggagcggccccucag

SEQ ID NO: 912793 - RNA, 22 nt, Human
agguaugggauggagucaggag

SEQ ID NO: 912794 - RNA, 21 nt, Human
aggugaggggagggggcgcuc

SEQ ID NO: 912795 - RNA, 22 nt, Human
caaguuaacaugugcuuccucu

SEQ ID NO: 912796 - RNA, 20 nt, Human
cagcgcgcagccgcgcuggc

SEQ ID NO: 912797 - RNA, 18 nt, Human
caggcagaggccuaggcc

SEQ ID NO: 912798 - RNA, 20 nt, Human
ccaaccccggggggaggggg

SEQ ID NO: 912799 - RNA, 20 nt, Human
ccacaggcuaaagccggcac

SEQ ID NO: 912800 - RNA, 22 nt, Human
ccagcgcacugagacaaaaggg

SEQ ID NO: 912801 - RNA, 21 nt, Human
ccccaccccccggcccccagu

SEQ ID NO: 912802 - RNA, 21 nt, Human
cccccaccccccggcccccag

SEQ ID NO: 912803 - RNA, 24 nt, Human
ccccccaaccccggggggaggggg

SEQ ID NO: 912804 - RNA, 22 nt, Human
ccccccaccccccggcccccag

SEQ ID NO: 912805 - RNA, 20 nt, Human
ccccccggcccccagucccc

SEQ ID NO: 912806 - RNA, 20 nt, Human
ccccggggggaggggggagg

SEQ ID NO: 912807 - RNA, 21 nt, Human
ccccggggggaggggggaggu

SEQ ID NO: 912808 - RNA, 24 nt, Human
cccgcaaagccacccgcgcaggcg

SEQ ID NO: 912809 - RNA, 24 nt, Human
cccggggggaggggggaggugagg

SEQ ID NO: 912810 - RNA, 22 nt, Human
cccuggcucccccccacccccc

SEQ ID NO: 912811 - RNA, 18 nt, Human
ccgccgccgccgucugcg

SEQ ID NO: 912812 - RNA, 22 nt, Human
ccgccucucgccgccgccgccg

SEQ ID NO: 912813 - RNA, 19 nt, Human
ccgcgaggggggagcggcc

SEQ ID NO: 912814 - RNA, 22 nt, Human
ccggcccggcugcuggcugcac

SEQ ID NO: 912815 - RNA, 22 nt, Human
ccggcugcuggcugcacagugg

SEQ ID NO: 912816 - RNA, 18 nt, Human
ccgucugcgucccggcug

SEQ ID NO: 912817 - RNA, 33 nt, Human
ccucccgggcugggugcucucugcuccggcccc

SEQ ID NO: 912818 - RNA, 19 nt, Human
ccucgcccuggcucccccc

SEQ ID NO: 912819 - RNA, 21 nt, Human
ccucgcccuggcuccccccca

SEQ ID NO: 912820 - RNA, 24 nt, Human
ccucucgccgccgccgccgucugc

SEQ ID NO: 912821 - RNA, 25 nt, Human
ccucuucuauuacggaaaugagagu

SEQ ID NO: 912822 - RNA, 22 nt, Human
ccugaggucucgcgcaggcgcu

SEQ ID NO: 912823 - RNA, 23 nt, Human
cgcagccgcggugagggaguacc

SEQ ID NO: 912824 - RNA, 22 nt, Human
cgcccuggcucccccccacccc

SEQ ID NO: 912825 - RNA, 19 nt, Human
cgccgccgccgccgucugc

SEQ ID NO: 912826 - RNA, 25 nt, Human
cgccgucugcgucccggcugccgcg

SEQ ID NO: 912827 - RNA, 23 nt, Human
cgcuccugaccccggccccgcuu

SEQ ID NO: 912828 - RNA, 20 nt, Human
cggccccucagucccggccc

SEQ ID NO: 912829 - RNA, 18 nt, Human
cgggaaggcuggcgggcg

SEQ ID NO: 912830 - RNA, 18 nt, Human
cgggacgacagcguccuc

SEQ ID NO: 912831 - RNA, 24 nt, Human
cucagucccggcccggcugcuggc

SEQ ID NO: 912832 - RNA, 21 nt, Human
cucccccccaccccccggccc

SEQ ID NO: 912833 - RNA, 28 nt, Human
cucccccccaccccccggcccccagucc

SEQ ID NO: 912834 - RNA, 24 nt, Human
cucugcuccggcccccccaacccc

SEQ ID NO: 912835 - RNA, 24 nt, Human
cugaccccggccccgcuuuuuucc

SEQ ID NO: 912836 - RNA, 18 nt, Human
cugugguuccaauccugc

SEQ ID NO: 912837 - RNA, 22 nt, Human
gaagccccaccuuucugcccuu

SEQ ID NO: 912838 - RNA, 19 nt, Human
gaggccuaggccuggaagg

SEQ ID NO: 912839 - RNA, 21 nt, Human
gccucucgccgccgccgccgu

SEQ ID NO: 912840 - RNA, 22 nt, Human
gcgcagccgcaggaagcuaggg

SEQ ID NO: 912841 - RNA, 18 nt, Human
gcggccccucagucccgg

SEQ ID NO: 912842 - RNA, 22 nt, Human
gcgggcgcugccaucccggggc

SEQ ID NO: 912843 - RNA, 19 nt, Human
gcuccggcccccccaaccc

SEQ ID NO: 912844 - RNA, 22 nt, Human
gcugugguuccaauccugccac

SEQ ID NO: 912845 - RNA, 20 nt, Human
ggaaaucacugaagcuuuca

SEQ ID NO: 912846 - RNA, 19 nt, Human
ggaggggggaggugagggg

SEQ ID NO: 912847 - RNA, 24 nt, Human
ggaggggggaggugaggggagggg

SEQ ID NO: 912848 - RNA, 18 nt, Human
gggagggggcgcuccuga

SEQ ID NO: 912849 - RNA, 18 nt, Human
gggcgggaccugaggucu

SEQ ID NO: 912850 - RNA, 19 nt, Human
ggggagggggcgcuccuga

SEQ ID NO: 912851 - RNA, 25 nt, Human
ggggaggggggaggugaggggaggg

SEQ ID NO: 912852 - RNA, 18 nt, Human
ggggagggugaugggggg

SEQ ID NO: 912853 - RNA, 19 nt, Human
ggggcuggggguaucggag

SEQ ID NO: 912854 - RNA, 20 nt, Human
gggggaggggggaggugagg

SEQ ID NO: 912855 - RNA, 23 nt, Human
gggggggugagagguuacgugag

SEQ ID NO: 912856 - RNA, 23 nt, Human
ggggggugagagguuacgugagg

SEQ ID NO: 912857 - RNA, 23 nt, Human
ggugauggggggugguccccggg

SEQ ID NO: 912858 - RNA, 25 nt, Human
ggugauggggggugguccccgggag

SEQ ID NO: 912859 - RNA, 24 nt, Human
guaagacaaacaauacaaaggcca

SEQ ID NO: 912860 - RNA, 22 nt, Human
uaagacaaacaauacaaaggcc

SEQ ID NO: 912861 - RNA, 30 nt, Human
uaagacaaacaauacaaaggccaaaguccc

SEQ ID NO: 912862 - RNA, 23 nt, Human
ucccacaggcuaaagccggcacu

SEQ ID NO: 912863 - RNA, 22 nt, Human
ucccccccaccccccggccccc

SEQ ID NO: 912864 - RNA, 25 nt, Human
uccccgggacgacagcguccucccg

SEQ ID NO: 912865 - RNA, 19 nt, Human
ucccgggcugggugcucuc

SEQ ID NO: 912866 - RNA, 20 nt, Human
ucgccgccgccgccgucugc

SEQ ID NO: 912867 - RNA, 21 nt, Human
ugacagaacaaaacaggcaga

SEQ ID NO: 912868 - RNA, 23 nt, Human
ugacuggggggagggugaugggg

SEQ ID NO: 912869 - RNA, 25 nt, Human
ugagacaaaagggcgggaccugagg

SEQ ID NO: 912870 - RNA, 19 nt, Human
ugaggggagggggcgcucc

SEQ ID NO: 912871 - RNA, 22 nt, Human
ugaggugacuggggggagggug

SEQ ID NO: 912872 - RNA, 23 nt, Human
ugccagaaagagcauaaaauuau

SEQ ID NO: 912873 - RNA, 20 nt, Human
ugcuccggcccccccaaccc

SEQ ID NO: 912874 - RNA, 19 nt, Human
uggaagguaugggauggag

SEQ ID NO: 912875 - RNA, 19 nt, Human
uggcucccccccacccccc

SEQ ID NO: 912876 - RNA, 26 nt, Human
uggcucccccccaccccccggccccc

SEQ ID NO: 912877 - RNA, 20 nt, Human
ugggauggagucaggagacc

SEQ ID NO: 912878 - RNA, 19 nt, Human
ugguccccgggcuccgccu

SEQ ID NO: 912879 - RNA, 20 nt, Human
uuagaaucuuauuugccaga

SEQ ID NO: 912880 - RNA, 19 nt, Human
aaaaggagacagucuugga

SEQ ID NO: 912881 - RNA, 21 nt, Human
acaccguugcccccucagccu

SEQ ID NO: 912882 - RNA, 20 nt, Human
acacuccucugcccccacca

SEQ ID NO: 912883 - RNA, 18 nt, Human
agacacuccucugccccc

SEQ ID NO: 912884 - RNA, 21 nt, Human
agccggguaaaaacuccaggg

SEQ ID NO: 912885 - RNA, 26 nt, Human
agcuguuucccugcagacacuccucu

SEQ ID NO: 912886 - RNA, 23 nt, Human
aggaagggaaaagagaagagggc

SEQ ID NO: 912887 - RNA, 23 nt, Human
aggaaugggaggggcaggaggaa

SEQ ID NO: 912888 - RNA, 24 nt, Human
agggcugggaagcaaauggggcuc

SEQ ID NO: 912889 - RNA, 22 nt, Human
cacaccguugcccccucagccu

SEQ ID NO: 912890 - RNA, 20 nt, Human
cacccucuguuccaucccuc

SEQ ID NO: 912891 - RNA, 24 nt, Human
cacccucuguuccaucccucugcu

SEQ ID NO: 912892 - RNA, 21 nt, Human
caggaaugggaggggcaggag

SEQ ID NO: 912893 - RNA, 21 nt, Human
caucggggcagaggagaagcu

SEQ ID NO: 912894 - RNA, 19 nt, Human
caucuucccucuccuggga

SEQ ID NO: 912895 - RNA, 18 nt, Human
ccaccugggcugggauga

SEQ ID NO: 912896 - RNA, 21 nt, Human
cccccaagaaaggaagggcuc

SEQ ID NO: 912897 - RNA, 18 nt, Human
cccucuguuccaucccuc

SEQ ID NO: 912898 - RNA, 20 nt, Human
ccucucucacccucuguucc

SEQ ID NO: 912899 - RNA, 19 nt, Human
cucagggugaugcagaaaa

SEQ ID NO: 912900 - RNA, 19 nt, Human
cuggcuugcaacaaaauuc

SEQ ID NO: 912901 - RNA, 26 nt, Human
cuuacuguugaacuuccuuuuggaau

SEQ ID NO: 912902 - RNA, 19 nt, Human
gagcuucccagagaggcuc

SEQ ID NO: 912903 - RNA, 21 nt, Human
gaggaagagcuucccagagag

SEQ ID NO: 912904 - RNA, 23 nt, Human
gaggaagagcuucccagagaggc

SEQ ID NO: 912905 - RNA, 18 nt, Human
ggaaagcucaggcagagc

SEQ ID NO: 912906 - RNA, 21 nt, Human
ggaaaggaaucuuuaggcaga

SEQ ID NO: 912907 - RNA, 21 nt, Human
gggaagcaaauggggcucagg

SEQ ID NO: 912908 - RNA, 18 nt, Human
gggaggggcaggaggaag

SEQ ID NO: 912909 - RNA, 26 nt, Human
gggcagagguggcaggcaaagccggg

SEQ ID NO: 912910 - RNA, 24 nt, Human
uaaaaacuccagggcugggaagca

SEQ ID NO: 912911 - RNA, 25 nt, Human
uacaggaagggaaaagagaagaggg

SEQ ID NO: 912912 - RNA, 18 nt, Human
ucacugagauucagcugu

SEQ ID NO: 912913 - RNA, 24 nt, Human
uccagggcugggaagcaaaugggg

SEQ ID NO: 912914 - RNA, 25 nt, Human
uccagggcugggaagcaaauggggc

SEQ ID NO: 912915 - RNA, 22 nt, Human
ucccgagagggaagaguguccu

SEQ ID NO: 912916 - RNA, 23 nt, Human
ucuuggaggugcugcuuacuguu

SEQ ID NO: 912917 - RNA, 20 nt, Human
ucuuucuuccucuucugucu

SEQ ID NO: 912918 - RNA, 22 nt, Human
ugacaacuggcuugcaacaaaa

SEQ ID NO: 912919 - RNA, 24 nt, Human
ugagcguuagucaaagguacagga

SEQ ID NO: 912920 - RNA, 20 nt, Human
ugagguggagacggccacug

SEQ ID NO: 912921 - RNA, 20 nt, Human
ugcagaaaaugugauguugc

SEQ ID NO: 912922 - RNA, 19 nt, Human
ugcagacacuccucugccc

SEQ ID NO: 912923 - RNA, 23 nt, Human
ugccucucucacccucuguucca

SEQ ID NO: 912924 - RNA, 19 nt, Human
ugggaagcaaauggggcuc

SEQ ID NO: 912925 - RNA, 23 nt, Human
ugggaagcaaauggggcucaggg

SEQ ID NO: 912926 - RNA, 24 nt, Human
ugggaagcaaauggggcucagggu

SEQ ID NO: 912927 - RNA, 19 nt, Human
ugggacagacgcuuuuuau

SEQ ID NO: 912928 - RNA, 20 nt, Human
ugggagaaggcagggaaagg

SEQ ID NO: 912929 - RNA, 22 nt, Human
ugggagaaggcagggaaaggaa

SEQ ID NO: 912930 - RNA, 24 nt, Human
ugugaacaucuguucuuucuuccu

SEQ ID NO: 912931 - RNA, 23 nt, Human
uguuucccugcagacacuccucu

SEQ ID NO: 912932 - RNA, 21 nt, Human
uuuauuguccuuguuuuuaac

SEQ ID NO: 912933 - RNA, 18 nt, Human
uuuuuuuuuuuuagggau

SEQ ID NO: 912934 - RNA, 19 nt, Human
aauaauaacaauaaagaga

SEQ ID NO: 912935 - RNA, 24 nt, Human
aauaauaauaacaauaaagagaaa

SEQ ID NO: 912936 - RNA, 20 nt, Human
agaaaaaaaugcaaaggccc

SEQ ID NO: 912937 - RNA, 22 nt, Human
agaaaaaaaugcaaaggccuug

SEQ ID NO: 912938 - RNA, 18 nt, Human
gauucugaccaaaacauu

SEQ ID NO: 912939 - RNA, 20 nt, Human
uacaauagcagagaaaauaa

SEQ ID NO: 912940 - RNA, 27 nt, Human
uacaauagcagagaaaauaauaauaau

SEQ ID NO: 912941 - RNA, 19 nt, Human
uuuuuuuuuuuuuuuuuaa

SEQ ID NO: 912942 - RNA, 22 nt, Human
aaaacgaaaaaacacuaaacau

SEQ ID NO: 912943 - RNA, 22 nt, Human
aaacauaaaagauugcuuaacu

SEQ ID NO: 912944 - RNA, 19 nt, Human
agacagcaauuaaaaucag

SEQ ID NO: 912945 - RNA, 22 nt, Human
cagcaauuaaaaucagacagaa

SEQ ID NO: 912946 - RNA, 21 nt, Human
caugacacaacuguuaaauuu

SEQ ID NO: 912947 - RNA, 18 nt, Human
ccuagacuugauauaauc

SEQ ID NO: 912948 - RNA, 18 nt, Human
cugcacaucucuugguuu

SEQ ID NO: 912949 - RNA, 20 nt, Human
cugcccuguuuguauaaagc

SEQ ID NO: 912950 - RNA, 18 nt, Human
gaagaaaugcauccuuua

SEQ ID NO: 912951 - RNA, 22 nt, Human
gucauuagacagcaauuaaaau

SEQ ID NO: 912952 - RNA, 21 nt, Human
uaaaacgaaaaaacacuaaac

SEQ ID NO: 912953 - RNA, 26 nt, Human
uaaaauaaauaagcagacaugugaaa

SEQ ID NO: 912954 - RNA, 22 nt, Human
uaaaccccaauuaauuacaaag

SEQ ID NO: 912955 - RNA, 19 nt, Human
uaaagcuccacaugccucc

SEQ ID NO: 912956 - RNA, 22 nt, Human
uaggugaauacugucuucuuuu

SEQ ID NO: 912957 - RNA, 21 nt, Human
uguacaucuuuucaucgugcu

SEQ ID NO: 912958 - RNA, 21 nt, Human
ugugaaauaagcaaggaugca

SEQ ID NO: 912959 - RNA, 21 nt, Human
uucaucgugcuuuccccguca

SEQ ID NO: 912960 - RNA, 24 nt, Human
uuuuaaaaauauaaaauaaauaag

SEQ ID NO: 912961 - RNA, 19 nt, Human
aaacaacagugacagcuga

SEQ ID NO: 912962 - RNA, 22 nt, Human
aaagacugaaaagaauacaugc

SEQ ID NO: 912963 - RNA, 21 nt, Human
aagaaaacacacauuguuuua

SEQ ID NO: 912964 - RNA, 18 nt, Human
aagacaugccugguccac

SEQ ID NO: 912965 - RNA, 20 nt, Human
aagcagaguccaauauccua

SEQ ID NO: 912966 - RNA, 20 nt, Human
aagcccuaacaggccaagaa

SEQ ID NO: 912967 - RNA, 23 nt, Human
aagguaagcaacagguggggccc

SEQ ID NO: 912968 - RNA, 23 nt, Human
acagagacgcugugcugcagagg

SEQ ID NO: 912969 - RNA, 22 nt, Human
acccaacucucagaaaaagucc

SEQ ID NO: 912970 - RNA, 21 nt, Human
acucacucauucucuccuucu

SEQ ID NO: 912971 - RNA, 22 nt, Human
agaaaaaguccuugucaaccug

SEQ ID NO: 912972 - RNA, 22 nt, Human
agaagcagagggagaauaugau

SEQ ID NO: 912973 - RNA, 20 nt, Human
agagggagggagggagugag

SEQ ID NO: 912974 - RNA, 22 nt, Human
agagggagggagggagugagag

SEQ ID NO: 912975 - RNA, 26 nt, Human
agagggagggagggagugagaggggu

SEQ ID NO: 912976 - RNA, 19 nt, Human
agcaaacaguagacauucu

SEQ ID NO: 912977 - RNA, 22 nt, Human
agcaacagguggggccccacag

SEQ ID NO: 912978 - RNA, 19 nt, Human
agcacucacucauucucuc

SEQ ID NO: 912979 - RNA, 24 nt, Human
agcauaaaaaccuuuacagagacg

SEQ ID NO: 912980 - RNA, 23 nt, Human
agccuggaggugcuccuagaaac

SEQ ID NO: 912981 - RNA, 18 nt, Human
aggaauucuggauccagu

SEQ ID NO: 912982 - RNA, 24 nt, Human
aggauagguacucaaaaccuccug

SEQ ID NO: 912983 - RNA, 22 nt, Human
aggcagcccucccuccagauca

SEQ ID NO: 912984 - RNA, 22 nt, Human
agggaaaucaaacaaaaucaaa

SEQ ID NO: 912985 - RNA, 22 nt, Human
agguacucaaaaccuccugacc

SEQ ID NO: 912986 - RNA, 21 nt, Human
auggauggaaaaaaauuagau

SEQ ID NO: 912987 - RNA, 22 nt, Human
caaaacauuccagugcuuucuc

SEQ ID NO: 912988 - RNA, 20 nt, Human
caaaagacaugccuggucca

SEQ ID NO: 912989 - RNA, 24 nt, Human
caaaagacaugccugguccacuuu

SEQ ID NO: 912990 - RNA, 24 nt, Human
caaaaucaaacacaaaagacugaa

SEQ ID NO: 912991 - RNA, 19 nt, Human
caaagcaaaagacaugccu

SEQ ID NO: 912992 - RNA, 23 nt, Human
caacagguggggccccacagucc

SEQ ID NO: 912993 - RNA, 24 nt, Human
caagaaaacaacagugacagcuga

SEQ ID NO: 912994 - RNA, 19 nt, Human
caagacccagacacaaaaa

SEQ ID NO: 912995 - RNA, 21 nt, Human
cacagaugaguaucauauaga

SEQ ID NO: 912996 - RNA, 18 nt, Human
cagcauauuccuauguau

SEQ ID NO: 912997 - RNA, 23 nt, Human
cauaaaaaccuuuacagagacgc

SEQ ID NO: 912998 - RNA, 20 nt, Human
cauguaucaguaagcaaagc

SEQ ID NO: 912999 - RNA, 23 nt, Human
ccccaguauauacagccuaaaca

SEQ ID NO: 913000 - RNA, 19 nt, Human
ccuguauggguggcaagga

SEQ ID NO: 913001 - RNA, 21 nt, Human
ccuuccuagugguugcaaaau

SEQ ID NO: 913002 - RNA, 20 nt, Human
ccuugucaaccuggcuccua

SEQ ID NO: 913003 - RNA, 21 nt, Human
cgaaagaaaacugauccauga

SEQ ID NO: 913004 - RNA, 21 nt, Human
cucaaaaccuccugaccuucu

SEQ ID NO: 913005 - RNA, 21 nt, Human
cuccaaggucccucaacuccu

SEQ ID NO: 913006 - RNA, 22 nt, Human
cugccuacaagccaguaagggg

SEQ ID NO: 913007 - RNA, 21 nt, Human
cugcuuucaaggcucauccag

SEQ ID NO: 913008 - RNA, 19 nt, Human
gaagagaaaagaagcagag

SEQ ID NO: 913009 - RNA, 23 nt, Human
gaaggagagagggagggagggag

SEQ ID NO: 913010 - RNA, 22 nt, Human
gacagggagauauaacucuaau

SEQ ID NO: 913011 - RNA, 20 nt, Human
gagggagugagagggguuug

SEQ ID NO: 913012 - RNA, 21 nt, Human
gcaaaagacaugccuggucca

SEQ ID NO: 913013 - RNA, 20 nt, Human
gcacugcucucaaagaaaac

SEQ ID NO: 913014 - RNA, 19 nt, Human
gcgagguagaaaucgcuuc

SEQ ID NO: 913015 - RNA, 21 nt, Human
gcugcuucagaagaauacaga

SEQ ID NO: 913016 - RNA, 23 nt, Human
ggaaaagauuucuagguagcaaa

SEQ ID NO: 913017 - RNA, 22 nt, Human
ggagauauaacucuaauagccc

SEQ ID NO: 913018 - RNA, 19 nt, Human
ggagggagggagugagagg

SEQ ID NO: 913019 - RNA, 22 nt, Human
gggaaggagagagggagggagg

SEQ ID NO: 913020 - RNA, 22 nt, Human
gggagggagggagugagagggg

SEQ ID NO: 913021 - RNA, 24 nt, Human
gggagggagugagagggguuuggg

SEQ ID NO: 913022 - RNA, 18 nt, Human
uaaaaaccuuauuaaaaa

SEQ ID NO: 913023 - RNA, 21 nt, Human
uaaaaagcaacauuuaaucau

SEQ ID NO: 913024 - RNA, 26 nt, Human
uaaaacaguaugacacauuucaagca

SEQ ID NO: 913025 - RNA, 25 nt, Human
uaaacauccucuuauauaacaaaga

SEQ ID NO: 913026 - RNA, 21 nt, Human
uaaauaauuccuugcuuagca

SEQ ID NO: 913027 - RNA, 24 nt, Human
uaacaaaacagacuucuccgucca

SEQ ID NO: 913028 - RNA, 22 nt, Human
uaacaaagauuacaaaaccaau

SEQ ID NO: 913029 - RNA, 20 nt, Human
uaacagaauggauggaaaaa

SEQ ID NO: 913030 - RNA, 22 nt, Human
uaacuaagcaaacuuugaacug

SEQ ID NO: 913031 - RNA, 22 nt, Human
uaagcaaacuuugaacuggauc

SEQ ID NO: 913032 - RNA, 21 nt, Human
uaagcaacagguggggcccca

SEQ ID NO: 913033 - RNA, 24 nt, Human
uaagcaacagguggggccccacag

SEQ ID NO: 913034 - RNA, 25 nt, Human
uaagggagauggaaguuaugcgcaa

SEQ ID NO: 913035 - RNA, 21 nt, Human
uaagguguuuguacuauucuu

SEQ ID NO: 913036 - RNA, 20 nt, Human
uaauacagacaaauuacaac

SEQ ID NO: 913037 - RNA, 22 nt, Human
uaauaggaaaauguaagacacu

SEQ ID NO: 913038 - RNA, 27 nt, Human
uacaaaaccaauaauauucacagauga

SEQ ID NO: 913039 - RNA, 25 nt, Human
uacagaaugggagccaaacagcuaa

SEQ ID NO: 913040 - RNA, 19 nt, Human
uacagccuaaacauccucu

SEQ ID NO: 913041 - RNA, 27 nt, Human
uacaugccauguaucaguaagcaaagc

SEQ ID NO: 913042 - RNA, 20 nt, Human
uaccucaaaagguaagcaac

SEQ ID NO: 913043 - RNA, 21 nt, Human
uagaaaauacaaaguguaaca

SEQ ID NO: 913044 - RNA, 19 nt, Human
uaggaauucuggauccagu

SEQ ID NO: 913045 - RNA, 24 nt, Human
uaggggaaggagagagggagggag

SEQ ID NO: 913046 - RNA, 18 nt, Human
uauuuuuugcugaguacu

SEQ ID NO: 913047 - RNA, 18 nt, Human
ucagaaaaaguccuuguc

SEQ ID NO: 913048 - RNA, 23 nt, Human
uccuccaaggucccucaacuccc

SEQ ID NO: 913049 - RNA, 23 nt, Human
ugaaagaggaauggaaaagauuu

SEQ ID NO: 913050 - RNA, 21 nt, Human
ugaaagcauaaaaaccuuuac

SEQ ID NO: 913051 - RNA, 21 nt, Human
ugaacuaugacuuugacauaa

SEQ ID NO: 913052 - RNA, 21 nt, Human
ugacaagacccagacacaaaa

SEQ ID NO: 913053 - RNA, 23 nt, Human
ugcaaaaugugcacugcucucaa

SEQ ID NO: 913054 - RNA, 23 nt, Human
ugcaucaggcagcccucccucca

SEQ ID NO: 913055 - RNA, 24 nt, Human
ugccugguccacuuuucuccagug

SEQ ID NO: 913056 - RNA, 21 nt, Human
ugcuaagcagaguccaauauc

SEQ ID NO: 913057 - RNA, 18 nt, Human
ugcugcagagggaaauca

SEQ ID NO: 913058 - RNA, 25 nt, Human
ugcuuuauguacccuauuuuuugcu

SEQ ID NO: 913059 - RNA, 19 nt, Human
uggauggaaaaaaauuaga

SEQ ID NO: 913060 - RNA, 24 nt, Human
uggcaaggauagguacucaaaacc

SEQ ID NO: 913061 - RNA, 22 nt, Human
uggggggagaaagagaaagaaa

SEQ ID NO: 913062 - RNA, 24 nt, Human
uguaagcccuaacaggccaagacu

SEQ ID NO: 913063 - RNA, 21 nt, Human
ugucaagucagagaacagggg

SEQ ID NO: 913064 - RNA, 22 nt, Human
uguuagaaaguacacaucucag

SEQ ID NO: 913065 - RNA, 18 nt, Human
uuccaaguaaaaaaacca

SEQ ID NO: 913066 - RNA, 18 nt, Human
uugauccuaaaacaguau

SEQ ID NO: 913067 - RNA, 20 nt, Human
uugauccuaaaacaguauga

SEQ ID NO: 913068 - RNA, 23 nt, Human
uugauccuaaaacaguaugacac

SEQ ID NO: 913069 - RNA, 24 nt, Human
uugauccuaaaacaguaugacaca

SEQ ID NO: 913070 - RNA, 22 nt, Human
uuggccgcaguacuacugggca

SEQ ID NO: 913071 - RNA, 19 nt, Human
uuucuagguagcaaacagu

SEQ ID NO: 913072 - RNA, 30 nt, Human
uuuguaagcccuaacaggccaagacugccg

SEQ ID NO: 913073 - RNA, 20 nt, Human
uuuucaauuccaaccuauuc

SEQ ID NO: 913074 - RNA, 21 nt, Human
uuuucacauccuauguaucuc

SEQ ID NO: 913075 - RNA, 24 nt, Human
aaaugcccccacuguaaucccuac

SEQ ID NO: 913076 - RNA, 19 nt, Human
aacaauguuuuuaagaggu

SEQ ID NO: 913077 - RNA, 22 nt, Human
augaaauagaguugugcuuuga

SEQ ID NO: 913078 - RNA, 20 nt, Human
ccgcgccgccccgugacugc

SEQ ID NO: 913079 - RNA, 24 nt, Human
cgguggcggcggccacaccccuga

SEQ ID NO: 913080 - RNA, 26 nt, Human
cucccaggacuaagcucgcggccuag

SEQ ID NO: 913081 - RNA, 26 nt, Human
cuuacgguggcggcggccacaccccu

SEQ ID NO: 913082 - RNA, 18 nt, Human
gaaaugcccccacuguaa

SEQ ID NO: 913083 - RNA, 23 nt, Human
gaaaugcccccacuguaaucccu

SEQ ID NO: 913084 - RNA, 22 nt, Human
gcagacccaggauuccuggcca

SEQ ID NO: 913085 - RNA, 24 nt, Human
gcccccacuguaaucccuaccaua

SEQ ID NO: 913086 - RNA, 18 nt, Human
gccccgugacugcagccc

SEQ ID NO: 913087 - RNA, 23 nt, Human
ggcgacggaggcggcucccagga

SEQ ID NO: 913088 - RNA, 21 nt, Human
ggggagaaugauuccuuuuuc

SEQ ID NO: 913089 - RNA, 19 nt, Human
guggcggcggccacacccc

SEQ ID NO: 913090 - RNA, 26 nt, Human
guugguuuucuuguuaagauaaucug

SEQ ID NO: 913091 - RNA, 21 nt, Human
uaagcucgcggccuagccuua

SEQ ID NO: 913092 - RNA, 19 nt, Human
uaucaagaaagauaauaac

SEQ ID NO: 913093 - RNA, 20 nt, Human
uaucaagaaagauaauaaca

SEQ ID NO: 913094 - RNA, 20 nt, Human
uccuggccagaagcaugaaa

SEQ ID NO: 913095 - RNA, 18 nt, Human
uccuuuuucuagaaucag

SEQ ID NO: 913096 - RNA, 30 nt, Human
ucugacggcggcgacggaggcggcucccuu

SEQ ID NO: 913097 - RNA, 22 nt, Human
ugcagacccaggauuccuggcc

SEQ ID NO: 913098 - RNA, 25 nt, Human
ugggagggaggggagaaugauuccu

SEQ ID NO: 913099 - RNA, 19 nt, Human
ugggcuggggcccuccgcg

SEQ ID NO: 913100 - RNA, 19 nt, Human
uggugggagggaggggaga

SEQ ID NO: 913101 - RNA, 19 nt, Human
uguggugggagggagggga

SEQ ID NO: 913102 - RNA, 19 nt, Human
uuccaaaguugcagaccca

SEQ ID NO: 913103 - RNA, 23 nt, Human
uuuuuuguucuuccaaaaauuua

SEQ ID NO: 913104 - RNA, 18 nt, Human
uuuuuuuuuuuuuuuuug

SEQ ID NO: 913105 - RNA, 24 nt, Human
uuuuuuuuuuuuuuuuuuguucuu

SEQ ID NO: 913106 - RNA, 22 nt, Human
aaaucagaauauggcuaaagug

SEQ ID NO: 913107 - RNA, 19 nt, Human
agaaaaacaaacuugaagg

SEQ ID NO: 913108 - RNA, 19 nt, Human
ccccgagaaaaacaaacuu

SEQ ID NO: 913109 - RNA, 23 nt, Human
gagcauguggauuaucuggcagg

SEQ ID NO: 913110 - RNA, 26 nt, Human
gaugagagagaugcccccgagaaaaa

SEQ ID NO: 913111 - RNA, 20 nt, Human
gauuuguuuuuauuuuccuu

SEQ ID NO: 913112 - RNA, 20 nt, Human
uggcaggcugauguagcugu

SEQ ID NO: 913113 - RNA, 23 nt, Human
uuuauuuuccuuuuuaaaaauca

SEQ ID NO: 913114 - RNA, 18 nt, Human
aaaucccccccacccucc

SEQ ID NO: 913115 - RNA, 21 nt, Human
aauuauggucaucuguuuuca

SEQ ID NO: 913116 - RNA, 21 nt, Human
acaaaucccccccacccuccc

SEQ ID NO: 913117 - RNA, 18 nt, Human
accacgacaaaguugugg

SEQ ID NO: 913118 - RNA, 18 nt, Human
agaucagcacuguccagu

SEQ ID NO: 913119 - RNA, 20 nt, Human
aguauaaacauuuaagaacc

SEQ ID NO: 913120 - RNA, 23 nt, Human
caaaucccccccacccucccaau

SEQ ID NO: 913121 - RNA, 24 nt, Human
caaaucccccccacccucccaauc

SEQ ID NO: 913122 - RNA, 20 nt, Human
cagaaucccuagaucagcac

SEQ ID NO: 913123 - RNA, 26 nt, Human
cauaucccaaagugaaaucagcagga

SEQ ID NO: 913124 - RNA, 19 nt, Human
cauugugcugaacacuuuc

SEQ ID NO: 913125 - RNA, 22 nt, Human
cccagccccuugccauccuuuu

SEQ ID NO: 913126 - RNA, 19 nt, Human
ccccacccucccaaucuaa

SEQ ID NO: 913127 - RNA, 23 nt, Human
ccccacccucccaaucuaaaauc

SEQ ID NO: 913128 - RNA, 21 nt, Human
ccccccacccucccaaucuaa

SEQ ID NO: 913129 - RNA, 21 nt, Human
cccccccacccucccaaucua

SEQ ID NO: 913130 - RNA, 23 nt, Human
ccuuuuagggcaaggaaaccagg

SEQ ID NO: 913131 - RNA, 27 nt, Human
cuacaaaucccccccacccucccaauc

SEQ ID NO: 913132 - RNA, 18 nt, Human
gcaaggaaaccaggcuca

SEQ ID NO: 913133 - RNA, 21 nt, Human
gccucaaacaacuucuuagaa

SEQ ID NO: 913134 - RNA, 19 nt, Human
gugaaaucagcaggagauu

SEQ ID NO: 913135 - RNA, 22 nt, Human
uaaaaagauaaccuacacacau

SEQ ID NO: 913136 - RNA, 23 nt, Human
uaaagauuacuggcucaagacca

SEQ ID NO: 913137 - RNA, 21 nt, Human
uaagauacaauuugcacugaa

SEQ ID NO: 913138 - RNA, 21 nt, Human
uacaaaucccccccacccucc

SEQ ID NO: 913139 - RNA, 21 nt, Human
uauaaagauuacuggcucaag

SEQ ID NO: 913140 - RNA, 21 nt, Human
uauaauaacaacaacuacuga

SEQ ID NO: 913141 - RNA, 24 nt, Human
ucaccugaagauuaucaaugcuau

SEQ ID NO: 913142 - RNA, 21 nt, Human
ucccccccacccucccaaucu

SEQ ID NO: 913143 - RNA, 25 nt, Human
ucccccccacccucccaaucuaaaa

SEQ ID NO: 913144 - RNA, 18 nt, Human
ugaaguguaaacuugaaa

SEQ ID NO: 913145 - RNA, 21 nt, Human
ugggaguguccgguacagggg

SEQ ID NO: 913146 - RNA, 18 nt, Human
uguccaguaacucugcag

SEQ ID NO: 913147 - RNA, 22 nt, Human
uguccgguacaggggccacgag

SEQ ID NO: 913148 - RNA, 22 nt, Human
ugugcugaacacuuucauggau

SEQ ID NO: 913149 - RNA, 21 nt, Human
uuaugcuacaaauccccccca

SEQ ID NO: 913150 - RNA, 21 nt, Human
uucuacgaucagcagugagcu

SEQ ID NO: 913151 - RNA, 24 nt, Human
uuugccucaaacaacuucuuagaa

SEQ ID NO: 913152 - RNA, 19 nt, Human
aagaguugucaucaggggu

SEQ ID NO: 913153 - RNA, 21 nt, Human
aagcaaccucagaguugagau

SEQ ID NO: 913154 - RNA, 23 nt, Human
aaggagucagggacgaaacaagc

SEQ ID NO: 913155 - RNA, 19 nt, Human
acagagaauugcaacacag

SEQ ID NO: 913156 - RNA, 28 nt, Human
agacaagggagugugaggcuugggggug

SEQ ID NO: 913157 - RNA, 19 nt, Human
agagggccuucggguaggg

SEQ ID NO: 913158 - RNA, 19 nt, Human
agccaacuauaggccgaga

SEQ ID NO: 913159 - RNA, 21 nt, Human
agggagugugaggcuuggggg

SEQ ID NO: 913160 - RNA, 19 nt, Human
agggccuucggguaggggc

SEQ ID NO: 913161 - RNA, 18 nt, Human
aggggacaguggcccaaa

SEQ ID NO: 913162 - RNA, 20 nt, Human
aggucuuggcuuaacagucu

SEQ ID NO: 913163 - RNA, 27 nt, Human
caaagugagagagugaggacaaagcca

SEQ ID NO: 913164 - RNA, 21 nt, Human
cagggaggggacaguggccca

SEQ ID NO: 913165 - RNA, 18 nt, Human
cauaagaguugucaucag

SEQ ID NO: 913166 - RNA, 21 nt, Human
ccaacuauaggccgagaugga

SEQ ID NO: 913167 - RNA, 21 nt, Human
ccuccuggugguggaacccug

SEQ ID NO: 913168 - RNA, 22 nt, Human
ccuccuggugguggaacccugg

SEQ ID NO: 913169 - RNA, 21 nt, Human
ccuucggguaggggcaggggu

SEQ ID NO: 913170 - RNA, 22 nt, Human
ccuuggcuggaaagguagaggu

SEQ ID NO: 913171 - RNA, 19 nt, Human
cuauaggccgagauggaug

SEQ ID NO: 913172 - RNA, 19 nt, Human
cuccuggaucucuuagaga

SEQ ID NO: 913173 - RNA, 22 nt, Human
cuggaucagggaggggacagug

SEQ ID NO: 913174 - RNA, 22 nt, Human
cuuggggguggcucccuccugg

SEQ ID NO: 913175 - RNA, 19 nt, Human
gacagagaauugcaacaca

SEQ ID NO: 913176 - RNA, 23 nt, Human
gagggcagaggggcuguuggcag

SEQ ID NO: 913177 - RNA, 22 nt, Human
gcagugcuggagggagacaggc

SEQ ID NO: 913178 - RNA, 20 nt, Human
gccaugggaggggaggaaug

SEQ ID NO: 913179 - RNA, 21 nt, Human
gccucggcagagaaccucggc

SEQ ID NO: 913180 - RNA, 19 nt, Human
ggcgggccaggaugaggug

SEQ ID NO: 913181 - RNA, 19 nt, Human
gggugguugugguaugugg

SEQ ID NO: 913182 - RNA, 20 nt, Human
gggugguugugguauguggc

SEQ ID NO: 913183 - RNA, 22 nt, Human
gguagagaagucaugaaggcca

SEQ ID NO: 913184 - RNA, 18 nt, Human
gguauuucugguuggccu

SEQ ID NO: 913185 - RNA, 18 nt, Human
gguugugguauguggcug

SEQ ID NO: 913186 - RNA, 23 nt, Human
guccuuggggguggcucccuccu

SEQ ID NO: 913187 - RNA, 21 nt, Human
gugcagccugacagguuguga

SEQ ID NO: 913188 - RNA, 24 nt, Human
guggaacccuggaucagggagggg

SEQ ID NO: 913189 - RNA, 25 nt, Human
guuggccucggcagagaaccucggc

SEQ ID NO: 913190 - RNA, 19 nt, Human
uaaggagucagggacgaaa

SEQ ID NO: 913191 - RNA, 20 nt, Human
uccaggugugauucuaaaau

SEQ ID NO: 913192 - RNA, 19 nt, Human
ucuuggcuuaacagucugg

SEQ ID NO: 913193 - RNA, 24 nt, Human
ugaaauggaguggcaguauguagg

SEQ ID NO: 913194 - RNA, 21 nt, Human
ugacagguugugacuugggua

SEQ ID NO: 913195 - RNA, 24 nt, Human
ugagggcagaggggcuguuggcag

SEQ ID NO: 913196 - RNA, 20 nt, Human
ugcagccugacagguuguga

SEQ ID NO: 913197 - RNA, 19 nt, Human
uggaacccuggaucaggga

SEQ ID NO: 913198 - RNA, 26 nt, Human
uggcaggguccuuggggguggcuccc

SEQ ID NO: 913199 - RNA, 24 nt, Human
ugggaggggaggaauggggugcgg

SEQ ID NO: 913200 - RNA, 22 nt, Human
ugugaggcuugggggugguugu

SEQ ID NO: 913201 - RNA, 18 nt, Human
ugugagggcagaggggcu

SEQ ID NO: 913202 - RNA, 18 nt, Human
uguguggacagagggccu

SEQ ID NO: 913203 - RNA, 23 nt, Human
uuccagcuuccaagggguauuuc

SEQ ID NO: 913204 - RNA, 19 nt, Human
uugcaacacaggauuaagg

SEQ ID NO: 913205 - RNA, 19 nt, Human
uuuagugauggcgaucaag

SEQ ID NO: 913206 - RNA, 22 nt, Human
uuugaccacugucaaaguccag

SEQ ID NO: 913207 - RNA, 19 nt, Human
agaguguggacggcagccc

SEQ ID NO: 913208 - RNA, 20 nt, Human
agggggacacaaggugcuga

SEQ ID NO: 913209 - RNA, 18 nt, Human
caaagggaguggggccuc

SEQ ID NO: 913210 - RNA, 21 nt, Human
cagcaggggagggagggcagu

SEQ ID NO: 913211 - RNA, 18 nt, Human
ggggacacaaggugcuga

SEQ ID NO: 913212 - RNA, 21 nt, Human
ucccaggacucugaccgggag

SEQ ID NO: 913213 - RNA, 21 nt, Human
ugaccgggagaguguggacgg

SEQ ID NO: 913214 - RNA, 18 nt, Human
uggacggcagcccuggaa

SEQ ID NO: 913215 - RNA, 19 nt, Human
uuggagagacccagcaggg

SEQ ID NO: 913216 - RNA, 19 nt, Human
aaacaaaaacacguuaaca

SEQ ID NO: 913217 - RNA, 20 nt, Human
aaacaaaauuacuucccaaa

SEQ ID NO: 913218 - RNA, 21 nt, Human
aaacaaaauuacuucccaaac

SEQ ID NO: 913219 - RNA, 24 nt, Human
aaauaaccaccaaagcccgggaac

SEQ ID NO: 913220 - RNA, 22 nt, Human
aagaaauagcaaagcaccucaa

SEQ ID NO: 913221 - RNA, 20 nt, Human
aagagaaaacaaaaggcucu

SEQ ID NO: 913222 - RNA, 24 nt, Human
aagcaccucaaaaauuuagaaaua

SEQ ID NO: 913223 - RNA, 20 nt, Human
aauacuauccauucuccagc

SEQ ID NO: 913224 - RNA, 20 nt, Human
acaaaacacaucucuccucc

SEQ ID NO: 913225 - RNA, 24 nt, Human
acaauacuauccauucuccagcuc

SEQ ID NO: 913226 - RNA, 21 nt, Human
acacacagacccaaaguucca

SEQ ID NO: 913227 - RNA, 21 nt, Human
accaccaaagcccgggaacaa

SEQ ID NO: 913228 - RNA, 20 nt, Human
acccaaaguuccagggagcu

SEQ ID NO: 913229 - RNA, 23 nt, Human
agaaauaaccaccaaagcccggg

SEQ ID NO: 913230 - RNA, 19 nt, Human
agaauccauuggcuggaaa

SEQ ID NO: 913231 - RNA, 23 nt, Human
agacaggaaaaaagagaagggac

SEQ ID NO: 913232 - RNA, 23 nt, Human
agcagaaaacguaguguuaagug

SEQ ID NO: 913233 - RNA, 21 nt, Human
aggaaaaaagagaaaacaaaa

SEQ ID NO: 913234 - RNA, 18 nt, Human
aggucaucaaccacagac

SEQ ID NO: 913235 - RNA, 24 nt, Human
auagacaggaaaaaagagaaaaca

SEQ ID NO: 913236 - RNA, 21 nt, Human
aucaacuuguacagaauauca

SEQ ID NO: 913237 - RNA, 24 nt, Human
auccauucuccagcucuucuccag

SEQ ID NO: 913238 - RNA, 20 nt, Human
caaacaaaaacacguuaaca

SEQ ID NO: 913239 - RNA, 26 nt, Human
caaacaaaaacacguuaacaaucgaa

SEQ ID NO: 913240 - RNA, 23 nt, Human
caaagcaccucaaaaauuuagaa

SEQ ID NO: 913241 - RNA, 19 nt, Human
caaagcccgggaacaaaug

SEQ ID NO: 913242 - RNA, 21 nt, Human
caaagcccgggaacaaaugug

SEQ ID NO: 913243 - RNA, 20 nt, Human
caaaugaacuuacagcugga

SEQ ID NO: 913244 - RNA, 23 nt, Human
caagaaauagcaaagcaccucaa

SEQ ID NO: 913245 - RNA, 22 nt, Human
cacagacccaaaguuccaggga

SEQ ID NO: 913246 - RNA, 19 nt, Human
cagacccaaaguuccaggg

SEQ ID NO: 913247 - RNA, 18 nt, Human
cauccccaagccccucaa

SEQ ID NO: 913248 - RNA, 22 nt, Human
cauccccaagccccucaagggc

SEQ ID NO: 913249 - RNA, 21 nt, Human
ccaccaaagcccgggaacaaa

SEQ ID NO: 913250 - RNA, 21 nt, Human
ccccaagccccucaagggccu

SEQ ID NO: 913251 - RNA, 22 nt, Human
ccccaagccccucaagggccuu

SEQ ID NO: 913252 - RNA, 24 nt, Human
cccgaauauuccugaaaacuuuua

SEQ ID NO: 913253 - RNA, 20 nt, Human
ccuccagagcuggagaacuc

SEQ ID NO: 913254 - RNA, 19 nt, Human
ccucuaaaacgcaucaggg

SEQ ID NO: 913255 - RNA, 21 nt, Human
ccuuuggucucacacagaaau

SEQ ID NO: 913256 - RNA, 23 nt, Human
cucaugugucacacacagaccca

SEQ ID NO: 913257 - RNA, 24 nt, Human
cuugaagaugccucuucuaguccu

SEQ ID NO: 913258 - RNA, 22 nt, Human
gagacagagcauagacaggaaa

SEQ ID NO: 913259 - RNA, 22 nt, Human
gagcuuacaaucuaggcccuaa

SEQ ID NO: 913260 - RNA, 20 nt, Human
gcccgaauauuccugaaaac

SEQ ID NO: 913261 - RNA, 25 nt, Human
gcuggagaacuccaacugugagucu

SEQ ID NO: 913262 - RNA, 19 nt, Human
ggagaacuccaacugugag

SEQ ID NO: 913263 - RNA, 23 nt, Human
uaaugcagcuccuucagcaccuc

SEQ ID NO: 913264 - RNA, 23 nt, Human
uauccauucuccagcucuucucc

SEQ ID NO: 913265 - RNA, 21 nt, Human
ucaugugucacacacagaccc

SEQ ID NO: 913266 - RNA, 23 nt, Human
uccaaacaaacucaccagacagg

SEQ ID NO: 913267 - RNA, 24 nt, Human
uccauuggcuggaaaccgccgacc

SEQ ID NO: 913268 - RNA, 21 nt, Human
ucccaaacaaaaacacguuaa

SEQ ID NO: 913269 - RNA, 22 nt, Human
uccuucagcaccuccagagcug

SEQ ID NO: 913270 - RNA, 18 nt, Human
ucuccagcucuucuccag

SEQ ID NO: 913271 - RNA, 24 nt, Human
ucuccagcucuucuccagauucac

SEQ ID NO: 913272 - RNA, 21 nt, Human
ucugguccuuucuucaguagu

SEQ ID NO: 913273 - RNA, 23 nt, Human
ugaaaacuuuuacccuuuuucaa

SEQ ID NO: 913274 - RNA, 20 nt, Human
ugccucggaaccgcaauagc

SEQ ID NO: 913275 - RNA, 22 nt, Human
ugccucggaaccgcaauagcga

SEQ ID NO: 913276 - RNA, 24 nt, Human
uuaggucugcuacucaaaugaacu

SEQ ID NO: 913277 - RNA, 23 nt, Human
uucaaacaaaauuacuucccaaa

SEQ ID NO: 913278 - RNA, 21 nt, Human
uucaguaguugcugcauggag

SEQ ID NO: 913279 - RNA, 24 nt, Human
uucccaaacaaaaacacguuaaca

SEQ ID NO: 913280 - RNA, 18 nt, Human
uucuccagauucacgagu

SEQ ID NO: 913281 - RNA, 21 nt, Human
uucuccagggugucagccaau

SEQ ID NO: 913282 - RNA, 18 nt, Human
uugaacaaaacacaucuc

SEQ ID NO: 913283 - RNA, 18 nt, Human
uuuucuucucagagaagc

SEQ ID NO: 913284 - RNA, 22 nt, Human
aaauaaccauugccccaccaug

SEQ ID NO: 913285 - RNA, 23 nt, Human
aaccaaauaaccauugccccacc

SEQ ID NO: 913286 - RNA, 19 nt, Human
aacucgccacuuucuccuc

SEQ ID NO: 913287 - RNA, 23 nt, Human
aaucacuauguuuuaaagacaga

SEQ ID NO: 913288 - RNA, 22 nt, Human
accaaagcacaucauuuuguuu

SEQ ID NO: 913289 - RNA, 20 nt, Human
accaaauaaccauugcccca

SEQ ID NO: 913290 - RNA, 22 nt, Human
accaaauaaccauugccccacc

SEQ ID NO: 913291 - RNA, 18 nt, Human
agaacaucaugacuaaaa

SEQ ID NO: 913292 - RNA, 18 nt, Human
agacacuugacuacuacu

SEQ ID NO: 913293 - RNA, 20 nt, Human
auaccaaagucuuuggaaca

SEQ ID NO: 913294 - RNA, 19 nt, Human
augcaguuaagucaauuga

SEQ ID NO: 913295 - RNA, 22 nt, Human
auuucauuuuguuacuggacag

SEQ ID NO: 913296 - RNA, 24 nt, Human
auuucauuuuguuacuggacagaa

SEQ ID NO: 913297 - RNA, 19 nt, Human
caaagcacaucauuuuguu

SEQ ID NO: 913298 - RNA, 19 nt, Human
caacagaauaacuguuacc

SEQ ID NO: 913299 - RNA, 18 nt, Human
caauuacaaguuugaaau

SEQ ID NO: 913300 - RNA, 22 nt, Human
cacuauguuuuaaagacagagu

SEQ ID NO: 913301 - RNA, 20 nt, Human
cccaccaugaacauggggcu

SEQ ID NO: 913302 - RNA, 24 nt, Human
cggaacucgccacuuucuccuccc

SEQ ID NO: 913303 - RNA, 20 nt, Human
cuacagauagaagaaaaaca

SEQ ID NO: 913304 - RNA, 18 nt, Human
cuggaguaaagguugggc

SEQ ID NO: 913305 - RNA, 18 nt, Human
cuguaugucccucccuca

SEQ ID NO: 913306 - RNA, 18 nt, Human
cuguuuugagauuucauu

SEQ ID NO: 913307 - RNA, 20 nt, Human
cuuuuuuuccaaagcuuucu

SEQ ID NO: 913308 - RNA, 24 nt, Human
gagggcaaggacaacagugcaguc

SEQ ID NO: 913309 - RNA, 22 nt, Human
gcaauaucaaagaccuagacac

SEQ ID NO: 913310 - RNA, 30 nt, Human
gccagcucuuuuuuuccaaagcuuucuuuu

SEQ ID NO: 913311 - RNA, 23 nt, Human
ggauccggaacucgccacuuucu

SEQ ID NO: 913312 - RNA, 18 nt, Human
gguaaaaccauuuuuauu

SEQ ID NO: 913313 - RNA, 19 nt, Human
gucccucccucauuucaaa

SEQ ID NO: 913314 - RNA, 22 nt, Human
guggacuguuacaaaugauuuu

SEQ ID NO: 913315 - RNA, 20 nt, Human
uaaaacacaguucacaagaa

SEQ ID NO: 913316 - RNA, 22 nt, Human
uaaccaaaagagcaauaucaaa

SEQ ID NO: 913317 - RNA, 22 nt, Human
uacuuuaaaaaccacuugacua

SEQ ID NO: 913318 - RNA, 19 nt, Human
uagacacuugacuacuacu

SEQ ID NO: 913319 - RNA, 24 nt, Human
uagagguagauaaaacagaaauca

SEQ ID NO: 913320 - RNA, 23 nt, Human
uagguuuuuaggccagccagcuc

SEQ ID NO: 913321 - RNA, 22 nt, Human
uaugucccucccucauuucaaa

SEQ ID NO: 913322 - RNA, 22 nt, Human
uauucuguaugucccucccuca

SEQ ID NO: 913323 - RNA, 18 nt, Human
uccagaaacacagaaaau

SEQ ID NO: 913324 - RNA, 21 nt, Human
ucccucauuucaaaugagagu

SEQ ID NO: 913325 - RNA, 18 nt, Human
ucucucaggaaaaacaca

SEQ ID NO: 913326 - RNA, 18 nt, Human
ucuuuggaacacugcaga

SEQ ID NO: 913327 - RNA, 20 nt, Human
ucuuuggaacacugcagauu

SEQ ID NO: 913328 - RNA, 19 nt, Human
ugacuagcgacuguacugu

SEQ ID NO: 913329 - RNA, 23 nt, Human
ugagguaaaaucauaaaacacag

SEQ ID NO: 913330 - RNA, 18 nt, Human
ugaguaaaauaaccaaau

SEQ ID NO: 913331 - RNA, 20 nt, Human
ugaguaaaauaaccaaauaa

SEQ ID NO: 913332 - RNA, 19 nt, Human
ugcagcugagcucuguuuu

SEQ ID NO: 913333 - RNA, 25 nt, Human
uggauuugugacacacaaacacauc

SEQ ID NO: 913334 - RNA, 18 nt, Human
uggggcuugggaagacag

SEQ ID NO: 913335 - RNA, 18 nt, Human
uguuaauuaaaaaacuua

SEQ ID NO: 913336 - RNA, 22 nt, Human
uuaauccuaacuauagacuacu

SEQ ID NO: 913337 - RNA, 22 nt, Human
uuuaaagacagaguggacuguu

SEQ ID NO: 913338 - RNA, 21 nt, Human
uuugggaaauacccaagucuu

SEQ ID NO: 913339 - RNA, 19 nt, Human
uuuugcagcugagcucugu

SEQ ID NO: 913340 - RNA, 21 nt, Human
uuuuguuacuggacagcgcuu

SEQ ID NO: 913341 - RNA, 19 nt, Human
uuuuuuuuuuuuagugggu

SEQ ID NO: 913342 - RNA, 18 nt, Human
aaacccaaagacuccgga

SEQ ID NO: 913343 - RNA, 21 nt, Human
aacacaguaugugacacagga

SEQ ID NO: 913344 - RNA, 18 nt, Human
aagaagaaaggaaagaag

SEQ ID NO: 913345 - RNA, 18 nt, Human
aagagaaagaagaaagga

SEQ ID NO: 913346 - RNA, 19 nt, Human
acccaaagacuccggacag

SEQ ID NO: 913347 - RNA, 19 nt, Human
acccacaccagugagaugu

SEQ ID NO: 913348 - RNA, 20 nt, Human
agaaagaagaaaggaaagaa

SEQ ID NO: 913349 - RNA, 24 nt, Human
agaaaggaaagaaggaaaaaagga

SEQ ID NO: 913350 - RNA, 24 nt, Human
agagucccuuccaaggccucacac

SEQ ID NO: 913351 - RNA, 19 nt, Human
agcaggugaaucaaaccca

SEQ ID NO: 913352 - RNA, 21 nt, Human
agcaggugaaucaaacccaaa

SEQ ID NO: 913353 - RNA, 24 nt, Human
aggaaagaaggaaaaaaggaaggg

SEQ ID NO: 913354 - RNA, 22 nt, Human
aggaugaugaagccccacuaga

SEQ ID NO: 913355 - RNA, 23 nt, Human
caacagaauauuccaacuucagu

SEQ ID NO: 913356 - RNA, 24 nt, Human
cagaaagagucccuuccaaggccu

SEQ ID NO: 913357 - RNA, 18 nt, Human
caguaugugacacaggag

SEQ ID NO: 913358 - RNA, 20 nt, Human
cauccauacugacacccacu

SEQ ID NO: 913359 - RNA, 22 nt, Human
cauccauacugacacccacucc

SEQ ID NO: 913360 - RNA, 25 nt, Human
cauucagacacauccauacugacac

SEQ ID NO: 913361 - RNA, 20 nt, Human
ccacagccccaugcacccaa

SEQ ID NO: 913362 - RNA, 22 nt, Human
cccacuagacauuacaaacaaa

SEQ ID NO: 913363 - RNA, 18 nt, Human
ccccaugcacccacacca

SEQ ID NO: 913364 - RNA, 23 nt, Human
cccugaucaggucgccucccuca

SEQ ID NO: 913365 - RNA, 23 nt, Human
cucaaauugauguguacccccac

SEQ ID NO: 913366 - RNA, 21 nt, Human
cucacacauucagacacaucc

SEQ ID NO: 913367 - RNA, 22 nt, Human
cuccccugaucaggucgccucc

SEQ ID NO: 913368 - RNA, 21 nt, Human
cugacaaagccaaaaagaaaa

SEQ ID NO: 913369 - RNA, 24 nt, Human
cuguaauauuccuuuuacauucua

SEQ ID NO: 913370 - RNA, 24 nt, Human
cuuucuugcucuuuaaaaaaaucc

SEQ ID NO: 913371 - RNA, 20 nt, Human
gaaaggaaagaaggaaaaaa

SEQ ID NO: 913372 - RNA, 21 nt, Human
gacauuacaaacaacugcaac

SEQ ID NO: 913373 - RNA, 21 nt, Human
gauguguacccccaccucccc

SEQ ID NO: 913374 - RNA, 21 nt, Human
gcaggugaaucaaacccaaag

SEQ ID NO: 913375 - RNA, 20 nt, Human
ggagucccuugauguuucuu

SEQ ID NO: 913376 - RNA, 21 nt, Human
ggccccugacuuugguuguuu

SEQ ID NO: 913377 - RNA, 23 nt, Human
gucccuugauguuucuugaggag

SEQ ID NO: 913378 - RNA, 19 nt, Human
uaaaaacacaguaugugac

SEQ ID NO: 913379 - RNA, 23 nt, Human
uaaaauaaaaacacaguauguga

SEQ ID NO: 913380 - RNA, 18 nt, Human
uacaguaucugcagaaag

SEQ ID NO: 913381 - RNA, 21 nt, Human
uagugagauuaauuuaucuug

SEQ ID NO: 913382 - RNA, 19 nt, Human
ucaggaugaugaagcccca

SEQ ID NO: 913383 - RNA, 21 nt, Human
ucccugacaaagccaaaaaga

SEQ ID NO: 913384 - RNA, 21 nt, Human
uccuucuuuucaggaugauga

SEQ ID NO: 913385 - RNA, 21 nt, Human
ucuugaggagaucuguacacu

SEQ ID NO: 913386 - RNA, 19 nt, Human
ugaaggccccugacuuugg

SEQ ID NO: 913387 - RNA, 20 nt, Human
ugaaggccccugacuuuggu

SEQ ID NO: 913388 - RNA, 22 nt, Human
ugaaggccccugacuuugguug

SEQ ID NO: 913389 - RNA, 21 nt, Human
ugacacaggagucccuugaug

SEQ ID NO: 913390 - RNA, 23 nt, Human
ugacacccacuccacagccccau

SEQ ID NO: 913391 - RNA, 19 nt, Human
ugaucaggucgccucccuc

SEQ ID NO: 913392 - RNA, 19 nt, Human
ugauuuguuuuucaauuuu

SEQ ID NO: 913393 - RNA, 20 nt, Human
uguacacaauuuguugaaug

SEQ ID NO: 913394 - RNA, 18 nt, Human
ugugacacaggagucccu

SEQ ID NO: 913395 - RNA, 20 nt, Human
ugugacacaggagucccuug

SEQ ID NO: 913396 - RNA, 18 nt, Human
uguguauauuacauauau

SEQ ID NO: 913397 - RNA, 19 nt, Human
uguguauauuacauauaug

SEQ ID NO: 913398 - RNA, 21 nt, Human
uuaaaaaaaucccugucuccu

SEQ ID NO: 913399 - RNA, 21 nt, Human
uucaaaugaucuuucuguugg

SEQ ID NO: 913400 - RNA, 24 nt, Human
uucacauuuuaauguuucaguagc

SEQ ID NO: 913401 - RNA, 22 nt, Human
uugauguguacccccaccuccc

SEQ ID NO: 913402 - RNA, 19 nt, Human
uuguacacaauuuguugaa

SEQ ID NO: 913403 - RNA, 25 nt, Human
uuuaaaaagaaagaaagagaaagaa

SEQ ID NO: 913404 - RNA, 21 nt, Human
uuuacauucuauauacacaga

SEQ ID NO: 913405 - RNA, 18 nt, Human
uuuuuuuuuuuuuuuuug

SEQ ID NO: 913406 - RNA, 23 nt, Human
uuuuuuuuuuuuuuuuuugguuu

SEQ ID NO: 913407 - RNA, 25 nt, Human
aagaaagcacccuaacgugagaacu

SEQ ID NO: 913408 - RNA, 18 nt, Human
accccacccuuccugcca

SEQ ID NO: 913409 - RNA, 18 nt, Human
acucuguaauuuuuagcu

SEQ ID NO: 913410 - RNA, 23 nt, Human
agccaauaacagccauggugacc

SEQ ID NO: 913411 - RNA, 18 nt, Human
agcccagcgggacggggu

SEQ ID NO: 913412 - RNA, 21 nt, Human
agcuguggcagcuggccugaa

SEQ ID NO: 913413 - RNA, 22 nt, Human
aggagcgcggccagcccugggc

SEQ ID NO: 913414 - RNA, 18 nt, Human
aggcaggaggcccagcag

SEQ ID NO: 913415 - RNA, 24 nt, Human
agggagccaauaacagccauggug

SEQ ID NO: 913416 - RNA, 23 nt, Human
aggggcucgcugggacacccaga

SEQ ID NO: 913417 - RNA, 22 nt, Human
auauuguguauguacacauagg

SEQ ID NO: 913418 - RNA, 21 nt, Human
caagguggggaggugaccugg

SEQ ID NO: 913419 - RNA, 27 nt, Human
cacccagacuggagucaucgcugaagc

SEQ ID NO: 913420 - RNA, 23 nt, Human
cacuggaaccggugcacgccuuc

SEQ ID NO: 913421 - RNA, 24 nt, Human
cagcagucgccuccagaacacggg

SEQ ID NO: 913422 - RNA, 19 nt, Human
caggagcgcggccagcccu

SEQ ID NO: 913423 - RNA, 19 nt, Human
caggaggcccagcagucgc

SEQ ID NO: 913424 - RNA, 18 nt, Human
caggcagcaaggugggga

SEQ ID NO: 913425 - RNA, 23 nt, Human
cauuacacauuaagaaucaggga

SEQ ID NO: 913426 - RNA, 25 nt, Human
ccaauaacagccauggugaccuccu

SEQ ID NO: 913427 - RNA, 24 nt, Human
ccagcagucgccuccagaacacgg

SEQ ID NO: 913428 - RNA, 25 nt, Human
cccagacuggagucaucgcugaagc

SEQ ID NO: 913429 - RNA, 18 nt, Human
cccugggcggccaggcag

SEQ ID NO: 913430 - RNA, 22 nt, Human
ccuuccugccagccccucccuc

SEQ ID NO: 913431 - RNA, 23 nt, Human
cucgcugggacacccagacugga

SEQ ID NO: 913432 - RNA, 23 nt, Human
cugaagcgcggcugaaagagcug

SEQ ID NO: 913433 - RNA, 22 nt, Human
cuuccugccagccccucccuca

SEQ ID NO: 913434 - RNA, 21 nt, Human
gaaagcacccuaacgugagaa

SEQ ID NO: 913435 - RNA, 19 nt, Human
gaagcgcggcugaaagagc

SEQ ID NO: 913436 - RNA, 24 nt, Human
gaccccacccuuccugccagcccc

SEQ ID NO: 913437 - RNA, 23 nt, Human
gccaggcaggaggcccagcaguc

SEQ ID NO: 913438 - RNA, 24 nt, Human
gcucgcugggacacccagacugga

SEQ ID NO: 913439 - RNA, 24 nt, Human
ggggacagcaagggagccaauaac

SEQ ID NO: 913440 - RNA, 21 nt, Human
guagagcccagcucugcagag

SEQ ID NO: 913441 - RNA, 20 nt, Human
uccugccagccccucccuca

SEQ ID NO: 913442 - RNA, 22 nt, Human
uccugccagccccucccucacu

SEQ ID NO: 913443 - RNA, 18 nt, Human
uccugcgcuggcgguccc

SEQ ID NO: 913444 - RNA, 20 nt, Human
ucuggacacaggcagcaagg

SEQ ID NO: 913445 - RNA, 22 nt, Human
ugaagccuuuugggguagagcc

SEQ ID NO: 913446 - RNA, 23 nt, Human
ugaagcgcggcugaaagagcuga

SEQ ID NO: 913447 - RNA, 19 nt, Human
ugaccuggggaacagcugg

SEQ ID NO: 913448 - RNA, 19 nt, Human
ugagaacuggagacuccaa

SEQ ID NO: 913449 - RNA, 23 nt, Human
ugaggaccccacccuuccugcca

SEQ ID NO: 913450 - RNA, 24 nt, Human
ugccagccccucccucacuuacug

SEQ ID NO: 913451 - RNA, 22 nt, Human
uggacacaggcagcaagguggg

SEQ ID NO: 913452 - RNA, 23 nt, Human
uggcagcacaccugacccucagc

SEQ ID NO: 913453 - RNA, 24 nt, Human
uggggaacagcuggggacagcaag

SEQ ID NO: 913454 - RNA, 18 nt, Human
ugggguagagcccagcuu

SEQ ID NO: 913455 - RNA, 18 nt, Human
uuacacauuaagaaucag

SEQ ID NO: 913456 - RNA, 25 nt, Human
uuccuugagcccagcgggacggggu

SEQ ID NO: 913457 - RNA, 21 nt, Human
accgcgcacgaagaaccgaaa

SEQ ID NO: 913458 - RNA, 18 nt, Human
acuuggcggagcuggagg

SEQ ID NO: 913459 - RNA, 20 nt, Human
agaacgccccagguccacag

SEQ ID NO: 913460 - RNA, 18 nt, Human
agcacagugggcggaagc

SEQ ID NO: 913461 - RNA, 19 nt, Human
aggcguccagcaggacggc

SEQ ID NO: 913462 - RNA, 21 nt, Human
cacagcuuaaggaguuuccca

SEQ ID NO: 913463 - RNA, 22 nt, Human
cacugcuacagcgaaagacaag

SEQ ID NO: 913464 - RNA, 19 nt, Human
cagucagucuucugcagcc

SEQ ID NO: 913465 - RNA, 20 nt, Human
cagugggcggaagccggggu

SEQ ID NO: 913466 - RNA, 23 nt, Human
ccccagaacgccccagguccacu

SEQ ID NO: 913467 - RNA, 23 nt, Human
ccgcgcacgaagaaccgaaacgg

SEQ ID NO: 913468 - RNA, 19 nt, Human
cgaagaaccgaaacggccu

SEQ ID NO: 913469 - RNA, 23 nt, Human
cgacagcccagguccgaggaagg

SEQ ID NO: 913470 - RNA, 19 nt, Human
cgcacgaagaaccgaaacg

SEQ ID NO: 913471 - RNA, 20 nt, Human
cgccccagguccacaguggc

SEQ ID NO: 913472 - RNA, 22 nt, Human
cuccuaguuuuguuuaauagga

SEQ ID NO: 913473 - RNA, 25 nt, Human
cugcagccccagaacgccccagguc

SEQ ID NO: 913474 - RNA, 21 nt, Human
gacggcggcgaauccacagcc

SEQ ID NO: 913475 - RNA, 22 nt, Human
gccaagggauucgagauggaag

SEQ ID NO: 913476 - RNA, 20 nt, Human
gccccagguccacaguggcu

SEQ ID NO: 913477 - RNA, 25 nt, Human
gccccagguccacaguggcugcugg

SEQ ID NO: 913478 - RNA, 21 nt, Human
gccuucuacagggcggaggac

SEQ ID NO: 913479 - RNA, 22 nt, Human
gccuucuacagggcggaggacg

SEQ ID NO: 913480 - RNA, 20 nt, Human
gggcagcacagugggcggaa

SEQ ID NO: 913481 - RNA, 20 nt, Human
gggcggaagccgggguggga

SEQ ID NO: 913482 - RNA, 25 nt, Human
uaaggaguuucccacugcuacagcg

SEQ ID NO: 913483 - RNA, 20 nt, Human
uaguggaucccaccuacuuu

SEQ ID NO: 913484 - RNA, 19 nt, Human
ucugcagccccagaacgcc

SEQ ID NO: 913485 - RNA, 21 nt, Human
ugcaaagugcacagagggagg

SEQ ID NO: 913486 - RNA, 19 nt, Human
ugcacagagggaggccuga

SEQ ID NO: 913487 - RNA, 20 nt, Human
uggcacauccacagucaguc

SEQ ID NO: 913488 - RNA, 18 nt, Human
ugggaguaaagccugggg

SEQ ID NO: 913489 - RNA, 19 nt, Human
uggggcggcuaccgcgcac

SEQ ID NO: 913490 - RNA, 19 nt, Human
ugggguaggggggcggcgg

SEQ ID NO: 913491 - RNA, 18 nt, Human
uuuuuuuuuuuuuuucug

SEQ ID NO: 913492 - RNA, 22 nt, Human
cacgccgccgccgccgccgccc

SEQ ID NO: 913493 - RNA, 18 nt, Human
cacugugccggguuaggc

SEQ ID NO: 913494 - RNA, 18 nt, Human
ccgccgccgcccaggcgc

SEQ ID NO: 913495 - RNA, 19 nt, Human
ccgccgccgccgccgccca

SEQ ID NO: 913496 - RNA, 20 nt, Human
cgccgccgccgccgccgccc

SEQ ID NO: 913497 - RNA, 18 nt, Human
aagaagggaugaugagca

SEQ ID NO: 913498 - RNA, 24 nt, Human
aauaaauguaccccuugggcuucu

SEQ ID NO: 913499 - RNA, 20 nt, Human
acaaagcuguaguauauggu

SEQ ID NO: 913500 - RNA, 22 nt, Human
acuacugaauuucaagucacac

SEQ ID NO: 913501 - RNA, 19 nt, Human
acucuguaccaacacacag

SEQ ID NO: 913502 - RNA, 24 nt, Human
agaagaaauucuuuuacuacugaa

SEQ ID NO: 913503 - RNA, 22 nt, Human
agagcacacauuacucccaaga

SEQ ID NO: 913504 - RNA, 19 nt, Human
cacacacaaaauaggugag

SEQ ID NO: 913505 - RNA, 24 nt, Human
cacacagaauuuacuguucugcaa

SEQ ID NO: 913506 - RNA, 19 nt, Human
cagaauuuacuguucugca

SEQ ID NO: 913507 - RNA, 21 nt, Human
cuccucuacaguuucuuuaaa

SEQ ID NO: 913508 - RNA, 22 nt, Human
cuccucuacaguuucuuuaaaa

SEQ ID NO: 913509 - RNA, 21 nt, Human
gcacaauccuagcaggcaauc

SEQ ID NO: 913510 - RNA, 19 nt, Human
gcacucuguaccaacacac

SEQ ID NO: 913511 - RNA, 19 nt, Human
gccuaccacaaagcuguag

SEQ ID NO: 913512 - RNA, 22 nt, Human
ggaauaaaacuaaaauuucuaa

SEQ ID NO: 913513 - RNA, 21 nt, Human
uaaauuccuauaacuagggac

SEQ ID NO: 913514 - RNA, 20 nt, Human
uacagcaauguaaaacuuuu

SEQ ID NO: 913515 - RNA, 25 nt, Human
uagcaaaacacaagaucauguacaa

SEQ ID NO: 913516 - RNA, 20 nt, Human
uauuuuaucauauuuagaau

SEQ ID NO: 913517 - RNA, 21 nt, Human
ucccuuaaaauauuuacauuu

SEQ ID NO: 913518 - RNA, 22 nt, Human
ugaaaauaauggccuaccacaa

SEQ ID NO: 913519 - RNA, 18 nt, Human
ugcauauuaauaaaacaa

SEQ ID NO: 913520 - RNA, 20 nt, Human
ugguaauaaaugacuucaau

SEQ ID NO: 913521 - RNA, 24 nt, Human
ugguaugaagaagggaugaugagc

SEQ ID NO: 913522 - RNA, 24 nt, Human
uguaauccugaagcagccugcaaa

SEQ ID NO: 913523 - RNA, 22 nt, Human
uuagaaucaaaauaucccuuaa

SEQ ID NO: 913524 - RNA, 23 nt, Human
uuccauaguuaaccauauuuacc

SEQ ID NO: 913525 - RNA, 21 nt, Human
uuuuacuacugaauuucaagu

SEQ ID NO: 913526 - RNA, 22 nt, Human
aaacaaguaaaugccuuucaag

SEQ ID NO: 913527 - RNA, 23 nt, Human
aaagaguuuccaauuucucaaaa

SEQ ID NO: 913528 - RNA, 24 nt, Human
agaacauaccaauauggagaacag

SEQ ID NO: 913529 - RNA, 20 nt, Human
agagcccugcccccccaccc

SEQ ID NO: 913530 - RNA, 21 nt, Human
agagcccugcccccccacccc

SEQ ID NO: 913531 - RNA, 25 nt, Human
agagcccugcccccccacccccccc

SEQ ID NO: 913532 - RNA, 20 nt, Human
agaggaggggguggcaagcu

SEQ ID NO: 913533 - RNA, 21 nt, Human
agaguuuccaauuucucaaaa

SEQ ID NO: 913534 - RNA, 19 nt, Human
agggagaggaggggguggc

SEQ ID NO: 913535 - RNA, 22 nt, Human
agggagaggaggggguggcaag

SEQ ID NO: 913536 - RNA, 18 nt, Human
caaaaaaaacgggaaaug

SEQ ID NO: 913537 - RNA, 18 nt, Human
caacagaaagaguuucca

SEQ ID NO: 913538 - RNA, 23 nt, Human
caacagaaagaguuuccaauuuc

SEQ ID NO: 913539 - RNA, 24 nt, Human
caacuuuauuaauauaauagcaac

SEQ ID NO: 913540 - RNA, 24 nt, Human
caccaaagguuccucaaggacagc

SEQ ID NO: 913541 - RNA, 24 nt, Human
caccaaagguuccucaaggacagc

SEQ ID NO: 913542 - RNA, 26 nt, Human
caccccccccccaaaaaaaacgggaa

SEQ ID NO: 913543 - RNA, 24 nt, Human
cagagcccugcccccccacccccc

SEQ ID NO: 913544 - RNA, 21 nt, Human
cagcugcagcagacugauguu

SEQ ID NO: 913545 - RNA, 20 nt, Human
ccaccccccccccaaaaaaa

SEQ ID NO: 913546 - RNA, 22 nt, Human
cccaaaaaaaacgggaaaugcc

SEQ ID NO: 913547 - RNA, 22 nt, Human
cccaccccccccccaaaaaaaa

SEQ ID NO: 913548 - RNA, 26 nt, Human
cccaccccccccccaaaaaaaacggg

SEQ ID NO: 913549 - RNA, 20 nt, Human
ccccaaaaaaaacgggaaau

SEQ ID NO: 913550 - RNA, 20 nt, Human
cccccaaaaaaaacgggaaa

SEQ ID NO: 913551 - RNA, 23 nt, Human
cccccaccccccccccaaaaaaa

SEQ ID NO: 913552 - RNA, 19 nt, Human
cccugcccccccacccccc

SEQ ID NO: 913553 - RNA, 24 nt, Human
cccugcccccccacccccccccca

SEQ ID NO: 913554 - RNA, 19 nt, Human
ccuacauuucuuguucuga

SEQ ID NO: 913555 - RNA, 20 nt, Human
ccucaaggacagcugccacc

SEQ ID NO: 913556 - RNA, 18 nt, Human
ccugcccccccacccccc

SEQ ID NO: 913557 - RNA, 20 nt, Human
ccuggugaugcucugggcuc

SEQ ID NO: 913558 - RNA, 18 nt, Human
cucaaggacagcugccac

SEQ ID NO: 913559 - RNA, 19 nt, Human
cucaaggacagcugccacc

SEQ ID NO: 913560 - RNA, 25 nt, Human
cugauagcuucccaccacacaccaa

SEQ ID NO: 913561 - RNA, 19 nt, Human
gaauccuuuuccaucccua

SEQ ID NO: 913562 - RNA, 21 nt, Human
gagcccugcccccccaccccc

SEQ ID NO: 913563 - RNA, 20 nt, Human
gaggggguggcaagcugcca

SEQ ID NO: 913564 - RNA, 27 nt, Human
gcccccccaccccccccccaaaaaaaa

SEQ ID NO: 913565 - RNA, 18 nt, Human
gcccugcccccccacccc

SEQ ID NO: 913566 - RNA, 23 nt, Human
gcccugcccccccaccccccccc

SEQ ID NO: 913567 - RNA, 18 nt, Human
gcucugggcucugcuccc

SEQ ID NO: 913568 - RNA, 24 nt, Human
gcucugggcucugcucccuuucug

SEQ ID NO: 913569 - RNA, 18 nt, Human
gggugaagggagaggagg

SEQ ID NO: 913570 - RNA, 19 nt, Human
gggugaagggagaggaggg

SEQ ID NO: 913571 - RNA, 23 nt, Human
uaacuaagccggccaccggaagc

SEQ ID NO: 913572 - RNA, 24 nt, Human
uaacuaagccggccaccggaagcu

SEQ ID NO: 913573 - RNA, 22 nt, Human
uaauagcaacagaaagaguuuc

SEQ ID NO: 913574 - RNA, 25 nt, Human
uagcaggcacuccuggugaugcucu

SEQ ID NO: 913575 - RNA, 23 nt, Human
uauuucuuuuuagaagaucuugg

SEQ ID NO: 913576 - RNA, 22 nt, Human
ucaaggacagcugccaccagag

SEQ ID NO: 913577 - RNA, 21 nt, Human
ucugggugaagggagaggagg

SEQ ID NO: 913578 - RNA, 25 nt, Human
ucuugguugagggagaaccgggguc

SEQ ID NO: 913579 - RNA, 19 nt, Human
ugaagggagaggagggggu

SEQ ID NO: 913580 - RNA, 23 nt, Human
ugagggagaacauaccaauaugg

SEQ ID NO: 913581 - RNA, 24 nt, Human
ugaugcucugggcucugcucccuu

SEQ ID NO: 913582 - RNA, 20 nt, Human
ugcccccccacccccccccc

SEQ ID NO: 913583 - RNA, 25 nt, Human
ugggcgucgcuucacagucaguucc

SEQ ID NO: 913584 - RNA, 19 nt, Human
ugggcucugcucccuuucu

SEQ ID NO: 913585 - RNA, 21 nt, Human
uggugaugcucugggcucugc

SEQ ID NO: 913586 - RNA, 22 nt, Human
uucacagucaguuccucaagca

SEQ ID NO: 913587 - RNA, 20 nt, Human
uuuuuagaagaucuugguug

SEQ ID NO: 913588 - RNA, 25 nt, Human
uuuuucacugggcgucgcuucacag

SEQ ID NO: 913589 - RNA, 22 nt, Human
uuuuuuuuuuuuuuuuaccaga

SEQ ID NO: 913590 - RNA, 22 nt, Human
uuuuuuuuuuuuuuuuuaccag

SEQ ID NO: 913591 - RNA, 22 nt, Human
aaaacaacaaacaugggugaag

SEQ ID NO: 913592 - RNA, 18 nt, Human
aaaacaagauuaaggugg

SEQ ID NO: 913593 - RNA, 19 nt, Human
aaaacaucugagggguggc

SEQ ID NO: 913594 - RNA, 19 nt, Human
aaacaacaaacauggguga

SEQ ID NO: 913595 - RNA, 20 nt, Human
aaacaugggugaaguaagaa

SEQ ID NO: 913596 - RNA, 24 nt, Human
aaauacgugucgguguggucacaa

SEQ ID NO: 913597 - RNA, 22 nt, Human
aacaucugagggguggcuuugc

SEQ ID NO: 913598 - RNA, 19 nt, Human
aacccggcggacgccccuc

SEQ ID NO: 913599 - RNA, 21 nt, Human
acaggcucuuccagcuugaaa

SEQ ID NO: 913600 - RNA, 24 nt, Human
acaggcucuuccagcuugaaacuu

SEQ ID NO: 913601 - RNA, 19 nt, Human
acccgccgccgcaagaaug

SEQ ID NO: 913602 - RNA, 23 nt, Human
aggcaguggcuuccuaacccggc

SEQ ID NO: 913603 - RNA, 20 nt, Human
aucaaguuguuucacuggac

SEQ ID NO: 913604 - RNA, 18 nt, Human
ccaaacccgauggaggag

SEQ ID NO: 913605 - RNA, 26 nt, Human
ccagagugcucccuccccaaacccga

SEQ ID NO: 913606 - RNA, 20 nt, Human
cccaaacccgauggaggagc

SEQ ID NO: 913607 - RNA, 21 nt, Human
cggugcugucucucucuccuc

SEQ ID NO: 913608 - RNA, 26 nt, Human
cucauagucucacugcuggcccugcu

SEQ ID NO: 913609 - RNA, 22 nt, Human
cucuuccagcuugaaacuucag

SEQ ID NO: 913610 - RNA, 20 nt, Human
cugcuggcccugcuuccuug

SEQ ID NO: 913611 - RNA, 21 nt, Human
cuggacugcucccuccucaug

SEQ ID NO: 913612 - RNA, 23 nt, Human
gacaggugcuggguaaaagcuug

SEQ ID NO: 913613 - RNA, 24 nt, Human
guaggauucugugcacacacugcu

SEQ ID NO: 913614 - RNA, 22 nt, Human
gugggacagcagcuacucagaa

SEQ ID NO: 913615 - RNA, 22 nt, Human
uaagaagaggcauaugaaaaca

SEQ ID NO: 913616 - RNA, 18 nt, Human
uccacugagacuucucuu

SEQ ID NO: 913617 - RNA, 25 nt, Human
ucgcugggccaagacguuccuugag

SEQ ID NO: 913618 - RNA, 18 nt, Human
ucucacagucccagagug

SEQ ID NO: 913619 - RNA, 18 nt, Human
ugaaaacaagauuaaggu

SEQ ID NO: 913620 - RNA, 21 nt, Human
ugaggacaauacaggcucuuc

SEQ ID NO: 913621 - RNA, 19 nt, Human
uggcaucuggacugcuccc

SEQ ID NO: 913622 - RNA, 21 nt, Human
ugggacagcagcuacucagaa

SEQ ID NO: 913623 - RNA, 20 nt, Human
ugggaggagaggaggagaaa

SEQ ID NO: 913624 - RNA, 24 nt, Human
uggguaaaagcuuguugagaaaau

SEQ ID NO: 913625 - RNA, 19 nt, Human
uggugggaggagaggagga

SEQ ID NO: 913626 - RNA, 22 nt, Human
uuguuggcaucuggacugcucc

SEQ ID NO: 913627 - RNA, 21 nt, Human
uuuuuuccuuuuauuuugcaa

SEQ ID NO: 913628 - RNA, 19 nt, Human
aaaccaccaggcaucaucu

SEQ ID NO: 913629 - RNA, 24 nt, Human
acagcagcaaggaagcagaagccu

SEQ ID NO: 913630 - RNA, 18 nt, Human
agcaaggaagcagaagcc

SEQ ID NO: 913631 - RNA, 18 nt, Human
aggaucuagaaaagcaag

SEQ ID NO: 913632 - RNA, 20 nt, Human
aguucuacuuauuccuuaac

SEQ ID NO: 913633 - RNA, 18 nt, Human
cacagcagcaaggaagcg

SEQ ID NO: 913634 - RNA, 21 nt, Human
cagcaaaggguagccucgugc

SEQ ID NO: 913635 - RNA, 22 nt, Human
cagcaaggaagcagaagccuua

SEQ ID NO: 913636 - RNA, 21 nt, Human
ccaaaccaccaggcaucaucu

SEQ ID NO: 913637 - RNA, 22 nt, Human
ccacagcagcaaggaagcagaa

SEQ ID NO: 913638 - RNA, 18 nt, Human
ccuacuccaccacagcag

SEQ ID NO: 913639 - RNA, 18 nt, Human
gaagagguuccuggcuuu

SEQ ID NO: 913640 - RNA, 19 nt, Human
gcagcaaaggguagccucg

SEQ ID NO: 913641 - RNA, 22 nt, Human
uaggaaaucuauaacgucaggc

SEQ ID NO: 913642 - RNA, 19 nt, Human
uaucaugguauuucauggu

SEQ ID NO: 913643 - RNA, 21 nt, Human
uccaccacagcagcaaggaag

SEQ ID NO: 913644 - RNA, 18 nt, Human
ucccagcaaacauuguag

SEQ ID NO: 913645 - RNA, 18 nt, Human
ucuaugacagaccugaag

SEQ ID NO: 913646 - RNA, 18 nt, Human
uuccuuaacuguaccugc

SEQ ID NO: 913647 - RNA, 30 nt, Human
uuuugcaucaucaaauuguugucucaagaa

SEQ ID NO: 913648 - RNA, 18 nt, Human
uuuuuuuuuuuuuuuuug

SEQ ID NO: 913649 - RNA, 21 nt, Human
uuuuuuuuuuuuuuuuugcaa

SEQ ID NO: 913650 - RNA, 23 nt, Human
uuuuuuuuuuuuuuuuugcaaau

SEQ ID NO: 913651 - RNA, 24 nt, Human
aaagugcugggauuacaggcguga

SEQ ID NO: 913652 - RNA, 19 nt, Human
aagugcugggauuacaggc

SEQ ID NO: 913653 - RNA, 19 nt, Human
aagugcugggauuacaggc

SEQ ID NO: 913654 - RNA, 26 nt, Human
aagugcugggauuacaggcgugagcc

SEQ ID NO: 913655 - RNA, 19 nt, Human
acaggcgcccgccaccacg

SEQ ID NO: 913656 - RNA, 18 nt, Human
acaggguuucaccguguu

SEQ ID NO: 913657 - RNA, 19 nt, Human
acaggguuucaccguguua

SEQ ID NO: 913658 - RNA, 20 nt, Human
acaggguuucaccguguuag

SEQ ID NO: 913659 - RNA, 24 nt, Human
acaggguuucaccguguuagccag

SEQ ID NO: 913660 - RNA, 24 nt, Human
accucgugauccacccgccuuggc

SEQ ID NO: 913661 - RNA, 24 nt, Human
acugucgcccaggcuggagugcag

SEQ ID NO: 913662 - RNA, 18 nt, Human
agacaggguuucaccgug

SEQ ID NO: 913663 - RNA, 19 nt, Human
agagacaggguuucaccgu

SEQ ID NO: 913664 - RNA, 18 nt, Human
agccuccagaguagcugg

SEQ ID NO: 913665 - RNA, 24 nt, Human
agcucugccucccggguucacgcu

SEQ ID NO: 913666 - RNA, 24 nt, Human
agcuggagaugguggugaacgguc

SEQ ID NO: 913667 - RNA, 20 nt, Human
aggcgcccgccaccacgccu

SEQ ID NO: 913668 - RNA, 25 nt, Human
aggcuggagugcaguagcgcaaucu

SEQ ID NO: 913669 - RNA, 20 nt, Human
aguagagacaggguuucacc

SEQ ID NO: 913670 - RNA, 18 nt, Human
aguagcugggacuacagg

SEQ ID NO: 913671 - RNA, 19 nt, Human
aguagcugggacuacaggc

SEQ ID NO: 913672 - RNA, 20 nt, Human
agugcaguagcgcaaucucg

SEQ ID NO: 913673 - RNA, 24 nt, Human
agugcaguagcgcaaucucggcuc

SEQ ID NO: 913674 - RNA, 19 nt, Human
auccacccgccuuggccuc

SEQ ID NO: 913675 - RNA, 24 nt, Human
caaagugcugggauuacaggcgug

SEQ ID NO: 913676 - RNA, 22 nt, Human
cacccgccuuggccuccaaagu

SEQ ID NO: 913677 - RNA, 23 nt, Human
cacccgccuuggccuccaaagug

SEQ ID NO: 913678 - RNA, 19 nt, Human
caccgcaagcucugccucc

SEQ ID NO: 913679 - RNA, 18 nt, Human
caccguguuagccaggau

SEQ ID NO: 913680 - RNA, 24 nt, Human
caccguguuagccaggauggucuc

SEQ ID NO: 913681 - RNA, 22 nt, Human
cacgcuacucuccugccucagc

SEQ ID NO: 913682 - RNA, 24 nt, Human
caggguuucaccguguuagccagg

SEQ ID NO: 913683 - RNA, 22 nt, Human
ccaaagugcugggauuacaggc

SEQ ID NO: 913684 - RNA, 22 nt, Human
ccaaagugcugggauuacaggc

SEQ ID NO: 913685 - RNA, 24 nt, Human
ccaaagugcugggauuacaggcgu

SEQ ID NO: 913686 - RNA, 24 nt, Human
ccagaguagcugggacuacaggcg

SEQ ID NO: 913687 - RNA, 23 nt, Human
cccggguucacgcuacucuccug

SEQ ID NO: 913688 - RNA, 20 nt, Human
cccugccccaccccuucucc

SEQ ID NO: 913689 - RNA, 21 nt, Human
ccgcaagcucugccucccggg

SEQ ID NO: 913690 - RNA, 22 nt, Human
ccucccggguucacgcuacucu

SEQ ID NO: 913691 - RNA, 20 nt, Human
ccugaccucgugauccaccc

SEQ ID NO: 913692 - RNA, 22 nt, Human
cgcgcccggcccacucugauuu

SEQ ID NO: 913693 - RNA, 24 nt, Human
cucaccgcaagcucugccucccgg

SEQ ID NO: 913694 - RNA, 24 nt, Human
cucagccuccagaguagcugggac

SEQ ID NO: 913695 - RNA, 24 nt, Human
cuccugaccucgugauccacccgc

SEQ ID NO: 913696 - RNA, 22 nt, Human
cucugccuuccuuagagacuga

SEQ ID NO: 913697 - RNA, 23 nt, Human
cugccucagccuccagaguagcu

SEQ ID NO: 913698 - RNA, 22 nt, Human
cuggcgucugugagcagcugga

SEQ ID NO: 913699 - RNA, 23 nt, Human
cuggucuguguccucccgcucuu

SEQ ID NO: 913700 - RNA, 21 nt, Human
gaccucgugauccacccgccu

SEQ ID NO: 913701 - RNA, 21 nt, Human
gaccucgugauccacccgccu

SEQ ID NO: 913702 - RNA, 22 nt, Human
gaccucgugauccacccgccuu

SEQ ID NO: 913703 - RNA, 25 nt, Human
gaguagcugggacuacaggcgcccg

SEQ ID NO: 913704 - RNA, 18 nt, Human
gauuacaggcgugagcca

SEQ ID NO: 913705 - RNA, 22 nt, Human
gauuacaggcgugagccaccgc

SEQ ID NO: 913706 - RNA, 22 nt, Human
gauuacaggcgugagccaccgc

SEQ ID NO: 913707 - RNA, 23 nt, Human
gccuggcuaauuuuuuguauuuu

SEQ ID NO: 913708 - RNA, 19 nt, Human
gcuggagugcaguagcgca

SEQ ID NO: 913709 - RNA, 24 nt, Human
gguacugucgcccaggcuggagug

SEQ ID NO: 913710 - RNA, 20 nt, Human
ggucucgaucuccugaccuc

SEQ ID NO: 913711 - RNA, 22 nt, Human
gugauccacccgccuuggccuc

SEQ ID NO: 913712 - RNA, 22 nt, Human
guuuuuuuuuuuuugagaugga

SEQ ID NO: 913713 - RNA, 24 nt, Human
uaauuuuuuguauuuuuaguagag

SEQ ID NO: 913714 - RNA, 25 nt, Human
uaauuuuuuguauuuuuaguagaga

SEQ ID NO: 913715 - RNA, 22 nt, Human
uacaggcgcccgccaccacgcc

SEQ ID NO: 913716 - RNA, 23 nt, Human
uacaggcgugagccaccgcgccc

SEQ ID NO: 913717 - RNA, 22 nt, Human
uagagacaggguuucaccgugu

SEQ ID NO: 913718 - RNA, 21 nt, Human
uaguagagacaggguuucacc

SEQ ID NO: 913719 - RNA, 24 nt, Human
uaguagagacaggguuucaccgug

SEQ ID NO: 913720 - RNA, 26 nt, Human
uaguagagacaggguuucaccguguu

SEQ ID NO: 913721 - RNA, 24 nt, Human
ucaccgcaagcucugccucccggg

SEQ ID NO: 913722 - RNA, 24 nt, Human
ucaccguguuagccaggauggucu

SEQ ID NO: 913723 - RNA, 23 nt, Human
uccaaagugcugggauuacaggc

SEQ ID NO: 913724 - RNA, 24 nt, Human
uccaaagugcugggauuacaggcg

SEQ ID NO: 913725 - RNA, 24 nt, Human
uccagaguagcugggacuacaggc

SEQ ID NO: 913726 - RNA, 21 nt, Human
ucccggguucacgcuacucuc

SEQ ID NO: 913727 - RNA, 24 nt, Human
ucccggguucacgcuacucuccug

SEQ ID NO: 913728 - RNA, 21 nt, Human
uccuggucuguguccucccgc

SEQ ID NO: 913729 - RNA, 24 nt, Human
ucgcccaggcuggagugcaguagc

SEQ ID NO: 913730 - RNA, 24 nt, Human
ucuccugccucagccuccagagua

SEQ ID NO: 913731 - RNA, 24 nt, Human
ucugguacugucgcccaggcugga

SEQ ID NO: 913732 - RNA, 18 nt, Human
ucuuuuauucugcugcuc

SEQ ID NO: 913733 - RNA, 19 nt, Human
ugcaauucaugacacaguu

SEQ ID NO: 913734 - RNA, 24 nt, Human
ugccucagccuccagaguagcugg

SEQ ID NO: 913735 - RNA, 19 nt, Human
ugccucccggguucacgcu

SEQ ID NO: 913736 - RNA, 24 nt, Human
ugcugggauuacaggcgugagcca

SEQ ID NO: 913737 - RNA, 24 nt, Human
uggagugcaguagcgcaaucucgg

SEQ ID NO: 913738 - RNA, 21 nt, Human
ugggacuacaggcgcccgcca

SEQ ID NO: 913739 - RNA, 22 nt, Human
ugggacuacaggcgcccgccac

SEQ ID NO: 913740 - RNA, 24 nt, Human
ugggacuacaggcgcccgccacca

SEQ ID NO: 913741 - RNA, 18 nt, Human
ugggauuacaggcgugag

SEQ ID NO: 913742 - RNA, 19 nt, Human
ugggauuacaggcgugagc

SEQ ID NO: 913743 - RNA, 21 nt, Human
ugggauuacaggcgugagcca

SEQ ID NO: 913744 - RNA, 22 nt, Human
ugggauuacaggcgugagccac

SEQ ID NO: 913745 - RNA, 23 nt, Human
ugggauuacaggcgugagccacc

SEQ ID NO: 913746 - RNA, 24 nt, Human
ugggauuacaggcgugagccaccg

SEQ ID NO: 913747 - RNA, 24 nt, Human
ugguacugucgcccaggcuggagu

SEQ ID NO: 913748 - RNA, 24 nt, Human
uuaagaucuucaccaacauucucu

SEQ ID NO: 913749 - RNA, 22 nt, Human
uuaguagagacaggguuucacc

SEQ ID NO: 913750 - RNA, 24 nt, Human
uuaguagagacaggguuucaccgu

SEQ ID NO: 913751 - RNA, 23 nt, Human
uuccuggucuguguccucccgcu

SEQ ID NO: 913752 - RNA, 19 nt, Human
uuucaccguguuagccagg

SEQ ID NO: 913753 - RNA, 24 nt, Human
uuuuguguuagucuagauaugaag

SEQ ID NO: 913754 - RNA, 24 nt, Human
uuuuuaguagagacaggguuucac

SEQ ID NO: 913755 - RNA, 21 nt, Human
uuuuuguauuuuuaguagaga

SEQ ID NO: 913756 - RNA, 24 nt, Human
uuuuuuguauuuuuaguagagaca

SEQ ID NO: 913757 - RNA, 25 nt, Human
uuuuuuuuuuugagauggagucugg

SEQ ID NO: 913758 - RNA, 20 nt, Human
aaauaguguggggucgcgga

SEQ ID NO: 913759 - RNA, 21 nt, Human
aagcaagaucgcaaaggccug

SEQ ID NO: 913760 - RNA, 24 nt, Human
aagcccccaaauacgagauuccag

SEQ ID NO: 913761 - RNA, 18 nt, Human
aaucucccuuccccgccc

SEQ ID NO: 913762 - RNA, 27 nt, Human
aaucucccuuccccgcccccuccgccg

SEQ ID NO: 913763 - RNA, 21 nt, Human
acagcacagaaauaguguggg

SEQ ID NO: 913764 - RNA, 19 nt, Human
acagcggcgggagauguuc

SEQ ID NO: 913765 - RNA, 18 nt, Human
acccccggauuucugggc

SEQ ID NO: 913766 - RNA, 21 nt, Human
acuugccccucaucccccccg

SEQ ID NO: 913767 - RNA, 20 nt, Human
agaaguggggaagggggcua

SEQ ID NO: 913768 - RNA, 18 nt, Human
agaggaaggaggggcuug

SEQ ID NO: 913769 - RNA, 21 nt, Human
agaggaaggaggggcuugggu

SEQ ID NO: 913770 - RNA, 22 nt, Human
agaggaaggaggggcuuggguc

SEQ ID NO: 913771 - RNA, 26 nt, Human
agcccgaggcaacaaguuacagcggg

SEQ ID NO: 913772 - RNA, 20 nt, Human
aggaaggaggggcuuggguu

SEQ ID NO: 913773 - RNA, 18 nt, Human
agggaaaagggaguagua

SEQ ID NO: 913774 - RNA, 23 nt, Human
agggagugcgggggucgggaggc

SEQ ID NO: 913775 - RNA, 24 nt, Human
aggggcuuggguuucgcuggucgg

SEQ ID NO: 913776 - RNA, 21 nt, Human
aguagacuggaggaggggcgg

SEQ ID NO: 913777 - RNA, 20 nt, Human
agugggggaggcagccgagg

SEQ ID NO: 913778 - RNA, 26 nt, Human
caagcccccaaauacgagauuccuuu

SEQ ID NO: 913779 - RNA, 25 nt, Human
cacgcagcccgaggcaacaaguuac

SEQ ID NO: 913780 - RNA, 23 nt, Human
cagaacucaaccgugcacagugg

SEQ ID NO: 913781 - RNA, 23 nt, Human
cauaacaaagccaaagggaaaag

SEQ ID NO: 913782 - RNA, 21 nt, Human
ccagaaauucccagagggaca

SEQ ID NO: 913783 - RNA, 26 nt, Human
ccaggaaauacugcugccuuccaagg

SEQ ID NO: 913784 - RNA, 18 nt, Human
ccaugggggguggggggg

SEQ ID NO: 913785 - RNA, 19 nt, Human
cccccugcaggcggccaga

SEQ ID NO: 913786 - RNA, 20 nt, Human
cccccuuccccaagccccca

SEQ ID NO: 913787 - RNA, 20 nt, Human
ccccgcccccuccgccguug

SEQ ID NO: 913788 - RNA, 25 nt, Human
ccccgcccccuccgccguuggcccg

SEQ ID NO: 913789 - RNA, 18 nt, Human
ccccucaucccccccggg

SEQ ID NO: 913790 - RNA, 20 nt, Human
cccuuccccaagcccccaaa

SEQ ID NO: 913791 - RNA, 24 nt, Human
ccgccgcguccccuuuaaaugccc

SEQ ID NO: 913792 - RNA, 19 nt, Human
ccgggggggccccuuccuc

SEQ ID NO: 913793 - RNA, 19 nt, Human
ccguccccuccacuugccc

SEQ ID NO: 913794 - RNA, 20 nt, Human
ccguccccuccacuugcccc

SEQ ID NO: 913795 - RNA, 24 nt, Human
ccuccagccgucgucacacguucg

SEQ ID NO: 913796 - RNA, 19 nt, Human
ccucccaguugggaggacc

SEQ ID NO: 913797 - RNA, 23 nt, Human
ccucuggcuuuuccuuugggggu

SEQ ID NO: 913798 - RNA, 21 nt, Human
cgagucccuccagucccgagg

SEQ ID NO: 913799 - RNA, 22 nt, Human
cgcccccuccgccguuggcccg

SEQ ID NO: 913800 - RNA, 21 nt, Human
cggcucacgagucccuccagu

SEQ ID NO: 913801 - RNA, 20 nt, Human
cggcucugagcccccuuccc

SEQ ID NO: 913802 - RNA, 18 nt, Human
cguggaaggcccagcccg

SEQ ID NO: 913803 - RNA, 23 nt, Human
cucaucccccccgggcagccgcc

SEQ ID NO: 913804 - RNA, 25 nt, Human
cucucugcgagguuacuggcugucc

SEQ ID NO: 913805 - RNA, 18 nt, Human
gaaucucccuuccccgcc

SEQ ID NO: 913806 - RNA, 18 nt, Human
gaccaggaaauacugcug

SEQ ID NO: 913807 - RNA, 19 nt, Human
gacccucuucugccucugu

SEQ ID NO: 913808 - RNA, 21 nt, Human
gacccucuucugccucugugg

SEQ ID NO: 913809 - RNA, 21 nt, Human
gagcccccuuccccaagcccc

SEQ ID NO: 913810 - RNA, 20 nt, Human
gagccggagccggagccgga

SEQ ID NO: 913811 - RNA, 21 nt, Human
gaggaaggaggggcuuggguu

SEQ ID NO: 913812 - RNA, 22 nt, Human
gaguguaagaaguggggaaggg

SEQ ID NO: 913813 - RNA, 19 nt, Human
gaguuuggaguguaagaag

SEQ ID NO: 913814 - RNA, 22 nt, Human
gcccggguaccccccugcaggc

SEQ ID NO: 913815 - RNA, 19 nt, Human
gcugggaugcaaggagaca

SEQ ID NO: 913816 - RNA, 21 nt, Human
ggaauuggaggggacgcggug

SEQ ID NO: 913817 - RNA, 19 nt, Human
ggaccaggaaauacugcug

SEQ ID NO: 913818 - RNA, 19 nt, Human
ggagugggggaggcagccg

SEQ ID NO: 913819 - RNA, 19 nt, Human
gggcggcggcagcagaggu

SEQ ID NO: 913820 - RNA, 19 nt, Human
ggggucgggaggcaagaga

SEQ ID NO: 913821 - RNA, 19 nt, Human
guaaaacaccagaggaagg

SEQ ID NO: 913822 - RNA, 20 nt, Human
guccccuccacuugccccuc

SEQ ID NO: 913823 - RNA, 24 nt, Human
guguggggucgcggugggugaagc

SEQ ID NO: 913824 - RNA, 25 nt, Human
uaaaacaccagaggaagggggaguc

SEQ ID NO: 913825 - RNA, 24 nt, Human
uaacaaagccaaagggaaaaggga

SEQ ID NO: 913826 - RNA, 23 nt, Human
ucccuccacaguagacuggagga

SEQ ID NO: 913827 - RNA, 22 nt, Human
ucccuuccccgcccccuccgcc

SEQ ID NO: 913828 - RNA, 21 nt, Human
ucugcgagguuacuggcuguc

SEQ ID NO: 913829 - RNA, 23 nt, Human
ucugcgagguuacuggcuguccg

SEQ ID NO: 913830 - RNA, 22 nt, Human
uggaggaggggcggucacgcag

SEQ ID NO: 913831 - RNA, 19 nt, Human
ugggaugcaaggagacacc

SEQ ID NO: 913832 - RNA, 23 nt, Human
uggggcgcaggauggagcaaggg

SEQ ID NO: 913833 - RNA, 21 nt, Human
ugggggcggcggcagcagagg

SEQ ID NO: 913834 - RNA, 19 nt, Human
uggggggugggggggaugc

SEQ ID NO: 913835 - RNA, 21 nt, Human
uguuccauggggggugggggg

SEQ ID NO: 913836 - RNA, 19 nt, Human
uguuccucuggcuuuuccu

SEQ ID NO: 913837 - RNA, 21 nt, Human
uuccaagguuugcgcgccacc

SEQ ID NO: 913838 - RNA, 23 nt, Human
uuugggggugcuagaagggagug

SEQ ID NO: 913839 - RNA, 20 nt, Human
aaacccggaaggagcuaaug

SEQ ID NO: 913840 - RNA, 21 nt, Human
aaccaaaucuuuauuagucuc

SEQ ID NO: 913841 - RNA, 19 nt, Human
aaggcucacaucuccccuu

SEQ ID NO: 913842 - RNA, 22 nt, Human
aagggaaccaaagggggagacu

SEQ ID NO: 913843 - RNA, 23 nt, Human
accccagcccaaaugaacuccca

SEQ ID NO: 913844 - RNA, 23 nt, Human
acuccuguucuccccaccaggac

SEQ ID NO: 913845 - RNA, 20 nt, Human
agacaaagccugagagggug

SEQ ID NO: 913846 - RNA, 22 nt, Human
agacugguggaccaccugaggg

SEQ ID NO: 913847 - RNA, 27 nt, Human
aggaggaagaggagucuagcaauccaa

SEQ ID NO: 913848 - RNA, 21 nt, Human
aggcaaggagggagcgcacag

SEQ ID NO: 913849 - RNA, 20 nt, Human
aggcuggagggggaggcaag

SEQ ID NO: 913850 - RNA, 20 nt, Human
agggccaaagugggacaggg

SEQ ID NO: 913851 - RNA, 21 nt, Human
aucaugaaacuucccuccaga

SEQ ID NO: 913852 - RNA, 18 nt, Human
auugggauagaaaggggg

SEQ ID NO: 913853 - RNA, 19 nt, Human
caaggaaggucgccucuuu

SEQ ID NO: 913854 - RNA, 24 nt, Human
caaucaugaaacuucccuccagag

SEQ ID NO: 913855 - RNA, 19 nt, Human
caccuguuccccaaccagg

SEQ ID NO: 913856 - RNA, 23 nt, Human
cagagaaggcucacaucuccccu

SEQ ID NO: 913857 - RNA, 22 nt, Human
cauuauagaugcaaucaugaaa

SEQ ID NO: 913858 - RNA, 22 nt, Human
ccaccccagcccaaaugaacuc

SEQ ID NO: 913859 - RNA, 19 nt, Human
ccagggcagcauuucccag

SEQ ID NO: 913860 - RNA, 19 nt, Human
cccaaggaaggucgccucu

SEQ ID NO: 913861 - RNA, 26 nt, Human
cccagccuccaccccagcccaaauga

SEQ ID NO: 913862 - RNA, 22 nt, Human
cccugagcgccuuagagauaag

SEQ ID NO: 913863 - RNA, 23 nt, Human
ccuaccugucuugcucccugccc

SEQ ID NO: 913864 - RNA, 23 nt, Human
ccuccaccccagcccaaaugaac

SEQ ID NO: 913865 - RNA, 20 nt, Human
ccuccuagguugggggcggg

SEQ ID NO: 913866 - RNA, 20 nt, Human
ccuccuccuagguugggggc

SEQ ID NO: 913867 - RNA, 21 nt, Human
ccuccuccuagguugggggcg

SEQ ID NO: 913868 - RNA, 19 nt, Human
ccuggcugcgcagucuggc

SEQ ID NO: 913869 - RNA, 26 nt, Human
cgcagcggggcauuucccugagcgcc

SEQ ID NO: 913870 - RNA, 20 nt, Human
cggaaggagcuaauggagag

SEQ ID NO: 913871 - RNA, 22 nt, Human
cggaaggagcuaauggagagga

SEQ ID NO: 913872 - RNA, 23 nt, Human
cggaaggagcuaauggagaggau

SEQ ID NO: 913873 - RNA, 23 nt, Human
cuccaccccagcccaaaugaacu

SEQ ID NO: 913874 - RNA, 20 nt, Human
cucuucagcuuugucaaguc

SEQ ID NO: 913875 - RNA, 22 nt, Human
cuuuauuagucucggcagcaga

SEQ ID NO: 913876 - RNA, 27 nt, Human
gaaauguauccauaaaugucuauaaca

SEQ ID NO: 913877 - RNA, 23 nt, Human
gaaccaaagggggagacuggugg

SEQ ID NO: 913878 - RNA, 21 nt, Human
gaaggugcuaccaagugggag

SEQ ID NO: 913879 - RNA, 23 nt, Human
gaccaccugagggcaggcacaga

SEQ ID NO: 913880 - RNA, 18 nt, Human
gaggaugggguccaggag

SEQ ID NO: 913881 - RNA, 21 nt, Human
gaggaugggguccaggaggaa

SEQ ID NO: 913882 - RNA, 20 nt, Human
gccuccaccccagcccaaau

SEQ ID NO: 913883 - RNA, 20 nt, Human
ggaaccaaagggggagacug

SEQ ID NO: 913884 - RNA, 21 nt, Human
ggaaggagcuaauggagagga

SEQ ID NO: 913885 - RNA, 26 nt, Human
ggaagggaaccaaagggggagacugg

SEQ ID NO: 913886 - RNA, 18 nt, Human
ggacagcgcccauacccc

SEQ ID NO: 913887 - RNA, 18 nt, Human
gggaaggaugggacuuaa

SEQ ID NO: 913888 - RNA, 19 nt, Human
gggauagaaagggggaaga

SEQ ID NO: 913889 - RNA, 21 nt, Human
gggauagaaagggggaagaga

SEQ ID NO: 913890 - RNA, 21 nt, Human
gucacagcuauaaagagaggg

SEQ ID NO: 913891 - RNA, 20 nt, Human
guuuacuccuguucucccca

SEQ ID NO: 913892 - RNA, 23 nt, Human
uaacucaggaguguuuuagguau

SEQ ID NO: 913893 - RNA, 19 nt, Human
uacugcuagaaccaaccaa

SEQ ID NO: 913894 - RNA, 18 nt, Human
uagaugcaaucaugaaac

SEQ ID NO: 913895 - RNA, 20 nt, Human
ucaaaggacugauaacucuu

SEQ ID NO: 913896 - RNA, 18 nt, Human
ucaagcgauguuuguacc

SEQ ID NO: 913897 - RNA, 21 nt, Human
ucacuagacaagucaucccug

SEQ ID NO: 913898 - RNA, 24 nt, Human
ucacuagacaagucaucccugauu

SEQ ID NO: 913899 - RNA, 25 nt, Human
ucacuagacaagucaucccugauuc

SEQ ID NO: 913900 - RNA, 21 nt, Human
ucagaaguggucuuggcucag

SEQ ID NO: 913901 - RNA, 19 nt, Human
uccaccccagcccaaauga

SEQ ID NO: 913902 - RNA, 21 nt, Human
ucccaaggaaggucgccucuu

SEQ ID NO: 913903 - RNA, 24 nt, Human
ucccagaaggcucccgcagcgggg

SEQ ID NO: 913904 - RNA, 19 nt, Human
ucccagccuccaccccagc

SEQ ID NO: 913905 - RNA, 18 nt, Human
ucccugccccaccugucc

SEQ ID NO: 913906 - RNA, 18 nt, Human
uccuggguggccagggca

SEQ ID NO: 913907 - RNA, 18 nt, Human
uccuuagcuugaaggccc

SEQ ID NO: 913908 - RNA, 20 nt, Human
ucggcagcagaacuaaugga

SEQ ID NO: 913909 - RNA, 25 nt, Human
ugagggcaggcacagauggggcuuc

SEQ ID NO: 913910 - RNA, 19 nt, Human
ugcccuguuguguuuagag

SEQ ID NO: 913911 - RNA, 21 nt, Human
uggaagggaaccaaaggggga

SEQ ID NO: 913912 - RNA, 19 nt, Human
uggacaugugucaguauuc

SEQ ID NO: 913913 - RNA, 20 nt, Human
uggaccaccugagggcaggc

SEQ ID NO: 913914 - RNA, 18 nt, Human
uggaucaggccccagagg

SEQ ID NO: 913915 - RNA, 22 nt, Human
uggaugguagaggauggggucc

SEQ ID NO: 913916 - RNA, 21 nt, Human
ugggacagggcuuggauggua

SEQ ID NO: 913917 - RNA, 20 nt, Human
ugggaggcuggagggggagg

SEQ ID NO: 913918 - RNA, 20 nt, Human
uggguggccagggcagcauu

SEQ ID NO: 913919 - RNA, 20 nt, Human
ugguggaccaccugagggca

SEQ ID NO: 913920 - RNA, 18 nt, Human
ugucuugcucccugcccc

SEQ ID NO: 913921 - RNA, 23 nt, Human
ugugagaggcauuucuggacgga

SEQ ID NO: 913922 - RNA, 21 nt, Human
ugugggaaggaugggacuuaa

SEQ ID NO: 913923 - RNA, 21 nt, Human
ugugucaguauucacaaaaca

SEQ ID NO: 913924 - RNA, 18 nt, Human
uguuugugggaaggaugg

SEQ ID NO: 913925 - RNA, 25 nt, Human
uucacaaaacaggcaauauauucau

SEQ ID NO: 913926 - RNA, 20 nt, Human
uugaaggcccaccacggucu

SEQ ID NO: 913927 - RNA, 22 nt, Human
uuugucaaguccuuguuuacuc

SEQ ID NO: 913928 - RNA, 24 nt, Human
uuugucaaguccuuguuuacuccu

SEQ ID NO: 913929 - RNA, 21 nt, Human
uuuuuuuuuuuuacugcuaga

SEQ ID NO: 913930 - RNA, 25 nt, Human
uuuuuuuuuuuuuuuuuacugcuag

SEQ ID NO: 913931 - RNA, 24 nt, Human
aagcaagggggcuggaauagggcc

SEQ ID NO: 913932 - RNA, 18 nt, Human
acucuaccaccuccuccc

SEQ ID NO: 913933 - RNA, 21 nt, Human
caccgcuuuggcccacccuuc

SEQ ID NO: 913934 - RNA, 19 nt, Human
caccuccucccuaauucuc

SEQ ID NO: 913935 - RNA, 21 nt, Human
ccacccuucccuccugucccc

SEQ ID NO: 913936 - RNA, 25 nt, Human
ccaccuccucccuaauucucaacuc

SEQ ID NO: 913937 - RNA, 25 nt, Human
ccccacccaacuggcuggcccuccu

SEQ ID NO: 913938 - RNA, 19 nt, Human
ccgcggcucuucucuccuc

SEQ ID NO: 913939 - RNA, 19 nt, Human
ccuccuguccccucucccu

SEQ ID NO: 913940 - RNA, 20 nt, Human
ccuccuguccccucucccuu

SEQ ID NO: 913941 - RNA, 21 nt, Human
ccucuccccgccucagagccc

SEQ ID NO: 913942 - RNA, 20 nt, Human
ccugcccccgggccucggcc

SEQ ID NO: 913943 - RNA, 22 nt, Human
ccuuucuugcccuacccuuccu

SEQ ID NO: 913944 - RNA, 18 nt, Human
cggacucuaccaccuccu

SEQ ID NO: 913945 - RNA, 20 nt, Human
cggcccucucccccacccaa

SEQ ID NO: 913946 - RNA, 23 nt, Human
cucacuacccggacucuaccacc

SEQ ID NO: 913947 - RNA, 29 nt, Human
cuccgggcugggccccccgcggcucuucc

SEQ ID NO: 913948 - RNA, 26 nt, Human
gaagcaagggggcuggaauagggccu

SEQ ID NO: 913949 - RNA, 19 nt, Human
gcccccgggccucggcccu

SEQ ID NO: 913950 - RNA, 18 nt, Human
gcuuuggcccacccuucc

SEQ ID NO: 913951 - RNA, 23 nt, Human
ggcucuucucuccucuccucucc

SEQ ID NO: 913952 - RNA, 18 nt, Human
uaaaccgagaaggaaacc

SEQ ID NO: 913953 - RNA, 24 nt, Human
uaacagaauaaaccgagaaggaaa

SEQ ID NO: 913954 - RNA, 18 nt, Human
uagagugaagcaaggggg

SEQ ID NO: 913955 - RNA, 23 nt, Human
uccugucccuccgcucacuaccc

SEQ ID NO: 913956 - RNA, 20 nt, Human
ugaagcaagggggcuggaau

SEQ ID NO: 913957 - RNA, 22 nt, Human
ugcacuccugcccccgggccuc

SEQ ID NO: 913958 - RNA, 20 nt, Human
ugcccccgggccucggcccu

SEQ ID NO: 913959 - RNA, 20 nt, Human
uggcccacccuucccuccug

SEQ ID NO: 913960 - RNA, 19 nt, Human
uggcuccgggcugggcccc

SEQ ID NO: 913961 - RNA, 20 nt, Human
uggcuccgggcugggccccc

SEQ ID NO: 913962 - RNA, 24 nt, Human
aaaaacacaaggaggcccgggaag

SEQ ID NO: 913963 - RNA, 21 nt, Human
aagaacaguaggacaaggaaa

SEQ ID NO: 913964 - RNA, 19 nt, Human
aagccuuuccauguccacc

SEQ ID NO: 913965 - RNA, 21 nt, Human
aagccuuuccauguccaccag

SEQ ID NO: 913966 - RNA, 25 nt, Human
acagcugggcggggugccggggccc

SEQ ID NO: 913967 - RNA, 21 nt, Human
acccagcucagcagggagggg

SEQ ID NO: 913968 - RNA, 24 nt, Human
agaagaaagagaguuccuuucuag

SEQ ID NO: 913969 - RNA, 21 nt, Human
agaagccuuuccauguccacc

SEQ ID NO: 913970 - RNA, 21 nt, Human
agaggaaaagcucgcagggag

SEQ ID NO: 913971 - RNA, 18 nt, Human
agcacagggggaaggaaa

SEQ ID NO: 913972 - RNA, 22 nt, Human
agcagggagggggcauucugug

SEQ ID NO: 913973 - RNA, 21 nt, Human
aggaaggggcaccucuggguc

SEQ ID NO: 913974 - RNA, 22 nt, Human
aggaggcugcuuccaugccccg

SEQ ID NO: 913975 - RNA, 20 nt, Human
aggcaaaaacacaaggaggc

SEQ ID NO: 913976 - RNA, 23 nt, Human
aggcaaaaacacaaggaggcccg

SEQ ID NO: 913977 - RNA, 21 nt, Human
aggccuccugacucaucccag

SEQ ID NO: 913978 - RNA, 18 nt, Human
aggggcgaggggagggca

SEQ ID NO: 913979 - RNA, 22 nt, Human
aggugggcaggucuuugggaga

SEQ ID NO: 913980 - RNA, 23 nt, Human
agugggccacccccacagcaaug

SEQ ID NO: 913981 - RNA, 19 nt, Human
aucucucccucgcccccca

SEQ ID NO: 913982 - RNA, 18 nt, Human
auuuauagaaggaaggga

SEQ ID NO: 913983 - RNA, 19 nt, Human
caacuacagaggcugagaa

SEQ ID NO: 913984 - RNA, 21 nt, Human
caaugccaaggggcgagggga

SEQ ID NO: 913985 - RNA, 22 nt, Human
cacaccucuccccaagccucca

SEQ ID NO: 913986 - RNA, 19 nt, Human
caccuccaucaucccccaa

SEQ ID NO: 913987 - RNA, 21 nt, Human
caccuccaucaucccccaaac

SEQ ID NO: 913988 - RNA, 26 nt, Human
caccuccaucaucccccaaacagccg

SEQ ID NO: 913989 - RNA, 21 nt, Human
caccucugagaaagucacugu

SEQ ID NO: 913990 - RNA, 23 nt, Human
cagagcaugaggcggcccacucc

SEQ ID NO: 913991 - RNA, 19 nt, Human
cagcaagcguugccgcggu

SEQ ID NO: 913992 - RNA, 19 nt, Human
cagcagggagggggcauuc

SEQ ID NO: 913993 - RNA, 20 nt, Human
cagcagggagggggcauucu

SEQ ID NO: 913994 - RNA, 20 nt, Human
cagcaggguggcaggagagc

SEQ ID NO: 913995 - RNA, 20 nt, Human
cagccaagagcucacaggug

SEQ ID NO: 913996 - RNA, 19 nt, Human
cagcucccugaaccugggc

SEQ ID NO: 913997 - RNA, 21 nt, Human
cagcugagcagcgcaagaaga

SEQ ID NO: 913998 - RNA, 18 nt, Human
caggaagaggguucuuug

SEQ ID NO: 913999 - RNA, 24 nt, Human
caguaggaaugaggcaaaaacaca

SEQ ID NO: 914000 - RNA, 20 nt, Human
cagugggccacccccacagc

SEQ ID NO: 914001 - RNA, 22 nt, Human
caucacgaaaauccagcugcuc

SEQ ID NO: 914002 - RNA, 22 nt, Human
cauccaucaucucugucaccuc

SEQ ID NO: 914003 - RNA, 21 nt, Human
caucucugucaccucugagaa

SEQ ID NO: 914004 - RNA, 25 nt, Human
caugccaggccccagcagagcauga

SEQ ID NO: 914005 - RNA, 19 nt, Human
ccaaacagccggcugcugc

SEQ ID NO: 914006 - RNA, 22 nt, Human
ccacagcaaugcugucagcaca

SEQ ID NO: 914007 - RNA, 19 nt, Human
ccacccccacagcaaugcu

SEQ ID NO: 914008 - RNA, 22 nt, Human
ccagcccagcugccaacuacag

SEQ ID NO: 914009 - RNA, 21 nt, Human
ccagggagucacgguggugca

SEQ ID NO: 914010 - RNA, 18 nt, Human
ccaggggagggcaguggg

SEQ ID NO: 914011 - RNA, 20 nt, Human
ccaggggagggcagugggcc

SEQ ID NO: 914012 - RNA, 22 nt, Human
ccaucaucccccaaacagccgg

SEQ ID NO: 914013 - RNA, 22 nt, Human
ccauguucucuccuucuccaca

SEQ ID NO: 914014 - RNA, 27 nt, Human
ccauguucucuccuucuccacaccucu

SEQ ID NO: 914015 - RNA, 20 nt, Human
ccccaaacagccggcugcug

SEQ ID NO: 914016 - RNA, 18 nt, Human
ccccaagccuccaggccu

SEQ ID NO: 914017 - RNA, 27 nt, Human
ccccaagccuccaggccuccugacucc

SEQ ID NO: 914018 - RNA, 19 nt, Human
ccccagagacccagcucag

SEQ ID NO: 914019 - RNA, 22 nt, Human
cccccacagcaaugcugucagc

SEQ ID NO: 914020 - RNA, 21 nt, Human
cccccagcuccccaggagucc

SEQ ID NO: 914021 - RNA, 22 nt, Human
ccccccagcuccccaggagucc

SEQ ID NO: 914022 - RNA, 22 nt, Human
cccccuccucaaccccaguggc

SEQ ID NO: 914023 - RNA, 19 nt, Human
cccugggagagcccaggag

SEQ ID NO: 914024 - RNA, 19 nt, Human
ccgacagccugacgccccc

SEQ ID NO: 914025 - RNA, 19 nt, Human
ccggcccgcugcugcuucc

SEQ ID NO: 914026 - RNA, 19 nt, Human
ccggggcccgcgggacagc

SEQ ID NO: 914027 - RNA, 19 nt, Human
ccucgccccccagcucccc

SEQ ID NO: 914028 - RNA, 20 nt, Human
cgcuugcuccucucccggcu

SEQ ID NO: 914029 - RNA, 21 nt, Human
cuccacaccucuccccaagcc

SEQ ID NO: 914030 - RNA, 18 nt, Human
cuccaucaucccccaaac

SEQ ID NO: 914031 - RNA, 18 nt, Human
cucccccuccucaacccc

SEQ ID NO: 914032 - RNA, 21 nt, Human
cuccccggggaggggcucccg

SEQ ID NO: 914033 - RNA, 18 nt, Human
cucccggccagcagggug

SEQ ID NO: 914034 - RNA, 23 nt, Human
cuccucccccuccucaaccccag

SEQ ID NO: 914035 - RNA, 22 nt, Human
cucucccucgccccccagcucc

SEQ ID NO: 914036 - RNA, 20 nt, Human
cuggacgaggcaaagaacag

SEQ ID NO: 914037 - RNA, 19 nt, Human
cuuuccauguccaccaggc

SEQ ID NO: 914038 - RNA, 18 nt, Human
gaaaggggaaguucucca

SEQ ID NO: 914039 - RNA, 20 nt, Human
gaagccuuuccauguccacc

SEQ ID NO: 914040 - RNA, 19 nt, Human
gaaguccagcccagcugcc

SEQ ID NO: 914041 - RNA, 20 nt, Human
gacagcagccggacgccugg

SEQ ID NO: 914042 - RNA, 26 nt, Human
gagaaagccagcucccugaaccuggg

SEQ ID NO: 914043 - RNA, 22 nt, Human
gagcaggggggcaggagagaga

SEQ ID NO: 914044 - RNA, 20 nt, Human
gagccaguggggaggggaga

SEQ ID NO: 914045 - RNA, 26 nt, Human
gagcucacaggugccagggcccucgg

SEQ ID NO: 914046 - RNA, 18 nt, Human
gaggcaaaaacacaagga

SEQ ID NO: 914047 - RNA, 23 nt, Human
gaggggagggcagcugggcagag

SEQ ID NO: 914048 - RNA, 25 nt, Human
gaggggagggcagcugggcagagug

SEQ ID NO: 914049 - RNA, 19 nt, Human
gaggguucuuuggggcaag

SEQ ID NO: 914050 - RNA, 22 nt, Human
gcagcagaggguccacagucca

SEQ ID NO: 914051 - RNA, 18 nt, Human
gccauguucucuccuucu

SEQ ID NO: 914052 - RNA, 27 nt, Human
gccccggggggacaugagggccagggg

SEQ ID NO: 914053 - RNA, 21 nt, Human
gcgggacagcuuacaggucuc

SEQ ID NO: 914054 - RNA, 19 nt, Human
gcggggugccggggcccgc

SEQ ID NO: 914055 - RNA, 18 nt, Human
gcuacagauaggugaccg

SEQ ID NO: 914056 - RNA, 23 nt, Human
gcugccaaggaggcugcuuccau

SEQ ID NO: 914057 - RNA, 18 nt, Human
ggagaaggagggacagcu

SEQ ID NO: 914058 - RNA, 18 nt, Human
ggagcaggggggcaggag

SEQ ID NO: 914059 - RNA, 18 nt, Human
ggagggagcaggggggca

SEQ ID NO: 914060 - RNA, 24 nt, Human
ggcaaaaacacaaggaggcccggg

SEQ ID NO: 914061 - RNA, 20 nt, Human
ggcaggcggaccccagcccc

SEQ ID NO: 914062 - RNA, 26 nt, Human
ggcagguggagaaggagggacagcuc

SEQ ID NO: 914063 - RNA, 21 nt, Human
ggccaggggagggcagugggc

SEQ ID NO: 914064 - RNA, 19 nt, Human
ggcugcacucuccucugcc

SEQ ID NO: 914065 - RNA, 18 nt, Human
gggaaggaaagggccugg

SEQ ID NO: 914066 - RNA, 22 nt, Human
gggaggacagggagagaccucu

SEQ ID NO: 914067 - RNA, 20 nt, Human
gggaguccacccucgugacc

SEQ ID NO: 914068 - RNA, 19 nt, Human
gggauccaggccuggagug

SEQ ID NO: 914069 - RNA, 23 nt, Human
gggcagaguggagggagcagggg

SEQ ID NO: 914070 - RNA, 27 nt, Human
gggcagguggagaaggagggacagcuc

SEQ ID NO: 914071 - RNA, 23 nt, Human
gggcgaggggagggcagcugggc

SEQ ID NO: 914072 - RNA, 19 nt, Human
ggggagaggcggagcagca

SEQ ID NO: 914073 - RNA, 21 nt, Human
ggggagggcagcugggcagag

SEQ ID NO: 914074 - RNA, 23 nt, Human
ggggcaccucugggucucagggg

SEQ ID NO: 914075 - RNA, 21 nt, Human
ggggugccggggcccgcggga

SEQ ID NO: 914076 - RNA, 21 nt, Human
ggugagugggacuaagaaaga

SEQ ID NO: 914077 - RNA, 19 nt, Human
gucagccccucccacaggc

SEQ ID NO: 914078 - RNA, 25 nt, Human
gugccggggcccgcgggacagcuua

SEQ ID NO: 914079 - RNA, 20 nt, Human
gugguuggcccugagugggg

SEQ ID NO: 914080 - RNA, 19 nt, Human
uaugcugggguauggaagg

SEQ ID NO: 914081 - RNA, 18 nt, Human
ucacaggugccagggccc

SEQ ID NO: 914082 - RNA, 20 nt, Human
ucaccuccaucaucccccaa

SEQ ID NO: 914083 - RNA, 20 nt, Human
ucacuggggucagcaagcgu

SEQ ID NO: 914084 - RNA, 22 nt, Human
ucagccccucccacaggcucuc

SEQ ID NO: 914085 - RNA, 19 nt, Human
ucaggccucucuccucacu

SEQ ID NO: 914086 - RNA, 21 nt, Human
ucaggggucuccucccccucc

SEQ ID NO: 914087 - RNA, 21 nt, Human
ucaucacgaaaauccagcugc

SEQ ID NO: 914088 - RNA, 23 nt, Human
ucauccaucaucucugucaccuc

SEQ ID NO: 914089 - RNA, 20 nt, Human
uccaucaucucugucaccuc

SEQ ID NO: 914090 - RNA, 20 nt, Human
uccauguccaccaggcuggg

SEQ ID NO: 914091 - RNA, 18 nt, Human
ucccagcugaggaagggg

SEQ ID NO: 914092 - RNA, 24 nt, Human
ucccggcugccaaggaggcugcuu

SEQ ID NO: 914093 - RNA, 21 nt, Human
ucccugggagagcccaggagg

SEQ ID NO: 914094 - RNA, 24 nt, Human
ucccugggagagcccaggaggugg

SEQ ID NO: 914095 - RNA, 18 nt, Human
uccucaaccccaguggcu

SEQ ID NO: 914096 - RNA, 20 nt, Human
ucgcagggaggacagggaga

SEQ ID NO: 914097 - RNA, 23 nt, Human
ucucaggggucuccucccccucc

SEQ ID NO: 914098 - RNA, 21 nt, Human
ucuccucccccuccucaaccc

SEQ ID NO: 914099 - RNA, 19 nt, Human
ucuuugggagauagagacc

SEQ ID NO: 914100 - RNA, 24 nt, Human
ugaggcaaaaacacaaggaggccc

SEQ ID NO: 914101 - RNA, 22 nt, Human
ugaggcugcacucuccucugcc

SEQ ID NO: 914102 - RNA, 22 nt, Human
ugccaacuacagaggcugagaa

SEQ ID NO: 914103 - RNA, 21 nt, Human
ugccaagagaagaaagagagu

SEQ ID NO: 914104 - RNA, 24 nt, Human
ugccaagagaagaaagagaguucc

SEQ ID NO: 914105 - RNA, 27 nt, Human
ugccaagagaagaaagagaguuccuuu

SEQ ID NO: 914106 - RNA, 19 nt, Human
ugccaaggaggcugcuucc

SEQ ID NO: 914107 - RNA, 20 nt, Human
ugccaggccccagcagagca

SEQ ID NO: 914108 - RNA, 20 nt, Human
ugcugcugucagccccuccc

SEQ ID NO: 914109 - RNA, 23 nt, Human
ugcugcugucagccccucccaca

SEQ ID NO: 914110 - RNA, 24 nt, Human
ugcugcugucagccccucccacag

SEQ ID NO: 914111 - RNA, 24 nt, Human
uggaaggaaggaacauccgacagc

SEQ ID NO: 914112 - RNA, 21 nt, Human
uggagggagcaggggggcagg

SEQ ID NO: 914113 - RNA, 18 nt, Human
uggaugagcuccccggca

SEQ ID NO: 914114 - RNA, 23 nt, Human
uggcccagaggggcuucccuggg

SEQ ID NO: 914115 - RNA, 20 nt, Human
uggccuugccggcccgcuga

SEQ ID NO: 914116 - RNA, 27 nt, Human
uggcgugcgcuugcuccucucccggcu

SEQ ID NO: 914117 - RNA, 22 nt, Human
uggcugcugucucagaccccug

SEQ ID NO: 914118 - RNA, 22 nt, Human
ugggacuaagaaagaucgcccc

SEQ ID NO: 914119 - RNA, 22 nt, Human
ugggccacccccacagcaaugc

SEQ ID NO: 914120 - RNA, 18 nt, Human
uggggaggggagaggcgg

SEQ ID NO: 914121 - RNA, 18 nt, Human
ugugcagcgcgucgcugc

SEQ ID NO: 914122 - RNA, 21 nt, Human
ugugggccacacuuaccaaga

SEQ ID NO: 914123 - RNA, 23 nt, Human
uucaucacgaaaauccagcugcu

SEQ ID NO: 914124 - RNA, 24 nt, Human
uuccgcucaucucucccucgcccc

SEQ ID NO: 914125 - RNA, 27 nt, Human
aaaaauaaacagcaugaccacuaaccc

SEQ ID NO: 914126 - RNA, 23 nt, Human
aaaauaaacagcaugaccacuaa

SEQ ID NO: 914127 - RNA, 21 nt, Human
aaacaaacaugcuagacaaac

SEQ ID NO: 914128 - RNA, 19 nt, Human
aaacagcaugaccacuaac

SEQ ID NO: 914129 - RNA, 21 nt, Human
aacagcaugaccacuaacccu

SEQ ID NO: 914130 - RNA, 24 nt, Human
aagaggaaaacaagauuagcacaa

SEQ ID NO: 914131 - RNA, 22 nt, Human
aagcagaaagguagaguuaggg

SEQ ID NO: 914132 - RNA, 20 nt, Human
acaugcccauguucccagaa

SEQ ID NO: 914133 - RNA, 21 nt, Human
acuuuguauagcagagaaaaa

SEQ ID NO: 914134 - RNA, 28 nt, Human
aggaauacuaagaggaaaaccgguaccc

SEQ ID NO: 914135 - RNA, 20 nt, Human
augcccauguucccagaaau

SEQ ID NO: 914136 - RNA, 21 nt, Human
cacaaaauauauuacugcaua

SEQ ID NO: 914137 - RNA, 20 nt, Human
cagacauauagacacaccaa

SEQ ID NO: 914138 - RNA, 24 nt, Human
cagcaugaccacuaacccuaaaau

SEQ ID NO: 914139 - RNA, 18 nt, Human
caugaccacuaacccuaa

SEQ ID NO: 914140 - RNA, 25 nt, Human
cuaaaaugaaugugaaccauuugcc

SEQ ID NO: 914141 - RNA, 21 nt, Human
cuaacccuaaaaugaauguga

SEQ ID NO: 914142 - RNA, 22 nt, Human
cuaagaggaaaacaagauuagc

SEQ ID NO: 914143 - RNA, 20 nt, Human
cuuuguauagcagagaaaaa

SEQ ID NO: 914144 - RNA, 21 nt, Human
gagaaaaauaaacagcaugac

SEQ ID NO: 914145 - RNA, 20 nt, Human
gcaauugaaauucaccugga

SEQ ID NO: 914146 - RNA, 19 nt, Human
ggagagugaagaaaaaaug

SEQ ID NO: 914147 - RNA, 19 nt, Human
uaaacagcaugaccacuaa

SEQ ID NO: 914148 - RNA, 21 nt, Human
uaagaggaacuuuguauagca

SEQ ID NO: 914149 - RNA, 24 nt, Human
uagcagagaaaaauaaacagcaug

SEQ ID NO: 914150 - RNA, 24 nt, Human
uagggucuaugaaaaaaaauaggg

SEQ ID NO: 914151 - RNA, 21 nt, Human
uauauacaugcccauguuccc

SEQ ID NO: 914152 - RNA, 20 nt, Human
uauauauauacaugcccaug

SEQ ID NO: 914153 - RNA, 25 nt, Human
ucccaaaggauuaaacaaacaugcu

SEQ ID NO: 914154 - RNA, 23 nt, Human
ucccagaaaucauuauauuuccu

SEQ ID NO: 914155 - RNA, 22 nt, Human
ugaaaaaaaauagggccagagg

SEQ ID NO: 914156 - RNA, 19 nt, Human
ugaagaaaaaaugaaucac

SEQ ID NO: 914157 - RNA, 23 nt, Human
ugaggcagaccccuaagaggaac

SEQ ID NO: 914158 - RNA, 19 nt, Human
ugagggguggagaagaaga

SEQ ID NO: 914159 - RNA, 21 nt, Human
ugagggguggagaagaagagg

SEQ ID NO: 914160 - RNA, 22 nt, Human
ugggaaauuuucagcaauugaa

SEQ ID NO: 914161 - RNA, 21 nt, Human
uucaaaaauccaaacaaaugu

SEQ ID NO: 914162 - RNA, 18 nt, Human
uugagggguggagaagaa

SEQ ID NO: 914163 - RNA, 22 nt, Human
aaaaacccaaaagaaaggugug

SEQ ID NO: 914164 - RNA, 24 nt, Human
aaguguucucucgaacauuguucc

SEQ ID NO: 914165 - RNA, 20 nt, Human
acccaaaagaaagguguggc

SEQ ID NO: 914166 - RNA, 25 nt, Human
accccacuccccaggcuuccuccca

SEQ ID NO: 914167 - RNA, 21 nt, Human
acccggcgcgcuccacaccac

SEQ ID NO: 914168 - RNA, 21 nt, Human
accuggguccccuucuggcuc

SEQ ID NO: 914169 - RNA, 25 nt, Human
accuucuuugucuuccuucccccaa

SEQ ID NO: 914170 - RNA, 20 nt, Human
agagcaggguuucagggaag

SEQ ID NO: 914171 - RNA, 23 nt, Human
agagcccuugcagagacccacuc

SEQ ID NO: 914172 - RNA, 19 nt, Human
agaguggagaaaggccagg

SEQ ID NO: 914173 - RNA, 19 nt, Human
agauggaggaggcuuggca

SEQ ID NO: 914174 - RNA, 20 nt, Human
agcaggggaaaagacacaug

SEQ ID NO: 914175 - RNA, 18 nt, Human
agcauuuaaaguuguuuu

SEQ ID NO: 914176 - RNA, 23 nt, Human
agccggcuccgggacccggcgcg

SEQ ID NO: 914177 - RNA, 21 nt, Human
aggagcacucacuguuccuga

SEQ ID NO: 914178 - RNA, 18 nt, Human
aggcuuccucccaccagu

SEQ ID NO: 914179 - RNA, 26 nt, Human
aucacacuaaaaggaacacaucauaa

SEQ ID NO: 914180 - RNA, 19 nt, Human
caaaaacccaaaagaaagg

SEQ ID NO: 914181 - RNA, 25 nt, Human
caaagaaucacacuaaaaggaacac

SEQ ID NO: 914182 - RNA, 23 nt, Human
caaggugccagaauugugaaaug

SEQ ID NO: 914183 - RNA, 19 nt, Human
caauagagcaggguuucag

SEQ ID NO: 914184 - RNA, 18 nt, Human
cacccuuuuuacucccuc

SEQ ID NO: 914185 - RNA, 26 nt, Human
cagaaaaaaguccaagaaccuaauag

SEQ ID NO: 914186 - RNA, 19 nt, Human
cagagacccacucccgaag

SEQ ID NO: 914187 - RNA, 18 nt, Human
cagagggcugcacaucuc

SEQ ID NO: 914188 - RNA, 21 nt, Human
cagcaacacucucgcagccca

SEQ ID NO: 914189 - RNA, 23 nt, Human
cagcaacacucucgcagcccagc

SEQ ID NO: 914190 - RNA, 26 nt, Human
cagcacugaugggagauggaggaggc

SEQ ID NO: 914191 - RNA, 20 nt, Human
cagcccagccuccauucccu

SEQ ID NO: 914192 - RNA, 20 nt, Human
cagccgggcaagcagaggac

SEQ ID NO: 914193 - RNA, 21 nt, Human
cagcgguagcacagaaaaaag

SEQ ID NO: 914194 - RNA, 22 nt, Human
cagcugccccuccagacacaga

SEQ ID NO: 914195 - RNA, 22 nt, Human
caggcuuccucccaccagucuc

SEQ ID NO: 914196 - RNA, 23 nt, Human
cauucugggccccuggcucuucc

SEQ ID NO: 914197 - RNA, 20 nt, Human
ccaaucgcaaggugccagaa

SEQ ID NO: 914198 - RNA, 19 nt, Human
ccacagcacugaugggaga

SEQ ID NO: 914199 - RNA, 22 nt, Human
ccacagggcaugcacauccagc

SEQ ID NO: 914200 - RNA, 23 nt, Human
ccacauucaaggcaaccugagca

SEQ ID NO: 914201 - RNA, 23 nt, Human
ccaccagucucugacaauauuuc

SEQ ID NO: 914202 - RNA, 25 nt, Human
ccaccagucucugacaauauuuccu

SEQ ID NO: 914203 - RNA, 22 nt, Human
ccacuccccaggcuuccuccca

SEQ ID NO: 914204 - RNA, 22 nt, Human
ccagagcccuugcagagaccca

SEQ ID NO: 914205 - RNA, 21 nt, Human
ccaggcccaggaccagcucuc

SEQ ID NO: 914206 - RNA, 20 nt, Human
cccagagcccuugcagagac

SEQ ID NO: 914207 - RNA, 24 nt, Human
cccaggcuuccucccaccagucuc

SEQ ID NO: 914208 - RNA, 18 nt, Human
ccccaggcuuccucccac

SEQ ID NO: 914209 - RNA, 23 nt, Human
ccccaggcuuccucccaccaguc

SEQ ID NO: 914210 - RNA, 23 nt, Human
cccccaaagaaacuggacaaaaa

SEQ ID NO: 914211 - RNA, 24 nt, Human
cccccaaagaaacuggacaaaaaa

SEQ ID NO: 914212 - RNA, 19 nt, Human
cccuccagacacagauggc

SEQ ID NO: 914213 - RNA, 22 nt, Human
cccucugacaccaccuuggcuc

SEQ ID NO: 914214 - RNA, 20 nt, Human
ccggcauucugggccccugg

SEQ ID NO: 914215 - RNA, 24 nt, Human
ccuacacuggacccaauuuccuuc

SEQ ID NO: 914216 - RNA, 19 nt, Human
ccuauggcuggcagaggga

SEQ ID NO: 914217 - RNA, 21 nt, Human
ccucugacaccaccuuggcuc

SEQ ID NO: 914218 - RNA, 25 nt, Human
ccuggaccagcugaccagagggcug

SEQ ID NO: 914219 - RNA, 21 nt, Human
ccuggauuaaagguuucugac

SEQ ID NO: 914220 - RNA, 20 nt, Human
ccuggguccccuucuggcuc

SEQ ID NO: 914221 - RNA, 24 nt, Human
cgcuccacaccacugcgcucgcug

SEQ ID NO: 914222 - RNA, 24 nt, Human
cgguagcacagaaaaaaguccaag

SEQ ID NO: 914223 - RNA, 23 nt, Human
cuccacaccacugcgcucgcggc

SEQ ID NO: 914224 - RNA, 22 nt, Human
cucccccggcauucugggcccc

SEQ ID NO: 914225 - RNA, 19 nt, Human
cucccggcauacacuccgg

SEQ ID NO: 914226 - RNA, 19 nt, Human
cugcaccccacuccccagg

SEQ ID NO: 914227 - RNA, 19 nt, Human
cugccaggcccaggaccag

SEQ ID NO: 914228 - RNA, 19 nt, Human
cuggaccagcugaccagag

SEQ ID NO: 914229 - RNA, 21 nt, Human
cuggacccaauuuccuucuga

SEQ ID NO: 914230 - RNA, 22 nt, Human
cuggaucaagacaauguggaga

SEQ ID NO: 914231 - RNA, 18 nt, Human
cuggcuccuacagucaag

SEQ ID NO: 914232 - RNA, 21 nt, Human
cuggcuccuacagucaagggg

SEQ ID NO: 914233 - RNA, 19 nt, Human
cuggguccccuucuggcuc

SEQ ID NO: 914234 - RNA, 19 nt, Human
cuugcagagacccacuccc

SEQ ID NO: 914235 - RNA, 21 nt, Human
cuugcagccagcccacagcac

SEQ ID NO: 914236 - RNA, 20 nt, Human
cuuugggccucaccuuucuc

SEQ ID NO: 914237 - RNA, 19 nt, Human
gaaauucuuccugucagcc

SEQ ID NO: 914238 - RNA, 24 nt, Human
gaaggggaccggcggggaccagcc

SEQ ID NO: 914239 - RNA, 19 nt, Human
gacagccggcuccgggacc

SEQ ID NO: 914240 - RNA, 21 nt, Human
gaccugggacaguuugaaggc

SEQ ID NO: 914241 - RNA, 20 nt, Human
gagaaacagacaagcuguag

SEQ ID NO: 914242 - RNA, 21 nt, Human
gagaaacagacaagcuguagg

SEQ ID NO: 914243 - RNA, 22 nt, Human
gagcauugggacuuuggaaaug

SEQ ID NO: 914244 - RNA, 20 nt, Human
gagcuguaccuucguccaca

SEQ ID NO: 914245 - RNA, 21 nt, Human
gcaacaaagaaucacacuaaa

SEQ ID NO: 914246 - RNA, 24 nt, Human
gcauggagcuccagccucccccac

SEQ ID NO: 914247 - RNA, 20 nt, Human
gccagcagagagcagagagg

SEQ ID NO: 914248 - RNA, 25 nt, Human
gccccuggcucuuccagaguccaca

SEQ ID NO: 914249 - RNA, 21 nt, Human
gccuauggcuggcagagggac

SEQ ID NO: 914250 - RNA, 27 nt, Human
ggacaaguggacucuugguggcuggac

SEQ ID NO: 914251 - RNA, 22 nt, Human
ggaccagcucucuccuacacug

SEQ ID NO: 914252 - RNA, 22 nt, Human
ggagaacuguuucgaggcuugc

SEQ ID NO: 914253 - RNA, 26 nt, Human
ggagaguggagaaaggccaggaaagg

SEQ ID NO: 914254 - RNA, 24 nt, Human
ggaggcuuggcaaaaacccaaaag

SEQ ID NO: 914255 - RNA, 20 nt, Human
ggcaggcaggcgagcuguac

SEQ ID NO: 914256 - RNA, 20 nt, Human
gggagauguuccuucccagg

SEQ ID NO: 914257 - RNA, 24 nt, Human
gggcacuuuaccaacagguuuggg

SEQ ID NO: 914258 - RNA, 19 nt, Human
gggcaugaacacagcugcc

SEQ ID NO: 914259 - RNA, 23 nt, Human
ggguggggagugaggcagcaggg

SEQ ID NO: 914260 - RNA, 19 nt, Human
gguggcaagcagagagaga

SEQ ID NO: 914261 - RNA, 21 nt, Human
guccgagucagcugcauguga

SEQ ID NO: 914262 - RNA, 24 nt, Human
guggguggaaagcucugagcaggg

SEQ ID NO: 914263 - RNA, 25 nt, Human
guguaaguucaggucagguuugguu

SEQ ID NO: 914264 - RNA, 18 nt, Human
guguggaggcuguggcca

SEQ ID NO: 914265 - RNA, 21 nt, Human
uacuuugcuuugguguagaaa

SEQ ID NO: 914266 - RNA, 20 nt, Human
ucaaaagaguuggggggaaa

SEQ ID NO: 914267 - RNA, 23 nt, Human
ucaaaagaguuggggggaaaaaa

SEQ ID NO: 914268 - RNA, 23 nt, Human
ucagaagccucccccggcauucu

SEQ ID NO: 914269 - RNA, 19 nt, Human
ucagaagggcgaggagcac

SEQ ID NO: 914270 - RNA, 18 nt, Human
ucagagagaaaagggaaa

SEQ ID NO: 914271 - RNA, 23 nt, Human
ucauacauuugcguugauuuaaa

SEQ ID NO: 914272 - RNA, 20 nt, Human
uccaagaaccuaauagccug

SEQ ID NO: 914273 - RNA, 24 nt, Human
uccacaccacugcgcucgcggccg

SEQ ID NO: 914274 - RNA, 24 nt, Human
uccacauucaaggcaaccugagca

SEQ ID NO: 914275 - RNA, 27 nt, Human
uccacauucaaggcaaccugagcacag

SEQ ID NO: 914276 - RNA, 20 nt, Human
uccccaggcuuccucccacc

SEQ ID NO: 914277 - RNA, 19 nt, Human
ucccccacaucagaagggc

SEQ ID NO: 914278 - RNA, 18 nt, Human
ucccccggcauucugggc

SEQ ID NO: 914279 - RNA, 23 nt, Human
ucccccggcauucugggccccug

SEQ ID NO: 914280 - RNA, 19 nt, Human
uccccuucuggcuccuaca

SEQ ID NO: 914281 - RNA, 20 nt, Human
ucccugacacuggaggcagg

SEQ ID NO: 914282 - RNA, 18 nt, Human
ucccuguggguggaaagc

SEQ ID NO: 914283 - RNA, 20 nt, Human
ucccuguggguggaaagcuc

SEQ ID NO: 914284 - RNA, 19 nt, Human
uccgggacccggcgcgcuc

SEQ ID NO: 914285 - RNA, 18 nt, Human
uccugcaccccacucccc

SEQ ID NO: 914286 - RNA, 22 nt, Human
ucugacaauauuuccucugccu

SEQ ID NO: 914287 - RNA, 24 nt, Human
ucugcagccgggcaagcagaggac

SEQ ID NO: 914288 - RNA, 20 nt, Human
ucugguguggaggcuguggc

SEQ ID NO: 914289 - RNA, 21 nt, Human
ucuuccuucccccaaagaaac

SEQ ID NO: 914290 - RNA, 22 nt, Human
ugaaauguccaguagcacaggg

SEQ ID NO: 914291 - RNA, 18 nt, Human
ugaccagagggcugcaca

SEQ ID NO: 914292 - RNA, 23 nt, Human
ugaggcagaauccacguccuguu

SEQ ID NO: 914293 - RNA, 19 nt, Human
ugagggagaguggagaaag

SEQ ID NO: 914294 - RNA, 21 nt, Human
ugagugccacucagaagccuc

SEQ ID NO: 914295 - RNA, 23 nt, Human
ugauuuaaauacauuacguacaa

SEQ ID NO: 914296 - RNA, 18 nt, Human
ugcgcaggaccugggaca

SEQ ID NO: 914297 - RNA, 22 nt, Human
uggaagcaagaagauacgcacu

SEQ ID NO: 914298 - RNA, 18 nt, Human
uggacaaaaaaggucaga

SEQ ID NO: 914299 - RNA, 23 nt, Human
uggagaucugguguggaggcugg

SEQ ID NO: 914300 - RNA, 20 nt, Human
uggcaaaaacccaaaagaaa

SEQ ID NO: 914301 - RNA, 22 nt, Human
uggcaagcagagagagagggcu

SEQ ID NO: 914302 - RNA, 24 nt, Human
uggcuuuuccugcaccccacuccc

SEQ ID NO: 914303 - RNA, 27 nt, Human
ugggaccaaggacucaggaagcaaggu

SEQ ID NO: 914304 - RNA, 18 nt, Human
ugggacuuuggaaaugag

SEQ ID NO: 914305 - RNA, 21 nt, Human
ugggagauggaggaggcuugg

SEQ ID NO: 914306 - RNA, 20 nt, Human
ugggccccuggcucuuccag

SEQ ID NO: 914307 - RNA, 21 nt, Human
uggggagugaggcagcagggg

SEQ ID NO: 914308 - RNA, 18 nt, Human
uggggcaggcaggcgagc

SEQ ID NO: 914309 - RNA, 20 nt, Human
uggggcaggcaggcgagcug

SEQ ID NO: 914310 - RNA, 21 nt, Human
ugguggcuggacuggaagggg

SEQ ID NO: 914311 - RNA, 21 nt, Human
ugguguggaggcuguggccag

SEQ ID NO: 914312 - RNA, 22 nt, Human
uguaaguucaggucagguuugg

SEQ ID NO: 914313 - RNA, 21 nt, Human
ugucccagugcugugguacug

SEQ ID NO: 914314 - RNA, 23 nt, Human
uguggagaucugguguggaggcu

SEQ ID NO: 914315 - RNA, 18 nt, Human
ugugugcggaagugcugg

SEQ ID NO: 914316 - RNA, 22 nt, Human
uguucccaaggccaguguccga

SEQ ID NO: 914317 - RNA, 23 nt, Human
uucccaggcaucuggacuacgug

SEQ ID NO: 914318 - RNA, 22 nt, Human
uucccccaaagaaacuggacaa

SEQ ID NO: 914319 - RNA, 19 nt, Human
uuccugcaccccacucccc

SEQ ID NO: 914320 - RNA, 18 nt, Human
uuuuguuuuguuuguuuu

SEQ ID NO: 914321 - RNA, 19 nt, Human
acaguugaggugccaggac

SEQ ID NO: 914322 - RNA, 23 nt, Human
agagcucucccaucaucccagau

SEQ ID NO: 914323 - RNA, 24 nt, Human
agauugaggcagaaugguggucac

SEQ ID NO: 914324 - RNA, 19 nt, Human
aggagcagcaggagagagg

SEQ ID NO: 914325 - RNA, 19 nt, Human
aggcagaaugguggucacc

SEQ ID NO: 914326 - RNA, 19 nt, Human
aggugggcuugcaaaagau

SEQ ID NO: 914327 - RNA, 19 nt, Human
cacccuuguuacccuaggg

SEQ ID NO: 914328 - RNA, 22 nt, Human
caggcgcacgcucacgccaccc

SEQ ID NO: 914329 - RNA, 23 nt, Human
ccagagcucucccaucaucccag

SEQ ID NO: 914330 - RNA, 18 nt, Human
ccaggacugaguuuuggg

SEQ ID NO: 914331 - RNA, 22 nt, Human
ccccuggccaggacagagaggc

SEQ ID NO: 914332 - RNA, 27 nt, Human
ccuggguggggcuuugcugauugucac

SEQ ID NO: 914333 - RNA, 20 nt, Human
gagcagcaggagagaggcag

SEQ ID NO: 914334 - RNA, 23 nt, Human
gcaggugggcuugcaaaagauug

SEQ ID NO: 914335 - RNA, 21 nt, Human
ggaccccaguuguccaccccu

SEQ ID NO: 914336 - RNA, 19 nt, Human
ggccuggguggggcuuugc

SEQ ID NO: 914337 - RNA, 18 nt, Human
ggcggggcuuaggccagg

SEQ ID NO: 914338 - RNA, 21 nt, Human
ggcggggcuuaggccaggagg

SEQ ID NO: 914339 - RNA, 20 nt, Human
gugcagauacagcuggagga

SEQ ID NO: 914340 - RNA, 19 nt, Human
uacccuagggaggcagggu

SEQ ID NO: 914341 - RNA, 26 nt, Human
uccaggauugggacaucugccagagc

SEQ ID NO: 914342 - RNA, 24 nt, Human
ucucccaucaucccagaugggggc

SEQ ID NO: 914343 - RNA, 18 nt, Human
ucugccagagcucuccca

SEQ ID NO: 914344 - RNA, 18 nt, Human
ugccaggacugaguuuug

SEQ ID NO: 914345 - RNA, 19 nt, Human
ugcccgaaggccgccaggc

SEQ ID NO: 914346 - RNA, 23 nt, Human
ugggcggggcuuaggccaggagg

SEQ ID NO: 914347 - RNA, 20 nt, Human
ugggggccuggguggggcuu

SEQ ID NO: 914348 - RNA, 23 nt, Human
ugguggucaccuuggcccaucug

SEQ ID NO: 914349 - RNA, 19 nt, Human
ugucacaguugaggugcca

SEQ ID NO: 914350 - RNA, 19 nt, Human
aaaaagcagcuuaaaauau

SEQ ID NO: 914351 - RNA, 24 nt, Human
aaaggagggauguucaggacucug

SEQ ID NO: 914352 - RNA, 23 nt, Human
acacugggcuagaggagccuggc

SEQ ID NO: 914353 - RNA, 20 nt, Human
acagaaaggguuacuucuga

SEQ ID NO: 914354 - RNA, 24 nt, Human
agagaaacugaagcacagcuggua

SEQ ID NO: 914355 - RNA, 21 nt, Human
agccgaugccugugagugaca

SEQ ID NO: 914356 - RNA, 19 nt, Human
agggagcaggaggacgggg

SEQ ID NO: 914357 - RNA, 21 nt, Human
agggagcaggaggacggggag

SEQ ID NO: 914358 - RNA, 19 nt, Human
agggauguucaggacucug

SEQ ID NO: 914359 - RNA, 23 nt, Human
agggauguucaggacucugcagc

SEQ ID NO: 914360 - RNA, 25 nt, Human
auaaauacaaccugagaacauccau

SEQ ID NO: 914361 - RNA, 21 nt, Human
cacaccuaaguuccguucucu

SEQ ID NO: 914362 - RNA, 21 nt, Human
cacugccugccuacuccaguu

SEQ ID NO: 914363 - RNA, 23 nt, Human
caggacucugcagcucugugucc

SEQ ID NO: 914364 - RNA, 19 nt, Human
cauugccucucccuucugc

SEQ ID NO: 914365 - RNA, 24 nt, Human
ccacacaggcucauucucaacugg

SEQ ID NO: 914366 - RNA, 21 nt, Human
ccacccuuugucuucucuuug

SEQ ID NO: 914367 - RNA, 22 nt, Human
ccaguccccuccaagagcccug

SEQ ID NO: 914368 - RNA, 20 nt, Human
ccccugaaaaagcagcuuaa

SEQ ID NO: 914369 - RNA, 24 nt, Human
ccccugaaaaagcagcuuaaaaua

SEQ ID NO: 914370 - RNA, 20 nt, Human
cccuaaaaaauacagaaggg

SEQ ID NO: 914371 - RNA, 20 nt, Human
cccugccgcacgccuggccu

SEQ ID NO: 914372 - RNA, 23 nt, Human
ccuaaaaaauacagaaggggaca

SEQ ID NO: 914373 - RNA, 19 nt, Human
ccuacagcagcuuacccag

SEQ ID NO: 914374 - RNA, 22 nt, Human
ccuacagcagcuuacccagggc

SEQ ID NO: 914375 - RNA, 22 nt, Human
ccuggccuuugggccagggcca

SEQ ID NO: 914376 - RNA, 22 nt, Human
ccuggggcccugggccacuagg

SEQ ID NO: 914377 - RNA, 22 nt, Human
cgaaauaaauacaaccugagaa

SEQ ID NO: 914378 - RNA, 24 nt, Human
cuauuuauccccugaaaaagcagc

SEQ ID NO: 914379 - RNA, 18 nt, Human
cugaagcacagcugguau

SEQ ID NO: 914380 - RNA, 24 nt, Human
cugaguccccaccaguccccucca

SEQ ID NO: 914381 - RNA, 18 nt, Human
cugggccuagcuguagag

SEQ ID NO: 914382 - RNA, 21 nt, Human
cuuccggagcaccugucuuca

SEQ ID NO: 914383 - RNA, 22 nt, Human
gaaauaaauacaaccugagaac

SEQ ID NO: 914384 - RNA, 24 nt, Human
gagaacauccauuucaaugucccc

SEQ ID NO: 914385 - RNA, 24 nt, Human
gcacagaaaggguuacuucugacc

SEQ ID NO: 914386 - RNA, 19 nt, Human
ggcuagaggagccuggccu

SEQ ID NO: 914387 - RNA, 18 nt, Human
gggcuaggcugggccuag

SEQ ID NO: 914388 - RNA, 20 nt, Human
gggcugggcuaggcugggcc

SEQ ID NO: 914389 - RNA, 21 nt, Human
uaaaauaugggugcacauuuu

SEQ ID NO: 914390 - RNA, 20 nt, Human
uacaaccugagaacauccau

SEQ ID NO: 914391 - RNA, 24 nt, Human
uacccagggcaaagugagagaaac

SEQ ID NO: 914392 - RNA, 23 nt, Human
uacuucugacccuacagcagcuu

SEQ ID NO: 914393 - RNA, 19 nt, Human
uagagacacaccuaaguuc

SEQ ID NO: 914394 - RNA, 24 nt, Human
uccaagagcccugaugcugcuucc

SEQ ID NO: 914395 - RNA, 22 nt, Human
uccccaccaguccccuccaaga

SEQ ID NO: 914396 - RNA, 22 nt, Human
ucugcagcucuguguccagccc

SEQ ID NO: 914397 - RNA, 22 nt, Human
ugaaaaagcagcuuaaaauaug

SEQ ID NO: 914398 - RNA, 21 nt, Human
ugaaggguguuuguucugggc

SEQ ID NO: 914399 - RNA, 25 nt, Human
ugagagaaacugaagcacagcuggu

SEQ ID NO: 914400 - RNA, 21 nt, Human
ugccaggaggcugagaguccc

SEQ ID NO: 914401 - RNA, 19 nt, Human
ugccucucccuucugcagc

SEQ ID NO: 914402 - RNA, 22 nt, Human
uggcacagaaaggguuacuucu

SEQ ID NO: 914403 - RNA, 24 nt, Human
uggccugagccgaugccugugagu

SEQ ID NO: 914404 - RNA, 24 nt, Human
ugggccagggccacacacugggcu

SEQ ID NO: 914405 - RNA, 19 nt, Human
ugggcugggcuaggcuggg

SEQ ID NO: 914406 - RNA, 20 nt, Human
ugggcugggcuaggcugggc

SEQ ID NO: 914407 - RNA, 20 nt, Human
uguucugggcugggcuaggc

SEQ ID NO: 914408 - RNA, 24 nt, Human
uuaaaauaugggugcacauuuugc

SEQ ID NO: 914409 - RNA, 26 nt, Human
uucaauguccccaaacacuauuuauc

SEQ ID NO: 914410 - RNA, 24 nt, Human
uucucuguuuggaggcugcaccca

SEQ ID NO: 914411 - RNA, 20 nt, Human
uugccucucccuucugcagc

SEQ ID NO: 914412 - RNA, 22 nt, Human
aaccaggcucccggcucccccg

SEQ ID NO: 914413 - RNA, 22 nt, Human
aagcaagaacauaaacacggaa

SEQ ID NO: 914414 - RNA, 24 nt, Human
aagcacggcuccaacacggccgug

SEQ ID NO: 914415 - RNA, 18 nt, Human
aagccugccuuggagcug

SEQ ID NO: 914416 - RNA, 18 nt, Human
acccuggcguggcccgcg

SEQ ID NO: 914417 - RNA, 21 nt, Human
acccuggcguggcccgcgccg

SEQ ID NO: 914418 - RNA, 19 nt, Human
acugggcuugauuucugcu

SEQ ID NO: 914419 - RNA, 18 nt, Human
aggcaggaggagacguga

SEQ ID NO: 914420 - RNA, 19 nt, Human
agggcuuucggggcuuuga

SEQ ID NO: 914421 - RNA, 18 nt, Human
augggacauugauggcag

SEQ ID NO: 914422 - RNA, 18 nt, Human
caagcaagaacauaaaca

SEQ ID NO: 914423 - RNA, 19 nt, Human
cagcaguaaaaucaaaugc

SEQ ID NO: 914424 - RNA, 24 nt, Human
ccaagcaagcacggcuccaacacg

SEQ ID NO: 914425 - RNA, 19 nt, Human
ccacgcgccgggcugccuc

SEQ ID NO: 914426 - RNA, 24 nt, Human
cccccaggguggccgccggggcgg

SEQ ID NO: 914427 - RNA, 21 nt, Human
cccgcgaggcucucccggggg

SEQ ID NO: 914428 - RNA, 22 nt, Human
ccucuggaucuggaagcuucug

SEQ ID NO: 914429 - RNA, 20 nt, Human
ccugggcccuggggguuggg

SEQ ID NO: 914430 - RNA, 23 nt, Human
cgccggggcgggcgggauggggg

SEQ ID NO: 914431 - RNA, 26 nt, Human
cgccugcagggggcgcacgcgcggug

SEQ ID NO: 914432 - RNA, 19 nt, Human
cggggcgggcgggaugggg

SEQ ID NO: 914433 - RNA, 25 nt, Human
cgggggccgccugcaggggggacac

SEQ ID NO: 914434 - RNA, 19 nt, Human
cuggaagcuucugggagcu

SEQ ID NO: 914435 - RNA, 19 nt, Human
cuucaugcugcacacgagc

SEQ ID NO: 914436 - RNA, 21 nt, Human
cuucugggagcuucaggcccu

SEQ ID NO: 914437 - RNA, 21 nt, Human
cuugggguagcugaaggagcu

SEQ ID NO: 914438 - RNA, 20 nt, Human
gagcuggaggaugcugugag

SEQ ID NO: 914439 - RNA, 19 nt, Human
gcagagaggagcagacaaa

SEQ ID NO: 914440 - RNA, 19 nt, Human
gcagcuugggguagcugaa

SEQ ID NO: 914441 - RNA, 23 nt, Human
gccaauggcgcgccguccccucc

SEQ ID NO: 914442 - RNA, 22 nt, Human
gcccuguggggugaggccuggg

SEQ ID NO: 914443 - RNA, 18 nt, Human
gcucucccgggggccgcc

SEQ ID NO: 914444 - RNA, 18 nt, Human
gcuuucggggcuuugagg

SEQ ID NO: 914445 - RNA, 21 nt, Human
ggaaauagaaucaucucugcu

SEQ ID NO: 914446 - RNA, 23 nt, Human
ggagacaugucuccuuugauugc

SEQ ID NO: 914447 - RNA, 19 nt, Human
ggagcccagcacuccgcaa

SEQ ID NO: 914448 - RNA, 21 nt, Human
ggaggcucuucccaggagaca

SEQ ID NO: 914449 - RNA, 23 nt, Human
ggccugggacugggcuugauuuc

SEQ ID NO: 914450 - RNA, 19 nt, Human
ggcguggcccgcgccgccc

SEQ ID NO: 914451 - RNA, 18 nt, Human
gggagacccuggcguggc

SEQ ID NO: 914452 - RNA, 19 nt, Human
gggauggggguuggcgggg

SEQ ID NO: 914453 - RNA, 22 nt, Human
guucugagagaccucuccuuca

SEQ ID NO: 914454 - RNA, 19 nt, Human
uaaaaucaaaugcgcgcca

SEQ ID NO: 914455 - RNA, 18 nt, Human
ucaagcaagaacauaaac

SEQ ID NO: 914456 - RNA, 25 nt, Human
ucccccgcgaggcucucccgggggc

SEQ ID NO: 914457 - RNA, 22 nt, Human
ucccgggggccgccugcagggg

SEQ ID NO: 914458 - RNA, 22 nt, Human
ucucaggcaaacugcuuaacuu

SEQ ID NO: 914459 - RNA, 24 nt, Human
ucugagagaccucuccuucaugcu

SEQ ID NO: 914460 - RNA, 18 nt, Human
ucugcugugcuggcuuug

SEQ ID NO: 914461 - RNA, 19 nt, Human
ucuggaagcuucugggagc

SEQ ID NO: 914462 - RNA, 21 nt, Human
ucuggaucuggaagcuucugg

SEQ ID NO: 914463 - RNA, 26 nt, Human
ucuggcggcccgcgcuggucccuccu

SEQ ID NO: 914464 - RNA, 21 nt, Human
ugaacacaggcugagagcuga

SEQ ID NO: 914465 - RNA, 18 nt, Human
ugagaaagcucauugcag

SEQ ID NO: 914466 - RNA, 25 nt, Human
uggggguugggggaagccugccuug

SEQ ID NO: 914467 - RNA, 19 nt, Human
ugucucccgggcccaggcc

SEQ ID NO: 914468 - RNA, 23 nt, Human
ugugaaaucagcaguaaaaucaa

SEQ ID NO: 914469 - RNA, 24 nt, Human
ugugagaaggaagggaggccucca

SEQ ID NO: 914470 - RNA, 24 nt, Human
uuaaauagccuugcggugucuccc

SEQ ID NO: 914471 - RNA, 21 nt, Human
uucucugggcaccacuccugg

SEQ ID NO: 914472 - RNA, 18 nt, Human
uuuccuggcaaguucugc

SEQ ID NO: 914473 - RNA, 26 nt, Human
uuucggggcuuugagguugugggagg

SEQ ID NO: 914474 - RNA, 21 nt, Human
uuugcuggacgguugugggga

SEQ ID NO: 914475 - RNA, 21 nt, Human
aaaaaagagccacugauggca

SEQ ID NO: 914476 - RNA, 18 nt, Human
aaaugacaccaaucauuu

SEQ ID NO: 914477 - RNA, 21 nt, Human
aaaugggaaaaugacaccaau

SEQ ID NO: 914478 - RNA, 19 nt, Human
aacauaguaagaccccauc

SEQ ID NO: 914479 - RNA, 20 nt, Human
aacauaguaagaccccaucu

SEQ ID NO: 914480 - RNA, 21 nt, Human
aacauaguaagaccccaucuc

SEQ ID NO: 914481 - RNA, 19 nt, Human
aagaccccaucucuguuuu

SEQ ID NO: 914482 - RNA, 21 nt, Human
aagaucuggcacagagaaaca

SEQ ID NO: 914483 - RNA, 23 nt, Human
aagcaggaaaaaagagccacuga

SEQ ID NO: 914484 - RNA, 21 nt, Human
agaaacaaggggagacagggc

SEQ ID NO: 914485 - RNA, 25 nt, Human
agacugccaccagaaaggcccaugg

SEQ ID NO: 914486 - RNA, 22 nt, Human
agccugggcaacauaguaagac

SEQ ID NO: 914487 - RNA, 24 nt, Human
agccugggcaacauaguaagaccc

SEQ ID NO: 914488 - RNA, 21 nt, Human
agcggcgucugggcccagagc

SEQ ID NO: 914489 - RNA, 21 nt, Human
agcuuaugccugcaaucccag

SEQ ID NO: 914490 - RNA, 18 nt, Human
aggaccccugcgcucgcg

SEQ ID NO: 914491 - RNA, 24 nt, Human
aggaucgcuugagcccaggaguuc

SEQ ID NO: 914492 - RNA, 29 nt, Human
aggcacuaaaggcugguucagccgagcuu

SEQ ID NO: 914493 - RNA, 23 nt, Human
aggcagaaggaucgcuugagccc

SEQ ID NO: 914494 - RNA, 24 nt, Human
aggcagaaggaucgcuugagccca

SEQ ID NO: 914495 - RNA, 18 nt, Human
aggcaggaaaccguggaa

SEQ ID NO: 914496 - RNA, 20 nt, Human
aguaagaggaccccugcgcu

SEQ ID NO: 914497 - RNA, 22 nt, Human
aucccagcacuucgggaggcca

SEQ ID NO: 914498 - RNA, 23 nt, Human
auuacagaaaaugguuuuauaaa

SEQ ID NO: 914499 - RNA, 19 nt, Human
cagaaaggcccauggaagc

SEQ ID NO: 914500 - RNA, 24 nt, Human
cagcacuucgggaggccaaggcag

SEQ ID NO: 914501 - RNA, 23 nt, Human
cagugauaagauccagcccuauu

SEQ ID NO: 914502 - RNA, 19 nt, Human
caguuacagaaucucaaag

SEQ ID NO: 914503 - RNA, 23 nt, Human
caguuacagaaucucaaagccaa

SEQ ID NO: 914504 - RNA, 21 nt, Human
cauaguaagaccccaucucug

SEQ ID NO: 914505 - RNA, 19 nt, Human
ccagcaccggcgguggacg

SEQ ID NO: 914506 - RNA, 20 nt, Human
ccagcaccggcgguggacgg

SEQ ID NO: 914507 - RNA, 20 nt, Human
ccucggguguccuucccgga

SEQ ID NO: 914508 - RNA, 24 nt, Human
ccugggcaacauaguaagacccca

SEQ ID NO: 914509 - RNA, 21 nt, Human
cgggaggccaaggcagaagga

SEQ ID NO: 914510 - RNA, 22 nt, Human
cucgcggggugcccgccuuacc

SEQ ID NO: 914511 - RNA, 23 nt, Human
cuuaugccugcaaucccagcacu

SEQ ID NO: 914512 - RNA, 20 nt, Human
gaaaaaaaucccuguaugga

SEQ ID NO: 914513 - RNA, 18 nt, Human
gacaccagccugggcaac

SEQ ID NO: 914514 - RNA, 18 nt, Human
gacagggcagugauaaga

SEQ ID NO: 914515 - RNA, 21 nt, Human
gaccaaaaggaggucauaaaa

SEQ ID NO: 914516 - RNA, 21 nt, Human
gagcucugggcagaacagccu

SEQ ID NO: 914517 - RNA, 21 nt, Human
gaggaccccugcgcucgcggg

SEQ ID NO: 914518 - RNA, 24 nt, Human
gaucgcuugagcccaggaguucga

SEQ ID NO: 914519 - RNA, 22 nt, Human
gcccagcaugguagcuuaugcc

SEQ ID NO: 914520 - RNA, 22 nt, Human
gcccaggaguucgacaccagcc

SEQ ID NO: 914521 - RNA, 19 nt, Human
gccugcaaucccagcacuu

SEQ ID NO: 914522 - RNA, 20 nt, Human
gcuucgcucucugacuuuca

SEQ ID NO: 914523 - RNA, 23 nt, Human
ggaucgcuugagcccaggaguuc

SEQ ID NO: 914524 - RNA, 18 nt, Human
ggcccagagcugggugcc

SEQ ID NO: 914525 - RNA, 23 nt, Human
gggaagagacggauaagauaaug

SEQ ID NO: 914526 - RNA, 21 nt, Human
gggucucccaggggccucggg

SEQ ID NO: 914527 - RNA, 22 nt, Human
uaagaaauuaaagugaaucugu

SEQ ID NO: 914528 - RNA, 22 nt, Human
uaauuacucuaugagaaaaaaa

SEQ ID NO: 914529 - RNA, 22 nt, Human
uaccccgcggggaggggucagg

SEQ ID NO: 914530 - RNA, 22 nt, Human
uagcuuaugccugcaaucccag

SEQ ID NO: 914531 - RNA, 24 nt, Human
uagcuuaugccugcaaucccagca

SEQ ID NO: 914532 - RNA, 19 nt, Human
uaugccugcaaucccagca

SEQ ID NO: 914533 - RNA, 20 nt, Human
uaugccugcaaucccagcac

SEQ ID NO: 914534 - RNA, 24 nt, Human
ucaggcccagcaugguagcuuaug

SEQ ID NO: 914535 - RNA, 18 nt, Human
ucagggaggcaggaaacc

SEQ ID NO: 914536 - RNA, 22 nt, Human
ucagggaggcaggaaaccgugg

SEQ ID NO: 914537 - RNA, 23 nt, Human
ucgacaccagccugggcaacaua

SEQ ID NO: 914538 - RNA, 21 nt, Human
ucgcuugagcccaggaguucg

SEQ ID NO: 914539 - RNA, 24 nt, Human
ucugcaguuacagaaucucaaagc

SEQ ID NO: 914540 - RNA, 18 nt, Human
ugaagaucuggcacagag

SEQ ID NO: 914541 - RNA, 24 nt, Human
ugagaaaaaaaucccuguauggaa

SEQ ID NO: 914542 - RNA, 25 nt, Human
ugagaaaaaaaucccuguauggaaa

SEQ ID NO: 914543 - RNA, 23 nt, Human
ugagcccaggaguucgacaccag

SEQ ID NO: 914544 - RNA, 21 nt, Human
ugauuacagaaaaugguuuua

SEQ ID NO: 914545 - RNA, 23 nt, Human
ugccaucagcaguaagaggaccc

SEQ ID NO: 914546 - RNA, 23 nt, Human
ugccugcaaucccagcacuucgg

SEQ ID NO: 914547 - RNA, 25 nt, Human
uggaacugacacucaaggggaaugu

SEQ ID NO: 914548 - RNA, 21 nt, Human
uggcaaaugggaaaaugacac

SEQ ID NO: 914549 - RNA, 22 nt, Human
ugggcaacauaguaagacccca

SEQ ID NO: 914550 - RNA, 24 nt, Human
ugguagcuuaugccugcaauccca

SEQ ID NO: 914551 - RNA, 20 nt, Human
uugauuacagaaaaugguuu

SEQ ID NO: 914552 - RNA, 20 nt, Human
uuuuuuuaaaaaaaagaaau

SEQ ID NO: 914553 - RNA, 22 nt, Human
uuuuuuuuuuuuuuuuuuuaag

SEQ ID NO: 914554 - RNA, 26 nt, Human
aaacaggaacaaauacuggcuuaaac

SEQ ID NO: 914555 - RNA, 19 nt, Human
aaagugcugagacuacagg

SEQ ID NO: 914556 - RNA, 25 nt, Human
aaagugcugagacuacaggcaaggg

SEQ ID NO: 914557 - RNA, 21 nt, Human
aaccgaaacgacugcagacua

SEQ ID NO: 914558 - RNA, 21 nt, Human
aagaaaagauggguguuaaaa

SEQ ID NO: 914559 - RNA, 20 nt, Human
aaucagaauguaacacagua

SEQ ID NO: 914560 - RNA, 21 nt, Human
acccgccaggcugccaaccga

SEQ ID NO: 914561 - RNA, 21 nt, Human
acugcuaccugucuccagccc

SEQ ID NO: 914562 - RNA, 19 nt, Human
agcugcuuagccccagcuc

SEQ ID NO: 914563 - RNA, 18 nt, Human
aucucccacccgccaggc

SEQ ID NO: 914564 - RNA, 24 nt, Human
auguuuuaguaucugauaguuuca

SEQ ID NO: 914565 - RNA, 27 nt, Human
caaagugcugagacuacaggcaagggc

SEQ ID NO: 914566 - RNA, 27 nt, Human
caagcgacccucccaccucagccuccc

SEQ ID NO: 914567 - RNA, 27 nt, Human
caagcgacccucccaccucagccuccc

SEQ ID NO: 914568 - RNA, 19 nt, Human
caaucagaauguaacacag

SEQ ID NO: 914569 - RNA, 24 nt, Human
caccucagccucccaaagugcuga

SEQ ID NO: 914570 - RNA, 21 nt, Human
caggaaagcuuuagaaagaaa

SEQ ID NO: 914571 - RNA, 23 nt, Human
caggaacaaauacuggcuuaaac

SEQ ID NO: 914572 - RNA, 21 nt, Human
ccaaccgaaacgacugcagac

SEQ ID NO: 914573 - RNA, 21 nt, Human
cccaaagcucucuucuggucc

SEQ ID NO: 914574 - RNA, 21 nt, Human
cccgcgcggucuucucagccg

SEQ ID NO: 914575 - RNA, 27 nt, Human
cccucccaccucagccucccaaagugc

SEQ ID NO: 914576 - RNA, 21 nt, Human
ccgcgcggucuucucagccgc

SEQ ID NO: 914577 - RNA, 26 nt, Human
ccuaggauuuccuagaagguggaccu

SEQ ID NO: 914578 - RNA, 24 nt, Human
cucaagcgacccucccaccucagc

SEQ ID NO: 914579 - RNA, 21 nt, Human
cucccaaagugcugagacuac

SEQ ID NO: 914580 - RNA, 24 nt, Human
gaacuccugaacucaagcgacccu

SEQ ID NO: 914581 - RNA, 23 nt, Human
gcgacccucccaccucagccucc

SEQ ID NO: 914582 - RNA, 20 nt, Human
ggccgccgcaucucccaccc

SEQ ID NO: 914583 - RNA, 28 nt, Human
uaagacagaagcauuguaaaacaggaac

SEQ ID NO: 914584 - RNA, 23 nt, Human
uaucacauccggcaugaagcccc

SEQ ID NO: 914585 - RNA, 18 nt, Human
ucagccucccaaagugcu

SEQ ID NO: 914586 - RNA, 26 nt, Human
uccaaacugccuucguacuucuaacc

SEQ ID NO: 914587 - RNA, 24 nt, Human
ucccaaagugcugagacuacaggc

SEQ ID NO: 914588 - RNA, 18 nt, Human
ucccaaauaaacgagucc

SEQ ID NO: 914589 - RNA, 19 nt, Human
uccucuauuuuaagaaugu

SEQ ID NO: 914590 - RNA, 21 nt, Human
ugagacuacaggcaagggcca

SEQ ID NO: 914591 - RNA, 22 nt, Human
ugagacuacaggcaagggccac

SEQ ID NO: 914592 - RNA, 24 nt, Human
ugagacuacaggcaagggccacca

SEQ ID NO: 914593 - RNA, 22 nt, Human
ugcugagacuacaggcaagggc

SEQ ID NO: 914594 - RNA, 22 nt, Human
ugucuccagccccgcgcggucu

SEQ ID NO: 914595 - RNA, 20 nt, Human
uucuuugcagcagguggccg

SEQ ID NO: 914596 - RNA, 21 nt, Human
uuuauauauaaggcaaacauu

SEQ ID NO: 914597 - RNA, 26 nt, Human
uuuuuuuuuuuugagacuaggucuca

SEQ ID NO: 914598 - RNA, 18 nt, Human
uuuuuuuuuuuuuuuuug

SEQ ID NO: 914599 - RNA, 22 nt, Human
aaaaauauuuucucccaaauua

SEQ ID NO: 914600 - RNA, 19 nt, Human
aaagacacaacuucacaaa

SEQ ID NO: 914601 - RNA, 23 nt, Human
acaaaacauaauaaaagauaaac

SEQ ID NO: 914602 - RNA, 19 nt, Human
agcagcagcgauuuucucc

SEQ ID NO: 914603 - RNA, 24 nt, Human
agguaauuagugaaaagacacaac

SEQ ID NO: 914604 - RNA, 24 nt, Human
ccaucucagcagcagcgauuuucu

SEQ ID NO: 914605 - RNA, 21 nt, Human
ccuuaucuuccucuucuccuu

SEQ ID NO: 914606 - RNA, 22 nt, Human
cugccaaaaaauggguucaaag

SEQ ID NO: 914607 - RNA, 20 nt, Human
cuuccucuucuccuuagccc

SEQ ID NO: 914608 - RNA, 23 nt, Human
ggagcggagcgggucggaggagc

SEQ ID NO: 914609 - RNA, 19 nt, Human
gggcggcgcggggccgagc

SEQ ID NO: 914610 - RNA, 23 nt, Human
gggcggcgcggggccgagcggag

SEQ ID NO: 914611 - RNA, 24 nt, Human
gggcggcgcggggccgagcggagc

SEQ ID NO: 914612 - RNA, 24 nt, Human
guuauggauagauauaaggaaaua

SEQ ID NO: 914613 - RNA, 27 nt, Human
uccaucucagcagcagcgauuuucucc

SEQ ID NO: 914614 - RNA, 21 nt, Human
ucuuccucuucuccuuagccc

SEQ ID NO: 914615 - RNA, 25 nt, Human
ugaaaagacacaacuucacaaaaca

SEQ ID NO: 914616 - RNA, 28 nt, Human
uggagaaacaguuucuucuucuggaguc

SEQ ID NO: 914617 - RNA, 18 nt, Human
uuuagcauuuuugacuag

SEQ ID NO: 914618 - RNA, 21 nt, Human
aaagcacgggacaugcgccag

SEQ ID NO: 914619 - RNA, 22 nt, Human
aagcgaccucuccagggaacau

SEQ ID NO: 914620 - RNA, 22 nt, Human
aagggagacagauuuggccgca

SEQ ID NO: 914621 - RNA, 23 nt, Human
aaggucccuccacccccacagcc

SEQ ID NO: 914622 - RNA, 18 nt, Human
acagcagcguccacaaag

SEQ ID NO: 914623 - RNA, 22 nt, Human
acagcagcugacggcuuccccc

SEQ ID NO: 914624 - RNA, 21 nt, Human
acaugcgccagcugagcuggu

SEQ ID NO: 914625 - RNA, 25 nt, Human
accccgugugguucagggagugagg

SEQ ID NO: 914626 - RNA, 24 nt, Human
acccucuggaccuggguaugcagg

SEQ ID NO: 914627 - RNA, 22 nt, Human
accgcagcaggugggaagcggg

SEQ ID NO: 914628 - RNA, 21 nt, Human
agccuggcgaugcucacagcc

SEQ ID NO: 914629 - RNA, 24 nt, Human
aggcccuugacacugaggcugcuc

SEQ ID NO: 914630 - RNA, 18 nt, Human
agggugccugggacugga

SEQ ID NO: 914631 - RNA, 26 nt, Human
agggugcuguucggcugagggagcua

SEQ ID NO: 914632 - RNA, 19 nt, Human
aggguucauccuggcaagg

SEQ ID NO: 914633 - RNA, 20 nt, Human
augcagggugggcauggggc

SEQ ID NO: 914634 - RNA, 22 nt, Human
augcgccagcugagcuggugcc

SEQ ID NO: 914635 - RNA, 24 nt, Human
cacccccacaucugcucacuccca

SEQ ID NO: 914636 - RNA, 18 nt, Human
cacugaggcugcucccgc

SEQ ID NO: 914637 - RNA, 20 nt, Human
cacuggggagcccccaggga

SEQ ID NO: 914638 - RNA, 26 nt, Human
cacuuucggccucagugccacggccc

SEQ ID NO: 914639 - RNA, 18 nt, Human
cagaggugucugcacagc

SEQ ID NO: 914640 - RNA, 21 nt, Human
cagaugcagggugcuguucgg

SEQ ID NO: 914641 - RNA, 21 nt, Human
cagcgacugcuucaauccccc

SEQ ID NO: 914642 - RNA, 22 nt, Human
caggcaguccuggugcugcuga

SEQ ID NO: 914643 - RNA, 22 nt, Human
caggccgcucacaccccugggg

SEQ ID NO: 914644 - RNA, 22 nt, Human
cagggaacacccgcacccagac

SEQ ID NO: 914645 - RNA, 20 nt, Human
cagugcucuggacaccuggg

SEQ ID NO: 914646 - RNA, 23 nt, Human
caugcgccagcugagcuggugcc

SEQ ID NO: 914647 - RNA, 20 nt, Human
ccacagcagccuggcgaugc

SEQ ID NO: 914648 - RNA, 23 nt, Human
ccacuggggagcccccagggaga

SEQ ID NO: 914649 - RNA, 18 nt, Human
cccaaugaccuccaagcc

SEQ ID NO: 914650 - RNA, 21 nt, Human
cccaaugaccuccaagcccaa

SEQ ID NO: 914651 - RNA, 30 nt, Human
cccacagcagccuggcgaugcucacagccu

SEQ ID NO: 914652 - RNA, 24 nt, Human
cccacagcgcgucauccccucacc

SEQ ID NO: 914653 - RNA, 21 nt, Human
cccacaucugcucacucccaa

SEQ ID NO: 914654 - RNA, 20 nt, Human
ccccacagccagggcagagc

SEQ ID NO: 914655 - RNA, 19 nt, Human
ccccaggccgcucacaccc

SEQ ID NO: 914656 - RNA, 20 nt, Human
ccccaggccgcucacacccc

SEQ ID NO: 914657 - RNA, 18 nt, Human
ccccagggagaccagccc

SEQ ID NO: 914658 - RNA, 21 nt, Human
ccccagggagaccagcccucc

SEQ ID NO: 914659 - RNA, 24 nt, Human
ccccagggagaccagcccuccacc

SEQ ID NO: 914660 - RNA, 25 nt, Human
cccccacagcagccuggcgaugcuc

SEQ ID NO: 914661 - RNA, 22 nt, Human
ccccgugugguucagggaguga

SEQ ID NO: 914662 - RNA, 23 nt, Human
ccccuggggggccacagaggugu

SEQ ID NO: 914663 - RNA, 19 nt, Human
cccgcacccagaccgugcc

SEQ ID NO: 914664 - RNA, 21 nt, Human
cccgcccccacagcagccugg

SEQ ID NO: 914665 - RNA, 18 nt, Human
cccuccacccccacagcc

SEQ ID NO: 914666 - RNA, 20 nt, Human
ccgcgcgcucgggcggcggg

SEQ ID NO: 914667 - RNA, 19 nt, Human
ccgggaggcgggugcuucc

SEQ ID NO: 914668 - RNA, 23 nt, Human
ccucagugccacggcccccuccc

SEQ ID NO: 914669 - RNA, 21 nt, Human
ccuggcaaggucccuccaccc

SEQ ID NO: 914670 - RNA, 22 nt, Human
ccuggcagagcagauggcuggc

SEQ ID NO: 914671 - RNA, 18 nt, Human
ccuggggcugcuguggug

SEQ ID NO: 914672 - RNA, 28 nt, Human
ccuggggcugcugugguggacggacccu

SEQ ID NO: 914673 - RNA, 24 nt, Human
ccuggggggccacagaggugucug

SEQ ID NO: 914674 - RNA, 24 nt, Human
cgcagcaggugggaagcggguccc

SEQ ID NO: 914675 - RNA, 23 nt, Human
cucccaaugaccuccaagcccaa

SEQ ID NO: 914676 - RNA, 21 nt, Human
cugaggcugcucccgccccca

SEQ ID NO: 914677 - RNA, 20 nt, Human
cugcuucaaucccccagaug

SEQ ID NO: 914678 - RNA, 18 nt, Human
cuggugcugcugagaugg

SEQ ID NO: 914679 - RNA, 19 nt, Human
cuucacaaagcgaccucuc

SEQ ID NO: 914680 - RNA, 20 nt, Human
cuugacacugaggcugcucc

SEQ ID NO: 914681 - RNA, 21 nt, Human
gagcagauggcuggcuguggc

SEQ ID NO: 914682 - RNA, 21 nt, Human
gagggugccugggacuggagg

SEQ ID NO: 914683 - RNA, 23 nt, Human
gcaggcuccccuccugaagcgga

SEQ ID NO: 914684 - RNA, 19 nt, Human
gcaguccuggugcugcuga

SEQ ID NO: 914685 - RNA, 23 nt, Human
gccacccccacaucugcucacuc

SEQ ID NO: 914686 - RNA, 19 nt, Human
gcugcugugguggacggac

SEQ ID NO: 914687 - RNA, 20 nt, Human
gcuucaaucccccagaugca

SEQ ID NO: 914688 - RNA, 21 nt, Human
ggaccuggguaugcagggugg

SEQ ID NO: 914689 - RNA, 18 nt, Human
ggagaccagcccuccacc

SEQ ID NO: 914690 - RNA, 23 nt, Human
ggcagguuuuauugucacagcag

SEQ ID NO: 914691 - RNA, 19 nt, Human
ggcccgggcccgcugggga

SEQ ID NO: 914692 - RNA, 18 nt, Human
ggcccuugacacugaggc

SEQ ID NO: 914693 - RNA, 19 nt, Human
gggacgggggucagcgacu

SEQ ID NO: 914694 - RNA, 19 nt, Human
gggcccgggcagacgacgg

SEQ ID NO: 914695 - RNA, 22 nt, Human
gggugcuuccggggccgcgcgc

SEQ ID NO: 914696 - RNA, 23 nt, Human
gucauccccucaccagccggcac

SEQ ID NO: 914697 - RNA, 18 nt, Human
gugccugggacuggaggg

SEQ ID NO: 914698 - RNA, 18 nt, Human
gugcuggguugccaggga

SEQ ID NO: 914699 - RNA, 20 nt, Human
gugugguucagggagugagg

SEQ ID NO: 914700 - RNA, 22 nt, Human
uaaaccccgugugguucaggga

SEQ ID NO: 914701 - RNA, 22 nt, Human
ucacagccugcugaugguuucu

SEQ ID NO: 914702 - RNA, 19 nt, Human
ucagggagugagggcccgg

SEQ ID NO: 914703 - RNA, 18 nt, Human
uccacaaagcacgggaca

SEQ ID NO: 914704 - RNA, 22 nt, Human
ucccaggcaguccuggugcugc

SEQ ID NO: 914705 - RNA, 18 nt, Human
uccccaggccgcucacac

SEQ ID NO: 914706 - RNA, 19 nt, Human
uccccaggccgcucacacc

SEQ ID NO: 914707 - RNA, 19 nt, Human
uccuggugcugcugagaug

SEQ ID NO: 914708 - RNA, 22 nt, Human
ucugcacagcagggcuuccucc

SEQ ID NO: 914709 - RNA, 18 nt, Human
ugcagggugggcaugggg

SEQ ID NO: 914710 - RNA, 19 nt, Human
ugcagggugggcauggggc

SEQ ID NO: 914711 - RNA, 19 nt, Human
ugccacggcccccucccca

SEQ ID NO: 914712 - RNA, 18 nt, Human
ugcucuggacaccugggg

SEQ ID NO: 914713 - RNA, 23 nt, Human
ugcucuggacaccugggguugcu

SEQ ID NO: 914714 - RNA, 22 nt, Human
ugcugcugagaugggcgcugcc

SEQ ID NO: 914715 - RNA, 19 nt, Human
ugcugugcucgccaccaug

SEQ ID NO: 914716 - RNA, 22 nt, Human
uggagugcggccagccuggcug

SEQ ID NO: 914717 - RNA, 18 nt, Human
uggcaaggucccuccacc

SEQ ID NO: 914718 - RNA, 22 nt, Human
uggcaaggucccuccaccccca

SEQ ID NO: 914719 - RNA, 24 nt, Human
uggccacccccacaucugcucacu

SEQ ID NO: 914720 - RNA, 18 nt, Human
uggcuggcuguggccgug

SEQ ID NO: 914721 - RNA, 19 nt, Human
ugggaagcgggucccaagg

SEQ ID NO: 914722 - RNA, 19 nt, Human
ugggaggcccaugaaggga

SEQ ID NO: 914723 - RNA, 19 nt, Human
uggggggccacagaggugu

SEQ ID NO: 914724 - RNA, 19 nt, Human
uggugccacccuggcagag

SEQ ID NO: 914725 - RNA, 22 nt, Human
uggugccacccuggcagagcag

SEQ ID NO: 914726 - RNA, 19 nt, Human
uguggccgugugguggugc

SEQ ID NO: 914727 - RNA, 19 nt, Human
aaaccuauguuuaauuuaa

SEQ ID NO: 914728 - RNA, 23 nt, Human
aacaaugaaagcacagguagaaa

SEQ ID NO: 914729 - RNA, 18 nt, Human
aauacaaaagaagauaga

SEQ ID NO: 914730 - RNA, 20 nt, Human
acaaugaaagcacagguaga

SEQ ID NO: 914731 - RNA, 19 nt, Human
auacugcuuuuaacuguag

SEQ ID NO: 914732 - RNA, 19 nt, Human
caacaaagaugccuuacuu

SEQ ID NO: 914733 - RNA, 21 nt, Human
caacacaaaagacuaauucug

SEQ ID NO: 914734 - RNA, 21 nt, Human
cacacaauuaaaacaaaugua

SEQ ID NO: 914735 - RNA, 23 nt, Human
cacagguagaaaauaaacaacac

SEQ ID NO: 914736 - RNA, 20 nt, Human
cagaggcccggaagugaaaa

SEQ ID NO: 914737 - RNA, 22 nt, Human
cagaggcccggaagugaaaaaa

SEQ ID NO: 914738 - RNA, 19 nt, Human
caguacuccacugaaggag

SEQ ID NO: 914739 - RNA, 19 nt, Human
cugacgcauauaucuuccu

SEQ ID NO: 914740 - RNA, 22 nt, Human
cugugcugucuuugacaacaaa

SEQ ID NO: 914741 - RNA, 22 nt, Human
uaaaaauacugcuuuuaacugu

SEQ ID NO: 914742 - RNA, 21 nt, Human
uaaacaacacaaaagacuaau

SEQ ID NO: 914743 - RNA, 18 nt, Human
ugaaaaaacaaugaaagc

SEQ ID NO: 914744 - RNA, 19 nt, Human
ugaaaaaacaaugaaagca

SEQ ID NO: 914745 - RNA, 21 nt, Human
ugaaaaaacaaugaaagcaca

SEQ ID NO: 914746 - RNA, 19 nt, Human
ugaaagcacagguagaaaa

SEQ ID NO: 914747 - RNA, 25 nt, Human
ugaaagcacagguagaaaauaaaca

SEQ ID NO: 914748 - RNA, 24 nt, Human
uuaauacccugugcugucuuugac

SEQ ID NO: 914749 - RNA, 23 nt, Human
uugaauuaauugaugagguuuau

SEQ ID NO: 914750 - RNA, 19 nt, Human
uugacucugcuccaaauau

SEQ ID NO: 914751 - RNA, 18 nt, Human
uuuuuuuuuuuuuuuuug

SEQ ID NO: 914752 - RNA, 24 nt, Human
aagcagaacucagguaccauguag

SEQ ID NO: 914753 - RNA, 19 nt, Human
aaugaaccagcugagcccc

SEQ ID NO: 914754 - RNA, 21 nt, Human
acaauauuucaaaacaagccc

SEQ ID NO: 914755 - RNA, 21 nt, Human
aggaaaaacaacauaaaugaa

SEQ ID NO: 914756 - RNA, 22 nt, Human
aggaaaaacaacauaaaugaaa

SEQ ID NO: 914757 - RNA, 21 nt, Human
aggaagcagaacucagguacc

SEQ ID NO: 914758 - RNA, 21 nt, Human
caaagguugcuccuaacgugg

SEQ ID NO: 914759 - RNA, 27 nt, Human
caacauaaaugaaccagcugagcccca

SEQ ID NO: 914760 - RNA, 24 nt, Human
gguacaggaaaaacaacauaaaug

SEQ ID NO: 914761 - RNA, 22 nt, Human
uaaaugaaccagcugagcccca

SEQ ID NO: 914762 - RNA, 20 nt, Human
uacaggaaaaacaacauaaa

SEQ ID NO: 914763 - RNA, 22 nt, Human
uacucugaagucuccaauauac

SEQ ID NO: 914764 - RNA, 25 nt, Human
uacucugaagucuccaauauacaaa

SEQ ID NO: 914765 - RNA, 18 nt, Human
ucaaaacaagcccuucaa

SEQ ID NO: 914766 - RNA, 22 nt, Human
ucaaaacaagcccuucaagacu

SEQ ID NO: 914767 - RNA, 22 nt, Human
ucuccaauauacaaagguugcu

SEQ ID NO: 914768 - RNA, 18 nt, Human
uggaaaauaugguaacuu

SEQ ID NO: 914769 - RNA, 20 nt, Human
uggaaaauaugguaacuuga

SEQ ID NO: 914770 - RNA, 31 nt, Human
uuccuugcugguuacucugaagucuccaauu

SEQ ID NO: 914771 - RNA, 20 nt, Human
uugaugggucaaucccaguu

SEQ ID NO: 914772 - RNA, 18 nt, Human
aaauguguuuauacuaua

SEQ ID NO: 914773 - RNA, 19 nt, Human
aaguaccccgggauuugac

SEQ ID NO: 914774 - RNA, 22 nt, Human
acacuacacuucagcugcugca

SEQ ID NO: 914775 - RNA, 19 nt, Human
acccguccgagcccuccuc

SEQ ID NO: 914776 - RNA, 20 nt, Human
accgccagucccaagaaaaa

SEQ ID NO: 914777 - RNA, 21 nt, Human
acuacacuucagcugcugcag

SEQ ID NO: 914778 - RNA, 23 nt, Human
aggaaccccggugguccugggag

SEQ ID NO: 914779 - RNA, 18 nt, Human
cacaaguaccccgggauu

SEQ ID NO: 914780 - RNA, 25 nt, Human
cacaaguaccccgggauuugacccc

SEQ ID NO: 914781 - RNA, 21 nt, Human
cagaggcucacaacgagguca

SEQ ID NO: 914782 - RNA, 21 nt, Human
cagcagagagaagaagccacg

SEQ ID NO: 914783 - RNA, 21 nt, Human
cagucccaagaaaacacuaca

SEQ ID NO: 914784 - RNA, 18 nt, Human
cauaaguaaacuagucaa

SEQ ID NO: 914785 - RNA, 19 nt, Human
ccccggugguccugggagg

SEQ ID NO: 914786 - RNA, 22 nt, Human
cccuaggccucgggaaaguguc

SEQ ID NO: 914787 - RNA, 19 nt, Human
ccgagcccuccucgagggc

SEQ ID NO: 914788 - RNA, 19 nt, Human
cgccagucccaagaaaaca

SEQ ID NO: 914789 - RNA, 22 nt, Human
cgccgaacucccgggaaagcaa

SEQ ID NO: 914790 - RNA, 23 nt, Human
cgucagcagcggggaaguuguuu

SEQ ID NO: 914791 - RNA, 25 nt, Human
cugcagccccagcaaacgccgaacu

SEQ ID NO: 914792 - RNA, 21 nt, Human
cuucaggaaccccgguggucc

SEQ ID NO: 914793 - RNA, 21 nt, Human
gagaagaagccacgcuaaaga

SEQ ID NO: 914794 - RNA, 18 nt, Human
gcuaaagagucuccacaa

SEQ ID NO: 914795 - RNA, 21 nt, Human
ggagauggaacccgggagaga

SEQ ID NO: 914796 - RNA, 22 nt, Human
ggauuugaccccuccagccccc

SEQ ID NO: 914797 - RNA, 22 nt, Human
guucagaggcucacaacgaggu

SEQ ID NO: 914798 - RNA, 19 nt, Human
uaggccucgggaaaguguc

SEQ ID NO: 914799 - RNA, 22 nt, Human
ucaaaaucguucagaggcucac

SEQ ID NO: 914800 - RNA, 18 nt, Human
ucagcagagagaagaagc

SEQ ID NO: 914801 - RNA, 24 nt, Human
ucccaagaaaacacuacacuucag

SEQ ID NO: 914802 - RNA, 20 nt, Human
ucccgggccucgucuuccuc

SEQ ID NO: 914803 - RNA, 24 nt, Human
ucucuagaaaugccuuuucucgag

SEQ ID NO: 914804 - RNA, 23 nt, Human
ucuucaggaaccccggugguccu

SEQ ID NO: 914805 - RNA, 22 nt, Human
ucuucauagacaggagaugggc

SEQ ID NO: 914806 - RNA, 24 nt, Human
ugaaaauuaagcaaaugaaucugu

SEQ ID NO: 914807 - RNA, 20 nt, Human
ugaaacaguaauauggagaa

SEQ ID NO: 914808 - RNA, 21 nt, Human
ugaaacaguaauauggagaca

SEQ ID NO: 914809 - RNA, 21 nt, Human
uuuugggugucauuuagucag

SEQ ID NO: 914810 - RNA, 20 nt, Human
uuuuuaauagcaaaaaugug

SEQ ID NO: 914811 - RNA, 21 nt, Human
acaaaaaggggcuacugucaa

SEQ ID NO: 914812 - RNA, 22 nt, Human
acagcuuugagggcacaugggg

SEQ ID NO: 914813 - RNA, 23 nt, Human
agacagguagggaauauguccag

SEQ ID NO: 914814 - RNA, 19 nt, Human
aggaauguuagcuccucug

SEQ ID NO: 914815 - RNA, 21 nt, Human
auggggcagaggcccucgaag

SEQ ID NO: 914816 - RNA, 21 nt, Human
cacugcauguggcggcagggc

SEQ ID NO: 914817 - RNA, 18 nt, Human
cagaggcccucgaagguc

SEQ ID NO: 914818 - RNA, 20 nt, Human
cauccauugauugucgcugc

SEQ ID NO: 914819 - RNA, 20 nt, Human
cugcgccacccacgugcugc

SEQ ID NO: 914820 - RNA, 18 nt, Human
gcgccacccacgugcugc

SEQ ID NO: 914821 - RNA, 18 nt, Human
gggcagggaggucgcagg

SEQ ID NO: 914822 - RNA, 23 nt, Human
uaaaaaaaggaacacgugcucac

SEQ ID NO: 914823 - RNA, 19 nt, Human
uccauggcguuaccaaggc

SEQ ID NO: 914824 - RNA, 20 nt, Human
uccauggcguuaccaaggcu

SEQ ID NO: 914825 - RNA, 21 nt, Human
uccauggcguuaccaaggcug

SEQ ID NO: 914826 - RNA, 21 nt, Human
uccauggcguuaccaaggcug

SEQ ID NO: 914827 - RNA, 24 nt, Human
ucgcagggcuccaugauuguggga

SEQ ID NO: 914828 - RNA, 19 nt, Human
ucgcugcaguccauggcgu

SEQ ID NO: 914829 - RNA, 18 nt, Human
ucuuugggccacaggccu

SEQ ID NO: 914830 - RNA, 22 nt, Human
ucuuuuuuuauacacaauacuu

SEQ ID NO: 914831 - RNA, 21 nt, Human
ugaaauaagacagguagggaa

SEQ ID NO: 914832 - RNA, 21 nt, Human
uggcggcagggcagggagguc

SEQ ID NO: 914833 - RNA, 21 nt, Human
uguccagugcaaacagaggac

SEQ ID NO: 914834 - RNA, 18 nt, Human
ugugaaacacaaaaaggg

SEQ ID NO: 914835 - RNA, 22 nt, Human
uuggguuuuuacuauuuugggu

SEQ ID NO: 914836 - RNA, 22 nt, Human
uuuuuggguuuuuacuauuuug

SEQ ID NO: 914837 - RNA, 18 nt, Human
uuuuuuuuuuuuuugggu

SEQ ID NO: 914838 - RNA, 21 nt, Human
agggugcacgugaaggggugg

SEQ ID NO: 914839 - RNA, 21 nt, Human
caacacaagaacagccuaaca

SEQ ID NO: 914840 - RNA, 24 nt, Human
cagucucagguauuuuuuuuccuu

SEQ ID NO: 914841 - RNA, 18 nt, Human
ugaagggguggcaaggga

SEQ ID NO: 914842 - RNA, 21 nt, Human
uggagacagcagcaaauucag

SEQ ID NO: 914843 - RNA, 20 nt, Human
agagauggcauccucgcucc

SEQ ID NO: 914844 - RNA, 20 nt, Human
agcuggcccugaacuccugg

SEQ ID NO: 914845 - RNA, 24 nt, Human
agcuggcccugaacuccugggcuc

SEQ ID NO: 914846 - RNA, 19 nt, Human
aggcaggagaggggcccug

SEQ ID NO: 914847 - RNA, 18 nt, Human
aguagcugggauuacagg

SEQ ID NO: 914848 - RNA, 22 nt, Human
auuauccaaagcuggcccugaa

SEQ ID NO: 914849 - RNA, 18 nt, Human
cagaguagcugggauuac

SEQ ID NO: 914850 - RNA, 20 nt, Human
cagaguagcugggauuacag

SEQ ID NO: 914851 - RNA, 21 nt, Human
cagaguagcugggauuacagg

SEQ ID NO: 914852 - RNA, 21 nt, Human
cagaguagcugggauuacagg

SEQ ID NO: 914853 - RNA, 24 nt, Human
cagaguagcugggauuacaggugu

SEQ ID NO: 914854 - RNA, 22 nt, Human
caggagccuuccccaaaccagu

SEQ ID NO: 914855 - RNA, 22 nt, Human
cauucaguuuugagagggcugu

SEQ ID NO: 914856 - RNA, 19 nt, Human
ccagcagagccguccaggc

SEQ ID NO: 914857 - RNA, 19 nt, Human
ccauuauccaaagcuggcc

SEQ ID NO: 914858 - RNA, 18 nt, Human
cccugaacuccugggcuc

SEQ ID NO: 914859 - RNA, 21 nt, Human
ccuccagggugaccagcacuu

SEQ ID NO: 914860 - RNA, 20 nt, Human
ccucgcucccauuauccaaa

SEQ ID NO: 914861 - RNA, 22 nt, Human
cuguaccuggccucaccauuca

SEQ ID NO: 914862 - RNA, 19 nt, Human
gaggagagccgggcucagg

SEQ ID NO: 914863 - RNA, 19 nt, Human
gaguagcugggauuacagg

SEQ ID NO: 914864 - RNA, 24 nt, Human
gaguagcugggauuacaggugugc

SEQ ID NO: 914865 - RNA, 21 nt, Human
gagugaggagagccgggcuca

SEQ ID NO: 914866 - RNA, 18 nt, Human
gauuacaggugugcgcca

SEQ ID NO: 914867 - RNA, 21 nt, Human
gauuacaggugugcgccacug

SEQ ID NO: 914868 - RNA, 24 nt, Human
gauuacaggugugcgccacuguac

SEQ ID NO: 914869 - RNA, 21 nt, Human
gcaggagaggggcccugugga

SEQ ID NO: 914870 - RNA, 19 nt, Human
gccacuguaccuggccuca

SEQ ID NO: 914871 - RNA, 24 nt, Human
ggagccuuccccaaaccagugcac

SEQ ID NO: 914872 - RNA, 18 nt, Human
ggagccuuccccaaaccg

SEQ ID NO: 914873 - RNA, 18 nt, Human
gggagaccagcagagccg

SEQ ID NO: 914874 - RNA, 21 nt, Human
ggggacggggagaccagcaga

SEQ ID NO: 914875 - RNA, 18 nt, Human
guagcugggauuacaggu

SEQ ID NO: 914876 - RNA, 22 nt, Human
ucagaguagcugggauuacagg

SEQ ID NO: 914877 - RNA, 24 nt, Human
ucagaguagcugggauuacaggug

SEQ ID NO: 914878 - RNA, 22 nt, Human
uccccaaaccagugcaccucca

SEQ ID NO: 914879 - RNA, 18 nt, Human
uccugggcucacuugauu

SEQ ID NO: 914880 - RNA, 24 nt, Human
ugaggugagugaggagagccgggc

SEQ ID NO: 914881 - RNA, 21 nt, Human
ugccucaggcuucagaguagc

SEQ ID NO: 914882 - RNA, 22 nt, Human
ugccucaggcuucagaguagcu

SEQ ID NO: 914883 - RNA, 24 nt, Human
ugccucaggcuucagaguagcugg

SEQ ID NO: 914884 - RNA, 21 nt, Human
ugggauuacaggugugcgcca

SEQ ID NO: 914885 - RNA, 22 nt, Human
ugggauuacaggugugcgccac

SEQ ID NO: 914886 - RNA, 22 nt, Human
ugggauuacaggugugcgccac

SEQ ID NO: 914887 - RNA, 22 nt, Human
ugggauuacaggugugcgccac

SEQ ID NO: 914888 - RNA, 24 nt, Human
ugggauuacaggugugcgccacug

SEQ ID NO: 914889 - RNA, 19 nt, Human
uguggaggggccgccuggg

SEQ ID NO: 914890 - RNA, 20 nt, Human
uuccccaaaccagugcaccu

SEQ ID NO: 914891 - RNA, 20 nt, Human
aauccuuuuuuuuuuuuuuu

SEQ ID NO: 914892 - RNA, 20 nt, Human
aauccuuuuuuuuuuuuuuu

SEQ ID NO: 914893 - RNA, 19 nt, Human
aggcaggagaggggcccug

SEQ ID NO: 914894 - RNA, 22 nt, Human
aggggacggggagaccagcaga

SEQ ID NO: 914895 - RNA, 21 nt, Human
aggugaguggggagagccagg

SEQ ID NO: 914896 - RNA, 19 nt, Human
ccagcagagcuguccaggc

SEQ ID NO: 914897 - RNA, 18 nt, Human
ccccaaaccaguacaccu

SEQ ID NO: 914898 - RNA, 18 nt, Human
ccccagagggcugugggg

SEQ ID NO: 914899 - RNA, 19 nt, Human
ccccagagggcuguggggg

SEQ ID NO: 914900 - RNA, 21 nt, Human
ccccagagggcugugggggcc

SEQ ID NO: 914901 - RNA, 21 nt, Human
ccuccagggugaccagcacuu

SEQ ID NO: 914902 - RNA, 21 nt, Human
gcaggagaggggcccugugga

SEQ ID NO: 914903 - RNA, 18 nt, Human
ggcugaggugagugggga

SEQ ID NO: 914904 - RNA, 19 nt, Human
ggggagaccagcagagcug

SEQ ID NO: 914905 - RNA, 22 nt, Human
uccccaaaccaguacaccucca

SEQ ID NO: 914906 - RNA, 19 nt, Human
ucccuugccuaauugcucc

SEQ ID NO: 914907 - RNA, 23 nt, Human
ugaggugaguggggagagccagg

SEQ ID NO: 914908 - RNA, 19 nt, Human
ugaguggggagagccaggg

SEQ ID NO: 914909 - RNA, 19 nt, Human
ugccugagggcugagguga

SEQ ID NO: 914910 - RNA, 20 nt, Human
ugccugagggcugaggugag

SEQ ID NO: 914911 - RNA, 24 nt, Human
uguggaggggcugccugagggcug

SEQ ID NO: 914912 - RNA, 24 nt, Human
uucaaauccuuuuuuuuuuuuuuu

SEQ ID NO: 914913 - RNA, 29 nt, Human
uucaaauccuuuuuuuuuuuuuuuuuuuu

SEQ ID NO: 914914 - RNA, 21 nt, Human
aagaaucauucuuaaagccaa

SEQ ID NO: 914915 - RNA, 21 nt, Human
aagcccgaggccuuuuccggc

SEQ ID NO: 914916 - RNA, 23 nt, Human
accaccggcgucccccgccgguc

SEQ ID NO: 914917 - RNA, 18 nt, Human
acgcacagcuugggaacg

SEQ ID NO: 914918 - RNA, 19 nt, Human
acugaacucucacucaagu

SEQ ID NO: 914919 - RNA, 21 nt, Human
cacagcuugggaacgcagagg

SEQ ID NO: 914920 - RNA, 22 nt, Human
cacugacagccagugccuuggc

SEQ ID NO: 914921 - RNA, 18 nt, Human
cagaggaugccaaguucu

SEQ ID NO: 914922 - RNA, 21 nt, Human
ccacucccguaacugaacgug

SEQ ID NO: 914923 - RNA, 26 nt, Human
ccagaacgcacagcuugggaacgcag

SEQ ID NO: 914924 - RNA, 24 nt, Human
cccaauguugauaccugcccacaa

SEQ ID NO: 914925 - RNA, 19 nt, Human
cccacaaaauauucucacc

SEQ ID NO: 914926 - RNA, 23 nt, Human
cccacccucaccauucacagacc

SEQ ID NO: 914927 - RNA, 19 nt, Human
cccggugcccccgcagccg

SEQ ID NO: 914928 - RNA, 20 nt, Human
ccgcugccgccaccaccggc

SEQ ID NO: 914929 - RNA, 22 nt, Human
ccgcugccgccaccaccggcgu

SEQ ID NO: 914930 - RNA, 20 nt, Human
cggcccggugcccccgcagc

SEQ ID NO: 914931 - RNA, 20 nt, Human
cuacuagaccagcuuggcca

SEQ ID NO: 914932 - RNA, 18 nt, Human
cuagaccagcuuggccau

SEQ ID NO: 914933 - RNA, 18 nt, Human
cucccacccucaccauuc

SEQ ID NO: 914934 - RNA, 26 nt, Human
cucucugcgcugucuugucuccugac

SEQ ID NO: 914935 - RNA, 23 nt, Human
cuguggaugcaggccuaccccuc

SEQ ID NO: 914936 - RNA, 19 nt, Human
cuuccccaauguugauacc

SEQ ID NO: 914937 - RNA, 19 nt, Human
gaagacaaccuuuacugca

SEQ ID NO: 914938 - RNA, 21 nt, Human
gacugaacucucacucaaguu

SEQ ID NO: 914939 - RNA, 22 nt, Human
gccuuggccuggauccucucug

SEQ ID NO: 914940 - RNA, 23 nt, Human
ggaugcaggccuaccccuccuca

SEQ ID NO: 914941 - RNA, 19 nt, Human
ggcccggugcccccgcagc

SEQ ID NO: 914942 - RNA, 18 nt, Human
gguggcgccgcggcccgg

SEQ ID NO: 914943 - RNA, 21 nt, Human
guggaugcaggccuaccccuc

SEQ ID NO: 914944 - RNA, 24 nt, Human
uauaagaaucauucuuaaagccaa

SEQ ID NO: 914945 - RNA, 23 nt, Human
ucacaacaaacuuggggcggugc

SEQ ID NO: 914946 - RNA, 19 nt, Human
ucacagaccaucacgacac

SEQ ID NO: 914947 - RNA, 27 nt, Human
ucaguagcugguccagaaccggggucc

SEQ ID NO: 914948 - RNA, 19 nt, Human
uccccaauguugauaccug

SEQ ID NO: 914949 - RNA, 26 nt, Human
uccccacacuuacuuacuuacugcuc

SEQ ID NO: 914950 - RNA, 20 nt, Human
uccucaguccagccucaucu

SEQ ID NO: 914951 - RNA, 24 nt, Human
ugacagccagugccuuggccugga

SEQ ID NO: 914952 - RNA, 18 nt, Human
ugacucccacccucacca

SEQ ID NO: 914953 - RNA, 18 nt, Human
ugauaccugcccacaaaa

SEQ ID NO: 914954 - RNA, 22 nt, Human
ugcaguuguaaauuugcauuua

SEQ ID NO: 914955 - RNA, 23 nt, Human
ugccaagcccgaggccuuuuccg

SEQ ID NO: 914956 - RNA, 20 nt, Human
ugucuugucuccugacuccc

SEQ ID NO: 914957 - RNA, 21 nt, Human
ugucuugucuccugacuccca

SEQ ID NO: 914958 - RNA, 20 nt, Human
uuaauauuucacaauuccug

SEQ ID NO: 914959 - RNA, 23 nt, Human
uuccucguguuaggggcaaaggu

SEQ ID NO: 914960 - RNA, 19 nt, Human
uugacgcugauuuaggcau

SEQ ID NO: 914961 - RNA, 24 nt, Human
uuuuuuuuuuuuuuuuuuuuucag

SEQ ID NO: 914962 - RNA, 20 nt, Human
aaaaaaagaaaaaaaaaagu

SEQ ID NO: 914963 - RNA, 20 nt, Human
aaaaaacgccuuucaacuga

SEQ ID NO: 914964 - RNA, 22 nt, Human
aaacaaaagcaaaaaguuauga

SEQ ID NO: 914965 - RNA, 23 nt, Human
aaacaaaagcaaaaaguuaugaa

SEQ ID NO: 914966 - RNA, 25 nt, Human
aaacaaaagcaaaaaguuaugaauu

SEQ ID NO: 914967 - RNA, 18 nt, Human
aaaccaaagaaaaauagg

SEQ ID NO: 914968 - RNA, 26 nt, Human
aaaggcaccaccauuccauaccaaag

SEQ ID NO: 914969 - RNA, 23 nt, Human
aaagguuaaaaaaaaaaaauuca

SEQ ID NO: 914970 - RNA, 23 nt, Human
aaagucacauucccaucaugcaa

SEQ ID NO: 914971 - RNA, 23 nt, Human
aaauauauacuaagcacaauaua

SEQ ID NO: 914972 - RNA, 22 nt, Human
aacauauuccuaucuccuacca

SEQ ID NO: 914973 - RNA, 20 nt, Human
aacaugguaaaccccggucu

SEQ ID NO: 914974 - RNA, 21 nt, Human
aacaugguaaaccccggucuc

SEQ ID NO: 914975 - RNA, 18 nt, Human
aagagaagaaggucaaag

SEQ ID NO: 914976 - RNA, 24 nt, Human
aagcaaacaaaauaaacacucucc

SEQ ID NO: 914977 - RNA, 23 nt, Human
aagcaggagagaaaugagccaug

SEQ ID NO: 914978 - RNA, 23 nt, Human
aagcuauucacaaacccugcuca

SEQ ID NO: 914979 - RNA, 21 nt, Human
aaggcaccaccauuccauacc

SEQ ID NO: 914980 - RNA, 24 nt, Human
aaucacuucaaccagggaggcaga

SEQ ID NO: 914981 - RNA, 19 nt, Human
aaucagauccccuaaccug

SEQ ID NO: 914982 - RNA, 18 nt, Human
aauucaggugguuccuuc

SEQ ID NO: 914983 - RNA, 18 nt, Human
acaaaacccugggcaggg

SEQ ID NO: 914984 - RNA, 22 nt, Human
acacugcaggacaaaaaugaac

SEQ ID NO: 914985 - RNA, 23 nt, Human
acagagcaagacucugucuaaaa

SEQ ID NO: 914986 - RNA, 25 nt, Human
acaugccucaaaaagcaaacaaaau

SEQ ID NO: 914987 - RNA, 22 nt, Human
acgacacagagaaacguguguc

SEQ ID NO: 914988 - RNA, 19 nt, Human
acugaaaugaggagcccug

SEQ ID NO: 914989 - RNA, 24 nt, Human
acugcacuccagccugggcaacag

SEQ ID NO: 914990 - RNA, 24 nt, Human
acugcacuccagccugggcaacag

SEQ ID NO: 914991 - RNA, 22 nt, Human
agaaaacauuccuccacucaaa

SEQ ID NO: 914992 - RNA, 22 nt, Human
agaaaaguggcuugaggccaag

SEQ ID NO: 914993 - RNA, 18 nt, Human
agaaauuggaagagaaau

SEQ ID NO: 914994 - RNA, 21 nt, Human
agagcaagacucugucuaaaa

SEQ ID NO: 914995 - RNA, 23 nt, Human
agagccgcugggaguccugagac

SEQ ID NO: 914996 - RNA, 21 nt, Human
agaggcaagggaauugcuucc

SEQ ID NO: 914997 - RNA, 20 nt, Human
agaggcaggcagaucaccug

SEQ ID NO: 914998 - RNA, 24 nt, Human
agagguugcagugagcuaaaaucg

SEQ ID NO: 914999 - RNA, 22 nt, Human
agaucaccugaggucaggaguu

SEQ ID NO: 915000 - RNA, 25 nt, Human
agaucaccugaggucaggaguuuga

SEQ ID NO: 915001 - RNA, 22 nt, Human
agcaaugaacagaagagacauu

SEQ ID NO: 915002 - RNA, 24 nt, Human
agcacacaagugacauauaaacau

SEQ ID NO: 915003 - RNA, 18 nt, Human
agcaguacaacuugcuuc

SEQ ID NO: 915004 - RNA, 24 nt, Human
agccugggcaacagagcaagacuc

SEQ ID NO: 915005 - RNA, 20 nt, Human
agccugggcaacaugguaaa

SEQ ID NO: 915006 - RNA, 23 nt, Human
agccugggcaacaugguaaaccc

SEQ ID NO: 915007 - RNA, 22 nt, Human
agcucauggggguugggguggg

SEQ ID NO: 915008 - RNA, 19 nt, Human
aggcacacuucccuuuugg

SEQ ID NO: 915009 - RNA, 19 nt, Human
aggcagaggcaggcagauc

SEQ ID NO: 915010 - RNA, 19 nt, Human
aggcagagguugcagugag

SEQ ID NO: 915011 - RNA, 20 nt, Human
aggcagagguugcagugagc

SEQ ID NO: 915012 - RNA, 23 nt, Human
aggcagagguugcagugagcuaa

SEQ ID NO: 915013 - RNA, 26 nt, Human
aggcagaucaccugaggucaggaguu

SEQ ID NO: 915014 - RNA, 22 nt, Human
aggcaggagaaucacuucaacc

SEQ ID NO: 915015 - RNA, 22 nt, Human
aggcaggcagaucaccugaggu

SEQ ID NO: 915016 - RNA, 26 nt, Human
aggcaggcagaucaccugaggucagg

SEQ ID NO: 915017 - RNA, 19 nt, Human
aggcugaggcaggagaauc

SEQ ID NO: 915018 - RNA, 21 nt, Human
aggcuggggaaauaugucuuc

SEQ ID NO: 915019 - RNA, 24 nt, Human
agggaggcagagguugcagugagc

SEQ ID NO: 915020 - RNA, 20 nt, Human
aggugaagcgaggugggggg

SEQ ID NO: 915021 - RNA, 21 nt, Human
aggugaagcgagguggggggc

SEQ ID NO: 915022 - RNA, 24 nt, Human
aggugugguggcucacaccuguaa

SEQ ID NO: 915023 - RNA, 21 nt, Human
agucaaacuucuugguuuccu

SEQ ID NO: 915024 - RNA, 24 nt, Human
aucgugccacugcacuccagccug

SEQ ID NO: 915025 - RNA, 25 nt, Human
auggggcagcgggagggggcugaaa

SEQ ID NO: 915026 - RNA, 21 nt, Human
auugaguaggaaagcucaaag

SEQ ID NO: 915027 - RNA, 21 nt, Human
caaaaaacgccuuucaacuga

SEQ ID NO: 915028 - RNA, 20 nt, Human
caaacagccaccagggccag

SEQ ID NO: 915029 - RNA, 18 nt, Human
caaagcuauucacaaacc

SEQ ID NO: 915030 - RNA, 23 nt, Human
caaagcuauucacaaacccugcu

SEQ ID NO: 915031 - RNA, 23 nt, Human
caacagcaacuucacaagguaac

SEQ ID NO: 915032 - RNA, 24 nt, Human
cacaaccccaaagaggaguccucu

SEQ ID NO: 915033 - RNA, 24 nt, Human
cacaccuguaaucccagcacucug

SEQ ID NO: 915034 - RNA, 24 nt, Human
cacagaaagaaucaguaauuucca

SEQ ID NO: 915035 - RNA, 22 nt, Human
caccacaggucaaacucaucuu

SEQ ID NO: 915036 - RNA, 20 nt, Human
caccuguaaucccagcacuc

SEQ ID NO: 915037 - RNA, 24 nt, Human
caccuguaaucccagcacucuggg

SEQ ID NO: 915038 - RNA, 19 nt, Human
cacgacacagagaaacgug

SEQ ID NO: 915039 - RNA, 22 nt, Human
cacuccugucuauccccccacc

SEQ ID NO: 915040 - RNA, 19 nt, Human
cacucucccucucacuccu

SEQ ID NO: 915041 - RNA, 18 nt, Human
cacugcacuccagccugg

SEQ ID NO: 915042 - RNA, 19 nt, Human
cacugcacuccagccuggg

SEQ ID NO: 915043 - RNA, 21 nt, Human
cacugcacuccagccugggca

SEQ ID NO: 915044 - RNA, 23 nt, Human
cacugcacuccagccugggcaac

SEQ ID NO: 915045 - RNA, 24 nt, Human
cacugcacuccagccugggcaaca

SEQ ID NO: 915046 - RNA, 27 nt, Human
cacugcacuccagccugggcaacagag

SEQ ID NO: 915047 - RNA, 18 nt, Human
cagaagccucauaguacu

SEQ ID NO: 915048 - RNA, 24 nt, Human
cagaucaccugaggucaggaguuu

SEQ ID NO: 915049 - RNA, 18 nt, Human
cagcacucugggaggcag

SEQ ID NO: 915050 - RNA, 26 nt, Human
cagccaaggacaagagcaguagacau

SEQ ID NO: 915051 - RNA, 24 nt, Human
cagcuacucgggaggcugaggcag

SEQ ID NO: 915052 - RNA, 22 nt, Human
cagcucacagacacugcaggac

SEQ ID NO: 915053 - RNA, 19 nt, Human
caggacaaaaaugaacacc

SEQ ID NO: 915054 - RNA, 18 nt, Human
caggaugagagcacagua

SEQ ID NO: 915055 - RNA, 22 nt, Human
caguagacauucuuugcggaac

SEQ ID NO: 915056 - RNA, 19 nt, Human
cagucaaguggaauaugua

SEQ ID NO: 915057 - RNA, 23 nt, Human
cagugcaaugaaacacacgcucc

SEQ ID NO: 915058 - RNA, 18 nt, Human
cauaacaccagugaauca

SEQ ID NO: 915059 - RNA, 21 nt, Human
caucaaauauauacuaagcac

SEQ ID NO: 915060 - RNA, 20 nt, Human
caucagggugcaaucugagg

SEQ ID NO: 915061 - RNA, 26 nt, Human
caugcaagcacauuaaaauauauggc

SEQ ID NO: 915062 - RNA, 18 nt, Human
ccaaacagccaccagggc

SEQ ID NO: 915063 - RNA, 24 nt, Human
ccaaaggaaagcauucaaagcuag

SEQ ID NO: 915064 - RNA, 21 nt, Human
ccaauccauagacagcccgcc

SEQ ID NO: 915065 - RNA, 19 nt, Human
ccacgacacagagaaacgu

SEQ ID NO: 915066 - RNA, 20 nt, Human
ccacugcacuccagccuggg

SEQ ID NO: 915067 - RNA, 20 nt, Human
ccacugcacuccagccuggg

SEQ ID NO: 915068 - RNA, 21 nt, Human
ccacugcacuccagccugggc

SEQ ID NO: 915069 - RNA, 23 nt, Human
ccacugcacuccagccugggcaa

SEQ ID NO: 915070 - RNA, 24 nt, Human
ccacugcacuccagccugggcaac

SEQ ID NO: 915071 - RNA, 21 nt, Human
ccagaaaaguggcuugaggcc

SEQ ID NO: 915072 - RNA, 20 nt, Human
ccagucaaguggaauaugua

SEQ ID NO: 915073 - RNA, 23 nt, Human
ccauuccauaccaaaggcaagga

SEQ ID NO: 915074 - RNA, 23 nt, Human
cccaauauucuuuggaccagaaa

SEQ ID NO: 915075 - RNA, 22 nt, Human
cccacauguuugcugggccaaa

SEQ ID NO: 915076 - RNA, 24 nt, Human
cccaguaggaacacaaaaaacgcc

SEQ ID NO: 915077 - RNA, 21 nt, Human
ccccaaagaggaguccucucc

SEQ ID NO: 915078 - RNA, 22 nt, Human
ccccaauccauagacagcccgc

SEQ ID NO: 915079 - RNA, 23 nt, Human
ccccccuagagccccacaucacc

SEQ ID NO: 915080 - RNA, 21 nt, Human
cccccuuccacaguccauuuc

SEQ ID NO: 915081 - RNA, 23 nt, Human
ccggucucaagaaauauacugaa

SEQ ID NO: 915082 - RNA, 21 nt, Human
ccguaugcuaagcccagugcc

SEQ ID NO: 915083 - RNA, 24 nt, Human
ccuaaaccagggcaucagggugca

SEQ ID NO: 915084 - RNA, 18 nt, Human
ccucaaaaagcaaacaaa

SEQ ID NO: 915085 - RNA, 21 nt, Human
ccuccuccuucagcucuccca

SEQ ID NO: 915086 - RNA, 20 nt, Human
ccugcauaaagugugaaaac

SEQ ID NO: 915087 - RNA, 20 nt, Human
ccugccccacgacacagaga

SEQ ID NO: 915088 - RNA, 22 nt, Human
ccugggcaacagagcaagacuc

SEQ ID NO: 915089 - RNA, 22 nt, Human
ccugggcaacaugguaaacccc

SEQ ID NO: 915090 - RNA, 23 nt, Human
ccugggcaacaugguaaaccccg

SEQ ID NO: 915091 - RNA, 23 nt, Human
ccuuggaccccaggaaacuaccc

SEQ ID NO: 915092 - RNA, 22 nt, Human
cggaaagugucacccacucucc

SEQ ID NO: 915093 - RNA, 19 nt, Human
cgggagggggcugaaaaca

SEQ ID NO: 915094 - RNA, 24 nt, Human
cgggcguagucccagcuacucggg

SEQ ID NO: 915095 - RNA, 22 nt, Human
cggucucaagaaauauacugaa

SEQ ID NO: 915096 - RNA, 24 nt, Human
cuaaaagucacauucccaucaugc

SEQ ID NO: 915097 - RNA, 19 nt, Human
cuagaaaacauuccuccac

SEQ ID NO: 915098 - RNA, 23 nt, Human
cuagaaaacauuccuccacucaa

SEQ ID NO: 915099 - RNA, 19 nt, Human
cuagagccccacaucaccg

SEQ ID NO: 915100 - RNA, 22 nt, Human
cuagagccccacaucaccguga

SEQ ID NO: 915101 - RNA, 23 nt, Human
cucacaccuguaaucccagcacu

SEQ ID NO: 915102 - RNA, 24 nt, Human
cucacaccuguaaucccagcacuc

SEQ ID NO: 915103 - RNA, 22 nt, Human
cucacuccugucuaucccccca

SEQ ID NO: 915104 - RNA, 20 nt, Human
cucagagcauggggcagcgg

SEQ ID NO: 915105 - RNA, 23 nt, Human
cucauaguacucugaggccaagc

SEQ ID NO: 915106 - RNA, 18 nt, Human
cucccaguucuaggauuc

SEQ ID NO: 915107 - RNA, 26 nt, Human
cucuuucuuacgcuuccuggagucuu

SEQ ID NO: 915108 - RNA, 21 nt, Human
cugagaugugcugaagaggca

SEQ ID NO: 915109 - RNA, 20 nt, Human
cuuccauggguuuuuguuuu

SEQ ID NO: 915110 - RNA, 23 nt, Human
cuucccuagguggagaaguaccc

SEQ ID NO: 915111 - RNA, 22 nt, Human
gaaguagaggucuccaauugug

SEQ ID NO: 915112 - RNA, 20 nt, Human
gaagucuacaggcugguguu

SEQ ID NO: 915113 - RNA, 22 nt, Human
gagcauggggcagcgggagggg

SEQ ID NO: 915114 - RNA, 19 nt, Human
gagguggggggcggagagg

SEQ ID NO: 915115 - RNA, 24 nt, Human
gaucaccugaggucaggaguuuga

SEQ ID NO: 915116 - RNA, 24 nt, Human
gaugagauguuuucucuagcuguu

SEQ ID NO: 915117 - RNA, 22 nt, Human
gcaaggaauuuuuguucugcaa

SEQ ID NO: 915118 - RNA, 20 nt, Human
gcacaaccuggucaaaagca

SEQ ID NO: 915119 - RNA, 24 nt, Human
gcacuccagccugggcaacagagc

SEQ ID NO: 915120 - RNA, 21 nt, Human
gcaggagaaucacuucaacca

SEQ ID NO: 915121 - RNA, 19 nt, Human
gcagggcucagagugucua

SEQ ID NO: 915122 - RNA, 20 nt, Human
gccaaggacaagagcaguag

SEQ ID NO: 915123 - RNA, 22 nt, Human
gccacugcacuccagccugggc

SEQ ID NO: 915124 - RNA, 24 nt, Human
gccacugcacuccagccugggcaa

SEQ ID NO: 915125 - RNA, 20 nt, Human
gcuaaaaucgugccacugca

SEQ ID NO: 915126 - RNA, 25 nt, Human
gcuguuguaaggaaaggaaacauua

SEQ ID NO: 915127 - RNA, 18 nt, Human
gcuuuugcaacaucuuga

SEQ ID NO: 915128 - RNA, 19 nt, Human
ggauauggcagcuuuucug

SEQ ID NO: 915129 - RNA, 25 nt, Human
ggcccuuuagguuucaaauggagaa

SEQ ID NO: 915130 - RNA, 18 nt, Human
gggaggcagaggcaggca

SEQ ID NO: 915131 - RNA, 23 nt, Human
gggaggcugaggcaggagaauca

SEQ ID NO: 915132 - RNA, 18 nt, Human
gggcagagagccgcuggg

SEQ ID NO: 915133 - RNA, 18 nt, Human
ggggguugggguggggaa

SEQ ID NO: 915134 - RNA, 24 nt, Human
gguggcucacaccuguaaucccag

SEQ ID NO: 915135 - RNA, 22 nt, Human
guccaguucuguugccuuugac

SEQ ID NO: 915136 - RNA, 18 nt, Human
guggaagggcacuuuaug

SEQ ID NO: 915137 - RNA, 23 nt, Human
guggcucacaccuguaaucccag

SEQ ID NO: 915138 - RNA, 18 nt, Human
gugugguggcucacaccu

SEQ ID NO: 915139 - RNA, 24 nt, Human
uaaaaucgugccacugcacuccag

SEQ ID NO: 915140 - RNA, 23 nt, Human
uaaacacuaguaauuugaacuuc

SEQ ID NO: 915141 - RNA, 18 nt, Human
uaaagcaaaagacgcccu

SEQ ID NO: 915142 - RNA, 24 nt, Human
uaaagguuaaaaaaaaaaaauuca

SEQ ID NO: 915143 - RNA, 18 nt, Human
uaaagugugaaaacacca

SEQ ID NO: 915144 - RNA, 23 nt, Human
uaacaccagugaaucaauaguau

SEQ ID NO: 915145 - RNA, 18 nt, Human
uaagcacaauauauaaua

SEQ ID NO: 915146 - RNA, 20 nt, Human
uaauaguauaucaucuuuua

SEQ ID NO: 915147 - RNA, 20 nt, Human
uacaacuugcuucuuguuuu

SEQ ID NO: 915148 - RNA, 22 nt, Human
uacaggcugguguugcaaacca

SEQ ID NO: 915149 - RNA, 18 nt, Human
uacgcuuccuggagucuu

SEQ ID NO: 915150 - RNA, 19 nt, Human
uagaaacaaaagcaaaaag

SEQ ID NO: 915151 - RNA, 18 nt, Human
uagccaaacagccaccag

SEQ ID NO: 915152 - RNA, 26 nt, Human
uagcucucuuuaacacaaugguacca

SEQ ID NO: 915153 - RNA, 21 nt, Human
uagcugacacaggaugagagc

SEQ ID NO: 915154 - RNA, 21 nt, Human
uaggccuuugauccuauucug

SEQ ID NO: 915155 - RNA, 23 nt, Human
uaguagaaacaaaagcaaaaagu

SEQ ID NO: 915156 - RNA, 21 nt, Human
uaguggccacagccuaggcug

SEQ ID NO: 915157 - RNA, 21 nt, Human
uaucaaccagugaaggcauca

SEQ ID NO: 915158 - RNA, 19 nt, Human
uaucaucuuuuaaacacua

SEQ ID NO: 915159 - RNA, 21 nt, Human
uaugugguucuggggucaugu

SEQ ID NO: 915160 - RNA, 18 nt, Human
ucaaacagugauuugggc

SEQ ID NO: 915161 - RNA, 26 nt, Human
ucacaaccccaaagaggagggaacgc

SEQ ID NO: 915162 - RNA, 18 nt, Human
ucacacagcaccucccaa

SEQ ID NO: 915163 - RNA, 19 nt, Human
ucacuguaauaauccacaa

SEQ ID NO: 915164 - RNA, 24 nt, Human
ucacuuugggaagcucugcaaagu

SEQ ID NO: 915165 - RNA, 24 nt, Human
ucaguuuuccuuuuaaggaaaaau

SEQ ID NO: 915166 - RNA, 18 nt, Human
ucauggggguuggggugg

SEQ ID NO: 915167 - RNA, 18 nt, Human
uccacgaggcacacuucc

SEQ ID NO: 915168 - RNA, 20 nt, Human
uccauagacagcccgccagc

SEQ ID NO: 915169 - RNA, 20 nt, Human
uccaugggcaauuacuccug

SEQ ID NO: 915170 - RNA, 20 nt, Human
ucccaaguagucuaauguac

SEQ ID NO: 915171 - RNA, 21 nt, Human
ucccucauguuuaacucuuuu

SEQ ID NO: 915172 - RNA, 23 nt, Human
uccuucaauacucuuuacauugc

SEQ ID NO: 915173 - RNA, 21 nt, Human
uccuuccagucacugcucuag

SEQ ID NO: 915174 - RNA, 25 nt, Human
ucgggaggcugaggcaggagaauca

SEQ ID NO: 915175 - RNA, 23 nt, Human
ucgugccacugcacuccagccug

SEQ ID NO: 915176 - RNA, 18 nt, Human
ucuccacuuccuuccuga

SEQ ID NO: 915177 - RNA, 20 nt, Human
ucucccucucacuccugucu

SEQ ID NO: 915178 - RNA, 21 nt, Human
ucucuacuaaaaauauaaaaa

SEQ ID NO: 915179 - RNA, 21 nt, Human
ucuuaaauuugaauagcacuu

SEQ ID NO: 915180 - RNA, 21 nt, Human
ucuuaaugcuaagguuguuuu

SEQ ID NO: 915181 - RNA, 22 nt, Human
ucuucaauuuaagaaaaacugg

SEQ ID NO: 915182 - RNA, 20 nt, Human
ucuugguuuccuagugggcu

SEQ ID NO: 915183 - RNA, 24 nt, Human
ugaaaagaugacauuaguuguguu

SEQ ID NO: 915184 - RNA, 22 nt, Human
ugaaaccccaauccauagacag

SEQ ID NO: 915185 - RNA, 22 nt, Human
ugaaaguaauccaguuuuccca

SEQ ID NO: 915186 - RNA, 20 nt, Human
ugagagcacaguaaaacuua

SEQ ID NO: 915187 - RNA, 22 nt, Human
ugagaugugcugaagaggcaag

SEQ ID NO: 915188 - RNA, 21 nt, Human
ugagcaggcaauggggcucca

SEQ ID NO: 915189 - RNA, 26 nt, Human
ugagccaugccucuuuuucaguuuag

SEQ ID NO: 915190 - RNA, 19 nt, Human
ugaggcaggagaaucacuu

SEQ ID NO: 915191 - RNA, 24 nt, Human
ugaggcaggagaaucacuucaacc

SEQ ID NO: 915192 - RNA, 18 nt, Human
ugaggucaggaguuugaa

SEQ ID NO: 915193 - RNA, 23 nt, Human
ugaggucaggaguuugaaaccag

SEQ ID NO: 915194 - RNA, 26 nt, Human
ugaguaaauuaucaugauuacaugaa

SEQ ID NO: 915195 - RNA, 22 nt, Human
ugcaauacaaagagaguaaauc

SEQ ID NO: 915196 - RNA, 21 nt, Human
ugcaaugcagggcucagagug

SEQ ID NO: 915197 - RNA, 24 nt, Human
ugccacugcacuccagccugggca

SEQ ID NO: 915198 - RNA, 20 nt, Human
ugccccauuuuuuucccaca

SEQ ID NO: 915199 - RNA, 21 nt, Human
ugccucaaaaagcaaacaaaa

SEQ ID NO: 915200 - RNA, 18 nt, Human
ugcugagagauucuccac

SEQ ID NO: 915201 - RNA, 24 nt, Human
uggaauauggaacacgccuccucc

SEQ ID NO: 915202 - RNA, 18 nt, Human
uggccuggccucuuaucu

SEQ ID NO: 915203 - RNA, 21 nt, Human
uggcucacaccuguaauccca

SEQ ID NO: 915204 - RNA, 24 nt, Human
uggcucacaccuguaaucccagca

SEQ ID NO: 915205 - RNA, 18 nt, Human
ugggaggcagaggcaggc

SEQ ID NO: 915206 - RNA, 20 nt, Human
ugggaggcagaggcaggcag

SEQ ID NO: 915207 - RNA, 24 nt, Human
ugggaggcagaggcaggcagauca

SEQ ID NO: 915208 - RNA, 23 nt, Human
ugggcaacaugguaaaccccggu

SEQ ID NO: 915209 - RNA, 20 nt, Human
ugggguggggaagaaaauga

SEQ ID NO: 915210 - RNA, 20 nt, Human
uggguacuugguggguugug

SEQ ID NO: 915211 - RNA, 22 nt, Human
uggguugugguuauuccuaugg

SEQ ID NO: 915212 - RNA, 19 nt, Human
uggguuuuuguuuuuuugu

SEQ ID NO: 915213 - RNA, 24 nt, Human
ugguggcucacaccuguaauccca

SEQ ID NO: 915214 - RNA, 20 nt, Human
ugguuuucucucucauucca

SEQ ID NO: 915215 - RNA, 22 nt, Human
uguacagaaagaaaagaaagga

SEQ ID NO: 915216 - RNA, 23 nt, Human
uguaccuaugaauuuaaacaugu

SEQ ID NO: 915217 - RNA, 18 nt, Human
ugugaaaacaccaagcug

SEQ ID NO: 915218 - RNA, 22 nt, Human
uguugcuuccauggguuuuugu

SEQ ID NO: 915219 - RNA, 26 nt, Human
uuaaaucauguauguggcuauaucaa

SEQ ID NO: 915220 - RNA, 22 nt, Human
uuacaguugaaaggcuggggaa

SEQ ID NO: 915221 - RNA, 19 nt, Human
uucaaccagggaggcagag

SEQ ID NO: 915222 - RNA, 18 nt, Human
uucccuuuugggcuaaag

SEQ ID NO: 915223 - RNA, 24 nt, Human
uuccugagcagccaugguuuucuc

SEQ ID NO: 915224 - RNA, 18 nt, Human
uucggccagguguggugg

SEQ ID NO: 915225 - RNA, 19 nt, Human
uucuagcacaaccugguca

SEQ ID NO: 915226 - RNA, 22 nt, Human
uucuaggauucaauuucuccug

SEQ ID NO: 915227 - RNA, 18 nt, Human
uucucucucauuccacag

SEQ ID NO: 915228 - RNA, 18 nt, Human
uucuugguuuccuagugg

SEQ ID NO: 915229 - RNA, 21 nt, Human
uugaaaaacagaauguuucca

SEQ ID NO: 915230 - RNA, 22 nt, Human
uugcagugagcuaaaaucgugc

SEQ ID NO: 915231 - RNA, 25 nt, Human
uuucucuauagcucucuuuaacaca

SEQ ID NO: 915232 - RNA, 23 nt, Human
uuucugugaggagagaaauuauc

SEQ ID NO: 915233 - RNA, 20 nt, Human
aaacaagaaagaggcggcgg

SEQ ID NO: 915234 - RNA, 18 nt, Human
aacagacaaaacacagag

SEQ ID NO: 915235 - RNA, 26 nt, Human
aaccaaaaaacacaaccaacaccaag

SEQ ID NO: 915236 - RNA, 20 nt, Human
aagccccucucagggguccc

SEQ ID NO: 915237 - RNA, 23 nt, Human
aaggacucaaaugcgauuggccg

SEQ ID NO: 915238 - RNA, 21 nt, Human
acaaugccccugucccugcug

SEQ ID NO: 915239 - RNA, 19 nt, Human
acacacgugcuuccgucuc

SEQ ID NO: 915240 - RNA, 18 nt, Human
acacagcacccucgucuc

SEQ ID NO: 915241 - RNA, 19 nt, Human
acagcacccucgucucggc

SEQ ID NO: 915242 - RNA, 18 nt, Human
acaggcucuuggcgucuc

SEQ ID NO: 915243 - RNA, 21 nt, Human
accaacaccaaguauaucucc

SEQ ID NO: 915244 - RNA, 22 nt, Human
agacaaaacacagagcccugcc

SEQ ID NO: 915245 - RNA, 26 nt, Human
agacaaaacacagagcccugccuggg

SEQ ID NO: 915246 - RNA, 24 nt, Human
agacaccccuucugaccucugccc

SEQ ID NO: 915247 - RNA, 18 nt, Human
agacgggguguggcgggg

SEQ ID NO: 915248 - RNA, 19 nt, Human
agccuggggaagaggaggc

SEQ ID NO: 915249 - RNA, 21 nt, Human
agccuggggaagaggaggccu

SEQ ID NO: 915250 - RNA, 22 nt, Human
aggaaccaaaaaacacaaccaa

SEQ ID NO: 915251 - RNA, 20 nt, Human
aggaagcugccccagggcag

SEQ ID NO: 915252 - RNA, 23 nt, Human
aggcaggcacagcagagaaccaa

SEQ ID NO: 915253 - RNA, 21 nt, Human
agggggacccgagcugcgacc

SEQ ID NO: 915254 - RNA, 23 nt, Human
agguuguaacagacaaaacacag

SEQ ID NO: 915255 - RNA, 19 nt, Human
aucaugggggacagcgggg

SEQ ID NO: 915256 - RNA, 19 nt, Human
aucaugggggacagcgggg

SEQ ID NO: 915257 - RNA, 19 nt, Human
augggggacagcggggugg

SEQ ID NO: 915258 - RNA, 22 nt, Human
caaaaaacacaaccaacaccaa

SEQ ID NO: 915259 - RNA, 23 nt, Human
caaguccccagcccugagcuccg

SEQ ID NO: 915260 - RNA, 23 nt, Human
caaugccccugucccugcuggcc

SEQ ID NO: 915261 - RNA, 20 nt, Human
cacaagaauggaaaugaaau

SEQ ID NO: 915262 - RNA, 22 nt, Human
cacagccaucaccaauaagccc

SEQ ID NO: 915263 - RNA, 20 nt, Human
caccaauaagccccucucag

SEQ ID NO: 915264 - RNA, 23 nt, Human
caccacugggagcgcugcccucu

SEQ ID NO: 915265 - RNA, 19 nt, Human
caccccacaggcucuuggc

SEQ ID NO: 915266 - RNA, 18 nt, Human
caccugcugcuccgaguc

SEQ ID NO: 915267 - RNA, 21 nt, Human
cacugaggcccccaaacccaa

SEQ ID NO: 915268 - RNA, 24 nt, Human
cagcacccucgucucggcgcuuug

SEQ ID NO: 915269 - RNA, 19 nt, Human
cagccguccccucugcagg

SEQ ID NO: 915270 - RNA, 23 nt, Human
cagcggagggaggcugcccugga

SEQ ID NO: 915271 - RNA, 21 nt, Human
caggacacaggcaggcacagc

SEQ ID NO: 915272 - RNA, 24 nt, Human
caggcaggcacagcagagaaccaa

SEQ ID NO: 915273 - RNA, 18 nt, Human
caguggagcacgucagcc

SEQ ID NO: 915274 - RNA, 23 nt, Human
caguuuggccauaaaaaugggac

SEQ ID NO: 915275 - RNA, 21 nt, Human
caugggggacagcgggguggg

SEQ ID NO: 915276 - RNA, 23 nt, Human
caugucuccacguggagggggcg

SEQ ID NO: 915277 - RNA, 22 nt, Human
ccaaaaaacacaaccaacacca

SEQ ID NO: 915278 - RNA, 19 nt, Human
ccaaacccaagcugagggc

SEQ ID NO: 915279 - RNA, 20 nt, Human
ccacaccaggcucugccagg

SEQ ID NO: 915280 - RNA, 24 nt, Human
ccagauguccugcacugaggcccc

SEQ ID NO: 915281 - RNA, 18 nt, Human
ccaggucccagacacccc

SEQ ID NO: 915282 - RNA, 20 nt, Human
ccagguuucgggggaacggg

SEQ ID NO: 915283 - RNA, 22 nt, Human
cccaaacccaagcugagggcag

SEQ ID NO: 915284 - RNA, 23 nt, Human
cccacagccaucaccaauaagcc

SEQ ID NO: 915285 - RNA, 24 nt, Human
cccacagccaucaccaauaagccc

SEQ ID NO: 915286 - RNA, 22 nt, Human
cccagcccugagcuccgccagc

SEQ ID NO: 915287 - RNA, 18 nt, Human
ccccagaggccaccgcga

SEQ ID NO: 915288 - RNA, 26 nt, Human
ccccagaggccaccgcgaacagccuu

SEQ ID NO: 915289 - RNA, 20 nt, Human
ccccuccucggagacaucac

SEQ ID NO: 915290 - RNA, 21 nt, Human
cccuaggccaugucuccaccg

SEQ ID NO: 915291 - RNA, 18 nt, Human
ccgagcucugggccucag

SEQ ID NO: 915292 - RNA, 21 nt, Human
ccgagcucugggccucagcgg

SEQ ID NO: 915293 - RNA, 22 nt, Human
ccggccgucggcauccgugcag

SEQ ID NO: 915294 - RNA, 18 nt, Human
ccguccccucugcaggcc

SEQ ID NO: 915295 - RNA, 22 nt, Human
ccucccgcucuguccugccaug

SEQ ID NO: 915296 - RNA, 19 nt, Human
ccuccugcccccgccccuc

SEQ ID NO: 915297 - RNA, 22 nt, Human
ccuccugcccccgccccucggc

SEQ ID NO: 915298 - RNA, 25 nt, Human
ccuggcccuccagcugguccccugg

SEQ ID NO: 915299 - RNA, 23 nt, Human
ccugggaggugggcgucagggcc

SEQ ID NO: 915300 - RNA, 24 nt, Human
ccuguggcccaaggcccggccucc

SEQ ID NO: 915301 - RNA, 19 nt, Human
cgacgggacgugaacagcg

SEQ ID NO: 915302 - RNA, 24 nt, Human
cgcccggggccacaccugcugcuc

SEQ ID NO: 915303 - RNA, 22 nt, Human
cggcggcgggggcgcccgaggg

SEQ ID NO: 915304 - RNA, 26 nt, Human
cgggggcagccggagcagaaguggag

SEQ ID NO: 915305 - RNA, 22 nt, Human
cgucagggccccacugcggcgg

SEQ ID NO: 915306 - RNA, 18 nt, Human
cgucucagaccccacacc

SEQ ID NO: 915307 - RNA, 24 nt, Human
cgucucagaccccacaccaggcuc

SEQ ID NO: 915308 - RNA, 18 nt, Human
cucagaccccacaccagg

SEQ ID NO: 915309 - RNA, 20 nt, Human
cuccggccgucucagacccc

SEQ ID NO: 915310 - RNA, 20 nt, Human
cucgaggggcaccugggagg

SEQ ID NO: 915311 - RNA, 22 nt, Human
cucuguccugccauggagaaaa

SEQ ID NO: 915312 - RNA, 19 nt, Human
cugaccucugccccugccu

SEQ ID NO: 915313 - RNA, 22 nt, Human
cugggaugcaaaccaguguuug

SEQ ID NO: 915314 - RNA, 22 nt, Human
cuggggaagaggaggccuggcc

SEQ ID NO: 915315 - RNA, 23 nt, Human
cuuguccugauggaugcugggag

SEQ ID NO: 915316 - RNA, 23 nt, Human
gaaccaaaaaacacaaccaacac

SEQ ID NO: 915317 - RNA, 22 nt, Human
gaaccugggaugcaaaccagug

SEQ ID NO: 915318 - RNA, 20 nt, Human
gacagggcgggggcugaugg

SEQ ID NO: 915319 - RNA, 22 nt, Human
gacggcggcgggggcgcccgag

SEQ ID NO: 915320 - RNA, 19 nt, Human
gacucccugggaggacugg

SEQ ID NO: 915321 - RNA, 20 nt, Human
gagcagaaguggagcucggc

SEQ ID NO: 915322 - RNA, 18 nt, Human
gaguggaggggcugcucu

SEQ ID NO: 915323 - RNA, 19 nt, Human
gaguguguguccucgcugg

SEQ ID NO: 915324 - RNA, 24 nt, Human
gauuggccgcucgggagggugggu

SEQ ID NO: 915325 - RNA, 19 nt, Human
gcagcgccuucgggggcag

SEQ ID NO: 915326 - RNA, 23 nt, Human
gcccacguucucaguggacagca

SEQ ID NO: 915327 - RNA, 19 nt, Human
gcucagguccccagaggcc

SEQ ID NO: 915328 - RNA, 20 nt, Human
gcucgggaccccagccgucc

SEQ ID NO: 915329 - RNA, 22 nt, Human
ggaaccaaaaaacacaaccaac

SEQ ID NO: 915330 - RNA, 24 nt, Human
ggaagugggcauuggucccgaccc

SEQ ID NO: 915331 - RNA, 20 nt, Human
ggagggggcggggagccuga

SEQ ID NO: 915332 - RNA, 19 nt, Human
ggcagccuggggaagagga

SEQ ID NO: 915333 - RNA, 21 nt, Human
ggcaggaggguccgcuuccca

SEQ ID NO: 915334 - RNA, 22 nt, Human
ggcucugccaggucuggagagg

SEQ ID NO: 915335 - RNA, 20 nt, Human
ggcugccgaccggggugccg

SEQ ID NO: 915336 - RNA, 21 nt, Human
gggaacggggacgugucggga

SEQ ID NO: 915337 - RNA, 28 nt, Human
gggaagugggcauuggucaccaagguau

SEQ ID NO: 915338 - RNA, 20 nt, Human
gggacagagccuggcaggag

SEQ ID NO: 915339 - RNA, 21 nt, Human
gggacagagccuggcaggaga

SEQ ID NO: 915340 - RNA, 19 nt, Human
gggacuggguuggggacag

SEQ ID NO: 915341 - RNA, 21 nt, Human
gggacuggguuggggacaggc

SEQ ID NO: 915342 - RNA, 21 nt, Human
gggaggcugcccuggacgcgg

SEQ ID NO: 915343 - RNA, 21 nt, Human
gggcagcgccuucgggggcag

SEQ ID NO: 915344 - RNA, 22 nt, Human
gggcagggugggugacucugcc

SEQ ID NO: 915345 - RNA, 20 nt, Human
gggcggggagccugaccuuc

SEQ ID NO: 915346 - RNA, 19 nt, Human
gguccuggggaagggcagg

SEQ ID NO: 915347 - RNA, 21 nt, Human
guggaguguguguccucgcug

SEQ ID NO: 915348 - RNA, 22 nt, Human
guggggacugagggcuguggag

SEQ ID NO: 915349 - RNA, 20 nt, Human
guugguuuguuugugucuuu

SEQ ID NO: 915350 - RNA, 21 nt, Human
uacaguacaggaauuuggaca

SEQ ID NO: 915351 - RNA, 20 nt, Human
uaccauggugaaggacccca

SEQ ID NO: 915352 - RNA, 21 nt, Human
uaucaugggggacagcggggu

SEQ ID NO: 915353 - RNA, 24 nt, Human
ucagcggagggaggcugcccugga

SEQ ID NO: 915354 - RNA, 21 nt, Human
ucaugggggacagcggggugg

SEQ ID NO: 915355 - RNA, 24 nt, Human
ucaugggggacagcgggguggguc

SEQ ID NO: 915356 - RNA, 22 nt, Human
uccacuccagcuccucacaucc

SEQ ID NO: 915357 - RNA, 19 nt, Human
ucccaaaggugcagcuucc

SEQ ID NO: 915358 - RNA, 20 nt, Human
ucccacguggauggaggcag

SEQ ID NO: 915359 - RNA, 22 nt, Human
ucccagacaccccuucugaccu

SEQ ID NO: 915360 - RNA, 26 nt, Human
uccccagaggccaccgcgaacagccu

SEQ ID NO: 915361 - RNA, 18 nt, Human
uccccggggggugccugc

SEQ ID NO: 915362 - RNA, 19 nt, Human
uccccggggggugccugcu

SEQ ID NO: 915363 - RNA, 22 nt, Human
ucccgcucuguccugccaugga

SEQ ID NO: 915364 - RNA, 21 nt, Human
ucccugggaggacuggugugg

SEQ ID NO: 915365 - RNA, 22 nt, Human
ucccugggaggacugguguggc

SEQ ID NO: 915366 - RNA, 24 nt, Human
uccuccugcccccgccccucggca

SEQ ID NO: 915367 - RNA, 20 nt, Human
uccugggcagaguggagggg

SEQ ID NO: 915368 - RNA, 18 nt, Human
uccuggggaagggcaggg

SEQ ID NO: 915369 - RNA, 21 nt, Human
ucuccggccgucucagacccc

SEQ ID NO: 915370 - RNA, 21 nt, Human
ucugccgagcucuggccucca

SEQ ID NO: 915371 - RNA, 19 nt, Human
ucuggugccagggcucugg

SEQ ID NO: 915372 - RNA, 21 nt, Human
ugaaaaggaaccaaaaaacac

SEQ ID NO: 915373 - RNA, 25 nt, Human
ugaaaaggaaccaaaaaacacaacc

SEQ ID NO: 915374 - RNA, 21 nt, Human
ugaccucugccccugccuccc

SEQ ID NO: 915375 - RNA, 22 nt, Human
ugagaugacaaugccccugucc

SEQ ID NO: 915376 - RNA, 19 nt, Human
ugagcuggucuccuguggc

SEQ ID NO: 915377 - RNA, 23 nt, Human
ugagcuggucuccuguggcccaa

SEQ ID NO: 915378 - RNA, 26 nt, Human
ugaggcccccaaacccaagcugaggg

SEQ ID NO: 915379 - RNA, 21 nt, Human
ugagggcaggaggguccgcuu

SEQ ID NO: 915380 - RNA, 19 nt, Human
ugcagggggaggacgaggu

SEQ ID NO: 915381 - RNA, 18 nt, Human
ugccagggcucugggcag

SEQ ID NO: 915382 - RNA, 18 nt, Human
ugccccagggcagucugg

SEQ ID NO: 915383 - RNA, 22 nt, Human
ugccgcccgcccggggccacac

SEQ ID NO: 915384 - RNA, 21 nt, Human
ugccugggcccuccaugccag

SEQ ID NO: 915385 - RNA, 19 nt, Human
ugcucgaggggcaccuggg

SEQ ID NO: 915386 - RNA, 21 nt, Human
uggaagugggggauucccaca

SEQ ID NO: 915387 - RNA, 20 nt, Human
uggacacugcccacguucuc

SEQ ID NO: 915388 - RNA, 24 nt, Human
uggagaggaauucuucccaaaggu

SEQ ID NO: 915389 - RNA, 23 nt, Human
uggagggugaugagucggaaaca

SEQ ID NO: 915390 - RNA, 20 nt, Human
uggcaucccuggggggaguu

SEQ ID NO: 915391 - RNA, 19 nt, Human
uggccuccaaccagcaccc

SEQ ID NO: 915392 - RNA, 22 nt, Human
ugggacuggguuggggacaggc

SEQ ID NO: 915393 - RNA, 24 nt, Human
ugggcagaguggaggggcugcucu

SEQ ID NO: 915394 - RNA, 27 nt, Human
ugggcagcgccuucggggaggacaccc

SEQ ID NO: 915395 - RNA, 23 nt, Human
ugggcagggcgacucgaggacuc

SEQ ID NO: 915396 - RNA, 22 nt, Human
ugggccucagcggggugggcag

SEQ ID NO: 915397 - RNA, 18 nt, Human
uggggccaggaguggcug

SEQ ID NO: 915398 - RNA, 18 nt, Human
uggggccaggaguggcug

SEQ ID NO: 915399 - RNA, 23 nt, Human
uggggcccccggggcucaggucc

SEQ ID NO: 915400 - RNA, 19 nt, Human
ugggguggggacugagggc

SEQ ID NO: 915401 - RNA, 21 nt, Human
ugggguggggacugagggcug

SEQ ID NO: 915402 - RNA, 23 nt, Human
uggguggcagccuggggaagagg

SEQ ID NO: 915403 - RNA, 21 nt, Human
uggugggucuggauuggaggc

SEQ ID NO: 915404 - RNA, 18 nt, Human
uguaacagacaaaacaca

SEQ ID NO: 915405 - RNA, 23 nt, Human
uguccugcacugaggcccccaaa

SEQ ID NO: 915406 - RNA, 19 nt, Human
uguguccucgcuggggacc

SEQ ID NO: 915407 - RNA, 23 nt, Human
uguuugugucuuuuuuguucuuu

SEQ ID NO: 915408 - RNA, 24 nt, Human
uugagaugacaaugccccuguccc

SEQ ID NO: 915409 - RNA, 26 nt, Human
aagccaccucugucccuccaauguuc

SEQ ID NO: 915410 - RNA, 23 nt, Human
acacacacacacacacauauaca

SEQ ID NO: 915411 - RNA, 24 nt, Human
acacacacacacacauauacacag

SEQ ID NO: 915412 - RNA, 22 nt, Human
acacacacacacauauacacaa

SEQ ID NO: 915413 - RNA, 22 nt, Human
acacacucacccccccccaaca

SEQ ID NO: 915414 - RNA, 22 nt, Human
acccccccccaacacacacaca

SEQ ID NO: 915415 - RNA, 21 nt, Human
accccggcccggggaggcagc

SEQ ID NO: 915416 - RNA, 20 nt, Human
augaguacuucacugaguuu

SEQ ID NO: 915417 - RNA, 19 nt, Human
cacacacacacacacauau

SEQ ID NO: 915418 - RNA, 24 nt, Human
cacacgcgcgcacacacucacccc

SEQ ID NO: 915419 - RNA, 22 nt, Human
caccgaagccaccucugucccu

SEQ ID NO: 915420 - RNA, 23 nt, Human
caccgaagccaccucugucccuu

SEQ ID NO: 915421 - RNA, 22 nt, Human
cagacugcgcucggcucgcgcc

SEQ ID NO: 915422 - RNA, 20 nt, Human
cagccgcauccccccggcgg

SEQ ID NO: 915423 - RNA, 27 nt, Human
ccaacacacacacacacacauauacac

SEQ ID NO: 915424 - RNA, 21 nt, Human
cccaacacacacacacacaca

SEQ ID NO: 915425 - RNA, 20 nt, Human
cccccaaaucagucaucuug

SEQ ID NO: 915426 - RNA, 24 nt, Human
cccccaaaucagucaucuuggccu

SEQ ID NO: 915427 - RNA, 31 nt, Human
ccccccccaacacacacacacacacauauag

SEQ ID NO: 915428 - RNA, 19 nt, Human
cccggcgcgccgcgcuccg

SEQ ID NO: 915429 - RNA, 24 nt, Human
cccuccaccgccgugcucccgagg

SEQ ID NO: 915430 - RNA, 19 nt, Human
ccggcgcgcucagccccac

SEQ ID NO: 915431 - RNA, 21 nt, Human
ccucugucccuccaauguuca

SEQ ID NO: 915432 - RNA, 20 nt, Human
cgccgcgcuccgcuccgccc

SEQ ID NO: 915433 - RNA, 19 nt, Human
cgcgcacacacucaccccc

SEQ ID NO: 915434 - RNA, 21 nt, Human
cgcgcacacacucaccccccc

SEQ ID NO: 915435 - RNA, 23 nt, Human
cgcuccgcccgcucggcccggca

SEQ ID NO: 915436 - RNA, 22 nt, Human
cgcucggcccggcagacugcgc

SEQ ID NO: 915437 - RNA, 18 nt, Human
cucggcucgcgccccggc

SEQ ID NO: 915438 - RNA, 25 nt, Human
cuuuuaaaaugcacacgcgcgcaca

SEQ ID NO: 915439 - RNA, 21 nt, Human
gacccgcccucucuacacccc

SEQ ID NO: 915440 - RNA, 21 nt, Human
gcgcacacacucacccccccc

SEQ ID NO: 915441 - RNA, 21 nt, Human
gcgccgcgcuccgcuccgccc

SEQ ID NO: 915442 - RNA, 18 nt, Human
gcgcgcacacacucaccc

SEQ ID NO: 915443 - RNA, 18 nt, Human
gcgcuccgcuccgcccgc

SEQ ID NO: 915444 - RNA, 24 nt, Human
ggccgccuccuauguccccuccac

SEQ ID NO: 915445 - RNA, 20 nt, Human
uaaagcgaguagcccccaaa

SEQ ID NO: 915446 - RNA, 23 nt, Human
uaaagcgaguagcccccaaauca

SEQ ID NO: 915447 - RNA, 23 nt, Human
uacacaaagucagaaauagcuag

SEQ ID NO: 915448 - RNA, 19 nt, Human
ucagccccacucggcucgc

SEQ ID NO: 915449 - RNA, 22 nt, Human
uccaauguucaugucuguccga

SEQ ID NO: 915450 - RNA, 22 nt, Human
uccaccgccgugcucccgaggc

SEQ ID NO: 915451 - RNA, 19 nt, Human
uccccccggcggcggcccc

SEQ ID NO: 915452 - RNA, 19 nt, Human
ucccgaggccggggacccg

SEQ ID NO: 915453 - RNA, 24 nt, Human
ucggcucgcgccccggcccguauc

SEQ ID NO: 915454 - RNA, 20 nt, Human
ucggcucgcuccgcccgcuc

SEQ ID NO: 915455 - RNA, 20 nt, Human
uguaaagcgaguagccccca

SEQ ID NO: 915456 - RNA, 20 nt, Human
uguaaagcgaguagccccca

SEQ ID NO: 915457 - RNA, 18 nt, Human
uuuuuuuuuuuuuuuuug

SEQ ID NO: 915458 - RNA, 20 nt, Human
aaacccgacucugcucccac

SEQ ID NO: 915459 - RNA, 21 nt, Human
aaagcccucccaaacccgacu

SEQ ID NO: 915460 - RNA, 27 nt, Human
aaagcccucccaaacccgacucugcuc

SEQ ID NO: 915461 - RNA, 24 nt, Human
aaauaaccauuuaaacaugagggu

SEQ ID NO: 915462 - RNA, 18 nt, Human
aacccgacucugcuccca

SEQ ID NO: 915463 - RNA, 26 nt, Human
aacccgacucugcucccacccuccca

SEQ ID NO: 915464 - RNA, 21 nt, Human
aagaaggaaauagaucgaggg

SEQ ID NO: 915465 - RNA, 30 nt, Human
acaaaacccaaauaaacccacgaagucauu

SEQ ID NO: 915466 - RNA, 18 nt, Human
acacagcacaucccccuc

SEQ ID NO: 915467 - RNA, 18 nt, Human
acacagcacaucccccuc

SEQ ID NO: 915468 - RNA, 22 nt, Human
acacagcacaucccccuccucu

SEQ ID NO: 915469 - RNA, 19 nt, Human
acacuuuccauacacauua

SEQ ID NO: 915470 - RNA, 21 nt, Human
acagaaacccgccuggccucc

SEQ ID NO: 915471 - RNA, 23 nt, Human
acagcacaucccccuccucuuca

SEQ ID NO: 915472 - RNA, 20 nt, Human
acagcgcacaagccagcggc

SEQ ID NO: 915473 - RNA, 24 nt, Human
acccacgaagucaucucuagcccc

SEQ ID NO: 915474 - RNA, 18 nt, Human
accccauauccagcucuc

SEQ ID NO: 915475 - RNA, 20 nt, Human
acccgacucugcucccaccc

SEQ ID NO: 915476 - RNA, 18 nt, Human
accucccaccccgccccg

SEQ ID NO: 915477 - RNA, 21 nt, Human
agaaacaaaacccaaauaaac

SEQ ID NO: 915478 - RNA, 18 nt, Human
agaaacccgccuggccuc

SEQ ID NO: 915479 - RNA, 19 nt, Human
agaaacccgccuggccucc

SEQ ID NO: 915480 - RNA, 22 nt, Human
agaaccagguguccaagagccc

SEQ ID NO: 915481 - RNA, 19 nt, Human
agacaagagcaaaugcagc

SEQ ID NO: 915482 - RNA, 23 nt, Human
agacaagagcaaaugcagcaggg

SEQ ID NO: 915483 - RNA, 23 nt, Human
agagaagccgguaggaacccgag

SEQ ID NO: 915484 - RNA, 18 nt, Human
agagcccagccgcuuucc

SEQ ID NO: 915485 - RNA, 24 nt, Human
agagcccagccgcuuuccugcccc

SEQ ID NO: 915486 - RNA, 18 nt, Human
agagcggggcaacaagga

SEQ ID NO: 915487 - RNA, 19 nt, Human
agccagcggccucaggccu

SEQ ID NO: 915488 - RNA, 21 nt, Human
agccuggggcuugggugauca

SEQ ID NO: 915489 - RNA, 19 nt, Human
aggaagaaggaaauagauc

SEQ ID NO: 915490 - RNA, 20 nt, Human
aggacccuugugcugggucu

SEQ ID NO: 915491 - RNA, 21 nt, Human
aggagcagauccaaacuucca

SEQ ID NO: 915492 - RNA, 21 nt, Human
aggagcagauccaaacuucca

SEQ ID NO: 915493 - RNA, 22 nt, Human
aggcagguggaacaccugcagg

SEQ ID NO: 915494 - RNA, 23 nt, Human
aggcagguggaacaccugcagga

SEQ ID NO: 915495 - RNA, 19 nt, Human
aggcgucgcuguggaccgc

SEQ ID NO: 915496 - RNA, 20 nt, Human
aggcugaggccaggucaaaa

SEQ ID NO: 915497 - RNA, 18 nt, Human
aggcugcagucucauugc

SEQ ID NO: 915498 - RNA, 22 nt, Human
aggcuggaagacagcuuuccaa

SEQ ID NO: 915499 - RNA, 18 nt, Human
aggggaggagggcugggc

SEQ ID NO: 915500 - RNA, 21 nt, Human
aggggcuaagacagccugggg

SEQ ID NO: 915501 - RNA, 21 nt, Human
aggggcuccccgcccgggccc

SEQ ID NO: 915502 - RNA, 21 nt, Human
auaaacccacgaagucaucuc

SEQ ID NO: 915503 - RNA, 21 nt, Human
auccucauguaacuaggaagc

SEQ ID NO: 915504 - RNA, 19 nt, Human
aucucaucccaaaucccca

SEQ ID NO: 915505 - RNA, 21 nt, Human
caaaacccacaucaagccucc

SEQ ID NO: 915506 - RNA, 24 nt, Human
caaaacccacaucaagccuccaaa

SEQ ID NO: 915507 - RNA, 18 nt, Human
caccacacucuaagaugg

SEQ ID NO: 915508 - RNA, 24 nt, Human
cacccccgcucccucaccgcgcca

SEQ ID NO: 915509 - RNA, 19 nt, Human
cacccucccaucuagccca

SEQ ID NO: 915510 - RNA, 20 nt, Human
cacccucccaucuagcccaa

SEQ ID NO: 915511 - RNA, 21 nt, Human
cacccuucucccuaacucccg

SEQ ID NO: 915512 - RNA, 21 nt, Human
caccgcaaccuccgccuccug

SEQ ID NO: 915513 - RNA, 21 nt, Human
caccucacguuuggacaccac

SEQ ID NO: 915514 - RNA, 19 nt, Human
cacgccccgcccucccgcc

SEQ ID NO: 915515 - RNA, 19 nt, Human
cacuccuuccaaaaaagcc

SEQ ID NO: 915516 - RNA, 23 nt, Human
cagaaacaaaacccaaauaaacc

SEQ ID NO: 915517 - RNA, 20 nt, Human
cagccgcuuuccugccccuc

SEQ ID NO: 915518 - RNA, 19 nt, Human
cagcggccgccccgcccgc

SEQ ID NO: 915519 - RNA, 18 nt, Human
cagcggccucaggccucc

SEQ ID NO: 915520 - RNA, 18 nt, Human
caggaagccacuccuucc

SEQ ID NO: 915521 - RNA, 22 nt, Human
caggucaaaacccacaucaagc

SEQ ID NO: 915522 - RNA, 19 nt, Human
caucccggagcuuaacgag

SEQ ID NO: 915523 - RNA, 18 nt, Human
cauucaaaaugguuucac

SEQ ID NO: 915524 - RNA, 19 nt, Human
ccagcggccucaggccucc

SEQ ID NO: 915525 - RNA, 18 nt, Human
ccaggguuuggcucuuuc

SEQ ID NO: 915526 - RNA, 21 nt, Human
ccauaucucaucccaaauccc

SEQ ID NO: 915527 - RNA, 20 nt, Human
ccauuuaaacaugagggucc

SEQ ID NO: 915528 - RNA, 18 nt, Human
cccaaauaaacccacgaa

SEQ ID NO: 915529 - RNA, 25 nt, Human
cccaaggcugaggccaggucaaaac

SEQ ID NO: 915530 - RNA, 21 nt, Human
cccacccucccaucuagccca

SEQ ID NO: 915531 - RNA, 21 nt, Human
cccaucugccucuuccagaag

SEQ ID NO: 915532 - RNA, 21 nt, Human
cccaucugccucuuccagaag

SEQ ID NO: 915533 - RNA, 18 nt, Human
ccccacgccccgcccucc

SEQ ID NO: 915534 - RNA, 18 nt, Human
cccccaaugcagaacaac

SEQ ID NO: 915535 - RNA, 24 nt, Human
cccccggaccgauccccacccccg

SEQ ID NO: 915536 - RNA, 21 nt, Human
ccccgcccgccccuccucccc

SEQ ID NO: 915537 - RNA, 20 nt, Human
ccccgcucccucaccgcgcc

SEQ ID NO: 915538 - RNA, 21 nt, Human
ccccgcucccucaccgcgcca

SEQ ID NO: 915539 - RNA, 18 nt, Human
ccccggggagcccgccgg

SEQ ID NO: 915540 - RNA, 21 nt, Human
ccccgugccggagccggaagg

SEQ ID NO: 915541 - RNA, 18 nt, Human
ccccuuccuggggccaag

SEQ ID NO: 915542 - RNA, 18 nt, Human
ccccuuccuggggccaag

SEQ ID NO: 915543 - RNA, 22 nt, Human
ccccuuccuggggccaaggcag

SEQ ID NO: 915544 - RNA, 22 nt, Human
ccccuuccuggggccaaggcag

SEQ ID NO: 915545 - RNA, 23 nt, Human
cccgacucugcucccacccuccc

SEQ ID NO: 915546 - RNA, 25 nt, Human
cccgauccccgaccccauauccagc

SEQ ID NO: 915547 - RNA, 21 nt, Human
cccggggcggcggcggcggcg

SEQ ID NO: 915548 - RNA, 20 nt, Human
cccgugccggagccggaagg

SEQ ID NO: 915549 - RNA, 21 nt, Human
cccgugccggagccggaaggg

SEQ ID NO: 915550 - RNA, 27 nt, Human
cccucccaaacccgacucugcucccac

SEQ ID NO: 915551 - RNA, 22 nt, Human
cccucccgccccgccccgggga

SEQ ID NO: 915552 - RNA, 19 nt, Human
cccugcaguccccuggccc

SEQ ID NO: 915553 - RNA, 21 nt, Human
cccuggccccguccuccccgu

SEQ ID NO: 915554 - RNA, 22 nt, Human
ccgacucugcucccacccuccc

SEQ ID NO: 915555 - RNA, 24 nt, Human
ccgauccccacccccgcucccuca

SEQ ID NO: 915556 - RNA, 24 nt, Human
ccgauccccgaccccauauccagc

SEQ ID NO: 915557 - RNA, 18 nt, Human
ccgcaaccuccgccuccu

SEQ ID NO: 915558 - RNA, 22 nt, Human
ccgcaaccuccgccuccugggu

SEQ ID NO: 915559 - RNA, 23 nt, Human
ccgcccgccccuccuccccgggc

SEQ ID NO: 915560 - RNA, 21 nt, Human
ccgcccgggccccccaacgcc

SEQ ID NO: 915561 - RNA, 19 nt, Human
ccgcuccgcaccccgcccc

SEQ ID NO: 915562 - RNA, 22 nt, Human
ccgggccugacagaaacccgcc

SEQ ID NO: 915563 - RNA, 21 nt, Human
ccggggcggcggcggcggcuu

SEQ ID NO: 915564 - RNA, 19 nt, Human
ccuaacucccgauccccga

SEQ ID NO: 915565 - RNA, 21 nt, Human
ccucccaucuagcccaaauac

SEQ ID NO: 915566 - RNA, 22 nt, Human
ccuccccgggccugacagaaac

SEQ ID NO: 915567 - RNA, 21 nt, Human
ccuccccgggccugacagaac

SEQ ID NO: 915568 - RNA, 20 nt, Human
ccucccgccccgccccgggg

SEQ ID NO: 915569 - RNA, 21 nt, Human
ccuccgaacgccucggggccc

SEQ ID NO: 915570 - RNA, 19 nt, Human
ccucggggccccgugccgg

SEQ ID NO: 915571 - RNA, 26 nt, Human
ccugcaguccccuggccccguccucc

SEQ ID NO: 915572 - RNA, 18 nt, Human
ccuggccccguccucccc

SEQ ID NO: 915573 - RNA, 23 nt, Human
ccuggggccaaggcagugguuug

SEQ ID NO: 915574 - RNA, 23 nt, Human
ccuggggccaaggcagugguuug

SEQ ID NO: 915575 - RNA, 21 nt, Human
ccugguugagggggugagaag

SEQ ID NO: 915576 - RNA, 25 nt, Human
ccuugugcugggucuacuggguauc

SEQ ID NO: 915577 - RNA, 19 nt, Human
cgaccccauauccagcucu

SEQ ID NO: 915578 - RNA, 27 nt, Human
cgccauggucgcgcccgucccguuacc

SEQ ID NO: 915579 - RNA, 27 nt, Human
cgccccgcccgccccuccuccccgggc

SEQ ID NO: 915580 - RNA, 19 nt, Human
cggaaggggaggagggcug

SEQ ID NO: 915581 - RNA, 19 nt, Human
cggaccgauccccaccccc

SEQ ID NO: 915582 - RNA, 20 nt, Human
cggcuagaaguaagagugcc

SEQ ID NO: 915583 - RNA, 21 nt, Human
cggggccccgugccggagccg

SEQ ID NO: 915584 - RNA, 25 nt, Human
cuaacucccgauccccgaccccaua

SEQ ID NO: 915585 - RNA, 24 nt, Human
cuacaagucugaccauaucucauc

SEQ ID NO: 915586 - RNA, 22 nt, Human
cuagccccaagguaucuuaaaa

SEQ ID NO: 915587 - RNA, 23 nt, Human
cuagccccaagguaucuuaaaag

SEQ ID NO: 915588 - RNA, 23 nt, Human
cucauugcuaaagcccucccaaa

SEQ ID NO: 915589 - RNA, 23 nt, Human
cuccaaacuggauuuccuggauc

SEQ ID NO: 915590 - RNA, 19 nt, Human
cucccaaacccgacucugc

SEQ ID NO: 915591 - RNA, 22 nt, Human
cucccacccucccaucuagccc

SEQ ID NO: 915592 - RNA, 22 nt, Human
cucccccggaccgauccccacc

SEQ ID NO: 915593 - RNA, 19 nt, Human
cugccccucaccaucccau

SEQ ID NO: 915594 - RNA, 26 nt, Human
cuggggcuugggugaucaucacaggg

SEQ ID NO: 915595 - RNA, 19 nt, Human
cuucagagaugcugcgccu

SEQ ID NO: 915596 - RNA, 19 nt, Human
cuucagagaugcugcgccu

SEQ ID NO: 915597 - RNA, 21 nt, Human
cuugcuggcuguaacucucca

SEQ ID NO: 915598 - RNA, 18 nt, Human
cuuugggguuaucuacaa

SEQ ID NO: 915599 - RNA, 21 nt, Human
gaaggcagguggaacaccugc

SEQ ID NO: 915600 - RNA, 20 nt, Human
gaaggggaggagggcugggc

SEQ ID NO: 915601 - RNA, 18 nt, Human
gacaagagcaaaugcagc

SEQ ID NO: 915602 - RNA, 20 nt, Human
gacaagagcaaaugcagcag

SEQ ID NO: 915603 - RNA, 19 nt, Human
gaccccauauccagcucuc

SEQ ID NO: 915604 - RNA, 19 nt, Human
gagcagauccaaacuucca

SEQ ID NO: 915605 - RNA, 19 nt, Human
gagcagauccaaacuucca

SEQ ID NO: 915606 - RNA, 27 nt, Human
gagcaggugcacacacagcacaucccc

SEQ ID NO: 915607 - RNA, 20 nt, Human
gaggcugcuggaagacagcu

SEQ ID NO: 915608 - RNA, 19 nt, Human
gaggcuggaagacagcuuu

SEQ ID NO: 915609 - RNA, 18 nt, Human
gaggugucucugcuaaaa

SEQ ID NO: 915610 - RNA, 19 nt, Human
gaucucugauucugaucug

SEQ ID NO: 915611 - RNA, 21 nt, Human
gaucugcuaaaagucuagagc

SEQ ID NO: 915612 - RNA, 18 nt, Human
gcaccuugcuggcuguaa

SEQ ID NO: 915613 - RNA, 21 nt, Human
gcagcagggcgaggugucuga

SEQ ID NO: 915614 - RNA, 20 nt, Human
gcagcggccgccccgcccgc

SEQ ID NO: 915615 - RNA, 23 nt, Human
gccaccucacguuuggacaccac

SEQ ID NO: 915616 - RNA, 23 nt, Human
gccagcggccucaggccuccccc

SEQ ID NO: 915617 - RNA, 27 nt, Human
gccccggggagcccgccggcccgcuuc

SEQ ID NO: 915618 - RNA, 22 nt, Human
gcccgccccuccuccccgggcc

SEQ ID NO: 915619 - RNA, 26 nt, Human
gcccggggcggcggcggcggcggcga

SEQ ID NO: 915620 - RNA, 19 nt, Human
gccgccccgcccgccccuc

SEQ ID NO: 915621 - RNA, 18 nt, Human
gccugggaggaggucaga

SEQ ID NO: 915622 - RNA, 19 nt, Human
gcggcggcgaaagaggggg

SEQ ID NO: 915623 - RNA, 18 nt, Human
gcggcggcggcgaaagag

SEQ ID NO: 915624 - RNA, 20 nt, Human
gcggcggcggcgaaagaggg

SEQ ID NO: 915625 - RNA, 22 nt, Human
gcggcggcggcgaaagaggggg

SEQ ID NO: 915626 - RNA, 24 nt, Human
gcggcggcggcgaaagaggggggc

SEQ ID NO: 915627 - RNA, 26 nt, Human
gcggcggcggcgaaagaggggggcgg

SEQ ID NO: 915628 - RNA, 20 nt, Human
gcggggcaacaaggaaaaag

SEQ ID NO: 915629 - RNA, 23 nt, Human
gcuuccuuuuuuuuuuuuuauuu

SEQ ID NO: 915630 - RNA, 24 nt, Human
ggagacagaucuccuacaagguca

SEQ ID NO: 915631 - RNA, 26 nt, Human
ggaggcaggcuuuacagagaggacuu

SEQ ID NO: 915632 - RNA, 18 nt, Human
ggcaggcuccgaaggcag

SEQ ID NO: 915633 - RNA, 20 nt, Human
ggcggcggcggcgaaagagg

SEQ ID NO: 915634 - RNA, 19 nt, Human
ggcuaagacagccuggggc

SEQ ID NO: 915635 - RNA, 18 nt, Human
ggcuccccgcccgggccc

SEQ ID NO: 915636 - RNA, 21 nt, Human
ggcuuggccagguuuggaggc

SEQ ID NO: 915637 - RNA, 26 nt, Human
gggaaccccuuuuuaaccuggguguc

SEQ ID NO: 915638 - RNA, 19 nt, Human
gggaggagggcugggcagg

SEQ ID NO: 915639 - RNA, 20 nt, Human
gggcggugcagccgcccugc

SEQ ID NO: 915640 - RNA, 19 nt, Human
ggggcggcggcggcggcgg

SEQ ID NO: 915641 - RNA, 20 nt, Human
ggggcggcggcggcggcggc

SEQ ID NO: 915642 - RNA, 22 nt, Human
gggggcaccuugcuggcuguaa

SEQ ID NO: 915643 - RNA, 18 nt, Human
gggucuacuggguaucuc

SEQ ID NO: 915644 - RNA, 18 nt, Human
gguaagcagaaggugggg

SEQ ID NO: 915645 - RNA, 22 nt, Human
gguuacaagguaccaaaaaggg

SEQ ID NO: 915646 - RNA, 21 nt, Human
guaggcugaugaaauaugauu

SEQ ID NO: 915647 - RNA, 18 nt, Human
guccaagagcccagccgc

SEQ ID NO: 915648 - RNA, 24 nt, Human
gucgcuguggaccgcgggaggggc

SEQ ID NO: 915649 - RNA, 24 nt, Human
guggcaggcuccgaaggcaggugg

SEQ ID NO: 915650 - RNA, 20 nt, Human
guggcucaguucugagggcc

SEQ ID NO: 915651 - RNA, 21 nt, Human
uaaagcccucccaaacccgac

SEQ ID NO: 915652 - RNA, 25 nt, Human
uaacauguugcccaagcuggagggu

SEQ ID NO: 915653 - RNA, 23 nt, Human
uaacgaggugucucugcuaaaaa

SEQ ID NO: 915654 - RNA, 21 nt, Human
uaacucccgauccccgacccc

SEQ ID NO: 915655 - RNA, 23 nt, Human
uaagaauguguuacacuuuccau

SEQ ID NO: 915656 - RNA, 21 nt, Human
uaagacagccuggggcuuggg

SEQ ID NO: 915657 - RNA, 23 nt, Human
uacacccuucucccuaacucccg

SEQ ID NO: 915658 - RNA, 22 nt, Human
uacuggguaucucuuuaauuga

SEQ ID NO: 915659 - RNA, 22 nt, Human
uauggccccuuccuggggccaa

SEQ ID NO: 915660 - RNA, 22 nt, Human
uauggccccuuccuggggccaa

SEQ ID NO: 915661 - RNA, 23 nt, Human
uauuccagacaggauggaggaau

SEQ ID NO: 915662 - RNA, 24 nt, Human
ucaccgcaaccuccgccuccuggg

SEQ ID NO: 915663 - RNA, 25 nt, Human
ucaccgcaaccuccgccuccugggu

SEQ ID NO: 915664 - RNA, 20 nt, Human
ucagcaaagauggggagggu

SEQ ID NO: 915665 - RNA, 24 nt, Human
ucauaacauguugcccaagcugga

SEQ ID NO: 915666 - RNA, 21 nt, Human
uccaaacuuccauucuucauu

SEQ ID NO: 915667 - RNA, 21 nt, Human
uccaaacuuccauucuucauu

SEQ ID NO: 915668 - RNA, 18 nt, Human
uccaagagcccagccgcu

SEQ ID NO: 915669 - RNA, 21 nt, Human
uccagacaggauggaggaaua

SEQ ID NO: 915670 - RNA, 20 nt, Human
uccagcagccccagugaagu

SEQ ID NO: 915671 - RNA, 20 nt, Human
uccagcagccccagugaagu

SEQ ID NO: 915672 - RNA, 22 nt, Human
uccauaaauuacaaaguuaauc

SEQ ID NO: 915673 - RNA, 23 nt, Human
uccauacacauuauggcaacaug

SEQ ID NO: 915674 - RNA, 23 nt, Human
uccauagcacuugguucuggaag

SEQ ID NO: 915675 - RNA, 18 nt, Human
ucccaaagggaaauaacc

SEQ ID NO: 915676 - RNA, 23 nt, Human
uccccacccccgcucccucaccc

SEQ ID NO: 915677 - RNA, 18 nt, Human
ucccccggaccgaucccc

SEQ ID NO: 915678 - RNA, 21 nt, Human
ucccccuccucuucagcuaaa

SEQ ID NO: 915679 - RNA, 22 nt, Human
uccccgcccgggccccccaacg

SEQ ID NO: 915680 - RNA, 20 nt, Human
uccccgggccugacagaaac

SEQ ID NO: 915681 - RNA, 18 nt, Human
ucccgccccgccccgggg

SEQ ID NO: 915682 - RNA, 23 nt, Human
uccuggccagagcagccuguggc

SEQ ID NO: 915683 - RNA, 22 nt, Human
ucgcuguggaccgcgggagggg

SEQ ID NO: 915684 - RNA, 19 nt, Human
ucugaaguuuucccaaagg

SEQ ID NO: 915685 - RNA, 24 nt, Human
ucugccucuuccagaagguuuccc

SEQ ID NO: 915686 - RNA, 24 nt, Human
ucugccucuuccagaagguuuccc

SEQ ID NO: 915687 - RNA, 20 nt, Human
ugaaauuucagaaacaaaac

SEQ ID NO: 915688 - RNA, 25 nt, Human
ugaccauaucucaucccaaaucccc

SEQ ID NO: 915689 - RNA, 19 nt, Human
ugagaagaugcaggaaugu

SEQ ID NO: 915690 - RNA, 29 nt, Human
ugagaucucugguguugaccugguguauu

SEQ ID NO: 915691 - RNA, 19 nt, Human
ugaggccaggucaaaaccc

SEQ ID NO: 915692 - RNA, 22 nt, Human
ugaggccaggucaaaacccaca

SEQ ID NO: 915693 - RNA, 18 nt, Human
ugagucaggcacagagac

SEQ ID NO: 915694 - RNA, 18 nt, Human
ugagucaggcacagagac

SEQ ID NO: 915695 - RNA, 23 nt, Human
ugcggcaguuguucagaccuacc

SEQ ID NO: 915696 - RNA, 19 nt, Human
uggauuuccuggaucacau

SEQ ID NO: 915697 - RNA, 22 nt, Human
uggcucaguucugagggccugg

SEQ ID NO: 915698 - RNA, 23 nt, Human
uggcucaguucugagggccuggg

SEQ ID NO: 915699 - RNA, 21 nt, Human
uggcuguaacucuccaggcac

SEQ ID NO: 915700 - RNA, 18 nt, Human
ugggaggaggucagaagg

SEQ ID NO: 915701 - RNA, 23 nt, Human
ugggaggaggucagaaggaagaa

SEQ ID NO: 915702 - RNA, 22 nt, Human
uggggagaaaaaaucaagggua

SEQ ID NO: 915703 - RNA, 21 nt, Human
ugggugaucaucacaggguuc

SEQ ID NO: 915704 - RNA, 23 nt, Human
uguaccucccccaaugcagaaca

SEQ ID NO: 915705 - RNA, 18 nt, Human
ugucacaggcugcagucu

SEQ ID NO: 915706 - RNA, 18 nt, Human
uguccaagagcccagccg

SEQ ID NO: 915707 - RNA, 19 nt, Human
ugugcacaauacuccauaa

SEQ ID NO: 915708 - RNA, 18 nt, Human
uuccaaaaaagccugugg

SEQ ID NO: 915709 - RNA, 21 nt, Human
uuccugguugagggggugaga

SEQ ID NO: 915710 - RNA, 25 nt, Human
uuccugguugagggggugggguucc

SEQ ID NO: 915711 - RNA, 29 nt, Human
uuccuuuuuuuuuuuuuauuuuuugagaa

SEQ ID NO: 915712 - RNA, 24 nt, Human
uugcggcaguuguucagaccuacc

SEQ ID NO: 915713 - RNA, 24 nt, Human
uugguucuggaaggacccuugugc

SEQ ID NO: 915714 - RNA, 25 nt, Human
uuuuuuauuuuuugagauggaguuu

SEQ ID NO: 915715 - RNA, 30 nt, Human
uuuuuuuuuuugcuuccuuuuuuuuuuuuu

SEQ ID NO: 915716 - RNA, 22 nt, Human
uuuuuuuuuuuuuuugcuuccu

SEQ ID NO: 915717 - RNA, 19 nt, Human
uuuuuuuuuuuuuuuugcu

SEQ ID NO: 915718 - RNA, 18 nt, Human
uuuuuuuuuuuuuuuuug

SEQ ID NO: 915719 - RNA, 21 nt, Human
uuuuuuuuuuuuuuuuugcuu

SEQ ID NO: 915720 - RNA, 21 nt, Human
aagaauggggggucugggugg

SEQ ID NO: 915721 - RNA, 28 nt, Human
acacaucuucagggauggagggaacgcc

SEQ ID NO: 915722 - RNA, 25 nt, Human
acacaucuuggccccaaaaggacuc

SEQ ID NO: 915723 - RNA, 22 nt, Human
agcacagagagccuggcuccgg

SEQ ID NO: 915724 - RNA, 25 nt, Human
aggaagaauggggggucuggguggc

SEQ ID NO: 915725 - RNA, 19 nt, Human
aggacuccaggugacagca

SEQ ID NO: 915726 - RNA, 19 nt, Human
aggcugggggcccuccucg

SEQ ID NO: 915727 - RNA, 18 nt, Human
agggagggugguaggcag

SEQ ID NO: 915728 - RNA, 26 nt, Human
agggccugugaguggggaggagagcu

SEQ ID NO: 915729 - RNA, 23 nt, Human
agggcuuugggaagagaguuuga

SEQ ID NO: 915730 - RNA, 20 nt, Human
agggggccaggggccuuuau

SEQ ID NO: 915731 - RNA, 19 nt, Human
aguugaggguuuauugcca

SEQ ID NO: 915732 - RNA, 18 nt, Human
auccacagcagccgucag

SEQ ID NO: 915733 - RNA, 19 nt, Human
auuccaaaugagcacugca

SEQ ID NO: 915734 - RNA, 24 nt, Human
caacaagcccucucucaagggggc

SEQ ID NO: 915735 - RNA, 18 nt, Human
caaggcaagggauccucc

SEQ ID NO: 915736 - RNA, 19 nt, Human
cacagagagccuggcuccg

SEQ ID NO: 915737 - RNA, 21 nt, Human
cacagcagccgucagccgggc

SEQ ID NO: 915738 - RNA, 24 nt, Human
cacaucuuggccccaaaaggacuc

SEQ ID NO: 915739 - RNA, 21 nt, Human
caccaacaagcccucucucaa

SEQ ID NO: 915740 - RNA, 18 nt, Human
caccccuggccagcccuc

SEQ ID NO: 915741 - RNA, 20 nt, Human
cacggccccacuucuccccg

SEQ ID NO: 915742 - RNA, 20 nt, Human
cagcagcucugggcucccag

SEQ ID NO: 915743 - RNA, 26 nt, Human
caucuuggccccaaaaggacuccagg

SEQ ID NO: 915744 - RNA, 18 nt, Human
ccaggcuucugagggaag

SEQ ID NO: 915745 - RNA, 18 nt, Human
ccccacaggaggggagcc

SEQ ID NO: 915746 - RNA, 21 nt, Human
cccccaguuuuacucacagac

SEQ ID NO: 915747 - RNA, 18 nt, Human
ccccccugccacccagga

SEQ ID NO: 915748 - RNA, 19 nt, Human
ccccucauccugggcauuu

SEQ ID NO: 915749 - RNA, 21 nt, Human
cccugccacccaggaggcccc

SEQ ID NO: 915750 - RNA, 21 nt, Human
cccuggccagcccucccucga

SEQ ID NO: 915751 - RNA, 19 nt, Human
cccuggggccggggguggg

SEQ ID NO: 915752 - RNA, 23 nt, Human
ccucaccaacaagcccucucuca

SEQ ID NO: 915753 - RNA, 20 nt, Human
ccuccuuccuggccuccugg

SEQ ID NO: 915754 - RNA, 22 nt, Human
ccuccuuccuggccuccugggc

SEQ ID NO: 915755 - RNA, 21 nt, Human
ccucucucaagggggccaggg

SEQ ID NO: 915756 - RNA, 23 nt, Human
ccuuccuggccuccugggccagg

SEQ ID NO: 915757 - RNA, 21 nt, Human
cgaccccgggugcacacacau

SEQ ID NO: 915758 - RNA, 18 nt, Human
cggcauccacagcagccg

SEQ ID NO: 915759 - RNA, 19 nt, Human
cucaccccugccugggagu

SEQ ID NO: 915760 - RNA, 23 nt, Human
cuccuuccuggccuccugggcca

SEQ ID NO: 915761 - RNA, 20 nt, Human
cugccccccugccacccagg

SEQ ID NO: 915762 - RNA, 21 nt, Human
cugcugccccccugccaccca

SEQ ID NO: 915763 - RNA, 23 nt, Human
cugcugccccccugccacccagg

SEQ ID NO: 915764 - RNA, 22 nt, Human
cuguuagggcuuugggaagaga

SEQ ID NO: 915765 - RNA, 21 nt, Human
gagcugcugccccccugccac

SEQ ID NO: 915766 - RNA, 23 nt, Human
gagcugcugccccccugccaccc

SEQ ID NO: 915767 - RNA, 18 nt, Human
gauccccucauccugggc

SEQ ID NO: 915768 - RNA, 22 nt, Human
gccagucucccaggcugggggc

SEQ ID NO: 915769 - RNA, 23 nt, Human
gcuguggcgggggaccucagcca

SEQ ID NO: 915770 - RNA, 22 nt, Human
ggaggcagacagggcccuccuu

SEQ ID NO: 915771 - RNA, 18 nt, Human
ggcccuggggccgggggu

SEQ ID NO: 915772 - RNA, 25 nt, Human
ggcugggggcccuccucgugggugc

SEQ ID NO: 915773 - RNA, 19 nt, Human
gggcuuugggaagagaguu

SEQ ID NO: 915774 - RNA, 18 nt, Human
ggggucuggguggccagg

SEQ ID NO: 915775 - RNA, 24 nt, Human
ggucuggguggccaggggucuugg

SEQ ID NO: 915776 - RNA, 23 nt, Human
gucacugauccccucauccuggg

SEQ ID NO: 915777 - RNA, 25 nt, Human
gucagcccucaccaacaagcccucu

SEQ ID NO: 915778 - RNA, 19 nt, Human
gucccaccccuggccagcc

SEQ ID NO: 915779 - RNA, 21 nt, Human
uacccugcggucuuggggcac

SEQ ID NO: 915780 - RNA, 22 nt, Human
uaggaagaauggggggucuggg

SEQ ID NO: 915781 - RNA, 18 nt, Human
uaggcagggggugcaccc

SEQ ID NO: 915782 - RNA, 23 nt, Human
uauuccucaugggacaggcuggc

SEQ ID NO: 915783 - RNA, 18 nt, Human
ucagcagcucugggcucc

SEQ ID NO: 915784 - RNA, 21 nt, Human
ucagcccucaccaacaagccc

SEQ ID NO: 915785 - RNA, 23 nt, Human
ucagccgggcauggcccagagca

SEQ ID NO: 915786 - RNA, 25 nt, Human
ucagggauggaugcaauaagagcca

SEQ ID NO: 915787 - RNA, 18 nt, Human
ucaugggacaggcugggc

SEQ ID NO: 915788 - RNA, 22 nt, Human
ucccaggcugggggcccuccuc

SEQ ID NO: 915789 - RNA, 20 nt, Human
uccuagacagucacugaucc

SEQ ID NO: 915790 - RNA, 21 nt, Human
uccucaugggacaggcugggc

SEQ ID NO: 915791 - RNA, 22 nt, Human
uccugacugcuaguggugccuu

SEQ ID NO: 915792 - RNA, 18 nt, Human
uccugggcauuugagccc

SEQ ID NO: 915793 - RNA, 21 nt, Human
uccugggcauuugagccccca

SEQ ID NO: 915794 - RNA, 20 nt, Human
uccuuccuggccuccugggc

SEQ ID NO: 915795 - RNA, 21 nt, Human
ucgugggugccccggacgugu

SEQ ID NO: 915796 - RNA, 23 nt, Human
ucucccaggcugggggcccuccu

SEQ ID NO: 915797 - RNA, 22 nt, Human
ucuggguggccaggggucuugg

SEQ ID NO: 915798 - RNA, 22 nt, Human
ugacagcaacagccacacaucu

SEQ ID NO: 915799 - RNA, 21 nt, Human
ugaguggggaggagagcugcu

SEQ ID NO: 915800 - RNA, 18 nt, Human
ugccaguguuaggaagaa

SEQ ID NO: 915801 - RNA, 19 nt, Human
ugccaguguuaggaagaau

SEQ ID NO: 915802 - RNA, 18 nt, Human
ugccugggagugaauggc

SEQ ID NO: 915803 - RNA, 25 nt, Human
uggaugcaauaagagccacaccucg

SEQ ID NO: 915804 - RNA, 25 nt, Human
ugggaagagaguuugacguggaggc

SEQ ID NO: 915805 - RNA, 21 nt, Human
ugggagugaauggccacgacc

SEQ ID NO: 915806 - RNA, 18 nt, Human
ugggcccuggggccgggg

SEQ ID NO: 915807 - RNA, 21 nt, Human
uggggaggagagcugcugccc

SEQ ID NO: 915808 - RNA, 27 nt, Human
ugggggcccuccucguggggggacacc

SEQ ID NO: 915809 - RNA, 23 nt, Human
uggguggccaggggucuugggag

SEQ ID NO: 915810 - RNA, 23 nt, Human
ugguaggcagggggugcacccag

SEQ ID NO: 915811 - RNA, 25 nt, Human
ugguaggcagggggugcacccagag

SEQ ID NO: 915812 - RNA, 21 nt, Human
uuuuauguggugggcccuggg

SEQ ID NO: 915813 - RNA, 23 nt, Human
caaaauucuaggacacaucaaga

SEQ ID NO: 915814 - RNA, 21 nt, Human
caccuggagccuuagcggcgg

SEQ ID NO: 915815 - RNA, 22 nt, Human
ccgccgggagcgagugcaggga

SEQ ID NO: 915816 - RNA, 21 nt, Human
cgcgaagagccgccgggagcg

SEQ ID NO: 915817 - RNA, 20 nt, Human
cuaguggaccccugcaggag

SEQ ID NO: 915818 - RNA, 19 nt, Human
gaggauggagggcuagugg

SEQ ID NO: 915819 - RNA, 18 nt, Human
gcaccuggagccuuagcg

SEQ ID NO: 915820 - RNA, 24 nt, Human
guccagucgccucaccgugacuca

SEQ ID NO: 915821 - RNA, 19 nt, Human
uaagagaguguggguccag

SEQ ID NO: 915822 - RNA, 18 nt, Human
uacaaaaaccauguuauc

SEQ ID NO: 915823 - RNA, 26 nt, Human
uacauuuauuguuacaaaaaccaugu

SEQ ID NO: 915824 - RNA, 18 nt, Human
uagaaauggaaugccuuc

SEQ ID NO: 915825 - RNA, 22 nt, Human
uggaaugccuucaauggcucaa

SEQ ID NO: 915826 - RNA, 21 nt, Human
uggaccccugcaggagcccca

SEQ ID NO: 915827 - RNA, 19 nt, Human
uggcaaaauucuaggacac

SEQ ID NO: 915828 - RNA, 19 nt, Human
uguagaggauggagggcua

SEQ ID NO: 915829 - RNA, 21 nt, Human
ugugccaggaaauauccuaca

SEQ ID NO: 915830 - RNA, 22 nt, Human
uuuuuuuuuuuuuaaagaaaca

SEQ ID NO: 915831 - RNA, 23 nt, Human
aaaaaacaaaaggggccaacaga

SEQ ID NO: 915832 - RNA, 25 nt, Human
aaaaaacaaaaggggccaacagaaa

SEQ ID NO: 915833 - RNA, 25 nt, Human
aaaaacgacaaccgagaccaacuga

SEQ ID NO: 915834 - RNA, 23 nt, Human
aaaacaaaaggggccaacagaaa

SEQ ID NO: 915835 - RNA, 21 nt, Human
aaacaaaaggggccaacagaa

SEQ ID NO: 915836 - RNA, 20 nt, Human
aaacaagcgccgagaccagg

SEQ ID NO: 915837 - RNA, 23 nt, Human
aagcaguugucacgaaggcugug

SEQ ID NO: 915838 - RNA, 19 nt, Human
aagcgccgagaccagggug

SEQ ID NO: 915839 - RNA, 18 nt, Human
accucuugucugcaccuc

SEQ ID NO: 915840 - RNA, 21 nt, Human
accuggauggccucaugggcc

SEQ ID NO: 915841 - RNA, 20 nt, Human
acucgaucacucccuuuguu

SEQ ID NO: 915842 - RNA, 24 nt, Human
agaaaacagcucaggugauggggg

SEQ ID NO: 915843 - RNA, 21 nt, Human
agagcaggaugaggugaaugu

SEQ ID NO: 915844 - RNA, 19 nt, Human
agcagccauaaucaggaaa

SEQ ID NO: 915845 - RNA, 19 nt, Human
agccacaagcacaaagacu

SEQ ID NO: 915846 - RNA, 18 nt, Human
agcugggccuacuaccug

SEQ ID NO: 915847 - RNA, 22 nt, Human
aggaacgggauagguugagggg

SEQ ID NO: 915848 - RNA, 21 nt, Human
aggaacucucccauuucccca

SEQ ID NO: 915849 - RNA, 22 nt, Human
aggagcagcaagaaaaaacgac

SEQ ID NO: 915850 - RNA, 25 nt, Human
aggggccaacagaaaacagcucagg

SEQ ID NO: 915851 - RNA, 21 nt, Human
agguugaggggcaugaugggg

SEQ ID NO: 915852 - RNA, 18 nt, Human
aguugaaaaaauucaaug

SEQ ID NO: 915853 - RNA, 23 nt, Human
augggccucccucuugaaaagac

SEQ ID NO: 915854 - RNA, 25 nt, Human
caacagaaaacagcucaggugaugg

SEQ ID NO: 915855 - RNA, 22 nt, Human
caacaugaaaucuggcccuguc

SEQ ID NO: 915856 - RNA, 21 nt, Human
caaccacgcugaggcaggccc

SEQ ID NO: 915857 - RNA, 18 nt, Human
caagacagacccugaauc

SEQ ID NO: 915858 - RNA, 18 nt, Human
caaggguccucugccucc

SEQ ID NO: 915859 - RNA, 22 nt, Human
caaggguccucugccuccaaga

SEQ ID NO: 915860 - RNA, 19 nt, Human
caauagcagcaacuuuccc

SEQ ID NO: 915861 - RNA, 26 nt, Human
caaugaugucucuccugcaggagaaa

SEQ ID NO: 915862 - RNA, 18 nt, Human
cacaagcacaaagacugc

SEQ ID NO: 915863 - RNA, 20 nt, Human
cacagcauccccagggucaa

SEQ ID NO: 915864 - RNA, 21 nt, Human
cacagcauccccagggucaac

SEQ ID NO: 915865 - RNA, 19 nt, Human
cacccugugcagcaggagc

SEQ ID NO: 915866 - RNA, 22 nt, Human
caccgucugucccucucagagc

SEQ ID NO: 915867 - RNA, 19 nt, Human
caccucuugucugcaccuc

SEQ ID NO: 915868 - RNA, 20 nt, Human
cacucccuuuguuuuccucu

SEQ ID NO: 915869 - RNA, 19 nt, Human
cagaagacacuagcagagu

SEQ ID NO: 915870 - RNA, 19 nt, Human
cagaagucucccacuuuuc

SEQ ID NO: 915871 - RNA, 23 nt, Human
cagcaagaaaaaacgacaaccga

SEQ ID NO: 915872 - RNA, 23 nt, Human
cagcaggagcguuaaggccaaaa

SEQ ID NO: 915873 - RNA, 21 nt, Human
cagguggcuccagcuuccccu

SEQ ID NO: 915874 - RNA, 23 nt, Human
cagugauugauuggucuugccug

SEQ ID NO: 915875 - RNA, 22 nt, Human
cauuuccccagcugggccuacu

SEQ ID NO: 915876 - RNA, 21 nt, Human
ccaaggguccucugccuccaa

SEQ ID NO: 915877 - RNA, 20 nt, Human
ccaccaaggguccucugccu

SEQ ID NO: 915878 - RNA, 21 nt, Human
ccccagaagaucgccagggag

SEQ ID NO: 915879 - RNA, 20 nt, Human
ccccagcugggccuacuacc

SEQ ID NO: 915880 - RNA, 24 nt, Human
ccccaggacacaggcugagcacca

SEQ ID NO: 915881 - RNA, 24 nt, Human
ccgccacugggggcuccccagggg

SEQ ID NO: 915882 - RNA, 24 nt, Human
ccucagaagacacuagcagagucc

SEQ ID NO: 915883 - RNA, 23 nt, Human
ccucugccuccaagacagacccu

SEQ ID NO: 915884 - RNA, 20 nt, Human
ccugaaucaauagcagcaac

SEQ ID NO: 915885 - RNA, 24 nt, Human
ccuuaccuggauggccucaugggc

SEQ ID NO: 915886 - RNA, 26 nt, Human
cgaggcucacucgaucacucccuuug

SEQ ID NO: 915887 - RNA, 21 nt, Human
cggcgcagggagggcggggcg

SEQ ID NO: 915888 - RNA, 18 nt, Human
cgggauagguugaggggc

SEQ ID NO: 915889 - RNA, 23 nt, Human
cgucugucccucucagagccgca

SEQ ID NO: 915890 - RNA, 21 nt, Human
cguuaaggccaaaaaacaaaa

SEQ ID NO: 915891 - RNA, 20 nt, Human
cuaaaacaagcgccgagacc

SEQ ID NO: 915892 - RNA, 20 nt, Human
cucccauuuccccagcuggg

SEQ ID NO: 915893 - RNA, 22 nt, Human
cugguugguggcgccgcuuccu

SEQ ID NO: 915894 - RNA, 21 nt, Human
cuuuccuccccuucccccgag

SEQ ID NO: 915895 - RNA, 18 nt, Human
gaaaagacccucacucug

SEQ ID NO: 915896 - RNA, 21 nt, Human
gaaaagaucccuuagcagcca

SEQ ID NO: 915897 - RNA, 23 nt, Human
gacccugaaucaauagcagcaac

SEQ ID NO: 915898 - RNA, 24 nt, Human
gagcagcaagaaaaaacgacaacc

SEQ ID NO: 915899 - RNA, 18 nt, Human
gagcaggaugaggugaau

SEQ ID NO: 915900 - RNA, 18 nt, Human
gaucgccagggaggaaaa

SEQ ID NO: 915901 - RNA, 21 nt, Human
ggaaagcaguugucacgaagg

SEQ ID NO: 915902 - RNA, 24 nt, Human
ggaaagcaguugucacgaaggcuc

SEQ ID NO: 915903 - RNA, 27 nt, Human
ggaacucucccauuuccccagcugggc

SEQ ID NO: 915904 - RNA, 21 nt, Human
ggagaaauucacagcaucccc

SEQ ID NO: 915905 - RNA, 18 nt, Human
ggagggcggggcgaggcu

SEQ ID NO: 915906 - RNA, 23 nt, Human
gggugcagaauagagggucaggg

SEQ ID NO: 915907 - RNA, 31 nt, Human
ggugauggggggaggagcagcaagaaaaaag

SEQ ID NO: 915908 - RNA, 18 nt, Human
gucacgaaggcugugugg

SEQ ID NO: 915909 - RNA, 20 nt, Human
gugcagaauagagggucagg

SEQ ID NO: 915910 - RNA, 22 nt, Human
uaaaaagauccaaaugugacug

SEQ ID NO: 915911 - RNA, 22 nt, Human
uaaaacaagcgccgagaccagg

SEQ ID NO: 915912 - RNA, 21 nt, Human
uaaaugaauuacuguucagaa

SEQ ID NO: 915913 - RNA, 21 nt, Human
uaccugccugcccuguucacu

SEQ ID NO: 915914 - RNA, 18 nt, Human
uaccuggauggccucaug

SEQ ID NO: 915915 - RNA, 21 nt, Human
uagcagaguccagggugaugc

SEQ ID NO: 915916 - RNA, 22 nt, Human
uauacaguguuuaaaaagaucc

SEQ ID NO: 915917 - RNA, 21 nt, Human
uaucaccagcugugggcccca

SEQ ID NO: 915918 - RNA, 21 nt, Human
ucacccugugcagcaggagcu

SEQ ID NO: 915919 - RNA, 20 nt, Human
ucaggugauggggggaggag

SEQ ID NO: 915920 - RNA, 20 nt, Human
uccaagacagacccugaauc

SEQ ID NO: 915921 - RNA, 22 nt, Human
uccccagcugggccuacuaccu

SEQ ID NO: 915922 - RNA, 19 nt, Human
uccccaggccugcguuccu

SEQ ID NO: 915923 - RNA, 23 nt, Human
ucccccgagccagcagaucuccu

SEQ ID NO: 915924 - RNA, 24 nt, Human
uccugugcugucacugcuccaggg

SEQ ID NO: 915925 - RNA, 24 nt, Human
ucuccugcaggagaaauucacagc

SEQ ID NO: 915926 - RNA, 19 nt, Human
ucuccugugcugucacugc

SEQ ID NO: 915927 - RNA, 21 nt, Human
ugaaucaauagcagcaacuuu

SEQ ID NO: 915928 - RNA, 24 nt, Human
ugaaucaauagcagcaacuuuccc

SEQ ID NO: 915929 - RNA, 21 nt, Human
ugaauuacuguucagaagucu

SEQ ID NO: 915930 - RNA, 21 nt, Human
ugaggcaggcccuuaccugga

SEQ ID NO: 915931 - RNA, 18 nt, Human
ugccagugagcccaguga

SEQ ID NO: 915932 - RNA, 22 nt, Human
ugcccuguucacucuggugcca

SEQ ID NO: 915933 - RNA, 24 nt, Human
ugccugcccuguucacucuggugc

SEQ ID NO: 915934 - RNA, 20 nt, Human
ugcuccagggccucugccuc

SEQ ID NO: 915935 - RNA, 23 nt, Human
ugcugggggagaggcauccacag

SEQ ID NO: 915936 - RNA, 20 nt, Human
uggccucaugggccucccuc

SEQ ID NO: 915937 - RNA, 20 nt, Human
uggcuccagcuuccccucgu

SEQ ID NO: 915938 - RNA, 23 nt, Human
ugggacagguuuuccaggcacug

SEQ ID NO: 915939 - RNA, 23 nt, Human
ugggccccagaagaucgccaggg

SEQ ID NO: 915940 - RNA, 19 nt, Human
uggggggaggagcagcaag

SEQ ID NO: 915941 - RNA, 23 nt, Human
ugguggcgccgcuuccuggguuu

SEQ ID NO: 915942 - RNA, 21 nt, Human
ugguugguggcgccgcuuccu

SEQ ID NO: 915943 - RNA, 21 nt, Human
uguucugccucuucuaaaaca

SEQ ID NO: 915944 - RNA, 19 nt, Human
uuauuuguaggcagaagga

SEQ ID NO: 915945 - RNA, 22 nt, Human
uuguaggcagaaggaacgggau

SEQ ID NO: 915946 - RNA, 22 nt, Human
uuuguaggcagaaggaacggga

SEQ ID NO: 915947 - RNA, 24 nt, Human
uuuuccucuuuccuccccuucccc

SEQ ID NO: 915948 - RNA, 21 nt, Human
uuuuuuuuuuuuuuuuuuaag

SEQ ID NO: 915949 - RNA, 20 nt, Human
acaccgaggagcacacggag

SEQ ID NO: 915950 - RNA, 21 nt, Human
agggaaguaacaccgaggagc

SEQ ID NO: 915951 - RNA, 23 nt, Human
caccgaggagcacacggagauau

SEQ ID NO: 915952 - RNA, 22 nt, Human
cacgggaccccauguccgggcc

SEQ ID NO: 915953 - RNA, 20 nt, Human
cagccccucgggccccuugg

SEQ ID NO: 915954 - RNA, 20 nt, Human
cagccucccacacgcagccc

SEQ ID NO: 915955 - RNA, 18 nt, Human
ccacacgcagccccucgg

SEQ ID NO: 915956 - RNA, 22 nt, Human
ccccauguccgggcccgccacg

SEQ ID NO: 915957 - RNA, 23 nt, Human
cccgccacgagggaggcagaggc

SEQ ID NO: 915958 - RNA, 19 nt, Human
cccggcgcuggguccccuc

SEQ ID NO: 915959 - RNA, 20 nt, Human
cccucauaugaaagggaagu

SEQ ID NO: 915960 - RNA, 22 nt, Human
ccgcgcgcggccuccgcuccuc

SEQ ID NO: 915961 - RNA, 19 nt, Human
cgcccuccucccucccccc

SEQ ID NO: 915962 - RNA, 20 nt, Human
cgcgcgcggccuccgcuccu

SEQ ID NO: 915963 - RNA, 25 nt, Human
cucugcgcccaugcccacgcccucc

SEQ ID NO: 915964 - RNA, 18 nt, Human
gaccccauguccgggccc

SEQ ID NO: 915965 - RNA, 25 nt, Human
gcacggcgcgacagucagugcgggg

SEQ ID NO: 915966 - RNA, 24 nt, Human
gcccacgcccuccucccucccccc

SEQ ID NO: 915967 - RNA, 18 nt, Human
ggccgagggacucaggcc

SEQ ID NO: 915968 - RNA, 24 nt, Human
ggccgagggacucaggccacggga

SEQ ID NO: 915969 - RNA, 20 nt, Human
gggaccccauguccgggccc

SEQ ID NO: 915970 - RNA, 19 nt, Human
ggguguggggcuggggggg

SEQ ID NO: 915971 - RNA, 19 nt, Human
ggguguggggcuggggggg

SEQ ID NO: 915972 - RNA, 23 nt, Human
ggguguggggcugggggggccag

SEQ ID NO: 915973 - RNA, 21 nt, Human
gugcggggaaggugcgcgcgg

SEQ ID NO: 915974 - RNA, 19 nt, Human
guguggggcugggggggcc

SEQ ID NO: 915975 - RNA, 26 nt, Human
uaacaccgaggagcacacggagauau

SEQ ID NO: 915976 - RNA, 21 nt, Human
uccccagccucccacacgcag

SEQ ID NO: 915977 - RNA, 22 nt, Human
ucugcgcccaugcccacgcccu

SEQ ID NO: 915978 - RNA, 18 nt, Human
ugcggggaaggugcgcgc

SEQ ID NO: 915979 - RNA, 20 nt, Human
ugcggggaaggugcgcgcgg

SEQ ID NO: 915980 - RNA, 18 nt, Human
uguggggcugggggggcc

SEQ ID NO: 915981 - RNA, 22 nt, Human
uuuuuuuuuuuuuuuuuggggu

SEQ ID NO: 915982 - RNA, 19 nt, Human
aaagugcuuggauuacagg

SEQ ID NO: 915983 - RNA, 24 nt, Human
aaagugcuuggauuacagguguga

SEQ ID NO: 915984 - RNA, 19 nt, Human
aaccaccgcacccggucug

SEQ ID NO: 915985 - RNA, 24 nt, Human
accauguuggccaggauggucuug

SEQ ID NO: 915986 - RNA, 25 nt, Human
acccgccucggccucccaaagugcu

SEQ ID NO: 915987 - RNA, 24 nt, Human
acccggcuaauuuuuuuguauuuu

SEQ ID NO: 915988 - RNA, 18 nt, Human
acgggguuucaccauguu

SEQ ID NO: 915989 - RNA, 23 nt, Human
acgggguuucaccauguuggcca

SEQ ID NO: 915990 - RNA, 24 nt, Human
acgggguuucaccauguuggccag

SEQ ID NO: 915991 - RNA, 18 nt, Human
agagucacccgcuccacc

SEQ ID NO: 915992 - RNA, 19 nt, Human
agccuccugaguagcuggg

SEQ ID NO: 915993 - RNA, 21 nt, Human
agccuccugaguagcugggac

SEQ ID NO: 915994 - RNA, 25 nt, Human
aggcuggagugcaguggcgugaucu

SEQ ID NO: 915995 - RNA, 19 nt, Human
aggugugaaccaccgcacc

SEQ ID NO: 915996 - RNA, 19 nt, Human
aguagcugggacuacaggc

SEQ ID NO: 915997 - RNA, 19 nt, Human
aguagcugggacuacaggc

SEQ ID NO: 915998 - RNA, 20 nt, Human
agucaagauggaagggucuc

SEQ ID NO: 915999 - RNA, 22 nt, Human
agucucuguugauucugcaaga

SEQ ID NO: 916000 - RNA, 19 nt, Human
agugcaguggcgugaucuc

SEQ ID NO: 916001 - RNA, 20 nt, Human
agugcaguggcgugaucucg

SEQ ID NO: 916002 - RNA, 23 nt, Human
agugcaguggcgugaucucggcu

SEQ ID NO: 916003 - RNA, 24 nt, Human
agugcaguggcgugaucucggcuc

SEQ ID NO: 916004 - RNA, 24 nt, Human
augauccacccgccucggccuccc

SEQ ID NO: 916005 - RNA, 24 nt, Human
auuuuaguagagacgggguuucac

SEQ ID NO: 916006 - RNA, 24 nt, Human
caaagugcuuggauuacaggugug

SEQ ID NO: 916007 - RNA, 23 nt, Human
caaccuccaccucccggguucaa

SEQ ID NO: 916008 - RNA, 22 nt, Human
caagcgauucuccugccuuagc

SEQ ID NO: 916009 - RNA, 18 nt, Human
caccauguuggccaggau

SEQ ID NO: 916010 - RNA, 22 nt, Human
caccauguuggccaggaugguc

SEQ ID NO: 916011 - RNA, 23 nt, Human
caccauguuggccaggauggucu

SEQ ID NO: 916012 - RNA, 24 nt, Human
caccauguuggccaggauggucuu

SEQ ID NO: 916013 - RNA, 23 nt, Human
cacccgccucggccucccaaagu

SEQ ID NO: 916014 - RNA, 21 nt, Human
cacugcaaccuccaccucccg

SEQ ID NO: 916015 - RNA, 23 nt, Human
cacugcaaccuccaccucccggg

SEQ ID NO: 916016 - RNA, 20 nt, Human
cagagucuugcuuugucaac

SEQ ID NO: 916017 - RNA, 19 nt, Human
caggcuggagugcaguggc

SEQ ID NO: 916018 - RNA, 21 nt, Human
ccaaagugcuuggauuacagg

SEQ ID NO: 916019 - RNA, 24 nt, Human
ccaaagugcuuggauuacaggugu

SEQ ID NO: 916020 - RNA, 24 nt, Human
ccaccucccggguucaagcgauuc

SEQ ID NO: 916021 - RNA, 20 nt, Human
cccggguucaagcgauucuc

SEQ ID NO: 916022 - RNA, 23 nt, Human
cccggguucaagcgauucuccug

SEQ ID NO: 916023 - RNA, 24 nt, Human
ccucccggguucaagcgauucucc

SEQ ID NO: 916024 - RNA, 20 nt, Human
ccugaccucaugauccaccc

SEQ ID NO: 916025 - RNA, 23 nt, Human
ccugaguagcugggacuacaggc

SEQ ID NO: 916026 - RNA, 23 nt, Human
ccugaguagcugggacuacaggc

SEQ ID NO: 916027 - RNA, 23 nt, Human
ccugccuuagccuccugaguagc

SEQ ID NO: 916028 - RNA, 25 nt, Human
cgccucggccucccaaagugcuugg

SEQ ID NO: 916029 - RNA, 24 nt, Human
cucacugcaaccuccaccucccgg

SEQ ID NO: 916030 - RNA, 24 nt, Human
cuccugaccucaugauccacccgc

SEQ ID NO: 916031 - RNA, 20 nt, Human
cucuacacaggcaacaaggc

SEQ ID NO: 916032 - RNA, 18 nt, Human
cugcaaccuccaccuccc

SEQ ID NO: 916033 - RNA, 23 nt, Human
cugcaaccuccaccucccggguu

SEQ ID NO: 916034 - RNA, 24 nt, Human
cugcaaccuccaccucccggguuc

SEQ ID NO: 916035 - RNA, 23 nt, Human
cugccuuagccuccugaguagcu

SEQ ID NO: 916036 - RNA, 24 nt, Human
cuuagccuccugaguagcugggac

SEQ ID NO: 916037 - RNA, 20 nt, Human
cuuggauuacaggugugaac

SEQ ID NO: 916038 - RNA, 24 nt, Human
gacagagucuugcuuugucaacag

SEQ ID NO: 916039 - RNA, 22 nt, Human
gaccucaugauccacccgccuc

SEQ ID NO: 916040 - RNA, 24 nt, Human
gagacgggguuucaccauguuggc

SEQ ID NO: 916041 - RNA, 24 nt, Human
gaguagcugggacuacaggcgugc

SEQ ID NO: 916042 - RNA, 20 nt, Human
gaguucugaggccgccuuuc

SEQ ID NO: 916043 - RNA, 23 nt, Human
gauuacaggugugaaccaccgca

SEQ ID NO: 916044 - RNA, 19 nt, Human
gcuggagugcaguggcgug

SEQ ID NO: 916045 - RNA, 21 nt, Human
ggauuacaggugugaaccacc

SEQ ID NO: 916046 - RNA, 22 nt, Human
ggauuacaggugugaaccaccg

SEQ ID NO: 916047 - RNA, 22 nt, Human
ggcuggagugcaguggcgugau

SEQ ID NO: 916048 - RNA, 23 nt, Human
gggguuucaccauguuggccagg

SEQ ID NO: 916049 - RNA, 22 nt, Human
ggguuucaccauguuggccagg

SEQ ID NO: 916050 - RNA, 20 nt, Human
ggucuugaucuccugaccuc

SEQ ID NO: 916051 - RNA, 24 nt, Human
gguuucaccauguuggccaggaug

SEQ ID NO: 916052 - RNA, 23 nt, Human
guagagacgggguuucaccaugu

SEQ ID NO: 916053 - RNA, 24 nt, Human
gucuugcuuugucaacaggcugga

SEQ ID NO: 916054 - RNA, 25 nt, Human
uaacacaaaagcccacuucagucuc

SEQ ID NO: 916055 - RNA, 23 nt, Human
uacaggcgugcaccgccacaccc

SEQ ID NO: 916056 - RNA, 23 nt, Human
uacaggugugaaccaccgcaccc

SEQ ID NO: 916057 - RNA, 22 nt, Human
uagagacgggguuucaccaugu

SEQ ID NO: 916058 - RNA, 24 nt, Human
uaguagagacgggguuucaccaug

SEQ ID NO: 916059 - RNA, 26 nt, Human
uaguagagacgggguuucaccauguu

SEQ ID NO: 916060 - RNA, 24 nt, Human
ucaacaggcuggagugcaguggcg

SEQ ID NO: 916061 - RNA, 24 nt, Human
ucaccauguuggccaggauggucu

SEQ ID NO: 916062 - RNA, 23 nt, Human
ucacugcaaccuccaccucccgg

SEQ ID NO: 916063 - RNA, 24 nt, Human
ucacugcaaccuccaccucccggg

SEQ ID NO: 916064 - RNA, 25 nt, Human
ucacugcaaccuccaccucccgggu

SEQ ID NO: 916065 - RNA, 27 nt, Human
ucacugcaaccuccaccucccggguuc

SEQ ID NO: 916066 - RNA, 23 nt, Human
ucccaaagugcuuggauuacagg

SEQ ID NO: 916067 - RNA, 21 nt, Human
ucccggguucaagcgauucuc

SEQ ID NO: 916068 - RNA, 24 nt, Human
ucccggguucaagcgauucuccug

SEQ ID NO: 916069 - RNA, 24 nt, Human
uccugaguagcugggacuacaggc

SEQ ID NO: 916070 - RNA, 19 nt, Human
ucuacacaggcaacaaggc

SEQ ID NO: 916071 - RNA, 24 nt, Human
ucuccugccuuagccuccugagua

SEQ ID NO: 916072 - RNA, 21 nt, Human
ucucugguuacuuccuuaacc

SEQ ID NO: 916073 - RNA, 22 nt, Human
ucuugcuuugucaacaggcugg

SEQ ID NO: 916074 - RNA, 23 nt, Human
ucuugcuuugucaacaggcugga

SEQ ID NO: 916075 - RNA, 19 nt, Human
ugaguucugaggccgccuu

SEQ ID NO: 916076 - RNA, 20 nt, Human
ugccuuagccuccugaguaa

SEQ ID NO: 916077 - RNA, 24 nt, Human
ugccuuagccuccugaguagcugg

SEQ ID NO: 916078 - RNA, 20 nt, Human
uggagugcaguggcgugauc

SEQ ID NO: 916079 - RNA, 23 nt, Human
uggagugcaguggcgugaucucg

SEQ ID NO: 916080 - RNA, 24 nt, Human
uggagugcaguggcgugaucucgg

SEQ ID NO: 916081 - RNA, 20 nt, Human
uggauuacaggugugaacca

SEQ ID NO: 916082 - RNA, 23 nt, Human
uggauuacaggugugaaccaccg

SEQ ID NO: 916083 - RNA, 22 nt, Human
uggcaguaccaccguaacuugc

SEQ ID NO: 916084 - RNA, 24 nt, Human
uggccaggauggucuugaucuccu

SEQ ID NO: 916085 - RNA, 20 nt, Human
uggcgugaucucggcucacu

SEQ ID NO: 916086 - RNA, 21 nt, Human
ugggacuacaggcgugcaccg

SEQ ID NO: 916087 - RNA, 24 nt, Human
ugggacuacaggcgugcaccgcca

SEQ ID NO: 916088 - RNA, 18 nt, Human
uuaguagagacgggguuu

SEQ ID NO: 916089 - RNA, 22 nt, Human
uuaguagagacgggguuucacc

SEQ ID NO: 916090 - RNA, 24 nt, Human
uuaguagagacgggguuucaccau

SEQ ID NO: 916091 - RNA, 20 nt, Human
uucaagcgauucuccugccu

SEQ ID NO: 916092 - RNA, 24 nt, Human
uucaagcgauucuccugccuuagc

SEQ ID NO: 916093 - RNA, 22 nt, Human
uuggauuacaggugugaaccac

SEQ ID NO: 916094 - RNA, 24 nt, Human
uuggauuacaggugugaaccaccg

SEQ ID NO: 916095 - RNA, 19 nt, Human
uuucaccauguuggccagg

SEQ ID NO: 916096 - RNA, 20 nt, Human
uuucaccauguuggccagga

SEQ ID NO: 916097 - RNA, 23 nt, Human
uuugucaacaggcuggagugcag

SEQ ID NO: 916098 - RNA, 20 nt, Human
uuuuuguauuuuaguagaga

SEQ ID NO: 916099 - RNA, 20 nt, Human
uuuuuuguauuuuaguagag

SEQ ID NO: 916100 - RNA, 24 nt, Human
uuuuuuuguauuuuaguagagacg

SEQ ID NO: 916101 - RNA, 21 nt, Human
aacuguuuucacauuggaaau

SEQ ID NO: 916102 - RNA, 21 nt, Human
aagaaaacaaaugcgauuuaa

SEQ ID NO: 916103 - RNA, 18 nt, Human
aauaaaggagcagggaga

SEQ ID NO: 916104 - RNA, 21 nt, Human
aaucucaaguagcauuuagaa

SEQ ID NO: 916105 - RNA, 20 nt, Human
acugaagaaaacaaaugcga

SEQ ID NO: 916106 - RNA, 18 nt, Human
agagaagcagagcucucg

SEQ ID NO: 916107 - RNA, 18 nt, Human
aggaacaucgacccauaa

SEQ ID NO: 916108 - RNA, 24 nt, Human
aggcagguaacagaaagaauaagg

SEQ ID NO: 916109 - RNA, 23 nt, Human
agguguagaccaaguccagaaag

SEQ ID NO: 916110 - RNA, 21 nt, Human
aguaaaaucaguauagaauaa

SEQ ID NO: 916111 - RNA, 22 nt, Human
cacuuucuucuaaggccuggag

SEQ ID NO: 916112 - RNA, 22 nt, Human
caguauuguggauuucagaugg

SEQ ID NO: 916113 - RNA, 19 nt, Human
cauuccagugacugucagg

SEQ ID NO: 916114 - RNA, 23 nt, Human
cgacccauaacaugcaacaaaaa

SEQ ID NO: 916115 - RNA, 21 nt, Human
cugcucccugcacacguuuuu

SEQ ID NO: 916116 - RNA, 21 nt, Human
gacauuacaaguaacagcaac

SEQ ID NO: 916117 - RNA, 22 nt, Human
gacccauaacaugcaacaaaaa

SEQ ID NO: 916118 - RNA, 23 nt, Human
gcaaucucaaguagcauuuagaa

SEQ ID NO: 916119 - RNA, 22 nt, Human
gguaacagaaagaauaaggggc

SEQ ID NO: 916120 - RNA, 28 nt, Human
uaaaaccaaaagaacaacuuuaauaagc

SEQ ID NO: 916121 - RNA, 20 nt, Human
uaacaugcaacaaaaaugaa

SEQ ID NO: 916122 - RNA, 24 nt, Human
uaguuucacuuucuucuaaggccu

SEQ ID NO: 916123 - RNA, 20 nt, Human
ucagaccaggaguaaacggc

SEQ ID NO: 916124 - RNA, 23 nt, Human
ucagaccaggaguaaacggccuu

SEQ ID NO: 916125 - RNA, 19 nt, Human
ugacauuacaaguaacagc

SEQ ID NO: 916126 - RNA, 21 nt, Human
ugagaugggaaaguaaaauca

SEQ ID NO: 916127 - RNA, 21 nt, Human
ugagaugggaaaguaaaauca

SEQ ID NO: 916128 - RNA, 19 nt, Human
ugcacacguuuuugagaug

SEQ ID NO: 916129 - RNA, 21 nt, Human
uggggcucggguaggagggcu

SEQ ID NO: 916130 - RNA, 21 nt, Human
uguaaaaccaaaagaacaacu

SEQ ID NO: 916131 - RNA, 20 nt, Human
uucagagaagcagagcucuc

SEQ ID NO: 916132 - RNA, 23 nt, Human
uucagauggggaaaauaaucaga

SEQ ID NO: 916133 - RNA, 24 nt, Human
aaacaggguccauagugccuaugg

SEQ ID NO: 916134 - RNA, 20 nt, Human
aacagcuucaguggugggac

SEQ ID NO: 916135 - RNA, 19 nt, Human
acuggccuggcccaacagc

SEQ ID NO: 916136 - RNA, 24 nt, Human
aggcagagaagaccaugggaguuc

SEQ ID NO: 916137 - RNA, 24 nt, Human
aggcgggggugaccuccgcagcuu

SEQ ID NO: 916138 - RNA, 18 nt, Human
cacgggccguucccccuc

SEQ ID NO: 916139 - RNA, 18 nt, Human
cagaggcagaaucugggg

SEQ ID NO: 916140 - RNA, 20 nt, Human
cccgacacaucugcuggcca

SEQ ID NO: 916141 - RNA, 21 nt, Human
ccgcggcugacuucacuccgu

SEQ ID NO: 916142 - RNA, 26 nt, Human
cgccucacccucucaccaggcccgac

SEQ ID NO: 916143 - RNA, 22 nt, Human
cgggggaggcaggagcaggggc

SEQ ID NO: 916144 - RNA, 22 nt, Human
cgguagacgguaaguuccuccc

SEQ ID NO: 916145 - RNA, 19 nt, Human
cgucucgccucacccucuc

SEQ ID NO: 916146 - RNA, 25 nt, Human
cucacccucucaccaggcccgacac

SEQ ID NO: 916147 - RNA, 25 nt, Human
cucgccucacccucucaccaggccc

SEQ ID NO: 916148 - RNA, 19 nt, Human
gcccugggcgaucgggccc

SEQ ID NO: 916149 - RNA, 19 nt, Human
gccguucccccucacggga

SEQ ID NO: 916150 - RNA, 20 nt, Human
ggaggcaggagcaggggcuc

SEQ ID NO: 916151 - RNA, 24 nt, Human
ggccaggcagagaagaccauggga

SEQ ID NO: 916152 - RNA, 21 nt, Human
uaaaagguuaaaagugcagag

SEQ ID NO: 916153 - RNA, 22 nt, Human
ucaagguucaaauacuuuuuau

SEQ ID NO: 916154 - RNA, 19 nt, Human
ucccacgugaauccagggu

SEQ ID NO: 916155 - RNA, 20 nt, Human
ucccugagcuaaggccaggc

SEQ ID NO: 916156 - RNA, 23 nt, Human
uccgcagcuuccggggcccuggg

SEQ ID NO: 916157 - RNA, 19 nt, Human
uccgcgcgcguucacgggc

SEQ ID NO: 916158 - RNA, 21 nt, Human
uccgcgcgcguucacgggccg

SEQ ID NO: 916159 - RNA, 22 nt, Human
uccgcgcgcguucacgggccgu

SEQ ID NO: 916160 - RNA, 20 nt, Human
ucgccucacccucucaccaa

SEQ ID NO: 916161 - RNA, 18 nt, Human
ugaccuccgcagcuuccu

SEQ ID NO: 916162 - RNA, 26 nt, Human
uggccuggcccaacagcuucaguggg

SEQ ID NO: 916163 - RNA, 18 nt, Human
aaggagcugagaaacuuc

SEQ ID NO: 916164 - RNA, 21 nt, Human
acagggccuuggagggaugag

SEQ ID NO: 916165 - RNA, 24 nt, Human
acccugaaggccucccggcgacac

SEQ ID NO: 916166 - RNA, 21 nt, Human
acucugcgaacagcaccaauc

SEQ ID NO: 916167 - RNA, 20 nt, Human
acugcacguccauuaaauuu

SEQ ID NO: 916168 - RNA, 24 nt, Human
agagggaaccggaggagagggugc

SEQ ID NO: 916169 - RNA, 22 nt, Human
agagggcccaagggguccccuc

SEQ ID NO: 916170 - RNA, 18 nt, Human
agccauggggugagaggg

SEQ ID NO: 916171 - RNA, 23 nt, Human
agcuggaggcugauggagccagg

SEQ ID NO: 916172 - RNA, 20 nt, Human
aggccuacucugcgaacagc

SEQ ID NO: 916173 - RNA, 20 nt, Human
agggaaguggggcugggguc

SEQ ID NO: 916174 - RNA, 21 nt, Human
agggauguagcaccuucucca

SEQ ID NO: 916175 - RNA, 19 nt, Human
aggugggggaggggaagcc

SEQ ID NO: 916176 - RNA, 23 nt, Human
auagcaggguuagaacagcuggg

SEQ ID NO: 916177 - RNA, 22 nt, Human
auguagcaccuucuccaacccc

SEQ ID NO: 916178 - RNA, 22 nt, Human
auguccaugguugcugugcgca

SEQ ID NO: 916179 - RNA, 19 nt, Human
auguccccuucccccccac

SEQ ID NO: 916180 - RNA, 24 nt, Human
cacauugcaaaagucucacgccaa

SEQ ID NO: 916181 - RNA, 19 nt, Human
cacgccaaaaaagcuagac

SEQ ID NO: 916182 - RNA, 23 nt, Human
cacuguggcucccaucccuuucu

SEQ ID NO: 916183 - RNA, 21 nt, Human
cagagggcccaaggggucccc

SEQ ID NO: 916184 - RNA, 19 nt, Human
caggagagagugaagggca

SEQ ID NO: 916185 - RNA, 24 nt, Human
cauuaaauuaaacccaauggaaaa

SEQ ID NO: 916186 - RNA, 21 nt, Human
ccacacaggcugcucgacugg

SEQ ID NO: 916187 - RNA, 19 nt, Human
ccccagagggcccaagggg

SEQ ID NO: 916188 - RNA, 21 nt, Human
cccccgggcaaaggccuacuc

SEQ ID NO: 916189 - RNA, 22 nt, Human
cccccuuugucucuccccuucc

SEQ ID NO: 916190 - RNA, 21 nt, Human
cccuugaaugucugucaaagg

SEQ ID NO: 916191 - RNA, 23 nt, Human
ccgccaaacagaguccucggcag

SEQ ID NO: 916192 - RNA, 20 nt, Human
ccgugggugggggccauggg

SEQ ID NO: 916193 - RNA, 21 nt, Human
ccucaggcccucccacuccuc

SEQ ID NO: 916194 - RNA, 21 nt, Human
ccuccauaugguuccuagccc

SEQ ID NO: 916195 - RNA, 22 nt, Human
ccuccuccuuccaggagcccca

SEQ ID NO: 916196 - RNA, 19 nt, Human
ccuggcuucccacuggacu

SEQ ID NO: 916197 - RNA, 19 nt, Human
ccuuugucucuccccuucc

SEQ ID NO: 916198 - RNA, 18 nt, Human
cgcagagacagggccuug

SEQ ID NO: 916199 - RNA, 18 nt, Human
cucaggcccucccacucc

SEQ ID NO: 916200 - RNA, 18 nt, Human
cuccuccuuccaggagcc

SEQ ID NO: 916201 - RNA, 21 nt, Human
cucggugguugggaaggaaca

SEQ ID NO: 916202 - RNA, 23 nt, Human
cuucuggggaugaaacucagucc

SEQ ID NO: 916203 - RNA, 23 nt, Human
gaacaucuaggguaaaaaaccau

SEQ ID NO: 916204 - RNA, 23 nt, Human
gaagccccagagggcccaagggg

SEQ ID NO: 916205 - RNA, 20 nt, Human
gagcacugaaggugggaaca

SEQ ID NO: 916206 - RNA, 21 nt, Human
gagcacugaaggugggaacau

SEQ ID NO: 916207 - RNA, 24 nt, Human
gagcacugaaggugggaacaucua

SEQ ID NO: 916208 - RNA, 20 nt, Human
gagccccaguuccuccaggg

SEQ ID NO: 916209 - RNA, 20 nt, Human
gagcugagaaacuucugggg

SEQ ID NO: 916210 - RNA, 22 nt, Human
gauaaccugguuucaccuucuc

SEQ ID NO: 916211 - RNA, 22 nt, Human
gaucucacuccugucuuuccac

SEQ ID NO: 916212 - RNA, 20 nt, Human
gccaaccaagggggucugga

SEQ ID NO: 916213 - RNA, 18 nt, Human
gccacucacauccugcca

SEQ ID NO: 916214 - RNA, 19 nt, Human
gccuuggagggaugagcug

SEQ ID NO: 916215 - RNA, 22 nt, Human
gggaagccccagagggcccaag

SEQ ID NO: 916216 - RNA, 20 nt, Human
gggccuuggagggaugagcu

SEQ ID NO: 916217 - RNA, 19 nt, Human
ggggaggggaagccccaga

SEQ ID NO: 916218 - RNA, 19 nt, Human
gggugccauucucugggcc

SEQ ID NO: 916219 - RNA, 19 nt, Human
gucuauggagggcguggag

SEQ ID NO: 916220 - RNA, 21 nt, Human
gugaagggcacuguggcuccc

SEQ ID NO: 916221 - RNA, 20 nt, Human
gugaucaccuagggacagcu

SEQ ID NO: 916222 - RNA, 21 nt, Human
gugccaaccaagggggucugg

SEQ ID NO: 916223 - RNA, 22 nt, Human
guggagcacugaaggugggaac

SEQ ID NO: 916224 - RNA, 24 nt, Human
uaaguucugugaucaccuagggac

SEQ ID NO: 916225 - RNA, 23 nt, Human
uaccccaaccaggugggggaggg

SEQ ID NO: 916226 - RNA, 23 nt, Human
uagcccagggucugccaucuccu

SEQ ID NO: 916227 - RNA, 21 nt, Human
ucaccuucucugaaggucuau

SEQ ID NO: 916228 - RNA, 22 nt, Human
ucagagcgggggcuggggaggc

SEQ ID NO: 916229 - RNA, 24 nt, Human
uccagggaaguggggcuggggucc

SEQ ID NO: 916230 - RNA, 22 nt, Human
ucccagauaaccugguuucacc

SEQ ID NO: 916231 - RNA, 18 nt, Human
ucccccccacccugaagg

SEQ ID NO: 916232 - RNA, 22 nt, Human
uccccuucccccccacccugaa

SEQ ID NO: 916233 - RNA, 19 nt, Human
ucccucggugcuuccugcc

SEQ ID NO: 916234 - RNA, 18 nt, Human
uccugccacugaaggagg

SEQ ID NO: 916235 - RNA, 26 nt, Human
uccugcccauguccccuuccccccca

SEQ ID NO: 916236 - RNA, 18 nt, Human
ucggugguugggaaggaa

SEQ ID NO: 916237 - RNA, 21 nt, Human
ucucacgccaaaaaagcuaga

SEQ ID NO: 916238 - RNA, 24 nt, Human
ucucugggcccucccccacauuua

SEQ ID NO: 916239 - RNA, 18 nt, Human
ugaagaaaggaagcugga

SEQ ID NO: 916240 - RNA, 20 nt, Human
ugaagaaaggaagcuggagg

SEQ ID NO: 916241 - RNA, 24 nt, Human
ugaaggacagaaugaagaaaggaa

SEQ ID NO: 916242 - RNA, 18 nt, Human
ugagagggaaccggagga

SEQ ID NO: 916243 - RNA, 23 nt, Human
ugcccuugaaugucugucaaagg

SEQ ID NO: 916244 - RNA, 19 nt, Human
ugcuuccugcccauguccc

SEQ ID NO: 916245 - RNA, 22 nt, Human
uggaaaacacacgugugaccug

SEQ ID NO: 916246 - RNA, 21 nt, Human
uggaaggugggugggagggua

SEQ ID NO: 916247 - RNA, 21 nt, Human
uggagagccuccuccuccuuc

SEQ ID NO: 916248 - RNA, 22 nt, Human
uggagcacugaaggugggaaca

SEQ ID NO: 916249 - RNA, 21 nt, Human
uggagccugguggauuccauc

SEQ ID NO: 916250 - RNA, 20 nt, Human
uggagggaugagcuggagcc

SEQ ID NO: 916251 - RNA, 23 nt, Human
uggagggaugagcuggagccugg

SEQ ID NO: 916252 - RNA, 19 nt, Human
uggcucccaucccuuucuc

SEQ ID NO: 916253 - RNA, 19 nt, Human
ugggaagagggauguagca

SEQ ID NO: 916254 - RNA, 21 nt, Human
ugggagcaaagggauggccgu

SEQ ID NO: 916255 - RNA, 25 nt, Human
ugggugggaggguauguguuagggu

SEQ ID NO: 916256 - RNA, 19 nt, Human
uguccccuucccccccacc

SEQ ID NO: 916257 - RNA, 22 nt, Human
uucccagauaaccugguuucac

SEQ ID NO: 916258 - RNA, 21 nt, Human
uuccucuauguauggcaucaa

SEQ ID NO: 916259 - RNA, 22 nt, Human
uugcucuaccccaaccaggugg

SEQ ID NO: 916260 - RNA, 18 nt, Human
uuucuucaagcuacugau

SEQ ID NO: 916261 - RNA, 18 nt, Human
aaccaguuucagauguga

SEQ ID NO: 916262 - RNA, 21 nt, Human
aagaguccuggguaguguugg

SEQ ID NO: 916263 - RNA, 23 nt, Human
acaggaacagucuuucuggggau

SEQ ID NO: 916264 - RNA, 19 nt, Human
acuggccuauggcccuggu

SEQ ID NO: 916265 - RNA, 22 nt, Human
agaaacagcagaaggccaugga

SEQ ID NO: 916266 - RNA, 20 nt, Human
agcaagaguccuggguagug

SEQ ID NO: 916267 - RNA, 19 nt, Human
agccugguuggcguugacc

SEQ ID NO: 916268 - RNA, 18 nt, Human
agggcugggccuccucca

SEQ ID NO: 916269 - RNA, 22 nt, Human
aggggaggugccacacucaagg

SEQ ID NO: 916270 - RNA, 24 nt, Human
aggggggcuugggaggggaggugc

SEQ ID NO: 916271 - RNA, 19 nt, Human
aggugccacacucaaggug

SEQ ID NO: 916272 - RNA, 26 nt, Human
aguagcugagaggaugucaagggggg

SEQ ID NO: 916273 - RNA, 20 nt, Human
caaauccuugccuuggcuca

SEQ ID NO: 916274 - RNA, 22 nt, Human
cacagcagagggaaacaaaucc

SEQ ID NO: 916275 - RNA, 24 nt, Human
caccgccacagcagagggaaacaa

SEQ ID NO: 916276 - RNA, 19 nt, Human
cacgcccgccuacccaccc

SEQ ID NO: 916277 - RNA, 23 nt, Human
cacgcccgccuacccacccugua

SEQ ID NO: 916278 - RNA, 20 nt, Human
cagccacuugcuuggggcug

SEQ ID NO: 916279 - RNA, 24 nt, Human
cagccccaggucggcuccugcauu

SEQ ID NO: 916280 - RNA, 18 nt, Human
caggcccggccuagucac

SEQ ID NO: 916281 - RNA, 20 nt, Human
cagggaugugcagccccagg

SEQ ID NO: 916282 - RNA, 18 nt, Human
cagggcucucggcaacca

SEQ ID NO: 916283 - RNA, 19 nt, Human
caggggccuccccggggcc

SEQ ID NO: 916284 - RNA, 25 nt, Human
cagucaccgccacagcagagggaaa

SEQ ID NO: 916285 - RNA, 27 nt, Human
cagugucccugcagccacuugcuuggu

SEQ ID NO: 916286 - RNA, 18 nt, Human
caguuucagaugugaggg

SEQ ID NO: 916287 - RNA, 21 nt, Human
cauucuuaccucagaugaggg

SEQ ID NO: 916288 - RNA, 23 nt, Human
ccaggcccggccuagucacuggc

SEQ ID NO: 916289 - RNA, 24 nt, Human
ccaggucggcuccugcauuugcug

SEQ ID NO: 916290 - RNA, 19 nt, Human
ccaguuucagaugugaggg

SEQ ID NO: 916291 - RNA, 20 nt, Human
ccuaguccggccccgauggg

SEQ ID NO: 916292 - RNA, 19 nt, Human
ccucagaggcuccgggccu

SEQ ID NO: 916293 - RNA, 20 nt, Human
ccugggcuuggcugcccacu

SEQ ID NO: 916294 - RNA, 18 nt, Human
cgcaaggggacuggugcc

SEQ ID NO: 916295 - RNA, 24 nt, Human
cgcccgggaccugagggaaggccc

SEQ ID NO: 916296 - RNA, 25 nt, Human
cucuggucccgaggggccggaaagc

SEQ ID NO: 916297 - RNA, 21 nt, Human
cugcauuugcugggcccccag

SEQ ID NO: 916298 - RNA, 24 nt, Human
gagaaacagcagaaggccauggaa

SEQ ID NO: 916299 - RNA, 19 nt, Human
gagaggaugucaagggggg

SEQ ID NO: 916300 - RNA, 22 nt, Human
gcagccccaggucggcuccugc

SEQ ID NO: 916301 - RNA, 20 nt, Human
gccacagcagagggaaacaa

SEQ ID NO: 916302 - RNA, 24 nt, Human
gcccgccuacccacccuguaggcc

SEQ ID NO: 916303 - RNA, 19 nt, Human
gccgagucgggccuuguug

SEQ ID NO: 916304 - RNA, 18 nt, Human
gccugggcuuggcugccc

SEQ ID NO: 916305 - RNA, 24 nt, Human
gcgaggcccuucgguucgcaaggg

SEQ ID NO: 916306 - RNA, 25 nt, Human
ggaaagccccagcaggccuucuucc

SEQ ID NO: 916307 - RNA, 22 nt, Human
ggagcuguucugguccagaagc

SEQ ID NO: 916308 - RNA, 22 nt, Human
ggcaucagugucccugcagcca

SEQ ID NO: 916309 - RNA, 19 nt, Human
ggccggcccaggagcugug

SEQ ID NO: 916310 - RNA, 28 nt, Human
ggccuggacuggccgaugccucagaggc

SEQ ID NO: 916311 - RNA, 24 nt, Human
gggcagggaugugcagccccaggu

SEQ ID NO: 916312 - RNA, 23 nt, Human
gggccuccuccauccacugcgag

SEQ ID NO: 916313 - RNA, 20 nt, Human
gggcucucggcaaccaguuu

SEQ ID NO: 916314 - RNA, 22 nt, Human
ggggaggugccacacucaaggu

SEQ ID NO: 916315 - RNA, 22 nt, Human
guccagaagcagucaccgccac

SEQ ID NO: 916316 - RNA, 22 nt, Human
gugcagccccaggucggcuccu

SEQ ID NO: 916317 - RNA, 20 nt, Human
ucaagccuggucagcucccg

SEQ ID NO: 916318 - RNA, 18 nt, Human
ucccugcagccacuugcu

SEQ ID NO: 916319 - RNA, 18 nt, Human
uccugacaggaacagucu

SEQ ID NO: 916320 - RNA, 22 nt, Human
uccuguagaaaauaccugggag

SEQ ID NO: 916321 - RNA, 25 nt, Human
ucggguggggcucuggucccgaggg

SEQ ID NO: 916322 - RNA, 22 nt, Human
ucgguucgcaaggggacuggug

SEQ ID NO: 916323 - RNA, 21 nt, Human
ugccaggcuagccugguuggc

SEQ ID NO: 916324 - RNA, 21 nt, Human
ugccaggcuagccugguuggc

SEQ ID NO: 916325 - RNA, 23 nt, Human
ugccgggccgcagcguaggcccc

SEQ ID NO: 916326 - RNA, 19 nt, Human
ugccucagaggcuccgggc

SEQ ID NO: 916327 - RNA, 22 nt, Human
ugccucagaggcuccgggccug

SEQ ID NO: 916328 - RNA, 23 nt, Human
ugcugggcccccagaacauuuuu

SEQ ID NO: 916329 - RNA, 20 nt, Human
uggcguugaccucagggcug

SEQ ID NO: 916330 - RNA, 20 nt, Human
uggcucagggcucucggcaa

SEQ ID NO: 916331 - RNA, 22 nt, Human
ugggagcuggagcuguucuggu

SEQ ID NO: 916332 - RNA, 18 nt, Human
uggggcucuggucccgag

SEQ ID NO: 916333 - RNA, 22 nt, Human
ugguaggccaggggccucccuc

SEQ ID NO: 916334 - RNA, 26 nt, Human
ugguuggcguugaccucagggcuggg

SEQ ID NO: 916335 - RNA, 21 nt, Human
ugucuggaguuggaaccaggu

SEQ ID NO: 916336 - RNA, 21 nt, Human
uugcugggcccccagaacauu

SEQ ID NO: 916337 - RNA, 21 nt, Human
uuuuuuuuuuuuuuuucucag

SEQ ID NO: 916338 - RNA, 18 nt, Human
aaaaaaguccguuccuuc

SEQ ID NO: 916339 - RNA, 21 nt, Human
aagacaagcgugcccuccccu

SEQ ID NO: 916340 - RNA, 20 nt, Human
acagagaaacaacauauuaa

SEQ ID NO: 916341 - RNA, 19 nt, Human
agacauuuggcauacuaag

SEQ ID NO: 916342 - RNA, 21 nt, Human
aggcagcggcgcgggccccgg

SEQ ID NO: 916343 - RNA, 22 nt, Human
aguaagggagcaaugcugggga

SEQ ID NO: 916344 - RNA, 23 nt, Human
cacuaucucccucacuuuuuuug

SEQ ID NO: 916345 - RNA, 28 nt, Human
cauaaaaugggaguggcuaugcuucuga

SEQ ID NO: 916346 - RNA, 21 nt, Human
ccauauccacgccuccuuccc

SEQ ID NO: 916347 - RNA, 18 nt, Human
ccccacagaguccccagg

SEQ ID NO: 916348 - RNA, 23 nt, Human
ccuccuucccggcuggcccucag

SEQ ID NO: 916349 - RNA, 24 nt, Human
ccuccuucccggcuggcccucagg

SEQ ID NO: 916350 - RNA, 23 nt, Human
ccuuguccuuguaaguaguccua

SEQ ID NO: 916351 - RNA, 21 nt, Human
cgccgggcucuacgggucccc

SEQ ID NO: 916352 - RNA, 20 nt, Human
cuaucucccucacuuuuuuu

SEQ ID NO: 916353 - RNA, 19 nt, Human
cucaacgggcuacagagaa

SEQ ID NO: 916354 - RNA, 22 nt, Human
cuccccucacuaucucccucac

SEQ ID NO: 916355 - RNA, 22 nt, Human
gcccucaggaucucgcugucuu

SEQ ID NO: 916356 - RNA, 22 nt, Human
gcgcccgcucaccuggaccagc

SEQ ID NO: 916357 - RNA, 22 nt, Human
gcgcccgcucaccugggccagc

SEQ ID NO: 916358 - RNA, 21 nt, Human
ggccccggacuuggcagcagc

SEQ ID NO: 916359 - RNA, 23 nt, Human
guuauagcaaaagaugacauuug

SEQ ID NO: 916360 - RNA, 22 nt, Human
uaaauaucuuuucauuuaucuc

SEQ ID NO: 916361 - RNA, 24 nt, Human
uaauagaaaugugacuuacucaua

SEQ ID NO: 916362 - RNA, 21 nt, Human
uacaacuggaaaaauggaaac

SEQ ID NO: 916363 - RNA, 22 nt, Human
ucaagacauuuggcauacuaag

SEQ ID NO: 916364 - RNA, 19 nt, Human
ucaccuggaccagcgcgcc

SEQ ID NO: 916365 - RNA, 25 nt, Human
uccccacagaguccccaggacgcgc

SEQ ID NO: 916366 - RNA, 20 nt, Human
uccccgagccgcggcgcggg

SEQ ID NO: 916367 - RNA, 21 nt, Human
ucgcugucuuuacgugaaccg

SEQ ID NO: 916368 - RNA, 20 nt, Human
ucucuuuuuuugguaaaugu

SEQ ID NO: 916369 - RNA, 21 nt, Human
ugauaauuuccccauuuucca

SEQ ID NO: 916370 - RNA, 18 nt, Human
uggaaaaauggaaaccuu

SEQ ID NO: 916371 - RNA, 22 nt, Human
uggcuaugcuucugaaucgcau

SEQ ID NO: 916372 - RNA, 24 nt, Human
uuagcuauccugggguugcucccu

SEQ ID NO: 916373 - RNA, 22 nt, Human
uuuauauuugaucucuuuuuuu

SEQ ID NO: 916374 - RNA, 18 nt, Human
uuuuuugguaaauguggu

SEQ ID NO: 916375 - RNA, 18 nt, Human
uuuuuuuuuuuuuuuuug

SEQ ID NO: 916376 - RNA, 22 nt, Human
uuuuuuuuuuuuuuuuugccuu

SEQ ID NO: 916377 - RNA, 26 nt, Human
uuuuuuuuuuuuuuuuuuugccuuga

SEQ ID NO: 916378 - RNA, 20 nt, Human
cucaaaaccaggaaggaauc

SEQ ID NO: 916379 - RNA, 20 nt, Human
gguagguacuggcuucucuc

SEQ ID NO: 916380 - RNA, 18 nt, Human
uacuggcuucucuccuca

SEQ ID NO: 916381 - RNA, 23 nt, Human
agcauaaaaggcagcagaagaaa

SEQ ID NO: 916382 - RNA, 19 nt, Human
ggaagggaggugcacaagg

SEQ ID NO: 916383 - RNA, 23 nt, Human
gguugcggggaagggaggugcac

SEQ ID NO: 916384 - RNA, 21 nt, Human
uaaaaggcagcagaagaaagc

SEQ ID NO: 916385 - RNA, 23 nt, Human
aaagcccucuccaacacccaccc

SEQ ID NO: 916386 - RNA, 20 nt, Human
aacacggacauacauguacc

SEQ ID NO: 916387 - RNA, 21 nt, Human
aacccuaugagguagcuccug

SEQ ID NO: 916388 - RNA, 20 nt, Human
aaccucucaagaucagacac

SEQ ID NO: 916389 - RNA, 23 nt, Human
aaccucucaagaucagacaccaa

SEQ ID NO: 916390 - RNA, 20 nt, Human
aacugaggccuuuaaaaggu

SEQ ID NO: 916391 - RNA, 23 nt, Human
acagacauuucugugacaucccu

SEQ ID NO: 916392 - RNA, 19 nt, Human
acgcugauuggcugaggag

SEQ ID NO: 916393 - RNA, 19 nt, Human
agacccauuucacagguga

SEQ ID NO: 916394 - RNA, 20 nt, Human
agacccccuuuuuuuagagg

SEQ ID NO: 916395 - RNA, 20 nt, Human
agacccccuuuuuuuagagg

SEQ ID NO: 916396 - RNA, 23 nt, Human
agaggaggaaacuaaggcuuaga

SEQ ID NO: 916397 - RNA, 19 nt, Human
aggaggaaagaggcuggag

SEQ ID NO: 916398 - RNA, 19 nt, Human
aggcauggaggagauuuga

SEQ ID NO: 916399 - RNA, 23 nt, Human
aggccaaagcccagggcaucaga

SEQ ID NO: 916400 - RNA, 25 nt, Human
aucagacaccaaaccauaguucagc

SEQ ID NO: 916401 - RNA, 25 nt, Human
caacacggacauacauguaccuccu

SEQ ID NO: 916402 - RNA, 19 nt, Human
caagagggagguccuuugc

SEQ ID NO: 916403 - RNA, 22 nt, Human
caaggccaaagcccagggcauc

SEQ ID NO: 916404 - RNA, 20 nt, Human
cacagcacccaggcacuagg

SEQ ID NO: 916405 - RNA, 22 nt, Human
cacagcacccaggcacuagggc

SEQ ID NO: 916406 - RNA, 19 nt, Human
caccaaaccauaguucagc

SEQ ID NO: 916407 - RNA, 23 nt, Human
cagcaggagaugugguccagcau

SEQ ID NO: 916408 - RNA, 25 nt, Human
caggagaugugguccagcauuuggg

SEQ ID NO: 916409 - RNA, 21 nt, Human
cagggcaucagaaugagcuuc

SEQ ID NO: 916410 - RNA, 19 nt, Human
cagucagacaaagccccug

SEQ ID NO: 916411 - RNA, 26 nt, Human
caucaaccucucaagaucagacacca

SEQ ID NO: 916412 - RNA, 21 nt, Human
caucccuaacuucccaccugc

SEQ ID NO: 916413 - RNA, 26 nt, Human
ccaacacccaccccaauccuggauuc

SEQ ID NO: 916414 - RNA, 19 nt, Human
ccaaggcuuggcauagcca

SEQ ID NO: 916415 - RNA, 20 nt, Human
ccagaacagcaggagaugug

SEQ ID NO: 916416 - RNA, 23 nt, Human
ccccugggaggaggggagcugaa

SEQ ID NO: 916417 - RNA, 20 nt, Human
cgggaccaaugaauggagcu

SEQ ID NO: 916418 - RNA, 21 nt, Human
cuccaacacccaccccaaucc

SEQ ID NO: 916419 - RNA, 27 nt, Human
cucuccaacacccaccccaauccuggg

SEQ ID NO: 916420 - RNA, 19 nt, Human
cuggcaaggccaaagccca

SEQ ID NO: 916421 - RNA, 22 nt, Human
cuugagauccccccauucaucc

SEQ ID NO: 916422 - RNA, 22 nt, Human
cuugccagggcccacgccccca

SEQ ID NO: 916423 - RNA, 27 nt, Human
gagcccagcaggcccggugcggcggga

SEQ ID NO: 916424 - RNA, 18 nt, Human
gaggaggaggaaagaggc

SEQ ID NO: 916425 - RNA, 20 nt, Human
gagugcacuugccagggccc

SEQ ID NO: 916426 - RNA, 20 nt, Human
gccccccugggaggagggga

SEQ ID NO: 916427 - RNA, 24 nt, Human
gcugcaauaaguuacccuuucccc

SEQ ID NO: 916428 - RNA, 20 nt, Human
ggagcugcgggaggaggagg

SEQ ID NO: 916429 - RNA, 20 nt, Human
gggaggaggaggaaagaggc

SEQ ID NO: 916430 - RNA, 20 nt, Human
gggaggaggaggaaagaggc

SEQ ID NO: 916431 - RNA, 19 nt, Human
gguuuagggcugggccagg

SEQ ID NO: 916432 - RNA, 21 nt, Human
uaaaagguuacaucaaccucu

SEQ ID NO: 916433 - RNA, 21 nt, Human
uaacuucccaccugcuaccuc

SEQ ID NO: 916434 - RNA, 22 nt, Human
uaccucaggccacagcacccag

SEQ ID NO: 916435 - RNA, 21 nt, Human
ucaagaucagacaccaaacca

SEQ ID NO: 916436 - RNA, 22 nt, Human
uccaacacccaccccaauccug

SEQ ID NO: 916437 - RNA, 19 nt, Human
uccaggcuggugcccagga

SEQ ID NO: 916438 - RNA, 24 nt, Human
ucccuaacuucccaccugcuaccu

SEQ ID NO: 916439 - RNA, 22 nt, Human
ucuccaacacccaccccaaucc

SEQ ID NO: 916440 - RNA, 22 nt, Human
ugagauucccaaggcuuggcau

SEQ ID NO: 916441 - RNA, 21 nt, Human
ugcaacacggacauacaugua

SEQ ID NO: 916442 - RNA, 23 nt, Human
ugccaucuccuuuaaucugcauc

SEQ ID NO: 916443 - RNA, 21 nt, Human
ugccugcccuugguggcccca

SEQ ID NO: 916444 - RNA, 19 nt, Human
uggcugaggagugcacuug

SEQ ID NO: 916445 - RNA, 23 nt, Human
ugggcaagguccaggcuggugcc

SEQ ID NO: 916446 - RNA, 20 nt, Human
ugguacugccuggggcugcu

SEQ ID NO: 916447 - RNA, 22 nt, Human
uuauuaagugcuaagcacugua

SEQ ID NO: 916448 - RNA, 20 nt, Human
uucacaggugagcgaacuga

SEQ ID NO: 916449 - RNA, 24 nt, Human
uucacaggugagcgaacugaggcc

SEQ ID NO: 916450 - RNA, 19 nt, Human
uucauccucuugauugucc

SEQ ID NO: 916451 - RNA, 24 nt, Human
uucccaaggcuuggcauagccaug

SEQ ID NO: 916452 - RNA, 26 nt, Human
uucccaccugcuaccucaggccacag

SEQ ID NO: 916453 - RNA, 22 nt, Human
uucccuggcaaggccaaagccc

SEQ ID NO: 916454 - RNA, 22 nt, Human
uuccugaacaccacauccaggc

SEQ ID NO: 916455 - RNA, 24 nt, Human
uuguccacaacagccucugccaug

SEQ ID NO: 916456 - RNA, 20 nt, Human
uuuagagacccccuuuuuuu

SEQ ID NO: 916457 - RNA, 24 nt, Human
uuuagggcugggccaggaagggcc

SEQ ID NO: 916458 - RNA, 21 nt, Human
uuuuuuuuuuuuuuuuucauu

SEQ ID NO: 916459 - RNA, 18 nt, Human
aaagugcuggaaggcggg

SEQ ID NO: 916460 - RNA, 19 nt, Human
acccauuucuuuaguccca

SEQ ID NO: 916461 - RNA, 23 nt, Human
agaggcagcccggcaggcccuca

SEQ ID NO: 916462 - RNA, 19 nt, Human
agcccggcaggcccucagg

SEQ ID NO: 916463 - RNA, 20 nt, Human
aggaagccugggagugcccu

SEQ ID NO: 916464 - RNA, 23 nt, Human
aggcagcccggcaggcccucagg

SEQ ID NO: 916465 - RNA, 24 nt, Human
aggggcaaaguccaacgggcaucu

SEQ ID NO: 916466 - RNA, 18 nt, Human
aggggcugggccagugug

SEQ ID NO: 916467 - RNA, 20 nt, Human
agugcccuugcugggggcug

SEQ ID NO: 916468 - RNA, 22 nt, Human
caggcccucagggaggcugggg

SEQ ID NO: 916469 - RNA, 24 nt, Human
caguggcugggcuuggccuggcag

SEQ ID NO: 916470 - RNA, 20 nt, Human
ccaacgggcaucccacuccu

SEQ ID NO: 916471 - RNA, 23 nt, Human
cccagccuggaaugacagaaagu

SEQ ID NO: 916472 - RNA, 22 nt, Human
ccccucucucagaaucggagac

SEQ ID NO: 916473 - RNA, 22 nt, Human
ccugggagugcccuugcugggg

SEQ ID NO: 916474 - RNA, 23 nt, Human
ccuucaggaccagccucgggcag

SEQ ID NO: 916475 - RNA, 22 nt, Human
cucagaaucggagacacgagga

SEQ ID NO: 916476 - RNA, 19 nt, Human
cugcccgggagggcagugg

SEQ ID NO: 916477 - RNA, 18 nt, Human
cugggccagugugagggg

SEQ ID NO: 916478 - RNA, 20 nt, Human
gaaggcgggguuagugggag

SEQ ID NO: 916479 - RNA, 22 nt, Human
gaggcuggggcugggggcaggg

SEQ ID NO: 916480 - RNA, 22 nt, Human
gagugcccuugcugggggcugg

SEQ ID NO: 916481 - RNA, 19 nt, Human
gccugggagugcccuugcu

SEQ ID NO: 916482 - RNA, 25 nt, Human
ggaggcuggggcugggggcaggggu

SEQ ID NO: 916483 - RNA, 20 nt, Human
ggaggcuggggcugggggcc

SEQ ID NO: 916484 - RNA, 23 nt, Human
ggagugcccuugcugggggcugg

SEQ ID NO: 916485 - RNA, 24 nt, Human
ggagugcccuugcugggggcuggg

SEQ ID NO: 916486 - RNA, 25 nt, Human
ggcugaauggacgaggucagcuggg

SEQ ID NO: 916487 - RNA, 18 nt, Human
ggcuggggcugggggcag

SEQ ID NO: 916488 - RNA, 19 nt, Human
gggaggccccaccgucuuc

SEQ ID NO: 916489 - RNA, 18 nt, Human
gggaggcuggggcugggg

SEQ ID NO: 916490 - RNA, 18 nt, Human
gggagucaguuguccuug

SEQ ID NO: 916491 - RNA, 19 nt, Human
gggcugggggcagggguac

SEQ ID NO: 916492 - RNA, 18 nt, Human
ggggcagguggggaggcc

SEQ ID NO: 916493 - RNA, 21 nt, Human
ggguggggcagugugaggggc

SEQ ID NO: 916494 - RNA, 22 nt, Human
gucagcuggggccggugagagg

SEQ ID NO: 916495 - RNA, 24 nt, Human
uauccaaaggaggguccggcggag

SEQ ID NO: 916496 - RNA, 18 nt, Human
ucccagcccccagggaac

SEQ ID NO: 916497 - RNA, 22 nt, Human
ucggagacacgaggaauaucca

SEQ ID NO: 916498 - RNA, 25 nt, Human
ucgggguggggcagugugaggggcu

SEQ ID NO: 916499 - RNA, 21 nt, Human
ucucccaggccuggucuaugg

SEQ ID NO: 916500 - RNA, 20 nt, Human
ugagcugaugggggagucag

SEQ ID NO: 916501 - RNA, 30 nt, Human
ugccugggcccagaucugcccgggagggcc

SEQ ID NO: 916502 - RNA, 18 nt, Human
ugcugggggcuggggcag

SEQ ID NO: 916503 - RNA, 23 nt, Human
uggaaugacagaaagugcuggaa

SEQ ID NO: 916504 - RNA, 20 nt, Human
uggcaggggcugaauggacg

SEQ ID NO: 916505 - RNA, 23 nt, Human
ugggcuuggccuggcaggggcug

SEQ ID NO: 916506 - RNA, 22 nt, Human
aaaaauaguaauuucacaugac

SEQ ID NO: 916507 - RNA, 18 nt, Human
aaacagccaaauaucaaa

SEQ ID NO: 916508 - RNA, 21 nt, Human
aaauaaacagccaaauaucaa

SEQ ID NO: 916509 - RNA, 23 nt, Human
aaauauccgucccucuuccccac

SEQ ID NO: 916510 - RNA, 21 nt, Human
aaguuauaugaguaacagccc

SEQ ID NO: 916511 - RNA, 23 nt, Human
aaugacaaaaauaaacagccaaa

SEQ ID NO: 916512 - RNA, 22 nt, Human
acacucuugaaaaucuacccaa

SEQ ID NO: 916513 - RNA, 23 nt, Human
accacuuuacaagauguaaaauu

SEQ ID NO: 916514 - RNA, 26 nt, Human
aggaaaaaaacacuaaucaauuaaaa

SEQ ID NO: 916515 - RNA, 27 nt, Human
aggaaaaaaacacuaaucaauuaaaaa

SEQ ID NO: 916516 - RNA, 20 nt, Human
aguaauuucacaugacaggu

SEQ ID NO: 916517 - RNA, 18 nt, Human
agugaagggcaaaaggaa

SEQ ID NO: 916518 - RNA, 22 nt, Human
aguggcuaagguaaggggaaga

SEQ ID NO: 916519 - RNA, 21 nt, Human
aguuauaugaguaacagcccu

SEQ ID NO: 916520 - RNA, 21 nt, Human
cacaguucagcagugcaaaaa

SEQ ID NO: 916521 - RNA, 21 nt, Human
cagccaaauaucaaaacuaga

SEQ ID NO: 916522 - RNA, 22 nt, Human
cccucauuuaaagggguuuuaa

SEQ ID NO: 916523 - RNA, 18 nt, Human
cccuccccaccacuuuac

SEQ ID NO: 916524 - RNA, 21 nt, Human
ccucaaauagugaagggcaaa

SEQ ID NO: 916525 - RNA, 20 nt, Human
cuaaaacaagaccuugaaau

SEQ ID NO: 916526 - RNA, 20 nt, Human
cugauacaugacuaacacag

SEQ ID NO: 916527 - RNA, 18 nt, Human
cuggcuuuuucuucaucc

SEQ ID NO: 916528 - RNA, 22 nt, Human
gccuggaccacauagagggcuc

SEQ ID NO: 916529 - RNA, 23 nt, Human
gggguuuuaaggauuaaauauca

SEQ ID NO: 916530 - RNA, 23 nt, Human
guaacagcccuugucuucuuagu

SEQ ID NO: 916531 - RNA, 18 nt, Human
gucaugucaaaugugagg

SEQ ID NO: 916532 - RNA, 20 nt, Human
uaaaguaguuauccuaaaac

SEQ ID NO: 916533 - RNA, 18 nt, Human
uaaccaccugauaaaauu

SEQ ID NO: 916534 - RNA, 23 nt, Human
uagacuuucaaauaauacaguuu

SEQ ID NO: 916535 - RNA, 27 nt, Human
uagcaaugaagguggagaaguuaaaua

SEQ ID NO: 916536 - RNA, 24 nt, Human
uauaaaugacaaaucaagaaauua

SEQ ID NO: 916537 - RNA, 23 nt, Human
uauauuguuuuaauauaugaauu

SEQ ID NO: 916538 - RNA, 18 nt, Human
uaucagugcuguucgaag

SEQ ID NO: 916539 - RNA, 23 nt, Human
uccccuccccaccacuuuacaag

SEQ ID NO: 916540 - RNA, 21 nt, Human
uccuaaaacaagaccuugaaa

SEQ ID NO: 916541 - RNA, 25 nt, Human
ucuaagccuggaguuaaauugaagu

SEQ ID NO: 916542 - RNA, 23 nt, Human
ucugaaagcagagauaauacugg

SEQ ID NO: 916543 - RNA, 19 nt, Human
ucugaacugauacaugacu

SEQ ID NO: 916544 - RNA, 19 nt, Human
ucuguuuccccuccccacc

SEQ ID NO: 916545 - RNA, 18 nt, Human
ugaaauaauggaaaauga

SEQ ID NO: 916546 - RNA, 21 nt, Human
ugaagggcaaaaggaaacugg

SEQ ID NO: 916547 - RNA, 18 nt, Human
ugacaaaaauaaacagcc

SEQ ID NO: 916548 - RNA, 21 nt, Human
ugacaaaaauaaacagccaaa

SEQ ID NO: 916549 - RNA, 18 nt, Human
ugccuggaccacauagag

SEQ ID NO: 916550 - RNA, 21 nt, Human
ugccuggaccacauagagggc

SEQ ID NO: 916551 - RNA, 27 nt, Human
uggaaaaugacaaaaauaaacagccaa

SEQ ID NO: 916552 - RNA, 22 nt, Human
ugucaaaugugaggaaaaaaac

SEQ ID NO: 916553 - RNA, 23 nt, Human
uuaaaaauauccgucccucuucc

SEQ ID NO: 916554 - RNA, 22 nt, Human
uucacacucuugaaaaucuacc

SEQ ID NO: 916555 - RNA, 20 nt, Human
uucuguuuccccuccccacc

SEQ ID NO: 916556 - RNA, 24 nt, Human
uucuucauccaaaaauaggccauu

SEQ ID NO: 916557 - RNA, 18 nt, Human
aaaaaguacacacccgag

SEQ ID NO: 916558 - RNA, 21 nt, Human
aaacacacacuccucgcuacc

SEQ ID NO: 916559 - RNA, 23 nt, Human
aaagaaaaagagccaguugagag

SEQ ID NO: 916560 - RNA, 22 nt, Human
aaagagccaguugagagcagac

SEQ ID NO: 916561 - RNA, 19 nt, Human
aaauacacacucacaaaca

SEQ ID NO: 916562 - RNA, 23 nt, Human
aaauacacacucacaaacacaca

SEQ ID NO: 916563 - RNA, 21 nt, Human
aaauacugaaagugcagagau

SEQ ID NO: 916564 - RNA, 20 nt, Human
aaccugccaauccgcaucca

SEQ ID NO: 916565 - RNA, 19 nt, Human
aagauccuucaugcucuuc

SEQ ID NO: 916566 - RNA, 21 nt, Human
aagcaaaaaguacacacccga

SEQ ID NO: 916567 - RNA, 22 nt, Human
acaaagcaaaaaguacacaccc

SEQ ID NO: 916568 - RNA, 21 nt, Human
acaauugauacugccauugau

SEQ ID NO: 916569 - RNA, 21 nt, Human
agacgagaaagaggcagcuag

SEQ ID NO: 916570 - RNA, 18 nt, Human
aggcaguggagggagggg

SEQ ID NO: 916571 - RNA, 18 nt, Human
aggcucuugacacuguug

SEQ ID NO: 916572 - RNA, 21 nt, Human
aggggcacaaaaaugcaagcu

SEQ ID NO: 916573 - RNA, 21 nt, Human
aguaaacagcaaaaaauauaa

SEQ ID NO: 916574 - RNA, 27 nt, Human
auuucuuucucuucuuccuucccuaga

SEQ ID NO: 916575 - RNA, 20 nt, Human
caacuucuggguaccacacc

SEQ ID NO: 916576 - RNA, 20 nt, Human
cacacuccucgcuaccugaa

SEQ ID NO: 916577 - RNA, 18 nt, Human
cagacgagaaagaggcag

SEQ ID NO: 916578 - RNA, 19 nt, Human
caggcucuugacacuguug

SEQ ID NO: 916579 - RNA, 25 nt, Human
cauccagaauuccaucuaauuacuc

SEQ ID NO: 916580 - RNA, 24 nt, Human
ccaaacuuuuucaaauagccccaa

SEQ ID NO: 916581 - RNA, 20 nt, Human
ccccaaacacccguaggacc

SEQ ID NO: 916582 - RNA, 22 nt, Human
ccccaaacacccguaggaccuc

SEQ ID NO: 916583 - RNA, 24 nt, Human
ccccccuucuucuucaguaauccc

SEQ ID NO: 916584 - RNA, 22 nt, Human
cccuaagccaaaauaaguucac

SEQ ID NO: 916585 - RNA, 20 nt, Human
cgagaaagaggcagcuagca

SEQ ID NO: 916586 - RNA, 22 nt, Human
cuacacaaaaagaaaaagagcc

SEQ ID NO: 916587 - RNA, 19 nt, Human
cuagaagagaagacccaca

SEQ ID NO: 916588 - RNA, 18 nt, Human
cucaagagagagagucau

SEQ ID NO: 916589 - RNA, 19 nt, Human
cucaagagagagagucaug

SEQ ID NO: 916590 - RNA, 20 nt, Human
cucagauuucuuucuuuuuu

SEQ ID NO: 916591 - RNA, 21 nt, Human
cucagauuucuuucuuuuuuu

SEQ ID NO: 916592 - RNA, 22 nt, Human
cucagauuucuuucuuuuuuuu

SEQ ID NO: 916593 - RNA, 23 nt, Human
cucagauuucuuucuuuuuuuuu

SEQ ID NO: 916594 - RNA, 22 nt, Human
cucucuccuucuguacuuccca

SEQ ID NO: 916595 - RNA, 21 nt, Human
cugaaagauggcaauccauuc

SEQ ID NO: 916596 - RNA, 18 nt, Human
cuguacuuuaguccuugc

SEQ ID NO: 916597 - RNA, 21 nt, Human
cuuucuguccucaaagucuca

SEQ ID NO: 916598 - RNA, 22 nt, Human
gacaauugauacugccauugau

SEQ ID NO: 916599 - RNA, 22 nt, Human
gaccucucuccucuugcuguac

SEQ ID NO: 916600 - RNA, 23 nt, Human
gagugaugggcagacgagaaaga

SEQ ID NO: 916601 - RNA, 20 nt, Human
gcagggcaagaguugaggau

SEQ ID NO: 916602 - RNA, 22 nt, Human
gccuaugauucucuccuacuug

SEQ ID NO: 916603 - RNA, 20 nt, Human
gcggagagcagggcaagagu

SEQ ID NO: 916604 - RNA, 20 nt, Human
ggcaguggagggaggggcuu

SEQ ID NO: 916605 - RNA, 20 nt, Human
gggcaagaguugaggauagg

SEQ ID NO: 916606 - RNA, 22 nt, Human
uaaaacaaauugcuagaacuuu

SEQ ID NO: 916607 - RNA, 24 nt, Human
uaaaguucuuuggggugccaguuu

SEQ ID NO: 916608 - RNA, 18 nt, Human
uaagggaaacuacacaaa

SEQ ID NO: 916609 - RNA, 21 nt, Human
uaauuuuuagcuuaguaaaca

SEQ ID NO: 916610 - RNA, 21 nt, Human
uacacaaaaagaaaaagagcc

SEQ ID NO: 916611 - RNA, 23 nt, Human
uacacacucacaaacacacacuc

SEQ ID NO: 916612 - RNA, 18 nt, Human
uacuagaagagaagaccc

SEQ ID NO: 916613 - RNA, 19 nt, Human
uagaaagaugggaaaauaa

SEQ ID NO: 916614 - RNA, 20 nt, Human
uagaaagaugggaaaauaag

SEQ ID NO: 916615 - RNA, 21 nt, Human
uagaagagaagacccacaggc

SEQ ID NO: 916616 - RNA, 18 nt, Human
uagcuuaguaaacagcaa

SEQ ID NO: 916617 - RNA, 22 nt, Human
uaucuaucauauuuccccuucc

SEQ ID NO: 916618 - RNA, 22 nt, Human
ucaaccugccaauccgcaucca

SEQ ID NO: 916619 - RNA, 22 nt, Human
ucaugcucuuccuccuucuucc

SEQ ID NO: 916620 - RNA, 26 nt, Human
ucaugcucuuccuccuucuuccauuu

SEQ ID NO: 916621 - RNA, 20 nt, Human
ucauucacccuuuguuuccc

SEQ ID NO: 916622 - RNA, 19 nt, Human
ucccagaaagcucagauuu

SEQ ID NO: 916623 - RNA, 22 nt, Human
uccccaaacacccguaggaccu

SEQ ID NO: 916624 - RNA, 19 nt, Human
uccccucacugauacuaga

SEQ ID NO: 916625 - RNA, 23 nt, Human
uccuucaguuugaugcuuggggu

SEQ ID NO: 916626 - RNA, 22 nt, Human
ucuacagaaccagaagucaacu

SEQ ID NO: 916627 - RNA, 24 nt, Human
ucucucaaauacacacucacaaac

SEQ ID NO: 916628 - RNA, 21 nt, Human
ucuuccuccuucuuccauuuc

SEQ ID NO: 916629 - RNA, 18 nt, Human
ucuuucucuucuuccuuc

SEQ ID NO: 916630 - RNA, 23 nt, Human
ucuuucuuuuuuuuuccccccuu

SEQ ID NO: 916631 - RNA, 29 nt, Human
ucuuucuuuuuuuuuccccccuucccucc

SEQ ID NO: 916632 - RNA, 21 nt, Human
ugagggaggaggguccuuaua

SEQ ID NO: 916633 - RNA, 20 nt, Human
ugccaauccgcauccauaga

SEQ ID NO: 916634 - RNA, 20 nt, Human
ugccucugaggcaguggagg

SEQ ID NO: 916635 - RNA, 23 nt, Human
uggcguccaggcucuugacacuu

SEQ ID NO: 916636 - RNA, 19 nt, Human
ugggugggacugaguaguu

SEQ ID NO: 916637 - RNA, 25 nt, Human
ugucugugaagguuagaauguuucc

SEQ ID NO: 916638 - RNA, 21 nt, Human
ugugaagguuagaauguuucc

SEQ ID NO: 916639 - RNA, 20 nt, Human
uuacugccucugaggcagug

SEQ ID NO: 916640 - RNA, 23 nt, Human
uucacagaccaaacuuuuucaaa

SEQ ID NO: 916641 - RNA, 19 nt, Human
uucaguaaucccuccccuc

SEQ ID NO: 916642 - RNA, 18 nt, Human
uuccucccagaaagcuca

SEQ ID NO: 916643 - RNA, 21 nt, Human
uuccuccugggucggccucuc

SEQ ID NO: 916644 - RNA, 21 nt, Human
uucuuuuuuuuuccccccuuc

SEQ ID NO: 916645 - RNA, 19 nt, Human
uugacacuguugugagaag

SEQ ID NO: 916646 - RNA, 21 nt, Human
uuggaaaauacugaaagugca

SEQ ID NO: 916647 - RNA, 21 nt, Human
uuguucuucuucauucacccu

SEQ ID NO: 916648 - RNA, 19 nt, Human
uuugcagucaccagggaaa

SEQ ID NO: 916649 - RNA, 20 nt, Human
uuuggggugccaguuugcug

SEQ ID NO: 916650 - RNA, 18 nt, Human
agaaaaaguccagacagc

SEQ ID NO: 916651 - RNA, 18 nt, Human
cugcgucucagugggaca

SEQ ID NO: 916652 - RNA, 21 nt, Human
gaacgcgacccucacacccuc

SEQ ID NO: 916653 - RNA, 20 nt, Human
gacagcaggaacgcgacccu

SEQ ID NO: 916654 - RNA, 20 nt, Human
ucagggcaaguguaaguaug

SEQ ID NO: 916655 - RNA, 18 nt, Human
uuuuuuuuuuuuuuuuug

SEQ ID NO: 916656 - RNA, 23 nt, Human
aaaaagguaucccaagcuacccu

SEQ ID NO: 916657 - RNA, 21 nt, Human
aaacagaauugcagaccugug

SEQ ID NO: 916658 - RNA, 26 nt, Human
aaaggccuucucuccugcccauuggu

SEQ ID NO: 916659 - RNA, 20 nt, Human
aaaggguuuaaacaguugcu

SEQ ID NO: 916660 - RNA, 22 nt, Human
aacaaaugcagucauggaagau

SEQ ID NO: 916661 - RNA, 22 nt, Human
aaccaagugaaccuagacagaa

SEQ ID NO: 916662 - RNA, 19 nt, Human
aaccaggccacuaaggcuu

SEQ ID NO: 916663 - RNA, 21 nt, Human
aagagcuagggagcuaaauuu

SEQ ID NO: 916664 - RNA, 19 nt, Human
aagcaggcaauggagccaa

SEQ ID NO: 916665 - RNA, 19 nt, Human
aagcgucucaaggguccca

SEQ ID NO: 916666 - RNA, 19 nt, Human
aaggaaaauuuugguuugg

SEQ ID NO: 916667 - RNA, 20 nt, Human
aaggaugggguuccugggcu

SEQ ID NO: 916668 - RNA, 22 nt, Human
aagugaccuucuacagcagggc

SEQ ID NO: 916669 - RNA, 22 nt, Human
aaucaaaacacacuuacuccaa

SEQ ID NO: 916670 - RNA, 23 nt, Human
aaucaaaacacacuuacuccaaa

SEQ ID NO: 916671 - RNA, 20 nt, Human
acaggaguggggaaggcaag

SEQ ID NO: 916672 - RNA, 18 nt, Human
acauuguggauaaggaaa

SEQ ID NO: 916673 - RNA, 22 nt, Human
acgcagcuuucagaaaacaauc

SEQ ID NO: 916674 - RNA, 20 nt, Human
acuguaaaguggaagagaca

SEQ ID NO: 916675 - RNA, 19 nt, Human
agaaaacaaucucuucacc

SEQ ID NO: 916676 - RNA, 20 nt, Human
agaaaacagcuaccaaaaag

SEQ ID NO: 916677 - RNA, 18 nt, Human
agaaggagguucuggcgc

SEQ ID NO: 916678 - RNA, 18 nt, Human
agaauucgagggagggac

SEQ ID NO: 916679 - RNA, 21 nt, Human
agacaggaggugggggcaagg

SEQ ID NO: 916680 - RNA, 20 nt, Human
agacauuuuaauaucuggug

SEQ ID NO: 916681 - RNA, 24 nt, Human
agacucugcuuccaagacuaauag

SEQ ID NO: 916682 - RNA, 22 nt, Human
agagccugaacccccaaaccaa

SEQ ID NO: 916683 - RNA, 20 nt, Human
agagcuagggagcuaaauuu

SEQ ID NO: 916684 - RNA, 22 nt, Human
agagggcagguggagagaggac

SEQ ID NO: 916685 - RNA, 19 nt, Human
agauaagagggcaggugga

SEQ ID NO: 916686 - RNA, 18 nt, Human
agcugagggccucugugg

SEQ ID NO: 916687 - RNA, 19 nt, Human
agcugagggccucuguggg

SEQ ID NO: 916688 - RNA, 21 nt, Human
aggaagagggccaaguguggc

SEQ ID NO: 916689 - RNA, 23 nt, Human
aggaagagggccaaguguggcuc

SEQ ID NO: 916690 - RNA, 21 nt, Human
aggacugguaggaggcugagg

SEQ ID NO: 916691 - RNA, 22 nt, Human
aggagguggcugcguaccaagg

SEQ ID NO: 916692 - RNA, 19 nt, Human
aggcccaguggccucugua

SEQ ID NO: 916693 - RNA, 21 nt, Human
aggcgggggugggggcacagg

SEQ ID NO: 916694 - RNA, 24 nt, Human
aggcucucagcucugucacagccu

SEQ ID NO: 916695 - RNA, 23 nt, Human
agggagggacaggaaagggcagg

SEQ ID NO: 916696 - RNA, 20 nt, Human
agggcugugcucucugcagc

SEQ ID NO: 916697 - RNA, 24 nt, Human
aggugggcuucuugggcaauuucu

SEQ ID NO: 916698 - RNA, 21 nt, Human
aggugggggcaaggccccggu

SEQ ID NO: 916699 - RNA, 21 nt, Human
aucaaaacacacuuacuccaa

SEQ ID NO: 916700 - RNA, 25 nt, Human
augaaaaccagauacaacaaagagg

SEQ ID NO: 916701 - RNA, 27 nt, Human
augaaaaccagauacaacaaagaggau

SEQ ID NO: 916702 - RNA, 18 nt, Human
augguccaaaaaaaaaaa

SEQ ID NO: 916703 - RNA, 18 nt, Human
augguccaaaaaaaaaaa

SEQ ID NO: 916704 - RNA, 23 nt, Human
augguccaaaaaaaaaaagguga

SEQ ID NO: 916705 - RNA, 20 nt, Human
caacaccugccuaaggcaaa

SEQ ID NO: 916706 - RNA, 23 nt, Human
caacuggaauggacugaugggaa

SEQ ID NO: 916707 - RNA, 21 nt, Human
caagaggccuccccauucucc

SEQ ID NO: 916708 - RNA, 24 nt, Human
caagugaccuucuacagcagggcc

SEQ ID NO: 916709 - RNA, 18 nt, Human
caccaacccagacucugc

SEQ ID NO: 916710 - RNA, 20 nt, Human
cacccuuuucccucgccaua

SEQ ID NO: 916711 - RNA, 18 nt, Human
caccugccuaaggcaaag

SEQ ID NO: 916712 - RNA, 21 nt, Human
cagaagaaaagaacuaaucau

SEQ ID NO: 916713 - RNA, 23 nt, Human
cagacacuggaauuuuuuuuuuu

SEQ ID NO: 916714 - RNA, 19 nt, Human
cagaguggaagcgucucaa

SEQ ID NO: 916715 - RNA, 26 nt, Human
cagaguuccaggagaggccagggugg

SEQ ID NO: 916716 - RNA, 24 nt, Human
caggaggugggggcaaggccccgg

SEQ ID NO: 916717 - RNA, 23 nt, Human
caggccacuaaggcuuuuuuuuu

SEQ ID NO: 916718 - RNA, 21 nt, Human
cauggaagauggcagagacug

SEQ ID NO: 916719 - RNA, 24 nt, Human
cauugaaaaaucuacuuuaacaaa

SEQ ID NO: 916720 - RNA, 21 nt, Human
cauugcuggcagaggcuggag

SEQ ID NO: 916721 - RNA, 18 nt, Human
ccaaaaagggagggggga

SEQ ID NO: 916722 - RNA, 23 nt, Human
ccaacaauuccacaacuucccgg

SEQ ID NO: 916723 - RNA, 24 nt, Human
ccaacaauuccacaacuucccgga

SEQ ID NO: 916724 - RNA, 19 nt, Human
cccagaaacugcugacugc

SEQ ID NO: 916725 - RNA, 19 nt, Human
cccaggacuguacucagcc

SEQ ID NO: 916726 - RNA, 22 nt, Human
cccccaggacuguacucagccc

SEQ ID NO: 916727 - RNA, 20 nt, Human
cccccaggacuguacucagg

SEQ ID NO: 916728 - RNA, 22 nt, Human
cccgaccccccagauuuuagga

SEQ ID NO: 916729 - RNA, 24 nt, Human
cccgguaguggcggcggucgggcc

SEQ ID NO: 916730 - RNA, 18 nt, Human
cccugagcuaccucccuu

SEQ ID NO: 916731 - RNA, 18 nt, Human
ccgccaggcccccucagg

SEQ ID NO: 916732 - RNA, 19 nt, Human
ccgccaggcccccucaggc

SEQ ID NO: 916733 - RNA, 23 nt, Human
ccuccuuugcuauccacaccaac

SEQ ID NO: 916734 - RNA, 19 nt, Human
ccugaacccccaaaccaag

SEQ ID NO: 916735 - RNA, 19 nt, Human
ccuuaauuagucccuggga

SEQ ID NO: 916736 - RNA, 20 nt, Human
ccuuugaacaaccaggccac

SEQ ID NO: 916737 - RNA, 20 nt, Human
cgccauagacccuacucucc

SEQ ID NO: 916738 - RNA, 22 nt, Human
cgcucggggccccacgcugcgg

SEQ ID NO: 916739 - RNA, 21 nt, Human
cuagagccugaacccccaaac

SEQ ID NO: 916740 - RNA, 23 nt, Human
cucaguaagcauacugaagugag

SEQ ID NO: 916741 - RNA, 21 nt, Human
cuccacacaggcucucagcuc

SEQ ID NO: 916742 - RNA, 23 nt, Human
cuccauaacagagccaaaaacug

SEQ ID NO: 916743 - RNA, 19 nt, Human
cuccuuucccugccuccca

SEQ ID NO: 916744 - RNA, 26 nt, Human
cugaaacccuacuggagaagucagca

SEQ ID NO: 916745 - RNA, 24 nt, Human
cugcuguggggucugcagguuggg

SEQ ID NO: 916746 - RNA, 21 nt, Human
cuggaggcgggggugggggca

SEQ ID NO: 916747 - RNA, 24 nt, Human
cuggaggcgggggugggggcacag

SEQ ID NO: 916748 - RNA, 19 nt, Human
cuggcagaggcuggaggug

SEQ ID NO: 916749 - RNA, 23 nt, Human
cuggucccucauuggucuuuguc

SEQ ID NO: 916750 - RNA, 20 nt, Human
cuguccugggcagaugcccc

SEQ ID NO: 916751 - RNA, 19 nt, Human
cuguggggucugcagguug

SEQ ID NO: 916752 - RNA, 27 nt, Human
gaaagccuccccauccgcuccacacag

SEQ ID NO: 916753 - RNA, 18 nt, Human
gaaccuagacagaaggug

SEQ ID NO: 916754 - RNA, 19 nt, Human
gaaccucauuggcgcuccu

SEQ ID NO: 916755 - RNA, 20 nt, Human
gaagcccaugaagaacugag

SEQ ID NO: 916756 - RNA, 23 nt, Human
gaaggugggugagggaggacugg

SEQ ID NO: 916757 - RNA, 18 nt, Human
gaggacacugagaggagg

SEQ ID NO: 916758 - RNA, 22 nt, Human
gagguggcugcguaccaaggua

SEQ ID NO: 916759 - RNA, 20 nt, Human
gcaaggagaaaagacaggag

SEQ ID NO: 916760 - RNA, 22 nt, Human
gcagauauuauuccucuguacc

SEQ ID NO: 916761 - RNA, 19 nt, Human
gccccgguaguggcggcgg

SEQ ID NO: 916762 - RNA, 19 nt, Human
gccgcgcucgggcuccgcc

SEQ ID NO: 916763 - RNA, 18 nt, Human
gccugaccaacugacugc

SEQ ID NO: 916764 - RNA, 22 nt, Human
gcgcucggggccccacgcugcg

SEQ ID NO: 916765 - RNA, 20 nt, Human
gcggaaaacuggaggcgggg

SEQ ID NO: 916766 - RNA, 23 nt, Human
gcuccaggcaagggcugugcucc

SEQ ID NO: 916767 - RNA, 23 nt, Human
gcugaagcagaaagcugaguccu

SEQ ID NO: 916768 - RNA, 21 nt, Human
gcuggagguggcagggaaagg

SEQ ID NO: 916769 - RNA, 23 nt, Human
gcuggagguggcagggaaagggg

SEQ ID NO: 916770 - RNA, 22 nt, Human
ggaaaagggacaggugggagga

SEQ ID NO: 916771 - RNA, 20 nt, Human
ggaaagacaggauagauggg

SEQ ID NO: 916772 - RNA, 23 nt, Human
ggaaagacaggauagaugggagg

SEQ ID NO: 916773 - RNA, 27 nt, Human
ggaaaggacuccucuaacagcccggga

SEQ ID NO: 916774 - RNA, 22 nt, Human
ggaaucgauccuagagccugaa

SEQ ID NO: 916775 - RNA, 23 nt, Human
ggaauuuuuccaaaccccucuau

SEQ ID NO: 916776 - RNA, 22 nt, Human
ggagaaaacagcuaccaaaaag

SEQ ID NO: 916777 - RNA, 23 nt, Human
ggcaguuaaggugagaaggguug

SEQ ID NO: 916778 - RNA, 20 nt, Human
ggcgggggugggggcacagg

SEQ ID NO: 916779 - RNA, 18 nt, Human
ggcggggguugcagggaa

SEQ ID NO: 916780 - RNA, 21 nt, Human
ggcggugggcuggagggcggg

SEQ ID NO: 916781 - RNA, 21 nt, Human
ggcuccgccaggcccccucag

SEQ ID NO: 916782 - RNA, 22 nt, Human
ggcuggagguggcagggaaagg

SEQ ID NO: 916783 - RNA, 23 nt, Human
gggaaccucauuggcgcuccuuu

SEQ ID NO: 916784 - RNA, 18 nt, Human
gggaccagaaggugggcu

SEQ ID NO: 916785 - RNA, 23 nt, Human
gggaguuuaaaggacuacuaggg

SEQ ID NO: 916786 - RNA, 19 nt, Human
gggcaugccuuucauuucu

SEQ ID NO: 916787 - RNA, 22 nt, Human
gggcuggagggcggggguugca

SEQ ID NO: 916788 - RNA, 19 nt, Human
ggggaggugacggacgugg

SEQ ID NO: 916789 - RNA, 19 nt, Human
ggggauggggaggugacgg

SEQ ID NO: 916790 - RNA, 22 nt, Human
gggguugcagggaaccucauug

SEQ ID NO: 916791 - RNA, 21 nt, Human
gguucuggcgcuuuggagagg

SEQ ID NO: 916792 - RNA, 18 nt, Human
guacaggaggaaugggug

SEQ ID NO: 916793 - RNA, 22 nt, Human
guuccugggcuccaggcaaggg

SEQ ID NO: 916794 - RNA, 21 nt, Human
uaacaugcacagcaugcagga

SEQ ID NO: 916795 - RNA, 20 nt, Human
uaccagcaaaguucacaguu

SEQ ID NO: 916796 - RNA, 18 nt, Human
uagaagcaaaucaucuag

SEQ ID NO: 916797 - RNA, 25 nt, Human
uagagccugaacccccaaaccaagu

SEQ ID NO: 916798 - RNA, 18 nt, Human
uauaauacaagucccaau

SEQ ID NO: 916799 - RNA, 21 nt, Human
uaugagaucuuuucacggggu

SEQ ID NO: 916800 - RNA, 23 nt, Human
ucaagaugaugcagagauccuuu

SEQ ID NO: 916801 - RNA, 23 nt, Human
ucagaagaaaagaacuaaucauu

SEQ ID NO: 916802 - RNA, 20 nt, Human
ucagaguggaagcgucucaa

SEQ ID NO: 916803 - RNA, 22 nt, Human
ucagcccugaccagcuacugug

SEQ ID NO: 916804 - RNA, 23 nt, Human
ucaguuccugaugacaaaccaag

SEQ ID NO: 916805 - RNA, 23 nt, Human
ucauaauguacuuggagaaaaac

SEQ ID NO: 916806 - RNA, 19 nt, Human
ucauggaagauggcagaga

SEQ ID NO: 916807 - RNA, 19 nt, Human
ucaugggggacacagacgg

SEQ ID NO: 916808 - RNA, 22 nt, Human
uccaaaccccucuauggaggca

SEQ ID NO: 916809 - RNA, 22 nt, Human
uccacagcagguucagaguucc

SEQ ID NO: 916810 - RNA, 20 nt, Human
uccaggcaagggcugugcuc

SEQ ID NO: 916811 - RNA, 28 nt, Human
uccauaacagagccaaaaaccggggucc

SEQ ID NO: 916812 - RNA, 25 nt, Human
ucccaauaacaugcacaggguaccc

SEQ ID NO: 916813 - RNA, 18 nt, Human
uccgugagugggaagagu

SEQ ID NO: 916814 - RNA, 19 nt, Human
uccuucuggaaucgauccu

SEQ ID NO: 916815 - RNA, 23 nt, Human
ucucaagggucccacaguggagg

SEQ ID NO: 916816 - RNA, 18 nt, Human
ucugaaucagaguggaag

SEQ ID NO: 916817 - RNA, 28 nt, Human
ucugcagguugggaccagaaggugggcu

SEQ ID NO: 916818 - RNA, 19 nt, Human
ucuggaaucgauccuagag

SEQ ID NO: 916819 - RNA, 23 nt, Human
ugaaaacggaggugcugguacag

SEQ ID NO: 916820 - RNA, 22 nt, Human
ugaaacccucugugucuccaag

SEQ ID NO: 916821 - RNA, 23 nt, Human
ugaacccccaaaccaagugcucc

SEQ ID NO: 916822 - RNA, 24 nt, Human
ugaacccccaaaccaagugcuccu

SEQ ID NO: 916823 - RNA, 20 nt, Human
ugaaccuagacagaaggugg

SEQ ID NO: 916824 - RNA, 20 nt, Human
ugacacacaaagaaaucgga

SEQ ID NO: 916825 - RNA, 18 nt, Human
ugaccucaaaugaagaga

SEQ ID NO: 916826 - RNA, 19 nt, Human
ugagaaagccuccccaucc

SEQ ID NO: 916827 - RNA, 21 nt, Human
ugagaaguggugucucaggag

SEQ ID NO: 916828 - RNA, 18 nt, Human
ugagagaagugcccagaa

SEQ ID NO: 916829 - RNA, 18 nt, Human
ugagaguguagggaaggu

SEQ ID NO: 916830 - RNA, 23 nt, Human
ugagcugagggccucuguggggg

SEQ ID NO: 916831 - RNA, 20 nt, Human
ugaggcaccuacugagagaa

SEQ ID NO: 916832 - RNA, 20 nt, Human
ugaggugacuguguaaacgg

SEQ ID NO: 916833 - RNA, 22 nt, Human
ugagucuagugaugaaaaccag

SEQ ID NO: 916834 - RNA, 21 nt, Human
ugcacagcaugcaggaggugg

SEQ ID NO: 916835 - RNA, 22 nt, Human
ugcagccagaggcccaguggcc

SEQ ID NO: 916836 - RNA, 30 nt, Human
ugcaggauaaagcuauucuuauccuuugaa

SEQ ID NO: 916837 - RNA, 21 nt, Human
ugcccagaaacugcugacugc

SEQ ID NO: 916838 - RNA, 25 nt, Human
ugccuucaugggggacacagacggg

SEQ ID NO: 916839 - RNA, 23 nt, Human
uggaagagacagaagggacauug

SEQ ID NO: 916840 - RNA, 19 nt, Human
uggauucucacauaccauc

SEQ ID NO: 916841 - RNA, 20 nt, Human
uggcaagggaggugaaaugg

SEQ ID NO: 916842 - RNA, 26 nt, Human
ugggaccagaaggugggcuucuuggg

SEQ ID NO: 916843 - RNA, 19 nt, Human
ugggaggaagaccaaugag

SEQ ID NO: 916844 - RNA, 20 nt, Human
ugggaggacacaggaguggg

SEQ ID NO: 916845 - RNA, 20 nt, Human
ugggaggacacaggaguggg

SEQ ID NO: 916846 - RNA, 24 nt, Human
ugggagggggacagcucauugcug

SEQ ID NO: 916847 - RNA, 25 nt, Human
ugggagggggacagcucauugcugg

SEQ ID NO: 916848 - RNA, 24 nt, Human
ugggcuggagggcggggguugcag

SEQ ID NO: 916849 - RNA, 18 nt, Human
ugggggacacagacgggg

SEQ ID NO: 916850 - RNA, 18 nt, Human
ugguuggaagcaggcaau

SEQ ID NO: 916851 - RNA, 18 nt, Human
uuaaaaagcaaaauauuu

SEQ ID NO: 916852 - RNA, 22 nt, Human
uucaccgcgcucggggccccac

SEQ ID NO: 916853 - RNA, 21 nt, Human
uucaugggggacacagacggg

SEQ ID NO: 916854 - RNA, 19 nt, Human
uuccccccgaccccccaga

SEQ ID NO: 916855 - RNA, 24 nt, Human
uucccggauuuucaauuaagaaaa

SEQ ID NO: 916856 - RNA, 18 nt, Human
uuccuugugggugcugag

SEQ ID NO: 916857 - RNA, 21 nt, Human
uugcagaccugugagaaaacu

SEQ ID NO: 916858 - RNA, 21 nt, Human
uuuaggaagggagguuuaaga

SEQ ID NO: 916859 - RNA, 22 nt, Human
uuuuuuuccuggucccucauug

SEQ ID NO: 916860 - RNA, 23 nt, Human
uuuuuuuuugaacccagcucuga

SEQ ID NO: 916861 - RNA, 20 nt, Human
aaaguuuuauuggaauacag

SEQ ID NO: 916862 - RNA, 23 nt, Human
aagcuugcugacccuugcucuaa

SEQ ID NO: 916863 - RNA, 19 nt, Human
aguccucccaaagaacaaa

SEQ ID NO: 916864 - RNA, 20 nt, Human
aguguccauaaauaaaguuu

SEQ ID NO: 916865 - RNA, 22 nt, Human
aguucagaaaucaucaauuucc

SEQ ID NO: 916866 - RNA, 20 nt, Human
caagguuuuaauaaaaugac

SEQ ID NO: 916867 - RNA, 21 nt, Human
cacagguuuugacuauugcuc

SEQ ID NO: 916868 - RNA, 20 nt, Human
caggguuuuaaggugguaga

SEQ ID NO: 916869 - RNA, 18 nt, Human
cuccaccuggguuaaaca

SEQ ID NO: 916870 - RNA, 19 nt, Human
ucaguguccauaaauaaag

SEQ ID NO: 916871 - RNA, 21 nt, Human
ugcucuauuuuuccucccugg

SEQ ID NO: 916872 - RNA, 25 nt, Human
ugcucuauuuuuccucccuggugau

SEQ ID NO: 916873 - RNA, 21 nt, Human
ugcugacccuugcucuaaguc

SEQ ID NO: 916874 - RNA, 21 nt, Human
uggcaguccccugggcuucau

SEQ ID NO: 916875 - RNA, 21 nt, Human
uguguugucuauggcugcuuu

SEQ ID NO: 916876 - RNA, 18 nt, Human
uuaaagaucuccaccugg

SEQ ID NO: 916877 - RNA, 18 nt, Human
uuauuggaauacagccac

SEQ ID NO: 916878 - RNA, 20 nt, Human
uucaguguccauaaauaaag

SEQ ID NO: 916879 - RNA, 19 nt, Human
uucuagaucaggguuuuaa

SEQ ID NO: 916880 - RNA, 23 nt, Human
uugcucuauuuuuccucccuggu

SEQ ID NO: 916881 - RNA, 22 nt, Human
uugguugguggcaacuagcccu

SEQ ID NO: 916882 - RNA, 22 nt, Human
uuuuccaacugcugacauuuau

SEQ ID NO: 916883 - RNA, 23 nt, Human
uuuuuuuuuuuuuuuuuuuucag

SEQ ID NO: 916884 - RNA, 21 nt, Human
aaaaugagugcuagacucuca

SEQ ID NO: 916885 - RNA, 24 nt, Human
aaacaaagccaacaccucuaagcc

SEQ ID NO: 916886 - RNA, 27 nt, Human
aaacaagaaugagaaaccagaguccuu

SEQ ID NO: 916887 - RNA, 23 nt, Human
aagaaagaaaacaagaaugagaa

SEQ ID NO: 916888 - RNA, 21 nt, Human
aagccaacaccucuaagcugg

SEQ ID NO: 916889 - RNA, 19 nt, Human
aauaaauauuuuuuaaagu

SEQ ID NO: 916890 - RNA, 23 nt, Human
acacacacacacacacacacaca

SEQ ID NO: 916891 - RNA, 23 nt, Human
acacacacacacacacacacaca

SEQ ID NO: 916892 - RNA, 23 nt, Human
acacacacacacacacacacaca

SEQ ID NO: 916893 - RNA, 23 nt, Human
acacacacacacacacacacaca

SEQ ID NO: 916894 - RNA, 29 nt, Human
acacacacacacacacacacacacucuuc

SEQ ID NO: 916895 - RNA, 24 nt, Human
acacacacacacacacacacacag

SEQ ID NO: 916896 - RNA, 27 nt, Human
acacacacacacacacacacacucuuc

SEQ ID NO: 916897 - RNA, 22 nt, Human
acacacacacucuuccacaggc

SEQ ID NO: 916898 - RNA, 20 nt, Human
acuacacugaaauacugaca

SEQ ID NO: 916899 - RNA, 21 nt, Human
agauaaauuaacuacacugaa

SEQ ID NO: 916900 - RNA, 20 nt, Human
agcuuuucaaaauaaaagca

SEQ ID NO: 916901 - RNA, 22 nt, Human
agguuuccccaaauuagcauau

SEQ ID NO: 916902 - RNA, 22 nt, Human
caaacauuacacucaaguacuu

SEQ ID NO: 916903 - RNA, 26 nt, Human
caacacagaauagauuuuaacagaau

SEQ ID NO: 916904 - RNA, 23 nt, Human
caaggaauaacucacuaaaugaa

SEQ ID NO: 916905 - RNA, 20 nt, Human
cacacacacacacacacaca

SEQ ID NO: 916906 - RNA, 20 nt, Human
cacacacacacacacacaca

SEQ ID NO: 916907 - RNA, 20 nt, Human
cacacacacacacacacaca

SEQ ID NO: 916908 - RNA, 20 nt, Human
cacacacacacacacacaca

SEQ ID NO: 916909 - RNA, 20 nt, Human
cacacacacacacacacaca

SEQ ID NO: 916910 - RNA, 20 nt, Human
cacacacacacacacacaca

SEQ ID NO: 916911 - RNA, 20 nt, Human
cacacacacacacacacaca

SEQ ID NO: 916912 - RNA, 20 nt, Human
cacacacacacacacacaca

SEQ ID NO: 916913 - RNA, 20 nt, Human
cacacacacacacacacaca

SEQ ID NO: 916914 - RNA, 22 nt, Human
cacacacacacacacacacaca

SEQ ID NO: 916915 - RNA, 22 nt, Human
cacacacacacacacacacaca

SEQ ID NO: 916916 - RNA, 22 nt, Human
cacacacacacacacacacaca

SEQ ID NO: 916917 - RNA, 22 nt, Human
cacacacacacacacacacaca

SEQ ID NO: 916918 - RNA, 26 nt, Human
cacacacacacacacacacacacaca

SEQ ID NO: 916919 - RNA, 26 nt, Human
cacacacacacacacacacacacaca

SEQ ID NO: 916920 - RNA, 26 nt, Human
cacacacacacacacacacacacaca

SEQ ID NO: 916921 - RNA, 26 nt, Human
cacacacacacacacacacacacaca

SEQ ID NO: 916922 - RNA, 26 nt, Human
cacacacacacacacacacacacaca

SEQ ID NO: 916923 - RNA, 26 nt, Human
cacacacacacacacacacacacaca

SEQ ID NO: 916924 - RNA, 26 nt, Human
cacacacacacacacacacacacaca

SEQ ID NO: 916925 - RNA, 28 nt, Human
cacacacacacacacacacucuuccaca

SEQ ID NO: 916926 - RNA, 18 nt, Human
caucaucuguuuaaucuu

SEQ ID NO: 916927 - RNA, 19 nt, Human
ccacacacacacacacaca

SEQ ID NO: 916928 - RNA, 21 nt, Human
ccacacacacacacacacaca

SEQ ID NO: 916929 - RNA, 24 nt, Human
cuagguuuccccaaauuagcauau

SEQ ID NO: 916930 - RNA, 31 nt, Human
cucucugccacacacacacacacacacacag

SEQ ID NO: 916931 - RNA, 21 nt, Human
gagauguuuauauuugcaaaa

SEQ ID NO: 916932 - RNA, 24 nt, Human
ggaagaaugagaccuuccuacaaa

SEQ ID NO: 916933 - RNA, 22 nt, Human
uaacagaauuucucucucucuc

SEQ ID NO: 916934 - RNA, 22 nt, Human
uaacucacuaaaugaauaaugc

SEQ ID NO: 916935 - RNA, 19 nt, Human
uaagcugccauaucuguua

SEQ ID NO: 916936 - RNA, 20 nt, Human
uacaacaauauuaugucaca

SEQ ID NO: 916937 - RNA, 21 nt, Human
uacacucaaguacuuuaugaa

SEQ ID NO: 916938 - RNA, 18 nt, Human
uacauccaaacaaagcca

SEQ ID NO: 916939 - RNA, 19 nt, Human
uacauccaaacaaagccaa

SEQ ID NO: 916940 - RNA, 22 nt, Human
uacauccaaacaaagccaacac

SEQ ID NO: 916941 - RNA, 25 nt, Human
uagaugcaauuauaaauguacccua

SEQ ID NO: 916942 - RNA, 18 nt, Human
ucaaauccuaauugcaac

SEQ ID NO: 916943 - RNA, 21 nt, Human
ucucaucaucuguuuaaucuu

SEQ ID NO: 916944 - RNA, 19 nt, Human
ucugacugaagaaaugacc

SEQ ID NO: 916945 - RNA, 21 nt, Human
ucugauucuuaggaauuuuuu

SEQ ID NO: 916946 - RNA, 26 nt, Human
ucuuccacaggcauccacacaggggu

SEQ ID NO: 916947 - RNA, 22 nt, Human
ugaaagaggcacugaagaagua

SEQ ID NO: 916948 - RNA, 20 nt, Human
ugaagaaguaggaaaggcag

SEQ ID NO: 916949 - RNA, 19 nt, Human
ugcaacagagcuuucagug

SEQ ID NO: 916950 - RNA, 23 nt, Human
ugcauguaugcuuucugugugug

SEQ ID NO: 916951 - RNA, 24 nt, Human
ugccacacacacacacacacacag

SEQ ID NO: 916952 - RNA, 22 nt, Human
ugucucagaauuuaaaacacug

SEQ ID NO: 916953 - RNA, 23 nt, Human
uguuaggguuauaucauagaugu

SEQ ID NO: 916954 - RNA, 23 nt, Human
uguuauagaaaaugagugcuaga

SEQ ID NO: 916955 - RNA, 27 nt, Human
uuaaacacagcaacagguuacaguaag

SEQ ID NO: 916956 - RNA, 20 nt, Human
uuucucucucucucuuucuc

SEQ ID NO: 916957 - RNA, 23 nt, Human
uuugcaaaauuucaacaauuauc

SEQ ID NO: 916958 - RNA, 19 nt, Human
uuuuugguuugaaggaucc

SEQ ID NO: 916959 - RNA, 23 nt, Human
aaagccgcguccucgcgcccccg

SEQ ID NO: 916960 - RNA, 24 nt, Human
acccacgcacgcaauccagccaug

SEQ ID NO: 916961 - RNA, 24 nt, Human
acuguaauuagcuauuccaguugu

SEQ ID NO: 916962 - RNA, 19 nt, Human
agccagggagcuucagucc

SEQ ID NO: 916963 - RNA, 18 nt, Human
aggaccccggggauucag

SEQ ID NO: 916964 - RNA, 19 nt, Human
auggcucagcaagcaugcc

SEQ ID NO: 916965 - RNA, 18 nt, Human
augggcgccccagcagac

SEQ ID NO: 916966 - RNA, 21 nt, Human
caaaaucaucuagaacccaga

SEQ ID NO: 916967 - RNA, 21 nt, Human
cagagacucuggcaaccccau

SEQ ID NO: 916968 - RNA, 19 nt, Human
caucuagaacccagagacu

SEQ ID NO: 916969 - RNA, 26 nt, Human
cauuuccaucuuaagaaauuguuuuc

SEQ ID NO: 916970 - RNA, 22 nt, Human
ccaaggaccccggggauucagg

SEQ ID NO: 916971 - RNA, 20 nt, Human
ccaauugcacauucuccucg

SEQ ID NO: 916972 - RNA, 22 nt, Human
ccagcagacccgccugcacaaa

SEQ ID NO: 916973 - RNA, 20 nt, Human
ccauuuccaucuuaagaaag

SEQ ID NO: 916974 - RNA, 19 nt, Human
cccacgcacgcaauccagc

SEQ ID NO: 916975 - RNA, 21 nt, Human
cccacgcacgcaauccagcca

SEQ ID NO: 916976 - RNA, 23 nt, Human
cccacgcacgcaauccagccaug

SEQ ID NO: 916977 - RNA, 18 nt, Human
cccccgacaccgucuucc

SEQ ID NO: 916978 - RNA, 22 nt, Human
cccccgcguccccgccgccgcc

SEQ ID NO: 916979 - RNA, 23 nt, Human
cccccgcguccccgccgccgccu

SEQ ID NO: 916980 - RNA, 21 nt, Human
ccccgacaccgucuuccccca

SEQ ID NO: 916981 - RNA, 22 nt, Human
ccccgccgccgccucgggccgc

SEQ ID NO: 916982 - RNA, 25 nt, Human
ccccgccgcugucauagcgcgcccg

SEQ ID NO: 916983 - RNA, 18 nt, Human
ccccgcguccccgccgcc

SEQ ID NO: 916984 - RNA, 20 nt, Human
cccgaauauuauucucauua

SEQ ID NO: 916985 - RNA, 23 nt, Human
cccgacaccgucuucccccacuc

SEQ ID NO: 916986 - RNA, 24 nt, Human
cccguggacgaggcgaccuccccc

SEQ ID NO: 916987 - RNA, 25 nt, Human
cccguggacgaggcgaccucccccu

SEQ ID NO: 916988 - RNA, 28 nt, Human
cccucuucuguuuuguaccauccuugau

SEQ ID NO: 916989 - RNA, 23 nt, Human
ccgcccggcuugcucucccgggg

SEQ ID NO: 916990 - RNA, 22 nt, Human
ccgcugucauagcgcgcccgcc

SEQ ID NO: 916991 - RNA, 18 nt, Human
ccucgcgcccccgcgucc

SEQ ID NO: 916992 - RNA, 21 nt, Human
cgacaccgucuucccccacuc

SEQ ID NO: 916993 - RNA, 18 nt, Human
cgcaacgccgcggggucc

SEQ ID NO: 916994 - RNA, 19 nt, Human
cgcaacgccgcgggguccc

SEQ ID NO: 916995 - RNA, 21 nt, Human
cgccccagcagacccgccugc

SEQ ID NO: 916996 - RNA, 19 nt, Human
cgccgcugucauagcgcgc

SEQ ID NO: 916997 - RNA, 22 nt, Human
cggggcgagcgcaacgccgcgg

SEQ ID NO: 916998 - RNA, 21 nt, Human
cucagcaagcaugccaccaaa

SEQ ID NO: 916999 - RNA, 18 nt, Human
cugucuuuuuccguuccc

SEQ ID NO: 917000 - RNA, 20 nt, Human
gaacccagagacucuggcaa

SEQ ID NO: 917001 - RNA, 19 nt, Human
ggacgaggcgaccuccccc

SEQ ID NO: 917002 - RNA, 22 nt, Human
ggacgggcccggggaggugggc

SEQ ID NO: 917003 - RNA, 23 nt, Human
ggcugcuuuuacaucaucucuac

SEQ ID NO: 917004 - RNA, 22 nt, Human
gggaacccguccacuuacauuc

SEQ ID NO: 917005 - RNA, 19 nt, Human
gggcgcccuuggcaccgag

SEQ ID NO: 917006 - RNA, 19 nt, Human
gucuuuuuccguucccucu

SEQ ID NO: 917007 - RNA, 21 nt, Human
uaagaaauuguuuucacuuag

SEQ ID NO: 917008 - RNA, 20 nt, Human
uacaauguauuguuuccaga

SEQ ID NO: 917009 - RNA, 26 nt, Human
uagaacccagagacucuggcaacccc

SEQ ID NO: 917010 - RNA, 24 nt, Human
uagaucagguuuuuuucuccaaua

SEQ ID NO: 917011 - RNA, 26 nt, Human
uaguaauuauggcucagcaagcaugc

SEQ ID NO: 917012 - RNA, 18 nt, Human
ucccccgacaccgucuuc

SEQ ID NO: 917013 - RNA, 25 nt, Human
uccccgccgccgccucgggccgccg

SEQ ID NO: 917014 - RNA, 18 nt, Human
uccguuggaaaccccgcc

SEQ ID NO: 917015 - RNA, 20 nt, Human
uccucgcgcccccgcguccc

SEQ ID NO: 917016 - RNA, 24 nt, Human
ucgauggcucuccaaggaccccgg

SEQ ID NO: 917017 - RNA, 21 nt, Human
ucucaguggagcuagagugaa

SEQ ID NO: 917018 - RNA, 22 nt, Human
ucuccaaggaccccggggauuc

SEQ ID NO: 917019 - RNA, 24 nt, Human
ugaacacuacuucauacaaugaaa

SEQ ID NO: 917020 - RNA, 18 nt, Human
uguaucuucagccaggga

SEQ ID NO: 917021 - RNA, 22 nt, Human
uucccccacuccggcuuucagg

SEQ ID NO: 917022 - RNA, 18 nt, Human
uuccguucccucuucugu

SEQ ID NO: 917023 - RNA, 23 nt, Human
uucucauuagugagugcaaagca

SEQ ID NO: 917024 - RNA, 18 nt, Human
uuggaaaccccgccgcug

SEQ ID NO: 917025 - RNA, 22 nt, Human
uuuaaaaucccgaauauuauuc

SEQ ID NO: 917026 - RNA, 20 nt, Human
uuucucaguggagcuagagu

SEQ ID NO: 917027 - RNA, 22 nt, Human
uuucucaguggagcuagaguga

SEQ ID NO: 917028 - RNA, 25 nt, Human
uuucucaguggagcuagagugaaua

SEQ ID NO: 917029 - RNA, 23 nt, Human
uuuuccguucccucuucuguuuu

SEQ ID NO: 917030 - RNA, 23 nt, Human
aggagggaggaauccugguuccc

SEQ ID NO: 917031 - RNA, 25 nt, Human
augaagauggggaaggaaauggcac

SEQ ID NO: 917032 - RNA, 22 nt, Human
auucacucuccaaagcaguaca

SEQ ID NO: 917033 - RNA, 22 nt, Human
caaaacuuacaaagaagucaaa

SEQ ID NO: 917034 - RNA, 21 nt, Human
caggugcgccuuccccgcgcc

SEQ ID NO: 917035 - RNA, 21 nt, Human
ccccaggugcgccuuccccgc

SEQ ID NO: 917036 - RNA, 19 nt, Human
uacaaagaagucaaaaguc

SEQ ID NO: 917037 - RNA, 22 nt, Human
uacaaagaagucaaaagucuua

SEQ ID NO: 917038 - RNA, 22 nt, Human
ucuccaaagcaguacaaaacuu

SEQ ID NO: 917039 - RNA, 18 nt, Human
uggcaccacugcuguuug

SEQ ID NO: 917040 - RNA, 22 nt, Human
ugguaggagggaggaauccugg

SEQ ID NO: 917041 - RNA, 19 nt, Human
ugugaugcuggggaaaagu

SEQ ID NO: 917042 - RNA, 24 nt, Human
uuucucauaagaagagaguuuuau

SEQ ID NO: 917043 - RNA, 29 nt, Human
uuuuuuuuuuuuuuuuuuucucauaagaa

SEQ ID NO: 917044 - RNA, 20 nt, Human
acacagaggaacaugcuaaa

SEQ ID NO: 917045 - RNA, 19 nt, Human
accauuucccccuuuauca

SEQ ID NO: 917046 - RNA, 21 nt, Human
agaggaacaugcuaaacugca

SEQ ID NO: 917047 - RNA, 24 nt, Human
aggaacaugcuaaacugcaccaaa

SEQ ID NO: 917048 - RNA, 20 nt, Human
aggcaggcuccgugcgcuuc

SEQ ID NO: 917049 - RNA, 18 nt, Human
cacuaaaaaccauuuccc

SEQ ID NO: 917050 - RNA, 26 nt, Human
cuagaagccucaugaaagguaacuga

SEQ ID NO: 917051 - RNA, 22 nt, Human
ggaacaugcuaaacugcaccaa

SEQ ID NO: 917052 - RNA, 27 nt, Human
ugcagaacacagaggaacaugcuaaac

SEQ ID NO: 917053 - RNA, 18 nt, Human
uggcuagaagccucauga

SEQ ID NO: 917054 - RNA, 22 nt, Human
aggcgcgggcccagacauuccc

SEQ ID NO: 917055 - RNA, 22 nt, Human
agggacguggcggccuuuagag

SEQ ID NO: 917056 - RNA, 21 nt, Human
caccgcgcauccucccggccc

SEQ ID NO: 917057 - RNA, 24 nt, Human
ccccacaccgcgcauccucccggc

SEQ ID NO: 917058 - RNA, 21 nt, Human
cccucccggcccgcccgggcc

SEQ ID NO: 917059 - RNA, 19 nt, Human
cccuccgccggcacgaagc

SEQ ID NO: 917060 - RNA, 20 nt, Human
ccgcccgggcccccuccgcc

SEQ ID NO: 917061 - RNA, 18 nt, Human
ccucccggcccgcccggg

SEQ ID NO: 917062 - RNA, 21 nt, Human
ccucccggcccggcgccggcc

SEQ ID NO: 917063 - RNA, 18 nt, Human
cgcccgggcccccuccgc

SEQ ID NO: 917064 - RNA, 21 nt, Human
gcagccccucccggcccgccc

SEQ ID NO: 917065 - RNA, 18 nt, Human
gcccgggcccccuccgcc

SEQ ID NO: 917066 - RNA, 18 nt, Human
gcggugaugggguaggcg

SEQ ID NO: 917067 - RNA, 19 nt, Human
gggcagccccucccggccc

SEQ ID NO: 917068 - RNA, 24 nt, Human
gguaggcgcagggccuggggcagc

SEQ ID NO: 917069 - RNA, 19 nt, Human
ucagagccccacaccgcgc

SEQ ID NO: 917070 - RNA, 18 nt, Human
ucccggcccgcccgggcc

SEQ ID NO: 917071 - RNA, 18 nt, Human
ugccugcgcgcgccgcag

SEQ ID NO: 917072 - RNA, 20 nt, Human
uucagagccccacaccgcgc

SEQ ID NO: 917073 - RNA, 19 nt, Human
agaggacggugugggugcu

SEQ ID NO: 917074 - RNA, 23 nt, Human
cacuaccucucuccccacucuca

SEQ ID NO: 917075 - RNA, 18 nt, Human
cagucucuuccucuuucu

SEQ ID NO: 917076 - RNA, 18 nt, Human
caguguugagaaaaccaa

SEQ ID NO: 917077 - RNA, 22 nt, Human
ccagaccacguccucgcgcucc

SEQ ID NO: 917078 - RNA, 18 nt, Human
cccucucucucucucucc

SEQ ID NO: 917079 - RNA, 21 nt, Human
cccuguguccucucuccuuca

SEQ ID NO: 917080 - RNA, 18 nt, Human
cccuuccucccucuccca

SEQ ID NO: 917081 - RNA, 23 nt, Human
ccucccgggcccgcaauggggac

SEQ ID NO: 917082 - RNA, 18 nt, Human
ccucccuuuucucuuucc

SEQ ID NO: 917083 - RNA, 20 nt, Human
ccugucucuuacggucucuc

SEQ ID NO: 917084 - RNA, 18 nt, Human
cgcgcuccgauuggcugc

SEQ ID NO: 917085 - RNA, 19 nt, Human
cucacuuucugugucuccc

SEQ ID NO: 917086 - RNA, 19 nt, Human
cucauucucucccucucuc

SEQ ID NO: 917087 - RNA, 20 nt, Human
cucucagucauccccugugu

SEQ ID NO: 917088 - RNA, 22 nt, Human
cucuccccacucucacuuucug

SEQ ID NO: 917089 - RNA, 18 nt, Human
cucucucucucucucucu

SEQ ID NO: 917090 - RNA, 18 nt, Human
cucucucucucucucucu

SEQ ID NO: 917091 - RNA, 23 nt, Human
cucucucucuuccuuuuacacua

SEQ ID NO: 917092 - RNA, 18 nt, Human
cucuuccucuuucucucu

SEQ ID NO: 917093 - RNA, 19 nt, Human
cuucacacucagucucuuc

SEQ ID NO: 917094 - RNA, 24 nt, Human
cuuccagucucucucucacucauu

SEQ ID NO: 917095 - RNA, 21 nt, Human
cuuuuugucucuuugucuccu

SEQ ID NO: 917096 - RNA, 19 nt, Human
gaccagaccacgcccccug

SEQ ID NO: 917097 - RNA, 21 nt, Human
gacucacagggucucuuccuu

SEQ ID NO: 917098 - RNA, 21 nt, Human
gaugcccugaguggucccaga

SEQ ID NO: 917099 - RNA, 18 nt, Human
gcggcaccuaggcagucu

SEQ ID NO: 917100 - RNA, 19 nt, Human
uaccuccagaccacguccu

SEQ ID NO: 917101 - RNA, 19 nt, Human
ucacuuucucccuuccucc

SEQ ID NO: 917102 - RNA, 22 nt, Human
ucagucauccccuguguccucu

SEQ ID NO: 917103 - RNA, 20 nt, Human
ucagucucuuccucuuucuc

SEQ ID NO: 917104 - RNA, 19 nt, Human
ucauucucucucucucucu

SEQ ID NO: 917105 - RNA, 21 nt, Human
uccccacucucacuuucugug

SEQ ID NO: 917106 - RNA, 25 nt, Human
ucccucucucucucucuccaaucuu

SEQ ID NO: 917107 - RNA, 20 nt, Human
ucccucugaucucugucucu

SEQ ID NO: 917108 - RNA, 19 nt, Human
ucgcgcuccgauuggcugc

SEQ ID NO: 917109 - RNA, 21 nt, Human
ucucccuuccucccucuccca

SEQ ID NO: 917110 - RNA, 19 nt, Human
ucuccugucucuuacgguc

SEQ ID NO: 917111 - RNA, 21 nt, Human
ucuccugucucuuacggucuc

SEQ ID NO: 917112 - RNA, 19 nt, Human
ucucucacucauucucucc

SEQ ID NO: 917113 - RNA, 18 nt, Human
ucucucuccaaucuuucu

SEQ ID NO: 917114 - RNA, 23 nt, Human
ucucucucuccaaucuuucuguu

SEQ ID NO: 917115 - RNA, 25 nt, Human
ucugccguuuccucccuuuucucuu

SEQ ID NO: 917116 - RNA, 22 nt, Human
ucugucucauucucucucucuc

SEQ ID NO: 917117 - RNA, 20 nt, Human
ucugucucuuccagucucuc

SEQ ID NO: 917118 - RNA, 21 nt, Human
ucugugucucccucugaucuc

SEQ ID NO: 917119 - RNA, 19 nt, Human
ucuuacggucucucucucu

SEQ ID NO: 917120 - RNA, 23 nt, Human
ugaucucugucucuuccagucuc

SEQ ID NO: 917121 - RNA, 27 nt, Human
ugccguuuccucccuuuucucuuuccg

SEQ ID NO: 917122 - RNA, 22 nt, Human
ugucucauucucucucucucuc

SEQ ID NO: 917123 - RNA, 23 nt, Human
ugucucuuccagucucucucuca

SEQ ID NO: 917124 - RNA, 22 nt, Human
uuccucccuuuucucuuuccga

SEQ ID NO: 917125 - RNA, 23 nt, Human
uucucacuuucucccuuccuccc

SEQ ID NO: 917126 - RNA, 21 nt, Human
uuucccuucucacuuucuccc

SEQ ID NO: 917127 - RNA, 23 nt, Human
uuugucucuuagcugcugucucu

SEQ ID NO: 917128 - RNA, 24 nt, Human
uuuuacacuaccucucuccccacu

SEQ ID NO: 917129 - RNA, 23 nt, Human
aggaugaugcagcucugcccagc

SEQ ID NO: 917130 - RNA, 19 nt, Human
agggggagggggacaaggc

SEQ ID NO: 917131 - RNA, 20 nt, Human
agugaggagggcaccagucc

SEQ ID NO: 917132 - RNA, 23 nt, Human
caacccccaccugcaaggaugau

SEQ ID NO: 917133 - RNA, 18 nt, Human
cacacugcagacauggca

SEQ ID NO: 917134 - RNA, 26 nt, Human
cacccgaacauguacaaaaauaacuu

SEQ ID NO: 917135 - RNA, 21 nt, Human
cagagccuccgcaccgcuccc

SEQ ID NO: 917136 - RNA, 22 nt, Human
cagccaccggggcuggggggca

SEQ ID NO: 917137 - RNA, 18 nt, Human
cauauggugggguugagg

SEQ ID NO: 917138 - RNA, 19 nt, Human
ccacacccgaacauguaca

SEQ ID NO: 917139 - RNA, 20 nt, Human
ccaguaugggccccagaugc

SEQ ID NO: 917140 - RNA, 19 nt, Human
ccuccgcaccgcucccucg

SEQ ID NO: 917141 - RNA, 22 nt, Human
cuccgcaccgcucccucgugcc

SEQ ID NO: 917142 - RNA, 21 nt, Human
cugcgcugcagaccucgaucc

SEQ ID NO: 917143 - RNA, 21 nt, Human
gagggggagggggacaaggga

SEQ ID NO: 917144 - RNA, 21 nt, Human
gcuguagaacccacacccgaa

SEQ ID NO: 917145 - RNA, 19 nt, Human
ggcacacugcagacauggc

SEQ ID NO: 917146 - RNA, 18 nt, Human
ggcuggggggcacacugc

SEQ ID NO: 917147 - RNA, 30 nt, Human
uacaaaaauaacuuacacagcaacccccag

SEQ ID NO: 917148 - RNA, 19 nt, Human
uacacagcaacccccaccu

SEQ ID NO: 917149 - RNA, 24 nt, Human
uagaacccacacccgaacauguac

SEQ ID NO: 917150 - RNA, 19 nt, Human
ucccgaagcugcgcugcag

SEQ ID NO: 917151 - RNA, 24 nt, Human
ucccgaagcugcgcugcagaccuc

SEQ ID NO: 917152 - RNA, 23 nt, Human
ugaggagggcaccaguccggagg

SEQ ID NO: 917153 - RNA, 20 nt, Human
ugaugcagcucugcccagcc

SEQ ID NO: 917154 - RNA, 21 nt, Human
uggcaccgcgggagccaacca

SEQ ID NO: 917155 - RNA, 21 nt, Human
ugggagugaggagggcaccag

SEQ ID NO: 917156 - RNA, 24 nt, Human
ugggagugaggagggcaccagucc

SEQ ID NO: 917157 - RNA, 22 nt, Human
uggugggguugagggggagggg

SEQ ID NO: 917158 - RNA, 20 nt, Human
uugagggggagggggacaag

SEQ ID NO: 917159 - RNA, 27 nt, Human
uuuuuuuuuuuuuuuuuuuuuuugggg

SEQ ID NO: 917160 - RNA, 22 nt, Human
aaaacaaaacacaagguacgga

SEQ ID NO: 917161 - RNA, 21 nt, Human
aaaacaaaucaagaccuucaa

SEQ ID NO: 917162 - RNA, 19 nt, Human
aaaagaacaacacaacucu

SEQ ID NO: 917163 - RNA, 18 nt, Human
aaacaaaacacaagguac

SEQ ID NO: 917164 - RNA, 23 nt, Human
aaacaggaaaagacugaaaucug

SEQ ID NO: 917165 - RNA, 24 nt, Human
aaacaggaaaagacugaaaucugg

SEQ ID NO: 917166 - RNA, 22 nt, Human
aaagauccuugcuuugaccccc

SEQ ID NO: 917167 - RNA, 20 nt, Human
aacagaaaaaaagacaugcu

SEQ ID NO: 917168 - RNA, 22 nt, Human
aaccuaacucuuaacacaccaa

SEQ ID NO: 917169 - RNA, 22 nt, Human
aacuguaguacaaaucuuuccu

SEQ ID NO: 917170 - RNA, 24 nt, Human
aagcuuaccaacugaauagccuga

SEQ ID NO: 917171 - RNA, 24 nt, Human
aauaaguaauaaacaaacugggaa

SEQ ID NO: 917172 - RNA, 20 nt, Human
aauagagagaccagaaugaa

SEQ ID NO: 917173 - RNA, 23 nt, Human
acaaaacauuuucccucuccucc

SEQ ID NO: 917174 - RNA, 24 nt, Human
acaacacaacucuuuacaacagaa

SEQ ID NO: 917175 - RNA, 20 nt, Human
acacagauucuacgcucccu

SEQ ID NO: 917176 - RNA, 24 nt, Human
acagaaaaaaagacaugcuaucca

SEQ ID NO: 917177 - RNA, 20 nt, Human
accaaagagaauauauuugg

SEQ ID NO: 917178 - RNA, 21 nt, Human
acuaauuaacagaaaaaaaga

SEQ ID NO: 917179 - RNA, 20 nt, Human
agcauuguaggcuguguggu

SEQ ID NO: 917180 - RNA, 18 nt, Human
aggagaagggagugagaa

SEQ ID NO: 917181 - RNA, 24 nt, Human
aggauccuggucucuccagccucc

SEQ ID NO: 917182 - RNA, 20 nt, Human
aggccagaguacacaacuaa

SEQ ID NO: 917183 - RNA, 21 nt, Human
agguuacaccauuagccacca

SEQ ID NO: 917184 - RNA, 22 nt, Human
aguguuuuuuuguaaagccucu

SEQ ID NO: 917185 - RNA, 23 nt, Human
caacacaacucuuuacaacagaa

SEQ ID NO: 917186 - RNA, 21 nt, Human
caacagaagaacuguaguaca

SEQ ID NO: 917187 - RNA, 23 nt, Human
caacugaauagccugaugacugg

SEQ ID NO: 917188 - RNA, 22 nt, Human
caacugcugcuccucaggccag

SEQ ID NO: 917189 - RNA, 26 nt, Human
caauaggcagauuugggcaaacgcuc

SEQ ID NO: 917190 - RNA, 24 nt, Human
caauucuauaucagaaaugaagga

SEQ ID NO: 917191 - RNA, 19 nt, Human
caauuuuccuaguuuaaaa

SEQ ID NO: 917192 - RNA, 24 nt, Human
cacaacuaauuaacagaaaaaaag

SEQ ID NO: 917193 - RNA, 21 nt, Human
caccagcaacugcugcuccuc

SEQ ID NO: 917194 - RNA, 25 nt, Human
caccuacgaugacugaauggauaau

SEQ ID NO: 917195 - RNA, 21 nt, Human
cagaaaaaaagacaugcuauc

SEQ ID NO: 917196 - RNA, 22 nt, Human
cagaaaaaaagacaugcuaucc

SEQ ID NO: 917197 - RNA, 21 nt, Human
cagaagaacuguaguacaaau

SEQ ID NO: 917198 - RNA, 24 nt, Human
cagaauacuuguagaaaaucccaa

SEQ ID NO: 917199 - RNA, 23 nt, Human
cagcuaugaagcaaaaugacuaa

SEQ ID NO: 917200 - RNA, 22 nt, Human
caugaaaugagcaccauuguga

SEQ ID NO: 917201 - RNA, 21 nt, Human
cauuuuguacaccaaagagaa

SEQ ID NO: 917202 - RNA, 21 nt, Human
ccacaggguugucaugguagc

SEQ ID NO: 917203 - RNA, 27 nt, Human
ccacaggguugucaugguagcuguuau

SEQ ID NO: 917204 - RNA, 24 nt, Human
ccagaguacacaacuaauuaacag

SEQ ID NO: 917205 - RNA, 21 nt, Human
ccccaugaaaugagcaccauu

SEQ ID NO: 917206 - RNA, 18 nt, Human
cccuaacgagguguaagg

SEQ ID NO: 917207 - RNA, 20 nt, Human
ccuucuaugcagccuggaag

SEQ ID NO: 917208 - RNA, 20 nt, Human
cgccaucggggucagugcuc

SEQ ID NO: 917209 - RNA, 24 nt, Human
cuagagagaacgaucagauuacuc

SEQ ID NO: 917210 - RNA, 20 nt, Human
cugcugcuccucaggccagu

SEQ ID NO: 917211 - RNA, 18 nt, Human
cuggaagcuuaccaacug

SEQ ID NO: 917212 - RNA, 24 nt, Human
cuggaagcuuaucuuguauacugg

SEQ ID NO: 917213 - RNA, 20 nt, Human
cuggaaggauccuggucucu

SEQ ID NO: 917214 - RNA, 20 nt, Human
cuuaaauauugcugaaacca

SEQ ID NO: 917215 - RNA, 20 nt, Human
cuuuauguuaaaccuaacuc

SEQ ID NO: 917216 - RNA, 21 nt, Human
cuuuccuuccacuuuguuucc

SEQ ID NO: 917217 - RNA, 20 nt, Human
cuuuuuuuuuuuuuuaaccc

SEQ ID NO: 917218 - RNA, 20 nt, Human
gacuuuuuuuuuuuuuuaaa

SEQ ID NO: 917219 - RNA, 18 nt, Human
gaugacugaauggauaau

SEQ ID NO: 917220 - RNA, 21 nt, Human
gggugaaagauccuugcuuug

SEQ ID NO: 917221 - RNA, 20 nt, Human
gucucuccagccuccuucuu

SEQ ID NO: 917222 - RNA, 27 nt, Human
uaaaaccaaucagacuuuuuuuuuuuu

SEQ ID NO: 917223 - RNA, 19 nt, Human
uaaaucaaaacaaaacaca

SEQ ID NO: 917224 - RNA, 25 nt, Human
uaacaaaaacaggaaaagacugaaa

SEQ ID NO: 917225 - RNA, 28 nt, Human
uaacagaaaaaaagacaugcuauccaaa

SEQ ID NO: 917226 - RNA, 27 nt, Human
uacaaaacauuuucccucuccuccuuc

SEQ ID NO: 917227 - RNA, 19 nt, Human
uagcuagagagaacgauca

SEQ ID NO: 917228 - RNA, 22 nt, Human
uauaucagaaaugaaggaaaca

SEQ ID NO: 917229 - RNA, 18 nt, Human
uauauguguauguaugca

SEQ ID NO: 917230 - RNA, 22 nt, Human
uauccugugucuaccagagggc

SEQ ID NO: 917231 - RNA, 19 nt, Human
uauguguauguaugcaugu

SEQ ID NO: 917232 - RNA, 20 nt, Human
uauguguauguaugcaugug

SEQ ID NO: 917233 - RNA, 24 nt, Human
uauguuauuaaaucaaaacaaaac

SEQ ID NO: 917234 - RNA, 18 nt, Human
ucaaagaauuauucucca

SEQ ID NO: 917235 - RNA, 22 nt, Human
ucagaaaugaaggaaacacuuu

SEQ ID NO: 917236 - RNA, 18 nt, Human
ucaggagaaaauaaccuu

SEQ ID NO: 917237 - RNA, 22 nt, Human
ucaguggaaguacccuuugaga

SEQ ID NO: 917238 - RNA, 22 nt, Human
uccaauuguagccggcuggcua

SEQ ID NO: 917239 - RNA, 24 nt, Human
ucucagguuacaccauuagccacc

SEQ ID NO: 917240 - RNA, 28 nt, Human
ucuccagccuccuucuucgggggccgcc

SEQ ID NO: 917241 - RNA, 23 nt, Human
ucucuccagccuccuucuucggu

SEQ ID NO: 917242 - RNA, 22 nt, Human
ucuuugggacucugacuccaau

SEQ ID NO: 917243 - RNA, 23 nt, Human
ucuuugggacucugacuccaauu

SEQ ID NO: 917244 - RNA, 19 nt, Human
ugaaaacaaguaucaagug

SEQ ID NO: 917245 - RNA, 23 nt, Human
ugaaaugagcaccauugugaaga

SEQ ID NO: 917246 - RNA, 22 nt, Human
ugaaaugugcaucauucuaaaa

SEQ ID NO: 917247 - RNA, 18 nt, Human
ugaauagccugaugacug

SEQ ID NO: 917248 - RNA, 18 nt, Human
ugaauggauaauacccca

SEQ ID NO: 917249 - RNA, 23 nt, Human
ugaauggauaauaccccaugaaa

SEQ ID NO: 917250 - RNA, 26 nt, Human
ugacaacacccuguuucucuucccua

SEQ ID NO: 917251 - RNA, 19 nt, Human
ugagaagaaauuacuuucu

SEQ ID NO: 917252 - RNA, 22 nt, Human
ugagcaucuuuccuuccacuuu

SEQ ID NO: 917253 - RNA, 23 nt, Human
ugagguuuucagggaaggguugg

SEQ ID NO: 917254 - RNA, 21 nt, Human
ugcuugaaaauucaauuagag

SEQ ID NO: 917255 - RNA, 19 nt, Human
uggcaaaggcaaagaguua

SEQ ID NO: 917256 - RNA, 18 nt, Human
ugggaagucaucuucuua

SEQ ID NO: 917257 - RNA, 23 nt, Human
uguagaaaaucccaauagauuca

SEQ ID NO: 917258 - RNA, 27 nt, Human
uguagaaaaucccaauagauucaacua

SEQ ID NO: 917259 - RNA, 19 nt, Human
uguauauauguguauguau

SEQ ID NO: 917260 - RNA, 22 nt, Human
uguguauauauguguauguaug

SEQ ID NO: 917261 - RNA, 19 nt, Human
uguguguauauauguguau

SEQ ID NO: 917262 - RNA, 23 nt, Human
uguguguauauauguguauguau

SEQ ID NO: 917263 - RNA, 21 nt, Human
uguguguguauauauguguau

SEQ ID NO: 917264 - RNA, 23 nt, Human
uguguguguauauauguguaugu

SEQ ID NO: 917265 - RNA, 23 nt, Human
uguuauuaaaucaaaacaaaaca

SEQ ID NO: 917266 - RNA, 18 nt, Human
uguucagcuggaaggauc

SEQ ID NO: 917267 - RNA, 18 nt, Human
uuaacaaaaacaggaaaa

SEQ ID NO: 917268 - RNA, 25 nt, Human
uuaacaaaaacaggaaaagacugaa

SEQ ID NO: 917269 - RNA, 18 nt, Human
uuacaaaacauuuucccu

SEQ ID NO: 917270 - RNA, 19 nt, Human
uuagccaccagcaacugcu

SEQ ID NO: 917271 - RNA, 19 nt, Human
uuccuuccacuuuguuucc

SEQ ID NO: 917272 - RNA, 21 nt, Human
uuccuucucuguaccugagca

SEQ ID NO: 917273 - RNA, 23 nt, Human
uuguggcugacuuuguucagcug

SEQ ID NO: 917274 - RNA, 24 nt, Human
uuuauccuuuauguguguuaaaau

SEQ ID NO: 917275 - RNA, 18 nt, Human
aaacucucugggacccac

SEQ ID NO: 917276 - RNA, 22 nt, Human
aacacaacucucaacaaaggca

SEQ ID NO: 917277 - RNA, 25 nt, Human
aagaaaggcacaaaaaggaccaaca

SEQ ID NO: 917278 - RNA, 21 nt, Human
aagcagccaaggauacccuaa

SEQ ID NO: 917279 - RNA, 23 nt, Human
acaaaaaggaccaacaaauaaua

SEQ ID NO: 917280 - RNA, 28 nt, Human
acacaacucucaacaaagggggaacgcc

SEQ ID NO: 917281 - RNA, 22 nt, Human
acagagggaauccuacacucca

SEQ ID NO: 917282 - RNA, 18 nt, Human
acaguaaagcagccaagg

SEQ ID NO: 917283 - RNA, 19 nt, Human
accaccucugcccucuccu

SEQ ID NO: 917284 - RNA, 24 nt, Human
acucucaacaaaggcaauuccagc

SEQ ID NO: 917285 - RNA, 21 nt, Human
acucuuuuuccugggggcagg

SEQ ID NO: 917286 - RNA, 23 nt, Human
aggcauugagagggugaaaugcu

SEQ ID NO: 917287 - RNA, 21 nt, Human
aggccuugcgguaccaggaga

SEQ ID NO: 917288 - RNA, 23 nt, Human
auggaauggaacacugcucccaa

SEQ ID NO: 917289 - RNA, 26 nt, Human
caacacuagggagccauauucccaga

SEQ ID NO: 917290 - RNA, 22 nt, Human
caagaaaggcacaaaaaggacc

SEQ ID NO: 917291 - RNA, 24 nt, Human
caagaaaggcacaaaaaggaccaa

SEQ ID NO: 917292 - RNA, 22 nt, Human
caccucugcccucuccuggggg

SEQ ID NO: 917293 - RNA, 21 nt, Human
cagaaagaaacuaggcugaca

SEQ ID NO: 917294 - RNA, 22 nt, Human
cagaaagaaacuaggcugacua

SEQ ID NO: 917295 - RNA, 20 nt, Human
cagcaauccuccugccuccc

SEQ ID NO: 917296 - RNA, 22 nt, Human
cagcaauccuccugccuccccc

SEQ ID NO: 917297 - RNA, 18 nt, Human
caggaacagccugggcag

SEQ ID NO: 917298 - RNA, 24 nt, Human
caucuggcgaacgggaaaggugag

SEQ ID NO: 917299 - RNA, 24 nt, Human
cauggagugggccccacccugcaa

SEQ ID NO: 917300 - RNA, 22 nt, Human
ccaccacaguaaagcagccaag

SEQ ID NO: 917301 - RNA, 22 nt, Human
ccagaaagaaacuaggcugaca

SEQ ID NO: 917302 - RNA, 19 nt, Human
ccaggaaauuuaaggggga

SEQ ID NO: 917303 - RNA, 21 nt, Human
ccaucuggcgaacgggaaagg

SEQ ID NO: 917304 - RNA, 21 nt, Human
cccaaaggaauccagccccuc

SEQ ID NO: 917305 - RNA, 21 nt, Human
ccccagaggcuaaaugaccuc

SEQ ID NO: 917306 - RNA, 19 nt, Human
ccuacacuccaaacucucu

SEQ ID NO: 917307 - RNA, 18 nt, Human
ccuccugccucccccucc

SEQ ID NO: 917308 - RNA, 19 nt, Human
ccuccugccucccccucca

SEQ ID NO: 917309 - RNA, 23 nt, Human
cggccaccacaguaaagcagcca

SEQ ID NO: 917310 - RNA, 20 nt, Human
cuggcgaacgggaaagguga

SEQ ID NO: 917311 - RNA, 20 nt, Human
gacaaccaccucugcccucu

SEQ ID NO: 917312 - RNA, 18 nt, Human
gacaacugaaugugaccu

SEQ ID NO: 917313 - RNA, 22 nt, Human
gacugcugucuucauggagugg

SEQ ID NO: 917314 - RNA, 19 nt, Human
gcacguaagguagcucugc

SEQ ID NO: 917315 - RNA, 24 nt, Human
gccugaugacaacugaaugugacc

SEQ ID NO: 917316 - RNA, 22 nt, Human
gcucccaaaggaauccagcccc

SEQ ID NO: 917317 - RNA, 18 nt, Human
ggaauacugaugguucca

SEQ ID NO: 917318 - RNA, 18 nt, Human
ggauccaggaggccuugc

SEQ ID NO: 917319 - RNA, 18 nt, Human
gggggcagguggagaagg

SEQ ID NO: 917320 - RNA, 24 nt, Human
guagcaacacugucucagacacca

SEQ ID NO: 917321 - RNA, 26 nt, Human
gugaacacaacucucaacaaaggcug

SEQ ID NO: 917322 - RNA, 22 nt, Human
uaccaggagaggaauacugaug

SEQ ID NO: 917323 - RNA, 22 nt, Human
uacugacauggugcuuuggauc

SEQ ID NO: 917324 - RNA, 20 nt, Human
ucuuaaggcaugacugcugu

SEQ ID NO: 917325 - RNA, 25 nt, Human
ugcagaagggguggggacaaccacc

SEQ ID NO: 917326 - RNA, 20 nt, Human
ugcagaagggguggggacac

SEQ ID NO: 917327 - RNA, 18 nt, Human
ugccuggggcaacugcug

SEQ ID NO: 917328 - RNA, 21 nt, Human
ugccuggggcaacugcugcag

SEQ ID NO: 917329 - RNA, 20 nt, Human
uggaacacugcucccaaagg

SEQ ID NO: 917330 - RNA, 22 nt, Human
uggcgaacgggaaaggugaggc

SEQ ID NO: 917331 - RNA, 18 nt, Human
uggggcaacugcugcaga

SEQ ID NO: 917332 - RNA, 23 nt, Human
uggggcaauuucagcuuaaugga

SEQ ID NO: 917333 - RNA, 20 nt, Human
uggggggcccucucaccagu

SEQ ID NO: 917334 - RNA, 23 nt, Human
ugguauugcaaguauuucacccc

SEQ ID NO: 917335 - RNA, 26 nt, Human
uguccucagagaaguagagaugauuc

SEQ ID NO: 917336 - RNA, 20 nt, Human
uuuaagggggagacucuuuu

SEQ ID NO: 917337 - RNA, 25 nt, Human
aguguguccagccuggugcuuaggg

SEQ ID NO: 917338 - RNA, 23 nt, Human
cacugggaggugaauuugaaaag

SEQ ID NO: 917339 - RNA, 23 nt, Human
cagauagugugcgaguuuuuccu

SEQ ID NO: 917340 - RNA, 26 nt, Human
cagcaggugggacuagguagucaugc

SEQ ID NO: 917341 - RNA, 20 nt, Human
ccaguguguccagccuggug

SEQ ID NO: 917342 - RNA, 20 nt, Human
ccuucaggucuaccuggcug

SEQ ID NO: 917343 - RNA, 21 nt, Human
ccuucaggucuaccuggcuga

SEQ ID NO: 917344 - RNA, 23 nt, Human
cuugagguauguuuuuaucuuca

SEQ ID NO: 917345 - RNA, 21 nt, Human
gacuagguagucaugcugacg

SEQ ID NO: 917346 - RNA, 21 nt, Human
gccagcugugccagcaggugg

SEQ ID NO: 917347 - RNA, 23 nt, Human
uagacaauauguccgggaggucc

SEQ ID NO: 917348 - RNA, 28 nt, Human
uaggguagacaauauguccgggaggucc

SEQ ID NO: 917349 - RNA, 20 nt, Human
uauuuugagggugguucacu

SEQ ID NO: 917350 - RNA, 22 nt, Human
ucccacacucugacauuccagu

SEQ ID NO: 917351 - RNA, 18 nt, Human
ugggagcccaggugguca

SEQ ID NO: 917352 - RNA, 22 nt, Human
uugauguuugaugauuuuucuc

SEQ ID NO: 917353 - RNA, 20 nt, Human
aaggggcugcccagaggagg

SEQ ID NO: 917354 - RNA, 21 nt, Human
aaggggcugcccagaggaggg

SEQ ID NO: 917355 - RNA, 21 nt, Human
aagugugaaagcugauaugcc

SEQ ID NO: 917356 - RNA, 24 nt, Human
agaguccuggguuccagaggccuc

SEQ ID NO: 917357 - RNA, 18 nt, Human
aggcagcggcgggggggc

SEQ ID NO: 917358 - RNA, 20 nt, Human
aggcagcggcgggggggcgg

SEQ ID NO: 917359 - RNA, 20 nt, Human
aggcagcggcgggggggcgg

SEQ ID NO: 917360 - RNA, 22 nt, Human
aggcagcggcgggggggcggug

SEQ ID NO: 917361 - RNA, 18 nt, Human
aggcggaggcgggcccga

SEQ ID NO: 917362 - RNA, 20 nt, Human
agggauggggccccccuucu

SEQ ID NO: 917363 - RNA, 21 nt, Human
aggggcaggcggccagggagu

SEQ ID NO: 917364 - RNA, 21 nt, Human
agggggugggagagagugcau

SEQ ID NO: 917365 - RNA, 25 nt, Human
agggggugggagagagugcaugggg

SEQ ID NO: 917366 - RNA, 24 nt, Human
aggguagggauggggccccccuuc

SEQ ID NO: 917367 - RNA, 21 nt, Human
aguggugggagguagcaggag

SEQ ID NO: 917368 - RNA, 21 nt, Human
augauggugucuggguggcuu

SEQ ID NO: 917369 - RNA, 21 nt, Human
caagcaccagcugaaggcagg

SEQ ID NO: 917370 - RNA, 19 nt, Human
caccagcugaaggcagggc

SEQ ID NO: 917371 - RNA, 20 nt, Human
cacuggggucccccugcagc

SEQ ID NO: 917372 - RNA, 27 nt, Human
cagaggccuccuuuggagcagaggccc

SEQ ID NO: 917373 - RNA, 18 nt, Human
caggaaucgcagcaagca

SEQ ID NO: 917374 - RNA, 26 nt, Human
ccagaguccuggguuccagaggccuc

SEQ ID NO: 917375 - RNA, 22 nt, Human
ccccagaguccuggguuccaga

SEQ ID NO: 917376 - RNA, 18 nt, Human
cccgagcucggaccccgg

SEQ ID NO: 917377 - RNA, 22 nt, Human
ccuagcacucggcagcucacca

SEQ ID NO: 917378 - RNA, 22 nt, Human
ccuccuugggaaccacaggggc

SEQ ID NO: 917379 - RNA, 20 nt, Human
ccuccuuuggagcagaggcu

SEQ ID NO: 917380 - RNA, 24 nt, Human
ccucuuguaaaaccccagaguccu

SEQ ID NO: 917381 - RNA, 26 nt, Human
ccucuuguaaaaccccagaguccugg

SEQ ID NO: 917382 - RNA, 24 nt, Human
ccucuuguaaaaccccagaguugg

SEQ ID NO: 917383 - RNA, 21 nt, Human
ccuggguuccagaggccuccu

SEQ ID NO: 917384 - RNA, 24 nt, Human
cgcagcaagcaccagcugaaggca

SEQ ID NO: 917385 - RNA, 26 nt, Human
cugcugggacaguggugggagguagc

SEQ ID NO: 917386 - RNA, 22 nt, Human
cuggaguucuggucgaggugau

SEQ ID NO: 917387 - RNA, 22 nt, Human
gacaguggugggagguagcagg

SEQ ID NO: 917388 - RNA, 19 nt, Human
gaggaaaggggcugcccag

SEQ ID NO: 917389 - RNA, 20 nt, Human
gaggaaaggggcugcccaga

SEQ ID NO: 917390 - RNA, 19 nt, Human
gcccuagugggagaggaag

SEQ ID NO: 917391 - RNA, 25 nt, Human
gcccucuuguaaaaccccagagucc

SEQ ID NO: 917392 - RNA, 23 nt, Human
gcggcucucauacauaccccucc

SEQ ID NO: 917393 - RNA, 20 nt, Human
ggagaggaaguuggcacugg

SEQ ID NO: 917394 - RNA, 24 nt, Human
ggcacuggggucccccugcagcug

SEQ ID NO: 917395 - RNA, 21 nt, Human
ggcgggggggcgguggcuaua

SEQ ID NO: 917396 - RNA, 25 nt, Human
gggacaguggugggagguagcagga

SEQ ID NO: 917397 - RNA, 23 nt, Human
gggugccuagcacucggcagcuc

SEQ ID NO: 917398 - RNA, 18 nt, Human
guagagacccccucaaag

SEQ ID NO: 917399 - RNA, 22 nt, Human
gugauggucuccucacaccaug

SEQ ID NO: 917400 - RNA, 22 nt, Human
uagagacccccucaaagugcca

SEQ ID NO: 917401 - RNA, 21 nt, Human
uagcaggagagcggcucucau

SEQ ID NO: 917402 - RNA, 24 nt, Human
uagggauggggccccccuucuguc

SEQ ID NO: 917403 - RNA, 20 nt, Human
uccuggguuccagaggccuc

SEQ ID NO: 917404 - RNA, 23 nt, Human
uccuuuggagcagaggcccugga

SEQ ID NO: 917405 - RNA, 19 nt, Human
ucgaggugauggucuccuc

SEQ ID NO: 917406 - RNA, 23 nt, Human
ucuggaguucuggucgaggugau

SEQ ID NO: 917407 - RNA, 25 nt, Human
ucuuguaaaaccccagaguccuggg

SEQ ID NO: 917408 - RNA, 18 nt, Human
ugcauggggaaaguguga

SEQ ID NO: 917409 - RNA, 24 nt, Human
ugcccagaggaggggccagggcag

SEQ ID NO: 917410 - RNA, 24 nt, Human
ugggagaggaaguuggcacugggg

SEQ ID NO: 917411 - RNA, 24 nt, Human
ugggagaggaaguuggcacugguc

SEQ ID NO: 917412 - RNA, 21 nt, Human
ugggagguagcaggagagcgg

SEQ ID NO: 917413 - RNA, 21 nt, Human
uggggagguagagacccccuc

SEQ ID NO: 917414 - RNA, 24 nt, Human
uuaguucuggagcccccagaagag

SEQ ID NO: 917415 - RNA, 23 nt, Human
uuggagcagaggcccuggaaggg

SEQ ID NO: 917416 - RNA, 20 nt, Human
uuggugcagcuugcccuucc

SEQ ID NO: 917417 - RNA, 25 nt, Human
aaaaacauaacuccaguucuuacca

SEQ ID NO: 917418 - RNA, 22 nt, Human
aaaacaaaaacaaaaacaaaaa

SEQ ID NO: 917419 - RNA, 26 nt, Human
aaaacaaaaacaaaaacaaaaaacaa

SEQ ID NO: 917420 - RNA, 23 nt, Human
aaaacaaagcaccuuucauuuca

SEQ ID NO: 917421 - RNA, 19 nt, Human
aaaacuaaagugcaacaga

SEQ ID NO: 917422 - RNA, 19 nt, Human
aaaagccuuauuguuucac

SEQ ID NO: 917423 - RNA, 24 nt, Human
aaaaugagcauuacgagaaacuca

SEQ ID NO: 917424 - RNA, 22 nt, Human
aaacaaaaacaaaaaacaauga

SEQ ID NO: 917425 - RNA, 23 nt, Human
aaacuaaagugcaacagaagcaa

SEQ ID NO: 917426 - RNA, 23 nt, Human
aagaagcaaagcaguauuaagca

SEQ ID NO: 917427 - RNA, 18 nt, Human
aagcagcagcagaagaau

SEQ ID NO: 917428 - RNA, 24 nt, Human
aagccauaaagaauacgaaaaagc

SEQ ID NO: 917429 - RNA, 18 nt, Human
acaaagguguacuaggca

SEQ ID NO: 917430 - RNA, 24 nt, Human
acccucaucucagaauaaccccau

SEQ ID NO: 917431 - RNA, 23 nt, Human
acgccgggucuaguuguacuggc

SEQ ID NO: 917432 - RNA, 20 nt, Human
agaaaacaagcauggaauau

SEQ ID NO: 917433 - RNA, 18 nt, Human
agaacacucaggcuuucu

SEQ ID NO: 917434 - RNA, 21 nt, Human
agaagccagguuauuuuaugc

SEQ ID NO: 917435 - RNA, 21 nt, Human
agaauaaccccaucuaagaac

SEQ ID NO: 917436 - RNA, 22 nt, Human
agaggaaagggaaaggaaagga

SEQ ID NO: 917437 - RNA, 21 nt, Human
agaucuugacuggcuguggcc

SEQ ID NO: 917438 - RNA, 19 nt, Human
agauuguguucuugcaagc

SEQ ID NO: 917439 - RNA, 22 nt, Human
aggaggcagggaagggagacgg

SEQ ID NO: 917440 - RNA, 21 nt, Human
agggaagggagacggagagga

SEQ ID NO: 917441 - RNA, 20 nt, Human
agugcaagaaaacaucauua

SEQ ID NO: 917442 - RNA, 18 nt, Human
aucacaucaaaugagaua

SEQ ID NO: 917443 - RNA, 27 nt, Human
augcagcagguuuuggaauacagggau

SEQ ID NO: 917444 - RNA, 21 nt, Human
augccagugaaugagaaaaca

SEQ ID NO: 917445 - RNA, 28 nt, Human
augucauauuuucaaauuuaaaaacaua

SEQ ID NO: 917446 - RNA, 27 nt, Human
caaaaacaaaaacaaaaaacaaugauc

SEQ ID NO: 917447 - RNA, 18 nt, Human
caaagcaaagaaauacac

SEQ ID NO: 917448 - RNA, 22 nt, Human
caaagcaccuuucauuucaaaa

SEQ ID NO: 917449 - RNA, 25 nt, Human
caaauauaaggcaauuaauauuuua

SEQ ID NO: 917450 - RNA, 19 nt, Human
caaauuuaaaaacauaacu

SEQ ID NO: 917451 - RNA, 23 nt, Human
cacccaauaaaaauacucuacaa

SEQ ID NO: 917452 - RNA, 18 nt, Human
cagaagaauacaucccau

SEQ ID NO: 917453 - RNA, 23 nt, Human
cagaauaaccccaucuaagaaca

SEQ ID NO: 917454 - RNA, 20 nt, Human
cagcagcagaagaauacauc

SEQ ID NO: 917455 - RNA, 24 nt, Human
cagcagcagaagaauacaucccau

SEQ ID NO: 917456 - RNA, 22 nt, Human
cagcagguuuuggaauacaggg

SEQ ID NO: 917457 - RNA, 22 nt, Human
caugccagugaaugagaaaaca

SEQ ID NO: 917458 - RNA, 20 nt, Human
ccaucuaagaacacucaggc

SEQ ID NO: 917459 - RNA, 27 nt, Human
cccgcagaaugcugggcaccggggacg

SEQ ID NO: 917460 - RNA, 18 nt, Human
cuaagacccucaucucag

SEQ ID NO: 917461 - RNA, 20 nt, Human
cugucugccugccuuuuugu

SEQ ID NO: 917462 - RNA, 26 nt, Human
cuugaaaaaaacaaaaacaaaaacaa

SEQ ID NO: 917463 - RNA, 20 nt, Human
cuugcaagcccacucucagc

SEQ ID NO: 917464 - RNA, 25 nt, Human
gaaaaaaacaaaaacaaaaacaaaa

SEQ ID NO: 917465 - RNA, 22 nt, Human
gaauaaccccaucuaagaacac

SEQ ID NO: 917466 - RNA, 21 nt, Human
gccauaaagaauacgaaaaag

SEQ ID NO: 917467 - RNA, 22 nt, Human
gcccuggccagcuccuuuccug

SEQ ID NO: 917468 - RNA, 21 nt, Human
gcugacuguaagcccaaucca

SEQ ID NO: 917469 - RNA, 20 nt, Human
ggaaaggaaaggaggcaggg

SEQ ID NO: 917470 - RNA, 20 nt, Human
ggaaaggaggcagggaaggg

SEQ ID NO: 917471 - RNA, 19 nt, Human
ggaaagggaaaggaaagga

SEQ ID NO: 917472 - RNA, 19 nt, Human
ggaagggagacggagagga

SEQ ID NO: 917473 - RNA, 19 nt, Human
ggaagggagacggagagga

SEQ ID NO: 917474 - RNA, 23 nt, Human
gggaucuaggcaaguuaaaaaua

SEQ ID NO: 917475 - RNA, 25 nt, Human
guaggcuaagacccucaucucagaa

SEQ ID NO: 917476 - RNA, 22 nt, Human
gugaauuguauuaaaacuauga

SEQ ID NO: 917477 - RNA, 21 nt, Human
uaaaaaacaaagcaccuuuca

SEQ ID NO: 917478 - RNA, 23 nt, Human
uaaaaaacaaagcaccuuucauu

SEQ ID NO: 917479 - RNA, 19 nt, Human
uaaccccaucuaagaacac

SEQ ID NO: 917480 - RNA, 27 nt, Human
uaagcagcagcagaagaauacauccca

SEQ ID NO: 917481 - RNA, 21 nt, Human
uacaaagcaaagaaauacacu

SEQ ID NO: 917482 - RNA, 21 nt, Human
uagaaaacuaaagugcaacag

SEQ ID NO: 917483 - RNA, 22 nt, Human
uaggaaaggguuagggauagaa

SEQ ID NO: 917484 - RNA, 27 nt, Human
uaggaaaggguuagggauagaagccag

SEQ ID NO: 917485 - RNA, 19 nt, Human
uaggaaauacauagucuac

SEQ ID NO: 917486 - RNA, 23 nt, Human
uauauaaggcaucugugaccaag

SEQ ID NO: 917487 - RNA, 23 nt, Human
uaugacaauauuauauaaagaaa

SEQ ID NO: 917488 - RNA, 23 nt, Human
uccaacuuuuccauuuuucaaaa

SEQ ID NO: 917489 - RNA, 25 nt, Human
ugaaaaaaacaaaaacaaaaacaaa

SEQ ID NO: 917490 - RNA, 22 nt, Human
ugaacgcacaaauuccagagaa

SEQ ID NO: 917491 - RNA, 19 nt, Human
ugaauauaauuaaaaaaca

SEQ ID NO: 917492 - RNA, 21 nt, Human
ugacuguguuaaaaaaaaaaa

SEQ ID NO: 917493 - RNA, 18 nt, Human
ugagaaaacaagcaugga

SEQ ID NO: 917494 - RNA, 19 nt, Human
ugagaaaacaagcauggaa

SEQ ID NO: 917495 - RNA, 21 nt, Human
ugagaaaacaagcauggaaua

SEQ ID NO: 917496 - RNA, 19 nt, Human
ugagaacagcauggugauc

SEQ ID NO: 917497 - RNA, 21 nt, Human
ugagaacagcauggugaucac

SEQ ID NO: 917498 - RNA, 18 nt, Human
ugcaauggcacuuucaaa

SEQ ID NO: 917499 - RNA, 24 nt, Human
ugcagguagaaaacuaaagugcaa

SEQ ID NO: 917500 - RNA, 22 nt, Human
ugccaacaaagucugcucuaaa

SEQ ID NO: 917501 - RNA, 20 nt, Human
ugucaauaaaaagaagcaaa

SEQ ID NO: 917502 - RNA, 18 nt, Human
uguguagauacauaugua

SEQ ID NO: 917503 - RNA, 23 nt, Human
uuaauccgccugccccgcagaau

SEQ ID NO: 917504 - RNA, 19 nt, Human
uuagugcaagaaaacauca

SEQ ID NO: 917505 - RNA, 19 nt, Human
uugauggcuugcugugucu

SEQ ID NO: 917506 - RNA, 19 nt, Human
aaaaagaaaagcaaggaaa

SEQ ID NO: 917507 - RNA, 18 nt, Human
aaacaaacaaaaacuccc

SEQ ID NO: 917508 - RNA, 18 nt, Human
aaacagagcaggacacaa

SEQ ID NO: 917509 - RNA, 26 nt, Human
aaacagagcaggacacaaaagaagaa

SEQ ID NO: 917510 - RNA, 21 nt, Human
aaaccucaacaaccacaaaua

SEQ ID NO: 917511 - RNA, 26 nt, Human
aaaccucaacaaccacaaauagcucu

SEQ ID NO: 917512 - RNA, 24 nt, Human
aaagaaaugagaaaggaaaccagg

SEQ ID NO: 917513 - RNA, 22 nt, Human
aaagaagaauccccuaauguug

SEQ ID NO: 917514 - RNA, 23 nt, Human
aaagguaagcaaaagucugguca

SEQ ID NO: 917515 - RNA, 18 nt, Human
aacacacuguuuggaagu

SEQ ID NO: 917516 - RNA, 20 nt, Human
aaccaggaggcagagucugg

SEQ ID NO: 917517 - RNA, 21 nt, Human
aagaaaagcaaggaaaauagc

SEQ ID NO: 917518 - RNA, 23 nt, Human
aagaaaugagaaaggaaaccagg

SEQ ID NO: 917519 - RNA, 22 nt, Human
aagaagaaaaguggauaaagga

SEQ ID NO: 917520 - RNA, 18 nt, Human
acauuuaaaccucugcua

SEQ ID NO: 917521 - RNA, 23 nt, Human
accaaacagagcaggacacaaaa

SEQ ID NO: 917522 - RNA, 22 nt, Human
accccugcaaaaaaaacaguca

SEQ ID NO: 917523 - RNA, 20 nt, Human
agaacagaccccuuuaaaaa

SEQ ID NO: 917524 - RNA, 18 nt, Human
agaaugucuucuccacug

SEQ ID NO: 917525 - RNA, 22 nt, Human
agaguaaacaagggagagcuuc

SEQ ID NO: 917526 - RNA, 19 nt, Human
agauaaauaaaccuagucu

SEQ ID NO: 917527 - RNA, 19 nt, Human
agcaggacacaaaagaaga

SEQ ID NO: 917528 - RNA, 27 nt, Human
agcuaccaaaaaauaggggagaaagga

SEQ ID NO: 917529 - RNA, 22 nt, Human
aggaaaaaauacaaaaaguguc

SEQ ID NO: 917530 - RNA, 23 nt, Human
aggaaaagaagaaacaaacaaaa

SEQ ID NO: 917531 - RNA, 24 nt, Human
aggaaaagaagaaacaaacaaaaa

SEQ ID NO: 917532 - RNA, 24 nt, Human
aggaaaagguaagcaaaagucugg

SEQ ID NO: 917533 - RNA, 24 nt, Human
aggaagaagaaaaguggauaaagg

SEQ ID NO: 917534 - RNA, 20 nt, Human
agggacagggagaaagccaa

SEQ ID NO: 917535 - RNA, 22 nt, Human
aguaaacaagggagagcuuccu

SEQ ID NO: 917536 - RNA, 25 nt, Human
agugacacuagaaacuagacauuug

SEQ ID NO: 917537 - RNA, 22 nt, Human
aguggauaaaggaaaagaagaa

SEQ ID NO: 917538 - RNA, 22 nt, Human
auuccacaaggaagacugauuu

SEQ ID NO: 917539 - RNA, 23 nt, Human
caaaaaaaacagucagcuuuuca

SEQ ID NO: 917540 - RNA, 22 nt, Human
caaaagucuggucaccagaaug

SEQ ID NO: 917541 - RNA, 23 nt, Human
caaacaaaaacucccaaagugaa

SEQ ID NO: 917542 - RNA, 22 nt, Human
caaaccucaacaaccacaaaua

SEQ ID NO: 917543 - RNA, 18 nt, Human
caagacauauacuaaacc

SEQ ID NO: 917544 - RNA, 20 nt, Human
caagacauauacuaaacccg

SEQ ID NO: 917545 - RNA, 19 nt, Human
cagagcaggacacaaaaga

SEQ ID NO: 917546 - RNA, 27 nt, Human
cagagcaggacacaaaagaagaaucuu

SEQ ID NO: 917547 - RNA, 19 nt, Human
cagcagcauacccugggac

SEQ ID NO: 917548 - RNA, 28 nt, Human
caggacacaaaagaagaauccccuaaug

SEQ ID NO: 917549 - RNA, 22 nt, Human
cauauggcccaccaaacagagc

SEQ ID NO: 917550 - RNA, 25 nt, Human
ccaguaaugauagcuacaguuagaa

SEQ ID NO: 917551 - RNA, 19 nt, Human
cccaaugugguaacagagu

SEQ ID NO: 917552 - RNA, 23 nt, Human
cccaccaaacagagcaggacaca

SEQ ID NO: 917553 - RNA, 24 nt, Human
cccaccaaacagagcaggacacaa

SEQ ID NO: 917554 - RNA, 30 nt, Human
cccaccaaacagagcaggacacaaaagaag

SEQ ID NO: 917555 - RNA, 24 nt, Human
cuacaguuagaaagaaaugagaaa

SEQ ID NO: 917556 - RNA, 28 nt, Human
cuacugcaaccugguuggggggcccucc

SEQ ID NO: 917557 - RNA, 27 nt, Human
cucaagacauauacuaaacccggaccu

SEQ ID NO: 917558 - RNA, 18 nt, Human
cuggaaaaaugaucccau

SEQ ID NO: 917559 - RNA, 21 nt, Human
cuuaaggaaaaaauacaaaaa

SEQ ID NO: 917560 - RNA, 23 nt, Human
cuuaaggaaaaaauacaaaaagu

SEQ ID NO: 917561 - RNA, 19 nt, Human
gaaaagcaaggaaaauagc

SEQ ID NO: 917562 - RNA, 22 nt, Human
gaaacaaacaaaaacucccaaa

SEQ ID NO: 917563 - RNA, 20 nt, Human
gaagaagaaaaguggauaaa

SEQ ID NO: 917564 - RNA, 21 nt, Human
gaagaagaaaaguggauaaag

SEQ ID NO: 917565 - RNA, 21 nt, Human
gaagaagaaaaguggauaaag

SEQ ID NO: 917566 - RNA, 20 nt, Human
gaagugaguuggacucuuaa

SEQ ID NO: 917567 - RNA, 21 nt, Human
gagaaaggaagggacagggag

SEQ ID NO: 917568 - RNA, 22 nt, Human
gagagcuuccucaaaugaggau

SEQ ID NO: 917569 - RNA, 23 nt, Human
gaguaaacaagggagagcuuccu

SEQ ID NO: 917570 - RNA, 19 nt, Human
gauaaaggaaaagaagaaa

SEQ ID NO: 917571 - RNA, 21 nt, Human
gcaagcuucaaugccuuccaa

SEQ ID NO: 917572 - RNA, 22 nt, Human
ggaaaagaagaaacaaacaaaa

SEQ ID NO: 917573 - RNA, 22 nt, Human
ggaagaagaaaaguggauaaag

SEQ ID NO: 917574 - RNA, 21 nt, Human
ggcagagucugggaauucaca

SEQ ID NO: 917575 - RNA, 23 nt, Human
gguacauuuaaaccucugcuaua

SEQ ID NO: 917576 - RNA, 19 nt, Human
gucagcuuuucaaaccuca

SEQ ID NO: 917577 - RNA, 23 nt, Human
gugcaagcuucaaugccuuccaa

SEQ ID NO: 917578 - RNA, 18 nt, Human
uaaaaaagaaaagcaagg

SEQ ID NO: 917579 - RNA, 24 nt, Human
uaaaagagcacggcuuuaaagaua

SEQ ID NO: 917580 - RNA, 19 nt, Human
uaaaggcagcauuccacaa

SEQ ID NO: 917581 - RNA, 18 nt, Human
uaacagaguaaacaaggg

SEQ ID NO: 917582 - RNA, 22 nt, Human
uaacccuaaaccaaguuccccu

SEQ ID NO: 917583 - RNA, 21 nt, Human
uacaguuagaaagaaaugaga

SEQ ID NO: 917584 - RNA, 19 nt, Human
uacccugggacuccauacc

SEQ ID NO: 917585 - RNA, 25 nt, Human
uagucuaccaggaagaagaaaagug

SEQ ID NO: 917586 - RNA, 23 nt, Human
uauaucacaaacugcuguuuuug

SEQ ID NO: 917587 - RNA, 20 nt, Human
uauggcccaccaaacagagc

SEQ ID NO: 917588 - RNA, 18 nt, Human
ucacaaacugcuguuuuu

SEQ ID NO: 917589 - RNA, 22 nt, Human
ucagauaaauaaaccuagucua

SEQ ID NO: 917590 - RNA, 18 nt, Human
ucagcuuuucaaaccuca

SEQ ID NO: 917591 - RNA, 25 nt, Human
uccacaauauaaacuguaacauuug

SEQ ID NO: 917592 - RNA, 22 nt, Human
uccacugcagaacagaccccuu

SEQ ID NO: 917593 - RNA, 23 nt, Human
uccuuccaacgucuuaacccuaa

SEQ ID NO: 917594 - RNA, 22 nt, Human
ucuaccaggaagaagaaaagug

SEQ ID NO: 917595 - RNA, 26 nt, Human
ucuccacugcagaacagaccccuuua

SEQ ID NO: 917596 - RNA, 19 nt, Human
ucuuaagcugguaaauccc

SEQ ID NO: 917597 - RNA, 22 nt, Human
ugaagacagagggguucuuugu

SEQ ID NO: 917598 - RNA, 22 nt, Human
ugauuugaggauugaagugauu

SEQ ID NO: 917599 - RNA, 21 nt, Human
ugcaacaguagaggggcagaa

SEQ ID NO: 917600 - RNA, 19 nt, Human
ugcaagcuucaaugccuuc

SEQ ID NO: 917601 - RNA, 23 nt, Human
ugcaagcuucaaugccuuccaaa

SEQ ID NO: 917602 - RNA, 22 nt, Human
uggaaaaaugaucccauaagga

SEQ ID NO: 917603 - RNA, 20 nt, Human
uggcaauuacuuacagagaa

SEQ ID NO: 917604 - RNA, 22 nt, Human
uggcucuaaauaaucagcauuu

SEQ ID NO: 917605 - RNA, 19 nt, Human
ugggcagaggcaaaagcaa

SEQ ID NO: 917606 - RNA, 21 nt, Human
ugggcagaggcaaaagcaagc

SEQ ID NO: 917607 - RNA, 25 nt, Human
ugggcagaggcaaaagcaagcagcc

SEQ ID NO: 917608 - RNA, 19 nt, Human
uggggaaaacaaaaauugg

SEQ ID NO: 917609 - RNA, 22 nt, Human
ugguugggcagaggcaaaagcc

SEQ ID NO: 917610 - RNA, 24 nt, Human
uguacaucaaucaaucgcuaaagc

SEQ ID NO: 917611 - RNA, 22 nt, Human
uguuguuguuuuauuaaagacc

SEQ ID NO: 917612 - RNA, 23 nt, Human
uuaaaagagcacggcuuuaaaga

SEQ ID NO: 917613 - RNA, 23 nt, Human
uuagaaagaaaugagaaaggaaa

SEQ ID NO: 917614 - RNA, 19 nt, Human
uucaucagugacacuagaa

SEQ ID NO: 917615 - RNA, 23 nt, Human
uuccaacgucuuaacccuaaacc

SEQ ID NO: 917616 - RNA, 21 nt, Human
uuccacaaggaagacugauuu

SEQ ID NO: 917617 - RNA, 18 nt, Human
uuccccaaugugguaaca

SEQ ID NO: 917618 - RNA, 24 nt, Human
uuccuuagauuuccuuccaacguc

SEQ ID NO: 917619 - RNA, 18 nt, Human
uugaagacagagggguuc

SEQ ID NO: 917620 - RNA, 22 nt, Human
uugaggauugaagugauuugcc

SEQ ID NO: 917621 - RNA, 18 nt, Human
uuggacucuuaagcuggu

SEQ ID NO: 917622 - RNA, 18 nt, Human
uuuguuuuguuuuguuuu

SEQ ID NO: 917623 - RNA, 20 nt, Human
aacugugucaucuuccagca

SEQ ID NO: 917624 - RNA, 23 nt, Human
agagggggcagguuccucggaga

SEQ ID NO: 917625 - RNA, 23 nt, Human
agagggggcagguuccucggaga

SEQ ID NO: 917626 - RNA, 18 nt, Human
agcucagcagaggccagc

SEQ ID NO: 917627 - RNA, 21 nt, Human
caacugugucaucuuccagca

SEQ ID NO: 917628 - RNA, 24 nt, Human
cagguuccucggagagaaggcaac

SEQ ID NO: 917629 - RNA, 24 nt, Human
cagguuccucggagagaaggcaac

SEQ ID NO: 917630 - RNA, 18 nt, Human
ccagcacaugggccagcc

SEQ ID NO: 917631 - RNA, 18 nt, Human
ccagcacaugggccagcc

SEQ ID NO: 917632 - RNA, 19 nt, Human
ccuggucuccucucucucc

SEQ ID NO: 917633 - RNA, 25 nt, Human
cucagcagcuguccuggucuccucu

SEQ ID NO: 917634 - RNA, 18 nt, Human
cucucucucccccacucc

SEQ ID NO: 917635 - RNA, 21 nt, Human
gggaagcugggccagagggaa

SEQ ID NO: 917636 - RNA, 20 nt, Human
ucagcagaggccagccccuu

SEQ ID NO: 917637 - RNA, 22 nt, Human
ucagcagaggccagccccuucc

SEQ ID NO: 917638 - RNA, 24 nt, Human
ucagcagcuguccuggucuccucu

SEQ ID NO: 917639 - RNA, 22 nt, Human
ucuguugggggaagacccagcu

SEQ ID NO: 917640 - RNA, 19 nt, Human
ugggaagcugggccagagg

SEQ ID NO: 917641 - RNA, 20 nt, Human
uggucuccucucucuccccc

SEQ ID NO: 917642 - RNA, 24 nt, Human
uggugggaaaggagagggggcagg

SEQ ID NO: 917643 - RNA, 24 nt, Human
uggugggaaaggagagggggcagg

SEQ ID NO: 917644 - RNA, 19 nt, Human
uguccuggucuccucucuc

SEQ ID NO: 917645 - RNA, 26 nt, Human
uguccuggucuccucucucuccccca

SEQ ID NO: 917646 - RNA, 25 nt, Human
uuuuuuuuuuugcagaagaagagcc

SEQ ID NO: 917647 - RNA, 18 nt, Human
uuuuuuuuuuuuuuuuug

SEQ ID NO: 917648 - RNA, 18 nt, Human
uuuuuuuuuuuuuuuuug

SEQ ID NO: 917649 - RNA, 19 nt, Human
uuuuuuuuuuuuuuuuugc

SEQ ID NO: 917650 - RNA, 19 nt, Human
agcaggccguggcuccugg

SEQ ID NO: 917651 - RNA, 27 nt, Human
agggccgaggccagagccaccaggaga

SEQ ID NO: 917652 - RNA, 23 nt, Human
ccuccgagcuuccagggcugccc

SEQ ID NO: 917653 - RNA, 22 nt, Human
gagacugggagucaccuuccac

SEQ ID NO: 917654 - RNA, 20 nt, Human
gagcuuccagggcugcccag

SEQ ID NO: 917655 - RNA, 20 nt, Human
ggauccagcagggccgaggc

SEQ ID NO: 917656 - RNA, 24 nt, Human
uccuccgagcuuccagggcugccc

SEQ ID NO: 917657 - RNA, 19 nt, Human
ugaggccccgggucuagga

SEQ ID NO: 917658 - RNA, 19 nt, Human
ugcccaggccaggcugaag

SEQ ID NO: 917659 - RNA, 20 nt, Human
uggacucggggagcaggcug

SEQ ID NO: 917660 - RNA, 21 nt, Human
uggguacuaccccaugagccu

SEQ ID NO: 917661 - RNA, 21 nt, Human
acaacaaauuaacgacacaga

SEQ ID NO: 917662 - RNA, 19 nt, Human
aggaaggagagcggggagg

SEQ ID NO: 917663 - RNA, 20 nt, Human
aggaaggagagcggggaggg

SEQ ID NO: 917664 - RNA, 19 nt, Human
aggagagcggggagggcgg

SEQ ID NO: 917665 - RNA, 18 nt, Human
ccaggaaggagagcgggg

SEQ ID NO: 917666 - RNA, 18 nt, Human
ccccgcagcucgcccagg

SEQ ID NO: 917667 - RNA, 18 nt, Human
cccgcagcucgcccagga

SEQ ID NO: 917668 - RNA, 21 nt, Human
ccgcggccgccccauccccgc

SEQ ID NO: 917669 - RNA, 25 nt, Human
cgacacagaguagcucaaaaccgug

SEQ ID NO: 917670 - RNA, 19 nt, Human
cgccccauccccgcagcuc

SEQ ID NO: 917671 - RNA, 21 nt, Human
cgccccauccccgcagcucgc

SEQ ID NO: 917672 - RNA, 24 nt, Human
cgcggcggcgacggcggcucaggc

SEQ ID NO: 917673 - RNA, 23 nt, Human
cgcucgggcucccgcggccgccc

SEQ ID NO: 917674 - RNA, 22 nt, Human
cggcucaggcgcgcggcaacgg

SEQ ID NO: 917675 - RNA, 24 nt, Human
cgggcggcggcggcggcgguuccu

SEQ ID NO: 917676 - RNA, 24 nt, Human
cugugcagcggcgguggcggcuuu

SEQ ID NO: 917677 - RNA, 21 nt, Human
gaaccuaugugcaaacaacaa

SEQ ID NO: 917678 - RNA, 27 nt, Human
gagacgcgggcggcggcggcggcgacg

SEQ ID NO: 917679 - RNA, 23 nt, Human
gcggcggcggcggcgguuccugc

SEQ ID NO: 917680 - RNA, 26 nt, Human
ggagacgcgggcggcggcggcggcgg

SEQ ID NO: 917681 - RNA, 23 nt, Human
ggcggcggcggcggcgguuccug

SEQ ID NO: 917682 - RNA, 21 nt, Human
gggagggcggcgcgcggcagg

SEQ ID NO: 917683 - RNA, 26 nt, Human
guagcucaagcagccauuuugcuccc

SEQ ID NO: 917684 - RNA, 23 nt, Human
gugcagcggcgguggcggcagca

SEQ ID NO: 917685 - RNA, 23 nt, Human
uccugcgcgcgcucgggcucccu

SEQ ID NO: 917686 - RNA, 24 nt, Human
ucgggcucccgcggccgccccauu

SEQ ID NO: 917687 - RNA, 18 nt, Human
ucgucugaagaacuuugc

SEQ ID NO: 917688 - RNA, 23 nt, Human
ucugaagaacuuugccagauuaa

SEQ ID NO: 917689 - RNA, 19 nt, Human
ugaagaacuuugccagauu

SEQ ID NO: 917690 - RNA, 21 nt, Human
ugccagauuaagccaggcccc

SEQ ID NO: 917691 - RNA, 27 nt, Human
ugcuuucuaaaagcugugcaugugccu

SEQ ID NO: 917692 - RNA, 23 nt, Human
uggaaccuaugugcaaacaacaa

SEQ ID NO: 917693 - RNA, 23 nt, Human
uggcggcagcaagcccugcgcgc

SEQ ID NO: 917694 - RNA, 22 nt, Human
ugugcaaacaacaaauuaacga

SEQ ID NO: 917695 - RNA, 20 nt, Human
aaaacagaugaauccccagg

SEQ ID NO: 917696 - RNA, 19 nt, Human
aaacagaugaauccccagg

SEQ ID NO: 917697 - RNA, 22 nt, Human
aaacuacaacacaaaagaauga

SEQ ID NO: 917698 - RNA, 21 nt, Human
aaccaaacaccacgucaacug

SEQ ID NO: 917699 - RNA, 21 nt, Human
acgggcggguaguggccggac

SEQ ID NO: 917700 - RNA, 22 nt, Human
agggaagugaagaaaacagaug

SEQ ID NO: 917701 - RNA, 22 nt, Human
agugaagaaaacagaugaaucc

SEQ ID NO: 917702 - RNA, 24 nt, Human
agugacaggaggguccauucauug

SEQ ID NO: 917703 - RNA, 22 nt, Human
auggaaccaaacaccacgucaa

SEQ ID NO: 917704 - RNA, 22 nt, Human
caacacaaaagaaugaaccuuu

SEQ ID NO: 917705 - RNA, 18 nt, Human
caacaggaucucagaugc

SEQ ID NO: 917706 - RNA, 19 nt, Human
caccacgucaacuggaacu

SEQ ID NO: 917707 - RNA, 21 nt, Human
caccacgucaacuggaacucu

SEQ ID NO: 917708 - RNA, 18 nt, Human
caccgccggcagccgggu

SEQ ID NO: 917709 - RNA, 22 nt, Human
cagcagcacaggcugaaguuag

SEQ ID NO: 917710 - RNA, 24 nt, Human
cagcagcacaggcugaaguuagcu

SEQ ID NO: 917711 - RNA, 19 nt, Human
cagcccaggccccgcccca

SEQ ID NO: 917712 - RNA, 18 nt, Human
cagccgggucccgccccu

SEQ ID NO: 917713 - RNA, 24 nt, Human
ccaccgccggcagccgggucccgc

SEQ ID NO: 917714 - RNA, 21 nt, Human
cccagcagcacaggcugaagu

SEQ ID NO: 917715 - RNA, 27 nt, Human
ccccaggguaccccgccauggaaccaa

SEQ ID NO: 917716 - RNA, 24 nt, Human
ccccgccccaccgccgccgccaga

SEQ ID NO: 917717 - RNA, 21 nt, Human
ccgccccaccgccgccgccag

SEQ ID NO: 917718 - RNA, 19 nt, Human
ccgccgccgccagagccgc

SEQ ID NO: 917719 - RNA, 21 nt, Human
ccgccgccgccagagccgccg

SEQ ID NO: 917720 - RNA, 18 nt, Human
ccgcgcacgcgcgcuucg

SEQ ID NO: 917721 - RNA, 23 nt, Human
ccgcgcacgcgcgcuucgacccc

SEQ ID NO: 917722 - RNA, 21 nt, Human
ccggcagccgggucccgcccc

SEQ ID NO: 917723 - RNA, 18 nt, Human
cgaccccacguucacagc

SEQ ID NO: 917724 - RNA, 20 nt, Human
cucccccagcuagacccacc

SEQ ID NO: 917725 - RNA, 19 nt, Human
cuggcuguggccuguccca

SEQ ID NO: 917726 - RNA, 20 nt, Human
gaccccacguucacagcccc

SEQ ID NO: 917727 - RNA, 19 nt, Human
gaggaugggugcaggaugu

SEQ ID NO: 917728 - RNA, 18 nt, Human
gagugacaggagggucca

SEQ ID NO: 917729 - RNA, 24 nt, Human
gcaaacgaaggcugaagaucaaga

SEQ ID NO: 917730 - RNA, 20 nt, Human
ggaagugaagaaaacagaug

SEQ ID NO: 917731 - RNA, 24 nt, Human
ggccggaccccuggcuguggccug

SEQ ID NO: 917732 - RNA, 23 nt, Human
ggcucuacggaggggugaggaug

SEQ ID NO: 917733 - RNA, 23 nt, Human
gggcggguaguggccggaccccu

SEQ ID NO: 917734 - RNA, 24 nt, Human
ggugaggaugggugcaggauguca

SEQ ID NO: 917735 - RNA, 21 nt, Human
gugagacugcaacuguccccu

SEQ ID NO: 917736 - RNA, 19 nt, Human
uaaauucuguucagcagag

SEQ ID NO: 917737 - RNA, 23 nt, Human
uaccccgccauggaaccaaacac

SEQ ID NO: 917738 - RNA, 21 nt, Human
ucacagugacaagggacaugg

SEQ ID NO: 917739 - RNA, 18 nt, Human
ucagcagagugacaggag

SEQ ID NO: 917740 - RNA, 18 nt, Human
uccccaggguaccccgcc

SEQ ID NO: 917741 - RNA, 21 nt, Human
uccccaggguaccccgccaug

SEQ ID NO: 917742 - RNA, 24 nt, Human
ugaauccccaggguaccccgccau

SEQ ID NO: 917743 - RNA, 22 nt, Human
ugacaagggacauggggugcgg

SEQ ID NO: 917744 - RNA, 21 nt, Human
ugcaaagggaagugaagaaaa

SEQ ID NO: 917745 - RNA, 20 nt, Human
aaaaacagcaacaacaacaa

SEQ ID NO: 917746 - RNA, 18 nt, Human
aaaacaccaaaaacagca

SEQ ID NO: 917747 - RNA, 20 nt, Human
aaaacaccaaaaacagcaac

SEQ ID NO: 917748 - RNA, 25 nt, Human
aaacagaugugagguaauuuuccau

SEQ ID NO: 917749 - RNA, 25 nt, Human
aaauguaacuuuaauacacauuuca

SEQ ID NO: 917750 - RNA, 27 nt, Human
aacaccaaaaacagcaacaacaacaau

SEQ ID NO: 917751 - RNA, 27 nt, Human
aagcaaaacaccaaaaacagcaacaac

SEQ ID NO: 917752 - RNA, 19 nt, Human
aagggucuuccauucuugc

SEQ ID NO: 917753 - RNA, 21 nt, Human
aaucacaggucaucuaccuuc

SEQ ID NO: 917754 - RNA, 23 nt, Human
aaugaaagaucaucugaacagaa

SEQ ID NO: 917755 - RNA, 22 nt, Human
acagagcccgggaaccucagcc

SEQ ID NO: 917756 - RNA, 21 nt, Human
accaaaaacagcaacaacaac

SEQ ID NO: 917757 - RNA, 21 nt, Human
acgcccaacaggaacacauug

SEQ ID NO: 917758 - RNA, 23 nt, Human
acuacaaccuacauuaagacauu

SEQ ID NO: 917759 - RNA, 24 nt, Human
agaaaaguauauuccaauuaugaa

SEQ ID NO: 917760 - RNA, 19 nt, Human
agcaaaacaccaaaaacag

SEQ ID NO: 917761 - RNA, 23 nt, Human
agcaacaacaacaaugcacugaa

SEQ ID NO: 917762 - RNA, 23 nt, Human
agcauuucgaaccuuuagaaacu

SEQ ID NO: 917763 - RNA, 20 nt, Human
agggaugcugggaucgggug

SEQ ID NO: 917764 - RNA, 21 nt, Human
agggaugcugggaucgggugu

SEQ ID NO: 917765 - RNA, 22 nt, Human
auaauguucucucaucccaaag

SEQ ID NO: 917766 - RNA, 20 nt, Human
auuuuccaucuaaagugacu

SEQ ID NO: 917767 - RNA, 27 nt, Human
caaaaacagcaacaacaacuggagacc

SEQ ID NO: 917768 - RNA, 21 nt, Human
caaaacaccaaaaacagcaac

SEQ ID NO: 917769 - RNA, 23 nt, Human
caagggucuuccauucuugcuuu

SEQ ID NO: 917770 - RNA, 21 nt, Human
caccaaaaacagcaacaacaa

SEQ ID NO: 917771 - RNA, 24 nt, Human
cagcaacaacaacaaugcacugaa

SEQ ID NO: 917772 - RNA, 21 nt, Human
cagcgguaaucuucggcaaaa

SEQ ID NO: 917773 - RNA, 20 nt, Human
cagucuaaucacaggucauc

SEQ ID NO: 917774 - RNA, 21 nt, Human
cagucuaaucacaggucaucu

SEQ ID NO: 917775 - RNA, 20 nt, Human
caucugaacagaagcaauac

SEQ ID NO: 917776 - RNA, 25 nt, Human
cauucuugcuuuaaaauaaacaaag

SEQ ID NO: 917777 - RNA, 20 nt, Human
cccaaguaacccuccuauac

SEQ ID NO: 917778 - RNA, 18 nt, Human
ccgccggugccgccgccc

SEQ ID NO: 917779 - RNA, 23 nt, Human
ccuccaacuggagcaccucggac

SEQ ID NO: 917780 - RNA, 23 nt, Human
cgggaaccucagccuccaacugg

SEQ ID NO: 917781 - RNA, 22 nt, Human
cuaaagugacuacaaccuacau

SEQ ID NO: 917782 - RNA, 20 nt, Human
cuccgccggugccgccgccc

SEQ ID NO: 917783 - RNA, 22 nt, Human
cugaaaagcaaaacaccaaaaa

SEQ ID NO: 917784 - RNA, 19 nt, Human
cugaagaaaacagauguga

SEQ ID NO: 917785 - RNA, 23 nt, Human
cugcaggacgcgagcugaacacg

SEQ ID NO: 917786 - RNA, 20 nt, Human
cugcaggcagggaugcuggg

SEQ ID NO: 917787 - RNA, 23 nt, Human
cuggccccaaguaacccuccuau

SEQ ID NO: 917788 - RNA, 24 nt, Human
gaguccccucaugcaaguuuuuga

SEQ ID NO: 917789 - RNA, 21 nt, Human
gcccagucuaaucacagguca

SEQ ID NO: 917790 - RNA, 19 nt, Human
guauguguauacauauaua

SEQ ID NO: 917791 - RNA, 20 nt, Human
uaaaauagcugccucuaggc

SEQ ID NO: 917792 - RNA, 18 nt, Human
uaaaauuauuccugcuga

SEQ ID NO: 917793 - RNA, 19 nt, Human
uaaguuucaaaaacaucaa

SEQ ID NO: 917794 - RNA, 21 nt, Human
uaaucuucggcaaaaacacua

SEQ ID NO: 917795 - RNA, 19 nt, Human
uacccauauaaguauguaa

SEQ ID NO: 917796 - RNA, 20 nt, Human
uagaacgauucucuaaguaa

SEQ ID NO: 917797 - RNA, 25 nt, Human
uagaccauaaauaccagaugguaaa

SEQ ID NO: 917798 - RNA, 20 nt, Human
uaggaugcacacuaauguga

SEQ ID NO: 917799 - RNA, 20 nt, Human
uauauucaccaaugcauaua

SEQ ID NO: 917800 - RNA, 22 nt, Human
uauggaacuuucauucuagaug

SEQ ID NO: 917801 - RNA, 18 nt, Human
uauguguauacauauaua

SEQ ID NO: 917802 - RNA, 25 nt, Human
ucaacacugaguauaacauuucagu

SEQ ID NO: 917803 - RNA, 22 nt, Human
ucacuuugauguauuccaucuu

SEQ ID NO: 917804 - RNA, 20 nt, Human
ucccaaagaaugauaaucug

SEQ ID NO: 917805 - RNA, 23 nt, Human
ucccugguuauacaaaaucccca

SEQ ID NO: 917806 - RNA, 22 nt, Human
ucucucuaccacuaaauaaaca

SEQ ID NO: 917807 - RNA, 18 nt, Human
ucuucggcaaaaacacua

SEQ ID NO: 917808 - RNA, 23 nt, Human
ugaaaagcaaaacaccaaaaaca

SEQ ID NO: 917809 - RNA, 24 nt, Human
ugaaaagcaaaacaccaaaaacag

SEQ ID NO: 917810 - RNA, 22 nt, Human
ugaaacgugcaccuccugagaa

SEQ ID NO: 917811 - RNA, 24 nt, Human
ugaaagaucaucugaacagaagca

SEQ ID NO: 917812 - RNA, 21 nt, Human
ugaccgaagaaaucaacacua

SEQ ID NO: 917813 - RNA, 18 nt, Human
ugagaacuaacuguuccu

SEQ ID NO: 917814 - RNA, 22 nt, Human
ugccucuaggcugaaaaaaaaa

SEQ ID NO: 917815 - RNA, 21 nt, Human
ugcugaaauaaaaucaagaca

SEQ ID NO: 917816 - RNA, 18 nt, Human
uggagcaccucggacagc

SEQ ID NO: 917817 - RNA, 20 nt, Human
uggccccaaguaacccuccu

SEQ ID NO: 917818 - RNA, 27 nt, Human
uggccccaaguaacccuccuauacuuu

SEQ ID NO: 917819 - RNA, 19 nt, Human
uguaaguauguguauacau

SEQ ID NO: 917820 - RNA, 22 nt, Human
uguaaguauguguauacauaua

SEQ ID NO: 917821 - RNA, 26 nt, Human
uguauacauauauauucaccaaugca

SEQ ID NO: 917822 - RNA, 23 nt, Human
ugugugcauauguuuaaauacaa

SEQ ID NO: 917823 - RNA, 19 nt, Human
uguuucuccccagccgccc

SEQ ID NO: 917824 - RNA, 19 nt, Human
uucagucuacugauuuacu

SEQ ID NO: 917825 - RNA, 18 nt, Human
uugaaggaguccccucau

SEQ ID NO: 917826 - RNA, 22 nt, Human
uugaugaaacgugcaccuccug

SEQ ID NO: 917827 - RNA, 22 nt, Human
uuucaagggucuuccauucuug

SEQ ID NO: 917828 - RNA, 18 nt, Human
aaauaacaaaaaacaaag

SEQ ID NO: 917829 - RNA, 21 nt, Human
aagacagucacagaaaagaug

SEQ ID NO: 917830 - RNA, 20 nt, Human
aagaggggcucaguauggca

SEQ ID NO: 917831 - RNA, 23 nt, Human
aagaguacgacugggauaaaacg

SEQ ID NO: 917832 - RNA, 20 nt, Human
aaggaauggaggucccugag

SEQ ID NO: 917833 - RNA, 19 nt, Human
acgcacguagucaaacagu

SEQ ID NO: 917834 - RNA, 22 nt, Human
aggaagaggggcucaguauggc

SEQ ID NO: 917835 - RNA, 22 nt, Human
aggaauggaggucccugagccu

SEQ ID NO: 917836 - RNA, 24 nt, Human
aggaggccccuggagcagccuggc

SEQ ID NO: 917837 - RNA, 20 nt, Human
aggagggguggacagcaggu

SEQ ID NO: 917838 - RNA, 21 nt, Human
agggaaaaauaaagaccaccc

SEQ ID NO: 917839 - RNA, 19 nt, Human
agggcugggccaugccaag

SEQ ID NO: 917840 - RNA, 24 nt, Human
aggugcccagacaugugggagugg

SEQ ID NO: 917841 - RNA, 21 nt, Human
agguuugaagaggcaaggggg

SEQ ID NO: 917842 - RNA, 21 nt, Human
agucacagaaaagaugggcuu

SEQ ID NO: 917843 - RNA, 20 nt, Human
aguggaaagguggagggggc

SEQ ID NO: 917844 - RNA, 22 nt, Human
augccaggcuguaauguuucug

SEQ ID NO: 917845 - RNA, 18 nt, Human
augcuaggaagaggggcu

SEQ ID NO: 917846 - RNA, 23 nt, Human
caaaccuggaagaguacgacugg

SEQ ID NO: 917847 - RNA, 21 nt, Human
caacgcagggagagcaggcag

SEQ ID NO: 917848 - RNA, 21 nt, Human
caagggcccuggaaaacaaug

SEQ ID NO: 917849 - RNA, 18 nt, Human
cacagaaaagaugggcuu

SEQ ID NO: 917850 - RNA, 22 nt, Human
caccccaugcauuguccauccc

SEQ ID NO: 917851 - RNA, 21 nt, Human
cagcccagggcaggugcccag

SEQ ID NO: 917852 - RNA, 22 nt, Human
cagcccagggcaggugcccagg

SEQ ID NO: 917853 - RNA, 24 nt, Human
ccacagugcugugucgaggcagcu

SEQ ID NO: 917854 - RNA, 22 nt, Human
ccaccaccaccgcucgcuaugg

SEQ ID NO: 917855 - RNA, 18 nt, Human
ccagugucacauggcugg

SEQ ID NO: 917856 - RNA, 22 nt, Human
cccagaugggaggccaugugcu

SEQ ID NO: 917857 - RNA, 26 nt, Human
ccccuggagcagccuggccucagccc

SEQ ID NO: 917858 - RNA, 20 nt, Human
ccuggccucagcccagggcc

SEQ ID NO: 917859 - RNA, 18 nt, Human
cucaaggaauggaggucc

SEQ ID NO: 917860 - RNA, 20 nt, Human
cugggccaugccaagacaaa

SEQ ID NO: 917861 - RNA, 23 nt, Human
gagcaggcaggagcuaccccagu

SEQ ID NO: 917862 - RNA, 18 nt, Human
gagggcgcaggaggcccc

SEQ ID NO: 917863 - RNA, 22 nt, Human
gagguuguugaguggaaaggug

SEQ ID NO: 917864 - RNA, 18 nt, Human
gcaaagagaagcuguagg

SEQ ID NO: 917865 - RNA, 26 nt, Human
gcacaccuccaggaaccaguuaugaa

SEQ ID NO: 917866 - RNA, 19 nt, Human
gcccuggacuggggaagcc

SEQ ID NO: 917867 - RNA, 23 nt, Human
gcgugccugggcaauagggacca

SEQ ID NO: 917868 - RNA, 23 nt, Human
gcugggcgggauggagaggagac

SEQ ID NO: 917869 - RNA, 18 nt, Human
ggaaauggcgugccuggg

SEQ ID NO: 917870 - RNA, 18 nt, Human
ggacaggggugggagguu

SEQ ID NO: 917871 - RNA, 21 nt, Human
ggacaggggugggagguuguu

SEQ ID NO: 917872 - RNA, 18 nt, Human
ggacuggggaagccgaug

SEQ ID NO: 917873 - RNA, 23 nt, Human
ggaggccccuggagcagccuggc

SEQ ID NO: 917874 - RNA, 20 nt, Human
ggcaauagggacaggccaca

SEQ ID NO: 917875 - RNA, 21 nt, Human
ggcaucacaguggccucuggu

SEQ ID NO: 917876 - RNA, 18 nt, Human
ggcuuugugcaugggcug

SEQ ID NO: 917877 - RNA, 23 nt, Human
gggaaaggagcaggggagcccug

SEQ ID NO: 917878 - RNA, 26 nt, Human
gggcugggccaugccaagacaaucuc

SEQ ID NO: 917879 - RNA, 20 nt, Human
ggugagggcgcaggaggccc

SEQ ID NO: 917880 - RNA, 21 nt, Human
guuguugaguggaaaggugga

SEQ ID NO: 917881 - RNA, 24 nt, Human
uaacaaaaaacaaaguagguccca

SEQ ID NO: 917882 - RNA, 25 nt, Human
uccaaaccuggaagaguacgacugg

SEQ ID NO: 917883 - RNA, 18 nt, Human
uccacaaauggcaaagag

SEQ ID NO: 917884 - RNA, 22 nt, Human
uccacaaauggcaaagagaagc

SEQ ID NO: 917885 - RNA, 22 nt, Human
uccggaccaugcagcaggacag

SEQ ID NO: 917886 - RNA, 20 nt, Human
ugaaaagguugguacaucuc

SEQ ID NO: 917887 - RNA, 18 nt, Human
ugaacucagauguaucgc

SEQ ID NO: 917888 - RNA, 21 nt, Human
ugccaagacaaucucaaggaa

SEQ ID NO: 917889 - RNA, 23 nt, Human
ugcccagacaugugggaguggga

SEQ ID NO: 917890 - RNA, 18 nt, Human
uggcugggcgggauggag

SEQ ID NO: 917891 - RNA, 21 nt, Human
uggcugggcgggauggagagg

SEQ ID NO: 917892 - RNA, 25 nt, Human
ugggaggccaugugcuuggaccggc

SEQ ID NO: 917893 - RNA, 22 nt, Human
ugggcaauagggacaggccaca

SEQ ID NO: 917894 - RNA, 19 nt, Human
uguaauguuucugugugga

SEQ ID NO: 917895 - RNA, 18 nt, Human
uguggcaggugagggcgc

SEQ ID NO: 917896 - RNA, 23 nt, Human
uguugaggagggguggacagcag

SEQ ID NO: 917897 - RNA, 20 nt, Human
uuguugaguggaaaggugga

SEQ ID NO: 917898 - RNA, 22 nt, Human
uuguugaguggaaagguggagg

SEQ ID NO: 917899 - RNA, 21 nt, Human
uuuuuuuuuuuuuaaagguug

SEQ ID NO: 917900 - RNA, 22 nt, Human
uuuuuuuuuuuuuuuuuaaagg

SEQ ID NO: 917901 - RNA, 18 nt, Human
aaaacagauucuccaagc

SEQ ID NO: 917902 - RNA, 20 nt, Human
aaagggcuggggaaccagca

SEQ ID NO: 917903 - RNA, 20 nt, Human
aaagggcuggggaaccagca

SEQ ID NO: 917904 - RNA, 22 nt, Human
aaccccaagggugccccaaagg

SEQ ID NO: 917905 - RNA, 23 nt, Human
aagggugccccaaaggcacagug

SEQ ID NO: 917906 - RNA, 21 nt, Human
accccaagggugccccaaagg

SEQ ID NO: 917907 - RNA, 20 nt, Human
acugggcaccauuucagccg

SEQ ID NO: 917908 - RNA, 23 nt, Human
agaagaaacagaggaaucuaaag

SEQ ID NO: 917909 - RNA, 20 nt, Human
agagagaacauggccaagaa

SEQ ID NO: 917910 - RNA, 24 nt, Human
aggaggggggcggaggggcagagc

SEQ ID NO: 917911 - RNA, 22 nt, Human
aggcacaguggcagugaggcuu

SEQ ID NO: 917912 - RNA, 24 nt, Human
caagaauuauccagguagaagaaa

SEQ ID NO: 917913 - RNA, 23 nt, Human
caagccagggcagggaaaagggc

SEQ ID NO: 917914 - RNA, 24 nt, Human
ccaggccaggcaugcuggaccaca

SEQ ID NO: 917915 - RNA, 23 nt, Human
cgcccaggccaggcaugcuggac

SEQ ID NO: 917916 - RNA, 19 nt, Human
cugcuucuggggcuggcgg

SEQ ID NO: 917917 - RNA, 18 nt, Human
gaaaagggcuggggaacc

SEQ ID NO: 917918 - RNA, 18 nt, Human
gaaaugguagugccgggu

SEQ ID NO: 917919 - RNA, 19 nt, Human
gaggggcagagcugaccug

SEQ ID NO: 917920 - RNA, 18 nt, Human
gcagggaaaagggcuggg

SEQ ID NO: 917921 - RNA, 20 nt, Human
ggaggggcagagcugaccug

SEQ ID NO: 917922 - RNA, 21 nt, Human
gggaaccagcaggaggggggc

SEQ ID NO: 917923 - RNA, 22 nt, Human
gggcagggaaaagggcugggga

SEQ ID NO: 917924 - RNA, 23 nt, Human
ggggaaccagcaggaggggggcg

SEQ ID NO: 917925 - RNA, 19 nt, Human
ucaguggagauugaaaaca

SEQ ID NO: 917926 - RNA, 25 nt, Human
uccaagccagggcagggaaaagggc

SEQ ID NO: 917927 - RNA, 22 nt, Human
uccagguagaagaaacagagga

SEQ ID NO: 917928 - RNA, 22 nt, Human
uccaucacugcugauggacugg

SEQ ID NO: 917929 - RNA, 18 nt, Human
uccgaagacgaccccuca

SEQ ID NO: 917930 - RNA, 21 nt, Human
ugaaaacagauucuccaagcc

SEQ ID NO: 917931 - RNA, 28 nt, Human
ugaaaacagauucuccaagccagggcag

SEQ ID NO: 917932 - RNA, 24 nt, Human
uggcagugaggcuugcucuggccu

SEQ ID NO: 917933 - RNA, 19 nt, Human
uggccuaguccuccagcaa

SEQ ID NO: 917934 - RNA, 20 nt, Human
uggccuaguccuccagcaaa

SEQ ID NO: 917935 - RNA, 22 nt, Human
ugggcaccauuucagccguucu

SEQ ID NO: 917936 - RNA, 23 nt, Human
uuccucacagccgcugccuagau

SEQ ID NO: 917937 - RNA, 20 nt, Human
acaaaccacauccccuaucc

SEQ ID NO: 917938 - RNA, 23 nt, Human
agaugguaguaugguucuaaagc

SEQ ID NO: 917939 - RNA, 24 nt, Human
cacccguggaaaugcugcucaggg

SEQ ID NO: 917940 - RNA, 19 nt, Human
caugucuuuauuucagagu

SEQ ID NO: 917941 - RNA, 19 nt, Human
cuaaagcucacuccauggc

SEQ ID NO: 917942 - RNA, 22 nt, Human
cucaugcucaugucuuuauuuc

SEQ ID NO: 917943 - RNA, 18 nt, Human
cuggagaugguaguaugg

SEQ ID NO: 917944 - RNA, 22 nt, Human
cuggagaugguaguaugguucu

SEQ ID NO: 917945 - RNA, 19 nt, Human
cuguccucugaagaaacac

SEQ ID NO: 917946 - RNA, 21 nt, Human
cuuggcagcucucaauucucc

SEQ ID NO: 917947 - RNA, 23 nt, Human
cuuggcagcucucaauucuccuu

SEQ ID NO: 917948 - RNA, 21 nt, Human
gagaagcuaucaaaauacuca

SEQ ID NO: 917949 - RNA, 24 nt, Human
ggcaggaaguggacaaaagggacc

SEQ ID NO: 917950 - RNA, 30 nt, Human
gucaagagagagggagggcugggaacucaa

SEQ ID NO: 917951 - RNA, 22 nt, Human
guuugggccuggagaugguagu

SEQ ID NO: 917952 - RNA, 21 nt, Human
uaaagcucacuccauggcagg

SEQ ID NO: 917953 - RNA, 19 nt, Human
uaacaaaccacauccccua

SEQ ID NO: 917954 - RNA, 23 nt, Human
uauuucagaguuugggccuggag

SEQ ID NO: 917955 - RNA, 24 nt, Human
ucaaaauacucauccuuuguaaca

SEQ ID NO: 917956 - RNA, 19 nt, Human
ucacuccauggcaggaagu

SEQ ID NO: 917957 - RNA, 23 nt, Human
ucugagcuuuguuauaaaccugc

SEQ ID NO: 917958 - RNA, 20 nt, Human
uggcagcucucaauucuccu

SEQ ID NO: 917959 - RNA, 21 nt, Human
uucaaggaaugagaagcuauc

SEQ ID NO: 917960 - RNA, 25 nt, Human
uuuuuugcucaugcucaugucuuua

SEQ ID NO: 917961 - RNA, 23 nt, Human
aaagaccucccccaaagcacguc

SEQ ID NO: 917962 - RNA, 19 nt, Human
aaagcacguccacaccccc

SEQ ID NO: 917963 - RNA, 26 nt, Human
agaccucccccaaagcacguccacac

SEQ ID NO: 917964 - RNA, 18 nt, Human
agcauuccacugcccagu

SEQ ID NO: 917965 - RNA, 22 nt, Human
agccaaacaccugcccaggcuc

SEQ ID NO: 917966 - RNA, 24 nt, Human
aggcggaagccagacccggcggaa

SEQ ID NO: 917967 - RNA, 27 nt, Human
aggcggcaucgggagagcaggcgggcc

SEQ ID NO: 917968 - RNA, 22 nt, Human
cacacccccucggcagcgucug

SEQ ID NO: 917969 - RNA, 18 nt, Human
cacucugcuugccaacgu

SEQ ID NO: 917970 - RNA, 22 nt, Human
cacugcccagucggacuuccac

SEQ ID NO: 917971 - RNA, 22 nt, Human
caggagccguccugguucgagc

SEQ ID NO: 917972 - RNA, 24 nt, Human
caucuuaguguaaugagcugaaaa

SEQ ID NO: 917973 - RNA, 24 nt, Human
ccaaacaccugcccaggcucugcu

SEQ ID NO: 917974 - RNA, 20 nt, Human
ccccaaagcacguccacacc

SEQ ID NO: 917975 - RNA, 18 nt, Human
cccccggggucgccgggg

SEQ ID NO: 917976 - RNA, 20 nt, Human
cccccucggcagcgucugcc

SEQ ID NO: 917977 - RNA, 21 nt, Human
ccccucuuggguuauggaaau

SEQ ID NO: 917978 - RNA, 23 nt, Human
ccuccaucagcauuccacugccc

SEQ ID NO: 917979 - RNA, 21 nt, Human
ccuucugcgagggcgcgagga

SEQ ID NO: 917980 - RNA, 19 nt, Human
cggcagcgucugccuccau

SEQ ID NO: 917981 - RNA, 20 nt, Human
cguccacacccccucggcag

SEQ ID NO: 917982 - RNA, 19 nt, Human
cuuaaagaccucccccaaa

SEQ ID NO: 917983 - RNA, 24 nt, Human
gccugcgguccggggccgcucggc

SEQ ID NO: 917984 - RNA, 25 nt, Human
gcggcaucgggagagcaggcgggcc

SEQ ID NO: 917985 - RNA, 23 nt, Human
guccggggccgcucggcaggcgg

SEQ ID NO: 917986 - RNA, 31 nt, Human
uaaaaauaacaaauacuaagccaaacaccuu

SEQ ID NO: 917987 - RNA, 18 nt, Human
uaagccaaacaccugccc

SEQ ID NO: 917988 - RNA, 20 nt, Human
uaagccaaacaccugcccag

SEQ ID NO: 917989 - RNA, 23 nt, Human
uacaguuaaacaauagacuuaaa

SEQ ID NO: 917990 - RNA, 24 nt, Human
ucccccaaagcacguccacacccc

SEQ ID NO: 917991 - RNA, 19 nt, Human
ucucuugugggccgggugg

SEQ ID NO: 917992 - RNA, 20 nt, Human
ucucuugugggccggguggu

SEQ ID NO: 917993 - RNA, 20 nt, Human
ucuggugggcucuggauggu

SEQ ID NO: 917994 - RNA, 19 nt, Human
ucuugugggccgggugguu

SEQ ID NO: 917995 - RNA, 21 nt, Human
ugcccaggcucugcugccuca

SEQ ID NO: 917996 - RNA, 24 nt, Human
uguugucucuugugggccgggugg

SEQ ID NO: 917997 - RNA, 24 nt, Human
uuccacagccucagaccccccucu

SEQ ID NO: 917998 - RNA, 21 nt, Human
aguaugcugcuuccaacauaa

SEQ ID NO: 917999 - RNA, 22 nt, Human
caacauaauuucucagagaaca

SEQ ID NO: 918000 - RNA, 20 nt, Human
cagagaacaaagacugacca

SEQ ID NO: 918001 - RNA, 23 nt, Human
cauuuuuauaauaaaacugaaaa

SEQ ID NO: 918002 - RNA, 24 nt, Human
cugcuuccaacauaauuucucaga

SEQ ID NO: 918003 - RNA, 21 nt, Human
uaaauacauguguucaaacaa

SEQ ID NO: 918004 - RNA, 21 nt, Human
ucuguuuuauaaauacaugug

SEQ ID NO: 918005 - RNA, 22 nt, Human
ucuguuuuauaaauacaugugu

SEQ ID NO: 918006 - RNA, 20 nt, Human
ugcuuccaacauaauuucuc

SEQ ID NO: 918007 - RNA, 20 nt, Human
uucagagggguagucuuuuu

SEQ ID NO: 918008 - RNA, 20 nt, Human
caguaccacuggcccagagc

SEQ ID NO: 918009 - RNA, 23 nt, Human
ccagacuguuuucuacuaacucc

SEQ ID NO: 918010 - RNA, 20 nt, Human
ccuucacugcagugcuuaga

SEQ ID NO: 918011 - RNA, 23 nt, Human
gcaccagcauccagacuguuuuc

SEQ ID NO: 918012 - RNA, 18 nt, Human
guaccacuggcccagagc

SEQ ID NO: 918013 - RNA, 25 nt, Human
uaguggcaccagcauccagacuguu

SEQ ID NO: 918014 - RNA, 22 nt, Human
ucaguaccacuggcccagagca

SEQ ID NO: 918015 - RNA, 20 nt, Human
ugccugaaacuucaaugaga

SEQ ID NO: 918016 - RNA, 19 nt, Human
uucaaugagauccauucca

SEQ ID NO: 918017 - RNA, 25 nt, Human
aacucacuuagaacaguccagcccc

SEQ ID NO: 918018 - RNA, 25 nt, Human
aagcucccccacccgaacucacuua

SEQ ID NO: 918019 - RNA, 21 nt, Human
aaggccaccacaggcugaggg

SEQ ID NO: 918020 - RNA, 18 nt, Human
agucaggaugcaaggcca

SEQ ID NO: 918021 - RNA, 18 nt, Human
auauggggagaaaagggu

SEQ ID NO: 918022 - RNA, 24 nt, Human
caacaaggaacaaucgcgccccuc

SEQ ID NO: 918023 - RNA, 23 nt, Human
caaggaacaaucgcgccccuccu

SEQ ID NO: 918024 - RNA, 21 nt, Human
caccucggccaggaucggggg

SEQ ID NO: 918025 - RNA, 20 nt, Human
cacuggggauauggcagggu

SEQ ID NO: 918026 - RNA, 21 nt, Human
cacuucucccuaccccuaaaa

SEQ ID NO: 918027 - RNA, 23 nt, Human
cagaaucuagacccccccugucu

SEQ ID NO: 918028 - RNA, 19 nt, Human
cagagucagccccaccccc

SEQ ID NO: 918029 - RNA, 19 nt, Human
cagccccacccccaccuca

SEQ ID NO: 918030 - RNA, 18 nt, Human
cagcucacuccuagaacc

SEQ ID NO: 918031 - RNA, 22 nt, Human
caggguuucgccuucaagcaca

SEQ ID NO: 918032 - RNA, 23 nt, Human
cauuuugcagagucagccccacc

SEQ ID NO: 918033 - RNA, 18 nt, Human
ccaacccccucagaaucu

SEQ ID NO: 918034 - RNA, 23 nt, Human
ccaacccccucagaaucuagacc

SEQ ID NO: 918035 - RNA, 20 nt, Human
ccagaacaaggggcugagaa

SEQ ID NO: 918036 - RNA, 24 nt, Human
ccagagguuuccugccuugcccaa

SEQ ID NO: 918037 - RNA, 18 nt, Human
ccccaccucagcaggccc

SEQ ID NO: 918038 - RNA, 22 nt, Human
ccccaccucagcaggccccagc

SEQ ID NO: 918039 - RNA, 24 nt, Human
ccccaccucagcaggccccagcuc

SEQ ID NO: 918040 - RNA, 20 nt, Human
ccccauggagaaaaugaggu

SEQ ID NO: 918041 - RNA, 25 nt, Human
cccccaccucagcaggccccagcuc

SEQ ID NO: 918042 - RNA, 23 nt, Human
cccccucagaaucuagacccccc

SEQ ID NO: 918043 - RNA, 21 nt, Human
ccccuaaaaucgggacaccuc

SEQ ID NO: 918044 - RNA, 20 nt, Human
ccccucagaaucuagacccc

SEQ ID NO: 918045 - RNA, 21 nt, Human
cccuccuuugcccuuggaguc

SEQ ID NO: 918046 - RNA, 23 nt, Human
cccuccuuugcccuuggagucuc

SEQ ID NO: 918047 - RNA, 20 nt, Human
ccgccacgccucgcgaugcc

SEQ ID NO: 918048 - RNA, 21 nt, Human
ccgccacgccucgcgaugccu

SEQ ID NO: 918049 - RNA, 18 nt, Human
ccuaccccuaaaaucggg

SEQ ID NO: 918050 - RNA, 21 nt, Human
ccucagaaucuagaccccccc

SEQ ID NO: 918051 - RNA, 21 nt, Human
ccuccugaagagcauggcugu

SEQ ID NO: 918052 - RNA, 18 nt, Human
ccucggccaggaucgggg

SEQ ID NO: 918053 - RNA, 22 nt, Human
ccugaagagcauggcugucuuc

SEQ ID NO: 918054 - RNA, 19 nt, Human
cgagguuuuuuuuuuuuuu

SEQ ID NO: 918055 - RNA, 21 nt, Human
cgagguuuuuuuuuuuuuuuu

SEQ ID NO: 918056 - RNA, 22 nt, Human
cgcgcggaauggacgcggccac

SEQ ID NO: 918057 - RNA, 24 nt, Human
cggaauggacgcggccacuaagcg

SEQ ID NO: 918058 - RNA, 21 nt, Human
cuccagagguuuccugccuug

SEQ ID NO: 918059 - RNA, 21 nt, Human
cuccucgccguagcugcgaac

SEQ ID NO: 918060 - RNA, 19 nt, Human
cuucacagagcagccuccc

SEQ ID NO: 918061 - RNA, 21 nt, Human
gaacaguccagccccgcccag

SEQ ID NO: 918062 - RNA, 25 nt, Human
gaagcucccccacccgaacucacuu

SEQ ID NO: 918063 - RNA, 23 nt, Human
gacuggcacuggggauauggcag

SEQ ID NO: 918064 - RNA, 23 nt, Human
gagaacauccagucaggaugcaa

SEQ ID NO: 918065 - RNA, 20 nt, Human
gcaaggccaccacaggcuga

SEQ ID NO: 918066 - RNA, 23 nt, Human
gcacagccaagacacccuccuuu

SEQ ID NO: 918067 - RNA, 26 nt, Human
gcacagccaagacacccuccuuugcc

SEQ ID NO: 918068 - RNA, 18 nt, Human
gcccuuggagucuccucc

SEQ ID NO: 918069 - RNA, 22 nt, Human
gccuugcccaauauccaccaac

SEQ ID NO: 918070 - RNA, 22 nt, Human
ggaacaaucgcgccccuccucg

SEQ ID NO: 918071 - RNA, 26 nt, Human
ggagaaaaugaggucuccagagguuu

SEQ ID NO: 918072 - RNA, 19 nt, Human
ggagcucuggguucuugcc

SEQ ID NO: 918073 - RNA, 18 nt, Human
ggggacuggcacugggga

SEQ ID NO: 918074 - RNA, 18 nt, Human
guccaaacagauaugggg

SEQ ID NO: 918075 - RNA, 21 nt, Human
uagcugcgaacagggcugacc

SEQ ID NO: 918076 - RNA, 22 nt, Human
uauuaguauccacacuggggag

SEQ ID NO: 918077 - RNA, 23 nt, Human
uccagucaggaugcaaggccacc

SEQ ID NO: 918078 - RNA, 19 nt, Human
ucgcgccccuccucgccgu

SEQ ID NO: 918079 - RNA, 24 nt, Human
ugaagcucccccacccgaacucac

SEQ ID NO: 918080 - RNA, 24 nt, Human
ugcccagaacaaggggcugagaac

SEQ ID NO: 918081 - RNA, 20 nt, Human
uggagaaaaugaggucucca

SEQ ID NO: 918082 - RNA, 24 nt, Human
uggagaaaaugaggucuccagagg

SEQ ID NO: 918083 - RNA, 18 nt, Human
uggcacuggggauauggc

SEQ ID NO: 918084 - RNA, 18 nt, Human
uguccaaacagauauggg

SEQ ID NO: 918085 - RNA, 21 nt, Human
uuugagagugugcuccaagag

SEQ ID NO: 918086 - RNA, 21 nt, Human
uuuuuguuuugagagugugcu

SEQ ID NO: 918087 - RNA, 18 nt, Human
uuuuuuuuuuuuguuuug

SEQ ID NO: 918088 - RNA, 18 nt, Human
uuuuuuuuuuuuuuuuug

SEQ ID NO: 918089 - RNA, 24 nt, Human
uuuuuuuuuuuuuuuuuuuguuuu

SEQ ID NO: 918090 - RNA, 23 nt, Human
aaaaaagaaaucagacagacaug

SEQ ID NO: 918091 - RNA, 20 nt, Human
aaaaagccauggcagcagcg

SEQ ID NO: 918092 - RNA, 23 nt, Human
aaaauaaaaacaacaacaaagaa

SEQ ID NO: 918093 - RNA, 25 nt, Human
aaacauaacuuaugacaauuauguu

SEQ ID NO: 918094 - RNA, 23 nt, Human
aaauaaauucaaaaaucugaaac

SEQ ID NO: 918095 - RNA, 20 nt, Human
aacagaaaugcaaaccgaga

SEQ ID NO: 918096 - RNA, 24 nt, Human
aacaggaaaaaaaaagaaaucaga

SEQ ID NO: 918097 - RNA, 21 nt, Human
aaccgagacaccccugcaaac

SEQ ID NO: 918098 - RNA, 19 nt, Human
aagcagugccaaaaaguuc

SEQ ID NO: 918099 - RNA, 26 nt, Human
acaacaacaaagaaucaaaacagaga

SEQ ID NO: 918100 - RNA, 27 nt, Human
acagaacacaguuguagaaagacaccg

SEQ ID NO: 918101 - RNA, 19 nt, Human
acagacacaaacugacacg

SEQ ID NO: 918102 - RNA, 19 nt, Human
acaugacaauaacucaucc

SEQ ID NO: 918103 - RNA, 20 nt, Human
accauugucugaaccguggc

SEQ ID NO: 918104 - RNA, 24 nt, Human
accccgugagaaccuuauuacacc

SEQ ID NO: 918105 - RNA, 18 nt, Human
acccgcucgcccacucgc

SEQ ID NO: 918106 - RNA, 23 nt, Human
acccgcucgcccacucgcccgcc

SEQ ID NO: 918107 - RNA, 24 nt, Human
accugauaacaaaaauauauacca

SEQ ID NO: 918108 - RNA, 23 nt, Human
agaagguggcuggaguggggaga

SEQ ID NO: 918109 - RNA, 21 nt, Human
agacuacaagacgagaaaaac

SEQ ID NO: 918110 - RNA, 23 nt, Human
agagccuaguuuuaugaaaaagc

SEQ ID NO: 918111 - RNA, 24 nt, Human
agccuucagcuccagcugcagcuu

SEQ ID NO: 918112 - RNA, 21 nt, Human
agcuucuccccuagccccucc

SEQ ID NO: 918113 - RNA, 20 nt, Human
aggaaaaaaaaagaaaucag

SEQ ID NO: 918114 - RNA, 25 nt, Human
aggagggagcggauuuagggguuca

SEQ ID NO: 918115 - RNA, 20 nt, Human
aggucucuagagcauauagu

SEQ ID NO: 918116 - RNA, 21 nt, Human
aggugcgaagccagggaaguu

SEQ ID NO: 918117 - RNA, 22 nt, Human
auccaaagcagugccaaaaagu

SEQ ID NO: 918118 - RNA, 23 nt, Human
augcaccugauaacaaaaauaua

SEQ ID NO: 918119 - RNA, 21 nt, Human
auuacaccauaaagacacgcc

SEQ ID NO: 918120 - RNA, 20 nt, Human
caaaacagagaugucuaaac

SEQ ID NO: 918121 - RNA, 24 nt, Human
caacaacaaagaaucaaaacagag

SEQ ID NO: 918122 - RNA, 19 nt, Human
caacugugugggguuccga

SEQ ID NO: 918123 - RNA, 21 nt, Human
caagggggugcgagaaaguca

SEQ ID NO: 918124 - RNA, 21 nt, Human
cacagcucaacgccugccucc

SEQ ID NO: 918125 - RNA, 23 nt, Human
cacuccggccgccgggacagucu

SEQ ID NO: 918126 - RNA, 19 nt, Human
cacuuggacaauagcaaag

SEQ ID NO: 918127 - RNA, 19 nt, Human
cagaguuugcagaugaaaa

SEQ ID NO: 918128 - RNA, 19 nt, Human
cagcagcgacgacaauagc

SEQ ID NO: 918129 - RNA, 22 nt, Human
cagcaggcggagcccuggcccc

SEQ ID NO: 918130 - RNA, 18 nt, Human
cagcccccugagagugcc

SEQ ID NO: 918131 - RNA, 21 nt, Human
caggaaaaaaaaagaaaucag

SEQ ID NO: 918132 - RNA, 22 nt, Human
caggcggagcccuggccccgcu

SEQ ID NO: 918133 - RNA, 22 nt, Human
cagggaaguuuguuuguuuugu

SEQ ID NO: 918134 - RNA, 19 nt, Human
caguccauccaccauacag

SEQ ID NO: 918135 - RNA, 22 nt, Human
cagugccaaaaaguucaguaaa

SEQ ID NO: 918136 - RNA, 18 nt, Human
cauaguccaacaggaaaa

SEQ ID NO: 918137 - RNA, 23 nt, Human
ccaggcaggugcgaagccaggga

SEQ ID NO: 918138 - RNA, 18 nt, Human
ccaggccgcgcugcucac

SEQ ID NO: 918139 - RNA, 18 nt, Human
cccacucgcccgcccggg

SEQ ID NO: 918140 - RNA, 26 nt, Human
ccgccgccgccgccgcaggauuccag

SEQ ID NO: 918141 - RNA, 18 nt, Human
ccgccgccgccgccgccg

SEQ ID NO: 918142 - RNA, 21 nt, Human
ccgccgccgccgccgccgcag

SEQ ID NO: 918143 - RNA, 21 nt, Human
ccgcucgcccacucgcccgcc

SEQ ID NO: 918144 - RNA, 18 nt, Human
ccgcugucgccgccgccg

SEQ ID NO: 918145 - RNA, 24 nt, Human
ccgcugucgccgccgccgccgccg

SEQ ID NO: 918146 - RNA, 22 nt, Human
ccuccuuacuaccagcagagcc

SEQ ID NO: 918147 - RNA, 23 nt, Human
ccuucagcuccagcugcagcuuc

SEQ ID NO: 918148 - RNA, 31 nt, Human
cgagaaaaacauuauacggucacguagaggg

SEQ ID NO: 918149 - RNA, 18 nt, Human
cgagacaccccugcaaac

SEQ ID NO: 918150 - RNA, 19 nt, Human
cgagacagacacaaacuga

SEQ ID NO: 918151 - RNA, 21 nt, Human
cgcccgggcccuggcucgccc

SEQ ID NO: 918152 - RNA, 23 nt, Human
cgccgccgccgccgcaggauucc

SEQ ID NO: 918153 - RNA, 19 nt, Human
cgggguugggaguugcaac

SEQ ID NO: 918154 - RNA, 18 nt, Human
cguccaggccgcgcugcu

SEQ ID NO: 918155 - RNA, 22 nt, Human
cgugugugugugccuuuuccuu

SEQ ID NO: 918156 - RNA, 24 nt, Human
cucauaauaaacuuggcucuuucc

SEQ ID NO: 918157 - RNA, 24 nt, Human
cuccccuagccccuccuuuaauuu

SEQ ID NO: 918158 - RNA, 22 nt, Human
cucuuccugucaccugcuuggg

SEQ ID NO: 918159 - RNA, 23 nt, Human
cugguggaagaagaaaaugccga

SEQ ID NO: 918160 - RNA, 19 nt, Human
cuuuuuuguuuuuauuuuu

SEQ ID NO: 918161 - RNA, 26 nt, Human
gaaagacaccgaaaaaguuggagacc

SEQ ID NO: 918162 - RNA, 21 nt, Human
gaaaugagggcgacgccguuu

SEQ ID NO: 918163 - RNA, 25 nt, Human
gagccuucagcuccagcugcagcuu

SEQ ID NO: 918164 - RNA, 22 nt, Human
gaguggggagaugugcacagcu

SEQ ID NO: 918165 - RNA, 23 nt, Human
gcccucaaugaaaaagccauggc

SEQ ID NO: 918166 - RNA, 19 nt, Human
gcucgcccgcugucgccgc

SEQ ID NO: 918167 - RNA, 18 nt, Human
gcugcagcuucuccccua

SEQ ID NO: 918168 - RNA, 22 nt, Human
ggcagcagcgacgacaauagcc

SEQ ID NO: 918169 - RNA, 24 nt, Human
gggaugguguucagcgagguggga

SEQ ID NO: 918170 - RNA, 20 nt, Human
gggguaggcgggagcgaggg

SEQ ID NO: 918171 - RNA, 19 nt, Human
guaaaagcugguggaagaa

SEQ ID NO: 918172 - RNA, 21 nt, Human
guuggucuuauugcuggcgcu

SEQ ID NO: 918173 - RNA, 18 nt, Human
guuuuuuaaaccuuucug

SEQ ID NO: 918174 - RNA, 25 nt, Human
uaaaaacaacaacaaagaaucaaaa

SEQ ID NO: 918175 - RNA, 23 nt, Human
uaaaauaaaaacaacaacaaaga

SEQ ID NO: 918176 - RNA, 21 nt, Human
uaauuugucuuuuuuuuccuu

SEQ ID NO: 918177 - RNA, 18 nt, Human
uacacucuuggaaaacua

SEQ ID NO: 918178 - RNA, 23 nt, Human
uagaaagacaccgaaaaaguuaa

SEQ ID NO: 918179 - RNA, 24 nt, Human
uaggcccucaaugaaaaagccaug

SEQ ID NO: 918180 - RNA, 19 nt, Human
uauauaccauugucugaac

SEQ ID NO: 918181 - RNA, 18 nt, Human
uaucuagaguuugugccu

SEQ ID NO: 918182 - RNA, 21 nt, Human
uauguucacaaacauagucca

SEQ ID NO: 918183 - RNA, 22 nt, Human
uauguucacaaacauaguccaa

SEQ ID NO: 918184 - RNA, 19 nt, Human
ucaacauucaacuaauauc

SEQ ID NO: 918185 - RNA, 25 nt, Human
ucaguaaaagcugguggaagaagaa

SEQ ID NO: 918186 - RNA, 22 nt, Human
uccaacaggaaaaaaaaagaaa

SEQ ID NO: 918187 - RNA, 26 nt, Human
ucgcccgcugucgccgccgccgccgg

SEQ ID NO: 918188 - RNA, 21 nt, Human
ucgccgccgccgccgccgccg

SEQ ID NO: 918189 - RNA, 22 nt, Human
ucgccgccgccgccgccgccgc

SEQ ID NO: 918190 - RNA, 24 nt, Human
ugaaaaagccuccuaugagaugcc

SEQ ID NO: 918191 - RNA, 20 nt, Human
ugaaacauaacuuaugacaa

SEQ ID NO: 918192 - RNA, 22 nt, Human
ugagaaccuuauuacaccauaa

SEQ ID NO: 918193 - RNA, 23 nt, Human
ugaggccccccaucucuuccugu

SEQ ID NO: 918194 - RNA, 23 nt, Human
ugcaaaccgagacaccccugcaa

SEQ ID NO: 918195 - RNA, 20 nt, Human
ugccaaaaaguucaguaaaa

SEQ ID NO: 918196 - RNA, 22 nt, Human
ugccuugucugaggucucuaga

SEQ ID NO: 918197 - RNA, 19 nt, Human
ugccuuuuaaaauaaaaac

SEQ ID NO: 918198 - RNA, 18 nt, Human
ugcgaggccccaggcagg

SEQ ID NO: 918199 - RNA, 22 nt, Human
uggaaaacuauaagcacaugua

SEQ ID NO: 918200 - RNA, 27 nt, Human
uggaagaagaaaaugccgacgggggga

SEQ ID NO: 918201 - RNA, 19 nt, Human
uggagaagguggcuggagu

SEQ ID NO: 918202 - RNA, 21 nt, Human
uggcagcagcgacgacaauag

SEQ ID NO: 918203 - RNA, 24 nt, Human
uggguuguuggcuuuuuguuuuuu

SEQ ID NO: 918204 - RNA, 23 nt, Human
ugguugaggccccccaucucuuc

SEQ ID NO: 918205 - RNA, 21 nt, Human
ugguuucugccuuccaacuuu

SEQ ID NO: 918206 - RNA, 18 nt, Human
ugucuaaacugcgcgaag

SEQ ID NO: 918207 - RNA, 22 nt, Human
uucugccuuccaacuuuuuugu

SEQ ID NO: 918208 - RNA, 25 nt, Human
uucugccuuccaacuuuuuuguuuu

SEQ ID NO: 918209 - RNA, 29 nt, Human
uugaccccaauccaaagcagugccaaaaa

SEQ ID NO: 918210 - RNA, 20 nt, Human
uuggggguugaggaaggggg

SEQ ID NO: 918211 - RNA, 19 nt, Human
uuugcagaugaaaaggcau

SEQ ID NO: 918212 - RNA, 18 nt, Human
uuuuacuuuuuugucuuu

SEQ ID NO: 918213 - RNA, 21 nt, Human
aauaccauaucacagcacaaa

SEQ ID NO: 918214 - RNA, 22 nt, Human
aaugcacauucaucaaaguggc

SEQ ID NO: 918215 - RNA, 21 nt, Human
acccgcagcuucugcggcuuc

SEQ ID NO: 918216 - RNA, 23 nt, Human
acccggcgccucacaggacaccc

SEQ ID NO: 918217 - RNA, 24 nt, Human
agaggaaauauccaaauuguaauc

SEQ ID NO: 918218 - RNA, 23 nt, Human
aggagaggaaauauccaaauugu

SEQ ID NO: 918219 - RNA, 20 nt, Human
aucaucuucaucaucaccgu

SEQ ID NO: 918220 - RNA, 20 nt, Human
caccgggaagcgccacccgg

SEQ ID NO: 918221 - RNA, 23 nt, Human
cacgacaccgggaagcgccaccc

SEQ ID NO: 918222 - RNA, 19 nt, Human
cagcacaaaaacauacccc

SEQ ID NO: 918223 - RNA, 23 nt, Human
cagcagcuccauggugaccgcua

SEQ ID NO: 918224 - RNA, 19 nt, Human
caggcccuggaaagggucg

SEQ ID NO: 918225 - RNA, 23 nt, Human
caucuucaucaucaccguccaag

SEQ ID NO: 918226 - RNA, 21 nt, Human
ccauaucacagcacaaaaaca

SEQ ID NO: 918227 - RNA, 21 nt, Human
cccagcagcuccauggugacc

SEQ ID NO: 918228 - RNA, 20 nt, Human
ccgccgccacccggugcugc

SEQ ID NO: 918229 - RNA, 21 nt, Human
cgggaagcgccacccggaggc

SEQ ID NO: 918230 - RNA, 30 nt, Human
cugcccgacguacucucccagcagcuccaa

SEQ ID NO: 918231 - RNA, 20 nt, Human
gacaccgggaagcgccaccc

SEQ ID NO: 918232 - RNA, 21 nt, Human
gcagcuucugcggcuucccuu

SEQ ID NO: 918233 - RNA, 24 nt, Human
gcagcuucugcggcuucccuuccu

SEQ ID NO: 918234 - RNA, 18 nt, Human
gugcauauuugacguggg

SEQ ID NO: 918235 - RNA, 24 nt, Human
guuauuuuuauauuuaaugcccaa

SEQ ID NO: 918236 - RNA, 20 nt, Human
uaagcuuccagaacacgaca

SEQ ID NO: 918237 - RNA, 18 nt, Human
uaccagagggucgaauaa

SEQ ID NO: 918238 - RNA, 25 nt, Human
uaccauaucacagcacaaaaacaua

SEQ ID NO: 918239 - RNA, 23 nt, Human
uaugaauucaggguuuccuuggg

SEQ ID NO: 918240 - RNA, 24 nt, Human
ucaauaaucuuuuuaaagcaaaau

SEQ ID NO: 918241 - RNA, 20 nt, Human
ucaugucaguucucugaaau

SEQ ID NO: 918242 - RNA, 19 nt, Human
ucucugaaauguuacugcc

SEQ ID NO: 918243 - RNA, 21 nt, Human
ugcacauucaucaaaguggca

SEQ ID NO: 918244 - RNA, 25 nt, Human
ugcaucaucuucaucaucaccgucc

SEQ ID NO: 918245 - RNA, 19 nt, Human
ugggccacgccagacaaca

SEQ ID NO: 918246 - RNA, 23 nt, Human
ugggucucuuucaaggacucucc

SEQ ID NO: 918247 - RNA, 20 nt, Human
uguaaucaaugcagauuguu

SEQ ID NO: 918248 - RNA, 19 nt, Human
uguauaaauaccauaucac

SEQ ID NO: 918249 - RNA, 22 nt, Human
uuuuuggccguuuugcagaugg

SEQ ID NO: 918250 - RNA, 23 nt, Human
aaagagacuugugaggagcaaag

SEQ ID NO: 918251 - RNA, 18 nt, Human
aaagugcucuuaucaucg

SEQ ID NO: 918252 - RNA, 19 nt, Human
aagagaaagagacuuguga

SEQ ID NO: 918253 - RNA, 23 nt, Human
acacugaaggaugccaagaaaag

SEQ ID NO: 918254 - RNA, 24 nt, Human
acccgcucgccucccgcuuccccu

SEQ ID NO: 918255 - RNA, 18 nt, Human
agaaagagacuugugagg

SEQ ID NO: 918256 - RNA, 23 nt, Human
agacuugugaggagcaaaggaac

SEQ ID NO: 918257 - RNA, 22 nt, Human
agagaaagagacuugugaggag

SEQ ID NO: 918258 - RNA, 19 nt, Human
aggagguagcgggcuuggc

SEQ ID NO: 918259 - RNA, 21 nt, Human
aguuucagaauugacaucagg

SEQ ID NO: 918260 - RNA, 19 nt, Human
caacuuuaguuucagaauu

SEQ ID NO: 918261 - RNA, 25 nt, Human
cccgcucgccucccgcuuccccucc

SEQ ID NO: 918262 - RNA, 19 nt, Human
cccgcuuccccuccagucc

SEQ ID NO: 918263 - RNA, 24 nt, Human
ccuacccgcucgccucccgcuucc

SEQ ID NO: 918264 - RNA, 23 nt, Human
ccucccgcuuccccuccaguccc

SEQ ID NO: 918265 - RNA, 21 nt, Human
ccucuuacaggagguagcggg

SEQ ID NO: 918266 - RNA, 24 nt, Human
cgccucccgcuuccccuccagucc

SEQ ID NO: 918267 - RNA, 19 nt, Human
cucgccucccgcuuccccu

SEQ ID NO: 918268 - RNA, 22 nt, Human
gagcaaaggaacaccuacccgc

SEQ ID NO: 918269 - RNA, 19 nt, Human
gaugccaagaaaaguuugc

SEQ ID NO: 918270 - RNA, 24 nt, Human
gccucccgcuuccccuccaguccu

SEQ ID NO: 918271 - RNA, 23 nt, Human
gcucgccucccgcuuccccucca

SEQ ID NO: 918272 - RNA, 20 nt, Human
uaaaaaguuguuuuaccaac

SEQ ID NO: 918273 - RNA, 19 nt, Human
uaaaagagaaagagacuug

SEQ ID NO: 918274 - RNA, 24 nt, Human
uaaacacugaaggaugccaagaaa

SEQ ID NO: 918275 - RNA, 26 nt, Human
uacaaggaacuuucauauauuuuuug

SEQ ID NO: 918276 - RNA, 23 nt, Human
uaguuuccauguauucaaaaaau

SEQ ID NO: 918277 - RNA, 19 nt, Human
uauacauacacauauauau

SEQ ID NO: 918278 - RNA, 19 nt, Human
uauauacauacacauauau

SEQ ID NO: 918279 - RNA, 23 nt, Human
uauauacauacacauauauaucu

SEQ ID NO: 918280 - RNA, 21 nt, Human
uccaguccucuuacaggaggu

SEQ ID NO: 918281 - RNA, 21 nt, Human
uccccauaaacacugaaggau

SEQ ID NO: 918282 - RNA, 20 nt, Human
ugggugucaaccuggcuuuu

SEQ ID NO: 918283 - RNA, 25 nt, Human
ugugaggagcaaaggaacaccuacc

SEQ ID NO: 918284 - RNA, 18 nt, Human
uuaagaaguuucuguauu

SEQ ID NO: 918285 - RNA, 22 nt, Human
uuggguuugagacgcacucgag

SEQ ID NO: 918286 - RNA, 25 nt, Human
uuuugggugucaaccuggcuuuggg

SEQ ID NO: 918287 - RNA, 24 nt, Human
uuuuuuuuuuuuuuuuuuucaaug

SEQ ID NO: 918288 - RNA, 19 nt, Human
ggaggggagcugggcgggg

SEQ ID NO: 918289 - RNA, 20 nt, Human
uguggaggggagcugggcgg

SEQ ID NO: 918290 - RNA, 25 nt, Human
uuuuuuuuuuuuuuuuuuuucaagg

SEQ ID NO: 918291 - RNA, 19 nt, Human
aagacagaguccugaucuc

SEQ ID NO: 918292 - RNA, 18 nt, Human
agaguccugaucucgccc

SEQ ID NO: 918293 - RNA, 24 nt, Human
caccgugcuccuggccuuagaacu

SEQ ID NO: 918294 - RNA, 22 nt, Human
cagaguccugaucucgcccuuc

SEQ ID NO: 918295 - RNA, 19 nt, Human
cagcagaggagcaguaacg

SEQ ID NO: 918296 - RNA, 21 nt, Human
cgcagccuggucuucccgcgg

SEQ ID NO: 918297 - RNA, 22 nt, Human
cggcggcugcgggccagcggaa

SEQ ID NO: 918298 - RNA, 21 nt, Human
cgggcgaggagcggccguuug

SEQ ID NO: 918299 - RNA, 19 nt, Human
cggggcguggccgccgggc

SEQ ID NO: 918300 - RNA, 22 nt, Human
cuggccuuagaacaauaccaga

SEQ ID NO: 918301 - RNA, 20 nt, Human
gaacaauaccagacacuccc

SEQ ID NO: 918302 - RNA, 24 nt, Human
gaucucgcccuucucugcccccac

SEQ ID NO: 918303 - RNA, 18 nt, Human
gcacucggagccgagcuc

SEQ ID NO: 918304 - RNA, 19 nt, Human
gccaucuugcgucuggguc

SEQ ID NO: 918305 - RNA, 20 nt, Human
gcgcucgcugcggcuccugg

SEQ ID NO: 918306 - RNA, 19 nt, Human
gcggcggcgaaggcaggcg

SEQ ID NO: 918307 - RNA, 24 nt, Human
gcgggcgaggagcgacggcggcgg

SEQ ID NO: 918308 - RNA, 26 nt, Human
ggaccagaaacgaaggcagcagagga

SEQ ID NO: 918309 - RNA, 24 nt, Human
ggacuccucugggcgggcggcgag

SEQ ID NO: 918310 - RNA, 19 nt, Human
ggcgaggagcgacggcggc

SEQ ID NO: 918311 - RNA, 26 nt, Human
ggggacuccucugggcgggcggcgag

SEQ ID NO: 918312 - RNA, 26 nt, Human
guaggcccgagggaggcgaccuucau

SEQ ID NO: 918313 - RNA, 18 nt, Human
gucgccaucuugcgucug

SEQ ID NO: 918314 - RNA, 20 nt, Human
gucuggguccggucgggucc

SEQ ID NO: 918315 - RNA, 23 nt, Human
uagaacaauaccagacacuccca

SEQ ID NO: 918316 - RNA, 21 nt, Human
ucuucccgcgggcgaggagcu

SEQ ID NO: 918317 - RNA, 22 nt, Human
ugccgaagucgcggcggcugcg

SEQ ID NO: 918318 - RNA, 23 nt, Human
ugcuccuggccuuagaacaauac

SEQ ID NO: 918319 - RNA, 21 nt, Human
uggccgccgggcgcucgcugc

SEQ ID NO: 918320 - RNA, 18 nt, Human
ugggagacuagccagagg

SEQ ID NO: 918321 - RNA, 18 nt, Human
uuaacaaagacagagucc

SEQ ID NO: 918322 - RNA, 22 nt, Human
aaaaacaacuacccacccccaa

SEQ ID NO: 918323 - RNA, 20 nt, Human
aaaacaacuacccacccccc

SEQ ID NO: 918324 - RNA, 18 nt, Human
aaaacauagcagggaaca

SEQ ID NO: 918325 - RNA, 20 nt, Human
aaacaacuacccacccccaa

SEQ ID NO: 918326 - RNA, 18 nt, Human
aaacacacacauccccaa

SEQ ID NO: 918327 - RNA, 23 nt, Human
aaacacacacauccccaagagaa

SEQ ID NO: 918328 - RNA, 21 nt, Human
aaccaaaaacaacuacccacc

SEQ ID NO: 918329 - RNA, 24 nt, Human
aagagaacaagcagccacuggccg

SEQ ID NO: 918330 - RNA, 20 nt, Human
aaguccccggccccucccuc

SEQ ID NO: 918331 - RNA, 23 nt, Human
acacacacauccccaagagaaca

SEQ ID NO: 918332 - RNA, 21 nt, Human
acacauccccaagagaacaag

SEQ ID NO: 918333 - RNA, 20 nt, Human
acagagagaaacugcaaaca

SEQ ID NO: 918334 - RNA, 23 nt, Human
acagcagugagcagagcccgggc

SEQ ID NO: 918335 - RNA, 25 nt, Human
accuucuucagccccugcuucgcug

SEQ ID NO: 918336 - RNA, 18 nt, Human
acuucugccccacagcuc

SEQ ID NO: 918337 - RNA, 19 nt, Human
agaagagggcaggagacag

SEQ ID NO: 918338 - RNA, 19 nt, Human
agaggcaggccccaggcag

SEQ ID NO: 918339 - RNA, 23 nt, Human
agaggcaggccccaggcaggcuc

SEQ ID NO: 918340 - RNA, 23 nt, Human
agccacuggccgagaucuacacc

SEQ ID NO: 918341 - RNA, 22 nt, Human
agcccuccaggcagaagagggc

SEQ ID NO: 918342 - RNA, 19 nt, Human
agcucuuccucagcagccc

SEQ ID NO: 918343 - RNA, 22 nt, Human
aggcagaagagggcaggagaca

SEQ ID NO: 918344 - RNA, 23 nt, Human
aggcagggccugacaccugggga

SEQ ID NO: 918345 - RNA, 19 nt, Human
agggccccaggauccaccu

SEQ ID NO: 918346 - RNA, 22 nt, Human
agugaaaaggccaacgucagga

SEQ ID NO: 918347 - RNA, 24 nt, Human
aucccuccuuccauagggccccag

SEQ ID NO: 918348 - RNA, 23 nt, Human
caaaauuuacugaagagaaacau

SEQ ID NO: 918349 - RNA, 18 nt, Human
caaacagccacuacaggu

SEQ ID NO: 918350 - RNA, 24 nt, Human
caaguugaggaaacugagucacga

SEQ ID NO: 918351 - RNA, 19 nt, Human
cacauccccaagagaacaa

SEQ ID NO: 918352 - RNA, 26 nt, Human
cacauccccaagagaacaagcagcca

SEQ ID NO: 918353 - RNA, 21 nt, Human
cacauccucucuucucuucuu

SEQ ID NO: 918354 - RNA, 18 nt, Human
cagaaguggucccagguu

SEQ ID NO: 918355 - RNA, 22 nt, Human
cagagcccccagccacaccuuc

SEQ ID NO: 918356 - RNA, 21 nt, Human
cagcagcccuggcuccuucug

SEQ ID NO: 918357 - RNA, 23 nt, Human
cagcagggguggaacgccaaagc

SEQ ID NO: 918358 - RNA, 18 nt, Human
caugccuccuucccaccg

SEQ ID NO: 918359 - RNA, 25 nt, Human
ccacaccuucuucagccccugcuuc

SEQ ID NO: 918360 - RNA, 19 nt, Human
ccagaggacucugcugugu

SEQ ID NO: 918361 - RNA, 22 nt, Human
ccagccacaccuucuucagccc

SEQ ID NO: 918362 - RNA, 23 nt, Human
ccaucugaagcccaggcacccca

SEQ ID NO: 918363 - RNA, 18 nt, Human
cccaagagaacaagcagc

SEQ ID NO: 918364 - RNA, 23 nt, Human
cccacagcucuuccucagcagcc

SEQ ID NO: 918365 - RNA, 18 nt, Human
cccagcacccuccuugcu

SEQ ID NO: 918366 - RNA, 19 nt, Human
ccccaccacaucccuccuu

SEQ ID NO: 918367 - RNA, 18 nt, Human
ccccagucaaguucccug

SEQ ID NO: 918368 - RNA, 19 nt, Human
ccccagucaaguucccugu

SEQ ID NO: 918369 - RNA, 22 nt, Human
ccccccccaccacaucccuccu

SEQ ID NO: 918370 - RNA, 24 nt, Human
ccccccccaccacaucccuccuuc

SEQ ID NO: 918371 - RNA, 20 nt, Human
cccccucuuccuccugcucc

SEQ ID NO: 918372 - RNA, 18 nt, Human
cccccucuuccuccuucu

SEQ ID NO: 918373 - RNA, 19 nt, Human
cccccucuuccuccuucuc

SEQ ID NO: 918374 - RNA, 20 nt, Human
cccccucuuccuccuucucc

SEQ ID NO: 918375 - RNA, 23 nt, Human
ccccucuuccuccucccccucuu

SEQ ID NO: 918376 - RNA, 21 nt, Human
ccccucuuccuccugcuccuc

SEQ ID NO: 918377 - RNA, 18 nt, Human
ccccucuuccuccuucuc

SEQ ID NO: 918378 - RNA, 18 nt, Human
cccggccccucccucagu

SEQ ID NO: 918379 - RNA, 22 nt, Human
cccucaguguggccccccccac

SEQ ID NO: 918380 - RNA, 20 nt, Human
cccuccugagcccacccgcu

SEQ ID NO: 918381 - RNA, 27 nt, Human
ccggccccucccucaguguggcccccc

SEQ ID NO: 918382 - RNA, 18 nt, Human
ccucaguguggccccccc

SEQ ID NO: 918383 - RNA, 19 nt, Human
ccuccaggucccacguggc

SEQ ID NO: 918384 - RNA, 28 nt, Human
ccucccucaguguggccccccccaccag

SEQ ID NO: 918385 - RNA, 18 nt, Human
ccuccuccugcugugggu

SEQ ID NO: 918386 - RNA, 23 nt, Human
ccuccuccuuccccucuuccucc

SEQ ID NO: 918387 - RNA, 20 nt, Human
ccuccucuuucucuuccuca

SEQ ID NO: 918388 - RNA, 18 nt, Human
ccuccuuccccucuuccu

SEQ ID NO: 918389 - RNA, 21 nt, Human
ccuccuucuccucccccucuu

SEQ ID NO: 918390 - RNA, 21 nt, Human
ccuccuugcuggagugaaggc

SEQ ID NO: 918391 - RNA, 27 nt, Human
ccugcggggcuucacuuccuccgcggg

SEQ ID NO: 918392 - RNA, 21 nt, Human
ccuuccccucuuccuccuccc

SEQ ID NO: 918393 - RNA, 19 nt, Human
cgaccuggcuucccugucc

SEQ ID NO: 918394 - RNA, 22 nt, Human
cgccaaagcacaaagcuuccug

SEQ ID NO: 918395 - RNA, 20 nt, Human
cggaacagcagugagcagag

SEQ ID NO: 918396 - RNA, 21 nt, Human
cucagcagcccuggcuccuuc

SEQ ID NO: 918397 - RNA, 20 nt, Human
cuccaggcagaagagggcag

SEQ ID NO: 918398 - RNA, 22 nt, Human
cuccaggcagaagagggcagga

SEQ ID NO: 918399 - RNA, 20 nt, Human
cuccucccccucuuccuccu

SEQ ID NO: 918400 - RNA, 21 nt, Human
cuccuccuuccccucuucccc

SEQ ID NO: 918401 - RNA, 22 nt, Human
cuccucuuucucuuccucacug

SEQ ID NO: 918402 - RNA, 18 nt, Human
cugagcccacccgcuggg

SEQ ID NO: 918403 - RNA, 22 nt, Human
cugccccacagcucuuccucag

SEQ ID NO: 918404 - RNA, 24 nt, Human
cuggcuccuucuggcagaggcagg

SEQ ID NO: 918405 - RNA, 19 nt, Human
cuggggcagggcccugccc

SEQ ID NO: 918406 - RNA, 21 nt, Human
cuggggcagggcccugcccua

SEQ ID NO: 918407 - RNA, 18 nt, Human
cugguugguccuccugca

SEQ ID NO: 918408 - RNA, 19 nt, Human
cuuccccucuuccuccucc

SEQ ID NO: 918409 - RNA, 25 nt, Human
gaagaaaagggaaucuaacacagag

SEQ ID NO: 918410 - RNA, 21 nt, Human
gaaggagugcuucggucuucu

SEQ ID NO: 918411 - RNA, 21 nt, Human
gagagaaacugcaaacagcca

SEQ ID NO: 918412 - RNA, 18 nt, Human
gaguaacagcaggggugg

SEQ ID NO: 918413 - RNA, 19 nt, Human
gcaaaccaaaaacaacuac

SEQ ID NO: 918414 - RNA, 22 nt, Human
gcaaaccaaaaacaacuaccca

SEQ ID NO: 918415 - RNA, 23 nt, Human
gcaauguguacucgcuucaggga

SEQ ID NO: 918416 - RNA, 21 nt, Human
gccccucccucaguguggccc

SEQ ID NO: 918417 - RNA, 23 nt, Human
gccuccccugcggggcuucacuu

SEQ ID NO: 918418 - RNA, 24 nt, Human
gccugacaccuggggacacugacg

SEQ ID NO: 918419 - RNA, 19 nt, Human
ggaacagcagugagcagag

SEQ ID NO: 918420 - RNA, 23 nt, Human
ggaacccccuccugagcccaccc

SEQ ID NO: 918421 - RNA, 19 nt, Human
ggcagcaagagagguagag

SEQ ID NO: 918422 - RNA, 22 nt, Human
ggccgagaucuacaccggcaaa

SEQ ID NO: 918423 - RNA, 21 nt, Human
ggccugaugaugacgcaaacc

SEQ ID NO: 918424 - RNA, 19 nt, Human
ggcuaugugggcucagguc

SEQ ID NO: 918425 - RNA, 21 nt, Human
gugggcaugcucagcucaaag

SEQ ID NO: 918426 - RNA, 23 nt, Human
uaaaaacacacacauccccaaga

SEQ ID NO: 918427 - RNA, 25 nt, Human
uaggaaggcagaaguggucccaggu

SEQ ID NO: 918428 - RNA, 21 nt, Human
ucagcagcccuggcuccuucu

SEQ ID NO: 918429 - RNA, 24 nt, Human
ucagcagcccuggcuccuucuggc

SEQ ID NO: 918430 - RNA, 23 nt, Human
ucagggaacccccuccugagccc

SEQ ID NO: 918431 - RNA, 24 nt, Human
uccaccucuugccaggaugguggg

SEQ ID NO: 918432 - RNA, 24 nt, Human
uccagcugguggaaaguaaggggg

SEQ ID NO: 918433 - RNA, 19 nt, Human
ucccgugucugguuggucc

SEQ ID NO: 918434 - RNA, 24 nt, Human
ucccucugccccagucaaguuccc

SEQ ID NO: 918435 - RNA, 22 nt, Human
ucccugcugccugccaggggaa

SEQ ID NO: 918436 - RNA, 23 nt, Human
uccucaaaguccagaggacucug

SEQ ID NO: 918437 - RNA, 22 nt, Human
uccuccucccgaucauccucuu

SEQ ID NO: 918438 - RNA, 18 nt, Human
uccuccucuuucucuucc

SEQ ID NO: 918439 - RNA, 21 nt, Human
ucuacaccggcaaagcagagg

SEQ ID NO: 918440 - RNA, 23 nt, Human
ucuucagccccugcuucgcuggg

SEQ ID NO: 918441 - RNA, 21 nt, Human
ucuuccuccucccccucuucc

SEQ ID NO: 918442 - RNA, 24 nt, Human
ucuuccuccuccuuccccucuucc

SEQ ID NO: 918443 - RNA, 22 nt, Human
ucuuccuccuucuccucccccc

SEQ ID NO: 918444 - RNA, 25 nt, Human
ucuucucuucuuacacuucuuccuc

SEQ ID NO: 918445 - RNA, 24 nt, Human
ugaaaaggccaacgucaggaggca

SEQ ID NO: 918446 - RNA, 20 nt, Human
ugaaacugcugaagaaaagg

SEQ ID NO: 918447 - RNA, 18 nt, Human
ugaaugcugccuuccugg

SEQ ID NO: 918448 - RNA, 19 nt, Human
ugacagcacucaaauaacu

SEQ ID NO: 918449 - RNA, 24 nt, Human
ugacgcaaaccaaaaacaacuacc

SEQ ID NO: 918450 - RNA, 22 nt, Human
ugacggaugagaaagauggcug

SEQ ID NO: 918451 - RNA, 18 nt, Human
ugagaaagauggcugagc

SEQ ID NO: 918452 - RNA, 22 nt, Human
ugaggaaacugagucacgagua

SEQ ID NO: 918453 - RNA, 22 nt, Human
ugccaggauggugggcucuggc

SEQ ID NO: 918454 - RNA, 22 nt, Human
ugcccuauagacugcacaggac

SEQ ID NO: 918455 - RNA, 25 nt, Human
ugcucagauaaaaacacacacaucc

SEQ ID NO: 918456 - RNA, 20 nt, Human
ugcugugugugcuucggguu

SEQ ID NO: 918457 - RNA, 21 nt, Human
uggaaaggagcugcucagaua

SEQ ID NO: 918458 - RNA, 19 nt, Human
uggaacgccaaagcacaaa

SEQ ID NO: 918459 - RNA, 18 nt, Human
uggcagaggcaggcccca

SEQ ID NO: 918460 - RNA, 20 nt, Human
uggcagaggcaggccccagg

SEQ ID NO: 918461 - RNA, 24 nt, Human
uggccccccccaccacaucccucc

SEQ ID NO: 918462 - RNA, 18 nt, Human
uggccugggugccagugg

SEQ ID NO: 918463 - RNA, 19 nt, Human
uguccagaggaccaggcca

SEQ ID NO: 918464 - RNA, 22 nt, Human
uguuaggggcuaugggcccggc

SEQ ID NO: 918465 - RNA, 22 nt, Human
uuauucuccucuuccuccuccc

SEQ ID NO: 918466 - RNA, 18 nt, Human
uucaaaugucccugcugc

SEQ ID NO: 918467 - RNA, 27 nt, Human
uuccuccuucuccucccccucuucccu

SEQ ID NO: 918468 - RNA, 18 nt, Human
uucuccucuuccuccucc

SEQ ID NO: 918469 - RNA, 24 nt, Human
uucucuucuuacacuucuuccucc

SEQ ID NO: 918470 - RNA, 23 nt, Human
aagaagaaaaauaagauguagga

SEQ ID NO: 918471 - RNA, 21 nt, Human
aagugauucuucugccucagc

SEQ ID NO: 918472 - RNA, 19 nt, Human
aauaagauguaggaagaga

SEQ ID NO: 918473 - RNA, 21 nt, Human
acaauggaagauacuacuaaa

SEQ ID NO: 918474 - RNA, 18 nt, Human
acgggguuucaccguguu

SEQ ID NO: 918475 - RNA, 19 nt, Human
acgggguuucaccguguua

SEQ ID NO: 918476 - RNA, 20 nt, Human
acgggguuucaccguguuag

SEQ ID NO: 918477 - RNA, 24 nt, Human
acgggguuucaccguguuagccag

SEQ ID NO: 918478 - RNA, 26 nt, Human
agaagaaaaauaagauguaggaagag

SEQ ID NO: 918479 - RNA, 18 nt, Human
agccuccugaguagcuag

SEQ ID NO: 918480 - RNA, 21 nt, Human
aguagcuaggauuacaggcau

SEQ ID NO: 918481 - RNA, 24 nt, Human
agugauucuucugccucagccucc

SEQ ID NO: 918482 - RNA, 20 nt, Human
agugcaauggcgcaaucucg

SEQ ID NO: 918483 - RNA, 24 nt, Human
agugcaauggcgcaaucucggcuc

SEQ ID NO: 918484 - RNA, 21 nt, Human
auuaucaaaaguguaucagau

SEQ ID NO: 918485 - RNA, 24 nt, Human
auuuuugcacuuuuaguagagacg

SEQ ID NO: 918486 - RNA, 24 nt, Human
caaccuccaccuccuggguugaag

SEQ ID NO: 918487 - RNA, 18 nt, Human
caccguguuagccaggau

SEQ ID NO: 918488 - RNA, 24 nt, Human
caccguguuagccaggauggucuc

SEQ ID NO: 918489 - RNA, 21 nt, Human
cacuacaaccuccaccuccug

SEQ ID NO: 918490 - RNA, 19 nt, Human
cagccuccugaguagcuag

SEQ ID NO: 918491 - RNA, 20 nt, Human
ccaccacgcccggcuaauuu

SEQ ID NO: 918492 - RNA, 24 nt, Human
ccuccaccuccuggguugaaguga

SEQ ID NO: 918493 - RNA, 23 nt, Human
ccugaguagcuaggauuacaggc

SEQ ID NO: 918494 - RNA, 24 nt, Human
ccugaguagcuaggauuacaggca

SEQ ID NO: 918495 - RNA, 24 nt, Human
cgggguuucaccguguuagccagg

SEQ ID NO: 918496 - RNA, 18 nt, Human
cuacaaccuccaccuccu

SEQ ID NO: 918497 - RNA, 23 nt, Human
cuacaaccuccaccuccuggguu

SEQ ID NO: 918498 - RNA, 18 nt, Human
cuacagcacaucacccua

SEQ ID NO: 918499 - RNA, 27 nt, Human
cucacuacaaccuccaccuccuggguu

SEQ ID NO: 918500 - RNA, 24 nt, Human
cucacuauaucuguuaacaguucu

SEQ ID NO: 918501 - RNA, 18 nt, Human
cucaugauccgccugccu

SEQ ID NO: 918502 - RNA, 24 nt, Human
cuccugaguagcuaggauuacagg

SEQ ID NO: 918503 - RNA, 24 nt, Human
cuccugaucucaugauccgccugc

SEQ ID NO: 918504 - RNA, 24 nt, Human
cugaguagcuaggauuacaggcau

SEQ ID NO: 918505 - RNA, 23 nt, Human
cugccucagccuccugaguagcu

SEQ ID NO: 918506 - RNA, 20 nt, Human
cuguuaacaguucugaagaa

SEQ ID NO: 918507 - RNA, 24 nt, Human
cuuuuaguagagacgggguuucac

SEQ ID NO: 918508 - RNA, 24 nt, Human
gagacgggguuucaccguguuagc

SEQ ID NO: 918509 - RNA, 22 nt, Human
gaguagcuaggauuacaggcau

SEQ ID NO: 918510 - RNA, 24 nt, Human
gaguagcuaggauuacaggcaugc

SEQ ID NO: 918511 - RNA, 24 nt, Human
gaucucaugauccgccugccuuag

SEQ ID NO: 918512 - RNA, 18 nt, Human
gauuacaggcaugcgcca

SEQ ID NO: 918513 - RNA, 19 nt, Human
gcuggagugcaauggcgca

SEQ ID NO: 918514 - RNA, 19 nt, Human
ggauuacaggcaugcgcca

SEQ ID NO: 918515 - RNA, 22 nt, Human
ggauuacaggcaugcgccacca

SEQ ID NO: 918516 - RNA, 23 nt, Human
gggguuucaccguguuagccagg

SEQ ID NO: 918517 - RNA, 21 nt, Human
guaaaguuguugggcacagag

SEQ ID NO: 918518 - RNA, 23 nt, Human
guagagacgggguuucaccgugu

SEQ ID NO: 918519 - RNA, 20 nt, Human
guagcuaggauuacaggcau

SEQ ID NO: 918520 - RNA, 24 nt, Human
gugauucuucugccucagccuccu

SEQ ID NO: 918521 - RNA, 24 nt, Human
uaauuuuugcacuuuuaguagaga

SEQ ID NO: 918522 - RNA, 21 nt, Human
uacagcacaucacccuagaca

SEQ ID NO: 918523 - RNA, 23 nt, Human
uacaggcaugcgccaccacgccc

SEQ ID NO: 918524 - RNA, 25 nt, Human
uacaucauuacuaccacauucaucc

SEQ ID NO: 918525 - RNA, 21 nt, Human
uacuguauacaaagaagaaaa

SEQ ID NO: 918526 - RNA, 22 nt, Human
uaggaagagaucuguuauaaua

SEQ ID NO: 918527 - RNA, 21 nt, Human
uaggauuacaggcaugcgcca

SEQ ID NO: 918528 - RNA, 22 nt, Human
uaggauuacaggcaugcgccac

SEQ ID NO: 918529 - RNA, 24 nt, Human
uaggauuacaggcaugcgccacca

SEQ ID NO: 918530 - RNA, 21 nt, Human
uaguagagacgggguuucacc

SEQ ID NO: 918531 - RNA, 24 nt, Human
uaguagagacgggguuucaccgug

SEQ ID NO: 918532 - RNA, 26 nt, Human
uaguagagacgggguuucaccguguu

SEQ ID NO: 918533 - RNA, 26 nt, Human
uaguagagacgggguuucaccguugg

SEQ ID NO: 918534 - RNA, 24 nt, Human
ucaccguguuagccaggauggucu

SEQ ID NO: 918535 - RNA, 24 nt, Human
ucacuacaaccuccaccuccuggg

SEQ ID NO: 918536 - RNA, 25 nt, Human
ucacuacaaccuccaccuccugggu

SEQ ID NO: 918537 - RNA, 27 nt, Human
ucacuacaaccuccaccuccuggguug

SEQ ID NO: 918538 - RNA, 22 nt, Human
ucagaauuguaaaaacaaaacu

SEQ ID NO: 918539 - RNA, 19 nt, Human
uccaguuugugaaccguug

SEQ ID NO: 918540 - RNA, 19 nt, Human
uccugaguagcuaggauua

SEQ ID NO: 918541 - RNA, 24 nt, Human
uccugaguagcuaggauuacaggc

SEQ ID NO: 918542 - RNA, 21 nt, Human
ucuacagcacaucacccuaga

SEQ ID NO: 918543 - RNA, 23 nt, Human
ucuacagcacaucacccuagaca

SEQ ID NO: 918544 - RNA, 21 nt, Human
ugagcauuuuaguacaaauaa

SEQ ID NO: 918545 - RNA, 23 nt, Human
ugccucagccuccugaguagcua

SEQ ID NO: 918546 - RNA, 24 nt, Human
ugccucagccuccugaguagcuag

SEQ ID NO: 918547 - RNA, 21 nt, Human
ugccugagcuggagugcaaug

SEQ ID NO: 918548 - RNA, 24 nt, Human
ugccugagcuggagugcaauggcg

SEQ ID NO: 918549 - RNA, 23 nt, Human
uggagugcaauggcgcaaucucg

SEQ ID NO: 918550 - RNA, 24 nt, Human
uggagugcaauggcgcaaucucgg

SEQ ID NO: 918551 - RNA, 24 nt, Human
uggcgcaaucucggcucacuacaa

SEQ ID NO: 918552 - RNA, 19 nt, Human
ugggcacagaggugaccug

SEQ ID NO: 918553 - RNA, 22 nt, Human
uguauaaaugacuuacuuuuaa

SEQ ID NO: 918554 - RNA, 22 nt, Human
uguugccugagcuggagugcaa

SEQ ID NO: 918555 - RNA, 21 nt, Human
uuaaacaaauauggguuacuc

SEQ ID NO: 918556 - RNA, 18 nt, Human
uuaguagagacgggguuu

SEQ ID NO: 918557 - RNA, 22 nt, Human
uuaguagagacgggguuucacc

SEQ ID NO: 918558 - RNA, 24 nt, Human
uuaguagagacgggguuucaccgu

SEQ ID NO: 918559 - RNA, 23 nt, Human
uugaagugauucuucugccucag

SEQ ID NO: 918560 - RNA, 19 nt, Human
uuucaccguguuagccagg

SEQ ID NO: 918561 - RNA, 24 nt, Human
uuuugcucuuguugccugagcugg

SEQ ID NO: 918562 - RNA, 20 nt, Human
uuuuugcacuuuuaguagag

SEQ ID NO: 918563 - RNA, 20 nt, Human
aggaagcgcgcccgccgccc

SEQ ID NO: 918564 - RNA, 24 nt, Human
aggcgggcuuugaggccugccccu

SEQ ID NO: 918565 - RNA, 24 nt, Human
cacucggccugcgccucgcugcgc

SEQ ID NO: 918566 - RNA, 19 nt, Human
ccacucggccugcgccucg

SEQ ID NO: 918567 - RNA, 19 nt, Human
ccccucgggcgggagugag

SEQ ID NO: 918568 - RNA, 22 nt, Human
ccucgggcgggagugagggagu

SEQ ID NO: 918569 - RNA, 25 nt, Human
cgaagccgccgugugaagucggggg

SEQ ID NO: 918570 - RNA, 19 nt, Human
cggccggguaggcgcgggg

SEQ ID NO: 918571 - RNA, 20 nt, Human
cggccggguaggcgcggggc

SEQ ID NO: 918572 - RNA, 19 nt, Human
cgggggaagcgggaaggag

SEQ ID NO: 918573 - RNA, 20 nt, Human
cugggcccgcguggucuccg

SEQ ID NO: 918574 - RNA, 20 nt, Human
gagcccgcgccgagggccag

SEQ ID NO: 918575 - RNA, 24 nt, Human
gcggggccaaggcgggcuuugagg

SEQ ID NO: 918576 - RNA, 21 nt, Human
ggagcccgcgccgagggccag

SEQ ID NO: 918577 - RNA, 19 nt, Human
ggcccacucggccugcgcc

SEQ ID NO: 918578 - RNA, 20 nt, Human
ggcgggagugagggaguugg

SEQ ID NO: 918579 - RNA, 18 nt, Human
gggcgggaaagcggggcc

SEQ ID NO: 918580 - RNA, 19 nt, Human
gggcgggagugagggaguu

SEQ ID NO: 918581 - RNA, 23 nt, Human
ucgcugggcccgcguggucuccg

SEQ ID NO: 918582 - RNA, 21 nt, Human
ugcgggcuccgggccguccgu

SEQ ID NO: 918583 - RNA, 18 nt, Human
uuuuuuuuuuuuuuuucg

SEQ ID NO: 918584 - RNA, 23 nt, Human
uuuuuuuuuuuuuuuucgcuggg

SEQ ID NO: 918585 - RNA, 21 nt, Human
uuuuuuuuuuuuuuuuucgcu

SEQ ID NO: 918586 - RNA, 24 nt, Human
uuuuuuuuuuuuuuuuuucgcugg

SEQ ID NO: 918587 - RNA, 22 nt, Human
aagcauaucuuuuagucaucag

SEQ ID NO: 918588 - RNA, 22 nt, Human
aauaaggcuuuuagcuucauau

SEQ ID NO: 918589 - RNA, 18 nt, Human
aaucaaacuuuaaacaau

SEQ ID NO: 918590 - RNA, 22 nt, Human
acaccuguucucauuuuuaaac

SEQ ID NO: 918591 - RNA, 23 nt, Human
accccaacaaauuaguuugauau

SEQ ID NO: 918592 - RNA, 19 nt, Human
accuuccuuacaccuacua

SEQ ID NO: 918593 - RNA, 22 nt, Human
agacacacacacacaaaaaaaa

SEQ ID NO: 918594 - RNA, 23 nt, Human
aguauacuaaauacucugcuaca

SEQ ID NO: 918595 - RNA, 22 nt, Human
auagcguguaauaaagcauauc

SEQ ID NO: 918596 - RNA, 22 nt, Human
auccaauuauacucuuaguuau

SEQ ID NO: 918597 - RNA, 23 nt, Human
augaaauuaaucaucaccuuuga

SEQ ID NO: 918598 - RNA, 21 nt, Human
auggagcuuaacauuuuagcc

SEQ ID NO: 918599 - RNA, 20 nt, Human
auuacagaauuuuaugugga

SEQ ID NO: 918600 - RNA, 20 nt, Human
caaaguacuaaugcagagac

SEQ ID NO: 918601 - RNA, 21 nt, Human
caaaguacuaaugcagagaca

SEQ ID NO: 918602 - RNA, 24 nt, Human
caaauaauugagaacaugcaaugu

SEQ ID NO: 918603 - RNA, 24 nt, Human
caaguaggauaaaucuaucaagua

SEQ ID NO: 918604 - RNA, 21 nt, Human
caccccuuuucccagccacua

SEQ ID NO: 918605 - RNA, 23 nt, Human
cacuuuguaaggucauuaaagcc

SEQ ID NO: 918606 - RNA, 23 nt, Human
cagagacacacacacacaaaaaa

SEQ ID NO: 918607 - RNA, 22 nt, Human
caggccuacugugaaaagcaaa

SEQ ID NO: 918608 - RNA, 24 nt, Human
cauaccacuaugaaaaaacuuacc

SEQ ID NO: 918609 - RNA, 23 nt, Human
cauccaugacuccuuaacugccc

SEQ ID NO: 918610 - RNA, 26 nt, Human
ccaaaacuucaaauuacacacccaag

SEQ ID NO: 918611 - RNA, 22 nt, Human
ccauccaugacuccuuaacugc

SEQ ID NO: 918612 - RNA, 21 nt, Human
ccucgcacaccccuuuuccca

SEQ ID NO: 918613 - RNA, 23 nt, Human
cgcaaauaauugagaacaugcaa

SEQ ID NO: 918614 - RNA, 19 nt, Human
cuacaccaagggaaaaaau

SEQ ID NO: 918615 - RNA, 22 nt, Human
cucacaccuguucucauuuuua

SEQ ID NO: 918616 - RNA, 19 nt, Human
cucgcacaccccuuuuccc

SEQ ID NO: 918617 - RNA, 22 nt, Human
cugcuacaaaauauuucuccca

SEQ ID NO: 918618 - RNA, 18 nt, Human
cuuggacaaaggcaacau

SEQ ID NO: 918619 - RNA, 20 nt, Human
cuuguaaaaucucuacccca

SEQ ID NO: 918620 - RNA, 21 nt, Human
gcaaagauauuucaguccaaa

SEQ ID NO: 918621 - RNA, 23 nt, Human
guacaauuaagcuauuauugacu

SEQ ID NO: 918622 - RNA, 23 nt, Human
gucuguuucuggcuuaugucacu

SEQ ID NO: 918623 - RNA, 21 nt, Human
gugaagaaauugucaucuaca

SEQ ID NO: 918624 - RNA, 20 nt, Human
guugugcuaucaaauacuag

SEQ ID NO: 918625 - RNA, 19 nt, Human
uaaaauuuucauccucauc

SEQ ID NO: 918626 - RNA, 20 nt, Human
uaagcuaauaaaacuucccc

SEQ ID NO: 918627 - RNA, 22 nt, Human
uaaguauuuuggaaaacucaca

SEQ ID NO: 918628 - RNA, 20 nt, Human
uaauauaaauaaggcuuuua

SEQ ID NO: 918629 - RNA, 18 nt, Human
uaauauagugaccucuag

SEQ ID NO: 918630 - RNA, 22 nt, Human
uacaccuacuacuaccacauug

SEQ ID NO: 918631 - RNA, 18 nt, Human
uacucacccgguugugcu

SEQ ID NO: 918632 - RNA, 19 nt, Human
uagaaccagaauagcauac

SEQ ID NO: 918633 - RNA, 23 nt, Human
uagaucccgcaaauaauugagaa

SEQ ID NO: 918634 - RNA, 19 nt, Human
uagcagcaugguuccaaau

SEQ ID NO: 918635 - RNA, 24 nt, Human
uagcauacuguauaauuuagugga

SEQ ID NO: 918636 - RNA, 21 nt, Human
uagcguguaauaaagcauauc

SEQ ID NO: 918637 - RNA, 21 nt, Human
uagugaccucuaguuccaucc

SEQ ID NO: 918638 - RNA, 23 nt, Human
ucaggccuacugugaaaagcaaa

SEQ ID NO: 918639 - RNA, 26 nt, Human
ucauuaaagccuaauugguccucaga

SEQ ID NO: 918640 - RNA, 19 nt, Human
ucauuuggggaagguaugc

SEQ ID NO: 918641 - RNA, 22 nt, Human
uccccaguuccccucgcacacc

SEQ ID NO: 918642 - RNA, 24 nt, Human
uccccaguuccccucgcacacccc

SEQ ID NO: 918643 - RNA, 21 nt, Human
ucgcacaccccuuuucccagc

SEQ ID NO: 918644 - RNA, 21 nt, Human
ucuuggguagcagcaugguuc

SEQ ID NO: 918645 - RNA, 25 nt, Human
ugaaaaaacuuaccuuccuuacacc

SEQ ID NO: 918646 - RNA, 18 nt, Human
ugaaaaaauacuuguguu

SEQ ID NO: 918647 - RNA, 18 nt, Human
ugaaaagcaaauacagac

SEQ ID NO: 918648 - RNA, 20 nt, Human
ugaaaagcaaauacagacug

SEQ ID NO: 918649 - RNA, 21 nt, Human
ugacuccuuaacugccccuga

SEQ ID NO: 918650 - RNA, 22 nt, Human
ugacuuguaaaaucucuacccc

SEQ ID NO: 918651 - RNA, 22 nt, Human
uggaaaaauaacaaaguacuaa

SEQ ID NO: 918652 - RNA, 25 nt, Human
uguaacugaacugcacauauaauau

SEQ ID NO: 918653 - RNA, 18 nt, Human
uguuccuacaccaaggga

SEQ ID NO: 918654 - RNA, 20 nt, Human
uuaaacaaucaggucccucu

SEQ ID NO: 918655 - RNA, 20 nt, Human
uuaaagccuaauugcuaaau

SEQ ID NO: 918656 - RNA, 22 nt, Human
uuccccucgcacaccccuuuuc

SEQ ID NO: 918657 - RNA, 20 nt, Human
uugcauaccacuaugaaaaa

SEQ ID NO: 918658 - RNA, 22 nt, Human
uugcauugaaaaaauacuugug

SEQ ID NO: 918659 - RNA, 25 nt, Human
uugcuaaaucaacuucuaaguauac

SEQ ID NO: 918660 - RNA, 20 nt, Human
uugcuguuuuguaaacucug

SEQ ID NO: 918661 - RNA, 23 nt, Human
uuguuacaguuacauauaugaau

SEQ ID NO: 918662 - RNA, 20 nt, Human
uuuuacacauuaagcauccc

SEQ ID NO: 918663 - RNA, 19 nt, Human
aaaaaaguguuuccuccca

SEQ ID NO: 918664 - RNA, 18 nt, Human
aaaagacccacaccagcc

SEQ ID NO: 918665 - RNA, 23 nt, Human
aaagaucuacaggggucagacaa

SEQ ID NO: 918666 - RNA, 24 nt, Human
aaagugcugggauuacaggcauga

SEQ ID NO: 918667 - RNA, 23 nt, Human
aacaauagugaaaaauugggggc

SEQ ID NO: 918668 - RNA, 25 nt, Human
aaccaccaaaagacugugagaacaa

SEQ ID NO: 918669 - RNA, 22 nt, Human
aaccgaaugccaacauucuacc

SEQ ID NO: 918670 - RNA, 22 nt, Human
aagacccacaccagccccagcc

SEQ ID NO: 918671 - RNA, 21 nt, Human
aagcacagugccuggcaugga

SEQ ID NO: 918672 - RNA, 24 nt, Human
aagcagcugggaauacaggcaugu

SEQ ID NO: 918673 - RNA, 23 nt, Human
aaggaagaaggcacugcaaggag

SEQ ID NO: 918674 - RNA, 23 nt, Human
aaggaucgcuugagccugggaga

SEQ ID NO: 918675 - RNA, 22 nt, Human
aaggucaaaaaaccaugggcuc

SEQ ID NO: 918676 - RNA, 19 nt, Human
aagugcugggauuacaggc

SEQ ID NO: 918677 - RNA, 21 nt, Human
aagugcugggauuacaggcau

SEQ ID NO: 918678 - RNA, 24 nt, Human
aaugcaguggcaccaucucggcuc

SEQ ID NO: 918679 - RNA, 19 nt, Human
aaugcccccauaaagcaau

SEQ ID NO: 918680 - RNA, 24 nt, Human
acagagcaaggcccugucuugggg

SEQ ID NO: 918681 - RNA, 21 nt, Human
acagagcgcugcacagcacca

SEQ ID NO: 918682 - RNA, 19 nt, Human
acagggaaaacaugauaca

SEQ ID NO: 918683 - RNA, 26 nt, Human
accaggcugccccugacaaaaaaagu

SEQ ID NO: 918684 - RNA, 22 nt, Human
accauguuggccaggcuggucu

SEQ ID NO: 918685 - RNA, 22 nt, Human
acccacaccagccccagccuca

SEQ ID NO: 918686 - RNA, 26 nt, Human
accgaaugccaacauucuaccaacca

SEQ ID NO: 918687 - RNA, 20 nt, Human
accgaaugccaacauucuag

SEQ ID NO: 918688 - RNA, 22 nt, Human
accuagugguggcagggagugu

SEQ ID NO: 918689 - RNA, 26 nt, Human
acgccuggcuauuauuauuauuuuuu

SEQ ID NO: 918690 - RNA, 23 nt, Human
acuccagccugggagacagagca

SEQ ID NO: 918691 - RNA, 18 nt, Human
acugcacuccagccuggg

SEQ ID NO: 918692 - RNA, 24 nt, Human
acugcacuccagccugggagacag

SEQ ID NO: 918693 - RNA, 19 nt, Human
acuuugcuguuugagaucu

SEQ ID NO: 918694 - RNA, 18 nt, Human
agacucuggucccuccag

SEQ ID NO: 918695 - RNA, 22 nt, Human
agacuguuguacugagcaacca

SEQ ID NO: 918696 - RNA, 18 nt, Human
agaggucuuaccugggcu

SEQ ID NO: 918697 - RNA, 20 nt, Human
agagucaaaaggugcuucuc

SEQ ID NO: 918698 - RNA, 23 nt, Human
agauaauucaccauguuggccag

SEQ ID NO: 918699 - RNA, 24 nt, Human
agauaauucaccauguuggccagg

SEQ ID NO: 918700 - RNA, 19 nt, Human
agccaccacacuuggccua

SEQ ID NO: 918701 - RNA, 21 nt, Human
agccaccacacuuggccuaaa

SEQ ID NO: 918702 - RNA, 23 nt, Human
aggagucacagauuauuaaaacu

SEQ ID NO: 918703 - RNA, 22 nt, Human
aggcagaaggaucgcuugagcc

SEQ ID NO: 918704 - RNA, 24 nt, Human
aggcagaaggaucgcuugagccug

SEQ ID NO: 918705 - RNA, 18 nt, Human
aggcagcagagcauggca

SEQ ID NO: 918706 - RNA, 18 nt, Human
aggcaguggggauggcuc

SEQ ID NO: 918707 - RNA, 18 nt, Human
aggcugaggcagaaggau

SEQ ID NO: 918708 - RNA, 20 nt, Human
aggcugaggcagaaggaucg

SEQ ID NO: 918709 - RNA, 24 nt, Human
aggcugaggcagaaggaucgcuug

SEQ ID NO: 918710 - RNA, 23 nt, Human
aggcugcaguaagccaugaucau

SEQ ID NO: 918711 - RNA, 19 nt, Human
aggugauuuggagcugggc

SEQ ID NO: 918712 - RNA, 21 nt, Human
agugguggcagggaguguacg

SEQ ID NO: 918713 - RNA, 24 nt, Human
aucaugccacugcacuccagccug

SEQ ID NO: 918714 - RNA, 19 nt, Human
aucccccaagccccagaaa

SEQ ID NO: 918715 - RNA, 22 nt, Human
augauuuucaaaaaccacagag

SEQ ID NO: 918716 - RNA, 21 nt, Human
augugaaucagcucaugcccc

SEQ ID NO: 918717 - RNA, 21 nt, Human
auucuccugccucagccuccc

SEQ ID NO: 918718 - RNA, 24 nt, Human
auuuuuuuguauuuuuaguagaga

SEQ ID NO: 918719 - RNA, 22 nt, Human
caaagugcugggauuacaggca

SEQ ID NO: 918720 - RNA, 23 nt, Human
caaagugcugggauuacaggcau

SEQ ID NO: 918721 - RNA, 23 nt, Human
caaccuccaccucccagguucaa

SEQ ID NO: 918722 - RNA, 20 nt, Human
caacuaaaagcuuccugcca

SEQ ID NO: 918723 - RNA, 24 nt, Human
caagacuguuguacugagcaacca

SEQ ID NO: 918724 - RNA, 22 nt, Human
caagccauucuccugccucagc

SEQ ID NO: 918725 - RNA, 22 nt, Human
caagccccagaaauggccuagg

SEQ ID NO: 918726 - RNA, 23 nt, Human
caaugcaauggccuuugucucuu

SEQ ID NO: 918727 - RNA, 21 nt, Human
caccauguuggccaggcuggu

SEQ ID NO: 918728 - RNA, 24 nt, Human
caccauguuggccaggcuggucuu

SEQ ID NO: 918729 - RNA, 27 nt, Human
caccauguuggccaggcuggucuugaa

SEQ ID NO: 918730 - RNA, 21 nt, Human
caccucaagugaucugcccac

SEQ ID NO: 918731 - RNA, 24 nt, Human
caccucaagugaucugcccaccuc

SEQ ID NO: 918732 - RNA, 19 nt, Human
caccucccagguucaagcc

SEQ ID NO: 918733 - RNA, 19 nt, Human
caccuugaaaagcagccaa

SEQ ID NO: 918734 - RNA, 23 nt, Human
cacuccagccugggagacagagc

SEQ ID NO: 918735 - RNA, 21 nt, Human
cacucccucuuuuugcuccca

SEQ ID NO: 918736 - RNA, 21 nt, Human
cacugcaaccuccaccuccca

SEQ ID NO: 918737 - RNA, 18 nt, Human
cacugcacuccagccugg

SEQ ID NO: 918738 - RNA, 19 nt, Human
cacugcacuccagccuggg

SEQ ID NO: 918739 - RNA, 22 nt, Human
cacugcacuccagccugggaga

SEQ ID NO: 918740 - RNA, 24 nt, Human
cacugcacuccagccugggagaca

SEQ ID NO: 918741 - RNA, 25 nt, Human
cacugcacuccagccugggagacag

SEQ ID NO: 918742 - RNA, 19 nt, Human
cacuuagucgcccacagag

SEQ ID NO: 918743 - RNA, 25 nt, Human
cagcacaggacagcauucauccccc

SEQ ID NO: 918744 - RNA, 18 nt, Human
cagcaucccaggcugcuc

SEQ ID NO: 918745 - RNA, 21 nt, Human
cagcaucccaggcugcucaga

SEQ ID NO: 918746 - RNA, 20 nt, Human
cagcauucaucccccaagcc

SEQ ID NO: 918747 - RNA, 24 nt, Human
cagcucagacucuggucccuccag

SEQ ID NO: 918748 - RNA, 18 nt, Human
cagcugggaauacaggca

SEQ ID NO: 918749 - RNA, 22 nt, Human
caggccuggcuggaaggaccag

SEQ ID NO: 918750 - RNA, 18 nt, Human
cagguaaacaaggaagaa

SEQ ID NO: 918751 - RNA, 23 nt, Human
caguagaagguaagguggcugau

SEQ ID NO: 918752 - RNA, 22 nt, Human
caguuaaggucacuuuagguac

SEQ ID NO: 918753 - RNA, 18 nt, Human
caucccccaagccccaga

SEQ ID NO: 918754 - RNA, 22 nt, Human
caugauaguguggcuugaugga

SEQ ID NO: 918755 - RNA, 18 nt, Human
caugcagucucagcuacc

SEQ ID NO: 918756 - RNA, 20 nt, Human
caugcagucucagcuaccag

SEQ ID NO: 918757 - RNA, 24 nt, Human
cauguuggccaggcuggucuugaa

SEQ ID NO: 918758 - RNA, 23 nt, Human
cauucuaccaaccaggccccacu

SEQ ID NO: 918759 - RNA, 21 nt, Human
ccaaaacacucaugacuuaga

SEQ ID NO: 918760 - RNA, 18 nt, Human
ccaacagggaaaacauga

SEQ ID NO: 918761 - RNA, 19 nt, Human
ccacugcacuccagccugg

SEQ ID NO: 918762 - RNA, 20 nt, Human
ccacugcacuccagccuggg

SEQ ID NO: 918763 - RNA, 22 nt, Human
ccacugcacuccagccugggag

SEQ ID NO: 918764 - RNA, 24 nt, Human
ccacugcacuccagccugggagac

SEQ ID NO: 918765 - RNA, 21 nt, Human
ccagccucauccacauucagu

SEQ ID NO: 918766 - RNA, 20 nt, Human
ccauuuuauagguaagaaaa

SEQ ID NO: 918767 - RNA, 25 nt, Human
cccaagccccagaaauggccuagga

SEQ ID NO: 918768 - RNA, 25 nt, Human
cccacaccagccccagccucaucca

SEQ ID NO: 918769 - RNA, 20 nt, Human
cccagguucaagccauucuc

SEQ ID NO: 918770 - RNA, 21 nt, Human
ccccaagccccagaaauggcc

SEQ ID NO: 918771 - RNA, 18 nt, Human
cccccaagccccagaaau

SEQ ID NO: 918772 - RNA, 18 nt, Human
cccgggaacccgagccag

SEQ ID NO: 918773 - RNA, 24 nt, Human
ccucccagguucaagccauucucc

SEQ ID NO: 918774 - RNA, 18 nt, Human
ccuucuggcauaggcaga

SEQ ID NO: 918775 - RNA, 22 nt, Human
ccuuugaacaaccugucgguuu

SEQ ID NO: 918776 - RNA, 23 nt, Human
cgagaagcagucaaauuaaucaa

SEQ ID NO: 918777 - RNA, 24 nt, Human
cgcucuguugcccaggcuggaaug

SEQ ID NO: 918778 - RNA, 24 nt, Human
cggcauguaggcuuuguuucuugg

SEQ ID NO: 918779 - RNA, 22 nt, Human
cuagcucacagaacacaacuga

SEQ ID NO: 918780 - RNA, 27 nt, Human
cucaagugaucugcccaccucggccuc

SEQ ID NO: 918781 - RNA, 24 nt, Human
cucacugcaaccuccaccucccag

SEQ ID NO: 918782 - RNA, 21 nt, Human
cucgcaaagugcugggauuac

SEQ ID NO: 918783 - RNA, 22 nt, Human
cucuccuguauccccaguaccu

SEQ ID NO: 918784 - RNA, 19 nt, Human
cucugaaccaggcugcccc

SEQ ID NO: 918785 - RNA, 23 nt, Human
cucuguugcccaggcuggaaugc

SEQ ID NO: 918786 - RNA, 23 nt, Human
cugcaaccuccaccucccagguu

SEQ ID NO: 918787 - RNA, 24 nt, Human
cugcaaccuccaccucccagguuc

SEQ ID NO: 918788 - RNA, 20 nt, Human
cugcaaggagcucugggccu

SEQ ID NO: 918789 - RNA, 20 nt, Human
cugcacagcaccacaaccga

SEQ ID NO: 918790 - RNA, 22 nt, Human
cugcacagcaccacaaccgaua

SEQ ID NO: 918791 - RNA, 23 nt, Human
cugccucagccucccaagcagcu

SEQ ID NO: 918792 - RNA, 21 nt, Human
cugcucugaccugcugcucgg

SEQ ID NO: 918793 - RNA, 19 nt, Human
cugcuuagaguuggguggc

SEQ ID NO: 918794 - RNA, 24 nt, Human
cuggaguccuagucuaggggagcc

SEQ ID NO: 918795 - RNA, 18 nt, Human
cuggccagcuagagaggu

SEQ ID NO: 918796 - RNA, 19 nt, Human
cuggccuccuggcugcucu

SEQ ID NO: 918797 - RNA, 19 nt, Human
cuguuuucucugccaggaa

SEQ ID NO: 918798 - RNA, 26 nt, Human
cuguuuucucugccaggaaugugcuc

SEQ ID NO: 918799 - RNA, 29 nt, Human
cuguuuucucugccaggaaugugcucccc

SEQ ID NO: 918800 - RNA, 20 nt, Human
cuuuacgcuugauucucucc

SEQ ID NO: 918801 - RNA, 18 nt, Human
gaaaacaauaaacuaugg

SEQ ID NO: 918802 - RNA, 19 nt, Human
gaaggcacugcaaggagcu

SEQ ID NO: 918803 - RNA, 24 nt, Human
gaauuuuagaaccacaaggucaaa

SEQ ID NO: 918804 - RNA, 20 nt, Human
gacagagcaaggcccugucu

SEQ ID NO: 918805 - RNA, 22 nt, Human
gagauaauucaccauguuggcc

SEQ ID NO: 918806 - RNA, 24 nt, Human
gagauaauucaccauguuggccag

SEQ ID NO: 918807 - RNA, 20 nt, Human
gaggacggcugggagaacag

SEQ ID NO: 918808 - RNA, 21 nt, Human
gaucaugccacugcacuccag

SEQ ID NO: 918809 - RNA, 18 nt, Human
gaucgcuugagccuggga

SEQ ID NO: 918810 - RNA, 18 nt, Human
gauuacaggcaugagcca

SEQ ID NO: 918811 - RNA, 21 nt, Human
gauuacaggcaugagccacca

SEQ ID NO: 918812 - RNA, 22 nt, Human
gauuacaggcaugagccaccac

SEQ ID NO: 918813 - RNA, 19 nt, Human
gcaaagugcugggauuaca

SEQ ID NO: 918814 - RNA, 24 nt, Human
gcaaagugcugggauuacaggcau

SEQ ID NO: 918815 - RNA, 24 nt, Human
gcacuccagccugggagacagagc

SEQ ID NO: 918816 - RNA, 19 nt, Human
gccaugaucaugccacugc

SEQ ID NO: 918817 - RNA, 20 nt, Human
gcccaggcuggaaugcagug

SEQ ID NO: 918818 - RNA, 21 nt, Human
gccccagccucauccacauuc

SEQ ID NO: 918819 - RNA, 25 nt, Human
gccugccucuccagccaugcuggcc

SEQ ID NO: 918820 - RNA, 19 nt, Human
gcggcgcacagucggggag

SEQ ID NO: 918821 - RNA, 21 nt, Human
gcgugaguggcacuuagucgc

SEQ ID NO: 918822 - RNA, 21 nt, Human
gcucgguucccugccuaugcc

SEQ ID NO: 918823 - RNA, 23 nt, Human
gcugcacagcaccacaaccgaua

SEQ ID NO: 918824 - RNA, 20 nt, Human
gcuggaaugcaguggcacca

SEQ ID NO: 918825 - RNA, 20 nt, Human
gcuggacugcuuugccagug

SEQ ID NO: 918826 - RNA, 23 nt, Human
ggaauuuuagaaccacaagguca

SEQ ID NO: 918827 - RNA, 23 nt, Human
ggagcucugggccuggcucagug

SEQ ID NO: 918828 - RNA, 19 nt, Human
ggauuacaggcaugagcca

SEQ ID NO: 918829 - RNA, 20 nt, Human
ggccaggcaguggggauggc

SEQ ID NO: 918830 - RNA, 21 nt, Human
ggccaggcaguggggauggcu

SEQ ID NO: 918831 - RNA, 24 nt, Human
ggcuggucuugaacuccucaccuc

SEQ ID NO: 918832 - RNA, 23 nt, Human
gggacaccuugaaaagcagccaa

SEQ ID NO: 918833 - RNA, 18 nt, Human
gggcucccucaucugcag

SEQ ID NO: 918834 - RNA, 21 nt, Human
gggcucccucaucugcagcuc

SEQ ID NO: 918835 - RNA, 22 nt, Human
gguggcugaucauuuuuccaua

SEQ ID NO: 918836 - RNA, 19 nt, Human
guccaggcugcagaauguc

SEQ ID NO: 918837 - RNA, 21 nt, Human
gugaucugcccaccucggccu

SEQ ID NO: 918838 - RNA, 20 nt, Human
guggauggcaaaugaauucc

SEQ ID NO: 918839 - RNA, 19 nt, Human
uaacaaauucacuucuggg

SEQ ID NO: 918840 - RNA, 20 nt, Human
uaagaaaauugggucagagg

SEQ ID NO: 918841 - RNA, 19 nt, Human
uaagagaaugcccccauaa

SEQ ID NO: 918842 - RNA, 21 nt, Human
uaagccucaugguguuggcag

SEQ ID NO: 918843 - RNA, 18 nt, Human
uaaguaaaacacuaggac

SEQ ID NO: 918844 - RNA, 21 nt, Human
uacaggcaugagccaccacac

SEQ ID NO: 918845 - RNA, 22 nt, Human
uacaggcaugugccaccacgcc

SEQ ID NO: 918846 - RNA, 18 nt, Human
uacaggcuuacaaccuag

SEQ ID NO: 918847 - RNA, 21 nt, Human
uaccaacagggaaaacaugau

SEQ ID NO: 918848 - RNA, 19 nt, Human
uaggaaccugcaaguccua

SEQ ID NO: 918849 - RNA, 20 nt, Human
uauccaggcuacauaccaac

SEQ ID NO: 918850 - RNA, 25 nt, Human
ucaagccauucuccugccucagccu

SEQ ID NO: 918851 - RNA, 19 nt, Human
ucacccuuucucucuccaa

SEQ ID NO: 918852 - RNA, 18 nt, Human
ucaccucaagugaucugc

SEQ ID NO: 918853 - RNA, 23 nt, Human
ucacugcaaccuccaccucccag

SEQ ID NO: 918854 - RNA, 24 nt, Human
ucacugcaaccuccaccucccagg

SEQ ID NO: 918855 - RNA, 27 nt, Human
ucacugcaaccuccaccucccagguuc

SEQ ID NO: 918856 - RNA, 23 nt, Human
ucagaaugugaaucagcucaugc

SEQ ID NO: 918857 - RNA, 20 nt, Human
ucagccucccaagcagcugg

SEQ ID NO: 918858 - RNA, 23 nt, Human
ucagcucaugccccucuucugcu

SEQ ID NO: 918859 - RNA, 23 nt, Human
ucaugccacugcacuccagccug

SEQ ID NO: 918860 - RNA, 23 nt, Human
uccaacuaaaagcuuccugccau

SEQ ID NO: 918861 - RNA, 21 nt, Human
uccacauucaguuaaggucac

SEQ ID NO: 918862 - RNA, 24 nt, Human
uccaccucccagguucaagccauu

SEQ ID NO: 918863 - RNA, 21 nt, Human
ucccagggcuggggaauaaau

SEQ ID NO: 918864 - RNA, 24 nt, Human
ucccagggcuggggaauaaauaag

SEQ ID NO: 918865 - RNA, 21 nt, Human
ucccagguucaagccauucuc

SEQ ID NO: 918866 - RNA, 24 nt, Human
ucccagguucaagccauucuccug

SEQ ID NO: 918867 - RNA, 22 nt, Human
uccugccauggccguccaggcu

SEQ ID NO: 918868 - RNA, 24 nt, Human
uccuucagaaugugaaucagcuca

SEQ ID NO: 918869 - RNA, 24 nt, Human
ucgcaaagugcugggauuacaggc

SEQ ID NO: 918870 - RNA, 23 nt, Human
ucgcuugagccugggagaucaag

SEQ ID NO: 918871 - RNA, 24 nt, Human
ucgcuugagccugggagaucaagg

SEQ ID NO: 918872 - RNA, 22 nt, Human
ucggcccgggaacccgagccag

SEQ ID NO: 918873 - RNA, 24 nt, Human
ucgguucccugccuaugccugccu

SEQ ID NO: 918874 - RNA, 19 nt, Human
ucuccagccaugcuggccu

SEQ ID NO: 918875 - RNA, 20 nt, Human
ucuccaucuuuggcagguga

SEQ ID NO: 918876 - RNA, 23 nt, Human
ucuccugccucagccucccaagc

SEQ ID NO: 918877 - RNA, 19 nt, Human
ucucgcucuguugcccagg

SEQ ID NO: 918878 - RNA, 23 nt, Human
ucucgcucuguugcccaggcugg

SEQ ID NO: 918879 - RNA, 24 nt, Human
ucucgcucuguugcccaggcugga

SEQ ID NO: 918880 - RNA, 26 nt, Human
ucucgcucuguugcccaggcuggaau

SEQ ID NO: 918881 - RNA, 27 nt, Human
ucucgcucuguugcccaggcuggaaug

SEQ ID NO: 918882 - RNA, 26 nt, Human
ucugcagcuccuucucugggggccgc

SEQ ID NO: 918883 - RNA, 22 nt, Human
ucugcccaccucggccucgcaa

SEQ ID NO: 918884 - RNA, 19 nt, Human
ucugcuuucacccuuucuc

SEQ ID NO: 918885 - RNA, 22 nt, Human
ucuguacaguuucuccugcuua

SEQ ID NO: 918886 - RNA, 18 nt, Human
ucuguugcccaggcugga

SEQ ID NO: 918887 - RNA, 24 nt, Human
ucuguugcccaggcuggaaugcag

SEQ ID NO: 918888 - RNA, 18 nt, Human
ugaaaagcagccaaaaga

SEQ ID NO: 918889 - RNA, 22 nt, Human
ugaaaagcagccaaaagaccca

SEQ ID NO: 918890 - RNA, 24 nt, Human
ugaaaagcagccaaaagacccaca

SEQ ID NO: 918891 - RNA, 27 nt, Human
ugaaaagcagccaaaagacccacacca

SEQ ID NO: 918892 - RNA, 22 nt, Human
ugaacaaacaccugcugaaugc

SEQ ID NO: 918893 - RNA, 18 nt, Human
ugaaggcuccagcugcag

SEQ ID NO: 918894 - RNA, 23 nt, Human
ugaaggcuccagcugcaggagga

SEQ ID NO: 918895 - RNA, 18 nt, Human
ugacagcuccuauuuccc

SEQ ID NO: 918896 - RNA, 23 nt, Human
ugacagcucuucagagaggucuu

SEQ ID NO: 918897 - RNA, 20 nt, Human
ugaccucugagcucugaacc

SEQ ID NO: 918898 - RNA, 21 nt, Human
ugaccugcugcucgguucccu

SEQ ID NO: 918899 - RNA, 24 nt, Human
ugagccugggagaucaaggcugca

SEQ ID NO: 918900 - RNA, 24 nt, Human
ugagcucugaaccaggcugccccu

SEQ ID NO: 918901 - RNA, 25 nt, Human
ugaggcagaaggaucgcuugagccu

SEQ ID NO: 918902 - RNA, 19 nt, Human
ugaggcuugagagcaaguc

SEQ ID NO: 918903 - RNA, 21 nt, Human
ugaguggcacuuagucgccca

SEQ ID NO: 918904 - RNA, 22 nt, Human
ugaucugcccaccucggccucg

SEQ ID NO: 918905 - RNA, 22 nt, Human
ugcaaauuccuugagaacaaag

SEQ ID NO: 918906 - RNA, 21 nt, Human
ugcaaggagcucugggccugg

SEQ ID NO: 918907 - RNA, 27 nt, Human
ugcaaucccggagcaccucuggcugcc

SEQ ID NO: 918908 - RNA, 20 nt, Human
ugcaauggccuuugucucuu

SEQ ID NO: 918909 - RNA, 22 nt, Human
ugcaguaagccaugaucaugcc

SEQ ID NO: 918910 - RNA, 22 nt, Human
ugcaguggcaccaucucggcuc

SEQ ID NO: 918911 - RNA, 24 nt, Human
ugcccaggcuggaaugcaguggca

SEQ ID NO: 918912 - RNA, 24 nt, Human
ugccucagccucccaagcagcugg

SEQ ID NO: 918913 - RNA, 23 nt, Human
ugccugccucuccagccaugcug

SEQ ID NO: 918914 - RNA, 19 nt, Human
uggaaacuggcucugggag

SEQ ID NO: 918915 - RNA, 24 nt, Human
uggaaugcaguggcaccaucucgg

SEQ ID NO: 918916 - RNA, 22 nt, Human
uggaccagaagacggaggcugg

SEQ ID NO: 918917 - RNA, 19 nt, Human
uggaggugacgagcaacga

SEQ ID NO: 918918 - RNA, 19 nt, Human
uggaguccuagucuagggg

SEQ ID NO: 918919 - RNA, 24 nt, Human
uggagucucgcucuguugcccagg

SEQ ID NO: 918920 - RNA, 19 nt, Human
uggcaccaucucggcucac

SEQ ID NO: 918921 - RNA, 18 nt, Human
uggcauggaggugacgag

SEQ ID NO: 918922 - RNA, 24 nt, Human
uggccaggcuggucuugaacuccu

SEQ ID NO: 918923 - RNA, 22 nt, Human
uggcucuggccaggcagugggg

SEQ ID NO: 918924 - RNA, 23 nt, Human
uggcucuugagggccacauuggg

SEQ ID NO: 918925 - RNA, 18 nt, Human
ugggaauacaggcaugug

SEQ ID NO: 918926 - RNA, 22 nt, Human
ugggaauacaggcaugugccac

SEQ ID NO: 918927 - RNA, 24 nt, Human
ugggaauacaggcaugugccacca

SEQ ID NO: 918928 - RNA, 18 nt, Human
ugggauuacaggcaugag

SEQ ID NO: 918929 - RNA, 19 nt, Human
ugggauuacaggcaugagc

SEQ ID NO: 918930 - RNA, 22 nt, Human
ugggauuacaggcaugagccac

SEQ ID NO: 918931 - RNA, 23 nt, Human
ugggauuacaggcaugagccacc

SEQ ID NO: 918932 - RNA, 24 nt, Human
ugggauuacaggcaugagccacca

SEQ ID NO: 918933 - RNA, 24 nt, Human
ugggauuacaggcaugagccacca

SEQ ID NO: 918934 - RNA, 20 nt, Human
ugggcagccuugggaaaauu

SEQ ID NO: 918935 - RNA, 22 nt, Human
uguacaguuucuccugcuuaga

SEQ ID NO: 918936 - RNA, 19 nt, Human
ugugcagaaagagaaggau

SEQ ID NO: 918937 - RNA, 22 nt, Human
ugugccuaguguaaggcugugg

SEQ ID NO: 918938 - RNA, 19 nt, Human
uuagaguuggguggcagcu

SEQ ID NO: 918939 - RNA, 21 nt, Human
uuaguagagauaauucaccau

SEQ ID NO: 918940 - RNA, 22 nt, Human
uuaguagagauaauucaccaug

SEQ ID NO: 918941 - RNA, 24 nt, Human
uucaaauaacaauagugaaaaauu

SEQ ID NO: 918942 - RNA, 21 nt, Human
uucaagccauucuccugccuc

SEQ ID NO: 918943 - RNA, 18 nt, Human
uucaccauguuggccagg

SEQ ID NO: 918944 - RNA, 20 nt, Human
uucaccauguuggccaggcu

SEQ ID NO: 918945 - RNA, 20 nt, Human
uucagcaucccaggcugcuc

SEQ ID NO: 918946 - RNA, 18 nt, Human
uucccagaagagcagaaa

SEQ ID NO: 918947 - RNA, 20 nt, Human
uucccagaagagcagaaagc

SEQ ID NO: 918948 - RNA, 21 nt, Human
uuccuguaucucuccaacuaa

SEQ ID NO: 918949 - RNA, 19 nt, Human
uucuuggguaaccuccccu

SEQ ID NO: 918950 - RNA, 19 nt, Human
uugagaccaaaacacucau

SEQ ID NO: 918951 - RNA, 18 nt, Human
uuggcaggugagaagagg

SEQ ID NO: 918952 - RNA, 19 nt, Human
uuggcaggugagaagagga

SEQ ID NO: 918953 - RNA, 22 nt, Human
uuggggggaaaaaaaauuaggc

SEQ ID NO: 918954 - RNA, 24 nt, Human
uugggucagaggaaaaagugcuag

SEQ ID NO: 918955 - RNA, 22 nt, Human
uuuaguagagauaauucaccau

SEQ ID NO: 918956 - RNA, 24 nt, Human
uuuauaauuaagagcauuuaucca

SEQ ID NO: 918957 - RNA, 21 nt, Human
uuuuuguauuuuuaguagaga

SEQ ID NO: 918958 - RNA, 21 nt, Human
uuuuuuguauuuuuaguagag

SEQ ID NO: 918959 - RNA, 24 nt, Human
uuuuuuguauuuuuaguagagaua

SEQ ID NO: 918960 - RNA, 24 nt, Human
aagggcccacacagcagagaacag

SEQ ID NO: 918961 - RNA, 20 nt, Human
aaugaagggguggcucccaa

SEQ ID NO: 918962 - RNA, 25 nt, Human
acuuuuuuuaaaaaaugaaggggug

SEQ ID NO: 918963 - RNA, 21 nt, Human
agaaggccccggccgucgguc

SEQ ID NO: 918964 - RNA, 21 nt, Human
agagaacagcagaggacagaa

SEQ ID NO: 918965 - RNA, 19 nt, Human
agaggcaggcccggcugca

SEQ ID NO: 918966 - RNA, 20 nt, Human
caagaccucagaccgucaga

SEQ ID NO: 918967 - RNA, 20 nt, Human
caagccaggggccggggagc

SEQ ID NO: 918968 - RNA, 23 nt, Human
caagccaggggccggggagccgg

SEQ ID NO: 918969 - RNA, 23 nt, Human
cacaaguccucccugcugggccu

SEQ ID NO: 918970 - RNA, 22 nt, Human
cacacagcagagaacagcagag

SEQ ID NO: 918971 - RNA, 21 nt, Human
cagcuccgaccugcgcccaag

SEQ ID NO: 918972 - RNA, 24 nt, Human
ccacucagaggcaggcccggcugc

SEQ ID NO: 918973 - RNA, 24 nt, Human
cccaaaagcuaccgcugagcuucu

SEQ ID NO: 918974 - RNA, 22 nt, Human
cccaagccaggggccggggagc

SEQ ID NO: 918975 - RNA, 19 nt, Human
cccuggcuggcuccucucu

SEQ ID NO: 918976 - RNA, 25 nt, Human
cccuggcuggcuccucucuccuuuc

SEQ ID NO: 918977 - RNA, 22 nt, Human
ccggcccacccagcuccgaccu

SEQ ID NO: 918978 - RNA, 23 nt, Human
ccggcccacccagcuccgaccug

SEQ ID NO: 918979 - RNA, 21 nt, Human
ccgucagaaggccccggccgu

SEQ ID NO: 918980 - RNA, 21 nt, Human
ccucagaccgucagaaggccc

SEQ ID NO: 918981 - RNA, 22 nt, Human
ccucagaccgucagaaggcccc

SEQ ID NO: 918982 - RNA, 23 nt, Human
ccucccuggcuggcuccucucuc

SEQ ID NO: 918983 - RNA, 23 nt, Human
ccucgcccucuuauccuuccccc

SEQ ID NO: 918984 - RNA, 20 nt, Human
ccucucuccuuucccaccca

SEQ ID NO: 918985 - RNA, 18 nt, Human
ccucuuauccuucccccc

SEQ ID NO: 918986 - RNA, 21 nt, Human
cgagaggacgcucuccuggug

SEQ ID NO: 918987 - RNA, 19 nt, Human
cgaugagcuccucgcccuc

SEQ ID NO: 918988 - RNA, 24 nt, Human
cgcccaagccaggggccggggagc

SEQ ID NO: 918989 - RNA, 20 nt, Human
cggagcauggacugagaagc

SEQ ID NO: 918990 - RNA, 20 nt, Human
cggucacagagaaauacuuu

SEQ ID NO: 918991 - RNA, 21 nt, Human
cguccugcuucccaaaagcua

SEQ ID NO: 918992 - RNA, 24 nt, Human
cuaagacuuuaagggcccacacag

SEQ ID NO: 918993 - RNA, 19 nt, Human
cucccugcugggccugguc

SEQ ID NO: 918994 - RNA, 27 nt, Human
cucccuggcuggcuccucucuccuuuc

SEQ ID NO: 918995 - RNA, 22 nt, Human
cuccgaccugcgcccaagaagc

SEQ ID NO: 918996 - RNA, 18 nt, Human
cuccucucuccuuuccca

SEQ ID NO: 918997 - RNA, 23 nt, Human
cuccucucuccuuucccacccaa

SEQ ID NO: 918998 - RNA, 18 nt, Human
cuggcccaagcaagaccu

SEQ ID NO: 918999 - RNA, 19 nt, Human
gauucauguagaaaaucac

SEQ ID NO: 919000 - RNA, 19 nt, Human
gcauggacugagaagcaag

SEQ ID NO: 919001 - RNA, 22 nt, Human
gcccacacagcagagaacagca

SEQ ID NO: 919002 - RNA, 20 nt, Human
gcccucuuauccuucccccc

SEQ ID NO: 919003 - RNA, 25 nt, Human
ggcccacccagcuccgaccugcgcc

SEQ ID NO: 919004 - RNA, 18 nt, Human
gggcccacacagcagaga

SEQ ID NO: 919005 - RNA, 18 nt, Human
guccugcuucccaaaagc

SEQ ID NO: 919006 - RNA, 23 nt, Human
uagaaaaucacaaagccuucucg

SEQ ID NO: 919007 - RNA, 20 nt, Human
ucacacucagaauuuaauuu

SEQ ID NO: 919008 - RNA, 21 nt, Human
ucacagagaaauacuuuuuuu

SEQ ID NO: 919009 - RNA, 24 nt, Human
ucacugcagcugccccucccuggc

SEQ ID NO: 919010 - RNA, 21 nt, Human
ucccaaaagcuaccgcugagc

SEQ ID NO: 919011 - RNA, 20 nt, Human
ucccugcugggccuggucac

SEQ ID NO: 919012 - RNA, 23 nt, Human
uccgcggaccgugacaggaggug

SEQ ID NO: 919013 - RNA, 22 nt, Human
ucuuggcuaagacuuuaagggc

SEQ ID NO: 919014 - RNA, 23 nt, Human
ugaagggguggcucccaaacgcc

SEQ ID NO: 919015 - RNA, 18 nt, Human
ugaauggagggagcagaa

SEQ ID NO: 919016 - RNA, 23 nt, Human
ugacgguggcagaacugcggcac

SEQ ID NO: 919017 - RNA, 18 nt, Human
ugagcuccucgcccucuu

SEQ ID NO: 919018 - RNA, 19 nt, Human
uggagggagcagaaaucuc

SEQ ID NO: 919019 - RNA, 20 nt, Human
uggcccaagcaagaccucag

SEQ ID NO: 919020 - RNA, 23 nt, Human
uggcccaagcaagaccucagacc

SEQ ID NO: 919021 - RNA, 19 nt, Human
uggcuccucucuccuuucc

SEQ ID NO: 919022 - RNA, 18 nt, Human
ugucacagggcuaugucu

SEQ ID NO: 919023 - RNA, 18 nt, Human
ugucacagggcuaugucu

SEQ ID NO: 919024 - RNA, 20 nt, Human
uucacacucagaauuuaauu

SEQ ID NO: 919025 - RNA, 18 nt, Human
uuccccccuccgcggacc

SEQ ID NO: 919026 - RNA, 24 nt, Human
uuucacacucagaauuuaauuucu

SEQ ID NO: 919027 - RNA, 20 nt, Human
uuucuccaaaaguuguuucu

SEQ ID NO: 919028 - RNA, 23 nt, Human
uuuuuuuuuuuuuuuuucacacu

SEQ ID NO: 919029 - RNA, 26 nt, Human
aaaaaacaccacucaauacuuacuaa

SEQ ID NO: 919030 - RNA, 21 nt, Human
aaaaacaccacucaauacuua

SEQ ID NO: 919031 - RNA, 26 nt, Human
aaaaagcagacagcugauugcaucac

SEQ ID NO: 919032 - RNA, 21 nt, Human
aaaaucaccagcacaccacug

SEQ ID NO: 919033 - RNA, 18 nt, Human
aaagaagccagucagaca

SEQ ID NO: 919034 - RNA, 26 nt, Human
aaagagcagcauaaagcacaccccgu

SEQ ID NO: 919035 - RNA, 23 nt, Human
aaaggaacagaacacaagccacg

SEQ ID NO: 919036 - RNA, 20 nt, Human
aaccuuaaaaagcagacagc

SEQ ID NO: 919037 - RNA, 21 nt, Human
aaucacagccacagcucccgc

SEQ ID NO: 919038 - RNA, 28 nt, Human
aaugacaaaaguaacuguuuaaaaggga

SEQ ID NO: 919039 - RNA, 22 nt, Human
acaccacugcaauccacugagc

SEQ ID NO: 919040 - RNA, 18 nt, Human
acacuguauauaggaagg

SEQ ID NO: 919041 - RNA, 19 nt, Human
acaugguauuguauaaaaa

SEQ ID NO: 919042 - RNA, 22 nt, Human
acugcaauccacugagcucacc

SEQ ID NO: 919043 - RNA, 18 nt, Human
agaaaaaaaaaacaccac

SEQ ID NO: 919044 - RNA, 20 nt, Human
agacuuacagagaacagccu

SEQ ID NO: 919045 - RNA, 20 nt, Human
agagaucauaggauuuguau

SEQ ID NO: 919046 - RNA, 26 nt, Human
agcaaauagggaagcuaaaaauacaa

SEQ ID NO: 919047 - RNA, 18 nt, Human
agcugauugcaucacuua

SEQ ID NO: 919048 - RNA, 19 nt, Human
aggaacagaacacaagcca

SEQ ID NO: 919049 - RNA, 21 nt, Human
aggcaaaagaagccagucaga

SEQ ID NO: 919050 - RNA, 25 nt, Human
aggggaucaacaaaccgcaaagagc

SEQ ID NO: 919051 - RNA, 22 nt, Human
agggugaguggagcacaguggg

SEQ ID NO: 919052 - RNA, 25 nt, Human
agggugaguggagcacaguggguua

SEQ ID NO: 919053 - RNA, 21 nt, Human
augaauucuuagaauacagag

SEQ ID NO: 919054 - RNA, 21 nt, Human
augucaaccuuuacucagcuu

SEQ ID NO: 919055 - RNA, 22 nt, Human
caaaagaagccagucagacacc

SEQ ID NO: 919056 - RNA, 19 nt, Human
caaaaucaccagcacacca

SEQ ID NO: 919057 - RNA, 26 nt, Human
caaacuucuggucuuaaucaaguuca

SEQ ID NO: 919058 - RNA, 22 nt, Human
caaauagggaagcuaaaaauac

SEQ ID NO: 919059 - RNA, 22 nt, Human
caagagggguaaacguauccag

SEQ ID NO: 919060 - RNA, 22 nt, Human
caagauggaacuccaaccaaca

SEQ ID NO: 919061 - RNA, 22 nt, Human
caaucccaaccuuaaaaagcag

SEQ ID NO: 919062 - RNA, 19 nt, Human
caccacucaauacuuacua

SEQ ID NO: 919063 - RNA, 20 nt, Human
cacucucuagguauugagag

SEQ ID NO: 919064 - RNA, 21 nt, Human
cacucucuagguauugagagu

SEQ ID NO: 919065 - RNA, 21 nt, Human
cacugugcaaaaucaccagca

SEQ ID NO: 919066 - RNA, 23 nt, Human
cacugugcaaaaucaccagcaca

SEQ ID NO: 919067 - RNA, 18 nt, Human
cagaacacaagccacguc

SEQ ID NO: 919068 - RNA, 26 nt, Human
cagcacaaucccaaccuuaaaaagca

SEQ ID NO: 919069 - RNA, 23 nt, Human
cagcagcacggcagcuccuccaa

SEQ ID NO: 919070 - RNA, 18 nt, Human
cagcauaaagcacacccc

SEQ ID NO: 919071 - RNA, 19 nt, Human
caggucaaagacugugcuu

SEQ ID NO: 919072 - RNA, 23 nt, Human
ccaaaacuuaaaagacuuacaga

SEQ ID NO: 919073 - RNA, 19 nt, Human
ccacugcaauccacugagc

SEQ ID NO: 919074 - RNA, 18 nt, Human
ccuagacauaaugccagg

SEQ ID NO: 919075 - RNA, 20 nt, Human
cucuaaccccucucucaauc

SEQ ID NO: 919076 - RNA, 24 nt, Human
cucuccauccuuuuuccuuuuaaa

SEQ ID NO: 919077 - RNA, 23 nt, Human
cucucccucuccauccucucuua

SEQ ID NO: 919078 - RNA, 27 nt, Human
cuucucuccauccuuuuuccuuuuaaa

SEQ ID NO: 919079 - RNA, 19 nt, Human
cuuuccauccuucucucca

SEQ ID NO: 919080 - RNA, 23 nt, Human
gaacaagaaggaauaauuccugu

SEQ ID NO: 919081 - RNA, 21 nt, Human
gaacagccucaggagguuagg

SEQ ID NO: 919082 - RNA, 22 nt, Human
gaacagccucaggagguuaggg

SEQ ID NO: 919083 - RNA, 19 nt, Human
gaacuccaaccaacaccag

SEQ ID NO: 919084 - RNA, 20 nt, Human
gaaggucccagagagcuuuu

SEQ ID NO: 919085 - RNA, 18 nt, Human
gaccagaggcaaugacaa

SEQ ID NO: 919086 - RNA, 18 nt, Human
gacucaucucccaaacuu

SEQ ID NO: 919087 - RNA, 18 nt, Human
gagguggagaucuagaug

SEQ ID NO: 919088 - RNA, 18 nt, Human
gccucuaaccccucucuc

SEQ ID NO: 919089 - RNA, 22 nt, Human
gcggaccagggcauagggugag

SEQ ID NO: 919090 - RNA, 21 nt, Human
gcuguuuuugaauauucuguu

SEQ ID NO: 919091 - RNA, 21 nt, Human
gcuuuccauccuucucuccau

SEQ ID NO: 919092 - RNA, 18 nt, Human
ggaauaauuccugugcca

SEQ ID NO: 919093 - RNA, 22 nt, Human
ggaggaagaggauuacagggag

SEQ ID NO: 919094 - RNA, 20 nt, Human
guggagcacaguggguuagc

SEQ ID NO: 919095 - RNA, 22 nt, Human
uaaaagacuuacagagaacagc

SEQ ID NO: 919096 - RNA, 24 nt, Human
uaaaugugugccuuaucuuccuca

SEQ ID NO: 919097 - RNA, 22 nt, Human
uaacagcuuuuugccuccugcu

SEQ ID NO: 919098 - RNA, 20 nt, Human
uaagaaacacccacaugaau

SEQ ID NO: 919099 - RNA, 20 nt, Human
uaaguccaggcuuuccaucc

SEQ ID NO: 919100 - RNA, 25 nt, Human
uacaccaucuugaggcaaaagaagc

SEQ ID NO: 919101 - RNA, 23 nt, Human
uagggugaguggagcacaguggg

SEQ ID NO: 919102 - RNA, 22 nt, Human
uaguauaaaccucacaggauga

SEQ ID NO: 919103 - RNA, 24 nt, Human
uauacaaagccacugcuuuagucc

SEQ ID NO: 919104 - RNA, 18 nt, Human
uaucauuguaauagauga

SEQ ID NO: 919105 - RNA, 19 nt, Human
uauccagcagaauguaagg

SEQ ID NO: 919106 - RNA, 18 nt, Human
ucaccagcacaccacugc

SEQ ID NO: 919107 - RNA, 20 nt, Human
ucacuugaagguuaucauug

SEQ ID NO: 919108 - RNA, 25 nt, Human
ucauuagaagguaacagcuuuuuuc

SEQ ID NO: 919109 - RNA, 25 nt, Human
uccauuccuauuuagacaaaugacc

SEQ ID NO: 919110 - RNA, 23 nt, Human
uccuuuuuccuuuuaaaaagaag

SEQ ID NO: 919111 - RNA, 24 nt, Human
ucuccagaaguuuuuucuaaaggu

SEQ ID NO: 919112 - RNA, 25 nt, Human
ucuccagaaguuuuuucuaaagguu

SEQ ID NO: 919113 - RNA, 20 nt, Human
ucuccauccucucuuaggga

SEQ ID NO: 919114 - RNA, 22 nt, Human
ugaaagaacagucuuuugauac

SEQ ID NO: 919115 - RNA, 21 nt, Human
ugcaaaaucaccagcacacca

SEQ ID NO: 919116 - RNA, 19 nt, Human
ugccuccugcuuccagaug

SEQ ID NO: 919117 - RNA, 23 nt, Human
ugccuccugcuuccagaugauuu

SEQ ID NO: 919118 - RNA, 22 nt, Human
ugcuaaagaagcucauguuaag

SEQ ID NO: 919119 - RNA, 21 nt, Human
uggaacuccaaccaacaccag

SEQ ID NO: 919120 - RNA, 20 nt, Human
ugggacccgccucuaacccc

SEQ ID NO: 919121 - RNA, 21 nt, Human
uguagccagguguccguguac

SEQ ID NO: 919122 - RNA, 18 nt, Human
ugucugcuacgugugaga

SEQ ID NO: 919123 - RNA, 28 nt, Human
uuaguccaaccaaaacuuaaaagacuua

SEQ ID NO: 919124 - RNA, 20 nt, Human
uuccuuuugguuaaaaacca

SEQ ID NO: 919125 - RNA, 24 nt, Human
uucucuccagaaguuuuuucuaaa

SEQ ID NO: 919126 - RNA, 24 nt, Human
uuguauaaaaagaaaaaaaaaaca

SEQ ID NO: 919127 - RNA, 22 nt, Human
uuguauuaucccuugcaagaug

SEQ ID NO: 919128 - RNA, 29 nt, Human
uuugccuccugcuuccagaugauuuccuc

SEQ ID NO: 919129 - RNA, 18 nt, Human
uuuguguucugccugagg

SEQ ID NO: 919130 - RNA, 23 nt, Human
aagaggagagaccggccccgucg

SEQ ID NO: 919131 - RNA, 22 nt, Human
agaaggaggcaacugcggggaa

SEQ ID NO: 919132 - RNA, 31 nt, Human
caaugggcucucgcuucuguccugagguucu

SEQ ID NO: 919133 - RNA, 25 nt, Human
cagccgggcugagcugagcaggagc

SEQ ID NO: 919134 - RNA, 19 nt, Human
cuguccugagguucuuggg

SEQ ID NO: 919135 - RNA, 21 nt, Human
gagcugagcaggagcaauggg

SEQ ID NO: 919136 - RNA, 20 nt, Human
gagguucuuggguggugagc

SEQ ID NO: 919137 - RNA, 20 nt, Human
gcaggaggucuuacguggug

SEQ ID NO: 919138 - RNA, 22 nt, Human
gggcaggaggucuuacguggug

SEQ ID NO: 919139 - RNA, 24 nt, Human
uccgcagccgggcugagcugagca

SEQ ID NO: 919140 - RNA, 20 nt, Human
ucuguccugagguucuuggg

SEQ ID NO: 919141 - RNA, 21 nt, Human
aaaacaaaacgugagauuaga

SEQ ID NO: 919142 - RNA, 22 nt, Human
aaagaggaugguuuagggagag

SEQ ID NO: 919143 - RNA, 22 nt, Human
aaccaucuaaccauacauuuaa

SEQ ID NO: 919144 - RNA, 23 nt, Human
aagaggaagccugggguuuuaaa

SEQ ID NO: 919145 - RNA, 20 nt, Human
aagcacucaacuuagaaaca

SEQ ID NO: 919146 - RNA, 19 nt, Human
aagcaggaggcacagaggg

SEQ ID NO: 919147 - RNA, 20 nt, Human
aagcagguuaucaaagcuua

SEQ ID NO: 919148 - RNA, 24 nt, Human
aagcuuacagacugacagaaguga

SEQ ID NO: 919149 - RNA, 18 nt, Human
aagguuuugggccaagug

SEQ ID NO: 919150 - RNA, 19 nt, Human
acuccagccugggccacag

SEQ ID NO: 919151 - RNA, 24 nt, Human
acuccagccugggccacagaguga

SEQ ID NO: 919152 - RNA, 18 nt, Human
acugcacuccagccuggg

SEQ ID NO: 919153 - RNA, 24 nt, Human
acugcacuccagccugggccacag

SEQ ID NO: 919154 - RNA, 18 nt, Human
agacugcagaucaaaaac

SEQ ID NO: 919155 - RNA, 21 nt, Human
agcagagaguaagguacaucu

SEQ ID NO: 919156 - RNA, 24 nt, Human
aggaagcaggaggcacagagggag

SEQ ID NO: 919157 - RNA, 18 nt, Human
aggaggcucaggcgggag

SEQ ID NO: 919158 - RNA, 24 nt, Human
aggcaggagagaaaggaagcagga

SEQ ID NO: 919159 - RNA, 18 nt, Human
aggcgggaggaucaccug

SEQ ID NO: 919160 - RNA, 24 nt, Human
aggcucaggcgggaggaucaccug

SEQ ID NO: 919161 - RNA, 22 nt, Human
aggugaugacaaauccuaaagc

SEQ ID NO: 919162 - RNA, 22 nt, Human
agucguucagaaucccucuugu

SEQ ID NO: 919163 - RNA, 24 nt, Human
aucaugccacugcacuccagccug

SEQ ID NO: 919164 - RNA, 22 nt, Human
augccacugcacuccagccugg

SEQ ID NO: 919165 - RNA, 26 nt, Human
caaaacaggauucugcuacucagaug

SEQ ID NO: 919166 - RNA, 22 nt, Human
caaaaggccauaaccuucagau

SEQ ID NO: 919167 - RNA, 21 nt, Human
caagcacucaacuuagaaaca

SEQ ID NO: 919168 - RNA, 21 nt, Human
cacagaaacacguagcacguc

SEQ ID NO: 919169 - RNA, 22 nt, Human
cacuccagccugggccacagag

SEQ ID NO: 919170 - RNA, 23 nt, Human
cacuccagccugggccacagagu

SEQ ID NO: 919171 - RNA, 24 nt, Human
cacuccagccugggccacagagug

SEQ ID NO: 919172 - RNA, 18 nt, Human
cacugcacuccagccugg

SEQ ID NO: 919173 - RNA, 19 nt, Human
cacugcacuccagccuggg

SEQ ID NO: 919174 - RNA, 20 nt, Human
cacugcacuccagccugggc

SEQ ID NO: 919175 - RNA, 24 nt, Human
cacugcacuccagccugggccaca

SEQ ID NO: 919176 - RNA, 19 nt, Human
cagagaguaagguacaucu

SEQ ID NO: 919177 - RNA, 23 nt, Human
cagagugagagacuccaucucuu

SEQ ID NO: 919178 - RNA, 24 nt, Human
caucuguagucccagauacucagg

SEQ ID NO: 919179 - RNA, 24 nt, Human
ccaagcacucaacuuagaaacaaa

SEQ ID NO: 919180 - RNA, 24 nt, Human
ccacagagugagagacuccaucuc

SEQ ID NO: 919181 - RNA, 20 nt, Human
ccacugcacuccagccuggg

SEQ ID NO: 919182 - RNA, 21 nt, Human
ccacugcacuccagccugggc

SEQ ID NO: 919183 - RNA, 24 nt, Human
ccacugcacuccagccugggccac

SEQ ID NO: 919184 - RNA, 23 nt, Human
ccauagucacaagucugggagau

SEQ ID NO: 919185 - RNA, 23 nt, Human
ccaucuguuuuuguaaaagacac

SEQ ID NO: 919186 - RNA, 21 nt, Human
ccucuugucaaaaggccauaa

SEQ ID NO: 919187 - RNA, 19 nt, Human
ccugggguuuuacaccuuc

SEQ ID NO: 919188 - RNA, 24 nt, Human
ccugucaaaccccaagcacucaac

SEQ ID NO: 919189 - RNA, 21 nt, Human
ccuucgccuccgcuucaggga

SEQ ID NO: 919190 - RNA, 20 nt, Human
cgcuggggcuuaaacucccc

SEQ ID NO: 919191 - RNA, 20 nt, Human
cguucagaaucccucuuguc

SEQ ID NO: 919192 - RNA, 22 nt, Human
cuaagaaaggccaacagagaua

SEQ ID NO: 919193 - RNA, 20 nt, Human
cucugaguuugguaagugcu

SEQ ID NO: 919194 - RNA, 20 nt, Human
cucuugucaaaaggccauaa

SEQ ID NO: 919195 - RNA, 21 nt, Human
cuucagggagcuacugcgucc

SEQ ID NO: 919196 - RNA, 20 nt, Human
gaaaaggaggcagaugagaa

SEQ ID NO: 919197 - RNA, 23 nt, Human
gacugacagaagugagaaaagga

SEQ ID NO: 919198 - RNA, 18 nt, Human
gagaaaaggaggcagaug

SEQ ID NO: 919199 - RNA, 19 nt, Human
gagaggcaggagagaaagg

SEQ ID NO: 919200 - RNA, 22 nt, Human
gaucaccugagcccaggauuuc

SEQ ID NO: 919201 - RNA, 21 nt, Human
gaucaugccacugcacuccag

SEQ ID NO: 919202 - RNA, 24 nt, Human
gcacuccagccugggccacagagu

SEQ ID NO: 919203 - RNA, 21 nt, Human
gcaguuaaagaggaugguuua

SEQ ID NO: 919204 - RNA, 20 nt, Human
gcauggaaaagcuucacaga

SEQ ID NO: 919205 - RNA, 22 nt, Human
gccacugcacuccagccugggc

SEQ ID NO: 919206 - RNA, 18 nt, Human
ggagcacugaauggaaac

SEQ ID NO: 919207 - RNA, 24 nt, Human
ggaggcagaugagaaagugggaug

SEQ ID NO: 919208 - RNA, 18 nt, Human
ggccaagugggucuauga

SEQ ID NO: 919209 - RNA, 23 nt, Human
uaaacuccccuucgccuccgcuu

SEQ ID NO: 919210 - RNA, 27 nt, Human
uaaccuucagauugaugaagcaaaaca

SEQ ID NO: 919211 - RNA, 23 nt, Human
uaauuuuuagaagacaugagaca

SEQ ID NO: 919212 - RNA, 24 nt, Human
uacagacugacagaagugagaaaa

SEQ ID NO: 919213 - RNA, 19 nt, Human
uacuaccacaccagcaggc

SEQ ID NO: 919214 - RNA, 21 nt, Human
uagaagcaguuaaagaggaug

SEQ ID NO: 919215 - RNA, 24 nt, Human
uagauuccugagcaccaucagauu

SEQ ID NO: 919216 - RNA, 20 nt, Human
uagcagagaguaagguacag

SEQ ID NO: 919217 - RNA, 22 nt, Human
uagcagagaguaagguacaucu

SEQ ID NO: 919218 - RNA, 20 nt, Human
uaggcugaccauaagcaaag

SEQ ID NO: 919219 - RNA, 20 nt, Human
uaugccaucuguuuuuguaa

SEQ ID NO: 919220 - RNA, 21 nt, Human
ucaacuuagaaacaaaaagcg

SEQ ID NO: 919221 - RNA, 18 nt, Human
ucaagugaagagagagaa

SEQ ID NO: 919222 - RNA, 24 nt, Human
ucacaagucugggagauggacuac

SEQ ID NO: 919223 - RNA, 26 nt, Human
ucacuaccugucaaaccccaagcacu

SEQ ID NO: 919224 - RNA, 20 nt, Human
ucaggcgggaggaucaccug

SEQ ID NO: 919225 - RNA, 23 nt, Human
ucaugccacugcacuccagccug

SEQ ID NO: 919226 - RNA, 23 nt, Human
uccagccugggccacagagugag

SEQ ID NO: 919227 - RNA, 24 nt, Human
uccagccugggccacagagugaga

SEQ ID NO: 919228 - RNA, 24 nt, Human
ucucuuaaaaacaaaacgugagau

SEQ ID NO: 919229 - RNA, 28 nt, Human
ugacagaagugagaaaaggaggcagaag

SEQ ID NO: 919230 - RNA, 21 nt, Human
ugagacaaaauuagccaggcu

SEQ ID NO: 919231 - RNA, 27 nt, Human
ugagcccaggauuucaaggaccaaagu

SEQ ID NO: 919232 - RNA, 21 nt, Human
ugagccuuggcugccucugug

SEQ ID NO: 919233 - RNA, 21 nt, Human
ugcaaucaaacauaggcugac

SEQ ID NO: 919234 - RNA, 22 nt, Human
ugcaaugagcuaugaucaugcc

SEQ ID NO: 919235 - RNA, 21 nt, Human
uggagcacugaauggaaacag

SEQ ID NO: 919236 - RNA, 19 nt, Human
ugggauggggagcagagga

SEQ ID NO: 919237 - RNA, 21 nt, Human
ugggguuuuacaccuuccggc

SEQ ID NO: 919238 - RNA, 22 nt, Human
ugucaaaccccaagcacucaac

SEQ ID NO: 919239 - RNA, 23 nt, Human
ugugaucagauuacuaccacacc

SEQ ID NO: 919240 - RNA, 20 nt, Human
uuuaaguaaacaaaagcgag

SEQ ID NO: 919241 - RNA, 22 nt, Human
uuuuuuuuuuuuuuuaacaaga

SEQ ID NO: 919242 - RNA, 24 nt, Human
uuuuuuuuuuuuuuuuuuaacaag

SEQ ID NO: 919243 - RNA, 21 nt, Human
aagagcagacccagggucaca

SEQ ID NO: 919244 - RNA, 24 nt, Human
acacagugaugaggcuggcacuga

SEQ ID NO: 919245 - RNA, 23 nt, Human
accacagccuccagcucauggcu

SEQ ID NO: 919246 - RNA, 19 nt, Human
aggaagccggugagucaag

SEQ ID NO: 919247 - RNA, 19 nt, Human
aggcagaagcacagagccu

SEQ ID NO: 919248 - RNA, 24 nt, Human
aggcagaagcacagagccuggcuc

SEQ ID NO: 919249 - RNA, 20 nt, Human
aggccccaccacagcuccac

SEQ ID NO: 919250 - RNA, 23 nt, Human
agggcccacuccagguagaugac

SEQ ID NO: 919251 - RNA, 20 nt, Human
aguuaacugcagugcaacua

SEQ ID NO: 919252 - RNA, 22 nt, Human
caacuaaugagacacugcacau

SEQ ID NO: 919253 - RNA, 18 nt, Human
cacacccugcagcacacc

SEQ ID NO: 919254 - RNA, 18 nt, Human
cacagcuccacgaugugg

SEQ ID NO: 919255 - RNA, 18 nt, Human
caccagcaggggcucaac

SEQ ID NO: 919256 - RNA, 23 nt, Human
caccagcaggggcucaacugauc

SEQ ID NO: 919257 - RNA, 24 nt, Human
caccagcaggggcucaacugaucc

SEQ ID NO: 919258 - RNA, 25 nt, Human
cacccugcagcacaccagcaggggc

SEQ ID NO: 919259 - RNA, 20 nt, Human
caccucaucacacccugcag

SEQ ID NO: 919260 - RNA, 21 nt, Human
caccucaucacacccugcagc

SEQ ID NO: 919261 - RNA, 24 nt, Human
caccucaucacacccugcagcaca

SEQ ID NO: 919262 - RNA, 20 nt, Human
cagagccaggggcuaugugu

SEQ ID NO: 919263 - RNA, 22 nt, Human
cagagugugccuggggauauga

SEQ ID NO: 919264 - RNA, 23 nt, Human
caggccccaccacagcuccacga

SEQ ID NO: 919265 - RNA, 24 nt, Human
caggggcuauguguggacuuaggg

SEQ ID NO: 919266 - RNA, 18 nt, Human
ccacagcuccacgaugug

SEQ ID NO: 919267 - RNA, 26 nt, Human
ccacuugccauucaugacugcaggcc

SEQ ID NO: 919268 - RNA, 19 nt, Human
cccaggcccucucccucuc

SEQ ID NO: 919269 - RNA, 21 nt, Human
ccucccagcuccuacccaggc

SEQ ID NO: 919270 - RNA, 20 nt, Human
ccugaagaaggggagggccc

SEQ ID NO: 919271 - RNA, 21 nt, Human
cuccacgaugugggccccacu

SEQ ID NO: 919272 - RNA, 24 nt, Human
cucccagcuccuacccaggcccuc

SEQ ID NO: 919273 - RNA, 21 nt, Human
gcuggcacugagggcucccac

SEQ ID NO: 919274 - RNA, 21 nt, Human
ggagggaguuggccacaaggg

SEQ ID NO: 919275 - RNA, 18 nt, Human
ggaguuggccacaagggg

SEQ ID NO: 919276 - RNA, 21 nt, Human
ggcagggugcccugcaggagc

SEQ ID NO: 919277 - RNA, 19 nt, Human
gggcagggugcccugcagg

SEQ ID NO: 919278 - RNA, 21 nt, Human
guacugaagccccauaguuga

SEQ ID NO: 919279 - RNA, 19 nt, Human
guggagggcacccaugucc

SEQ ID NO: 919280 - RNA, 20 nt, Human
guggagggcacccaugucca

SEQ ID NO: 919281 - RNA, 18 nt, Human
uagaugacauggccaggg

SEQ ID NO: 919282 - RNA, 23 nt, Human
ucacacccugcagcacaccagca

SEQ ID NO: 919283 - RNA, 18 nt, Human
ucagugagaaggggaggg

SEQ ID NO: 919284 - RNA, 18 nt, Human
ucccagcuccuacccagg

SEQ ID NO: 919285 - RNA, 19 nt, Human
ucccagcuccuacccaggc

SEQ ID NO: 919286 - RNA, 20 nt, Human
uccggaagagccaggccuug

SEQ ID NO: 919287 - RNA, 22 nt, Human
uccuugcuggcacgaaccacag

SEQ ID NO: 919288 - RNA, 25 nt, Human
ucuccagaugccuacagcacaccag

SEQ ID NO: 919289 - RNA, 22 nt, Human
ucugggcagggugcccugcagg

SEQ ID NO: 919290 - RNA, 18 nt, Human
ugaaaauuaucuuccucc

SEQ ID NO: 919291 - RNA, 19 nt, Human
ugaaaauuaucuuccuccc

SEQ ID NO: 919292 - RNA, 19 nt, Human
ugaagccccauaguugaaa

SEQ ID NO: 919293 - RNA, 21 nt, Human
ugaaggugggggucagggggc

SEQ ID NO: 919294 - RNA, 21 nt, Human
ugagaacaggccuuaaaggca

SEQ ID NO: 919295 - RNA, 22 nt, Human
ugaguggaagugggggacacag

SEQ ID NO: 919296 - RNA, 21 nt, Human
ugauucaaggccugaagaagg

SEQ ID NO: 919297 - RNA, 21 nt, Human
ugcagugcagguaugcauggu

SEQ ID NO: 919298 - RNA, 23 nt, Human
ugcugagaacaggccuuaaaggc

SEQ ID NO: 919299 - RNA, 20 nt, Human
uggagacauucaguggccag

SEQ ID NO: 919300 - RNA, 18 nt, Human
uggcucggggcgcugcag

SEQ ID NO: 919301 - RNA, 20 nt, Human
ugggcagggugcccugcagg

SEQ ID NO: 919302 - RNA, 18 nt, Human
ugggggacacaggcaggc

SEQ ID NO: 919303 - RNA, 21 nt, Human
uucaugacugcaggccccacc

SEQ ID NO: 919304 - RNA, 22 nt, Human
uuccugaguggaagugggggac

SEQ ID NO: 919305 - RNA, 18 nt, Human
aauagaaacaagacacca

SEQ ID NO: 919306 - RNA, 23 nt, Human
acaaauaaaauacuuuuuaucac

SEQ ID NO: 919307 - RNA, 20 nt, Human
caagacaccaagauauuuaa

SEQ ID NO: 919308 - RNA, 21 nt, Human
caauagaaacaagacaccaag

SEQ ID NO: 919309 - RNA, 23 nt, Human
cacaucaagacuaucuacaaaaa

SEQ ID NO: 919310 - RNA, 23 nt, Human
cagaagaaaagcaugcauaucau

SEQ ID NO: 919311 - RNA, 19 nt, Human
ccacacaauagaaacaaga

SEQ ID NO: 919312 - RNA, 22 nt, Human
ugccaaacgguucucgagcucc

SEQ ID NO: 919313 - RNA, 24 nt, Human
aaaaaaaaaaaaaaaagcauuuca

SEQ ID NO: 919314 - RNA, 23 nt, Human
aaaaagaugauguggaggccaaa

SEQ ID NO: 919315 - RNA, 20 nt, Human
aaacacccugaaauuaaaac

SEQ ID NO: 919316 - RNA, 23 nt, Human
aaacagcaaccuaaccccacgcc

SEQ ID NO: 919317 - RNA, 25 nt, Human
aaacuggucuuucucuauaaagucu

SEQ ID NO: 919318 - RNA, 22 nt, Human
aaaggcaaaguagccaucuauc

SEQ ID NO: 919319 - RNA, 20 nt, Human
aagaauuucaggccaguugu

SEQ ID NO: 919320 - RNA, 20 nt, Human
aagaccacuuaccccaaauc

SEQ ID NO: 919321 - RNA, 24 nt, Human
aagacuucagugagccaugacugu

SEQ ID NO: 919322 - RNA, 23 nt, Human
aagcauuucaaacuaacagcggu

SEQ ID NO: 919323 - RNA, 20 nt, Human
aagucagccccagacagugg

SEQ ID NO: 919324 - RNA, 22 nt, Human
acagcaaaugggcugcagugaa

SEQ ID NO: 919325 - RNA, 19 nt, Human
acagcaaccuaaccccacg

SEQ ID NO: 919326 - RNA, 18 nt, Human
acauccagccugggaagu

SEQ ID NO: 919327 - RNA, 20 nt, Human
accucuuuggcacgaccauu

SEQ ID NO: 919328 - RNA, 23 nt, Human
acugugcugugaauggcacaacu

SEQ ID NO: 919329 - RNA, 21 nt, Human
acuucagugagccaugacugu

SEQ ID NO: 919330 - RNA, 18 nt, Human
agacagugggaagguggu

SEQ ID NO: 919331 - RNA, 19 nt, Human
agcacuugucccccaagug

SEQ ID NO: 919332 - RNA, 20 nt, Human
agcauaguaaaaccccaccu

SEQ ID NO: 919333 - RNA, 18 nt, Human
aggcagggggaucacuug

SEQ ID NO: 919334 - RNA, 23 nt, Human
aggcagggggaucacuugagccc

SEQ ID NO: 919335 - RNA, 24 nt, Human
aggccaguugugguggcucaugcc

SEQ ID NO: 919336 - RNA, 22 nt, Human
aggcugaggcagcggggucaag

SEQ ID NO: 919337 - RNA, 22 nt, Human
agucuggacagcauaguaaaac

SEQ ID NO: 919338 - RNA, 24 nt, Human
agucuggacagcauaguaaaaccc

SEQ ID NO: 919339 - RNA, 24 nt, Human
aguugugguggcucaugccuguaa

SEQ ID NO: 919340 - RNA, 24 nt, Human
aucacuugagcccaggaguuuaag

SEQ ID NO: 919341 - RNA, 27 nt, Human
caaaguagccaucuaucucaaggggcc

SEQ ID NO: 919342 - RNA, 19 nt, Human
caaccuaaccccacgccaa

SEQ ID NO: 919343 - RNA, 24 nt, Human
cacaccuguggccccaguuauuug

SEQ ID NO: 919344 - RNA, 24 nt, Human
caccucuauaaaaaauuuuaaaaa

SEQ ID NO: 919345 - RNA, 20 nt, Human
cagcauaguaaaaccccacc

SEQ ID NO: 919346 - RNA, 24 nt, Human
caguuauuugggaggcugaggcag

SEQ ID NO: 919347 - RNA, 20 nt, Human
caugucaccugggccuguga

SEQ ID NO: 919348 - RNA, 20 nt, Human
ccacgccaagcugggcuguu

SEQ ID NO: 919349 - RNA, 25 nt, Human
ccauggcgugcuucuuccgucuccc

SEQ ID NO: 919350 - RNA, 23 nt, Human
ccauuuaaaaaaaaaaaaaaaaa

SEQ ID NO: 919351 - RNA, 22 nt, Human
ccccaaauccacauucugcaag

SEQ ID NO: 919352 - RNA, 19 nt, Human
ccuccagccuggacaagag

SEQ ID NO: 919353 - RNA, 23 nt, Human
ccucuuuggcacgaccauugcuu

SEQ ID NO: 919354 - RNA, 20 nt, Human
ccuguaaucucaccaguuug

SEQ ID NO: 919355 - RNA, 22 nt, Human
ccuguaaucucaccaguuuggg

SEQ ID NO: 919356 - RNA, 19 nt, Human
ccuucaagaccacuuaccc

SEQ ID NO: 919357 - RNA, 22 nt, Human
cuaaaugaauccuucaagacca

SEQ ID NO: 919358 - RNA, 25 nt, Human
cucaugccuguaaucucaccaguuu

SEQ ID NO: 919359 - RNA, 18 nt, Human
cucauuucagaaacaucg

SEQ ID NO: 919360 - RNA, 21 nt, Human
cugcaagacaguucaagaaga

SEQ ID NO: 919361 - RNA, 23 nt, Human
cuggacagcauaguaaaacccca

SEQ ID NO: 919362 - RNA, 19 nt, Human
cuggcugccacugcacaag

SEQ ID NO: 919363 - RNA, 19 nt, Human
cuucaagaccacuuacccc

SEQ ID NO: 919364 - RNA, 18 nt, Human
gaccauugcuucuucuuu

SEQ ID NO: 919365 - RNA, 20 nt, Human
gagcagcagugauguuugga

SEQ ID NO: 919366 - RNA, 24 nt, Human
gaucacuugagcccaggaguuuaa

SEQ ID NO: 919367 - RNA, 23 nt, Human
gcaaaugggcugcagugaacagu

SEQ ID NO: 919368 - RNA, 18 nt, Human
gcaagucagccccagaca

SEQ ID NO: 919369 - RNA, 19 nt, Human
gccugggaaguacacaggc

SEQ ID NO: 919370 - RNA, 23 nt, Human
gcgugcuucuuccgucucccagg

SEQ ID NO: 919371 - RNA, 23 nt, Human
ggaaggugguguuaugccugggg

SEQ ID NO: 919372 - RNA, 20 nt, Human
ggaggcugaggcagcggggu

SEQ ID NO: 919373 - RNA, 22 nt, Human
ggaucacuugagcccaggaguu

SEQ ID NO: 919374 - RNA, 22 nt, Human
gggaaguacacaggcgucaagg

SEQ ID NO: 919375 - RNA, 24 nt, Human
gggaucacuugagcccaggaguuu

SEQ ID NO: 919376 - RNA, 24 nt, Human
gggcuuugguggaggucauggggc

SEQ ID NO: 919377 - RNA, 27 nt, Human
gguggcucaugccuguaaucucaccag

SEQ ID NO: 919378 - RNA, 22 nt, Human
guggcucaugccuguaaucuca

SEQ ID NO: 919379 - RNA, 22 nt, Human
uaaaaaaaaaaaaaaaaagcau

SEQ ID NO: 919380 - RNA, 19 nt, Human
uaauguagcuucacaucca

SEQ ID NO: 919381 - RNA, 21 nt, Human
uaccccaaauccacauucugc

SEQ ID NO: 919382 - RNA, 20 nt, Human
ucaacagaauuucugugcaa

SEQ ID NO: 919383 - RNA, 18 nt, Human
ucaccaguuugggaggcc

SEQ ID NO: 919384 - RNA, 24 nt, Human
ucaggccaguugugguggcucaug

SEQ ID NO: 919385 - RNA, 21 nt, Human
uccaagauuccaugucaccuu

SEQ ID NO: 919386 - RNA, 21 nt, Human
uccagagaaguuuuucuucag

SEQ ID NO: 919387 - RNA, 20 nt, Human
uccuccagccuggacaagag

SEQ ID NO: 919388 - RNA, 22 nt, Human
uccuucaagaccacuuacccca

SEQ ID NO: 919389 - RNA, 23 nt, Human
ucuccaaaggaauucucaacugu

SEQ ID NO: 919390 - RNA, 24 nt, Human
ucuccauuuaaaaaaaaaaaaaaa

SEQ ID NO: 919391 - RNA, 22 nt, Human
ucuccgagcagcagugauguuu

SEQ ID NO: 919392 - RNA, 21 nt, Human
ucuuccgucucccagguuagg

SEQ ID NO: 919393 - RNA, 18 nt, Human
ugaaauuaaaacaugaaa

SEQ ID NO: 919394 - RNA, 22 nt, Human
ugaaauuaaaacaugaaauauu

SEQ ID NO: 919395 - RNA, 18 nt, Human
ugaccccucaucucacac

SEQ ID NO: 919396 - RNA, 22 nt, Human
ugacuaaaugaauccuucaaga

SEQ ID NO: 919397 - RNA, 23 nt, Human
ugagcccaggaguuuaagaccag

SEQ ID NO: 919398 - RNA, 24 nt, Human
ugaggcagcggggucaagacuuca

SEQ ID NO: 919399 - RNA, 23 nt, Human
ugaguuauuugaaacagcaaccu

SEQ ID NO: 919400 - RNA, 21 nt, Human
ugcagugaacagugcacaccc

SEQ ID NO: 919401 - RNA, 24 nt, Human
ugccuguaaucucaccaguuuggg

SEQ ID NO: 919402 - RNA, 21 nt, Human
ugcuccaagauuccaugucac

SEQ ID NO: 919403 - RNA, 22 nt, Human
uggacagcauaguaaaacccca

SEQ ID NO: 919404 - RNA, 23 nt, Human
uggcacaacucacaugguaaugu

SEQ ID NO: 919405 - RNA, 22 nt, Human
uggcgugcuucuuccgucuccc

SEQ ID NO: 919406 - RNA, 24 nt, Human
uggcucaugccuguaaucucacca

SEQ ID NO: 919407 - RNA, 19 nt, Human
ugggaaggugguguuaugc

SEQ ID NO: 919408 - RNA, 25 nt, Human
ugggaaggugguguuaugccugggg

SEQ ID NO: 919409 - RNA, 26 nt, Human
ugggaaggugguguuaugccugggga

SEQ ID NO: 919410 - RNA, 24 nt, Human
ugggaggccaaggcagggggauca

SEQ ID NO: 919411 - RNA, 24 nt, Human
ugggaggcugaggcagcgggguca

SEQ ID NO: 919412 - RNA, 28 nt, Human
ugggcacacaacaaccacaguucauaca

SEQ ID NO: 919413 - RNA, 19 nt, Human
ugggguggagguguucggu

SEQ ID NO: 919414 - RNA, 24 nt, Human
ugguggcucaugccuguaaucuca

SEQ ID NO: 919415 - RNA, 21 nt, Human
ugucccccaaguguaaacacc

SEQ ID NO: 919416 - RNA, 21 nt, Human
ugugcaagucagccccagaca

SEQ ID NO: 919417 - RNA, 20 nt, Human
uucaagaccacuuaccccaa

SEQ ID NO: 919418 - RNA, 24 nt, Human
uucaagaccacuuaccccaaaucc

SEQ ID NO: 919419 - RNA, 21 nt, Human
uucagugagccaugacuguac

SEQ ID NO: 919420 - RNA, 28 nt, Human
uugaaacagcaaccuaaccccacgccaa

SEQ ID NO: 919421 - RNA, 22 nt, Human
uugagcccaggaguuuaagacc

SEQ ID NO: 919422 - RNA, 24 nt, Human
uuuaaaaaaaaaaaaaaaaagcau

SEQ ID NO: 919423 - RNA, 21 nt, Human
uuucaaaugaugaauuucuua

SEQ ID NO: 919424 - RNA, 22 nt, Human
aacaggugugggccacccuggg

SEQ ID NO: 919425 - RNA, 26 nt, Human
acuacagaagucccauggggcagacg

SEQ ID NO: 919426 - RNA, 19 nt, Human
agacgggagccacaggccc

SEQ ID NO: 919427 - RNA, 20 nt, Human
agagcacccccaaaggacag

SEQ ID NO: 919428 - RNA, 26 nt, Human
agccacaggcccagacuccacagccc

SEQ ID NO: 919429 - RNA, 22 nt, Human
caguagguccccgcccggaucu

SEQ ID NO: 919430 - RNA, 23 nt, Human
ccacaggcccagacuccacagcc

SEQ ID NO: 919431 - RNA, 23 nt, Human
cccaaaggacaguagguccccgc

SEQ ID NO: 919432 - RNA, 20 nt, Human
cccacagcacccgagggacc

SEQ ID NO: 919433 - RNA, 21 nt, Human
cccccaaaggacaguaggucc

SEQ ID NO: 919434 - RNA, 24 nt, Human
cccccaaaggacaguagguccccg

SEQ ID NO: 919435 - RNA, 21 nt, Human
cccuggggugagcugccuccc

SEQ ID NO: 919436 - RNA, 20 nt, Human
cguccagaccccaagugucc

SEQ ID NO: 919437 - RNA, 21 nt, Human
cucccgccgccguugcgucca

SEQ ID NO: 919438 - RNA, 31 nt, Human
cuggcccacagcacccgagggacccugcagg

SEQ ID NO: 919439 - RNA, 25 nt, Human
gaacaggugugggccacccuggggu

SEQ ID NO: 919440 - RNA, 20 nt, Human
ggcccagacuccacagcccc

SEQ ID NO: 919441 - RNA, 19 nt, Human
guagaagagcacccccaaa

SEQ ID NO: 919442 - RNA, 19 nt, Human
uagaagagcacccccaaag

SEQ ID NO: 919443 - RNA, 21 nt, Human
uagaagagcacccccaaagga

SEQ ID NO: 919444 - RNA, 20 nt, Human
uaggaacaggugugggccac

SEQ ID NO: 919445 - RNA, 21 nt, Human
ucccagaggccuggaaggacc

SEQ ID NO: 919446 - RNA, 24 nt, Human
ucccagaggccuggaaggaccucg

SEQ ID NO: 919447 - RNA, 22 nt, Human
ucccauggggcagacgggagcc

SEQ ID NO: 919448 - RNA, 22 nt, Human
ucccgccgccguugcguccaga

SEQ ID NO: 919449 - RNA, 23 nt, Human
ucccgccgccguugcguccagaa

SEQ ID NO: 919450 - RNA, 25 nt, Human
ucuuuccccucuaaacuguucuaga

SEQ ID NO: 919451 - RNA, 18 nt, Human
ugcuaggaacaggugugg

SEQ ID NO: 919452 - RNA, 19 nt, Human
aaacagaaaaugggggacc

SEQ ID NO: 919453 - RNA, 21 nt, Human
aaagccccaccuccaaauacc

SEQ ID NO: 919454 - RNA, 21 nt, Human
aaauaacuuuaaaaagaacau

SEQ ID NO: 919455 - RNA, 24 nt, Human
aaccacugagaaaguaggaaacag

SEQ ID NO: 919456 - RNA, 22 nt, Human
aauuucuuuucaaugaaaccac

SEQ ID NO: 919457 - RNA, 21 nt, Human
accacugagaaaguaggaaac

SEQ ID NO: 919458 - RNA, 20 nt, Human
agaaguccaagaucaaggug

SEQ ID NO: 919459 - RNA, 21 nt, Human
agccccaccuccaaauaccau

SEQ ID NO: 919460 - RNA, 21 nt, Human
aggcauguuccacucuccccc

SEQ ID NO: 919461 - RNA, 24 nt, Human
auaaauaacuuuaaaaagaacauu

SEQ ID NO: 919462 - RNA, 18 nt, Human
auuucucacaauucugga

SEQ ID NO: 919463 - RNA, 25 nt, Human
caacauuagaauucugggggcacac

SEQ ID NO: 919464 - RNA, 22 nt, Human
cacuaaucccauucaugagcgc

SEQ ID NO: 919465 - RNA, 21 nt, Human
cagauuuguuuucuggugagg

SEQ ID NO: 919466 - RNA, 19 nt, Human
ccaaaagccccaccuccaa

SEQ ID NO: 919467 - RNA, 19 nt, Human
ccagaaugucaaugcccau

SEQ ID NO: 919468 - RNA, 18 nt, Human
cccaccuccaaauaccau

SEQ ID NO: 919469 - RNA, 19 nt, Human
cccccagucauaccccaag

SEQ ID NO: 919470 - RNA, 24 nt, Human
cucacaauucuggaggcugagaag

SEQ ID NO: 919471 - RNA, 22 nt, Human
cucccccagucauaccccaagu

SEQ ID NO: 919472 - RNA, 19 nt, Human
cucucugggucucuuuaua

SEQ ID NO: 919473 - RNA, 24 nt, Human
cucuuugcuauuccugccuuuaac

SEQ ID NO: 919474 - RNA, 23 nt, Human
cugcgccugcuccggcccacuua

SEQ ID NO: 919475 - RNA, 22 nt, Human
cuuaccaaaagccccaccucca

SEQ ID NO: 919476 - RNA, 20 nt, Human
cuuuuagcacuuggcaacuc

SEQ ID NO: 919477 - RNA, 24 nt, Human
gccccaccuccaaauaccaucaca

SEQ ID NO: 919478 - RNA, 19 nt, Human
ggaggcugagaaguccaag

SEQ ID NO: 919479 - RNA, 22 nt, Human
ggccgaggggccuucuuccucg

SEQ ID NO: 919480 - RNA, 28 nt, Human
gggaaccaguggaggauagccgguaccc

SEQ ID NO: 919481 - RNA, 21 nt, Human
uaaaaaaaaacuuccaaugaa

SEQ ID NO: 919482 - RNA, 23 nt, Human
uaaguaacuucauuugcaaaaug

SEQ ID NO: 919483 - RNA, 19 nt, Human
uaccaucacauuggaaaug

SEQ ID NO: 919484 - RNA, 21 nt, Human
uagcagcaagucuacguccau

SEQ ID NO: 919485 - RNA, 20 nt, Human
uauaagggcacuaaucccau

SEQ ID NO: 919486 - RNA, 22 nt, Human
uaucauaguacuugguaaauac

SEQ ID NO: 919487 - RNA, 19 nt, Human
uaucugcucccuaaguaac

SEQ ID NO: 919488 - RNA, 23 nt, Human
uaucugcucccuaaguaacuuca

SEQ ID NO: 919489 - RNA, 21 nt, Human
uauugugcggaaaaggcaugu

SEQ ID NO: 919490 - RNA, 23 nt, Human
ucaaugcccaucggacgcacaag

SEQ ID NO: 919491 - RNA, 19 nt, Human
uccucgugucgcagccggu

SEQ ID NO: 919492 - RNA, 25 nt, Human
ucuacugcagacauuaaauaagaau

SEQ ID NO: 919493 - RNA, 21 nt, Human
ucuuauucuuguuuuccagaa

SEQ ID NO: 919494 - RNA, 21 nt, Human
ugaaaccacugagaaaguagg

SEQ ID NO: 919495 - RNA, 24 nt, Human
ugagaaguccaagaucaaggugcu

SEQ ID NO: 919496 - RNA, 18 nt, Human
ugaggacccacuuccugg

SEQ ID NO: 919497 - RNA, 22 nt, Human
ugaggacccacuuccugguucg

SEQ ID NO: 919498 - RNA, 22 nt, Human
ugccuuuaaccccuucuaauuu

SEQ ID NO: 919499 - RNA, 18 nt, Human
uggaggcugagaagucca

SEQ ID NO: 919500 - RNA, 22 nt, Human
ugggaaagcacugggaaaggaa

SEQ ID NO: 919501 - RNA, 18 nt, Human
ugggaaaggaacuccagg

SEQ ID NO: 919502 - RNA, 24 nt, Human
ugggggcacacaaacauucagucu

SEQ ID NO: 919503 - RNA, 21 nt, Human
uguacugaaaauauguccuug

SEQ ID NO: 919504 - RNA, 21 nt, Human
uguuccacucucccccaguca

SEQ ID NO: 919505 - RNA, 19 nt, Human
uguuugucuucucccuuuc

SEQ ID NO: 919506 - RNA, 25 nt, Human
uugaaguaaguaugguagcauaauc

SEQ ID NO: 919507 - RNA, 24 nt, Human
uuuaaaaagaacauuuuuauacuc

SEQ ID NO: 919508 - RNA, 21 nt, Human
uuucucacaauucuggaggcu

SEQ ID NO: 919509 - RNA, 23 nt, Human
acaaggcaagcacacacuagggc

SEQ ID NO: 919510 - RNA, 25 nt, Human
acaaggcaagcacacacuagggcag

SEQ ID NO: 919511 - RNA, 18 nt, Human
caacucauacugccagcu

SEQ ID NO: 919512 - RNA, 22 nt, Human
caacucauacugccagcuaagc

SEQ ID NO: 919513 - RNA, 20 nt, Human
cacaaguuuacaaguaacag

SEQ ID NO: 919514 - RNA, 21 nt, Human
cacacagaaaaacucccagac

SEQ ID NO: 919515 - RNA, 19 nt, Human
cacacuagggcagcugggc

SEQ ID NO: 919516 - RNA, 25 nt, Human
cagaaaaacucccagacauucauga

SEQ ID NO: 919517 - RNA, 20 nt, Human
cauacugccagcuaagcauc

SEQ ID NO: 919518 - RNA, 24 nt, Human
ccagacauucaugacuucauccac

SEQ ID NO: 919519 - RNA, 28 nt, Human
ccccacacagaaaaacucccagacauuc

SEQ ID NO: 919520 - RNA, 18 nt, Human
cccccuggcucuucaccu

SEQ ID NO: 919521 - RNA, 24 nt, Human
ccucaaaagguuuaucuuuccacc

SEQ ID NO: 919522 - RNA, 19 nt, Human
gacuucauccacccugccu

SEQ ID NO: 919523 - RNA, 22 nt, Human
gggcagcugggccauccuggcc

SEQ ID NO: 919524 - RNA, 20 nt, Human
gucucugucuccuccccaca

SEQ ID NO: 919525 - RNA, 18 nt, Human
uagcaaagacccucagga

SEQ ID NO: 919526 - RNA, 19 nt, Human
uaucuuuccaccacacuag

SEQ ID NO: 919527 - RNA, 19 nt, Human
uccaccacacuagcaaaga

SEQ ID NO: 919528 - RNA, 21 nt, Human
uccaccacacuagcaaagacc

SEQ ID NO: 919529 - RNA, 19 nt, Human
uccccacacagaaaaacuc

SEQ ID NO: 919530 - RNA, 22 nt, Human
uccccacacagaaaaacuccca

SEQ ID NO: 919531 - RNA, 21 nt, Human
ugacccccuggcucuucaccu

SEQ ID NO: 919532 - RNA, 21 nt, Human
uggcagauaggccauauuucc

SEQ ID NO: 919533 - RNA, 24 nt, Human
aaagugcugggauuacaggcguga

SEQ ID NO: 919534 - RNA, 25 nt, Human
aacaaaaaauaccaguaauuaaucu

SEQ ID NO: 919535 - RNA, 22 nt, Human
aaccaagaacaacaaugcuagc

SEQ ID NO: 919536 - RNA, 20 nt, Human
aacuccugaccucgugaucc

SEQ ID NO: 919537 - RNA, 24 nt, Human
aagcagcaucaccucuagagucca

SEQ ID NO: 919538 - RNA, 19 nt, Human
aagugcugggauuacaggc

SEQ ID NO: 919539 - RNA, 19 nt, Human
aagugcugggauuacaggc

SEQ ID NO: 919540 - RNA, 26 nt, Human
aagugcugggauuacaggcgugagcc

SEQ ID NO: 919541 - RNA, 24 nt, Human
aauuacaggcaucuaccaccaugc

SEQ ID NO: 919542 - RNA, 21 nt, Human
acaggcaucuaccaccaugcc

SEQ ID NO: 919543 - RNA, 21 nt, Human
accaagaacaacaaugcuagc

SEQ ID NO: 919544 - RNA, 21 nt, Human
agaagacaagccaagaucuau

SEQ ID NO: 919545 - RNA, 24 nt, Human
agcgauucuccugccucagccucc

SEQ ID NO: 919546 - RNA, 18 nt, Human
aggaaaaaagcuucuaau

SEQ ID NO: 919547 - RNA, 25 nt, Human
aggcuggagugcaguggcaugaucu

SEQ ID NO: 919548 - RNA, 21 nt, Human
aguagcuggaauuacaggcau

SEQ ID NO: 919549 - RNA, 20 nt, Human
agugcaguggcaugaucucg

SEQ ID NO: 919550 - RNA, 23 nt, Human
agugcaguggcaugaucucggcu

SEQ ID NO: 919551 - RNA, 24 nt, Human
agugcaguggcaugaucucggcuc

SEQ ID NO: 919552 - RNA, 18 nt, Human
agugcugggauuacaggc

SEQ ID NO: 919553 - RNA, 24 nt, Human
caaagugcugggauuacaggcgug

SEQ ID NO: 919554 - RNA, 23 nt, Human
caacuuacuucuagaauguauua

SEQ ID NO: 919555 - RNA, 22 nt, Human
caagcgauucuccugccucagc

SEQ ID NO: 919556 - RNA, 22 nt, Human
caccauauuguccagggcgguc

SEQ ID NO: 919557 - RNA, 19 nt, Human
cagccuccugaguagcugg

SEQ ID NO: 919558 - RNA, 19 nt, Human
caugcuucuugguagucuu

SEQ ID NO: 919559 - RNA, 19 nt, Human
cauugcccaggcuggagug

SEQ ID NO: 919560 - RNA, 20 nt, Human
ccaaagugcugggauuacag

SEQ ID NO: 919561 - RNA, 22 nt, Human
ccaaagugcugggauuacaggc

SEQ ID NO: 919562 - RNA, 22 nt, Human
ccaaagugcugggauuacaggc

SEQ ID NO: 919563 - RNA, 24 nt, Human
ccaaagugcugggauuacaggcgu

SEQ ID NO: 919564 - RNA, 19 nt, Human
cccaggcuggagugcagug

SEQ ID NO: 919565 - RNA, 23 nt, Human
cccaggcuggagugcaguggcau

SEQ ID NO: 919566 - RNA, 24 nt, Human
ccuccuggguucaagcgauucucc

SEQ ID NO: 919567 - RNA, 18 nt, Human
ccucgugauccacccucc

SEQ ID NO: 919568 - RNA, 21 nt, Human
ccucgugauccacccuccuca

SEQ ID NO: 919569 - RNA, 24 nt, Human
ccucucuccauugcccaggcugga

SEQ ID NO: 919570 - RNA, 20 nt, Human
ccugaaucucgcagugacgc

SEQ ID NO: 919571 - RNA, 23 nt, Human
ccugaguagcuggaauuacaggc

SEQ ID NO: 919572 - RNA, 23 nt, Human
ccugccucagccuccugaguagc

SEQ ID NO: 919573 - RNA, 24 nt, Human
ccugccucagccuccugaguagcu

SEQ ID NO: 919574 - RNA, 23 nt, Human
ccuggguucaagcgauucuccug

SEQ ID NO: 919575 - RNA, 24 nt, Human
cgugauccacccuccucagccuuc

SEQ ID NO: 919576 - RNA, 23 nt, Human
cucacacagagaggcaaacagcu

SEQ ID NO: 919577 - RNA, 18 nt, Human
cuccugaccucgugaucc

SEQ ID NO: 919578 - RNA, 21 nt, Human
cuccuggguucaagcgauucu

SEQ ID NO: 919579 - RNA, 19 nt, Human
cucuagaguccaacagaau

SEQ ID NO: 919580 - RNA, 24 nt, Human
cucuccauugcccaggcuggagug

SEQ ID NO: 919581 - RNA, 23 nt, Human
cucucuccauugcccaggcugga

SEQ ID NO: 919582 - RNA, 24 nt, Human
cugaguagcuggaauuacaggcau

SEQ ID NO: 919583 - RNA, 24 nt, Human
cuggagugcaguggcaugaucucg

SEQ ID NO: 919584 - RNA, 22 nt, Human
gaccucgugauccacccuccuc

SEQ ID NO: 919585 - RNA, 24 nt, Human
gaccucgugauccacccuccucag

SEQ ID NO: 919586 - RNA, 21 nt, Human
gagacagagccucucuccauu

SEQ ID NO: 919587 - RNA, 25 nt, Human
gaguagcuggaauuacaggcaucua

SEQ ID NO: 919588 - RNA, 18 nt, Human
gauuacaggcgugagcca

SEQ ID NO: 919589 - RNA, 21 nt, Human
gauuacaggcgugagccaccg

SEQ ID NO: 919590 - RNA, 24 nt, Human
gauuacaggcgugagccaccguac

SEQ ID NO: 919591 - RNA, 24 nt, Human
gcgauucuccugccucagccuccu

SEQ ID NO: 919592 - RNA, 23 nt, Human
ggcggucuccaacuccugaccuc

SEQ ID NO: 919593 - RNA, 18 nt, Human
guacaaugcugagaaccu

SEQ ID NO: 919594 - RNA, 18 nt, Human
gucuauuuaauuuucuuu

SEQ ID NO: 919595 - RNA, 24 nt, Human
gugauccacccuccucagccuucc

SEQ ID NO: 919596 - RNA, 27 nt, Human
uaauuuuucugugcguuuuuaguagag

SEQ ID NO: 919597 - RNA, 28 nt, Human
uaauuuuucugugcguuuuuaguagaga

SEQ ID NO: 919598 - RNA, 25 nt, Human
uacaaugcugagaaccugggucacc

SEQ ID NO: 919599 - RNA, 22 nt, Human
uacaggcgugagccaccguacc

SEQ ID NO: 919600 - RNA, 22 nt, Human
uacaggcgugagccaccguacc

SEQ ID NO: 919601 - RNA, 23 nt, Human
uacaggcgugagccaccguaccu

SEQ ID NO: 919602 - RNA, 22 nt, Human
uaccaccaugccuggcuaauuu

SEQ ID NO: 919603 - RNA, 21 nt, Human
uagauguauccagauagaaca

SEQ ID NO: 919604 - RNA, 24 nt, Human
uagggcuucaccauauuguccagg

SEQ ID NO: 919605 - RNA, 26 nt, Human
uaguagagauagggcuucaccauauu

SEQ ID NO: 919606 - RNA, 21 nt, Human
uaugaaguuuaguauuuuugu

SEQ ID NO: 919607 - RNA, 18 nt, Human
uaugccaaaagugaagau

SEQ ID NO: 919608 - RNA, 19 nt, Human
ucaagcgauucuccugccu

SEQ ID NO: 919609 - RNA, 24 nt, Human
ucacggcaaucuucgccuccuggg

SEQ ID NO: 919610 - RNA, 25 nt, Human
ucacggcaaucuucgccuccugggu

SEQ ID NO: 919611 - RNA, 22 nt, Human
ucagccuccugaguagcuggaa

SEQ ID NO: 919612 - RNA, 23 nt, Human
uccaaagugcugggauuacaggc

SEQ ID NO: 919613 - RNA, 24 nt, Human
uccaaagugcugggauuacaggcg

SEQ ID NO: 919614 - RNA, 21 nt, Human
uccacccuccucagccuucca

SEQ ID NO: 919615 - RNA, 24 nt, Human
uccauugcccaggcuggagugcag

SEQ ID NO: 919616 - RNA, 28 nt, Human
ucccuugccauaugccaaaagugaagau

SEQ ID NO: 919617 - RNA, 21 nt, Human
uccucagccuuccaaagugcu

SEQ ID NO: 919618 - RNA, 24 nt, Human
uccugaguagcuggaauuacaggc

SEQ ID NO: 919619 - RNA, 21 nt, Human
uccuggguucaagcgauucuc

SEQ ID NO: 919620 - RNA, 24 nt, Human
uccuggguucaagcgauucuccug

SEQ ID NO: 919621 - RNA, 22 nt, Human
uccuuaaaauaaacaaaaaaua

SEQ ID NO: 919622 - RNA, 21 nt, Human
ucuauuugaaaagggccauaa

SEQ ID NO: 919623 - RNA, 28 nt, Human
ucuccaacuccugaccucgugauccacc

SEQ ID NO: 919624 - RNA, 25 nt, Human
ucuccauugcccaggcuggagugca

SEQ ID NO: 919625 - RNA, 24 nt, Human
ucuccugccucagccuccugagua

SEQ ID NO: 919626 - RNA, 21 nt, Human
ucucuccauugcccaggcugg

SEQ ID NO: 919627 - RNA, 21 nt, Human
ucucuccauugcccaggcugg

SEQ ID NO: 919628 - RNA, 22 nt, Human
ucucuccauugcccaggcugga

SEQ ID NO: 919629 - RNA, 24 nt, Human
ucucuccauugcccaggcuggagu

SEQ ID NO: 919630 - RNA, 23 nt, Human
ucugugcguuuuuaguagagaua

SEQ ID NO: 919631 - RNA, 29 nt, Human
ugaaaccaagaacaacaaugcuagcaaac

SEQ ID NO: 919632 - RNA, 21 nt, Human
ugagaaccugggucaccuaau

SEQ ID NO: 919633 - RNA, 22 nt, Human
ugagcaaaguaaaaaauaaugu

SEQ ID NO: 919634 - RNA, 18 nt, Human
ugcccaggcuggagugca

SEQ ID NO: 919635 - RNA, 22 nt, Human
ugcccaggcuggagugcagugg

SEQ ID NO: 919636 - RNA, 24 nt, Human
ugcccaggcuggagugcaguggca

SEQ ID NO: 919637 - RNA, 24 nt, Human
ugccucagccuccugaguagcugg

SEQ ID NO: 919638 - RNA, 24 nt, Human
ugcugggauuacaggcgugagcca

SEQ ID NO: 919639 - RNA, 19 nt, Human
uggaauuacaggcaucuac

SEQ ID NO: 919640 - RNA, 21 nt, Human
uggaauuacaggcaucuacca

SEQ ID NO: 919641 - RNA, 24 nt, Human
uggaauuacaggcaucuaccacca

SEQ ID NO: 919642 - RNA, 19 nt, Human
uggagugcaguggcaugau

SEQ ID NO: 919643 - RNA, 24 nt, Human
uggagugcaguggcaugaucucgg

SEQ ID NO: 919644 - RNA, 22 nt, Human
ugggauauuuauuaaaaaguau

SEQ ID NO: 919645 - RNA, 18 nt, Human
ugggauuacaggcgugag

SEQ ID NO: 919646 - RNA, 21 nt, Human
ugggauuacaggcgugagcca

SEQ ID NO: 919647 - RNA, 22 nt, Human
ugggauuacaggcgugagccac

SEQ ID NO: 919648 - RNA, 23 nt, Human
ugggauuacaggcgugagccacc

SEQ ID NO: 919649 - RNA, 23 nt, Human
ugggauuacaggcgugagccacc

SEQ ID NO: 919650 - RNA, 24 nt, Human
ugggauuacaggcgugagccaccg

SEQ ID NO: 919651 - RNA, 19 nt, Human
ugggucaccuaaugaaauu

SEQ ID NO: 919652 - RNA, 23 nt, Human
uggguucaagcgauucuccugcc

SEQ ID NO: 919653 - RNA, 19 nt, Human
uuagaagacaagccaagau

SEQ ID NO: 919654 - RNA, 23 nt, Human
uuagaagacaguuuagcaaccag

SEQ ID NO: 919655 - RNA, 18 nt, Human
uuaguagagauagggcuu

SEQ ID NO: 919656 - RNA, 24 nt, Human
uuaguagagauagggcuucaccau

SEQ ID NO: 919657 - RNA, 21 nt, Human
uucaagcgauucuccugccuc

SEQ ID NO: 919658 - RNA, 23 nt, Human
uucaagcgauucuccugccucag

SEQ ID NO: 919659 - RNA, 24 nt, Human
uucaagcgauucuccugccucagc

SEQ ID NO: 919660 - RNA, 24 nt, Human
uugcccaggcuggagugcaguggc

SEQ ID NO: 919661 - RNA, 24 nt, Human
uuuuuaguagagauagggcuucac

SEQ ID NO: 919662 - RNA, 18 nt, Human
aagacaaaggcauggagc

SEQ ID NO: 919663 - RNA, 18 nt, Human
aagcgggcucaggcagac

SEQ ID NO: 919664 - RNA, 18 nt, Human
acacagagccgcgcccgg

SEQ ID NO: 919665 - RNA, 20 nt, Human
acucagccacgucucagugg

SEQ ID NO: 919666 - RNA, 21 nt, Human
agacaaaggcauggagcugua

SEQ ID NO: 919667 - RNA, 19 nt, Human
aggaagauuucacucagcc

SEQ ID NO: 919668 - RNA, 24 nt, Human
aggcagacgccccgcguuucuccg

SEQ ID NO: 919669 - RNA, 24 nt, Human
auggagcuguauggaugacacacc

SEQ ID NO: 919670 - RNA, 19 nt, Human
auuucacucagccacgucu

SEQ ID NO: 919671 - RNA, 21 nt, Human
caagacccuucaaccucgucc

SEQ ID NO: 919672 - RNA, 20 nt, Human
cacagcacggugccaagggc

SEQ ID NO: 919673 - RNA, 18 nt, Human
caccacccaccgcccugc

SEQ ID NO: 919674 - RNA, 23 nt, Human
cagagagcuuuucaaugagaccc

SEQ ID NO: 919675 - RNA, 22 nt, Human
cagaucaaacuccacccugcag

SEQ ID NO: 919676 - RNA, 18 nt, Human
cagcccuggcucgugguu

SEQ ID NO: 919677 - RNA, 23 nt, Human
caucagagagcuuuucaaugaga

SEQ ID NO: 919678 - RNA, 21 nt, Human
caugcaagccccagcccuggc

SEQ ID NO: 919679 - RNA, 24 nt, Human
cccuccaacacugagcugucccgg

SEQ ID NO: 919680 - RNA, 19 nt, Human
ccgacgguugggggugagg

SEQ ID NO: 919681 - RNA, 21 nt, Human
ccucccagcgugggcccaccc

SEQ ID NO: 919682 - RNA, 22 nt, Human
ccugcucaacguucgauucacc

SEQ ID NO: 919683 - RNA, 18 nt, Human
ccuucaaccucgucccga

SEQ ID NO: 919684 - RNA, 22 nt, Human
ccuucaaccucgucccgacccc

SEQ ID NO: 919685 - RNA, 20 nt, Human
cgcucggcacuccacaccac

SEQ ID NO: 919686 - RNA, 22 nt, Human
cucagcccagcccguguccucc

SEQ ID NO: 919687 - RNA, 20 nt, Human
cuccacaccacccaccgccc

SEQ ID NO: 919688 - RNA, 24 nt, Human
cugccagaucaaacuccacccugc

SEQ ID NO: 919689 - RNA, 24 nt, Human
cuucaaccucgucccgaccccagc

SEQ ID NO: 919690 - RNA, 20 nt, Human
gacaaugacaugcaagcccc

SEQ ID NO: 919691 - RNA, 19 nt, Human
gacacaccuugaccacuga

SEQ ID NO: 919692 - RNA, 22 nt, Human
gacgguugggggugaggccgcu

SEQ ID NO: 919693 - RNA, 24 nt, Human
gccgggacuugcucagguugcugg

SEQ ID NO: 919694 - RNA, 25 nt, Human
gcgggcucaggcagacgccccgcgu

SEQ ID NO: 919695 - RNA, 19 nt, Human
gcucccggcaacgccucgg

SEQ ID NO: 919696 - RNA, 18 nt, Human
gcuggccucugaaauacu

SEQ ID NO: 919697 - RNA, 25 nt, Human
ggccgggacuugcucagguugcugg

SEQ ID NO: 919698 - RNA, 24 nt, Human
gggcagggccgggacuugcucagg

SEQ ID NO: 919699 - RNA, 19 nt, Human
gguugggggugaggccgcu

SEQ ID NO: 919700 - RNA, 22 nt, Human
uagaggcccugcucagcccagc

SEQ ID NO: 919701 - RNA, 20 nt, Human
ucaaugagacccccaaugug

SEQ ID NO: 919702 - RNA, 19 nt, Human
ucaucagagagcuuuucaa

SEQ ID NO: 919703 - RNA, 21 nt, Human
uccacacagcacggugccaag

SEQ ID NO: 919704 - RNA, 23 nt, Human
uccacacagcacggugccaaggg

SEQ ID NO: 919705 - RNA, 25 nt, Human
uccacccugcagcaauuagcaagga

SEQ ID NO: 919706 - RNA, 19 nt, Human
ucguugucgaugacuccua

SEQ ID NO: 919707 - RNA, 21 nt, Human
ucuccgaguccacacagagcc

SEQ ID NO: 919708 - RNA, 20 nt, Human
ucuuaguucaggggugaaga

SEQ ID NO: 919709 - RNA, 19 nt, Human
ugaaauacucccugugucu

SEQ ID NO: 919710 - RNA, 21 nt, Human
ugacacaccuugaccacugac

SEQ ID NO: 919711 - RNA, 21 nt, Human
ugacaugcaagccccagcccu

SEQ ID NO: 919712 - RNA, 22 nt, Human
ugccaagggcagucuugacgcu

SEQ ID NO: 919713 - RNA, 23 nt, Human
ugccaagggcagucuugacgcug

SEQ ID NO: 919714 - RNA, 18 nt, Human
ugccgggcucgcugaggg

SEQ ID NO: 919715 - RNA, 20 nt, Human
ugcucagguugcuggguguu

SEQ ID NO: 919716 - RNA, 19 nt, Human
uggccucugaaauacuccc

SEQ ID NO: 919717 - RNA, 21 nt, Human
uggcucgugguucagguggcc

SEQ ID NO: 919718 - RNA, 20 nt, Human
ugucccgggacgccugccgg

SEQ ID NO: 919719 - RNA, 19 nt, Human
uucuccgaguccacacaga

SEQ ID NO: 919720 - RNA, 26 nt, Human
uugcuggguguucaugaaggaggauc

SEQ ID NO: 919721 - RNA, 24 nt, Human
acccacucccacccucuggcaccc

SEQ ID NO: 919722 - RNA, 24 nt, Human
acugcuucccagcuggcucuccug

SEQ ID NO: 919723 - RNA, 18 nt, Human
aggaggcggccggacgcg

SEQ ID NO: 919724 - RNA, 22 nt, Human
agggcagcucgggguaccccgg

SEQ ID NO: 919725 - RNA, 25 nt, Human
augcuggguuccauuccagcugcac

SEQ ID NO: 919726 - RNA, 24 nt, Human
caagagggcagcucgggguacccc

SEQ ID NO: 919727 - RNA, 29 nt, Human
cacauacacacacgcgcacccacucccaa

SEQ ID NO: 919728 - RNA, 21 nt, Human
cacucagcuguccaguuacac

SEQ ID NO: 919729 - RNA, 19 nt, Human
cagcggagcgcggggcccc

SEQ ID NO: 919730 - RNA, 23 nt, Human
cagcuggcucuccugggaaguuc

SEQ ID NO: 919731 - RNA, 21 nt, Human
cagcuuccucauggccggaug

SEQ ID NO: 919732 - RNA, 22 nt, Human
ccacucccacccucuggcaccc

SEQ ID NO: 919733 - RNA, 23 nt, Human
ccucacauacacacacgcgcacc

SEQ ID NO: 919734 - RNA, 28 nt, Human
ccucauggccggaugguccaguacugcu

SEQ ID NO: 919735 - RNA, 22 nt, Human
ccucugggucgcccuccggccc

SEQ ID NO: 919736 - RNA, 23 nt, Human
cggcccgggccgcuaggaggcgg

SEQ ID NO: 919737 - RNA, 26 nt, Human
cggggcgggcagcguggucgcggccc

SEQ ID NO: 919738 - RNA, 18 nt, Human
cuccaaugcuggguucca

SEQ ID NO: 919739 - RNA, 18 nt, Human
cucccacccucuggcacc

SEQ ID NO: 919740 - RNA, 21 nt, Human
gcacccacucccacccucugg

SEQ ID NO: 919741 - RNA, 23 nt, Human
gcggagcgcggggccccgggcuc

SEQ ID NO: 919742 - RNA, 19 nt, Human
ggccggaugguccaguacu

SEQ ID NO: 919743 - RNA, 21 nt, Human
gggcagcguggucgcggcccg

SEQ ID NO: 919744 - RNA, 24 nt, Human
gggcagcguggucgcggcccgggc

SEQ ID NO: 919745 - RNA, 18 nt, Human
gggcucggggcggggcgg

SEQ ID NO: 919746 - RNA, 21 nt, Human
ggggcggggcgggcagcgugg

SEQ ID NO: 919747 - RNA, 25 nt, Human
ggggcggggcgggcagcguggucgc

SEQ ID NO: 919748 - RNA, 19 nt, Human
ggucuguauuccacaggga

SEQ ID NO: 919749 - RNA, 22 nt, Human
uacacacacgcgcacccacucc

SEQ ID NO: 919750 - RNA, 20 nt, Human
uacacggucuguauuccacc

SEQ ID NO: 919751 - RNA, 20 nt, Human
uaccaaaaaauauuacuaua

SEQ ID NO: 919752 - RNA, 19 nt, Human
uagaguuuaugacacucag

SEQ ID NO: 919753 - RNA, 18 nt, Human
uaugacacucagcugucc

SEQ ID NO: 919754 - RNA, 19 nt, Human
uaugacacucagcugucca

SEQ ID NO: 919755 - RNA, 29 nt, Human
uauuuuagaguuuaugacacucagcuggu

SEQ ID NO: 919756 - RNA, 20 nt, Human
ucacugcagcggagcgcggu

SEQ ID NO: 919757 - RNA, 23 nt, Human
ucccacccucuggcacccauccu

SEQ ID NO: 919758 - RNA, 22 nt, Human
uccugggaaguuccuggaccca

SEQ ID NO: 919759 - RNA, 19 nt, Human
ucuggcacccauccucccc

SEQ ID NO: 919760 - RNA, 24 nt, Human
ugaccagccgccccgccaaggagu

SEQ ID NO: 919761 - RNA, 24 nt, Human
ugcuggguuccauuccagcugcac

SEQ ID NO: 919762 - RNA, 22 nt, Human
uggacggaaugcggcucucucc

SEQ ID NO: 919763 - RNA, 24 nt, Human
ugugcacgagggagcagcccaaga

SEQ ID NO: 919764 - RNA, 23 nt, Human
aacaagugggccugaagccugag

SEQ ID NO: 919765 - RNA, 23 nt, Human
acuccauuucaaguggguaaugu

SEQ ID NO: 919766 - RNA, 22 nt, Human
agccugagcaguguagccagcu

SEQ ID NO: 919767 - RNA, 19 nt, Human
gccagcuguguggggagca

SEQ ID NO: 919768 - RNA, 23 nt, Human
uggaagaugcuguugcuacccag

SEQ ID NO: 919769 - RNA, 22 nt, Human
uuuuuuuuuuuuuugccacgga

SEQ ID NO: 919770 - RNA, 23 nt, Human
uuuuuuuuuuuuuuuugccacgg

SEQ ID NO: 919771 - RNA, 21 nt, Human
aaaaaggugagggggcagggg

SEQ ID NO: 919772 - RNA, 18 nt, Human
aaacagauugaugcagac

SEQ ID NO: 919773 - RNA, 26 nt, Human
aaagcaguuuuauuccugagaugagg

SEQ ID NO: 919774 - RNA, 22 nt, Human
aacucccaaauaacuacagccc

SEQ ID NO: 919775 - RNA, 23 nt, Human
aacuugaaagcuuccacuagugg

SEQ ID NO: 919776 - RNA, 22 nt, Human
aagaaaugacuucaaaaucaag

SEQ ID NO: 919777 - RNA, 24 nt, Human
aagggcacaggauuugaacugaag

SEQ ID NO: 919778 - RNA, 25 nt, Human
aaguacacaucuagaaagugaacaa

SEQ ID NO: 919779 - RNA, 21 nt, Human
acagauaugagugaggaccau

SEQ ID NO: 919780 - RNA, 20 nt, Human
acauugacauuguugccauu

SEQ ID NO: 919781 - RNA, 22 nt, Human
acccuuguuagugagcacucca

SEQ ID NO: 919782 - RNA, 19 nt, Human
acugaacuuggccaugcau

SEQ ID NO: 919783 - RNA, 19 nt, Human
acugcauugagauuucaac

SEQ ID NO: 919784 - RNA, 23 nt, Human
agaacacugcauuucacaaagca

SEQ ID NO: 919785 - RNA, 19 nt, Human
agacaauacuuucagccuc

SEQ ID NO: 919786 - RNA, 20 nt, Human
agauaaauuaggcacaucag

SEQ ID NO: 919787 - RNA, 18 nt, Human
agcagcaaauaagggcac

SEQ ID NO: 919788 - RNA, 18 nt, Human
aggugagggggcaggggg

SEQ ID NO: 919789 - RNA, 19 nt, Human
aucuggauuaucuaauuca

SEQ ID NO: 919790 - RNA, 18 nt, Human
augacacuuuuacacuga

SEQ ID NO: 919791 - RNA, 20 nt, Human
auuccaccaaaagcaccaua

SEQ ID NO: 919792 - RNA, 24 nt, Human
caacaugcuucuaacuaacuugaa

SEQ ID NO: 919793 - RNA, 24 nt, Human
caagcagcaaauaagggcacagga

SEQ ID NO: 919794 - RNA, 26 nt, Human
caagugaaacugccaauacuucuuuu

SEQ ID NO: 919795 - RNA, 24 nt, Human
cacaguguuucaacaguggagugu

SEQ ID NO: 919796 - RNA, 22 nt, Human
cacauaauucacagacuauacc

SEQ ID NO: 919797 - RNA, 24 nt, Human
caccauaacagguuaugaaacucc

SEQ ID NO: 919798 - RNA, 19 nt, Human
cacugcauuucacaaagca

SEQ ID NO: 919799 - RNA, 20 nt, Human
cacugcuguguagucggacc

SEQ ID NO: 919800 - RNA, 25 nt, Human
cacuguacuuugaguuuccuagaga

SEQ ID NO: 919801 - RNA, 22 nt, Human
cacuguauauccugacugaaau

SEQ ID NO: 919802 - RNA, 18 nt, Human
cagaauagaagagugggc

SEQ ID NO: 919803 - RNA, 21 nt, Human
caguggagugugguugucaug

SEQ ID NO: 919804 - RNA, 22 nt, Human
caugaaaaugcaguauugacac

SEQ ID NO: 919805 - RNA, 22 nt, Human
cauguuaaauugaaaaagggau

SEQ ID NO: 919806 - RNA, 21 nt, Human
cauuguuaucaguuaaaaucc

SEQ ID NO: 919807 - RNA, 18 nt, Human
cauuguugccauuguccu

SEQ ID NO: 919808 - RNA, 18 nt, Human
ccagccauuuuuuucccc

SEQ ID NO: 919809 - RNA, 21 nt, Human
cccauaggcauuggccaggcu

SEQ ID NO: 919810 - RNA, 19 nt, Human
cccuuuacccucuuuauuc

SEQ ID NO: 919811 - RNA, 22 nt, Human
ccuccuucauuccaauuacuuc

SEQ ID NO: 919812 - RNA, 19 nt, Human
cgggaaagggguuggggga

SEQ ID NO: 919813 - RNA, 21 nt, Human
cuauaguguauuuguaccuga

SEQ ID NO: 919814 - RNA, 22 nt, Human
cuauaguuggggccauguugac

SEQ ID NO: 919815 - RNA, 20 nt, Human
cucaugccccagggcagacc

SEQ ID NO: 919816 - RNA, 21 nt, Human
cugaacuuggccaugcaucaa

SEQ ID NO: 919817 - RNA, 23 nt, Human
cuguaaacacugaacuuggccau

SEQ ID NO: 919818 - RNA, 21 nt, Human
gaaagggguugggggaagccc

SEQ ID NO: 919819 - RNA, 18 nt, Human
gaacugaagggaacuacu

SEQ ID NO: 919820 - RNA, 19 nt, Human
gaacuuucaccaccacuaa

SEQ ID NO: 919821 - RNA, 24 nt, Human
gcagaccauguuaaauugaaaaag

SEQ ID NO: 919822 - RNA, 19 nt, Human
gcagcaaauaagggcacag

SEQ ID NO: 919823 - RNA, 20 nt, Human
gcaugagaaaugaguuaaca

SEQ ID NO: 919824 - RNA, 18 nt, Human
gcugcuucacugaaugaa

SEQ ID NO: 919825 - RNA, 18 nt, Human
ggcacuauaguuggggcc

SEQ ID NO: 919826 - RNA, 20 nt, Human
ggccacccauaggcauuggc

SEQ ID NO: 919827 - RNA, 19 nt, Human
guacuauccuauaaacaca

SEQ ID NO: 919828 - RNA, 22 nt, Human
gucugaacuaaaaaaagacaaa

SEQ ID NO: 919829 - RNA, 20 nt, Human
gugagggggcaggggguucc

SEQ ID NO: 919830 - RNA, 22 nt, Human
guggcguuaagagagaacacug

SEQ ID NO: 919831 - RNA, 18 nt, Human
uaaaauccauauggcuuu

SEQ ID NO: 919832 - RNA, 24 nt, Human
uaaauaauaaaaauuccaccaaaa

SEQ ID NO: 919833 - RNA, 18 nt, Human
uaacuugaaagcuuccac

SEQ ID NO: 919834 - RNA, 25 nt, Human
uaacuugaaagcuuccacuagugag

SEQ ID NO: 919835 - RNA, 18 nt, Human
uaauggcaugagaaauga

SEQ ID NO: 919836 - RNA, 20 nt, Human
uacaacuaaacagaccuggc

SEQ ID NO: 919837 - RNA, 20 nt, Human
uacaaugauguaucuggauu

SEQ ID NO: 919838 - RNA, 24 nt, Human
uacacaucuagaaagugaacaaag

SEQ ID NO: 919839 - RNA, 22 nt, Human
uacaccuuaccugaaugaacac

SEQ ID NO: 919840 - RNA, 20 nt, Human
uaccacuauaaaugugguca

SEQ ID NO: 919841 - RNA, 19 nt, Human
uaccuugggggaaauaauu

SEQ ID NO: 919842 - RNA, 22 nt, Human
uacuuucagccuccuucauucc

SEQ ID NO: 919843 - RNA, 23 nt, Human
uagauuaaaaccaguugacagcc

SEQ ID NO: 919844 - RNA, 24 nt, Human
uagcaaaaagcagacaguuucaaa

SEQ ID NO: 919845 - RNA, 21 nt, Human
uagcaucauagauuaaaacca

SEQ ID NO: 919846 - RNA, 19 nt, Human
uagggcuccggcaagggcg

SEQ ID NO: 919847 - RNA, 20 nt, Human
uauccugacugaaauaacua

SEQ ID NO: 919848 - RNA, 22 nt, Human
uaugaaggaucacucaugacua

SEQ ID NO: 919849 - RNA, 22 nt, Human
uaugacacuuuuacacugauuu

SEQ ID NO: 919850 - RNA, 19 nt, Human
uauugcuuacgucagcaag

SEQ ID NO: 919851 - RNA, 21 nt, Human
ucacagacgugagaagaagaa

SEQ ID NO: 919852 - RNA, 18 nt, Human
ucagaccaauaaccacua

SEQ ID NO: 919853 - RNA, 18 nt, Human
ucaguuggugaccugaag

SEQ ID NO: 919854 - RNA, 19 nt, Human
ucccaaauaacuacagccc

SEQ ID NO: 919855 - RNA, 18 nt, Human
uccuucauuccaauuacu

SEQ ID NO: 919856 - RNA, 23 nt, Human
ucuagaaagugaacaaaggaaac

SEQ ID NO: 919857 - RNA, 22 nt, Human
ucucaguggccucugggcucac

SEQ ID NO: 919858 - RNA, 21 nt, Human
ucucugcagucugaagcuaca

SEQ ID NO: 919859 - RNA, 18 nt, Human
ucugaacuaaaaaaagac

SEQ ID NO: 919860 - RNA, 24 nt, Human
ucuguaaacacugaacuuggccau

SEQ ID NO: 919861 - RNA, 24 nt, Human
ucuguuaugggccuggggaacgug

SEQ ID NO: 919862 - RNA, 23 nt, Human
ugaaaaugcaguauugacacuau

SEQ ID NO: 919863 - RNA, 24 nt, Human
ugaaacugcagaaauagcaaaaag

SEQ ID NO: 919864 - RNA, 19 nt, Human
ugaaauaacuaacuugaaa

SEQ ID NO: 919865 - RNA, 21 nt, Human
ugaaaugaaaagcacacgucc

SEQ ID NO: 919866 - RNA, 18 nt, Human
ugacaacaugcuucuaac

SEQ ID NO: 919867 - RNA, 18 nt, Human
ugacacugcaccugaugg

SEQ ID NO: 919868 - RNA, 24 nt, Human
ugacagcggucuccuaaaaugcua

SEQ ID NO: 919869 - RNA, 21 nt, Human
ugacuucaguuggugacccca

SEQ ID NO: 919870 - RNA, 18 nt, Human
ugagauuucaacacugua

SEQ ID NO: 919871 - RNA, 19 nt, Human
ugagggggcaggggguucc

SEQ ID NO: 919872 - RNA, 19 nt, Human
ugaguguagaacuuucacc

SEQ ID NO: 919873 - RNA, 18 nt, Human
ugccccagggcagaccgg

SEQ ID NO: 919874 - RNA, 22 nt, Human
uggcaugagaaaugaguuaaca

SEQ ID NO: 919875 - RNA, 18 nt, Human
uggccaggcuggucugcu

SEQ ID NO: 919876 - RNA, 29 nt, Human
uggccaggcuggucugcuguugacuaggg

SEQ ID NO: 919877 - RNA, 30 nt, Human
uggccaggcuggucugcuguugacuagggg

SEQ ID NO: 919878 - RNA, 19 nt, Human
uggccucugggcucacuuu

SEQ ID NO: 919879 - RNA, 19 nt, Human
uggggaacguguacuaucc

SEQ ID NO: 919880 - RNA, 19 nt, Human
ugggggaagcccaggaagg

SEQ ID NO: 919881 - RNA, 21 nt, Human
ugggggaagcccaggaagggu

SEQ ID NO: 919882 - RNA, 19 nt, Human
uggucugcuguugacuagg

SEQ ID NO: 919883 - RNA, 26 nt, Human
uggugggaaggggguugaccggaacg

SEQ ID NO: 919884 - RNA, 26 nt, Human
uggugggaaggggguugaccggaacg

SEQ ID NO: 919885 - RNA, 26 nt, Human
ugucaguaaucugcauucucaguggc

SEQ ID NO: 919886 - RNA, 21 nt, Human
ugugaacaaaugaauaguugc

SEQ ID NO: 919887 - RNA, 22 nt, Human
uuaucaaggauuugauggggaa

SEQ ID NO: 919888 - RNA, 18 nt, Human
uucaaaaucaagagaaaa

SEQ ID NO: 919889 - RNA, 20 nt, Human
uucaaaggugaaaaaaauuu

SEQ ID NO: 919890 - RNA, 19 nt, Human
uucaacaguggaguguggu

SEQ ID NO: 919891 - RNA, 20 nt, Human
uucaacaguggagugugguu

SEQ ID NO: 919892 - RNA, 23 nt, Human
uucauuguuaucaguuaaaaucc

SEQ ID NO: 919893 - RNA, 20 nt, Human
uucccuuuacccucuuuauu

SEQ ID NO: 919894 - RNA, 22 nt, Human
uucccuuuacccucuuuauucu

SEQ ID NO: 919895 - RNA, 19 nt, Human
uugaacugaagggaacuac

SEQ ID NO: 919896 - RNA, 24 nt, Human
uuucuaauuauuacaauaaauagu

SEQ ID NO: 919897 - RNA, 22 nt, Human
aaggaaaagaucugggaaugaa

SEQ ID NO: 919898 - RNA, 21 nt, Human
aaggagcccaagccagagggc

SEQ ID NO: 919899 - RNA, 20 nt, Human
acacccuggggcugcccuuc

SEQ ID NO: 919900 - RNA, 25 nt, Human
accccagccugaagagugaugccau

SEQ ID NO: 919901 - RNA, 21 nt, Human
augaagcccuguggccaggaa

SEQ ID NO: 919902 - RNA, 23 nt, Human
caacuucugggccuccaggcacu

SEQ ID NO: 919903 - RNA, 21 nt, Human
cacacccuggggcugcccuuc

SEQ ID NO: 919904 - RNA, 25 nt, Human
caccccagccugaagagugaugcca

SEQ ID NO: 919905 - RNA, 21 nt, Human
caggccccagccagaaaaagg

SEQ ID NO: 919906 - RNA, 18 nt, Human
cauguccaaucucccaca

SEQ ID NO: 919907 - RNA, 24 nt, Human
ccccagccugaagagugaugccau

SEQ ID NO: 919908 - RNA, 21 nt, Human
ccuccaggcacucuucccacc

SEQ ID NO: 919909 - RNA, 26 nt, Human
ccuguggccaggaagauagacagggc

SEQ ID NO: 919910 - RNA, 22 nt, Human
cgcaacaucauuggcccagggg

SEQ ID NO: 919911 - RNA, 19 nt, Human
gaaggaaaagaucugggaa

SEQ ID NO: 919912 - RNA, 22 nt, Human
gcagcaacuucugggccuccag

SEQ ID NO: 919913 - RNA, 20 nt, Human
gcccaagccagagggcaagu

SEQ ID NO: 919914 - RNA, 18 nt, Human
gcccgggccgcgcgggga

SEQ ID NO: 919915 - RNA, 22 nt, Human
gcccgggccgcgcggggaccuc

SEQ ID NO: 919916 - RNA, 23 nt, Human
gggagcacaccccagccugaaga

SEQ ID NO: 919917 - RNA, 19 nt, Human
gggaguccgagaagagcug

SEQ ID NO: 919918 - RNA, 22 nt, Human
gggcuccccauuauccccaccc

SEQ ID NO: 919919 - RNA, 19 nt, Human
ggugggugggugaggguag

SEQ ID NO: 919920 - RNA, 20 nt, Human
gucuuucuugauagccaagu

SEQ ID NO: 919921 - RNA, 22 nt, Human
ucccaccauagcaaugugggca

SEQ ID NO: 919922 - RNA, 20 nt, Human
ucccaguccccuucucugca

SEQ ID NO: 919923 - RNA, 21 nt, Human
uccccaccccuuuggucccag

SEQ ID NO: 919924 - RNA, 23 nt, Human
ugaagagugaugccauuggccag

SEQ ID NO: 919925 - RNA, 19 nt, Human
ugcaaugggcacgcauaga

SEQ ID NO: 919926 - RNA, 22 nt, Human
uggaaggaaaagaucugggaau

SEQ ID NO: 919927 - RNA, 23 nt, Human
ugggcaaaacuggugucaggccc

SEQ ID NO: 919928 - RNA, 25 nt, Human
ugggcaaaacuggugucaggcccca

SEQ ID NO: 919929 - RNA, 19 nt, Human
ugucauagccguuggcugu

SEQ ID NO: 919930 - RNA, 21 nt, Human
uucccaaugucuuucuugaua

SEQ ID NO: 919931 - RNA, 20 nt, Human
uuuucaggcucugucauugg

SEQ ID NO: 919932 - RNA, 22 nt, Human
aaaaaaccuacauucaaaguac

SEQ ID NO: 919933 - RNA, 25 nt, Human
aaaaauaugugcuccuuaaugcucc

SEQ ID NO: 919934 - RNA, 20 nt, Human
aaaaaugucauuuccccaaa

SEQ ID NO: 919935 - RNA, 18 nt, Human
aaaagauacccaaaaucc

SEQ ID NO: 919936 - RNA, 19 nt, Human
aaacaaaagcugacaacag

SEQ ID NO: 919937 - RNA, 22 nt, Human
aaauacauucucaaggaaugca

SEQ ID NO: 919938 - RNA, 26 nt, Human
aagcacugaaguucuuuaugugagcu

SEQ ID NO: 919939 - RNA, 18 nt, Human
aauggaaaacacuccaaa

SEQ ID NO: 919940 - RNA, 21 nt, Human
acaacaaaaaaaccuacauuc

SEQ ID NO: 919941 - RNA, 24 nt, Human
acaacaaaaaaaccuacauucaaa

SEQ ID NO: 919942 - RNA, 20 nt, Human
acacucaauuaaaaauuucu

SEQ ID NO: 919943 - RNA, 25 nt, Human
acacugcaguuuaccuaaauuacac

SEQ ID NO: 919944 - RNA, 23 nt, Human
acaguagcaaauaaucuaacuuc

SEQ ID NO: 919945 - RNA, 21 nt, Human
accuugaagaaucuuuacaua

SEQ ID NO: 919946 - RNA, 21 nt, Human
acugccaacucuguuuaucug

SEQ ID NO: 919947 - RNA, 25 nt, Human
acugugcuuuuucucuccauuaaaa

SEQ ID NO: 919948 - RNA, 22 nt, Human
acuuauacaucuggauuguuug

SEQ ID NO: 919949 - RNA, 22 nt, Human
agagaaaaagacauaacuaaaa

SEQ ID NO: 919950 - RNA, 18 nt, Human
agauauugaaagcagcuu

SEQ ID NO: 919951 - RNA, 21 nt, Human
agcauggaguaagaggaggga

SEQ ID NO: 919952 - RNA, 21 nt, Human
agccaaaaaaaaaaagauagg

SEQ ID NO: 919953 - RNA, 26 nt, Human
agccaucagcccaccucuccuucaaa

SEQ ID NO: 919954 - RNA, 22 nt, Human
agcgguucuuuuucuuaaaguu

SEQ ID NO: 919955 - RNA, 20 nt, Human
aggaaacuuucaaggcaaau

SEQ ID NO: 919956 - RNA, 20 nt, Human
aggaaggaggaaauguccuc

SEQ ID NO: 919957 - RNA, 21 nt, Human
agguggcggcggcgagagcgg

SEQ ID NO: 919958 - RNA, 18 nt, Human
agugaaauaccaagaaug

SEQ ID NO: 919959 - RNA, 24 nt, Human
auaacuaaacuacuucaaacccaa

SEQ ID NO: 919960 - RNA, 22 nt, Human
auggaaaacacuccaaaauaca

SEQ ID NO: 919961 - RNA, 19 nt, Human
caaaagauacccaaaaucc

SEQ ID NO: 919962 - RNA, 25 nt, Human
caaaagauacccaaaauccugagug

SEQ ID NO: 919963 - RNA, 24 nt, Human
caaaagcugacaacaguuuuauug

SEQ ID NO: 919964 - RNA, 18 nt, Human
caacaaaaaaaccuacau

SEQ ID NO: 919965 - RNA, 26 nt, Human
caacaacaaaaaaaccuacauucaaa

SEQ ID NO: 919966 - RNA, 22 nt, Human
caacauugaaagcucaaaagaa

SEQ ID NO: 919967 - RNA, 23 nt, Human
caacauugaaagcucaaaagaag

SEQ ID NO: 919968 - RNA, 23 nt, Human
caaucccuggcuuaauaaacaca

SEQ ID NO: 919969 - RNA, 19 nt, Human
cacaaucccuggcuuaaua

SEQ ID NO: 919970 - RNA, 19 nt, Human
cagccggggcggcggggcc

SEQ ID NO: 919971 - RNA, 23 nt, Human
cauacagagaaaaagacauaacu

SEQ ID NO: 919972 - RNA, 21 nt, Human
ccagccaaaaaaaaaaagaua

SEQ ID NO: 919973 - RNA, 20 nt, Human
cccagccaaaaaaaaaaaga

SEQ ID NO: 919974 - RNA, 22 nt, Human
cccccaccccagccaaaaaaaa

SEQ ID NO: 919975 - RNA, 20 nt, Human
cccccgaaugaccaaauagg

SEQ ID NO: 919976 - RNA, 21 nt, Human
cccuaacagggcuaagcaaag

SEQ ID NO: 919977 - RNA, 21 nt, Human
cccuuguuaccuugaagaauc

SEQ ID NO: 919978 - RNA, 23 nt, Human
ccggcgccggcuccgcuuccccu

SEQ ID NO: 919979 - RNA, 20 nt, Human
ccucccgccgcuugcccccc

SEQ ID NO: 919980 - RNA, 23 nt, Human
ccucccgccgcuugccccccgaa

SEQ ID NO: 919981 - RNA, 24 nt, Human
ccucucuaaaaauuccucucaaaa

SEQ ID NO: 919982 - RNA, 23 nt, Human
ccucuuuuguuaaaacuugaccc

SEQ ID NO: 919983 - RNA, 19 nt, Human
cggggcggcggggccgggc

SEQ ID NO: 919984 - RNA, 19 nt, Human
cgugggcucccagccgagg

SEQ ID NO: 919985 - RNA, 18 nt, Human
cugagaguacuucuccuu

SEQ ID NO: 919986 - RNA, 24 nt, Human
cugggggaagucccacaaucccug

SEQ ID NO: 919987 - RNA, 23 nt, Human
gaaaacacuccaaaauacauuag

SEQ ID NO: 919988 - RNA, 27 nt, Human
gaaaacacuccaaaauacauuagcuaa

SEQ ID NO: 919989 - RNA, 21 nt, Human
gaccuucagaaacugguguga

SEQ ID NO: 919990 - RNA, 21 nt, Human
gagguggcggcggcgagagcg

SEQ ID NO: 919991 - RNA, 19 nt, Human
gcagccggggcggcggggc

SEQ ID NO: 919992 - RNA, 20 nt, Human
gcagccucgugggcucccag

SEQ ID NO: 919993 - RNA, 21 nt, Human
gccaucuuaguauuuacugug

SEQ ID NO: 919994 - RNA, 22 nt, Human
gcgcagccggcgccggcuccgc

SEQ ID NO: 919995 - RNA, 18 nt, Human
gcgugcgcagccggggcg

SEQ ID NO: 919996 - RNA, 21 nt, Human
gcuaaaaccauuguaugaacg

SEQ ID NO: 919997 - RNA, 23 nt, Human
ggcaggaugcggcagccucgugg

SEQ ID NO: 919998 - RNA, 21 nt, Human
gguuaaaaugcacagcaagua

SEQ ID NO: 919999 - RNA, 18 nt, Human
guggcggcggcgagagcg

SEQ ID NO: 920000 - RNA, 19 nt, Human
uaaaacaaaagcugacaac

SEQ ID NO: 920001 - RNA, 24 nt, Human
uaaaguuagguguguuuacacuca

SEQ ID NO: 920002 - RNA, 18 nt, Human
uaagaaauaugguccaaa

SEQ ID NO: 920003 - RNA, 22 nt, Human
uaagauauauccagcucugaaa

SEQ ID NO: 920004 - RNA, 25 nt, Human
uacaacucagccaucagcccaccuc

SEQ ID NO: 920005 - RNA, 22 nt, Human
uacacagagaacaaaaauuaca

SEQ ID NO: 920006 - RNA, 21 nt, Human
uacugugacuacauaccucuu

SEQ ID NO: 920007 - RNA, 20 nt, Human
uaguuugauuguauaauuuc

SEQ ID NO: 920008 - RNA, 23 nt, Human
uauuauguuaaacacugcaguuu

SEQ ID NO: 920009 - RNA, 21 nt, Human
uauuuuggaucauuuuuuucu

SEQ ID NO: 920010 - RNA, 24 nt, Human
ucaaaacccaaacccuuguuaccu

SEQ ID NO: 920011 - RNA, 18 nt, Human
ucaaggaaauuuuaaaau

SEQ ID NO: 920012 - RNA, 19 nt, Human
ucagaaacuggugugauuc

SEQ ID NO: 920013 - RNA, 20 nt, Human
uccaaaauacauuagcuaau

SEQ ID NO: 920014 - RNA, 24 nt, Human
ucccuauaaugccaggauuauuua

SEQ ID NO: 920015 - RNA, 21 nt, Human
ucgcgugcgcagccggggcgg

SEQ ID NO: 920016 - RNA, 21 nt, Human
ucggccgcgcacguuuccccu

SEQ ID NO: 920017 - RNA, 21 nt, Human
ucugagaguacuucuccuuca

SEQ ID NO: 920018 - RNA, 20 nt, Human
ugaaaauacaaaauuaucac

SEQ ID NO: 920019 - RNA, 21 nt, Human
ugaaaauacaaaauuaucacu

SEQ ID NO: 920020 - RNA, 19 nt, Human
ugaaauaccaagaaugcag

SEQ ID NO: 920021 - RNA, 21 nt, Human
ugacaauauucucacaguagc

SEQ ID NO: 920022 - RNA, 22 nt, Human
ugacaauauucucacaguagca

SEQ ID NO: 920023 - RNA, 18 nt, Human
ugaccaaugcccccaccc

SEQ ID NO: 920024 - RNA, 23 nt, Human
ugacugacuugaaguagugaaau

SEQ ID NO: 920025 - RNA, 21 nt, Human
ugcaagcaaaacugagcauuu

SEQ ID NO: 920026 - RNA, 21 nt, Human
uggcggcggcgagagcggcuu

SEQ ID NO: 920027 - RNA, 22 nt, Human
uguaaaauggaaaacacuccaa

SEQ ID NO: 920028 - RNA, 23 nt, Human
ugugaccaaugcccccaccccag

SEQ ID NO: 920029 - RNA, 22 nt, Human
ugugcuccuuaaugcuccaaug

SEQ ID NO: 920030 - RNA, 18 nt, Human
uuaaauguaggugcaugu

SEQ ID NO: 920031 - RNA, 24 nt, Human
uuacauacauccaaucauauccau

SEQ ID NO: 920032 - RNA, 23 nt, Human
uuaccuugaagaaucuuuacaua

SEQ ID NO: 920033 - RNA, 18 nt, Human
uuaguacuuaaaaagugg

SEQ ID NO: 920034 - RNA, 24 nt, Human
uuauuugaaaauuuucuuuuucuu

SEQ ID NO: 920035 - RNA, 23 nt, Human
uucaaacccaaugcagaggaaac

SEQ ID NO: 920036 - RNA, 19 nt, Human
uucuauauucaucagauuu

SEQ ID NO: 920037 - RNA, 25 nt, Human
uugaaaauacaaaauuaucacuaua

SEQ ID NO: 920038 - RNA, 23 nt, Human
uuuauagauaacaacaacaaaaa

SEQ ID NO: 920039 - RNA, 24 nt, Human
uuuuggguuuuauuugaaaauuuu

SEQ ID NO: 920040 - RNA, 18 nt, Human
uuuuuuuuuuuagaagga

SEQ ID NO: 920041 - RNA, 28 nt, Human
aaaacagaaagcaaaacaaaagggaccc

SEQ ID NO: 920042 - RNA, 27 nt, Human
aaaagcaaaacagaaagcaaaacaaaa

SEQ ID NO: 920043 - RNA, 22 nt, Human
aaacagaaagcaaaacaaaauc

SEQ ID NO: 920044 - RNA, 24 nt, Human
aaacagaaagcaaaacaaaaucca

SEQ ID NO: 920045 - RNA, 23 nt, Human
aaagcaaaacaaaauccauagcc

SEQ ID NO: 920046 - RNA, 20 nt, Human
aaauuugacaaacacuguca

SEQ ID NO: 920047 - RNA, 26 nt, Human
aacaagcaauaaaaccauguauuaca

SEQ ID NO: 920048 - RNA, 21 nt, Human
aacauuauaaaucugaccacu

SEQ ID NO: 920049 - RNA, 23 nt, Human
aagcaaaacagaaagcaaaacaa

SEQ ID NO: 920050 - RNA, 22 nt, Human
accccaacaaagcaacuuugcc

SEQ ID NO: 920051 - RNA, 22 nt, Human
accuugcacccaguaaaagcca

SEQ ID NO: 920052 - RNA, 26 nt, Human
agaaagcaaaacaaaauccauagcca

SEQ ID NO: 920053 - RNA, 22 nt, Human
agcaaaacagaaagcaaaacaa

SEQ ID NO: 920054 - RNA, 22 nt, Human
agguaaaaaucaaacuauuuua

SEQ ID NO: 920055 - RNA, 21 nt, Human
aguuguaauagcggcauauuu

SEQ ID NO: 920056 - RNA, 21 nt, Human
caaaacaaaauccauagccau

SEQ ID NO: 920057 - RNA, 20 nt, Human
caaaacagaaagcaaaacaa

SEQ ID NO: 920058 - RNA, 25 nt, Human
caaaagcaaaacagaaagcaaaaca

SEQ ID NO: 920059 - RNA, 22 nt, Human
caaagcaacuuugccauuucua

SEQ ID NO: 920060 - RNA, 18 nt, Human
caacaaagcaacuuugcc

SEQ ID NO: 920061 - RNA, 19 nt, Human
caacaaagcaacuuugcca

SEQ ID NO: 920062 - RNA, 19 nt, Human
cagcaccccaacaaagcaa

SEQ ID NO: 920063 - RNA, 21 nt, Human
caucaguaucagcaccccaac

SEQ ID NO: 920064 - RNA, 23 nt, Human
cccauauccaugcuaacaucauc

SEQ ID NO: 920065 - RNA, 18 nt, Human
gaguggcaacauuuuaug

SEQ ID NO: 920066 - RNA, 20 nt, Human
gcaaaacaaaauccauagcc

SEQ ID NO: 920067 - RNA, 23 nt, Human
gcaaaacagaaagcaaaacaaaa

SEQ ID NO: 920068 - RNA, 22 nt, Human
guaucagcaccccaacaaagca

SEQ ID NO: 920069 - RNA, 22 nt, Human
uaacauacacaaaucuauauau

SEQ ID NO: 920070 - RNA, 20 nt, Human
uaacauuauaaaucugacca

SEQ ID NO: 920071 - RNA, 22 nt, Human
uaagcaggucucuuuguacaaa

SEQ ID NO: 920072 - RNA, 27 nt, Human
uacaaaacucaggucaggaaaagaagc

SEQ ID NO: 920073 - RNA, 21 nt, Human
uaccuugcacccaguaaaagc

SEQ ID NO: 920074 - RNA, 20 nt, Human
ucaggaaaagaagcucaaac

SEQ ID NO: 920075 - RNA, 21 nt, Human
ucaguaucagcaccccaacaa

SEQ ID NO: 920076 - RNA, 22 nt, Human
ugauacaaaacucaggucagga

SEQ ID NO: 920077 - RNA, 23 nt, Human
uguacaaaagcaaaacagaaagc

SEQ ID NO: 920078 - RNA, 20 nt, Human
uuacuaaguuaacaucucau

SEQ ID NO: 920079 - RNA, 20 nt, Human
aaaaaggcuucuggcagccc

SEQ ID NO: 920080 - RNA, 22 nt, Human
aagacaguguuuuauuacaaau

SEQ ID NO: 920081 - RNA, 21 nt, Human
aggcuucuggcagcccagcuc

SEQ ID NO: 920082 - RNA, 19 nt, Human
cacugcagagugaaaaagg

SEQ ID NO: 920083 - RNA, 20 nt, Human
ccaacccaugaagcaacccu

SEQ ID NO: 920084 - RNA, 18 nt, Human
cccuucucuccuuugccc

SEQ ID NO: 920085 - RNA, 21 nt, Human
ccgccgcggcugaacucuccu

SEQ ID NO: 920086 - RNA, 21 nt, Human
ccucacaacacggcgagagga

SEQ ID NO: 920087 - RNA, 20 nt, Human
ccuccaacccaugaagcaac

SEQ ID NO: 920088 - RNA, 24 nt, Human
ccuccaacccaugaagcaacccug

SEQ ID NO: 920089 - RNA, 19 nt, Human
cgagaggaagccaaucaca

SEQ ID NO: 920090 - RNA, 18 nt, Human
cuggcagcccagcucugc

SEQ ID NO: 920091 - RNA, 25 nt, Human
ggcugaacucucaucuugacucgcu

SEQ ID NO: 920092 - RNA, 24 nt, Human
guuuuuuuuuuuuuuuucucccuu

SEQ ID NO: 920093 - RNA, 18 nt, Human
uauauuguguaugggugu

SEQ ID NO: 920094 - RNA, 21 nt, Human
uauuacaaauuaggcaaaugu

SEQ ID NO: 920095 - RNA, 24 nt, Human
uccgucuccauccuuccuuccuuu

SEQ ID NO: 920096 - RNA, 21 nt, Human
ucucccuucucuccuuugccc

SEQ ID NO: 920097 - RNA, 19 nt, Human
ucugcugcugcugccgccg

SEQ ID NO: 920098 - RNA, 21 nt, Human
ucuggcagcccagcucugccc

SEQ ID NO: 920099 - RNA, 20 nt, Human
ugaagcaacccugaaaagac

SEQ ID NO: 920100 - RNA, 23 nt, Human
ugcugccgccgcggcugaacucu

SEQ ID NO: 920101 - RNA, 19 nt, Human
uggcagcccagcucugccc

SEQ ID NO: 920102 - RNA, 21 nt, Human
ugggugugugugguuuuuuuu

SEQ ID NO: 920103 - RNA, 23 nt, Human
ugguauauuguguaugggugugu

SEQ ID NO: 920104 - RNA, 18 nt, Human
uguguaugggugugugug

SEQ ID NO: 920105 - RNA, 26 nt, Human
aaaugcaccuaaaacuagaaaauggu

SEQ ID NO: 920106 - RNA, 24 nt, Human
aacaaagcaauugaaaacuggaag

SEQ ID NO: 920107 - RNA, 18 nt, Human
aagcauuaacacuucaga

SEQ ID NO: 920108 - RNA, 23 nt, Human
aaggaacacaguauaggaggaaa

SEQ ID NO: 920109 - RNA, 22 nt, Human
aaguggcaaaugcaccuaaaac

SEQ ID NO: 920110 - RNA, 22 nt, Human
acaaagaaaaaaacaaucuuca

SEQ ID NO: 920111 - RNA, 19 nt, Human
acaaaucagaacacuacca

SEQ ID NO: 920112 - RNA, 24 nt, Human
acaaaucagaacacuaccaguaaa

SEQ ID NO: 920113 - RNA, 18 nt, Human
agaauuuuuccaaacaau

SEQ ID NO: 920114 - RNA, 18 nt, Human
agacagugaaucaggucu

SEQ ID NO: 920115 - RNA, 22 nt, Human
agauaaauuaauaauuuacaga

SEQ ID NO: 920116 - RNA, 21 nt, Human
aggaaaggggcgucucuggag

SEQ ID NO: 920117 - RNA, 22 nt, Human
aggugugugugugugugugugu

SEQ ID NO: 920118 - RNA, 19 nt, Human
aguugcuagagagauaaau

SEQ ID NO: 920119 - RNA, 20 nt, Human
auaaauauuaacauguagcc

SEQ ID NO: 920120 - RNA, 27 nt, Human
augaaagacaaucgaacaacaccaaaa

SEQ ID NO: 920121 - RNA, 21 nt, Human
augucucuaucacauuaagca

SEQ ID NO: 920122 - RNA, 20 nt, Human
caaagaaaaaaacaaucuuc

SEQ ID NO: 920123 - RNA, 23 nt, Human
caaaucagaacacuaccaguaaa

SEQ ID NO: 920124 - RNA, 22 nt, Human
caacaaagcaauugaaaacugg

SEQ ID NO: 920125 - RNA, 22 nt, Human
caagaaaccaggccauauacag

SEQ ID NO: 920126 - RNA, 23 nt, Human
cacccgccgccgccuccggacuc

SEQ ID NO: 920127 - RNA, 25 nt, Human
cacuaccaguaaaaacaaagaaaaa

SEQ ID NO: 920128 - RNA, 24 nt, Human
cagaacucaagacuuuggagagcc

SEQ ID NO: 920129 - RNA, 26 nt, Human
cagcaauacagcaaaauuuguaagaa

SEQ ID NO: 920130 - RNA, 24 nt, Human
caguguaaaugcagaaaaucugcc

SEQ ID NO: 920131 - RNA, 19 nt, Human
cauaguaaauaaaccaucu

SEQ ID NO: 920132 - RNA, 20 nt, Human
ccaaaaggaaaaacugaagu

SEQ ID NO: 920133 - RNA, 24 nt, Human
ccaaacaaugugaauuuacaagcc

SEQ ID NO: 920134 - RNA, 20 nt, Human
ccaguaaaaacaaagaaaaa

SEQ ID NO: 920135 - RNA, 31 nt, Human
ccgccgccgccuccggacucuguacgccugg

SEQ ID NO: 920136 - RNA, 18 nt, Human
ccgccggggcgcuggucc

SEQ ID NO: 920137 - RNA, 23 nt, Human
ccgccuccggacucuguacgccu

SEQ ID NO: 920138 - RNA, 22 nt, Human
ccuccgagaagugccgggccag

SEQ ID NO: 920139 - RNA, 25 nt, Human
ccuccggacucuguacgccugaucu

SEQ ID NO: 920140 - RNA, 26 nt, Human
cgaggugggguucaaagggacaacuu

SEQ ID NO: 920141 - RNA, 23 nt, Human
cgauuugucgagauucacauuua

SEQ ID NO: 920142 - RNA, 27 nt, Human
cgccuccggacucuguacgccugaucu

SEQ ID NO: 920143 - RNA, 18 nt, Human
cgccugaucucggcuacg

SEQ ID NO: 920144 - RNA, 19 nt, Human
cucacaaaucagaacacua

SEQ ID NO: 920145 - RNA, 19 nt, Human
cucaccggcuugggcucag

SEQ ID NO: 920146 - RNA, 18 nt, Human
cucacuggucccggcugc

SEQ ID NO: 920147 - RNA, 21 nt, Human
cuccacacuuccucugaagaa

SEQ ID NO: 920148 - RNA, 21 nt, Human
cuccgagaagugccgggccag

SEQ ID NO: 920149 - RNA, 27 nt, Human
cugcaaacagccaucuccacacuuccu

SEQ ID NO: 920150 - RNA, 31 nt, Human
cuguuagaggugugugugugugugugugugg

SEQ ID NO: 920151 - RNA, 21 nt, Human
cuuaagcauuaacacuucaga

SEQ ID NO: 920152 - RNA, 18 nt, Human
gaagaagccgaggugggg

SEQ ID NO: 920153 - RNA, 18 nt, Human
gagaacagcaauacagca

SEQ ID NO: 920154 - RNA, 21 nt, Human
gaggaaaggggcgucucugga

SEQ ID NO: 920155 - RNA, 21 nt, Human
gccagccggggcuggagcugg

SEQ ID NO: 920156 - RNA, 21 nt, Human
gccgccgccuccggacucugu

SEQ ID NO: 920157 - RNA, 18 nt, Human
gcugccgggacccuccga

SEQ ID NO: 920158 - RNA, 21 nt, Human
ggagagccucaaagagaacag

SEQ ID NO: 920159 - RNA, 22 nt, Human
gggacccuccgagaagugccgg

SEQ ID NO: 920160 - RNA, 21 nt, Human
gggccagccggggcuggagcu

SEQ ID NO: 920161 - RNA, 19 nt, Human
guaaaaacaaagaaaaaaa

SEQ ID NO: 920162 - RNA, 22 nt, Human
guagccaacaaagcaauugaaa

SEQ ID NO: 920163 - RNA, 21 nt, Human
gugugugugugugugugugag

SEQ ID NO: 920164 - RNA, 20 nt, Human
gugugugugugugugugugu

SEQ ID NO: 920165 - RNA, 21 nt, Human
guugccaauaaaacauuaaaa

SEQ ID NO: 920166 - RNA, 26 nt, Human
uaaaaacaagaaaccaggccauauac

SEQ ID NO: 920167 - RNA, 20 nt, Human
uaacauguagccaacaaagc

SEQ ID NO: 920168 - RNA, 20 nt, Human
uacaaacaaaccuccaaaag

SEQ ID NO: 920169 - RNA, 22 nt, Human
uagaaaauggugcaucggucau

SEQ ID NO: 920170 - RNA, 22 nt, Human
uagucgccaaaagugaaaagag

SEQ ID NO: 920171 - RNA, 19 nt, Human
ucagagaaggaaaaggggg

SEQ ID NO: 920172 - RNA, 25 nt, Human
uccacacuuccucugaagaagccga

SEQ ID NO: 920173 - RNA, 24 nt, Human
uccguagaggcacucacugguccc

SEQ ID NO: 920174 - RNA, 26 nt, Human
uccucugaagaagccgaggugggguu

SEQ ID NO: 920175 - RNA, 20 nt, Human
uccuucgccgccucugcugu

SEQ ID NO: 920176 - RNA, 18 nt, Human
ucucaccggcuugggcuc

SEQ ID NO: 920177 - RNA, 22 nt, Human
ugaaaaagcagcauacguugcc

SEQ ID NO: 920178 - RNA, 21 nt, Human
ugaaauaccuuggugaaaucu

SEQ ID NO: 920179 - RNA, 22 nt, Human
ugaagggcaaacaccaaguggc

SEQ ID NO: 920180 - RNA, 22 nt, Human
ugaauuuacaagcagugcacug

SEQ ID NO: 920181 - RNA, 21 nt, Human
ugcagaaaaucugccaucuuu

SEQ ID NO: 920182 - RNA, 22 nt, Human
uggcaaaugcaccuaaaacuag

SEQ ID NO: 920183 - RNA, 19 nt, Human
ugggaagggcugugcgaag

SEQ ID NO: 920184 - RNA, 18 nt, Human
ugggguucaaagggacaa

SEQ ID NO: 920185 - RNA, 18 nt, Human
uguacuuuuaaacuugaa

SEQ ID NO: 920186 - RNA, 21 nt, Human
uguacuuuuaaacuugaacac

SEQ ID NO: 920187 - RNA, 18 nt, Human
ugucucgucugccuuccu

SEQ ID NO: 920188 - RNA, 20 nt, Human
uguguguguguguguguaag

SEQ ID NO: 920189 - RNA, 18 nt, Human
ugugugugugugugugug

SEQ ID NO: 920190 - RNA, 18 nt, Human
ugugugugugugugugug

SEQ ID NO: 920191 - RNA, 18 nt, Human
ugugugugugugugugug

SEQ ID NO: 920192 - RNA, 18 nt, Human
ugugugugugugugugug

SEQ ID NO: 920193 - RNA, 18 nt, Human
ugugugugugugugugug

SEQ ID NO: 920194 - RNA, 21 nt, Human
ugugugugugugugugugugu

SEQ ID NO: 920195 - RNA, 21 nt, Human
ugugugugugugugugugugu

SEQ ID NO: 920196 - RNA, 21 nt, Human
ugugugugugugugugugugu

SEQ ID NO: 920197 - RNA, 21 nt, Human
ugugugugugugugugugugu

SEQ ID NO: 920198 - RNA, 21 nt, Human
ugugugugugugugugugugu

SEQ ID NO: 920199 - RNA, 21 nt, Human
ugugugugugugugugugugu

SEQ ID NO: 920200 - RNA, 21 nt, Human
ugugugugugugugugugugu

SEQ ID NO: 920201 - RNA, 22 nt, Human
ugugugugugugugugugugua

SEQ ID NO: 920202 - RNA, 22 nt, Human
ugugugugugugugugugugug

SEQ ID NO: 920203 - RNA, 22 nt, Human
ugugugugugugugugugugug

SEQ ID NO: 920204 - RNA, 22 nt, Human
ugugugugugugugugugugug

SEQ ID NO: 920205 - RNA, 24 nt, Human
uuagagaugucucuaucacauuaa

SEQ ID NO: 920206 - RNA, 20 nt, Human
uucagagaaggaaaaggggg

SEQ ID NO: 920207 - RNA, 19 nt, Human
uuuaaacuugaacacgggu

SEQ ID NO: 920208 - RNA, 19 nt, Human
uuuacagaggguuguucug

SEQ ID NO: 920209 - RNA, 23 nt, Human
uuuuuugaacguuacuagcuaua

SEQ ID NO: 920210 - RNA, 22 nt, Human
aaaauucuaaacgccuccaccc

SEQ ID NO: 920211 - RNA, 22 nt, Human
aaacggggcucaaucacacccc

SEQ ID NO: 920212 - RNA, 27 nt, Human
aaagaaacaagcaucgaaagcuacaug

SEQ ID NO: 920213 - RNA, 26 nt, Human
aaagagcccgucagccaugggcagga

SEQ ID NO: 920214 - RNA, 20 nt, Human
aacgccuccaccccuaaccu

SEQ ID NO: 920215 - RNA, 20 nt, Human
aagaaacaagcaucgaaagc

SEQ ID NO: 920216 - RNA, 25 nt, Human
aagcaucgaaagcuacaugaagggg

SEQ ID NO: 920217 - RNA, 18 nt, Human
acaugaagggggugcagc

SEQ ID NO: 920218 - RNA, 24 nt, Human
agaaaucccucagccccuuuuguc

SEQ ID NO: 920219 - RNA, 23 nt, Human
agugacaacaaagacggaaagaa

SEQ ID NO: 920220 - RNA, 23 nt, Human
cacagcuccagaagugagccggg

SEQ ID NO: 920221 - RNA, 19 nt, Human
caccccgucccgcgcuggc

SEQ ID NO: 920222 - RNA, 18 nt, Human
cagccccuuuugucuugg

SEQ ID NO: 920223 - RNA, 23 nt, Human
cagggucugcgccgaaagagccc

SEQ ID NO: 920224 - RNA, 20 nt, Human
cauccuagaguccccaagga

SEQ ID NO: 920225 - RNA, 19 nt, Human
ccaaggacagcccucccgu

SEQ ID NO: 920226 - RNA, 18 nt, Human
ccccaaggacagcccucc

SEQ ID NO: 920227 - RNA, 27 nt, Human
ccccagggucugcgccgaaagagcccc

SEQ ID NO: 920228 - RNA, 22 nt, Human
cccccugcgcccucccgcccgc

SEQ ID NO: 920229 - RNA, 19 nt, Human
cccuccccgcucgguccug

SEQ ID NO: 920230 - RNA, 18 nt, Human
cccuuucccuccccgcuc

SEQ ID NO: 920231 - RNA, 22 nt, Human
ccguggaccccggcuagggccc

SEQ ID NO: 920232 - RNA, 25 nt, Human
ccuaaccugcaggugcaaacagcac

SEQ ID NO: 920233 - RNA, 21 nt, Human
cgaccugggcccgcgggcagc

SEQ ID NO: 920234 - RNA, 20 nt, Human
cgcucgguccugcgcccacc

SEQ ID NO: 920235 - RNA, 18 nt, Human
cggccccccugcgcccuc

SEQ ID NO: 920236 - RNA, 19 nt, Human
cggcuagggcccccagagu

SEQ ID NO: 920237 - RNA, 22 nt, Human
cuaaaacacaaaaugccgagcc

SEQ ID NO: 920238 - RNA, 22 nt, Human
cuccagaagugagccgggccag

SEQ ID NO: 920239 - RNA, 19 nt, Human
cucgggguccgggcgaauc

SEQ ID NO: 920240 - RNA, 21 nt, Human
cugggcccgcgggcagcggga

SEQ ID NO: 920241 - RNA, 20 nt, Human
gacaacaaagacggaaagaa

SEQ ID NO: 920242 - RNA, 23 nt, Human
gacaacaaagacggaaagaaaca

SEQ ID NO: 920243 - RNA, 22 nt, Human
gacauuugcaaguaaauaauau

SEQ ID NO: 920244 - RNA, 21 nt, Human
gacgccgaccugggcccgcgg

SEQ ID NO: 920245 - RNA, 18 nt, Human
gcaggaucgcggguaggu

SEQ ID NO: 920246 - RNA, 19 nt, Human
gccuccaccccuaaccugc

SEQ ID NO: 920247 - RNA, 18 nt, Human
ggaggugauggagaaggc

SEQ ID NO: 920248 - RNA, 21 nt, Human
ggcaggaucgcggguaggugg

SEQ ID NO: 920249 - RNA, 18 nt, Human
gguggguaaauaucuugc

SEQ ID NO: 920250 - RNA, 20 nt, Human
uaaaacacaaaaugccgagc

SEQ ID NO: 920251 - RNA, 25 nt, Human
uaaccugcaggugcaaacagcaccc

SEQ ID NO: 920252 - RNA, 25 nt, Human
uaagaugacaaaucccuagggguca

SEQ ID NO: 920253 - RNA, 21 nt, Human
uagaggagacugaaaaagaua

SEQ ID NO: 920254 - RNA, 18 nt, Human
uagaguccccaaggacag

SEQ ID NO: 920255 - RNA, 24 nt, Human
uagaguccccaaggacagcccucc

SEQ ID NO: 920256 - RNA, 24 nt, Human
uauuucauugccggcagcuacuuu

SEQ ID NO: 920257 - RNA, 28 nt, Human
ucacagcuccagaagugaggggaacgcc

SEQ ID NO: 920258 - RNA, 24 nt, Human
ucaggugguuuucccgcacgaacu

SEQ ID NO: 920259 - RNA, 19 nt, Human
uccccaaggacagcccucc

SEQ ID NO: 920260 - RNA, 18 nt, Human
ucgcggguagguggguca

SEQ ID NO: 920261 - RNA, 18 nt, Human
ucgggggcugcccggcgc

SEQ ID NO: 920262 - RNA, 24 nt, Human
ucuaaaacacaaaaugccgagccc

SEQ ID NO: 920263 - RNA, 22 nt, Human
ucuaaacgccuccaccccuaac

SEQ ID NO: 920264 - RNA, 21 nt, Human
ucucacagcuccagaagugag

SEQ ID NO: 920265 - RNA, 18 nt, Human
ugacaacaaagacggaaa

SEQ ID NO: 920266 - RNA, 21 nt, Human
ugacaacaaagacggaaagaa

SEQ ID NO: 920267 - RNA, 23 nt, Human
ugcggaaaauggucgagauagca

SEQ ID NO: 920268 - RNA, 19 nt, Human
uggagaggugcggaaaaug

SEQ ID NO: 920269 - RNA, 22 nt, Human
uuugcaaguaaauaauaugcag

SEQ ID NO: 920270 - RNA, 18 nt, Human
uuuucccuuucccucccc

SEQ ID NO: 920271 - RNA, 19 nt, Human
uuuuuuuuuuuagaggaga

SEQ ID NO: 920272 - RNA, 22 nt, Human
uuuuuuuuuuuuagaggagacu

SEQ ID NO: 920273 - RNA, 22 nt, Human
uuuuuuuuuuuuuuuuuagagg

SEQ ID NO: 920274 - RNA, 25 nt, Human
aaaacacgaauccugauaaugccaa

SEQ ID NO: 920275 - RNA, 23 nt, Human
aaacaugcuaaaaacaugguguu

SEQ ID NO: 920276 - RNA, 23 nt, Human
aaagccaggaccaggaugaagga

SEQ ID NO: 920277 - RNA, 18 nt, Human
acacagacuuccgcccaa

SEQ ID NO: 920278 - RNA, 23 nt, Human
acagucaggagaaacugaagaga

SEQ ID NO: 920279 - RNA, 20 nt, Human
accccaaagcaccucacgcc

SEQ ID NO: 920280 - RNA, 21 nt, Human
accccaaagcaccucacgccc

SEQ ID NO: 920281 - RNA, 21 nt, Human
acggcaaugcaagcagaaagu

SEQ ID NO: 920282 - RNA, 23 nt, Human
acucugagaagcugagggacaaa

SEQ ID NO: 920283 - RNA, 23 nt, Human
agagaaaggcugagucugcagcg

SEQ ID NO: 920284 - RNA, 23 nt, Human
agagcaguucucagccugugccc

SEQ ID NO: 920285 - RNA, 23 nt, Human
agccagaccagcugcaguuugga

SEQ ID NO: 920286 - RNA, 24 nt, Human
agcgggugagguccccgugcucag

SEQ ID NO: 920287 - RNA, 23 nt, Human
agcugaaucccacuccuggccuc

SEQ ID NO: 920288 - RNA, 18 nt, Human
aggaagccccccaggccu

SEQ ID NO: 920289 - RNA, 24 nt, Human
aggcagccgcccaccaaggcccca

SEQ ID NO: 920290 - RNA, 21 nt, Human
aggcagguggaggcuggagaa

SEQ ID NO: 920291 - RNA, 22 nt, Human
aggcagguggaggcuggagaag

SEQ ID NO: 920292 - RNA, 23 nt, Human
aggcugugccaccuucacuggca

SEQ ID NO: 920293 - RNA, 18 nt, Human
agggcuggccggacucug

SEQ ID NO: 920294 - RNA, 21 nt, Human
agggggcgcccugcugcagcu

SEQ ID NO: 920295 - RNA, 22 nt, Human
caaaacaguaagccagaccagc

SEQ ID NO: 920296 - RNA, 24 nt, Human
caaagcaccucacgcccagcuccc

SEQ ID NO: 920297 - RNA, 24 nt, Human
caaagccugaaaagauggccaucu

SEQ ID NO: 920298 - RNA, 21 nt, Human
caaggagggggcaggaagccc

SEQ ID NO: 920299 - RNA, 24 nt, Human
caccaaagccugaaaagauggcca

SEQ ID NO: 920300 - RNA, 21 nt, Human
cacccuacucuccacucccac

SEQ ID NO: 920301 - RNA, 24 nt, Human
cacccuacucuccacucccacccc

SEQ ID NO: 920302 - RNA, 23 nt, Human
cacccugcacaacucacaagacc

SEQ ID NO: 920303 - RNA, 23 nt, Human
cacccugcuuucccucccgugcu

SEQ ID NO: 920304 - RNA, 23 nt, Human
caccugcuuccaccacccaagag

SEQ ID NO: 920305 - RNA, 25 nt, Human
cacuccuggccucacuccccagccc

SEQ ID NO: 920306 - RNA, 23 nt, Human
cagagagcugagacacaggccca

SEQ ID NO: 920307 - RNA, 20 nt, Human
cagccgcccaccaaggcccc

SEQ ID NO: 920308 - RNA, 23 nt, Human
cagccgcccaccaaggccccacc

SEQ ID NO: 920309 - RNA, 25 nt, Human
cagccgcccaccaaggccccaccug

SEQ ID NO: 920310 - RNA, 23 nt, Human
cagcggaugccccccugcagucc

SEQ ID NO: 920311 - RNA, 21 nt, Human
cagcugaaucccacuccuggc

SEQ ID NO: 920312 - RNA, 22 nt, Human
cagcugaaucccacuccuggcc

SEQ ID NO: 920313 - RNA, 21 nt, Human
cagggcagggaggccaggccc

SEQ ID NO: 920314 - RNA, 22 nt, Human
ccacccagacugcucuugggcc

SEQ ID NO: 920315 - RNA, 20 nt, Human
ccacccuacucuccacuccc

SEQ ID NO: 920316 - RNA, 21 nt, Human
ccacccuacucuccacuccca

SEQ ID NO: 920317 - RNA, 23 nt, Human
ccacccuggacuauugacucacu

SEQ ID NO: 920318 - RNA, 20 nt, Human
ccacuccuggccucacuccc

SEQ ID NO: 920319 - RNA, 19 nt, Human
ccacugccccugucucagg

SEQ ID NO: 920320 - RNA, 21 nt, Human
ccagagagcugagacacaggc

SEQ ID NO: 920321 - RNA, 19 nt, Human
ccaggccccacccuggacu

SEQ ID NO: 920322 - RNA, 19 nt, Human
cccaaagcaccucacgccc

SEQ ID NO: 920323 - RNA, 24 nt, Human
cccacugcaggauggcugcagaga

SEQ ID NO: 920324 - RNA, 22 nt, Human
ccccacaaaacacgaauccuga

SEQ ID NO: 920325 - RNA, 22 nt, Human
ccccacccuggacuauugacuc

SEQ ID NO: 920326 - RNA, 23 nt, Human
ccccaggccuuaccuccugaguc

SEQ ID NO: 920327 - RNA, 23 nt, Human
cccccacugcaggauggcugcag

SEQ ID NO: 920328 - RNA, 24 nt, Human
cccccaggccuuaccuccugaguc

SEQ ID NO: 920329 - RNA, 20 nt, Human
cccgggggcaggcagguggg

SEQ ID NO: 920330 - RNA, 21 nt, Human
ccgugacaccugcuuccacca

SEQ ID NO: 920331 - RNA, 26 nt, Human
ccucacuccccagcccguuucucucc

SEQ ID NO: 920332 - RNA, 19 nt, Human
ccucuacaaacccugaggg

SEQ ID NO: 920333 - RNA, 18 nt, Human
ccugcacaacucacaaga

SEQ ID NO: 920334 - RNA, 25 nt, Human
ccugcacaacucacaagaccacccu

SEQ ID NO: 920335 - RNA, 19 nt, Human
ccuggccucacuccccagc

SEQ ID NO: 920336 - RNA, 18 nt, Human
cgaauccugauaaugcca

SEQ ID NO: 920337 - RNA, 21 nt, Human
cggaugccccccugcaguccu

SEQ ID NO: 920338 - RNA, 20 nt, Human
cggcaaaacaguaagccaga

SEQ ID NO: 920339 - RNA, 21 nt, Human
cgggcagggccaccuuccaga

SEQ ID NO: 920340 - RNA, 24 nt, Human
cucacccccacugcaggauggcug

SEQ ID NO: 920341 - RNA, 18 nt, Human
cuccccagcccguuucuc

SEQ ID NO: 920342 - RNA, 18 nt, Human
cuccuggccucacucccc

SEQ ID NO: 920343 - RNA, 24 nt, Human
cugauaaugccaacgguucugucc

SEQ ID NO: 920344 - RNA, 21 nt, Human
cugcacaacucacaagaccac

SEQ ID NO: 920345 - RNA, 21 nt, Human
cugcagcugaaucccacuccu

SEQ ID NO: 920346 - RNA, 18 nt, Human
cugcaguccucuacaaac

SEQ ID NO: 920347 - RNA, 22 nt, Human
cuucacccugcacaacucacaa

SEQ ID NO: 920348 - RNA, 19 nt, Human
gagagcugagacacaggcc

SEQ ID NO: 920349 - RNA, 18 nt, Human
gcaggugggcaaggaggg

SEQ ID NO: 920350 - RNA, 23 nt, Human
gcuggguggccgugucucagcuc

SEQ ID NO: 920351 - RNA, 21 nt, Human
ggaacacaagggcuggccgga

SEQ ID NO: 920352 - RNA, 26 nt, Human
ggaauucucucaggggaauucuaccc

SEQ ID NO: 920353 - RNA, 21 nt, Human
ggagaggggggugacacggcu

SEQ ID NO: 920354 - RNA, 18 nt, Human
ggcaggcaggugggcaag

SEQ ID NO: 920355 - RNA, 21 nt, Human
ggcaggggcugaagagaaggg

SEQ ID NO: 920356 - RNA, 23 nt, Human
ggcugaagagaaggggacagccc

SEQ ID NO: 920357 - RNA, 23 nt, Human
gggcaggggcugaagagaagggg

SEQ ID NO: 920358 - RNA, 19 nt, Human
ggggaggggugcaggggga

SEQ ID NO: 920359 - RNA, 18 nt, Human
guccuccuguucccgauu

SEQ ID NO: 920360 - RNA, 19 nt, Human
guccucuacaaacccugag

SEQ ID NO: 920361 - RNA, 18 nt, Human
guggcccucugaguggaa

SEQ ID NO: 920362 - RNA, 19 nt, Human
uacggcaaugcaagcagaa

SEQ ID NO: 920363 - RNA, 20 nt, Human
uaguuagcaccuccaccagu

SEQ ID NO: 920364 - RNA, 19 nt, Human
ucacugcaguggggaggag

SEQ ID NO: 920365 - RNA, 19 nt, Human
ucaggagaaacugaagaga

SEQ ID NO: 920366 - RNA, 19 nt, Human
uccaccacccaagagcagu

SEQ ID NO: 920367 - RNA, 25 nt, Human
uccacucccacccccacaaaacacg

SEQ ID NO: 920368 - RNA, 21 nt, Human
uccaucagcaccacugccccu

SEQ ID NO: 920369 - RNA, 21 nt, Human
ucccauccuaugccacguccu

SEQ ID NO: 920370 - RNA, 22 nt, Human
uccccaaucagggcagggaggc

SEQ ID NO: 920371 - RNA, 22 nt, Human
ucccgugcugcccgggggcagg

SEQ ID NO: 920372 - RNA, 19 nt, Human
ucuacaaacccugagggac

SEQ ID NO: 920373 - RNA, 20 nt, Human
ucuccacucccacccccaca

SEQ ID NO: 920374 - RNA, 22 nt, Human
ucucucaggggaauucuacccc

SEQ ID NO: 920375 - RNA, 19 nt, Human
ucucucccaugcccagcuc

SEQ ID NO: 920376 - RNA, 21 nt, Human
ucugagacaaguguguaaauu

SEQ ID NO: 920377 - RNA, 21 nt, Human
ugaaaccaacaagcgugcuca

SEQ ID NO: 920378 - RNA, 23 nt, Human
ugaaggaacgcacagauacggca

SEQ ID NO: 920379 - RNA, 24 nt, Human
ugacaagacaaacuguauaggaaa

SEQ ID NO: 920380 - RNA, 21 nt, Human
ugacaccugcuuccaccaccc

SEQ ID NO: 920381 - RNA, 19 nt, Human
ugagaagcugagggacaaa

SEQ ID NO: 920382 - RNA, 21 nt, Human
ugagaagcugagggacaaaga

SEQ ID NO: 920383 - RNA, 24 nt, Human
ugagaucacagucaggagaaacug

SEQ ID NO: 920384 - RNA, 20 nt, Human
ugccccccugcaguccucuc

SEQ ID NO: 920385 - RNA, 20 nt, Human
uggagggagaggggggugac

SEQ ID NO: 920386 - RNA, 18 nt, Human
uggaucagacaggcaggu

SEQ ID NO: 920387 - RNA, 20 nt, Human
uggcaaagggagccgugagu

SEQ ID NO: 920388 - RNA, 19 nt, Human
uggccggacucugagaagc

SEQ ID NO: 920389 - RNA, 19 nt, Human
uggcugcagagaaaggcug

SEQ ID NO: 920390 - RNA, 19 nt, Human
uggcugcagagaaaggcug

SEQ ID NO: 920391 - RNA, 20 nt, Human
ugggccaccaaagccugaaa

SEQ ID NO: 920392 - RNA, 20 nt, Human
uggggaggaggaaagugugg

SEQ ID NO: 920393 - RNA, 21 nt, Human
uggggcacgggaacacaaggg

SEQ ID NO: 920394 - RNA, 25 nt, Human
uuccaagucaaaccaggacaccugc

SEQ ID NO: 920395 - RNA, 22 nt, Human
uucugagacaaguguguaaauu

SEQ ID NO: 920396 - RNA, 26 nt, Human
uugaaaccaacaagcgugcucacccc

SEQ ID NO: 920397 - RNA, 27 nt, Human
uugaaaccaacaagcgugcucaccccc

SEQ ID NO: 920398 - RNA, 24 nt, Human
uugaacugacucuggcaaagggag

SEQ ID NO: 920399 - RNA, 22 nt, Human
uugggccaccaaagccugaaaa

SEQ ID NO: 920400 - RNA, 23 nt, Human
uuuuuggcuuuugacacuuuauc

SEQ ID NO: 920401 - RNA, 25 nt, Human
uuuuuuuuuuuuuuuuggcuuuuga

SEQ ID NO: 920402 - RNA, 18 nt, Human
uuuuuuuuuuuuuuuuug

SEQ ID NO: 920403 - RNA, 25 nt, Human
uuuuuuuuuuuuuuuuuuggcuuuu

SEQ ID NO: 920404 - RNA, 22 nt, Human
uuuuuuuuuuuuuuuuuuuggc

SEQ ID NO: 920405 - RNA, 24 nt, Human
aaacaagaagggauugaagcaagg

SEQ ID NO: 920406 - RNA, 24 nt, Human
aaacaauacauaugucacugaaac

SEQ ID NO: 920407 - RNA, 23 nt, Human
aagccaggagcaagcccagggga

SEQ ID NO: 920408 - RNA, 20 nt, Human
aagcccaccaagagcaacag

SEQ ID NO: 920409 - RNA, 23 nt, Human
acacauccauagccagagaggcc

SEQ ID NO: 920410 - RNA, 20 nt, Human
accucgugaccuugaaguca

SEQ ID NO: 920411 - RNA, 23 nt, Human
agagauccagaagccugcaagga

SEQ ID NO: 920412 - RNA, 18 nt, Human
agaggugggaggggaacc

SEQ ID NO: 920413 - RNA, 18 nt, Human
aggaauacaggauaaugg

SEQ ID NO: 920414 - RNA, 20 nt, Human
aggaggccccagcagcuuuc

SEQ ID NO: 920415 - RNA, 20 nt, Human
aggaggccggggacaaagcu

SEQ ID NO: 920416 - RNA, 20 nt, Human
aggcaguggcuggcuggaga

SEQ ID NO: 920417 - RNA, 24 nt, Human
aggggagaugcuguuccaugcugg

SEQ ID NO: 920418 - RNA, 18 nt, Human
aguagguggcggggagaa

SEQ ID NO: 920419 - RNA, 19 nt, Human
auuuauaguuguaucccuu

SEQ ID NO: 920420 - RNA, 20 nt, Human
caagcccaggggagaugcug

SEQ ID NO: 920421 - RNA, 18 nt, Human
caaggagacccaugggca

SEQ ID NO: 920422 - RNA, 23 nt, Human
caagucagaaaucccccagugca

SEQ ID NO: 920423 - RNA, 20 nt, Human
cacaucuucagccuaguccc

SEQ ID NO: 920424 - RNA, 24 nt, Human
cacaucuucagccuagucccugcc

SEQ ID NO: 920425 - RNA, 20 nt, Human
caccaaguacccacacaucc

SEQ ID NO: 920426 - RNA, 21 nt, Human
caccaaguacccacacaucca

SEQ ID NO: 920427 - RNA, 24 nt, Human
caccaaguacccacacauccauag

SEQ ID NO: 920428 - RNA, 19 nt, Human
cagcagcuuucaagaaugg

SEQ ID NO: 920429 - RNA, 24 nt, Human
cagcccucuagcuuggaagggaga

SEQ ID NO: 920430 - RNA, 22 nt, Human
caggugagggacccccaggcau

SEQ ID NO: 920431 - RNA, 24 nt, Human
ccaggacagaaaggaaacugggca

SEQ ID NO: 920432 - RNA, 22 nt, Human
cccacacauccauagccagaga

SEQ ID NO: 920433 - RNA, 25 nt, Human
ccccaggcauucucccugcccgcac

SEQ ID NO: 920434 - RNA, 21 nt, Human
ccccagugcaacuuaagacaa

SEQ ID NO: 920435 - RNA, 25 nt, Human
cccccacccgacagacugacccuug

SEQ ID NO: 920436 - RNA, 19 nt, Human
cccccuuccccauuccagc

SEQ ID NO: 920437 - RNA, 22 nt, Human
cccgcaccgagucucucuucac

SEQ ID NO: 920438 - RNA, 24 nt, Human
ccugccaagcccaccaagagcaac

SEQ ID NO: 920439 - RNA, 22 nt, Human
ccuggccacacguaugacucug

SEQ ID NO: 920440 - RNA, 25 nt, Human
cucuucuaccuuccugagcuaaaag

SEQ ID NO: 920441 - RNA, 24 nt, Human
cucuuuucauauuccucacaaccc

SEQ ID NO: 920442 - RNA, 26 nt, Human
cugacccuugucccccuuccccauuc

SEQ ID NO: 920443 - RNA, 23 nt, Human
cugccugaauacaggaagcaaga

SEQ ID NO: 920444 - RNA, 19 nt, Human
cugcugggaccugcgccgu

SEQ ID NO: 920445 - RNA, 21 nt, Human
cuggcuacuuccuggccacac

SEQ ID NO: 920446 - RNA, 23 nt, Human
cuucacccuggcuacuuccuggc

SEQ ID NO: 920447 - RNA, 20 nt, Human
gaacccagaagucuucagua

SEQ ID NO: 920448 - RNA, 25 nt, Human
gacaaacagagagaagucaccuucc

SEQ ID NO: 920449 - RNA, 23 nt, Human
gccaagcccaccaagagcaacag

SEQ ID NO: 920450 - RNA, 21 nt, Human
gcccagaccacagucauaggg

SEQ ID NO: 920451 - RNA, 21 nt, Human
gcccgcaccgagucucucuuc

SEQ ID NO: 920452 - RNA, 22 nt, Human
ggaaaggggccuaaagcccaga

SEQ ID NO: 920453 - RNA, 20 nt, Human
gggaaggaaaggggccuaaa

SEQ ID NO: 920454 - RNA, 21 nt, Human
gggaaggaaaggggccuaaag

SEQ ID NO: 920455 - RNA, 22 nt, Human
guccccaccaaguacccacaca

SEQ ID NO: 920456 - RNA, 19 nt, Human
gugaaaaugggggcuugcu

SEQ ID NO: 920457 - RNA, 19 nt, Human
guucuauuaucuguccccc

SEQ ID NO: 920458 - RNA, 18 nt, Human
uaagacaaacagagagaa

SEQ ID NO: 920459 - RNA, 22 nt, Human
uaagacaaacagagagaaguca

SEQ ID NO: 920460 - RNA, 19 nt, Human
uagcuccuccguccccacc

SEQ ID NO: 920461 - RNA, 25 nt, Human
uaucccuuugugugauauaguuagg

SEQ ID NO: 920462 - RNA, 19 nt, Human
ucacaagccaggagcaagc

SEQ ID NO: 920463 - RNA, 20 nt, Human
ucauauuccucacaacccca

SEQ ID NO: 920464 - RNA, 20 nt, Human
uccagaagccugcaaggagg

SEQ ID NO: 920465 - RNA, 21 nt, Human
ucccccaucccuaacccagau

SEQ ID NO: 920466 - RNA, 26 nt, Human
ucuauuaucugucccccaucccuaac

SEQ ID NO: 920467 - RNA, 19 nt, Human
ucugaccagagauccagaa

SEQ ID NO: 920468 - RNA, 22 nt, Human
ugaagcaaggagacccaugggc

SEQ ID NO: 920469 - RNA, 19 nt, Human
ugaccagagauccagaagc

SEQ ID NO: 920470 - RNA, 20 nt, Human
ugaccagagauccagaagcc

SEQ ID NO: 920471 - RNA, 21 nt, Human
ugacccuugucccccuucccc

SEQ ID NO: 920472 - RNA, 21 nt, Human
ugggccucaagucagaaaucc

SEQ ID NO: 920473 - RNA, 18 nt, Human
ugucuccaggacagaaag

SEQ ID NO: 920474 - RNA, 24 nt, Human
uuaaguaauuaauccuaacuauau

SEQ ID NO: 920475 - RNA, 22 nt, Human
uucauauuccucacaaccccag

SEQ ID NO: 920476 - RNA, 21 nt, Human
uuccucacaaccccagcuguu

SEQ ID NO: 920477 - RNA, 18 nt, Human
uuccuggccacacguaug

SEQ ID NO: 920478 - RNA, 22 nt, Human
uuucauauuccucacaacccca

SEQ ID NO: 920479 - RNA, 20 nt, Human
uuuuuuuuuuuuuuuugggu

SEQ ID NO: 920480 - RNA, 19 nt, Human
uuuuuuuuuuuuuuuuuug

SEQ ID NO: 920481 - RNA, 23 nt, Human
uuuuuuuuuuuuuuuuuuugggu

SEQ ID NO: 920482 - RNA, 23 nt, Human
uuuuuuuuuuuuuuuuuuuuggg

SEQ ID NO: 920483 - RNA, 19 nt, Human
acaaaguguaggggaaaau

SEQ ID NO: 920484 - RNA, 18 nt, Human
gggaaucccauggucagg

SEQ ID NO: 920485 - RNA, 21 nt, Human
ucagguagaaagagggauucc

SEQ ID NO: 920486 - RNA, 21 nt, Human
uggucagguagaaagagggau

SEQ ID NO: 920487 - RNA, 18 nt, Human
uguuuuaaugacaaagug

SEQ ID NO: 920488 - RNA, 19 nt, Human
aaaaggaaacagggccaaa

SEQ ID NO: 920489 - RNA, 22 nt, Human
aaacaaaagugcacaugcagaa

SEQ ID NO: 920490 - RNA, 21 nt, Human
aaacccugacaugcccaaugg

SEQ ID NO: 920491 - RNA, 22 nt, Human
aaagaggccucucaucucccuc

SEQ ID NO: 920492 - RNA, 19 nt, Human
aaccccaagugccgccccc

SEQ ID NO: 920493 - RNA, 20 nt, Human
aaccccaagugccgccccca

SEQ ID NO: 920494 - RNA, 19 nt, Human
aagaggcuccagcuggguc

SEQ ID NO: 920495 - RNA, 24 nt, Human
aagcagaagacacagaaugccacc

SEQ ID NO: 920496 - RNA, 21 nt, Human
aaugccaccuuccucaagcac

SEQ ID NO: 920497 - RNA, 18 nt, Human
aauguggacaucagagcc

SEQ ID NO: 920498 - RNA, 22 nt, Human
acacagaaugccacccuccuca

SEQ ID NO: 920499 - RNA, 19 nt, Human
acccugucaccagggcugg

SEQ ID NO: 920500 - RNA, 20 nt, Human
accuucaccuccagcugggc

SEQ ID NO: 920501 - RNA, 23 nt, Human
accuuccucaagcacgcaagcua

SEQ ID NO: 920502 - RNA, 25 nt, Human
acgcagcccagagaagagggaacgc

SEQ ID NO: 920503 - RNA, 18 nt, Human
acugggcaacugaugucc

SEQ ID NO: 920504 - RNA, 19 nt, Human
acuucugaucauccuccuc

SEQ ID NO: 920505 - RNA, 23 nt, Human
agaggaaggggcugcagaaaaug

SEQ ID NO: 920506 - RNA, 25 nt, Human
agauagccaggcaguagcccugggu

SEQ ID NO: 920507 - RNA, 24 nt, Human
agcagaguaggaaggacgccagga

SEQ ID NO: 920508 - RNA, 25 nt, Human
agccagacuguggcaugggggccca

SEQ ID NO: 920509 - RNA, 24 nt, Human
agccagcuuccugccuagggccca

SEQ ID NO: 920510 - RNA, 19 nt, Human
agccuggacccaaggccuc

SEQ ID NO: 920511 - RNA, 22 nt, Human
agcuugcugagacagggguugg

SEQ ID NO: 920512 - RNA, 18 nt, Human
aggaggcaugaggggccg

SEQ ID NO: 920513 - RNA, 21 nt, Human
aggaggcugaugggggcuccc

SEQ ID NO: 920514 - RNA, 22 nt, Human
aggaggcugaugggggcucccg

SEQ ID NO: 920515 - RNA, 20 nt, Human
aggcaggcccugcacguucu

SEQ ID NO: 920516 - RNA, 24 nt, Human
aggcgcagaagaccgucagaagcu

SEQ ID NO: 920517 - RNA, 23 nt, Human
aggcuggacacuauccaggggcc

SEQ ID NO: 920518 - RNA, 21 nt, Human
aggggcuggcuuugaggcugc

SEQ ID NO: 920519 - RNA, 23 nt, Human
aggucccaggggggcagugcugu

SEQ ID NO: 920520 - RNA, 18 nt, Human
aggugcuuccuggcucag

SEQ ID NO: 920521 - RNA, 20 nt, Human
aucaagauccaggcgcagaa

SEQ ID NO: 920522 - RNA, 19 nt, Human
aucucucauuuccugcagg

SEQ ID NO: 920523 - RNA, 18 nt, Human
auggaacugagguggcag

SEQ ID NO: 920524 - RNA, 21 nt, Human
auggccaaacccugacaugcc

SEQ ID NO: 920525 - RNA, 23 nt, Human
caaagaggccucucaucucccuc

SEQ ID NO: 920526 - RNA, 24 nt, Human
cacacagcuaauguccuccucaca

SEQ ID NO: 920527 - RNA, 21 nt, Human
cacaugacugggcaacugaug

SEQ ID NO: 920528 - RNA, 21 nt, Human
caccacuggccagagcagagu

SEQ ID NO: 920529 - RNA, 21 nt, Human
cagaaaccccaagugccgccc

SEQ ID NO: 920530 - RNA, 18 nt, Human
cagaaauauacaaggcug

SEQ ID NO: 920531 - RNA, 20 nt, Human
cagaagacacagaaugccac

SEQ ID NO: 920532 - RNA, 18 nt, Human
cagaaugccacccuccuc

SEQ ID NO: 920533 - RNA, 25 nt, Human
cagagccacuguccuccucugcugg

SEQ ID NO: 920534 - RNA, 20 nt, Human
cagcuccuuccgcuucuccc

SEQ ID NO: 920535 - RNA, 18 nt, Human
caggagggaacugaggcu

SEQ ID NO: 920536 - RNA, 18 nt, Human
caggcggcgacucucccc

SEQ ID NO: 920537 - RNA, 18 nt, Human
cagggcugguggucucag

SEQ ID NO: 920538 - RNA, 23 nt, Human
cagggcugguggucucaggugcu

SEQ ID NO: 920539 - RNA, 18 nt, Human
caguagcccuggguggca

SEQ ID NO: 920540 - RNA, 22 nt, Human
caguuuggaacgaccacacaaa

SEQ ID NO: 920541 - RNA, 23 nt, Human
caugcccaauggcccuccugcag

SEQ ID NO: 920542 - RNA, 21 nt, Human
cauggaggcuuucaguuucuc

SEQ ID NO: 920543 - RNA, 22 nt, Human
cauggccaaacccugacaugcc

SEQ ID NO: 920544 - RNA, 23 nt, Human
cauggccaaacccugacaugccc

SEQ ID NO: 920545 - RNA, 23 nt, Human
ccaagugccgcccccaaagcccu

SEQ ID NO: 920546 - RNA, 24 nt, Human
ccacacacuucugaucauccuccu

SEQ ID NO: 920547 - RNA, 22 nt, Human
ccacagccuggcugagcaaugu

SEQ ID NO: 920548 - RNA, 20 nt, Human
ccacccuccucaaggaggca

SEQ ID NO: 920549 - RNA, 27 nt, Human
ccagaaaccccaagugccgcccccaaa

SEQ ID NO: 920550 - RNA, 18 nt, Human
ccagagcagaguaggaag

SEQ ID NO: 920551 - RNA, 21 nt, Human
cccagaaaccccaagugccgc

SEQ ID NO: 920552 - RNA, 25 nt, Human
cccagaaaccccaagugccgccccc

SEQ ID NO: 920553 - RNA, 26 nt, Human
cccagccccagccccagcccagaggc

SEQ ID NO: 920554 - RNA, 19 nt, Human
ccccaaagcccuggggcag

SEQ ID NO: 920555 - RNA, 19 nt, Human
ccccaagggaggagcagcg

SEQ ID NO: 920556 - RNA, 24 nt, Human
ccccaagugccgcccccaaagccc

SEQ ID NO: 920557 - RNA, 24 nt, Human
ccccagcccagaggccaggccaga

SEQ ID NO: 920558 - RNA, 27 nt, Human
cccccaacugagggaugaaccuagagc

SEQ ID NO: 920559 - RNA, 24 nt, Human
ccccccaacugagggaugaaccua

SEQ ID NO: 920560 - RNA, 18 nt, Human
ccccccuuucucucuuuc

SEQ ID NO: 920561 - RNA, 18 nt, Human
ccccuuaaauuccucuuc

SEQ ID NO: 920562 - RNA, 21 nt, Human
cccugcacguucucacuccuc

SEQ ID NO: 920563 - RNA, 18 nt, Human
cccuuaaauuccucuucc

SEQ ID NO: 920564 - RNA, 21 nt, Human
ccgcccccaaagcccuggggc

SEQ ID NO: 920565 - RNA, 20 nt, Human
ccgcgggccuuccccaagca

SEQ ID NO: 920566 - RNA, 19 nt, Human
ccgcuccgccacucgcuuc

SEQ ID NO: 920567 - RNA, 18 nt, Human
ccgcuucucccuuagccc

SEQ ID NO: 920568 - RNA, 22 nt, Human
ccggccccacgcagcccagaga

SEQ ID NO: 920569 - RNA, 21 nt, Human
ccggucccgugucacaugcuc

SEQ ID NO: 920570 - RNA, 22 nt, Human
ccuaaggcaagauggcagggga

SEQ ID NO: 920571 - RNA, 21 nt, Human
ccucccugggggcagccucag

SEQ ID NO: 920572 - RNA, 20 nt, Human
ccucuuccacucuugaaucc

SEQ ID NO: 920573 - RNA, 21 nt, Human
ccugcacugugccuggagcag

SEQ ID NO: 920574 - RNA, 19 nt, Human
ccugcagccauugcuguag

SEQ ID NO: 920575 - RNA, 20 nt, Human
ccugcaucucacccauggag

SEQ ID NO: 920576 - RNA, 23 nt, Human
ccuggggaucgcagcaggauaaa

SEQ ID NO: 920577 - RNA, 19 nt, Human
ccugggggcugggguucuc

SEQ ID NO: 920578 - RNA, 19 nt, Human
ccuuuaccucaucgaaagc

SEQ ID NO: 920579 - RNA, 18 nt, Human
cgccgaggucccgccgcu

SEQ ID NO: 920580 - RNA, 18 nt, Human
cggaaugccaccuuccuc

SEQ ID NO: 920581 - RNA, 20 nt, Human
cggccccacgcagcccagag

SEQ ID NO: 920582 - RNA, 28 nt, Human
cgugugugcucccagccccagccccagc

SEQ ID NO: 920583 - RNA, 19 nt, Human
cuacuaccucaagaacaaa

SEQ ID NO: 920584 - RNA, 21 nt, Human
cucacugcccagcaccuuguu

SEQ ID NO: 920585 - RNA, 18 nt, Human
cucagugggguuggggaa

SEQ ID NO: 920586 - RNA, 19 nt, Human
cuccagcugggcccgauau

SEQ ID NO: 920587 - RNA, 26 nt, Human
cucccagaagccagcuuccugccuag

SEQ ID NO: 920588 - RNA, 19 nt, Human
cucccagccccagccccag

SEQ ID NO: 920589 - RNA, 22 nt, Human
cucccagccccagccccagccc

SEQ ID NO: 920590 - RNA, 21 nt, Human
cugaguccucuuggcucucag

SEQ ID NO: 920591 - RNA, 27 nt, Human
cugcagcaggggccuccugggggcugg

SEQ ID NO: 920592 - RNA, 20 nt, Human
cugggccucaaccugugacc

SEQ ID NO: 920593 - RNA, 18 nt, Human
cuggugggggaaggcugu

SEQ ID NO: 920594 - RNA, 21 nt, Human
cugugccuggagccggggucc

SEQ ID NO: 920595 - RNA, 21 nt, Human
cugugcuguauucagaaguca

SEQ ID NO: 920596 - RNA, 21 nt, Human
cuuccgcuucucccuuagccc

SEQ ID NO: 920597 - RNA, 23 nt, Human
cuuccuggcucagcucucccaaa

SEQ ID NO: 920598 - RNA, 23 nt, Human
cuugauggauggccagaagggau

SEQ ID NO: 920599 - RNA, 24 nt, Human
gaaaauguccuuguuuugcaaaaa

SEQ ID NO: 920600 - RNA, 20 nt, Human
gacaguacaauaacgauaac

SEQ ID NO: 920601 - RNA, 23 nt, Human
gaccugcacugugccuggagcag

SEQ ID NO: 920602 - RNA, 21 nt, Human
gaccuggguggccugccucag

SEQ ID NO: 920603 - RNA, 18 nt, Human
gauggacuugauggaugg

SEQ ID NO: 920604 - RNA, 18 nt, Human
gauggauggccagaaggg

SEQ ID NO: 920605 - RNA, 19 nt, Human
gcacccacagacucugccc

SEQ ID NO: 920606 - RNA, 22 nt, Human
gccaccuccuucagguggacuc

SEQ ID NO: 920607 - RNA, 21 nt, Human
gccagccauggcugcuggugg

SEQ ID NO: 920608 - RNA, 23 nt, Human
gcccaauggcccuccugcagcca

SEQ ID NO: 920609 - RNA, 24 nt, Human
gcccagccugcuaaaggauggaaa

SEQ ID NO: 920610 - RNA, 28 nt, Human
gccccagccccagcccagaggccaggcc

SEQ ID NO: 920611 - RNA, 23 nt, Human
gcggggauggaacugagguggca

SEQ ID NO: 920612 - RNA, 20 nt, Human
gcgugugugcucccagcccc

SEQ ID NO: 920613 - RNA, 21 nt, Human
gcucccagccccagccccagc

SEQ ID NO: 920614 - RNA, 26 nt, Human
gcucucucccccacaggggucuccac

SEQ ID NO: 920615 - RNA, 18 nt, Human
gcugcaguuagcuacuug

SEQ ID NO: 920616 - RNA, 21 nt, Human
ggaaacagggccaaagagaga

SEQ ID NO: 920617 - RNA, 22 nt, Human
ggagaugggagcugcagggggc

SEQ ID NO: 920618 - RNA, 19 nt, Human
ggauggugccucuggccca

SEQ ID NO: 920619 - RNA, 18 nt, Human
ggcaccuggcaccacugg

SEQ ID NO: 920620 - RNA, 22 nt, Human
ggcagauggagggaaagccaga

SEQ ID NO: 920621 - RNA, 23 nt, Human
ggcccagaagccugcaucucacc

SEQ ID NO: 920622 - RNA, 21 nt, Human
ggcccagaaggcccuagggug

SEQ ID NO: 920623 - RNA, 20 nt, Human
ggcccgauauagccguuccc

SEQ ID NO: 920624 - RNA, 18 nt, Human
ggccugccucagcugcuc

SEQ ID NO: 920625 - RNA, 19 nt, Human
ggcugguggucucaggugc

SEQ ID NO: 920626 - RNA, 20 nt, Human
gggaacagggcagaaaggcc

SEQ ID NO: 920627 - RNA, 22 nt, Human
gggagaccucagagcuugcuga

SEQ ID NO: 920628 - RNA, 21 nt, Human
gggccggggugucucccgagg

SEQ ID NO: 920629 - RNA, 22 nt, Human
ggggcuucccacccucccuggg

SEQ ID NO: 920630 - RNA, 23 nt, Human
gggugcccucagccugagagggc

SEQ ID NO: 920631 - RNA, 20 nt, Human
gguggcaccuggcaccacug

SEQ ID NO: 920632 - RNA, 24 nt, Human
gguggcuuggcuaaagccccagcc

SEQ ID NO: 920633 - RNA, 19 nt, Human
ggugggaggaggggcuggc

SEQ ID NO: 920634 - RNA, 18 nt, Human
uaaauuccucuuccacuc

SEQ ID NO: 920635 - RNA, 20 nt, Human
uaccucaagaacaaagugac

SEQ ID NO: 920636 - RNA, 18 nt, Human
uagcccuggguggcaccu

SEQ ID NO: 920637 - RNA, 20 nt, Human
uagcucacugagaggaaggg

SEQ ID NO: 920638 - RNA, 20 nt, Human
uagcugcccagcuccacagu

SEQ ID NO: 920639 - RNA, 22 nt, Human
uagguggcuuggcuaaagcccc

SEQ ID NO: 920640 - RNA, 24 nt, Human
uaggugggaggaggggcuggcuuu

SEQ ID NO: 920641 - RNA, 18 nt, Human
ucaaggaggcaagcacgg

SEQ ID NO: 920642 - RNA, 24 nt, Human
ucacaugacugggcaacugauguc

SEQ ID NO: 920643 - RNA, 26 nt, Human
ucacugagaggaaggggcugcagaaa

SEQ ID NO: 920644 - RNA, 20 nt, Human
ucagcucucccaaaucucuc

SEQ ID NO: 920645 - RNA, 20 nt, Human
ucaggacugucauccaugcc

SEQ ID NO: 920646 - RNA, 23 nt, Human
ucagugggguuggggaacagggc

SEQ ID NO: 920647 - RNA, 21 nt, Human
ucaguuucucugauaagaucu

SEQ ID NO: 920648 - RNA, 21 nt, Human
uccacagucuccacacacuuc

SEQ ID NO: 920649 - RNA, 24 nt, Human
uccaggauuccuucuccuccccgg

SEQ ID NO: 920650 - RNA, 21 nt, Human
ucccacccucccugggggcag

SEQ ID NO: 920651 - RNA, 27 nt, Human
ucccagaaaccccaagugccgccccca

SEQ ID NO: 920652 - RNA, 22 nt, Human
ucccagaagccagcuuccugcc

SEQ ID NO: 920653 - RNA, 20 nt, Human
ucccagccccagccccagcc

SEQ ID NO: 920654 - RNA, 21 nt, Human
ucccagccccagccccagccc

SEQ ID NO: 920655 - RNA, 22 nt, Human
ucccugggggcagccucagaag

SEQ ID NO: 920656 - RNA, 26 nt, Human
uccuucagguggacucucguuggugg

SEQ ID NO: 920657 - RNA, 20 nt, Human
ucgcugaccuuguucccucc

SEQ ID NO: 920658 - RNA, 24 nt, Human
ucucacuccucucccagaagccag

SEQ ID NO: 920659 - RNA, 24 nt, Human
ucucaggugcuaggaaaggcuugg

SEQ ID NO: 920660 - RNA, 25 nt, Human
ucucaucucccucaagaggcuccag

SEQ ID NO: 920661 - RNA, 25 nt, Human
ucucccucaagaggcuccagcuggg

SEQ ID NO: 920662 - RNA, 24 nt, Human
ucucugcagcaggggccuccuggg

SEQ ID NO: 920663 - RNA, 23 nt, Human
ucucuuucaguaaacaaaaguug

SEQ ID NO: 920664 - RNA, 23 nt, Human
ucugcacccacagacucugcccu

SEQ ID NO: 920665 - RNA, 19 nt, Human
ucuuguccaccuuuaccuc

SEQ ID NO: 920666 - RNA, 20 nt, Human
ugaccugugcagcaggccuc

SEQ ID NO: 920667 - RNA, 19 nt, Human
ugagaggaaggggcugcag

SEQ ID NO: 920668 - RNA, 20 nt, Human
ugagaggaaggggcugcaga

SEQ ID NO: 920669 - RNA, 21 nt, Human
ugaggagggcacgaagguccu

SEQ ID NO: 920670 - RNA, 19 nt, Human
ugaggcuccaauuccuggc

SEQ ID NO: 920671 - RNA, 19 nt, Human
ugagguggcaggucccagg

SEQ ID NO: 920672 - RNA, 22 nt, Human
ugagguggcaggucccaggggg

SEQ ID NO: 920673 - RNA, 24 nt, Human
ugagguggcaggucccaggggggc

SEQ ID NO: 920674 - RNA, 18 nt, Human
ugcaaaaaaggaaacagg

SEQ ID NO: 920675 - RNA, 22 nt, Human
ugcacaaggaggcugauggggg

SEQ ID NO: 920676 - RNA, 18 nt, Human
ugcacuggccaccuccuu

SEQ ID NO: 920677 - RNA, 23 nt, Human
ugccauucacugagaccugcacu

SEQ ID NO: 920678 - RNA, 30 nt, Human
ugcccagcuccacagucuccacacacuucc

SEQ ID NO: 920679 - RNA, 23 nt, Human
ugccgcccccaaagcccuggggc

SEQ ID NO: 920680 - RNA, 18 nt, Human
ugccuacccaccaggccc

SEQ ID NO: 920681 - RNA, 21 nt, Human
ugccuaggaauagcuggagau

SEQ ID NO: 920682 - RNA, 24 nt, Human
ugccuaggaauagcuggagauggg

SEQ ID NO: 920683 - RNA, 20 nt, Human
ugccuagggcccagccugcu

SEQ ID NO: 920684 - RNA, 19 nt, Human
ugccucagcugcuccacag

SEQ ID NO: 920685 - RNA, 25 nt, Human
ugccuggagcagguggcccagaagc

SEQ ID NO: 920686 - RNA, 19 nt, Human
ugccugggacgguucugca

SEQ ID NO: 920687 - RNA, 21 nt, Human
ugcuccggccccacgcagccc

SEQ ID NO: 920688 - RNA, 19 nt, Human
ugcugggggcaaacacugg

SEQ ID NO: 920689 - RNA, 23 nt, Human
ugcugggggcaaacacugguggc

SEQ ID NO: 920690 - RNA, 25 nt, Human
ugcuggggucucugaguccucuugg

SEQ ID NO: 920691 - RNA, 19 nt, Human
ugcuggugggggaaggcug

SEQ ID NO: 920692 - RNA, 24 nt, Human
uggagaugggagcugcagggggcu

SEQ ID NO: 920693 - RNA, 21 nt, Human
uggagcagguggcccagaagc

SEQ ID NO: 920694 - RNA, 24 nt, Human
uggauggccagaagggauggugcc

SEQ ID NO: 920695 - RNA, 24 nt, Human
uggcaccacuggccagagcagagu

SEQ ID NO: 920696 - RNA, 19 nt, Human
uggccugccucagcugcuc

SEQ ID NO: 920697 - RNA, 20 nt, Human
uggcugcuggugggggaagg

SEQ ID NO: 920698 - RNA, 24 nt, Human
uggcugggccucaaccugugaccu

SEQ ID NO: 920699 - RNA, 19 nt, Human
ugggaggaggggcuggcuu

SEQ ID NO: 920700 - RNA, 19 nt, Human
ugggaggcugcucagagcc

SEQ ID NO: 920701 - RNA, 23 nt, Human
ugggcagguccuaucggaagcug

SEQ ID NO: 920702 - RNA, 18 nt, Human
uggggauggggaacagag

SEQ ID NO: 920703 - RNA, 23 nt, Human
uggggcagauggagggaaagcca

SEQ ID NO: 920704 - RNA, 22 nt, Human
uggggucucugaguccucuugg

SEQ ID NO: 920705 - RNA, 20 nt, Human
uggggugcccucagccugag

SEQ ID NO: 920706 - RNA, 25 nt, Human
ugguaggaggcaugaggggccgggg

SEQ ID NO: 920707 - RNA, 19 nt, Human
uggucacuugagguggccc

SEQ ID NO: 920708 - RNA, 21 nt, Human
uggugggggaaggcuguuccu

SEQ ID NO: 920709 - RNA, 19 nt, Human
uguagaagcagaagcacau

SEQ ID NO: 920710 - RNA, 18 nt, Human
ugucaggcaggacgcugu

SEQ ID NO: 920711 - RNA, 23 nt, Human
uguccuuguuuugcaaaaaagga

SEQ ID NO: 920712 - RNA, 24 nt, Human
uguccuuguuuugcaaaaaaggaa

SEQ ID NO: 920713 - RNA, 22 nt, Human
uguuguugcauccuuuggagga

SEQ ID NO: 920714 - RNA, 20 nt, Human
uucauaagcagaagacacag

SEQ ID NO: 920715 - RNA, 19 nt, Human
uucccugggcugcaaggga

SEQ ID NO: 920716 - RNA, 23 nt, Human
uuccucuuccacucuugaauccu

SEQ ID NO: 920717 - RNA, 20 nt, Human
uuccugcaggaccugggugg

SEQ ID NO: 920718 - RNA, 23 nt, Human
uucucauagcugcccagcuccac

SEQ ID NO: 920719 - RNA, 22 nt, Human
uucugaucauccuccuccucca

SEQ ID NO: 920720 - RNA, 26 nt, Human
uugaggcugccuuagccaugaggcuc

SEQ ID NO: 920721 - RNA, 30 nt, Human
uuguugcauccuuuggaggaguuccugggg

SEQ ID NO: 920722 - RNA, 19 nt, Human
uuugauccaggauuccuuc

SEQ ID NO: 920723 - RNA, 21 nt, Human
uuuuuuuuuuuuuuuuuccau

SEQ ID NO: 920724 - RNA, 24 nt, Human
aagccaggugagcgugaggccaaa

SEQ ID NO: 920725 - RNA, 18 nt, Human
aaggagccccaggccugc

SEQ ID NO: 920726 - RNA, 19 nt, Human
acagcugggccacggccga

SEQ ID NO: 920727 - RNA, 20 nt, Human
accacggugaagaagguaca

SEQ ID NO: 920728 - RNA, 24 nt, Human
accacggugaagaagguacagaga

SEQ ID NO: 920729 - RNA, 24 nt, Human
acuccauugccacaggggguaugg

SEQ ID NO: 920730 - RNA, 23 nt, Human
acuccugccccuccaggacccac

SEQ ID NO: 920731 - RNA, 23 nt, Human
acuguccugccacgauccaggag

SEQ ID NO: 920732 - RNA, 18 nt, Human
agaaggagccccaggccu

SEQ ID NO: 920733 - RNA, 23 nt, Human
agaaggagccccaggccugcagg

SEQ ID NO: 920734 - RNA, 24 nt, Human
agaaguaaagccaggugagcguga

SEQ ID NO: 920735 - RNA, 18 nt, Human
agacaggaggacagaugg

SEQ ID NO: 920736 - RNA, 21 nt, Human
agcagaguugcuucagguaga

SEQ ID NO: 920737 - RNA, 21 nt, Human
agcauccacacacuccauugc

SEQ ID NO: 920738 - RNA, 24 nt, Human
agcauggugacugcugccacagcc

SEQ ID NO: 920739 - RNA, 22 nt, Human
agccacacacccacccuggcca

SEQ ID NO: 920740 - RNA, 19 nt, Human
agcccagccacccuggggg

SEQ ID NO: 920741 - RNA, 22 nt, Human
agcccagccacccugggggcag

SEQ ID NO: 920742 - RNA, 22 nt, Human
agcccuaggccccauacuuccc

SEQ ID NO: 920743 - RNA, 25 nt, Human
agcucacucuuuuggccaucuccag

SEQ ID NO: 920744 - RNA, 19 nt, Human
aggccugcaggggcaucug

SEQ ID NO: 920745 - RNA, 21 nt, Human
agguaccgguggcugugagcu

SEQ ID NO: 920746 - RNA, 24 nt, Human
agguucccucuguucaggcccacu

SEQ ID NO: 920747 - RNA, 20 nt, Human
auggccaccaccguggaagc

SEQ ID NO: 920748 - RNA, 21 nt, Human
caacggcagccguagaugccc

SEQ ID NO: 920749 - RNA, 23 nt, Human
cacacccacccuggccauaucca

SEQ ID NO: 920750 - RNA, 18 nt, Human
cacccugggggcagaggc

SEQ ID NO: 920751 - RNA, 21 nt, Human
caccucccacucguccuccca

SEQ ID NO: 920752 - RNA, 23 nt, Human
cacggauccaggauccaaagccc

SEQ ID NO: 920753 - RNA, 18 nt, Human
cacuccauugccacaggg

SEQ ID NO: 920754 - RNA, 22 nt, Human
cacuccugccccuccaggaccc

SEQ ID NO: 920755 - RNA, 19 nt, Human
cagacaggaggacagaugg

SEQ ID NO: 920756 - RNA, 19 nt, Human
cagaguugcuucagguaga

SEQ ID NO: 920757 - RNA, 22 nt, Human
cagcagagaacucaggugccuc

SEQ ID NO: 920758 - RNA, 24 nt, Human
cagcagagaacucaggugccuccu

SEQ ID NO: 920759 - RNA, 20 nt, Human
cagcagcaccucccacucgu

SEQ ID NO: 920760 - RNA, 19 nt, Human
cagcagcuguggucacaag

SEQ ID NO: 920761 - RNA, 20 nt, Human
cagcuuguucuucuaaagca

SEQ ID NO: 920762 - RNA, 22 nt, Human
caggacccacggauccaggauc

SEQ ID NO: 920763 - RNA, 22 nt, Human
caggagacagggagucccccuc

SEQ ID NO: 920764 - RNA, 20 nt, Human
caggaugaccaccagcccga

SEQ ID NO: 920765 - RNA, 20 nt, Human
caggcgcccauggaggcccc

SEQ ID NO: 920766 - RNA, 21 nt, Human
caggugggacagacaugucuu

SEQ ID NO: 920767 - RNA, 19 nt, Human
caggugggcccugcccugu

SEQ ID NO: 920768 - RNA, 18 nt, Human
cagucuguggacuccugg

SEQ ID NO: 920769 - RNA, 23 nt, Human
caugcaggaauggcgcugugccc

SEQ ID NO: 920770 - RNA, 21 nt, Human
cauggccaccaccguggaagc

SEQ ID NO: 920771 - RNA, 22 nt, Human
cauugcagcuggcuuccuccug

SEQ ID NO: 920772 - RNA, 24 nt, Human
cauugcagcuggcuuccuccuggg

SEQ ID NO: 920773 - RNA, 24 nt, Human
ccaaaggugaaggugaggagcagg

SEQ ID NO: 920774 - RNA, 21 nt, Human
ccaagcccuaggccccauacu

SEQ ID NO: 920775 - RNA, 28 nt, Human
ccacacacccacccuggccauauccaga

SEQ ID NO: 920776 - RNA, 20 nt, Human
ccacccugggggcagaggcu

SEQ ID NO: 920777 - RNA, 19 nt, Human
ccacggcccuggcgccugg

SEQ ID NO: 920778 - RNA, 20 nt, Human
ccaggagagcauggugacug

SEQ ID NO: 920779 - RNA, 22 nt, Human
ccagucgcuccaguagcccaug

SEQ ID NO: 920780 - RNA, 27 nt, Human
cccacagcugggccacggccggggucc

SEQ ID NO: 920781 - RNA, 21 nt, Human
cccagccacccugggggcaga

SEQ ID NO: 920782 - RNA, 24 nt, Human
cccauggaggcccccagcuugucc

SEQ ID NO: 920783 - RNA, 24 nt, Human
cccgcuccuggggcaggggguugg

SEQ ID NO: 920784 - RNA, 20 nt, Human
cccuaggccccauacuuccc

SEQ ID NO: 920785 - RNA, 23 nt, Human
cccuuucacgcugcccagggucc

SEQ ID NO: 920786 - RNA, 22 nt, Human
ccuaggccccauacuucccaga

SEQ ID NO: 920787 - RNA, 23 nt, Human
ccucaggcgcccauggaggcccc

SEQ ID NO: 920788 - RNA, 21 nt, Human
ccugaaccacuccugccccuc

SEQ ID NO: 920789 - RNA, 21 nt, Human
ccuggaagaagguaccggugg

SEQ ID NO: 920790 - RNA, 19 nt, Human
ccuggcccucaggcgccca

SEQ ID NO: 920791 - RNA, 23 nt, Human
ccuggcgccuggcccucaggccg

SEQ ID NO: 920792 - RNA, 21 nt, Human
cgugucuccacauugcagcug

SEQ ID NO: 920793 - RNA, 22 nt, Human
cuccuggguuaggugacccuuc

SEQ ID NO: 920794 - RNA, 20 nt, Human
cucguaguacugcaggggcu

SEQ ID NO: 920795 - RNA, 21 nt, Human
cucgugcccacggcccuggcc

SEQ ID NO: 920796 - RNA, 20 nt, Human
cuggacaccugggcauggga

SEQ ID NO: 920797 - RNA, 24 nt, Human
cuggccauauccagaacacuucua

SEQ ID NO: 920798 - RNA, 19 nt, Human
cuggccugugggacuccag

SEQ ID NO: 920799 - RNA, 24 nt, Human
cuucccagaaggagccccaggccu

SEQ ID NO: 920800 - RNA, 20 nt, Human
gaaccagaggcgcucccacg

SEQ ID NO: 920801 - RNA, 18 nt, Human
gacauagugccaggacca

SEQ ID NO: 920802 - RNA, 19 nt, Human
gacuccagaaacucaguca

SEQ ID NO: 920803 - RNA, 20 nt, Human
gaggacagauggcacaggug

SEQ ID NO: 920804 - RNA, 25 nt, Human
gaggcugcggcugacaaggggcugg

SEQ ID NO: 920805 - RNA, 20 nt, Human
gcagaaacuauaacagcagc

SEQ ID NO: 920806 - RNA, 21 nt, Human
gcagcuggcuuccuccugggc

SEQ ID NO: 920807 - RNA, 24 nt, Human
gcccacaaggaggcuguggagccc

SEQ ID NO: 920808 - RNA, 20 nt, Human
gcggcugacaaggggcugga

SEQ ID NO: 920809 - RNA, 19 nt, Human
gcuuccaggucgggauaca

SEQ ID NO: 920810 - RNA, 23 nt, Human
gcuuccuccugggcugaaccucc

SEQ ID NO: 920811 - RNA, 21 nt, Human
ggagcgcugguagcgcuucca

SEQ ID NO: 920812 - RNA, 22 nt, Human
ggcugugagcugggcuccugga

SEQ ID NO: 920813 - RNA, 22 nt, Human
ggggcaggauaacagcagagaa

SEQ ID NO: 920814 - RNA, 22 nt, Human
ggguauggcauggcccaugacc

SEQ ID NO: 920815 - RNA, 20 nt, Human
guaguacugcaggggcuggu

SEQ ID NO: 920816 - RNA, 23 nt, Human
gugagcaggacacacaaaggcuc

SEQ ID NO: 920817 - RNA, 19 nt, Human
guuccaagugcuuuccaug

SEQ ID NO: 920818 - RNA, 24 nt, Human
uaccaggcccuguccgaggcccug

SEQ ID NO: 920819 - RNA, 30 nt, Human
uaccaggcccuguccgaggcccuggagacc

SEQ ID NO: 920820 - RNA, 20 nt, Human
uaccaggugggcccugcccu

SEQ ID NO: 920821 - RNA, 19 nt, Human
uagccacacacccacccug

SEQ ID NO: 920822 - RNA, 19 nt, Human
uaggccccauacuucccag

SEQ ID NO: 920823 - RNA, 22 nt, Human
uaggccccauacuucccagaag

SEQ ID NO: 920824 - RNA, 18 nt, Human
uaguacugcaggggcugg

SEQ ID NO: 920825 - RNA, 24 nt, Human
ucagaagagggggaccaagcccua

SEQ ID NO: 920826 - RNA, 26 nt, Human
ucagcagcaccucccacucguccucc

SEQ ID NO: 920827 - RNA, 19 nt, Human
ucaggcccacuuagccacc

SEQ ID NO: 920828 - RNA, 18 nt, Human
ucaggcccgcuccugggg

SEQ ID NO: 920829 - RNA, 22 nt, Human
uccaacgcuggccugugggacu

SEQ ID NO: 920830 - RNA, 21 nt, Human
uccacacacuccauugccaca

SEQ ID NO: 920831 - RNA, 21 nt, Human
uccacagaggcagugauauca

SEQ ID NO: 920832 - RNA, 20 nt, Human
uccagcugcuccuaggggac

SEQ ID NO: 920833 - RNA, 24 nt, Human
uccaggauccaaagcccagccacc

SEQ ID NO: 920834 - RNA, 22 nt, Human
ucccacagcugggccacggccg

SEQ ID NO: 920835 - RNA, 22 nt, Human
ucccagagcacuccgaguucag

SEQ ID NO: 920836 - RNA, 23 nt, Human
ucccagagcacuccgaguucaga

SEQ ID NO: 920837 - RNA, 18 nt, Human
uccugccacgauccagga

SEQ ID NO: 920838 - RNA, 23 nt, Human
ucuaccaggugggcccugcccug

SEQ ID NO: 920839 - RNA, 24 nt, Human
ucugcuggacaccugggcauggga

SEQ ID NO: 920840 - RNA, 19 nt, Human
ucuguaccaggcccugucc

SEQ ID NO: 920841 - RNA, 19 nt, Human
ugacaggaagagcagaguu

SEQ ID NO: 920842 - RNA, 21 nt, Human
ugacugcugccacagccccca

SEQ ID NO: 920843 - RNA, 18 nt, Human
ugaugugggaaccugagg

SEQ ID NO: 920844 - RNA, 23 nt, Human
ugcagcuggcuuccuccugggcu

SEQ ID NO: 920845 - RNA, 18 nt, Human
ugcagggagaggagaugg

SEQ ID NO: 920846 - RNA, 19 nt, Human
ugcagggagaggagauggu

SEQ ID NO: 920847 - RNA, 18 nt, Human
ugccacagcccccacaug

SEQ ID NO: 920848 - RNA, 25 nt, Human
ugcccacggcccuggcgccuggccc

SEQ ID NO: 920849 - RNA, 18 nt, Human
ugcccagaggugcacagc

SEQ ID NO: 920850 - RNA, 20 nt, Human
ugcccugcagggagaucagc

SEQ ID NO: 920851 - RNA, 22 nt, Human
ugccuugaggucugcuggacac

SEQ ID NO: 920852 - RNA, 18 nt, Human
uggaagaagguaccggug

SEQ ID NO: 920853 - RNA, 21 nt, Human
uggaagaagguaccgguggcu

SEQ ID NO: 920854 - RNA, 19 nt, Human
uggaggugucuuguccaca

SEQ ID NO: 920855 - RNA, 23 nt, Human
uggcacagacaggaggacagaug

SEQ ID NO: 920856 - RNA, 18 nt, Human
uggcacaggugagcaucc

SEQ ID NO: 920857 - RNA, 18 nt, Human
uggcccaugacccaucaa

SEQ ID NO: 920858 - RNA, 19 nt, Human
uggcccaugacccaucaaa

SEQ ID NO: 920859 - RNA, 19 nt, Human
uggccugugggacuccaga

SEQ ID NO: 920860 - RNA, 21 nt, Human
uggcucaggcccgcuccuggg

SEQ ID NO: 920861 - RNA, 22 nt, Human
uggcuuccuccugggcugaacc

SEQ ID NO: 920862 - RNA, 26 nt, Human
ugggagcgcugguagcgcuuccaacg

SEQ ID NO: 920863 - RNA, 22 nt, Human
ugggcugaaccuccuugugcuu

SEQ ID NO: 920864 - RNA, 21 nt, Human
uggggcaggauaacagcagag

SEQ ID NO: 920865 - RNA, 20 nt, Human
uggguuggggaggaggacgu

SEQ ID NO: 920866 - RNA, 22 nt, Human
uguccuggggcucagagcagag

SEQ ID NO: 920867 - RNA, 23 nt, Human
ugucucaccauacucgugcccac

SEQ ID NO: 920868 - RNA, 19 nt, Human
ugugcagccagugcagguu

SEQ ID NO: 920869 - RNA, 21 nt, Human
uguggucacaaggauggguac

SEQ ID NO: 920870 - RNA, 21 nt, Human
uuccaccagcucuccuaggcu

SEQ ID NO: 920871 - RNA, 20 nt, Human
uucuguaccaggcccugucc

SEQ ID NO: 920872 - RNA, 24 nt, Human
uugcagcuggcuuccuccugggcu

SEQ ID NO: 920873 - RNA, 22 nt, Human
uuguggacuucccaccagaagu

SEQ ID NO: 920874 - RNA, 24 nt, Human
uuuuuuuuuuuuuuuuuuuucaag

SEQ ID NO: 920875 - RNA, 20 nt, Human
aaggccucccugaacucgcc

SEQ ID NO: 920876 - RNA, 19 nt, Human
acagggggucccacgccug

SEQ ID NO: 920877 - RNA, 22 nt, Human
acaugagcccguucugcagaga

SEQ ID NO: 920878 - RNA, 24 nt, Human
acccccaugggggguggcaggggc

SEQ ID NO: 920879 - RNA, 21 nt, Human
acccugugcccaccuccuuga

SEQ ID NO: 920880 - RNA, 18 nt, Human
accgagacacucugccgg

SEQ ID NO: 920881 - RNA, 24 nt, Human
agcacuuugggaggcugaggcagg

SEQ ID NO: 920882 - RNA, 22 nt, Human
aggcagcaccagcgcagagccc

SEQ ID NO: 920883 - RNA, 20 nt, Human
aggcaggcggaucacgaggu

SEQ ID NO: 920884 - RNA, 24 nt, Human
aggcaggcggaucacgaggucagg

SEQ ID NO: 920885 - RNA, 18 nt, Human
aggcccgaggcagcucga

SEQ ID NO: 920886 - RNA, 19 nt, Human
aggcgaggccgggcccaga

SEQ ID NO: 920887 - RNA, 24 nt, Human
aggcggaucacgaggucaggaguu

SEQ ID NO: 920888 - RNA, 21 nt, Human
aggcugaggcaggcggaucac

SEQ ID NO: 920889 - RNA, 21 nt, Human
aggcugaggcaggcggaucac

SEQ ID NO: 920890 - RNA, 23 nt, Human
agggagcaggcaucagcuccagu

SEQ ID NO: 920891 - RNA, 18 nt, Human
aggggcgggugcgggggu

SEQ ID NO: 920892 - RNA, 21 nt, Human
aggggugacuggcccaggagg

SEQ ID NO: 920893 - RNA, 24 nt, Human
cacccccuaccucacccugugccc

SEQ ID NO: 920894 - RNA, 25 nt, Human
cacccccuaccucacccugugccca

SEQ ID NO: 920895 - RNA, 22 nt, Human
cacgccugucaucccagcacuu

SEQ ID NO: 920896 - RNA, 24 nt, Human
cacgccugucaucccagcacuuug

SEQ ID NO: 920897 - RNA, 24 nt, Human
cagcacuuugggaggcugaggcag

SEQ ID NO: 920898 - RNA, 26 nt, Human
cagcacuuugggaggcugaggcaggc

SEQ ID NO: 920899 - RNA, 25 nt, Human
caggaguucucucucagaccagccu

SEQ ID NO: 920900 - RNA, 20 nt, Human
caggggccucgggcgggcuu

SEQ ID NO: 920901 - RNA, 24 nt, Human
ccaccuggggccaugcccagcugc

SEQ ID NO: 920902 - RNA, 19 nt, Human
ccagaagugccgcgggggc

SEQ ID NO: 920903 - RNA, 20 nt, Human
ccagaagugccgcgggggca

SEQ ID NO: 920904 - RNA, 20 nt, Human
ccaggcacguggcccaugcc

SEQ ID NO: 920905 - RNA, 23 nt, Human
ccaugcccacgacgcccacgacc

SEQ ID NO: 920906 - RNA, 19 nt, Human
cccacgacgcccacgacca

SEQ ID NO: 920907 - RNA, 21 nt, Human
cccacgacgcccacgaccacg

SEQ ID NO: 920908 - RNA, 19 nt, Human
cccccuaccucacccugug

SEQ ID NO: 920909 - RNA, 22 nt, Human
ccccuaccucacccugugccca

SEQ ID NO: 920910 - RNA, 22 nt, Human
ccccuaccucacccugugcccc

SEQ ID NO: 920911 - RNA, 19 nt, Human
ccucccugaacucgccacc

SEQ ID NO: 920912 - RNA, 23 nt, Human
ccuccuugaaggccucccugaac

SEQ ID NO: 920913 - RNA, 22 nt, Human
ccugucaucccagcacuuuggg

SEQ ID NO: 920914 - RNA, 19 nt, Human
cgaggccgggcccagaccc

SEQ ID NO: 920915 - RNA, 21 nt, Human
cgcacgccugucaucccagca

SEQ ID NO: 920916 - RNA, 23 nt, Human
cgccugucaucccagcacuuugg

SEQ ID NO: 920917 - RNA, 19 nt, Human
cgcuccgagacgauggugc

SEQ ID NO: 920918 - RNA, 22 nt, Human
cggaucacgaggucaggaguuc

SEQ ID NO: 920919 - RNA, 21 nt, Human
cguggcccaugcccacgacgc

SEQ ID NO: 920920 - RNA, 20 nt, Human
cuccaguucuucucgaugcc

SEQ ID NO: 920921 - RNA, 19 nt, Human
cucucagaccagccuggcc

SEQ ID NO: 920922 - RNA, 21 nt, Human
cuucacgggccgggugcagug

SEQ ID NO: 920923 - RNA, 20 nt, Human
cuuccugggcucggcugugg

SEQ ID NO: 920924 - RNA, 22 nt, Human
cuucucaaagguagcucccuuc

SEQ ID NO: 920925 - RNA, 25 nt, Human
cuugugccgggccucggucacccuc

SEQ ID NO: 920926 - RNA, 19 nt, Human
gaucacgaggucaggaguu

SEQ ID NO: 920927 - RNA, 18 nt, Human
gcacuucucaaagguagc

SEQ ID NO: 920928 - RNA, 20 nt, Human
gcagagcccugccccagccc

SEQ ID NO: 920929 - RNA, 22 nt, Human
gcagagcccugccccagcccag

SEQ ID NO: 920930 - RNA, 20 nt, Human
gcagcaccagcgcagagccc

SEQ ID NO: 920931 - RNA, 21 nt, Human
gcagcucgaggcgccgcgcgg

SEQ ID NO: 920932 - RNA, 22 nt, Human
gcaggcagcaccagcgcagagc

SEQ ID NO: 920933 - RNA, 19 nt, Human
gcagucuccuacuugugcc

SEQ ID NO: 920934 - RNA, 22 nt, Human
gcccacgaccacggaggggacg

SEQ ID NO: 920935 - RNA, 19 nt, Human
gcccacgacgcccacgacc

SEQ ID NO: 920936 - RNA, 18 nt, Human
ggagacggacggcggggg

SEQ ID NO: 920937 - RNA, 23 nt, Human
ggcccgaggcagcucgaggcgcc

SEQ ID NO: 920938 - RNA, 22 nt, Human
ggcugggggaggggugacuggc

SEQ ID NO: 920939 - RNA, 19 nt, Human
gggaauggcagaacuggga

SEQ ID NO: 920940 - RNA, 23 nt, Human
gggaauggcagaacugggauggc

SEQ ID NO: 920941 - RNA, 18 nt, Human
gggauggcaggcagcacc

SEQ ID NO: 920942 - RNA, 18 nt, Human
gggcaggcgaggccgggc

SEQ ID NO: 920943 - RNA, 20 nt, Human
gggcugggggaggggugacu

SEQ ID NO: 920944 - RNA, 20 nt, Human
ggggacgcacuuccugggcu

SEQ ID NO: 920945 - RNA, 20 nt, Human
ggggugcgcugggggaaugg

SEQ ID NO: 920946 - RNA, 21 nt, Human
gggugcgggggugcgcugggg

SEQ ID NO: 920947 - RNA, 18 nt, Human
ggugcaguggcgcacgcc

SEQ ID NO: 920948 - RNA, 20 nt, Human
ggugcaguggcgcacgccug

SEQ ID NO: 920949 - RNA, 21 nt, Human
ggugcaguggcgcacgccugu

SEQ ID NO: 920950 - RNA, 20 nt, Human
gugcggcggcccauccagua

SEQ ID NO: 920951 - RNA, 24 nt, Human
guggggaaggacaaggggucagua

SEQ ID NO: 920952 - RNA, 21 nt, Human
guucuucucgaugccaggcac

SEQ ID NO: 920953 - RNA, 18 nt, Human
uaccugcucgggccucag

SEQ ID NO: 920954 - RNA, 23 nt, Human
uacugcgcggcgggcagcgacag

SEQ ID NO: 920955 - RNA, 19 nt, Human
uagcccagcaggccgaaga

SEQ ID NO: 920956 - RNA, 24 nt, Human
uauuugggugggcugggggagggg

SEQ ID NO: 920957 - RNA, 18 nt, Human
ucacgaggucaggaguuc

SEQ ID NO: 920958 - RNA, 18 nt, Human
ucagaaaagaccuucacg

SEQ ID NO: 920959 - RNA, 21 nt, Human
ucagaccagccuggccaacau

SEQ ID NO: 920960 - RNA, 18 nt, Human
ucaguaccugcucgggcc

SEQ ID NO: 920961 - RNA, 21 nt, Human
ucccugaacucgccaccuggg

SEQ ID NO: 920962 - RNA, 19 nt, Human
uccucaggggcccgagcgg

SEQ ID NO: 920963 - RNA, 21 nt, Human
ucucaaagguagcucccuuca

SEQ ID NO: 920964 - RNA, 21 nt, Human
ucucucagaccagccuggcca

SEQ ID NO: 920965 - RNA, 20 nt, Human
ucugcagagagagggagcag

SEQ ID NO: 920966 - RNA, 18 nt, Human
ugaacucgccaccugggg

SEQ ID NO: 920967 - RNA, 24 nt, Human
ugaggcaggcggaucacgagguca

SEQ ID NO: 920968 - RNA, 23 nt, Human
ugcagagggucagaccagagcag

SEQ ID NO: 920969 - RNA, 19 nt, Human
uggcccccuccccgacagg

SEQ ID NO: 920970 - RNA, 24 nt, Human
uggcgcacgccugucaucccagca

SEQ ID NO: 920971 - RNA, 18 nt, Human
ugggaggcugaggcaggc

SEQ ID NO: 920972 - RNA, 20 nt, Human
ugggaggcugaggcaggcgg

SEQ ID NO: 920973 - RNA, 24 nt, Human
ugggaggcugaggcaggcggauca

SEQ ID NO: 920974 - RNA, 18 nt, Human
ugggggguggcaggggcc

SEQ ID NO: 920975 - RNA, 20 nt, Human
ugggugggcugggggagggg

SEQ ID NO: 920976 - RNA, 22 nt, Human
uucacggccaaccgagacacuc

SEQ ID NO: 920977 - RNA, 20 nt, Human
uuggcccccuccccgacagg

SEQ ID NO: 920978 - RNA, 25 nt, Human
uugggaggcugaggcaggcggauca

SEQ ID NO: 920979 - RNA, 21 nt, Human
uuuuuuuuuuuuuuuuuucag

SEQ ID NO: 920980 - RNA, 23 nt, Human
acagggcagguccagccuggggc

SEQ ID NO: 920981 - RNA, 25 nt, Human
cacuuuugcacacgcgugcugagga

SEQ ID NO: 920982 - RNA, 18 nt, Human
cagcagcaguccuggggg

SEQ ID NO: 920983 - RNA, 20 nt, Human
cagcagcaguccugggggug

SEQ ID NO: 920984 - RNA, 18 nt, Human
cagcccaaguucagguca

SEQ ID NO: 920985 - RNA, 24 nt, Human
caggcccccagagugggccgaagg

SEQ ID NO: 920986 - RNA, 20 nt, Human
cagggcagguccagccuggg

SEQ ID NO: 920987 - RNA, 18 nt, Human
cagguccagccuggggcc

SEQ ID NO: 920988 - RNA, 18 nt, Human
cccacugcagcauuucca

SEQ ID NO: 920989 - RNA, 19 nt, Human
ccccacugcagcauuucca

SEQ ID NO: 920990 - RNA, 18 nt, Human
ccugaacaaacaccuccg

SEQ ID NO: 920991 - RNA, 23 nt, Human
ccugaacaaacaccuccggguca

SEQ ID NO: 920992 - RNA, 23 nt, Human
cugcagcauuuccaggcccccag

SEQ ID NO: 920993 - RNA, 22 nt, Human
cuggggccugcuccccacugca

SEQ ID NO: 920994 - RNA, 21 nt, Human
gagagccgccugaacaaacac

SEQ ID NO: 920995 - RNA, 20 nt, Human
gagccgccugaacaaacacc

SEQ ID NO: 920996 - RNA, 19 nt, Human
gaguaaaaggcauuuucuu

SEQ ID NO: 920997 - RNA, 21 nt, Human
gccugaacaaacaccuccggg

SEQ ID NO: 920998 - RNA, 18 nt, Human
gccuggggccugcucccc

SEQ ID NO: 920999 - RNA, 21 nt, Human
ggacguguccaggcuccagca

SEQ ID NO: 921000 - RNA, 18 nt, Human
ggcagguccagccugggg

SEQ ID NO: 921001 - RNA, 23 nt, Human
ggccugcuccccacugcagcauu

SEQ ID NO: 921002 - RNA, 26 nt, Human
ucaauggcgucacaguaauccugagc

SEQ ID NO: 921003 - RNA, 22 nt, Human
uccccacugcagcauuuccagg

SEQ ID NO: 921004 - RNA, 18 nt, Human
uccuggggguggggguug

SEQ ID NO: 921005 - RNA, 19 nt, Human
ugaggggccgguccucggg

SEQ ID NO: 921006 - RNA, 20 nt, Human
uggggguggggguugugggc

SEQ ID NO: 921007 - RNA, 22 nt, Human
uguucacuuuugcacacgcgug

SEQ ID NO: 921008 - RNA, 25 nt, Human
uuggcacagaacugcacgaugaggg

SEQ ID NO: 921009 - RNA, 19 nt, Human
uuuccacauuaaguagcag

SEQ ID NO: 921010 - RNA, 21 nt, Human
uuuuuuuuuuuuuuugcaucu

SEQ ID NO: 921011 - RNA, 25 nt, Human
uuuuuuuuuuuuuuugcaucuuuga

SEQ ID NO: 921012 - RNA, 24 nt, Human
aaaaccugguuacuauucucuagg

SEQ ID NO: 921013 - RNA, 22 nt, Human
aaaguuacaaucaacggcugag

SEQ ID NO: 921014 - RNA, 26 nt, Human
aauguuaaaaacaugauuaggaaaaa

SEQ ID NO: 921015 - RNA, 18 nt, Human
accacuuuuuugcaccug

SEQ ID NO: 921016 - RNA, 19 nt, Human
agaaaaagucuggcacgug

SEQ ID NO: 921017 - RNA, 23 nt, Human
agagcuacugguuuaagguacaa

SEQ ID NO: 921018 - RNA, 18 nt, Human
agauacuauaagccauaa

SEQ ID NO: 921019 - RNA, 18 nt, Human
agaugugaccaucuauca

SEQ ID NO: 921020 - RNA, 18 nt, Human
aggauguuugaaccacug

SEQ ID NO: 921021 - RNA, 18 nt, Human
agugcaugcccaccgaua

SEQ ID NO: 921022 - RNA, 18 nt, Human
aguuaaaaacaaaaccug

SEQ ID NO: 921023 - RNA, 25 nt, Human
caauauacuuauuaucacgguuuua

SEQ ID NO: 921024 - RNA, 22 nt, Human
cagaucuaccuaaucagaaucu

SEQ ID NO: 921025 - RNA, 21 nt, Human
cccacucuacccaucccccca

SEQ ID NO: 921026 - RNA, 22 nt, Human
cccccaauaucuauagaacagg

SEQ ID NO: 921027 - RNA, 24 nt, Human
cccccaauaucuauagaacaggau

SEQ ID NO: 921028 - RNA, 22 nt, Human
ccuuaagauaugguagauugca

SEQ ID NO: 921029 - RNA, 24 nt, Human
gcccaccgauaacaaaaucuauua

SEQ ID NO: 921030 - RNA, 21 nt, Human
gcccagggcgcggcccugagc

SEQ ID NO: 921031 - RNA, 21 nt, Human
uaaaauguuaaaaacaugauu

SEQ ID NO: 921032 - RNA, 24 nt, Human
uaagaaaaagucuggcacgugacu

SEQ ID NO: 921033 - RNA, 21 nt, Human
uacuccagaucuaccuaauca

SEQ ID NO: 921034 - RNA, 23 nt, Human
uaggagcuauuauuaagcuuuca

SEQ ID NO: 921035 - RNA, 18 nt, Human
uauuaagcuuucaaucuu

SEQ ID NO: 921036 - RNA, 26 nt, Human
uauuauuaagcuuucaaucuuuggag

SEQ ID NO: 921037 - RNA, 19 nt, Human
uauucagaauuuccuguuc

SEQ ID NO: 921038 - RNA, 21 nt, Human
ucccacucuacccaucccccc

SEQ ID NO: 921039 - RNA, 20 nt, Human
ucuguggcaacaauauacuu

SEQ ID NO: 921040 - RNA, 23 nt, Human
ugcaugcccaccgauaacaaaau

SEQ ID NO: 921041 - RNA, 19 nt, Human
uuaaaguuaaaaacaaaac

SEQ ID NO: 921042 - RNA, 21 nt, Human
uuaaugucauuaaccaaaugg

SEQ ID NO: 921043 - RNA, 20 nt, Human
uucaaaucugaugcucuuac

SEQ ID NO: 921044 - RNA, 21 nt, Human
aaggcagcccuguccccauua

SEQ ID NO: 921045 - RNA, 20 nt, Human
acauuucauagaagugggau

SEQ ID NO: 921046 - RNA, 20 nt, Human
accaagaugguggcugggca

SEQ ID NO: 921047 - RNA, 21 nt, Human
accacgccgugcagccauccc

SEQ ID NO: 921048 - RNA, 21 nt, Human
acccacacugugucaccccca

SEQ ID NO: 921049 - RNA, 19 nt, Human
acccacgaauccucucccu

SEQ ID NO: 921050 - RNA, 22 nt, Human
acccccaggucccccuccccag

SEQ ID NO: 921051 - RNA, 26 nt, Human
acccccaggucccccuccccaguccc

SEQ ID NO: 921052 - RNA, 24 nt, Human
accccgcagcugggaggagggagu

SEQ ID NO: 921053 - RNA, 20 nt, Human
agaaggcagcccugucccca

SEQ ID NO: 921054 - RNA, 18 nt, Human
agacaggaggaucacccg

SEQ ID NO: 921055 - RNA, 18 nt, Human
agacaggaggaucacccg

SEQ ID NO: 921056 - RNA, 24 nt, Human
agacaggaggaucacccgagccca

SEQ ID NO: 921057 - RNA, 19 nt, Human
agagcugggggcucagggc

SEQ ID NO: 921058 - RNA, 25 nt, Human
agauggagaagccagaccccaggug

SEQ ID NO: 921059 - RNA, 21 nt, Human
aggaaagaaauuaaaccaaga

SEQ ID NO: 921060 - RNA, 20 nt, Human
aggagcuggggugacaggug

SEQ ID NO: 921061 - RNA, 21 nt, Human
aggccauguccugaggcucug

SEQ ID NO: 921062 - RNA, 18 nt, Human
aucgaaggggcaggggga

SEQ ID NO: 921063 - RNA, 25 nt, Human
augguggcccacaccuguaauccca

SEQ ID NO: 921064 - RNA, 18 nt, Human
cacaaaucgugcugcugu

SEQ ID NO: 921065 - RNA, 24 nt, Human
cacaccuguaaucccagcaccuug

SEQ ID NO: 921066 - RNA, 21 nt, Human
cacccacacugugucaccccc

SEQ ID NO: 921067 - RNA, 18 nt, Human
caccgcuguacaggugag

SEQ ID NO: 921068 - RNA, 22 nt, Human
caccucaccccgcagcugggag

SEQ ID NO: 921069 - RNA, 19 nt, Human
caccuggcaguggcccugg

SEQ ID NO: 921070 - RNA, 21 nt, Human
caccuggcaguggcccuggcc

SEQ ID NO: 921071 - RNA, 21 nt, Human
caccuguaaucccagcaccuu

SEQ ID NO: 921072 - RNA, 23 nt, Human
caccuguaaucccagcaccuugg

SEQ ID NO: 921073 - RNA, 22 nt, Human
cacugagcgugacauccucaag

SEQ ID NO: 921074 - RNA, 23 nt, Human
cagaagccccucaagggggugug

SEQ ID NO: 921075 - RNA, 20 nt, Human
cagaaggcagcccugucccc

SEQ ID NO: 921076 - RNA, 21 nt, Human
cagaaggcagcccugucccca

SEQ ID NO: 921077 - RNA, 24 nt, Human
cagaggccuucuggcaggagcccg

SEQ ID NO: 921078 - RNA, 18 nt, Human
cagccccucccucccucc

SEQ ID NO: 921079 - RNA, 19 nt, Human
caggucccccuccccaguc

SEQ ID NO: 921080 - RNA, 25 nt, Human
caggugagccccucccagccccucc

SEQ ID NO: 921081 - RNA, 22 nt, Human
ccacaccuguaaucccagcacc

SEQ ID NO: 921082 - RNA, 24 nt, Human
ccacacugugucacccccaguugu

SEQ ID NO: 921083 - RNA, 21 nt, Human
ccagaacauucucaucaccca

SEQ ID NO: 921084 - RNA, 23 nt, Human
ccagccccucccucccucccucc

SEQ ID NO: 921085 - RNA, 23 nt, Human
cccacaccuguaaucccagcacc

SEQ ID NO: 921086 - RNA, 22 nt, Human
ccccucaaggggguguggagau

SEQ ID NO: 921087 - RNA, 19 nt, Human
ccccucccagccccucccu

SEQ ID NO: 921088 - RNA, 21 nt, Human
ccccucccuacaggugagccc

SEQ ID NO: 921089 - RNA, 20 nt, Human
ccccucccucccucccuccc

SEQ ID NO: 921090 - RNA, 22 nt, Human
cccuacaggugagccccuccca

SEQ ID NO: 921091 - RNA, 21 nt, Human
cccuccccagucccggcaccc

SEQ ID NO: 921092 - RNA, 21 nt, Human
cccucgaggccagcuucccag

SEQ ID NO: 921093 - RNA, 22 nt, Human
cccuuugcuccauuuccaagga

SEQ ID NO: 921094 - RNA, 19 nt, Human
ccgcacuguggccuggguc

SEQ ID NO: 921095 - RNA, 22 nt, Human
ccgcuguacaggugagccccuc

SEQ ID NO: 921096 - RNA, 21 nt, Human
ccuccugcgaucgaaggggcu

SEQ ID NO: 921097 - RNA, 20 nt, Human
ccucgaggccaccucacccc

SEQ ID NO: 921098 - RNA, 22 nt, Human
ccucggggacccucgaggccag

SEQ ID NO: 921099 - RNA, 23 nt, Human
ccugcgaucgaaggggccggggc

SEQ ID NO: 921100 - RNA, 18 nt, Human
ccuggccuugcccaccca

SEQ ID NO: 921101 - RNA, 19 nt, Human
ccuucuggcaggagcccgg

SEQ ID NO: 921102 - RNA, 20 nt, Human
ccuucugugucuggugucuc

SEQ ID NO: 921103 - RNA, 24 nt, Human
cucaucacccagaaggcagcccug

SEQ ID NO: 921104 - RNA, 21 nt, Human
cucccugggugucagguuaca

SEQ ID NO: 921105 - RNA, 23 nt, Human
cucucacugagcgugacauccuc

SEQ ID NO: 921106 - RNA, 21 nt, Human
cugucaacgguggccucagag

SEQ ID NO: 921107 - RNA, 21 nt, Human
gagcccgggggauccaggcag

SEQ ID NO: 921108 - RNA, 20 nt, Human
gaucacagcguacccuucug

SEQ ID NO: 921109 - RNA, 23 nt, Human
gcccuggccuugcccacccacac

SEQ ID NO: 921110 - RNA, 19 nt, Human
gcccuggccuugcccaccu

SEQ ID NO: 921111 - RNA, 19 nt, Human
ggagaagccagaccccagg

SEQ ID NO: 921112 - RNA, 23 nt, Human
ggagauggagaagccagacccca

SEQ ID NO: 921113 - RNA, 18 nt, Human
ggaggagggaguggucag

SEQ ID NO: 921114 - RNA, 21 nt, Human
ggcccacaccuguaaucccag

SEQ ID NO: 921115 - RNA, 24 nt, Human
gggcaugguggcccacaccuguaa

SEQ ID NO: 921116 - RNA, 18 nt, Human
ggggguauaccagucacc

SEQ ID NO: 921117 - RNA, 24 nt, Human
gguggcccacaccuguaaucccag

SEQ ID NO: 921118 - RNA, 18 nt, Human
guggcccuggccuugccc

SEQ ID NO: 921119 - RNA, 23 nt, Human
guggcugggcaugguggcccaca

SEQ ID NO: 921120 - RNA, 21 nt, Human
uaagacaggaggaucacccga

SEQ ID NO: 921121 - RNA, 23 nt, Human
uaagacaggaggaucacccgagc

SEQ ID NO: 921122 - RNA, 24 nt, Human
uaagacaggaggaucacccgagcc

SEQ ID NO: 921123 - RNA, 19 nt, Human
uacaggugagccccucccu

SEQ ID NO: 921124 - RNA, 19 nt, Human
uaugcugucaacgguggcc

SEQ ID NO: 921125 - RNA, 21 nt, Human
ucacccccaggucccccuccc

SEQ ID NO: 921126 - RNA, 26 nt, Human
ucagaggccuucuggcaggagcccgg

SEQ ID NO: 921127 - RNA, 20 nt, Human
uccaaggaaagaaauuaaac

SEQ ID NO: 921128 - RNA, 21 nt, Human
uccaaggaaagaaauuaaacc

SEQ ID NO: 921129 - RNA, 18 nt, Human
ucccagccccucccuccc

SEQ ID NO: 921130 - RNA, 18 nt, Human
uccccagucccggcaccc

SEQ ID NO: 921131 - RNA, 22 nt, Human
uccccagucccggcacccacga

SEQ ID NO: 921132 - RNA, 20 nt, Human
ucccuacaggugagccccuc

SEQ ID NO: 921133 - RNA, 21 nt, Human
ucgaggccagcuucccagcac

SEQ ID NO: 921134 - RNA, 18 nt, Human
ugaaagcccuuugcucca

SEQ ID NO: 921135 - RNA, 23 nt, Human
ugacaggugccugcgaccccggc

SEQ ID NO: 921136 - RNA, 18 nt, Human
ugaggagugaggagcugg

SEQ ID NO: 921137 - RNA, 22 nt, Human
ugagugggugaggagugaggag

SEQ ID NO: 921138 - RNA, 18 nt, Human
ugcgugcaggucucaucc

SEQ ID NO: 921139 - RNA, 24 nt, Human
uggaaggcuaagacaggaggauca

SEQ ID NO: 921140 - RNA, 20 nt, Human
uggaauacuaugcagccaug

SEQ ID NO: 921141 - RNA, 20 nt, Human
uggagaagccagaccccagg

SEQ ID NO: 921142 - RNA, 22 nt, Human
uggagauggagaagccagaccc

SEQ ID NO: 921143 - RNA, 21 nt, Human
uggcaguggcccuggccuugc

SEQ ID NO: 921144 - RNA, 24 nt, Human
uggcccacaccuguaaucccagca

SEQ ID NO: 921145 - RNA, 23 nt, Human
uggcugggcaugguggcccacag

SEQ ID NO: 921146 - RNA, 19 nt, Human
ugggcagaugugauuuugg

SEQ ID NO: 921147 - RNA, 21 nt, Human
ugggugaggagugaggagcug

SEQ ID NO: 921148 - RNA, 19 nt, Human
ugucaacgguggccucaga

SEQ ID NO: 921149 - RNA, 19 nt, Human
ugugagugggugaggagug

SEQ ID NO: 921150 - RNA, 23 nt, Human
ugugguaaaauacaaaaucuacc

SEQ ID NO: 921151 - RNA, 22 nt, Human
uucaccacgccgugcagccauc

SEQ ID NO: 921152 - RNA, 19 nt, Human
uugcgugcaggucucaucc

SEQ ID NO: 921153 - RNA, 25 nt, Human
uuggaaggcuaagacaggaggauca

SEQ ID NO: 921154 - RNA, 23 nt, Human
uuuguuuuguuuuguuuauugug

SEQ ID NO: 921155 - RNA, 20 nt, Human
uuuuggggguauaccaguca

SEQ ID NO: 921156 - RNA, 23 nt, Human
uuuuuuuuuuuugguuuuguuuu

SEQ ID NO: 921157 - RNA, 20 nt, Human
uuuuuuuuuuuuuuuuuugg

SEQ ID NO: 921158 - RNA, 24 nt, Human
uuuuuuuuuuuuuuuuuugguuuu

SEQ ID NO: 921159 - RNA, 21 nt, Human
agaaagcgcucccuagccccg

SEQ ID NO: 921160 - RNA, 20 nt, Human
agaggguauccuggccgagg

SEQ ID NO: 921161 - RNA, 18 nt, Human
aggccgcacgcagcccca

SEQ ID NO: 921162 - RNA, 20 nt, Human
auggagcaggucaguggcag

SEQ ID NO: 921163 - RNA, 21 nt, Human
auggcagaggguauccuggcc

SEQ ID NO: 921164 - RNA, 23 nt, Human
caaacugguccgggccacuuggg

SEQ ID NO: 921165 - RNA, 22 nt, Human
cacagccuucagaaagggcagg

SEQ ID NO: 921166 - RNA, 20 nt, Human
caccccggcucugacugucg

SEQ ID NO: 921167 - RNA, 28 nt, Human
cacgcagccccaaacugguccgggccac

SEQ ID NO: 921168 - RNA, 23 nt, Human
cacuccaaccucuuccacagccu

SEQ ID NO: 921169 - RNA, 19 nt, Human
cagaaagggcaggcgcagc

SEQ ID NO: 921170 - RNA, 18 nt, Human
cagccccaaacugguccg

SEQ ID NO: 921171 - RNA, 23 nt, Human
caggaacagucacugucucuccu

SEQ ID NO: 921172 - RNA, 22 nt, Human
cccgcuggcaccccggcucuga

SEQ ID NO: 921173 - RNA, 21 nt, Human
ccuaaagucucucuuccuuca

SEQ ID NO: 921174 - RNA, 28 nt, Human
cgccgaccuacguaccugguugcuugag

SEQ ID NO: 921175 - RNA, 21 nt, Human
cucacacugaagggcagcucc

SEQ ID NO: 921176 - RNA, 22 nt, Human
cucccaccgcagcgccgagcug

SEQ ID NO: 921177 - RNA, 18 nt, Human
cuccccaggccuuuuggc

SEQ ID NO: 921178 - RNA, 18 nt, Human
cucugacugucgcccucc

SEQ ID NO: 921179 - RNA, 24 nt, Human
cugcuugccuaaagucucucuucc

SEQ ID NO: 921180 - RNA, 21 nt, Human
cuugccuaaagucucucuucc

SEQ ID NO: 921181 - RNA, 26 nt, Human
gaaagggcaggcgcagcucugcgaag

SEQ ID NO: 921182 - RNA, 20 nt, Human
gcccacuccaaccucuucca

SEQ ID NO: 921183 - RNA, 22 nt, Human
gcccacuccaaccucuuccaca

SEQ ID NO: 921184 - RNA, 25 nt, Human
gccccaaacugguccgggccacuug

SEQ ID NO: 921185 - RNA, 19 nt, Human
ggaggccccgggacucaga

SEQ ID NO: 921186 - RNA, 22 nt, Human
uaagugccugucacuuugcucc

SEQ ID NO: 921187 - RNA, 18 nt, Human
uauccugauggugugggg

SEQ ID NO: 921188 - RNA, 20 nt, Human
ucccacauaauggagagcuc

SEQ ID NO: 921189 - RNA, 21 nt, Human
ucccgggagaaagcgcucccu

SEQ ID NO: 921190 - RNA, 18 nt, Human
uccuggccgagguccuaa

SEQ ID NO: 921191 - RNA, 21 nt, Human
uccuggccgagguccuaaggc

SEQ ID NO: 921192 - RNA, 26 nt, Human
ucugcagcacgaggaggccccgggac

SEQ ID NO: 921193 - RNA, 18 nt, Human
ugaggaaugggucccaca

SEQ ID NO: 921194 - RNA, 22 nt, Human
ugaggcaggccgcacgcagccc

SEQ ID NO: 921195 - RNA, 18 nt, Human
ugcaucuaagugccuguc

SEQ ID NO: 921196 - RNA, 22 nt, Human
ugccuaaagucucucuuccuuc

SEQ ID NO: 921197 - RNA, 21 nt, Human
uggcagaggguauccuggccg

SEQ ID NO: 921198 - RNA, 21 nt, Human
uggcaggaacagucacugucc

SEQ ID NO: 921199 - RNA, 18 nt, Human
uggccgagguccuaaggc

SEQ ID NO: 921200 - RNA, 22 nt, Human
uggccgcuucgcagaacgacgg

SEQ ID NO: 921201 - RNA, 24 nt, Human
uggcggucgcgucccgcuggcacc

SEQ ID NO: 921202 - RNA, 24 nt, Human
ugggaaggacuguggcaggaacag

SEQ ID NO: 921203 - RNA, 22 nt, Human
ugggcugcuugccuaaagucuc

SEQ ID NO: 921204 - RNA, 18 nt, Human
uggugaggaauggguccc

SEQ ID NO: 921205 - RNA, 22 nt, Human
ugguguggggguguggaacagg

SEQ ID NO: 921206 - RNA, 19 nt, Human
aaagugcuggaauuauagg

SEQ ID NO: 921207 - RNA, 24 nt, Human
aaagugcuggaauuauagguguga

SEQ ID NO: 921208 - RNA, 26 nt, Human
aagugcuggaauuauaggugugagcc

SEQ ID NO: 921209 - RNA, 18 nt, Human
aauuauaggugugagcca

SEQ ID NO: 921210 - RNA, 21 nt, Human
aauuauaggugugagccacca

SEQ ID NO: 921211 - RNA, 18 nt, Human
acaguucacugcagccuc

SEQ ID NO: 921212 - RNA, 24 nt, Human
accucaggcugcugaggggccugg

SEQ ID NO: 921213 - RNA, 24 nt, Human
acuacaggcgcgugccaccacauu

SEQ ID NO: 921214 - RNA, 18 nt, Human
acugcagccucaaccucc

SEQ ID NO: 921215 - RNA, 24 nt, Human
acugcagccucaaccuccuggcuu

SEQ ID NO: 921216 - RNA, 24 nt, Human
agcaccuuucaccuggacaauggc

SEQ ID NO: 921217 - RNA, 22 nt, Human
agguccuuagcaccuuucaccu

SEQ ID NO: 921218 - RNA, 19 nt, Human
aggugugagccaccacgcc

SEQ ID NO: 921219 - RNA, 19 nt, Human
aggugugagccaccacgcc

SEQ ID NO: 921220 - RNA, 19 nt, Human
aguagccacccagaccccc

SEQ ID NO: 921221 - RNA, 23 nt, Human
aguagcugggacuacaggcgcgu

SEQ ID NO: 921222 - RNA, 19 nt, Human
auggggucuugccauguug

SEQ ID NO: 921223 - RNA, 24 nt, Human
auggggucuugccauguugcccag

SEQ ID NO: 921224 - RNA, 24 nt, Human
caaagugcuggaauuauaggugug

SEQ ID NO: 921225 - RNA, 22 nt, Human
caagugauccuccugccucagc

SEQ ID NO: 921226 - RNA, 27 nt, Human
caagugauccuccugccucagccuccc

SEQ ID NO: 921227 - RNA, 27 nt, Human
caagugauccuccugccucagccuccc

SEQ ID NO: 921228 - RNA, 19 nt, Human
cacccagacccccaaauag

SEQ ID NO: 921229 - RNA, 24 nt, Human
caccccagccuuccgaguagcugg

SEQ ID NO: 921230 - RNA, 19 nt, Human
cacugcagccucaaccucc

SEQ ID NO: 921231 - RNA, 22 nt, Human
cagccucaaccuccuggcuuca

SEQ ID NO: 921232 - RNA, 21 nt, Human
cagcuuccuggccaggcuccc

SEQ ID NO: 921233 - RNA, 23 nt, Human
cagcuuccuggccaggcucccag

SEQ ID NO: 921234 - RNA, 23 nt, Human
caggcucccagccuccagccaca

SEQ ID NO: 921235 - RNA, 19 nt, Human
cagguccuuagcaccuuuc

SEQ ID NO: 921236 - RNA, 22 nt, Human
caguagccacccagacccccaa

SEQ ID NO: 921237 - RNA, 24 nt, Human
caguagccacccagacccccaaau

SEQ ID NO: 921238 - RNA, 20 nt, Human
cauagccugggaacaggggg

SEQ ID NO: 921239 - RNA, 23 nt, Human
cauguugcccaggcugguguuga

SEQ ID NO: 921240 - RNA, 24 nt, Human
cauguugcccaggcugguguugaa

SEQ ID NO: 921241 - RNA, 21 nt, Human
ccaaagugcuggaauuauagg

SEQ ID NO: 921242 - RNA, 24 nt, Human
ccaaagugcuggaauuauaggugu

SEQ ID NO: 921243 - RNA, 20 nt, Human
ccaccacauucagcucauuu

SEQ ID NO: 921244 - RNA, 23 nt, Human
ccaccccagccuuccgaguagcu

SEQ ID NO: 921245 - RNA, 20 nt, Human
ccauagccugggaacagggg

SEQ ID NO: 921246 - RNA, 19 nt, Human
ccauguugcccaggcuggu

SEQ ID NO: 921247 - RNA, 23 nt, Human
cccucugcaaggcccuccaguag

SEQ ID NO: 921248 - RNA, 19 nt, Human
ccucaggcugcugaggggc

SEQ ID NO: 921249 - RNA, 21 nt, Human
ccucaggcugcugaggggccu

SEQ ID NO: 921250 - RNA, 24 nt, Human
ccugccucagccucccaaagugcu

SEQ ID NO: 921251 - RNA, 19 nt, Human
ccugcuuucuucuuucugu

SEQ ID NO: 921252 - RNA, 19 nt, Human
ccuggacaauggcgacagc

SEQ ID NO: 921253 - RNA, 23 nt, Human
ccuggccugcuuucuucuuucug

SEQ ID NO: 921254 - RNA, 24 nt, Human
ccuggcuucaagggccaccccagc

SEQ ID NO: 921255 - RNA, 21 nt, Human
ccuggucucaagugauccucc

SEQ ID NO: 921256 - RNA, 22 nt, Human
ccuggucucaagugauccuccu

SEQ ID NO: 921257 - RNA, 23 nt, Human
ccuggucucaagugauccuccug

SEQ ID NO: 921258 - RNA, 18 nt, Human
ccuguucugccccuucac

SEQ ID NO: 921259 - RNA, 20 nt, Human
cucaagugauccuccugccu

SEQ ID NO: 921260 - RNA, 24 nt, Human
cucaagugauccuccugccucagc

SEQ ID NO: 921261 - RNA, 21 nt, Human
cuccuggcuucaagggccacc

SEQ ID NO: 921262 - RNA, 19 nt, Human
cucugucacccaggcugga

SEQ ID NO: 921263 - RNA, 19 nt, Human
cugccccucugcaaggccc

SEQ ID NO: 921264 - RNA, 19 nt, Human
cugccccucugcaaggccc

SEQ ID NO: 921265 - RNA, 24 nt, Human
cugccucagccucccaaagugcug

SEQ ID NO: 921266 - RNA, 22 nt, Human
cuggcuucaagggccaccccag

SEQ ID NO: 921267 - RNA, 23 nt, Human
cuuagcaccuuucaccuggacaa

SEQ ID NO: 921268 - RNA, 21 nt, Human
cuucaagggccaccccagccu

SEQ ID NO: 921269 - RNA, 21 nt, Human
cuuggacucaaaagccauuug

SEQ ID NO: 921270 - RNA, 20 nt, Human
cuuucuguccccacugccac

SEQ ID NO: 921271 - RNA, 22 nt, Human
cuuugaaggacaccaccucagg

SEQ ID NO: 921272 - RNA, 21 nt, Human
gaaccugccuguucugccccu

SEQ ID NO: 921273 - RNA, 21 nt, Human
gacuggacacaagagugggaa

SEQ ID NO: 921274 - RNA, 20 nt, Human
gaguagcugggacuacaggc

SEQ ID NO: 921275 - RNA, 26 nt, Human
gaguagcugggacuacaggcgcgugc

SEQ ID NO: 921276 - RNA, 20 nt, Human
gcccaggcugguguugaauu

SEQ ID NO: 921277 - RNA, 21 nt, Human
ggacaccaccucaggcugcug

SEQ ID NO: 921278 - RNA, 20 nt, Human
gggaacaggggguccugggg

SEQ ID NO: 921279 - RNA, 22 nt, Human
ggggucuugccauguugcccag

SEQ ID NO: 921280 - RNA, 22 nt, Human
gggucuugccauguugcccagg

SEQ ID NO: 921281 - RNA, 24 nt, Human
ggucucaagugauccuccugccuc

SEQ ID NO: 921282 - RNA, 24 nt, Human
ggucucugucacccaggcuggagu

SEQ ID NO: 921283 - RNA, 19 nt, Human
guccugggucgagggaacc

SEQ ID NO: 921284 - RNA, 21 nt, Human
gucucugucacccaggcugga

SEQ ID NO: 921285 - RNA, 24 nt, Human
gucuugccauguugcccaggcugg

SEQ ID NO: 921286 - RNA, 24 nt, Human
gugauccuccugccucagccuccc

SEQ ID NO: 921287 - RNA, 20 nt, Human
uacaggcgcgugccaccaca

SEQ ID NO: 921288 - RNA, 19 nt, Human
uagaaauggggucuugcca

SEQ ID NO: 921289 - RNA, 22 nt, Human
uagaaauggggucuugccaugu

SEQ ID NO: 921290 - RNA, 20 nt, Human
uaggggucgcaagcacgggg

SEQ ID NO: 921291 - RNA, 23 nt, Human
uauaggugugagccaccacgccu

SEQ ID NO: 921292 - RNA, 20 nt, Human
ucaagggccaccccagccuu

SEQ ID NO: 921293 - RNA, 19 nt, Human
ucacugcagccucaaccuc

SEQ ID NO: 921294 - RNA, 23 nt, Human
ucacugcagccucaaccuccugg

SEQ ID NO: 921295 - RNA, 24 nt, Human
ucacugcagccucaaccuccuggc

SEQ ID NO: 921296 - RNA, 20 nt, Human
ucagggauuugcaggaagca

SEQ ID NO: 921297 - RNA, 19 nt, Human
ucagucacaguucacugca

SEQ ID NO: 921298 - RNA, 23 nt, Human
ucccaaagugcuggaauuauagg

SEQ ID NO: 921299 - RNA, 23 nt, Human
uccgaguagcugggacuacaggc

SEQ ID NO: 921300 - RNA, 24 nt, Human
uccgaguagcugggacuacaggcg

SEQ ID NO: 921301 - RNA, 27 nt, Human
uccuccugccucagccucccaaagugc

SEQ ID NO: 921302 - RNA, 18 nt, Human
uccugggucgagggaacc

SEQ ID NO: 921303 - RNA, 25 nt, Human
ucucugucacccaggcuggaguaua

SEQ ID NO: 921304 - RNA, 18 nt, Human
ucugucacccaggcugga

SEQ ID NO: 921305 - RNA, 20 nt, Human
ucuucuuucuguccccacug

SEQ ID NO: 921306 - RNA, 23 nt, Human
ucuugccauguugcccaggcugg

SEQ ID NO: 921307 - RNA, 24 nt, Human
ucuugccauguugcccaggcuggu

SEQ ID NO: 921308 - RNA, 21 nt, Human
ugaugcagugcucugcucuuu

SEQ ID NO: 921309 - RNA, 19 nt, Human
ugccagccgucacgcugcg

SEQ ID NO: 921310 - RNA, 18 nt, Human
ugccauguugcccaggcu

SEQ ID NO: 921311 - RNA, 21 nt, Human
ugccauguugcccaggcuggu

SEQ ID NO: 921312 - RNA, 24 nt, Human
ugcccaggcugguguugaauuccu

SEQ ID NO: 921313 - RNA, 24 nt, Human
ugccucagccucccaaagugcugg

SEQ ID NO: 921314 - RNA, 18 nt, Human
uggaauuauaggugugag

SEQ ID NO: 921315 - RNA, 19 nt, Human
uggaauuauaggugugagc

SEQ ID NO: 921316 - RNA, 22 nt, Human
uggaauuauaggugugagccac

SEQ ID NO: 921317 - RNA, 24 nt, Human
uggaauuauaggugugagccacca

SEQ ID NO: 921318 - RNA, 22 nt, Human
uggccaggcucccagccuccag

SEQ ID NO: 921319 - RNA, 24 nt, Human
uggccaggcucccagccuccagcc

SEQ ID NO: 921320 - RNA, 21 nt, Human
ugggaaaauccauuuguuugg

SEQ ID NO: 921321 - RNA, 20 nt, Human
ugggaacaggggguccuggg

SEQ ID NO: 921322 - RNA, 21 nt, Human
ugggacuacaggcgcgugcca

SEQ ID NO: 921323 - RNA, 22 nt, Human
ugggacuacaggcgcgugccac

SEQ ID NO: 921324 - RNA, 24 nt, Human
ugggacuacaggcgcgugccacca

SEQ ID NO: 921325 - RNA, 24 nt, Human
uggggucuugccauguugcccagg

SEQ ID NO: 921326 - RNA, 18 nt, Human
ugggucgagggaaccugc

SEQ ID NO: 921327 - RNA, 24 nt, Human
ugggucucugucacccaggcugga

SEQ ID NO: 921328 - RNA, 23 nt, Human
uggucucaagugauccuccugcc

SEQ ID NO: 921329 - RNA, 24 nt, Human
uggucucaagugauccuccugccu

SEQ ID NO: 921330 - RNA, 24 nt, Human
uguagaaauggggucuugccaugu

SEQ ID NO: 921331 - RNA, 22 nt, Human
ugucaugguccugccuucucug

SEQ ID NO: 921332 - RNA, 21 nt, Human
ugugagccaccacgccuggcc

SEQ ID NO: 921333 - RNA, 20 nt, Human
uuagcaccuuucaccuggac

SEQ ID NO: 921334 - RNA, 24 nt, Human
uucacugcagccucaaccuccugg

SEQ ID NO: 921335 - RNA, 24 nt, Human
uuccgaguagcugggacuacaggc

SEQ ID NO: 921336 - RNA, 24 nt, Human
uuguagaaauggggucuugccaug

SEQ ID NO: 921337 - RNA, 24 nt, Human
uuuguagaaauggggucuugccau

SEQ ID NO: 921338 - RNA, 21 nt, Human
uuuuuuuuuuuuagguacuca

SEQ ID NO: 921339 - RNA, 23 nt, Human
uuuuuuuuuuuuuuuuuuuuagg

SEQ ID NO: 921340 - RNA, 26 nt, Human
acacaacuccuuuaugaaaggaaacc

SEQ ID NO: 921341 - RNA, 24 nt, Human
acuggaguggaagggcuggggaca

SEQ ID NO: 921342 - RNA, 23 nt, Human
augaaaggaaaccgagggccaca

SEQ ID NO: 921343 - RNA, 22 nt, Human
ccgcugcuccggugcggcuugg

SEQ ID NO: 921344 - RNA, 22 nt, Human
ggaguggaagggcuggggacac

SEQ ID NO: 921345 - RNA, 20 nt, Human
ggcuggggacacaacuccuu

SEQ ID NO: 921346 - RNA, 18 nt, Human
gggcuggggacacaacuc

SEQ ID NO: 921347 - RNA, 19 nt, Human
uacuggaguggaagggcug

SEQ ID NO: 921348 - RNA, 21 nt, Human
ugaaaggaaaccgagggccac

SEQ ID NO: 921349 - RNA, 23 nt, Human
uggaagggcuggggacacaacuc

SEQ ID NO: 921350 - RNA, 19 nt, Human
aacuauguacacacaaagu

SEQ ID NO: 921351 - RNA, 18 nt, Human
acaaagugugcauccaag

SEQ ID NO: 921352 - RNA, 23 nt, Human
acucucgcuuuaaggauggggac

SEQ ID NO: 921353 - RNA, 21 nt, Human
agaaagaugcauccucuugcc

SEQ ID NO: 921354 - RNA, 21 nt, Human
agccgcggcagcucuguagcc

SEQ ID NO: 921355 - RNA, 22 nt, Human
agcucuguagccucaggaccuc

SEQ ID NO: 921356 - RNA, 19 nt, Human
aguugacuacaaaugccug

SEQ ID NO: 921357 - RNA, 25 nt, Human
auagcagcagcagaagucuuuaaag

SEQ ID NO: 921358 - RNA, 23 nt, Human
cacacaaagugugcauccaagag

SEQ ID NO: 921359 - RNA, 24 nt, Human
caccaggaagaaagaugcauccuc

SEQ ID NO: 921360 - RNA, 22 nt, Human
cagcaauggcgcccggggcccu

SEQ ID NO: 921361 - RNA, 18 nt, Human
cagcgcaggaccgggcag

SEQ ID NO: 921362 - RNA, 21 nt, Human
caggaccgggcagcgcgcggg

SEQ ID NO: 921363 - RNA, 25 nt, Human
cauauuacauacauguuuauacaua

SEQ ID NO: 921364 - RNA, 24 nt, Human
ccacugaguuaaagguaacuaugu

SEQ ID NO: 921365 - RNA, 19 nt, Human
ccgagcuacggccccuccc

SEQ ID NO: 921366 - RNA, 19 nt, Human
ccggaggaggagagcagcc

SEQ ID NO: 921367 - RNA, 23 nt, Human
ccucccgcugagcagcgcaggac

SEQ ID NO: 921368 - RNA, 23 nt, Human
cgccagcaauggcgcccggggcc

SEQ ID NO: 921369 - RNA, 21 nt, Human
cggccccgagcuacggccccu

SEQ ID NO: 921370 - RNA, 20 nt, Human
cgggccggggcuggcgacgg

SEQ ID NO: 921371 - RNA, 18 nt, Human
cguccggaucccggcgcu

SEQ ID NO: 921372 - RNA, 23 nt, Human
cuacggccccucccagccggagg

SEQ ID NO: 921373 - RNA, 21 nt, Human
cuuguggcaaucauuuuccuu

SEQ ID NO: 921374 - RNA, 18 nt, Human
gaaucaccaaaaucaaga

SEQ ID NO: 921375 - RNA, 23 nt, Human
gacucucgcuuuaaggaugggga

SEQ ID NO: 921376 - RNA, 22 nt, Human
ggcgggcugagaccgggcggcg

SEQ ID NO: 921377 - RNA, 25 nt, Human
gggcugagaccgggcggcgcuccca

SEQ ID NO: 921378 - RNA, 22 nt, Human
uaaaucaaacaucauucauaga

SEQ ID NO: 921379 - RNA, 24 nt, Human
uagaaaacaggccagcuucaccug

SEQ ID NO: 921380 - RNA, 21 nt, Human
uauguacacacaaagugugca

SEQ ID NO: 921381 - RNA, 21 nt, Human
ucccagccggaggaggagagc

SEQ ID NO: 921382 - RNA, 21 nt, Human
uccccucacagcccccgcgaa

SEQ ID NO: 921383 - RNA, 24 nt, Human
ucucccacaggcggggcguccaga

SEQ ID NO: 921384 - RNA, 23 nt, Human
ugagcagcgcaggaccgggcagc

SEQ ID NO: 921385 - RNA, 22 nt, Human
ugaguuaaagguaacuauguac

SEQ ID NO: 921386 - RNA, 21 nt, Human
ugcccgggcugcccggcaagg

SEQ ID NO: 921387 - RNA, 23 nt, Human
ugcccgggcugcccggcaagggc

SEQ ID NO: 921388 - RNA, 21 nt, Human
ugccgaggcgcucgugugcca

SEQ ID NO: 921389 - RNA, 20 nt, Human
uguagagucagcuaaaggaa

SEQ ID NO: 921390 - RNA, 23 nt, Human
uguuugcugccagccucuacuug

SEQ ID NO: 921391 - RNA, 21 nt, Human
uuacuuucuuuucucuuagga

SEQ ID NO: 921392 - RNA, 19 nt, Human
uuccuuuagaaaacaggcc

SEQ ID NO: 921393 - RNA, 19 nt, Human
uugcuccccguccggaucc

SEQ ID NO: 921394 - RNA, 21 nt, Human
uugguucucccauacauuuua

SEQ ID NO: 921395 - RNA, 24 nt, Human
uuugguggaaggcuuggaguuuuu

SEQ ID NO: 921396 - RNA, 20 nt, Human
aaaaacagcucaggaggugg

SEQ ID NO: 921397 - RNA, 20 nt, Human
acccaggcgcccgggucgcc

SEQ ID NO: 921398 - RNA, 18 nt, Human
agugcagccggggcugcc

SEQ ID NO: 921399 - RNA, 23 nt, Human
cacacccaggcgcccgggucgcc

SEQ ID NO: 921400 - RNA, 24 nt, Human
cacacccaggcgcccgggucgccu

SEQ ID NO: 921401 - RNA, 19 nt, Human
cagcucaggaggugggugg

SEQ ID NO: 921402 - RNA, 19 nt, Human
ccccggcuccgggcgcggc

SEQ ID NO: 921403 - RNA, 27 nt, Human
cccgcgaagacgucccgcaacagcagc

SEQ ID NO: 921404 - RNA, 22 nt, Human
cggcuagagugcagccggggcu

SEQ ID NO: 921405 - RNA, 23 nt, Human
cuccugcgcgccucugcuuuccu

SEQ ID NO: 921406 - RNA, 19 nt, Human
cucggccaccuuccccucg

SEQ ID NO: 921407 - RNA, 22 nt, Human
cuggcugcggcgcgagccuccc

SEQ ID NO: 921408 - RNA, 21 nt, Human
gaagagagccagaucccgucg

SEQ ID NO: 921409 - RNA, 18 nt, Human
gagugcagccggggcugc

SEQ ID NO: 921410 - RNA, 22 nt, Human
gcaacagcagccacacacccag

SEQ ID NO: 921411 - RNA, 22 nt, Human
gcgcgcuguuguggcgcgcguc

SEQ ID NO: 921412 - RNA, 24 nt, Human
gcgcgcuguuguggcgcgcgucug

SEQ ID NO: 921413 - RNA, 21 nt, Human
gcggcuagagugcagccgggg

SEQ ID NO: 921414 - RNA, 18 nt, Human
gcuccuccugcgcgccuc

SEQ ID NO: 921415 - RNA, 19 nt, Human
gcugcggcgcgagccuccc

SEQ ID NO: 921416 - RNA, 19 nt, Human
ggagagcagcaagaacuug

SEQ ID NO: 921417 - RNA, 23 nt, Human
gucaacccuaaaucguucuaaag

SEQ ID NO: 921418 - RNA, 21 nt, Human
ucggccccggcuccgggcgcg

SEQ ID NO: 921419 - RNA, 27 nt, Human
ugccuccaacugcagaaggugguguuu

SEQ ID NO: 921420 - RNA, 20 nt, Human
ugcgcagcuuggggcgcgcu

SEQ ID NO: 921421 - RNA, 22 nt, Human
uuugcagagcugcgcagcuugg

SEQ ID NO: 921422 - RNA, 19 nt, Human
aaacaggugcccuauuuua

SEQ ID NO: 921423 - RNA, 18 nt, Human
aaaugcugagggcuaccc

SEQ ID NO: 921424 - RNA, 19 nt, Human
aaccccauaaaaagaaggg

SEQ ID NO: 921425 - RNA, 19 nt, Human
aagaaggggauauuugggg

SEQ ID NO: 921426 - RNA, 21 nt, Human
aagaaggggauauuuggggac

SEQ ID NO: 921427 - RNA, 28 nt, Human
agcuggacucacagcagcucccugccug

SEQ ID NO: 921428 - RNA, 23 nt, Human
auuacauuuuacaaaacagcaac

SEQ ID NO: 921429 - RNA, 21 nt, Human
cagcggaaccgcucacugcuc

SEQ ID NO: 921430 - RNA, 19 nt, Human
cagcuggacucacagcagc

SEQ ID NO: 921431 - RNA, 19 nt, Human
cagggcagggggcagcgga

SEQ ID NO: 921432 - RNA, 23 nt, Human
ccacauauacauuacauuuuaca

SEQ ID NO: 921433 - RNA, 18 nt, Human
ccccauaaaaagaagggg

SEQ ID NO: 921434 - RNA, 22 nt, Human
ccccuccaaaugcugagggcua

SEQ ID NO: 921435 - RNA, 18 nt, Human
cccucagugccuaaccag

SEQ ID NO: 921436 - RNA, 21 nt, Human
ccguccagaacccucagugcc

SEQ ID NO: 921437 - RNA, 21 nt, Human
cgacgggaacagguuccccuc

SEQ ID NO: 921438 - RNA, 21 nt, Human
cgggaacagguuccccuccaa

SEQ ID NO: 921439 - RNA, 20 nt, Human
cuggagggaccaccugggug

SEQ ID NO: 921440 - RNA, 21 nt, Human
gacccccgacgccggucccag

SEQ ID NO: 921441 - RNA, 18 nt, Human
gacucacagcagcucccu

SEQ ID NO: 921442 - RNA, 24 nt, Human
gaucucucggucccuuccuuaacc

SEQ ID NO: 921443 - RNA, 18 nt, Human
gcccaggguuccuggagc

SEQ ID NO: 921444 - RNA, 23 nt, Human
ggaaccgcucacugcucccauca

SEQ ID NO: 921445 - RNA, 25 nt, Human
uaaaaaccacauauacaaccuucag

SEQ ID NO: 921446 - RNA, 23 nt, Human
uaaccccauaaaaagaaggggau

SEQ ID NO: 921447 - RNA, 21 nt, Human
ugaucucucggucccuuccuu

SEQ ID NO: 921448 - RNA, 18 nt, Human
ugccuaaccaggcuggag

SEQ ID NO: 921449 - RNA, 20 nt, Human
ugcucccaucagcccagggu

SEQ ID NO: 921450 - RNA, 21 nt, Human
ugcugagggcuacccaggcau

SEQ ID NO: 921451 - RNA, 21 nt, Human
uuccccuccaaaugcugaggg

SEQ ID NO: 921452 - RNA, 20 nt, Human
uuuuuuuuugugaaacaggg

SEQ ID NO: 921453 - RNA, 22 nt, Human
uuuuuuuuuugugaaacaggug

SEQ ID NO: 921454 - RNA, 25 nt, Human
uuuuuuuuuuugugaaacaggugcc

SEQ ID NO: 921455 - RNA, 18 nt, Human
uuuuuuuuuuuuuuuuug

SEQ ID NO: 921456 - RNA, 19 nt, Human
uuuuuuuuuuuuuuuuugu

SEQ ID NO: 921457 - RNA, 21 nt, Human
caagauuaaagauuccacugg

SEQ ID NO: 921458 - RNA, 21 nt, Human
cauaggauuuauacauacaag

SEQ ID NO: 921459 - RNA, 21 nt, Human
cccacgccgcggccccggggc

SEQ ID NO: 921460 - RNA, 25 nt, Human
ccccacgccgcggccccggggcccc

SEQ ID NO: 921461 - RNA, 18 nt, Human
ccccggggcccgccgccc

SEQ ID NO: 921462 - RNA, 24 nt, Human
cccgcggccggacacuggcggagc

SEQ ID NO: 921463 - RNA, 21 nt, Human
cggcguccgccugcccgcccc

SEQ ID NO: 921464 - RNA, 25 nt, Human
gaaagacuaaaauuagguauaagaa

SEQ ID NO: 921465 - RNA, 18 nt, Human
gcccgccccacgccgcgg

SEQ ID NO: 921466 - RNA, 25 nt, Human
gguauaagaacaugauuugaaagga

SEQ ID NO: 921467 - RNA, 24 nt, Human
uacaagcauuacaguacauucauu

SEQ ID NO: 921468 - RNA, 20 nt, Human
uacauacaagcauuacagua

SEQ ID NO: 921469 - RNA, 20 nt, Human
uacauacaagcauuacagua

SEQ ID NO: 921470 - RNA, 19 nt, Human
ugaaagacuaaaauuaggu

SEQ ID NO: 921471 - RNA, 21 nt, Human
uguuggauucaaaugcugcau

SEQ ID NO: 921472 - RNA, 20 nt, Human
aauugaucaaugacaaccgc

SEQ ID NO: 921473 - RNA, 19 nt, Human
aggagaagggaggcucaca

SEQ ID NO: 921474 - RNA, 19 nt, Human
cacccagcacuccuggacc

SEQ ID NO: 921475 - RNA, 19 nt, Human
cacuccuggaccauuuccc

SEQ ID NO: 921476 - RNA, 19 nt, Human
cagugcugccuccuuugag

SEQ ID NO: 921477 - RNA, 23 nt, Human
cucacacccagcacuccuggacc

SEQ ID NO: 921478 - RNA, 22 nt, Human
gagaagggaggcucacacccag

SEQ ID NO: 921479 - RNA, 24 nt, Human
ggcagccggugaggacgcuacagc

SEQ ID NO: 921480 - RNA, 19 nt, Human
ggcucacacccagcacucc

SEQ ID NO: 921481 - RNA, 24 nt, Human
ggucagugcugccuccuuugagug

SEQ ID NO: 921482 - RNA, 21 nt, Human
uccggcuugaggagaagggag

SEQ ID NO: 921483 - RNA, 23 nt, Human
uuucacaaagguuuucacugcuc

SEQ ID NO: 921484 - RNA, 18 nt, Human
aaaccccagccacaucca

SEQ ID NO: 921485 - RNA, 18 nt, Human
aaagaagugaggcagagg

SEQ ID NO: 921486 - RNA, 22 nt, Human
aaagcagcugcuccagccaccu

SEQ ID NO: 921487 - RNA, 21 nt, Human
aaaugacccuuucuuggaagg

SEQ ID NO: 921488 - RNA, 22 nt, Human
aacaccucccugcaacacuucu

SEQ ID NO: 921489 - RNA, 19 nt, Human
aacccagaaggaggaagcc

SEQ ID NO: 921490 - RNA, 18 nt, Human
aagagaguggcugccuuc

SEQ ID NO: 921491 - RNA, 20 nt, Human
aagcagcugcuccagccacc

SEQ ID NO: 921492 - RNA, 23 nt, Human
aagcagcugcuccagccaccugu

SEQ ID NO: 921493 - RNA, 23 nt, Human
aaggaccaucccagccuguggcc

SEQ ID NO: 921494 - RNA, 18 nt, Human
aaucccuccaucuccacu

SEQ ID NO: 921495 - RNA, 24 nt, Human
aauggggccuucaguagcccuucc

SEQ ID NO: 921496 - RNA, 26 nt, Human
acacacccacacucacacccacccac

SEQ ID NO: 921497 - RNA, 20 nt, Human
accaaaucaggaccuguauc

SEQ ID NO: 921498 - RNA, 24 nt, Human
accaagacaacagccuuccaucac

SEQ ID NO: 921499 - RNA, 24 nt, Human
accaaucuuaggaaucuccaucau

SEQ ID NO: 921500 - RNA, 27 nt, Human
acccacacacacccauacacccauucc

SEQ ID NO: 921501 - RNA, 23 nt, Human
accccaagagaaugggggcagga

SEQ ID NO: 921502 - RNA, 22 nt, Human
accucagucuuccuccucccag

SEQ ID NO: 921503 - RNA, 26 nt, Human
accucagucuuccuccucccagccuc

SEQ ID NO: 921504 - RNA, 24 nt, Human
acguacacacccacacucacaccc

SEQ ID NO: 921505 - RNA, 19 nt, Human
acuuugaugaagcccucgg

SEQ ID NO: 921506 - RNA, 26 nt, Human
agaacucaaggugauccuccggccgg

SEQ ID NO: 921507 - RNA, 23 nt, Human
agaaucccaagcauggacaaccu

SEQ ID NO: 921508 - RNA, 22 nt, Human
agaggagccugugaaacccaga

SEQ ID NO: 921509 - RNA, 20 nt, Human
agccaccuguaggauggcac

SEQ ID NO: 921510 - RNA, 25 nt, Human
agcugcccuucucuccuucccccag

SEQ ID NO: 921511 - RNA, 20 nt, Human
agcugcuccagccaccugua

SEQ ID NO: 921512 - RNA, 21 nt, Human
agcugcuccagccaccuguag

SEQ ID NO: 921513 - RNA, 18 nt, Human
aggaaaccccagccacau

SEQ ID NO: 921514 - RNA, 22 nt, Human
aggaaggggaacgagcaagagg

SEQ ID NO: 921515 - RNA, 23 nt, Human
aggaaggggaacgagcaagaggg

SEQ ID NO: 921516 - RNA, 22 nt, Human
aggcuaccagaggccauuggcu

SEQ ID NO: 921517 - RNA, 20 nt, Human
agggaugcugggagcagagc

SEQ ID NO: 921518 - RNA, 19 nt, Human
aggugaucagguugcaaag

SEQ ID NO: 921519 - RNA, 18 nt, Human
aggugcucugaauggacc

SEQ ID NO: 921520 - RNA, 18 nt, Human
auagcccagcaggagcuc

SEQ ID NO: 921521 - RNA, 19 nt, Human
auccauuacccagggaugg

SEQ ID NO: 921522 - RNA, 21 nt, Human
caaagcagcugcuccagccac

SEQ ID NO: 921523 - RNA, 20 nt, Human
caagauccgcacaaccuccc

SEQ ID NO: 921524 - RNA, 26 nt, Human
caagauccgcacaaccucccuucccc

SEQ ID NO: 921525 - RNA, 18 nt, Human
caagggauacaccaagac

SEQ ID NO: 921526 - RNA, 22 nt, Human
cacacccacccacacacaccca

SEQ ID NO: 921527 - RNA, 21 nt, Human
caccaagacaacagccuucca

SEQ ID NO: 921528 - RNA, 20 nt, Human
cacccacacacacccauaca

SEQ ID NO: 921529 - RNA, 19 nt, Human
cacccacccacacacaccu

SEQ ID NO: 921530 - RNA, 25 nt, Human
cacucacacccacccacacacaccc

SEQ ID NO: 921531 - RNA, 25 nt, Human
cacugcacuggccccuauccaagaa

SEQ ID NO: 921532 - RNA, 25 nt, Human
cagaguucucuucuuaacaccuccc

SEQ ID NO: 921533 - RNA, 24 nt, Human
cagccagacguggauagacacccu

SEQ ID NO: 921534 - RNA, 19 nt, Human
cagcccaucaagagcaccc

SEQ ID NO: 921535 - RNA, 22 nt, Human
caggaccuguaucccucagcuu

SEQ ID NO: 921536 - RNA, 22 nt, Human
caggcaccuugguaggaugagg

SEQ ID NO: 921537 - RNA, 22 nt, Human
cagggcaaccggaaagucacgg

SEQ ID NO: 921538 - RNA, 19 nt, Human
cagguccugggcagcacug

SEQ ID NO: 921539 - RNA, 21 nt, Human
caggugccauugcuccuucug

SEQ ID NO: 921540 - RNA, 19 nt, Human
ccaaacuugacuuugggcu

SEQ ID NO: 921541 - RNA, 23 nt, Human
ccacaauaccaggaaaccccagc

SEQ ID NO: 921542 - RNA, 20 nt, Human
ccagaggccauuggcucucc

SEQ ID NO: 921543 - RNA, 19 nt, Human
ccagcccaucaagagcacc

SEQ ID NO: 921544 - RNA, 22 nt, Human
cccacacacacccauacaccca

SEQ ID NO: 921545 - RNA, 22 nt, Human
cccagccccucccugaccccaa

SEQ ID NO: 921546 - RNA, 27 nt, Human
ccccaccacaccagugaugggccucuc

SEQ ID NO: 921547 - RNA, 24 nt, Human
cccuccaucuccacucccagcaac

SEQ ID NO: 921548 - RNA, 20 nt, Human
cccucgguuccaucauccca

SEQ ID NO: 921549 - RNA, 21 nt, Human
ccuccacaauaccaggaaacc

SEQ ID NO: 921550 - RNA, 20 nt, Human
ccucccugcaacacuucuca

SEQ ID NO: 921551 - RNA, 26 nt, Human
ccugaccccaagagaaugggggcagg

SEQ ID NO: 921552 - RNA, 21 nt, Human
ccugcaagccuagucccugcu

SEQ ID NO: 921553 - RNA, 19 nt, Human
ccugcccaccaaaauagcc

SEQ ID NO: 921554 - RNA, 19 nt, Human
ccuggcccauuaucucacc

SEQ ID NO: 921555 - RNA, 21 nt, Human
ccuggcccauuaucucaccug

SEQ ID NO: 921556 - RNA, 19 nt, Human
cgcacaaccucccuucccc

SEQ ID NO: 921557 - RNA, 19 nt, Human
cuaaagaagugaggcagag

SEQ ID NO: 921558 - RNA, 23 nt, Human
cucaauaaucccuccaucuccac

SEQ ID NO: 921559 - RNA, 19 nt, Human
cucacacccacccacacac

SEQ ID NO: 921560 - RNA, 23 nt, Human
cucagagcucagggauccauuuc

SEQ ID NO: 921561 - RNA, 19 nt, Human
cucccagccucaccauccu

SEQ ID NO: 921562 - RNA, 20 nt, Human
cucuccucuaccgaaaagga

SEQ ID NO: 921563 - RNA, 19 nt, Human
cugcccuucucuccuuccc

SEQ ID NO: 921564 - RNA, 21 nt, Human
cugcccuucucuccuuccccc

SEQ ID NO: 921565 - RNA, 24 nt, Human
cugccuugcccaagccuaagggag

SEQ ID NO: 921566 - RNA, 20 nt, Human
cugguccugguggagguugc

SEQ ID NO: 921567 - RNA, 20 nt, Human
cuggugacucgccaaaaaaa

SEQ ID NO: 921568 - RNA, 22 nt, Human
cuuccaucacuguuugcacaga

SEQ ID NO: 921569 - RNA, 19 nt, Human
cuuggcucagagcucaggg

SEQ ID NO: 921570 - RNA, 20 nt, Human
gaagccagcccugggggcca

SEQ ID NO: 921571 - RNA, 22 nt, Human
gaauauauucugagauccaggg

SEQ ID NO: 921572 - RNA, 20 nt, Human
gacaagcaagagaguggcug

SEQ ID NO: 921573 - RNA, 24 nt, Human
gacccagcuauccuggcacagcug

SEQ ID NO: 921574 - RNA, 21 nt, Human
gagagcaagggcagguggcug

SEQ ID NO: 921575 - RNA, 21 nt, Human
gaggagagaaggggaagggau

SEQ ID NO: 921576 - RNA, 18 nt, Human
gaggguuaggugauuugg

SEQ ID NO: 921577 - RNA, 19 nt, Human
gauacaccaagacaacagc

SEQ ID NO: 921578 - RNA, 18 nt, Human
gauccgcacaaccucccu

SEQ ID NO: 921579 - RNA, 22 nt, Human
gcaaccugauggcagggaggcc

SEQ ID NO: 921580 - RNA, 21 nt, Human
gcaagaggggucagggccaga

SEQ ID NO: 921581 - RNA, 19 nt, Human
gcauggacaaccugggugc

SEQ ID NO: 921582 - RNA, 22 nt, Human
gcccaagccuaagggagagccc

SEQ ID NO: 921583 - RNA, 20 nt, Human
gcccuucccagccccucccu

SEQ ID NO: 921584 - RNA, 21 nt, Human
gcuuuaagcccuggcacugcc

SEQ ID NO: 921585 - RNA, 20 nt, Human
gcuuuuccuuuccucucacu

SEQ ID NO: 921586 - RNA, 20 nt, Human
ggacaagcaagagaguggcu

SEQ ID NO: 921587 - RNA, 20 nt, Human
ggacagggccgucagagagg

SEQ ID NO: 921588 - RNA, 19 nt, Human
ggagaguggugaugcuggg

SEQ ID NO: 921589 - RNA, 19 nt, Human
ggaggaagccagcccuggg

SEQ ID NO: 921590 - RNA, 18 nt, Human
ggagggcucgggucacug

SEQ ID NO: 921591 - RNA, 20 nt, Human
ggcagguggcugccuugccc

SEQ ID NO: 921592 - RNA, 23 nt, Human
gggcuuuaagcccuggcacugcc

SEQ ID NO: 921593 - RNA, 20 nt, Human
ggggaaagcaaugaaaaugg

SEQ ID NO: 921594 - RNA, 20 nt, Human
gguccugguggagguugcag

SEQ ID NO: 921595 - RNA, 20 nt, Human
guacguacacacccacacuc

SEQ ID NO: 921596 - RNA, 18 nt, Human
gugaggcagaggaggaga

SEQ ID NO: 921597 - RNA, 24 nt, Human
gugaggcagaggaggagagaaggg

SEQ ID NO: 921598 - RNA, 20 nt, Human
gugaugcuggggaugccaaa

SEQ ID NO: 921599 - RNA, 23 nt, Human
guggagggcucgggucacuggug

SEQ ID NO: 921600 - RNA, 22 nt, Human
gugguggggacgcgcuggccag

SEQ ID NO: 921601 - RNA, 21 nt, Human
guucucuucuuaacaccuccc

SEQ ID NO: 921602 - RNA, 20 nt, Human
guugcagugcagaccaggcu

SEQ ID NO: 921603 - RNA, 21 nt, Human
guugcagugcagaccaggcug

SEQ ID NO: 921604 - RNA, 20 nt, Human
uaagcccuggcacugcccag

SEQ ID NO: 921605 - RNA, 21 nt, Human
uaagggagagcccaccccacc

SEQ ID NO: 921606 - RNA, 25 nt, Human
uacacacccacacucacacccaccc

SEQ ID NO: 921607 - RNA, 25 nt, Human
uacagccagcccaucaagagcaccc

SEQ ID NO: 921608 - RNA, 22 nt, Human
uaccaggaaaccccagccacau

SEQ ID NO: 921609 - RNA, 24 nt, Human
uaccaggaaaccccagccacaucc

SEQ ID NO: 921610 - RNA, 24 nt, Human
uacgacauggccaacaguggcagg

SEQ ID NO: 921611 - RNA, 22 nt, Human
uagcccagcaggagcuccaccc

SEQ ID NO: 921612 - RNA, 19 nt, Human
uagcccuucccagccccuc

SEQ ID NO: 921613 - RNA, 22 nt, Human
uauccaagaaacacaugccaga

SEQ ID NO: 921614 - RNA, 22 nt, Human
ucaauaaucccuccaucuccac

SEQ ID NO: 921615 - RNA, 21 nt, Human
ucagaacucaaggugaucagg

SEQ ID NO: 921616 - RNA, 18 nt, Human
ucagagagguggggaugg

SEQ ID NO: 921617 - RNA, 19 nt, Human
ucagagagguggggaugga

SEQ ID NO: 921618 - RNA, 18 nt, Human
ucagcuuggguucccauc

SEQ ID NO: 921619 - RNA, 24 nt, Human
ucaguagcccuucccagccccucc

SEQ ID NO: 921620 - RNA, 19 nt, Human
ucauuuuuauaggguuggg

SEQ ID NO: 921621 - RNA, 18 nt, Human
uccaacucauuuucugcu

SEQ ID NO: 921622 - RNA, 21 nt, Human
uccaucaucccacccugaaca

SEQ ID NO: 921623 - RNA, 19 nt, Human
uccaucaucuuaccaucca

SEQ ID NO: 921624 - RNA, 26 nt, Human
uccauuacccagggaugggagcuguu

SEQ ID NO: 921625 - RNA, 24 nt, Human
ucccagcaaccugauggcagggag

SEQ ID NO: 921626 - RNA, 18 nt, Human
ucccccagaaucccaagc

SEQ ID NO: 921627 - RNA, 20 nt, Human
ucccucagcuuggguuccca

SEQ ID NO: 921628 - RNA, 26 nt, Human
ucccugaccccaagagaaugggggcc

SEQ ID NO: 921629 - RNA, 18 nt, Human
ucccugcccaccaaaaua

SEQ ID NO: 921630 - RNA, 21 nt, Human
uccucccagccucaccauccu

SEQ ID NO: 921631 - RNA, 21 nt, Human
ucgggguaauggggugccgag

SEQ ID NO: 921632 - RNA, 22 nt, Human
ucugaaaugacccuuucuugga

SEQ ID NO: 921633 - RNA, 21 nt, Human
ucugagauccagggcaaccgg

SEQ ID NO: 921634 - RNA, 20 nt, Human
ucugcucaauaaucccucca

SEQ ID NO: 921635 - RNA, 23 nt, Human
ucuuaccauccauuacccaggga

SEQ ID NO: 921636 - RNA, 18 nt, Human
ugaaaaugguggcagcug

SEQ ID NO: 921637 - RNA, 24 nt, Human
ugaaacccagaaggaggaagccag

SEQ ID NO: 921638 - RNA, 22 nt, Human
ugaauggacccagcuauccugg

SEQ ID NO: 921639 - RNA, 19 nt, Human
ugagcuuagguguggagcg

SEQ ID NO: 921640 - RNA, 23 nt, Human
ugaggcagaggaggagagaaggg

SEQ ID NO: 921641 - RNA, 25 nt, Human
ugauuuggggacaagcaagagagug

SEQ ID NO: 921642 - RNA, 21 nt, Human
ugccagaugcuuuuccuuucc

SEQ ID NO: 921643 - RNA, 20 nt, Human
ugccagggccuggaaucucu

SEQ ID NO: 921644 - RNA, 23 nt, Human
ugcccuagagucaagauccgcac

SEQ ID NO: 921645 - RNA, 20 nt, Human
ugcucagaacucaaggugau

SEQ ID NO: 921646 - RNA, 18 nt, Human
uggacugggugcccuggc

SEQ ID NO: 921647 - RNA, 24 nt, Human
uggguucccaucaugcugcugggg

SEQ ID NO: 921648 - RNA, 18 nt, Human
ugguguggagggcucggg

SEQ ID NO: 921649 - RNA, 18 nt, Human
ugguguggagggcucggg

SEQ ID NO: 921650 - RNA, 23 nt, Human
ugugaaacccagaaggaggaagc

SEQ ID NO: 921651 - RNA, 22 nt, Human
uguggagcggccgcugaguggu

SEQ ID NO: 921652 - RNA, 26 nt, Human
uguggagcggccgcugaguggugggg

SEQ ID NO: 921653 - RNA, 22 nt, Human
uucccagccccucccugacccc

SEQ ID NO: 921654 - RNA, 20 nt, Human
uuccuaccaaaucaggaccu

SEQ ID NO: 921655 - RNA, 22 nt, Human
uucucuccuucccccagaaucc

SEQ ID NO: 921656 - RNA, 21 nt, Human
uucugcucaauaaucccucca

SEQ ID NO: 921657 - RNA, 20 nt, Human
uugguacguacacacccaca

SEQ ID NO: 921658 - RNA, 22 nt, Human
uugguacguacacacccacacu

SEQ ID NO: 921659 - RNA, 20 nt, Human
uuucuuggaaggaccauccc

SEQ ID NO: 921660 - RNA, 22 nt, Human
aacaaaaucauucacauccugg

SEQ ID NO: 921661 - RNA, 18 nt, Human
aauguccuacuuaggugg

SEQ ID NO: 921662 - RNA, 20 nt, Human
auaagacaauaagaggcaag

SEQ ID NO: 921663 - RNA, 25 nt, Human
aucguccuuaggucacaaaauaaaa

SEQ ID NO: 921664 - RNA, 20 nt, Human
caaaaucauucacauccugg

SEQ ID NO: 921665 - RNA, 21 nt, Human
caaguagaaaaaagacuaagc

SEQ ID NO: 921666 - RNA, 23 nt, Human
caccuccucucggaguucaaagc

SEQ ID NO: 921667 - RNA, 23 nt, Human
cacucugguaaaauacucaucuu

SEQ ID NO: 921668 - RNA, 24 nt, Human
cagcagaaguuagaacaacaaacc

SEQ ID NO: 921669 - RNA, 21 nt, Human
ccccagcacuccggcccggcc

SEQ ID NO: 921670 - RNA, 22 nt, Human
ccccagcacuccggcccggccg

SEQ ID NO: 921671 - RNA, 21 nt, Human
cuuagguggcuacagugaaca

SEQ ID NO: 921672 - RNA, 21 nt, Human
gacagcagaaguuagaacaac

SEQ ID NO: 921673 - RNA, 18 nt, Human
gccccagcacuccggccc

SEQ ID NO: 921674 - RNA, 19 nt, Human
ggcccggccgccagcucga

SEQ ID NO: 921675 - RNA, 18 nt, Human
guacuguauauauacaua

SEQ ID NO: 921676 - RNA, 21 nt, Human
guagaaaaaagacuaagcacu

SEQ ID NO: 921677 - RNA, 21 nt, Human
gugaucuuuucaccaucgucc

SEQ ID NO: 921678 - RNA, 22 nt, Human
uaaaaagcagguuuaaagcuga

SEQ ID NO: 921679 - RNA, 19 nt, Human
uaagaggcaaguggaggug

SEQ ID NO: 921680 - RNA, 20 nt, Human
uagaaaaaagacuaagcacu

SEQ ID NO: 921681 - RNA, 22 nt, Human
uagaaaaaagacuaagcacucc

SEQ ID NO: 921682 - RNA, 27 nt, Human
uagaagaaaaacaauuauacucucauu

SEQ ID NO: 921683 - RNA, 18 nt, Human
uaggucacaaaauaaaag

SEQ ID NO: 921684 - RNA, 19 nt, Human
uauguacuguauauauaca

SEQ ID NO: 921685 - RNA, 19 nt, Human
ucaacaauuuugugguguc

SEQ ID NO: 921686 - RNA, 20 nt, Human
ucacauccugguuacuguuc

SEQ ID NO: 921687 - RNA, 24 nt, Human
ucaccagugucuuauuuuuugugg

SEQ ID NO: 921688 - RNA, 21 nt, Human
uccacauauugauucugaaau

SEQ ID NO: 921689 - RNA, 24 nt, Human
uccauaccgcggauaugaauggaa

SEQ ID NO: 921690 - RNA, 23 nt, Human
ucgacagcagaaguuagaacaac

SEQ ID NO: 921691 - RNA, 22 nt, Human
ucggaguucaaagccccagcac

SEQ ID NO: 921692 - RNA, 24 nt, Human
ucuauguacuguauauauacauua

SEQ ID NO: 921693 - RNA, 18 nt, Human
ugaaugcuuaaagaaguu

SEQ ID NO: 921694 - RNA, 21 nt, Human
ugaucaacauuguuaaaaguc

SEQ ID NO: 921695 - RNA, 22 nt, Human
ugauguaacaaaaucauucaca

SEQ ID NO: 921696 - RNA, 25 nt, Human
ugccuguuguauauacugugagugu

SEQ ID NO: 921697 - RNA, 23 nt, Human
uggaaaagcaaguagaaaaaaga

SEQ ID NO: 921698 - RNA, 21 nt, Human
uggagguguggcuggcauuua

SEQ ID NO: 921699 - RNA, 23 nt, Human
ugggggguggagagccgccggca

SEQ ID NO: 921700 - RNA, 27 nt, Human
uguaacaaaaucauucacauccugguu

SEQ ID NO: 921701 - RNA, 25 nt, Human
ugucuuauuuuuuguggcaacuuca

SEQ ID NO: 921702 - RNA, 24 nt, Human
ugugaguguuuggaaaagcaagua

SEQ ID NO: 921703 - RNA, 26 nt, Human
uguggcaacuucagaaucggcacauu

SEQ ID NO: 921704 - RNA, 23 nt, Human
uguggcuggcauuuagugggcac

SEQ ID NO: 921705 - RNA, 23 nt, Human
uuaaaaagcagguuuaaagcuga

SEQ ID NO: 921706 - RNA, 19 nt, Human
uucaaagccccagcacucc

SEQ ID NO: 921707 - RNA, 23 nt, Human
uucuauguacuguauauauacau

SEQ ID NO: 921708 - RNA, 21 nt, Human
uugauucugaaaucauauaau

SEQ ID NO: 921709 - RNA, 20 nt, Human
uuuacauuaaauagaagaaa

SEQ ID NO: 921710 - RNA, 22 nt, Human
aaagagacuggcccagggguac

SEQ ID NO: 921711 - RNA, 23 nt, Human
aagaaagaagagaccaccucuga

SEQ ID NO: 921712 - RNA, 19 nt, Human
aaguucauguguuuccacu

SEQ ID NO: 921713 - RNA, 22 nt, Human
acugaaguguagggggugccug

SEQ ID NO: 921714 - RNA, 21 nt, Human
agccaagacugugguccacga

SEQ ID NO: 921715 - RNA, 25 nt, Human
augcagcuccagauccuggccaccc

SEQ ID NO: 921716 - RNA, 25 nt, Human
cacacaguguuacugugagcucuca

SEQ ID NO: 921717 - RNA, 22 nt, Human
caccuuuggcaaugguccccaa

SEQ ID NO: 921718 - RNA, 20 nt, Human
ccacuggugcugaagaugaa

SEQ ID NO: 921719 - RNA, 21 nt, Human
cugaaguaaggcacaacacaa

SEQ ID NO: 921720 - RNA, 24 nt, Human
cugaaguaaggcacaacacaauuc

SEQ ID NO: 921721 - RNA, 18 nt, Human
cuggugcugaagaugaac

SEQ ID NO: 921722 - RNA, 21 nt, Human
cuggugcugaagaugaacauc

SEQ ID NO: 921723 - RNA, 26 nt, Human
cuguggcagaagucccuguugcucau

SEQ ID NO: 921724 - RNA, 25 nt, Human
ggggugccugagagcugagccucgu

SEQ ID NO: 921725 - RNA, 24 nt, Human
gucccuguugcucaucccuuugau

SEQ ID NO: 921726 - RNA, 23 nt, Human
uaagugucuuuccuccugagucc

SEQ ID NO: 921727 - RNA, 23 nt, Human
uagagaugcagcuccagauccug

SEQ ID NO: 921728 - RNA, 18 nt, Human
uagggggugccugagagc

SEQ ID NO: 921729 - RNA, 27 nt, Human
ucacuguggcagaagucccuguugcuc

SEQ ID NO: 921730 - RNA, 20 nt, Human
uccauugucacuguggcaga

SEQ ID NO: 921731 - RNA, 27 nt, Human
ugaaguaaggcacaacacaauuccauu

SEQ ID NO: 921732 - RNA, 22 nt, Human
ugcacacgugcgggggugaggu

SEQ ID NO: 921733 - RNA, 18 nt, Human
ugcacagagggcagguga

SEQ ID NO: 921734 - RNA, 22 nt, Human
ugccuggccuccuccucuucuu

SEQ ID NO: 921735 - RNA, 21 nt, Human
ugcgagucaugcacacgugcg

SEQ ID NO: 921736 - RNA, 22 nt, Human
uggccccuuagagaugcagcuc

SEQ ID NO: 921737 - RNA, 21 nt, Human
uggugcugaagaugaacauca

SEQ ID NO: 921738 - RNA, 24 nt, Human
uuacaagaaagaagagaccaccuu

SEQ ID NO: 921739 - RNA, 23 nt, Human
uuuccgcauaaauauugcuuuua

SEQ ID NO: 921740 - RNA, 26 nt, Human
aacucuuuguccuucccaguggguuu

SEQ ID NO: 921741 - RNA, 24 nt, Human
aagcaaacggucuacgucaccaag

SEQ ID NO: 921742 - RNA, 26 nt, Human
aagcaaacggucuacgucaccaagac

SEQ ID NO: 921743 - RNA, 21 nt, Human
aagcaagaaugaacgguucua

SEQ ID NO: 921744 - RNA, 23 nt, Human
acccugccacccaugcuguaugg

SEQ ID NO: 921745 - RNA, 23 nt, Human
accguguggaccugccacagagg

SEQ ID NO: 921746 - RNA, 18 nt, Human
agcuggggaggcccuuau

SEQ ID NO: 921747 - RNA, 18 nt, Human
aggcuuggccuaugagag

SEQ ID NO: 921748 - RNA, 18 nt, Human
aucaauacaaucacccca

SEQ ID NO: 921749 - RNA, 27 nt, Human
caagaaugaacgguucuauacucucga

SEQ ID NO: 921750 - RNA, 19 nt, Human
caccuagcccagauccagc

SEQ ID NO: 921751 - RNA, 20 nt, Human
cagcaguucccuagcccggu

SEQ ID NO: 921752 - RNA, 18 nt, Human
cagcugggcucuggggcc

SEQ ID NO: 921753 - RNA, 21 nt, Human
cagggcacaggagcugcucag

SEQ ID NO: 921754 - RNA, 26 nt, Human
caggggucaccuagcccagauccagc

SEQ ID NO: 921755 - RNA, 24 nt, Human
cauccugaacuuccagcaguuccc

SEQ ID NO: 921756 - RNA, 20 nt, Human
cccacucagaggucugaggc

SEQ ID NO: 921757 - RNA, 20 nt, Human
ccccaggggucaccuagccc

SEQ ID NO: 921758 - RNA, 23 nt, Human
cccccagggcacaggagcugcuc

SEQ ID NO: 921759 - RNA, 19 nt, Human
ccggcgcagcgaggagcag

SEQ ID NO: 921760 - RNA, 19 nt, Human
ccugccauggagacggggg

SEQ ID NO: 921761 - RNA, 20 nt, Human
cgaagaaagaaacccgggac

SEQ ID NO: 921762 - RNA, 24 nt, Human
cggcaaacucuuuguccuucccag

SEQ ID NO: 921763 - RNA, 19 nt, Human
cggcgcagcgaggagcaga

SEQ ID NO: 921764 - RNA, 18 nt, Human
cuagcccagauccagccu

SEQ ID NO: 921765 - RNA, 19 nt, Human
cucaggguuggcuuccuuc

SEQ ID NO: 921766 - RNA, 18 nt, Human
cugccaggaggacacaga

SEQ ID NO: 921767 - RNA, 19 nt, Human
cugggacgcuggcacagag

SEQ ID NO: 921768 - RNA, 21 nt, Human
cuuggccuaugagaggagggg

SEQ ID NO: 921769 - RNA, 19 nt, Human
gagcacggggguguugggg

SEQ ID NO: 921770 - RNA, 21 nt, Human
gaggcuguguggcuuccucag

SEQ ID NO: 921771 - RNA, 18 nt, Human
gcccccgagaguggcugg

SEQ ID NO: 921772 - RNA, 19 nt, Human
gccugcuucggguguggag

SEQ ID NO: 921773 - RNA, 19 nt, Human
gcucaggguuggcuuccuu

SEQ ID NO: 921774 - RNA, 20 nt, Human
ggaaugggacacaaagcaag

SEQ ID NO: 921775 - RNA, 19 nt, Human
ggaggcccuuauacugggg

SEQ ID NO: 921776 - RNA, 20 nt, Human
ggcaaacucuuuguccuucc

SEQ ID NO: 921777 - RNA, 23 nt, Human
ggcacaggagcugcucaggaacg

SEQ ID NO: 921778 - RNA, 22 nt, Human
ggcgcagcgaggagcagaaacg

SEQ ID NO: 921779 - RNA, 19 nt, Human
ggcuggugcagagcacggg

SEQ ID NO: 921780 - RNA, 21 nt, Human
gggaagcagcuucuuacucag

SEQ ID NO: 921781 - RNA, 21 nt, Human
gguuuugaucaauacaaucac

SEQ ID NO: 921782 - RNA, 25 nt, Human
ucaaaaauggucuacgucaccaaga

SEQ ID NO: 921783 - RNA, 19 nt, Human
ucaccuagcccagauccag

SEQ ID NO: 921784 - RNA, 23 nt, Human
uccaagcccugcccacccacacc

SEQ ID NO: 921785 - RNA, 25 nt, Human
ucccucggauccccgaaaggcggca

SEQ ID NO: 921786 - RNA, 23 nt, Human
uccgcggcuggaguuaaagaagc

SEQ ID NO: 921787 - RNA, 18 nt, Human
uccguggugcugcugggc

SEQ ID NO: 921788 - RNA, 20 nt, Human
uccguggugcugcugggcgg

SEQ ID NO: 921789 - RNA, 21 nt, Human
uccucagcugggcucuggggc

SEQ ID NO: 921790 - RNA, 21 nt, Human
ucucccggggcaggccucggc

SEQ ID NO: 921791 - RNA, 20 nt, Human
ucugugacugcccccagggc

SEQ ID NO: 921792 - RNA, 20 nt, Human
ugacugcccccagggcacag

SEQ ID NO: 921793 - RNA, 20 nt, Human
ugaguccucguucagcaaac

SEQ ID NO: 921794 - RNA, 22 nt, Human
ugaucaauacaaucaccccacg

SEQ ID NO: 921795 - RNA, 20 nt, Human
ugccaggaggacacagaugg

SEQ ID NO: 921796 - RNA, 22 nt, Human
ugccaggaggacacagauggac

SEQ ID NO: 921797 - RNA, 23 nt, Human
ugcccacccacaccguguggacc

SEQ ID NO: 921798 - RNA, 21 nt, Human
ugcucaggaacggauucugac

SEQ ID NO: 921799 - RNA, 21 nt, Human
uggaggcuguguggcuuccuc

SEQ ID NO: 921800 - RNA, 21 nt, Human
ugggcucuggggcccacucag

SEQ ID NO: 921801 - RNA, 21 nt, Human
ugguggggaucccuggccuag

SEQ ID NO: 921802 - RNA, 18 nt, Human
uguguuugaggggcugcc

SEQ ID NO: 921803 - RNA, 22 nt, Human
uucaaaaauggucuacgucacc

SEQ ID NO: 921804 - RNA, 19 nt, Human
uuccucagcugggcucugg

SEQ ID NO: 921805 - RNA, 18 nt, Human
uuugaucaauacaaucac

SEQ ID NO: 921806 - RNA, 21 nt, Human
uuuuuuuuuuuuuuuuuuaag

SEQ ID NO: 921807 - RNA, 21 nt, Human
agcccggacagcugaggccgg

SEQ ID NO: 921808 - RNA, 19 nt, Human
agccggcgccgccacgcgc

SEQ ID NO: 921809 - RNA, 20 nt, Human
aguccaugggccuguggaau

SEQ ID NO: 921810 - RNA, 21 nt, Human
cagcucaaagcccuguggcgg

SEQ ID NO: 921811 - RNA, 20 nt, Human
cagugcagcucaaagcccug

SEQ ID NO: 921812 - RNA, 18 nt, Human
caugggccuguggaaugu

SEQ ID NO: 921813 - RNA, 19 nt, Human
ccuguggcggacuacaggg

SEQ ID NO: 921814 - RNA, 22 nt, Human
cucaaagaaagaugucccugug

SEQ ID NO: 921815 - RNA, 21 nt, Human
ggccgcgguggcuagggagcc

SEQ ID NO: 921816 - RNA, 18 nt, Human
ggcggcgggcgccguccu

SEQ ID NO: 921817 - RNA, 23 nt, Human
ggcuagggagccggcgccgccac

SEQ ID NO: 921818 - RNA, 22 nt, Human
gggacugggguugcucgcgggc

SEQ ID NO: 921819 - RNA, 28 nt, Human
uccaugggccuguggaaugugaggggag

SEQ ID NO: 921820 - RNA, 20 nt, Human
uuauuaaaaaaaaaaaaaaa

SEQ ID NO: 921821 - RNA, 23 nt, Human
aaagaaaacacguaagagccaca

SEQ ID NO: 921822 - RNA, 22 nt, Human
aagagcggagggggaagcagag

SEQ ID NO: 921823 - RNA, 23 nt, Human
aagagcggagggggaagcagaga

SEQ ID NO: 921824 - RNA, 24 nt, Human
acaggcacccucggugcugccucc

SEQ ID NO: 921825 - RNA, 20 nt, Human
agaaaacacguaagagccac

SEQ ID NO: 921826 - RNA, 22 nt, Human
agcaaaugcugagaaaagccag

SEQ ID NO: 921827 - RNA, 20 nt, Human
agcggagggggaagcagaga

SEQ ID NO: 921828 - RNA, 23 nt, Human
agggcacauaucccaaaugcugc

SEQ ID NO: 921829 - RNA, 26 nt, Human
cagcagcaaaugcugagaaaagccag

SEQ ID NO: 921830 - RNA, 22 nt, Human
caguggcuuuuuugcacagccu

SEQ ID NO: 921831 - RNA, 24 nt, Human
caguggcuuuuuugcacagccugc

SEQ ID NO: 921832 - RNA, 20 nt, Human
ccucugaggcuggcaguucc

SEQ ID NO: 921833 - RNA, 21 nt, Human
cuccugggcccacagcugugc

SEQ ID NO: 921834 - RNA, 24 nt, Human
cuccugggcccacagcugugccug

SEQ ID NO: 921835 - RNA, 21 nt, Human
cugaggcuggcaguuccuucc

SEQ ID NO: 921836 - RNA, 18 nt, Human
cugugccugcagaggagc

SEQ ID NO: 921837 - RNA, 19 nt, Human
gagcaccugagcuggcucc

SEQ ID NO: 921838 - RNA, 21 nt, Human
gcaaaugcugagaaaagccag

SEQ ID NO: 921839 - RNA, 22 nt, Human
gccugcagaggagcugcuccaa

SEQ ID NO: 921840 - RNA, 22 nt, Human
gcuugcuucaaacaggcacccu

SEQ ID NO: 921841 - RNA, 21 nt, Human
ggaggggagcaccugagcugg

SEQ ID NO: 921842 - RNA, 19 nt, Human
gggaagcagagagagugcc

SEQ ID NO: 921843 - RNA, 24 nt, Human
gguggaggggagcaccugagcugg

SEQ ID NO: 921844 - RNA, 19 nt, Human
guagucccaggagaggccc

SEQ ID NO: 921845 - RNA, 24 nt, Human
gugcugccuccucugaggcuggca

SEQ ID NO: 921846 - RNA, 24 nt, Human
uaugcagggucaagagcggagggg

SEQ ID NO: 921847 - RNA, 23 nt, Human
ucccaaaugcugcuugcuucaaa

SEQ ID NO: 921848 - RNA, 20 nt, Human
ugccugggaauaguccaggc

SEQ ID NO: 921849 - RNA, 20 nt, Human
uggaggggagcaccugagcu

SEQ ID NO: 921850 - RNA, 20 nt, Human
uggcuccugggcccacagcu

SEQ ID NO: 921851 - RNA, 22 nt, Human
ugugccugcagaggagcugcuc

SEQ ID NO: 921852 - RNA, 18 nt, Human
aaacagaccgagaagccc

SEQ ID NO: 921853 - RNA, 20 nt, Human
aacagagcaagacccugucu

SEQ ID NO: 921854 - RNA, 23 nt, Human
aacggcugacaacucagaccaug

SEQ ID NO: 921855 - RNA, 24 nt, Human
aagaaaaccagacauauacagcug

SEQ ID NO: 921856 - RNA, 18 nt, Human
aagaugacagaaguaggg

SEQ ID NO: 921857 - RNA, 24 nt, Human
acagagcaagacccugucuuaaag

SEQ ID NO: 921858 - RNA, 20 nt, Human
acagguuaagggaugggaag

SEQ ID NO: 921859 - RNA, 24 nt, Human
acugcacuggagccuggguaacag

SEQ ID NO: 921860 - RNA, 22 nt, Human
agagacgccaggcaggcuugag

SEQ ID NO: 921861 - RNA, 22 nt, Human
agccuggguguagggcaggccu

SEQ ID NO: 921862 - RNA, 24 nt, Human
agcggcggcggcgacuagcgagca

SEQ ID NO: 921863 - RNA, 21 nt, Human
agcuggauguaguggugcacg

SEQ ID NO: 921864 - RNA, 21 nt, Human
agcuggauguaguggugcacg

SEQ ID NO: 921865 - RNA, 24 nt, Human
agcuggauguaguggugcacggcu

SEQ ID NO: 921866 - RNA, 28 nt, Human
aggaaaccacaaucuggagacacagucc

SEQ ID NO: 921867 - RNA, 23 nt, Human
aggcaggaggauugcuugagccc

SEQ ID NO: 921868 - RNA, 24 nt, Human
aggcaggaggauugcuugagccca

SEQ ID NO: 921869 - RNA, 18 nt, Human
aggcagggcacggcagga

SEQ ID NO: 921870 - RNA, 21 nt, Human
aggcugaggcaggaggauugc

SEQ ID NO: 921871 - RNA, 24 nt, Human
aggcugaggcaggaggauugcuug

SEQ ID NO: 921872 - RNA, 20 nt, Human
agguccuggaaacagggcca

SEQ ID NO: 921873 - RNA, 24 nt, Human
aggucgaggcugcagugagccaug

SEQ ID NO: 921874 - RNA, 24 nt, Human
aucacaccacugcacuggagccug

SEQ ID NO: 921875 - RNA, 21 nt, Human
augggcccccagcccugcaac

SEQ ID NO: 921876 - RNA, 19 nt, Human
auugcuugagcccaggagg

SEQ ID NO: 921877 - RNA, 22 nt, Human
auuggcuggcagcagagggcag

SEQ ID NO: 921878 - RNA, 18 nt, Human
caccaagguccacagcgg

SEQ ID NO: 921879 - RNA, 20 nt, Human
cacugcacuggagccugggu

SEQ ID NO: 921880 - RNA, 23 nt, Human
cacugcacuggagccuggguaac

SEQ ID NO: 921881 - RNA, 24 nt, Human
cacugcacuggagccuggguaaca

SEQ ID NO: 921882 - RNA, 20 nt, Human
cagccagagcaggugagcag

SEQ ID NO: 921883 - RNA, 18 nt, Human
cagcuggauguaguggug

SEQ ID NO: 921884 - RNA, 23 nt, Human
caggagacacuggccucaaccca

SEQ ID NO: 921885 - RNA, 24 nt, Human
cagggcccugagagcucaggcagg

SEQ ID NO: 921886 - RNA, 24 nt, Human
ccacugcacuggagccuggguaac

SEQ ID NO: 921887 - RNA, 19 nt, Human
ccagcccugcaaccccacc

SEQ ID NO: 921888 - RNA, 20 nt, Human
cccagcccugcaaccccacc

SEQ ID NO: 921889 - RNA, 24 nt, Human
cccagcccugcaaccccaccaagg

SEQ ID NO: 921890 - RNA, 25 nt, Human
ccccucaagauucucacaggggcug

SEQ ID NO: 921891 - RNA, 18 nt, Human
cccugagagcucaggcag

SEQ ID NO: 921892 - RNA, 18 nt, Human
ccucaagauucucacagg

SEQ ID NO: 921893 - RNA, 25 nt, Human
cggcuguagucccagcuacuugcga

SEQ ID NO: 921894 - RNA, 22 nt, Human
cucaacccaguguggguccccu

SEQ ID NO: 921895 - RNA, 21 nt, Human
cucagaccauggagccgcagc

SEQ ID NO: 921896 - RNA, 19 nt, Human
cucuggcugggccaggucc

SEQ ID NO: 921897 - RNA, 22 nt, Human
cuggccgggccugagagcagca

SEQ ID NO: 921898 - RNA, 20 nt, Human
cuggcugggccagguccugg

SEQ ID NO: 921899 - RNA, 23 nt, Human
cugggccagguccuggaaacagg

SEQ ID NO: 921900 - RNA, 19 nt, Human
cuguagucccagcuacuug

SEQ ID NO: 921901 - RNA, 18 nt, Human
cuucagaagccccugaag

SEQ ID NO: 921902 - RNA, 23 nt, Human
gaaaaccagacauauacagcugg

SEQ ID NO: 921903 - RNA, 19 nt, Human
gacccugucuuaaagagga

SEQ ID NO: 921904 - RNA, 19 nt, Human
gagaugaagcccagguggu

SEQ ID NO: 921905 - RNA, 18 nt, Human
gagccgcagccgaguucg

SEQ ID NO: 921906 - RNA, 18 nt, Human
gaggagaggccugaggca

SEQ ID NO: 921907 - RNA, 22 nt, Human
gaugacagaaguagggguaaga

SEQ ID NO: 921908 - RNA, 20 nt, Human
gcagcagagggcaggcuaga

SEQ ID NO: 921909 - RNA, 19 nt, Human
gcaggagggcggggagagg

SEQ ID NO: 921910 - RNA, 20 nt, Human
gccaaggcccuuggcaacag

SEQ ID NO: 921911 - RNA, 19 nt, Human
gccaugaucacaccacugc

SEQ ID NO: 921912 - RNA, 23 nt, Human
gccaugaucacaccacugcacuu

SEQ ID NO: 921913 - RNA, 24 nt, Human
gcccaggaggucgaggcugcagug

SEQ ID NO: 921914 - RNA, 21 nt, Human
gccugccuacuagaggagagg

SEQ ID NO: 921915 - RNA, 24 nt, Human
gcggcggcggcgacuagcgagcac

SEQ ID NO: 921916 - RNA, 22 nt, Human
ggagauguggacaugggccccc

SEQ ID NO: 921917 - RNA, 23 nt, Human
ggagggcggggagagggacaucc

SEQ ID NO: 921918 - RNA, 24 nt, Human
ggcaacagguuaagggaugggaag

SEQ ID NO: 921919 - RNA, 24 nt, Human
ggccugaggcaccagccugggugu

SEQ ID NO: 921920 - RNA, 21 nt, Human
gggaaggcugugggcucccag

SEQ ID NO: 921921 - RNA, 18 nt, Human
gggaugggaaggcugugg

SEQ ID NO: 921922 - RNA, 19 nt, Human
gggaugggaaggcuguggg

SEQ ID NO: 921923 - RNA, 21 nt, Human
gggaugggaaggcugugggcu

SEQ ID NO: 921924 - RNA, 21 nt, Human
uaacagagcaagacccugucu

SEQ ID NO: 921925 - RNA, 20 nt, Human
uaaccuggccugccuacuag

SEQ ID NO: 921926 - RNA, 24 nt, Human
uaguggugcacggcuguaguccca

SEQ ID NO: 921927 - RNA, 23 nt, Human
uauuggcuggcagcagagggcag

SEQ ID NO: 921928 - RNA, 23 nt, Human
ucaaaacagaccgagaagcccac

SEQ ID NO: 921929 - RNA, 23 nt, Human
ucacaccacugcacuggagccug

SEQ ID NO: 921930 - RNA, 26 nt, Human
ucaggcagggcacggcaggaaacuca

SEQ ID NO: 921931 - RNA, 18 nt, Human
ucaguaagucuggggucu

SEQ ID NO: 921932 - RNA, 21 nt, Human
uccacuuguucucacagcagg

SEQ ID NO: 921933 - RNA, 18 nt, Human
ucccugagaagaugacag

SEQ ID NO: 921934 - RNA, 25 nt, Human
ucccugagaagaugacagaaguagg

SEQ ID NO: 921935 - RNA, 28 nt, Human
ucccugagaagaugacagaaguaggggu

SEQ ID NO: 921936 - RNA, 21 nt, Human
uccuggaaacagggccaaggc

SEQ ID NO: 921937 - RNA, 19 nt, Human
ugagagcagcaaggccacu

SEQ ID NO: 921938 - RNA, 21 nt, Human
ugagaugaagcccaggugguu

SEQ ID NO: 921939 - RNA, 24 nt, Human
ugaggcaggaggauugcuugagcc

SEQ ID NO: 921940 - RNA, 25 nt, Human
ugaggcaggaggauugcuugagccc

SEQ ID NO: 921941 - RNA, 22 nt, Human
ugcagugagccaugaucacacc

SEQ ID NO: 921942 - RNA, 24 nt, Human
ugcgaggcugaggcaggaggauug

SEQ ID NO: 921943 - RNA, 24 nt, Human
uggaaauggagauguggacauggg

SEQ ID NO: 921944 - RNA, 21 nt, Human
uggcagcagagggcaggcuag

SEQ ID NO: 921945 - RNA, 23 nt, Human
uggcugggccagguccuggaaac

SEQ ID NO: 921946 - RNA, 20 nt, Human
ugggcccccagcccugcaac

SEQ ID NO: 921947 - RNA, 19 nt, Human
uggggucugaaaacuuguc

SEQ ID NO: 921948 - RNA, 18 nt, Human
uggugcacggcuguaguc

SEQ ID NO: 921949 - RNA, 21 nt, Human
uggugcacggcuguaguccca

SEQ ID NO: 921950 - RNA, 25 nt, Human
uugagaugaagcccaggugguucac

SEQ ID NO: 921951 - RNA, 20 nt, Human
uugcgaggcugaggcaggag

SEQ ID NO: 921952 - RNA, 24 nt, Human
uugcuugagcccaggaggucgagg

SEQ ID NO: 921953 - RNA, 20 nt, Human
aaaaauaagucucuaguccc

SEQ ID NO: 921954 - RNA, 20 nt, Human
aaaagaaaaaaagaauuagg

SEQ ID NO: 921955 - RNA, 23 nt, Human
aaaauaacacuuccaggauacgg

SEQ ID NO: 921956 - RNA, 21 nt, Human
aaacaggaaaaaugcaaucgc

SEQ ID NO: 921957 - RNA, 22 nt, Human
aaacaggaaaaaugcaaucgca

SEQ ID NO: 921958 - RNA, 22 nt, Human
aaacaggaaaaaugcaaucgca

SEQ ID NO: 921959 - RNA, 21 nt, Human
aagcagaaggaugaugcaauc

SEQ ID NO: 921960 - RNA, 24 nt, Human
accgccucaccuccuuccuccccu

SEQ ID NO: 921961 - RNA, 27 nt, Human
accugggcaaccucaagcaaugcuuua

SEQ ID NO: 921962 - RNA, 30 nt, Human
acucgcaguaucccaagaacuaaaccaguu

SEQ ID NO: 921963 - RNA, 24 nt, Human
agaacucagcaagcauucgaauaa

SEQ ID NO: 921964 - RNA, 22 nt, Human
aggcgaaacuaccugggcaacc

SEQ ID NO: 921965 - RNA, 19 nt, Human
agucuuacagcgagcucaa

SEQ ID NO: 921966 - RNA, 19 nt, Human
agucuuacagcgagcucaa

SEQ ID NO: 921967 - RNA, 19 nt, Human
agucuuacagcgagcucaa

SEQ ID NO: 921968 - RNA, 18 nt, Human
agugguuucaggaaggac

SEQ ID NO: 921969 - RNA, 18 nt, Human
agugguuucaggaaggac

SEQ ID NO: 921970 - RNA, 18 nt, Human
agugguuucaggaaggac

SEQ ID NO: 921971 - RNA, 22 nt, Human
aguguaaggcgaaacuaccuga

SEQ ID NO: 921972 - RNA, 19 nt, Human
augccugcacuugaggcug

SEQ ID NO: 921973 - RNA, 22 nt, Human
caaaaauaagucuuugggcuuc

SEQ ID NO: 921974 - RNA, 22 nt, Human
caaaaauaagucuuugggcuuc

SEQ ID NO: 921975 - RNA, 18 nt, Human
caccuccuuccuccccuc

SEQ ID NO: 921976 - RNA, 26 nt, Human
caccuccuuccuccccucaucuuccu

SEQ ID NO: 921977 - RNA, 24 nt, Human
cacgccuauaauccuaacacuuug

SEQ ID NO: 921978 - RNA, 23 nt, Human
cacuguucacucgcaguauccca

SEQ ID NO: 921979 - RNA, 23 nt, Human
cagcgagcucaaaaauaagucuc

SEQ ID NO: 921980 - RNA, 22 nt, Human
ccaagaacuaaaccaguagcaa

SEQ ID NO: 921981 - RNA, 24 nt, Human
ccacucaaaaaugccugcacuuga

SEQ ID NO: 921982 - RNA, 18 nt, Human
cccaagagagagaacgcc

SEQ ID NO: 921983 - RNA, 18 nt, Human
cccaagagagagaacgcc

SEQ ID NO: 921984 - RNA, 27 nt, Human
ccccucaucuuccuaucucaaaccaaa

SEQ ID NO: 921985 - RNA, 18 nt, Human
ccccuuaccgccucaccu

SEQ ID NO: 921986 - RNA, 19 nt, Human
ccccuuaccgccucaccuc

SEQ ID NO: 921987 - RNA, 22 nt, Human
ccgccucaccuccuuccucccc

SEQ ID NO: 921988 - RNA, 22 nt, Human
ccuauaauccuaacacuuuggg

SEQ ID NO: 921989 - RNA, 23 nt, Human
ccuauaauccuaacacuuuggga

SEQ ID NO: 921990 - RNA, 23 nt, Human
ccuuaccgccucaccuccuuccu

SEQ ID NO: 921991 - RNA, 20 nt, Human
cucaaaccaaaacgacaaug

SEQ ID NO: 921992 - RNA, 20 nt, Human
cucacgccuauaauccuaac

SEQ ID NO: 921993 - RNA, 24 nt, Human
cucacgccuauaauccuaacacuu

SEQ ID NO: 921994 - RNA, 24 nt, Human
cucgcaguaucccaagaacuaaac

SEQ ID NO: 921995 - RNA, 19 nt, Human
cuugcugugggaggaauau

SEQ ID NO: 921996 - RNA, 21 nt, Human
gcaaccucaagcaaugcuuua

SEQ ID NO: 921997 - RNA, 20 nt, Human
gccgggcgugguggcucacg

SEQ ID NO: 921998 - RNA, 20 nt, Human
gccucaccuccuuccucccc

SEQ ID NO: 921999 - RNA, 23 nt, Human
gccucaccuccuuccuccccuca

SEQ ID NO: 922000 - RNA, 20 nt, Human
gcucuaagaauggggauaaa

SEQ ID NO: 922001 - RNA, 26 nt, Human
ggccacucaaaaaugccugcacuuga

SEQ ID NO: 922002 - RNA, 23 nt, Human
ggcgugguggcucacgccuauaa

SEQ ID NO: 922003 - RNA, 24 nt, Human
gggccagcggaaguugggcgcggg

SEQ ID NO: 922004 - RNA, 24 nt, Human
gggccagcggaaguugggcgcggg

SEQ ID NO: 922005 - RNA, 19 nt, Human
gguggcucacgccuauaau

SEQ ID NO: 922006 - RNA, 23 nt, Human
gguggcucacgccuauaauccua

SEQ ID NO: 922007 - RNA, 19 nt, Human
gugaaagggagcucuacua

SEQ ID NO: 922008 - RNA, 23 nt, Human
uaacacuuugggaggccgaggug

SEQ ID NO: 922009 - RNA, 26 nt, Human
uaacacuuugggaggccgaggugcag

SEQ ID NO: 922010 - RNA, 21 nt, Human
uaacucacacacgcucaucuu

SEQ ID NO: 922011 - RNA, 22 nt, Human
uaaggcgaaacuaccugggcaa

SEQ ID NO: 922012 - RNA, 18 nt, Human
uaagucucuagucccaaa

SEQ ID NO: 922013 - RNA, 18 nt, Human
uaccugggcaaccucaag

SEQ ID NO: 922014 - RNA, 18 nt, Human
uaggcucauuuuccuguc

SEQ ID NO: 922015 - RNA, 20 nt, Human
ucagcaagcauucgaauaag

SEQ ID NO: 922016 - RNA, 23 nt, Human
ucagucuuacagcgagcucaaaa

SEQ ID NO: 922017 - RNA, 23 nt, Human
ucagucuuacagcgagcucaaaa

SEQ ID NO: 922018 - RNA, 23 nt, Human
ucagucuuacagcgagcucaaaa

SEQ ID NO: 922019 - RNA, 23 nt, Human
uccccucaucuuccuaucucaaa

SEQ ID NO: 922020 - RNA, 19 nt, Human
ugcacugggacaagaagug

SEQ ID NO: 922021 - RNA, 19 nt, Human
uggcucacgccuauaaucc

SEQ ID NO: 922022 - RNA, 21 nt, Human
uggcucacgccuauaauccua

SEQ ID NO: 922023 - RNA, 27 nt, Human
ugggcaaccucaagcaaugcuuuacac

SEQ ID NO: 922024 - RNA, 24 nt, Human
uggggauaaaagcuguugggcgcc

SEQ ID NO: 922025 - RNA, 22 nt, Human
ugguggcucacgccuauaaucc

SEQ ID NO: 922026 - RNA, 25 nt, Human
uguaaacaagcagaaggaugaugca

SEQ ID NO: 922027 - RNA, 25 nt, Human
uguaaucaggccacucaaaaaugcc

SEQ ID NO: 922028 - RNA, 20 nt, Human
uuaggcucauuuuccugucu

SEQ ID NO: 922029 - RNA, 24 nt, Human
uucacucgcaguaucccaagaacu

SEQ ID NO: 922030 - RNA, 25 nt, Human
uucacucgcaguaucccaagaacua

SEQ ID NO: 922031 - RNA, 22 nt, Human
uuuuccugucuuaacucacaca

SEQ ID NO: 922032 - RNA, 27 nt, Human
aaaaaaauaacaagcuuugacacaaaa

SEQ ID NO: 922033 - RNA, 19 nt, Human
aacaagcuuugacacaaaa

SEQ ID NO: 922034 - RNA, 22 nt, Human
agacaaaugacaaacacaaaau

SEQ ID NO: 922035 - RNA, 23 nt, Human
agacaaaugacaaacacaaaauu

SEQ ID NO: 922036 - RNA, 23 nt, Human
agcuuugacacaaaaucuaagca

SEQ ID NO: 922037 - RNA, 27 nt, Human
cacaaaaucuaagcaucugggacauac

SEQ ID NO: 922038 - RNA, 22 nt, Human
cacuuacagauacauacguaug

SEQ ID NO: 922039 - RNA, 19 nt, Human
cuccuccgcuacaaacccc

SEQ ID NO: 922040 - RNA, 21 nt, Human
cuccuccgcuacaaaccccgg

SEQ ID NO: 922041 - RNA, 22 nt, Human
cucucaauucugccucuucauc

SEQ ID NO: 922042 - RNA, 25 nt, Human
cucuuaaguuagacaagaguaaaua

SEQ ID NO: 922043 - RNA, 25 nt, Human
gacaacaucuguaucuuaagcuggc

SEQ ID NO: 922044 - RNA, 25 nt, Human
ggccuuagggaacuucuaaaauguc

SEQ ID NO: 922045 - RNA, 23 nt, Human
uaaaaugucgacaacaucuguau

SEQ ID NO: 922046 - RNA, 24 nt, Human
uacuucauuaaaaaaagagugaaa

SEQ ID NO: 922047 - RNA, 19 nt, Human
uagccucucaauucugccu

SEQ ID NO: 922048 - RNA, 23 nt, Human
uauacaaagaaaauguucaauuc

SEQ ID NO: 922049 - RNA, 26 nt, Human
uauguauaacaauaaaauuaguguaa

SEQ ID NO: 922050 - RNA, 23 nt, Human
ugacacaaaaucuaagcaucugc

SEQ ID NO: 922051 - RNA, 18 nt, Human
ugaugaguacacagauau

SEQ ID NO: 922052 - RNA, 22 nt, Human
uguuguaaaacuauaauagaca

SEQ ID NO: 922053 - RNA, 21 nt, Human
uuaaaaaaagagugaaaaugu

SEQ ID NO: 922054 - RNA, 20 nt, Human
uucaaaaaugaagacuaccc

SEQ ID NO: 922055 - RNA, 22 nt, Human
uuuauauaaaauucagaaacau

SEQ ID NO: 922056 - RNA, 24 nt, Human
uuuguaguaugaaauacuucauua

SEQ ID NO: 922057 - RNA, 22 nt, Human
aaacaacgaaggaacauccuga

SEQ ID NO: 922058 - RNA, 22 nt, Human
aaagaaacaaggcauuuagccc

SEQ ID NO: 922059 - RNA, 18 nt, Human
aaauguaaggacuugaaa

SEQ ID NO: 922060 - RNA, 18 nt, Human
aacaaaaucauacaacaa

SEQ ID NO: 922061 - RNA, 25 nt, Human
aacaacgaaggaacauccugaaaga

SEQ ID NO: 922062 - RNA, 20 nt, Human
aagucucaaauuuacaaaaa

SEQ ID NO: 922063 - RNA, 21 nt, Human
aaucauacaacaaaaauugcu

SEQ ID NO: 922064 - RNA, 21 nt, Human
acaacgaaggaacauccugaa

SEQ ID NO: 922065 - RNA, 20 nt, Human
accccaaguccaaacacaac

SEQ ID NO: 922066 - RNA, 18 nt, Human
agaaggaggaggaagagc

SEQ ID NO: 922067 - RNA, 19 nt, Human
agagagcgggucccggaga

SEQ ID NO: 922068 - RNA, 22 nt, Human
agagucccccccaccccccccu

SEQ ID NO: 922069 - RNA, 19 nt, Human
aggaacagcagcaggccca

SEQ ID NO: 922070 - RNA, 21 nt, Human
aggcggcggcggcggcagccg

SEQ ID NO: 922071 - RNA, 22 nt, Human
aggcggcggcggcggcagccgg

SEQ ID NO: 922072 - RNA, 21 nt, Human
auauaucuguugcaucacaca

SEQ ID NO: 922073 - RNA, 22 nt, Human
aucacacaauaagccaaacauu

SEQ ID NO: 922074 - RNA, 19 nt, Human
auuaugguuugaaaucacg

SEQ ID NO: 922075 - RNA, 23 nt, Human
caaacauuucuuguaacuuugau

SEQ ID NO: 922076 - RNA, 18 nt, Human
caccccccccuccccaac

SEQ ID NO: 922077 - RNA, 19 nt, Human
caccccccccuccccaacc

SEQ ID NO: 922078 - RNA, 27 nt, Human
caccccccccuccccaaccacguuccg

SEQ ID NO: 922079 - RNA, 25 nt, Human
caccgcggcggcgacggcggcagcc

SEQ ID NO: 922080 - RNA, 20 nt, Human
cagaauaucuuacuaggaac

SEQ ID NO: 922081 - RNA, 22 nt, Human
ccaaucaugauagcaaaaaugu

SEQ ID NO: 922082 - RNA, 27 nt, Human
ccaccccccccuccccaaccacguucc

SEQ ID NO: 922083 - RNA, 25 nt, Human
cccaagauugagauucuuauggaac

SEQ ID NO: 922084 - RNA, 25 nt, Human
cccaaguccaaacacaacaugacuu

SEQ ID NO: 922085 - RNA, 19 nt, Human
ccccaagauugagauucuu

SEQ ID NO: 922086 - RNA, 20 nt, Human
ccccaccccccccuccccaa

SEQ ID NO: 922087 - RNA, 21 nt, Human
ccccaccccccccuccccaac

SEQ ID NO: 922088 - RNA, 19 nt, Human
cccccaccccccccucccc

SEQ ID NO: 922089 - RNA, 24 nt, Human
cccccaccccccccuccccaacca

SEQ ID NO: 922090 - RNA, 31 nt, Human
cccccaccccccccuccccaaccacguuccc

SEQ ID NO: 922091 - RNA, 22 nt, Human
ccccccaccccccccuccccaa

SEQ ID NO: 922092 - RNA, 18 nt, Human
ccccccccuccccaacca

SEQ ID NO: 922093 - RNA, 18 nt, Human
ccccccccuccccaacca

SEQ ID NO: 922094 - RNA, 18 nt, Human
cccccccuccccaaccac

SEQ ID NO: 922095 - RNA, 23 nt, Human
ccgaggcggcggcggcggcagcc

SEQ ID NO: 922096 - RNA, 19 nt, Human
ccuuaaaguugaggaugga

SEQ ID NO: 922097 - RNA, 19 nt, Human
cggccgaggcggcggcggc

SEQ ID NO: 922098 - RNA, 21 nt, Human
cggcggcggcggcagccgggg

SEQ ID NO: 922099 - RNA, 18 nt, Human
cggcugucggcgcccucg

SEQ ID NO: 922100 - RNA, 21 nt, Human
cggggagggggucaccgcggc

SEQ ID NO: 922101 - RNA, 22 nt, Human
cuagagucccccccaccccccc

SEQ ID NO: 922102 - RNA, 19 nt, Human
cuccauggcuagaugagca

SEQ ID NO: 922103 - RNA, 20 nt, Human
cuccauggcuagaugagcag

SEQ ID NO: 922104 - RNA, 21 nt, Human
cucucccuguuccaaccccaa

SEQ ID NO: 922105 - RNA, 18 nt, Human
cuggggaaggggcggagg

SEQ ID NO: 922106 - RNA, 19 nt, Human
gaagagccgaggacucaug

SEQ ID NO: 922107 - RNA, 20 nt, Human
gaaggaggaggaagagccga

SEQ ID NO: 922108 - RNA, 21 nt, Human
gagagggaggcagagagcggg

SEQ ID NO: 922109 - RNA, 19 nt, Human
gagcagccgcaggcgggca

SEQ ID NO: 922110 - RNA, 21 nt, Human
gcggcggcggcagccggggag

SEQ ID NO: 922111 - RNA, 20 nt, Human
gcgggccaggucaggcuggg

SEQ ID NO: 922112 - RNA, 23 nt, Human
gcuguacucuccuuuggagguga

SEQ ID NO: 922113 - RNA, 20 nt, Human
ggaaacaacgaaggaacauc

SEQ ID NO: 922114 - RNA, 20 nt, Human
ggaagagccgaggacucaug

SEQ ID NO: 922115 - RNA, 24 nt, Human
ggaaggggcggaggaggggaggag

SEQ ID NO: 922116 - RNA, 24 nt, Human
ggcggaggaggggaggagccgggc

SEQ ID NO: 922117 - RNA, 18 nt, Human
gggaggagccgggcugcg

SEQ ID NO: 922118 - RNA, 26 nt, Human
gggccaggucaggcuggggaaggggc

SEQ ID NO: 922119 - RNA, 22 nt, Human
gggcccccggcugucggcgccc

SEQ ID NO: 922120 - RNA, 21 nt, Human
ggggagggggucaccgcggcg

SEQ ID NO: 922121 - RNA, 20 nt, Human
gguaaacuccauggcuagau

SEQ ID NO: 922122 - RNA, 19 nt, Human
gucccccccaccccccccu

SEQ ID NO: 922123 - RNA, 26 nt, Human
gucggccgaggcggcggcggcggcaa

SEQ ID NO: 922124 - RNA, 20 nt, Human
gucuagagucccccccaccc

SEQ ID NO: 922125 - RNA, 18 nt, Human
uacaaaaaaaaaaaaaaa

SEQ ID NO: 922126 - RNA, 25 nt, Human
uacuaggaacagcagcaggcccagc

SEQ ID NO: 922127 - RNA, 18 nt, Human
uacucauggaaacaacga

SEQ ID NO: 922128 - RNA, 20 nt, Human
uagagucccccccacccccc

SEQ ID NO: 922129 - RNA, 18 nt, Human
uccaaacacaacaugacu

SEQ ID NO: 922130 - RNA, 24 nt, Human
uccaaccccaaguccaaacacaac

SEQ ID NO: 922131 - RNA, 23 nt, Human
ucccccccaccccccccucccca

SEQ ID NO: 922132 - RNA, 19 nt, Human
uccgggcccccggcugucg

SEQ ID NO: 922133 - RNA, 19 nt, Human
uccucuagguccggagcag

SEQ ID NO: 922134 - RNA, 20 nt, Human
ucuagagucccccccacccc

SEQ ID NO: 922135 - RNA, 19 nt, Human
ucuccuuuggaggugaagg

SEQ ID NO: 922136 - RNA, 21 nt, Human
ugaaagggcuauauaucuguu

SEQ ID NO: 922137 - RNA, 20 nt, Human
ugagcguguagcugacaugg

SEQ ID NO: 922138 - RNA, 19 nt, Human
ugauagcaaaaauguggca

SEQ ID NO: 922139 - RNA, 24 nt, Human
ugauagcaaaaauguggcaguuuc

SEQ ID NO: 922140 - RNA, 21 nt, Human
ugcguccgggcccccggcugu

SEQ ID NO: 922141 - RNA, 20 nt, Human
uggagagggaggcagagagc

SEQ ID NO: 922142 - RNA, 20 nt, Human
uguuaaaaguuucaacaaag

SEQ ID NO: 922143 - RNA, 18 nt, Human
uugaaagggcuauauauc

SEQ ID NO: 922144 - RNA, 18 nt, Human
uuggagagggaggcagag

SEQ ID NO: 922145 - RNA, 23 nt, Human
uuuaagauaguuuucaauaacuc

SEQ ID NO: 922146 - RNA, 24 nt, Human
uuuaucaacaaugccaacuccccu

SEQ ID NO: 922147 - RNA, 19 nt, Human
aaaaagacaaaacucaggg

SEQ ID NO: 922148 - RNA, 19 nt, Human
aaccagaaccgccaguccu

SEQ ID NO: 922149 - RNA, 22 nt, Human
aaccagaaccgccaguccuucc

SEQ ID NO: 922150 - RNA, 22 nt, Human
aagcggccgagggccauggagc

SEQ ID NO: 922151 - RNA, 19 nt, Human
aagcugggcgcgacccgug

SEQ ID NO: 922152 - RNA, 24 nt, Human
acaacagagcacaggcacagaacc

SEQ ID NO: 922153 - RNA, 18 nt, Human
acagagcacaggcacaga

SEQ ID NO: 922154 - RNA, 20 nt, Human
accgccaguccuucccucca

SEQ ID NO: 922155 - RNA, 24 nt, Human
accucauacccacugcuaaggcua

SEQ ID NO: 922156 - RNA, 24 nt, Human
acugcuaaggcuaaaggaaaaaga

SEQ ID NO: 922157 - RNA, 24 nt, Human
agacaaaacucagucucagguccg

SEQ ID NO: 922158 - RNA, 21 nt, Human
aggugcaggaaagcugggccg

SEQ ID NO: 922159 - RNA, 25 nt, Human
cacugcuaaggcuaaaggaaaaaga

SEQ ID NO: 922160 - RNA, 22 nt, Human
cagaguaaaaaccagaaccgcc

SEQ ID NO: 922161 - RNA, 24 nt, Human
cagaguaaaaaccagaaccgccag

SEQ ID NO: 922162 - RNA, 20 nt, Human
ccaguccuucccuccaacac

SEQ ID NO: 922163 - RNA, 19 nt, Human
ccccgggggugcgcgcggc

SEQ ID NO: 922164 - RNA, 19 nt, Human
ccccugcacaccucauacc

SEQ ID NO: 922165 - RNA, 21 nt, Human
cccggcugcaguguggaggga

SEQ ID NO: 922166 - RNA, 19 nt, Human
ccuccaacacaacagagca

SEQ ID NO: 922167 - RNA, 19 nt, Human
cggcaggagcaggaggcgg

SEQ ID NO: 922168 - RNA, 18 nt, Human
gagcacaggcacagaacc

SEQ ID NO: 922169 - RNA, 21 nt, Human
gagcagaggcggcugggaagg

SEQ ID NO: 922170 - RNA, 20 nt, Human
gaggagcagaggcggcuggg

SEQ ID NO: 922171 - RNA, 18 nt, Human
gccgccaauaaaaaagaa

SEQ ID NO: 922172 - RNA, 23 nt, Human
ggcggagugaagccacccagcuc

SEQ ID NO: 922173 - RNA, 19 nt, Human
gggagagcccucuuuggaa

SEQ ID NO: 922174 - RNA, 24 nt, Human
gggcggagugaagccacccagcuc

SEQ ID NO: 922175 - RNA, 20 nt, Human
gugaagccacccagcucccc

SEQ ID NO: 922176 - RNA, 22 nt, Human
uaaauaaaguucacagaguaaa

SEQ ID NO: 922177 - RNA, 23 nt, Human
ucagaaaacagucuaggugggca

SEQ ID NO: 922178 - RNA, 19 nt, Human
ucucagguccggagggcuc

SEQ ID NO: 922179 - RNA, 18 nt, Human
ugccggagccgaagcccc

SEQ ID NO: 922180 - RNA, 25 nt, Human
ugccggagccgaagccccgggggug

SEQ ID NO: 922181 - RNA, 22 nt, Human
uggaaugggcggagugaagcca

SEQ ID NO: 922182 - RNA, 19 nt, Human
ugggaaggacagcagaggc

SEQ ID NO: 922183 - RNA, 23 nt, Human
uucacagaguaaaaaccagaacc

SEQ ID NO: 922184 - RNA, 27 nt, Human
aaaaaauaaaacaaccaaccaggaccc

SEQ ID NO: 922185 - RNA, 23 nt, Human
aaaacaaccaaccaggacccaaa

SEQ ID NO: 922186 - RNA, 20 nt, Human
aaaacccaaccaauccacug

SEQ ID NO: 922187 - RNA, 27 nt, Human
aaaauaaaggccaacucaguauucauu

SEQ ID NO: 922188 - RNA, 26 nt, Human
aaaauauguacaucaaugcgcaccag

SEQ ID NO: 922189 - RNA, 24 nt, Human
aaacaaccaaccaggacccaaaac

SEQ ID NO: 922190 - RNA, 18 nt, Human
aaacccccaggaacccaa

SEQ ID NO: 922191 - RNA, 23 nt, Human
aaccaaccaggacccaaaacuca

SEQ ID NO: 922192 - RNA, 21 nt, Human
aacucaguauucauuuccccc

SEQ ID NO: 922193 - RNA, 22 nt, Human
aagacccugcacaaaacccaac

SEQ ID NO: 922194 - RNA, 20 nt, Human
aagcugcuuucucuuuccac

SEQ ID NO: 922195 - RNA, 21 nt, Human
aagggaaaaugggccucacag

SEQ ID NO: 922196 - RNA, 19 nt, Human
acaaaaccaaaaaaaaaaa

SEQ ID NO: 922197 - RNA, 22 nt, Human
acaaccaaccaggacccaaaac

SEQ ID NO: 922198 - RNA, 23 nt, Human
acaaccaaccaggacccaaaacu

SEQ ID NO: 922199 - RNA, 21 nt, Human
acagggcgaaucuucucaaaa

SEQ ID NO: 922200 - RNA, 23 nt, Human
acccccaggaacccaagcaagug

SEQ ID NO: 922201 - RNA, 18 nt, Human
acgcugggggaggggugg

SEQ ID NO: 922202 - RNA, 22 nt, Human
agaaaacccccaggaacccaag

SEQ ID NO: 922203 - RNA, 21 nt, Human
agaguucugugugcauguggg

SEQ ID NO: 922204 - RNA, 18 nt, Human
agcaagugggaacugagg

SEQ ID NO: 922205 - RNA, 20 nt, Human
aggcccagcacgccgggccc

SEQ ID NO: 922206 - RNA, 21 nt, Human
aggggcagaagacacaagugg

SEQ ID NO: 922207 - RNA, 20 nt, Human
aggggguaaaauuuuggagg

SEQ ID NO: 922208 - RNA, 22 nt, Human
agggguugugugaacagggcag

SEQ ID NO: 922209 - RNA, 26 nt, Human
auaaaacaaccaaccaggacccaaaa

SEQ ID NO: 922210 - RNA, 19 nt, Human
auagaaaacaacugaugcc

SEQ ID NO: 922211 - RNA, 21 nt, Human
auauacaauaccccuuucagc

SEQ ID NO: 922212 - RNA, 24 nt, Human
aucagaaaacccccaggaacccaa

SEQ ID NO: 922213 - RNA, 23 nt, Human
auccacccaggaaggcgccuggu

SEQ ID NO: 922214 - RNA, 21 nt, Human
auucauuucccccccacccaa

SEQ ID NO: 922215 - RNA, 22 nt, Human
caaaacccaaccaauccacugu

SEQ ID NO: 922216 - RNA, 23 nt, Human
caacuccauuuagggaggggggu

SEQ ID NO: 922217 - RNA, 26 nt, Human
caacugggucuccucuucagcagucc

SEQ ID NO: 922218 - RNA, 18 nt, Human
caagucccaagcagcgug

SEQ ID NO: 922219 - RNA, 20 nt, Human
caagucccaagcagcguggg

SEQ ID NO: 922220 - RNA, 19 nt, Human
cacagaaaguugaaggucc

SEQ ID NO: 922221 - RNA, 20 nt, Human
cacagaagccauaacagggu

SEQ ID NO: 922222 - RNA, 21 nt, Human
caccagugaucagaaaacccc

SEQ ID NO: 922223 - RNA, 19 nt, Human
cagaagccauaacagggug

SEQ ID NO: 922224 - RNA, 21 nt, Human
caggcccagcacgccgggccc

SEQ ID NO: 922225 - RNA, 19 nt, Human
cagugggauauacaauacc

SEQ ID NO: 922226 - RNA, 20 nt, Human
cauagaaaacaacugaugcc

SEQ ID NO: 922227 - RNA, 22 nt, Human
caugaggaauaaugaacuuagc

SEQ ID NO: 922228 - RNA, 19 nt, Human
ccaggacccaaaacucaau

SEQ ID NO: 922229 - RNA, 22 nt, Human
cccaagcaagugggaacugagg

SEQ ID NO: 922230 - RNA, 18 nt, Human
cccccccacccaacucca

SEQ ID NO: 922231 - RNA, 24 nt, Human
cccugcacaaaacccaaccaaucc

SEQ ID NO: 922232 - RNA, 24 nt, Human
ccuagcagacccaggacgcagacu

SEQ ID NO: 922233 - RNA, 24 nt, Human
ccugcacaaaacccaaccaaucca

SEQ ID NO: 922234 - RNA, 18 nt, Human
cgaaccuagcagacccag

SEQ ID NO: 922235 - RNA, 21 nt, Human
cggcuuguuucuguuuuccuc

SEQ ID NO: 922236 - RNA, 21 nt, Human
cuagcagacccaggacgcaga

SEQ ID NO: 922237 - RNA, 18 nt, Human
cucacagaagccauaaca

SEQ ID NO: 922238 - RNA, 18 nt, Human
cucacugaaguauuuuau

SEQ ID NO: 922239 - RNA, 21 nt, Human
cucacugaaguauuuuaucaa

SEQ ID NO: 922240 - RNA, 21 nt, Human
cugaugccaaagugaaggaga

SEQ ID NO: 922241 - RNA, 22 nt, Human
cugcacaaaacccaaccaaucc

SEQ ID NO: 922242 - RNA, 20 nt, Human
cugcaguccacagggguugu

SEQ ID NO: 922243 - RNA, 22 nt, Human
cuggaagccuccuucacgcugg

SEQ ID NO: 922244 - RNA, 21 nt, Human
cugguggcugcuguuuucccu

SEQ ID NO: 922245 - RNA, 27 nt, Human
cuuucaggcccagcacgccgggcccaa

SEQ ID NO: 922246 - RNA, 23 nt, Human
gacuaagaauggugagcccacgg

SEQ ID NO: 922247 - RNA, 20 nt, Human
gagaaaauucaaaccucuaa

SEQ ID NO: 922248 - RNA, 21 nt, Human
gaugccaaagugaaggagaga

SEQ ID NO: 922249 - RNA, 21 nt, Human
gcagcgugggcugguggggug

SEQ ID NO: 922250 - RNA, 18 nt, Human
gccaaagugaaggagaga

SEQ ID NO: 922251 - RNA, 22 nt, Human
gccaaagugaaggagagaacug

SEQ ID NO: 922252 - RNA, 18 nt, Human
ggcaagguuccagguggg

SEQ ID NO: 922253 - RNA, 20 nt, Human
ggggagggguggggaugaug

SEQ ID NO: 922254 - RNA, 20 nt, Human
uaaaacaaccaaccaggacc

SEQ ID NO: 922255 - RNA, 21 nt, Human
uaaaacaaccaaccaggaccc

SEQ ID NO: 922256 - RNA, 22 nt, Human
uaaaacaaccaaccaggaccca

SEQ ID NO: 922257 - RNA, 23 nt, Human
uaaaacaaccaaccaggacccaa

SEQ ID NO: 922258 - RNA, 24 nt, Human
uaaaacaaccaaccaggacccaaa

SEQ ID NO: 922259 - RNA, 22 nt, Human
uaacccaagacccugcacaaaa

SEQ ID NO: 922260 - RNA, 23 nt, Human
uacaaaaccaaaaaaaaaaauac

SEQ ID NO: 922261 - RNA, 26 nt, Human
uacaaaaccaaaaaaaaaaauacuca

SEQ ID NO: 922262 - RNA, 18 nt, Human
uauguacaucaaugcgca

SEQ ID NO: 922263 - RNA, 20 nt, Human
uauucauuucccccccaccc

SEQ ID NO: 922264 - RNA, 20 nt, Human
ucaaaaagugaagccaacug

SEQ ID NO: 922265 - RNA, 19 nt, Human
ucagcuggggaaaagggaa

SEQ ID NO: 922266 - RNA, 20 nt, Human
ucaggauccuuucaagggcu

SEQ ID NO: 922267 - RNA, 20 nt, Human
ucaggauccuuucaagggcu

SEQ ID NO: 922268 - RNA, 24 nt, Human
ucaguauucauuucccccccaccc

SEQ ID NO: 922269 - RNA, 24 nt, Human
uccacagggguugugugaacaggg

SEQ ID NO: 922270 - RNA, 19 nt, Human
uccagaacucaaauccagc

SEQ ID NO: 922271 - RNA, 19 nt, Human
uccccagacuggaggaaaa

SEQ ID NO: 922272 - RNA, 18 nt, Human
ucccccccacccaacucc

SEQ ID NO: 922273 - RNA, 21 nt, Human
ucgcagaaaaaaguucugagu

SEQ ID NO: 922274 - RNA, 18 nt, Human
ucucaaaaagugaagcca

SEQ ID NO: 922275 - RNA, 22 nt, Human
ucucucuccuccccagacugga

SEQ ID NO: 922276 - RNA, 22 nt, Human
ucugccagcuaaaacuugcacc

SEQ ID NO: 922277 - RNA, 23 nt, Human
ugacagggugaaguaccuggaag

SEQ ID NO: 922278 - RNA, 22 nt, Human
ugagaaaggacuaagaauggug

SEQ ID NO: 922279 - RNA, 21 nt, Human
ugagaagcuggucucacugaa

SEQ ID NO: 922280 - RNA, 24 nt, Human
ugaugagaagcuggucucacugaa

SEQ ID NO: 922281 - RNA, 21 nt, Human
ugcacaaaacccaaccaaucc

SEQ ID NO: 922282 - RNA, 22 nt, Human
ugcacaaaacccaaccaaucca

SEQ ID NO: 922283 - RNA, 27 nt, Human
ugcauguagugugacuuuccccucggg

SEQ ID NO: 922284 - RNA, 19 nt, Human
uggaaagggguuuggggua

SEQ ID NO: 922285 - RNA, 19 nt, Human
uggaugagugaauuugggu

SEQ ID NO: 922286 - RNA, 24 nt, Human
ugggaaggggcagaagacacaagu

SEQ ID NO: 922287 - RNA, 18 nt, Human
ugggagcagggagugagc

SEQ ID NO: 922288 - RNA, 19 nt, Human
uggggugggcaagauaggu

SEQ ID NO: 922289 - RNA, 22 nt, Human
ugggucuccucuucagcagucc

SEQ ID NO: 922290 - RNA, 19 nt, Human
ugguggcugcuguuuuccc

SEQ ID NO: 922291 - RNA, 20 nt, Human
uguugcugcggcuuguuucu

SEQ ID NO: 922292 - RNA, 25 nt, Human
uguuuucccuuuccccccucucuca

SEQ ID NO: 922293 - RNA, 19 nt, Human
uucagcaucuccccacccc

SEQ ID NO: 922294 - RNA, 20 nt, Human
uucccuuuccccccucucuc

SEQ ID NO: 922295 - RNA, 25 nt, Human
uugagcccucucagugcagugggau

SEQ ID NO: 922296 - RNA, 18 nt, Human
uuucccccccacccaacu

SEQ ID NO: 922297 - RNA, 24 nt, Human
uuuuaaaaauaaaggccaacucag

SEQ ID NO: 922298 - RNA, 19 nt, Human
uuuuuuuuuuuuuuuuuaa

SEQ ID NO: 922299 - RNA, 22 nt, Human
aaaauaccuucucccccugccc

SEQ ID NO: 922300 - RNA, 23 nt, Human
aaaauaccuucucccccugcccc

SEQ ID NO: 922301 - RNA, 24 nt, Human
aaaauaccuucucccccugcccca

SEQ ID NO: 922302 - RNA, 22 nt, Human
acagugggcggggagggggcag

SEQ ID NO: 922303 - RNA, 19 nt, Human
acgggggaaggggugcgug

SEQ ID NO: 922304 - RNA, 22 nt, Human
aggaggggaggggugacggggu

SEQ ID NO: 922305 - RNA, 22 nt, Human
caccuggcugaggcuggcggga

SEQ ID NO: 922306 - RNA, 19 nt, Human
cacuucuugguccucaguu

SEQ ID NO: 922307 - RNA, 25 nt, Human
cagcaaaaaauagaagacgucccuc

SEQ ID NO: 922308 - RNA, 21 nt, Human
cagugggcggggagggggcag

SEQ ID NO: 922309 - RNA, 21 nt, Human
cccaccuccauccuggccucg

SEQ ID NO: 922310 - RNA, 20 nt, Human
cccccggagcccugucacuc

SEQ ID NO: 922311 - RNA, 22 nt, Human
cccccugccccagacagugggc

SEQ ID NO: 922312 - RNA, 22 nt, Human
ccccggagcccugucacucgug

SEQ ID NO: 922313 - RNA, 18 nt, Human
ccccucuggcaacguccc

SEQ ID NO: 922314 - RNA, 18 nt, Human
cccucggcuccuggggac

SEQ ID NO: 922315 - RNA, 18 nt, Human
cccucuggcaacgucccc

SEQ ID NO: 922316 - RNA, 23 nt, Human
ccuccaggcggccacucuggucc

SEQ ID NO: 922317 - RNA, 21 nt, Human
ccucccaguccggagguccca

SEQ ID NO: 922318 - RNA, 22 nt, Human
ccucggguggcccccucggcuc

SEQ ID NO: 922319 - RNA, 19 nt, Human
cuauggcuucucugagacu

SEQ ID NO: 922320 - RNA, 25 nt, Human
cucgaaaauaccuucucccccugcc

SEQ ID NO: 922321 - RNA, 23 nt, Human
cugguccuggcuacugauccuug

SEQ ID NO: 922322 - RNA, 23 nt, Human
gacagugggcggggagggggcag

SEQ ID NO: 922323 - RNA, 23 nt, Human
gaggucccaggggggcuauggcu

SEQ ID NO: 922324 - RNA, 23 nt, Human
gcuccuggggacucugcuccccu

SEQ ID NO: 922325 - RNA, 20 nt, Human
ggaccuccaggcggccacuc

SEQ ID NO: 922326 - RNA, 20 nt, Human
gggcggggagggggcagcaa

SEQ ID NO: 922327 - RNA, 24 nt, Human
gggcggggagggggcagcaaaaaa

SEQ ID NO: 922328 - RNA, 21 nt, Human
ggggaaggggugcguguggca

SEQ ID NO: 922329 - RNA, 19 nt, Human
ggguggcccccucggcucc

SEQ ID NO: 922330 - RNA, 21 nt, Human
gucacucguguucacacgggg

SEQ ID NO: 922331 - RNA, 23 nt, Human
uaaauacgggugcgggaaagucc

SEQ ID NO: 922332 - RNA, 22 nt, Human
uauugcacauggacccuauaua

SEQ ID NO: 922333 - RNA, 19 nt, Human
ucacacgggggaaggggug

SEQ ID NO: 922334 - RNA, 21 nt, Human
ucccccggagcccugucacuc

SEQ ID NO: 922335 - RNA, 21 nt, Human
ucccucccuauugcacaugga

SEQ ID NO: 922336 - RNA, 19 nt, Human
ucccugcucaggaggggag

SEQ ID NO: 922337 - RNA, 19 nt, Human
ucgaaaauaccuucucccc

SEQ ID NO: 922338 - RNA, 19 nt, Human
ucggguggcccccucggcu

SEQ ID NO: 922339 - RNA, 22 nt, Human
ucugagacuucccccggagccc

SEQ ID NO: 922340 - RNA, 22 nt, Human
ugaggcuggcgggacucuuggc

SEQ ID NO: 922341 - RNA, 22 nt, Human
ugaguggcaacuucacgacuuu

SEQ ID NO: 922342 - RNA, 22 nt, Human
uggcaacgucccccugcuuggc

SEQ ID NO: 922343 - RNA, 21 nt, Human
uggcagaagcagcuguauaaa

SEQ ID NO: 922344 - RNA, 18 nt, Human
uggccucggguggccccc

SEQ ID NO: 922345 - RNA, 23 nt, Human
uggcgggacucuuggcacauucu

SEQ ID NO: 922346 - RNA, 22 nt, Human
uuccuggucccgucucuggccc

SEQ ID NO: 922347 - RNA, 24 nt, Human
uugaguggcaacuucacgacuuuu

SEQ ID NO: 922348 - RNA, 20 nt, Human
uuuuuuuuuuugaguggcaa

SEQ ID NO: 922349 - RNA, 22 nt, Human
uuuuuuuuuuuuuuuugagugg

SEQ ID NO: 922350 - RNA, 18 nt, Human
uuuuuuuuuuuuuuuuug

SEQ ID NO: 922351 - RNA, 18 nt, Human
aaaauagagccuaagggc

SEQ ID NO: 922352 - RNA, 20 nt, Human
aaagggccucaccuggaaac

SEQ ID NO: 922353 - RNA, 24 nt, Human
aaauucaguccuuggaggcgaaag

SEQ ID NO: 922354 - RNA, 23 nt, Human
aacaggaagcggaacccccaagg

SEQ ID NO: 922355 - RNA, 20 nt, Human
accaguccacccccagcccc

SEQ ID NO: 922356 - RNA, 22 nt, Human
accaguccacccccagccccaa

SEQ ID NO: 922357 - RNA, 24 nt, Human
acccccagccccaaccccaaccac

SEQ ID NO: 922358 - RNA, 20 nt, Human
acggggggcagggcggucgc

SEQ ID NO: 922359 - RNA, 20 nt, Human
acuccauucagggaacugaa

SEQ ID NO: 922360 - RNA, 18 nt, Human
acuggagaaagggccuca

SEQ ID NO: 922361 - RNA, 21 nt, Human
agcggaacccccaaggcggcc

SEQ ID NO: 922362 - RNA, 22 nt, Human
aggcggcagcugcggcgggaug

SEQ ID NO: 922363 - RNA, 18 nt, Human
aggcggccgagcagagug

SEQ ID NO: 922364 - RNA, 21 nt, Human
agugagcaccauuaagaccau

SEQ ID NO: 922365 - RNA, 18 nt, Human
agugcuccaaggugaugg

SEQ ID NO: 922366 - RNA, 18 nt, Human
caaccccaaccacccucc

SEQ ID NO: 922367 - RNA, 20 nt, Human
caagucaguaagagcuucug

SEQ ID NO: 922368 - RNA, 22 nt, Human
cacaccaguccacccccagccc

SEQ ID NO: 922369 - RNA, 24 nt, Human
cacauuuuuacauaaauuacacac

SEQ ID NO: 922370 - RNA, 31 nt, Human
caccaguccacccccagccccaaccccaacc

SEQ ID NO: 922371 - RNA, 22 nt, Human
cacccccagccccaaccccaac

SEQ ID NO: 922372 - RNA, 21 nt, Human
cacccuccgcugccacggccu

SEQ ID NO: 922373 - RNA, 21 nt, Human
cacccuccgcugccacggccu

SEQ ID NO: 922374 - RNA, 18 nt, Human
caccuggaaacuguagga

SEQ ID NO: 922375 - RNA, 23 nt, Human
cacggccuccagcaccugacucc

SEQ ID NO: 922376 - RNA, 23 nt, Human
cacuauguacagucagugcucca

SEQ ID NO: 922377 - RNA, 24 nt, Human
cacugcuggagggggugauggccu

SEQ ID NO: 922378 - RNA, 19 nt, Human
cacuggcaaccaaccgggg

SEQ ID NO: 922379 - RNA, 19 nt, Human
cagcagcgucugggcuggc

SEQ ID NO: 922380 - RNA, 25 nt, Human
cagcuuuccuggaaaacagcacaau

SEQ ID NO: 922381 - RNA, 19 nt, Human
caguccagccacagugcug

SEQ ID NO: 922382 - RNA, 18 nt, Human
ccacccccagccccaacc

SEQ ID NO: 922383 - RNA, 23 nt, Human
ccacccccagccccaaccccaac

SEQ ID NO: 922384 - RNA, 19 nt, Human
ccagccccaaccccaacca

SEQ ID NO: 922385 - RNA, 19 nt, Human
ccauuaagaccauuuucua

SEQ ID NO: 922386 - RNA, 24 nt, Human
ccauuaagaccauuuucuagcugc

SEQ ID NO: 922387 - RNA, 21 nt, Human
cccagccccaaccccaaccac

SEQ ID NO: 922388 - RNA, 28 nt, Human
cccagccccaaccccaaccacccuccgc

SEQ ID NO: 922389 - RNA, 19 nt, Human
ccccaaccccaaccacccu

SEQ ID NO: 922390 - RNA, 21 nt, Human
ccccaaccccaaccacccucc

SEQ ID NO: 922391 - RNA, 21 nt, Human
ccccaaccccaaccacccucc

SEQ ID NO: 922392 - RNA, 24 nt, Human
ccccaaccccaaccacccuccgcu

SEQ ID NO: 922393 - RNA, 20 nt, Human
ccccagccccaaccccaacc

SEQ ID NO: 922394 - RNA, 23 nt, Human
ccccagccccaaccccaaccacc

SEQ ID NO: 922395 - RNA, 18 nt, Human
ccccagcuccucugcccc

SEQ ID NO: 922396 - RNA, 20 nt, Human
cccccagccccaaccccaac

SEQ ID NO: 922397 - RNA, 22 nt, Human
cccccagccccaaccccaacca

SEQ ID NO: 922398 - RNA, 25 nt, Human
cccccagccccaaccccaaccaccc

SEQ ID NO: 922399 - RNA, 24 nt, Human
cccucacaccaguccacccccagc

SEQ ID NO: 922400 - RNA, 19 nt, Human
ccgccgugcucuccggccc

SEQ ID NO: 922401 - RNA, 21 nt, Human
ccgcggcgaggcggcagcugc

SEQ ID NO: 922402 - RNA, 19 nt, Human
ccgugcucuccggcccggc

SEQ ID NO: 922403 - RNA, 22 nt, Human
ccucagugaagcgcccuccuug

SEQ ID NO: 922404 - RNA, 21 nt, Human
ccuccagcaccugacuccauu

SEQ ID NO: 922405 - RNA, 22 nt, Human
ccuccagcaccugacuccauuc

SEQ ID NO: 922406 - RNA, 26 nt, Human
ccugaccccagcuccucugccccagc

SEQ ID NO: 922407 - RNA, 24 nt, Human
ccugacuccauucagggaacugaa

SEQ ID NO: 922408 - RNA, 24 nt, Human
ccuguauuuuaaugagaaaaaaaa

SEQ ID NO: 922409 - RNA, 21 nt, Human
ccuugguggcggccccuccug

SEQ ID NO: 922410 - RNA, 18 nt, Human
cgaggcggcagcugcggc

SEQ ID NO: 922411 - RNA, 20 nt, Human
cgccgagcugugcccaccgc

SEQ ID NO: 922412 - RNA, 19 nt, Human
cggacaguguucacugcug

SEQ ID NO: 922413 - RNA, 22 nt, Human
cggcagagagggguggccccug

SEQ ID NO: 922414 - RNA, 20 nt, Human
cggcaguccagccacagugc

SEQ ID NO: 922415 - RNA, 22 nt, Human
cggccgcggcgaggcggcagcu

SEQ ID NO: 922416 - RNA, 21 nt, Human
cucauacaugaaaaauagagc

SEQ ID NO: 922417 - RNA, 20 nt, Human
cuccgcgccgagcugugccc

SEQ ID NO: 922418 - RNA, 18 nt, Human
cuccuugguggcggcccc

SEQ ID NO: 922419 - RNA, 25 nt, Human
cuggaacaggaagcggaacccccaa

SEQ ID NO: 922420 - RNA, 20 nt, Human
cugggccugggacaaaggug

SEQ ID NO: 922421 - RNA, 19 nt, Human
cuucaggcaccaaacagcc

SEQ ID NO: 922422 - RNA, 24 nt, Human
gcaacacuggacauguuuccauac

SEQ ID NO: 922423 - RNA, 22 nt, Human
gccauccuucaggcaccaaaca

SEQ ID NO: 922424 - RNA, 18 nt, Human
gcccaccgcuccggccgc

SEQ ID NO: 922425 - RNA, 18 nt, Human
gccccaaccccaaccacc

SEQ ID NO: 922426 - RNA, 21 nt, Human
gccccagcugcugcuccuugg

SEQ ID NO: 922427 - RNA, 23 nt, Human
ggagaaagggccucaccuggaaa

SEQ ID NO: 922428 - RNA, 20 nt, Human
ggcaagagggguggguguuu

SEQ ID NO: 922429 - RNA, 23 nt, Human
ggcccggccgcggcgaggcggca

SEQ ID NO: 922430 - RNA, 19 nt, Human
ggccgcggcgaggcggcag

SEQ ID NO: 922431 - RNA, 19 nt, Human
gggaagaaggaucaugugu

SEQ ID NO: 922432 - RNA, 19 nt, Human
gggguccuggugcccgugg

SEQ ID NO: 922433 - RNA, 20 nt, Human
ggugaugaagggaagaagga

SEQ ID NO: 922434 - RNA, 21 nt, Human
gucagcagcgucugggcuggc

SEQ ID NO: 922435 - RNA, 23 nt, Human
uaaagugagcaccauuaagacca

SEQ ID NO: 922436 - RNA, 19 nt, Human
uacguacaauucacaccuc

SEQ ID NO: 922437 - RNA, 19 nt, Human
ucaguccuuggaggcgaaa

SEQ ID NO: 922438 - RNA, 19 nt, Human
ucccgccgccgugcucucc

SEQ ID NO: 922439 - RNA, 24 nt, Human
uccuaaggccgcgcucccgccgcc

SEQ ID NO: 922440 - RNA, 20 nt, Human
uccucugccccagcugcugc

SEQ ID NO: 922441 - RNA, 21 nt, Human
uccuggugcccguggcgcggc

SEQ ID NO: 922442 - RNA, 19 nt, Human
uccuucaggcaccaaacag

SEQ ID NO: 922443 - RNA, 22 nt, Human
ucucccaguugucacuuggucu

SEQ ID NO: 922444 - RNA, 22 nt, Human
ucuuaauggcaagagggguggg

SEQ ID NO: 922445 - RNA, 22 nt, Human
ugaaaguggguauuuauuugga

SEQ ID NO: 922446 - RNA, 21 nt, Human
ugaagggaagaaggaucaugu

SEQ ID NO: 922447 - RNA, 19 nt, Human
ugaccccagcuccucugcc

SEQ ID NO: 922448 - RNA, 19 nt, Human
ugcuggagggggugauggc

SEQ ID NO: 922449 - RNA, 18 nt, Human
uggcaagaccaugcggug

SEQ ID NO: 922450 - RNA, 26 nt, Human
uggcaagagggguggguguuuugaaa

SEQ ID NO: 922451 - RNA, 18 nt, Human
uggcagcggccaugcucc

SEQ ID NO: 922452 - RNA, 21 nt, Human
uggccccugaccccagcuccu

SEQ ID NO: 922453 - RNA, 23 nt, Human
ugggaagugugagaaaggaugag

SEQ ID NO: 922454 - RNA, 22 nt, Human
ugggacuucuuaauggcaagag

SEQ ID NO: 922455 - RNA, 22 nt, Human
uggugaugaagggaagaaggau

SEQ ID NO: 922456 - RNA, 20 nt, Human
uguacacacauuuuuacaua

SEQ ID NO: 922457 - RNA, 18 nt, Human
ugugugggaagugugaga

SEQ ID NO: 922458 - RNA, 19 nt, Human
uucacuggcaaccaaccgg

SEQ ID NO: 922459 - RNA, 20 nt, Human
aggucugccccaccccggcc

SEQ ID NO: 922460 - RNA, 23 nt, Human
cccagccuggccccgcgccgguu

SEQ ID NO: 922461 - RNA, 19 nt, Human
ccccgcgcugugcgccuuc

SEQ ID NO: 922462 - RNA, 19 nt, Human
ccccggccgccucaggccu

SEQ ID NO: 922463 - RNA, 22 nt, Human
ccccggccgccucaggccucag

SEQ ID NO: 922464 - RNA, 18 nt, Human
ccuggccccgcgcugugc

SEQ ID NO: 922465 - RNA, 19 nt, Human
ccuggccccgcgcugugcg

SEQ ID NO: 922466 - RNA, 22 nt, Human
cgccgggaggucugccccaccc

SEQ ID NO: 922467 - RNA, 22 nt, Human
gccccgcgcugugcgccuucgc

SEQ ID NO: 922468 - RNA, 18 nt, Human
ggccccgcgcugugcgcc

SEQ ID NO: 922469 - RNA, 23 nt, Human
gggaggucugccccaccccggcc

SEQ ID NO: 922470 - RNA, 26 nt, Human
gggcggggcuagccgggggcgggggc

SEQ ID NO: 922471 - RNA, 23 nt, Human
uacagaaccauuaaauacaacuu

SEQ ID NO: 922472 - RNA, 20 nt, Human
ucgggcucgccgggaggucu

SEQ ID NO: 922473 - RNA, 21 nt, Human
ugccccaccccggccgccuca

SEQ ID NO: 922474 - RNA, 23 nt, Human
aaaaaccuuuaaaaccaaaaaaa

SEQ ID NO: 922475 - RNA, 24 nt, Human
aaaagaaaaaaaaaaaaacaaaaa

SEQ ID NO: 922476 - RNA, 18 nt, Human
aaaauaacggauacacug

SEQ ID NO: 922477 - RNA, 19 nt, Human
aaagcaucccaaccaauga

SEQ ID NO: 922478 - RNA, 21 nt, Human
aaccacaaguuuauuccaucc

SEQ ID NO: 922479 - RNA, 19 nt, Human
aagaagacacucgaucugc

SEQ ID NO: 922480 - RNA, 23 nt, Human
aaggaagaagacacucgaucugc

SEQ ID NO: 922481 - RNA, 22 nt, Human
acacaagccauugagagaagcc

SEQ ID NO: 922482 - RNA, 24 nt, Human
acauaguuuuuuuaaaaaauaaaa

SEQ ID NO: 922483 - RNA, 24 nt, Human
acccagaguccucaacacaagcca

SEQ ID NO: 922484 - RNA, 19 nt, Human
acccaucccacauuccauc

SEQ ID NO: 922485 - RNA, 21 nt, Human
acgcagccuggcguggcccuu

SEQ ID NO: 922486 - RNA, 18 nt, Human
agaaaacuaucuucccug

SEQ ID NO: 922487 - RNA, 22 nt, Human
agacaauaagcacaugaccugg

SEQ ID NO: 922488 - RNA, 21 nt, Human
agacccccccaccuucacacc

SEQ ID NO: 922489 - RNA, 24 nt, Human
agacccccccaccuucacaccaaa

SEQ ID NO: 922490 - RNA, 20 nt, Human
agagcacccuugauauaaaa

SEQ ID NO: 922491 - RNA, 23 nt, Human
agagggcuagagcacgccaccag

SEQ ID NO: 922492 - RNA, 24 nt, Human
agaguccucaacacaagccauuga

SEQ ID NO: 922493 - RNA, 19 nt, Human
agcgggggccuccuggagg

SEQ ID NO: 922494 - RNA, 22 nt, Human
aggcacagaagcuaccagaacc

SEQ ID NO: 922495 - RNA, 21 nt, Human
auacauuuucaaaagcuugcc

SEQ ID NO: 922496 - RNA, 20 nt, Human
aucaaguuaguucuucaaau

SEQ ID NO: 922497 - RNA, 28 nt, Human
caaaaaagaaaaaaaaaaaaacaaaaaa

SEQ ID NO: 922498 - RNA, 22 nt, Human
caaagcaucccaaccaaugaaa

SEQ ID NO: 922499 - RNA, 18 nt, Human
caacucagcuccuagagc

SEQ ID NO: 922500 - RNA, 21 nt, Human
caagcacggggaucagggugc

SEQ ID NO: 922501 - RNA, 26 nt, Human
cacccagaguccucaacacaagccau

SEQ ID NO: 922502 - RNA, 21 nt, Human
caccuccuuugauaauccuug

SEQ ID NO: 922503 - RNA, 31 nt, Human
caccuucacaccaaaaaagaaaaaaaaaaaa

SEQ ID NO: 922504 - RNA, 20 nt, Human
cagcagcacucagugaagaa

SEQ ID NO: 922505 - RNA, 22 nt, Human
cagcuccuagagcaacugucuu

SEQ ID NO: 922506 - RNA, 19 nt, Human
caggcacagaagcuaccag

SEQ ID NO: 922507 - RNA, 18 nt, Human
cauaaagugaacguugaa

SEQ ID NO: 922508 - RNA, 21 nt, Human
cauacaacuuuaaaagacuac

SEQ ID NO: 922509 - RNA, 21 nt, Human
cauuaacaaaaaccuuuaaaa

SEQ ID NO: 922510 - RNA, 26 nt, Human
ccaccugaagacaucuuaugguaggu

SEQ ID NO: 922511 - RNA, 24 nt, Human
ccaccuucacaccaaaaaagaaaa

SEQ ID NO: 922512 - RNA, 18 nt, Human
cccaggacucuuucuucg

SEQ ID NO: 922513 - RNA, 21 nt, Human
ccccauccuuggacaaggcca

SEQ ID NO: 922514 - RNA, 23 nt, Human
ccccccaccuucacaccaaaaaa

SEQ ID NO: 922515 - RNA, 21 nt, Human
ccccgcgcgcccgagccucag

SEQ ID NO: 922516 - RNA, 25 nt, Human
ccuucacaccaaaaaagaaaaaaaa

SEQ ID NO: 922517 - RNA, 19 nt, Human
ccuugaguguccaccuccu

SEQ ID NO: 922518 - RNA, 19 nt, Human
cggcccggaggaggggcgg

SEQ ID NO: 922519 - RNA, 20 nt, Human
cgggcggagcgcgcccggcg

SEQ ID NO: 922520 - RNA, 22 nt, Human
cuacacagugcuuccuuuuucc

SEQ ID NO: 922521 - RNA, 18 nt, Human
cucaccuugacacuuaac

SEQ ID NO: 922522 - RNA, 21 nt, Human
cuuaugguagguggguuucug

SEQ ID NO: 922523 - RNA, 19 nt, Human
gaaguacaaaucccaggac

SEQ ID NO: 922524 - RNA, 18 nt, Human
gagacaauaagcacauga

SEQ ID NO: 922525 - RNA, 21 nt, Human
gagcugguaacugagagggcu

SEQ ID NO: 922526 - RNA, 23 nt, Human
gccucagugcggcccggaggagg

SEQ ID NO: 922527 - RNA, 19 nt, Human
gcggagcgcgcccggcgcc

SEQ ID NO: 922528 - RNA, 20 nt, Human
ggacaaggccaccugaagac

SEQ ID NO: 922529 - RNA, 21 nt, Human
ggagagagaauaaacacagua

SEQ ID NO: 922530 - RNA, 20 nt, Human
ggcccggcagccgcaugcga

SEQ ID NO: 922531 - RNA, 26 nt, Human
gggugcacaauuagggccaggagcac

SEQ ID NO: 922532 - RNA, 19 nt, Human
gucuugagagaaugugagg

SEQ ID NO: 922533 - RNA, 25 nt, Human
gugcggcccggaggaggggcgggcg

SEQ ID NO: 922534 - RNA, 20 nt, Human
guuucugugggagucagcgg

SEQ ID NO: 922535 - RNA, 20 nt, Human
uaaaaugccugacccccauc

SEQ ID NO: 922536 - RNA, 20 nt, Human
uaagcacaugaccuggcaaa

SEQ ID NO: 922537 - RNA, 24 nt, Human
uaauagacccccccaccuucacac

SEQ ID NO: 922538 - RNA, 26 nt, Human
uacaaaaugagacaauaagcacauga

SEQ ID NO: 922539 - RNA, 18 nt, Human
uaccaccuccggcccggc

SEQ ID NO: 922540 - RNA, 19 nt, Human
uacccaggcacagaagcua

SEQ ID NO: 922541 - RNA, 19 nt, Human
uauaaaaugccugaccccc

SEQ ID NO: 922542 - RNA, 27 nt, Human
ucacaccaaaaaagaaaaaaaaaaaaa

SEQ ID NO: 922543 - RNA, 23 nt, Human
ucagcuccuagagcaacugucuu

SEQ ID NO: 922544 - RNA, 31 nt, Human
uccaaaccagcaacucagcuccuagagcaac

SEQ ID NO: 922545 - RNA, 22 nt, Human
uccuuggacaaggccaccugac

SEQ ID NO: 922546 - RNA, 19 nt, Human
ucucaccuauuacccaucc

SEQ ID NO: 922547 - RNA, 21 nt, Human
ucucaccuauuacccauccca

SEQ ID NO: 922548 - RNA, 19 nt, Human
ugaaaacacaugugcuggg

SEQ ID NO: 922549 - RNA, 18 nt, Human
ugaagaaugccuaguggc

SEQ ID NO: 922550 - RNA, 18 nt, Human
ugagagaagccagaaaug

SEQ ID NO: 922551 - RNA, 18 nt, Human
ugagagaagccagaaaug

SEQ ID NO: 922552 - RNA, 18 nt, Human
ugcaaaauaccacugaga

SEQ ID NO: 922553 - RNA, 22 nt, Human
ugccuaguggccucuugaaaac

SEQ ID NO: 922554 - RNA, 18 nt, Human
uggaaagcagacaauuca

SEQ ID NO: 922555 - RNA, 29 nt, Human
ugguaaacaauacaaaauuaaauacauuu

SEQ ID NO: 922556 - RNA, 23 nt, Human
ugguaacugagagggcuagagca

SEQ ID NO: 922557 - RNA, 31 nt, Human
ugugaaauaaaacucacaucaacauuuuaaa

SEQ ID NO: 922558 - RNA, 19 nt, Human
uguguagauauauacaagu

SEQ ID NO: 922559 - RNA, 22 nt, Human
uguguagauauauacaagugug

SEQ ID NO: 922560 - RNA, 18 nt, Human
uguguguagauauauaca

SEQ ID NO: 922561 - RNA, 23 nt, Human
uguguguagauauauacaagugu

SEQ ID NO: 922562 - RNA, 18 nt, Human
uguucagagcacccuuga

SEQ ID NO: 922563 - RNA, 25 nt, Human
uuaaaaccaaaaaaagaacgcuccu

SEQ ID NO: 922564 - RNA, 24 nt, Human
uuaacaaaaaccuuuaaaaccaaa

SEQ ID NO: 922565 - RNA, 22 nt, Human
uuaacacucgguuuacucccac

SEQ ID NO: 922566 - RNA, 23 nt, Human
uuccuugaguguccaccuccuuu

SEQ ID NO: 922567 - RNA, 21 nt, Human
uugaccaacuuaacauuucug

SEQ ID NO: 922568 - RNA, 27 nt, Human
uuguaagcagcuccauuuauuugagua

SEQ ID NO: 922569 - RNA, 24 nt, Human
uuucucaccuugacacuuaacacu

SEQ ID NO: 922570 - RNA, 21 nt, Human
uuucuuuugaucugcuuuccu

SEQ ID NO: 922571 - RNA, 23 nt, Human
agagcccagcugacagaaacuag

SEQ ID NO: 922572 - RNA, 23 nt, Human
aggaaggcauuggacaacagcca

SEQ ID NO: 922573 - RNA, 26 nt, Human
caaaugucccuccuuguccacauuuc

SEQ ID NO: 922574 - RNA, 19 nt, Human
caaggaaggcauuggacac

SEQ ID NO: 922575 - RNA, 20 nt, Human
cagaaacuagcugugaccac

SEQ ID NO: 922576 - RNA, 21 nt, Human
cagaaacuagcugugaccaca

SEQ ID NO: 922577 - RNA, 24 nt, Human
cagccagcuuucucccagagagcc

SEQ ID NO: 922578 - RNA, 25 nt, Human
cagccagcuuucucccagagagccc

SEQ ID NO: 922579 - RNA, 18 nt, Human
cagcuuucucccagagag

SEQ ID NO: 922580 - RNA, 18 nt, Human
cagugcugaggcugcuaa

SEQ ID NO: 922581 - RNA, 18 nt, Human
cauuggacaacagccagc

SEQ ID NO: 922582 - RNA, 18 nt, Human
ccaggaucuggaguuuca

SEQ ID NO: 922583 - RNA, 21 nt, Human
cccaaggagcuauuucccucu

SEQ ID NO: 922584 - RNA, 18 nt, Human
cucuuagccaggaucugg

SEQ ID NO: 922585 - RNA, 22 nt, Human
gacagaaacuagcugugaccac

SEQ ID NO: 922586 - RNA, 18 nt, Human
gagcagagccacagaggg

SEQ ID NO: 922587 - RNA, 21 nt, Human
gccaagcuacccauacggaaa

SEQ ID NO: 922588 - RNA, 21 nt, Human
gcugcuaaagauggucucuca

SEQ ID NO: 922589 - RNA, 18 nt, Human
ggcaaggagcugggaaaa

SEQ ID NO: 922590 - RNA, 21 nt, Human
ggcaggccuggcagugcugag

SEQ ID NO: 922591 - RNA, 22 nt, Human
ucccagagagcccagcugacag

SEQ ID NO: 922592 - RNA, 21 nt, Human
ugacagaaacuagcugugacc

SEQ ID NO: 922593 - RNA, 19 nt, Human
ugagcagagccacagaggg

SEQ ID NO: 922594 - RNA, 23 nt, Human
ugccaaggaaggcauuggacaac

SEQ ID NO: 922595 - RNA, 23 nt, Human
uuggacaacagccagcuuucucc

SEQ ID NO: 922596 - RNA, 24 nt, Human
uuuuuugggcuccuaaagguuuua

SEQ ID NO: 922597 - RNA, 19 nt, Human
uuuuuuuuuuuugggcucc

SEQ ID NO: 922598 - RNA, 18 nt, Human
uuuuuuuuuuuuuuuuug

SEQ ID NO: 922599 - RNA, 25 nt, Human
uuuuuuuuuuuuuuuuuuuuuuggg

SEQ ID NO: 922600 - RNA, 19 nt, Human
ccccgggggcaggagcgcc

SEQ ID NO: 922601 - RNA, 21 nt, Human
ccguggcgacaagcgggcgcg

SEQ ID NO: 922602 - RNA, 18 nt, Human
cgacaagcgggcgcgggg

SEQ ID NO: 922603 - RNA, 18 nt, Human
gccagaagcgaucacagg

SEQ ID NO: 922604 - RNA, 20 nt, Human
ggacgguuagggaggccagc

SEQ ID NO: 922605 - RNA, 20 nt, Human
gggcgcggggucgugcagcg

SEQ ID NO: 922606 - RNA, 20 nt, Human
ucaccccgggggcaggagcu

SEQ ID NO: 922607 - RNA, 22 nt, Human
aaaaaaaaugucaaaggacagc

SEQ ID NO: 922608 - RNA, 21 nt, Human
aaaagcacauccaacuaaauc

SEQ ID NO: 922609 - RNA, 24 nt, Human
aaaggacauuuaaaagcacaucca

SEQ ID NO: 922610 - RNA, 24 nt, Human
acauccaacuaaaucaaaaaaggg

SEQ ID NO: 922611 - RNA, 23 nt, Human
agaggguugaaaagccccugagc

SEQ ID NO: 922612 - RNA, 25 nt, Human
aggauuagaaaucacacuaguucau

SEQ ID NO: 922613 - RNA, 24 nt, Human
caaaaaaaaaaauuaaacuagauc

SEQ ID NO: 922614 - RNA, 23 nt, Human
caacgcgauaccggaaggacugg

SEQ ID NO: 922615 - RNA, 20 nt, Human
caacuaaaucaaaaaaggga

SEQ ID NO: 922616 - RNA, 23 nt, Human
cacagagggcagcgaaugcggca

SEQ ID NO: 922617 - RNA, 23 nt, Human
caccauggauaggagucccccca

SEQ ID NO: 922618 - RNA, 23 nt, Human
cagaaaagccacagagggcagcg

SEQ ID NO: 922619 - RNA, 21 nt, Human
cagaacacagggaagaacagc

SEQ ID NO: 922620 - RNA, 20 nt, Human
cagcagaaaagccacagagg

SEQ ID NO: 922621 - RNA, 22 nt, Human
ccagcgguggcgucgcugcucc

SEQ ID NO: 922622 - RNA, 30 nt, Human
ccucaugcaggcaaaggacauuuaaaagcu

SEQ ID NO: 922623 - RNA, 24 nt, Human
cucaaaaagguccccuuuccaccu

SEQ ID NO: 922624 - RNA, 21 nt, Human
gacaacucaaaaagguccccu

SEQ ID NO: 922625 - RNA, 19 nt, Human
gcagaacacagggaagaac

SEQ ID NO: 922626 - RNA, 22 nt, Human
gccccugagcaacgcgauaccg

SEQ ID NO: 922627 - RNA, 18 nt, Human
gccuugcccagcgguggc

SEQ ID NO: 922628 - RNA, 24 nt, Human
ggaaggacuggguaggccggcugg

SEQ ID NO: 922629 - RNA, 18 nt, Human
ggaguccccccacggccu

SEQ ID NO: 922630 - RNA, 22 nt, Human
ggaguccccccacggccucggc

SEQ ID NO: 922631 - RNA, 22 nt, Human
gggcagcgaaugcggcagcggg

SEQ ID NO: 922632 - RNA, 22 nt, Human
gggcggcagaacacagggaaga

SEQ ID NO: 922633 - RNA, 23 nt, Human
uaaaagcacauccaacuaaauca

SEQ ID NO: 922634 - RNA, 18 nt, Human
uaggacuacaggcugcca

SEQ ID NO: 922635 - RNA, 23 nt, Human
uccaaguuacauuuccucuaaaa

SEQ ID NO: 922636 - RNA, 24 nt, Human
uccucuaaaaaaaaaaaugucaaa

SEQ ID NO: 922637 - RNA, 21 nt, Human
ugacagaggguugaaaagccc

SEQ ID NO: 922638 - RNA, 23 nt, Human
ugcggcagcgggcggcagaacac

SEQ ID NO: 922639 - RNA, 24 nt, Human
ugggauauguugcaaaaaaaaaaa

SEQ ID NO: 922640 - RNA, 22 nt, Human
uggguaggccggcuggugcggu

SEQ ID NO: 922641 - RNA, 21 nt, Human
uggugcgguggaagcgaagcc

SEQ ID NO: 922642 - RNA, 24 nt, Human
uuaaaagcacauccaacuaaauca

SEQ ID NO: 922643 - RNA, 18 nt, Human
uucaacaccauggauagg

SEQ ID NO: 922644 - RNA, 19 nt, Human
uucauccuucauuaucagg

SEQ ID NO: 922645 - RNA, 24 nt, Human
uuguuuuuaaaagacaccucucag

SEQ ID NO: 922646 - RNA, 19 nt, Human
aaacagcccuuuaucaaga

SEQ ID NO: 922647 - RNA, 21 nt, Human
aaacagcccuuuaucaagagu

SEQ ID NO: 922648 - RNA, 24 nt, Human
acagggccccugcaugcugagcaa

SEQ ID NO: 922649 - RNA, 18 nt, Human
agcaccagggcacgcacc

SEQ ID NO: 922650 - RNA, 21 nt, Human
aggcagccuugggcugugccc

SEQ ID NO: 922651 - RNA, 24 nt, Human
agggcugcucggggcaccagagug

SEQ ID NO: 922652 - RNA, 23 nt, Human
cagccagacaucccuccaggcau

SEQ ID NO: 922653 - RNA, 22 nt, Human
caggcugggccugagggguggg

SEQ ID NO: 922654 - RNA, 21 nt, Human
cccuccaggcaugucuucuga

SEQ ID NO: 922655 - RNA, 19 nt, Human
cccucgggggcauccccuu

SEQ ID NO: 922656 - RNA, 18 nt, Human
cgacagggccccugcaug

SEQ ID NO: 922657 - RNA, 24 nt, Human
cggcugcuugcccacagggcugcu

SEQ ID NO: 922658 - RNA, 21 nt, Human
cuagcuggacuggcacccucg

SEQ ID NO: 922659 - RNA, 18 nt, Human
cucggggcaccagagugg

SEQ ID NO: 922660 - RNA, 21 nt, Human
gccccugcaugcugagcaaca

SEQ ID NO: 922661 - RNA, 20 nt, Human
gcggcggcugcuugcccaca

SEQ ID NO: 922662 - RNA, 19 nt, Human
ggagcuugggggccaggcu

SEQ ID NO: 922663 - RNA, 23 nt, Human
ggcggcugcuugcccacagggcu

SEQ ID NO: 922664 - RNA, 23 nt, Human
gggcacgcaccguggggaggcag

SEQ ID NO: 922665 - RNA, 24 nt, Human
uagcuggacuggcacccucggggg

SEQ ID NO: 922666 - RNA, 25 nt, Human
uagcuggacuggcacccucgggggc

SEQ ID NO: 922667 - RNA, 22 nt, Human
uccauggcaaaacagcccuuua

SEQ ID NO: 922668 - RNA, 18 nt, Human
ucccagagcuuccucgug

SEQ ID NO: 922669 - RNA, 22 nt, Human
uggcacccucgggggcaucccc

SEQ ID NO: 922670 - RNA, 24 nt, Human
uggggagcuugggggccaggcugg

SEQ ID NO: 922671 - RNA, 20 nt, Human
uuuuuuuuuuuuuuuuccau

SEQ ID NO: 922672 - RNA, 25 nt, Human
uuuuuuuuuuuuuuuuuuuccaugg

SEQ ID NO: 922673 - RNA, 22 nt, Human
aaagagcagaucccaugaccaa

SEQ ID NO: 922674 - RNA, 24 nt, Human
aaagaucugcgaagauuuuuuuua

SEQ ID NO: 922675 - RNA, 22 nt, Human
aaagcuccccagggacuuaaag

SEQ ID NO: 922676 - RNA, 20 nt, Human
aaaguuccagauggaccugg

SEQ ID NO: 922677 - RNA, 22 nt, Human
aaccacaaggaacaguucuccu

SEQ ID NO: 922678 - RNA, 24 nt, Human
aacccagugaccuugauacgaucc

SEQ ID NO: 922679 - RNA, 19 nt, Human
aaccuaaacagcucucucc

SEQ ID NO: 922680 - RNA, 18 nt, Human
aagaugcagacacuuugc

SEQ ID NO: 922681 - RNA, 22 nt, Human
aaugggacugcugaugccugug

SEQ ID NO: 922682 - RNA, 18 nt, Human
aauguuauccagggguga

SEQ ID NO: 922683 - RNA, 21 nt, Human
accaggaggccacgacaggcc

SEQ ID NO: 922684 - RNA, 21 nt, Human
acccuggauucgcagacuugg

SEQ ID NO: 922685 - RNA, 21 nt, Human
acgaugcagcaggaagcagaa

SEQ ID NO: 922686 - RNA, 20 nt, Human
acuauguaauaaaugagcca

SEQ ID NO: 922687 - RNA, 24 nt, Human
acuuaaagccccaagaagggaugg

SEQ ID NO: 922688 - RNA, 18 nt, Human
agagcccaccccaaaugg

SEQ ID NO: 922689 - RNA, 25 nt, Human
agagcccaccucuccccagcugccc

SEQ ID NO: 922690 - RNA, 18 nt, Human
agaugcagacacuuugcc

SEQ ID NO: 922691 - RNA, 20 nt, Human
agcaccagccaguaaaaccc

SEQ ID NO: 922692 - RNA, 21 nt, Human
agccagcugcccugcuccugg

SEQ ID NO: 922693 - RNA, 26 nt, Human
agccuccugggccgccuccaccccuu

SEQ ID NO: 922694 - RNA, 22 nt, Human
agcuggaagcaacuccagggac

SEQ ID NO: 922695 - RNA, 22 nt, Human
aggagaccuacagggaaagcuc

SEQ ID NO: 922696 - RNA, 23 nt, Human
aggaguuuuacagacuaaaggaa

SEQ ID NO: 922697 - RNA, 22 nt, Human
agggcagcgcggggccucuggu

SEQ ID NO: 922698 - RNA, 18 nt, Human
agguucuggcugagccug

SEQ ID NO: 922699 - RNA, 22 nt, Human
auaaaugagccaccaugagcaa

SEQ ID NO: 922700 - RNA, 22 nt, Human
auacagaguuuuaauuuuuuuu

SEQ ID NO: 922701 - RNA, 24 nt, Human
auacuugguggcaaauguuaucca

SEQ ID NO: 922702 - RNA, 22 nt, Human
auccccaaaaaggcaaaagcug

SEQ ID NO: 922703 - RNA, 20 nt, Human
augugugugugugugugugu

SEQ ID NO: 922704 - RNA, 24 nt, Human
caaaaagaucggaaaaccuaaaca

SEQ ID NO: 922705 - RNA, 23 nt, Human
caaagagcagaucccaugaccaa

SEQ ID NO: 922706 - RNA, 23 nt, Human
caagaauagagcugggaucucaa

SEQ ID NO: 922707 - RNA, 23 nt, Human
caagaucagacagcagagugaac

SEQ ID NO: 922708 - RNA, 20 nt, Human
caagcccacccucccaagau

SEQ ID NO: 922709 - RNA, 22 nt, Human
caagcuacuugccagaaacuca

SEQ ID NO: 922710 - RNA, 24 nt, Human
caagggauaaccugcagccggggc

SEQ ID NO: 922711 - RNA, 23 nt, Human
caccaagcauccccaaaaaggca

SEQ ID NO: 922712 - RNA, 22 nt, Human
caccaugagcaagaaacaauga

SEQ ID NO: 922713 - RNA, 21 nt, Human
cacuugcaaugcccaugggaa

SEQ ID NO: 922714 - RNA, 18 nt, Human
cagcaccugcuuuggaag

SEQ ID NO: 922715 - RNA, 21 nt, Human
cagccagcugcccugcuccug

SEQ ID NO: 922716 - RNA, 18 nt, Human
cagcugagggcugggguu

SEQ ID NO: 922717 - RNA, 18 nt, Human
cagcugcccugcuccugg

SEQ ID NO: 922718 - RNA, 18 nt, Human
cagcuuagcagguccccu

SEQ ID NO: 922719 - RNA, 20 nt, Human
cagcuuaucggguacaccaa

SEQ ID NO: 922720 - RNA, 19 nt, Human
caggacaggggacacaccc

SEQ ID NO: 922721 - RNA, 21 nt, Human
caggccccgcacgguggcacu

SEQ ID NO: 922722 - RNA, 18 nt, Human
caggcugggagccccugg

SEQ ID NO: 922723 - RNA, 18 nt, Human
caguacgugccuucagug

SEQ ID NO: 922724 - RNA, 23 nt, Human
caguagggggcuaagaaugacaa

SEQ ID NO: 922725 - RNA, 21 nt, Human
caguccucccuccccagcacc

SEQ ID NO: 922726 - RNA, 23 nt, Human
caguuaccucccucccucuagga

SEQ ID NO: 922727 - RNA, 23 nt, Human
cauuuuuacacaaagcugcugau

SEQ ID NO: 922728 - RNA, 22 nt, Human
ccaacucuagcccuaccauggc

SEQ ID NO: 922729 - RNA, 20 nt, Human
ccaagcuacuugccagaaac

SEQ ID NO: 922730 - RNA, 28 nt, Human
ccagggcagcgcggggccucuggugggg

SEQ ID NO: 922731 - RNA, 20 nt, Human
ccaguaaaacccagugaccu

SEQ ID NO: 922732 - RNA, 19 nt, Human
ccauuggagccuuugcucu

SEQ ID NO: 922733 - RNA, 20 nt, Human
cccaacucuagcccuaccau

SEQ ID NO: 922734 - RNA, 26 nt, Human
cccaaguuacaaauagcaagaguuaa

SEQ ID NO: 922735 - RNA, 25 nt, Human
cccaugccaugggcaucuccaaagg

SEQ ID NO: 922736 - RNA, 26 nt, Human
ccccuggauggucacacagcuggcuc

SEQ ID NO: 922737 - RNA, 23 nt, Human
cccgggaucccgagcacugacuc

SEQ ID NO: 922738 - RNA, 25 nt, Human
cccuggcugggggcuaggagcucau

SEQ ID NO: 922739 - RNA, 20 nt, Human
ccugagauguugaagagccc

SEQ ID NO: 922740 - RNA, 21 nt, Human
ccugaugcugagaaccucucc

SEQ ID NO: 922741 - RNA, 19 nt, Human
ccugggccgccuccacccc

SEQ ID NO: 922742 - RNA, 18 nt, Human
ccugucagguguggcugg

SEQ ID NO: 922743 - RNA, 18 nt, Human
ccuguuccagccacagcc

SEQ ID NO: 922744 - RNA, 20 nt, Human
ccuugugucagauggcagac

SEQ ID NO: 922745 - RNA, 18 nt, Human
cgggaucccgagcacuga

SEQ ID NO: 922746 - RNA, 19 nt, Human
cuaaacagcucucuccuga

SEQ ID NO: 922747 - RNA, 18 nt, Human
cucauagacugagaaaga

SEQ ID NO: 922748 - RNA, 19 nt, Human
cuccaaaggggguccuggg

SEQ ID NO: 922749 - RNA, 21 nt, Human
cuccagggacaugugcccccu

SEQ ID NO: 922750 - RNA, 19 nt, Human
cucccagcucccgaaucca

SEQ ID NO: 922751 - RNA, 24 nt, Human
cucccagcucccgaauccaccccc

SEQ ID NO: 922752 - RNA, 23 nt, Human
cucccgaauccaccccugccaug

SEQ ID NO: 922753 - RNA, 25 nt, Human
cucccuggaaaagcauuccaaugga

SEQ ID NO: 922754 - RNA, 23 nt, Human
cugaaaagcagagcccaccucuc

SEQ ID NO: 922755 - RNA, 18 nt, Human
cugcagcuuaucggguac

SEQ ID NO: 922756 - RNA, 23 nt, Human
cuggaugaugucugccuggaacc

SEQ ID NO: 922757 - RNA, 21 nt, Human
cugucuucagccuccugggcc

SEQ ID NO: 922758 - RNA, 20 nt, Human
gaaccuaacguagaggcugg

SEQ ID NO: 922759 - RNA, 24 nt, Human
gaacucaaaagggcugacuggcag

SEQ ID NO: 922760 - RNA, 24 nt, Human
gaagugaauucaguuaccucccuc

SEQ ID NO: 922761 - RNA, 19 nt, Human
gaccuugucccccucccac

SEQ ID NO: 922762 - RNA, 21 nt, Human
gagcaagggauaaccugcagc

SEQ ID NO: 922763 - RNA, 19 nt, Human
gaggccacgacaggccuug

SEQ ID NO: 922764 - RNA, 19 nt, Human
gagguucuggcugagccug

SEQ ID NO: 922765 - RNA, 24 nt, Human
gagguucuggcugagccugugggc

SEQ ID NO: 922766 - RNA, 18 nt, Human
gaucccgagcacugacuc

SEQ ID NO: 922767 - RNA, 21 nt, Human
gcacacaugacugauggaggu

SEQ ID NO: 922768 - RNA, 24 nt, Human
gcagaaguguggcucucaacaagg

SEQ ID NO: 922769 - RNA, 19 nt, Human
gcaucacucaggcucccug

SEQ ID NO: 922770 - RNA, 21 nt, Human
gcccaccucuccccagcugcc

SEQ ID NO: 922771 - RNA, 21 nt, Human
gcggagggcugggggucugca

SEQ ID NO: 922772 - RNA, 20 nt, Human
gcuagcacggugcaccgggg

SEQ ID NO: 922773 - RNA, 22 nt, Human
gcucccugaaguccagcucccu

SEQ ID NO: 922774 - RNA, 24 nt, Human
ggaaagcuccccagggacuuaaag

SEQ ID NO: 922775 - RNA, 21 nt, Human
ggaagcuccucacuuagcuuc

SEQ ID NO: 922776 - RNA, 18 nt, Human
ggagaacagccauucaca

SEQ ID NO: 922777 - RNA, 18 nt, Human
ggaggguuggcugagaug

SEQ ID NO: 922778 - RNA, 22 nt, Human
ggcugagccugugggcagugcc

SEQ ID NO: 922779 - RNA, 27 nt, Human
gggaaucagcugggauuccucgugucg

SEQ ID NO: 922780 - RNA, 23 nt, Human
gggccagggcagcgcggggccuc

SEQ ID NO: 922781 - RNA, 20 nt, Human
ggggucacuuuugcagaguc

SEQ ID NO: 922782 - RNA, 19 nt, Human
gguggagguggccugaugc

SEQ ID NO: 922783 - RNA, 19 nt, Human
ggugggagguggaggcagg

SEQ ID NO: 922784 - RNA, 20 nt, Human
guagcccugggccuagaguu

SEQ ID NO: 922785 - RNA, 18 nt, Human
gucacuuuugcagaguca

SEQ ID NO: 922786 - RNA, 20 nt, Human
gugaaccaggaggccacgac

SEQ ID NO: 922787 - RNA, 22 nt, Human
gugcaggcugggagccccuggg

SEQ ID NO: 922788 - RNA, 22 nt, Human
guggaagggggugggaggugga

SEQ ID NO: 922789 - RNA, 24 nt, Human
guggcugguggcucagacuuuggg

SEQ ID NO: 922790 - RNA, 18 nt, Human
gugugugugugugugugu

SEQ ID NO: 922791 - RNA, 20 nt, Human
uaaaacccagugaccuugau

SEQ ID NO: 922792 - RNA, 19 nt, Human
uacaccaagagguucuggc

SEQ ID NO: 922793 - RNA, 19 nt, Human
uacaccaguggcuucuggu

SEQ ID NO: 922794 - RNA, 19 nt, Human
uagagucccccaaagaugc

SEQ ID NO: 922795 - RNA, 24 nt, Human
uauaugugugugugugugugugag

SEQ ID NO: 922796 - RNA, 21 nt, Human
uauauuagacucucuugauug

SEQ ID NO: 922797 - RNA, 18 nt, Human
uaugugugugugugugug

SEQ ID NO: 922798 - RNA, 21 nt, Human
uaugugugugugugugugugu

SEQ ID NO: 922799 - RNA, 19 nt, Human
ucacacagcuggcuccugg

SEQ ID NO: 922800 - RNA, 18 nt, Human
ucacucaggcucccugaa

SEQ ID NO: 922801 - RNA, 18 nt, Human
ucagacagcagagugaac

SEQ ID NO: 922802 - RNA, 19 nt, Human
ucaucuacccauguagauu

SEQ ID NO: 922803 - RNA, 20 nt, Human
ucauuggagguuggucucca

SEQ ID NO: 922804 - RNA, 22 nt, Human
uccaccccuacucuagaauaca

SEQ ID NO: 922805 - RNA, 19 nt, Human
ucccaaggaaaggcuuuga

SEQ ID NO: 922806 - RNA, 23 nt, Human
ucccacacccuucugccuuugac

SEQ ID NO: 922807 - RNA, 22 nt, Human
ucccagcucccgaauccacccc

SEQ ID NO: 922808 - RNA, 20 nt, Human
uccccagccagggcuguugg

SEQ ID NO: 922809 - RNA, 22 nt, Human
uccccagcugcccugacaccuc

SEQ ID NO: 922810 - RNA, 23 nt, Human
ucccccuccaccccuggaugguc

SEQ ID NO: 922811 - RNA, 19 nt, Human
uccgcagaaccuaacguag

SEQ ID NO: 922812 - RNA, 19 nt, Human
uccugggccgccuccaccc

SEQ ID NO: 922813 - RNA, 19 nt, Human
ucuaagcccccuugcuucc

SEQ ID NO: 922814 - RNA, 22 nt, Human
ucuauccuggcauuggggugga

SEQ ID NO: 922815 - RNA, 23 nt, Human
ucuccccagcugcccugacaccu

SEQ ID NO: 922816 - RNA, 21 nt, Human
ucuggauauucacaaagaccc

SEQ ID NO: 922817 - RNA, 18 nt, Human
ucugugcaccugucuuca

SEQ ID NO: 922818 - RNA, 20 nt, Human
ugaaaacaugagccaaugcc

SEQ ID NO: 922819 - RNA, 19 nt, Human
ugaaaagcagagcccaccu

SEQ ID NO: 922820 - RNA, 22 nt, Human
ugaaaguuccagauggaccugg

SEQ ID NO: 922821 - RNA, 18 nt, Human
ugaaggaagcagcaacuu

SEQ ID NO: 922822 - RNA, 20 nt, Human
ugaaguccagcucccucucu

SEQ ID NO: 922823 - RNA, 20 nt, Human
ugacaaagagcagaucccau

SEQ ID NO: 922824 - RNA, 23 nt, Human
ugacaugcauguacugauccgga

SEQ ID NO: 922825 - RNA, 24 nt, Human
ugaccauuggagccuuugcucuua

SEQ ID NO: 922826 - RNA, 24 nt, Human
ugagacucugagucuuaacuucca

SEQ ID NO: 922827 - RNA, 23 nt, Human
ugagaugggcugggcugaaacag

SEQ ID NO: 922828 - RNA, 18 nt, Human
ugagggcuggggucugag

SEQ ID NO: 922829 - RNA, 20 nt, Human
ugagggcuggggucugaguu

SEQ ID NO: 922830 - RNA, 18 nt, Human
ugaguuccucugaaaagc

SEQ ID NO: 922831 - RNA, 21 nt, Human
ugaugcugaaggaagcagcaa

SEQ ID NO: 922832 - RNA, 18 nt, Human
ugcagacacuuugccuca

SEQ ID NO: 922833 - RNA, 20 nt, Human
ugcagcuacucaguaaauua

SEQ ID NO: 922834 - RNA, 20 nt, Human
ugcagucacucccaugggcc

SEQ ID NO: 922835 - RNA, 25 nt, Human
ugcauguacugauccggagaagccu

SEQ ID NO: 922836 - RNA, 19 nt, Human
ugccauaggaccugggucc

SEQ ID NO: 922837 - RNA, 20 nt, Human
ugcccugacaccuccccagg

SEQ ID NO: 922838 - RNA, 21 nt, Human
ugcccuggggcaggggagacc

SEQ ID NO: 922839 - RNA, 23 nt, Human
ugccucaggugacuugaauggga

SEQ ID NO: 922840 - RNA, 22 nt, Human
ugcucuaggagagagagcagga

SEQ ID NO: 922841 - RNA, 23 nt, Human
uggacccaaggcccaccggugcc

SEQ ID NO: 922842 - RNA, 19 nt, Human
uggaggcaggcuggccccu

SEQ ID NO: 922843 - RNA, 20 nt, Human
uggauauucacaaagacccc

SEQ ID NO: 922844 - RNA, 21 nt, Human
uggauauucacaaagacccca

SEQ ID NO: 922845 - RNA, 19 nt, Human
uggauuaaacagugcagag

SEQ ID NO: 922846 - RNA, 25 nt, Human
uggauucgcagacuuggggcaucac

SEQ ID NO: 922847 - RNA, 21 nt, Human
uggcaaggggcuacguggaaa

SEQ ID NO: 922848 - RNA, 22 nt, Human
uggcacuugcaaugcccauggg

SEQ ID NO: 922849 - RNA, 20 nt, Human
uggcagcuggaagcaacucc

SEQ ID NO: 922850 - RNA, 20 nt, Human
uggcaugggcagaagugugg

SEQ ID NO: 922851 - RNA, 26 nt, Human
uggcucccucugaacacagcgaggac

SEQ ID NO: 922852 - RNA, 18 nt, Human
uggcugaaaacaugagcc

SEQ ID NO: 922853 - RNA, 20 nt, Human
uggcugaaggcagcuaucac

SEQ ID NO: 922854 - RNA, 19 nt, Human
uggcugagaugggcugggc

SEQ ID NO: 922855 - RNA, 20 nt, Human
ugggaaagcaucacucaggc

SEQ ID NO: 922856 - RNA, 20 nt, Human
ugggagccccugggugaggc

SEQ ID NO: 922857 - RNA, 21 nt, Human
ugggagguggaggcaggcugg

SEQ ID NO: 922858 - RNA, 22 nt, Human
ugggagguggaggcaggcuggc

SEQ ID NO: 922859 - RNA, 22 nt, Human
ugggauucccagccuucugggu

SEQ ID NO: 922860 - RNA, 19 nt, Human
ugggcagccagcugagggc

SEQ ID NO: 922861 - RNA, 23 nt, Human
ugggcagccagcugagggcuggg

SEQ ID NO: 922862 - RNA, 19 nt, Human
uggggagagggcuauagcu

SEQ ID NO: 922863 - RNA, 22 nt, Human
uggggagagggcuauagcuucu

SEQ ID NO: 922864 - RNA, 22 nt, Human
uggggcaucaccacuccugcaa

SEQ ID NO: 922865 - RNA, 18 nt, Human
uggguggagaggaauagc

SEQ ID NO: 922866 - RNA, 21 nt, Human
ugguggggcuggggccucaug

SEQ ID NO: 922867 - RNA, 23 nt, Human
ugguggggcuggggccucauggu

SEQ ID NO: 922868 - RNA, 18 nt, Human
ugguugacuuugccuggu

SEQ ID NO: 922869 - RNA, 21 nt, Human
ugguuuucccccuccaccccu

SEQ ID NO: 922870 - RNA, 21 nt, Human
uguauaugugugugugugugu

SEQ ID NO: 922871 - RNA, 25 nt, Human
uguauaugugugugugugugugugg

SEQ ID NO: 922872 - RNA, 22 nt, Human
ugucacaggccuuggcagcugg

SEQ ID NO: 922873 - RNA, 23 nt, Human
ugucacaggccuuggcagcugga

SEQ ID NO: 922874 - RNA, 22 nt, Human
uguguauaugugugugugugug

SEQ ID NO: 922875 - RNA, 23 nt, Human
uguguguauaugugugugugugu

SEQ ID NO: 922876 - RNA, 24 nt, Human
uguguguauaugugugugugugug

SEQ ID NO: 922877 - RNA, 19 nt, Human
uguguguguauaugugugu

SEQ ID NO: 922878 - RNA, 20 nt, Human
uguguguguauaugugugug

SEQ ID NO: 922879 - RNA, 21 nt, Human
uguguguguauaugugugugu

SEQ ID NO: 922880 - RNA, 24 nt, Human
uguguguguauaugugugugugug

SEQ ID NO: 922881 - RNA, 21 nt, Human
uguguguguguauaugugugu

SEQ ID NO: 922882 - RNA, 21 nt, Human
uguguguguguguauaugugu

SEQ ID NO: 922883 - RNA, 30 nt, Human
uguguguguguguauauguguguguguguu

SEQ ID NO: 922884 - RNA, 18 nt, Human
ugugugugugugugugug

SEQ ID NO: 922885 - RNA, 24 nt, Human
uguguguguguguguguuaaugug

SEQ ID NO: 922886 - RNA, 18 nt, Human
uuaaacagugcagagcag

SEQ ID NO: 922887 - RNA, 18 nt, Human
uucacaguccucccuccc

SEQ ID NO: 922888 - RNA, 21 nt, Human
uuccagcagccaccaagggug

SEQ ID NO: 922889 - RNA, 19 nt, Human
uuccaggaacgaaauugcc

SEQ ID NO: 922890 - RNA, 25 nt, Human
uucccagcaccagccaguaaaaccc

SEQ ID NO: 922891 - RNA, 18 nt, Human
uucccucagaacucccua

SEQ ID NO: 922892 - RNA, 21 nt, Human
uucuaagcccccuugcuuccc

SEQ ID NO: 922893 - RNA, 24 nt, Human
uuguguguguguguauaugugugu

SEQ ID NO: 922894 - RNA, 21 nt, Human
uuuaaggacaaauaaaaggcg

SEQ ID NO: 922895 - RNA, 23 nt, Human
aaaaacagcagcaggagagaggc

SEQ ID NO: 922896 - RNA, 23 nt, Human
aaaacaagagauuuuccccaaaa

SEQ ID NO: 922897 - RNA, 24 nt, Human
aaaggaaggcagcuggggcuugga

SEQ ID NO: 922898 - RNA, 18 nt, Human
aagaaaagagaaccuggg

SEQ ID NO: 922899 - RNA, 24 nt, Human
aagaaucuugccuucccuccuuuc

SEQ ID NO: 922900 - RNA, 22 nt, Human
aagcuugggaauccaaaaggaa

SEQ ID NO: 922901 - RNA, 19 nt, Human
aaggaaggcagcuggggcu

SEQ ID NO: 922902 - RNA, 21 nt, Human
aagggacagcggucccacagc

SEQ ID NO: 922903 - RNA, 24 nt, Human
aauaagaaacaaauccggugucca

SEQ ID NO: 922904 - RNA, 24 nt, Human
acacauccugaagcuugggaaucc

SEQ ID NO: 922905 - RNA, 28 nt, Human
acaccaccacacccucuuucccaugggc

SEQ ID NO: 922906 - RNA, 21 nt, Human
acagcagcaggagagaggccu

SEQ ID NO: 922907 - RNA, 19 nt, Human
acagcuggacacggcacag

SEQ ID NO: 922908 - RNA, 18 nt, Human
acauacacucuuuccagc

SEQ ID NO: 922909 - RNA, 22 nt, Human
acucggggcuggggcgggcgcg

SEQ ID NO: 922910 - RNA, 22 nt, Human
agaaaggauucucccaguugga

SEQ ID NO: 922911 - RNA, 18 nt, Human
agagggcagggcaagaag

SEQ ID NO: 922912 - RNA, 21 nt, Human
agcaaguaaagucagggcuaa

SEQ ID NO: 922913 - RNA, 18 nt, Human
aggagggugggggcuaca

SEQ ID NO: 922914 - RNA, 22 nt, Human
aggcggcgggacucggggcugg

SEQ ID NO: 922915 - RNA, 23 nt, Human
auacauacacucuuuccagcaug

SEQ ID NO: 922916 - RNA, 20 nt, Human
auguaucugggcaagcugag

SEQ ID NO: 922917 - RNA, 24 nt, Human
caaaaacagcagcaggagagaggc

SEQ ID NO: 922918 - RNA, 18 nt, Human
caagauaccuccuccucu

SEQ ID NO: 922919 - RNA, 24 nt, Human
caagcugaggcccaggaggaggcc

SEQ ID NO: 922920 - RNA, 18 nt, Human
caauaagaaaagagaacc

SEQ ID NO: 922921 - RNA, 24 nt, Human
cacacccucuuucccaugggccaa

SEQ ID NO: 922922 - RNA, 18 nt, Human
caccacacccucuuuccc

SEQ ID NO: 922923 - RNA, 22 nt, Human
caccaccacacccucuuuccca

SEQ ID NO: 922924 - RNA, 23 nt, Human
cacccucuuucccaugggccaag

SEQ ID NO: 922925 - RNA, 21 nt, Human
cacccucuuucccaugggccu

SEQ ID NO: 922926 - RNA, 21 nt, Human
cagaggcagcuuggcaggagg

SEQ ID NO: 922927 - RNA, 19 nt, Human
cagcagcaggagagaggcc

SEQ ID NO: 922928 - RNA, 21 nt, Human
cagggagggggaaagaaucuu

SEQ ID NO: 922929 - RNA, 25 nt, Human
caugggccucuucauuaauagccac

SEQ ID NO: 922930 - RNA, 22 nt, Human
ccaccuaucugacccucaucuc

SEQ ID NO: 922931 - RNA, 23 nt, Human
ccacuaccugggaaaaucaaaaa

SEQ ID NO: 922932 - RNA, 21 nt, Human
ccaguuggaaaagaaggaaag

SEQ ID NO: 922933 - RNA, 21 nt, Human
cccacagcuggaagagggaac

SEQ ID NO: 922934 - RNA, 18 nt, Human
ccccaaaagugaaggaau

SEQ ID NO: 922935 - RNA, 21 nt, Human
cccgcgcugcggcgggaggga

SEQ ID NO: 922936 - RNA, 26 nt, Human
cccggccccagcccggcgcgcucggc

SEQ ID NO: 922937 - RNA, 20 nt, Human
cccuccuuuccucucuccca

SEQ ID NO: 922938 - RNA, 23 nt, Human
cccuggaaguuaguccucccacc

SEQ ID NO: 922939 - RNA, 18 nt, Human
ccgcuccgcuccggcccc

SEQ ID NO: 922940 - RNA, 20 nt, Human
ccggccccagcccggcgcgc

SEQ ID NO: 922941 - RNA, 22 nt, Human
ccggccccggccccagcccggc

SEQ ID NO: 922942 - RNA, 23 nt, Human
cgcuccggccccggccccagccc

SEQ ID NO: 922943 - RNA, 18 nt, Human
cgggcgcgcucccucucc

SEQ ID NO: 922944 - RNA, 21 nt, Human
cguuccucaauaagaaaagag

SEQ ID NO: 922945 - RNA, 23 nt, Human
cucaggcucugcucuugccucug

SEQ ID NO: 922946 - RNA, 19 nt, Human
cucccaccuaucugacccu

SEQ ID NO: 922947 - RNA, 19 nt, Human
cucccagcucgcggcuccg

SEQ ID NO: 922948 - RNA, 23 nt, Human
cucccucauauauauauauauau

SEQ ID NO: 922949 - RNA, 24 nt, Human
cucccucauauauauauauauaua

SEQ ID NO: 922950 - RNA, 25 nt, Human
cuccgcuccggccccggccccagcc

SEQ ID NO: 922951 - RNA, 21 nt, Human
cucggcucccggcucccggcc

SEQ ID NO: 922952 - RNA, 23 nt, Human
cucucccacuaccugggaaaauc

SEQ ID NO: 922953 - RNA, 24 nt, Human
cucuccgcuccgcuccggccccgg

SEQ ID NO: 922954 - RNA, 20 nt, Human
cugcggcgggagggaaggcg

SEQ ID NO: 922955 - RNA, 22 nt, Human
cuggggcgggcgcgcucccucu

SEQ ID NO: 922956 - RNA, 23 nt, Human
cuuuccagcaugauaaaaucugg

SEQ ID NO: 922957 - RNA, 21 nt, Human
gacccucaucucucuucccac

SEQ ID NO: 922958 - RNA, 21 nt, Human
gagggugggggcuacagagag

SEQ ID NO: 922959 - RNA, 19 nt, Human
gcagcaggagagaggccug

SEQ ID NO: 922960 - RNA, 18 nt, Human
gcucccggcacagcgcuc

SEQ ID NO: 922961 - RNA, 19 nt, Human
gcuggggcgggcgcgcucc

SEQ ID NO: 922962 - RNA, 18 nt, Human
ggacucggggcuggggcg

SEQ ID NO: 922963 - RNA, 19 nt, Human
ggacucggggcuggggcgg

SEQ ID NO: 922964 - RNA, 23 nt, Human
ggcaagaaggcagggagaaagga

SEQ ID NO: 922965 - RNA, 24 nt, Human
ggcccaggaggaggccccgagggc

SEQ ID NO: 922966 - RNA, 20 nt, Human
ggccggugggcccgcgcugc

SEQ ID NO: 922967 - RNA, 20 nt, Human
ggccggugggcccgcgcugc

SEQ ID NO: 922968 - RNA, 23 nt, Human
ggcgcgcucggcucccggcuccc

SEQ ID NO: 922969 - RNA, 23 nt, Human
gggaacacauccugaagcuuggg

SEQ ID NO: 922970 - RNA, 21 nt, Human
gggaaggcggcgggacucggg

SEQ ID NO: 922971 - RNA, 18 nt, Human
gggacagcggucccacag

SEQ ID NO: 922972 - RNA, 23 nt, Human
gggacucggggcuggggcgggcg

SEQ ID NO: 922973 - RNA, 21 nt, Human
gggcucauaguagcugcaugg

SEQ ID NO: 922974 - RNA, 19 nt, Human
gggcuggggcgggcgcgcu

SEQ ID NO: 922975 - RNA, 21 nt, Human
uacagagagggcagggcaaga

SEQ ID NO: 922976 - RNA, 23 nt, Human
uaccugggaaaaucaaaaacagc

SEQ ID NO: 922977 - RNA, 21 nt, Human
uaggacaagggaacccuucca

SEQ ID NO: 922978 - RNA, 22 nt, Human
uccagcugcagggcaggccugu

SEQ ID NO: 922979 - RNA, 19 nt, Human
uccauuguugcuaacgggu

SEQ ID NO: 922980 - RNA, 19 nt, Human
ucccaagauaccuccuccu

SEQ ID NO: 922981 - RNA, 19 nt, Human
ucccaccuaucugacccuc

SEQ ID NO: 922982 - RNA, 18 nt, Human
ucccagaggcagcuuggc

SEQ ID NO: 922983 - RNA, 18 nt, Human
ucccaugggccaagugcc

SEQ ID NO: 922984 - RNA, 19 nt, Human
ucccaugggccaagugcca

SEQ ID NO: 922985 - RNA, 22 nt, Human
uccccaaaagugaaggaauaag

SEQ ID NO: 922986 - RNA, 23 nt, Human
ucuaggacaagggaacccuucca

SEQ ID NO: 922987 - RNA, 25 nt, Human
ucuguaccacaugcuucagcaggga

SEQ ID NO: 922988 - RNA, 19 nt, Human
ugaaggaauaagaaacaaa

SEQ ID NO: 922989 - RNA, 19 nt, Human
ugagacaguuucuucucuu

SEQ ID NO: 922990 - RNA, 21 nt, Human
ugaggcccaggaggaggcccc

SEQ ID NO: 922991 - RNA, 21 nt, Human
ugcauucccaaacugcagucu

SEQ ID NO: 922992 - RNA, 21 nt, Human
ugccaaggaccuaacaccaaa

SEQ ID NO: 922993 - RNA, 24 nt, Human
ugccuucccuccuuuccucucucc

SEQ ID NO: 922994 - RNA, 24 nt, Human
ugcggcgggagggaaggcggcggg

SEQ ID NO: 922995 - RNA, 19 nt, Human
uggaaaagaaggaaagugc

SEQ ID NO: 922996 - RNA, 18 nt, Human
uggcaggagggugggggc

SEQ ID NO: 922997 - RNA, 24 nt, Human
uggcaggagggugggggcuacaga

SEQ ID NO: 922998 - RNA, 20 nt, Human
uggccgugagaucugagaca

SEQ ID NO: 922999 - RNA, 19 nt, Human
ugggggcuacagagagggc

SEQ ID NO: 923000 - RNA, 21 nt, Human
uuaauagccacuguguucucu

SEQ ID NO: 923001 - RNA, 22 nt, Human
uuccuucuuggcacccuggaag

SEQ ID NO: 923002 - RNA, 19 nt, Human
uucuuccuucuuggcaccc

SEQ ID NO: 923003 - RNA, 18 nt, Human
uuggcaggaggguggggg

SEQ ID NO: 923004 - RNA, 23 nt, Human
uuucuuccuucccagaggcagcu

SEQ ID NO: 923005 - RNA, 21 nt, Human
uuucuuccuucuuggcacccu

SEQ ID NO: 923006 - RNA, 20 nt, Human
uuuuuuguguguucacuggg

SEQ ID NO: 923007 - RNA, 18 nt, Human
uuuuuuuuuuuguguguu

SEQ ID NO: 923008 - RNA, 20 nt, Human
uuuuuuuuuuuuuuugugug

SEQ ID NO: 923009 - RNA, 26 nt, Human
aaaacgcaacaaagaggucucugcca

SEQ ID NO: 923010 - RNA, 24 nt, Human
aaaacgccuuaguccuggacccug

SEQ ID NO: 923011 - RNA, 22 nt, Human
aaacaagcaaacacagaccagc

SEQ ID NO: 923012 - RNA, 23 nt, Human
aaagcacaaaacgcaacaaagag

SEQ ID NO: 923013 - RNA, 18 nt, Human
aagcacaaaacgcaacaa

SEQ ID NO: 923014 - RNA, 20 nt, Human
aaggggcagagcagcugggg

SEQ ID NO: 923015 - RNA, 22 nt, Human
acgcaacaaagaggucucugcc

SEQ ID NO: 923016 - RNA, 20 nt, Human
acgggagggguucaggccug

SEQ ID NO: 923017 - RNA, 18 nt, Human
agagcagcugggggacaa

SEQ ID NO: 923018 - RNA, 23 nt, Human
agcugggggacaaggaaaaccug

SEQ ID NO: 923019 - RNA, 22 nt, Human
aggaaaguggguagaaaagggg

SEQ ID NO: 923020 - RNA, 21 nt, Human
caaacaagcaaacacagacca

SEQ ID NO: 923021 - RNA, 20 nt, Human
caaagcacaaaacgcaacaa

SEQ ID NO: 923022 - RNA, 19 nt, Human
cacaaaacgcaacaaagag

SEQ ID NO: 923023 - RNA, 19 nt, Human
caccucccucccucagccu

SEQ ID NO: 923024 - RNA, 21 nt, Human
cagccaaaggugggcaaacaa

SEQ ID NO: 923025 - RNA, 21 nt, Human
caguccaucuuccaggcaccc

SEQ ID NO: 923026 - RNA, 21 nt, Human
caucaaagcacaaaacgcaac

SEQ ID NO: 923027 - RNA, 22 nt, Human
caucaaagcacaaaacgcaaca

SEQ ID NO: 923028 - RNA, 24 nt, Human
ccaggcacccaggaggagcaaggg

SEQ ID NO: 923029 - RNA, 23 nt, Human
ccccagaucuuaggguccugccc

SEQ ID NO: 923030 - RNA, 19 nt, Human
ccccaggcucucgggacuc

SEQ ID NO: 923031 - RNA, 21 nt, Human
ccccaggcucucgggacucgg

SEQ ID NO: 923032 - RNA, 19 nt, Human
cccgggcugggcgcgcccc

SEQ ID NO: 923033 - RNA, 19 nt, Human
cccguccuucuccaccucc

SEQ ID NO: 923034 - RNA, 20 nt, Human
cccguccuucuccaccuccc

SEQ ID NO: 923035 - RNA, 23 nt, Human
cccguccuucuccaccucccucc

SEQ ID NO: 923036 - RNA, 20 nt, Human
ccgccgaggggagggcgcgg

SEQ ID NO: 923037 - RNA, 21 nt, Human
ccgccgaggggagggcgcggg

SEQ ID NO: 923038 - RNA, 20 nt, Human
ccuccacuuccuccugggag

SEQ ID NO: 923039 - RNA, 20 nt, Human
ccucccucagccucuccucc

SEQ ID NO: 923040 - RNA, 21 nt, Human
ccucgcucccucgcgcucccc

SEQ ID NO: 923041 - RNA, 19 nt, Human
ccucucccguccuucucca

SEQ ID NO: 923042 - RNA, 19 nt, Human
ccucuccgcgugugucucu

SEQ ID NO: 923043 - RNA, 18 nt, Human
ccucucucugccucuccc

SEQ ID NO: 923044 - RNA, 21 nt, Human
ccucugccgggcucacccucc

SEQ ID NO: 923045 - RNA, 21 nt, Human
ccugcccugugggucuccugu

SEQ ID NO: 923046 - RNA, 24 nt, Human
ccuguucccgguuuucuggauuuu

SEQ ID NO: 923047 - RNA, 22 nt, Human
cgacucggggucccggcggcgg

SEQ ID NO: 923048 - RNA, 18 nt, Human
cgaggggagggcgcggga

SEQ ID NO: 923049 - RNA, 22 nt, Human
cgcccccaggcucucgggacuc

SEQ ID NO: 923050 - RNA, 19 nt, Human
cgcccgggcugggcgcgcc

SEQ ID NO: 923051 - RNA, 24 nt, Human
cggggugggcgguggggcuggggu

SEQ ID NO: 923052 - RNA, 26 nt, Human
cguccuucuccaccucccucccucaa

SEQ ID NO: 923053 - RNA, 22 nt, Human
cucaggaccuccuuuccccaga

SEQ ID NO: 923054 - RNA, 25 nt, Human
cucaggaccuccuuuccccagaucu

SEQ ID NO: 923055 - RNA, 20 nt, Human
cucccucgcgcuccccggcc

SEQ ID NO: 923056 - RNA, 20 nt, Human
cuccgcgugugucucugccu

SEQ ID NO: 923057 - RNA, 23 nt, Human
cugcccugugggucuccuguguc

SEQ ID NO: 923058 - RNA, 21 nt, Human
cugccgggcucacccuccggu

SEQ ID NO: 923059 - RNA, 30 nt, Human
cuggagucagggaagaaggggaaaggggcc

SEQ ID NO: 923060 - RNA, 20 nt, Human
cuggcaggggugggcaucag

SEQ ID NO: 923061 - RNA, 22 nt, Human
cuggcgccccccgcugugugcc

SEQ ID NO: 923062 - RNA, 23 nt, Human
cugucucacaucccaccucccgc

SEQ ID NO: 923063 - RNA, 23 nt, Human
cugugccucgcucccucgcgcuc

SEQ ID NO: 923064 - RNA, 22 nt, Human
gcaucaaagcacaaaacgcaac

SEQ ID NO: 923065 - RNA, 18 nt, Human
gcauuccuggcaucaaag

SEQ ID NO: 923066 - RNA, 18 nt, Human
gcccgggcugggcgcgcc

SEQ ID NO: 923067 - RNA, 21 nt, Human
gcggcgagaggaggaggaggg

SEQ ID NO: 923068 - RNA, 24 nt, Human
ggaagaaggggaaaggggcagagc

SEQ ID NO: 923069 - RNA, 19 nt, Human
ggcgguggggcuggggugc

SEQ ID NO: 923070 - RNA, 18 nt, Human
ggcuggggugcgcgacuc

SEQ ID NO: 923071 - RNA, 20 nt, Human
gggcgcgggagcgggaggag

SEQ ID NO: 923072 - RNA, 22 nt, Human
gggcgcgggagcgggaggaggg

SEQ ID NO: 923073 - RNA, 21 nt, Human
gggcugugcggcgagaggagg

SEQ ID NO: 923074 - RNA, 21 nt, Human
ggggaguagaauugugaaggg

SEQ ID NO: 923075 - RNA, 21 nt, Human
ggggugggcgguggggcuggg

SEQ ID NO: 923076 - RNA, 23 nt, Human
gggugggcgguggggcuggggug

SEQ ID NO: 923077 - RNA, 20 nt, Human
ggugauuaagggaagauucc

SEQ ID NO: 923078 - RNA, 22 nt, Human
ggugggcgguggggcuggggug

SEQ ID NO: 923079 - RNA, 18 nt, Human
gucagggaagaaggggaa

SEQ ID NO: 923080 - RNA, 22 nt, Human
guccuucuccaccucccucccu

SEQ ID NO: 923081 - RNA, 18 nt, Human
gucugugcugggcucccc

SEQ ID NO: 923082 - RNA, 23 nt, Human
gugcggcgagaggaggaggaggg

SEQ ID NO: 923083 - RNA, 23 nt, Human
gugcugggcucccccgcgcaggc

SEQ ID NO: 923084 - RNA, 20 nt, Human
uagcaggcgaggggaagagc

SEQ ID NO: 923085 - RNA, 22 nt, Human
uccaggggagaggaucugggga

SEQ ID NO: 923086 - RNA, 23 nt, Human
uccaucuuccaggcacccaggag

SEQ ID NO: 923087 - RNA, 18 nt, Human
ucccucagccucuccucc

SEQ ID NO: 923088 - RNA, 19 nt, Human
uccugagugucucugcgug

SEQ ID NO: 923089 - RNA, 19 nt, Human
ucgcugagccaggucugug

SEQ ID NO: 923090 - RNA, 19 nt, Human
ucucggugucucuccccuc

SEQ ID NO: 923091 - RNA, 19 nt, Human
ucucggugucucuccccuc

SEQ ID NO: 923092 - RNA, 20 nt, Human
ucucucugccucucccgucc

SEQ ID NO: 923093 - RNA, 20 nt, Human
ucucucugccucucccgucc

SEQ ID NO: 923094 - RNA, 18 nt, Human
ugacuggcaggggugggc

SEQ ID NO: 923095 - RNA, 21 nt, Human
ugacuggcaggggugggcauc

SEQ ID NO: 923096 - RNA, 22 nt, Human
ugccaguccaucuuccaggcac

SEQ ID NO: 923097 - RNA, 20 nt, Human
ugcccugugggucuccugug

SEQ ID NO: 923098 - RNA, 21 nt, Human
ugccgggcucacccuccgguc

SEQ ID NO: 923099 - RNA, 19 nt, Human
uggcaggggugggcaucag

SEQ ID NO: 923100 - RNA, 22 nt, Human
uggcaucaaagcacaaaacgca

SEQ ID NO: 923101 - RNA, 18 nt, Human
ugggcgguggggcugggg

SEQ ID NO: 923102 - RNA, 21 nt, Human
ugucucacaucccaccucccg

SEQ ID NO: 923103 - RNA, 18 nt, Human
ugucucugccucugccgg

SEQ ID NO: 923104 - RNA, 24 nt, Human
uguguccaggggagaggaucuggg

SEQ ID NO: 923105 - RNA, 19 nt, Human
ugugugccccaccggggac

SEQ ID NO: 923106 - RNA, 23 nt, Human
uucucaggaccuccuuuccccag

SEQ ID NO: 923107 - RNA, 21 nt, Human
aaaaaaccaacuuccuacaag

SEQ ID NO: 923108 - RNA, 21 nt, Human
aaaaccaaaacaaaacaacaa

SEQ ID NO: 923109 - RNA, 24 nt, Human
aaacaaaacaacaacaaaaacaaa

SEQ ID NO: 923110 - RNA, 20 nt, Human
aaacaaaaccaaaacaaaac

SEQ ID NO: 923111 - RNA, 23 nt, Human
aaacaacaacaaaaacaaccuaa

SEQ ID NO: 923112 - RNA, 25 nt, Human
aaacaaccuaacccaaccacaaaac

SEQ ID NO: 923113 - RNA, 24 nt, Human
aaacagaaaauaaaagaggggacc

SEQ ID NO: 923114 - RNA, 21 nt, Human
aaaccaaaacaaaacaacaac

SEQ ID NO: 923115 - RNA, 24 nt, Human
aaaccaaaacaaaacaacaacaaa

SEQ ID NO: 923116 - RNA, 25 nt, Human
aaaccaaaacaaaacaacaacaaaa

SEQ ID NO: 923117 - RNA, 25 nt, Human
aaagucauugagcuuucgggggaaa

SEQ ID NO: 923118 - RNA, 23 nt, Human
aaagugcagggauuacaggcaua

SEQ ID NO: 923119 - RNA, 19 nt, Human
aaagugcugggauuacagg

SEQ ID NO: 923120 - RNA, 23 nt, Human
aaagugcugggauuacaggcaua

SEQ ID NO: 923121 - RNA, 25 nt, Human
aacaaaaacaaccuaacccaaccac

SEQ ID NO: 923122 - RNA, 18 nt, Human
aacaccccuaaguaaaca

SEQ ID NO: 923123 - RNA, 23 nt, Human
aaccacaaaacucuaggagccaa

SEQ ID NO: 923124 - RNA, 20 nt, Human
aacuccaaaaacaaacaaaa

SEQ ID NO: 923125 - RNA, 26 nt, Human
aagaaagaagugaagaggagggaccc

SEQ ID NO: 923126 - RNA, 18 nt, Human
aagacucuuagcuugaaa

SEQ ID NO: 923127 - RNA, 21 nt, Human
aagccaccacacucggcccca

SEQ ID NO: 923128 - RNA, 19 nt, Human
aaguagcugggacuacagg

SEQ ID NO: 923129 - RNA, 20 nt, Human
aaguagcugggacuacaggc

SEQ ID NO: 923130 - RNA, 25 nt, Human
aaguagcugggacuacaggcgcccg

SEQ ID NO: 923131 - RNA, 19 nt, Human
aagugcugggauuacaggc

SEQ ID NO: 923132 - RNA, 21 nt, Human
aagugcugggauuacaggcau

SEQ ID NO: 923133 - RNA, 26 nt, Human
aagugcugggauuacaggcauaagcc

SEQ ID NO: 923134 - RNA, 21 nt, Human
aaucccauuucucuucugcca

SEQ ID NO: 923135 - RNA, 23 nt, Human
aaucuggaaaauccaagcacaag

SEQ ID NO: 923136 - RNA, 24 nt, Human
aaugacagugcacucugugccucu

SEQ ID NO: 923137 - RNA, 24 nt, Human
aaugcagugacgugaucucggcuc

SEQ ID NO: 923138 - RNA, 20 nt, Human
aaugcaguggugugaucucg

SEQ ID NO: 923139 - RNA, 24 nt, Human
aaugcaguggugugaucucgguuc

SEQ ID NO: 923140 - RNA, 18 nt, Human
acaacaacaaaaacaacc

SEQ ID NO: 923141 - RNA, 26 nt, Human
acaacaacaaaaacaaccuaacccaa

SEQ ID NO: 923142 - RNA, 20 nt, Human
acagcagagauacacgugga

SEQ ID NO: 923143 - RNA, 19 nt, Human
acaggcgcccgccaccacg

SEQ ID NO: 923144 - RNA, 18 nt, Human
acaggguuucaccguguu

SEQ ID NO: 923145 - RNA, 19 nt, Human
acaggguuucaccguguua

SEQ ID NO: 923146 - RNA, 20 nt, Human
acaggguuucaccguguuag

SEQ ID NO: 923147 - RNA, 24 nt, Human
acaggguuucaccguguuagccag

SEQ ID NO: 923148 - RNA, 19 nt, Human
accaaaacaaaacaacaac

SEQ ID NO: 923149 - RNA, 22 nt, Human
accaaacuccaaaaacaaacaa

SEQ ID NO: 923150 - RNA, 22 nt, Human
accauguuggccaggcuggucu

SEQ ID NO: 923151 - RNA, 28 nt, Human
acccaaccacaaaacucuaggagccaaa

SEQ ID NO: 923152 - RNA, 23 nt, Human
accccuaaguaaacaccaaucuu

SEQ ID NO: 923153 - RNA, 18 nt, Human
acgagguuucaccauguu

SEQ ID NO: 923154 - RNA, 20 nt, Human
acgagguuucaccauguugg

SEQ ID NO: 923155 - RNA, 24 nt, Human
acgagguuucaccauguuggccag

SEQ ID NO: 923156 - RNA, 20 nt, Human
acuccaaaaacaaacaaaaa

SEQ ID NO: 923157 - RNA, 24 nt, Human
acuccaaaaacaaacaaaaauaga

SEQ ID NO: 923158 - RNA, 24 nt, Human
acucugucgcucaggcugaaaugc

SEQ ID NO: 923159 - RNA, 21 nt, Human
acugugcuuccacuccucuuc

SEQ ID NO: 923160 - RNA, 21 nt, Human
agaaaacaagagccaauccca

SEQ ID NO: 923161 - RNA, 18 nt, Human
agaaagcucccccuagaa

SEQ ID NO: 923162 - RNA, 18 nt, Human
agacaggguuucaccgug

SEQ ID NO: 923163 - RNA, 18 nt, Human
agagcacccaaagaugaa

SEQ ID NO: 923164 - RNA, 18 nt, Human
agccaccacacucggccc

SEQ ID NO: 923165 - RNA, 22 nt, Human
agccaccacacucggccccaga

SEQ ID NO: 923166 - RNA, 25 nt, Human
aggcgggaaugcaguggugugaucu

SEQ ID NO: 923167 - RNA, 24 nt, Human
aggcugaaaugcagugacgugauc

SEQ ID NO: 923168 - RNA, 22 nt, Human
agggauuacaggcauaagccac

SEQ ID NO: 923169 - RNA, 24 nt, Human
agggauuacaggcauaagccacca

SEQ ID NO: 923170 - RNA, 24 nt, Human
aggugagcugcccgccuuggcuuc

SEQ ID NO: 923171 - RNA, 22 nt, Human
agguucccgccauucuccugcc

SEQ ID NO: 923172 - RNA, 22 nt, Human
agguuucaccauguuggccagg

SEQ ID NO: 923173 - RNA, 20 nt, Human
aguagagacaggguuucacc

SEQ ID NO: 923174 - RNA, 18 nt, Human
agucauugagcuuucggg

SEQ ID NO: 923175 - RNA, 18 nt, Human
agugcugggauuacaggc

SEQ ID NO: 923176 - RNA, 19 nt, Human
auaaaacgugguucugccc

SEQ ID NO: 923177 - RNA, 21 nt, Human
auagccuuaagagcauuuaaa

SEQ ID NO: 923178 - RNA, 19 nt, Human
aucccauuucucuucugca

SEQ ID NO: 923179 - RNA, 22 nt, Human
augaaucucugaaauuucagag

SEQ ID NO: 923180 - RNA, 21 nt, Human
auucuccugccucagccuccc

SEQ ID NO: 923181 - RNA, 22 nt, Human
auuuuguauuuuuaguacagac

SEQ ID NO: 923182 - RNA, 25 nt, Human
caaaaauagaaaauaaaaaaccaac

SEQ ID NO: 923183 - RNA, 22 nt, Human
caaaacaaaacaacaacaaaaa

SEQ ID NO: 923184 - RNA, 23 nt, Human
caaaacaaaacaacaacaaaaac

SEQ ID NO: 923185 - RNA, 22 nt, Human
caaaaccaaaacaaaacaacaa

SEQ ID NO: 923186 - RNA, 19 nt, Human
caaaaguagaagcugaaag

SEQ ID NO: 923187 - RNA, 24 nt, Human
caaagugcagggauuacaggcaua

SEQ ID NO: 923188 - RNA, 24 nt, Human
caaagugcugggauuacaggcaua

SEQ ID NO: 923189 - RNA, 20 nt, Human
caacaaaaacaaccuaaccc

SEQ ID NO: 923190 - RNA, 25 nt, Human
caacaaaaacaaccuaacccaacca

SEQ ID NO: 923191 - RNA, 25 nt, Human
caacaacaaaaacaaccuaacccaa

SEQ ID NO: 923192 - RNA, 22 nt, Human
caaccacaaaacucuaggagcc

SEQ ID NO: 923193 - RNA, 23 nt, Human
caaccuccaccuccuggguucaa

SEQ ID NO: 923194 - RNA, 22 nt, Human
caagugauucuccugccucagc

SEQ ID NO: 923195 - RNA, 21 nt, Human
caccauguuggccaggcuggu

SEQ ID NO: 923196 - RNA, 22 nt, Human
caccauguuggccaggcugguc

SEQ ID NO: 923197 - RNA, 24 nt, Human
caccauguuggccaggcuggucuu

SEQ ID NO: 923198 - RNA, 22 nt, Human
caccccuaaguaaacaccaauc

SEQ ID NO: 923199 - RNA, 21 nt, Human
caccgcgcccggccccaaaau

SEQ ID NO: 923200 - RNA, 18 nt, Human
caccguguuagccaggau

SEQ ID NO: 923201 - RNA, 24 nt, Human
caccguguuagccaggauggucuc

SEQ ID NO: 923202 - RNA, 23 nt, Human
caccugccucggccucccaaagu

SEQ ID NO: 923203 - RNA, 23 nt, Human
caccugggagagguacaaaaaac

SEQ ID NO: 923204 - RNA, 19 nt, Human
cacucugucgcucaggcug

SEQ ID NO: 923205 - RNA, 21 nt, Human
cacugcaaccuccaccuccug

SEQ ID NO: 923206 - RNA, 23 nt, Human
cacugcaaccuccaccuccuggg

SEQ ID NO: 923207 - RNA, 20 nt, Human
cacugcacagugagcagagc

SEQ ID NO: 923208 - RNA, 22 nt, Human
cagaacccugcaaucugugaca

SEQ ID NO: 923209 - RNA, 24 nt, Human
cagagagcacccaaagaugaacac

SEQ ID NO: 923210 - RNA, 20 nt, Human
cagcagcuugcaggaaaggg

SEQ ID NO: 923211 - RNA, 21 nt, Human
caggcgcccgccaccacgccu

SEQ ID NO: 923212 - RNA, 20 nt, Human
cagggccugggcuggguucc

SEQ ID NO: 923213 - RNA, 24 nt, Human
caggguuucaccguguuagccagg

SEQ ID NO: 923214 - RNA, 18 nt, Human
caugaaaucaguuuugcu

SEQ ID NO: 923215 - RNA, 24 nt, Human
cauguuggccaggcuggucuugaa

SEQ ID NO: 923216 - RNA, 24 nt, Human
ccaaagugcagggauuacaggcau

SEQ ID NO: 923217 - RNA, 23 nt, Human
ccaaagugcugggauuacaggca

SEQ ID NO: 923218 - RNA, 24 nt, Human
ccaaagugcugggauuacaggcau

SEQ ID NO: 923219 - RNA, 23 nt, Human
ccaaccacaaaacucuaggagcc

SEQ ID NO: 923220 - RNA, 24 nt, Human
ccaccuccuggguucaagugauuc

SEQ ID NO: 923221 - RNA, 21 nt, Human
ccacgcccugucaccugcagu

SEQ ID NO: 923222 - RNA, 20 nt, Human
ccacguugcuccucccuggc

SEQ ID NO: 923223 - RNA, 22 nt, Human
ccagccaagcacguuaaaguca

SEQ ID NO: 923224 - RNA, 21 nt, Human
ccaguaacagcauaagguaaa

SEQ ID NO: 923225 - RNA, 24 nt, Human
cccaaagugcugggauuacaggca

SEQ ID NO: 923226 - RNA, 23 nt, Human
cccaaguagcugggacuacaggc

SEQ ID NO: 923227 - RNA, 23 nt, Human
cccaaguagcugggacuacaggc

SEQ ID NO: 923228 - RNA, 22 nt, Human
cccgaguagcuggauuacaggc

SEQ ID NO: 923229 - RNA, 23 nt, Human
cccgaguagcuggauuacaggcg

SEQ ID NO: 923230 - RNA, 22 nt, Human
cccgccuuggcuucccaaagug

SEQ ID NO: 923231 - RNA, 26 nt, Human
cccuaaguaaacaccaaucuugccca

SEQ ID NO: 923232 - RNA, 22 nt, Human
ccuccaccuccuggguucaagu

SEQ ID NO: 923233 - RNA, 24 nt, Human
ccucccagguucccgccauucucc

SEQ ID NO: 923234 - RNA, 21 nt, Human
ccuccuggguucaagugauuc

SEQ ID NO: 923235 - RNA, 24 nt, Human
ccuccuggguucaagugauucucc

SEQ ID NO: 923236 - RNA, 18 nt, Human
ccugaccucaggugagcu

SEQ ID NO: 923237 - RNA, 19 nt, Human
ccugaccucgugauccacc

SEQ ID NO: 923238 - RNA, 21 nt, Human
ccugaccucgugauccaccug

SEQ ID NO: 923239 - RNA, 23 nt, Human
ccuggguucaagugauucuccuc

SEQ ID NO: 923240 - RNA, 23 nt, Human
ccuggguucaagugauucuccug

SEQ ID NO: 923241 - RNA, 18 nt, Human
cgcggagaagcccccucc

SEQ ID NO: 923242 - RNA, 21 nt, Human
cgcggagaagcccccucccca

SEQ ID NO: 923243 - RNA, 21 nt, Human
cuaaacacagcagaaaagaug

SEQ ID NO: 923244 - RNA, 24 nt, Human
cucacugcaaccuccaccuccugg

SEQ ID NO: 923245 - RNA, 27 nt, Human
cucacugcaaccuccaccuccuggguu

SEQ ID NO: 923246 - RNA, 24 nt, Human
cucagccucccaaguagcugggac

SEQ ID NO: 923247 - RNA, 24 nt, Human
cuccaaaaacaaacaaaaauagaa

SEQ ID NO: 923248 - RNA, 20 nt, Human
cucccuggccuuccaucucc

SEQ ID NO: 923249 - RNA, 24 nt, Human
cuccugaccucgugauccaccugc

SEQ ID NO: 923250 - RNA, 21 nt, Human
cuccuggguucaagugauucu

SEQ ID NO: 923251 - RNA, 18 nt, Human
cucugucgcucaggcuga

SEQ ID NO: 923252 - RNA, 23 nt, Human
cugcaaccuccaccuccuggguu

SEQ ID NO: 923253 - RNA, 19 nt, Human
cugcacagugagcagagcu

SEQ ID NO: 923254 - RNA, 23 nt, Human
cugccucagccucccaaguagcu

SEQ ID NO: 923255 - RNA, 23 nt, Human
cugccucagccucccgaguagcu

SEQ ID NO: 923256 - RNA, 23 nt, Human
cugccucggccucccaaagugcu

SEQ ID NO: 923257 - RNA, 18 nt, Human
cuggcagagagcacccaa

SEQ ID NO: 923258 - RNA, 19 nt, Human
cuguccugccuugucagaa

SEQ ID NO: 923259 - RNA, 18 nt, Human
cuuagaaagcucccccua

SEQ ID NO: 923260 - RNA, 21 nt, Human
gaaaacaagagccaaucccau

SEQ ID NO: 923261 - RNA, 21 nt, Human
gaaucacagucacgauaaaac

SEQ ID NO: 923262 - RNA, 24 nt, Human
gaccucaggugagcugcccgccuu

SEQ ID NO: 923263 - RNA, 22 nt, Human
gaccucgugauccaccugccuc

SEQ ID NO: 923264 - RNA, 22 nt, Human
gaccucgugauccaccugccuc

SEQ ID NO: 923265 - RNA, 24 nt, Human
gaccucgugauccaccugccucgg

SEQ ID NO: 923266 - RNA, 23 nt, Human
gaggaaaugccugucucaaccac

SEQ ID NO: 923267 - RNA, 23 nt, Human
gagguuucaccauguuggccagg

SEQ ID NO: 923268 - RNA, 28 nt, Human
gauccuuuuauuuucccaaacggggccu

SEQ ID NO: 923269 - RNA, 18 nt, Human
gauuacaggcauaagcca

SEQ ID NO: 923270 - RNA, 18 nt, Human
gauuacaggcauaagcca

SEQ ID NO: 923271 - RNA, 21 nt, Human
gauuacaggcauaagccacca

SEQ ID NO: 923272 - RNA, 22 nt, Human
gauuacaggcauaagccaccgc

SEQ ID NO: 923273 - RNA, 18 nt, Human
gauuacaggcgccugcca

SEQ ID NO: 923274 - RNA, 21 nt, Human
gauucuccugccucagccucc

SEQ ID NO: 923275 - RNA, 22 nt, Human
gcaaccuccaccuccuggguuc

SEQ ID NO: 923276 - RNA, 20 nt, Human
gcaacugugcuuccacuccu

SEQ ID NO: 923277 - RNA, 23 nt, Human
gcagaaaacaagagccaauccca

SEQ ID NO: 923278 - RNA, 19 nt, Human
gccauucuccugccucagc

SEQ ID NO: 923279 - RNA, 20 nt, Human
gccucagccucccaaguagc

SEQ ID NO: 923280 - RNA, 20 nt, Human
gccucagccucccgaguagc

SEQ ID NO: 923281 - RNA, 24 nt, Human
gccuggcuaauuuuuuuguauuuu

SEQ ID NO: 923282 - RNA, 23 nt, Human
gccuuggcuucccaaagugcagg

SEQ ID NO: 923283 - RNA, 19 nt, Human
gcugaaaugcagugacgug

SEQ ID NO: 923284 - RNA, 23 nt, Human
ggaaugcaguggugugaucucgg

SEQ ID NO: 923285 - RNA, 19 nt, Human
ggauuacaggcauaagcca

SEQ ID NO: 923286 - RNA, 22 nt, Human
ggauuacaggcauaagccaccg

SEQ ID NO: 923287 - RNA, 20 nt, Human
ggauuacaggcgccugccac

SEQ ID NO: 923288 - RNA, 22 nt, Human
ggauuacaggcgccugccacca

SEQ ID NO: 923289 - RNA, 19 nt, Human
ggcuggggcugaguggcuu

SEQ ID NO: 923290 - RNA, 24 nt, Human
ggcuggucuugaacgccugaccuc

SEQ ID NO: 923291 - RNA, 26 nt, Human
gggaagcacagcagcuugcaggaaag

SEQ ID NO: 923292 - RNA, 23 nt, Human
gggaaugcaguggugugaucucg

SEQ ID NO: 923293 - RNA, 24 nt, Human
gggaaugcaguggugugaucucgg

SEQ ID NO: 923294 - RNA, 23 nt, Human
gggaggaggaaaugccugucuca

SEQ ID NO: 923295 - RNA, 21 nt, Human
gggaggcagggccugggcugg

SEQ ID NO: 923296 - RNA, 23 nt, Human
gggauuacaggcauaagccacca

SEQ ID NO: 923297 - RNA, 21 nt, Human
ggggaagcacagcagcuugca

SEQ ID NO: 923298 - RNA, 20 nt, Human
gggucaagaagcgggaggag

SEQ ID NO: 923299 - RNA, 20 nt, Human
ggucucgaucuccugaccuc

SEQ ID NO: 923300 - RNA, 18 nt, Human
ggucuugaacgccugacc

SEQ ID NO: 923301 - RNA, 21 nt, Human
ggugacucgggguaaaugugg

SEQ ID NO: 923302 - RNA, 24 nt, Human
gugauccaccugccucggccuccc

SEQ ID NO: 923303 - RNA, 24 nt, Human
gugauucuccugccucagccuccc

SEQ ID NO: 923304 - RNA, 23 nt, Human
guuccacguugcuccucccuggc

SEQ ID NO: 923305 - RNA, 21 nt, Human
uaaaaaaccaacuuccuacaa

SEQ ID NO: 923306 - RNA, 24 nt, Human
uaaauuuuguauuuuuaguacaga

SEQ ID NO: 923307 - RNA, 18 nt, Human
uaacaugucaaugacagu

SEQ ID NO: 923308 - RNA, 19 nt, Human
uaacaugucaaugacagug

SEQ ID NO: 923309 - RNA, 20 nt, Human
uaagaaagaagugaagagga

SEQ ID NO: 923310 - RNA, 23 nt, Human
uaagccaccacacucggccccag

SEQ ID NO: 923311 - RNA, 24 nt, Human
uaaggcaaaguaaaauucaggacc

SEQ ID NO: 923312 - RNA, 21 nt, Human
uaagguaaaaaugugauuucc

SEQ ID NO: 923313 - RNA, 22 nt, Human
uaaguaaacaccaaucuugccc

SEQ ID NO: 923314 - RNA, 23 nt, Human
uaaguaaacaccaaucuugccca

SEQ ID NO: 923315 - RNA, 21 nt, Human
uacaggcauaagccaccacac

SEQ ID NO: 923316 - RNA, 23 nt, Human
uacaggcauaagccaccgcgccc

SEQ ID NO: 923317 - RNA, 22 nt, Human
uacaggcgcccgccaccacgcc

SEQ ID NO: 923318 - RNA, 24 nt, Human
uacaggcgccugccaccacacuca

SEQ ID NO: 923319 - RNA, 20 nt, Human
uagaagcugaaagugucccc

SEQ ID NO: 923320 - RNA, 22 nt, Human
uagagacaggguuucaccgugu

SEQ ID NO: 923321 - RNA, 19 nt, Human
uagcuggauuacaggcgcc

SEQ ID NO: 923322 - RNA, 20 nt, Human
uaggcuugucuguggcagcu

SEQ ID NO: 923323 - RNA, 24 nt, Human
uaguacagacgagguuucaccaug

SEQ ID NO: 923324 - RNA, 21 nt, Human
uaguagagacaggguuucacc

SEQ ID NO: 923325 - RNA, 24 nt, Human
uaguagagacaggguuucaccgug

SEQ ID NO: 923326 - RNA, 26 nt, Human
uaguagagacaggguuucaccguguu

SEQ ID NO: 923327 - RNA, 20 nt, Human
ucaaggcaucuuaaacuuca

SEQ ID NO: 923328 - RNA, 19 nt, Human
ucaagugauucuccugccu

SEQ ID NO: 923329 - RNA, 24 nt, Human
ucaccguguuagccaggauggucu

SEQ ID NO: 923330 - RNA, 22 nt, Human
ucacucugucgcucaggcugaa

SEQ ID NO: 923331 - RNA, 23 nt, Human
ucacugcaaccuccaccuccugg

SEQ ID NO: 923332 - RNA, 24 nt, Human
ucacugcaaccuccaccuccuggg

SEQ ID NO: 923333 - RNA, 25 nt, Human
ucacugcaaccuccaccuccugggu

SEQ ID NO: 923334 - RNA, 27 nt, Human
ucacugcaaccuccaccuccuggguuc

SEQ ID NO: 923335 - RNA, 18 nt, Human
ucacuguaagcuccgccu

SEQ ID NO: 923336 - RNA, 19 nt, Human
ucacuguaagcuccgccuc

SEQ ID NO: 923337 - RNA, 19 nt, Human
ucacuguaagcuccgccuc

SEQ ID NO: 923338 - RNA, 23 nt, Human
ucacuguaagcuccgccucccag

SEQ ID NO: 923339 - RNA, 24 nt, Human
ucacuguaagcuccgccucccagg

SEQ ID NO: 923340 - RNA, 20 nt, Human
ucagccucccaaguagcugg

SEQ ID NO: 923341 - RNA, 21 nt, Human
ucagccucccgaguagcugga

SEQ ID NO: 923342 - RNA, 20 nt, Human
uccaaaaacaaacaaaaaua

SEQ ID NO: 923343 - RNA, 24 nt, Human
uccaagcacaagacucuuagcuug

SEQ ID NO: 923344 - RNA, 24 nt, Human
ucccaaagugcagggauuacaggc

SEQ ID NO: 923345 - RNA, 24 nt, Human
ucccaaagugcugggauuacaggc

SEQ ID NO: 923346 - RNA, 24 nt, Human
ucccaaguagcugggacuacaggc

SEQ ID NO: 923347 - RNA, 21 nt, Human
ucccagguucccgccauucuc

SEQ ID NO: 923348 - RNA, 24 nt, Human
ucccagguucccgccauucuccug

SEQ ID NO: 923349 - RNA, 21 nt, Human
uccccuaucucuuuacauaca

SEQ ID NO: 923350 - RNA, 23 nt, Human
ucccgaguagcuggauuacaggc

SEQ ID NO: 923351 - RNA, 18 nt, Human
ucccggaagucucucuuu

SEQ ID NO: 923352 - RNA, 19 nt, Human
uccgccacgcccugucacc

SEQ ID NO: 923353 - RNA, 24 nt, Human
uccugccuugucagaacccugcaa

SEQ ID NO: 923354 - RNA, 21 nt, Human
uccuggguucaagugauucuc

SEQ ID NO: 923355 - RNA, 24 nt, Human
uccuggguucaagugauucuccug

SEQ ID NO: 923356 - RNA, 18 nt, Human
ucggccucccaaagugcu

SEQ ID NO: 923357 - RNA, 26 nt, Human
ucuccugccucagccucccaaguagc

SEQ ID NO: 923358 - RNA, 24 nt, Human
ucuccugccucagccucccgagua

SEQ ID NO: 923359 - RNA, 20 nt, Human
ucucgcucugcugcccaggc

SEQ ID NO: 923360 - RNA, 22 nt, Human
ucucgcucugcugcccaggcgg

SEQ ID NO: 923361 - RNA, 23 nt, Human
ucucgcucugcugcccaggcggg

SEQ ID NO: 923362 - RNA, 24 nt, Human
ucucgcucugcugcccaggcggga

SEQ ID NO: 923363 - RNA, 23 nt, Human
ucugccuccaaauccaggcaacu

SEQ ID NO: 923364 - RNA, 24 nt, Human
ucugucgcucaggcugaaaugcag

SEQ ID NO: 923365 - RNA, 19 nt, Human
ugaaaagccugacaacucu

SEQ ID NO: 923366 - RNA, 23 nt, Human
ugaaaguguccccacucuugacu

SEQ ID NO: 923367 - RNA, 19 nt, Human
ugaaaugcagugacgugau

SEQ ID NO: 923368 - RNA, 24 nt, Human
ugaaaugcagugacgugaucucgg

SEQ ID NO: 923369 - RNA, 24 nt, Human
ugaccucaggugagcugcccgccu

SEQ ID NO: 923370 - RNA, 19 nt, Human
ugagacaaaccagccaagc

SEQ ID NO: 923371 - RNA, 22 nt, Human
ugagacggagucucgcucugcu

SEQ ID NO: 923372 - RNA, 18 nt, Human
ugagcugcccgccuuggc

SEQ ID NO: 923373 - RNA, 20 nt, Human
ugauucuccugccucagccu

SEQ ID NO: 923374 - RNA, 19 nt, Human
ugcaaucugugacaccgca

SEQ ID NO: 923375 - RNA, 18 nt, Human
ugcagugacgugaucucg

SEQ ID NO: 923376 - RNA, 22 nt, Human
ugcagugacgugaucucggcuc

SEQ ID NO: 923377 - RNA, 18 nt, Human
ugcccaagaaaaaucaca

SEQ ID NO: 923378 - RNA, 22 nt, Human
ugcccaggcgggaaugcagugg

SEQ ID NO: 923379 - RNA, 24 nt, Human
ugccucagccucccaaguagcugg

SEQ ID NO: 923380 - RNA, 24 nt, Human
ugccucagccucccgaguagcugg

SEQ ID NO: 923381 - RNA, 21 nt, Human
ugccucggccucccaaagugc

SEQ ID NO: 923382 - RNA, 24 nt, Human
ugccucggccucccaaagugcugg

SEQ ID NO: 923383 - RNA, 24 nt, Human
ugcugggauuacaggcauaagcca

SEQ ID NO: 923384 - RNA, 23 nt, Human
uggauaugcaaaucaaauguccu

SEQ ID NO: 923385 - RNA, 19 nt, Human
uggauuacaggcgccugcc

SEQ ID NO: 923386 - RNA, 23 nt, Human
uggauuacaggcgccugccacca

SEQ ID NO: 923387 - RNA, 24 nt, Human
uggccaggcuggucuugaacgccu

SEQ ID NO: 923388 - RNA, 19 nt, Human
uggcuggggcugaguggcu

SEQ ID NO: 923389 - RNA, 21 nt, Human
ugggacuacaggcgcccgcca

SEQ ID NO: 923390 - RNA, 22 nt, Human
ugggacuacaggcgcccgccac

SEQ ID NO: 923391 - RNA, 24 nt, Human
ugggacuacaggcgcccgccacca

SEQ ID NO: 923392 - RNA, 18 nt, Human
ugggauuacaggcauaag

SEQ ID NO: 923393 - RNA, 21 nt, Human
ugggauuacaggcauaagcca

SEQ ID NO: 923394 - RNA, 22 nt, Human
ugggauuacaggcauaagccac

SEQ ID NO: 923395 - RNA, 23 nt, Human
ugggauuacaggcauaagccacc

SEQ ID NO: 923396 - RNA, 24 nt, Human
ugggauuacaggcauaagccaccg

SEQ ID NO: 923397 - RNA, 24 nt, Human
ugggauuacaggcauaagccaccg

SEQ ID NO: 923398 - RNA, 19 nt, Human
ugggcuggguucccggaga

SEQ ID NO: 923399 - RNA, 23 nt, Human
uggguucaagugauucuccugcc

SEQ ID NO: 923400 - RNA, 24 nt, Human
uggguucaagugauucuccugccu

SEQ ID NO: 923401 - RNA, 24 nt, Human
uggugugaucucgguucacuguaa

SEQ ID NO: 923402 - RNA, 19 nt, Human
ugucacagcagagauacac

SEQ ID NO: 923403 - RNA, 19 nt, Human
uguccuaaacacagcagaa

SEQ ID NO: 923404 - RNA, 22 nt, Human
uguccugccuugucagaacccu

SEQ ID NO: 923405 - RNA, 24 nt, Human
ugucucaaccacuaacuaauuugc

SEQ ID NO: 923406 - RNA, 22 nt, Human
ugugucacagcagagauacacg

SEQ ID NO: 923407 - RNA, 24 nt, Human
uguuuacauaaaacgugguucugc

SEQ ID NO: 923408 - RNA, 22 nt, Human
uuaaucuggaaaauccaagcac

SEQ ID NO: 923409 - RNA, 23 nt, Human
uuaaucuggaaaauccaagcaca

SEQ ID NO: 923410 - RNA, 24 nt, Human
uuagcuugaaaagccugacaacuc

SEQ ID NO: 923411 - RNA, 24 nt, Human
uuaguacagacgagguuucaccau

SEQ ID NO: 923412 - RNA, 22 nt, Human
uuaguagagacaggguuucacc

SEQ ID NO: 923413 - RNA, 24 nt, Human
uuaguagagacaggguuucaccgu

SEQ ID NO: 923414 - RNA, 21 nt, Human
uuauaacaucaugucauccua

SEQ ID NO: 923415 - RNA, 18 nt, Human
uucaaauuaaucuggaaa

SEQ ID NO: 923416 - RNA, 21 nt, Human
uucaagugauucuccugccuc

SEQ ID NO: 923417 - RNA, 23 nt, Human
uucaagugauucuccugccucag

SEQ ID NO: 923418 - RNA, 24 nt, Human
uucaagugauucuccugccucagc

SEQ ID NO: 923419 - RNA, 23 nt, Human
uugagacaguuucacucugucgc

SEQ ID NO: 923420 - RNA, 20 nt, Human
uugcaggaaaggccuggcug

SEQ ID NO: 923421 - RNA, 24 nt, Human
uuucaccauguuggccaggcuggu

SEQ ID NO: 923422 - RNA, 19 nt, Human
uuucaccguguuagccagg

SEQ ID NO: 923423 - RNA, 24 nt, Human
uuucacucugucgcucaggcugaa

SEQ ID NO: 923424 - RNA, 23 nt, Human
uuuccagcacagacgugcacaga

SEQ ID NO: 923425 - RNA, 26 nt, Human
uuuugagacaguuucacucugucgcu

SEQ ID NO: 923426 - RNA, 24 nt, Human
uuuuuaguacagacgagguuucac

SEQ ID NO: 923427 - RNA, 24 nt, Human
uuuuuaguagagacaggguuucac

SEQ ID NO: 923428 - RNA, 21 nt, Human
uuuuuguauuuuuaguagaga

SEQ ID NO: 923429 - RNA, 21 nt, Human
uuuuuuguauuuuuaguagag

SEQ ID NO: 923430 - RNA, 24 nt, Human
uuuuuuguauuuuuaguagagaca

SEQ ID NO: 923431 - RNA, 21 nt, Human
uuuuuuucuguuugagacgga

SEQ ID NO: 923432 - RNA, 23 nt, Human
aacacacccaacacaacacaaga

SEQ ID NO: 923433 - RNA, 22 nt, Human
acaacaccagggugugucaugc

SEQ ID NO: 923434 - RNA, 22 nt, Human
acacaagauguugguaaguuag

SEQ ID NO: 923435 - RNA, 19 nt, Human
acacacccaacacaacaca

SEQ ID NO: 923436 - RNA, 22 nt, Human
acccaacacaacacaagauguu

SEQ ID NO: 923437 - RNA, 21 nt, Human
agagcgcccauguuuccacag

SEQ ID NO: 923438 - RNA, 20 nt, Human
agguaacuacagagcagagc

SEQ ID NO: 923439 - RNA, 19 nt, Human
caaaacacacccaacacaa

SEQ ID NO: 923440 - RNA, 20 nt, Human
caaaacacacccaacacaac

SEQ ID NO: 923441 - RNA, 21 nt, Human
caagugacaaaacacacccaa

SEQ ID NO: 923442 - RNA, 18 nt, Human
cacacccaacacaacaca

SEQ ID NO: 923443 - RNA, 21 nt, Human
cauggcagggcgcucucugcc

SEQ ID NO: 923444 - RNA, 18 nt, Human
cauuggaguagguguugc

SEQ ID NO: 923445 - RNA, 19 nt, Human
cccacacauuggaguaggu

SEQ ID NO: 923446 - RNA, 23 nt, Human
cuagacuguccuccccaucugug

SEQ ID NO: 923447 - RNA, 18 nt, Human
cuguuugauggcuuucuc

SEQ ID NO: 923448 - RNA, 21 nt, Human
gggcaggaagagguggggacu

SEQ ID NO: 923449 - RNA, 22 nt, Human
gggcaggaagagguggggacuu

SEQ ID NO: 923450 - RNA, 22 nt, Human
uaagagugcauucuauugcaga

SEQ ID NO: 923451 - RNA, 20 nt, Human
uagcaagcagaaugacuugc

SEQ ID NO: 923452 - RNA, 21 nt, Human
uauugcagaaaaugcaguuau

SEQ ID NO: 923453 - RNA, 21 nt, Human
ucuagacuguccuccccaucu

SEQ ID NO: 923454 - RNA, 21 nt, Human
ucuccaagugacaaaacacac

SEQ ID NO: 923455 - RNA, 18 nt, Human
ucuuggguggggucacac

SEQ ID NO: 923456 - RNA, 22 nt, Human
ugacaaaacacacccaacacaa

SEQ ID NO: 923457 - RNA, 22 nt, Human
ugacaaaacacacccaacacaa

SEQ ID NO: 923458 - RNA, 21 nt, Human
ugacuugcuugccuuuucccu

SEQ ID NO: 923459 - RNA, 19 nt, Human
ugaugccuagcaagcagaa

SEQ ID NO: 923460 - RNA, 20 nt, Human
ugccauuucaggaucccaca

SEQ ID NO: 923461 - RNA, 24 nt, Human
ugccuuuucccuuaguagguaacu

SEQ ID NO: 923462 - RNA, 23 nt, Human
uggggucacacuaguucuccaag

SEQ ID NO: 923463 - RNA, 19 nt, Human
ugucaugcucuuggguggg

SEQ ID NO: 923464 - RNA, 21 nt, Human
uguccagacugagaauuaaga

SEQ ID NO: 923465 - RNA, 23 nt, Human
uguccagacugagaauuaagagc

SEQ ID NO: 923466 - RNA, 24 nt, Human
uuaguaguuaaaauuaagagugcc

SEQ ID NO: 923467 - RNA, 19 nt, Human
uuggguggggucacacuag

SEQ ID NO: 923468 - RNA, 18 nt, Human
uuuuuuuuuuuuuuuuug

SEQ ID NO: 923469 - RNA, 21 nt, Human
aaagugcccuacccuuaccua

SEQ ID NO: 923470 - RNA, 18 nt, Human
acaauggaaggcauaaaa

SEQ ID NO: 923471 - RNA, 24 nt, Human
acacugucaaacacuggaaagggg

SEQ ID NO: 923472 - RNA, 24 nt, Human
acagagcuuucuccauguagcuau

SEQ ID NO: 923473 - RNA, 19 nt, Human
acccccuuuauaccacugg

SEQ ID NO: 923474 - RNA, 19 nt, Human
agagggcggauggcggcgg

SEQ ID NO: 923475 - RNA, 18 nt, Human
aggaggccagaagaggag

SEQ ID NO: 923476 - RNA, 20 nt, Human
aggcaagauggugcaagaag

SEQ ID NO: 923477 - RNA, 19 nt, Human
aggggcgccacaauggacc

SEQ ID NO: 923478 - RNA, 25 nt, Human
agugcccuacccuuaccuaaauggc

SEQ ID NO: 923479 - RNA, 21 nt, Human
caacauauacccccuuuauac

SEQ ID NO: 923480 - RNA, 19 nt, Human
caagauggugcaagaaguc

SEQ ID NO: 923481 - RNA, 21 nt, Human
caaucuaguccauuaggcaag

SEQ ID NO: 923482 - RNA, 20 nt, Human
caccacagugaugaauccaa

SEQ ID NO: 923483 - RNA, 20 nt, Human
cacuggaaaggggcgccaca

SEQ ID NO: 923484 - RNA, 21 nt, Human
cagugaugaauccacagagcu

SEQ ID NO: 923485 - RNA, 22 nt, Human
ccagaagaggaggaaugcuaca

SEQ ID NO: 923486 - RNA, 20 nt, Human
cccccucaccuggggauggg

SEQ ID NO: 923487 - RNA, 22 nt, Human
cccccuuuauaccacugacccc

SEQ ID NO: 923488 - RNA, 27 nt, Human
cgaauggcacacugucaaacacuggaa

SEQ ID NO: 923489 - RNA, 23 nt, Human
cucggggucuccgcuucccuaag

SEQ ID NO: 923490 - RNA, 18 nt, Human
gagcaguccaggaggcca

SEQ ID NO: 923491 - RNA, 21 nt, Human
ggaggaaugcuacaagccaca

SEQ ID NO: 923492 - RNA, 19 nt, Human
ggaggccagaagaggagga

SEQ ID NO: 923493 - RNA, 22 nt, Human
gggcaaggguaagagaugaagg

SEQ ID NO: 923494 - RNA, 23 nt, Human
ggggauggggggguagagagggc

SEQ ID NO: 923495 - RNA, 22 nt, Human
ggguuccucggggucuccgcuu

SEQ ID NO: 923496 - RNA, 24 nt, Human
uaaaucccauagcaugacugaagg

SEQ ID NO: 923497 - RNA, 20 nt, Human
uaauauaccaccaccaagac

SEQ ID NO: 923498 - RNA, 24 nt, Human
uaauuuaaaaaaagggggaagggg

SEQ ID NO: 923499 - RNA, 23 nt, Human
uaccacugaccccaaacugacuc

SEQ ID NO: 923500 - RNA, 22 nt, Human
uagcagacauggagaacaccac

SEQ ID NO: 923501 - RNA, 18 nt, Human
uauacccccuuuauacca

SEQ ID NO: 923502 - RNA, 22 nt, Human
uccugaacucaccccccucacc

SEQ ID NO: 923503 - RNA, 19 nt, Human
ucgaauggcacacugucaa

SEQ ID NO: 923504 - RNA, 20 nt, Human
ucgaauggcacacugucaaa

SEQ ID NO: 923505 - RNA, 19 nt, Human
ucuccgcuuccugaacuca

SEQ ID NO: 923506 - RNA, 18 nt, Human
ugaaggggagcaguccag

SEQ ID NO: 923507 - RNA, 20 nt, Human
ugcaacauauacccccuuua

SEQ ID NO: 923508 - RNA, 20 nt, Human
uggaaaggggcgccacaaug

SEQ ID NO: 923509 - RNA, 20 nt, Human
uggagaacaccacagugaug

SEQ ID NO: 923510 - RNA, 19 nt, Human
uggcacacugucaaacacu

SEQ ID NO: 923511 - RNA, 18 nt, Human
uggcuagcagacauggag

SEQ ID NO: 923512 - RNA, 23 nt, Human
uggggauggggggguagagaggg

SEQ ID NO: 923513 - RNA, 22 nt, Human
uggguuccucggggucuccgcu

SEQ ID NO: 923514 - RNA, 24 nt, Human
uuaaaagugcccuacccuuaccua

SEQ ID NO: 923515 - RNA, 24 nt, Human
uucacuguguuugacgucaucaca

SEQ ID NO: 923516 - RNA, 26 nt, Human
uuuaauuuaaaaaaagggggaagggg

SEQ ID NO: 923517 - RNA, 24 nt, Human
aagaaagaaacauuuaaaauacac

SEQ ID NO: 923518 - RNA, 21 nt, Human
aauguguauccagaccuauug

SEQ ID NO: 923519 - RNA, 19 nt, Human
acagaggcaacuucaguca

SEQ ID NO: 923520 - RNA, 20 nt, Human
agauggauauuaaguugcuu

SEQ ID NO: 923521 - RNA, 21 nt, Human
agcaggccuucugauaggaag

SEQ ID NO: 923522 - RNA, 20 nt, Human
agcuagucuaauacuccugg

SEQ ID NO: 923523 - RNA, 20 nt, Human
agcuagucuaauacuccugg

SEQ ID NO: 923524 - RNA, 21 nt, Human
agggaaaccauuuauauuuga

SEQ ID NO: 923525 - RNA, 20 nt, Human
aguagcugcugcacaugugu

SEQ ID NO: 923526 - RNA, 23 nt, Human
augaagggaaaccauuuauauuu

SEQ ID NO: 923527 - RNA, 20 nt, Human
caccuguguagagaaccgug

SEQ ID NO: 923528 - RNA, 21 nt, Human
cacuucugaggagaagcuccg

SEQ ID NO: 923529 - RNA, 23 nt, Human
caggauacaguagcugcugcaca

SEQ ID NO: 923530 - RNA, 25 nt, Human
caugaaaauucuccuaaaugacagu

SEQ ID NO: 923531 - RNA, 25 nt, Human
ccaaguaugagucaaauucuauacu

SEQ ID NO: 923532 - RNA, 18 nt, Human
ccagcaaaguuggaaggc

SEQ ID NO: 923533 - RNA, 20 nt, Human
ccagcaaaguuggaaggccc

SEQ ID NO: 923534 - RNA, 20 nt, Human
ccagccaacacagaggcaac

SEQ ID NO: 923535 - RNA, 21 nt, Human
ccagugguuacaauaccugag

SEQ ID NO: 923536 - RNA, 18 nt, Human
ccuccggcggcucagcuc

SEQ ID NO: 923537 - RNA, 19 nt, Human
ccuucugauaggaagugaa

SEQ ID NO: 923538 - RNA, 18 nt, Human
cuaguuaaaaaaaaaauc

SEQ ID NO: 923539 - RNA, 20 nt, Human
cucagcucgcgggcagcgcu

SEQ ID NO: 923540 - RNA, 21 nt, Human
cucucauaaauuuacuaucau

SEQ ID NO: 923541 - RNA, 20 nt, Human
cugcaagugaagguuucuuc

SEQ ID NO: 923542 - RNA, 19 nt, Human
cuuucagaacuaguuaaaa

SEQ ID NO: 923543 - RNA, 22 nt, Human
gagaaguauugugauaacugag

SEQ ID NO: 923544 - RNA, 19 nt, Human
gagccggaggggacucagg

SEQ ID NO: 923545 - RNA, 21 nt, Human
gaggagaagcuccguaagagg

SEQ ID NO: 923546 - RNA, 18 nt, Human
gcuuaaaaacaaaguucc

SEQ ID NO: 923547 - RNA, 20 nt, Human
guagcugcugcacaugugug

SEQ ID NO: 923548 - RNA, 22 nt, Human
gugaaugacagagaaaccucgu

SEQ ID NO: 923549 - RNA, 19 nt, Human
uaaaaaaaaaaucuagggg

SEQ ID NO: 923550 - RNA, 20 nt, Human
uaaaauacacaucuucguuu

SEQ ID NO: 923551 - RNA, 18 nt, Human
uaaagugacuaguaguuu

SEQ ID NO: 923552 - RNA, 22 nt, Human
uaacugaguccuccaaagguuu

SEQ ID NO: 923553 - RNA, 22 nt, Human
uaggcuccauaggagccggagg

SEQ ID NO: 923554 - RNA, 23 nt, Human
uaguaauuguuuucaacaugaag

SEQ ID NO: 923555 - RNA, 22 nt, Human
uagugaauacaucuacaacuac

SEQ ID NO: 923556 - RNA, 24 nt, Human
uauccagaccuauugcuuaaaaac

SEQ ID NO: 923557 - RNA, 19 nt, Human
ucaggauacaguagcugcu

SEQ ID NO: 923558 - RNA, 22 nt, Human
uccaaauauaauggcuuuuccc

SEQ ID NO: 923559 - RNA, 26 nt, Human
uccacagucagggagguuaccagagc

SEQ ID NO: 923560 - RNA, 19 nt, Human
ucccaugaagggaaaccau

SEQ ID NO: 923561 - RNA, 21 nt, Human
ucguugcccgcggcuccuccu

SEQ ID NO: 923562 - RNA, 25 nt, Human
ucuuuuaguucuucaacaguucuaa

SEQ ID NO: 923563 - RNA, 25 nt, Human
ugaauacaucuacaacuacaguaaa

SEQ ID NO: 923564 - RNA, 20 nt, Human
ugacuuuggaaggcgauggu

SEQ ID NO: 923565 - RNA, 18 nt, Human
ugagguggaugaaauauc

SEQ ID NO: 923566 - RNA, 18 nt, Human
ugcccgcggcuccuccuc

SEQ ID NO: 923567 - RNA, 18 nt, Human
ugggacuuggaacuuucu

SEQ ID NO: 923568 - RNA, 21 nt, Human
uggugggacuuggaacuuucu

SEQ ID NO: 923569 - RNA, 28 nt, Human
uguaaagugacuaguaguuuggcaggua

SEQ ID NO: 923570 - RNA, 20 nt, Human
uguagagugcugacuuugga

SEQ ID NO: 923571 - RNA, 23 nt, Human
uuaaaaaaaaaaucuaggggaaa

SEQ ID NO: 923572 - RNA, 29 nt, Human
uuaauaacaauguucagugguuucuuccu

SEQ ID NO: 923573 - RNA, 21 nt, Human
uucaaugaauaaaagauaaaa

SEQ ID NO: 923574 - RNA, 25 nt, Human
uucagaacuaguuaaaaaaaaaauc

SEQ ID NO: 923575 - RNA, 22 nt, Human
uucauuuaagaaguguuuuuuu

SEQ ID NO: 923576 - RNA, 18 nt, Human
uucugcaagugaagguuu

SEQ ID NO: 923577 - RNA, 21 nt, Human
uuggaaggcgaugguaccacu

SEQ ID NO: 923578 - RNA, 21 nt, Human
uuuggauauuaaauacaucau

SEQ ID NO: 923579 - RNA, 23 nt, Human
uuuuucaaguuccagaauuuucu

SEQ ID NO: 923580 - RNA, 23 nt, Human
aaacagcaucagagcagagcuca

SEQ ID NO: 923581 - RNA, 21 nt, Human
aaagaacacuauugcugcugc

SEQ ID NO: 923582 - RNA, 21 nt, Human
aagagcuuccugucaccacac

SEQ ID NO: 923583 - RNA, 22 nt, Human
aagcauacuucuccaggcgagu

SEQ ID NO: 923584 - RNA, 22 nt, Human
acaaaguacagggggaucuccg

SEQ ID NO: 923585 - RNA, 18 nt, Human
acuacaaucuccauuacc

SEQ ID NO: 923586 - RNA, 22 nt, Human
acuacaaucuccauuaccguga

SEQ ID NO: 923587 - RNA, 23 nt, Human
agaaaaugacugaacacauccuc

SEQ ID NO: 923588 - RNA, 18 nt, Human
agagcgggaagagcuggg

SEQ ID NO: 923589 - RNA, 22 nt, Human
aggaguucaccaauaaagaaaa

SEQ ID NO: 923590 - RNA, 24 nt, Human
aggcgagugaguggaggcagguua

SEQ ID NO: 923591 - RNA, 19 nt, Human
agggacuggaaggcagccu

SEQ ID NO: 923592 - RNA, 23 nt, Human
agugaaggggccgagggacugga

SEQ ID NO: 923593 - RNA, 23 nt, Human
aguggccagaugcucagggcgcc

SEQ ID NO: 923594 - RNA, 20 nt, Human
augucagaaagcuuugagca

SEQ ID NO: 923595 - RNA, 20 nt, Human
auuugcagcacaaaccuucc

SEQ ID NO: 923596 - RNA, 23 nt, Human
caaaaccagaguccaaauccugg

SEQ ID NO: 923597 - RNA, 21 nt, Human
caaacagcaucagagcagagc

SEQ ID NO: 923598 - RNA, 22 nt, Human
caacagcaugacaaauaucacc

SEQ ID NO: 923599 - RNA, 26 nt, Human
caacagcaugacaaauaucaccaaaa

SEQ ID NO: 923600 - RNA, 28 nt, Human
cacaaccccaggucugcugcagucgucc

SEQ ID NO: 923601 - RNA, 21 nt, Human
cagcaucagagcagagcucaa

SEQ ID NO: 923602 - RNA, 24 nt, Human
cagcaugacaaauaucaccaaaau

SEQ ID NO: 923603 - RNA, 24 nt, Human
cagccucacucagaagcagcucua

SEQ ID NO: 923604 - RNA, 22 nt, Human
cagcuguugugcacaaccccag

SEQ ID NO: 923605 - RNA, 25 nt, Human
ccagccgacacacagcuuuccacag

SEQ ID NO: 923606 - RNA, 24 nt, Human
ccccaaacagcaucagagcagagc

SEQ ID NO: 923607 - RNA, 22 nt, Human
cccucuggcaauaaucugccgg

SEQ ID NO: 923608 - RNA, 20 nt, Human
ccugaggcccagccucacuc

SEQ ID NO: 923609 - RNA, 22 nt, Human
ccuggccuggaauguccaagaa

SEQ ID NO: 923610 - RNA, 18 nt, Human
cgcugaggucccuuccac

SEQ ID NO: 923611 - RNA, 18 nt, Human
cuccugcaagcuaccaag

SEQ ID NO: 923612 - RNA, 23 nt, Human
cucgcugaaagcauacuucucca

SEQ ID NO: 923613 - RNA, 21 nt, Human
cugcagucguccuccugaggc

SEQ ID NO: 923614 - RNA, 18 nt, Human
cugcugcagucguccucc

SEQ ID NO: 923615 - RNA, 19 nt, Human
gaagauaaaggccagcccu

SEQ ID NO: 923616 - RNA, 19 nt, Human
gaagauaucaagcagcccu

SEQ ID NO: 923617 - RNA, 18 nt, Human
gaguagcaggcguucaac

SEQ ID NO: 923618 - RNA, 20 nt, Human
gcagaacacucuaauucgaa

SEQ ID NO: 923619 - RNA, 19 nt, Human
gcccucuggcaauaaucug

SEQ ID NO: 923620 - RNA, 23 nt, Human
gcugcugauggggaggucauuca

SEQ ID NO: 923621 - RNA, 22 nt, Human
ggaagagcuggguucugcggac

SEQ ID NO: 923622 - RNA, 24 nt, Human
ggaauucuguuuauaccuuaauaa

SEQ ID NO: 923623 - RNA, 21 nt, Human
ggacuggaaggcagccuggug

SEQ ID NO: 923624 - RNA, 19 nt, Human
ggagccagaggcaaaacca

SEQ ID NO: 923625 - RNA, 25 nt, Human
gggaaacccugguccacucagcucc

SEQ ID NO: 923626 - RNA, 19 nt, Human
ggggaggagcugugcgaca

SEQ ID NO: 923627 - RNA, 22 nt, Human
guggccagaugcucagggcgcc

SEQ ID NO: 923628 - RNA, 19 nt, Human
uaaguccuugcuuauguca

SEQ ID NO: 923629 - RNA, 22 nt, Human
uaccgugaggaagucuucuuca

SEQ ID NO: 923630 - RNA, 30 nt, Human
uagaacagcagaacacucuaauucgaaagg

SEQ ID NO: 923631 - RNA, 21 nt, Human
ucagaggagcuacugcugugu

SEQ ID NO: 923632 - RNA, 19 nt, Human
ucagggcgccauccucucc

SEQ ID NO: 923633 - RNA, 21 nt, Human
ucagggcgccauccucucgaa

SEQ ID NO: 923634 - RNA, 21 nt, Human
ucaugucagaaagcuuugagc

SEQ ID NO: 923635 - RNA, 19 nt, Human
uccacagguagcucuggcu

SEQ ID NO: 923636 - RNA, 19 nt, Human
ucccugggcaggcccagga

SEQ ID NO: 923637 - RNA, 20 nt, Human
ucccugggcaggcccaggaa

SEQ ID NO: 923638 - RNA, 22 nt, Human
uccucaguguucccugggcagg

SEQ ID NO: 923639 - RNA, 20 nt, Human
uccucucgaagauaaaggcu

SEQ ID NO: 923640 - RNA, 18 nt, Human
uccugcaaguccacaaag

SEQ ID NO: 923641 - RNA, 18 nt, Human
ucucuggggaaacccugg

SEQ ID NO: 923642 - RNA, 21 nt, Human
ucucuggggaaacccuggucc

SEQ ID NO: 923643 - RNA, 25 nt, Human
ucucuggggaaacccugguccacuc

SEQ ID NO: 923644 - RNA, 23 nt, Human
ucugcacaggcuuuccgcaugcc

SEQ ID NO: 923645 - RNA, 19 nt, Human
ugaagagcgggaagagcug

SEQ ID NO: 923646 - RNA, 28 nt, Human
ugacaaauaucaccaaaauuugcagcac

SEQ ID NO: 923647 - RNA, 19 nt, Human
ugcaaagguggaagugaag

SEQ ID NO: 923648 - RNA, 22 nt, Human
ugcaaagguggaagugaagggg

SEQ ID NO: 923649 - RNA, 20 nt, Human
ugcagucguccuccugaggc

SEQ ID NO: 923650 - RNA, 19 nt, Human
ugcaucuucugacaaucug

SEQ ID NO: 923651 - RNA, 18 nt, Human
ugcggaccccaggggagg

SEQ ID NO: 923652 - RNA, 19 nt, Human
uggaauguccaagaaggcc

SEQ ID NO: 923653 - RNA, 18 nt, Human
uggccagaugcucagggc

SEQ ID NO: 923654 - RNA, 18 nt, Human
ugugguauuuguaacuca

SEQ ID NO: 923655 - RNA, 18 nt, Human
uuccacagguagcucugg

SEQ ID NO: 923656 - RNA, 19 nt, Human
uucgcugaggucccuucca

SEQ ID NO: 923657 - RNA, 19 nt, Human
aaaggugcacuuuuuuaca

SEQ ID NO: 923658 - RNA, 27 nt, Human
acccuaaaaagucauuucuuggagaag

SEQ ID NO: 923659 - RNA, 21 nt, Human
acgcgcugccggguaccacgg

SEQ ID NO: 923660 - RNA, 19 nt, Human
acuguguguaaaauacugc

SEQ ID NO: 923661 - RNA, 19 nt, Human
agauuaaucugagaguuac

SEQ ID NO: 923662 - RNA, 19 nt, Human
agcucauggauguuccuuc

SEQ ID NO: 923663 - RNA, 23 nt, Human
aggcccuugaucacaagcguauc

SEQ ID NO: 923664 - RNA, 24 nt, Human
augcagcaggugucacagaaggac

SEQ ID NO: 923665 - RNA, 20 nt, Human
cacagaaggacccuguccca

SEQ ID NO: 923666 - RNA, 21 nt, Human
cacccagccuggugaugcagc

SEQ ID NO: 923667 - RNA, 24 nt, Human
cacccuaaaaagucauuucuugga

SEQ ID NO: 923668 - RNA, 20 nt, Human
caggugucacagaaggaccc

SEQ ID NO: 923669 - RNA, 24 nt, Human
ccagccuggugaugcagcaggugu

SEQ ID NO: 923670 - RNA, 20 nt, Human
cccugucccagcugguacug

SEQ ID NO: 923671 - RNA, 21 nt, Human
cgcgcugccggguaccacggc

SEQ ID NO: 923672 - RNA, 19 nt, Human
cgcugccggguaccacggc

SEQ ID NO: 923673 - RNA, 24 nt, Human
cugccggguaccacggcuuucuuu

SEQ ID NO: 923674 - RNA, 22 nt, Human
cugugaguucuggcaauugugu

SEQ ID NO: 923675 - RNA, 18 nt, Human
cuuuccaguuuuacuggg

SEQ ID NO: 923676 - RNA, 22 nt, Human
gacuggcuauuucuccgacuuc

SEQ ID NO: 923677 - RNA, 21 nt, Human
gcaggugucacagaaggaccc

SEQ ID NO: 923678 - RNA, 23 nt, Human
gugaugcagcaggugucacagaa

SEQ ID NO: 923679 - RNA, 23 nt, Human
uaaaaccagaacuguguguaaaa

SEQ ID NO: 923680 - RNA, 18 nt, Human
uaaaacuaaaggugcacu

SEQ ID NO: 923681 - RNA, 21 nt, Human
uaaucugagaguuacuauuaa

SEQ ID NO: 923682 - RNA, 21 nt, Human
uaggaugguguggccucugau

SEQ ID NO: 923683 - RNA, 22 nt, Human
ucaucuucuucauccucuucug

SEQ ID NO: 923684 - RNA, 23 nt, Human
ucuaccacaacugaagaaauuuc

SEQ ID NO: 923685 - RNA, 21 nt, Human
ucuuuaucaugggaugaaggu

SEQ ID NO: 923686 - RNA, 24 nt, Human
ugaacgcgcugccggguaccacgg

SEQ ID NO: 923687 - RNA, 23 nt, Human
ugaguucuggcaauuguguccgu

SEQ ID NO: 923688 - RNA, 25 nt, Human
ugggaugauucuggaaagauucuuu

SEQ ID NO: 923689 - RNA, 20 nt, Human
ugguguggccucugaucugu

SEQ ID NO: 923690 - RNA, 19 nt, Human
uuccugauguucaucugcc

SEQ ID NO: 923691 - RNA, 21 nt, Human
uucgccuuuuugucaaaccug

SEQ ID NO: 923692 - RNA, 24 nt, Human
uugaaugcaucuuguuuauaacug

SEQ ID NO: 923693 - RNA, 23 nt, Human
uugacuggcuauuucuccgacuu

SEQ ID NO: 923694 - RNA, 18 nt, Human
uuggagaagcgauggaug

SEQ ID NO: 923695 - RNA, 20 nt, Human
uuuccugugagguuucggug

SEQ ID NO: 923696 - RNA, 23 nt, Human
acaaguccagcgggcugagcucu

SEQ ID NO: 923697 - RNA, 18 nt, Human
acaugggcccaggccugg

SEQ ID NO: 923698 - RNA, 23 nt, Human
acccucuugcccagggcacaugg

SEQ ID NO: 923699 - RNA, 27 nt, Human
agaccccacucugagaaggccagcggu

SEQ ID NO: 923700 - RNA, 18 nt, Human
agauggggcuugggcugg

SEQ ID NO: 923701 - RNA, 18 nt, Human
agauggggcuugggcugg

SEQ ID NO: 923702 - RNA, 21 nt, Human
agggcacaugggcccaggccu

SEQ ID NO: 923703 - RNA, 23 nt, Human
aggugccagcccaccgguuucau

SEQ ID NO: 923704 - RNA, 19 nt, Human
agugguagggggcgggagg

SEQ ID NO: 923705 - RNA, 23 nt, Human
augcucuguuuccccaagagugg

SEQ ID NO: 923706 - RNA, 21 nt, Human
cacccucuugcccagggcaca

SEQ ID NO: 923707 - RNA, 18 nt, Human
cagcacagaugcucuguu

SEQ ID NO: 923708 - RNA, 21 nt, Human
cagcaugggaagaccccacuc

SEQ ID NO: 923709 - RNA, 22 nt, Human
cagcguguccucuuugucucuu

SEQ ID NO: 923710 - RNA, 23 nt, Human
ccagcccaccgguuucauauccg

SEQ ID NO: 923711 - RNA, 24 nt, Human
ccagcguguccucuuugucucuuu

SEQ ID NO: 923712 - RNA, 22 nt, Human
ccaggccuggucagcacagaug

SEQ ID NO: 923713 - RNA, 19 nt, Human
ccauggcacaugccuaggc

SEQ ID NO: 923714 - RNA, 21 nt, Human
cccaggggcugggaucucucu

SEQ ID NO: 923715 - RNA, 18 nt, Human
ccccuggguacaauggcu

SEQ ID NO: 923716 - RNA, 21 nt, Human
cccguggagugguagggggcg

SEQ ID NO: 923717 - RNA, 25 nt, Human
cucagcuguguacugggccaucugc

SEQ ID NO: 923718 - RNA, 23 nt, Human
cuguguacugggccaucugcucc

SEQ ID NO: 923719 - RNA, 23 nt, Human
gagugagcuucggccagagccaa

SEQ ID NO: 923720 - RNA, 22 nt, Human
gcccaggccuggucagcacaga

SEQ ID NO: 923721 - RNA, 23 nt, Human
gcccguggagugguagggggcgg

SEQ ID NO: 923722 - RNA, 19 nt, Human
ggaggggagagcugggcug

SEQ ID NO: 923723 - RNA, 20 nt, Human
ggcuggagauggggcuuggg

SEQ ID NO: 923724 - RNA, 21 nt, Human
ggcuugggcuggggauagggu

SEQ ID NO: 923725 - RNA, 26 nt, Human
gggagagcugggcuggccaggagccu

SEQ ID NO: 923726 - RNA, 19 nt, Human
ggggcuggagauggggcuu

SEQ ID NO: 923727 - RNA, 20 nt, Human
guccucuuugucucuuucuc

SEQ ID NO: 923728 - RNA, 19 nt, Human
uacugggccaucugcuccg

SEQ ID NO: 923729 - RNA, 22 nt, Human
uaggguguggccaggaaugugg

SEQ ID NO: 923730 - RNA, 24 nt, Human
uccauggcacaugccuaggcuugg

SEQ ID NO: 923731 - RNA, 19 nt, Human
ucugcuccggugugguauu

SEQ ID NO: 923732 - RNA, 19 nt, Human
ugcccaggugccagcccac

SEQ ID NO: 923733 - RNA, 21 nt, Human
uggaagcacugugcccaggug

SEQ ID NO: 923734 - RNA, 21 nt, Human
uggaaggggcugggacugggg

SEQ ID NO: 923735 - RNA, 21 nt, Human
uggaggggagagcugggcugg

SEQ ID NO: 923736 - RNA, 18 nt, Human
uggagugggcccaggguc

SEQ ID NO: 923737 - RNA, 23 nt, Human
ugggaagaccccacucugagaag

SEQ ID NO: 923738 - RNA, 24 nt, Human
ugggcccagggucccaggggcugg

SEQ ID NO: 923739 - RNA, 19 nt, Human
ugggcuggggauagggugu

SEQ ID NO: 923740 - RNA, 24 nt, Human
uggggcuggagauggggcuugggc

SEQ ID NO: 923741 - RNA, 18 nt, Human
ugggggcagcagcauggg

SEQ ID NO: 923742 - RNA, 20 nt, Human
ugggggcagcagcaugggaa

SEQ ID NO: 923743 - RNA, 19 nt, Human
ugguagggggcgggaggua

SEQ ID NO: 923744 - RNA, 26 nt, Human
ugugcaggaacagggagugggaacgc

SEQ ID NO: 923745 - RNA, 22 nt, Human
ugugcccaggugccagcccacc

SEQ ID NO: 923746 - RNA, 23 nt, Human
aaaccaggugcuccagggcccug

SEQ ID NO: 923747 - RNA, 23 nt, Human
aaacugacaagcagcucagauaa

SEQ ID NO: 923748 - RNA, 22 nt, Human
aaccaguagcuggguggacaga

SEQ ID NO: 923749 - RNA, 21 nt, Human
aagcagcucagauaaagauuc

SEQ ID NO: 923750 - RNA, 23 nt, Human
aagcuuuuauuuuaacccaggga

SEQ ID NO: 923751 - RNA, 21 nt, Human
aaugaaccaguagcugggugg

SEQ ID NO: 923752 - RNA, 25 nt, Human
accaggugcuccagggcccuguucc

SEQ ID NO: 923753 - RNA, 19 nt, Human
agcuggguggacagaacau

SEQ ID NO: 923754 - RNA, 18 nt, Human
agggcccuguuccucucc

SEQ ID NO: 923755 - RNA, 23 nt, Human
caaacugacaagcagcucagaua

SEQ ID NO: 923756 - RNA, 27 nt, Human
caccagaaagcuuuuauuuuaacccag

SEQ ID NO: 923757 - RNA, 25 nt, Human
caguagcuggguggacagaacauac

SEQ ID NO: 923758 - RNA, 23 nt, Human
caucgcaacucccaccaacccua

SEQ ID NO: 923759 - RNA, 18 nt, Human
ccaagcgccucccguaaa

SEQ ID NO: 923760 - RNA, 20 nt, Human
ccagggccagggaggccgaa

SEQ ID NO: 923761 - RNA, 22 nt, Human
ccagggccagggaggccgaagc

SEQ ID NO: 923762 - RNA, 23 nt, Human
cccagggccagggaggccgaagc

SEQ ID NO: 923763 - RNA, 23 nt, Human
cccgaaaccaggugcuccagggc

SEQ ID NO: 923764 - RNA, 21 nt, Human
ccuagggacagacgaacaaac

SEQ ID NO: 923765 - RNA, 22 nt, Human
cgaaaccaggugcuccagggcc

SEQ ID NO: 923766 - RNA, 23 nt, Human
cgaacaaacugacaagcagcuca

SEQ ID NO: 923767 - RNA, 18 nt, Human
cguaaccaagcgccuccc

SEQ ID NO: 923768 - RNA, 21 nt, Human
cguaaccaagcgccucccgua

SEQ ID NO: 923769 - RNA, 24 nt, Human
cguaaccaagcgccucccguaaac

SEQ ID NO: 923770 - RNA, 20 nt, Human
cuagggacagacgaacaaac

SEQ ID NO: 923771 - RNA, 22 nt, Human
cuccagggcccuguuccucucc

SEQ ID NO: 923772 - RNA, 18 nt, Human
gauuccuaucuggauccc

SEQ ID NO: 923773 - RNA, 18 nt, Human
gcacuaaaagauguaaga

SEQ ID NO: 923774 - RNA, 23 nt, Human
guaaccaagcgccucccguaaac

SEQ ID NO: 923775 - RNA, 19 nt, Human
guagcuggguggacagaac

SEQ ID NO: 923776 - RNA, 21 nt, Human
uaaaagauguaagagguaggu

SEQ ID NO: 923777 - RNA, 24 nt, Human
uggacagaacauacgcacuaaaag

SEQ ID NO: 923778 - RNA, 27 nt, Human
uggcaauaucaucgcaacucccaccaa

SEQ ID NO: 923779 - RNA, 27 nt, Human
ccucucgugggggaaccgggcgaaggu

SEQ ID NO: 923780 - RNA, 19 nt, Human
gagcggccccgcggcggcg

SEQ ID NO: 923781 - RNA, 25 nt, Human
gcccggugguggcacguggggagcg

SEQ ID NO: 923782 - RNA, 18 nt, Human
uacacgagccgcgguggc

SEQ ID NO: 923783 - RNA, 22 nt, Human
ugggggaaccgggcgaaggugc

SEQ ID NO: 923784 - RNA, 20 nt, Human
cagaauccagcuugccugac

SEQ ID NO: 923785 - RNA, 24 nt, Human
cagcgucuugcuacauugcccagg

SEQ ID NO: 923786 - RNA, 21 nt, Human
ccagaauccagcuugccugac

SEQ ID NO: 923787 - RNA, 21 nt, Human
gcuggucuggaacuccugugc

SEQ ID NO: 923788 - RNA, 24 nt, Human
uacauugcccaggcuggucuggaa

SEQ ID NO: 923789 - RNA, 18 nt, Human
uagagacagcgucuugcu

SEQ ID NO: 923790 - RNA, 19 nt, Human
ucucucugcaaaggugggg

SEQ ID NO: 923791 - RNA, 23 nt, Human
ucuugcuacauugcccaggcugg

SEQ ID NO: 923792 - RNA, 24 nt, Human
ugcccaggcuggucuggaacuccu

SEQ ID NO: 923793 - RNA, 27 nt, Human
ugcuacauugcccaggcuggucuggaa

SEQ ID NO: 923794 - RNA, 23 nt, Human
acaagcccaggcagcucugugac

SEQ ID NO: 923795 - RNA, 24 nt, Human
accuccgucuccaggggcaggagc

SEQ ID NO: 923796 - RNA, 18 nt, Human
acucgaucaccuccagga

SEQ ID NO: 923797 - RNA, 20 nt, Human
agcaacuuuggguccauggg

SEQ ID NO: 923798 - RNA, 20 nt, Human
agcgggcgcugggcuggcug

SEQ ID NO: 923799 - RNA, 19 nt, Human
aggugaugggccacgggau

SEQ ID NO: 923800 - RNA, 22 nt, Human
caccuccgucuccaggggcagg

SEQ ID NO: 923801 - RNA, 24 nt, Human
caccuccgucuccaggggcaggag

SEQ ID NO: 923802 - RNA, 21 nt, Human
cagcugcuucagcaacuuugg

SEQ ID NO: 923803 - RNA, 18 nt, Human
ccagggggagugguuggu

SEQ ID NO: 923804 - RNA, 23 nt, Human
ccccgcgccggaucccgaggugc

SEQ ID NO: 923805 - RNA, 18 nt, Human
cccgaggugcuugccacc

SEQ ID NO: 923806 - RNA, 19 nt, Human
cccgcgccgggauccaggg

SEQ ID NO: 923807 - RNA, 24 nt, Human
ccggucuuaccgucccagggggag

SEQ ID NO: 923808 - RNA, 19 nt, Human
ccucucggccuucucugcc

SEQ ID NO: 923809 - RNA, 18 nt, Human
ccuucucugccuuccuca

SEQ ID NO: 923810 - RNA, 20 nt, Human
ccuucucugccuuccucagc

SEQ ID NO: 923811 - RNA, 23 nt, Human
cgggcgcugggcuggcuggcugu

SEQ ID NO: 923812 - RNA, 23 nt, Human
cuggccccacgccuaccggucuu

SEQ ID NO: 923813 - RNA, 21 nt, Human
gaaccacgaucuccccuucaa

SEQ ID NO: 923814 - RNA, 20 nt, Human
gaucaccuccaggaucuccc

SEQ ID NO: 923815 - RNA, 23 nt, Human
gauccuucuccuuccugagcgcu

SEQ ID NO: 923816 - RNA, 23 nt, Human
gcagcucugugacuuucccgcgc

SEQ ID NO: 923817 - RNA, 25 nt, Human
gcaucuccucauugcuggugaacuc

SEQ ID NO: 923818 - RNA, 18 nt, Human
gccuuccucagcugcuuc

SEQ ID NO: 923819 - RNA, 20 nt, Human
gcuggggcuggagucaucuc

SEQ ID NO: 923820 - RNA, 27 nt, Human
ggaacucccucucggccuucucugccu

SEQ ID NO: 923821 - RNA, 21 nt, Human
ggccacgggaugagugggacc

SEQ ID NO: 923822 - RNA, 22 nt, Human
gggagugguugguuuuccaggg

SEQ ID NO: 923823 - RNA, 24 nt, Human
ucagcaacuuuggguccaugggug

SEQ ID NO: 923824 - RNA, 19 nt, Human
ucauugcuggugaacucga

SEQ ID NO: 923825 - RNA, 25 nt, Human
uccaggaucuccccgcgccggaucc

SEQ ID NO: 923826 - RNA, 25 nt, Human
ucuccucauugcuggugaacucgau

SEQ ID NO: 923827 - RNA, 20 nt, Human
ugagcgggcgcugggcuggc

SEQ ID NO: 923828 - RNA, 22 nt, Human
ugccuuccucagcugcuucagc

SEQ ID NO: 923829 - RNA, 22 nt, Human
ugcuguggcuggggauccuucu

SEQ ID NO: 923830 - RNA, 22 nt, Human
ugcuuuaaacuggggcuuuaug

SEQ ID NO: 923831 - RNA, 24 nt, Human
uggagucaucucuggguuccacau

SEQ ID NO: 923832 - RNA, 18 nt, Human
uggcaacugcuguggcug

SEQ ID NO: 923833 - RNA, 22 nt, Human
uggcuguccuggccccacgccu

SEQ ID NO: 923834 - RNA, 21 nt, Human
ugggccacgggaugaguggga

SEQ ID NO: 923835 - RNA, 19 nt, Human
uggggcuuuauguggccag

SEQ ID NO: 923836 - RNA, 21 nt, Human
uggggucccggcacagcaucu

SEQ ID NO: 923837 - RNA, 22 nt, Human
uggguggcaacugcuguggcug

SEQ ID NO: 923838 - RNA, 24 nt, Human
uucccgcgccgggauccagggcuc

SEQ ID NO: 923839 - RNA, 21 nt, Human
uuccucagcugcuucagcaac

SEQ ID NO: 923840 - RNA, 26 nt, Human
aaaaaaacuaugcaaaagaacuugaa

SEQ ID NO: 923841 - RNA, 30 nt, Human
aaaaacccacaccuucucgcuucugcccuu

SEQ ID NO: 923842 - RNA, 25 nt, Human
aaacccacaccuucucgcuucugcc

SEQ ID NO: 923843 - RNA, 21 nt, Human
aaagaacuugaauccaaugag

SEQ ID NO: 923844 - RNA, 22 nt, Human
aaagaacuugaauccaaugagc

SEQ ID NO: 923845 - RNA, 19 nt, Human
aaauagcugcauaaaucug

SEQ ID NO: 923846 - RNA, 23 nt, Human
aaaugucuuuuuaaacaaauucc

SEQ ID NO: 923847 - RNA, 23 nt, Human
aaauucccccaccauuccacacc

SEQ ID NO: 923848 - RNA, 23 nt, Human
aaccccuaccccacucugaacag

SEQ ID NO: 923849 - RNA, 20 nt, Human
aacuaucucccaccacagca

SEQ ID NO: 923850 - RNA, 19 nt, Human
aagcaaacccaacuccgau

SEQ ID NO: 923851 - RNA, 19 nt, Human
acaggcuccuuucucccuc

SEQ ID NO: 923852 - RNA, 19 nt, Human
acaggggccagcaggcccc

SEQ ID NO: 923853 - RNA, 20 nt, Human
accccuggagaccaagguca

SEQ ID NO: 923854 - RNA, 22 nt, Human
acccuuguguggugcagcccca

SEQ ID NO: 923855 - RNA, 20 nt, Human
agacgagguggguggaccag

SEQ ID NO: 923856 - RNA, 20 nt, Human
agagcuggggguacaaggcc

SEQ ID NO: 923857 - RNA, 24 nt, Human
agcacgacgggggcaggguggggc

SEQ ID NO: 923858 - RNA, 23 nt, Human
agggguuagaaaaaaacuaugca

SEQ ID NO: 923859 - RNA, 19 nt, Human
agggucuuugggggcggga

SEQ ID NO: 923860 - RNA, 22 nt, Human
agguggguggaccaggacgcga

SEQ ID NO: 923861 - RNA, 21 nt, Human
auccagugcaaacuuuccuuc

SEQ ID NO: 923862 - RNA, 24 nt, Human
caaaagaacuugaauccaaugagc

SEQ ID NO: 923863 - RNA, 20 nt, Human
caaaauaagcaaacccaacu

SEQ ID NO: 923864 - RNA, 21 nt, Human
caaaauaagcaaacccaacuc

SEQ ID NO: 923865 - RNA, 24 nt, Human
caaagacacacucaccccucaaag

SEQ ID NO: 923866 - RNA, 21 nt, Human
caaauucccccaccauuccac

SEQ ID NO: 923867 - RNA, 19 nt, Human
cacaaggcgccauggcugc

SEQ ID NO: 923868 - RNA, 24 nt, Human
cacccacaaaggaggcugcacaag

SEQ ID NO: 923869 - RNA, 20 nt, Human
cagcaaaaacagugaucugg

SEQ ID NO: 923870 - RNA, 22 nt, Human
cagccagguggggggacuggcg

SEQ ID NO: 923871 - RNA, 23 nt, Human
caggaucaggacagccagagcug

SEQ ID NO: 923872 - RNA, 18 nt, Human
caggcuccuuucucccuc

SEQ ID NO: 923873 - RNA, 23 nt, Human
cagggaauguaugaaaauagcug

SEQ ID NO: 923874 - RNA, 19 nt, Human
caugcaaagacacacucac

SEQ ID NO: 923875 - RNA, 21 nt, Human
cauuuagcucugaccuucacc

SEQ ID NO: 923876 - RNA, 22 nt, Human
ccagagccaucagggggcacag

SEQ ID NO: 923877 - RNA, 19 nt, Human
cccacaccuucucgcuucu

SEQ ID NO: 923878 - RNA, 21 nt, Human
ccccaccauuccacaccccug

SEQ ID NO: 923879 - RNA, 24 nt, Human
ccccagaacccgggccgggggaca

SEQ ID NO: 923880 - RNA, 23 nt, Human
ccccagucauguugcucucucua

SEQ ID NO: 923881 - RNA, 21 nt, Human
cccccaccauuccacaccccu

SEQ ID NO: 923882 - RNA, 23 nt, Human
ccccucaaagggugggggaugga

SEQ ID NO: 923883 - RNA, 18 nt, Human
ccccuggacuccaacagg

SEQ ID NO: 923884 - RNA, 26 nt, Human
ccccuggagaccaaggucaagguggg

SEQ ID NO: 923885 - RNA, 23 nt, Human
ccccuuggaaaaaaacccacacc

SEQ ID NO: 923886 - RNA, 22 nt, Human
ccgcccgccugcccgcugggga

SEQ ID NO: 923887 - RNA, 18 nt, Human
ccuccuguaggaggaagg

SEQ ID NO: 923888 - RNA, 19 nt, Human
ccugaggagcugcuucccc

SEQ ID NO: 923889 - RNA, 19 nt, Human
ccugugcaguggaagcgag

SEQ ID NO: 923890 - RNA, 18 nt, Human
ccuuaaggagccauuuag

SEQ ID NO: 923891 - RNA, 21 nt, Human
cgcuuucggccccgcuggccc

SEQ ID NO: 923892 - RNA, 26 nt, Human
cggaaaaccccuaccccacucugaac

SEQ ID NO: 923893 - RNA, 19 nt, Human
cuaaaaaguucauccuuaa

SEQ ID NO: 923894 - RNA, 21 nt, Human
cuaugcaaaagaacuugaauc

SEQ ID NO: 923895 - RNA, 18 nt, Human
cuccgcccgccugcccgc

SEQ ID NO: 923896 - RNA, 18 nt, Human
cuccuucuucccagagcc

SEQ ID NO: 923897 - RNA, 22 nt, Human
cugagccuucccugcucagcaa

SEQ ID NO: 923898 - RNA, 21 nt, Human
cuggagaccaaggucaaggug

SEQ ID NO: 923899 - RNA, 22 nt, Human
cugggaaggguggcaaaaggga

SEQ ID NO: 923900 - RNA, 20 nt, Human
cugugcaguggaagcgaggu

SEQ ID NO: 923901 - RNA, 25 nt, Human
cuucugccugcaggaugggccacag

SEQ ID NO: 923902 - RNA, 19 nt, Human
cuuuccuucaggggaggga

SEQ ID NO: 923903 - RNA, 20 nt, Human
cuuucuccuuccugggccug

SEQ ID NO: 923904 - RNA, 27 nt, Human
gcaaaagaacuugaauccaaugagcaa

SEQ ID NO: 923905 - RNA, 25 nt, Human
gcaaacuuuccuucaggggagggaa

SEQ ID NO: 923906 - RNA, 22 nt, Human
gcacaggcuccuuucucccucc

SEQ ID NO: 923907 - RNA, 18 nt, Human
gccagccccucuccccuc

SEQ ID NO: 923908 - RNA, 18 nt, Human
gccaucagggggcacagg

SEQ ID NO: 923909 - RNA, 20 nt, Human
gccuuucuccuuccugggcc

SEQ ID NO: 923910 - RNA, 21 nt, Human
ggaaacaugcaaagacacacu

SEQ ID NO: 923911 - RNA, 18 nt, Human
ggacaucacccagccagg

SEQ ID NO: 923912 - RNA, 23 nt, Human
ggagccauuuagcucugaccuuc

SEQ ID NO: 923913 - RNA, 21 nt, Human
ggaucggguaacggcggaaaa

SEQ ID NO: 923914 - RNA, 24 nt, Human
ggcugcacaaggcgccauggcugc

SEQ ID NO: 923915 - RNA, 21 nt, Human
gggagggaagacaggaucagg

SEQ ID NO: 923916 - RNA, 24 nt, Human
gggccagcaggccccggcagggaa

SEQ ID NO: 923917 - RNA, 23 nt, Human
gggcccuggggacccuugugugg

SEQ ID NO: 923918 - RNA, 20 nt, Human
gggggcccuggggacccuug

SEQ ID NO: 923919 - RNA, 21 nt, Human
gggggcgcugccagagcuggg

SEQ ID NO: 923920 - RNA, 19 nt, Human
ggguacaaggcccaccugg

SEQ ID NO: 923921 - RNA, 18 nt, Human
gggucuuugggggcggga

SEQ ID NO: 923922 - RNA, 23 nt, Human
gucaaacuaucucccaccacagc

SEQ ID NO: 923923 - RNA, 19 nt, Human
guccuuuucuccagccccu

SEQ ID NO: 923924 - RNA, 23 nt, Human
uaagcaaacccaacuccgcuuuc

SEQ ID NO: 923925 - RNA, 18 nt, Human
uacaaggcccaccugggg

SEQ ID NO: 923926 - RNA, 18 nt, Human
uacauauaucuaucucca

SEQ ID NO: 923927 - RNA, 23 nt, Human
uagacgagguggguggaccagga

SEQ ID NO: 923928 - RNA, 18 nt, Human
uaugcaaaagaacuugaa

SEQ ID NO: 923929 - RNA, 23 nt, Human
ucauguugcucucucuacauaua

SEQ ID NO: 923930 - RNA, 20 nt, Human
uccccuuggaaaaaaaccca

SEQ ID NO: 923931 - RNA, 21 nt, Human
uccuggguccaguccuggcuc

SEQ ID NO: 923932 - RNA, 22 nt, Human
ucuccuuccugggccugugcag

SEQ ID NO: 923933 - RNA, 20 nt, Human
ucugggggccucucagggcc

SEQ ID NO: 923934 - RNA, 21 nt, Human
ucuguccuuuucuccagcccc

SEQ ID NO: 923935 - RNA, 23 nt, Human
ugaacagggaauguaugaaaaua

SEQ ID NO: 923936 - RNA, 20 nt, Human
ugaguauauacauauauaca

SEQ ID NO: 923937 - RNA, 22 nt, Human
ugaucugggggccucucagggc

SEQ ID NO: 923938 - RNA, 19 nt, Human
ugcucagcaaaaacaguga

SEQ ID NO: 923939 - RNA, 21 nt, Human
ugcuucaccgacgcuccaucc

SEQ ID NO: 923940 - RNA, 20 nt, Human
uggaaaaaaacccacaccuu

SEQ ID NO: 923941 - RNA, 24 nt, Human
uggaaaaaaacccacaccuucucg

SEQ ID NO: 923942 - RNA, 22 nt, Human
uggaggaagcugaacugaggca

SEQ ID NO: 923943 - RNA, 18 nt, Human
uggaucggguaacggcgg

SEQ ID NO: 923944 - RNA, 23 nt, Human
uggcaaaagggacuagcgcagca

SEQ ID NO: 923945 - RNA, 18 nt, Human
uggcugagcucuucucca

SEQ ID NO: 923946 - RNA, 21 nt, Human
ugggaaggguggcaaaaggga

SEQ ID NO: 923947 - RNA, 18 nt, Human
uggggcuccccacguuca

SEQ ID NO: 923948 - RNA, 22 nt, Human
ugggggccucucagggccucuu

SEQ ID NO: 923949 - RNA, 23 nt, Human
uggggguacaaggcccaccuggg

SEQ ID NO: 923950 - RNA, 24 nt, Human
uggggguucagucaaacuaucucc

SEQ ID NO: 923951 - RNA, 20 nt, Human
uucccagagcccauccuccu

SEQ ID NO: 923952 - RNA, 21 nt, Human
uuuuuuuuuuuuuuugugaaa

SEQ ID NO: 923953 - RNA, 18 nt, Human
uuuuuuuuuuuuuuuuug

SEQ ID NO: 923954 - RNA, 19 nt, Human
uuuuuuuuuuuuuuuuugu

SEQ ID NO: 923955 - RNA, 18 nt, Human
aaagcugcucccagccuu

SEQ ID NO: 923956 - RNA, 21 nt, Human
aacaugccuaaacaaaaaaga

SEQ ID NO: 923957 - RNA, 20 nt, Human
aagaaaaacuaaagucaccc

SEQ ID NO: 923958 - RNA, 22 nt, Human
aagcacuccuaagcugaagaaa

SEQ ID NO: 923959 - RNA, 23 nt, Human
acaccaaguccacacugguaagc

SEQ ID NO: 923960 - RNA, 21 nt, Human
acccccaacaaagggcaaugc

SEQ ID NO: 923961 - RNA, 19 nt, Human
acggccccgagagcaacaa

SEQ ID NO: 923962 - RNA, 19 nt, Human
acguacuguaugagguaaa

SEQ ID NO: 923963 - RNA, 19 nt, Human
aguccagguccagaccuac

SEQ ID NO: 923964 - RNA, 27 nt, Human
caaaaccaagucuccuaggaccacuaa

SEQ ID NO: 923965 - RNA, 22 nt, Human
cacaggaaugggggagaugaga

SEQ ID NO: 923966 - RNA, 18 nt, Human
caccuccccaguagugac

SEQ ID NO: 923967 - RNA, 20 nt, Human
cacggccccgagagcaacaa

SEQ ID NO: 923968 - RNA, 26 nt, Human
cagaucuccacgacaaagacagcuca

SEQ ID NO: 923969 - RNA, 21 nt, Human
cauacccccaacaaagggcag

SEQ ID NO: 923970 - RNA, 22 nt, Human
ccagaucuccacgacaaagaca

SEQ ID NO: 923971 - RNA, 18 nt, Human
ccaguagugacaugugca

SEQ ID NO: 923972 - RNA, 18 nt, Human
ccauggucauggaaccug

SEQ ID NO: 923973 - RNA, 19 nt, Human
ccccgagagcaacaaccac

SEQ ID NO: 923974 - RNA, 26 nt, Human
ccuaggaccacuaaaccuaugauggg

SEQ ID NO: 923975 - RNA, 27 nt, Human
ccucaucguggaagcuagagcaggaac

SEQ ID NO: 923976 - RNA, 19 nt, Human
ccucuuugccaguagggca

SEQ ID NO: 923977 - RNA, 24 nt, Human
ccucuuugccaguagggcaggcca

SEQ ID NO: 923978 - RNA, 21 nt, Human
ccugugugguggggacaaggc

SEQ ID NO: 923979 - RNA, 22 nt, Human
ccuuccugucaccucuuugcca

SEQ ID NO: 923980 - RNA, 19 nt, Human
cgccgagaaagcguuccga

SEQ ID NO: 923981 - RNA, 24 nt, Human
cuaacaccaaguccacacugguaa

SEQ ID NO: 923982 - RNA, 20 nt, Human
cuccaagcagccgugagucc

SEQ ID NO: 923983 - RNA, 20 nt, Human
cuccacacggccccgagagc

SEQ ID NO: 923984 - RNA, 19 nt, Human
cuccuaagcugaagaaaaa

SEQ ID NO: 923985 - RNA, 20 nt, Human
cuccuaggaccacuaaaccu

SEQ ID NO: 923986 - RNA, 24 nt, Human
cugaagaaaaacuaaagucacccc

SEQ ID NO: 923987 - RNA, 23 nt, Human
gcauguguguucauacaugcaua

SEQ ID NO: 923988 - RNA, 18 nt, Human
ggaagaauaaauaauagu

SEQ ID NO: 923989 - RNA, 19 nt, Human
ggacgcuccaagcagccgu

SEQ ID NO: 923990 - RNA, 19 nt, Human
ggagaugagagccaaggga

SEQ ID NO: 923991 - RNA, 21 nt, Human
ggcacaggaaugggggagaug

SEQ ID NO: 923992 - RNA, 24 nt, Human
gggggagaugagagccaagggaca

SEQ ID NO: 923993 - RNA, 22 nt, Human
ggugaaauaaaacaagcuuuga

SEQ ID NO: 923994 - RNA, 22 nt, Human
guaacacucauucacaucuuua

SEQ ID NO: 923995 - RNA, 20 nt, Human
gucauggaaccuggccaagg

SEQ ID NO: 923996 - RNA, 20 nt, Human
guugacaguaguacugcugc

SEQ ID NO: 923997 - RNA, 20 nt, Human
uaaacagcguggcuaacacu

SEQ ID NO: 923998 - RNA, 28 nt, Human
uacaguggugaaauaaaacaagcuuuga

SEQ ID NO: 923999 - RNA, 22 nt, Human
uacuccacacggccccgagagc

SEQ ID NO: 924000 - RNA, 20 nt, Human
ucaggccccauaugcuaaaa

SEQ ID NO: 924001 - RNA, 26 nt, Human
ucauacaugcauacccccaacaaagg

SEQ ID NO: 924002 - RNA, 23 nt, Human
uccacgacaaagacagcucaacc

SEQ ID NO: 924003 - RNA, 19 nt, Human
uccagguccagaccuacuc

SEQ ID NO: 924004 - RNA, 19 nt, Human
ucuccuaggaccacuaaac

SEQ ID NO: 924005 - RNA, 21 nt, Human
ucucuucaggaggaaggcugu

SEQ ID NO: 924006 - RNA, 22 nt, Human
ugaagaaaaacuaaagucaccc

SEQ ID NO: 924007 - RNA, 25 nt, Human
ugagguaaacagcguggcuaacacc

SEQ ID NO: 924008 - RNA, 22 nt, Human
ugcaaaguuccagaucuccacg

SEQ ID NO: 924009 - RNA, 18 nt, Human
uggccaagguuucaagca

SEQ ID NO: 924010 - RNA, 23 nt, Human
ugggcuuucaacuguaacacuca

SEQ ID NO: 924011 - RNA, 18 nt, Human
uguccuguguggugggga

SEQ ID NO: 924012 - RNA, 25 nt, Human
uguguucauacaugcauacccccaa

SEQ ID NO: 924013 - RNA, 22 nt, Human
uucaacuguaacacucauucac

SEQ ID NO: 924014 - RNA, 19 nt, Human
uuggaacaaacagacuccc

SEQ ID NO: 924015 - RNA, 18 nt, Human
uuuuuuuuuuuuuuuuug

SEQ ID NO: 924016 - RNA, 19 nt, Human
aaaagcuaaaacugaaccu

SEQ ID NO: 924017 - RNA, 21 nt, Human
aaaaguaauaaaauacacuga

SEQ ID NO: 924018 - RNA, 21 nt, Human
aaacaaaaucuacauccaacc

SEQ ID NO: 924019 - RNA, 29 nt, Human
aacagacaugaggugggugcuggauucaa

SEQ ID NO: 924020 - RNA, 18 nt, Human
aagaagaagaagaagaag

SEQ ID NO: 924021 - RNA, 20 nt, Human
aagaagaagaagaagaagaa

SEQ ID NO: 924022 - RNA, 22 nt, Human
aagaagaagaagaagaagaaga

SEQ ID NO: 924023 - RNA, 21 nt, Human
aagaagaagaagaagaagaca

SEQ ID NO: 924024 - RNA, 22 nt, Human
aagaagaagaagaagaagacaa

SEQ ID NO: 924025 - RNA, 21 nt, Human
aagaagaagaagaagacaacu

SEQ ID NO: 924026 - RNA, 22 nt, Human
aagaagaagaagacaacuuaga

SEQ ID NO: 924027 - RNA, 24 nt, Human
aagaagaagaagacaacuuagaaa

SEQ ID NO: 924028 - RNA, 20 nt, Human
aagaagaagacaacuuagaa

SEQ ID NO: 924029 - RNA, 24 nt, Human
acaccugcugcauagcacaagacu

SEQ ID NO: 924030 - RNA, 20 nt, Human
acacuauaacucacugaaug

SEQ ID NO: 924031 - RNA, 21 nt, Human
accaaagaagaagaagaagaa

SEQ ID NO: 924032 - RNA, 22 nt, Human
accaauaucuccuucuuaccac

SEQ ID NO: 924033 - RNA, 24 nt, Human
accacaaccacagaaugggaggca

SEQ ID NO: 924034 - RNA, 19 nt, Human
accaccacaaccacagaau

SEQ ID NO: 924035 - RNA, 24 nt, Human
accaccaccacaaccacagaaugg

SEQ ID NO: 924036 - RNA, 22 nt, Human
accuuggcaaaauaaaccccag

SEQ ID NO: 924037 - RNA, 22 nt, Human
agaagaagaagaagaagaagaa

SEQ ID NO: 924038 - RNA, 22 nt, Human
agaagaagaagaagaagaagaa

SEQ ID NO: 924039 - RNA, 22 nt, Human
agaagaagaagaagaagaagaa

SEQ ID NO: 924040 - RNA, 25 nt, Human
agaagaagaagaagacaacuuagaa

SEQ ID NO: 924041 - RNA, 22 nt, Human
agaagaagaagacaacuuagaa

SEQ ID NO: 924042 - RNA, 23 nt, Human
agaagaagaagacaacuuagaag

SEQ ID NO: 924043 - RNA, 24 nt, Human
agaagaagacaacuuagaagggaa

SEQ ID NO: 924044 - RNA, 21 nt, Human
agaagggaaagcaacaaagag

SEQ ID NO: 924045 - RNA, 21 nt, Human
agaccuaaugcacacccacaa

SEQ ID NO: 924046 - RNA, 18 nt, Human
agcaugucacaaaaaguu

SEQ ID NO: 924047 - RNA, 20 nt, Human
aggaaaaguaaggcucguca

SEQ ID NO: 924048 - RNA, 20 nt, Human
aggucuuucuguucuggagu

SEQ ID NO: 924049 - RNA, 21 nt, Human
augaaguaaggucuuucuguu

SEQ ID NO: 924050 - RNA, 18 nt, Human
auggaugagagacaaaac

SEQ ID NO: 924051 - RNA, 26 nt, Human
caaauuaaaaagaacguaacagggcc

SEQ ID NO: 924052 - RNA, 19 nt, Human
caacagcccaacaauaguu

SEQ ID NO: 924053 - RNA, 23 nt, Human
caagauaaagcaguucagaccua

SEQ ID NO: 924054 - RNA, 24 nt, Human
caaggaauauauccuuuaccaaug

SEQ ID NO: 924055 - RNA, 25 nt, Human
cacagccuuuaagccucugcccucc

SEQ ID NO: 924056 - RNA, 23 nt, Human
cagcauuaaaaguaauaaaauac

SEQ ID NO: 924057 - RNA, 23 nt, Human
cagccuuuucucuuucagguugu

SEQ ID NO: 924058 - RNA, 19 nt, Human
cagcucaagagcaaggcaa

SEQ ID NO: 924059 - RNA, 20 nt, Human
ccaaagaagaagaagaagaa

SEQ ID NO: 924060 - RNA, 20 nt, Human
ccacaaaggaaaaguaaggc

SEQ ID NO: 924061 - RNA, 18 nt, Human
ccaccacaaccacagaau

SEQ ID NO: 924062 - RNA, 19 nt, Human
ccauaaaaugaacauucca

SEQ ID NO: 924063 - RNA, 22 nt, Human
ccauaaaaugaacauuccauuc

SEQ ID NO: 924064 - RNA, 23 nt, Human
cccuucugucccacaccugggag

SEQ ID NO: 924065 - RNA, 24 nt, Human
ccuguguuuugcaaugcaggguca

SEQ ID NO: 924066 - RNA, 20 nt, Human
ccuucuuaccaccaccacaa

SEQ ID NO: 924067 - RNA, 21 nt, Human
cuacauacauguuuuccaaau

SEQ ID NO: 924068 - RNA, 22 nt, Human
cucacacauacaaacauguuua

SEQ ID NO: 924069 - RNA, 24 nt, Human
cuccuucuuaccaccaccacaacc

SEQ ID NO: 924070 - RNA, 20 nt, Human
cuggaguaauaaauucuacu

SEQ ID NO: 924071 - RNA, 28 nt, Human
cuuaaggaccaaagaagaagaagaagaa

SEQ ID NO: 924072 - RNA, 19 nt, Human
cuuuaagccucugcccucc

SEQ ID NO: 924073 - RNA, 20 nt, Human
gaacaugagcuucugaccua

SEQ ID NO: 924074 - RNA, 19 nt, Human
gaagaagaagaagaagaag

SEQ ID NO: 924075 - RNA, 19 nt, Human
gaagaagaagaagaagaag

SEQ ID NO: 924076 - RNA, 19 nt, Human
gaagaagaagaagaagaag

SEQ ID NO: 924077 - RNA, 19 nt, Human
gaagaagaagaagaagaag

SEQ ID NO: 924078 - RNA, 21 nt, Human
gaagagcuggcuucauuuuug

SEQ ID NO: 924079 - RNA, 18 nt, Human
gacugccauccgcaucuc

SEQ ID NO: 924080 - RNA, 18 nt, Human
ggaauauauccuuuacca

SEQ ID NO: 924081 - RNA, 19 nt, Human
gguaugaacacaauaugcc

SEQ ID NO: 924082 - RNA, 20 nt, Human
uaaaaacaaaaucuacaucc

SEQ ID NO: 924083 - RNA, 22 nt, Human
uaaaacugaaccuuuagaaaau

SEQ ID NO: 924084 - RNA, 20 nt, Human
uaaaacuuaaaacaacugcc

SEQ ID NO: 924085 - RNA, 19 nt, Human
uaacaggauagggucaaca

SEQ ID NO: 924086 - RNA, 21 nt, Human
uaaggucuuucuguucuggag

SEQ ID NO: 924087 - RNA, 25 nt, Human
uaauaaauaagaaaugccaccuucc

SEQ ID NO: 924088 - RNA, 20 nt, Human
uaccaccaccacaaccacag

SEQ ID NO: 924089 - RNA, 23 nt, Human
uaccaccaccacaaccacagaau

SEQ ID NO: 924090 - RNA, 19 nt, Human
uagcaugucacaaaaaguu

SEQ ID NO: 924091 - RNA, 22 nt, Human
uagggaaguuaaaaaaaaucag

SEQ ID NO: 924092 - RNA, 20 nt, Human
uaucagaacaugagcuucug

SEQ ID NO: 924093 - RNA, 27 nt, Human
uaucuccuucuuaccaccaccacaacc

SEQ ID NO: 924094 - RNA, 19 nt, Human
ucaaaacaauagguuuuuc

SEQ ID NO: 924095 - RNA, 18 nt, Human
ucaaugauaaaaacaaaa

SEQ ID NO: 924096 - RNA, 20 nt, Human
ucacauuuaaauaacaggau

SEQ ID NO: 924097 - RNA, 19 nt, Human
ucacuuaaggaccaaagaa

SEQ ID NO: 924098 - RNA, 28 nt, Human
ucacuuaaggaccaaagaagaagaagaa

SEQ ID NO: 924099 - RNA, 22 nt, Human
ucauuuuaagacagcauuaaaa

SEQ ID NO: 924100 - RNA, 20 nt, Human
uccacuagucuucuccuaga

SEQ ID NO: 924101 - RNA, 20 nt, Human
uccaucuaccggcugugagg

SEQ ID NO: 924102 - RNA, 18 nt, Human
uccauuuucaguuuccau

SEQ ID NO: 924103 - RNA, 21 nt, Human
ucccucugccccuucuguccc

SEQ ID NO: 924104 - RNA, 24 nt, Human
uccuucuuaccaccaccacaacca

SEQ ID NO: 924105 - RNA, 26 nt, Human
uccuucuuaccaccaccacaaccaca

SEQ ID NO: 924106 - RNA, 21 nt, Human
uccuuuaccaaugaaugauaa

SEQ ID NO: 924107 - RNA, 22 nt, Human
ucuacauccaaccuacuccaaa

SEQ ID NO: 924108 - RNA, 23 nt, Human
ugaaagccaugcgauuuggcucg

SEQ ID NO: 924109 - RNA, 22 nt, Human
ugagaacagacaugaggugggu

SEQ ID NO: 924110 - RNA, 18 nt, Human
ugagagacaaaacugugg

SEQ ID NO: 924111 - RNA, 19 nt, Human
ugagagacaaaacuguggu

SEQ ID NO: 924112 - RNA, 20 nt, Human
ugagcuucugaccuaaucca

SEQ ID NO: 924113 - RNA, 19 nt, Human
ugaggaagagcuggcuuca

SEQ ID NO: 924114 - RNA, 21 nt, Human
ugcacacccacaaaaugcccc

SEQ ID NO: 924115 - RNA, 19 nt, Human
ugccauaaaaugaacauuc

SEQ ID NO: 924116 - RNA, 22 nt, Human
ugccaucucuucaaauccaggu

SEQ ID NO: 924117 - RNA, 22 nt, Human
ugcgaaaucuacacaucaauaa

SEQ ID NO: 924118 - RNA, 19 nt, Human
ugcuggcacaaacagggcg

SEQ ID NO: 924119 - RNA, 18 nt, Human
uggaaagcacuaccaaca

SEQ ID NO: 924120 - RNA, 26 nt, Human
uggcacauccugucuccaccuuuggu

SEQ ID NO: 924121 - RNA, 19 nt, Human
ugugaggaagagcuggcuu

SEQ ID NO: 924122 - RNA, 23 nt, Human
uguucuguggcaaaaaccgaggg

SEQ ID NO: 924123 - RNA, 21 nt, Human
uuccaauaaguuauuccugaa

SEQ ID NO: 924124 - RNA, 23 nt, Human
uuccaucuaccggcugugaggaa

SEQ ID NO: 924125 - RNA, 19 nt, Human
uuccugaagggaggggaga

SEQ ID NO: 924126 - RNA, 19 nt, Human
uucucuccaccucgaaauc

SEQ ID NO: 924127 - RNA, 21 nt, Human
uucugcugacaucaagcagcc

SEQ ID NO: 924128 - RNA, 24 nt, Human
uucugucccacaccugggagggcu

SEQ ID NO: 924129 - RNA, 25 nt, Human
uuggcacauccugucuccaccuuug

SEQ ID NO: 924130 - RNA, 21 nt, Human
uuggcucgacugccauccgca

SEQ ID NO: 924131 - RNA, 22 nt, Human
uuggcucgacugccauccgcau

SEQ ID NO: 924132 - RNA, 19 nt, Human
uuucucucucucucucuca

SEQ ID NO: 924133 - RNA, 20 nt, Human
uuuguuaaauuacugaaaac

SEQ ID NO: 924134 - RNA, 21 nt, Human
aaggcaacgggucaagaacac

SEQ ID NO: 924135 - RNA, 21 nt, Human
acauggagcaccuggcagagc

SEQ ID NO: 924136 - RNA, 22 nt, Human
accgagguucagagaggcagag

SEQ ID NO: 924137 - RNA, 19 nt, Human
agagacacugaggaccugg

SEQ ID NO: 924138 - RNA, 23 nt, Human
aggacagagauucaggaagagaa

SEQ ID NO: 924139 - RNA, 24 nt, Human
auggagcaccuggcagagcugccg

SEQ ID NO: 924140 - RNA, 19 nt, Human
auucaggaagagaagaaca

SEQ ID NO: 924141 - RNA, 24 nt, Human
auugacaaggaggauacaagggca

SEQ ID NO: 924142 - RNA, 18 nt, Human
cacguuacacuccucagg

SEQ ID NO: 924143 - RNA, 22 nt, Human
ccacccacggagguagccgccu

SEQ ID NO: 924144 - RNA, 18 nt, Human
ccagagaaaggcaacggg

SEQ ID NO: 924145 - RNA, 23 nt, Human
ccauccuucuagaacuccaggcu

SEQ ID NO: 924146 - RNA, 22 nt, Human
cccacaguccauugagguggcu

SEQ ID NO: 924147 - RNA, 18 nt, Human
cccugcuugagacugggg

SEQ ID NO: 924148 - RNA, 19 nt, Human
cccugcuugagacugggga

SEQ ID NO: 924149 - RNA, 18 nt, Human
cucacucuccauccuucu

SEQ ID NO: 924150 - RNA, 21 nt, Human
cucacucuccauccuucuaga

SEQ ID NO: 924151 - RNA, 18 nt, Human
cuccucaggucucccgga

SEQ ID NO: 924152 - RNA, 23 nt, Human
cucuccauccuucuagaacucca

SEQ ID NO: 924153 - RNA, 24 nt, Human
gaacacagcacacaccccuucugc

SEQ ID NO: 924154 - RNA, 22 nt, Human
gaacuuccuuuauugacaagga

SEQ ID NO: 924155 - RNA, 24 nt, Human
gcagagcugccgaugggucugcca

SEQ ID NO: 924156 - RNA, 20 nt, Human
uaccagagaaaggcaacggg

SEQ ID NO: 924157 - RNA, 20 nt, Human
ucaauuuacuuaagccuccc

SEQ ID NO: 924158 - RNA, 22 nt, Human
ucaggaagagaagaacaaggcu

SEQ ID NO: 924159 - RNA, 21 nt, Human
ugaagaaaccgagguucagag

SEQ ID NO: 924160 - RNA, 19 nt, Human
ugacaaggaggauacaagg

SEQ ID NO: 924161 - RNA, 22 nt, Human
ugacaaggaggauacaagggca

SEQ ID NO: 924162 - RNA, 21 nt, Human
uggagcaccuggcagagcugc

SEQ ID NO: 924163 - RNA, 23 nt, Human
uggauccccucacucuccauccu

SEQ ID NO: 924164 - RNA, 27 nt, Human
uggcaggacagagauucaggaagagaa

SEQ ID NO: 924165 - RNA, 22 nt, Human
ugggaccauguguggcaggaca

SEQ ID NO: 924166 - RNA, 20 nt, Human
ugggguaagacaccaguacc

SEQ ID NO: 924167 - RNA, 21 nt, Human
uuccuggacuaaguuagggaa

SEQ ID NO: 924168 - RNA, 26 nt, Human
uuccuuuauugacaaggaggauacaa

SEQ ID NO: 924169 - RNA, 21 nt, Human
aacccccgcgcccgaccacac

SEQ ID NO: 924170 - RNA, 23 nt, Human
aacccccgcgcccgaccacaccc

SEQ ID NO: 924171 - RNA, 18 nt, Human
aagagagguacaaaugua

SEQ ID NO: 924172 - RNA, 24 nt, Human
aagguuaaagugaccaucuucugg

SEQ ID NO: 924173 - RNA, 18 nt, Human
aaguccgcucuccugccc

SEQ ID NO: 924174 - RNA, 24 nt, Human
acaacccccgcgcccgaccacacc

SEQ ID NO: 924175 - RNA, 18 nt, Human
acacgggccaaggcgggg

SEQ ID NO: 924176 - RNA, 20 nt, Human
acagcugaaggggagggggc

SEQ ID NO: 924177 - RNA, 22 nt, Human
accacacccggacaaggagguc

SEQ ID NO: 924178 - RNA, 19 nt, Human
acggccgggccgacggggg

SEQ ID NO: 924179 - RNA, 20 nt, Human
acuucaggacaccaguccca

SEQ ID NO: 924180 - RNA, 20 nt, Human
agaauacaagagagguacaa

SEQ ID NO: 924181 - RNA, 25 nt, Human
aggacucucgguggcggaggagggg

SEQ ID NO: 924182 - RNA, 18 nt, Human
aggcagggggacccccuc

SEQ ID NO: 924183 - RNA, 20 nt, Human
aucugcgacacgggccaagg

SEQ ID NO: 924184 - RNA, 19 nt, Human
auuuuagaauacaagagag

SEQ ID NO: 924185 - RNA, 18 nt, Human
caacccccgcgcccgacc

SEQ ID NO: 924186 - RNA, 24 nt, Human
cacaacccccgcgcccgaccacac

SEQ ID NO: 924187 - RNA, 18 nt, Human
cacagaagccaccuuaac

SEQ ID NO: 924188 - RNA, 19 nt, Human
cacagaagccaccuuaacc

SEQ ID NO: 924189 - RNA, 23 nt, Human
cacagcucggaagcgcuucgugg

SEQ ID NO: 924190 - RNA, 22 nt, Human
caccagagggcgcgcacggccc

SEQ ID NO: 924191 - RNA, 27 nt, Human
caccuuaaccucucgggcagcgguucc

SEQ ID NO: 924192 - RNA, 21 nt, Human
caggcacgaugucacagcuga

SEQ ID NO: 924193 - RNA, 23 nt, Human
caggcagggggacccccucccag

SEQ ID NO: 924194 - RNA, 23 nt, Human
ccacagaagccaccuuaaccucu

SEQ ID NO: 924195 - RNA, 20 nt, Human
ccacccacgagggggaugcc

SEQ ID NO: 924196 - RNA, 21 nt, Human
cccaggggccggaagaggaga

SEQ ID NO: 924197 - RNA, 18 nt, Human
cccaguagcccgcacaug

SEQ ID NO: 924198 - RNA, 21 nt, Human
cccaguagcccgcacauguca

SEQ ID NO: 924199 - RNA, 26 nt, Human
ccccacaacccccgcgcccgaccaca

SEQ ID NO: 924200 - RNA, 20 nt, Human
cccccacaacccccgcgccc

SEQ ID NO: 924201 - RNA, 24 nt, Human
cccccacaacccccgcgcccgacc

SEQ ID NO: 924202 - RNA, 23 nt, Human
cccccgcgcccgaccacacccgg

SEQ ID NO: 924203 - RNA, 20 nt, Human
ccccgcgcccgaccacaccc

SEQ ID NO: 924204 - RNA, 23 nt, Human
cccggcgccgggggacggccggg

SEQ ID NO: 924205 - RNA, 23 nt, Human
ccgccuccggggcgcaaccccag

SEQ ID NO: 924206 - RNA, 22 nt, Human
ccgcgcccgaccacacccggac

SEQ ID NO: 924207 - RNA, 18 nt, Human
ccggcucuacagcagcag

SEQ ID NO: 924208 - RNA, 19 nt, Human
ccgggccggggguuggggc

SEQ ID NO: 924209 - RNA, 18 nt, Human
ccggggguuggggcugga

SEQ ID NO: 924210 - RNA, 21 nt, Human
ccgggucucuucccgcugccg

SEQ ID NO: 924211 - RNA, 24 nt, Human
ccuacgggaauccugguaaaugac

SEQ ID NO: 924212 - RNA, 21 nt, Human
ccuucauuuuacagaugggga

SEQ ID NO: 924213 - RNA, 21 nt, Human
cgguggcggaggaggggacuc

SEQ ID NO: 924214 - RNA, 26 nt, Human
gaagaugcaucucuccgggucucuuc

SEQ ID NO: 924215 - RNA, 18 nt, Human
gaccacacccggacaagg

SEQ ID NO: 924216 - RNA, 23 nt, Human
gagcgcgcggggcccggcggggg

SEQ ID NO: 924217 - RNA, 21 nt, Human
gcaucucuccgggucucuucc

SEQ ID NO: 924218 - RNA, 23 nt, Human
gccaccuuaaccucucgggcagc

SEQ ID NO: 924219 - RNA, 18 nt, Human
gcccccacaacccccgcg

SEQ ID NO: 924220 - RNA, 20 nt, Human
gccggccugggcgcccggcu

SEQ ID NO: 924221 - RNA, 21 nt, Human
gccuaaaggagagaagggccc

SEQ ID NO: 924222 - RNA, 21 nt, Human
gcgcccccacaacccccgcgc

SEQ ID NO: 924223 - RNA, 22 nt, Human
gcgcggggcccggcgggggcgc

SEQ ID NO: 924224 - RNA, 24 nt, Human
gcucggggucccacagaggauuuc

SEQ ID NO: 924225 - RNA, 21 nt, Human
ggaauucccgggacugggcac

SEQ ID NO: 924226 - RNA, 18 nt, Human
ggccggggguuggggcug

SEQ ID NO: 924227 - RNA, 18 nt, Human
ggccugggcgcccggcuc

SEQ ID NO: 924228 - RNA, 23 nt, Human
ggcucuaaguccgcucuccugcc

SEQ ID NO: 924229 - RNA, 18 nt, Human
gggcagggaccgagggaa

SEQ ID NO: 924230 - RNA, 26 nt, Human
gggccggggugccggggacccaggag

SEQ ID NO: 924231 - RNA, 22 nt, Human
ggggguaagcuggccuaaagga

SEQ ID NO: 924232 - RNA, 19 nt, Human
gguauauuucgccuuccca

SEQ ID NO: 924233 - RNA, 21 nt, Human
gugcacugcaaagagcuccuu

SEQ ID NO: 924234 - RNA, 21 nt, Human
gugcagggucuugcucggggu

SEQ ID NO: 924235 - RNA, 21 nt, Human
guguguguuggaaggggcugg

SEQ ID NO: 924236 - RNA, 20 nt, Human
guguguuggaaggggcuggg

SEQ ID NO: 924237 - RNA, 24 nt, Human
uacaaaacgcccuacgggaauccu

SEQ ID NO: 924238 - RNA, 24 nt, Human
uauuuacaguuguacauauacaau

SEQ ID NO: 924239 - RNA, 20 nt, Human
ucacagcugaaggggagggg

SEQ ID NO: 924240 - RNA, 23 nt, Human
uccuucauuuuacagauggggaa

SEQ ID NO: 924241 - RNA, 23 nt, Human
ucugcgacacgggccaaggcggg

SEQ ID NO: 924242 - RNA, 18 nt, Human
ucuugcucggggucccac

SEQ ID NO: 924243 - RNA, 20 nt, Human
ugaggaaacgggcagggacc

SEQ ID NO: 924244 - RNA, 18 nt, Human
ugcaaagagcuccuuccu

SEQ ID NO: 924245 - RNA, 22 nt, Human
ugcaaagagcuccuuccucauc

SEQ ID NO: 924246 - RNA, 24 nt, Human
ugcaaagagcuccuuccucauccg

SEQ ID NO: 924247 - RNA, 18 nt, Human
ugcugaggggcccucggg

SEQ ID NO: 924248 - RNA, 18 nt, Human
uggaaggggcugggggua

SEQ ID NO: 924249 - RNA, 18 nt, Human
uggcggaggaggggacuc

SEQ ID NO: 924250 - RNA, 19 nt, Human
uguguguguuggaaggggc

SEQ ID NO: 924251 - RNA, 22 nt, Human
uguguguguuggaaggggcugg

SEQ ID NO: 924252 - RNA, 19 nt, Human
aacuugaccaauuuguaca

SEQ ID NO: 924253 - RNA, 25 nt, Human
acacacaccacauuuguauucuacc

SEQ ID NO: 924254 - RNA, 25 nt, Human
agaggcccggggugcggagguacug

SEQ ID NO: 924255 - RNA, 26 nt, Human
agagucccacccgagagggucacauu

SEQ ID NO: 924256 - RNA, 18 nt, Human
agcucuccagguggccag

SEQ ID NO: 924257 - RNA, 22 nt, Human
aggcaggcgcucgggugcucca

SEQ ID NO: 924258 - RNA, 22 nt, Human
agguacugguggcacucgagcu

SEQ ID NO: 924259 - RNA, 19 nt, Human
auaaaacaacacacaccac

SEQ ID NO: 924260 - RNA, 25 nt, Human
augagaacagauaaaauguaaacaa

SEQ ID NO: 924261 - RNA, 21 nt, Human
caaucuggaaccaaaaccaaa

SEQ ID NO: 924262 - RNA, 24 nt, Human
cagaaaaguacaacuuaaaaauac

SEQ ID NO: 924263 - RNA, 21 nt, Human
ccaaaauacuauacccacugu

SEQ ID NO: 924264 - RNA, 25 nt, Human
ccaaaauacuauacccacuguacag

SEQ ID NO: 924265 - RNA, 18 nt, Human
ccagaggcccggggugcg

SEQ ID NO: 924266 - RNA, 25 nt, Human
cccucuucccaccaccaggaguucc

SEQ ID NO: 924267 - RNA, 19 nt, Human
ccucaccccgccccuuccc

SEQ ID NO: 924268 - RNA, 24 nt, Human
ccucaccccgccccuucccgggaa

SEQ ID NO: 924269 - RNA, 25 nt, Human
ccucucaaaaacaaaaacgguuuug

SEQ ID NO: 924270 - RNA, 19 nt, Human
ccuuuuggcaccgcuagcg

SEQ ID NO: 924271 - RNA, 23 nt, Human
cgacuccucucuguccucacccc

SEQ ID NO: 924272 - RNA, 25 nt, Human
cgagaauaaacccucgacuccucuc

SEQ ID NO: 924273 - RNA, 21 nt, Human
cgccccuucccgggaagacuc

SEQ ID NO: 924274 - RNA, 24 nt, Human
cuuuaaaauuauauauugcgugcu

SEQ ID NO: 924275 - RNA, 25 nt, Human
gaggcccggggugcggagguacugg

SEQ ID NO: 924276 - RNA, 22 nt, Human
gaguuuggugagagaguugcgc

SEQ ID NO: 924277 - RNA, 18 nt, Human
gccccgacgugcguccuc

SEQ ID NO: 924278 - RNA, 20 nt, Human
gcccucucaaaaacaaaaac

SEQ ID NO: 924279 - RNA, 18 nt, Human
gccgccgccaccaggcag

SEQ ID NO: 924280 - RNA, 20 nt, Human
ggaagggcgcgagugacaga

SEQ ID NO: 924281 - RNA, 23 nt, Human
ggcgcccucucaaaaacaaaaac

SEQ ID NO: 924282 - RNA, 20 nt, Human
ggcgggcaugcacugcgccu

SEQ ID NO: 924283 - RNA, 22 nt, Human
ggugagcucauccaagaagucc

SEQ ID NO: 924284 - RNA, 19 nt, Human
uacagcagucauuauaaaa

SEQ ID NO: 924285 - RNA, 24 nt, Human
uagucuuugacaugagaacagaua

SEQ ID NO: 924286 - RNA, 19 nt, Human
ucagcaccagaugugggac

SEQ ID NO: 924287 - RNA, 18 nt, Human
uccuccacagaaaaguac

SEQ ID NO: 924288 - RNA, 20 nt, Human
uccucuacugcgagaauaaa

SEQ ID NO: 924289 - RNA, 24 nt, Human
ugagaacagauaaaauguaaacaa

SEQ ID NO: 924290 - RNA, 20 nt, Human
uggaaccaaaaccaaaauac

SEQ ID NO: 924291 - RNA, 19 nt, Human
uggcaccgcuagcgcaagg

SEQ ID NO: 924292 - RNA, 30 nt, Human
uguacagcagucauuauaaaacaacacacc

SEQ ID NO: 924293 - RNA, 18 nt, Human
uuaaaaucugcgcccucg

SEQ ID NO: 924294 - RNA, 24 nt, Human
uucaaaaggcacaauuuccuccac

SEQ ID NO: 924295 - RNA, 22 nt, Human
uucagggugagcucauccaaga

SEQ ID NO: 924296 - RNA, 21 nt, Human
uuccuccacagaaaaguacaa

SEQ ID NO: 924297 - RNA, 20 nt, Human
uuggaagggcgcgagugaca

SEQ ID NO: 924298 - RNA, 24 nt, Human
aaagugcugggauuacaggcguga

SEQ ID NO: 924299 - RNA, 20 nt, Human
aaccuccgucuccugugcuc

SEQ ID NO: 924300 - RNA, 19 nt, Human
aagugcugggauuacaggc

SEQ ID NO: 924301 - RNA, 19 nt, Human
aagugcugggauuacaggc

SEQ ID NO: 924302 - RNA, 24 nt, Human
accauguugcccaggcuggucucg

SEQ ID NO: 924303 - RNA, 25 nt, Human
accauguugcccaggcuggucucga

SEQ ID NO: 924304 - RNA, 20 nt, Human
acccaccucugccucccaaa

SEQ ID NO: 924305 - RNA, 24 nt, Human
accuccaagagcgccaccgcggag

SEQ ID NO: 924306 - RNA, 20 nt, Human
aggcaugugccaccaccccc

SEQ ID NO: 924307 - RNA, 18 nt, Human
agugcugggauuacaggc

SEQ ID NO: 924308 - RNA, 23 nt, Human
aguggcuggaaccacaggcaugu

SEQ ID NO: 924309 - RNA, 19 nt, Human
augugccaccacccccagc

SEQ ID NO: 924310 - RNA, 24 nt, Human
auuucaccauguugcccaggcugg

SEQ ID NO: 924311 - RNA, 24 nt, Human
auuuuuguauuuuuuugguagaga

SEQ ID NO: 924312 - RNA, 26 nt, Human
auuuuuguauuuuuuugguagagaca

SEQ ID NO: 924313 - RNA, 24 nt, Human
caaagugcugggauuacaggcgug

SEQ ID NO: 924314 - RNA, 24 nt, Human
caccacccccagcugauuuuugua

SEQ ID NO: 924315 - RNA, 24 nt, Human
caccauguugcccaggcuggucuc

SEQ ID NO: 924316 - RNA, 27 nt, Human
caccauguugcccaggcuggucucgaa

SEQ ID NO: 924317 - RNA, 22 nt, Human
cacccaccucugccucccaaag

SEQ ID NO: 924318 - RNA, 23 nt, Human
cacccaccucugccucccaaagu

SEQ ID NO: 924319 - RNA, 22 nt, Human
cacccagguugaaaagcagugg

SEQ ID NO: 924320 - RNA, 25 nt, Human
cacccagguugaaaagcaguggggc

SEQ ID NO: 924321 - RNA, 24 nt, Human
caccucgaccuccugaguggcugg

SEQ ID NO: 924322 - RNA, 24 nt, Human
caccucugccucccaaagugcugg

SEQ ID NO: 924323 - RNA, 24 nt, Human
caggauuucaccauguugcccagg

SEQ ID NO: 924324 - RNA, 18 nt, Human
caucccgccaccucgacc

SEQ ID NO: 924325 - RNA, 20 nt, Human
caucccgccaccucgaccuc

SEQ ID NO: 924326 - RNA, 21 nt, Human
cauguugcccaggcuggucuc

SEQ ID NO: 924327 - RNA, 23 nt, Human
cauguugcccaggcuggucucga

SEQ ID NO: 924328 - RNA, 24 nt, Human
cauguugcccaggcuggucucgaa

SEQ ID NO: 924329 - RNA, 22 nt, Human
ccaaagugcugggauuacaggc

SEQ ID NO: 924330 - RNA, 22 nt, Human
ccaaagugcugggauuacaggc

SEQ ID NO: 924331 - RNA, 24 nt, Human
ccaaagugcugggauuacaggcgu

SEQ ID NO: 924332 - RNA, 22 nt, Human
cccgccaccucgaccuccugag

SEQ ID NO: 924333 - RNA, 24 nt, Human
ccuggacuugagugauccacccac

SEQ ID NO: 924334 - RNA, 27 nt, Human
ccuggacuugagugauccacccaccuc

SEQ ID NO: 924335 - RNA, 18 nt, Human
cgggcgggcccugagggc

SEQ ID NO: 924336 - RNA, 24 nt, Human
cuccugaguggcuggaaccacagg

SEQ ID NO: 924337 - RNA, 23 nt, Human
gacuugagugauccacccaccuc

SEQ ID NO: 924338 - RNA, 21 nt, Human
gagcgccaccgcggagcgggc

SEQ ID NO: 924339 - RNA, 18 nt, Human
gauuacaggcgugaguca

SEQ ID NO: 924340 - RNA, 21 nt, Human
gauuacaggcgugagucauug

SEQ ID NO: 924341 - RNA, 24 nt, Human
gauuacaggcgugagucauugugc

SEQ ID NO: 924342 - RNA, 21 nt, Human
gcaguggggcgaucucagcuc

SEQ ID NO: 924343 - RNA, 21 nt, Human
ggcgaucucagcucacagcaa

SEQ ID NO: 924344 - RNA, 21 nt, Human
gggcgggcggggccgcggggc

SEQ ID NO: 924345 - RNA, 21 nt, Human
gguagagacaggauuucacca

SEQ ID NO: 924346 - RNA, 21 nt, Human
guagagacaggauuucaccau

SEQ ID NO: 924347 - RNA, 22 nt, Human
guagagacaggauuucaccaug

SEQ ID NO: 924348 - RNA, 24 nt, Human
gugauccacccaccucugccuccc
